United States Patent Application Publication US 2011/0177960 A1 - sequence listing, part 4

SEQ ID NO: 29471 - DNA, 25 bp, Artificial
  probe
  misc_feature (1)..(25): SEQ ID NO: 4840; WAN0249PI_at; Start 270; Stop 294
gacaaatcgaggatagtcaaatcga

SEQ ID NO: 29472 - DNA, 25 bp, Artificial
  probe
  misc_feature (1)..(25): SEQ ID NO: 4840; WAN0249PI_at; Start 16; Stop 40
atacttatacagagcacctttcggg

SEQ ID NO: 29473 - DNA, 25 bp, Artificial
  probe
  misc_feature (1)..(25): SEQ ID NO: 4840; WAN0249PI_at; Start 98; Stop 122
tttagtcgcttacaaatgtggctgc

SEQ ID NO: 29474 - DNA, 25 bp, Artificial
  probe
  misc_feature (1)..(25): SEQ ID NO: 4840; WAN0249PI_at; Start 102; Stop 126
gtcgcttacaaatgtggctgcaacc

SEQ ID NO: 29475 - DNA, 25 bp, Artificial
  probe
  misc_feature (1)..(25): SEQ ID NO: 4840; WAN0249PI_at; Start 133; Stop 157
ggtcagttgcctcaaaacgttaatc

SEQ ID NO: 29476 - DNA, 25 bp, Artificial
  probe
  misc_feature (1)..(25): SEQ ID NO: 4840; WAN0249PI_at; Start 274; Stop 298
aatcgaggatagtcaaatcgaattc

SEQ ID NO: 29477 - DNA, 25 bp, Artificial
  probe
  misc_feature (1)..(25): SEQ ID NO: 4840; WAN0249PI_at; Start 103; Stop 127
tcgcttacaaatgtggctgcaacct

SEQ ID NO: 29478 - DNA, 25 bp, Artificial
  probe
  misc_feature (1)..(25): SEQ ID NO: 4840; WAN0249PI_at; Start 76; Stop 100
caattgacacagttgttgcgacttt

SEQ ID NO: 29479 - DNA, 25 bp, Artificial
  probe
  misc_feature (1)..(25): SEQ ID NO: 4840; WAN0249PI_at; Start 71; Stop 95
tggtgcaattgacacagttgttgcg

SEQ ID NO: 29480 - DNA, 25 bp, Artificial
  probe
  misc_feature (1)..(25): SEQ ID NO: 4840; WAN0249PI_at; Start 23; Stop 47
tacagagcacctttcggggtgttct

SEQ ID NO: 29481 - DNA, 25 bp, Artificial
  probe
  misc_feature (1)..(25): SEQ ID NO: 4840; WAN0249PI_at; Start 81; Stop 105
gacacagttgttgcgactttagtcg

SEQ ID NO: 29482 - DNA, 25 bp, Artificial
  probe
  misc_feature (1)..(25): SEQ ID NO: 4840; WAN0249PI_at; Start 135; Stop 159
tcagttgcctcaaaacgttaatcaa

SEQ ID NO: 29483 - DNA, 25 bp, Artificial
  probe
  misc_feature (1)..(25): SEQ ID NO: 4840; WAN0249PI_at; Start 15; Stop 39
tatacttatacagagcacctttcgg

SEQ ID NO: 29484 - DNA, 25 bp, Artificial
  probe
  misc_feature (1)..(25): SEQ ID NO: 4840; WAN0249PI_at; Start 148; Stop 172
aacgttaatcaatacgattatatca

SEQ ID NO: 29485 - DNA, 25 bp, Artificial
  probe
  misc_feature (1)..(25): SEQ ID NO: 4840; WAN0249PI_at; Start 12; Stop 36
tactatacttatacagagcaccttt

SEQ ID NO: 29486 - DNA, 25 bp, Artificial
  probe
  misc_feature (1)..(25): SEQ ID NO: 4840; WAN0249PI_at; Start 78; Stop 102
attgacacagttgttgcgactttag

SEQ ID NO: 29487 - DNA, 25 bp, Artificial
  probe
  misc_feature (1)..(25): SEQ ID NO: 4840; WAN0249PI_at; Start 100; Stop 124
tagtcgcttacaaatgtggctgcaa

SEQ ID NO: 29488 - DNA, 25 bp, Artificial
  probe
  misc_feature (1)..(25): SEQ ID NO: 4840; WAN0249PI_at; Start 261; Stop 285
taagaataggacaaatcgaggatag

SEQ ID NO: 29489 - DNA, 25 bp, Artificial
  probe
  misc_feature (1)..(25): SEQ ID NO: 4840; WAN0249PI_at; Start 141; Stop 165
gcctcaaaacgttaatcaatacgat

SEQ ID NO: 29490 - DNA, 25 bp, Artificial
  probe
  misc_feature (1)..(25): SEQ ID NO: 4840; WAN0249PI_at; Start 139; Stop 163
ttgcctcaaaacgttaatcaatacg

SEQ ID NO: 29491 - DNA, 25 bp, Artificial
  probe
  misc_feature (1)..(25): SEQ ID NO: 4840; WAN0249PI_at; Start 107; Stop 131
ttacaaatgtggctgcaacctgaca

SEQ ID NO: 29492 - DNA, 25 bp, Artificial
  probe
  misc_feature (1)..(25): SEQ ID NO: 4840; WAN0249PI_at; Start 105; Stop 129
gcttacaaatgtggctgcaacctga

SEQ ID NO: 29493 - DNA, 25 bp, Artificial
  probe
  misc_feature (1)..(25): SEQ ID NO: 4840; WAN0249PI_at; Start 63; Stop 87
tactaaattggtgcaattgacacag

SEQ ID NO: 29494 - DNA, 25 bp, Artificial
  probe
  misc_feature (1)..(25): SEQ ID NO: 4840; WAN0249PI_at; Start 85; Stop 109
cagttgttgcgactttagtcgctta

SEQ ID NO: 29495 - DNA, 25 bp, Artificial
  probe
  misc_feature (1)..(25): SEQ ID NO: 4840; WAN0249PI_at; Start 264; Stop 288
gaataggacaaatcgaggatagtca

SEQ ID NO: 29496 - DNA, 25 bp, Artificial
  probe
  misc_feature (1)..(25): SEQ ID NO: 4840; WAN0249PI_at; Start 95; Stop 119
gactttagtcgcttacaaatgtggc

SEQ ID NO: 29497 - DNA, 25 bp, Artificial
  probe
  misc_feature (1)..(25): SEQ ID NO: 4840; WAN0249PI_at; Start 66; Stop 90
taaattggtgcaattgacacagttg

SEQ ID NO: 29498 - DNA, 25 bp, Artificial
  probe
  misc_feature (1)..(25): SEQ ID NO: 4840; WAN0249PI_at; Start 8; Stop 32
gaattactatacttatacagagcac

SEQ ID NO: 29499 - DNA, 25 bp, Artificial
  probe
  misc_feature (1)..(25): SEQ ID NO: 4840; WAN0249PI_at; Start 94; Stop 118
cgactttagtcgcttacaaatgtgg

SEQ ID NO: 29500 - DNA, 25 bp, Artificial
  probe
  misc_feature (1)..(25): SEQ ID NO: 130; WAN0249PJ_at; Start 274; Stop 298
aaaagtagcggatttctccactgct

SEQ ID NO: 29501 - DNA, 25 bp, Artificial
  probe
  misc_feature (1)..(25): SEQ ID NO: 130; WAN0249PJ_at; Start 224; Stop 248
tcttatttcaagctactatatataa

SEQ ID NO: 29502 - DNA, 25 bp, Artificial
  probe
  misc_feature (1)..(25): SEQ ID NO: 130; WAN0249PJ_at; Start 273; Stop 297
aaaaagtagcggatttctccactgc

SEQ ID NO: 29503 - DNA, 25 bp, Artificial
  probe
  misc_feature (1)..(25): SEQ ID NO: 130; WAN0249PJ_at; Start 58; Stop 82
cggaatgaaataaggacagtcaaat

SEQ ID NO: 29504 - DNA, 25 bp, Artificial
  probe
  misc_feature (1)..(25): SEQ ID NO: 130; WAN0249PJ_at; Start 280; Stop 304
agcggatttctccactgctttaaca

SEQ ID NO: 29505 - DNA, 25 bp, Artificial
  probe
  misc_feature (1)..(25): SEQ ID NO: 130; WAN0249PJ_at; Start 129; Stop 153
cgatctattatagttggttgagttt

SEQ ID NO: 29506 - DNA, 25 bp, Artificial
  probe
  misc_feature (1)..(25): SEQ ID NO: 130; WAN0249PJ_at; Start 259; Stop 283
tgaatcaaaaatcgaaaaagtagcg

SEQ ID NO: 29507 - DNA, 25 bp, Artificial
  probe
  misc_feature (1)..(25): SEQ ID NO: 130; WAN0249PJ_at; Start 130; Stop 154
gatctattatagttggttgagtttg

SEQ ID NO: 29508 - DNA, 25 bp, Artificial
  probe
  misc_feature (1)..(25): SEQ ID NO: 130; WAN0249PJ_at; Start 132; Stop 156
tctattatagttggttgagtttgga

SEQ ID NO: 29509 - DNA, 25 bp, Artificial
  probe
  misc_feature (1)..(25): SEQ ID NO: 130; WAN0249PJ_at; Start 60; Stop 84
gaatgaaataaggacagtcaaatcg

SEQ ID NO: 29510 - DNA, 25 bp, Artificial
  probe
  misc_feature (1)..(25): SEQ ID NO: 130; WAN0249PJ_at; Start 249; Stop 273
tctaaaaacttgaatcaaaaatcga

SEQ ID NO: 29511 - DNA, 25 bp, Artificial
  probe
  misc_feature (1)..(25): SEQ ID NO: 130; WAN0249PJ_at; Start 121; Stop 145
tctagtttcgatctattatagttgg

SEQ ID NO: 29512 - DNA, 25 bp, Artificial
  probe
  misc_feature (1)..(25): SEQ ID NO: 130; WAN0249PJ_at; Start 227; Stop 251
tatttcaagctactatatataatct

SEQ ID NO: 29513 - DNA, 25 bp, Artificial
  probe
  misc_feature (1)..(25): SEQ ID NO: 130; WAN0249PJ_at; Start 278; Stop 302
gtagcggatttctccactgctttaa

SEQ ID NO: 29514 - DNA, 25 bp, Artificial
  probe
  misc_feature (1)..(25): SEQ ID NO: 130; WAN0249PJ_at; Start 272; Stop 296
gaaaaagtagcggatttctccactg

SEQ ID NO: 29515 - DNA, 25 bp, Artificial
  probe
  misc_feature (1)..(25): SEQ ID NO: 130; WAN0249PJ_at; Start 125; Stop 149
gtttcgatctattatagttggttga

SEQ ID NO: 29516 - DNA, 25 bp, Artificial
  probe
  misc_feature (1)..(25): SEQ ID NO: 130; WAN0249PJ_at; Start 277; Stop 301
agtagcggatttctccactgcttta

SEQ ID NO: 29517 - DNA, 25 bp, Artificial
  probe
  misc_feature (1)..(25): SEQ ID NO: 130; WAN0249PJ_at; Start 236; Stop 260
ctactatatataatctaaaaacttg

SEQ ID NO: 29518 - DNA, 25 bp, Artificial
  probe
  misc_feature (1)..(25): SEQ ID NO: 130; WAN0249PJ_at; Start 232; Stop 256
caagctactatatataatctaaaaa

SEQ ID NO: 29519 - DNA, 25 bp, Artificial
  probe
  misc_feature (1)..(25): SEQ ID NO: 130; WAN0249PJ_at; Start 127; Stop 151
ttcgatctattatagttggttgagt

SEQ ID NO: 29520 - DNA, 25 bp, Artificial
  probe
  misc_feature (1)..(25): SEQ ID NO: 130; WAN0249PJ_at; Start 276; Stop 300
aagtagcggatttctccactgcttt

SEQ ID NO: 29521 - DNA, 25 bp, Artificial
  probe
  misc_feature (1)..(25): SEQ ID NO: 130; WAN0249PJ_at; Start 269; Stop 293
atcgaaaaagtagcggatttctcca

SEQ ID NO: 29522 - DNA, 25 bp, Artificial
  probe
  misc_feature (1)..(25): SEQ ID NO: 130; WAN0249PJ_at; Start 59; Stop 83
ggaatgaaataaggacagtcaaatc

SEQ ID NO: 29523 - DNA, 25 bp, Artificial
  probe
  misc_feature (1)..(25): SEQ ID NO: 130; WAN0249PJ_at; Start 275; Stop 299
aaagtagcggatttctccactgctt

SEQ ID NO: 29524 - DNA, 25 bp, Artificial
  probe
  misc_feature (1)..(25): SEQ ID NO: 130; WAN0249PJ_at; Start 281; Stop 305
gcggatttctccactgctttaacag

SEQ ID NO: 29525 - DNA, 25 bp, Artificial
  probe
  misc_feature (1)..(25): SEQ ID NO: 130; WAN0249PJ_at; Start 282; Stop 306
cggatttctccactgctttaacagc

SEQ ID NO: 29526 - DNA, 25 bp, Artificial
  probe
  misc_feature (1)..(25): SEQ ID NO: 130; WAN0249PJ_at; Start 56; Stop 80
agcggaatgaaataaggacagtcaa

SEQ ID NO: 29527 - DNA, 25 bp, Artificial
  probe
  misc_feature (1)..(25): SEQ ID NO: 130; WAN0249PJ_at; Start 279; Stop 303
tagcggatttctccactgctttaac

SEQ ID NO: 29528 - DNA, 25 bp, Artificial
  probe
  misc_feature (1)..(25): SEQ ID NO: 130; WAN0249PJ_at; Start 122; Stop 146
ctagtttcgatctattatagttggt

SEQ ID NO: 29529 - DNA, 25 bp, Artificial
  probe
  misc_feature (1)..(25): SEQ ID NO: 130; WAN0249PJ_at; Start 258; Stop 282
ttgaatcaaaaatcgaaaaagtagc

SEQ ID NO: 29530 - DNA, 25 bp, Artificial
  probe
  misc_feature (1)..(25): SEQ ID NO: 130; WAN0249PJ_at; Start 262; Stop 286
atcaaaaatcgaaaaagtagcggat

SEQ ID NO: 29531 - DNA, 25 bp, Artificial
  probe
  misc_feature (1)..(25): SEQ ID NO: 130; WAN0249PJ_at; Start 240; Stop 264
tatatataatctaaaaacttgaatc

SEQ ID NO: 29532 - DNA, 25 bp, Artificial
  probe
  misc_feature (1)..(25): SEQ ID NO: 130; WAN0249PJ_at; Start 231; Stop 255
tcaagctactatatataatctaaaa

SEQ ID NO: 29533 - DNA, 25 bp, Artificial
  probe
  misc_feature (1)..(25): SEQ ID NO: 130; WAN0249PJ_at; Start 57; Stop 81
gcggaatgaaataaggacagtcaaa

SEQ ID NO: 29534 - DNA, 25 bp, Artificial
  probe
  misc_feature (1)..(25): SEQ ID NO: 3591; WAN0249PK_at; Start 70; Stop 94
tctgaaaaaattcactatagtgaaa

SEQ ID NO: 29535 - DNA, 25 bp, Artificial
  probe
  misc_feature (1)..(25): SEQ ID NO: 3591; WAN0249PK_at; Start 1; Stop 25
gagagatctctattgtgttatattt

SEQ ID NO: 29536 - DNA, 25 bp, Artificial
  probe
  misc_feature (1)..(25): SEQ ID NO: 3591; WAN0249PK_at; Start 26; Stop 50
tataacacggttctacaataaaaga

SEQ ID NO: 29537 - DNA, 25 bp, Artificial
  probe
  misc_feature (1)..(25): SEQ ID NO: 3591; WAN0249PK_at; Start 29; Stop 53
aacacggttctacaataaaagaatg

SEQ ID NO: 29538 - DNA, 25 bp, Artificial
  probe
  misc_feature (1)..(25): SEQ ID NO: 3591; WAN0249PK_at; Start 35; Stop 59
gttctacaataaaagaatgttcttg

SEQ ID NO: 29539 - DNA, 25 bp, Artificial
  probe
  misc_feature (1)..(25): SEQ ID NO: 3591; WAN0249PK_at; Start 204; Stop 228
aatctggatagagaaaacgtctaaa

SEQ ID NO: 29540 - DNA, 25 bp, Artificial
  probe
  misc_feature (1)..(25): SEQ ID NO: 3591; WAN0249PK_at; Start 235; Stop 259
tataatgaagcaatagaattcttag

SEQ ID NO: 29541 - DNA, 25 bp, Artificial
  probe
  misc_feature (1)..(25): SEQ ID NO: 3591; WAN0249PK_at; Start 3; Stop 27
gagatctctattgtgttatatttta

SEQ ID NO: 29542 - DNA, 25 bp, Artificial
  probe
  misc_feature (1)..(25): SEQ ID NO: 3591; WAN0249PK_at; Start 221; Stop 245
cgtctaaatcatgttataatgaagc

SEQ ID NO: 29543 - DNA, 25 bp, Artificial
  probe
  misc_feature (1)..(25): SEQ ID NO: 3591; WAN0249PK_at; Start 241; Stop 265
gaagcaatagaattcttagaaagag

SEQ ID NO: 29544 - DNA, 25 bp, Artificial
  probe
  misc_feature (1)..(25): SEQ ID NO: 3591; WAN0249PK_at; Start 33; Stop 57
cggttctacaataaaagaatgttct

SEQ ID NO: 29545 - DNA, 25 bp, Artificial
  probe
  misc_feature (1)..(25): SEQ ID NO: 3591; WAN0249PK_at; Start 198; Stop 222
aaaagcaatctggatagagaaaacg

SEQ ID NO: 29546 - DNA, 25 bp, Artificial
  probe
  misc_feature (1)..(25): SEQ ID NO: 3591; WAN0249PK_at; Start 207; Stop 231
ctggatagagaaaacgtctaaatca

SEQ ID NO: 29547 - DNA, 25 bp, Artificial
  probe
  misc_feature (1)..(25): SEQ ID NO: 3591; WAN0249PK_at; Start 230; Stop 254
catgttataatgaagcaatagaatt

SEQ ID NO: 29548 - DNA, 25 bp, Artificial
  probe
  misc_feature (1)..(25): SEQ ID NO: 3591; WAN0249PK_at; Start 199; Stop 223
aaagcaatctggatagagaaaacgt

SEQ ID NO: 29549 - DNA, 25 bp, Artificial
  probe
  misc_feature (1)..(25): SEQ ID NO: 3591; WAN0249PK_at; Start 223; Stop 247
tctaaatcatgttataatgaagcaa

SEQ ID NO: 29550 - DNA, 25 bp, Artificial
  probe
  misc_feature (1)..(25): SEQ ID NO: 3591; WAN0249PK_at; Start 195; Stop 219
taaaaaagcaatctggatagagaaa

SEQ ID NO: 29551 - DNA, 25 bp, Artificial
  probe
  misc_feature (1)..(25): SEQ ID NO: 3591; WAN0249PK_at; Start 193; Stop 217
tataaaaaagcaatctggatagaga

SEQ ID NO: 29552 - DNA, 25 bp, Artificial
  probe
  misc_feature (1)..(25): SEQ ID NO: 3591; WAN0249PK_at; Start 187; Stop 211
aaatgttataaaaaagcaatctgga

SEQ ID NO: 29553 - DNA, 25 bp, Artificial
  probe
  misc_feature (1)..(25): SEQ ID NO: 3591; WAN0249PK_at; Start 210; Stop 234
gatagagaaaacgtctaaatcatgt

SEQ ID NO: 29554 - DNA, 25 bp, Artificial
  probe
  misc_feature (1)..(25): SEQ ID NO: 3591; WAN0249PK_at; Start 209; Stop 233
ggatagagaaaacgtctaaatcatg

SEQ ID NO: 29555 - DNA, 25 bp, Artificial
  probe
  misc_feature (1)..(25): SEQ ID NO: 3591; WAN0249PK_at; Start 185; Stop 209
taaaatgttataaaaaagcaatctg

SEQ ID NO: 29556 - DNA, 25 bp, Artificial
  probe
  misc_feature (1)..(25): SEQ ID NO: 3591; WAN0249PK_at; Start 203; Stop 227
caatctggatagagaaaacgtctaa

SEQ ID NO: 29557 - DNA, 25 bp, Artificial
  probe
  misc_feature (1)..(25): SEQ ID NO: 3591; WAN0249PK_at; Start 237; Stop 261
taatgaagcaatagaattcttagaa

SEQ ID NO: 29558 - DNA, 25 bp, Artificial
  probe
  misc_feature (1)..(25): SEQ ID NO: 3591; WAN0249PK_at; Start 202; Stop 226
gcaatctggatagagaaaacgtcta

SEQ ID NO: 29559 - DNA, 25 bp, Artificial
  probe
  misc_feature (1)..(25): SEQ ID NO: 3591; WAN0249PK_at; Start 201; Stop 225
agcaatctggatagagaaaacgtct

SEQ ID NO: 29560 - DNA, 25 bp, Artificial
  probe
  misc_feature (1)..(25): SEQ ID NO: 3591; WAN0249PK_at; Start 200; Stop 224
aagcaatctggatagagaaaacgtc

SEQ ID NO: 29561 - DNA, 25 bp, Artificial
  probe
  misc_feature (1)..(25): SEQ ID NO: 3591; WAN0249PK_at; Start 190; Stop 214
tgttataaaaaagcaatctggatag

SEQ ID NO: 29562 - DNA, 25 bp, Artificial
  probe
  misc_feature (1)..(25): SEQ ID NO: 3591; WAN0249PK_at; Start 19; Stop 43
tatattttataacacggttctacaa

SEQ ID NO: 29563 - DNA, 25 bp, Artificial
  probe
  misc_feature (1)..(25): SEQ ID NO: 3591; WAN0249PK_at; Start 31; Stop 55
cacggttctacaataaaagaatgtt

SEQ ID NO: 29564 - DNA, 25 bp, Artificial
  probe
  misc_feature (1)..(25): SEQ ID NO: 3591; WAN0249PK_at; Start 232; Stop 256
tgttataatgaagcaatagaattct

SEQ ID NO: 29565 - DNA, 25 bp, Artificial
  probe
  misc_feature (1)..(25): SEQ ID NO: 3591; WAN0249PK_at; Start 206; Stop 230
tctggatagagaaaacgtctaaatc

SEQ ID NO: 29566 - DNA, 25 bp, Artificial
  probe
  misc_feature (1)..(25): SEQ ID NO: 3591; WAN0249PK_at; Start 214; Stop 238
gagaaaacgtctaaatcatgttata

SEQ ID NO: 29567 - DNA, 25 bp, Artificial
  probe
  misc_feature (1)..(25): SEQ ID NO: 3591; WAN0249PK_at; Start 212; Stop 236
tagagaaaacgtctaaatcatgtta

SEQ ID NO: 29568 - DNA, 25 bp, Artificial
  probe
  misc_feature (1)..(25): SEQ ID NO: 3254; WAN0249PL_at; Start 91; Stop 115
atttgactcgccgagaactttgaca

SEQ ID NO: 29569 - DNA, 25 bp, Artificial
  probe
  misc_feature (1)..(25): SEQ ID NO: 3254; WAN0249PL_at; Start 83; Stop 107
gaatcgctatttgactcgccgagaa

SEQ ID NO: 29570 - DNA, 25 bp, Artificial
  probe
  misc_feature (1)..(25): SEQ ID NO: 3254; WAN0249PL_at; Start 103; Stop 127
gagaactttgacatcagatatacta

SEQ ID NO: 29571 - DNA, 25 bp, Artificial
  probe
  misc_feature (1)..(25): SEQ ID NO: 3254; WAN0249PL_at; Start 84; Stop 108
aatcgctatttgactcgccgagaac

SEQ ID NO: 29572 - DNA, 25 bp, Artificial
  probe
  misc_feature (1)..(25): SEQ ID NO: 3254; WAN0249PL_at; Start 92; Stop 116
tttgactcgccgagaactttgacat

SEQ ID NO: 29573 - DNA, 25 bp, Artificial
  probe
  misc_feature (1)..(25): SEQ ID NO: 3254; WAN0249PL_at; Start 180; Stop 204
tataacaatatagttgattgaaact

SEQ ID NO: 29574 - DNA, 25 bp, Artificial
  probe
  misc_feature (1)..(25): SEQ ID NO: 3254; WAN0249PL_at; Start 298; Stop 322
tagaagatatgctgtgctattccag

SEQ ID NO: 29575 - DNA, 25 bp, Artificial
  probe
  misc_feature (1)..(25): SEQ ID NO: 3254; WAN0249PL_at; Start 97; Stop 121
ctcgccgagaactttgacatcagat

SEQ ID NO: 29576 - DNA, 25 bp, Artificial
  probe
  misc_feature (1)..(25): SEQ ID NO: 3254; WAN0249PL_at; Start 82; Stop 106
ggaatcgctatttgactcgccgaga

SEQ ID NO: 29577 - DNA, 25 bp, Artificial
  probe
  misc_feature (1)..(25): SEQ ID NO: 3254; WAN0249PL_at; Start 96; Stop 120
actcgccgagaactttgacatcaga

SEQ ID NO: 29578 - DNA, 25 bp, Artificial
  probe
  misc_feature (1)..(25): SEQ ID NO: 3254; WAN0249PL_at; Start 99; Stop 123
cgccgagaactttgacatcagatat

SEQ ID NO: 29579 - DNA, 25 bp, Artificial
  probe
  misc_feature (1)..(25): SEQ ID NO: 3254; WAN0249PL_at; Start 100; Stop 124
gccgagaactttgacatcagatata

SEQ ID NO: 29580 - DNA, 25 bp, Artificial
  probe
  misc_feature (1)..(25): SEQ ID NO: 3254; WAN0249PL_at; Start 87; Stop 111
cgctatttgactcgccgagaacttt

SEQ ID NO: 29581 - DNA, 25 bp, Artificial
  probe
  misc_feature (1)..(25): SEQ ID NO: 3254; WAN0249PL_at; Start 300; Stop 324
gaagatatgctgtgctattccagat

SEQ ID NO: 29582 - DNA, 25 bp, Artificial
  probe
  misc_feature (1)..(25): SEQ ID NO: 3254; WAN0249PL_at; Start 296; Stop 320
tttagaagatatgctgtgctattcc

SEQ ID NO: 29583 - DNA, 25 bp, Artificial
  probe
  misc_feature (1)..(25): SEQ ID NO: 3254; WAN0249PL_at; Start 85; Stop 109
atcgctatttgactcgccgagaact

SEQ ID NO: 29584 - DNA, 25 bp, Artificial
  probe
  misc_feature (1)..(25): SEQ ID NO: 3254; WAN0249PL_at; Start 304; Stop 328
atatgctgtgctattccagattcag

SEQ ID NO: 29585 - DNA, 25 bp, Artificial
  probe
  misc_feature (1)..(25): SEQ ID NO: 3254; WAN0249PL_at; Start 101; Stop 125
ccgagaactttgacatcagatatac

SEQ ID NO: 29586 - DNA, 25 bp, Artificial
  probe
  misc_feature (1)..(25): SEQ ID NO: 3254; WAN0249PL_at; Start 98; Stop 122
tcgccgagaactttgacatcagata

SEQ ID NO: 29587 - DNA, 25 bp, Artificial
  probe
  misc_feature (1)..(25): SEQ ID NO: 3254; WAN0249PL_at; Start 93; Stop 117
ttgactcgccgagaactttgacatc

SEQ ID NO: 29588 - DNA, 25 bp, Artificial
  probe
  misc_feature (1)..(25): SEQ ID NO: 3254; WAN0249PL_at; Start 108; Stop 132
ctttgacatcagatatactataaca

SEQ ID NO: 29589 - DNA, 25 bp, Artificial
  probe
  misc_feature (1)..(25): SEQ ID NO: 3254; WAN0249PL_at; Start 95; Stop 119
gactcgccgagaactttgacatcag

SEQ ID NO: 29590 - DNA, 25 bp, Artificial
  probe
  misc_feature (1)..(25): SEQ ID NO: 3254; WAN0249PL_at; Start 168; Stop 192
ttcaaatcaatttataacaatatag

SEQ ID NO: 29591 - DNA, 25 bp, Artificial
  probe
  misc_feature (1)..(25): SEQ ID NO: 3254; WAN0249PL_at; Start 105; Stop 129
gaactttgacatcagatatactata

SEQ ID NO: 29592 - DNA, 25 bp, Artificial
  probe
  misc_feature (1)..(25): SEQ ID NO: 3254; WAN0249PL_at; Start 136; Stop 160
tgaaataagaatcaaacaatttaat

SEQ ID NO: 29593 - DNA, 25 bp, Artificial
  probe
  misc_feature (1)..(25): SEQ ID NO: 3254; WAN0249PL_at; Start 81; Stop 105
gggaatcgctatttgactcgccgag

SEQ ID NO: 29594 - DNA, 25 bp, Artificial
  probe
  misc_feature (1)..(25): SEQ ID NO: 3254; WAN0249PL_at; Start 79; Stop 103
ttgggaatcgctatttgactcgccg

SEQ ID NO: 29595 - DNA, 25 bp, Artificial
  probe
  misc_feature (1)..(25): SEQ ID NO: 3254; WAN0249PL_at; Start 290; Stop 314
ctatattttagaagatatgctgtgc

SEQ ID NO: 29596 - DNA, 25 bp, Artificial
  probe
  misc_feature (1)..(25): SEQ ID NO: 3254; WAN0249PL_at; Start 303; Stop 327
gatatgctgtgctattccagattca

SEQ ID NO: 29597 - DNA, 25 bp, Artificial
  probe
  misc_feature (1)..(25): SEQ ID NO: 3254; WAN0249PL_at; Start 111; Stop 135
tgacatcagatatactataacaaat

SEQ ID NO: 29598 - DNA, 25 bp, Artificial
  probe
  misc_feature (1)..(25): SEQ ID NO: 3254; WAN0249PL_at; Start 114; Stop 138
catcagatatactataacaaattga

SEQ ID NO: 29599 - DNA, 25 bp, Artificial
  probe
  misc_feature (1)..(25): SEQ ID NO: 3254; WAN0249PL_at; Start 86; Stop 110
tcgctatttgactcgccgagaactt

SEQ ID NO: 29600 - DNA, 25 bp, Artificial
  probe
  misc_feature (1)..(25): SEQ ID NO: 3254; WAN0249PL_at; Start 117; Stop 141
cagatatactataacaaattgaaat

SEQ ID NO: 29601 - DNA, 25 bp, Artificial
  probe
  misc_feature (1)..(25): SEQ ID NO: 3254; WAN0249PL_at; Start 80; Stop 104
tgggaatcgctatttgactcgccga

SEQ ID NO: 29602 - DNA, 25 bp, Artificial
  probe
  misc_feature (1)..(25): SEQ ID NO: 419; WAN0249PM_at; Start 56; Stop 80
ttatcctctagtcacttgatttgtt

SEQ ID NO: 29603 - DNA, 25 bp, Artificial
  probe
  misc_feature (1)..(25): SEQ ID NO: 419; WAN0249PM_at; Start 61; Stop 85
ctctagtcacttgatttgtttcagg

SEQ ID NO: 29604 - DNA, 25 bp, Artificial
  probe
  misc_feature (1)..(25): SEQ ID NO: 419; WAN0249PM_at; Start 53; Stop 77
tttttatcctctagtcacttgattt

SEQ ID NO: 29605 - DNA, 25 bp, Artificial
  probe
  misc_feature (1)..(25): SEQ ID NO: 419; WAN0249PM_at; Start 58; Stop 82
atcctctagtcacttgatttgtttc

SEQ ID NO: 29606 - DNA, 25 bp, Artificial
  probe
  misc_feature (1)..(25): SEQ ID NO: 419; WAN0249PM_at; Start 66; Stop 90
gtcacttgatttgtttcaggtggtt

SEQ ID NO: 29607 - DNA, 25 bp, Artificial
  probe
  misc_feature (1)..(25): SEQ ID NO: 419; WAN0249PM_at; Start 65; Stop 89
agtcacttgatttgtttcaggtggt

SEQ ID NO: 29608 - DNA, 25 bp, Artificial
  probe
  misc_feature (1)..(25): SEQ ID NO: 419; WAN0249PM_at; Start 9; Stop 33
tattatgcgttttttgcttttcaaa

SEQ ID NO: 29609 - DNA, 25 bp, Artificial
  probe
  misc_feature (1)..(25): SEQ ID NO: 419; WAN0249PM_at; Start 62; Stop 86
tctagtcacttgatttgtttcaggt

SEQ ID NO: 29610 - DNA, 25 bp, Artificial
  probe
  misc_feature (1)..(25): SEQ ID NO: 419; WAN0249PM_at; Start 67; Stop 91
tcacttgatttgtttcaggtggttt

SEQ ID NO: 29611 - DNA, 25 bp, Artificial
  probe
  misc_feature (1)..(25): SEQ ID NO: 419; WAN0249PM_at; Start 63; Stop 87
ctagtcacttgatttgtttcaggtg

SEQ ID NO: 29612 - DNA, 25 bp, Artificial
  probe
  misc_feature (1)..(25): SEQ ID NO: 419; WAN0249PM_at; Start 55; Stop 79
tttatcctctagtcacttgatttgt

SEQ ID NO: 29613 - DNA, 25 bp, Artificial
  probe
  misc_feature (1)..(25): SEQ ID NO: 419; WAN0249PM_at; Start 52; Stop 76
gtttttatcctctagtcacttgatt

SEQ ID NO: 29614 - DNA, 25 bp, Artificial
  probe
  misc_feature (1)..(25): SEQ ID NO: 419; WAN0249PM_at; Start 64; Stop 88
tagtcacttgatttgtttcaggtgg

SEQ ID NO: 29615 - DNA, 25 bp, Artificial
  probe
  misc_feature (1)..(25): SEQ ID NO: 419; WAN0249PM_at; Start 60; Stop 84
cctctagtcacttgatttgtttcag

SEQ ID NO: 29616 - DNA, 25 bp, Artificial
  probe
  misc_feature (1)..(25): SEQ ID NO: 419; WAN0249PM_at; Start 59; Stop 83
tcctctagtcacttgatttgtttca

SEQ ID NO: 29617 - DNA, 25 bp, Artificial
  probe
  misc_feature (1)..(25): SEQ ID NO: 419; WAN0249PM_at; Start 57; Stop 81
tatcctctagtcacttgatttgttt

SEQ ID NO: 29618 - DNA, 25 bp, Artificial
  probe
  misc_feature (1)..(25): SEQ ID NO: 419; WAN0249PM_at; Start 68; Stop 92
cacttgatttgtttcaggtggtttt

SEQ ID NO: 29619 - DNA, 25 bp, Artificial
  probe
  misc_feature (1)..(25): SEQ ID NO: 419; WAN0249PM_at; Start 54; Stop 78
ttttatcctctagtcacttgatttg

SEQ ID NO: 29620 - DNA, 25 bp, Artificial
  probe
  misc_feature (1)..(25): SEQ ID NO: 3647; WAN0249PN_at; Start 89; Stop 113
agtatcttagtagacttcccgcgaa

SEQ ID NO: 29621 - DNA, 25 bp, Artificial
  probe
  misc_feature (1)..(25): SEQ ID NO: 3647; WAN0249PN_at; Start 33; Stop 57
tatatcacttttttacggtaatgtc

SEQ ID NO: 29622 - DNA, 25 bp, Artificial
  probe
  misc_feature (1)..(25): SEQ ID NO: 3647; WAN0249PN_at; Start 81; Stop 105
catctttaagtatcttagtagactt

SEQ ID NO: 29623 - DNA, 25 bp, Artificial
  probe
  misc_feature (1)..(25): SEQ ID NO: 3647; WAN0249PN_at; Start 74; Stop 98
ctatctgcatctttaagtatcttag

SEQ ID NO: 29624 - DNA, 25 bp, Artificial
  probe
  misc_feature (1)..(25): SEQ ID NO: 3647; WAN0249PN_at; Start 79; Stop 103
tgcatctttaagtatcttagtagac

SEQ ID NO: 29625 - DNA, 25 bp, Artificial
  probe
  misc_feature (1)..(25): SEQ ID NO: 3647; WAN0249PN_at; Start 73; Stop 97
actatctgcatctttaagtatctta

SEQ ID NO: 29626 - DNA, 25 bp, Artificial
  probe
  misc_feature (1)..(25): SEQ ID NO: 3647; WAN0249PN_at; Start 34; Stop 58
atatcacttttttacggtaatgtct

SEQ ID NO: 29627 - DNA, 25 bp, Artificial
  probe
  misc_feature (1)..(25): SEQ ID NO: 3647; WAN0249PN_at; Start 78; Stop 102
ctgcatctttaagtatcttagtaga

SEQ ID NO: 29628 - DNA, 25 bp, Artificial
  probe
  misc_feature (1)..(25): SEQ ID NO: 3647; WAN0249PN_at; Start 88; Stop 112
aagtatcttagtagacttcccgcga

SEQ ID NO: 29629 - DNA, 25 bp, Artificial
  probe
  misc_feature (1)..(25): SEQ ID NO: 3647; WAN0249PN_at; Start 87; Stop 111
taagtatcttagtagacttcccgcg

SEQ ID NO: 29630 - DNA, 25 bp, Artificial
  probe
  misc_feature (1)..(25): SEQ ID NO: 3647; WAN0249PN_at; Start 77; Stop 101
tctgcatctttaagtatcttagtag

SEQ ID NO: 29631 - DNA, 25 bp, Artificial
  probe
  misc_feature (1)..(25): SEQ ID NO: 3647; WAN0249PN_at; Start 72; Stop 96
tactatctgcatctttaagtatctt

SEQ ID NO: 29632 - DNA, 25 bp, Artificial
  probe
  misc_feature (1)..(25): SEQ ID NO: 3647; WAN0249PN_at; Start 76; Stop 100
atctgcatctttaagtatcttagta

SEQ ID NO: 29633 - DNA, 25 bp, Artificial
  probe
  misc_feature (1)..(25): SEQ ID NO: 3647; WAN0249PN_at; Start 83; Stop 107
tctttaagtatcttagtagacttcc

SEQ ID NO: 29634 - DNA, 25 bp, Artificial
  probe
  misc_feature (1)..(25): SEQ ID NO: 3647; WAN0249PN_at; Start 80; Stop 104
gcatctttaagtatcttagtagact

SEQ ID NO: 29635 - DNA, 25 bp, Artificial
  probe
  misc_feature (1)..(25): SEQ ID NO: 3647; WAN0249PN_at; Start 35; Stop 59
tatcacttttttacggtaatgtcta

SEQ ID NO: 29636 - DNA, 25 bp, Artificial
  probe
  misc_feature (1)..(25): SEQ ID NO: 3647; WAN0249PN_at; Start 86; Stop 110
ttaagtatcttagtagacttcccgc

SEQ ID NO: 29637 - DNA, 25 bp, Artificial
  probe
  misc_feature (1)..(25): SEQ ID NO: 3647; WAN0249PN_at; Start 82; Stop 106
atctttaagtatcttagtagacttc

SEQ ID NO: 29638 - DNA, 25 bp, Artificial
  probe
  misc_feature (1)..(25): SEQ ID NO: 3647; WAN0249PN_at; Start 75; Stop 99
tatctgcatctttaagtatcttagt

SEQ ID NO: 29639 - DNA, 25 bp, Artificial
  probe
  misc_feature (1)..(25): SEQ ID NO: 3647; WAN0249PN_at; Start 37; Stop 61
tcacttttttacggtaatgtctaca

SEQ ID NO: 29640 - DNA, 25 bp, Artificial
  probe
  misc_feature (1)..(25): SEQ ID NO: 582; WAN0249PO_at; Start 86; Stop 110
gtccattatgatatatagtagactg

SEQ ID NO: 29641 - DNA, 25 bp, Artificial
  probe
  misc_feature (1)..(25): SEQ ID NO: 582; WAN0249PO_at; Start 50; Stop 74
ctaaaataactgtaatttcttgaca

SEQ ID NO: 29642 - DNA, 25 bp, Artificial
  probe
  misc_feature (1)..(25): SEQ ID NO: 582; WAN0249PO_at; Start 63; Stop 87
aatttcttgacagcttgccctttgt

SEQ ID NO: 29643 - DNA, 25 bp, Artificial
  probe
  misc_feature (1)..(25): SEQ ID NO: 582; WAN0249PO_at; Start 19; Stop 43
agaaaatgaaatttttctgcttctt

SEQ ID NO: 29644 - DNA, 25 bp, Artificial
  probe
  misc_feature (1)..(25): SEQ ID NO: 582; WAN0249PO_at; Start 17; Stop 41
gtagaaaatgaaatttttctgcttc

SEQ ID NO: 29645 - DNA, 25 bp, Artificial
  probe
  misc_feature (1)..(25): SEQ ID NO: 582; WAN0249PO_at; Start 80; Stop 104
ccctttgtccattatgatatatagt

SEQ ID NO: 29646 - DNA, 25 bp, Artificial
  probe
  misc_feature (1)..(25): SEQ ID NO: 582; WAN0249PO_at; Start 55; Stop 79
ataactgtaatttcttgacagcttg

SEQ ID NO: 29647 - DNA, 25 bp, Artificial
  probe
  misc_feature (1)..(25): SEQ ID NO: 582; WAN0249PO_at; Start 60; Stop 84
tgtaatttcttgacagcttgccctt

SEQ ID NO: 29648 - DNA, 25 bp, Artificial
  probe
  misc_feature (1)..(25): SEQ ID NO: 582; WAN0249PO_at; Start 77; Stop 101
ttgccctttgtccattatgatatat

SEQ ID NO: 29649 - DNA, 25 bp, Artificial
  probe
  misc_feature (1)..(25): SEQ ID NO: 582; WAN0249PO_at; Start 62; Stop 86
taatttcttgacagcttgccctttg

SEQ ID NO: 29650 - DNA, 25 bp, Artificial
  probe
  misc_feature (1)..(25): SEQ ID NO: 582; WAN0249PO_at; Start 57; Stop 81
aactgtaatttcttgacagcttgcc

SEQ ID NO: 29651 - DNA, 25 bp, Artificial
  probe
  misc_feature (1)..(25): SEQ ID NO: 582; WAN0249PO_at; Start 54; Stop 78
aataactgtaatttcttgacagctt

SEQ ID NO: 29652 - DNA, 25 bp, Artificial
  probe
  misc_feature (1)..(25): SEQ ID NO: 582; WAN0249PO_at; Start 48; Stop 72
tactaaaataactgtaatttcttga

SEQ ID NO: 29653 - DNA, 25 bp, Artificial
  probe
  misc_feature (1)..(25): SEQ ID NO: 582; WAN0249PO_at; Start 59; Stop 83
ctgtaatttcttgacagcttgccct

SEQ ID NO: 29654 - DNA, 25 bp, Artificial
  probe
  misc_feature (1)..(25): SEQ ID NO: 582; WAN0249PO_at; Start 85; Stop 109
tgtccattatgatatatagtagact

SEQ ID NO: 29655 - DNA, 25 bp, Artificial
  probe
  misc_feature (1)..(25): SEQ ID NO: 582; WAN0249PO_at; Start 16; Stop 40
agtagaaaatgaaatttttctgctt

SEQ ID NO: 29656 - DNA, 25 bp, Artificial
  probe
  misc_feature (1)..(25): SEQ ID NO: 582; WAN0249PO_at; Start 52; Stop 76
aaaataactgtaatttcttgacagc

SEQ ID NO: 29657 - DNA, 25 bp, Artificial
  probe
  misc_feature (1)..(25): SEQ ID NO: 582; WAN0249PO_at; Start 64; Stop 88
atttcttgacagcttgccctttgtc

SEQ ID NO: 29658 - DNA, 25 bp, Artificial
  probe
  misc_feature (1)..(25): SEQ ID NO: 582; WAN0249PO_at; Start 79; Stop 103
gccctttgtccattatgatatatag

SEQ ID NO: 29659 - DNA, 25 bp, Artificial
  probe
  misc_feature (1)..(25): SEQ ID NO: 582; WAN0249PO_at; Start 53; Stop 77
aaataactgtaatttcttgacagct

SEQ ID NO: 29660 - DNA, 25 bp, Artificial
  probe
  misc_feature (1)..(25): SEQ ID NO: 582; WAN0249PO_at; Start 81; Stop 105
cctttgtccattatgatatatagta

SEQ ID NO: 29661 - DNA, 25 bp, Artificial
  probe
  misc_feature (1)..(25): SEQ ID NO: 582; WAN0249PO_at; Start 51; Stop 75
taaaataactgtaatttcttgacag

SEQ ID NO: 29662 - DNA, 25 bp, Artificial
  probe
  misc_feature (1)..(25): SEQ ID NO: 582; WAN0249PO_at; Start 83; Stop 107
tttgtccattatgatatatagtaga

SEQ ID NO: 29663 - DNA, 25 bp, Artificial
  probe
  misc_feature (1)..(25): SEQ ID NO: 582; WAN0249PO_at; Start 84; Stop 108
ttgtccattatgatatatagtagac

SEQ ID NO: 29664 - DNA, 25 bp, Artificial
  probe
  misc_feature (1)..(25): SEQ ID NO: 582; WAN0249PO_at; Start 58; Stop 82
actgtaatttcttgacagcttgccc

SEQ ID NO: 29665 - DNA, 25 bp, Artificial
  probe
  misc_feature (1)..(25): SEQ ID NO: 582; WAN0249PO_at; Start 18; Stop 42
tagaaaatgaaatttttctgcttct

SEQ ID NO: 29666 - DNA, 25 bp, Artificial
  probe
  misc_feature (1)..(25): SEQ ID NO: 582; WAN0249PO_at; Start 56; Stop 80
taactgtaatttcttgacagcttgc

SEQ ID NO: 29667 - DNA, 25 bp, Artificial
  probe
  misc_feature (1)..(25): SEQ ID NO: 582; WAN0249PO_at; Start 61; Stop 85
gtaatttcttgacagcttgcccttt

SEQ ID NO: 29668 - DNA, 25 bp, Artificial
  probe
  misc_feature (1)..(25): SEQ ID NO: 582; WAN0249PO_at; Start 82; Stop 106
ctttgtccattatgatatatagtag

SEQ ID NO: 29669 - DNA, 25 bp, Artificial
  probe
  misc_feature (1)..(25): SEQ ID NO: 582; WAN0249PO_at; Start 76; Stop 100
cttgccctttgtccattatgatata

SEQ ID NO: 29670 - DNA, 25 bp, Artificial
  probe
  misc_feature (1)..(25): SEQ ID NO: 582; WAN0249PO_at; Start 78; Stop 102
tgccctttgtccattatgatatata

SEQ ID NO: 29671 - DNA, 25 bp, Artificial
  probe
  misc_feature (1)..(25): SEQ ID NO: 582; WAN0249PO_at; Start 15; Stop 39
gagtagaaaatgaaatttttctgct

SEQ ID NO: 29672 - DNA, 25 bp, Artificial
  probe
  misc_feature (1)..(25): SEQ ID NO: 4522; WAN0249PP_at; Start 220; Stop 244
gattttagtctggtataaatattgc

SEQ ID NO: 29673 - DNA, 25 bp, Artificial
  probe
  misc_feature (1)..(25): SEQ ID NO: 4522; WAN0249PP_at; Start 225; Stop 249
tagtctggtataaatattgctttcc

SEQ ID NO: 29674 - DNA, 25 bp, Artificial
  probe
  misc_feature (1)..(25): SEQ ID NO: 4522; WAN0249PP_at; Start 236; Stop 260
aaatattgctttcctccaaaatggt

SEQ ID NO: 29675 - DNA, 25 bp, Artificial
  probe
  misc_feature (1)..(25): SEQ ID NO: 4522; WAN0249PP_at; Start 229; Stop 253
ctggtataaatattgctttcctcca

SEQ ID NO: 29676 - DNA, 25 bp, Artificial
  probe
  misc_feature (1)..(25): SEQ ID NO: 4522; WAN0249PP_at; Start 292; Stop 316
ggataaattaacaagtgatttctga

SEQ ID NO: 29677 - DNA, 25 bp, Artificial
  probe
  misc_feature (1)..(25): SEQ ID NO: 4522; WAN0249PP_at; Start 238; Stop 262
atattgctttcctccaaaatggtca

SEQ ID NO: 29678 - DNA, 25 bp, Artificial
  probe
  misc_feature (1)..(25): SEQ ID NO: 4522; WAN0249PP_at; Start 279; Stop 303
tctaacatatcacggataaattaac

SEQ ID NO: 29679 - DNA, 25 bp, Artificial
  probe
  misc_feature (1)..(25): SEQ ID NO: 4522; WAN0249PP_at; Start 237; Stop 261
aatattgctttcctccaaaatggtc

SEQ ID NO: 29680 - DNA, 25 bp, Artificial
  probe
  misc_feature (1)..(25): SEQ ID NO: 4522; WAN0249PP_at; Start 230; Stop 254
tggtataaatattgctttcctccaa

SEQ ID NO: 29681 - DNA, 25 bp, Artificial
  probe
  misc_feature (1)..(25): SEQ ID NO: 4522; WAN0249PP_at; Start 232; Stop 256
gtataaatattgctttcctccaaaa

SEQ ID NO: 29682 - DNA, 25 bp, Artificial
  probe
  misc_feature (1)..(25): SEQ ID NO: 4522; WAN0249PP_at; Start 283; Stop 307
acatatcacggataaattaacaagt

SEQ ID NO: 29683 - DNA, 25 bp, Artificial
  probe
  misc_feature (1)..(25): SEQ ID NO: 4522; WAN0249PP_at; Start 274; Stop 298
gcaaatctaacatatcacggataaa

SEQ ID NO: 29684 - DNA, 25 bp, Artificial
  probe
  misc_feature (1)..(25): SEQ ID NO: 4522; WAN0249PP_at; Start 296; Stop 320
aaattaacaagtgatttctgaattg

SEQ ID NO: 29685 - DNA, 25 bp, Artificial
  probe
  misc_feature (1)..(25): SEQ ID NO: 4522; WAN0249PP_at; Start 226; Stop 250
agtctggtataaatattgctttcct

SEQ ID NO: 29686 - DNA, 25 bp, Artificial
  probe
  misc_feature (1)..(25): SEQ ID NO: 4522; WAN0249PP_at; Start 285; Stop 309
atatcacggataaattaacaagtga

SEQ ID NO: 29687 - DNA, 25 bp, Artificial
  probe
  misc_feature (1)..(25): SEQ ID NO: 4522; WAN0249PP_at; Start 276; Stop 300
aaatctaacatatcacggataaatt

SEQ ID NO: 29688 - DNA, 25 bp, Artificial
  probe
  misc_feature (1)..(25): SEQ ID NO: 4522; WAN0249PP_at; Start 227; Stop 251
gtctggtataaatattgctttcctc

SEQ ID NO: 29689 - DNA, 25 bp, Artificial
  probe
  misc_feature (1)..(25): SEQ ID NO: 4522; WAN0249PP_at; Start 286; Stop 310
tatcacggataaattaacaagtgat

SEQ ID NO: 29690 - DNA, 25 bp, Artificial
  probe
  misc_feature (1)..(25): SEQ ID NO: 4522; WAN0249PP_at; Start 282; Stop 306
aacatatcacggataaattaacaag

SEQ ID NO: 29691 - DNA, 25 bp, Artificial
  probe
  misc_feature (1)..(25): SEQ ID NO: 4522; WAN0249PP_at; Start 293; Stop 317
gataaattaacaagtgatttctgaa

SEQ ID NO: 29692 - DNA, 25 bp, Artificial
  probe
  misc_feature (1)..(25): SEQ ID NO: 4522; WAN0249PP_at; Start 290; Stop 314
acggataaattaacaagtgatttct

SEQ ID NO: 29693 - DNA, 25 bp, Artificial
  probe
  misc_feature (1)..(25): SEQ ID NO: 4522; WAN0249PP_at; Start 235; Stop 259
taaatattgctttcctccaaaatgg

SEQ ID NO: 29694 - DNA, 25 bp, Artificial
  probe
  misc_feature (1)..(25): SEQ ID NO: 4522; WAN0249PP_at; Start 281; Stop 305
taacatatcacggataaattaacaa

SEQ ID NO: 29695 - DNA, 25 bp, Artificial
  probe
  misc_feature (1)..(25): SEQ ID NO: 4522; WAN0249PP_at; Start 277; Stop 301
aatctaacatatcacggataaatta

SEQ ID NO: 29696 - DNA, 25 bp, Artificial
  probe
  misc_feature (1)..(25): SEQ ID NO: 4522; WAN0249PP_at; Start 234; Stop 258
ataaatattgctttcctccaaaatg

SEQ ID NO: 29697 - DNA, 25 bp, Artificial
  probe
  misc_feature (1)..(25): SEQ ID NO: 4522; WAN0249PP_at; Start 240; Stop 264
attgctttcctccaaaatggtcata

SEQ ID NO: 29698 - DNA, 25 bp, Artificial
  probe
  misc_feature (1)..(25): SEQ ID NO: 4522; WAN0249PP_at; Start 284; Stop 308
catatcacggataaattaacaagtg

SEQ ID NO: 29699 - DNA, 25 bp, Artificial
  probe
  misc_feature (1)..(25): SEQ ID NO: 4522; WAN0249PP_at; Start 228; Stop 252
tctggtataaatattgctttcctcc

SEQ ID NO: 29700 - DNA, 25 bp, Artificial
  probe
  misc_feature (1)..(25): SEQ ID NO: 4522; WAN0249PP_at; Start 291; Stop 315
cggataaattaacaagtgatttctg

SEQ ID NO: 29701 - DNA, 25 bp, Artificial
  probe
  misc_feature (1)..(25): SEQ ID NO: 4522; WAN0249PP_at; Start 289; Stop 313
cacggataaattaacaagtgatttc

SEQ ID NO: 29702 - DNA, 25 bp, Artificial
  probe
  misc_feature (1)..(25): SEQ ID NO: 4522; WAN0249PP_at; Start 275; Stop 299
caaatctaacatatcacggataaat

SEQ ID NO: 29703 - DNA, 25 bp, Artificial
  probe
  misc_feature (1)..(25): SEQ ID NO: 4522; WAN0249PP_at; Start 233; Stop 257
tataaatattgctttcctccaaaat

SEQ ID NO: 29704 - DNA, 25 bp, Artificial
  probe
  misc_feature (1)..(25): SEQ ID NO: 4522; WAN0249PP_at; Start 239; Stop 263
tattgctttcctccaaaatggtcat

SEQ ID NO: 29705 - DNA, 25 bp, Artificial
  probe
  misc_feature (1)..(25): SEQ ID NO: 4522; WAN0249PP_at; Start 231; Stop 255
ggtataaatattgctttcctccaaa

SEQ ID NO: 29706 - DNA, 25 bp, Artificial
  probe
  misc_feature (1)..(25): SEQ ID NO: 4598; WAN0249PQ_at; Start 33; Stop 57
tctagcttggtcagtaggtttttta

SEQ ID NO: 29707 - DNA, 25 bp, Artificial
  probe
  misc_feature (1)..(25): SEQ ID NO: 4598; WAN0249PQ_at; Start 27; Stop 51
aagctttctagcttggtcagtaggt

SEQ ID NO: 29708 - DNA, 25 bp, Artificial
  probe
  misc_feature (1)..(25): SEQ ID NO: 4598; WAN0249PQ_at; Start 29; Stop 53
gctttctagcttggtcagtaggttt

SEQ ID NO: 29709 - DNA, 25 bp, Artificial
  probe
  misc_feature (1)..(25): SEQ ID NO: 4598; WAN0249PQ_at; Start 95; Stop 119
aatgttccgaaaatattgtatatag

SEQ ID NO: 29710 - DNA, 25 bp, Artificial
  probe
  misc_feature (1)..(25): SEQ ID NO: 4598; WAN0249PQ_at; Start 60; Stop 84
tatgaaatctagtaataaatagagt

SEQ ID NO: 29711 - DNA, 25 bp, Artificial
  probe
  misc_feature (1)..(25): SEQ ID NO: 4598; WAN0249PQ_at; Start 91; Stop 115
gttgaatgttccgaaaatattgtat

SEQ ID NO: 29712 - DNA, 25 bp, Artificial
  probe
  misc_feature (1)..(25): SEQ ID NO: 4598; WAN0249PQ_at; Start 21; Stop 45
tgtatcaagctttctagcttggtca

SEQ ID NO: 29713 - DNA, 25 bp, Artificial
  probe
  misc_feature (1)..(25): SEQ ID NO: 4598; WAN0249PQ_at; Start 18; Stop 42
tattgtatcaagctttctagcttgg

SEQ ID NO: 29714 - DNA, 25 bp, Artificial
  probe
  misc_feature (1)..(25): SEQ ID NO: 4598; WAN0249PQ_at; Start 10; Stop 34
aaaaagcctattgtatcaagctttc

SEQ ID NO: 29715 - DNA, 25 bp, Artificial
  probe
  misc_feature (1)..(25): SEQ ID NO: 4598; WAN0249PQ_at; Start 5; Stop 29
tctttaaaaagcctattgtatcaag

SEQ ID NO: 29716 - DNA, 25 bp, Artificial
  probe
  misc_feature (1)..(25): SEQ ID NO: 4598; WAN0249PQ_at; Start 98; Stop 122
gttccgaaaatattgtatatagtag

SEQ ID NO: 29717 - DNA, 25 bp, Artificial
  probe
  misc_feature (1)..(25): SEQ ID NO: 4598; WAN0249PQ_at; Start 14; Stop 38
agcctattgtatcaagctttctagc

SEQ ID NO: 29718 - DNA, 25 bp, Artificial
  probe
  misc_feature (1)..(25): SEQ ID NO: 4598; WAN0249PQ_at; Start 13; Stop 37
aagcctattgtatcaagctttctag

SEQ ID NO: 29719 - DNA, 25 bp, Artificial
  probe
  misc_feature (1)..(25): SEQ ID NO: 4598; WAN0249PQ_at; Start 28; Stop 52
agctttctagcttggtcagtaggtt

SEQ ID NO: 29720 - DNA, 25 bp, Artificial
  probe
  misc_feature (1)..(25): SEQ ID NO: 4598; WAN0249PQ_at; Start 7; Stop 31
tttaaaaagcctattgtatcaagct

SEQ ID NO: 29721 - DNA, 25 bp, Artificial
  probe
  misc_feature (1)..(25): SEQ ID NO: 4598; WAN0249PQ_at; Start 101; Stop 125
ccgaaaatattgtatatagtagact

SEQ ID NO: 29722 - DNA, 25 bp, Artificial
  probe
  misc_feature (1)..(25): SEQ ID NO: 4598; WAN0249PQ_at; Start 40; Stop 64
tggtcagtaggttttttaattatga

SEQ ID NO: 29723 - DNA, 25 bp, Artificial
  probe
  misc_feature (1)..(25): SEQ ID NO: 4598; WAN0249PQ_at; Start 63; Stop 87
gaaatctagtaataaatagagttaa

SEQ ID NO: 29724 - DNA, 25 bp, Artificial
  probe
  misc_feature (1)..(25): SEQ ID NO: 4598; WAN0249PQ_at; Start 15; Stop 39
gcctattgtatcaagctttctagct

SEQ ID NO: 29725 - DNA, 25 bp, Artificial
  probe
  misc_feature (1)..(25): SEQ ID NO: 4598; WAN0249PQ_at; Start 22; Stop 46
gtatcaagctttctagcttggtcag

SEQ ID NO: 29726 - DNA, 25 bp, Artificial
  probe
  misc_feature (1)..(25): SEQ ID NO: 4598; WAN0249PQ_at; Start 6; Stop 30
ctttaaaaagcctattgtatcaagc

SEQ ID NO: 29727 - DNA, 25 bp, Artificial
  probe
  misc_feature (1)..(25): SEQ ID NO: 4598; WAN0249PQ_at; Start 8; Stop 32
ttaaaaagcctattgtatcaagctt

SEQ ID NO: 29728 - DNA, 25 bp, Artificial
  probe
  misc_feature (1)..(25): SEQ ID NO: 4598; WAN0249PQ_at; Start 3; Stop 27
agtctttaaaaagcctattgtatca

SEQ ID NO: 29729 - DNA, 25 bp, Artificial
  probe
  misc_feature (1)..(25): SEQ ID NO: 4598; WAN0249PQ_at; Start 26; Stop 50
caagctttctagcttggtcagtagg

SEQ ID NO: 29730 - DNA, 25 bp, Artificial
  probe
  misc_feature (1)..(25): SEQ ID NO: 4598; WAN0249PQ_at; Start 88; Stop 112
aaagttgaatgttccgaaaatattg

SEQ ID NO: 29731 - DNA, 25 bp, Artificial
  probe
  misc_feature (1)..(25): SEQ ID NO: 4598; WAN0249PQ_at; Start 30; Stop 54
ctttctagcttggtcagtaggtttt

SEQ ID NO: 29732 - DNA, 25 bp, Artificial
  probe
  misc_feature (1)..(25): SEQ ID NO: 4598; WAN0249PQ_at; Start 100; Stop 124
tccgaaaatattgtatatagtagac

SEQ ID NO: 29733 - DNA, 25 bp, Artificial
  probe
  misc_feature (1)..(25): SEQ ID NO: 4598; WAN0249PQ_at; Start 94; Stop 118
gaatgttccgaaaatattgtatata

SEQ ID NO: 29734 - DNA, 25 bp, Artificial
  probe
  misc_feature (1)..(25): SEQ ID NO: 4598; WAN0249PQ_at; Start 23; Stop 47
tatcaagctttctagcttggtcagt

SEQ ID NO: 29735 - DNA, 25 bp, Artificial
  probe
  misc_feature (1)..(25): SEQ ID NO: 4598; WAN0249PQ_at; Start 16; Stop 40
cctattgtatcaagctttctagctt

SEQ ID NO: 29736 - DNA, 25 bp, Artificial
  probe
  misc_feature (1)..(25): SEQ ID NO: 4598; WAN0249PQ_at; Start 74; Stop 98
ataaatagagttaaaaagttgaatg

SEQ ID NO: 29737 - DNA, 25 bp, Artificial
  probe
  misc_feature (1)..(25): SEQ ID NO: 4598; WAN0249PQ_at; Start 103; Stop 127
gaaaatattgtatatagtagactga

SEQ ID NO: 29738 - DNA, 25 bp, Artificial
  probe
  misc_feature (1)..(25): SEQ ID NO: 4598; WAN0249PQ_at; Start 25; Stop 49
tcaagctttctagcttggtcagtag

SEQ ID NO: 29739 - DNA, 25 bp, Artificial
  probe
  misc_feature (1)..(25): SEQ ID NO: 4598; WAN0249PQ_at; Start 2; Stop 26
cagtctttaaaaagcctattgtatc

SEQ ID NO: 29740 - DNA, 25 bp, Artificial
  probe
  misc_feature (1)..(25): SEQ ID NO: 5898; WAN0249PR_at; Start 57; Stop 81
ttgcattatacagcaaccttttggg

SEQ ID NO: 29741 - DNA, 25 bp, Artificial
  probe
  misc_feature (1)..(25): SEQ ID NO: 5898; WAN0249PR_at; Start 199; Stop 223
gctaataatgaggaggttagtttat

SEQ ID NO: 29742 - DNA, 25 bp, Artificial
  probe
  misc_feature (1)..(25): SEQ ID NO: 5898; WAN0249PR_at; Start 182; Stop 206
taatcagtagaagccttgctaataa

SEQ ID NO: 29743 - DNA, 25 bp, Artificial
  probe
  misc_feature (1)..(25): SEQ ID NO: 5898; WAN0249PR_at; Start 194; Stop 218
gccttgctaataatgaggaggttag

SEQ ID NO: 29744 - DNA, 25 bp, Artificial
  probe
  misc_feature (1)..(25): SEQ ID NO: 5898; WAN0249PR_at; Start 1; Stop 25
tttattagctcactaaattgagggt

SEQ ID NO: 29745 - DNA, 25 bp, Artificial
  probe
  misc_feature (1)..(25): SEQ ID NO: 5898; WAN0249PR_at; Start 53; Stop 77
tgtcttgcattatacagcaaccttt

SEQ ID NO: 29746 - DNA, 25 bp, Artificial
  probe
  misc_feature (1)..(25): SEQ ID NO: 5898; WAN0249PR_at; Start 6; Stop 30
tagctcactaaattgagggtaagga

SEQ ID NO: 29747 - DNA, 25 bp, Artificial
  probe
  misc_feature (1)..(25): SEQ ID NO: 5898; WAN0249PR_at; Start 141; Stop 165
tattggacagttagtcttgaagtag

SEQ ID NO: 29748 - DNA, 25 bp, Artificial
  probe
  misc_feature (1)..(25): SEQ ID NO: 5898; WAN0249PR_at; Start 109; Stop 133
gattaagagtggatgatttatctgt

SEQ ID NO: 29749 - DNA, 25 bp, Artificial
  probe
  misc_feature (1)..(25): SEQ ID NO: 5898; WAN0249PR_at; Start 189; Stop 213
tagaagccttgctaataatgaggag

SEQ ID NO: 29750 - DNA, 25 bp, Artificial
  probe
  misc_feature (1)..(25): SEQ ID NO: 5898; WAN0249PR_at; Start 64; Stop 88
atacagcaaccttttgggaatgagt

SEQ ID NO: 29751 - DNA, 25 bp, Artificial
  probe
  misc_feature (1)..(25): SEQ ID NO: 5898; WAN0249PR_at; Start 159; Stop 183
gaagtagtctaagaattaggttata

SEQ ID NO: 29752 - DNA, 25 bp, Artificial
  probe
  misc_feature (1)..(25): SEQ ID NO: 5898; WAN0249PR_at; Start 47; Stop 71
gaaaaatgtcttgcattatacagca

SEQ ID NO: 29753 - DNA, 25 bp, Artificial
  probe
  misc_feature (1)..(25): SEQ ID NO: 5898; WAN0249PR_at; Start 191; Stop 215
gaagccttgctaataatgaggaggt

SEQ ID NO: 29754 - DNA, 25 bp, Artificial
  probe
  misc_feature (1)..(25): SEQ ID NO: 5898; WAN0249PR_at; Start 195; Stop 219
ccttgctaataatgaggaggttagt

SEQ ID NO: 29755 - DNA, 25 bp, Artificial
  probe
  misc_feature (1)..(25): SEQ ID NO: 5898; WAN0249PR_at; Start 155; Stop 179
tcttgaagtagtctaagaattaggt

SEQ ID NO: 29756 - DNA, 25 bp, Artificial
  probe
  misc_feature (1)..(25): SEQ ID NO: 5898; WAN0249PR_at; Start 138; Stop 162
tattattggacagttagtcttgaag

SEQ ID NO: 29757 - DNA, 25 bp, Artificial
  probe
  misc_feature (1)..(25): SEQ ID NO: 5898; WAN0249PR_at; Start 63; Stop 87
tatacagcaaccttttgggaatgag

SEQ ID NO: 29758 - DNA, 25 bp, Artificial
  probe
  misc_feature (1)..(25): SEQ ID NO: 5898; WAN0249PR_at; Start 148; Stop 172
cagttagtcttgaagtagtctaaga

SEQ ID NO: 29759 - DNA, 25 bp, Artificial
  probe
  misc_feature (1)..(25): SEQ ID NO: 5898; WAN0249PR_at; Start 97; Stop 121
tgaataaaatttgattaagagtgga

SEQ ID NO: 29760 - DNA, 25 bp, Artificial
  probe
  misc_feature (1)..(25): SEQ ID NO: 5898; WAN0249PR_at; Start 132; Stop 156
gtagattattattggacagttagtc

SEQ ID NO: 29761 - DNA, 25 bp, Artificial
  probe
  misc_feature (1)..(25): SEQ ID NO: 5898; WAN0249PR_at; Start 186; Stop 210
cagtagaagccttgctaataatgag

SEQ ID NO: 29762 - DNA, 25 bp, Artificial
  probe
  misc_feature (1)..(25): SEQ ID NO: 5898; WAN0249PR_at; Start 37; Stop 61
aaagcagtaagaaaaatgtcttgca

SEQ ID NO: 29763 - DNA, 25 bp, Artificial
  probe
  misc_feature (1)..(25): SEQ ID NO: 5898; WAN0249PR_at; Start 50; Stop 74
aaatgtcttgcattatacagcaacc

SEQ ID NO: 29764 - DNA, 25 bp, Artificial
  probe
  misc_feature (1)..(25): SEQ ID NO: 5898; WAN0249PR_at; Start 115; Stop 139
gagtggatgatttatctgtagatta

SEQ ID NO: 29765 - DNA, 25 bp, Artificial
  probe
  misc_feature (1)..(25): SEQ ID NO: 5898; WAN0249PR_at; Start 213; Stop 237
ggttagtttatgtatagtagactga

SEQ ID NO: 29766 - DNA, 25 bp, Artificial
  probe
  misc_feature (1)..(25): SEQ ID NO: 5898; WAN0249PR_at; Start 33; Stop 57
agtaaaagcagtaagaaaaatgtct

SEQ ID NO: 29767 - DNA, 25 bp, Artificial
  probe
  misc_feature (1)..(25): SEQ ID NO: 5898; WAN0249PR_at; Start 180; Stop 204
tataatcagtagaagccttgctaat

SEQ ID NO: 29768 - DNA, 25 bp, Artificial
  probe
  misc_feature (1)..(25): SEQ ID NO: 5898; WAN0249PR_at; Start 8; Stop 32
gctcactaaattgagggtaaggaaa

SEQ ID NO: 29769 - DNA, 25 bp, Artificial
  probe
  misc_feature (1)..(25): SEQ ID NO: 5898; WAN0249PR_at; Start 177; Stop 201
ggttataatcagtagaagccttgct

SEQ ID NO: 29770 - DNA, 25 bp, Artificial
  probe
  misc_feature (1)..(25): SEQ ID NO: 5898; WAN0249PR_at; Start 210; Stop 234
ggaggttagtttatgtatagtagac

SEQ ID NO: 29771 - DNA, 25 bp, Artificial
  probe
  misc_feature (1)..(25): SEQ ID NO: 5898; WAN0249PR_at; Start 59; Stop 83
gcattatacagcaaccttttgggaa

SEQ ID NO: 29772 - DNA, 25 bp, Artificial
  probe
  misc_feature (1)..(25): SEQ ID NO: 5898; WAN0249PR_at; Start 145; Stop 169
ggacagttagtcttgaagtagtcta

SEQ ID NO: 29773 - DNA, 25 bp, Artificial
  probe
  misc_feature (1)..(25): SEQ ID NO: 5898; WAN0249PR_at; Start 172; Stop 196
aattaggttataatcagtagaagcc

SEQ ID NO: 29774 - DNA, 25 bp, Artificial
  probe
  misc_feature (1)..(25): SEQ ID NO: 4757; WAN0249PS_at; Start 138; Stop 162
atttaaggcctactgttatagattc

SEQ ID NO: 29775 - DNA, 25 bp, Artificial
  probe
  misc_feature (1)..(25): SEQ ID NO: 4757; WAN0249PS_at; Start 137; Stop 161
tatttaaggcctactgttatagatt

SEQ ID NO: 29776 - DNA, 25 bp, Artificial
  probe
  misc_feature (1)..(25): SEQ ID NO: 4757; WAN0249PS_at; Start 161; Stop 185
tcaatacactatatatgtgtttgtc

SEQ ID NO: 29777 - DNA, 25 bp, Artificial
  probe
  misc_feature (1)..(25): SEQ ID NO: 4757; WAN0249PS_at; Start 160; Stop 184
ttcaatacactatatatgtgtttgt

SEQ ID NO: 29778 - DNA, 25 bp, Artificial
  probe
  misc_feature (1)..(25): SEQ ID NO: 4757; WAN0249PS_at; Start 172; Stop 196
tatatgtgtttgtctgataaaaatt

SEQ ID NO: 29779 - DNA, 25 bp, Artificial
  probe
  misc_feature (1)..(25): SEQ ID NO: 4757; WAN0249PS_at; Start 171; Stop 195
atatatgtgtttgtctgataaaaat

SEQ ID NO: 29780 - DNA, 25 bp, Artificial
  probe
  misc_feature (1)..(25): SEQ ID NO: 4757; WAN0249PS_at; Start 135; Stop 159
agtatttaaggcctactgttataga

SEQ ID NO: 29781 - DNA, 25 bp, Artificial
  probe
  misc_feature (1)..(25): SEQ ID NO: 4757; WAN0249PS_at; Start 177; Stop 201
gtgtttgtctgataaaaatttctac

SEQ ID NO: 29782 - DNA, 25 bp, Artificial
  probe
  misc_feature (1)..(25): SEQ ID NO: 4757; WAN0249PS_at; Start 88; Stop 112
atgaacagctctatcaggaaagtta

SEQ ID NO: 29783 - DNA, 25 bp, Artificial
  probe
  misc_feature (1)..(25): SEQ ID NO: 4757; WAN0249PS_at; Start 163; Stop 187
aatacactatatatgtgtttgtctg

SEQ ID NO: 29784 - DNA, 25 bp, Artificial
  probe
  misc_feature (1)..(25): SEQ ID NO: 4757; WAN0249PS_at; Start 93; Stop 117
cagctctatcaggaaagttaaatta

SEQ ID NO: 29785 - DNA, 25 bp, Artificial
  probe
  misc_feature (1)..(25): SEQ ID NO: 4757; WAN0249PS_at; Start 134; Stop 158
tagtatttaaggcctactgttatag

SEQ ID NO: 29786 - DNA, 25 bp, Artificial
  probe
  misc_feature (1)..(25): SEQ ID NO: 4757; WAN0249PS_at; Start 162; Stop 186
caatacactatatatgtgtttgtct

SEQ ID NO: 29787 - DNA, 25 bp, Artificial
  probe
  misc_feature (1)..(25): SEQ ID NO: 4757; WAN0249PS_at; Start 133; Stop 157
ttagtatttaaggcctactgttata

SEQ ID NO: 29788 - DNA, 25 bp, Artificial
  probe
  misc_feature (1)..(25): SEQ ID NO: 4757; WAN0249PS_at; Start 173; Stop 197
atatgtgtttgtctgataaaaattt

SEQ ID NO: 29789 - DNA, 25 bp, Artificial
  probe
  misc_feature (1)..(25): SEQ ID NO: 4757; WAN0249PS_at; Start 179; Stop 203
gtttgtctgataaaaatttctactc

SEQ ID NO: 29790 - DNA, 25 bp, Artificial
  probe
  misc_feature (1)..(25): SEQ ID NO: 4757; WAN0249PS_at; Start 178; Stop 202
tgtttgtctgataaaaatttctact

SEQ ID NO: 29791 - DNA, 25 bp, Artificial
  probe
  misc_feature (1)..(25): SEQ ID NO: 4757; WAN0249PS_at; Start 180; Stop 204
tttgtctgataaaaatttctactct

SEQ ID NO: 29792 - DNA, 25 bp, Artificial
  probe
  misc_feature (1)..(25): SEQ ID NO: 4757; WAN0249PS_at; Start 136; Stop 160
gtatttaaggcctactgttatagat

SEQ ID NO: 29793 - DNA, 25 bp, Artificial
  probe
  misc_feature (1)..(25): SEQ ID NO: 4757; WAN0249PS_at; Start 165; Stop 189
tacactatatatgtgtttgtctgat

SEQ ID NO: 29794 - DNA, 25 bp, Artificial
  probe
  misc_feature (1)..(25): SEQ ID NO: 4757; WAN0249PS_at; Start 164; Stop 188
atacactatatatgtgtttgtctga

SEQ ID NO: 29795 - DNA, 25 bp, Artificial
  probe
  misc_feature (1)..(25): SEQ ID NO: 4757; WAN0249PS_at; Start 2; Stop 26
taacagattttataactcttataaa

SEQ ID NO: 29796 - DNA, 25 bp, Artificial
  probe
  misc_feature (1)..(25): SEQ ID NO: 4757; WAN0249PS_at; Start 176; Stop 200
tgtgtttgtctgataaaaatttcta

SEQ ID NO: 29797 - DNA, 25 bp, Artificial
  probe
  misc_feature (1)..(25): SEQ ID NO: 4757; WAN0249PS_at; Start 87; Stop 111
tatgaacagctctatcaggaaagtt

SEQ ID NO: 29798 - DNA, 25 bp, Artificial
  probe
  misc_feature (1)..(25): SEQ ID NO: 4757; WAN0249PS_at; Start 168; Stop 192
actatatatgtgtttgtctgataaa

SEQ ID NO: 29799 - DNA, 25 bp, Artificial
  probe
  misc_feature (1)..(25): SEQ ID NO: 4757; WAN0249PS_at; Start 166; Stop 190
acactatatatgtgtttgtctgata

SEQ ID NO: 29800 - DNA, 25 bp, Artificial
  probe
  misc_feature (1)..(25): SEQ ID NO: 4757; WAN0249PS_at; Start 174; Stop 198
tatgtgtttgtctgataaaaatttc

SEQ ID NO: 29801 - DNA, 25 bp, Artificial
  probe
  misc_feature (1)..(25): SEQ ID NO: 4757; WAN0249PS_at; Start 175; Stop 199
atgtgtttgtctgataaaaatttct

SEQ ID NO: 29802 - DNA, 25 bp, Artificial
  probe
  misc_feature (1)..(25): SEQ ID NO: 4757; WAN0249PS_at; Start 170; Stop 194
tatatatgtgtttgtctgataaaaa

SEQ ID NO: 29803 - DNA, 25 bp, Artificial
  probe
  misc_feature (1)..(25): SEQ ID NO: 4757; WAN0249PS_at; Start 167; Stop 191
cactatatatgtgtttgtctgataa

SEQ ID NO: 29804 - DNA, 25 bp, Artificial
  probe
  misc_feature (1)..(25): SEQ ID NO: 4757; WAN0249PS_at; Start 159; Stop 183
attcaatacactatatatgtgtttg

SEQ ID NO: 29805 - DNA, 25 bp, Artificial
  probe
  misc_feature (1)..(25): SEQ ID NO: 4757; WAN0249PS_at; Start 128; Stop 152
atattttagtatttaaggcctactg

SEQ ID NO: 29806 - DNA, 25 bp, Artificial
  probe
  misc_feature (1)..(25): SEQ ID NO: 4757; WAN0249PS_at; Start 169; Stop 193
ctatatatgtgtttgtctgataaaa

SEQ ID NO: 29807 - DNA, 25 bp, Artificial
  probe
  misc_feature (1)..(25): SEQ ID NO: 4674; WAN0249PT_at; Start 176; Stop 200
tgctctagctcttcccaatggtatt

SEQ ID NO: 29808 - DNA, 25 bp, Artificial
  probe
  misc_feature (1)..(25): SEQ ID NO: 4674; WAN0249PT_at; Start 163; Stop 187
tttgaaaaatacttgctctagctct

SEQ ID NO: 29809 - DNA, 25 bp, Artificial
  probe
  misc_feature (1)..(25): SEQ ID NO: 4674; WAN0249PT_at; Start 165; Stop 189
tgaaaaatacttgctctagctcttc

SEQ ID NO: 29810 - DNA, 25 bp, Artificial
  probe
  misc_feature (1)..(25): SEQ ID NO: 4674; WAN0249PT_at; Start 162; Stop 186
gtttgaaaaatacttgctctagctc

SEQ ID NO: 29811 - DNA, 25 bp, Artificial
  probe
  misc_feature (1)..(25): SEQ ID NO: 4674; WAN0249PT_at; Start 129; Stop 153
aattctctggctctatctatttatt

SEQ ID NO: 29812 - DNA, 25 bp, Artificial
  probe
  misc_feature (1)..(25): SEQ ID NO: 4674; WAN0249PT_at; Start 175; Stop 199
ttgctctagctcttcccaatggtat

SEQ ID NO: 29813 - DNA, 25 bp, Artificial
  probe
  misc_feature (1)..(25): SEQ ID NO: 4674; WAN0249PT_at; Start 168; Stop 192
aaaatacttgctctagctcttccca

SEQ ID NO: 29814 - DNA, 25 bp, Artificial
  probe
  misc_feature (1)..(25): SEQ ID NO: 4674; WAN0249PT_at; Start 122; Stop 146
tttactaaattctctggctctatct

SEQ ID NO: 29815 - DNA, 25 bp, Artificial
  probe
  misc_feature (1)..(25): SEQ ID NO: 4674; WAN0249PT_at; Start 167; Stop 191
aaaaatacttgctctagctcttccc

SEQ ID NO: 29816 - DNA, 25 bp, Artificial
  probe
  misc_feature (1)..(25): SEQ ID NO: 4674; WAN0249PT_at; Start 114; Stop 138
aatctaggtttactaaattctctgg

SEQ ID NO: 29817 - DNA, 25 bp, Artificial
  probe
  misc_feature (1)..(25): SEQ ID NO: 4674; WAN0249PT_at; Start 166; Stop 190
gaaaaatacttgctctagctcttcc

SEQ ID NO: 29818 - DNA, 25 bp, Artificial
  probe
  misc_feature (1)..(25): SEQ ID NO: 4674; WAN0249PT_at; Start 119; Stop 143
aggtttactaaattctctggctcta

SEQ ID NO: 29819 - DNA, 25 bp, Artificial
  probe
  misc_feature (1)..(25): SEQ ID NO: 4674; WAN0249PT_at; Start 177; Stop 201
gctctagctcttcccaatggtattt

SEQ ID NO: 29820 - DNA, 25 bp, Artificial
  probe
  misc_feature (1)..(25): SEQ ID NO: 4674; WAN0249PT_at; Start 117; Stop 141
ctaggtttactaaattctctggctc

SEQ ID NO: 29821 - DNA, 25 bp, Artificial
  probe
  misc_feature (1)..(25): SEQ ID NO: 4674; WAN0249PT_at; Start 164; Stop 188
ttgaaaaatacttgctctagctctt

SEQ ID NO: 29822 - DNA, 25 bp, Artificial
  probe
  misc_feature (1)..(25): SEQ ID NO: 4674; WAN0249PT_at; Start 170; Stop 194
aatacttgctctagctcttcccaat

SEQ ID NO: 29823 - DNA, 25 bp, Artificial
  probe
  misc_feature (1)..(25): SEQ ID NO: 4674; WAN0249PT_at; Start 181; Stop 205
tagctcttcccaatggtattttttg

SEQ ID NO: 29824 - DNA, 25 bp, Artificial
  probe
  misc_feature (1)..(25): SEQ ID NO: 4674; WAN0249PT_at; Start 123; Stop 147
ttactaaattctctggctctatcta

SEQ ID NO: 29825 - DNA, 25 bp, Artificial
  probe
  misc_feature (1)..(25): SEQ ID NO: 4674; WAN0249PT_at; Start 169; Stop 193
aaatacttgctctagctcttcccaa

SEQ ID NO: 29826 - DNA, 25 bp, Artificial
  probe
  misc_feature (1)..(25): SEQ ID NO: 4674; WAN0249PT_at; Start 118; Stop 142
taggtttactaaattctctggctct

SEQ ID NO: 29827 - DNA, 25 bp, Artificial
  probe
  misc_feature (1)..(25): SEQ ID NO: 4674; WAN0249PT_at; Start 174; Stop 198
cttgctctagctcttcccaatggta

SEQ ID NO: 29828 - DNA, 25 bp, Artificial
  probe
  misc_feature (1)..(25): SEQ ID NO: 4674; WAN0249PT_at; Start 115; Stop 139
atctaggtttactaaattctctggc

SEQ ID NO: 29829 - DNA, 25 bp, Artificial
  probe
  misc_feature (1)..(25): SEQ ID NO: 4674; WAN0249PT_at; Start 128; Stop 152
aaattctctggctctatctatttat

SEQ ID NO: 29830 - DNA, 25 bp, Artificial
  probe
  misc_feature (1)..(25): SEQ ID NO: 4674; WAN0249PT_at; Start 116; Stop 140
tctaggtttactaaattctctggct

SEQ ID NO: 29831 - DNA, 25 bp, Artificial
  probe
  misc_feature (1)..(25): SEQ ID NO: 4674; WAN0249PT_at; Start 173; Stop 197
acttgctctagctcttcccaatggt

SEQ ID NO: 29832 - DNA, 25 bp, Artificial
  probe
  misc_feature (1)..(25): SEQ ID NO: 4674; WAN0249PT_at; Start 121; Stop 145
gtttactaaattctctggctctatc

SEQ ID NO: 29833 - DNA, 25 bp, Artificial
  probe
  misc_feature (1)..(25): SEQ ID NO: 4674; WAN0249PT_at; Start 120; Stop 144
ggtttactaaattctctggctctat

SEQ ID NO: 29834 - DNA, 25 bp, Artificial
  probe
  misc_feature (1)..(25): SEQ ID NO: 4674; WAN0249PT_at; Start 159; Stop 183
aaagtttgaaaaatacttgctctag

SEQ ID NO: 29835 - DNA, 25 bp, Artificial
  probe
  misc_feature (1)..(25): SEQ ID NO: 4674; WAN0249PT_at; Start 125; Stop 149
actaaattctctggctctatctatt

SEQ ID NO: 29836 - DNA, 25 bp, Artificial
  probe
  misc_feature (1)..(25): SEQ ID NO: 4674; WAN0249PT_at; Start 183; Stop 207
gctcttcccaatggtattttttgat

SEQ ID NO: 29837 - DNA, 25 bp, Artificial
  probe
  misc_feature (1)..(25): SEQ ID NO: 4674; WAN0249PT_at; Start 179; Stop 203
tctagctcttcccaatggtattttt

SEQ ID NO: 29838 - DNA, 25 bp, Artificial
  probe
  misc_feature (1)..(25): SEQ ID NO: 4674; WAN0249PT_at; Start 124; Stop 148
tactaaattctctggctctatctat

SEQ ID NO: 29839 - DNA, 25 bp, Artificial
  probe
  misc_feature (1)..(25): SEQ ID NO: 4674; WAN0249PT_at; Start 182; Stop 206
agctcttcccaatggtattttttga

SEQ ID NO: 29840 - DNA, 25 bp, Artificial
  probe
  misc_feature (1)..(25): SEQ ID NO: 4674; WAN0249PT_at; Start 172; Stop 196
tacttgctctagctcttcccaatgg

SEQ ID NO: 29841 - DNA, 25 bp, Artificial
  probe
  misc_feature (1)..(25): SEQ ID NO: 3196; WAN0249PU_at; Start 89; Stop 113
ggatgccttttttctgatgactaga

SEQ ID NO: 29842 - DNA, 25 bp, Artificial
  probe
  misc_feature (1)..(25): SEQ ID NO: 3196; WAN0249PU_at; Start 84; Stop 108
tgattggatgccttttttctgatga

SEQ ID NO: 29843 - DNA, 25 bp, Artificial
  probe
  misc_feature (1)..(25): SEQ ID NO: 3196; WAN0249PU_at; Start 22; Stop 46
ttaagtaaactatccagcaaatctt

SEQ ID NO: 29844 - DNA, 25 bp, Artificial
  probe
  misc_feature (1)..(25): SEQ ID NO: 3196; WAN0249PU_at; Start 19; Stop 43
aatttaagtaaactatccagcaaat

SEQ ID NO: 29845 - DNA, 25 bp, Artificial
  probe
  misc_feature (1)..(25): SEQ ID NO: 3196; WAN0249PU_at; Start 21; Stop 45
tttaagtaaactatccagcaaatct

SEQ ID NO: 29846 - DNA, 25 bp, Artificial
  probe
  misc_feature (1)..(25): SEQ ID NO: 3196; WAN0249PU_at; Start 16; Stop 40
cgaaatttaagtaaactatccagca

SEQ ID NO: 29847 - DNA, 25 bp, Artificial
  probe
  misc_feature (1)..(25): SEQ ID NO: 3196; WAN0249PU_at; Start 25; Stop 49
agtaaactatccagcaaatctttct

SEQ ID NO: 29848 - DNA, 25 bp, Artificial
  probe
  misc_feature (1)..(25): SEQ ID NO: 3196; WAN0249PU_at; Start 86; Stop 110
attggatgccttttttctgatgact

SEQ ID NO: 29849 - DNA, 25 bp, Artificial
  probe
  misc_feature (1)..(25): SEQ ID NO: 3196; WAN0249PU_at; Start 94; Stop 118
ccttttttctgatgactagattttt

SEQ ID NO: 29850 - DNA, 25 bp, Artificial
  probe
  misc_feature (1)..(25): SEQ ID NO: 3196; WAN0249PU_at; Start 24; Stop 48
aagtaaactatccagcaaatctttc

SEQ ID NO: 29851 - DNA, 25 bp, Artificial
  probe
  misc_feature (1)..(25): SEQ ID NO: 3196; WAN0249PU_at; Start 29; Stop 53
aactatccagcaaatctttctatta

SEQ ID NO: 29852 - DNA, 25 bp, Artificial
  probe
  misc_feature (1)..(25): SEQ ID NO: 3196; WAN0249PU_at; Start 85; Stop 109
gattggatgccttttttctgatgac

SEQ ID NO: 29853 - DNA, 25 bp, Artificial
  probe
  misc_feature (1)..(25): SEQ ID NO: 3196; WAN0249PU_at; Start 1; Stop 25
caagatgatgacaatcgaaatttaa

SEQ ID NO: 29854 - DNA, 25 bp, Artificial
  probe
  misc_feature (1)..(25): SEQ ID NO: 3196; WAN0249PU_at; Start 3; Stop 27
agatgatgacaatcgaaatttaagt

SEQ ID NO: 29855 - DNA, 25 bp, Artificial
  probe
  misc_feature (1)..(25): SEQ ID NO: 3196; WAN0249PU_at; Start 95; Stop 119
cttttttctgatgactagatttttt

SEQ ID NO: 29856 - DNA, 25 bp, Artificial
  probe
  misc_feature (1)..(25): SEQ ID NO: 3196; WAN0249PU_at; Start 96; Stop 120
ttttttctgatgactagattttttg

SEQ ID NO: 29857 - DNA, 25 bp, Artificial
  probe
  misc_feature (1)..(25): SEQ ID NO: 3196; WAN0249PU_at; Start 4; Stop 28
gatgatgacaatcgaaatttaagta

SEQ ID NO: 29858 - DNA, 25 bp, Artificial
  probe
  misc_feature (1)..(25): SEQ ID NO: 3196; WAN0249PU_at; Start 23; Stop 47
taagtaaactatccagcaaatcttt

SEQ ID NO: 29859 - DNA, 25 bp, Artificial
  probe
  misc_feature (1)..(25): SEQ ID NO: 3196; WAN0249PU_at; Start 28; Stop 52
aaactatccagcaaatctttctatt

SEQ ID NO: 29860 - DNA, 25 bp, Artificial
  probe
  misc_feature (1)..(25): SEQ ID NO: 3196; WAN0249PU_at; Start 2; Stop 26
aagatgatgacaatcgaaatttaag

SEQ ID NO: 29861 - DNA, 25 bp, Artificial
  probe
  misc_feature (1)..(25): SEQ ID NO: 3196; WAN0249PU_at; Start 88; Stop 112
tggatgccttttttctgatgactag

SEQ ID NO: 29862 - DNA, 25 bp, Artificial
  probe
  misc_feature (1)..(25): SEQ ID NO: 3196; WAN0249PU_at; Start 17; Stop 41
gaaatttaagtaaactatccagcaa

SEQ ID NO: 29863 - DNA, 25 bp, Artificial
  probe
  misc_feature (1)..(25): SEQ ID NO: 3196; WAN0249PU_at; Start 27; Stop 51
taaactatccagcaaatctttctat

SEQ ID NO: 29864 - DNA, 25 bp, Artificial
  probe
  misc_feature (1)..(25): SEQ ID NO: 3196; WAN0249PU_at; Start 20; Stop 44
atttaagtaaactatccagcaaatc

SEQ ID NO: 29865 - DNA, 25 bp, Artificial
  probe
  misc_feature (1)..(25): SEQ ID NO: 3196; WAN0249PU_at; Start 26; Stop 50
gtaaactatccagcaaatctttcta

SEQ ID NO: 29866 - DNA, 25 bp, Artificial
  probe
  misc_feature (1)..(25): SEQ ID NO: 3196; WAN0249PU_at; Start 5; Stop 29
atgatgacaatcgaaatttaagtaa

SEQ ID NO: 29867 - DNA, 25 bp, Artificial
  probe
  misc_feature (1)..(25): SEQ ID NO: 3196; WAN0249PU_at; Start 90; Stop 114
gatgccttttttctgatgactagat

SEQ ID NO: 29868 - DNA, 25 bp, Artificial
  probe
  misc_feature (1)..(25): SEQ ID NO: 3196; WAN0249PU_at; Start 92; Stop 116
tgccttttttctgatgactagattt

SEQ ID NO: 29869 - DNA, 25 bp, Artificial
  probe
  misc_feature (1)..(25): SEQ ID NO: 3196; WAN0249PU_at; Start 93; Stop 117
gccttttttctgatgactagatttt

SEQ ID NO: 29870 - DNA, 25 bp, Artificial
  probe
  misc_feature (1)..(25): SEQ ID NO: 3196; WAN0249PU_at; Start 87; Stop 111
ttggatgccttttttctgatgacta

SEQ ID NO: 29871 - DNA, 25 bp, Artificial
  probe
  misc_feature (1)..(25): SEQ ID NO: 3196; WAN0249PU_at; Start 91; Stop 115
atgccttttttctgatgactagatt

SEQ ID NO: 29872 - DNA, 25 bp, Artificial
  probe
  misc_feature (1)..(25): SEQ ID NO: 117; WAN0249PV_at; Start 5; Stop 29
ttgtattcctcctgtctcttaatat

SEQ ID NO: 29873 - DNA, 25 bp, Artificial
  probe
  misc_feature (1)..(25): SEQ ID NO: 117; WAN0249PV_at; Start 2; Stop 26
aacttgtattcctcctgtctcttaa

SEQ ID NO: 29874 - DNA, 25 bp, Artificial
  probe
  misc_feature (1)..(25): SEQ ID NO: 117; WAN0249PV_at; Start 9; Stop 33
attcctcctgtctcttaatatacat

SEQ ID NO: 29875 - DNA, 25 bp, Artificial
  probe
  misc_feature (1)..(25): SEQ ID NO: 117; WAN0249PV_at; Start 1; Stop 25
aaacttgtattcctcctgtctctta

SEQ ID NO: 29876 - DNA, 25 bp, Artificial
  probe
  misc_feature (1)..(25): SEQ ID NO: 117; WAN0249PV_at; Start 10; Stop 34
ttcctcctgtctcttaatatacatt

SEQ ID NO: 29877 - DNA, 25 bp, Artificial
  probe
  misc_feature (1)..(25): SEQ ID NO: 117; WAN0249PV_at; Start 102; Stop 126
gataactttcaggataaatttctaa

SEQ ID NO: 29878 - DNA, 25 bp, Artificial
  probe
  misc_feature (1)..(25): SEQ ID NO: 117; WAN0249PV_at; Start 7; Stop 31
gtattcctcctgtctcttaatatac

SEQ ID NO: 29879 - DNA, 25 bp, Artificial
  probe
  misc_feature (1)..(25): SEQ ID NO: 117; WAN0249PV_at; Start 91; Stop 115
tagattctaaagataactttcagga

SEQ ID NO: 29880 - DNA, 25 bp, Artificial
  probe
  misc_feature (1)..(25): SEQ ID NO: 117; WAN0249PV_at; Start 179; Stop 203
catggaaagattttttataatagct

SEQ ID NO: 29881 - DNA, 25 bp, Artificial
  probe
  misc_feature (1)..(25): SEQ ID NO: 117; WAN0249PV_at; Start 96; Stop 120
tctaaagataactttcaggataaat

SEQ ID NO: 29882 - DNA, 25 bp, Artificial
  probe
  misc_feature (1)..(25): SEQ ID NO: 117; WAN0249PV_at; Start 8; Stop 32
tattcctcctgtctcttaatataca

SEQ ID NO: 29883 - DNA, 25 bp, Artificial
  probe
  misc_feature (1)..(25): SEQ ID NO: 117; WAN0249PV_at; Start 194; Stop 218
tataatagctaaaaaataatagtta

SEQ ID NO: 29884 - DNA, 25 bp, Artificial
  probe
  misc_feature (1)..(25): SEQ ID NO: 117; WAN0249PV_at; Start 84; Stop 108
tgaaaaatagattctaaagataact

SEQ ID NO: 29885 - DNA, 25 bp, Artificial
  probe
  misc_feature (1)..(25): SEQ ID NO: 117; WAN0249PV_at; Start 93; Stop 117
gattctaaagataactttcaggata

SEQ ID NO: 29886 - DNA, 25 bp, Artificial
  probe
  misc_feature (1)..(25): SEQ ID NO: 117; WAN0249PV_at; Start 3; Stop 27
acttgtattcctcctgtctcttaat

SEQ ID NO: 29887 - DNA, 25 bp, Artificial
  probe
  misc_feature (1)..(25): SEQ ID NO: 117; WAN0249PV_at; Start 107; Stop 131
ctttcaggataaatttctaaattat

SEQ ID NO: 29888 - DNA, 25 bp, Artificial
  probe
  misc_feature (1)..(25): SEQ ID NO: 117; WAN0249PV_at; Start 90; Stop 114
atagattctaaagataactttcagg

SEQ ID NO: 29889 - DNA, 25 bp, Artificial
  probe
  misc_feature (1)..(25): SEQ ID NO: 117; WAN0249PV_at; Start 6; Stop 30
tgtattcctcctgtctcttaatata

SEQ ID NO: 29890 - DNA, 25 bp, Artificial
  probe
  misc_feature (1)..(25): SEQ ID NO: 117; WAN0249PV_at; Start 156; Stop 180
aaacttggaattatgcgttttatca

SEQ ID NO: 29891 - DNA, 25 bp, Artificial
  probe
  misc_feature (1)..(25): SEQ ID NO: 117; WAN0249PV_at; Start 138; Stop 162
catagtatcaagtgtaaaaaacttg

SEQ ID NO: 29892 - DNA, 25 bp, Artificial
  probe
  misc_feature (1)..(25): SEQ ID NO: 117; WAN0249PV_at; Start 78; Stop 102
aataactgaaaaatagattctaaag

SEQ ID NO: 29893 - DNA, 25 bp, Artificial
  probe
  misc_feature (1)..(25): SEQ ID NO: 117; WAN0249PV_at; Start 83; Stop 107
ctgaaaaatagattctaaagataac

SEQ ID NO: 29894 - DNA, 25 bp, Artificial
  probe
  misc_feature (1)..(25): SEQ ID NO: 117; WAN0249PV_at; Start 15; Stop 39
cctgtctcttaatatacattaaaaa

SEQ ID NO: 29895 - DNA, 25 bp, Artificial
  probe
  misc_feature (1)..(25): SEQ ID NO: 117; WAN0249PV_at; Start 12; Stop 36
cctcctgtctcttaatatacattaa

SEQ ID NO: 29896 - DNA, 25 bp, Artificial
  probe
  misc_feature (1)..(25): SEQ ID NO: 117; WAN0249PV_at; Start 97; Stop 121
ctaaagataactttcaggataaatt

SEQ ID NO: 29897 - DNA, 25 bp, Artificial
  probe
  misc_feature (1)..(25): SEQ ID NO: 117; WAN0249PV_at; Start 169; Stop 193
tgcgttttatcatggaaagattttt

SEQ ID NO: 29898 - DNA, 25 bp, Artificial
  probe
  misc_feature (1)..(25): SEQ ID NO: 117; WAN0249PV_at; Start 148; Stop 172
agtgtaaaaaacttggaattatgcg

SEQ ID NO: 29899 - DNA, 25 bp, Artificial
  probe
  misc_feature (1)..(25): SEQ ID NO: 117; WAN0249PV_at; Start 4; Stop 28
cttgtattcctcctgtctcttaata

SEQ ID NO: 29900 - DNA, 25 bp, Artificial
  probe
  misc_feature (1)..(25): SEQ ID NO: 117; WAN0249PV_at; Start 80; Stop 104
taactgaaaaatagattctaaagat

SEQ ID NO: 29901 - DNA, 25 bp, Artificial
  probe
  misc_feature (1)..(25): SEQ ID NO: 117; WAN0249PV_at; Start 139; Stop 163
atagtatcaagtgtaaaaaacttgg

SEQ ID NO: 29902 - DNA, 25 bp, Artificial
  probe
  misc_feature (1)..(25): SEQ ID NO: 117; WAN0249PV_at; Start 178; Stop 202
tcatggaaagattttttataatagc

SEQ ID NO: 29903 - DNA, 25 bp, Artificial
  probe
  misc_feature (1)..(25): SEQ ID NO: 117; WAN0249PV_at; Start 181; Stop 205
tggaaagattttttataatagctaa

SEQ ID NO: 29904 - DNA, 25 bp, Artificial
  probe
  misc_feature (1)..(25): SEQ ID NO: 117; WAN0249PV_at; Start 14; Stop 38
tcctgtctcttaatatacattaaaa

SEQ ID NO: 29905 - DNA, 25 bp, Artificial
  probe
  misc_feature (1)..(25): SEQ ID NO: 117; WAN0249PV_at; Start 11; Stop 35
tcctcctgtctcttaatatacatta

SEQ ID NO: 29906 - DNA, 25 bp, Artificial
  probe
  misc_feature (1)..(25): SEQ ID NO: 4742; WAN0249PW_at; Start 5; Stop 29
aaaaatctagtcatcagaaaaaagg

SEQ ID NO: 29907 - DNA, 25 bp, Artificial
  probe
  misc_feature (1)..(25): SEQ ID NO: 4742; WAN0249PW_at; Start 73; Stop 97
tagaaagatttgctggatagtttac

SEQ ID NO: 29908 - DNA, 25 bp, Artificial
  probe
  misc_feature (1)..(25): SEQ ID NO: 4742; WAN0249PW_at; Start 12; Stop 36
tagtcatcagaaaaaaggcatccaa

SEQ ID NO: 29909 - DNA, 25 bp, Artificial
  probe
  misc_feature (1)..(25): SEQ ID NO: 4742; WAN0249PW_at; Start 82; Stop 106
ttgctggatagtttacttaaatttc

SEQ ID NO: 29910 - DNA, 25 bp, Artificial
  probe
  misc_feature (1)..(25): SEQ ID NO: 4742; WAN0249PW_at; Start 75; Stop 99
gaaagatttgctggatagtttactt

SEQ ID NO: 29911 - DNA, 25 bp, Artificial
  probe
  misc_feature (1)..(25): SEQ ID NO: 4742; WAN0249PW_at; Start 9; Stop 33
atctagtcatcagaaaaaaggcatc

SEQ ID NO: 29912 - DNA, 25 bp, Artificial
  probe
  misc_feature (1)..(25): SEQ ID NO: 4742; WAN0249PW_at; Start 93; Stop 117
tttacttaaatttcgattgtcatca

SEQ ID NO: 29913 - DNA, 25 bp, Artificial
  probe
  misc_feature (1)..(25): SEQ ID NO: 4742; WAN0249PW_at; Start 92; Stop 116
gtttacttaaatttcgattgtcatc

SEQ ID NO: 29914 - DNA, 25 bp, Artificial
  probe
  misc_feature (1)..(25): SEQ ID NO: 4742; WAN0249PW_at; Start 7; Stop 31
aaatctagtcatcagaaaaaaggca

SEQ ID NO: 29915 - DNA, 25 bp, Artificial
  probe
  misc_feature (1)..(25): SEQ ID NO: 4742; WAN0249PW_at; Start 94; Stop 118
ttacttaaatttcgattgtcatcat

SEQ ID NO: 29916 - DNA, 25 bp, Artificial
  probe
  misc_feature (1)..(25): SEQ ID NO: 4742; WAN0249PW_at; Start 96; Stop 120
acttaaatttcgattgtcatcatct

SEQ ID NO: 29917 - DNA, 25 bp, Artificial
  probe
  misc_feature (1)..(25): SEQ ID NO: 4742; WAN0249PW_at; Start 72; Stop 96
atagaaagatttgctggatagttta

SEQ ID NO: 29918 - DNA, 25 bp, Artificial
  probe
  misc_feature (1)..(25): SEQ ID NO: 4742; WAN0249PW_at; Start 91; Stop 115
agtttacttaaatttcgattgtcat

SEQ ID NO: 29919 - DNA, 25 bp, Artificial
  probe
  misc_feature (1)..(25): SEQ ID NO: 4742; WAN0249PW_at; Start 74; Stop 98
agaaagatttgctggatagtttact

SEQ ID NO: 29920 - DNA, 25 bp, Artificial
  probe
  misc_feature (1)..(25): SEQ ID NO: 4742; WAN0249PW_at; Start 6; Stop 30
aaaatctagtcatcagaaaaaaggc

SEQ ID NO: 29921 - DNA, 25 bp, Artificial
  probe
  misc_feature (1)..(25): SEQ ID NO: 4742; WAN0249PW_at; Start 10; Stop 34
tctagtcatcagaaaaaaggcatcc

SEQ ID NO: 29922 - DNA, 25 bp, Artificial
  probe
  misc_feature (1)..(25): SEQ ID NO: 4742; WAN0249PW_at; Start 90; Stop 114
tagtttacttaaatttcgattgtca

SEQ ID NO: 29923 - DNA, 25 bp, Artificial
  probe
  misc_feature (1)..(25): SEQ ID NO: 4742; WAN0249PW_at; Start 80; Stop 104
atttgctggatagtttacttaaatt

SEQ ID NO: 29924 - DNA, 25 bp, Artificial
  probe
  misc_feature (1)..(25): SEQ ID NO: 4742; WAN0249PW_at; Start 98; Stop 122
ttaaatttcgattgtcatcatcttg

SEQ ID NO: 29925 - DNA, 25 bp, Artificial
  probe
  misc_feature (1)..(25): SEQ ID NO: 4742; WAN0249PW_at; Start 77; Stop 101
aagatttgctggatagtttacttaa

SEQ ID NO: 29926 - DNA, 25 bp, Artificial
  probe
  misc_feature (1)..(25): SEQ ID NO: 4742; WAN0249PW_at; Start 97; Stop 121
cttaaatttcgattgtcatcatctt

SEQ ID NO: 29927 - DNA, 25 bp, Artificial
  probe
  misc_feature (1)..(25): SEQ ID NO: 4742; WAN0249PW_at; Start 79; Stop 103
gatttgctggatagtttacttaaat

SEQ ID NO: 29928 - DNA, 25 bp, Artificial
  probe
  misc_feature (1)..(25): SEQ ID NO: 4742; WAN0249PW_at; Start 13; Stop 37
agtcatcagaaaaaaggcatccaat

SEQ ID NO: 29929 - DNA, 25 bp, Artificial
  probe
  misc_feature (1)..(25): SEQ ID NO: 4742; WAN0249PW_at; Start 84; Stop 108
gctggatagtttacttaaatttcga

SEQ ID NO: 29930 - DNA, 25 bp, Artificial
  probe
  misc_feature (1)..(25): SEQ ID NO: 4742; WAN0249PW_at; Start 11; Stop 35
ctagtcatcagaaaaaaggcatcca

SEQ ID NO: 29931 - DNA, 25 bp, Artificial
  probe
  misc_feature (1)..(25): SEQ ID NO: 4742; WAN0249PW_at; Start 83; Stop 107
tgctggatagtttacttaaatttcg

SEQ ID NO: 29932 - DNA, 25 bp, Artificial
  probe
  misc_feature (1)..(25): SEQ ID NO: 4742; WAN0249PW_at; Start 95; Stop 119
tacttaaatttcgattgtcatcatc

SEQ ID NO: 29933 - DNA, 25 bp, Artificial
  probe
  misc_feature (1)..(25): SEQ ID NO: 4742; WAN0249PW_at; Start 76; Stop 100
aaagatttgctggatagtttactta

SEQ ID NO: 29934 - DNA, 25 bp, Artificial
  probe
  misc_feature (1)..(25): SEQ ID NO: 4742; WAN0249PW_at; Start 8; Stop 32
aatctagtcatcagaaaaaaggcat

SEQ ID NO: 29935 - DNA, 25 bp, Artificial
  probe
  misc_feature (1)..(25): SEQ ID NO: 4742; WAN0249PW_at; Start 15; Stop 39
tcatcagaaaaaaggcatccaatca

SEQ ID NO: 29936 - DNA, 25 bp, Artificial
  probe
  misc_feature (1)..(25): SEQ ID NO: 4742; WAN0249PW_at; Start 14; Stop 38
gtcatcagaaaaaaggcatccaatc

SEQ ID NO: 29937 - DNA, 25 bp, Artificial
  probe
  misc_feature (1)..(25): SEQ ID NO: 4742; WAN0249PW_at; Start 85; Stop 109
ctggatagtttacttaaatttcgat

SEQ ID NO: 29938 - DNA, 25 bp, Artificial
  probe
  misc_feature (1)..(25): SEQ ID NO: 4742; WAN0249PW_at; Start 78; Stop 102
agatttgctggatagtttacttaaa

SEQ ID NO: 29939 - DNA, 25 bp, Artificial
  probe
  misc_feature (1)..(25): SEQ ID NO: 4708; WAN0249PX_at; Start 14; Stop 38
taatatatgtttgagactggattgc

SEQ ID NO: 29940 - DNA, 25 bp, Artificial
  probe
  misc_feature (1)..(25): SEQ ID NO: 4708; WAN0249PX_at; Start 43; Stop 67
ctttttatgatggtcaaaatcaaca

SEQ ID NO: 29941 - DNA, 25 bp, Artificial
  probe
  misc_feature (1)..(25): SEQ ID NO: 4708; WAN0249PX_at; Start 19; Stop 43
tatgtttgagactggattgccagtc

SEQ ID NO: 29942 - DNA, 25 bp, Artificial
  probe
  misc_feature (1)..(25): SEQ ID NO: 4708; WAN0249PX_at; Start 51; Stop 75
gatggtcaaaatcaacagacttttt

SEQ ID NO: 29943 - DNA, 25 bp, Artificial
  probe
  misc_feature (1)..(25): SEQ ID NO: 4708; WAN0249PX_at; Start 47; Stop 71
ttatgatggtcaaaatcaacagact

SEQ ID NO: 29944 - DNA, 25 bp, Artificial
  probe
  misc_feature (1)..(25): SEQ ID NO: 4708; WAN0249PX_at; Start 49; Stop 73
atgatggtcaaaatcaacagacttt

SEQ ID NO: 29945 - DNA, 25 bp, Artificial
  probe
  misc_feature (1)..(25): SEQ ID NO: 4708; WAN0249PX_at; Start 38; Stop 62
ccagtctttttatgatggtcaaaat

SEQ ID NO: 29946 - DNA, 25 bp, Artificial
  probe
  misc_feature (1)..(25): SEQ ID NO: 4708; WAN0249PX_at; Start 23; Stop 47
tttgagactggattgccagtctttt

SEQ ID NO: 29947 - DNA, 25 bp, Artificial
  probe
  misc_feature (1)..(25): SEQ ID NO: 4708; WAN0249PX_at; Start 16; Stop 40
atatatgtttgagactggattgcca

SEQ ID NO: 29948 - DNA, 25 bp, Artificial
  probe
  misc_feature (1)..(25): SEQ ID NO: 4708; WAN0249PX_at; Start 68; Stop 92
gacttttttctcttttctgaatgtg

SEQ ID NO: 29949 - DNA, 25 bp, Artificial
  probe
  misc_feature (1)..(25): SEQ ID NO: 4708; WAN0249PX_at; Start 18; Stop 42
atatgtttgagactggattgccagt

SEQ ID NO: 29950 - DNA, 25 bp, Artificial
  probe
  misc_feature (1)..(25): SEQ ID NO: 4708; WAN0249PX_at; Start 50; Stop 74
tgatggtcaaaatcaacagactttt

SEQ ID NO: 29951 - DNA, 25 bp, Artificial
  probe
  misc_feature (1)..(25): SEQ ID NO: 4708; WAN0249PX_at; Start 39; Stop 63
cagtctttttatgatggtcaaaatc

SEQ ID NO: 29952 - DNA, 25 bp, Artificial
  probe
  misc_feature (1)..(25): SEQ ID NO: 4708; WAN0249PX_at; Start 55; Stop 79
gtcaaaatcaacagacttttttctc

SEQ ID NO: 29953 - DNA, 25 bp, Artificial
  probe
  misc_feature (1)..(25): SEQ ID NO: 4708; WAN0249PX_at; Start 66; Stop 90
cagacttttttctcttttctgaatg

SEQ ID NO: 29954 - DNA, 25 bp, Artificial
  probe
  misc_feature (1)..(25): SEQ ID NO: 4708; WAN0249PX_at; Start 20; Stop 44
atgtttgagactggattgccagtct

SEQ ID NO: 29955 - DNA, 25 bp, Artificial
  probe
  misc_feature (1)..(25): SEQ ID NO: 4708; WAN0249PX_at; Start 42; Stop 66
tctttttatgatggtcaaaatcaac

SEQ ID NO: 29956 - DNA, 25 bp, Artificial
  probe
  misc_feature (1)..(25): SEQ ID NO: 4708; WAN0249PX_at; Start 45; Stop 69
ttttatgatggtcaaaatcaacaga

SEQ ID NO: 29957 - DNA, 25 bp, Artificial
  probe
  misc_feature (1)..(25): SEQ ID NO: 4708; WAN0249PX_at; Start 15; Stop 39
aatatatgtttgagactggattgcc

SEQ ID NO: 29958 - DNA, 25 bp, Artificial
  probe
  misc_feature (1)..(25): SEQ ID NO: 4708; WAN0249PX_at; Start 73; Stop 97
ttttctcttttctgaatgtgttata

SEQ ID NO: 29959 - DNA, 25 bp, Artificial
  probe
  misc_feature (1)..(25): SEQ ID NO: 4708; WAN0249PX_at; Start 44; Stop 68
tttttatgatggtcaaaatcaacag

SEQ ID NO: 29960 - DNA, 25 bp, Artificial
  probe
  misc_feature (1)..(25): SEQ ID NO: 4708; WAN0249PX_at; Start 22; Stop 46
gtttgagactggattgccagtcttt

SEQ ID NO: 29961 - DNA, 25 bp, Artificial
  probe
  misc_feature (1)..(25): SEQ ID NO: 4708; WAN0249PX_at; Start 10; Stop 34
tctataatatatgtttgagactgga

SEQ ID NO: 29962 - DNA, 25 bp, Artificial
  probe
  misc_feature (1)..(25): SEQ ID NO: 4708; WAN0249PX_at; Start 53; Stop 77
tggtcaaaatcaacagacttttttc

SEQ ID NO: 29963 - DNA, 25 bp, Artificial
  probe
  misc_feature (1)..(25): SEQ ID NO: 4708; WAN0249PX_at; Start 11; Stop 35
ctataatatatgtttgagactggat

SEQ ID NO: 29964 - DNA, 25 bp, Artificial
  probe
  misc_feature (1)..(25): SEQ ID NO: 4708; WAN0249PX_at; Start 48; Stop 72
tatgatggtcaaaatcaacagactt

SEQ ID NO: 29965 - DNA, 25 bp, Artificial
  probe
  misc_feature (1)..(25): SEQ ID NO: 4708; WAN0249PX_at; Start 46; Stop 70
tttatgatggtcaaaatcaacagac

SEQ ID NO: 29966 - DNA, 25 bp, Artificial
  probe
  misc_feature (1)..(25): SEQ ID NO: 4708; WAN0249PX_at; Start 40; Stop 64
agtctttttatgatggtcaaaatca

SEQ ID NO: 29967 - DNA, 25 bp, Artificial
  probe
  misc_feature (1)..(25): SEQ ID NO: 4708; WAN0249PX_at; Start 2; Stop 26
ggagaatttctataatatatgtttg

SEQ ID NO: 29968 - DNA, 25 bp, Artificial
  probe
  misc_feature (1)..(25): SEQ ID NO: 4708; WAN0249PX_at; Start 25; Stop 49
tgagactggattgccagtcttttta

SEQ ID NO: 29969 - DNA, 25 bp, Artificial
  probe
  misc_feature (1)..(25): SEQ ID NO: 4708; WAN0249PX_at; Start 63; Stop 87
caacagacttttttctcttttctga

SEQ ID NO: 29970 - DNA, 25 bp, Artificial
  probe
  misc_feature (1)..(25): SEQ ID NO: 4708; WAN0249PX_at; Start 57; Stop 81
caaaatcaacagacttttttctctt

SEQ ID NO: 29971 - DNA, 25 bp, Artificial
  probe
  misc_feature (1)..(25): SEQ ID NO: 4708; WAN0249PX_at; Start 17; Stop 41
tatatgtttgagactggattgccag

SEQ ID NO: 29972 - DNA, 25 bp, Artificial
  probe
  misc_feature (1)..(25): SEQ ID NO: 4708; WAN0249PX_at; Start 21; Stop 45
tgtttgagactggattgccagtctt

SEQ ID NO: 29973 - DNA, 25 bp, Artificial
  probe
  misc_feature (1)..(25): SEQ ID NO: 279; WAN0249PY_at; Start 72; Stop 96
ctactatatacaatattttcggaac

SEQ ID NO: 29974 - DNA, 25 bp, Artificial
  probe
  misc_feature (1)..(25): SEQ ID NO: 279; WAN0249PY_at; Start 140; Stop 164
aaaacctactgaccaagctagaaag

SEQ ID NO: 29975 - DNA, 25 bp, Artificial
  probe
  misc_feature (1)..(25): SEQ ID NO: 279; WAN0249PY_at; Start 141; Stop 165
aaacctactgaccaagctagaaagc

SEQ ID NO: 29976 - DNA, 25 bp, Artificial
  probe
  misc_feature (1)..(25): SEQ ID NO: 279; WAN0249PY_at; Start 168; Stop 192
gatacaataggctttttaaagactg

SEQ ID NO: 29977 - DNA, 25 bp, Artificial
  probe
  misc_feature (1)..(25): SEQ ID NO: 279; WAN0249PY_at; Start 73; Stop 97
tactatatacaatattttcggaaca

SEQ ID NO: 29978 - DNA, 25 bp, Artificial
  probe
  misc_feature (1)..(25): SEQ ID NO: 279; WAN0249PY_at; Start 144; Stop 168
cctactgaccaagctagaaagcttg

SEQ ID NO: 29979 - DNA, 25 bp, Artificial
  probe
  misc_feature (1)..(25): SEQ ID NO: 279; WAN0249PY_at; Start 79; Stop 103
atacaatattttcggaacattcaac

SEQ ID NO: 29980 - DNA, 25 bp, Artificial
  probe
  misc_feature (1)..(25): SEQ ID NO: 279; WAN0249PY_at; Start 150; Stop 174
gaccaagctagaaagcttgatacaa

SEQ ID NO: 29981 - DNA, 25 bp, Artificial
  probe
  misc_feature (1)..(25): SEQ ID NO: 279; WAN0249PY_at; Start 146; Stop 170
tactgaccaagctagaaagcttgat

SEQ ID NO: 29982 - DNA, 25 bp, Artificial
  probe
  misc_feature (1)..(25): SEQ ID NO: 279; WAN0249PY_at; Start 162; Stop 186
aagcttgatacaataggctttttaa

SEQ ID NO: 29983 - DNA, 25 bp, Artificial
  probe
  misc_feature (1)..(25): SEQ ID NO: 279; WAN0249PY_at; Start 78; Stop 102
tatacaatattttcggaacattcaa

SEQ ID NO: 29984 - DNA, 25 bp, Artificial
  probe
  misc_feature (1)..(25): SEQ ID NO: 279; WAN0249PY_at; Start 156; Stop 180
gctagaaagcttgatacaataggct

SEQ ID NO: 29985 - DNA, 25 bp, Artificial
  probe
  misc_feature (1)..(25): SEQ ID NO: 279; WAN0249PY_at; Start 70; Stop 94
gtctactatatacaatattttcgga

SEQ ID NO: 29986 - DNA, 25 bp, Artificial
  probe
  misc_feature (1)..(25): SEQ ID NO: 279; WAN0249PY_at; Start 143; Stop 167
acctactgaccaagctagaaagctt

SEQ ID NO: 29987 - DNA, 25 bp, Artificial
  probe
  misc_feature (1)..(25): SEQ ID NO: 279; WAN0249PY_at; Start 164; Stop 188
gcttgatacaataggctttttaaag

SEQ ID NO: 29988 - DNA, 25 bp, Artificial
  probe
  misc_feature (1)..(25): SEQ ID NO: 279; WAN0249PY_at; Start 137; Stop 161
taaaaaacctactgaccaagctaga

SEQ ID NO: 29989 - DNA, 25 bp, Artificial
  probe
  misc_feature (1)..(25): SEQ ID NO: 279; WAN0249PY_at; Start 149; Stop 173
tgaccaagctagaaagcttgataca

SEQ ID NO: 29990 - DNA, 25 bp, Artificial
  probe
  misc_feature (1)..(25): SEQ ID NO: 279; WAN0249PY_at; Start 169; Stop 193
atacaataggctttttaaagactga

SEQ ID NO: 29991 - DNA, 25 bp, Artificial
  probe
  misc_feature (1)..(25): SEQ ID NO: 279; WAN0249PY_at; Start 167; Stop 191
tgatacaataggctttttaaagact

SEQ ID NO: 29992 - DNA, 25 bp, Artificial
  probe
  misc_feature (1)..(25): SEQ ID NO: 279; WAN0249PY_at; Start 145; Stop 169
ctactgaccaagctagaaagcttga

SEQ ID NO: 29993 - DNA, 25 bp, Artificial
  probe
  misc_feature (1)..(25): SEQ ID NO: 279; WAN0249PY_at; Start 152; Stop 176
ccaagctagaaagcttgatacaata

SEQ ID NO: 29994 - DNA, 25 bp, Artificial
  probe
  misc_feature (1)..(25): SEQ ID NO: 279; WAN0249PY_at; Start 142; Stop 166
aacctactgaccaagctagaaagct

SEQ ID NO: 29995 - DNA, 25 bp, Artificial
  probe
  misc_feature (1)..(25): SEQ ID NO: 279; WAN0249PY_at; Start 96; Stop 120
cattcaactttttaactctatttat

SEQ ID NO: 29996 - DNA, 25 bp, Artificial
  probe
  misc_feature (1)..(25): SEQ ID NO: 279; WAN0249PY_at; Start 82; Stop 106
caatattttcggaacattcaacttt

SEQ ID NO: 29997 - DNA, 25 bp, Artificial
  probe
  misc_feature (1)..(25): SEQ ID NO: 279; WAN0249PY_at; Start 130; Stop 154
tcataattaaaaaacctactgacca

SEQ ID NO: 29998 - DNA, 25 bp, Artificial
  probe
  misc_feature (1)..(25): SEQ ID NO: 279; WAN0249PY_at; Start 76; Stop 100
tatatacaatattttcggaacattc

SEQ ID NO: 29999 - DNA, 25 bp, Artificial
  probe
  misc_feature (1)..(25): SEQ ID NO: 279; WAN0249PY_at; Start 148; Stop 172
ctgaccaagctagaaagcttgatac

SEQ ID NO: 30000 - DNA, 25 bp, Artificial
  probe
  misc_feature (1)..(25): SEQ ID NO: 279; WAN0249PY_at; Start 160; Stop 184
gaaagcttgatacaataggcttttt

SEQ ID NO: 30001 - DNA, 25 bp, Artificial
  probe
  misc_feature (1)..(25): SEQ ID NO: 279; WAN0249PY_at; Start 68; Stop 92
cagtctactatatacaatattttcg

SEQ ID NO: 30002 - DNA, 25 bp, Artificial
  probe
  misc_feature (1)..(25): SEQ ID NO: 279; WAN0249PY_at; Start 155; Stop 179
agctagaaagcttgatacaataggc

SEQ ID NO: 30003 - DNA, 25 bp, Artificial
  probe
  misc_feature (1)..(25): SEQ ID NO: 279; WAN0249PY_at; Start 158; Stop 182
tagaaagcttgatacaataggcttt

SEQ ID NO: 30004 - DNA, 25 bp, Artificial
  probe
  misc_feature (1)..(25): SEQ ID NO: 279; WAN0249PY_at; Start 108; Stop 132
taactctatttattactagatttca

SEQ ID NO: 30005 - DNA, 25 bp, Artificial
  probe
  misc_feature (1)..(25): SEQ ID NO: 279; WAN0249PY_at; Start 147; Stop 171
actgaccaagctagaaagcttgata

SEQ ID NO: 30006 - DNA, 25 bp, Artificial
  probe
  misc_feature (1)..(25): SEQ ID NO: 279; WAN0249PY_at; Start 157; Stop 181
ctagaaagcttgatacaataggctt

SEQ ID NO: 30007 - DNA, 25 bp, Artificial
  probe
  misc_feature (1)..(25): SEQ ID NO: 4559; WAN0249PZ_at; Start 141; Stop 165
tggcaatccagtctcaaacatatat

SEQ ID NO: 30008 - DNA, 25 bp, Artificial
  probe
  misc_feature (1)..(25): SEQ ID NO: 4559; WAN0249PZ_at; Start 147; Stop 171
tccagtctcaaacatatattataga

SEQ ID NO: 30009 - DNA, 25 bp, Artificial
  probe
  misc_feature (1)..(25): SEQ ID NO: 4559; WAN0249PZ_at; Start 133; Stop 157
aaaaagactggcaatccagtctcaa

SEQ ID NO: 30010 - DNA, 25 bp, Artificial
  probe
  misc_feature (1)..(25): SEQ ID NO: 4559; WAN0249PZ_at; Start 140; Stop 164
ctggcaatccagtctcaaacatata

SEQ ID NO: 30011 - DNA, 25 bp, Artificial
  probe
  misc_feature (1)..(25): SEQ ID NO: 4559; WAN0249PZ_at; Start 118; Stop 142
gattttgaccatcataaaaagactg

SEQ ID NO: 30012 - DNA, 25 bp, Artificial
  probe
  misc_feature (1)..(25): SEQ ID NO: 4559; WAN0249PZ_at; Start 119; Stop 143
attttgaccatcataaaaagactgg

SEQ ID NO: 30013 - DNA, 25 bp, Artificial
  probe
  misc_feature (1)..(25): SEQ ID NO: 4559; WAN0249PZ_at; Start 130; Stop 154
cataaaaagactggcaatccagtct

SEQ ID NO: 30014 - DNA, 25 bp, Artificial
  probe
  misc_feature (1)..(25): SEQ ID NO: 4559; WAN0249PZ_at; Start 89; Stop 113
cacattcagaaaagagaaaaaagtc

SEQ ID NO: 30015 - DNA, 25 bp, Artificial
  probe
  misc_feature (1)..(25): SEQ ID NO: 4559; WAN0249PZ_at; Start 149; Stop 173
cagtctcaaacatatattatagaaa

SEQ ID NO: 30016 - DNA, 25 bp, Artificial
  probe
  misc_feature (1)..(25): SEQ ID NO: 4559; WAN0249PZ_at; Start 126; Stop 150
ccatcataaaaagactggcaatcca

SEQ ID NO: 30017 - DNA, 25 bp, Artificial
  probe
  misc_feature (1)..(25): SEQ ID NO: 4559; WAN0249PZ_at; Start 132; Stop 156
taaaaagactggcaatccagtctca

SEQ ID NO: 30018 - DNA, 25 bp, Artificial
  probe
  misc_feature (1)..(25): SEQ ID NO: 4559; WAN0249PZ_at; Start 124; Stop 148
gaccatcataaaaagactggcaatc

SEQ ID NO: 30019 - DNA, 25 bp, Artificial
  probe
  misc_feature (1)..(25): SEQ ID NO: 4559; WAN0249PZ_at; Start 122; Stop 146
ttgaccatcataaaaagactggcaa

SEQ ID NO: 30020 - DNA, 25 bp, Artificial
  probe
  misc_feature (1)..(25): SEQ ID NO: 4559; WAN0249PZ_at; Start 111; Stop 135
gtctgttgattttgaccatcataaa

SEQ ID NO: 30021 - DNA, 25 bp, Artificial
  probe
  misc_feature (1)..(25): SEQ ID NO: 4559; WAN0249PZ_at; Start 107; Stop 131
aaaagtctgttgattttgaccatca

SEQ ID NO: 30022 - DNA, 25 bp, Artificial
  probe
  misc_feature (1)..(25): SEQ ID NO: 4559; WAN0249PZ_at; Start 109; Stop 133
aagtctgttgattttgaccatcata

SEQ ID NO: 30023 - DNA, 25 bp, Artificial
  probe
  misc_feature (1)..(25): SEQ ID NO: 4559; WAN0249PZ_at; Start 91; Stop 115
cattcagaaaagagaaaaaagtctg

SEQ ID NO: 30024 - DNA, 25 bp, Artificial
  probe
  misc_feature (1)..(25): SEQ ID NO: 4559; WAN0249PZ_at; Start 94; Stop 118
tcagaaaagagaaaaaagtctgttg

SEQ ID NO: 30025 - DNA, 25 bp, Artificial
  probe
  misc_feature (1)..(25): SEQ ID NO: 4559; WAN0249PZ_at; Start 155; Stop 179
caaacatatattatagaaattctcc

SEQ ID NO: 30026 - DNA, 25 bp, Artificial
  probe
  misc_feature (1)..(25): SEQ ID NO: 4559; WAN0249PZ_at; Start 142; Stop 166
ggcaatccagtctcaaacatatatt

SEQ ID NO: 30027 - DNA, 25 bp, Artificial
  probe
  misc_feature (1)..(25): SEQ ID NO: 4559; WAN0249PZ_at; Start 114; Stop 138
tgttgattttgaccatcataaaaag

SEQ ID NO: 30028 - DNA, 25 bp, Artificial
  probe
  misc_feature (1)..(25): SEQ ID NO: 4559; WAN0249PZ_at; Start 143; Stop 167
gcaatccagtctcaaacatatatta

SEQ ID NO: 30029 - DNA, 25 bp, Artificial
  probe
  misc_feature (1)..(25): SEQ ID NO: 4559; WAN0249PZ_at; Start 84; Stop 108
tataacacattcagaaaagagaaaa

SEQ ID NO: 30030 - DNA, 25 bp, Artificial
  probe
  misc_feature (1)..(25): SEQ ID NO: 4559; WAN0249PZ_at; Start 108; Stop 132
aaagtctgttgattttgaccatcat

SEQ ID NO: 30031 - DNA, 25 bp, Artificial
  probe
  misc_feature (1)..(25): SEQ ID NO: 4559; WAN0249PZ_at; Start 121; Stop 145
tttgaccatcataaaaagactggca

SEQ ID NO: 30032 - DNA, 25 bp, Artificial
  probe
  misc_feature (1)..(25): SEQ ID NO: 4559; WAN0249PZ_at; Start 95; Stop 119
cagaaaagagaaaaaagtctgttga

SEQ ID NO: 30033 - DNA, 25 bp, Artificial
  probe
  misc_feature (1)..(25): SEQ ID NO: 4559; WAN0249PZ_at; Start 104; Stop 128
gaaaaaagtctgttgattttgacca

SEQ ID NO: 30034 - DNA, 25 bp, Artificial
  probe
  misc_feature (1)..(25): SEQ ID NO: 4559; WAN0249PZ_at; Start 129; Stop 153
tcataaaaagactggcaatccagtc

SEQ ID NO: 30035 - DNA, 25 bp, Artificial
  probe
  misc_feature (1)..(25): SEQ ID NO: 4559; WAN0249PZ_at; Start 135; Stop 159
aaagactggcaatccagtctcaaac

SEQ ID NO: 30036 - DNA, 25 bp, Artificial
  probe
  misc_feature (1)..(25): SEQ ID NO: 4559; WAN0249PZ_at; Start 146; Stop 170
atccagtctcaaacatatattatag

SEQ ID NO: 30037 - DNA, 25 bp, Artificial
  probe
  misc_feature (1)..(25): SEQ ID NO: 4559; WAN0249PZ_at; Start 127; Stop 151
catcataaaaagactggcaatccag

SEQ ID NO: 30038 - DNA, 25 bp, Artificial
  probe
  misc_feature (1)..(25): SEQ ID NO: 4559; WAN0249PZ_at; Start 138; Stop 162
gactggcaatccagtctcaaacata

SEQ ID NO: 30039 - DNA, 25 bp, Artificial
  probe
  misc_feature (1)..(25): SEQ ID NO: 4559; WAN0249PZ_at; Start 106; Stop 130
aaaaagtctgttgattttgaccatc

SEQ ID NO: 30040 - DNA, 25 bp, Artificial
  probe
  misc_feature (1)..(25): SEQ ID NO: 4559; WAN0249PZ_at; Start 123; Stop 147
tgaccatcataaaaagactggcaat

SEQ ID NO: 30041 - DNA, 25 bp, Artificial
  probe
  misc_feature (1)..(25): SEQ ID NO: 586; WAN0249Q2_at; Start 98; Stop 122
caagctgtcaagaaattacagttat

SEQ ID NO: 30042 - DNA, 25 bp, Artificial
  probe
  misc_feature (1)..(25): SEQ ID NO: 586; WAN0249Q2_at; Start 95; Stop 119
gggcaagctgtcaagaaattacagt

SEQ ID NO: 30043 - DNA, 25 bp, Artificial
  probe
  misc_feature (1)..(25): SEQ ID NO: 586; WAN0249Q2_at; Start 101; Stop 125
gctgtcaagaaattacagttatttt

SEQ ID NO: 30044 - DNA, 25 bp, Artificial
  probe
  misc_feature (1)..(25): SEQ ID NO: 586; WAN0249Q2_at; Start 136; Stop 160
gaagcagaaaaatttcattttctac

SEQ ID NO: 30045 - DNA, 25 bp, Artificial
  probe
  misc_feature (1)..(25): SEQ ID NO: 586; WAN0249Q2_at; Start 93; Stop 117
aagggcaagctgtcaagaaattaca

SEQ ID NO: 30046 - DNA, 25 bp, Artificial
  probe
  misc_feature (1)..(25): SEQ ID NO: 586; WAN0249Q2_at; Start 67; Stop 91
cagtctactatatatcataatggac

SEQ ID NO: 30047 - DNA, 25 bp, Artificial
  probe
  misc_feature (1)..(25): SEQ ID NO: 586; WAN0249Q2_at; Start 79; Stop 103
tatcataatggacaaagggcaagct

SEQ ID NO: 30048 - DNA, 25 bp, Artificial
  probe
  misc_feature (1)..(25): SEQ ID NO: 586; WAN0249Q2_at; Start 89; Stop 113
gacaaagggcaagctgtcaagaaat

SEQ ID NO: 30049 - DNA, 25 bp, Artificial
  probe
  misc_feature (1)..(25): SEQ ID NO: 586; WAN0249Q2_at; Start 82; Stop 106
cataatggacaaagggcaagctgtc

SEQ ID NO: 30050 - DNA, 25 bp, Artificial
  probe
  misc_feature (1)..(25): SEQ ID NO: 586; WAN0249Q2_at; Start 91; Stop 115
caaagggcaagctgtcaagaaatta

SEQ ID NO: 30051 - DNA, 25 bp, Artificial
  probe
  misc_feature (1)..(25): SEQ ID NO: 586; WAN0249Q2_at; Start 75; Stop 99
tatatatcataatggacaaagggca

SEQ ID NO: 30052 - DNA, 25 bp, Artificial
  probe
  misc_feature (1)..(25): SEQ ID NO: 586; WAN0249Q2_at; Start 78; Stop 102
atatcataatggacaaagggcaagc

SEQ ID NO: 30053 - DNA, 25 bp, Artificial
  probe
  misc_feature (1)..(25): SEQ ID NO: 586; WAN0249Q2_at; Start 72; Stop 96
tactatatatcataatggacaaagg

SEQ ID NO: 30054 - DNA, 25 bp, Artificial
  probe
  misc_feature (1)..(25): SEQ ID NO: 586; WAN0249Q2_at; Start 68; Stop 92
agtctactatatatcataatggaca

SEQ ID NO: 30055 - DNA, 25 bp, Artificial
  probe
  misc_feature (1)..(25): SEQ ID NO: 586; WAN0249Q2_at; Start 94; Stop 118
agggcaagctgtcaagaaattacag

SEQ ID NO: 30056 - DNA, 25 bp, Artificial
  probe
  misc_feature (1)..(25): SEQ ID NO: 586; WAN0249Q2_at; Start 76; Stop 100
atatatcataatggacaaagggcaa

SEQ ID NO: 30057 - DNA, 25 bp, Artificial
  probe
  misc_feature (1)..(25): SEQ ID NO: 586; WAN0249Q2_at; Start 70; Stop 94
tctactatatatcataatggacaaa

SEQ ID NO: 30058 - DNA, 25 bp, Artificial
  probe
  misc_feature (1)..(25): SEQ ID NO: 586; WAN0249Q2_at; Start 77; Stop 101
tatatcataatggacaaagggcaag

SEQ ID NO: 30059 - DNA, 25 bp, Artificial
  probe
  misc_feature (1)..(25): SEQ ID NO: 586; WAN0249Q2_at; Start 71; Stop 95
ctactatatatcataatggacaaag

SEQ ID NO: 30060 - DNA, 25 bp, Artificial
  probe
  misc_feature (1)..(25): SEQ ID NO: 586; WAN0249Q2_at; Start 87; Stop 111
tggacaaagggcaagctgtcaagaa

SEQ ID NO: 30061 - DNA, 25 bp, Artificial
  probe
  misc_feature (1)..(25): SEQ ID NO: 586; WAN0249Q2_at; Start 81; Stop 105
tcataatggacaaagggcaagctgt

SEQ ID NO: 30062 - DNA, 25 bp, Artificial
  probe
  misc_feature (1)..(25): SEQ ID NO: 586; WAN0249Q2_at; Start 73; Stop 97
actatatatcataatggacaaaggg

SEQ ID NO: 30063 - DNA, 25 bp, Artificial
  probe
  misc_feature (1)..(25): SEQ ID NO: 586; WAN0249Q2_at; Start 105; Stop 129
tcaagaaattacagttattttagta

SEQ ID NO: 30064 - DNA, 25 bp, Artificial
  probe
  misc_feature (1)..(25): SEQ ID NO: 586; WAN0249Q2_at; Start 99; Stop 123
aagctgtcaagaaattacagttatt

SEQ ID NO: 30065 - DNA, 25 bp, Artificial
  probe
  misc_feature (1)..(25): SEQ ID NO: 586; WAN0249Q2_at; Start 92; Stop 116
aaagggcaagctgtcaagaaattac

SEQ ID NO: 30066 - DNA, 25 bp, Artificial
  probe
  misc_feature (1)..(25): SEQ ID NO: 586; WAN0249Q2_at; Start 80; Stop 104
atcataatggacaaagggcaagctg

SEQ ID NO: 30067 - DNA, 25 bp, Artificial
  probe
  misc_feature (1)..(25): SEQ ID NO: 586; WAN0249Q2_at; Start 139; Stop 163
gcagaaaaatttcattttctactcc

SEQ ID NO: 30068 - DNA, 25 bp, Artificial
  probe
  misc_feature (1)..(25): SEQ ID NO: 586; WAN0249Q2_at; Start 90; Stop 114
acaaagggcaagctgtcaagaaatt

SEQ ID NO: 30069 - DNA, 25 bp, Artificial
  probe
  misc_feature (1)..(25): SEQ ID NO: 586; WAN0249Q2_at; Start 96; Stop 120
ggcaagctgtcaagaaattacagtt

SEQ ID NO: 30070 - DNA, 25 bp, Artificial
  probe
  misc_feature (1)..(25): SEQ ID NO: 586; WAN0249Q2_at; Start 88; Stop 112
ggacaaagggcaagctgtcaagaaa

SEQ ID NO: 30071 - DNA, 25 bp, Artificial
  probe
  misc_feature (1)..(25): SEQ ID NO: 586; WAN0249Q2_at; Start 103; Stop 127
tgtcaagaaattacagttattttag

SEQ ID NO: 30072 - DNA, 25 bp, Artificial
  probe
  misc_feature (1)..(25): SEQ ID NO: 586; WAN0249Q2_at; Start 74; Stop 98
ctatatatcataatggacaaagggc

SEQ ID NO: 30073 - DNA, 25 bp, Artificial
  probe
  misc_feature (1)..(25): SEQ ID NO: 586; WAN0249Q2_at; Start 83; Stop 107
ataatggacaaagggcaagctgtca

SEQ ID NO: 30074 - DNA, 25 bp, Artificial
  probe
  misc_feature (1)..(25): SEQ ID NO: 586; WAN0249Q2_at; Start 97; Stop 121
gcaagctgtcaagaaattacagtta

SEQ ID NO: 30075 - DNA, 25 bp, Artificial
  probe
  misc_feature (1)..(25): SEQ ID NO: 321; WAN0249Q3_at; Start 414; Stop 438
aaaatggtataatagtaacatcaca

SEQ ID NO: 30076 - DNA, 25 bp, Artificial
  probe
  misc_feature (1)..(25): SEQ ID NO: 321; WAN0249Q3_at; Start 72; Stop 96
aataggatgagaacaaatcgattgg

SEQ ID NO: 30077 - DNA, 25 bp, Artificial
  probe
  misc_feature (1)..(25): SEQ ID NO: 321; WAN0249Q3_at; Start 212; Stop 236
gtgaatacattaattagcattccag

SEQ ID NO: 30078 - DNA, 25 bp, Artificial
  probe
  misc_feature (1)..(25): SEQ ID NO: 321; WAN0249Q3_at; Start 335; Stop 359
gatagagcaattcatagtcatcaaa

SEQ ID NO: 30079 - DNA, 25 bp, Artificial
  probe
  misc_feature (1)..(25): SEQ ID NO: 321; WAN0249Q3_at; Start 289; Stop 313
gacttactccttgatttactgcata

SEQ ID NO: 30080 - DNA, 25 bp, Artificial
  probe
  misc_feature (1)..(25): SEQ ID NO: 321; WAN0249Q3_at; Start 297; Stop 321
ccttgatttactgcataacaatggg

SEQ ID NO: 30081 - DNA, 25 bp, Artificial
  probe
  misc_feature (1)..(25): SEQ ID NO: 321; WAN0249Q3_at; Start 430; Stop 454
aacatcacaaaattggagagagacc

SEQ ID NO: 30082 - DNA, 25 bp, Artificial
  probe
  misc_feature (1)..(25): SEQ ID NO: 321; WAN0249Q3_at; Start 167; Stop 191
gttcttcataaatcaaaaagcgaca

SEQ ID NO: 30083 - DNA, 25 bp, Artificial
  probe
  misc_feature (1)..(25): SEQ ID NO: 321; WAN0249Q3_at; Start 362; Stop 386
taatgagatacagtatacagttttt

SEQ ID NO: 30084 - DNA, 25 bp, Artificial
  probe
  misc_feature (1)..(25): SEQ ID NO: 321; WAN0249Q3_at; Start 226; Stop 250
tagcattccagttttatcttcggtc

SEQ ID NO: 30085 - DNA, 25 bp, Artificial
  probe
  misc_feature (1)..(25): SEQ ID NO: 321; WAN0249Q3_at; Start 301; Stop 325
gatttactgcataacaatgggataa

SEQ ID NO: 30086 - DNA, 25 bp, Artificial
  probe
  misc_feature (1)..(25): SEQ ID NO: 321; WAN0249Q3_at; Start 401; Stop 425
tcaaattccctcaaaaatggtataa

SEQ ID NO: 30087 - DNA, 25 bp, Artificial
  probe
  misc_feature (1)..(25): SEQ ID NO: 321; WAN0249Q3_at; Start 61; Stop 85
tagaagattgaaataggatgagaac

SEQ ID NO: 30088 - DNA, 25 bp, Artificial
  probe
  misc_feature (1)..(25): SEQ ID NO: 321; WAN0249Q3_at; Start 285; Stop 309
tcttgacttactccttgatttactg

SEQ ID NO: 30089 - DNA, 25 bp, Artificial
  probe
  misc_feature (1)..(25): SEQ ID NO: 321; WAN0249Q3_at; Start 2; Stop 26
caataaggactactgttttccaaat

SEQ ID NO: 30090 - DNA, 25 bp, Artificial
  probe
  misc_feature (1)..(25): SEQ ID NO: 321; WAN0249Q3_at; Start 310; Stop 334
cataacaatgggataaaaagtggga

SEQ ID NO: 30091 - DNA, 25 bp, Artificial
  probe
  misc_feature (1)..(25): SEQ ID NO: 321; WAN0249Q3_at; Start 20; Stop 44
tccaaatggtagtcttttattgatc

SEQ ID NO: 30092 - DNA, 25 bp, Artificial
  probe
  misc_feature (1)..(25): SEQ ID NO: 321; WAN0249Q3_at; Start 389; Stop 413
tttaaacacatttcaaattccctca

SEQ ID NO: 30093 - DNA, 25 bp, Artificial
  probe
  misc_feature (1)..(25): SEQ ID NO: 321; WAN0249Q3_at; Start 172; Stop 196
tcataaatcaaaaagcgacataggt

SEQ ID NO: 30094 - DNA, 25 bp, Artificial
  probe
  misc_feature (1)..(25): SEQ ID NO: 321; WAN0249Q3_at; Start 323; Stop 347
taaaaagtgggagatagagcaattc

SEQ ID NO: 30095 - DNA, 25 bp, Artificial
  probe
  misc_feature (1)..(25): SEQ ID NO: 321; WAN0249Q3_at; Start 7; Stop 31
aggactactgttttccaaatggtag

SEQ ID NO: 30096 - DNA, 25 bp, Artificial
  probe
  misc_feature (1)..(25): SEQ ID NO: 321; WAN0249Q3_at; Start 186; Stop 210
gcgacataggttgtcggctatttat

SEQ ID NO: 30097 - DNA, 25 bp, Artificial
  probe
  misc_feature (1)..(25): SEQ ID NO: 321; WAN0249Q3_at; Start 339; Stop 363
gagcaattcatagtcatcaaaatta

SEQ ID NO: 30098 - DNA, 25 bp, Artificial
  probe
  misc_feature (1)..(25): SEQ ID NO: 321; WAN0249Q3_at; Start 179; Stop 203
tcaaaaagcgacataggttgtcggc

SEQ ID NO: 30099 - DNA, 25 bp, Artificial
  probe
  misc_feature (1)..(25): SEQ ID NO: 321; WAN0249Q3_at; Start 69; Stop 93
tgaaataggatgagaacaaatcgat

SEQ ID NO: 30100 - DNA, 25 bp, Artificial
  probe
  misc_feature (1)..(25): SEQ ID NO: 321; WAN0249Q3_at; Start 197; Stop 221
tgtcggctatttattgtgaatacat

SEQ ID NO: 30101 - DNA, 25 bp, Artificial
  probe
  misc_feature (1)..(25): SEQ ID NO: 321; WAN0249Q3_at; Start 423; Stop 447
taatagtaacatcacaaaattggag

SEQ ID NO: 30102 - DNA, 25 bp, Artificial
  probe
  misc_feature (1)..(25): SEQ ID NO: 321; WAN0249Q3_at; Start 356; Stop 380
caaaattaatgagatacagtataca

SEQ ID NO: 30103 - DNA, 25 bp, Artificial
  probe
  misc_feature (1)..(25): SEQ ID NO: 321; WAN0249Q3_at; Start 192; Stop 216
taggttgtcggctatttattgtgaa

SEQ ID NO: 30104 - DNA, 25 bp, Artificial
  probe
  misc_feature (1)..(25): SEQ ID NO: 321; WAN0249Q3_at; Start 330; Stop 354
tgggagatagagcaattcatagtca

SEQ ID NO: 30105 - DNA, 25 bp, Artificial
  probe
  misc_feature (1)..(25): SEQ ID NO: 321; WAN0249Q3_at; Start 259; Stop 283
gtattttgtgctatacgagataagc

SEQ ID NO: 30106 - DNA, 25 bp, Artificial
  probe
  misc_feature (1)..(25): SEQ ID NO: 321; WAN0249Q3_at; Start 245; Stop 269
tcggtctaaaataagtattttgtgc

SEQ ID NO: 30107 - DNA, 25 bp, Artificial
  probe
  misc_feature (1)..(25): SEQ ID NO: 321; WAN0249Q3_at; Start 229; Stop 253
cattccagttttatcttcggtctaa

SEQ ID NO: 30108 - DNA, 25 bp, Artificial
  probe
  misc_feature (1)..(25): SEQ ID NO: 321; WAN0249Q3_at; Start 53; Stop 77
gaattctatagaagattgaaatagg

SEQ ID NO: 30109 - DNA, 25 bp, Artificial
  probe
  misc_feature (1)..(25): SEQ ID NO: 3560; WAN0249Q4_at; Start 5; Stop 29
tcatctatcaaaagatgttagaaaa

SEQ ID NO: 30110 - DNA, 25 bp, Artificial
  probe
  misc_feature (1)..(25): SEQ ID NO: 3560; WAN0249Q4_at; Start 34; Stop 58
caatttcactagaaaatgaggaaaa

SEQ ID NO: 30111 - DNA, 25 bp, Artificial
  probe
  misc_feature (1)..(25): SEQ ID NO: 3560; WAN0249Q4_at; Start 9; Stop 33
ctatcaaaagatgttagaaaaagtt

SEQ ID NO: 30112 - DNA, 25 bp, Artificial
  probe
  misc_feature (1)..(25): SEQ ID NO: 3560; WAN0249Q4_at; Start 12; Stop 36
tcaaaagatgttagaaaaagttcaa

SEQ ID NO: 30113 - DNA, 25 bp, Artificial
  probe
  misc_feature (1)..(25): SEQ ID NO: 3560; WAN0249Q4_at; Start 19; Stop 43
atgttagaaaaagttcaatttcact

SEQ ID NO: 30114 - DNA, 25 bp, Artificial
  probe
  misc_feature (1)..(25): SEQ ID NO: 3560; WAN0249Q4_at; Start 30; Stop 54
agttcaatttcactagaaaatgagg

SEQ ID NO: 30115 - DNA, 25 bp, Artificial
  probe
  misc_feature (1)..(25): SEQ ID NO: 3560; WAN0249Q4_at; Start 37; Stop 61
tttcactagaaaatgaggaaaatct

SEQ ID NO: 30116 - DNA, 25 bp, Artificial
  probe
  misc_feature (1)..(25): SEQ ID NO: 3560; WAN0249Q4_at; Start 13; Stop 37
caaaagatgttagaaaaagttcaat

SEQ ID NO: 30117 - DNA, 25 bp, Artificial
  probe
  misc_feature (1)..(25): SEQ ID NO: 3560; WAN0249Q4_at; Start 35; Stop 59
aatttcactagaaaatgaggaaaat

SEQ ID NO: 30118 - DNA, 25 bp, Artificial
  probe
  misc_feature (1)..(25): SEQ ID NO: 3560; WAN0249Q4_at; Start 7; Stop 31
atctatcaaaagatgttagaaaaag

SEQ ID NO: 30119 - DNA, 25 bp, Artificial
  probe
  misc_feature (1)..(25): SEQ ID NO: 3560; WAN0249Q4_at; Start 31; Stop 55
gttcaatttcactagaaaatgagga

SEQ ID NO: 30120 - DNA, 25 bp, Artificial
  probe
  misc_feature (1)..(25): SEQ ID NO: 3560; WAN0249Q4_at; Start 17; Stop 41
agatgttagaaaaagttcaatttca

SEQ ID NO: 30121 - DNA, 25 bp, Artificial
  probe
  misc_feature (1)..(25): SEQ ID NO: 3560; WAN0249Q4_at; Start 22; Stop 46
ttagaaaaagttcaatttcactaga

SEQ ID NO: 30122 - DNA, 25 bp, Artificial
  probe
  misc_feature (1)..(25): SEQ ID NO: 3560; WAN0249Q4_at; Start 33; Stop 57
tcaatttcactagaaaatgaggaaa

SEQ ID NO: 30123 - DNA, 25 bp, Artificial
  probe
  misc_feature (1)..(25): SEQ ID NO: 3560; WAN0249Q4_at; Start 8; Stop 32
tctatcaaaagatgttagaaaaagt

SEQ ID NO: 30124 - DNA, 25 bp, Artificial
  probe
  misc_feature (1)..(25): SEQ ID NO: 3560; WAN0249Q4_at; Start 32; Stop 56
ttcaatttcactagaaaatgaggaa

SEQ ID NO: 30125 - DNA, 25 bp, Artificial
  probe
  misc_feature (1)..(25): SEQ ID NO: 3560; WAN0249Q4_at; Start 27; Stop 51
aaaagttcaatttcactagaaaatg

SEQ ID NO: 30126 - DNA, 25 bp, Artificial
  probe
  misc_feature (1)..(25): SEQ ID NO: 3560; WAN0249Q4_at; Start 23; Stop 47
tagaaaaagttcaatttcactagaa

SEQ ID NO: 30127 - DNA, 25 bp, Artificial
  probe
  misc_feature (1)..(25): SEQ ID NO: 3560; WAN0249Q4_at; Start 20; Stop 44
tgttagaaaaagttcaatttcacta

SEQ ID NO: 30128 - DNA, 25 bp, Artificial
  probe
  misc_feature (1)..(25): SEQ ID NO: 3560; WAN0249Q4_at; Start 2; Stop 26
aagtcatctatcaaaagatgttaga

SEQ ID NO: 30129 - DNA, 25 bp, Artificial
  probe
  misc_feature (1)..(25): SEQ ID NO: 3560; WAN0249Q4_at; Start 18; Stop 42
gatgttagaaaaagttcaatttcac

SEQ ID NO: 30130 - DNA, 25 bp, Artificial
  probe
  misc_feature (1)..(25): SEQ ID NO: 3560; WAN0249Q4_at; Start 29; Stop 53
aagttcaatttcactagaaaatgag

SEQ ID NO: 30131 - DNA, 25 bp, Artificial
  probe
  misc_feature (1)..(25): SEQ ID NO: 3560; WAN0249Q4_at; Start 10; Stop 34
tatcaaaagatgttagaaaaagttc

SEQ ID NO: 30132 - DNA, 25 bp, Artificial
  probe
  misc_feature (1)..(25): SEQ ID NO: 3560; WAN0249Q4_at; Start 36; Stop 60
atttcactagaaaatgaggaaaatc

SEQ ID NO: 30133 - DNA, 25 bp, Artificial
  probe
  misc_feature (1)..(25): SEQ ID NO: 3560; WAN0249Q4_at; Start 1; Stop 25
gaagtcatctatcaaaagatgttag

SEQ ID NO: 30134 - DNA, 25 bp, Artificial
  probe
  misc_feature (1)..(25): SEQ ID NO: 3560; WAN0249Q4_at; Start 3; Stop 27
agtcatctatcaaaagatgttagaa

SEQ ID NO: 30135 - DNA, 25 bp, Artificial
  probe
  misc_feature (1)..(25): SEQ ID NO: 3560; WAN0249Q4_at; Start 4; Stop 28
gtcatctatcaaaagatgttagaaa

SEQ ID NO: 30136 - DNA, 25 bp, Artificial
  probe
  misc_feature (1)..(25): SEQ ID NO: 3560; WAN0249Q4_at; Start 6; Stop 30
catctatcaaaagatgttagaaaaa

SEQ ID NO: 30137 - DNA, 25 bp, Artificial
  probe
  misc_feature (1)..(25): SEQ ID NO: 3560; WAN0249Q4_at; Start 28; Stop 52
aaagttcaatttcactagaaaatga

SEQ ID NO: 30138 - DNA, 25 bp, Artificial
  probe
  misc_feature (1)..(25): SEQ ID NO: 3560; WAN0249Q4_at; Start 11; Stop 35
atcaaaagatgttagaaaaagttca

SEQ ID NO: 30139 - DNA, 25 bp, Artificial
  probe
  misc_feature (1)..(25): SEQ ID NO: 274; WAN0249Q5_x_at; Start 20; Stop 44
gcataaaatcaaggtttttgaacac

SEQ ID NO: 30140 - DNA, 25 bp, Artificial
  probe
  misc_feature (1)..(25): SEQ ID NO: 274; WAN0249Q5_x_at; Start 31; Stop 55
aggtttttgaacacctgattttatg

SEQ ID NO: 30141 - DNA, 25 bp, Artificial
  probe
  misc_feature (1)..(25): SEQ ID NO: 274; WAN0249Q5_x_at; Start 37; Stop 61
ttgaacacctgattttatgcgtttt

SEQ ID NO: 30142 - DNA, 25 bp, Artificial
  probe
  misc_feature (1)..(25): SEQ ID NO: 274; WAN0249Q5_x_at; Start 36; Stop 60
tttgaacacctgattttatgcgttt

SEQ ID NO: 30143 - DNA, 25 bp, Artificial
  probe
  misc_feature (1)..(25): SEQ ID NO: 274; WAN0249Q5_x_at; Start 19; Stop 43
cgcataaaatcaaggtttttgaaca

SEQ ID NO: 30144 - DNA, 25 bp, Artificial
  probe
  misc_feature (1)..(25): SEQ ID NO: 274; WAN0249Q5_x_at; Start 11; Stop 35
tgataaaacgcataaaatcaaggtt

SEQ ID NO: 30145 - DNA, 25 bp, Artificial
  probe
  misc_feature (1)..(25): SEQ ID NO: 274; WAN0249Q5_x_at; Start 34; Stop 58
tttttgaacacctgattttatgcgt

SEQ ID NO: 30146 - DNA, 25 bp, Artificial
  probe
  misc_feature (1)..(25): SEQ ID NO: 274; WAN0249Q5_x_at; Start 32; Stop 56
ggtttttgaacacctgattttatgc

SEQ ID NO: 30147 - DNA, 25 bp, Artificial
  probe
  misc_feature (1)..(25): SEQ ID NO: 274; WAN0249Q5_x_at; Start 33; Stop 57
gtttttgaacacctgattttatgcg

SEQ ID NO: 30148 - DNA, 25 bp, Artificial
  probe
  misc_feature (1)..(25): SEQ ID NO: 274; WAN0249Q5_x_at; Start 27; Stop 51
atcaaggtttttgaacacctgattt

SEQ ID NO: 30149 - DNA, 25 bp, Artificial
  probe
  misc_feature (1)..(25): SEQ ID NO: 274; WAN0249Q5_x_at; Start 35; Stop 59
ttttgaacacctgattttatgcgtt

SEQ ID NO: 30150 - DNA, 25 bp, Artificial
  probe
  misc_feature (1)..(25): SEQ ID NO: 274; WAN0249Q5_x_at; Start 10; Stop 34
atgataaaacgcataaaatcaaggt

SEQ ID NO: 30151 - DNA, 25 bp, Artificial
  probe
  misc_feature (1)..(25): SEQ ID NO: 274; WAN0249Q5_x_at; Start 26; Stop 50
aatcaaggtttttgaacacctgatt

SEQ ID NO: 30152 - DNA, 25 bp, Artificial
  probe
  misc_feature (1)..(25): SEQ ID NO: 274; WAN0249Q5_x_at; Start 25; Stop 49
aaatcaaggtttttgaacacctgat

SEQ ID NO: 30153 - DNA, 25 bp, Artificial
  probe
  misc_feature (1)..(25): SEQ ID NO: 274; WAN0249Q5_x_at; Start 38; Stop 62
tgaacacctgattttatgcgttttt

SEQ ID NO: 30154 - DNA, 25 bp, Artificial
  probe
  misc_feature (1)..(25): SEQ ID NO: 278; WAN0249Q6_at; Start 221; Stop 245
ttcccaaaaggttgctgtataatgc

SEQ ID NO: 30155 - DNA, 25 bp, Artificial
  probe
  misc_feature (1)..(25): SEQ ID NO: 278; WAN0249Q6_at; Start 227; Stop 251
aaaggttgctgtataatgcaagaca

SEQ ID NO: 30156 - DNA, 25 bp, Artificial
  probe
  misc_feature (1)..(25): SEQ ID NO: 278; WAN0249Q6_at; Start 234; Stop 258
gctgtataatgcaagacatttttct

SEQ ID NO: 30157 - DNA, 25 bp, Artificial
  probe
  misc_feature (1)..(25): SEQ ID NO: 278; WAN0249Q6_at; Start 148; Stop 172
gactaactgtccaataataatctac

SEQ ID NO: 30158 - DNA, 25 bp, Artificial
  probe
  misc_feature (1)..(25): SEQ ID NO: 278; WAN0249Q6_at; Start 102; Stop 126
tagcaaggcttctactgattataac

SEQ ID NO: 30159 - DNA, 25 bp, Artificial
  probe
  misc_feature (1)..(25): SEQ ID NO: 278; WAN0249Q6_at; Start 76; Stop 100
tatacataaactaacctcctcatta

SEQ ID NO: 30160 - DNA, 25 bp, Artificial
  probe
  misc_feature (1)..(25): SEQ ID NO: 278; WAN0249Q6_at; Start 85; Stop 109
actaacctcctcattattagcaagg

SEQ ID NO: 30161 - DNA, 25 bp, Artificial
  probe
  misc_feature (1)..(25): SEQ ID NO: 278; WAN0249Q6_at; Start 137; Stop 161
gactacttcaagactaactgtccaa

SEQ ID NO: 30162 - DNA, 25 bp, Artificial
  probe
  misc_feature (1)..(25): SEQ ID NO: 278; WAN0249Q6_at; Start 126; Stop 150
cctaattcttagactacttcaagac

SEQ ID NO: 30163 - DNA, 25 bp, Artificial
  probe
  misc_feature (1)..(25): SEQ ID NO: 278; WAN0249Q6_at; Start 155; Stop 179
tgtccaataataatctacagataaa

SEQ ID NO: 30164 - DNA, 25 bp, Artificial
  probe
  misc_feature (1)..(25): SEQ ID NO: 278; WAN0249Q6_at; Start 132; Stop 156
tcttagactacttcaagactaactg

SEQ ID NO: 30165 - DNA, 25 bp, Artificial
  probe
  misc_feature (1)..(25): SEQ ID NO: 278; WAN0249Q6_at; Start 218; Stop 242
tcattcccaaaaggttgctgtataa

SEQ ID NO: 30166 - DNA, 25 bp, Artificial
  probe
  misc_feature (1)..(25): SEQ ID NO: 278; WAN0249Q6_at; Start 216; Stop 240
actcattcccaaaaggttgctgtat

SEQ ID NO: 30167 - DNA, 25 bp, Artificial
  probe
  misc_feature (1)..(25): SEQ ID NO: 278; WAN0249Q6_at; Start 168; Stop 192
tctacagataaatcatccactctta

SEQ ID NO: 30168 - DNA, 25 bp, Artificial
  probe
  misc_feature (1)..(25): SEQ ID NO: 278; WAN0249Q6_at; Start 135; Stop 159
tagactacttcaagactaactgtcc

SEQ ID NO: 30169 - DNA, 25 bp, Artificial
  probe
  misc_feature (1)..(25): SEQ ID NO: 278; WAN0249Q6_at; Start 272; Stop 296
tttccttaccctcaatttagtgagc

SEQ ID NO: 30170 - DNA, 25 bp, Artificial
  probe
  misc_feature (1)..(25): SEQ ID NO: 278; WAN0249Q6_at; Start 165; Stop 189
taatctacagataaatcatccactc

SEQ ID NO: 30171 - DNA, 25 bp, Artificial
  probe
  misc_feature (1)..(25): SEQ ID NO: 278; WAN0249Q6_at; Start 230; Stop 254
ggttgctgtataatgcaagacattt

SEQ ID NO: 30172 - DNA, 25 bp, Artificial
  probe
  misc_feature (1)..(25): SEQ ID NO: 278; WAN0249Q6_at; Start 87; Stop 111
taacctcctcattattagcaaggct

SEQ ID NO: 30173 - DNA, 25 bp, Artificial
  probe
  misc_feature (1)..(25): SEQ ID NO: 278; WAN0249Q6_at; Start 183; Stop 207
tccactcttaatcaaattttattca

SEQ ID NO: 30174 - DNA, 25 bp, Artificial
  probe
  misc_feature (1)..(25): SEQ ID NO: 278; WAN0249Q6_at; Start 225; Stop 249
caaaaggttgctgtataatgcaaga

SEQ ID NO: 30175 - DNA, 25 bp, Artificial
  probe
  misc_feature (1)..(25): SEQ ID NO: 278; WAN0249Q6_at; Start 104; Stop 128
gcaaggcttctactgattataacct

SEQ ID NO: 30176 - DNA, 25 bp, Artificial
  probe
  misc_feature (1)..(25): SEQ ID NO: 278; WAN0249Q6_at; Start 240; Stop 264
taatgcaagacatttttcttactgc

SEQ ID NO: 30177 - DNA, 25 bp, Artificial
  probe
  misc_feature (1)..(25): SEQ ID NO: 278; WAN0249Q6_at; Start 278; Stop 302
taccctcaatttagtgagctaataa

SEQ ID NO: 30178 - DNA, 25 bp, Artificial
  probe
  misc_feature (1)..(25): SEQ ID NO: 278; WAN0249Q6_at; Start 96; Stop 120
cattattagcaaggcttctactgat

SEQ ID NO: 30179 - DNA, 25 bp, Artificial
  probe
  misc_feature (1)..(25): SEQ ID NO: 278; WAN0249Q6_at; Start 223; Stop 247
cccaaaaggttgctgtataatgcaa

SEQ ID NO: 30180 - DNA, 25 bp, Artificial
  probe
  misc_feature (1)..(25): SEQ ID NO: 278; WAN0249Q6_at; Start 174; Stop 198
gataaatcatccactcttaatcaaa

SEQ ID NO: 30181 - DNA, 25 bp, Artificial
  probe
  misc_feature (1)..(25): SEQ ID NO: 278; WAN0249Q6_at; Start 90; Stop 114
cctcctcattattagcaaggcttct

SEQ ID NO: 30182 - DNA, 25 bp, Artificial
  probe
  misc_feature (1)..(25): SEQ ID NO: 278; WAN0249Q6_at; Start 108; Stop 132
ggcttctactgattataacctaatt

SEQ ID NO: 30183 - DNA, 25 bp, Artificial
  probe
  misc_feature (1)..(25): SEQ ID NO: 278; WAN0249Q6_at; Start 247; Stop 271
agacatttttcttactgcttttact

SEQ ID NO: 30184 - DNA, 25 bp, Artificial
  probe
  misc_feature (1)..(25): SEQ ID NO: 278; WAN0249Q6_at; Start 140; Stop 164
tacttcaagactaactgtccaataa

SEQ ID NO: 30185 - DNA, 25 bp, Artificial
  probe
  misc_feature (1)..(25): SEQ ID NO: 278; WAN0249Q6_at; Start 93; Stop 117
cctcattattagcaaggcttctact

SEQ ID NO: 30186 - DNA, 25 bp, Artificial
  probe
  misc_feature (1)..(25): SEQ ID NO: 278; WAN0249Q6_at; Start 274; Stop 298
tccttaccctcaatttagtgagcta

SEQ ID NO: 30187 - DNA, 25 bp, Artificial
  probe
  misc_feature (1)..(25): SEQ ID NO: 278; WAN0249Q6_at; Start 118; Stop 142
gattataacctaattcttagactac

SEQ ID NO: 30188 - DNA, 25 bp, Artificial
  probe
  misc_feature (1)..(25): SEQ ID NO: 4611; WAN0249Q7_at; Start 26; Stop 50
actcgacttcaggaaaaaatgaagc

SEQ ID NO: 30189 - DNA, 25 bp, Artificial
  probe
  misc_feature (1)..(25): SEQ ID NO: 4611; WAN0249Q7_at; Start 67; Stop 91
aaacgcatagtacaaggtttgtact

SEQ ID NO: 30190 - DNA, 25 bp, Artificial
  probe
  misc_feature (1)..(25): SEQ ID NO: 4611; WAN0249Q7_at; Start 10; Stop 34
atgagtcagggaaaaaactcgactt

SEQ ID NO: 30191 - DNA, 25 bp, Artificial
  probe
  misc_feature (1)..(25): SEQ ID NO: 4611; WAN0249Q7_at; Start 3; Stop 27
caaatcaatgagtcagggaaaaaac

SEQ ID NO: 30192 - DNA, 25 bp, Artificial
  probe
  misc_feature (1)..(25): SEQ ID NO: 4611; WAN0249Q7_at; Start 41; Stop 65
aaaatgaagcaaacattcccacaat

SEQ ID NO: 30193 - DNA, 25 bp, Artificial
  probe
  misc_feature (1)..(25): SEQ ID NO: 4611; WAN0249Q7_at; Start 5; Stop 29
aatcaatgagtcagggaaaaaactc

SEQ ID NO: 30194 - DNA, 25 bp, Artificial
  probe
  misc_feature (1)..(25): SEQ ID NO: 4611; WAN0249Q7_at; Start 13; Stop 37
agtcagggaaaaaactcgacttcag

SEQ ID NO: 30195 - DNA, 25 bp, Artificial
  probe
  misc_feature (1)..(25): SEQ ID NO: 4611; WAN0249Q7_at; Start 43; Stop 67
aatgaagcaaacattcccacaataa

SEQ ID NO: 30196 - DNA, 25 bp, Artificial
  probe
  misc_feature (1)..(25): SEQ ID NO: 4611; WAN0249Q7_at; Start 8; Stop 32
caatgagtcagggaaaaaactcgac

SEQ ID NO: 30197 - DNA, 25 bp, Artificial
  probe
  misc_feature (1)..(25): SEQ ID NO: 4611; WAN0249Q7_at; Start 12; Stop 36
gagtcagggaaaaaactcgacttca

SEQ ID NO: 30198 - DNA, 25 bp, Artificial
  probe
  misc_feature (1)..(25): SEQ ID NO: 4611; WAN0249Q7_at; Start 6; Stop 30
atcaatgagtcagggaaaaaactcg

SEQ ID NO: 30199 - DNA, 25 bp, Artificial
  probe
  misc_feature (1)..(25): SEQ ID NO: 4611; WAN0249Q7_at; Start 30; Stop 54
gacttcaggaaaaaatgaagcaaac

SEQ ID NO: 30200 - DNA, 25 bp, Artificial
  probe
  misc_feature (1)..(25): SEQ ID NO: 4611; WAN0249Q7_at; Start 4; Stop 28
aaatcaatgagtcagggaaaaaact

SEQ ID NO: 30201 - DNA, 25 bp, Artificial
  probe
  misc_feature (1)..(25): SEQ ID NO: 4611; WAN0249Q7_at; Start 27; Stop 51
ctcgacttcaggaaaaaatgaagca

SEQ ID NO: 30202 - DNA, 25 bp, Artificial
  probe
  misc_feature (1)..(25): SEQ ID NO: 4611; WAN0249Q7_at; Start 39; Stop 63
aaaaaatgaagcaaacattcccaca

SEQ ID NO: 30203 - DNA, 25 bp, Artificial
  probe
  misc_feature (1)..(25): SEQ ID NO: 4611; WAN0249Q7_at; Start 1; Stop 25
tccaaatcaatgagtcagggaaaaa

SEQ ID NO: 30204 - DNA, 25 bp, Artificial
  probe
  misc_feature (1)..(25): SEQ ID NO: 4611; WAN0249Q7_at; Start 15; Stop 39
tcagggaaaaaactcgacttcagga

SEQ ID NO: 30205 - DNA, 25 bp, Artificial
  probe
  misc_feature (1)..(25): SEQ ID NO: 4611; WAN0249Q7_at; Start 35; Stop 59
caggaaaaaatgaagcaaacattcc

SEQ ID NO: 30206 - DNA, 25 bp, Artificial
  probe
  misc_feature (1)..(25): SEQ ID NO: 4611; WAN0249Q7_at; Start 70; Stop 94
cgcatagtacaaggtttgtactgcc

SEQ ID NO: 30207 - DNA, 25 bp, Artificial
  probe
  misc_feature (1)..(25): SEQ ID NO: 4611; WAN0249Q7_at; Start 11; Stop 35
tgagtcagggaaaaaactcgacttc

SEQ ID NO: 30208 - DNA, 25 bp, Artificial
  probe
  misc_feature (1)..(25): SEQ ID NO: 4611; WAN0249Q7_at; Start 72; Stop 96
catagtacaaggtttgtactgcccc

SEQ ID NO: 30209 - DNA, 25 bp, Artificial
  probe
  misc_feature (1)..(25): SEQ ID NO: 4611; WAN0249Q7_at; Start 32; Stop 56
cttcaggaaaaaatgaagcaaacat

SEQ ID NO: 30210 - DNA, 25 bp, Artificial
  probe
  misc_feature (1)..(25): SEQ ID NO: 4611; WAN0249Q7_at; Start 9; Stop 33
aatgagtcagggaaaaaactcgact

SEQ ID NO: 30211 - DNA, 25 bp, Artificial
  probe
  misc_feature (1)..(25): SEQ ID NO: 4611; WAN0249Q7_at; Start 71; Stop 95
gcatagtacaaggtttgtactgccc

SEQ ID NO: 30212 - DNA, 25 bp, Artificial
  probe
  misc_feature (1)..(25): SEQ ID NO: 4611; WAN0249Q7_at; Start 65; Stop 89
taaaacgcatagtacaaggtttgta

SEQ ID NO: 30213 - DNA, 25 bp, Artificial
  probe
  misc_feature (1)..(25): SEQ ID NO: 4611; WAN0249Q7_at; Start 37; Stop 61
ggaaaaaatgaagcaaacattccca

SEQ ID NO: 30214 - DNA, 25 bp, Artificial
  probe
  misc_feature (1)..(25): SEQ ID NO: 4611; WAN0249Q7_at; Start 45; Stop 69
tgaagcaaacattcccacaataaaa

SEQ ID NO: 30215 - DNA, 25 bp, Artificial
  probe
  misc_feature (1)..(25): SEQ ID NO: 4611; WAN0249Q7_at; Start 38; Stop 62
gaaaaaatgaagcaaacattcccac

SEQ ID NO: 30216 - DNA, 25 bp, Artificial
  probe
  misc_feature (1)..(25): SEQ ID NO: 4611; WAN0249Q7_at; Start 68; Stop 92
aacgcatagtacaaggtttgtactg

SEQ ID NO: 30217 - DNA, 25 bp, Artificial
  probe
  misc_feature (1)..(25): SEQ ID NO: 4611; WAN0249Q7_at; Start 28; Stop 52
tcgacttcaggaaaaaatgaagcaa

SEQ ID NO: 30218 - DNA, 25 bp, Artificial
  probe
  misc_feature (1)..(25): SEQ ID NO: 4611; WAN0249Q7_at; Start 2; Stop 26
ccaaatcaatgagtcagggaaaaaa

SEQ ID NO: 30219 - DNA, 25 bp, Artificial
  probe
  misc_feature (1)..(25): SEQ ID NO: 4611; WAN0249Q7_at; Start 25; Stop 49
aactcgacttcaggaaaaaatgaag

SEQ ID NO: 30220 - DNA, 25 bp, Artificial
  probe
  misc_feature (1)..(25): SEQ ID NO: 4611; WAN0249Q7_at; Start 34; Stop 58
tcaggaaaaaatgaagcaaacattc

SEQ ID NO: 30221 - DNA, 25 bp, Artificial
  probe
  misc_feature (1)..(25): SEQ ID NO: 4611; WAN0249Q7_at; Start 29; Stop 53
cgacttcaggaaaaaatgaagcaaa

SEQ ID NO: 30222 - DNA, 25 bp, Artificial
  probe
  misc_feature (1)..(25): SEQ ID NO: 3318; WAN0249Q8_at; Start 241; Stop 265
aaatataacacaatagagatctctc

SEQ ID NO: 30223 - DNA, 25 bp, Artificial
  probe
  misc_feature (1)..(25): SEQ ID NO: 3318; WAN0249Q8_at; Start 39; Stop 63
ttagacgttttctctatccagattg

SEQ ID NO: 30224 - DNA, 25 bp, Artificial
  probe
  misc_feature (1)..(25): SEQ ID NO: 3318; WAN0249Q8_at; Start 24; Stop 48
tcattataacatgatttagacgttt

SEQ ID NO: 30225 - DNA, 25 bp, Artificial
  probe
  misc_feature (1)..(25): SEQ ID NO: 3318; WAN0249Q8_at; Start 52; Stop 76
ctatccagattgcttttttataaca

SEQ ID NO: 30226 - DNA, 25 bp, Artificial
  probe
  misc_feature (1)..(25): SEQ ID NO: 3318; WAN0249Q8_at; Start 213; Stop 237
cattcttttattgtagaaccgtgtt

SEQ ID NO: 30227 - DNA, 25 bp, Artificial
  probe
  misc_feature (1)..(25): SEQ ID NO: 3318; WAN0249Q8_at; Start 207; Stop 231
caagaacattcttttattgtagaac

SEQ ID NO: 30228 - DNA, 25 bp, Artificial
  probe
  misc_feature (1)..(25): SEQ ID NO: 3318; WAN0249Q8_at; Start 237; Stop 261
tataaaatataacacaatagagatc

SEQ ID NO: 30229 - DNA, 25 bp, Artificial
  probe
  misc_feature (1)..(25): SEQ ID NO: 3318; WAN0249Q8_at; Start 209; Stop 233
agaacattcttttattgtagaaccg

SEQ ID NO: 30230 - DNA, 25 bp, Artificial
  probe
  misc_feature (1)..(25): SEQ ID NO: 3318; WAN0249Q8_at; Start 28; Stop 52
tataacatgatttagacgttttctc

SEQ ID NO: 30231 - DNA, 25 bp, Artificial
  probe
  misc_feature (1)..(25): SEQ ID NO: 3318; WAN0249Q8_at; Start 12; Stop 36
aattctattgcttcattataacatg

SEQ ID NO: 30232 - DNA, 25 bp, Artificial
  probe
  misc_feature (1)..(25): SEQ ID NO: 3318; WAN0249Q8_at; Start 221; Stop 245
tattgtagaaccgtgttataaaata

SEQ ID NO: 30233 - DNA, 25 bp, Artificial
  probe
  misc_feature (1)..(25): SEQ ID NO: 3318; WAN0249Q8_at; Start 226; Stop 250
tagaaccgtgttataaaatataaca

SEQ ID NO: 30234 - DNA, 25 bp, Artificial
  probe
  misc_feature (1)..(25): SEQ ID NO: 3318; WAN0249Q8_at; Start 40; Stop 64
tagacgttttctctatccagattgc

SEQ ID NO: 30235 - DNA, 25 bp, Artificial
  probe
  misc_feature (1)..(25): SEQ ID NO: 3318; WAN0249Q8_at; Start 239; Stop 263
taaaatataacacaatagagatctc

SEQ ID NO: 30236 - DNA, 25 bp, Artificial
  probe
  misc_feature (1)..(25): SEQ ID NO: 3318; WAN0249Q8_at; Start 223; Stop 247
ttgtagaaccgtgttataaaatata

SEQ ID NO: 30237 - DNA, 25 bp, Artificial
  probe
  misc_feature (1)..(25): SEQ ID NO: 3318; WAN0249Q8_at; Start 41; Stop 65
agacgttttctctatccagattgct

SEQ ID NO: 30238 - DNA, 25 bp, Artificial
  probe
  misc_feature (1)..(25): SEQ ID NO: 3318; WAN0249Q8_at; Start 33; Stop 57
catgatttagacgttttctctatcc

SEQ ID NO: 30239 - DNA, 25 bp, Artificial
  probe
  misc_feature (1)..(25): SEQ ID NO: 3318; WAN0249Q8_at; Start 36; Stop 60
gatttagacgttttctctatccaga

SEQ ID NO: 30240 - DNA, 25 bp, Artificial
  probe
  misc_feature (1)..(25): SEQ ID NO: 3318; WAN0249Q8_at; Start 44; Stop 68
cgttttctctatccagattgctttt

SEQ ID NO: 30241 - DNA, 25 bp, Artificial
  probe
  misc_feature (1)..(25): SEQ ID NO: 3318; WAN0249Q8_at; Start 42; Stop 66
gacgttttctctatccagattgctt

SEQ ID NO: 30242 - DNA, 25 bp, Artificial
  probe
  misc_feature (1)..(25): SEQ ID NO: 3318; WAN0249Q8_at; Start 211; Stop 235
aacattcttttattgtagaaccgtg

SEQ ID NO: 30243 - DNA, 25 bp, Artificial
  probe
  misc_feature (1)..(25): SEQ ID NO: 3318; WAN0249Q8_at; Start 1; Stop 25
ctctttctaagaattctattgcttc

SEQ ID NO: 30244 - DNA, 25 bp, Artificial
  probe
  misc_feature (1)..(25): SEQ ID NO: 3318; WAN0249Q8_at; Start 3; Stop 27
ctttctaagaattctattgcttcat

SEQ ID NO: 30245 - DNA, 25 bp, Artificial
  probe
  misc_feature (1)..(25): SEQ ID NO: 3318; WAN0249Q8_at; Start 10; Stop 34
agaattctattgcttcattataaca

SEQ ID NO: 30246 - DNA, 25 bp, Artificial
  probe
  misc_feature (1)..(25): SEQ ID NO: 3318; WAN0249Q8_at; Start 9; Stop 33
aagaattctattgcttcattataac

SEQ ID NO: 30247 - DNA, 25 bp, Artificial
  probe
  misc_feature (1)..(25): SEQ ID NO: 3318; WAN0249Q8_at; Start 56; Stop 80
ccagattgcttttttataacatttt

SEQ ID NO: 30248 - DNA, 25 bp, Artificial
  probe
  misc_feature (1)..(25): SEQ ID NO: 3318; WAN0249Q8_at; Start 216; Stop 240
tcttttattgtagaaccgtgttata

SEQ ID NO: 30249 - DNA, 25 bp, Artificial
  probe
  misc_feature (1)..(25): SEQ ID NO: 3318; WAN0249Q8_at; Start 172; Stop 196
tttcactatagtgaattttttcaga

SEQ ID NO: 30250 - DNA, 25 bp, Artificial
  probe
  misc_feature (1)..(25): SEQ ID NO: 3318; WAN0249Q8_at; Start 35; Stop 59
tgatttagacgttttctctatccag

SEQ ID NO: 30251 - DNA, 25 bp, Artificial
  probe
  misc_feature (1)..(25): SEQ ID NO: 3318; WAN0249Q8_at; Start 43; Stop 67
acgttttctctatccagattgcttt

SEQ ID NO: 30252 - DNA, 25 bp, Artificial
  probe
  misc_feature (1)..(25): SEQ ID NO: 3318; WAN0249Q8_at; Start 21; Stop 45
gcttcattataacatgatttagacg

SEQ ID NO: 30253 - DNA, 25 bp, Artificial
  probe
  misc_feature (1)..(25): SEQ ID NO: 3318; WAN0249Q8_at; Start 53; Stop 77
tatccagattgcttttttataacat

SEQ ID NO: 30254 - DNA, 25 bp, Artificial
  probe
  misc_feature (1)..(25): SEQ ID NO: 3318; WAN0249Q8_at; Start 45; Stop 69
gttttctctatccagattgcttttt

SEQ ID NO: 30255 - DNA, 25 bp, Artificial
  probe
  misc_feature (1)..(25): SEQ ID NO: 3318; WAN0249Q8_at; Start 30; Stop 54
taacatgatttagacgttttctcta

SEQ ID NO: 30256 - DNA, 25 bp, Artificial
  probe
  misc_feature (1)..(25): SEQ ID NO: 4441; WAN0249Q9_at; Start 340; Stop 364
tcggaactgagttttgtgaaaatag

SEQ ID NO: 30257 - DNA, 25 bp, Artificial
  probe
  misc_feature (1)..(25): SEQ ID NO: 4441; WAN0249Q9_at; Start 758; Stop 782
ctaaaaactgttcccttgcgataag

SEQ ID NO: 30258 - DNA, 25 bp, Artificial
  probe
  misc_feature (1)..(25): SEQ ID NO: 4441; WAN0249Q9_at; Start 139; Stop 163
tcagaatagtatttcgccaatggtt

SEQ ID NO: 30259 - DNA, 25 bp, Artificial
  probe
  misc_feature (1)..(25): SEQ ID NO: 4441; WAN0249Q9_at; Start 33; Stop 57
catttattttatggcaattctaagc

SEQ ID NO: 30260 - DNA, 25 bp, Artificial
  probe
  misc_feature (1)..(25): SEQ ID NO: 4441; WAN0249Q9_at; Start 173; Stop 197
gaggtgattgtgttatgatagtcta

SEQ ID NO: 30261 - DNA, 25 bp, Artificial
  probe
  misc_feature (1)..(25): SEQ ID NO: 4441; WAN0249Q9_at; Start 132; Stop 156
caatgcttcagaatagtatttcgcc

SEQ ID NO: 30262 - DNA, 25 bp, Artificial
  probe
  misc_feature (1)..(25): SEQ ID NO: 4441; WAN0249Q9_at; Start 267; Stop 291
gataaaacttgttggctacttattg

SEQ ID NO: 30263 - DNA, 25 bp, Artificial
  probe
  misc_feature (1)..(25): SEQ ID NO: 4441; WAN0249Q9_at; Start 252; Stop 276
tgcaggaattggtgagataaaactt

SEQ ID NO: 30264 - DNA, 25 bp, Artificial
  probe
  misc_feature (1)..(25): SEQ ID NO: 4441; WAN0249Q9_at; Start 767; Stop 791
gttcccttgcgataagcctaataag

SEQ ID NO: 30265 - DNA, 25 bp, Artificial
  probe
  misc_feature (1)..(25): SEQ ID NO: 4441; WAN0249Q9_at; Start 716; Stop 740
catggacacatagtagtaagcacac

SEQ ID NO: 30266 - DNA, 25 bp, Artificial
  probe
  misc_feature (1)..(25): SEQ ID NO: 4441; WAN0249Q9_at; Start 732; Stop 756
taagcacactatgtggcttggcaga

SEQ ID NO: 30267 - DNA, 25 bp, Artificial
  probe
  misc_feature (1)..(25): SEQ ID NO: 4441; WAN0249Q9_at; Start 390; Stop 414
tgtaagtatgttaactattgctcga

SEQ ID NO: 30268 - DNA, 25 bp, Artificial
  probe
  misc_feature (1)..(25): SEQ ID NO: 4441; WAN0249Q9_at; Start 466; Stop 490
aacagaggttggtcgattatcagcc

SEQ ID NO: 30269 - DNA, 25 bp, Artificial
  probe
  misc_feature (1)..(25): SEQ ID NO: 4441; WAN0249Q9_at; Start 5; Stop 29
cagtcaaagacttagaatagcctga

SEQ ID NO: 30270 - DNA, 25 bp, Artificial
  probe
  misc_feature (1)..(25): SEQ ID NO: 4441; WAN0249Q9_at; Start 670; Stop 694
caatctactatactttctcgttaaa

SEQ ID NO: 30271 - DNA, 25 bp, Artificial
  probe
  misc_feature (1)..(25): SEQ ID NO: 4441; WAN0249Q9_at; Start 782; Stop 806
gcctaataagcacaacatagggagt

SEQ ID NO: 30272 - DNA, 25 bp, Artificial
  probe
  misc_feature (1)..(25): SEQ ID NO: 4441; WAN0249Q9_at; Start 152; Stop 176
tcgccaatggtttttattgaagagg

SEQ ID NO: 30273 - DNA, 25 bp, Artificial
  probe
  misc_feature (1)..(25): SEQ ID NO: 4441; WAN0249Q9_at; Start 99; Stop 123
taggacagctctattctgagaaatc

SEQ ID NO: 30274 - DNA, 25 bp, Artificial
  probe
  misc_feature (1)..(25): SEQ ID NO: 4441; WAN0249Q9_at; Start 113; Stop 137
tctgagaaatctgagctatcaatgc

SEQ ID NO: 30275 - DNA, 25 bp, Artificial
  probe
  misc_feature (1)..(25): SEQ ID NO: 4441; WAN0249Q9_at; Start 220; Stop 244
taaatggagaatcgttacatgaaac

SEQ ID NO: 30276 - DNA, 25 bp, Artificial
  probe
  misc_feature (1)..(25): SEQ ID NO: 4441; WAN0249Q9_at; Start 81; Stop 105
tttgagctgctcgatagttaggaca

SEQ ID NO: 30277 - DNA, 25 bp, Artificial
  probe
  misc_feature (1)..(25): SEQ ID NO: 4441; WAN0249Q9_at; Start 437; Stop 461
gaatagtttggacttgaactgtatc

SEQ ID NO: 30278 - DNA, 25 bp, Artificial
  probe
  misc_feature (1)..(25): SEQ ID NO: 4441; WAN0249Q9_at; Start 456; Stop 480
tgtatctaaaaacagaggttggtcg

SEQ ID NO: 30279 - DNA, 25 bp, Artificial
  probe
  misc_feature (1)..(25): SEQ ID NO: 4441; WAN0249Q9_at; Start 324; Stop 348
tatatatgtcataggttcggaactg

SEQ ID NO: 30280 - DNA, 25 bp, Artificial
  probe
  misc_feature (1)..(25): SEQ ID NO: 4441; WAN0249Q9_at; Start 69; Stop 93
catatatatgtatttgagctgctcg

SEQ ID NO: 30281 - DNA, 25 bp, Artificial
  probe
  misc_feature (1)..(25): SEQ ID NO: 4441; WAN0249Q9_at; Start 56; Stop 80
gcttagaattgctcatatatatgta

SEQ ID NO: 30282 - DNA, 25 bp, Artificial
  probe
  misc_feature (1)..(25): SEQ ID NO: 4441; WAN0249Q9_at; Start 814; Stop 838
gccgactctaatcaaccactttggg

SEQ ID NO: 30283 - DNA, 25 bp, Artificial
  probe
  misc_feature (1)..(25): SEQ ID NO: 4441; WAN0249Q9_at; Start 304; Stop 328
ggactagcccctctttttcatatat

SEQ ID NO: 30284 - DNA, 25 bp, Artificial
  probe
  misc_feature (1)..(25): SEQ ID NO: 4441; WAN0249Q9_at; Start 483; Stop 507
tatcagcctctttcttgtcgttgaa

SEQ ID NO: 30285 - DNA, 25 bp, Artificial
  probe
  misc_feature (1)..(25): SEQ ID NO: 4441; WAN0249Q9_at; Start 797; Stop 821
catagggagttagagaagccgactc

SEQ ID NO: 30286 - DNA, 25 bp, Artificial
  probe
  misc_feature (1)..(25): SEQ ID NO: 4441; WAN0249Q9_at; Start 544; Stop 568
cataattgagttgggataaacctaa

SEQ ID NO: 30287 - DNA, 25 bp, Artificial
  probe
  misc_feature (1)..(25): SEQ ID NO: 4441; WAN0249Q9_at; Start 704; Stop 728
aattcatggtgacatggacacatag

SEQ ID NO: 30288 - DNA, 25 bp, Artificial
  probe
  misc_feature (1)..(25): SEQ ID NO: 4441; WAN0249Q9_at; Start 498; Stop 522
tgtcgttgaaaagagtgagatatat

SEQ ID NO: 30289 - DNA, 25 bp, Artificial
  probe
  misc_feature (1)..(25): SEQ ID NO: 4441; WAN0249Q9_at; Start 830; Stop 854
cactttgggcagtagtggtaactgc

SEQ ID NO: 30290 - DNA, 25 bp, Artificial
  probe
  misc_feature (1)..(25): SEQ ID NO: 3166; WAN0249QA_x_at; Start 19; Stop 43
ttcgtatcttatttcaatctactat

SEQ ID NO: 30291 - DNA, 25 bp, Artificial
  probe
  misc_feature (1)..(25): SEQ ID NO: 3166; WAN0249QA_x_at; Start 46; Stop 70
taaaatgaaccaaaaatagtacaca

SEQ ID NO: 30292 - DNA, 25 bp, Artificial
  probe
  misc_feature (1)..(25): SEQ ID NO: 3166; WAN0249QA_x_at; Start 20; Stop 44
tcgtatcttatttcaatctactata

SEQ ID NO: 30293 - DNA, 25 bp, Artificial
  probe
  misc_feature (1)..(25): SEQ ID NO: 188; WAN0249QB_at; Start 118; Stop 142
ttctgttgagtatgtctgttcccga

SEQ ID NO: 30294 - DNA, 25 bp, Artificial
  probe
  misc_feature (1)..(25): SEQ ID NO: 188; WAN0249QB_at; Start 346; Stop 370
tactcgggtttatatttgctagaaa

SEQ ID NO: 30295 - DNA, 25 bp, Artificial
  probe
  misc_feature (1)..(25): SEQ ID NO: 188; WAN0249QB_at; Start 271; Stop 295
gcttttaaccctatcaataatgtgg

SEQ ID NO: 30296 - DNA, 25 bp, Artificial
  probe
  misc_feature (1)..(25): SEQ ID NO: 188; WAN0249QB_at; Start 237; Stop 261
ggacaagtgtcctaacatcaactta

SEQ ID NO: 30297 - DNA, 25 bp, Artificial
  probe
  misc_feature (1)..(25): SEQ ID NO: 188; WAN0249QB_at; Start 294; Stop 318
ggcttttcaaccacgcttcggcatt

SEQ ID NO: 30298 - DNA, 25 bp, Artificial
  probe
  misc_feature (1)..(25): SEQ ID NO: 188; WAN0249QB_at; Start 194; Stop 218
caagatgacgtgtgctttcaccaca

SEQ ID NO: 30299 - DNA, 25 bp, Artificial
  probe
  misc_feature (1)..(25): SEQ ID NO: 188; WAN0249QB_at; Start 207; Stop 231
gctttcaccacactaaaaatttatg

SEQ ID NO: 30300 - DNA, 25 bp, Artificial
  probe
  misc_feature (1)..(25): SEQ ID NO: 188; WAN0249QB_at; Start 86; Stop 110
gctctgcaatcttctgacgtgttta

SEQ ID NO: 30301 - DNA, 25 bp, Artificial
  probe
  misc_feature (1)..(25): SEQ ID NO: 188; WAN0249QB_at; Start 398; Stop 422
actatatcatgtttttaagaacttg

SEQ ID NO: 30302 - DNA, 25 bp, Artificial
  probe
  misc_feature (1)..(25): SEQ ID NO: 188; WAN0249QB_at; Start 184; Stop 208
gatcgtttcacaagatgacgtgtgc

SEQ ID NO: 30303 - DNA, 25 bp, Artificial
  probe
  misc_feature (1)..(25): SEQ ID NO: 188; WAN0249QB_at; Start 3; Stop 27
catactcctttcaatatttttagga

SEQ ID NO: 30304 - DNA, 25 bp, Artificial
  probe
  misc_feature (1)..(25): SEQ ID NO: 188; WAN0249QB_at; Start 252; Stop 276
catcaacttataaaagtaggctttt

SEQ ID NO: 30305 - DNA, 25 bp, Artificial
  probe
  misc_feature (1)..(25): SEQ ID NO: 188; WAN0249QB_at; Start 312; Stop 336
cggcattcaaccctgcctgtccgta

SEQ ID NO: 30306 - DNA, 25 bp, Artificial
  probe
  misc_feature (1)..(25): SEQ ID NO: 188; WAN0249QB_at; Start 614; Stop 638
gatggttcaattagctgatagctct

SEQ ID NO: 30307 - DNA, 25 bp, Artificial
  probe
  misc_feature (1)..(25): SEQ ID NO: 188; WAN0249QB_at; Start 224; Stop 248
aatttatgaattaggacaagtgtcc

SEQ ID NO: 30308 - DNA, 25 bp, Artificial
  probe
  misc_feature (1)..(25): SEQ ID NO: 188; WAN0249QB_at; Start 140; Stop 164
cgatgtttcctaactctctagtagc

SEQ ID NO: 30309 - DNA, 25 bp, Artificial
  probe
  misc_feature (1)..(25): SEQ ID NO: 188; WAN0249QB_at; Start 13; Stop 37
tcaatatttttaggaccttatgaaa

SEQ ID NO: 30310 - DNA, 25 bp, Artificial
  probe
  misc_feature (1)..(25): SEQ ID NO: 188; WAN0249QB_at; Start 200; Stop 224
gacgtgtgctttcaccacactaaaa

SEQ ID NO: 30311 - DNA, 25 bp, Artificial
  probe
  misc_feature (1)..(25): SEQ ID NO: 188; WAN0249QB_at; Start 153; Stop 177
ctctctagtagcaaatattacgtac

SEQ ID NO: 30312 - DNA, 25 bp, Artificial
  probe
  misc_feature (1)..(25): SEQ ID NO: 188; WAN0249QB_at; Start 598; Stop 622
gccctcctaaaaattagatggttca

SEQ ID NO: 30313 - DNA, 25 bp, Artificial
  probe
  misc_feature (1)..(25): SEQ ID NO: 188; WAN0249QB_at; Start 173; Stop 197
cgtactttattgatcgtttcacaag

SEQ ID NO: 30314 - DNA, 25 bp, Artificial
  probe
  misc_feature (1)..(25): SEQ ID NO: 188; WAN0249QB_at; Start 298; Stop 322
tttcaaccacgcttcggcattcaac

SEQ ID NO: 30315 - DNA, 25 bp, Artificial
  probe
  misc_feature (1)..(25): SEQ ID NO: 188; WAN0249QB_at; Start 358; Stop 382
tatttgctagaaaacatcatctcat

SEQ ID NO: 30316 - DNA, 25 bp, Artificial
  probe
  misc_feature (1)..(25): SEQ ID NO: 188; WAN0249QB_at; Start 125; Stop 149
gagtatgtctgttcccgatgtttcc

SEQ ID NO: 30317 - DNA, 25 bp, Artificial
  probe
  misc_feature (1)..(25): SEQ ID NO: 188; WAN0249QB_at; Start 103; Stop 127
cgtgtttattttggtttctgttgag

SEQ ID NO: 30318 - DNA, 25 bp, Artificial
  probe
  misc_feature (1)..(25): SEQ ID NO: 188; WAN0249QB_at; Start 385; Stop 409
tctaagctttattactatatcatgt

SEQ ID NO: 30319 - DNA, 25 bp, Artificial
  probe
  misc_feature (1)..(25): SEQ ID NO: 188; WAN0249QB_at; Start 553; Stop 577
ctatatgttcgtaaatgaaagttct

SEQ ID NO: 30320 - DNA, 25 bp, Artificial
  probe
  misc_feature (1)..(25): SEQ ID NO: 188; WAN0249QB_at; Start 52; Stop 76
ggttgactcatgaaaaaagagcagg

SEQ ID NO: 30321 - DNA, 25 bp, Artificial
  probe
  misc_feature (1)..(25): SEQ ID NO: 188; WAN0249QB_at; Start 73; Stop 97
caggttttcacctgctctgcaatct

SEQ ID NO: 30322 - DNA, 25 bp, Artificial
  probe
  misc_feature (1)..(25): SEQ ID NO: 188; WAN0249QB_at; Start 592; Stop 616
cacccagccctcctaaaaattagat

SEQ ID NO: 30323 - DNA, 25 bp, Artificial
  probe
  misc_feature (1)..(25): SEQ ID NO: 188; WAN0249QB_at; Start 39; Stop 63
ctaaggaactaaaggttgactcatg

SEQ ID NO: 30324 - DNA, 25 bp, Artificial
  probe
  misc_feature (1)..(25): SEQ ID NO: 188; WAN0249QB_at; Start 285; Stop 309
caataatgtggcttttcaaccacgc

SEQ ID NO: 30325 - DNA, 25 bp, Artificial
  probe
  misc_feature (1)..(25): SEQ ID NO: 188; WAN0249QB_at; Start 63; Stop 87
gaaaaaagagcaggttttcacctgc

SEQ ID NO: 30326 - DNA, 25 bp, Artificial
  probe
  misc_feature (1)..(25): SEQ ID NO: 188; WAN0249QB_at; Start 369; Stop 393
aaacatcatctcattttctaagctt

SEQ ID NO: 30327 - DNA, 25 bp, Artificial
  probe
  misc_feature (1)..(25): SEQ ID NO: 377; WAN0249QC_at; Start 750; Stop 774
gcattgatagctcagatttctcaga

SEQ ID NO: 30328 - DNA, 25 bp, Artificial
  probe
  misc_feature (1)..(25): SEQ ID NO: 377; WAN0249QC_at; Start 738; Stop 762
tactattctgaagcattgatagctc

SEQ ID NO: 30329 - DNA, 25 bp, Artificial
  probe
  misc_feature (1)..(25): SEQ ID NO: 377; WAN0249QC_at; Start 793; Stop 817
tcgagcagctcaaatacatatatat

SEQ ID NO: 30330 - DNA, 25 bp, Artificial
  probe
  misc_feature (1)..(25): SEQ ID NO: 377; WAN0249QC_at; Start 764; Stop 788
gatttctcagaatagagctgtccta

SEQ ID NO: 30331 - DNA, 25 bp, Artificial
  probe
  misc_feature (1)..(25): SEQ ID NO: 377; WAN0249QC_at; Start 830; Stop 854
gcttagaattgccataaaataaatg

SEQ ID NO: 30332 - DNA, 25 bp, Artificial
  probe
  misc_feature (1)..(25): SEQ ID NO: 377; WAN0249QC_at; Start 782; Stop 806
tgtcctaactatcgagcagctcaaa

SEQ ID NO: 30333 - DNA, 25 bp, Artificial
  probe
  misc_feature (1)..(25): SEQ ID NO: 377; WAN0249QC_at; Start 98; Stop 122
tattaggcttatcgcaagggaacag

SEQ ID NO: 30334 - DNA, 25 bp, Artificial
  probe
  misc_feature (1)..(25): SEQ ID NO: 377; WAN0249QC_at; Start 859; Stop 883
caggctattctaagtctttgactgc

SEQ ID NO: 30335 - DNA, 25 bp, Artificial
  probe
  misc_feature (1)..(25): SEQ ID NO: 377; WAN0249QC_at; Start 195; Stop 219
taacgagaaagtatagtagattgaa

SEQ ID NO: 30336 - DNA, 25 bp, Artificial
  probe
  misc_feature (1)..(25): SEQ ID NO: 377; WAN0249QC_at; Start 590; Stop 614
tatatacaataagtagccaacaagt

SEQ ID NO: 30337 - DNA, 25 bp, Artificial
  probe
  misc_feature (1)..(25): SEQ ID NO: 377; WAN0249QC_at; Start 33; Stop 57
gcagttaccactactgcccaaagtg

SEQ ID NO: 30338 - DNA, 25 bp, Artificial
  probe
  misc_feature (1)..(25): SEQ ID NO: 377; WAN0249QC_at; Start 105; Stop 129
cttatcgcaagggaacagtttttag

SEQ ID NO: 30339 - DNA, 25 bp, Artificial
  probe
  misc_feature (1)..(25): SEQ ID NO: 377; WAN0249QC_at; Start 524; Stop 548
tattttcacaaaactcagttccgaa

SEQ ID NO: 30340 - DNA, 25 bp, Artificial
  probe
  misc_feature (1)..(25): SEQ ID NO: 377; WAN0249QC_at; Start 66; Stop 90
gagtcggcttctctaactccctatg

SEQ ID NO: 30341 - DNA, 25 bp, Artificial
  probe
  misc_feature (1)..(25): SEQ ID NO: 377; WAN0249QC_at; Start 724; Stop 748
aaccattggcgaaatactattctga

SEQ ID NO: 30342 - DNA, 25 bp, Artificial
  probe
  misc_feature (1)..(25): SEQ ID NO: 377; WAN0249QC_at; Start 500; Stop 524
tataactcccaaaatagataacact

SEQ ID NO: 30343 - DNA, 25 bp, Artificial
  probe
  misc_feature (1)..(25): SEQ ID NO: 377; WAN0249QC_at; Start 147; Stop 171
gtgtgcttactactatgtgtccatg

SEQ ID NO: 30344 - DNA, 25 bp, Artificial
  probe
  misc_feature (1)..(25): SEQ ID NO: 377; WAN0249QC_at; Start 574; Stop 598
gggctagtcctacacatatatacaa

SEQ ID NO: 30345 - DNA, 25 bp, Artificial
  probe
  misc_feature (1)..(25): SEQ ID NO: 377; WAN0249QC_at; Start 690; Stop 714
tagactatcataacacaatcacctc

SEQ ID NO: 30346 - DNA, 25 bp, Artificial
  probe
  misc_feature (1)..(25): SEQ ID NO: 377; WAN0249QC_at; Start 455; Stop 479
tagaaaagtccgataaattcgagca

SEQ ID NO: 30347 - DNA, 25 bp, Artificial
  probe
  misc_feature (1)..(25): SEQ ID NO: 377; WAN0249QC_at; Start 426; Stop 450
gatacagttcaagtccaaactattc

SEQ ID NO: 30348 - DNA, 25 bp, Artificial
  probe
  misc_feature (1)..(25): SEQ ID NO: 377; WAN0249QC_at; Start 638; Stop 662
aaaatgtttcatgtaacgattctcc

SEQ ID NO: 30349 - DNA, 25 bp, Artificial
  probe
  misc_feature (1)..(25): SEQ ID NO: 377; WAN0249QC_at; Start 408; Stop 432
gaccaacctctgtttttagatacag

SEQ ID NO: 30350 - DNA, 25 bp, Artificial
  probe
  misc_feature (1)..(25): SEQ ID NO: 377; WAN0249QC_at; Start 776; Stop 800
tagagctgtcctaactatcgagcag

SEQ ID NO: 30351 - DNA, 25 bp, Artificial
  probe
  misc_feature (1)..(25): SEQ ID NO: 377; WAN0249QC_at; Start 652; Stop 676
aacgattctccatttactccattaa

SEQ ID NO: 30352 - DNA, 25 bp, Artificial
  probe
  misc_feature (1)..(25): SEQ ID NO: 377; WAN0249QC_at; Start 397; Stop 421
ggctgataatcgaccaacctctgtt

SEQ ID NO: 30353 - DNA, 25 bp, Artificial
  probe
  misc_feature (1)..(25): SEQ ID NO: 377; WAN0249QC_at; Start 807; Stop 831
tacatatatatgagcaattctaagc

SEQ ID NO: 30354 - DNA, 25 bp, Artificial
  probe
  misc_feature (1)..(25): SEQ ID NO: 377; WAN0249QC_at; Start 50; Stop 74
ccaaagtggttgattagagtcggct

SEQ ID NO: 30355 - DNA, 25 bp, Artificial
  probe
  misc_feature (1)..(25): SEQ ID NO: 377; WAN0249QC_at; Start 131; Stop 155
tctgccaagccacatagtgtgctta

SEQ ID NO: 30356 - DNA, 25 bp, Artificial
  probe
  misc_feature (1)..(25): SEQ ID NO: 377; WAN0249QC_at; Start 710; Stop 734
acctcttcaataaaaaccattggcg

SEQ ID NO: 30357 - DNA, 25 bp, Artificial
  probe
  misc_feature (1)..(25): SEQ ID NO: 377; WAN0249QC_at; Start 612; Stop 636
agttttatctcaccaattcctgcaa

SEQ ID NO: 30358 - DNA, 25 bp, Artificial
  probe
  misc_feature (1)..(25): SEQ ID NO: 377; WAN0249QC_at; Start 81; Stop 105
actccctatgttgtgcttattaggc

SEQ ID NO: 30359 - DNA, 25 bp, Artificial
  probe
  misc_feature (1)..(25): SEQ ID NO: 377; WAN0249QC_at; Start 539; Stop 563
cagttccgaacctatgacatatata

SEQ ID NO: 30360 - DNA, 25 bp, Artificial
  probe
  misc_feature (1)..(25): SEQ ID NO: 377; WAN0249QC_at; Start 472; Stop 496
ttcgagcaatagttaacatacttac

SEQ ID NO: 30361 - DNA, 25 bp, Artificial
  probe
  misc_feature (1)..(25): SEQ ID NO: 423; WAN0249QD_at; Start 59; Stop 83
caatttatctagtgctatagtagat

SEQ ID NO: 30362 - DNA, 25 bp, Artificial
  probe
  misc_feature (1)..(25): SEQ ID NO: 423; WAN0249QD_at; Start 29; Stop 53
cctaaagggatcctcatattctttt

SEQ ID NO: 30363 - DNA, 25 bp, Artificial
  probe
  misc_feature (1)..(25): SEQ ID NO: 423; WAN0249QD_at; Start 22; Stop 46
cactatccctaaagggatcctcata

SEQ ID NO: 30364 - DNA, 25 bp, Artificial
  probe
  misc_feature (1)..(25): SEQ ID NO: 423; WAN0249QD_at; Start 25; Stop 49
tatccctaaagggatcctcatattc

SEQ ID NO: 30365 - DNA, 25 bp, Artificial
  probe
  misc_feature (1)..(25): SEQ ID NO: 423; WAN0249QD_at; Start 34; Stop 58
agggatcctcatattcttttacact

SEQ ID NO: 30366 - DNA, 25 bp, Artificial
  probe
  misc_feature (1)..(25): SEQ ID NO: 423; WAN0249QD_at; Start 63; Stop 87
ttatctagtgctatagtagattgaa

SEQ ID NO: 30367 - DNA, 25 bp, Artificial
  probe
  misc_feature (1)..(25): SEQ ID NO: 423; WAN0249QD_at; Start 32; Stop 56
aaagggatcctcatattcttttaca

SEQ ID NO: 30368 - DNA, 25 bp, Artificial
  probe
  misc_feature (1)..(25): SEQ ID NO: 423; WAN0249QD_at; Start 28; Stop 52
ccctaaagggatcctcatattcttt

SEQ ID NO: 30369 - DNA, 25 bp, Artificial
  probe
  misc_feature (1)..(25): SEQ ID NO: 423; WAN0249QD_at; Start 9; Stop 33
tggtattacttaccactatccctaa

SEQ ID NO: 30370 - DNA, 25 bp, Artificial
  probe
  misc_feature (1)..(25): SEQ ID NO: 423; WAN0249QD_at; Start 55; Stop 79
cactcaatttatctagtgctatagt

SEQ ID NO: 30371 - DNA, 25 bp, Artificial
  probe
  misc_feature (1)..(25): SEQ ID NO: 423; WAN0249QD_at; Start 20; Stop 44
accactatccctaaagggatcctca

SEQ ID NO: 30372 - DNA, 25 bp, Artificial
  probe
  misc_feature (1)..(25): SEQ ID NO: 423; WAN0249QD_at; Start 21; Stop 45
ccactatccctaaagggatcctcat

SEQ ID NO: 30373 - DNA, 25 bp, Artificial
  probe
  misc_feature (1)..(25): SEQ ID NO: 423; WAN0249QD_at; Start 39; Stop 63
tcctcatattcttttacactcaatt

SEQ ID NO: 30374 - DNA, 25 bp, Artificial
  probe
  misc_feature (1)..(25): SEQ ID NO: 423; WAN0249QD_at; Start 8; Stop 32
ttggtattacttaccactatcccta

SEQ ID NO: 30375 - DNA, 25 bp, Artificial
  probe
  misc_feature (1)..(25): SEQ ID NO: 423; WAN0249QD_at; Start 23; Stop 47
actatccctaaagggatcctcatat

SEQ ID NO: 30376 - DNA, 25 bp, Artificial
  probe
  misc_feature (1)..(25): SEQ ID NO: 423; WAN0249QD_at; Start 30; Stop 54
ctaaagggatcctcatattctttta

SEQ ID NO: 30377 - DNA, 25 bp, Artificial
  probe
  misc_feature (1)..(25): SEQ ID NO: 423; WAN0249QD_at; Start 36; Stop 60
ggatcctcatattcttttacactca

SEQ ID NO: 30378 - DNA, 25 bp, Artificial
  probe
  misc_feature (1)..(25): SEQ ID NO: 423; WAN0249QD_at; Start 57; Stop 81
ctcaatttatctagtgctatagtag

SEQ ID NO: 30379 - DNA, 25 bp, Artificial
  probe
  misc_feature (1)..(25): SEQ ID NO: 423; WAN0249QD_at; Start 37; Stop 61
gatcctcatattcttttacactcaa

SEQ ID NO: 30380 - DNA, 25 bp, Artificial
  probe
  misc_feature (1)..(25): SEQ ID NO: 423; WAN0249QD_at; Start 54; Stop 78
acactcaatttatctagtgctatag

SEQ ID NO: 30381 - DNA, 25 bp, Artificial
  probe
  misc_feature (1)..(25): SEQ ID NO: 423; WAN0249QD_at; Start 58; Stop 82
tcaatttatctagtgctatagtaga

SEQ ID NO: 30382 - DNA, 25 bp, Artificial
  probe
  misc_feature (1)..(25): SEQ ID NO: 423; WAN0249QD_at; Start 19; Stop 43
taccactatccctaaagggatcctc

SEQ ID NO: 30383 - DNA, 25 bp, Artificial
  probe
  misc_feature (1)..(25): SEQ ID NO: 423; WAN0249QD_at; Start 51; Stop 75
tttacactcaatttatctagtgcta

SEQ ID NO: 30384 - DNA, 25 bp, Artificial
  probe
  misc_feature (1)..(25): SEQ ID NO: 423; WAN0249QD_at; Start 27; Stop 51
tccctaaagggatcctcatattctt

SEQ ID NO: 30385 - DNA, 25 bp, Artificial
  probe
  misc_feature (1)..(25): SEQ ID NO: 423; WAN0249QD_at; Start 4; Stop 28
gactttggtattacttaccactatc

SEQ ID NO: 30386 - DNA, 25 bp, Artificial
  probe
  misc_feature (1)..(25): SEQ ID NO: 423; WAN0249QD_at; Start 26; Stop 50
atccctaaagggatcctcatattct

SEQ ID NO: 30387 - DNA, 25 bp, Artificial
  probe
  misc_feature (1)..(25): SEQ ID NO: 423; WAN0249QD_at; Start 46; Stop 70
attcttttacactcaatttatctag

SEQ ID NO: 30388 - DNA, 25 bp, Artificial
  probe
  misc_feature (1)..(25): SEQ ID NO: 423; WAN0249QD_at; Start 31; Stop 55
taaagggatcctcatattcttttac

SEQ ID NO: 30389 - DNA, 25 bp, Artificial
  probe
  misc_feature (1)..(25): SEQ ID NO: 423; WAN0249QD_at; Start 2; Stop 26
gagactttggtattacttaccacta

SEQ ID NO: 30390 - DNA, 25 bp, Artificial
  probe
  misc_feature (1)..(25): SEQ ID NO: 423; WAN0249QD_at; Start 49; Stop 73
cttttacactcaatttatctagtgc

SEQ ID NO: 30391 - DNA, 25 bp, Artificial
  probe
  misc_feature (1)..(25): SEQ ID NO: 423; WAN0249QD_at; Start 33; Stop 57
aagggatcctcatattcttttacac

SEQ ID NO: 30392 - DNA, 25 bp, Artificial
  probe
  misc_feature (1)..(25): SEQ ID NO: 423; WAN0249QD_at; Start 62; Stop 86
tttatctagtgctatagtagattga

SEQ ID NO: 30393 - DNA, 25 bp, Artificial
  probe
  misc_feature (1)..(25): SEQ ID NO: 423; WAN0249QD_at; Start 35; Stop 59
gggatcctcatattcttttacactc

SEQ ID NO: 30394 - DNA, 25 bp, Artificial
  probe
  misc_feature (1)..(25): SEQ ID NO: 423; WAN0249QD_at; Start 1; Stop 25
agagactttggtattacttaccact

SEQ ID NO: 30395 - DNA, 25 bp, Artificial
  probe
  misc_feature (1)..(25): SEQ ID NO: 5501; WAN0249QE_at; Start 89; Stop 113
acagacttttgacttcttttatatg

SEQ ID NO: 30396 - DNA, 25 bp, Artificial
  probe
  misc_feature (1)..(25): SEQ ID NO: 5501; WAN0249QE_at; Start 1; Stop 25
ttggatttactgaataaaatccatt

SEQ ID NO: 30397 - DNA, 25 bp, Artificial
  probe
  misc_feature (1)..(25): SEQ ID NO: 5501; WAN0249QE_at; Start 95; Stop 119
ttttgacttcttttatatgatataa

SEQ ID NO: 30398 - DNA, 25 bp, Artificial
  probe
  misc_feature (1)..(25): SEQ ID NO: 5501; WAN0249QE_at; Start 88; Stop 112
aacagacttttgacttcttttatat

SEQ ID NO: 30399 - DNA, 25 bp, Artificial
  probe
  misc_feature (1)..(25): SEQ ID NO: 5501; WAN0249QE_at; Start 70; Stop 94
tggtgttgaaaatagtttaacagac

SEQ ID NO: 30400 - DNA, 25 bp, Artificial
  probe
  misc_feature (1)..(25): SEQ ID NO: 5501; WAN0249QE_at; Start 3; Stop 27
ggatttactgaataaaatccatttc

SEQ ID NO: 30401 - DNA, 25 bp, Artificial
  probe
  misc_feature (1)..(25): SEQ ID NO: 5501; WAN0249QE_at; Start 76; Stop 100
tgaaaatagtttaacagacttttga

SEQ ID NO: 30402 - DNA, 25 bp, Artificial
  probe
  misc_feature (1)..(25): SEQ ID NO: 5501; WAN0249QE_at; Start 93; Stop 117
acttttgacttcttttatatgatat

SEQ ID NO: 30403 - DNA, 25 bp, Artificial
  probe
  misc_feature (1)..(25): SEQ ID NO: 5501; WAN0249QE_at; Start 92; Stop 116
gacttttgacttcttttatatgata

SEQ ID NO: 30404 - DNA, 25 bp, Artificial
  probe
  misc_feature (1)..(25): SEQ ID NO: 5501; WAN0249QE_at; Start 87; Stop 111
taacagacttttgacttcttttata

SEQ ID NO: 30405 - DNA, 25 bp, Artificial
  probe
  misc_feature (1)..(25): SEQ ID NO: 5501; WAN0249QE_at; Start 91; Stop 115
agacttttgacttcttttatatgat

SEQ ID NO: 30406 - DNA, 25 bp, Artificial
  probe
  misc_feature (1)..(25): SEQ ID NO: 5501; WAN0249QE_at; Start 81; Stop 105
atagtttaacagacttttgacttct

SEQ ID NO: 30407 - DNA, 25 bp, Artificial
  probe
  misc_feature (1)..(25): SEQ ID NO: 5501; WAN0249QE_at; Start 90; Stop 114
cagacttttgacttcttttatatga

SEQ ID NO: 30408 - DNA, 25 bp, Artificial
  probe
  misc_feature (1)..(25): SEQ ID NO: 5501; WAN0249QE_at; Start 94; Stop 118
cttttgacttcttttatatgatata

SEQ ID NO: 30409 - DNA, 25 bp, Artificial
  probe
  misc_feature (1)..(25): SEQ ID NO: 5501; WAN0249QE_at; Start 2; Stop 26
tggatttactgaataaaatccattt

SEQ ID NO: 30410 - DNA, 25 bp, Artificial
  probe
  misc_feature (1)..(25): SEQ ID NO: 5501; WAN0249QE_at; Start 69; Stop 93
ttggtgttgaaaatagtttaacaga

SEQ ID NO: 30411 - DNA, 25 bp, Artificial
  probe
  misc_feature (1)..(25): SEQ ID NO: 4464; WAN0249QF_x_at; Start 44; Stop 68
tcttaaaaacgcatagtatcaggta

SEQ ID NO: 30412 - DNA, 25 bp, Artificial
  probe
  misc_feature (1)..(25): SEQ ID NO: 4464; WAN0249QF_x_at; Start 41; Stop 65
aaatcttaaaaacgcatagtatcag

SEQ ID NO: 30413 - DNA, 25 bp, Artificial
  probe
  misc_feature (1)..(25): SEQ ID NO: 4464; WAN0249QF_x_at; Start 40; Stop 64
aaaatcttaaaaacgcatagtatca

SEQ ID NO: 30414 - DNA, 25 bp, Artificial
  probe
  misc_feature (1)..(25): SEQ ID NO: 4464; WAN0249QF_x_at; Start 39; Stop 63
taaaatcttaaaaacgcatagtatc

SEQ ID NO: 30415 - DNA, 25 bp, Artificial
  probe
  misc_feature (1)..(25): SEQ ID NO: 4464; WAN0249QF_x_at; Start 43; Stop 67
atcttaaaaacgcatagtatcaggt

SEQ ID NO: 30416 - DNA, 25 bp, Artificial
  probe
  misc_feature (1)..(25): SEQ ID NO: 4464; WAN0249QF_x_at; Start 45; Stop 69
cttaaaaacgcatagtatcaggtat

SEQ ID NO: 30417 - DNA, 25 bp, Artificial
  probe
  misc_feature (1)..(25): SEQ ID NO: 4464; WAN0249QF_x_at; Start 42; Stop 66
aatcttaaaaacgcatagtatcagg

SEQ ID NO: 30418 - DNA, 25 bp, Artificial
  probe
  misc_feature (1)..(25): SEQ ID NO: 144; WAN0249QG_at; Start 108; Stop 132
gaaatggattttattcagtaaatcc

SEQ ID NO: 30419 - DNA, 25 bp, Artificial
  probe
  misc_feature (1)..(25): SEQ ID NO: 144; WAN0249QG_at; Start 109; Stop 133
aaatggattttattcagtaaatcca

SEQ ID NO: 30420 - DNA, 25 bp, Artificial
  probe
  misc_feature (1)..(25): SEQ ID NO: 144; WAN0249QG_at; Start 18; Stop 42
atatcatataaaagaagtcaaaagt

SEQ ID NO: 30421 - DNA, 25 bp, Artificial
  probe
  misc_feature (1)..(25): SEQ ID NO: 144; WAN0249QG_at; Start 19; Stop 43
tatcatataaaagaagtcaaaagtc

SEQ ID NO: 30422 - DNA, 25 bp, Artificial
  probe
  misc_feature (1)..(25): SEQ ID NO: 144; WAN0249QG_at; Start 23; Stop 47
atataaaagaagtcaaaagtctgtt

SEQ ID NO: 30423 - DNA, 25 bp, Artificial
  probe
  misc_feature (1)..(25): SEQ ID NO: 144; WAN0249QG_at; Start 35; Stop 59
tcaaaagtctgttaaactattttca

SEQ ID NO: 30424 - DNA, 25 bp, Artificial
  probe
  misc_feature (1)..(25): SEQ ID NO: 144; WAN0249QG_at; Start 17; Stop 41
tatatcatataaaagaagtcaaaag

SEQ ID NO: 30425 - DNA, 25 bp, Artificial
  probe
  misc_feature (1)..(25): SEQ ID NO: 144; WAN0249QG_at; Start 30; Stop 54
agaagtcaaaagtctgttaaactat

SEQ ID NO: 30426 - DNA, 25 bp, Artificial
  probe
  misc_feature (1)..(25): SEQ ID NO: 144; WAN0249QG_at; Start 110; Stop 134
aatggattttattcagtaaatccaa

SEQ ID NO: 30427 - DNA, 25 bp, Artificial
  probe
  misc_feature (1)..(25): SEQ ID NO: 144; WAN0249QG_at; Start 22; Stop 46
catataaaagaagtcaaaagtctgt

SEQ ID NO: 30428 - DNA, 25 bp, Artificial
  probe
  misc_feature (1)..(25): SEQ ID NO: 144; WAN0249QG_at; Start 15; Stop 39
attatatcatataaaagaagtcaaa

SEQ ID NO: 30429 - DNA, 25 bp, Artificial
  probe
  misc_feature (1)..(25): SEQ ID NO: 144; WAN0249QG_at; Start 42; Stop 66
tctgttaaactattttcaacaccaa

SEQ ID NO: 30430 - DNA, 25 bp, Artificial
  probe
  misc_feature (1)..(25): SEQ ID NO: 144; WAN0249QG_at; Start 20; Stop 44
atcatataaaagaagtcaaaagtct

SEQ ID NO: 30431 - DNA, 25 bp, Artificial
  probe
  misc_feature (1)..(25): SEQ ID NO: 144; WAN0249QG_at; Start 41; Stop 65
gtctgttaaactattttcaacacca

SEQ ID NO: 30432 - DNA, 25 bp, Artificial
  probe
  misc_feature (1)..(25): SEQ ID NO: 144; WAN0249QG_at; Start 24; Stop 48
tataaaagaagtcaaaagtctgtta

SEQ ID NO: 30433 - DNA, 25 bp, Artificial
  probe
  misc_feature (1)..(25): SEQ ID NO: 144; WAN0249QG_at; Start 21; Stop 45
tcatataaaagaagtcaaaagtctg

SEQ ID NO: 30434 - DNA, 25 bp, Artificial
  probe
  misc_feature (1)..(25): SEQ ID NO: 144; WAN0249QG_at; Start 16; Stop 40
ttatatcatataaaagaagtcaaaa

SEQ ID NO: 30435 - DNA, 25 bp, Artificial
  probe
  misc_feature (1)..(25): SEQ ID NO: 4793; WAN0249QH_at; Start 269; Stop 293
tgcagacgaaatacaagataattcc

SEQ ID NO: 30436 - DNA, 25 bp, Artificial
  probe
  misc_feature (1)..(25): SEQ ID NO: 4793; WAN0249QH_at; Start 417; Stop 441
catttagatcatcaaggtcacttaa

SEQ ID NO: 30437 - DNA, 25 bp, Artificial
  probe
  misc_feature (1)..(25): SEQ ID NO: 4793; WAN0249QH_at; Start 304; Stop 328
tccgctataatagtaagagcgagct

SEQ ID NO: 30438 - DNA, 25 bp, Artificial
  probe
  misc_feature (1)..(25): SEQ ID NO: 4793; WAN0249QH_at; Start 358; Stop 382
tctcacgaacccataggaacgtaat

SEQ ID NO: 30439 - DNA, 25 bp, Artificial
  probe
  misc_feature (1)..(25): SEQ ID NO: 4793; WAN0249QH_at; Start 317; Stop 341
taagagcgagctctatgataaggct

SEQ ID NO: 30440 - DNA, 25 bp, Artificial
  probe
  misc_feature (1)..(25): SEQ ID NO: 4793; WAN0249QH_at; Start 254; Stop 278
tactatctagccatctgcagacgaa

SEQ ID NO: 30441 - DNA, 25 bp, Artificial
  probe
  misc_feature (1)..(25): SEQ ID NO: 4793; WAN0249QH_at; Start 273; Stop 297
gacgaaatacaagataattccagct

SEQ ID NO: 30442 - DNA, 25 bp, Artificial
  probe
  misc_feature (1)..(25): SEQ ID NO: 4793; WAN0249QH_at; Start 101; Stop 125
cttgaactattgtagattatatgct

SEQ ID NO: 30443 - DNA, 25 bp, Artificial
  probe
  misc_feature (1)..(25): SEQ ID NO: 4793; WAN0249QH_at; Start 394; Stop 418
gacaaaaatagtataccacaataca

SEQ ID NO: 30444 - DNA, 25 bp, Artificial
  probe
  misc_feature (1)..(25): SEQ ID NO: 4793; WAN0249QH_at; Start 320; Stop 344
gagcgagctctatgataaggctcat

SEQ ID NO: 30445 - DNA, 25 bp, Artificial
  probe
  misc_feature (1)..(25): SEQ ID NO: 4793; WAN0249QH_at; Start 241; Stop 265
tcggtctactccttactatctagcc

SEQ ID NO: 30446 - DNA, 25 bp, Artificial
  probe
  misc_feature (1)..(25): SEQ ID NO: 4793; WAN0249QH_at; Start 299; Stop 323
taacatccgctataatagtaagagc

SEQ ID NO: 30447 - DNA, 25 bp, Artificial
  probe
  misc_feature (1)..(25): SEQ ID NO: 4793; WAN0249QH_at; Start 369; Stop 393
cataggaacgtaatcggtaaccgat

SEQ ID NO: 30448 - DNA, 25 bp, Artificial
  probe
  misc_feature (1)..(25): SEQ ID NO: 4793; WAN0249QH_at; Start 169; Stop 193
ctaactatggccgtagttaagggct

SEQ ID NO: 30449 - DNA, 25 bp, Artificial
  probe
  misc_feature (1)..(25): SEQ ID NO: 4793; WAN0249QH_at; Start 292; Stop 316
ccagctataacatccgctataatag

SEQ ID NO: 30450 - DNA, 25 bp, Artificial
  probe
  misc_feature (1)..(25): SEQ ID NO: 4793; WAN0249QH_at; Start 250; Stop 274
tccttactatctagccatctgcaga

SEQ ID NO: 30451 - DNA, 25 bp, Artificial
  probe
  misc_feature (1)..(25): SEQ ID NO: 4793; WAN0249QH_at; Start 263; Stop 287
gccatctgcagacgaaatacaagat

SEQ ID NO: 30452 - DNA, 25 bp, Artificial
  probe
  misc_feature (1)..(25): SEQ ID NO: 4793; WAN0249QH_at; Start 307; Stop 331
gctataatagtaagagcgagctcta

SEQ ID NO: 30453 - DNA, 25 bp, Artificial
  probe
  misc_feature (1)..(25): SEQ ID NO: 4793; WAN0249QH_at; Start 338; Stop 362
ggctcattagtttcacctcctctca

SEQ ID NO: 30454 - DNA, 25 bp, Artificial
  probe
  misc_feature (1)..(25): SEQ ID NO: 4793; WAN0249QH_at; Start 330; Stop 354
tatgataaggctcattagtttcacc

SEQ ID NO: 30455 - DNA, 25 bp, Artificial
  probe
  misc_feature (1)..(25): SEQ ID NO: 4793; WAN0249QH_at; Start 342; Stop 366
cattagtttcacctcctctcacgaa

SEQ ID NO: 30456 - DNA, 25 bp, Artificial
  probe
  misc_feature (1)..(25): SEQ ID NO: 4793; WAN0249QH_at; Start 257; Stop 281
tatctagccatctgcagacgaaata

SEQ ID NO: 30457 - DNA, 25 bp, Artificial
  probe
  misc_feature (1)..(25): SEQ ID NO: 4793; WAN0249QH_at; Start 131; Stop 155
gtagttaattgataaggttcattag

SEQ ID NO: 30458 - DNA, 25 bp, Artificial
  probe
  misc_feature (1)..(25): SEQ ID NO: 4793; WAN0249QH_at; Start 423; Stop 447
gatcatcaaggtcacttaattcttg

SEQ ID NO: 30459 - DNA, 25 bp, Artificial
  probe
  misc_feature (1)..(25): SEQ ID NO: 4793; WAN0249QH_at; Start 429; Stop 453
caaggtcacttaattcttgaaatat

SEQ ID NO: 30460 - DNA, 25 bp, Artificial
  probe
  misc_feature (1)..(25): SEQ ID NO: 4793; WAN0249QH_at; Start 161; Stop 185
caaagcccctaactatggccgtagt

SEQ ID NO: 30461 - DNA, 25 bp, Artificial
  probe
  misc_feature (1)..(25): SEQ ID NO: 4793; WAN0249QH_at; Start 285; Stop 309
gataattccagctataacatccgct

SEQ ID NO: 30462 - DNA, 25 bp, Artificial
  probe
  misc_feature (1)..(25): SEQ ID NO: 4793; WAN0249QH_at; Start 412; Stop 436
caatacatttagatcatcaaggtca

SEQ ID NO: 30463 - DNA, 25 bp, Artificial
  probe
  misc_feature (1)..(25): SEQ ID NO: 4793; WAN0249QH_at; Start 333; Stop 357
gataaggctcattagtttcacctcc

SEQ ID NO: 30464 - DNA, 25 bp, Artificial
  probe
  misc_feature (1)..(25): SEQ ID NO: 4793; WAN0249QH_at; Start 371; Stop 395
taggaacgtaatcggtaaccgatga

SEQ ID NO: 30465 - DNA, 25 bp, Artificial
  probe
  misc_feature (1)..(25): SEQ ID NO: 4793; WAN0249QH_at; Start 323; Stop 347
cgagctctatgataaggctcattag

SEQ ID NO: 30466 - DNA, 25 bp, Artificial
  probe
  misc_feature (1)..(25): SEQ ID NO: 4793; WAN0249QH_at; Start 409; Stop 433
ccacaatacatttagatcatcaagg

SEQ ID NO: 30467 - DNA, 25 bp, Artificial
  probe
  misc_feature (1)..(25): SEQ ID NO: 4793; WAN0249QH_at; Start 261; Stop 285
tagccatctgcagacgaaatacaag

SEQ ID NO: 30468 - DNA, 25 bp, Artificial
  probe
  misc_feature (1)..(25): SEQ ID NO: 4793; WAN0249QH_at; Start 287; Stop 311
taattccagctataacatccgctat

SEQ ID NO: 30469 - DNA, 25 bp, Artificial
  probe
  misc_feature (1)..(25): SEQ ID NO: 4682; WAN0249QI_at; Start 37; Stop 61
tttgatactagatggctaacttcat

SEQ ID NO: 30470 - DNA, 25 bp, Artificial
  probe
  misc_feature (1)..(25): SEQ ID NO: 4682; WAN0249QI_at; Start 12; Stop 36
ctagttcataagagctagtcggttt

SEQ ID NO: 30471 - DNA, 25 bp, Artificial
  probe
  misc_feature (1)..(25): SEQ ID NO: 4682; WAN0249QI_at; Start 139; Stop 163
tagttagtgtataaggttcattaga

SEQ ID NO: 30472 - DNA, 25 bp, Artificial
  probe
  misc_feature (1)..(25): SEQ ID NO: 4682; WAN0249QI_at; Start 10; Stop 34
gactagttcataagagctagtcggt

SEQ ID NO: 30473 - DNA, 25 bp, Artificial
  probe
  misc_feature (1)..(25): SEQ ID NO: 4682; WAN0249QI_at; Start 28; Stop 52
agtcggttttttgatactagatggc

SEQ ID NO: 30474 - DNA, 25 bp, Artificial
  probe
  misc_feature (1)..(25): SEQ ID NO: 4682; WAN0249QI_at; Start 175; Stop 199
cctaactagtgccatagttaagggc

SEQ ID NO: 30475 - DNA, 25 bp, Artificial
  probe
  misc_feature (1)..(25): SEQ ID NO: 4682; WAN0249QI_at; Start 97; Stop 121
taaataaaactcttgaaatatctgg

SEQ ID NO: 30476 - DNA, 25 bp, Artificial
  probe
  misc_feature (1)..(25): SEQ ID NO: 4682; WAN0249QI_at; Start 177; Stop 201
taactagtgccatagttaagggctt

SEQ ID NO: 30477 - DNA, 25 bp, Artificial
  probe
  misc_feature (1)..(25): SEQ ID NO: 4682; WAN0249QI_at; Start 35; Stop 59
tttttgatactagatggctaacttc

SEQ ID NO: 30478 - DNA, 25 bp, Artificial
  probe
  misc_feature (1)..(25): SEQ ID NO: 4682; WAN0249QI_at; Start 36; Stop 60
ttttgatactagatggctaacttca

SEQ ID NO: 30479 - DNA, 25 bp, Artificial
  probe
  misc_feature (1)..(25): SEQ ID NO: 4682; WAN0249QI_at; Start 30; Stop 54
tcggttttttgatactagatggcta

SEQ ID NO: 30480 - DNA, 25 bp, Artificial
  probe
  misc_feature (1)..(25): SEQ ID NO: 4682; WAN0249QI_at; Start 13; Stop 37
tagttcataagagctagtcggtttt

SEQ ID NO: 30481 - DNA, 25 bp, Artificial
  probe
  misc_feature (1)..(25): SEQ ID NO: 4682; WAN0249QI_at; Start 25; Stop 49
gctagtcggttttttgatactagat

SEQ ID NO: 30482 - DNA, 25 bp, Artificial
  probe
  misc_feature (1)..(25): SEQ ID NO: 4682; WAN0249QI_at; Start 134; Stop 158
gaatgtagttagtgtataaggttca

SEQ ID NO: 30483 - DNA, 25 bp, Artificial
  probe
  misc_feature (1)..(25): SEQ ID NO: 4682; WAN0249QI_at; Start 179; Stop 203
actagtgccatagttaagggctttt

SEQ ID NO: 30484 - DNA, 25 bp, Artificial
  probe
  misc_feature (1)..(25): SEQ ID NO: 4682; WAN0249QI_at; Start 170; Stop 194
aagcccctaactagtgccatagtta

SEQ ID NO: 30485 - DNA, 25 bp, Artificial
  probe
  misc_feature (1)..(25): SEQ ID NO: 4682; WAN0249QI_at; Start 16; Stop 40
ttcataagagctagtcggttttttg

SEQ ID NO: 30486 - DNA, 25 bp, Artificial
  probe
  misc_feature (1)..(25): SEQ ID NO: 4682; WAN0249QI_at; Start 178; Stop 202
aactagtgccatagttaagggcttt

SEQ ID NO: 30487 - DNA, 25 bp, Artificial
  probe
  misc_feature (1)..(25): SEQ ID NO: 4682; WAN0249QI_at; Start 38; Stop 62
ttgatactagatggctaacttcatt

SEQ ID NO: 30488 - DNA, 25 bp, Artificial
  probe
  misc_feature (1)..(25): SEQ ID NO: 4682; WAN0249QI_at; Start 125; Stop 149
tatatgctagaatgtagttagtgta

SEQ ID NO: 30489 - DNA, 25 bp, Artificial
  probe
  misc_feature (1)..(25): SEQ ID NO: 4682; WAN0249QI_at; Start 18; Stop 42
cataagagctagtcggttttttgat

SEQ ID NO: 30490 - DNA, 25 bp, Artificial
  probe
  misc_feature (1)..(25): SEQ ID NO: 4682; WAN0249QI_at; Start 23; Stop 47
gagctagtcggttttttgatactag

SEQ ID NO: 30491 - DNA, 25 bp, Artificial
  probe
  misc_feature (1)..(25): SEQ ID NO: 4682; WAN0249QI_at; Start 168; Stop 192
caaagcccctaactagtgccatagt

SEQ ID NO: 30492 - DNA, 25 bp, Artificial
  probe
  misc_feature (1)..(25): SEQ ID NO: 4682; WAN0249QI_at; Start 54; Stop 78
aacttcattatagacctttcagaac

SEQ ID NO: 30493 - DNA, 25 bp, Artificial
  probe
  misc_feature (1)..(25): SEQ ID NO: 4682; WAN0249QI_at; Start 55; Stop 79
acttcattatagacctttcagaact

SEQ ID NO: 30494 - DNA, 25 bp, Artificial
  probe
  misc_feature (1)..(25): SEQ ID NO: 4682; WAN0249QI_at; Start 169; Stop 193
aaagcccctaactagtgccatagtt

SEQ ID NO: 30495 - DNA, 25 bp, Artificial
  probe
  misc_feature (1)..(25): SEQ ID NO: 4682; WAN0249QI_at; Start 8; Stop 32
tcgactagttcataagagctagtcg

SEQ ID NO: 30496 - DNA, 25 bp, Artificial
  probe
  misc_feature (1)..(25): SEQ ID NO: 4682; WAN0249QI_at; Start 14; Stop 38
agttcataagagctagtcggttttt

SEQ ID NO: 30497 - DNA, 25 bp, Artificial
  probe
  misc_feature (1)..(25): SEQ ID NO: 4682; WAN0249QI_at; Start 172; Stop 196
gcccctaactagtgccatagttaag

SEQ ID NO: 30498 - DNA, 25 bp, Artificial
  probe
  misc_feature (1)..(25): SEQ ID NO: 4682; WAN0249QI_at; Start 130; Stop 154
gctagaatgtagttagtgtataagg

SEQ ID NO: 30499 - DNA, 25 bp, Artificial
  probe
  misc_feature (1)..(25): SEQ ID NO: 4682; WAN0249QI_at; Start 32; Stop 56
ggttttttgatactagatggctaac

SEQ ID NO: 30500 - DNA, 25 bp, Artificial
  probe
  misc_feature (1)..(25): SEQ ID NO: 4682; WAN0249QI_at; Start 123; Stop 147
cttatatgctagaatgtagttagtg

SEQ ID NO: 30501 - DNA, 25 bp, Artificial
  probe
  misc_feature (1)..(25): SEQ ID NO: 4682; WAN0249QI_at; Start 21; Stop 45
aagagctagtcggttttttgatact

SEQ ID NO: 30502 - DNA, 25 bp, Artificial
  probe
  misc_feature (1)..(25): SEQ ID NO: 4682; WAN0249QI_at; Start 31; Stop 55
cggttttttgatactagatggctaa

SEQ ID NO: 30503 - DNA, 25 bp, Artificial
  probe
  misc_feature (1)..(25): SEQ ID NO: 356; WAN0249QJ_at; Start 155; Stop 179
aaactaatgagccttatcatagagc

SEQ ID NO: 30504 - DNA, 25 bp, Artificial
  probe
  misc_feature (1)..(25): SEQ ID NO: 356; WAN0249QJ_at; Start 53; Stop 77
tatttcaagaattaagtgaccttga

SEQ ID NO: 30505 - DNA, 25 bp, Artificial
  probe
  misc_feature (1)..(25): SEQ ID NO: 356; WAN0249QJ_at; Start 95; Stop 119
ggtatactatttttgtcatcggtta

SEQ ID NO: 30506 - DNA, 25 bp, Artificial
  probe
  misc_feature (1)..(25): SEQ ID NO: 356; WAN0249QJ_at; Start 79; Stop 103
gatctaaatgtattgtggtatacta

SEQ ID NO: 30507 - DNA, 25 bp, Artificial
  probe
  misc_feature (1)..(25): SEQ ID NO: 356; WAN0249QJ_at; Start 69; Stop 93
tgaccttgatgatctaaatgtattg

SEQ ID NO: 30508 - DNA, 25 bp, Artificial
  probe
  misc_feature (1)..(25): SEQ ID NO: 356; WAN0249QJ_at; Start 237; Stop 261
gatggctagatagtaaggagtagac

SEQ ID NO: 30509 - DNA, 25 bp, Artificial
  probe
  misc_feature (1)..(25): SEQ ID NO: 356; WAN0249QJ_at; Start 162; Stop 186
tgagccttatcatagagctcgctct

SEQ ID NO: 30510 - DNA, 25 bp, Artificial
  probe
  misc_feature (1)..(25): SEQ ID NO: 356; WAN0249QJ_at; Start 379; Stop 403
tagcatataatctacaatagttcaa

SEQ ID NO: 30511 - DNA, 25 bp, Artificial
  probe
  misc_feature (1)..(25): SEQ ID NO: 356; WAN0249QJ_at; Start 147; Stop 171
aggaggtgaaactaatgagccttat

SEQ ID NO: 30512 - DNA, 25 bp, Artificial
  probe
  misc_feature (1)..(25): SEQ ID NO: 356; WAN0249QJ_at; Start 72; Stop 96
ccttgatgatctaaatgtattgtgg

SEQ ID NO: 30513 - DNA, 25 bp, Artificial
  probe
  misc_feature (1)..(25): SEQ ID NO: 356; WAN0249QJ_at; Start 123; Stop 147
attacgttcctatgggttcgtgaga

SEQ ID NO: 30514 - DNA, 25 bp, Artificial
  probe
  misc_feature (1)..(25): SEQ ID NO: 356; WAN0249QJ_at; Start 320; Stop 344
actacggccatagttaggggctttg

SEQ ID NO: 30515 - DNA, 25 bp, Artificial
  probe
  misc_feature (1)..(25): SEQ ID NO: 356; WAN0249QJ_at; Start 350; Stop 374
ctaatgaaccttatcaattaactac

SEQ ID NO: 30516 - DNA, 25 bp, Artificial
  probe
  misc_feature (1)..(25): SEQ ID NO: 356; WAN0249QJ_at; Start 160; Stop 184
aatgagccttatcatagagctcgct

SEQ ID NO: 30517 - DNA, 25 bp, Artificial
  probe
  misc_feature (1)..(25): SEQ ID NO: 356; WAN0249QJ_at; Start 235; Stop 259
cagatggctagatagtaaggagtag

SEQ ID NO: 30518 - DNA, 25 bp, Artificial
  probe
  misc_feature (1)..(25): SEQ ID NO: 356; WAN0249QJ_at; Start 240; Stop 264
ggctagatagtaaggagtagaccga

SEQ ID NO: 30519 - DNA, 25 bp, Artificial
  probe
  misc_feature (1)..(25): SEQ ID NO: 356; WAN0249QJ_at; Start 166; Stop 190
ccttatcatagagctcgctcttact

SEQ ID NO: 30520 - DNA, 25 bp, Artificial
  probe
  misc_feature (1)..(25): SEQ ID NO: 356; WAN0249QJ_at; Start 233; Stop 257
tgcagatggctagatagtaaggagt

SEQ ID NO: 30521 - DNA, 25 bp, Artificial
  probe
  misc_feature (1)..(25): SEQ ID NO: 356; WAN0249QJ_at; Start 64; Stop 88
ttaagtgaccttgatgatctaaatg

SEQ ID NO: 30522 - DNA, 25 bp, Artificial
  probe
  misc_feature (1)..(25): SEQ ID NO: 356; WAN0249QJ_at; Start 353; Stop 377
atgaaccttatcaattaactacatt

SEQ ID NO: 30523 - DNA, 25 bp, Artificial
  probe
  misc_feature (1)..(25): SEQ ID NO: 356; WAN0249QJ_at; Start 231; Stop 255
tctgcagatggctagatagtaagga

SEQ ID NO: 30524 - DNA, 25 bp, Artificial
  probe
  misc_feature (1)..(25): SEQ ID NO: 356; WAN0249QJ_at; Start 164; Stop 188
agccttatcatagagctcgctctta

SEQ ID NO: 30525 - DNA, 25 bp, Artificial
  probe
  misc_feature (1)..(25): SEQ ID NO: 356; WAN0249QJ_at; Start 66; Stop 90
aagtgaccttgatgatctaaatgta

SEQ ID NO: 30526 - DNA, 25 bp, Artificial
  probe
  misc_feature (1)..(25): SEQ ID NO: 356; WAN0249QJ_at; Start 239; Stop 263
tggctagatagtaaggagtagaccg

SEQ ID NO: 30527 - DNA, 25 bp, Artificial
  probe
  misc_feature (1)..(25): SEQ ID NO: 356; WAN0249QJ_at; Start 172; Stop 196
catagagctcgctcttactattata

SEQ ID NO: 30528 - DNA, 25 bp, Artificial
  probe
  misc_feature (1)..(25): SEQ ID NO: 356; WAN0249QJ_at; Start 151; Stop 175
ggtgaaactaatgagccttatcata

SEQ ID NO: 30529 - DNA, 25 bp, Artificial
  probe
  misc_feature (1)..(25): SEQ ID NO: 356; WAN0249QJ_at; Start 92; Stop 116
tgtggtatactatttttgtcatcgg

SEQ ID NO: 30530 - DNA, 25 bp, Artificial
  probe
  misc_feature (1)..(25): SEQ ID NO: 356; WAN0249QJ_at; Start 96; Stop 120
gtatactatttttgtcatcggttac

SEQ ID NO: 30531 - DNA, 25 bp, Artificial
  probe
  misc_feature (1)..(25): SEQ ID NO: 356; WAN0249QJ_at; Start 131; Stop 155
cctatgggttcgtgagaggaggtga

SEQ ID NO: 30532 - DNA, 25 bp, Artificial
  probe
  misc_feature (1)..(25): SEQ ID NO: 356; WAN0249QJ_at; Start 149; Stop 173
gaggtgaaactaatgagccttatca

SEQ ID NO: 30533 - DNA, 25 bp, Artificial
  probe
  misc_feature (1)..(25): SEQ ID NO: 356; WAN0249QJ_at; Start 312; Stop 336
agcccttaactacggccatagttag

SEQ ID NO: 30534 - DNA, 25 bp, Artificial
  probe
  misc_feature (1)..(25): SEQ ID NO: 356; WAN0249QJ_at; Start 58; Stop 82
caagaattaagtgaccttgatgatc

SEQ ID NO: 30535 - DNA, 25 bp, Artificial
  probe
  misc_feature (1)..(25): SEQ ID NO: 356; WAN0249QJ_at; Start 61; Stop 85
gaattaagtgaccttgatgatctaa

SEQ ID NO: 30536 - DNA, 25 bp, Artificial
  probe
  misc_feature (1)..(25): SEQ ID NO: 356; WAN0249QJ_at; Start 159; Stop 183
taatgagccttatcatagagctcgc

SEQ ID NO: 30537 - DNA, 25 bp, Artificial
  probe
  misc_feature (1)..(25): SEQ ID NO: 4491; WAN0249QK_at; Start 53; Stop 77
aaaagcccttaactatggcactagt

SEQ ID NO: 30538 - DNA, 25 bp, Artificial
  probe
  misc_feature (1)..(25): SEQ ID NO: 4491; WAN0249QK_at; Start 201; Stop 225
ttagccatctagtatcaaaaaaccg

SEQ ID NO: 30539 - DNA, 25 bp, Artificial
  probe
  misc_feature (1)..(25): SEQ ID NO: 4491; WAN0249QK_at; Start 176; Stop 200
tagttctgaaaggtctataatgaag

SEQ ID NO: 30540 - DNA, 25 bp, Artificial
  probe
  misc_feature (1)..(25): SEQ ID NO: 4491; WAN0249QK_at; Start 220; Stop 244
aaaccgactagctcttatgaactag

SEQ ID NO: 30541 - DNA, 25 bp, Artificial
  probe
  misc_feature (1)..(25): SEQ ID NO: 4491; WAN0249QK_at; Start 105; Stop 129
tatacactaactacattctagcata

SEQ ID NO: 30542 - DNA, 25 bp, Artificial
  probe
  misc_feature (1)..(25): SEQ ID NO: 4491; WAN0249QK_at; Start 93; Stop 117
tctaatgaaccttatacactaacta

SEQ ID NO: 30543 - DNA, 25 bp, Artificial
  probe
  misc_feature (1)..(25): SEQ ID NO: 4491; WAN0249QK_at; Start 216; Stop 240
caaaaaaccgactagctcttatgaa

SEQ ID NO: 30544 - DNA, 25 bp, Artificial
  probe
  misc_feature (1)..(25): SEQ ID NO: 4491; WAN0249QK_at; Start 170; Stop 194
ttcccttagttctgaaaggtctata

SEQ ID NO: 30545 - DNA, 25 bp, Artificial
  probe
  misc_feature (1)..(25): SEQ ID NO: 4491; WAN0249QK_at; Start 64; Stop 88
actatggcactagttaggggctttg

SEQ ID NO: 30546 - DNA, 25 bp, Artificial
  probe
  misc_feature (1)..(25): SEQ ID NO: 4491; WAN0249QK_at; Start 208; Stop 232
tctagtatcaaaaaaccgactagct

SEQ ID NO: 30547 - DNA, 25 bp, Artificial
  probe
  misc_feature (1)..(25): SEQ ID NO: 4491; WAN0249QK_at; Start 213; Stop 237
tatcaaaaaaccgactagctcttat

SEQ ID NO: 30548 - DNA, 25 bp, Artificial
  probe
  misc_feature (1)..(25): SEQ ID NO: 4491; WAN0249QK_at; Start 172; Stop 196
cccttagttctgaaaggtctataat

SEQ ID NO: 30549 - DNA, 25 bp, Artificial
  probe
  misc_feature (1)..(25): SEQ ID NO: 4491; WAN0249QK_at; Start 98; Stop 122
tgaaccttatacactaactacattc

SEQ ID NO: 30550 - DNA, 25 bp, Artificial
  probe
  misc_feature (1)..(25): SEQ ID NO: 4491; WAN0249QK_at; Start 206; Stop 230
catctagtatcaaaaaaccgactag

SEQ ID NO: 30551 - DNA, 25 bp, Artificial
  probe
  misc_feature (1)..(25): SEQ ID NO: 4491; WAN0249QK_at; Start 102; Stop 126
ccttatacactaactacattctagc

SEQ ID NO: 30552 - DNA, 25 bp, Artificial
  probe
  misc_feature (1)..(25): SEQ ID NO: 4491; WAN0249QK_at; Start 195; Stop 219
atgaagttagccatctagtatcaaa

SEQ ID NO: 30553 - DNA, 25 bp, Artificial
  probe
  misc_feature (1)..(25): SEQ ID NO: 4491; WAN0249QK_at; Start 231; Stop 255
ctcttatgaactagtcgatttctca

SEQ ID NO: 30554 - DNA, 25 bp, Artificial
  probe
  misc_feature (1)..(25): SEQ ID NO: 4491; WAN0249QK_at; Start 210; Stop 234
tagtatcaaaaaaccgactagctct

SEQ ID NO: 30555 - DNA, 25 bp, Artificial
  probe
  misc_feature (1)..(25): SEQ ID NO: 4491; WAN0249QK_at; Start 230; Stop 254
gctcttatgaactagtcgatttctc

SEQ ID NO: 30556 - DNA, 25 bp, Artificial
  probe
  misc_feature (1)..(25): SEQ ID NO: 4491; WAN0249QK_at; Start 203; Stop 227
agccatctagtatcaaaaaaccgac

SEQ ID NO: 30557 - DNA, 25 bp, Artificial
  probe
  misc_feature (1)..(25): SEQ ID NO: 4491; WAN0249QK_at; Start 179; Stop 203
ttctgaaaggtctataatgaagtta

SEQ ID NO: 30558 - DNA, 25 bp, Artificial
  probe
  misc_feature (1)..(25): SEQ ID NO: 4491; WAN0249QK_at; Start 204; Stop 228
gccatctagtatcaaaaaaccgact

SEQ ID NO: 30559 - DNA, 25 bp, Artificial
  probe
  misc_feature (1)..(25): SEQ ID NO: 4491; WAN0249QK_at; Start 225; Stop 249
gactagctcttatgaactagtcgat

SEQ ID NO: 30560 - DNA, 25 bp, Artificial
  probe
  misc_feature (1)..(25): SEQ ID NO: 4491; WAN0249QK_at; Start 135; Stop 159
ccagatatttcaagagttttattta

SEQ ID NO: 30561 - DNA, 25 bp, Artificial
  probe
  misc_feature (1)..(25): SEQ ID NO: 4491; WAN0249QK_at; Start 57; Stop 81
gcccttaactatggcactagttagg

SEQ ID NO: 30562 - DNA, 25 bp, Artificial
  probe
  misc_feature (1)..(25): SEQ ID NO: 4491; WAN0249QK_at; Start 54; Stop 78
aaagcccttaactatggcactagtt

SEQ ID NO: 30563 - DNA, 25 bp, Artificial
  probe
  misc_feature (1)..(25): SEQ ID NO: 4491; WAN0249QK_at; Start 218; Stop 242
aaaaaccgactagctcttatgaact

SEQ ID NO: 30564 - DNA, 25 bp, Artificial
  probe
  misc_feature (1)..(25): SEQ ID NO: 4491; WAN0249QK_at; Start 211; Stop 235
agtatcaaaaaaccgactagctctt

SEQ ID NO: 30565 - DNA, 25 bp, Artificial
  probe
  misc_feature (1)..(25): SEQ ID NO: 4491; WAN0249QK_at; Start 194; Stop 218
aatgaagttagccatctagtatcaa

SEQ ID NO: 30566 - DNA, 25 bp, Artificial
  probe
  misc_feature (1)..(25): SEQ ID NO: 4491; WAN0249QK_at; Start 202; Stop 226
tagccatctagtatcaaaaaaccga

SEQ ID NO: 30567 - DNA, 25 bp, Artificial
  probe
  misc_feature (1)..(25): SEQ ID NO: 4491; WAN0249QK_at; Start 214; Stop 238
atcaaaaaaccgactagctcttatg

SEQ ID NO: 30568 - DNA, 25 bp, Artificial
  probe
  misc_feature (1)..(25): SEQ ID NO: 4491; WAN0249QK_at; Start 228; Stop 252
tagctcttatgaactagtcgatttc

SEQ ID NO: 30569 - DNA, 25 bp, Artificial
  probe
  misc_feature (1)..(25): SEQ ID NO: 4491; WAN0249QK_at; Start 109; Stop 133
cactaactacattctagcatataag

SEQ ID NO: 30570 - DNA, 25 bp, Artificial
  probe
  misc_feature (1)..(25): SEQ ID NO: 4491; WAN0249QK_at; Start 221; Stop 245
aaccgactagctcttatgaactagt

SEQ ID NO: 30571 - DNA, 25 bp, Artificial
  probe
  misc_feature (1)..(25): SEQ ID NO: 565; WAN0249QL_at; Start 117; Stop 141
tctgctgtctttgtgagtgcaaggc

SEQ ID NO: 30572 - DNA, 25 bp, Artificial
  probe
  misc_feature (1)..(25): SEQ ID NO: 565; WAN0249QL_at; Start 97; Stop 121
tgttttttgcaaaagaaagatctgc

SEQ ID NO: 30573 - DNA, 25 bp, Artificial
  probe
  misc_feature (1)..(25): SEQ ID NO: 565; WAN0249QL_at; Start 46; Stop 70
aaagctatgtccagattcagcttga

SEQ ID NO: 30574 - DNA, 25 bp, Artificial
  probe
  misc_feature (1)..(25): SEQ ID NO: 565; WAN0249QL_at; Start 127; Stop 151
ttgtgagtgcaaggctgtatttcca

SEQ ID NO: 30575 - DNA, 25 bp, Artificial
  probe
  misc_feature (1)..(25): SEQ ID NO: 565; WAN0249QL_at; Start 73; Stop 97
ggctaattcatcaaacaggtcattt

SEQ ID NO: 30576 - DNA, 25 bp, Artificial
  probe
  misc_feature (1)..(25): SEQ ID NO: 565; WAN0249QL_at; Start 112; Stop 136
aaagatctgctgtctttgtgagtgc

SEQ ID NO: 30577 - DNA, 25 bp, Artificial
  probe
  misc_feature (1)..(25): SEQ ID NO: 565; WAN0249QL_at; Start 320; Stop 344
taatcttgtaagctgaactctaatt

SEQ ID NO: 30578 - DNA, 25 bp, Artificial
  probe
  misc_feature (1)..(25): SEQ ID NO: 565; WAN0249QL_at; Start 312; Stop 336
gaactgtctaatcttgtaagctgaa

SEQ ID NO: 30579 - DNA, 25 bp, Artificial
  probe
  misc_feature (1)..(25): SEQ ID NO: 565; WAN0249QL_at; Start 140; Stop 164
gctgtatttccagttcaatttcttg

SEQ ID NO: 30580 - DNA, 25 bp, Artificial
  probe
  misc_feature (1)..(25): SEQ ID NO: 565; WAN0249QL_at; Start 135; Stop 159
gcaaggctgtatttccagttcaatt

SEQ ID NO: 30581 - DNA, 25 bp, Artificial
  probe
  misc_feature (1)..(25): SEQ ID NO: 565; WAN0249QL_at; Start 148; Stop 172
tccagttcaatttcttgaactagta

SEQ ID NO: 30582 - DNA, 25 bp, Artificial
  probe
  misc_feature (1)..(25): SEQ ID NO: 565; WAN0249QL_at; Start 131; Stop 155
gagtgcaaggctgtatttccagttc

SEQ ID NO: 30583 - DNA, 25 bp, Artificial
  probe
  misc_feature (1)..(25): SEQ ID NO: 565; WAN0249QL_at; Start 63; Stop 87
cagcttgaatggctaattcatcaaa

SEQ ID NO: 30584 - DNA, 25 bp, Artificial
  probe
  misc_feature (1)..(25): SEQ ID NO: 565; WAN0249QL_at; Start 69; Stop 93
gaatggctaattcatcaaacaggtc

SEQ ID NO: 30585 - DNA, 25 bp, Artificial
  probe
  misc_feature (1)..(25): SEQ ID NO: 565; WAN0249QL_at; Start 382; Stop 406
gatgaagatgatatagtagattgaa

SEQ ID NO: 30586 - DNA, 25 bp, Artificial
  probe
  misc_feature (1)..(25): SEQ ID NO: 565; WAN0249QL_at; Start 115; Stop 139
gatctgctgtctttgtgagtgcaag

SEQ ID NO: 30587 - DNA, 25 bp, Artificial
  probe
  misc_feature (1)..(25): SEQ ID NO: 565; WAN0249QL_at; Start 297; Stop 321
ttcgtatgtcgaaaagaactgtcta

SEQ ID NO: 30588 - DNA, 25 bp, Artificial
  probe
  misc_feature (1)..(25): SEQ ID NO: 565; WAN0249QL_at; Start 160; Stop 184
tcttgaactagtataaaatgtgtgt

SEQ ID NO: 30589 - DNA, 25 bp, Artificial
  probe
  misc_feature (1)..(25): SEQ ID NO: 565; WAN0249QL_at; Start 121; Stop 145
ctgtctttgtgagtgcaaggctgta

SEQ ID NO: 30590 - DNA, 25 bp, Artificial
  probe
  misc_feature (1)..(25): SEQ ID NO: 565; WAN0249QL_at; Start 84; Stop 108
caaacaggtcatttgttttttgcaa

SEQ ID NO: 30591 - DNA, 25 bp, Artificial
  probe
  misc_feature (1)..(25): SEQ ID NO: 565; WAN0249QL_at; Start 42; Stop 66
ttaaaaagctatgtccagattcagc

SEQ ID NO: 30592 - DNA, 25 bp, Artificial
  probe
  misc_feature (1)..(25): SEQ ID NO: 565; WAN0249QL_at; Start 367; Stop 391
tcttttacgaaactggatgaagatg

SEQ ID NO: 30593 - DNA, 25 bp, Artificial
  probe
  misc_feature (1)..(25): SEQ ID NO: 565; WAN0249QL_at; Start 102; Stop 126
tttgcaaaagaaagatctgctgtct

SEQ ID NO: 30594 - DNA, 25 bp, Artificial
  probe
  misc_feature (1)..(25): SEQ ID NO: 565; WAN0249QL_at; Start 316; Stop 340
tgtctaatcttgtaagctgaactct

SEQ ID NO: 30595 - DNA, 25 bp, Artificial
  probe
  misc_feature (1)..(25): SEQ ID NO: 565; WAN0249QL_at; Start 301; Stop 325
tatgtcgaaaagaactgtctaatct

SEQ ID NO: 30596 - DNA, 25 bp, Artificial
  probe
  misc_feature (1)..(25): SEQ ID NO: 565; WAN0249QL_at; Start 6; Stop 30
tatccttggattctaagtaagtagg

SEQ ID NO: 30597 - DNA, 25 bp, Artificial
  probe
  misc_feature (1)..(25): SEQ ID NO: 565; WAN0249QL_at; Start 173; Stop 197
taaaatgtgtgttataataatcaca

SEQ ID NO: 30598 - DNA, 25 bp, Artificial
  probe
  misc_feature (1)..(25): SEQ ID NO: 565; WAN0249QL_at; Start 372; Stop 396
tacgaaactggatgaagatgatata

SEQ ID NO: 30599 - DNA, 25 bp, Artificial
  probe
  misc_feature (1)..(25): SEQ ID NO: 565; WAN0249QL_at; Start 55; Stop 79
tccagattcagcttgaatggctaat

SEQ ID NO: 30600 - DNA, 25 bp, Artificial
  probe
  misc_feature (1)..(25): SEQ ID NO: 565; WAN0249QL_at; Start 51; Stop 75
tatgtccagattcagcttgaatggc

SEQ ID NO: 30601 - DNA, 25 bp, Artificial
  probe
  misc_feature (1)..(25): SEQ ID NO: 565; WAN0249QL_at; Start 12; Stop 36
tggattctaagtaagtaggattttc

SEQ ID NO: 30602 - DNA, 25 bp, Artificial
  probe
  misc_feature (1)..(25): SEQ ID NO: 565; WAN0249QL_at; Start 2; Stop 26
tatctatccttggattctaagtaag

SEQ ID NO: 30603 - DNA, 25 bp, Artificial
  probe
  misc_feature (1)..(25): SEQ ID NO: 565; WAN0249QL_at; Start 37; Stop 61
cttttttaaaaagctatgtccagat

SEQ ID NO: 30604 - DNA, 25 bp, Artificial
  probe
  misc_feature (1)..(25): SEQ ID NO: 565; WAN0249QL_at; Start 88; Stop 112
caggtcatttgttttttgcaaaaga

SEQ ID NO: 30605 - DNA, 25 bp, Artificial
  probe
  misc_feature (1)..(25): SEQ ID NO: 213; WAN0249QM_at; Start 8; Stop 32
gattgcgattgttagaggtgaaaaa

SEQ ID NO: 30606 - DNA, 25 bp, Artificial
  probe
  misc_feature (1)..(25): SEQ ID NO: 213; WAN0249QM_at; Start 135; Stop 159
ctataaaacaatatagactagtaat

SEQ ID NO: 30607 - DNA, 25 bp, Artificial
  probe
  misc_feature (1)..(25): SEQ ID NO: 213; WAN0249QM_at; Start 127; Stop 151
tcaatcaactataaaacaatataga

SEQ ID NO: 30608 - DNA, 25 bp, Artificial
  probe
  misc_feature (1)..(25): SEQ ID NO: 213; WAN0249QM_at; Start 132; Stop 156
caactataaaacaatatagactagt

SEQ ID NO: 30609 - DNA, 25 bp, Artificial
  probe
  misc_feature (1)..(25): SEQ ID NO: 213; WAN0249QM_at; Start 5; Stop 29
agagattgcgattgttagaggtgaa

SEQ ID NO: 30610 - DNA, 25 bp, Artificial
  probe
  misc_feature (1)..(25): SEQ ID NO: 213; WAN0249QM_at; Start 129; Stop 153
aatcaactataaaacaatatagact

SEQ ID NO: 30611 - DNA, 25 bp, Artificial
  probe
  misc_feature (1)..(25): SEQ ID NO: 213; WAN0249QM_at; Start 143; Stop 167
caatatagactagtaatggttggac

SEQ ID NO: 30612 - DNA, 25 bp, Artificial
  probe
  misc_feature (1)..(25): SEQ ID NO: 213; WAN0249QM_at; Start 2; Stop 26
agaagagattgcgattgttagaggt

SEQ ID NO: 30613 - DNA, 25 bp, Artificial
  probe
  misc_feature (1)..(25): SEQ ID NO: 213; WAN0249QM_at; Start 146; Stop 170
tatagactagtaatggttggactca

SEQ ID NO: 30614 - DNA, 25 bp, Artificial
  probe
  misc_feature (1)..(25): SEQ ID NO: 213; WAN0249QM_at; Start 6; Stop 30
gagattgcgattgttagaggtgaaa

SEQ ID NO: 30615 - DNA, 25 bp, Artificial
  probe
  misc_feature (1)..(25): SEQ ID NO: 213; WAN0249QM_at; Start 128; Stop 152
caatcaactataaaacaatatagac

SEQ ID NO: 30616 - DNA, 25 bp, Artificial
  probe
  misc_feature (1)..(25): SEQ ID NO: 213; WAN0249QM_at; Start 138; Stop 162
taaaacaatatagactagtaatggt

SEQ ID NO: 30617 - DNA, 25 bp, Artificial
  probe
  misc_feature (1)..(25): SEQ ID NO: 213; WAN0249QM_at; Start 140; Stop 164
aaacaatatagactagtaatggttg

SEQ ID NO: 30618 - DNA, 25 bp, Artificial
  probe
  misc_feature (1)..(25): SEQ ID NO: 213; WAN0249QM_at; Start 149; Stop 173
agactagtaatggttggactcaata

SEQ ID NO: 30619 - DNA, 25 bp, Artificial
  probe
  misc_feature (1)..(25): SEQ ID NO: 213; WAN0249QM_at; Start 152; Stop 176
ctagtaatggttggactcaataaga

SEQ ID NO: 30620 - DNA, 25 bp, Artificial
  probe
  misc_feature (1)..(25): SEQ ID NO: 213; WAN0249QM_at; Start 131; Stop 155
tcaactataaaacaatatagactag

SEQ ID NO: 30621 - DNA, 25 bp, Artificial
  probe
  misc_feature (1)..(25): SEQ ID NO: 213; WAN0249QM_at; Start 4; Stop 28
aagagattgcgattgttagaggtga

SEQ ID NO: 30622 - DNA, 25 bp, Artificial
  probe
  misc_feature (1)..(25): SEQ ID NO: 213; WAN0249QM_at; Start 150; Stop 174
gactagtaatggttggactcaataa

SEQ ID NO: 30623 - DNA, 25 bp, Artificial
  probe
  misc_feature (1)..(25): SEQ ID NO: 213; WAN0249QM_at; Start 136; Stop 160
tataaaacaatatagactagtaatg

SEQ ID NO: 30624 - DNA, 25 bp, Artificial
  probe
  misc_feature (1)..(25): SEQ ID NO: 213; WAN0249QM_at; Start 144; Stop 168
aatatagactagtaatggttggact

SEQ ID NO: 30625 - DNA, 25 bp, Artificial
  probe
  misc_feature (1)..(25): SEQ ID NO: 213; WAN0249QM_at; Start 133; Stop 157
aactataaaacaatatagactagta

SEQ ID NO: 30626 - DNA, 25 bp, Artificial
  probe
  misc_feature (1)..(25): SEQ ID NO: 213; WAN0249QM_at; Start 151; Stop 175
actagtaatggttggactcaataag

SEQ ID NO: 30627 - DNA, 25 bp, Artificial
  probe
  misc_feature (1)..(25): SEQ ID NO: 213; WAN0249QM_at; Start 139; Stop 163
aaaacaatatagactagtaatggtt

SEQ ID NO: 30628 - DNA, 25 bp, Artificial
  probe
  misc_feature (1)..(25): SEQ ID NO: 213; WAN0249QM_at; Start 134; Stop 158
actataaaacaatatagactagtaa

SEQ ID NO: 30629 - DNA, 25 bp, Artificial
  probe
  misc_feature (1)..(25): SEQ ID NO: 213; WAN0249QM_at; Start 148; Stop 172
tagactagtaatggttggactcaat

SEQ ID NO: 30630 - DNA, 25 bp, Artificial
  probe
  misc_feature (1)..(25): SEQ ID NO: 213; WAN0249QM_at; Start 3; Stop 27
gaagagattgcgattgttagaggtg

SEQ ID NO: 30631 - DNA, 25 bp, Artificial
  probe
  misc_feature (1)..(25): SEQ ID NO: 213; WAN0249QM_at; Start 147; Stop 171
atagactagtaatggttggactcaa

SEQ ID NO: 30632 - DNA, 25 bp, Artificial
  probe
  misc_feature (1)..(25): SEQ ID NO: 213; WAN0249QM_at; Start 142; Stop 166
acaatatagactagtaatggttgga

SEQ ID NO: 30633 - DNA, 25 bp, Artificial
  probe
  misc_feature (1)..(25): SEQ ID NO: 213; WAN0249QM_at; Start 126; Stop 150
ctcaatcaactataaaacaatatag

SEQ ID NO: 30634 - DNA, 25 bp, Artificial
  probe
  misc_feature (1)..(25): SEQ ID NO: 213; WAN0249QM_at; Start 141; Stop 165
aacaatatagactagtaatggttgg

SEQ ID NO: 30635 - DNA, 25 bp, Artificial
  probe
  misc_feature (1)..(25): SEQ ID NO: 213; WAN0249QM_at; Start 7; Stop 31
agattgcgattgttagaggtgaaaa

SEQ ID NO: 30636 - DNA, 25 bp, Artificial
  probe
  misc_feature (1)..(25): SEQ ID NO: 213; WAN0249QM_at; Start 145; Stop 169
atatagactagtaatggttggactc

SEQ ID NO: 30637 - DNA, 25 bp, Artificial
  probe
  misc_feature (1)..(25): SEQ ID NO: 213; WAN0249QM_at; Start 137; Stop 161
ataaaacaatatagactagtaatgg

SEQ ID NO: 30638 - DNA, 25 bp, Artificial
  probe
  misc_feature (1)..(25): SEQ ID NO: 213; WAN0249QM_at; Start 153; Stop 177
tagtaatggttggactcaataagaa

SEQ ID NO: 30639 - DNA, 25 bp, Artificial
  probe
  misc_feature (1)..(25): SEQ ID NO: 5130; WAN0249QN_at; Start 8; Stop 32
ggattatacaaactactaagataga

SEQ ID NO: 30640 - DNA, 25 bp, Artificial
  probe
  misc_feature (1)..(25): SEQ ID NO: 5130; WAN0249QN_at; Start 61; Stop 85
aaatgaaatacatattcccacaata

SEQ ID NO: 30641 - DNA, 25 bp, Artificial
  probe
  misc_feature (1)..(25): SEQ ID NO: 5130; WAN0249QN_at; Start 27; Stop 51
gatagaggttattcaaaaacataat

SEQ ID NO: 30642 - DNA, 25 bp, Artificial
  probe
  misc_feature (1)..(25): SEQ ID NO: 5130; WAN0249QN_at; Start 54; Stop 78
tagtagaaaatgaaatacatattcc

SEQ ID NO: 30643 - DNA, 25 bp, Artificial
  probe
  misc_feature (1)..(25): SEQ ID NO: 5130; WAN0249QN_at; Start 21; Stop 45
tactaagatagaggttattcaaaaa

SEQ ID NO: 30644 - DNA, 25 bp, Artificial
  probe
  misc_feature (1)..(25): SEQ ID NO: 5130; WAN0249QN_at; Start 16; Stop 40
caaactactaagatagaggttattc

SEQ ID NO: 30645 - DNA, 25 bp, Artificial
  probe
  misc_feature (1)..(25): SEQ ID NO: 5130; WAN0249QN_at; Start 56; Stop 80
gtagaaaatgaaatacatattccca

SEQ ID NO: 30646 - DNA, 25 bp, Artificial
  probe
  misc_feature (1)..(25): SEQ ID NO: 5130; WAN0249QN_at; Start 20; Stop 44
ctactaagatagaggttattcaaaa

SEQ ID NO: 30647 - DNA, 25 bp, Artificial
  probe
  misc_feature (1)..(25): SEQ ID NO: 5130; WAN0249QN_at; Start 7; Stop 31
gggattatacaaactactaagatag

SEQ ID NO: 30648 - DNA, 25 bp, Artificial
  probe
  misc_feature (1)..(25): SEQ ID NO: 5130; WAN0249QN_at; Start 12; Stop 36
tatacaaactactaagatagaggtt

SEQ ID NO: 30649 - DNA, 25 bp, Artificial
  probe
  misc_feature (1)..(25): SEQ ID NO: 5130; WAN0249QN_at; Start 19; Stop 43
actactaagatagaggttattcaaa

SEQ ID NO: 30650 - DNA, 25 bp, Artificial
  probe
  misc_feature (1)..(25): SEQ ID NO: 5130; WAN0249QN_at; Start 14; Stop 38
tacaaactactaagatagaggttat

SEQ ID NO: 30651 - DNA, 25 bp, Artificial
  probe
  misc_feature (1)..(25): SEQ ID NO: 5130; WAN0249QN_at; Start 17; Stop 41
aaactactaagatagaggttattca

SEQ ID NO: 30652 - DNA, 25 bp, Artificial
  probe
  misc_feature (1)..(25): SEQ ID NO: 5130; WAN0249QN_at; Start 25; Stop 49
aagatagaggttattcaaaaacata

SEQ ID NO: 30653 - DNA, 25 bp, Artificial
  probe
  misc_feature (1)..(25): SEQ ID NO: 5130; WAN0249QN_at; Start 228; Stop 252
tcctgtgtactgttctaaattcagt

SEQ ID NO: 30654 - DNA, 25 bp, Artificial
  probe
  misc_feature (1)..(25): SEQ ID NO: 5130; WAN0249QN_at; Start 222; Stop 246
tagtattcctgtgtactgttctaaa

SEQ ID NO: 30655 - DNA, 25 bp, Artificial
  probe
  misc_feature (1)..(25): SEQ ID NO: 5130; WAN0249QN_at; Start 59; Stop 83
gaaaatgaaatacatattcccacaa

SEQ ID NO: 30656 - DNA, 25 bp, Artificial
  probe
  misc_feature (1)..(25): SEQ ID NO: 5130; WAN0249QN_at; Start 24; Stop 48
taagatagaggttattcaaaaacat

SEQ ID NO: 30657 - DNA, 25 bp, Artificial
  probe
  misc_feature (1)..(25): SEQ ID NO: 5130; WAN0249QN_at; Start 225; Stop 249
tattcctgtgtactgttctaaattc

SEQ ID NO: 30658 - DNA, 25 bp, Artificial
  probe
  misc_feature (1)..(25): SEQ ID NO: 5130; WAN0249QN_at; Start 23; Stop 47
ctaagatagaggttattcaaaaaca

SEQ ID NO: 30659 - DNA, 25 bp, Artificial
  probe
  misc_feature (1)..(25): SEQ ID NO: 5130; WAN0249QN_at; Start 226; Stop 250
attcctgtgtactgttctaaattca

SEQ ID NO: 30660 - DNA, 25 bp, Artificial
  probe
  misc_feature (1)..(25): SEQ ID NO: 5130; WAN0249QN_at; Start 175; Stop 199
tgcgaacaaatcaattagaaaattc

SEQ ID NO: 30661 - DNA, 25 bp, Artificial
  probe
  misc_feature (1)..(25): SEQ ID NO: 5130; WAN0249QN_at; Start 178; Stop 202
gaacaaatcaattagaaaattcaaa

SEQ ID NO: 30662 - DNA, 25 bp, Artificial
  probe
  misc_feature (1)..(25): SEQ ID NO: 5130; WAN0249QN_at; Start 10; Stop 34
attatacaaactactaagatagagg

SEQ ID NO: 30663 - DNA, 25 bp, Artificial
  probe
  misc_feature (1)..(25): SEQ ID NO: 5130; WAN0249QN_at; Start 9; Stop 33
gattatacaaactactaagatagag

SEQ ID NO: 30664 - DNA, 25 bp, Artificial
  probe
  misc_feature (1)..(25): SEQ ID NO: 5130; WAN0249QN_at; Start 176; Stop 200
gcgaacaaatcaattagaaaattca

SEQ ID NO: 30665 - DNA, 25 bp, Artificial
  probe
  misc_feature (1)..(25): SEQ ID NO: 5130; WAN0249QN_at; Start 11; Stop 35
ttatacaaactactaagatagaggt

SEQ ID NO: 30666 - DNA, 25 bp, Artificial
  probe
  misc_feature (1)..(25): SEQ ID NO: 5130; WAN0249QN_at; Start 223; Stop 247
agtattcctgtgtactgttctaaat

SEQ ID NO: 30667 - DNA, 25 bp, Artificial
  probe
  misc_feature (1)..(25): SEQ ID NO: 5130; WAN0249QN_at; Start 64; Stop 88
tgaaatacatattcccacaataaaa

SEQ ID NO: 30668 - DNA, 25 bp, Artificial
  probe
  misc_feature (1)..(25): SEQ ID NO: 5130; WAN0249QN_at; Start 227; Stop 251
ttcctgtgtactgttctaaattcag

SEQ ID NO: 30669 - DNA, 25 bp, Artificial
  probe
  misc_feature (1)..(25): SEQ ID NO: 5130; WAN0249QN_at; Start 215; Stop 239
aatattttagtattcctgtgtactg

SEQ ID NO: 30670 - DNA, 25 bp, Artificial
  probe
  misc_feature (1)..(25): SEQ ID NO: 5130; WAN0249QN_at; Start 57; Stop 81
tagaaaatgaaatacatattcccac

SEQ ID NO: 30671 - DNA, 25 bp, Artificial
  probe
  misc_feature (1)..(25): SEQ ID NO: 5130; WAN0249QN_at; Start 36; Stop 60
tattcaaaaacataattttagtaga

SEQ ID NO: 30672 - DNA, 25 bp, Artificial
  probe
  misc_feature (1)..(25): SEQ ID NO: 5130; WAN0249QN_at; Start 18; Stop 42
aactactaagatagaggttattcaa

SEQ ID NO: 30673 - DNA, 25 bp, Artificial
  probe
  misc_feature (1)..(25): SEQ ID NO: 4730; WAN0249QO_x_at; Start 27; Stop 51
tatagtagattgaaataagatacga

SEQ ID NO: 30674 - DNA, 25 bp, Artificial
  probe
  misc_feature (1)..(25): SEQ ID NO: 4730; WAN0249QO_x_at; Start 28; Stop 52
atagtagattgaaataagatacgaa

SEQ ID NO: 30675 - DNA, 25 bp, Artificial
  probe
  misc_feature (1)..(25): SEQ ID NO: 4730; WAN0249QO_x_at; Start 1; Stop 25
tgtgtactatttttggttcatttta

SEQ ID NO: 30676 - DNA, 25 bp, Artificial
  probe
  misc_feature (1)..(25): SEQ ID NO: 451; WAN0249QP_at; Start 113; Stop 137
gattgaatatagacaaataccttgt

SEQ ID NO: 30677 - DNA, 25 bp, Artificial
  probe
  misc_feature (1)..(25): SEQ ID NO: 451; WAN0249QP_at; Start 329; Stop 353
tataagcatccaaccctctttttgt

SEQ ID NO: 30678 - DNA, 25 bp, Artificial
  probe
  misc_feature (1)..(25): SEQ ID NO: 451; WAN0249QP_at; Start 91; Stop 115
cggaaatgaagcttatatagtagat

SEQ ID NO: 30679 - DNA, 25 bp, Artificial
  probe
  misc_feature (1)..(25): SEQ ID NO: 451; WAN0249QP_at; Start 19; Stop 43
ggatgtgatagtagcaccctctttt

SEQ ID NO: 30680 - DNA, 25 bp, Artificial
  probe
  misc_feature (1)..(25): SEQ ID NO: 451; WAN0249QP_at; Start 366; Stop 390
tcttaaattatcagtctattgcaac

SEQ ID NO: 30681 - DNA, 25 bp, Artificial
  probe
  misc_feature (1)..(25): SEQ ID NO: 451; WAN0249QP_at; Start 238; Stop 262
tcagcttggtcagttctacctgcga

SEQ ID NO: 30682 - DNA, 25 bp, Artificial
  probe
  misc_feature (1)..(25): SEQ ID NO: 451; WAN0249QP_at; Start 25; Stop 49
gatagtagcaccctctttttctttg

SEQ ID NO: 30683 - DNA, 25 bp, Artificial
  probe
  misc_feature (1)..(25): SEQ ID NO: 451; WAN0249QP_at; Start 58; Stop 82
tagttcatcctcgagtaaattcaag

SEQ ID NO: 30684 - DNA, 25 bp, Artificial
  probe
  misc_feature (1)..(25): SEQ ID NO: 451; WAN0249QP_at; Start 245; Stop 269
ggtcagttctacctgcgacctcaaa

SEQ ID NO: 30685 - DNA, 25 bp, Artificial
  probe
  misc_feature (1)..(25): SEQ ID NO: 451; WAN0249QP_at; Start 227; Stop 251
ttcaaaccacatcagcttggtcagt

SEQ ID NO: 30686 - DNA, 25 bp, Artificial
  probe
  misc_feature (1)..(25): SEQ ID NO: 451; WAN0249QP_at; Start 132; Stop 156
ccttgtgattggtaaaacattttag

SEQ ID NO: 30687 - DNA, 25 bp, Artificial
  probe
  misc_feature (1)..(25): SEQ ID NO: 451; WAN0249QP_at; Start 222; Stop 246
atttcttcaaaccacatcagcttgg

SEQ ID NO: 30688 - DNA, 25 bp, Artificial
  probe
  misc_feature (1)..(25): SEQ ID NO: 451; WAN0249QP_at; Start 442; Stop 466
taaggtagtaatcattaagaagtgg

SEQ ID NO: 30689 - DNA, 25 bp, Artificial
  probe
  misc_feature (1)..(25): SEQ ID NO: 451; WAN0249QP_at; Start 258; Stop 282
tgcgacctcaaaacttgtgctttgg

SEQ ID NO: 30690 - DNA, 25 bp, Artificial
  probe
  misc_feature (1)..(25): SEQ ID NO: 451; WAN0249QP_at; Start 335; Stop 359
catccaaccctctttttgtcttcta

SEQ ID NO: 30691 - DNA, 25 bp, Artificial
  probe
  misc_feature (1)..(25): SEQ ID NO: 451; WAN0249QP_at; Start 84; Stop 108
tcttgctcggaaatgaagcttatat

SEQ ID NO: 30692 - DNA, 25 bp, Artificial
  probe
  misc_feature (1)..(25): SEQ ID NO: 451; WAN0249QP_at; Start 48; Stop 72
tgttttatgatagttcatcctcgag

SEQ ID NO: 30693 - DNA, 25 bp, Artificial
  probe
  misc_feature (1)..(25): SEQ ID NO: 451; WAN0249QP_at; Start 162; Stop 186
catttacctttcctaatcgacttgg

SEQ ID NO: 30694 - DNA, 25 bp, Artificial
  probe
  misc_feature (1)..(25): SEQ ID NO: 451; WAN0249QP_at; Start 324; Stop 348
ttgactataagcatccaaccctctt

SEQ ID NO: 30695 - DNA, 25 bp, Artificial
  probe
  misc_feature (1)..(25): SEQ ID NO: 451; WAN0249QP_at; Start 252; Stop 276
tctacctgcgacctcaaaacttgtg

SEQ ID NO: 30696 - DNA, 25 bp, Artificial
  probe
  misc_feature (1)..(25): SEQ ID NO: 451; WAN0249QP_at; Start 376; Stop 400
tcagtctattgcaacttttctcata

SEQ ID NO: 30697 - DNA, 25 bp, Artificial
  probe
  misc_feature (1)..(25): SEQ ID NO: 451; WAN0249QP_at; Start 268; Stop 292
aaacttgtgctttggtcaagctggg

SEQ ID NO: 30698 - DNA, 25 bp, Artificial
  probe
  misc_feature (1)..(25): SEQ ID NO: 451; WAN0249QP_at; Start 312; Stop 336
gatggatttccattgactataagca

SEQ ID NO: 30699 - DNA, 25 bp, Artificial
  probe
  misc_feature (1)..(25): SEQ ID NO: 451; WAN0249QP_at; Start 431; Stop 455
tagtagtatactaaggtagtaatca

SEQ ID NO: 30700 - DNA, 25 bp, Artificial
  probe
  misc_feature (1)..(25): SEQ ID NO: 451; WAN0249QP_at; Start 298; Stop 322
tttcctagtttgctgatggatttcc

SEQ ID NO: 30701 - DNA, 25 bp, Artificial
  probe
  misc_feature (1)..(25): SEQ ID NO: 451; WAN0249QP_at; Start 178; Stop 202
tcgacttggtttcatcttatttcaa

SEQ ID NO: 30702 - DNA, 25 bp, Artificial
  probe
  misc_feature (1)..(25): SEQ ID NO: 451; WAN0249QP_at; Start 416; Stop 440
gctattggttttccttagtagtata

SEQ ID NO: 30703 - DNA, 25 bp, Artificial
  probe
  misc_feature (1)..(25): SEQ ID NO: 451; WAN0249QP_at; Start 126; Stop 150
caaataccttgtgattggtaaaaca

SEQ ID NO: 30704 - DNA, 25 bp, Artificial
  probe
  misc_feature (1)..(25): SEQ ID NO: 451; WAN0249QP_at; Start 12; Stop 36
gaaagagggatgtgatagtagcacc

SEQ ID NO: 30705 - DNA, 25 bp, Artificial
  probe
  misc_feature (1)..(25): SEQ ID NO: 451; WAN0249QP_at; Start 280; Stop 304
tggtcaagctgggtttagtttccta

SEQ ID NO: 30706 - DNA, 25 bp, Artificial
  probe
  misc_feature (1)..(25): SEQ ID NO: 451; WAN0249QP_at; Start 3; Stop 27
cgatgatttgaaagagggatgtgat

SEQ ID NO: 30707 - DNA, 25 bp, Artificial
  probe
  misc_feature (1)..(25): SEQ ID NO: 451; WAN0249QP_at; Start 316; Stop 340
gatttccattgactataagcatcca

SEQ ID NO: 30708 - DNA, 25 bp, Artificial
  probe
  misc_feature (1)..(25): SEQ ID NO: 451; WAN0249QP_at; Start 172; Stop 196
tcctaatcgacttggtttcatctta

SEQ ID NO: 30709 - DNA, 25 bp, Artificial
  probe
  misc_feature (1)..(25): SEQ ID NO: 451; WAN0249QP_at; Start 450; Stop 474
taatcattaagaagtggttacaaaa

SEQ ID NO: 30710 - DNA, 25 bp, Artificial
  probe
  misc_feature (1)..(25): SEQ ID NO: 4577; WAN0249QQ_at; Start 446; Stop 470
gctactatcacatccctctttcaaa

SEQ ID NO: 30711 - DNA, 25 bp, Artificial
  probe
  misc_feature (1)..(25): SEQ ID NO: 4577; WAN0249QQ_at; Start 224; Stop 248
tagaactgaccaagctgatgtggtt

SEQ ID NO: 30712 - DNA, 25 bp, Artificial
  probe
  misc_feature (1)..(25): SEQ ID NO: 4577; WAN0249QQ_at; Start 370; Stop 394
tatataagcttcatttccgagcaag

SEQ ID NO: 30713 - DNA, 25 bp, Artificial
  probe
  misc_feature (1)..(25): SEQ ID NO: 4577; WAN0249QQ_at; Start 293; Stop 317
ccaagtcgattaggaaaggtaaatg

SEQ ID NO: 30714 - DNA, 25 bp, Artificial
  probe
  misc_feature (1)..(25): SEQ ID NO: 4577; WAN0249QQ_at; Start 286; Stop 310
gatgaaaccaagtcgattaggaaag

SEQ ID NO: 30715 - DNA, 25 bp, Artificial
  probe
  misc_feature (1)..(25): SEQ ID NO: 4577; WAN0249QQ_at; Start 120; Stop 144
tagaagacaaaaagagggttggatg

SEQ ID NO: 30716 - DNA, 25 bp, Artificial
  probe
  misc_feature (1)..(25): SEQ ID NO: 4577; WAN0249QQ_at; Start 197; Stop 221
ccaaagcacaagttttgaggtcgca

SEQ ID NO: 30717 - DNA, 25 bp, Artificial
  probe
  misc_feature (1)..(25): SEQ ID NO: 4577; WAN0249QQ_at; Start 247; Stop 271
tttgaagaaattccccaatactata

SEQ ID NO: 30718 - DNA, 25 bp, Artificial
  probe
  misc_feature (1)..(25): SEQ ID NO: 4577; WAN0249QQ_at; Start 419; Stop 443
ctatcataaaacaaagaaaaagagg

SEQ ID NO: 30719 - DNA, 25 bp, Artificial
  probe
  misc_feature (1)..(25): SEQ ID NO: 4577; WAN0249QQ_at; Start 434; Stop 458
gaaaaagagggtgctactatcacat

SEQ ID NO: 30720 - DNA, 25 bp, Artificial
  probe
  misc_feature (1)..(25): SEQ ID NO: 4577; WAN0249QQ_at; Start 175; Stop 199
taggaaactaaacccagcttgacca

SEQ ID NO: 30721 - DNA, 25 bp, Artificial
  probe
  misc_feature (1)..(25): SEQ ID NO: 4577; WAN0249QQ_at; Start 43; Stop 67
ctactaaggaaaaccaatagcaaga

SEQ ID NO: 30722 - DNA, 25 bp, Artificial
  probe
  misc_feature (1)..(25): SEQ ID NO: 4577; WAN0249QQ_at; Start 203; Stop 227
cacaagttttgaggtcgcaggtaga

SEQ ID NO: 30723 - DNA, 25 bp, Artificial
  probe
  misc_feature (1)..(25): SEQ ID NO: 4577; WAN0249QQ_at; Start 406; Stop 430
actcgaggatgaactatcataaaac

SEQ ID NO: 30724 - DNA, 25 bp, Artificial
  probe
  misc_feature (1)..(25): SEQ ID NO: 4577; WAN0249QQ_at; Start 397; Stop 421
cttgaatttactcgaggatgaacta

SEQ ID NO: 30725 - DNA, 25 bp, Artificial
  probe
  misc_feature (1)..(25): SEQ ID NO: 4577; WAN0249QQ_at; Start 131; Stop 155
aagagggttggatgcttatagtcaa

SEQ ID NO: 30726 - DNA, 25 bp, Artificial
  probe
  misc_feature (1)..(25): SEQ ID NO: 4577; WAN0249QQ_at; Start 10; Stop 34
taaccacttcttaatgattactacc

SEQ ID NO: 30727 - DNA, 25 bp, Artificial
  probe
  misc_feature (1)..(25): SEQ ID NO: 4577; WAN0249QQ_at; Start 210; Stop 234
tttgaggtcgcaggtagaactgacc

SEQ ID NO: 30728 - DNA, 25 bp, Artificial
  probe
  misc_feature (1)..(25): SEQ ID NO: 4577; WAN0249QQ_at; Start 343; Stop 367
caaggtatttgtctatattcaatct

SEQ ID NO: 30729 - DNA, 25 bp, Artificial
  probe
  misc_feature (1)..(25): SEQ ID NO: 4577; WAN0249QQ_at; Start 25; Stop 49
gattactaccttagtatactactaa

SEQ ID NO: 30730 - DNA, 25 bp, Artificial
  probe
  misc_feature (1)..(25): SEQ ID NO: 4577; WAN0249QQ_at; Start 39; Stop 63
tatactactaaggaaaaccaatagc

SEQ ID NO: 30731 - DNA, 25 bp, Artificial
  probe
  misc_feature (1)..(25): SEQ ID NO: 4577; WAN0249QQ_at; Start 154; Stop 178
aatggaaatccatcagcaaactagg

SEQ ID NO: 30732 - DNA, 25 bp, Artificial
  probe
  misc_feature (1)..(25): SEQ ID NO: 4577; WAN0249QQ_at; Start 183; Stop 207
taaacccagcttgaccaaagcacaa

SEQ ID NO: 30733 - DNA, 25 bp, Artificial
  probe
  misc_feature (1)..(25): SEQ ID NO: 4577; WAN0249QQ_at; Start 452; Stop 476
atcacatccctctttcaaatcatcg

SEQ ID NO: 30734 - DNA, 25 bp, Artificial
  probe
  misc_feature (1)..(25): SEQ ID NO: 4577; WAN0249QQ_at; Start 218; Stop 242
cgcaggtagaactgaccaagctgat

SEQ ID NO: 30735 - DNA, 25 bp, Artificial
  probe
  misc_feature (1)..(25): SEQ ID NO: 4577; WAN0249QQ_at; Start 253; Stop 277
gaaattccccaatactataatagat

SEQ ID NO: 30736 - DNA, 25 bp, Artificial
  probe
  misc_feature (1)..(25): SEQ ID NO: 4577; WAN0249QQ_at; Start 278; Stop 302
tgaaataagatgaaaccaagtcgat

SEQ ID NO: 30737 - DNA, 25 bp, Artificial
  probe
  misc_feature (1)..(25): SEQ ID NO: 4577; WAN0249QQ_at; Start 104; Stop 128
taatttaagaattctttagaagaca

SEQ ID NO: 30738 - DNA, 25 bp, Artificial
  probe
  misc_feature (1)..(25): SEQ ID NO: 4577; WAN0249QQ_at; Start 323; Stop 347
ctaaaatgttttaccaatcacaagg

SEQ ID NO: 30739 - DNA, 25 bp, Artificial
  probe
  misc_feature (1)..(25): SEQ ID NO: 4577; WAN0249QQ_at; Start 329; Stop 353
tgttttaccaatcacaaggtatttg

SEQ ID NO: 30740 - DNA, 25 bp, Artificial
  probe
  misc_feature (1)..(25): SEQ ID NO: 4577; WAN0249QQ_at; Start 89; Stop 113
gttgcaatagactgataatttaaga

SEQ ID NO: 30741 - DNA, 25 bp, Artificial
  probe
  misc_feature (1)..(25): SEQ ID NO: 4577; WAN0249QQ_at; Start 79; Stop 103
tatgagaaaagttgcaatagactga

SEQ ID NO: 30742 - DNA, 25 bp, Artificial
  probe
  misc_feature (1)..(25): SEQ ID NO: 4577; WAN0249QQ_at; Start 158; Stop 182
gaaatccatcagcaaactaggaaac

SEQ ID NO: 30743 - DNA, 25 bp, Artificial
  probe
  misc_feature (1)..(25): SEQ ID NO: 4577; WAN0249QQ_at; Start 143; Stop 167
tgcttatagtcaatggaaatccatc

SEQ ID NO: 30744 - DNA, 25 bp, Artificial
  probe
  misc_feature (1)..(25): SEQ ID NO: 92; WAN0249QR_at; Start 13; Stop 37
cacaaacaaaacagtcgccatcatc

SEQ ID NO: 30745 - DNA, 25 bp, Artificial
  probe
  misc_feature (1)..(25): SEQ ID NO: 92; WAN0249QR_at; Start 5; Stop 29
tcgacaagcacaaacaaaacagtcg

SEQ ID NO: 30746 - DNA, 25 bp, Artificial
  probe
  misc_feature (1)..(25): SEQ ID NO: 92; WAN0249QR_at; Start 106; Stop 130
tctagaaatttttagcagatgtagt

SEQ ID NO: 30747 - DNA, 25 bp, Artificial
  probe
  misc_feature (1)..(25): SEQ ID NO: 92; WAN0249QR_at; Start 9; Stop 33
caagcacaaacaaaacagtcgccat

SEQ ID NO: 30748 - DNA, 25 bp, Artificial
  probe
  misc_feature (1)..(25): SEQ ID NO: 92; WAN0249QR_at; Start 203; Stop 227
tgaagcttgcaaaagttagtaaact

SEQ ID NO: 30749 - DNA, 25 bp, Artificial
  probe
  misc_feature (1)..(25): SEQ ID NO: 92; WAN0249QR_at; Start 118; Stop 142
tagcagatgtagtgtactattctag

SEQ ID NO: 30750 - DNA, 25 bp, Artificial
  probe
  misc_feature (1)..(25): SEQ ID NO: 92; WAN0249QR_at; Start 134; Stop 158
ctattctagtctcaatttactatgg

SEQ ID NO: 30751 - DNA, 25 bp, Artificial
  probe
  misc_feature (1)..(25): SEQ ID NO: 92; WAN0249QR_at; Start 112; Stop 136
aatttttagcagatgtagtgtacta

SEQ ID NO: 30752 - DNA, 25 bp, Artificial
  probe
  misc_feature (1)..(25): SEQ ID NO: 92; WAN0249QR_at; Start 37; Stop 61
catttattgagataatatagtagat

SEQ ID NO: 30753 - DNA, 25 bp, Artificial
  probe
  misc_feature (1)..(25): SEQ ID NO: 92; WAN0249QR_at; Start 26; Stop 50
gtcgccatcatcatttattgagata

SEQ ID NO: 30754 - DNA, 25 bp, Artificial
  probe
  misc_feature (1)..(25): SEQ ID NO: 92; WAN0249QR_at; Start 3; Stop 27
aatcgacaagcacaaacaaaacagt

SEQ ID NO: 30755 - DNA, 25 bp, Artificial
  probe
  misc_feature (1)..(25): SEQ ID NO: 92; WAN0249QR_at; Start 207; Stop 231
gcttgcaaaagttagtaaacttgta

SEQ ID NO: 30756 - DNA, 25 bp, Artificial
  probe
  misc_feature (1)..(25): SEQ ID NO: 92; WAN0249QR_at; Start 189; Stop 213
cagatgtgtaattttgaagcttgca

SEQ ID NO: 30757 - DNA, 25 bp, Artificial
  probe
  misc_feature (1)..(25): SEQ ID NO: 92; WAN0249QR_at; Start 2; Stop 26
aaatcgacaagcacaaacaaaacag

SEQ ID NO: 30758 - DNA, 25 bp, Artificial
  probe
  misc_feature (1)..(25): SEQ ID NO: 92; WAN0249QR_at; Start 15; Stop 39
caaacaaaacagtcgccatcatcat

SEQ ID NO: 30759 - DNA, 25 bp, Artificial
  probe
  misc_feature (1)..(25): SEQ ID NO: 92; WAN0249QR_at; Start 230; Stop 254
tagatttcgatttgaagtaacttgt

SEQ ID NO: 30760 - DNA, 25 bp, Artificial
  probe
  misc_feature (1)..(25): SEQ ID NO: 92; WAN0249QR_at; Start 174; Stop 198
tcgaaaaaatatttacagatgtgta

SEQ ID NO: 30761 - DNA, 25 bp, Artificial
  probe
  misc_feature (1)..(25): SEQ ID NO: 92; WAN0249QR_at; Start 16; Stop 40
aaacaaaacagtcgccatcatcatt

SEQ ID NO: 30762 - DNA, 25 bp, Artificial
  probe
  misc_feature (1)..(25): SEQ ID NO: 92; WAN0249QR_at; Start 168; Stop 192
tatctttcgaaaaaatatttacaga

SEQ ID NO: 30763 - DNA, 25 bp, Artificial
  probe
  misc_feature (1)..(25): SEQ ID NO: 92; WAN0249QR_at; Start 226; Stop 250
cttgtagatttcgatttgaagtaac

SEQ ID NO: 30764 - DNA, 25 bp, Artificial
  probe
  misc_feature (1)..(25): SEQ ID NO: 92; WAN0249QR_at; Start 110; Stop 134
gaaatttttagcagatgtagtgtac

SEQ ID NO: 30765 - DNA, 25 bp, Artificial
  probe
  misc_feature (1)..(25): SEQ ID NO: 92; WAN0249QR_at; Start 19; Stop 43
caaaacagtcgccatcatcatttat

SEQ ID NO: 30766 - DNA, 25 bp, Artificial
  probe
  misc_feature (1)..(25): SEQ ID NO: 92; WAN0249QR_at; Start 193; Stop 217
tgtgtaattttgaagcttgcaaaag

SEQ ID NO: 30767 - DNA, 25 bp, Artificial
  probe
  misc_feature (1)..(25): SEQ ID NO: 92; WAN0249QR_at; Start 222; Stop 246
taaacttgtagatttcgatttgaag

SEQ ID NO: 30768 - DNA, 25 bp, Artificial
  probe
  misc_feature (1)..(25): SEQ ID NO: 92; WAN0249QR_at; Start 12; Stop 36
gcacaaacaaaacagtcgccatcat

SEQ ID NO: 30769 - DNA, 25 bp, Artificial
  probe
  misc_feature (1)..(25): SEQ ID NO: 92; WAN0249QR_at; Start 24; Stop 48
cagtcgccatcatcatttattgaga

SEQ ID NO: 30770 - DNA, 25 bp, Artificial
  probe
  misc_feature (1)..(25): SEQ ID NO: 92; WAN0249QR_at; Start 29; Stop 53
gccatcatcatttattgagataata

SEQ ID NO: 30771 - DNA, 25 bp, Artificial
  probe
  misc_feature (1)..(25): SEQ ID NO: 92; WAN0249QR_at; Start 7; Stop 31
gacaagcacaaacaaaacagtcgcc

SEQ ID NO: 30772 - DNA, 25 bp, Artificial
  probe
  misc_feature (1)..(25): SEQ ID NO: 92; WAN0249QR_at; Start 219; Stop 243
tagtaaacttgtagatttcgatttg

SEQ ID NO: 30773 - DNA, 25 bp, Artificial
  probe
  misc_feature (1)..(25): SEQ ID NO: 92; WAN0249QR_at; Start 202; Stop 226
ttgaagcttgcaaaagttagtaaac

SEQ ID NO: 30774 - DNA, 25 bp, Artificial
  probe
  misc_feature (1)..(25): SEQ ID NO: 92; WAN0249QR_at; Start 10; Stop 34
aagcacaaacaaaacagtcgccatc

SEQ ID NO: 30775 - DNA, 25 bp, Artificial
  probe
  misc_feature (1)..(25): SEQ ID NO: 92; WAN0249QR_at; Start 115; Stop 139
ttttagcagatgtagtgtactattc

SEQ ID NO: 30776 - DNA, 25 bp, Artificial
  probe
  misc_feature (1)..(25): SEQ ID NO: 92; WAN0249QR_at; Start 191; Stop 215
gatgtgtaattttgaagcttgcaaa

SEQ ID NO: 30777 - DNA, 25 bp, Artificial
  probe
  misc_feature (1)..(25): SEQ ID NO: 92; WAN0249QR_at; Start 21; Stop 45
aaacagtcgccatcatcatttattg

SEQ ID NO: 30778 - DNA, 25 bp, Artificial
  probe
  misc_feature (1)..(25): SEQ ID NO: 4610; WAN0249QS_at; Start 55; Stop 79
tttgtaaaaaagttcagtagatgca

SEQ ID NO: 30779 - DNA, 25 bp, Artificial
  probe
  misc_feature (1)..(25): SEQ ID NO: 4610; WAN0249QS_at; Start 7; Stop 31
cgaattctatcaaaaatcagtagga

SEQ ID NO: 30780 - DNA, 25 bp, Artificial
  probe
  misc_feature (1)..(25): SEQ ID NO: 4610; WAN0249QS_at; Start 12; Stop 36
tctatcaaaaatcagtaggaactcg

SEQ ID NO: 30781 - DNA, 25 bp, Artificial
  probe
  misc_feature (1)..(25): SEQ ID NO: 4610; WAN0249QS_at; Start 254; Stop 278
ggttcagctattacaattccaggaa

SEQ ID NO: 30782 - DNA, 25 bp, Artificial
  probe
  misc_feature (1)..(25): SEQ ID NO: 4610; WAN0249QS_at; Start 21; Stop 45
aatcagtaggaactcgagtctactg

SEQ ID NO: 30783 - DNA, 25 bp, Artificial
  probe
  misc_feature (1)..(25): SEQ ID NO: 4610; WAN0249QS_at; Start 71; Stop 95
gtagatgcaaatggattcggaagcg

SEQ ID NO: 30784 - DNA, 25 bp, Artificial
  probe
  misc_feature (1)..(25): SEQ ID NO: 4610; WAN0249QS_at; Start 19; Stop 43
aaaatcagtaggaactcgagtctac

SEQ ID NO: 30785 - DNA, 25 bp, Artificial
  probe
  misc_feature (1)..(25): SEQ ID NO: 4610; WAN0249QS_at; Start 72; Stop 96
tagatgcaaatggattcggaagcga

SEQ ID NO: 30786 - DNA, 25 bp, Artificial
  probe
  misc_feature (1)..(25): SEQ ID NO: 4610; WAN0249QS_at; Start 67; Stop 91
ttcagtagatgcaaatggattcgga

SEQ ID NO: 30787 - DNA, 25 bp, Artificial
  probe
  misc_feature (1)..(25): SEQ ID NO: 4610; WAN0249QS_at; Start 255; Stop 279
gttcagctattacaattccaggaaa

SEQ ID NO: 30788 - DNA, 25 bp, Artificial
  probe
  misc_feature (1)..(25): SEQ ID NO: 4610; WAN0249QS_at; Start 74; Stop 98
gatgcaaatggattcggaagcgatg

SEQ ID NO: 30789 - DNA, 25 bp, Artificial
  probe
  misc_feature (1)..(25): SEQ ID NO: 4610; WAN0249QS_at; Start 73; Stop 97
agatgcaaatggattcggaagcgat

SEQ ID NO: 30790 - DNA, 25 bp, Artificial
  probe
  misc_feature (1)..(25): SEQ ID NO: 4610; WAN0249QS_at; Start 59; Stop 83
taaaaaagttcagtagatgcaaatg

SEQ ID NO: 30791 - DNA, 25 bp, Artificial
  probe
  misc_feature (1)..(25): SEQ ID NO: 4610; WAN0249QS_at; Start 65; Stop 89
agttcagtagatgcaaatggattcg

SEQ ID NO: 30792 - DNA, 25 bp, Artificial
  probe
  misc_feature (1)..(25): SEQ ID NO: 4610; WAN0249QS_at; Start 1; Stop 25
tccaaacgaattctatcaaaaatca

SEQ ID NO: 30793 - DNA, 25 bp, Artificial
  probe
  misc_feature (1)..(25): SEQ ID NO: 4610; WAN0249QS_at; Start 69; Stop 93
cagtagatgcaaatggattcggaag

SEQ ID NO: 30794 - DNA, 25 bp, Artificial
  probe
  misc_feature (1)..(25): SEQ ID NO: 4610; WAN0249QS_at; Start 14; Stop 38
tatcaaaaatcagtaggaactcgag

SEQ ID NO: 30795 - DNA, 25 bp, Artificial
  probe
  misc_feature (1)..(25): SEQ ID NO: 4610; WAN0249QS_at; Start 54; Stop 78
ttttgtaaaaaagttcagtagatgc

SEQ ID NO: 30796 - DNA, 25 bp, Artificial
  probe
  misc_feature (1)..(25): SEQ ID NO: 4610; WAN0249QS_at; Start 68; Stop 92
tcagtagatgcaaatggattcggaa

SEQ ID NO: 30797 - DNA, 25 bp, Artificial
  probe
  misc_feature (1)..(25): SEQ ID NO: 4610; WAN0249QS_at; Start 61; Stop 85
aaaaagttcagtagatgcaaatgga

SEQ ID NO: 30798 - DNA, 25 bp, Artificial
  probe
  misc_feature (1)..(25): SEQ ID NO: 4610; WAN0249QS_at; Start 251; Stop 275
gatggttcagctattacaattccag

SEQ ID NO: 30799 - DNA, 25 bp, Artificial
  probe
  misc_feature (1)..(25): SEQ ID NO: 4610; WAN0249QS_at; Start 259; Stop 283
agctattacaattccaggaaatcaa

SEQ ID NO: 30800 - DNA, 25 bp, Artificial
  probe
  misc_feature (1)..(25): SEQ ID NO: 4610; WAN0249QS_at; Start 26; Stop 50
gtaggaactcgagtctactgatttt

SEQ ID NO: 30801 - DNA, 25 bp, Artificial
  probe
  misc_feature (1)..(25): SEQ ID NO: 4610; WAN0249QS_at; Start 20; Stop 44
aaatcagtaggaactcgagtctact

SEQ ID NO: 30802 - DNA, 25 bp, Artificial
  probe
  misc_feature (1)..(25): SEQ ID NO: 4610; WAN0249QS_at; Start 76; Stop 100
tgcaaatggattcggaagcgatgtt

SEQ ID NO: 30803 - DNA, 25 bp, Artificial
  probe
  misc_feature (1)..(25): SEQ ID NO: 4610; WAN0249QS_at; Start 64; Stop 88
aagttcagtagatgcaaatggattc

SEQ ID NO: 30804 - DNA, 25 bp, Artificial
  probe
  misc_feature (1)..(25): SEQ ID NO: 4610; WAN0249QS_at; Start 24; Stop 48
cagtaggaactcgagtctactgatt

SEQ ID NO: 30805 - DNA, 25 bp, Artificial
  probe
  misc_feature (1)..(25): SEQ ID NO: 4610; WAN0249QS_at; Start 57; Stop 81
tgtaaaaaagttcagtagatgcaaa

SEQ ID NO: 30806 - DNA, 25 bp, Artificial
  probe
  misc_feature (1)..(25): SEQ ID NO: 4610; WAN0249QS_at; Start 253; Stop 277
tggttcagctattacaattccagga

SEQ ID NO: 30807 - DNA, 25 bp, Artificial
  probe
  misc_feature (1)..(25): SEQ ID NO: 4610; WAN0249QS_at; Start 257; Stop 281
tcagctattacaattccaggaaatc

SEQ ID NO: 30808 - DNA, 25 bp, Artificial
  probe
  misc_feature (1)..(25): SEQ ID NO: 4610; WAN0249QS_at; Start 258; Stop 282
cagctattacaattccaggaaatca

SEQ ID NO: 30809 - DNA, 25 bp, Artificial
  probe
  misc_feature (1)..(25): SEQ ID NO: 4610; WAN0249QS_at; Start 70; Stop 94
agtagatgcaaatggattcggaagc

SEQ ID NO: 30810 - DNA, 25 bp, Artificial
  probe
  misc_feature (1)..(25): SEQ ID NO: 4610; WAN0249QS_at; Start 66; Stop 90
gttcagtagatgcaaatggattcgg

SEQ ID NO: 30811 - DNA, 25 bp, Artificial
  probe
  misc_feature (1)..(25): SEQ ID NO: 4610; WAN0249QS_at; Start 3; Stop 27
caaacgaattctatcaaaaatcagt

SEQ ID NO: 30812 - DNA, 25 bp, Artificial
  probe
  misc_feature (1)..(25): SEQ ID NO: 4430; WAN0249QT_at; Start 189; Stop 213
agctattatcctcgcagttttttca

SEQ ID NO: 30813 - DNA, 25 bp, Artificial
  probe
  misc_feature (1)..(25): SEQ ID NO: 4430; WAN0249QT_at; Start 228; Stop 252
cctatgttcattcgcttgggtctgc

SEQ ID NO: 30814 - DNA, 25 bp, Artificial
  probe
  misc_feature (1)..(25): SEQ ID NO: 4430; WAN0249QT_at; Start 126; Stop 150
tatcgaaactacaggcttgttgttg

SEQ ID NO: 30815 - DNA, 25 bp, Artificial
  probe
  misc_feature (1)..(25): SEQ ID NO: 4430; WAN0249QT_at; Start 73; Stop 97
ggtaacaatatgcttaatgcgaaaa

SEQ ID NO: 30816 - DNA, 25 bp, Artificial
  probe
  misc_feature (1)..(25): SEQ ID NO: 4430; WAN0249QT_at; Start 62; Stop 86
aaaaagaaagcggtaacaatatgct

SEQ ID NO: 30817 - DNA, 25 bp, Artificial
  probe
  misc_feature (1)..(25): SEQ ID NO: 4430; WAN0249QT_at; Start 107; Stop 131
tatttttatgtttgatcgttatcga

SEQ ID NO: 30818 - DNA, 25 bp, Artificial
  probe
  misc_feature (1)..(25): SEQ ID NO: 4430; WAN0249QT_at; Start 235; Stop 259
tcattcgcttgggtctgctctacaa

SEQ ID NO: 30819 - DNA, 25 bp, Artificial
  probe
  misc_feature (1)..(25): SEQ ID NO: 4430; WAN0249QT_at; Start 175; Stop 199
tatttagacacagaagctattatcc

SEQ ID NO: 30820 - DNA, 25 bp, Artificial
  probe
  misc_feature (1)..(25): SEQ ID NO: 4430; WAN0249QT_at; Start 232; Stop 256
tgttcattcgcttgggtctgctcta

SEQ ID NO: 30821 - DNA, 25 bp, Artificial
  probe
  misc_feature (1)..(25): SEQ ID NO: 4430; WAN0249QT_at; Start 78; Stop 102
caatatgcttaatgcgaaaattttt

SEQ ID NO: 30822 - DNA, 25 bp, Artificial
  probe
  misc_feature (1)..(25): SEQ ID NO: 4430; WAN0249QT_at; Start 185; Stop 209
cagaagctattatcctcgcagtttt

SEQ ID NO: 30823 - DNA, 25 bp, Artificial
  probe
  misc_feature (1)..(25): SEQ ID NO: 4430; WAN0249QT_at; Start 120; Stop 144
gatcgttatcgaaactacaggcttg

SEQ ID NO: 30824 - DNA, 25 bp, Artificial
  probe
  misc_feature (1)..(25): SEQ ID NO: 4430; WAN0249QT_at; Start 123; Stop 147
cgttatcgaaactacaggcttgttg

SEQ ID NO: 30825 - DNA, 25 bp, Artificial
  probe
  misc_feature (1)..(25): SEQ ID NO: 4430; WAN0249QT_at; Start 181; Stop 205
gacacagaagctattatcctcgcag

SEQ ID NO: 30826 - DNA, 25 bp, Artificial
  probe
  misc_feature (1)..(25): SEQ ID NO: 4430; WAN0249QT_at; Start 152; Stop 176
tgaaaagaggtctcgaaatgggtta

SEQ ID NO: 30827 - DNA, 25 bp, Artificial
  probe
  misc_feature (1)..(25): SEQ ID NO: 4430; WAN0249QT_at; Start 71; Stop 95
gcggtaacaatatgcttaatgcgaa

SEQ ID NO: 30828 - DNA, 25 bp, Artificial
  probe
  misc_feature (1)..(25): SEQ ID NO: 4430; WAN0249QT_at; Start 230; Stop 254
tatgttcattcgcttgggtctgctc

SEQ ID NO: 30829 - DNA, 25 bp, Artificial
  probe
  misc_feature (1)..(25): SEQ ID NO: 4430; WAN0249QT_at; Start 195; Stop 219
tatcctcgcagttttttcatttgct

SEQ ID NO: 30830 - DNA, 25 bp, Artificial
  probe
  misc_feature (1)..(25): SEQ ID NO: 4430; WAN0249QT_at; Start 149; Stop 173
tgttgaaaagaggtctcgaaatggg

SEQ ID NO: 30831 - DNA, 25 bp, Artificial
  probe
  misc_feature (1)..(25): SEQ ID NO: 4430; WAN0249QT_at; Start 157; Stop 181
agaggtctcgaaatgggttatttag

SEQ ID NO: 30832 - DNA, 25 bp, Artificial
  probe
  misc_feature (1)..(25): SEQ ID NO: 4430; WAN0249QT_at; Start 144; Stop 168
gttgttgttgaaaagaggtctcgaa

SEQ ID NO: 30833 - DNA, 25 bp, Artificial
  probe
  misc_feature (1)..(25): SEQ ID NO: 4430; WAN0249QT_at; Start 117; Stop 141
tttgatcgttatcgaaactacaggc

SEQ ID NO: 30834 - DNA, 25 bp, Artificial
  probe
  misc_feature (1)..(25): SEQ ID NO: 4430; WAN0249QT_at; Start 239; Stop 263
tcgcttgggtctgctctacaataaa

SEQ ID NO: 30835 - DNA, 25 bp, Artificial
  probe
  misc_feature (1)..(25): SEQ ID NO: 4430; WAN0249QT_at; Start 245; Stop 269
gggtctgctctacaataaaaaaaca

SEQ ID NO: 30836 - DNA, 25 bp, Artificial
  probe
  misc_feature (1)..(25): SEQ ID NO: 4430; WAN0249QT_at; Start 198; Stop 222
cctcgcagttttttcatttgctttt

SEQ ID NO: 30837 - DNA, 25 bp, Artificial
  probe
  misc_feature (1)..(25): SEQ ID NO: 4430; WAN0249QT_at; Start 171; Stop 195
gggttatttagacacagaagctatt

SEQ ID NO: 30838 - DNA, 25 bp, Artificial
  probe
  misc_feature (1)..(25): SEQ ID NO: 4430; WAN0249QT_at; Start 135; Stop 159
tacaggcttgttgttgttgaaaaga

SEQ ID NO: 30839 - DNA, 25 bp, Artificial
  probe
  misc_feature (1)..(25): SEQ ID NO: 4430; WAN0249QT_at; Start 178; Stop 202
ttagacacagaagctattatcctcg

SEQ ID NO: 30840 - DNA, 25 bp, Artificial
  probe
  misc_feature (1)..(25): SEQ ID NO: 4430; WAN0249QT_at; Start 167; Stop 191
aaatgggttatttagacacagaagc

SEQ ID NO: 30841 - DNA, 25 bp, Artificial
  probe
  misc_feature (1)..(25): SEQ ID NO: 4430; WAN0249QT_at; Start 241; Stop 265
gcttgggtctgctctacaataaaaa

SEQ ID NO: 30842 - DNA, 25 bp, Artificial
  probe
  misc_feature (1)..(25): SEQ ID NO: 4430; WAN0249QT_at; Start 183; Stop 207
cacagaagctattatcctcgcagtt

SEQ ID NO: 30843 - DNA, 25 bp, Artificial
  probe
  misc_feature (1)..(25): SEQ ID NO: 4430; WAN0249QT_at; Start 141; Stop 165
cttgttgttgttgaaaagaggtctc

SEQ ID NO: 30844 - DNA, 25 bp, Artificial
  probe
  misc_feature (1)..(25): SEQ ID NO: 4430; WAN0249QT_at; Start 162; Stop 186
tctcgaaatgggttatttagacaca

SEQ ID NO: 30845 - DNA, 25 bp, Artificial
  probe
  misc_feature (1)..(25): SEQ ID NO: 4430; WAN0249QT_at; Start 130; Stop 154
gaaactacaggcttgttgttgttga

SEQ ID NO: 30846 - DNA, 25 bp, Artificial
  probe
  misc_feature (1)..(25): SEQ ID NO: 4361; WAN0249QU_at; Start 226; Stop 250
cgtaggctatgaatagaaacgtgat

SEQ ID NO: 30847 - DNA, 25 bp, Artificial
  probe
  misc_feature (1)..(25): SEQ ID NO: 4361; WAN0249QU_at; Start 356; Stop 380
tggtgtgaaaagacatagtaaactg

SEQ ID NO: 30848 - DNA, 25 bp, Artificial
  probe
  misc_feature (1)..(25): SEQ ID NO: 4361; WAN0249QU_at; Start 41; Stop 65
tttttatacgatgggcatgtcgtgc

SEQ ID NO: 30849 - DNA, 25 bp, Artificial
  probe
  misc_feature (1)..(25): SEQ ID NO: 4361; WAN0249QU_at; Start 242; Stop 266
aaacgtgatagcgaggagcatatag

SEQ ID NO: 30850 - DNA, 25 bp, Artificial
  probe
  misc_feature (1)..(25): SEQ ID NO: 4361; WAN0249QU_at; Start 13; Stop 37
tgaaatcttctaccttgggtaggag

SEQ ID NO: 30851 - DNA, 25 bp, Artificial
  probe
  misc_feature (1)..(25): SEQ ID NO: 4361; WAN0249QU_at; Start 264; Stop 288
tagtggataaggtagcgagaaattt

SEQ ID NO: 30852 - DNA, 25 bp, Artificial
  probe
  misc_feature (1)..(25): SEQ ID NO: 4361; WAN0249QU_at; Start 32; Stop 56
taggagatttttttatacgatgggc

SEQ ID NO: 30853 - DNA, 25 bp, Artificial
  probe
  misc_feature (1)..(25): SEQ ID NO: 4361; WAN0249QU_at; Start 102; Stop 126
ggtgaatacaatagcgctccccaag

SEQ ID NO: 30854 - DNA, 25 bp, Artificial
  probe
  misc_feature (1)..(25): SEQ ID NO: 4361; WAN0249QU_at; Start 48; Stop 72
acgatgggcatgtcgtgcatctgag

SEQ ID NO: 30855 - DNA, 25 bp, Artificial
  probe
  misc_feature (1)..(25): SEQ ID NO: 4361; WAN0249QU_at; Start 107; Stop 131
atacaatagcgctccccaagcctga

SEQ ID NO: 30856 - DNA, 25 bp, Artificial
  probe
  misc_feature (1)..(25): SEQ ID NO: 4361; WAN0249QU_at; Start 360; Stop 384
gtgaaaagacatagtaaactgaatc

SEQ ID NO: 30857 - DNA, 25 bp, Artificial
  probe
  misc_feature (1)..(25): SEQ ID NO: 4361; WAN0249QU_at; Start 305; Stop 329
gtcttaatctatatatgtaaatcac

SEQ ID NO: 30858 - DNA, 25 bp, Artificial
  probe
  misc_feature (1)..(25): SEQ ID NO: 4361; WAN0249QU_at; Start 350; Stop 374
taaggttggtgtgaaaagacatagt

SEQ ID NO: 30859 - DNA, 25 bp, Artificial
  probe
  misc_feature (1)..(25): SEQ ID NO: 4361; WAN0249QU_at; Start 208; Stop 232
agaaagcaatagtgaaatcgtaggc

SEQ ID NO: 30860 - DNA, 25 bp, Artificial
  probe
  misc_feature (1)..(25): SEQ ID NO: 4361; WAN0249QU_at; Start 239; Stop 263
tagaaacgtgatagcgaggagcata

SEQ ID NO: 30861 - DNA, 25 bp, Artificial
  probe
  misc_feature (1)..(25): SEQ ID NO: 4361; WAN0249QU_at; Start 221; Stop 245
gaaatcgtaggctatgaatagaaac

SEQ ID NO: 30862 - DNA, 25 bp, Artificial
  probe
  misc_feature (1)..(25): SEQ ID NO: 4361; WAN0249QU_at; Start 202; Stop 226
tgtcagagaaagcaatagtgaaatc

SEQ ID NO: 30863 - DNA, 25 bp, Artificial
  probe
  misc_feature (1)..(25): SEQ ID NO: 4361; WAN0249QU_at; Start 98; Stop 122
taccggtgaatacaatagcgctccc

SEQ ID NO: 30864 - DNA, 25 bp, Artificial
  probe
  misc_feature (1)..(25): SEQ ID NO: 4361; WAN0249QU_at; Start 289; Stop 313
taaagtataaaagatagtcttaatc

SEQ ID NO: 30865 - DNA, 25 bp, Artificial
  probe
  misc_feature (1)..(25): SEQ ID NO: 4361; WAN0249QU_at; Start 182; Stop 206
ctgacgcaggaaataagaattgtca

SEQ ID NO: 30866 - DNA, 25 bp, Artificial
  probe
  misc_feature (1)..(25): SEQ ID NO: 4361; WAN0249QU_at; Start 45; Stop 69
tatacgatgggcatgtcgtgcatct

SEQ ID NO: 30867 - DNA, 25 bp, Artificial
  probe
  misc_feature (1)..(25): SEQ ID NO: 4361; WAN0249QU_at; Start 318; Stop 342
tatgtaaatcacaaaagtaattgaa

SEQ ID NO: 30868 - DNA, 25 bp, Artificial
  probe
  misc_feature (1)..(25): SEQ ID NO: 4361; WAN0249QU_at; Start 52; Stop 76
tgggcatgtcgtgcatctgaggtgt

SEQ ID NO: 30869 - DNA, 25 bp, Artificial
  probe
  misc_feature (1)..(25): SEQ ID NO: 4361; WAN0249QU_at; Start 186; Stop 210
cgcaggaaataagaattgtcagaga

SEQ ID NO: 30870 - DNA, 25 bp, Artificial
  probe
  misc_feature (1)..(25): SEQ ID NO: 4361; WAN0249QU_at; Start 191; Stop 215
gaaataagaattgtcagagaaagca

SEQ ID NO: 30871 - DNA, 25 bp, Artificial
  probe
  misc_feature (1)..(25): SEQ ID NO: 4361; WAN0249QU_at; Start 266; Stop 290
gtggataaggtagcgagaaatttta

SEQ ID NO: 30872 - DNA, 25 bp, Artificial
  probe
  misc_feature (1)..(25): SEQ ID NO: 4361; WAN0249QU_at; Start 16; Stop 40
aatcttctaccttgggtaggagatt

SEQ ID NO: 30873 - DNA, 25 bp, Artificial
  probe
  misc_feature (1)..(25): SEQ ID NO: 4361; WAN0249QU_at; Start 260; Stop 284
catatagtggataaggtagcgagaa

SEQ ID NO: 30874 - DNA, 25 bp, Artificial
  probe
  misc_feature (1)..(25): SEQ ID NO: 4361; WAN0249QU_at; Start 213; Stop 237
gcaatagtgaaatcgtaggctatga

SEQ ID NO: 30875 - DNA, 25 bp, Artificial
  probe
  misc_feature (1)..(25): SEQ ID NO: 4361; WAN0249QU_at; Start 250; Stop 274
tagcgaggagcatatagtggataag

SEQ ID NO: 30876 - DNA, 25 bp, Artificial
  probe
  misc_feature (1)..(25): SEQ ID NO: 4361; WAN0249QU_at; Start 247; Stop 271
tgatagcgaggagcatatagtggat

SEQ ID NO: 30877 - DNA, 25 bp, Artificial
  probe
  misc_feature (1)..(25): SEQ ID NO: 4361; WAN0249QU_at; Start 233; Stop 257
tatgaatagaaacgtgatagcgagg

SEQ ID NO: 30878 - DNA, 25 bp, Artificial
  probe
  misc_feature (1)..(25): SEQ ID NO: 4361; WAN0249QU_at; Start 253; Stop 277
cgaggagcatatagtggataaggta

SEQ ID NO: 30879 - DNA, 25 bp, Artificial
  probe
  misc_feature (1)..(25): SEQ ID NO: 4361; WAN0249QU_at; Start 236; Stop 260
gaatagaaacgtgatagcgaggagc

SEQ ID NO: 30880 - DNA, 25 bp, Artificial
  probe
  misc_feature (1)..(25): SEQ ID NO: 410; WAN0249QV_at; Start 287; Stop 311
agttctcggcgagtcaaatagcgat

SEQ ID NO: 30881 - DNA, 25 bp, Artificial
  probe
  misc_feature (1)..(25): SEQ ID NO: 410; WAN0249QV_at; Start 69; Stop 93
tgaatctggaatagcacagcatatc

SEQ ID NO: 30882 - DNA, 25 bp, Artificial
  probe
  misc_feature (1)..(25): SEQ ID NO: 410; WAN0249QV_at; Start 272; Stop 296
tatatctgatgtcaaagttctcggc

SEQ ID NO: 30883 - DNA, 25 bp, Artificial
  probe
  misc_feature (1)..(25): SEQ ID NO: 410; WAN0249QV_at; Start 197; Stop 221
caatcaactatattgttataaattg

SEQ ID NO: 30884 - DNA, 25 bp, Artificial
  probe
  misc_feature (1)..(25): SEQ ID NO: 410; WAN0249QV_at; Start 70; Stop 94
gaatctggaatagcacagcatatct

SEQ ID NO: 30885 - DNA, 25 bp, Artificial
  probe
  misc_feature (1)..(25): SEQ ID NO: 410; WAN0249QV_at; Start 77; Stop 101
gaatagcacagcatatcttctaaaa

SEQ ID NO: 30886 - DNA, 25 bp, Artificial
  probe
  misc_feature (1)..(25): SEQ ID NO: 410; WAN0249QV_at; Start 269; Stop 293
tagtatatctgatgtcaaagttctc

SEQ ID NO: 30887 - DNA, 25 bp, Artificial
  probe
  misc_feature (1)..(25): SEQ ID NO: 410; WAN0249QV_at; Start 277; Stop 301
ctgatgtcaaagttctcggcgagtc

SEQ ID NO: 30888 - DNA, 25 bp, Artificial
  probe
  misc_feature (1)..(25): SEQ ID NO: 410; WAN0249QV_at; Start 267; Stop 291
tatagtatatctgatgtcaaagttc

SEQ ID NO: 30889 - DNA, 25 bp, Artificial
  probe
  misc_feature (1)..(25): SEQ ID NO: 410; WAN0249QV_at; Start 75; Stop 99
tggaatagcacagcatatcttctaa

SEQ ID NO: 30890 - DNA, 25 bp, Artificial
  probe
  misc_feature (1)..(25): SEQ ID NO: 410; WAN0249QV_at; Start 288; Stop 312
gttctcggcgagtcaaatagcgatt

SEQ ID NO: 30891 - DNA, 25 bp, Artificial
  probe
  misc_feature (1)..(25): SEQ ID NO: 410; WAN0249QV_at; Start 292; Stop 316
tcggcgagtcaaatagcgattccca

SEQ ID NO: 30892 - DNA, 25 bp, Artificial
  probe
  misc_feature (1)..(25): SEQ ID NO: 410; WAN0249QV_at; Start 285; Stop 309
aaagttctcggcgagtcaaatagcg

SEQ ID NO: 30893 - DNA, 25 bp, Artificial
  probe
  misc_feature (1)..(25): SEQ ID NO: 410; WAN0249QV_at; Start 290; Stop 314
tctcggcgagtcaaatagcgattcc

SEQ ID NO: 30894 - DNA, 25 bp, Artificial
  probe
  misc_feature (1)..(25): SEQ ID NO: 410; WAN0249QV_at; Start 68; Stop 92
ctgaatctggaatagcacagcatat

SEQ ID NO: 30895 - DNA, 25 bp, Artificial
  probe
  misc_feature (1)..(25): SEQ ID NO: 410; WAN0249QV_at; Start 281; Stop 305
tgtcaaagttctcggcgagtcaaat

SEQ ID NO: 30896 - DNA, 25 bp, Artificial
  probe
  misc_feature (1)..(25): SEQ ID NO: 410; WAN0249QV_at; Start 278; Stop 302
tgatgtcaaagttctcggcgagtca

SEQ ID NO: 30897 - DNA, 25 bp, Artificial
  probe
  misc_feature (1)..(25): SEQ ID NO: 410; WAN0249QV_at; Start 276; Stop 300
tctgatgtcaaagttctcggcgagt

SEQ ID NO: 30898 - DNA, 25 bp, Artificial
  probe
  misc_feature (1)..(25): SEQ ID NO: 410; WAN0249QV_at; Start 275; Stop 299
atctgatgtcaaagttctcggcgag

SEQ ID NO: 30899 - DNA, 25 bp, Artificial
  probe
  misc_feature (1)..(25): SEQ ID NO: 410; WAN0249QV_at; Start 258; Stop 282
tcaatttgttatagtatatctgatg

SEQ ID NO: 30900 - DNA, 25 bp, Artificial
  probe
  misc_feature (1)..(25): SEQ ID NO: 410; WAN0249QV_at; Start 273; Stop 297
atatctgatgtcaaagttctcggcg

SEQ ID NO: 30901 - DNA, 25 bp, Artificial
  probe
  misc_feature (1)..(25): SEQ ID NO: 410; WAN0249QV_at; Start 73; Stop 97
tctggaatagcacagcatatcttct

SEQ ID NO: 30902 - DNA, 25 bp, Artificial
  probe
  misc_feature (1)..(25): SEQ ID NO: 410; WAN0249QV_at; Start 280; Stop 304
atgtcaaagttctcggcgagtcaaa

SEQ ID NO: 30903 - DNA, 25 bp, Artificial
  probe
  misc_feature (1)..(25): SEQ ID NO: 410; WAN0249QV_at; Start 85; Stop 109
cagcatatcttctaaaatatagtaa

SEQ ID NO: 30904 - DNA, 25 bp, Artificial
  probe
  misc_feature (1)..(25): SEQ ID NO: 410; WAN0249QV_at; Start 289; Stop 313
ttctcggcgagtcaaatagcgattc

SEQ ID NO: 30905 - DNA, 25 bp, Artificial
  probe
  misc_feature (1)..(25): SEQ ID NO: 410; WAN0249QV_at; Start 274; Stop 298
tatctgatgtcaaagttctcggcga

SEQ ID NO: 30906 - DNA, 25 bp, Artificial
  probe
  misc_feature (1)..(25): SEQ ID NO: 410; WAN0249QV_at; Start 271; Stop 295
gtatatctgatgtcaaagttctcgg

SEQ ID NO: 30907 - DNA, 25 bp, Artificial
  probe
  misc_feature (1)..(25): SEQ ID NO: 410; WAN0249QV_at; Start 264; Stop 288
tgttatagtatatctgatgtcaaag

SEQ ID NO: 30908 - DNA, 25 bp, Artificial
  probe
  misc_feature (1)..(25): SEQ ID NO: 410; WAN0249QV_at; Start 293; Stop 317
cggcgagtcaaatagcgattcccaa

SEQ ID NO: 30909 - DNA, 25 bp, Artificial
  probe
  misc_feature (1)..(25): SEQ ID NO: 410; WAN0249QV_at; Start 291; Stop 315
ctcggcgagtcaaatagcgattccc

SEQ ID NO: 30910 - DNA, 25 bp, Artificial
  probe
  misc_feature (1)..(25): SEQ ID NO: 410; WAN0249QV_at; Start 286; Stop 310
aagttctcggcgagtcaaatagcga

SEQ ID NO: 30911 - DNA, 25 bp, Artificial
  probe
  misc_feature (1)..(25): SEQ ID NO: 410; WAN0249QV_at; Start 82; Stop 106
gcacagcatatcttctaaaatatag

SEQ ID NO: 30912 - DNA, 25 bp, Artificial
  probe
  misc_feature (1)..(25): SEQ ID NO: 410; WAN0249QV_at; Start 76; Stop 100
ggaatagcacagcatatcttctaaa

SEQ ID NO: 30913 - DNA, 25 bp, Artificial
  probe
  misc_feature (1)..(25): SEQ ID NO: 410; WAN0249QV_at; Start 279; Stop 303
gatgtcaaagttctcggcgagtcaa

SEQ ID NO: 30914 - DNA, 25 bp, Artificial
  probe
  misc_feature (1)..(25): SEQ ID NO: 4596; WAN0249QW_at; Start 94; Stop 118
ctcggtgggcacctactaccggtga

SEQ ID NO: 30915 - DNA, 25 bp, Artificial
  probe
  misc_feature (1)..(25): SEQ ID NO: 4596; WAN0249QW_at; Start 83; Stop 107
aggtgtaagtcctcggtgggcacct

SEQ ID NO: 30916 - DNA, 25 bp, Artificial
  probe
  misc_feature (1)..(25): SEQ ID NO: 4596; WAN0249QW_at; Start 95; Stop 119
tcggtgggcacctactaccggtgaa

SEQ ID NO: 30917 - DNA, 25 bp, Artificial
  probe
  misc_feature (1)..(25): SEQ ID NO: 4596; WAN0249QW_at; Start 90; Stop 114
agtcctcggtgggcacctactaccg

SEQ ID NO: 30918 - DNA, 25 bp, Artificial
  probe
  misc_feature (1)..(25): SEQ ID NO: 4596; WAN0249QW_at; Start 86; Stop 110
tgtaagtcctcggtgggcacctact

SEQ ID NO: 30919 - DNA, 25 bp, Artificial
  probe
  misc_feature (1)..(25): SEQ ID NO: 4596; WAN0249QW_at; Start 36; Stop 60
ctatgtctcaactttttttgatgta

SEQ ID NO: 30920 - DNA, 25 bp, Artificial
  probe
  misc_feature (1)..(25): SEQ ID NO: 4596; WAN0249QW_at; Start 103; Stop 127
cacctactaccggtgaacccaatag

SEQ ID NO: 30921 - DNA, 25 bp, Artificial
  probe
  misc_feature (1)..(25): SEQ ID NO: 4596; WAN0249QW_at; Start 109; Stop 133
ctaccggtgaacccaatagcgattc

SEQ ID NO: 30922 - DNA, 25 bp, Artificial
  probe
  misc_feature (1)..(25): SEQ ID NO: 4596; WAN0249QW_at; Start 39; Stop 63
tgtctcaactttttttgatgtacga

SEQ ID NO: 30923 - DNA, 25 bp, Artificial
  probe
  misc_feature (1)..(25): SEQ ID NO: 4596; WAN0249QW_at; Start 40; Stop 64
gtctcaactttttttgatgtacgac

SEQ ID NO: 30924 - DNA, 25 bp, Artificial
  probe
  misc_feature (1)..(25): SEQ ID NO: 4596; WAN0249QW_at; Start 38; Stop 62
atgtctcaactttttttgatgtacg

SEQ ID NO: 30925 - DNA, 25 bp, Artificial
  probe
  misc_feature (1)..(25): SEQ ID NO: 4596; WAN0249QW_at; Start 99; Stop 123
tgggcacctactaccggtgaaccca

SEQ ID NO: 30926 - DNA, 25 bp, Artificial
  probe
  misc_feature (1)..(25): SEQ ID NO: 4596; WAN0249QW_at; Start 110; Stop 134
taccggtgaacccaatagcgattcc

SEQ ID NO: 30927 - DNA, 25 bp, Artificial
  probe
  misc_feature (1)..(25): SEQ ID NO: 4596; WAN0249QW_at; Start 41; Stop 65
tctcaactttttttgatgtacgacg

SEQ ID NO: 30928 - DNA, 25 bp, Artificial
  probe
  misc_feature (1)..(25): SEQ ID NO: 4596; WAN0249QW_at; Start 88; Stop 112
taagtcctcggtgggcacctactac

SEQ ID NO: 30929 - DNA, 25 bp, Artificial
  probe
  misc_feature (1)..(25): SEQ ID NO: 4596; WAN0249QW_at; Start 126; Stop 150
agcgattcccaagtctgacgctgga

SEQ ID NO: 30930 - DNA, 25 bp, Artificial
  probe
  misc_feature (1)..(25): SEQ ID NO: 4596; WAN0249QW_at; Start 42; Stop 66
ctcaactttttttgatgtacgacgg

SEQ ID NO: 30931 - DNA, 25 bp, Artificial
  probe
  misc_feature (1)..(25): SEQ ID NO: 4596; WAN0249QW_at; Start 102; Stop 126
gcacctactaccggtgaacccaata

SEQ ID NO: 30932 - DNA, 25 bp, Artificial
  probe
  misc_feature (1)..(25): SEQ ID NO: 4596; WAN0249QW_at; Start 124; Stop 148
atagcgattcccaagtctgacgctg

SEQ ID NO: 30933 - DNA, 25 bp, Artificial
  probe
  misc_feature (1)..(25): SEQ ID NO: 4596; WAN0249QW_at; Start 37; Stop 61
tatgtctcaactttttttgatgtac

SEQ ID NO: 30934 - DNA, 25 bp, Artificial
  probe
  misc_feature (1)..(25): SEQ ID NO: 4596; WAN0249QW_at; Start 93; Stop 117
cctcggtgggcacctactaccggtg

SEQ ID NO: 30935 - DNA, 25 bp, Artificial
  probe
  misc_feature (1)..(25): SEQ ID NO: 4596; WAN0249QW_at; Start 84; Stop 108
ggtgtaagtcctcggtgggcaccta

SEQ ID NO: 30936 - DNA, 25 bp, Artificial
  probe
  misc_feature (1)..(25): SEQ ID NO: 4596; WAN0249QW_at; Start 125; Stop 149
tagcgattcccaagtctgacgctgg

SEQ ID NO: 30937 - DNA, 25 bp, Artificial
  probe
  misc_feature (1)..(25): SEQ ID NO: 4596; WAN0249QW_at; Start 85; Stop 109
gtgtaagtcctcggtgggcacctac

SEQ ID NO: 30938 - DNA, 25 bp, Artificial
  probe
  misc_feature (1)..(25): SEQ ID NO: 4596; WAN0249QW_at; Start 87; Stop 111
gtaagtcctcggtgggcacctacta

SEQ ID NO: 30939 - DNA, 25 bp, Artificial
  probe
  misc_feature (1)..(25): SEQ ID NO: 4750; WAN0249QX_at; Start 180; Stop 204
agaccatccttaaattttgcttaag

SEQ ID NO: 30940 - DNA, 25 bp, Artificial
  probe
  misc_feature (1)..(25): SEQ ID NO: 4750; WAN0249QX_at; Start 36; Stop 60
tttgcaaaaaatttctatcaccagc

SEQ ID NO: 30941 - DNA, 25 bp, Artificial
  probe
  misc_feature (1)..(25): SEQ ID NO: 4750; WAN0249QX_at; Start 176; Stop 200
tactagaccatccttaaattttgct

SEQ ID NO: 30942 - DNA, 25 bp, Artificial
  probe
  misc_feature (1)..(25): SEQ ID NO: 4750; WAN0249QX_at; Start 37; Stop 61
ttgcaaaaaatttctatcaccagca

SEQ ID NO: 30943 - DNA, 25 bp, Artificial
  probe
  misc_feature (1)..(25): SEQ ID NO: 4750; WAN0249QX_at; Start 108; Stop 132
attgtgatgaaaaaagtttaggatt

SEQ ID NO: 30944 - DNA, 25 bp, Artificial
  probe
  misc_feature (1)..(25): SEQ ID NO: 4750; WAN0249QX_at; Start 39; Stop 63
gcaaaaaatttctatcaccagcacc

SEQ ID NO: 30945 - DNA, 25 bp, Artificial
  probe
  misc_feature (1)..(25): SEQ ID NO: 4750; WAN0249QX_at; Start 104; Stop 128
ggagattgtgatgaaaaaagtttag

SEQ ID NO: 30946 - DNA, 25 bp, Artificial
  probe
  misc_feature (1)..(25): SEQ ID NO: 4750; WAN0249QX_at; Start 165; Stop 189
tgactatataatactagaccatcct

SEQ ID NO: 30947 - DNA, 25 bp, Artificial
  probe
  misc_feature (1)..(25): SEQ ID NO: 4750; WAN0249QX_at; Start 167; Stop 191
actatataatactagaccatcctta

SEQ ID NO: 30948 - DNA, 25 bp, Artificial
  probe
  misc_feature (1)..(25): SEQ ID NO: 4750; WAN0249QX_at; Start 60; Stop 84
cacctcaccacgcaaaaaagccacc

SEQ ID NO: 30949 - DNA, 25 bp, Artificial
  probe
  misc_feature (1)..(25): SEQ ID NO: 4750; WAN0249QX_at; Start 179; Stop 203
tagaccatccttaaattttgcttaa

SEQ ID NO: 30950 - DNA, 25 bp, Artificial
  probe
  misc_feature (1)..(25): SEQ ID NO: 4750; WAN0249QX_at; Start 181; Stop 205
gaccatccttaaattttgcttaaga

SEQ ID NO: 30951 - DNA, 25 bp, Artificial
  probe
  misc_feature (1)..(25): SEQ ID NO: 4750; WAN0249QX_at; Start 107; Stop 131
gattgtgatgaaaaaagtttaggat

SEQ ID NO: 30952 - DNA, 25 bp, Artificial
  probe
  misc_feature (1)..(25): SEQ ID NO: 4750; WAN0249QX_at; Start 55; Stop 79
accagcacctcaccacgcaaaaaag

SEQ ID NO: 30953 - DNA, 25 bp, Artificial
  probe
  misc_feature (1)..(25): SEQ ID NO: 4750; WAN0249QX_at; Start 177; Stop 201
actagaccatccttaaattttgctt

SEQ ID NO: 30954 - DNA, 25 bp, Artificial
  probe
  misc_feature (1)..(25): SEQ ID NO: 4750; WAN0249QX_at; Start 38; Stop 62
tgcaaaaaatttctatcaccagcac

SEQ ID NO: 30955 - DNA, 25 bp, Artificial
  probe
  misc_feature (1)..(25): SEQ ID NO: 4750; WAN0249QX_at; Start 162; Stop 186
taatgactatataatactagaccat

SEQ ID NO: 30956 - DNA, 25 bp, Artificial
  probe
  misc_feature (1)..(25): SEQ ID NO: 4750; WAN0249QX_at; Start 175; Stop 199
atactagaccatccttaaattttgc

SEQ ID NO: 30957 - DNA, 25 bp, Artificial
  probe
  misc_feature (1)..(25): SEQ ID NO: 4750; WAN0249QX_at; Start 42; Stop 66
aaaaatttctatcaccagcacctca

SEQ ID NO: 30958 - DNA, 25 bp, Artificial
  probe
  misc_feature (1)..(25): SEQ ID NO: 4750; WAN0249QX_at; Start 168; Stop 192
ctatataatactagaccatccttaa

SEQ ID NO: 30959 - DNA, 25 bp, Artificial
  probe
  misc_feature (1)..(25): SEQ ID NO: 4750; WAN0249QX_at; Start 33; Stop 57
tattttgcaaaaaatttctatcacc

SEQ ID NO: 30960 - DNA, 25 bp, Artificial
  probe
  misc_feature (1)..(25): SEQ ID NO: 4750; WAN0249QX_at; Start 45; Stop 69
aatttctatcaccagcacctcacca

SEQ ID NO: 30961 - DNA, 25 bp, Artificial
  probe
  misc_feature (1)..(25): SEQ ID NO: 4750; WAN0249QX_at; Start 171; Stop 195
tataatactagaccatccttaaatt

SEQ ID NO: 30962 - DNA, 25 bp, Artificial
  probe
  misc_feature (1)..(25): SEQ ID NO: 4750; WAN0249QX_at; Start 47; Stop 71
tttctatcaccagcacctcaccacg

SEQ ID NO: 30963 - DNA, 25 bp, Artificial
  probe
  misc_feature (1)..(25): SEQ ID NO: 4750; WAN0249QX_at; Start 58; Stop 82
agcacctcaccacgcaaaaaagcca

SEQ ID NO: 30964 - DNA, 25 bp, Artificial
  probe
  misc_feature (1)..(25): SEQ ID NO: 4750; WAN0249QX_at; Start 40; Stop 64
caaaaaatttctatcaccagcacct

SEQ ID NO: 30965 - DNA, 25 bp, Artificial
  probe
  misc_feature (1)..(25): SEQ ID NO: 4750; WAN0249QX_at; Start 166; Stop 190
gactatataatactagaccatcctt

SEQ ID NO: 30966 - DNA, 25 bp, Artificial
  probe
  misc_feature (1)..(25): SEQ ID NO: 4750; WAN0249QX_at; Start 163; Stop 187
aatgactatataatactagaccatc

SEQ ID NO: 30967 - DNA, 25 bp, Artificial
  probe
  misc_feature (1)..(25): SEQ ID NO: 4750; WAN0249QX_at; Start 105; Stop 129
gagattgtgatgaaaaaagtttagg

SEQ ID NO: 30968 - DNA, 25 bp, Artificial
  probe
  misc_feature (1)..(25): SEQ ID NO: 4750; WAN0249QX_at; Start 43; Stop 67
aaaatttctatcaccagcacctcac

SEQ ID NO: 30969 - DNA, 25 bp, Artificial
  probe
  misc_feature (1)..(25): SEQ ID NO: 4750; WAN0249QX_at; Start 169; Stop 193
tatataatactagaccatccttaaa

SEQ ID NO: 30970 - DNA, 25 bp, Artificial
  probe
  misc_feature (1)..(25): SEQ ID NO: 4750; WAN0249QX_at; Start 178; Stop 202
ctagaccatccttaaattttgctta

SEQ ID NO: 30971 - DNA, 25 bp, Artificial
  probe
  misc_feature (1)..(25): SEQ ID NO: 4750; WAN0249QX_at; Start 174; Stop 198
aatactagaccatccttaaattttg

SEQ ID NO: 30972 - DNA, 25 bp, Artificial
  probe
  misc_feature (1)..(25): SEQ ID NO: 4750; WAN0249QX_at; Start 41; Stop 65
aaaaaatttctatcaccagcacctc

SEQ ID NO: 30973 - DNA, 25 bp, Artificial
  probe
  misc_feature (1)..(25): SEQ ID NO: 3619; WAN0249QY_at; Start 236; Stop 260
tcactatagtaaggtgcagcaggat

SEQ ID NO: 30974 - DNA, 25 bp, Artificial
  probe
  misc_feature (1)..(25): SEQ ID NO: 3619; WAN0249QY_at; Start 234; Stop 258
tttcactatagtaaggtgcagcagg

SEQ ID NO: 30975 - DNA, 25 bp, Artificial
  probe
  misc_feature (1)..(25): SEQ ID NO: 3619; WAN0249QY_at; Start 129; Stop 153
tgttatgatatagcagattgaaact

SEQ ID NO: 30976 - DNA, 25 bp, Artificial
  probe
  misc_feature (1)..(25): SEQ ID NO: 3619; WAN0249QY_at; Start 10; Stop 34
tcctttttgaattttcagaataatc

SEQ ID NO: 30977 - DNA, 25 bp, Artificial
  probe
  misc_feature (1)..(25): SEQ ID NO: 3619; WAN0249QY_at; Start 18; Stop 42
gaattttcagaataatctgtatatg

SEQ ID NO: 30978 - DNA, 25 bp, Artificial
  probe
  misc_feature (1)..(25): SEQ ID NO: 3619; WAN0249QY_at; Start 235; Stop 259
ttcactatagtaaggtgcagcagga

SEQ ID NO: 30979 - DNA, 25 bp, Artificial
  probe
  misc_feature (1)..(25): SEQ ID NO: 3619; WAN0249QY_at; Start 227; Stop 251
tatttcatttcactatagtaaggtg

SEQ ID NO: 30980 - DNA, 25 bp, Artificial
  probe
  misc_feature (1)..(25): SEQ ID NO: 3619; WAN0249QY_at; Start 132; Stop 156
tatgatatagcagattgaaactaga

SEQ ID NO: 30981 - DNA, 25 bp, Artificial
  probe
  misc_feature (1)..(25): SEQ ID NO: 3619; WAN0249QY_at; Start 7; Stop 31
tactcctttttgaattttcagaata

SEQ ID NO: 30982 - DNA, 25 bp, Artificial
  probe
  misc_feature (1)..(25): SEQ ID NO: 3619; WAN0249QY_at; Start 111; Stop 135
aagaaaatctgaaataactgttatg

SEQ ID NO: 30983 - DNA, 25 bp, Artificial
  probe
  misc_feature (1)..(25): SEQ ID NO: 3619; WAN0249QY_at; Start 239; Stop 263
ctatagtaaggtgcagcaggataaa

SEQ ID NO: 30984 - DNA, 25 bp, Artificial
  probe
  misc_feature (1)..(25): SEQ ID NO: 3619; WAN0249QY_at; Start 109; Stop 133
caaagaaaatctgaaataactgtta

SEQ ID NO: 30985 - DNA, 25 bp, Artificial
  probe
  misc_feature (1)..(25): SEQ ID NO: 3619; WAN0249QY_at; Start 229; Stop 253
tttcatttcactatagtaaggtgca

SEQ ID NO: 30986 - DNA, 25 bp, Artificial
  probe
  misc_feature (1)..(25): SEQ ID NO: 3619; WAN0249QY_at; Start 107; Stop 131
tacaaagaaaatctgaaataactgt

SEQ ID NO: 30987 - DNA, 25 bp, Artificial
  probe
  misc_feature (1)..(25): SEQ ID NO: 3619; WAN0249QY_at; Start 27; Stop 51
gaataatctgtatatgtaatctata

SEQ ID NO: 30988 - DNA, 25 bp, Artificial
  probe
  misc_feature (1)..(25): SEQ ID NO: 3619; WAN0249QY_at; Start 39; Stop 63
tatgtaatctatattctacaaaaaa

SEQ ID NO: 30989 - DNA, 25 bp, Artificial
  probe
  misc_feature (1)..(25): SEQ ID NO: 3619; WAN0249QY_at; Start 232; Stop 256
catttcactatagtaaggtgcagca

SEQ ID NO: 30990 - DNA, 25 bp, Artificial
  probe
  misc_feature (1)..(25): SEQ ID NO: 3619; WAN0249QY_at; Start 62; Stop 86
aattttggaaaaatgcaagaatatt

SEQ ID NO: 30991 - DNA, 25 bp, Artificial
  probe
  misc_feature (1)..(25): SEQ ID NO: 3619; WAN0249QY_at; Start 25; Stop 49
cagaataatctgtatatgtaatcta

SEQ ID NO: 30992 - DNA, 25 bp, Artificial
  probe
  misc_feature (1)..(25): SEQ ID NO: 3619; WAN0249QY_at; Start 228; Stop 252
atttcatttcactatagtaaggtgc

SEQ ID NO: 30993 - DNA, 25 bp, Artificial
  probe
  misc_feature (1)..(25): SEQ ID NO: 3619; WAN0249QY_at; Start 133; Stop 157
atgatatagcagattgaaactagaa

SEQ ID NO: 30994 - DNA, 25 bp, Artificial
  probe
  misc_feature (1)..(25): SEQ ID NO: 3619; WAN0249QY_at; Start 121; Stop 145
gaaataactgttatgatatagcaga

SEQ ID NO: 30995 - DNA, 25 bp, Artificial
  probe
  misc_feature (1)..(25): SEQ ID NO: 3619; WAN0249QY_at; Start 237; Stop 261
cactatagtaaggtgcagcaggata

SEQ ID NO: 30996 - DNA, 25 bp, Artificial
  probe
  misc_feature (1)..(25): SEQ ID NO: 3619; WAN0249QY_at; Start 33; Stop 57
tctgtatatgtaatctatattctac

SEQ ID NO: 30997 - DNA, 25 bp, Artificial
  probe
  misc_feature (1)..(25): SEQ ID NO: 3619; WAN0249QY_at; Start 238; Stop 262
actatagtaaggtgcagcaggataa

SEQ ID NO: 30998 - DNA, 25 bp, Artificial
  probe
  misc_feature (1)..(25): SEQ ID NO: 3619; WAN0249QY_at; Start 113; Stop 137
gaaaatctgaaataactgttatgat

SEQ ID NO: 30999 - DNA, 25 bp, Artificial
  probe
  misc_feature (1)..(25): SEQ ID NO: 3619; WAN0249QY_at; Start 24; Stop 48
tcagaataatctgtatatgtaatct

SEQ ID NO: 31000 - DNA, 25 bp, Artificial
  probe
  misc_feature (1)..(25): SEQ ID NO: 3619; WAN0249QY_at; Start 128; Stop 152
ctgttatgatatagcagattgaaac

SEQ ID NO: 31001 - DNA, 25 bp, Artificial
  probe
  misc_feature (1)..(25): SEQ ID NO: 3619; WAN0249QY_at; Start 131; Stop 155
ttatgatatagcagattgaaactag

SEQ ID NO: 31002 - DNA, 25 bp, Artificial
  probe
  misc_feature (1)..(25): SEQ ID NO: 3619; WAN0249QY_at; Start 233; Stop 257
atttcactatagtaaggtgcagcag

SEQ ID NO: 31003 - DNA, 25 bp, Artificial
  probe
  misc_feature (1)..(25): SEQ ID NO: 3619; WAN0249QY_at; Start 125; Stop 149
taactgttatgatatagcagattga

SEQ ID NO: 31004 - DNA, 25 bp, Artificial
  probe
  misc_feature (1)..(25): SEQ ID NO: 3619; WAN0249QY_at; Start 231; Stop 255
tcatttcactatagtaaggtgcagc

SEQ ID NO: 31005 - DNA, 25 bp, Artificial
  probe
  misc_feature (1)..(25): SEQ ID NO: 3619; WAN0249QY_at; Start 230; Stop 254
ttcatttcactatagtaaggtgcag

SEQ ID NO: 31006 - DNA, 25 bp, Artificial
  probe
  misc_feature (1)..(25): SEQ ID NO: 3619; WAN0249QY_at; Start 98; Stop 122
tagaaaatttacaaagaaaatctga

SEQ ID NO: 31007 - DNA, 25 bp, Artificial
  probe
  misc_feature (1)..(25): SEQ ID NO: 3746; WAN0249QZ_at; Start 57; Stop 81
actcctaagtttagcacttatgtgg

SEQ ID NO: 31008 - DNA, 25 bp, Artificial
  probe
  misc_feature (1)..(25): SEQ ID NO: 3746; WAN0249QZ_at; Start 24; Stop 48
aagccacaaacaaaaaagccacctg

SEQ ID NO: 31009 - DNA, 25 bp, Artificial
  probe
  misc_feature (1)..(25): SEQ ID NO: 3746; WAN0249QZ_at; Start 48; Stop 72
gattgggtgactcctaagtttagca

SEQ ID NO: 31010 - DNA, 25 bp, Artificial
  probe
  misc_feature (1)..(25): SEQ ID NO: 3746; WAN0249QZ_at; Start 55; Stop 79
tgactcctaagtttagcacttatgt

SEQ ID NO: 31011 - DNA, 25 bp, Artificial
  probe
  misc_feature (1)..(25): SEQ ID NO: 3746; WAN0249QZ_at; Start 105; Stop 129
caccgcctacgaaaggaggtgagat

SEQ ID NO: 31012 - DNA, 25 bp, Artificial
  probe
  misc_feature (1)..(25): SEQ ID NO: 3746; WAN0249QZ_at; Start 50; Stop 74
ttgggtgactcctaagtttagcact

SEQ ID NO: 31013 - DNA, 25 bp, Artificial
  probe
  misc_feature (1)..(25): SEQ ID NO: 3746; WAN0249QZ_at; Start 110; Stop 134
cctacgaaaggaggtgagatagccc

SEQ ID NO: 31014 - DNA, 25 bp, Artificial
  probe
  misc_feature (1)..(25): SEQ ID NO: 3746; WAN0249QZ_at; Start 49; Stop 73
attgggtgactcctaagtttagcac

SEQ ID NO: 31015 - DNA, 25 bp, Artificial
  probe
  misc_feature (1)..(25): SEQ ID NO: 3746; WAN0249QZ_at; Start 65; Stop 89
gtttagcacttatgtggtataatat

SEQ ID NO: 31016 - DNA, 25 bp, Artificial
  probe
  misc_feature (1)..(25): SEQ ID NO: 3746; WAN0249QZ_at; Start 51; Stop 75
tgggtgactcctaagtttagcactt

SEQ ID NO: 31017 - DNA, 25 bp, Artificial
  probe
  misc_feature (1)..(25): SEQ ID NO: 3746; WAN0249QZ_at; Start 47; Stop 71
tgattgggtgactcctaagtttagc

SEQ ID NO: 31018 - DNA, 25 bp, Artificial
  probe
  misc_feature (1)..(25): SEQ ID NO: 3746; WAN0249QZ_at; Start 102; Stop 126
ctacaccgcctacgaaaggaggtga

SEQ ID NO: 31019 - DNA, 25 bp, Artificial
  probe
  misc_feature (1)..(25): SEQ ID NO: 3746; WAN0249QZ_at; Start 44; Stop 68
acctgattgggtgactcctaagttt

SEQ ID NO: 31020 - DNA, 25 bp, Artificial
  probe
  misc_feature (1)..(25): SEQ ID NO: 3746; WAN0249QZ_at; Start 45; Stop 69
cctgattgggtgactcctaagttta

SEQ ID NO: 31021 - DNA, 25 bp, Artificial
  probe
  misc_feature (1)..(25): SEQ ID NO: 3746; WAN0249QZ_at; Start 42; Stop 66
ccacctgattgggtgactcctaagt

SEQ ID NO: 31022 - DNA, 25 bp, Artificial
  probe
  misc_feature (1)..(25): SEQ ID NO: 3746; WAN0249QZ_at; Start 62; Stop 86
taagtttagcacttatgtggtataa

SEQ ID NO: 31023 - DNA, 25 bp, Artificial
  probe
  misc_feature (1)..(25): SEQ ID NO: 3746; WAN0249QZ_at; Start 108; Stop 132
cgcctacgaaaggaggtgagatagc

SEQ ID NO: 31024 - DNA, 25 bp, Artificial
  probe
  misc_feature (1)..(25): SEQ ID NO: 3746; WAN0249QZ_at; Start 59; Stop 83
tcctaagtttagcacttatgtggta

SEQ ID NO: 31025 - DNA, 25 bp, Artificial
  probe
  misc_feature (1)..(25): SEQ ID NO: 3746; WAN0249QZ_at; Start 23; Stop 47
caagccacaaacaaaaaagccacct

SEQ ID NO: 31026 - DNA, 25 bp, Artificial
  probe
  misc_feature (1)..(25): SEQ ID NO: 3746; WAN0249QZ_at; Start 103; Stop 127
tacaccgcctacgaaaggaggtgag

SEQ ID NO: 31027 - DNA, 25 bp, Artificial
  probe
  misc_feature (1)..(25): SEQ ID NO: 3746; WAN0249QZ_at; Start 71; Stop 95
cacttatgtggtataatattatacg

SEQ ID NO: 31028 - DNA, 25 bp, Artificial
  probe
  misc_feature (1)..(25): SEQ ID NO: 3746; WAN0249QZ_at; Start 43; Stop 67
cacctgattgggtgactcctaagtt

SEQ ID NO: 31029 - DNA, 25 bp, Artificial
  probe
  misc_feature (1)..(25): SEQ ID NO: 3746; WAN0249QZ_at; Start 70; Stop 94
gcacttatgtggtataatattatac

SEQ ID NO: 31030 - DNA, 25 bp, Artificial
  probe
  misc_feature (1)..(25): SEQ ID NO: 3746; WAN0249QZ_at; Start 60; Stop 84
cctaagtttagcacttatgtggtat

SEQ ID NO: 31031 - DNA, 25 bp, Artificial
  probe
  misc_feature (1)..(25): SEQ ID NO: 3746; WAN0249QZ_at; Start 46; Stop 70
ctgattgggtgactcctaagtttag

SEQ ID NO: 31032 - DNA, 25 bp, Artificial
  probe
  misc_feature (1)..(25): SEQ ID NO: 3746; WAN0249QZ_at; Start 56; Stop 80
gactcctaagtttagcacttatgtg

SEQ ID NO: 31033 - DNA, 25 bp, Artificial
  probe
  misc_feature (1)..(25): SEQ ID NO: 3746; WAN0249QZ_at; Start 107; Stop 131
ccgcctacgaaaggaggtgagatag

SEQ ID NO: 31034 - DNA, 25 bp, Artificial
  probe
  misc_feature (1)..(25): SEQ ID NO: 3746; WAN0249QZ_at; Start 109; Stop 133
gcctacgaaaggaggtgagatagcc

SEQ ID NO: 31035 - DNA, 25 bp, Artificial
  probe
  misc_feature (1)..(25): SEQ ID NO: 3746; WAN0249QZ_at; Start 104; Stop 128
acaccgcctacgaaaggaggtgaga

SEQ ID NO: 31036 - DNA, 25 bp, Artificial
  probe
  misc_feature (1)..(25): SEQ ID NO: 3746; WAN0249QZ_at; Start 53; Stop 77
ggtgactcctaagtttagcacttat

SEQ ID NO: 31037 - DNA, 25 bp, Artificial
  probe
  misc_feature (1)..(25): SEQ ID NO: 3746; WAN0249QZ_at; Start 54; Stop 78
gtgactcctaagtttagcacttatg

SEQ ID NO: 31038 - DNA, 25 bp, Artificial
  probe
  misc_feature (1)..(25): SEQ ID NO: 3746; WAN0249QZ_at; Start 106; Stop 130
accgcctacgaaaggaggtgagata

SEQ ID NO: 31039 - DNA, 25 bp, Artificial
  probe
  misc_feature (1)..(25): SEQ ID NO: 3746; WAN0249QZ_at; Start 58; Stop 82
ctcctaagtttagcacttatgtggt

SEQ ID NO: 31040 - DNA, 25 bp, Artificial
  probe
  misc_feature (1)..(25): SEQ ID NO: 3746; WAN0249QZ_at; Start 52; Stop 76
gggtgactcctaagtttagcactta

SEQ ID NO: 31041 - DNA, 25 bp, Artificial
  probe
  misc_feature (1)..(25): SEQ ID NO: 551; WAN0249R2_at; Start 32; Stop 56
agaacagtacacaggaatactaaaa

SEQ ID NO: 31042 - DNA, 25 bp, Artificial
  probe
  misc_feature (1)..(25): SEQ ID NO: 551; WAN0249R2_at; Start 27; Stop 51
aatttagaacagtacacaggaatac

SEQ ID NO: 31043 - DNA, 25 bp, Artificial
  probe
  misc_feature (1)..(25): SEQ ID NO: 551; WAN0249R2_at; Start 233; Stop 257
ttgaataacctctatcttagtagtt

SEQ ID NO: 31044 - DNA, 25 bp, Artificial
  probe
  misc_feature (1)..(25): SEQ ID NO: 551; WAN0249R2_at; Start 198; Stop 222
gaatatgtatttcattttctactaa

SEQ ID NO: 31045 - DNA, 25 bp, Artificial
  probe
  misc_feature (1)..(25): SEQ ID NO: 551; WAN0249R2_at; Start 26; Stop 50
gaatttagaacagtacacaggaata

SEQ ID NO: 31046 - DNA, 25 bp, Artificial
  probe
  misc_feature (1)..(25): SEQ ID NO: 551; WAN0249R2_at; Start 76; Stop 100
gaattttctaattgatttgttcgca

SEQ ID NO: 31047 - DNA, 25 bp, Artificial
  probe
  misc_feature (1)..(25): SEQ ID NO: 551; WAN0249R2_at; Start 235; Stop 259
gaataacctctatcttagtagtttg

SEQ ID NO: 31048 - DNA, 25 bp, Artificial
  probe
  misc_feature (1)..(25): SEQ ID NO: 551; WAN0249R2_at; Start 28; Stop 52
atttagaacagtacacaggaatact

SEQ ID NO: 31049 - DNA, 25 bp, Artificial
  probe
  misc_feature (1)..(25): SEQ ID NO: 551; WAN0249R2_at; Start 25; Stop 49
tgaatttagaacagtacacaggaat

SEQ ID NO: 31050 - DNA, 25 bp, Artificial
  probe
  misc_feature (1)..(25): SEQ ID NO: 551; WAN0249R2_at; Start 231; Stop 255
ttttgaataacctctatcttagtag

SEQ ID NO: 31051 - DNA, 25 bp, Artificial
  probe
  misc_feature (1)..(25): SEQ ID NO: 551; WAN0249R2_at; Start 77; Stop 101
aattttctaattgatttgttcgcat

SEQ ID NO: 31052 - DNA, 25 bp, Artificial
  probe
  misc_feature (1)..(25): SEQ ID NO: 551; WAN0249R2_at; Start 249; Stop 273
ttagtagtttgtataatccccctca

SEQ ID NO: 31053 - DNA, 25 bp, Artificial
  probe
  misc_feature (1)..(25): SEQ ID NO: 551; WAN0249R2_at; Start 24; Stop 48
ctgaatttagaacagtacacaggaa

SEQ ID NO: 31054 - DNA, 25 bp, Artificial
  probe
  misc_feature (1)..(25): SEQ ID NO: 551; WAN0249R2_at; Start 30; Stop 54
ttagaacagtacacaggaatactaa

SEQ ID NO: 31055 - DNA, 25 bp, Artificial
  probe
  misc_feature (1)..(25): SEQ ID NO: 551; WAN0249R2_at; Start 31; Stop 55
tagaacagtacacaggaatactaaa

SEQ ID NO: 31056 - DNA, 25 bp, Artificial
  probe
  misc_feature (1)..(25): SEQ ID NO: 551; WAN0249R2_at; Start 238; Stop 262
taacctctatcttagtagtttgtat

SEQ ID NO: 31057 - DNA, 25 bp, Artificial
  probe
  misc_feature (1)..(25): SEQ ID NO: 551; WAN0249R2_at; Start 195; Stop 219
tgggaatatgtatttcattttctac

SEQ ID NO: 31058 - DNA, 25 bp, Artificial
  probe
  misc_feature (1)..(25): SEQ ID NO: 551; WAN0249R2_at; Start 29; Stop 53
tttagaacagtacacaggaatacta

SEQ ID NO: 31059 - DNA, 25 bp, Artificial
  probe
  misc_feature (1)..(25): SEQ ID NO: 551; WAN0249R2_at; Start 187; Stop 211
ttttattgtgggaatatgtatttca

SEQ ID NO: 31060 - DNA, 25 bp, Artificial
  probe
  misc_feature (1)..(25): SEQ ID NO: 551; WAN0249R2_at; Start 36; Stop 60
cagtacacaggaatactaaaatatt

SEQ ID NO: 31061 - DNA, 25 bp, Artificial
  probe
  misc_feature (1)..(25): SEQ ID NO: 551; WAN0249R2_at; Start 239; Stop 263
aacctctatcttagtagtttgtata

SEQ ID NO: 31062 - DNA, 25 bp, Artificial
  probe
  misc_feature (1)..(25): SEQ ID NO: 551; WAN0249R2_at; Start 33; Stop 57
gaacagtacacaggaatactaaaat

SEQ ID NO: 31063 - DNA, 25 bp, Artificial
  probe
  misc_feature (1)..(25): SEQ ID NO: 551; WAN0249R2_at; Start 250; Stop 274
tagtagtttgtataatccccctcaa

SEQ ID NO: 31064 - DNA, 25 bp, Artificial
  probe
  misc_feature (1)..(25): SEQ ID NO: 551; WAN0249R2_at; Start 241; Stop 265
cctctatcttagtagtttgtataat

SEQ ID NO: 31065 - DNA, 25 bp, Artificial
  probe
  misc_feature (1)..(25): SEQ ID NO: 551; WAN0249R2_at; Start 23; Stop 47
actgaatttagaacagtacacagga

SEQ ID NO: 31066 - DNA, 25 bp, Artificial
  probe
  misc_feature (1)..(25): SEQ ID NO: 551; WAN0249R2_at; Start 244; Stop 268
ctatcttagtagtttgtataatccc

SEQ ID NO: 31067 - DNA, 25 bp, Artificial
  probe
  misc_feature (1)..(25): SEQ ID NO: 551; WAN0249R2_at; Start 37; Stop 61
agtacacaggaatactaaaatattt

SEQ ID NO: 31068 - DNA, 25 bp, Artificial
  probe
  misc_feature (1)..(25): SEQ ID NO: 551; WAN0249R2_at; Start 236; Stop 260
aataacctctatcttagtagtttgt

SEQ ID NO: 31069 - DNA, 25 bp, Artificial
  probe
  misc_feature (1)..(25): SEQ ID NO: 551; WAN0249R2_at; Start 245; Stop 269
tatcttagtagtttgtataatcccc

SEQ ID NO: 31070 - DNA, 25 bp, Artificial
  probe
  misc_feature (1)..(25): SEQ ID NO: 551; WAN0249R2_at; Start 240; Stop 264
acctctatcttagtagtttgtataa

SEQ ID NO: 31071 - DNA, 25 bp, Artificial
  probe
  misc_feature (1)..(25): SEQ ID NO: 551; WAN0249R2_at; Start 232; Stop 256
tttgaataacctctatcttagtagt

SEQ ID NO: 31072 - DNA, 25 bp, Artificial
  probe
  misc_feature (1)..(25): SEQ ID NO: 551; WAN0249R2_at; Start 196; Stop 220
gggaatatgtatttcattttctact

SEQ ID NO: 31073 - DNA, 25 bp, Artificial
  probe
  misc_feature (1)..(25): SEQ ID NO: 551; WAN0249R2_at; Start 243; Stop 267
tctatcttagtagtttgtataatcc

SEQ ID NO: 31074 - DNA, 25 bp, Artificial
  probe
  misc_feature (1)..(25): SEQ ID NO: 551; WAN0249R2_at; Start 228; Stop 252
tgtttttgaataacctctatcttag

SEQ ID NO: 31075 - DNA, 25 bp, Artificial
  probe
  misc_feature (1)..(25): SEQ ID NO: 4728; WAN0249R3_s_at; Start 124; Stop 148
cgcgggaagtctactaagatactta

SEQ ID NO: 31076 - DNA, 25 bp, Artificial
  probe
  misc_feature (1)..(25): SEQ ID NO: 4728; WAN0249R3_s_at; Start 134; Stop 158
ctactaagatacttaaagatgcaga

SEQ ID NO: 31077 - DNA, 25 bp, Artificial
  probe
  misc_feature (1)..(25): SEQ ID NO: 4728; WAN0249R3_s_at; Start 125; Stop 149
gcgggaagtctactaagatacttaa

SEQ ID NO: 31078 - DNA, 25 bp, Artificial
  probe
  misc_feature (1)..(25): SEQ ID NO: 4728; WAN0249R3_s_at; Start 129; Stop 153
gaagtctactaagatacttaaagat

SEQ ID NO: 31079 - DNA, 25 bp, Artificial
  probe
  misc_feature (1)..(25): SEQ ID NO: 4728; WAN0249R3_s_at; Start 122; Stop 146
ttcgcgggaagtctactaagatact

SEQ ID NO: 31080 - DNA, 25 bp, Artificial
  probe
  misc_feature (1)..(25): SEQ ID NO: 4728; WAN0249R3_s_at; Start 132; Stop 156
gtctactaagatacttaaagatgca

SEQ ID NO: 31081 - DNA, 25 bp, Artificial
  probe
  misc_feature (1)..(25): SEQ ID NO: 4728; WAN0249R3_s_at; Start 130; Stop 154
aagtctactaagatacttaaagatg

SEQ ID NO: 31082 - DNA, 25 bp, Artificial
  probe
  misc_feature (1)..(25): SEQ ID NO: 4728; WAN0249R3_s_at; Start 123; Stop 147
tcgcgggaagtctactaagatactt

SEQ ID NO: 31083 - DNA, 25 bp, Artificial
  probe
  misc_feature (1)..(25): SEQ ID NO: 4728; WAN0249R3_s_at; Start 131; Stop 155
agtctactaagatacttaaagatgc

SEQ ID NO: 31084 - DNA, 25 bp, Artificial
  probe
  misc_feature (1)..(25): SEQ ID NO: 4728; WAN0249R3_s_at; Start 128; Stop 152
ggaagtctactaagatacttaaaga

SEQ ID NO: 31085 - DNA, 25 bp, Artificial
  probe
  misc_feature (1)..(25): SEQ ID NO: 4728; WAN0249R3_s_at; Start 133; Stop 157
tctactaagatacttaaagatgcag

SEQ ID NO: 31086 - DNA, 25 bp, Artificial
  probe
  misc_feature (1)..(25): SEQ ID NO: 3314; WAN0249R4_at; Start 203; Stop 227
tttttattgtagagcagacccaagc

SEQ ID NO: 31087 - DNA, 25 bp, Artificial
  probe
  misc_feature (1)..(25): SEQ ID NO: 3314; WAN0249R4_at; Start 314; Stop 338
tcaacaacaacaagcctgtagtttc

SEQ ID NO: 31088 - DNA, 25 bp, Artificial
  probe
  misc_feature (1)..(25): SEQ ID NO: 3314; WAN0249R4_at; Start 263; Stop 287
ctgcgaggataatagcttctgtgtc

SEQ ID NO: 31089 - DNA, 25 bp, Artificial
  probe
  misc_feature (1)..(25): SEQ ID NO: 3314; WAN0249R4_at; Start 327; Stop 351
gcctgtagtttcgataacgatcaaa

SEQ ID NO: 31090 - DNA, 25 bp, Artificial
  probe
  misc_feature (1)..(25): SEQ ID NO: 3314; WAN0249R4_at; Start 277; Stop 301
gcttctgtgtctaaataacccattt

SEQ ID NO: 31091 - DNA, 25 bp, Artificial
  probe
  misc_feature (1)..(25): SEQ ID NO: 3314; WAN0249R4_at; Start 373; Stop 397
ttcgcattaagcatattgttaccgc

SEQ ID NO: 31092 - DNA, 25 bp, Artificial
  probe
  misc_feature (1)..(25): SEQ ID NO: 3314; WAN0249R4_at; Start 362; Stop 386
tataaaaaattttcgcattaagcat

SEQ ID NO: 31093 - DNA, 25 bp, Artificial
  probe
  misc_feature (1)..(25): SEQ ID NO: 3314; WAN0249R4_at; Start 261; Stop 285
aactgcgaggataatagcttctgtg

SEQ ID NO: 31094 - DNA, 25 bp, Artificial
  probe
  misc_feature (1)..(25): SEQ ID NO: 3314; WAN0249R4_at; Start 246; Stop 270
aaaagcaaatgaaaaaactgcgagg

SEQ ID NO: 31095 - DNA, 25 bp, Artificial
  probe
  misc_feature (1)..(25): SEQ ID NO: 3314; WAN0249R4_at; Start 303; Stop 327
gagacctcttttcaacaacaacaag

SEQ ID NO: 31096 - DNA, 25 bp, Artificial
  probe
  misc_feature (1)..(25): SEQ ID NO: 3314; WAN0249R4_at; Start 273; Stop 297
aatagcttctgtgtctaaataaccc

SEQ ID NO: 31097 - DNA, 25 bp, Artificial
  probe
  misc_feature (1)..(25): SEQ ID NO: 3314; WAN0249R4_at; Start 207; Stop 231
tattgtagagcagacccaagcgaat

SEQ ID NO: 31098 - DNA, 25 bp, Artificial
  probe
  misc_feature (1)..(25): SEQ ID NO: 3314; WAN0249R4_at; Start 311; Stop 335
ttttcaacaacaacaagcctgtagt

SEQ ID NO: 31099 - DNA, 25 bp, Artificial
  probe
  misc_feature (1)..(25): SEQ ID NO: 3314; WAN0249R4_at; Start 380; Stop 404
taagcatattgttaccgctttcttt

SEQ ID NO: 31100 - DNA, 25 bp, Artificial
  probe
  misc_feature (1)..(25): SEQ ID NO: 3314; WAN0249R4_at; Start 292; Stop 316
taacccatttcgagacctcttttca

SEQ ID NO: 31101 - DNA, 25 bp, Artificial
  probe
  misc_feature (1)..(25): SEQ ID NO: 3314; WAN0249R4_at; Start 255; Stop 279
tgaaaaaactgcgaggataatagct

SEQ ID NO: 31102 - DNA, 25 bp, Artificial
  probe
  misc_feature (1)..(25): SEQ ID NO: 3314; WAN0249R4_at; Start 266; Stop 290
cgaggataatagcttctgtgtctaa

SEQ ID NO: 31103 - DNA, 25 bp, Artificial
  probe
  misc_feature (1)..(25): SEQ ID NO: 3314; WAN0249R4_at; Start 209; Stop 233
ttgtagagcagacccaagcgaatga

SEQ ID NO: 31104 - DNA, 25 bp, Artificial
  probe
  misc_feature (1)..(25): SEQ ID NO: 3314; WAN0249R4_at; Start 330; Stop 354
tgtagtttcgataacgatcaaacat

SEQ ID NO: 31105 - DNA, 25 bp, Artificial
  probe
  misc_feature (1)..(25): SEQ ID NO: 3314; WAN0249R4_at; Start 216; Stop 240
gcagacccaagcgaatgaacatagg

SEQ ID NO: 31106 - DNA, 25 bp, Artificial
  probe
  misc_feature (1)..(25): SEQ ID NO: 3314; WAN0249R4_at; Start 212; Stop 236
tagagcagacccaagcgaatgaaca

SEQ ID NO: 31107 - DNA, 25 bp, Artificial
  probe
  misc_feature (1)..(25): SEQ ID NO: 3314; WAN0249R4_at; Start 287; Stop 311
ctaaataacccatttcgagacctct

SEQ ID NO: 31108 - DNA, 25 bp, Artificial
  probe
  misc_feature (1)..(25): SEQ ID NO: 3314; WAN0249R4_at; Start 282; Stop 306
tgtgtctaaataacccatttcgaga

SEQ ID NO: 31109 - DNA, 25 bp, Artificial
  probe
  misc_feature (1)..(25): SEQ ID NO: 3314; WAN0249R4_at; Start 250; Stop 274
gcaaatgaaaaaactgcgaggataa

SEQ ID NO: 31110 - DNA, 25 bp, Artificial
  probe
  misc_feature (1)..(25): SEQ ID NO: 3314; WAN0249R4_at; Start 205; Stop 229
tttattgtagagcagacccaagcga

SEQ ID NO: 31111 - DNA, 25 bp, Artificial
  probe
  misc_feature (1)..(25): SEQ ID NO: 3314; WAN0249R4_at; Start 259; Stop 283
aaaactgcgaggataatagcttctg

SEQ ID NO: 31112 - DNA, 25 bp, Artificial
  probe
  misc_feature (1)..(25): SEQ ID NO: 3314; WAN0249R4_at; Start 214; Stop 238
gagcagacccaagcgaatgaacata

SEQ ID NO: 31113 - DNA, 25 bp, Artificial
  probe
  misc_feature (1)..(25): SEQ ID NO: 3314; WAN0249R4_at; Start 337; Stop 361
tcgataacgatcaaacataaaaata

SEQ ID NO: 31114 - DNA, 25 bp, Artificial
  probe
  misc_feature (1)..(25): SEQ ID NO: 3314; WAN0249R4_at; Start 309; Stop 333
tcttttcaacaacaacaagcctgta

SEQ ID NO: 31115 - DNA, 25 bp, Artificial
  probe
  misc_feature (1)..(25): SEQ ID NO: 3314; WAN0249R4_at; Start 324; Stop 348
caagcctgtagtttcgataacgatc

SEQ ID NO: 31116 - DNA, 25 bp, Artificial
  probe
  misc_feature (1)..(25): SEQ ID NO: 3314; WAN0249R4_at; Start 321; Stop 345
caacaagcctgtagtttcgataacg

SEQ ID NO: 31117 - DNA, 25 bp, Artificial
  probe
  misc_feature (1)..(25): SEQ ID NO: 3314; WAN0249R4_at; Start 377; Stop 401
cattaagcatattgttaccgctttc

SEQ ID NO: 31118 - DNA, 25 bp, Artificial
  probe
  misc_feature (1)..(25): SEQ ID NO: 3314; WAN0249R4_at; Start 297; Stop 321
catttcgagacctcttttcaacaac

SEQ ID NO: 31119 - DNA, 25 bp, Artificial
  probe
  misc_feature (1)..(25): SEQ ID NO: 3314; WAN0249R4_at; Start 217; Stop 241
cagacccaagcgaatgaacataggt

SEQ ID NO: 31120 - DNA, 25 bp, Artificial
  probe
  misc_feature (1)..(25): SEQ ID NO: 4567; WAN0249R5_at; Start 150; Stop 174
tctattcatagcctacgatttcact

SEQ ID NO: 31121 - DNA, 25 bp, Artificial
  probe
  misc_feature (1)..(25): SEQ ID NO: 4567; WAN0249R5_at; Start 336; Stop 360
gcccatcgtataaaaaaatctccta

SEQ ID NO: 31122 - DNA, 25 bp, Artificial
  probe
  misc_feature (1)..(25): SEQ ID NO: 4567; WAN0249R5_at; Start 15; Stop 39
tttactatgtcttttcacaccaacc

SEQ ID NO: 31123 - DNA, 25 bp, Artificial
  probe
  misc_feature (1)..(25): SEQ ID NO: 4567; WAN0249R5_at; Start 271; Stop 295
ggagcgctattgtattcaccggtag

SEQ ID NO: 31124 - DNA, 25 bp, Artificial
  probe
  misc_feature (1)..(25): SEQ ID NO: 4567; WAN0249R5_at; Start 115; Stop 139
taccttatccactatatgctcctcg

SEQ ID NO: 31125 - DNA, 25 bp, Artificial
  probe
  misc_feature (1)..(25): SEQ ID NO: 4567; WAN0249R5_at; Start 143; Stop 167
tcacgtttctattcatagcctacga

SEQ ID NO: 31126 - DNA, 25 bp, Artificial
  probe
  misc_feature (1)..(25): SEQ ID NO: 4567; WAN0249R5_at; Start 322; Stop 346
cagatgcacgacatgcccatcgtat

SEQ ID NO: 31127 - DNA, 25 bp, Artificial
  probe
  misc_feature (1)..(25): SEQ ID NO: 4567; WAN0249R5_at; Start 351; Stop 375
aaatctcctacccaaggtagaagat

SEQ ID NO: 31128 - DNA, 25 bp, Artificial
  probe
  misc_feature (1)..(25): SEQ ID NO: 4567; WAN0249R5_at; Start 19; Stop 43
ctatgtcttttcacaccaaccttat

SEQ ID NO: 31129 - DNA, 25 bp, Artificial
  probe
  misc_feature (1)..(25): SEQ ID NO: 4567; WAN0249R5_at; Start 102; Stop 126
taaaatttctcgctaccttatccac

SEQ ID NO: 31130 - DNA, 25 bp, Artificial
  probe
  misc_feature (1)..(25): SEQ ID NO: 4567; WAN0249R5_at; Start 129; Stop 153
tatgctcctcgctatcacgtttcta

SEQ ID NO: 31131 - DNA, 25 bp, Artificial
  probe
  misc_feature (1)..(25): SEQ ID NO: 4567; WAN0249R5_at; Start 52; Stop 76
caattacttttgtgatttacatata

SEQ ID NO: 31132 - DNA, 25 bp, Artificial
  probe
  misc_feature (1)..(25): SEQ ID NO: 4567; WAN0249R5_at; Start 166; Stop 190
gatttcactattgctttctctgaca

SEQ ID NO: 31133 - DNA, 25 bp, Artificial
  probe
  misc_feature (1)..(25): SEQ ID NO: 4567; WAN0249R5_at; Start 155; Stop 179
tcatagcctacgatttcactattgc

SEQ ID NO: 31134 - DNA, 25 bp, Artificial
  probe
  misc_feature (1)..(25): SEQ ID NO: 4567; WAN0249R5_at; Start 182; Stop 206
tctctgacaattcttatttcctgcg

SEQ ID NO: 31135 - DNA, 25 bp, Artificial
  probe
  misc_feature (1)..(25): SEQ ID NO: 4567; WAN0249R5_at; Start 171; Stop 195
cactattgctttctctgacaattct

SEQ ID NO: 31136 - DNA, 25 bp, Artificial
  probe
  misc_feature (1)..(25): SEQ ID NO: 4567; WAN0249R5_at; Start 324; Stop 348
gatgcacgacatgcccatcgtataa

SEQ ID NO: 31137 - DNA, 25 bp, Artificial
  probe
  misc_feature (1)..(25): SEQ ID NO: 4567; WAN0249R5_at; Start 270; Stop 294
gggagcgctattgtattcaccggta

SEQ ID NO: 31138 - DNA, 25 bp, Artificial
  probe
  misc_feature (1)..(25): SEQ ID NO: 4567; WAN0249R5_at; Start 124; Stop 148
cactatatgctcctcgctatcacgt

SEQ ID NO: 31139 - DNA, 25 bp, Artificial
  probe
  misc_feature (1)..(25): SEQ ID NO: 4567; WAN0249R5_at; Start 356; Stop 380
tcctacccaaggtagaagatttcaa

SEQ ID NO: 31140 - DNA, 25 bp, Artificial
  probe
  misc_feature (1)..(25): SEQ ID NO: 4567; WAN0249R5_at; Start 63; Stop 87
gtgatttacatatatagattaagac

SEQ ID NO: 31141 - DNA, 25 bp, Artificial
  probe
  misc_feature (1)..(25): SEQ ID NO: 4567; WAN0249R5_at; Start 362; Stop 386
ccaaggtagaagatttcaaacttat

SEQ ID NO: 31142 - DNA, 25 bp, Artificial
  probe
  misc_feature (1)..(25): SEQ ID NO: 4567; WAN0249R5_at; Start 119; Stop 143
ttatccactatatgctcctcgctat

SEQ ID NO: 31143 - DNA, 25 bp, Artificial
  probe
  misc_feature (1)..(25): SEQ ID NO: 4567; WAN0249R5_at; Start 320; Stop 344
ctcagatgcacgacatgcccatcgt

SEQ ID NO: 31144 - DNA, 25 bp, Artificial
  probe
  misc_feature (1)..(25): SEQ ID NO: 4567; WAN0249R5_at; Start 327; Stop 351
gcacgacatgcccatcgtataaaaa

SEQ ID NO: 31145 - DNA, 25 bp, Artificial
  probe
  misc_feature (1)..(25): SEQ ID NO: 4567; WAN0249R5_at; Start 108; Stop 132
ttctcgctaccttatccactatatg

SEQ ID NO: 31146 - DNA, 25 bp, Artificial
  probe
  misc_feature (1)..(25): SEQ ID NO: 4567; WAN0249R5_at; Start 79; Stop 103
gattaagactatcttttatacttta

SEQ ID NO: 31147 - DNA, 25 bp, Artificial
  probe
  misc_feature (1)..(25): SEQ ID NO: 4567; WAN0249R5_at; Start 160; Stop 184
gcctacgatttcactattgctttct

SEQ ID NO: 31148 - DNA, 25 bp, Artificial
  probe
  misc_feature (1)..(25): SEQ ID NO: 4567; WAN0249R5_at; Start 135; Stop 159
cctcgctatcacgtttctattcata

SEQ ID NO: 31149 - DNA, 25 bp, Artificial
  probe
  misc_feature (1)..(25): SEQ ID NO: 4567; WAN0249R5_at; Start 132; Stop 156
gctcctcgctatcacgtttctattc

SEQ ID NO: 31150 - DNA, 25 bp, Artificial
  probe
  misc_feature (1)..(25): SEQ ID NO: 4567; WAN0249R5_at; Start 12; Stop 36
cagtttactatgtcttttcacacca

SEQ ID NO: 31151 - DNA, 25 bp, Artificial
  probe
  misc_feature (1)..(25): SEQ ID NO: 4567; WAN0249R5_at; Start 186; Stop 210
tgacaattcttatttcctgcgtcag

SEQ ID NO: 31152 - DNA, 25 bp, Artificial
  probe
  misc_feature (1)..(25): SEQ ID NO: 4567; WAN0249R5_at; Start 8; Stop 32
gattcagtttactatgtcttttcac

SEQ ID NO: 31153 - DNA, 25 bp, Artificial
  probe
  misc_feature (1)..(25): SEQ ID NO: 4567; WAN0249R5_at; Start 104; Stop 128
aaatttctcgctaccttatccacta

SEQ ID NO: 31154 - DNA, 25 bp, Artificial
  probe
  misc_feature (1)..(25): SEQ ID NO: 3255; WAN0249R6_at; Start 56; Stop 80
ggtgcccaccgaggacttacacctc

SEQ ID NO: 31155 - DNA, 25 bp, Artificial
  probe
  misc_feature (1)..(25): SEQ ID NO: 3255; WAN0249R6_at; Start 43; Stop 67
ttcaccggtagtaggtgcccaccga

SEQ ID NO: 31156 - DNA, 25 bp, Artificial
  probe
  misc_feature (1)..(25): SEQ ID NO: 3255; WAN0249R6_at; Start 35; Stop 59
ctattgggttcaccggtagtaggtg

SEQ ID NO: 31157 - DNA, 25 bp, Artificial
  probe
  misc_feature (1)..(25): SEQ ID NO: 3255; WAN0249R6_at; Start 52; Stop 76
agtaggtgcccaccgaggacttaca

SEQ ID NO: 31158 - DNA, 25 bp, Artificial
  probe
  misc_feature (1)..(25): SEQ ID NO: 3255; WAN0249R6_at; Start 55; Stop 79
aggtgcccaccgaggacttacacct

SEQ ID NO: 31159 - DNA, 25 bp, Artificial
  probe
  misc_feature (1)..(25): SEQ ID NO: 3255; WAN0249R6_at; Start 13; Stop 37
ccagcgtcagacttgggaatcgcta

SEQ ID NO: 31160 - DNA, 25 bp, Artificial
  probe
  misc_feature (1)..(25): SEQ ID NO: 3255; WAN0249R6_at; Start 48; Stop 72
cggtagtaggtgcccaccgaggact

SEQ ID NO: 31161 - DNA, 25 bp, Artificial
  probe
  misc_feature (1)..(25): SEQ ID NO: 3255; WAN0249R6_at; Start 102; Stop 126
tacatcaaaaaaagttgagacatag

SEQ ID NO: 31162 - DNA, 25 bp, Artificial
  probe
  misc_feature (1)..(25): SEQ ID NO: 3255; WAN0249R6_at; Start 96; Stop 120
ccgtcgtacatcaaaaaaagttgag

SEQ ID NO: 31163 - DNA, 25 bp, Artificial
  probe
  misc_feature (1)..(25): SEQ ID NO: 3255; WAN0249R6_at; Start 28; Stop 52
ggaatcgctattgggttcaccggta

SEQ ID NO: 31164 - DNA, 25 bp, Artificial
  probe
  misc_feature (1)..(25): SEQ ID NO: 3255; WAN0249R6_at; Start 99; Stop 123
tcgtacatcaaaaaaagttgagaca

SEQ ID NO: 31165 - DNA, 25 bp, Artificial
  probe
  misc_feature (1)..(25): SEQ ID NO: 3255; WAN0249R6_at; Start 45; Stop 69
caccggtagtaggtgcccaccgagg

SEQ ID NO: 31166 - DNA, 25 bp, Artificial
  probe
  misc_feature (1)..(25): SEQ ID NO: 3255; WAN0249R6_at; Start 98; Stop 122
gtcgtacatcaaaaaaagttgagac

SEQ ID NO: 31167 - DNA, 25 bp, Artificial
  probe
  misc_feature (1)..(25): SEQ ID NO: 3255; WAN0249R6_at; Start 51; Stop 75
tagtaggtgcccaccgaggacttac

SEQ ID NO: 31168 - DNA, 25 bp, Artificial
  probe
  misc_feature (1)..(25): SEQ ID NO: 3255; WAN0249R6_at; Start 101; Stop 125
gtacatcaaaaaaagttgagacata

SEQ ID NO: 31169 - DNA, 25 bp, Artificial
  probe
  misc_feature (1)..(25): SEQ ID NO: 3255; WAN0249R6_at; Start 14; Stop 38
cagcgtcagacttgggaatcgctat

SEQ ID NO: 31170 - DNA, 25 bp, Artificial
  probe
  misc_feature (1)..(25): SEQ ID NO: 3255; WAN0249R6_at; Start 53; Stop 77
gtaggtgcccaccgaggacttacac

SEQ ID NO: 31171 - DNA, 25 bp, Artificial
  probe
  misc_feature (1)..(25): SEQ ID NO: 3255; WAN0249R6_at; Start 44; Stop 68
tcaccggtagtaggtgcccaccgag

SEQ ID NO: 31172 - DNA, 25 bp, Artificial
  probe
  misc_feature (1)..(25): SEQ ID NO: 3255; WAN0249R6_at; Start 36; Stop 60
tattgggttcaccggtagtaggtgc

SEQ ID NO: 31173 - DNA, 25 bp, Artificial
  probe
  misc_feature (1)..(25): SEQ ID NO: 3255; WAN0249R6_at; Start 100; Stop 124
cgtacatcaaaaaaagttgagacat

SEQ ID NO: 31174 - DNA, 25 bp, Artificial
  probe
  misc_feature (1)..(25): SEQ ID NO: 3255; WAN0249R6_at; Start 54; Stop 78
taggtgcccaccgaggacttacacc

SEQ ID NO: 31175 - DNA, 25 bp, Artificial
  probe
  misc_feature (1)..(25): SEQ ID NO: 3255; WAN0249R6_at; Start 50; Stop 74
gtagtaggtgcccaccgaggactta

SEQ ID NO: 31176 - DNA, 25 bp, Artificial
  probe
  misc_feature (1)..(25): SEQ ID NO: 3255; WAN0249R6_at; Start 97; Stop 121
cgtcgtacatcaaaaaaagttgaga

SEQ ID NO: 31177 - DNA, 25 bp, Artificial
  probe
  misc_feature (1)..(25): SEQ ID NO: 3255; WAN0249R6_at; Start 29; Stop 53
gaatcgctattgggttcaccggtag

SEQ ID NO: 31178 - DNA, 25 bp, Artificial
  probe
  misc_feature (1)..(25): SEQ ID NO: 3255; WAN0249R6_at; Start 39; Stop 63
tgggttcaccggtagtaggtgccca

SEQ ID NO: 31179 - DNA, 25 bp, Artificial
  probe
  misc_feature (1)..(25): SEQ ID NO: 3255; WAN0249R6_at; Start 12; Stop 36
tccagcgtcagacttgggaatcgct

SEQ ID NO: 31180 - DNA, 25 bp, Artificial
  probe
  misc_feature (1)..(25): SEQ ID NO: 3547; WAN0249R7_at; Start 44; Stop 68
ttctttatcctgctgcaccttacta

SEQ ID NO: 31181 - DNA, 25 bp, Artificial
  probe
  misc_feature (1)..(25): SEQ ID NO: 3547; WAN0249R7_at; Start 165; Stop 189
tctgctatatcataacagttatttc

SEQ ID NO: 31182 - DNA, 25 bp, Artificial
  probe
  misc_feature (1)..(25): SEQ ID NO: 3547; WAN0249R7_at; Start 15; Stop 39
gcaaatccgagaaagaaacttctcg

SEQ ID NO: 31183 - DNA, 25 bp, Artificial
  probe
  misc_feature (1)..(25): SEQ ID NO: 3547; WAN0249R7_at; Start 39; Stop 63
ggtttttctttatcctgctgcacct

SEQ ID NO: 31184 - DNA, 25 bp, Artificial
  probe
  misc_feature (1)..(25): SEQ ID NO: 3547; WAN0249R7_at; Start 47; Stop 71
tttatcctgctgcaccttactatag

SEQ ID NO: 31185 - DNA, 25 bp, Artificial
  probe
  misc_feature (1)..(25): SEQ ID NO: 3547; WAN0249R7_at; Start 177; Stop 201
taacagttatttcagattttctttg

SEQ ID NO: 31186 - DNA, 25 bp, Artificial
  probe
  misc_feature (1)..(25): SEQ ID NO: 3547; WAN0249R7_at; Start 158; Stop 182
gtttcaatctgctatatcataacag

SEQ ID NO: 31187 - DNA, 25 bp, Artificial
  probe
  misc_feature (1)..(25): SEQ ID NO: 3547; WAN0249R7_at; Start 35; Stop 59
tctcggtttttctttatcctgctgc

SEQ ID NO: 31188 - DNA, 25 bp, Artificial
  probe
  misc_feature (1)..(25): SEQ ID NO: 3547; WAN0249R7_at; Start 162; Stop 186
caatctgctatatcataacagttat

SEQ ID NO: 31189 - DNA, 25 bp, Artificial
  probe
  misc_feature (1)..(25): SEQ ID NO: 3547; WAN0249R7_at; Start 51; Stop 75
tcctgctgcaccttactatagtgaa

SEQ ID NO: 31190 - DNA, 25 bp, Artificial
  probe
  misc_feature (1)..(25): SEQ ID NO: 3547; WAN0249R7_at; Start 12; Stop 36
taagcaaatccgagaaagaaacttc

SEQ ID NO: 31191 - DNA, 25 bp, Artificial
  probe
  misc_feature (1)..(25): SEQ ID NO: 3547; WAN0249R7_at; Start 261; Stop 285
tagattacatatacagattattctg

SEQ ID NO: 31192 - DNA, 25 bp, Artificial
  probe
  misc_feature (1)..(25): SEQ ID NO: 3547; WAN0249R7_at; Start 221; Stop 245
caaaatattcttgcatttttccaaa

SEQ ID NO: 31193 - DNA, 25 bp, Artificial
  probe
  misc_feature (1)..(25): SEQ ID NO: 3547; WAN0249R7_at; Start 2; Stop 26
aacctcataataagcaaatccgaga

SEQ ID NO: 31194 - DNA, 25 bp, Artificial
  probe
  misc_feature (1)..(25): SEQ ID NO: 3547; WAN0249R7_at; Start 174; Stop 198
tcataacagttatttcagattttct

SEQ ID NO: 31195 - DNA, 25 bp, Artificial
  probe
  misc_feature (1)..(25): SEQ ID NO: 3547; WAN0249R7_at; Start 9; Stop 33
taataagcaaatccgagaaagaaac

SEQ ID NO: 31196 - DNA, 25 bp, Artificial
  probe
  misc_feature (1)..(25): SEQ ID NO: 3547; WAN0249R7_at; Start 54; Stop 78
tgctgcaccttactatagtgaaatg

SEQ ID NO: 31197 - DNA, 25 bp, Artificial
  probe
  misc_feature (1)..(25): SEQ ID NO: 3547; WAN0249R7_at; Start 211; Stop 235
tatcttttttcaaaatattcttgca

SEQ ID NO: 31198 - DNA, 25 bp, Artificial
  probe
  misc_feature (1)..(25): SEQ ID NO: 3547; WAN0249R7_at; Start 52; Stop 76
cctgctgcaccttactatagtgaaa

SEQ ID NO: 31199 - DNA, 25 bp, Artificial
  probe
  misc_feature (1)..(25): SEQ ID NO: 3547; WAN0249R7_at; Start 7; Stop 31
cataataagcaaatccgagaaagaa

SEQ ID NO: 31200 - DNA, 25 bp, Artificial
  probe
  misc_feature (1)..(25): SEQ ID NO: 3547; WAN0249R7_at; Start 16; Stop 40
caaatccgagaaagaaacttctcgg

SEQ ID NO: 31201 - DNA, 25 bp, Artificial
  probe
  misc_feature (1)..(25): SEQ ID NO: 3547; WAN0249R7_at; Start 272; Stop 296
tacagattattctgaaaattcaaaa

SEQ ID NO: 31202 - DNA, 25 bp, Artificial
  probe
  misc_feature (1)..(25): SEQ ID NO: 3547; WAN0249R7_at; Start 1; Stop 25
gaacctcataataagcaaatccgag

SEQ ID NO: 31203 - DNA, 25 bp, Artificial
  probe
  misc_feature (1)..(25): SEQ ID NO: 3547; WAN0249R7_at; Start 168; Stop 192
gctatatcataacagttatttcaga

SEQ ID NO: 31204 - DNA, 25 bp, Artificial
  probe
  misc_feature (1)..(25): SEQ ID NO: 3547; WAN0249R7_at; Start 6; Stop 30
tcataataagcaaatccgagaaaga

SEQ ID NO: 31205 - DNA, 25 bp, Artificial
  probe
  misc_feature (1)..(25): SEQ ID NO: 3547; WAN0249R7_at; Start 41; Stop 65
tttttctttatcctgctgcacctta

SEQ ID NO: 31206 - DNA, 25 bp, Artificial
  probe
  misc_feature (1)..(25): SEQ ID NO: 3547; WAN0249R7_at; Start 13; Stop 37
aagcaaatccgagaaagaaacttct

SEQ ID NO: 31207 - DNA, 25 bp, Artificial
  probe
  misc_feature (1)..(25): SEQ ID NO: 3547; WAN0249R7_at; Start 180; Stop 204
cagttatttcagattttctttgtaa

SEQ ID NO: 31208 - DNA, 25 bp, Artificial
  probe
  misc_feature (1)..(25): SEQ ID NO: 3547; WAN0249R7_at; Start 268; Stop 292
catatacagattattctgaaaattc

SEQ ID NO: 31209 - DNA, 25 bp, Artificial
  probe
  misc_feature (1)..(25): SEQ ID NO: 3547; WAN0249R7_at; Start 4; Stop 28
cctcataataagcaaatccgagaaa

SEQ ID NO: 31210 - DNA, 25 bp, Artificial
  probe
  misc_feature (1)..(25): SEQ ID NO: 3547; WAN0249R7_at; Start 154; Stop 178
tctagtttcaatctgctatatcata

SEQ ID NO: 31211 - DNA, 25 bp, Artificial
  probe
  misc_feature (1)..(25): SEQ ID NO: 3547; WAN0249R7_at; Start 49; Stop 73
tatcctgctgcaccttactatagtg

SEQ ID NO: 31212 - DNA, 25 bp, Artificial
  probe
  misc_feature (1)..(25): SEQ ID NO: 3547; WAN0249R7_at; Start 37; Stop 61
tcggtttttctttatcctgctgcac

SEQ ID NO: 31213 - DNA, 25 bp, Artificial
  probe
  misc_feature (1)..(25): SEQ ID NO: 3547; WAN0249R7_at; Start 253; Stop 277
gtagaatatagattacatatacaga

SEQ ID NO: 31214 - DNA, 25 bp, Artificial
  probe
  misc_feature (1)..(25): SEQ ID NO: 3767; WAN0249R8_at; Start 92; Stop 116
taattttgatgactatgaattgctc

SEQ ID NO: 31215 - DNA, 25 bp, Artificial
  probe
  misc_feature (1)..(25): SEQ ID NO: 3767; WAN0249R8_at; Start 69; Stop 93
aaaaactgtatactgtatctcatta

SEQ ID NO: 31216 - DNA, 25 bp, Artificial
  probe
  misc_feature (1)..(25): SEQ ID NO: 3767; WAN0249R8_at; Start 383; Stop 407
ttcaatcttctatagaattcaatac

SEQ ID NO: 31217 - DNA, 25 bp, Artificial
  probe
  misc_feature (1)..(25): SEQ ID NO: 3767; WAN0249R8_at; Start 31; Stop 55
tataccatttttgagggaatttgaa

SEQ ID NO: 31218 - DNA, 25 bp, Artificial
  probe
  misc_feature (1)..(25): SEQ ID NO: 3767; WAN0249R8_at; Start 219; Stop 243
ctggaatgctaattaatgtattcac

SEQ ID NO: 31219 - DNA, 25 bp, Artificial
  probe
  misc_feature (1)..(25): SEQ ID NO: 3767; WAN0249R8_at; Start 136; Stop 160
cattgttatgcagtaaatcaaggag

SEQ ID NO: 31220 - DNA, 25 bp, Artificial
  probe
  misc_feature (1)..(25): SEQ ID NO: 3767; WAN0249R8_at; Start 424; Stop 448
ctaccatttggaaaacagtagtcct

SEQ ID NO: 31221 - DNA, 25 bp, Artificial
  probe
  misc_feature (1)..(25): SEQ ID NO: 3767; WAN0249R8_at; Start 260; Stop 284
cctatgtcgctttttgatttatgaa

SEQ ID NO: 31222 - DNA, 25 bp, Artificial
  probe
  misc_feature (1)..(25): SEQ ID NO: 3767; WAN0249R8_at; Start 1; Stop 25
ggtctctctccaattttgtgatgtt

SEQ ID NO: 31223 - DNA, 25 bp, Artificial
  probe
  misc_feature (1)..(25): SEQ ID NO: 3767; WAN0249R8_at; Start 142; Stop 166
tatgcagtaaatcaaggagtaagtc

SEQ ID NO: 31224 - DNA, 25 bp, Artificial
  probe
  misc_feature (1)..(25): SEQ ID NO: 3767; WAN0249R8_at; Start 146; Stop 170
cagtaaatcaaggagtaagtcaaga

SEQ ID NO: 31225 - DNA, 25 bp, Artificial
  probe
  misc_feature (1)..(25): SEQ ID NO: 3767; WAN0249R8_at; Start 420; Stop 444
aagactaccatttggaaaacagtag

SEQ ID NO: 31226 - DNA, 25 bp, Artificial
  probe
  misc_feature (1)..(25): SEQ ID NO: 3767; WAN0249R8_at; Start 207; Stop 231
ccgaagataaaactggaatgctaat

SEQ ID NO: 31227 - DNA, 25 bp, Artificial
  probe
  misc_feature (1)..(25): SEQ ID NO: 3767; WAN0249R8_at; Start 370; Stop 394
gttctcatcctatttcaatcttcta

SEQ ID NO: 31228 - DNA, 25 bp, Artificial
  probe
  misc_feature (1)..(25): SEQ ID NO: 3767; WAN0249R8_at; Start 359; Stop 383
ccaatcgatttgttctcatcctatt

SEQ ID NO: 31229 - DNA, 25 bp, Artificial
  probe
  misc_feature (1)..(25): SEQ ID NO: 3767; WAN0249R8_at; Start 186; Stop 210
gcacaaaatacttattttagaccga

SEQ ID NO: 31230 - DNA, 25 bp, Artificial
  probe
  misc_feature (1)..(25): SEQ ID NO: 3767; WAN0249R8_at; Start 232; Stop 256
taatgtattcacaataaatagccga

SEQ ID NO: 31231 - DNA, 25 bp, Artificial
  probe
  misc_feature (1)..(25): SEQ ID NO: 3767; WAN0249R8_at; Start 428; Stop 452
catttggaaaacagtagtccttatt

SEQ ID NO: 31232 - DNA, 25 bp, Artificial
  probe
  misc_feature (1)..(25): SEQ ID NO: 3767; WAN0249R8_at; Start 108; Stop 132
gaattgctctatctcccacttttta

SEQ ID NO: 31233 - DNA, 25 bp, Artificial
  probe
  misc_feature (1)..(25): SEQ ID NO: 3767; WAN0249R8_at; Start 246; Stop 270
taaatagccgacaacctatgtcgct

SEQ ID NO: 31234 - DNA, 25 bp, Artificial
  probe
  misc_feature (1)..(25): SEQ ID NO: 3767; WAN0249R8_at; Start 264; Stop 288
tgtcgctttttgatttatgaagaac

SEQ ID NO: 31235 - DNA, 25 bp, Artificial
  probe
  misc_feature (1)..(25): SEQ ID NO: 3767; WAN0249R8_at; Start 172; Stop 196
gcttatctcgtatagcacaaaatac

SEQ ID NO: 31236 - DNA, 25 bp, Artificial
  probe
  misc_feature (1)..(25): SEQ ID NO: 3767; WAN0249R8_at; Start 124; Stop 148
cactttttatcccattgttatgcag

SEQ ID NO: 31237 - DNA, 25 bp, Artificial
  probe
  misc_feature (1)..(25): SEQ ID NO: 3767; WAN0249R8_at; Start 12; Stop 36
aattttgtgatgttactattatacc

SEQ ID NO: 31238 - DNA, 25 bp, Artificial
  probe
  misc_feature (1)..(25): SEQ ID NO: 3767; WAN0249R8_at; Start 252; Stop 276
gccgacaacctatgtcgctttttga

SEQ ID NO: 31239 - DNA, 25 bp, Artificial
  probe
  misc_feature (1)..(25): SEQ ID NO: 3767; WAN0249R8_at; Start 131; Stop 155
tatcccattgttatgcagtaaatca

SEQ ID NO: 31240 - DNA, 25 bp, Artificial
  probe
  misc_feature (1)..(25): SEQ ID NO: 3767; WAN0249R8_at; Start 177; Stop 201
tctcgtatagcacaaaatacttatt

SEQ ID NO: 31241 - DNA, 25 bp, Artificial
  probe
  misc_feature (1)..(25): SEQ ID NO: 3767; WAN0249R8_at; Start 237; Stop 261
tattcacaataaatagccgacaacc

SEQ ID NO: 31242 - DNA, 25 bp, Artificial
  probe
  misc_feature (1)..(25): SEQ ID NO: 3767; WAN0249R8_at; Start 411; Stop 435
gatcaataaaagactaccatttgga

SEQ ID NO: 31243 - DNA, 25 bp, Artificial
  probe
  misc_feature (1)..(25): SEQ ID NO: 3767; WAN0249R8_at; Start 42; Stop 66
tgagggaatttgaaatgtgtttaaa

SEQ ID NO: 31244 - DNA, 25 bp, Artificial
  probe
  misc_feature (1)..(25): SEQ ID NO: 3767; WAN0249R8_at; Start 203; Stop 227
tagaccgaagataaaactggaatgc

SEQ ID NO: 31245 - DNA, 25 bp, Artificial
  probe
  misc_feature (1)..(25): SEQ ID NO: 3767; WAN0249R8_at; Start 102; Stop 126
gactatgaattgctctatctcccac

SEQ ID NO: 31246 - DNA, 25 bp, Artificial
  probe
  misc_feature (1)..(25): SEQ ID NO: 3767; WAN0249R8_at; Start 79; Stop 103
tactgtatctcattaattttgatga

SEQ ID NO: 31247 - DNA, 25 bp, Artificial
  probe
  misc_feature (1)..(25): SEQ ID NO: 3767; WAN0249R8_at; Start 212; Stop 236
gataaaactggaatgctaattaatg

SEQ ID NO: 31248 - DNA, 25 bp, Artificial
  probe
  misc_feature (1)..(25): SEQ ID NO: 5259; WAN0249R9_at; Start 9; Stop 33
ctggaattgtaatagctgaaccatc

SEQ ID NO: 31249 - DNA, 25 bp, Artificial
  probe
  misc_feature (1)..(25): SEQ ID NO: 5259; WAN0249R9_at; Start 226; Stop 250
caaaaataaaaatcagtagactcga

SEQ ID NO: 31250 - DNA, 25 bp, Artificial
  probe
  misc_feature (1)..(25): SEQ ID NO: 5259; WAN0249R9_at; Start 3; Stop 27
gatttcctggaattgtaatagctga

SEQ ID NO: 31251 - DNA, 25 bp, Artificial
  probe
  misc_feature (1)..(25): SEQ ID NO: 5259; WAN0249R9_at; Start 248; Stop 272
cgagttcctactgatttttgataga

SEQ ID NO: 31252 - DNA, 25 bp, Artificial
  probe
  misc_feature (1)..(25): SEQ ID NO: 5259; WAN0249R9_at; Start 195; Stop 219
cgaatccatttgcatctactgaact

SEQ ID NO: 31253 - DNA, 25 bp, Artificial
  probe
  misc_feature (1)..(25): SEQ ID NO: 5259; WAN0249R9_at; Start 246; Stop 270
ctcgagttcctactgatttttgata

SEQ ID NO: 31254 - DNA, 25 bp, Artificial
  probe
  misc_feature (1)..(25): SEQ ID NO: 5259; WAN0249R9_at; Start 2; Stop 26
tgatttcctggaattgtaatagctg

SEQ ID NO: 31255 - DNA, 25 bp, Artificial
  probe
  misc_feature (1)..(25): SEQ ID NO: 5259; WAN0249R9_at; Start 206; Stop 230
gcatctactgaacttttttacaaaa

SEQ ID NO: 31256 - DNA, 25 bp, Artificial
  probe
  misc_feature (1)..(25): SEQ ID NO: 5259; WAN0249R9_at; Start 236; Stop 260
aatcagtagactcgagttcctactg

SEQ ID NO: 31257 - DNA, 25 bp, Artificial
  probe
  misc_feature (1)..(25): SEQ ID NO: 5259; WAN0249R9_at; Start 239; Stop 263
cagtagactcgagttcctactgatt

SEQ ID NO: 31258 - DNA, 25 bp, Artificial
  probe
  misc_feature (1)..(25): SEQ ID NO: 5259; WAN0249R9_at; Start 8; Stop 32
cctggaattgtaatagctgaaccat

SEQ ID NO: 31259 - DNA, 25 bp, Artificial
  probe
  misc_feature (1)..(25): SEQ ID NO: 5259; WAN0249R9_at; Start 5; Stop 29
tttcctggaattgtaatagctgaac

SEQ ID NO: 31260 - DNA, 25 bp, Artificial
  probe
  misc_feature (1)..(25): SEQ ID NO: 5259; WAN0249R9_at; Start 194; Stop 218
ccgaatccatttgcatctactgaac

SEQ ID NO: 31261 - DNA, 25 bp, Artificial
  probe
  misc_feature (1)..(25): SEQ ID NO: 5259; WAN0249R9_at; Start 193; Stop 217
tccgaatccatttgcatctactgaa

SEQ ID NO: 31262 - DNA, 25 bp, Artificial
  probe
  misc_feature (1)..(25): SEQ ID NO: 5259; WAN0249R9_at; Start 191; Stop 215
cttccgaatccatttgcatctactg

SEQ ID NO: 31263 - DNA, 25 bp, Artificial
  probe
  misc_feature (1)..(25): SEQ ID NO: 5259; WAN0249R9_at; Start 7; Stop 31
tcctggaattgtaatagctgaacca

SEQ ID NO: 31264 - DNA, 25 bp, Artificial
  probe
  misc_feature (1)..(25): SEQ ID NO: 5259; WAN0249R9_at; Start 259; Stop 283
tgatttttgatagaattcgtttgga

SEQ ID NO: 31265 - DNA, 25 bp, Artificial
  probe
  misc_feature (1)..(25): SEQ ID NO: 5259; WAN0249R9_at; Start 254; Stop 278
cctactgatttttgatagaattcgt

SEQ ID NO: 31266 - DNA, 25 bp, Artificial
  probe
  misc_feature (1)..(25): SEQ ID NO: 5259; WAN0249R9_at; Start 190; Stop 214
gcttccgaatccatttgcatctact

SEQ ID NO: 31267 - DNA, 25 bp, Artificial
  probe
  misc_feature (1)..(25): SEQ ID NO: 5259; WAN0249R9_at; Start 234; Stop 258
aaaatcagtagactcgagttcctac

SEQ ID NO: 31268 - DNA, 25 bp, Artificial
  probe
  misc_feature (1)..(25): SEQ ID NO: 5259; WAN0249R9_at; Start 10; Stop 34
tggaattgtaatagctgaaccatct

SEQ ID NO: 31269 - DNA, 25 bp, Artificial
  probe
  misc_feature (1)..(25): SEQ ID NO: 5259; WAN0249R9_at; Start 253; Stop 277
tcctactgatttttgatagaattcg

SEQ ID NO: 31270 - DNA, 25 bp, Artificial
  probe
  misc_feature (1)..(25): SEQ ID NO: 5259; WAN0249R9_at; Start 186; Stop 210
catcgcttccgaatccatttgcatc

SEQ ID NO: 31271 - DNA, 25 bp, Artificial
  probe
  misc_feature (1)..(25): SEQ ID NO: 5259; WAN0249R9_at; Start 199; Stop 223
tccatttgcatctactgaacttttt

SEQ ID NO: 31272 - DNA, 25 bp, Artificial
  probe
  misc_feature (1)..(25): SEQ ID NO: 5259; WAN0249R9_at; Start 205; Stop 229
tgcatctactgaacttttttacaaa

SEQ ID NO: 31273 - DNA, 25 bp, Artificial
  probe
  misc_feature (1)..(25): SEQ ID NO: 5259; WAN0249R9_at; Start 201; Stop 225
catttgcatctactgaactttttta

SEQ ID NO: 31274 - DNA, 25 bp, Artificial
  probe
  misc_feature (1)..(25): SEQ ID NO: 5259; WAN0249R9_at; Start 184; Stop 208
aacatcgcttccgaatccatttgca

SEQ ID NO: 31275 - DNA, 25 bp, Artificial
  probe
  misc_feature (1)..(25): SEQ ID NO: 5259; WAN0249R9_at; Start 241; Stop 265
gtagactcgagttcctactgatttt

SEQ ID NO: 31276 - DNA, 25 bp, Artificial
  probe
  misc_feature (1)..(25): SEQ ID NO: 5259; WAN0249R9_at; Start 249; Stop 273
gagttcctactgatttttgatagaa

SEQ ID NO: 31277 - DNA, 25 bp, Artificial
  probe
  misc_feature (1)..(25): SEQ ID NO: 5259; WAN0249R9_at; Start 227; Stop 251
aaaaataaaaatcagtagactcgag

SEQ ID NO: 31278 - DNA, 25 bp, Artificial
  probe
  misc_feature (1)..(25): SEQ ID NO: 5259; WAN0249R9_at; Start 6; Stop 30
ttcctggaattgtaatagctgaacc

SEQ ID NO: 31279 - DNA, 25 bp, Artificial
  probe
  misc_feature (1)..(25): SEQ ID NO: 5259; WAN0249R9_at; Start 196; Stop 220
gaatccatttgcatctactgaactt

SEQ ID NO: 31280 - DNA, 25 bp, Artificial
  probe
  misc_feature (1)..(25): SEQ ID NO: 5259; WAN0249R9_at; Start 188; Stop 212
tcgcttccgaatccatttgcatcta

SEQ ID NO: 31281 - DNA, 25 bp, Artificial
  probe
  misc_feature (1)..(25): SEQ ID NO: 5259; WAN0249R9_at; Start 235; Stop 259
aaatcagtagactcgagttcctact

SEQ ID NO: 31282 - DNA, 25 bp, Artificial
  probe
  misc_feature (1)..(25): SEQ ID NO: 4409; WAN0249RA_at; Start 47; Stop 71
gacaaacacatatatagtgtattga

SEQ ID NO: 31283 - DNA, 25 bp, Artificial
  probe
  misc_feature (1)..(25): SEQ ID NO: 4409; WAN0249RA_at; Start 38; Stop 62
tttttatcagacaaacacatatata

SEQ ID NO: 31284 - DNA, 25 bp, Artificial
  probe
  misc_feature (1)..(25): SEQ ID NO: 4409; WAN0249RA_at; Start 75; Stop 99
tataacagtaggccttaaatactaa

SEQ ID NO: 31285 - DNA, 25 bp, Artificial
  probe
  misc_feature (1)..(25): SEQ ID NO: 4409; WAN0249RA_at; Start 39; Stop 63
ttttatcagacaaacacatatatag

SEQ ID NO: 31286 - DNA, 25 bp, Artificial
  probe
  misc_feature (1)..(25): SEQ ID NO: 4409; WAN0249RA_at; Start 41; Stop 65
ttatcagacaaacacatatatagtg

SEQ ID NO: 31287 - DNA, 25 bp, Artificial
  probe
  misc_feature (1)..(25): SEQ ID NO: 4409; WAN0249RA_at; Start 46; Stop 70
agacaaacacatatatagtgtattg

SEQ ID NO: 31288 - DNA, 25 bp, Artificial
  probe
  misc_feature (1)..(25): SEQ ID NO: 4409; WAN0249RA_at; Start 73; Stop 97
tctataacagtaggccttaaatact

SEQ ID NO: 31289 - DNA, 25 bp, Artificial
  probe
  misc_feature (1)..(25): SEQ ID NO: 4409; WAN0249RA_at; Start 74; Stop 98
ctataacagtaggccttaaatacta

SEQ ID NO: 31290 - DNA, 25 bp, Artificial
  probe
  misc_feature (1)..(25): SEQ ID NO: 4409; WAN0249RA_at; Start 37; Stop 61
atttttatcagacaaacacatatat

SEQ ID NO: 31291 - DNA, 25 bp, Artificial
  probe
  misc_feature (1)..(25): SEQ ID NO: 4409; WAN0249RA_at; Start 72; Stop 96
atctataacagtaggccttaaatac

SEQ ID NO: 31292 - DNA, 25 bp, Artificial
  probe
  misc_feature (1)..(25): SEQ ID NO: 4409; WAN0249RA_at; Start 45; Stop 69
cagacaaacacatatatagtgtatt

SEQ ID NO: 31293 - DNA, 25 bp, Artificial
  probe
  misc_feature (1)..(25): SEQ ID NO: 4409; WAN0249RA_at; Start 32; Stop 56
tagaaatttttatcagacaaacaca

SEQ ID NO: 31294 - DNA, 25 bp, Artificial
  probe
  misc_feature (1)..(25): SEQ ID NO: 4409; WAN0249RA_at; Start 43; Stop 67
atcagacaaacacatatatagtgta

SEQ ID NO: 31295 - DNA, 25 bp, Artificial
  probe
  misc_feature (1)..(25): SEQ ID NO: 4409; WAN0249RA_at; Start 71; Stop 95
aatctataacagtaggccttaaata

SEQ ID NO: 31296 - DNA, 25 bp, Artificial
  probe
  misc_feature (1)..(25): SEQ ID NO: 4409; WAN0249RA_at; Start 80; Stop 104
cagtaggccttaaatactaaaatat

SEQ ID NO: 31297 - DNA, 25 bp, Artificial
  probe
  misc_feature (1)..(25): SEQ ID NO: 4409; WAN0249RA_at; Start 40; Stop 64
tttatcagacaaacacatatatagt

SEQ ID NO: 31298 - DNA, 25 bp, Artificial
  probe
  misc_feature (1)..(25): SEQ ID NO: 4409; WAN0249RA_at; Start 44; Stop 68
tcagacaaacacatatatagtgtat

SEQ ID NO: 31299 - DNA, 25 bp, Artificial
  probe
  misc_feature (1)..(25): SEQ ID NO: 4409; WAN0249RA_at; Start 34; Stop 58
gaaatttttatcagacaaacacata

SEQ ID NO: 31300 - DNA, 25 bp, Artificial
  probe
  misc_feature (1)..(25): SEQ ID NO: 4409; WAN0249RA_at; Start 30; Stop 54
agtagaaatttttatcagacaaaca

SEQ ID NO: 31301 - DNA, 25 bp, Artificial
  probe
  misc_feature (1)..(25): SEQ ID NO: 4409; WAN0249RA_at; Start 121; Stop 145
aactttcctgatagagctgttcata

SEQ ID NO: 31302 - DNA, 25 bp, Artificial
  probe
  misc_feature (1)..(25): SEQ ID NO: 4409; WAN0249RA_at; Start 35; Stop 59
aaatttttatcagacaaacacatat

SEQ ID NO: 31303 - DNA, 25 bp, Artificial
  probe
  misc_feature (1)..(25): SEQ ID NO: 4409; WAN0249RA_at; Start 36; Stop 60
aatttttatcagacaaacacatata

SEQ ID NO: 31304 - DNA, 25 bp, Artificial
  probe
  misc_feature (1)..(25): SEQ ID NO: 4409; WAN0249RA_at; Start 120; Stop 144
taactttcctgatagagctgttcat

SEQ ID NO: 31305 - DNA, 25 bp, Artificial
  probe
  misc_feature (1)..(25): SEQ ID NO: 4409; WAN0249RA_at; Start 42; Stop 66
tatcagacaaacacatatatagtgt

SEQ ID NO: 31306 - DNA, 25 bp, Artificial
  probe
  misc_feature (1)..(25): SEQ ID NO: 4409; WAN0249RA_at; Start 29; Stop 53
gagtagaaatttttatcagacaaac

SEQ ID NO: 31307 - DNA, 25 bp, Artificial
  probe
  misc_feature (1)..(25): SEQ ID NO: 4409; WAN0249RA_at; Start 33; Stop 57
agaaatttttatcagacaaacacat

SEQ ID NO: 31308 - DNA, 25 bp, Artificial
  probe
  misc_feature (1)..(25): SEQ ID NO: 4409; WAN0249RA_at; Start 70; Stop 94
gaatctataacagtaggccttaaat

SEQ ID NO: 31309 - DNA, 25 bp, Artificial
  probe
  misc_feature (1)..(25): SEQ ID NO: 4409; WAN0249RA_at; Start 28; Stop 52
agagtagaaatttttatcagacaaa

SEQ ID NO: 31310 - DNA, 25 bp, Artificial
  probe
  misc_feature (1)..(25): SEQ ID NO: 4409; WAN0249RA_at; Start 31; Stop 55
gtagaaatttttatcagacaaacac

SEQ ID NO: 31311 - DNA, 25 bp, Artificial
  probe
  misc_feature (1)..(25): SEQ ID NO: 3620; WAN0249RB_at; Start 10; Stop 34
acaagaaagtcaattttaggagaag

SEQ ID NO: 31312 - DNA, 25 bp, Artificial
  probe
  misc_feature (1)..(25): SEQ ID NO: 3620; WAN0249RB_at; Start 11; Stop 35
caagaaagtcaattttaggagaaga

SEQ ID NO: 31313 - DNA, 25 bp, Artificial
  probe
  misc_feature (1)..(25): SEQ ID NO: 3620; WAN0249RB_at; Start 25; Stop 49
ttaggagaagacaaggttaatagtc

SEQ ID NO: 31314 - DNA, 25 bp, Artificial
  probe
  misc_feature (1)..(25): SEQ ID NO: 4537; WAN0249RC_at; Start 16; Stop 40
cggtcaaatatcttgctagggcttt

SEQ ID NO: 31315 - DNA, 25 bp, Artificial
  probe
  misc_feature (1)..(25): SEQ ID NO: 4537; WAN0249RC_at; Start 20; Stop 44
caaatatcttgctagggctttcatt

SEQ ID NO: 31316 - DNA, 25 bp, Artificial
  probe
  misc_feature (1)..(25): SEQ ID NO: 4537; WAN0249RC_at; Start 8; Stop 32
atatttttcggtcaaatatcttgct

SEQ ID NO: 31317 - DNA, 25 bp, Artificial
  probe
  misc_feature (1)..(25): SEQ ID NO: 4537; WAN0249RC_at; Start 11; Stop 35
tttttcggtcaaatatcttgctagg

SEQ ID NO: 31318 - DNA, 25 bp, Artificial
  probe
  misc_feature (1)..(25): SEQ ID NO: 4537; WAN0249RC_at; Start 14; Stop 38
ttcggtcaaatatcttgctagggct

SEQ ID NO: 31319 - DNA, 25 bp, Artificial
  probe
  misc_feature (1)..(25): SEQ ID NO: 4537; WAN0249RC_at; Start 7; Stop 31
gatatttttcggtcaaatatcttgc

SEQ ID NO: 31320 - DNA, 25 bp, Artificial
  probe
  misc_feature (1)..(25): SEQ ID NO: 4537; WAN0249RC_at; Start 17; Stop 41
ggtcaaatatcttgctagggctttc

SEQ ID NO: 31321 - DNA, 25 bp, Artificial
  probe
  misc_feature (1)..(25): SEQ ID NO: 4537; WAN0249RC_at; Start 36; Stop 60
gctttcattttttgctatactggtt

SEQ ID NO: 31322 - DNA, 25 bp, Artificial
  probe
  misc_feature (1)..(25): SEQ ID NO: 4537; WAN0249RC_at; Start 40; Stop 64
tcattttttgctatactggttcagt

SEQ ID NO: 31323 - DNA, 25 bp, Artificial
  probe
  misc_feature (1)..(25): SEQ ID NO: 4537; WAN0249RC_at; Start 41; Stop 65
cattttttgctatactggttcagta

SEQ ID NO: 31324 - DNA, 25 bp, Artificial
  probe
  misc_feature (1)..(25): SEQ ID NO: 4537; WAN0249RC_at; Start 27; Stop 51
cttgctagggctttcattttttgct

SEQ ID NO: 31325 - DNA, 25 bp, Artificial
  probe
  misc_feature (1)..(25): SEQ ID NO: 4537; WAN0249RC_at; Start 10; Stop 34
atttttcggtcaaatatcttgctag

SEQ ID NO: 31326 - DNA, 25 bp, Artificial
  probe
  misc_feature (1)..(25): SEQ ID NO: 4537; WAN0249RC_at; Start 19; Stop 43
tcaaatatcttgctagggctttcat

SEQ ID NO: 31327 - DNA, 25 bp, Artificial
  probe
  misc_feature (1)..(25): SEQ ID NO: 4537; WAN0249RC_at; Start 37; Stop 61
ctttcattttttgctatactggttc

SEQ ID NO: 31328 - DNA, 25 bp, Artificial
  probe
  misc_feature (1)..(25): SEQ ID NO: 4537; WAN0249RC_at; Start 1; Stop 25
tataaagatatttttcggtcaaata

SEQ ID NO: 31329 - DNA, 25 bp, Artificial
  probe
  misc_feature (1)..(25): SEQ ID NO: 4537; WAN0249RC_at; Start 33; Stop 57
agggctttcattttttgctatactg

SEQ ID NO: 31330 - DNA, 25 bp, Artificial
  probe
  misc_feature (1)..(25): SEQ ID NO: 4537; WAN0249RC_at; Start 18; Stop 42
gtcaaatatcttgctagggctttca

SEQ ID NO: 31331 - DNA, 25 bp, Artificial
  probe
  misc_feature (1)..(25): SEQ ID NO: 4537; WAN0249RC_at; Start 26; Stop 50
tcttgctagggctttcattttttgc

SEQ ID NO: 31332 - DNA, 25 bp, Artificial
  probe
  misc_feature (1)..(25): SEQ ID NO: 4537; WAN0249RC_at; Start 39; Stop 63
ttcattttttgctatactggttcag

SEQ ID NO: 31333 - DNA, 25 bp, Artificial
  probe
  misc_feature (1)..(25): SEQ ID NO: 4537; WAN0249RC_at; Start 29; Stop 53
tgctagggctttcattttttgctat

SEQ ID NO: 31334 - DNA, 25 bp, Artificial
  probe
  misc_feature (1)..(25): SEQ ID NO: 4537; WAN0249RC_at; Start 28; Stop 52
ttgctagggctttcattttttgcta

SEQ ID NO: 31335 - DNA, 25 bp, Artificial
  probe
  misc_feature (1)..(25): SEQ ID NO: 4537; WAN0249RC_at; Start 34; Stop 58
gggctttcattttttgctatactgg

SEQ ID NO: 31336 - DNA, 25 bp, Artificial
  probe
  misc_feature (1)..(25): SEQ ID NO: 4537; WAN0249RC_at; Start 35; Stop 59
ggctttcattttttgctatactggt

SEQ ID NO: 31337 - DNA, 25 bp, Artificial
  probe
  misc_feature (1)..(25): SEQ ID NO: 4537; WAN0249RC_at; Start 21; Stop 45
aaatatcttgctagggctttcattt

SEQ ID NO: 31338 - DNA, 25 bp, Artificial
  probe
  misc_feature (1)..(25): SEQ ID NO: 4537; WAN0249RC_at; Start 31; Stop 55
ctagggctttcattttttgctatac

SEQ ID NO: 31339 - DNA, 25 bp, Artificial
  probe
  misc_feature (1)..(25): SEQ ID NO: 4537; WAN0249RC_at; Start 30; Stop 54
gctagggctttcattttttgctata

SEQ ID NO: 31340 - DNA, 25 bp, Artificial
  probe
  misc_feature (1)..(25): SEQ ID NO: 4537; WAN0249RC_at; Start 32; Stop 56
tagggctttcattttttgctatact

SEQ ID NO: 31341 - DNA, 25 bp, Artificial
  probe
  misc_feature (1)..(25): SEQ ID NO: 4537; WAN0249RC_at; Start 3; Stop 27
taaagatatttttcggtcaaatatc

SEQ ID NO: 31342 - DNA, 25 bp, Artificial
  probe
  misc_feature (1)..(25): SEQ ID NO: 4537; WAN0249RC_at; Start 12; Stop 36
ttttcggtcaaatatcttgctaggg

SEQ ID NO: 31343 - DNA, 25 bp, Artificial
  probe
  misc_feature (1)..(25): SEQ ID NO: 4537; WAN0249RC_at; Start 15; Stop 39
tcggtcaaatatcttgctagggctt

SEQ ID NO: 31344 - DNA, 25 bp, Artificial
  probe
  misc_feature (1)..(25): SEQ ID NO: 4537; WAN0249RC_at; Start 38; Stop 62
tttcattttttgctatactggttca

SEQ ID NO: 31345 - DNA, 25 bp, Artificial
  probe
  misc_feature (1)..(25): SEQ ID NO: 4537; WAN0249RC_at; Start 22; Stop 46
aatatcttgctagggctttcatttt

SEQ ID NO: 31346 - DNA, 25 bp, Artificial
  probe
  misc_feature (1)..(25): SEQ ID NO: 4537; WAN0249RC_at; Start 13; Stop 37
tttcggtcaaatatcttgctagggc

SEQ ID NO: 31347 - DNA, 25 bp, Artificial
  probe
  misc_feature (1)..(25): SEQ ID NO: 4537; WAN0249RC_at; Start 9; Stop 33
tatttttcggtcaaatatcttgcta

SEQ ID NO: 31348 - DNA, 25 bp, Artificial
  probe
  misc_feature (1)..(25): SEQ ID NO: 3467; WAN0249RD_at; Start 89; Stop 113
tatggtataatattagcaataaaag

SEQ ID NO: 31349 - DNA, 25 bp, Artificial
  probe
  misc_feature (1)..(25): SEQ ID NO: 3467; WAN0249RD_at; Start 108; Stop 132
taaaagaaatctggaggattagaat

SEQ ID NO: 31350 - DNA, 25 bp, Artificial
  probe
  misc_feature (1)..(25): SEQ ID NO: 3467; WAN0249RD_at; Start 2; Stop 26
tgtttccatagcatgacttctgtac

SEQ ID NO: 31351 - DNA, 25 bp, Artificial
  probe
  misc_feature (1)..(25): SEQ ID NO: 3467; WAN0249RD_at; Start 49; Stop 73
tagatagaaccacagaatctagtaa

SEQ ID NO: 31352 - DNA, 25 bp, Artificial
  probe
  misc_feature (1)..(25): SEQ ID NO: 3467; WAN0249RD_at; Start 109; Stop 133
aaaagaaatctggaggattagaatc

SEQ ID NO: 31353 - DNA, 25 bp, Artificial
  probe
  misc_feature (1)..(25): SEQ ID NO: 3467; WAN0249RD_at; Start 3; Stop 27
gtttccatagcatgacttctgtact

SEQ ID NO: 31354 - DNA, 25 bp, Artificial
  probe
  misc_feature (1)..(25): SEQ ID NO: 3467; WAN0249RD_at; Start 105; Stop 129
caataaaagaaatctggaggattag

SEQ ID NO: 31355 - DNA, 25 bp, Artificial
  probe
  misc_feature (1)..(25): SEQ ID NO: 3467; WAN0249RD_at; Start 10; Stop 34
tagcatgacttctgtactagacttt

SEQ ID NO: 31356 - DNA, 25 bp, Artificial
  probe
  misc_feature (1)..(25): SEQ ID NO: 3467; WAN0249RD_at; Start 11; Stop 35
agcatgacttctgtactagactttc

SEQ ID NO: 31357 - DNA, 25 bp, Artificial
  probe
  misc_feature (1)..(25): SEQ ID NO: 3467; WAN0249RD_at; Start 55; Stop 79
gaaccacagaatctagtaaacctag

SEQ ID NO: 31358 - DNA, 25 bp, Artificial
  probe
  misc_feature (1)..(25): SEQ ID NO: 3467; WAN0249RD_at; Start 47; Stop 71
aatagatagaaccacagaatctagt

SEQ ID NO: 31359 - DNA, 25 bp, Artificial
  probe
  misc_feature (1)..(25): SEQ ID NO: 3467; WAN0249RD_at; Start 16; Stop 40
gacttctgtactagactttcttttc

SEQ ID NO: 31360 - DNA, 25 bp, Artificial
  probe
  misc_feature (1)..(25): SEQ ID NO: 3467; WAN0249RD_at; Start 12; Stop 36
gcatgacttctgtactagactttct

SEQ ID NO: 31361 - DNA, 25 bp, Artificial
  probe
  misc_feature (1)..(25): SEQ ID NO: 3467; WAN0249RD_at; Start 13; Stop 37
catgacttctgtactagactttctt

SEQ ID NO: 31362 - DNA, 25 bp, Artificial
  probe
  misc_feature (1)..(25): SEQ ID NO: 3467; WAN0249RD_at; Start 58; Stop 82
ccacagaatctagtaaacctagaat

SEQ ID NO: 31363 - DNA, 25 bp, Artificial
  probe
  misc_feature (1)..(25): SEQ ID NO: 3467; WAN0249RD_at; Start 61; Stop 85
cagaatctagtaaacctagaattaa

SEQ ID NO: 31364 - DNA, 25 bp, Artificial
  probe
  misc_feature (1)..(25): SEQ ID NO: 3467; WAN0249RD_at; Start 53; Stop 77
tagaaccacagaatctagtaaacct

SEQ ID NO: 31365 - DNA, 25 bp, Artificial
  probe
  misc_feature (1)..(25): SEQ ID NO: 3467; WAN0249RD_at; Start 59; Stop 83
cacagaatctagtaaacctagaatt

SEQ ID NO: 31366 - DNA, 25 bp, Artificial
  probe
  misc_feature (1)..(25): SEQ ID NO: 3467; WAN0249RD_at; Start 20; Stop 44
tctgtactagactttcttttccgaa

SEQ ID NO: 31367 - DNA, 25 bp, Artificial
  probe
  misc_feature (1)..(25): SEQ ID NO: 3467; WAN0249RD_at; Start 100; Stop 124
attagcaataaaagaaatctggagg

SEQ ID NO: 31368 - DNA, 25 bp, Artificial
  probe
  misc_feature (1)..(25): SEQ ID NO: 3467; WAN0249RD_at; Start 56; Stop 80
aaccacagaatctagtaaacctaga

SEQ ID NO: 31369 - DNA, 25 bp, Artificial
  probe
  misc_feature (1)..(25): SEQ ID NO: 3467; WAN0249RD_at; Start 7; Stop 31
ccatagcatgacttctgtactagac

SEQ ID NO: 31370 - DNA, 25 bp, Artificial
  probe
  misc_feature (1)..(25): SEQ ID NO: 3467; WAN0249RD_at; Start 1; Stop 25
ctgtttccatagcatgacttctgta

SEQ ID NO: 31371 - DNA, 25 bp, Artificial
  probe
  misc_feature (1)..(25): SEQ ID NO: 3467; WAN0249RD_at; Start 101; Stop 125
ttagcaataaaagaaatctggagga

SEQ ID NO: 31372 - DNA, 25 bp, Artificial
  probe
  misc_feature (1)..(25): SEQ ID NO: 3467; WAN0249RD_at; Start 21; Stop 45
ctgtactagactttcttttccgaat

SEQ ID NO: 31373 - DNA, 25 bp, Artificial
  probe
  misc_feature (1)..(25): SEQ ID NO: 3467; WAN0249RD_at; Start 8; Stop 32
catagcatgacttctgtactagact

SEQ ID NO: 31374 - DNA, 25 bp, Artificial
  probe
  misc_feature (1)..(25): SEQ ID NO: 3467; WAN0249RD_at; Start 102; Stop 126
tagcaataaaagaaatctggaggat

SEQ ID NO: 31375 - DNA, 25 bp, Artificial
  probe
  misc_feature (1)..(25): SEQ ID NO: 3467; WAN0249RD_at; Start 18; Stop 42
cttctgtactagactttcttttccg

SEQ ID NO: 31376 - DNA, 25 bp, Artificial
  probe
  misc_feature (1)..(25): SEQ ID NO: 3467; WAN0249RD_at; Start 6; Stop 30
tccatagcatgacttctgtactaga

SEQ ID NO: 31377 - DNA, 25 bp, Artificial
  probe
  misc_feature (1)..(25): SEQ ID NO: 3467; WAN0249RD_at; Start 99; Stop 123
tattagcaataaaagaaatctggag

SEQ ID NO: 31378 - DNA, 25 bp, Artificial
  probe
  misc_feature (1)..(25): SEQ ID NO: 3467; WAN0249RD_at; Start 75; Stop 99
cctagaattaaaattatggtataat

SEQ ID NO: 31379 - DNA, 25 bp, Artificial
  probe
  misc_feature (1)..(25): SEQ ID NO: 3467; WAN0249RD_at; Start 5; Stop 29
ttccatagcatgacttctgtactag

SEQ ID NO: 31380 - DNA, 25 bp, Artificial
  probe
  misc_feature (1)..(25): SEQ ID NO: 3467; WAN0249RD_at; Start 51; Stop 75
gatagaaccacagaatctagtaaac

SEQ ID NO: 31381 - DNA, 25 bp, Artificial
  probe
  misc_feature (1)..(25): SEQ ID NO: 3467; WAN0249RD_at; Start 104; Stop 128
gcaataaaagaaatctggaggatta

SEQ ID NO: 31382 - DNA, 25 bp, Artificial
  probe
  misc_feature (1)..(25): SEQ ID NO: 5266; WAN0249RE_at; Start 342; Stop 366
tgatgaattagccattcaagctgaa

SEQ ID NO: 31383 - DNA, 25 bp, Artificial
  probe
  misc_feature (1)..(25): SEQ ID NO: 5266; WAN0249RE_at; Start 292; Stop 316
cactcacaaagacagcagatctttc

SEQ ID NO: 31384 - DNA, 25 bp, Artificial
  probe
  misc_feature (1)..(25): SEQ ID NO: 5266; WAN0249RE_at; Start 366; Stop 390
atctggacatagctttttaaaaaag

SEQ ID NO: 31385 - DNA, 25 bp, Artificial
  probe
  misc_feature (1)..(25): SEQ ID NO: 5266; WAN0249RE_at; Start 306; Stop 330
gcagatctttcttttgcaaaaaaca

SEQ ID NO: 31386 - DNA, 25 bp, Artificial
  probe
  misc_feature (1)..(25): SEQ ID NO: 5266; WAN0249RE_at; Start 349; Stop 373
ttagccattcaagctgaatctggac

SEQ ID NO: 31387 - DNA, 25 bp, Artificial
  probe
  misc_feature (1)..(25): SEQ ID NO: 5266; WAN0249RE_at; Start 224; Stop 248
taattatgtgattattataacacac

SEQ ID NO: 31388 - DNA, 25 bp, Artificial
  probe
  misc_feature (1)..(25): SEQ ID NO: 5266; WAN0249RE_at; Start 272; Stop 296
gaactggaaatacagccttgcactc

SEQ ID NO: 31389 - DNA, 25 bp, Artificial
  probe
  misc_feature (1)..(25): SEQ ID NO: 5266; WAN0249RE_at; Start 282; Stop 306
tacagccttgcactcacaaagacag

SEQ ID NO: 31390 - DNA, 25 bp, Artificial
  probe
  misc_feature (1)..(25): SEQ ID NO: 5266; WAN0249RE_at; Start 244; Stop 268
cacacattttatactagttcaagaa

SEQ ID NO: 31391 - DNA, 25 bp, Artificial
  probe
  misc_feature (1)..(25): SEQ ID NO: 5266; WAN0249RE_at; Start 330; Stop 354
aaatgacctgtttgatgaattagcc

SEQ ID NO: 31392 - DNA, 25 bp, Artificial
  probe
  misc_feature (1)..(25): SEQ ID NO: 5266; WAN0249RE_at; Start 88; Stop 112
gagttcagcttacaagattagacag

SEQ ID NO: 31393 - DNA, 25 bp, Artificial
  probe
  misc_feature (1)..(25): SEQ ID NO: 5266; WAN0249RE_at; Start 364; Stop 388
gaatctggacatagctttttaaaaa

SEQ ID NO: 31394 - DNA, 25 bp, Artificial
  probe
  misc_feature (1)..(25): SEQ ID NO: 5266; WAN0249RE_at; Start 401; Stop 425
cttacttagaatccaaggatagata

SEQ ID NO: 31395 - DNA, 25 bp, Artificial
  probe
  misc_feature (1)..(25): SEQ ID NO: 5266; WAN0249RE_at; Start 100; Stop 124
caagattagacagttcttttcgaca

SEQ ID NO: 31396 - DNA, 25 bp, Artificial
  probe
  misc_feature (1)..(25): SEQ ID NO: 5266; WAN0249RE_at; Start 397; Stop 421
cctacttacttagaatccaaggata

SEQ ID NO: 31397 - DNA, 25 bp, Artificial
  probe
  misc_feature (1)..(25): SEQ ID NO: 5266; WAN0249RE_at; Start 23; Stop 47
caatctactatatcatcttcatcca

SEQ ID NO: 31398 - DNA, 25 bp, Artificial
  probe
  misc_feature (1)..(25): SEQ ID NO: 5266; WAN0249RE_at; Start 278; Stop 302
gaaatacagccttgcactcacaaag

SEQ ID NO: 31399 - DNA, 25 bp, Artificial
  probe
  misc_feature (1)..(25): SEQ ID NO: 5266; WAN0249RE_at; Start 361; Stop 385
gctgaatctggacatagctttttaa

SEQ ID NO: 31400 - DNA, 25 bp, Artificial
  probe
  misc_feature (1)..(25): SEQ ID NO: 5266; WAN0249RE_at; Start 106; Stop 130
tagacagttcttttcgacatacgaa

SEQ ID NO: 31401 - DNA, 25 bp, Artificial
  probe
  misc_feature (1)..(25): SEQ ID NO: 5266; WAN0249RE_at; Start 92; Stop 116
tcagcttacaagattagacagttct

SEQ ID NO: 31402 - DNA, 25 bp, Artificial
  probe
  misc_feature (1)..(25): SEQ ID NO: 5266; WAN0249RE_at; Start 354; Stop 378
cattcaagctgaatctggacatagc

SEQ ID NO: 31403 - DNA, 25 bp, Artificial
  probe
  misc_feature (1)..(25): SEQ ID NO: 5266; WAN0249RE_at; Start 290; Stop 314
tgcactcacaaagacagcagatctt

SEQ ID NO: 31404 - DNA, 25 bp, Artificial
  probe
  misc_feature (1)..(25): SEQ ID NO: 5266; WAN0249RE_at; Start 286; Stop 310
gccttgcactcacaaagacagcaga

SEQ ID NO: 31405 - DNA, 25 bp, Artificial
  probe
  misc_feature (1)..(25): SEQ ID NO: 5266; WAN0249RE_at; Start 108; Stop 132
gacagttcttttcgacatacgaaaa

SEQ ID NO: 31406 - DNA, 25 bp, Artificial
  probe
  misc_feature (1)..(25): SEQ ID NO: 5266; WAN0249RE_at; Start 391; Stop 415
gaaaatcctacttacttagaatcca

SEQ ID NO: 31407 - DNA, 25 bp, Artificial
  probe
  misc_feature (1)..(25): SEQ ID NO: 5266; WAN0249RE_at; Start 86; Stop 110
tagagttcagcttacaagattagac

SEQ ID NO: 31408 - DNA, 25 bp, Artificial
  probe
  misc_feature (1)..(25): SEQ ID NO: 5266; WAN0249RE_at; Start 268; Stop 292
aattgaactggaaatacagccttgc

SEQ ID NO: 31409 - DNA, 25 bp, Artificial
  probe
  misc_feature (1)..(25): SEQ ID NO: 5266; WAN0249RE_at; Start 119; Stop 143
tcgacatacgaaaaaaacatttcac

SEQ ID NO: 31410 - DNA, 25 bp, Artificial
  probe
  misc_feature (1)..(25): SEQ ID NO: 5266; WAN0249RE_at; Start 33; Stop 57
tatcatcttcatccagtttcgtaaa

SEQ ID NO: 31411 - DNA, 25 bp, Artificial
  probe
  misc_feature (1)..(25): SEQ ID NO: 5266; WAN0249RE_at; Start 334; Stop 358
gacctgtttgatgaattagccattc

SEQ ID NO: 31412 - DNA, 25 bp, Artificial
  probe
  misc_feature (1)..(25): SEQ ID NO: 5266; WAN0249RE_at; Start 315; Stop 339
tcttttgcaaaaaacaaatgacctg

SEQ ID NO: 31413 - DNA, 25 bp, Artificial
  probe
  misc_feature (1)..(25): SEQ ID NO: 5266; WAN0249RE_at; Start 302; Stop 326
gacagcagatctttcttttgcaaaa

SEQ ID NO: 31414 - DNA, 25 bp, Artificial
  probe
  misc_feature (1)..(25): SEQ ID NO: 5266; WAN0249RE_at; Start 262; Stop 286
tcaagaaattgaactggaaatacag

SEQ ID NO: 31415 - DNA, 25 bp, Artificial
  probe
  misc_feature (1)..(25): SEQ ID NO: 5266; WAN0249RE_at; Start 38; Stop 62
tcttcatccagtttcgtaaaagaaa

SEQ ID NO: 31416 - DNA, 25 bp, Artificial
  probe
  misc_feature (1)..(25): SEQ ID NO: 4787; WAN0249RF_at; Start 124; Stop 148
actgaaccagtatagcaaaaaatga

SEQ ID NO: 31417 - DNA, 25 bp, Artificial
  probe
  misc_feature (1)..(25): SEQ ID NO: 4787; WAN0249RF_at; Start 158; Stop 182
caagatatttgaccgaaaaatatct

SEQ ID NO: 31418 - DNA, 25 bp, Artificial
  probe
  misc_feature (1)..(25): SEQ ID NO: 4787; WAN0249RF_at; Start 148; Stop 172
aaagccctagcaagatatttgaccg

SEQ ID NO: 31419 - DNA, 25 bp, Artificial
  probe
  misc_feature (1)..(25): SEQ ID NO: 4787; WAN0249RF_at; Start 128; Stop 152
aaccagtatagcaaaaaatgaaagc

SEQ ID NO: 31420 - DNA, 25 bp, Artificial
  probe
  misc_feature (1)..(25): SEQ ID NO: 4787; WAN0249RF_at; Start 149; Stop 173
aagccctagcaagatatttgaccga

SEQ ID NO: 31421 - DNA, 25 bp, Artificial
  probe
  misc_feature (1)..(25): SEQ ID NO: 4787; WAN0249RF_at; Start 135; Stop 159
atagcaaaaaatgaaagccctagca

SEQ ID NO: 31422 - DNA, 25 bp, Artificial
  probe
  misc_feature (1)..(25): SEQ ID NO: 4787; WAN0249RF_at; Start 151; Stop 175
gccctagcaagatatttgaccgaaa

SEQ ID NO: 31423 - DNA, 25 bp, Artificial
  probe
  misc_feature (1)..(25): SEQ ID NO: 4787; WAN0249RF_at; Start 133; Stop 157
gtatagcaaaaaatgaaagccctag

SEQ ID NO: 31424 - DNA, 25 bp, Artificial
  probe
  misc_feature (1)..(25): SEQ ID NO: 4787; WAN0249RF_at; Start 127; Stop 151
gaaccagtatagcaaaaaatgaaag

SEQ ID NO: 31425 - DNA, 25 bp, Artificial
  probe
  misc_feature (1)..(25): SEQ ID NO: 4787; WAN0249RF_at; Start 144; Stop 168
aatgaaagccctagcaagatatttg

SEQ ID NO: 31426 - DNA, 25 bp, Artificial
  probe
  misc_feature (1)..(25): SEQ ID NO: 4787; WAN0249RF_at; Start 138; Stop 162
gcaaaaaatgaaagccctagcaaga

SEQ ID NO: 31427 - DNA, 25 bp, Artificial
  probe
  misc_feature (1)..(25): SEQ ID NO: 4787; WAN0249RF_at; Start 132; Stop 156
agtatagcaaaaaatgaaagcccta

SEQ ID NO: 31428 - DNA, 25 bp, Artificial
  probe
  misc_feature (1)..(25): SEQ ID NO: 4787; WAN0249RF_at; Start 161; Stop 185
gatatttgaccgaaaaatatcttta

SEQ ID NO: 31429 - DNA, 25 bp, Artificial
  probe
  misc_feature (1)..(25): SEQ ID NO: 4787; WAN0249RF_at; Start 152; Stop 176
ccctagcaagatatttgaccgaaaa

SEQ ID NO: 31430 - DNA, 25 bp, Artificial
  probe
  misc_feature (1)..(25): SEQ ID NO: 4787; WAN0249RF_at; Start 130; Stop 154
ccagtatagcaaaaaatgaaagccc

SEQ ID NO: 31431 - DNA, 25 bp, Artificial
  probe
  misc_feature (1)..(25): SEQ ID NO: 4787; WAN0249RF_at; Start 150; Stop 174
agccctagcaagatatttgaccgaa

SEQ ID NO: 31432 - DNA, 25 bp, Artificial
  probe
  misc_feature (1)..(25): SEQ ID NO: 4787; WAN0249RF_at; Start 126; Stop 150
tgaaccagtatagcaaaaaatgaaa

SEQ ID NO: 31433 - DNA, 25 bp, Artificial
  probe
  misc_feature (1)..(25): SEQ ID NO: 4787; WAN0249RF_at; Start 146; Stop 170
tgaaagccctagcaagatatttgac

SEQ ID NO: 31434 - DNA, 25 bp, Artificial
  probe
  misc_feature (1)..(25): SEQ ID NO: 4787; WAN0249RF_at; Start 155; Stop 179
tagcaagatatttgaccgaaaaata

SEQ ID NO: 31435 - DNA, 25 bp, Artificial
  probe
  misc_feature (1)..(25): SEQ ID NO: 4787; WAN0249RF_at; Start 163; Stop 187
tatttgaccgaaaaatatctttata

SEQ ID NO: 31436 - DNA, 25 bp, Artificial
  probe
  misc_feature (1)..(25): SEQ ID NO: 4787; WAN0249RF_at; Start 147; Stop 171
gaaagccctagcaagatatttgacc

SEQ ID NO: 31437 - DNA, 25 bp, Artificial
  probe
  misc_feature (1)..(25): SEQ ID NO: 4787; WAN0249RF_at; Start 125; Stop 149
ctgaaccagtatagcaaaaaatgaa

SEQ ID NO: 31438 - DNA, 25 bp, Artificial
  probe
  misc_feature (1)..(25): SEQ ID NO: 4787; WAN0249RF_at; Start 153; Stop 177
cctagcaagatatttgaccgaaaaa

SEQ ID NO: 31439 - DNA, 25 bp, Artificial
  probe
  misc_feature (1)..(25): SEQ ID NO: 4787; WAN0249RF_at; Start 143; Stop 167
aaatgaaagccctagcaagatattt

SEQ ID NO: 31440 - DNA, 25 bp, Artificial
  probe
  misc_feature (1)..(25): SEQ ID NO: 4787; WAN0249RF_at; Start 142; Stop 166
aaaatgaaagccctagcaagatatt

SEQ ID NO: 31441 - DNA, 25 bp, Artificial
  probe
  misc_feature (1)..(25): SEQ ID NO: 4787; WAN0249RF_at; Start 129; Stop 153
accagtatagcaaaaaatgaaagcc

SEQ ID NO: 31442 - DNA, 25 bp, Artificial
  probe
  misc_feature (1)..(25): SEQ ID NO: 4787; WAN0249RF_at; Start 136; Stop 160
tagcaaaaaatgaaagccctagcaa

SEQ ID NO: 31443 - DNA, 25 bp, Artificial
  probe
  misc_feature (1)..(25): SEQ ID NO: 4787; WAN0249RF_at; Start 123; Stop 147
tactgaaccagtatagcaaaaaatg

SEQ ID NO: 31444 - DNA, 25 bp, Artificial
  probe
  misc_feature (1)..(25): SEQ ID NO: 4787; WAN0249RF_at; Start 139; Stop 163
caaaaaatgaaagccctagcaagat

SEQ ID NO: 31445 - DNA, 25 bp, Artificial
  probe
  misc_feature (1)..(25): SEQ ID NO: 4787; WAN0249RF_at; Start 137; Stop 161
agcaaaaaatgaaagccctagcaag

SEQ ID NO: 31446 - DNA, 25 bp, Artificial
  probe
  misc_feature (1)..(25): SEQ ID NO: 4787; WAN0249RF_at; Start 131; Stop 155
cagtatagcaaaaaatgaaagccct

SEQ ID NO: 31447 - DNA, 25 bp, Artificial
  probe
  misc_feature (1)..(25): SEQ ID NO: 4787; WAN0249RF_at; Start 154; Stop 178
ctagcaagatatttgaccgaaaaat

SEQ ID NO: 31448 - DNA, 25 bp, Artificial
  probe
  misc_feature (1)..(25): SEQ ID NO: 4787; WAN0249RF_at; Start 157; Stop 181
gcaagatatttgaccgaaaaatatc

SEQ ID NO: 31449 - DNA, 25 bp, Artificial
  probe
  misc_feature (1)..(25): SEQ ID NO: 4787; WAN0249RF_at; Start 145; Stop 169
atgaaagccctagcaagatatttga

SEQ ID NO: 31450 - DNA, 25 bp, Artificial
  probe
  misc_feature (1)..(25): SEQ ID NO: 259; WAN0249RG_at; Start 36; Stop 60
tagaagcatagaatctagcaaacct

SEQ ID NO: 31451 - DNA, 25 bp, Artificial
  probe
  misc_feature (1)..(25): SEQ ID NO: 259; WAN0249RG_at; Start 54; Stop 78
caaacctagatttaaaaatgtgcta

SEQ ID NO: 31452 - DNA, 25 bp, Artificial
  probe
  misc_feature (1)..(25): SEQ ID NO: 259; WAN0249RG_at; Start 97; Stop 121
gaggattctcagacatctaggtatc

SEQ ID NO: 31453 - DNA, 25 bp, Artificial
  probe
  misc_feature (1)..(25): SEQ ID NO: 259; WAN0249RG_at; Start 99; Stop 123
ggattctcagacatctaggtatcag

SEQ ID NO: 31454 - DNA, 25 bp, Artificial
  probe
  misc_feature (1)..(25): SEQ ID NO: 259; WAN0249RG_at; Start 41; Stop 65
gcatagaatctagcaaacctagatt

SEQ ID NO: 31455 - DNA, 25 bp, Artificial
  probe
  misc_feature (1)..(25): SEQ ID NO: 259; WAN0249RG_at; Start 51; Stop 75
tagcaaacctagatttaaaaatgtg

SEQ ID NO: 31456 - DNA, 25 bp, Artificial
  probe
  misc_feature (1)..(25): SEQ ID NO: 259; WAN0249RG_at; Start 58; Stop 82
cctagatttaaaaatgtgctataat

SEQ ID NO: 31457 - DNA, 25 bp, Artificial
  probe
  misc_feature (1)..(25): SEQ ID NO: 259; WAN0249RG_at; Start 82; Stop 106
tagaaggaggaaaaggaggattctc

SEQ ID NO: 31458 - DNA, 25 bp, Artificial
  probe
  misc_feature (1)..(25): SEQ ID NO: 259; WAN0249RG_at; Start 93; Stop 117
aaaggaggattctcagacatctagg

SEQ ID NO: 31459 - DNA, 25 bp, Artificial
  probe
  misc_feature (1)..(25): SEQ ID NO: 259; WAN0249RG_at; Start 104; Stop 128
ctcagacatctaggtatcagcccaa

SEQ ID NO: 31460 - DNA, 25 bp, Artificial
  probe
  misc_feature (1)..(25): SEQ ID NO: 259; WAN0249RG_at; Start 72; Stop 96
tgtgctataatagaaggaggaaaag

SEQ ID NO: 31461 - DNA, 25 bp, Artificial
  probe
  misc_feature (1)..(25): SEQ ID NO: 259; WAN0249RG_at; Start 91; Stop 115
gaaaaggaggattctcagacatcta

SEQ ID NO: 31462 - DNA, 25 bp, Artificial
  probe
  misc_feature (1)..(25): SEQ ID NO: 259; WAN0249RG_at; Start 107; Stop 131
agacatctaggtatcagcccaacta

SEQ ID NO: 31463 - DNA, 25 bp, Artificial
  probe
  misc_feature (1)..(25): SEQ ID NO: 259; WAN0249RG_at; Start 30; Stop 54
aatagatagaagcatagaatctagc

SEQ ID NO: 31464 - DNA, 25 bp, Artificial
  probe
  misc_feature (1)..(25): SEQ ID NO: 259; WAN0249RG_at; Start 88; Stop 112
gaggaaaaggaggattctcagacat

SEQ ID NO: 31465 - DNA, 25 bp, Artificial
  probe
  misc_feature (1)..(25): SEQ ID NO: 259; WAN0249RG_at; Start 85; Stop 109
aaggaggaaaaggaggattctcaga

SEQ ID NO: 31466 - DNA, 25 bp, Artificial
  probe
  misc_feature (1)..(25): SEQ ID NO: 259; WAN0249RG_at; Start 102; Stop 126
ttctcagacatctaggtatcagccc

SEQ ID NO: 31467 - DNA, 25 bp, Artificial
  probe
  misc_feature (1)..(25): SEQ ID NO: 259; WAN0249RG_at; Start 75; Stop 99
gctataatagaaggaggaaaaggag

SEQ ID NO: 31468 - DNA, 25 bp, Artificial
  probe
  misc_feature (1)..(25): SEQ ID NO: 259; WAN0249RG_at; Start 67; Stop 91
aaaaatgtgctataatagaaggagg

SEQ ID NO: 31469 - DNA, 25 bp, Artificial
  probe
  misc_feature (1)..(25): SEQ ID NO: 259; WAN0249RG_at; Start 87; Stop 111
ggaggaaaaggaggattctcagaca

SEQ ID NO: 31470 - DNA, 25 bp, Artificial
  probe
  misc_feature (1)..(25): SEQ ID NO: 259; WAN0249RG_at; Start 96; Stop 120
ggaggattctcagacatctaggtat

SEQ ID NO: 31471 - DNA, 25 bp, Artificial
  probe
  misc_feature (1)..(25): SEQ ID NO: 259; WAN0249RG_at; Start 32; Stop 56
tagatagaagcatagaatctagcaa

SEQ ID NO: 31472 - DNA, 25 bp, Artificial
  probe
  misc_feature (1)..(25): SEQ ID NO: 259; WAN0249RG_at; Start 4; Stop 28
aagctattagctttcttttccgaat

SEQ ID NO: 31473 - DNA, 25 bp, Artificial
  probe
  misc_feature (1)..(25): SEQ ID NO: 259; WAN0249RG_at; Start 100; Stop 124
gattctcagacatctaggtatcagc

SEQ ID NO: 31474 - DNA, 25 bp, Artificial
  probe
  misc_feature (1)..(25): SEQ ID NO: 259; WAN0249RG_at; Start 105; Stop 129
tcagacatctaggtatcagcccaac

SEQ ID NO: 31475 - DNA, 25 bp, Artificial
  probe
  misc_feature (1)..(25): SEQ ID NO: 259; WAN0249RG_at; Start 77; Stop 101
tataatagaaggaggaaaaggagga

SEQ ID NO: 31476 - DNA, 25 bp, Artificial
  probe
  misc_feature (1)..(25): SEQ ID NO: 259; WAN0249RG_at; Start 106; Stop 130
cagacatctaggtatcagcccaact

SEQ ID NO: 31477 - DNA, 25 bp, Artificial
  probe
  misc_feature (1)..(25): SEQ ID NO: 259; WAN0249RG_at; Start 90; Stop 114
ggaaaaggaggattctcagacatct

SEQ ID NO: 31478 - DNA, 25 bp, Artificial
  probe
  misc_feature (1)..(25): SEQ ID NO: 259; WAN0249RG_at; Start 34; Stop 58
gatagaagcatagaatctagcaaac

SEQ ID NO: 31479 - DNA, 25 bp, Artificial
  probe
  misc_feature (1)..(25): SEQ ID NO: 259; WAN0249RG_at; Start 94; Stop 118
aaggaggattctcagacatctaggt

SEQ ID NO: 31480 - DNA, 25 bp, Artificial
  probe
  misc_feature (1)..(25): SEQ ID NO: 259; WAN0249RG_at; Start 92; Stop 116
aaaaggaggattctcagacatctag

SEQ ID NO: 31481 - DNA, 25 bp, Artificial
  probe
  misc_feature (1)..(25): SEQ ID NO: 259; WAN0249RG_at; Start 38; Stop 62
gaagcatagaatctagcaaacctag

SEQ ID NO: 31482 - DNA, 25 bp, Artificial
  probe
  misc_feature (1)..(25): SEQ ID NO: 259; WAN0249RG_at; Start 103; Stop 127
tctcagacatctaggtatcagccca

SEQ ID NO: 31483 - DNA, 25 bp, Artificial
  probe
  misc_feature (1)..(25): SEQ ID NO: 259; WAN0249RG_at; Start 3; Stop 27
taagctattagctttcttttccgaa

SEQ ID NO: 31484 - DNA, 25 bp, Artificial
  probe
  misc_feature (1)..(25): SEQ ID NO: 3648; WAN0249RH_at; Start 108; Stop 132
gtacagaagtcatgctatggaaaca

SEQ ID NO: 31485 - DNA, 25 bp, Artificial
  probe
  misc_feature (1)..(25): SEQ ID NO: 3648; WAN0249RH_at; Start 63; Stop 87
actagattctgtggttctatctatt

SEQ ID NO: 31486 - DNA, 25 bp, Artificial
  probe
  misc_feature (1)..(25): SEQ ID NO: 3648; WAN0249RH_at; Start 97; Stop 121
aagaaagtctagtacagaagtcatg

SEQ ID NO: 31487 - DNA, 25 bp, Artificial
  probe
  misc_feature (1)..(25): SEQ ID NO: 3648; WAN0249RH_at; Start 58; Stop 82
ggtttactagattctgtggttctat

SEQ ID NO: 31488 - DNA, 25 bp, Artificial
  probe
  misc_feature (1)..(25): SEQ ID NO: 3648; WAN0249RH_at; Start 91; Stop 115
tcggaaaagaaagtctagtacagaa

SEQ ID NO: 31489 - DNA, 25 bp, Artificial
  probe
  misc_feature (1)..(25): SEQ ID NO: 3648; WAN0249RH_at; Start 99; Stop 123
gaaagtctagtacagaagtcatgct

SEQ ID NO: 31490 - DNA, 25 bp, Artificial
  probe
  misc_feature (1)..(25): SEQ ID NO: 3648; WAN0249RH_at; Start 109; Stop 133
tacagaagtcatgctatggaaacag

SEQ ID NO: 31491 - DNA, 25 bp, Artificial
  probe
  misc_feature (1)..(25): SEQ ID NO: 3648; WAN0249RH_at; Start 60; Stop 84
tttactagattctgtggttctatct

SEQ ID NO: 31492 - DNA, 25 bp, Artificial
  probe
  misc_feature (1)..(25): SEQ ID NO: 3648; WAN0249RH_at; Start 12; Stop 36
tccagatttcttttattgctaatat

SEQ ID NO: 31493 - DNA, 25 bp, Artificial
  probe
  misc_feature (1)..(25): SEQ ID NO: 3648; WAN0249RH_at; Start 107; Stop 131
agtacagaagtcatgctatggaaac

SEQ ID NO: 31494 - DNA, 25 bp, Artificial
  probe
  misc_feature (1)..(25): SEQ ID NO: 3648; WAN0249RH_at; Start 55; Stop 79
ctaggtttactagattctgtggttc

SEQ ID NO: 31495 - DNA, 25 bp, Artificial
  probe
  misc_feature (1)..(25): SEQ ID NO: 3648; WAN0249RH_at; Start 20; Stop 44
tcttttattgctaatattataccat

SEQ ID NO: 31496 - DNA, 25 bp, Artificial
  probe
  misc_feature (1)..(25): SEQ ID NO: 3648; WAN0249RH_at; Start 103; Stop 127
gtctagtacagaagtcatgctatgg

SEQ ID NO: 31497 - DNA, 25 bp, Artificial
  probe
  misc_feature (1)..(25): SEQ ID NO: 3648; WAN0249RH_at; Start 95; Stop 119
aaaagaaagtctagtacagaagtca

SEQ ID NO: 31498 - DNA, 25 bp, Artificial
  probe
  misc_feature (1)..(25): SEQ ID NO: 3648; WAN0249RH_at; Start 56; Stop 80
taggtttactagattctgtggttct

SEQ ID NO: 31499 - DNA, 25 bp, Artificial
  probe
  misc_feature (1)..(25): SEQ ID NO: 3648; WAN0249RH_at; Start 9; Stop 33
tcctccagatttcttttattgctaa

SEQ ID NO: 31500 - DNA, 25 bp, Artificial
  probe
  misc_feature (1)..(25): SEQ ID NO: 3648; WAN0249RH_at; Start 98; Stop 122
agaaagtctagtacagaagtcatgc

SEQ ID NO: 31501 - DNA, 25 bp, Artificial
  probe
  misc_feature (1)..(25): SEQ ID NO: 3648; WAN0249RH_at; Start 94; Stop 118
gaaaagaaagtctagtacagaagtc

SEQ ID NO: 31502 - DNA, 25 bp, Artificial
  probe
  misc_feature (1)..(25): SEQ ID NO: 3648; WAN0249RH_at; Start 104; Stop 128
tctagtacagaagtcatgctatgga

SEQ ID NO: 31503 - DNA, 25 bp, Artificial
  probe
  misc_feature (1)..(25): SEQ ID NO: 3648; WAN0249RH_at; Start 35; Stop 59
attataccataattttaattctagg

SEQ ID NO: 31504 - DNA, 25 bp, Artificial
  probe
  misc_feature (1)..(25): SEQ ID NO: 3648; WAN0249RH_at; Start 10; Stop 34
cctccagatttcttttattgctaat

SEQ ID NO: 31505 - DNA, 25 bp, Artificial
  probe
  misc_feature (1)..(25): SEQ ID NO: 3648; WAN0249RH_at; Start 51; Stop 75
aattctaggtttactagattctgtg

SEQ ID NO: 31506 - DNA, 25 bp, Artificial
  probe
  misc_feature (1)..(25): SEQ ID NO: 3648; WAN0249RH_at; Start 6; Stop 30
taatcctccagatttcttttattgc

SEQ ID NO: 31507 - DNA, 25 bp, Artificial
  probe
  misc_feature (1)..(25): SEQ ID NO: 3648; WAN0249RH_at; Start 89; Stop 113
attcggaaaagaaagtctagtacag

SEQ ID NO: 31508 - DNA, 25 bp, Artificial
  probe
  misc_feature (1)..(25): SEQ ID NO: 3648; WAN0249RH_at; Start 1; Stop 25
gattctaatcctccagatttctttt

SEQ ID NO: 31509 - DNA, 25 bp, Artificial
  probe
  misc_feature (1)..(25): SEQ ID NO: 3648; WAN0249RH_at; Start 105; Stop 129
ctagtacagaagtcatgctatggaa

SEQ ID NO: 31510 - DNA, 25 bp, Artificial
  probe
  misc_feature (1)..(25): SEQ ID NO: 3648; WAN0249RH_at; Start 92; Stop 116
cggaaaagaaagtctagtacagaag

SEQ ID NO: 31511 - DNA, 25 bp, Artificial
  probe
  misc_feature (1)..(25): SEQ ID NO: 3648; WAN0249RH_at; Start 101; Stop 125
aagtctagtacagaagtcatgctat

SEQ ID NO: 31512 - DNA, 25 bp, Artificial
  probe
  misc_feature (1)..(25): SEQ ID NO: 3648; WAN0249RH_at; Start 100; Stop 124
aaagtctagtacagaagtcatgcta

SEQ ID NO: 31513 - DNA, 25 bp, Artificial
  probe
  misc_feature (1)..(25): SEQ ID NO: 3648; WAN0249RH_at; Start 62; Stop 86
tactagattctgtggttctatctat

SEQ ID NO: 31514 - DNA, 25 bp, Artificial
  probe
  misc_feature (1)..(25): SEQ ID NO: 3648; WAN0249RH_at; Start 102; Stop 126
agtctagtacagaagtcatgctatg

SEQ ID NO: 31515 - DNA, 25 bp, Artificial
  probe
  misc_feature (1)..(25): SEQ ID NO: 3648; WAN0249RH_at; Start 90; Stop 114
ttcggaaaagaaagtctagtacaga

SEQ ID NO: 31516 - DNA, 25 bp, Artificial
  probe
  misc_feature (1)..(25): SEQ ID NO: 3648; WAN0249RH_at; Start 96; Stop 120
aaagaaagtctagtacagaagtcat

SEQ ID NO: 31517 - DNA, 25 bp, Artificial
  probe
  misc_feature (1)..(25): SEQ ID NO: 3648; WAN0249RH_at; Start 106; Stop 130
tagtacagaagtcatgctatggaaa

SEQ ID NO: 31518 - DNA, 25 bp, Artificial
  probe
  misc_feature (1)..(25): SEQ ID NO: 4530; WAN0249RI_at; Start 8; Stop 32
gctgatacctagatgtctgagaatc

SEQ ID NO: 31519 - DNA, 25 bp, Artificial
  probe
  misc_feature (1)..(25): SEQ ID NO: 4530; WAN0249RI_at; Start 3; Stop 27
gttgggctgatacctagatgtctga

SEQ ID NO: 31520 - DNA, 25 bp, Artificial
  probe
  misc_feature (1)..(25): SEQ ID NO: 4530; WAN0249RI_at; Start 106; Stop 130
tcggaaaagaaagctaatagcttat

SEQ ID NO: 31521 - DNA, 25 bp, Artificial
  probe
  misc_feature (1)..(25): SEQ ID NO: 4530; WAN0249RI_at; Start 105; Stop 129
ttcggaaaagaaagctaatagctta

SEQ ID NO: 31522 - DNA, 25 bp, Artificial
  probe
  misc_feature (1)..(25): SEQ ID NO: 4530; WAN0249RI_at; Start 72; Stop 96
aggtttgctagattctatgcttcta

SEQ ID NO: 31523 - DNA, 25 bp, Artificial
  probe
  misc_feature (1)..(25): SEQ ID NO: 4530; WAN0249RI_at; Start 104; Stop 128
attcggaaaagaaagctaatagctt

SEQ ID NO: 31524 - DNA, 25 bp, Artificial
  probe
  misc_feature (1)..(25): SEQ ID NO: 4530; WAN0249RI_at; Start 5; Stop 29
tgggctgatacctagatgtctgaga

SEQ ID NO: 31525 - DNA, 25 bp, Artificial
  probe
  misc_feature (1)..(25): SEQ ID NO: 4530; WAN0249RI_at; Start 73; Stop 97
ggtttgctagattctatgcttctat

SEQ ID NO: 31526 - DNA, 25 bp, Artificial
  probe
  misc_feature (1)..(25): SEQ ID NO: 4530; WAN0249RI_at; Start 77; Stop 101
tgctagattctatgcttctatctat

SEQ ID NO: 31527 - DNA, 25 bp, Artificial
  probe
  misc_feature (1)..(25): SEQ ID NO: 4530; WAN0249RI_at; Start 75; Stop 99
tttgctagattctatgcttctatct

SEQ ID NO: 31528 - DNA, 25 bp, Artificial
  probe
  misc_feature (1)..(25): SEQ ID NO: 4530; WAN0249RI_at; Start 35; Stop 59
ccttttcctccttctattatagcac

SEQ ID NO: 31529 - DNA, 25 bp, Artificial
  probe
  misc_feature (1)..(25): SEQ ID NO: 4530; WAN0249RI_at; Start 69; Stop 93
tctaggtttgctagattctatgctt

SEQ ID NO: 31530 - DNA, 25 bp, Artificial
  probe
  misc_feature (1)..(25): SEQ ID NO: 4530; WAN0249RI_at; Start 7; Stop 31
ggctgatacctagatgtctgagaat

SEQ ID NO: 31531 - DNA, 25 bp, Artificial
  probe
  misc_feature (1)..(25): SEQ ID NO: 4530; WAN0249RI_at; Start 31; Stop 55
tcctccttttcctccttctattata

SEQ ID NO: 31532 - DNA, 25 bp, Artificial
  probe
  misc_feature (1)..(25): SEQ ID NO: 4530; WAN0249RI_at; Start 9; Stop 33
ctgatacctagatgtctgagaatcc

SEQ ID NO: 31533 - DNA, 25 bp, Artificial
  probe
  misc_feature (1)..(25): SEQ ID NO: 4530; WAN0249RI_at; Start 74; Stop 98
gtttgctagattctatgcttctatc

SEQ ID NO: 31534 - DNA, 25 bp, Artificial
  probe
  misc_feature (1)..(25): SEQ ID NO: 4530; WAN0249RI_at; Start 107; Stop 131
cggaaaagaaagctaatagcttatt

SEQ ID NO: 31535 - DNA, 25 bp, Artificial
  probe
  misc_feature (1)..(25): SEQ ID NO: 4530; WAN0249RI_at; Start 66; Stop 90
aaatctaggtttgctagattctatg

SEQ ID NO: 31536 - DNA, 25 bp, Artificial
  probe
  misc_feature (1)..(25): SEQ ID NO: 4530; WAN0249RI_at; Start 33; Stop 57
ctccttttcctccttctattatagc

SEQ ID NO: 31537 - DNA, 25 bp, Artificial
  probe
  misc_feature (1)..(25): SEQ ID NO: 4530; WAN0249RI_at; Start 68; Stop 92
atctaggtttgctagattctatgct

SEQ ID NO: 31538 - DNA, 25 bp, Artificial
  probe
  misc_feature (1)..(25): SEQ ID NO: 4530; WAN0249RI_at; Start 67; Stop 91
aatctaggtttgctagattctatgc

SEQ ID NO: 31539 - DNA, 25 bp, Artificial
  probe
  misc_feature (1)..(25): SEQ ID NO: 4530; WAN0249RI_at; Start 39; Stop 63
ttcctccttctattatagcacattt

SEQ ID NO: 31540 - DNA, 25 bp, Artificial
  probe
  misc_feature (1)..(25): SEQ ID NO: 4530; WAN0249RI_at; Start 1; Stop 25
tagttgggctgatacctagatgtct

SEQ ID NO: 31541 - DNA, 25 bp, Artificial
  probe
  misc_feature (1)..(25): SEQ ID NO: 4530; WAN0249RI_at; Start 34; Stop 58
tccttttcctccttctattatagca

SEQ ID NO: 31542 - DNA, 25 bp, Artificial
  probe
  misc_feature (1)..(25): SEQ ID NO: 4530; WAN0249RI_at; Start 65; Stop 89
taaatctaggtttgctagattctat

SEQ ID NO: 31543 - DNA, 25 bp, Artificial
  probe
  misc_feature (1)..(25): SEQ ID NO: 4530; WAN0249RI_at; Start 71; Stop 95
taggtttgctagattctatgcttct

SEQ ID NO: 31544 - DNA, 25 bp, Artificial
  probe
  misc_feature (1)..(25): SEQ ID NO: 4530; WAN0249RI_at; Start 32; Stop 56
cctccttttcctccttctattatag

SEQ ID NO: 31545 - DNA, 25 bp, Artificial
  probe
  misc_feature (1)..(25): SEQ ID NO: 4530; WAN0249RI_at; Start 36; Stop 60
cttttcctccttctattatagcaca

SEQ ID NO: 31546 - DNA, 25 bp, Artificial
  probe
  misc_feature (1)..(25): SEQ ID NO: 4530; WAN0249RI_at; Start 78; Stop 102
gctagattctatgcttctatctatt

SEQ ID NO: 31547 - DNA, 25 bp, Artificial
  probe
  misc_feature (1)..(25): SEQ ID NO: 4530; WAN0249RI_at; Start 70; Stop 94
ctaggtttgctagattctatgcttc

SEQ ID NO: 31548 - DNA, 25 bp, Artificial
  probe
  misc_feature (1)..(25): SEQ ID NO: 4530; WAN0249RI_at; Start 37; Stop 61
ttttcctccttctattatagcacat

SEQ ID NO: 31549 - DNA, 25 bp, Artificial
  probe
  misc_feature (1)..(25): SEQ ID NO: 4530; WAN0249RI_at; Start 76; Stop 100
ttgctagattctatgcttctatcta

SEQ ID NO: 31550 - DNA, 25 bp, Artificial
  probe
  misc_feature (1)..(25): SEQ ID NO: 4530; WAN0249RI_at; Start 38; Stop 62
tttcctccttctattatagcacatt

SEQ ID NO: 31551 - DNA, 25 bp, Artificial
  probe
  misc_feature (1)..(25): SEQ ID NO: 4530; WAN0249RI_at; Start 4; Stop 28
ttgggctgatacctagatgtctgag

SEQ ID NO: 31552 - DNA, 25 bp, Artificial
  probe
  misc_feature (1)..(25): SEQ ID NO: 3213; WAN0249RK_at; Start 248; Stop 272
aagcatcttattttcttcattgaaa

SEQ ID NO: 31553 - DNA, 25 bp, Artificial
  probe
  misc_feature (1)..(25): SEQ ID NO: 3213; WAN0249RK_at; Start 273; Stop 297
aaagcctttctttctgctataatcg

SEQ ID NO: 31554 - DNA, 25 bp, Artificial
  probe
  misc_feature (1)..(25): SEQ ID NO: 3213; WAN0249RK_at; Start 236; Stop 260
ctttaggctagaaagcatcttattt

SEQ ID NO: 31555 - DNA, 25 bp, Artificial
  probe
  misc_feature (1)..(25): SEQ ID NO: 3213; WAN0249RK_at; Start 246; Stop 270
gaaagcatcttattttcttcattga

SEQ ID NO: 31556 - DNA, 25 bp, Artificial
  probe
  misc_feature (1)..(25): SEQ ID NO: 3213; WAN0249RK_at; Start 241; Stop 265
ggctagaaagcatcttattttcttc

SEQ ID NO: 31557 - DNA, 25 bp, Artificial
  probe
  misc_feature (1)..(25): SEQ ID NO: 3213; WAN0249RK_at; Start 226; Stop 250
gaaaggctcgctttaggctagaaag

SEQ ID NO: 31558 - DNA, 25 bp, Artificial
  probe
  misc_feature (1)..(25): SEQ ID NO: 3213; WAN0249RK_at; Start 271; Stop 295
aaaaagcctttctttctgctataat

SEQ ID NO: 31559 - DNA, 25 bp, Artificial
  probe
  misc_feature (1)..(25): SEQ ID NO: 3213; WAN0249RK_at; Start 277; Stop 301
cctttctttctgctataatcgtata

SEQ ID NO: 31560 - DNA, 25 bp, Artificial
  probe
  misc_feature (1)..(25): SEQ ID NO: 3213; WAN0249RK_at; Start 288; Stop 312
gctataatcgtataaaatacttact

SEQ ID NO: 31561 - DNA, 25 bp, Artificial
  probe
  misc_feature (1)..(25): SEQ ID NO: 3213; WAN0249RK_at; Start 276; Stop 300
gcctttctttctgctataatcgtat

SEQ ID NO: 31562 - DNA, 25 bp, Artificial
  probe
  misc_feature (1)..(25): SEQ ID NO: 3213; WAN0249RK_at; Start 267; Stop 291
ttgaaaaaagcctttctttctgcta

SEQ ID NO: 31563 - DNA, 25 bp, Artificial
  probe
  misc_feature (1)..(25): SEQ ID NO: 3213; WAN0249RK_at; Start 274; Stop 298
aagcctttctttctgctataatcgt

SEQ ID NO: 31564 - DNA, 25 bp, Artificial
  probe
  misc_feature (1)..(25): SEQ ID NO: 3213; WAN0249RK_at; Start 227; Stop 251
aaaggctcgctttaggctagaaagc

SEQ ID NO: 31565 - DNA, 25 bp, Artificial
  probe
  misc_feature (1)..(25): SEQ ID NO: 3213; WAN0249RK_at; Start 234; Stop 258
cgctttaggctagaaagcatcttat

SEQ ID NO: 31566 - DNA, 25 bp, Artificial
  probe
  misc_feature (1)..(25): SEQ ID NO: 3213; WAN0249RK_at; Start 238; Stop 262
ttaggctagaaagcatcttattttc

SEQ ID NO: 31567 - DNA, 25 bp, Artificial
  probe
  misc_feature (1)..(25): SEQ ID NO: 3213; WAN0249RK_at; Start 272; Stop 296
aaaagcctttctttctgctataatc

SEQ ID NO: 31568 - DNA, 25 bp, Artificial
  probe
  misc_feature (1)..(25): SEQ ID NO: 3213; WAN0249RK_at; Start 235; Stop 259
gctttaggctagaaagcatcttatt

SEQ ID NO: 31569 - DNA, 25 bp, Artificial
  probe
  misc_feature (1)..(25): SEQ ID NO: 3213; WAN0249RK_at; Start 285; Stop 309
tctgctataatcgtataaaatactt

SEQ ID NO: 31570 - DNA, 25 bp, Artificial
  probe
  misc_feature (1)..(25): SEQ ID NO: 3213; WAN0249RK_at; Start 224; Stop 248
aagaaaggctcgctttaggctagaa

SEQ ID NO: 31571 - DNA, 25 bp, Artificial
  probe
  misc_feature (1)..(25): SEQ ID NO: 3213; WAN0249RK_at; Start 275; Stop 299
agcctttctttctgctataatcgta

SEQ ID NO: 31572 - DNA, 25 bp, Artificial
  probe
  misc_feature (1)..(25): SEQ ID NO: 3213; WAN0249RK_at; Start 239; Stop 263
taggctagaaagcatcttattttct

SEQ ID NO: 31573 - DNA, 25 bp, Artificial
  probe
  misc_feature (1)..(25): SEQ ID NO: 3213; WAN0249RK_at; Start 225; Stop 249
agaaaggctcgctttaggctagaaa

SEQ ID NO: 31574 - DNA, 25 bp, Artificial
  probe
  misc_feature (1)..(25): SEQ ID NO: 3213; WAN0249RK_at; Start 229; Stop 253
aggctcgctttaggctagaaagcat

SEQ ID NO: 31575 - DNA, 25 bp, Artificial
  probe
  misc_feature (1)..(25): SEQ ID NO: 3213; WAN0249RK_at; Start 228; Stop 252
aaggctcgctttaggctagaaagca

SEQ ID NO: 31576 - DNA, 25 bp, Artificial
  probe
  misc_feature (1)..(25): SEQ ID NO: 3213; WAN0249RK_at; Start 269; Stop 293
gaaaaaagcctttctttctgctata

SEQ ID NO: 31577 - DNA, 25 bp, Artificial
  probe
  misc_feature (1)..(25): SEQ ID NO: 3213; WAN0249RK_at; Start 278; Stop 302
ctttctttctgctataatcgtataa

SEQ ID NO: 31578 - DNA, 25 bp, Artificial
  probe
  misc_feature (1)..(25): SEQ ID NO: 3213; WAN0249RK_at; Start 231; Stop 255
gctcgctttaggctagaaagcatct

SEQ ID NO: 31579 - DNA, 25 bp, Artificial
  probe
  misc_feature (1)..(25): SEQ ID NO: 3213; WAN0249RK_at; Start 281; Stop 305
tctttctgctataatcgtataaaat

SEQ ID NO: 31580 - DNA, 25 bp, Artificial
  probe
  misc_feature (1)..(25): SEQ ID NO: 3213; WAN0249RK_at; Start 253; Stop 277
tcttattttcttcattgaaaaaagc

SEQ ID NO: 31581 - DNA, 25 bp, Artificial
  probe
  misc_feature (1)..(25): SEQ ID NO: 3213; WAN0249RK_at; Start 233; Stop 257
tcgctttaggctagaaagcatctta

SEQ ID NO: 31582 - DNA, 25 bp, Artificial
  probe
  misc_feature (1)..(25): SEQ ID NO: 3213; WAN0249RK_at; Start 242; Stop 266
gctagaaagcatcttattttcttca

SEQ ID NO: 31583 - DNA, 25 bp, Artificial
  probe
  misc_feature (1)..(25): SEQ ID NO: 3213; WAN0249RK_at; Start 250; Stop 274
gcatcttattttcttcattgaaaaa

SEQ ID NO: 31584 - DNA, 25 bp, Artificial
  probe
  misc_feature (1)..(25): SEQ ID NO: 3213; WAN0249RK_at; Start 232; Stop 256
ctcgctttaggctagaaagcatctt

SEQ ID NO: 31585 - DNA, 25 bp, Artificial
  probe
  misc_feature (1)..(25): SEQ ID NO: 3213; WAN0249RK_at; Start 264; Stop 288
tcattgaaaaaagcctttctttctg

SEQ ID NO: 31586 - DNA, 25 bp, Artificial
  probe
  misc_feature (1)..(25): SEQ ID NO: 547; WAN0249RL_x_at; Start 7; Stop 31
gatactatgcgtttttaagatttta

SEQ ID NO: 31587 - DNA, 25 bp, Artificial
  probe
  misc_feature (1)..(25): SEQ ID NO: 547; WAN0249RL_x_at; Start 5; Stop 29
ctgatactatgcgtttttaagattt

SEQ ID NO: 31588 - DNA, 25 bp, Artificial
  probe
  misc_feature (1)..(25): SEQ ID NO: 547; WAN0249RL_x_at; Start 3; Stop 27
acctgatactatgcgtttttaagat

SEQ ID NO: 31589 - DNA, 25 bp, Artificial
  probe
  misc_feature (1)..(25): SEQ ID NO: 547; WAN0249RL_x_at; Start 2; Stop 26
tacctgatactatgcgtttttaaga

SEQ ID NO: 31590 - DNA, 25 bp, Artificial
  probe
  misc_feature (1)..(25): SEQ ID NO: 547; WAN0249RL_x_at; Start 1; Stop 25
atacctgatactatgcgtttttaag

SEQ ID NO: 31591 - DNA, 25 bp, Artificial
  probe
  misc_feature (1)..(25): SEQ ID NO: 547; WAN0249RL_x_at; Start 4; Stop 28
cctgatactatgcgtttttaagatt

SEQ ID NO: 31592 - DNA, 25 bp, Artificial
  probe
  misc_feature (1)..(25): SEQ ID NO: 547; WAN0249RL_x_at; Start 6; Stop 30
tgatactatgcgtttttaagatttt

SEQ ID NO: 31593 - DNA, 25 bp, Artificial
  probe
  misc_feature (1)..(25): SEQ ID NO: 514; WAN0249RM_at; Start 15; Stop 39
caagaaattagtctgtaaacaagga

SEQ ID NO: 31594 - DNA, 25 bp, Artificial
  probe
  misc_feature (1)..(25): SEQ ID NO: 514; WAN0249RM_at; Start 40; Stop 64
cctaaaacaaatattgtatgggtat

SEQ ID NO: 31595 - DNA, 25 bp, Artificial
  probe
  misc_feature (1)..(25): SEQ ID NO: 514; WAN0249RM_at; Start 251; Stop 275
actcaatcaactatagtttgctctt

SEQ ID NO: 31596 - DNA, 25 bp, Artificial
  probe
  misc_feature (1)..(25): SEQ ID NO: 514; WAN0249RM_at; Start 254; Stop 278
caatcaactatagtttgctctttga

SEQ ID NO: 31597 - DNA, 25 bp, Artificial
  probe
  misc_feature (1)..(25): SEQ ID NO: 514; WAN0249RM_at; Start 10; Stop 34
tttatcaagaaattagtctgtaaac

SEQ ID NO: 31598 - DNA, 25 bp, Artificial
  probe
  misc_feature (1)..(25): SEQ ID NO: 514; WAN0249RM_at; Start 5; Stop 29
tctattttatcaagaaattagtctg

SEQ ID NO: 31599 - DNA, 25 bp, Artificial
  probe
  misc_feature (1)..(25): SEQ ID NO: 514; WAN0249RM_at; Start 8; Stop 32
attttatcaagaaattagtctgtaa

SEQ ID NO: 31600 - DNA, 25 bp, Artificial
  probe
  misc_feature (1)..(25): SEQ ID NO: 514; WAN0249RM_at; Start 34; Stop 58
caaggacctaaaacaaatattgtat

SEQ ID NO: 31601 - DNA, 25 bp, Artificial
  probe
  misc_feature (1)..(25): SEQ ID NO: 514; WAN0249RM_at; Start 35; Stop 59
aaggacctaaaacaaatattgtatg

SEQ ID NO: 31602 - DNA, 25 bp, Artificial
  probe
  misc_feature (1)..(25): SEQ ID NO: 514; WAN0249RM_at; Start 11; Stop 35
ttatcaagaaattagtctgtaaaca

SEQ ID NO: 31603 - DNA, 25 bp, Artificial
  probe
  misc_feature (1)..(25): SEQ ID NO: 514; WAN0249RM_at; Start 9; Stop 33
ttttatcaagaaattagtctgtaaa

SEQ ID NO: 31604 - DNA, 25 bp, Artificial
  probe
  misc_feature (1)..(25): SEQ ID NO: 514; WAN0249RM_at; Start 6; Stop 30
ctattttatcaagaaattagtctgt

SEQ ID NO: 31605 - DNA, 25 bp, Artificial
  probe
  misc_feature (1)..(25): SEQ ID NO: 514; WAN0249RM_at; Start 41; Stop 65
ctaaaacaaatattgtatgggtata

SEQ ID NO: 31606 - DNA, 25 bp, Artificial
  probe
  misc_feature (1)..(25): SEQ ID NO: 514; WAN0249RM_at; Start 7; Stop 31
tattttatcaagaaattagtctgta

SEQ ID NO: 31607 - DNA, 25 bp, Artificial
  probe
  misc_feature (1)..(25): SEQ ID NO: 514; WAN0249RM_at; Start 13; Stop 37
atcaagaaattagtctgtaaacaag

SEQ ID NO: 31608 - DNA, 25 bp, Artificial
  probe
  misc_feature (1)..(25): SEQ ID NO: 514; WAN0249RM_at; Start 4; Stop 28
ctctattttatcaagaaattagtct

SEQ ID NO: 31609 - DNA, 25 bp, Artificial
  probe
  misc_feature (1)..(25): SEQ ID NO: 514; WAN0249RM_at; Start 3; Stop 27
cctctattttatcaagaaattagtc

SEQ ID NO: 31610 - DNA, 25 bp, Artificial
  probe
  misc_feature (1)..(25): SEQ ID NO: 514; WAN0249RM_at; Start 36; Stop 60
aggacctaaaacaaatattgtatgg

SEQ ID NO: 31611 - DNA, 25 bp, Artificial
  probe
  misc_feature (1)..(25): SEQ ID NO: 514; WAN0249RM_at; Start 12; Stop 36
tatcaagaaattagtctgtaaacaa

SEQ ID NO: 31612 - DNA, 25 bp, Artificial
  probe
  misc_feature (1)..(25): SEQ ID NO: 514; WAN0249RM_at; Start 42; Stop 66
taaaacaaatattgtatgggtataa

SEQ ID NO: 31613 - DNA, 25 bp, Artificial
  probe
  misc_feature (1)..(25): SEQ ID NO: 514; WAN0249RM_at; Start 14; Stop 38
tcaagaaattagtctgtaaacaagg

SEQ ID NO: 31614 - DNA, 25 bp, Artificial
  probe
  misc_feature (1)..(25): SEQ ID NO: 4766; WAN0249RN_at; Start 178; Stop 202
aattctcaactaaagataaatcgaa

SEQ ID NO: 31615 - DNA, 25 bp, Artificial
  probe
  misc_feature (1)..(25): SEQ ID NO: 4766; WAN0249RN_at; Start 181; Stop 205
tctcaactaaagataaatcgaaatt

SEQ ID NO: 31616 - DNA, 25 bp, Artificial
  probe
  misc_feature (1)..(25): SEQ ID NO: 4766; WAN0249RN_at; Start 209; Stop 233
agatcgtataaagtgaaaaggaagg

SEQ ID NO: 31617 - DNA, 25 bp, Artificial
  probe
  misc_feature (1)..(25): SEQ ID NO: 4766; WAN0249RN_at; Start 207; Stop 231
gtagatcgtataaagtgaaaaggaa

SEQ ID NO: 31618 - DNA, 25 bp, Artificial
  probe
  misc_feature (1)..(25): SEQ ID NO: 4766; WAN0249RN_at; Start 187; Stop 211
ctaaagataaatcgaaattagtaga

SEQ ID NO: 31619 - DNA, 25 bp, Artificial
  probe
  misc_feature (1)..(25): SEQ ID NO: 4766; WAN0249RN_at; Start 183; Stop 207
tcaactaaagataaatcgaaattag

SEQ ID NO: 31620 - DNA, 25 bp, Artificial
  probe
  misc_feature (1)..(25): SEQ ID NO: 4766; WAN0249RN_at; Start 208; Stop 232
tagatcgtataaagtgaaaaggaag

SEQ ID NO: 31621 - DNA, 25 bp, Artificial
  probe
  misc_feature (1)..(25): SEQ ID NO: 4766; WAN0249RN_at; Start 182; Stop 206
ctcaactaaagataaatcgaaatta

SEQ ID NO: 31622 - DNA, 25 bp, Artificial
  probe
  misc_feature (1)..(25): SEQ ID NO: 4766; WAN0249RN_at; Start 184; Stop 208
caactaaagataaatcgaaattagt

SEQ ID NO: 31623 - DNA, 25 bp, Artificial
  probe
  misc_feature (1)..(25): SEQ ID NO: 4766; WAN0249RN_at; Start 179; Stop 203
attctcaactaaagataaatcgaaa

SEQ ID NO: 31624 - DNA, 25 bp, Artificial
  probe
  misc_feature (1)..(25): SEQ ID NO: 4766; WAN0249RN_at; Start 186; Stop 210
actaaagataaatcgaaattagtag

SEQ ID NO: 31625 - DNA, 25 bp, Artificial
  probe
  misc_feature (1)..(25): SEQ ID NO: 4766; WAN0249RN_at; Start 171; Stop 195
tgaaaaaaattctcaactaaagata

SEQ ID NO: 31626 - DNA, 25 bp, Artificial
  probe
  misc_feature (1)..(25): SEQ ID NO: 4766; WAN0249RN_at; Start 180; Stop 204
ttctcaactaaagataaatcgaaat

SEQ ID NO: 31627 - DNA, 25 bp, Artificial
  probe
  misc_feature (1)..(25): SEQ ID NO: 4766; WAN0249RN_at; Start 177; Stop 201
aaattctcaactaaagataaatcga

SEQ ID NO: 31628 - DNA, 25 bp, Artificial
  probe
  misc_feature (1)..(25): SEQ ID NO: 4766; WAN0249RN_at; Start 176; Stop 200
aaaattctcaactaaagataaatcg

SEQ ID NO: 31629 - DNA, 25 bp, Artificial
  probe
  misc_feature (1)..(25): SEQ ID NO: 4766; WAN0249RN_at; Start 211; Stop 235
atcgtataaagtgaaaaggaaggat

SEQ ID NO: 31630 - DNA, 25 bp, Artificial
  probe
  misc_feature (1)..(25): SEQ ID NO: 4766; WAN0249RN_at; Start 210; Stop 234
gatcgtataaagtgaaaaggaagga

SEQ ID NO: 31631 - DNA, 25 bp, Artificial
  probe
  misc_feature (1)..(25): SEQ ID NO: 4766; WAN0249RN_at; Start 170; Stop 194
atgaaaaaaattctcaactaaagat

SEQ ID NO: 31632 - DNA, 25 bp, Artificial
  probe
  misc_feature (1)..(25): SEQ ID NO: 529; WAN0249RO_at; Start 75; Stop 99
ttcctcattttctagtgaaattgaa

SEQ ID NO: 31633 - DNA, 25 bp, Artificial
  probe
  misc_feature (1)..(25): SEQ ID NO: 529; WAN0249RO_at; Start 70; Stop 94
agattttcctcattttctagtgaaa

SEQ ID NO: 31634 - DNA, 25 bp, Artificial
  probe
  misc_feature (1)..(25): SEQ ID NO: 529; WAN0249RO_at; Start 84; Stop 108
ttctagtgaaattgaactttttcta

SEQ ID NO: 31635 - DNA, 25 bp, Artificial
  probe
  misc_feature (1)..(25): SEQ ID NO: 529; WAN0249RO_at; Start 76; Stop 100
tcctcattttctagtgaaattgaac

SEQ ID NO: 31636 - DNA, 25 bp, Artificial
  probe
  misc_feature (1)..(25): SEQ ID NO: 529; WAN0249RO_at; Start 104; Stop 128
ttctaacatcttttgatagatgact

SEQ ID NO: 31637 - DNA, 25 bp, Artificial
  probe
  misc_feature (1)..(25): SEQ ID NO: 529; WAN0249RO_at; Start 79; Stop 103
tcattttctagtgaaattgaacttt

SEQ ID NO: 31638 - DNA, 25 bp, Artificial
  probe
  misc_feature (1)..(25): SEQ ID NO: 529; WAN0249RO_at; Start 85; Stop 109
tctagtgaaattgaactttttctaa

SEQ ID NO: 31639 - DNA, 25 bp, Artificial
  probe
  misc_feature (1)..(25): SEQ ID NO: 529; WAN0249RO_at; Start 89; Stop 113
gtgaaattgaactttttctaacatc

SEQ ID NO: 31640 - DNA, 25 bp, Artificial
  probe
  misc_feature (1)..(25): SEQ ID NO: 529; WAN0249RO_at; Start 106; Stop 130
ctaacatcttttgatagatgacttc

SEQ ID NO: 31641 - DNA, 25 bp, Artificial
  probe
  misc_feature (1)..(25): SEQ ID NO: 529; WAN0249RO_at; Start 105; Stop 129
tctaacatcttttgatagatgactt

SEQ ID NO: 31642 - DNA, 25 bp, Artificial
  probe
  misc_feature (1)..(25): SEQ ID NO: 529; WAN0249RO_at; Start 78; Stop 102
ctcattttctagtgaaattgaactt

SEQ ID NO: 31643 - DNA, 25 bp, Artificial
  probe
  misc_feature (1)..(25): SEQ ID NO: 529; WAN0249RO_at; Start 94; Stop 118
attgaactttttctaacatcttttg

SEQ ID NO: 31644 - DNA, 25 bp, Artificial
  probe
  misc_feature (1)..(25): SEQ ID NO: 529; WAN0249RO_at; Start 98; Stop 122
aactttttctaacatcttttgatag

SEQ ID NO: 31645 - DNA, 25 bp, Artificial
  probe
  misc_feature (1)..(25): SEQ ID NO: 529; WAN0249RO_at; Start 77; Stop 101
cctcattttctagtgaaattgaact

SEQ ID NO: 31646 - DNA, 25 bp, Artificial
  probe
  misc_feature (1)..(25): SEQ ID NO: 529; WAN0249RO_at; Start 74; Stop 98
tttcctcattttctagtgaaattga

SEQ ID NO: 31647 - DNA, 25 bp, Artificial
  probe
  misc_feature (1)..(25): SEQ ID NO: 529; WAN0249RO_at; Start 103; Stop 127
tttctaacatcttttgatagatgac

SEQ ID NO: 31648 - DNA, 25 bp, Artificial
  probe
  misc_feature (1)..(25): SEQ ID NO: 529; WAN0249RO_at; Start 87; Stop 111
tagtgaaattgaactttttctaaca

SEQ ID NO: 31649 - DNA, 25 bp, Artificial
  probe
  misc_feature (1)..(25): SEQ ID NO: 529; WAN0249RO_at; Start 71; Stop 95
gattttcctcattttctagtgaaat

SEQ ID NO: 31650 - DNA, 25 bp, Artificial
  probe
  misc_feature (1)..(25): SEQ ID NO: 529; WAN0249RO_at; Start 99; Stop 123
actttttctaacatcttttgataga

SEQ ID NO: 31651 - DNA, 25 bp, Artificial
  probe
  misc_feature (1)..(25): SEQ ID NO: 529; WAN0249RO_at; Start 90; Stop 114
tgaaattgaactttttctaacatct

SEQ ID NO: 31652 - DNA, 25 bp, Artificial
  probe
  misc_feature (1)..(25): SEQ ID NO: 529; WAN0249RO_at; Start 80; Stop 104
cattttctagtgaaattgaactttt

SEQ ID NO: 31653 - DNA, 25 bp, Artificial
  probe
  misc_feature (1)..(25): SEQ ID NO: 529; WAN0249RO_at; Start 95; Stop 119
ttgaactttttctaacatcttttga

SEQ ID NO: 31654 - DNA, 25 bp, Artificial
  probe
  misc_feature (1)..(25): SEQ ID NO: 529; WAN0249RO_at; Start 73; Stop 97
ttttcctcattttctagtgaaattg

SEQ ID NO: 31655 - DNA, 25 bp, Artificial
  probe
  misc_feature (1)..(25): SEQ ID NO: 529; WAN0249RO_at; Start 102; Stop 126
ttttctaacatcttttgatagatga

SEQ ID NO: 31656 - DNA, 25 bp, Artificial
  probe
  misc_feature (1)..(25): SEQ ID NO: 529; WAN0249RO_at; Start 101; Stop 125
tttttctaacatcttttgatagatg

SEQ ID NO: 31657 - DNA, 25 bp, Artificial
  probe
  misc_feature (1)..(25): SEQ ID NO: 529; WAN0249RO_at; Start 96; Stop 120
tgaactttttctaacatcttttgat

SEQ ID NO: 31658 - DNA, 25 bp, Artificial
  probe
  misc_feature (1)..(25): SEQ ID NO: 529; WAN0249RO_at; Start 97; Stop 121
gaactttttctaacatcttttgata

SEQ ID NO: 31659 - DNA, 25 bp, Artificial
  probe
  misc_feature (1)..(25): SEQ ID NO: 529; WAN0249RO_at; Start 72; Stop 96
attttcctcattttctagtgaaatt

SEQ ID NO: 31660 - DNA, 25 bp, Artificial
  probe
  misc_feature (1)..(25): SEQ ID NO: 529; WAN0249RO_at; Start 100; Stop 124
ctttttctaacatcttttgatagat

SEQ ID NO: 31661 - DNA, 25 bp, Artificial
  probe
  misc_feature (1)..(25): SEQ ID NO: 529; WAN0249RO_at; Start 88; Stop 112
agtgaaattgaactttttctaacat

SEQ ID NO: 31662 - DNA, 25 bp, Artificial
  probe
  misc_feature (1)..(25): SEQ ID NO: 408; WAN0249RP_at; Start 6; Stop 30
tattatatcatatcaaaaggaggct

SEQ ID NO: 31663 - DNA, 25 bp, Artificial
  probe
  misc_feature (1)..(25): SEQ ID NO: 408; WAN0249RP_at; Start 5; Stop 29
ctattatatcatatcaaaaggaggc

SEQ ID NO: 31664 - DNA, 25 bp, Artificial
  probe
  misc_feature (1)..(25): SEQ ID NO: 408; WAN0249RP_at; Start 47; Stop 71
tccttttcgtttcatactcttcaaa

SEQ ID NO: 31665 - DNA, 25 bp, Artificial
  probe
  misc_feature (1)..(25): SEQ ID NO: 408; WAN0249RP_at; Start 46; Stop 70
ctccttttcgtttcatactcttcaa

SEQ ID NO: 31666 - DNA, 25 bp, Artificial
  probe
  misc_feature (1)..(25): SEQ ID NO: 408; WAN0249RP_at; Start 38; Stop 62
tgaccaacctccttttcgtttcata

SEQ ID NO: 31667 - DNA, 25 bp, Artificial
  probe
  misc_feature (1)..(25): SEQ ID NO: 408; WAN0249RP_at; Start 45; Stop 69
cctccttttcgtttcatactcttca

SEQ ID NO: 31668 - DNA, 25 bp, Artificial
  probe
  misc_feature (1)..(25): SEQ ID NO: 408; WAN0249RP_at; Start 37; Stop 61
atgaccaacctccttttcgtttcat

SEQ ID NO: 31669 - DNA, 25 bp, Artificial
  probe
  misc_feature (1)..(25): SEQ ID NO: 408; WAN0249RP_at; Start 42; Stop 66
caacctccttttcgtttcatactct

SEQ ID NO: 31670 - DNA, 25 bp, Artificial
  probe
  misc_feature (1)..(25): SEQ ID NO: 3293; WAN0249RQ_at; Start 1; Stop 25
ctattgaatttagtatcgtaaataa

SEQ ID NO: 31671 - DNA, 25 bp, Artificial
  probe
  misc_feature (1)..(25): SEQ ID NO: 3293; WAN0249RQ_at; Start 89; Stop 113
tatattttccgcataaaatgaggga

SEQ ID NO: 31672 - DNA, 25 bp, Artificial
  probe
  misc_feature (1)..(25): SEQ ID NO: 3293; WAN0249RQ_at; Start 76; Stop 100
tctagaaaccaaatatattttccgc

SEQ ID NO: 31673 - DNA, 25 bp, Artificial
  probe
  misc_feature (1)..(25): SEQ ID NO: 3293; WAN0249RQ_at; Start 234; Stop 258
tcattttactataatttagtgtgag

SEQ ID NO: 31674 - DNA, 25 bp, Artificial
  probe
  misc_feature (1)..(25): SEQ ID NO: 3293; WAN0249RQ_at; Start 35; Stop 59
tggtttctagattattgtcattcaa

SEQ ID NO: 31675 - DNA, 25 bp, Artificial
  probe
  misc_feature (1)..(25): SEQ ID NO: 3293; WAN0249RQ_at; Start 44; Stop 68
gattattgtcattcaaattggataa

SEQ ID NO: 31676 - DNA, 25 bp, Artificial
  probe
  misc_feature (1)..(25): SEQ ID NO: 3293; WAN0249RQ_at; Start 255; Stop 279
tgagtaaaatataataataaaggag

SEQ ID NO: 31677 - DNA, 25 bp, Artificial
  probe
  misc_feature (1)..(25): SEQ ID NO: 3293; WAN0249RQ_at; Start 100; Stop 124
cataaaatgagggattatatatctc

SEQ ID NO: 31678 - DNA, 25 bp, Artificial
  probe
  misc_feature (1)..(25): SEQ ID NO: 3293; WAN0249RQ_at; Start 103; Stop 127
aaaatgagggattatatatctcact

SEQ ID NO: 31679 - DNA, 25 bp, Artificial
  probe
  misc_feature (1)..(25): SEQ ID NO: 3293; WAN0249RQ_at; Start 66; Stop 90
taatgataaatctagaaaccaaata

SEQ ID NO: 31680 - DNA, 25 bp, Artificial
  probe
  misc_feature (1)..(25): SEQ ID NO: 3293; WAN0249RQ_at; Start 105; Stop 129
aatgagggattatatatctcacttt

SEQ ID NO: 31681 - DNA, 25 bp, Artificial
  probe
  misc_feature (1)..(25): SEQ ID NO: 3293; WAN0249RQ_at; Start 240; Stop 264
tactataatttagtgtgagtaaaat

SEQ ID NO: 31682 - DNA, 25 bp, Artificial
  probe
  misc_feature (1)..(25): SEQ ID NO: 3293; WAN0249RQ_at; Start 94; Stop 118
tttccgcataaaatgagggattata

SEQ ID NO: 31683 - DNA, 25 bp, Artificial
  probe
  misc_feature (1)..(25): SEQ ID NO: 3293; WAN0249RQ_at; Start 96; Stop 120
tccgcataaaatgagggattatata

SEQ ID NO: 31684 - DNA, 25 bp, Artificial
  probe
  misc_feature (1)..(25): SEQ ID NO: 3293; WAN0249RQ_at; Start 12; Stop 36
agtatcgtaaataataaagcgtttg

SEQ ID NO: 31685 - DNA, 25 bp, Artificial
  probe
  misc_feature (1)..(25): SEQ ID NO: 3293; WAN0249RQ_at; Start 31; Stop 55
cgtttggtttctagattattgtcat

SEQ ID NO: 31686 - DNA, 25 bp, Artificial
  probe
  misc_feature (1)..(25): SEQ ID NO: 3293; WAN0249RQ_at; Start 56; Stop 80
tcaaattggataatgataaatctag

SEQ ID NO: 31687 - DNA, 25 bp, Artificial
  probe
  misc_feature (1)..(25): SEQ ID NO: 3293; WAN0249RQ_at; Start 30; Stop 54
gcgtttggtttctagattattgtca

SEQ ID NO: 31688 - DNA, 25 bp, Artificial
  probe
  misc_feature (1)..(25): SEQ ID NO: 3293; WAN0249RQ_at; Start 95; Stop 119
ttccgcataaaatgagggattatat

SEQ ID NO: 31689 - DNA, 25 bp, Artificial
  probe
  misc_feature (1)..(25): SEQ ID NO: 3293; WAN0249RQ_at; Start 93; Stop 117
ttttccgcataaaatgagggattat

SEQ ID NO: 31690 - DNA, 25 bp, Artificial
  probe
  misc_feature (1)..(25): SEQ ID NO: 3293; WAN0249RQ_at; Start 36; Stop 60
ggtttctagattattgtcattcaaa

SEQ ID NO: 31691 - DNA, 25 bp, Artificial
  probe
  misc_feature (1)..(25): SEQ ID NO: 3293; WAN0249RQ_at; Start 40; Stop 64
tctagattattgtcattcaaattgg

SEQ ID NO: 31692 - DNA, 25 bp, Artificial
  probe
  misc_feature (1)..(25): SEQ ID NO: 3293; WAN0249RQ_at; Start 102; Stop 126
taaaatgagggattatatatctcac

SEQ ID NO: 31693 - DNA, 25 bp, Artificial
  probe
  misc_feature (1)..(25): SEQ ID NO: 3293; WAN0249RQ_at; Start 80; Stop 104
gaaaccaaatatattttccgcataa

SEQ ID NO: 31694 - DNA, 25 bp, Artificial
  probe
  misc_feature (1)..(25): SEQ ID NO: 3293; WAN0249RQ_at; Start 98; Stop 122
cgcataaaatgagggattatatatc

SEQ ID NO: 31695 - DNA, 25 bp, Artificial
  probe
  misc_feature (1)..(25): SEQ ID NO: 3293; WAN0249RQ_at; Start 53; Stop 77
cattcaaattggataatgataaatc

SEQ ID NO: 31696 - DNA, 25 bp, Artificial
  probe
  misc_feature (1)..(25): SEQ ID NO: 3293; WAN0249RQ_at; Start 91; Stop 115
tattttccgcataaaatgagggatt

SEQ ID NO: 31697 - DNA, 25 bp, Artificial
  probe
  misc_feature (1)..(25): SEQ ID NO: 3293; WAN0249RQ_at; Start 63; Stop 87
ggataatgataaatctagaaaccaa

SEQ ID NO: 31698 - DNA, 25 bp, Artificial
  probe
  misc_feature (1)..(25): SEQ ID NO: 3293; WAN0249RQ_at; Start 61; Stop 85
ttggataatgataaatctagaaacc

SEQ ID NO: 31699 - DNA, 25 bp, Artificial
  probe
  misc_feature (1)..(25): SEQ ID NO: 3293; WAN0249RQ_at; Start 78; Stop 102
tagaaaccaaatatattttccgcat

SEQ ID NO: 31700 - DNA, 25 bp, Artificial
  probe
  misc_feature (1)..(25): SEQ ID NO: 3293; WAN0249RQ_at; Start 41; Stop 65
ctagattattgtcattcaaattgga

SEQ ID NO: 31701 - DNA, 25 bp, Artificial
  probe
  misc_feature (1)..(25): SEQ ID NO: 3293; WAN0249RQ_at; Start 64; Stop 88
gataatgataaatctagaaaccaaa

SEQ ID NO: 31702 - DNA, 25 bp, Artificial
  probe
  misc_feature (1)..(25): SEQ ID NO: 3293; WAN0249RQ_at; Start 27; Stop 51
aaagcgtttggtttctagattattg

SEQ ID NO: 31703 - DNA, 25 bp, Artificial
  probe
  misc_feature (1)..(25): SEQ ID NO: 3293; WAN0249RQ_at; Start 69; Stop 93
tgataaatctagaaaccaaatatat

SEQ ID NO: 31704 - DNA, 25 bp, Artificial
  probe
  misc_feature (1)..(25): SEQ ID NO: 5906; WAN0249RR_at; Start 2; Stop 26
ttcctaaatctgatactcaatgaaa

SEQ ID NO: 31705 - DNA, 25 bp, Artificial
  probe
  misc_feature (1)..(25): SEQ ID NO: 5906; WAN0249RR_at; Start 287; Stop 311
tccttttgatatgatataatagttc

SEQ ID NO: 31706 - DNA, 25 bp, Artificial
  probe
  misc_feature (1)..(25): SEQ ID NO: 5906; WAN0249RR_at; Start 288; Stop 312
ccttttgatatgatataatagttct

SEQ ID NO: 31707 - DNA, 25 bp, Artificial
  probe
  misc_feature (1)..(25): SEQ ID NO: 5906; WAN0249RR_at; Start 283; Stop 307
agcctccttttgatatgatataata

SEQ ID NO: 31708 - DNA, 25 bp, Artificial
  probe
  misc_feature (1)..(25): SEQ ID NO: 5906; WAN0249RR_at; Start 1; Stop 25
tttcctaaatctgatactcaatgaa

SEQ ID NO: 31709 - DNA, 25 bp, Artificial
  probe
  misc_feature (1)..(25): SEQ ID NO: 5906; WAN0249RR_at; Start 251; Stop 275
tatgaaacgaaaaggaggttggtca

SEQ ID NO: 31710 - DNA, 25 bp, Artificial
  probe
  misc_feature (1)..(25): SEQ ID NO: 5906; WAN0249RR_at; Start 284; Stop 308
gcctccttttgatatgatataatag

SEQ ID NO: 31711 - DNA, 25 bp, Artificial
  probe
  misc_feature (1)..(25): SEQ ID NO: 5906; WAN0249RR_at; Start 252; Stop 276
atgaaacgaaaaggaggttggtcat

SEQ ID NO: 31712 - DNA, 25 bp, Artificial
  probe
  misc_feature (1)..(25): SEQ ID NO: 4765; WAN0249RS_at; Start 58; Stop 82
gtactgccttgaggttttagataag

SEQ ID NO: 31713 - DNA, 25 bp, Artificial
  probe
  misc_feature (1)..(25): SEQ ID NO: 4765; WAN0249RS_at; Start 154; Stop 178
gaagagtataaaaactctctaattc

SEQ ID NO: 31714 - DNA, 25 bp, Artificial
  probe
  misc_feature (1)..(25): SEQ ID NO: 4765; WAN0249RS_at; Start 59; Stop 83
tactgccttgaggttttagataaga

SEQ ID NO: 31715 - DNA, 25 bp, Artificial
  probe
  misc_feature (1)..(25): SEQ ID NO: 4765; WAN0249RS_at; Start 57; Stop 81
agtactgccttgaggttttagataa

SEQ ID NO: 31716 - DNA, 25 bp, Artificial
  probe
  misc_feature (1)..(25): SEQ ID NO: 212; WAN0249RT_at; Start 144; Stop 168
tcctaaaaaagatatactttgacag

SEQ ID NO: 31717 - DNA, 25 bp, Artificial
  probe
  misc_feature (1)..(25): SEQ ID NO: 212; WAN0249RT_at; Start 26; Stop 50
tacgattatagcagaaagaaaggct

SEQ ID NO: 31718 - DNA, 25 bp, Artificial
  probe
  misc_feature (1)..(25): SEQ ID NO: 212; WAN0249RT_at; Start 55; Stop 79
tcaatgaagaaaataagatgctttc

SEQ ID NO: 31719 - DNA, 25 bp, Artificial
  probe
  misc_feature (1)..(25): SEQ ID NO: 212; WAN0249RT_at; Start 124; Stop 148
gattttttcttgctttctgatccta

SEQ ID NO: 31720 - DNA, 25 bp, Artificial
  probe
  misc_feature (1)..(25): SEQ ID NO: 212; WAN0249RT_at; Start 134; Stop 158
tgctttctgatcctaaaaaagatat

SEQ ID NO: 31721 - DNA, 25 bp, Artificial
  probe
  misc_feature (1)..(25): SEQ ID NO: 212; WAN0249RT_at; Start 75; Stop 99
ctttctagcctaaagcgagcctttc

SEQ ID NO: 31722 - DNA, 25 bp, Artificial
  probe
  misc_feature (1)..(25): SEQ ID NO: 212; WAN0249RT_at; Start 77; Stop 101
ttctagcctaaagcgagcctttctt

SEQ ID NO: 31723 - DNA, 25 bp, Artificial
  probe
  misc_feature (1)..(25): SEQ ID NO: 212; WAN0249RT_at; Start 90; Stop 114
cgagcctttcttatcggctgagaca

SEQ ID NO: 31724 - DNA, 25 bp, Artificial
  probe
  misc_feature (1)..(25): SEQ ID NO: 212; WAN0249RT_at; Start 28; Stop 52
cgattatagcagaaagaaaggcttt

SEQ ID NO: 31725 - DNA, 25 bp, Artificial
  probe
  misc_feature (1)..(25): SEQ ID NO: 212; WAN0249RT_at; Start 101; Stop 125
tatcggctgagacactttcagtcga

SEQ ID NO: 31726 - DNA, 25 bp, Artificial
  probe
  misc_feature (1)..(25): SEQ ID NO: 212; WAN0249RT_at; Start 68; Stop 92
taagatgctttctagcctaaagcga

SEQ ID NO: 31727 - DNA, 25 bp, Artificial
  probe
  misc_feature (1)..(25): SEQ ID NO: 212; WAN0249RT_at; Start 105; Stop 129
ggctgagacactttcagtcgatttt

SEQ ID NO: 31728 - DNA, 25 bp, Artificial
  probe
  misc_feature (1)..(25): SEQ ID NO: 212; WAN0249RT_at; Start 108; Stop 132
tgagacactttcagtcgattttttc

SEQ ID NO: 31729 - DNA, 25 bp, Artificial
  probe
  misc_feature (1)..(25): SEQ ID NO: 212; WAN0249RT_at; Start 73; Stop 97
tgctttctagcctaaagcgagcctt

SEQ ID NO: 31730 - DNA, 25 bp, Artificial
  probe
  misc_feature (1)..(25): SEQ ID NO: 212; WAN0249RT_at; Start 24; Stop 48
tatacgattatagcagaaagaaagg

SEQ ID NO: 31731 - DNA, 25 bp, Artificial
  probe
  misc_feature (1)..(25): SEQ ID NO: 212; WAN0249RT_at; Start 81; Stop 105
agcctaaagcgagcctttcttatcg

SEQ ID NO: 31732 - DNA, 25 bp, Artificial
  probe
  misc_feature (1)..(25): SEQ ID NO: 212; WAN0249RT_at; Start 95; Stop 119
ctttcttatcggctgagacactttc

SEQ ID NO: 31733 - DNA, 25 bp, Artificial
  probe
  misc_feature (1)..(25): SEQ ID NO: 212; WAN0249RT_at; Start 87; Stop 111
aagcgagcctttcttatcggctgag

SEQ ID NO: 31734 - DNA, 25 bp, Artificial
  probe
  misc_feature (1)..(25): SEQ ID NO: 212; WAN0249RT_at; Start 85; Stop 109
taaagcgagcctttcttatcggctg

SEQ ID NO: 31735 - DNA, 25 bp, Artificial
  probe
  misc_feature (1)..(25): SEQ ID NO: 212; WAN0249RT_at; Start 98; Stop 122
tcttatcggctgagacactttcagt

SEQ ID NO: 31736 - DNA, 25 bp, Artificial
  probe
  misc_feature (1)..(25): SEQ ID NO: 212; WAN0249RT_at; Start 284; Stop 308
tcgaagagtataaactgcttataaa

SEQ ID NO: 31737 - DNA, 25 bp, Artificial
  probe
  misc_feature (1)..(25): SEQ ID NO: 212; WAN0249RT_at; Start 158; Stop 182
tactttgacagtgaaataatttaac

SEQ ID NO: 31738 - DNA, 25 bp, Artificial
  probe
  misc_feature (1)..(25): SEQ ID NO: 212; WAN0249RT_at; Start 15; Stop 39
taagtattttatacgattatagcag

SEQ ID NO: 31739 - DNA, 25 bp, Artificial
  probe
  misc_feature (1)..(25): SEQ ID NO: 212; WAN0249RT_at; Start 112; Stop 136
acactttcagtcgattttttcttgc

SEQ ID NO: 31740 - DNA, 25 bp, Artificial
  probe
  misc_feature (1)..(25): SEQ ID NO: 212; WAN0249RT_at; Start 91; Stop 115
gagcctttcttatcggctgagacac

SEQ ID NO: 31741 - DNA, 25 bp, Artificial
  probe
  misc_feature (1)..(25): SEQ ID NO: 212; WAN0249RT_at; Start 32; Stop 56
tatagcagaaagaaaggcttttttc

SEQ ID NO: 31742 - DNA, 25 bp, Artificial
  probe
  misc_feature (1)..(25): SEQ ID NO: 212; WAN0249RT_at; Start 119; Stop 143
cagtcgattttttcttgctttctga

SEQ ID NO: 31743 - DNA, 25 bp, Artificial
  probe
  misc_feature (1)..(25): SEQ ID NO: 212; WAN0249RT_at; Start 164; Stop 188
gacagtgaaataatttaacactcaa

SEQ ID NO: 31744 - DNA, 25 bp, Artificial
  probe
  misc_feature (1)..(25): SEQ ID NO: 212; WAN0249RT_at; Start 208; Stop 232
taagaagctagacgaagtcagctca

SEQ ID NO: 31745 - DNA, 25 bp, Artificial
  probe
  misc_feature (1)..(25): SEQ ID NO: 212; WAN0249RT_at; Start 70; Stop 94
agatgctttctagcctaaagcgagc

SEQ ID NO: 31746 - DNA, 25 bp, Artificial
  probe
  misc_feature (1)..(25): SEQ ID NO: 212; WAN0249RT_at; Start 37; Stop 61
cagaaagaaaggcttttttcaatga

SEQ ID NO: 31747 - DNA, 25 bp, Artificial
  probe
  misc_feature (1)..(25): SEQ ID NO: 212; WAN0249RT_at; Start 205; Stop 229
aactaagaagctagacgaagtcagc

SEQ ID NO: 31748 - DNA, 25 bp, Artificial
  probe
  misc_feature (1)..(25): SEQ ID NO: 212; WAN0249RT_at; Start 131; Stop 155
tcttgctttctgatcctaaaaaaga

SEQ ID NO: 31749 - DNA, 25 bp, Artificial
  probe
  misc_feature (1)..(25): SEQ ID NO: 212; WAN0249RT_at; Start 63; Stop 87
gaaaataagatgctttctagcctaa

SEQ ID NO: 31750 - DNA, 25 bp, Artificial
  probe
  misc_feature (1)..(25): SEQ ID NO: 3773; WAN0249RU_at; Start 27; Stop 51
taaaaacgcatcctatcaggtttga

SEQ ID NO: 31751 - DNA, 25 bp, Artificial
  probe
  misc_feature (1)..(25): SEQ ID NO: 3773; WAN0249RU_at; Start 2; Stop 26
gtggggtaaatagatttcaaaatga

SEQ ID NO: 31752 - DNA, 25 bp, Artificial
  probe
  misc_feature (1)..(25): SEQ ID NO: 3773; WAN0249RU_at; Start 24; Stop 48
tgataaaaacgcatcctatcaggtt

SEQ ID NO: 31753 - DNA, 25 bp, Artificial
  probe
  misc_feature (1)..(25): SEQ ID NO: 3773; WAN0249RU_at; Start 25; Stop 49
gataaaaacgcatcctatcaggttt

SEQ ID NO: 31754 - DNA, 25 bp, Artificial
  probe
  misc_feature (1)..(25): SEQ ID NO: 3773; WAN0249RU_at; Start 26; Stop 50
ataaaaacgcatcctatcaggtttg

SEQ ID NO: 31755 - DNA, 25 bp, Artificial
  probe
  misc_feature (1)..(25): SEQ ID NO: 4347; WAN0249RV_at; Start 106; Stop 130
gtttatctttatttacactatctgt

SEQ ID NO: 31756 - DNA, 25 bp, Artificial
  probe
  misc_feature (1)..(25): SEQ ID NO: 4347; WAN0249RV_at; Start 123; Stop 147
ctatctgttaagatatagtaaaatg

SEQ ID NO: 31757 - DNA, 25 bp, Artificial
  probe
  misc_feature (1)..(25): SEQ ID NO: 4347; WAN0249RV_at; Start 110; Stop 134
atctttatttacactatctgttaag

SEQ ID NO: 31758 - DNA, 25 bp, Artificial
  probe
  misc_feature (1)..(25): SEQ ID NO: 4347; WAN0249RV_at; Start 94; Stop 118
agccagtaaatagtttatctttatt

SEQ ID NO: 31759 - DNA, 25 bp, Artificial
  probe
  misc_feature (1)..(25): SEQ ID NO: 4347; WAN0249RV_at; Start 90; Stop 114
aattagccagtaaatagtttatctt

SEQ ID NO: 31760 - DNA, 25 bp, Artificial
  probe
  misc_feature (1)..(25): SEQ ID NO: 4347; WAN0249RV_at; Start 85; Stop 109
tgattaattagccagtaaatagttt

SEQ ID NO: 31761 - DNA, 25 bp, Artificial
  probe
  misc_feature (1)..(25): SEQ ID NO: 4347; WAN0249RV_at; Start 82; Stop 106
aactgattaattagccagtaaatag

SEQ ID NO: 31762 - DNA, 25 bp, Artificial
  probe
  misc_feature (1)..(25): SEQ ID NO: 4347; WAN0249RV_at; Start 91; Stop 115
attagccagtaaatagtttatcttt

SEQ ID NO: 31763 - DNA, 25 bp, Artificial
  probe
  misc_feature (1)..(25): SEQ ID NO: 4347; WAN0249RV_at; Start 92; Stop 116
ttagccagtaaatagtttatcttta

SEQ ID NO: 31764 - DNA, 25 bp, Artificial
  probe
  misc_feature (1)..(25): SEQ ID NO: 4347; WAN0249RV_at; Start 117; Stop 141
tttacactatctgttaagatatagt

SEQ ID NO: 31765 - DNA, 25 bp, Artificial
  probe
  misc_feature (1)..(25): SEQ ID NO: 4347; WAN0249RV_at; Start 71; Stop 95
aactagtgtttaactgattaattag

SEQ ID NO: 31766 - DNA, 25 bp, Artificial
  probe
  misc_feature (1)..(25): SEQ ID NO: 4347; WAN0249RV_at; Start 83; Stop 107
actgattaattagccagtaaatagt

SEQ ID NO: 31767 - DNA, 25 bp, Artificial
  probe
  misc_feature (1)..(25): SEQ ID NO: 4347; WAN0249RV_at; Start 111; Stop 135
tctttatttacactatctgttaaga

SEQ ID NO: 31768 - DNA, 25 bp, Artificial
  probe
  misc_feature (1)..(25): SEQ ID NO: 4347; WAN0249RV_at; Start 89; Stop 113
taattagccagtaaatagtttatct

SEQ ID NO: 31769 - DNA, 25 bp, Artificial
  probe
  misc_feature (1)..(25): SEQ ID NO: 4347; WAN0249RV_at; Start 79; Stop 103
tttaactgattaattagccagtaaa

SEQ ID NO: 31770 - DNA, 25 bp, Artificial
  probe
  misc_feature (1)..(25): SEQ ID NO: 4347; WAN0249RV_at; Start 109; Stop 133
tatctttatttacactatctgttaa

SEQ ID NO: 31771 - DNA, 25 bp, Artificial
  probe
  misc_feature (1)..(25): SEQ ID NO: 4347; WAN0249RV_at; Start 121; Stop 145
cactatctgttaagatatagtaaaa

SEQ ID NO: 31772 - DNA, 25 bp, Artificial
  probe
  misc_feature (1)..(25): SEQ ID NO: 4347; WAN0249RV_at; Start 116; Stop 140
atttacactatctgttaagatatag

SEQ ID NO: 31773 - DNA, 25 bp, Artificial
  probe
  misc_feature (1)..(25): SEQ ID NO: 4347; WAN0249RV_at; Start 68; Stop 92
cttaactagtgtttaactgattaat

SEQ ID NO: 31774 - DNA, 25 bp, Artificial
  probe
  misc_feature (1)..(25): SEQ ID NO: 4347; WAN0249RV_at; Start 93; Stop 117
tagccagtaaatagtttatctttat

SEQ ID NO: 31775 - DNA, 25 bp, Artificial
  probe
  misc_feature (1)..(25): SEQ ID NO: 4347; WAN0249RV_at; Start 78; Stop 102
gtttaactgattaattagccagtaa

SEQ ID NO: 31776 - DNA, 25 bp, Artificial
  probe
  misc_feature (1)..(25): SEQ ID NO: 4347; WAN0249RV_at; Start 72; Stop 96
actagtgtttaactgattaattagc

SEQ ID NO: 31777 - DNA, 25 bp, Artificial
  probe
  misc_feature (1)..(25): SEQ ID NO: 4347; WAN0249RV_at; Start 86; Stop 110
gattaattagccagtaaatagttta

SEQ ID NO: 31778 - DNA, 25 bp, Artificial
  probe
  misc_feature (1)..(25): SEQ ID NO: 4347; WAN0249RV_at; Start 73; Stop 97
ctagtgtttaactgattaattagcc

SEQ ID NO: 31779 - DNA, 25 bp, Artificial
  probe
  misc_feature (1)..(25): SEQ ID NO: 4347; WAN0249RV_at; Start 119; Stop 143
tacactatctgttaagatatagtaa

SEQ ID NO: 31780 - DNA, 25 bp, Artificial
  probe
  misc_feature (1)..(25): SEQ ID NO: 4347; WAN0249RV_at; Start 66; Stop 90
tccttaactagtgtttaactgatta

SEQ ID NO: 31781 - DNA, 25 bp, Artificial
  probe
  misc_feature (1)..(25): SEQ ID NO: 4347; WAN0249RV_at; Start 80; Stop 104
ttaactgattaattagccagtaaat

SEQ ID NO: 31782 - DNA, 25 bp, Artificial
  probe
  misc_feature (1)..(25): SEQ ID NO: 4347; WAN0249RV_at; Start 81; Stop 105
taactgattaattagccagtaaata

SEQ ID NO: 31783 - DNA, 25 bp, Artificial
  probe
  misc_feature (1)..(25): SEQ ID NO: 4347; WAN0249RV_at; Start 77; Stop 101
tgtttaactgattaattagccagta

SEQ ID NO: 31784 - DNA, 25 bp, Artificial
  probe
  misc_feature (1)..(25): SEQ ID NO: 4347; WAN0249RV_at; Start 112; Stop 136
ctttatttacactatctgttaagat

SEQ ID NO: 31785 - DNA, 25 bp, Artificial
  probe
  misc_feature (1)..(25): SEQ ID NO: 4347; WAN0249RV_at; Start 76; Stop 100
gtgtttaactgattaattagccagt

SEQ ID NO: 31786 - DNA, 25 bp, Artificial
  probe
  misc_feature (1)..(25): SEQ ID NO: 4347; WAN0249RV_at; Start 88; Stop 112
ttaattagccagtaaatagtttatc

SEQ ID NO: 31787 - DNA, 25 bp, Artificial
  probe
  misc_feature (1)..(25): SEQ ID NO: 4347; WAN0249RV_at; Start 75; Stop 99
agtgtttaactgattaattagccag

SEQ ID NO: 31788 - DNA, 25 bp, Artificial
  probe
  misc_feature (1)..(25): SEQ ID NO: 4347; WAN0249RV_at; Start 74; Stop 98
tagtgtttaactgattaattagcca

SEQ ID NO: 31789 - DNA, 25 bp, Artificial
  probe
  misc_feature (1)..(25): SEQ ID NO: 4348; WAN0249RW_at; Start 94; Stop 118
taatgatgaaaaaaagaacaatact

SEQ ID NO: 31790 - DNA, 25 bp, Artificial
  probe
  misc_feature (1)..(25): SEQ ID NO: 4348; WAN0249RW_at; Start 71; Stop 95
tcagttaaacactagttaaggagta

SEQ ID NO: 31791 - DNA, 25 bp, Artificial
  probe
  misc_feature (1)..(25): SEQ ID NO: 4348; WAN0249RW_at; Start 49; Stop 73
aaactatttactggctaattaatca

SEQ ID NO: 31792 - DNA, 25 bp, Artificial
  probe
  misc_feature (1)..(25): SEQ ID NO: 4348; WAN0249RW_at; Start 128; Stop 152
ggccagtctgttagctcttgtctta

SEQ ID NO: 31793 - DNA, 25 bp, Artificial
  probe
  misc_feature (1)..(25): SEQ ID NO: 4348; WAN0249RW_at; Start 124; Stop 148
tgacggccagtctgttagctcttgt

SEQ ID NO: 31794 - DNA, 25 bp, Artificial
  probe
  misc_feature (1)..(25): SEQ ID NO: 4348; WAN0249RW_at; Start 23; Stop 47
tcttaacagatagtgtaaataaaga

SEQ ID NO: 31795 - DNA, 25 bp, Artificial
  probe
  misc_feature (1)..(25): SEQ ID NO: 4348; WAN0249RW_at; Start 76; Stop 100
taaacactagttaaggagtaatgat

SEQ ID NO: 31796 - DNA, 25 bp, Artificial
  probe
  misc_feature (1)..(25): SEQ ID NO: 4348; WAN0249RW_at; Start 109; Stop 133
gaacaatactattattgacggccag

SEQ ID NO: 31797 - DNA, 25 bp, Artificial
  probe
  misc_feature (1)..(25): SEQ ID NO: 4348; WAN0249RW_at; Start 61; Stop 85
ggctaattaatcagttaaacactag

SEQ ID NO: 31798 - DNA, 25 bp, Artificial
  probe
  misc_feature (1)..(25): SEQ ID NO: 4348; WAN0249RW_at; Start 120; Stop 144
ttattgacggccagtctgttagctc

SEQ ID NO: 31799 - DNA, 25 bp, Artificial
  probe
  misc_feature (1)..(25): SEQ ID NO: 4348; WAN0249RW_at; Start 57; Stop 81
tactggctaattaatcagttaaaca

SEQ ID NO: 31800 - DNA, 25 bp, Artificial
  probe
  misc_feature (1)..(25): SEQ ID NO: 4348; WAN0249RW_at; Start 80; Stop 104
cactagttaaggagtaatgatgaaa

SEQ ID NO: 31801 - DNA, 25 bp, Artificial
  probe
  misc_feature (1)..(25): SEQ ID NO: 4348; WAN0249RW_at; Start 112; Stop 136
caatactattattgacggccagtct

SEQ ID NO: 31802 - DNA, 25 bp, Artificial
  probe
  misc_feature (1)..(25): SEQ ID NO: 4348; WAN0249RW_at; Start 119; Stop 143
attattgacggccagtctgttagct

SEQ ID NO: 31803 - DNA, 25 bp, Artificial
  probe
  misc_feature (1)..(25): SEQ ID NO: 4348; WAN0249RW_at; Start 11; Stop 35
cattttactatatcttaacagatag

SEQ ID NO: 31804 - DNA, 25 bp, Artificial
  probe
  misc_feature (1)..(25): SEQ ID NO: 4348; WAN0249RW_at; Start 115; Stop 139
tactattattgacggccagtctgtt

SEQ ID NO: 31805 - DNA, 25 bp, Artificial
  probe
  misc_feature (1)..(25): SEQ ID NO: 4348; WAN0249RW_at; Start 132; Stop 156
agtctgttagctcttgtcttaggaa

SEQ ID NO: 31806 - DNA, 25 bp, Artificial
  probe
  misc_feature (1)..(25): SEQ ID NO: 4348; WAN0249RW_at; Start 78; Stop 102
aacactagttaaggagtaatgatga

SEQ ID NO: 31807 - DNA, 25 bp, Artificial
  probe
  misc_feature (1)..(25): SEQ ID NO: 4348; WAN0249RW_at; Start 68; Stop 92
taatcagttaaacactagttaagga

SEQ ID NO: 31808 - DNA, 25 bp, Artificial
  probe
  misc_feature (1)..(25): SEQ ID NO: 4348; WAN0249RW_at; Start 126; Stop 150
acggccagtctgttagctcttgtct

SEQ ID NO: 31809 - DNA, 25 bp, Artificial
  probe
  misc_feature (1)..(25): SEQ ID NO: 4348; WAN0249RW_at; Start 16; Stop 40
tactatatcttaacagatagtgtaa

SEQ ID NO: 31810 - DNA, 25 bp, Artificial
  probe
  misc_feature (1)..(25): SEQ ID NO: 4348; WAN0249RW_at; Start 46; Stop 70
gataaactatttactggctaattaa

SEQ ID NO: 31811 - DNA, 25 bp, Artificial
  probe
  misc_feature (1)..(25): SEQ ID NO: 4348; WAN0249RW_at; Start 125; Stop 149
gacggccagtctgttagctcttgtc

SEQ ID NO: 31812 - DNA, 25 bp, Artificial
  probe
  misc_feature (1)..(25): SEQ ID NO: 4348; WAN0249RW_at; Start 42; Stop 66
taaagataaactatttactggctaa

SEQ ID NO: 31813 - DNA, 25 bp, Artificial
  probe
  misc_feature (1)..(25): SEQ ID NO: 4348; WAN0249RW_at; Start 121; Stop 145
tattgacggccagtctgttagctct

SEQ ID NO: 31814 - DNA, 25 bp, Artificial
  probe
  misc_feature (1)..(25): SEQ ID NO: 4348; WAN0249RW_at; Start 110; Stop 134
aacaatactattattgacggccagt

SEQ ID NO: 31815 - DNA, 25 bp, Artificial
  probe
  misc_feature (1)..(25): SEQ ID NO: 4348; WAN0249RW_at; Start 113; Stop 137
aatactattattgacggccagtctg

SEQ ID NO: 31816 - DNA, 25 bp, Artificial
  probe
  misc_feature (1)..(25): SEQ ID NO: 4348; WAN0249RW_at; Start 129; Stop 153
gccagtctgttagctcttgtcttag

SEQ ID NO: 31817 - DNA, 25 bp, Artificial
  probe
  misc_feature (1)..(25): SEQ ID NO: 4348; WAN0249RW_at; Start 123; Stop 147
ttgacggccagtctgttagctcttg

SEQ ID NO: 31818 - DNA, 25 bp, Artificial
  probe
  misc_feature (1)..(25): SEQ ID NO: 4348; WAN0249RW_at; Start 131; Stop 155
cagtctgttagctcttgtcttagga

SEQ ID NO: 31819 - DNA, 25 bp, Artificial
  probe
  misc_feature (1)..(25): SEQ ID NO: 4348; WAN0249RW_at; Start 127; Stop 151
cggccagtctgttagctcttgtctt

SEQ ID NO: 31820 - DNA, 25 bp, Artificial
  probe
  misc_feature (1)..(25): SEQ ID NO: 4348; WAN0249RW_at; Start 133; Stop 157
gtctgttagctcttgtcttaggaac

SEQ ID NO: 31821 - DNA, 25 bp, Artificial
  probe
  misc_feature (1)..(25): SEQ ID NO: 4348; WAN0249RW_at; Start 82; Stop 106
ctagttaaggagtaatgatgaaaaa

SEQ ID NO: 31822 - DNA, 25 bp, Artificial
  probe
  misc_feature (1)..(25): SEQ ID NO: 4348; WAN0249RW_at; Start 29; Stop 53
cagatagtgtaaataaagataaact

SEQ ID NO: 31823 - DNA, 25 bp, Artificial
  probe
  misc_feature (1)..(25): SEQ ID NO: 3703; WAN0249RX_at; Start 12; Stop 36
taccgcagataactcaaacagtgtt

SEQ ID NO: 31824 - DNA, 25 bp, Artificial
  probe
  misc_feature (1)..(25): SEQ ID NO: 3703; WAN0249RX_at; Start 135; Stop 159
gatgctaacctgatttgaagagatt

SEQ ID NO: 31825 - DNA, 25 bp, Artificial
  probe
  misc_feature (1)..(25): SEQ ID NO: 3703; WAN0249RX_at; Start 133; Stop 157
gcgatgctaacctgatttgaagaga

SEQ ID NO: 31826 - DNA, 25 bp, Artificial
  probe
  misc_feature (1)..(25): SEQ ID NO: 3703; WAN0249RX_at; Start 56; Stop 80
tgacggagtcagctcaaagcactgc

SEQ ID NO: 31827 - DNA, 25 bp, Artificial
  probe
  misc_feature (1)..(25): SEQ ID NO: 3703; WAN0249RX_at; Start 120; Stop 144
tgcctaagacaaagcgatgctaacc

SEQ ID NO: 31828 - DNA, 25 bp, Artificial
  probe
  misc_feature (1)..(25): SEQ ID NO: 3703; WAN0249RX_at; Start 119; Stop 143
atgcctaagacaaagcgatgctaac

SEQ ID NO: 31829 - DNA, 25 bp, Artificial
  probe
  misc_feature (1)..(25): SEQ ID NO: 3703; WAN0249RX_at; Start 111; Stop 135
agtaacatatgcctaagacaaagcg

SEQ ID NO: 31830 - DNA, 25 bp, Artificial
  probe
  misc_feature (1)..(25): SEQ ID NO: 3703; WAN0249RX_at; Start 112; Stop 136
gtaacatatgcctaagacaaagcga

SEQ ID NO: 31831 - DNA, 25 bp, Artificial
  probe
  misc_feature (1)..(25): SEQ ID NO: 3703; WAN0249RX_at; Start 130; Stop 154
aaagcgatgctaacctgatttgaag

SEQ ID NO: 31832 - DNA, 25 bp, Artificial
  probe
  misc_feature (1)..(25): SEQ ID NO: 3703; WAN0249RX_at; Start 11; Stop 35
ttaccgcagataactcaaacagtgt

SEQ ID NO: 31833 - DNA, 25 bp, Artificial
  probe
  misc_feature (1)..(25): SEQ ID NO: 3703; WAN0249RX_at; Start 109; Stop 133
tcagtaacatatgcctaagacaaag

SEQ ID NO: 31834 - DNA, 25 bp, Artificial
  probe
  misc_feature (1)..(25): SEQ ID NO: 3703; WAN0249RX_at; Start 127; Stop 151
gacaaagcgatgctaacctgatttg

SEQ ID NO: 31835 - DNA, 25 bp, Artificial
  probe
  misc_feature (1)..(25): SEQ ID NO: 3703; WAN0249RX_at; Start 118; Stop 142
tatgcctaagacaaagcgatgctaa

SEQ ID NO: 31836 - DNA, 25 bp, Artificial
  probe
  misc_feature (1)..(25): SEQ ID NO: 3703; WAN0249RX_at; Start 113; Stop 137
taacatatgcctaagacaaagcgat

SEQ ID NO: 31837 - DNA, 25 bp, Artificial
  probe
  misc_feature (1)..(25): SEQ ID NO: 3703; WAN0249RX_at; Start 137; Stop 161
tgctaacctgatttgaagagatttt

SEQ ID NO: 31838 - DNA, 25 bp, Artificial
  probe
  misc_feature (1)..(25): SEQ ID NO: 3703; WAN0249RX_at; Start 6; Stop 30
aaagattaccgcagataactcaaac

SEQ ID NO: 31839 - DNA, 25 bp, Artificial
  probe
  misc_feature (1)..(25): SEQ ID NO: 3703; WAN0249RX_at; Start 129; Stop 153
caaagcgatgctaacctgatttgaa

SEQ ID NO: 31840 - DNA, 25 bp, Artificial
  probe
  misc_feature (1)..(25): SEQ ID NO: 3703; WAN0249RX_at; Start 131; Stop 155
aagcgatgctaacctgatttgaaga

SEQ ID NO: 31841 - DNA, 25 bp, Artificial
  probe
  misc_feature (1)..(25): SEQ ID NO: 3703; WAN0249RX_at; Start 124; Stop 148
taagacaaagcgatgctaacctgat

SEQ ID NO: 31842 - DNA, 25 bp, Artificial
  probe
  misc_feature (1)..(25): SEQ ID NO: 3703; WAN0249RX_at; Start 116; Stop 140
catatgcctaagacaaagcgatgct

SEQ ID NO: 31843 - DNA, 25 bp, Artificial
  probe
  misc_feature (1)..(25): SEQ ID NO: 3703; WAN0249RX_at; Start 106; Stop 130
aagtcagtaacatatgcctaagaca

SEQ ID NO: 31844 - DNA, 25 bp, Artificial
  probe
  misc_feature (1)..(25): SEQ ID NO: 3703; WAN0249RX_at; Start 14; Stop 38
ccgcagataactcaaacagtgtttt

SEQ ID NO: 31845 - DNA, 25 bp, Artificial
  probe
  misc_feature (1)..(25): SEQ ID NO: 3703; WAN0249RX_at; Start 114; Stop 138
aacatatgcctaagacaaagcgatg

SEQ ID NO: 31846 - DNA, 25 bp, Artificial
  probe
  misc_feature (1)..(25): SEQ ID NO: 3703; WAN0249RX_at; Start 134; Stop 158
cgatgctaacctgatttgaagagat

SEQ ID NO: 31847 - DNA, 25 bp, Artificial
  probe
  misc_feature (1)..(25): SEQ ID NO: 3703; WAN0249RX_at; Start 9; Stop 33
gattaccgcagataactcaaacagt

SEQ ID NO: 31848 - DNA, 25 bp, Artificial
  probe
  misc_feature (1)..(25): SEQ ID NO: 3703; WAN0249RX_at; Start 125; Stop 149
aagacaaagcgatgctaacctgatt

SEQ ID NO: 31849 - DNA, 25 bp, Artificial
  probe
  misc_feature (1)..(25): SEQ ID NO: 3703; WAN0249RX_at; Start 1; Stop 25
gctagaaagattaccgcagataact

SEQ ID NO: 31850 - DNA, 25 bp, Artificial
  probe
  misc_feature (1)..(25): SEQ ID NO: 3703; WAN0249RX_at; Start 15; Stop 39
cgcagataactcaaacagtgttttg

SEQ ID NO: 31851 - DNA, 25 bp, Artificial
  probe
  misc_feature (1)..(25): SEQ ID NO: 3703; WAN0249RX_at; Start 17; Stop 41
cagataactcaaacagtgttttgag

SEQ ID NO: 31852 - DNA, 25 bp, Artificial
  probe
  misc_feature (1)..(25): SEQ ID NO: 3703; WAN0249RX_at; Start 121; Stop 145
gcctaagacaaagcgatgctaacct

SEQ ID NO: 31853 - DNA, 25 bp, Artificial
  probe
  misc_feature (1)..(25): SEQ ID NO: 3703; WAN0249RX_at; Start 123; Stop 147
ctaagacaaagcgatgctaacctga

SEQ ID NO: 31854 - DNA, 25 bp, Artificial
  probe
  misc_feature (1)..(25): SEQ ID NO: 3703; WAN0249RX_at; Start 5; Stop 29
gaaagattaccgcagataactcaaa

SEQ ID NO: 31855 - DNA, 25 bp, Artificial
  probe
  misc_feature (1)..(25): SEQ ID NO: 3703; WAN0249RX_at; Start 57; Stop 81
gacggagtcagctcaaagcactgct

SEQ ID NO: 31856 - DNA, 25 bp, Artificial
  probe
  misc_feature (1)..(25): SEQ ID NO: 3703; WAN0249RX_at; Start 2; Stop 26
ctagaaagattaccgcagataactc

SEQ ID NO: 31857 - DNA, 25 bp, Artificial
  probe
  misc_feature (1)..(25): SEQ ID NO: 3159; WAN0249RY_at; Start 36; Stop 60
taatttcgatttatctttagttgag

SEQ ID NO: 31858 - DNA, 25 bp, Artificial
  probe
  misc_feature (1)..(25): SEQ ID NO: 3159; WAN0249RY_at; Start 231; Stop 255
atatatatacggtaaggcgacgctg

SEQ ID NO: 31859 - DNA, 25 bp, Artificial
  probe
  misc_feature (1)..(25): SEQ ID NO: 3159; WAN0249RY_at; Start 276; Stop 300
cgaagagtattaagctagtttttag

SEQ ID NO: 31860 - DNA, 25 bp, Artificial
  probe
  misc_feature (1)..(25): SEQ ID NO: 3159; WAN0249RY_at; Start 232; Stop 256
tatatatacggtaaggcgacgctga

SEQ ID NO: 31861 - DNA, 25 bp, Artificial
  probe
  misc_feature (1)..(25): SEQ ID NO: 3159; WAN0249RY_at; Start 38; Stop 62
atttcgatttatctttagttgagaa

SEQ ID NO: 31862 - DNA, 25 bp, Artificial
  probe
  misc_feature (1)..(25): SEQ ID NO: 3159; WAN0249RY_at; Start 37; Stop 61
aatttcgatttatctttagttgaga

SEQ ID NO: 31863 - DNA, 25 bp, Artificial
  probe
  misc_feature (1)..(25): SEQ ID NO: 3159; WAN0249RY_at; Start 275; Stop 299
tcgaagagtattaagctagttttta

SEQ ID NO: 31864 - DNA, 25 bp, Artificial
  probe
  misc_feature (1)..(25): SEQ ID NO: 3159; WAN0249RY_at; Start 32; Stop 56
ctactaatttcgatttatctttagt

SEQ ID NO: 31865 - DNA, 25 bp, Artificial
  probe
  misc_feature (1)..(25): SEQ ID NO: 3159; WAN0249RY_at; Start 229; Stop 253
acatatatatacggtaaggcgacgc

SEQ ID NO: 31866 - DNA, 25 bp, Artificial
  probe
  misc_feature (1)..(25): SEQ ID NO: 3159; WAN0249RY_at; Start 31; Stop 55
tctactaatttcgatttatctttag

SEQ ID NO: 31867 - DNA, 25 bp, Artificial
  probe
  misc_feature (1)..(25): SEQ ID NO: 3159; WAN0249RY_at; Start 230; Stop 254
catatatatacggtaaggcgacgct

SEQ ID NO: 31868 - DNA, 25 bp, Artificial
  probe
  misc_feature (1)..(25): SEQ ID NO: 3159; WAN0249RY_at; Start 35; Stop 59
ctaatttcgatttatctttagttga

SEQ ID NO: 31869 - DNA, 25 bp, Artificial
  probe
  misc_feature (1)..(25): SEQ ID NO: 3159; WAN0249RY_at; Start 34; Stop 58
actaatttcgatttatctttagttg

SEQ ID NO: 31870 - DNA, 25 bp, Artificial
  probe
  misc_feature (1)..(25): SEQ ID NO: 3159; WAN0249RY_at; Start 39; Stop 63
tttcgatttatctttagttgagaat

SEQ ID NO: 31871 - DNA, 25 bp, Artificial
  probe
  misc_feature (1)..(25): SEQ ID NO: 3159; WAN0249RY_at; Start 40; Stop 64
ttcgatttatctttagttgagaatt

SEQ ID NO: 31872 - DNA, 25 bp, Artificial
  probe
  misc_feature (1)..(25): SEQ ID NO: 3616; WAN0249RZ_at; Start 8; Stop 32
tagtggctgaaactgcgttttgatt

SEQ ID NO: 31873 - DNA, 25 bp, Artificial
  probe
  misc_feature (1)..(25): SEQ ID NO: 3616; WAN0249RZ_at; Start 94; Stop 118
tgaatatggaatagcccactgtgat

SEQ ID NO: 31874 - DNA, 25 bp, Artificial
  probe
  misc_feature (1)..(25): SEQ ID NO: 3616; WAN0249RZ_at; Start 174; Stop 198
gaaatactgatgtaactgttttagg

SEQ ID NO: 31875 - DNA, 25 bp, Artificial
  probe
  misc_feature (1)..(25): SEQ ID NO: 3616; WAN0249RZ_at; Start 52; Stop 76
tgtaatctaggaaaacgataatagc

SEQ ID NO: 31876 - DNA, 25 bp, Artificial
  probe
  misc_feature (1)..(25): SEQ ID NO: 3616; WAN0249RZ_at; Start 59; Stop 83
taggaaaacgataatagcgattgaa

SEQ ID NO: 31877 - DNA, 25 bp, Artificial
  probe
  misc_feature (1)..(25): SEQ ID NO: 3616; WAN0249RZ_at; Start 3; Stop 27
taaaatagtggctgaaactgcgttt

SEQ ID NO: 31878 - DNA, 25 bp, Artificial
  probe
  misc_feature (1)..(25): SEQ ID NO: 3616; WAN0249RZ_at; Start 158; Stop 182
taaaatgttctgtaatgaaatactg

SEQ ID NO: 31879 - DNA, 25 bp, Artificial
  probe
  misc_feature (1)..(25): SEQ ID NO: 3616; WAN0249RZ_at; Start 57; Stop 81
tctaggaaaacgataatagcgattg

SEQ ID NO: 31880 - DNA, 25 bp, Artificial
  probe
  misc_feature (1)..(25): SEQ ID NO: 3616; WAN0249RZ_at; Start 54; Stop 78
taatctaggaaaacgataatagcga

SEQ ID NO: 31881 - DNA, 25 bp, Artificial
  probe
  misc_feature (1)..(25): SEQ ID NO: 3616; WAN0249RZ_at; Start 21; Stop 45
tgcgttttgattagcaaaacgtagt

SEQ ID NO: 31882 - DNA, 25 bp, Artificial
  probe
  misc_feature (1)..(25): SEQ ID NO: 3616; WAN0249RZ_at; Start 16; Stop 40
gaaactgcgttttgattagcaaaac

SEQ ID NO: 31883 - DNA, 25 bp, Artificial
  probe
  misc_feature (1)..(25): SEQ ID NO: 3616; WAN0249RZ_at; Start 90; Stop 114
taattgaatatggaatagcccactg

SEQ ID NO: 31884 - DNA, 25 bp, Artificial
  probe
  misc_feature (1)..(25): SEQ ID NO: 3616; WAN0249RZ_at; Start 166; Stop 190
tctgtaatgaaatactgatgtaact

SEQ ID NO: 31885 - DNA, 25 bp, Artificial
  probe
  misc_feature (1)..(25): SEQ ID NO: 3616; WAN0249RZ_at; Start 88; Stop 112
gataattgaatatggaatagcccac

SEQ ID NO: 31886 - DNA, 25 bp, Artificial
  probe
  misc_feature (1)..(25): SEQ ID NO: 3616; WAN0249RZ_at; Start 103; Stop 127
aatagcccactgtgatttctaaaac

SEQ ID NO: 31887 - DNA, 25 bp, Artificial
  probe
  misc_feature (1)..(25): SEQ ID NO: 3616; WAN0249RZ_at; Start 6; Stop 30
aatagtggctgaaactgcgttttga

SEQ ID NO: 31888 - DNA, 25 bp, Artificial
  probe
  misc_feature (1)..(25): SEQ ID NO: 3616; WAN0249RZ_at; Start 107; Stop 131
gcccactgtgatttctaaaacattg

SEQ ID NO: 31889 - DNA, 25 bp, Artificial
  probe
  misc_feature (1)..(25): SEQ ID NO: 3616; WAN0249RZ_at; Start 61; Stop 85
ggaaaacgataatagcgattgaata

SEQ ID NO: 31890 - DNA, 25 bp, Artificial
  probe
  misc_feature (1)..(25): SEQ ID NO: 3616; WAN0249RZ_at; Start 12; Stop 36
ggctgaaactgcgttttgattagca

SEQ ID NO: 31891 - DNA, 25 bp, Artificial
  probe
  misc_feature (1)..(25): SEQ ID NO: 3616; WAN0249RZ_at; Start 168; Stop 192
tgtaatgaaatactgatgtaactgt

SEQ ID NO: 31892 - DNA, 25 bp, Artificial
  probe
  misc_feature (1)..(25): SEQ ID NO: 3616; WAN0249RZ_at; Start 145; Stop 169
tgacttccaaaattaaaatgttctg

SEQ ID NO: 31893 - DNA, 25 bp, Artificial
  probe
  misc_feature (1)..(25): SEQ ID NO: 3616; WAN0249RZ_at; Start 92; Stop 116
attgaatatggaatagcccactgtg

SEQ ID NO: 31894 - DNA, 25 bp, Artificial
  probe
  misc_feature (1)..(25): SEQ ID NO: 3616; WAN0249RZ_at; Start 108; Stop 132
cccactgtgatttctaaaacattgt

SEQ ID NO: 31895 - DNA, 25 bp, Artificial
  probe
  misc_feature (1)..(25): SEQ ID NO: 3616; WAN0249RZ_at; Start 73; Stop 97
tagcgattgaatatggataattgaa

SEQ ID NO: 31896 - DNA, 25 bp, Artificial
  probe
  misc_feature (1)..(25): SEQ ID NO: 3616; WAN0249RZ_at; Start 14; Stop 38
ctgaaactgcgttttgattagcaaa

SEQ ID NO: 31897 - DNA, 25 bp, Artificial
  probe
  misc_feature (1)..(25): SEQ ID NO: 3616; WAN0249RZ_at; Start 130; Stop 154
tgttaaaaattgatttgacttccaa

SEQ ID NO: 31898 - DNA, 25 bp, Artificial
  probe
  misc_feature (1)..(25): SEQ ID NO: 3616; WAN0249RZ_at; Start 163; Stop 187
tgttctgtaatgaaatactgatgta

SEQ ID NO: 31899 - DNA, 25 bp, Artificial
  probe
  misc_feature (1)..(25): SEQ ID NO: 3616; WAN0249RZ_at; Start 2; Stop 26
ataaaatagtggctgaaactgcgtt

SEQ ID NO: 31900 - DNA, 25 bp, Artificial
  probe
  misc_feature (1)..(25): SEQ ID NO: 3616; WAN0249RZ_at; Start 67; Stop 91
cgataatagcgattgaatatggata

SEQ ID NO: 31901 - DNA, 25 bp, Artificial
  probe
  misc_feature (1)..(25): SEQ ID NO: 3616; WAN0249RZ_at; Start 95; Stop 119
gaatatggaatagcccactgtgatt

SEQ ID NO: 31902 - DNA, 25 bp, Artificial
  probe
  misc_feature (1)..(25): SEQ ID NO: 3616; WAN0249RZ_at; Start 101; Stop 125
ggaatagcccactgtgatttctaaa

SEQ ID NO: 31903 - DNA, 25 bp, Artificial
  probe
  misc_feature (1)..(25): SEQ ID NO: 3616; WAN0249RZ_at; Start 5; Stop 29
aaatagtggctgaaactgcgttttg

SEQ ID NO: 31904 - DNA, 25 bp, Artificial
  probe
  misc_feature (1)..(25): SEQ ID NO: 3616; WAN0249RZ_at; Start 65; Stop 89
aacgataatagcgattgaatatgga

SEQ ID NO: 31905 - DNA, 25 bp, Artificial
  probe
  misc_feature (1)..(25): SEQ ID NO: 3616; WAN0249RZ_at; Start 105; Stop 129
tagcccactgtgatttctaaaacat

SEQ ID NO: 31906 - DNA, 25 bp, Artificial
  probe
  misc_feature (1)..(25): SEQ ID NO: 145; WAN0249S2_at; Start 126; Stop 150
ttttaagcacaaagacttcttacac

SEQ ID NO: 31907 - DNA, 25 bp, Artificial
  probe
  misc_feature (1)..(25): SEQ ID NO: 145; WAN0249S2_at; Start 28; Stop 52
taaagtcgggaataactcaatttga

SEQ ID NO: 31908 - DNA, 25 bp, Artificial
  probe
  misc_feature (1)..(25): SEQ ID NO: 145; WAN0249S2_at; Start 146; Stop 170
tacacaaacttatctacaattagat

SEQ ID NO: 31909 - DNA, 25 bp, Artificial
  probe
  misc_feature (1)..(25): SEQ ID NO: 145; WAN0249S2_at; Start 93; Stop 117
catctaggattttatatacctgata

SEQ ID NO: 31910 - DNA, 25 bp, Artificial
  probe
  misc_feature (1)..(25): SEQ ID NO: 145; WAN0249S2_at; Start 90; Stop 114
taacatctaggattttatatacctg

SEQ ID NO: 31911 - DNA, 25 bp, Artificial
  probe
  misc_feature (1)..(25): SEQ ID NO: 145; WAN0249S2_at; Start 79; Stop 103
aacaaaacgcataacatctaggatt

SEQ ID NO: 31912 - DNA, 25 bp, Artificial
  probe
  misc_feature (1)..(25): SEQ ID NO: 145; WAN0249S2_at; Start 116; Stop 140
tattatgcgtttttaagcacaaaga

SEQ ID NO: 31913 - DNA, 25 bp, Artificial
  probe
  misc_feature (1)..(25): SEQ ID NO: 145; WAN0249S2_at; Start 135; Stop 159
caaagacttcttacacaaacttatc

SEQ ID NO: 31914 - DNA, 25 bp, Artificial
  probe
  misc_feature (1)..(25): SEQ ID NO: 145; WAN0249S2_at; Start 117; Stop 141
attatgcgtttttaagcacaaagac

SEQ ID NO: 31915 - DNA, 25 bp, Artificial
  probe
  misc_feature (1)..(25): SEQ ID NO: 145; WAN0249S2_at; Start 132; Stop 156
gcacaaagacttcttacacaaactt

SEQ ID NO: 31916 - DNA, 25 bp, Artificial
  probe
  misc_feature (1)..(25): SEQ ID NO: 145; WAN0249S2_at; Start 12; Stop 36
ataatatttcaacggataaagtcgg

SEQ ID NO: 31917 - DNA, 25 bp, Artificial
  probe
  misc_feature (1)..(25): SEQ ID NO: 145; WAN0249S2_at; Start 30; Stop 54
aagtcgggaataactcaatttgagg

SEQ ID NO: 31918 - DNA, 25 bp, Artificial
  probe
  misc_feature (1)..(25): SEQ ID NO: 145; WAN0249S2_at; Start 84; Stop 108
aacgcataacatctaggattttata

SEQ ID NO: 31919 - DNA, 25 bp, Artificial
  probe
  misc_feature (1)..(25): SEQ ID NO: 145; WAN0249S2_at; Start 81; Stop 105
caaaacgcataacatctaggatttt

SEQ ID NO: 31920 - DNA, 25 bp, Artificial
  probe
  misc_feature (1)..(25): SEQ ID NO: 145; WAN0249S2_at; Start 88; Stop 112
cataacatctaggattttatatacc

SEQ ID NO: 31921 - DNA, 25 bp, Artificial
  probe
  misc_feature (1)..(25): SEQ ID NO: 145; WAN0249S2_at; Start 51; Stop 75
gaggataaaatctaataaatcttcc

SEQ ID NO: 31922 - DNA, 25 bp, Artificial
  probe
  misc_feature (1)..(25): SEQ ID NO: 145; WAN0249S2_at; Start 65; Stop 89
ataaatcttcctataacaaaacgca

SEQ ID NO: 31923 - DNA, 25 bp, Artificial
  probe
  misc_feature (1)..(25): SEQ ID NO: 145; WAN0249S2_at; Start 129; Stop 153
taagcacaaagacttcttacacaaa

SEQ ID NO: 31924 - DNA, 25 bp, Artificial
  probe
  misc_feature (1)..(25): SEQ ID NO: 145; WAN0249S2_at; Start 34; Stop 58
cgggaataactcaatttgaggataa

SEQ ID NO: 31925 - DNA, 25 bp, Artificial
  probe
  misc_feature (1)..(25): SEQ ID NO: 145; WAN0249S2_at; Start 144; Stop 168
cttacacaaacttatctacaattag

SEQ ID NO: 31926 - DNA, 25 bp, Artificial
  probe
  misc_feature (1)..(25): SEQ ID NO: 145; WAN0249S2_at; Start 4; Stop 28
tactccttataatatttcaacggat

SEQ ID NO: 31927 - DNA, 25 bp, Artificial
  probe
  misc_feature (1)..(25): SEQ ID NO: 145; WAN0249S2_at; Start 86; Stop 110
cgcataacatctaggattttatata

SEQ ID NO: 31928 - DNA, 25 bp, Artificial
  probe
  misc_feature (1)..(25): SEQ ID NO: 145; WAN0249S2_at; Start 11; Stop 35
tataatatttcaacggataaagtcg

SEQ ID NO: 31929 - DNA, 25 bp, Artificial
  probe
  misc_feature (1)..(25): SEQ ID NO: 145; WAN0249S2_at; Start 31; Stop 55
agtcgggaataactcaatttgagga

SEQ ID NO: 31930 - DNA, 25 bp, Artificial
  probe
  misc_feature (1)..(25): SEQ ID NO: 145; WAN0249S2_at; Start 53; Stop 77
ggataaaatctaataaatcttccta

SEQ ID NO: 31931 - DNA, 25 bp, Artificial
  probe
  misc_feature (1)..(25): SEQ ID NO: 145; WAN0249S2_at; Start 29; Stop 53
aaagtcgggaataactcaatttgag

SEQ ID NO: 31932 - DNA, 25 bp, Artificial
  probe
  misc_feature (1)..(25): SEQ ID NO: 145; WAN0249S2_at; Start 100; Stop 124
gattttatatacctgatattatgcg

SEQ ID NO: 31933 - DNA, 25 bp, Artificial
  probe
  misc_feature (1)..(25): SEQ ID NO: 145; WAN0249S2_at; Start 2; Stop 26
aatactccttataatatttcaacgg

SEQ ID NO: 31934 - DNA, 25 bp, Artificial
  probe
  misc_feature (1)..(25): SEQ ID NO: 145; WAN0249S2_at; Start 8; Stop 32
ccttataatatttcaacggataaag

SEQ ID NO: 31935 - DNA, 25 bp, Artificial
  probe
  misc_feature (1)..(25): SEQ ID NO: 145; WAN0249S2_at; Start 32; Stop 56
gtcgggaataactcaatttgaggat

SEQ ID NO: 31936 - DNA, 25 bp, Artificial
  probe
  misc_feature (1)..(25): SEQ ID NO: 145; WAN0249S2_at; Start 139; Stop 163
gacttcttacacaaacttatctaca

SEQ ID NO: 31937 - DNA, 25 bp, Artificial
  probe
  misc_feature (1)..(25): SEQ ID NO: 145; WAN0249S2_at; Start 41; Stop 65
aactcaatttgaggataaaatctaa

SEQ ID NO: 31938 - DNA, 25 bp, Artificial
  probe
  misc_feature (1)..(25): SEQ ID NO: 145; WAN0249S2_at; Start 78; Stop 102
taacaaaacgcataacatctaggat

SEQ ID NO: 31939 - DNA, 25 bp, Artificial
  probe
  misc_feature (1)..(25): SEQ ID NO: 145; WAN0249S2_at; Start 118; Stop 142
ttatgcgtttttaagcacaaagact

SEQ ID NO: 31940 - DNA, 25 bp, Artificial
  probe
  misc_feature (1)..(25): SEQ ID NO: 4686; WAN0249S3_at; Start 85; Stop 109
tcacgttgtcacatgaattgaatcg

SEQ ID NO: 31941 - DNA, 25 bp, Artificial
  probe
  misc_feature (1)..(25): SEQ ID NO: 4686; WAN0249S3_at; Start 91; Stop 115
tgtcacatgaattgaatcgagttcc

SEQ ID NO: 31942 - DNA, 25 bp, Artificial
  probe
  misc_feature (1)..(25): SEQ ID NO: 4686; WAN0249S3_at; Start 103; Stop 127
tgaatcgagttccaactaaaatctg

SEQ ID NO: 31943 - DNA, 25 bp, Artificial
  probe
  misc_feature (1)..(25): SEQ ID NO: 4686; WAN0249S3_at; Start 108; Stop 132
cgagttccaactaaaatctgtagga

SEQ ID NO: 31944 - DNA, 25 bp, Artificial
  probe
  misc_feature (1)..(25): SEQ ID NO: 4686; WAN0249S3_at; Start 115; Stop 139
caactaaaatctgtaggaaactagc

SEQ ID NO: 31945 - DNA, 25 bp, Artificial
  probe
  misc_feature (1)..(25): SEQ ID NO: 4686; WAN0249S3_at; Start 107; Stop 131
tcgagttccaactaaaatctgtagg

SEQ ID NO: 31946 - DNA, 25 bp, Artificial
  probe
  misc_feature (1)..(25): SEQ ID NO: 4686; WAN0249S3_at; Start 109; Stop 133
gagttccaactaaaatctgtaggaa

SEQ ID NO: 31947 - DNA, 25 bp, Artificial
  probe
  misc_feature (1)..(25): SEQ ID NO: 4686; WAN0249S3_at; Start 77; Stop 101
aacgattttcacgttgtcacatgaa

SEQ ID NO: 31948 - DNA, 25 bp, Artificial
  probe
  misc_feature (1)..(25): SEQ ID NO: 4686; WAN0249S3_at; Start 104; Stop 128
gaatcgagttccaactaaaatctgt

SEQ ID NO: 31949 - DNA, 25 bp, Artificial
  probe
  misc_feature (1)..(25): SEQ ID NO: 4686; WAN0249S3_at; Start 93; Stop 117
tcacatgaattgaatcgagttccaa

SEQ ID NO: 31950 - DNA, 25 bp, Artificial
  probe
  misc_feature (1)..(25): SEQ ID NO: 4686; WAN0249S3_at; Start 88; Stop 112
cgttgtcacatgaattgaatcgagt

SEQ ID NO: 31951 - DNA, 25 bp, Artificial
  probe
  misc_feature (1)..(25): SEQ ID NO: 4686; WAN0249S3_at; Start 99; Stop 123
gaattgaatcgagttccaactaaaa

SEQ ID NO: 31952 - DNA, 25 bp, Artificial
  probe
  misc_feature (1)..(25): SEQ ID NO: 4686; WAN0249S3_at; Start 80; Stop 104
gattttcacgttgtcacatgaattg

SEQ ID NO: 31953 - DNA, 25 bp, Artificial
  probe
  misc_feature (1)..(25): SEQ ID NO: 4686; WAN0249S3_at; Start 114; Stop 138
ccaactaaaatctgtaggaaactag

SEQ ID NO: 31954 - DNA, 25 bp, Artificial
  probe
  misc_feature (1)..(25): SEQ ID NO: 4686; WAN0249S3_at; Start 161; Stop 185
ctttgaggttgccggataagactga

SEQ ID NO: 31955 - DNA, 25 bp, Artificial
  probe
  misc_feature (1)..(25): SEQ ID NO: 4686; WAN0249S3_at; Start 66; Stop 90
taaaatgctctaacgattttcacgt

SEQ ID NO: 31956 - DNA, 25 bp, Artificial
  probe
  misc_feature (1)..(25): SEQ ID NO: 4686; WAN0249S3_at; Start 87; Stop 111
acgttgtcacatgaattgaatcgag

SEQ ID NO: 31957 - DNA, 25 bp, Artificial
  probe
  misc_feature (1)..(25): SEQ ID NO: 4686; WAN0249S3_at; Start 57; Stop 81
tattctatataaaatgctctaacga

SEQ ID NO: 31958 - DNA, 25 bp, Artificial
  probe
  misc_feature (1)..(25): SEQ ID NO: 4686; WAN0249S3_at; Start 73; Stop 97
ctctaacgattttcacgttgtcaca

SEQ ID NO: 31959 - DNA, 25 bp, Artificial
  probe
  misc_feature (1)..(25): SEQ ID NO: 4686; WAN0249S3_at; Start 71; Stop 95
tgctctaacgattttcacgttgtca

SEQ ID NO: 31960 - DNA, 25 bp, Artificial
  probe
  misc_feature (1)..(25): SEQ ID NO: 4686; WAN0249S3_at; Start 76; Stop 100
taacgattttcacgttgtcacatga

SEQ ID NO: 31961 - DNA, 25 bp, Artificial
  probe
  misc_feature (1)..(25): SEQ ID NO: 4686; WAN0249S3_at; Start 59; Stop 83
ttctatataaaatgctctaacgatt

SEQ ID NO: 31962 - DNA, 25 bp, Artificial
  probe
  misc_feature (1)..(25): SEQ ID NO: 4686; WAN0249S3_at; Start 45; Stop 69
cattcccatgtatattctatataaa

SEQ ID NO: 31963 - DNA, 25 bp, Artificial
  probe
  misc_feature (1)..(25): SEQ ID NO: 4686; WAN0249S3_at; Start 96; Stop 120
catgaattgaatcgagttccaacta

SEQ ID NO: 31964 - DNA, 25 bp, Artificial
  probe
  misc_feature (1)..(25): SEQ ID NO: 4686; WAN0249S3_at; Start 68; Stop 92
aaatgctctaacgattttcacgttg

SEQ ID NO: 31965 - DNA, 25 bp, Artificial
  probe
  misc_feature (1)..(25): SEQ ID NO: 4686; WAN0249S3_at; Start 86; Stop 110
cacgttgtcacatgaattgaatcga

SEQ ID NO: 31966 - DNA, 25 bp, Artificial
  probe
  misc_feature (1)..(25): SEQ ID NO: 4686; WAN0249S3_at; Start 98; Stop 122
tgaattgaatcgagttccaactaaa

SEQ ID NO: 31967 - DNA, 25 bp, Artificial
  probe
  misc_feature (1)..(25): SEQ ID NO: 4686; WAN0249S3_at; Start 207; Stop 231
ttttgaggttgccggataagactga

SEQ ID NO: 31968 - DNA, 25 bp, Artificial
  probe
  misc_feature (1)..(25): SEQ ID NO: 4686; WAN0249S3_at; Start 117; Stop 141
actaaaatctgtaggaaactagccg

SEQ ID NO: 31969 - DNA, 25 bp, Artificial
  probe
  misc_feature (1)..(25): SEQ ID NO: 4686; WAN0249S3_at; Start 94; Stop 118
cacatgaattgaatcgagttccaac

SEQ ID NO: 31970 - DNA, 25 bp, Artificial
  probe
  misc_feature (1)..(25): SEQ ID NO: 4686; WAN0249S3_at; Start 75; Stop 99
ctaacgattttcacgttgtcacatg

SEQ ID NO: 31971 - DNA, 25 bp, Artificial
  probe
  misc_feature (1)..(25): SEQ ID NO: 4686; WAN0249S3_at; Start 92; Stop 116
gtcacatgaattgaatcgagttcca

SEQ ID NO: 31972 - DNA, 25 bp, Artificial
  probe
  misc_feature (1)..(25): SEQ ID NO: 4686; WAN0249S3_at; Start 1; Stop 25
tgagttcctctttttctattaaata

SEQ ID NO: 31973 - DNA, 25 bp, Artificial
  probe
  misc_feature (1)..(25): SEQ ID NO: 4686; WAN0249S3_at; Start 118; Stop 142
ctaaaatctgtaggaaactagccgc

SEQ ID NO: 31974 - DNA, 25 bp, Artificial
  probe
  misc_feature (1)..(25): SEQ ID NO: 3529; WAN0249S4_at; Start 43; Stop 67
ctatcgtgagaagtgattgtttatt

SEQ ID NO: 31975 - DNA, 25 bp, Artificial
  probe
  misc_feature (1)..(25): SEQ ID NO: 3529; WAN0249S4_at; Start 204; Stop 228
aactctcacctattcatacaaagga

SEQ ID NO: 31976 - DNA, 25 bp, Artificial
  probe
  misc_feature (1)..(25): SEQ ID NO: 3529; WAN0249S4_at; Start 31; Stop 55
cagcctcttcttctatcgtgagaag

SEQ ID NO: 31977 - DNA, 25 bp, Artificial
  probe
  misc_feature (1)..(25): SEQ ID NO: 3529; WAN0249S4_at; Start 36; Stop 60
tcttcttctatcgtgagaagtgatt

SEQ ID NO: 31978 - DNA, 25 bp, Artificial
  probe
  misc_feature (1)..(25): SEQ ID NO: 3529; WAN0249S4_at; Start 30; Stop 54
tcagcctcttcttctatcgtgagaa

SEQ ID NO: 31979 - DNA, 25 bp, Artificial
  probe
  misc_feature (1)..(25): SEQ ID NO: 3529; WAN0249S4_at; Start 29; Stop 53
ctcagcctcttcttctatcgtgaga

SEQ ID NO: 31980 - DNA, 25 bp, Artificial
  probe
  misc_feature (1)..(25): SEQ ID NO: 3529; WAN0249S4_at; Start 193; Stop 217
aaaacaatcccaactctcacctatt

SEQ ID NO: 31981 - DNA, 25 bp, Artificial
  probe
  misc_feature (1)..(25): SEQ ID NO: 3529; WAN0249S4_at; Start 27; Stop 51
atctcagcctcttcttctatcgtga

SEQ ID NO: 31982 - DNA, 25 bp, Artificial
  probe
  misc_feature (1)..(25): SEQ ID NO: 3529; WAN0249S4_at; Start 191; Stop 215
taaaaacaatcccaactctcaccta

SEQ ID NO: 31983 - DNA, 25 bp, Artificial
  probe
  misc_feature (1)..(25): SEQ ID NO: 3529; WAN0249S4_at; Start 35; Stop 59
ctcttcttctatcgtgagaagtgat

SEQ ID NO: 31984 - DNA, 25 bp, Artificial
  probe
  misc_feature (1)..(25): SEQ ID NO: 3529; WAN0249S4_at; Start 17; Stop 41
agaatcaccaatctcagcctcttct

SEQ ID NO: 31985 - DNA, 25 bp, Artificial
  probe
  misc_feature (1)..(25): SEQ ID NO: 3529; WAN0249S4_at; Start 26; Stop 50
aatctcagcctcttcttctatcgtg

SEQ ID NO: 31986 - DNA, 25 bp, Artificial
  probe
  misc_feature (1)..(25): SEQ ID NO: 3529; WAN0249S4_at; Start 209; Stop 233
tcacctattcatacaaaggaatttt

SEQ ID NO: 31987 - DNA, 25 bp, Artificial
  probe
  misc_feature (1)..(25): SEQ ID NO: 3529; WAN0249S4_at; Start 192; Stop 216
aaaaacaatcccaactctcacctat

SEQ ID NO: 31988 - DNA, 25 bp, Artificial
  probe
  misc_feature (1)..(25): SEQ ID NO: 3529; WAN0249S4_at; Start 202; Stop 226
ccaactctcacctattcatacaaag

SEQ ID NO: 31989 - DNA, 25 bp, Artificial
  probe
  misc_feature (1)..(25): SEQ ID NO: 3529; WAN0249S4_at; Start 25; Stop 49
caatctcagcctcttcttctatcgt

SEQ ID NO: 31990 - DNA, 25 bp, Artificial
  probe
  misc_feature (1)..(25): SEQ ID NO: 3529; WAN0249S4_at; Start 207; Stop 231
tctcacctattcatacaaaggaatt

SEQ ID NO: 31991 - DNA, 25 bp, Artificial
  probe
  misc_feature (1)..(25): SEQ ID NO: 3529; WAN0249S4_at; Start 52; Stop 76
gaagtgattgtttattgacaaatac

SEQ ID NO: 31992 - DNA, 25 bp, Artificial
  probe
  misc_feature (1)..(25): SEQ ID NO: 3529; WAN0249S4_at; Start 203; Stop 227
caactctcacctattcatacaaagg

SEQ ID NO: 31993 - DNA, 25 bp, Artificial
  probe
  misc_feature (1)..(25): SEQ ID NO: 3529; WAN0249S4_at; Start 208; Stop 232
ctcacctattcatacaaaggaattt

SEQ ID NO: 31994 - DNA, 25 bp, Artificial
  probe
  misc_feature (1)..(25): SEQ ID NO: 3529; WAN0249S4_at; Start 55; Stop 79
gtgattgtttattgacaaatactca

SEQ ID NO: 31995 - DNA, 25 bp, Artificial
  probe
  misc_feature (1)..(25): SEQ ID NO: 3529; WAN0249S4_at; Start 205; Stop 229
actctcacctattcatacaaaggaa

SEQ ID NO: 31996 - DNA, 25 bp, Artificial
  probe
  misc_feature (1)..(25): SEQ ID NO: 3529; WAN0249S4_at; Start 37; Stop 61
cttcttctatcgtgagaagtgattg

SEQ ID NO: 31997 - DNA, 25 bp, Artificial
  probe
  misc_feature (1)..(25): SEQ ID NO: 3529; WAN0249S4_at; Start 46; Stop 70
tcgtgagaagtgattgtttattgac

SEQ ID NO: 31998 - DNA, 25 bp, Artificial
  probe
  misc_feature (1)..(25): SEQ ID NO: 3529; WAN0249S4_at; Start 49; Stop 73
tgagaagtgattgtttattgacaaa

SEQ ID NO: 31999 - DNA, 25 bp, Artificial
  probe
  misc_feature (1)..(25): SEQ ID NO: 3529; WAN0249S4_at; Start 47; Stop 71
cgtgagaagtgattgtttattgaca

SEQ ID NO: 32000 - DNA, 25 bp, Artificial
  probe
  misc_feature (1)..(25): SEQ ID NO: 3529; WAN0249S4_at; Start 16; Stop 40
gagaatcaccaatctcagcctcttc

SEQ ID NO: 32001 - DNA, 25 bp, Artificial
  probe
  misc_feature (1)..(25): SEQ ID NO: 3529; WAN0249S4_at; Start 28; Stop 52
tctcagcctcttcttctatcgtgag

SEQ ID NO: 32002 - DNA, 25 bp, Artificial
  probe
  misc_feature (1)..(25): SEQ ID NO: 3529; WAN0249S4_at; Start 33; Stop 57
gcctcttcttctatcgtgagaagtg

SEQ ID NO: 32003 - DNA, 25 bp, Artificial
  probe
  misc_feature (1)..(25): SEQ ID NO: 3529; WAN0249S4_at; Start 206; Stop 230
ctctcacctattcatacaaaggaat

SEQ ID NO: 32004 - DNA, 25 bp, Artificial
  probe
  misc_feature (1)..(25): SEQ ID NO: 3529; WAN0249S4_at; Start 32; Stop 56
agcctcttcttctatcgtgagaagt

SEQ ID NO: 32005 - DNA, 25 bp, Artificial
  probe
  misc_feature (1)..(25): SEQ ID NO: 3529; WAN0249S4_at; Start 44; Stop 68
tatcgtgagaagtgattgtttattg

SEQ ID NO: 32006 - DNA, 25 bp, Artificial
  probe
  misc_feature (1)..(25): SEQ ID NO: 3529; WAN0249S4_at; Start 42; Stop 66
tctatcgtgagaagtgattgtttat

SEQ ID NO: 32007 - DNA, 25 bp, Artificial
  probe
  misc_feature (1)..(25): SEQ ID NO: 3529; WAN0249S4_at; Start 34; Stop 58
cctcttcttctatcgtgagaagtga

SEQ ID NO: 32008 - DNA, 25 bp, Artificial
  probe
  misc_feature (1)..(25): SEQ ID NO: 3675; WAN0249S5_at; Start 37; Stop 61
tcattttgaaatctactgctaatca

SEQ ID NO: 32009 - DNA, 25 bp, Artificial
  probe
  misc_feature (1)..(25): SEQ ID NO: 3675; WAN0249S5_at; Start 40; Stop 64
ttttgaaatctactgctaatcaatg

SEQ ID NO: 32010 - DNA, 25 bp, Artificial
  probe
  misc_feature (1)..(25): SEQ ID NO: 3675; WAN0249S5_at; Start 44; Stop 68
gaaatctactgctaatcaatgaaga

SEQ ID NO: 32011 - DNA, 25 bp, Artificial
  probe
  misc_feature (1)..(25): SEQ ID NO: 3675; WAN0249S5_at; Start 54; Stop 78
gctaatcaatgaagaagcaaagatc

SEQ ID NO: 32012 - DNA, 25 bp, Artificial
  probe
  misc_feature (1)..(25): SEQ ID NO: 3675; WAN0249S5_at; Start 39; Stop 63
attttgaaatctactgctaatcaat

SEQ ID NO: 32013 - DNA, 25 bp, Artificial
  probe
  misc_feature (1)..(25): SEQ ID NO: 3675; WAN0249S5_at; Start 60; Stop 84
caatgaagaagcaaagatcaaacta

SEQ ID NO: 32014 - DNA, 25 bp, Artificial
  probe
  misc_feature (1)..(25): SEQ ID NO: 3675; WAN0249S5_at; Start 57; Stop 81
aatcaatgaagaagcaaagatcaaa

SEQ ID NO: 32015 - DNA, 25 bp, Artificial
  probe
  misc_feature (1)..(25): SEQ ID NO: 3675; WAN0249S5_at; Start 47; Stop 71
atctactgctaatcaatgaagaagc

SEQ ID NO: 32016 - DNA, 25 bp, Artificial
  probe
  misc_feature (1)..(25): SEQ ID NO: 3675; WAN0249S5_at; Start 58; Stop 82
atcaatgaagaagcaaagatcaaac

SEQ ID NO: 32017 - DNA, 25 bp, Artificial
  probe
  misc_feature (1)..(25): SEQ ID NO: 3675; WAN0249S5_at; Start 38; Stop 62
cattttgaaatctactgctaatcaa

SEQ ID NO: 32018 - DNA, 25 bp, Artificial
  probe
  misc_feature (1)..(25): SEQ ID NO: 3675; WAN0249S5_at; Start 42; Stop 66
ttgaaatctactgctaatcaatgaa

SEQ ID NO: 32019 - DNA, 25 bp, Artificial
  probe
  misc_feature (1)..(25): SEQ ID NO: 3675; WAN0249S5_at; Start 46; Stop 70
aatctactgctaatcaatgaagaag

SEQ ID NO: 32020 - DNA, 25 bp, Artificial
  probe
  misc_feature (1)..(25): SEQ ID NO: 3675; WAN0249S5_at; Start 45; Stop 69
aaatctactgctaatcaatgaagaa

SEQ ID NO: 32021 - DNA, 25 bp, Artificial
  probe
  misc_feature (1)..(25): SEQ ID NO: 3675; WAN0249S5_at; Start 56; Stop 80
taatcaatgaagaagcaaagatcaa

SEQ ID NO: 32022 - DNA, 25 bp, Artificial
  probe
  misc_feature (1)..(25): SEQ ID NO: 3675; WAN0249S5_at; Start 49; Stop 73
ctactgctaatcaatgaagaagcaa

SEQ ID NO: 32023 - DNA, 25 bp, Artificial
  probe
  misc_feature (1)..(25): SEQ ID NO: 3675; WAN0249S5_at; Start 51; Stop 75
actgctaatcaatgaagaagcaaag

SEQ ID NO: 32024 - DNA, 25 bp, Artificial
  probe
  misc_feature (1)..(25): SEQ ID NO: 3675; WAN0249S5_at; Start 43; Stop 67
tgaaatctactgctaatcaatgaag

SEQ ID NO: 32025 - DNA, 25 bp, Artificial
  probe
  misc_feature (1)..(25): SEQ ID NO: 3675; WAN0249S5_at; Start 55; Stop 79
ctaatcaatgaagaagcaaagatca

SEQ ID NO: 32026 - DNA, 25 bp, Artificial
  probe
  misc_feature (1)..(25): SEQ ID NO: 3675; WAN0249S5_at; Start 80; Stop 104
aactaggcagctagttacaagttac

SEQ ID NO: 32027 - DNA, 25 bp, Artificial
  probe
  misc_feature (1)..(25): SEQ ID NO: 3675; WAN0249S5_at; Start 41; Stop 65
tttgaaatctactgctaatcaatga

SEQ ID NO: 32028 - DNA, 25 bp, Artificial
  probe
  misc_feature (1)..(25): SEQ ID NO: 3675; WAN0249S5_at; Start 79; Stop 103
aaactaggcagctagttacaagtta

SEQ ID NO: 32029 - DNA, 25 bp, Artificial
  probe
  misc_feature (1)..(25): SEQ ID NO: 3675; WAN0249S5_at; Start 53; Stop 77
tgctaatcaatgaagaagcaaagat

SEQ ID NO: 32030 - DNA, 25 bp, Artificial
  probe
  misc_feature (1)..(25): SEQ ID NO: 3675; WAN0249S5_at; Start 50; Stop 74
tactgctaatcaatgaagaagcaaa

SEQ ID NO: 32031 - DNA, 25 bp, Artificial
  probe
  misc_feature (1)..(25): SEQ ID NO: 3675; WAN0249S5_at; Start 59; Stop 83
tcaatgaagaagcaaagatcaaact

SEQ ID NO: 32032 - DNA, 25 bp, Artificial
  probe
  misc_feature (1)..(25): SEQ ID NO: 3675; WAN0249S5_at; Start 61; Stop 85
aatgaagaagcaaagatcaaactag

SEQ ID NO: 32033 - DNA, 25 bp, Artificial
  probe
  misc_feature (1)..(25): SEQ ID NO: 3675; WAN0249S5_at; Start 52; Stop 76
ctgctaatcaatgaagaagcaaaga

SEQ ID NO: 32034 - DNA, 25 bp, Artificial
  probe
  misc_feature (1)..(25): SEQ ID NO: 3675; WAN0249S5_at; Start 48; Stop 72
tctactgctaatcaatgaagaagca

SEQ ID NO: 32035 - DNA, 25 bp, Artificial
  probe
  misc_feature (1)..(25): SEQ ID NO: 4855; WAN0249S6_at; Start 11; Stop 35
gtccaaccattactagtctatattg

SEQ ID NO: 32036 - DNA, 25 bp, Artificial
  probe
  misc_feature (1)..(25): SEQ ID NO: 4855; WAN0249S6_at; Start 153; Stop 177
cctctaacaatcgcaatctcttctt

SEQ ID NO: 32037 - DNA, 25 bp, Artificial
  probe
  misc_feature (1)..(25): SEQ ID NO: 4855; WAN0249S6_at; Start 8; Stop 32
tgagtccaaccattactagtctata

SEQ ID NO: 32038 - DNA, 25 bp, Artificial
  probe
  misc_feature (1)..(25): SEQ ID NO: 4855; WAN0249S6_at; Start 148; Stop 172
tttcacctctaacaatcgcaatctc

SEQ ID NO: 32039 - DNA, 25 bp, Artificial
  probe
  misc_feature (1)..(25): SEQ ID NO: 4855; WAN0249S6_at; Start 14; Stop 38
caaccattactagtctatattgttt

SEQ ID NO: 32040 - DNA, 25 bp, Artificial
  probe
  misc_feature (1)..(25): SEQ ID NO: 4855; WAN0249S6_at; Start 7; Stop 31
ttgagtccaaccattactagtctat

SEQ ID NO: 32041 - DNA, 25 bp, Artificial
  probe
  misc_feature (1)..(25): SEQ ID NO: 4855; WAN0249S6_at; Start 16; Stop 40
accattactagtctatattgtttta

SEQ ID NO: 32042 - DNA, 25 bp, Artificial
  probe
  misc_feature (1)..(25): SEQ ID NO: 4855; WAN0249S6_at; Start 12; Stop 36
tccaaccattactagtctatattgt

SEQ ID NO: 32043 - DNA, 25 bp, Artificial
  probe
  misc_feature (1)..(25): SEQ ID NO: 4855; WAN0249S6_at; Start 150; Stop 174
tcacctctaacaatcgcaatctctt

SEQ ID NO: 32044 - DNA, 25 bp, Artificial
  probe
  misc_feature (1)..(25): SEQ ID NO: 4855; WAN0249S6_at; Start 1; Stop 25
ttcttattgagtccaaccattacta

SEQ ID NO: 32045 - DNA, 25 bp, Artificial
  probe
  misc_feature (1)..(25): SEQ ID NO: 4855; WAN0249S6_at; Start 4; Stop 28
ttattgagtccaaccattactagtc

SEQ ID NO: 32046 - DNA, 25 bp, Artificial
  probe
  misc_feature (1)..(25): SEQ ID NO: 4855; WAN0249S6_at; Start 23; Stop 47
ctagtctatattgttttatagttga

SEQ ID NO: 32047 - DNA, 25 bp, Artificial
  probe
  misc_feature (1)..(25): SEQ ID NO: 4855; WAN0249S6_at; Start 147; Stop 171
ttttcacctctaacaatcgcaatct

SEQ ID NO: 32048 - DNA, 25 bp, Artificial
  probe
  misc_feature (1)..(25): SEQ ID NO: 4855; WAN0249S6_at; Start 28; Stop 52
ctatattgttttatagttgattgag

SEQ ID NO: 32049 - DNA, 25 bp, Artificial
  probe
  misc_feature (1)..(25): SEQ ID NO: 4855; WAN0249S6_at; Start 13; Stop 37
ccaaccattactagtctatattgtt

SEQ ID NO: 32050 - DNA, 25 bp, Artificial
  probe
  misc_feature (1)..(25): SEQ ID NO: 4855; WAN0249S6_at; Start 3; Stop 27
cttattgagtccaaccattactagt

SEQ ID NO: 32051 - DNA, 25 bp, Artificial
  probe
  misc_feature (1)..(25): SEQ ID NO: 4855; WAN0249S6_at; Start 29; Stop 53
tatattgttttatagttgattgagt

SEQ ID NO: 32052 - DNA, 25 bp, Artificial
  probe
  misc_feature (1)..(25): SEQ ID NO: 4855; WAN0249S6_at; Start 18; Stop 42
cattactagtctatattgttttata

SEQ ID NO: 32053 - DNA, 25 bp, Artificial
  probe
  misc_feature (1)..(25): SEQ ID NO: 4855; WAN0249S6_at; Start 2; Stop 26
tcttattgagtccaaccattactag

SEQ ID NO: 32054 - DNA, 25 bp, Artificial
  probe
  misc_feature (1)..(25): SEQ ID NO: 4855; WAN0249S6_at; Start 146; Stop 170
tttttcacctctaacaatcgcaatc

SEQ ID NO: 32055 - DNA, 25 bp, Artificial
  probe
  misc_feature (1)..(25): SEQ ID NO: 4855; WAN0249S6_at; Start 9; Stop 33
gagtccaaccattactagtctatat

SEQ ID NO: 32056 - DNA, 25 bp, Artificial
  probe
  misc_feature (1)..(25): SEQ ID NO: 4855; WAN0249S6_at; Start 15; Stop 39
aaccattactagtctatattgtttt

SEQ ID NO: 32057 - DNA, 25 bp, Artificial
  probe
  misc_feature (1)..(25): SEQ ID NO: 4855; WAN0249S6_at; Start 22; Stop 46
actagtctatattgttttatagttg

SEQ ID NO: 32058 - DNA, 25 bp, Artificial
  probe
  misc_feature (1)..(25): SEQ ID NO: 4855; WAN0249S6_at; Start 151; Stop 175
cacctctaacaatcgcaatctcttc

SEQ ID NO: 32059 - DNA, 25 bp, Artificial
  probe
  misc_feature (1)..(25): SEQ ID NO: 4855; WAN0249S6_at; Start 6; Stop 30
attgagtccaaccattactagtcta

SEQ ID NO: 32060 - DNA, 25 bp, Artificial
  probe
  misc_feature (1)..(25): SEQ ID NO: 4855; WAN0249S6_at; Start 10; Stop 34
agtccaaccattactagtctatatt

SEQ ID NO: 32061 - DNA, 25 bp, Artificial
  probe
  misc_feature (1)..(25): SEQ ID NO: 4855; WAN0249S6_at; Start 17; Stop 41
ccattactagtctatattgttttat

SEQ ID NO: 32062 - DNA, 25 bp, Artificial
  probe
  misc_feature (1)..(25): SEQ ID NO: 4855; WAN0249S6_at; Start 152; Stop 176
acctctaacaatcgcaatctcttct

SEQ ID NO: 32063 - DNA, 25 bp, Artificial
  probe
  misc_feature (1)..(25): SEQ ID NO: 4855; WAN0249S6_at; Start 149; Stop 173
ttcacctctaacaatcgcaatctct

SEQ ID NO: 32064 - DNA, 25 bp, Artificial
  probe
  misc_feature (1)..(25): SEQ ID NO: 4855; WAN0249S6_at; Start 5; Stop 29
tattgagtccaaccattactagtct

SEQ ID NO: 32065 - DNA, 25 bp, Artificial
  probe
  misc_feature (1)..(25): SEQ ID NO: 3522; WAN0249S7_at; Start 28; Stop 52
tacaagtttactaacttttgcaagc

SEQ ID NO: 32066 - DNA, 25 bp, Artificial
  probe
  misc_feature (1)..(25): SEQ ID NO: 3522; WAN0249S7_at; Start 225; Stop 249
gatggcgactgttttgtttgtgctt

SEQ ID NO: 32067 - DNA, 25 bp, Artificial
  probe
  misc_feature (1)..(25): SEQ ID NO: 3522; WAN0249S7_at; Start 209; Stop 233
tatctcaataaatgatgatggcgac

SEQ ID NO: 32068 - DNA, 25 bp, Artificial
  probe
  misc_feature (1)..(25): SEQ ID NO: 3522; WAN0249S7_at; Start 133; Stop 157
catctgctaaaaatttctagaaact

SEQ ID NO: 32069 - DNA, 25 bp, Artificial
  probe
  misc_feature (1)..(25): SEQ ID NO: 3522; WAN0249S7_at; Start 101; Stop 125
ccatagtaaattgagactagaatag

SEQ ID NO: 32070 - DNA, 25 bp, Artificial
  probe
  misc_feature (1)..(25): SEQ ID NO: 3522; WAN0249S7_at; Start 206; Stop 230
tattatctcaataaatgatgatggc

SEQ ID NO: 32071 - DNA, 25 bp, Artificial
  probe
  misc_feature (1)..(25): SEQ ID NO: 3522; WAN0249S7_at; Start 107; Stop 131
taaattgagactagaatagtacact

SEQ ID NO: 32072 - DNA, 25 bp, Artificial
  probe
  misc_feature (1)..(25): SEQ ID NO: 3522; WAN0249S7_at; Start 219; Stop 243
aatgatgatggcgactgttttgttt

SEQ ID NO: 32073 - DNA, 25 bp, Artificial
  probe
  misc_feature (1)..(25): SEQ ID NO: 3522; WAN0249S7_at; Start 4; Stop 28
aacaagttacttcaaatcgaaatct

SEQ ID NO: 32074 - DNA, 25 bp, Artificial
  probe
  misc_feature (1)..(25): SEQ ID NO: 3522; WAN0249S7_at; Start 33; Stop 57
gtttactaacttttgcaagcttcaa

SEQ ID NO: 32075 - DNA, 25 bp, Artificial
  probe
  misc_feature (1)..(25): SEQ ID NO: 3522; WAN0249S7_at; Start 51; Stop 75
gcttcaaaattacacatctgtaaat

SEQ ID NO: 32076 - DNA, 25 bp, Artificial
  probe
  misc_feature (1)..(25): SEQ ID NO: 3522; WAN0249S7_at; Start 75; Stop 99
tattttttcgaaagatatatttgaa

SEQ ID NO: 32077 - DNA, 25 bp, Artificial
  probe
  misc_feature (1)..(25): SEQ ID NO: 3522; WAN0249S7_at; Start 128; Stop 152
cactacatctgctaaaaatttctag

SEQ ID NO: 32078 - DNA, 25 bp, Artificial
  probe
  misc_feature (1)..(25): SEQ ID NO: 3522; WAN0249S7_at; Start 6; Stop 30
caagttacttcaaatcgaaatctac

SEQ ID NO: 32079 - DNA, 25 bp, Artificial
  probe
  misc_feature (1)..(25): SEQ ID NO: 3522; WAN0249S7_at; Start 212; Stop 236
ctcaataaatgatgatggcgactgt

SEQ ID NO: 32080 - DNA, 25 bp, Artificial
  probe
  misc_feature (1)..(25): SEQ ID NO: 3522; WAN0249S7_at; Start 112; Stop 136
tgagactagaatagtacactacatc

SEQ ID NO: 32081 - DNA, 25 bp, Artificial
  probe
  misc_feature (1)..(25): SEQ ID NO: 3522; WAN0249S7_at; Start 211; Stop 235
tctcaataaatgatgatggcgactg

SEQ ID NO: 32082 - DNA, 25 bp, Artificial
  probe
  misc_feature (1)..(25): SEQ ID NO: 3522; WAN0249S7_at; Start 214; Stop 238
caataaatgatgatggcgactgttt

SEQ ID NO: 32083 - DNA, 25 bp, Artificial
  probe
  misc_feature (1)..(25): SEQ ID NO: 3522; WAN0249S7_at; Start 109; Stop 133
aattgagactagaatagtacactac

SEQ ID NO: 32084 - DNA, 25 bp, Artificial
  probe
  misc_feature (1)..(25): SEQ ID NO: 3522; WAN0249S7_at; Start 11; Stop 35
tacttcaaatcgaaatctacaagtt

SEQ ID NO: 32085 - DNA, 25 bp, Artificial
  probe
  misc_feature (1)..(25): SEQ ID NO: 3522; WAN0249S7_at; Start 123; Stop 147
tagtacactacatctgctaaaaatt

SEQ ID NO: 32086 - DNA, 25 bp, Artificial
  probe
  misc_feature (1)..(25): SEQ ID NO: 3522; WAN0249S7_at; Start 125; Stop 149
gtacactacatctgctaaaaatttc

SEQ ID NO: 32087 - DNA, 25 bp, Artificial
  probe
  misc_feature (1)..(25): SEQ ID NO: 3522; WAN0249S7_at; Start 65; Stop 89
catctgtaaatattttttcgaaaga

SEQ ID NO: 32088 - DNA, 25 bp, Artificial
  probe
  misc_feature (1)..(25): SEQ ID NO: 3522; WAN0249S7_at; Start 46; Stop 70
tgcaagcttcaaaattacacatctg

SEQ ID NO: 32089 - DNA, 25 bp, Artificial
  probe
  misc_feature (1)..(25): SEQ ID NO: 3522; WAN0249S7_at; Start 231; Stop 255
gactgttttgtttgtgcttgtcgat

SEQ ID NO: 32090 - DNA, 25 bp, Artificial
  probe
  misc_feature (1)..(25): SEQ ID NO: 3522; WAN0249S7_at; Start 48; Stop 72
caagcttcaaaattacacatctgta

SEQ ID NO: 32091 - DNA, 25 bp, Artificial
  probe
  misc_feature (1)..(25): SEQ ID NO: 3522; WAN0249S7_at; Start 228; Stop 252
ggcgactgttttgtttgtgcttgtc

SEQ ID NO: 32092 - DNA, 25 bp, Artificial
  probe
  misc_feature (1)..(25): SEQ ID NO: 3522; WAN0249S7_at; Start 16; Stop 40
caaatcgaaatctacaagtttacta

SEQ ID NO: 32093 - DNA, 25 bp, Artificial
  probe
  misc_feature (1)..(25): SEQ ID NO: 3522; WAN0249S7_at; Start 120; Stop 144
gaatagtacactacatctgctaaaa

SEQ ID NO: 32094 - DNA, 25 bp, Artificial
  probe
  misc_feature (1)..(25): SEQ ID NO: 3522; WAN0249S7_at; Start 9; Stop 33
gttacttcaaatcgaaatctacaag

SEQ ID NO: 32095 - DNA, 25 bp, Artificial
  probe
  misc_feature (1)..(25): SEQ ID NO: 3522; WAN0249S7_at; Start 222; Stop 246
gatgatggcgactgttttgtttgtg

SEQ ID NO: 32096 - DNA, 25 bp, Artificial
  probe
  misc_feature (1)..(25): SEQ ID NO: 3522; WAN0249S7_at; Start 61; Stop 85
tacacatctgtaaatattttttcga

SEQ ID NO: 32097 - DNA, 25 bp, Artificial
  probe
  misc_feature (1)..(25): SEQ ID NO: 3522; WAN0249S7_at; Start 233; Stop 257
ctgttttgtttgtgcttgtcgattt

SEQ ID NO: 32098 - DNA, 25 bp, Artificial
  probe
  misc_feature (1)..(25): SEQ ID NO: 3522; WAN0249S7_at; Start 115; Stop 139
gactagaatagtacactacatctgc

SEQ ID NO: 32099 - DNA, 25 bp, Artificial
  probe
  misc_feature (1)..(25): SEQ ID NO: 3654; WAN0249S8_at; Start 288; Stop 312
acagactaatttcttgataaaatag

SEQ ID NO: 32100 - DNA, 25 bp, Artificial
  probe
  misc_feature (1)..(25): SEQ ID NO: 3654; WAN0249S8_at; Start 281; Stop 305
cttgtttacagactaatttcttgat

SEQ ID NO: 32101 - DNA, 25 bp, Artificial
  probe
  misc_feature (1)..(25): SEQ ID NO: 3654; WAN0249S8_at; Start 243; Stop 267
atgagatttttatacccatacaata

SEQ ID NO: 32102 - DNA, 25 bp, Artificial
  probe
  misc_feature (1)..(25): SEQ ID NO: 3654; WAN0249S8_at; Start 12; Stop 36
aagtttttcttttgatactcaatga

SEQ ID NO: 32103 - DNA, 25 bp, Artificial
  probe
  misc_feature (1)..(25): SEQ ID NO: 3654; WAN0249S8_at; Start 253; Stop 277
tatacccatacaatatttgttttag

SEQ ID NO: 32104 - DNA, 25 bp, Artificial
  probe
  misc_feature (1)..(25): SEQ ID NO: 3654; WAN0249S8_at; Start 279; Stop 303
tccttgtttacagactaatttcttg

SEQ ID NO: 32105 - DNA, 25 bp, Artificial
  probe
  misc_feature (1)..(25): SEQ ID NO: 3654; WAN0249S8_at; Start 237; Stop 261
aagagtatgagatttttatacccat

SEQ ID NO: 32106 - DNA, 25 bp, Artificial
  probe
  misc_feature (1)..(25): SEQ ID NO: 3654; WAN0249S8_at; Start 244; Stop 268
tgagatttttatacccatacaatat

SEQ ID NO: 32107 - DNA, 25 bp, Artificial
  probe
  misc_feature (1)..(25): SEQ ID NO: 3654; WAN0249S8_at; Start 280; Stop 304
ccttgtttacagactaatttcttga

SEQ ID NO: 32108 - DNA, 25 bp, Artificial
  probe
  misc_feature (1)..(25): SEQ ID NO: 3654; WAN0249S8_at; Start 43; Stop 67
aagagcaaactatagttgattgagt

SEQ ID NO: 32109 - DNA, 25 bp, Artificial
  probe
  misc_feature (1)..(25): SEQ ID NO: 3654; WAN0249S8_at; Start 291; Stop 315
gactaatttcttgataaaatagagg

SEQ ID NO: 32110 - DNA, 25 bp, Artificial
  probe
  misc_feature (1)..(25): SEQ ID NO: 3654; WAN0249S8_at; Start 13; Stop 37
agtttttcttttgatactcaatgaa

SEQ ID NO: 32111 - DNA, 25 bp, Artificial
  probe
  misc_feature (1)..(25): SEQ ID NO: 3654; WAN0249S8_at; Start 287; Stop 311
tacagactaatttcttgataaaata

SEQ ID NO: 32112 - DNA, 25 bp, Artificial
  probe
  misc_feature (1)..(25): SEQ ID NO: 3654; WAN0249S8_at; Start 260; Stop 284
atacaatatttgttttaggtccttg

SEQ ID NO: 32113 - DNA, 25 bp, Artificial
  probe
  misc_feature (1)..(25): SEQ ID NO: 3654; WAN0249S8_at; Start 247; Stop 271
gatttttatacccatacaatatttg

SEQ ID NO: 32114 - DNA, 25 bp, Artificial
  probe
  misc_feature (1)..(25): SEQ ID NO: 3654; WAN0249S8_at; Start 42; Stop 66
aaagagcaaactatagttgattgag

SEQ ID NO: 32115 - DNA, 25 bp, Artificial
  probe
  misc_feature (1)..(25): SEQ ID NO: 3654; WAN0249S8_at; Start 284; Stop 308
gtttacagactaatttcttgataaa

SEQ ID NO: 32116 - DNA, 25 bp, Artificial
  probe
  misc_feature (1)..(25): SEQ ID NO: 3654; WAN0249S8_at; Start 241; Stop 265
gtatgagatttttatacccatacaa

SEQ ID NO: 32117 - DNA, 25 bp, Artificial
  probe
  misc_feature (1)..(25): SEQ ID NO: 3654; WAN0249S8_at; Start 283; Stop 307
tgtttacagactaatttcttgataa

SEQ ID NO: 32118 - DNA, 25 bp, Artificial
  probe
  misc_feature (1)..(25): SEQ ID NO: 3654; WAN0249S8_at; Start 11; Stop 35
taagtttttcttttgatactcaatg

SEQ ID NO: 32119 - DNA, 25 bp, Artificial
  probe
  misc_feature (1)..(25): SEQ ID NO: 3654; WAN0249S8_at; Start 234; Stop 258
tcgaagagtatgagatttttatacc

SEQ ID NO: 32120 - DNA, 25 bp, Artificial
  probe
  misc_feature (1)..(25): SEQ ID NO: 3654; WAN0249S8_at; Start 254; Stop 278
atacccatacaatatttgttttagg

SEQ ID NO: 32121 - DNA, 25 bp, Artificial
  probe
  misc_feature (1)..(25): SEQ ID NO: 3654; WAN0249S8_at; Start 245; Stop 269
gagatttttatacccatacaatatt

SEQ ID NO: 32122 - DNA, 25 bp, Artificial
  probe
  misc_feature (1)..(25): SEQ ID NO: 3654; WAN0249S8_at; Start 282; Stop 306
ttgtttacagactaatttcttgata

SEQ ID NO: 32123 - DNA, 25 bp, Artificial
  probe
  misc_feature (1)..(25): SEQ ID NO: 3654; WAN0249S8_at; Start 248; Stop 272
atttttatacccatacaatatttgt

SEQ ID NO: 32124 - DNA, 25 bp, Artificial
  probe
  misc_feature (1)..(25): SEQ ID NO: 3654; WAN0249S8_at; Start 239; Stop 263
gagtatgagatttttatacccatac

SEQ ID NO: 32125 - DNA, 25 bp, Artificial
  probe
  misc_feature (1)..(25): SEQ ID NO: 3654; WAN0249S8_at; Start 8; Stop 32
tcctaagtttttcttttgatactca

SEQ ID NO: 32126 - DNA, 25 bp, Artificial
  probe
  misc_feature (1)..(25): SEQ ID NO: 3654; WAN0249S8_at; Start 258; Stop 282
ccatacaatatttgttttaggtcct

SEQ ID NO: 32127 - DNA, 25 bp, Artificial
  probe
  misc_feature (1)..(25): SEQ ID NO: 3654; WAN0249S8_at; Start 235; Stop 259
cgaagagtatgagatttttataccc

SEQ ID NO: 32128 - DNA, 25 bp, Artificial
  probe
  misc_feature (1)..(25): SEQ ID NO: 3654; WAN0249S8_at; Start 236; Stop 260
gaagagtatgagatttttataccca

SEQ ID NO: 32129 - DNA, 25 bp, Artificial
  probe
  misc_feature (1)..(25): SEQ ID NO: 3654; WAN0249S8_at; Start 240; Stop 264
agtatgagatttttatacccataca

SEQ ID NO: 32130 - DNA, 25 bp, Artificial
  probe
  misc_feature (1)..(25): SEQ ID NO: 3654; WAN0249S8_at; Start 238; Stop 262
agagtatgagatttttatacccata

SEQ ID NO: 32131 - DNA, 25 bp, Artificial
  probe
  misc_feature (1)..(25): SEQ ID NO: 3654; WAN0249S8_at; Start 289; Stop 313
cagactaatttcttgataaaataga

SEQ ID NO: 32132 - DNA, 25 bp, Artificial
  probe
  misc_feature (1)..(25): SEQ ID NO: 3654; WAN0249S8_at; Start 259; Stop 283
catacaatatttgttttaggtcctt

SEQ ID NO: 32133 - DNA, 25 bp, Artificial
  probe
  misc_feature (1)..(25): SEQ ID NO: 280; WAN0249S9_at; Start 62; Stop 86
tatataaaatcctagatgttatgcg

SEQ ID NO: 32134 - DNA, 25 bp, Artificial
  probe
  misc_feature (1)..(25): SEQ ID NO: 280; WAN0249S9_at; Start 13; Stop 37
gataagtttgtgtaagaagtctttg

SEQ ID NO: 32135 - DNA, 25 bp, Artificial
  probe
  misc_feature (1)..(25): SEQ ID NO: 280; WAN0249S9_at; Start 124; Stop 148
attgagttattcccgactttatccg

SEQ ID NO: 32136 - DNA, 25 bp, Artificial
  probe
  misc_feature (1)..(25): SEQ ID NO: 280; WAN0249S9_at; Start 64; Stop 88
tataaaatcctagatgttatgcgtt

SEQ ID NO: 32137 - DNA, 25 bp, Artificial
  probe
  misc_feature (1)..(25): SEQ ID NO: 280; WAN0249S9_at; Start 97; Stop 121
ggaagatttattagattttatcctc

SEQ ID NO: 32138 - DNA, 25 bp, Artificial
  probe
  misc_feature (1)..(25): SEQ ID NO: 280; WAN0249S9_at; Start 3; Stop 27
tctaattgtagataagtttgtgtaa

SEQ ID NO: 32139 - DNA, 25 bp, Artificial
  probe
  misc_feature (1)..(25): SEQ ID NO: 280; WAN0249S9_at; Start 58; Stop 82
caggtatataaaatcctagatgtta

SEQ ID NO: 32140 - DNA, 25 bp, Artificial
  probe
  misc_feature (1)..(25): SEQ ID NO: 280; WAN0249S9_at; Start 49; Stop 73
gcataatatcaggtatataaaatcc

SEQ ID NO: 32141 - DNA, 25 bp, Artificial
  probe
  misc_feature (1)..(25): SEQ ID NO: 280; WAN0249S9_at; Start 30; Stop 54
agtctttgtgcttaaaaacgcataa

SEQ ID NO: 32142 - DNA, 25 bp, Artificial
  probe
  misc_feature (1)..(25): SEQ ID NO: 280; WAN0249S9_at; Start 118; Stop 142
cctcaaattgagttattcccgactt

SEQ ID NO: 32143 - DNA, 25 bp, Artificial
  probe
  misc_feature (1)..(25): SEQ ID NO: 280; WAN0249S9_at; Start 52; Stop 76
taatatcaggtatataaaatcctag

SEQ ID NO: 32144 - DNA, 25 bp, Artificial
  probe
  misc_feature (1)..(25): SEQ ID NO: 280; WAN0249S9_at; Start 119; Stop 143
ctcaaattgagttattcccgacttt

SEQ ID NO: 32145 - DNA, 25 bp, Artificial
  probe
  misc_feature (1)..(25): SEQ ID NO: 280; WAN0249S9_at; Start 23; Stop 47
tgtaagaagtctttgtgcttaaaaa

SEQ ID NO: 32146 - DNA, 25 bp, Artificial
  probe
  misc_feature (1)..(25): SEQ ID NO: 280; WAN0249S9_at; Start 105; Stop 129
tattagattttatcctcaaattgag

SEQ ID NO: 32147 - DNA, 25 bp, Artificial
  probe
  misc_feature (1)..(25): SEQ ID NO: 280; WAN0249S9_at; Start 121; Stop 145
caaattgagttattcccgactttat

SEQ ID NO: 32148 - DNA, 25 bp, Artificial
  probe
  misc_feature (1)..(25): SEQ ID NO: 280; WAN0249S9_at; Start 21; Stop 45
tgtgtaagaagtctttgtgcttaaa

SEQ ID NO: 32149 - DNA, 25 bp, Artificial
  probe
  misc_feature (1)..(25): SEQ ID NO: 280; WAN0249S9_at; Start 55; Stop 79
tatcaggtatataaaatcctagatg

SEQ ID NO: 32150 - DNA, 25 bp, Artificial
  probe
  misc_feature (1)..(25): SEQ ID NO: 280; WAN0249S9_at; Start 32; Stop 56
tctttgtgcttaaaaacgcataata

SEQ ID NO: 32151 - DNA, 25 bp, Artificial
  probe
  misc_feature (1)..(25): SEQ ID NO: 280; WAN0249S9_at; Start 31; Stop 55
gtctttgtgcttaaaaacgcataat

SEQ ID NO: 32152 - DNA, 25 bp, Artificial
  probe
  misc_feature (1)..(25): SEQ ID NO: 280; WAN0249S9_at; Start 120; Stop 144
tcaaattgagttattcccgacttta

SEQ ID NO: 32153 - DNA, 25 bp, Artificial
  probe
  misc_feature (1)..(25): SEQ ID NO: 280; WAN0249S9_at; Start 143; Stop 167
tatccgttgaaatattataaggagt

SEQ ID NO: 32154 - DNA, 25 bp, Artificial
  probe
  misc_feature (1)..(25): SEQ ID NO: 280; WAN0249S9_at; Start 68; Stop 92
aaatcctagatgttatgcgttttgt

SEQ ID NO: 32155 - DNA, 25 bp, Artificial
  probe
  misc_feature (1)..(25): SEQ ID NO: 280; WAN0249S9_at; Start 146; Stop 170
ccgttgaaatattataaggagtatt

SEQ ID NO: 32156 - DNA, 25 bp, Artificial
  probe
  misc_feature (1)..(25): SEQ ID NO: 280; WAN0249S9_at; Start 117; Stop 141
tcctcaaattgagttattcccgact

SEQ ID NO: 32157 - DNA, 25 bp, Artificial
  probe
  misc_feature (1)..(25): SEQ ID NO: 280; WAN0249S9_at; Start 9; Stop 33
tgtagataagtttgtgtaagaagtc

SEQ ID NO: 32158 - DNA, 25 bp, Artificial
  probe
  misc_feature (1)..(25): SEQ ID NO: 280; WAN0249S9_at; Start 70; Stop 94
atcctagatgttatgcgttttgtta

SEQ ID NO: 32159 - DNA, 25 bp, Artificial
  probe
  misc_feature (1)..(25): SEQ ID NO: 280; WAN0249S9_at; Start 140; Stop 164
ctttatccgttgaaatattataagg

SEQ ID NO: 32160 - DNA, 25 bp, Artificial
  probe
  misc_feature (1)..(25): SEQ ID NO: 280; WAN0249S9_at; Start 16; Stop 40
aagtttgtgtaagaagtctttgtgc

SEQ ID NO: 32161 - DNA, 25 bp, Artificial
  probe
  misc_feature (1)..(25): SEQ ID NO: 280; WAN0249S9_at; Start 83; Stop 107
tgcgttttgttataggaagatttat

SEQ ID NO: 32162 - DNA, 25 bp, Artificial
  probe
  misc_feature (1)..(25): SEQ ID NO: 280; WAN0249S9_at; Start 11; Stop 35
tagataagtttgtgtaagaagtctt

SEQ ID NO: 32163 - DNA, 25 bp, Artificial
  probe
  misc_feature (1)..(25): SEQ ID NO: 280; WAN0249S9_at; Start 33; Stop 57
ctttgtgcttaaaaacgcataatat

SEQ ID NO: 32164 - DNA, 25 bp, Artificial
  probe
  misc_feature (1)..(25): SEQ ID NO: 280; WAN0249S9_at; Start 18; Stop 42
gtttgtgtaagaagtctttgtgctt

SEQ ID NO: 32165 - DNA, 25 bp, Artificial
  probe
  misc_feature (1)..(25): SEQ ID NO: 280; WAN0249S9_at; Start 137; Stop 161
cgactttatccgttgaaatattata

SEQ ID NO: 32166 - DNA, 25 bp, Artificial
  probe
  misc_feature (1)..(25): SEQ ID NO: 280; WAN0249S9_at; Start 136; Stop 160
ccgactttatccgttgaaatattat

SEQ ID NO: 32167 - DNA, 25 bp, Artificial
  probe
  misc_feature (1)..(25): SEQ ID NO: 4668; WAN0249SA_at; Start 28; Stop 52
gttagcatcgctttgtcttaggcat

SEQ ID NO: 32168 - DNA, 25 bp, Artificial
  probe
  misc_feature (1)..(25): SEQ ID NO: 4668; WAN0249SA_at; Start 29; Stop 53
ttagcatcgctttgtcttaggcata

SEQ ID NO: 32169 - DNA, 25 bp, Artificial
  probe
  misc_feature (1)..(25): SEQ ID NO: 4668; WAN0249SA_at; Start 27; Stop 51
ggttagcatcgctttgtcttaggca

SEQ ID NO: 32170 - DNA, 25 bp, Artificial
  probe
  misc_feature (1)..(25): SEQ ID NO: 4668; WAN0249SA_at; Start 26; Stop 50
aggttagcatcgctttgtcttaggc

SEQ ID NO: 32171 - DNA, 25 bp, Artificial
  probe
  misc_feature (1)..(25): SEQ ID NO: 4668; WAN0249SA_at; Start 90; Stop 114
agcagtgctttgagctgactccgtc

SEQ ID NO: 32172 - DNA, 25 bp, Artificial
  probe
  misc_feature (1)..(25): SEQ ID NO: 4668; WAN0249SA_at; Start 38; Stop 62
ctttgtcttaggcatatgttactga

SEQ ID NO: 32173 - DNA, 25 bp, Artificial
  probe
  misc_feature (1)..(25): SEQ ID NO: 4668; WAN0249SA_at; Start 17; Stop 41
cttcaaatcaggttagcatcgcttt

SEQ ID NO: 32174 - DNA, 25 bp, Artificial
  probe
  misc_feature (1)..(25): SEQ ID NO: 4668; WAN0249SA_at; Start 32; Stop 56
gcatcgctttgtcttaggcatatgt

SEQ ID NO: 32175 - DNA, 25 bp, Artificial
  probe
  misc_feature (1)..(25): SEQ ID NO: 4668; WAN0249SA_at; Start 35; Stop 59
tcgctttgtcttaggcatatgttac

SEQ ID NO: 32176 - DNA, 25 bp, Artificial
  probe
  misc_feature (1)..(25): SEQ ID NO: 4668; WAN0249SA_at; Start 146; Stop 170
agttatctgcggtaatctttctagc

SEQ ID NO: 32177 - DNA, 25 bp, Artificial
  probe
  misc_feature (1)..(25): SEQ ID NO: 4668; WAN0249SA_at; Start 145; Stop 169
gagttatctgcggtaatctttctag

SEQ ID NO: 32178 - DNA, 25 bp, Artificial
  probe
  misc_feature (1)..(25): SEQ ID NO: 4668; WAN0249SA_at; Start 91; Stop 115
gcagtgctttgagctgactccgtca

SEQ ID NO: 32179 - DNA, 25 bp, Artificial
  probe
  misc_feature (1)..(25): SEQ ID NO: 4668; WAN0249SA_at; Start 135; Stop 159
aacactgtttgagttatctgcggta

SEQ ID NO: 32180 - DNA, 25 bp, Artificial
  probe
  misc_feature (1)..(25): SEQ ID NO: 4668; WAN0249SA_at; Start 10; Stop 34
aaaatctcttcaaatcaggttagca

SEQ ID NO: 32181 - DNA, 25 bp, Artificial
  probe
  misc_feature (1)..(25): SEQ ID NO: 4668; WAN0249SA_at; Start 30; Stop 54
tagcatcgctttgtcttaggcatat

SEQ ID NO: 32182 - DNA, 25 bp, Artificial
  probe
  misc_feature (1)..(25): SEQ ID NO: 4668; WAN0249SA_at; Start 24; Stop 48
tcaggttagcatcgctttgtcttag

SEQ ID NO: 32183 - DNA, 25 bp, Artificial
  probe
  misc_feature (1)..(25): SEQ ID NO: 4668; WAN0249SA_at; Start 19; Stop 43
tcaaatcaggttagcatcgctttgt

SEQ ID NO: 32184 - DNA, 25 bp, Artificial
  probe
  misc_feature (1)..(25): SEQ ID NO: 4668; WAN0249SA_at; Start 137; Stop 161
cactgtttgagttatctgcggtaat

SEQ ID NO: 32185 - DNA, 25 bp, Artificial
  probe
  misc_feature (1)..(25): SEQ ID NO: 4668; WAN0249SA_at; Start 20; Stop 44
caaatcaggttagcatcgctttgtc

SEQ ID NO: 32186 - DNA, 25 bp, Artificial
  probe
  misc_feature (1)..(25): SEQ ID NO: 4668; WAN0249SA_at; Start 15; Stop 39
ctcttcaaatcaggttagcatcgct

SEQ ID NO: 32187 - DNA, 25 bp, Artificial
  probe
  misc_feature (1)..(25): SEQ ID NO: 4668; WAN0249SA_at; Start 33; Stop 57
catcgctttgtcttaggcatatgtt

SEQ ID NO: 32188 - DNA, 25 bp, Artificial
  probe
  misc_feature (1)..(25): SEQ ID NO: 4668; WAN0249SA_at; Start 138; Stop 162
actgtttgagttatctgcggtaatc

SEQ ID NO: 32189 - DNA, 25 bp, Artificial
  probe
  misc_feature (1)..(25): SEQ ID NO: 4668; WAN0249SA_at; Start 31; Stop 55
agcatcgctttgtcttaggcatatg

SEQ ID NO: 32190 - DNA, 25 bp, Artificial
  probe
  misc_feature (1)..(25): SEQ ID NO: 4668; WAN0249SA_at; Start 16; Stop 40
tcttcaaatcaggttagcatcgctt

SEQ ID NO: 32191 - DNA, 25 bp, Artificial
  probe
  misc_feature (1)..(25): SEQ ID NO: 4668; WAN0249SA_at; Start 14; Stop 38
tctcttcaaatcaggttagcatcgc

SEQ ID NO: 32192 - DNA, 25 bp, Artificial
  probe
  misc_feature (1)..(25): SEQ ID NO: 4668; WAN0249SA_at; Start 133; Stop 157
aaaacactgtttgagttatctgcgg

SEQ ID NO: 32193 - DNA, 25 bp, Artificial
  probe
  misc_feature (1)..(25): SEQ ID NO: 4668; WAN0249SA_at; Start 12; Stop 36
aatctcttcaaatcaggttagcatc

SEQ ID NO: 32194 - DNA, 25 bp, Artificial
  probe
  misc_feature (1)..(25): SEQ ID NO: 4668; WAN0249SA_at; Start 41; Stop 65
tgtcttaggcatatgttactgactt

SEQ ID NO: 32195 - DNA, 25 bp, Artificial
  probe
  misc_feature (1)..(25): SEQ ID NO: 4668; WAN0249SA_at; Start 36; Stop 60
cgctttgtcttaggcatatgttact

SEQ ID NO: 32196 - DNA, 25 bp, Artificial
  probe
  misc_feature (1)..(25): SEQ ID NO: 4668; WAN0249SA_at; Start 142; Stop 166
tttgagttatctgcggtaatctttc

SEQ ID NO: 32197 - DNA, 25 bp, Artificial
  probe
  misc_feature (1)..(25): SEQ ID NO: 4668; WAN0249SA_at; Start 132; Stop 156
caaaacactgtttgagttatctgcg

SEQ ID NO: 32198 - DNA, 25 bp, Artificial
  probe
  misc_feature (1)..(25): SEQ ID NO: 4668; WAN0249SA_at; Start 21; Stop 45
aaatcaggttagcatcgctttgtct

SEQ ID NO: 32199 - DNA, 25 bp, Artificial
  probe
  misc_feature (1)..(25): SEQ ID NO: 4668; WAN0249SA_at; Start 134; Stop 158
aaacactgtttgagttatctgcggt

SEQ ID NO: 32200 - DNA, 25 bp, Artificial
  probe
  misc_feature (1)..(25): SEQ ID NO: 4668; WAN0249SA_at; Start 139; Stop 163
ctgtttgagttatctgcggtaatct

SEQ ID NO: 32201 - DNA, 25 bp, Artificial
  probe
  misc_feature (1)..(25): SEQ ID NO: 151; WAN0249SB_at; Start 79; Stop 103
tcttctgagtgtcagaaaagtagtc

SEQ ID NO: 32202 - DNA, 25 bp, Artificial
  probe
  misc_feature (1)..(25): SEQ ID NO: 151; WAN0249SB_at; Start 26; Stop 50
tatgtatcatcagctattttagttt

SEQ ID NO: 32203 - DNA, 25 bp, Artificial
  probe
  misc_feature (1)..(25): SEQ ID NO: 151; WAN0249SB_at; Start 63; Stop 87
aaagcgaacaagctagtcttctgag

SEQ ID NO: 32204 - DNA, 25 bp, Artificial
  probe
  misc_feature (1)..(25): SEQ ID NO: 151; WAN0249SB_at; Start 69; Stop 93
aacaagctagtcttctgagtgtcag

SEQ ID NO: 32205 - DNA, 25 bp, Artificial
  probe
  misc_feature (1)..(25): SEQ ID NO: 151; WAN0249SB_at; Start 20; Stop 44
tggcaatatgtatcatcagctattt

SEQ ID NO: 32206 - DNA, 25 bp, Artificial
  probe
  misc_feature (1)..(25): SEQ ID NO: 151; WAN0249SB_at; Start 65; Stop 89
agcgaacaagctagtcttctgagtg

SEQ ID NO: 32207 - DNA, 25 bp, Artificial
  probe
  misc_feature (1)..(25): SEQ ID NO: 151; WAN0249SB_at; Start 62; Stop 86
aaaagcgaacaagctagtcttctga

SEQ ID NO: 32208 - DNA, 25 bp, Artificial
  probe
  misc_feature (1)..(25): SEQ ID NO: 151; WAN0249SB_at; Start 1; Stop 25
aaatcagatattttgtatttggcaa

SEQ ID NO: 32209 - DNA, 25 bp, Artificial
  probe
  misc_feature (1)..(25): SEQ ID NO: 151; WAN0249SB_at; Start 74; Stop 98
gctagtcttctgagtgtcagaaaag

SEQ ID NO: 32210 - DNA, 25 bp, Artificial
  probe
  misc_feature (1)..(25): SEQ ID NO: 151; WAN0249SB_at; Start 33; Stop 57
catcagctattttagtttataaatg

SEQ ID NO: 32211 - DNA, 25 bp, Artificial
  probe
  misc_feature (1)..(25): SEQ ID NO: 151; WAN0249SB_at; Start 72; Stop 96
aagctagtcttctgagtgtcagaaa

SEQ ID NO: 32212 - DNA, 25 bp, Artificial
  probe
  misc_feature (1)..(25): SEQ ID NO: 151; WAN0249SB_at; Start 16; Stop 40
tatttggcaatatgtatcatcagct

SEQ ID NO: 32213 - DNA, 25 bp, Artificial
  probe
  misc_feature (1)..(25): SEQ ID NO: 151; WAN0249SB_at; Start 71; Stop 95
caagctagtcttctgagtgtcagaa

SEQ ID NO: 32214 - DNA, 25 bp, Artificial
  probe
  misc_feature (1)..(25): SEQ ID NO: 151; WAN0249SB_at; Start 48; Stop 72
tttataaatgagaaaaaagcgaaca

SEQ ID NO: 32215 - DNA, 25 bp, Artificial
  probe
  misc_feature (1)..(25): SEQ ID NO: 151; WAN0249SB_at; Start 68; Stop 92
gaacaagctagtcttctgagtgtca

SEQ ID NO: 32216 - DNA, 25 bp, Artificial
  probe
  misc_feature (1)..(25): SEQ ID NO: 151; WAN0249SB_at; Start 96; Stop 120
aagtagtcttgttcgcttttattat

SEQ ID NO: 32217 - DNA, 25 bp, Artificial
  probe
  misc_feature (1)..(25): SEQ ID NO: 151; WAN0249SB_at; Start 66; Stop 90
gcgaacaagctagtcttctgagtgt

SEQ ID NO: 32218 - DNA, 25 bp, Artificial
  probe
  misc_feature (1)..(25): SEQ ID NO: 151; WAN0249SB_at; Start 83; Stop 107
ctgagtgtcagaaaagtagtcttgt

SEQ ID NO: 32219 - DNA, 25 bp, Artificial
  probe
  misc_feature (1)..(25): SEQ ID NO: 151; WAN0249SB_at; Start 15; Stop 39
gtatttggcaatatgtatcatcagc

SEQ ID NO: 32220 - DNA, 25 bp, Artificial
  probe
  misc_feature (1)..(25): SEQ ID NO: 151; WAN0249SB_at; Start 64; Stop 88
aagcgaacaagctagtcttctgagt

SEQ ID NO: 32221 - DNA, 25 bp, Artificial
  probe
  misc_feature (1)..(25): SEQ ID NO: 151; WAN0249SB_at; Start 91; Stop 115
cagaaaagtagtcttgttcgctttt

SEQ ID NO: 32222 - DNA, 25 bp, Artificial
  probe
  misc_feature (1)..(25): SEQ ID NO: 151; WAN0249SB_at; Start 85; Stop 109
gagtgtcagaaaagtagtcttgttc

SEQ ID NO: 32223 - DNA, 25 bp, Artificial
  probe
  misc_feature (1)..(25): SEQ ID NO: 151; WAN0249SB_at; Start 23; Stop 47
caatatgtatcatcagctattttag

SEQ ID NO: 32224 - DNA, 25 bp, Artificial
  probe
  misc_feature (1)..(25): SEQ ID NO: 151; WAN0249SB_at; Start 56; Stop 80
tgagaaaaaagcgaacaagctagtc

SEQ ID NO: 32225 - DNA, 25 bp, Artificial
  probe
  misc_feature (1)..(25): SEQ ID NO: 151; WAN0249SB_at; Start 52; Stop 76
taaatgagaaaaaagcgaacaagct

SEQ ID NO: 32226 - DNA, 25 bp, Artificial
  probe
  misc_feature (1)..(25): SEQ ID NO: 151; WAN0249SB_at; Start 59; Stop 83
gaaaaaagcgaacaagctagtcttc

SEQ ID NO: 32227 - DNA, 25 bp, Artificial
  probe
  misc_feature (1)..(25): SEQ ID NO: 151; WAN0249SB_at; Start 67; Stop 91
cgaacaagctagtcttctgagtgtc

SEQ ID NO: 32228 - DNA, 25 bp, Artificial
  probe
  misc_feature (1)..(25): SEQ ID NO: 151; WAN0249SB_at; Start 57; Stop 81
gagaaaaaagcgaacaagctagtct

SEQ ID NO: 32229 - DNA, 25 bp, Artificial
  probe
  misc_feature (1)..(25): SEQ ID NO: 151; WAN0249SB_at; Start 90; Stop 114
tcagaaaagtagtcttgttcgcttt

SEQ ID NO: 32230 - DNA, 25 bp, Artificial
  probe
  misc_feature (1)..(25): SEQ ID NO: 151; WAN0249SB_at; Start 88; Stop 112
tgtcagaaaagtagtcttgttcgct

SEQ ID NO: 32231 - DNA, 25 bp, Artificial
  probe
  misc_feature (1)..(25): SEQ ID NO: 151; WAN0249SB_at; Start 82; Stop 106
tctgagtgtcagaaaagtagtcttg

SEQ ID NO: 32232 - DNA, 25 bp, Artificial
  probe
  misc_feature (1)..(25): SEQ ID NO: 151; WAN0249SB_at; Start 70; Stop 94
acaagctagtcttctgagtgtcaga

SEQ ID NO: 32233 - DNA, 25 bp, Artificial
  probe
  misc_feature (1)..(25): SEQ ID NO: 151; WAN0249SB_at; Start 18; Stop 42
tttggcaatatgtatcatcagctat

SEQ ID NO: 32234 - DNA, 25 bp, Artificial
  probe
  misc_feature (1)..(25): SEQ ID NO: 151; WAN0249SB_at; Start 61; Stop 85
aaaaagcgaacaagctagtcttctg

SEQ ID NO: 32235 - DNA, 25 bp, Artificial
  probe
  misc_feature (1)..(25): SEQ ID NO: 424; WAN0249SC_at; Start 444; Stop 468
tgtggtgaaagcacacgtcatcttg

SEQ ID NO: 32236 - DNA, 25 bp, Artificial
  probe
  misc_feature (1)..(25): SEQ ID NO: 424; WAN0249SC_at; Start 267; Stop 291
taaagcttagaaaatgagatgatgt

SEQ ID NO: 32237 - DNA, 25 bp, Artificial
  probe
  misc_feature (1)..(25): SEQ ID NO: 424; WAN0249SC_at; Start 552; Stop 576
taaacacgtcagaagattgcagagc

SEQ ID NO: 32238 - DNA, 25 bp, Artificial
  probe
  misc_feature (1)..(25): SEQ ID NO: 424; WAN0249SC_at; Start 254; Stop 278
catgatatagtaataaagcttagaa

SEQ ID NO: 32239 - DNA, 25 bp, Artificial
  probe
  misc_feature (1)..(25): SEQ ID NO: 424; WAN0249SC_at; Start 478; Stop 502
caataaagtacgtaatatttgctac

SEQ ID NO: 32240 - DNA, 25 bp, Artificial
  probe
  misc_feature (1)..(25): SEQ ID NO: 424; WAN0249SC_at; Start 365; Stop 389
agccacattattgatagggttaaaa

SEQ ID NO: 32241 - DNA, 25 bp, Artificial
  probe
  misc_feature (1)..(25): SEQ ID NO: 424; WAN0249SC_at; Start 58; Stop 82
ggagggctgggtggctaacttcatt

SEQ ID NO: 32242 - DNA, 25 bp, Artificial
  probe
  misc_feature (1)..(25): SEQ ID NO: 424; WAN0249SC_at; Start 44; Stop 68
ccatctaatttttaggagggctggg

SEQ ID NO: 32243 - DNA, 25 bp, Artificial
  probe
  misc_feature (1)..(25): SEQ ID NO: 424; WAN0249SC_at; Start 348; Stop 372
ccgaagcgtggttgaaaagccacat

SEQ ID NO: 32244 - DNA, 25 bp, Artificial
  probe
  misc_feature (1)..(25): SEQ ID NO: 424; WAN0249SC_at; Start 524; Stop 548
gaacagacatactcaacagaaacca

SEQ ID NO: 32245 - DNA, 25 bp, Artificial
  probe
  misc_feature (1)..(25): SEQ ID NO: 424; WAN0249SC_at; Start 414; Stop 438
ggacacttgtcctaattcataaatt

SEQ ID NO: 32246 - DNA, 25 bp, Artificial
  probe
  misc_feature (1)..(25): SEQ ID NO: 424; WAN0249SC_at; Start 431; Stop 455
cataaatttttagtgtggtgaaagc

SEQ ID NO: 32247 - DNA, 25 bp, Artificial
  probe
  misc_feature (1)..(25): SEQ ID NO: 424; WAN0249SC_at; Start 343; Stop 367
gaatgccgaagcgtggttgaaaagc

SEQ ID NO: 32248 - DNA, 25 bp, Artificial
  probe
  misc_feature (1)..(25): SEQ ID NO: 424; WAN0249SC_at; Start 86; Stop 110
gaactttcatttacgaacatatagt

SEQ ID NO: 32249 - DNA, 25 bp, Artificial
  probe
  misc_feature (1)..(25): SEQ ID NO: 424; WAN0249SC_at; Start 556; Stop 580
cacgtcagaagattgcagagcaggt

SEQ ID NO: 32250 - DNA, 25 bp, Artificial
  probe
  misc_feature (1)..(25): SEQ ID NO: 424; WAN0249SC_at; Start 465; Stop 489
cttgtgaaacgatcaataaagtacg

SEQ ID NO: 32251 - DNA, 25 bp, Artificial
  probe
  misc_feature (1)..(25): SEQ ID NO: 424; WAN0249SC_at; Start 455; Stop 479
cacacgtcatcttgtgaaacgatca

SEQ ID NO: 32252 - DNA, 25 bp, Artificial
  probe
  misc_feature (1)..(25): SEQ ID NO: 424; WAN0249SC_at; Start 514; Stop 538
gaaacatcgggaacagacatactca

SEQ ID NO: 32253 - DNA, 25 bp, Artificial
  probe
  misc_feature (1)..(25): SEQ ID NO: 424; WAN0249SC_at; Start 566; Stop 590
gattgcagagcaggtgaaaacctgc

SEQ ID NO: 32254 - DNA, 25 bp, Artificial
  probe
  misc_feature (1)..(25): SEQ ID NO: 424; WAN0249SC_at; Start 401; Stop 425
taagttgatgttaggacacttgtcc

SEQ ID NO: 32255 - DNA, 25 bp, Artificial
  probe
  misc_feature (1)..(25): SEQ ID NO: 424; WAN0249SC_at; Start 636; Stop 660
cctaaaaatattgaaaggagtatgt

SEQ ID NO: 32256 - DNA, 25 bp, Artificial
  probe
  misc_feature (1)..(25): SEQ ID NO: 424; WAN0249SC_at; Start 386; Stop 410
aaaagcctacttttataagttgatg

SEQ ID NO: 32257 - DNA, 25 bp, Artificial
  probe
  misc_feature (1)..(25): SEQ ID NO: 424; WAN0249SC_at; Start 507; Stop 531
gagttaggaaacatcgggaacagac

SEQ ID NO: 32258 - DNA, 25 bp, Artificial
  probe
  misc_feature (1)..(25): SEQ ID NO: 424; WAN0249SC_at; Start 294; Stop 318
tctagcaaatataaacccgagtaaa

SEQ ID NO: 32259 - DNA, 25 bp, Artificial
  probe
  misc_feature (1)..(25): SEQ ID NO: 424; WAN0249SC_at; Start 278; Stop 302
aaatgagatgatgttttctagcaaa

SEQ ID NO: 32260 - DNA, 25 bp, Artificial
  probe
  misc_feature (1)..(25): SEQ ID NO: 424; WAN0249SC_at; Start 628; Stop 652
cataaggtcctaaaaatattgaaag

SEQ ID NO: 32261 - DNA, 25 bp, Artificial
  probe
  misc_feature (1)..(25): SEQ ID NO: 424; WAN0249SC_at; Start 360; Stop 384
tgaaaagccacattattgatagggt

SEQ ID NO: 32262 - DNA, 25 bp, Artificial
  probe
  misc_feature (1)..(25): SEQ ID NO: 424; WAN0249SC_at; Start 599; Stop 623
catgagtcaacctttagttccttag

SEQ ID NO: 32263 - DNA, 25 bp, Artificial
  probe
  misc_feature (1)..(25): SEQ ID NO: 424; WAN0249SC_at; Start 498; Stop 522
gctactagagagttaggaaacatcg

SEQ ID NO: 32264 - DNA, 25 bp, Artificial
  probe
  misc_feature (1)..(25): SEQ ID NO: 424; WAN0249SC_at; Start 518; Stop 542
catcgggaacagacatactcaacag

SEQ ID NO: 32265 - DNA, 25 bp, Artificial
  probe
  misc_feature (1)..(25): SEQ ID NO: 424; WAN0249SC_at; Start 539; Stop 563
acagaaaccaaaataaacacgtcag

SEQ ID NO: 32266 - DNA, 25 bp, Artificial
  probe
  misc_feature (1)..(25): SEQ ID NO: 424; WAN0249SC_at; Start 582; Stop 606
aaaacctgctcttttttcatgagtc

SEQ ID NO: 32267 - DNA, 25 bp, Artificial
  probe
  misc_feature (1)..(25): SEQ ID NO: 424; WAN0249SC_at; Start 326; Stop 350
tacggacaggcagggttgaatgccg

SEQ ID NO: 32268 - DNA, 25 bp, Artificial
  probe
  misc_feature (1)..(25): SEQ ID NO: 424; WAN0249SC_at; Start 486; Stop 510
tacgtaatatttgctactagagagt

SEQ ID NO: 32269 - DNA, 25 bp, Artificial
  probe
  misc_feature (1)..(25): SEQ ID NO: 4764; WAN0249SD_at; Start 201; Stop 225
tatattaagagacaggaggaataca

SEQ ID NO: 32270 - DNA, 25 bp, Artificial
  probe
  misc_feature (1)..(25): SEQ ID NO: 4764; WAN0249SD_at; Start 114; Stop 138
tatcctgaaagttatctttagaatc

SEQ ID NO: 32271 - DNA, 25 bp, Artificial
  probe
  misc_feature (1)..(25): SEQ ID NO: 4764; WAN0249SD_at; Start 196; Stop 220
taatgtatattaagagacaggagga

SEQ ID NO: 32272 - DNA, 25 bp, Artificial
  probe
  misc_feature (1)..(25): SEQ ID NO: 4764; WAN0249SD_at; Start 117; Stop 141
cctgaaagttatctttagaatctat

SEQ ID NO: 32273 - DNA, 25 bp, Artificial
  probe
  misc_feature (1)..(25): SEQ ID NO: 4764; WAN0249SD_at; Start 34; Stop 58
tataaaaaatctttccatgataaaa

SEQ ID NO: 32274 - DNA, 25 bp, Artificial
  probe
  misc_feature (1)..(25): SEQ ID NO: 4764; WAN0249SD_at; Start 204; Stop 228
attaagagacaggaggaatacaagt

SEQ ID NO: 32275 - DNA, 25 bp, Artificial
  probe
  misc_feature (1)..(25): SEQ ID NO: 4764; WAN0249SD_at; Start 198; Stop 222
atgtatattaagagacaggaggaat

SEQ ID NO: 32276 - DNA, 25 bp, Artificial
  probe
  misc_feature (1)..(25): SEQ ID NO: 4764; WAN0249SD_at; Start 59; Stop 83
cgcataattccaagttttttacact

SEQ ID NO: 32277 - DNA, 25 bp, Artificial
  probe
  misc_feature (1)..(25): SEQ ID NO: 4764; WAN0249SD_at; Start 100; Stop 124
ataatttagaaatttatcctgaaag

SEQ ID NO: 32278 - DNA, 25 bp, Artificial
  probe
  misc_feature (1)..(25): SEQ ID NO: 4764; WAN0249SD_at; Start 107; Stop 131
agaaatttatcctgaaagttatctt

SEQ ID NO: 32279 - DNA, 25 bp, Artificial
  probe
  misc_feature (1)..(25): SEQ ID NO: 4764; WAN0249SD_at; Start 61; Stop 85
cataattccaagttttttacacttg

SEQ ID NO: 32280 - DNA, 25 bp, Artificial
  probe
  misc_feature (1)..(25): SEQ ID NO: 4764; WAN0249SD_at; Start 197; Stop 221
aatgtatattaagagacaggaggaa

SEQ ID NO: 32281 - DNA, 25 bp, Artificial
  probe
  misc_feature (1)..(25): SEQ ID NO: 4764; WAN0249SD_at; Start 51; Stop 75
tgataaaacgcataattccaagttt

SEQ ID NO: 32282 - DNA, 25 bp, Artificial
  probe
  misc_feature (1)..(25): SEQ ID NO: 4764; WAN0249SD_at; Start 112; Stop 136
tttatcctgaaagttatctttagaa

SEQ ID NO: 32283 - DNA, 25 bp, Artificial
  probe
  misc_feature (1)..(25): SEQ ID NO: 4764; WAN0249SD_at; Start 206; Stop 230
taagagacaggaggaatacaagttt

SEQ ID NO: 32284 - DNA, 25 bp, Artificial
  probe
  misc_feature (1)..(25): SEQ ID NO: 4764; WAN0249SD_at; Start 29; Stop 53
gctattataaaaaatctttccatga

SEQ ID NO: 32285 - DNA, 25 bp, Artificial
  probe
  misc_feature (1)..(25): SEQ ID NO: 4764; WAN0249SD_at; Start 116; Stop 140
tcctgaaagttatctttagaatcta

SEQ ID NO: 32286 - DNA, 25 bp, Artificial
  probe
  misc_feature (1)..(25): SEQ ID NO: 4764; WAN0249SD_at; Start 200; Stop 224
gtatattaagagacaggaggaatac

SEQ ID NO: 32287 - DNA, 25 bp, Artificial
  probe
  misc_feature (1)..(25): SEQ ID NO: 4764; WAN0249SD_at; Start 105; Stop 129
ttagaaatttatcctgaaagttatc

SEQ ID NO: 32288 - DNA, 25 bp, Artificial
  probe
  misc_feature (1)..(25): SEQ ID NO: 4764; WAN0249SD_at; Start 199; Stop 223
tgtatattaagagacaggaggaata

SEQ ID NO: 32289 - DNA, 25 bp, Artificial
  probe
  misc_feature (1)..(25): SEQ ID NO: 4764; WAN0249SD_at; Start 202; Stop 226
atattaagagacaggaggaatacaa

SEQ ID NO: 32290 - DNA, 25 bp, Artificial
  probe
  misc_feature (1)..(25): SEQ ID NO: 4764; WAN0249SD_at; Start 195; Stop 219
ttaatgtatattaagagacaggagg

SEQ ID NO: 32291 - DNA, 25 bp, Artificial
  probe
  misc_feature (1)..(25): SEQ ID NO: 4764; WAN0249SD_at; Start 129; Stop 153
ctttagaatctatttttcagttatt

SEQ ID NO: 32292 - DNA, 25 bp, Artificial
  probe
  misc_feature (1)..(25): SEQ ID NO: 4764; WAN0249SD_at; Start 124; Stop 148
gttatctttagaatctatttttcag

SEQ ID NO: 32293 - DNA, 25 bp, Artificial
  probe
  misc_feature (1)..(25): SEQ ID NO: 4764; WAN0249SD_at; Start 205; Stop 229
ttaagagacaggaggaatacaagtt

SEQ ID NO: 32294 - DNA, 25 bp, Artificial
  probe
  misc_feature (1)..(25): SEQ ID NO: 4764; WAN0249SD_at; Start 118; Stop 142
ctgaaagttatctttagaatctatt

SEQ ID NO: 32295 - DNA, 25 bp, Artificial
  probe
  misc_feature (1)..(25): SEQ ID NO: 4764; WAN0249SD_at; Start 110; Stop 134
aatttatcctgaaagttatctttag

SEQ ID NO: 32296 - DNA, 25 bp, Artificial
  probe
  misc_feature (1)..(25): SEQ ID NO: 4764; WAN0249SD_at; Start 69; Stop 93
caagttttttacacttgatactatg

SEQ ID NO: 32297 - DNA, 25 bp, Artificial
  probe
  misc_feature (1)..(25): SEQ ID NO: 4764; WAN0249SD_at; Start 203; Stop 227
tattaagagacaggaggaatacaag

SEQ ID NO: 32298 - DNA, 25 bp, Artificial
  probe
  misc_feature (1)..(25): SEQ ID NO: 4764; WAN0249SD_at; Start 28; Stop 52
agctattataaaaaatctttccatg

SEQ ID NO: 32299 - DNA, 25 bp, Artificial
  probe
  misc_feature (1)..(25): SEQ ID NO: 4764; WAN0249SD_at; Start 27; Stop 51
tagctattataaaaaatctttccat

SEQ ID NO: 32300 - DNA, 25 bp, Artificial
  probe
  misc_feature (1)..(25): SEQ ID NO: 4764; WAN0249SD_at; Start 26; Stop 50
ttagctattataaaaaatctttcca

SEQ ID NO: 32301 - DNA, 25 bp, Artificial
  probe
  misc_feature (1)..(25): SEQ ID NO: 4764; WAN0249SD_at; Start 68; Stop 92
ccaagttttttacacttgatactat

SEQ ID NO: 32302 - DNA, 25 bp, Artificial
  probe
  misc_feature (1)..(25): SEQ ID NO: 4764; WAN0249SD_at; Start 106; Stop 130
tagaaatttatcctgaaagttatct

SEQ ID NO: 32303 - DNA, 25 bp, Artificial
  probe
  misc_feature (1)..(25): SEQ ID NO: 3271; WAN0249SE_at; Start 148; Stop 172
gagctagacattttatgataaaaca

SEQ ID NO: 32304 - DNA, 25 bp, Artificial
  probe
  misc_feature (1)..(25): SEQ ID NO: 3271; WAN0249SE_at; Start 79; Stop 103
ttttcccaacctcaacatgcctagg

SEQ ID NO: 32305 - DNA, 25 bp, Artificial
  probe
  misc_feature (1)..(25): SEQ ID NO: 3271; WAN0249SE_at; Start 133; Stop 157
atttttgaaaagtatgagctagaca

SEQ ID NO: 32306 - DNA, 25 bp, Artificial
  probe
  misc_feature (1)..(25): SEQ ID NO: 3271; WAN0249SE_at; Start 78; Stop 102
tttttcccaacctcaacatgcctag

SEQ ID NO: 32307 - DNA, 25 bp, Artificial
  probe
  misc_feature (1)..(25): SEQ ID NO: 3271; WAN0249SE_at; Start 88; Stop 112
cctcaacatgcctaggacaagagga

SEQ ID NO: 32308 - DNA, 25 bp, Artificial
  probe
  misc_feature (1)..(25): SEQ ID NO: 3271; WAN0249SE_at; Start 134; Stop 158
tttttgaaaagtatgagctagacat

SEQ ID NO: 32309 - DNA, 25 bp, Artificial
  probe
  misc_feature (1)..(25): SEQ ID NO: 3271; WAN0249SE_at; Start 135; Stop 159
ttttgaaaagtatgagctagacatt

SEQ ID NO: 32310 - DNA, 25 bp, Artificial
  probe
  misc_feature (1)..(25): SEQ ID NO: 3271; WAN0249SE_at; Start 142; Stop 166
aagtatgagctagacattttatgat

SEQ ID NO: 32311 - DNA, 25 bp, Artificial
  probe
  misc_feature (1)..(25): SEQ ID NO: 3271; WAN0249SE_at; Start 39; Stop 63
ttcatcacctgatatgatacgtttt

SEQ ID NO: 32312 - DNA, 25 bp, Artificial
  probe
  misc_feature (1)..(25): SEQ ID NO: 3271; WAN0249SE_at; Start 40; Stop 64
tcatcacctgatatgatacgttttt

SEQ ID NO: 32313 - DNA, 25 bp, Artificial
  probe
  misc_feature (1)..(25): SEQ ID NO: 3271; WAN0249SE_at; Start 132; Stop 156
tatttttgaaaagtatgagctagac

SEQ ID NO: 32314 - DNA, 25 bp, Artificial
  probe
  misc_feature (1)..(25): SEQ ID NO: 3271; WAN0249SE_at; Start 159; Stop 183
tttatgataaaacaaatcctttgcc

SEQ ID NO: 32315 - DNA, 25 bp, Artificial
  probe
  misc_feature (1)..(25): SEQ ID NO: 3271; WAN0249SE_at; Start 145; Stop 169
tatgagctagacattttatgataaa

SEQ ID NO: 32316 - DNA, 25 bp, Artificial
  probe
  misc_feature (1)..(25): SEQ ID NO: 3271; WAN0249SE_at; Start 147; Stop 171
tgagctagacattttatgataaaac

SEQ ID NO: 32317 - DNA, 25 bp, Artificial
  probe
  misc_feature (1)..(25): SEQ ID NO: 3271; WAN0249SE_at; Start 75; Stop 99
agatttttcccaacctcaacatgcc

SEQ ID NO: 32318 - DNA, 25 bp, Artificial
  probe
  misc_feature (1)..(25): SEQ ID NO: 3271; WAN0249SE_at; Start 87; Stop 111
acctcaacatgcctaggacaagagg

SEQ ID NO: 32319 - DNA, 25 bp, Artificial
  probe
  misc_feature (1)..(25): SEQ ID NO: 3271; WAN0249SE_at; Start 42; Stop 66
atcacctgatatgatacgtttttct

SEQ ID NO: 32320 - DNA, 25 bp, Artificial
  probe
  misc_feature (1)..(25): SEQ ID NO: 3271; WAN0249SE_at; Start 138; Stop 162
tgaaaagtatgagctagacatttta

SEQ ID NO: 32321 - DNA, 25 bp, Artificial
  probe
  misc_feature (1)..(25): SEQ ID NO: 3271; WAN0249SE_at; Start 139; Stop 163
gaaaagtatgagctagacattttat

SEQ ID NO: 32322 - DNA, 25 bp, Artificial
  probe
  misc_feature (1)..(25): SEQ ID NO: 3271; WAN0249SE_at; Start 77; Stop 101
atttttcccaacctcaacatgccta

SEQ ID NO: 32323 - DNA, 25 bp, Artificial
  probe
  misc_feature (1)..(25): SEQ ID NO: 3271; WAN0249SE_at; Start 41; Stop 65
catcacctgatatgatacgtttttc

SEQ ID NO: 32324 - DNA, 25 bp, Artificial
  probe
  misc_feature (1)..(25): SEQ ID NO: 3271; WAN0249SE_at; Start 143; Stop 167
agtatgagctagacattttatgata

SEQ ID NO: 32325 - DNA, 25 bp, Artificial
  probe
  misc_feature (1)..(25): SEQ ID NO: 3271; WAN0249SE_at; Start 76; Stop 100
gatttttcccaacctcaacatgcct

SEQ ID NO: 32326 - DNA, 25 bp, Artificial
  probe
  misc_feature (1)..(25): SEQ ID NO: 3271; WAN0249SE_at; Start 85; Stop 109
caacctcaacatgcctaggacaaga

SEQ ID NO: 32327 - DNA, 25 bp, Artificial
  probe
  misc_feature (1)..(25): SEQ ID NO: 3271; WAN0249SE_at; Start 141; Stop 165
aaagtatgagctagacattttatga

SEQ ID NO: 32328 - DNA, 25 bp, Artificial
  probe
  misc_feature (1)..(25): SEQ ID NO: 3271; WAN0249SE_at; Start 136; Stop 160
tttgaaaagtatgagctagacattt

SEQ ID NO: 32329 - DNA, 25 bp, Artificial
  probe
  misc_feature (1)..(25): SEQ ID NO: 3271; WAN0249SE_at; Start 89; Stop 113
ctcaacatgcctaggacaagaggaa

SEQ ID NO: 32330 - DNA, 25 bp, Artificial
  probe
  misc_feature (1)..(25): SEQ ID NO: 3271; WAN0249SE_at; Start 84; Stop 108
ccaacctcaacatgcctaggacaag

SEQ ID NO: 32331 - DNA, 25 bp, Artificial
  probe
  misc_feature (1)..(25): SEQ ID NO: 3271; WAN0249SE_at; Start 116; Stop 140
tgacctcgtttaaacatatttttga

SEQ ID NO: 32332 - DNA, 25 bp, Artificial
  probe
  misc_feature (1)..(25): SEQ ID NO: 3271; WAN0249SE_at; Start 38; Stop 62
tttcatcacctgatatgatacgttt

SEQ ID NO: 32333 - DNA, 25 bp, Artificial
  probe
  misc_feature (1)..(25): SEQ ID NO: 3271; WAN0249SE_at; Start 74; Stop 98
aagatttttcccaacctcaacatgc

SEQ ID NO: 32334 - DNA, 25 bp, Artificial
  probe
  misc_feature (1)..(25): SEQ ID NO: 3271; WAN0249SE_at; Start 90; Stop 114
tcaacatgcctaggacaagaggaag

SEQ ID NO: 32335 - DNA, 25 bp, Artificial
  probe
  misc_feature (1)..(25): SEQ ID NO: 3271; WAN0249SE_at; Start 80; Stop 104
tttcccaacctcaacatgcctagga

SEQ ID NO: 32336 - DNA, 25 bp, Artificial
  probe
  misc_feature (1)..(25): SEQ ID NO: 3271; WAN0249SE_at; Start 37; Stop 61
ttttcatcacctgatatgatacgtt

SEQ ID NO: 32337 - DNA, 25 bp, Artificial
  probe
  misc_feature (1)..(25): SEQ ID NO: 4659; WAN0249SF_at; Start 4; Stop 28
tcctaggataaagcaaaacgcatag

SEQ ID NO: 32338 - DNA, 25 bp, Artificial
  probe
  misc_feature (1)..(25): SEQ ID NO: 4659; WAN0249SF_at; Start 58; Stop 82
gcgttttctgatgttaaagactttc

SEQ ID NO: 32339 - DNA, 25 bp, Artificial
  probe
  misc_feature (1)..(25): SEQ ID NO: 4659; WAN0249SF_at; Start 101; Stop 125
cataattgttagttgtagtcattta

SEQ ID NO: 32340 - DNA, 25 bp, Artificial
  probe
  misc_feature (1)..(25): SEQ ID NO: 4659; WAN0249SF_at; Start 2; Stop 26
cttcctaggataaagcaaaacgcat

SEQ ID NO: 32341 - DNA, 25 bp, Artificial
  probe
  misc_feature (1)..(25): SEQ ID NO: 4659; WAN0249SF_at; Start 53; Stop 77
actatgcgttttctgatgttaaaga

SEQ ID NO: 32342 - DNA, 25 bp, Artificial
  probe
  misc_feature (1)..(25): SEQ ID NO: 4659; WAN0249SF_at; Start 62; Stop 86
tttctgatgttaaagactttctacc

SEQ ID NO: 32343 - DNA, 25 bp, Artificial
  probe
  misc_feature (1)..(25): SEQ ID NO: 4659; WAN0249SF_at; Start 54; Stop 78
ctatgcgttttctgatgttaaagac

SEQ ID NO: 32344 - DNA, 25 bp, Artificial
  probe
  misc_feature (1)..(25): SEQ ID NO: 4659; WAN0249SF_at; Start 34; Stop 58
agggttttcaacacttgatactatg

SEQ ID NO: 32345 - DNA, 25 bp, Artificial
  probe
  misc_feature (1)..(25): SEQ ID NO: 4659; WAN0249SF_at; Start 52; Stop 76
tactatgcgttttctgatgttaaag

SEQ ID NO: 32346 - DNA, 25 bp, Artificial
  probe
  misc_feature (1)..(25): SEQ ID NO: 4659; WAN0249SF_at; Start 26; Stop 50
tagtatcaagggttttcaacacttg

SEQ ID NO: 32347 - DNA, 25 bp, Artificial
  probe
  misc_feature (1)..(25): SEQ ID NO: 4659; WAN0249SF_at; Start 6; Stop 30
ctaggataaagcaaaacgcatagta

SEQ ID NO: 32348 - DNA, 25 bp, Artificial
  probe
  misc_feature (1)..(25): SEQ ID NO: 4659; WAN0249SF_at; Start 63; Stop 87
ttctgatgttaaagactttctacca

SEQ ID NO: 32349 - DNA, 25 bp, Artificial
  probe
  misc_feature (1)..(25): SEQ ID NO: 4659; WAN0249SF_at; Start 3; Stop 27
ttcctaggataaagcaaaacgcata

SEQ ID NO: 32350 - DNA, 25 bp, Artificial
  probe
  misc_feature (1)..(25): SEQ ID NO: 4659; WAN0249SF_at; Start 21; Stop 45
acgcatagtatcaagggttttcaac

SEQ ID NO: 32351 - DNA, 25 bp, Artificial
  probe
  misc_feature (1)..(25): SEQ ID NO: 4659; WAN0249SF_at; Start 96; Stop 120
aaaagcataattgttagttgtagtc

SEQ ID NO: 32352 - DNA, 25 bp, Artificial
  probe
  misc_feature (1)..(25): SEQ ID NO: 4659; WAN0249SF_at; Start 59; Stop 83
cgttttctgatgttaaagactttct

SEQ ID NO: 32353 - DNA, 25 bp, Artificial
  probe
  misc_feature (1)..(25): SEQ ID NO: 4659; WAN0249SF_at; Start 98; Stop 122
aagcataattgttagttgtagtcat

SEQ ID NO: 32354 - DNA, 25 bp, Artificial
  probe
  misc_feature (1)..(25): SEQ ID NO: 4659; WAN0249SF_at; Start 8; Stop 32
aggataaagcaaaacgcatagtatc

SEQ ID NO: 32355 - DNA, 25 bp, Artificial
  probe
  misc_feature (1)..(25): SEQ ID NO: 4659; WAN0249SF_at; Start 27; Stop 51
agtatcaagggttttcaacacttga

SEQ ID NO: 32356 - DNA, 25 bp, Artificial
  probe
  misc_feature (1)..(25): SEQ ID NO: 4659; WAN0249SF_at; Start 100; Stop 124
gcataattgttagttgtagtcattt

SEQ ID NO: 32357 - DNA, 25 bp, Artificial
  probe
  misc_feature (1)..(25): SEQ ID NO: 4659; WAN0249SF_at; Start 97; Stop 121
aaagcataattgttagttgtagtca

SEQ ID NO: 32358 - DNA, 25 bp, Artificial
  probe
  misc_feature (1)..(25): SEQ ID NO: 4659; WAN0249SF_at; Start 32; Stop 56
caagggttttcaacacttgatacta

SEQ ID NO: 32359 - DNA, 25 bp, Artificial
  probe
  misc_feature (1)..(25): SEQ ID NO: 4659; WAN0249SF_at; Start 60; Stop 84
gttttctgatgttaaagactttcta

SEQ ID NO: 32360 - DNA, 25 bp, Artificial
  probe
  misc_feature (1)..(25): SEQ ID NO: 4659; WAN0249SF_at; Start 5; Stop 29
cctaggataaagcaaaacgcatagt

SEQ ID NO: 32361 - DNA, 25 bp, Artificial
  probe
  misc_feature (1)..(25): SEQ ID NO: 4659; WAN0249SF_at; Start 57; Stop 81
tgcgttttctgatgttaaagacttt

SEQ ID NO: 32362 - DNA, 25 bp, Artificial
  probe
  misc_feature (1)..(25): SEQ ID NO: 4659; WAN0249SF_at; Start 7; Stop 31
taggataaagcaaaacgcatagtat

SEQ ID NO: 32363 - DNA, 25 bp, Artificial
  probe
  misc_feature (1)..(25): SEQ ID NO: 4659; WAN0249SF_at; Start 64; Stop 88
tctgatgttaaagactttctaccag

SEQ ID NO: 32364 - DNA, 25 bp, Artificial
  probe
  misc_feature (1)..(25): SEQ ID NO: 4659; WAN0249SF_at; Start 33; Stop 57
aagggttttcaacacttgatactat

SEQ ID NO: 32365 - DNA, 25 bp, Artificial
  probe
  misc_feature (1)..(25): SEQ ID NO: 4659; WAN0249SF_at; Start 25; Stop 49
atagtatcaagggttttcaacactt

SEQ ID NO: 32366 - DNA, 25 bp, Artificial
  probe
  misc_feature (1)..(25): SEQ ID NO: 4659; WAN0249SF_at; Start 23; Stop 47
gcatagtatcaagggttttcaacac

SEQ ID NO: 32367 - DNA, 25 bp, Artificial
  probe
  misc_feature (1)..(25): SEQ ID NO: 4659; WAN0249SF_at; Start 61; Stop 85
ttttctgatgttaaagactttctac

SEQ ID NO: 32368 - DNA, 25 bp, Artificial
  probe
  misc_feature (1)..(25): SEQ ID NO: 4659; WAN0249SF_at; Start 1; Stop 25
tcttcctaggataaagcaaaacgca

SEQ ID NO: 32369 - DNA, 25 bp, Artificial
  probe
  misc_feature (1)..(25): SEQ ID NO: 4659; WAN0249SF_at; Start 28; Stop 52
gtatcaagggttttcaacacttgat

SEQ ID NO: 32370 - DNA, 25 bp, Artificial
  probe
  misc_feature (1)..(25): SEQ ID NO: 4659; WAN0249SF_at; Start 31; Stop 55
tcaagggttttcaacacttgatact

SEQ ID NO: 32371 - DNA, 25 bp, Artificial
  probe
  misc_feature (1)..(25): SEQ ID NO: 4420; WAN0249SG_at; Start 3; Stop 27
aatgactacaactaacaattatgct

SEQ ID NO: 32372 - DNA, 25 bp, Artificial
  probe
  misc_feature (1)..(25): SEQ ID NO: 4420; WAN0249SG_at; Start 49; Stop 73
tctttaacatcagaaaacgcatagt

SEQ ID NO: 32373 - DNA, 25 bp, Artificial
  probe
  misc_feature (1)..(25): SEQ ID NO: 4420; WAN0249SG_at; Start 36; Stop 60
acctggtagaaagtctttaacatca

SEQ ID NO: 32374 - DNA, 25 bp, Artificial
  probe
  misc_feature (1)..(25): SEQ ID NO: 4420; WAN0249SG_at; Start 100; Stop 124
atgcgttttgctttatcctaggaag

SEQ ID NO: 32375 - DNA, 25 bp, Artificial
  probe
  misc_feature (1)..(25): SEQ ID NO: 4420; WAN0249SG_at; Start 37; Stop 61
cctggtagaaagtctttaacatcag

SEQ ID NO: 32376 - DNA, 25 bp, Artificial
  probe
  misc_feature (1)..(25): SEQ ID NO: 4420; WAN0249SG_at; Start 43; Stop 67
agaaagtctttaacatcagaaaacg

SEQ ID NO: 32377 - DNA, 25 bp, Artificial
  probe
  misc_feature (1)..(25): SEQ ID NO: 4420; WAN0249SG_at; Start 41; Stop 65
gtagaaagtctttaacatcagaaaa

SEQ ID NO: 32378 - DNA, 25 bp, Artificial
  probe
  misc_feature (1)..(25): SEQ ID NO: 4420; WAN0249SG_at; Start 94; Stop 118
gatactatgcgttttgctttatcct

SEQ ID NO: 32379 - DNA, 25 bp, Artificial
  probe
  misc_feature (1)..(25): SEQ ID NO: 4420; WAN0249SG_at; Start 40; Stop 64
ggtagaaagtctttaacatcagaaa

SEQ ID NO: 32380 - DNA, 25 bp, Artificial
  probe
  misc_feature (1)..(25): SEQ ID NO: 4420; WAN0249SG_at; Start 97; Stop 121
actatgcgttttgctttatcctagg

SEQ ID NO: 32381 - DNA, 25 bp, Artificial
  probe
  misc_feature (1)..(25): SEQ ID NO: 4420; WAN0249SG_at; Start 2; Stop 26
aaatgactacaactaacaattatgc

SEQ ID NO: 32382 - DNA, 25 bp, Artificial
  probe
  misc_feature (1)..(25): SEQ ID NO: 4420; WAN0249SG_at; Start 39; Stop 63
tggtagaaagtctttaacatcagaa

SEQ ID NO: 32383 - DNA, 25 bp, Artificial
  probe
  misc_feature (1)..(25): SEQ ID NO: 4420; WAN0249SG_at; Start 42; Stop 66
tagaaagtctttaacatcagaaaac

SEQ ID NO: 32384 - DNA, 25 bp, Artificial
  probe
  misc_feature (1)..(25): SEQ ID NO: 4420; WAN0249SG_at; Start 50; Stop 74
ctttaacatcagaaaacgcatagta

SEQ ID NO: 32385 - DNA, 25 bp, Artificial
  probe
  misc_feature (1)..(25): SEQ ID NO: 4420; WAN0249SG_at; Start 72; Stop 96
gtatcaagtgttgaaaacccttgat

SEQ ID NO: 32386 - DNA, 25 bp, Artificial
  probe
  misc_feature (1)..(25): SEQ ID NO: 4420; WAN0249SG_at; Start 4; Stop 28
atgactacaactaacaattatgctt

SEQ ID NO: 32387 - DNA, 25 bp, Artificial
  probe
  misc_feature (1)..(25): SEQ ID NO: 4420; WAN0249SG_at; Start 48; Stop 72
gtctttaacatcagaaaacgcatag

SEQ ID NO: 32388 - DNA, 25 bp, Artificial
  probe
  misc_feature (1)..(25): SEQ ID NO: 4420; WAN0249SG_at; Start 96; Stop 120
tactatgcgttttgctttatcctag

SEQ ID NO: 32389 - DNA, 25 bp, Artificial
  probe
  misc_feature (1)..(25): SEQ ID NO: 4420; WAN0249SG_at; Start 70; Stop 94
tagtatcaagtgttgaaaacccttg

SEQ ID NO: 32390 - DNA, 25 bp, Artificial
  probe
  misc_feature (1)..(25): SEQ ID NO: 4420; WAN0249SG_at; Start 1; Stop 25
taaatgactacaactaacaattatg

SEQ ID NO: 32391 - DNA, 25 bp, Artificial
  probe
  misc_feature (1)..(25): SEQ ID NO: 4420; WAN0249SG_at; Start 95; Stop 119
atactatgcgttttgctttatccta

SEQ ID NO: 32392 - DNA, 25 bp, Artificial
  probe
  misc_feature (1)..(25): SEQ ID NO: 4420; WAN0249SG_at; Start 98; Stop 122
ctatgcgttttgctttatcctagga

SEQ ID NO: 32393 - DNA, 25 bp, Artificial
  probe
  misc_feature (1)..(25): SEQ ID NO: 4420; WAN0249SG_at; Start 68; Stop 92
catagtatcaagtgttgaaaaccct

SEQ ID NO: 32394 - DNA, 25 bp, Artificial
  probe
  misc_feature (1)..(25): SEQ ID NO: 4420; WAN0249SG_at; Start 45; Stop 69
aaagtctttaacatcagaaaacgca

SEQ ID NO: 32395 - DNA, 25 bp, Artificial
  probe
  misc_feature (1)..(25): SEQ ID NO: 4420; WAN0249SG_at; Start 71; Stop 95
agtatcaagtgttgaaaacccttga

SEQ ID NO: 32396 - DNA, 25 bp, Artificial
  probe
  misc_feature (1)..(25): SEQ ID NO: 4420; WAN0249SG_at; Start 46; Stop 70
aagtctttaacatcagaaaacgcat

SEQ ID NO: 32397 - DNA, 25 bp, Artificial
  probe
  misc_feature (1)..(25): SEQ ID NO: 4420; WAN0249SG_at; Start 99; Stop 123
tatgcgttttgctttatcctaggaa

SEQ ID NO: 32398 - DNA, 25 bp, Artificial
  probe
  misc_feature (1)..(25): SEQ ID NO: 4420; WAN0249SG_at; Start 44; Stop 68
gaaagtctttaacatcagaaaacgc

SEQ ID NO: 32399 - DNA, 25 bp, Artificial
  probe
  misc_feature (1)..(25): SEQ ID NO: 4420; WAN0249SG_at; Start 38; Stop 62
ctggtagaaagtctttaacatcaga

SEQ ID NO: 32400 - DNA, 25 bp, Artificial
  probe
  misc_feature (1)..(25): SEQ ID NO: 4420; WAN0249SG_at; Start 69; Stop 93
atagtatcaagtgttgaaaaccctt

SEQ ID NO: 32401 - DNA, 25 bp, Artificial
  probe
  misc_feature (1)..(25): SEQ ID NO: 4420; WAN0249SG_at; Start 101; Stop 125
tgcgttttgctttatcctaggaaga

SEQ ID NO: 32402 - DNA, 25 bp, Artificial
  probe
  misc_feature (1)..(25): SEQ ID NO: 3789; WAN0249SH_at; Start 42; Stop 66
attgattagcagtagatttcaaaat

SEQ ID NO: 32403 - DNA, 25 bp, Artificial
  probe
  misc_feature (1)..(25): SEQ ID NO: 3789; WAN0249SH_at; Start 34; Stop 58
gcttcttcattgattagcagtagat

SEQ ID NO: 32404 - DNA, 25 bp, Artificial
  probe
  misc_feature (1)..(25): SEQ ID NO: 3789; WAN0249SH_at; Start 41; Stop 65
cattgattagcagtagatttcaaaa

SEQ ID NO: 32405 - DNA, 25 bp, Artificial
  probe
  misc_feature (1)..(25): SEQ ID NO: 3789; WAN0249SH_at; Start 2; Stop 26
taacttgtaactagctgcctagttt

SEQ ID NO: 32406 - DNA, 25 bp, Artificial
  probe
  misc_feature (1)..(25): SEQ ID NO: 3789; WAN0249SH_at; Start 31; Stop 55
tttgcttcttcattgattagcagta

SEQ ID NO: 32407 - DNA, 25 bp, Artificial
  probe
  misc_feature (1)..(25): SEQ ID NO: 3789; WAN0249SH_at; Start 8; Stop 32
gtaactagctgcctagtttgatctt

SEQ ID NO: 32408 - DNA, 25 bp, Artificial
  probe
  misc_feature (1)..(25): SEQ ID NO: 3789; WAN0249SH_at; Start 28; Stop 52
atctttgcttcttcattgattagca

SEQ ID NO: 32409 - DNA, 25 bp, Artificial
  probe
  misc_feature (1)..(25): SEQ ID NO: 3789; WAN0249SH_at; Start 5; Stop 29
cttgtaactagctgcctagtttgat

SEQ ID NO: 32410 - DNA, 25 bp, Artificial
  probe
  misc_feature (1)..(25): SEQ ID NO: 3789; WAN0249SH_at; Start 3; Stop 27
aacttgtaactagctgcctagtttg

SEQ ID NO: 32411 - DNA, 25 bp, Artificial
  probe
  misc_feature (1)..(25): SEQ ID NO: 3789; WAN0249SH_at; Start 30; Stop 54
ctttgcttcttcattgattagcagt

SEQ ID NO: 32412 - DNA, 25 bp, Artificial
  probe
  misc_feature (1)..(25): SEQ ID NO: 3789; WAN0249SH_at; Start 36; Stop 60
ttcttcattgattagcagtagattt

SEQ ID NO: 32413 - DNA, 25 bp, Artificial
  probe
  misc_feature (1)..(25): SEQ ID NO: 3789; WAN0249SH_at; Start 26; Stop 50
tgatctttgcttcttcattgattag

SEQ ID NO: 32414 - DNA, 25 bp, Artificial
  probe
  misc_feature (1)..(25): SEQ ID NO: 3789; WAN0249SH_at; Start 25; Stop 49
ttgatctttgcttcttcattgatta

SEQ ID NO: 32415 - DNA, 25 bp, Artificial
  probe
  misc_feature (1)..(25): SEQ ID NO: 3789; WAN0249SH_at; Start 40; Stop 64
tcattgattagcagtagatttcaaa

SEQ ID NO: 32416 - DNA, 25 bp, Artificial
  probe
  misc_feature (1)..(25): SEQ ID NO: 3789; WAN0249SH_at; Start 38; Stop 62
cttcattgattagcagtagatttca

SEQ ID NO: 32417 - DNA, 25 bp, Artificial
  probe
  misc_feature (1)..(25): SEQ ID NO: 3789; WAN0249SH_at; Start 7; Stop 31
tgtaactagctgcctagtttgatct

SEQ ID NO: 32418 - DNA, 25 bp, Artificial
  probe
  misc_feature (1)..(25): SEQ ID NO: 3789; WAN0249SH_at; Start 21; Stop 45
tagtttgatctttgcttcttcattg

SEQ ID NO: 32419 - DNA, 25 bp, Artificial
  probe
  misc_feature (1)..(25): SEQ ID NO: 3789; WAN0249SH_at; Start 37; Stop 61
tcttcattgattagcagtagatttc

SEQ ID NO: 32420 - DNA, 25 bp, Artificial
  probe
  misc_feature (1)..(25): SEQ ID NO: 3789; WAN0249SH_at; Start 29; Stop 53
tctttgcttcttcattgattagcag

SEQ ID NO: 32421 - DNA, 25 bp, Artificial
  probe
  misc_feature (1)..(25): SEQ ID NO: 3789; WAN0249SH_at; Start 39; Stop 63
ttcattgattagcagtagatttcaa

SEQ ID NO: 32422 - DNA, 25 bp, Artificial
  probe
  misc_feature (1)..(25): SEQ ID NO: 3789; WAN0249SH_at; Start 44; Stop 68
tgattagcagtagatttcaaaatga

SEQ ID NO: 32423 - DNA, 25 bp, Artificial
  probe
  misc_feature (1)..(25): SEQ ID NO: 3789; WAN0249SH_at; Start 6; Stop 30
ttgtaactagctgcctagtttgatc

SEQ ID NO: 32424 - DNA, 25 bp, Artificial
  probe
  misc_feature (1)..(25): SEQ ID NO: 3789; WAN0249SH_at; Start 43; Stop 67
ttgattagcagtagatttcaaaatg

SEQ ID NO: 32425 - DNA, 25 bp, Artificial
  probe
  misc_feature (1)..(25): SEQ ID NO: 3789; WAN0249SH_at; Start 9; Stop 33
taactagctgcctagtttgatcttt

SEQ ID NO: 32426 - DNA, 25 bp, Artificial
  probe
  misc_feature (1)..(25): SEQ ID NO: 3789; WAN0249SH_at; Start 27; Stop 51
gatctttgcttcttcattgattagc

SEQ ID NO: 32427 - DNA, 25 bp, Artificial
  probe
  misc_feature (1)..(25): SEQ ID NO: 3789; WAN0249SH_at; Start 20; Stop 44
ctagtttgatctttgcttcttcatt

SEQ ID NO: 32428 - DNA, 25 bp, Artificial
  probe
  misc_feature (1)..(25): SEQ ID NO: 3789; WAN0249SH_at; Start 4; Stop 28
acttgtaactagctgcctagtttga

SEQ ID NO: 32429 - DNA, 25 bp, Artificial
  probe
  misc_feature (1)..(25): SEQ ID NO: 3789; WAN0249SH_at; Start 1; Stop 25
gtaacttgtaactagctgcctagtt

SEQ ID NO: 32430 - DNA, 25 bp, Artificial
  probe
  misc_feature (1)..(25): SEQ ID NO: 3789; WAN0249SH_at; Start 33; Stop 57
tgcttcttcattgattagcagtaga

SEQ ID NO: 32431 - DNA, 25 bp, Artificial
  probe
  misc_feature (1)..(25): SEQ ID NO: 3789; WAN0249SH_at; Start 32; Stop 56
ttgcttcttcattgattagcagtag

SEQ ID NO: 32432 - DNA, 25 bp, Artificial
  probe
  misc_feature (1)..(25): SEQ ID NO: 3789; WAN0249SH_at; Start 24; Stop 48
tttgatctttgcttcttcattgatt

SEQ ID NO: 32433 - DNA, 25 bp, Artificial
  probe
  misc_feature (1)..(25): SEQ ID NO: 3789; WAN0249SH_at; Start 35; Stop 59
cttcttcattgattagcagtagatt

SEQ ID NO: 32434 - DNA, 25 bp, Artificial
  probe
  misc_feature (1)..(25): SEQ ID NO: 294; WAN0249SI_at; Start 72; Stop 96
ccttgtcttctcctaaaattgactt

SEQ ID NO: 32435 - DNA, 25 bp, Artificial
  probe
  misc_feature (1)..(25): SEQ ID NO: 294; WAN0249SI_at; Start 75; Stop 99
tgtcttctcctaaaattgactttct

SEQ ID NO: 32436 - DNA, 25 bp, Artificial
  probe
  misc_feature (1)..(25): SEQ ID NO: 294; WAN0249SI_at; Start 71; Stop 95
accttgtcttctcctaaaattgact

SEQ ID NO: 32437 - DNA, 25 bp, Artificial
  probe
  misc_feature (1)..(25): SEQ ID NO: 294; WAN0249SI_at; Start 77; Stop 101
tcttctcctaaaattgactttcttg

SEQ ID NO: 32438 - DNA, 25 bp, Artificial
  probe
  misc_feature (1)..(25): SEQ ID NO: 294; WAN0249SI_at; Start 69; Stop 93
taaccttgtcttctcctaaaattga

SEQ ID NO: 32439 - DNA, 25 bp, Artificial
  probe
  misc_feature (1)..(25): SEQ ID NO: 294; WAN0249SI_at; Start 78; Stop 102
cttctcctaaaattgactttcttgt

SEQ ID NO: 32440 - DNA, 25 bp, Artificial
  probe
  misc_feature (1)..(25): SEQ ID NO: 294; WAN0249SI_at; Start 63; Stop 87
gactattaaccttgtcttctcctaa

SEQ ID NO: 32441 - DNA, 25 bp, Artificial
  probe
  misc_feature (1)..(25): SEQ ID NO: 294; WAN0249SI_at; Start 73; Stop 97
cttgtcttctcctaaaattgacttt

SEQ ID NO: 32442 - DNA, 25 bp, Artificial
  probe
  misc_feature (1)..(25): SEQ ID NO: 294; WAN0249SI_at; Start 74; Stop 98
ttgtcttctcctaaaattgactttc

SEQ ID NO: 32443 - DNA, 25 bp, Artificial
  probe
  misc_feature (1)..(25): SEQ ID NO: 3622; WAN0249SJ_at; Start 151; Stop 175
ggatgttaagcaccaattcatttgt

SEQ ID NO: 32444 - DNA, 25 bp, Artificial
  probe
  misc_feature (1)..(25): SEQ ID NO: 3622; WAN0249SJ_at; Start 108; Stop 132
atccagaatagtccactgtagtttc

SEQ ID NO: 32445 - DNA, 25 bp, Artificial
  probe
  misc_feature (1)..(25): SEQ ID NO: 3622; WAN0249SJ_at; Start 21; Stop 45
tagggcaaacgatacatccgccctc

SEQ ID NO: 32446 - DNA, 25 bp, Artificial
  probe
  misc_feature (1)..(25): SEQ ID NO: 3622; WAN0249SJ_at; Start 106; Stop 130
gaatccagaatagtccactgtagtt

SEQ ID NO: 32447 - DNA, 25 bp, Artificial
  probe
  misc_feature (1)..(25): SEQ ID NO: 3622; WAN0249SJ_at; Start 68; Stop 92
tcttgtgaatgtgttttgtcataat

SEQ ID NO: 32448 - DNA, 25 bp, Artificial
  probe
  misc_feature (1)..(25): SEQ ID NO: 3622; WAN0249SJ_at; Start 48; Stop 72
cttttaaaatgtcgtagccttcttg

SEQ ID NO: 32449 - DNA, 25 bp, Artificial
  probe
  misc_feature (1)..(25): SEQ ID NO: 3622; WAN0249SJ_at; Start 64; Stop 88
gccttcttgtgaatgtgttttgtca

SEQ ID NO: 32450 - DNA, 25 bp, Artificial
  probe
  misc_feature (1)..(25): SEQ ID NO: 3622; WAN0249SJ_at; Start 100; Stop 124
tgtgttgaatccagaatagtccact

SEQ ID NO: 32451 - DNA, 25 bp, Artificial
  probe
  misc_feature (1)..(25): SEQ ID NO: 3622; WAN0249SJ_at; Start 97; Stop 121
taatgtgttgaatccagaatagtcc

SEQ ID NO: 32452 - DNA, 25 bp, Artificial
  probe
  misc_feature (1)..(25): SEQ ID NO: 3622; WAN0249SJ_at; Start 104; Stop 128
ttgaatccagaatagtccactgtag

SEQ ID NO: 32453 - DNA, 25 bp, Artificial
  probe
  misc_feature (1)..(25): SEQ ID NO: 3622; WAN0249SJ_at; Start 57; Stop 81
tgtcgtagccttcttgtgaatgtgt

SEQ ID NO: 32454 - DNA, 25 bp, Artificial
  probe
  misc_feature (1)..(25): SEQ ID NO: 3622; WAN0249SJ_at; Start 150; Stop 174
tggatgttaagcaccaattcatttg

SEQ ID NO: 32455 - DNA, 25 bp, Artificial
  probe
  misc_feature (1)..(25): SEQ ID NO: 3622; WAN0249SJ_at; Start 111; Stop 135
cagaatagtccactgtagtttctaa

SEQ ID NO: 32456 - DNA, 25 bp, Artificial
  probe
  misc_feature (1)..(25): SEQ ID NO: 3622; WAN0249SJ_at; Start 18; Stop 42
tagtagggcaaacgatacatccgcc

SEQ ID NO: 32457 - DNA, 25 bp, Artificial
  probe
  misc_feature (1)..(25): SEQ ID NO: 3622; WAN0249SJ_at; Start 188; Stop 212
tcagtttactatatttccttttcta

SEQ ID NO: 32458 - DNA, 25 bp, Artificial
  probe
  misc_feature (1)..(25): SEQ ID NO: 3622; WAN0249SJ_at; Start 157; Stop 181
taagcaccaattcatttgtttacat

SEQ ID NO: 32459 - DNA, 25 bp, Artificial
  probe
  misc_feature (1)..(25): SEQ ID NO: 3622; WAN0249SJ_at; Start 145; Stop 169
ggaaatggatgttaagcaccaattc

SEQ ID NO: 32460 - DNA, 25 bp, Artificial
  probe
  misc_feature (1)..(25): SEQ ID NO: 3622; WAN0249SJ_at; Start 19; Stop 43
agtagggcaaacgatacatccgccc

SEQ ID NO: 32461 - DNA, 25 bp, Artificial
  probe
  misc_feature (1)..(25): SEQ ID NO: 3622; WAN0249SJ_at; Start 87; Stop 111
cataattttataatgtgttgaatcc

SEQ ID NO: 32462 - DNA, 25 bp, Artificial
  probe
  misc_feature (1)..(25): SEQ ID NO: 3622; WAN0249SJ_at; Start 60; Stop 84
cgtagccttcttgtgaatgtgtttt

SEQ ID NO: 32463 - DNA, 25 bp, Artificial
  probe
  misc_feature (1)..(25): SEQ ID NO: 3622; WAN0249SJ_at; Start 102; Stop 126
tgttgaatccagaatagtccactgt

SEQ ID NO: 32464 - DNA, 25 bp, Artificial
  probe
  misc_feature (1)..(25): SEQ ID NO: 3622; WAN0249SJ_at; Start 3; Stop 27
taatgtaaccaactttagtagggca

SEQ ID NO: 32465 - DNA, 25 bp, Artificial
  probe
  misc_feature (1)..(25): SEQ ID NO: 3622; WAN0249SJ_at; Start 35; Stop 59
catccgccctcaccttttaaaatgt

SEQ ID NO: 32466 - DNA, 25 bp, Artificial
  probe
  misc_feature (1)..(25): SEQ ID NO: 3622; WAN0249SJ_at; Start 16; Stop 40
tttagtagggcaaacgatacatccg

SEQ ID NO: 32467 - DNA, 25 bp, Artificial
  probe
  misc_feature (1)..(25): SEQ ID NO: 3622; WAN0249SJ_at; Start 160; Stop 184
gcaccaattcatttgtttacatctt

SEQ ID NO: 32468 - DNA, 25 bp, Artificial
  probe
  misc_feature (1)..(25): SEQ ID NO: 3622; WAN0249SJ_at; Start 146; Stop 170
gaaatggatgttaagcaccaattca

SEQ ID NO: 32469 - DNA, 25 bp, Artificial
  probe
  misc_feature (1)..(25): SEQ ID NO: 3622; WAN0249SJ_at; Start 50; Stop 74
tttaaaatgtcgtagccttcttgtg

SEQ ID NO: 32470 - DNA, 25 bp, Artificial
  probe
  misc_feature (1)..(25): SEQ ID NO: 3622; WAN0249SJ_at; Start 52; Stop 76
taaaatgtcgtagccttcttgtgaa

SEQ ID NO: 32471 - DNA, 25 bp, Artificial
  probe
  misc_feature (1)..(25): SEQ ID NO: 3622; WAN0249SJ_at; Start 43; Stop 67
ctcaccttttaaaatgtcgtagcct

SEQ ID NO: 32472 - DNA, 25 bp, Artificial
  probe
  misc_feature (1)..(25): SEQ ID NO: 3622; WAN0249SJ_at; Start 98; Stop 122
aatgtgttgaatccagaatagtcca

SEQ ID NO: 32473 - DNA, 25 bp, Artificial
  probe
  misc_feature (1)..(25): SEQ ID NO: 3622; WAN0249SJ_at; Start 54; Stop 78
aaatgtcgtagccttcttgtgaatg

SEQ ID NO: 32474 - DNA, 25 bp, Artificial
  probe
  misc_feature (1)..(25): SEQ ID NO: 3622; WAN0249SJ_at; Start 17; Stop 41
ttagtagggcaaacgatacatccgc

SEQ ID NO: 32475 - DNA, 25 bp, Artificial
  probe
  misc_feature (1)..(25): SEQ ID NO: 3622; WAN0249SJ_at; Start 15; Stop 39
ctttagtagggcaaacgatacatcc

SEQ ID NO: 32476 - DNA, 25 bp, Artificial
  probe
  misc_feature (1)..(25): SEQ ID NO: 3622; WAN0249SJ_at; Start 31; Stop 55
gatacatccgccctcaccttttaaa

SEQ ID NO: 32477 - DNA, 25 bp, Artificial
  probe
  misc_feature (1)..(25): SEQ ID NO: 4574; WAN0249SK_at; Start 130; Stop 154
tactactaggcaagcaaataagcaa

SEQ ID NO: 32478 - DNA, 25 bp, Artificial
  probe
  misc_feature (1)..(25): SEQ ID NO: 4574; WAN0249SK_at; Start 185; Stop 209
gatagggctctaaaaactgacttct

SEQ ID NO: 32479 - DNA, 25 bp, Artificial
  probe
  misc_feature (1)..(25): SEQ ID NO: 4574; WAN0249SK_at; Start 151; Stop 175
gcaaataaacaaataaacaactaga

SEQ ID NO: 32480 - DNA, 25 bp, Artificial
  probe
  misc_feature (1)..(25): SEQ ID NO: 4574; WAN0249SK_at; Start 191; Stop 215
gctctaaaaactgacttctattcct

SEQ ID NO: 32481 - DNA, 25 bp, Artificial
  probe
  misc_feature (1)..(25): SEQ ID NO: 4574; WAN0249SK_at; Start 80; Stop 104
tgagtacggcaaggcaacgctgacg

SEQ ID NO: 32482 - DNA, 25 bp, Artificial
  probe
  misc_feature (1)..(25): SEQ ID NO: 4574; WAN0249SK_at; Start 136; Stop 160
taggcaagcaaataagcaaataaac

SEQ ID NO: 32483 - DNA, 25 bp, Artificial
  probe
  misc_feature (1)..(25): SEQ ID NO: 4574; WAN0249SK_at; Start 132; Stop 156
ctactaggcaagcaaataagcaaat

SEQ ID NO: 32484 - DNA, 25 bp, Artificial
  probe
  misc_feature (1)..(25): SEQ ID NO: 4574; WAN0249SK_at; Start 79; Stop 103
ttgagtacggcaaggcaacgctgac

SEQ ID NO: 32485 - DNA, 25 bp, Artificial
  probe
  misc_feature (1)..(25): SEQ ID NO: 4574; WAN0249SK_at; Start 82; Stop 106
agtacggcaaggcaacgctgacgtg

SEQ ID NO: 32486 - DNA, 25 bp, Artificial
  probe
  misc_feature (1)..(25): SEQ ID NO: 4574; WAN0249SK_at; Start 168; Stop 192
caactagaatagaaaaagatagggc

SEQ ID NO: 32487 - DNA, 25 bp, Artificial
  probe
  misc_feature (1)..(25): SEQ ID NO: 4574; WAN0249SK_at; Start 213; Stop 237
ccttaaaaacgaaccagcttgactg

SEQ ID NO: 32488 - DNA, 25 bp, Artificial
  probe
  misc_feature (1)..(25): SEQ ID NO: 4574; WAN0249SK_at; Start 187; Stop 211
tagggctctaaaaactgacttctat

SEQ ID NO: 32489 - DNA, 25 bp, Artificial
  probe
  misc_feature (1)..(25): SEQ ID NO: 4574; WAN0249SK_at; Start 193; Stop 217
tctaaaaactgacttctattcctta

SEQ ID NO: 32490 - DNA, 25 bp, Artificial
  probe
  misc_feature (1)..(25): SEQ ID NO: 4574; WAN0249SK_at; Start 223; Stop 247
gaaccagcttgactgattcgtcttc

SEQ ID NO: 32491 - DNA, 25 bp, Artificial
  probe
  misc_feature (1)..(25): SEQ ID NO: 4574; WAN0249SK_at; Start 236; Stop 260
tgattcgtcttcttacgtttatctc

SEQ ID NO: 32492 - DNA, 25 bp, Artificial
  probe
  misc_feature (1)..(25): SEQ ID NO: 4574; WAN0249SK_at; Start 216; Stop 240
taaaaacgaaccagcttgactgatt

SEQ ID NO: 32493 - DNA, 25 bp, Artificial
  probe
  misc_feature (1)..(25): SEQ ID NO: 4574; WAN0249SK_at; Start 140; Stop 164
caagcaaataagcaaataaacaaat

SEQ ID NO: 32494 - DNA, 25 bp, Artificial
  probe
  misc_feature (1)..(25): SEQ ID NO: 4574; WAN0249SK_at; Start 233; Stop 257
gactgattcgtcttcttacgtttat

SEQ ID NO: 32495 - DNA, 25 bp, Artificial
  probe
  misc_feature (1)..(25): SEQ ID NO: 4574; WAN0249SK_at; Start 229; Stop 253
gcttgactgattcgtcttcttacgt

SEQ ID NO: 32496 - DNA, 25 bp, Artificial
  probe
  misc_feature (1)..(25): SEQ ID NO: 4574; WAN0249SK_at; Start 182; Stop 206
aaagatagggctctaaaaactgact

SEQ ID NO: 32497 - DNA, 25 bp, Artificial
  probe
  misc_feature (1)..(25): SEQ ID NO: 4574; WAN0249SK_at; Start 119; Stop 143
taggcttagtatactactaggcaag

SEQ ID NO: 32498 - DNA, 25 bp, Artificial
  probe
  misc_feature (1)..(25): SEQ ID NO: 4574; WAN0249SK_at; Start 106; Stop 130
ggtttgaagagtataggcttagtat

SEQ ID NO: 32499 - DNA, 25 bp, Artificial
  probe
  misc_feature (1)..(25): SEQ ID NO: 4574; WAN0249SK_at; Start 226; Stop 250
ccagcttgactgattcgtcttctta

SEQ ID NO: 32500 - DNA, 25 bp, Artificial
  probe
  misc_feature (1)..(25): SEQ ID NO: 4574; WAN0249SK_at; Start 121; Stop 145
ggcttagtatactactaggcaagca

SEQ ID NO: 32501 - DNA, 25 bp, Artificial
  probe
  misc_feature (1)..(25): SEQ ID NO: 4574; WAN0249SK_at; Start 77; Stop 101
acttgagtacggcaaggcaacgctg

SEQ ID NO: 32502 - DNA, 25 bp, Artificial
  probe
  misc_feature (1)..(25): SEQ ID NO: 4574; WAN0249SK_at; Start 117; Stop 141
tataggcttagtatactactaggca

SEQ ID NO: 32503 - DNA, 25 bp, Artificial
  probe
  misc_feature (1)..(25): SEQ ID NO: 4574; WAN0249SK_at; Start 218; Stop 242
aaaacgaaccagcttgactgattcg

SEQ ID NO: 32504 - DNA, 25 bp, Artificial
  probe
  misc_feature (1)..(25): SEQ ID NO: 4574; WAN0249SK_at; Start 214; Stop 238
cttaaaaacgaaccagcttgactga

SEQ ID NO: 32505 - DNA, 25 bp, Artificial
  probe
  misc_feature (1)..(25): SEQ ID NO: 4574; WAN0249SK_at; Start 128; Stop 152
tatactactaggcaagcaaataagc

SEQ ID NO: 32506 - DNA, 25 bp, Artificial
  probe
  misc_feature (1)..(25): SEQ ID NO: 4574; WAN0249SK_at; Start 189; Stop 213
gggctctaaaaactgacttctattc

SEQ ID NO: 32507 - DNA, 25 bp, Artificial
  probe
  misc_feature (1)..(25): SEQ ID NO: 4574; WAN0249SK_at; Start 125; Stop 149
tagtatactactaggcaagcaaata

SEQ ID NO: 32508 - DNA, 25 bp, Artificial
  probe
  misc_feature (1)..(25): SEQ ID NO: 4574; WAN0249SK_at; Start 74; Stop 98
tgtacttgagtacggcaaggcaacg

SEQ ID NO: 32509 - DNA, 25 bp, Artificial
  probe
  misc_feature (1)..(25): SEQ ID NO: 4574; WAN0249SK_at; Start 171; Stop 195
ctagaatagaaaaagatagggctct

SEQ ID NO: 32510 - DNA, 25 bp, Artificial
  probe
  misc_feature (1)..(25): SEQ ID NO: 4574; WAN0249SK_at; Start 174; Stop 198
gaatagaaaaagatagggctctaaa

SEQ ID NO: 32511 - DNA, 25 bp, Artificial
  probe
  misc_feature (1)..(25): SEQ ID NO: 3753; WAN0249SL_at; Start 57; Stop 81
cataagtgctaaacttaggagtcac

SEQ ID NO: 32512 - DNA, 25 bp, Artificial
  probe
  misc_feature (1)..(25): SEQ ID NO: 3753; WAN0249SL_at; Start 47; Stop 71
tattataccacataagtgctaaact

SEQ ID NO: 32513 - DNA, 25 bp, Artificial
  probe
  misc_feature (1)..(25): SEQ ID NO: 3753; WAN0249SL_at; Start 40; Stop 64
cgtataatattataccacataagtg

SEQ ID NO: 32514 - DNA, 25 bp, Artificial
  probe
  misc_feature (1)..(25): SEQ ID NO: 3753; WAN0249SL_at; Start 88; Stop 112
aggtggcttttttgtttgtggcttg

SEQ ID NO: 32515 - DNA, 25 bp, Artificial
  probe
  misc_feature (1)..(25): SEQ ID NO: 3753; WAN0249SL_at; Start 1; Stop 25
gggctatctcacctcctttcgtagg

SEQ ID NO: 32516 - DNA, 25 bp, Artificial
  probe
  misc_feature (1)..(25): SEQ ID NO: 3753; WAN0249SL_at; Start 44; Stop 68
taatattataccacataagtgctaa

SEQ ID NO: 32517 - DNA, 25 bp, Artificial
  probe
  misc_feature (1)..(25): SEQ ID NO: 3753; WAN0249SL_at; Start 42; Stop 66
tataatattataccacataagtgct

SEQ ID NO: 32518 - DNA, 25 bp, Artificial
  probe
  misc_feature (1)..(25): SEQ ID NO: 3753; WAN0249SL_at; Start 63; Stop 87
tgctaaacttaggagtcacccaatc

SEQ ID NO: 32519 - DNA, 25 bp, Artificial
  probe
  misc_feature (1)..(25): SEQ ID NO: 3753; WAN0249SL_at; Start 53; Stop 77
accacataagtgctaaacttaggag

SEQ ID NO: 32520 - DNA, 25 bp, Artificial
  probe
  misc_feature (1)..(25): SEQ ID NO: 3753; WAN0249SL_at; Start 8; Stop 32
ctcacctcctttcgtaggcggtgta

SEQ ID NO: 32521 - DNA, 25 bp, Artificial
  probe
  misc_feature (1)..(25): SEQ ID NO: 3753; WAN0249SL_at; Start 61; Stop 85
agtgctaaacttaggagtcacccaa

SEQ ID NO: 32522 - DNA, 25 bp, Artificial
  probe
  misc_feature (1)..(25): SEQ ID NO: 3753; WAN0249SL_at; Start 52; Stop 76
taccacataagtgctaaacttagga

SEQ ID NO: 32523 - DNA, 25 bp, Artificial
  probe
  misc_feature (1)..(25): SEQ ID NO: 3753; WAN0249SL_at; Start 50; Stop 74
tataccacataagtgctaaacttag

SEQ ID NO: 32524 - DNA, 25 bp, Artificial
  probe
  misc_feature (1)..(25): SEQ ID NO: 3753; WAN0249SL_at; Start 68; Stop 92
aacttaggagtcacccaatcaggtg

SEQ ID NO: 32525 - DNA, 25 bp, Artificial
  probe
  misc_feature (1)..(25): SEQ ID NO: 3753; WAN0249SL_at; Start 87; Stop 111
caggtggcttttttgtttgtggctt

SEQ ID NO: 32526 - DNA, 25 bp, Artificial
  probe
  misc_feature (1)..(25): SEQ ID NO: 3753; WAN0249SL_at; Start 54; Stop 78
ccacataagtgctaaacttaggagt

SEQ ID NO: 32527 - DNA, 25 bp, Artificial
  probe
  misc_feature (1)..(25): SEQ ID NO: 3753; WAN0249SL_at; Start 59; Stop 83
taagtgctaaacttaggagtcaccc

SEQ ID NO: 32528 - DNA, 25 bp, Artificial
  probe
  misc_feature (1)..(25): SEQ ID NO: 3753; WAN0249SL_at; Start 4; Stop 28
ctatctcacctcctttcgtaggcgg

SEQ ID NO: 32529 - DNA, 25 bp, Artificial
  probe
  misc_feature (1)..(25): SEQ ID NO: 3753; WAN0249SL_at; Start 7; Stop 31
tctcacctcctttcgtaggcggtgt

SEQ ID NO: 32530 - DNA, 25 bp, Artificial
  probe
  misc_feature (1)..(25): SEQ ID NO: 3753; WAN0249SL_at; Start 6; Stop 30
atctcacctcctttcgtaggcggtg

SEQ ID NO: 32531 - DNA, 25 bp, Artificial
  probe
  misc_feature (1)..(25): SEQ ID NO: 3753; WAN0249SL_at; Start 67; Stop 91
aaacttaggagtcacccaatcaggt

SEQ ID NO: 32532 - DNA, 25 bp, Artificial
  probe
  misc_feature (1)..(25): SEQ ID NO: 3753; WAN0249SL_at; Start 62; Stop 86
gtgctaaacttaggagtcacccaat

SEQ ID NO: 32533 - DNA, 25 bp, Artificial
  probe
  misc_feature (1)..(25): SEQ ID NO: 3753; WAN0249SL_at; Start 9; Stop 33
tcacctcctttcgtaggcggtgtag

SEQ ID NO: 32534 - DNA, 25 bp, Artificial
  probe
  misc_feature (1)..(25): SEQ ID NO: 3753; WAN0249SL_at; Start 69; Stop 93
acttaggagtcacccaatcaggtgg

SEQ ID NO: 32535 - DNA, 25 bp, Artificial
  probe
  misc_feature (1)..(25): SEQ ID NO: 3753; WAN0249SL_at; Start 65; Stop 89
ctaaacttaggagtcacccaatcag

SEQ ID NO: 32536 - DNA, 25 bp, Artificial
  probe
  misc_feature (1)..(25): SEQ ID NO: 3753; WAN0249SL_at; Start 2; Stop 26
ggctatctcacctcctttcgtaggc

SEQ ID NO: 32537 - DNA, 25 bp, Artificial
  probe
  misc_feature (1)..(25): SEQ ID NO: 3753; WAN0249SL_at; Start 55; Stop 79
cacataagtgctaaacttaggagtc

SEQ ID NO: 32538 - DNA, 25 bp, Artificial
  probe
  misc_feature (1)..(25): SEQ ID NO: 3753; WAN0249SL_at; Start 66; Stop 90
taaacttaggagtcacccaatcagg

SEQ ID NO: 32539 - DNA, 25 bp, Artificial
  probe
  misc_feature (1)..(25): SEQ ID NO: 3753; WAN0249SL_at; Start 64; Stop 88
gctaaacttaggagtcacccaatca

SEQ ID NO: 32540 - DNA, 25 bp, Artificial
  probe
  misc_feature (1)..(25): SEQ ID NO: 3753; WAN0249SL_at; Start 58; Stop 82
ataagtgctaaacttaggagtcacc

SEQ ID NO: 32541 - DNA, 25 bp, Artificial
  probe
  misc_feature (1)..(25): SEQ ID NO: 3753; WAN0249SL_at; Start 3; Stop 27
gctatctcacctcctttcgtaggcg

SEQ ID NO: 32542 - DNA, 25 bp, Artificial
  probe
  misc_feature (1)..(25): SEQ ID NO: 3753; WAN0249SL_at; Start 60; Stop 84
aagtgctaaacttaggagtcaccca

SEQ ID NO: 32543 - DNA, 25 bp, Artificial
  probe
  misc_feature (1)..(25): SEQ ID NO: 3753; WAN0249SL_at; Start 5; Stop 29
tatctcacctcctttcgtaggcggt

SEQ ID NO: 32544 - DNA, 25 bp, Artificial
  probe
  misc_feature (1)..(25): SEQ ID NO: 3753; WAN0249SL_at; Start 51; Stop 75
ataccacataagtgctaaacttagg

SEQ ID NO: 32545 - DNA, 25 bp, Artificial
  probe
  misc_feature (1)..(25): SEQ ID NO: 3188; WAN0249SM_at; Start 30; Stop 54
aaggatggtctagtattatatagtc

SEQ ID NO: 32546 - DNA, 25 bp, Artificial
  probe
  misc_feature (1)..(25): SEQ ID NO: 3188; WAN0249SM_at; Start 25; Stop 49
aatttaaggatggtctagtattata

SEQ ID NO: 32547 - DNA, 25 bp, Artificial
  probe
  misc_feature (1)..(25): SEQ ID NO: 3188; WAN0249SM_at; Start 20; Stop 44
agcaaaatttaaggatggtctagta

SEQ ID NO: 32548 - DNA, 25 bp, Artificial
  probe
  misc_feature (1)..(25): SEQ ID NO: 3188; WAN0249SM_at; Start 43; Stop 67
tattatatagtcattaaataaagac

SEQ ID NO: 32549 - DNA, 25 bp, Artificial
  probe
  misc_feature (1)..(25): SEQ ID NO: 3188; WAN0249SM_at; Start 36; Stop 60
ggtctagtattatatagtcattaaa

SEQ ID NO: 32550 - DNA, 25 bp, Artificial
  probe
  misc_feature (1)..(25): SEQ ID NO: 3188; WAN0249SM_at; Start 155; Stop 179
gaggtgctggtgatagaaatttttt

SEQ ID NO: 32551 - DNA, 25 bp, Artificial
  probe
  misc_feature (1)..(25): SEQ ID NO: 3188; WAN0249SM_at; Start 19; Stop 43
aagcaaaatttaaggatggtctagt

SEQ ID NO: 32552 - DNA, 25 bp, Artificial
  probe
  misc_feature (1)..(25): SEQ ID NO: 3188; WAN0249SM_at; Start 15; Stop 39
tcttaagcaaaatttaaggatggtc

SEQ ID NO: 32553 - DNA, 25 bp, Artificial
  probe
  misc_feature (1)..(25): SEQ ID NO: 3188; WAN0249SM_at; Start 153; Stop 177
gtgaggtgctggtgatagaaatttt

SEQ ID NO: 32554 - DNA, 25 bp, Artificial
  probe
  misc_feature (1)..(25): SEQ ID NO: 3188; WAN0249SM_at; Start 32; Stop 56
ggatggtctagtattatatagtcat

SEQ ID NO: 32555 - DNA, 25 bp, Artificial
  probe
  misc_feature (1)..(25): SEQ ID NO: 3188; WAN0249SM_at; Start 140; Stop 164
gcttttttgcgtggtgaggtgctgg

SEQ ID NO: 32556 - DNA, 25 bp, Artificial
  probe
  misc_feature (1)..(25): SEQ ID NO: 3188; WAN0249SM_at; Start 91; Stop 115
cctaaacttttttcatcacaatctc

SEQ ID NO: 32557 - DNA, 25 bp, Artificial
  probe
  misc_feature (1)..(25): SEQ ID NO: 3188; WAN0249SM_at; Start 157; Stop 181
ggtgctggtgatagaaattttttgc

SEQ ID NO: 32558 - DNA, 25 bp, Artificial
  probe
  misc_feature (1)..(25): SEQ ID NO: 3188; WAN0249SM_at; Start 33; Stop 57
gatggtctagtattatatagtcatt

SEQ ID NO: 32559 - DNA, 25 bp, Artificial
  probe
  misc_feature (1)..(25): SEQ ID NO: 3188; WAN0249SM_at; Start 159; Stop 183
tgctggtgatagaaattttttgcaa

SEQ ID NO: 32560 - DNA, 25 bp, Artificial
  probe
  misc_feature (1)..(25): SEQ ID NO: 3188; WAN0249SM_at; Start 141; Stop 165
cttttttgcgtggtgaggtgctggt

SEQ ID NO: 32561 - DNA, 25 bp, Artificial
  probe
  misc_feature (1)..(25): SEQ ID NO: 3188; WAN0249SM_at; Start 17; Stop 41
ttaagcaaaatttaaggatggtcta

SEQ ID NO: 32562 - DNA, 25 bp, Artificial
  probe
  misc_feature (1)..(25): SEQ ID NO: 3188; WAN0249SM_at; Start 92; Stop 116
ctaaacttttttcatcacaatctcc

SEQ ID NO: 32563 - DNA, 25 bp, Artificial
  probe
  misc_feature (1)..(25): SEQ ID NO: 3188; WAN0249SM_at; Start 145; Stop 169
tttgcgtggtgaggtgctggtgata

SEQ ID NO: 32564 - DNA, 25 bp, Artificial
  probe
  misc_feature (1)..(25): SEQ ID NO: 3188; WAN0249SM_at; Start 18; Stop 42
taagcaaaatttaaggatggtctag

SEQ ID NO: 32565 - DNA, 25 bp, Artificial
  probe
  misc_feature (1)..(25): SEQ ID NO: 3188; WAN0249SM_at; Start 138; Stop 162
tggcttttttgcgtggtgaggtgct

SEQ ID NO: 32566 - DNA, 25 bp, Artificial
  probe
  misc_feature (1)..(25): SEQ ID NO: 3188; WAN0249SM_at; Start 22; Stop 46
caaaatttaaggatggtctagtatt

SEQ ID NO: 32567 - DNA, 25 bp, Artificial
  probe
  misc_feature (1)..(25): SEQ ID NO: 3188; WAN0249SM_at; Start 16; Stop 40
cttaagcaaaatttaaggatggtct

SEQ ID NO: 32568 - DNA, 25 bp, Artificial
  probe
  misc_feature (1)..(25): SEQ ID NO: 3188; WAN0249SM_at; Start 21; Stop 45
gcaaaatttaaggatggtctagtat

SEQ ID NO: 32569 - DNA, 25 bp, Artificial
  probe
  misc_feature (1)..(25): SEQ ID NO: 3188; WAN0249SM_at; Start 29; Stop 53
taaggatggtctagtattatatagt

SEQ ID NO: 32570 - DNA, 25 bp, Artificial
  probe
  misc_feature (1)..(25): SEQ ID NO: 3188; WAN0249SM_at; Start 143; Stop 167
tttttgcgtggtgaggtgctggtga

SEQ ID NO: 32571 - DNA, 25 bp, Artificial
  probe
  misc_feature (1)..(25): SEQ ID NO: 3188; WAN0249SM_at; Start 158; Stop 182
gtgctggtgatagaaattttttgca

SEQ ID NO: 32572 - DNA, 25 bp, Artificial
  probe
  misc_feature (1)..(25): SEQ ID NO: 3188; WAN0249SM_at; Start 149; Stop 173
cgtggtgaggtgctggtgatagaaa

SEQ ID NO: 32573 - DNA, 25 bp, Artificial
  probe
  misc_feature (1)..(25): SEQ ID NO: 3188; WAN0249SM_at; Start 136; Stop 160
ggtggcttttttgcgtggtgaggtg

SEQ ID NO: 32574 - DNA, 25 bp, Artificial
  probe
  misc_feature (1)..(25): SEQ ID NO: 3188; WAN0249SM_at; Start 154; Stop 178
tgaggtgctggtgatagaaattttt

SEQ ID NO: 32575 - DNA, 25 bp, Artificial
  probe
  misc_feature (1)..(25): SEQ ID NO: 3188; WAN0249SM_at; Start 160; Stop 184
gctggtgatagaaattttttgcaaa

SEQ ID NO: 32576 - DNA, 25 bp, Artificial
  probe
  misc_feature (1)..(25): SEQ ID NO: 3188; WAN0249SM_at; Start 31; Stop 55
aggatggtctagtattatatagtca

SEQ ID NO: 32577 - DNA, 25 bp, Artificial
  probe
  misc_feature (1)..(25): SEQ ID NO: 3188; WAN0249SM_at; Start 166; Stop 190
gatagaaattttttgcaaaatagta

SEQ ID NO: 32578 - DNA, 25 bp, Artificial
  probe
  misc_feature (1)..(25): SEQ ID NO: 3188; WAN0249SM_at; Start 163; Stop 187
ggtgatagaaattttttgcaaaata

SEQ ID NO: 32579 - DNA, 25 bp, Artificial
  probe
  misc_feature (1)..(25): SEQ ID NO: 404; WAN0249SN_at; Start 13; Stop 37
gtggatgatttcttcacgagtatga

SEQ ID NO: 32580 - DNA, 25 bp, Artificial
  probe
  misc_feature (1)..(25): SEQ ID NO: 404; WAN0249SN_at; Start 202; Stop 226
gaggatccctttagggatagtggta

SEQ ID NO: 32581 - DNA, 25 bp, Artificial
  probe
  misc_feature (1)..(25): SEQ ID NO: 404; WAN0249SN_at; Start 159; Stop 183
tcaatctactatagcactagataaa

SEQ ID NO: 32582 - DNA, 25 bp, Artificial
  probe
  misc_feature (1)..(25): SEQ ID NO: 404; WAN0249SN_at; Start 44; Stop 68
gagaactagtaaagcatgatatata

SEQ ID NO: 32583 - DNA, 25 bp, Artificial
  probe
  misc_feature (1)..(25): SEQ ID NO: 404; WAN0249SN_at; Start 41; Stop 65
tttgagaactagtaaagcatgatat

SEQ ID NO: 32584 - DNA, 25 bp, Artificial
  probe
  misc_feature (1)..(25): SEQ ID NO: 404; WAN0249SN_at; Start 16; Stop 40
gatgatttcttcacgagtatgaaaa

SEQ ID NO: 32585 - DNA, 25 bp, Artificial
  probe
  misc_feature (1)..(25): SEQ ID NO: 404; WAN0249SN_at; Start 10; Stop 34
ccagtggatgatttcttcacgagta

SEQ ID NO: 32586 - DNA, 25 bp, Artificial
  probe
  misc_feature (1)..(25): SEQ ID NO: 404; WAN0249SN_at; Start 38; Stop 62
aaatttgagaactagtaaagcatga

SEQ ID NO: 32587 - DNA, 25 bp, Artificial
  probe
  misc_feature (1)..(25): SEQ ID NO: 404; WAN0249SN_at; Start 26; Stop 50
tcacgagtatgaaaatttgagaact

SEQ ID NO: 32588 - DNA, 25 bp, Artificial
  probe
  misc_feature (1)..(25): SEQ ID NO: 404; WAN0249SN_at; Start 27; Stop 51
cacgagtatgaaaatttgagaacta

SEQ ID NO: 32589 - DNA, 25 bp, Artificial
  probe
  misc_feature (1)..(25): SEQ ID NO: 404; WAN0249SN_at; Start 11; Stop 35
cagtggatgatttcttcacgagtat

SEQ ID NO: 32590 - DNA, 25 bp, Artificial
  probe
  misc_feature (1)..(25): SEQ ID NO: 404; WAN0249SN_at; Start 194; Stop 218
aagaatatgaggatccctttaggga

SEQ ID NO: 32591 - DNA, 25 bp, Artificial
  probe
  misc_feature (1)..(25): SEQ ID NO: 404; WAN0249SN_at; Start 220; Stop 244
agtggtaagtaataccaaagtctct

SEQ ID NO: 32592 - DNA, 25 bp, Artificial
  probe
  misc_feature (1)..(25): SEQ ID NO: 404; WAN0249SN_at; Start 9; Stop 33
tccagtggatgatttcttcacgagt

SEQ ID NO: 32593 - DNA, 25 bp, Artificial
  probe
  misc_feature (1)..(25): SEQ ID NO: 404; WAN0249SN_at; Start 6; Stop 30
ttatccagtggatgatttcttcacg

SEQ ID NO: 32594 - DNA, 25 bp, Artificial
  probe
  misc_feature (1)..(25): SEQ ID NO: 404; WAN0249SN_at; Start 188; Stop 212
gtgtaaaagaatatgaggatccctt

SEQ ID NO: 32595 - DNA, 25 bp, Artificial
  probe
  misc_feature (1)..(25): SEQ ID NO: 404; WAN0249SN_at; Start 192; Stop 216
aaaagaatatgaggatccctttagg

SEQ ID NO: 32596 - DNA, 25 bp, Artificial
  probe
  misc_feature (1)..(25): SEQ ID NO: 404; WAN0249SN_at; Start 164; Stop 188
ctactatagcactagataaattgag

SEQ ID NO: 32597 - DNA, 25 bp, Artificial
  probe
  misc_feature (1)..(25): SEQ ID NO: 404; WAN0249SN_at; Start 49; Stop 73
ctagtaaagcatgatatatagtaaa

SEQ ID NO: 32598 - DNA, 25 bp, Artificial
  probe
  misc_feature (1)..(25): SEQ ID NO: 404; WAN0249SN_at; Start 29; Stop 53
cgagtatgaaaatttgagaactagt

SEQ ID NO: 32599 - DNA, 25 bp, Artificial
  probe
  misc_feature (1)..(25): SEQ ID NO: 404; WAN0249SN_at; Start 186; Stop 210
gagtgtaaaagaatatgaggatccc

SEQ ID NO: 32600 - DNA, 25 bp, Artificial
  probe
  misc_feature (1)..(25): SEQ ID NO: 404; WAN0249SN_at; Start 23; Stop 47
tcttcacgagtatgaaaatttgaga

SEQ ID NO: 32601 - DNA, 25 bp, Artificial
  probe
  misc_feature (1)..(25): SEQ ID NO: 404; WAN0249SN_at; Start 22; Stop 46
ttcttcacgagtatgaaaatttgag

SEQ ID NO: 32602 - DNA, 25 bp, Artificial
  probe
  misc_feature (1)..(25): SEQ ID NO: 404; WAN0249SN_at; Start 36; Stop 60
gaaaatttgagaactagtaaagcat

SEQ ID NO: 32603 - DNA, 25 bp, Artificial
  probe
  misc_feature (1)..(25): SEQ ID NO: 404; WAN0249SN_at; Start 7; Stop 31
tatccagtggatgatttcttcacga

SEQ ID NO: 32604 - DNA, 25 bp, Artificial
  probe
  misc_feature (1)..(25): SEQ ID NO: 404; WAN0249SN_at; Start 53; Stop 77
taaagcatgatatatagtaaaatga

SEQ ID NO: 32605 - DNA, 25 bp, Artificial
  probe
  misc_feature (1)..(25): SEQ ID NO: 404; WAN0249SN_at; Start 167; Stop 191
ctatagcactagataaattgagtgt

SEQ ID NO: 32606 - DNA, 25 bp, Artificial
  probe
  misc_feature (1)..(25): SEQ ID NO: 404; WAN0249SN_at; Start 213; Stop 237
tagggatagtggtaagtaataccaa

SEQ ID NO: 32607 - DNA, 25 bp, Artificial
  probe
  misc_feature (1)..(25): SEQ ID NO: 404; WAN0249SN_at; Start 189; Stop 213
tgtaaaagaatatgaggatcccttt

SEQ ID NO: 32608 - DNA, 25 bp, Artificial
  probe
  misc_feature (1)..(25): SEQ ID NO: 404; WAN0249SN_at; Start 219; Stop 243
tagtggtaagtaataccaaagtctc

SEQ ID NO: 32609 - DNA, 25 bp, Artificial
  probe
  misc_feature (1)..(25): SEQ ID NO: 404; WAN0249SN_at; Start 172; Stop 196
gcactagataaattgagtgtaaaag

SEQ ID NO: 32610 - DNA, 25 bp, Artificial
  probe
  misc_feature (1)..(25): SEQ ID NO: 404; WAN0249SN_at; Start 199; Stop 223
tatgaggatccctttagggatagtg

SEQ ID NO: 32611 - DNA, 25 bp, Artificial
  probe
  misc_feature (1)..(25): SEQ ID NO: 404; WAN0249SN_at; Start 15; Stop 39
ggatgatttcttcacgagtatgaaa

SEQ ID NO: 32612 - DNA, 25 bp, Artificial
  probe
  misc_feature (1)..(25): SEQ ID NO: 404; WAN0249SN_at; Start 196; Stop 220
gaatatgaggatccctttagggata

SEQ ID NO: 32613 - DNA, 25 bp, Artificial
  probe
  misc_feature (1)..(25): SEQ ID NO: 494; WAN0249SO_at; Start 15; Stop 39
ggaatgctacactataacttataaa

SEQ ID NO: 32614 - DNA, 25 bp, Artificial
  probe
  misc_feature (1)..(25): SEQ ID NO: 494; WAN0249SO_at; Start 3; Stop 27
tgctttgaagttggaatgctacact

SEQ ID NO: 32615 - DNA, 25 bp, Artificial
  probe
  misc_feature (1)..(25): SEQ ID NO: 494; WAN0249SO_at; Start 12; Stop 36
gttggaatgctacactataacttat

SEQ ID NO: 32616 - DNA, 25 bp, Artificial
  probe
  misc_feature (1)..(25): SEQ ID NO: 494; WAN0249SO_at; Start 8; Stop 32
tgaagttggaatgctacactataac

SEQ ID NO: 32617 - DNA, 25 bp, Artificial
  probe
  misc_feature (1)..(25): SEQ ID NO: 494; WAN0249SO_at; Start 5; Stop 29
ctttgaagttggaatgctacactat

SEQ ID NO: 32618 - DNA, 25 bp, Artificial
  probe
  misc_feature (1)..(25): SEQ ID NO: 494; WAN0249SO_at; Start 16; Stop 40
gaatgctacactataacttataaaa

SEQ ID NO: 32619 - DNA, 25 bp, Artificial
  probe
  misc_feature (1)..(25): SEQ ID NO: 494; WAN0249SO_at; Start 19; Stop 43
tgctacactataacttataaaatat

SEQ ID NO: 32620 - DNA, 25 bp, Artificial
  probe
  misc_feature (1)..(25): SEQ ID NO: 494; WAN0249SO_at; Start 17; Stop 41
aatgctacactataacttataaaat

SEQ ID NO: 32621 - DNA, 25 bp, Artificial
  probe
  misc_feature (1)..(25): SEQ ID NO: 494; WAN0249SO_at; Start 22; Stop 46
tacactataacttataaaatatagt

SEQ ID NO: 32622 - DNA, 25 bp, Artificial
  probe
  misc_feature (1)..(25): SEQ ID NO: 494; WAN0249SO_at; Start 10; Stop 34
aagttggaatgctacactataactt

SEQ ID NO: 32623 - DNA, 25 bp, Artificial
  probe
  misc_feature (1)..(25): SEQ ID NO: 494; WAN0249SO_at; Start 18; Stop 42
atgctacactataacttataaaata

SEQ ID NO: 32624 - DNA, 25 bp, Artificial
  probe
  misc_feature (1)..(25): SEQ ID NO: 494; WAN0249SO_at; Start 9; Stop 33
gaagttggaatgctacactataact

SEQ ID NO: 32625 - DNA, 25 bp, Artificial
  probe
  misc_feature (1)..(25): SEQ ID NO: 494; WAN0249SO_at; Start 13; Stop 37
ttggaatgctacactataacttata

SEQ ID NO: 32626 - DNA, 25 bp, Artificial
  probe
  misc_feature (1)..(25): SEQ ID NO: 494; WAN0249SO_at; Start 7; Stop 31
ttgaagttggaatgctacactataa

SEQ ID NO: 32627 - DNA, 25 bp, Artificial
  probe
  misc_feature (1)..(25): SEQ ID NO: 494; WAN0249SO_at; Start 14; Stop 38
tggaatgctacactataacttataa

SEQ ID NO: 32628 - DNA, 25 bp, Artificial
  probe
  misc_feature (1)..(25): SEQ ID NO: 494; WAN0249SO_at; Start 6; Stop 30
tttgaagttggaatgctacactata

SEQ ID NO: 32629 - DNA, 25 bp, Artificial
  probe
  misc_feature (1)..(25): SEQ ID NO: 494; WAN0249SO_at; Start 11; Stop 35
agttggaatgctacactataactta

SEQ ID NO: 32630 - DNA, 25 bp, Artificial
  probe
  misc_feature (1)..(25): SEQ ID NO: 494; WAN0249SO_at; Start 20; Stop 44
gctacactataacttataaaatata

SEQ ID NO: 32631 - DNA, 25 bp, Artificial
  probe
  misc_feature (1)..(25): SEQ ID NO: 494; WAN0249SO_at; Start 21; Stop 45
ctacactataacttataaaatatag

SEQ ID NO: 32632 - DNA, 25 bp, Artificial
  probe
  misc_feature (1)..(25): SEQ ID NO: 494; WAN0249SO_at; Start 2; Stop 26
gtgctttgaagttggaatgctacac

SEQ ID NO: 32633 - DNA, 25 bp, Artificial
  probe
  misc_feature (1)..(25): SEQ ID NO: 494; WAN0249SO_at; Start 4; Stop 28
gctttgaagttggaatgctacacta

SEQ ID NO: 32634 - DNA, 25 bp, Artificial
  probe
  misc_feature (1)..(25): SEQ ID NO: 494; WAN0249SO_at; Start 1; Stop 25
agtgctttgaagttggaatgctaca

SEQ ID NO: 32635 - DNA, 25 bp, Artificial
  probe
  misc_feature (1)..(25): SEQ ID NO: 3286; WAN0249SP_at; Start 21; Stop 45
ctagaccgatatagtccaaagtgat

SEQ ID NO: 32636 - DNA, 25 bp, Artificial
  probe
  misc_feature (1)..(25): SEQ ID NO: 3286; WAN0249SP_at; Start 31; Stop 55
atagtccaaagtgatatagtaaaat

SEQ ID NO: 32637 - DNA, 25 bp, Artificial
  probe
  misc_feature (1)..(25): SEQ ID NO: 3286; WAN0249SP_at; Start 7; Stop 31
tcgttgagacataactagaccgata

SEQ ID NO: 32638 - DNA, 25 bp, Artificial
  probe
  misc_feature (1)..(25): SEQ ID NO: 3286; WAN0249SP_at; Start 23; Stop 47
agaccgatatagtccaaagtgatat

SEQ ID NO: 32639 - DNA, 25 bp, Artificial
  probe
  misc_feature (1)..(25): SEQ ID NO: 3286; WAN0249SP_at; Start 4; Stop 28
taatcgttgagacataactagaccg

SEQ ID NO: 32640 - DNA, 25 bp, Artificial
  probe
  misc_feature (1)..(25): SEQ ID NO: 3286; WAN0249SP_at; Start 14; Stop 38
gacataactagaccgatatagtcca

SEQ ID NO: 32641 - DNA, 25 bp, Artificial
  probe
  misc_feature (1)..(25): SEQ ID NO: 3286; WAN0249SP_at; Start 28; Stop 52
gatatagtccaaagtgatatagtaa

SEQ ID NO: 32642 - DNA, 25 bp, Artificial
  probe
  misc_feature (1)..(25): SEQ ID NO: 3286; WAN0249SP_at; Start 13; Stop 37
agacataactagaccgatatagtcc

SEQ ID NO: 32643 - DNA, 25 bp, Artificial
  probe
  misc_feature (1)..(25): SEQ ID NO: 3286; WAN0249SP_at; Start 12; Stop 36
gagacataactagaccgatatagtc

SEQ ID NO: 32644 - DNA, 25 bp, Artificial
  probe
  misc_feature (1)..(25): SEQ ID NO: 3286; WAN0249SP_at; Start 20; Stop 44
actagaccgatatagtccaaagtga

SEQ ID NO: 32645 - DNA, 25 bp, Artificial
  probe
  misc_feature (1)..(25): SEQ ID NO: 3286; WAN0249SP_at; Start 5; Stop 29
aatcgttgagacataactagaccga

SEQ ID NO: 32646 - DNA, 25 bp, Artificial
  probe
  misc_feature (1)..(25): SEQ ID NO: 3286; WAN0249SP_at; Start 8; Stop 32
cgttgagacataactagaccgatat

SEQ ID NO: 32647 - DNA, 25 bp, Artificial
  probe
  misc_feature (1)..(25): SEQ ID NO: 3286; WAN0249SP_at; Start 33; Stop 57
agtccaaagtgatatagtaaaatga

SEQ ID NO: 32648 - DNA, 25 bp, Artificial
  probe
  misc_feature (1)..(25): SEQ ID NO: 3286; WAN0249SP_at; Start 18; Stop 42
taactagaccgatatagtccaaagt

SEQ ID NO: 32649 - DNA, 25 bp, Artificial
  probe
  misc_feature (1)..(25): SEQ ID NO: 3286; WAN0249SP_at; Start 9; Stop 33
gttgagacataactagaccgatata

SEQ ID NO: 32650 - DNA, 25 bp, Artificial
  probe
  misc_feature (1)..(25): SEQ ID NO: 3286; WAN0249SP_at; Start 17; Stop 41
ataactagaccgatatagtccaaag

SEQ ID NO: 32651 - DNA, 25 bp, Artificial
  probe
  misc_feature (1)..(25): SEQ ID NO: 3286; WAN0249SP_at; Start 26; Stop 50
ccgatatagtccaaagtgatatagt

SEQ ID NO: 32652 - DNA, 25 bp, Artificial
  probe
  misc_feature (1)..(25): SEQ ID NO: 3286; WAN0249SP_at; Start 22; Stop 46
tagaccgatatagtccaaagtgata

SEQ ID NO: 32653 - DNA, 25 bp, Artificial
  probe
  misc_feature (1)..(25): SEQ ID NO: 3286; WAN0249SP_at; Start 15; Stop 39
acataactagaccgatatagtccaa

SEQ ID NO: 32654 - DNA, 25 bp, Artificial
  probe
  misc_feature (1)..(25): SEQ ID NO: 3286; WAN0249SP_at; Start 30; Stop 54
tatagtccaaagtgatatagtaaaa

SEQ ID NO: 32655 - DNA, 25 bp, Artificial
  probe
  misc_feature (1)..(25): SEQ ID NO: 3286; WAN0249SP_at; Start 24; Stop 48
gaccgatatagtccaaagtgatata

SEQ ID NO: 32656 - DNA, 25 bp, Artificial
  probe
  misc_feature (1)..(25): SEQ ID NO: 3286; WAN0249SP_at; Start 11; Stop 35
tgagacataactagaccgatatagt

SEQ ID NO: 32657 - DNA, 25 bp, Artificial
  probe
  misc_feature (1)..(25): SEQ ID NO: 3286; WAN0249SP_at; Start 10; Stop 34
ttgagacataactagaccgatatag

SEQ ID NO: 32658 - DNA, 25 bp, Artificial
  probe
  misc_feature (1)..(25): SEQ ID NO: 3286; WAN0249SP_at; Start 16; Stop 40
cataactagaccgatatagtccaaa

SEQ ID NO: 32659 - DNA, 25 bp, Artificial
  probe
  misc_feature (1)..(25): SEQ ID NO: 3286; WAN0249SP_at; Start 19; Stop 43
aactagaccgatatagtccaaagtg

SEQ ID NO: 32660 - DNA, 25 bp, Artificial
  probe
  misc_feature (1)..(25): SEQ ID NO: 3286; WAN0249SP_at; Start 27; Stop 51
cgatatagtccaaagtgatatagta

SEQ ID NO: 32661 - DNA, 25 bp, Artificial
  probe
  misc_feature (1)..(25): SEQ ID NO: 3286; WAN0249SP_at; Start 32; Stop 56
tagtccaaagtgatatagtaaaatg

SEQ ID NO: 32662 - DNA, 25 bp, Artificial
  probe
  misc_feature (1)..(25): SEQ ID NO: 3286; WAN0249SP_at; Start 6; Stop 30
atcgttgagacataactagaccgat

SEQ ID NO: 32663 - DNA, 25 bp, Artificial
  probe
  misc_feature (1)..(25): SEQ ID NO: 3286; WAN0249SP_at; Start 3; Stop 27
ataatcgttgagacataactagacc

SEQ ID NO: 32664 - DNA, 25 bp, Artificial
  probe
  misc_feature (1)..(25): SEQ ID NO: 3286; WAN0249SP_at; Start 2; Stop 26
tataatcgttgagacataactagac

SEQ ID NO: 32665 - DNA, 25 bp, Artificial
  probe
  misc_feature (1)..(25): SEQ ID NO: 3286; WAN0249SP_at; Start 29; Stop 53
atatagtccaaagtgatatagtaaa

SEQ ID NO: 32666 - DNA, 25 bp, Artificial
  probe
  misc_feature (1)..(25): SEQ ID NO: 3286; WAN0249SP_at; Start 1; Stop 25
ctataatcgttgagacataactaga

SEQ ID NO: 32667 - DNA, 25 bp, Artificial
  probe
  misc_feature (1)..(25): SEQ ID NO: 3286; WAN0249SP_at; Start 25; Stop 49
accgatatagtccaaagtgatatag

SEQ ID NO: 32668 - DNA, 25 bp, Artificial
  probe
  misc_feature (1)..(25): SEQ ID NO: 5961; WAN0249SQ_at; Start 16; Stop 40
gttgggtttgccattgcattttcct

SEQ ID NO: 32669 - DNA, 25 bp, Artificial
  probe
  misc_feature (1)..(25): SEQ ID NO: 5961; WAN0249SQ_at; Start 10; Stop 34
ccgaaagttgggtttgccattgcat

SEQ ID NO: 32670 - DNA, 25 bp, Artificial
  probe
  misc_feature (1)..(25): SEQ ID NO: 5961; WAN0249SQ_at; Start 28; Stop 52
attgcattttcctcattatctagta

SEQ ID NO: 32671 - DNA, 25 bp, Artificial
  probe
  misc_feature (1)..(25): SEQ ID NO: 5961; WAN0249SQ_at; Start 26; Stop 50
ccattgcattttcctcattatctag

SEQ ID NO: 32672 - DNA, 25 bp, Artificial
  probe
  misc_feature (1)..(25): SEQ ID NO: 5961; WAN0249SQ_at; Start 23; Stop 47
ttgccattgcattttcctcattatc

SEQ ID NO: 32673 - DNA, 25 bp, Artificial
  probe
  misc_feature (1)..(25): SEQ ID NO: 5961; WAN0249SQ_at; Start 12; Stop 36
gaaagttgggtttgccattgcattt

SEQ ID NO: 32674 - DNA, 25 bp, Artificial
  probe
  misc_feature (1)..(25): SEQ ID NO: 5961; WAN0249SQ_at; Start 38; Stop 62
cctcattatctagtatcgttattat

SEQ ID NO: 32675 - DNA, 25 bp, Artificial
  probe
  misc_feature (1)..(25): SEQ ID NO: 5961; WAN0249SQ_at; Start 7; Stop 31
tctccgaaagttgggtttgccattg

SEQ ID NO: 32676 - DNA, 25 bp, Artificial
  probe
  misc_feature (1)..(25): SEQ ID NO: 5961; WAN0249SQ_at; Start 20; Stop 44
ggtttgccattgcattttcctcatt

SEQ ID NO: 32677 - DNA, 25 bp, Artificial
  probe
  misc_feature (1)..(25): SEQ ID NO: 5961; WAN0249SQ_at; Start 37; Stop 61
tcctcattatctagtatcgttatta

SEQ ID NO: 32678 - DNA, 25 bp, Artificial
  probe
  misc_feature (1)..(25): SEQ ID NO: 5961; WAN0249SQ_at; Start 32; Stop 56
cattttcctcattatctagtatcgt

SEQ ID NO: 32679 - DNA, 25 bp, Artificial
  probe
  misc_feature (1)..(25): SEQ ID NO: 5961; WAN0249SQ_at; Start 30; Stop 54
tgcattttcctcattatctagtatc

SEQ ID NO: 32680 - DNA, 25 bp, Artificial
  probe
  misc_feature (1)..(25): SEQ ID NO: 5961; WAN0249SQ_at; Start 39; Stop 63
ctcattatctagtatcgttattatt

SEQ ID NO: 32681 - DNA, 25 bp, Artificial
  probe
  misc_feature (1)..(25): SEQ ID NO: 5961; WAN0249SQ_at; Start 36; Stop 60
ttcctcattatctagtatcgttatt

SEQ ID NO: 32682 - DNA, 25 bp, Artificial
  probe
  misc_feature (1)..(25): SEQ ID NO: 5961; WAN0249SQ_at; Start 22; Stop 46
tttgccattgcattttcctcattat

SEQ ID NO: 32683 - DNA, 25 bp, Artificial
  probe
  misc_feature (1)..(25): SEQ ID NO: 5961; WAN0249SQ_at; Start 17; Stop 41
ttgggtttgccattgcattttcctc

SEQ ID NO: 32684 - DNA, 25 bp, Artificial
  probe
  misc_feature (1)..(25): SEQ ID NO: 5961; WAN0249SQ_at; Start 9; Stop 33
tccgaaagttgggtttgccattgca

SEQ ID NO: 32685 - DNA, 25 bp, Artificial
  probe
  misc_feature (1)..(25): SEQ ID NO: 5961; WAN0249SQ_at; Start 34; Stop 58
ttttcctcattatctagtatcgtta

SEQ ID NO: 32686 - DNA, 25 bp, Artificial
  probe
  misc_feature (1)..(25): SEQ ID NO: 5961; WAN0249SQ_at; Start 31; Stop 55
gcattttcctcattatctagtatcg

SEQ ID NO: 32687 - DNA, 25 bp, Artificial
  probe
  misc_feature (1)..(25): SEQ ID NO: 5961; WAN0249SQ_at; Start 44; Stop 68
tatctagtatcgttattattatagt

SEQ ID NO: 32688 - DNA, 25 bp, Artificial
  probe
  misc_feature (1)..(25): SEQ ID NO: 5961; WAN0249SQ_at; Start 11; Stop 35
cgaaagttgggtttgccattgcatt

SEQ ID NO: 32689 - DNA, 25 bp, Artificial
  probe
  misc_feature (1)..(25): SEQ ID NO: 5961; WAN0249SQ_at; Start 27; Stop 51
cattgcattttcctcattatctagt

SEQ ID NO: 32690 - DNA, 25 bp, Artificial
  probe
  misc_feature (1)..(25): SEQ ID NO: 5961; WAN0249SQ_at; Start 13; Stop 37
aaagttgggtttgccattgcatttt

SEQ ID NO: 32691 - DNA, 25 bp, Artificial
  probe
  misc_feature (1)..(25): SEQ ID NO: 5961; WAN0249SQ_at; Start 21; Stop 45
gtttgccattgcattttcctcatta

SEQ ID NO: 32692 - DNA, 25 bp, Artificial
  probe
  misc_feature (1)..(25): SEQ ID NO: 5961; WAN0249SQ_at; Start 15; Stop 39
agttgggtttgccattgcattttcc

SEQ ID NO: 32693 - DNA, 25 bp, Artificial
  probe
  misc_feature (1)..(25): SEQ ID NO: 5961; WAN0249SQ_at; Start 29; Stop 53
ttgcattttcctcattatctagtat

SEQ ID NO: 32694 - DNA, 25 bp, Artificial
  probe
  misc_feature (1)..(25): SEQ ID NO: 5961; WAN0249SQ_at; Start 41; Stop 65
cattatctagtatcgttattattat

SEQ ID NO: 32695 - DNA, 25 bp, Artificial
  probe
  misc_feature (1)..(25): SEQ ID NO: 5961; WAN0249SQ_at; Start 33; Stop 57
attttcctcattatctagtatcgtt

SEQ ID NO: 32696 - DNA, 25 bp, Artificial
  probe
  misc_feature (1)..(25): SEQ ID NO: 5961; WAN0249SQ_at; Start 24; Stop 48
tgccattgcattttcctcattatct

SEQ ID NO: 32697 - DNA, 25 bp, Artificial
  probe
  misc_feature (1)..(25): SEQ ID NO: 5961; WAN0249SQ_at; Start 40; Stop 64
tcattatctagtatcgttattatta

SEQ ID NO: 32698 - DNA, 25 bp, Artificial
  probe
  misc_feature (1)..(25): SEQ ID NO: 5961; WAN0249SQ_at; Start 35; Stop 59
tttcctcattatctagtatcgttat

SEQ ID NO: 32699 - DNA, 25 bp, Artificial
  probe
  misc_feature (1)..(25): SEQ ID NO: 5961; WAN0249SQ_at; Start 19; Stop 43
gggtttgccattgcattttcctcat

SEQ ID NO: 32700 - DNA, 25 bp, Artificial
  probe
  misc_feature (1)..(25): SEQ ID NO: 5961; WAN0249SQ_at; Start 18; Stop 42
tgggtttgccattgcattttcctca

SEQ ID NO: 32701 - DNA, 25 bp, Artificial
  probe
  misc_feature (1)..(25): SEQ ID NO: 5961; WAN0249SQ_at; Start 25; Stop 49
gccattgcattttcctcattatcta

SEQ ID NO: 32702 - DNA, 25 bp, Artificial
  probe
  misc_feature (1)..(25): SEQ ID NO: 4456; WAN0249SR_at; Start 25; Stop 49
tcttttttgttatgtaataataatc

SEQ ID NO: 32703 - DNA, 25 bp, Artificial
  probe
  misc_feature (1)..(25): SEQ ID NO: 4456; WAN0249SR_at; Start 34; Stop 58
ttatgtaataataatctattttgtg

SEQ ID NO: 32704 - DNA, 25 bp, Artificial
  probe
  misc_feature (1)..(25): SEQ ID NO: 4456; WAN0249SR_at; Start 40; Stop 64
aataataatctattttgtgttatag

SEQ ID NO: 32705 - DNA, 25 bp, Artificial
  probe
  misc_feature (1)..(25): SEQ ID NO: 4456; WAN0249SR_at; Start 35; Stop 59
tatgtaataataatctattttgtgt

SEQ ID NO: 32706 - DNA, 25 bp, Artificial
  probe
  misc_feature (1)..(25): SEQ ID NO: 4456; WAN0249SR_at; Start 3; Stop 27
attgagttaagaggtttagacctct

SEQ ID NO: 32707 - DNA, 25 bp, Artificial
  probe
  misc_feature (1)..(25): SEQ ID NO: 4456; WAN0249SR_at; Start 19; Stop 43
tagacctcttttttgttatgtaata

SEQ ID NO: 32708 - DNA, 25 bp, Artificial
  probe
  misc_feature (1)..(25): SEQ ID NO: 4349; WAN0249SS_at; Start 36; Stop 60
tcctctagaacgagttttatgtcag

SEQ ID NO: 32709 - DNA, 25 bp, Artificial
  probe
  misc_feature (1)..(25): SEQ ID NO: 4349; WAN0249SS_at; Start 38; Stop 62
ctctagaacgagttttatgtcagat

SEQ ID NO: 32710 - DNA, 25 bp, Artificial
  probe
  misc_feature (1)..(25): SEQ ID NO: 4349; WAN0249SS_at; Start 59; Stop 83
agatagtttaaacgcctcttcaaat

SEQ ID NO: 32711 - DNA, 25 bp, Artificial
  probe
  misc_feature (1)..(25): SEQ ID NO: 4349; WAN0249SS_at; Start 27; Stop 51
ggatgtctttcctctagaacgagtt

SEQ ID NO: 32712 - DNA, 25 bp, Artificial
  probe
  misc_feature (1)..(25): SEQ ID NO: 4349; WAN0249SS_at; Start 28; Stop 52
gatgtctttcctctagaacgagttt

SEQ ID NO: 32713 - DNA, 25 bp, Artificial
  probe
  misc_feature (1)..(25): SEQ ID NO: 4349; WAN0249SS_at; Start 30; Stop 54
tgtctttcctctagaacgagtttta

SEQ ID NO: 32714 - DNA, 25 bp, Artificial
  probe
  misc_feature (1)..(25): SEQ ID NO: 4349; WAN0249SS_at; Start 34; Stop 58
tttcctctagaacgagttttatgtc

SEQ ID NO: 32715 - DNA, 25 bp, Artificial
  probe
  misc_feature (1)..(25): SEQ ID NO: 4349; WAN0249SS_at; Start 41; Stop 65
tagaacgagttttatgtcagatagt

SEQ ID NO: 32716 - DNA, 25 bp, Artificial
  probe
  misc_feature (1)..(25): SEQ ID NO: 4349; WAN0249SS_at; Start 23; Stop 47
taaaggatgtctttcctctagaacg

SEQ ID NO: 32717 - DNA, 25 bp, Artificial
  probe
  misc_feature (1)..(25): SEQ ID NO: 4349; WAN0249SS_at; Start 65; Stop 89
tttaaacgcctcttcaaatatagta

SEQ ID NO: 32718 - DNA, 25 bp, Artificial
  probe
  misc_feature (1)..(25): SEQ ID NO: 4349; WAN0249SS_at; Start 26; Stop 50
aggatgtctttcctctagaacgagt

SEQ ID NO: 32719 - DNA, 25 bp, Artificial
  probe
  misc_feature (1)..(25): SEQ ID NO: 4349; WAN0249SS_at; Start 55; Stop 79
tgtcagatagtttaaacgcctcttc

SEQ ID NO: 32720 - DNA, 25 bp, Artificial
  probe
  misc_feature (1)..(25): SEQ ID NO: 4349; WAN0249SS_at; Start 70; Stop 94
acgcctcttcaaatatagtaaaatg

SEQ ID NO: 32721 - DNA, 25 bp, Artificial
  probe
  misc_feature (1)..(25): SEQ ID NO: 4349; WAN0249SS_at; Start 69; Stop 93
aacgcctcttcaaatatagtaaaat

SEQ ID NO: 32722 - DNA, 25 bp, Artificial
  probe
  misc_feature (1)..(25): SEQ ID NO: 4349; WAN0249SS_at; Start 35; Stop 59
ttcctctagaacgagttttatgtca

SEQ ID NO: 32723 - DNA, 25 bp, Artificial
  probe
  misc_feature (1)..(25): SEQ ID NO: 4349; WAN0249SS_at; Start 25; Stop 49
aaggatgtctttcctctagaacgag

SEQ ID NO: 32724 - DNA, 25 bp, Artificial
  probe
  misc_feature (1)..(25): SEQ ID NO: 4349; WAN0249SS_at; Start 54; Stop 78
atgtcagatagtttaaacgcctctt

SEQ ID NO: 32725 - DNA, 25 bp, Artificial
  probe
  misc_feature (1)..(25): SEQ ID NO: 4349; WAN0249SS_at; Start 63; Stop 87
agtttaaacgcctcttcaaatatag

SEQ ID NO: 32726 - DNA, 25 bp, Artificial
  probe
  misc_feature (1)..(25): SEQ ID NO: 4349; WAN0249SS_at; Start 45; Stop 69
acgagttttatgtcagatagtttaa

SEQ ID NO: 32727 - DNA, 25 bp, Artificial
  probe
  misc_feature (1)..(25): SEQ ID NO: 4349; WAN0249SS_at; Start 24; Stop 48
aaaggatgtctttcctctagaacga

SEQ ID NO: 32728 - DNA, 25 bp, Artificial
  probe
  misc_feature (1)..(25): SEQ ID NO: 4349; WAN0249SS_at; Start 58; Stop 82
cagatagtttaaacgcctcttcaaa

SEQ ID NO: 32729 - DNA, 25 bp, Artificial
  probe
  misc_feature (1)..(25): SEQ ID NO: 4349; WAN0249SS_at; Start 53; Stop 77
tatgtcagatagtttaaacgcctct

SEQ ID NO: 32730 - DNA, 25 bp, Artificial
  probe
  misc_feature (1)..(25): SEQ ID NO: 4349; WAN0249SS_at; Start 56; Stop 80
gtcagatagtttaaacgcctcttca

SEQ ID NO: 32731 - DNA, 25 bp, Artificial
  probe
  misc_feature (1)..(25): SEQ ID NO: 4349; WAN0249SS_at; Start 50; Stop 74
ttttatgtcagatagtttaaacgcc

SEQ ID NO: 32732 - DNA, 25 bp, Artificial
  probe
  misc_feature (1)..(25): SEQ ID NO: 4349; WAN0249SS_at; Start 33; Stop 57
ctttcctctagaacgagttttatgt

SEQ ID NO: 32733 - DNA, 25 bp, Artificial
  probe
  misc_feature (1)..(25): SEQ ID NO: 4349; WAN0249SS_at; Start 40; Stop 64
ctagaacgagttttatgtcagatag

SEQ ID NO: 32734 - DNA, 25 bp, Artificial
  probe
  misc_feature (1)..(25): SEQ ID NO: 4349; WAN0249SS_at; Start 32; Stop 56
tctttcctctagaacgagttttatg

SEQ ID NO: 32735 - DNA, 25 bp, Artificial
  probe
  misc_feature (1)..(25): SEQ ID NO: 4349; WAN0249SS_at; Start 37; Stop 61
cctctagaacgagttttatgtcaga

SEQ ID NO: 32736 - DNA, 25 bp, Artificial
  probe
  misc_feature (1)..(25): SEQ ID NO: 4349; WAN0249SS_at; Start 43; Stop 67
gaacgagttttatgtcagatagttt

SEQ ID NO: 32737 - DNA, 25 bp, Artificial
  probe
  misc_feature (1)..(25): SEQ ID NO: 4349; WAN0249SS_at; Start 52; Stop 76
ttatgtcagatagtttaaacgcctc

SEQ ID NO: 32738 - DNA, 25 bp, Artificial
  probe
  misc_feature (1)..(25): SEQ ID NO: 4349; WAN0249SS_at; Start 57; Stop 81
tcagatagtttaaacgcctcttcaa

SEQ ID NO: 32739 - DNA, 25 bp, Artificial
  probe
  misc_feature (1)..(25): SEQ ID NO: 4349; WAN0249SS_at; Start 67; Stop 91
taaacgcctcttcaaatatagtaaa

SEQ ID NO: 32740 - DNA, 25 bp, Artificial
  probe
  misc_feature (1)..(25): SEQ ID NO: 4349; WAN0249SS_at; Start 51; Stop 75
tttatgtcagatagtttaaacgcct

SEQ ID NO: 32741 - DNA, 25 bp, Artificial
  probe
  misc_feature (1)..(25): SEQ ID NO: 4349; WAN0249SS_at; Start 39; Stop 63
tctagaacgagttttatgtcagata

SEQ ID NO: 32742 - DNA, 25 bp, Artificial
  probe
  misc_feature (1)..(25): SEQ ID NO: 59; WAN0249ST_at; Start 145; Stop 169
cacaagaaggctacgacattttaaa

SEQ ID NO: 32743 - DNA, 25 bp, Artificial
  probe
  misc_feature (1)..(25): SEQ ID NO: 59; WAN0249ST_at; Start 108; Stop 132
ggattcaacacattataaaattatg

SEQ ID NO: 32744 - DNA, 25 bp, Artificial
  probe
  misc_feature (1)..(25): SEQ ID NO: 59; WAN0249ST_at; Start 177; Stop 201
ggcggatgtatcgtttgccctacta

SEQ ID NO: 32745 - DNA, 25 bp, Artificial
  probe
  misc_feature (1)..(25): SEQ ID NO: 59; WAN0249ST_at; Start 44; Stop 68
acaaatgaattggtgcttaacatcc

SEQ ID NO: 32746 - DNA, 25 bp, Artificial
  probe
  misc_feature (1)..(25): SEQ ID NO: 59; WAN0249ST_at; Start 98; Stop 122
ggactattctggattcaacacatta

SEQ ID NO: 32747 - DNA, 25 bp, Artificial
  probe
  misc_feature (1)..(25): SEQ ID NO: 59; WAN0249ST_at; Start 92; Stop 116
tacagtggactattctggattcaac

SEQ ID NO: 32748 - DNA, 25 bp, Artificial
  probe
  misc_feature (1)..(25): SEQ ID NO: 59; WAN0249ST_at; Start 102; Stop 126
tattctggattcaacacattataaa

SEQ ID NO: 32749 - DNA, 25 bp, Artificial
  probe
  misc_feature (1)..(25): SEQ ID NO: 59; WAN0249ST_at; Start 179; Stop 203
cggatgtatcgtttgccctactaaa

SEQ ID NO: 32750 - DNA, 25 bp, Artificial
  probe
  misc_feature (1)..(25): SEQ ID NO: 59; WAN0249ST_at; Start 97; Stop 121
tggactattctggattcaacacatt

SEQ ID NO: 32751 - DNA, 25 bp, Artificial
  probe
  misc_feature (1)..(25): SEQ ID NO: 59; WAN0249ST_at; Start 35; Stop 59
aagatgtaaacaaatgaattggtgc

SEQ ID NO: 32752 - DNA, 25 bp, Artificial
  probe
  misc_feature (1)..(25): SEQ ID NO: 59; WAN0249ST_at; Start 147; Stop 171
caagaaggctacgacattttaaaag

SEQ ID NO: 32753 - DNA, 25 bp, Artificial
  probe
  misc_feature (1)..(25): SEQ ID NO: 59; WAN0249ST_at; Start 37; Stop 61
gatgtaaacaaatgaattggtgctt

SEQ ID NO: 32754 - DNA, 25 bp, Artificial
  probe
  misc_feature (1)..(25): SEQ ID NO: 59; WAN0249ST_at; Start 178; Stop 202
gcggatgtatcgtttgccctactaa

SEQ ID NO: 32755 - DNA, 25 bp, Artificial
  probe
  misc_feature (1)..(25): SEQ ID NO: 59; WAN0249ST_at; Start 94; Stop 118
cagtggactattctggattcaacac

SEQ ID NO: 32756 - DNA, 25 bp, Artificial
  probe
  misc_feature (1)..(25): SEQ ID NO: 59; WAN0249ST_at; Start 143; Stop 167
ttcacaagaaggctacgacatttta

SEQ ID NO: 32757 - DNA, 25 bp, Artificial
  probe
  misc_feature (1)..(25): SEQ ID NO: 59; WAN0249ST_at; Start 126; Stop 150
aattatgacaaaacacattcacaag

SEQ ID NO: 32758 - DNA, 25 bp, Artificial
  probe
  misc_feature (1)..(25): SEQ ID NO: 59; WAN0249ST_at; Start 85; Stop 109
tagaaactacagtggactattctgg

SEQ ID NO: 32759 - DNA, 25 bp, Artificial
  probe
  misc_feature (1)..(25): SEQ ID NO: 59; WAN0249ST_at; Start 161; Stop 185
cattttaaaaggtgagggcggatgt

SEQ ID NO: 32760 - DNA, 25 bp, Artificial
  probe
  misc_feature (1)..(25): SEQ ID NO: 59; WAN0249ST_at; Start 129; Stop 153
tatgacaaaacacattcacaagaag

SEQ ID NO: 32761 - DNA, 25 bp, Artificial
  probe
  misc_feature (1)..(25): SEQ ID NO: 59; WAN0249ST_at; Start 152; Stop 176
aggctacgacattttaaaaggtgag

SEQ ID NO: 32762 - DNA, 25 bp, Artificial
  probe
  misc_feature (1)..(25): SEQ ID NO: 59; WAN0249ST_at; Start 87; Stop 111
gaaactacagtggactattctggat

SEQ ID NO: 32763 - DNA, 25 bp, Artificial
  probe
  misc_feature (1)..(25): SEQ ID NO: 59; WAN0249ST_at; Start 160; Stop 184
acattttaaaaggtgagggcggatg

SEQ ID NO: 32764 - DNA, 25 bp, Artificial
  probe
  misc_feature (1)..(25): SEQ ID NO: 59; WAN0249ST_at; Start 173; Stop 197
tgagggcggatgtatcgtttgccct

SEQ ID NO: 32765 - DNA, 25 bp, Artificial
  probe
  misc_feature (1)..(25): SEQ ID NO: 59; WAN0249ST_at; Start 141; Stop 165
cattcacaagaaggctacgacattt

SEQ ID NO: 32766 - DNA, 25 bp, Artificial
  probe
  misc_feature (1)..(25): SEQ ID NO: 59; WAN0249ST_at; Start 99; Stop 123
gactattctggattcaacacattat

SEQ ID NO: 32767 - DNA, 25 bp, Artificial
  probe
  misc_feature (1)..(25): SEQ ID NO: 59; WAN0249ST_at; Start 7; Stop 31
tagaaaaggaaatatagtaaactga

SEQ ID NO: 32768 - DNA, 25 bp, Artificial
  probe
  misc_feature (1)..(25): SEQ ID NO: 59; WAN0249ST_at; Start 45; Stop 69
caaatgaattggtgcttaacatcca

SEQ ID NO: 32769 - DNA, 25 bp, Artificial
  probe
  misc_feature (1)..(25): SEQ ID NO: 59; WAN0249ST_at; Start 50; Stop 74
gaattggtgcttaacatccatttcc

SEQ ID NO: 32770 - DNA, 25 bp, Artificial
  probe
  misc_feature (1)..(25): SEQ ID NO: 59; WAN0249ST_at; Start 181; Stop 205
gatgtatcgtttgccctactaaagt

SEQ ID NO: 32771 - DNA, 25 bp, Artificial
  probe
  misc_feature (1)..(25): SEQ ID NO: 59; WAN0249ST_at; Start 164; Stop 188
tttaaaaggtgagggcggatgtatc

SEQ ID NO: 32772 - DNA, 25 bp, Artificial
  probe
  misc_feature (1)..(25): SEQ ID NO: 59; WAN0249ST_at; Start 95; Stop 119
agtggactattctggattcaacaca

SEQ ID NO: 32773 - DNA, 25 bp, Artificial
  probe
  misc_feature (1)..(25): SEQ ID NO: 59; WAN0249ST_at; Start 192; Stop 216
tgccctactaaagttggttacatta

SEQ ID NO: 32774 - DNA, 25 bp, Artificial
  probe
  misc_feature (1)..(25): SEQ ID NO: 59; WAN0249ST_at; Start 90; Stop 114
actacagtggactattctggattca

SEQ ID NO: 32775 - DNA, 25 bp, Artificial
  probe
  misc_feature (1)..(25): SEQ ID NO: 59; WAN0249ST_at; Start 180; Stop 204
ggatgtatcgtttgccctactaaag

SEQ ID NO: 32776 - DNA, 25 bp, Artificial
  probe
  misc_feature (1)..(25): SEQ ID NO: 5773; WAN0249SU_at; Start 38; Stop 62
acgatactagataatgaggaaaatg

SEQ ID NO: 32777 - DNA, 25 bp, Artificial
  probe
  misc_feature (1)..(25): SEQ ID NO: 5773; WAN0249SU_at; Start 47; Stop 71
gataatgaggaaaatgcaatggcaa

SEQ ID NO: 32778 - DNA, 25 bp, Artificial
  probe
  misc_feature (1)..(25): SEQ ID NO: 5773; WAN0249SU_at; Start 49; Stop 73
taatgaggaaaatgcaatggcaaac

SEQ ID NO: 32779 - DNA, 25 bp, Artificial
  probe
  misc_feature (1)..(25): SEQ ID NO: 5773; WAN0249SU_at; Start 33; Stop 57
taataacgatactagataatgagga

SEQ ID NO: 32780 - DNA, 25 bp, Artificial
  probe
  misc_feature (1)..(25): SEQ ID NO: 5773; WAN0249SU_at; Start 45; Stop 69
tagataatgaggaaaatgcaatggc

SEQ ID NO: 32781 - DNA, 25 bp, Artificial
  probe
  misc_feature (1)..(25): SEQ ID NO: 5773; WAN0249SU_at; Start 30; Stop 54
taataataacgatactagataatga

SEQ ID NO: 32782 - DNA, 25 bp, Artificial
  probe
  misc_feature (1)..(25): SEQ ID NO: 5773; WAN0249SU_at; Start 60; Stop 84
atgcaatggcaaacccaactttcgg

SEQ ID NO: 32783 - DNA, 25 bp, Artificial
  probe
  misc_feature (1)..(25): SEQ ID NO: 5773; WAN0249SU_at; Start 35; Stop 59
ataacgatactagataatgaggaaa

SEQ ID NO: 32784 - DNA, 25 bp, Artificial
  probe
  misc_feature (1)..(25): SEQ ID NO: 5773; WAN0249SU_at; Start 51; Stop 75
atgaggaaaatgcaatggcaaaccc

SEQ ID NO: 32785 - DNA, 25 bp, Artificial
  probe
  misc_feature (1)..(25): SEQ ID NO: 5773; WAN0249SU_at; Start 31; Stop 55
aataataacgatactagataatgag

SEQ ID NO: 32786 - DNA, 25 bp, Artificial
  probe
  misc_feature (1)..(25): SEQ ID NO: 5773; WAN0249SU_at; Start 57; Stop 81
aaaatgcaatggcaaacccaacttt

SEQ ID NO: 32787 - DNA, 25 bp, Artificial
  probe
  misc_feature (1)..(25): SEQ ID NO: 5773; WAN0249SU_at; Start 54; Stop 78
aggaaaatgcaatggcaaacccaac

SEQ ID NO: 32788 - DNA, 25 bp, Artificial
  probe
  misc_feature (1)..(25): SEQ ID NO: 5773; WAN0249SU_at; Start 48; Stop 72
ataatgaggaaaatgcaatggcaaa

SEQ ID NO: 32789 - DNA, 25 bp, Artificial
  probe
  misc_feature (1)..(25): SEQ ID NO: 5773; WAN0249SU_at; Start 28; Stop 52
tataataataacgatactagataat

SEQ ID NO: 32790 - DNA, 25 bp, Artificial
  probe
  misc_feature (1)..(25): SEQ ID NO: 5773; WAN0249SU_at; Start 53; Stop 77
gaggaaaatgcaatggcaaacccaa

SEQ ID NO: 32791 - DNA, 25 bp, Artificial
  probe
  misc_feature (1)..(25): SEQ ID NO: 5773; WAN0249SU_at; Start 59; Stop 83
aatgcaatggcaaacccaactttcg

SEQ ID NO: 32792 - DNA, 25 bp, Artificial
  probe
  misc_feature (1)..(25): SEQ ID NO: 5773; WAN0249SU_at; Start 37; Stop 61
aacgatactagataatgaggaaaat

SEQ ID NO: 32793 - DNA, 25 bp, Artificial
  probe
  misc_feature (1)..(25): SEQ ID NO: 5773; WAN0249SU_at; Start 41; Stop 65
atactagataatgaggaaaatgcaa

SEQ ID NO: 32794 - DNA, 25 bp, Artificial
  probe
  misc_feature (1)..(25): SEQ ID NO: 5773; WAN0249SU_at; Start 46; Stop 70
agataatgaggaaaatgcaatggca

SEQ ID NO: 32795 - DNA, 25 bp, Artificial
  probe
  misc_feature (1)..(25): SEQ ID NO: 5773; WAN0249SU_at; Start 55; Stop 79
ggaaaatgcaatggcaaacccaact

SEQ ID NO: 32796 - DNA, 25 bp, Artificial
  probe
  misc_feature (1)..(25): SEQ ID NO: 5773; WAN0249SU_at; Start 44; Stop 68
ctagataatgaggaaaatgcaatgg

SEQ ID NO: 32797 - DNA, 25 bp, Artificial
  probe
  misc_feature (1)..(25): SEQ ID NO: 5773; WAN0249SU_at; Start 63; Stop 87
caatggcaaacccaactttcggaga

SEQ ID NO: 32798 - DNA, 25 bp, Artificial
  probe
  misc_feature (1)..(25): SEQ ID NO: 5773; WAN0249SU_at; Start 34; Stop 58
aataacgatactagataatgaggaa

SEQ ID NO: 32799 - DNA, 25 bp, Artificial
  probe
  misc_feature (1)..(25): SEQ ID NO: 5773; WAN0249SU_at; Start 42; Stop 66
tactagataatgaggaaaatgcaat

SEQ ID NO: 32800 - DNA, 25 bp, Artificial
  probe
  misc_feature (1)..(25): SEQ ID NO: 5773; WAN0249SU_at; Start 40; Stop 64
gatactagataatgaggaaaatgca

SEQ ID NO: 32801 - DNA, 25 bp, Artificial
  probe
  misc_feature (1)..(25): SEQ ID NO: 5773; WAN0249SU_at; Start 58; Stop 82
aaatgcaatggcaaacccaactttc

SEQ ID NO: 32802 - DNA, 25 bp, Artificial
  probe
  misc_feature (1)..(25): SEQ ID NO: 5773; WAN0249SU_at; Start 43; Stop 67
actagataatgaggaaaatgcaatg

SEQ ID NO: 32803 - DNA, 25 bp, Artificial
  probe
  misc_feature (1)..(25): SEQ ID NO: 5773; WAN0249SU_at; Start 27; Stop 51
ctataataataacgatactagataa

SEQ ID NO: 32804 - DNA, 25 bp, Artificial
  probe
  misc_feature (1)..(25): SEQ ID NO: 5773; WAN0249SU_at; Start 52; Stop 76
tgaggaaaatgcaatggcaaaccca

SEQ ID NO: 32805 - DNA, 25 bp, Artificial
  probe
  misc_feature (1)..(25): SEQ ID NO: 5773; WAN0249SU_at; Start 61; Stop 85
tgcaatggcaaacccaactttcgga

SEQ ID NO: 32806 - DNA, 25 bp, Artificial
  probe
  misc_feature (1)..(25): SEQ ID NO: 5773; WAN0249SU_at; Start 39; Stop 63
cgatactagataatgaggaaaatgc

SEQ ID NO: 32807 - DNA, 25 bp, Artificial
  probe
  misc_feature (1)..(25): SEQ ID NO: 5773; WAN0249SU_at; Start 50; Stop 74
aatgaggaaaatgcaatggcaaacc

SEQ ID NO: 32808 - DNA, 25 bp, Artificial
  probe
  misc_feature (1)..(25): SEQ ID NO: 5773; WAN0249SU_at; Start 36; Stop 60
taacgatactagataatgaggaaaa

SEQ ID NO: 32809 - DNA, 25 bp, Artificial
  probe
  misc_feature (1)..(25): SEQ ID NO: 5773; WAN0249SU_at; Start 32; Stop 56
ataataacgatactagataatgagg

SEQ ID NO: 32810 - DNA, 25 bp, Artificial
  probe
  misc_feature (1)..(25): SEQ ID NO: 5771; WAN0249SV_at; Start 51; Stop 75
tctagttatgtctcaacgattatag

SEQ ID NO: 32811 - DNA, 25 bp, Artificial
  probe
  misc_feature (1)..(25): SEQ ID NO: 5771; WAN0249SV_at; Start 41; Stop 65
actatatcggtctagttatgtctca

SEQ ID NO: 32812 - DNA, 25 bp, Artificial
  probe
  misc_feature (1)..(25): SEQ ID NO: 5771; WAN0249SV_at; Start 42; Stop 66
ctatatcggtctagttatgtctcaa

SEQ ID NO: 32813 - DNA, 25 bp, Artificial
  probe
  misc_feature (1)..(25): SEQ ID NO: 5771; WAN0249SV_at; Start 43; Stop 67
tatatcggtctagttatgtctcaac

SEQ ID NO: 32814 - DNA, 25 bp, Artificial
  probe
  misc_feature (1)..(25): SEQ ID NO: 5771; WAN0249SV_at; Start 19; Stop 43
tcattttactatatcactttggact

SEQ ID NO: 32815 - DNA, 25 bp, Artificial
  probe
  misc_feature (1)..(25): SEQ ID NO: 5771; WAN0249SV_at; Start 50; Stop 74
gtctagttatgtctcaacgattata

SEQ ID NO: 32816 - DNA, 25 bp, Artificial
  probe
  misc_feature (1)..(25): SEQ ID NO: 5771; WAN0249SV_at; Start 32; Stop 56
tcactttggactatatcggtctagt

SEQ ID NO: 32817 - DNA, 25 bp, Artificial
  probe
  misc_feature (1)..(25): SEQ ID NO: 5771; WAN0249SV_at; Start 29; Stop 53
atatcactttggactatatcggtct

SEQ ID NO: 32818 - DNA, 25 bp, Artificial
  probe
  misc_feature (1)..(25): SEQ ID NO: 5771; WAN0249SV_at; Start 38; Stop 62
tggactatatcggtctagttatgtc

SEQ ID NO: 32819 - DNA, 25 bp, Artificial
  probe
  misc_feature (1)..(25): SEQ ID NO: 5771; WAN0249SV_at; Start 24; Stop 48
ttactatatcactttggactatatc

SEQ ID NO: 32820 - DNA, 25 bp, Artificial
  probe
  misc_feature (1)..(25): SEQ ID NO: 5771; WAN0249SV_at; Start 45; Stop 69
tatcggtctagttatgtctcaacga

SEQ ID NO: 32821 - DNA, 25 bp, Artificial
  probe
  misc_feature (1)..(25): SEQ ID NO: 5771; WAN0249SV_at; Start 22; Stop 46
ttttactatatcactttggactata

SEQ ID NO: 32822 - DNA, 25 bp, Artificial
  probe
  misc_feature (1)..(25): SEQ ID NO: 5771; WAN0249SV_at; Start 39; Stop 63
ggactatatcggtctagttatgtct

SEQ ID NO: 32823 - DNA, 25 bp, Artificial
  probe
  misc_feature (1)..(25): SEQ ID NO: 5771; WAN0249SV_at; Start 34; Stop 58
actttggactatatcggtctagtta

SEQ ID NO: 32824 - DNA, 25 bp, Artificial
  probe
  misc_feature (1)..(25): SEQ ID NO: 5771; WAN0249SV_at; Start 21; Stop 45
attttactatatcactttggactat

SEQ ID NO: 32825 - DNA, 25 bp, Artificial
  probe
  misc_feature (1)..(25): SEQ ID NO: 5771; WAN0249SV_at; Start 49; Stop 73
ggtctagttatgtctcaacgattat

SEQ ID NO: 32826 - DNA, 25 bp, Artificial
  probe
  misc_feature (1)..(25): SEQ ID NO: 5771; WAN0249SV_at; Start 44; Stop 68
atatcggtctagttatgtctcaacg

SEQ ID NO: 32827 - DNA, 25 bp, Artificial
  probe
  misc_feature (1)..(25): SEQ ID NO: 5771; WAN0249SV_at; Start 26; Stop 50
actatatcactttggactatatcgg

SEQ ID NO: 32828 - DNA, 25 bp, Artificial
  probe
  misc_feature (1)..(25): SEQ ID NO: 5771; WAN0249SV_at; Start 30; Stop 54
tatcactttggactatatcggtcta

SEQ ID NO: 32829 - DNA, 25 bp, Artificial
  probe
  misc_feature (1)..(25): SEQ ID NO: 5771; WAN0249SV_at; Start 36; Stop 60
tttggactatatcggtctagttatg

SEQ ID NO: 32830 - DNA, 25 bp, Artificial
  probe
  misc_feature (1)..(25): SEQ ID NO: 5771; WAN0249SV_at; Start 33; Stop 57
cactttggactatatcggtctagtt

SEQ ID NO: 32831 - DNA, 25 bp, Artificial
  probe
  misc_feature (1)..(25): SEQ ID NO: 5771; WAN0249SV_at; Start 28; Stop 52
tatatcactttggactatatcggtc

SEQ ID NO: 32832 - DNA, 25 bp, Artificial
  probe
  misc_feature (1)..(25): SEQ ID NO: 5771; WAN0249SV_at; Start 46; Stop 70
atcggtctagttatgtctcaacgat

SEQ ID NO: 32833 - DNA, 25 bp, Artificial
  probe
  misc_feature (1)..(25): SEQ ID NO: 5771; WAN0249SV_at; Start 48; Stop 72
cggtctagttatgtctcaacgatta

SEQ ID NO: 32834 - DNA, 25 bp, Artificial
  probe
  misc_feature (1)..(25): SEQ ID NO: 5771; WAN0249SV_at; Start 37; Stop 61
ttggactatatcggtctagttatgt

SEQ ID NO: 32835 - DNA, 25 bp, Artificial
  probe
  misc_feature (1)..(25): SEQ ID NO: 5771; WAN0249SV_at; Start 35; Stop 59
ctttggactatatcggtctagttat

SEQ ID NO: 32836 - DNA, 25 bp, Artificial
  probe
  misc_feature (1)..(25): SEQ ID NO: 5771; WAN0249SV_at; Start 20; Stop 44
cattttactatatcactttggacta

SEQ ID NO: 32837 - DNA, 25 bp, Artificial
  probe
  misc_feature (1)..(25): SEQ ID NO: 5771; WAN0249SV_at; Start 40; Stop 64
gactatatcggtctagttatgtctc

SEQ ID NO: 32838 - DNA, 25 bp, Artificial
  probe
  misc_feature (1)..(25): SEQ ID NO: 5771; WAN0249SV_at; Start 25; Stop 49
tactatatcactttggactatatcg

SEQ ID NO: 32839 - DNA, 25 bp, Artificial
  probe
  misc_feature (1)..(25): SEQ ID NO: 5771; WAN0249SV_at; Start 47; Stop 71
tcggtctagttatgtctcaacgatt

SEQ ID NO: 32840 - DNA, 25 bp, Artificial
  probe
  misc_feature (1)..(25): SEQ ID NO: 5771; WAN0249SV_at; Start 27; Stop 51
ctatatcactttggactatatcggt

SEQ ID NO: 32841 - DNA, 25 bp, Artificial
  probe
  misc_feature (1)..(25): SEQ ID NO: 5771; WAN0249SV_at; Start 23; Stop 47
tttactatatcactttggactatat

SEQ ID NO: 32842 - DNA, 25 bp, Artificial
  probe
  misc_feature (1)..(25): SEQ ID NO: 5771; WAN0249SV_at; Start 31; Stop 55
atcactttggactatatcggtctag

SEQ ID NO: 32843 - DNA, 25 bp, Artificial
  probe
  misc_feature (1)..(25): SEQ ID NO: 5772; WAN0249SW_at; Start 28; Stop 52
tatattttataagttatagtgtagc

SEQ ID NO: 32844 - DNA, 25 bp, Artificial
  probe
  misc_feature (1)..(25): SEQ ID NO: 5772; WAN0249SW_at; Start 41; Stop 65
ttatagtgtagcattccaacttcaa

SEQ ID NO: 32845 - DNA, 25 bp, Artificial
  probe
  misc_feature (1)..(25): SEQ ID NO: 5772; WAN0249SW_at; Start 33; Stop 57
tttataagttatagtgtagcattcc

SEQ ID NO: 32846 - DNA, 25 bp, Artificial
  probe
  misc_feature (1)..(25): SEQ ID NO: 5772; WAN0249SW_at; Start 40; Stop 64
gttatagtgtagcattccaacttca

SEQ ID NO: 32847 - DNA, 25 bp, Artificial
  probe
  misc_feature (1)..(25): SEQ ID NO: 5772; WAN0249SW_at; Start 31; Stop 55
attttataagttatagtgtagcatt

SEQ ID NO: 32848 - DNA, 25 bp, Artificial
  probe
  misc_feature (1)..(25): SEQ ID NO: 5772; WAN0249SW_at; Start 32; Stop 56
ttttataagttatagtgtagcattc

SEQ ID NO: 32849 - DNA, 25 bp, Artificial
  probe
  misc_feature (1)..(25): SEQ ID NO: 5772; WAN0249SW_at; Start 39; Stop 63
agttatagtgtagcattccaacttc

SEQ ID NO: 32850 - DNA, 25 bp, Artificial
  probe
  misc_feature (1)..(25): SEQ ID NO: 5772; WAN0249SW_at; Start 38; Stop 62
aagttatagtgtagcattccaactt

SEQ ID NO: 32851 - DNA, 25 bp, Artificial
  probe
  misc_feature (1)..(25): SEQ ID NO: 5772; WAN0249SW_at; Start 36; Stop 60
ataagttatagtgtagcattccaac

SEQ ID NO: 32852 - DNA, 25 bp, Artificial
  probe
  misc_feature (1)..(25): SEQ ID NO: 5772; WAN0249SW_at; Start 45; Stop 69
agtgtagcattccaacttcaaagca

SEQ ID NO: 32853 - DNA, 25 bp, Artificial
  probe
  misc_feature (1)..(25): SEQ ID NO: 5772; WAN0249SW_at; Start 47; Stop 71
tgtagcattccaacttcaaagcact

SEQ ID NO: 32854 - DNA, 25 bp, Artificial
  probe
  misc_feature (1)..(25): SEQ ID NO: 5772; WAN0249SW_at; Start 43; Stop 67
atagtgtagcattccaacttcaaag

SEQ ID NO: 32855 - DNA, 25 bp, Artificial
  probe
  misc_feature (1)..(25): SEQ ID NO: 5772; WAN0249SW_at; Start 46; Stop 70
gtgtagcattccaacttcaaagcac

SEQ ID NO: 32856 - DNA, 25 bp, Artificial
  probe
  misc_feature (1)..(25): SEQ ID NO: 5772; WAN0249SW_at; Start 35; Stop 59
tataagttatagtgtagcattccaa

SEQ ID NO: 32857 - DNA, 25 bp, Artificial
  probe
  misc_feature (1)..(25): SEQ ID NO: 5772; WAN0249SW_at; Start 30; Stop 54
tattttataagttatagtgtagcat

SEQ ID NO: 32858 - DNA, 25 bp, Artificial
  probe
  misc_feature (1)..(25): SEQ ID NO: 5772; WAN0249SW_at; Start 44; Stop 68
tagtgtagcattccaacttcaaagc

SEQ ID NO: 32859 - DNA, 25 bp, Artificial
  probe
  misc_feature (1)..(25): SEQ ID NO: 5772; WAN0249SW_at; Start 27; Stop 51
ctatattttataagttatagtgtag

SEQ ID NO: 32860 - DNA, 25 bp, Artificial
  probe
  misc_feature (1)..(25): SEQ ID NO: 5772; WAN0249SW_at; Start 34; Stop 58
ttataagttatagtgtagcattcca

SEQ ID NO: 32861 - DNA, 25 bp, Artificial
  probe
  misc_feature (1)..(25): SEQ ID NO: 5772; WAN0249SW_at; Start 29; Stop 53
atattttataagttatagtgtagca

SEQ ID NO: 32862 - DNA, 25 bp, Artificial
  probe
  misc_feature (1)..(25): SEQ ID NO: 5772; WAN0249SW_at; Start 37; Stop 61
taagttatagtgtagcattccaact

SEQ ID NO: 32863 - DNA, 25 bp, Artificial
  probe
  misc_feature (1)..(25): SEQ ID NO: 5772; WAN0249SW_at; Start 42; Stop 66
tatagtgtagcattccaacttcaaa

SEQ ID NO: 32864 - DNA, 25 bp, Artificial
  probe
  misc_feature (1)..(25): SEQ ID NO: 4729; WAN0249SX_at; Start 49; Stop 73
ctatctgacataaaactcgttctag

SEQ ID NO: 32865 - DNA, 25 bp, Artificial
  probe
  misc_feature (1)..(25): SEQ ID NO: 4729; WAN0249SX_at; Start 52; Stop 76
tctgacataaaactcgttctagagg

SEQ ID NO: 32866 - DNA, 25 bp, Artificial
  probe
  misc_feature (1)..(25): SEQ ID NO: 4729; WAN0249SX_at; Start 33; Stop 57
tgaagaggcgtttaaactatctgac

SEQ ID NO: 32867 - DNA, 25 bp, Artificial
  probe
  misc_feature (1)..(25): SEQ ID NO: 4729; WAN0249SX_at; Start 61; Stop 85
aaactcgttctagaggaaagacatc

SEQ ID NO: 32868 - DNA, 25 bp, Artificial
  probe
  misc_feature (1)..(25): SEQ ID NO: 4729; WAN0249SX_at; Start 22; Stop 46
tttactatatttgaagaggcgttta

SEQ ID NO: 32869 - DNA, 25 bp, Artificial
  probe
  misc_feature (1)..(25): SEQ ID NO: 4729; WAN0249SX_at; Start 67; Stop 91
gttctagaggaaagacatcctttaa

SEQ ID NO: 32870 - DNA, 25 bp, Artificial
  probe
  misc_feature (1)..(25): SEQ ID NO: 4729; WAN0249SX_at; Start 26; Stop 50
ctatatttgaagaggcgtttaaact

SEQ ID NO: 32871 - DNA, 25 bp, Artificial
  probe
  misc_feature (1)..(25): SEQ ID NO: 4729; WAN0249SX_at; Start 53; Stop 77
ctgacataaaactcgttctagagga

SEQ ID NO: 32872 - DNA, 25 bp, Artificial
  probe
  misc_feature (1)..(25): SEQ ID NO: 4729; WAN0249SX_at; Start 47; Stop 71
aactatctgacataaaactcgttct

SEQ ID NO: 32873 - DNA, 25 bp, Artificial
  probe
  misc_feature (1)..(25): SEQ ID NO: 4729; WAN0249SX_at; Start 45; Stop 69
taaactatctgacataaaactcgtt

SEQ ID NO: 32874 - DNA, 25 bp, Artificial
  probe
  misc_feature (1)..(25): SEQ ID NO: 4729; WAN0249SX_at; Start 24; Stop 48
tactatatttgaagaggcgtttaaa

SEQ ID NO: 32875 - DNA, 25 bp, Artificial
  probe
  misc_feature (1)..(25): SEQ ID NO: 4729; WAN0249SX_at; Start 59; Stop 83
taaaactcgttctagaggaaagaca

SEQ ID NO: 32876 - DNA, 25 bp, Artificial
  probe
  misc_feature (1)..(25): SEQ ID NO: 4729; WAN0249SX_at; Start 36; Stop 60
agaggcgtttaaactatctgacata

SEQ ID NO: 32877 - DNA, 25 bp, Artificial
  probe
  misc_feature (1)..(25): SEQ ID NO: 4729; WAN0249SX_at; Start 50; Stop 74
tatctgacataaaactcgttctaga

SEQ ID NO: 32878 - DNA, 25 bp, Artificial
  probe
  misc_feature (1)..(25): SEQ ID NO: 4729; WAN0249SX_at; Start 63; Stop 87
actcgttctagaggaaagacatcct

SEQ ID NO: 32879 - DNA, 25 bp, Artificial
  probe
  misc_feature (1)..(25): SEQ ID NO: 4729; WAN0249SX_at; Start 56; Stop 80
acataaaactcgttctagaggaaag

SEQ ID NO: 32880 - DNA, 25 bp, Artificial
  probe
  misc_feature (1)..(25): SEQ ID NO: 4729; WAN0249SX_at; Start 54; Stop 78
tgacataaaactcgttctagaggaa

SEQ ID NO: 32881 - DNA, 25 bp, Artificial
  probe
  misc_feature (1)..(25): SEQ ID NO: 4729; WAN0249SX_at; Start 60; Stop 84
aaaactcgttctagaggaaagacat

SEQ ID NO: 32882 - DNA, 25 bp, Artificial
  probe
  misc_feature (1)..(25): SEQ ID NO: 4729; WAN0249SX_at; Start 57; Stop 81
cataaaactcgttctagaggaaaga

SEQ ID NO: 32883 - DNA, 25 bp, Artificial
  probe
  misc_feature (1)..(25): SEQ ID NO: 4729; WAN0249SX_at; Start 35; Stop 59
aagaggcgtttaaactatctgacat

SEQ ID NO: 32884 - DNA, 25 bp, Artificial
  probe
  misc_feature (1)..(25): SEQ ID NO: 4729; WAN0249SX_at; Start 62; Stop 86
aactcgttctagaggaaagacatcc

SEQ ID NO: 32885 - DNA, 25 bp, Artificial
  probe
  misc_feature (1)..(25): SEQ ID NO: 4729; WAN0249SX_at; Start 65; Stop 89
tcgttctagaggaaagacatccttt

SEQ ID NO: 32886 - DNA, 25 bp, Artificial
  probe
  misc_feature (1)..(25): SEQ ID NO: 4729; WAN0249SX_at; Start 32; Stop 56
ttgaagaggcgtttaaactatctga

SEQ ID NO: 32887 - DNA, 25 bp, Artificial
  probe
  misc_feature (1)..(25): SEQ ID NO: 4729; WAN0249SX_at; Start 39; Stop 63
ggcgtttaaactatctgacataaaa

SEQ ID NO: 32888 - DNA, 25 bp, Artificial
  probe
  misc_feature (1)..(25): SEQ ID NO: 4729; WAN0249SX_at; Start 37; Stop 61
gaggcgtttaaactatctgacataa

SEQ ID NO: 32889 - DNA, 25 bp, Artificial
  probe
  misc_feature (1)..(25): SEQ ID NO: 4729; WAN0249SX_at; Start 55; Stop 79
gacataaaactcgttctagaggaaa

SEQ ID NO: 32890 - DNA, 25 bp, Artificial
  probe
  misc_feature (1)..(25): SEQ ID NO: 4729; WAN0249SX_at; Start 31; Stop 55
tttgaagaggcgtttaaactatctg

SEQ ID NO: 32891 - DNA, 25 bp, Artificial
  probe
  misc_feature (1)..(25): SEQ ID NO: 4729; WAN0249SX_at; Start 66; Stop 90
cgttctagaggaaagacatccttta

SEQ ID NO: 32892 - DNA, 25 bp, Artificial
  probe
  misc_feature (1)..(25): SEQ ID NO: 4729; WAN0249SX_at; Start 69; Stop 93
tctagaggaaagacatcctttaaaa

SEQ ID NO: 32893 - DNA, 25 bp, Artificial
  probe
  misc_feature (1)..(25): SEQ ID NO: 4729; WAN0249SX_at; Start 20; Stop 44
attttactatatttgaagaggcgtt

SEQ ID NO: 32894 - DNA, 25 bp, Artificial
  probe
  misc_feature (1)..(25): SEQ ID NO: 4729; WAN0249SX_at; Start 34; Stop 58
gaagaggcgtttaaactatctgaca

SEQ ID NO: 32895 - DNA, 25 bp, Artificial
  probe
  misc_feature (1)..(25): SEQ ID NO: 4729; WAN0249SX_at; Start 44; Stop 68
ttaaactatctgacataaaactcgt

SEQ ID NO: 32896 - DNA, 25 bp, Artificial
  probe
  misc_feature (1)..(25): SEQ ID NO: 4729; WAN0249SX_at; Start 40; Stop 64
gcgtttaaactatctgacataaaac

SEQ ID NO: 32897 - DNA, 25 bp, Artificial
  probe
  misc_feature (1)..(25): SEQ ID NO: 4729; WAN0249SX_at; Start 64; Stop 88
ctcgttctagaggaaagacatcctt

SEQ ID NO: 32898 - DNA, 25 bp, Artificial
  probe
  misc_feature (1)..(25): SEQ ID NO: 4731; WAN0249SY_at; Start 26; Stop 50
ctataacacaaaatagattattatt

SEQ ID NO: 32899 - DNA, 25 bp, Artificial
  probe
  misc_feature (1)..(25): SEQ ID NO: 4731; WAN0249SY_at; Start 32; Stop 56
cacaaaatagattattattacataa

SEQ ID NO: 32900 - DNA, 25 bp, Artificial
  probe
  misc_feature (1)..(25): SEQ ID NO: 4731; WAN0249SY_at; Start 34; Stop 58
caaaatagattattattacataaca

SEQ ID NO: 32901 - DNA, 25 bp, Artificial
  probe
  misc_feature (1)..(25): SEQ ID NO: 4731; WAN0249SY_at; Start 28; Stop 52
ataacacaaaatagattattattac

SEQ ID NO: 32902 - DNA, 25 bp, Artificial
  probe
  misc_feature (1)..(25): SEQ ID NO: 4731; WAN0249SY_at; Start 33; Stop 57
acaaaatagattattattacataac

SEQ ID NO: 32903 - DNA, 25 bp, Artificial
  probe
  misc_feature (1)..(25): SEQ ID NO: 4731; WAN0249SY_at; Start 30; Stop 54
aacacaaaatagattattattacat

SEQ ID NO: 32904 - DNA, 25 bp, Artificial
  probe
  misc_feature (1)..(25): SEQ ID NO: 4731; WAN0249SY_at; Start 25; Stop 49
actataacacaaaatagattattat

SEQ ID NO: 32905 - DNA, 25 bp, Artificial
  probe
  misc_feature (1)..(25): SEQ ID NO: 4731; WAN0249SY_at; Start 27; Stop 51
tataacacaaaatagattattatta

SEQ ID NO: 32906 - DNA, 25 bp, Artificial
  probe
  misc_feature (1)..(25): SEQ ID NO: 4731; WAN0249SY_at; Start 47; Stop 71
tattacataacaaaaaagaggtcta

SEQ ID NO: 32907 - DNA, 25 bp, Artificial
  probe
  misc_feature (1)..(25): SEQ ID NO: 4731; WAN0249SY_at; Start 40; Stop 64
agattattattacataacaaaaaag

SEQ ID NO: 32908 - DNA, 25 bp, Artificial
  probe
  misc_feature (1)..(25): SEQ ID NO: 4731; WAN0249SY_at; Start 31; Stop 55
acacaaaatagattattattacata

SEQ ID NO: 32909 - DNA, 25 bp, Artificial
  probe
  misc_feature (1)..(25): SEQ ID NO: 4731; WAN0249SY_at; Start 42; Stop 66
attattattacataacaaaaaagag

SEQ ID NO: 32910 - DNA, 25 bp, Artificial
  probe
  misc_feature (1)..(25): SEQ ID NO: 4731; WAN0249SY_at; Start 39; Stop 63
tagattattattacataacaaaaaa

SEQ ID NO: 32911 - DNA, 25 bp, Artificial
  probe
  misc_feature (1)..(25): SEQ ID NO: 4731; WAN0249SY_at; Start 29; Stop 53
taacacaaaatagattattattaca

SEQ ID NO: 32912 - DNA, 25 bp, Artificial
  probe
  misc_feature (1)..(25): SEQ ID NO: 4731; WAN0249SY_at; Start 63; Stop 87
agaggtctaaacctcttaactcaat

SEQ ID NO: 32913 - DNA, 25 bp, Artificial
  probe
  misc_feature (1)..(25): SEQ ID NO: 4731; WAN0249SY_at; Start 41; Stop 65
gattattattacataacaaaaaaga

SEQ ID NO: 32914 - DNA, 25 bp, Artificial
  probe
  misc_feature (1)..(25): SEQ ID NO: 163; WAN0249SZ_at; Start 89; Stop 113
aacaccatttcaggataatataaag

SEQ ID NO: 32915 - DNA, 25 bp, Artificial
  probe
  misc_feature (1)..(25): SEQ ID NO: 163; WAN0249SZ_at; Start 210; Stop 234
tttaacttgatactcagtgaaaagc

SEQ ID NO: 32916 - DNA, 25 bp, Artificial
  probe
  misc_feature (1)..(25): SEQ ID NO: 163; WAN0249SZ_at; Start 138; Stop 162
tattatcaaacttttcatcacctga

SEQ ID NO: 32917 - DNA, 25 bp, Artificial
  probe
  misc_feature (1)..(25): SEQ ID NO: 163; WAN0249SZ_at; Start 63; Stop 87
aaagtcaagccagataactcaaaaa

SEQ ID NO: 32918 - DNA, 25 bp, Artificial
  probe
  misc_feature (1)..(25): SEQ ID NO: 163; WAN0249SZ_at; Start 8; Stop 32
cctcttttctcgttgtaattattat

SEQ ID NO: 32919 - DNA, 25 bp, Artificial
  probe
  misc_feature (1)..(25): SEQ ID NO: 163; WAN0249SZ_at; Start 93; Stop 117
ccatttcaggataatataaagtaaa

SEQ ID NO: 32920 - DNA, 25 bp, Artificial
  probe
  misc_feature (1)..(25): SEQ ID NO: 163; WAN0249SZ_at; Start 84; Stop 108
aaaataacaccatttcaggataata

SEQ ID NO: 32921 - DNA, 25 bp, Artificial
  probe
  misc_feature (1)..(25): SEQ ID NO: 163; WAN0249SZ_at; Start 82; Stop 106
caaaaataacaccatttcaggataa

SEQ ID NO: 32922 - DNA, 25 bp, Artificial
  probe
  misc_feature (1)..(25): SEQ ID NO: 163; WAN0249SZ_at; Start 78; Stop 102
aactcaaaaataacaccatttcagg

SEQ ID NO: 32923 - DNA, 25 bp, Artificial
  probe
  misc_feature (1)..(25): SEQ ID NO: 163; WAN0249SZ_at; Start 216; Stop 240
ttgatactcagtgaaaagcaaagat

SEQ ID NO: 32924 - DNA, 25 bp, Artificial
  probe
  misc_feature (1)..(25): SEQ ID NO: 163; WAN0249SZ_at; Start 211; Stop 235
ttaacttgatactcagtgaaaagca

SEQ ID NO: 32925 - DNA, 25 bp, Artificial
  probe
  misc_feature (1)..(25): SEQ ID NO: 163; WAN0249SZ_at; Start 98; Stop 122
tcaggataatataaagtaaatcatt

SEQ ID NO: 32926 - DNA, 25 bp, Artificial
  probe
  misc_feature (1)..(25): SEQ ID NO: 163; WAN0249SZ_at; Start 2; Stop 26
aatggtcctcttttctcgttgtaat

SEQ ID NO: 32927 - DNA, 25 bp, Artificial
  probe
  misc_feature (1)..(25): SEQ ID NO: 163; WAN0249SZ_at; Start 91; Stop 115
caccatttcaggataatataaagta

SEQ ID NO: 32928 - DNA, 25 bp, Artificial
  probe
  misc_feature (1)..(25): SEQ ID NO: 163; WAN0249SZ_at; Start 65; Stop 89
agtcaagccagataactcaaaaata

SEQ ID NO: 32929 - DNA, 25 bp, Artificial
  probe
  misc_feature (1)..(25): SEQ ID NO: 163; WAN0249SZ_at; Start 135; Stop 159
gcatattatcaaacttttcatcacc

SEQ ID NO: 32930 - DNA, 25 bp, Artificial
  probe
  misc_feature (1)..(25): SEQ ID NO: 163; WAN0249SZ_at; Start 62; Stop 86
gaaagtcaagccagataactcaaaa

SEQ ID NO: 32931 - DNA, 25 bp, Artificial
  probe
  misc_feature (1)..(25): SEQ ID NO: 163; WAN0249SZ_at; Start 215; Stop 239
cttgatactcagtgaaaagcaaaga

SEQ ID NO: 32932 - DNA, 25 bp, Artificial
  probe
  misc_feature (1)..(25): SEQ ID NO: 163; WAN0249SZ_at; Start 111; Stop 135
aagtaaatcatttcataataaaacg

SEQ ID NO: 32933 - DNA, 25 bp, Artificial
  probe
  misc_feature (1)..(25): SEQ ID NO: 163; WAN0249SZ_at; Start 214; Stop 238
acttgatactcagtgaaaagcaaag

SEQ ID NO: 32934 - DNA, 25 bp, Artificial
  probe
  misc_feature (1)..(25): SEQ ID NO: 163; WAN0249SZ_at; Start 7; Stop 31
tcctcttttctcgttgtaattatta

SEQ ID NO: 32935 - DNA, 25 bp, Artificial
  probe
  misc_feature (1)..(25): SEQ ID NO: 163; WAN0249SZ_at; Start 81; Stop 105
tcaaaaataacaccatttcaggata

SEQ ID NO: 32936 - DNA, 25 bp, Artificial
  probe
  misc_feature (1)..(25): SEQ ID NO: 163; WAN0249SZ_at; Start 86; Stop 110
aataacaccatttcaggataatata

SEQ ID NO: 32937 - DNA, 25 bp, Artificial
  probe
  misc_feature (1)..(25): SEQ ID NO: 163; WAN0249SZ_at; Start 101; Stop 125
ggataatataaagtaaatcatttca

SEQ ID NO: 32938 - DNA, 25 bp, Artificial
  probe
  misc_feature (1)..(25): SEQ ID NO: 163; WAN0249SZ_at; Start 64; Stop 88
aagtcaagccagataactcaaaaat

SEQ ID NO: 32939 - DNA, 25 bp, Artificial
  probe
  misc_feature (1)..(25): SEQ ID NO: 163; WAN0249SZ_at; Start 80; Stop 104
ctcaaaaataacaccatttcaggat

SEQ ID NO: 32940 - DNA, 25 bp, Artificial
  probe
  misc_feature (1)..(25): SEQ ID NO: 163; WAN0249SZ_at; Start 96; Stop 120
tttcaggataatataaagtaaatca

SEQ ID NO: 32941 - DNA, 25 bp, Artificial
  probe
  misc_feature (1)..(25): SEQ ID NO: 163; WAN0249SZ_at; Start 79; Stop 103
actcaaaaataacaccatttcagga

SEQ ID NO: 32942 - DNA, 25 bp, Artificial
  probe
  misc_feature (1)..(25): SEQ ID NO: 163; WAN0249SZ_at; Start 4; Stop 28
tggtcctcttttctcgttgtaatta

SEQ ID NO: 32943 - DNA, 25 bp, Artificial
  probe
  misc_feature (1)..(25): SEQ ID NO: 163; WAN0249SZ_at; Start 212; Stop 236
taacttgatactcagtgaaaagcaa

SEQ ID NO: 32944 - DNA, 25 bp, Artificial
  probe
  misc_feature (1)..(25): SEQ ID NO: 163; WAN0249SZ_at; Start 88; Stop 112
taacaccatttcaggataatataaa

SEQ ID NO: 32945 - DNA, 25 bp, Artificial
  probe
  misc_feature (1)..(25): SEQ ID NO: 163; WAN0249SZ_at; Start 132; Stop 156
aacgcatattatcaaacttttcatc

SEQ ID NO: 32946 - DNA, 25 bp, Artificial
  probe
  misc_feature (1)..(25): SEQ ID NO: 163; WAN0249SZ_at; Start 213; Stop 237
aacttgatactcagtgaaaagcaaa

SEQ ID NO: 32947 - DNA, 25 bp, Artificial
  probe
  misc_feature (1)..(25): SEQ ID NO: 163; WAN0249SZ_at; Start 77; Stop 101
taactcaaaaataacaccatttcag

SEQ ID NO: 32948 - DNA, 25 bp, Artificial
  probe
  misc_feature (1)..(25): SEQ ID NO: 5675; WAN0249T2_at; Start 82; Stop 106
tcttgtcctaggcatgttgaggttg

SEQ ID NO: 32949 - DNA, 25 bp, Artificial
  probe
  misc_feature (1)..(25): SEQ ID NO: 5675; WAN0249T2_at; Start 128; Stop 152
aaaacgtatcatatcaggtgatgaa

SEQ ID NO: 32950 - DNA, 25 bp, Artificial
  probe
  misc_feature (1)..(25): SEQ ID NO: 5675; WAN0249T2_at; Start 24; Stop 48
tatcataaaatgtctagctcatact

SEQ ID NO: 32951 - DNA, 25 bp, Artificial
  probe
  misc_feature (1)..(25): SEQ ID NO: 5675; WAN0249T2_at; Start 66; Stop 90
aacgaggtcaccttcctcttgtcct

SEQ ID NO: 32952 - DNA, 25 bp, Artificial
  probe
  misc_feature (1)..(25): SEQ ID NO: 5675; WAN0249T2_at; Start 88; Stop 112
cctaggcatgttgaggttgggaaaa

SEQ ID NO: 32953 - DNA, 25 bp, Artificial
  probe
  misc_feature (1)..(25): SEQ ID NO: 5675; WAN0249T2_at; Start 69; Stop 93
gaggtcaccttcctcttgtcctagg

SEQ ID NO: 32954 - DNA, 25 bp, Artificial
  probe
  misc_feature (1)..(25): SEQ ID NO: 5675; WAN0249T2_at; Start 70; Stop 94
aggtcaccttcctcttgtcctaggc

SEQ ID NO: 32955 - DNA, 25 bp, Artificial
  probe
  misc_feature (1)..(25): SEQ ID NO: 5675; WAN0249T2_at; Start 71; Stop 95
ggtcaccttcctcttgtcctaggca

SEQ ID NO: 32956 - DNA, 25 bp, Artificial
  probe
  misc_feature (1)..(25): SEQ ID NO: 5675; WAN0249T2_at; Start 90; Stop 114
taggcatgttgaggttgggaaaaat

SEQ ID NO: 32957 - DNA, 25 bp, Artificial
  probe
  misc_feature (1)..(25): SEQ ID NO: 5675; WAN0249T2_at; Start 8; Stop 32
ggcaaaggatttgttttatcataaa

SEQ ID NO: 32958 - DNA, 25 bp, Artificial
  probe
  misc_feature (1)..(25): SEQ ID NO: 5675; WAN0249T2_at; Start 87; Stop 111
tcctaggcatgttgaggttgggaaa

SEQ ID NO: 32959 - DNA, 25 bp, Artificial
  probe
  misc_feature (1)..(25): SEQ ID NO: 5675; WAN0249T2_at; Start 29; Stop 53
taaaatgtctagctcatacttttca

SEQ ID NO: 32960 - DNA, 25 bp, Artificial
  probe
  misc_feature (1)..(25): SEQ ID NO: 5675; WAN0249T2_at; Start 51; Stop 75
tcaaaaatatgtttaaacgaggtca

SEQ ID NO: 32961 - DNA, 25 bp, Artificial
  probe
  misc_feature (1)..(25): SEQ ID NO: 5675; WAN0249T2_at; Start 130; Stop 154
aacgtatcatatcaggtgatgaaaa

SEQ ID NO: 32962 - DNA, 25 bp, Artificial
  probe
  misc_feature (1)..(25): SEQ ID NO: 5675; WAN0249T2_at; Start 35; Stop 59
gtctagctcatacttttcaaaaata

SEQ ID NO: 32963 - DNA, 25 bp, Artificial
  probe
  misc_feature (1)..(25): SEQ ID NO: 5675; WAN0249T2_at; Start 89; Stop 113
ctaggcatgttgaggttgggaaaaa

SEQ ID NO: 32964 - DNA, 25 bp, Artificial
  probe
  misc_feature (1)..(25): SEQ ID NO: 5675; WAN0249T2_at; Start 118; Stop 142
taaaatcagaaaaacgtatcatatc

SEQ ID NO: 32965 - DNA, 25 bp, Artificial
  probe
  misc_feature (1)..(25): SEQ ID NO: 5675; WAN0249T2_at; Start 78; Stop 102
ttcctcttgtcctaggcatgttgag

SEQ ID NO: 32966 - DNA, 25 bp, Artificial
  probe
  misc_feature (1)..(25): SEQ ID NO: 5675; WAN0249T2_at; Start 77; Stop 101
cttcctcttgtcctaggcatgttga

SEQ ID NO: 32967 - DNA, 25 bp, Artificial
  probe
  misc_feature (1)..(25): SEQ ID NO: 5675; WAN0249T2_at; Start 79; Stop 103
tcctcttgtcctaggcatgttgagg

SEQ ID NO: 32968 - DNA, 25 bp, Artificial
  probe
  misc_feature (1)..(25): SEQ ID NO: 5675; WAN0249T2_at; Start 92; Stop 116
ggcatgttgaggttgggaaaaatct

SEQ ID NO: 32969 - DNA, 25 bp, Artificial
  probe
  misc_feature (1)..(25): SEQ ID NO: 5675; WAN0249T2_at; Start 80; Stop 104
cctcttgtcctaggcatgttgaggt

SEQ ID NO: 32970 - DNA, 25 bp, Artificial
  probe
  misc_feature (1)..(25): SEQ ID NO: 5675; WAN0249T2_at; Start 83; Stop 107
cttgtcctaggcatgttgaggttgg

SEQ ID NO: 32971 - DNA, 25 bp, Artificial
  probe
  misc_feature (1)..(25): SEQ ID NO: 5675; WAN0249T2_at; Start 94; Stop 118
catgttgaggttgggaaaaatcttt

SEQ ID NO: 32972 - DNA, 25 bp, Artificial
  probe
  misc_feature (1)..(25): SEQ ID NO: 5675; WAN0249T2_at; Start 124; Stop 148
cagaaaaacgtatcatatcaggtga

SEQ ID NO: 32973 - DNA, 25 bp, Artificial
  probe
  misc_feature (1)..(25): SEQ ID NO: 5675; WAN0249T2_at; Start 76; Stop 100
ccttcctcttgtcctaggcatgttg

SEQ ID NO: 32974 - DNA, 25 bp, Artificial
  probe
  misc_feature (1)..(25): SEQ ID NO: 5675; WAN0249T2_at; Start 123; Stop 147
tcagaaaaacgtatcatatcaggtg

SEQ ID NO: 32975 - DNA, 25 bp, Artificial
  probe
  misc_feature (1)..(25): SEQ ID NO: 5675; WAN0249T2_at; Start 64; Stop 88
taaacgaggtcaccttcctcttgtc

SEQ ID NO: 32976 - DNA, 25 bp, Artificial
  probe
  misc_feature (1)..(25): SEQ ID NO: 5675; WAN0249T2_at; Start 126; Stop 150
gaaaaacgtatcatatcaggtgatg

SEQ ID NO: 32977 - DNA, 25 bp, Artificial
  probe
  misc_feature (1)..(25): SEQ ID NO: 5675; WAN0249T2_at; Start 26; Stop 50
tcataaaatgtctagctcatacttt

SEQ ID NO: 32978 - DNA, 25 bp, Artificial
  probe
  misc_feature (1)..(25): SEQ ID NO: 5675; WAN0249T2_at; Start 20; Stop 44
gttttatcataaaatgtctagctca

SEQ ID NO: 32979 - DNA, 25 bp, Artificial
  probe
  misc_feature (1)..(25): SEQ ID NO: 5675; WAN0249T2_at; Start 121; Stop 145
aatcagaaaaacgtatcatatcagg

SEQ ID NO: 32980 - DNA, 25 bp, Artificial
  probe
  misc_feature (1)..(25): SEQ ID NO: 5675; WAN0249T2_at; Start 73; Stop 97
tcaccttcctcttgtcctaggcatg

SEQ ID NO: 32981 - DNA, 25 bp, Artificial
  probe
  misc_feature (1)..(25): SEQ ID NO: 5675; WAN0249T2_at; Start 32; Stop 56
aatgtctagctcatacttttcaaaa

SEQ ID NO: 32982 - DNA, 25 bp, Artificial
  probe
  misc_feature (1)..(25): SEQ ID NO: 292; WAN0249T3_at; Start 52; Stop 76
tttattgtgggaatgtttgcttcat

SEQ ID NO: 32983 - DNA, 25 bp, Artificial
  probe
  misc_feature (1)..(25): SEQ ID NO: 292; WAN0249T3_at; Start 69; Stop 93
tgcttcattttttcctgaagtcgag

SEQ ID NO: 32984 - DNA, 25 bp, Artificial
  probe
  misc_feature (1)..(25): SEQ ID NO: 292; WAN0249T3_at; Start 68; Stop 92
ttgcttcattttttcctgaagtcga

SEQ ID NO: 32985 - DNA, 25 bp, Artificial
  probe
  misc_feature (1)..(25): SEQ ID NO: 292; WAN0249T3_at; Start 67; Stop 91
tttgcttcattttttcctgaagtcg

SEQ ID NO: 32986 - DNA, 25 bp, Artificial
  probe
  misc_feature (1)..(25): SEQ ID NO: 292; WAN0249T3_at; Start 92; Stop 116
agttttttccctgactcattgattt

SEQ ID NO: 32987 - DNA, 25 bp, Artificial
  probe
  misc_feature (1)..(25): SEQ ID NO: 292; WAN0249T3_at; Start 61; Stop 85
ggaatgtttgcttcattttttcctg

SEQ ID NO: 32988 - DNA, 25 bp, Artificial
  probe
  misc_feature (1)..(25): SEQ ID NO: 292; WAN0249T3_at; Start 25; Stop 49
gggcagtacaaaccttgtactatgc

SEQ ID NO: 32989 - DNA, 25 bp, Artificial
  probe
  misc_feature (1)..(25): SEQ ID NO: 292; WAN0249T3_at; Start 70; Stop 94
gcttcattttttcctgaagtcgagt

SEQ ID NO: 32990 - DNA, 25 bp, Artificial
  probe
  misc_feature (1)..(25): SEQ ID NO: 292; WAN0249T3_at; Start 55; Stop 79
attgtgggaatgtttgcttcatttt

SEQ ID NO: 32991 - DNA, 25 bp, Artificial
  probe
  misc_feature (1)..(25): SEQ ID NO: 292; WAN0249T3_at; Start 93; Stop 117
gttttttccctgactcattgatttg

SEQ ID NO: 32992 - DNA, 25 bp, Artificial
  probe
  misc_feature (1)..(25): SEQ ID NO: 292; WAN0249T3_at; Start 85; Stop 109
gaagtcgagttttttccctgactca

SEQ ID NO: 32993 - DNA, 25 bp, Artificial
  probe
  misc_feature (1)..(25): SEQ ID NO: 292; WAN0249T3_at; Start 65; Stop 89
tgtttgcttcattttttcctgaagt

SEQ ID NO: 32994 - DNA, 25 bp, Artificial
  probe
  misc_feature (1)..(25): SEQ ID NO: 292; WAN0249T3_at; Start 66; Stop 90
gtttgcttcattttttcctgaagtc

SEQ ID NO: 32995 - DNA, 25 bp, Artificial
  probe
  misc_feature (1)..(25): SEQ ID NO: 292; WAN0249T3_at; Start 26; Stop 50
ggcagtacaaaccttgtactatgcg

SEQ ID NO: 32996 - DNA, 25 bp, Artificial
  probe
  misc_feature (1)..(25): SEQ ID NO: 292; WAN0249T3_at; Start 83; Stop 107
ctgaagtcgagttttttccctgact

SEQ ID NO: 32997 - DNA, 25 bp, Artificial
  probe
  misc_feature (1)..(25): SEQ ID NO: 292; WAN0249T3_at; Start 53; Stop 77
ttattgtgggaatgtttgcttcatt

SEQ ID NO: 32998 - DNA, 25 bp, Artificial
  probe
  misc_feature (1)..(25): SEQ ID NO: 292; WAN0249T3_at; Start 27; Stop 51
gcagtacaaaccttgtactatgcgt

SEQ ID NO: 32999 - DNA, 25 bp, Artificial
  probe
  misc_feature (1)..(25): SEQ ID NO: 292; WAN0249T3_at; Start 95; Stop 119
tttttccctgactcattgatttgga

SEQ ID NO: 33000 - DNA, 25 bp, Artificial
  probe
  misc_feature (1)..(25): SEQ ID NO: 292; WAN0249T3_at; Start 84; Stop 108
tgaagtcgagttttttccctgactc

SEQ ID NO: 33001 - DNA, 25 bp, Artificial
  probe
  misc_feature (1)..(25): SEQ ID NO: 292; WAN0249T3_at; Start 51; Stop 75
ttttattgtgggaatgtttgcttca

SEQ ID NO: 33002 - DNA, 25 bp, Artificial
  probe
  misc_feature (1)..(25): SEQ ID NO: 292; WAN0249T3_at; Start 88; Stop 112
gtcgagttttttccctgactcattg

SEQ ID NO: 33003 - DNA, 25 bp, Artificial
  probe
  misc_feature (1)..(25): SEQ ID NO: 292; WAN0249T3_at; Start 71; Stop 95
cttcattttttcctgaagtcgagtt

SEQ ID NO: 33004 - DNA, 25 bp, Artificial
  probe
  misc_feature (1)..(25): SEQ ID NO: 292; WAN0249T3_at; Start 64; Stop 88
atgtttgcttcattttttcctgaag

SEQ ID NO: 33005 - DNA, 25 bp, Artificial
  probe
  misc_feature (1)..(25): SEQ ID NO: 292; WAN0249T3_at; Start 90; Stop 114
cgagttttttccctgactcattgat

SEQ ID NO: 33006 - DNA, 25 bp, Artificial
  probe
  misc_feature (1)..(25): SEQ ID NO: 292; WAN0249T3_at; Start 62; Stop 86
gaatgtttgcttcattttttcctga

SEQ ID NO: 33007 - DNA, 25 bp, Artificial
  probe
  misc_feature (1)..(25): SEQ ID NO: 292; WAN0249T3_at; Start 28; Stop 52
cagtacaaaccttgtactatgcgtt

SEQ ID NO: 33008 - DNA, 25 bp, Artificial
  probe
  misc_feature (1)..(25): SEQ ID NO: 292; WAN0249T3_at; Start 86; Stop 110
aagtcgagttttttccctgactcat

SEQ ID NO: 33009 - DNA, 25 bp, Artificial
  probe
  misc_feature (1)..(25): SEQ ID NO: 292; WAN0249T3_at; Start 59; Stop 83
tgggaatgtttgcttcattttttcc

SEQ ID NO: 33010 - DNA, 25 bp, Artificial
  probe
  misc_feature (1)..(25): SEQ ID NO: 292; WAN0249T3_at; Start 87; Stop 111
agtcgagttttttccctgactcatt

SEQ ID NO: 33011 - DNA, 25 bp, Artificial
  probe
  misc_feature (1)..(25): SEQ ID NO: 292; WAN0249T3_at; Start 81; Stop 105
tcctgaagtcgagttttttccctga

SEQ ID NO: 33012 - DNA, 25 bp, Artificial
  probe
  misc_feature (1)..(25): SEQ ID NO: 292; WAN0249T3_at; Start 94; Stop 118
ttttttccctgactcattgatttgg

SEQ ID NO: 33013 - DNA, 25 bp, Artificial
  probe
  misc_feature (1)..(25): SEQ ID NO: 292; WAN0249T3_at; Start 54; Stop 78
tattgtgggaatgtttgcttcattt

SEQ ID NO: 33014 - DNA, 25 bp, Artificial
  probe
  misc_feature (1)..(25): SEQ ID NO: 292; WAN0249T3_at; Start 91; Stop 115
gagttttttccctgactcattgatt

SEQ ID NO: 33015 - DNA, 25 bp, Artificial
  probe
  misc_feature (1)..(25): SEQ ID NO: 292; WAN0249T3_at; Start 58; Stop 82
gtgggaatgtttgcttcattttttc

SEQ ID NO: 33016 - DNA, 25 bp, Artificial
  probe
  misc_feature (1)..(25): SEQ ID NO: 244; WAN0249T4_x_at; Start 56; Stop 80
gtgttcaaaaaccttgattttatgc

SEQ ID NO: 33017 - DNA, 25 bp, Artificial
  probe
  misc_feature (1)..(25): SEQ ID NO: 244; WAN0249T4_x_at; Start 38; Stop 62
aaaaacgcataaaatcaggtgttca

SEQ ID NO: 33018 - DNA, 25 bp, Artificial
  probe
  misc_feature (1)..(25): SEQ ID NO: 244; WAN0249T4_x_at; Start 66; Stop 90
accttgattttatgcgttttatcat

SEQ ID NO: 33019 - DNA, 25 bp, Artificial
  probe
  misc_feature (1)..(25): SEQ ID NO: 244; WAN0249T4_x_at; Start 65; Stop 89
aaccttgattttatgcgttttatca

SEQ ID NO: 33020 - DNA, 25 bp, Artificial
  probe
  misc_feature (1)..(25): SEQ ID NO: 244; WAN0249T4_x_at; Start 57; Stop 81
tgttcaaaaaccttgattttatgcg

SEQ ID NO: 33021 - DNA, 25 bp, Artificial
  probe
  misc_feature (1)..(25): SEQ ID NO: 244; WAN0249T4_x_at; Start 40; Stop 64
aaacgcataaaatcaggtgttcaaa

SEQ ID NO: 33022 - DNA, 25 bp, Artificial
  probe
  misc_feature (1)..(25): SEQ ID NO: 244; WAN0249T4_x_at; Start 49; Stop 73
aaatcaggtgttcaaaaaccttgat

SEQ ID NO: 33023 - DNA, 25 bp, Artificial
  probe
  misc_feature (1)..(25): SEQ ID NO: 244; WAN0249T4_x_at; Start 43; Stop 67
cgcataaaatcaggtgttcaaaaac

SEQ ID NO: 33024 - DNA, 25 bp, Artificial
  probe
  misc_feature (1)..(25): SEQ ID NO: 244; WAN0249T4_x_at; Start 50; Stop 74
aatcaggtgttcaaaaaccttgatt

SEQ ID NO: 33025 - DNA, 25 bp, Artificial
  probe
  misc_feature (1)..(25): SEQ ID NO: 244; WAN0249T4_x_at; Start 41; Stop 65
aacgcataaaatcaggtgttcaaaa

SEQ ID NO: 33026 - DNA, 25 bp, Artificial
  probe
  misc_feature (1)..(25): SEQ ID NO: 244; WAN0249T4_x_at; Start 39; Stop 63
aaaacgcataaaatcaggtgttcaa

SEQ ID NO: 33027 - DNA, 25 bp, Artificial
  probe
  misc_feature (1)..(25): SEQ ID NO: 244; WAN0249T4_x_at; Start 51; Stop 75
atcaggtgttcaaaaaccttgattt

SEQ ID NO: 33028 - DNA, 25 bp, Artificial
  probe
  misc_feature (1)..(25): SEQ ID NO: 244; WAN0249T4_x_at; Start 42; Stop 66
acgcataaaatcaggtgttcaaaaa

SEQ ID NO: 33029 - DNA, 25 bp, Artificial
  probe
  misc_feature (1)..(25): SEQ ID NO: 244; WAN0249T4_x_at; Start 45; Stop 69
cataaaatcaggtgttcaaaaacct

SEQ ID NO: 33030 - DNA, 25 bp, Artificial
  probe
  misc_feature (1)..(25): SEQ ID NO: 244; WAN0249T4_x_at; Start 44; Stop 68
gcataaaatcaggtgttcaaaaacc

SEQ ID NO: 33031 - DNA, 25 bp, Artificial
  probe
  misc_feature (1)..(25): SEQ ID NO: 599; WAN0249T5_at; Start 152; Stop 176
tatttttgagttatctggcttgact

SEQ ID NO: 33032 - DNA, 25 bp, Artificial
  probe
  misc_feature (1)..(25): SEQ ID NO: 599; WAN0249T5_at; Start 119; Stop 143
aatgatttactttatattatcctga

SEQ ID NO: 33033 - DNA, 25 bp, Artificial
  probe
  misc_feature (1)..(25): SEQ ID NO: 599; WAN0249T5_at; Start 85; Stop 109
gatgaaaagtttgataatatgcgtt

SEQ ID NO: 33034 - DNA, 25 bp, Artificial
  probe
  misc_feature (1)..(25): SEQ ID NO: 599; WAN0249T5_at; Start 214; Stop 238
aattacaacgagaaaagaggaccat

SEQ ID NO: 33035 - DNA, 25 bp, Artificial
  probe
  misc_feature (1)..(25): SEQ ID NO: 599; WAN0249T5_at; Start 139; Stop 163
cctgaaatggtgttatttttgagtt

SEQ ID NO: 33036 - DNA, 25 bp, Artificial
  probe
  misc_feature (1)..(25): SEQ ID NO: 599; WAN0249T5_at; Start 131; Stop 155
tatattatcctgaaatggtgttatt

SEQ ID NO: 33037 - DNA, 25 bp, Artificial
  probe
  misc_feature (1)..(25): SEQ ID NO: 599; WAN0249T5_at; Start 124; Stop 148
tttactttatattatcctgaaatgg

SEQ ID NO: 33038 - DNA, 25 bp, Artificial
  probe
  misc_feature (1)..(25): SEQ ID NO: 599; WAN0249T5_at; Start 79; Stop 103
tcaggtgatgaaaagtttgataata

SEQ ID NO: 33039 - DNA, 25 bp, Artificial
  probe
  misc_feature (1)..(25): SEQ ID NO: 599; WAN0249T5_at; Start 136; Stop 160
tatcctgaaatggtgttatttttga

SEQ ID NO: 33040 - DNA, 25 bp, Artificial
  probe
  misc_feature (1)..(25): SEQ ID NO: 599; WAN0249T5_at; Start 133; Stop 157
tattatcctgaaatggtgttatttt

SEQ ID NO: 33041 - DNA, 25 bp, Artificial
  probe
  misc_feature (1)..(25): SEQ ID NO: 599; WAN0249T5_at; Start 153; Stop 177
atttttgagttatctggcttgactt

SEQ ID NO: 33042 - DNA, 25 bp, Artificial
  probe
  misc_feature (1)..(25): SEQ ID NO: 599; WAN0249T5_at; Start 84; Stop 108
tgatgaaaagtttgataatatgcgt

SEQ ID NO: 33043 - DNA, 25 bp, Artificial
  probe
  misc_feature (1)..(25): SEQ ID NO: 599; WAN0249T5_at; Start 4; Stop 28
tttgcttttcactgagtatcaagtt

SEQ ID NO: 33044 - DNA, 25 bp, Artificial
  probe
  misc_feature (1)..(25): SEQ ID NO: 599; WAN0249T5_at; Start 215; Stop 239
attacaacgagaaaagaggaccatt

SEQ ID NO: 33045 - DNA, 25 bp, Artificial
  probe
  misc_feature (1)..(25): SEQ ID NO: 599; WAN0249T5_at; Start 213; Stop 237
taattacaacgagaaaagaggacca

SEQ ID NO: 33046 - DNA, 25 bp, Artificial
  probe
  misc_feature (1)..(25): SEQ ID NO: 599; WAN0249T5_at; Start 210; Stop 234
taataattacaacgagaaaagagga

SEQ ID NO: 33047 - DNA, 25 bp, Artificial
  probe
  misc_feature (1)..(25): SEQ ID NO: 599; WAN0249T5_at; Start 138; Stop 162
tcctgaaatggtgttatttttgagt

SEQ ID NO: 33048 - DNA, 25 bp, Artificial
  probe
  misc_feature (1)..(25): SEQ ID NO: 599; WAN0249T5_at; Start 3; Stop 27
ctttgcttttcactgagtatcaagt

SEQ ID NO: 33049 - DNA, 25 bp, Artificial
  probe
  misc_feature (1)..(25): SEQ ID NO: 599; WAN0249T5_at; Start 2; Stop 26
tctttgcttttcactgagtatcaag

SEQ ID NO: 33050 - DNA, 25 bp, Artificial
  probe
  misc_feature (1)..(25): SEQ ID NO: 599; WAN0249T5_at; Start 155; Stop 179
ttttgagttatctggcttgactttc

SEQ ID NO: 33051 - DNA, 25 bp, Artificial
  probe
  misc_feature (1)..(25): SEQ ID NO: 599; WAN0249T5_at; Start 6; Stop 30
tgcttttcactgagtatcaagttaa

SEQ ID NO: 33052 - DNA, 25 bp, Artificial
  probe
  misc_feature (1)..(25): SEQ ID NO: 599; WAN0249T5_at; Start 82; Stop 106
ggtgatgaaaagtttgataatatgc

SEQ ID NO: 33053 - DNA, 25 bp, Artificial
  probe
  misc_feature (1)..(25): SEQ ID NO: 599; WAN0249T5_at; Start 129; Stop 153
tttatattatcctgaaatggtgtta

SEQ ID NO: 33054 - DNA, 25 bp, Artificial
  probe
  misc_feature (1)..(25): SEQ ID NO: 599; WAN0249T5_at; Start 7; Stop 31
gcttttcactgagtatcaagttaaa

SEQ ID NO: 33055 - DNA, 25 bp, Artificial
  probe
  misc_feature (1)..(25): SEQ ID NO: 599; WAN0249T5_at; Start 130; Stop 154
ttatattatcctgaaatggtgttat

SEQ ID NO: 33056 - DNA, 25 bp, Artificial
  probe
  misc_feature (1)..(25): SEQ ID NO: 599; WAN0249T5_at; Start 80; Stop 104
caggtgatgaaaagtttgataatat

SEQ ID NO: 33057 - DNA, 25 bp, Artificial
  probe
  misc_feature (1)..(25): SEQ ID NO: 599; WAN0249T5_at; Start 127; Stop 151
actttatattatcctgaaatggtgt

SEQ ID NO: 33058 - DNA, 25 bp, Artificial
  probe
  misc_feature (1)..(25): SEQ ID NO: 599; WAN0249T5_at; Start 5; Stop 29
ttgcttttcactgagtatcaagtta

SEQ ID NO: 33059 - DNA, 25 bp, Artificial
  probe
  misc_feature (1)..(25): SEQ ID NO: 599; WAN0249T5_at; Start 126; Stop 150
tactttatattatcctgaaatggtg

SEQ ID NO: 33060 - DNA, 25 bp, Artificial
  probe
  misc_feature (1)..(25): SEQ ID NO: 599; WAN0249T5_at; Start 10; Stop 34
tttcactgagtatcaagttaaaaaa

SEQ ID NO: 33061 - DNA, 25 bp, Artificial
  probe
  misc_feature (1)..(25): SEQ ID NO: 599; WAN0249T5_at; Start 128; Stop 152
ctttatattatcctgaaatggtgtt

SEQ ID NO: 33062 - DNA, 25 bp, Artificial
  probe
  misc_feature (1)..(25): SEQ ID NO: 599; WAN0249T5_at; Start 8; Stop 32
cttttcactgagtatcaagttaaaa

SEQ ID NO: 33063 - DNA, 25 bp, Artificial
  probe
  misc_feature (1)..(25): SEQ ID NO: 599; WAN0249T5_at; Start 137; Stop 161
atcctgaaatggtgttatttttgag

SEQ ID NO: 33064 - DNA, 25 bp, Artificial
  probe
  misc_feature (1)..(25): SEQ ID NO: 599; WAN0249T5_at; Start 121; Stop 145
tgatttactttatattatcctgaaa

SEQ ID NO: 33065 - DNA, 25 bp, Artificial
  probe
  misc_feature (1)..(25): SEQ ID NO: 4621; WAN0249T6_at; Start 72; Stop 96
tgttttagaaatcacagtgggctat

SEQ ID NO: 33066 - DNA, 25 bp, Artificial
  probe
  misc_feature (1)..(25): SEQ ID NO: 4621; WAN0249T6_at; Start 31; Stop 55
cagaacattttaattttggaagtca

SEQ ID NO: 33067 - DNA, 25 bp, Artificial
  probe
  misc_feature (1)..(25): SEQ ID NO: 4621; WAN0249T6_at; Start 18; Stop 42
cagtatttcattacagaacatttta

SEQ ID NO: 33068 - DNA, 25 bp, Artificial
  probe
  misc_feature (1)..(25): SEQ ID NO: 4621; WAN0249T6_at; Start 86; Stop 110
cagtgggctattccatattcaatta

SEQ ID NO: 33069 - DNA, 25 bp, Artificial
  probe
  misc_feature (1)..(25): SEQ ID NO: 4621; WAN0249T6_at; Start 84; Stop 108
cacagtgggctattccatattcaat

SEQ ID NO: 33070 - DNA, 25 bp, Artificial
  probe
  misc_feature (1)..(25): SEQ ID NO: 4621; WAN0249T6_at; Start 109; Stop 133
tatccatattcaatcgctattatcg

SEQ ID NO: 33071 - DNA, 25 bp, Artificial
  probe
  misc_feature (1)..(25): SEQ ID NO: 4621; WAN0249T6_at; Start 167; Stop 191
taatcaaaacgcagtttcagccact

SEQ ID NO: 33072 - DNA, 25 bp, Artificial
  probe
  misc_feature (1)..(25): SEQ ID NO: 4621; WAN0249T6_at; Start 126; Stop 150
tattatcgttttcctagattacaaa

SEQ ID NO: 33073 - DNA, 25 bp, Artificial
  probe
  misc_feature (1)..(25): SEQ ID NO: 4621; WAN0249T6_at; Start 36; Stop 60
cattttaattttggaagtcaaatca

SEQ ID NO: 33074 - DNA, 25 bp, Artificial
  probe
  misc_feature (1)..(25): SEQ ID NO: 4621; WAN0249T6_at; Start 77; Stop 101
tagaaatcacagtgggctattccat

SEQ ID NO: 33075 - DNA, 25 bp, Artificial
  probe
  misc_feature (1)..(25): SEQ ID NO: 4621; WAN0249T6_at; Start 119; Stop 143
caatcgctattatcgttttcctaga

SEQ ID NO: 33076 - DNA, 25 bp, Artificial
  probe
  misc_feature (1)..(25): SEQ ID NO: 4621; WAN0249T6_at; Start 75; Stop 99
tttagaaatcacagtgggctattcc

SEQ ID NO: 33077 - DNA, 25 bp, Artificial
  probe
  misc_feature (1)..(25): SEQ ID NO: 4621; WAN0249T6_at; Start 2; Stop 26
cctaaaacagttacatcagtatttc

SEQ ID NO: 33078 - DNA, 25 bp, Artificial
  probe
  misc_feature (1)..(25): SEQ ID NO: 4621; WAN0249T6_at; Start 47; Stop 71
tggaagtcaaatcaatttttaacaa

SEQ ID NO: 33079 - DNA, 25 bp, Artificial
  probe
  misc_feature (1)..(25): SEQ ID NO: 4621; WAN0249T6_at; Start 157; Stop 181
tacgttttgctaatcaaaacgcagt

SEQ ID NO: 33080 - DNA, 25 bp, Artificial
  probe
  misc_feature (1)..(25): SEQ ID NO: 4621; WAN0249T6_at; Start 69; Stop 93
caatgttttagaaatcacagtgggc

SEQ ID NO: 33081 - DNA, 25 bp, Artificial
  probe
  misc_feature (1)..(25): SEQ ID NO: 4621; WAN0249T6_at; Start 171; Stop 195
caaaacgcagtttcagccactattt

SEQ ID NO: 33082 - DNA, 25 bp, Artificial
  probe
  misc_feature (1)..(25): SEQ ID NO: 4621; WAN0249T6_at; Start 101; Stop 125
tattcaattatccatattcaatcgc

SEQ ID NO: 33083 - DNA, 25 bp, Artificial
  probe
  misc_feature (1)..(25): SEQ ID NO: 4621; WAN0249T6_at; Start 164; Stop 188
tgctaatcaaaacgcagtttcagcc

SEQ ID NO: 33084 - DNA, 25 bp, Artificial
  probe
  misc_feature (1)..(25): SEQ ID NO: 4621; WAN0249T6_at; Start 174; Stop 198
aacgcagtttcagccactattttat

SEQ ID NO: 33085 - DNA, 25 bp, Artificial
  probe
  misc_feature (1)..(25): SEQ ID NO: 4621; WAN0249T6_at; Start 111; Stop 135
tccatattcaatcgctattatcgtt

SEQ ID NO: 33086 - DNA, 25 bp, Artificial
  probe
  misc_feature (1)..(25): SEQ ID NO: 4621; WAN0249T6_at; Start 115; Stop 139
tattcaatcgctattatcgttttcc

SEQ ID NO: 33087 - DNA, 25 bp, Artificial
  probe
  misc_feature (1)..(25): SEQ ID NO: 4621; WAN0249T6_at; Start 71; Stop 95
atgttttagaaatcacagtgggcta

SEQ ID NO: 33088 - DNA, 25 bp, Artificial
  probe
  misc_feature (1)..(25): SEQ ID NO: 4621; WAN0249T6_at; Start 162; Stop 186
tttgctaatcaaaacgcagtttcag

SEQ ID NO: 33089 - DNA, 25 bp, Artificial
  probe
  misc_feature (1)..(25): SEQ ID NO: 4621; WAN0249T6_at; Start 104; Stop 128
tcaattatccatattcaatcgctat

SEQ ID NO: 33090 - DNA, 25 bp, Artificial
  probe
  misc_feature (1)..(25): SEQ ID NO: 4621; WAN0249T6_at; Start 124; Stop 148
gctattatcgttttcctagattaca

SEQ ID NO: 33091 - DNA, 25 bp, Artificial
  probe
  misc_feature (1)..(25): SEQ ID NO: 4621; WAN0249T6_at; Start 15; Stop 39
catcagtatttcattacagaacatt

SEQ ID NO: 33092 - DNA, 25 bp, Artificial
  probe
  misc_feature (1)..(25): SEQ ID NO: 4621; WAN0249T6_at; Start 13; Stop 37
tacatcagtatttcattacagaaca

SEQ ID NO: 33093 - DNA, 25 bp, Artificial
  probe
  misc_feature (1)..(25): SEQ ID NO: 4621; WAN0249T6_at; Start 90; Stop 114
gggctattccatattcaattatcca

SEQ ID NO: 33094 - DNA, 25 bp, Artificial
  probe
  misc_feature (1)..(25): SEQ ID NO: 4621; WAN0249T6_at; Start 9; Stop 33
cagttacatcagtatttcattacag

SEQ ID NO: 33095 - DNA, 25 bp, Artificial
  probe
  misc_feature (1)..(25): SEQ ID NO: 4621; WAN0249T6_at; Start 88; Stop 112
gtgggctattccatattcaattatc

SEQ ID NO: 33096 - DNA, 25 bp, Artificial
  probe
  misc_feature (1)..(25): SEQ ID NO: 4621; WAN0249T6_at; Start 78; Stop 102
agaaatcacagtgggctattccata

SEQ ID NO: 33097 - DNA, 25 bp, Artificial
  probe
  misc_feature (1)..(25): SEQ ID NO: 4621; WAN0249T6_at; Start 170; Stop 194
tcaaaacgcagtttcagccactatt

SEQ ID NO: 33098 - DNA, 25 bp, Artificial
  probe
  misc_feature (1)..(25): SEQ ID NO: 4621; WAN0249T6_at; Start 83; Stop 107
tcacagtgggctattccatattcaa

SEQ ID NO: 33099 - DNA, 25 bp, Artificial
  probe
  misc_feature (1)..(25): SEQ ID NO: 3811; WAN0249T7_at; Start 37; Stop 61
tctagttcgaattcaattgctcacg

SEQ ID NO: 33100 - DNA, 25 bp, Artificial
  probe
  misc_feature (1)..(25): SEQ ID NO: 3811; WAN0249T7_at; Start 295; Stop 319
ctagcaaaaaggagagaagcatttt

SEQ ID NO: 33101 - DNA, 25 bp, Artificial
  probe
  misc_feature (1)..(25): SEQ ID NO: 3811; WAN0249T7_at; Start 137; Stop 161
aaactagccgtaagctgctcaaagt

SEQ ID NO: 33102 - DNA, 25 bp, Artificial
  probe
  misc_feature (1)..(25): SEQ ID NO: 3811; WAN0249T7_at; Start 46; Stop 70
aattcaattgctcacgtagtttacg

SEQ ID NO: 33103 - DNA, 25 bp, Artificial
  probe
  misc_feature (1)..(25): SEQ ID NO: 3811; WAN0249T7_at; Start 31; Stop 55
tacctctctagttcgaattcaattg

SEQ ID NO: 33104 - DNA, 25 bp, Artificial
  probe
  misc_feature (1)..(25): SEQ ID NO: 3811; WAN0249T7_at; Start 73; Stop 97
tatagcttcacttgtagatggtacc

SEQ ID NO: 33105 - DNA, 25 bp, Artificial
  probe
  misc_feature (1)..(25): SEQ ID NO: 3811; WAN0249T7_at; Start 87; Stop 111
tagatggtacccacaaataatactc

SEQ ID NO: 33106 - DNA, 25 bp, Artificial
  probe
  misc_feature (1)..(25): SEQ ID NO: 3811; WAN0249T7_at; Start 96; Stop 120
cccacaaataatactcaatggaaat

SEQ ID NO: 33107 - DNA, 25 bp, Artificial
  probe
  misc_feature (1)..(25): SEQ ID NO: 3811; WAN0249T7_at; Start 145; Stop 169
cgtaagctgctcaaagtacatcttt

SEQ ID NO: 33108 - DNA, 25 bp, Artificial
  probe
  misc_feature (1)..(25): SEQ ID NO: 3811; WAN0249T7_at; Start 337; Stop 361
aactgatatctctccactacaattg

SEQ ID NO: 33109 - DNA, 25 bp, Artificial
  probe
  misc_feature (1)..(25): SEQ ID NO: 3811; WAN0249T7_at; Start 257; Stop 281
taaagagcatcacaatatagatgca

SEQ ID NO: 33110 - DNA, 25 bp, Artificial
  probe
  misc_feature (1)..(25): SEQ ID NO: 3811; WAN0249T7_at; Start 92; Stop 116
ggtacccacaaataatactcaatgg

SEQ ID NO: 33111 - DNA, 25 bp, Artificial
  probe
  misc_feature (1)..(25): SEQ ID NO: 3811; WAN0249T7_at; Start 343; Stop 367
tatctctccactacaattgataaag

SEQ ID NO: 33112 - DNA, 25 bp, Artificial
  probe
  misc_feature (1)..(25): SEQ ID NO: 3811; WAN0249T7_at; Start 245; Stop 269
ttcgaagagtattaaagagcatcac

SEQ ID NO: 33113 - DNA, 25 bp, Artificial
  probe
  misc_feature (1)..(25): SEQ ID NO: 3811; WAN0249T7_at; Start 21; Stop 45
aatttattattacctctctagttcg

SEQ ID NO: 33114 - DNA, 25 bp, Artificial
  probe
  misc_feature (1)..(25): SEQ ID NO: 3811; WAN0249T7_at; Start 364; Stop 388
aaagagatatcttttcttgtagtgc

SEQ ID NO: 33115 - DNA, 25 bp, Artificial
  probe
  misc_feature (1)..(25): SEQ ID NO: 3811; WAN0249T7_at; Start 141; Stop 165
tagccgtaagctgctcaaagtacat

SEQ ID NO: 33116 - DNA, 25 bp, Artificial
  probe
  misc_feature (1)..(25): SEQ ID NO: 3811; WAN0249T7_at; Start 306; Stop 330
gagagaagcattttgtttctctccc

SEQ ID NO: 33117 - DNA, 25 bp, Artificial
  probe
  misc_feature (1)..(25): SEQ ID NO: 3811; WAN0249T7_at; Start 148; Stop 172
aagctgctcaaagtacatctttgag

SEQ ID NO: 33118 - DNA, 25 bp, Artificial
  probe
  misc_feature (1)..(25): SEQ ID NO: 3811; WAN0249T7_at; Start 67; Stop 91
tacgcatatagcttcacttgtagat

SEQ ID NO: 33119 - DNA, 25 bp, Artificial
  probe
  misc_feature (1)..(25): SEQ ID NO: 3811; WAN0249T7_at; Start 41; Stop 65
gttcgaattcaattgctcacgtagt

SEQ ID NO: 33120 - DNA, 25 bp, Artificial
  probe
  misc_feature (1)..(25): SEQ ID NO: 3811; WAN0249T7_at; Start 60; Stop 84
cgtagtttacgcatatagcttcact

SEQ ID NO: 33121 - DNA, 25 bp, Artificial
  probe
  misc_feature (1)..(25): SEQ ID NO: 3811; WAN0249T7_at; Start 349; Stop 373
tccactacaattgataaagagatat

SEQ ID NO: 33122 - DNA, 25 bp, Artificial
  probe
  misc_feature (1)..(25): SEQ ID NO: 3811; WAN0249T7_at; Start 50; Stop 74
caattgctcacgtagtttacgcata

SEQ ID NO: 33123 - DNA, 25 bp, Artificial
  probe
  misc_feature (1)..(25): SEQ ID NO: 3811; WAN0249T7_at; Start 191; Stop 215
gaaatcagtaatcatacgtacggca

SEQ ID NO: 33124 - DNA, 25 bp, Artificial
  probe
  misc_feature (1)..(25): SEQ ID NO: 3811; WAN0249T7_at; Start 369; Stop 393
gatatcttttcttgtagtgctttga

SEQ ID NO: 33125 - DNA, 25 bp, Artificial
  probe
  misc_feature (1)..(25): SEQ ID NO: 3811; WAN0249T7_at; Start 269; Stop 293
caatatagatgcataatatgacttc

SEQ ID NO: 33126 - DNA, 25 bp, Artificial
  probe
  misc_feature (1)..(25): SEQ ID NO: 3811; WAN0249T7_at; Start 247; Stop 271
cgaagagtattaaagagcatcacaa

SEQ ID NO: 33127 - DNA, 25 bp, Artificial
  probe
  misc_feature (1)..(25): SEQ ID NO: 3811; WAN0249T7_at; Start 54; Stop 78
tgctcacgtagtttacgcatatagc

SEQ ID NO: 33128 - DNA, 25 bp, Artificial
  probe
  misc_feature (1)..(25): SEQ ID NO: 3811; WAN0249T7_at; Start 1; Stop 25
gtcaccataactatagcataaattt

SEQ ID NO: 33129 - DNA, 25 bp, Artificial
  probe
  misc_feature (1)..(25): SEQ ID NO: 3811; WAN0249T7_at; Start 77; Stop 101
gcttcacttgtagatggtacccaca

SEQ ID NO: 33130 - DNA, 25 bp, Artificial
  probe
  misc_feature (1)..(25): SEQ ID NO: 3811; WAN0249T7_at; Start 379; Stop 403
cttgtagtgctttgaattttattta

SEQ ID NO: 33131 - DNA, 25 bp, Artificial
  probe
  misc_feature (1)..(25): SEQ ID NO: 3811; WAN0249T7_at; Start 81; Stop 105
cacttgtagatggtacccacaaata

SEQ ID NO: 33132 - DNA, 25 bp, Artificial
  probe
  misc_feature (1)..(25): SEQ ID NO: 3811; WAN0249T7_at; Start 188; Stop 212
gacgaaatcagtaatcatacgtacg

SEQ ID NO: 33133 - DNA, 25 bp, Artificial
  probe
  misc_feature (1)..(25): SEQ ID NO: 293; WAN0249T8_x_at; Start 5; Stop 29
aatttatagaaatattttagcagtc

SEQ ID NO: 33134 - DNA, 25 bp, Artificial
  probe
  misc_feature (1)..(25): SEQ ID NO: 293; WAN0249T8_x_at; Start 4; Stop 28
taatttatagaaatattttagcagt

SEQ ID NO: 33135 - DNA, 25 bp, Artificial
  probe
  misc_feature (1)..(25): SEQ ID NO: 293; WAN0249T8_x_at; Start 81; Stop 105
taaggaggaaagtctatgggagaag

SEQ ID NO: 33136 - DNA, 25 bp, Artificial
  probe
  misc_feature (1)..(25): SEQ ID NO: 293; WAN0249T8_x_at; Start 8; Stop 32
ttatagaaatattttagcagtcaag

SEQ ID NO: 33137 - DNA, 25 bp, Artificial
  probe
  misc_feature (1)..(25): SEQ ID NO: 293; WAN0249T8_x_at; Start 82; Stop 106
aaggaggaaagtctatgggagaaga

SEQ ID NO: 33138 - DNA, 25 bp, Artificial
  probe
  misc_feature (1)..(25): SEQ ID NO: 293; WAN0249T8_x_at; Start 3; Stop 27
ttaatttatagaaatattttagcag

SEQ ID NO: 33139 - DNA, 25 bp, Artificial
  probe
  misc_feature (1)..(25): SEQ ID NO: 293; WAN0249T8_x_at; Start 7; Stop 31
tttatagaaatattttagcagtcaa

SEQ ID NO: 33140 - DNA, 25 bp, Artificial
  probe
  misc_feature (1)..(25): SEQ ID NO: 293; WAN0249T8_x_at; Start 6; Stop 30
atttatagaaatattttagcagtca

SEQ ID NO: 33141 - DNA, 25 bp, Artificial
  probe
  misc_feature (1)..(25): SEQ ID NO: 4724; WAN0249T9_at; Start 182; Stop 206
ccagactgtttgagtattcacccct

SEQ ID NO: 33142 - DNA, 25 bp, Artificial
  probe
  misc_feature (1)..(25): SEQ ID NO: 4724; WAN0249T9_at; Start 110; Stop 134
gacacaagtgaagtaggattacttc

SEQ ID NO: 33143 - DNA, 25 bp, Artificial
  probe
  misc_feature (1)..(25): SEQ ID NO: 4724; WAN0249T9_at; Start 167; Stop 191
tcaaacagtctctccccagactgtt

SEQ ID NO: 33144 - DNA, 25 bp, Artificial
  probe
  misc_feature (1)..(25): SEQ ID NO: 4724; WAN0249T9_at; Start 136; Stop 160
atctgtcgttttctctttctagcga

SEQ ID NO: 33145 - DNA, 25 bp, Artificial
  probe
  misc_feature (1)..(25): SEQ ID NO: 4724; WAN0249T9_at; Start 174; Stop 198
gtctctccccagactgtttgagtat

SEQ ID NO: 33146 - DNA, 25 bp, Artificial
  probe
  misc_feature (1)..(25): SEQ ID NO: 4724; WAN0249T9_at; Start 20; Stop 44
ttttggtgcctgagggacatcttat

SEQ ID NO: 33147 - DNA, 25 bp, Artificial
  probe
  misc_feature (1)..(25): SEQ ID NO: 4724; WAN0249T9_at; Start 177; Stop 201
tctccccagactgtttgagtattca

SEQ ID NO: 33148 - DNA, 25 bp, Artificial
  probe
  misc_feature (1)..(25): SEQ ID NO: 4724; WAN0249T9_at; Start 27; Stop 51
gcctgagggacatcttatattggtg

SEQ ID NO: 33149 - DNA, 25 bp, Artificial
  probe
  misc_feature (1)..(25): SEQ ID NO: 4724; WAN0249T9_at; Start 145; Stop 169
tttctctttctagcgacagacctca

SEQ ID NO: 33150 - DNA, 25 bp, Artificial
  probe
  misc_feature (1)..(25): SEQ ID NO: 4724; WAN0249T9_at; Start 188; Stop 212
tgtttgagtattcaccccttcgctc

SEQ ID NO: 33151 - DNA, 25 bp, Artificial
  probe
  misc_feature (1)..(25): SEQ ID NO: 4724; WAN0249T9_at; Start 108; Stop 132
cagacacaagtgaagtaggattact

SEQ ID NO: 33152 - DNA, 25 bp, Artificial
  probe
  misc_feature (1)..(25): SEQ ID NO: 4724; WAN0249T9_at; Start 106; Stop 130
tacagacacaagtgaagtaggatta

SEQ ID NO: 33153 - DNA, 25 bp, Artificial
  probe
  misc_feature (1)..(25): SEQ ID NO: 4724; WAN0249T9_at; Start 143; Stop 167
gttttctctttctagcgacagacct

SEQ ID NO: 33154 - DNA, 25 bp, Artificial
  probe
  misc_feature (1)..(25): SEQ ID NO: 4724; WAN0249T9_at; Start 186; Stop 210
actgtttgagtattcaccccttcgc

SEQ ID NO: 33155 - DNA, 25 bp, Artificial
  probe
  misc_feature (1)..(25): SEQ ID NO: 4724; WAN0249T9_at; Start 262; Stop 286
catgattcgttgttactacgctttc

SEQ ID NO: 33156 - DNA, 25 bp, Artificial
  probe
  misc_feature (1)..(25): SEQ ID NO: 4724; WAN0249T9_at; Start 185; Stop 209
gactgtttgagtattcaccccttcg

SEQ ID NO: 33157 - DNA, 25 bp, Artificial
  probe
  misc_feature (1)..(25): SEQ ID NO: 4724; WAN0249T9_at; Start 23; Stop 47
tggtgcctgagggacatcttatatt

SEQ ID NO: 33158 - DNA, 25 bp, Artificial
  probe
  misc_feature (1)..(25): SEQ ID NO: 4724; WAN0249T9_at; Start 193; Stop 217
gagtattcaccccttcgctccactt

SEQ ID NO: 33159 - DNA, 25 bp, Artificial
  probe
  misc_feature (1)..(25): SEQ ID NO: 4724; WAN0249T9_at; Start 149; Stop 173
tctttctagcgacagacctcaaaca

SEQ ID NO: 33160 - DNA, 25 bp, Artificial
  probe
  misc_feature (1)..(25): SEQ ID NO: 4724; WAN0249T9_at; Start 180; Stop 204
ccccagactgtttgagtattcaccc

SEQ ID NO: 33161 - DNA, 25 bp, Artificial
  probe
  misc_feature (1)..(25): SEQ ID NO: 4724; WAN0249T9_at; Start 151; Stop 175
tttctagcgacagacctcaaacagt

SEQ ID NO: 33162 - DNA, 25 bp, Artificial
  probe
  misc_feature (1)..(25): SEQ ID NO: 4724; WAN0249T9_at; Start 259; Stop 283
tctcatgattcgttgttactacgct

SEQ ID NO: 33163 - DNA, 25 bp, Artificial
  probe
  misc_feature (1)..(25): SEQ ID NO: 4724; WAN0249T9_at; Start 183; Stop 207
cagactgtttgagtattcacccctt

SEQ ID NO: 33164 - DNA, 25 bp, Artificial
  probe
  misc_feature (1)..(25): SEQ ID NO: 4724; WAN0249T9_at; Start 179; Stop 203
tccccagactgtttgagtattcacc

SEQ ID NO: 33165 - DNA, 25 bp, Artificial
  probe
  misc_feature (1)..(25): SEQ ID NO: 4724; WAN0249T9_at; Start 141; Stop 165
tcgttttctctttctagcgacagac

SEQ ID NO: 33166 - DNA, 25 bp, Artificial
  probe
  misc_feature (1)..(25): SEQ ID NO: 4724; WAN0249T9_at; Start 103; Stop 127
ttttacagacacaagtgaagtagga

SEQ ID NO: 33167 - DNA, 25 bp, Artificial
  probe
  misc_feature (1)..(25): SEQ ID NO: 4724; WAN0249T9_at; Start 190; Stop 214
tttgagtattcaccccttcgctcca

SEQ ID NO: 33168 - DNA, 25 bp, Artificial
  probe
  misc_feature (1)..(25): SEQ ID NO: 4724; WAN0249T9_at; Start 28; Stop 52
cctgagggacatcttatattggtga

SEQ ID NO: 33169 - DNA, 25 bp, Artificial
  probe
  misc_feature (1)..(25): SEQ ID NO: 4724; WAN0249T9_at; Start 26; Stop 50
tgcctgagggacatcttatattggt

SEQ ID NO: 33170 - DNA, 25 bp, Artificial
  probe
  misc_feature (1)..(25): SEQ ID NO: 4724; WAN0249T9_at; Start 265; Stop 289
gattcgttgttactacgctttcagc

SEQ ID NO: 33171 - DNA, 25 bp, Artificial
  probe
  misc_feature (1)..(25): SEQ ID NO: 4724; WAN0249T9_at; Start 147; Stop 171
tctctttctagcgacagacctcaaa

SEQ ID NO: 33172 - DNA, 25 bp, Artificial
  probe
  misc_feature (1)..(25): SEQ ID NO: 4724; WAN0249T9_at; Start 172; Stop 196
cagtctctccccagactgtttgagt

SEQ ID NO: 33173 - DNA, 25 bp, Artificial
  probe
  misc_feature (1)..(25): SEQ ID NO: 4724; WAN0249T9_at; Start 255; Stop 279
gacttctcatgattcgttgttacta

SEQ ID NO: 33174 - DNA, 25 bp, Artificial
  probe
  misc_feature (1)..(25): SEQ ID NO: 4724; WAN0249T9_at; Start 24; Stop 48
ggtgcctgagggacatcttatattg

SEQ ID NO: 33175 - DNA, 25 bp, Artificial
  probe
  misc_feature (1)..(25): SEQ ID NO: 5904; WAN0249TA_at; Start 96; Stop 120
gggtgaatactcaaacagtctgggg

SEQ ID NO: 33176 - DNA, 25 bp, Artificial
  probe
  misc_feature (1)..(25): SEQ ID NO: 5904; WAN0249TA_at; Start 19; Stop 43
cgtagtaacaacgaatcatgagaag

SEQ ID NO: 33177 - DNA, 25 bp, Artificial
  probe
  misc_feature (1)..(25): SEQ ID NO: 5904; WAN0249TA_at; Start 103; Stop 127
tactcaaacagtctggggagagact

SEQ ID NO: 33178 - DNA, 25 bp, Artificial
  probe
  misc_feature (1)..(25): SEQ ID NO: 5904; WAN0249TA_at; Start 18; Stop 42
gcgtagtaacaacgaatcatgagaa

SEQ ID NO: 33179 - DNA, 25 bp, Artificial
  probe
  misc_feature (1)..(25): SEQ ID NO: 5904; WAN0249TA_at; Start 129; Stop 153
tttgaggtctgtcgctagaaagaga

SEQ ID NO: 33180 - DNA, 25 bp, Artificial
  probe
  misc_feature (1)..(25): SEQ ID NO: 5904; WAN0249TA_at; Start 16; Stop 40
aagcgtagtaacaacgaatcatgag

SEQ ID NO: 33181 - DNA, 25 bp, Artificial
  probe
  misc_feature (1)..(25): SEQ ID NO: 5904; WAN0249TA_at; Start 136; Stop 160
tctgtcgctagaaagagaaaacgac

SEQ ID NO: 33182 - DNA, 25 bp, Artificial
  probe
  misc_feature (1)..(25): SEQ ID NO: 5904; WAN0249TA_at; Start 248; Stop 272
tcaccaatataagatgtccctcagg

SEQ ID NO: 33183 - DNA, 25 bp, Artificial
  probe
  misc_feature (1)..(25): SEQ ID NO: 5904; WAN0249TA_at; Start 127; Stop 151
tgtttgaggtctgtcgctagaaaga

SEQ ID NO: 33184 - DNA, 25 bp, Artificial
  probe
  misc_feature (1)..(25): SEQ ID NO: 5904; WAN0249TA_at; Start 135; Stop 159
gtctgtcgctagaaagagaaaacga

SEQ ID NO: 33185 - DNA, 25 bp, Artificial
  probe
  misc_feature (1)..(25): SEQ ID NO: 5904; WAN0249TA_at; Start 168; Stop 192
agtaatcctacttcacttgtgtctg

SEQ ID NO: 33186 - DNA, 25 bp, Artificial
  probe
  misc_feature (1)..(25): SEQ ID NO: 5904; WAN0249TA_at; Start 132; Stop 156
gaggtctgtcgctagaaagagaaaa

SEQ ID NO: 33187 - DNA, 25 bp, Artificial
  probe
  misc_feature (1)..(25): SEQ ID NO: 5904; WAN0249TA_at; Start 137; Stop 161
ctgtcgctagaaagagaaaacgaca

SEQ ID NO: 33188 - DNA, 25 bp, Artificial
  probe
  misc_feature (1)..(25): SEQ ID NO: 5904; WAN0249TA_at; Start 134; Stop 158
ggtctgtcgctagaaagagaaaacg

SEQ ID NO: 33189 - DNA, 25 bp, Artificial
  probe
  misc_feature (1)..(25): SEQ ID NO: 5904; WAN0249TA_at; Start 124; Stop 148
gactgtttgaggtctgtcgctagaa

SEQ ID NO: 33190 - DNA, 25 bp, Artificial
  probe
  misc_feature (1)..(25): SEQ ID NO: 5904; WAN0249TA_at; Start 125; Stop 149
actgtttgaggtctgtcgctagaaa

SEQ ID NO: 33191 - DNA, 25 bp, Artificial
  probe
  misc_feature (1)..(25): SEQ ID NO: 5904; WAN0249TA_at; Start 90; Stop 114
gcgaaggggtgaatactcaaacagt

SEQ ID NO: 33192 - DNA, 25 bp, Artificial
  probe
  misc_feature (1)..(25): SEQ ID NO: 5904; WAN0249TA_at; Start 131; Stop 155
tgaggtctgtcgctagaaagagaaa

SEQ ID NO: 33193 - DNA, 25 bp, Artificial
  probe
  misc_feature (1)..(25): SEQ ID NO: 5904; WAN0249TA_at; Start 166; Stop 190
gaagtaatcctacttcacttgtgtc

SEQ ID NO: 33194 - DNA, 25 bp, Artificial
  probe
  misc_feature (1)..(25): SEQ ID NO: 5904; WAN0249TA_at; Start 11; Stop 35
gctgaaagcgtagtaacaacgaatc

SEQ ID NO: 33195 - DNA, 25 bp, Artificial
  probe
  misc_feature (1)..(25): SEQ ID NO: 5904; WAN0249TA_at; Start 122; Stop 146
gagactgtttgaggtctgtcgctag

SEQ ID NO: 33196 - DNA, 25 bp, Artificial
  probe
  misc_feature (1)..(25): SEQ ID NO: 5904; WAN0249TA_at; Start 120; Stop 144
gagagactgtttgaggtctgtcgct

SEQ ID NO: 33197 - DNA, 25 bp, Artificial
  probe
  misc_feature (1)..(25): SEQ ID NO: 5904; WAN0249TA_at; Start 12; Stop 36
ctgaaagcgtagtaacaacgaatca

SEQ ID NO: 33198 - DNA, 25 bp, Artificial
  probe
  misc_feature (1)..(25): SEQ ID NO: 5904; WAN0249TA_at; Start 252; Stop 276
caatataagatgtccctcaggcacc

SEQ ID NO: 33199 - DNA, 25 bp, Artificial
  probe
  misc_feature (1)..(25): SEQ ID NO: 5904; WAN0249TA_at; Start 256; Stop 280
ataagatgtccctcaggcaccaaaa

SEQ ID NO: 33200 - DNA, 25 bp, Artificial
  probe
  misc_feature (1)..(25): SEQ ID NO: 5904; WAN0249TA_at; Start 255; Stop 279
tataagatgtccctcaggcaccaaa

SEQ ID NO: 33201 - DNA, 25 bp, Artificial
  probe
  misc_feature (1)..(25): SEQ ID NO: 5904; WAN0249TA_at; Start 250; Stop 274
accaatataagatgtccctcaggca

SEQ ID NO: 33202 - DNA, 25 bp, Artificial
  probe
  misc_feature (1)..(25): SEQ ID NO: 5904; WAN0249TA_at; Start 14; Stop 38
gaaagcgtagtaacaacgaatcatg

SEQ ID NO: 33203 - DNA, 25 bp, Artificial
  probe
  misc_feature (1)..(25): SEQ ID NO: 5904; WAN0249TA_at; Start 173; Stop 197
tcctacttcacttgtgtctgtaaaa

SEQ ID NO: 33204 - DNA, 25 bp, Artificial
  probe
  misc_feature (1)..(25): SEQ ID NO: 5904; WAN0249TA_at; Start 253; Stop 277
aatataagatgtccctcaggcacca

SEQ ID NO: 33205 - DNA, 25 bp, Artificial
  probe
  misc_feature (1)..(25): SEQ ID NO: 5904; WAN0249TA_at; Start 170; Stop 194
taatcctacttcacttgtgtctgta

SEQ ID NO: 33206 - DNA, 25 bp, Artificial
  probe
  misc_feature (1)..(25): SEQ ID NO: 5904; WAN0249TA_at; Start 251; Stop 275
ccaatataagatgtccctcaggcac

SEQ ID NO: 33207 - DNA, 25 bp, Artificial
  probe
  misc_feature (1)..(25): SEQ ID NO: 5904; WAN0249TA_at; Start 249; Stop 273
caccaatataagatgtccctcaggc

SEQ ID NO: 33208 - DNA, 25 bp, Artificial
  probe
  misc_feature (1)..(25): SEQ ID NO: 5904; WAN0249TA_at; Start 21; Stop 45
tagtaacaacgaatcatgagaagtc

SEQ ID NO: 33209 - DNA, 25 bp, Artificial
  probe
  misc_feature (1)..(25): SEQ ID NO: 3712; WAN0249TB_at; Start 3; Stop 27
tgttaaagcagtggagaaatccgct

SEQ ID NO: 33210 - DNA, 25 bp, Artificial
  probe
  misc_feature (1)..(25): SEQ ID NO: 3712; WAN0249TB_at; Start 5; Stop 29
ttaaagcagtggagaaatccgctac

SEQ ID NO: 33211 - DNA, 25 bp, Artificial
  probe
  misc_feature (1)..(25): SEQ ID NO: 3712; WAN0249TB_at; Start 257; Stop 281
taagtttgctgtttcttgtcgctcc

SEQ ID NO: 33212 - DNA, 25 bp, Artificial
  probe
  misc_feature (1)..(25): SEQ ID NO: 3712; WAN0249TB_at; Start 264; Stop 288
gctgtttcttgtcgctcctctggaa

SEQ ID NO: 33213 - DNA, 25 bp, Artificial
  probe
  misc_feature (1)..(25): SEQ ID NO: 3712; WAN0249TB_at; Start 279; Stop 303
tcctctggaaagctgatataatagc

SEQ ID NO: 33214 - DNA, 25 bp, Artificial
  probe
  misc_feature (1)..(25): SEQ ID NO: 3712; WAN0249TB_at; Start 266; Stop 290
tgtttcttgtcgctcctctggaaag

SEQ ID NO: 33215 - DNA, 25 bp, Artificial
  probe
  misc_feature (1)..(25): SEQ ID NO: 3712; WAN0249TB_at; Start 2; Stop 26
ctgttaaagcagtggagaaatccgc

SEQ ID NO: 33216 - DNA, 25 bp, Artificial
  probe
  misc_feature (1)..(25): SEQ ID NO: 3712; WAN0249TB_at; Start 34; Stop 58
tcgatttttgattcaagtttttaga

SEQ ID NO: 33217 - DNA, 25 bp, Artificial
  probe
  misc_feature (1)..(25): SEQ ID NO: 3712; WAN0249TB_at; Start 151; Stop 175
tccaaactcaaccaactataataga

SEQ ID NO: 33218 - DNA, 25 bp, Artificial
  probe
  misc_feature (1)..(25): SEQ ID NO: 3712; WAN0249TB_at; Start 162; Stop 186
ccaactataatagatcgaaactaga

SEQ ID NO: 33219 - DNA, 25 bp, Artificial
  probe
  misc_feature (1)..(25): SEQ ID NO: 3712; WAN0249TB_at; Start 272; Stop 296
ttgtcgctcctctggaaagctgata

SEQ ID NO: 33220 - DNA, 25 bp, Artificial
  probe
  misc_feature (1)..(25): SEQ ID NO: 3712; WAN0249TB_at; Start 14; Stop 38
tggagaaatccgctactttttcgat

SEQ ID NO: 33221 - DNA, 25 bp, Artificial
  probe
  misc_feature (1)..(25): SEQ ID NO: 3712; WAN0249TB_at; Start 263; Stop 287
tgctgtttcttgtcgctcctctgga

SEQ ID NO: 33222 - DNA, 25 bp, Artificial
  probe
  misc_feature (1)..(25): SEQ ID NO: 3712; WAN0249TB_at; Start 270; Stop 294
tcttgtcgctcctctggaaagctga

SEQ ID NO: 33223 - DNA, 25 bp, Artificial
  probe
  misc_feature (1)..(25): SEQ ID NO: 3712; WAN0249TB_at; Start 282; Stop 306
tctggaaagctgatataatagcttt

SEQ ID NO: 33224 - DNA, 25 bp, Artificial
  probe
  misc_feature (1)..(25): SEQ ID NO: 3712; WAN0249TB_at; Start 154; Stop 178
aaactcaaccaactataatagatcg

SEQ ID NO: 33225 - DNA, 25 bp, Artificial
  probe
  misc_feature (1)..(25): SEQ ID NO: 3712; WAN0249TB_at; Start 274; Stop 298
gtcgctcctctggaaagctgatata

SEQ ID NO: 33226 - DNA, 25 bp, Artificial
  probe
  misc_feature (1)..(25): SEQ ID NO: 3712; WAN0249TB_at; Start 243; Stop 267
cattccgctatatataagtttgctg

SEQ ID NO: 33227 - DNA, 25 bp, Artificial
  probe
  misc_feature (1)..(25): SEQ ID NO: 3712; WAN0249TB_at; Start 247; Stop 271
ccgctatatataagtttgctgtttc

SEQ ID NO: 33228 - DNA, 25 bp, Artificial
  probe
  misc_feature (1)..(25): SEQ ID NO: 3712; WAN0249TB_at; Start 232; Stop 256
tgtccttatttcattccgctatata

SEQ ID NO: 33229 - DNA, 25 bp, Artificial
  probe
  misc_feature (1)..(25): SEQ ID NO: 3712; WAN0249TB_at; Start 241; Stop 265
ttcattccgctatatataagtttgc

SEQ ID NO: 33230 - DNA, 25 bp, Artificial
  probe
  misc_feature (1)..(25): SEQ ID NO: 3712; WAN0249TB_at; Start 1; Stop 25
gctgttaaagcagtggagaaatccg

SEQ ID NO: 33231 - DNA, 25 bp, Artificial
  probe
  misc_feature (1)..(25): SEQ ID NO: 3712; WAN0249TB_at; Start 276; Stop 300
cgctcctctggaaagctgatataat

SEQ ID NO: 33232 - DNA, 25 bp, Artificial
  probe
  misc_feature (1)..(25): SEQ ID NO: 3712; WAN0249TB_at; Start 10; Stop 34
gcagtggagaaatccgctacttttt

SEQ ID NO: 33233 - DNA, 25 bp, Artificial
  probe
  misc_feature (1)..(25): SEQ ID NO: 3712; WAN0249TB_at; Start 269; Stop 293
ttcttgtcgctcctctggaaagctg

SEQ ID NO: 33234 - DNA, 25 bp, Artificial
  probe
  misc_feature (1)..(25): SEQ ID NO: 3712; WAN0249TB_at; Start 224; Stop 248
gatttgactgtccttatttcattcc

SEQ ID NO: 33235 - DNA, 25 bp, Artificial
  probe
  misc_feature (1)..(25): SEQ ID NO: 3712; WAN0249TB_at; Start 55; Stop 79
tagattatatatagtagcttgaaat

SEQ ID NO: 33236 - DNA, 25 bp, Artificial
  probe
  misc_feature (1)..(25): SEQ ID NO: 3712; WAN0249TB_at; Start 7; Stop 31
aaagcagtggagaaatccgctactt

SEQ ID NO: 33237 - DNA, 25 bp, Artificial
  probe
  misc_feature (1)..(25): SEQ ID NO: 3712; WAN0249TB_at; Start 25; Stop 49
gctactttttcgatttttgattcaa

SEQ ID NO: 33238 - DNA, 25 bp, Artificial
  probe
  misc_feature (1)..(25): SEQ ID NO: 3712; WAN0249TB_at; Start 6; Stop 30
taaagcagtggagaaatccgctact

SEQ ID NO: 33239 - DNA, 25 bp, Artificial
  probe
  misc_feature (1)..(25): SEQ ID NO: 3712; WAN0249TB_at; Start 163; Stop 187
caactataatagatcgaaactagaa

SEQ ID NO: 33240 - DNA, 25 bp, Artificial
  probe
  misc_feature (1)..(25): SEQ ID NO: 3712; WAN0249TB_at; Start 280; Stop 304
cctctggaaagctgatataatagct

SEQ ID NO: 33241 - DNA, 25 bp, Artificial
  probe
  misc_feature (1)..(25): SEQ ID NO: 3712; WAN0249TB_at; Start 229; Stop 253
gactgtccttatttcattccgctat

SEQ ID NO: 33242 - DNA, 25 bp, Artificial
  probe
  misc_feature (1)..(25): SEQ ID NO: 3712; WAN0249TB_at; Start 11; Stop 35
cagtggagaaatccgctactttttc

SEQ ID NO: 33243 - DNA, 25 bp, Artificial
  probe
  misc_feature (1)..(25): SEQ ID NO: 4476; WAN0249TC_at; Start 24; Stop 48
tgagcctttgactcactccctgttt

SEQ ID NO: 33244 - DNA, 25 bp, Artificial
  probe
  misc_feature (1)..(25): SEQ ID NO: 4476; WAN0249TC_at; Start 40; Stop 64
tccctgtttcgatatttaatactct

SEQ ID NO: 33245 - DNA, 25 bp, Artificial
  probe
  misc_feature (1)..(25): SEQ ID NO: 4476; WAN0249TC_at; Start 5; Stop 29
aaaatgttgaaatagggaatgagcc

SEQ ID NO: 33246 - DNA, 25 bp, Artificial
  probe
  misc_feature (1)..(25): SEQ ID NO: 4476; WAN0249TC_at; Start 238; Stop 262
tcggaattataaatagaaagagtga

SEQ ID NO: 33247 - DNA, 25 bp, Artificial
  probe
  misc_feature (1)..(25): SEQ ID NO: 4476; WAN0249TC_at; Start 28; Stop 52
cctttgactcactccctgtttcgat

SEQ ID NO: 33248 - DNA, 25 bp, Artificial
  probe
  misc_feature (1)..(25): SEQ ID NO: 4476; WAN0249TC_at; Start 7; Stop 31
aatgttgaaatagggaatgagcctt

SEQ ID NO: 33249 - DNA, 25 bp, Artificial
  probe
  misc_feature (1)..(25): SEQ ID NO: 4476; WAN0249TC_at; Start 235; Stop 259
ccctcggaattataaatagaaagag

SEQ ID NO: 33250 - DNA, 25 bp, Artificial
  probe
  misc_feature (1)..(25): SEQ ID NO: 4476; WAN0249TC_at; Start 17; Stop 41
tagggaatgagcctttgactcactc

SEQ ID NO: 33251 - DNA, 25 bp, Artificial
  probe
  misc_feature (1)..(25): SEQ ID NO: 4476; WAN0249TC_at; Start 37; Stop 61
cactccctgtttcgatatttaatac

SEQ ID NO: 33252 - DNA, 25 bp, Artificial
  probe
  misc_feature (1)..(25): SEQ ID NO: 4476; WAN0249TC_at; Start 205; Stop 229
tataagaacctatcaaaaagtgagg

SEQ ID NO: 33253 - DNA, 25 bp, Artificial
  probe
  misc_feature (1)..(25): SEQ ID NO: 4476; WAN0249TC_at; Start 34; Stop 58
actcactccctgtttcgatatttaa

SEQ ID NO: 33254 - DNA, 25 bp, Artificial
  probe
  misc_feature (1)..(25): SEQ ID NO: 4476; WAN0249TC_at; Start 207; Stop 231
taagaacctatcaaaaagtgaggga

SEQ ID NO: 33255 - DNA, 25 bp, Artificial
  probe
  misc_feature (1)..(25): SEQ ID NO: 4476; WAN0249TC_at; Start 22; Stop 46
aatgagcctttgactcactccctgt

SEQ ID NO: 33256 - DNA, 25 bp, Artificial
  probe
  misc_feature (1)..(25): SEQ ID NO: 4476; WAN0249TC_at; Start 15; Stop 39
aatagggaatgagcctttgactcac

SEQ ID NO: 33257 - DNA, 25 bp, Artificial
  probe
  misc_feature (1)..(25): SEQ ID NO: 4476; WAN0249TC_at; Start 33; Stop 57
gactcactccctgtttcgatattta

SEQ ID NO: 33258 - DNA, 25 bp, Artificial
  probe
  misc_feature (1)..(25): SEQ ID NO: 4476; WAN0249TC_at; Start 25; Stop 49
gagcctttgactcactccctgtttc

SEQ ID NO: 33259 - DNA, 25 bp, Artificial
  probe
  misc_feature (1)..(25): SEQ ID NO: 4476; WAN0249TC_at; Start 27; Stop 51
gcctttgactcactccctgtttcga

SEQ ID NO: 33260 - DNA, 25 bp, Artificial
  probe
  misc_feature (1)..(25): SEQ ID NO: 4476; WAN0249TC_at; Start 236; Stop 260
cctcggaattataaatagaaagagt

SEQ ID NO: 33261 - DNA, 25 bp, Artificial
  probe
  misc_feature (1)..(25): SEQ ID NO: 4476; WAN0249TC_at; Start 19; Stop 43
gggaatgagcctttgactcactccc

SEQ ID NO: 33262 - DNA, 25 bp, Artificial
  probe
  misc_feature (1)..(25): SEQ ID NO: 4476; WAN0249TC_at; Start 44; Stop 68
tgtttcgatatttaatactcttcga

SEQ ID NO: 33263 - DNA, 25 bp, Artificial
  probe
  misc_feature (1)..(25): SEQ ID NO: 4476; WAN0249TC_at; Start 18; Stop 42
agggaatgagcctttgactcactcc

SEQ ID NO: 33264 - DNA, 25 bp, Artificial
  probe
  misc_feature (1)..(25): SEQ ID NO: 4476; WAN0249TC_at; Start 14; Stop 38
aaatagggaatgagcctttgactca

SEQ ID NO: 33265 - DNA, 25 bp, Artificial
  probe
  misc_feature (1)..(25): SEQ ID NO: 4476; WAN0249TC_at; Start 12; Stop 36
tgaaatagggaatgagcctttgact

SEQ ID NO: 33266 - DNA, 25 bp, Artificial
  probe
  misc_feature (1)..(25): SEQ ID NO: 4476; WAN0249TC_at; Start 9; Stop 33
tgttgaaatagggaatgagcctttg

SEQ ID NO: 33267 - DNA, 25 bp, Artificial
  probe
  misc_feature (1)..(25): SEQ ID NO: 4476; WAN0249TC_at; Start 11; Stop 35
ttgaaatagggaatgagcctttgac

SEQ ID NO: 33268 - DNA, 25 bp, Artificial
  probe
  misc_feature (1)..(25): SEQ ID NO: 4476; WAN0249TC_at; Start 1; Stop 25
tagaaaaatgttgaaatagggaatg

SEQ ID NO: 33269 - DNA, 25 bp, Artificial
  probe
  misc_feature (1)..(25): SEQ ID NO: 4476; WAN0249TC_at; Start 20; Stop 44
ggaatgagcctttgactcactccct

SEQ ID NO: 33270 - DNA, 25 bp, Artificial
  probe
  misc_feature (1)..(25): SEQ ID NO: 4476; WAN0249TC_at; Start 29; Stop 53
ctttgactcactccctgtttcgata

SEQ ID NO: 33271 - DNA, 25 bp, Artificial
  probe
  misc_feature (1)..(25): SEQ ID NO: 4476; WAN0249TC_at; Start 202; Stop 226
gagtataagaacctatcaaaaagtg

SEQ ID NO: 33272 - DNA, 25 bp, Artificial
  probe
  misc_feature (1)..(25): SEQ ID NO: 4476; WAN0249TC_at; Start 21; Stop 45
gaatgagcctttgactcactccctg

SEQ ID NO: 33273 - DNA, 25 bp, Artificial
  probe
  misc_feature (1)..(25): SEQ ID NO: 4476; WAN0249TC_at; Start 13; Stop 37
gaaatagggaatgagcctttgactc

SEQ ID NO: 33274 - DNA, 25 bp, Artificial
  probe
  misc_feature (1)..(25): SEQ ID NO: 4476; WAN0249TC_at; Start 31; Stop 55
ttgactcactccctgtttcgatatt

SEQ ID NO: 33275 - DNA, 25 bp, Artificial
  probe
  misc_feature (1)..(25): SEQ ID NO: 4476; WAN0249TC_at; Start 204; Stop 228
gtataagaacctatcaaaaagtgag

SEQ ID NO: 33276 - DNA, 25 bp, Artificial
  probe
  misc_feature (1)..(25): SEQ ID NO: 4476; WAN0249TC_at; Start 241; Stop 265
gaattataaatagaaagagtgaatc

SEQ ID NO: 33277 - DNA, 25 bp, Artificial
  probe
  misc_feature (1)..(25): SEQ ID NO: 407; WAN0249TD_at; Start 909; Stop 933
tgaaccacttcgacactgatcatgg

SEQ ID NO: 33278 - DNA, 25 bp, Artificial
  probe
  misc_feature (1)..(25): SEQ ID NO: 407; WAN0249TD_at; Start 1481; Stop 1505
gatgtcatgaatcaactccaagatg

SEQ ID NO: 33279 - DNA, 25 bp, Artificial
  probe
  misc_feature (1)..(25): SEQ ID NO: 407; WAN0249TD_at; Start 565; Stop 589
tagtcgttcatcagctggcaaagcc

SEQ ID NO: 33280 - DNA, 25 bp, Artificial
  probe
  misc_feature (1)..(25): SEQ ID NO: 407; WAN0249TD_at; Start 503; Stop 527
tgacgccggcactaagcaaagaagt

SEQ ID NO: 33281 - DNA, 25 bp, Artificial
  probe
  misc_feature (1)..(25): SEQ ID NO: 407; WAN0249TD_at; Start 367; Stop 391
caatgatttaatggcgcgttcagct

SEQ ID NO: 33282 - DNA, 25 bp, Artificial
  probe
  misc_feature (1)..(25): SEQ ID NO: 407; WAN0249TD_at; Start 1789; Stop 1813
tctggtgtgagagctttgacatcct

SEQ ID NO: 33283 - DNA, 25 bp, Artificial
  probe
  misc_feature (1)..(25): SEQ ID NO: 407; WAN0249TD_at; Start 386; Stop 410
tcagctagattattggaaaggacca

SEQ ID NO: 33284 - DNA, 25 bp, Artificial
  probe
  misc_feature (1)..(25): SEQ ID NO: 407; WAN0249TD_at; Start 811; Stop 835
tcgcataggcagaactagaggacta

SEQ ID NO: 33285 - DNA, 25 bp, Artificial
  probe
  misc_feature (1)..(25): SEQ ID NO: 407; WAN0249TD_at; Start 483; Stop 507
ttgaacctgctaaaactgactgacg

SEQ ID NO: 33286 - DNA, 25 bp, Artificial
  probe
  misc_feature (1)..(25): SEQ ID NO: 407; WAN0249TD_at; Start 1546; Stop 1570
taatcggagatggactagaatgctt

SEQ ID NO: 33287 - DNA, 25 bp, Artificial
  probe
  misc_feature (1)..(25): SEQ ID NO: 407; WAN0249TD_at; Start 1384; Stop 1408
tattcctccatacacaccagagatg

SEQ ID NO: 33288 - DNA, 25 bp, Artificial
  probe
  misc_feature (1)..(25): SEQ ID NO: 407; WAN0249TD_at; Start 1932; Stop 1956
gacttgaccggagaaaggatccaat

SEQ ID NO: 33289 - DNA, 25 bp, Artificial
  probe
  misc_feature (1)..(25): SEQ ID NO: 407; WAN0249TD_at; Start 845; Stop 869
gttactgccgcaaaatatcacaatg

SEQ ID NO: 33290 - DNA, 25 bp, Artificial
  probe
  misc_feature (1)..(25): SEQ ID NO: 407; WAN0249TD_at; Start 1103; Stop 1127
gactcgccttgatatgccaattaga

SEQ ID NO: 33291 - DNA, 25 bp, Artificial
  probe
  misc_feature (1)..(25): SEQ ID NO: 407; WAN0249TD_at; Start 1498; Stop 1522
ccaagatgttatacaaggactggag

SEQ ID NO: 33292 - DNA, 25 bp, Artificial
  probe
  misc_feature (1)..(25): SEQ ID NO: 407; WAN0249TD_at; Start 1818; Stop 1842
tgtacttagccaaatcaatctgccg

SEQ ID NO: 33293 - DNA, 25 bp, Artificial
  probe
  misc_feature (1)..(25): SEQ ID NO: 407; WAN0249TD_at; Start 1898; Stop 1922
taaagcggtctttacgtccaccaca

SEQ ID NO: 33294 - DNA, 25 bp, Artificial
  probe
  misc_feature (1)..(25): SEQ ID NO: 407; WAN0249TD_at; Start 406; Stop 430
gaccagatgtccgtctttcaaaatg

SEQ ID NO: 33295 - DNA, 25 bp, Artificial
  probe
  misc_feature (1)..(25): SEQ ID NO: 407; WAN0249TD_at; Start 1232; Stop 1256
tagaagctgagccaaagttatgcgc

SEQ ID NO: 33296 - DNA, 25 bp, Artificial
  probe
  misc_feature (1)..(25): SEQ ID NO: 407; WAN0249TD_at; Start 519; Stop 543
caaagaagtcttccattaagggctg

SEQ ID NO: 33297 - DNA, 25 bp, Artificial
  probe
  misc_feature (1)..(25): SEQ ID NO: 407; WAN0249TD_at; Start 1856; Stop 1880
tatatagtagccaaaatccttgacc

SEQ ID NO: 33298 - DNA, 25 bp, Artificial
  probe
  misc_feature (1)..(25): SEQ ID NO: 407; WAN0249TD_at; Start 1202; Stop 1226
taaacttctgatggatggtgtgagc

SEQ ID NO: 33299 - DNA, 25 bp, Artificial
  probe
  misc_feature (1)..(25): SEQ ID NO: 407; WAN0249TD_at; Start 320; Stop 344
gcttaggctaaaagagtccactgga

SEQ ID NO: 33300 - DNA, 25 bp, Artificial
  probe
  misc_feature (1)..(25): SEQ ID NO: 407; WAN0249TD_at; Start 1757; Stop 1781
tagaaaagcccttcataagccagtc

SEQ ID NO: 33301 - DNA, 25 bp, Artificial
  probe
  misc_feature (1)..(25): SEQ ID NO: 407; WAN0249TD_at; Start 449; Stop 473
tacttgaggctgtattcaattgccc

SEQ ID NO: 33302 - DNA, 25 bp, Artificial
  probe
  misc_feature (1)..(25): SEQ ID NO: 407; WAN0249TD_at; Start 972; Stop 996
caaaaaagtccaatagtaagtcagc

SEQ ID NO: 33303 - DNA, 25 bp, Artificial
  probe
  misc_feature (1)..(25): SEQ ID NO: 407; WAN0249TD_at; Start 831; Stop 855
gactaaagtcctaagttactgccgc

SEQ ID NO: 33304 - DNA, 25 bp, Artificial
  probe
  misc_feature (1)..(25): SEQ ID NO: 407; WAN0249TD_at; Start 926; Stop 950
gatcatggtggtaaagcgtaatccc

SEQ ID NO: 33305 - DNA, 25 bp, Artificial
  probe
  misc_feature (1)..(25): SEQ ID NO: 407; WAN0249TD_at; Start 585; Stop 609
aagcctcccagtctctttccaagga

SEQ ID NO: 33306 - DNA, 25 bp, Artificial
  probe
  misc_feature (1)..(25): SEQ ID NO: 407; WAN0249TD_at; Start 1964; Stop 1988
gggttttaaccagataagccagtga

SEQ ID NO: 33307 - DNA, 25 bp, Artificial
  probe
  misc_feature (1)..(25): SEQ ID NO: 407; WAN0249TD_at; Start 1132; Stop 1156
tccttacgtgtgattggtaaaccca

SEQ ID NO: 33308 - DNA, 25 bp, Artificial
  probe
  misc_feature (1)..(25): SEQ ID NO: 407; WAN0249TD_at; Start 2009; Stop 2033
cagttttcccacacacgagatagac

SEQ ID NO: 33309 - DNA, 25 bp, Artificial
  probe
  misc_feature (1)..(25): SEQ ID NO: 407; WAN0249TD_at; Start 49; Stop 73
tccagactggagaactcacggatag

SEQ ID NO: 33310 - DNA, 25 bp, Artificial
  probe
  misc_feature (1)..(25): SEQ ID NO: 407; WAN0249TD_at; Start 1174; Stop 1198
tcttggcgataattgggtaccttca

SEQ ID NO: 33311 - DNA, 25 bp, Artificial
  probe
  misc_feature (1)..(25): SEQ ID NO: 194; WAN0249TE_at; Start 209; Stop 233
ctatacatattaaaaagtatgggta

SEQ ID NO: 33312 - DNA, 25 bp, Artificial
  probe
  misc_feature (1)..(25): SEQ ID NO: 194; WAN0249TE_at; Start 43; Stop 67
agaaatcgagtaggaaactcatatc

SEQ ID NO: 33313 - DNA, 25 bp, Artificial
  probe
  misc_feature (1)..(25): SEQ ID NO: 194; WAN0249TE_at; Start 298; Stop 322
ctcacctttacatttcaaggttcgg

SEQ ID NO: 33314 - DNA, 25 bp, Artificial
  probe
  misc_feature (1)..(25): SEQ ID NO: 194; WAN0249TE_at; Start 44; Stop 68
gaaatcgagtaggaaactcatatca

SEQ ID NO: 33315 - DNA, 25 bp, Artificial
  probe
  misc_feature (1)..(25): SEQ ID NO: 194; WAN0249TE_at; Start 36; Stop 60
aatctgaagaaatcgagtaggaaac

SEQ ID NO: 33316 - DNA, 25 bp, Artificial
  probe
  misc_feature (1)..(25): SEQ ID NO: 194; WAN0249TE_at; Start 280; Stop 304
taagctgtttctagcttcctcacct

SEQ ID NO: 33317 - DNA, 25 bp, Artificial
  probe
  misc_feature (1)..(25): SEQ ID NO: 194; WAN0249TE_at; Start 34; Stop 58
aaaatctgaagaaatcgagtaggaa

SEQ ID NO: 33318 - DNA, 25 bp, Artificial
  probe
  misc_feature (1)..(25): SEQ ID NO: 194; WAN0249TE_at; Start 285; Stop 309
tgtttctagcttcctcacctttaca

SEQ ID NO: 33319 - DNA, 25 bp, Artificial
  probe
  misc_feature (1)..(25): SEQ ID NO: 194; WAN0249TE_at; Start 74; Stop 98
taacagtgttctattccagattcat

SEQ ID NO: 33320 - DNA, 25 bp, Artificial
  probe
  misc_feature (1)..(25): SEQ ID NO: 194; WAN0249TE_at; Start 46; Stop 70
aatcgagtaggaaactcatatcaat

SEQ ID NO: 33321 - DNA, 25 bp, Artificial
  probe
  misc_feature (1)..(25): SEQ ID NO: 194; WAN0249TE_at; Start 263; Stop 287
ctcggaaagccttattttaagctgt

SEQ ID NO: 33322 - DNA, 25 bp, Artificial
  probe
  misc_feature (1)..(25): SEQ ID NO: 194; WAN0249TE_at; Start 38; Stop 62
tctgaagaaatcgagtaggaaactc

SEQ ID NO: 33323 - DNA, 25 bp, Artificial
  probe
  misc_feature (1)..(25): SEQ ID NO: 194; WAN0249TE_at; Start 269; Stop 293
aagccttattttaagctgtttctag

SEQ ID NO: 33324 - DNA, 25 bp, Artificial
  probe
  misc_feature (1)..(25): SEQ ID NO: 194; WAN0249TE_at; Start 33; Stop 57
taaaatctgaagaaatcgagtagga

SEQ ID NO: 33325 - DNA, 25 bp, Artificial
  probe
  misc_feature (1)..(25): SEQ ID NO: 194; WAN0249TE_at; Start 73; Stop 97
ttaacagtgttctattccagattca

SEQ ID NO: 33326 - DNA, 25 bp, Artificial
  probe
  misc_feature (1)..(25): SEQ ID NO: 194; WAN0249TE_at; Start 45; Stop 69
aaatcgagtaggaaactcatatcaa

SEQ ID NO: 33327 - DNA, 25 bp, Artificial
  probe
  misc_feature (1)..(25): SEQ ID NO: 194; WAN0249TE_at; Start 92; Stop 116
gattcatactcaatgaaaattaaag

SEQ ID NO: 33328 - DNA, 25 bp, Artificial
  probe
  misc_feature (1)..(25): SEQ ID NO: 194; WAN0249TE_at; Start 286; Stop 310
gtttctagcttcctcacctttacat

SEQ ID NO: 33329 - DNA, 25 bp, Artificial
  probe
  misc_feature (1)..(25): SEQ ID NO: 194; WAN0249TE_at; Start 291; Stop 315
tagcttcctcacctttacatttcaa

SEQ ID NO: 33330 - DNA, 25 bp, Artificial
  probe
  misc_feature (1)..(25): SEQ ID NO: 194; WAN0249TE_at; Start 293; Stop 317
gcttcctcacctttacatttcaagg

SEQ ID NO: 33331 - DNA, 25 bp, Artificial
  probe
  misc_feature (1)..(25): SEQ ID NO: 194; WAN0249TE_at; Start 18; Stop 42
tatagtcaattgaaataaaatctga

SEQ ID NO: 33332 - DNA, 25 bp, Artificial
  probe
  misc_feature (1)..(25): SEQ ID NO: 194; WAN0249TE_at; Start 41; Stop 65
gaagaaatcgagtaggaaactcata

SEQ ID NO: 33333 - DNA, 25 bp, Artificial
  probe
  misc_feature (1)..(25): SEQ ID NO: 194; WAN0249TE_at; Start 262; Stop 286
actcggaaagccttattttaagctg

SEQ ID NO: 33334 - DNA, 25 bp, Artificial
  probe
  misc_feature (1)..(25): SEQ ID NO: 194; WAN0249TE_at; Start 271; Stop 295
gccttattttaagctgtttctagct

SEQ ID NO: 33335 - DNA, 25 bp, Artificial
  probe
  misc_feature (1)..(25): SEQ ID NO: 194; WAN0249TE_at; Start 248; Stop 272
caggctctccgaaaactcggaaagc

SEQ ID NO: 33336 - DNA, 25 bp, Artificial
  probe
  misc_feature (1)..(25): SEQ ID NO: 194; WAN0249TE_at; Start 39; Stop 63
ctgaagaaatcgagtaggaaactca

SEQ ID NO: 33337 - DNA, 25 bp, Artificial
  probe
  misc_feature (1)..(25): SEQ ID NO: 194; WAN0249TE_at; Start 40; Stop 64
tgaagaaatcgagtaggaaactcat

SEQ ID NO: 33338 - DNA, 25 bp, Artificial
  probe
  misc_feature (1)..(25): SEQ ID NO: 194; WAN0249TE_at; Start 88; Stop 112
tccagattcatactcaatgaaaatt

SEQ ID NO: 33339 - DNA, 25 bp, Artificial
  probe
  misc_feature (1)..(25): SEQ ID NO: 194; WAN0249TE_at; Start 297; Stop 321
cctcacctttacatttcaaggttcg

SEQ ID NO: 33340 - DNA, 25 bp, Artificial
  probe
  misc_feature (1)..(25): SEQ ID NO: 194; WAN0249TE_at; Start 72; Stop 96
tttaacagtgttctattccagattc

SEQ ID NO: 33341 - DNA, 25 bp, Artificial
  probe
  misc_feature (1)..(25): SEQ ID NO: 194; WAN0249TE_at; Start 278; Stop 302
tttaagctgtttctagcttcctcac

SEQ ID NO: 33342 - DNA, 25 bp, Artificial
  probe
  misc_feature (1)..(25): SEQ ID NO: 194; WAN0249TE_at; Start 283; Stop 307
gctgtttctagcttcctcaccttta

SEQ ID NO: 33343 - DNA, 25 bp, Artificial
  probe
  misc_feature (1)..(25): SEQ ID NO: 194; WAN0249TE_at; Start 207; Stop 231
cactatacatattaaaaagtatggg

SEQ ID NO: 33344 - DNA, 25 bp, Artificial
  probe
  misc_feature (1)..(25): SEQ ID NO: 194; WAN0249TE_at; Start 247; Stop 271
acaggctctccgaaaactcggaaag

SEQ ID NO: 33345 - DNA, 25 bp, Artificial
  probe
  misc_feature (1)..(25): SEQ ID NO: 210; WAN0249TF_at; Start 81; Stop 105
acttggtcagttctatagtagactg

SEQ ID NO: 33346 - DNA, 25 bp, Artificial
  probe
  misc_feature (1)..(25): SEQ ID NO: 210; WAN0249TF_at; Start 89; Stop 113
agttctatagtagactgaaactata

SEQ ID NO: 33347 - DNA, 25 bp, Artificial
  probe
  misc_feature (1)..(25): SEQ ID NO: 210; WAN0249TF_at; Start 84; Stop 108
tggtcagttctatagtagactgaaa

SEQ ID NO: 33348 - DNA, 25 bp, Artificial
  probe
  misc_feature (1)..(25): SEQ ID NO: 210; WAN0249TF_at; Start 90; Stop 114
gttctatagtagactgaaactataa

SEQ ID NO: 33349 - DNA, 25 bp, Artificial
  probe
  misc_feature (1)..(25): SEQ ID NO: 210; WAN0249TF_at; Start 222; Stop 246
gaaagcaaacagccttgaaatcaat

SEQ ID NO: 33350 - DNA, 25 bp, Artificial
  probe
  misc_feature (1)..(25): SEQ ID NO: 210; WAN0249TF_at; Start 252; Stop 276
ctgcgattatgaacctgaatcagcc

SEQ ID NO: 33351 - DNA, 25 bp, Artificial
  probe
  misc_feature (1)..(25): SEQ ID NO: 210; WAN0249TF_at; Start 209; Stop 233
aaaaggggagatagaaagcaaacag

SEQ ID NO: 33352 - DNA, 25 bp, Artificial
  probe
  misc_feature (1)..(25): SEQ ID NO: 210; WAN0249TF_at; Start 220; Stop 244
tagaaagcaaacagccttgaaatca

SEQ ID NO: 33353 - DNA, 25 bp, Artificial
  probe
  misc_feature (1)..(25): SEQ ID NO: 210; WAN0249TF_at; Start 211; Stop 235
aaggggagatagaaagcaaacagcc

SEQ ID NO: 33354 - DNA, 25 bp, Artificial
  probe
  misc_feature (1)..(25): SEQ ID NO: 210; WAN0249TF_at; Start 217; Stop 241
agatagaaagcaaacagccttgaaa

SEQ ID NO: 33355 - DNA, 25 bp, Artificial
  probe
  misc_feature (1)..(25): SEQ ID NO: 210; WAN0249TF_at; Start 199; Stop 223
tacattatgaaaaaggggagataga

SEQ ID NO: 33356 - DNA, 25 bp, Artificial
  probe
  misc_feature (1)..(25): SEQ ID NO: 210; WAN0249TF_at; Start 200; Stop 224
acattatgaaaaaggggagatagaa

SEQ ID NO: 33357 - DNA, 25 bp, Artificial
  probe
  misc_feature (1)..(25): SEQ ID NO: 210; WAN0249TF_at; Start 204; Stop 228
tatgaaaaaggggagatagaaagca

SEQ ID NO: 33358 - DNA, 25 bp, Artificial
  probe
  misc_feature (1)..(25): SEQ ID NO: 210; WAN0249TF_at; Start 221; Stop 245
agaaagcaaacagccttgaaatcaa

SEQ ID NO: 33359 - DNA, 25 bp, Artificial
  probe
  misc_feature (1)..(25): SEQ ID NO: 210; WAN0249TF_at; Start 215; Stop 239
ggagatagaaagcaaacagccttga

SEQ ID NO: 33360 - DNA, 25 bp, Artificial
  probe
  misc_feature (1)..(25): SEQ ID NO: 210; WAN0249TF_at; Start 82; Stop 106
cttggtcagttctatagtagactga

SEQ ID NO: 33361 - DNA, 25 bp, Artificial
  probe
  misc_feature (1)..(25): SEQ ID NO: 210; WAN0249TF_at; Start 85; Stop 109
ggtcagttctatagtagactgaaac

SEQ ID NO: 33362 - DNA, 25 bp, Artificial
  probe
  misc_feature (1)..(25): SEQ ID NO: 210; WAN0249TF_at; Start 83; Stop 107
ttggtcagttctatagtagactgaa

SEQ ID NO: 33363 - DNA, 25 bp, Artificial
  probe
  misc_feature (1)..(25): SEQ ID NO: 210; WAN0249TF_at; Start 251; Stop 275
actgcgattatgaacctgaatcagc

SEQ ID NO: 33364 - DNA, 25 bp, Artificial
  probe
  misc_feature (1)..(25): SEQ ID NO: 210; WAN0249TF_at; Start 210; Stop 234
aaaggggagatagaaagcaaacagc

SEQ ID NO: 33365 - DNA, 25 bp, Artificial
  probe
  misc_feature (1)..(25): SEQ ID NO: 210; WAN0249TF_at; Start 216; Stop 240
gagatagaaagcaaacagccttgaa

SEQ ID NO: 33366 - DNA, 25 bp, Artificial
  probe
  misc_feature (1)..(25): SEQ ID NO: 210; WAN0249TF_at; Start 225; Stop 249
agcaaacagccttgaaatcaatgtt

SEQ ID NO: 33367 - DNA, 25 bp, Artificial
  probe
  misc_feature (1)..(25): SEQ ID NO: 210; WAN0249TF_at; Start 206; Stop 230
tgaaaaaggggagatagaaagcaaa

SEQ ID NO: 33368 - DNA, 25 bp, Artificial
  probe
  misc_feature (1)..(25): SEQ ID NO: 210; WAN0249TF_at; Start 80; Stop 104
gacttggtcagttctatagtagact

SEQ ID NO: 33369 - DNA, 25 bp, Artificial
  probe
  misc_feature (1)..(25): SEQ ID NO: 210; WAN0249TF_at; Start 214; Stop 238
gggagatagaaagcaaacagccttg

SEQ ID NO: 33370 - DNA, 25 bp, Artificial
  probe
  misc_feature (1)..(25): SEQ ID NO: 210; WAN0249TF_at; Start 87; Stop 111
tcagttctatagtagactgaaacta

SEQ ID NO: 33371 - DNA, 25 bp, Artificial
  probe
  misc_feature (1)..(25): SEQ ID NO: 210; WAN0249TF_at; Start 224; Stop 248
aagcaaacagccttgaaatcaatgt

SEQ ID NO: 33372 - DNA, 25 bp, Artificial
  probe
  misc_feature (1)..(25): SEQ ID NO: 210; WAN0249TF_at; Start 223; Stop 247
aaagcaaacagccttgaaatcaatg

SEQ ID NO: 33373 - DNA, 25 bp, Artificial
  probe
  misc_feature (1)..(25): SEQ ID NO: 210; WAN0249TF_at; Start 86; Stop 110
gtcagttctatagtagactgaaact

SEQ ID NO: 33374 - DNA, 25 bp, Artificial
  probe
  misc_feature (1)..(25): SEQ ID NO: 210; WAN0249TF_at; Start 219; Stop 243
atagaaagcaaacagccttgaaatc

SEQ ID NO: 33375 - DNA, 25 bp, Artificial
  probe
  misc_feature (1)..(25): SEQ ID NO: 210; WAN0249TF_at; Start 205; Stop 229
atgaaaaaggggagatagaaagcaa

SEQ ID NO: 33376 - DNA, 25 bp, Artificial
  probe
  misc_feature (1)..(25): SEQ ID NO: 210; WAN0249TF_at; Start 201; Stop 225
cattatgaaaaaggggagatagaaa

SEQ ID NO: 33377 - DNA, 25 bp, Artificial
  probe
  misc_feature (1)..(25): SEQ ID NO: 210; WAN0249TF_at; Start 218; Stop 242
gatagaaagcaaacagccttgaaat

SEQ ID NO: 33378 - DNA, 25 bp, Artificial
  probe
  misc_feature (1)..(25): SEQ ID NO: 210; WAN0249TF_at; Start 88; Stop 112
cagttctatagtagactgaaactat

SEQ ID NO: 33379 - DNA, 25 bp, Artificial
  probe
  misc_feature (1)..(25): SEQ ID NO: 4434; WAN0249TG_at; Start 31; Stop 55
caggttctaaataatcgaccacgaa

SEQ ID NO: 33380 - DNA, 25 bp, Artificial
  probe
  misc_feature (1)..(25): SEQ ID NO: 4434; WAN0249TG_at; Start 265; Stop 289
tcctaaaagtattattatgttgttg

SEQ ID NO: 33381 - DNA, 25 bp, Artificial
  probe
  misc_feature (1)..(25): SEQ ID NO: 4434; WAN0249TG_at; Start 89; Stop 113
gctacgggaaagttatgcacttaat

SEQ ID NO: 33382 - DNA, 25 bp, Artificial
  probe
  misc_feature (1)..(25): SEQ ID NO: 4434; WAN0249TG_at; Start 15; Stop 39
catttttttgtgaatacaggttcta

SEQ ID NO: 33383 - DNA, 25 bp, Artificial
  probe
  misc_feature (1)..(25): SEQ ID NO: 4434; WAN0249TG_at; Start 44; Stop 68
atcgaccacgaaaatttcttaagtg

SEQ ID NO: 33384 - DNA, 25 bp, Artificial
  probe
  misc_feature (1)..(25): SEQ ID NO: 4434; WAN0249TG_at; Start 318; Stop 342
ggatcctattcaattactagaacta

SEQ ID NO: 33385 - DNA, 25 bp, Artificial
  probe
  misc_feature (1)..(25): SEQ ID NO: 4434; WAN0249TG_at; Start 376; Stop 400
ctattttggttacaatgtctactaa

SEQ ID NO: 33386 - DNA, 25 bp, Artificial
  probe
  misc_feature (1)..(25): SEQ ID NO: 4434; WAN0249TG_at; Start 67; Stop 91
tggaaaacgccttatgaagtatgct

SEQ ID NO: 33387 - DNA, 25 bp, Artificial
  probe
  misc_feature (1)..(25): SEQ ID NO: 4434; WAN0249TG_at; Start 355; Stop 379
ggtcagctcacagatgagcaactat

SEQ ID NO: 33388 - DNA, 25 bp, Artificial
  probe
  misc_feature (1)..(25): SEQ ID NO: 4434; WAN0249TG_at; Start 300; Stop 324
tgattgaatctaactaaaggatcct

SEQ ID NO: 33389 - DNA, 25 bp, Artificial
  probe
  misc_feature (1)..(25): SEQ ID NO: 4434; WAN0249TG_at; Start 29; Stop 53
tacaggttctaaataatcgaccacg

SEQ ID NO: 33390 - DNA, 25 bp, Artificial
  probe
  misc_feature (1)..(25): SEQ ID NO: 4434; WAN0249TG_at; Start 102; Stop 126
tatgcacttaatttgacaattcaag

SEQ ID NO: 33391 - DNA, 25 bp, Artificial
  probe
  misc_feature (1)..(25): SEQ ID NO: 4434; WAN0249TG_at; Start 404; Stop 428
taagtcaaacaaataatttagtcaa

SEQ ID NO: 33392 - DNA, 25 bp, Artificial
  probe
  misc_feature (1)..(25): SEQ ID NO: 4434; WAN0249TG_at; Start 341; Stop 365
tatcacatactcaaggtcagctcac

SEQ ID NO: 33393 - DNA, 25 bp, Artificial
  probe
  misc_feature (1)..(25): SEQ ID NO: 4434; WAN0249TG_at; Start 370; Stop 394
gagcaactattttggttacaatgtc

SEQ ID NO: 33394 - DNA, 25 bp, Artificial
  probe
  misc_feature (1)..(25): SEQ ID NO: 4434; WAN0249TG_at; Start 337; Stop 361
gaactatcacatactcaaggtcagc

SEQ ID NO: 33395 - DNA, 25 bp, Artificial
  probe
  misc_feature (1)..(25): SEQ ID NO: 4434; WAN0249TG_at; Start 71; Stop 95
aaacgccttatgaagtatgctacgg

SEQ ID NO: 33396 - DNA, 25 bp, Artificial
  probe
  misc_feature (1)..(25): SEQ ID NO: 4434; WAN0249TG_at; Start 344; Stop 368
cacatactcaaggtcagctcacaga

SEQ ID NO: 33397 - DNA, 25 bp, Artificial
  probe
  misc_feature (1)..(25): SEQ ID NO: 4434; WAN0249TG_at; Start 305; Stop 329
gaatctaactaaaggatcctattca

SEQ ID NO: 33398 - DNA, 25 bp, Artificial
  probe
  misc_feature (1)..(25): SEQ ID NO: 4434; WAN0249TG_at; Start 332; Stop 356
tactagaactatcacatactcaagg

SEQ ID NO: 33399 - DNA, 25 bp, Artificial
  probe
  misc_feature (1)..(25): SEQ ID NO: 4434; WAN0249TG_at; Start 285; Stop 309
tgttgtgttatagattgattgaatc

SEQ ID NO: 33400 - DNA, 25 bp, Artificial
  probe
  misc_feature (1)..(25): SEQ ID NO: 4434; WAN0249TG_at; Start 243; Stop 267
tactataatatttgataagttatcc

SEQ ID NO: 33401 - DNA, 25 bp, Artificial
  probe
  misc_feature (1)..(25): SEQ ID NO: 4434; WAN0249TG_at; Start 434; Stop 458
aaaaaatagaggaacataaatatga

SEQ ID NO: 33402 - DNA, 25 bp, Artificial
  probe
  misc_feature (1)..(25): SEQ ID NO: 4434; WAN0249TG_at; Start 365; Stop 389
cagatgagcaactattttggttaca

SEQ ID NO: 33403 - DNA, 25 bp, Artificial
  probe
  misc_feature (1)..(25): SEQ ID NO: 4434; WAN0249TG_at; Start 254; Stop 278
ttgataagttatcctaaaagtatta

SEQ ID NO: 33404 - DNA, 25 bp, Artificial
  probe
  misc_feature (1)..(25): SEQ ID NO: 4434; WAN0249TG_at; Start 59; Stop 83
ttcttaagtggaaaacgccttatga

SEQ ID NO: 33405 - DNA, 25 bp, Artificial
  probe
  misc_feature (1)..(25): SEQ ID NO: 4434; WAN0249TG_at; Start 360; Stop 384
gctcacagatgagcaactattttgg

SEQ ID NO: 33406 - DNA, 25 bp, Artificial
  probe
  misc_feature (1)..(25): SEQ ID NO: 4434; WAN0249TG_at; Start 84; Stop 108
agtatgctacgggaaagttatgcac

SEQ ID NO: 33407 - DNA, 25 bp, Artificial
  probe
  misc_feature (1)..(25): SEQ ID NO: 4434; WAN0249TG_at; Start 348; Stop 372
tactcaaggtcagctcacagatgag

SEQ ID NO: 33408 - DNA, 25 bp, Artificial
  probe
  misc_feature (1)..(25): SEQ ID NO: 4434; WAN0249TG_at; Start 314; Stop 338
taaaggatcctattcaattactaga

SEQ ID NO: 33409 - DNA, 25 bp, Artificial
  probe
  misc_feature (1)..(25): SEQ ID NO: 4434; WAN0249TG_at; Start 118; Stop 142
caattcaagatgtaaaaatatatac

SEQ ID NO: 33410 - DNA, 25 bp, Artificial
  probe
  misc_feature (1)..(25): SEQ ID NO: 4434; WAN0249TG_at; Start 351; Stop 375
tcaaggtcagctcacagatgagcaa

SEQ ID NO: 33411 - DNA, 25 bp, Artificial
  probe
  misc_feature (1)..(25): SEQ ID NO: 4434; WAN0249TG_at; Start 76; Stop 100
ccttatgaagtatgctacgggaaag

SEQ ID NO: 33412 - DNA, 25 bp, Artificial
  probe
  misc_feature (1)..(25): SEQ ID NO: 4434; WAN0249TG_at; Start 388; Stop 412
caatgtctactaaatttaagtcaaa

SEQ ID NO: 33413 - DNA, 25 bp, Artificial
  probe
  misc_feature (1)..(25): SEQ ID NO: 3593; WAN0249TH_at; Start 14; Stop 38
gaagacgaatcagtcaagctggttc

SEQ ID NO: 33414 - DNA, 25 bp, Artificial
  probe
  misc_feature (1)..(25): SEQ ID NO: 3593; WAN0249TH_at; Start 232; Stop 256
attaaccttacagaaagcggcaaca

SEQ ID NO: 33415 - DNA, 25 bp, Artificial
  probe
  misc_feature (1)..(25): SEQ ID NO: 3593; WAN0249TH_at; Start 53; Stop 77
gaagtcagtttttagagccctatct

SEQ ID NO: 33416 - DNA, 25 bp, Artificial
  probe
  misc_feature (1)..(25): SEQ ID NO: 3593; WAN0249TH_at; Start 236; Stop 260
accttacagaaagcggcaacaaata

SEQ ID NO: 33417 - DNA, 25 bp, Artificial
  probe
  misc_feature (1)..(25): SEQ ID NO: 3593; WAN0249TH_at; Start 51; Stop 75
tagaagtcagtttttagagccctat

SEQ ID NO: 33418 - DNA, 25 bp, Artificial
  probe
  misc_feature (1)..(25): SEQ ID NO: 3593; WAN0249TH_at; Start 55; Stop 79
agtcagtttttagagccctatcttt

SEQ ID NO: 33419 - DNA, 25 bp, Artificial
  probe
  misc_feature (1)..(25): SEQ ID NO: 3593; WAN0249TH_at; Start 86; Stop 110
tctagttgtttatttgtttatttgc

SEQ ID NO: 33420 - DNA, 25 bp, Artificial
  probe
  misc_feature (1)..(25): SEQ ID NO: 3593; WAN0249TH_at; Start 69; Stop 93
gccctatctttttctattctagttg

SEQ ID NO: 33421 - DNA, 25 bp, Artificial
  probe
  misc_feature (1)..(25): SEQ ID NO: 3593; WAN0249TH_at; Start 49; Stop 73
aatagaagtcagtttttagagccct

SEQ ID NO: 33422 - DNA, 25 bp, Artificial
  probe
  misc_feature (1)..(25): SEQ ID NO: 3593; WAN0249TH_at; Start 17; Stop 41
gacgaatcagtcaagctggttcgtt

SEQ ID NO: 33423 - DNA, 25 bp, Artificial
  probe
  misc_feature (1)..(25): SEQ ID NO: 3593; WAN0249TH_at; Start 235; Stop 259
aaccttacagaaagcggcaacaaat

SEQ ID NO: 33424 - DNA, 25 bp, Artificial
  probe
  misc_feature (1)..(25): SEQ ID NO: 3593; WAN0249TH_at; Start 231; Stop 255
tattaaccttacagaaagcggcaac

SEQ ID NO: 33425 - DNA, 25 bp, Artificial
  probe
  misc_feature (1)..(25): SEQ ID NO: 3593; WAN0249TH_at; Start 12; Stop 36
aagaagacgaatcagtcaagctggt

SEQ ID NO: 33426 - DNA, 25 bp, Artificial
  probe
  misc_feature (1)..(25): SEQ ID NO: 3593; WAN0249TH_at; Start 52; Stop 76
agaagtcagtttttagagccctatc

SEQ ID NO: 33427 - DNA, 25 bp, Artificial
  probe
  misc_feature (1)..(25): SEQ ID NO: 3593; WAN0249TH_at; Start 66; Stop 90
agagccctatctttttctattctag

SEQ ID NO: 33428 - DNA, 25 bp, Artificial
  probe
  misc_feature (1)..(25): SEQ ID NO: 3593; WAN0249TH_at; Start 9; Stop 33
cgtaagaagacgaatcagtcaagct

SEQ ID NO: 33429 - DNA, 25 bp, Artificial
  probe
  misc_feature (1)..(25): SEQ ID NO: 3593; WAN0249TH_at; Start 5; Stop 29
taaacgtaagaagacgaatcagtca

SEQ ID NO: 33430 - DNA, 25 bp, Artificial
  probe
  misc_feature (1)..(25): SEQ ID NO: 3593; WAN0249TH_at; Start 11; Stop 35
taagaagacgaatcagtcaagctgg

SEQ ID NO: 33431 - DNA, 25 bp, Artificial
  probe
  misc_feature (1)..(25): SEQ ID NO: 3593; WAN0249TH_at; Start 48; Stop 72
gaatagaagtcagtttttagagccc

SEQ ID NO: 33432 - DNA, 25 bp, Artificial
  probe
  misc_feature (1)..(25): SEQ ID NO: 3593; WAN0249TH_at; Start 24; Stop 48
cagtcaagctggttcgtttttaagg

SEQ ID NO: 33433 - DNA, 25 bp, Artificial
  probe
  misc_feature (1)..(25): SEQ ID NO: 3593; WAN0249TH_at; Start 229; Stop 253
agtattaaccttacagaaagcggca

SEQ ID NO: 33434 - DNA, 25 bp, Artificial
  probe
  misc_feature (1)..(25): SEQ ID NO: 3593; WAN0249TH_at; Start 230; Stop 254
gtattaaccttacagaaagcggcaa

SEQ ID NO: 33435 - DNA, 25 bp, Artificial
  probe
  misc_feature (1)..(25): SEQ ID NO: 3593; WAN0249TH_at; Start 20; Stop 44
gaatcagtcaagctggttcgttttt

SEQ ID NO: 33436 - DNA, 25 bp, Artificial
  probe
  misc_feature (1)..(25): SEQ ID NO: 3593; WAN0249TH_at; Start 233; Stop 257
ttaaccttacagaaagcggcaacaa

SEQ ID NO: 33437 - DNA, 25 bp, Artificial
  probe
  misc_feature (1)..(25): SEQ ID NO: 3593; WAN0249TH_at; Start 228; Stop 252
gagtattaaccttacagaaagcggc

SEQ ID NO: 33438 - DNA, 25 bp, Artificial
  probe
  misc_feature (1)..(25): SEQ ID NO: 3593; WAN0249TH_at; Start 234; Stop 258
taaccttacagaaagcggcaacaaa

SEQ ID NO: 33439 - DNA, 25 bp, Artificial
  probe
  misc_feature (1)..(25): SEQ ID NO: 3593; WAN0249TH_at; Start 101; Stop 125
gtttatttgcttatttgcttgccta

SEQ ID NO: 33440 - DNA, 25 bp, Artificial
  probe
  misc_feature (1)..(25): SEQ ID NO: 3593; WAN0249TH_at; Start 103; Stop 127
ttatttgcttatttgcttgcctagt

SEQ ID NO: 33441 - DNA, 25 bp, Artificial
  probe
  misc_feature (1)..(25): SEQ ID NO: 3593; WAN0249TH_at; Start 23; Stop 47
tcagtcaagctggttcgtttttaag

SEQ ID NO: 33442 - DNA, 25 bp, Artificial
  probe
  misc_feature (1)..(25): SEQ ID NO: 3593; WAN0249TH_at; Start 7; Stop 31
aacgtaagaagacgaatcagtcaag

SEQ ID NO: 33443 - DNA, 25 bp, Artificial
  probe
  misc_feature (1)..(25): SEQ ID NO: 3593; WAN0249TH_at; Start 1; Stop 25
gagataaacgtaagaagacgaatca

SEQ ID NO: 33444 - DNA, 25 bp, Artificial
  probe
  misc_feature (1)..(25): SEQ ID NO: 3593; WAN0249TH_at; Start 227; Stop 251
tgagtattaaccttacagaaagcgg

SEQ ID NO: 33445 - DNA, 25 bp, Artificial
  probe
  misc_feature (1)..(25): SEQ ID NO: 3593; WAN0249TH_at; Start 15; Stop 39
aagacgaatcagtcaagctggttcg

SEQ ID NO: 33446 - DNA, 25 bp, Artificial
  probe
  misc_feature (1)..(25): SEQ ID NO: 3593; WAN0249TH_at; Start 3; Stop 27
gataaacgtaagaagacgaatcagt

SEQ ID NO: 33447 - DNA, 25 bp, Artificial
  probe
  misc_feature (1)..(25): SEQ ID NO: 3242; WAN0249TI_at; Start 1737; Stop 1761
agcgagggtggttattttctcaaag

SEQ ID NO: 33448 - DNA, 25 bp, Artificial
  probe
  misc_feature (1)..(25): SEQ ID NO: 3242; WAN0249TI_at; Start 1848; Stop 1872
cctatcttctagaatgtcttccaaa

SEQ ID NO: 33449 - DNA, 25 bp, Artificial
  probe
  misc_feature (1)..(25): SEQ ID NO: 3242; WAN0249TI_at; Start 1286; Stop 1310
ccgctcgtctgcttatcgtcaactg

SEQ ID NO: 33450 - DNA, 25 bp, Artificial
  probe
  misc_feature (1)..(25): SEQ ID NO: 3242; WAN0249TI_at; Start 524; Stop 548
ccagtccttgtataacatcttggag

SEQ ID NO: 33451 - DNA, 25 bp, Artificial
  probe
  misc_feature (1)..(25): SEQ ID NO: 3242; WAN0249TI_at; Start 466; Stop 490
ctttcaaaaagcattctagtccatc

SEQ ID NO: 33452 - DNA, 25 bp, Artificial
  probe
  misc_feature (1)..(25): SEQ ID NO: 3242; WAN0249TI_at; Start 1255; Stop 1279
caaggcgacgctaagcttggtaaac

SEQ ID NO: 33453 - DNA, 25 bp, Artificial
  probe
  misc_feature (1)..(25): SEQ ID NO: 3242; WAN0249TI_at; Start 1798; Stop 1822
tttgttggaaacagctaaacgtcat

SEQ ID NO: 33454 - DNA, 25 bp, Artificial
  probe
  misc_feature (1)..(25): SEQ ID NO: 3242; WAN0249TI_at; Start 1722; Stop 1746
agctcagtttaaaaaagcgagggtg

SEQ ID NO: 33455 - DNA, 25 bp, Artificial
  probe
  misc_feature (1)..(25): SEQ ID NO: 3242; WAN0249TI_at; Start 1241; Stop 1265
ccaaggtttaggagcaaggcgacgc

SEQ ID NO: 33456 - DNA, 25 bp, Artificial
  probe
  misc_feature (1)..(25): SEQ ID NO: 3242; WAN0249TI_at; Start 210; Stop 234
tgatttggctaagtacagaaaagga

SEQ ID NO: 33457 - DNA, 25 bp, Artificial
  probe
  misc_feature (1)..(25): SEQ ID NO: 3242; WAN0249TI_at; Start 693; Stop 717
ggtacttgatttatgccatatagca

SEQ ID NO: 33458 - DNA, 25 bp, Artificial
  probe
  misc_feature (1)..(25): SEQ ID NO: 3242; WAN0249TI_at; Start 1204; Stop 1228
gactttagtcctctagttctgccta

SEQ ID NO: 33459 - DNA, 25 bp, Artificial
  probe
  misc_feature (1)..(25): SEQ ID NO: 3242; WAN0249TI_at; Start 1756; Stop 1780
tcaaagttttgaaggagctaaagca

SEQ ID NO: 33460 - DNA, 25 bp, Artificial
  probe
  misc_feature (1)..(25): SEQ ID NO: 3242; WAN0249TI_at; Start 1766; Stop 1790
gaaggagctaaagcaagagctatta

SEQ ID NO: 33461 - DNA, 25 bp, Artificial
  probe
  misc_feature (1)..(25): SEQ ID NO: 3242; WAN0249TI_at; Start 736; Stop 760
agataatcatctggataagcttgtg

SEQ ID NO: 33462 - DNA, 25 bp, Artificial
  probe
  misc_feature (1)..(25): SEQ ID NO: 3242; WAN0249TI_at; Start 1181; Stop 1205
gatattttgcggcagtaacttagga

SEQ ID NO: 33463 - DNA, 25 bp, Artificial
  probe
  misc_feature (1)..(25): SEQ ID NO: 3242; WAN0249TI_at; Start 1212; Stop 1236
tcctctagttctgcctatgcgatag

SEQ ID NO: 33464 - DNA, 25 bp, Artificial
  probe
  misc_feature (1)..(25): SEQ ID NO: 3242; WAN0249TI_at; Start 1345; Stop 1369
tgagaaggaagttttttgaagcgcc

SEQ ID NO: 33465 - DNA, 25 bp, Artificial
  probe
  misc_feature (1)..(25): SEQ ID NO: 3242; WAN0249TI_at; Start 719; Stop 743
tgtccataacgagtaaaagataatc

SEQ ID NO: 33466 - DNA, 25 bp, Artificial
  probe
  misc_feature (1)..(25): SEQ ID NO: 3242; WAN0249TI_at; Start 1261; Stop 1285
gacgctaagcttggtaaacttcgaa

SEQ ID NO: 33467 - DNA, 25 bp, Artificial
  probe
  misc_feature (1)..(25): SEQ ID NO: 3242; WAN0249TI_at; Start 1272; Stop 1296
tggtaaacttcgaaccgctcgtctg

SEQ ID NO: 33468 - DNA, 25 bp, Artificial
  probe
  misc_feature (1)..(25): SEQ ID NO: 3242; WAN0249TI_at; Start 1421; Stop 1445
gtgatcagttattttccttggaaag

SEQ ID NO: 33469 - DNA, 25 bp, Artificial
  probe
  misc_feature (1)..(25): SEQ ID NO: 3242; WAN0249TI_at; Start 1337; Stop 1361
ggcgcatgtgagaaggaagtttttt

SEQ ID NO: 33470 - DNA, 25 bp, Artificial
  probe
  misc_feature (1)..(25): SEQ ID NO: 3242; WAN0249TI_at; Start 1937; Stop 1961
gaaaagtgcaaataagaaatctcca

SEQ ID NO: 33471 - DNA, 25 bp, Artificial
  probe
  misc_feature (1)..(25): SEQ ID NO: 3242; WAN0249TI_at; Start 1972; Stop 1996
tatccgtgagttctccagtctggag

SEQ ID NO: 33472 - DNA, 25 bp, Artificial
  probe
  misc_feature (1)..(25): SEQ ID NO: 3242; WAN0249TI_at; Start 1962; Stop 1986
gattaggaactatccgtgagttctc

SEQ ID NO: 33473 - DNA, 25 bp, Artificial
  probe
  misc_feature (1)..(25): SEQ ID NO: 3242; WAN0249TI_at; Start 678; Stop 702
agtcggaatctttaaggtacttgat

SEQ ID NO: 33474 - DNA, 25 bp, Artificial
  probe
  misc_feature (1)..(25): SEQ ID NO: 3242; WAN0249TI_at; Start 707; Stop 731
gccatatagcattgtccataacgag

SEQ ID NO: 33475 - DNA, 25 bp, Artificial
  probe
  misc_feature (1)..(25): SEQ ID NO: 3242; WAN0249TI_at; Start 1189; Stop 1213
gcggcagtaacttaggactttagtc

SEQ ID NO: 33476 - DNA, 25 bp, Artificial
  probe
  misc_feature (1)..(25): SEQ ID NO: 3242; WAN0249TI_at; Start 1227; Stop 1251
tatgcgatagcagtccaaggtttag

SEQ ID NO: 33477 - DNA, 25 bp, Artificial
  probe
  misc_feature (1)..(25): SEQ ID NO: 3242; WAN0249TI_at; Start 1826; Stop 1850
ttaaatagcgagaaatatctatcct

SEQ ID NO: 33478 - DNA, 25 bp, Artificial
  probe
  misc_feature (1)..(25): SEQ ID NO: 3242; WAN0249TI_at; Start 1709; Stop 1733
ctcttttagcctaagctcagtttaa

SEQ ID NO: 33479 - DNA, 25 bp, Artificial
  probe
  misc_feature (1)..(25): SEQ ID NO: 3242; WAN0249TI_at; Start 1782; Stop 1806
gagctattattatgagtttgttgga

SEQ ID NO: 33480 - DNA, 25 bp, Artificial
  probe
  misc_feature (1)..(25): SEQ ID NO: 3242; WAN0249TI_at; Start 195; Stop 219
ttgagaacggcagattgatttggct

SEQ ID NO: 33481 - DNA, 25 bp, Artificial
  probe
  misc_feature (1)..(25): SEQ ID NO: 254; WAN0249TJ_at; Start 131; Stop 155
tatattgtgatgctctttaatactc

SEQ ID NO: 33482 - DNA, 25 bp, Artificial
  probe
  misc_feature (1)..(25): SEQ ID NO: 254; WAN0249TJ_at; Start 335; Stop 359
gcgtaaactacgtgagcaattgaat

SEQ ID NO: 33483 - DNA, 25 bp, Artificial
  probe
  misc_feature (1)..(25): SEQ ID NO: 254; WAN0249TJ_at; Start 314; Stop 338
catctacaagtgaagctatatgcgt

SEQ ID NO: 33484 - DNA, 25 bp, Artificial
  probe
  misc_feature (1)..(25): SEQ ID NO: 254; WAN0249TJ_at; Start 87; Stop 111
aaaatgcttctctcctttttgctag

SEQ ID NO: 33485 - DNA, 25 bp, Artificial
  probe
  misc_feature (1)..(25): SEQ ID NO: 254; WAN0249TJ_at; Start 240; Stop 264
gatgtactttgagcagcttacggct

SEQ ID NO: 33486 - DNA, 25 bp, Artificial
  probe
  misc_feature (1)..(25): SEQ ID NO: 254; WAN0249TJ_at; Start 309; Stop 333
ggtaccatctacaagtgaagctata

SEQ ID NO: 33487 - DNA, 25 bp, Artificial
  probe
  misc_feature (1)..(25): SEQ ID NO: 254; WAN0249TJ_at; Start 311; Stop 335
taccatctacaagtgaagctatatg

SEQ ID NO: 33488 - DNA, 25 bp, Artificial
  probe
  misc_feature (1)..(25): SEQ ID NO: 254; WAN0249TJ_at; Start 360; Stop 384
tcgaactagagaggtaataataaat

SEQ ID NO: 33489 - DNA, 25 bp, Artificial
  probe
  misc_feature (1)..(25): SEQ ID NO: 254; WAN0249TJ_at; Start 237; Stop 261
aaagatgtactttgagcagcttacg

SEQ ID NO: 33490 - DNA, 25 bp, Artificial
  probe
  misc_feature (1)..(25): SEQ ID NO: 254; WAN0249TJ_at; Start 338; Stop 362
taaactacgtgagcaattgaattcg

SEQ ID NO: 33491 - DNA, 25 bp, Artificial
  probe
  misc_feature (1)..(25): SEQ ID NO: 254; WAN0249TJ_at; Start 45; Stop 69
caattgtagtggagagatatcagtt

SEQ ID NO: 33492 - DNA, 25 bp, Artificial
  probe
  misc_feature (1)..(25): SEQ ID NO: 254; WAN0249TJ_at; Start 307; Stop 331
tgggtaccatctacaagtgaagcta

SEQ ID NO: 33493 - DNA, 25 bp, Artificial
  probe
  misc_feature (1)..(25): SEQ ID NO: 254; WAN0249TJ_at; Start 75; Stop 99
agggagagaaacaaaatgcttctct

SEQ ID NO: 33494 - DNA, 25 bp, Artificial
  probe
  misc_feature (1)..(25): SEQ ID NO: 254; WAN0249TJ_at; Start 325; Stop 349
gaagctatatgcgtaaactacgtga

SEQ ID NO: 33495 - DNA, 25 bp, Artificial
  probe
  misc_feature (1)..(25): SEQ ID NO: 254; WAN0249TJ_at; Start 348; Stop 372
gagcaattgaattcgaactagagag

SEQ ID NO: 33496 - DNA, 25 bp, Artificial
  probe
  misc_feature (1)..(25): SEQ ID NO: 254; WAN0249TJ_at; Start 366; Stop 390
tagagaggtaataataaatttatgc

SEQ ID NO: 33497 - DNA, 25 bp, Artificial
  probe
  misc_feature (1)..(25): SEQ ID NO: 254; WAN0249TJ_at; Start 305; Stop 329
tgtgggtaccatctacaagtgaagc

SEQ ID NO: 33498 - DNA, 25 bp, Artificial
  probe
  misc_feature (1)..(25): SEQ ID NO: 254; WAN0249TJ_at; Start 322; Stop 346
agtgaagctatatgcgtaaactacg

SEQ ID NO: 33499 - DNA, 25 bp, Artificial
  probe
  misc_feature (1)..(25): SEQ ID NO: 254; WAN0249TJ_at; Start 332; Stop 356
tatgcgtaaactacgtgagcaattg

SEQ ID NO: 33500 - DNA, 25 bp, Artificial
  probe
  misc_feature (1)..(25): SEQ ID NO: 254; WAN0249TJ_at; Start 343; Stop 367
tacgtgagcaattgaattcgaacta

SEQ ID NO: 33501 - DNA, 25 bp, Artificial
  probe
  misc_feature (1)..(25): SEQ ID NO: 254; WAN0249TJ_at; Start 18; Stop 42
gcactacaagaaaagatatctcttt

SEQ ID NO: 33502 - DNA, 25 bp, Artificial
  probe
  misc_feature (1)..(25): SEQ ID NO: 254; WAN0249TJ_at; Start 113; Stop 137
gaagtcatattatgcatctatattg

SEQ ID NO: 33503 - DNA, 25 bp, Artificial
  probe
  misc_feature (1)..(25): SEQ ID NO: 254; WAN0249TJ_at; Start 340; Stop 364
aactacgtgagcaattgaattcgaa

SEQ ID NO: 33504 - DNA, 25 bp, Artificial
  probe
  misc_feature (1)..(25): SEQ ID NO: 254; WAN0249TJ_at; Start 36; Stop 60
tctctttatcaattgtagtggagag

SEQ ID NO: 33505 - DNA, 25 bp, Artificial
  probe
  misc_feature (1)..(25): SEQ ID NO: 254; WAN0249TJ_at; Start 290; Stop 314
ccattgagtattatttgtgggtacc

SEQ ID NO: 33506 - DNA, 25 bp, Artificial
  probe
  misc_feature (1)..(25): SEQ ID NO: 254; WAN0249TJ_at; Start 126; Stop 150
gcatctatattgtgatgctctttaa

SEQ ID NO: 33507 - DNA, 25 bp, Artificial
  probe
  misc_feature (1)..(25): SEQ ID NO: 254; WAN0249TJ_at; Start 318; Stop 342
tacaagtgaagctatatgcgtaaac

SEQ ID NO: 33508 - DNA, 25 bp, Artificial
  probe
  misc_feature (1)..(25): SEQ ID NO: 254; WAN0249TJ_at; Start 13; Stop 37
tcaaagcactacaagaaaagatatc

SEQ ID NO: 33509 - DNA, 25 bp, Artificial
  probe
  misc_feature (1)..(25): SEQ ID NO: 254; WAN0249TJ_at; Start 351; Stop 375
caattgaattcgaactagagaggta

SEQ ID NO: 33510 - DNA, 25 bp, Artificial
  probe
  misc_feature (1)..(25): SEQ ID NO: 254; WAN0249TJ_at; Start 3; Stop 27
taaataaaattcaaagcactacaag

SEQ ID NO: 33511 - DNA, 25 bp, Artificial
  probe
  misc_feature (1)..(25): SEQ ID NO: 254; WAN0249TJ_at; Start 32; Stop 56
gatatctctttatcaattgtagtgg

SEQ ID NO: 33512 - DNA, 25 bp, Artificial
  probe
  misc_feature (1)..(25): SEQ ID NO: 254; WAN0249TJ_at; Start 355; Stop 379
tgaattcgaactagagaggtaataa

SEQ ID NO: 33513 - DNA, 25 bp, Artificial
  probe
  misc_feature (1)..(25): SEQ ID NO: 254; WAN0249TJ_at; Start 328; Stop 352
gctatatgcgtaaactacgtgagca

SEQ ID NO: 33514 - DNA, 25 bp, Artificial
  probe
  misc_feature (1)..(25): SEQ ID NO: 254; WAN0249TJ_at; Start 381; Stop 405
aaatttatgctatagttatggtgac

SEQ ID NO: 33515 - DNA, 25 bp, Artificial
  probe
  misc_feature (1)..(25): SEQ ID NO: 541; WAN0249TK_at; Start 6; Stop 30
ttttacctagatatgtaacatactc

SEQ ID NO: 33516 - DNA, 25 bp, Artificial
  probe
  misc_feature (1)..(25): SEQ ID NO: 541; WAN0249TK_at; Start 37; Stop 61
caaaagagaccaggcaaaaagtctt

SEQ ID NO: 33517 - DNA, 25 bp, Artificial
  probe
  misc_feature (1)..(25): SEQ ID NO: 541; WAN0249TK_at; Start 290; Stop 314
attccagattcagttcactatacaa

SEQ ID NO: 33518 - DNA, 25 bp, Artificial
  probe
  misc_feature (1)..(25): SEQ ID NO: 541; WAN0249TK_at; Start 199; Stop 223
tcactatatcgcaaaatgaaataag

SEQ ID NO: 33519 - DNA, 25 bp, Artificial
  probe
  misc_feature (1)..(25): SEQ ID NO: 541; WAN0249TK_at; Start 385; Stop 409
taaaaacctcgctttcgcaaggctc

SEQ ID NO: 33520 - DNA, 25 bp, Artificial
  probe
  misc_feature (1)..(25): SEQ ID NO: 541; WAN0249TK_at; Start 274; Stop 298
gaagtaatattatcctattccagat

SEQ ID NO: 33521 - DNA, 25 bp, Artificial
  probe
  misc_feature (1)..(25): SEQ ID NO: 541; WAN0249TK_at; Start 171; Stop 195
cgttttttgtgagctgacttatttc

SEQ ID NO: 33522 - DNA, 25 bp, Artificial
  probe
  misc_feature (1)..(25): SEQ ID NO: 541; WAN0249TK_at; Start 212; Stop 236
aaatgaaataagaacggaacgatgg

SEQ ID NO: 33523 - DNA, 25 bp, Artificial
  probe
  misc_feature (1)..(25): SEQ ID NO: 541; WAN0249TK_at; Start 15; Stop 39
gatatgtaacatactcatagaacaa

SEQ ID NO: 33524 - DNA, 25 bp, Artificial
  probe
  misc_feature (1)..(25): SEQ ID NO: 541; WAN0249TK_at; Start 342; Stop 366
aatgtgtacataattaggttcgtga

SEQ ID NO: 33525 - DNA, 25 bp, Artificial
  probe
  misc_feature (1)..(25): SEQ ID NO: 541; WAN0249TK_at; Start 296; Stop 320
gattcagttcactatacaattgagt

SEQ ID NO: 33526 - DNA, 25 bp, Artificial
  probe
  misc_feature (1)..(25): SEQ ID NO: 541; WAN0249TK_at; Start 192; Stop 216
tttcctttcactatatcgcaaaatg

SEQ ID NO: 33527 - DNA, 25 bp, Artificial
  probe
  misc_feature (1)..(25): SEQ ID NO: 541; WAN0249TK_at; Start 339; Stop 363
cataatgtgtacataattaggttcg

SEQ ID NO: 33528 - DNA, 25 bp, Artificial
  probe
  misc_feature (1)..(25): SEQ ID NO: 541; WAN0249TK_at; Start 346; Stop 370
tgtacataattaggttcgtgattcc

SEQ ID NO: 33529 - DNA, 25 bp, Artificial
  probe
  misc_feature (1)..(25): SEQ ID NO: 541; WAN0249TK_at; Start 181; Stop 205
gagctgacttatttcctttcactat

SEQ ID NO: 33530 - DNA, 25 bp, Artificial
  probe
  misc_feature (1)..(25): SEQ ID NO: 541; WAN0249TK_at; Start 300; Stop 324
cagttcactatacaattgagttttc

SEQ ID NO: 33531 - DNA, 25 bp, Artificial
  probe
  misc_feature (1)..(25): SEQ ID NO: 541; WAN0249TK_at; Start 29; Stop 53
tcatagaacaaaagagaccaggcaa

SEQ ID NO: 33532 - DNA, 25 bp, Artificial
  probe
  misc_feature (1)..(25): SEQ ID NO: 541; WAN0249TK_at; Start 186; Stop 210
gacttatttcctttcactatatcgc

SEQ ID NO: 33533 - DNA, 25 bp, Artificial
  probe
  misc_feature (1)..(25): SEQ ID NO: 541; WAN0249TK_at; Start 264; Stop 288
gaatgttttagaagtaatattatcc

SEQ ID NO: 33534 - DNA, 25 bp, Artificial
  probe
  misc_feature (1)..(25): SEQ ID NO: 541; WAN0249TK_at; Start 32; Stop 56
tagaacaaaagagaccaggcaaaaa

SEQ ID NO: 33535 - DNA, 25 bp, Artificial
  probe
  misc_feature (1)..(25): SEQ ID NO: 541; WAN0249TK_at; Start 350; Stop 374
cataattaggttcgtgattccaccc

SEQ ID NO: 33536 - DNA, 25 bp, Artificial
  probe
  misc_feature (1)..(25): SEQ ID NO: 541; WAN0249TK_at; Start 219; Stop 243
ataagaacggaacgatgggattttg

SEQ ID NO: 33537 - DNA, 25 bp, Artificial
  probe
  misc_feature (1)..(25): SEQ ID NO: 541; WAN0249TK_at; Start 348; Stop 372
tacataattaggttcgtgattccac

SEQ ID NO: 33538 - DNA, 25 bp, Artificial
  probe
  misc_feature (1)..(25): SEQ ID NO: 541; WAN0249TK_at; Start 387; Stop 411
aaaacctcgctttcgcaaggctctt

SEQ ID NO: 33539 - DNA, 25 bp, Artificial
  probe
  misc_feature (1)..(25): SEQ ID NO: 541; WAN0249TK_at; Start 30; Stop 54
catagaacaaaagagaccaggcaaa

SEQ ID NO: 33540 - DNA, 25 bp, Artificial
  probe
  misc_feature (1)..(25): SEQ ID NO: 541; WAN0249TK_at; Start 26; Stop 50
tactcatagaacaaaagagaccagg

SEQ ID NO: 33541 - DNA, 25 bp, Artificial
  probe
  misc_feature (1)..(25): SEQ ID NO: 541; WAN0249TK_at; Start 176; Stop 200
tttgtgagctgacttatttcctttc

SEQ ID NO: 33542 - DNA, 25 bp, Artificial
  probe
  misc_feature (1)..(25): SEQ ID NO: 541; WAN0249TK_at; Start 351; Stop 375
ataattaggttcgtgattccaccct

SEQ ID NO: 33543 - DNA, 25 bp, Artificial
  probe
  misc_feature (1)..(25): SEQ ID NO: 541; WAN0249TK_at; Start 356; Stop 380
taggttcgtgattccacccttttca

SEQ ID NO: 33544 - DNA, 25 bp, Artificial
  probe
  misc_feature (1)..(25): SEQ ID NO: 541; WAN0249TK_at; Start 167; Stop 191
tatgcgttttttgtgagctgactta

SEQ ID NO: 33545 - DNA, 25 bp, Artificial
  probe
  misc_feature (1)..(25): SEQ ID NO: 541; WAN0249TK_at; Start 214; Stop 238
atgaaataagaacggaacgatggga

SEQ ID NO: 33546 - DNA, 25 bp, Artificial
  probe
  misc_feature (1)..(25): SEQ ID NO: 541; WAN0249TK_at; Start 307; Stop 331
ctatacaattgagttttcaagcaac

SEQ ID NO: 33547 - DNA, 25 bp, Artificial
  probe
  misc_feature (1)..(25): SEQ ID NO: 541; WAN0249TK_at; Start 305; Stop 329
cactatacaattgagttttcaagca

SEQ ID NO: 33548 - DNA, 25 bp, Artificial
  probe
  misc_feature (1)..(25): SEQ ID NO: 541; WAN0249TK_at; Start 20; Stop 44
gtaacatactcatagaacaaaagag

SEQ ID NO: 33549 - DNA, 25 bp, Artificial
  probe
  misc_feature (1)..(25): SEQ ID NO: 5964; WAN0249TL_at; Start 17; Stop 41
accacctgaaacaaatcaagtgact

SEQ ID NO: 33550 - DNA, 25 bp, Artificial
  probe
  misc_feature (1)..(25): SEQ ID NO: 5964; WAN0249TL_at; Start 165; Stop 189
gtgtttttgccccacctatctgcta

SEQ ID NO: 33551 - DNA, 25 bp, Artificial
  probe
  misc_feature (1)..(25): SEQ ID NO: 5964; WAN0249TL_at; Start 164; Stop 188
tgtgtttttgccccacctatctgct

SEQ ID NO: 33552 - DNA, 25 bp, Artificial
  probe
  misc_feature (1)..(25): SEQ ID NO: 5964; WAN0249TL_at; Start 19; Stop 43
cacctgaaacaaatcaagtgactag

SEQ ID NO: 33553 - DNA, 25 bp, Artificial
  probe
  misc_feature (1)..(25): SEQ ID NO: 5964; WAN0249TL_at; Start 28; Stop 52
caaatcaagtgactagaggataaaa

SEQ ID NO: 33554 - DNA, 25 bp, Artificial
  probe
  misc_feature (1)..(25): SEQ ID NO: 5964; WAN0249TL_at; Start 14; Stop 38
aaaaccacctgaaacaaatcaagtg

SEQ ID NO: 33555 - DNA, 25 bp, Artificial
  probe
  misc_feature (1)..(25): SEQ ID NO: 5964; WAN0249TL_at; Start 21; Stop 45
cctgaaacaaatcaagtgactagag

SEQ ID NO: 33556 - DNA, 25 bp, Artificial
  probe
  misc_feature (1)..(25): SEQ ID NO: 5964; WAN0249TL_at; Start 26; Stop 50
aacaaatcaagtgactagaggataa

SEQ ID NO: 33557 - DNA, 25 bp, Artificial
  probe
  misc_feature (1)..(25): SEQ ID NO: 5964; WAN0249TL_at; Start 174; Stop 198
ccccacctatctgctatgttgcaaa

SEQ ID NO: 33558 - DNA, 25 bp, Artificial
  probe
  misc_feature (1)..(25): SEQ ID NO: 5964; WAN0249TL_at; Start 18; Stop 42
ccacctgaaacaaatcaagtgacta

SEQ ID NO: 33559 - DNA, 25 bp, Artificial
  probe
  misc_feature (1)..(25): SEQ ID NO: 5964; WAN0249TL_at; Start 23; Stop 47
tgaaacaaatcaagtgactagagga

SEQ ID NO: 33560 - DNA, 25 bp, Artificial
  probe
  misc_feature (1)..(25): SEQ ID NO: 5964; WAN0249TL_at; Start 172; Stop 196
tgccccacctatctgctatgttgca

SEQ ID NO: 33561 - DNA, 25 bp, Artificial
  probe
  misc_feature (1)..(25): SEQ ID NO: 5964; WAN0249TL_at; Start 15; Stop 39
aaaccacctgaaacaaatcaagtga

SEQ ID NO: 33562 - DNA, 25 bp, Artificial
  probe
  misc_feature (1)..(25): SEQ ID NO: 5964; WAN0249TL_at; Start 22; Stop 46
ctgaaacaaatcaagtgactagagg

SEQ ID NO: 33563 - DNA, 25 bp, Artificial
  probe
  misc_feature (1)..(25): SEQ ID NO: 5964; WAN0249TL_at; Start 162; Stop 186
attgtgtttttgccccacctatctg

SEQ ID NO: 33564 - DNA, 25 bp, Artificial
  probe
  misc_feature (1)..(25): SEQ ID NO: 5964; WAN0249TL_at; Start 29; Stop 53
aaatcaagtgactagaggataaaaa

SEQ ID NO: 33565 - DNA, 25 bp, Artificial
  probe
  misc_feature (1)..(25): SEQ ID NO: 5964; WAN0249TL_at; Start 173; Stop 197
gccccacctatctgctatgttgcaa

SEQ ID NO: 33566 - DNA, 25 bp, Artificial
  probe
  misc_feature (1)..(25): SEQ ID NO: 5964; WAN0249TL_at; Start 175; Stop 199
cccacctatctgctatgttgcaaat

SEQ ID NO: 33567 - DNA, 25 bp, Artificial
  probe
  misc_feature (1)..(25): SEQ ID NO: 5964; WAN0249TL_at; Start 169; Stop 193
ttttgccccacctatctgctatgtt

SEQ ID NO: 33568 - DNA, 25 bp, Artificial
  probe
  misc_feature (1)..(25): SEQ ID NO: 5964; WAN0249TL_at; Start 163; Stop 187
ttgtgtttttgccccacctatctgc

SEQ ID NO: 33569 - DNA, 25 bp, Artificial
  probe
  misc_feature (1)..(25): SEQ ID NO: 5964; WAN0249TL_at; Start 24; Stop 48
gaaacaaatcaagtgactagaggat

SEQ ID NO: 33570 - DNA, 25 bp, Artificial
  probe
  misc_feature (1)..(25): SEQ ID NO: 5964; WAN0249TL_at; Start 170; Stop 194
tttgccccacctatctgctatgttg

SEQ ID NO: 33571 - DNA, 25 bp, Artificial
  probe
  misc_feature (1)..(25): SEQ ID NO: 5964; WAN0249TL_at; Start 25; Stop 49
aaacaaatcaagtgactagaggata

SEQ ID NO: 33572 - DNA, 25 bp, Artificial
  probe
  misc_feature (1)..(25): SEQ ID NO: 5964; WAN0249TL_at; Start 168; Stop 192
tttttgccccacctatctgctatgt

SEQ ID NO: 33573 - DNA, 25 bp, Artificial
  probe
  misc_feature (1)..(25): SEQ ID NO: 5964; WAN0249TL_at; Start 171; Stop 195
ttgccccacctatctgctatgttgc

SEQ ID NO: 33574 - DNA, 25 bp, Artificial
  probe
  misc_feature (1)..(25): SEQ ID NO: 5964; WAN0249TL_at; Start 27; Stop 51
acaaatcaagtgactagaggataaa

SEQ ID NO: 33575 - DNA, 25 bp, Artificial
  probe
  misc_feature (1)..(25): SEQ ID NO: 5964; WAN0249TL_at; Start 167; Stop 191
gtttttgccccacctatctgctatg

SEQ ID NO: 33576 - DNA, 25 bp, Artificial
  probe
  misc_feature (1)..(25): SEQ ID NO: 5964; WAN0249TL_at; Start 161; Stop 185
aattgtgtttttgccccacctatct

SEQ ID NO: 33577 - DNA, 25 bp, Artificial
  probe
  misc_feature (1)..(25): SEQ ID NO: 5964; WAN0249TL_at; Start 16; Stop 40
aaccacctgaaacaaatcaagtgac

SEQ ID NO: 33578 - DNA, 25 bp, Artificial
  probe
  misc_feature (1)..(25): SEQ ID NO: 5964; WAN0249TL_at; Start 20; Stop 44
acctgaaacaaatcaagtgactaga

SEQ ID NO: 33579 - DNA, 25 bp, Artificial
  probe
  misc_feature (1)..(25): SEQ ID NO: 5964; WAN0249TL_at; Start 166; Stop 190
tgtttttgccccacctatctgctat

SEQ ID NO: 33580 - DNA, 25 bp, Artificial
  probe
  misc_feature (1)..(25): SEQ ID NO: 4493; WAN0249TM_at; Start 214; Stop 238
caacgtgaaaatcgttagagcattt

SEQ ID NO: 33581 - DNA, 25 bp, Artificial
  probe
  misc_feature (1)..(25): SEQ ID NO: 4493; WAN0249TM_at; Start 188; Stop 212
gttggaactcgattcaattcatgtg

SEQ ID NO: 33582 - DNA, 25 bp, Artificial
  probe
  misc_feature (1)..(25): SEQ ID NO: 4493; WAN0249TM_at; Start 203; Stop 227
aattcatgtgacaacgtgaaaatcg

SEQ ID NO: 33583 - DNA, 25 bp, Artificial
  probe
  misc_feature (1)..(25): SEQ ID NO: 4493; WAN0249TM_at; Start 169; Stop 193
tagtttcctacagattttagttgga

SEQ ID NO: 33584 - DNA, 25 bp, Artificial
  probe
  misc_feature (1)..(25): SEQ ID NO: 4493; WAN0249TM_at; Start 196; Stop 220
tcgattcaattcatgtgacaacgtg

SEQ ID NO: 33585 - DNA, 25 bp, Artificial
  probe
  misc_feature (1)..(25): SEQ ID NO: 4493; WAN0249TM_at; Start 191; Stop 215
ggaactcgattcaattcatgtgaca

SEQ ID NO: 33586 - DNA, 25 bp, Artificial
  probe
  misc_feature (1)..(25): SEQ ID NO: 4493; WAN0249TM_at; Start 175; Stop 199
cctacagattttagttggaactcga

SEQ ID NO: 33587 - DNA, 25 bp, Artificial
  probe
  misc_feature (1)..(25): SEQ ID NO: 4493; WAN0249TM_at; Start 192; Stop 216
gaactcgattcaattcatgtgacaa

SEQ ID NO: 33588 - DNA, 25 bp, Artificial
  probe
  misc_feature (1)..(25): SEQ ID NO: 4493; WAN0249TM_at; Start 176; Stop 200
ctacagattttagttggaactcgat

SEQ ID NO: 33589 - DNA, 25 bp, Artificial
  probe
  misc_feature (1)..(25): SEQ ID NO: 4493; WAN0249TM_at; Start 237; Stop 261
tttatatagaatatacatgggaatg

SEQ ID NO: 33590 - DNA, 25 bp, Artificial
  probe
  misc_feature (1)..(25): SEQ ID NO: 4493; WAN0249TM_at; Start 209; Stop 233
tgtgacaacgtgaaaatcgttagag

SEQ ID NO: 33591 - DNA, 25 bp, Artificial
  probe
  misc_feature (1)..(25): SEQ ID NO: 4493; WAN0249TM_at; Start 197; Stop 221
cgattcaattcatgtgacaacgtga

SEQ ID NO: 33592 - DNA, 25 bp, Artificial
  probe
  misc_feature (1)..(25): SEQ ID NO: 4493; WAN0249TM_at; Start 202; Stop 226
caattcatgtgacaacgtgaaaatc

SEQ ID NO: 33593 - DNA, 25 bp, Artificial
  probe
  misc_feature (1)..(25): SEQ ID NO: 4493; WAN0249TM_at; Start 223; Stop 247
aatcgttagagcattttatatagaa

SEQ ID NO: 33594 - DNA, 25 bp, Artificial
  probe
  misc_feature (1)..(25): SEQ ID NO: 4493; WAN0249TM_at; Start 194; Stop 218
actcgattcaattcatgtgacaacg

SEQ ID NO: 33595 - DNA, 25 bp, Artificial
  probe
  misc_feature (1)..(25): SEQ ID NO: 4493; WAN0249TM_at; Start 165; Stop 189
cggctagtttcctacagattttagt

SEQ ID NO: 33596 - DNA, 25 bp, Artificial
  probe
  misc_feature (1)..(25): SEQ ID NO: 4493; WAN0249TM_at; Start 174; Stop 198
tcctacagattttagttggaactcg

SEQ ID NO: 33597 - DNA, 25 bp, Artificial
  probe
  misc_feature (1)..(25): SEQ ID NO: 4493; WAN0249TM_at; Start 205; Stop 229
ttcatgtgacaacgtgaaaatcgtt

SEQ ID NO: 33598 - DNA, 25 bp, Artificial
  probe
  misc_feature (1)..(25): SEQ ID NO: 4493; WAN0249TM_at; Start 212; Stop 236
gacaacgtgaaaatcgttagagcat

SEQ ID NO: 33599 - DNA, 25 bp, Artificial
  probe
  misc_feature (1)..(25): SEQ ID NO: 4493; WAN0249TM_at; Start 217; Stop 241
cgtgaaaatcgttagagcattttat

SEQ ID NO: 33600 - DNA, 25 bp, Artificial
  probe
  misc_feature (1)..(25): SEQ ID NO: 4493; WAN0249TM_at; Start 186; Stop 210
tagttggaactcgattcaattcatg

SEQ ID NO: 33601 - DNA, 25 bp, Artificial
  probe
  misc_feature (1)..(25): SEQ ID NO: 4493; WAN0249TM_at; Start 164; Stop 188
gcggctagtttcctacagattttag

SEQ ID NO: 33602 - DNA, 25 bp, Artificial
  probe
  misc_feature (1)..(25): SEQ ID NO: 4493; WAN0249TM_at; Start 206; Stop 230
tcatgtgacaacgtgaaaatcgtta

SEQ ID NO: 33603 - DNA, 25 bp, Artificial
  probe
  misc_feature (1)..(25): SEQ ID NO: 4493; WAN0249TM_at; Start 167; Stop 191
gctagtttcctacagattttagttg

SEQ ID NO: 33604 - DNA, 25 bp, Artificial
  probe
  misc_feature (1)..(25): SEQ ID NO: 4493; WAN0249TM_at; Start 200; Stop 224
ttcaattcatgtgacaacgtgaaaa

SEQ ID NO: 33605 - DNA, 25 bp, Artificial
  probe
  misc_feature (1)..(25): SEQ ID NO: 4493; WAN0249TM_at; Start 207; Stop 231
catgtgacaacgtgaaaatcgttag

SEQ ID NO: 33606 - DNA, 25 bp, Artificial
  probe
  misc_feature (1)..(25): SEQ ID NO: 4493; WAN0249TM_at; Start 226; Stop 250
cgttagagcattttatatagaatat

SEQ ID NO: 33607 - DNA, 25 bp, Artificial
  probe
  misc_feature (1)..(25): SEQ ID NO: 4493; WAN0249TM_at; Start 184; Stop 208
tttagttggaactcgattcaattca

SEQ ID NO: 33608 - DNA, 25 bp, Artificial
  probe
  misc_feature (1)..(25): SEQ ID NO: 4493; WAN0249TM_at; Start 181; Stop 205
gattttagttggaactcgattcaat

SEQ ID NO: 33609 - DNA, 25 bp, Artificial
  probe
  misc_feature (1)..(25): SEQ ID NO: 4493; WAN0249TM_at; Start 190; Stop 214
tggaactcgattcaattcatgtgac

SEQ ID NO: 33610 - DNA, 25 bp, Artificial
  probe
  misc_feature (1)..(25): SEQ ID NO: 4493; WAN0249TM_at; Start 211; Stop 235
tgacaacgtgaaaatcgttagagca

SEQ ID NO: 33611 - DNA, 25 bp, Artificial
  probe
  misc_feature (1)..(25): SEQ ID NO: 4493; WAN0249TM_at; Start 198; Stop 222
gattcaattcatgtgacaacgtgaa

SEQ ID NO: 33612 - DNA, 25 bp, Artificial
  probe
  misc_feature (1)..(25): SEQ ID NO: 4493; WAN0249TM_at; Start 179; Stop 203
cagattttagttggaactcgattca

SEQ ID NO: 33613 - DNA, 25 bp, Artificial
  probe
  misc_feature (1)..(25): SEQ ID NO: 4493; WAN0249TM_at; Start 233; Stop 257
gcattttatatagaatatacatggg

SEQ ID NO: 33614 - DNA, 25 bp, Artificial
  probe
  misc_feature (1)..(25): SEQ ID NO: 3805; WAN0249TN_at; Start 165; Stop 189
accgtttgacgattcctcacttcgc

SEQ ID NO: 33615 - DNA, 25 bp, Artificial
  probe
  misc_feature (1)..(25): SEQ ID NO: 3805; WAN0249TN_at; Start 133; Stop 157
tttcgtagcacccttcaaacagcct

SEQ ID NO: 33616 - DNA, 25 bp, Artificial
  probe
  misc_feature (1)..(25): SEQ ID NO: 3805; WAN0249TN_at; Start 164; Stop 188
taccgtttgacgattcctcacttcg

SEQ ID NO: 33617 - DNA, 25 bp, Artificial
  probe
  misc_feature (1)..(25): SEQ ID NO: 3805; WAN0249TN_at; Start 171; Stop 195
tgacgattcctcacttcgctccact

SEQ ID NO: 33618 - DNA, 25 bp, Artificial
  probe
  misc_feature (1)..(25): SEQ ID NO: 3805; WAN0249TN_at; Start 137; Stop 161
gtagcacccttcaaacagcctatcc

SEQ ID NO: 33619 - DNA, 25 bp, Artificial
  probe
  misc_feature (1)..(25): SEQ ID NO: 3805; WAN0249TN_at; Start 166; Stop 190
ccgtttgacgattcctcacttcgct

SEQ ID NO: 33620 - DNA, 25 bp, Artificial
  probe
  misc_feature (1)..(25): SEQ ID NO: 3805; WAN0249TN_at; Start 170; Stop 194
ttgacgattcctcacttcgctccac

SEQ ID NO: 33621 - DNA, 25 bp, Artificial
  probe
  misc_feature (1)..(25): SEQ ID NO: 3805; WAN0249TN_at; Start 159; Stop 183
tcccctaccgtttgacgattcctca

SEQ ID NO: 33622 - DNA, 25 bp, Artificial
  probe
  misc_feature (1)..(25): SEQ ID NO: 3805; WAN0249TN_at; Start 174; Stop 198
cgattcctcacttcgctccacttcc

SEQ ID NO: 33623 - DNA, 25 bp, Artificial
  probe
  misc_feature (1)..(25): SEQ ID NO: 3805; WAN0249TN_at; Start 153; Stop 177
agcctatcccctaccgtttgacgat

SEQ ID NO: 33624 - DNA, 25 bp, Artificial
  probe
  misc_feature (1)..(25): SEQ ID NO: 3805; WAN0249TN_at; Start 127; Stop 151
tatctttttcgtagcacccttcaaa

SEQ ID NO: 33625 - DNA, 25 bp, Artificial
  probe
  misc_feature (1)..(25): SEQ ID NO: 3805; WAN0249TN_at; Start 129; Stop 153
tctttttcgtagcacccttcaaaca

SEQ ID NO: 33626 - DNA, 25 bp, Artificial
  probe
  misc_feature (1)..(25): SEQ ID NO: 3805; WAN0249TN_at; Start 172; Stop 196
gacgattcctcacttcgctccactt

SEQ ID NO: 33627 - DNA, 25 bp, Artificial
  probe
  misc_feature (1)..(25): SEQ ID NO: 3805; WAN0249TN_at; Start 130; Stop 154
ctttttcgtagcacccttcaaacag

SEQ ID NO: 33628 - DNA, 25 bp, Artificial
  probe
  misc_feature (1)..(25): SEQ ID NO: 3805; WAN0249TN_at; Start 148; Stop 172
caaacagcctatcccctaccgtttg

SEQ ID NO: 33629 - DNA, 25 bp, Artificial
  probe
  misc_feature (1)..(25): SEQ ID NO: 3805; WAN0249TN_at; Start 138; Stop 162
tagcacccttcaaacagcctatccc

SEQ ID NO: 33630 - DNA, 25 bp, Artificial
  probe
  misc_feature (1)..(25): SEQ ID NO: 3805; WAN0249TN_at; Start 141; Stop 165
cacccttcaaacagcctatccccta

SEQ ID NO: 33631 - DNA, 25 bp, Artificial
  probe
  misc_feature (1)..(25): SEQ ID NO: 3805; WAN0249TN_at; Start 135; Stop 159
tcgtagcacccttcaaacagcctat

SEQ ID NO: 33632 - DNA, 25 bp, Artificial
  probe
  misc_feature (1)..(25): SEQ ID NO: 3805; WAN0249TN_at; Start 132; Stop 156
ttttcgtagcacccttcaaacagcc

SEQ ID NO: 33633 - DNA, 25 bp, Artificial
  probe
  misc_feature (1)..(25): SEQ ID NO: 3805; WAN0249TN_at; Start 162; Stop 186
cctaccgtttgacgattcctcactt

SEQ ID NO: 33634 - DNA, 25 bp, Artificial
  probe
  misc_feature (1)..(25): SEQ ID NO: 3805; WAN0249TN_at; Start 134; Stop 158
ttcgtagcacccttcaaacagccta

SEQ ID NO: 33635 - DNA, 25 bp, Artificial
  probe
  misc_feature (1)..(25): SEQ ID NO: 3805; WAN0249TN_at; Start 108; Stop 132
ctataatttcaccttaccctatctt

SEQ ID NO: 33636 - DNA, 25 bp, Artificial
  probe
  misc_feature (1)..(25): SEQ ID NO: 3805; WAN0249TN_at; Start 145; Stop 169
cttcaaacagcctatcccctaccgt

SEQ ID NO: 33637 - DNA, 25 bp, Artificial
  probe
  misc_feature (1)..(25): SEQ ID NO: 3805; WAN0249TN_at; Start 131; Stop 155
tttttcgtagcacccttcaaacagc

SEQ ID NO: 33638 - DNA, 25 bp, Artificial
  probe
  misc_feature (1)..(25): SEQ ID NO: 3805; WAN0249TN_at; Start 168; Stop 192
gtttgacgattcctcacttcgctcc

SEQ ID NO: 33639 - DNA, 25 bp, Artificial
  probe
  misc_feature (1)..(25): SEQ ID NO: 3805; WAN0249TN_at; Start 144; Stop 168
ccttcaaacagcctatcccctaccg

SEQ ID NO: 33640 - DNA, 25 bp, Artificial
  probe
  misc_feature (1)..(25): SEQ ID NO: 3805; WAN0249TN_at; Start 167; Stop 191
cgtttgacgattcctcacttcgctc

SEQ ID NO: 33641 - DNA, 25 bp, Artificial
  probe
  misc_feature (1)..(25): SEQ ID NO: 3805; WAN0249TN_at; Start 140; Stop 164
gcacccttcaaacagcctatcccct

SEQ ID NO: 33642 - DNA, 25 bp, Artificial
  probe
  misc_feature (1)..(25): SEQ ID NO: 3805; WAN0249TN_at; Start 169; Stop 193
tttgacgattcctcacttcgctcca

SEQ ID NO: 33643 - DNA, 25 bp, Artificial
  probe
  misc_feature (1)..(25): SEQ ID NO: 3805; WAN0249TN_at; Start 151; Stop 175
acagcctatcccctaccgtttgacg

SEQ ID NO: 33644 - DNA, 25 bp, Artificial
  probe
  misc_feature (1)..(25): SEQ ID NO: 3805; WAN0249TN_at; Start 136; Stop 160
cgtagcacccttcaaacagcctatc

SEQ ID NO: 33645 - DNA, 25 bp, Artificial
  probe
  misc_feature (1)..(25): SEQ ID NO: 3805; WAN0249TN_at; Start 173; Stop 197
acgattcctcacttcgctccacttc

SEQ ID NO: 33646 - DNA, 25 bp, Artificial
  probe
  misc_feature (1)..(25): SEQ ID NO: 3805; WAN0249TN_at; Start 126; Stop 150
ctatctttttcgtagcacccttcaa

SEQ ID NO: 33647 - DNA, 25 bp, Artificial
  probe
  misc_feature (1)..(25): SEQ ID NO: 3805; WAN0249TN_at; Start 139; Stop 163
agcacccttcaaacagcctatcccc

SEQ ID NO: 33648 - DNA, 25 bp, Artificial
  probe
  misc_feature (1)..(25): SEQ ID NO: 3136; WAN0249TO_at; Start 191; Stop 215
ttgagtataacacaaaaggtagccc

SEQ ID NO: 33649 - DNA, 25 bp, Artificial
  probe
  misc_feature (1)..(25): SEQ ID NO: 3136; WAN0249TO_at; Start 188; Stop 212
tcattgagtataacacaaaaggtag

SEQ ID NO: 33650 - DNA, 25 bp, Artificial
  probe
  misc_feature (1)..(25): SEQ ID NO: 3136; WAN0249TO_at; Start 187; Stop 211
ttcattgagtataacacaaaaggta

SEQ ID NO: 33651 - DNA, 25 bp, Artificial
  probe
  misc_feature (1)..(25): SEQ ID NO: 3136; WAN0249TO_at; Start 186; Stop 210
tttcattgagtataacacaaaaggt

SEQ ID NO: 33652 - DNA, 25 bp, Artificial
  probe
  misc_feature (1)..(25): SEQ ID NO: 3136; WAN0249TO_at; Start 189; Stop 213
cattgagtataacacaaaaggtagc

SEQ ID NO: 33653 - DNA, 25 bp, Artificial
  probe
  misc_feature (1)..(25): SEQ ID NO: 3136; WAN0249TO_at; Start 190; Stop 214
attgagtataacacaaaaggtagcc

SEQ ID NO: 33654 - DNA, 25 bp, Artificial
  probe
  misc_feature (1)..(25): SEQ ID NO: 3136; WAN0249TO_at; Start 192; Stop 216
tgagtataacacaaaaggtagccca

SEQ ID NO: 33655 - DNA, 25 bp, Artificial
  probe
  misc_feature (1)..(25): SEQ ID NO: 4516; WAN0249TP_at; Start 76; Stop 100
gattttattagcaaatcaagctagg

SEQ ID NO: 33656 - DNA, 25 bp, Artificial
  probe
  misc_feature (1)..(25): SEQ ID NO: 4516; WAN0249TP_at; Start 215; Stop 239
ttgacaaagtcagctcaaattactg

SEQ ID NO: 33657 - DNA, 25 bp, Artificial
  probe
  misc_feature (1)..(25): SEQ ID NO: 4516; WAN0249TP_at; Start 110; Stop 134
tacctgctaagatggtcttgccttt

SEQ ID NO: 33658 - DNA, 25 bp, Artificial
  probe
  misc_feature (1)..(25): SEQ ID NO: 4516; WAN0249TP_at; Start 186; Stop 210
tatctgcaaatagaaagtttcagcc

SEQ ID NO: 33659 - DNA, 25 bp, Artificial
  probe
  misc_feature (1)..(25): SEQ ID NO: 4516; WAN0249TP_at; Start 299; Stop 323
tactccagacatatcatagttcaag

SEQ ID NO: 33660 - DNA, 25 bp, Artificial
  probe
  misc_feature (1)..(25): SEQ ID NO: 4516; WAN0249TP_at; Start 257; Stop 281
taagcgacaaaaacaatcatactgc

SEQ ID NO: 33661 - DNA, 25 bp, Artificial
  probe
  misc_feature (1)..(25): SEQ ID NO: 4516; WAN0249TP_at; Start 320; Stop 344
caagtaaatactttgaaattcaaca

SEQ ID NO: 33662 - DNA, 25 bp, Artificial
  probe
  misc_feature (1)..(25): SEQ ID NO: 4516; WAN0249TP_at; Start 171; Stop 195
aacaaactagaccattatctgcaaa

SEQ ID NO: 33663 - DNA, 25 bp, Artificial
  probe
  misc_feature (1)..(25): SEQ ID NO: 4516; WAN0249TP_at; Start 240; Stop 264
tttgaagtttgtagatataagcgac

SEQ ID NO: 33664 - DNA, 25 bp, Artificial
  probe
  misc_feature (1)..(25): SEQ ID NO: 4516; WAN0249TP_at; Start 392; Stop 416
taagcaaacctctaatactcaataa

SEQ ID NO: 33665 - DNA, 25 bp, Artificial
  probe
  misc_feature (1)..(25): SEQ ID NO: 4516; WAN0249TP_at; Start 334; Stop 358
gaaattcaacagttcttataggcgc

SEQ ID NO: 33666 - DNA, 25 bp, Artificial
  probe
  misc_feature (1)..(25): SEQ ID NO: 4516; WAN0249TP_at; Start 608; Stop 632
cattttttccataaatgggtattag

SEQ ID NO: 33667 - DNA, 25 bp, Artificial
  probe
  misc_feature (1)..(25): SEQ ID NO: 4516; WAN0249TP_at; Start 100; Stop 124
gatagcactttacctgctaagatgg

SEQ ID NO: 33668 - DNA, 25 bp, Artificial
  probe
  misc_feature (1)..(25): SEQ ID NO: 4516; WAN0249TP_at; Start 542; Stop 566
gaagttagactagtacactggcact

SEQ ID NO: 33669 - DNA, 25 bp, Artificial
  probe
  misc_feature (1)..(25): SEQ ID NO: 4516; WAN0249TP_at; Start 156; Stop 180
catccacattcaaaaaacaaactag

SEQ ID NO: 33670 - DNA, 25 bp, Artificial
  probe
  misc_feature (1)..(25): SEQ ID NO: 4516; WAN0249TP_at; Start 284; Stop 308
cttttgttgacagtctactccagac

SEQ ID NO: 33671 - DNA, 25 bp, Artificial
  probe
  misc_feature (1)..(25): SEQ ID NO: 4516; WAN0249TP_at; Start 92; Stop 116
caagctaggatagcactttacctgc

SEQ ID NO: 33672 - DNA, 25 bp, Artificial
  probe
  misc_feature (1)..(25): SEQ ID NO: 4516; WAN0249TP_at; Start 632; Stop 656
gatataaacagcaaaatatttccga

SEQ ID NO: 33673 - DNA, 25 bp, Artificial
  probe
  misc_feature (1)..(25): SEQ ID NO: 4516; WAN0249TP_at; Start 354; Stop 378
ggcgctattgtattctaagaaatca

SEQ ID NO: 33674 - DNA, 25 bp, Artificial
  probe
  misc_feature (1)..(25): SEQ ID NO: 4516; WAN0249TP_at; Start 306; Stop 330
gacatatcatagttcaagtaaatac

SEQ ID NO: 33675 - DNA, 25 bp, Artificial
  probe
  misc_feature (1)..(25): SEQ ID NO: 4516; WAN0249TP_at; Start 339; Stop 363
tcaacagttcttataggcgctattg

SEQ ID NO: 33676 - DNA, 25 bp, Artificial
  probe
  misc_feature (1)..(25): SEQ ID NO: 4516; WAN0249TP_at; Start 196; Stop 220
tagaaagtttcagccaagtttgaca

SEQ ID NO: 33677 - DNA, 25 bp, Artificial
  probe
  misc_feature (1)..(25): SEQ ID NO: 4516; WAN0249TP_at; Start 84; Stop 108
tagcaaatcaagctaggatagcact

SEQ ID NO: 33678 - DNA, 25 bp, Artificial
  probe
  misc_feature (1)..(25): SEQ ID NO: 4516; WAN0249TP_at; Start 548; Stop 572
agactagtacactggcacttctaaa

SEQ ID NO: 33679 - DNA, 25 bp, Artificial
  probe
  misc_feature (1)..(25): SEQ ID NO: 4516; WAN0249TP_at; Start 203; Stop 227
tttcagccaagtttgacaaagtcag

SEQ ID NO: 33680 - DNA, 25 bp, Artificial
  probe
  misc_feature (1)..(25): SEQ ID NO: 4516; WAN0249TP_at; Start 123; Stop 147
ggtcttgcctttctatctttatcaa

SEQ ID NO: 33681 - DNA, 25 bp, Artificial
  probe
  misc_feature (1)..(25): SEQ ID NO: 4516; WAN0249TP_at; Start 640; Stop 664
cagcaaaatatttccgatacgtgtc

SEQ ID NO: 33682 - DNA, 25 bp, Artificial
  probe
  misc_feature (1)..(25): SEQ ID NO: 4516; WAN0249TP_at; Start 574; Stop 598
cattgctagcaattgatttgttcat

SEQ ID NO: 33683 - DNA, 25 bp, Artificial
  probe
  misc_feature (1)..(25): SEQ ID NO: 4516; WAN0249TP_at; Start 271; Stop 295
aatcatactgcaccttttgttgaca

SEQ ID NO: 33684 - DNA, 25 bp, Artificial
  probe
  misc_feature (1)..(25): SEQ ID NO: 4516; WAN0249TP_at; Start 619; Stop 643
taaatgggtattagatataaacagc

SEQ ID NO: 33685 - DNA, 25 bp, Artificial
  probe
  misc_feature (1)..(25): SEQ ID NO: 4516; WAN0249TP_at; Start 538; Stop 562
tggagaagttagactagtacactgg

SEQ ID NO: 33686 - DNA, 25 bp, Artificial
  probe
  misc_feature (1)..(25): SEQ ID NO: 4516; WAN0249TP_at; Start 223; Stop 247
gtcagctcaaattactgtttgaagt

SEQ ID NO: 33687 - DNA, 25 bp, Artificial
  probe
  misc_feature (1)..(25): SEQ ID NO: 4516; WAN0249TP_at; Start 464; Stop 488
tgttttgaggttgcggatagggctg

SEQ ID NO: 33688 - DNA, 25 bp, Artificial
  probe
  misc_feature (1)..(25): SEQ ID NO: 4516; WAN0249TP_at; Start 380; Stop 404
tagaagagtttctaagcaaacctct

SEQ ID NO: 33689 - DNA, 25 bp, Artificial
  probe
  misc_feature (1)..(25): SEQ ID NO: 4786; WAN0249TQ_at; Start 386; Stop 410
gagtagactgtcaacaaaaggtgca

SEQ ID NO: 33690 - DNA, 25 bp, Artificial
  probe
  misc_feature (1)..(25): SEQ ID NO: 4786; WAN0249TQ_at; Start 469; Stop 493
tgtcaaacttggctgaaactttcta

SEQ ID NO: 33691 - DNA, 25 bp, Artificial
  probe
  misc_feature (1)..(25): SEQ ID NO: 4786; WAN0249TQ_at; Start 463; Stop 487
tgactttgtcaaacttggctgaaac

SEQ ID NO: 33692 - DNA, 25 bp, Artificial
  probe
  misc_feature (1)..(25): SEQ ID NO: 4786; WAN0249TQ_at; Start 574; Stop 598
caggtaaagtgctatcctagcttga

SEQ ID NO: 33693 - DNA, 25 bp, Artificial
  probe
  misc_feature (1)..(25): SEQ ID NO: 4786; WAN0249TQ_at; Start 425; Stop 449
gtcgcttatatctacaaacttcaaa

SEQ ID NO: 33694 - DNA, 25 bp, Artificial
  probe
  misc_feature (1)..(25): SEQ ID NO: 4786; WAN0249TQ_at; Start 376; Stop 400
gatatgtctggagtagactgtcaac

SEQ ID NO: 33695 - DNA, 25 bp, Artificial
  probe
  misc_feature (1)..(25): SEQ ID NO: 4786; WAN0249TQ_at; Start 141; Stop 165
taacttctccatcttaggaacacgt

SEQ ID NO: 33696 - DNA, 25 bp, Artificial
  probe
  misc_feature (1)..(25): SEQ ID NO: 4786; WAN0249TQ_at; Start 364; Stop 388
tacttgaactatgatatgtctggag

SEQ ID NO: 33697 - DNA, 25 bp, Artificial
  probe
  misc_feature (1)..(25): SEQ ID NO: 4786; WAN0249TQ_at; Start 492; Stop 516
tatttgcagataatggtctagtttg

SEQ ID NO: 33698 - DNA, 25 bp, Artificial
  probe
  misc_feature (1)..(25): SEQ ID NO: 4786; WAN0249TQ_at; Start 566; Stop 590
catcttagcaggtaaagtgctatcc

SEQ ID NO: 33699 - DNA, 25 bp, Artificial
  probe
  misc_feature (1)..(25): SEQ ID NO: 4786; WAN0249TQ_at; Start 439; Stop 463
caaacttcaaacagtaatttgagct

SEQ ID NO: 33700 - DNA, 25 bp, Artificial
  probe
  misc_feature (1)..(25): SEQ ID NO: 4786; WAN0249TQ_at; Start 25; Stop 49
gacacgtatcggaaatattttgctg

SEQ ID NO: 33701 - DNA, 25 bp, Artificial
  probe
  misc_feature (1)..(25): SEQ ID NO: 4786; WAN0249TQ_at; Start 42; Stop 66
ttttgctgtttatatctaataccca

SEQ ID NO: 33702 - DNA, 25 bp, Artificial
  probe
  misc_feature (1)..(25): SEQ ID NO: 4786; WAN0249TQ_at; Start 559; Stop 583
gcaagaccatcttagcaggtaaagt

SEQ ID NO: 33703 - DNA, 25 bp, Artificial
  probe
  misc_feature (1)..(25): SEQ ID NO: 4786; WAN0249TQ_at; Start 288; Stop 312
ggtttgcttagaaactcttctattg

SEQ ID NO: 33704 - DNA, 25 bp, Artificial
  probe
  misc_feature (1)..(25): SEQ ID NO: 4786; WAN0249TQ_at; Start 117; Stop 141
tttagaagtgccagtgtactagtct

SEQ ID NO: 33705 - DNA, 25 bp, Artificial
  probe
  misc_feature (1)..(25): SEQ ID NO: 4786; WAN0249TQ_at; Start 333; Stop 357
gcctataagaactgttgaatttcaa

SEQ ID NO: 33706 - DNA, 25 bp, Artificial
  probe
  misc_feature (1)..(25): SEQ ID NO: 4786; WAN0249TQ_at; Start 88; Stop 112
aatatgaacaaatcaattgctagca

SEQ ID NO: 33707 - DNA, 25 bp, Artificial
  probe
  misc_feature (1)..(25): SEQ ID NO: 4786; WAN0249TQ_at; Start 507; Stop 531
gtctagtttgttttttgaatgtgga

SEQ ID NO: 33708 - DNA, 25 bp, Artificial
  probe
  misc_feature (1)..(25): SEQ ID NO: 4786; WAN0249TQ_at; Start 121; Stop 145
gaagtgccagtgtactagtctaact

SEQ ID NO: 33709 - DNA, 25 bp, Artificial
  probe
  misc_feature (1)..(25): SEQ ID NO: 4786; WAN0249TQ_at; Start 554; Stop 578
gaaaggcaagaccatcttagcaggt

SEQ ID NO: 33710 - DNA, 25 bp, Artificial
  probe
  misc_feature (1)..(25): SEQ ID NO: 4786; WAN0249TQ_at; Start 393; Stop 417
ctgtcaacaaaaggtgcagtatgat

SEQ ID NO: 33711 - DNA, 25 bp, Artificial
  probe
  misc_feature (1)..(25): SEQ ID NO: 4786; WAN0249TQ_at; Start 479; Stop 503
ggctgaaactttctatttgcagata

SEQ ID NO: 33712 - DNA, 25 bp, Artificial
  probe
  misc_feature (1)..(25): SEQ ID NO: 4786; WAN0249TQ_at; Start 543; Stop 567
tgataaagatagaaaggcaagacca

SEQ ID NO: 33713 - DNA, 25 bp, Artificial
  probe
  misc_feature (1)..(25): SEQ ID NO: 4786; WAN0249TQ_at; Start 326; Stop 350
caatagcgcctataagaactgttga

SEQ ID NO: 33714 - DNA, 25 bp, Artificial
  probe
  misc_feature (1)..(25): SEQ ID NO: 4786; WAN0249TQ_at; Start 589; Stop 613
cctagcttgatttgctaataaaatc

SEQ ID NO: 33715 - DNA, 25 bp, Artificial
  probe
  misc_feature (1)..(25): SEQ ID NO: 4786; WAN0249TQ_at; Start 408; Stop 432
gcagtatgattgtttttgtcgctta

SEQ ID NO: 33716 - DNA, 25 bp, Artificial
  probe
  misc_feature (1)..(25): SEQ ID NO: 4786; WAN0249TQ_at; Start 49; Stop 73
gtttatatctaatacccatttatgg

SEQ ID NO: 33717 - DNA, 25 bp, Artificial
  probe
  misc_feature (1)..(25): SEQ ID NO: 4786; WAN0249TQ_at; Start 659; Stop 683
agattaaaatgtgaaaaaaggagat

SEQ ID NO: 33718 - DNA, 25 bp, Artificial
  probe
  misc_feature (1)..(25): SEQ ID NO: 4786; WAN0249TQ_at; Start 127; Stop 151
ccagtgtactagtctaacttctcca

SEQ ID NO: 33719 - DNA, 25 bp, Artificial
  probe
  misc_feature (1)..(25): SEQ ID NO: 4786; WAN0249TQ_at; Start 278; Stop 302
gagtattagaggtttgcttagaaac

SEQ ID NO: 33720 - DNA, 25 bp, Artificial
  probe
  misc_feature (1)..(25): SEQ ID NO: 4786; WAN0249TQ_at; Start 146; Stop 170
tctccatcttaggaacacgtaaatt

SEQ ID NO: 33721 - DNA, 25 bp, Artificial
  probe
  misc_feature (1)..(25): SEQ ID NO: 4786; WAN0249TQ_at; Start 450; Stop 474
cagtaatttgagctgactttgtcaa

SEQ ID NO: 33722 - DNA, 25 bp, Artificial
  probe
  misc_feature (1)..(25): SEQ ID NO: 4786; WAN0249TQ_at; Start 312; Stop 336
gatttcttagaatacaatagcgcct

SEQ ID NO: 33723 - DNA, 25 bp, Artificial
  probe
  misc_feature (1)..(25): SEQ ID NO: 527; WAN0249TR_at; Start 64; Stop 88
tcctaacaagatatagtgaatttcg

SEQ ID NO: 33724 - DNA, 25 bp, Artificial
  probe
  misc_feature (1)..(25): SEQ ID NO: 527; WAN0249TR_at; Start 317; Stop 341
tattgtgtgttttattatgggaaga

SEQ ID NO: 33725 - DNA, 25 bp, Artificial
  probe
  misc_feature (1)..(25): SEQ ID NO: 527; WAN0249TR_at; Start 151; Stop 175
tctggaagtactatcaaaaattaat

SEQ ID NO: 33726 - DNA, 25 bp, Artificial
  probe
  misc_feature (1)..(25): SEQ ID NO: 527; WAN0249TR_at; Start 359; Stop 383
tgaaatggagttttgaagcaggatc

SEQ ID NO: 33727 - DNA, 25 bp, Artificial
  probe
  misc_feature (1)..(25): SEQ ID NO: 527; WAN0249TR_at; Start 198; Stop 222
gcatcacccactttctcaaataaga

SEQ ID NO: 33728 - DNA, 25 bp, Artificial
  probe
  misc_feature (1)..(25): SEQ ID NO: 527; WAN0249TR_at; Start 138; Stop 162
gggatctataatttctggaagtact

SEQ ID NO: 33729 - DNA, 25 bp, Artificial
  probe
  misc_feature (1)..(25): SEQ ID NO: 527; WAN0249TR_at; Start 444; Stop 468
tggaaacatacggtaaacaattgaa

SEQ ID NO: 33730 - DNA, 25 bp, Artificial
  probe
  misc_feature (1)..(25): SEQ ID NO: 527; WAN0249TR_at; Start 454; Stop 478
cggtaaacaattgaaaagatactat

SEQ ID NO: 33731 - DNA, 25 bp, Artificial
  probe
  misc_feature (1)..(25): SEQ ID NO: 527; WAN0249TR_at; Start 36; Stop 60
cagtctgttatcaatgattctaccc

SEQ ID NO: 33732 - DNA, 25 bp, Artificial
  probe
  misc_feature (1)..(25): SEQ ID NO: 527; WAN0249TR_at; Start 402; Stop 426
catagaaaaactgtataatccttaa

SEQ ID NO: 33733 - DNA, 25 bp, Artificial
  probe
  misc_feature (1)..(25): SEQ ID NO: 527; WAN0249TR_at; Start 93; Stop 117
cgctatataatacggacacttgaaa

SEQ ID NO: 33734 - DNA, 25 bp, Artificial
  probe
  misc_feature (1)..(25): SEQ ID NO: 527; WAN0249TR_at; Start 266; Stop 290
agtctttaaaaatcagaaaagcgca

SEQ ID NO: 33735 - DNA, 25 bp, Artificial
  probe
  misc_feature (1)..(25): SEQ ID NO: 527; WAN0249TR_at; Start 439; Stop 463
tctattggaaacatacggtaaacaa

SEQ ID NO: 33736 - DNA, 25 bp, Artificial
  probe
  misc_feature (1)..(25): SEQ ID NO: 527; WAN0249TR_at; Start 19; Stop 43
gctaattagatttgcaacagtctgt

SEQ ID NO: 33737 - DNA, 25 bp, Artificial
  probe
  misc_feature (1)..(25): SEQ ID NO: 527; WAN0249TR_at; Start 500; Stop 524
aaaataagctagtaagaatcactct

SEQ ID NO: 33738 - DNA, 25 bp, Artificial
  probe
  misc_feature (1)..(25): SEQ ID NO: 527; WAN0249TR_at; Start 105; Stop 129
cggacacttgaaaatagaaattggg

SEQ ID NO: 33739 - DNA, 25 bp, Artificial
  probe
  misc_feature (1)..(25): SEQ ID NO: 527; WAN0249TR_at; Start 373; Stop 397
gaagcaggatcactctatttgaaaa

SEQ ID NO: 33740 - DNA, 25 bp, Artificial
  probe
  misc_feature (1)..(25): SEQ ID NO: 527; WAN0249TR_at; Start 186; Stop 210
tattagagaatagcatcacccactt

SEQ ID NO: 33741 - DNA, 25 bp, Artificial
  probe
  misc_feature (1)..(25): SEQ ID NO: 527; WAN0249TR_at; Start 390; Stop 414
tttgaaaatatacatagaaaaactg

SEQ ID NO: 33742 - DNA, 25 bp, Artificial
  probe
  misc_feature (1)..(25): SEQ ID NO: 527; WAN0249TR_at; Start 272; Stop 296
taaaaatcagaaaagcgcatagtat

SEQ ID NO: 33743 - DNA, 25 bp, Artificial
  probe
  misc_feature (1)..(25): SEQ ID NO: 527; WAN0249TR_at; Start 13; Stop 37
catacagctaattagatttgcaaca

SEQ ID NO: 33744 - DNA, 25 bp, Artificial
  probe
  misc_feature (1)..(25): SEQ ID NO: 527; WAN0249TR_at; Start 50; Stop 74
tgattctacccaaatcctaacaaga

SEQ ID NO: 33745 - DNA, 25 bp, Artificial
  probe
  misc_feature (1)..(25): SEQ ID NO: 527; WAN0249TR_at; Start 471; Stop 495
gatactatataaagtggtacaatgg

SEQ ID NO: 33746 - DNA, 25 bp, Artificial
  probe
  misc_feature (1)..(25): SEQ ID NO: 527; WAN0249TR_at; Start 365; Stop 389
ggagttttgaagcaggatcactcta

SEQ ID NO: 33747 - DNA, 25 bp, Artificial
  probe
  misc_feature (1)..(25): SEQ ID NO: 527; WAN0249TR_at; Start 432; Stop 456
gctgaaatctattggaaacatacgg

SEQ ID NO: 33748 - DNA, 25 bp, Artificial
  probe
  misc_feature (1)..(25): SEQ ID NO: 527; WAN0249TR_at; Start 344; Stop 368
tacttcattgtctcctgaaatggag

SEQ ID NO: 33749 - DNA, 25 bp, Artificial
  probe
  misc_feature (1)..(25): SEQ ID NO: 527; WAN0249TR_at; Start 515; Stop 539
gaatcactcttattttagcgaaaaa

SEQ ID NO: 33750 - DNA, 25 bp, Artificial
  probe
  misc_feature (1)..(25): SEQ ID NO: 527; WAN0249TR_at; Start 421; Stop 445
ccttaaaataagctgaaatctattg

SEQ ID NO: 33751 - DNA, 25 bp, Artificial
  probe
  misc_feature (1)..(25): SEQ ID NO: 527; WAN0249TR_at; Start 73; Stop 97
gatatagtgaatttcgaatacgcta

SEQ ID NO: 33752 - DNA, 25 bp, Artificial
  probe
  misc_feature (1)..(25): SEQ ID NO: 527; WAN0249TR_at; Start 175; Stop 199
tatcatagtcttattagagaatagc

SEQ ID NO: 33753 - DNA, 25 bp, Artificial
  probe
  misc_feature (1)..(25): SEQ ID NO: 527; WAN0249TR_at; Start 485; Stop 509
tggtacaatggtagaaaaataagct

SEQ ID NO: 33754 - DNA, 25 bp, Artificial
  probe
  misc_feature (1)..(25): SEQ ID NO: 527; WAN0249TR_at; Start 87; Stop 111
cgaatacgctatataatacggacac

SEQ ID NO: 33755 - DNA, 25 bp, Artificial
  probe
  misc_feature (1)..(25): SEQ ID NO: 527; WAN0249TR_at; Start 230; Stop 254
gtaactgaattataatgaaaaagag

SEQ ID NO: 33756 - DNA, 25 bp, Artificial
  probe
  misc_feature (1)..(25): SEQ ID NO: 527; WAN0249TR_at; Start 212; Stop 236
ctcaaataagattaaattgtaactg

SEQ ID NO: 33757 - DNA, 25 bp, Artificial
  probe
  misc_feature (1)..(25): SEQ ID NO: 233; WAN0249TS_at; Start 233; Stop 257
tgttcgcttttttctcatttataaa

SEQ ID NO: 33758 - DNA, 25 bp, Artificial
  probe
  misc_feature (1)..(25): SEQ ID NO: 233; WAN0249TS_at; Start 191; Stop 215
aaagcgaacaagactacttttctga

SEQ ID NO: 33759 - DNA, 25 bp, Artificial
  probe
  misc_feature (1)..(25): SEQ ID NO: 233; WAN0249TS_at; Start 264; Stop 288
tagctgatgatacatattgccaaat

SEQ ID NO: 33760 - DNA, 25 bp, Artificial
  probe
  misc_feature (1)..(25): SEQ ID NO: 233; WAN0249TS_at; Start 280; Stop 304
ttgccaaatacaaaatatctgattt

SEQ ID NO: 33761 - DNA, 25 bp, Artificial
  probe
  misc_feature (1)..(25): SEQ ID NO: 233; WAN0249TS_at; Start 217; Stop 241
actcagaagactagcttgttcgctt

SEQ ID NO: 33762 - DNA, 25 bp, Artificial
  probe
  misc_feature (1)..(25): SEQ ID NO: 233; WAN0249TS_at; Start 185; Stop 209
ataataaaagcgaacaagactactt

SEQ ID NO: 33763 - DNA, 25 bp, Artificial
  probe
  misc_feature (1)..(25): SEQ ID NO: 233; WAN0249TS_at; Start 202; Stop 226
gactacttttctgacactcagaaga

SEQ ID NO: 33764 - DNA, 25 bp, Artificial
  probe
  misc_feature (1)..(25): SEQ ID NO: 233; WAN0249TS_at; Start 3; Stop 27
gccacctcctacaaatagaaagtaa

SEQ ID NO: 33765 - DNA, 25 bp, Artificial
  probe
  misc_feature (1)..(25): SEQ ID NO: 233; WAN0249TS_at; Start 1; Stop 25
aagccacctcctacaaatagaaagt

SEQ ID NO: 33766 - DNA, 25 bp, Artificial
  probe
  misc_feature (1)..(25): SEQ ID NO: 233; WAN0249TS_at; Start 216; Stop 240
cactcagaagactagcttgttcgct

SEQ ID NO: 33767 - DNA, 25 bp, Artificial
  probe
  misc_feature (1)..(25): SEQ ID NO: 233; WAN0249TS_at; Start 200; Stop 224
aagactacttttctgacactcagaa

SEQ ID NO: 33768 - DNA, 25 bp, Artificial
  probe
  misc_feature (1)..(25): SEQ ID NO: 233; WAN0249TS_at; Start 198; Stop 222
acaagactacttttctgacactcag

SEQ ID NO: 33769 - DNA, 25 bp, Artificial
  probe
  misc_feature (1)..(25): SEQ ID NO: 233; WAN0249TS_at; Start 213; Stop 237
tgacactcagaagactagcttgttc

SEQ ID NO: 33770 - DNA, 25 bp, Artificial
  probe
  misc_feature (1)..(25): SEQ ID NO: 233; WAN0249TS_at; Start 259; Stop 283
taaaatagctgatgatacatattgc

SEQ ID NO: 33771 - DNA, 25 bp, Artificial
  probe
  misc_feature (1)..(25): SEQ ID NO: 233; WAN0249TS_at; Start 214; Stop 238
gacactcagaagactagcttgttcg

SEQ ID NO: 33772 - DNA, 25 bp, Artificial
  probe
  misc_feature (1)..(25): SEQ ID NO: 233; WAN0249TS_at; Start 211; Stop 235
tctgacactcagaagactagcttgt

SEQ ID NO: 33773 - DNA, 25 bp, Artificial
  probe
  misc_feature (1)..(25): SEQ ID NO: 233; WAN0249TS_at; Start 266; Stop 290
gctgatgatacatattgccaaatac

SEQ ID NO: 33774 - DNA, 25 bp, Artificial
  probe
  misc_feature (1)..(25): SEQ ID NO: 233; WAN0249TS_at; Start 196; Stop 220
gaacaagactacttttctgacactc

SEQ ID NO: 33775 - DNA, 25 bp, Artificial
  probe
  misc_feature (1)..(25): SEQ ID NO: 233; WAN0249TS_at; Start 269; Stop 293
gatgatacatattgccaaatacaaa

SEQ ID NO: 33776 - DNA, 25 bp, Artificial
  probe
  misc_feature (1)..(25): SEQ ID NO: 233; WAN0249TS_at; Start 261; Stop 285
aaatagctgatgatacatattgcca

SEQ ID NO: 33777 - DNA, 25 bp, Artificial
  probe
  misc_feature (1)..(25): SEQ ID NO: 233; WAN0249TS_at; Start 194; Stop 218
gcgaacaagactacttttctgacac

SEQ ID NO: 33778 - DNA, 25 bp, Artificial
  probe
  misc_feature (1)..(25): SEQ ID NO: 233; WAN0249TS_at; Start 272; Stop 296
gatacatattgccaaatacaaaata

SEQ ID NO: 33779 - DNA, 25 bp, Artificial
  probe
  misc_feature (1)..(25): SEQ ID NO: 233; WAN0249TS_at; Start 4; Stop 28
ccacctcctacaaatagaaagtaat

SEQ ID NO: 33780 - DNA, 25 bp, Artificial
  probe
  misc_feature (1)..(25): SEQ ID NO: 233; WAN0249TS_at; Start 208; Stop 232
ttttctgacactcagaagactagct

SEQ ID NO: 33781 - DNA, 25 bp, Artificial
  probe
  misc_feature (1)..(25): SEQ ID NO: 233; WAN0249TS_at; Start 254; Stop 278
taaactaaaatagctgatgatacat

SEQ ID NO: 33782 - DNA, 25 bp, Artificial
  probe
  misc_feature (1)..(25): SEQ ID NO: 233; WAN0249TS_at; Start 278; Stop 302
tattgccaaatacaaaatatctgat

SEQ ID NO: 33783 - DNA, 25 bp, Artificial
  probe
  misc_feature (1)..(25): SEQ ID NO: 233; WAN0249TS_at; Start 222; Stop 246
gaagactagcttgttcgcttttttc

SEQ ID NO: 33784 - DNA, 25 bp, Artificial
  probe
  misc_feature (1)..(25): SEQ ID NO: 233; WAN0249TS_at; Start 219; Stop 243
tcagaagactagcttgttcgctttt

SEQ ID NO: 33785 - DNA, 25 bp, Artificial
  probe
  misc_feature (1)..(25): SEQ ID NO: 233; WAN0249TS_at; Start 225; Stop 249
gactagcttgttcgcttttttctca

SEQ ID NO: 33786 - DNA, 25 bp, Artificial
  probe
  misc_feature (1)..(25): SEQ ID NO: 233; WAN0249TS_at; Start 199; Stop 223
caagactacttttctgacactcaga

SEQ ID NO: 33787 - DNA, 25 bp, Artificial
  probe
  misc_feature (1)..(25): SEQ ID NO: 233; WAN0249TS_at; Start 212; Stop 236
ctgacactcagaagactagcttgtt

SEQ ID NO: 33788 - DNA, 25 bp, Artificial
  probe
  misc_feature (1)..(25): SEQ ID NO: 233; WAN0249TS_at; Start 215; Stop 239
acactcagaagactagcttgttcgc

SEQ ID NO: 33789 - DNA, 25 bp, Artificial
  probe
  misc_feature (1)..(25): SEQ ID NO: 233; WAN0249TS_at; Start 248; Stop 272
catttataaactaaaatagctgatg

SEQ ID NO: 33790 - DNA, 25 bp, Artificial
  probe
  misc_feature (1)..(25): SEQ ID NO: 233; WAN0249TS_at; Start 205; Stop 229
tacttttctgacactcagaagacta

SEQ ID NO: 33791 - DNA, 25 bp, Artificial
  probe
  misc_feature (1)..(25): SEQ ID NO: 458; WAN0249TT_at; Start 100; Stop 124
tttgaagggtgctacgaaaaagata

SEQ ID NO: 33792 - DNA, 25 bp, Artificial
  probe
  misc_feature (1)..(25): SEQ ID NO: 458; WAN0249TT_at; Start 63; Stop 87
cgaagtgaggaatcgtcaaacggta

SEQ ID NO: 33793 - DNA, 25 bp, Artificial
  probe
  misc_feature (1)..(25): SEQ ID NO: 458; WAN0249TT_at; Start 102; Stop 126
tgaagggtgctacgaaaaagatagg

SEQ ID NO: 33794 - DNA, 25 bp, Artificial
  probe
  misc_feature (1)..(25): SEQ ID NO: 458; WAN0249TT_at; Start 56; Stop 80
agtggagcgaagtgaggaatcgtca

SEQ ID NO: 33795 - DNA, 25 bp, Artificial
  probe
  misc_feature (1)..(25): SEQ ID NO: 458; WAN0249TT_at; Start 156; Stop 180
agatatgaacaaattgattgaggaa

SEQ ID NO: 33796 - DNA, 25 bp, Artificial
  probe
  misc_feature (1)..(25): SEQ ID NO: 458; WAN0249TT_at; Start 66; Stop 90
agtgaggaatcgtcaaacggtaggg

SEQ ID NO: 33797 - DNA, 25 bp, Artificial
  probe
  misc_feature (1)..(25): SEQ ID NO: 458; WAN0249TT_at; Start 101; Stop 125
ttgaagggtgctacgaaaaagatag

SEQ ID NO: 33798 - DNA, 25 bp, Artificial
  probe
  misc_feature (1)..(25): SEQ ID NO: 458; WAN0249TT_at; Start 98; Stop 122
tgtttgaagggtgctacgaaaaaga

SEQ ID NO: 33799 - DNA, 25 bp, Artificial
  probe
  misc_feature (1)..(25): SEQ ID NO: 458; WAN0249TT_at; Start 75; Stop 99
tcgtcaaacggtaggggataggctg

SEQ ID NO: 33800 - DNA, 25 bp, Artificial
  probe
  misc_feature (1)..(25): SEQ ID NO: 458; WAN0249TT_at; Start 57; Stop 81
gtggagcgaagtgaggaatcgtcaa

SEQ ID NO: 33801 - DNA, 25 bp, Artificial
  probe
  misc_feature (1)..(25): SEQ ID NO: 458; WAN0249TT_at; Start 64; Stop 88
gaagtgaggaatcgtcaaacggtag

SEQ ID NO: 33802 - DNA, 25 bp, Artificial
  probe
  misc_feature (1)..(25): SEQ ID NO: 458; WAN0249TT_at; Start 97; Stop 121
ctgtttgaagggtgctacgaaaaag

SEQ ID NO: 33803 - DNA, 25 bp, Artificial
  probe
  misc_feature (1)..(25): SEQ ID NO: 458; WAN0249TT_at; Start 54; Stop 78
gaagtggagcgaagtgaggaatcgt

SEQ ID NO: 33804 - DNA, 25 bp, Artificial
  probe
  misc_feature (1)..(25): SEQ ID NO: 458; WAN0249TT_at; Start 155; Stop 179
aagatatgaacaaattgattgagga

SEQ ID NO: 33805 - DNA, 25 bp, Artificial
  probe
  misc_feature (1)..(25): SEQ ID NO: 458; WAN0249TT_at; Start 119; Stop 143
aagatagggtaaggtgaaattatag

SEQ ID NO: 33806 - DNA, 25 bp, Artificial
  probe
  misc_feature (1)..(25): SEQ ID NO: 458; WAN0249TT_at; Start 65; Stop 89
aagtgaggaatcgtcaaacggtagg

SEQ ID NO: 33807 - DNA, 25 bp, Artificial
  probe
  misc_feature (1)..(25): SEQ ID NO: 458; WAN0249TT_at; Start 55; Stop 79
aagtggagcgaagtgaggaatcgtc

SEQ ID NO: 33808 - DNA, 25 bp, Artificial
  probe
  misc_feature (1)..(25): SEQ ID NO: 458; WAN0249TT_at; Start 94; Stop 118
aggctgtttgaagggtgctacgaaa

SEQ ID NO: 33809 - DNA, 25 bp, Artificial
  probe
  misc_feature (1)..(25): SEQ ID NO: 458; WAN0249TT_at; Start 76; Stop 100
cgtcaaacggtaggggataggctgt

SEQ ID NO: 33810 - DNA, 25 bp, Artificial
  probe
  misc_feature (1)..(25): SEQ ID NO: 458; WAN0249TT_at; Start 93; Stop 117
taggctgtttgaagggtgctacgaa

SEQ ID NO: 33811 - DNA, 25 bp, Artificial
  probe
  misc_feature (1)..(25): SEQ ID NO: 458; WAN0249TT_at; Start 60; Stop 84
gagcgaagtgaggaatcgtcaaacg

SEQ ID NO: 33812 - DNA, 25 bp, Artificial
  probe
  misc_feature (1)..(25): SEQ ID NO: 458; WAN0249TT_at; Start 59; Stop 83
ggagcgaagtgaggaatcgtcaaac

SEQ ID NO: 33813 - DNA, 25 bp, Artificial
  probe
  misc_feature (1)..(25): SEQ ID NO: 458; WAN0249TT_at; Start 68; Stop 92
tgaggaatcgtcaaacggtagggga

SEQ ID NO: 33814 - DNA, 25 bp, Artificial
  probe
  misc_feature (1)..(25): SEQ ID NO: 458; WAN0249TT_at; Start 157; Stop 181
gatatgaacaaattgattgaggaaa

SEQ ID NO: 33815 - DNA, 25 bp, Artificial
  probe
  misc_feature (1)..(25): SEQ ID NO: 458; WAN0249TT_at; Start 158; Stop 182
atatgaacaaattgattgaggaaat

SEQ ID NO: 33816 - DNA, 25 bp, Artificial
  probe
  misc_feature (1)..(25): SEQ ID NO: 458; WAN0249TT_at; Start 61; Stop 85
agcgaagtgaggaatcgtcaaacgg

SEQ ID NO: 33817 - DNA, 25 bp, Artificial
  probe
  misc_feature (1)..(25): SEQ ID NO: 458; WAN0249TT_at; Start 58; Stop 82
tggagcgaagtgaggaatcgtcaaa

SEQ ID NO: 33818 - DNA, 25 bp, Artificial
  probe
  misc_feature (1)..(25): SEQ ID NO: 458; WAN0249TT_at; Start 74; Stop 98
atcgtcaaacggtaggggataggct

SEQ ID NO: 33819 - DNA, 25 bp, Artificial
  probe
  misc_feature (1)..(25): SEQ ID NO: 458; WAN0249TT_at; Start 62; Stop 86
gcgaagtgaggaatcgtcaaacggt

SEQ ID NO: 33820 - DNA, 25 bp, Artificial
  probe
  misc_feature (1)..(25): SEQ ID NO: 458; WAN0249TT_at; Start 53; Stop 77
ggaagtggagcgaagtgaggaatcg

SEQ ID NO: 33821 - DNA, 25 bp, Artificial
  probe
  misc_feature (1)..(25): SEQ ID NO: 458; WAN0249TT_at; Start 92; Stop 116
ataggctgtttgaagggtgctacga

SEQ ID NO: 33822 - DNA, 25 bp, Artificial
  probe
  misc_feature (1)..(25): SEQ ID NO: 458; WAN0249TT_at; Start 95; Stop 119
ggctgtttgaagggtgctacgaaaa

SEQ ID NO: 33823 - DNA, 25 bp, Artificial
  probe
  misc_feature (1)..(25): SEQ ID NO: 458; WAN0249TT_at; Start 96; Stop 120
gctgtttgaagggtgctacgaaaaa

SEQ ID NO: 33824 - DNA, 25 bp, Artificial
  probe
  misc_feature (1)..(25): SEQ ID NO: 458; WAN0249TT_at; Start 154; Stop 178
taagatatgaacaaattgattgagg

SEQ ID NO: 33825 - DNA, 25 bp, Artificial
  probe
  misc_feature (1)..(25): SEQ ID NO: 3544; WAN0249TU_at; Start 766; Stop 790
aaagggcaaaaaggcctcaatatca

SEQ ID NO: 33826 - DNA, 25 bp, Artificial
  probe
  misc_feature (1)..(25): SEQ ID NO: 3544; WAN0249TU_at; Start 853; Stop 877
tactggatctttccctcaaattgag

SEQ ID NO: 33827 - DNA, 25 bp, Artificial
  probe
  misc_feature (1)..(25): SEQ ID NO: 3544; WAN0249TU_at; Start 104; Stop 128
gatccaatccttttcttttactcta

SEQ ID NO: 33828 - DNA, 25 bp, Artificial
  probe
  misc_feature (1)..(25): SEQ ID NO: 3544; WAN0249TU_at; Start 883; Stop 907
gtcttgcttctagactgataaacaa

SEQ ID NO: 33829 - DNA, 25 bp, Artificial
  probe
  misc_feature (1)..(25): SEQ ID NO: 3544; WAN0249TU_at; Start 67; Stop 91
caaaatgattgaaaggattggatcc

SEQ ID NO: 33830 - DNA, 25 bp, Artificial
  probe
  misc_feature (1)..(25): SEQ ID NO: 3544; WAN0249TU_at; Start 52; Stop 76
cctccaaaagttggacaaaatgatt

SEQ ID NO: 33831 - DNA, 25 bp, Artificial
  probe
  misc_feature (1)..(25): SEQ ID NO: 3544; WAN0249TU_at; Start 82; Stop 106
gattggatcctgcattacacaagat

SEQ ID NO: 33832 - DNA, 25 bp, Artificial
  probe
  misc_feature (1)..(25): SEQ ID NO: 3544; WAN0249TU_at; Start 776; Stop 800
aaggcctcaatatcataaaaaggca

SEQ ID NO: 33833 - DNA, 25 bp, Artificial
  probe
  misc_feature (1)..(25): SEQ ID NO: 3544; WAN0249TU_at; Start 875; Stop 899
gagtttttgtcttgcttctagactg

SEQ ID NO: 33834 - DNA, 25 bp, Artificial
  probe
  misc_feature (1)..(25): SEQ ID NO: 3544; WAN0249TU_at; Start 480; Stop 504
tgggccttagtaaatactactctta

SEQ ID NO: 33835 - DNA, 25 bp, Artificial
  probe
  misc_feature (1)..(25): SEQ ID NO: 3544; WAN0249TU_at; Start 496; Stop 520
ctactcttaaattaaactatagtga

SEQ ID NO: 33836 - DNA, 25 bp, Artificial
  probe
  misc_feature (1)..(25): SEQ ID NO: 3544; WAN0249TU_at; Start 856; Stop 880
tggatctttccctcaaattgagttt

SEQ ID NO: 33837 - DNA, 25 bp, Artificial
  probe
  misc_feature (1)..(25): SEQ ID NO: 3544; WAN0249TU_at; Start 38; Stop 62
ctacattgtaggaacctccaaaagt

SEQ ID NO: 33838 - DNA, 25 bp, Artificial
  probe
  misc_feature (1)..(25): SEQ ID NO: 3544; WAN0249TU_at; Start 12; Stop 36
ttcccatctgtctttattaatgacg

SEQ ID NO: 33839 - DNA, 25 bp, Artificial
  probe
  misc_feature (1)..(25): SEQ ID NO: 3544; WAN0249TU_at; Start 859; Stop 883
atctttccctcaaattgagtttttg

SEQ ID NO: 33840 - DNA, 25 bp, Artificial
  probe
  misc_feature (1)..(25): SEQ ID NO: 3544; WAN0249TU_at; Start 44; Stop 68
tgtaggaacctccaaaagttggaca

SEQ ID NO: 33841 - DNA, 25 bp, Artificial
  probe
  misc_feature (1)..(25): SEQ ID NO: 3544; WAN0249TU_at; Start 41; Stop 65
cattgtaggaacctccaaaagttgg

SEQ ID NO: 33842 - DNA, 25 bp, Artificial
  probe
  misc_feature (1)..(25): SEQ ID NO: 3544; WAN0249TU_at; Start 783; Stop 807
caatatcataaaaaggcatcctatc

SEQ ID NO: 33843 - DNA, 25 bp, Artificial
  probe
  misc_feature (1)..(25): SEQ ID NO: 3544; WAN0249TU_at; Start 446; Stop 470
gtcatcgttttctcgtttgctcttt

SEQ ID NO: 33844 - DNA, 25 bp, Artificial
  probe
  misc_feature (1)..(25): SEQ ID NO: 3544; WAN0249TU_at; Start 781; Stop 805
ctcaatatcataaaaaggcatccta

SEQ ID NO: 33845 - DNA, 25 bp, Artificial
  probe
  misc_feature (1)..(25): SEQ ID NO: 3544; WAN0249TU_at; Start 70; Stop 94
aatgattgaaaggattggatcctgc

SEQ ID NO: 33846 - DNA, 25 bp, Artificial
  probe
  misc_feature (1)..(25): SEQ ID NO: 3544; WAN0249TU_at; Start 442; Stop 466
ccttgtcatcgttttctcgtttgct

SEQ ID NO: 33847 - DNA, 25 bp, Artificial
  probe
  misc_feature (1)..(25): SEQ ID NO: 3544; WAN0249TU_at; Start 92; Stop 116
tgcattacacaagatccaatccttt

SEQ ID NO: 33848 - DNA, 25 bp, Artificial
  probe
  misc_feature (1)..(25): SEQ ID NO: 3544; WAN0249TU_at; Start 512; Stop 536
ctatagtgaattgaaataagatgtg

SEQ ID NO: 33849 - DNA, 25 bp, Artificial
  probe
  misc_feature (1)..(25): SEQ ID NO: 3544; WAN0249TU_at; Start 80; Stop 104
aggattggatcctgcattacacaag

SEQ ID NO: 33850 - DNA, 25 bp, Artificial
  probe
  misc_feature (1)..(25): SEQ ID NO: 3544; WAN0249TU_at; Start 478; Stop 502
attgggccttagtaaatactactct

SEQ ID NO: 33851 - DNA, 25 bp, Artificial
  probe
  misc_feature (1)..(25): SEQ ID NO: 3544; WAN0249TU_at; Start 89; Stop 113
tcctgcattacacaagatccaatcc

SEQ ID NO: 33852 - DNA, 25 bp, Artificial
  probe
  misc_feature (1)..(25): SEQ ID NO: 3544; WAN0249TU_at; Start 772; Stop 796
caaaaaggcctcaatatcataaaaa

SEQ ID NO: 33853 - DNA, 25 bp, Artificial
  probe
  misc_feature (1)..(25): SEQ ID NO: 3544; WAN0249TU_at; Start 73; Stop 97
gattgaaaggattggatcctgcatt

SEQ ID NO: 33854 - DNA, 25 bp, Artificial
  probe
  misc_feature (1)..(25): SEQ ID NO: 3544; WAN0249TU_at; Start 55; Stop 79
ccaaaagttggacaaaatgattgaa

SEQ ID NO: 33855 - DNA, 25 bp, Artificial
  probe
  misc_feature (1)..(25): SEQ ID NO: 3544; WAN0249TU_at; Start 87; Stop 111
gatcctgcattacacaagatccaat

SEQ ID NO: 33856 - DNA, 25 bp, Artificial
  probe
  misc_feature (1)..(25): SEQ ID NO: 3544; WAN0249TU_at; Start 770; Stop 794
ggcaaaaaggcctcaatatcataaa

SEQ ID NO: 33857 - DNA, 25 bp, Artificial
  probe
  misc_feature (1)..(25): SEQ ID NO: 3544; WAN0249TU_at; Start 94; Stop 118
cattacacaagatccaatccttttc

SEQ ID NO: 33858 - DNA, 25 bp, Artificial
  probe
  misc_feature (1)..(25): SEQ ID NO: 3544; WAN0249TU_at; Start 77; Stop 101
gaaaggattggatcctgcattacac

SEQ ID NO: 33859 - DNA, 25 bp, Artificial
  probe
  misc_feature (1)..(25): SEQ ID NO: 220; WAN0249TV_at; Start 157; Stop 181
tgatttgaattccaaaatcccatcg

SEQ ID NO: 33860 - DNA, 25 bp, Artificial
  probe
  misc_feature (1)..(25): SEQ ID NO: 220; WAN0249TV_at; Start 32; Stop 56
tgaaaagggtggaatcacgaaccta

SEQ ID NO: 33861 - DNA, 25 bp, Artificial
  probe
  misc_feature (1)..(25): SEQ ID NO: 220; WAN0249TV_at; Start 43; Stop 67
gaatcacgaacctaattatgtacac

SEQ ID NO: 33862 - DNA, 25 bp, Artificial
  probe
  misc_feature (1)..(25): SEQ ID NO: 220; WAN0249TV_at; Start 1; Stop 25
aagagccttgcgaaagcgaggtttt

SEQ ID NO: 33863 - DNA, 25 bp, Artificial
  probe
  misc_feature (1)..(25): SEQ ID NO: 220; WAN0249TV_at; Start 212; Stop 236
gaaaggaaataagtcagctcacaaa

SEQ ID NO: 33864 - DNA, 25 bp, Artificial
  probe
  misc_feature (1)..(25): SEQ ID NO: 220; WAN0249TV_at; Start 162; Stop 186
tgaattccaaaatcccatcgttccg

SEQ ID NO: 33865 - DNA, 25 bp, Artificial
  probe
  misc_feature (1)..(25): SEQ ID NO: 220; WAN0249TV_at; Start 115; Stop 139
tctggaataggataatattacttct

SEQ ID NO: 33866 - DNA, 25 bp, Artificial
  probe
  misc_feature (1)..(25): SEQ ID NO: 220; WAN0249TV_at; Start 196; Stop 220
cattttgcgatatagtgaaaggaaa

SEQ ID NO: 33867 - DNA, 25 bp, Artificial
  probe
  misc_feature (1)..(25): SEQ ID NO: 220; WAN0249TV_at; Start 360; Stop 384
tgcctggtctcttttgttctatgag

SEQ ID NO: 33868 - DNA, 25 bp, Artificial
  probe
  misc_feature (1)..(25): SEQ ID NO: 220; WAN0249TV_at; Start 217; Stop 241
gaaataagtcagctcacaaaaaacg

SEQ ID NO: 33869 - DNA, 25 bp, Artificial
  probe
  misc_feature (1)..(25): SEQ ID NO: 220; WAN0249TV_at; Start 221; Stop 245
taagtcagctcacaaaaaacgcata

SEQ ID NO: 33870 - DNA, 25 bp, Artificial
  probe
  misc_feature (1)..(25): SEQ ID NO: 220; WAN0249TV_at; Start 206; Stop 230
tatagtgaaaggaaataagtcagct

SEQ ID NO: 33871 - DNA, 25 bp, Artificial
  probe
  misc_feature (1)..(25): SEQ ID NO: 220; WAN0249TV_at; Start 49; Stop 73
cgaacctaattatgtacacattatg

SEQ ID NO: 33872 - DNA, 25 bp, Artificial
  probe
  misc_feature (1)..(25): SEQ ID NO: 220; WAN0249TV_at; Start 111; Stop 135
tgaatctggaataggataatattac

SEQ ID NO: 33873 - DNA, 25 bp, Artificial
  probe
  misc_feature (1)..(25): SEQ ID NO: 220; WAN0249TV_at; Start 382; Stop 406
gagtatgttacatatctaggtaaaa

SEQ ID NO: 33874 - DNA, 25 bp, Artificial
  probe
  misc_feature (1)..(25): SEQ ID NO: 220; WAN0249TV_at; Start 202; Stop 226
gcgatatagtgaaaggaaataagtc

SEQ ID NO: 33875 - DNA, 25 bp, Artificial
  probe
  misc_feature (1)..(25): SEQ ID NO: 220; WAN0249TV_at; Start 174; Stop 198
tcccatcgttccgttcttatttcat

SEQ ID NO: 33876 - DNA, 25 bp, Artificial
  probe
  misc_feature (1)..(25): SEQ ID NO: 220; WAN0249TV_at; Start 208; Stop 232
tagtgaaaggaaataagtcagctca

SEQ ID NO: 33877 - DNA, 25 bp, Artificial
  probe
  misc_feature (1)..(25): SEQ ID NO: 220; WAN0249TV_at; Start 38; Stop 62
gggtggaatcacgaacctaattatg

SEQ ID NO: 33878 - DNA, 25 bp, Artificial
  probe
  misc_feature (1)..(25): SEQ ID NO: 220; WAN0249TV_at; Start 41; Stop 65
tggaatcacgaacctaattatgtac

SEQ ID NO: 33879 - DNA, 25 bp, Artificial
  probe
  misc_feature (1)..(25): SEQ ID NO: 220; WAN0249TV_at; Start 55; Stop 79
taattatgtacacattatgtaaaca

SEQ ID NO: 33880 - DNA, 25 bp, Artificial
  probe
  misc_feature (1)..(25): SEQ ID NO: 220; WAN0249TV_at; Start 362; Stop 386
cctggtctcttttgttctatgagta

SEQ ID NO: 33881 - DNA, 25 bp, Artificial
  probe
  misc_feature (1)..(25): SEQ ID NO: 220; WAN0249TV_at; Start 81; Stop 105
gttgcttgaaaactcaattgtatag

SEQ ID NO: 33882 - DNA, 25 bp, Artificial
  probe
  misc_feature (1)..(25): SEQ ID NO: 220; WAN0249TV_at; Start 97; Stop 121
attgtatagtgaactgaatctggaa

SEQ ID NO: 33883 - DNA, 25 bp, Artificial
  probe
  misc_feature (1)..(25): SEQ ID NO: 220; WAN0249TV_at; Start 46; Stop 70
tcacgaacctaattatgtacacatt

SEQ ID NO: 33884 - DNA, 25 bp, Artificial
  probe
  misc_feature (1)..(25): SEQ ID NO: 220; WAN0249TV_at; Start 369; Stop 393
tcttttgttctatgagtatgttaca

SEQ ID NO: 33885 - DNA, 25 bp, Artificial
  probe
  misc_feature (1)..(25): SEQ ID NO: 220; WAN0249TV_at; Start 124; Stop 148
ggataatattacttctaaaacattc

SEQ ID NO: 33886 - DNA, 25 bp, Artificial
  probe
  misc_feature (1)..(25): SEQ ID NO: 220; WAN0249TV_at; Start 188; Stop 212
tcttatttcattttgcgatatagtg

SEQ ID NO: 33887 - DNA, 25 bp, Artificial
  probe
  misc_feature (1)..(25): SEQ ID NO: 220; WAN0249TV_at; Start 95; Stop 119
caattgtatagtgaactgaatctgg

SEQ ID NO: 33888 - DNA, 25 bp, Artificial
  probe
  misc_feature (1)..(25): SEQ ID NO: 220; WAN0249TV_at; Start 3; Stop 27
gagccttgcgaaagcgaggttttta

SEQ ID NO: 33889 - DNA, 25 bp, Artificial
  probe
  misc_feature (1)..(25): SEQ ID NO: 220; WAN0249TV_at; Start 169; Stop 193
caaaatcccatcgttccgttcttat

SEQ ID NO: 33890 - DNA, 25 bp, Artificial
  probe
  misc_feature (1)..(25): SEQ ID NO: 220; WAN0249TV_at; Start 387; Stop 411
tgttacatatctaggtaaaaattat

SEQ ID NO: 33891 - DNA, 25 bp, Artificial
  probe
  misc_feature (1)..(25): SEQ ID NO: 220; WAN0249TV_at; Start 88; Stop 112
gaaaactcaattgtatagtgaactg

SEQ ID NO: 33892 - DNA, 25 bp, Artificial
  probe
  misc_feature (1)..(25): SEQ ID NO: 220; WAN0249TV_at; Start 351; Stop 375
aagactttttgcctggtctcttttg

SEQ ID NO: 33893 - DNA, 25 bp, Artificial
  probe
  misc_feature (1)..(25): SEQ ID NO: 3520; WAN0249TW_at; Start 218; Stop 242
aaatcttcccataataaaacacaca

SEQ ID NO: 33894 - DNA, 25 bp, Artificial
  probe
  misc_feature (1)..(25): SEQ ID NO: 3520; WAN0249TW_at; Start 106; Stop 130
ccgtatgtttccaatagatttcagc

SEQ ID NO: 33895 - DNA, 25 bp, Artificial
  probe
  misc_feature (1)..(25): SEQ ID NO: 3520; WAN0249TW_at; Start 433; Stop 457
cccaatttctattttcaagtgtccg

SEQ ID NO: 33896 - DNA, 25 bp, Artificial
  probe
  misc_feature (1)..(25): SEQ ID NO: 3520; WAN0249TW_at; Start 8; Stop 32
cattcatttctgtaatttttcgcta

SEQ ID NO: 33897 - DNA, 25 bp, Artificial
  probe
  misc_feature (1)..(25): SEQ ID NO: 3520; WAN0249TW_at; Start 196; Stop 220
ccatttcaggagacaatgaagtaaa

SEQ ID NO: 33898 - DNA, 25 bp, Artificial
  probe
  misc_feature (1)..(25): SEQ ID NO: 3520; WAN0249TW_at; Start 173; Stop 197
tagagtgatcctgcttcaaaactcc

SEQ ID NO: 33899 - DNA, 25 bp, Artificial
  probe
  misc_feature (1)..(25): SEQ ID NO: 3520; WAN0249TW_at; Start 67; Stop 91
ccattgtaccactttatatagtatc

SEQ ID NO: 33900 - DNA, 25 bp, Artificial
  probe
  misc_feature (1)..(25): SEQ ID NO: 3520; WAN0249TW_at; Start 447; Stop 471
tcaagtgtccgtattatatagcgta

SEQ ID NO: 33901 - DNA, 25 bp, Artificial
  probe
  misc_feature (1)..(25): SEQ ID NO: 3520; WAN0249TW_at; Start 453; Stop 477
gtccgtattatatagcgtattcgaa

SEQ ID NO: 33902 - DNA, 25 bp, Artificial
  probe
  misc_feature (1)..(25): SEQ ID NO: 3520; WAN0249TW_at; Start 23; Stop 47
tttttcgctaaaataagagtgattc

SEQ ID NO: 33903 - DNA, 25 bp, Artificial
  probe
  misc_feature (1)..(25): SEQ ID NO: 3520; WAN0249TW_at; Start 415; Stop 439
tatagatcccctttcatccccaatt

SEQ ID NO: 33904 - DNA, 25 bp, Artificial
  probe
  misc_feature (1)..(25): SEQ ID NO: 3520; WAN0249TW_at; Start 340; Stop 364
tcttatttgagaaagtgggtgatgc

SEQ ID NO: 33905 - DNA, 25 bp, Artificial
  probe
  misc_feature (1)..(25): SEQ ID NO: 3520; WAN0249TW_at; Start 88; Stop 112
tatcttttcaattgtttaccgtatg

SEQ ID NO: 33906 - DNA, 25 bp, Artificial
  probe
  misc_feature (1)..(25): SEQ ID NO: 3520; WAN0249TW_at; Start 268; Stop 292
actatgcgcttttctgatttttaaa

SEQ ID NO: 33907 - DNA, 25 bp, Artificial
  probe
  misc_feature (1)..(25): SEQ ID NO: 3520; WAN0249TW_at; Start 474; Stop 498
cgaaattcactatatcttgttagga

SEQ ID NO: 33908 - DNA, 25 bp, Artificial
  probe
  misc_feature (1)..(25): SEQ ID NO: 3520; WAN0249TW_at; Start 461; Stop 485
tatatagcgtattcgaaattcacta

SEQ ID NO: 33909 - DNA, 25 bp, Artificial
  probe
  misc_feature (1)..(25): SEQ ID NO: 3520; WAN0249TW_at; Start 100; Stop 124
tgtttaccgtatgtttccaatagat

SEQ ID NO: 33910 - DNA, 25 bp, Artificial
  probe
  misc_feature (1)..(25): SEQ ID NO: 3520; WAN0249TW_at; Start 522; Stop 546
gactgttgcaaatctaattagctgt

SEQ ID NO: 33911 - DNA, 25 bp, Artificial
  probe
  misc_feature (1)..(25): SEQ ID NO: 3520; WAN0249TW_at; Start 53; Stop 77
agcttatttttctaccattgtacca

SEQ ID NO: 33912 - DNA, 25 bp, Artificial
  probe
  misc_feature (1)..(25): SEQ ID NO: 3520; WAN0249TW_at; Start 360; Stop 384
gatgctattctctaataagactatg

SEQ ID NO: 33913 - DNA, 25 bp, Artificial
  probe
  misc_feature (1)..(25): SEQ ID NO: 3520; WAN0249TW_at; Start 137; Stop 161
taaggattatacagtttttctatgt

SEQ ID NO: 33914 - DNA, 25 bp, Artificial
  probe
  misc_feature (1)..(25): SEQ ID NO: 3520; WAN0249TW_at; Start 189; Stop 213
caaaactccatttcaggagacaatg

SEQ ID NO: 33915 - DNA, 25 bp, Artificial
  probe
  misc_feature (1)..(25): SEQ ID NO: 3520; WAN0249TW_at; Start 401; Stop 425
gtacttccagaaattatagatcccc

SEQ ID NO: 33916 - DNA, 25 bp, Artificial
  probe
  misc_feature (1)..(25): SEQ ID NO: 3520; WAN0249TW_at; Start 326; Stop 350
cagttacaatttaatcttatttgag

SEQ ID NO: 33917 - DNA, 25 bp, Artificial
  probe
  misc_feature (1)..(25): SEQ ID NO: 3520; WAN0249TW_at; Start 117; Stop 141
caatagatttcagcttattttaagg

SEQ ID NO: 33918 - DNA, 25 bp, Artificial
  probe
  misc_feature (1)..(25): SEQ ID NO: 3520; WAN0249TW_at; Start 227; Stop 251
cataataaaacacacaatatcaagt

SEQ ID NO: 33919 - DNA, 25 bp, Artificial
  probe
  misc_feature (1)..(25): SEQ ID NO: 3520; WAN0249TW_at; Start 507; Stop 531
gaatcattgataacagactgttgca

SEQ ID NO: 33920 - DNA, 25 bp, Artificial
  probe
  misc_feature (1)..(25): SEQ ID NO: 3520; WAN0249TW_at; Start 386; Stop 410
tattaatttttgatagtacttccag

SEQ ID NO: 33921 - DNA, 25 bp, Artificial
  probe
  misc_feature (1)..(25): SEQ ID NO: 3520; WAN0249TW_at; Start 488; Stop 512
tcttgttaggatttgggtagaatca

SEQ ID NO: 33922 - DNA, 25 bp, Artificial
  probe
  misc_feature (1)..(25): SEQ ID NO: 3520; WAN0249TW_at; Start 179; Stop 203
gatcctgcttcaaaactccatttca

SEQ ID NO: 33923 - DNA, 25 bp, Artificial
  probe
  misc_feature (1)..(25): SEQ ID NO: 3520; WAN0249TW_at; Start 351; Stop 375
aaagtgggtgatgctattctctaat

SEQ ID NO: 33924 - DNA, 25 bp, Artificial
  probe
  misc_feature (1)..(25): SEQ ID NO: 3520; WAN0249TW_at; Start 501; Stop 525
tgggtagaatcattgataacagact

SEQ ID NO: 33925 - DNA, 25 bp, Artificial
  probe
  misc_feature (1)..(25): SEQ ID NO: 3520; WAN0249TW_at; Start 163; Stop 187
tattttcaaatagagtgatcctgct

SEQ ID NO: 33926 - DNA, 25 bp, Artificial
  probe
  misc_feature (1)..(25): SEQ ID NO: 3520; WAN0249TW_at; Start 37; Stop 61
aagagtgattcttactagcttattt

SEQ ID NO: 33927 - DNA, 25 bp, Artificial
  probe
  misc_feature (1)..(25): SEQ ID NO: 3521; WAN0249TX_at; Start 10; Stop 34
agctgatgggctaccttttgtgtta

SEQ ID NO: 33928 - DNA, 25 bp, Artificial
  probe
  misc_feature (1)..(25): SEQ ID NO: 3521; WAN0249TX_at; Start 17; Stop 41
gggctaccttttgtgttatactcaa

SEQ ID NO: 33929 - DNA, 25 bp, Artificial
  probe
  misc_feature (1)..(25): SEQ ID NO: 3521; WAN0249TX_at; Start 2; Stop 26
aaaaaggtagctgatgggctacctt

SEQ ID NO: 33930 - DNA, 25 bp, Artificial
  probe
  misc_feature (1)..(25): SEQ ID NO: 3521; WAN0249TX_at; Start 15; Stop 39
atgggctaccttttgtgttatactc

SEQ ID NO: 33931 - DNA, 25 bp, Artificial
  probe
  misc_feature (1)..(25): SEQ ID NO: 3521; WAN0249TX_at; Start 6; Stop 30
aggtagctgatgggctaccttttgt

SEQ ID NO: 33932 - DNA, 25 bp, Artificial
  probe
  misc_feature (1)..(25): SEQ ID NO: 3521; WAN0249TX_at; Start 14; Stop 38
gatgggctaccttttgtgttatact

SEQ ID NO: 33933 - DNA, 25 bp, Artificial
  probe
  misc_feature (1)..(25): SEQ ID NO: 3521; WAN0249TX_at; Start 20; Stop 44
ctaccttttgtgttatactcaatga

SEQ ID NO: 33934 - DNA, 25 bp, Artificial
  probe
  misc_feature (1)..(25): SEQ ID NO: 3521; WAN0249TX_at; Start 19; Stop 43
gctaccttttgtgttatactcaatg

SEQ ID NO: 33935 - DNA, 25 bp, Artificial
  probe
  misc_feature (1)..(25): SEQ ID NO: 3521; WAN0249TX_at; Start 11; Stop 35
gctgatgggctaccttttgtgttat

SEQ ID NO: 33936 - DNA, 25 bp, Artificial
  probe
  misc_feature (1)..(25): SEQ ID NO: 3521; WAN0249TX_at; Start 5; Stop 29
aaggtagctgatgggctaccttttg

SEQ ID NO: 33937 - DNA, 25 bp, Artificial
  probe
  misc_feature (1)..(25): SEQ ID NO: 3521; WAN0249TX_at; Start 9; Stop 33
tagctgatgggctaccttttgtgtt

SEQ ID NO: 33938 - DNA, 25 bp, Artificial
  probe
  misc_feature (1)..(25): SEQ ID NO: 3521; WAN0249TX_at; Start 16; Stop 40
tgggctaccttttgtgttatactca

SEQ ID NO: 33939 - DNA, 25 bp, Artificial
  probe
  misc_feature (1)..(25): SEQ ID NO: 3521; WAN0249TX_at; Start 3; Stop 27
aaaaggtagctgatgggctaccttt

SEQ ID NO: 33940 - DNA, 25 bp, Artificial
  probe
  misc_feature (1)..(25): SEQ ID NO: 3521; WAN0249TX_at; Start 1; Stop 25
gaaaaaggtagctgatgggctacct

SEQ ID NO: 33941 - DNA, 25 bp, Artificial
  probe
  misc_feature (1)..(25): SEQ ID NO: 3521; WAN0249TX_at; Start 12; Stop 36
ctgatgggctaccttttgtgttata

SEQ ID NO: 33942 - DNA, 25 bp, Artificial
  probe
  misc_feature (1)..(25): SEQ ID NO: 3521; WAN0249TX_at; Start 22; Stop 46
accttttgtgttatactcaatgaaa

SEQ ID NO: 33943 - DNA, 25 bp, Artificial
  probe
  misc_feature (1)..(25): SEQ ID NO: 3521; WAN0249TX_at; Start 13; Stop 37
tgatgggctaccttttgtgttatac

SEQ ID NO: 33944 - DNA, 25 bp, Artificial
  probe
  misc_feature (1)..(25): SEQ ID NO: 3521; WAN0249TX_at; Start 8; Stop 32
gtagctgatgggctaccttttgtgt

SEQ ID NO: 33945 - DNA, 25 bp, Artificial
  probe
  misc_feature (1)..(25): SEQ ID NO: 3521; WAN0249TX_at; Start 7; Stop 31
ggtagctgatgggctaccttttgtg

SEQ ID NO: 33946 - DNA, 25 bp, Artificial
  probe
  misc_feature (1)..(25): SEQ ID NO: 3521; WAN0249TX_at; Start 4; Stop 28
aaaggtagctgatgggctacctttt

SEQ ID NO: 33947 - DNA, 25 bp, Artificial
  probe
  misc_feature (1)..(25): SEQ ID NO: 3521; WAN0249TX_at; Start 21; Stop 45
taccttttgtgttatactcaatgaa

SEQ ID NO: 33948 - DNA, 25 bp, Artificial
  probe
  misc_feature (1)..(25): SEQ ID NO: 3521; WAN0249TX_at; Start 18; Stop 42
ggctaccttttgtgttatactcaat

SEQ ID NO: 33949 - DNA, 25 bp, Artificial
  probe
  misc_feature (1)..(25): SEQ ID NO: 4418; WAN0249TY_at; Start 120; Stop 144
ccatcttcaacctcaaagtagtgct

SEQ ID NO: 33950 - DNA, 25 bp, Artificial
  probe
  misc_feature (1)..(25): SEQ ID NO: 4418; WAN0249TY_at; Start 119; Stop 143
tccatcttcaacctcaaagtagtgc

SEQ ID NO: 33951 - DNA, 25 bp, Artificial
  probe
  misc_feature (1)..(25): SEQ ID NO: 4418; WAN0249TY_at; Start 237; Stop 261
ttgtcaagttctaaccaaaaggagc

SEQ ID NO: 33952 - DNA, 25 bp, Artificial
  probe
  misc_feature (1)..(25): SEQ ID NO: 4418; WAN0249TY_at; Start 30; Stop 54
taaaaacatgattaaatcgctattc

SEQ ID NO: 33953 - DNA, 25 bp, Artificial
  probe
  misc_feature (1)..(25): SEQ ID NO: 4418; WAN0249TY_at; Start 197; Stop 221
taaaataatcttcttctagtttcgc

SEQ ID NO: 33954 - DNA, 25 bp, Artificial
  probe
  misc_feature (1)..(25): SEQ ID NO: 4418; WAN0249TY_at; Start 10; Stop 34
gagcaactacagtagtagcttaaaa

SEQ ID NO: 33955 - DNA, 25 bp, Artificial
  probe
  misc_feature (1)..(25): SEQ ID NO: 4418; WAN0249TY_at; Start 206; Stop 230
cttcttctagtttcgcataaaatga

SEQ ID NO: 33956 - DNA, 25 bp, Artificial
  probe
  misc_feature (1)..(25): SEQ ID NO: 4418; WAN0249TY_at; Start 27; Stop 51
gcttaaaaacatgattaaatcgcta

SEQ ID NO: 33957 - DNA, 25 bp, Artificial
  probe
  misc_feature (1)..(25): SEQ ID NO: 4418; WAN0249TY_at; Start 240; Stop 264
tcaagttctaaccaaaaggagcctg

SEQ ID NO: 33958 - DNA, 25 bp, Artificial
  probe
  misc_feature (1)..(25): SEQ ID NO: 4418; WAN0249TY_at; Start 1; Stop 25
taaataatagagcaactacagtagt

SEQ ID NO: 33959 - DNA, 25 bp, Artificial
  probe
  misc_feature (1)..(25): SEQ ID NO: 4418; WAN0249TY_at; Start 35; Stop 59
acatgattaaatcgctattcttagg

SEQ ID NO: 33960 - DNA, 25 bp, Artificial
  probe
  misc_feature (1)..(25): SEQ ID NO: 4418; WAN0249TY_at; Start 8; Stop 32
tagagcaactacagtagtagcttaa

SEQ ID NO: 33961 - DNA, 25 bp, Artificial
  probe
  misc_feature (1)..(25): SEQ ID NO: 4418; WAN0249TY_at; Start 198; Stop 222
aaaataatcttcttctagtttcgca

SEQ ID NO: 33962 - DNA, 25 bp, Artificial
  probe
  misc_feature (1)..(25): SEQ ID NO: 4418; WAN0249TY_at; Start 209; Stop 233
cttctagtttcgcataaaatgatgt

SEQ ID NO: 33963 - DNA, 25 bp, Artificial
  probe
  misc_feature (1)..(25): SEQ ID NO: 4418; WAN0249TY_at; Start 42; Stop 66
taaatcgctattcttaggagtagcg

SEQ ID NO: 33964 - DNA, 25 bp, Artificial
  probe
  misc_feature (1)..(25): SEQ ID NO: 4418; WAN0249TY_at; Start 19; Stop 43
cagtagtagcttaaaaacatgatta

SEQ ID NO: 33965 - DNA, 25 bp, Artificial
  probe
  misc_feature (1)..(25): SEQ ID NO: 4418; WAN0249TY_at; Start 118; Stop 142
ttccatcttcaacctcaaagtagtg

SEQ ID NO: 33966 - DNA, 25 bp, Artificial
  probe
  misc_feature (1)..(25): SEQ ID NO: 4418; WAN0249TY_at; Start 203; Stop 227
aatcttcttctagtttcgcataaaa

SEQ ID NO: 33967 - DNA, 25 bp, Artificial
  probe
  misc_feature (1)..(25): SEQ ID NO: 4418; WAN0249TY_at; Start 238; Stop 262
tgtcaagttctaaccaaaaggagcc

SEQ ID NO: 33968 - DNA, 25 bp, Artificial
  probe
  misc_feature (1)..(25): SEQ ID NO: 4418; WAN0249TY_at; Start 37; Stop 61
atgattaaatcgctattcttaggag

SEQ ID NO: 33969 - DNA, 25 bp, Artificial
  probe
  misc_feature (1)..(25): SEQ ID NO: 4418; WAN0249TY_at; Start 200; Stop 224
aataatcttcttctagtttcgcata

SEQ ID NO: 33970 - DNA, 25 bp, Artificial
  probe
  misc_feature (1)..(25): SEQ ID NO: 4418; WAN0249TY_at; Start 116; Stop 140
gcttccatcttcaacctcaaagtag

SEQ ID NO: 33971 - DNA, 25 bp, Artificial
  probe
  misc_feature (1)..(25): SEQ ID NO: 4418; WAN0249TY_at; Start 202; Stop 226
taatcttcttctagtttcgcataaa

SEQ ID NO: 33972 - DNA, 25 bp, Artificial
  probe
  misc_feature (1)..(25): SEQ ID NO: 4418; WAN0249TY_at; Start 41; Stop 65
ttaaatcgctattcttaggagtagc

SEQ ID NO: 33973 - DNA, 25 bp, Artificial
  probe
  misc_feature (1)..(25): SEQ ID NO: 4418; WAN0249TY_at; Start 15; Stop 39
actacagtagtagcttaaaaacatg

SEQ ID NO: 33974 - DNA, 25 bp, Artificial
  probe
  misc_feature (1)..(25): SEQ ID NO: 4418; WAN0249TY_at; Start 192; Stop 216
gagtataaaataatcttcttctagt

SEQ ID NO: 33975 - DNA, 25 bp, Artificial
  probe
  misc_feature (1)..(25): SEQ ID NO: 4418; WAN0249TY_at; Start 205; Stop 229
tcttcttctagtttcgcataaaatg

SEQ ID NO: 33976 - DNA, 25 bp, Artificial
  probe
  misc_feature (1)..(25): SEQ ID NO: 4418; WAN0249TY_at; Start 13; Stop 37
caactacagtagtagcttaaaaaca

SEQ ID NO: 33977 - DNA, 25 bp, Artificial
  probe
  misc_feature (1)..(25): SEQ ID NO: 4418; WAN0249TY_at; Start 25; Stop 49
tagcttaaaaacatgattaaatcgc

SEQ ID NO: 33978 - DNA, 25 bp, Artificial
  probe
  misc_feature (1)..(25): SEQ ID NO: 4418; WAN0249TY_at; Start 5; Stop 29
taatagagcaactacagtagtagct

SEQ ID NO: 33979 - DNA, 25 bp, Artificial
  probe
  misc_feature (1)..(25): SEQ ID NO: 4418; WAN0249TY_at; Start 17; Stop 41
tacagtagtagcttaaaaacatgat

SEQ ID NO: 33980 - DNA, 25 bp, Artificial
  probe
  misc_feature (1)..(25): SEQ ID NO: 4418; WAN0249TY_at; Start 3; Stop 27
aataatagagcaactacagtagtag

SEQ ID NO: 33981 - DNA, 25 bp, Artificial
  probe
  misc_feature (1)..(25): SEQ ID NO: 4418; WAN0249TY_at; Start 241; Stop 265
caagttctaaccaaaaggagcctga

SEQ ID NO: 33982 - DNA, 25 bp, Artificial
  probe
  misc_feature (1)..(25): SEQ ID NO: 4418; WAN0249TY_at; Start 39; Stop 63
gattaaatcgctattcttaggagta

SEQ ID NO: 33983 - DNA, 25 bp, Artificial
  probe
  misc_feature (1)..(25): SEQ ID NO: 134; WAN0249TZ_at; Start 74; Stop 98
gctttccgagttttcggagagcctg

SEQ ID NO: 33984 - DNA, 25 bp, Artificial
  probe
  misc_feature (1)..(25): SEQ ID NO: 134; WAN0249TZ_at; Start 246; Stop 270
gtatgaatctggaatagaacactgt

SEQ ID NO: 33985 - DNA, 25 bp, Artificial
  probe
  misc_feature (1)..(25): SEQ ID NO: 134; WAN0249TZ_at; Start 286; Stop 310
gtttcctactcgatttcttcagatt

SEQ ID NO: 33986 - DNA, 25 bp, Artificial
  probe
  misc_feature (1)..(25): SEQ ID NO: 134; WAN0249TZ_at; Start 59; Stop 83
acagcttaaaataaggctttccgag

SEQ ID NO: 33987 - DNA, 25 bp, Artificial
  probe
  misc_feature (1)..(25): SEQ ID NO: 134; WAN0249TZ_at; Start 24; Stop 48
ccgaaccttgaaatgtaaaggtgag

SEQ ID NO: 33988 - DNA, 25 bp, Artificial
  probe
  misc_feature (1)..(25): SEQ ID NO: 134; WAN0249TZ_at; Start 250; Stop 274
gaatctggaatagaacactgttaaa

SEQ ID NO: 33989 - DNA, 25 bp, Artificial
  probe
  misc_feature (1)..(25): SEQ ID NO: 134; WAN0249TZ_at; Start 318; Stop 342
aattgactataagaactgctatctg

SEQ ID NO: 33990 - DNA, 25 bp, Artificial
  probe
  misc_feature (1)..(25): SEQ ID NO: 134; WAN0249TZ_at; Start 320; Stop 344
ttgactataagaactgctatctggt

SEQ ID NO: 33991 - DNA, 25 bp, Artificial
  probe
  misc_feature (1)..(25): SEQ ID NO: 134; WAN0249TZ_at; Start 52; Stop 76
gctagaaacagcttaaaataaggct

SEQ ID NO: 33992 - DNA, 25 bp, Artificial
  probe
  misc_feature (1)..(25): SEQ ID NO: 134; WAN0249TZ_at; Start 75; Stop 99
ctttccgagttttcggagagcctgt

SEQ ID NO: 33993 - DNA, 25 bp, Artificial
  probe
  misc_feature (1)..(25): SEQ ID NO: 134; WAN0249TZ_at; Start 278; Stop 302
tgatatgagtttcctactcgatttc

SEQ ID NO: 33994 - DNA, 25 bp, Artificial
  probe
  misc_feature (1)..(25): SEQ ID NO: 134; WAN0249TZ_at; Start 39; Stop 63
taaaggtgaggaagctagaaacagc

SEQ ID NO: 33995 - DNA, 25 bp, Artificial
  probe
  misc_feature (1)..(25): SEQ ID NO: 134; WAN0249TZ_at; Start 29; Stop 53
ccttgaaatgtaaaggtgaggaagc

SEQ ID NO: 33996 - DNA, 25 bp, Artificial
  probe
  misc_feature (1)..(25): SEQ ID NO: 134; WAN0249TZ_at; Start 30; Stop 54
cttgaaatgtaaaggtgaggaagct

SEQ ID NO: 33997 - DNA, 25 bp, Artificial
  probe
  misc_feature (1)..(25): SEQ ID NO: 134; WAN0249TZ_at; Start 26; Stop 50
gaaccttgaaatgtaaaggtgagga

SEQ ID NO: 33998 - DNA, 25 bp, Artificial
  probe
  misc_feature (1)..(25): SEQ ID NO: 134; WAN0249TZ_at; Start 43; Stop 67
ggtgaggaagctagaaacagcttaa

SEQ ID NO: 33999 - DNA, 25 bp, Artificial
  probe
  misc_feature (1)..(25): SEQ ID NO: 134; WAN0249TZ_at; Start 239; Stop 263
tcattgagtatgaatctggaataga

SEQ ID NO: 34000 - DNA, 25 bp, Artificial
  probe
  misc_feature (1)..(25): SEQ ID NO: 134; WAN0249TZ_at; Start 284; Stop 308
gagtttcctactcgatttcttcaga

SEQ ID NO: 34001 - DNA, 25 bp, Artificial
  probe
  misc_feature (1)..(25): SEQ ID NO: 134; WAN0249TZ_at; Start 113; Stop 137
tacccatactttttaatatgtatag

SEQ ID NO: 34002 - DNA, 25 bp, Artificial
  probe
  misc_feature (1)..(25): SEQ ID NO: 134; WAN0249TZ_at; Start 249; Stop 273
tgaatctggaatagaacactgttaa

SEQ ID NO: 34003 - DNA, 25 bp, Artificial
  probe
  misc_feature (1)..(25): SEQ ID NO: 134; WAN0249TZ_at; Start 243; Stop 267
tgagtatgaatctggaatagaacac

SEQ ID NO: 34004 - DNA, 25 bp, Artificial
  probe
  misc_feature (1)..(25): SEQ ID NO: 134; WAN0249TZ_at; Start 45; Stop 69
tgaggaagctagaaacagcttaaaa

SEQ ID NO: 34005 - DNA, 25 bp, Artificial
  probe
  misc_feature (1)..(25): SEQ ID NO: 134; WAN0249TZ_at; Start 304; Stop 328
tcagattttatttcaattgactata

SEQ ID NO: 34006 - DNA, 25 bp, Artificial
  probe
  misc_feature (1)..(25): SEQ ID NO: 134; WAN0249TZ_at; Start 316; Stop 340
tcaattgactataagaactgctatc

SEQ ID NO: 34007 - DNA, 25 bp, Artificial
  probe
  misc_feature (1)..(25): SEQ ID NO: 134; WAN0249TZ_at; Start 40; Stop 64
aaaggtgaggaagctagaaacagct

SEQ ID NO: 34008 - DNA, 25 bp, Artificial
  probe
  misc_feature (1)..(25): SEQ ID NO: 134; WAN0249TZ_at; Start 126; Stop 150
taatatgtatagtggattgatactc

SEQ ID NO: 34009 - DNA, 25 bp, Artificial
  probe
  misc_feature (1)..(25): SEQ ID NO: 134; WAN0249TZ_at; Start 244; Stop 268
gagtatgaatctggaatagaacact

SEQ ID NO: 34010 - DNA, 25 bp, Artificial
  probe
  misc_feature (1)..(25): SEQ ID NO: 134; WAN0249TZ_at; Start 33; Stop 57
gaaatgtaaaggtgaggaagctaga

SEQ ID NO: 34011 - DNA, 25 bp, Artificial
  probe
  misc_feature (1)..(25): SEQ ID NO: 134; WAN0249TZ_at; Start 32; Stop 56
tgaaatgtaaaggtgaggaagctag

SEQ ID NO: 34012 - DNA, 25 bp, Artificial
  probe
  misc_feature (1)..(25): SEQ ID NO: 134; WAN0249TZ_at; Start 321; Stop 345
tgactataagaactgctatctggtt

SEQ ID NO: 34013 - DNA, 25 bp, Artificial
  probe
  misc_feature (1)..(25): SEQ ID NO: 134; WAN0249TZ_at; Start 36; Stop 60
atgtaaaggtgaggaagctagaaac

SEQ ID NO: 34014 - DNA, 25 bp, Artificial
  probe
  misc_feature (1)..(25): SEQ ID NO: 134; WAN0249TZ_at; Start 60; Stop 84
cagcttaaaataaggctttccgagt

SEQ ID NO: 34015 - DNA, 25 bp, Artificial
  probe
  misc_feature (1)..(25): SEQ ID NO: 134; WAN0249TZ_at; Start 247; Stop 271
tatgaatctggaatagaacactgtt

SEQ ID NO: 34016 - DNA, 25 bp, Artificial
  probe
  misc_feature (1)..(25): SEQ ID NO: 134; WAN0249TZ_at; Start 289; Stop 313
tcctactcgatttcttcagatttta

SEQ ID NO: 34017 - DNA, 25 bp, Artificial
  probe
  misc_feature (1)..(25): SEQ ID NO: 3807; WAN0249U2_at; Start 284; Stop 308
gaattcgatttgactatcctcgatt

SEQ ID NO: 34018 - DNA, 25 bp, Artificial
  probe
  misc_feature (1)..(25): SEQ ID NO: 3807; WAN0249U2_at; Start 541; Stop 565
ccccgaaaggtgctctgtataagta

SEQ ID NO: 34019 - DNA, 25 bp, Artificial
  probe
  misc_feature (1)..(25): SEQ ID NO: 3807; WAN0249U2_at; Start 81; Stop 105
gatgttataggagtttttcaaagtg

SEQ ID NO: 34020 - DNA, 25 bp, Artificial
  probe
  misc_feature (1)..(25): SEQ ID NO: 3807; WAN0249U2_at; Start 204; Stop 228
taaggagctatgagatacaaaacac

SEQ ID NO: 34021 - DNA, 25 bp, Artificial
  probe
  misc_feature (1)..(25): SEQ ID NO: 3807; WAN0249U2_at; Start 23; Stop 47
tactagtagtatagcatagacttgt

SEQ ID NO: 34022 - DNA, 25 bp, Artificial
  probe
  misc_feature (1)..(25): SEQ ID NO: 3807; WAN0249U2_at; Start 425; Stop 449
gattaacgttttgaggcaactgacc

SEQ ID NO: 34023 - DNA, 25 bp, Artificial
  probe
  misc_feature (1)..(25): SEQ ID NO: 3807; WAN0249U2_at; Start 536; Stop 560
gaacaccccgaaaggtgctctgtat

SEQ ID NO: 34024 - DNA, 25 bp, Artificial
  probe
  misc_feature (1)..(25): SEQ ID NO: 3807; WAN0249U2_at; Start 184; Stop 208
tacataactgaagagctatataagg

SEQ ID NO: 34025 - DNA, 25 bp, Artificial
  probe
  misc_feature (1)..(25): SEQ ID NO: 3807; WAN0249U2_at; Start 464; Stop 488
ccacatttgtaagcgactaaagtcg

SEQ ID NO: 34026 - DNA, 25 bp, Artificial
  probe
  misc_feature (1)..(25): SEQ ID NO: 3807; WAN0249U2_at; Start 163; Stop 187
ccactaaacttctgttaatactaca

SEQ ID NO: 34027 - DNA, 25 bp, Artificial
  probe
  misc_feature (1)..(25): SEQ ID NO: 3807; WAN0249U2_at; Start 113; Stop 137
gacttagacctacaaacaaaacaga

SEQ ID NO: 34028 - DNA, 25 bp, Artificial
  probe
  misc_feature (1)..(25): SEQ ID NO: 3807; WAN0249U2_at; Start 419; Stop 443
cgtattgattaacgttttgaggcaa

SEQ ID NO: 34029 - DNA, 25 bp, Artificial
  probe
  misc_feature (1)..(25): SEQ ID NO: 3807; WAN0249U2_at; Start 488; Stop 512
gcaacaactgtgtcaattgcaccaa

SEQ ID NO: 34030 - DNA, 25 bp, Artificial
  probe
  misc_feature (1)..(25): SEQ ID NO: 3807; WAN0249U2_at; Start 451; Stop 475
tgtcaggttgcagccacatttgtaa

SEQ ID NO: 34031 - DNA, 25 bp, Artificial
  probe
  misc_feature (1)..(25): SEQ ID NO: 3807; WAN0249U2_at; Start 175; Stop 199
tgttaatactacataactgaagagc

SEQ ID NO: 34032 - DNA, 25 bp, Artificial
  probe
  misc_feature (1)..(25): SEQ ID NO: 3807; WAN0249U2_at; Start 557; Stop 581
gtataagtatagtaattctttcgaa

SEQ ID NO: 34033 - DNA, 25 bp, Artificial
  probe
  misc_feature (1)..(25): SEQ ID NO: 3807; WAN0249U2_at; Start 118; Stop 142
agacctacaaacaaaacagaataag

SEQ ID NO: 34034 - DNA, 25 bp, Artificial
  probe
  misc_feature (1)..(25): SEQ ID NO: 3807; WAN0249U2_at; Start 493; Stop 517
aactgtgtcaattgcaccaatttag

SEQ ID NO: 34035 - DNA, 25 bp, Artificial
  probe
  misc_feature (1)..(25): SEQ ID NO: 3807; WAN0249U2_at; Start 295; Stop 319
gactatcctcgatttgtcctattct

SEQ ID NO: 34036 - DNA, 25 bp, Artificial
  probe
  misc_feature (1)..(25): SEQ ID NO: 3807; WAN0249U2_at; Start 478; Stop 502
gactaaagtcgcaacaactgtgtca

SEQ ID NO: 34037 - DNA, 25 bp, Artificial
  probe
  misc_feature (1)..(25): SEQ ID NO: 3807; WAN0249U2_at; Start 188; Stop 212
taactgaagagctatataaggagct

SEQ ID NO: 34038 - DNA, 25 bp, Artificial
  probe
  misc_feature (1)..(25): SEQ ID NO: 3807; WAN0249U2_at; Start 501; Stop 525
caattgcaccaatttagtaagaaag

SEQ ID NO: 34039 - DNA, 25 bp, Artificial
  probe
  misc_feature (1)..(25): SEQ ID NO: 3807; WAN0249U2_at; Start 289; Stop 313
cgatttgactatcctcgatttgtcc

SEQ ID NO: 34040 - DNA, 25 bp, Artificial
  probe
  misc_feature (1)..(25): SEQ ID NO: 3807; WAN0249U2_at; Start 482; Stop 506
aaagtcgcaacaactgtgtcaattg

SEQ ID NO: 34041 - DNA, 25 bp, Artificial
  probe
  misc_feature (1)..(25): SEQ ID NO: 3807; WAN0249U2_at; Start 456; Stop 480
ggttgcagccacatttgtaagcgac

SEQ ID NO: 34042 - DNA, 25 bp, Artificial
  probe
  misc_feature (1)..(25): SEQ ID NO: 3807; WAN0249U2_at; Start 152; Stop 176
aaaaatctcacccactaaacttctg

SEQ ID NO: 34043 - DNA, 25 bp, Artificial
  probe
  misc_feature (1)..(25): SEQ ID NO: 3807; WAN0249U2_at; Start 98; Stop 122
tcaaagtgataaaaagacttagacc

SEQ ID NO: 34044 - DNA, 25 bp, Artificial
  probe
  misc_feature (1)..(25): SEQ ID NO: 3807; WAN0249U2_at; Start 545; Stop 569
gaaaggtgctctgtataagtatagt

SEQ ID NO: 34045 - DNA, 25 bp, Artificial
  probe
  misc_feature (1)..(25): SEQ ID NO: 3807; WAN0249U2_at; Start 65; Stop 89
tatagtttttcggaaagatgttata

SEQ ID NO: 34046 - DNA, 25 bp, Artificial
  probe
  misc_feature (1)..(25): SEQ ID NO: 3807; WAN0249U2_at; Start 198; Stop 222
gctatataaggagctatgagataca

SEQ ID NO: 34047 - DNA, 25 bp, Artificial
  probe
  misc_feature (1)..(25): SEQ ID NO: 3807; WAN0249U2_at; Start 36; Stop 60
gcatagacttgtatatttttcaaga

SEQ ID NO: 34048 - DNA, 25 bp, Artificial
  probe
  misc_feature (1)..(25): SEQ ID NO: 3807; WAN0249U2_at; Start 206; Stop 230
aggagctatgagatacaaaacacat

SEQ ID NO: 34049 - DNA, 25 bp, Artificial
  probe
  misc_feature (1)..(25): SEQ ID NO: 3807; WAN0249U2_at; Start 460; Stop 484
gcagccacatttgtaagcgactaaa

SEQ ID NO: 34050 - DNA, 25 bp, Artificial
  probe
  misc_feature (1)..(25): SEQ ID NO: 3807; WAN0249U2_at; Start 506; Stop 530
gcaccaatttagtaagaaagtataa

SEQ ID NO: 34051 - DNA, 25 bp, Artificial
  probe
  misc_feature (1)..(25): SEQ ID NO: 433; WAN0249U3_at; Start 70; Stop 94
tcattttatgcgaaactagaagaag

SEQ ID NO: 34052 - DNA, 25 bp, Artificial
  probe
  misc_feature (1)..(25): SEQ ID NO: 433; WAN0249U3_at; Start 269; Stop 293
taagctactactgtagttgctctat

SEQ ID NO: 34053 - DNA, 25 bp, Artificial
  probe
  misc_feature (1)..(25): SEQ ID NO: 433; WAN0249U3_at; Start 242; Stop 266
ctaagaatagcgatttaatcatgtt

SEQ ID NO: 34054 - DNA, 25 bp, Artificial
  probe
  misc_feature (1)..(25): SEQ ID NO: 433; WAN0249U3_at; Start 85; Stop 109
ctagaagaagattattttatactca

SEQ ID NO: 34055 - DNA, 25 bp, Artificial
  probe
  misc_feature (1)..(25): SEQ ID NO: 433; WAN0249U3_at; Start 273; Stop 297
ctactactgtagttgctctattatt

SEQ ID NO: 34056 - DNA, 25 bp, Artificial
  probe
  misc_feature (1)..(25): SEQ ID NO: 433; WAN0249U3_at; Start 258; Stop 282
aatcatgtttttaagctactactgt

SEQ ID NO: 34057 - DNA, 25 bp, Artificial
  probe
  misc_feature (1)..(25): SEQ ID NO: 433; WAN0249U3_at; Start 241; Stop 265
cctaagaatagcgatttaatcatgt

SEQ ID NO: 34058 - DNA, 25 bp, Artificial
  probe
  misc_feature (1)..(25): SEQ ID NO: 433; WAN0249U3_at; Start 272; Stop 296
gctactactgtagttgctctattat

SEQ ID NO: 34059 - DNA, 25 bp, Artificial
  probe
  misc_feature (1)..(25): SEQ ID NO: 433; WAN0249U3_at; Start 257; Stop 281
taatcatgtttttaagctactactg

SEQ ID NO: 34060 - DNA, 25 bp, Artificial
  probe
  misc_feature (1)..(25): SEQ ID NO: 433; WAN0249U3_at; Start 263; Stop 287
tgtttttaagctactactgtagttg

SEQ ID NO: 34061 - DNA, 25 bp, Artificial
  probe
  misc_feature (1)..(25): SEQ ID NO: 433; WAN0249U3_at; Start 78; Stop 102
tgcgaaactagaagaagattatttt

SEQ ID NO: 34062 - DNA, 25 bp, Artificial
  probe
  misc_feature (1)..(25): SEQ ID NO: 433; WAN0249U3_at; Start 71; Stop 95
cattttatgcgaaactagaagaaga

SEQ ID NO: 34063 - DNA, 25 bp, Artificial
  probe
  misc_feature (1)..(25): SEQ ID NO: 433; WAN0249U3_at; Start 239; Stop 263
ctcctaagaatagcgatttaatcat

SEQ ID NO: 34064 - DNA, 25 bp, Artificial
  probe
  misc_feature (1)..(25): SEQ ID NO: 433; WAN0249U3_at; Start 252; Stop 276
cgatttaatcatgtttttaagctac

SEQ ID NO: 34065 - DNA, 25 bp, Artificial
  probe
  misc_feature (1)..(25): SEQ ID NO: 433; WAN0249U3_at; Start 264; Stop 288
gtttttaagctactactgtagttgc

SEQ ID NO: 34066 - DNA, 25 bp, Artificial
  probe
  misc_feature (1)..(25): SEQ ID NO: 433; WAN0249U3_at; Start 76; Stop 100
tatgcgaaactagaagaagattatt

SEQ ID NO: 34067 - DNA, 25 bp, Artificial
  probe
  misc_feature (1)..(25): SEQ ID NO: 433; WAN0249U3_at; Start 75; Stop 99
ttatgcgaaactagaagaagattat

SEQ ID NO: 34068 - DNA, 25 bp, Artificial
  probe
  misc_feature (1)..(25): SEQ ID NO: 433; WAN0249U3_at; Start 235; Stop 259
gctactcctaagaatagcgatttaa

SEQ ID NO: 34069 - DNA, 25 bp, Artificial
  probe
  misc_feature (1)..(25): SEQ ID NO: 433; WAN0249U3_at; Start 80; Stop 104
cgaaactagaagaagattattttat

SEQ ID NO: 34070 - DNA, 25 bp, Artificial
  probe
  misc_feature (1)..(25): SEQ ID NO: 433; WAN0249U3_at; Start 275; Stop 299
actactgtagttgctctattattta

SEQ ID NO: 34071 - DNA, 25 bp, Artificial
  probe
  misc_feature (1)..(25): SEQ ID NO: 433; WAN0249U3_at; Start 67; Stop 91
acatcattttatgcgaaactagaag

SEQ ID NO: 34072 - DNA, 25 bp, Artificial
  probe
  misc_feature (1)..(25): SEQ ID NO: 433; WAN0249U3_at; Start 79; Stop 103
gcgaaactagaagaagattatttta

SEQ ID NO: 34073 - DNA, 25 bp, Artificial
  probe
  misc_feature (1)..(25): SEQ ID NO: 433; WAN0249U3_at; Start 238; Stop 262
actcctaagaatagcgatttaatca

SEQ ID NO: 34074 - DNA, 25 bp, Artificial
  probe
  misc_feature (1)..(25): SEQ ID NO: 433; WAN0249U3_at; Start 267; Stop 291
tttaagctactactgtagttgctct

SEQ ID NO: 34075 - DNA, 25 bp, Artificial
  probe
  misc_feature (1)..(25): SEQ ID NO: 433; WAN0249U3_at; Start 249; Stop 273
tagcgatttaatcatgtttttaagc

SEQ ID NO: 34076 - DNA, 25 bp, Artificial
  probe
  misc_feature (1)..(25): SEQ ID NO: 433; WAN0249U3_at; Start 261; Stop 285
catgtttttaagctactactgtagt

SEQ ID NO: 34077 - DNA, 25 bp, Artificial
  probe
  misc_feature (1)..(25): SEQ ID NO: 433; WAN0249U3_at; Start 234; Stop 258
cgctactcctaagaatagcgattta

SEQ ID NO: 34078 - DNA, 25 bp, Artificial
  probe
  misc_feature (1)..(25): SEQ ID NO: 433; WAN0249U3_at; Start 74; Stop 98
tttatgcgaaactagaagaagatta

SEQ ID NO: 34079 - DNA, 25 bp, Artificial
  probe
  misc_feature (1)..(25): SEQ ID NO: 433; WAN0249U3_at; Start 236; Stop 260
ctactcctaagaatagcgatttaat

SEQ ID NO: 34080 - DNA, 25 bp, Artificial
  probe
  misc_feature (1)..(25): SEQ ID NO: 433; WAN0249U3_at; Start 260; Stop 284
tcatgtttttaagctactactgtag

SEQ ID NO: 34081 - DNA, 25 bp, Artificial
  probe
  misc_feature (1)..(25): SEQ ID NO: 433; WAN0249U3_at; Start 237; Stop 261
tactcctaagaatagcgatttaatc

SEQ ID NO: 34082 - DNA, 25 bp, Artificial
  probe
  misc_feature (1)..(25): SEQ ID NO: 433; WAN0249U3_at; Start 73; Stop 97
ttttatgcgaaactagaagaagatt

SEQ ID NO: 34083 - DNA, 25 bp, Artificial
  probe
  misc_feature (1)..(25): SEQ ID NO: 433; WAN0249U3_at; Start 84; Stop 108
actagaagaagattattttatactc

SEQ ID NO: 34084 - DNA, 25 bp, Artificial
  probe
  misc_feature (1)..(25): SEQ ID NO: 433; WAN0249U3_at; Start 266; Stop 290
ttttaagctactactgtagttgctc

SEQ ID NO: 34085 - DNA, 25 bp, Artificial
  probe
  misc_feature (1)..(25): SEQ ID NO: 3201; WAN0249U4_at; Start 429; Stop 453
tgtaggtctaagtctttttatcact

SEQ ID NO: 34086 - DNA, 25 bp, Artificial
  probe
  misc_feature (1)..(25): SEQ ID NO: 3201; WAN0249U4_at; Start 23; Stop 47
tttatccgtgatatgttagatttgc

SEQ ID NO: 34087 - DNA, 25 bp, Artificial
  probe
  misc_feature (1)..(25): SEQ ID NO: 3201; WAN0249U4_at; Start 507; Stop 531
tacaagtctatgctatactactagt

SEQ ID NO: 34088 - DNA, 25 bp, Artificial
  probe
  misc_feature (1)..(25): SEQ ID NO: 3201; WAN0249U4_at; Start 340; Stop 364
catagctccttatatagctcttcag

SEQ ID NO: 34089 - DNA, 25 bp, Artificial
  probe
  misc_feature (1)..(25): SEQ ID NO: 3201; WAN0249U4_at; Start 321; Stop 345
tacaatgtgttttgtatctcatagc

SEQ ID NO: 34090 - DNA, 25 bp, Artificial
  probe
  misc_feature (1)..(25): SEQ ID NO: 3201; WAN0249U4_at; Start 327; Stop 351
gtgttttgtatctcatagctcctta

SEQ ID NO: 34091 - DNA, 25 bp, Artificial
  probe
  misc_feature (1)..(25): SEQ ID NO: 3201; WAN0249U4_at; Start 447; Stop 471
tatcactttgaaaaactcctataac

SEQ ID NO: 34092 - DNA, 25 bp, Artificial
  probe
  misc_feature (1)..(25): SEQ ID NO: 3201; WAN0249U4_at; Start 81; Stop 105
tatttataccagactaaaatcaaaa

SEQ ID NO: 34093 - DNA, 25 bp, Artificial
  probe
  misc_feature (1)..(25): SEQ ID NO: 3201; WAN0249U4_at; Start 373; Stop 397
tattaacagaagtttagtgggtgag

SEQ ID NO: 34094 - DNA, 25 bp, Artificial
  probe
  misc_feature (1)..(25): SEQ ID NO: 3201; WAN0249U4_at; Start 509; Stop 533
caagtctatgctatactactagtat

SEQ ID NO: 34095 - DNA, 25 bp, Artificial
  probe
  misc_feature (1)..(25): SEQ ID NO: 3201; WAN0249U4_at; Start 356; Stop 380
gctcttcagttatgtagtattaaca

SEQ ID NO: 34096 - DNA, 25 bp, Artificial
  probe
  misc_feature (1)..(25): SEQ ID NO: 3201; WAN0249U4_at; Start 379; Stop 403
cagaagtttagtgggtgagattttt

SEQ ID NO: 34097 - DNA, 25 bp, Artificial
  probe
  misc_feature (1)..(25): SEQ ID NO: 3201; WAN0249U4_at; Start 344; Stop 368
gctccttatatagctcttcagttat

SEQ ID NO: 34098 - DNA, 25 bp, Artificial
  probe
  misc_feature (1)..(25): SEQ ID NO: 3201; WAN0249U4_at; Start 8; Stop 32
gaaatcacttgttaatttatccgtg

SEQ ID NO: 34099 - DNA, 25 bp, Artificial
  probe
  misc_feature (1)..(25): SEQ ID NO: 3201; WAN0249U4_at; Start 60; Stop 84
gaccattttggaggaaagcaatatt

SEQ ID NO: 34100 - DNA, 25 bp, Artificial
  probe
  misc_feature (1)..(25): SEQ ID NO: 3201; WAN0249U4_at; Start 455; Stop 479
tgaaaaactcctataacatctttcc

SEQ ID NO: 34101 - DNA, 25 bp, Artificial
  probe
  misc_feature (1)..(25): SEQ ID NO: 3201; WAN0249U4_at; Start 70; Stop 94
gaggaaagcaatatttataccagac

SEQ ID NO: 34102 - DNA, 25 bp, Artificial
  probe
  misc_feature (1)..(25): SEQ ID NO: 3201; WAN0249U4_at; Start 433; Stop 457
ggtctaagtctttttatcactttga

SEQ ID NO: 34103 - DNA, 25 bp, Artificial
  probe
  misc_feature (1)..(25): SEQ ID NO: 3201; WAN0249U4_at; Start 324; Stop 348
aatgtgttttgtatctcatagctcc

SEQ ID NO: 34104 - DNA, 25 bp, Artificial
  probe
  misc_feature (1)..(25): SEQ ID NO: 3201; WAN0249U4_at; Start 350; Stop 374
tatatagctcttcagttatgtagta

SEQ ID NO: 34105 - DNA, 25 bp, Artificial
  probe
  misc_feature (1)..(25): SEQ ID NO: 3201; WAN0249U4_at; Start 452; Stop 476
ctttgaaaaactcctataacatctt

SEQ ID NO: 34106 - DNA, 25 bp, Artificial
  probe
  misc_feature (1)..(25): SEQ ID NO: 3201; WAN0249U4_at; Start 376; Stop 400
taacagaagtttagtgggtgagatt

SEQ ID NO: 34107 - DNA, 25 bp, Artificial
  probe
  misc_feature (1)..(25): SEQ ID NO: 3201; WAN0249U4_at; Start 66; Stop 90
tttggaggaaagcaatatttatacc

SEQ ID NO: 34108 - DNA, 25 bp, Artificial
  probe
  misc_feature (1)..(25): SEQ ID NO: 3201; WAN0249U4_at; Start 415; Stop 439
tattctgttttgtttgtaggtctaa

SEQ ID NO: 34109 - DNA, 25 bp, Artificial
  probe
  misc_feature (1)..(25): SEQ ID NO: 3201; WAN0249U4_at; Start 466; Stop 490
tataacatctttccgaaaaactata

SEQ ID NO: 34110 - DNA, 25 bp, Artificial
  probe
  misc_feature (1)..(25): SEQ ID NO: 3201; WAN0249U4_at; Start 333; Stop 357
tgtatctcatagctccttatatagc

SEQ ID NO: 34111 - DNA, 25 bp, Artificial
  probe
  misc_feature (1)..(25): SEQ ID NO: 3201; WAN0249U4_at; Start 368; Stop 392
tgtagtattaacagaagtttagtgg

SEQ ID NO: 34112 - DNA, 25 bp, Artificial
  probe
  misc_feature (1)..(25): SEQ ID NO: 3201; WAN0249U4_at; Start 495; Stop 519
tcttgaaaaatatacaagtctatgc

SEQ ID NO: 34113 - DNA, 25 bp, Artificial
  probe
  misc_feature (1)..(25): SEQ ID NO: 3201; WAN0249U4_at; Start 57; Stop 81
tatgaccattttggaggaaagcaat

SEQ ID NO: 34114 - DNA, 25 bp, Artificial
  probe
  misc_feature (1)..(25): SEQ ID NO: 3201; WAN0249U4_at; Start 13; Stop 37
cacttgttaatttatccgtgatatg

SEQ ID NO: 34115 - DNA, 25 bp, Artificial
  probe
  misc_feature (1)..(25): SEQ ID NO: 3201; WAN0249U4_at; Start 73; Stop 97
gaaagcaatatttataccagactaa

SEQ ID NO: 34116 - DNA, 25 bp, Artificial
  probe
  misc_feature (1)..(25): SEQ ID NO: 3201; WAN0249U4_at; Start 62; Stop 86
ccattttggaggaaagcaatattta

SEQ ID NO: 34117 - DNA, 25 bp, Artificial
  probe
  misc_feature (1)..(25): SEQ ID NO: 3201; WAN0249U4_at; Start 418; Stop 442
tctgttttgtttgtaggtctaagtc

SEQ ID NO: 34118 - DNA, 25 bp, Artificial
  probe
  misc_feature (1)..(25): SEQ ID NO: 3201; WAN0249U4_at; Start 6; Stop 30
cagaaatcacttgttaatttatccg

SEQ ID NO: 34119 - DNA, 25 bp, Artificial
  probe
  misc_feature (1)..(25): SEQ ID NO: 228; WAN0249U5_at; Start 232; Stop 256
agtcaaaggctcattccctatttca

SEQ ID NO: 34120 - DNA, 25 bp, Artificial
  probe
  misc_feature (1)..(25): SEQ ID NO: 228; WAN0249U5_at; Start 239; Stop 263
ggctcattccctatttcaacatttt

SEQ ID NO: 34121 - DNA, 25 bp, Artificial
  probe
  misc_feature (1)..(25): SEQ ID NO: 228; WAN0249U5_at; Start 7; Stop 31
cactctttctatttataattccgag

SEQ ID NO: 34122 - DNA, 25 bp, Artificial
  probe
  misc_feature (1)..(25): SEQ ID NO: 228; WAN0249U5_at; Start 216; Stop 240
atcgaaacagggagtgagtcaaagg

SEQ ID NO: 34123 - DNA, 25 bp, Artificial
  probe
  misc_feature (1)..(25): SEQ ID NO: 228; WAN0249U5_at; Start 217; Stop 241
tcgaaacagggagtgagtcaaaggc

SEQ ID NO: 34124 - DNA, 25 bp, Artificial
  probe
  misc_feature (1)..(25): SEQ ID NO: 228; WAN0249U5_at; Start 229; Stop 253
gtgagtcaaaggctcattccctatt

SEQ ID NO: 34125 - DNA, 25 bp, Artificial
  probe
  misc_feature (1)..(25): SEQ ID NO: 228; WAN0249U5_at; Start 235; Stop 259
caaaggctcattccctatttcaaca

SEQ ID NO: 34126 - DNA, 25 bp, Artificial
  probe
  misc_feature (1)..(25): SEQ ID NO: 228; WAN0249U5_at; Start 243; Stop 267
cattccctatttcaacatttttcta

SEQ ID NO: 34127 - DNA, 25 bp, Artificial
  probe
  misc_feature (1)..(25): SEQ ID NO: 228; WAN0249U5_at; Start 223; Stop 247
cagggagtgagtcaaaggctcattc

SEQ ID NO: 34128 - DNA, 25 bp, Artificial
  probe
  misc_feature (1)..(25): SEQ ID NO: 228; WAN0249U5_at; Start 240; Stop 264
gctcattccctatttcaacattttt

SEQ ID NO: 34129 - DNA, 25 bp, Artificial
  probe
  misc_feature (1)..(25): SEQ ID NO: 228; WAN0249U5_at; Start 230; Stop 254
tgagtcaaaggctcattccctattt

SEQ ID NO: 34130 - DNA, 25 bp, Artificial
  probe
  misc_feature (1)..(25): SEQ ID NO: 228; WAN0249U5_at; Start 238; Stop 262
aggctcattccctatttcaacattt

SEQ ID NO: 34131 - DNA, 25 bp, Artificial
  probe
  misc_feature (1)..(25): SEQ ID NO: 228; WAN0249U5_at; Start 5; Stop 29
ttcactctttctatttataattccg

SEQ ID NO: 34132 - DNA, 25 bp, Artificial
  probe
  misc_feature (1)..(25): SEQ ID NO: 228; WAN0249U5_at; Start 225; Stop 249
gggagtgagtcaaaggctcattccc

SEQ ID NO: 34133 - DNA, 25 bp, Artificial
  probe
  misc_feature (1)..(25): SEQ ID NO: 228; WAN0249U5_at; Start 3; Stop 27
gattcactctttctatttataattc

SEQ ID NO: 34134 - DNA, 25 bp, Artificial
  probe
  misc_feature (1)..(25): SEQ ID NO: 228; WAN0249U5_at; Start 231; Stop 255
gagtcaaaggctcattccctatttc

SEQ ID NO: 34135 - DNA, 25 bp, Artificial
  probe
  misc_feature (1)..(25): SEQ ID NO: 228; WAN0249U5_at; Start 219; Stop 243
gaaacagggagtgagtcaaaggctc

SEQ ID NO: 34136 - DNA, 25 bp, Artificial
  probe
  misc_feature (1)..(25): SEQ ID NO: 228; WAN0249U5_at; Start 218; Stop 242
cgaaacagggagtgagtcaaaggct

SEQ ID NO: 34137 - DNA, 25 bp, Artificial
  probe
  misc_feature (1)..(25): SEQ ID NO: 228; WAN0249U5_at; Start 215; Stop 239
tatcgaaacagggagtgagtcaaag

SEQ ID NO: 34138 - DNA, 25 bp, Artificial
  probe
  misc_feature (1)..(25): SEQ ID NO: 228; WAN0249U5_at; Start 224; Stop 248
agggagtgagtcaaaggctcattcc

SEQ ID NO: 34139 - DNA, 25 bp, Artificial
  probe
  misc_feature (1)..(25): SEQ ID NO: 228; WAN0249U5_at; Start 242; Stop 266
tcattccctatttcaacatttttct

SEQ ID NO: 34140 - DNA, 25 bp, Artificial
  probe
  misc_feature (1)..(25): SEQ ID NO: 228; WAN0249U5_at; Start 8; Stop 32
actctttctatttataattccgagg

SEQ ID NO: 34141 - DNA, 25 bp, Artificial
  probe
  misc_feature (1)..(25): SEQ ID NO: 228; WAN0249U5_at; Start 221; Stop 245
aacagggagtgagtcaaaggctcat

SEQ ID NO: 34142 - DNA, 25 bp, Artificial
  probe
  misc_feature (1)..(25): SEQ ID NO: 228; WAN0249U5_at; Start 9; Stop 33
ctctttctatttataattccgaggg

SEQ ID NO: 34143 - DNA, 25 bp, Artificial
  probe
  misc_feature (1)..(25): SEQ ID NO: 228; WAN0249U5_at; Start 234; Stop 258
tcaaaggctcattccctatttcaac

SEQ ID NO: 34144 - DNA, 25 bp, Artificial
  probe
  misc_feature (1)..(25): SEQ ID NO: 228; WAN0249U5_at; Start 1; Stop 25
aagattcactctttctatttataat

SEQ ID NO: 34145 - DNA, 25 bp, Artificial
  probe
  misc_feature (1)..(25): SEQ ID NO: 228; WAN0249U5_at; Start 237; Stop 261
aaggctcattccctatttcaacatt

SEQ ID NO: 34146 - DNA, 25 bp, Artificial
  probe
  misc_feature (1)..(25): SEQ ID NO: 228; WAN0249U5_at; Start 220; Stop 244
aaacagggagtgagtcaaaggctca

SEQ ID NO: 34147 - DNA, 25 bp, Artificial
  probe
  misc_feature (1)..(25): SEQ ID NO: 228; WAN0249U5_at; Start 226; Stop 250
ggagtgagtcaaaggctcattccct

SEQ ID NO: 34148 - DNA, 25 bp, Artificial
  probe
  misc_feature (1)..(25): SEQ ID NO: 228; WAN0249U5_at; Start 227; Stop 251
gagtgagtcaaaggctcattcccta

SEQ ID NO: 34149 - DNA, 25 bp, Artificial
  probe
  misc_feature (1)..(25): SEQ ID NO: 228; WAN0249U5_at; Start 241; Stop 265
ctcattccctatttcaacatttttc

SEQ ID NO: 34150 - DNA, 25 bp, Artificial
  probe
  misc_feature (1)..(25): SEQ ID NO: 228; WAN0249U5_at; Start 233; Stop 257
gtcaaaggctcattccctatttcaa

SEQ ID NO: 34151 - DNA, 25 bp, Artificial
  probe
  misc_feature (1)..(25): SEQ ID NO: 228; WAN0249U5_at; Start 6; Stop 30
tcactctttctatttataattccga

SEQ ID NO: 34152 - DNA, 25 bp, Artificial
  probe
  misc_feature (1)..(25): SEQ ID NO: 228; WAN0249U5_at; Start 222; Stop 246
acagggagtgagtcaaaggctcatt

SEQ ID NO: 34153 - DNA, 25 bp, Artificial
  probe
  misc_feature (1)..(25): SEQ ID NO: 4814; WAN0249U6_at; Start 169; Stop 193
tactaaaacgagtagcttgaaatca

SEQ ID NO: 34154 - DNA, 25 bp, Artificial
  probe
  misc_feature (1)..(25): SEQ ID NO: 4814; WAN0249U6_at; Start 159; Stop 183
cagtttactatactaaaacgagtag

SEQ ID NO: 34155 - DNA, 25 bp, Artificial
  probe
  misc_feature (1)..(25): SEQ ID NO: 4814; WAN0249U6_at; Start 203; Stop 227
ccctcacaggcaggttttatctgta

SEQ ID NO: 34156 - DNA, 25 bp, Artificial
  probe
  misc_feature (1)..(25): SEQ ID NO: 4814; WAN0249U6_at; Start 171; Stop 195
ctaaaacgagtagcttgaaatcaaa

SEQ ID NO: 34157 - DNA, 25 bp, Artificial
  probe
  misc_feature (1)..(25): SEQ ID NO: 4814; WAN0249U6_at; Start 204; Stop 228
cctcacaggcaggttttatctgtat

SEQ ID NO: 34158 - DNA, 25 bp, Artificial
  probe
  misc_feature (1)..(25): SEQ ID NO: 4814; WAN0249U6_at; Start 35; Stop 59
gtgaaataggatacgaacaaattga

SEQ ID NO: 34159 - DNA, 25 bp, Artificial
  probe
  misc_feature (1)..(25): SEQ ID NO: 4814; WAN0249U6_at; Start 198; Stop 222
acccaccctcacaggcaggttttat

SEQ ID NO: 34160 - DNA, 25 bp, Artificial
  probe
  misc_feature (1)..(25): SEQ ID NO: 4814; WAN0249U6_at; Start 61; Stop 85
taggaaaatcaaatgaatttataga

SEQ ID NO: 34161 - DNA, 25 bp, Artificial
  probe
  misc_feature (1)..(25): SEQ ID NO: 4814; WAN0249U6_at; Start 164; Stop 188
tactatactaaaacgagtagcttga

SEQ ID NO: 34162 - DNA, 25 bp, Artificial
  probe
  misc_feature (1)..(25): SEQ ID NO: 4814; WAN0249U6_at; Start 212; Stop 236
gcaggttttatctgtattattcagc

SEQ ID NO: 34163 - DNA, 25 bp, Artificial
  probe
  misc_feature (1)..(25): SEQ ID NO: 4814; WAN0249U6_at; Start 39; Stop 63
aataggatacgaacaaattgattag

SEQ ID NO: 34164 - DNA, 25 bp, Artificial
  probe
  misc_feature (1)..(25): SEQ ID NO: 4814; WAN0249U6_at; Start 209; Stop 233
caggcaggttttatctgtattattc

SEQ ID NO: 34165 - DNA, 25 bp, Artificial
  probe
  misc_feature (1)..(25): SEQ ID NO: 4814; WAN0249U6_at; Start 33; Stop 57
gagtgaaataggatacgaacaaatt

SEQ ID NO: 34166 - DNA, 25 bp, Artificial
  probe
  misc_feature (1)..(25): SEQ ID NO: 4814; WAN0249U6_at; Start 43; Stop 67
ggatacgaacaaattgattaggaaa

SEQ ID NO: 34167 - DNA, 25 bp, Artificial
  probe
  misc_feature (1)..(25): SEQ ID NO: 4814; WAN0249U6_at; Start 167; Stop 191
tatactaaaacgagtagcttgaaat

SEQ ID NO: 34168 - DNA, 25 bp, Artificial
  probe
  misc_feature (1)..(25): SEQ ID NO: 4814; WAN0249U6_at; Start 139; Stop 163
gcattgtgctagtctagattcagtt

SEQ ID NO: 34169 - DNA, 25 bp, Artificial
  probe
  misc_feature (1)..(25): SEQ ID NO: 4814; WAN0249U6_at; Start 143; Stop 167
tgtgctagtctagattcagtttact

SEQ ID NO: 34170 - DNA, 25 bp, Artificial
  probe
  misc_feature (1)..(25): SEQ ID NO: 4814; WAN0249U6_at; Start 172; Stop 196
taaaacgagtagcttgaaatcaaaa

SEQ ID NO: 34171 - DNA, 25 bp, Artificial
  probe
  misc_feature (1)..(25): SEQ ID NO: 4814; WAN0249U6_at; Start 163; Stop 187
ttactatactaaaacgagtagcttg

SEQ ID NO: 34172 - DNA, 25 bp, Artificial
  probe
  misc_feature (1)..(25): SEQ ID NO: 4814; WAN0249U6_at; Start 201; Stop 225
caccctcacaggcaggttttatctg

SEQ ID NO: 34173 - DNA, 25 bp, Artificial
  probe
  misc_feature (1)..(25): SEQ ID NO: 4814; WAN0249U6_at; Start 52; Stop 76
caaattgattaggaaaatcaaatga

SEQ ID NO: 34174 - DNA, 25 bp, Artificial
  probe
  misc_feature (1)..(25): SEQ ID NO: 4814; WAN0249U6_at; Start 48; Stop 72
cgaacaaattgattaggaaaatcaa

SEQ ID NO: 34175 - DNA, 25 bp, Artificial
  probe
  misc_feature (1)..(25): SEQ ID NO: 4814; WAN0249U6_at; Start 178; Stop 202
gagtagcttgaaatcaaaaaaccca

SEQ ID NO: 34176 - DNA, 25 bp, Artificial
  probe
  misc_feature (1)..(25): SEQ ID NO: 4814; WAN0249U6_at; Start 137; Stop 161
cagcattgtgctagtctagattcag

SEQ ID NO: 34177 - DNA, 25 bp, Artificial
  probe
  misc_feature (1)..(25): SEQ ID NO: 4814; WAN0249U6_at; Start 202; Stop 226
accctcacaggcaggttttatctgt

SEQ ID NO: 34178 - DNA, 25 bp, Artificial
  probe
  misc_feature (1)..(25): SEQ ID NO: 4814; WAN0249U6_at; Start 216; Stop 240
gttttatctgtattattcagctaga

SEQ ID NO: 34179 - DNA, 25 bp, Artificial
  probe
  misc_feature (1)..(25): SEQ ID NO: 4814; WAN0249U6_at; Start 186; Stop 210
tgaaatcaaaaaacccaccctcaca

SEQ ID NO: 34180 - DNA, 25 bp, Artificial
  probe
  misc_feature (1)..(25): SEQ ID NO: 4814; WAN0249U6_at; Start 41; Stop 65
taggatacgaacaaattgattagga

SEQ ID NO: 34181 - DNA, 25 bp, Artificial
  probe
  misc_feature (1)..(25): SEQ ID NO: 4814; WAN0249U6_at; Start 207; Stop 231
cacaggcaggttttatctgtattat

SEQ ID NO: 34182 - DNA, 25 bp, Artificial
  probe
  misc_feature (1)..(25): SEQ ID NO: 4814; WAN0249U6_at; Start 46; Stop 70
tacgaacaaattgattaggaaaatc

SEQ ID NO: 34183 - DNA, 25 bp, Artificial
  probe
  misc_feature (1)..(25): SEQ ID NO: 4814; WAN0249U6_at; Start 206; Stop 230
tcacaggcaggttttatctgtatta

SEQ ID NO: 34184 - DNA, 25 bp, Artificial
  probe
  misc_feature (1)..(25): SEQ ID NO: 4814; WAN0249U6_at; Start 165; Stop 189
actatactaaaacgagtagcttgaa

SEQ ID NO: 34185 - DNA, 25 bp, Artificial
  probe
  misc_feature (1)..(25): SEQ ID NO: 4814; WAN0249U6_at; Start 144; Stop 168
gtgctagtctagattcagtttacta

SEQ ID NO: 34186 - DNA, 25 bp, Artificial
  probe
  misc_feature (1)..(25): SEQ ID NO: 4814; WAN0249U6_at; Start 215; Stop 239
ggttttatctgtattattcagctag

SEQ ID NO: 34187 - DNA, 25 bp, Artificial
  probe
  misc_feature (1)..(25): SEQ ID NO: 545; WAN0249U7_at; Start 61; Stop 85
gctgtttgctttctatctccccttt

SEQ ID NO: 34188 - DNA, 25 bp, Artificial
  probe
  misc_feature (1)..(25): SEQ ID NO: 545; WAN0249U7_at; Start 48; Stop 72
cattgatttcaaggctgtttgcttt

SEQ ID NO: 34189 - DNA, 25 bp, Artificial
  probe
  misc_feature (1)..(25): SEQ ID NO: 545; WAN0249U7_at; Start 231; Stop 255
gggcaaggcggcactgacctagttt

SEQ ID NO: 34190 - DNA, 25 bp, Artificial
  probe
  misc_feature (1)..(25): SEQ ID NO: 545; WAN0249U7_at; Start 216; Stop 240
agtaacctagacttagggcaaggcg

SEQ ID NO: 34191 - DNA, 25 bp, Artificial
  probe
  misc_feature (1)..(25): SEQ ID NO: 545; WAN0249U7_at; Start 4; Stop 28
cagtctcttttgaggggctgattca

SEQ ID NO: 34192 - DNA, 25 bp, Artificial
  probe
  misc_feature (1)..(25): SEQ ID NO: 545; WAN0249U7_at; Start 46; Stop 70
aacattgatttcaaggctgtttgct

SEQ ID NO: 34193 - DNA, 25 bp, Artificial
  probe
  misc_feature (1)..(25): SEQ ID NO: 545; WAN0249U7_at; Start 214; Stop 238
tcagtaacctagacttagggcaagg

SEQ ID NO: 34194 - DNA, 25 bp, Artificial
  probe
  misc_feature (1)..(25): SEQ ID NO: 545; WAN0249U7_at; Start 207; Stop 231
gaccaagtcagtaacctagacttag

SEQ ID NO: 34195 - DNA, 25 bp, Artificial
  probe
  misc_feature (1)..(25): SEQ ID NO: 545; WAN0249U7_at; Start 56; Stop 80
tcaaggctgtttgctttctatctcc

SEQ ID NO: 34196 - DNA, 25 bp, Artificial
  probe
  misc_feature (1)..(25): SEQ ID NO: 545; WAN0249U7_at; Start 204; Stop 228
actgaccaagtcagtaacctagact

SEQ ID NO: 34197 - DNA, 25 bp, Artificial
  probe
  misc_feature (1)..(25): SEQ ID NO: 545; WAN0249U7_at; Start 223; Stop 247
tagacttagggcaaggcggcactga

SEQ ID NO: 34198 - DNA, 25 bp, Artificial
  probe
  misc_feature (1)..(25): SEQ ID NO: 545; WAN0249U7_at; Start 52; Stop 76
gatttcaaggctgtttgctttctat

SEQ ID NO: 34199 - DNA, 25 bp, Artificial
  probe
  misc_feature (1)..(25): SEQ ID NO: 545; WAN0249U7_at; Start 234; Stop 258
caaggcggcactgacctagtttgaa

SEQ ID NO: 34200 - DNA, 25 bp, Artificial
  probe
  misc_feature (1)..(25): SEQ ID NO: 545; WAN0249U7_at; Start 215; Stop 239
cagtaacctagacttagggcaaggc

SEQ ID NO: 34201 - DNA, 25 bp, Artificial
  probe
  misc_feature (1)..(25): SEQ ID NO: 545; WAN0249U7_at; Start 197; Stop 221
ctatagaactgaccaagtcagtaac

SEQ ID NO: 34202 - DNA, 25 bp, Artificial
  probe
  misc_feature (1)..(25): SEQ ID NO: 545; WAN0249U7_at; Start 236; Stop 260
aggcggcactgacctagtttgaaga

SEQ ID NO: 34203 - DNA, 25 bp, Artificial
  probe
  misc_feature (1)..(25): SEQ ID NO: 545; WAN0249U7_at; Start 238; Stop 262
gcggcactgacctagtttgaagaga

SEQ ID NO: 34204 - DNA, 25 bp, Artificial
  probe
  misc_feature (1)..(25): SEQ ID NO: 545; WAN0249U7_at; Start 186; Stop 210
gtttcagtctactatagaactgacc

SEQ ID NO: 34205 - DNA, 25 bp, Artificial
  probe
  misc_feature (1)..(25): SEQ ID NO: 545; WAN0249U7_at; Start 224; Stop 248
agacttagggcaaggcggcactgac

SEQ ID NO: 34206 - DNA, 25 bp, Artificial
  probe
  misc_feature (1)..(25): SEQ ID NO: 545; WAN0249U7_at; Start 194; Stop 218
ctactatagaactgaccaagtcagt

SEQ ID NO: 34207 - DNA, 25 bp, Artificial
  probe
  misc_feature (1)..(25): SEQ ID NO: 545; WAN0249U7_at; Start 189; Stop 213
tcagtctactatagaactgaccaag

SEQ ID NO: 34208 - DNA, 25 bp, Artificial
  probe
  misc_feature (1)..(25): SEQ ID NO: 545; WAN0249U7_at; Start 219; Stop 243
aacctagacttagggcaaggcggca

SEQ ID NO: 34209 - DNA, 25 bp, Artificial
  probe
  misc_feature (1)..(25): SEQ ID NO: 545; WAN0249U7_at; Start 212; Stop 236
agtcagtaacctagacttagggcaa

SEQ ID NO: 34210 - DNA, 25 bp, Artificial
  probe
  misc_feature (1)..(25): SEQ ID NO: 545; WAN0249U7_at; Start 184; Stop 208
tagtttcagtctactatagaactga

SEQ ID NO: 34211 - DNA, 25 bp, Artificial
  probe
  misc_feature (1)..(25): SEQ ID NO: 545; WAN0249U7_at; Start 218; Stop 242
taacctagacttagggcaaggcggc

SEQ ID NO: 34212 - DNA, 25 bp, Artificial
  probe
  misc_feature (1)..(25): SEQ ID NO: 545; WAN0249U7_at; Start 233; Stop 257
gcaaggcggcactgacctagtttga

SEQ ID NO: 34213 - DNA, 25 bp, Artificial
  probe
  misc_feature (1)..(25): SEQ ID NO: 545; WAN0249U7_at; Start 58; Stop 82
aaggctgtttgctttctatctcccc

SEQ ID NO: 34214 - DNA, 25 bp, Artificial
  probe
  misc_feature (1)..(25): SEQ ID NO: 545; WAN0249U7_at; Start 20; Stop 44
gctgattcaggttcataatcgcagt

SEQ ID NO: 34215 - DNA, 25 bp, Artificial
  probe
  misc_feature (1)..(25): SEQ ID NO: 545; WAN0249U7_at; Start 191; Stop 215
agtctactatagaactgaccaagtc

SEQ ID NO: 34216 - DNA, 25 bp, Artificial
  probe
  misc_feature (1)..(25): SEQ ID NO: 545; WAN0249U7_at; Start 193; Stop 217
tctactatagaactgaccaagtcag

SEQ ID NO: 34217 - DNA, 25 bp, Artificial
  probe
  misc_feature (1)..(25): SEQ ID NO: 545; WAN0249U7_at; Start 210; Stop 234
caagtcagtaacctagacttagggc

SEQ ID NO: 34218 - DNA, 25 bp, Artificial
  probe
  misc_feature (1)..(25): SEQ ID NO: 545; WAN0249U7_at; Start 225; Stop 249
gacttagggcaaggcggcactgacc

SEQ ID NO: 34219 - DNA, 25 bp, Artificial
  probe
  misc_feature (1)..(25): SEQ ID NO: 545; WAN0249U7_at; Start 18; Stop 42
gggctgattcaggttcataatcgca

SEQ ID NO: 34220 - DNA, 25 bp, Artificial
  probe
  misc_feature (1)..(25): SEQ ID NO: 545; WAN0249U7_at; Start 235; Stop 259
aaggcggcactgacctagtttgaag

SEQ ID NO: 34221 - DNA, 25 bp, Artificial
  probe
  misc_feature (1)..(25): SEQ ID NO: 3225; WAN0249U8_at; Start 72; Stop 96
aatggttggtccgtagagacttata

SEQ ID NO: 34222 - DNA, 25 bp, Artificial
  probe
  misc_feature (1)..(25): SEQ ID NO: 3225; WAN0249U8_at; Start 76; Stop 100
gttggtccgtagagacttatactct

SEQ ID NO: 34223 - DNA, 25 bp, Artificial
  probe
  misc_feature (1)..(25): SEQ ID NO: 3225; WAN0249U8_at; Start 69; Stop 93
gataatggttggtccgtagagactt

SEQ ID NO: 34224 - DNA, 25 bp, Artificial
  probe
  misc_feature (1)..(25): SEQ ID NO: 3225; WAN0249U8_at; Start 22; Stop 46
aaagaagttgagttcagtctgtctc

SEQ ID NO: 34225 - DNA, 25 bp, Artificial
  probe
  misc_feature (1)..(25): SEQ ID NO: 3225; WAN0249U8_at; Start 4; Stop 28
tgctgatacgacactaaaaaagaag

SEQ ID NO: 34226 - DNA, 25 bp, Artificial
  probe
  misc_feature (1)..(25): SEQ ID NO: 3225; WAN0249U8_at; Start 79; Stop 103
ggtccgtagagacttatactcttcg

SEQ ID NO: 34227 - DNA, 25 bp, Artificial
  probe
  misc_feature (1)..(25): SEQ ID NO: 3225; WAN0249U8_at; Start 70; Stop 94
ataatggttggtccgtagagactta

SEQ ID NO: 34228 - DNA, 25 bp, Artificial
  probe
  misc_feature (1)..(25): SEQ ID NO: 3225; WAN0249U8_at; Start 7; Stop 31
tgatacgacactaaaaaagaagttg

SEQ ID NO: 34229 - DNA, 25 bp, Artificial
  probe
  misc_feature (1)..(25): SEQ ID NO: 3225; WAN0249U8_at; Start 52; Stop 76
cttttttgttactacaggataatgg

SEQ ID NO: 34230 - DNA, 25 bp, Artificial
  probe
  misc_feature (1)..(25): SEQ ID NO: 3225; WAN0249U8_at; Start 9; Stop 33
atacgacactaaaaaagaagttgag

SEQ ID NO: 34231 - DNA, 25 bp, Artificial
  probe
  misc_feature (1)..(25): SEQ ID NO: 3225; WAN0249U8_at; Start 60; Stop 84
ttactacaggataatggttggtccg

SEQ ID NO: 34232 - DNA, 25 bp, Artificial
  probe
  misc_feature (1)..(25): SEQ ID NO: 3225; WAN0249U8_at; Start 59; Stop 83
gttactacaggataatggttggtcc

SEQ ID NO: 34233 - DNA, 25 bp, Artificial
  probe
  misc_feature (1)..(25): SEQ ID NO: 3225; WAN0249U8_at; Start 8; Stop 32
gatacgacactaaaaaagaagttga

SEQ ID NO: 34234 - DNA, 25 bp, Artificial
  probe
  misc_feature (1)..(25): SEQ ID NO: 3225; WAN0249U8_at; Start 64; Stop 88
tacaggataatggttggtccgtaga

SEQ ID NO: 34235 - DNA, 25 bp, Artificial
  probe
  misc_feature (1)..(25): SEQ ID NO: 3225; WAN0249U8_at; Start 58; Stop 82
tgttactacaggataatggttggtc

SEQ ID NO: 34236 - DNA, 25 bp, Artificial
  probe
  misc_feature (1)..(25): SEQ ID NO: 3225; WAN0249U8_at; Start 17; Stop 41
ctaaaaaagaagttgagttcagtct

SEQ ID NO: 34237 - DNA, 25 bp, Artificial
  probe
  misc_feature (1)..(25): SEQ ID NO: 3225; WAN0249U8_at; Start 1; Stop 25
cattgctgatacgacactaaaaaag

SEQ ID NO: 34238 - DNA, 25 bp, Artificial
  probe
  misc_feature (1)..(25): SEQ ID NO: 3225; WAN0249U8_at; Start 67; Stop 91
aggataatggttggtccgtagagac

SEQ ID NO: 34239 - DNA, 25 bp, Artificial
  probe
  misc_feature (1)..(25): SEQ ID NO: 3225; WAN0249U8_at; Start 13; Stop 37
gacactaaaaaagaagttgagttca

SEQ ID NO: 34240 - DNA, 25 bp, Artificial
  probe
  misc_feature (1)..(25): SEQ ID NO: 3225; WAN0249U8_at; Start 15; Stop 39
cactaaaaaagaagttgagttcagt

SEQ ID NO: 34241 - DNA, 25 bp, Artificial
  probe
  misc_feature (1)..(25): SEQ ID NO: 3225; WAN0249U8_at; Start 80; Stop 104
gtccgtagagacttatactcttcga

SEQ ID NO: 34242 - DNA, 25 bp, Artificial
  probe
  misc_feature (1)..(25): SEQ ID NO: 3225; WAN0249U8_at; Start 231; Stop 255
tagaattagaaaatcggaggaaata

SEQ ID NO: 34243 - DNA, 25 bp, Artificial
  probe
  misc_feature (1)..(25): SEQ ID NO: 3225; WAN0249U8_at; Start 74; Stop 98
tggttggtccgtagagacttatact

SEQ ID NO: 34244 - DNA, 25 bp, Artificial
  probe
  misc_feature (1)..(25): SEQ ID NO: 3225; WAN0249U8_at; Start 62; Stop 86
actacaggataatggttggtccgta

SEQ ID NO: 34245 - DNA, 25 bp, Artificial
  probe
  misc_feature (1)..(25): SEQ ID NO: 3225; WAN0249U8_at; Start 68; Stop 92
ggataatggttggtccgtagagact

SEQ ID NO: 34246 - DNA, 25 bp, Artificial
  probe
  misc_feature (1)..(25): SEQ ID NO: 3225; WAN0249U8_at; Start 23; Stop 47
aagaagttgagttcagtctgtctca

SEQ ID NO: 34247 - DNA, 25 bp, Artificial
  probe
  misc_feature (1)..(25): SEQ ID NO: 3225; WAN0249U8_at; Start 5; Stop 29
gctgatacgacactaaaaaagaagt

SEQ ID NO: 34248 - DNA, 25 bp, Artificial
  probe
  misc_feature (1)..(25): SEQ ID NO: 3225; WAN0249U8_at; Start 56; Stop 80
tttgttactacaggataatggttgg

SEQ ID NO: 34249 - DNA, 25 bp, Artificial
  probe
  misc_feature (1)..(25): SEQ ID NO: 3225; WAN0249U8_at; Start 75; Stop 99
ggttggtccgtagagacttatactc

SEQ ID NO: 34250 - DNA, 25 bp, Artificial
  probe
  misc_feature (1)..(25): SEQ ID NO: 3225; WAN0249U8_at; Start 18; Stop 42
taaaaaagaagttgagttcagtctg

SEQ ID NO: 34251 - DNA, 25 bp, Artificial
  probe
  misc_feature (1)..(25): SEQ ID NO: 3225; WAN0249U8_at; Start 20; Stop 44
aaaaagaagttgagttcagtctgtc

SEQ ID NO: 34252 - DNA, 25 bp, Artificial
  probe
  misc_feature (1)..(25): SEQ ID NO: 3225; WAN0249U8_at; Start 78; Stop 102
tggtccgtagagacttatactcttc

SEQ ID NO: 34253 - DNA, 25 bp, Artificial
  probe
  misc_feature (1)..(25): SEQ ID NO: 3225; WAN0249U8_at; Start 61; Stop 85
tactacaggataatggttggtccgt

SEQ ID NO: 34254 - DNA, 25 bp, Artificial
  probe
  misc_feature (1)..(25): SEQ ID NO: 3225; WAN0249U8_at; Start 66; Stop 90
caggataatggttggtccgtagaga

SEQ ID NO: 34255 - DNA, 25 bp, Artificial
  probe
  misc_feature (1)..(25): SEQ ID NO: 3643; WAN0249U9_at; Start 348; Stop 372
tagtctagtattagtaagcagactc

SEQ ID NO: 34256 - DNA, 25 bp, Artificial
  probe
  misc_feature (1)..(25): SEQ ID NO: 3643; WAN0249U9_at; Start 64; Stop 88
tacaattctattctatagtgtattg

SEQ ID NO: 34257 - DNA, 25 bp, Artificial
  probe
  misc_feature (1)..(25): SEQ ID NO: 3643; WAN0249U9_at; Start 67; Stop 91
aattctattctatagtgtattgaat

SEQ ID NO: 34258 - DNA, 25 bp, Artificial
  probe
  misc_feature (1)..(25): SEQ ID NO: 3643; WAN0249U9_at; Start 215; Stop 239
catcagacaaaatagaacgatttga

SEQ ID NO: 34259 - DNA, 25 bp, Artificial
  probe
  misc_feature (1)..(25): SEQ ID NO: 3643; WAN0249U9_at; Start 360; Stop 384
agtaagcagactcaaaccttagaaa

SEQ ID NO: 34260 - DNA, 25 bp, Artificial
  probe
  misc_feature (1)..(25): SEQ ID NO: 3643; WAN0249U9_at; Start 352; Stop 376
ctagtattagtaagcagactcaaac

SEQ ID NO: 34261 - DNA, 25 bp, Artificial
  probe
  misc_feature (1)..(25): SEQ ID NO: 3643; WAN0249U9_at; Start 66; Stop 90
caattctattctatagtgtattgaa

SEQ ID NO: 34262 - DNA, 25 bp, Artificial
  probe
  misc_feature (1)..(25): SEQ ID NO: 3643; WAN0249U9_at; Start 351; Stop 375
tctagtattagtaagcagactcaaa

SEQ ID NO: 34263 - DNA, 25 bp, Artificial
  probe
  misc_feature (1)..(25): SEQ ID NO: 3643; WAN0249U9_at; Start 359; Stop 383
tagtaagcagactcaaaccttagaa

SEQ ID NO: 34264 - DNA, 25 bp, Artificial
  probe
  misc_feature (1)..(25): SEQ ID NO: 3643; WAN0249U9_at; Start 209; Stop 233
tttgcccatcagacaaaatagaacg

SEQ ID NO: 34265 - DNA, 25 bp, Artificial
  probe
  misc_feature (1)..(25): SEQ ID NO: 3643; WAN0249U9_at; Start 364; Stop 388
agcagactcaaaccttagaaaatct

SEQ ID NO: 34266 - DNA, 25 bp, Artificial
  probe
  misc_feature (1)..(25): SEQ ID NO: 3643; WAN0249U9_at; Start 353; Stop 377
tagtattagtaagcagactcaaacc

SEQ ID NO: 34267 - DNA, 25 bp, Artificial
  probe
  misc_feature (1)..(25): SEQ ID NO: 3643; WAN0249U9_at; Start 354; Stop 378
agtattagtaagcagactcaaacct

SEQ ID NO: 34268 - DNA, 25 bp, Artificial
  probe
  misc_feature (1)..(25): SEQ ID NO: 3643; WAN0249U9_at; Start 349; Stop 373
agtctagtattagtaagcagactca

SEQ ID NO: 34269 - DNA, 25 bp, Artificial
  probe
  misc_feature (1)..(25): SEQ ID NO: 3643; WAN0249U9_at; Start 363; Stop 387
aagcagactcaaaccttagaaaatc

SEQ ID NO: 34270 - DNA, 25 bp, Artificial
  probe
  misc_feature (1)..(25): SEQ ID NO: 3643; WAN0249U9_at; Start 350; Stop 374
gtctagtattagtaagcagactcaa

SEQ ID NO: 34271 - DNA, 25 bp, Artificial
  probe
  misc_feature (1)..(25): SEQ ID NO: 3643; WAN0249U9_at; Start 356; Stop 380
tattagtaagcagactcaaacctta

SEQ ID NO: 34272 - DNA, 25 bp, Artificial
  probe
  misc_feature (1)..(25): SEQ ID NO: 3643; WAN0249U9_at; Start 346; Stop 370
tttagtctagtattagtaagcagac

SEQ ID NO: 34273 - DNA, 25 bp, Artificial
  probe
  misc_feature (1)..(25): SEQ ID NO: 3643; WAN0249U9_at; Start 357; Stop 381
attagtaagcagactcaaaccttag

SEQ ID NO: 34274 - DNA, 25 bp, Artificial
  probe
  misc_feature (1)..(25): SEQ ID NO: 3643; WAN0249U9_at; Start 347; Stop 371
ttagtctagtattagtaagcagact

SEQ ID NO: 34275 - DNA, 25 bp, Artificial
  probe
  misc_feature (1)..(25): SEQ ID NO: 3643; WAN0249U9_at; Start 362; Stop 386
taagcagactcaaaccttagaaaat

SEQ ID NO: 34276 - DNA, 25 bp, Artificial
  probe
  misc_feature (1)..(25): SEQ ID NO: 3643; WAN0249U9_at; Start 365; Stop 389
gcagactcaaaccttagaaaatctt

SEQ ID NO: 34277 - DNA, 25 bp, Artificial
  probe
  misc_feature (1)..(25): SEQ ID NO: 3643; WAN0249U9_at; Start 211; Stop 235
tgcccatcagacaaaatagaacgat

SEQ ID NO: 34278 - DNA, 25 bp, Artificial
  probe
  misc_feature (1)..(25): SEQ ID NO: 3643; WAN0249U9_at; Start 355; Stop 379
gtattagtaagcagactcaaacctt

SEQ ID NO: 34279 - DNA, 25 bp, Artificial
  probe
  misc_feature (1)..(25): SEQ ID NO: 3643; WAN0249U9_at; Start 358; Stop 382
ttagtaagcagactcaaaccttaga

SEQ ID NO: 34280 - DNA, 25 bp, Artificial
  probe
  misc_feature (1)..(25): SEQ ID NO: 3643; WAN0249U9_at; Start 65; Stop 89
acaattctattctatagtgtattga

SEQ ID NO: 34281 - DNA, 25 bp, Artificial
  probe
  misc_feature (1)..(25): SEQ ID NO: 3643; WAN0249U9_at; Start 212; Stop 236
gcccatcagacaaaatagaacgatt

SEQ ID NO: 34282 - DNA, 25 bp, Artificial
  probe
  misc_feature (1)..(25): SEQ ID NO: 3643; WAN0249U9_at; Start 208; Stop 232
atttgcccatcagacaaaatagaac

SEQ ID NO: 34283 - DNA, 25 bp, Artificial
  probe
  misc_feature (1)..(25): SEQ ID NO: 3643; WAN0249U9_at; Start 361; Stop 385
gtaagcagactcaaaccttagaaaa

SEQ ID NO: 34284 - DNA, 25 bp, Artificial
  probe
  misc_feature (1)..(25): SEQ ID NO: 3643; WAN0249U9_at; Start 213; Stop 237
cccatcagacaaaatagaacgattt

SEQ ID NO: 34285 - DNA, 25 bp, Artificial
  probe
  misc_feature (1)..(25): SEQ ID NO: 3643; WAN0249U9_at; Start 210; Stop 234
ttgcccatcagacaaaatagaacga

SEQ ID NO: 34286 - DNA, 25 bp, Artificial
  probe
  misc_feature (1)..(25): SEQ ID NO: 3643; WAN0249U9_at; Start 214; Stop 238
ccatcagacaaaatagaacgatttg

SEQ ID NO: 34287 - DNA, 25 bp, Artificial
  probe
  misc_feature (1)..(25): SEQ ID NO: 3643; WAN0249U9_at; Start 216; Stop 240
atcagacaaaatagaacgatttgaa

SEQ ID NO: 34288 - DNA, 25 bp, Artificial
  probe
  misc_feature (1)..(25): SEQ ID NO: 4602; WAN0249UA_at; Start 136; Stop 160
ggatcctttagttagattcaatcaa

SEQ ID NO: 34289 - DNA, 25 bp, Artificial
  probe
  misc_feature (1)..(25): SEQ ID NO: 4602; WAN0249UA_at; Start 157; Stop 181
tcaatctataacacaacaacataat

SEQ ID NO: 34290 - DNA, 25 bp, Artificial
  probe
  misc_feature (1)..(25): SEQ ID NO: 4602; WAN0249UA_at; Start 391; Stop 415
cacttaagaaattttcgtggtcgat

SEQ ID NO: 34291 - DNA, 25 bp, Artificial
  probe
  misc_feature (1)..(25): SEQ ID NO: 4602; WAN0249UA_at; Start 330; Stop 354
catcttgaattgtcaaattaagtgc

SEQ ID NO: 34292 - DNA, 25 bp, Artificial
  probe
  misc_feature (1)..(25): SEQ ID NO: 4602; WAN0249UA_at; Start 367; Stop 391
tagcatacttcataaggcgttttcc

SEQ ID NO: 34293 - DNA, 25 bp, Artificial
  probe
  misc_feature (1)..(25): SEQ ID NO: 4602; WAN0249UA_at; Start 117; Stop 141
tagttctagtaattgaataggatcc

SEQ ID NO: 34294 - DNA, 25 bp, Artificial
  probe
  misc_feature (1)..(25): SEQ ID NO: 4602; WAN0249UA_at; Start 79; Stop 103
aatagttgctcatctgtgagctgac

SEQ ID NO: 34295 - DNA, 25 bp, Artificial
  probe
  misc_feature (1)..(25): SEQ ID NO: 4602; WAN0249UA_at; Start 406; Stop 430
cgtggtcgattatttagaacctgta

SEQ ID NO: 34296 - DNA, 25 bp, Artificial
  probe
  misc_feature (1)..(25): SEQ ID NO: 4602; WAN0249UA_at; Start 75; Stop 99
ccaaaatagttgctcatctgtgagc

SEQ ID NO: 34297 - DNA, 25 bp, Artificial
  probe
  misc_feature (1)..(25): SEQ ID NO: 4602; WAN0249UA_at; Start 150; Stop 174
gattcaatcaatctataacacaaca

SEQ ID NO: 34298 - DNA, 25 bp, Artificial
  probe
  misc_feature (1)..(25): SEQ ID NO: 4602; WAN0249UA_at; Start 88; Stop 112
tcatctgtgagctgaccttgagtat

SEQ ID NO: 34299 - DNA, 25 bp, Artificial
  probe
  misc_feature (1)..(25): SEQ ID NO: 4602; WAN0249UA_at; Start 101; Stop 125
gaccttgagtatgtgatagttctag

SEQ ID NO: 34300 - DNA, 25 bp, Artificial
  probe
  misc_feature (1)..(25): SEQ ID NO: 4602; WAN0249UA_at; Start 376; Stop 400
tcataaggcgttttccacttaagaa

SEQ ID NO: 34301 - DNA, 25 bp, Artificial
  probe
  misc_feature (1)..(25): SEQ ID NO: 4602; WAN0249UA_at; Start 412; Stop 436
cgattatttagaacctgtattcaca

SEQ ID NO: 34302 - DNA, 25 bp, Artificial
  probe
  misc_feature (1)..(25): SEQ ID NO: 4602; WAN0249UA_at; Start 181; Stop 205
taatacttttaggataacttatcaa

SEQ ID NO: 34303 - DNA, 25 bp, Artificial
  probe
  misc_feature (1)..(25): SEQ ID NO: 4602; WAN0249UA_at; Start 342; Stop 366
tcaaattaagtgcataactttcccg

SEQ ID NO: 34304 - DNA, 25 bp, Artificial
  probe
  misc_feature (1)..(25): SEQ ID NO: 4602; WAN0249UA_at; Start 369; Stop 393
gcatacttcataaggcgttttccac

SEQ ID NO: 34305 - DNA, 25 bp, Artificial
  probe
  misc_feature (1)..(25): SEQ ID NO: 4602; WAN0249UA_at; Start 351; Stop 375
gtgcataactttcccgtagcatact

SEQ ID NO: 34306 - DNA, 25 bp, Artificial
  probe
  misc_feature (1)..(25): SEQ ID NO: 4602; WAN0249UA_at; Start 54; Stop 78
taaatttagtagacattgtaaccaa

SEQ ID NO: 34307 - DNA, 25 bp, Artificial
  probe
  misc_feature (1)..(25): SEQ ID NO: 4602; WAN0249UA_at; Start 433; Stop 457
cacaaaaaaatgttaagctagagtt

SEQ ID NO: 34308 - DNA, 25 bp, Artificial
  probe
  misc_feature (1)..(25): SEQ ID NO: 4602; WAN0249UA_at; Start 72; Stop 96
taaccaaaatagttgctcatctgtg

SEQ ID NO: 34309 - DNA, 25 bp, Artificial
  probe
  misc_feature (1)..(25): SEQ ID NO: 4602; WAN0249UA_at; Start 170; Stop 194
caacaacataataatacttttagga

SEQ ID NO: 34310 - DNA, 25 bp, Artificial
  probe
  misc_feature (1)..(25): SEQ ID NO: 4602; WAN0249UA_at; Start 85; Stop 109
tgctcatctgtgagctgaccttgag

SEQ ID NO: 34311 - DNA, 25 bp, Artificial
  probe
  misc_feature (1)..(25): SEQ ID NO: 4602; WAN0249UA_at; Start 361; Stop 385
ttcccgtagcatacttcataaggcg

SEQ ID NO: 34312 - DNA, 25 bp, Artificial
  probe
  misc_feature (1)..(25): SEQ ID NO: 4602; WAN0249UA_at; Start 91; Stop 115
tctgtgagctgaccttgagtatgtg

SEQ ID NO: 34313 - DNA, 25 bp, Artificial
  probe
  misc_feature (1)..(25): SEQ ID NO: 4602; WAN0249UA_at; Start 416; Stop 440
tatttagaacctgtattcacaaaaa

SEQ ID NO: 34314 - DNA, 25 bp, Artificial
  probe
  misc_feature (1)..(25): SEQ ID NO: 4602; WAN0249UA_at; Start 336; Stop 360
gaattgtcaaattaagtgcataact

SEQ ID NO: 34315 - DNA, 25 bp, Artificial
  probe
  misc_feature (1)..(25): SEQ ID NO: 4602; WAN0249UA_at; Start 122; Stop 146
ctagtaattgaataggatcctttag

SEQ ID NO: 34316 - DNA, 25 bp, Artificial
  probe
  misc_feature (1)..(25): SEQ ID NO: 4602; WAN0249UA_at; Start 103; Stop 127
ccttgagtatgtgatagttctagta

SEQ ID NO: 34317 - DNA, 25 bp, Artificial
  probe
  misc_feature (1)..(25): SEQ ID NO: 4602; WAN0249UA_at; Start 348; Stop 372
taagtgcataactttcccgtagcat

SEQ ID NO: 34318 - DNA, 25 bp, Artificial
  probe
  misc_feature (1)..(25): SEQ ID NO: 4602; WAN0249UA_at; Start 364; Stop 388
ccgtagcatacttcataaggcgttt

SEQ ID NO: 34319 - DNA, 25 bp, Artificial
  probe
  misc_feature (1)..(25): SEQ ID NO: 4602; WAN0249UA_at; Start 65; Stop 89
gacattgtaaccaaaatagttgctc

SEQ ID NO: 34320 - DNA, 25 bp, Artificial
  probe
  misc_feature (1)..(25): SEQ ID NO: 4602; WAN0249UA_at; Start 190; Stop 214
taggataacttatcaaatattatag

SEQ ID NO: 34321 - DNA, 25 bp, Artificial
  probe
  misc_feature (1)..(25): SEQ ID NO: 4602; WAN0249UA_at; Start 95; Stop 119
tgagctgaccttgagtatgtgatag

SEQ ID NO: 34322 - DNA, 25 bp, Artificial
  probe
  misc_feature (1)..(25): SEQ ID NO: 4645; WAN0249UB_at; Start 13; Stop 37
atacagataaaacctgcctgtgagg

SEQ ID NO: 34323 - DNA, 25 bp, Artificial
  probe
  misc_feature (1)..(25): SEQ ID NO: 4645; WAN0249UB_at; Start 171; Stop 195
gattttcctaatcaatttgttcgta

SEQ ID NO: 34324 - DNA, 25 bp, Artificial
  probe
  misc_feature (1)..(25): SEQ ID NO: 4645; WAN0249UB_at; Start 1; Stop 25
tctagctgaataatacagataaaac

SEQ ID NO: 34325 - DNA, 25 bp, Artificial
  probe
  misc_feature (1)..(25): SEQ ID NO: 4645; WAN0249UB_at; Start 39; Stop 63
tgggttttttgatttcaagctactc

SEQ ID NO: 34326 - DNA, 25 bp, Artificial
  probe
  misc_feature (1)..(25): SEQ ID NO: 4645; WAN0249UB_at; Start 182; Stop 206
tcaatttgttcgtatcctatttcac

SEQ ID NO: 34327 - DNA, 25 bp, Artificial
  probe
  misc_feature (1)..(25): SEQ ID NO: 4645; WAN0249UB_at; Start 184; Stop 208
aatttgttcgtatcctatttcactc

SEQ ID NO: 34328 - DNA, 25 bp, Artificial
  probe
  misc_feature (1)..(25): SEQ ID NO: 4645; WAN0249UB_at; Start 15; Stop 39
acagataaaacctgcctgtgagggt

SEQ ID NO: 34329 - DNA, 25 bp, Artificial
  probe
  misc_feature (1)..(25): SEQ ID NO: 4645; WAN0249UB_at; Start 49; Stop 73
gatttcaagctactcgttttagtat

SEQ ID NO: 34330 - DNA, 25 bp, Artificial
  probe
  misc_feature (1)..(25): SEQ ID NO: 4645; WAN0249UB_at; Start 31; Stop 55
tgtgagggtgggttttttgatttca

SEQ ID NO: 34331 - DNA, 25 bp, Artificial
  probe
  misc_feature (1)..(25): SEQ ID NO: 4645; WAN0249UB_at; Start 160; Stop 184
taaattcatttgattttcctaatca

SEQ ID NO: 34332 - DNA, 25 bp, Artificial
  probe
  misc_feature (1)..(25): SEQ ID NO: 4645; WAN0249UB_at; Start 58; Stop 82
ctactcgttttagtatagtaaactg

SEQ ID NO: 34333 - DNA, 25 bp, Artificial
  probe
  misc_feature (1)..(25): SEQ ID NO: 4645; WAN0249UB_at; Start 46; Stop 70
tttgatttcaagctactcgttttag

SEQ ID NO: 34334 - DNA, 25 bp, Artificial
  probe
  misc_feature (1)..(25): SEQ ID NO: 4645; WAN0249UB_at; Start 74; Stop 98
agtaaactgaatctagactagcaca

SEQ ID NO: 34335 - DNA, 25 bp, Artificial
  probe
  misc_feature (1)..(25): SEQ ID NO: 4645; WAN0249UB_at; Start 8; Stop 32
gaataatacagataaaacctgcctg

SEQ ID NO: 34336 - DNA, 25 bp, Artificial
  probe
  misc_feature (1)..(25): SEQ ID NO: 4645; WAN0249UB_at; Start 19; Stop 43
ataaaacctgcctgtgagggtgggt

SEQ ID NO: 34337 - DNA, 25 bp, Artificial
  probe
  misc_feature (1)..(25): SEQ ID NO: 4645; WAN0249UB_at; Start 73; Stop 97
tagtaaactgaatctagactagcac

SEQ ID NO: 34338 - DNA, 25 bp, Artificial
  probe
  misc_feature (1)..(25): SEQ ID NO: 4645; WAN0249UB_at; Start 7; Stop 31
tgaataatacagataaaacctgcct

SEQ ID NO: 34339 - DNA, 25 bp, Artificial
  probe
  misc_feature (1)..(25): SEQ ID NO: 4645; WAN0249UB_at; Start 78; Stop 102
aactgaatctagactagcacaatgc

SEQ ID NO: 34340 - DNA, 25 bp, Artificial
  probe
  misc_feature (1)..(25): SEQ ID NO: 4645; WAN0249UB_at; Start 12; Stop 36
aatacagataaaacctgcctgtgag

SEQ ID NO: 34341 - DNA, 25 bp, Artificial
  probe
  misc_feature (1)..(25): SEQ ID NO: 4645; WAN0249UB_at; Start 48; Stop 72
tgatttcaagctactcgttttagta

SEQ ID NO: 34342 - DNA, 25 bp, Artificial
  probe
  misc_feature (1)..(25): SEQ ID NO: 4645; WAN0249UB_at; Start 80; Stop 104
ctgaatctagactagcacaatgctg

SEQ ID NO: 34343 - DNA, 25 bp, Artificial
  probe
  misc_feature (1)..(25): SEQ ID NO: 4645; WAN0249UB_at; Start 14; Stop 38
tacagataaaacctgcctgtgaggg

SEQ ID NO: 34344 - DNA, 25 bp, Artificial
  probe
  misc_feature (1)..(25): SEQ ID NO: 4645; WAN0249UB_at; Start 75; Stop 99
gtaaactgaatctagactagcacaa

SEQ ID NO: 34345 - DNA, 25 bp, Artificial
  probe
  misc_feature (1)..(25): SEQ ID NO: 4645; WAN0249UB_at; Start 16; Stop 40
cagataaaacctgcctgtgagggtg

SEQ ID NO: 34346 - DNA, 25 bp, Artificial
  probe
  misc_feature (1)..(25): SEQ ID NO: 4645; WAN0249UB_at; Start 11; Stop 35
taatacagataaaacctgcctgtga

SEQ ID NO: 34347 - DNA, 25 bp, Artificial
  probe
  misc_feature (1)..(25): SEQ ID NO: 4645; WAN0249UB_at; Start 9; Stop 33
aataatacagataaaacctgcctgt

SEQ ID NO: 34348 - DNA, 25 bp, Artificial
  probe
  misc_feature (1)..(25): SEQ ID NO: 4645; WAN0249UB_at; Start 5; Stop 29
gctgaataatacagataaaacctgc

SEQ ID NO: 34349 - DNA, 25 bp, Artificial
  probe
  misc_feature (1)..(25): SEQ ID NO: 4645; WAN0249UB_at; Start 177; Stop 201
cctaatcaatttgttcgtatcctat

SEQ ID NO: 34350 - DNA, 25 bp, Artificial
  probe
  misc_feature (1)..(25): SEQ ID NO: 4645; WAN0249UB_at; Start 51; Stop 75
tttcaagctactcgttttagtatag

SEQ ID NO: 34351 - DNA, 25 bp, Artificial
  probe
  misc_feature (1)..(25): SEQ ID NO: 4645; WAN0249UB_at; Start 76; Stop 100
taaactgaatctagactagcacaat

SEQ ID NO: 34352 - DNA, 25 bp, Artificial
  probe
  misc_feature (1)..(25): SEQ ID NO: 4645; WAN0249UB_at; Start 54; Stop 78
caagctactcgttttagtatagtaa

SEQ ID NO: 34353 - DNA, 25 bp, Artificial
  probe
  misc_feature (1)..(25): SEQ ID NO: 4645; WAN0249UB_at; Start 10; Stop 34
ataatacagataaaacctgcctgtg

SEQ ID NO: 34354 - DNA, 25 bp, Artificial
  probe
  misc_feature (1)..(25): SEQ ID NO: 4645; WAN0249UB_at; Start 6; Stop 30
ctgaataatacagataaaacctgcc

SEQ ID NO: 34355 - DNA, 25 bp, Artificial
  probe
  misc_feature (1)..(25): SEQ ID NO: 4645; WAN0249UB_at; Start 176; Stop 200
tcctaatcaatttgttcgtatccta

SEQ ID NO: 34356 - DNA, 25 bp, Artificial
  probe
  misc_feature (1)..(25): SEQ ID NO: 5849; WAN0249UC_at; Start 817; Stop 841
ggatccaatcctttcaatcattttg

SEQ ID NO: 34357 - DNA, 25 bp, Artificial
  probe
  misc_feature (1)..(25): SEQ ID NO: 5849; WAN0249UC_at; Start 516; Stop 540
taagtgcgaaggaaatgagctttta

SEQ ID NO: 34358 - DNA, 25 bp, Artificial
  probe
  misc_feature (1)..(25): SEQ ID NO: 5849; WAN0249UC_at; Start 549; Stop 573
tcgttttaaaatactatctcagata

SEQ ID NO: 34359 - DNA, 25 bp, Artificial
  probe
  misc_feature (1)..(25): SEQ ID NO: 5849; WAN0249UC_at; Start 9; Stop 33
cagtctagaagcaagacaaaaactc

SEQ ID NO: 34360 - DNA, 25 bp, Artificial
  probe
  misc_feature (1)..(25): SEQ ID NO: 5849; WAN0249UC_at; Start 633; Stop 657
tggctcattcaatttttcactagaa

SEQ ID NO: 34361 - DNA, 25 bp, Artificial
  probe
  misc_feature (1)..(25): SEQ ID NO: 5849; WAN0249UC_at; Start 695; Stop 719
caaataaattggagcttaacatcta

SEQ ID NO: 34362 - DNA, 25 bp, Artificial
  probe
  misc_feature (1)..(25): SEQ ID NO: 5849; WAN0249UC_at; Start 499; Stop 523
gatagatctctataaaataagtgcg

SEQ ID NO: 34363 - DNA, 25 bp, Artificial
  probe
  misc_feature (1)..(25): SEQ ID NO: 5849; WAN0249UC_at; Start 872; Stop 896
cgtcattaataaagacagatgggaa

SEQ ID NO: 34364 - DNA, 25 bp, Artificial
  probe
  misc_feature (1)..(25): SEQ ID NO: 5849; WAN0249UC_at; Start 568; Stop 592
cagatattcttatatcgacaagaag

SEQ ID NO: 34365 - DNA, 25 bp, Artificial
  probe
  misc_feature (1)..(25): SEQ ID NO: 5849; WAN0249UC_at; Start 584; Stop 608
gacaagaagtttttgagtcattccc

SEQ ID NO: 34366 - DNA, 25 bp, Artificial
  probe
  misc_feature (1)..(25): SEQ ID NO: 5849; WAN0249UC_at; Start 792; Stop 816
aaaggattggatcttgtgtaatgca

SEQ ID NO: 34367 - DNA, 25 bp, Artificial
  probe
  misc_feature (1)..(25): SEQ ID NO: 5849; WAN0249UC_at; Start 779; Stop 803
ctagagtaaaagaaaaggattggat

SEQ ID NO: 34368 - DNA, 25 bp, Artificial
  probe
  misc_feature (1)..(25): SEQ ID NO: 5849; WAN0249UC_at; Start 484; Stop 508
tctaaagagtataatgatagatctc

SEQ ID NO: 34369 - DNA, 25 bp, Artificial
  probe
  misc_feature (1)..(25): SEQ ID NO: 5849; WAN0249UC_at; Start 700; Stop 724
aaattggagcttaacatctatttcc

SEQ ID NO: 34370 - DNA, 25 bp, Artificial
  probe
  misc_feature (1)..(25): SEQ ID NO: 5849; WAN0249UC_at; Start 462; Stop 486
caaggtgtgttgctttttgatttct

SEQ ID NO: 34371 - DNA, 25 bp, Artificial
  probe
  misc_feature (1)..(25): SEQ ID NO: 5849; WAN0249UC_at; Start 831; Stop 855
caatcattttgtccaacttttggag

SEQ ID NO: 34372 - DNA, 25 bp, Artificial
  probe
  misc_feature (1)..(25): SEQ ID NO: 5849; WAN0249UC_at; Start 115; Stop 139
ttatgatattgaggcctttttgccc

SEQ ID NO: 34373 - DNA, 25 bp, Artificial
  probe
  misc_feature (1)..(25): SEQ ID NO: 5849; WAN0249UC_at; Start 404; Stop 428
taagagtagtatttactaaggccca

SEQ ID NO: 34374 - DNA, 25 bp, Artificial
  probe
  misc_feature (1)..(25): SEQ ID NO: 5849; WAN0249UC_at; Start 103; Stop 127
taggatgcctttttatgatattgag

SEQ ID NO: 34375 - DNA, 25 bp, Artificial
  probe
  misc_feature (1)..(25): SEQ ID NO: 5849; WAN0249UC_at; Start 58; Stop 82
ttttctatgataaaaggcatcctat

SEQ ID NO: 34376 - DNA, 25 bp, Artificial
  probe
  misc_feature (1)..(25): SEQ ID NO: 5849; WAN0249UC_at; Start 1; Stop 25
ttgtttatcagtctagaagcaagac

SEQ ID NO: 34377 - DNA, 25 bp, Artificial
  probe
  misc_feature (1)..(25): SEQ ID NO: 5849; WAN0249UC_at; Start 511; Stop 535
taaaataagtgcgaaggaaatgagc

SEQ ID NO: 34378 - DNA, 25 bp, Artificial
  probe
  misc_feature (1)..(25): SEQ ID NO: 5849; WAN0249UC_at; Start 840; Stop 864
tgtccaacttttggaggttcctaca

SEQ ID NO: 34379 - DNA, 25 bp, Artificial
  probe
  misc_feature (1)..(25): SEQ ID NO: 5849; WAN0249UC_at; Start 598; Stop 622
gagtcattccctcatcatacatatt

SEQ ID NO: 34380 - DNA, 25 bp, Artificial
  probe
  misc_feature (1)..(25): SEQ ID NO: 5849; WAN0249UC_at; Start 89; Stop 113
ttttgaacacctgataggatgcctt

SEQ ID NO: 34381 - DNA, 25 bp, Artificial
  probe
  misc_feature (1)..(25): SEQ ID NO: 5849; WAN0249UC_at; Start 388; Stop 412
tcactatagtttaatttaagagtag

SEQ ID NO: 34382 - DNA, 25 bp, Artificial
  probe
  misc_feature (1)..(25): SEQ ID NO: 5849; WAN0249UC_at; Start 452; Stop 476
aaaacgatgacaaggtgtgttgctt

SEQ ID NO: 34383 - DNA, 25 bp, Artificial
  probe
  misc_feature (1)..(25): SEQ ID NO: 5849; WAN0249UC_at; Start 846; Stop 870
acttttggaggttcctacaatgtag

SEQ ID NO: 34384 - DNA, 25 bp, Artificial
  probe
  misc_feature (1)..(25): SEQ ID NO: 5849; WAN0249UC_at; Start 277; Stop 301
taaaaaatatagtatagtagactga

SEQ ID NO: 34385 - DNA, 25 bp, Artificial
  probe
  misc_feature (1)..(25): SEQ ID NO: 5849; WAN0249UC_at; Start 372; Stop 396
cacatcttatttcaattcactatag

SEQ ID NO: 34386 - DNA, 25 bp, Artificial
  probe
  misc_feature (1)..(25): SEQ ID NO: 5849; WAN0249UC_at; Start 655; Stop 679
gaataataagctagtatagtaaact

SEQ ID NO: 34387 - DNA, 25 bp, Artificial
  probe
  misc_feature (1)..(25): SEQ ID NO: 5849; WAN0249UC_at; Start 29; Stop 53
aactcaatttgagggaaagatccag

SEQ ID NO: 34388 - DNA, 25 bp, Artificial
  probe
  misc_feature (1)..(25): SEQ ID NO: 5849; WAN0249UC_at; Start 803; Stop 827
tcttgtgtaatgcaggatccaatcc

SEQ ID NO: 34389 - DNA, 25 bp, Artificial
  probe
  misc_feature (1)..(25): SEQ ID NO: 5849; WAN0249UC_at; Start 619; Stop 643
tattaaataaatagtggctcattca

SEQ ID NO: 34390 - DNA, 25 bp, Artificial
  probe
  misc_feature (1)..(25): SEQ ID NO: 5889; WAN0249UD_at; Start 62; Stop 86
tattgaagttagagtagtacacaac

SEQ ID NO: 34391 - DNA, 25 bp, Artificial
  probe
  misc_feature (1)..(25): SEQ ID NO: 5889; WAN0249UD_at; Start 68; Stop 92
agttagagtagtacacaactgcttc

SEQ ID NO: 34392 - DNA, 25 bp, Artificial
  probe
  misc_feature (1)..(25): SEQ ID NO: 5889; WAN0249UD_at; Start 86; Stop 110
ctgcttctaagatctggttaaaatt

SEQ ID NO: 34393 - DNA, 25 bp, Artificial
  probe
  misc_feature (1)..(25): SEQ ID NO: 5889; WAN0249UD_at; Start 60; Stop 84
tctattgaagttagagtagtacaca

SEQ ID NO: 34394 - DNA, 25 bp, Artificial
  probe
  misc_feature (1)..(25): SEQ ID NO: 5889; WAN0249UD_at; Start 89; Stop 113
cttctaagatctggttaaaattgct

SEQ ID NO: 34395 - DNA, 25 bp, Artificial
  probe
  misc_feature (1)..(25): SEQ ID NO: 5889; WAN0249UD_at; Start 93; Stop 117
taagatctggttaaaattgctttct

SEQ ID NO: 34396 - DNA, 25 bp, Artificial
  probe
  misc_feature (1)..(25): SEQ ID NO: 5889; WAN0249UD_at; Start 72; Stop 96
agagtagtacacaactgcttctaag

SEQ ID NO: 34397 - DNA, 25 bp, Artificial
  probe
  misc_feature (1)..(25): SEQ ID NO: 5889; WAN0249UD_at; Start 57; Stop 81
tagtctattgaagttagagtagtac

SEQ ID NO: 34398 - DNA, 25 bp, Artificial
  probe
  misc_feature (1)..(25): SEQ ID NO: 5889; WAN0249UD_at; Start 100; Stop 124
tggttaaaattgctttcttcagatt

SEQ ID NO: 34399 - DNA, 25 bp, Artificial
  probe
  misc_feature (1)..(25): SEQ ID NO: 5889; WAN0249UD_at; Start 66; Stop 90
gaagttagagtagtacacaactgct

SEQ ID NO: 34400 - DNA, 25 bp, Artificial
  probe
  misc_feature (1)..(25): SEQ ID NO: 5889; WAN0249UD_at; Start 92; Stop 116
ctaagatctggttaaaattgctttc

SEQ ID NO: 34401 - DNA, 25 bp, Artificial
  probe
  misc_feature (1)..(25): SEQ ID NO: 5889; WAN0249UD_at; Start 75; Stop 99
gtagtacacaactgcttctaagatc

SEQ ID NO: 34402 - DNA, 25 bp, Artificial
  probe
  misc_feature (1)..(25): SEQ ID NO: 5889; WAN0249UD_at; Start 46; Stop 70
tctatatgatatagtctattgaagt

SEQ ID NO: 34403 - DNA, 25 bp, Artificial
  probe
  misc_feature (1)..(25): SEQ ID NO: 5889; WAN0249UD_at; Start 76; Stop 100
tagtacacaactgcttctaagatct

SEQ ID NO: 34404 - DNA, 25 bp, Artificial
  probe
  misc_feature (1)..(25): SEQ ID NO: 5889; WAN0249UD_at; Start 70; Stop 94
ttagagtagtacacaactgcttcta

SEQ ID NO: 34405 - DNA, 25 bp, Artificial
  probe
  misc_feature (1)..(25): SEQ ID NO: 5889; WAN0249UD_at; Start 71; Stop 95
tagagtagtacacaactgcttctaa

SEQ ID NO: 34406 - DNA, 25 bp, Artificial
  probe
  misc_feature (1)..(25): SEQ ID NO: 5889; WAN0249UD_at; Start 65; Stop 89
tgaagttagagtagtacacaactgc

SEQ ID NO: 34407 - DNA, 25 bp, Artificial
  probe
  misc_feature (1)..(25): SEQ ID NO: 5889; WAN0249UD_at; Start 78; Stop 102
gtacacaactgcttctaagatctgg

SEQ ID NO: 34408 - DNA, 25 bp, Artificial
  probe
  misc_feature (1)..(25): SEQ ID NO: 5889; WAN0249UD_at; Start 77; Stop 101
agtacacaactgcttctaagatctg

SEQ ID NO: 34409 - DNA, 25 bp, Artificial
  probe
  misc_feature (1)..(25): SEQ ID NO: 5889; WAN0249UD_at; Start 69; Stop 93
gttagagtagtacacaactgcttct

SEQ ID NO: 34410 - DNA, 25 bp, Artificial
  probe
  misc_feature (1)..(25): SEQ ID NO: 5889; WAN0249UD_at; Start 52; Stop 76
tgatatagtctattgaagttagagt

SEQ ID NO: 34411 - DNA, 25 bp, Artificial
  probe
  misc_feature (1)..(25): SEQ ID NO: 5889; WAN0249UD_at; Start 96; Stop 120
gatctggttaaaattgctttcttca

SEQ ID NO: 34412 - DNA, 25 bp, Artificial
  probe
  misc_feature (1)..(25): SEQ ID NO: 5889; WAN0249UD_at; Start 81; Stop 105
cacaactgcttctaagatctggtta

SEQ ID NO: 34413 - DNA, 25 bp, Artificial
  probe
  misc_feature (1)..(25): SEQ ID NO: 5889; WAN0249UD_at; Start 82; Stop 106
acaactgcttctaagatctggttaa

SEQ ID NO: 34414 - DNA, 25 bp, Artificial
  probe
  misc_feature (1)..(25): SEQ ID NO: 5889; WAN0249UD_at; Start 64; Stop 88
ttgaagttagagtagtacacaactg

SEQ ID NO: 34415 - DNA, 25 bp, Artificial
  probe
  misc_feature (1)..(25): SEQ ID NO: 5889; WAN0249UD_at; Start 79; Stop 103
tacacaactgcttctaagatctggt

SEQ ID NO: 34416 - DNA, 25 bp, Artificial
  probe
  misc_feature (1)..(25): SEQ ID NO: 5889; WAN0249UD_at; Start 80; Stop 104
acacaactgcttctaagatctggtt

SEQ ID NO: 34417 - DNA, 25 bp, Artificial
  probe
  misc_feature (1)..(25): SEQ ID NO: 5889; WAN0249UD_at; Start 84; Stop 108
aactgcttctaagatctggttaaaa

SEQ ID NO: 34418 - DNA, 25 bp, Artificial
  probe
  misc_feature (1)..(25): SEQ ID NO: 5889; WAN0249UD_at; Start 98; Stop 122
tctggttaaaattgctttcttcaga

SEQ ID NO: 34419 - DNA, 25 bp, Artificial
  probe
  misc_feature (1)..(25): SEQ ID NO: 5889; WAN0249UD_at; Start 73; Stop 97
gagtagtacacaactgcttctaaga

SEQ ID NO: 34420 - DNA, 25 bp, Artificial
  probe
  misc_feature (1)..(25): SEQ ID NO: 5889; WAN0249UD_at; Start 61; Stop 85
ctattgaagttagagtagtacacaa

SEQ ID NO: 34421 - DNA, 25 bp, Artificial
  probe
  misc_feature (1)..(25): SEQ ID NO: 5889; WAN0249UD_at; Start 88; Stop 112
gcttctaagatctggttaaaattgc

SEQ ID NO: 34422 - DNA, 25 bp, Artificial
  probe
  misc_feature (1)..(25): SEQ ID NO: 5889; WAN0249UD_at; Start 74; Stop 98
agtagtacacaactgcttctaagat

SEQ ID NO: 34423 - DNA, 25 bp, Artificial
  probe
  misc_feature (1)..(25): SEQ ID NO: 5889; WAN0249UD_at; Start 83; Stop 107
caactgcttctaagatctggttaaa

SEQ ID NO: 34424 - DNA, 25 bp, Artificial
  probe
  misc_feature (1)..(25): SEQ ID NO: 326; WAN0249UE_at; Start 90; Stop 114
gccagagaatttagtaaacctagat

SEQ ID NO: 34425 - DNA, 25 bp, Artificial
  probe
  misc_feature (1)..(25): SEQ ID NO: 326; WAN0249UE_at; Start 23; Stop 47
tcaaaaaataccattgggaagagct

SEQ ID NO: 34426 - DNA, 25 bp, Artificial
  probe
  misc_feature (1)..(25): SEQ ID NO: 326; WAN0249UE_at; Start 36; Stop 60
ttgggaagagctagagcaagtattt

SEQ ID NO: 34427 - DNA, 25 bp, Artificial
  probe
  misc_feature (1)..(25): SEQ ID NO: 326; WAN0249UE_at; Start 37; Stop 61
tgggaagagctagagcaagtatttt

SEQ ID NO: 34428 - DNA, 25 bp, Artificial
  probe
  misc_feature (1)..(25): SEQ ID NO: 326; WAN0249UE_at; Start 44; Stop 68
agctagagcaagtatttttcaaact

SEQ ID NO: 34429 - DNA, 25 bp, Artificial
  probe
  misc_feature (1)..(25): SEQ ID NO: 326; WAN0249UE_at; Start 24; Stop 48
caaaaaataccattgggaagagcta

SEQ ID NO: 34430 - DNA, 25 bp, Artificial
  probe
  misc_feature (1)..(25): SEQ ID NO: 326; WAN0249UE_at; Start 34; Stop 58
cattgggaagagctagagcaagtat

SEQ ID NO: 34431 - DNA, 25 bp, Artificial
  probe
  misc_feature (1)..(25): SEQ ID NO: 326; WAN0249UE_at; Start 82; Stop 106
tagatagagccagagaatttagtaa

SEQ ID NO: 34432 - DNA, 25 bp, Artificial
  probe
  misc_feature (1)..(25): SEQ ID NO: 326; WAN0249UE_at; Start 1; Stop 25
acacccattataaaggaaagaatca

SEQ ID NO: 34433 - DNA, 25 bp, Artificial
  probe
  misc_feature (1)..(25): SEQ ID NO: 326; WAN0249UE_at; Start 35; Stop 59
attgggaagagctagagcaagtatt

SEQ ID NO: 34434 - DNA, 25 bp, Artificial
  probe
  misc_feature (1)..(25): SEQ ID NO: 326; WAN0249UE_at; Start 40; Stop 64
gaagagctagagcaagtatttttca

SEQ ID NO: 34435 - DNA, 25 bp, Artificial
  probe
  misc_feature (1)..(25): SEQ ID NO: 326; WAN0249UE_at; Start 87; Stop 111
agagccagagaatttagtaaaccta

SEQ ID NO: 34436 - DNA, 25 bp, Artificial
  probe
  misc_feature (1)..(25): SEQ ID NO: 326; WAN0249UE_at; Start 43; Stop 67
gagctagagcaagtatttttcaaac

SEQ ID NO: 34437 - DNA, 25 bp, Artificial
  probe
  misc_feature (1)..(25): SEQ ID NO: 326; WAN0249UE_at; Start 39; Stop 63
ggaagagctagagcaagtatttttc

SEQ ID NO: 34438 - DNA, 25 bp, Artificial
  probe
  misc_feature (1)..(25): SEQ ID NO: 326; WAN0249UE_at; Start 25; Stop 49
aaaaaataccattgggaagagctag

SEQ ID NO: 34439 - DNA, 25 bp, Artificial
  probe
  misc_feature (1)..(25): SEQ ID NO: 326; WAN0249UE_at; Start 80; Stop 104
aatagatagagccagagaatttagt

SEQ ID NO: 34440 - DNA, 25 bp, Artificial
  probe
  misc_feature (1)..(25): SEQ ID NO: 326; WAN0249UE_at; Start 29; Stop 53
aataccattgggaagagctagagca

SEQ ID NO: 34441 - DNA, 25 bp, Artificial
  probe
  misc_feature (1)..(25): SEQ ID NO: 326; WAN0249UE_at; Start 20; Stop 44
gaatcaaaaaataccattgggaaga

SEQ ID NO: 34442 - DNA, 25 bp, Artificial
  probe
  misc_feature (1)..(25): SEQ ID NO: 326; WAN0249UE_at; Start 30; Stop 54
ataccattgggaagagctagagcaa

SEQ ID NO: 34443 - DNA, 25 bp, Artificial
  probe
  misc_feature (1)..(25): SEQ ID NO: 326; WAN0249UE_at; Start 86; Stop 110
tagagccagagaatttagtaaacct

SEQ ID NO: 34444 - DNA, 25 bp, Artificial
  probe
  misc_feature (1)..(25): SEQ ID NO: 326; WAN0249UE_at; Start 33; Stop 57
ccattgggaagagctagagcaagta

SEQ ID NO: 34445 - DNA, 25 bp, Artificial
  probe
  misc_feature (1)..(25): SEQ ID NO: 326; WAN0249UE_at; Start 85; Stop 109
atagagccagagaatttagtaaacc

SEQ ID NO: 34446 - DNA, 25 bp, Artificial
  probe
  misc_feature (1)..(25): SEQ ID NO: 326; WAN0249UE_at; Start 46; Stop 70
ctagagcaagtatttttcaaacttt

SEQ ID NO: 34447 - DNA, 25 bp, Artificial
  probe
  misc_feature (1)..(25): SEQ ID NO: 326; WAN0249UE_at; Start 88; Stop 112
gagccagagaatttagtaaacctag

SEQ ID NO: 34448 - DNA, 25 bp, Artificial
  probe
  misc_feature (1)..(25): SEQ ID NO: 326; WAN0249UE_at; Start 31; Stop 55
taccattgggaagagctagagcaag

SEQ ID NO: 34449 - DNA, 25 bp, Artificial
  probe
  misc_feature (1)..(25): SEQ ID NO: 326; WAN0249UE_at; Start 26; Stop 50
aaaaataccattgggaagagctaga

SEQ ID NO: 34450 - DNA, 25 bp, Artificial
  probe
  misc_feature (1)..(25): SEQ ID NO: 326; WAN0249UE_at; Start 28; Stop 52
aaataccattgggaagagctagagc

SEQ ID NO: 34451 - DNA, 25 bp, Artificial
  probe
  misc_feature (1)..(25): SEQ ID NO: 326; WAN0249UE_at; Start 32; Stop 56
accattgggaagagctagagcaagt

SEQ ID NO: 34452 - DNA, 25 bp, Artificial
  probe
  misc_feature (1)..(25): SEQ ID NO: 326; WAN0249UE_at; Start 42; Stop 66
agagctagagcaagtatttttcaaa

SEQ ID NO: 34453 - DNA, 25 bp, Artificial
  probe
  misc_feature (1)..(25): SEQ ID NO: 326; WAN0249UE_at; Start 76; Stop 100
aataaatagatagagccagagaatt

SEQ ID NO: 34454 - DNA, 25 bp, Artificial
  probe
  misc_feature (1)..(25): SEQ ID NO: 326; WAN0249UE_at; Start 2; Stop 26
cacccattataaaggaaagaatcaa

SEQ ID NO: 34455 - DNA, 25 bp, Artificial
  probe
  misc_feature (1)..(25): SEQ ID NO: 326; WAN0249UE_at; Start 84; Stop 108
gatagagccagagaatttagtaaac

SEQ ID NO: 34456 - DNA, 25 bp, Artificial
  probe
  misc_feature (1)..(25): SEQ ID NO: 326; WAN0249UE_at; Start 89; Stop 113
agccagagaatttagtaaacctaga

SEQ ID NO: 34457 - DNA, 25 bp, Artificial
  probe
  misc_feature (1)..(25): SEQ ID NO: 326; WAN0249UE_at; Start 41; Stop 65
aagagctagagcaagtatttttcaa

SEQ ID NO: 34458 - DNA, 25 bp, Artificial
  probe
  misc_feature (1)..(25): SEQ ID NO: 3482; WAN0249UF_at; Start 160; Stop 184
catgctggtttttaagttcatttta

SEQ ID NO: 34459 - DNA, 25 bp, Artificial
  probe
  misc_feature (1)..(25): SEQ ID NO: 3482; WAN0249UF_at; Start 72; Stop 96
gctaatgacggagtttatgcaacct

SEQ ID NO: 34460 - DNA, 25 bp, Artificial
  probe
  misc_feature (1)..(25): SEQ ID NO: 3482; WAN0249UF_at; Start 399; Stop 423
agaacgtaaaaaagcataagttcag

SEQ ID NO: 34461 - DNA, 25 bp, Artificial
  probe
  misc_feature (1)..(25): SEQ ID NO: 3482; WAN0249UF_at; Start 67; Stop 91
aacaagctaatgacggagtttatgc

SEQ ID NO: 34462 - DNA, 25 bp, Artificial
  probe
  misc_feature (1)..(25): SEQ ID NO: 3482; WAN0249UF_at; Start 17; Stop 41
cgacaaatgagaagccaactacggt

SEQ ID NO: 34463 - DNA, 25 bp, Artificial
  probe
  misc_feature (1)..(25): SEQ ID NO: 3482; WAN0249UF_at; Start 20; Stop 44
caaatgagaagccaactacggtagc

SEQ ID NO: 34464 - DNA, 25 bp, Artificial
  probe
  misc_feature (1)..(25): SEQ ID NO: 3482; WAN0249UF_at; Start 368; Stop 392
tcaactgttttttgagtataaacag

SEQ ID NO: 34465 - DNA, 25 bp, Artificial
  probe
  misc_feature (1)..(25): SEQ ID NO: 3482; WAN0249UF_at; Start 96; Stop 120
tatgaagggcaattgacacctttcc

SEQ ID NO: 34466 - DNA, 25 bp, Artificial
  probe
  misc_feature (1)..(25): SEQ ID NO: 3482; WAN0249UF_at; Start 90; Stop 114
gcaacctatgaagggcaattgacac

SEQ ID NO: 34467 - DNA, 25 bp, Artificial
  probe
  misc_feature (1)..(25): SEQ ID NO: 3482; WAN0249UF_at; Start 137; Stop 161
taaccagcctgtcttcatctagtca

SEQ ID NO: 34468 - DNA, 25 bp, Artificial
  probe
  misc_feature (1)..(25): SEQ ID NO: 3482; WAN0249UF_at; Start 12; Stop 36
tatagcgacaaatgagaagccaact

SEQ ID NO: 34469 - DNA, 25 bp, Artificial
  probe
  misc_feature (1)..(25): SEQ ID NO: 3482; WAN0249UF_at; Start 103; Stop 127
ggcaattgacacctttccaatattg

SEQ ID NO: 34470 - DNA, 25 bp, Artificial
  probe
  misc_feature (1)..(25): SEQ ID NO: 3482; WAN0249UF_at; Start 22; Stop 46
aatgagaagccaactacggtagcac

SEQ ID NO: 34471 - DNA, 25 bp, Artificial
  probe
  misc_feature (1)..(25): SEQ ID NO: 3482; WAN0249UF_at; Start 123; Stop 147
tattgataaattgataaccagcctg

SEQ ID NO: 34472 - DNA, 25 bp, Artificial
  probe
  misc_feature (1)..(25): SEQ ID NO: 3482; WAN0249UF_at; Start 211; Stop 235
gctatacttaatttatactcaatga

SEQ ID NO: 34473 - DNA, 25 bp, Artificial
  probe
  misc_feature (1)..(25): SEQ ID NO: 3482; WAN0249UF_at; Start 36; Stop 60
tacggtagcactctaaacatcacgt

SEQ ID NO: 34474 - DNA, 25 bp, Artificial
  probe
  misc_feature (1)..(25): SEQ ID NO: 3482; WAN0249UF_at; Start 78; Stop 102
gacggagtttatgcaacctatgaag

SEQ ID NO: 34475 - DNA, 25 bp, Artificial
  probe
  misc_feature (1)..(25): SEQ ID NO: 3482; WAN0249UF_at; Start 191; Stop 215
tacctattctccctaactgtgctat

SEQ ID NO: 34476 - DNA, 25 bp, Artificial
  probe
  misc_feature (1)..(25): SEQ ID NO: 3482; WAN0249UF_at; Start 109; Stop 133
tgacacctttccaatattgataaat

SEQ ID NO: 34477 - DNA, 25 bp, Artificial
  probe
  misc_feature (1)..(25): SEQ ID NO: 3482; WAN0249UF_at; Start 380; Stop 404
tgagtataaacagtctttaagaacg

SEQ ID NO: 34478 - DNA, 25 bp, Artificial
  probe
  misc_feature (1)..(25): SEQ ID NO: 3482; WAN0249UF_at; Start 82; Stop 106
gagtttatgcaacctatgaagggca

SEQ ID NO: 34479 - DNA, 25 bp, Artificial
  probe
  misc_feature (1)..(25): SEQ ID NO: 3482; WAN0249UF_at; Start 151; Stop 175
tcatctagtcatgctggtttttaag

SEQ ID NO: 34480 - DNA, 25 bp, Artificial
  probe
  misc_feature (1)..(25): SEQ ID NO: 3482; WAN0249UF_at; Start 99; Stop 123
gaagggcaattgacacctttccaat

SEQ ID NO: 34481 - DNA, 25 bp, Artificial
  probe
  misc_feature (1)..(25): SEQ ID NO: 3482; WAN0249UF_at; Start 60; Stop 84
tctatcaaacaagctaatgacggag

SEQ ID NO: 34482 - DNA, 25 bp, Artificial
  probe
  misc_feature (1)..(25): SEQ ID NO: 3482; WAN0249UF_at; Start 155; Stop 179
ctagtcatgctggtttttaagttca

SEQ ID NO: 34483 - DNA, 25 bp, Artificial
  probe
  misc_feature (1)..(25): SEQ ID NO: 3482; WAN0249UF_at; Start 143; Stop 167
gcctgtcttcatctagtcatgctgg

SEQ ID NO: 34484 - DNA, 25 bp, Artificial
  probe
  misc_feature (1)..(25): SEQ ID NO: 3482; WAN0249UF_at; Start 86; Stop 110
ttatgcaacctatgaagggcaattg

SEQ ID NO: 34485 - DNA, 25 bp, Artificial
  probe
  misc_feature (1)..(25): SEQ ID NO: 3482; WAN0249UF_at; Start 198; Stop 222
tctccctaactgtgctatacttaat

SEQ ID NO: 34486 - DNA, 25 bp, Artificial
  probe
  misc_feature (1)..(25): SEQ ID NO: 3482; WAN0249UF_at; Start 177; Stop 201
tcattttaaatccttacctattctc

SEQ ID NO: 34487 - DNA, 25 bp, Artificial
  probe
  misc_feature (1)..(25): SEQ ID NO: 3482; WAN0249UF_at; Start 30; Stop 54
gccaactacggtagcactctaaaca

SEQ ID NO: 34488 - DNA, 25 bp, Artificial
  probe
  misc_feature (1)..(25): SEQ ID NO: 3482; WAN0249UF_at; Start 127; Stop 151
gataaattgataaccagcctgtctt

SEQ ID NO: 34489 - DNA, 25 bp, Artificial
  probe
  misc_feature (1)..(25): SEQ ID NO: 3482; WAN0249UF_at; Start 49; Stop 73
taaacatcacgtctatcaaacaagc

SEQ ID NO: 34490 - DNA, 25 bp, Artificial
  probe
  misc_feature (1)..(25): SEQ ID NO: 3482; WAN0249UF_at; Start 25; Stop 49
gagaagccaactacggtagcactct

SEQ ID NO: 34491 - DNA, 25 bp, Artificial
  probe
  misc_feature (1)..(25): SEQ ID NO: 3482; WAN0249UF_at; Start 39; Stop 63
ggtagcactctaaacatcacgtcta

SEQ ID NO: 34492 - DNA, 25 bp, Artificial
  probe
  misc_feature (1)..(25): SEQ ID NO: 3329; WAN0249UG_at; Start 361; Stop 385
tagacgtgatgtttagagtgctacc

SEQ ID NO: 34493 - DNA, 25 bp, Artificial
  probe
  misc_feature (1)..(25): SEQ ID NO: 3329; WAN0249UG_at; Start 311; Stop 335
tgtcaattgcccttcataggttgca

SEQ ID NO: 34494 - DNA, 25 bp, Artificial
  probe
  misc_feature (1)..(25): SEQ ID NO: 3329; WAN0249UG_at; Start 208; Stop 232
tatagcacagttagggagaataggt

SEQ ID NO: 34495 - DNA, 25 bp, Artificial
  probe
  misc_feature (1)..(25): SEQ ID NO: 3329; WAN0249UG_at; Start 305; Stop 329
gaaaggtgtcaattgcccttcatag

SEQ ID NO: 34496 - DNA, 25 bp, Artificial
  probe
  misc_feature (1)..(25): SEQ ID NO: 3329; WAN0249UG_at; Start 365; Stop 389
cgtgatgtttagagtgctaccgtag

SEQ ID NO: 34497 - DNA, 25 bp, Artificial
  probe
  misc_feature (1)..(25): SEQ ID NO: 3329; WAN0249UG_at; Start 189; Stop 213
tcattgagtataaattaagtatagc

SEQ ID NO: 34498 - DNA, 25 bp, Artificial
  probe
  misc_feature (1)..(25): SEQ ID NO: 3329; WAN0249UG_at; Start 370; Stop 394
tgtttagagtgctaccgtagttggc

SEQ ID NO: 34499 - DNA, 25 bp, Artificial
  probe
  misc_feature (1)..(25): SEQ ID NO: 3329; WAN0249UG_at; Start 213; Stop 237
cacagttagggagaataggtaagga

SEQ ID NO: 34500 - DNA, 25 bp, Artificial
  probe
  misc_feature (1)..(25): SEQ ID NO: 3329; WAN0249UG_at; Start 246; Stop 270
gaacttaaaaaccagcatgactaga

SEQ ID NO: 34501 - DNA, 25 bp, Artificial
  probe
  misc_feature (1)..(25): SEQ ID NO: 3329; WAN0249UG_at; Start 199; Stop 223
taaattaagtatagcacagttaggg

SEQ ID NO: 34502 - DNA, 25 bp, Artificial
  probe
  misc_feature (1)..(25): SEQ ID NO: 3329; WAN0249UG_at; Start 1; Stop 25
ctgaacttatgcttttttacgttct

SEQ ID NO: 34503 - DNA, 25 bp, Artificial
  probe
  misc_feature (1)..(25): SEQ ID NO: 3329; WAN0249UG_at; Start 223; Stop 247
gagaataggtaaggatttaaaatga

SEQ ID NO: 34504 - DNA, 25 bp, Artificial
  probe
  misc_feature (1)..(25): SEQ ID NO: 3329; WAN0249UG_at; Start 329; Stop 353
ggttgcataaactccgtcattagct

SEQ ID NO: 34505 - DNA, 25 bp, Artificial
  probe
  misc_feature (1)..(25): SEQ ID NO: 3329; WAN0249UG_at; Start 204; Stop 228
taagtatagcacagttagggagaat

SEQ ID NO: 34506 - DNA, 25 bp, Artificial
  probe
  misc_feature (1)..(25): SEQ ID NO: 3329; WAN0249UG_at; Start 288; Stop 312
tcaatttatcaatattggaaaggtg

SEQ ID NO: 34507 - DNA, 25 bp, Artificial
  probe
  misc_feature (1)..(25): SEQ ID NO: 3329; WAN0249UG_at; Start 346; Stop 370
cattagcttgtttgatagacgtgat

SEQ ID NO: 34508 - DNA, 25 bp, Artificial
  probe
  misc_feature (1)..(25): SEQ ID NO: 3329; WAN0249UG_at; Start 240; Stop 264
taaaatgaacttaaaaaccagcatg

SEQ ID NO: 34509 - DNA, 25 bp, Artificial
  probe
  misc_feature (1)..(25): SEQ ID NO: 3329; WAN0249UG_at; Start 260; Stop 284
gcatgactagatgaagacaggctgg

SEQ ID NO: 34510 - DNA, 25 bp, Artificial
  probe
  misc_feature (1)..(25): SEQ ID NO: 3329; WAN0249UG_at; Start 251; Stop 275
taaaaaccagcatgactagatgaag

SEQ ID NO: 34511 - DNA, 25 bp, Artificial
  probe
  misc_feature (1)..(25): SEQ ID NO: 3329; WAN0249UG_at; Start 275; Stop 299
gacaggctggttatcaatttatcaa

SEQ ID NO: 34512 - DNA, 25 bp, Artificial
  probe
  misc_feature (1)..(25): SEQ ID NO: 3329; WAN0249UG_at; Start 388; Stop 412
agttggcttctcatttgtcgctata

SEQ ID NO: 34513 - DNA, 25 bp, Artificial
  probe
  misc_feature (1)..(25): SEQ ID NO: 3329; WAN0249UG_at; Start 384; Stop 408
ccgtagttggcttctcatttgtcgc

SEQ ID NO: 34514 - DNA, 25 bp, Artificial
  probe
  misc_feature (1)..(25): SEQ ID NO: 3329; WAN0249UG_at; Start 28; Stop 52
aagactgtttatactcaaaaaacag

SEQ ID NO: 34515 - DNA, 25 bp, Artificial
  probe
  misc_feature (1)..(25): SEQ ID NO: 3329; WAN0249UG_at; Start 314; Stop 338
caattgcccttcataggttgcataa

SEQ ID NO: 34516 - DNA, 25 bp, Artificial
  probe
  misc_feature (1)..(25): SEQ ID NO: 3329; WAN0249UG_at; Start 300; Stop 324
tattggaaaggtgtcaattgccctt

SEQ ID NO: 34517 - DNA, 25 bp, Artificial
  probe
  misc_feature (1)..(25): SEQ ID NO: 3329; WAN0249UG_at; Start 297; Stop 321
caatattggaaaggtgtcaattgcc

SEQ ID NO: 34518 - DNA, 25 bp, Artificial
  probe
  misc_feature (1)..(25): SEQ ID NO: 3329; WAN0249UG_at; Start 341; Stop 365
tccgtcattagcttgtttgatagac

SEQ ID NO: 34519 - DNA, 25 bp, Artificial
  probe
  misc_feature (1)..(25): SEQ ID NO: 3329; WAN0249UG_at; Start 20; Stop 44
cgttcttaaagactgtttatactca

SEQ ID NO: 34520 - DNA, 25 bp, Artificial
  probe
  misc_feature (1)..(25): SEQ ID NO: 3329; WAN0249UG_at; Start 320; Stop 344
cccttcataggttgcataaactccg

SEQ ID NO: 34521 - DNA, 25 bp, Artificial
  probe
  misc_feature (1)..(25): SEQ ID NO: 3329; WAN0249UG_at; Start 376; Stop 400
gagtgctaccgtagttggcttctca

SEQ ID NO: 34522 - DNA, 25 bp, Artificial
  probe
  misc_feature (1)..(25): SEQ ID NO: 3329; WAN0249UG_at; Start 257; Stop 281
ccagcatgactagatgaagacaggc

SEQ ID NO: 34523 - DNA, 25 bp, Artificial
  probe
  misc_feature (1)..(25): SEQ ID NO: 3329; WAN0249UG_at; Start 323; Stop 347
ttcataggttgcataaactccgtca

SEQ ID NO: 34524 - DNA, 25 bp, Artificial
  probe
  misc_feature (1)..(25): SEQ ID NO: 3329; WAN0249UG_at; Start 333; Stop 357
gcataaactccgtcattagcttgtt

SEQ ID NO: 34525 - DNA, 25 bp, Artificial
  probe
  misc_feature (1)..(25): SEQ ID NO: 3329; WAN0249UG_at; Start 380; Stop 404
gctaccgtagttggcttctcatttg

SEQ ID NO: 34526 - DNA, 25 bp, Artificial
  probe
  misc_feature (1)..(25): SEQ ID NO: 132; WAN0249UH_at; Start 124; Stop 148
acttcaatagactatatcatataga

SEQ ID NO: 34527 - DNA, 25 bp, Artificial
  probe
  misc_feature (1)..(25): SEQ ID NO: 132; WAN0249UH_at; Start 111; Stop 135
gtgtactactctaacttcaatagac

SEQ ID NO: 34528 - DNA, 25 bp, Artificial
  probe
  misc_feature (1)..(25): SEQ ID NO: 132; WAN0249UH_at; Start 83; Stop 107
caattttaaccagatcttagaagca

SEQ ID NO: 34529 - DNA, 25 bp, Artificial
  probe
  misc_feature (1)..(25): SEQ ID NO: 132; WAN0249UH_at; Start 97; Stop 121
tcttagaagcagttgtgtactactc

SEQ ID NO: 34530 - DNA, 25 bp, Artificial
  probe
  misc_feature (1)..(25): SEQ ID NO: 132; WAN0249UH_at; Start 98; Stop 122
cttagaagcagttgtgtactactct

SEQ ID NO: 34531 - DNA, 25 bp, Artificial
  probe
  misc_feature (1)..(25): SEQ ID NO: 132; WAN0249UH_at; Start 105; Stop 129
gcagttgtgtactactctaacttca

SEQ ID NO: 34532 - DNA, 25 bp, Artificial
  probe
  misc_feature (1)..(25): SEQ ID NO: 132; WAN0249UH_at; Start 70; Stop 94
aatctgaagaaagcaattttaacca

SEQ ID NO: 34533 - DNA, 25 bp, Artificial
  probe
  misc_feature (1)..(25): SEQ ID NO: 132; WAN0249UH_at; Start 88; Stop 112
ttaaccagatcttagaagcagttgt

SEQ ID NO: 34534 - DNA, 25 bp, Artificial
  probe
  misc_feature (1)..(25): SEQ ID NO: 132; WAN0249UH_at; Start 108; Stop 132
gttgtgtactactctaacttcaata

SEQ ID NO: 34535 - DNA, 25 bp, Artificial
  probe
  misc_feature (1)..(25): SEQ ID NO: 132; WAN0249UH_at; Start 75; Stop 99
gaagaaagcaattttaaccagatct

SEQ ID NO: 34536 - DNA, 25 bp, Artificial
  probe
  misc_feature (1)..(25): SEQ ID NO: 132; WAN0249UH_at; Start 102; Stop 126
gaagcagttgtgtactactctaact

SEQ ID NO: 34537 - DNA, 25 bp, Artificial
  probe
  misc_feature (1)..(25): SEQ ID NO: 132; WAN0249UH_at; Start 86; Stop 110
ttttaaccagatcttagaagcagtt

SEQ ID NO: 34538 - DNA, 25 bp, Artificial
  probe
  misc_feature (1)..(25): SEQ ID NO: 132; WAN0249UH_at; Start 101; Stop 125
agaagcagttgtgtactactctaac

SEQ ID NO: 34539 - DNA, 25 bp, Artificial
  probe
  misc_feature (1)..(25): SEQ ID NO: 132; WAN0249UH_at; Start 99; Stop 123
ttagaagcagttgtgtactactcta

SEQ ID NO: 34540 - DNA, 25 bp, Artificial
  probe
  misc_feature (1)..(25): SEQ ID NO: 132; WAN0249UH_at; Start 117; Stop 141
tactctaacttcaatagactatatc

SEQ ID NO: 34541 - DNA, 25 bp, Artificial
  probe
  misc_feature (1)..(25): SEQ ID NO: 132; WAN0249UH_at; Start 138; Stop 162
tatcatatagataaaaaacaactcc

SEQ ID NO: 34542 - DNA, 25 bp, Artificial
  probe
  misc_feature (1)..(25): SEQ ID NO: 132; WAN0249UH_at; Start 82; Stop 106
gcaattttaaccagatcttagaagc

SEQ ID NO: 34543 - DNA, 25 bp, Artificial
  probe
  misc_feature (1)..(25): SEQ ID NO: 132; WAN0249UH_at; Start 74; Stop 98
tgaagaaagcaattttaaccagatc

SEQ ID NO: 34544 - DNA, 25 bp, Artificial
  probe
  misc_feature (1)..(25): SEQ ID NO: 132; WAN0249UH_at; Start 100; Stop 124
tagaagcagttgtgtactactctaa

SEQ ID NO: 34545 - DNA, 25 bp, Artificial
  probe
  misc_feature (1)..(25): SEQ ID NO: 132; WAN0249UH_at; Start 90; Stop 114
aaccagatcttagaagcagttgtgt

SEQ ID NO: 34546 - DNA, 25 bp, Artificial
  probe
  misc_feature (1)..(25): SEQ ID NO: 132; WAN0249UH_at; Start 106; Stop 130
cagttgtgtactactctaacttcaa

SEQ ID NO: 34547 - DNA, 25 bp, Artificial
  probe
  misc_feature (1)..(25): SEQ ID NO: 132; WAN0249UH_at; Start 84; Stop 108
aattttaaccagatcttagaagcag

SEQ ID NO: 34548 - DNA, 25 bp, Artificial
  probe
  misc_feature (1)..(25): SEQ ID NO: 132; WAN0249UH_at; Start 93; Stop 117
cagatcttagaagcagttgtgtact

SEQ ID NO: 34549 - DNA, 25 bp, Artificial
  probe
  misc_feature (1)..(25): SEQ ID NO: 132; WAN0249UH_at; Start 92; Stop 116
ccagatcttagaagcagttgtgtac

SEQ ID NO: 34550 - DNA, 25 bp, Artificial
  probe
  misc_feature (1)..(25): SEQ ID NO: 132; WAN0249UH_at; Start 110; Stop 134
tgtgtactactctaacttcaataga

SEQ ID NO: 34551 - DNA, 25 bp, Artificial
  probe
  misc_feature (1)..(25): SEQ ID NO: 132; WAN0249UH_at; Start 113; Stop 137
gtactactctaacttcaatagacta

SEQ ID NO: 34552 - DNA, 25 bp, Artificial
  probe
  misc_feature (1)..(25): SEQ ID NO: 132; WAN0249UH_at; Start 87; Stop 111
tttaaccagatcttagaagcagttg

SEQ ID NO: 34553 - DNA, 25 bp, Artificial
  probe
  misc_feature (1)..(25): SEQ ID NO: 132; WAN0249UH_at; Start 79; Stop 103
aaagcaattttaaccagatcttaga

SEQ ID NO: 34554 - DNA, 25 bp, Artificial
  probe
  misc_feature (1)..(25): SEQ ID NO: 132; WAN0249UH_at; Start 89; Stop 113
taaccagatcttagaagcagttgtg

SEQ ID NO: 34555 - DNA, 25 bp, Artificial
  probe
  misc_feature (1)..(25): SEQ ID NO: 132; WAN0249UH_at; Start 95; Stop 119
gatcttagaagcagttgtgtactac

SEQ ID NO: 34556 - DNA, 25 bp, Artificial
  probe
  misc_feature (1)..(25): SEQ ID NO: 132; WAN0249UH_at; Start 120; Stop 144
tctaacttcaatagactatatcata

SEQ ID NO: 34557 - DNA, 25 bp, Artificial
  probe
  misc_feature (1)..(25): SEQ ID NO: 132; WAN0249UH_at; Start 81; Stop 105
agcaattttaaccagatcttagaag

SEQ ID NO: 34558 - DNA, 25 bp, Artificial
  probe
  misc_feature (1)..(25): SEQ ID NO: 132; WAN0249UH_at; Start 78; Stop 102
gaaagcaattttaaccagatcttag

SEQ ID NO: 34559 - DNA, 25 bp, Artificial
  probe
  misc_feature (1)..(25): SEQ ID NO: 132; WAN0249UH_at; Start 140; Stop 164
tcatatagataaaaaacaactccct

SEQ ID NO: 34560 - DNA, 25 bp, Artificial
  probe
  misc_feature (1)..(25): SEQ ID NO: 230; WAN0249UI_at; Start 345; Stop 369
tgtgattgatgttggctaggttatg

SEQ ID NO: 34561 - DNA, 25 bp, Artificial
  probe
  misc_feature (1)..(25): SEQ ID NO: 230; WAN0249UI_at; Start 18; Stop 42
gagtctgcttactaatactagacta

SEQ ID NO: 34562 - DNA, 25 bp, Artificial
  probe
  misc_feature (1)..(25): SEQ ID NO: 230; WAN0249UI_at; Start 14; Stop 38
gtttgagtctgcttactaatactag

SEQ ID NO: 34563 - DNA, 25 bp, Artificial
  probe
  misc_feature (1)..(25): SEQ ID NO: 230; WAN0249UI_at; Start 341; Stop 365
tgattgtgattgatgttggctaggt

SEQ ID NO: 34564 - DNA, 25 bp, Artificial
  probe
  misc_feature (1)..(25): SEQ ID NO: 230; WAN0249UI_at; Start 366; Stop 390
tatgttcaatgattcctaccgtctc

SEQ ID NO: 34565 - DNA, 25 bp, Artificial
  probe
  misc_feature (1)..(25): SEQ ID NO: 230; WAN0249UI_at; Start 313; Stop 337
taatttagtgtaattgagaaaggag

SEQ ID NO: 34566 - DNA, 25 bp, Artificial
  probe
  misc_feature (1)..(25): SEQ ID NO: 230; WAN0249UI_at; Start 348; Stop 372
gattgatgttggctaggttatgttc

SEQ ID NO: 34567 - DNA, 25 bp, Artificial
  probe
  misc_feature (1)..(25): SEQ ID NO: 230; WAN0249UI_at; Start 368; Stop 392
tgttcaatgattcctaccgtctcaa

SEQ ID NO: 34568 - DNA, 25 bp, Artificial
  probe
  misc_feature (1)..(25): SEQ ID NO: 230; WAN0249UI_at; Start 328; Stop 352
gagaaaggagaaatgattgtgattg

SEQ ID NO: 34569 - DNA, 25 bp, Artificial
  probe
  misc_feature (1)..(25): SEQ ID NO: 230; WAN0249UI_at; Start 298; Stop 322
gattcaattacactataatttagtg

SEQ ID NO: 34570 - DNA, 25 bp, Artificial
  probe
  misc_feature (1)..(25): SEQ ID NO: 230; WAN0249UI_at; Start 357; Stop 381
tggctaggttatgttcaatgattcc

SEQ ID NO: 34571 - DNA, 25 bp, Artificial
  probe
  misc_feature (1)..(25): SEQ ID NO: 230; WAN0249UI_at; Start 339; Stop 363
aatgattgtgattgatgttggctag

SEQ ID NO: 34572 - DNA, 25 bp, Artificial
  probe
  misc_feature (1)..(25): SEQ ID NO: 230; WAN0249UI_at; Start 362; Stop 386
aggttatgttcaatgattcctaccg

SEQ ID NO: 34573 - DNA, 25 bp, Artificial
  probe
  misc_feature (1)..(25): SEQ ID NO: 230; WAN0249UI_at; Start 342; Stop 366
gattgtgattgatgttggctaggtt

SEQ ID NO: 34574 - DNA, 25 bp, Artificial
  probe
  misc_feature (1)..(25): SEQ ID NO: 230; WAN0249UI_at; Start 321; Stop 345
tgtaattgagaaaggagaaatgatt

SEQ ID NO: 34575 - DNA, 25 bp, Artificial
  probe
  misc_feature (1)..(25): SEQ ID NO: 230; WAN0249UI_at; Start 364; Stop 388
gttatgttcaatgattcctaccgtc

SEQ ID NO: 34576 - DNA, 25 bp, Artificial
  probe
  misc_feature (1)..(25): SEQ ID NO: 230; WAN0249UI_at; Start 326; Stop 350
ttgagaaaggagaaatgattgtgat

SEQ ID NO: 34577 - DNA, 25 bp, Artificial
  probe
  misc_feature (1)..(25): SEQ ID NO: 230; WAN0249UI_at; Start 11; Stop 35
aaggtttgagtctgcttactaatac

SEQ ID NO: 34578 - DNA, 25 bp, Artificial
  probe
  misc_feature (1)..(25): SEQ ID NO: 230; WAN0249UI_at; Start 13; Stop 37
ggtttgagtctgcttactaatacta

SEQ ID NO: 34579 - DNA, 25 bp, Artificial
  probe
  misc_feature (1)..(25): SEQ ID NO: 230; WAN0249UI_at; Start 371; Stop 395
tcaatgattcctaccgtctcaaatc

SEQ ID NO: 34580 - DNA, 25 bp, Artificial
  probe
  misc_feature (1)..(25): SEQ ID NO: 230; WAN0249UI_at; Start 5; Stop 29
ttttctaaggtttgagtctgcttac

SEQ ID NO: 34581 - DNA, 25 bp, Artificial
  probe
  misc_feature (1)..(25): SEQ ID NO: 230; WAN0249UI_at; Start 337; Stop 361
gaaatgattgtgattgatgttggct

SEQ ID NO: 34582 - DNA, 25 bp, Artificial
  probe
  misc_feature (1)..(25): SEQ ID NO: 230; WAN0249UI_at; Start 158; Stop 182
gttctattttgtctgatgggcaaat

SEQ ID NO: 34583 - DNA, 25 bp, Artificial
  probe
  misc_feature (1)..(25): SEQ ID NO: 230; WAN0249UI_at; Start 8; Stop 32
tctaaggtttgagtctgcttactaa

SEQ ID NO: 34584 - DNA, 25 bp, Artificial
  probe
  misc_feature (1)..(25): SEQ ID NO: 230; WAN0249UI_at; Start 156; Stop 180
tcgttctattttgtctgatgggcaa

SEQ ID NO: 34585 - DNA, 25 bp, Artificial
  probe
  misc_feature (1)..(25): SEQ ID NO: 230; WAN0249UI_at; Start 20; Stop 44
gtctgcttactaatactagactaaa

SEQ ID NO: 34586 - DNA, 25 bp, Artificial
  probe
  misc_feature (1)..(25): SEQ ID NO: 230; WAN0249UI_at; Start 16; Stop 40
ttgagtctgcttactaatactagac

SEQ ID NO: 34587 - DNA, 25 bp, Artificial
  probe
  misc_feature (1)..(25): SEQ ID NO: 230; WAN0249UI_at; Start 352; Stop 376
gatgttggctaggttatgttcaatg

SEQ ID NO: 34588 - DNA, 25 bp, Artificial
  probe
  misc_feature (1)..(25): SEQ ID NO: 230; WAN0249UI_at; Start 157; Stop 181
cgttctattttgtctgatgggcaaa

SEQ ID NO: 34589 - DNA, 25 bp, Artificial
  probe
  misc_feature (1)..(25): SEQ ID NO: 230; WAN0249UI_at; Start 323; Stop 347
taattgagaaaggagaaatgattgt

SEQ ID NO: 34590 - DNA, 25 bp, Artificial
  probe
  misc_feature (1)..(25): SEQ ID NO: 230; WAN0249UI_at; Start 369; Stop 393
gttcaatgattcctaccgtctcaaa

SEQ ID NO: 34591 - DNA, 25 bp, Artificial
  probe
  misc_feature (1)..(25): SEQ ID NO: 230; WAN0249UI_at; Start 318; Stop 342
tagtgtaattgagaaaggagaaatg

SEQ ID NO: 34592 - DNA, 25 bp, Artificial
  probe
  misc_feature (1)..(25): SEQ ID NO: 230; WAN0249UI_at; Start 361; Stop 385
taggttatgttcaatgattcctacc

SEQ ID NO: 34593 - DNA, 25 bp, Artificial
  probe
  misc_feature (1)..(25): SEQ ID NO: 230; WAN0249UI_at; Start 358; Stop 382
ggctaggttatgttcaatgattcct

SEQ ID NO: 34594 - DNA, 25 bp, Artificial
  probe
  misc_feature (1)..(25): SEQ ID NO: 273; WAN0249UJ_at; Start 161; Stop 185
gtataagtctctacggaccaaccat

SEQ ID NO: 34595 - DNA, 25 bp, Artificial
  probe
  misc_feature (1)..(25): SEQ ID NO: 273; WAN0249UJ_at; Start 219; Stop 243
actgaactcaacttcttttttagtg

SEQ ID NO: 34596 - DNA, 25 bp, Artificial
  probe
  misc_feature (1)..(25): SEQ ID NO: 273; WAN0249UJ_at; Start 217; Stop 241
agactgaactcaacttcttttttag

SEQ ID NO: 34597 - DNA, 25 bp, Artificial
  probe
  misc_feature (1)..(25): SEQ ID NO: 273; WAN0249UJ_at; Start 229; Stop 253
acttcttttttagtgtcgtatcagc

SEQ ID NO: 34598 - DNA, 25 bp, Artificial
  probe
  misc_feature (1)..(25): SEQ ID NO: 273; WAN0249UJ_at; Start 167; Stop 191
gtctctacggaccaaccattatcct

SEQ ID NO: 34599 - DNA, 25 bp, Artificial
  probe
  misc_feature (1)..(25): SEQ ID NO: 273; WAN0249UJ_at; Start 179; Stop 203
caaccattatcctgtagtaacaaaa

SEQ ID NO: 34600 - DNA, 25 bp, Artificial
  probe
  misc_feature (1)..(25): SEQ ID NO: 273; WAN0249UJ_at; Start 174; Stop 198
cggaccaaccattatcctgtagtaa

SEQ ID NO: 34601 - DNA, 25 bp, Artificial
  probe
  misc_feature (1)..(25): SEQ ID NO: 273; WAN0249UJ_at; Start 182; Stop 206
ccattatcctgtagtaacaaaaaag

SEQ ID NO: 34602 - DNA, 25 bp, Artificial
  probe
  misc_feature (1)..(25): SEQ ID NO: 273; WAN0249UJ_at; Start 165; Stop 189
aagtctctacggaccaaccattatc

SEQ ID NO: 34603 - DNA, 25 bp, Artificial
  probe
  misc_feature (1)..(25): SEQ ID NO: 273; WAN0249UJ_at; Start 164; Stop 188
taagtctctacggaccaaccattat

SEQ ID NO: 34604 - DNA, 25 bp, Artificial
  probe
  misc_feature (1)..(25): SEQ ID NO: 273; WAN0249UJ_at; Start 177; Stop 201
accaaccattatcctgtagtaacaa

SEQ ID NO: 34605 - DNA, 25 bp, Artificial
  probe
  misc_feature (1)..(25): SEQ ID NO: 273; WAN0249UJ_at; Start 230; Stop 254
cttcttttttagtgtcgtatcagca

SEQ ID NO: 34606 - DNA, 25 bp, Artificial
  probe
  misc_feature (1)..(25): SEQ ID NO: 273; WAN0249UJ_at; Start 170; Stop 194
tctacggaccaaccattatcctgta

SEQ ID NO: 34607 - DNA, 25 bp, Artificial
  probe
  misc_feature (1)..(25): SEQ ID NO: 273; WAN0249UJ_at; Start 169; Stop 193
ctctacggaccaaccattatcctgt

SEQ ID NO: 34608 - DNA, 25 bp, Artificial
  probe
  misc_feature (1)..(25): SEQ ID NO: 273; WAN0249UJ_at; Start 173; Stop 197
acggaccaaccattatcctgtagta

SEQ ID NO: 34609 - DNA, 25 bp, Artificial
  probe
  misc_feature (1)..(25): SEQ ID NO: 273; WAN0249UJ_at; Start 212; Stop 236
gagacagactgaactcaacttcttt

SEQ ID NO: 34610 - DNA, 25 bp, Artificial
  probe
  misc_feature (1)..(25): SEQ ID NO: 273; WAN0249UJ_at; Start 227; Stop 251
caacttcttttttagtgtcgtatca

SEQ ID NO: 34611 - DNA, 25 bp, Artificial
  probe
  misc_feature (1)..(25): SEQ ID NO: 273; WAN0249UJ_at; Start 162; Stop 186
tataagtctctacggaccaaccatt

SEQ ID NO: 34612 - DNA, 25 bp, Artificial
  probe
  misc_feature (1)..(25): SEQ ID NO: 273; WAN0249UJ_at; Start 232; Stop 256
tcttttttagtgtcgtatcagcaat

SEQ ID NO: 34613 - DNA, 25 bp, Artificial
  probe
  misc_feature (1)..(25): SEQ ID NO: 273; WAN0249UJ_at; Start 168; Stop 192
tctctacggaccaaccattatcctg

SEQ ID NO: 34614 - DNA, 25 bp, Artificial
  probe
  misc_feature (1)..(25): SEQ ID NO: 273; WAN0249UJ_at; Start 178; Stop 202
ccaaccattatcctgtagtaacaaa

SEQ ID NO: 34615 - DNA, 25 bp, Artificial
  probe
  misc_feature (1)..(25): SEQ ID NO: 273; WAN0249UJ_at; Start 160; Stop 184
agtataagtctctacggaccaacca

SEQ ID NO: 34616 - DNA, 25 bp, Artificial
  probe
  misc_feature (1)..(25): SEQ ID NO: 273; WAN0249UJ_at; Start 214; Stop 238
gacagactgaactcaacttcttttt

SEQ ID NO: 34617 - DNA, 25 bp, Artificial
  probe
  misc_feature (1)..(25): SEQ ID NO: 273; WAN0249UJ_at; Start 233; Stop 257
cttttttagtgtcgtatcagcaatg

SEQ ID NO: 34618 - DNA, 25 bp, Artificial
  probe
  misc_feature (1)..(25): SEQ ID NO: 273; WAN0249UJ_at; Start 216; Stop 240
cagactgaactcaacttctttttta

SEQ ID NO: 34619 - DNA, 25 bp, Artificial
  probe
  misc_feature (1)..(25): SEQ ID NO: 273; WAN0249UJ_at; Start 166; Stop 190
agtctctacggaccaaccattatcc

SEQ ID NO: 34620 - DNA, 25 bp, Artificial
  probe
  misc_feature (1)..(25): SEQ ID NO: 273; WAN0249UJ_at; Start 176; Stop 200
gaccaaccattatcctgtagtaaca

SEQ ID NO: 34621 - DNA, 25 bp, Artificial
  probe
  misc_feature (1)..(25): SEQ ID NO: 273; WAN0249UJ_at; Start 211; Stop 235
tgagacagactgaactcaacttctt

SEQ ID NO: 34622 - DNA, 25 bp, Artificial
  probe
  misc_feature (1)..(25): SEQ ID NO: 273; WAN0249UJ_at; Start 3; Stop 27
tatttcctccgattttctaattcta

SEQ ID NO: 34623 - DNA, 25 bp, Artificial
  probe
  misc_feature (1)..(25): SEQ ID NO: 273; WAN0249UJ_at; Start 183; Stop 207
cattatcctgtagtaacaaaaaaga

SEQ ID NO: 34624 - DNA, 25 bp, Artificial
  probe
  misc_feature (1)..(25): SEQ ID NO: 273; WAN0249UJ_at; Start 8; Stop 32
cctccgattttctaattctattata

SEQ ID NO: 34625 - DNA, 25 bp, Artificial
  probe
  misc_feature (1)..(25): SEQ ID NO: 273; WAN0249UJ_at; Start 172; Stop 196
tacggaccaaccattatcctgtagt

SEQ ID NO: 34626 - DNA, 25 bp, Artificial
  probe
  misc_feature (1)..(25): SEQ ID NO: 273; WAN0249UJ_at; Start 221; Stop 245
tgaactcaacttcttttttagtgtc

SEQ ID NO: 34627 - DNA, 25 bp, Artificial
  probe
  misc_feature (1)..(25): SEQ ID NO: 273; WAN0249UJ_at; Start 175; Stop 199
ggaccaaccattatcctgtagtaac

SEQ ID NO: 34628 - DNA, 25 bp, Artificial
  probe
  misc_feature (1)..(25): SEQ ID NO: 4506; WAN0249UK_at; Start 2; Stop 26
agcaccgagtccattttctacgata

SEQ ID NO: 34629 - DNA, 25 bp, Artificial
  probe
  misc_feature (1)..(25): SEQ ID NO: 4506; WAN0249UK_at; Start 8; Stop 32
gagtccattttctacgataatacta

SEQ ID NO: 34630 - DNA, 25 bp, Artificial
  probe
  misc_feature (1)..(25): SEQ ID NO: 4506; WAN0249UK_at; Start 251; Stop 275
tcaatccattatatttcgtctgatg

SEQ ID NO: 34631 - DNA, 25 bp, Artificial
  probe
  misc_feature (1)..(25): SEQ ID NO: 4506; WAN0249UK_at; Start 3; Stop 27
gcaccgagtccattttctacgataa

SEQ ID NO: 34632 - DNA, 25 bp, Artificial
  probe
  misc_feature (1)..(25): SEQ ID NO: 4506; WAN0249UK_at; Start 5; Stop 29
accgagtccattttctacgataata

SEQ ID NO: 34633 - DNA, 25 bp, Artificial
  probe
  misc_feature (1)..(25): SEQ ID NO: 4506; WAN0249UK_at; Start 248; Stop 272
gtttcaatccattatatttcgtctg

SEQ ID NO: 34634 - DNA, 25 bp, Artificial
  probe
  misc_feature (1)..(25): SEQ ID NO: 4506; WAN0249UK_at; Start 6; Stop 30
ccgagtccattttctacgataatac

SEQ ID NO: 34635 - DNA, 25 bp, Artificial
  probe
  misc_feature (1)..(25): SEQ ID NO: 4506; WAN0249UK_at; Start 7; Stop 31
cgagtccattttctacgataatact

SEQ ID NO: 34636 - DNA, 25 bp, Artificial
  probe
  misc_feature (1)..(25): SEQ ID NO: 4506; WAN0249UK_at; Start 250; Stop 274
ttcaatccattatatttcgtctgat

SEQ ID NO: 34637 - DNA, 25 bp, Artificial
  probe
  misc_feature (1)..(25): SEQ ID NO: 4506; WAN0249UK_at; Start 1; Stop 25
tagcaccgagtccattttctacgat

SEQ ID NO: 34638 - DNA, 25 bp, Artificial
  probe
  misc_feature (1)..(25): SEQ ID NO: 4506; WAN0249UK_at; Start 252; Stop 276
caatccattatatttcgtctgatgg

SEQ ID NO: 34639 - DNA, 25 bp, Artificial
  probe
  misc_feature (1)..(25): SEQ ID NO: 4506; WAN0249UK_at; Start 4; Stop 28
caccgagtccattttctacgataat

SEQ ID NO: 34640 - DNA, 25 bp, Artificial
  probe
  misc_feature (1)..(25): SEQ ID NO: 4506; WAN0249UK_at; Start 247; Stop 271
agtttcaatccattatatttcgtct

SEQ ID NO: 34641 - DNA, 25 bp, Artificial
  probe
  misc_feature (1)..(25): SEQ ID NO: 4506; WAN0249UK_at; Start 249; Stop 273
tttcaatccattatatttcgtctga

SEQ ID NO: 34642 - DNA, 25 bp, Artificial
  probe
  misc_feature (1)..(25): SEQ ID NO: 3660; WAN0249UL_at; Start 466; Stop 490
tattatcgtagaaaatggactcggt

SEQ ID NO: 34643 - DNA, 25 bp, Artificial
  probe
  misc_feature (1)..(25): SEQ ID NO: 3660; WAN0249UL_at; Start 32; Stop 56
cctagccaacatcaatcacaatcat

SEQ ID NO: 34644 - DNA, 25 bp, Artificial
  probe
  misc_feature (1)..(25): SEQ ID NO: 3660; WAN0249UL_at; Start 223; Stop 247
cagacgaaatataatggattgaaac

SEQ ID NO: 34645 - DNA, 25 bp, Artificial
  probe
  misc_feature (1)..(25): SEQ ID NO: 3660; WAN0249UL_at; Start 463; Stop 487
tagtattatcgtagaaaatggactc

SEQ ID NO: 34646 - DNA, 25 bp, Artificial
  probe
  misc_feature (1)..(25): SEQ ID NO: 3660; WAN0249UL_at; Start 10; Stop 34
cggtaggaatcattgaacataacct

SEQ ID NO: 34647 - DNA, 25 bp, Artificial
  probe
  misc_feature (1)..(25): SEQ ID NO: 3660; WAN0249UL_at; Start 11; Stop 35
ggtaggaatcattgaacataaccta

SEQ ID NO: 34648 - DNA, 25 bp, Artificial
  probe
  misc_feature (1)..(25): SEQ ID NO: 3660; WAN0249UL_at; Start 5; Stop 29
tgagacggtaggaatcattgaacat

SEQ ID NO: 34649 - DNA, 25 bp, Artificial
  probe
  misc_feature (1)..(25): SEQ ID NO: 3660; WAN0249UL_at; Start 13; Stop 37
taggaatcattgaacataacctagc

SEQ ID NO: 34650 - DNA, 25 bp, Artificial
  probe
  misc_feature (1)..(25): SEQ ID NO: 3660; WAN0249UL_at; Start 29; Stop 53
taacctagccaacatcaatcacaat

SEQ ID NO: 34651 - DNA, 25 bp, Artificial
  probe
  misc_feature (1)..(25): SEQ ID NO: 3660; WAN0249UL_at; Start 17; Stop 41
aatcattgaacataacctagccaac

SEQ ID NO: 34652 - DNA, 25 bp, Artificial
  probe
  misc_feature (1)..(25): SEQ ID NO: 3660; WAN0249UL_at; Start 465; Stop 489
gtattatcgtagaaaatggactcgg

SEQ ID NO: 34653 - DNA, 25 bp, Artificial
  probe
  misc_feature (1)..(25): SEQ ID NO: 3660; WAN0249UL_at; Start 214; Stop 238
tttgcccatcagacgaaatataatg

SEQ ID NO: 34654 - DNA, 25 bp, Artificial
  probe
  misc_feature (1)..(25): SEQ ID NO: 3660; WAN0249UL_at; Start 34; Stop 58
tagccaacatcaatcacaatcattt

SEQ ID NO: 34655 - DNA, 25 bp, Artificial
  probe
  misc_feature (1)..(25): SEQ ID NO: 3660; WAN0249UL_at; Start 1; Stop 25
gatttgagacggtaggaatcattga

SEQ ID NO: 34656 - DNA, 25 bp, Artificial
  probe
  misc_feature (1)..(25): SEQ ID NO: 3660; WAN0249UL_at; Start 19; Stop 43
tcattgaacataacctagccaacat

SEQ ID NO: 34657 - DNA, 25 bp, Artificial
  probe
  misc_feature (1)..(25): SEQ ID NO: 3660; WAN0249UL_at; Start 20; Stop 44
cattgaacataacctagccaacatc

SEQ ID NO: 34658 - DNA, 25 bp, Artificial
  probe
  misc_feature (1)..(25): SEQ ID NO: 3660; WAN0249UL_at; Start 6; Stop 30
gagacggtaggaatcattgaacata

SEQ ID NO: 34659 - DNA, 25 bp, Artificial
  probe
  misc_feature (1)..(25): SEQ ID NO: 3660; WAN0249UL_at; Start 24; Stop 48
gaacataacctagccaacatcaatc

SEQ ID NO: 34660 - DNA, 25 bp, Artificial
  probe
  misc_feature (1)..(25): SEQ ID NO: 3660; WAN0249UL_at; Start 4; Stop 28
ttgagacggtaggaatcattgaaca

SEQ ID NO: 34661 - DNA, 25 bp, Artificial
  probe
  misc_feature (1)..(25): SEQ ID NO: 3660; WAN0249UL_at; Start 468; Stop 492
ttatcgtagaaaatggactcggtgc

SEQ ID NO: 34662 - DNA, 25 bp, Artificial
  probe
  misc_feature (1)..(25): SEQ ID NO: 3660; WAN0249UL_at; Start 469; Stop 493
tatcgtagaaaatggactcggtgct

SEQ ID NO: 34663 - DNA, 25 bp, Artificial
  probe
  misc_feature (1)..(25): SEQ ID NO: 3660; WAN0249UL_at; Start 27; Stop 51
cataacctagccaacatcaatcaca

SEQ ID NO: 34664 - DNA, 25 bp, Artificial
  probe
  misc_feature (1)..(25): SEQ ID NO: 3660; WAN0249UL_at; Start 23; Stop 47
tgaacataacctagccaacatcaat

SEQ ID NO: 34665 - DNA, 25 bp, Artificial
  probe
  misc_feature (1)..(25): SEQ ID NO: 3660; WAN0249UL_at; Start 220; Stop 244
catcagacgaaatataatggattga

SEQ ID NO: 34666 - DNA, 25 bp, Artificial
  probe
  misc_feature (1)..(25): SEQ ID NO: 3660; WAN0249UL_at; Start 216; Stop 240
tgcccatcagacgaaatataatgga

SEQ ID NO: 34667 - DNA, 25 bp, Artificial
  probe
  misc_feature (1)..(25): SEQ ID NO: 3660; WAN0249UL_at; Start 8; Stop 32
gacggtaggaatcattgaacataac

SEQ ID NO: 34668 - DNA, 25 bp, Artificial
  probe
  misc_feature (1)..(25): SEQ ID NO: 3660; WAN0249UL_at; Start 217; Stop 241
gcccatcagacgaaatataatggat

SEQ ID NO: 34669 - DNA, 25 bp, Artificial
  probe
  misc_feature (1)..(25): SEQ ID NO: 3660; WAN0249UL_at; Start 15; Stop 39
ggaatcattgaacataacctagcca

SEQ ID NO: 34670 - DNA, 25 bp, Artificial
  probe
  misc_feature (1)..(25): SEQ ID NO: 3660; WAN0249UL_at; Start 218; Stop 242
cccatcagacgaaatataatggatt

SEQ ID NO: 34671 - DNA, 25 bp, Artificial
  probe
  misc_feature (1)..(25): SEQ ID NO: 3660; WAN0249UL_at; Start 215; Stop 239
ttgcccatcagacgaaatataatgg

SEQ ID NO: 34672 - DNA, 25 bp, Artificial
  probe
  misc_feature (1)..(25): SEQ ID NO: 3660; WAN0249UL_at; Start 3; Stop 27
tttgagacggtaggaatcattgaac

SEQ ID NO: 34673 - DNA, 25 bp, Artificial
  probe
  misc_feature (1)..(25): SEQ ID NO: 3660; WAN0249UL_at; Start 225; Stop 249
gacgaaatataatggattgaaacta

SEQ ID NO: 34674 - DNA, 25 bp, Artificial
  probe
  misc_feature (1)..(25): SEQ ID NO: 3660; WAN0249UL_at; Start 16; Stop 40
gaatcattgaacataacctagccaa

SEQ ID NO: 34675 - DNA, 25 bp, Artificial
  probe
  misc_feature (1)..(25): SEQ ID NO: 3660; WAN0249UL_at; Start 470; Stop 494
atcgtagaaaatggactcggtgcta

SEQ ID NO: 34676 - DNA, 25 bp, Artificial
  probe
  misc_feature (1)..(25): SEQ ID NO: 3778; WAN0249UM_at; Start 22; Stop 46
ttttttctattgcaagaatgtactg

SEQ ID NO: 34677 - DNA, 25 bp, Artificial
  probe
  misc_feature (1)..(25): SEQ ID NO: 3778; WAN0249UM_at; Start 32; Stop 56
tgcaagaatgtactgacaaggagga

SEQ ID NO: 34678 - DNA, 25 bp, Artificial
  probe
  misc_feature (1)..(25): SEQ ID NO: 3778; WAN0249UM_at; Start 27; Stop 51
tctattgcaagaatgtactgacaag

SEQ ID NO: 34679 - DNA, 25 bp, Artificial
  probe
  misc_feature (1)..(25): SEQ ID NO: 3778; WAN0249UM_at; Start 21; Stop 45
attttttctattgcaagaatgtact

SEQ ID NO: 34680 - DNA, 25 bp, Artificial
  probe
  misc_feature (1)..(25): SEQ ID NO: 3778; WAN0249UM_at; Start 10; Stop 34
gactcaatcttattttttctattgc

SEQ ID NO: 34681 - DNA, 25 bp, Artificial
  probe
  misc_feature (1)..(25): SEQ ID NO: 3778; WAN0249UM_at; Start 13; Stop 37
tcaatcttattttttctattgcaag

SEQ ID NO: 34682 - DNA, 25 bp, Artificial
  probe
  misc_feature (1)..(25): SEQ ID NO: 3778; WAN0249UM_at; Start 33; Stop 57
gcaagaatgtactgacaaggaggag

SEQ ID NO: 34683 - DNA, 25 bp, Artificial
  probe
  misc_feature (1)..(25): SEQ ID NO: 3778; WAN0249UM_at; Start 16; Stop 40
atcttattttttctattgcaagaat

SEQ ID NO: 34684 - DNA, 25 bp, Artificial
  probe
  misc_feature (1)..(25): SEQ ID NO: 3778; WAN0249UM_at; Start 30; Stop 54
attgcaagaatgtactgacaaggag

SEQ ID NO: 34685 - DNA, 25 bp, Artificial
  probe
  misc_feature (1)..(25): SEQ ID NO: 3778; WAN0249UM_at; Start 35; Stop 59
aagaatgtactgacaaggaggaggt

SEQ ID NO: 34686 - DNA, 25 bp, Artificial
  probe
  misc_feature (1)..(25): SEQ ID NO: 3778; WAN0249UM_at; Start 34; Stop 58
caagaatgtactgacaaggaggagg

SEQ ID NO: 34687 - DNA, 25 bp, Artificial
  probe
  misc_feature (1)..(25): SEQ ID NO: 3778; WAN0249UM_at; Start 14; Stop 38
caatcttattttttctattgcaaga

SEQ ID NO: 34688 - DNA, 25 bp, Artificial
  probe
  misc_feature (1)..(25): SEQ ID NO: 3778; WAN0249UM_at; Start 41; Stop 65
gtactgacaaggaggaggtgagaag

SEQ ID NO: 34689 - DNA, 25 bp, Artificial
  probe
  misc_feature (1)..(25): SEQ ID NO: 3778; WAN0249UM_at; Start 29; Stop 53
tattgcaagaatgtactgacaagga

SEQ ID NO: 34690 - DNA, 25 bp, Artificial
  probe
  misc_feature (1)..(25): SEQ ID NO: 3778; WAN0249UM_at; Start 9; Stop 33
ggactcaatcttattttttctattg

SEQ ID NO: 34691 - DNA, 25 bp, Artificial
  probe
  misc_feature (1)..(25): SEQ ID NO: 3778; WAN0249UM_at; Start 39; Stop 63
atgtactgacaaggaggaggtgaga

SEQ ID NO: 34692 - DNA, 25 bp, Artificial
  probe
  misc_feature (1)..(25): SEQ ID NO: 3778; WAN0249UM_at; Start 36; Stop 60
agaatgtactgacaaggaggaggtg

SEQ ID NO: 34693 - DNA, 25 bp, Artificial
  probe
  misc_feature (1)..(25): SEQ ID NO: 3778; WAN0249UM_at; Start 26; Stop 50
ttctattgcaagaatgtactgacaa

SEQ ID NO: 34694 - DNA, 25 bp, Artificial
  probe
  misc_feature (1)..(25): SEQ ID NO: 3778; WAN0249UM_at; Start 38; Stop 62
aatgtactgacaaggaggaggtgag

SEQ ID NO: 34695 - DNA, 25 bp, Artificial
  probe
  misc_feature (1)..(25): SEQ ID NO: 3778; WAN0249UM_at; Start 20; Stop 44
tattttttctattgcaagaatgtac

SEQ ID NO: 34696 - DNA, 25 bp, Artificial
  probe
  misc_feature (1)..(25): SEQ ID NO: 3778; WAN0249UM_at; Start 23; Stop 47
tttttctattgcaagaatgtactga

SEQ ID NO: 34697 - DNA, 25 bp, Artificial
  probe
  misc_feature (1)..(25): SEQ ID NO: 3778; WAN0249UM_at; Start 28; Stop 52
ctattgcaagaatgtactgacaagg

SEQ ID NO: 34698 - DNA, 25 bp, Artificial
  probe
  misc_feature (1)..(25): SEQ ID NO: 3778; WAN0249UM_at; Start 12; Stop 36
ctcaatcttattttttctattgcaa

SEQ ID NO: 34699 - DNA, 25 bp, Artificial
  probe
  misc_feature (1)..(25): SEQ ID NO: 3778; WAN0249UM_at; Start 15; Stop 39
aatcttattttttctattgcaagaa

SEQ ID NO: 34700 - DNA, 25 bp, Artificial
  probe
  misc_feature (1)..(25): SEQ ID NO: 3778; WAN0249UM_at; Start 25; Stop 49
tttctattgcaagaatgtactgaca

SEQ ID NO: 34701 - DNA, 25 bp, Artificial
  probe
  misc_feature (1)..(25): SEQ ID NO: 3778; WAN0249UM_at; Start 24; Stop 48
ttttctattgcaagaatgtactgac

SEQ ID NO: 34702 - DNA, 25 bp, Artificial
  probe
  misc_feature (1)..(25): SEQ ID NO: 3778; WAN0249UM_at; Start 37; Stop 61
gaatgtactgacaaggaggaggtga

SEQ ID NO: 34703 - DNA, 25 bp, Artificial
  probe
  misc_feature (1)..(25): SEQ ID NO: 3778; WAN0249UM_at; Start 31; Stop 55
ttgcaagaatgtactgacaaggagg

SEQ ID NO: 34704 - DNA, 25 bp, Artificial
  probe
  misc_feature (1)..(25): SEQ ID NO: 3778; WAN0249UM_at; Start 40; Stop 64
tgtactgacaaggaggaggtgagaa

SEQ ID NO: 34705 - DNA, 25 bp, Artificial
  probe
  misc_feature (1)..(25): SEQ ID NO: 3778; WAN0249UM_at; Start 11; Stop 35
actcaatcttattttttctattgca

SEQ ID NO: 34706 - DNA, 25 bp, Artificial
  probe
  misc_feature (1)..(25): SEQ ID NO: 3778; WAN0249UM_at; Start 19; Stop 43
ttattttttctattgcaagaatgta

SEQ ID NO: 34707 - DNA, 25 bp, Artificial
  probe
  misc_feature (1)..(25): SEQ ID NO: 3778; WAN0249UM_at; Start 17; Stop 41
tcttattttttctattgcaagaatg

SEQ ID NO: 34708 - DNA, 25 bp, Artificial
  probe
  misc_feature (1)..(25): SEQ ID NO: 3778; WAN0249UM_at; Start 18; Stop 42
cttattttttctattgcaagaatgt

SEQ ID NO: 34709 - DNA, 25 bp, Artificial
  probe
  misc_feature (1)..(25): SEQ ID NO: 3493; WAN0249UN_at; Start 8; Stop 32
cctcctccttgtcagtacattcttg

SEQ ID NO: 34710 - DNA, 25 bp, Artificial
  probe
  misc_feature (1)..(25): SEQ ID NO: 3493; WAN0249UN_at; Start 30; Stop 54
ttgcaatagaaaaaataagattgag

SEQ ID NO: 34711 - DNA, 25 bp, Artificial
  probe
  misc_feature (1)..(25): SEQ ID NO: 3493; WAN0249UN_at; Start 14; Stop 38
ccttgtcagtacattcttgcaatag

SEQ ID NO: 34712 - DNA, 25 bp, Artificial
  probe
  misc_feature (1)..(25): SEQ ID NO: 3493; WAN0249UN_at; Start 4; Stop 28
ctcacctcctccttgtcagtacatt

SEQ ID NO: 34713 - DNA, 25 bp, Artificial
  probe
  misc_feature (1)..(25): SEQ ID NO: 3493; WAN0249UN_at; Start 21; Stop 45
agtacattcttgcaatagaaaaaat

SEQ ID NO: 34714 - DNA, 25 bp, Artificial
  probe
  misc_feature (1)..(25): SEQ ID NO: 3493; WAN0249UN_at; Start 23; Stop 47
tacattcttgcaatagaaaaaataa

SEQ ID NO: 34715 - DNA, 25 bp, Artificial
  probe
  misc_feature (1)..(25): SEQ ID NO: 3493; WAN0249UN_at; Start 24; Stop 48
acattcttgcaatagaaaaaataag

SEQ ID NO: 34716 - DNA, 25 bp, Artificial
  probe
  misc_feature (1)..(25): SEQ ID NO: 3493; WAN0249UN_at; Start 16; Stop 40
ttgtcagtacattcttgcaatagaa

SEQ ID NO: 34717 - DNA, 25 bp, Artificial
  probe
  misc_feature (1)..(25): SEQ ID NO: 3493; WAN0249UN_at; Start 2; Stop 26
ttctcacctcctccttgtcagtaca

SEQ ID NO: 34718 - DNA, 25 bp, Artificial
  probe
  misc_feature (1)..(25): SEQ ID NO: 3493; WAN0249UN_at; Start 22; Stop 46
gtacattcttgcaatagaaaaaata

SEQ ID NO: 34719 - DNA, 25 bp, Artificial
  probe
  misc_feature (1)..(25): SEQ ID NO: 3493; WAN0249UN_at; Start 1; Stop 25
cttctcacctcctccttgtcagtac

SEQ ID NO: 34720 - DNA, 25 bp, Artificial
  probe
  misc_feature (1)..(25): SEQ ID NO: 3493; WAN0249UN_at; Start 9; Stop 33
ctcctccttgtcagtacattcttgc

SEQ ID NO: 34721 - DNA, 25 bp, Artificial
  probe
  misc_feature (1)..(25): SEQ ID NO: 3493; WAN0249UN_at; Start 19; Stop 43
tcagtacattcttgcaatagaaaaa

SEQ ID NO: 34722 - DNA, 25 bp, Artificial
  probe
  misc_feature (1)..(25): SEQ ID NO: 3493; WAN0249UN_at; Start 20; Stop 44
cagtacattcttgcaatagaaaaaa

SEQ ID NO: 34723 - DNA, 25 bp, Artificial
  probe
  misc_feature (1)..(25): SEQ ID NO: 3493; WAN0249UN_at; Start 11; Stop 35
cctccttgtcagtacattcttgcaa

SEQ ID NO: 34724 - DNA, 25 bp, Artificial
  probe
  misc_feature (1)..(25): SEQ ID NO: 3493; WAN0249UN_at; Start 15; Stop 39
cttgtcagtacattcttgcaataga

SEQ ID NO: 34725 - DNA, 25 bp, Artificial
  probe
  misc_feature (1)..(25): SEQ ID NO: 3493; WAN0249UN_at; Start 29; Stop 53
cttgcaatagaaaaaataagattga

SEQ ID NO: 34726 - DNA, 25 bp, Artificial
  probe
  misc_feature (1)..(25): SEQ ID NO: 3493; WAN0249UN_at; Start 6; Stop 30
cacctcctccttgtcagtacattct

SEQ ID NO: 34727 - DNA, 25 bp, Artificial
  probe
  misc_feature (1)..(25): SEQ ID NO: 3493; WAN0249UN_at; Start 12; Stop 36
ctccttgtcagtacattcttgcaat

SEQ ID NO: 34728 - DNA, 25 bp, Artificial
  probe
  misc_feature (1)..(25): SEQ ID NO: 3493; WAN0249UN_at; Start 28; Stop 52
tcttgcaatagaaaaaataagattg

SEQ ID NO: 34729 - DNA, 25 bp, Artificial
  probe
  misc_feature (1)..(25): SEQ ID NO: 3493; WAN0249UN_at; Start 27; Stop 51
ttcttgcaatagaaaaaataagatt

SEQ ID NO: 34730 - DNA, 25 bp, Artificial
  probe
  misc_feature (1)..(25): SEQ ID NO: 3493; WAN0249UN_at; Start 25; Stop 49
cattcttgcaatagaaaaaataaga

SEQ ID NO: 34731 - DNA, 25 bp, Artificial
  probe
  misc_feature (1)..(25): SEQ ID NO: 3493; WAN0249UN_at; Start 3; Stop 27
tctcacctcctccttgtcagtacat

SEQ ID NO: 34732 - DNA, 25 bp, Artificial
  probe
  misc_feature (1)..(25): SEQ ID NO: 3493; WAN0249UN_at; Start 13; Stop 37
tccttgtcagtacattcttgcaata

SEQ ID NO: 34733 - DNA, 25 bp, Artificial
  probe
  misc_feature (1)..(25): SEQ ID NO: 3493; WAN0249UN_at; Start 33; Stop 57
caatagaaaaaataagattgagtcc

SEQ ID NO: 34734 - DNA, 25 bp, Artificial
  probe
  misc_feature (1)..(25): SEQ ID NO: 3493; WAN0249UN_at; Start 17; Stop 41
tgtcagtacattcttgcaatagaaa

SEQ ID NO: 34735 - DNA, 25 bp, Artificial
  probe
  misc_feature (1)..(25): SEQ ID NO: 3493; WAN0249UN_at; Start 10; Stop 34
tcctccttgtcagtacattcttgca

SEQ ID NO: 34736 - DNA, 25 bp, Artificial
  probe
  misc_feature (1)..(25): SEQ ID NO: 3493; WAN0249UN_at; Start 26; Stop 50
attcttgcaatagaaaaaataagat

SEQ ID NO: 34737 - DNA, 25 bp, Artificial
  probe
  misc_feature (1)..(25): SEQ ID NO: 3493; WAN0249UN_at; Start 31; Stop 55
tgcaatagaaaaaataagattgagt

SEQ ID NO: 34738 - DNA, 25 bp, Artificial
  probe
  misc_feature (1)..(25): SEQ ID NO: 3493; WAN0249UN_at; Start 7; Stop 31
acctcctccttgtcagtacattctt

SEQ ID NO: 34739 - DNA, 25 bp, Artificial
  probe
  misc_feature (1)..(25): SEQ ID NO: 3493; WAN0249UN_at; Start 18; Stop 42
gtcagtacattcttgcaatagaaaa

SEQ ID NO: 34740 - DNA, 25 bp, Artificial
  probe
  misc_feature (1)..(25): SEQ ID NO: 3493; WAN0249UN_at; Start 5; Stop 29
tcacctcctccttgtcagtacattc

SEQ ID NO: 34741 - DNA, 25 bp, Artificial
  probe
  misc_feature (1)..(25): SEQ ID NO: 3493; WAN0249UN_at; Start 32; Stop 56
gcaatagaaaaaataagattgagtc

SEQ ID NO: 34742 - DNA, 25 bp, Artificial
  probe
  misc_feature (1)..(25): SEQ ID NO: 4606; WAN0249UO_at; Start 23; Stop 47
ataagaggcttgatttggtgaatca

SEQ ID NO: 34743 - DNA, 25 bp, Artificial
  probe
  misc_feature (1)..(25): SEQ ID NO: 4606; WAN0249UO_at; Start 34; Stop 58
gatttggtgaatcaagtcttttttc

SEQ ID NO: 34744 - DNA, 25 bp, Artificial
  probe
  misc_feature (1)..(25): SEQ ID NO: 4606; WAN0249UO_at; Start 25; Stop 49
aagaggcttgatttggtgaatcaag

SEQ ID NO: 34745 - DNA, 25 bp, Artificial
  probe
  misc_feature (1)..(25): SEQ ID NO: 4606; WAN0249UO_at; Start 49; Stop 73
gtcttttttctctcttttactgcca

SEQ ID NO: 34746 - DNA, 25 bp, Artificial
  probe
  misc_feature (1)..(25): SEQ ID NO: 4606; WAN0249UO_at; Start 17; Stop 41
tgaccaataagaggcttgatttggt

SEQ ID NO: 34747 - DNA, 25 bp, Artificial
  probe
  misc_feature (1)..(25): SEQ ID NO: 4606; WAN0249UO_at; Start 21; Stop 45
caataagaggcttgatttggtgaat

SEQ ID NO: 34748 - DNA, 25 bp, Artificial
  probe
  misc_feature (1)..(25): SEQ ID NO: 4606; WAN0249UO_at; Start 8; Stop 32
ttaaaatgatgaccaataagaggct

SEQ ID NO: 34749 - DNA, 25 bp, Artificial
  probe
  misc_feature (1)..(25): SEQ ID NO: 4606; WAN0249UO_at; Start 65; Stop 89
ttactgccatttgtgataaaatagt

SEQ ID NO: 34750 - DNA, 25 bp, Artificial
  probe
  misc_feature (1)..(25): SEQ ID NO: 4606; WAN0249UO_at; Start 15; Stop 39
gatgaccaataagaggcttgatttg

SEQ ID NO: 34751 - DNA, 25 bp, Artificial
  probe
  misc_feature (1)..(25): SEQ ID NO: 4606; WAN0249UO_at; Start 2; Stop 26
cattctttaaaatgatgaccaataa

SEQ ID NO: 34752 - DNA, 25 bp, Artificial
  probe
  misc_feature (1)..(25): SEQ ID NO: 4606; WAN0249UO_at; Start 16; Stop 40
atgaccaataagaggcttgatttgg

SEQ ID NO: 34753 - DNA, 25 bp, Artificial
  probe
  misc_feature (1)..(25): SEQ ID NO: 4606; WAN0249UO_at; Start 10; Stop 34
aaaatgatgaccaataagaggcttg

SEQ ID NO: 34754 - DNA, 25 bp, Artificial
  probe
  misc_feature (1)..(25): SEQ ID NO: 4606; WAN0249UO_at; Start 64; Stop 88
tttactgccatttgtgataaaatag

SEQ ID NO: 34755 - DNA, 25 bp, Artificial
  probe
  misc_feature (1)..(25): SEQ ID NO: 4606; WAN0249UO_at; Start 38; Stop 62
tggtgaatcaagtcttttttctctc

SEQ ID NO: 34756 - DNA, 25 bp, Artificial
  probe
  misc_feature (1)..(25): SEQ ID NO: 4606; WAN0249UO_at; Start 13; Stop 37
atgatgaccaataagaggcttgatt

SEQ ID NO: 34757 - DNA, 25 bp, Artificial
  probe
  misc_feature (1)..(25): SEQ ID NO: 4606; WAN0249UO_at; Start 46; Stop 70
caagtcttttttctctcttttactg

SEQ ID NO: 34758 - DNA, 25 bp, Artificial
  probe
  misc_feature (1)..(25): SEQ ID NO: 4606; WAN0249UO_at; Start 29; Stop 53
ggcttgatttggtgaatcaagtctt

SEQ ID NO: 34759 - DNA, 25 bp, Artificial
  probe
  misc_feature (1)..(25): SEQ ID NO: 4606; WAN0249UO_at; Start 6; Stop 30
ctttaaaatgatgaccaataagagg

SEQ ID NO: 34760 - DNA, 25 bp, Artificial
  probe
  misc_feature (1)..(25): SEQ ID NO: 4606; WAN0249UO_at; Start 20; Stop 44
ccaataagaggcttgatttggtgaa

SEQ ID NO: 34761 - DNA, 25 bp, Artificial
  probe
  misc_feature (1)..(25): SEQ ID NO: 4606; WAN0249UO_at; Start 24; Stop 48
taagaggcttgatttggtgaatcaa

SEQ ID NO: 34762 - DNA, 25 bp, Artificial
  probe
  misc_feature (1)..(25): SEQ ID NO: 4606; WAN0249UO_at; Start 56; Stop 80
ttctctcttttactgccatttgtga

SEQ ID NO: 34763 - DNA, 25 bp, Artificial
  probe
  misc_feature (1)..(25): SEQ ID NO: 4606; WAN0249UO_at; Start 11; Stop 35
aaatgatgaccaataagaggcttga

SEQ ID NO: 34764 - DNA, 25 bp, Artificial
  probe
  misc_feature (1)..(25): SEQ ID NO: 4606; WAN0249UO_at; Start 60; Stop 84
ctcttttactgccatttgtgataaa

SEQ ID NO: 34765 - DNA, 25 bp, Artificial
  probe
  misc_feature (1)..(25): SEQ ID NO: 4606; WAN0249UO_at; Start 53; Stop 77
tttttctctcttttactgccatttg

SEQ ID NO: 34766 - DNA, 25 bp, Artificial
  probe
  misc_feature (1)..(25): SEQ ID NO: 4606; WAN0249UO_at; Start 58; Stop 82
ctctcttttactgccatttgtgata

SEQ ID NO: 34767 - DNA, 25 bp, Artificial
  probe
  misc_feature (1)..(25): SEQ ID NO: 4606; WAN0249UO_at; Start 22; Stop 46
aataagaggcttgatttggtgaatc

SEQ ID NO: 34768 - DNA, 25 bp, Artificial
  probe
  misc_feature (1)..(25): SEQ ID NO: 4606; WAN0249UO_at; Start 7; Stop 31
tttaaaatgatgaccaataagaggc

SEQ ID NO: 34769 - DNA, 25 bp, Artificial
  probe
  misc_feature (1)..(25): SEQ ID NO: 4606; WAN0249UO_at; Start 12; Stop 36
aatgatgaccaataagaggcttgat

SEQ ID NO: 34770 - DNA, 25 bp, Artificial
  probe
  misc_feature (1)..(25): SEQ ID NO: 4606; WAN0249UO_at; Start 76; Stop 100
tgtgataaaatagtatagaacgatt

SEQ ID NO: 34771 - DNA, 25 bp, Artificial
  probe
  misc_feature (1)..(25): SEQ ID NO: 4606; WAN0249UO_at; Start 9; Stop 33
taaaatgatgaccaataagaggctt

SEQ ID NO: 34772 - DNA, 25 bp, Artificial
  probe
  misc_feature (1)..(25): SEQ ID NO: 4606; WAN0249UO_at; Start 14; Stop 38
tgatgaccaataagaggcttgattt

SEQ ID NO: 34773 - DNA, 25 bp, Artificial
  probe
  misc_feature (1)..(25): SEQ ID NO: 4606; WAN0249UO_at; Start 39; Stop 63
ggtgaatcaagtcttttttctctct

SEQ ID NO: 34774 - DNA, 25 bp, Artificial
  probe
  misc_feature (1)..(25): SEQ ID NO: 4606; WAN0249UO_at; Start 57; Stop 81
tctctcttttactgccatttgtgat

SEQ ID NO: 34775 - DNA, 25 bp, Artificial
  probe
  misc_feature (1)..(25): SEQ ID NO: 4606; WAN0249UO_at; Start 27; Stop 51
gaggcttgatttggtgaatcaagtc

SEQ ID NO: 34776 - DNA, 25 bp, Artificial
  probe
  misc_feature (1)..(25): SEQ ID NO: 3782; WAN0249UP_at; Start 73; Stop 97
caagcctcttattggtcatcatttt

SEQ ID NO: 34777 - DNA, 25 bp, Artificial
  probe
  misc_feature (1)..(25): SEQ ID NO: 3782; WAN0249UP_at; Start 77; Stop 101
cctcttattggtcatcattttaaag

SEQ ID NO: 34778 - DNA, 25 bp, Artificial
  probe
  misc_feature (1)..(25): SEQ ID NO: 3782; WAN0249UP_at; Start 68; Stop 92
caaatcaagcctcttattggtcatc

SEQ ID NO: 34779 - DNA, 25 bp, Artificial
  probe
  misc_feature (1)..(25): SEQ ID NO: 3782; WAN0249UP_at; Start 37; Stop 61
cagtaaaagagagaaaaaagacttg

SEQ ID NO: 34780 - DNA, 25 bp, Artificial
  probe
  misc_feature (1)..(25): SEQ ID NO: 3782; WAN0249UP_at; Start 69; Stop 93
aaatcaagcctcttattggtcatca

SEQ ID NO: 34781 - DNA, 25 bp, Artificial
  probe
  misc_feature (1)..(25): SEQ ID NO: 3782; WAN0249UP_at; Start 28; Stop 52
cacaaatggcagtaaaagagagaaa

SEQ ID NO: 34782 - DNA, 25 bp, Artificial
  probe
  misc_feature (1)..(25): SEQ ID NO: 3782; WAN0249UP_at; Start 74; Stop 98
aagcctcttattggtcatcatttta

SEQ ID NO: 34783 - DNA, 25 bp, Artificial
  probe
  misc_feature (1)..(25): SEQ ID NO: 3782; WAN0249UP_at; Start 49; Stop 73
gaaaaaagacttgattcaccaaatc

SEQ ID NO: 34784 - DNA, 25 bp, Artificial
  probe
  misc_feature (1)..(25): SEQ ID NO: 3782; WAN0249UP_at; Start 59; Stop 83
ttgattcaccaaatcaagcctctta

SEQ ID NO: 34785 - DNA, 25 bp, Artificial
  probe
  misc_feature (1)..(25): SEQ ID NO: 3782; WAN0249UP_at; Start 27; Stop 51
tcacaaatggcagtaaaagagagaa

SEQ ID NO: 34786 - DNA, 25 bp, Artificial
  probe
  misc_feature (1)..(25): SEQ ID NO: 3782; WAN0249UP_at; Start 30; Stop 54
caaatggcagtaaaagagagaaaaa

SEQ ID NO: 34787 - DNA, 25 bp, Artificial
  probe
  misc_feature (1)..(25): SEQ ID NO: 3782; WAN0249UP_at; Start 32; Stop 56
aatggcagtaaaagagagaaaaaag

SEQ ID NO: 34788 - DNA, 25 bp, Artificial
  probe
  misc_feature (1)..(25): SEQ ID NO: 3782; WAN0249UP_at; Start 60; Stop 84
tgattcaccaaatcaagcctcttat

SEQ ID NO: 34789 - DNA, 25 bp, Artificial
  probe
  misc_feature (1)..(25): SEQ ID NO: 3782; WAN0249UP_at; Start 70; Stop 94
aatcaagcctcttattggtcatcat

SEQ ID NO: 34790 - DNA, 25 bp, Artificial
  probe
  misc_feature (1)..(25): SEQ ID NO: 3782; WAN0249UP_at; Start 43; Stop 67
aagagagaaaaaagacttgattcac

SEQ ID NO: 34791 - DNA, 25 bp, Artificial
  probe
  misc_feature (1)..(25): SEQ ID NO: 3782; WAN0249UP_at; Start 19; Stop 43
ctattttatcacaaatggcagtaaa

SEQ ID NO: 34792 - DNA, 25 bp, Artificial
  probe
  misc_feature (1)..(25): SEQ ID NO: 3782; WAN0249UP_at; Start 23; Stop 47
tttatcacaaatggcagtaaaagag

SEQ ID NO: 34793 - DNA, 25 bp, Artificial
  probe
  misc_feature (1)..(25): SEQ ID NO: 3782; WAN0249UP_at; Start 18; Stop 42
actattttatcacaaatggcagtaa

SEQ ID NO: 34794 - DNA, 25 bp, Artificial
  probe
  misc_feature (1)..(25): SEQ ID NO: 3782; WAN0249UP_at; Start 45; Stop 69
gagagaaaaaagacttgattcacca

SEQ ID NO: 34795 - DNA, 25 bp, Artificial
  probe
  misc_feature (1)..(25): SEQ ID NO: 3782; WAN0249UP_at; Start 80; Stop 104
cttattggtcatcattttaaagaat

SEQ ID NO: 34796 - DNA, 25 bp, Artificial
  probe
  misc_feature (1)..(25): SEQ ID NO: 3782; WAN0249UP_at; Start 47; Stop 71
gagaaaaaagacttgattcaccaaa

SEQ ID NO: 34797 - DNA, 25 bp, Artificial
  probe
  misc_feature (1)..(25): SEQ ID NO: 3782; WAN0249UP_at; Start 7; Stop 31
aatcgttctatactattttatcaca

SEQ ID NO: 34798 - DNA, 25 bp, Artificial
  probe
  misc_feature (1)..(25): SEQ ID NO: 3782; WAN0249UP_at; Start 25; Stop 49
tatcacaaatggcagtaaaagagag

SEQ ID NO: 34799 - DNA, 25 bp, Artificial
  probe
  misc_feature (1)..(25): SEQ ID NO: 3782; WAN0249UP_at; Start 64; Stop 88
tcaccaaatcaagcctcttattggt

SEQ ID NO: 34800 - DNA, 25 bp, Artificial
  probe
  misc_feature (1)..(25): SEQ ID NO: 3782; WAN0249UP_at; Start 54; Stop 78
aagacttgattcaccaaatcaagcc

SEQ ID NO: 34801 - DNA, 25 bp, Artificial
  probe
  misc_feature (1)..(25): SEQ ID NO: 3782; WAN0249UP_at; Start 63; Stop 87
ttcaccaaatcaagcctcttattgg

SEQ ID NO: 34802 - DNA, 25 bp, Artificial
  probe
  misc_feature (1)..(25): SEQ ID NO: 3782; WAN0249UP_at; Start 61; Stop 85
gattcaccaaatcaagcctcttatt

SEQ ID NO: 34803 - DNA, 25 bp, Artificial
  probe
  misc_feature (1)..(25): SEQ ID NO: 3782; WAN0249UP_at; Start 82; Stop 106
tattggtcatcattttaaagaatga

SEQ ID NO: 34804 - DNA, 25 bp, Artificial
  probe
  misc_feature (1)..(25): SEQ ID NO: 3782; WAN0249UP_at; Start 76; Stop 100
gcctcttattggtcatcattttaaa

SEQ ID NO: 34805 - DNA, 25 bp, Artificial
  probe
  misc_feature (1)..(25): SEQ ID NO: 3782; WAN0249UP_at; Start 72; Stop 96
tcaagcctcttattggtcatcattt

SEQ ID NO: 34806 - DNA, 25 bp, Artificial
  probe
  misc_feature (1)..(25): SEQ ID NO: 3782; WAN0249UP_at; Start 26; Stop 50
atcacaaatggcagtaaaagagaga

SEQ ID NO: 34807 - DNA, 25 bp, Artificial
  probe
  misc_feature (1)..(25): SEQ ID NO: 3782; WAN0249UP_at; Start 52; Stop 76
aaaagacttgattcaccaaatcaag

SEQ ID NO: 34808 - DNA, 25 bp, Artificial
  probe
  misc_feature (1)..(25): SEQ ID NO: 3782; WAN0249UP_at; Start 56; Stop 80
gacttgattcaccaaatcaagcctc

SEQ ID NO: 34809 - DNA, 25 bp, Artificial
  probe
  misc_feature (1)..(25): SEQ ID NO: 3782; WAN0249UP_at; Start 34; Stop 58
tggcagtaaaagagagaaaaaagac

SEQ ID NO: 34810 - DNA, 25 bp, Artificial
  probe
  misc_feature (1)..(25): SEQ ID NO: 495; WAN0249UQ_at; Start 15; Stop 39
tttttctgcaaaacgcttgacatat

SEQ ID NO: 34811 - DNA, 25 bp, Artificial
  probe
  misc_feature (1)..(25): SEQ ID NO: 495; WAN0249UQ_at; Start 93; Stop 117
caagaacaaaatgttatataaggag

SEQ ID NO: 34812 - DNA, 25 bp, Artificial
  probe
  misc_feature (1)..(25): SEQ ID NO: 495; WAN0249UQ_at; Start 82; Stop 106
tcgctttcaaacaagaacaaaatgt

SEQ ID NO: 34813 - DNA, 25 bp, Artificial
  probe
  misc_feature (1)..(25): SEQ ID NO: 495; WAN0249UQ_at; Start 62; Stop 86
agtcgtaagggcgaataaaatcgct

SEQ ID NO: 34814 - DNA, 25 bp, Artificial
  probe
  misc_feature (1)..(25): SEQ ID NO: 495; WAN0249UQ_at; Start 74; Stop 98
gaataaaatcgctttcaaacaagaa

SEQ ID NO: 34815 - DNA, 25 bp, Artificial
  probe
  misc_feature (1)..(25): SEQ ID NO: 495; WAN0249UQ_at; Start 7; Stop 31
tagaatattttttctgcaaaacgct

SEQ ID NO: 34816 - DNA, 25 bp, Artificial
  probe
  misc_feature (1)..(25): SEQ ID NO: 495; WAN0249UQ_at; Start 83; Stop 107
cgctttcaaacaagaacaaaatgtt

SEQ ID NO: 34817 - DNA, 25 bp, Artificial
  probe
  misc_feature (1)..(25): SEQ ID NO: 495; WAN0249UQ_at; Start 70; Stop 94
gggcgaataaaatcgctttcaaaca

SEQ ID NO: 34818 - DNA, 25 bp, Artificial
  probe
  misc_feature (1)..(25): SEQ ID NO: 495; WAN0249UQ_at; Start 85; Stop 109
ctttcaaacaagaacaaaatgttat

SEQ ID NO: 34819 - DNA, 25 bp, Artificial
  probe
  misc_feature (1)..(25): SEQ ID NO: 495; WAN0249UQ_at; Start 19; Stop 43
tctgcaaaacgcttgacatattttt

SEQ ID NO: 34820 - DNA, 25 bp, Artificial
  probe
  misc_feature (1)..(25): SEQ ID NO: 495; WAN0249UQ_at; Start 71; Stop 95
ggcgaataaaatcgctttcaaacaa

SEQ ID NO: 34821 - DNA, 25 bp, Artificial
  probe
  misc_feature (1)..(25): SEQ ID NO: 495; WAN0249UQ_at; Start 84; Stop 108
gctttcaaacaagaacaaaatgtta

SEQ ID NO: 34822 - DNA, 25 bp, Artificial
  probe
  misc_feature (1)..(25): SEQ ID NO: 495; WAN0249UQ_at; Start 50; Stop 74
tgataaaataatagtcgtaagggcg

SEQ ID NO: 34823 - DNA, 25 bp, Artificial
  probe
  misc_feature (1)..(25): SEQ ID NO: 495; WAN0249UQ_at; Start 67; Stop 91
taagggcgaataaaatcgctttcaa

SEQ ID NO: 34824 - DNA, 25 bp, Artificial
  probe
  misc_feature (1)..(25): SEQ ID NO: 495; WAN0249UQ_at; Start 18; Stop 42
ttctgcaaaacgcttgacatatttt

SEQ ID NO: 34825 - DNA, 25 bp, Artificial
  probe
  misc_feature (1)..(25): SEQ ID NO: 495; WAN0249UQ_at; Start 27; Stop 51
acgcttgacatatttttaaaacatg

SEQ ID NO: 34826 - DNA, 25 bp, Artificial
  probe
  misc_feature (1)..(25): SEQ ID NO: 495; WAN0249UQ_at; Start 20; Stop 44
ctgcaaaacgcttgacatattttta

SEQ ID NO: 34827 - DNA, 25 bp, Artificial
  probe
  misc_feature (1)..(25): SEQ ID NO: 495; WAN0249UQ_at; Start 48; Stop 72
catgataaaataatagtcgtaaggg

SEQ ID NO: 34828 - DNA, 25 bp, Artificial
  probe
  misc_feature (1)..(25): SEQ ID NO: 495; WAN0249UQ_at; Start 12; Stop 36
tattttttctgcaaaacgcttgaca

SEQ ID NO: 34829 - DNA, 25 bp, Artificial
  probe
  misc_feature (1)..(25): SEQ ID NO: 495; WAN0249UQ_at; Start 9; Stop 33
gaatattttttctgcaaaacgcttg

SEQ ID NO: 34830 - DNA, 25 bp, Artificial
  probe
  misc_feature (1)..(25): SEQ ID NO: 495; WAN0249UQ_at; Start 96; Stop 120
gaacaaaatgttatataaggagatt

SEQ ID NO: 34831 - DNA, 25 bp, Artificial
  probe
  misc_feature (1)..(25): SEQ ID NO: 495; WAN0249UQ_at; Start 14; Stop 38
ttttttctgcaaaacgcttgacata

SEQ ID NO: 34832 - DNA, 25 bp, Artificial
  probe
  misc_feature (1)..(25): SEQ ID NO: 495; WAN0249UQ_at; Start 5; Stop 29
gatagaatattttttctgcaaaacg

SEQ ID NO: 34833 - DNA, 25 bp, Artificial
  probe
  misc_feature (1)..(25): SEQ ID NO: 495; WAN0249UQ_at; Start 73; Stop 97
cgaataaaatcgctttcaaacaaga

SEQ ID NO: 34834 - DNA, 25 bp, Artificial
  probe
  misc_feature (1)..(25): SEQ ID NO: 495; WAN0249UQ_at; Start 22; Stop 46
gcaaaacgcttgacatatttttaaa

SEQ ID NO: 34835 - DNA, 25 bp, Artificial
  probe
  misc_feature (1)..(25): SEQ ID NO: 495; WAN0249UQ_at; Start 16; Stop 40
ttttctgcaaaacgcttgacatatt

SEQ ID NO: 34836 - DNA, 25 bp, Artificial
  probe
  misc_feature (1)..(25): SEQ ID NO: 495; WAN0249UQ_at; Start 10; Stop 34
aatattttttctgcaaaacgcttga

SEQ ID NO: 34837 - DNA, 25 bp, Artificial
  probe
  misc_feature (1)..(25): SEQ ID NO: 495; WAN0249UQ_at; Start 29; Stop 53
gcttgacatatttttaaaacatgat

SEQ ID NO: 34838 - DNA, 25 bp, Artificial
  probe
  misc_feature (1)..(25): SEQ ID NO: 495; WAN0249UQ_at; Start 103; Stop 127
atgttatataaggagatttttgcaa

SEQ ID NO: 34839 - DNA, 25 bp, Artificial
  probe
  misc_feature (1)..(25): SEQ ID NO: 495; WAN0249UQ_at; Start 77; Stop 101
taaaatcgctttcaaacaagaacaa

SEQ ID NO: 34840 - DNA, 25 bp, Artificial
  probe
  misc_feature (1)..(25): SEQ ID NO: 495; WAN0249UQ_at; Start 51; Stop 75
gataaaataatagtcgtaagggcga

SEQ ID NO: 34841 - DNA, 25 bp, Artificial
  probe
  misc_feature (1)..(25): SEQ ID NO: 495; WAN0249UQ_at; Start 66; Stop 90
gtaagggcgaataaaatcgctttca

SEQ ID NO: 34842 - DNA, 25 bp, Artificial
  probe
  misc_feature (1)..(25): SEQ ID NO: 495; WAN0249UQ_at; Start 42; Stop 66
ttaaaacatgataaaataatagtcg

SEQ ID NO: 34843 - DNA, 25 bp, Artificial
  probe
  misc_feature (1)..(25): SEQ ID NO: 495; WAN0249UQ_at; Start 102; Stop 126
aatgttatataaggagatttttgca

SEQ ID NO: 34844 - DNA, 25 bp, Artificial
  probe
  misc_feature (1)..(25): SEQ ID NO: 5282; WAN0249UR_at; Start 62; Stop 86
cgactattattttatcatgttttaa

SEQ ID NO: 34845 - DNA, 25 bp, Artificial
  probe
  misc_feature (1)..(25): SEQ ID NO: 5282; WAN0249UR_at; Start 90; Stop 114
tatgtcaagcgttttgcagaaaaaa

SEQ ID NO: 34846 - DNA, 25 bp, Artificial
  probe
  misc_feature (1)..(25): SEQ ID NO: 5282; WAN0249UR_at; Start 56; Stop 80
cccttacgactattattttatcatg

SEQ ID NO: 34847 - DNA, 25 bp, Artificial
  probe
  misc_feature (1)..(25): SEQ ID NO: 5282; WAN0249UR_at; Start 77; Stop 101
catgttttaaaaatatgtcaagcgt

SEQ ID NO: 34848 - DNA, 25 bp, Artificial
  probe
  misc_feature (1)..(25): SEQ ID NO: 5282; WAN0249UR_at; Start 44; Stop 68
cgattttattcgcccttacgactat

SEQ ID NO: 34849 - DNA, 25 bp, Artificial
  probe
  misc_feature (1)..(25): SEQ ID NO: 5282; WAN0249UR_at; Start 8; Stop 32
aatctccttatataacattttgttc

SEQ ID NO: 34850 - DNA, 25 bp, Artificial
  probe
  misc_feature (1)..(25): SEQ ID NO: 5282; WAN0249UR_at; Start 38; Stop 62
tgaaagcgattttattcgcccttac

SEQ ID NO: 34851 - DNA, 25 bp, Artificial
  probe
  misc_feature (1)..(25): SEQ ID NO: 5282; WAN0249UR_at; Start 33; Stop 57
ttgtttgaaagcgattttattcgcc

SEQ ID NO: 34852 - DNA, 25 bp, Artificial
  probe
  misc_feature (1)..(25): SEQ ID NO: 5282; WAN0249UR_at; Start 76; Stop 100
tcatgttttaaaaatatgtcaagcg

SEQ ID NO: 34853 - DNA, 25 bp, Artificial
  probe
  misc_feature (1)..(25): SEQ ID NO: 5282; WAN0249UR_at; Start 89; Stop 113
atatgtcaagcgttttgcagaaaaa

SEQ ID NO: 34854 - DNA, 25 bp, Artificial
  probe
  misc_feature (1)..(25): SEQ ID NO: 5282; WAN0249UR_at; Start 42; Stop 66
agcgattttattcgcccttacgact

SEQ ID NO: 34855 - DNA, 25 bp, Artificial
  probe
  misc_feature (1)..(25): SEQ ID NO: 5282; WAN0249UR_at; Start 21; Stop 45
aacattttgttcttgtttgaaagcg

SEQ ID NO: 34856 - DNA, 25 bp, Artificial
  probe
  misc_feature (1)..(25): SEQ ID NO: 5282; WAN0249UR_at; Start 88; Stop 112
aatatgtcaagcgttttgcagaaaa

SEQ ID NO: 34857 - DNA, 25 bp, Artificial
  probe
  misc_feature (1)..(25): SEQ ID NO: 5282; WAN0249UR_at; Start 95; Stop 119
caagcgttttgcagaaaaaatattc

SEQ ID NO: 34858 - DNA, 25 bp, Artificial
  probe
  misc_feature (1)..(25): SEQ ID NO: 5282; WAN0249UR_at; Start 100; Stop 124
gttttgcagaaaaaatattctatcc

SEQ ID NO: 34859 - DNA, 25 bp, Artificial
  probe
  misc_feature (1)..(25): SEQ ID NO: 5282; WAN0249UR_at; Start 92; Stop 116
tgtcaagcgttttgcagaaaaaata

SEQ ID NO: 34860 - DNA, 25 bp, Artificial
  probe
  misc_feature (1)..(25): SEQ ID NO: 5282; WAN0249UR_at; Start 22; Stop 46
acattttgttcttgtttgaaagcga

SEQ ID NO: 34861 - DNA, 25 bp, Artificial
  probe
  misc_feature (1)..(25): SEQ ID NO: 5282; WAN0249UR_at; Start 98; Stop 122
gcgttttgcagaaaaaatattctat

SEQ ID NO: 34862 - DNA, 25 bp, Artificial
  probe
  misc_feature (1)..(25): SEQ ID NO: 5282; WAN0249UR_at; Start 102; Stop 126
tttgcagaaaaaatattctatccac

SEQ ID NO: 34863 - DNA, 25 bp, Artificial
  probe
  misc_feature (1)..(25): SEQ ID NO: 5282; WAN0249UR_at; Start 85; Stop 109
aaaaatatgtcaagcgttttgcaga

SEQ ID NO: 34864 - DNA, 25 bp, Artificial
  probe
  misc_feature (1)..(25): SEQ ID NO: 5282; WAN0249UR_at; Start 53; Stop 77
tcgcccttacgactattattttatc

SEQ ID NO: 34865 - DNA, 25 bp, Artificial
  probe
  misc_feature (1)..(25): SEQ ID NO: 5282; WAN0249UR_at; Start 96; Stop 120
aagcgttttgcagaaaaaatattct

SEQ ID NO: 34866 - DNA, 25 bp, Artificial
  probe
  misc_feature (1)..(25): SEQ ID NO: 5282; WAN0249UR_at; Start 37; Stop 61
ttgaaagcgattttattcgccctta

SEQ ID NO: 34867 - DNA, 25 bp, Artificial
  probe
  misc_feature (1)..(25): SEQ ID NO: 5282; WAN0249UR_at; Start 84; Stop 108
taaaaatatgtcaagcgttttgcag

SEQ ID NO: 34868 - DNA, 25 bp, Artificial
  probe
  misc_feature (1)..(25): SEQ ID NO: 5282; WAN0249UR_at; Start 54; Stop 78
cgcccttacgactattattttatca

SEQ ID NO: 34869 - DNA, 25 bp, Artificial
  probe
  misc_feature (1)..(25): SEQ ID NO: 5282; WAN0249UR_at; Start 1; Stop 25
ttgcaaaaatctccttatataacat

SEQ ID NO: 34870 - DNA, 25 bp, Artificial
  probe
  misc_feature (1)..(25): SEQ ID NO: 5282; WAN0249UR_at; Start 3; Stop 27
gcaaaaatctccttatataacattt

SEQ ID NO: 34871 - DNA, 25 bp, Artificial
  probe
  misc_feature (1)..(25): SEQ ID NO: 5282; WAN0249UR_at; Start 86; Stop 110
aaaatatgtcaagcgttttgcagaa

SEQ ID NO: 34872 - DNA, 25 bp, Artificial
  probe
  misc_feature (1)..(25): SEQ ID NO: 5282; WAN0249UR_at; Start 57; Stop 81
ccttacgactattattttatcatgt

SEQ ID NO: 34873 - DNA, 25 bp, Artificial
  probe
  misc_feature (1)..(25): SEQ ID NO: 5282; WAN0249UR_at; Start 34; Stop 58
tgtttgaaagcgattttattcgccc

SEQ ID NO: 34874 - DNA, 25 bp, Artificial
  probe
  misc_feature (1)..(25): SEQ ID NO: 5282; WAN0249UR_at; Start 23; Stop 47
cattttgttcttgtttgaaagcgat

SEQ ID NO: 34875 - DNA, 25 bp, Artificial
  probe
  misc_feature (1)..(25): SEQ ID NO: 5282; WAN0249UR_at; Start 82; Stop 106
tttaaaaatatgtcaagcgttttgc

SEQ ID NO: 34876 - DNA, 25 bp, Artificial
  probe
  misc_feature (1)..(25): SEQ ID NO: 5282; WAN0249UR_at; Start 93; Stop 117
gtcaagcgttttgcagaaaaaatat

SEQ ID NO: 34877 - DNA, 25 bp, Artificial
  probe
  misc_feature (1)..(25): SEQ ID NO: 5282; WAN0249UR_at; Start 31; Stop 55
tcttgtttgaaagcgattttattcg

SEQ ID NO: 34878 - DNA, 25 bp, Artificial
  probe
  misc_feature (1)..(25): SEQ ID NO: 4587; WAN0249US_at; Start 90; Stop 114
gagacatttagactttcgaagtatg

SEQ ID NO: 34879 - DNA, 25 bp, Artificial
  probe
  misc_feature (1)..(25): SEQ ID NO: 4587; WAN0249US_at; Start 83; Stop 107
aaaaatagagacatttagactttcg

SEQ ID NO: 34880 - DNA, 25 bp, Artificial
  probe
  misc_feature (1)..(25): SEQ ID NO: 4587; WAN0249US_at; Start 3; Stop 27
aatcctctctaatgtgaaaacgaac

SEQ ID NO: 34881 - DNA, 25 bp, Artificial
  probe
  misc_feature (1)..(25): SEQ ID NO: 4587; WAN0249US_at; Start 55; Stop 79
gatagtaagatttacagaggaaaat

SEQ ID NO: 34882 - DNA, 25 bp, Artificial
  probe
  misc_feature (1)..(25): SEQ ID NO: 4587; WAN0249US_at; Start 84; Stop 108
aaaatagagacatttagactttcga

SEQ ID NO: 34883 - DNA, 25 bp, Artificial
  probe
  misc_feature (1)..(25): SEQ ID NO: 4587; WAN0249US_at; Start 9; Stop 33
ctctaatgtgaaaacgaacaaatga

SEQ ID NO: 34884 - DNA, 25 bp, Artificial
  probe
  misc_feature (1)..(25): SEQ ID NO: 4587; WAN0249US_at; Start 11; Stop 35
ctaatgtgaaaacgaacaaatgaca

SEQ ID NO: 34885 - DNA, 25 bp, Artificial
  probe
  misc_feature (1)..(25): SEQ ID NO: 4587; WAN0249US_at; Start 8; Stop 32
tctctaatgtgaaaacgaacaaatg

SEQ ID NO: 34886 - DNA, 25 bp, Artificial
  probe
  misc_feature (1)..(25): SEQ ID NO: 4587; WAN0249US_at; Start 60; Stop 84
taagatttacagaggaaaatctaaa

SEQ ID NO: 34887 - DNA, 25 bp, Artificial
  probe
  misc_feature (1)..(25): SEQ ID NO: 4587; WAN0249US_at; Start 88; Stop 112
tagagacatttagactttcgaagta

SEQ ID NO: 34888 - DNA, 25 bp, Artificial
  probe
  misc_feature (1)..(25): SEQ ID NO: 4587; WAN0249US_at; Start 1; Stop 25
tcaatcctctctaatgtgaaaacga

SEQ ID NO: 34889 - DNA, 25 bp, Artificial
  probe
  misc_feature (1)..(25): SEQ ID NO: 4587; WAN0249US_at; Start 17; Stop 41
tgaaaacgaacaaatgacatgtttg

SEQ ID NO: 34890 - DNA, 25 bp, Artificial
  probe
  misc_feature (1)..(25): SEQ ID NO: 4587; WAN0249US_at; Start 13; Stop 37
aatgtgaaaacgaacaaatgacatg

SEQ ID NO: 34891 - DNA, 25 bp, Artificial
  probe
  misc_feature (1)..(25): SEQ ID NO: 4587; WAN0249US_at; Start 50; Stop 74
tattagatagtaagatttacagagg

SEQ ID NO: 34892 - DNA, 25 bp, Artificial
  probe
  misc_feature (1)..(25): SEQ ID NO: 4587; WAN0249US_at; Start 15; Stop 39
tgtgaaaacgaacaaatgacatgtt

SEQ ID NO: 34893 - DNA, 25 bp, Artificial
  probe
  misc_feature (1)..(25): SEQ ID NO: 4587; WAN0249US_at; Start 67; Stop 91
tacagaggaaaatctaaaaaataga

SEQ ID NO: 34894 - DNA, 25 bp, Artificial
  probe
  misc_feature (1)..(25): SEQ ID NO: 4587; WAN0249US_at; Start 27; Stop 51
caaatgacatgtttgttcgttttta

SEQ ID NO: 34895 - DNA, 25 bp, Artificial
  probe
  misc_feature (1)..(25): SEQ ID NO: 4587; WAN0249US_at; Start 86; Stop 110
aatagagacatttagactttcgaag

SEQ ID NO: 34896 - DNA, 25 bp, Artificial
  probe
  misc_feature (1)..(25): SEQ ID NO: 4587; WAN0249US_at; Start 71; Stop 95
gaggaaaatctaaaaaatagagaca

SEQ ID NO: 34897 - DNA, 25 bp, Artificial
  probe
  misc_feature (1)..(25): SEQ ID NO: 4587; WAN0249US_at; Start 12; Stop 36
taatgtgaaaacgaacaaatgacat

SEQ ID NO: 34898 - DNA, 25 bp, Artificial
  probe
  misc_feature (1)..(25): SEQ ID NO: 4587; WAN0249US_at; Start 53; Stop 77
tagatagtaagatttacagaggaaa

SEQ ID NO: 34899 - DNA, 25 bp, Artificial
  probe
  misc_feature (1)..(25): SEQ ID NO: 4587; WAN0249US_at; Start 5; Stop 29
tcctctctaatgtgaaaacgaacaa

SEQ ID NO: 34900 - DNA, 25 bp, Artificial
  probe
  misc_feature (1)..(25): SEQ ID NO: 4587; WAN0249US_at; Start 18; Stop 42
gaaaacgaacaaatgacatgtttgt

SEQ ID NO: 34901 - DNA, 25 bp, Artificial
  probe
  misc_feature (1)..(25): SEQ ID NO: 4587; WAN0249US_at; Start 7; Stop 31
ctctctaatgtgaaaacgaacaaat

SEQ ID NO: 34902 - DNA, 25 bp, Artificial
  probe
  misc_feature (1)..(25): SEQ ID NO: 4587; WAN0249US_at; Start 6; Stop 30
cctctctaatgtgaaaacgaacaaa

SEQ ID NO: 34903 - DNA, 25 bp, Artificial
  probe
  misc_feature (1)..(25): SEQ ID NO: 4587; WAN0249US_at; Start 4; Stop 28
atcctctctaatgtgaaaacgaaca

SEQ ID NO: 34904 - DNA, 25 bp, Artificial
  probe
  misc_feature (1)..(25): SEQ ID NO: 4587; WAN0249US_at; Start 32; Stop 56
gacatgtttgttcgtttttattaga

SEQ ID NO: 34905 - DNA, 25 bp, Artificial
  probe
  misc_feature (1)..(25): SEQ ID NO: 4587; WAN0249US_at; Start 10; Stop 34
tctaatgtgaaaacgaacaaatgac

SEQ ID NO: 34906 - DNA, 25 bp, Artificial
  probe
  misc_feature (1)..(25): SEQ ID NO: 4587; WAN0249US_at; Start 2; Stop 26
caatcctctctaatgtgaaaacgaa

SEQ ID NO: 34907 - DNA, 25 bp, Artificial
  probe
  misc_feature (1)..(25): SEQ ID NO: 4587; WAN0249US_at; Start 34; Stop 58
catgtttgttcgtttttattagata

SEQ ID NO: 34908 - DNA, 25 bp, Artificial
  probe
  misc_feature (1)..(25): SEQ ID NO: 4587; WAN0249US_at; Start 21; Stop 45
aacgaacaaatgacatgtttgttcg

SEQ ID NO: 34909 - DNA, 25 bp, Artificial
  probe
  misc_feature (1)..(25): SEQ ID NO: 4587; WAN0249US_at; Start 57; Stop 81
tagtaagatttacagaggaaaatct

SEQ ID NO: 34910 - DNA, 25 bp, Artificial
  probe
  misc_feature (1)..(25): SEQ ID NO: 4587; WAN0249US_at; Start 89; Stop 113
agagacatttagactttcgaagtat

SEQ ID NO: 34911 - DNA, 25 bp, Artificial
  probe
  misc_feature (1)..(25): SEQ ID NO: 4587; WAN0249US_at; Start 40; Stop 64
tgttcgtttttattagatagtaaga

SEQ ID NO: 34912 - DNA, 25 bp, Artificial
  probe
  misc_feature (1)..(25): SEQ ID NO: 3218; WAN0249UT_at; Start 82; Stop 106
tcatttgttcgttttcacattagag

SEQ ID NO: 34913 - DNA, 25 bp, Artificial
  probe
  misc_feature (1)..(25): SEQ ID NO: 3218; WAN0249UT_at; Start 88; Stop 112
gttcgttttcacattagagaggatt

SEQ ID NO: 34914 - DNA, 25 bp, Artificial
  probe
  misc_feature (1)..(25): SEQ ID NO: 3218; WAN0249UT_at; Start 84; Stop 108
atttgttcgttttcacattagagag

SEQ ID NO: 34915 - DNA, 25 bp, Artificial
  probe
  misc_feature (1)..(25): SEQ ID NO: 3218; WAN0249UT_at; Start 86; Stop 110
ttgttcgttttcacattagagagga

SEQ ID NO: 34916 - DNA, 25 bp, Artificial
  probe
  misc_feature (1)..(25): SEQ ID NO: 3218; WAN0249UT_at; Start 3; Stop 27
tacttcgaaagtctaaatgtctcta

SEQ ID NO: 34917 - DNA, 25 bp, Artificial
  probe
  misc_feature (1)..(25): SEQ ID NO: 3218; WAN0249UT_at; Start 66; Stop 90
aaaacgaacaaacatgtcatttgtt

SEQ ID NO: 34918 - DNA, 25 bp, Artificial
  probe
  misc_feature (1)..(25): SEQ ID NO: 3218; WAN0249UT_at; Start 4; Stop 28
acttcgaaagtctaaatgtctctat

SEQ ID NO: 34919 - DNA, 25 bp, Artificial
  probe
  misc_feature (1)..(25): SEQ ID NO: 3218; WAN0249UT_at; Start 57; Stop 81
tatctaataaaaacgaacaaacatg

SEQ ID NO: 34920 - DNA, 25 bp, Artificial
  probe
  misc_feature (1)..(25): SEQ ID NO: 3218; WAN0249UT_at; Start 74; Stop 98
caaacatgtcatttgttcgttttca

SEQ ID NO: 34921 - DNA, 25 bp, Artificial
  probe
  misc_feature (1)..(25): SEQ ID NO: 3218; WAN0249UT_at; Start 87; Stop 111
tgttcgttttcacattagagaggat

SEQ ID NO: 34922 - DNA, 25 bp, Artificial
  probe
  misc_feature (1)..(25): SEQ ID NO: 3218; WAN0249UT_at; Start 89; Stop 113
ttcgttttcacattagagaggattg

SEQ ID NO: 34923 - DNA, 25 bp, Artificial
  probe
  misc_feature (1)..(25): SEQ ID NO: 3218; WAN0249UT_at; Start 85; Stop 109
tttgttcgttttcacattagagagg

SEQ ID NO: 34924 - DNA, 25 bp, Artificial
  probe
  misc_feature (1)..(25): SEQ ID NO: 3218; WAN0249UT_at; Start 6; Stop 30
ttcgaaagtctaaatgtctctattt

SEQ ID NO: 34925 - DNA, 25 bp, Artificial
  probe
  misc_feature (1)..(25): SEQ ID NO: 3218; WAN0249UT_at; Start 35; Stop 59
gattttcctctgtaaatcttactat

SEQ ID NO: 34926 - DNA, 25 bp, Artificial
  probe
  misc_feature (1)..(25): SEQ ID NO: 3218; WAN0249UT_at; Start 7; Stop 31
tcgaaagtctaaatgtctctatttt

SEQ ID NO: 34927 - DNA, 25 bp, Artificial
  probe
  misc_feature (1)..(25): SEQ ID NO: 3218; WAN0249UT_at; Start 83; Stop 107
catttgttcgttttcacattagaga

SEQ ID NO: 34928 - DNA, 25 bp, Artificial
  probe
  misc_feature (1)..(25): SEQ ID NO: 3218; WAN0249UT_at; Start 80; Stop 104
tgtcatttgttcgttttcacattag

SEQ ID NO: 34929 - DNA, 25 bp, Artificial
  probe
  misc_feature (1)..(25): SEQ ID NO: 3218; WAN0249UT_at; Start 20; Stop 44
tgtctctattttttagattttcctc

SEQ ID NO: 34930 - DNA, 25 bp, Artificial
  probe
  misc_feature (1)..(25): SEQ ID NO: 3218; WAN0249UT_at; Start 11; Stop 35
aagtctaaatgtctctattttttag

SEQ ID NO: 34931 - DNA, 25 bp, Artificial
  probe
  misc_feature (1)..(25): SEQ ID NO: 3218; WAN0249UT_at; Start 64; Stop 88
taaaaacgaacaaacatgtcatttg

SEQ ID NO: 34932 - DNA, 25 bp, Artificial
  probe
  misc_feature (1)..(25): SEQ ID NO: 3218; WAN0249UT_at; Start 8; Stop 32
cgaaagtctaaatgtctctattttt

SEQ ID NO: 34933 - DNA, 25 bp, Artificial
  probe
  misc_feature (1)..(25): SEQ ID NO: 3218; WAN0249UT_at; Start 76; Stop 100
aacatgtcatttgttcgttttcaca

SEQ ID NO: 34934 - DNA, 25 bp, Artificial
  probe
  misc_feature (1)..(25): SEQ ID NO: 3218; WAN0249UT_at; Start 5; Stop 29
cttcgaaagtctaaatgtctctatt

SEQ ID NO: 34935 - DNA, 25 bp, Artificial
  probe
  misc_feature (1)..(25): SEQ ID NO: 3218; WAN0249UT_at; Start 90; Stop 114
tcgttttcacattagagaggattga

SEQ ID NO: 34936 - DNA, 25 bp, Artificial
  probe
  misc_feature (1)..(25): SEQ ID NO: 3218; WAN0249UT_at; Start 75; Stop 99
aaacatgtcatttgttcgttttcac

SEQ ID NO: 34937 - DNA, 25 bp, Artificial
  probe
  misc_feature (1)..(25): SEQ ID NO: 3218; WAN0249UT_at; Start 2; Stop 26
atacttcgaaagtctaaatgtctct

SEQ ID NO: 34938 - DNA, 25 bp, Artificial
  probe
  misc_feature (1)..(25): SEQ ID NO: 3218; WAN0249UT_at; Start 77; Stop 101
acatgtcatttgttcgttttcacat

SEQ ID NO: 34939 - DNA, 25 bp, Artificial
  probe
  misc_feature (1)..(25): SEQ ID NO: 3218; WAN0249UT_at; Start 41; Stop 65
cctctgtaaatcttactatctaata

SEQ ID NO: 34940 - DNA, 25 bp, Artificial
  probe
  misc_feature (1)..(25): SEQ ID NO: 3218; WAN0249UT_at; Start 59; Stop 83
tctaataaaaacgaacaaacatgtc

SEQ ID NO: 34941 - DNA, 25 bp, Artificial
  probe
  misc_feature (1)..(25): SEQ ID NO: 3218; WAN0249UT_at; Start 38; Stop 62
tttcctctgtaaatcttactatcta

SEQ ID NO: 34942 - DNA, 25 bp, Artificial
  probe
  misc_feature (1)..(25): SEQ ID NO: 3218; WAN0249UT_at; Start 51; Stop 75
tcttactatctaataaaaacgaaca

SEQ ID NO: 34943 - DNA, 25 bp, Artificial
  probe
  misc_feature (1)..(25): SEQ ID NO: 3218; WAN0249UT_at; Start 1; Stop 25
catacttcgaaagtctaaatgtctc

SEQ ID NO: 34944 - DNA, 25 bp, Artificial
  probe
  misc_feature (1)..(25): SEQ ID NO: 3218; WAN0249UT_at; Start 61; Stop 85
taataaaaacgaacaaacatgtcat

SEQ ID NO: 34945 - DNA, 25 bp, Artificial
  probe
  misc_feature (1)..(25): SEQ ID NO: 3218; WAN0249UT_at; Start 60; Stop 84
ctaataaaaacgaacaaacatgtca

SEQ ID NO: 34946 - DNA, 25 bp, Artificial
  probe
  misc_feature (1)..(25): SEQ ID NO: 440; WAN0249UU_at; Start 47; Stop 71
caatatttttgagcctttccttaag

SEQ ID NO: 34947 - DNA, 25 bp, Artificial
  probe
  misc_feature (1)..(25): SEQ ID NO: 440; WAN0249UU_at; Start 241; Stop 265
ccaaagtatatttagtatcaagcta

SEQ ID NO: 34948 - DNA, 25 bp, Artificial
  probe
  misc_feature (1)..(25): SEQ ID NO: 440; WAN0249UU_at; Start 141; Stop 165
tccgaatacctgaaaccattagatt

SEQ ID NO: 34949 - DNA, 25 bp, Artificial
  probe
  misc_feature (1)..(25): SEQ ID NO: 440; WAN0249UU_at; Start 169; Stop 193
ggtgtttctatcacggcggaaaggc

SEQ ID NO: 34950 - DNA, 25 bp, Artificial
  probe
  misc_feature (1)..(25): SEQ ID NO: 440; WAN0249UU_at; Start 184; Stop 208
gcggaaaggctaggtaagtcctcgc

SEQ ID NO: 34951 - DNA, 25 bp, Artificial
  probe
  misc_feature (1)..(25): SEQ ID NO: 440; WAN0249UU_at; Start 144; Stop 168
gaatacctgaaaccattagatttca

SEQ ID NO: 34952 - DNA, 25 bp, Artificial
  probe
  misc_feature (1)..(25): SEQ ID NO: 440; WAN0249UU_at; Start 162; Stop 186
gatttcaggtgtttctatcacggcg

SEQ ID NO: 34953 - DNA, 25 bp, Artificial
  probe
  misc_feature (1)..(25): SEQ ID NO: 440; WAN0249UU_at; Start 177; Stop 201
tatcacggcggaaaggctaggtaag

SEQ ID NO: 34954 - DNA, 25 bp, Artificial
  probe
  misc_feature (1)..(25): SEQ ID NO: 440; WAN0249UU_at; Start 68; Stop 92
taagtgattacggacggtagcgact

SEQ ID NO: 34955 - DNA, 25 bp, Artificial
  probe
  misc_feature (1)..(25): SEQ ID NO: 440; WAN0249UU_at; Start 152; Stop 176
gaaaccattagatttcaggtgtttc

SEQ ID NO: 34956 - DNA, 25 bp, Artificial
  probe
  misc_feature (1)..(25): SEQ ID NO: 440; WAN0249UU_at; Start 194; Stop 218
taggtaagtcctcgcctcactatcg

SEQ ID NO: 34957 - DNA, 25 bp, Artificial
  probe
  misc_feature (1)..(25): SEQ ID NO: 440; WAN0249UU_at; Start 239; Stop 263
taccaaagtatatttagtatcaagc

SEQ ID NO: 34958 - DNA, 25 bp, Artificial
  probe
  misc_feature (1)..(25): SEQ ID NO: 440; WAN0249UU_at; Start 191; Stop 215
ggctaggtaagtcctcgcctcacta

SEQ ID NO: 34959 - DNA, 25 bp, Artificial
  probe
  misc_feature (1)..(25): SEQ ID NO: 440; WAN0249UU_at; Start 255; Stop 279
gtatcaagctatagttaatctacgc

SEQ ID NO: 34960 - DNA, 25 bp, Artificial
  probe
  misc_feature (1)..(25): SEQ ID NO: 440; WAN0249UU_at; Start 206; Stop 230
cgcctcactatcgaaaaatatgcat

SEQ ID NO: 34961 - DNA, 25 bp, Artificial
  probe
  misc_feature (1)..(25): SEQ ID NO: 440; WAN0249UU_at; Start 170; Stop 194
gtgtttctatcacggcggaaaggct

SEQ ID NO: 34962 - DNA, 25 bp, Artificial
  probe
  misc_feature (1)..(25): SEQ ID NO: 440; WAN0249UU_at; Start 37; Stop 61
tggttgaaaacaatatttttgagcc

SEQ ID NO: 34963 - DNA, 25 bp, Artificial
  probe
  misc_feature (1)..(25): SEQ ID NO: 440; WAN0249UU_at; Start 259; Stop 283
caagctatagttaatctacgcttta

SEQ ID NO: 34964 - DNA, 25 bp, Artificial
  probe
  misc_feature (1)..(25): SEQ ID NO: 440; WAN0249UU_at; Start 164; Stop 188
tttcaggtgtttctatcacggcgga

SEQ ID NO: 34965 - DNA, 25 bp, Artificial
  probe
  misc_feature (1)..(25): SEQ ID NO: 440; WAN0249UU_at; Start 272; Stop 296
atctacgctttaaaaatccacttgg

SEQ ID NO: 34966 - DNA, 25 bp, Artificial
  probe
  misc_feature (1)..(25): SEQ ID NO: 440; WAN0249UU_at; Start 187; Stop 211
gaaaggctaggtaagtcctcgcctc

SEQ ID NO: 34967 - DNA, 25 bp, Artificial
  probe
  misc_feature (1)..(25): SEQ ID NO: 440; WAN0249UU_at; Start 167; Stop 191
caggtgtttctatcacggcggaaag

SEQ ID NO: 34968 - DNA, 25 bp, Artificial
  probe
  misc_feature (1)..(25): SEQ ID NO: 440; WAN0249UU_at; Start 2; Stop 26
gcacaaaatccgcttgggaaaccaa

SEQ ID NO: 34969 - DNA, 25 bp, Artificial
  probe
  misc_feature (1)..(25): SEQ ID NO: 440; WAN0249UU_at; Start 203; Stop 227
cctcgcctcactatcgaaaaatatg

SEQ ID NO: 34970 - DNA, 25 bp, Artificial
  probe
  misc_feature (1)..(25): SEQ ID NO: 440; WAN0249UU_at; Start 139; Stop 163
tttccgaatacctgaaaccattaga

SEQ ID NO: 34971 - DNA, 25 bp, Artificial
  probe
  misc_feature (1)..(25): SEQ ID NO: 440; WAN0249UU_at; Start 66; Stop 90
cttaagtgattacggacggtagcga

SEQ ID NO: 34972 - DNA, 25 bp, Artificial
  probe
  misc_feature (1)..(25): SEQ ID NO: 440; WAN0249UU_at; Start 199; Stop 223
aagtcctcgcctcactatcgaaaaa

SEQ ID NO: 34973 - DNA, 25 bp, Artificial
  probe
  misc_feature (1)..(25): SEQ ID NO: 440; WAN0249UU_at; Start 72; Stop 96
tgattacggacggtagcgactttct

SEQ ID NO: 34974 - DNA, 25 bp, Artificial
  probe
  misc_feature (1)..(25): SEQ ID NO: 440; WAN0249UU_at; Start 55; Stop 79
ttgagcctttccttaagtgattacg

SEQ ID NO: 34975 - DNA, 25 bp, Artificial
  probe
  misc_feature (1)..(25): SEQ ID NO: 440; WAN0249UU_at; Start 197; Stop 221
gtaagtcctcgcctcactatcgaaa

SEQ ID NO: 34976 - DNA, 25 bp, Artificial
  probe
  misc_feature (1)..(25): SEQ ID NO: 440; WAN0249UU_at; Start 57; Stop 81
gagcctttccttaagtgattacgga

SEQ ID NO: 34977 - DNA, 25 bp, Artificial
  probe
  misc_feature (1)..(25): SEQ ID NO: 440; WAN0249UU_at; Start 64; Stop 88
tccttaagtgattacggacggtagc

SEQ ID NO: 34978 - DNA, 25 bp, Artificial
  probe
  misc_feature (1)..(25): SEQ ID NO: 440; WAN0249UU_at; Start 179; Stop 203
tcacggcggaaaggctaggtaagtc

SEQ ID NO: 34979 - DNA, 25 bp, Artificial
  probe
  misc_feature (1)..(25): SEQ ID NO: 440; WAN0249UU_at; Start 175; Stop 199
tctatcacggcggaaaggctaggta

SEQ ID NO: 34980 - DNA, 25 bp, Artificial
  probe
  misc_feature (1)..(25): SEQ ID NO: 3208; WAN0249UV_at; Start 113; Stop 137
gcgaggacttacctagcctttccgc

SEQ ID NO: 34981 - DNA, 25 bp, Artificial
  probe
  misc_feature (1)..(25): SEQ ID NO: 3208; WAN0249UV_at; Start 118; Stop 142
gacttacctagcctttccgccgtga

SEQ ID NO: 34982 - DNA, 25 bp, Artificial
  probe
  misc_feature (1)..(25): SEQ ID NO: 3208; WAN0249UV_at; Start 232; Stop 256
tcgctaccgtccgtaatcacttaag

SEQ ID NO: 34983 - DNA, 25 bp, Artificial
  probe
  misc_feature (1)..(25): SEQ ID NO: 3208; WAN0249UV_at; Start 64; Stop 88
tactaaatatactttggtatggaaa

SEQ ID NO: 34984 - DNA, 25 bp, Artificial
  probe
  misc_feature (1)..(25): SEQ ID NO: 3208; WAN0249UV_at; Start 189; Stop 213
gacactagtgtctcaaagtttaggt

SEQ ID NO: 34985 - DNA, 25 bp, Artificial
  probe
  misc_feature (1)..(25): SEQ ID NO: 3208; WAN0249UV_at; Start 155; Stop 179
aaatctaatggtttcaggtattcgg

SEQ ID NO: 34986 - DNA, 25 bp, Artificial
  probe
  misc_feature (1)..(25): SEQ ID NO: 3208; WAN0249UV_at; Start 270; Stop 294
atattgttttcaaccacaaaatccg

SEQ ID NO: 34987 - DNA, 25 bp, Artificial
  probe
  misc_feature (1)..(25): SEQ ID NO: 3208; WAN0249UV_at; Start 243; Stop 267
cgtaatcacttaaggaaaggctcaa

SEQ ID NO: 34988 - DNA, 25 bp, Artificial
  probe
  misc_feature (1)..(25): SEQ ID NO: 3208; WAN0249UV_at; Start 245; Stop 269
taatcacttaaggaaaggctcaaaa

SEQ ID NO: 34989 - DNA, 25 bp, Artificial
  probe
  misc_feature (1)..(25): SEQ ID NO: 3208; WAN0249UV_at; Start 91; Stop 115
atgcatatttttcgatagtgaggcg

SEQ ID NO: 34990 - DNA, 25 bp, Artificial
  probe
  misc_feature (1)..(25): SEQ ID NO: 3208; WAN0249UV_at; Start 56; Stop 80
tagcttgatactaaatatactttgg

SEQ ID NO: 34991 - DNA, 25 bp, Artificial
  probe
  misc_feature (1)..(25): SEQ ID NO: 3208; WAN0249UV_at; Start 35; Stop 59
ttttaaagcgtagattaactatagc

SEQ ID NO: 34992 - DNA, 25 bp, Artificial
  probe
  misc_feature (1)..(25): SEQ ID NO: 3208; WAN0249UV_at; Start 133; Stop 157
tccgccgtgatagaaacacctgaaa

SEQ ID NO: 34993 - DNA, 25 bp, Artificial
  probe
  misc_feature (1)..(25): SEQ ID NO: 3208; WAN0249UV_at; Start 109; Stop 133
tgaggcgaggacttacctagccttt

SEQ ID NO: 34994 - DNA, 25 bp, Artificial
  probe
  misc_feature (1)..(25): SEQ ID NO: 3208; WAN0249UV_at; Start 106; Stop 130
tagtgaggcgaggacttacctagcc

SEQ ID NO: 34995 - DNA, 25 bp, Artificial
  probe
  misc_feature (1)..(25): SEQ ID NO: 3208; WAN0249UV_at; Start 261; Stop 285
ggctcaaaaatattgttttcaacca

SEQ ID NO: 34996 - DNA, 25 bp, Artificial
  probe
  misc_feature (1)..(25): SEQ ID NO: 3208; WAN0249UV_at; Start 25; Stop 49
ccaagtggatttttaaagcgtagat

SEQ ID NO: 34997 - DNA, 25 bp, Artificial
  probe
  misc_feature (1)..(25): SEQ ID NO: 3208; WAN0249UV_at; Start 136; Stop 160
gccgtgatagaaacacctgaaatct

SEQ ID NO: 34998 - DNA, 25 bp, Artificial
  probe
  misc_feature (1)..(25): SEQ ID NO: 3208; WAN0249UV_at; Start 100; Stop 124
tttcgatagtgaggcgaggacttac

SEQ ID NO: 34999 - DNA, 25 bp, Artificial
  probe
  misc_feature (1)..(25): SEQ ID NO: 3208; WAN0249UV_at; Start 42; Stop 66
gcgtagattaactatagcttgatac

SEQ ID NO: 35000 - DNA, 25 bp, Artificial
  probe
  misc_feature (1)..(25): SEQ ID NO: 3208; WAN0249UV_at; Start 251; Stop 275
cttaaggaaaggctcaaaaatattg

SEQ ID NO: 35001 - DNA, 25 bp, Artificial
  probe
  misc_feature (1)..(25): SEQ ID NO: 3208; WAN0249UV_at; Start 122; Stop 146
tacctagcctttccgccgtgataga

SEQ ID NO: 35002 - DNA, 25 bp, Artificial
  probe
  misc_feature (1)..(25): SEQ ID NO: 3208; WAN0249UV_at; Start 234; Stop 258
gctaccgtccgtaatcacttaagga

SEQ ID NO: 35003 - DNA, 25 bp, Artificial
  probe
  misc_feature (1)..(25): SEQ ID NO: 3208; WAN0249UV_at; Start 176; Stop 200
tcggaaactttgagacactagtgtc

SEQ ID NO: 35004 - DNA, 25 bp, Artificial
  probe
  misc_feature (1)..(25): SEQ ID NO: 3208; WAN0249UV_at; Start 191; Stop 215
cactagtgtctcaaagtttaggtat

SEQ ID NO: 35005 - DNA, 25 bp, Artificial
  probe
  misc_feature (1)..(25): SEQ ID NO: 3208; WAN0249UV_at; Start 96; Stop 120
tatttttcgatagtgaggcgaggac

SEQ ID NO: 35006 - DNA, 25 bp, Artificial
  probe
  misc_feature (1)..(25): SEQ ID NO: 3208; WAN0249UV_at; Start 158; Stop 182
tctaatggtttcaggtattcggaaa

SEQ ID NO: 35007 - DNA, 25 bp, Artificial
  probe
  misc_feature (1)..(25): SEQ ID NO: 3208; WAN0249UV_at; Start 226; Stop 250
agaaagtcgctaccgtccgtaatca

SEQ ID NO: 35008 - DNA, 25 bp, Artificial
  probe
  misc_feature (1)..(25): SEQ ID NO: 3208; WAN0249UV_at; Start 169; Stop 193
caggtattcggaaactttgagacac

SEQ ID NO: 35009 - DNA, 25 bp, Artificial
  probe
  misc_feature (1)..(25): SEQ ID NO: 3208; WAN0249UV_at; Start 296; Stop 320
ttggtttcccaagcggattttgtgc

SEQ ID NO: 35010 - DNA, 25 bp, Artificial
  probe
  misc_feature (1)..(25): SEQ ID NO: 3208; WAN0249UV_at; Start 103; Stop 127
cgatagtgaggcgaggacttaccta

SEQ ID NO: 35011 - DNA, 25 bp, Artificial
  probe
  misc_feature (1)..(25): SEQ ID NO: 3208; WAN0249UV_at; Start 241; Stop 265
tccgtaatcacttaaggaaaggctc

SEQ ID NO: 35012 - DNA, 25 bp, Artificial
  probe
  misc_feature (1)..(25): SEQ ID NO: 3208; WAN0249UV_at; Start 143; Stop 167
tagaaacacctgaaatctaatggtt

SEQ ID NO: 35013 - DNA, 25 bp, Artificial
  probe
  misc_feature (1)..(25): SEQ ID NO: 3208; WAN0249UV_at; Start 130; Stop 154
ctttccgccgtgatagaaacacctg

SEQ ID NO: 35014 - DNA, 25 bp, Artificial
  probe
  misc_feature (1)..(25): SEQ ID NO: 3786; WAN0249UW_at; Start 56; Stop 80
gggaatgagtcttttttgataagga

SEQ ID NO: 35015 - DNA, 25 bp, Artificial
  probe
  misc_feature (1)..(25): SEQ ID NO: 3786; WAN0249UW_at; Start 82; Stop 106
tagaaagtaaatagcccttcgagac

SEQ ID NO: 35016 - DNA, 25 bp, Artificial
  probe
  misc_feature (1)..(25): SEQ ID NO: 3786; WAN0249UW_at; Start 87; Stop 111
agtaaatagcccttcgagacttaga

SEQ ID NO: 35017 - DNA, 25 bp, Artificial
  probe
  misc_feature (1)..(25): SEQ ID NO: 3786; WAN0249UW_at; Start 15; Stop 39
gatagtatatttctactataccata

SEQ ID NO: 35018 - DNA, 25 bp, Artificial
  probe
  misc_feature (1)..(25): SEQ ID NO: 3786; WAN0249UW_at; Start 128; Stop 152
aaggttatatgcattctaggtttcg

SEQ ID NO: 35019 - DNA, 25 bp, Artificial
  probe
  misc_feature (1)..(25): SEQ ID NO: 3786; WAN0249UW_at; Start 309; Stop 333
ctctctgatggacgtaatttatggc

SEQ ID NO: 35020 - DNA, 25 bp, Artificial
  probe
  misc_feature (1)..(25): SEQ ID NO: 3786; WAN0249UW_at; Start 301; Stop 325
aagagtctctctctgatggacgtaa

SEQ ID NO: 35021 - DNA, 25 bp, Artificial
  probe
  misc_feature (1)..(25): SEQ ID NO: 3786; WAN0249UW_at; Start 159; Stop 183
cgcaattccataaatttaaaagcat

SEQ ID NO: 35022 - DNA, 25 bp, Artificial
  probe
  misc_feature (1)..(25): SEQ ID NO: 3786; WAN0249UW_at; Start 248; Stop 272
ccctaaagtttagatgtattctgaa

SEQ ID NO: 35023 - DNA, 25 bp, Artificial
  probe
  misc_feature (1)..(25): SEQ ID NO: 3786; WAN0249UW_at; Start 239; Stop 263
agtcattttccctaaagtttagatg

SEQ ID NO: 35024 - DNA, 25 bp, Artificial
  probe
  misc_feature (1)..(25): SEQ ID NO: 3786; WAN0249UW_at; Start 207; Stop 231
gagataattttgaggcattcgcgct

SEQ ID NO: 35025 - DNA, 25 bp, Artificial
  probe
  misc_feature (1)..(25): SEQ ID NO: 3786; WAN0249UW_at; Start 218; Stop 242
gaggcattcgcgctttcgaatagtc

SEQ ID NO: 35026 - DNA, 25 bp, Artificial
  probe
  misc_feature (1)..(25): SEQ ID NO: 3786; WAN0249UW_at; Start 176; Stop 200
aaaagcattctaagtttcgaatagc

SEQ ID NO: 35027 - DNA, 25 bp, Artificial
  probe
  misc_feature (1)..(25): SEQ ID NO: 3786; WAN0249UW_at; Start 101; Stop 125
cgagacttagaataggtctgtcaac

SEQ ID NO: 35028 - DNA, 25 bp, Artificial
  probe
  misc_feature (1)..(25): SEQ ID NO: 3786; WAN0249UW_at; Start 372; Stop 396
taatcagttctgaaataattactaa

SEQ ID NO: 35029 - DNA, 25 bp, Artificial
  probe
  misc_feature (1)..(25): SEQ ID NO: 3786; WAN0249UW_at; Start 93; Stop 117
tagcccttcgagacttagaataggt

SEQ ID NO: 35030 - DNA, 25 bp, Artificial
  probe
  misc_feature (1)..(25): SEQ ID NO: 3786; WAN0249UW_at; Start 139; Stop 163
cattctaggtttcgaataatcgcaa

SEQ ID NO: 35031 - DNA, 25 bp, Artificial
  probe
  misc_feature (1)..(25): SEQ ID NO: 3786; WAN0249UW_at; Start 115; Stop 139
ggtctgtcaactaaaggttatatgc

SEQ ID NO: 35032 - DNA, 25 bp, Artificial
  probe
  misc_feature (1)..(25): SEQ ID NO: 3786; WAN0249UW_at; Start 318; Stop 342
ggacgtaatttatggctagtatgaa

SEQ ID NO: 35033 - DNA, 25 bp, Artificial
  probe
  misc_feature (1)..(25): SEQ ID NO: 3786; WAN0249UW_at; Start 146; Stop 170
ggtttcgaataatcgcaattccata

SEQ ID NO: 35034 - DNA, 25 bp, Artificial
  probe
  misc_feature (1)..(25): SEQ ID NO: 3786; WAN0249UW_at; Start 264; Stop 288
tattctgaagctagaaagactaaaa

SEQ ID NO: 35035 - DNA, 25 bp, Artificial
  probe
  misc_feature (1)..(25): SEQ ID NO: 3786; WAN0249UW_at; Start 291; Stop 315
taaaagtagtaagagtctctctctg

SEQ ID NO: 35036 - DNA, 25 bp, Artificial
  probe
  misc_feature (1)..(25): SEQ ID NO: 3786; WAN0249UW_at; Start 108; Stop 132
tagaataggtctgtcaactaaaggt

SEQ ID NO: 35037 - DNA, 25 bp, Artificial
  probe
  misc_feature (1)..(25): SEQ ID NO: 3786; WAN0249UW_at; Start 260; Stop 284
gatgtattctgaagctagaaagact

SEQ ID NO: 35038 - DNA, 25 bp, Artificial
  probe
  misc_feature (1)..(25): SEQ ID NO: 3786; WAN0249UW_at; Start 225; Stop 249
tcgcgctttcgaatagtcattttcc

SEQ ID NO: 35039 - DNA, 25 bp, Artificial
  probe
  misc_feature (1)..(25): SEQ ID NO: 3786; WAN0249UW_at; Start 186; Stop 210
taagtttcgaatagcttatctgaga

SEQ ID NO: 35040 - DNA, 25 bp, Artificial
  probe
  misc_feature (1)..(25): SEQ ID NO: 3786; WAN0249UW_at; Start 212; Stop 236
aattttgaggcattcgcgctttcga

SEQ ID NO: 35041 - DNA, 25 bp, Artificial
  probe
  misc_feature (1)..(25): SEQ ID NO: 3786; WAN0249UW_at; Start 1; Stop 25
gtaaactcctcatagatagtatatt

SEQ ID NO: 35042 - DNA, 25 bp, Artificial
  probe
  misc_feature (1)..(25): SEQ ID NO: 3786; WAN0249UW_at; Start 73; Stop 97
gataaggaatagaaagtaaatagcc

SEQ ID NO: 35043 - DNA, 25 bp, Artificial
  probe
  misc_feature (1)..(25): SEQ ID NO: 3786; WAN0249UW_at; Start 298; Stop 322
agtaagagtctctctctgatggacg

SEQ ID NO: 35044 - DNA, 25 bp, Artificial
  probe
  misc_feature (1)..(25): SEQ ID NO: 3786; WAN0249UW_at; Start 334; Stop 358
tagtatgaatcctttgaattgttag

SEQ ID NO: 35045 - DNA, 25 bp, Artificial
  probe
  misc_feature (1)..(25): SEQ ID NO: 3786; WAN0249UW_at; Start 229; Stop 253
gctttcgaatagtcattttccctaa

SEQ ID NO: 35046 - DNA, 25 bp, Artificial
  probe
  misc_feature (1)..(25): SEQ ID NO: 3786; WAN0249UW_at; Start 199; Stop 223
gcttatctgagataattttgaggca

SEQ ID NO: 35047 - DNA, 25 bp, Artificial
  probe
  misc_feature (1)..(25): SEQ ID NO: 3786; WAN0249UW_at; Start 328; Stop 352
tatggctagtatgaatcctttgaat

SEQ ID NO: 35048 - DNA, 25 bp, Artificial
  probe
  misc_feature (1)..(25): SEQ ID NO: 4454; WAN0249UX_at; Start 96; Stop 120
cgtccatcagagagagactcttact

SEQ ID NO: 35049 - DNA, 25 bp, Artificial
  probe
  misc_feature (1)..(25): SEQ ID NO: 4454; WAN0249UX_at; Start 155; Stop 179
catctaaactttagggaaaatgact

SEQ ID NO: 35050 - DNA, 25 bp, Artificial
  probe
  misc_feature (1)..(25): SEQ ID NO: 4454; WAN0249UX_at; Start 296; Stop 320
gacagacctattctaagtctcgaag

SEQ ID NO: 35051 - DNA, 25 bp, Artificial
  probe
  misc_feature (1)..(25): SEQ ID NO: 4454; WAN0249UX_at; Start 68; Stop 92
tcaaaggattcatactagccataaa

SEQ ID NO: 35052 - DNA, 25 bp, Artificial
  probe
  misc_feature (1)..(25): SEQ ID NO: 4454; WAN0249UX_at; Start 307; Stop 331
tctaagtctcgaagggctatttact

SEQ ID NO: 35053 - DNA, 25 bp, Artificial
  probe
  misc_feature (1)..(25): SEQ ID NO: 4454; WAN0249UX_at; Start 279; Stop 303
gcatataacctttagttgacagacc

SEQ ID NO: 35054 - DNA, 25 bp, Artificial
  probe
  misc_feature (1)..(25): SEQ ID NO: 4454; WAN0249UX_at; Start 89; Stop 113
taaattacgtccatcagagagagac

SEQ ID NO: 35055 - DNA, 25 bp, Artificial
  probe
  misc_feature (1)..(25): SEQ ID NO: 4454; WAN0249UX_at; Start 182; Stop 206
tcgaaagcgcgaatgcctcaaaatt

SEQ ID NO: 35056 - DNA, 25 bp, Artificial
  probe
  misc_feature (1)..(25): SEQ ID NO: 4454; WAN0249UX_at; Start 338; Stop 362
tccttatcaaaaaagactcattccc

SEQ ID NO: 35057 - DNA, 25 bp, Artificial
  probe
  misc_feature (1)..(25): SEQ ID NO: 4454; WAN0249UX_at; Start 393; Stop 417
aatatactatctatgaggagtttac

SEQ ID NO: 35058 - DNA, 25 bp, Artificial
  probe
  misc_feature (1)..(25): SEQ ID NO: 4454; WAN0249UX_at; Start 56; Stop 80
ttaactaacaattcaaaggattcat

SEQ ID NO: 35059 - DNA, 25 bp, Artificial
  probe
  misc_feature (1)..(25): SEQ ID NO: 4454; WAN0249UX_at; Start 215; Stop 239
taagctattcgaaacttagaatgct

SEQ ID NO: 35060 - DNA, 25 bp, Artificial
  probe
  misc_feature (1)..(25): SEQ ID NO: 4454; WAN0249UX_at; Start 188; Stop 212
gcgcgaatgcctcaaaattatctca

SEQ ID NO: 35061 - DNA, 25 bp, Artificial
  probe
  misc_feature (1)..(25): SEQ ID NO: 4454; WAN0249UX_at; Start 76; Stop 100
ttcatactagccataaattacgtcc

SEQ ID NO: 35062 - DNA, 25 bp, Artificial
  probe
  misc_feature (1)..(25): SEQ ID NO: 4454; WAN0249UX_at; Start 175; Stop 199
tgactattcgaaagcgcgaatgcct

SEQ ID NO: 35063 - DNA, 25 bp, Artificial
  probe
  misc_feature (1)..(25): SEQ ID NO: 4454; WAN0249UX_at; Start 252; Stop 276
gaattgcgattattcgaaacctaga

SEQ ID NO: 35064 - DNA, 25 bp, Artificial
  probe
  misc_feature (1)..(25): SEQ ID NO: 4454; WAN0249UX_at; Start 64; Stop 88
caattcaaaggattcatactagcca

SEQ ID NO: 35065 - DNA, 25 bp, Artificial
  probe
  misc_feature (1)..(25): SEQ ID NO: 4454; WAN0249UX_at; Start 192; Stop 216
gaatgcctcaaaattatctcagata

SEQ ID NO: 35066 - DNA, 25 bp, Artificial
  probe
  misc_feature (1)..(25): SEQ ID NO: 4454; WAN0249UX_at; Start 19; Stop 43
tatttagtaattatttcagaactga

SEQ ID NO: 35067 - DNA, 25 bp, Artificial
  probe
  misc_feature (1)..(25): SEQ ID NO: 4454; WAN0249UX_at; Start 248; Stop 272
tatggaattgcgattattcgaaacc

SEQ ID NO: 35068 - DNA, 25 bp, Artificial
  probe
  misc_feature (1)..(25): SEQ ID NO: 4454; WAN0249UX_at; Start 300; Stop 324
gacctattctaagtctcgaagggct

SEQ ID NO: 35069 - DNA, 25 bp, Artificial
  probe
  misc_feature (1)..(25): SEQ ID NO: 4454; WAN0249UX_at; Start 388; Stop 412
gtagaaatatactatctatgaggag

SEQ ID NO: 35070 - DNA, 25 bp, Artificial
  probe
  misc_feature (1)..(25): SEQ ID NO: 4454; WAN0249UX_at; Start 103; Stop 127
cagagagagactcttactactttta

SEQ ID NO: 35071 - DNA, 25 bp, Artificial
  probe
  misc_feature (1)..(25): SEQ ID NO: 4454; WAN0249UX_at; Start 265; Stop 289
tcgaaacctagaatgcatataacct

SEQ ID NO: 35072 - DNA, 25 bp, Artificial
  probe
  misc_feature (1)..(25): SEQ ID NO: 4454; WAN0249UX_at; Start 257; Stop 281
gcgattattcgaaacctagaatgca

SEQ ID NO: 35073 - DNA, 25 bp, Artificial
  probe
  misc_feature (1)..(25): SEQ ID NO: 4454; WAN0249UX_at; Start 284; Stop 308
taacctttagttgacagacctattc

SEQ ID NO: 35074 - DNA, 25 bp, Artificial
  probe
  misc_feature (1)..(25): SEQ ID NO: 4454; WAN0249UX_at; Start 85; Stop 109
gccataaattacgtccatcagagag

SEQ ID NO: 35075 - DNA, 25 bp, Artificial
  probe
  misc_feature (1)..(25): SEQ ID NO: 4454; WAN0249UX_at; Start 206; Stop 230
tatctcagataagctattcgaaact

SEQ ID NO: 35076 - DNA, 25 bp, Artificial
  probe
  misc_feature (1)..(25): SEQ ID NO: 4454; WAN0249UX_at; Start 321; Stop 345
ggctatttactttctattccttatc

SEQ ID NO: 35077 - DNA, 25 bp, Artificial
  probe
  misc_feature (1)..(25): SEQ ID NO: 4454; WAN0249UX_at; Start 131; Stop 155
tttagtctttctagcttcagaatac

SEQ ID NO: 35078 - DNA, 25 bp, Artificial
  probe
  misc_feature (1)..(25): SEQ ID NO: 4454; WAN0249UX_at; Start 236; Stop 260
tgcttttaaatttatggaattgcga

SEQ ID NO: 35079 - DNA, 25 bp, Artificial
  probe
  misc_feature (1)..(25): SEQ ID NO: 4454; WAN0249UX_at; Start 169; Stop 193
ggaaaatgactattcgaaagcgcga

SEQ ID NO: 35080 - DNA, 25 bp, Artificial
  probe
  misc_feature (1)..(25): SEQ ID NO: 4454; WAN0249UX_at; Start 146; Stop 170
ttcagaatacatctaaactttaggg

SEQ ID NO: 35081 - DNA, 25 bp, Artificial
  probe
  misc_feature (1)..(25): SEQ ID NO: 4454; WAN0249UX_at; Start 312; Stop 336
gtctcgaagggctatttactttcta

SEQ ID NO: 35082 - DNA, 25 bp, Artificial
  probe
  misc_feature (1)..(25): SEQ ID NO: 3632; WAN0249V4_at; Start 63; Stop 87
ctagtatccatttacaatcccacca

SEQ ID NO: 35083 - DNA, 25 bp, Artificial
  probe
  misc_feature (1)..(25): SEQ ID NO: 3632; WAN0249V4_at; Start 70; Stop 94
ccatttacaatcccaccaaaccatg

SEQ ID NO: 35084 - DNA, 25 bp, Artificial
  probe
  misc_feature (1)..(25): SEQ ID NO: 3632; WAN0249V4_at; Start 69; Stop 93
tccatttacaatcccaccaaaccat

SEQ ID NO: 35085 - DNA, 25 bp, Artificial
  probe
  misc_feature (1)..(25): SEQ ID NO: 3632; WAN0249V4_at; Start 17; Stop 41
taactatgaaaccattatatcatat

SEQ ID NO: 35086 - DNA, 25 bp, Artificial
  probe
  misc_feature (1)..(25): SEQ ID NO: 3632; WAN0249V4_at; Start 57; Stop 81
aaacttctagtatccatttacaatc

SEQ ID NO: 35087 - DNA, 25 bp, Artificial
  probe
  misc_feature (1)..(25): SEQ ID NO: 3632; WAN0249V4_at; Start 32; Stop 56
tatatcatatttcaagcgttttcaa

SEQ ID NO: 35088 - DNA, 25 bp, Artificial
  probe
  misc_feature (1)..(25): SEQ ID NO: 3632; WAN0249V4_at; Start 60; Stop 84
cttctagtatccatttacaatccca

SEQ ID NO: 35089 - DNA, 25 bp, Artificial
  probe
  misc_feature (1)..(25): SEQ ID NO: 3632; WAN0249V4_at; Start 58; Stop 82
aacttctagtatccatttacaatcc

SEQ ID NO: 35090 - DNA, 25 bp, Artificial
  probe
  misc_feature (1)..(25): SEQ ID NO: 3632; WAN0249V4_at; Start 21; Stop 45
tatgaaaccattatatcatatttca

SEQ ID NO: 35091 - DNA, 25 bp, Artificial
  probe
  misc_feature (1)..(25): SEQ ID NO: 3632; WAN0249V4_at; Start 1; Stop 25
gatattcccctaaaaataactatga

SEQ ID NO: 35092 - DNA, 25 bp, Artificial
  probe
  misc_feature (1)..(25): SEQ ID NO: 3632; WAN0249V4_at; Start 25; Stop 49
aaaccattatatcatatttcaagcg

SEQ ID NO: 35093 - DNA, 25 bp, Artificial
  probe
  misc_feature (1)..(25): SEQ ID NO: 3632; WAN0249V4_at; Start 24; Stop 48
gaaaccattatatcatatttcaagc

SEQ ID NO: 35094 - DNA, 25 bp, Artificial
  probe
  misc_feature (1)..(25): SEQ ID NO: 3632; WAN0249V4_at; Start 30; Stop 54
attatatcatatttcaagcgttttc

SEQ ID NO: 35095 - DNA, 25 bp, Artificial
  probe
  misc_feature (1)..(25): SEQ ID NO: 3632; WAN0249V4_at; Start 33; Stop 57
atatcatatttcaagcgttttcaaa

SEQ ID NO: 35096 - DNA, 25 bp, Artificial
  probe
  misc_feature (1)..(25): SEQ ID NO: 3632; WAN0249V4_at; Start 27; Stop 51
accattatatcatatttcaagcgtt

SEQ ID NO: 35097 - DNA, 25 bp, Artificial
  probe
  misc_feature (1)..(25): SEQ ID NO: 3632; WAN0249V4_at; Start 37; Stop 61
catatttcaagcgttttcaaaaact

SEQ ID NO: 35098 - DNA, 25 bp, Artificial
  probe
  misc_feature (1)..(25): SEQ ID NO: 3632; WAN0249V4_at; Start 26; Stop 50
aaccattatatcatatttcaagcgt

SEQ ID NO: 35099 - DNA, 25 bp, Artificial
  probe
  misc_feature (1)..(25): SEQ ID NO: 3632; WAN0249V4_at; Start 35; Stop 59
atcatatttcaagcgttttcaaaaa

SEQ ID NO: 35100 - DNA, 25 bp, Artificial
  probe
  misc_feature (1)..(25): SEQ ID NO: 3632; WAN0249V4_at; Start 65; Stop 89
agtatccatttacaatcccaccaaa

SEQ ID NO: 35101 - DNA, 25 bp, Artificial
  probe
  misc_feature (1)..(25): SEQ ID NO: 3632; WAN0249V4_at; Start 34; Stop 58
tatcatatttcaagcgttttcaaaa

SEQ ID NO: 35102 - DNA, 25 bp, Artificial
  probe
  misc_feature (1)..(25): SEQ ID NO: 3632; WAN0249V4_at; Start 28; Stop 52
ccattatatcatatttcaagcgttt

SEQ ID NO: 35103 - DNA, 25 bp, Artificial
  probe
  misc_feature (1)..(25): SEQ ID NO: 3632; WAN0249V4_at; Start 53; Stop 77
tcaaaaacttctagtatccatttac

SEQ ID NO: 35104 - DNA, 25 bp, Artificial
  probe
  misc_feature (1)..(25): SEQ ID NO: 3632; WAN0249V4_at; Start 29; Stop 53
cattatatcatatttcaagcgtttt

SEQ ID NO: 35105 - DNA, 25 bp, Artificial
  probe
  misc_feature (1)..(25): SEQ ID NO: 3632; WAN0249V4_at; Start 54; Stop 78
caaaaacttctagtatccatttaca

SEQ ID NO: 35106 - DNA, 25 bp, Artificial
  probe
  misc_feature (1)..(25): SEQ ID NO: 3632; WAN0249V4_at; Start 59; Stop 83
acttctagtatccatttacaatccc

SEQ ID NO: 35107 - DNA, 25 bp, Artificial
  probe
  misc_feature (1)..(25): SEQ ID NO: 3632; WAN0249V4_at; Start 23; Stop 47
tgaaaccattatatcatatttcaag

SEQ ID NO: 35108 - DNA, 25 bp, Artificial
  probe
  misc_feature (1)..(25): SEQ ID NO: 3632; WAN0249V4_at; Start 31; Stop 55
ttatatcatatttcaagcgttttca

SEQ ID NO: 35109 - DNA, 25 bp, Artificial
  probe
  misc_feature (1)..(25): SEQ ID NO: 3632; WAN0249V4_at; Start 61; Stop 85
ttctagtatccatttacaatcccac

SEQ ID NO: 35110 - DNA, 25 bp, Artificial
  probe
  misc_feature (1)..(25): SEQ ID NO: 3632; WAN0249V4_at; Start 20; Stop 44
ctatgaaaccattatatcatatttc

SEQ ID NO: 35111 - DNA, 25 bp, Artificial
  probe
  misc_feature (1)..(25): SEQ ID NO: 3632; WAN0249V4_at; Start 67; Stop 91
tatccatttacaatcccaccaaacc

SEQ ID NO: 35112 - DNA, 25 bp, Artificial
  probe
  misc_feature (1)..(25): SEQ ID NO: 3632; WAN0249V4_at; Start 62; Stop 86
tctagtatccatttacaatcccacc

SEQ ID NO: 35113 - DNA, 25 bp, Artificial
  probe
  misc_feature (1)..(25): SEQ ID NO: 3632; WAN0249V4_at; Start 66; Stop 90
gtatccatttacaatcccaccaaac

SEQ ID NO: 35114 - DNA, 25 bp, Artificial
  probe
  misc_feature (1)..(25): SEQ ID NO: 3632; WAN0249V4_at; Start 56; Stop 80
aaaacttctagtatccatttacaat

SEQ ID NO: 35115 - DNA, 25 bp, Artificial
  probe
  misc_feature (1)..(25): SEQ ID NO: 3632; WAN0249V4_at; Start 64; Stop 88
tagtatccatttacaatcccaccaa

SEQ ID NO: 35116 - DNA, 25 bp, Artificial
  probe
  misc_feature (1)..(25): SEQ ID NO: 3185; WAN0249V5_at; Start 38; Stop 62
tttttgaaaacgcttgaaatatgat

SEQ ID NO: 35117 - DNA, 25 bp, Artificial
  probe
  misc_feature (1)..(25): SEQ ID NO: 3185; WAN0249V5_at; Start 17; Stop 41
attgtaaatggatactagaagtttt

SEQ ID NO: 35118 - DNA, 25 bp, Artificial
  probe
  misc_feature (1)..(25): SEQ ID NO: 3185; WAN0249V5_at; Start 44; Stop 68
aaaacgcttgaaatatgatataatg

SEQ ID NO: 35119 - DNA, 25 bp, Artificial
  probe
  misc_feature (1)..(25): SEQ ID NO: 3185; WAN0249V5_at; Start 59; Stop 83
tgatataatggtttcatagttattt

SEQ ID NO: 35120 - DNA, 25 bp, Artificial
  probe
  misc_feature (1)..(25): SEQ ID NO: 3185; WAN0249V5_at; Start 14; Stop 38
gggattgtaaatggatactagaagt

SEQ ID NO: 35121 - DNA, 25 bp, Artificial
  probe
  misc_feature (1)..(25): SEQ ID NO: 3185; WAN0249V5_at; Start 72; Stop 96
tcatagttatttttaggggaatatc

SEQ ID NO: 35122 - DNA, 25 bp, Artificial
  probe
  misc_feature (1)..(25): SEQ ID NO: 3185; WAN0249V5_at; Start 16; Stop 40
gattgtaaatggatactagaagttt

SEQ ID NO: 35123 - DNA, 25 bp, Artificial
  probe
  misc_feature (1)..(25): SEQ ID NO: 3185; WAN0249V5_at; Start 57; Stop 81
tatgatataatggtttcatagttat

SEQ ID NO: 35124 - DNA, 25 bp, Artificial
  probe
  misc_feature (1)..(25): SEQ ID NO: 3185; WAN0249V5_at; Start 46; Stop 70
aacgcttgaaatatgatataatggt

SEQ ID NO: 35125 - DNA, 25 bp, Artificial
  probe
  misc_feature (1)..(25): SEQ ID NO: 3185; WAN0249V5_at; Start 45; Stop 69
aaacgcttgaaatatgatataatgg

SEQ ID NO: 35126 - DNA, 25 bp, Artificial
  probe
  misc_feature (1)..(25): SEQ ID NO: 3185; WAN0249V5_at; Start 49; Stop 73
gcttgaaatatgatataatggtttc

SEQ ID NO: 35127 - DNA, 25 bp, Artificial
  probe
  misc_feature (1)..(25): SEQ ID NO: 3185; WAN0249V5_at; Start 52; Stop 76
tgaaatatgatataatggtttcata

SEQ ID NO: 35128 - DNA, 25 bp, Artificial
  probe
  misc_feature (1)..(25): SEQ ID NO: 3185; WAN0249V5_at; Start 53; Stop 77
gaaatatgatataatggtttcatag

SEQ ID NO: 35129 - DNA, 25 bp, Artificial
  probe
  misc_feature (1)..(25): SEQ ID NO: 3185; WAN0249V5_at; Start 47; Stop 71
acgcttgaaatatgatataatggtt

SEQ ID NO: 35130 - DNA, 25 bp, Artificial
  probe
  misc_feature (1)..(25): SEQ ID NO: 3185; WAN0249V5_at; Start 63; Stop 87
ataatggtttcatagttatttttag

SEQ ID NO: 35131 - DNA, 25 bp, Artificial
  probe
  misc_feature (1)..(25): SEQ ID NO: 3185; WAN0249V5_at; Start 39; Stop 63
ttttgaaaacgcttgaaatatgata

SEQ ID NO: 35132 - DNA, 25 bp, Artificial
  probe
  misc_feature (1)..(25): SEQ ID NO: 3185; WAN0249V5_at; Start 21; Stop 45
taaatggatactagaagtttttgaa

SEQ ID NO: 35133 - DNA, 25 bp, Artificial
  probe
  misc_feature (1)..(25): SEQ ID NO: 3185; WAN0249V5_at; Start 50; Stop 74
cttgaaatatgatataatggtttca

SEQ ID NO: 35134 - DNA, 25 bp, Artificial
  probe
  misc_feature (1)..(25): SEQ ID NO: 3185; WAN0249V5_at; Start 42; Stop 66
tgaaaacgcttgaaatatgatataa

SEQ ID NO: 35135 - DNA, 25 bp, Artificial
  probe
  misc_feature (1)..(25): SEQ ID NO: 3185; WAN0249V5_at; Start 54; Stop 78
aaatatgatataatggtttcatagt

SEQ ID NO: 35136 - DNA, 25 bp, Artificial
  probe
  misc_feature (1)..(25): SEQ ID NO: 3185; WAN0249V5_at; Start 55; Stop 79
aatatgatataatggtttcatagtt

SEQ ID NO: 35137 - DNA, 25 bp, Artificial
  probe
  misc_feature (1)..(25): SEQ ID NO: 3185; WAN0249V5_at; Start 40; Stop 64
tttgaaaacgcttgaaatatgatat

SEQ ID NO: 35138 - DNA, 25 bp, Artificial
  probe
  misc_feature (1)..(25): SEQ ID NO: 3185; WAN0249V5_at; Start 43; Stop 67
gaaaacgcttgaaatatgatataat

SEQ ID NO: 35139 - DNA, 25 bp, Artificial
  probe
  misc_feature (1)..(25): SEQ ID NO: 3185; WAN0249V5_at; Start 19; Stop 43
tgtaaatggatactagaagtttttg

SEQ ID NO: 35140 - DNA, 25 bp, Artificial
  probe
  misc_feature (1)..(25): SEQ ID NO: 3185; WAN0249V5_at; Start 51; Stop 75
ttgaaatatgatataatggtttcat

SEQ ID NO: 35141 - DNA, 25 bp, Artificial
  probe
  misc_feature (1)..(25): SEQ ID NO: 3185; WAN0249V5_at; Start 60; Stop 84
gatataatggtttcatagttatttt

SEQ ID NO: 35142 - DNA, 25 bp, Artificial
  probe
  misc_feature (1)..(25): SEQ ID NO: 3185; WAN0249V5_at; Start 15; Stop 39
ggattgtaaatggatactagaagtt

SEQ ID NO: 35143 - DNA, 25 bp, Artificial
  probe
  misc_feature (1)..(25): SEQ ID NO: 3185; WAN0249V5_at; Start 20; Stop 44
gtaaatggatactagaagtttttga

SEQ ID NO: 35144 - DNA, 25 bp, Artificial
  probe
  misc_feature (1)..(25): SEQ ID NO: 3185; WAN0249V5_at; Start 41; Stop 65
ttgaaaacgcttgaaatatgatata

SEQ ID NO: 35145 - DNA, 25 bp, Artificial
  probe
  misc_feature (1)..(25): SEQ ID NO: 3185; WAN0249V5_at; Start 12; Stop 36
gtgggattgtaaatggatactagaa

SEQ ID NO: 35146 - DNA, 25 bp, Artificial
  probe
  misc_feature (1)..(25): SEQ ID NO: 3185; WAN0249V5_at; Start 13; Stop 37
tgggattgtaaatggatactagaag

SEQ ID NO: 35147 - DNA, 25 bp, Artificial
  probe
  misc_feature (1)..(25): SEQ ID NO: 3185; WAN0249V5_at; Start 37; Stop 61
gtttttgaaaacgcttgaaatatga

SEQ ID NO: 35148 - DNA, 25 bp, Artificial
  probe
  misc_feature (1)..(25): SEQ ID NO: 3185; WAN0249V5_at; Start 36; Stop 60
agtttttgaaaacgcttgaaatatg

SEQ ID NO: 35149 - DNA, 25 bp, Artificial
  probe
  misc_feature (1)..(25): SEQ ID NO: 3185; WAN0249V5_at; Start 48; Stop 72
cgcttgaaatatgatataatggttt

SEQ ID NO: 35150 - DNA, 25 bp, Artificial
  probe
  misc_feature (1)..(25): SEQ ID NO: 518; WAN0249V6_at; Start 69; Stop 93
tccttgaaaataatcagtaattgtg

SEQ ID NO: 35151 - DNA, 25 bp, Artificial
  probe
  misc_feature (1)..(25): SEQ ID NO: 518; WAN0249V6_at; Start 89; Stop 113
ttgtgctaaaattaaaggaacattc

SEQ ID NO: 35152 - DNA, 25 bp, Artificial
  probe
  misc_feature (1)..(25): SEQ ID NO: 518; WAN0249V6_at; Start 66; Stop 90
tcttccttgaaaataatcagtaatt

SEQ ID NO: 35153 - DNA, 25 bp, Artificial
  probe
  misc_feature (1)..(25): SEQ ID NO: 518; WAN0249V6_at; Start 53; Stop 77
tcaaaatggggattcttccttgaaa

SEQ ID NO: 35154 - DNA, 25 bp, Artificial
  probe
  misc_feature (1)..(25): SEQ ID NO: 518; WAN0249V6_at; Start 90; Stop 114
tgtgctaaaattaaaggaacattct

SEQ ID NO: 35155 - DNA, 25 bp, Artificial
  probe
  misc_feature (1)..(25): SEQ ID NO: 518; WAN0249V6_at; Start 78; Stop 102
ataatcagtaattgtgctaaaatta

SEQ ID NO: 35156 - DNA, 25 bp, Artificial
  probe
  misc_feature (1)..(25): SEQ ID NO: 518; WAN0249V6_at; Start 74; Stop 98
gaaaataatcagtaattgtgctaaa

SEQ ID NO: 35157 - DNA, 25 bp, Artificial
  probe
  misc_feature (1)..(25): SEQ ID NO: 518; WAN0249V6_at; Start 67; Stop 91
cttccttgaaaataatcagtaattg

SEQ ID NO: 35158 - DNA, 25 bp, Artificial
  probe
  misc_feature (1)..(25): SEQ ID NO: 518; WAN0249V6_at; Start 70; Stop 94
ccttgaaaataatcagtaattgtgc

SEQ ID NO: 35159 - DNA, 25 bp, Artificial
  probe
  misc_feature (1)..(25): SEQ ID NO: 518; WAN0249V6_at; Start 51; Stop 75
tttcaaaatggggattcttccttga

SEQ ID NO: 35160 - DNA, 25 bp, Artificial
  probe
  misc_feature (1)..(25): SEQ ID NO: 518; WAN0249V6_at; Start 77; Stop 101
aataatcagtaattgtgctaaaatt

SEQ ID NO: 35161 - DNA, 25 bp, Artificial
  probe
  misc_feature (1)..(25): SEQ ID NO: 518; WAN0249V6_at; Start 68; Stop 92
ttccttgaaaataatcagtaattgt

SEQ ID NO: 35162 - DNA, 25 bp, Artificial
  probe
  misc_feature (1)..(25): SEQ ID NO: 518; WAN0249V6_at; Start 71; Stop 95
cttgaaaataatcagtaattgtgct

SEQ ID NO: 35163 - DNA, 25 bp, Artificial
  probe
  misc_feature (1)..(25): SEQ ID NO: 518; WAN0249V6_at; Start 83; Stop 107
cagtaattgtgctaaaattaaagga

SEQ ID NO: 35164 - DNA, 25 bp, Artificial
  probe
  misc_feature (1)..(25): SEQ ID NO: 518; WAN0249V6_at; Start 82; Stop 106
tcagtaattgtgctaaaattaaagg

SEQ ID NO: 35165 - DNA, 25 bp, Artificial
  probe
  misc_feature (1)..(25): SEQ ID NO: 518; WAN0249V6_at; Start 75; Stop 99
aaaataatcagtaattgtgctaaaa

SEQ ID NO: 35166 - DNA, 25 bp, Artificial
  probe
  misc_feature (1)..(25): SEQ ID NO: 518; WAN0249V6_at; Start 63; Stop 87
gattcttccttgaaaataatcagta

SEQ ID NO: 35167 - DNA, 25 bp, Artificial
  probe
  misc_feature (1)..(25): SEQ ID NO: 518; WAN0249V6_at; Start 73; Stop 97
tgaaaataatcagtaattgtgctaa

SEQ ID NO: 35168 - DNA, 25 bp, Artificial
  probe
  misc_feature (1)..(25): SEQ ID NO: 518; WAN0249V6_at; Start 87; Stop 111
aattgtgctaaaattaaaggaacat

SEQ ID NO: 35169 - DNA, 25 bp, Artificial
  probe
  misc_feature (1)..(25): SEQ ID NO: 518; WAN0249V6_at; Start 72; Stop 96
ttgaaaataatcagtaattgtgcta

SEQ ID NO: 35170 - DNA, 25 bp, Artificial
  probe
  misc_feature (1)..(25): SEQ ID NO: 518; WAN0249V6_at; Start 65; Stop 89
ttcttccttgaaaataatcagtaat

SEQ ID NO: 35171 - DNA, 25 bp, Artificial
  probe
  misc_feature (1)..(25): SEQ ID NO: 518; WAN0249V6_at; Start 79; Stop 103
taatcagtaattgtgctaaaattaa

SEQ ID NO: 35172 - DNA, 25 bp, Artificial
  probe
  misc_feature (1)..(25): SEQ ID NO: 518; WAN0249V6_at; Start 62; Stop 86
ggattcttccttgaaaataatcagt

SEQ ID NO: 35173 - DNA, 25 bp, Artificial
  probe
  misc_feature (1)..(25): SEQ ID NO: 518; WAN0249V6_at; Start 104; Stop 128
aggaacattctaaaatattcggaat

SEQ ID NO: 35174 - DNA, 25 bp, Artificial
  probe
  misc_feature (1)..(25): SEQ ID NO: 518; WAN0249V6_at; Start 52; Stop 76
ttcaaaatggggattcttccttgaa

SEQ ID NO: 35175 - DNA, 25 bp, Artificial
  probe
  misc_feature (1)..(25): SEQ ID NO: 518; WAN0249V6_at; Start 88; Stop 112
attgtgctaaaattaaaggaacatt

SEQ ID NO: 35176 - DNA, 25 bp, Artificial
  probe
  misc_feature (1)..(25): SEQ ID NO: 518; WAN0249V6_at; Start 91; Stop 115
gtgctaaaattaaaggaacattcta

SEQ ID NO: 35177 - DNA, 25 bp, Artificial
  probe
  misc_feature (1)..(25): SEQ ID NO: 518; WAN0249V6_at; Start 81; Stop 105
atcagtaattgtgctaaaattaaag

SEQ ID NO: 35178 - DNA, 25 bp, Artificial
  probe
  misc_feature (1)..(25): SEQ ID NO: 518; WAN0249V6_at; Start 80; Stop 104
aatcagtaattgtgctaaaattaaa

SEQ ID NO: 35179 - DNA, 25 bp, Artificial
  probe
  misc_feature (1)..(25): SEQ ID NO: 518; WAN0249V6_at; Start 86; Stop 110
taattgtgctaaaattaaaggaaca

SEQ ID NO: 35180 - DNA, 25 bp, Artificial
  probe
  misc_feature (1)..(25): SEQ ID NO: 518; WAN0249V6_at; Start 64; Stop 88
attcttccttgaaaataatcagtaa

SEQ ID NO: 35181 - DNA, 25 bp, Artificial
  probe
  misc_feature (1)..(25): SEQ ID NO: 518; WAN0249V6_at; Start 76; Stop 100
aaataatcagtaattgtgctaaaat

SEQ ID NO: 35182 - DNA, 25 bp, Artificial
  probe
  misc_feature (1)..(25): SEQ ID NO: 518; WAN0249V6_at; Start 92; Stop 116
tgctaaaattaaaggaacattctaa

SEQ ID NO: 35183 - DNA, 25 bp, Artificial
  probe
  misc_feature (1)..(25): SEQ ID NO: 518; WAN0249V6_at; Start 61; Stop 85
gggattcttccttgaaaataatcag

SEQ ID NO: 35184 - DNA, 25 bp, Artificial
  probe
  misc_feature (1)..(25): SEQ ID NO: 4365; WAN0249V7_at; Start 32; Stop 56
agaatgttcctttaattttagcaca

SEQ ID NO: 35185 - DNA, 25 bp, Artificial
  probe
  misc_feature (1)..(25): SEQ ID NO: 4365; WAN0249V7_at; Start 63; Stop 87
gattattttcaaggaagaatcccca

SEQ ID NO: 35186 - DNA, 25 bp, Artificial
  probe
  misc_feature (1)..(25): SEQ ID NO: 4365; WAN0249V7_at; Start 52; Stop 76
gcacaattactgattattttcaagg

SEQ ID NO: 35187 - DNA, 25 bp, Artificial
  probe
  misc_feature (1)..(25): SEQ ID NO: 4365; WAN0249V7_at; Start 56; Stop 80
aattactgattattttcaaggaaga

SEQ ID NO: 35188 - DNA, 25 bp, Artificial
  probe
  misc_feature (1)..(25): SEQ ID NO: 4365; WAN0249V7_at; Start 58; Stop 82
ttactgattattttcaaggaagaat

SEQ ID NO: 35189 - DNA, 25 bp, Artificial
  probe
  misc_feature (1)..(25): SEQ ID NO: 4365; WAN0249V7_at; Start 31; Stop 55
tagaatgttcctttaattttagcac

SEQ ID NO: 35190 - DNA, 25 bp, Artificial
  probe
  misc_feature (1)..(25): SEQ ID NO: 4365; WAN0249V7_at; Start 60; Stop 84
actgattattttcaaggaagaatcc

SEQ ID NO: 35191 - DNA, 25 bp, Artificial
  probe
  misc_feature (1)..(25): SEQ ID NO: 4365; WAN0249V7_at; Start 46; Stop 70
attttagcacaattactgattattt

SEQ ID NO: 35192 - DNA, 25 bp, Artificial
  probe
  misc_feature (1)..(25): SEQ ID NO: 4365; WAN0249V7_at; Start 44; Stop 68
taattttagcacaattactgattat

SEQ ID NO: 35193 - DNA, 25 bp, Artificial
  probe
  misc_feature (1)..(25): SEQ ID NO: 4365; WAN0249V7_at; Start 71; Stop 95
tcaaggaagaatccccattttgaaa

SEQ ID NO: 35194 - DNA, 25 bp, Artificial
  probe
  misc_feature (1)..(25): SEQ ID NO: 4365; WAN0249V7_at; Start 48; Stop 72
tttagcacaattactgattattttc

SEQ ID NO: 35195 - DNA, 25 bp, Artificial
  probe
  misc_feature (1)..(25): SEQ ID NO: 4365; WAN0249V7_at; Start 57; Stop 81
attactgattattttcaaggaagaa

SEQ ID NO: 35196 - DNA, 25 bp, Artificial
  probe
  misc_feature (1)..(25): SEQ ID NO: 4365; WAN0249V7_at; Start 50; Stop 74
tagcacaattactgattattttcaa

SEQ ID NO: 35197 - DNA, 25 bp, Artificial
  probe
  misc_feature (1)..(25): SEQ ID NO: 4365; WAN0249V7_at; Start 51; Stop 75
agcacaattactgattattttcaag

SEQ ID NO: 35198 - DNA, 25 bp, Artificial
  probe
  misc_feature (1)..(25): SEQ ID NO: 4365; WAN0249V7_at; Start 39; Stop 63
tcctttaattttagcacaattactg

SEQ ID NO: 35199 - DNA, 25 bp, Artificial
  probe
  misc_feature (1)..(25): SEQ ID NO: 4365; WAN0249V7_at; Start 36; Stop 60
tgttcctttaattttagcacaatta

SEQ ID NO: 35200 - DNA, 25 bp, Artificial
  probe
  misc_feature (1)..(25): SEQ ID NO: 4365; WAN0249V7_at; Start 40; Stop 64
cctttaattttagcacaattactga

SEQ ID NO: 35201 - DNA, 25 bp, Artificial
  probe
  misc_feature (1)..(25): SEQ ID NO: 4365; WAN0249V7_at; Start 42; Stop 66
tttaattttagcacaattactgatt

SEQ ID NO: 35202 - DNA, 25 bp, Artificial
  probe
  misc_feature (1)..(25): SEQ ID NO: 4365; WAN0249V7_at; Start 61; Stop 85
ctgattattttcaaggaagaatccc

SEQ ID NO: 35203 - DNA, 25 bp, Artificial
  probe
  misc_feature (1)..(25): SEQ ID NO: 4365; WAN0249V7_at; Start 53; Stop 77
cacaattactgattattttcaagga

SEQ ID NO: 35204 - DNA, 25 bp, Artificial
  probe
  misc_feature (1)..(25): SEQ ID NO: 4365; WAN0249V7_at; Start 33; Stop 57
gaatgttcctttaattttagcacaa

SEQ ID NO: 35205 - DNA, 25 bp, Artificial
  probe
  misc_feature (1)..(25): SEQ ID NO: 4365; WAN0249V7_at; Start 69; Stop 93
tttcaaggaagaatccccattttga

SEQ ID NO: 35206 - DNA, 25 bp, Artificial
  probe
  misc_feature (1)..(25): SEQ ID NO: 4365; WAN0249V7_at; Start 43; Stop 67
ttaattttagcacaattactgatta

SEQ ID NO: 35207 - DNA, 25 bp, Artificial
  probe
  misc_feature (1)..(25): SEQ ID NO: 4365; WAN0249V7_at; Start 18; Stop 42
attccgaatattttagaatgttcct

SEQ ID NO: 35208 - DNA, 25 bp, Artificial
  probe
  misc_feature (1)..(25): SEQ ID NO: 4365; WAN0249V7_at; Start 62; Stop 86
tgattattttcaaggaagaatcccc

SEQ ID NO: 35209 - DNA, 25 bp, Artificial
  probe
  misc_feature (1)..(25): SEQ ID NO: 4365; WAN0249V7_at; Start 45; Stop 69
aattttagcacaattactgattatt

SEQ ID NO: 35210 - DNA, 25 bp, Artificial
  probe
  misc_feature (1)..(25): SEQ ID NO: 4365; WAN0249V7_at; Start 41; Stop 65
ctttaattttagcacaattactgat

SEQ ID NO: 35211 - DNA, 25 bp, Artificial
  probe
  misc_feature (1)..(25): SEQ ID NO: 4365; WAN0249V7_at; Start 64; Stop 88
attattttcaaggaagaatccccat

SEQ ID NO: 35212 - DNA, 25 bp, Artificial
  probe
  misc_feature (1)..(25): SEQ ID NO: 4365; WAN0249V7_at; Start 70; Stop 94
ttcaaggaagaatccccattttgaa

SEQ ID NO: 35213 - DNA, 25 bp, Artificial
  probe
  misc_feature (1)..(25): SEQ ID NO: 4365; WAN0249V7_at; Start 54; Stop 78
acaattactgattattttcaaggaa

SEQ ID NO: 35214 - DNA, 25 bp, Artificial
  probe
  misc_feature (1)..(25): SEQ ID NO: 4365; WAN0249V7_at; Start 55; Stop 79
caattactgattattttcaaggaag

SEQ ID NO: 35215 - DNA, 25 bp, Artificial
  probe
  misc_feature (1)..(25): SEQ ID NO: 4365; WAN0249V7_at; Start 49; Stop 73
ttagcacaattactgattattttca

SEQ ID NO: 35216 - DNA, 25 bp, Artificial
  probe
  misc_feature (1)..(25): SEQ ID NO: 4365; WAN0249V7_at; Start 59; Stop 83
tactgattattttcaaggaagaatc

SEQ ID NO: 35217 - DNA, 25 bp, Artificial
  probe
  misc_feature (1)..(25): SEQ ID NO: 4365; WAN0249V7_at; Start 34; Stop 58
aatgttcctttaattttagcacaat

SEQ ID NO: 35218 - DNA, 25 bp, Artificial
  probe
  misc_feature (1)..(25): SEQ ID NO: 3681; WAN0249V8_at; Start 62; Stop 86
tgattacatagatatgctacagttg

SEQ ID NO: 35219 - DNA, 25 bp, Artificial
  probe
  misc_feature (1)..(25): SEQ ID NO: 3681; WAN0249V8_at; Start 91; Stop 115
aacgattacaaaataaaaggagcat

SEQ ID NO: 35220 - DNA, 25 bp, Artificial
  probe
  misc_feature (1)..(25): SEQ ID NO: 3681; WAN0249V8_at; Start 6; Stop 30
tcatcctaaaagtaaagaatctaaa

SEQ ID NO: 35221 - DNA, 25 bp, Artificial
  probe
  misc_feature (1)..(25): SEQ ID NO: 3681; WAN0249V8_at; Start 75; Stop 99
atgctacagttgtggtaacgattac

SEQ ID NO: 35222 - DNA, 25 bp, Artificial
  probe
  misc_feature (1)..(25): SEQ ID NO: 3681; WAN0249V8_at; Start 71; Stop 95
agatatgctacagttgtggtaacga

SEQ ID NO: 35223 - DNA, 25 bp, Artificial
  probe
  misc_feature (1)..(25): SEQ ID NO: 3681; WAN0249V8_at; Start 54; Stop 78
tcttgcattgattacatagatatgc

SEQ ID NO: 35224 - DNA, 25 bp, Artificial
  probe
  misc_feature (1)..(25): SEQ ID NO: 3681; WAN0249V8_at; Start 3; Stop 27
ccatcatcctaaaagtaaagaatct

SEQ ID NO: 35225 - DNA, 25 bp, Artificial
  probe
  misc_feature (1)..(25): SEQ ID NO: 3681; WAN0249V8_at; Start 65; Stop 89
ttacatagatatgctacagttgtgg

SEQ ID NO: 35226 - DNA, 25 bp, Artificial
  probe
  misc_feature (1)..(25): SEQ ID NO: 3681; WAN0249V8_at; Start 81; Stop 105
cagttgtggtaacgattacaaaata

SEQ ID NO: 35227 - DNA, 25 bp, Artificial
  probe
  misc_feature (1)..(25): SEQ ID NO: 3681; WAN0249V8_at; Start 66; Stop 90
tacatagatatgctacagttgtggt

SEQ ID NO: 35228 - DNA, 25 bp, Artificial
  probe
  misc_feature (1)..(25): SEQ ID NO: 3681; WAN0249V8_at; Start 17; Stop 41
gtaaagaatctaaattcactttcta

SEQ ID NO: 35229 - DNA, 25 bp, Artificial
  probe
  misc_feature (1)..(25): SEQ ID NO: 3681; WAN0249V8_at; Start 58; Stop 82
gcattgattacatagatatgctaca

SEQ ID NO: 35230 - DNA, 25 bp, Artificial
  probe
  misc_feature (1)..(25): SEQ ID NO: 3681; WAN0249V8_at; Start 48; Stop 72
cttctttcttgcattgattacatag

SEQ ID NO: 35231 - DNA, 25 bp, Artificial
  probe
  misc_feature (1)..(25): SEQ ID NO: 3681; WAN0249V8_at; Start 67; Stop 91
acatagatatgctacagttgtggta

SEQ ID NO: 35232 - DNA, 25 bp, Artificial
  probe
  misc_feature (1)..(25): SEQ ID NO: 3681; WAN0249V8_at; Start 77; Stop 101
gctacagttgtggtaacgattacaa

SEQ ID NO: 35233 - DNA, 25 bp, Artificial
  probe
  misc_feature (1)..(25): SEQ ID NO: 3681; WAN0249V8_at; Start 59; Stop 83
cattgattacatagatatgctacag

SEQ ID NO: 35234 - DNA, 25 bp, Artificial
  probe
  misc_feature (1)..(25): SEQ ID NO: 3681; WAN0249V8_at; Start 93; Stop 117
cgattacaaaataaaaggagcatgc

SEQ ID NO: 35235 - DNA, 25 bp, Artificial
  probe
  misc_feature (1)..(25): SEQ ID NO: 3681; WAN0249V8_at; Start 68; Stop 92
catagatatgctacagttgtggtaa

SEQ ID NO: 35236 - DNA, 25 bp, Artificial
  probe
  misc_feature (1)..(25): SEQ ID NO: 3681; WAN0249V8_at; Start 51; Stop 75
ctttcttgcattgattacatagata

SEQ ID NO: 35237 - DNA, 25 bp, Artificial
  probe
  misc_feature (1)..(25): SEQ ID NO: 3681; WAN0249V8_at; Start 7; Stop 31
catcctaaaagtaaagaatctaaat

SEQ ID NO: 35238 - DNA, 25 bp, Artificial
  probe
  misc_feature (1)..(25): SEQ ID NO: 3681; WAN0249V8_at; Start 4; Stop 28
catcatcctaaaagtaaagaatcta

SEQ ID NO: 35239 - DNA, 25 bp, Artificial
  probe
  misc_feature (1)..(25): SEQ ID NO: 3681; WAN0249V8_at; Start 70; Stop 94
tagatatgctacagttgtggtaacg

SEQ ID NO: 35240 - DNA, 25 bp, Artificial
  probe
  misc_feature (1)..(25): SEQ ID NO: 3681; WAN0249V8_at; Start 72; Stop 96
gatatgctacagttgtggtaacgat

SEQ ID NO: 35241 - DNA, 25 bp, Artificial
  probe
  misc_feature (1)..(25): SEQ ID NO: 3681; WAN0249V8_at; Start 47; Stop 71
ccttctttcttgcattgattacata

SEQ ID NO: 35242 - DNA, 25 bp, Artificial
  probe
  misc_feature (1)..(25): SEQ ID NO: 3681; WAN0249V8_at; Start 76; Stop 100
tgctacagttgtggtaacgattaca

SEQ ID NO: 35243 - DNA, 25 bp, Artificial
  probe
  misc_feature (1)..(25): SEQ ID NO: 3681; WAN0249V8_at; Start 78; Stop 102
ctacagttgtggtaacgattacaaa

SEQ ID NO: 35244 - DNA, 25 bp, Artificial
  probe
  misc_feature (1)..(25): SEQ ID NO: 3681; WAN0249V8_at; Start 79; Stop 103
tacagttgtggtaacgattacaaaa

SEQ ID NO: 35245 - DNA, 25 bp, Artificial
  probe
  misc_feature (1)..(25): SEQ ID NO: 3681; WAN0249V8_at; Start 63; Stop 87
gattacatagatatgctacagttgt

SEQ ID NO: 35246 - DNA, 25 bp, Artificial
  probe
  misc_feature (1)..(25): SEQ ID NO: 3681; WAN0249V8_at; Start 2; Stop 26
cccatcatcctaaaagtaaagaatc

SEQ ID NO: 35247 - DNA, 25 bp, Artificial
  probe
  misc_feature (1)..(25): SEQ ID NO: 3681; WAN0249V8_at; Start 90; Stop 114
taacgattacaaaataaaaggagca

SEQ ID NO: 35248 - DNA, 25 bp, Artificial
  probe
  misc_feature (1)..(25): SEQ ID NO: 3681; WAN0249V8_at; Start 74; Stop 98
tatgctacagttgtggtaacgatta

SEQ ID NO: 35249 - DNA, 25 bp, Artificial
  probe
  misc_feature (1)..(25): SEQ ID NO: 3681; WAN0249V8_at; Start 1; Stop 25
gcccatcatcctaaaagtaaagaat

SEQ ID NO: 35250 - DNA, 25 bp, Artificial
  probe
  misc_feature (1)..(25): SEQ ID NO: 3681; WAN0249V8_at; Start 94; Stop 118
gattacaaaataaaaggagcatgct

SEQ ID NO: 35251 - DNA, 25 bp, Artificial
  probe
  misc_feature (1)..(25): SEQ ID NO: 3681; WAN0249V8_at; Start 55; Stop 79
cttgcattgattacatagatatgct

SEQ ID NO: 35252 - DNA, 25 bp, Artificial
  probe
  misc_feature (1)..(25): SEQ ID NO: 447; WAN0249V9_at; Start 78; Stop 102
tagaaagtgaatttagattctttac

SEQ ID NO: 35253 - DNA, 25 bp, Artificial
  probe
  misc_feature (1)..(25): SEQ ID NO: 447; WAN0249V9_at; Start 42; Stop 66
catatctatgtaatcaatgcaagaa

SEQ ID NO: 35254 - DNA, 25 bp, Artificial
  probe
  misc_feature (1)..(25): SEQ ID NO: 447; WAN0249V9_at; Start 34; Stop 58
aactgtagcatatctatgtaatcaa

SEQ ID NO: 35255 - DNA, 25 bp, Artificial
  probe
  misc_feature (1)..(25): SEQ ID NO: 447; WAN0249V9_at; Start 26; Stop 50
gttaccacaactgtagcatatctat

SEQ ID NO: 35256 - DNA, 25 bp, Artificial
  probe
  misc_feature (1)..(25): SEQ ID NO: 447; WAN0249V9_at; Start 27; Stop 51
ttaccacaactgtagcatatctatg

SEQ ID NO: 35257 - DNA, 25 bp, Artificial
  probe
  misc_feature (1)..(25): SEQ ID NO: 447; WAN0249V9_at; Start 21; Stop 45
taatcgttaccacaactgtagcata

SEQ ID NO: 35258 - DNA, 25 bp, Artificial
  probe
  misc_feature (1)..(25): SEQ ID NO: 447; WAN0249V9_at; Start 37; Stop 61
tgtagcatatctatgtaatcaatgc

SEQ ID NO: 35259 - DNA, 25 bp, Artificial
  probe
  misc_feature (1)..(25): SEQ ID NO: 447; WAN0249V9_at; Start 74; Stop 98
taaatagaaagtgaatttagattct

SEQ ID NO: 35260 - DNA, 25 bp, Artificial
  probe
  misc_feature (1)..(25): SEQ ID NO: 447; WAN0249V9_at; Start 29; Stop 53
accacaactgtagcatatctatgta

SEQ ID NO: 35261 - DNA, 25 bp, Artificial
  probe
  misc_feature (1)..(25): SEQ ID NO: 447; WAN0249V9_at; Start 20; Stop 44
gtaatcgttaccacaactgtagcat

SEQ ID NO: 35262 - DNA, 25 bp, Artificial
  probe
  misc_feature (1)..(25): SEQ ID NO: 447; WAN0249V9_at; Start 40; Stop 64
agcatatctatgtaatcaatgcaag

SEQ ID NO: 35263 - DNA, 25 bp, Artificial
  probe
  misc_feature (1)..(25): SEQ ID NO: 447; WAN0249V9_at; Start 38; Stop 62
gtagcatatctatgtaatcaatgca

SEQ ID NO: 35264 - DNA, 25 bp, Artificial
  probe
  misc_feature (1)..(25): SEQ ID NO: 447; WAN0249V9_at; Start 16; Stop 40
ttttgtaatcgttaccacaactgta

SEQ ID NO: 35265 - DNA, 25 bp, Artificial
  probe
  misc_feature (1)..(25): SEQ ID NO: 447; WAN0249V9_at; Start 46; Stop 70
tctatgtaatcaatgcaagaaagaa

SEQ ID NO: 35266 - DNA, 25 bp, Artificial
  probe
  misc_feature (1)..(25): SEQ ID NO: 447; WAN0249V9_at; Start 44; Stop 68
tatctatgtaatcaatgcaagaaag

SEQ ID NO: 35267 - DNA, 25 bp, Artificial
  probe
  misc_feature (1)..(25): SEQ ID NO: 447; WAN0249V9_at; Start 33; Stop 57
caactgtagcatatctatgtaatca

SEQ ID NO: 35268 - DNA, 25 bp, Artificial
  probe
  misc_feature (1)..(25): SEQ ID NO: 447; WAN0249V9_at; Start 19; Stop 43
tgtaatcgttaccacaactgtagca

SEQ ID NO: 35269 - DNA, 25 bp, Artificial
  probe
  misc_feature (1)..(25): SEQ ID NO: 447; WAN0249V9_at; Start 2; Stop 26
gcatgctccttttattttgtaatcg

SEQ ID NO: 35270 - DNA, 25 bp, Artificial
  probe
  misc_feature (1)..(25): SEQ ID NO: 447; WAN0249V9_at; Start 94; Stop 118
attctttacttttaggatgatgggc

SEQ ID NO: 35271 - DNA, 25 bp, Artificial
  probe
  misc_feature (1)..(25): SEQ ID NO: 447; WAN0249V9_at; Start 18; Stop 42
ttgtaatcgttaccacaactgtagc

SEQ ID NO: 35272 - DNA, 25 bp, Artificial
  probe
  misc_feature (1)..(25): SEQ ID NO: 447; WAN0249V9_at; Start 47; Stop 71
ctatgtaatcaatgcaagaaagaag

SEQ ID NO: 35273 - DNA, 25 bp, Artificial
  probe
  misc_feature (1)..(25): SEQ ID NO: 447; WAN0249V9_at; Start 93; Stop 117
gattctttacttttaggatgatggg

SEQ ID NO: 35274 - DNA, 25 bp, Artificial
  probe
  misc_feature (1)..(25): SEQ ID NO: 447; WAN0249V9_at; Start 24; Stop 48
tcgttaccacaactgtagcatatct

SEQ ID NO: 35275 - DNA, 25 bp, Artificial
  probe
  misc_feature (1)..(25): SEQ ID NO: 447; WAN0249V9_at; Start 48; Stop 72
tatgtaatcaatgcaagaaagaagg

SEQ ID NO: 35276 - DNA, 25 bp, Artificial
  probe
  misc_feature (1)..(25): SEQ ID NO: 447; WAN0249V9_at; Start 23; Stop 47
atcgttaccacaactgtagcatatc

SEQ ID NO: 35277 - DNA, 25 bp, Artificial
  probe
  misc_feature (1)..(25): SEQ ID NO: 447; WAN0249V9_at; Start 31; Stop 55
cacaactgtagcatatctatgtaat

SEQ ID NO: 35278 - DNA, 25 bp, Artificial
  probe
  misc_feature (1)..(25): SEQ ID NO: 447; WAN0249V9_at; Start 41; Stop 65
gcatatctatgtaatcaatgcaaga

SEQ ID NO: 35279 - DNA, 25 bp, Artificial
  probe
  misc_feature (1)..(25): SEQ ID NO: 447; WAN0249V9_at; Start 14; Stop 38
tattttgtaatcgttaccacaactg

SEQ ID NO: 35280 - DNA, 25 bp, Artificial
  probe
  misc_feature (1)..(25): SEQ ID NO: 447; WAN0249V9_at; Start 17; Stop 41
tttgtaatcgttaccacaactgtag

SEQ ID NO: 35281 - DNA, 25 bp, Artificial
  probe
  misc_feature (1)..(25): SEQ ID NO: 447; WAN0249V9_at; Start 28; Stop 52
taccacaactgtagcatatctatgt

SEQ ID NO: 35282 - DNA, 25 bp, Artificial
  probe
  misc_feature (1)..(25): SEQ ID NO: 447; WAN0249V9_at; Start 25; Stop 49
cgttaccacaactgtagcatatcta

SEQ ID NO: 35283 - DNA, 25 bp, Artificial
  probe
  misc_feature (1)..(25): SEQ ID NO: 447; WAN0249V9_at; Start 5; Stop 29
tgctccttttattttgtaatcgtta

SEQ ID NO: 35284 - DNA, 25 bp, Artificial
  probe
  misc_feature (1)..(25): SEQ ID NO: 447; WAN0249V9_at; Start 30; Stop 54
ccacaactgtagcatatctatgtaa

SEQ ID NO: 35285 - DNA, 25 bp, Artificial
  probe
  misc_feature (1)..(25): SEQ ID NO: 447; WAN0249V9_at; Start 22; Stop 46
aatcgttaccacaactgtagcatat

SEQ ID NO: 35286 - DNA, 25 bp, Artificial
  probe
  misc_feature (1)..(25): SEQ ID NO: 3734; WAN0249VA_at; Start 9; Stop 33
ctctaagcacaaaatcttaaaaatt

SEQ ID NO: 35287 - DNA, 25 bp, Artificial
  probe
  misc_feature (1)..(25): SEQ ID NO: 3734; WAN0249VA_at; Start 36; Stop 60
aaacacgcatagtatcaggggatta

SEQ ID NO: 35288 - DNA, 25 bp, Artificial
  probe
  misc_feature (1)..(25): SEQ ID NO: 3734; WAN0249VA_at; Start 4; Stop 28
gtcgactctaagcacaaaatcttaa

SEQ ID NO: 35289 - DNA, 25 bp, Artificial
  probe
  misc_feature (1)..(25): SEQ ID NO: 3734; WAN0249VA_at; Start 23; Stop 47
tcttaaaaattacaaacacgcatag

SEQ ID NO: 35290 - DNA, 25 bp, Artificial
  probe
  misc_feature (1)..(25): SEQ ID NO: 3734; WAN0249VA_at; Start 27; Stop 51
aaaaattacaaacacgcatagtatc

SEQ ID NO: 35291 - DNA, 25 bp, Artificial
  probe
  misc_feature (1)..(25): SEQ ID NO: 3734; WAN0249VA_at; Start 12; Stop 36
taagcacaaaatcttaaaaattaca

SEQ ID NO: 35292 - DNA, 25 bp, Artificial
  probe
  misc_feature (1)..(25): SEQ ID NO: 3734; WAN0249VA_at; Start 2; Stop 26
gagtcgactctaagcacaaaatctt

SEQ ID NO: 35293 - DNA, 25 bp, Artificial
  probe
  misc_feature (1)..(25): SEQ ID NO: 3734; WAN0249VA_at; Start 24; Stop 48
cttaaaaattacaaacacgcatagt

SEQ ID NO: 35294 - DNA, 25 bp, Artificial
  probe
  misc_feature (1)..(25): SEQ ID NO: 3734; WAN0249VA_at; Start 38; Stop 62
acacgcatagtatcaggggattaag

SEQ ID NO: 35295 - DNA, 25 bp, Artificial
  probe
  misc_feature (1)..(25): SEQ ID NO: 3734; WAN0249VA_at; Start 8; Stop 32
actctaagcacaaaatcttaaaaat

SEQ ID NO: 35296 - DNA, 25 bp, Artificial
  probe
  misc_feature (1)..(25): SEQ ID NO: 3734; WAN0249VA_at; Start 7; Stop 31
gactctaagcacaaaatcttaaaaa

SEQ ID NO: 35297 - DNA, 25 bp, Artificial
  probe
  misc_feature (1)..(25): SEQ ID NO: 3734; WAN0249VA_at; Start 35; Stop 59
caaacacgcatagtatcaggggatt

SEQ ID NO: 35298 - DNA, 25 bp, Artificial
  probe
  misc_feature (1)..(25): SEQ ID NO: 3734; WAN0249VA_at; Start 34; Stop 58
acaaacacgcatagtatcaggggat

SEQ ID NO: 35299 - DNA, 25 bp, Artificial
  probe
  misc_feature (1)..(25): SEQ ID NO: 3734; WAN0249VA_at; Start 25; Stop 49
ttaaaaattacaaacacgcatagta

SEQ ID NO: 35300 - DNA, 25 bp, Artificial
  probe
  misc_feature (1)..(25): SEQ ID NO: 3734; WAN0249VA_at; Start 10; Stop 34
tctaagcacaaaatcttaaaaatta

SEQ ID NO: 35301 - DNA, 25 bp, Artificial
  probe
  misc_feature (1)..(25): SEQ ID NO: 3734; WAN0249VA_at; Start 1; Stop 25
ggagtcgactctaagcacaaaatct

SEQ ID NO: 35302 - DNA, 25 bp, Artificial
  probe
  misc_feature (1)..(25): SEQ ID NO: 3734; WAN0249VA_at; Start 6; Stop 30
cgactctaagcacaaaatcttaaaa

SEQ ID NO: 35303 - DNA, 25 bp, Artificial
  probe
  misc_feature (1)..(25): SEQ ID NO: 3734; WAN0249VA_at; Start 5; Stop 29
tcgactctaagcacaaaatcttaaa

SEQ ID NO: 35304 - DNA, 25 bp, Artificial
  probe
  misc_feature (1)..(25): SEQ ID NO: 3734; WAN0249VA_at; Start 26; Stop 50
taaaaattacaaacacgcatagtat

SEQ ID NO: 35305 - DNA, 25 bp, Artificial
  probe
  misc_feature (1)..(25): SEQ ID NO: 3734; WAN0249VA_at; Start 3; Stop 27
agtcgactctaagcacaaaatctta

SEQ ID NO: 35306 - DNA, 25 bp, Artificial
  probe
  misc_feature (1)..(25): SEQ ID NO: 3734; WAN0249VA_at; Start 32; Stop 56
ttacaaacacgcatagtatcagggg

SEQ ID NO: 35307 - DNA, 25 bp, Artificial
  probe
  misc_feature (1)..(25): SEQ ID NO: 3734; WAN0249VA_at; Start 21; Stop 45
aatcttaaaaattacaaacacgcat

SEQ ID NO: 35308 - DNA, 25 bp, Artificial
  probe
  misc_feature (1)..(25): SEQ ID NO: 3734; WAN0249VA_at; Start 22; Stop 46
atcttaaaaattacaaacacgcata

SEQ ID NO: 35309 - DNA, 25 bp, Artificial
  probe
  misc_feature (1)..(25): SEQ ID NO: 3734; WAN0249VA_at; Start 37; Stop 61
aacacgcatagtatcaggggattaa

SEQ ID NO: 35310 - DNA, 25 bp, Artificial
  probe
  misc_feature (1)..(25): SEQ ID NO: 3734; WAN0249VA_at; Start 33; Stop 57
tacaaacacgcatagtatcagggga

SEQ ID NO: 35311 - DNA, 25 bp, Artificial
  probe
  misc_feature (1)..(25): SEQ ID NO: 3476; WAN0249VB_at; Start 33; Stop 57
ttttaagattttgtgcttagagtcg

SEQ ID NO: 35312 - DNA, 25 bp, Artificial
  probe
  misc_feature (1)..(25): SEQ ID NO: 3476; WAN0249VB_at; Start 32; Stop 56
tttttaagattttgtgcttagagtc

SEQ ID NO: 35313 - DNA, 25 bp, Artificial
  probe
  misc_feature (1)..(25): SEQ ID NO: 3476; WAN0249VB_at; Start 34; Stop 58
tttaagattttgtgcttagagtcga

SEQ ID NO: 35314 - DNA, 25 bp, Artificial
  probe
  misc_feature (1)..(25): SEQ ID NO: 3476; WAN0249VB_at; Start 27; Stop 51
tgtaatttttaagattttgtgctta

SEQ ID NO: 35315 - DNA, 25 bp, Artificial
  probe
  misc_feature (1)..(25): SEQ ID NO: 3476; WAN0249VB_at; Start 12; Stop 36
gatactatgcgtgtttgtaattttt

SEQ ID NO: 35316 - DNA, 25 bp, Artificial
  probe
  misc_feature (1)..(25): SEQ ID NO: 3476; WAN0249VB_at; Start 31; Stop 55
atttttaagattttgtgcttagagt

SEQ ID NO: 35317 - DNA, 25 bp, Artificial
  probe
  misc_feature (1)..(25): SEQ ID NO: 3476; WAN0249VB_at; Start 5; Stop 29
atcccctgatactatgcgtgtttgt

SEQ ID NO: 35318 - DNA, 25 bp, Artificial
  probe
  misc_feature (1)..(25): SEQ ID NO: 3476; WAN0249VB_at; Start 18; Stop 42
atgcgtgtttgtaatttttaagatt

SEQ ID NO: 35319 - DNA, 25 bp, Artificial
  probe
  misc_feature (1)..(25): SEQ ID NO: 3476; WAN0249VB_at; Start 36; Stop 60
taagattttgtgcttagagtcgact

SEQ ID NO: 35320 - DNA, 25 bp, Artificial
  probe
  misc_feature (1)..(25): SEQ ID NO: 3476; WAN0249VB_at; Start 16; Stop 40
ctatgcgtgtttgtaatttttaaga

SEQ ID NO: 35321 - DNA, 25 bp, Artificial
  probe
  misc_feature (1)..(25): SEQ ID NO: 3476; WAN0249VB_at; Start 14; Stop 38
tactatgcgtgtttgtaatttttaa

SEQ ID NO: 35322 - DNA, 25 bp, Artificial
  probe
  misc_feature (1)..(25): SEQ ID NO: 3476; WAN0249VB_at; Start 17; Stop 41
tatgcgtgtttgtaatttttaagat

SEQ ID NO: 35323 - DNA, 25 bp, Artificial
  probe
  misc_feature (1)..(25): SEQ ID NO: 3476; WAN0249VB_at; Start 13; Stop 37
atactatgcgtgtttgtaattttta

SEQ ID NO: 35324 - DNA, 25 bp, Artificial
  probe
  misc_feature (1)..(25): SEQ ID NO: 3476; WAN0249VB_at; Start 4; Stop 28
aatcccctgatactatgcgtgtttg

SEQ ID NO: 35325 - DNA, 25 bp, Artificial
  probe
  misc_feature (1)..(25): SEQ ID NO: 3476; WAN0249VB_at; Start 30; Stop 54
aatttttaagattttgtgcttagag

SEQ ID NO: 35326 - DNA, 25 bp, Artificial
  probe
  misc_feature (1)..(25): SEQ ID NO: 3476; WAN0249VB_at; Start 2; Stop 26
ttaatcccctgatactatgcgtgtt

SEQ ID NO: 35327 - DNA, 25 bp, Artificial
  probe
  misc_feature (1)..(25): SEQ ID NO: 3476; WAN0249VB_at; Start 35; Stop 59
ttaagattttgtgcttagagtcgac

SEQ ID NO: 35328 - DNA, 25 bp, Artificial
  probe
  misc_feature (1)..(25): SEQ ID NO: 3476; WAN0249VB_at; Start 37; Stop 61
aagattttgtgcttagagtcgactc

SEQ ID NO: 35329 - DNA, 25 bp, Artificial
  probe
  misc_feature (1)..(25): SEQ ID NO: 3476; WAN0249VB_at; Start 6; Stop 30
tcccctgatactatgcgtgtttgta

SEQ ID NO: 35330 - DNA, 25 bp, Artificial
  probe
  misc_feature (1)..(25): SEQ ID NO: 3476; WAN0249VB_at; Start 1; Stop 25
cttaatcccctgatactatgcgtgt

SEQ ID NO: 35331 - DNA, 25 bp, Artificial
  probe
  misc_feature (1)..(25): SEQ ID NO: 3476; WAN0249VB_at; Start 29; Stop 53
taatttttaagattttgtgcttaga

SEQ ID NO: 35332 - DNA, 25 bp, Artificial
  probe
  misc_feature (1)..(25): SEQ ID NO: 3476; WAN0249VB_at; Start 7; Stop 31
cccctgatactatgcgtgtttgtaa

SEQ ID NO: 35333 - DNA, 25 bp, Artificial
  probe
  misc_feature (1)..(25): SEQ ID NO: 3476; WAN0249VB_at; Start 3; Stop 27
taatcccctgatactatgcgtgttt

SEQ ID NO: 35334 - DNA, 25 bp, Artificial
  probe
  misc_feature (1)..(25): SEQ ID NO: 3476; WAN0249VB_at; Start 38; Stop 62
agattttgtgcttagagtcgactcc

SEQ ID NO: 35335 - DNA, 25 bp, Artificial
  probe
  misc_feature (1)..(25): SEQ ID NO: 3476; WAN0249VB_at; Start 15; Stop 39
actatgcgtgtttgtaatttttaag

SEQ ID NO: 35336 - DNA, 25 bp, Artificial
  probe
  misc_feature (1)..(25): SEQ ID NO: 1653; WAN0249VC_at; Start 48; Stop 72
tactttcaaggacattattatataa

SEQ ID NO: 35337 - DNA, 25 bp, Artificial
  probe
  misc_feature (1)..(25): SEQ ID NO: 1653; WAN0249VC_at; Start 196; Stop 220
gatagattgctgtaaaaatagtagt

SEQ ID NO: 35338 - DNA, 25 bp, Artificial
  probe
  misc_feature (1)..(25): SEQ ID NO: 1653; WAN0249VC_at; Start 17; Stop 41
tttttatggactataaatgttcagc

SEQ ID NO: 35339 - DNA, 25 bp, Artificial
  probe
  misc_feature (1)..(25): SEQ ID NO: 1653; WAN0249VC_at; Start 22; Stop 46
atggactataaatgttcagctgaaa

SEQ ID NO: 35340 - DNA, 25 bp, Artificial
  probe
  misc_feature (1)..(25): SEQ ID NO: 1653; WAN0249VC_at; Start 193; Stop 217
aaagatagattgctgtaaaaatagt

SEQ ID NO: 35341 - DNA, 25 bp, Artificial
  probe
  misc_feature (1)..(25): SEQ ID NO: 1653; WAN0249VC_at; Start 54; Stop 78
caaggacattattatataaaagaat

SEQ ID NO: 35342 - DNA, 25 bp, Artificial
  probe
  misc_feature (1)..(25): SEQ ID NO: 1653; WAN0249VC_at; Start 186; Stop 210
tatatttaaagatagattgctgtaa

SEQ ID NO: 35343 - DNA, 25 bp, Artificial
  probe
  misc_feature (1)..(25): SEQ ID NO: 1653; WAN0249VC_at; Start 30; Stop 54
taaatgttcagctgaaactactttc

SEQ ID NO: 35344 - DNA, 25 bp, Artificial
  probe
  misc_feature (1)..(25): SEQ ID NO: 1653; WAN0249VC_at; Start 192; Stop 216
taaagatagattgctgtaaaaatag

SEQ ID NO: 35345 - DNA, 25 bp, Artificial
  probe
  misc_feature (1)..(25): SEQ ID NO: 1653; WAN0249VC_at; Start 195; Stop 219
agatagattgctgtaaaaatagtag

SEQ ID NO: 35346 - DNA, 25 bp, Artificial
  probe
  misc_feature (1)..(25): SEQ ID NO: 1653; WAN0249VC_at; Start 201; Stop 225
attgctgtaaaaatagtagtagcta

SEQ ID NO: 35347 - DNA, 25 bp, Artificial
  probe
  misc_feature (1)..(25): SEQ ID NO: 1653; WAN0249VC_at; Start 99; Stop 123
tatattacactatattgaaagcgtt

SEQ ID NO: 35348 - DNA, 25 bp, Artificial
  probe
  misc_feature (1)..(25): SEQ ID NO: 1653; WAN0249VC_at; Start 98; Stop 122
ctatattacactatattgaaagcgt

SEQ ID NO: 35349 - DNA, 25 bp, Artificial
  probe
  misc_feature (1)..(25): SEQ ID NO: 1653; WAN0249VC_at; Start 8; Stop 32
tctgttttctttttatggactataa

SEQ ID NO: 35350 - DNA, 25 bp, Artificial
  probe
  misc_feature (1)..(25): SEQ ID NO: 1653; WAN0249VC_at; Start 20; Stop 44
ttatggactataaatgttcagctga

SEQ ID NO: 35351 - DNA, 25 bp, Artificial
  probe
  misc_feature (1)..(25): SEQ ID NO: 1653; WAN0249VC_at; Start 198; Stop 222
tagattgctgtaaaaatagtagtag

SEQ ID NO: 35352 - DNA, 25 bp, Artificial
  probe
  misc_feature (1)..(25): SEQ ID NO: 1653; WAN0249VC_at; Start 23; Stop 47
tggactataaatgttcagctgaaac

SEQ ID NO: 35353 - DNA, 25 bp, Artificial
  probe
  misc_feature (1)..(25): SEQ ID NO: 1653; WAN0249VC_at; Start 24; Stop 48
ggactataaatgttcagctgaaact

SEQ ID NO: 35354 - DNA, 25 bp, Artificial
  probe
  misc_feature (1)..(25): SEQ ID NO: 1653; WAN0249VC_at; Start 19; Stop 43
tttatggactataaatgttcagctg

SEQ ID NO: 35355 - DNA, 25 bp, Artificial
  probe
  misc_feature (1)..(25): SEQ ID NO: 1653; WAN0249VC_at; Start 185; Stop 209
gtatatttaaagatagattgctgta

SEQ ID NO: 35356 - DNA, 25 bp, Artificial
  probe
  misc_feature (1)..(25): SEQ ID NO: 1653; WAN0249VC_at; Start 97; Stop 121
actatattacactatattgaaagcg

SEQ ID NO: 35357 - DNA, 25 bp, Artificial
  probe
  misc_feature (1)..(25): SEQ ID NO: 1653; WAN0249VC_at; Start 26; Stop 50
actataaatgttcagctgaaactac

SEQ ID NO: 35358 - DNA, 25 bp, Artificial
  probe
  misc_feature (1)..(25): SEQ ID NO: 1653; WAN0249VC_at; Start 2; Stop 26
tgagtttctgttttctttttatgga

SEQ ID NO: 35359 - DNA, 25 bp, Artificial
  probe
  misc_feature (1)..(25): SEQ ID NO: 1653; WAN0249VC_at; Start 28; Stop 52
tataaatgttcagctgaaactactt

SEQ ID NO: 35360 - DNA, 25 bp, Artificial
  probe
  misc_feature (1)..(25): SEQ ID NO: 1653; WAN0249VC_at; Start 181; Stop 205
ttatgtatatttaaagatagattgc

SEQ ID NO: 35361 - DNA, 25 bp, Artificial
  probe
  misc_feature (1)..(25): SEQ ID NO: 1653; WAN0249VC_at; Start 101; Stop 125
tattacactatattgaaagcgtttt

SEQ ID NO: 35362 - DNA, 25 bp, Artificial
  probe
  misc_feature (1)..(25): SEQ ID NO: 1653; WAN0249VC_at; Start 53; Stop 77
tcaaggacattattatataaaagaa

SEQ ID NO: 35363 - DNA, 25 bp, Artificial
  probe
  misc_feature (1)..(25): SEQ ID NO: 1653; WAN0249VC_at; Start 84; Stop 108
gaaactaaaatctactatattacac

SEQ ID NO: 35364 - DNA, 25 bp, Artificial
  probe
  misc_feature (1)..(25): SEQ ID NO: 1653; WAN0249VC_at; Start 31; Stop 55
aaatgttcagctgaaactactttca

SEQ ID NO: 35365 - DNA, 25 bp, Artificial
  probe
  misc_feature (1)..(25): SEQ ID NO: 1653; WAN0249VC_at; Start 21; Stop 45
tatggactataaatgttcagctgaa

SEQ ID NO: 35366 - DNA, 25 bp, Artificial
  probe
  misc_feature (1)..(25): SEQ ID NO: 1653; WAN0249VC_at; Start 200; Stop 224
gattgctgtaaaaatagtagtagct

SEQ ID NO: 35367 - DNA, 25 bp, Artificial
  probe
  misc_feature (1)..(25): SEQ ID NO: 1653; WAN0249VC_at; Start 199; Stop 223
agattgctgtaaaaatagtagtagc

SEQ ID NO: 35368 - DNA, 25 bp, Artificial
  probe
  misc_feature (1)..(25): SEQ ID NO: 1653; WAN0249VC_at; Start 25; Stop 49
gactataaatgttcagctgaaacta

SEQ ID NO: 35369 - DNA, 25 bp, Artificial
  probe
  misc_feature (1)..(25): SEQ ID NO: 1653; WAN0249VC_at; Start 27; Stop 51
ctataaatgttcagctgaaactact

SEQ ID NO: 35370 - DNA, 25 bp, Artificial
  probe
  misc_feature (1)..(25): SEQ ID NO: 4511; WAN0249VD_at; Start 157; Stop 181
tataataatgtccttgaaagtagtt

SEQ ID NO: 35371 - DNA, 25 bp, Artificial
  probe
  misc_feature (1)..(25): SEQ ID NO: 4511; WAN0249VD_at; Start 105; Stop 129
cgctttcaatatagtgtaatatagt

SEQ ID NO: 35372 - DNA, 25 bp, Artificial
  probe
  misc_feature (1)..(25): SEQ ID NO: 4511; WAN0249VD_at; Start 194; Stop 218
ttatagtccataaaaagaaaacaga

SEQ ID NO: 35373 - DNA, 25 bp, Artificial
  probe
  misc_feature (1)..(25): SEQ ID NO: 4511; WAN0249VD_at; Start 180; Stop 204
tttcagctgaacatttatagtccat

SEQ ID NO: 35374 - DNA, 25 bp, Artificial
  probe
  misc_feature (1)..(25): SEQ ID NO: 4511; WAN0249VD_at; Start 6; Stop 30
actactatttttacagcaatctatc

SEQ ID NO: 35375 - DNA, 25 bp, Artificial
  probe
  misc_feature (1)..(25): SEQ ID NO: 4511; WAN0249VD_at; Start 100; Stop 124
taaaacgctttcaatatagtgtaat

SEQ ID NO: 35376 - DNA, 25 bp, Artificial
  probe
  misc_feature (1)..(25): SEQ ID NO: 4511; WAN0249VD_at; Start 21; Stop 45
gcaatctatctttaaatatacataa

SEQ ID NO: 35377 - DNA, 25 bp, Artificial
  probe
  misc_feature (1)..(25): SEQ ID NO: 4511; WAN0249VD_at; Start 1; Stop 25
tagctactactatttttacagcaat

SEQ ID NO: 35378 - DNA, 25 bp, Artificial
  probe
  misc_feature (1)..(25): SEQ ID NO: 4511; WAN0249VD_at; Start 179; Stop 203
gtttcagctgaacatttatagtcca

SEQ ID NO: 35379 - DNA, 25 bp, Artificial
  probe
  misc_feature (1)..(25): SEQ ID NO: 4511; WAN0249VD_at; Start 8; Stop 32
tactatttttacagcaatctatctt

SEQ ID NO: 35380 - DNA, 25 bp, Artificial
  probe
  misc_feature (1)..(25): SEQ ID NO: 4511; WAN0249VD_at; Start 98; Stop 122
tttaaaacgctttcaatatagtgta

SEQ ID NO: 35381 - DNA, 25 bp, Artificial
  probe
  misc_feature (1)..(25): SEQ ID NO: 4511; WAN0249VD_at; Start 155; Stop 179
tatataataatgtccttgaaagtag

SEQ ID NO: 35382 - DNA, 25 bp, Artificial
  probe
  misc_feature (1)..(25): SEQ ID NO: 4511; WAN0249VD_at; Start 181; Stop 205
ttcagctgaacatttatagtccata

SEQ ID NO: 35383 - DNA, 25 bp, Artificial
  probe
  misc_feature (1)..(25): SEQ ID NO: 4511; WAN0249VD_at; Start 182; Stop 206
tcagctgaacatttatagtccataa

SEQ ID NO: 35384 - DNA, 25 bp, Artificial
  probe
  misc_feature (1)..(25): SEQ ID NO: 4511; WAN0249VD_at; Start 175; Stop 199
agtagtttcagctgaacatttatag

SEQ ID NO: 35385 - DNA, 25 bp, Artificial
  probe
  misc_feature (1)..(25): SEQ ID NO: 4511; WAN0249VD_at; Start 101; Stop 125
aaaacgctttcaatatagtgtaata

SEQ ID NO: 35386 - DNA, 25 bp, Artificial
  probe
  misc_feature (1)..(25): SEQ ID NO: 4511; WAN0249VD_at; Start 172; Stop 196
gaaagtagtttcagctgaacattta

SEQ ID NO: 35387 - DNA, 25 bp, Artificial
  probe
  misc_feature (1)..(25): SEQ ID NO: 4511; WAN0249VD_at; Start 201; Stop 225
ccataaaaagaaaacagaaactcat

SEQ ID NO: 35388 - DNA, 25 bp, Artificial
  probe
  misc_feature (1)..(25): SEQ ID NO: 4511; WAN0249VD_at; Start 3; Stop 27
gctactactatttttacagcaatct

SEQ ID NO: 35389 - DNA, 25 bp, Artificial
  probe
  misc_feature (1)..(25): SEQ ID NO: 4511; WAN0249VD_at; Start 160; Stop 184
aataatgtccttgaaagtagtttca

SEQ ID NO: 35390 - DNA, 25 bp, Artificial
  probe
  misc_feature (1)..(25): SEQ ID NO: 4511; WAN0249VD_at; Start 177; Stop 201
tagtttcagctgaacatttatagtc

SEQ ID NO: 35391 - DNA, 25 bp, Artificial
  probe
  misc_feature (1)..(25): SEQ ID NO: 4511; WAN0249VD_at; Start 195; Stop 219
tatagtccataaaaagaaaacagaa

SEQ ID NO: 35392 - DNA, 25 bp, Artificial
  probe
  misc_feature (1)..(25): SEQ ID NO: 4511; WAN0249VD_at; Start 107; Stop 131
ctttcaatatagtgtaatatagtag

SEQ ID NO: 35393 - DNA, 25 bp, Artificial
  probe
  misc_feature (1)..(25): SEQ ID NO: 4511; WAN0249VD_at; Start 183; Stop 207
cagctgaacatttatagtccataaa

SEQ ID NO: 35394 - DNA, 25 bp, Artificial
  probe
  misc_feature (1)..(25): SEQ ID NO: 4511; WAN0249VD_at; Start 200; Stop 224
tccataaaaagaaaacagaaactca

SEQ ID NO: 35395 - DNA, 25 bp, Artificial
  probe
  misc_feature (1)..(25): SEQ ID NO: 4511; WAN0249VD_at; Start 159; Stop 183
taataatgtccttgaaagtagtttc

SEQ ID NO: 35396 - DNA, 25 bp, Artificial
  probe
  misc_feature (1)..(25): SEQ ID NO: 4511; WAN0249VD_at; Start 120; Stop 144
gtaatatagtagattttagtttcaa

SEQ ID NO: 35397 - DNA, 25 bp, Artificial
  probe
  misc_feature (1)..(25): SEQ ID NO: 4511; WAN0249VD_at; Start 185; Stop 209
gctgaacatttatagtccataaaaa

SEQ ID NO: 35398 - DNA, 25 bp, Artificial
  probe
  misc_feature (1)..(25): SEQ ID NO: 4511; WAN0249VD_at; Start 150; Stop 174
tcttttatataataatgtccttgaa

SEQ ID NO: 35399 - DNA, 25 bp, Artificial
  probe
  misc_feature (1)..(25): SEQ ID NO: 4511; WAN0249VD_at; Start 17; Stop 41
tacagcaatctatctttaaatatac

SEQ ID NO: 35400 - DNA, 25 bp, Artificial
  probe
  misc_feature (1)..(25): SEQ ID NO: 4511; WAN0249VD_at; Start 171; Stop 195
tgaaagtagtttcagctgaacattt

SEQ ID NO: 35401 - DNA, 25 bp, Artificial
  probe
  misc_feature (1)..(25): SEQ ID NO: 4511; WAN0249VD_at; Start 178; Stop 202
agtttcagctgaacatttatagtcc

SEQ ID NO: 35402 - DNA, 25 bp, Artificial
  probe
  misc_feature (1)..(25): SEQ ID NO: 4511; WAN0249VD_at; Start 92; Stop 116
ctcatttttaaaacgctttcaatat

SEQ ID NO: 35403 - DNA, 25 bp, Artificial
  probe
  misc_feature (1)..(25): SEQ ID NO: 4511; WAN0249VD_at; Start 188; Stop 212
gaacatttatagtccataaaaagaa

SEQ ID NO: 35404 - DNA, 25 bp, Artificial
  probe
  misc_feature (1)..(25): SEQ ID NO: 4813; WAN0249VE_at; Start 5; Stop 29
tccagaaaatgcacttagtttgtct

SEQ ID NO: 35405 - DNA, 25 bp, Artificial
  probe
  misc_feature (1)..(25): SEQ ID NO: 4813; WAN0249VE_at; Start 148; Stop 172
tttatctaccaggacaccgctgcaa

SEQ ID NO: 35406 - DNA, 25 bp, Artificial
  probe
  misc_feature (1)..(25): SEQ ID NO: 4813; WAN0249VE_at; Start 186; Stop 210
tctctttataagcaaatgatggaca

SEQ ID NO: 35407 - DNA, 25 bp, Artificial
  probe
  misc_feature (1)..(25): SEQ ID NO: 4813; WAN0249VE_at; Start 145; Stop 169
tagtttatctaccaggacaccgctg

SEQ ID NO: 35408 - DNA, 25 bp, Artificial
  probe
  misc_feature (1)..(25): SEQ ID NO: 4813; WAN0249VE_at; Start 217; Stop 241
tatgctatttacaccatacttcctg

SEQ ID NO: 35409 - DNA, 25 bp, Artificial
  probe
  misc_feature (1)..(25): SEQ ID NO: 4813; WAN0249VE_at; Start 146; Stop 170
agtttatctaccaggacaccgctgc

SEQ ID NO: 35410 - DNA, 25 bp, Artificial
  probe
  misc_feature (1)..(25): SEQ ID NO: 4813; WAN0249VE_at; Start 125; Stop 149
caatcagactcctgccaatctagtt

SEQ ID NO: 35411 - DNA, 25 bp, Artificial
  probe
  misc_feature (1)..(25): SEQ ID NO: 4813; WAN0249VE_at; Start 150; Stop 174
tatctaccaggacaccgctgcaatt

SEQ ID NO: 35412 - DNA, 25 bp, Artificial
  probe
  misc_feature (1)..(25): SEQ ID NO: 4813; WAN0249VE_at; Start 157; Stop 181
caggacaccgctgcaattaaactaa

SEQ ID NO: 35413 - DNA, 25 bp, Artificial
  probe
  misc_feature (1)..(25): SEQ ID NO: 4813; WAN0249VE_at; Start 159; Stop 183
ggacaccgctgcaattaaactaaaa

SEQ ID NO: 35414 - DNA, 25 bp, Artificial
  probe
  misc_feature (1)..(25): SEQ ID NO: 4813; WAN0249VE_at; Start 81; Stop 105
acaaactatctcaaattggtgccaa

SEQ ID NO: 35415 - DNA, 25 bp, Artificial
  probe
  misc_feature (1)..(25): SEQ ID NO: 4813; WAN0249VE_at; Start 7; Stop 31
cagaaaatgcacttagtttgtcttt

SEQ ID NO: 35416 - DNA, 25 bp, Artificial
  probe
  misc_feature (1)..(25): SEQ ID NO: 4813; WAN0249VE_at; Start 160; Stop 184
gacaccgctgcaattaaactaaaat

SEQ ID NO: 35417 - DNA, 25 bp, Artificial
  probe
  misc_feature (1)..(25): SEQ ID NO: 4813; WAN0249VE_at; Start 163; Stop 187
accgctgcaattaaactaaaatatc

SEQ ID NO: 35418 - DNA, 25 bp, Artificial
  probe
  misc_feature (1)..(25): SEQ ID NO: 4813; WAN0249VE_at; Start 129; Stop 153
cagactcctgccaatctagtttatc

SEQ ID NO: 35419 - DNA, 25 bp, Artificial
  probe
  misc_feature (1)..(25): SEQ ID NO: 4813; WAN0249VE_at; Start 136; Stop 160
ctgccaatctagtttatctaccagg

SEQ ID NO: 35420 - DNA, 25 bp, Artificial
  probe
  misc_feature (1)..(25): SEQ ID NO: 4813; WAN0249VE_at; Start 64; Stop 88
tgacaaaaatgaactaaacaaacta

SEQ ID NO: 35421 - DNA, 25 bp, Artificial
  probe
  misc_feature (1)..(25): SEQ ID NO: 4813; WAN0249VE_at; Start 143; Stop 167
tctagtttatctaccaggacaccgc

SEQ ID NO: 35422 - DNA, 25 bp, Artificial
  probe
  misc_feature (1)..(25): SEQ ID NO: 4813; WAN0249VE_at; Start 218; Stop 242
atgctatttacaccatacttcctgc

SEQ ID NO: 35423 - DNA, 25 bp, Artificial
  probe
  misc_feature (1)..(25): SEQ ID NO: 4813; WAN0249VE_at; Start 138; Stop 162
gccaatctagtttatctaccaggac

SEQ ID NO: 35424 - DNA, 25 bp, Artificial
  probe
  misc_feature (1)..(25): SEQ ID NO: 4813; WAN0249VE_at; Start 123; Stop 147
tccaatcagactcctgccaatctag

SEQ ID NO: 35425 - DNA, 25 bp, Artificial
  probe
  misc_feature (1)..(25): SEQ ID NO: 4813; WAN0249VE_at; Start 188; Stop 212
tctttataagcaaatgatggacatc

SEQ ID NO: 35426 - DNA, 25 bp, Artificial
  probe
  misc_feature (1)..(25): SEQ ID NO: 4813; WAN0249VE_at; Start 131; Stop 155
gactcctgccaatctagtttatcta

SEQ ID NO: 35427 - DNA, 25 bp, Artificial
  probe
  misc_feature (1)..(25): SEQ ID NO: 4813; WAN0249VE_at; Start 140; Stop 164
caatctagtttatctaccaggacac

SEQ ID NO: 35428 - DNA, 25 bp, Artificial
  probe
  misc_feature (1)..(25): SEQ ID NO: 4813; WAN0249VE_at; Start 152; Stop 176
tctaccaggacaccgctgcaattaa

SEQ ID NO: 35429 - DNA, 25 bp, Artificial
  probe
  misc_feature (1)..(25): SEQ ID NO: 4813; WAN0249VE_at; Start 191; Stop 215
ttataagcaaatgatggacatcagc

SEQ ID NO: 35430 - DNA, 25 bp, Artificial
  probe
  misc_feature (1)..(25): SEQ ID NO: 4813; WAN0249VE_at; Start 155; Stop 179
accaggacaccgctgcaattaaact

SEQ ID NO: 35431 - DNA, 25 bp, Artificial
  probe
  misc_feature (1)..(25): SEQ ID NO: 4813; WAN0249VE_at; Start 48; Stop 72
ctacagttcatttaaatgacaaaaa

SEQ ID NO: 35432 - DNA, 25 bp, Artificial
  probe
  misc_feature (1)..(25): SEQ ID NO: 4813; WAN0249VE_at; Start 107; Stop 131
tttcccctctcctttctccaatcag

SEQ ID NO: 35433 - DNA, 25 bp, Artificial
  probe
  misc_feature (1)..(25): SEQ ID NO: 4813; WAN0249VE_at; Start 174; Stop 198
taaactaaaatatctctttataagc

SEQ ID NO: 35434 - DNA, 25 bp, Artificial
  probe
  misc_feature (1)..(25): SEQ ID NO: 4813; WAN0249VE_at; Start 14; Stop 38
tgcacttagtttgtcttttattaac

SEQ ID NO: 35435 - DNA, 25 bp, Artificial
  probe
  misc_feature (1)..(25): SEQ ID NO: 4813; WAN0249VE_at; Start 147; Stop 171
gtttatctaccaggacaccgctgca

SEQ ID NO: 35436 - DNA, 25 bp, Artificial
  probe
  misc_feature (1)..(25): SEQ ID NO: 4813; WAN0249VE_at; Start 78; Stop 102
taaacaaactatctcaaattggtgc

SEQ ID NO: 35437 - DNA, 25 bp, Artificial
  probe
  misc_feature (1)..(25): SEQ ID NO: 4813; WAN0249VE_at; Start 44; Stop 68
tttactacagttcatttaaatgaca

SEQ ID NO: 35438 - DNA, 25 bp, Artificial
  probe
  misc_feature (1)..(25): SEQ ID NO: 3674; WAN0249VF_at; Start 178; Stop 202
catttaaatgaactgtagtaaaaga

SEQ ID NO: 35439 - DNA, 25 bp, Artificial
  probe
  misc_feature (1)..(25): SEQ ID NO: 3674; WAN0249VF_at; Start 141; Stop 165
gcaccaatttgagatagtttgttta

SEQ ID NO: 35440 - DNA, 25 bp, Artificial
  probe
  misc_feature (1)..(25): SEQ ID NO: 3674; WAN0249VF_at; Start 214; Stop 238
agacaaactaagtgcattttctgga

SEQ ID NO: 35441 - DNA, 25 bp, Artificial
  probe
  misc_feature (1)..(25): SEQ ID NO: 3674; WAN0249VF_at; Start 83; Stop 107
cctggtagataaactagattggcag

SEQ ID NO: 35442 - DNA, 25 bp, Artificial
  probe
  misc_feature (1)..(25): SEQ ID NO: 3674; WAN0249VF_at; Start 64; Stop 88
agtttaattgcagcggtgtcctggt

SEQ ID NO: 35443 - DNA, 25 bp, Artificial
  probe
  misc_feature (1)..(25): SEQ ID NO: 3674; WAN0249VF_at; Start 175; Stop 199
tgtcatttaaatgaactgtagtaaa

SEQ ID NO: 35444 - DNA, 25 bp, Artificial
  probe
  misc_feature (1)..(25): SEQ ID NO: 3674; WAN0249VF_at; Start 31; Stop 55
gatgtccatcatttgcttataaaga

SEQ ID NO: 35445 - DNA, 25 bp, Artificial
  probe
  misc_feature (1)..(25): SEQ ID NO: 3674; WAN0249VF_at; Start 63; Stop 87
tagtttaattgcagcggtgtcctgg

SEQ ID NO: 35446 - DNA, 25 bp, Artificial
  probe
  misc_feature (1)..(25): SEQ ID NO: 3674; WAN0249VF_at; Start 82; Stop 106
tcctggtagataaactagattggca

SEQ ID NO: 35447 - DNA, 25 bp, Artificial
  probe
  misc_feature (1)..(25): SEQ ID NO: 3674; WAN0249VF_at; Start 74; Stop 98
cagcggtgtcctggtagataaacta

SEQ ID NO: 35448 - DNA, 25 bp, Artificial
  probe
  misc_feature (1)..(25): SEQ ID NO: 3674; WAN0249VF_at; Start 88; Stop 112
tagataaactagattggcaggagtc

SEQ ID NO: 35449 - DNA, 25 bp, Artificial
  probe
  misc_feature (1)..(25): SEQ ID NO: 3674; WAN0249VF_at; Start 145; Stop 169
caatttgagatagtttgtttagttc

SEQ ID NO: 35450 - DNA, 25 bp, Artificial
  probe
  misc_feature (1)..(25): SEQ ID NO: 3674; WAN0249VF_at; Start 105; Stop 129
caggagtctgattggagaaaggaga

SEQ ID NO: 35451 - DNA, 25 bp, Artificial
  probe
  misc_feature (1)..(25): SEQ ID NO: 3674; WAN0249VF_at; Start 86; Stop 110
ggtagataaactagattggcaggag

SEQ ID NO: 35452 - DNA, 25 bp, Artificial
  probe
  misc_feature (1)..(25): SEQ ID NO: 3674; WAN0249VF_at; Start 155; Stop 179
tagtttgtttagttcatttttgtca

SEQ ID NO: 35453 - DNA, 25 bp, Artificial
  probe
  misc_feature (1)..(25): SEQ ID NO: 3674; WAN0249VF_at; Start 213; Stop 237
aagacaaactaagtgcattttctgg

SEQ ID NO: 35454 - DNA, 25 bp, Artificial
  probe
  misc_feature (1)..(25): SEQ ID NO: 3674; WAN0249VF_at; Start 69; Stop 93
aattgcagcggtgtcctggtagata

SEQ ID NO: 35455 - DNA, 25 bp, Artificial
  probe
  misc_feature (1)..(25): SEQ ID NO: 3674; WAN0249VF_at; Start 68; Stop 92
taattgcagcggtgtcctggtagat

SEQ ID NO: 35456 - DNA, 25 bp, Artificial
  probe
  misc_feature (1)..(25): SEQ ID NO: 3674; WAN0249VF_at; Start 36; Stop 60
ccatcatttgcttataaagagatat

SEQ ID NO: 35457 - DNA, 25 bp, Artificial
  probe
  misc_feature (1)..(25): SEQ ID NO: 3674; WAN0249VF_at; Start 1; Stop 25
gcaggaagtatggtgtaaatagcat

SEQ ID NO: 35458 - DNA, 25 bp, Artificial
  probe
  misc_feature (1)..(25): SEQ ID NO: 3674; WAN0249VF_at; Start 60; Stop 84
ttttagtttaattgcagcggtgtcc

SEQ ID NO: 35459 - DNA, 25 bp, Artificial
  probe
  misc_feature (1)..(25): SEQ ID NO: 3674; WAN0249VF_at; Start 28; Stop 52
gctgatgtccatcatttgcttataa

SEQ ID NO: 35460 - DNA, 25 bp, Artificial
  probe
  misc_feature (1)..(25): SEQ ID NO: 3674; WAN0249VF_at; Start 96; Stop 120
ctagattggcaggagtctgattgga

SEQ ID NO: 35461 - DNA, 25 bp, Artificial
  probe
  misc_feature (1)..(25): SEQ ID NO: 3674; WAN0249VF_at; Start 72; Stop 96
tgcagcggtgtcctggtagataaac

SEQ ID NO: 35462 - DNA, 25 bp, Artificial
  probe
  misc_feature (1)..(25): SEQ ID NO: 3674; WAN0249VF_at; Start 93; Stop 117
aaactagattggcaggagtctgatt

SEQ ID NO: 35463 - DNA, 25 bp, Artificial
  probe
  misc_feature (1)..(25): SEQ ID NO: 3674; WAN0249VF_at; Start 90; Stop 114
gataaactagattggcaggagtctg

SEQ ID NO: 35464 - DNA, 25 bp, Artificial
  probe
  misc_feature (1)..(25): SEQ ID NO: 3674; WAN0249VF_at; Start 54; Stop 78
gagatattttagtttaattgcagcg

SEQ ID NO: 35465 - DNA, 25 bp, Artificial
  probe
  misc_feature (1)..(25): SEQ ID NO: 3674; WAN0249VF_at; Start 205; Stop 229
gttaataaaagacaaactaagtgca

SEQ ID NO: 35466 - DNA, 25 bp, Artificial
  probe
  misc_feature (1)..(25): SEQ ID NO: 3674; WAN0249VF_at; Start 33; Stop 57
tgtccatcatttgcttataaagaga

SEQ ID NO: 35467 - DNA, 25 bp, Artificial
  probe
  misc_feature (1)..(25): SEQ ID NO: 3674; WAN0249VF_at; Start 138; Stop 162
ttggcaccaatttgagatagtttgt

SEQ ID NO: 35468 - DNA, 25 bp, Artificial
  probe
  misc_feature (1)..(25): SEQ ID NO: 3674; WAN0249VF_at; Start 78; Stop 102
ggtgtcctggtagataaactagatt

SEQ ID NO: 35469 - DNA, 25 bp, Artificial
  probe
  misc_feature (1)..(25): SEQ ID NO: 3674; WAN0249VF_at; Start 2; Stop 26
caggaagtatggtgtaaatagcata

SEQ ID NO: 35470 - DNA, 25 bp, Artificial
  probe
  misc_feature (1)..(25): SEQ ID NO: 3674; WAN0249VF_at; Start 80; Stop 104
tgtcctggtagataaactagattgg

SEQ ID NO: 35471 - DNA, 25 bp, Artificial
  probe
  misc_feature (1)..(25): SEQ ID NO: 3674; WAN0249VF_at; Start 76; Stop 100
gcggtgtcctggtagataaactaga

SEQ ID NO: 35472 - DNA, 25 bp, Artificial
  probe
  misc_feature (1)..(25): SEQ ID NO: 3590; WAN0249VG_at; Start 40; Stop 64
gagatagcaggttttcaagcctgct

SEQ ID NO: 35473 - DNA, 25 bp, Artificial
  probe
  misc_feature (1)..(25): SEQ ID NO: 3590; WAN0249VG_at; Start 86; Stop 110
ggctgatacgaaatcataagaggtc

SEQ ID NO: 35474 - DNA, 25 bp, Artificial
  probe
  misc_feature (1)..(25): SEQ ID NO: 3590; WAN0249VG_at; Start 46; Stop 70
gcaggttttcaagcctgctatcttt

SEQ ID NO: 35475 - DNA, 25 bp, Artificial
  probe
  misc_feature (1)..(25): SEQ ID NO: 3590; WAN0249VG_at; Start 122; Stop 146
tcagagtagtctgttctataaaata

SEQ ID NO: 35476 - DNA, 25 bp, Artificial
  probe
  misc_feature (1)..(25): SEQ ID NO: 3590; WAN0249VG_at; Start 96; Stop 120
aaatcataagaggtctgaaactact

SEQ ID NO: 35477 - DNA, 25 bp, Artificial
  probe
  misc_feature (1)..(25): SEQ ID NO: 3590; WAN0249VG_at; Start 39; Stop 63
ggagatagcaggttttcaagcctgc

SEQ ID NO: 35478 - DNA, 25 bp, Artificial
  probe
  misc_feature (1)..(25): SEQ ID NO: 3590; WAN0249VG_at; Start 95; Stop 119
gaaatcataagaggtctgaaactac

SEQ ID NO: 35479 - DNA, 25 bp, Artificial
  probe
  misc_feature (1)..(25): SEQ ID NO: 3590; WAN0249VG_at; Start 80; Stop 104
cattcaggctgatacgaaatcataa

SEQ ID NO: 35480 - DNA, 25 bp, Artificial
  probe
  misc_feature (1)..(25): SEQ ID NO: 3590; WAN0249VG_at; Start 78; Stop 102
gacattcaggctgatacgaaatcat

SEQ ID NO: 35481 - DNA, 25 bp, Artificial
  probe
  misc_feature (1)..(25): SEQ ID NO: 3590; WAN0249VG_at; Start 89; Stop 113
tgatacgaaatcataagaggtctga

SEQ ID NO: 35482 - DNA, 25 bp, Artificial
  probe
  misc_feature (1)..(25): SEQ ID NO: 3590; WAN0249VG_at; Start 34; Stop 58
tagaaggagatagcaggttttcaag

SEQ ID NO: 35483 - DNA, 25 bp, Artificial
  probe
  misc_feature (1)..(25): SEQ ID NO: 3590; WAN0249VG_at; Start 92; Stop 116
tacgaaatcataagaggtctgaaac

SEQ ID NO: 35484 - DNA, 25 bp, Artificial
  probe
  misc_feature (1)..(25): SEQ ID NO: 3590; WAN0249VG_at; Start 128; Stop 152
tagtctgttctataaaatatagtag

SEQ ID NO: 35485 - DNA, 25 bp, Artificial
  probe
  misc_feature (1)..(25): SEQ ID NO: 3590; WAN0249VG_at; Start 77; Stop 101
tgacattcaggctgatacgaaatca

SEQ ID NO: 35486 - DNA, 25 bp, Artificial
  probe
  misc_feature (1)..(25): SEQ ID NO: 3590; WAN0249VG_at; Start 74; Stop 98
tgatgacattcaggctgatacgaaa

SEQ ID NO: 35487 - DNA, 25 bp, Artificial
  probe
  misc_feature (1)..(25): SEQ ID NO: 3590; WAN0249VG_at; Start 72; Stop 96
tttgatgacattcaggctgatacga

SEQ ID NO: 35488 - DNA, 25 bp, Artificial
  probe
  misc_feature (1)..(25): SEQ ID NO: 3590; WAN0249VG_at; Start 117; Stop 141
tactttcagagtagtctgttctata

SEQ ID NO: 35489 - DNA, 25 bp, Artificial
  probe
  misc_feature (1)..(25): SEQ ID NO: 3590; WAN0249VG_at; Start 36; Stop 60
gaaggagatagcaggttttcaagcc

SEQ ID NO: 35490 - DNA, 25 bp, Artificial
  probe
  misc_feature (1)..(25): SEQ ID NO: 3590; WAN0249VG_at; Start 94; Stop 118
cgaaatcataagaggtctgaaacta

SEQ ID NO: 35491 - DNA, 25 bp, Artificial
  probe
  misc_feature (1)..(25): SEQ ID NO: 3590; WAN0249VG_at; Start 110; Stop 134
ctgaaactactttcagagtagtctg

SEQ ID NO: 35492 - DNA, 25 bp, Artificial
  probe
  misc_feature (1)..(25): SEQ ID NO: 3590; WAN0249VG_at; Start 28; Stop 52
taaaaatagaaggagatagcaggtt

SEQ ID NO: 35493 - DNA, 25 bp, Artificial
  probe
  misc_feature (1)..(25): SEQ ID NO: 3590; WAN0249VG_at; Start 83; Stop 107
tcaggctgatacgaaatcataagag

SEQ ID NO: 35494 - DNA, 25 bp, Artificial
  probe
  misc_feature (1)..(25): SEQ ID NO: 3590; WAN0249VG_at; Start 87; Stop 111
gctgatacgaaatcataagaggtct

SEQ ID NO: 35495 - DNA, 25 bp, Artificial
  probe
  misc_feature (1)..(25): SEQ ID NO: 3590; WAN0249VG_at; Start 31; Stop 55
aaatagaaggagatagcaggttttc

SEQ ID NO: 35496 - DNA, 25 bp, Artificial
  probe
  misc_feature (1)..(25): SEQ ID NO: 3590; WAN0249VG_at; Start 84; Stop 108
caggctgatacgaaatcataagagg

SEQ ID NO: 35497 - DNA, 25 bp, Artificial
  probe
  misc_feature (1)..(25): SEQ ID NO: 3590; WAN0249VG_at; Start 27; Stop 51
gtaaaaatagaaggagatagcaggt

SEQ ID NO: 35498 - DNA, 25 bp, Artificial
  probe
  misc_feature (1)..(25): SEQ ID NO: 3590; WAN0249VG_at; Start 37; Stop 61
aaggagatagcaggttttcaagcct

SEQ ID NO: 35499 - DNA, 25 bp, Artificial
  probe
  misc_feature (1)..(25): SEQ ID NO: 3590; WAN0249VG_at; Start 112; Stop 136
gaaactactttcagagtagtctgtt

SEQ ID NO: 35500 - DNA, 25 bp, Artificial
  probe
  misc_feature (1)..(25): SEQ ID NO: 3590; WAN0249VG_at; Start 125; Stop 149
gagtagtctgttctataaaatatag

SEQ ID NO: 35501 - DNA, 25 bp, Artificial
  probe
  misc_feature (1)..(25): SEQ ID NO: 3590; WAN0249VG_at; Start 115; Stop 139
actactttcagagtagtctgttcta

SEQ ID NO: 35502 - DNA, 25 bp, Artificial
  probe
  misc_feature (1)..(25): SEQ ID NO: 3590; WAN0249VG_at; Start 71; Stop 95
ttttgatgacattcaggctgatacg

SEQ ID NO: 35503 - DNA, 25 bp, Artificial
  probe
  misc_feature (1)..(25): SEQ ID NO: 3590; WAN0249VG_at; Start 58; Stop 82
gcctgctatctttttttgatgacat

SEQ ID NO: 35504 - DNA, 25 bp, Artificial
  probe
  misc_feature (1)..(25): SEQ ID NO: 3590; WAN0249VG_at; Start 90; Stop 114
gatacgaaatcataagaggtctgaa

SEQ ID NO: 35505 - DNA, 25 bp, Artificial
  probe
  misc_feature (1)..(25): SEQ ID NO: 3590; WAN0249VG_at; Start 99; Stop 123
tcataagaggtctgaaactactttc

SEQ ID NO: 35506 - DNA, 25 bp, Artificial
  probe
  misc_feature (1)..(25): SEQ ID NO: 3277; WAN0249VH_at; Start 45; Stop 69
cctcttatgatttcgtatcagcctg

SEQ ID NO: 35507 - DNA, 25 bp, Artificial
  probe
  misc_feature (1)..(25): SEQ ID NO: 3277; WAN0249VH_at; Start 102; Stop 126
acctgctatctccttctatttttac

SEQ ID NO: 35508 - DNA, 25 bp, Artificial
  probe
  misc_feature (1)..(25): SEQ ID NO: 3277; WAN0249VH_at; Start 37; Stop 61
gtttcagacctcttatgatttcgta

SEQ ID NO: 35509 - DNA, 25 bp, Artificial
  probe
  misc_feature (1)..(25): SEQ ID NO: 3277; WAN0249VH_at; Start 86; Stop 110
gatagcaggcttgaaaacctgctat

SEQ ID NO: 35510 - DNA, 25 bp, Artificial
  probe
  misc_feature (1)..(25): SEQ ID NO: 3277; WAN0249VH_at; Start 52; Stop 76
tgatttcgtatcagcctgaatgtca

SEQ ID NO: 35511 - DNA, 25 bp, Artificial
  probe
  misc_feature (1)..(25): SEQ ID NO: 3277; WAN0249VH_at; Start 53; Stop 77
gatttcgtatcagcctgaatgtcat

SEQ ID NO: 35512 - DNA, 25 bp, Artificial
  probe
  misc_feature (1)..(25): SEQ ID NO: 3277; WAN0249VH_at; Start 31; Stop 55
aaagtagtttcagacctcttatgat

SEQ ID NO: 35513 - DNA, 25 bp, Artificial
  probe
  misc_feature (1)..(25): SEQ ID NO: 3277; WAN0249VH_at; Start 41; Stop 65
cagacctcttatgatttcgtatcag

SEQ ID NO: 35514 - DNA, 25 bp, Artificial
  probe
  misc_feature (1)..(25): SEQ ID NO: 3277; WAN0249VH_at; Start 19; Stop 43
cagactactctgaaagtagtttcag

SEQ ID NO: 35515 - DNA, 25 bp, Artificial
  probe
  misc_feature (1)..(25): SEQ ID NO: 3277; WAN0249VH_at; Start 7; Stop 31
tattttatagaacagactactctga

SEQ ID NO: 35516 - DNA, 25 bp, Artificial
  probe
  misc_feature (1)..(25): SEQ ID NO: 3277; WAN0249VH_at; Start 50; Stop 74
tatgatttcgtatcagcctgaatgt

SEQ ID NO: 35517 - DNA, 25 bp, Artificial
  probe
  misc_feature (1)..(25): SEQ ID NO: 3277; WAN0249VH_at; Start 14; Stop 38
tagaacagactactctgaaagtagt

SEQ ID NO: 35518 - DNA, 25 bp, Artificial
  probe
  misc_feature (1)..(25): SEQ ID NO: 3277; WAN0249VH_at; Start 40; Stop 64
tcagacctcttatgatttcgtatca

SEQ ID NO: 35519 - DNA, 25 bp, Artificial
  probe
  misc_feature (1)..(25): SEQ ID NO: 3277; WAN0249VH_at; Start 60; Stop 84
tatcagcctgaatgtcatcaaaaaa

SEQ ID NO: 35520 - DNA, 25 bp, Artificial
  probe
  misc_feature (1)..(25): SEQ ID NO: 3277; WAN0249VH_at; Start 12; Stop 36
tatagaacagactactctgaaagta

SEQ ID NO: 35521 - DNA, 25 bp, Artificial
  probe
  misc_feature (1)..(25): SEQ ID NO: 3277; WAN0249VH_at; Start 30; Stop 54
gaaagtagtttcagacctcttatga

SEQ ID NO: 35522 - DNA, 25 bp, Artificial
  probe
  misc_feature (1)..(25): SEQ ID NO: 3277; WAN0249VH_at; Start 59; Stop 83
gtatcagcctgaatgtcatcaaaaa

SEQ ID NO: 35523 - DNA, 25 bp, Artificial
  probe
  misc_feature (1)..(25): SEQ ID NO: 3277; WAN0249VH_at; Start 55; Stop 79
tttcgtatcagcctgaatgtcatca

SEQ ID NO: 35524 - DNA, 25 bp, Artificial
  probe
  misc_feature (1)..(25): SEQ ID NO: 3277; WAN0249VH_at; Start 58; Stop 82
cgtatcagcctgaatgtcatcaaaa

SEQ ID NO: 35525 - DNA, 25 bp, Artificial
  probe
  misc_feature (1)..(25): SEQ ID NO: 3277; WAN0249VH_at; Start 93; Stop 117
ggcttgaaaacctgctatctccttc

SEQ ID NO: 35526 - DNA, 25 bp, Artificial
  probe
  misc_feature (1)..(25): SEQ ID NO: 3277; WAN0249VH_at; Start 10; Stop 34
tttatagaacagactactctgaaag

SEQ ID NO: 35527 - DNA, 25 bp, Artificial
  probe
  misc_feature (1)..(25): SEQ ID NO: 3277; WAN0249VH_at; Start 83; Stop 107
aaagatagcaggcttgaaaacctgc

SEQ ID NO: 35528 - DNA, 25 bp, Artificial
  probe
  misc_feature (1)..(25): SEQ ID NO: 3277; WAN0249VH_at; Start 69; Stop 93
gaatgtcatcaaaaaaagatagcag

SEQ ID NO: 35529 - DNA, 25 bp, Artificial
  probe
  misc_feature (1)..(25): SEQ ID NO: 3277; WAN0249VH_at; Start 94; Stop 118
gcttgaaaacctgctatctccttct

SEQ ID NO: 35530 - DNA, 25 bp, Artificial
  probe
  misc_feature (1)..(25): SEQ ID NO: 3277; WAN0249VH_at; Start 90; Stop 114
gcaggcttgaaaacctgctatctcc

SEQ ID NO: 35531 - DNA, 25 bp, Artificial
  probe
  misc_feature (1)..(25): SEQ ID NO: 3277; WAN0249VH_at; Start 43; Stop 67
gacctcttatgatttcgtatcagcc

SEQ ID NO: 35532 - DNA, 25 bp, Artificial
  probe
  misc_feature (1)..(25): SEQ ID NO: 3277; WAN0249VH_at; Start 91; Stop 115
caggcttgaaaacctgctatctcct

SEQ ID NO: 35533 - DNA, 25 bp, Artificial
  probe
  misc_feature (1)..(25): SEQ ID NO: 3277; WAN0249VH_at; Start 16; Stop 40
gaacagactactctgaaagtagttt

SEQ ID NO: 35534 - DNA, 25 bp, Artificial
  probe
  misc_feature (1)..(25): SEQ ID NO: 3277; WAN0249VH_at; Start 4; Stop 28
ctatattttatagaacagactactc

SEQ ID NO: 35535 - DNA, 25 bp, Artificial
  probe
  misc_feature (1)..(25): SEQ ID NO: 3277; WAN0249VH_at; Start 84; Stop 108
aagatagcaggcttgaaaacctgct

SEQ ID NO: 35536 - DNA, 25 bp, Artificial
  probe
  misc_feature (1)..(25): SEQ ID NO: 3277; WAN0249VH_at; Start 47; Stop 71
tcttatgatttcgtatcagcctgaa

SEQ ID NO: 35537 - DNA, 25 bp, Artificial
  probe
  misc_feature (1)..(25): SEQ ID NO: 3277; WAN0249VH_at; Start 35; Stop 59
tagtttcagacctcttatgatttcg

SEQ ID NO: 35538 - DNA, 25 bp, Artificial
  probe
  misc_feature (1)..(25): SEQ ID NO: 3277; WAN0249VH_at; Start 49; Stop 73
ttatgatttcgtatcagcctgaatg

SEQ ID NO: 35539 - DNA, 25 bp, Artificial
  probe
  misc_feature (1)..(25): SEQ ID NO: 3277; WAN0249VH_at; Start 98; Stop 122
gaaaacctgctatctccttctattt

SEQ ID NO: 35540 - DNA, 25 bp, Artificial
  probe
  misc_feature (1)..(25): SEQ ID NO: 3156; WAN0249VI_at; Start 58; Stop 82
aagcaagaggtggaattttctctcc

SEQ ID NO: 35541 - DNA, 25 bp, Artificial
  probe
  misc_feature (1)..(25): SEQ ID NO: 3156; WAN0249VI_at; Start 24; Stop 48
gaatagtcttctttacaatctatac

SEQ ID NO: 35542 - DNA, 25 bp, Artificial
  probe
  misc_feature (1)..(25): SEQ ID NO: 3156; WAN0249VI_at; Start 59; Stop 83
agcaagaggtggaattttctctccc

SEQ ID NO: 35543 - DNA, 25 bp, Artificial
  probe
  misc_feature (1)..(25): SEQ ID NO: 3156; WAN0249VI_at; Start 50; Stop 74
ctatacaaaagcaagaggtggaatt

SEQ ID NO: 35544 - DNA, 25 bp, Artificial
  probe
  misc_feature (1)..(25): SEQ ID NO: 3156; WAN0249VI_at; Start 53; Stop 77
tacaaaagcaagaggtggaattttc

SEQ ID NO: 35545 - DNA, 25 bp, Artificial
  probe
  misc_feature (1)..(25): SEQ ID NO: 3156; WAN0249VI_at; Start 68; Stop 92
tggaattttctctcccacctccctg

SEQ ID NO: 35546 - DNA, 25 bp, Artificial
  probe
  misc_feature (1)..(25): SEQ ID NO: 3156; WAN0249VI_at; Start 61; Stop 85
caagaggtggaattttctctcccac

SEQ ID NO: 35547 - DNA, 25 bp, Artificial
  probe
  misc_feature (1)..(25): SEQ ID NO: 3156; WAN0249VI_at; Start 49; Stop 73
tctatacaaaagcaagaggtggaat

SEQ ID NO: 35548 - DNA, 25 bp, Artificial
  probe
  misc_feature (1)..(25): SEQ ID NO: 3156; WAN0249VI_at; Start 17; Stop 41
tatgaacgaatagtcttctttacaa

SEQ ID NO: 35549 - DNA, 25 bp, Artificial
  probe
  misc_feature (1)..(25): SEQ ID NO: 3156; WAN0249VI_at; Start 51; Stop 75
tatacaaaagcaagaggtggaattt

SEQ ID NO: 35550 - DNA, 25 bp, Artificial
  probe
  misc_feature (1)..(25): SEQ ID NO: 3156; WAN0249VI_at; Start 21; Stop 45
aacgaatagtcttctttacaatcta

SEQ ID NO: 35551 - DNA, 25 bp, Artificial
  probe
  misc_feature (1)..(25): SEQ ID NO: 3156; WAN0249VI_at; Start 57; Stop 81
aaagcaagaggtggaattttctctc

SEQ ID NO: 35552 - DNA, 25 bp, Artificial
  probe
  misc_feature (1)..(25): SEQ ID NO: 3156; WAN0249VI_at; Start 37; Stop 61
tacaatctatactctatacaaaagc

SEQ ID NO: 35553 - DNA, 25 bp, Artificial
  probe
  misc_feature (1)..(25): SEQ ID NO: 3156; WAN0249VI_at; Start 29; Stop 53
gtcttctttacaatctatactctat

SEQ ID NO: 35554 - DNA, 25 bp, Artificial
  probe
  misc_feature (1)..(25): SEQ ID NO: 3156; WAN0249VI_at; Start 64; Stop 88
gaggtggaattttctctcccacctc

SEQ ID NO: 35555 - DNA, 25 bp, Artificial
  probe
  misc_feature (1)..(25): SEQ ID NO: 3156; WAN0249VI_at; Start 44; Stop 68
tatactctatacaaaagcaagaggt

SEQ ID NO: 35556 - DNA, 25 bp, Artificial
  probe
  misc_feature (1)..(25): SEQ ID NO: 3156; WAN0249VI_at; Start 55; Stop 79
caaaagcaagaggtggaattttctc

SEQ ID NO: 35557 - DNA, 25 bp, Artificial
  probe
  misc_feature (1)..(25): SEQ ID NO: 3156; WAN0249VI_at; Start 75; Stop 99
ttctctcccacctccctgtttctta

SEQ ID NO: 35558 - DNA, 25 bp, Artificial
  probe
  misc_feature (1)..(25): SEQ ID NO: 3156; WAN0249VI_at; Start 39; Stop 63
caatctatactctatacaaaagcaa

SEQ ID NO: 35559 - DNA, 25 bp, Artificial
  probe
  misc_feature (1)..(25): SEQ ID NO: 3156; WAN0249VI_at; Start 60; Stop 84
gcaagaggtggaattttctctccca

SEQ ID NO: 35560 - DNA, 25 bp, Artificial
  probe
  misc_feature (1)..(25): SEQ ID NO: 3156; WAN0249VI_at; Start 47; Stop 71
actctatacaaaagcaagaggtgga

SEQ ID NO: 35561 - DNA, 25 bp, Artificial
  probe
  misc_feature (1)..(25): SEQ ID NO: 3156; WAN0249VI_at; Start 3; Stop 27
tctctctacctttctatgaacgaat

SEQ ID NO: 35562 - DNA, 25 bp, Artificial
  probe
  misc_feature (1)..(25): SEQ ID NO: 3156; WAN0249VI_at; Start 42; Stop 66
tctatactctatacaaaagcaagag

SEQ ID NO: 35563 - DNA, 25 bp, Artificial
  probe
  misc_feature (1)..(25): SEQ ID NO: 3156; WAN0249VI_at; Start 48; Stop 72
ctctatacaaaagcaagaggtggaa

SEQ ID NO: 35564 - DNA, 25 bp, Artificial
  probe
  misc_feature (1)..(25): SEQ ID NO: 3156; WAN0249VI_at; Start 15; Stop 39
tctatgaacgaatagtcttctttac

SEQ ID NO: 35565 - DNA, 25 bp, Artificial
  probe
  misc_feature (1)..(25): SEQ ID NO: 3156; WAN0249VI_at; Start 1; Stop 25
attctctctacctttctatgaacga

SEQ ID NO: 35566 - DNA, 25 bp, Artificial
  probe
  misc_feature (1)..(25): SEQ ID NO: 3156; WAN0249VI_at; Start 46; Stop 70
tactctatacaaaagcaagaggtgg

SEQ ID NO: 35567 - DNA, 25 bp, Artificial
  probe
  misc_feature (1)..(25): SEQ ID NO: 3156; WAN0249VI_at; Start 12; Stop 36
ctttctatgaacgaatagtcttctt

SEQ ID NO: 35568 - DNA, 25 bp, Artificial
  probe
  misc_feature (1)..(25): SEQ ID NO: 3156; WAN0249VI_at; Start 63; Stop 87
agaggtggaattttctctcccacct

SEQ ID NO: 35569 - DNA, 25 bp, Artificial
  probe
  misc_feature (1)..(25): SEQ ID NO: 3156; WAN0249VI_at; Start 7; Stop 31
tctacctttctatgaacgaatagtc

SEQ ID NO: 35570 - DNA, 25 bp, Artificial
  probe
  misc_feature (1)..(25): SEQ ID NO: 3156; WAN0249VI_at; Start 9; Stop 33
tacctttctatgaacgaatagtctt

SEQ ID NO: 35571 - DNA, 25 bp, Artificial
  probe
  misc_feature (1)..(25): SEQ ID NO: 3156; WAN0249VI_at; Start 20; Stop 44
gaacgaatagtcttctttacaatct

SEQ ID NO: 35572 - DNA, 25 bp, Artificial
  probe
  misc_feature (1)..(25): SEQ ID NO: 3156; WAN0249VI_at; Start 5; Stop 29
tctctacctttctatgaacgaatag

SEQ ID NO: 35573 - DNA, 25 bp, Artificial
  probe
  misc_feature (1)..(25): SEQ ID NO: 3156; WAN0249VI_at; Start 11; Stop 35
cctttctatgaacgaatagtcttct

SEQ ID NO: 35574 - DNA, 25 bp, Artificial
  probe
  misc_feature (1)..(25): SEQ ID NO: 4438; WAN0249VJ_at; Start 28; Stop 52
ttccacctcttgcttttgtatagag

SEQ ID NO: 35575 - DNA, 25 bp, Artificial
  probe
  misc_feature (1)..(25): SEQ ID NO: 4438; WAN0249VJ_at; Start 1; Stop 25
taagaaacagggaggtgggagagaa

SEQ ID NO: 35576 - DNA, 25 bp, Artificial
  probe
  misc_feature (1)..(25): SEQ ID NO: 4438; WAN0249VJ_at; Start 16; Stop 40
tgggagagaaaattccacctcttgc

SEQ ID NO: 35577 - DNA, 25 bp, Artificial
  probe
  misc_feature (1)..(25): SEQ ID NO: 4438; WAN0249VJ_at; Start 12; Stop 36
gaggtgggagagaaaattccacctc

SEQ ID NO: 35578 - DNA, 25 bp, Artificial
  probe
  misc_feature (1)..(25): SEQ ID NO: 4438; WAN0249VJ_at; Start 19; Stop 43
gagagaaaattccacctcttgcttt

SEQ ID NO: 35579 - DNA, 25 bp, Artificial
  probe
  misc_feature (1)..(25): SEQ ID NO: 4438; WAN0249VJ_at; Start 57; Stop 81
gattgtaaagaagactattcgttca

SEQ ID NO: 35580 - DNA, 25 bp, Artificial
  probe
  misc_feature (1)..(25): SEQ ID NO: 4438; WAN0249VJ_at; Start 60; Stop 84
tgtaaagaagactattcgttcatag

SEQ ID NO: 35581 - DNA, 25 bp, Artificial
  probe
  misc_feature (1)..(25): SEQ ID NO: 4438; WAN0249VJ_at; Start 69; Stop 93
gactattcgttcatagaaaggtaga

SEQ ID NO: 35582 - DNA, 25 bp, Artificial
  probe
  misc_feature (1)..(25): SEQ ID NO: 4438; WAN0249VJ_at; Start 73; Stop 97
attcgttcatagaaaggtagagaga

SEQ ID NO: 35583 - DNA, 25 bp, Artificial
  probe
  misc_feature (1)..(25): SEQ ID NO: 4438; WAN0249VJ_at; Start 33; Stop 57
cctcttgcttttgtatagagtatag

SEQ ID NO: 35584 - DNA, 25 bp, Artificial
  probe
  misc_feature (1)..(25): SEQ ID NO: 4438; WAN0249VJ_at; Start 64; Stop 88
aagaagactattcgttcatagaaag

SEQ ID NO: 35585 - DNA, 25 bp, Artificial
  probe
  misc_feature (1)..(25): SEQ ID NO: 4438; WAN0249VJ_at; Start 70; Stop 94
actattcgttcatagaaaggtagag

SEQ ID NO: 35586 - DNA, 25 bp, Artificial
  probe
  misc_feature (1)..(25): SEQ ID NO: 4438; WAN0249VJ_at; Start 72; Stop 96
tattcgttcatagaaaggtagagag

SEQ ID NO: 35587 - DNA, 25 bp, Artificial
  probe
  misc_feature (1)..(25): SEQ ID NO: 4438; WAN0249VJ_at; Start 66; Stop 90
gaagactattcgttcatagaaaggt

SEQ ID NO: 35588 - DNA, 25 bp, Artificial
  probe
  misc_feature (1)..(25): SEQ ID NO: 4438; WAN0249VJ_at; Start 65; Stop 89
agaagactattcgttcatagaaagg

SEQ ID NO: 35589 - DNA, 25 bp, Artificial
  probe
  misc_feature (1)..(25): SEQ ID NO: 4438; WAN0249VJ_at; Start 25; Stop 49
aaattccacctcttgcttttgtata

SEQ ID NO: 35590 - DNA, 25 bp, Artificial
  probe
  misc_feature (1)..(25): SEQ ID NO: 4438; WAN0249VJ_at; Start 26; Stop 50
aattccacctcttgcttttgtatag

SEQ ID NO: 35591 - DNA, 25 bp, Artificial
  probe
  misc_feature (1)..(25): SEQ ID NO: 4438; WAN0249VJ_at; Start 30; Stop 54
ccacctcttgcttttgtatagagta

SEQ ID NO: 35592 - DNA, 25 bp, Artificial
  probe
  misc_feature (1)..(25): SEQ ID NO: 4438; WAN0249VJ_at; Start 31; Stop 55
cacctcttgcttttgtatagagtat

SEQ ID NO: 35593 - DNA, 25 bp, Artificial
  probe
  misc_feature (1)..(25): SEQ ID NO: 4438; WAN0249VJ_at; Start 15; Stop 39
gtgggagagaaaattccacctcttg

SEQ ID NO: 35594 - DNA, 25 bp, Artificial
  probe
  misc_feature (1)..(25): SEQ ID NO: 4438; WAN0249VJ_at; Start 13; Stop 37
aggtgggagagaaaattccacctct

SEQ ID NO: 35595 - DNA, 25 bp, Artificial
  probe
  misc_feature (1)..(25): SEQ ID NO: 4438; WAN0249VJ_at; Start 27; Stop 51
attccacctcttgcttttgtataga

SEQ ID NO: 35596 - DNA, 25 bp, Artificial
  probe
  misc_feature (1)..(25): SEQ ID NO: 4438; WAN0249VJ_at; Start 39; Stop 63
gcttttgtatagagtatagattgta

SEQ ID NO: 35597 - DNA, 25 bp, Artificial
  probe
  misc_feature (1)..(25): SEQ ID NO: 4438; WAN0249VJ_at; Start 75; Stop 99
tcgttcatagaaaggtagagagaat

SEQ ID NO: 35598 - DNA, 25 bp, Artificial
  probe
  misc_feature (1)..(25): SEQ ID NO: 4438; WAN0249VJ_at; Start 23; Stop 47
gaaaattccacctcttgcttttgta

SEQ ID NO: 35599 - DNA, 25 bp, Artificial
  probe
  misc_feature (1)..(25): SEQ ID NO: 4438; WAN0249VJ_at; Start 17; Stop 41
gggagagaaaattccacctcttgct

SEQ ID NO: 35600 - DNA, 25 bp, Artificial
  probe
  misc_feature (1)..(25): SEQ ID NO: 4438; WAN0249VJ_at; Start 53; Stop 77
tatagattgtaaagaagactattcg

SEQ ID NO: 35601 - DNA, 25 bp, Artificial
  probe
  misc_feature (1)..(25): SEQ ID NO: 4438; WAN0249VJ_at; Start 55; Stop 79
tagattgtaaagaagactattcgtt

SEQ ID NO: 35602 - DNA, 25 bp, Artificial
  probe
  misc_feature (1)..(25): SEQ ID NO: 4438; WAN0249VJ_at; Start 48; Stop 72
tagagtatagattgtaaagaagact

SEQ ID NO: 35603 - DNA, 25 bp, Artificial
  probe
  misc_feature (1)..(25): SEQ ID NO: 4438; WAN0249VJ_at; Start 21; Stop 45
gagaaaattccacctcttgcttttg

SEQ ID NO: 35604 - DNA, 25 bp, Artificial
  probe
  misc_feature (1)..(25): SEQ ID NO: 4438; WAN0249VJ_at; Start 62; Stop 86
taaagaagactattcgttcatagaa

SEQ ID NO: 35605 - DNA, 25 bp, Artificial
  probe
  misc_feature (1)..(25): SEQ ID NO: 4438; WAN0249VJ_at; Start 68; Stop 92
agactattcgttcatagaaaggtag

SEQ ID NO: 35606 - DNA, 25 bp, Artificial
  probe
  misc_feature (1)..(25): SEQ ID NO: 4438; WAN0249VJ_at; Start 18; Stop 42
ggagagaaaattccacctcttgctt

SEQ ID NO: 35607 - DNA, 25 bp, Artificial
  probe
  misc_feature (1)..(25): SEQ ID NO: 4438; WAN0249VJ_at; Start 47; Stop 71
atagagtatagattgtaaagaagac

SEQ ID NO: 35608 - DNA, 25 bp, Artificial
  probe
  misc_feature (1)..(25): SEQ ID NO: 223; WAN0249VK_at; Start 37; Stop 61
attttagaaaaacgaagtgagcagc

SEQ ID NO: 35609 - DNA, 25 bp, Artificial
  probe
  misc_feature (1)..(25): SEQ ID NO: 223; WAN0249VK_at; Start 5; Stop 29
gtctattagtgctagaataatagat

SEQ ID NO: 35610 - DNA, 25 bp, Artificial
  probe
  misc_feature (1)..(25): SEQ ID NO: 223; WAN0249VK_at; Start 8; Stop 32
tattagtgctagaataatagattag

SEQ ID NO: 35611 - DNA, 25 bp, Artificial
  probe
  misc_feature (1)..(25): SEQ ID NO: 223; WAN0249VK_at; Start 10; Stop 34
ttagtgctagaataatagattagaa

SEQ ID NO: 35612 - DNA, 25 bp, Artificial
  probe
  misc_feature (1)..(25): SEQ ID NO: 223; WAN0249VK_at; Start 35; Stop 59
ttattttagaaaaacgaagtgagca

SEQ ID NO: 35613 - DNA, 25 bp, Artificial
  probe
  misc_feature (1)..(25): SEQ ID NO: 223; WAN0249VK_at; Start 1; Stop 25
aagagtctattagtgctagaataat

SEQ ID NO: 35614 - DNA, 25 bp, Artificial
  probe
  misc_feature (1)..(25): SEQ ID NO: 223; WAN0249VK_at; Start 7; Stop 31
ctattagtgctagaataatagatta

SEQ ID NO: 35615 - DNA, 25 bp, Artificial
  probe
  misc_feature (1)..(25): SEQ ID NO: 223; WAN0249VK_at; Start 9; Stop 33
attagtgctagaataatagattaga

SEQ ID NO: 35616 - DNA, 25 bp, Artificial
  probe
  misc_feature (1)..(25): SEQ ID NO: 223; WAN0249VK_at; Start 40; Stop 64
ttagaaaaacgaagtgagcagctta

SEQ ID NO: 35617 - DNA, 25 bp, Artificial
  probe
  misc_feature (1)..(25): SEQ ID NO: 223; WAN0249VK_at; Start 4; Stop 28
agtctattagtgctagaataataga

SEQ ID NO: 35618 - DNA, 25 bp, Artificial
  probe
  misc_feature (1)..(25): SEQ ID NO: 223; WAN0249VK_at; Start 39; Stop 63
tttagaaaaacgaagtgagcagctt

SEQ ID NO: 35619 - DNA, 25 bp, Artificial
  probe
  misc_feature (1)..(25): SEQ ID NO: 223; WAN0249VK_at; Start 38; Stop 62
ttttagaaaaacgaagtgagcagct

SEQ ID NO: 35620 - DNA, 25 bp, Artificial
  probe
  misc_feature (1)..(25): SEQ ID NO: 223; WAN0249VK_at; Start 36; Stop 60
tattttagaaaaacgaagtgagcag

SEQ ID NO: 35621 - DNA, 25 bp, Artificial
  probe
  misc_feature (1)..(25): SEQ ID NO: 223; WAN0249VK_at; Start 6; Stop 30
tctattagtgctagaataatagatt

SEQ ID NO: 35622 - DNA, 25 bp, Artificial
  probe
  misc_feature (1)..(25): SEQ ID NO: 223; WAN0249VK_at; Start 2; Stop 26
agagtctattagtgctagaataata

SEQ ID NO: 35623 - DNA, 25 bp, Artificial
  probe
  misc_feature (1)..(25): SEQ ID NO: 223; WAN0249VK_at; Start 3; Stop 27
gagtctattagtgctagaataatag

SEQ ID NO: 35624 - DNA, 25 bp, Artificial
  probe
  misc_feature (1)..(25): SEQ ID NO: 4442; WAN0249VL_at; Start 5; Stop 29
ctgctcacttcgtttttctaaaata

SEQ ID NO: 35625 - DNA, 25 bp, Artificial
  probe
  misc_feature (1)..(25): SEQ ID NO: 4442; WAN0249VL_at; Start 1; Stop 25
taagctgctcacttcgtttttctaa

SEQ ID NO: 35626 - DNA, 25 bp, Artificial
  probe
  misc_feature (1)..(25): SEQ ID NO: 4442; WAN0249VL_at; Start 3; Stop 27
agctgctcacttcgtttttctaaaa

SEQ ID NO: 35627 - DNA, 25 bp, Artificial
  probe
  misc_feature (1)..(25): SEQ ID NO: 4442; WAN0249VL_at; Start 35; Stop 59
aatctattattctagcactaataga

SEQ ID NO: 35628 - DNA, 25 bp, Artificial
  probe
  misc_feature (1)..(25): SEQ ID NO: 4442; WAN0249VL_at; Start 26; Stop 50
aataattctaatctattattctagc

SEQ ID NO: 35629 - DNA, 25 bp, Artificial
  probe
  misc_feature (1)..(25): SEQ ID NO: 4442; WAN0249VL_at; Start 38; Stop 62
ctattattctagcactaatagactc

SEQ ID NO: 35630 - DNA, 25 bp, Artificial
  probe
  misc_feature (1)..(25): SEQ ID NO: 4442; WAN0249VL_at; Start 39; Stop 63
tattattctagcactaatagactct

SEQ ID NO: 35631 - DNA, 25 bp, Artificial
  probe
  misc_feature (1)..(25): SEQ ID NO: 4442; WAN0249VL_at; Start 29; Stop 53
aattctaatctattattctagcact

SEQ ID NO: 35632 - DNA, 25 bp, Artificial
  probe
  misc_feature (1)..(25): SEQ ID NO: 4442; WAN0249VL_at; Start 36; Stop 60
atctattattctagcactaatagac

SEQ ID NO: 35633 - DNA, 25 bp, Artificial
  probe
  misc_feature (1)..(25): SEQ ID NO: 4442; WAN0249VL_at; Start 34; Stop 58
taatctattattctagcactaatag

SEQ ID NO: 35634 - DNA, 25 bp, Artificial
  probe
  misc_feature (1)..(25): SEQ ID NO: 4442; WAN0249VL_at; Start 30; Stop 54
attctaatctattattctagcacta

SEQ ID NO: 35635 - DNA, 25 bp, Artificial
  probe
  misc_feature (1)..(25): SEQ ID NO: 4442; WAN0249VL_at; Start 33; Stop 57
ctaatctattattctagcactaata

SEQ ID NO: 35636 - DNA, 25 bp, Artificial
  probe
  misc_feature (1)..(25): SEQ ID NO: 4442; WAN0249VL_at; Start 31; Stop 55
ttctaatctattattctagcactaa

SEQ ID NO: 35637 - DNA, 25 bp, Artificial
  probe
  misc_feature (1)..(25): SEQ ID NO: 4442; WAN0249VL_at; Start 27; Stop 51
ataattctaatctattattctagca

SEQ ID NO: 35638 - DNA, 25 bp, Artificial
  probe
  misc_feature (1)..(25): SEQ ID NO: 4442; WAN0249VL_at; Start 2; Stop 26
aagctgctcacttcgtttttctaaa

SEQ ID NO: 35639 - DNA, 25 bp, Artificial
  probe
  misc_feature (1)..(25): SEQ ID NO: 4442; WAN0249VL_at; Start 28; Stop 52
taattctaatctattattctagcac

SEQ ID NO: 35640 - DNA, 25 bp, Artificial
  probe
  misc_feature (1)..(25): SEQ ID NO: 4442; WAN0249VL_at; Start 40; Stop 64
attattctagcactaatagactctt

SEQ ID NO: 35641 - DNA, 25 bp, Artificial
  probe
  misc_feature (1)..(25): SEQ ID NO: 4442; WAN0249VL_at; Start 37; Stop 61
tctattattctagcactaatagact

SEQ ID NO: 35642 - DNA, 25 bp, Artificial
  probe
  misc_feature (1)..(25): SEQ ID NO: 4442; WAN0249VL_at; Start 6; Stop 30
tgctcacttcgtttttctaaaataa

SEQ ID NO: 35643 - DNA, 25 bp, Artificial
  probe
  misc_feature (1)..(25): SEQ ID NO: 4442; WAN0249VL_at; Start 25; Stop 49
aaataattctaatctattattctag

SEQ ID NO: 35644 - DNA, 25 bp, Artificial
  probe
  misc_feature (1)..(25): SEQ ID NO: 4442; WAN0249VL_at; Start 32; Stop 56
tctaatctattattctagcactaat

SEQ ID NO: 35645 - DNA, 25 bp, Artificial
  probe
  misc_feature (1)..(25): SEQ ID NO: 4442; WAN0249VL_at; Start 4; Stop 28
gctgctcacttcgtttttctaaaat

SEQ ID NO: 35646 - DNA, 25 bp, Artificial
  probe
  misc_feature (1)..(25): SEQ ID NO: 3578; WAN0249VM_at; Start 3; Stop 27
cctccttgtgaagattgaggagata

SEQ ID NO: 35647 - DNA, 25 bp, Artificial
  probe
  misc_feature (1)..(25): SEQ ID NO: 3578; WAN0249VM_at; Start 4; Stop 28
ctccttgtgaagattgaggagatac

SEQ ID NO: 35648 - DNA, 25 bp, Artificial
  probe
  misc_feature (1)..(25): SEQ ID NO: 3578; WAN0249VM_at; Start 5; Stop 29
tccttgtgaagattgaggagatact

SEQ ID NO: 35649 - DNA, 25 bp, Artificial
  probe
  misc_feature (1)..(25): SEQ ID NO: 3578; WAN0249VM_at; Start 2; Stop 26
acctccttgtgaagattgaggagat

SEQ ID NO: 35650 - DNA, 25 bp, Artificial
  probe
  misc_feature (1)..(25): SEQ ID NO: 3578; WAN0249VM_at; Start 1; Stop 25
gacctccttgtgaagattgaggaga

SEQ ID NO: 35651 - DNA, 25 bp, Artificial
  probe
  misc_feature (1)..(25): SEQ ID NO: 4534; WAN0249VN_at; Start 29; Stop 53
tctcctcaatcttcacaaggaggtc

SEQ ID NO: 35652 - DNA, 25 bp, Artificial
  probe
  misc_feature (1)..(25): SEQ ID NO: 4534; WAN0249VN_at; Start 27; Stop 51
tatctcctcaatcttcacaaggagg

SEQ ID NO: 35653 - DNA, 25 bp, Artificial
  probe
  misc_feature (1)..(25): SEQ ID NO: 4534; WAN0249VN_at; Start 25; Stop 49
agtatctcctcaatcttcacaagga

SEQ ID NO: 35654 - DNA, 25 bp, Artificial
  probe
  misc_feature (1)..(25): SEQ ID NO: 4534; WAN0249VN_at; Start 28; Stop 52
atctcctcaatcttcacaaggaggt

SEQ ID NO: 35655 - DNA, 25 bp, Artificial
  probe
  misc_feature (1)..(25): SEQ ID NO: 4534; WAN0249VN_at; Start 26; Stop 50
gtatctcctcaatcttcacaaggag

SEQ ID NO: 35656 - DNA, 25 bp, Artificial
  probe
  misc_feature (1)..(25): SEQ ID NO: 2764; WAN0249VO_at; Start 33; Stop 57
agctgaaaagctctagcccaatctt

SEQ ID NO: 35657 - DNA, 25 bp, Artificial
  probe
  misc_feature (1)..(25): SEQ ID NO: 2764; WAN0249VO_at; Start 30; Stop 54
gtgagctgaaaagctctagcccaat

SEQ ID NO: 35658 - DNA, 25 bp, Artificial
  probe
  misc_feature (1)..(25): SEQ ID NO: 2764; WAN0249VO_at; Start 41; Stop 65
agctctagcccaatcttgtaaaaga

SEQ ID NO: 35659 - DNA, 25 bp, Artificial
  probe
  misc_feature (1)..(25): SEQ ID NO: 2764; WAN0249VO_at; Start 40; Stop 64
aagctctagcccaatcttgtaaaag

SEQ ID NO: 35660 - DNA, 25 bp, Artificial
  probe
  misc_feature (1)..(25): SEQ ID NO: 2764; WAN0249VO_at; Start 1; Stop 25
atgtaaaagactagaaaataggtgg

SEQ ID NO: 35661 - DNA, 25 bp, Artificial
  probe
  misc_feature (1)..(25): SEQ ID NO: 2764; WAN0249VO_at; Start 42; Stop 66
gctctagcccaatcttgtaaaagaa

SEQ ID NO: 35662 - DNA, 25 bp, Artificial
  probe
  misc_feature (1)..(25): SEQ ID NO: 2764; WAN0249VO_at; Start 28; Stop 52
tagtgagctgaaaagctctagccca

SEQ ID NO: 35663 - DNA, 25 bp, Artificial
  probe
  misc_feature (1)..(25): SEQ ID NO: 2764; WAN0249VO_at; Start 38; Stop 62
aaaagctctagcccaatcttgtaaa

SEQ ID NO: 35664 - DNA, 25 bp, Artificial
  probe
  misc_feature (1)..(25): SEQ ID NO: 2764; WAN0249VO_at; Start 34; Stop 58
gctgaaaagctctagcccaatcttg

SEQ ID NO: 35665 - DNA, 25 bp, Artificial
  probe
  misc_feature (1)..(25): SEQ ID NO: 2764; WAN0249VO_at; Start 39; Stop 63
aaagctctagcccaatcttgtaaaa

SEQ ID NO: 35666 - DNA, 25 bp, Artificial
  probe
  misc_feature (1)..(25): SEQ ID NO: 2764; WAN0249VO_at; Start 35; Stop 59
ctgaaaagctctagcccaatcttgt

SEQ ID NO: 35667 - DNA, 25 bp, Artificial
  probe
  misc_feature (1)..(25): SEQ ID NO: 2764; WAN0249VO_at; Start 36; Stop 60
tgaaaagctctagcccaatcttgta

SEQ ID NO: 35668 - DNA, 25 bp, Artificial
  probe
  misc_feature (1)..(25): SEQ ID NO: 2764; WAN0249VO_at; Start 54; Stop 78
tcttgtaaaagaagggagaaggaga

SEQ ID NO: 35669 - DNA, 25 bp, Artificial
  probe
  misc_feature (1)..(25): SEQ ID NO: 2764; WAN0249VO_at; Start 37; Stop 61
gaaaagctctagcccaatcttgtaa

SEQ ID NO: 35670 - DNA, 25 bp, Artificial
  probe
  misc_feature (1)..(25): SEQ ID NO: 2764; WAN0249VO_at; Start 29; Stop 53
agtgagctgaaaagctctagcccaa

SEQ ID NO: 35671 - DNA, 25 bp, Artificial
  probe
  misc_feature (1)..(25): SEQ ID NO: 2764; WAN0249VO_at; Start 31; Stop 55
tgagctgaaaagctctagcccaatc

SEQ ID NO: 35672 - DNA, 25 bp, Artificial
  probe
  misc_feature (1)..(25): SEQ ID NO: 2764; WAN0249VO_at; Start 32; Stop 56
gagctgaaaagctctagcccaatct

SEQ ID NO: 35673 - DNA, 25 bp, Artificial
  probe
  misc_feature (1)..(25): SEQ ID NO: 4648; WAN0249VP_at; Start 25; Stop 49
attgggctagagcttttcagctcac

SEQ ID NO: 35674 - DNA, 25 bp, Artificial
  probe
  misc_feature (1)..(25): SEQ ID NO: 4648; WAN0249VP_at; Start 14; Stop 38
tcttttacaagattgggctagagct

SEQ ID NO: 35675 - DNA, 25 bp, Artificial
  probe
  misc_feature (1)..(25): SEQ ID NO: 4648; WAN0249VP_at; Start 19; Stop 43
tacaagattgggctagagcttttca

SEQ ID NO: 35676 - DNA, 25 bp, Artificial
  probe
  misc_feature (1)..(25): SEQ ID NO: 4648; WAN0249VP_at; Start 1; Stop 25
tctccttctcccttcttttacaaga

SEQ ID NO: 35677 - DNA, 25 bp, Artificial
  probe
  misc_feature (1)..(25): SEQ ID NO: 4648; WAN0249VP_at; Start 12; Stop 36
cttcttttacaagattgggctagag

SEQ ID NO: 35678 - DNA, 25 bp, Artificial
  probe
  misc_feature (1)..(25): SEQ ID NO: 4648; WAN0249VP_at; Start 24; Stop 48
gattgggctagagcttttcagctca

SEQ ID NO: 35679 - DNA, 25 bp, Artificial
  probe
  misc_feature (1)..(25): SEQ ID NO: 4648; WAN0249VP_at; Start 54; Stop 78
ccacctattttctagtcttttacat

SEQ ID NO: 35680 - DNA, 25 bp, Artificial
  probe
  misc_feature (1)..(25): SEQ ID NO: 4648; WAN0249VP_at; Start 26; Stop 50
ttgggctagagcttttcagctcact

SEQ ID NO: 35681 - DNA, 25 bp, Artificial
  probe
  misc_feature (1)..(25): SEQ ID NO: 4648; WAN0249VP_at; Start 4; Stop 28
ccttctcccttcttttacaagattg

SEQ ID NO: 35682 - DNA, 25 bp, Artificial
  probe
  misc_feature (1)..(25): SEQ ID NO: 4648; WAN0249VP_at; Start 23; Stop 47
agattgggctagagcttttcagctc

SEQ ID NO: 35683 - DNA, 25 bp, Artificial
  probe
  misc_feature (1)..(25): SEQ ID NO: 4648; WAN0249VP_at; Start 7; Stop 31
tctcccttcttttacaagattgggc

SEQ ID NO: 35684 - DNA, 25 bp, Artificial
  probe
  misc_feature (1)..(25): SEQ ID NO: 4648; WAN0249VP_at; Start 9; Stop 33
tcccttcttttacaagattgggcta

SEQ ID NO: 35685 - DNA, 25 bp, Artificial
  probe
  misc_feature (1)..(25): SEQ ID NO: 4648; WAN0249VP_at; Start 21; Stop 45
caagattgggctagagcttttcagc

SEQ ID NO: 35686 - DNA, 25 bp, Artificial
  probe
  misc_feature (1)..(25): SEQ ID NO: 4648; WAN0249VP_at; Start 22; Stop 46
aagattgggctagagcttttcagct

SEQ ID NO: 35687 - DNA, 25 bp, Artificial
  probe
  misc_feature (1)..(25): SEQ ID NO: 4648; WAN0249VP_at; Start 27; Stop 51
tgggctagagcttttcagctcacta

SEQ ID NO: 35688 - DNA, 25 bp, Artificial
  probe
  misc_feature (1)..(25): SEQ ID NO: 4648; WAN0249VP_at; Start 5; Stop 29
cttctcccttcttttacaagattgg

SEQ ID NO: 35689 - DNA, 25 bp, Artificial
  probe
  misc_feature (1)..(25): SEQ ID NO: 4648; WAN0249VP_at; Start 15; Stop 39
cttttacaagattgggctagagctt

SEQ ID NO: 35690 - DNA, 25 bp, Artificial
  probe
  misc_feature (1)..(25): SEQ ID NO: 4648; WAN0249VP_at; Start 13; Stop 37
ttcttttacaagattgggctagagc

SEQ ID NO: 35691 - DNA, 25 bp, Artificial
  probe
  misc_feature (1)..(25): SEQ ID NO: 4648; WAN0249VP_at; Start 16; Stop 40
ttttacaagattgggctagagcttt

SEQ ID NO: 35692 - DNA, 25 bp, Artificial
  probe
  misc_feature (1)..(25): SEQ ID NO: 4648; WAN0249VP_at; Start 2; Stop 26
ctccttctcccttcttttacaagat

SEQ ID NO: 35693 - DNA, 25 bp, Artificial
  probe
  misc_feature (1)..(25): SEQ ID NO: 4648; WAN0249VP_at; Start 18; Stop 42
ttacaagattgggctagagcttttc

SEQ ID NO: 35694 - DNA, 25 bp, Artificial
  probe
  misc_feature (1)..(25): SEQ ID NO: 4648; WAN0249VP_at; Start 8; Stop 32
ctcccttcttttacaagattgggct

SEQ ID NO: 35695 - DNA, 25 bp, Artificial
  probe
  misc_feature (1)..(25): SEQ ID NO: 4648; WAN0249VP_at; Start 11; Stop 35
ccttcttttacaagattgggctaga

SEQ ID NO: 35696 - DNA, 25 bp, Artificial
  probe
  misc_feature (1)..(25): SEQ ID NO: 4648; WAN0249VP_at; Start 20; Stop 44
acaagattgggctagagcttttcag

SEQ ID NO: 35697 - DNA, 25 bp, Artificial
  probe
  misc_feature (1)..(25): SEQ ID NO: 4648; WAN0249VP_at; Start 17; Stop 41
tttacaagattgggctagagctttt

SEQ ID NO: 35698 - DNA, 25 bp, Artificial
  probe
  misc_feature (1)..(25): SEQ ID NO: 4648; WAN0249VP_at; Start 10; Stop 34
cccttcttttacaagattgggctag

SEQ ID NO: 35699 - DNA, 25 bp, Artificial
  probe
  misc_feature (1)..(25): SEQ ID NO: 3180; WAN0249VQ_at; Start 43; Stop 67
aagtacttttagaggagctgtttga

SEQ ID NO: 35700 - DNA, 25 bp, Artificial
  probe
  misc_feature (1)..(25): SEQ ID NO: 3180; WAN0249VQ_at; Start 13; Stop 37
tcctatttataggtcgacttgctcc

SEQ ID NO: 35701 - DNA, 25 bp, Artificial
  probe
  misc_feature (1)..(25): SEQ ID NO: 3180; WAN0249VQ_at; Start 46; Stop 70
tacttttagaggagctgtttgactt

SEQ ID NO: 35702 - DNA, 25 bp, Artificial
  probe
  misc_feature (1)..(25): SEQ ID NO: 3180; WAN0249VQ_at; Start 9; Stop 33
attctcctatttataggtcgacttg

SEQ ID NO: 35703 - DNA, 25 bp, Artificial
  probe
  misc_feature (1)..(25): SEQ ID NO: 3180; WAN0249VQ_at; Start 19; Stop 43
ttataggtcgacttgctcctctgaa

SEQ ID NO: 35704 - DNA, 25 bp, Artificial
  probe
  misc_feature (1)..(25): SEQ ID NO: 3180; WAN0249VQ_at; Start 26; Stop 50
tcgacttgctcctctgaaagtactt

SEQ ID NO: 35705 - DNA, 25 bp, Artificial
  probe
  misc_feature (1)..(25): SEQ ID NO: 3180; WAN0249VQ_at; Start 22; Stop 46
taggtcgacttgctcctctgaaagt

SEQ ID NO: 35706 - DNA, 25 bp, Artificial
  probe
  misc_feature (1)..(25): SEQ ID NO: 3180; WAN0249VQ_at; Start 5; Stop 29
tggtattctcctatttataggtcga

SEQ ID NO: 35707 - DNA, 25 bp, Artificial
  probe
  misc_feature (1)..(25): SEQ ID NO: 3180; WAN0249VQ_at; Start 14; Stop 38
cctatttataggtcgacttgctcct

SEQ ID NO: 35708 - DNA, 25 bp, Artificial
  probe
  misc_feature (1)..(25): SEQ ID NO: 3180; WAN0249VQ_at; Start 28; Stop 52
gacttgctcctctgaaagtactttt

SEQ ID NO: 35709 - DNA, 25 bp, Artificial
  probe
  misc_feature (1)..(25): SEQ ID NO: 3180; WAN0249VQ_at; Start 15; Stop 39
ctatttataggtcgacttgctcctc

SEQ ID NO: 35710 - DNA, 25 bp, Artificial
  probe
  misc_feature (1)..(25): SEQ ID NO: 3180; WAN0249VQ_at; Start 27; Stop 51
cgacttgctcctctgaaagtacttt

SEQ ID NO: 35711 - DNA, 25 bp, Artificial
  probe
  misc_feature (1)..(25): SEQ ID NO: 3180; WAN0249VQ_at; Start 12; Stop 36
ctcctatttataggtcgacttgctc

SEQ ID NO: 35712 - DNA, 25 bp, Artificial
  probe
  misc_feature (1)..(25): SEQ ID NO: 3180; WAN0249VQ_at; Start 18; Stop 42
tttataggtcgacttgctcctctga

SEQ ID NO: 35713 - DNA, 25 bp, Artificial
  probe
  misc_feature (1)..(25): SEQ ID NO: 3180; WAN0249VQ_at; Start 7; Stop 31
gtattctcctatttataggtcgact

SEQ ID NO: 35714 - DNA, 25 bp, Artificial
  probe
  misc_feature (1)..(25): SEQ ID NO: 3180; WAN0249VQ_at; Start 21; Stop 45
ataggtcgacttgctcctctgaaag

SEQ ID NO: 35715 - DNA, 25 bp, Artificial
  probe
  misc_feature (1)..(25): SEQ ID NO: 3180; WAN0249VQ_at; Start 8; Stop 32
tattctcctatttataggtcgactt

SEQ ID NO: 35716 - DNA, 25 bp, Artificial
  probe
  misc_feature (1)..(25): SEQ ID NO: 3180; WAN0249VQ_at; Start 3; Stop 27
tttggtattctcctatttataggtc

SEQ ID NO: 35717 - DNA, 25 bp, Artificial
  probe
  misc_feature (1)..(25): SEQ ID NO: 3180; WAN0249VQ_at; Start 24; Stop 48
ggtcgacttgctcctctgaaagtac

SEQ ID NO: 35718 - DNA, 25 bp, Artificial
  probe
  misc_feature (1)..(25): SEQ ID NO: 3180; WAN0249VQ_at; Start 45; Stop 69
gtacttttagaggagctgtttgact

SEQ ID NO: 35719 - DNA, 25 bp, Artificial
  probe
  misc_feature (1)..(25): SEQ ID NO: 3180; WAN0249VQ_at; Start 1; Stop 25
attttggtattctcctatttatagg

SEQ ID NO: 35720 - DNA, 25 bp, Artificial
  probe
  misc_feature (1)..(25): SEQ ID NO: 3180; WAN0249VQ_at; Start 44; Stop 68
agtacttttagaggagctgtttgac

SEQ ID NO: 35721 - DNA, 25 bp, Artificial
  probe
  misc_feature (1)..(25): SEQ ID NO: 3180; WAN0249VQ_at; Start 40; Stop 64
tgaaagtacttttagaggagctgtt

SEQ ID NO: 35722 - DNA, 25 bp, Artificial
  probe
  misc_feature (1)..(25): SEQ ID NO: 3180; WAN0249VQ_at; Start 4; Stop 28
ttggtattctcctatttataggtcg

SEQ ID NO: 35723 - DNA, 25 bp, Artificial
  probe
  misc_feature (1)..(25): SEQ ID NO: 3180; WAN0249VQ_at; Start 23; Stop 47
aggtcgacttgctcctctgaaagta

SEQ ID NO: 35724 - DNA, 25 bp, Artificial
  probe
  misc_feature (1)..(25): SEQ ID NO: 3180; WAN0249VQ_at; Start 6; Stop 30
ggtattctcctatttataggtcgac

SEQ ID NO: 35725 - DNA, 25 bp, Artificial
  probe
  misc_feature (1)..(25): SEQ ID NO: 3180; WAN0249VQ_at; Start 11; Stop 35
tctcctatttataggtcgacttgct

SEQ ID NO: 35726 - DNA, 25 bp, Artificial
  probe
  misc_feature (1)..(25): SEQ ID NO: 3180; WAN0249VQ_at; Start 10; Stop 34
ttctcctatttataggtcgacttgc

SEQ ID NO: 35727 - DNA, 25 bp, Artificial
  probe
  misc_feature (1)..(25): SEQ ID NO: 3180; WAN0249VQ_at; Start 42; Stop 66
aaagtacttttagaggagctgtttg

SEQ ID NO: 35728 - DNA, 25 bp, Artificial
  probe
  misc_feature (1)..(25): SEQ ID NO: 3180; WAN0249VQ_at; Start 17; Stop 41
atttataggtcgacttgctcctctg

SEQ ID NO: 35729 - DNA, 25 bp, Artificial
  probe
  misc_feature (1)..(25): SEQ ID NO: 3180; WAN0249VQ_at; Start 20; Stop 44
tataggtcgacttgctcctctgaaa

SEQ ID NO: 35730 - DNA, 25 bp, Artificial
  probe
  misc_feature (1)..(25): SEQ ID NO: 3180; WAN0249VQ_at; Start 25; Stop 49
gtcgacttgctcctctgaaagtact

SEQ ID NO: 35731 - DNA, 25 bp, Artificial
  probe
  misc_feature (1)..(25): SEQ ID NO: 3180; WAN0249VQ_at; Start 16; Stop 40
tatttataggtcgacttgctcctct

SEQ ID NO: 35732 - DNA, 25 bp, Artificial
  probe
  misc_feature (1)..(25): SEQ ID NO: 113; WAN0249VR_at; Start 44; Stop 68
gagcaagtcgacctataaataggag

SEQ ID NO: 35733 - DNA, 25 bp, Artificial
  probe
  misc_feature (1)..(25): SEQ ID NO: 113; WAN0249VR_at; Start 11; Stop 35
agtcaaacagctcctctaaaagtac

SEQ ID NO: 35734 - DNA, 25 bp, Artificial
  probe
  misc_feature (1)..(25): SEQ ID NO: 113; WAN0249VR_at; Start 43; Stop 67
ggagcaagtcgacctataaatagga

SEQ ID NO: 35735 - DNA, 25 bp, Artificial
  probe
  misc_feature (1)..(25): SEQ ID NO: 113; WAN0249VR_at; Start 46; Stop 70
gcaagtcgacctataaataggagaa

SEQ ID NO: 35736 - DNA, 25 bp, Artificial
  probe
  misc_feature (1)..(25): SEQ ID NO: 113; WAN0249VR_at; Start 35; Stop 59
ctttcagaggagcaagtcgacctat

SEQ ID NO: 35737 - DNA, 25 bp, Artificial
  probe
  misc_feature (1)..(25): SEQ ID NO: 113; WAN0249VR_at; Start 49; Stop 73
agtcgacctataaataggagaatac

SEQ ID NO: 35738 - DNA, 25 bp, Artificial
  probe
  misc_feature (1)..(25): SEQ ID NO: 113; WAN0249VR_at; Start 14; Stop 38
caaacagctcctctaaaagtacttt

SEQ ID NO: 35739 - DNA, 25 bp, Artificial
  probe
  misc_feature (1)..(25): SEQ ID NO: 113; WAN0249VR_at; Start 38; Stop 62
tcagaggagcaagtcgacctataaa

SEQ ID NO: 35740 - DNA, 25 bp, Artificial
  probe
  misc_feature (1)..(25): SEQ ID NO: 113; WAN0249VR_at; Start 53; Stop 77
gacctataaataggagaataccaaa

SEQ ID NO: 35741 - DNA, 25 bp, Artificial
  probe
  misc_feature (1)..(25): SEQ ID NO: 113; WAN0249VR_at; Start 37; Stop 61
ttcagaggagcaagtcgacctataa

SEQ ID NO: 35742 - DNA, 25 bp, Artificial
  probe
  misc_feature (1)..(25): SEQ ID NO: 113; WAN0249VR_at; Start 28; Stop 52
aaaagtactttcagaggagcaagtc

SEQ ID NO: 35743 - DNA, 25 bp, Artificial
  probe
  misc_feature (1)..(25): SEQ ID NO: 113; WAN0249VR_at; Start 48; Stop 72
aagtcgacctataaataggagaata

SEQ ID NO: 35744 - DNA, 25 bp, Artificial
  probe
  misc_feature (1)..(25): SEQ ID NO: 113; WAN0249VR_at; Start 12; Stop 36
gtcaaacagctcctctaaaagtact

SEQ ID NO: 35745 - DNA, 25 bp, Artificial
  probe
  misc_feature (1)..(25): SEQ ID NO: 113; WAN0249VR_at; Start 47; Stop 71
caagtcgacctataaataggagaat

SEQ ID NO: 35746 - DNA, 25 bp, Artificial
  probe
  misc_feature (1)..(25): SEQ ID NO: 113; WAN0249VR_at; Start 34; Stop 58
actttcagaggagcaagtcgaccta

SEQ ID NO: 35747 - DNA, 25 bp, Artificial
  probe
  misc_feature (1)..(25): SEQ ID NO: 113; WAN0249VR_at; Start 16; Stop 40
aacagctcctctaaaagtactttca

SEQ ID NO: 35748 - DNA, 25 bp, Artificial
  probe
  misc_feature (1)..(25): SEQ ID NO: 113; WAN0249VR_at; Start 40; Stop 64
agaggagcaagtcgacctataaata

SEQ ID NO: 35749 - DNA, 25 bp, Artificial
  probe
  misc_feature (1)..(25): SEQ ID NO: 113; WAN0249VR_at; Start 45; Stop 69
agcaagtcgacctataaataggaga

SEQ ID NO: 35750 - DNA, 25 bp, Artificial
  probe
  misc_feature (1)..(25): SEQ ID NO: 113; WAN0249VR_at; Start 33; Stop 57
tactttcagaggagcaagtcgacct

SEQ ID NO: 35751 - DNA, 25 bp, Artificial
  probe
  misc_feature (1)..(25): SEQ ID NO: 113; WAN0249VR_at; Start 13; Stop 37
tcaaacagctcctctaaaagtactt

SEQ ID NO: 35752 - DNA, 25 bp, Artificial
  probe
  misc_feature (1)..(25): SEQ ID NO: 113; WAN0249VR_at; Start 32; Stop 56
gtactttcagaggagcaagtcgacc

SEQ ID NO: 35753 - DNA, 25 bp, Artificial
  probe
  misc_feature (1)..(25): SEQ ID NO: 113; WAN0249VR_at; Start 30; Stop 54
aagtactttcagaggagcaagtcga

SEQ ID NO: 35754 - DNA, 25 bp, Artificial
  probe
  misc_feature (1)..(25): SEQ ID NO: 113; WAN0249VR_at; Start 36; Stop 60
tttcagaggagcaagtcgacctata

SEQ ID NO: 35755 - DNA, 25 bp, Artificial
  probe
  misc_feature (1)..(25): SEQ ID NO: 113; WAN0249VR_at; Start 55; Stop 79
cctataaataggagaataccaaaat

SEQ ID NO: 35756 - DNA, 25 bp, Artificial
  probe
  misc_feature (1)..(25): SEQ ID NO: 113; WAN0249VR_at; Start 10; Stop 34
aagtcaaacagctcctctaaaagta

SEQ ID NO: 35757 - DNA, 25 bp, Artificial
  probe
  misc_feature (1)..(25): SEQ ID NO: 113; WAN0249VR_at; Start 41; Stop 65
gaggagcaagtcgacctataaatag

SEQ ID NO: 35758 - DNA, 25 bp, Artificial
  probe
  misc_feature (1)..(25): SEQ ID NO: 113; WAN0249VR_at; Start 31; Stop 55
agtactttcagaggagcaagtcgac

SEQ ID NO: 35759 - DNA, 25 bp, Artificial
  probe
  misc_feature (1)..(25): SEQ ID NO: 113; WAN0249VR_at; Start 42; Stop 66
aggagcaagtcgacctataaatagg

SEQ ID NO: 35760 - DNA, 25 bp, Artificial
  probe
  misc_feature (1)..(25): SEQ ID NO: 113; WAN0249VR_at; Start 51; Stop 75
tcgacctataaataggagaatacca

SEQ ID NO: 35761 - DNA, 25 bp, Artificial
  probe
  misc_feature (1)..(25): SEQ ID NO: 113; WAN0249VR_at; Start 39; Stop 63
cagaggagcaagtcgacctataaat

SEQ ID NO: 35762 - DNA, 25 bp, Artificial
  probe
  misc_feature (1)..(25): SEQ ID NO: 113; WAN0249VR_at; Start 29; Stop 53
aaagtactttcagaggagcaagtcg

SEQ ID NO: 35763 - DNA, 25 bp, Artificial
  probe
  misc_feature (1)..(25): SEQ ID NO: 113; WAN0249VR_at; Start 50; Stop 74
gtcgacctataaataggagaatacc

SEQ ID NO: 35764 - DNA, 25 bp, Artificial
  probe
  misc_feature (1)..(25): SEQ ID NO: 113; WAN0249VR_at; Start 52; Stop 76
cgacctataaataggagaataccaa

SEQ ID NO: 35765 - DNA, 25 bp, Artificial
  probe
  misc_feature (1)..(25): SEQ ID NO: 3794; WAN0249VS_at; Start 60; Stop 84
tcgcatacaagaaataaagaactca

SEQ ID NO: 35766 - DNA, 25 bp, Artificial
  probe
  misc_feature (1)..(25): SEQ ID NO: 3794; WAN0249VS_at; Start 14; Stop 38
taataaaaaacagaggagagtgatg

SEQ ID NO: 35767 - DNA, 25 bp, Artificial
  probe
  misc_feature (1)..(25): SEQ ID NO: 3794; WAN0249VS_at; Start 19; Stop 43
aaaaacagaggagagtgatggatga

SEQ ID NO: 35768 - DNA, 25 bp, Artificial
  probe
  misc_feature (1)..(25): SEQ ID NO: 3794; WAN0249VS_at; Start 41; Stop 65
tgagtaggatgaaatgaaatcgcat

SEQ ID NO: 35769 - DNA, 25 bp, Artificial
  probe
  misc_feature (1)..(25): SEQ ID NO: 3794; WAN0249VS_at; Start 45; Stop 69
taggatgaaatgaaatcgcatacaa

SEQ ID NO: 35770 - DNA, 25 bp, Artificial
  probe
  misc_feature (1)..(25): SEQ ID NO: 3794; WAN0249VS_at; Start 47; Stop 71
ggatgaaatgaaatcgcatacaaga

SEQ ID NO: 35771 - DNA, 25 bp, Artificial
  probe
  misc_feature (1)..(25): SEQ ID NO: 3794; WAN0249VS_at; Start 78; Stop 102
gaactcattatccaagttggatacg

SEQ ID NO: 35772 - DNA, 25 bp, Artificial
  probe
  misc_feature (1)..(25): SEQ ID NO: 3794; WAN0249VS_at; Start 57; Stop 81
aaatcgcatacaagaaataaagaac

SEQ ID NO: 35773 - DNA, 25 bp, Artificial
  probe
  misc_feature (1)..(25): SEQ ID NO: 3794; WAN0249VS_at; Start 12; Stop 36
cttaataaaaaacagaggagagtga

SEQ ID NO: 35774 - DNA, 25 bp, Artificial
  probe
  misc_feature (1)..(25): SEQ ID NO: 3794; WAN0249VS_at; Start 70; Stop 94
gaaataaagaactcattatccaagt

SEQ ID NO: 35775 - DNA, 25 bp, Artificial
  probe
  misc_feature (1)..(25): SEQ ID NO: 3794; WAN0249VS_at; Start 48; Stop 72
gatgaaatgaaatcgcatacaagaa

SEQ ID NO: 35776 - DNA, 25 bp, Artificial
  probe
  misc_feature (1)..(25): SEQ ID NO: 3794; WAN0249VS_at; Start 96; Stop 120
ggatacgcttattacataggagaat

SEQ ID NO: 35777 - DNA, 25 bp, Artificial
  probe
  misc_feature (1)..(25): SEQ ID NO: 3794; WAN0249VS_at; Start 88; Stop 112
tccaagttggatacgcttattacat

SEQ ID NO: 35778 - DNA, 25 bp, Artificial
  probe
  misc_feature (1)..(25): SEQ ID NO: 3794; WAN0249VS_at; Start 17; Stop 41
taaaaaacagaggagagtgatggat

SEQ ID NO: 35779 - DNA, 25 bp, Artificial
  probe
  misc_feature (1)..(25): SEQ ID NO: 3794; WAN0249VS_at; Start 61; Stop 85
cgcatacaagaaataaagaactcat

SEQ ID NO: 35780 - DNA, 25 bp, Artificial
  probe
  misc_feature (1)..(25): SEQ ID NO: 3794; WAN0249VS_at; Start 75; Stop 99
aaagaactcattatccaagttggat

SEQ ID NO: 35781 - DNA, 25 bp, Artificial
  probe
  misc_feature (1)..(25): SEQ ID NO: 3794; WAN0249VS_at; Start 63; Stop 87
catacaagaaataaagaactcatta

SEQ ID NO: 35782 - DNA, 25 bp, Artificial
  probe
  misc_feature (1)..(25): SEQ ID NO: 3794; WAN0249VS_at; Start 6; Stop 30
tactgacttaataaaaaacagagga

SEQ ID NO: 35783 - DNA, 25 bp, Artificial
  probe
  misc_feature (1)..(25): SEQ ID NO: 3794; WAN0249VS_at; Start 43; Stop 67
agtaggatgaaatgaaatcgcatac

SEQ ID NO: 35784 - DNA, 25 bp, Artificial
  probe
  misc_feature (1)..(25): SEQ ID NO: 3794; WAN0249VS_at; Start 97; Stop 121
gatacgcttattacataggagaata

SEQ ID NO: 35785 - DNA, 25 bp, Artificial
  probe
  misc_feature (1)..(25): SEQ ID NO: 3794; WAN0249VS_at; Start 55; Stop 79
tgaaatcgcatacaagaaataaaga

SEQ ID NO: 35786 - DNA, 25 bp, Artificial
  probe
  misc_feature (1)..(25): SEQ ID NO: 3794; WAN0249VS_at; Start 4; Stop 28
cttactgacttaataaaaaacagag

SEQ ID NO: 35787 - DNA, 25 bp, Artificial
  probe
  misc_feature (1)..(25): SEQ ID NO: 3794; WAN0249VS_at; Start 51; Stop 75
gaaatgaaatcgcatacaagaaata

SEQ ID NO: 35788 - DNA, 25 bp, Artificial
  probe
  misc_feature (1)..(25): SEQ ID NO: 3794; WAN0249VS_at; Start 95; Stop 119
tggatacgcttattacataggagaa

SEQ ID NO: 35789 - DNA, 25 bp, Artificial
  probe
  misc_feature (1)..(25): SEQ ID NO: 3794; WAN0249VS_at; Start 34; Stop 58
tgatggatgagtaggatgaaatgaa

SEQ ID NO: 35790 - DNA, 25 bp, Artificial
  probe
  misc_feature (1)..(25): SEQ ID NO: 3794; WAN0249VS_at; Start 89; Stop 113
ccaagttggatacgcttattacata

SEQ ID NO: 35791 - DNA, 25 bp, Artificial
  probe
  misc_feature (1)..(25): SEQ ID NO: 3794; WAN0249VS_at; Start 100; Stop 124
acgcttattacataggagaatacaa

SEQ ID NO: 35792 - DNA, 25 bp, Artificial
  probe
  misc_feature (1)..(25): SEQ ID NO: 3794; WAN0249VS_at; Start 99; Stop 123
tacgcttattacataggagaataca

SEQ ID NO: 35793 - DNA, 25 bp, Artificial
  probe
  misc_feature (1)..(25): SEQ ID NO: 3794; WAN0249VS_at; Start 9; Stop 33
tgacttaataaaaaacagaggagag

SEQ ID NO: 35794 - DNA, 25 bp, Artificial
  probe
  misc_feature (1)..(25): SEQ ID NO: 3794; WAN0249VS_at; Start 91; Stop 115
aagttggatacgcttattacatagg

SEQ ID NO: 35795 - DNA, 25 bp, Artificial
  probe
  misc_feature (1)..(25): SEQ ID NO: 3794; WAN0249VS_at; Start 93; Stop 117
gttggatacgcttattacataggag

SEQ ID NO: 35796 - DNA, 25 bp, Artificial
  probe
  misc_feature (1)..(25): SEQ ID NO: 3794; WAN0249VS_at; Start 39; Stop 63
gatgagtaggatgaaatgaaatcgc

SEQ ID NO: 35797 - DNA, 25 bp, Artificial
  probe
  misc_feature (1)..(25): SEQ ID NO: 3794; WAN0249VS_at; Start 82; Stop 106
tcattatccaagttggatacgctta

SEQ ID NO: 35798 - DNA, 25 bp, Artificial
  probe
  misc_feature (1)..(25): SEQ ID NO: 3794; WAN0249VS_at; Start 74; Stop 98
taaagaactcattatccaagttgga

SEQ ID NO: 35799 - DNA, 25 bp, Artificial
  probe
  misc_feature (1)..(25): SEQ ID NO: 5690; WAN0249VT_at; Start 4; Stop 28
tattctcctatgtaataagcgtatc

SEQ ID NO: 35800 - DNA, 25 bp, Artificial
  probe
  misc_feature (1)..(25): SEQ ID NO: 5690; WAN0249VT_at; Start 50; Stop 74
tatttcttgtatgcgatttcatttc

SEQ ID NO: 35801 - DNA, 25 bp, Artificial
  probe
  misc_feature (1)..(25): SEQ ID NO: 5690; WAN0249VT_at; Start 25; Stop 49
tatccaacttggataatgagttctt

SEQ ID NO: 35802 - DNA, 25 bp, Artificial
  probe
  misc_feature (1)..(25): SEQ ID NO: 5690; WAN0249VT_at; Start 23; Stop 47
cgtatccaacttggataatgagttc

SEQ ID NO: 35803 - DNA, 25 bp, Artificial
  probe
  misc_feature (1)..(25): SEQ ID NO: 5690; WAN0249VT_at; Start 62; Stop 86
gcgatttcatttcatcctactcatc

SEQ ID NO: 35804 - DNA, 25 bp, Artificial
  probe
  misc_feature (1)..(25): SEQ ID NO: 5690; WAN0249VT_at; Start 93; Stop 117
tctcctctgttttttattaagtcag

SEQ ID NO: 35805 - DNA, 25 bp, Artificial
  probe
  misc_feature (1)..(25): SEQ ID NO: 5690; WAN0249VT_at; Start 6; Stop 30
ttctcctatgtaataagcgtatcca

SEQ ID NO: 35806 - DNA, 25 bp, Artificial
  probe
  misc_feature (1)..(25): SEQ ID NO: 5690; WAN0249VT_at; Start 57; Stop 81
tgtatgcgatttcatttcatcctac

SEQ ID NO: 35807 - DNA, 25 bp, Artificial
  probe
  misc_feature (1)..(25): SEQ ID NO: 5690; WAN0249VT_at; Start 20; Stop 44
aagcgtatccaacttggataatgag

SEQ ID NO: 35808 - DNA, 25 bp, Artificial
  probe
  misc_feature (1)..(25): SEQ ID NO: 5690; WAN0249VT_at; Start 46; Stop 70
tctttatttcttgtatgcgatttca

SEQ ID NO: 35809 - DNA, 25 bp, Artificial
  probe
  misc_feature (1)..(25): SEQ ID NO: 5690; WAN0249VT_at; Start 84; Stop 108
atccatcactctcctctgtttttta

SEQ ID NO: 35810 - DNA, 25 bp, Artificial
  probe
  misc_feature (1)..(25): SEQ ID NO: 5690; WAN0249VT_at; Start 42; Stop 66
gagttctttatttcttgtatgcgat

SEQ ID NO: 35811 - DNA, 25 bp, Artificial
  probe
  misc_feature (1)..(25): SEQ ID NO: 5690; WAN0249VT_at; Start 16; Stop 40
taataagcgtatccaacttggataa

SEQ ID NO: 35812 - DNA, 25 bp, Artificial
  probe
  misc_feature (1)..(25): SEQ ID NO: 5690; WAN0249VT_at; Start 7; Stop 31
tctcctatgtaataagcgtatccaa

SEQ ID NO: 35813 - DNA, 25 bp, Artificial
  probe
  misc_feature (1)..(25): SEQ ID NO: 5690; WAN0249VT_at; Start 2; Stop 26
tgtattctcctatgtaataagcgta

SEQ ID NO: 35814 - DNA, 25 bp, Artificial
  probe
  misc_feature (1)..(25): SEQ ID NO: 5690; WAN0249VT_at; Start 28; Stop 52
ccaacttggataatgagttctttat

SEQ ID NO: 35815 - DNA, 25 bp, Artificial
  probe
  misc_feature (1)..(25): SEQ ID NO: 5690; WAN0249VT_at; Start 14; Stop 38
tgtaataagcgtatccaacttggat

SEQ ID NO: 35816 - DNA, 25 bp, Artificial
  probe
  misc_feature (1)..(25): SEQ ID NO: 5690; WAN0249VT_at; Start 8; Stop 32
ctcctatgtaataagcgtatccaac

SEQ ID NO: 35817 - DNA, 25 bp, Artificial
  probe
  misc_feature (1)..(25): SEQ ID NO: 5690; WAN0249VT_at; Start 64; Stop 88
gatttcatttcatcctactcatcca

SEQ ID NO: 35818 - DNA, 25 bp, Artificial
  probe
  misc_feature (1)..(25): SEQ ID NO: 5690; WAN0249VT_at; Start 27; Stop 51
tccaacttggataatgagttcttta

SEQ ID NO: 35819 - DNA, 25 bp, Artificial
  probe
  misc_feature (1)..(25): SEQ ID NO: 5690; WAN0249VT_at; Start 59; Stop 83
tatgcgatttcatttcatcctactc

SEQ ID NO: 35820 - DNA, 25 bp, Artificial
  probe
  misc_feature (1)..(25): SEQ ID NO: 5690; WAN0249VT_at; Start 82; Stop 106
tcatccatcactctcctctgttttt

SEQ ID NO: 35821 - DNA, 25 bp, Artificial
  probe
  misc_feature (1)..(25): SEQ ID NO: 5690; WAN0249VT_at; Start 54; Stop 78
tcttgtatgcgatttcatttcatcc

SEQ ID NO: 35822 - DNA, 25 bp, Artificial
  probe
  misc_feature (1)..(25): SEQ ID NO: 5690; WAN0249VT_at; Start 9; Stop 33
tcctatgtaataagcgtatccaact

SEQ ID NO: 35823 - DNA, 25 bp, Artificial
  probe
  misc_feature (1)..(25): SEQ ID NO: 5690; WAN0249VT_at; Start 10; Stop 34
cctatgtaataagcgtatccaactt

SEQ ID NO: 35824 - DNA, 25 bp, Artificial
  probe
  misc_feature (1)..(25): SEQ ID NO: 5690; WAN0249VT_at; Start 41; Stop 65
tgagttctttatttcttgtatgcga

SEQ ID NO: 35825 - DNA, 25 bp, Artificial
  probe
  misc_feature (1)..(25): SEQ ID NO: 5690; WAN0249VT_at; Start 67; Stop 91
ttcatttcatcctactcatccatca

SEQ ID NO: 35826 - DNA, 25 bp, Artificial
  probe
  misc_feature (1)..(25): SEQ ID NO: 5690; WAN0249VT_at; Start 97; Stop 121
ctctgttttttattaagtcagtaag

SEQ ID NO: 35827 - DNA, 25 bp, Artificial
  probe
  misc_feature (1)..(25): SEQ ID NO: 5690; WAN0249VT_at; Start 15; Stop 39
gtaataagcgtatccaacttggata

SEQ ID NO: 35828 - DNA, 25 bp, Artificial
  probe
  misc_feature (1)..(25): SEQ ID NO: 5690; WAN0249VT_at; Start 13; Stop 37
atgtaataagcgtatccaacttgga

SEQ ID NO: 35829 - DNA, 25 bp, Artificial
  probe
  misc_feature (1)..(25): SEQ ID NO: 5690; WAN0249VT_at; Start 89; Stop 113
tcactctcctctgttttttattaag

SEQ ID NO: 35830 - DNA, 25 bp, Artificial
  probe
  misc_feature (1)..(25): SEQ ID NO: 5690; WAN0249VT_at; Start 12; Stop 36
tatgtaataagcgtatccaacttgg

SEQ ID NO: 35831 - DNA, 25 bp, Artificial
  probe
  misc_feature (1)..(25): SEQ ID NO: 5690; WAN0249VT_at; Start 61; Stop 85
tgcgatttcatttcatcctactcat

SEQ ID NO: 35832 - DNA, 25 bp, Artificial
  probe
  misc_feature (1)..(25): SEQ ID NO: 5690; WAN0249VT_at; Start 19; Stop 43
taagcgtatccaacttggataatga

SEQ ID NO: 35833 - DNA, 25 bp, Artificial
  probe
  misc_feature (1)..(25): SEQ ID NO: 4625; WAN0249VU_at; Start 112; Stop 136
aactgtcacgaaattaaaatgaagt

SEQ ID NO: 35834 - DNA, 25 bp, Artificial
  probe
  misc_feature (1)..(25): SEQ ID NO: 4625; WAN0249VU_at; Start 101; Stop 125
aaaatgtaagaaactgtcacgaaat

SEQ ID NO: 35835 - DNA, 25 bp, Artificial
  probe
  misc_feature (1)..(25): SEQ ID NO: 4625; WAN0249VU_at; Start 110; Stop 134
gaaactgtcacgaaattaaaatgaa

SEQ ID NO: 35836 - DNA, 25 bp, Artificial
  probe
  misc_feature (1)..(25): SEQ ID NO: 4625; WAN0249VU_at; Start 54; Stop 78
cccttttccctctacacagatagtg

SEQ ID NO: 35837 - DNA, 25 bp, Artificial
  probe
  misc_feature (1)..(25): SEQ ID NO: 4625; WAN0249VU_at; Start 68; Stop 92
cacagatagtgtaagaaaagggggc

SEQ ID NO: 35838 - DNA, 25 bp, Artificial
  probe
  misc_feature (1)..(25): SEQ ID NO: 4625; WAN0249VU_at; Start 124; Stop 148
attaaaatgaagttcttacataagc

SEQ ID NO: 35839 - DNA, 25 bp, Artificial
  probe
  misc_feature (1)..(25): SEQ ID NO: 4625; WAN0249VU_at; Start 102; Stop 126
aaatgtaagaaactgtcacgaaatt

SEQ ID NO: 35840 - DNA, 25 bp, Artificial
  probe
  misc_feature (1)..(25): SEQ ID NO: 4625; WAN0249VU_at; Start 103; Stop 127
aatgtaagaaactgtcacgaaatta

SEQ ID NO: 35841 - DNA, 25 bp, Artificial
  probe
  misc_feature (1)..(25): SEQ ID NO: 4625; WAN0249VU_at; Start 99; Stop 123
ttaaaatgtaagaaactgtcacgaa

SEQ ID NO: 35842 - DNA, 25 bp, Artificial
  probe
  misc_feature (1)..(25): SEQ ID NO: 4625; WAN0249VU_at; Start 55; Stop 79
ccttttccctctacacagatagtgt

SEQ ID NO: 35843 - DNA, 25 bp, Artificial
  probe
  misc_feature (1)..(25): SEQ ID NO: 4625; WAN0249VU_at; Start 61; Stop 85
ccctctacacagatagtgtaagaaa

SEQ ID NO: 35844 - DNA, 25 bp, Artificial
  probe
  misc_feature (1)..(25): SEQ ID NO: 4625; WAN0249VU_at; Start 59; Stop 83
ttccctctacacagatagtgtaaga

SEQ ID NO: 35845 - DNA, 25 bp, Artificial
  probe
  misc_feature (1)..(25): SEQ ID NO: 4625; WAN0249VU_at; Start 120; Stop 144
cgaaattaaaatgaagttcttacat

SEQ ID NO: 35846 - DNA, 25 bp, Artificial
  probe
  misc_feature (1)..(25): SEQ ID NO: 4625; WAN0249VU_at; Start 60; Stop 84
tccctctacacagatagtgtaagaa

SEQ ID NO: 35847 - DNA, 25 bp, Artificial
  probe
  misc_feature (1)..(25): SEQ ID NO: 4625; WAN0249VU_at; Start 108; Stop 132
aagaaactgtcacgaaattaaaatg

SEQ ID NO: 35848 - DNA, 25 bp, Artificial
  probe
  misc_feature (1)..(25): SEQ ID NO: 4625; WAN0249VU_at; Start 57; Stop 81
ttttccctctacacagatagtgtaa

SEQ ID NO: 35849 - DNA, 25 bp, Artificial
  probe
  misc_feature (1)..(25): SEQ ID NO: 4625; WAN0249VU_at; Start 104; Stop 128
atgtaagaaactgtcacgaaattaa

SEQ ID NO: 35850 - DNA, 25 bp, Artificial
  probe
  misc_feature (1)..(25): SEQ ID NO: 4625; WAN0249VU_at; Start 100; Stop 124
taaaatgtaagaaactgtcacgaaa

SEQ ID NO: 35851 - DNA, 25 bp, Artificial
  probe
  misc_feature (1)..(25): SEQ ID NO: 4625; WAN0249VU_at; Start 64; Stop 88
tctacacagatagtgtaagaaaagg

SEQ ID NO: 35852 - DNA, 25 bp, Artificial
  probe
  misc_feature (1)..(25): SEQ ID NO: 4625; WAN0249VU_at; Start 70; Stop 94
cagatagtgtaagaaaagggggctt

SEQ ID NO: 35853 - DNA, 25 bp, Artificial
  probe
  misc_feature (1)..(25): SEQ ID NO: 4625; WAN0249VU_at; Start 109; Stop 133
agaaactgtcacgaaattaaaatga

SEQ ID NO: 35854 - DNA, 25 bp, Artificial
  probe
  misc_feature (1)..(25): SEQ ID NO: 4625; WAN0249VU_at; Start 115; Stop 139
tgtcacgaaattaaaatgaagttct

SEQ ID NO: 35855 - DNA, 25 bp, Artificial
  probe
  misc_feature (1)..(25): SEQ ID NO: 4625; WAN0249VU_at; Start 105; Stop 129
tgtaagaaactgtcacgaaattaaa

SEQ ID NO: 35856 - DNA, 25 bp, Artificial
  probe
  misc_feature (1)..(25): SEQ ID NO: 4625; WAN0249VU_at; Start 98; Stop 122
tttaaaatgtaagaaactgtcacga

SEQ ID NO: 35857 - DNA, 25 bp, Artificial
  probe
  misc_feature (1)..(25): SEQ ID NO: 4625; WAN0249VU_at; Start 62; Stop 86
cctctacacagatagtgtaagaaaa

SEQ ID NO: 35858 - DNA, 25 bp, Artificial
  probe
  misc_feature (1)..(25): SEQ ID NO: 4625; WAN0249VU_at; Start 96; Stop 120
tgtttaaaatgtaagaaactgtcac

SEQ ID NO: 35859 - DNA, 25 bp, Artificial
  probe
  misc_feature (1)..(25): SEQ ID NO: 4625; WAN0249VU_at; Start 63; Stop 87
ctctacacagatagtgtaagaaaag

SEQ ID NO: 35860 - DNA, 25 bp, Artificial
  probe
  misc_feature (1)..(25): SEQ ID NO: 4625; WAN0249VU_at; Start 65; Stop 89
ctacacagatagtgtaagaaaaggg

SEQ ID NO: 35861 - DNA, 25 bp, Artificial
  probe
  misc_feature (1)..(25): SEQ ID NO: 4625; WAN0249VU_at; Start 114; Stop 138
ctgtcacgaaattaaaatgaagttc

SEQ ID NO: 35862 - DNA, 25 bp, Artificial
  probe
  misc_feature (1)..(25): SEQ ID NO: 4625; WAN0249VU_at; Start 58; Stop 82
tttccctctacacagatagtgtaag

SEQ ID NO: 35863 - DNA, 25 bp, Artificial
  probe
  misc_feature (1)..(25): SEQ ID NO: 4625; WAN0249VU_at; Start 56; Stop 80
cttttccctctacacagatagtgta

SEQ ID NO: 35864 - DNA, 25 bp, Artificial
  probe
  misc_feature (1)..(25): SEQ ID NO: 4625; WAN0249VU_at; Start 117; Stop 141
tcacgaaattaaaatgaagttctta

SEQ ID NO: 35865 - DNA, 25 bp, Artificial
  probe
  misc_feature (1)..(25): SEQ ID NO: 4625; WAN0249VU_at; Start 113; Stop 137
actgtcacgaaattaaaatgaagtt

SEQ ID NO: 35866 - DNA, 25 bp, Artificial
  probe
  misc_feature (1)..(25): SEQ ID NO: 4625; WAN0249VU_at; Start 111; Stop 135
aaactgtcacgaaattaaaatgaag

SEQ ID NO: 35867 - DNA, 25 bp, Artificial
  probe
  misc_feature (1)..(25): SEQ ID NO: 3713; WAN0249VV_at; Start 10; Stop 34
agaacttcattttaatttcgtgaca

SEQ ID NO: 35868 - DNA, 25 bp, Artificial
  probe
  misc_feature (1)..(25): SEQ ID NO: 3713; WAN0249VV_at; Start 63; Stop 87
ttttcttacactatctgtgtagagg

SEQ ID NO: 35869 - DNA, 25 bp, Artificial
  probe
  misc_feature (1)..(25): SEQ ID NO: 3713; WAN0249VV_at; Start 68; Stop 92
ttacactatctgtgtagagggaaaa

SEQ ID NO: 35870 - DNA, 25 bp, Artificial
  probe
  misc_feature (1)..(25): SEQ ID NO: 3713; WAN0249VV_at; Start 20; Stop 44
tttaatttcgtgacagtttcttaca

SEQ ID NO: 35871 - DNA, 25 bp, Artificial
  probe
  misc_feature (1)..(25): SEQ ID NO: 3713; WAN0249VV_at; Start 71; Stop 95
cactatctgtgtagagggaaaaggg

SEQ ID NO: 35872 - DNA, 25 bp, Artificial
  probe
  misc_feature (1)..(25): SEQ ID NO: 3713; WAN0249VV_at; Start 22; Stop 46
taatttcgtgacagtttcttacatt

SEQ ID NO: 35873 - DNA, 25 bp, Artificial
  probe
  misc_feature (1)..(25): SEQ ID NO: 3713; WAN0249VV_at; Start 66; Stop 90
tcttacactatctgtgtagagggaa

SEQ ID NO: 35874 - DNA, 25 bp, Artificial
  probe
  misc_feature (1)..(25): SEQ ID NO: 3713; WAN0249VV_at; Start 61; Stop 85
ccttttcttacactatctgtgtaga

SEQ ID NO: 35875 - DNA, 25 bp, Artificial
  probe
  misc_feature (1)..(25): SEQ ID NO: 3713; WAN0249VV_at; Start 17; Stop 41
cattttaatttcgtgacagtttctt

SEQ ID NO: 35876 - DNA, 25 bp, Artificial
  probe
  misc_feature (1)..(25): SEQ ID NO: 3713; WAN0249VV_at; Start 55; Stop 79
aagcccccttttcttacactatctg

SEQ ID NO: 35877 - DNA, 25 bp, Artificial
  probe
  misc_feature (1)..(25): SEQ ID NO: 3713; WAN0249VV_at; Start 65; Stop 89
ttcttacactatctgtgtagaggga

SEQ ID NO: 35878 - DNA, 25 bp, Artificial
  probe
  misc_feature (1)..(25): SEQ ID NO: 3713; WAN0249VV_at; Start 25; Stop 49
tttcgtgacagtttcttacatttta

SEQ ID NO: 35879 - DNA, 25 bp, Artificial
  probe
  misc_feature (1)..(25): SEQ ID NO: 3713; WAN0249VV_at; Start 13; Stop 37
acttcattttaatttcgtgacagtt

SEQ ID NO: 35880 - DNA, 25 bp, Artificial
  probe
  misc_feature (1)..(25): SEQ ID NO: 3713; WAN0249VV_at; Start 12; Stop 36
aacttcattttaatttcgtgacagt

SEQ ID NO: 35881 - DNA, 25 bp, Artificial
  probe
  misc_feature (1)..(25): SEQ ID NO: 3713; WAN0249VV_at; Start 1; Stop 25
gcttatgtaagaacttcattttaat

SEQ ID NO: 35882 - DNA, 25 bp, Artificial
  probe
  misc_feature (1)..(25): SEQ ID NO: 3713; WAN0249VV_at; Start 26; Stop 50
ttcgtgacagtttcttacattttaa

SEQ ID NO: 35883 - DNA, 25 bp, Artificial
  probe
  misc_feature (1)..(25): SEQ ID NO: 3713; WAN0249VV_at; Start 59; Stop 83
ccccttttcttacactatctgtgta

SEQ ID NO: 35884 - DNA, 25 bp, Artificial
  probe
  misc_feature (1)..(25): SEQ ID NO: 3713; WAN0249VV_at; Start 70; Stop 94
acactatctgtgtagagggaaaagg

SEQ ID NO: 35885 - DNA, 25 bp, Artificial
  probe
  misc_feature (1)..(25): SEQ ID NO: 3713; WAN0249VV_at; Start 15; Stop 39
ttcattttaatttcgtgacagtttc

SEQ ID NO: 35886 - DNA, 25 bp, Artificial
  probe
  misc_feature (1)..(25): SEQ ID NO: 3713; WAN0249VV_at; Start 8; Stop 32
taagaacttcattttaatttcgtga

SEQ ID NO: 35887 - DNA, 25 bp, Artificial
  probe
  misc_feature (1)..(25): SEQ ID NO: 3713; WAN0249VV_at; Start 24; Stop 48
atttcgtgacagtttcttacatttt

SEQ ID NO: 35888 - DNA, 25 bp, Artificial
  probe
  misc_feature (1)..(25): SEQ ID NO: 3713; WAN0249VV_at; Start 67; Stop 91
cttacactatctgtgtagagggaaa

SEQ ID NO: 35889 - DNA, 25 bp, Artificial
  probe
  misc_feature (1)..(25): SEQ ID NO: 3713; WAN0249VV_at; Start 11; Stop 35
gaacttcattttaatttcgtgacag

SEQ ID NO: 35890 - DNA, 25 bp, Artificial
  probe
  misc_feature (1)..(25): SEQ ID NO: 3713; WAN0249VV_at; Start 27; Stop 51
tcgtgacagtttcttacattttaaa

SEQ ID NO: 35891 - DNA, 25 bp, Artificial
  probe
  misc_feature (1)..(25): SEQ ID NO: 3713; WAN0249VV_at; Start 69; Stop 93
tacactatctgtgtagagggaaaag

SEQ ID NO: 35892 - DNA, 25 bp, Artificial
  probe
  misc_feature (1)..(25): SEQ ID NO: 3713; WAN0249VV_at; Start 29; Stop 53
gtgacagtttcttacattttaaaca

SEQ ID NO: 35893 - DNA, 25 bp, Artificial
  probe
  misc_feature (1)..(25): SEQ ID NO: 3713; WAN0249VV_at; Start 16; Stop 40
tcattttaatttcgtgacagtttct

SEQ ID NO: 35894 - DNA, 25 bp, Artificial
  probe
  misc_feature (1)..(25): SEQ ID NO: 3713; WAN0249VV_at; Start 30; Stop 54
tgacagtttcttacattttaaacaa

SEQ ID NO: 35895 - DNA, 25 bp, Artificial
  probe
  misc_feature (1)..(25): SEQ ID NO: 3713; WAN0249VV_at; Start 57; Stop 81
gcccccttttcttacactatctgtg

SEQ ID NO: 35896 - DNA, 25 bp, Artificial
  probe
  misc_feature (1)..(25): SEQ ID NO: 3713; WAN0249VV_at; Start 62; Stop 86
cttttcttacactatctgtgtagag

SEQ ID NO: 35897 - DNA, 25 bp, Artificial
  probe
  misc_feature (1)..(25): SEQ ID NO: 3713; WAN0249VV_at; Start 60; Stop 84
cccttttcttacactatctgtgtag

SEQ ID NO: 35898 - DNA, 25 bp, Artificial
  probe
  misc_feature (1)..(25): SEQ ID NO: 3713; WAN0249VV_at; Start 23; Stop 47
aatttcgtgacagtttcttacattt

SEQ ID NO: 35899 - DNA, 25 bp, Artificial
  probe
  misc_feature (1)..(25): SEQ ID NO: 3713; WAN0249VV_at; Start 21; Stop 45
ttaatttcgtgacagtttcttacat

SEQ ID NO: 35900 - DNA, 25 bp, Artificial
  probe
  misc_feature (1)..(25): SEQ ID NO: 3713; WAN0249VV_at; Start 64; Stop 88
tttcttacactatctgtgtagaggg

SEQ ID NO: 35901 - DNA, 25 bp, Artificial
  probe
  misc_feature (1)..(25): SEQ ID NO: 286; WAN0249VW_at; Start 39; Stop 63
tatgttagcttggacagtgcttgca

SEQ ID NO: 35902 - DNA, 25 bp, Artificial
  probe
  misc_feature (1)..(25): SEQ ID NO: 286; WAN0249VW_at; Start 104; Stop 128
cttggagtactattttaattgcttc

SEQ ID NO: 35903 - DNA, 25 bp, Artificial
  probe
  misc_feature (1)..(25): SEQ ID NO: 286; WAN0249VW_at; Start 31; Stop 55
ttattgaatatgttagcttggacag

SEQ ID NO: 35904 - DNA, 25 bp, Artificial
  probe
  misc_feature (1)..(25): SEQ ID NO: 286; WAN0249VW_at; Start 38; Stop 62
atatgttagcttggacagtgcttgc

SEQ ID NO: 35905 - DNA, 25 bp, Artificial
  probe
  misc_feature (1)..(25): SEQ ID NO: 286; WAN0249VW_at; Start 2; Stop 26
atgcgagaatgaaagcactttgtat

SEQ ID NO: 35906 - DNA, 25 bp, Artificial
  probe
  misc_feature (1)..(25): SEQ ID NO: 286; WAN0249VW_at; Start 32; Stop 56
tattgaatatgttagcttggacagt

SEQ ID NO: 35907 - DNA, 25 bp, Artificial
  probe
  misc_feature (1)..(25): SEQ ID NO: 286; WAN0249VW_at; Start 29; Stop 53
ttttattgaatatgttagcttggac

SEQ ID NO: 35908 - DNA, 25 bp, Artificial
  probe
  misc_feature (1)..(25): SEQ ID NO: 286; WAN0249VW_at; Start 106; Stop 130
tggagtactattttaattgcttcgc

SEQ ID NO: 35909 - DNA, 25 bp, Artificial
  probe
  misc_feature (1)..(25): SEQ ID NO: 286; WAN0249VW_at; Start 30; Stop 54
tttattgaatatgttagcttggaca

SEQ ID NO: 35910 - DNA, 25 bp, Artificial
  probe
  misc_feature (1)..(25): SEQ ID NO: 286; WAN0249VW_at; Start 37; Stop 61
aatatgttagcttggacagtgcttg

SEQ ID NO: 35911 - DNA, 25 bp, Artificial
  probe
  misc_feature (1)..(25): SEQ ID NO: 286; WAN0249VW_at; Start 40; Stop 64
atgttagcttggacagtgcttgcaa

SEQ ID NO: 35912 - DNA, 25 bp, Artificial
  probe
  misc_feature (1)..(25): SEQ ID NO: 286; WAN0249VW_at; Start 3; Stop 27
tgcgagaatgaaagcactttgtatt

SEQ ID NO: 35913 - DNA, 25 bp, Artificial
  probe
  misc_feature (1)..(25): SEQ ID NO: 286; WAN0249VW_at; Start 102; Stop 126
tacttggagtactattttaattgct

SEQ ID NO: 35914 - DNA, 25 bp, Artificial
  probe
  misc_feature (1)..(25): SEQ ID NO: 286; WAN0249VW_at; Start 109; Stop 133
agtactattttaattgcttcgctgt

SEQ ID NO: 35915 - DNA, 25 bp, Artificial
  probe
  misc_feature (1)..(25): SEQ ID NO: 286; WAN0249VW_at; Start 7; Stop 31
agaatgaaagcactttgtatttttt

SEQ ID NO: 35916 - DNA, 25 bp, Artificial
  probe
  misc_feature (1)..(25): SEQ ID NO: 286; WAN0249VW_at; Start 41; Stop 65
tgttagcttggacagtgcttgcaat

SEQ ID NO: 35917 - DNA, 25 bp, Artificial
  probe
  misc_feature (1)..(25): SEQ ID NO: 286; WAN0249VW_at; Start 1; Stop 25
aatgcgagaatgaaagcactttgta

SEQ ID NO: 35918 - DNA, 25 bp, Artificial
  probe
  misc_feature (1)..(25): SEQ ID NO: 286; WAN0249VW_at; Start 45; Stop 69
agcttggacagtgcttgcaatgata

SEQ ID NO: 35919 - DNA, 25 bp, Artificial
  probe
  misc_feature (1)..(25): SEQ ID NO: 286; WAN0249VW_at; Start 44; Stop 68
tagcttggacagtgcttgcaatgat

SEQ ID NO: 35920 - DNA, 25 bp, Artificial
  probe
  misc_feature (1)..(25): SEQ ID NO: 286; WAN0249VW_at; Start 101; Stop 125
atacttggagtactattttaattgc

SEQ ID NO: 35921 - DNA, 25 bp, Artificial
  probe
  misc_feature (1)..(25): SEQ ID NO: 286; WAN0249VW_at; Start 4; Stop 28
gcgagaatgaaagcactttgtattt

SEQ ID NO: 35922 - DNA, 25 bp, Artificial
  probe
  misc_feature (1)..(25): SEQ ID NO: 286; WAN0249VW_at; Start 43; Stop 67
ttagcttggacagtgcttgcaatga

SEQ ID NO: 35923 - DNA, 25 bp, Artificial
  probe
  misc_feature (1)..(25): SEQ ID NO: 286; WAN0249VW_at; Start 5; Stop 29
cgagaatgaaagcactttgtatttt

SEQ ID NO: 35924 - DNA, 25 bp, Artificial
  probe
  misc_feature (1)..(25): SEQ ID NO: 286; WAN0249VW_at; Start 107; Stop 131
ggagtactattttaattgcttcgct

SEQ ID NO: 35925 - DNA, 25 bp, Artificial
  probe
  misc_feature (1)..(25): SEQ ID NO: 286; WAN0249VW_at; Start 35; Stop 59
tgaatatgttagcttggacagtgct

SEQ ID NO: 35926 - DNA, 25 bp, Artificial
  probe
  misc_feature (1)..(25): SEQ ID NO: 286; WAN0249VW_at; Start 36; Stop 60
gaatatgttagcttggacagtgctt

SEQ ID NO: 35927 - DNA, 25 bp, Artificial
  probe
  misc_feature (1)..(25): SEQ ID NO: 286; WAN0249VW_at; Start 42; Stop 66
gttagcttggacagtgcttgcaatg

SEQ ID NO: 35928 - DNA, 25 bp, Artificial
  probe
  misc_feature (1)..(25): SEQ ID NO: 286; WAN0249VW_at; Start 108; Stop 132
gagtactattttaattgcttcgctg

SEQ ID NO: 35929 - DNA, 25 bp, Artificial
  probe
  misc_feature (1)..(25): SEQ ID NO: 286; WAN0249VW_at; Start 6; Stop 30
gagaatgaaagcactttgtattttt

SEQ ID NO: 35930 - DNA, 25 bp, Artificial
  probe
  misc_feature (1)..(25): SEQ ID NO: 286; WAN0249VW_at; Start 100; Stop 124
catacttggagtactattttaattg

SEQ ID NO: 35931 - DNA, 25 bp, Artificial
  probe
  misc_feature (1)..(25): SEQ ID NO: 286; WAN0249VW_at; Start 34; Stop 58
ttgaatatgttagcttggacagtgc

SEQ ID NO: 35932 - DNA, 25 bp, Artificial
  probe
  misc_feature (1)..(25): SEQ ID NO: 286; WAN0249VW_at; Start 99; Stop 123
gcatacttggagtactattttaatt

SEQ ID NO: 35933 - DNA, 25 bp, Artificial
  probe
  misc_feature (1)..(25): SEQ ID NO: 286; WAN0249VW_at; Start 105; Stop 129
ttggagtactattttaattgcttcg

SEQ ID NO: 35934 - DNA, 25 bp, Artificial
  probe
  misc_feature (1)..(25): SEQ ID NO: 286; WAN0249VW_at; Start 33; Stop 57
attgaatatgttagcttggacagtg

SEQ ID NO: 35935 - DNA, 25 bp, Artificial
  probe
  misc_feature (1)..(25): SEQ ID NO: 591; WAN0249VX_at; Start 81; Stop 105
agcaattaaaatagtactccaagta

SEQ ID NO: 35936 - DNA, 25 bp, Artificial
  probe
  misc_feature (1)..(25): SEQ ID NO: 591; WAN0249VX_at; Start 146; Stop 170
caagcactgtccaagctaacatatt

SEQ ID NO: 35937 - DNA, 25 bp, Artificial
  probe
  misc_feature (1)..(25): SEQ ID NO: 591; WAN0249VX_at; Start 167; Stop 191
tattcaataaaaaaatacaaagtgc

SEQ ID NO: 35938 - DNA, 25 bp, Artificial
  probe
  misc_feature (1)..(25): SEQ ID NO: 591; WAN0249VX_at; Start 144; Stop 168
tgcaagcactgtccaagctaacata

SEQ ID NO: 35939 - DNA, 25 bp, Artificial
  probe
  misc_feature (1)..(25): SEQ ID NO: 591; WAN0249VX_at; Start 145; Stop 169
gcaagcactgtccaagctaacatat

SEQ ID NO: 35940 - DNA, 25 bp, Artificial
  probe
  misc_feature (1)..(25): SEQ ID NO: 591; WAN0249VX_at; Start 141; Stop 165
cattgcaagcactgtccaagctaac

SEQ ID NO: 35941 - DNA, 25 bp, Artificial
  probe
  misc_feature (1)..(25): SEQ ID NO: 591; WAN0249VX_at; Start 156; Stop 180
ccaagctaacatattcaataaaaaa

SEQ ID NO: 35942 - DNA, 25 bp, Artificial
  probe
  misc_feature (1)..(25): SEQ ID NO: 591; WAN0249VX_at; Start 147; Stop 171
aagcactgtccaagctaacatattc

SEQ ID NO: 35943 - DNA, 25 bp, Artificial
  probe
  misc_feature (1)..(25): SEQ ID NO: 591; WAN0249VX_at; Start 84; Stop 108
aattaaaatagtactccaagtatgc

SEQ ID NO: 35944 - DNA, 25 bp, Artificial
  probe
  misc_feature (1)..(25): SEQ ID NO: 591; WAN0249VX_at; Start 150; Stop 174
cactgtccaagctaacatattcaat

SEQ ID NO: 35945 - DNA, 25 bp, Artificial
  probe
  misc_feature (1)..(25): SEQ ID NO: 591; WAN0249VX_at; Start 83; Stop 107
caattaaaatagtactccaagtatg

SEQ ID NO: 35946 - DNA, 25 bp, Artificial
  probe
  misc_feature (1)..(25): SEQ ID NO: 591; WAN0249VX_at; Start 82; Stop 106
gcaattaaaatagtactccaagtat

SEQ ID NO: 35947 - DNA, 25 bp, Artificial
  probe
  misc_feature (1)..(25): SEQ ID NO: 591; WAN0249VX_at; Start 152; Stop 176
ctgtccaagctaacatattcaataa

SEQ ID NO: 35948 - DNA, 25 bp, Artificial
  probe
  misc_feature (1)..(25): SEQ ID NO: 591; WAN0249VX_at; Start 75; Stop 99
cagcgaagcaattaaaatagtactc

SEQ ID NO: 35949 - DNA, 25 bp, Artificial
  probe
  misc_feature (1)..(25): SEQ ID NO: 591; WAN0249VX_at; Start 153; Stop 177
tgtccaagctaacatattcaataaa

SEQ ID NO: 35950 - DNA, 25 bp, Artificial
  probe
  misc_feature (1)..(25): SEQ ID NO: 591; WAN0249VX_at; Start 151; Stop 175
actgtccaagctaacatattcaata

SEQ ID NO: 35951 - DNA, 25 bp, Artificial
  probe
  misc_feature (1)..(25): SEQ ID NO: 591; WAN0249VX_at; Start 140; Stop 164
tcattgcaagcactgtccaagctaa

SEQ ID NO: 35952 - DNA, 25 bp, Artificial
  probe
  misc_feature (1)..(25): SEQ ID NO: 591; WAN0249VX_at; Start 154; Stop 178
gtccaagctaacatattcaataaaa

SEQ ID NO: 35953 - DNA, 25 bp, Artificial
  probe
  misc_feature (1)..(25): SEQ ID NO: 591; WAN0249VX_at; Start 142; Stop 166
attgcaagcactgtccaagctaaca

SEQ ID NO: 35954 - DNA, 25 bp, Artificial
  probe
  misc_feature (1)..(25): SEQ ID NO: 591; WAN0249VX_at; Start 77; Stop 101
gcgaagcaattaaaatagtactcca

SEQ ID NO: 35955 - DNA, 25 bp, Artificial
  probe
  misc_feature (1)..(25): SEQ ID NO: 591; WAN0249VX_at; Start 138; Stop 162
tatcattgcaagcactgtccaagct

SEQ ID NO: 35956 - DNA, 25 bp, Artificial
  probe
  misc_feature (1)..(25): SEQ ID NO: 591; WAN0249VX_at; Start 148; Stop 172
agcactgtccaagctaacatattca

SEQ ID NO: 35957 - DNA, 25 bp, Artificial
  probe
  misc_feature (1)..(25): SEQ ID NO: 591; WAN0249VX_at; Start 182; Stop 206
tacaaagtgctttcattctcgcatt

SEQ ID NO: 35958 - DNA, 25 bp, Artificial
  probe
  misc_feature (1)..(25): SEQ ID NO: 591; WAN0249VX_at; Start 143; Stop 167
ttgcaagcactgtccaagctaacat

SEQ ID NO: 35959 - DNA, 25 bp, Artificial
  probe
  misc_feature (1)..(25): SEQ ID NO: 591; WAN0249VX_at; Start 179; Stop 203
aaatacaaagtgctttcattctcgc

SEQ ID NO: 35960 - DNA, 25 bp, Artificial
  probe
  misc_feature (1)..(25): SEQ ID NO: 591; WAN0249VX_at; Start 76; Stop 100
agcgaagcaattaaaatagtactcc

SEQ ID NO: 35961 - DNA, 25 bp, Artificial
  probe
  misc_feature (1)..(25): SEQ ID NO: 591; WAN0249VX_at; Start 78; Stop 102
cgaagcaattaaaatagtactccaa

SEQ ID NO: 35962 - DNA, 25 bp, Artificial
  probe
  misc_feature (1)..(25): SEQ ID NO: 591; WAN0249VX_at; Start 155; Stop 179
tccaagctaacatattcaataaaaa

SEQ ID NO: 35963 - DNA, 25 bp, Artificial
  probe
  misc_feature (1)..(25): SEQ ID NO: 591; WAN0249VX_at; Start 139; Stop 163
atcattgcaagcactgtccaagcta

SEQ ID NO: 35964 - DNA, 25 bp, Artificial
  probe
  misc_feature (1)..(25): SEQ ID NO: 591; WAN0249VX_at; Start 180; Stop 204
aatacaaagtgctttcattctcgca

SEQ ID NO: 35965 - DNA, 25 bp, Artificial
  probe
  misc_feature (1)..(25): SEQ ID NO: 591; WAN0249VX_at; Start 80; Stop 104
aagcaattaaaatagtactccaagt

SEQ ID NO: 35966 - DNA, 25 bp, Artificial
  probe
  misc_feature (1)..(25): SEQ ID NO: 591; WAN0249VX_at; Start 149; Stop 173
gcactgtccaagctaacatattcaa

SEQ ID NO: 35967 - DNA, 25 bp, Artificial
  probe
  misc_feature (1)..(25): SEQ ID NO: 591; WAN0249VX_at; Start 178; Stop 202
aaaatacaaagtgctttcattctcg

SEQ ID NO: 35968 - DNA, 25 bp, Artificial
  probe
  misc_feature (1)..(25): SEQ ID NO: 591; WAN0249VX_at; Start 79; Stop 103
gaagcaattaaaatagtactccaag

SEQ ID NO: 35969 - DNA, 25 bp, Artificial
  probe
  misc_feature (1)..(25): SEQ ID NO: 3803; WAN0249VY_at; Start 89; Stop 113
tataagatattgaaagccttttcgg

SEQ ID NO: 35970 - DNA, 25 bp, Artificial
  probe
  misc_feature (1)..(25): SEQ ID NO: 3803; WAN0249VY_at; Start 87; Stop 111
tctataagatattgaaagccttttc

SEQ ID NO: 35971 - DNA, 25 bp, Artificial
  probe
  misc_feature (1)..(25): SEQ ID NO: 3803; WAN0249VY_at; Start 33; Stop 57
tactttcaaaggctccaaacgctat

SEQ ID NO: 35972 - DNA, 25 bp, Artificial
  probe
  misc_feature (1)..(25): SEQ ID NO: 3803; WAN0249VY_at; Start 48; Stop 72
caaacgctattctataagcgagaaa

SEQ ID NO: 35973 - DNA, 25 bp, Artificial
  probe
  misc_feature (1)..(25): SEQ ID NO: 3803; WAN0249VY_at; Start 40; Stop 64
aaaggctccaaacgctattctataa

SEQ ID NO: 35974 - DNA, 25 bp, Artificial
  probe
  misc_feature (1)..(25): SEQ ID NO: 3803; WAN0249VY_at; Start 36; Stop 60
tttcaaaggctccaaacgctattct

SEQ ID NO: 35975 - DNA, 25 bp, Artificial
  probe
  misc_feature (1)..(25): SEQ ID NO: 3803; WAN0249VY_at; Start 38; Stop 62
tcaaaggctccaaacgctattctat

SEQ ID NO: 35976 - DNA, 25 bp, Artificial
  probe
  misc_feature (1)..(25): SEQ ID NO: 3803; WAN0249VY_at; Start 82; Stop 106
aagtgtctataagatattgaaagcc

SEQ ID NO: 35977 - DNA, 25 bp, Artificial
  probe
  misc_feature (1)..(25): SEQ ID NO: 3803; WAN0249VY_at; Start 35; Stop 59
ctttcaaaggctccaaacgctattc

SEQ ID NO: 35978 - DNA, 25 bp, Artificial
  probe
  misc_feature (1)..(25): SEQ ID NO: 3803; WAN0249VY_at; Start 27; Stop 51
tgaaactactttcaaaggctccaaa

SEQ ID NO: 35979 - DNA, 25 bp, Artificial
  probe
  misc_feature (1)..(25): SEQ ID NO: 3803; WAN0249VY_at; Start 52; Stop 76
cgctattctataagcgagaaactaa

SEQ ID NO: 35980 - DNA, 25 bp, Artificial
  probe
  misc_feature (1)..(25): SEQ ID NO: 3803; WAN0249VY_at; Start 50; Stop 74
aacgctattctataagcgagaaact

SEQ ID NO: 35981 - DNA, 25 bp, Artificial
  probe
  misc_feature (1)..(25): SEQ ID NO: 3803; WAN0249VY_at; Start 84; Stop 108
gtgtctataagatattgaaagcctt

SEQ ID NO: 35982 - DNA, 25 bp, Artificial
  probe
  misc_feature (1)..(25): SEQ ID NO: 3803; WAN0249VY_at; Start 130; Stop 154
gaagtaaagaaaaatctgctttagc

SEQ ID NO: 35983 - DNA, 25 bp, Artificial
  probe
  misc_feature (1)..(25): SEQ ID NO: 3803; WAN0249VY_at; Start 44; Stop 68
gctccaaacgctattctataagcga

SEQ ID NO: 35984 - DNA, 25 bp, Artificial
  probe
  misc_feature (1)..(25): SEQ ID NO: 3803; WAN0249VY_at; Start 46; Stop 70
tccaaacgctattctataagcgaga

SEQ ID NO: 35985 - DNA, 25 bp, Artificial
  probe
  misc_feature (1)..(25): SEQ ID NO: 3803; WAN0249VY_at; Start 144; Stop 168
tctgctttagcagaaaataaaaata

SEQ ID NO: 35986 - DNA, 25 bp, Artificial
  probe
  misc_feature (1)..(25): SEQ ID NO: 3803; WAN0249VY_at; Start 138; Stop 162
gaaaaatctgctttagcagaaaata

SEQ ID NO: 35987 - DNA, 25 bp, Artificial
  probe
  misc_feature (1)..(25): SEQ ID NO: 3803; WAN0249VY_at; Start 125; Stop 149
ctaaagaagtaaagaaaaatctgct

SEQ ID NO: 35988 - DNA, 25 bp, Artificial
  probe
  misc_feature (1)..(25): SEQ ID NO: 3803; WAN0249VY_at; Start 151; Stop 175
tagcagaaaataaaaataataggag

SEQ ID NO: 35989 - DNA, 25 bp, Artificial
  probe
  misc_feature (1)..(25): SEQ ID NO: 3803; WAN0249VY_at; Start 37; Stop 61
ttcaaaggctccaaacgctattcta

SEQ ID NO: 35990 - DNA, 25 bp, Artificial
  probe
  misc_feature (1)..(25): SEQ ID NO: 3803; WAN0249VY_at; Start 60; Stop 84
tataagcgagaaactaaaatctaag

SEQ ID NO: 35991 - DNA, 25 bp, Artificial
  probe
  misc_feature (1)..(25): SEQ ID NO: 3803; WAN0249VY_at; Start 91; Stop 115
taagatattgaaagccttttcggta

SEQ ID NO: 35992 - DNA, 25 bp, Artificial
  probe
  misc_feature (1)..(25): SEQ ID NO: 3803; WAN0249VY_at; Start 134; Stop 158
taaagaaaaatctgctttagcagaa

SEQ ID NO: 35993 - DNA, 25 bp, Artificial
  probe
  misc_feature (1)..(25): SEQ ID NO: 3803; WAN0249VY_at; Start 69; Stop 93
gaaactaaaatctaagtgtctataa

SEQ ID NO: 35994 - DNA, 25 bp, Artificial
  probe
  misc_feature (1)..(25): SEQ ID NO: 3803; WAN0249VY_at; Start 58; Stop 82
tctataagcgagaaactaaaatcta

SEQ ID NO: 35995 - DNA, 25 bp, Artificial
  probe
  misc_feature (1)..(25): SEQ ID NO: 3803; WAN0249VY_at; Start 66; Stop 90
cgagaaactaaaatctaagtgtcta

SEQ ID NO: 35996 - DNA, 25 bp, Artificial
  probe
  misc_feature (1)..(25): SEQ ID NO: 3803; WAN0249VY_at; Start 64; Stop 88
agcgagaaactaaaatctaagtgtc

SEQ ID NO: 35997 - DNA, 25 bp, Artificial
  probe
  misc_feature (1)..(25): SEQ ID NO: 3803; WAN0249VY_at; Start 53; Stop 77
gctattctataagcgagaaactaaa

SEQ ID NO: 35998 - DNA, 25 bp, Artificial
  probe
  misc_feature (1)..(25): SEQ ID NO: 3803; WAN0249VY_at; Start 153; Stop 177
gcagaaaataaaaataataggagaa

SEQ ID NO: 35999 - DNA, 25 bp, Artificial
  probe
  misc_feature (1)..(25): SEQ ID NO: 3803; WAN0249VY_at; Start 43; Stop 67
ggctccaaacgctattctataagcg

SEQ ID NO: 36000 - DNA, 25 bp, Artificial
  probe
  misc_feature (1)..(25): SEQ ID NO: 3803; WAN0249VY_at; Start 39; Stop 63
caaaggctccaaacgctattctata

SEQ ID NO: 36001 - DNA, 25 bp, Artificial
  probe
  misc_feature (1)..(25): SEQ ID NO: 3803; WAN0249VY_at; Start 31; Stop 55
actactttcaaaggctccaaacgct

SEQ ID NO: 36002 - DNA, 25 bp, Artificial
  probe
  misc_feature (1)..(25): SEQ ID NO: 3803; WAN0249VY_at; Start 62; Stop 86
taagcgagaaactaaaatctaagtg

SEQ ID NO: 36003 - DNA, 25 bp, Artificial
  probe
  misc_feature (1)..(25): SEQ ID NO: 439; WAN0249VZ_at; Start 93; Stop 117
tagacacttagattttagtttctcg

SEQ ID NO: 36004 - DNA, 25 bp, Artificial
  probe
  misc_feature (1)..(25): SEQ ID NO: 439; WAN0249VZ_at; Start 107; Stop 131
ttagtttctcgcttatagaatagcg

SEQ ID NO: 36005 - DNA, 25 bp, Artificial
  probe
  misc_feature (1)..(25): SEQ ID NO: 439; WAN0249VZ_at; Start 124; Stop 148
gaatagcgtttggagcctttgaaag

SEQ ID NO: 36006 - DNA, 25 bp, Artificial
  probe
  misc_feature (1)..(25): SEQ ID NO: 439; WAN0249VZ_at; Start 82; Stop 106
tcaatatcttatagacacttagatt

SEQ ID NO: 36007 - DNA, 25 bp, Artificial
  probe
  misc_feature (1)..(25): SEQ ID NO: 439; WAN0249VZ_at; Start 132; Stop 156
tttggagcctttgaaagtagtttca

SEQ ID NO: 36008 - DNA, 25 bp, Artificial
  probe
  misc_feature (1)..(25): SEQ ID NO: 439; WAN0249VZ_at; Start 110; Stop 134
gtttctcgcttatagaatagcgttt

SEQ ID NO: 36009 - DNA, 25 bp, Artificial
  probe
  misc_feature (1)..(25): SEQ ID NO: 439; WAN0249VZ_at; Start 29; Stop 53
gctaaagcagatttttctttacttc

SEQ ID NO: 36010 - DNA, 25 bp, Artificial
  probe
  misc_feature (1)..(25): SEQ ID NO: 439; WAN0249VZ_at; Start 95; Stop 119
gacacttagattttagtttctcgct

SEQ ID NO: 36011 - DNA, 25 bp, Artificial
  probe
  misc_feature (1)..(25): SEQ ID NO: 439; WAN0249VZ_at; Start 79; Stop 103
ctttcaatatcttatagacacttag

SEQ ID NO: 36012 - DNA, 25 bp, Artificial
  probe
  misc_feature (1)..(25): SEQ ID NO: 439; WAN0249VZ_at; Start 97; Stop 121
cacttagattttagtttctcgctta

SEQ ID NO: 36013 - DNA, 25 bp, Artificial
  probe
  misc_feature (1)..(25): SEQ ID NO: 439; WAN0249VZ_at; Start 121; Stop 145
atagaatagcgtttggagcctttga

SEQ ID NO: 36014 - DNA, 25 bp, Artificial
  probe
  misc_feature (1)..(25): SEQ ID NO: 439; WAN0249VZ_at; Start 125; Stop 149
aatagcgtttggagcctttgaaagt

SEQ ID NO: 36015 - DNA, 25 bp, Artificial
  probe
  misc_feature (1)..(25): SEQ ID NO: 439; WAN0249VZ_at; Start 34; Stop 58
agcagatttttctttacttctttag

SEQ ID NO: 36016 - DNA, 25 bp, Artificial
  probe
  misc_feature (1)..(25): SEQ ID NO: 439; WAN0249VZ_at; Start 70; Stop 94
ccgaaaaggctttcaatatcttata

SEQ ID NO: 36017 - DNA, 25 bp, Artificial
  probe
  misc_feature (1)..(25): SEQ ID NO: 439; WAN0249VZ_at; Start 116; Stop 140
cgcttatagaatagcgtttggagcc

SEQ ID NO: 36018 - DNA, 25 bp, Artificial
  probe
  misc_feature (1)..(25): SEQ ID NO: 439; WAN0249VZ_at; Start 21; Stop 45
tattttctgctaaagcagatttttc

SEQ ID NO: 36019 - DNA, 25 bp, Artificial
  probe
  misc_feature (1)..(25): SEQ ID NO: 439; WAN0249VZ_at; Start 128; Stop 152
agcgtttggagcctttgaaagtagt

SEQ ID NO: 36020 - DNA, 25 bp, Artificial
  probe
  misc_feature (1)..(25): SEQ ID NO: 439; WAN0249VZ_at; Start 72; Stop 96
gaaaaggctttcaatatcttataga

SEQ ID NO: 36021 - DNA, 25 bp, Artificial
  probe
  misc_feature (1)..(25): SEQ ID NO: 439; WAN0249VZ_at; Start 15; Stop 39
tatttttattttctgctaaagcaga

SEQ ID NO: 36022 - DNA, 25 bp, Artificial
  probe
  misc_feature (1)..(25): SEQ ID NO: 439; WAN0249VZ_at; Start 108; Stop 132
tagtttctcgcttatagaatagcgt

SEQ ID NO: 36023 - DNA, 25 bp, Artificial
  probe
  misc_feature (1)..(25): SEQ ID NO: 439; WAN0249VZ_at; Start 77; Stop 101
ggctttcaatatcttatagacactt

SEQ ID NO: 36024 - DNA, 25 bp, Artificial
  probe
  misc_feature (1)..(25): SEQ ID NO: 439; WAN0249VZ_at; Start 119; Stop 143
ttatagaatagcgtttggagccttt

SEQ ID NO: 36025 - DNA, 25 bp, Artificial
  probe
  misc_feature (1)..(25): SEQ ID NO: 439; WAN0249VZ_at; Start 115; Stop 139
tcgcttatagaatagcgtttggagc

SEQ ID NO: 36026 - DNA, 25 bp, Artificial
  probe
  misc_feature (1)..(25): SEQ ID NO: 439; WAN0249VZ_at; Start 112; Stop 136
ttctcgcttatagaatagcgtttgg

SEQ ID NO: 36027 - DNA, 25 bp, Artificial
  probe
  misc_feature (1)..(25): SEQ ID NO: 439; WAN0249VZ_at; Start 26; Stop 50
tctgctaaagcagatttttctttac

SEQ ID NO: 36028 - DNA, 25 bp, Artificial
  probe
  misc_feature (1)..(25): SEQ ID NO: 439; WAN0249VZ_at; Start 122; Stop 146
tagaatagcgtttggagcctttgaa

SEQ ID NO: 36029 - DNA, 25 bp, Artificial
  probe
  misc_feature (1)..(25): SEQ ID NO: 439; WAN0249VZ_at; Start 68; Stop 92
taccgaaaaggctttcaatatctta

SEQ ID NO: 36030 - DNA, 25 bp, Artificial
  probe
  misc_feature (1)..(25): SEQ ID NO: 439; WAN0249VZ_at; Start 126; Stop 150
atagcgtttggagcctttgaaagta

SEQ ID NO: 36031 - DNA, 25 bp, Artificial
  probe
  misc_feature (1)..(25): SEQ ID NO: 439; WAN0249VZ_at; Start 123; Stop 147
agaatagcgtttggagcctttgaaa

SEQ ID NO: 36032 - DNA, 25 bp, Artificial
  probe
  misc_feature (1)..(25): SEQ ID NO: 439; WAN0249VZ_at; Start 75; Stop 99
aaggctttcaatatcttatagacac

SEQ ID NO: 36033 - DNA, 25 bp, Artificial
  probe
  misc_feature (1)..(25): SEQ ID NO: 439; WAN0249VZ_at; Start 101; Stop 125
tagattttagtttctcgcttataga

SEQ ID NO: 36034 - DNA, 25 bp, Artificial
  probe
  misc_feature (1)..(25): SEQ ID NO: 439; WAN0249VZ_at; Start 117; Stop 141
gcttatagaatagcgtttggagcct

SEQ ID NO: 36035 - DNA, 25 bp, Artificial
  probe
  misc_feature (1)..(25): SEQ ID NO: 439; WAN0249VZ_at; Start 113; Stop 137
tctcgcttatagaatagcgtttgga

SEQ ID NO: 36036 - DNA, 25 bp, Artificial
  probe
  misc_feature (1)..(25): SEQ ID NO: 439; WAN0249VZ_at; Start 120; Stop 144
tatagaatagcgtttggagcctttg

SEQ ID NO: 36037 - DNA, 25 bp, Artificial
  probe
  misc_feature (1)..(25): SEQ ID NO: 3650; WAN0249W2_at; Start 111; Stop 135
tgagaaaccacccaccttactcaga

SEQ ID NO: 36038 - DNA, 25 bp, Artificial
  probe
  misc_feature (1)..(25): SEQ ID NO: 3650; WAN0249W2_at; Start 115; Stop 139
aaaccacccaccttactcagaatgg

SEQ ID NO: 36039 - DNA, 25 bp, Artificial
  probe
  misc_feature (1)..(25): SEQ ID NO: 3650; WAN0249W2_at; Start 119; Stop 143
cacccaccttactcagaatggatga

SEQ ID NO: 36040 - DNA, 25 bp, Artificial
  probe
  misc_feature (1)..(25): SEQ ID NO: 3650; WAN0249W2_at; Start 128; Stop 152
tactcagaatggatgatttcaagaa

SEQ ID NO: 36041 - DNA, 25 bp, Artificial
  probe
  misc_feature (1)..(25): SEQ ID NO: 3650; WAN0249W2_at; Start 114; Stop 138
gaaaccacccaccttactcagaatg

SEQ ID NO: 36042 - DNA, 25 bp, Artificial
  probe
  misc_feature (1)..(25): SEQ ID NO: 3650; WAN0249W2_at; Start 56; Stop 80
cacaaattgttattagatagtcaga

SEQ ID NO: 36043 - DNA, 25 bp, Artificial
  probe
  misc_feature (1)..(25): SEQ ID NO: 3650; WAN0249W2_at; Start 123; Stop 147
caccttactcagaatggatgatttc

SEQ ID NO: 36044 - DNA, 25 bp, Artificial
  probe
  misc_feature (1)..(25): SEQ ID NO: 3650; WAN0249W2_at; Start 37; Stop 61
ctcacaatttgtttgatttcacaaa

SEQ ID NO: 36045 - DNA, 25 bp, Artificial
  probe
  misc_feature (1)..(25): SEQ ID NO: 3650; WAN0249W2_at; Start 16; Stop 40
aaaataataccgtactagtatctca

SEQ ID NO: 36046 - DNA, 25 bp, Artificial
  probe
  misc_feature (1)..(25): SEQ ID NO: 3650; WAN0249W2_at; Start 120; Stop 144
acccaccttactcagaatggatgat

SEQ ID NO: 36047 - DNA, 25 bp, Artificial
  probe
  misc_feature (1)..(25): SEQ ID NO: 3650; WAN0249W2_at; Start 129; Stop 153
actcagaatggatgatttcaagaaa

SEQ ID NO: 36048 - DNA, 25 bp, Artificial
  probe
  misc_feature (1)..(25): SEQ ID NO: 3650; WAN0249W2_at; Start 118; Stop 142
ccacccaccttactcagaatggatg

SEQ ID NO: 36049 - DNA, 25 bp, Artificial
  probe
  misc_feature (1)..(25): SEQ ID NO: 3650; WAN0249W2_at; Start 73; Stop 97
tagtcagatatatagtttaaaacta

SEQ ID NO: 36050 - DNA, 25 bp, Artificial
  probe
  misc_feature (1)..(25): SEQ ID NO: 3650; WAN0249W2_at; Start 122; Stop 146
ccaccttactcagaatggatgattt

SEQ ID NO: 36051 - DNA, 25 bp, Artificial
  probe
  misc_feature (1)..(25): SEQ ID NO: 3650; WAN0249W2_at; Start 24; Stop 48
accgtactagtatctcacaatttgt

SEQ ID NO: 36052 - DNA, 25 bp, Artificial
  probe
  misc_feature (1)..(25): SEQ ID NO: 3650; WAN0249W2_at; Start 117; Stop 141
accacccaccttactcagaatggat

SEQ ID NO: 36053 - DNA, 25 bp, Artificial
  probe
  misc_feature (1)..(25): SEQ ID NO: 3650; WAN0249W2_at; Start 124; Stop 148
accttactcagaatggatgatttca

SEQ ID NO: 36054 - DNA, 25 bp, Artificial
  probe
  misc_feature (1)..(25): SEQ ID NO: 3650; WAN0249W2_at; Start 20; Stop 44
taataccgtactagtatctcacaat

SEQ ID NO: 36055 - DNA, 25 bp, Artificial
  probe
  misc_feature (1)..(25): SEQ ID NO: 3650; WAN0249W2_at; Start 116; Stop 140
aaccacccaccttactcagaatgga

SEQ ID NO: 36056 - DNA, 25 bp, Artificial
  probe
  misc_feature (1)..(25): SEQ ID NO: 3650; WAN0249W2_at; Start 58; Stop 82
caaattgttattagatagtcagata

SEQ ID NO: 36057 - DNA, 25 bp, Artificial
  probe
  misc_feature (1)..(25): SEQ ID NO: 3650; WAN0249W2_at; Start 27; Stop 51
gtactagtatctcacaatttgtttg

SEQ ID NO: 36058 - DNA, 25 bp, Artificial
  probe
  misc_feature (1)..(25): SEQ ID NO: 3650; WAN0249W2_at; Start 23; Stop 47
taccgtactagtatctcacaatttg

SEQ ID NO: 36059 - DNA, 25 bp, Artificial
  probe
  misc_feature (1)..(25): SEQ ID NO: 3650; WAN0249W2_at; Start 18; Stop 42
aataataccgtactagtatctcaca

SEQ ID NO: 36060 - DNA, 25 bp, Artificial
  probe
  misc_feature (1)..(25): SEQ ID NO: 3650; WAN0249W2_at; Start 125; Stop 149
ccttactcagaatggatgatttcaa

SEQ ID NO: 36061 - DNA, 25 bp, Artificial
  probe
  misc_feature (1)..(25): SEQ ID NO: 3650; WAN0249W2_at; Start 55; Stop 79
tcacaaattgttattagatagtcag

SEQ ID NO: 36062 - DNA, 25 bp, Artificial
  probe
  misc_feature (1)..(25): SEQ ID NO: 3650; WAN0249W2_at; Start 126; Stop 150
cttactcagaatggatgatttcaag

SEQ ID NO: 36063 - DNA, 25 bp, Artificial
  probe
  misc_feature (1)..(25): SEQ ID NO: 3650; WAN0249W2_at; Start 26; Stop 50
cgtactagtatctcacaatttgttt

SEQ ID NO: 36064 - DNA, 25 bp, Artificial
  probe
  misc_feature (1)..(25): SEQ ID NO: 3650; WAN0249W2_at; Start 28; Stop 52
tactagtatctcacaatttgtttga

SEQ ID NO: 36065 - DNA, 25 bp, Artificial
  probe
  misc_feature (1)..(25): SEQ ID NO: 3650; WAN0249W2_at; Start 96; Stop 120
tatatccctaaaaactgagaaacca

SEQ ID NO: 36066 - DNA, 25 bp, Artificial
  probe
  misc_feature (1)..(25): SEQ ID NO: 3650; WAN0249W2_at; Start 25; Stop 49
ccgtactagtatctcacaatttgtt

SEQ ID NO: 36067 - DNA, 25 bp, Artificial
  probe
  misc_feature (1)..(25): SEQ ID NO: 3650; WAN0249W2_at; Start 63; Stop 87
tgttattagatagtcagatatatag

SEQ ID NO: 36068 - DNA, 25 bp, Artificial
  probe
  misc_feature (1)..(25): SEQ ID NO: 3650; WAN0249W2_at; Start 112; Stop 136
gagaaaccacccaccttactcagaa

SEQ ID NO: 36069 - DNA, 25 bp, Artificial
  probe
  misc_feature (1)..(25): SEQ ID NO: 3650; WAN0249W2_at; Start 71; Stop 95
gatagtcagatatatagtttaaaac

SEQ ID NO: 36070 - DNA, 25 bp, Artificial
  probe
  misc_feature (1)..(25): SEQ ID NO: 3650; WAN0249W2_at; Start 121; Stop 145
cccaccttactcagaatggatgatt

SEQ ID NO: 36071 - DNA, 25 bp, Artificial
  probe
  misc_feature (1)..(25): SEQ ID NO: 5912; WAN0249W3_at; Start 11; Stop 35
tcatccattctgagtaaggtgggtg

SEQ ID NO: 36072 - DNA, 25 bp, Artificial
  probe
  misc_feature (1)..(25): SEQ ID NO: 5912; WAN0249W3_at; Start 9; Stop 33
aatcatccattctgagtaaggtggg

SEQ ID NO: 36073 - DNA, 25 bp, Artificial
  probe
  misc_feature (1)..(25): SEQ ID NO: 5912; WAN0249W3_at; Start 15; Stop 39
ccattctgagtaaggtgggtggttt

SEQ ID NO: 36074 - DNA, 25 bp, Artificial
  probe
  misc_feature (1)..(25): SEQ ID NO: 5912; WAN0249W3_at; Start 75; Stop 99
ctgactatctaataacaatttgtga

SEQ ID NO: 36075 - DNA, 25 bp, Artificial
  probe
  misc_feature (1)..(25): SEQ ID NO: 5912; WAN0249W3_at; Start 6; Stop 30
tgaaatcatccattctgagtaaggt

SEQ ID NO: 36076 - DNA, 25 bp, Artificial
  probe
  misc_feature (1)..(25): SEQ ID NO: 5912; WAN0249W3_at; Start 105; Stop 129
aacaaattgtgagatactagtacgg

SEQ ID NO: 36077 - DNA, 25 bp, Artificial
  probe
  misc_feature (1)..(25): SEQ ID NO: 5912; WAN0249W3_at; Start 14; Stop 38
tccattctgagtaaggtgggtggtt

SEQ ID NO: 36078 - DNA, 25 bp, Artificial
  probe
  misc_feature (1)..(25): SEQ ID NO: 5912; WAN0249W3_at; Start 7; Stop 31
gaaatcatccattctgagtaaggtg

SEQ ID NO: 36079 - DNA, 25 bp, Artificial
  probe
  misc_feature (1)..(25): SEQ ID NO: 5912; WAN0249W3_at; Start 83; Stop 107
ctaataacaatttgtgaaatcaaac

SEQ ID NO: 36080 - DNA, 25 bp, Artificial
  probe
  misc_feature (1)..(25): SEQ ID NO: 5912; WAN0249W3_at; Start 97; Stop 121
tgaaatcaaacaaattgtgagatac

SEQ ID NO: 36081 - DNA, 25 bp, Artificial
  probe
  misc_feature (1)..(25): SEQ ID NO: 5912; WAN0249W3_at; Start 34; Stop 58
tggtttctcagtttttagggatata

SEQ ID NO: 36082 - DNA, 25 bp, Artificial
  probe
  misc_feature (1)..(25): SEQ ID NO: 5912; WAN0249W3_at; Start 4; Stop 28
cttgaaatcatccattctgagtaag

SEQ ID NO: 36083 - DNA, 25 bp, Artificial
  probe
  misc_feature (1)..(25): SEQ ID NO: 5912; WAN0249W3_at; Start 107; Stop 131
caaattgtgagatactagtacggta

SEQ ID NO: 36084 - DNA, 25 bp, Artificial
  probe
  misc_feature (1)..(25): SEQ ID NO: 5912; WAN0249W3_at; Start 63; Stop 87
taaactatatatctgactatctaat

SEQ ID NO: 36085 - DNA, 25 bp, Artificial
  probe
  misc_feature (1)..(25): SEQ ID NO: 5912; WAN0249W3_at; Start 19; Stop 43
tctgagtaaggtgggtggtttctca

SEQ ID NO: 36086 - DNA, 25 bp, Artificial
  probe
  misc_feature (1)..(25): SEQ ID NO: 5912; WAN0249W3_at; Start 16; Stop 40
cattctgagtaaggtgggtggtttc

SEQ ID NO: 36087 - DNA, 25 bp, Artificial
  probe
  misc_feature (1)..(25): SEQ ID NO: 5912; WAN0249W3_at; Start 114; Stop 138
tgagatactagtacggtattatttt

SEQ ID NO: 36088 - DNA, 25 bp, Artificial
  probe
  misc_feature (1)..(25): SEQ ID NO: 5912; WAN0249W3_at; Start 103; Stop 127
caaacaaattgtgagatactagtac

SEQ ID NO: 36089 - DNA, 25 bp, Artificial
  probe
  misc_feature (1)..(25): SEQ ID NO: 5912; WAN0249W3_at; Start 109; Stop 133
aattgtgagatactagtacggtatt

SEQ ID NO: 36090 - DNA, 25 bp, Artificial
  probe
  misc_feature (1)..(25): SEQ ID NO: 5912; WAN0249W3_at; Start 12; Stop 36
catccattctgagtaaggtgggtgg

SEQ ID NO: 36091 - DNA, 25 bp, Artificial
  probe
  misc_feature (1)..(25): SEQ ID NO: 5912; WAN0249W3_at; Start 1; Stop 25
tttcttgaaatcatccattctgagt

SEQ ID NO: 36092 - DNA, 25 bp, Artificial
  probe
  misc_feature (1)..(25): SEQ ID NO: 5912; WAN0249W3_at; Start 108; Stop 132
aaattgtgagatactagtacggtat

SEQ ID NO: 36093 - DNA, 25 bp, Artificial
  probe
  misc_feature (1)..(25): SEQ ID NO: 5912; WAN0249W3_at; Start 3; Stop 27
tcttgaaatcatccattctgagtaa

SEQ ID NO: 36094 - DNA, 25 bp, Artificial
  probe
  misc_feature (1)..(25): SEQ ID NO: 5912; WAN0249W3_at; Start 8; Stop 32
aaatcatccattctgagtaaggtgg

SEQ ID NO: 36095 - DNA, 25 bp, Artificial
  probe
  misc_feature (1)..(25): SEQ ID NO: 5912; WAN0249W3_at; Start 77; Stop 101
gactatctaataacaatttgtgaaa

SEQ ID NO: 36096 - DNA, 25 bp, Artificial
  probe
  misc_feature (1)..(25): SEQ ID NO: 5912; WAN0249W3_at; Start 59; Stop 83
gttttaaactatatatctgactatc

SEQ ID NO: 36097 - DNA, 25 bp, Artificial
  probe
  misc_feature (1)..(25): SEQ ID NO: 5912; WAN0249W3_at; Start 74; Stop 98
tctgactatctaataacaatttgtg

SEQ ID NO: 36098 - DNA, 25 bp, Artificial
  probe
  misc_feature (1)..(25): SEQ ID NO: 5912; WAN0249W3_at; Start 72; Stop 96
tatctgactatctaataacaatttg

SEQ ID NO: 36099 - DNA, 25 bp, Artificial
  probe
  misc_feature (1)..(25): SEQ ID NO: 5912; WAN0249W3_at; Start 104; Stop 128
aaacaaattgtgagatactagtacg

SEQ ID NO: 36100 - DNA, 25 bp, Artificial
  probe
  misc_feature (1)..(25): SEQ ID NO: 5912; WAN0249W3_at; Start 112; Stop 136
tgtgagatactagtacggtattatt

SEQ ID NO: 36101 - DNA, 25 bp, Artificial
  probe
  misc_feature (1)..(25): SEQ ID NO: 5912; WAN0249W3_at; Start 93; Stop 117
tttgtgaaatcaaacaaattgtgag

SEQ ID NO: 36102 - DNA, 25 bp, Artificial
  probe
  misc_feature (1)..(25): SEQ ID NO: 5912; WAN0249W3_at; Start 106; Stop 130
acaaattgtgagatactagtacggt

SEQ ID NO: 36103 - DNA, 25 bp, Artificial
  probe
  misc_feature (1)..(25): SEQ ID NO: 5912; WAN0249W3_at; Start 18; Stop 42
ttctgagtaaggtgggtggtttctc

SEQ ID NO: 36104 - DNA, 25 bp, Artificial
  probe
  misc_feature (1)..(25): SEQ ID NO: 5912; WAN0249W3_at; Start 5; Stop 29
ttgaaatcatccattctgagtaagg

SEQ ID NO: 36105 - DNA, 25 bp, Artificial
  probe
  misc_feature (1)..(25): SEQ ID NO: 463; WAN0249W4_at; Start 63; Stop 87
tataacacataatataaggatagat

SEQ ID NO: 36106 - DNA, 25 bp, Artificial
  probe
  misc_feature (1)..(25): SEQ ID NO: 463; WAN0249W4_at; Start 75; Stop 99
tataaggatagataaataaaaacgc

SEQ ID NO: 36107 - DNA, 25 bp, Artificial
  probe
  misc_feature (1)..(25): SEQ ID NO: 463; WAN0249W4_at; Start 1; Stop 25
agggaaagctcctttacatgagtca

SEQ ID NO: 36108 - DNA, 25 bp, Artificial
  probe
  misc_feature (1)..(25): SEQ ID NO: 463; WAN0249W4_at; Start 165; Stop 189
tgtggtacaattaagagtaagattt

SEQ ID NO: 36109 - DNA, 25 bp, Artificial
  probe
  misc_feature (1)..(25): SEQ ID NO: 463; WAN0249W4_at; Start 17; Stop 41
catgagtcatactggaagactagat

SEQ ID NO: 36110 - DNA, 25 bp, Artificial
  probe
  misc_feature (1)..(25): SEQ ID NO: 463; WAN0249W4_at; Start 14; Stop 38
ttacatgagtcatactggaagacta

SEQ ID NO: 36111 - DNA, 25 bp, Artificial
  probe
  misc_feature (1)..(25): SEQ ID NO: 463; WAN0249W4_at; Start 87; Stop 111
taaataaaaacgcatctctgtttta

SEQ ID NO: 36112 - DNA, 25 bp, Artificial
  probe
  misc_feature (1)..(25): SEQ ID NO: 463; WAN0249W4_at; Start 12; Stop 36
ctttacatgagtcatactggaagac

SEQ ID NO: 36113 - DNA, 25 bp, Artificial
  probe
  misc_feature (1)..(25): SEQ ID NO: 463; WAN0249W4_at; Start 80; Stop 104
ggatagataaataaaaacgcatctc

SEQ ID NO: 36114 - DNA, 25 bp, Artificial
  probe
  misc_feature (1)..(25): SEQ ID NO: 463; WAN0249W4_at; Start 7; Stop 31
agctcctttacatgagtcatactgg

SEQ ID NO: 36115 - DNA, 25 bp, Artificial
  probe
  misc_feature (1)..(25): SEQ ID NO: 463; WAN0249W4_at; Start 83; Stop 107
tagataaataaaaacgcatctctgt

SEQ ID NO: 36116 - DNA, 25 bp, Artificial
  probe
  misc_feature (1)..(25): SEQ ID NO: 463; WAN0249W4_at; Start 49; Stop 73
tagtcacacttcattataacacata

SEQ ID NO: 36117 - DNA, 25 bp, Artificial
  probe
  misc_feature (1)..(25): SEQ ID NO: 463; WAN0249W4_at; Start 4; Stop 28
gaaagctcctttacatgagtcatac

SEQ ID NO: 36118 - DNA, 25 bp, Artificial
  probe
  misc_feature (1)..(25): SEQ ID NO: 463; WAN0249W4_at; Start 160; Stop 184
caaattgtggtacaattaagagtaa

SEQ ID NO: 36119 - DNA, 25 bp, Artificial
  probe
  misc_feature (1)..(25): SEQ ID NO: 463; WAN0249W4_at; Start 10; Stop 34
tcctttacatgagtcatactggaag

SEQ ID NO: 36120 - DNA, 25 bp, Artificial
  probe
  misc_feature (1)..(25): SEQ ID NO: 463; WAN0249W4_at; Start 15; Stop 39
tacatgagtcatactggaagactag

SEQ ID NO: 36121 - DNA, 25 bp, Artificial
  probe
  misc_feature (1)..(25): SEQ ID NO: 463; WAN0249W4_at; Start 126; Stop 150
gaaaaagcttctctcttttccataa

SEQ ID NO: 36122 - DNA, 25 bp, Artificial
  probe
  misc_feature (1)..(25): SEQ ID NO: 463; WAN0249W4_at; Start 149; Stop 173
aattttctactcaaattgtggtaca

SEQ ID NO: 36123 - DNA, 25 bp, Artificial
  probe
  misc_feature (1)..(25): SEQ ID NO: 463; WAN0249W4_at; Start 190; Stop 214
taagttagaaatgagactgatttgt

SEQ ID NO: 36124 - DNA, 25 bp, Artificial
  probe
  misc_feature (1)..(25): SEQ ID NO: 463; WAN0249W4_at; Start 8; Stop 32
gctcctttacatgagtcatactgga

SEQ ID NO: 36125 - DNA, 25 bp, Artificial
  probe
  misc_feature (1)..(25): SEQ ID NO: 463; WAN0249W4_at; Start 125; Stop 149
cgaaaaagcttctctcttttccata

SEQ ID NO: 36126 - DNA, 25 bp, Artificial
  probe
  misc_feature (1)..(25): SEQ ID NO: 463; WAN0249W4_at; Start 11; Stop 35
cctttacatgagtcatactggaaga

SEQ ID NO: 36127 - DNA, 25 bp, Artificial
  probe
  misc_feature (1)..(25): SEQ ID NO: 463; WAN0249W4_at; Start 185; Stop 209
gattttaagttagaaatgagactga

SEQ ID NO: 36128 - DNA, 25 bp, Artificial
  probe
  misc_feature (1)..(25): SEQ ID NO: 463; WAN0249W4_at; Start 154; Stop 178
tctactcaaattgtggtacaattaa

SEQ ID NO: 36129 - DNA, 25 bp, Artificial
  probe
  misc_feature (1)..(25): SEQ ID NO: 463; WAN0249W4_at; Start 137; Stop 161
tctcttttccataattttctactca

SEQ ID NO: 36130 - DNA, 25 bp, Artificial
  probe
  misc_feature (1)..(25): SEQ ID NO: 463; WAN0249W4_at; Start 151; Stop 175
ttttctactcaaattgtggtacaat

SEQ ID NO: 36131 - DNA, 25 bp, Artificial
  probe
  misc_feature (1)..(25): SEQ ID NO: 463; WAN0249W4_at; Start 46; Stop 70
gaatagtcacacttcattataacac

SEQ ID NO: 36132 - DNA, 25 bp, Artificial
  probe
  misc_feature (1)..(25): SEQ ID NO: 463; WAN0249W4_at; Start 2; Stop 26
gggaaagctcctttacatgagtcat

SEQ ID NO: 36133 - DNA, 25 bp, Artificial
  probe
  misc_feature (1)..(25): SEQ ID NO: 463; WAN0249W4_at; Start 85; Stop 109
gataaataaaaacgcatctctgttt

SEQ ID NO: 36134 - DNA, 25 bp, Artificial
  probe
  misc_feature (1)..(25): SEQ ID NO: 463; WAN0249W4_at; Start 3; Stop 27
ggaaagctcctttacatgagtcata

SEQ ID NO: 36135 - DNA, 25 bp, Artificial
  probe
  misc_feature (1)..(25): SEQ ID NO: 463; WAN0249W4_at; Start 77; Stop 101
taaggatagataaataaaaacgcat

SEQ ID NO: 36136 - DNA, 25 bp, Artificial
  probe
  misc_feature (1)..(25): SEQ ID NO: 463; WAN0249W4_at; Start 20; Stop 44
gagtcatactggaagactagatcag

SEQ ID NO: 36137 - DNA, 25 bp, Artificial
  probe
  misc_feature (1)..(25): SEQ ID NO: 463; WAN0249W4_at; Start 167; Stop 191
tggtacaattaagagtaagatttta

SEQ ID NO: 36138 - DNA, 25 bp, Artificial
  probe
  misc_feature (1)..(25): SEQ ID NO: 463; WAN0249W4_at; Start 131; Stop 155
agcttctctcttttccataattttc

SEQ ID NO: 36139 - DNA, 25 bp, Artificial
  probe
  misc_feature (1)..(25): SEQ ID NO: 317; WAN0249W5_at; Start 2; Stop 26
caaatcagtctcatttctaacttaa

SEQ ID NO: 36140 - DNA, 25 bp, Artificial
  probe
  misc_feature (1)..(25): SEQ ID NO: 317; WAN0249W5_at; Start 175; Stop 199
tctagtcttccagtatgactcatgt

SEQ ID NO: 36141 - DNA, 25 bp, Artificial
  probe
  misc_feature (1)..(25): SEQ ID NO: 317; WAN0249W5_at; Start 68; Stop 92
tggaaaagagagaagctttttcgat

SEQ ID NO: 36142 - DNA, 25 bp, Artificial
  probe
  misc_feature (1)..(25): SEQ ID NO: 317; WAN0249W5_at; Start 184; Stop 208
ccagtatgactcatgtaaaggagct

SEQ ID NO: 36143 - DNA, 25 bp, Artificial
  probe
  misc_feature (1)..(25): SEQ ID NO: 317; WAN0249W5_at; Start 171; Stop 195
ctgatctagtcttccagtatgactc

SEQ ID NO: 36144 - DNA, 25 bp, Artificial
  probe
  misc_feature (1)..(25): SEQ ID NO: 317; WAN0249W5_at; Start 185; Stop 209
cagtatgactcatgtaaaggagctt

SEQ ID NO: 36145 - DNA, 25 bp, Artificial
  probe
  misc_feature (1)..(25): SEQ ID NO: 317; WAN0249W5_at; Start 173; Stop 197
gatctagtcttccagtatgactcat

SEQ ID NO: 36146 - DNA, 25 bp, Artificial
  probe
  misc_feature (1)..(25): SEQ ID NO: 317; WAN0249W5_at; Start 66; Stop 90
tatggaaaagagagaagctttttcg

SEQ ID NO: 36147 - DNA, 25 bp, Artificial
  probe
  misc_feature (1)..(25): SEQ ID NO: 317; WAN0249W5_at; Start 172; Stop 196
tgatctagtcttccagtatgactca

SEQ ID NO: 36148 - DNA, 25 bp, Artificial
  probe
  misc_feature (1)..(25): SEQ ID NO: 317; WAN0249W5_at; Start 111; Stop 135
gagatgcgtttttatttatctatcc

SEQ ID NO: 36149 - DNA, 25 bp, Artificial
  probe
  misc_feature (1)..(25): SEQ ID NO: 317; WAN0249W5_at; Start 116; Stop 140
gcgtttttatttatctatccttata

SEQ ID NO: 36150 - DNA, 25 bp, Artificial
  probe
  misc_feature (1)..(25): SEQ ID NO: 317; WAN0249W5_at; Start 123; Stop 147
tatttatctatccttatattatgtg

SEQ ID NO: 36151 - DNA, 25 bp, Artificial
  probe
  misc_feature (1)..(25): SEQ ID NO: 317; WAN0249W5_at; Start 179; Stop 203
gtcttccagtatgactcatgtaaag

SEQ ID NO: 36152 - DNA, 25 bp, Artificial
  probe
  misc_feature (1)..(25): SEQ ID NO: 317; WAN0249W5_at; Start 187; Stop 211
gtatgactcatgtaaaggagctttc

SEQ ID NO: 36153 - DNA, 25 bp, Artificial
  probe
  misc_feature (1)..(25): SEQ ID NO: 317; WAN0249W5_at; Start 55; Stop 79
gagtagaaaattatggaaaagagag

SEQ ID NO: 36154 - DNA, 25 bp, Artificial
  probe
  misc_feature (1)..(25): SEQ ID NO: 317; WAN0249W5_at; Start 180; Stop 204
tcttccagtatgactcatgtaaagg

SEQ ID NO: 36155 - DNA, 25 bp, Artificial
  probe
  misc_feature (1)..(25): SEQ ID NO: 317; WAN0249W5_at; Start 108; Stop 132
acagagatgcgtttttatttatcta

SEQ ID NO: 36156 - DNA, 25 bp, Artificial
  probe
  misc_feature (1)..(25): SEQ ID NO: 317; WAN0249W5_at; Start 181; Stop 205
cttccagtatgactcatgtaaagga

SEQ ID NO: 36157 - DNA, 25 bp, Artificial
  probe
  misc_feature (1)..(25): SEQ ID NO: 317; WAN0249W5_at; Start 177; Stop 201
tagtcttccagtatgactcatgtaa

SEQ ID NO: 36158 - DNA, 25 bp, Artificial
  probe
  misc_feature (1)..(25): SEQ ID NO: 317; WAN0249W5_at; Start 142; Stop 166
tatgtgttataatgaagtgtgacta

SEQ ID NO: 36159 - DNA, 25 bp, Artificial
  probe
  misc_feature (1)..(25): SEQ ID NO: 317; WAN0249W5_at; Start 13; Stop 37
catttctaacttaaaatcttactct

SEQ ID NO: 36160 - DNA, 25 bp, Artificial
  probe
  misc_feature (1)..(25): SEQ ID NO: 317; WAN0249W5_at; Start 24; Stop 48
taaaatcttactcttaattgtacca

SEQ ID NO: 36161 - DNA, 25 bp, Artificial
  probe
  misc_feature (1)..(25): SEQ ID NO: 317; WAN0249W5_at; Start 188; Stop 212
tatgactcatgtaaaggagctttcc

SEQ ID NO: 36162 - DNA, 25 bp, Artificial
  probe
  misc_feature (1)..(25): SEQ ID NO: 317; WAN0249W5_at; Start 183; Stop 207
tccagtatgactcatgtaaaggagc

SEQ ID NO: 36163 - DNA, 25 bp, Artificial
  probe
  misc_feature (1)..(25): SEQ ID NO: 317; WAN0249W5_at; Start 60; Stop 84
gaaaattatggaaaagagagaagct

SEQ ID NO: 36164 - DNA, 25 bp, Artificial
  probe
  misc_feature (1)..(25): SEQ ID NO: 317; WAN0249W5_at; Start 6; Stop 30
tcagtctcatttctaacttaaaatc

SEQ ID NO: 36165 - DNA, 25 bp, Artificial
  probe
  misc_feature (1)..(25): SEQ ID NO: 317; WAN0249W5_at; Start 145; Stop 169
gtgttataatgaagtgtgactattc

SEQ ID NO: 36166 - DNA, 25 bp, Artificial
  probe
  misc_feature (1)..(25): SEQ ID NO: 317; WAN0249W5_at; Start 189; Stop 213
atgactcatgtaaaggagctttccc

SEQ ID NO: 36167 - DNA, 25 bp, Artificial
  probe
  misc_feature (1)..(25): SEQ ID NO: 317; WAN0249W5_at; Start 190; Stop 214
tgactcatgtaaaggagctttccct

SEQ ID NO: 36168 - DNA, 25 bp, Artificial
  probe
  misc_feature (1)..(25): SEQ ID NO: 317; WAN0249W5_at; Start 27; Stop 51
aatcttactcttaattgtaccacaa

SEQ ID NO: 36169 - DNA, 25 bp, Artificial
  probe
  misc_feature (1)..(25): SEQ ID NO: 317; WAN0249W5_at; Start 38; Stop 62
taattgtaccacaatttgagtagaa

SEQ ID NO: 36170 - DNA, 25 bp, Artificial
  probe
  misc_feature (1)..(25): SEQ ID NO: 317; WAN0249W5_at; Start 32; Stop 56
tactcttaattgtaccacaatttga

SEQ ID NO: 36171 - DNA, 25 bp, Artificial
  probe
  misc_feature (1)..(25): SEQ ID NO: 317; WAN0249W5_at; Start 42; Stop 66
tgtaccacaatttgagtagaaaatt

SEQ ID NO: 36172 - DNA, 25 bp, Artificial
  probe
  misc_feature (1)..(25): SEQ ID NO: 317; WAN0249W5_at; Start 106; Stop 130
aaacagagatgcgtttttatttatc

SEQ ID NO: 36173 - DNA, 25 bp, Artificial
  probe
  misc_feature (1)..(25): SEQ ID NO: 5896; WAN0249W6_at; Start 49; Stop 73
tgtatagtgtgatgagtaggctcag

SEQ ID NO: 36174 - DNA, 25 bp, Artificial
  probe
  misc_feature (1)..(25): SEQ ID NO: 5896; WAN0249W6_at; Start 123; Stop 147
ttctagtagaattaggacaaataat

SEQ ID NO: 36175 - DNA, 25 bp, Artificial
  probe
  misc_feature (1)..(25): SEQ ID NO: 5896; WAN0249W6_at; Start 9; Stop 33
aaatcaaagaggctgaaaatcgttc

SEQ ID NO: 36176 - DNA, 25 bp, Artificial
  probe
  misc_feature (1)..(25): SEQ ID NO: 5896; WAN0249W6_at; Start 17; Stop 41
gaggctgaaaatcgttcctatcggc

SEQ ID NO: 36177 - DNA, 25 bp, Artificial
  probe
  misc_feature (1)..(25): SEQ ID NO: 5896; WAN0249W6_at; Start 26; Stop 50
aatcgttcctatcggcctctttttg

SEQ ID NO: 36178 - DNA, 25 bp, Artificial
  probe
  misc_feature (1)..(25): SEQ ID NO: 5896; WAN0249W6_at; Start 22; Stop 46
tgaaaatcgttcctatcggcctctt

SEQ ID NO: 36179 - DNA, 25 bp, Artificial
  probe
  misc_feature (1)..(25): SEQ ID NO: 5896; WAN0249W6_at; Start 51; Stop 75
tatagtgtgatgagtaggctcaggt

SEQ ID NO: 36180 - DNA, 25 bp, Artificial
  probe
  misc_feature (1)..(25): SEQ ID NO: 5896; WAN0249W6_at; Start 110; Stop 134
taaagagcgagtattctagtagaat

SEQ ID NO: 36181 - DNA, 25 bp, Artificial
  probe
  misc_feature (1)..(25): SEQ ID NO: 5896; WAN0249W6_at; Start 103; Stop 127
gatatactaaagagcgagtattcta

SEQ ID NO: 36182 - DNA, 25 bp, Artificial
  probe
  misc_feature (1)..(25): SEQ ID NO: 5896; WAN0249W6_at; Start 53; Stop 77
tagtgtgatgagtaggctcaggttc

SEQ ID NO: 36183 - DNA, 25 bp, Artificial
  probe
  misc_feature (1)..(25): SEQ ID NO: 5896; WAN0249W6_at; Start 100; Stop 124
tatgatatactaaagagcgagtatt

SEQ ID NO: 36184 - DNA, 25 bp, Artificial
  probe
  misc_feature (1)..(25): SEQ ID NO: 5896; WAN0249W6_at; Start 117; Stop 141
cgagtattctagtagaattaggaca

SEQ ID NO: 36185 - DNA, 25 bp, Artificial
  probe
  misc_feature (1)..(25): SEQ ID NO: 5896; WAN0249W6_at; Start 61; Stop 85
tgagtaggctcaggttcaagtttta

SEQ ID NO: 36186 - DNA, 25 bp, Artificial
  probe
  misc_feature (1)..(25): SEQ ID NO: 5896; WAN0249W6_at; Start 35; Stop 59
tatcggcctctttttgtatagtgtg

SEQ ID NO: 36187 - DNA, 25 bp, Artificial
  probe
  misc_feature (1)..(25): SEQ ID NO: 5896; WAN0249W6_at; Start 37; Stop 61
tcggcctctttttgtatagtgtgat

SEQ ID NO: 36188 - DNA, 25 bp, Artificial
  probe
  misc_feature (1)..(25): SEQ ID NO: 5896; WAN0249W6_at; Start 55; Stop 79
gtgtgatgagtaggctcaggttcaa

SEQ ID NO: 36189 - DNA, 25 bp, Artificial
  probe
  misc_feature (1)..(25): SEQ ID NO: 5896; WAN0249W6_at; Start 1; Stop 25
tttataaaaaatcaaagaggctgaa

SEQ ID NO: 36190 - DNA, 25 bp, Artificial
  probe
  misc_feature (1)..(25): SEQ ID NO: 5896; WAN0249W6_at; Start 109; Stop 133
ctaaagagcgagtattctagtagaa

SEQ ID NO: 36191 - DNA, 25 bp, Artificial
  probe
  misc_feature (1)..(25): SEQ ID NO: 5896; WAN0249W6_at; Start 20; Stop 44
gctgaaaatcgttcctatcggcctc

SEQ ID NO: 36192 - DNA, 25 bp, Artificial
  probe
  misc_feature (1)..(25): SEQ ID NO: 5896; WAN0249W6_at; Start 7; Stop 31
aaaaatcaaagaggctgaaaatcgt

SEQ ID NO: 36193 - DNA, 25 bp, Artificial
  probe
  misc_feature (1)..(25): SEQ ID NO: 5896; WAN0249W6_at; Start 85; Stop 109
aaaaaaccaagcaaatatgatatac

SEQ ID NO: 36194 - DNA, 25 bp, Artificial
  probe
  misc_feature (1)..(25): SEQ ID NO: 5896; WAN0249W6_at; Start 39; Stop 63
ggcctctttttgtatagtgtgatga

SEQ ID NO: 36195 - DNA, 25 bp, Artificial
  probe
  misc_feature (1)..(25): SEQ ID NO: 5896; WAN0249W6_at; Start 97; Stop 121
aaatatgatatactaaagagcgagt

SEQ ID NO: 36196 - DNA, 25 bp, Artificial
  probe
  misc_feature (1)..(25): SEQ ID NO: 5896; WAN0249W6_at; Start 21; Stop 45
ctgaaaatcgttcctatcggcctct

SEQ ID NO: 36197 - DNA, 25 bp, Artificial
  probe
  misc_feature (1)..(25): SEQ ID NO: 5896; WAN0249W6_at; Start 30; Stop 54
gttcctatcggcctctttttgtata

SEQ ID NO: 36198 - DNA, 25 bp, Artificial
  probe
  misc_feature (1)..(25): SEQ ID NO: 5896; WAN0249W6_at; Start 16; Stop 40
agaggctgaaaatcgttcctatcgg

SEQ ID NO: 36199 - DNA, 25 bp, Artificial
  probe
  misc_feature (1)..(25): SEQ ID NO: 5896; WAN0249W6_at; Start 33; Stop 57
cctatcggcctctttttgtatagtg

SEQ ID NO: 36200 - DNA, 25 bp, Artificial
  probe
  misc_feature (1)..(25): SEQ ID NO: 5896; WAN0249W6_at; Start 47; Stop 71
tttgtatagtgtgatgagtaggctc

SEQ ID NO: 36201 - DNA, 25 bp, Artificial
  probe
  misc_feature (1)..(25): SEQ ID NO: 5896; WAN0249W6_at; Start 62; Stop 86
gagtaggctcaggttcaagttttaa

SEQ ID NO: 36202 - DNA, 25 bp, Artificial
  probe
  misc_feature (1)..(25): SEQ ID NO: 5896; WAN0249W6_at; Start 41; Stop 65
cctctttttgtatagtgtgatgagt

SEQ ID NO: 36203 - DNA, 25 bp, Artificial
  probe
  misc_feature (1)..(25): SEQ ID NO: 5896; WAN0249W6_at; Start 107; Stop 131
tactaaagagcgagtattctagtag

SEQ ID NO: 36204 - DNA, 25 bp, Artificial
  probe
  misc_feature (1)..(25): SEQ ID NO: 5896; WAN0249W6_at; Start 19; Stop 43
ggctgaaaatcgttcctatcggcct

SEQ ID NO: 36205 - DNA, 25 bp, Artificial
  probe
  misc_feature (1)..(25): SEQ ID NO: 5896; WAN0249W6_at; Start 58; Stop 82
tgatgagtaggctcaggttcaagtt

SEQ ID NO: 36206 - DNA, 25 bp, Artificial
  probe
  misc_feature (1)..(25): SEQ ID NO: 5896; WAN0249W6_at; Start 96; Stop 120
caaatatgatatactaaagagcgag

SEQ ID NO: 36207 - DNA, 25 bp, Artificial
  probe
  misc_feature (1)..(25): SEQ ID NO: 3144; WAN0249W7_at; Start 15; Stop 39
ttctactagaatactcgctctttag

SEQ ID NO: 36208 - DNA, 25 bp, Artificial
  probe
  misc_feature (1)..(25): SEQ ID NO: 3144; WAN0249W7_at; Start 98; Stop 122
caaaaagaggccgataggaacgatt

SEQ ID NO: 36209 - DNA, 25 bp, Artificial
  probe
  misc_feature (1)..(25): SEQ ID NO: 3144; WAN0249W7_at; Start 89; Stop 113
cacactatacaaaaagaggccgata

SEQ ID NO: 36210 - DNA, 25 bp, Artificial
  probe
  misc_feature (1)..(25): SEQ ID NO: 3144; WAN0249W7_at; Start 77; Stop 101
gagcctactcatcacactatacaaa

SEQ ID NO: 36211 - DNA, 25 bp, Artificial
  probe
  misc_feature (1)..(25): SEQ ID NO: 3144; WAN0249W7_at; Start 107; Stop 131
gccgataggaacgattttcagcctc

SEQ ID NO: 36212 - DNA, 25 bp, Artificial
  probe
  misc_feature (1)..(25): SEQ ID NO: 3144; WAN0249W7_at; Start 62; Stop 86
ttaaaacttgaacctgagcctactc

SEQ ID NO: 36213 - DNA, 25 bp, Artificial
  probe
  misc_feature (1)..(25): SEQ ID NO: 3144; WAN0249W7_at; Start 21; Stop 45
tagaatactcgctctttagtatatc

SEQ ID NO: 36214 - DNA, 25 bp, Artificial
  probe
  misc_feature (1)..(25): SEQ ID NO: 3144; WAN0249W7_at; Start 41; Stop 65
atatcatatttgcttggttttttaa

SEQ ID NO: 36215 - DNA, 25 bp, Artificial
  probe
  misc_feature (1)..(25): SEQ ID NO: 3144; WAN0249W7_at; Start 85; Stop 109
tcatcacactatacaaaaagaggcc

SEQ ID NO: 36216 - DNA, 25 bp, Artificial
  probe
  misc_feature (1)..(25): SEQ ID NO: 3144; WAN0249W7_at; Start 106; Stop 130
ggccgataggaacgattttcagcct

SEQ ID NO: 36217 - DNA, 25 bp, Artificial
  probe
  misc_feature (1)..(25): SEQ ID NO: 3144; WAN0249W7_at; Start 114; Stop 138
ggaacgattttcagcctctttgatt

SEQ ID NO: 36218 - DNA, 25 bp, Artificial
  probe
  misc_feature (1)..(25): SEQ ID NO: 3144; WAN0249W7_at; Start 112; Stop 136
taggaacgattttcagcctctttga

SEQ ID NO: 36219 - DNA, 25 bp, Artificial
  probe
  misc_feature (1)..(25): SEQ ID NO: 3144; WAN0249W7_at; Start 102; Stop 126
aagaggccgataggaacgattttca

SEQ ID NO: 36220 - DNA, 25 bp, Artificial
  probe
  misc_feature (1)..(25): SEQ ID NO: 3144; WAN0249W7_at; Start 66; Stop 90
aacttgaacctgagcctactcatca

SEQ ID NO: 36221 - DNA, 25 bp, Artificial
  probe
  misc_feature (1)..(25): SEQ ID NO: 3144; WAN0249W7_at; Start 119; Stop 143
gattttcagcctctttgatttttta

SEQ ID NO: 36222 - DNA, 25 bp, Artificial
  probe
  misc_feature (1)..(25): SEQ ID NO: 3144; WAN0249W7_at; Start 104; Stop 128
gaggccgataggaacgattttcagc

SEQ ID NO: 36223 - DNA, 25 bp, Artificial
  probe
  misc_feature (1)..(25): SEQ ID NO: 3144; WAN0249W7_at; Start 86; Stop 110
catcacactatacaaaaagaggccg

SEQ ID NO: 36224 - DNA, 25 bp, Artificial
  probe
  misc_feature (1)..(25): SEQ ID NO: 3144; WAN0249W7_at; Start 63; Stop 87
taaaacttgaacctgagcctactca

SEQ ID NO: 36225 - DNA, 25 bp, Artificial
  probe
  misc_feature (1)..(25): SEQ ID NO: 3144; WAN0249W7_at; Start 110; Stop 134
gataggaacgattttcagcctcttt

SEQ ID NO: 36226 - DNA, 25 bp, Artificial
  probe
  misc_feature (1)..(25): SEQ ID NO: 3144; WAN0249W7_at; Start 108; Stop 132
ccgataggaacgattttcagcctct

SEQ ID NO: 36227 - DNA, 25 bp, Artificial
  probe
  misc_feature (1)..(25): SEQ ID NO: 3144; WAN0249W7_at; Start 88; Stop 112
tcacactatacaaaaagaggccgat

SEQ ID NO: 36228 - DNA, 25 bp, Artificial
  probe
  misc_feature (1)..(25): SEQ ID NO: 3144; WAN0249W7_at; Start 71; Stop 95
gaacctgagcctactcatcacacta

SEQ ID NO: 36229 - DNA, 25 bp, Artificial
  probe
  misc_feature (1)..(25): SEQ ID NO: 3144; WAN0249W7_at; Start 123; Stop 147
ttcagcctctttgattttttataaa

SEQ ID NO: 36230 - DNA, 25 bp, Artificial
  probe
  misc_feature (1)..(25): SEQ ID NO: 3144; WAN0249W7_at; Start 33; Stop 57
tctttagtatatcatatttgcttgg

SEQ ID NO: 36231 - DNA, 25 bp, Artificial
  probe
  misc_feature (1)..(25): SEQ ID NO: 3144; WAN0249W7_at; Start 29; Stop 53
tcgctctttagtatatcatatttgc

SEQ ID NO: 36232 - DNA, 25 bp, Artificial
  probe
  misc_feature (1)..(25): SEQ ID NO: 3144; WAN0249W7_at; Start 115; Stop 139
gaacgattttcagcctctttgattt

SEQ ID NO: 36233 - DNA, 25 bp, Artificial
  probe
  misc_feature (1)..(25): SEQ ID NO: 3144; WAN0249W7_at; Start 23; Stop 47
gaatactcgctctttagtatatcat

SEQ ID NO: 36234 - DNA, 25 bp, Artificial
  probe
  misc_feature (1)..(25): SEQ ID NO: 3144; WAN0249W7_at; Start 7; Stop 31
tgtcctaattctactagaatactcg

SEQ ID NO: 36235 - DNA, 25 bp, Artificial
  probe
  misc_feature (1)..(25): SEQ ID NO: 3144; WAN0249W7_at; Start 91; Stop 115
cactatacaaaaagaggccgatagg

SEQ ID NO: 36236 - DNA, 25 bp, Artificial
  probe
  misc_feature (1)..(25): SEQ ID NO: 3144; WAN0249W7_at; Start 64; Stop 88
aaaacttgaacctgagcctactcat

SEQ ID NO: 36237 - DNA, 25 bp, Artificial
  probe
  misc_feature (1)..(25): SEQ ID NO: 3144; WAN0249W7_at; Start 12; Stop 36
taattctactagaatactcgctctt

SEQ ID NO: 36238 - DNA, 25 bp, Artificial
  probe
  misc_feature (1)..(25): SEQ ID NO: 3144; WAN0249W7_at; Start 1; Stop 25
attatttgtcctaattctactagaa

SEQ ID NO: 36239 - DNA, 25 bp, Artificial
  probe
  misc_feature (1)..(25): SEQ ID NO: 3144; WAN0249W7_at; Start 94; Stop 118
tatacaaaaagaggccgataggaac

SEQ ID NO: 36240 - DNA, 25 bp, Artificial
  probe
  misc_feature (1)..(25): SEQ ID NO: 3144; WAN0249W7_at; Start 70; Stop 94
tgaacctgagcctactcatcacact

SEQ ID NO: 36241 - DNA, 25 bp, Artificial
  probe
  misc_feature (1)..(25): SEQ ID NO: 3555; WAN0249W8_at; Start 34; Stop 58
aacaactagcatggtataataatat

SEQ ID NO: 36242 - DNA, 25 bp, Artificial
  probe
  misc_feature (1)..(25): SEQ ID NO: 3555; WAN0249W8_at; Start 65; Stop 89
aaattttgaattatgaggaagacta

SEQ ID NO: 36243 - DNA, 25 bp, Artificial
  probe
  misc_feature (1)..(25): SEQ ID NO: 3555; WAN0249W8_at; Start 50; Stop 74
taataatatgcaggaaaattttgaa

SEQ ID NO: 36244 - DNA, 25 bp, Artificial
  probe
  misc_feature (1)..(25): SEQ ID NO: 3555; WAN0249W8_at; Start 22; Stop 46
aaatccatttttaacaactagcatg

SEQ ID NO: 36245 - DNA, 25 bp, Artificial
  probe
  misc_feature (1)..(25): SEQ ID NO: 3555; WAN0249W8_at; Start 4; Stop 28
gatgattatcgtatttctaaatcca

SEQ ID NO: 36246 - DNA, 25 bp, Artificial
  probe
  misc_feature (1)..(25): SEQ ID NO: 3555; WAN0249W8_at; Start 29; Stop 53
tttttaacaactagcatggtataat

SEQ ID NO: 36247 - DNA, 25 bp, Artificial
  probe
  misc_feature (1)..(25): SEQ ID NO: 3555; WAN0249W8_at; Start 30; Stop 54
ttttaacaactagcatggtataata

SEQ ID NO: 36248 - DNA, 25 bp, Artificial
  probe
  misc_feature (1)..(25): SEQ ID NO: 3555; WAN0249W8_at; Start 28; Stop 52
atttttaacaactagcatggtataa

SEQ ID NO: 36249 - DNA, 25 bp, Artificial
  probe
  misc_feature (1)..(25): SEQ ID NO: 3555; WAN0249W8_at; Start 27; Stop 51
catttttaacaactagcatggtata

SEQ ID NO: 36250 - DNA, 25 bp, Artificial
  probe
  misc_feature (1)..(25): SEQ ID NO: 3555; WAN0249W8_at; Start 43; Stop 67
catggtataataatatgcaggaaaa

SEQ ID NO: 36251 - DNA, 25 bp, Artificial
  probe
  misc_feature (1)..(25): SEQ ID NO: 3555; WAN0249W8_at; Start 46; Stop 70
ggtataataatatgcaggaaaattt

SEQ ID NO: 36252 - DNA, 25 bp, Artificial
  probe
  misc_feature (1)..(25): SEQ ID NO: 3555; WAN0249W8_at; Start 48; Stop 72
tataataatatgcaggaaaattttg

SEQ ID NO: 36253 - DNA, 25 bp, Artificial
  probe
  misc_feature (1)..(25): SEQ ID NO: 3555; WAN0249W8_at; Start 39; Stop 63
ctagcatggtataataatatgcagg

SEQ ID NO: 36254 - DNA, 25 bp, Artificial
  probe
  misc_feature (1)..(25): SEQ ID NO: 3555; WAN0249W8_at; Start 42; Stop 66
gcatggtataataatatgcaggaaa

SEQ ID NO: 36255 - DNA, 25 bp, Artificial
  probe
  misc_feature (1)..(25): SEQ ID NO: 3555; WAN0249W8_at; Start 60; Stop 84
caggaaaattttgaattatgaggaa

SEQ ID NO: 36256 - DNA, 25 bp, Artificial
  probe
  misc_feature (1)..(25): SEQ ID NO: 3555; WAN0249W8_at; Start 45; Stop 69
tggtataataatatgcaggaaaatt

SEQ ID NO: 36257 - DNA, 25 bp, Artificial
  probe
  misc_feature (1)..(25): SEQ ID NO: 3555; WAN0249W8_at; Start 7; Stop 31
gattatcgtatttctaaatccattt

SEQ ID NO: 36258 - DNA, 25 bp, Artificial
  probe
  misc_feature (1)..(25): SEQ ID NO: 3555; WAN0249W8_at; Start 23; Stop 47
aatccatttttaacaactagcatgg

SEQ ID NO: 36259 - DNA, 25 bp, Artificial
  probe
  misc_feature (1)..(25): SEQ ID NO: 3555; WAN0249W8_at; Start 19; Stop 43
tctaaatccatttttaacaactagc

SEQ ID NO: 36260 - DNA, 25 bp, Artificial
  probe
  misc_feature (1)..(25): SEQ ID NO: 3555; WAN0249W8_at; Start 41; Stop 65
agcatggtataataatatgcaggaa

SEQ ID NO: 36261 - DNA, 25 bp, Artificial
  probe
  misc_feature (1)..(25): SEQ ID NO: 3555; WAN0249W8_at; Start 1; Stop 25
gaagatgattatcgtatttctaaat

SEQ ID NO: 36262 - DNA, 25 bp, Artificial
  probe
  misc_feature (1)..(25): SEQ ID NO: 3555; WAN0249W8_at; Start 26; Stop 50
ccatttttaacaactagcatggtat

SEQ ID NO: 36263 - DNA, 25 bp, Artificial
  probe
  misc_feature (1)..(25): SEQ ID NO: 3555; WAN0249W8_at; Start 59; Stop 83
gcaggaaaattttgaattatgagga

SEQ ID NO: 36264 - DNA, 25 bp, Artificial
  probe
  misc_feature (1)..(25): SEQ ID NO: 3555; WAN0249W8_at; Start 37; Stop 61
aactagcatggtataataatatgca

SEQ ID NO: 36265 - DNA, 25 bp, Artificial
  probe
  misc_feature (1)..(25): SEQ ID NO: 3555; WAN0249W8_at; Start 35; Stop 59
acaactagcatggtataataatatg

SEQ ID NO: 36266 - DNA, 25 bp, Artificial
  probe
  misc_feature (1)..(25): SEQ ID NO: 3555; WAN0249W8_at; Start 40; Stop 64
tagcatggtataataatatgcagga

SEQ ID NO: 36267 - DNA, 25 bp, Artificial
  probe
  misc_feature (1)..(25): SEQ ID NO: 3555; WAN0249W8_at; Start 25; Stop 49
tccatttttaacaactagcatggta

SEQ ID NO: 36268 - DNA, 25 bp, Artificial
  probe
  misc_feature (1)..(25): SEQ ID NO: 3555; WAN0249W8_at; Start 31; Stop 55
tttaacaactagcatggtataataa

SEQ ID NO: 36269 - DNA, 25 bp, Artificial
  probe
  misc_feature (1)..(25): SEQ ID NO: 3555; WAN0249W8_at; Start 63; Stop 87
gaaaattttgaattatgaggaagac

SEQ ID NO: 36270 - DNA, 25 bp, Artificial
  probe
  misc_feature (1)..(25): SEQ ID NO: 3555; WAN0249W8_at; Start 58; Stop 82
tgcaggaaaattttgaattatgagg

SEQ ID NO: 36271 - DNA, 25 bp, Artificial
  probe
  misc_feature (1)..(25): SEQ ID NO: 3555; WAN0249W8_at; Start 20; Stop 44
ctaaatccatttttaacaactagca

SEQ ID NO: 36272 - DNA, 25 bp, Artificial
  probe
  misc_feature (1)..(25): SEQ ID NO: 3555; WAN0249W8_at; Start 66; Stop 90
aattttgaattatgaggaagactag

SEQ ID NO: 36273 - DNA, 25 bp, Artificial
  probe
  misc_feature (1)..(25): SEQ ID NO: 3555; WAN0249W8_at; Start 36; Stop 60
caactagcatggtataataatatgc

SEQ ID NO: 36274 - DNA, 25 bp, Artificial
  probe
  misc_feature (1)..(25): SEQ ID NO: 3555; WAN0249W8_at; Start 33; Stop 57
taacaactagcatggtataataata

SEQ ID NO: 36275 - DNA, 25 bp, Artificial
  probe
  misc_feature (1)..(25): SEQ ID NO: 3285; WAN0249W9_at; Start 8; Stop 32
tcctcataattcaaaattttcctgc

SEQ ID NO: 36276 - DNA, 25 bp, Artificial
  probe
  misc_feature (1)..(25): SEQ ID NO: 3285; WAN0249W9_at; Start 28; Stop 52
cctgcatattattataccatgctag

SEQ ID NO: 36277 - DNA, 25 bp, Artificial
  probe
  misc_feature (1)..(25): SEQ ID NO: 3285; WAN0249W9_at; Start 24; Stop 48
ttttcctgcatattattataccatg

SEQ ID NO: 36278 - DNA, 25 bp, Artificial
  probe
  misc_feature (1)..(25): SEQ ID NO: 3285; WAN0249W9_at; Start 64; Stop 88
ggatttagaaatacgataatcatct

SEQ ID NO: 36279 - DNA, 25 bp, Artificial
  probe
  misc_feature (1)..(25): SEQ ID NO: 3285; WAN0249W9_at; Start 34; Stop 58
tattattataccatgctagttgtta

SEQ ID NO: 36280 - DNA, 25 bp, Artificial
  probe
  misc_feature (1)..(25): SEQ ID NO: 3285; WAN0249W9_at; Start 60; Stop 84
aaatggatttagaaatacgataatc

SEQ ID NO: 36281 - DNA, 25 bp, Artificial
  probe
  misc_feature (1)..(25): SEQ ID NO: 3285; WAN0249W9_at; Start 45; Stop 69
catgctagttgttaaaaatggattt

SEQ ID NO: 36282 - DNA, 25 bp, Artificial
  probe
  misc_feature (1)..(25): SEQ ID NO: 3285; WAN0249W9_at; Start 25; Stop 49
tttcctgcatattattataccatgc

SEQ ID NO: 36283 - DNA, 25 bp, Artificial
  probe
  misc_feature (1)..(25): SEQ ID NO: 3285; WAN0249W9_at; Start 29; Stop 53
ctgcatattattataccatgctagt

SEQ ID NO: 36284 - DNA, 25 bp, Artificial
  probe
  misc_feature (1)..(25): SEQ ID NO: 3285; WAN0249W9_at; Start 9; Stop 33
cctcataattcaaaattttcctgca

SEQ ID NO: 36285 - DNA, 25 bp, Artificial
  probe
  misc_feature (1)..(25): SEQ ID NO: 3285; WAN0249W9_at; Start 41; Stop 65
ataccatgctagttgttaaaaatgg

SEQ ID NO: 36286 - DNA, 25 bp, Artificial
  probe
  misc_feature (1)..(25): SEQ ID NO: 3285; WAN0249W9_at; Start 32; Stop 56
catattattataccatgctagttgt

SEQ ID NO: 36287 - DNA, 25 bp, Artificial
  probe
  misc_feature (1)..(25): SEQ ID NO: 3285; WAN0249W9_at; Start 10; Stop 34
ctcataattcaaaattttcctgcat

SEQ ID NO: 36288 - DNA, 25 bp, Artificial
  probe
  misc_feature (1)..(25): SEQ ID NO: 3285; WAN0249W9_at; Start 35; Stop 59
attattataccatgctagttgttaa

SEQ ID NO: 36289 - DNA, 25 bp, Artificial
  probe
  misc_feature (1)..(25): SEQ ID NO: 3285; WAN0249W9_at; Start 27; Stop 51
tcctgcatattattataccatgcta

SEQ ID NO: 36290 - DNA, 25 bp, Artificial
  probe
  misc_feature (1)..(25): SEQ ID NO: 3285; WAN0249W9_at; Start 66; Stop 90
atttagaaatacgataatcatcttc

SEQ ID NO: 36291 - DNA, 25 bp, Artificial
  probe
  misc_feature (1)..(25): SEQ ID NO: 3285; WAN0249W9_at; Start 1; Stop 25
ctagtcttcctcataattcaaaatt

SEQ ID NO: 36292 - DNA, 25 bp, Artificial
  probe
  misc_feature (1)..(25): SEQ ID NO: 3285; WAN0249W9_at; Start 38; Stop 62
attataccatgctagttgttaaaaa

SEQ ID NO: 36293 - DNA, 25 bp, Artificial
  probe
  misc_feature (1)..(25): SEQ ID NO: 3285; WAN0249W9_at; Start 12; Stop 36
cataattcaaaattttcctgcatat

SEQ ID NO: 36294 - DNA, 25 bp, Artificial
  probe
  misc_feature (1)..(25): SEQ ID NO: 3285; WAN0249W9_at; Start 65; Stop 89
gatttagaaatacgataatcatctt

SEQ ID NO: 36295 - DNA, 25 bp, Artificial
  probe
  misc_feature (1)..(25): SEQ ID NO: 3285; WAN0249W9_at; Start 47; Stop 71
tgctagttgttaaaaatggatttag

SEQ ID NO: 36296 - DNA, 25 bp, Artificial
  probe
  misc_feature (1)..(25): SEQ ID NO: 3285; WAN0249W9_at; Start 11; Stop 35
tcataattcaaaattttcctgcata

SEQ ID NO: 36297 - DNA, 25 bp, Artificial
  probe
  misc_feature (1)..(25): SEQ ID NO: 3285; WAN0249W9_at; Start 37; Stop 61
tattataccatgctagttgttaaaa

SEQ ID NO: 36298 - DNA, 25 bp, Artificial
  probe
  misc_feature (1)..(25): SEQ ID NO: 3285; WAN0249W9_at; Start 2; Stop 26
tagtcttcctcataattcaaaattt

SEQ ID NO: 36299 - DNA, 25 bp, Artificial
  probe
  misc_feature (1)..(25): SEQ ID NO: 3285; WAN0249W9_at; Start 48; Stop 72
gctagttgttaaaaatggatttaga

SEQ ID NO: 36300 - DNA, 25 bp, Artificial
  probe
  misc_feature (1)..(25): SEQ ID NO: 3285; WAN0249W9_at; Start 26; Stop 50
ttcctgcatattattataccatgct

SEQ ID NO: 36301 - DNA, 25 bp, Artificial
  probe
  misc_feature (1)..(25): SEQ ID NO: 3285; WAN0249W9_at; Start 31; Stop 55
gcatattattataccatgctagttg

SEQ ID NO: 36302 - DNA, 25 bp, Artificial
  probe
  misc_feature (1)..(25): SEQ ID NO: 3285; WAN0249W9_at; Start 22; Stop 46
aattttcctgcatattattatacca

SEQ ID NO: 36303 - DNA, 25 bp, Artificial
  probe
  misc_feature (1)..(25): SEQ ID NO: 3285; WAN0249W9_at; Start 44; Stop 68
ccatgctagttgttaaaaatggatt

SEQ ID NO: 36304 - DNA, 25 bp, Artificial
  probe
  misc_feature (1)..(25): SEQ ID NO: 3285; WAN0249W9_at; Start 57; Stop 81
taaaaatggatttagaaatacgata

SEQ ID NO: 36305 - DNA, 25 bp, Artificial
  probe
  misc_feature (1)..(25): SEQ ID NO: 3285; WAN0249W9_at; Start 63; Stop 87
tggatttagaaatacgataatcatc

SEQ ID NO: 36306 - DNA, 25 bp, Artificial
  probe
  misc_feature (1)..(25): SEQ ID NO: 3285; WAN0249W9_at; Start 42; Stop 66
taccatgctagttgttaaaaatgga

SEQ ID NO: 36307 - DNA, 25 bp, Artificial
  probe
  misc_feature (1)..(25): SEQ ID NO: 3285; WAN0249W9_at; Start 43; Stop 67
accatgctagttgttaaaaatggat

SEQ ID NO: 36308 - DNA, 25 bp, Artificial
  probe
  misc_feature (1)..(25): SEQ ID NO: 3285; WAN0249W9_at; Start 40; Stop 64
tataccatgctagttgttaaaaatg

SEQ ID NO: 36309 - DNA, 25 bp, Artificial
  probe
  misc_feature (1)..(25): SEQ ID NO: 3206; WAN0249WA_at; Start 7; Stop 31
gctttcttttttgctcttagagagt

SEQ ID NO: 36310 - DNA, 25 bp, Artificial
  probe
  misc_feature (1)..(25): SEQ ID NO: 3206; WAN0249WA_at; Start 93; Stop 117
aatttaggaaaaaagcaagcacgat

SEQ ID NO: 36311 - DNA, 25 bp, Artificial
  probe
  misc_feature (1)..(25): SEQ ID NO: 3206; WAN0249WA_at; Start 22; Stop 46
cttagagagtttttacaagcagctt

SEQ ID NO: 36312 - DNA, 25 bp, Artificial
  probe
  misc_feature (1)..(25): SEQ ID NO: 3206; WAN0249WA_at; Start 1; Stop 25
cacagagctttcttttttgctctta

SEQ ID NO: 36313 - DNA, 25 bp, Artificial
  probe
  misc_feature (1)..(25): SEQ ID NO: 3206; WAN0249WA_at; Start 137; Stop 161
tattttgtgaatagctatgcctatg

SEQ ID NO: 36314 - DNA, 25 bp, Artificial
  probe
  misc_feature (1)..(25): SEQ ID NO: 3206; WAN0249WA_at; Start 71; Stop 95
caaactcaaaaaatggctgggaaat

SEQ ID NO: 36315 - DNA, 25 bp, Artificial
  probe
  misc_feature (1)..(25): SEQ ID NO: 3206; WAN0249WA_at; Start 75; Stop 99
ctcaaaaaatggctgggaaatttag

SEQ ID NO: 36316 - DNA, 25 bp, Artificial
  probe
  misc_feature (1)..(25): SEQ ID NO: 3206; WAN0249WA_at; Start 64; Stop 88
gaatagacaaactcaaaaaatggct

SEQ ID NO: 36317 - DNA, 25 bp, Artificial
  probe
  misc_feature (1)..(25): SEQ ID NO: 3206; WAN0249WA_at; Start 97; Stop 121
taggaaaaaagcaagcacgattaaa

SEQ ID NO: 36318 - DNA, 25 bp, Artificial
  probe
  misc_feature (1)..(25): SEQ ID NO: 3206; WAN0249WA_at; Start 21; Stop 45
tcttagagagtttttacaagcagct

SEQ ID NO: 36319 - DNA, 25 bp, Artificial
  probe
  misc_feature (1)..(25): SEQ ID NO: 3206; WAN0249WA_at; Start 20; Stop 44
ctcttagagagtttttacaagcagc

SEQ ID NO: 36320 - DNA, 25 bp, Artificial
  probe
  misc_feature (1)..(25): SEQ ID NO: 3206; WAN0249WA_at; Start 26; Stop 50
gagagtttttacaagcagcttataa

SEQ ID NO: 36321 - DNA, 25 bp, Artificial
  probe
  misc_feature (1)..(25): SEQ ID NO: 3206; WAN0249WA_at; Start 63; Stop 87
tgaatagacaaactcaaaaaatggc

SEQ ID NO: 36322 - DNA, 25 bp, Artificial
  probe
  misc_feature (1)..(25): SEQ ID NO: 3206; WAN0249WA_at; Start 139; Stop 163
ttttgtgaatagctatgcctatgtt

SEQ ID NO: 36323 - DNA, 25 bp, Artificial
  probe
  misc_feature (1)..(25): SEQ ID NO: 3206; WAN0249WA_at; Start 104; Stop 128
aaagcaagcacgattaaattttttg

SEQ ID NO: 36324 - DNA, 25 bp, Artificial
  probe
  misc_feature (1)..(25): SEQ ID NO: 3206; WAN0249WA_at; Start 134; Stop 158
taatattttgtgaatagctatgcct

SEQ ID NO: 36325 - DNA, 25 bp, Artificial
  probe
  misc_feature (1)..(25): SEQ ID NO: 3206; WAN0249WA_at; Start 35; Stop 59
tacaagcagcttataaaataagaat

SEQ ID NO: 36326 - DNA, 25 bp, Artificial
  probe
  misc_feature (1)..(25): SEQ ID NO: 3206; WAN0249WA_at; Start 28; Stop 52
gagtttttacaagcagcttataaaa

SEQ ID NO: 36327 - DNA, 25 bp, Artificial
  probe
  misc_feature (1)..(25): SEQ ID NO: 3206; WAN0249WA_at; Start 107; Stop 131
gcaagcacgattaaattttttgtgt

SEQ ID NO: 36328 - DNA, 25 bp, Artificial
  probe
  misc_feature (1)..(25): SEQ ID NO: 3206; WAN0249WA_at; Start 68; Stop 92
agacaaactcaaaaaatggctggga

SEQ ID NO: 36329 - DNA, 25 bp, Artificial
  probe
  misc_feature (1)..(25): SEQ ID NO: 3206; WAN0249WA_at; Start 111; Stop 135
gcacgattaaattttttgtgttata

SEQ ID NO: 36330 - DNA, 25 bp, Artificial
  probe
  misc_feature (1)..(25): SEQ ID NO: 3206; WAN0249WA_at; Start 56; Stop 80
gaatttctgaatagacaaactcaaa

SEQ ID NO: 36331 - DNA, 25 bp, Artificial
  probe
  misc_feature (1)..(25): SEQ ID NO: 3206; WAN0249WA_at; Start 67; Stop 91
tagacaaactcaaaaaatggctggg

SEQ ID NO: 36332 - DNA, 25 bp, Artificial
  probe
  misc_feature (1)..(25): SEQ ID NO: 3206; WAN0249WA_at; Start 69; Stop 93
gacaaactcaaaaaatggctgggaa

SEQ ID NO: 36333 - DNA, 25 bp, Artificial
  probe
  misc_feature (1)..(25): SEQ ID NO: 3206; WAN0249WA_at; Start 65; Stop 89
aatagacaaactcaaaaaatggctg

SEQ ID NO: 36334 - DNA, 25 bp, Artificial
  probe
  misc_feature (1)..(25): SEQ ID NO: 3206; WAN0249WA_at; Start 5; Stop 29
gagctttcttttttgctcttagaga

SEQ ID NO: 36335 - DNA, 25 bp, Artificial
  probe
  misc_feature (1)..(25): SEQ ID NO: 3206; WAN0249WA_at; Start 95; Stop 119
tttaggaaaaaagcaagcacgatta

SEQ ID NO: 36336 - DNA, 25 bp, Artificial
  probe
  misc_feature (1)..(25): SEQ ID NO: 3206; WAN0249WA_at; Start 66; Stop 90
atagacaaactcaaaaaatggctgg

SEQ ID NO: 36337 - DNA, 25 bp, Artificial
  probe
  misc_feature (1)..(25): SEQ ID NO: 3206; WAN0249WA_at; Start 98; Stop 122
aggaaaaaagcaagcacgattaaat

SEQ ID NO: 36338 - DNA, 25 bp, Artificial
  probe
  misc_feature (1)..(25): SEQ ID NO: 3206; WAN0249WA_at; Start 24; Stop 48
tagagagtttttacaagcagcttat

SEQ ID NO: 36339 - DNA, 25 bp, Artificial
  probe
  misc_feature (1)..(25): SEQ ID NO: 3206; WAN0249WA_at; Start 53; Stop 77
taagaatttctgaatagacaaactc

SEQ ID NO: 36340 - DNA, 25 bp, Artificial
  probe
  misc_feature (1)..(25): SEQ ID NO: 3206; WAN0249WA_at; Start 19; Stop 43
gctcttagagagtttttacaagcag

SEQ ID NO: 36341 - DNA, 25 bp, Artificial
  probe
  misc_feature (1)..(25): SEQ ID NO: 3206; WAN0249WA_at; Start 142; Stop 166
tgtgaatagctatgcctatgtttag

SEQ ID NO: 36342 - DNA, 25 bp, Artificial
  probe
  misc_feature (1)..(25): SEQ ID NO: 3206; WAN0249WA_at; Start 40; Stop 64
gcagcttataaaataagaatttctg

SEQ ID NO: 36343 - DNA, 25 bp, Artificial
  probe
  misc_feature (1)..(25): SEQ ID NO: 3270; WAN0249WB_at; Start 72; Stop 96
atttcccagccattttttgagtttg

SEQ ID NO: 36344 - DNA, 25 bp, Artificial
  probe
  misc_feature (1)..(25): SEQ ID NO: 3270; WAN0249WB_at; Start 142; Stop 166
taagagcaaaaaagaaagctctgtg

SEQ ID NO: 36345 - DNA, 25 bp, Artificial
  probe
  misc_feature (1)..(25): SEQ ID NO: 3270; WAN0249WB_at; Start 37; Stop 61
cacaaaaaatttaatcgtgcttgct

SEQ ID NO: 36346 - DNA, 25 bp, Artificial
  probe
  misc_feature (1)..(25): SEQ ID NO: 3270; WAN0249WB_at; Start 2; Stop 26
taaacataggcatagctattcacaa

SEQ ID NO: 36347 - DNA, 25 bp, Artificial
  probe
  misc_feature (1)..(25): SEQ ID NO: 3270; WAN0249WB_at; Start 123; Stop 147
gctgcttgtaaaaactctctaagag

SEQ ID NO: 36348 - DNA, 25 bp, Artificial
  probe
  misc_feature (1)..(25): SEQ ID NO: 3270; WAN0249WB_at; Start 82; Stop 106
cattttttgagtttgtctattcaga

SEQ ID NO: 36349 - DNA, 25 bp, Artificial
  probe
  misc_feature (1)..(25): SEQ ID NO: 3270; WAN0249WB_at; Start 126; Stop 150
gcttgtaaaaactctctaagagcaa

SEQ ID NO: 36350 - DNA, 25 bp, Artificial
  probe
  misc_feature (1)..(25): SEQ ID NO: 3270; WAN0249WB_at; Start 77; Stop 101
ccagccattttttgagtttgtctat

SEQ ID NO: 36351 - DNA, 25 bp, Artificial
  probe
  misc_feature (1)..(25): SEQ ID NO: 3270; WAN0249WB_at; Start 117; Stop 141
ttataagctgcttgtaaaaactctc

SEQ ID NO: 36352 - DNA, 25 bp, Artificial
  probe
  misc_feature (1)..(25): SEQ ID NO: 3270; WAN0249WB_at; Start 1; Stop 25
ctaaacataggcatagctattcaca

SEQ ID NO: 36353 - DNA, 25 bp, Artificial
  probe
  misc_feature (1)..(25): SEQ ID NO: 3270; WAN0249WB_at; Start 90; Stop 114
gagtttgtctattcagaaattctta

SEQ ID NO: 36354 - DNA, 25 bp, Artificial
  probe
  misc_feature (1)..(25): SEQ ID NO: 3270; WAN0249WB_at; Start 122; Stop 146
agctgcttgtaaaaactctctaaga

SEQ ID NO: 36355 - DNA, 25 bp, Artificial
  probe
  misc_feature (1)..(25): SEQ ID NO: 3270; WAN0249WB_at; Start 49; Stop 73
aatcgtgcttgcttttttcctaaat

SEQ ID NO: 36356 - DNA, 25 bp, Artificial
  probe
  misc_feature (1)..(25): SEQ ID NO: 3270; WAN0249WB_at; Start 121; Stop 145
aagctgcttgtaaaaactctctaag

SEQ ID NO: 36357 - DNA, 25 bp, Artificial
  probe
  misc_feature (1)..(25): SEQ ID NO: 3270; WAN0249WB_at; Start 74; Stop 98
ttcccagccattttttgagtttgtc

SEQ ID NO: 36358 - DNA, 25 bp, Artificial
  probe
  misc_feature (1)..(25): SEQ ID NO: 3270; WAN0249WB_at; Start 4; Stop 28
aacataggcatagctattcacaaaa

SEQ ID NO: 36359 - DNA, 25 bp, Artificial
  probe
  misc_feature (1)..(25): SEQ ID NO: 3270; WAN0249WB_at; Start 136; Stop 160
actctctaagagcaaaaaagaaagc

SEQ ID NO: 36360 - DNA, 25 bp, Artificial
  probe
  misc_feature (1)..(25): SEQ ID NO: 3270; WAN0249WB_at; Start 32; Stop 56
tataacacaaaaaatttaatcgtgc

SEQ ID NO: 36361 - DNA, 25 bp, Artificial
  probe
  misc_feature (1)..(25): SEQ ID NO: 3270; WAN0249WB_at; Start 76; Stop 100
cccagccattttttgagtttgtcta

SEQ ID NO: 36362 - DNA, 25 bp, Artificial
  probe
  misc_feature (1)..(25): SEQ ID NO: 3270; WAN0249WB_at; Start 48; Stop 72
taatcgtgcttgcttttttcctaaa

SEQ ID NO: 36363 - DNA, 25 bp, Artificial
  probe
  misc_feature (1)..(25): SEQ ID NO: 3270; WAN0249WB_at; Start 10; Stop 34
ggcatagctattcacaaaatattat

SEQ ID NO: 36364 - DNA, 25 bp, Artificial
  probe
  misc_feature (1)..(25): SEQ ID NO: 3270; WAN0249WB_at; Start 118; Stop 142
tataagctgcttgtaaaaactctct

SEQ ID NO: 36365 - DNA, 25 bp, Artificial
  probe
  misc_feature (1)..(25): SEQ ID NO: 3270; WAN0249WB_at; Start 6; Stop 30
cataggcatagctattcacaaaata

SEQ ID NO: 36366 - DNA, 25 bp, Artificial
  probe
  misc_feature (1)..(25): SEQ ID NO: 3270; WAN0249WB_at; Start 80; Stop 104
gccattttttgagtttgtctattca

SEQ ID NO: 36367 - DNA, 25 bp, Artificial
  probe
  misc_feature (1)..(25): SEQ ID NO: 3270; WAN0249WB_at; Start 50; Stop 74
atcgtgcttgcttttttcctaaatt

SEQ ID NO: 36368 - DNA, 25 bp, Artificial
  probe
  misc_feature (1)..(25): SEQ ID NO: 3270; WAN0249WB_at; Start 120; Stop 144
taagctgcttgtaaaaactctctaa

SEQ ID NO: 36369 - DNA, 25 bp, Artificial
  probe
  misc_feature (1)..(25): SEQ ID NO: 3270; WAN0249WB_at; Start 129; Stop 153
tgtaaaaactctctaagagcaaaaa

SEQ ID NO: 36370 - DNA, 25 bp, Artificial
  probe
  misc_feature (1)..(25): SEQ ID NO: 3270; WAN0249WB_at; Start 124; Stop 148
ctgcttgtaaaaactctctaagagc

SEQ ID NO: 36371 - DNA, 25 bp, Artificial
  probe
  misc_feature (1)..(25): SEQ ID NO: 3270; WAN0249WB_at; Start 68; Stop 92
ctaaatttcccagccattttttgag

SEQ ID NO: 36372 - DNA, 25 bp, Artificial
  probe
  misc_feature (1)..(25): SEQ ID NO: 3270; WAN0249WB_at; Start 138; Stop 162
tctctaagagcaaaaaagaaagctc

SEQ ID NO: 36373 - DNA, 25 bp, Artificial
  probe
  misc_feature (1)..(25): SEQ ID NO: 3270; WAN0249WB_at; Start 8; Stop 32
taggcatagctattcacaaaatatt

SEQ ID NO: 36374 - DNA, 25 bp, Artificial
  probe
  misc_feature (1)..(25): SEQ ID NO: 3270; WAN0249WB_at; Start 39; Stop 63
caaaaaatttaatcgtgcttgcttt

SEQ ID NO: 36375 - DNA, 25 bp, Artificial
  probe
  misc_feature (1)..(25): SEQ ID NO: 3270; WAN0249WB_at; Start 127; Stop 151
cttgtaaaaactctctaagagcaaa

SEQ ID NO: 36376 - DNA, 25 bp, Artificial
  probe
  misc_feature (1)..(25): SEQ ID NO: 3270; WAN0249WB_at; Start 140; Stop 164
tctaagagcaaaaaagaaagctctg

SEQ ID NO: 36377 - DNA, 25 bp, Artificial
  probe
  misc_feature (1)..(25): SEQ ID NO: 412; WAN0249WE_at; Start 3; Stop 27
aatcaaagagaaacttagcaagcta

SEQ ID NO: 36378 - DNA, 25 bp, Artificial
  probe
  misc_feature (1)..(25): SEQ ID NO: 412; WAN0249WE_at; Start 26; Stop 50
taacagtagtaagataaaataggaa

SEQ ID NO: 36379 - DNA, 25 bp, Artificial
  probe
  misc_feature (1)..(25): SEQ ID NO: 412; WAN0249WE_at; Start 51; Stop 75
tttgatattagggataagattggta

SEQ ID NO: 36380 - DNA, 25 bp, Artificial
  probe
  misc_feature (1)..(25): SEQ ID NO: 412; WAN0249WE_at; Start 10; Stop 34
gagaaacttagcaagctaacagtag

SEQ ID NO: 36381 - DNA, 25 bp, Artificial
  probe
  misc_feature (1)..(25): SEQ ID NO: 412; WAN0249WE_at; Start 11; Stop 35
agaaacttagcaagctaacagtagt

SEQ ID NO: 36382 - DNA, 25 bp, Artificial
  probe
  misc_feature (1)..(25): SEQ ID NO: 412; WAN0249WE_at; Start 12; Stop 36
gaaacttagcaagctaacagtagta

SEQ ID NO: 36383 - DNA, 25 bp, Artificial
  probe
  misc_feature (1)..(25): SEQ ID NO: 412; WAN0249WE_at; Start 15; Stop 39
acttagcaagctaacagtagtaaga

SEQ ID NO: 36384 - DNA, 25 bp, Artificial
  probe
  misc_feature (1)..(25): SEQ ID NO: 412; WAN0249WE_at; Start 45; Stop 69
taggaatttgatattagggataaga

SEQ ID NO: 36385 - DNA, 25 bp, Artificial
  probe
  misc_feature (1)..(25): SEQ ID NO: 412; WAN0249WE_at; Start 20; Stop 44
gcaagctaacagtagtaagataaaa

SEQ ID NO: 36386 - DNA, 25 bp, Artificial
  probe
  misc_feature (1)..(25): SEQ ID NO: 412; WAN0249WE_at; Start 59; Stop 83
tagggataagattggtaaatagtgt

SEQ ID NO: 36387 - DNA, 25 bp, Artificial
  probe
  misc_feature (1)..(25): SEQ ID NO: 412; WAN0249WE_at; Start 2; Stop 26
gaatcaaagagaaacttagcaagct

SEQ ID NO: 36388 - DNA, 25 bp, Artificial
  probe
  misc_feature (1)..(25): SEQ ID NO: 412; WAN0249WE_at; Start 7; Stop 31
aaagagaaacttagcaagctaacag

SEQ ID NO: 36389 - DNA, 25 bp, Artificial
  probe
  misc_feature (1)..(25): SEQ ID NO: 412; WAN0249WE_at; Start 5; Stop 29
tcaaagagaaacttagcaagctaac

SEQ ID NO: 36390 - DNA, 25 bp, Artificial
  probe
  misc_feature (1)..(25): SEQ ID NO: 412; WAN0249WE_at; Start 108; Stop 132
tatagttatttctggtttctgaaaa

SEQ ID NO: 36391 - DNA, 25 bp, Artificial
  probe
  misc_feature (1)..(25): SEQ ID NO: 412; WAN0249WE_at; Start 114; Stop 138
tatttctggtttctgaaaagtatta

SEQ ID NO: 36392 - DNA, 25 bp, Artificial
  probe
  misc_feature (1)..(25): SEQ ID NO: 412; WAN0249WE_at; Start 21; Stop 45
caagctaacagtagtaagataaaat

SEQ ID NO: 36393 - DNA, 25 bp, Artificial
  probe
  misc_feature (1)..(25): SEQ ID NO: 412; WAN0249WE_at; Start 53; Stop 77
tgatattagggataagattggtaaa

SEQ ID NO: 36394 - DNA, 25 bp, Artificial
  probe
  misc_feature (1)..(25): SEQ ID NO: 412; WAN0249WE_at; Start 16; Stop 40
cttagcaagctaacagtagtaagat

SEQ ID NO: 36395 - DNA, 25 bp, Artificial
  probe
  misc_feature (1)..(25): SEQ ID NO: 412; WAN0249WE_at; Start 14; Stop 38
aacttagcaagctaacagtagtaag

SEQ ID NO: 36396 - DNA, 25 bp, Artificial
  probe
  misc_feature (1)..(25): SEQ ID NO: 412; WAN0249WE_at; Start 106; Stop 130
tatatagttatttctggtttctgaa

SEQ ID NO: 36397 - DNA, 25 bp, Artificial
  probe
  misc_feature (1)..(25): SEQ ID NO: 412; WAN0249WE_at; Start 58; Stop 82
ttagggataagattggtaaatagtg

SEQ ID NO: 36398 - DNA, 25 bp, Artificial
  probe
  misc_feature (1)..(25): SEQ ID NO: 412; WAN0249WE_at; Start 29; Stop 53
cagtagtaagataaaataggaattt

SEQ ID NO: 36399 - DNA, 25 bp, Artificial
  probe
  misc_feature (1)..(25): SEQ ID NO: 412; WAN0249WE_at; Start 6; Stop 30
caaagagaaacttagcaagctaaca

SEQ ID NO: 36400 - DNA, 25 bp, Artificial
  probe
  misc_feature (1)..(25): SEQ ID NO: 412; WAN0249WE_at; Start 61; Stop 85
gggataagattggtaaatagtgtaa

SEQ ID NO: 36401 - DNA, 25 bp, Artificial
  probe
  misc_feature (1)..(25): SEQ ID NO: 412; WAN0249WE_at; Start 18; Stop 42
tagcaagctaacagtagtaagataa

SEQ ID NO: 36402 - DNA, 25 bp, Artificial
  probe
  misc_feature (1)..(25): SEQ ID NO: 412; WAN0249WE_at; Start 109; Stop 133
atagttatttctggtttctgaaaag

SEQ ID NO: 36403 - DNA, 25 bp, Artificial
  probe
  misc_feature (1)..(25): SEQ ID NO: 412; WAN0249WE_at; Start 119; Stop 143
ctggtttctgaaaagtattatattt

SEQ ID NO: 36404 - DNA, 25 bp, Artificial
  probe
  misc_feature (1)..(25): SEQ ID NO: 412; WAN0249WE_at; Start 63; Stop 87
gataagattggtaaatagtgtaata

SEQ ID NO: 36405 - DNA, 25 bp, Artificial
  probe
  misc_feature (1)..(25): SEQ ID NO: 412; WAN0249WE_at; Start 17; Stop 41
ttagcaagctaacagtagtaagata

SEQ ID NO: 36406 - DNA, 25 bp, Artificial
  probe
  misc_feature (1)..(25): SEQ ID NO: 412; WAN0249WE_at; Start 24; Stop 48
gctaacagtagtaagataaaatagg

SEQ ID NO: 36407 - DNA, 25 bp, Artificial
  probe
  misc_feature (1)..(25): SEQ ID NO: 412; WAN0249WE_at; Start 8; Stop 32
aagagaaacttagcaagctaacagt

SEQ ID NO: 36408 - DNA, 25 bp, Artificial
  probe
  misc_feature (1)..(25): SEQ ID NO: 412; WAN0249WE_at; Start 74; Stop 98
taaatagtgtaatatttttacaaca

SEQ ID NO: 36409 - DNA, 25 bp, Artificial
  probe
  misc_feature (1)..(25): SEQ ID NO: 412; WAN0249WE_at; Start 40; Stop 64
taaaataggaatttgatattaggga

SEQ ID NO: 36410 - DNA, 25 bp, Artificial
  probe
  misc_feature (1)..(25): SEQ ID NO: 412; WAN0249WE_at; Start 4; Stop 28
atcaaagagaaacttagcaagctaa

SEQ ID NO: 36411 - DNA, 25 bp, Artificial
  probe
  misc_feature (1)..(25): SEQ ID NO: 180; WAN0249WF_at; Start 137; Stop 161
ttagcttgctaagtttctctttgat

SEQ ID NO: 36412 - DNA, 25 bp, Artificial
  probe
  misc_feature (1)..(25): SEQ ID NO: 180; WAN0249WF_at; Start 22; Stop 46
aaatataatacttttcagaaaccag

SEQ ID NO: 36413 - DNA, 25 bp, Artificial
  probe
  misc_feature (1)..(25): SEQ ID NO: 180; WAN0249WF_at; Start 37; Stop 61
cagaaaccagaaataactatataaa

SEQ ID NO: 36414 - DNA, 25 bp, Artificial
  probe
  misc_feature (1)..(25): SEQ ID NO: 180; WAN0249WF_at; Start 122; Stop 146
tttatcttactactgttagcttgct

SEQ ID NO: 36415 - DNA, 25 bp, Artificial
  probe
  misc_feature (1)..(25): SEQ ID NO: 180; WAN0249WF_at; Start 124; Stop 148
tatcttactactgttagcttgctaa

SEQ ID NO: 36416 - DNA, 25 bp, Artificial
  probe
  misc_feature (1)..(25): SEQ ID NO: 180; WAN0249WF_at; Start 83; Stop 107
cactatttaccaatcttatccctaa

SEQ ID NO: 36417 - DNA, 25 bp, Artificial
  probe
  misc_feature (1)..(25): SEQ ID NO: 180; WAN0249WF_at; Start 23; Stop 47
aatataatacttttcagaaaccaga

SEQ ID NO: 36418 - DNA, 25 bp, Artificial
  probe
  misc_feature (1)..(25): SEQ ID NO: 180; WAN0249WF_at; Start 25; Stop 49
tataatacttttcagaaaccagaaa

SEQ ID NO: 36419 - DNA, 25 bp, Artificial
  probe
  misc_feature (1)..(25): SEQ ID NO: 180; WAN0249WF_at; Start 32; Stop 56
cttttcagaaaccagaaataactat

SEQ ID NO: 36420 - DNA, 25 bp, Artificial
  probe
  misc_feature (1)..(25): SEQ ID NO: 180; WAN0249WF_at; Start 33; Stop 57
ttttcagaaaccagaaataactata

SEQ ID NO: 36421 - DNA, 25 bp, Artificial
  probe
  misc_feature (1)..(25): SEQ ID NO: 180; WAN0249WF_at; Start 27; Stop 51
taatacttttcagaaaccagaaata

SEQ ID NO: 36422 - DNA, 25 bp, Artificial
  probe
  misc_feature (1)..(25): SEQ ID NO: 180; WAN0249WF_at; Start 131; Stop 155
ctactgttagcttgctaagtttctc

SEQ ID NO: 36423 - DNA, 25 bp, Artificial
  probe
  misc_feature (1)..(25): SEQ ID NO: 180; WAN0249WF_at; Start 81; Stop 105
tacactatttaccaatcttatccct

SEQ ID NO: 36424 - DNA, 25 bp, Artificial
  probe
  misc_feature (1)..(25): SEQ ID NO: 180; WAN0249WF_at; Start 117; Stop 141
cctattttatcttactactgttagc

SEQ ID NO: 36425 - DNA, 25 bp, Artificial
  probe
  misc_feature (1)..(25): SEQ ID NO: 180; WAN0249WF_at; Start 125; Stop 149
atcttactactgttagcttgctaag

SEQ ID NO: 36426 - DNA, 25 bp, Artificial
  probe
  misc_feature (1)..(25): SEQ ID NO: 180; WAN0249WF_at; Start 129; Stop 153
tactactgttagcttgctaagtttc

SEQ ID NO: 36427 - DNA, 25 bp, Artificial
  probe
  misc_feature (1)..(25): SEQ ID NO: 180; WAN0249WF_at; Start 34; Stop 58
tttcagaaaccagaaataactatat

SEQ ID NO: 36428 - DNA, 25 bp, Artificial
  probe
  misc_feature (1)..(25): SEQ ID NO: 180; WAN0249WF_at; Start 36; Stop 60
tcagaaaccagaaataactatataa

SEQ ID NO: 36429 - DNA, 25 bp, Artificial
  probe
  misc_feature (1)..(25): SEQ ID NO: 180; WAN0249WF_at; Start 139; Stop 163
agcttgctaagtttctctttgattc

SEQ ID NO: 36430 - DNA, 25 bp, Artificial
  probe
  misc_feature (1)..(25): SEQ ID NO: 180; WAN0249WF_at; Start 96; Stop 120
tcttatccctaatatcaaattccta

SEQ ID NO: 36431 - DNA, 25 bp, Artificial
  probe
  misc_feature (1)..(25): SEQ ID NO: 180; WAN0249WF_at; Start 135; Stop 159
tgttagcttgctaagtttctctttg

SEQ ID NO: 36432 - DNA, 25 bp, Artificial
  probe
  misc_feature (1)..(25): SEQ ID NO: 180; WAN0249WF_at; Start 132; Stop 156
tactgttagcttgctaagtttctct

SEQ ID NO: 36433 - DNA, 25 bp, Artificial
  probe
  misc_feature (1)..(25): SEQ ID NO: 180; WAN0249WF_at; Start 84; Stop 108
actatttaccaatcttatccctaat

SEQ ID NO: 36434 - DNA, 25 bp, Artificial
  probe
  misc_feature (1)..(25): SEQ ID NO: 180; WAN0249WF_at; Start 126; Stop 150
tcttactactgttagcttgctaagt

SEQ ID NO: 36435 - DNA, 25 bp, Artificial
  probe
  misc_feature (1)..(25): SEQ ID NO: 180; WAN0249WF_at; Start 140; Stop 164
gcttgctaagtttctctttgattct

SEQ ID NO: 36436 - DNA, 25 bp, Artificial
  probe
  misc_feature (1)..(25): SEQ ID NO: 180; WAN0249WF_at; Start 136; Stop 160
gttagcttgctaagtttctctttga

SEQ ID NO: 36437 - DNA, 25 bp, Artificial
  probe
  misc_feature (1)..(25): SEQ ID NO: 180; WAN0249WF_at; Start 138; Stop 162
tagcttgctaagtttctctttgatt

SEQ ID NO: 36438 - DNA, 25 bp, Artificial
  probe
  misc_feature (1)..(25): SEQ ID NO: 180; WAN0249WF_at; Start 90; Stop 114
taccaatcttatccctaatatcaaa

SEQ ID NO: 36439 - DNA, 25 bp, Artificial
  probe
  misc_feature (1)..(25): SEQ ID NO: 180; WAN0249WF_at; Start 70; Stop 94
tgtaaaaatattacactatttacca

SEQ ID NO: 36440 - DNA, 25 bp, Artificial
  probe
  misc_feature (1)..(25): SEQ ID NO: 180; WAN0249WF_at; Start 97; Stop 121
cttatccctaatatcaaattcctat

SEQ ID NO: 36441 - DNA, 25 bp, Artificial
  probe
  misc_feature (1)..(25): SEQ ID NO: 180; WAN0249WF_at; Start 127; Stop 151
cttactactgttagcttgctaagtt

SEQ ID NO: 36442 - DNA, 25 bp, Artificial
  probe
  misc_feature (1)..(25): SEQ ID NO: 180; WAN0249WF_at; Start 112; Stop 136
aaattcctattttatcttactactg

SEQ ID NO: 36443 - DNA, 25 bp, Artificial
  probe
  misc_feature (1)..(25): SEQ ID NO: 180; WAN0249WF_at; Start 121; Stop 145
ttttatcttactactgttagcttgc

SEQ ID NO: 36444 - DNA, 25 bp, Artificial
  probe
  misc_feature (1)..(25): SEQ ID NO: 180; WAN0249WF_at; Start 88; Stop 112
tttaccaatcttatccctaatatca

SEQ ID NO: 36445 - DNA, 25 bp, Artificial
  probe
  misc_feature (1)..(25): SEQ ID NO: 103; WAN0249WI_at; Start 18; Stop 42
attgatttctaggctttttatgtta

SEQ ID NO: 36446 - DNA, 25 bp, Artificial
  probe
  misc_feature (1)..(25): SEQ ID NO: 103; WAN0249WI_at; Start 25; Stop 49
tctaggctttttatgttagtatgga

SEQ ID NO: 36447 - DNA, 25 bp, Artificial
  probe
  misc_feature (1)..(25): SEQ ID NO: 103; WAN0249WI_at; Start 27; Stop 51
taggctttttatgttagtatggaag

SEQ ID NO: 36448 - DNA, 25 bp, Artificial
  probe
  misc_feature (1)..(25): SEQ ID NO: 103; WAN0249WI_at; Start 26; Stop 50
ctaggctttttatgttagtatggaa

SEQ ID NO: 36449 - DNA, 25 bp, Artificial
  probe
  misc_feature (1)..(25): SEQ ID NO: 103; WAN0249WI_at; Start 20; Stop 44
tgatttctaggctttttatgttagt

SEQ ID NO: 36450 - DNA, 25 bp, Artificial
  probe
  misc_feature (1)..(25): SEQ ID NO: 103; WAN0249WI_at; Start 19; Stop 43
ttgatttctaggctttttatgttag

SEQ ID NO: 36451 - DNA, 25 bp, Artificial
  probe
  misc_feature (1)..(25): SEQ ID NO: 103; WAN0249WI_at; Start 22; Stop 46
atttctaggctttttatgttagtat

SEQ ID NO: 36452 - DNA, 25 bp, Artificial
  probe
  misc_feature (1)..(25): SEQ ID NO: 103; WAN0249WI_at; Start 28; Stop 52
aggctttttatgttagtatggaagt

SEQ ID NO: 36453 - DNA, 25 bp, Artificial
  probe
  misc_feature (1)..(25): SEQ ID NO: 103; WAN0249WI_at; Start 24; Stop 48
ttctaggctttttatgttagtatgg

SEQ ID NO: 36454 - DNA, 25 bp, Artificial
  probe
  misc_feature (1)..(25): SEQ ID NO: 103; WAN0249WI_at; Start 21; Stop 45
gatttctaggctttttatgttagta

SEQ ID NO: 36455 - DNA, 25 bp, Artificial
  probe
  misc_feature (1)..(25): SEQ ID NO: 103; WAN0249WI_at; Start 23; Stop 47
tttctaggctttttatgttagtatg

SEQ ID NO: 36456 - DNA, 25 bp, Artificial
  probe
  misc_feature (1)..(25): SEQ ID NO: 394; WAN0249WJ_at; Start 11; Stop 35
taacataaaaagcctagaaatcaat

SEQ ID NO: 36457 - DNA, 25 bp, Artificial
  probe
  misc_feature (1)..(25): SEQ ID NO: 394; WAN0249WJ_at; Start 2; Stop 26
cttccatactaacataaaaagccta

SEQ ID NO: 36458 - DNA, 25 bp, Artificial
  probe
  misc_feature (1)..(25): SEQ ID NO: 394; WAN0249WJ_at; Start 8; Stop 32
tactaacataaaaagcctagaaatc

SEQ ID NO: 36459 - DNA, 25 bp, Artificial
  probe
  misc_feature (1)..(25): SEQ ID NO: 394; WAN0249WJ_at; Start 6; Stop 30
catactaacataaaaagcctagaaa

SEQ ID NO: 36460 - DNA, 25 bp, Artificial
  probe
  misc_feature (1)..(25): SEQ ID NO: 394; WAN0249WJ_at; Start 7; Stop 31
atactaacataaaaagcctagaaat

SEQ ID NO: 36461 - DNA, 25 bp, Artificial
  probe
  misc_feature (1)..(25): SEQ ID NO: 394; WAN0249WJ_at; Start 5; Stop 29
ccatactaacataaaaagcctagaa

SEQ ID NO: 36462 - DNA, 25 bp, Artificial
  probe
  misc_feature (1)..(25): SEQ ID NO: 394; WAN0249WJ_at; Start 9; Stop 33
actaacataaaaagcctagaaatca

SEQ ID NO: 36463 - DNA, 25 bp, Artificial
  probe
  misc_feature (1)..(25): SEQ ID NO: 394; WAN0249WJ_at; Start 10; Stop 34
ctaacataaaaagcctagaaatcaa

SEQ ID NO: 36464 - DNA, 25 bp, Artificial
  probe
  misc_feature (1)..(25): SEQ ID NO: 394; WAN0249WJ_at; Start 3; Stop 27
ttccatactaacataaaaagcctag

SEQ ID NO: 36465 - DNA, 25 bp, Artificial
  probe
  misc_feature (1)..(25): SEQ ID NO: 394; WAN0249WJ_at; Start 4; Stop 28
tccatactaacataaaaagcctaga

SEQ ID NO: 36466 - DNA, 25 bp, Artificial
  probe
  misc_feature (1)..(25): SEQ ID NO: 394; WAN0249WJ_at; Start 1; Stop 25
acttccatactaacataaaaagcct

SEQ ID NO: 36467 - DNA, 25 bp, Artificial
  probe
  misc_feature (1)..(25): SEQ ID NO: 3556; WAN0249WK_at; Start 84; Stop 108
gttataatgataataggaagtaata

SEQ ID NO: 36468 - DNA, 25 bp, Artificial
  probe
  misc_feature (1)..(25): SEQ ID NO: 3556; WAN0249WK_at; Start 88; Stop 112
taatgataataggaagtaatactca

SEQ ID NO: 36469 - DNA, 25 bp, Artificial
  probe
  misc_feature (1)..(25): SEQ ID NO: 3556; WAN0249WK_at; Start 87; Stop 111
ataatgataataggaagtaatactc

SEQ ID NO: 36470 - DNA, 25 bp, Artificial
  probe
  misc_feature (1)..(25): SEQ ID NO: 3556; WAN0249WK_at; Start 90; Stop 114
atgataataggaagtaatactcaat

SEQ ID NO: 36471 - DNA, 25 bp, Artificial
  probe
  misc_feature (1)..(25): SEQ ID NO: 3556; WAN0249WK_at; Start 4; Stop 28
gatgttataaggcagtaatttgaaa

SEQ ID NO: 36472 - DNA, 25 bp, Artificial
  probe
  misc_feature (1)..(25): SEQ ID NO: 3556; WAN0249WK_at; Start 91; Stop 115
tgataataggaagtaatactcaatg

SEQ ID NO: 36473 - DNA, 25 bp, Artificial
  probe
  misc_feature (1)..(25): SEQ ID NO: 3556; WAN0249WK_at; Start 86; Stop 110
tataatgataataggaagtaatact

SEQ ID NO: 36474 - DNA, 25 bp, Artificial
  probe
  misc_feature (1)..(25): SEQ ID NO: 3556; WAN0249WK_at; Start 2; Stop 26
aagatgttataaggcagtaatttga

SEQ ID NO: 36475 - DNA, 25 bp, Artificial
  probe
  misc_feature (1)..(25): SEQ ID NO: 3556; WAN0249WK_at; Start 3; Stop 27
agatgttataaggcagtaatttgaa

SEQ ID NO: 36476 - DNA, 25 bp, Artificial
  probe
  misc_feature (1)..(25): SEQ ID NO: 3556; WAN0249WK_at; Start 85; Stop 109
ttataatgataataggaagtaatac

SEQ ID NO: 36477 - DNA, 25 bp, Artificial
  probe
  misc_feature (1)..(25): SEQ ID NO: 3556; WAN0249WK_at; Start 92; Stop 116
gataataggaagtaatactcaatga

SEQ ID NO: 36478 - DNA, 25 bp, Artificial
  probe
  misc_feature (1)..(25): SEQ ID NO: 3556; WAN0249WK_at; Start 6; Stop 30
tgttataaggcagtaatttgaaact

SEQ ID NO: 36479 - DNA, 25 bp, Artificial
  probe
  misc_feature (1)..(25): SEQ ID NO: 3556; WAN0249WK_at; Start 89; Stop 113
aatgataataggaagtaatactcaa

SEQ ID NO: 36480 - DNA, 25 bp, Artificial
  probe
  misc_feature (1)..(25): SEQ ID NO: 3556; WAN0249WK_at; Start 5; Stop 29
atgttataaggcagtaatttgaaac

SEQ ID NO: 36481 - DNA, 25 bp, Artificial
  probe
  misc_feature (1)..(25): SEQ ID NO: 3556; WAN0249WK_at; Start 1; Stop 25
gaagatgttataaggcagtaatttg

SEQ ID NO: 36482 - DNA, 25 bp, Artificial
  probe
  misc_feature (1)..(25): SEQ ID NO: 3556; WAN0249WK_at; Start 83; Stop 107
cgttataatgataataggaagtaat

SEQ ID NO: 36483 - DNA, 25 bp, Artificial
  probe
  misc_feature (1)..(25): SEQ ID NO: 4607; WAN0249WL_at; Start 3; Stop 27
attgagtattacttcctattatcat

SEQ ID NO: 36484 - DNA, 25 bp, Artificial
  probe
  misc_feature (1)..(25): SEQ ID NO: 4607; WAN0249WL_at; Start 88; Stop 112
gtttcaaattactgccttataacat

SEQ ID NO: 36485 - DNA, 25 bp, Artificial
  probe
  misc_feature (1)..(25): SEQ ID NO: 4607; WAN0249WL_at; Start 10; Stop 34
attacttcctattatcattataacg

SEQ ID NO: 36486 - DNA, 25 bp, Artificial
  probe
  misc_feature (1)..(25): SEQ ID NO: 4607; WAN0249WL_at; Start 89; Stop 113
tttcaaattactgccttataacatc

SEQ ID NO: 36487 - DNA, 25 bp, Artificial
  probe
  misc_feature (1)..(25): SEQ ID NO: 4607; WAN0249WL_at; Start 92; Stop 116
caaattactgccttataacatcttc

SEQ ID NO: 36488 - DNA, 25 bp, Artificial
  probe
  misc_feature (1)..(25): SEQ ID NO: 4607; WAN0249WL_at; Start 90; Stop 114
ttcaaattactgccttataacatct

SEQ ID NO: 36489 - DNA, 25 bp, Artificial
  probe
  misc_feature (1)..(25): SEQ ID NO: 4607; WAN0249WL_at; Start 4; Stop 28
ttgagtattacttcctattatcatt

SEQ ID NO: 36490 - DNA, 25 bp, Artificial
  probe
  misc_feature (1)..(25): SEQ ID NO: 4607; WAN0249WL_at; Start 9; Stop 33
tattacttcctattatcattataac

SEQ ID NO: 36491 - DNA, 25 bp, Artificial
  probe
  misc_feature (1)..(25): SEQ ID NO: 4607; WAN0249WL_at; Start 5; Stop 29
tgagtattacttcctattatcatta

SEQ ID NO: 36492 - DNA, 25 bp, Artificial
  probe
  misc_feature (1)..(25): SEQ ID NO: 4607; WAN0249WL_at; Start 8; Stop 32
gtattacttcctattatcattataa

SEQ ID NO: 36493 - DNA, 25 bp, Artificial
  probe
  misc_feature (1)..(25): SEQ ID NO: 4607; WAN0249WL_at; Start 6; Stop 30
gagtattacttcctattatcattat

SEQ ID NO: 36494 - DNA, 25 bp, Artificial
  probe
  misc_feature (1)..(25): SEQ ID NO: 4607; WAN0249WL_at; Start 91; Stop 115
tcaaattactgccttataacatctt

SEQ ID NO: 36495 - DNA, 25 bp, Artificial
  probe
  misc_feature (1)..(25): SEQ ID NO: 4607; WAN0249WL_at; Start 7; Stop 31
agtattacttcctattatcattata

SEQ ID NO: 36496 - DNA, 25 bp, Artificial
  probe
  misc_feature (1)..(25): SEQ ID NO: 4607; WAN0249WL_at; Start 87; Stop 111
agtttcaaattactgccttataaca

SEQ ID NO: 36497 - DNA, 25 bp, Artificial
  probe
  misc_feature (1)..(25): SEQ ID NO: 3761; WAN0249WM_at; Start 69; Stop 93
ggaactctttgtgacagaggatttt

SEQ ID NO: 36498 - DNA, 25 bp, Artificial
  probe
  misc_feature (1)..(25): SEQ ID NO: 3761; WAN0249WM_at; Start 70; Stop 94
gaactctttgtgacagaggattttt

SEQ ID NO: 36499 - DNA, 25 bp, Artificial
  probe
  misc_feature (1)..(25): SEQ ID NO: 3761; WAN0249WM_at; Start 62; Stop 86
agagcagggaactctttgtgacaga

SEQ ID NO: 36500 - DNA, 25 bp, Artificial
  probe
  misc_feature (1)..(25): SEQ ID NO: 3761; WAN0249WM_at; Start 7; Stop 31
tatttttagctgattgaacttctat

SEQ ID NO: 36501 - DNA, 25 bp, Artificial
  probe
  misc_feature (1)..(25): SEQ ID NO: 3761; WAN0249WM_at; Start 58; Stop 82
tcaaagagcagggaactctttgtga

SEQ ID NO: 36502 - DNA, 25 bp, Artificial
  probe
  misc_feature (1)..(25): SEQ ID NO: 3761; WAN0249WM_at; Start 56; Stop 80
tttcaaagagcagggaactctttgt

SEQ ID NO: 36503 - DNA, 25 bp, Artificial
  probe
  misc_feature (1)..(25): SEQ ID NO: 3761; WAN0249WM_at; Start 45; Stop 69
aaaatcctccgtttcaaagagcagg

SEQ ID NO: 36504 - DNA, 25 bp, Artificial
  probe
  misc_feature (1)..(25): SEQ ID NO: 3761; WAN0249WM_at; Start 64; Stop 88
agcagggaactctttgtgacagagg

SEQ ID NO: 36505 - DNA, 25 bp, Artificial
  probe
  misc_feature (1)..(25): SEQ ID NO: 3761; WAN0249WM_at; Start 51; Stop 75
ctccgtttcaaagagcagggaactc

SEQ ID NO: 36506 - DNA, 25 bp, Artificial
  probe
  misc_feature (1)..(25): SEQ ID NO: 3761; WAN0249WM_at; Start 48; Stop 72
atcctccgtttcaaagagcagggaa

SEQ ID NO: 36507 - DNA, 25 bp, Artificial
  probe
  misc_feature (1)..(25): SEQ ID NO: 3761; WAN0249WM_at; Start 43; Stop 67
caaaaatcctccgtttcaaagagca

SEQ ID NO: 36508 - DNA, 25 bp, Artificial
  probe
  misc_feature (1)..(25): SEQ ID NO: 3761; WAN0249WM_at; Start 49; Stop 73
tcctccgtttcaaagagcagggaac

SEQ ID NO: 36509 - DNA, 25 bp, Artificial
  probe
  misc_feature (1)..(25): SEQ ID NO: 3761; WAN0249WM_at; Start 60; Stop 84
aaagagcagggaactctttgtgaca

SEQ ID NO: 36510 - DNA, 25 bp, Artificial
  probe
  misc_feature (1)..(25): SEQ ID NO: 3761; WAN0249WM_at; Start 47; Stop 71
aatcctccgtttcaaagagcaggga

SEQ ID NO: 36511 - DNA, 25 bp, Artificial
  probe
  misc_feature (1)..(25): SEQ ID NO: 3761; WAN0249WM_at; Start 44; Stop 68
aaaaatcctccgtttcaaagagcag

SEQ ID NO: 36512 - DNA, 25 bp, Artificial
  probe
  misc_feature (1)..(25): SEQ ID NO: 3761; WAN0249WM_at; Start 15; Stop 39
gctgattgaacttctatttactaat

SEQ ID NO: 36513 - DNA, 25 bp, Artificial
  probe
  misc_feature (1)..(25): SEQ ID NO: 3761; WAN0249WM_at; Start 36; Stop 60
taatattcaaaaatcctccgtttca

SEQ ID NO: 36514 - DNA, 25 bp, Artificial
  probe
  misc_feature (1)..(25): SEQ ID NO: 3761; WAN0249WM_at; Start 65; Stop 89
gcagggaactctttgtgacagagga

SEQ ID NO: 36515 - DNA, 25 bp, Artificial
  probe
  misc_feature (1)..(25): SEQ ID NO: 3761; WAN0249WM_at; Start 46; Stop 70
aaatcctccgtttcaaagagcaggg

SEQ ID NO: 36516 - DNA, 25 bp, Artificial
  probe
  misc_feature (1)..(25): SEQ ID NO: 3761; WAN0249WM_at; Start 66; Stop 90
cagggaactctttgtgacagaggat

SEQ ID NO: 36517 - DNA, 25 bp, Artificial
  probe
  misc_feature (1)..(25): SEQ ID NO: 3761; WAN0249WM_at; Start 11; Stop 35
tttagctgattgaacttctatttac

SEQ ID NO: 36518 - DNA, 25 bp, Artificial
  probe
  misc_feature (1)..(25): SEQ ID NO: 3761; WAN0249WM_at; Start 67; Stop 91
agggaactctttgtgacagaggatt

SEQ ID NO: 36519 - DNA, 25 bp, Artificial
  probe
  misc_feature (1)..(25): SEQ ID NO: 3761; WAN0249WM_at; Start 1; Stop 25
ggtagttatttttagctgattgaac

SEQ ID NO: 36520 - DNA, 25 bp, Artificial
  probe
  misc_feature (1)..(25): SEQ ID NO: 3761; WAN0249WM_at; Start 52; Stop 76
tccgtttcaaagagcagggaactct

SEQ ID NO: 36521 - DNA, 25 bp, Artificial
  probe
  misc_feature (1)..(25): SEQ ID NO: 3761; WAN0249WM_at; Start 59; Stop 83
caaagagcagggaactctttgtgac

SEQ ID NO: 36522 - DNA, 25 bp, Artificial
  probe
  misc_feature (1)..(25): SEQ ID NO: 3761; WAN0249WM_at; Start 5; Stop 29
gttatttttagctgattgaacttct

SEQ ID NO: 36523 - DNA, 25 bp, Artificial
  probe
  misc_feature (1)..(25): SEQ ID NO: 3761; WAN0249WM_at; Start 54; Stop 78
cgtttcaaagagcagggaactcttt

SEQ ID NO: 36524 - DNA, 25 bp, Artificial
  probe
  misc_feature (1)..(25): SEQ ID NO: 3761; WAN0249WM_at; Start 55; Stop 79
gtttcaaagagcagggaactctttg

SEQ ID NO: 36525 - DNA, 25 bp, Artificial
  probe
  misc_feature (1)..(25): SEQ ID NO: 3761; WAN0249WM_at; Start 50; Stop 74
cctccgtttcaaagagcagggaact

SEQ ID NO: 36526 - DNA, 25 bp, Artificial
  probe
  misc_feature (1)..(25): SEQ ID NO: 3761; WAN0249WM_at; Start 68; Stop 92
gggaactctttgtgacagaggattt

SEQ ID NO: 36527 - DNA, 25 bp, Artificial
  probe
  misc_feature (1)..(25): SEQ ID NO: 3761; WAN0249WM_at; Start 71; Stop 95
aactctttgtgacagaggatttttt

SEQ ID NO: 36528 - DNA, 25 bp, Artificial
  probe
  misc_feature (1)..(25): SEQ ID NO: 3761; WAN0249WM_at; Start 61; Stop 85
aagagcagggaactctttgtgacag

SEQ ID NO: 36529 - DNA, 25 bp, Artificial
  probe
  misc_feature (1)..(25): SEQ ID NO: 3761; WAN0249WM_at; Start 22; Stop 46
gaacttctatttactaatattcaaa

SEQ ID NO: 36530 - DNA, 25 bp, Artificial
  probe
  misc_feature (1)..(25): SEQ ID NO: 3761; WAN0249WM_at; Start 53; Stop 77
ccgtttcaaagagcagggaactctt

SEQ ID NO: 36531 - DNA, 25 bp, Artificial
  probe
  misc_feature (1)..(25): SEQ ID NO: 61; WAN0249WN_at; Start 6; Stop 30
atcctctgtcacaaagagttccctg

SEQ ID NO: 36532 - DNA, 25 bp, Artificial
  probe
  misc_feature (1)..(25): SEQ ID NO: 61; WAN0249WN_at; Start 26; Stop 50
ccctgctctttgaaacggaggattt

SEQ ID NO: 36533 - DNA, 25 bp, Artificial
  probe
  misc_feature (1)..(25): SEQ ID NO: 61; WAN0249WN_at; Start 59; Stop 83
tagtaaatagaagttcaatcagcta

SEQ ID NO: 36534 - DNA, 25 bp, Artificial
  probe
  misc_feature (1)..(25): SEQ ID NO: 61; WAN0249WN_at; Start 20; Stop 44
agagttccctgctctttgaaacgga

SEQ ID NO: 36535 - DNA, 25 bp, Artificial
  probe
  misc_feature (1)..(25): SEQ ID NO: 61; WAN0249WN_at; Start 11; Stop 35
ctgtcacaaagagttccctgctctt

SEQ ID NO: 36536 - DNA, 25 bp, Artificial
  probe
  misc_feature (1)..(25): SEQ ID NO: 61; WAN0249WN_at; Start 3; Stop 27
aaaatcctctgtcacaaagagttcc

SEQ ID NO: 36537 - DNA, 25 bp, Artificial
  probe
  misc_feature (1)..(25): SEQ ID NO: 61; WAN0249WN_at; Start 24; Stop 48
ttccctgctctttgaaacggaggat

SEQ ID NO: 36538 - DNA, 25 bp, Artificial
  probe
  misc_feature (1)..(25): SEQ ID NO: 61; WAN0249WN_at; Start 29; Stop 53
tgctctttgaaacggaggatttttg

SEQ ID NO: 36539 - DNA, 25 bp, Artificial
  probe
  misc_feature (1)..(25): SEQ ID NO: 61; WAN0249WN_at; Start 22; Stop 46
agttccctgctctttgaaacggagg

SEQ ID NO: 36540 - DNA, 25 bp, Artificial
  probe
  misc_feature (1)..(25): SEQ ID NO: 61; WAN0249WN_at; Start 61; Stop 85
gtaaatagaagttcaatcagctaaa

SEQ ID NO: 36541 - DNA, 25 bp, Artificial
  probe
  misc_feature (1)..(25): SEQ ID NO: 61; WAN0249WN_at; Start 28; Stop 52
ctgctctttgaaacggaggattttt

SEQ ID NO: 36542 - DNA, 25 bp, Artificial
  probe
  misc_feature (1)..(25): SEQ ID NO: 61; WAN0249WN_at; Start 1; Stop 25
aaaaaatcctctgtcacaaagagtt

SEQ ID NO: 36543 - DNA, 25 bp, Artificial
  probe
  misc_feature (1)..(25): SEQ ID NO: 61; WAN0249WN_at; Start 71; Stop 95
gttcaatcagctaaaaataactacc

SEQ ID NO: 36544 - DNA, 25 bp, Artificial
  probe
  misc_feature (1)..(25): SEQ ID NO: 61; WAN0249WN_at; Start 36; Stop 60
tgaaacggaggatttttgaatatta

SEQ ID NO: 36545 - DNA, 25 bp, Artificial
  probe
  misc_feature (1)..(25): SEQ ID NO: 61; WAN0249WN_at; Start 4; Stop 28
aaatcctctgtcacaaagagttccc

SEQ ID NO: 36546 - DNA, 25 bp, Artificial
  probe
  misc_feature (1)..(25): SEQ ID NO: 61; WAN0249WN_at; Start 19; Stop 43
aagagttccctgctctttgaaacgg

SEQ ID NO: 36547 - DNA, 25 bp, Artificial
  probe
  misc_feature (1)..(25): SEQ ID NO: 61; WAN0249WN_at; Start 8; Stop 32
cctctgtcacaaagagttccctgct

SEQ ID NO: 36548 - DNA, 25 bp, Artificial
  probe
  misc_feature (1)..(25): SEQ ID NO: 61; WAN0249WN_at; Start 68; Stop 92
gaagttcaatcagctaaaaataact

SEQ ID NO: 36549 - DNA, 25 bp, Artificial
  probe
  misc_feature (1)..(25): SEQ ID NO: 61; WAN0249WN_at; Start 2; Stop 26
aaaaatcctctgtcacaaagagttc

SEQ ID NO: 36550 - DNA, 25 bp, Artificial
  probe
  misc_feature (1)..(25): SEQ ID NO: 61; WAN0249WN_at; Start 56; Stop 80
tattagtaaatagaagttcaatcag

SEQ ID NO: 36551 - DNA, 25 bp, Artificial
  probe
  misc_feature (1)..(25): SEQ ID NO: 61; WAN0249WN_at; Start 27; Stop 51
cctgctctttgaaacggaggatttt

SEQ ID NO: 36552 - DNA, 25 bp, Artificial
  probe
  misc_feature (1)..(25): SEQ ID NO: 61; WAN0249WN_at; Start 58; Stop 82
ttagtaaatagaagttcaatcagct

SEQ ID NO: 36553 - DNA, 25 bp, Artificial
  probe
  misc_feature (1)..(25): SEQ ID NO: 61; WAN0249WN_at; Start 13; Stop 37
gtcacaaagagttccctgctctttg

SEQ ID NO: 36554 - DNA, 25 bp, Artificial
  probe
  misc_feature (1)..(25): SEQ ID NO: 61; WAN0249WN_at; Start 10; Stop 34
tctgtcacaaagagttccctgctct

SEQ ID NO: 36555 - DNA, 25 bp, Artificial
  probe
  misc_feature (1)..(25): SEQ ID NO: 61; WAN0249WN_at; Start 7; Stop 31
tcctctgtcacaaagagttccctgc

SEQ ID NO: 36556 - DNA, 25 bp, Artificial
  probe
  misc_feature (1)..(25): SEQ ID NO: 61; WAN0249WN_at; Start 21; Stop 45
gagttccctgctctttgaaacggag

SEQ ID NO: 36557 - DNA, 25 bp, Artificial
  probe
  misc_feature (1)..(25): SEQ ID NO: 61; WAN0249WN_at; Start 18; Stop 42
aaagagttccctgctctttgaaacg

SEQ ID NO: 36558 - DNA, 25 bp, Artificial
  probe
  misc_feature (1)..(25): SEQ ID NO: 61; WAN0249WN_at; Start 23; Stop 47
gttccctgctctttgaaacggagga

SEQ ID NO: 36559 - DNA, 25 bp, Artificial
  probe
  misc_feature (1)..(25): SEQ ID NO: 61; WAN0249WN_at; Start 62; Stop 86
taaatagaagttcaatcagctaaaa

SEQ ID NO: 36560 - DNA, 25 bp, Artificial
  probe
  misc_feature (1)..(25): SEQ ID NO: 61; WAN0249WN_at; Start 66; Stop 90
tagaagttcaatcagctaaaaataa

SEQ ID NO: 36561 - DNA, 25 bp, Artificial
  probe
  misc_feature (1)..(25): SEQ ID NO: 61; WAN0249WN_at; Start 14; Stop 38
tcacaaagagttccctgctctttga

SEQ ID NO: 36562 - DNA, 25 bp, Artificial
  probe
  misc_feature (1)..(25): SEQ ID NO: 61; WAN0249WN_at; Start 12; Stop 36
tgtcacaaagagttccctgctcttt

SEQ ID NO: 36563 - DNA, 25 bp, Artificial
  probe
  misc_feature (1)..(25): SEQ ID NO: 61; WAN0249WN_at; Start 5; Stop 29
aatcctctgtcacaaagagttccct

SEQ ID NO: 36564 - DNA, 25 bp, Artificial
  probe
  misc_feature (1)..(25): SEQ ID NO: 61; WAN0249WN_at; Start 25; Stop 49
tccctgctctttgaaacggaggatt

SEQ ID NO: 36565 - DNA, 25 bp, Artificial
  probe
  misc_feature (1)..(25): SEQ ID NO: 3818; WAN0249WO_at; Start 48; Stop 72
gcatttacgccattatatgatatct

SEQ ID NO: 36566 - DNA, 25 bp, Artificial
  probe
  misc_feature (1)..(25): SEQ ID NO: 3818; WAN0249WO_at; Start 46; Stop 70
gagcatttacgccattatatgatat

SEQ ID NO: 36567 - DNA, 25 bp, Artificial
  probe
  misc_feature (1)..(25): SEQ ID NO: 3818; WAN0249WO_at; Start 42; Stop 66
aaaagagcatttacgccattatatg

SEQ ID NO: 36568 - DNA, 25 bp, Artificial
  probe
  misc_feature (1)..(25): SEQ ID NO: 3818; WAN0249WO_at; Start 49; Stop 73
catttacgccattatatgatatcta

SEQ ID NO: 36569 - DNA, 25 bp, Artificial
  probe
  misc_feature (1)..(25): SEQ ID NO: 3818; WAN0249WO_at; Start 25; Stop 49
cttataatcttaacagaaaaagagc

SEQ ID NO: 36570 - DNA, 25 bp, Artificial
  probe
  misc_feature (1)..(25): SEQ ID NO: 3818; WAN0249WO_at; Start 33; Stop 57
cttaacagaaaaagagcatttacgc

SEQ ID NO: 36571 - DNA, 25 bp, Artificial
  probe
  misc_feature (1)..(25): SEQ ID NO: 3818; WAN0249WO_at; Start 1; Stop 25
gtcatttcctccaaaatagaatacc

SEQ ID NO: 36572 - DNA, 25 bp, Artificial
  probe
  misc_feature (1)..(25): SEQ ID NO: 3818; WAN0249WO_at; Start 39; Stop 63
agaaaaagagcatttacgccattat

SEQ ID NO: 36573 - DNA, 25 bp, Artificial
  probe
  misc_feature (1)..(25): SEQ ID NO: 3818; WAN0249WO_at; Start 32; Stop 56
tcttaacagaaaaagagcatttacg

SEQ ID NO: 36574 - DNA, 25 bp, Artificial
  probe
  misc_feature (1)..(25): SEQ ID NO: 3818; WAN0249WO_at; Start 75; Stop 99
ctctgtgataagttttttttatggg

SEQ ID NO: 36575 - DNA, 25 bp, Artificial
  probe
  misc_feature (1)..(25): SEQ ID NO: 3818; WAN0249WO_at; Start 27; Stop 51
tataatcttaacagaaaaagagcat

SEQ ID NO: 36576 - DNA, 25 bp, Artificial
  probe
  misc_feature (1)..(25): SEQ ID NO: 3818; WAN0249WO_at; Start 36; Stop 60
aacagaaaaagagcatttacgccat

SEQ ID NO: 36577 - DNA, 25 bp, Artificial
  probe
  misc_feature (1)..(25): SEQ ID NO: 3818; WAN0249WO_at; Start 10; Stop 34
tccaaaatagaataccttataatct

SEQ ID NO: 36578 - DNA, 25 bp, Artificial
  probe
  misc_feature (1)..(25): SEQ ID NO: 3818; WAN0249WO_at; Start 43; Stop 67
aaagagcatttacgccattatatga

SEQ ID NO: 36579 - DNA, 25 bp, Artificial
  probe
  misc_feature (1)..(25): SEQ ID NO: 3818; WAN0249WO_at; Start 34; Stop 58
ttaacagaaaaagagcatttacgcc

SEQ ID NO: 36580 - DNA, 25 bp, Artificial
  probe
  misc_feature (1)..(25): SEQ ID NO: 3818; WAN0249WO_at; Start 37; Stop 61
acagaaaaagagcatttacgccatt

SEQ ID NO: 36581 - DNA, 25 bp, Artificial
  probe
  misc_feature (1)..(25): SEQ ID NO: 3818; WAN0249WO_at; Start 19; Stop 43
gaataccttataatcttaacagaaa

SEQ ID NO: 36582 - DNA, 25 bp, Artificial
  probe
  misc_feature (1)..(25): SEQ ID NO: 3818; WAN0249WO_at; Start 2; Stop 26
tcatttcctccaaaatagaatacct

SEQ ID NO: 36583 - DNA, 25 bp, Artificial
  probe
  misc_feature (1)..(25): SEQ ID NO: 3818; WAN0249WO_at; Start 51; Stop 75
tttacgccattatatgatatctatc

SEQ ID NO: 36584 - DNA, 25 bp, Artificial
  probe
  misc_feature (1)..(25): SEQ ID NO: 3818; WAN0249WO_at; Start 56; Stop 80
gccattatatgatatctatctctgt

SEQ ID NO: 36585 - DNA, 25 bp, Artificial
  probe
  misc_feature (1)..(25): SEQ ID NO: 3818; WAN0249WO_at; Start 35; Stop 59
taacagaaaaagagcatttacgcca

SEQ ID NO: 36586 - DNA, 25 bp, Artificial
  probe
  misc_feature (1)..(25): SEQ ID NO: 3818; WAN0249WO_at; Start 8; Stop 32
cctccaaaatagaataccttataat

SEQ ID NO: 36587 - DNA, 25 bp, Artificial
  probe
  misc_feature (1)..(25): SEQ ID NO: 3818; WAN0249WO_at; Start 66; Stop 90
gatatctatctctgtgataagtttt

SEQ ID NO: 36588 - DNA, 25 bp, Artificial
  probe
  misc_feature (1)..(25): SEQ ID NO: 3818; WAN0249WO_at; Start 55; Stop 79
cgccattatatgatatctatctctg

SEQ ID NO: 36589 - DNA, 25 bp, Artificial
  probe
  misc_feature (1)..(25): SEQ ID NO: 3818; WAN0249WO_at; Start 53; Stop 77
tacgccattatatgatatctatctc

SEQ ID NO: 36590 - DNA, 25 bp, Artificial
  probe
  misc_feature (1)..(25): SEQ ID NO: 3818; WAN0249WO_at; Start 29; Stop 53
taatcttaacagaaaaagagcattt

SEQ ID NO: 36591 - DNA, 25 bp, Artificial
  probe
  misc_feature (1)..(25): SEQ ID NO: 3818; WAN0249WO_at; Start 3; Stop 27
catttcctccaaaatagaatacctt

SEQ ID NO: 36592 - DNA, 25 bp, Artificial
  probe
  misc_feature (1)..(25): SEQ ID NO: 3818; WAN0249WO_at; Start 61; Stop 85
tatatgatatctatctctgtgataa

SEQ ID NO: 36593 - DNA, 25 bp, Artificial
  probe
  misc_feature (1)..(25): SEQ ID NO: 3818; WAN0249WO_at; Start 58; Stop 82
cattatatgatatctatctctgtga

SEQ ID NO: 36594 - DNA, 25 bp, Artificial
  probe
  misc_feature (1)..(25): SEQ ID NO: 3818; WAN0249WO_at; Start 6; Stop 30
ttcctccaaaatagaataccttata

SEQ ID NO: 36595 - DNA, 25 bp, Artificial
  probe
  misc_feature (1)..(25): SEQ ID NO: 3818; WAN0249WO_at; Start 38; Stop 62
cagaaaaagagcatttacgccatta

SEQ ID NO: 36596 - DNA, 25 bp, Artificial
  probe
  misc_feature (1)..(25): SEQ ID NO: 3818; WAN0249WO_at; Start 17; Stop 41
tagaataccttataatcttaacaga

SEQ ID NO: 36597 - DNA, 25 bp, Artificial
  probe
  misc_feature (1)..(25): SEQ ID NO: 3818; WAN0249WO_at; Start 40; Stop 64
gaaaaagagcatttacgccattata

SEQ ID NO: 36598 - DNA, 25 bp, Artificial
  probe
  misc_feature (1)..(25): SEQ ID NO: 3818; WAN0249WO_at; Start 63; Stop 87
tatgatatctatctctgtgataagt

SEQ ID NO: 36599 - DNA, 25 bp, Artificial
  probe
  misc_feature (1)..(25): SEQ ID NO: 4421; WAN0249WP_at; Start 82; Stop 106
ggtattctattttggaggaaatgac

SEQ ID NO: 36600 - DNA, 25 bp, Artificial
  probe
  misc_feature (1)..(25): SEQ ID NO: 4421; WAN0249WP_at; Start 58; Stop 82
gctctttttctgttaagattataag

SEQ ID NO: 36601 - DNA, 25 bp, Artificial
  probe
  misc_feature (1)..(25): SEQ ID NO: 4421; WAN0249WP_at; Start 43; Stop 67
tataatggcgtaaatgctctttttc

SEQ ID NO: 36602 - DNA, 25 bp, Artificial
  probe
  misc_feature (1)..(25): SEQ ID NO: 4421; WAN0249WP_at; Start 29; Stop 53
agagatagatatcatataatggcgt

SEQ ID NO: 36603 - DNA, 25 bp, Artificial
  probe
  misc_feature (1)..(25): SEQ ID NO: 4421; WAN0249WP_at; Start 37; Stop 61
atatcatataatggcgtaaatgctc

SEQ ID NO: 36604 - DNA, 25 bp, Artificial
  probe
  misc_feature (1)..(25): SEQ ID NO: 4421; WAN0249WP_at; Start 41; Stop 65
catataatggcgtaaatgctctttt

SEQ ID NO: 36605 - DNA, 25 bp, Artificial
  probe
  misc_feature (1)..(25): SEQ ID NO: 4421; WAN0249WP_at; Start 27; Stop 51
acagagatagatatcatataatggc

SEQ ID NO: 36606 - DNA, 25 bp, Artificial
  probe
  misc_feature (1)..(25): SEQ ID NO: 4421; WAN0249WP_at; Start 50; Stop 74
gcgtaaatgctctttttctgttaag

SEQ ID NO: 36607 - DNA, 25 bp, Artificial
  probe
  misc_feature (1)..(25): SEQ ID NO: 4421; WAN0249WP_at; Start 35; Stop 59
agatatcatataatggcgtaaatgc

SEQ ID NO: 36608 - DNA, 25 bp, Artificial
  probe
  misc_feature (1)..(25): SEQ ID NO: 4421; WAN0249WP_at; Start 21; Stop 45
cttatcacagagatagatatcatat

SEQ ID NO: 36609 - DNA, 25 bp, Artificial
  probe
  misc_feature (1)..(25): SEQ ID NO: 4421; WAN0249WP_at; Start 52; Stop 76
gtaaatgctctttttctgttaagat

SEQ ID NO: 36610 - DNA, 25 bp, Artificial
  probe
  misc_feature (1)..(25): SEQ ID NO: 4421; WAN0249WP_at; Start 40; Stop 64
tcatataatggcgtaaatgctcttt

SEQ ID NO: 36611 - DNA, 25 bp, Artificial
  probe
  misc_feature (1)..(25): SEQ ID NO: 4421; WAN0249WP_at; Start 51; Stop 75
cgtaaatgctctttttctgttaaga

SEQ ID NO: 36612 - DNA, 25 bp, Artificial
  probe
  misc_feature (1)..(25): SEQ ID NO: 4421; WAN0249WP_at; Start 19; Stop 43
aacttatcacagagatagatatcat

SEQ ID NO: 36613 - DNA, 25 bp, Artificial
  probe
  misc_feature (1)..(25): SEQ ID NO: 4421; WAN0249WP_at; Start 80; Stop 104
aaggtattctattttggaggaaatg

SEQ ID NO: 36614 - DNA, 25 bp, Artificial
  probe
  misc_feature (1)..(25): SEQ ID NO: 4421; WAN0249WP_at; Start 54; Stop 78
aaatgctctttttctgttaagatta

SEQ ID NO: 36615 - DNA, 25 bp, Artificial
  probe
  misc_feature (1)..(25): SEQ ID NO: 4421; WAN0249WP_at; Start 23; Stop 47
tatcacagagatagatatcatataa

SEQ ID NO: 36616 - DNA, 25 bp, Artificial
  probe
  misc_feature (1)..(25): SEQ ID NO: 4421; WAN0249WP_at; Start 64; Stop 88
tttctgttaagattataaggtattc

SEQ ID NO: 36617 - DNA, 25 bp, Artificial
  probe
  misc_feature (1)..(25): SEQ ID NO: 4421; WAN0249WP_at; Start 8; Stop 32
cccataaaaaaaacttatcacagag

SEQ ID NO: 36618 - DNA, 25 bp, Artificial
  probe
  misc_feature (1)..(25): SEQ ID NO: 4421; WAN0249WP_at; Start 34; Stop 58
tagatatcatataatggcgtaaatg

SEQ ID NO: 36619 - DNA, 25 bp, Artificial
  probe
  misc_feature (1)..(25): SEQ ID NO: 4421; WAN0249WP_at; Start 30; Stop 54
gagatagatatcatataatggcgta

SEQ ID NO: 36620 - DNA, 25 bp, Artificial
  probe
  misc_feature (1)..(25): SEQ ID NO: 4421; WAN0249WP_at; Start 49; Stop 73
ggcgtaaatgctctttttctgttaa

SEQ ID NO: 36621 - DNA, 25 bp, Artificial
  probe
  misc_feature (1)..(25): SEQ ID NO: 4421; WAN0249WP_at; Start 48; Stop 72
tggcgtaaatgctctttttctgtta

SEQ ID NO: 36622 - DNA, 25 bp, Artificial
  probe
  misc_feature (1)..(25): SEQ ID NO: 4421; WAN0249WP_at; Start 32; Stop 56
gatagatatcatataatggcgtaaa

SEQ ID NO: 36623 - DNA, 25 bp, Artificial
  probe
  misc_feature (1)..(25): SEQ ID NO: 4421; WAN0249WP_at; Start 17; Stop 41
aaaacttatcacagagatagatatc

SEQ ID NO: 36624 - DNA, 25 bp, Artificial
  probe
  misc_feature (1)..(25): SEQ ID NO: 4421; WAN0249WP_at; Start 28; Stop 52
cagagatagatatcatataatggcg

SEQ ID NO: 36625 - DNA, 25 bp, Artificial
  probe
  misc_feature (1)..(25): SEQ ID NO: 4421; WAN0249WP_at; Start 77; Stop 101
tataaggtattctattttggaggaa

SEQ ID NO: 36626 - DNA, 25 bp, Artificial
  probe
  misc_feature (1)..(25): SEQ ID NO: 4421; WAN0249WP_at; Start 66; Stop 90
tctgttaagattataaggtattcta

SEQ ID NO: 36627 - DNA, 25 bp, Artificial
  probe
  misc_feature (1)..(25): SEQ ID NO: 4421; WAN0249WP_at; Start 46; Stop 70
aatggcgtaaatgctctttttctgt

SEQ ID NO: 36628 - DNA, 25 bp, Artificial
  probe
  misc_feature (1)..(25): SEQ ID NO: 4421; WAN0249WP_at; Start 45; Stop 69
taatggcgtaaatgctctttttctg

SEQ ID NO: 36629 - DNA, 25 bp, Artificial
  probe
  misc_feature (1)..(25): SEQ ID NO: 4421; WAN0249WP_at; Start 36; Stop 60
gatatcatataatggcgtaaatgct

SEQ ID NO: 36630 - DNA, 25 bp, Artificial
  probe
  misc_feature (1)..(25): SEQ ID NO: 4421; WAN0249WP_at; Start 26; Stop 50
cacagagatagatatcatataatgg

SEQ ID NO: 36631 - DNA, 25 bp, Artificial
  probe
  misc_feature (1)..(25): SEQ ID NO: 4421; WAN0249WP_at; Start 74; Stop 98
gattataaggtattctattttggag

SEQ ID NO: 36632 - DNA, 25 bp, Artificial
  probe
  misc_feature (1)..(25): SEQ ID NO: 4421; WAN0249WP_at; Start 18; Stop 42
aaacttatcacagagatagatatca

SEQ ID NO: 36633 - DNA, 25 bp, Artificial
  probe
  misc_feature (1)..(25): SEQ ID NO: 503; WAN0249WQ_at; Start 80; Stop 104
ttctgttccaatctagttttcatat

SEQ ID NO: 36634 - DNA, 25 bp, Artificial
  probe
  misc_feature (1)..(25): SEQ ID NO: 503; WAN0249WQ_at; Start 84; Stop 108
gttccaatctagttttcatattctt

SEQ ID NO: 36635 - DNA, 25 bp, Artificial
  probe
  misc_feature (1)..(25): SEQ ID NO: 503; WAN0249WQ_at; Start 76; Stop 100
cttattctgttccaatctagttttc

SEQ ID NO: 36636 - DNA, 25 bp, Artificial
  probe
  misc_feature (1)..(25): SEQ ID NO: 503; WAN0249WQ_at; Start 71; Stop 95
tttttcttattctgttccaatctag

SEQ ID NO: 36637 - DNA, 25 bp, Artificial
  probe
  misc_feature (1)..(25): SEQ ID NO: 503; WAN0249WQ_at; Start 45; Stop 69
gaattatcaagcaattttgaattat

SEQ ID NO: 36638 - DNA, 25 bp, Artificial
  probe
  misc_feature (1)..(25): SEQ ID NO: 503; WAN0249WQ_at; Start 82; Stop 106
ctgttccaatctagttttcatattc

SEQ ID NO: 36639 - DNA, 25 bp, Artificial
  probe
  misc_feature (1)..(25): SEQ ID NO: 503; WAN0249WQ_at; Start 112; Stop 136
aaagtgataaaatggtaggaagaat

SEQ ID NO: 36640 - DNA, 25 bp, Artificial
  probe
  misc_feature (1)..(25): SEQ ID NO: 503; WAN0249WQ_at; Start 113; Stop 137
aagtgataaaatggtaggaagaatt

SEQ ID NO: 36641 - DNA, 25 bp, Artificial
  probe
  misc_feature (1)..(25): SEQ ID NO: 503; WAN0249WQ_at; Start 114; Stop 138
agtgataaaatggtaggaagaattg

SEQ ID NO: 36642 - DNA, 25 bp, Artificial
  probe
  misc_feature (1)..(25): SEQ ID NO: 503; WAN0249WQ_at; Start 73; Stop 97
tttcttattctgttccaatctagtt

SEQ ID NO: 36643 - DNA, 25 bp, Artificial
  probe
  misc_feature (1)..(25): SEQ ID NO: 503; WAN0249WQ_at; Start 88; Stop 112
caatctagttttcatattcttaaaa

SEQ ID NO: 36644 - DNA, 25 bp, Artificial
  probe
  misc_feature (1)..(25): SEQ ID NO: 503; WAN0249WQ_at; Start 77; Stop 101
ttattctgttccaatctagttttca

SEQ ID NO: 36645 - DNA, 25 bp, Artificial
  probe
  misc_feature (1)..(25): SEQ ID NO: 503; WAN0249WQ_at; Start 116; Stop 140
tgataaaatggtaggaagaattgga

SEQ ID NO: 36646 - DNA, 25 bp, Artificial
  probe
  misc_feature (1)..(25): SEQ ID NO: 503; WAN0249WQ_at; Start 121; Stop 145
aaatggtaggaagaattggagagta

SEQ ID NO: 36647 - DNA, 25 bp, Artificial
  probe
  misc_feature (1)..(25): SEQ ID NO: 503; WAN0249WQ_at; Start 99; Stop 123
tcatattcttaaaaaagtgataaaa

SEQ ID NO: 36648 - DNA, 25 bp, Artificial
  probe
  misc_feature (1)..(25): SEQ ID NO: 503; WAN0249WQ_at; Start 81; Stop 105
tctgttccaatctagttttcatatt

SEQ ID NO: 36649 - DNA, 25 bp, Artificial
  probe
  misc_feature (1)..(25): SEQ ID NO: 503; WAN0249WQ_at; Start 117; Stop 141
gataaaatggtaggaagaattggag

SEQ ID NO: 36650 - DNA, 25 bp, Artificial
  probe
  misc_feature (1)..(25): SEQ ID NO: 503; WAN0249WQ_at; Start 122; Stop 146
aatggtaggaagaattggagagtag

SEQ ID NO: 36651 - DNA, 25 bp, Artificial
  probe
  misc_feature (1)..(25): SEQ ID NO: 503; WAN0249WQ_at; Start 72; Stop 96
ttttcttattctgttccaatctagt

SEQ ID NO: 36652 - DNA, 25 bp, Artificial
  probe
  misc_feature (1)..(25): SEQ ID NO: 503; WAN0249WQ_at; Start 78; Stop 102
tattctgttccaatctagttttcat

SEQ ID NO: 36653 - DNA, 25 bp, Artificial
  probe
  misc_feature (1)..(25): SEQ ID NO: 503; WAN0249WQ_at; Start 87; Stop 111
ccaatctagttttcatattcttaaa

SEQ ID NO: 36654 - DNA, 25 bp, Artificial
  probe
  misc_feature (1)..(25): SEQ ID NO: 503; WAN0249WQ_at; Start 75; Stop 99
tcttattctgttccaatctagtttt

SEQ ID NO: 36655 - DNA, 25 bp, Artificial
  probe
  misc_feature (1)..(25): SEQ ID NO: 503; WAN0249WQ_at; Start 74; Stop 98
ttcttattctgttccaatctagttt

SEQ ID NO: 36656 - DNA, 25 bp, Artificial
  probe
  misc_feature (1)..(25): SEQ ID NO: 503; WAN0249WQ_at; Start 79; Stop 103
attctgttccaatctagttttcata

SEQ ID NO: 36657 - DNA, 25 bp, Artificial
  probe
  misc_feature (1)..(25): SEQ ID NO: 503; WAN0249WQ_at; Start 42; Stop 66
tcagaattatcaagcaattttgaat

SEQ ID NO: 36658 - DNA, 25 bp, Artificial
  probe
  misc_feature (1)..(25): SEQ ID NO: 503; WAN0249WQ_at; Start 124; Stop 148
tggtaggaagaattggagagtagag

SEQ ID NO: 36659 - DNA, 25 bp, Artificial
  probe
  misc_feature (1)..(25): SEQ ID NO: 503; WAN0249WQ_at; Start 86; Stop 110
tccaatctagttttcatattcttaa

SEQ ID NO: 36660 - DNA, 25 bp, Artificial
  probe
  misc_feature (1)..(25): SEQ ID NO: 503; WAN0249WQ_at; Start 115; Stop 139
gtgataaaatggtaggaagaattgg

SEQ ID NO: 36661 - DNA, 25 bp, Artificial
  probe
  misc_feature (1)..(25): SEQ ID NO: 503; WAN0249WQ_at; Start 120; Stop 144
aaaatggtaggaagaattggagagt

SEQ ID NO: 36662 - DNA, 25 bp, Artificial
  probe
  misc_feature (1)..(25): SEQ ID NO: 503; WAN0249WQ_at; Start 8; Stop 32
aatctaacttcgtagtatattacgg

SEQ ID NO: 36663 - DNA, 25 bp, Artificial
  probe
  misc_feature (1)..(25): SEQ ID NO: 503; WAN0249WQ_at; Start 83; Stop 107
tgttccaatctagttttcatattct

SEQ ID NO: 36664 - DNA, 25 bp, Artificial
  probe
  misc_feature (1)..(25): SEQ ID NO: 503; WAN0249WQ_at; Start 43; Stop 67
cagaattatcaagcaattttgaatt

SEQ ID NO: 36665 - DNA, 25 bp, Artificial
  probe
  misc_feature (1)..(25): SEQ ID NO: 503; WAN0249WQ_at; Start 119; Stop 143
taaaatggtaggaagaattggagag

SEQ ID NO: 36666 - DNA, 25 bp, Artificial
  probe
  misc_feature (1)..(25): SEQ ID NO: 503; WAN0249WQ_at; Start 118; Stop 142
ataaaatggtaggaagaattggaga

SEQ ID NO: 36667 - DNA, 25 bp, Artificial
  probe
  misc_feature (1)..(25): SEQ ID NO: 3313; WAN0249WR_at; Start 51; Stop 75
aaactagattggaacagaataagaa

SEQ ID NO: 36668 - DNA, 25 bp, Artificial
  probe
  misc_feature (1)..(25): SEQ ID NO: 3313; WAN0249WR_at; Start 83; Stop 107
attcaaaattgcttgataattctga

SEQ ID NO: 36669 - DNA, 25 bp, Artificial
  probe
  misc_feature (1)..(25): SEQ ID NO: 3313; WAN0249WR_at; Start 46; Stop 70
tatgaaaactagattggaacagaat

SEQ ID NO: 36670 - DNA, 25 bp, Artificial
  probe
  misc_feature (1)..(25): SEQ ID NO: 3313; WAN0249WR_at; Start 54; Stop 78
ctagattggaacagaataagaaaaa

SEQ ID NO: 36671 - DNA, 25 bp, Artificial
  probe
  misc_feature (1)..(25): SEQ ID NO: 3313; WAN0249WR_at; Start 40; Stop 64
taagaatatgaaaactagattggaa

SEQ ID NO: 36672 - DNA, 25 bp, Artificial
  probe
  misc_feature (1)..(25): SEQ ID NO: 3313; WAN0249WR_at; Start 117; Stop 141
ccgtaatatactacgaagttagatt

SEQ ID NO: 36673 - DNA, 25 bp, Artificial
  probe
  misc_feature (1)..(25): SEQ ID NO: 3313; WAN0249WR_at; Start 4; Stop 28
tactctccaattcttcctaccattt

SEQ ID NO: 36674 - DNA, 25 bp, Artificial
  probe
  misc_feature (1)..(25): SEQ ID NO: 3313; WAN0249WR_at; Start 50; Stop 74
aaaactagattggaacagaataaga

SEQ ID NO: 36675 - DNA, 25 bp, Artificial
  probe
  misc_feature (1)..(25): SEQ ID NO: 3313; WAN0249WR_at; Start 53; Stop 77
actagattggaacagaataagaaaa

SEQ ID NO: 36676 - DNA, 25 bp, Artificial
  probe
  misc_feature (1)..(25): SEQ ID NO: 3313; WAN0249WR_at; Start 41; Stop 65
aagaatatgaaaactagattggaac

SEQ ID NO: 36677 - DNA, 25 bp, Artificial
  probe
  misc_feature (1)..(25): SEQ ID NO: 3313; WAN0249WR_at; Start 8; Stop 32
ctccaattcttcctaccattttatc

SEQ ID NO: 36678 - DNA, 25 bp, Artificial
  probe
  misc_feature (1)..(25): SEQ ID NO: 3313; WAN0249WR_at; Start 82; Stop 106
aattcaaaattgcttgataattctg

SEQ ID NO: 36679 - DNA, 25 bp, Artificial
  probe
  misc_feature (1)..(25): SEQ ID NO: 3313; WAN0249WR_at; Start 7; Stop 31
tctccaattcttcctaccattttat

SEQ ID NO: 36680 - DNA, 25 bp, Artificial
  probe
  misc_feature (1)..(25): SEQ ID NO: 3313; WAN0249WR_at; Start 10; Stop 34
ccaattcttcctaccattttatcac

SEQ ID NO: 36681 - DNA, 25 bp, Artificial
  probe
  misc_feature (1)..(25): SEQ ID NO: 3313; WAN0249WR_at; Start 118; Stop 142
cgtaatatactacgaagttagattt

SEQ ID NO: 36682 - DNA, 25 bp, Artificial
  probe
  misc_feature (1)..(25): SEQ ID NO: 3313; WAN0249WR_at; Start 39; Stop 63
ttaagaatatgaaaactagattgga

SEQ ID NO: 36683 - DNA, 25 bp, Artificial
  probe
  misc_feature (1)..(25): SEQ ID NO: 3313; WAN0249WR_at; Start 26; Stop 50
ttttatcacttttttaagaatatga

SEQ ID NO: 36684 - DNA, 25 bp, Artificial
  probe
  misc_feature (1)..(25): SEQ ID NO: 3313; WAN0249WR_at; Start 43; Stop 67
gaatatgaaaactagattggaacag

SEQ ID NO: 36685 - DNA, 25 bp, Artificial
  probe
  misc_feature (1)..(25): SEQ ID NO: 3313; WAN0249WR_at; Start 120; Stop 144
taatatactacgaagttagatttta

SEQ ID NO: 36686 - DNA, 25 bp, Artificial
  probe
  misc_feature (1)..(25): SEQ ID NO: 3313; WAN0249WR_at; Start 45; Stop 69
atatgaaaactagattggaacagaa

SEQ ID NO: 36687 - DNA, 25 bp, Artificial
  probe
  misc_feature (1)..(25): SEQ ID NO: 3313; WAN0249WR_at; Start 9; Stop 33
tccaattcttcctaccattttatca

SEQ ID NO: 36688 - DNA, 25 bp, Artificial
  probe
  misc_feature (1)..(25): SEQ ID NO: 3313; WAN0249WR_at; Start 48; Stop 72
tgaaaactagattggaacagaataa

SEQ ID NO: 36689 - DNA, 25 bp, Artificial
  probe
  misc_feature (1)..(25): SEQ ID NO: 3313; WAN0249WR_at; Start 44; Stop 68
aatatgaaaactagattggaacaga

SEQ ID NO: 36690 - DNA, 25 bp, Artificial
  probe
  misc_feature (1)..(25): SEQ ID NO: 3313; WAN0249WR_at; Start 12; Stop 36
aattcttcctaccattttatcactt

SEQ ID NO: 36691 - DNA, 25 bp, Artificial
  probe
  misc_feature (1)..(25): SEQ ID NO: 3313; WAN0249WR_at; Start 52; Stop 76
aactagattggaacagaataagaaa

SEQ ID NO: 36692 - DNA, 25 bp, Artificial
  probe
  misc_feature (1)..(25): SEQ ID NO: 3313; WAN0249WR_at; Start 38; Stop 62
tttaagaatatgaaaactagattgg

SEQ ID NO: 36693 - DNA, 25 bp, Artificial
  probe
  misc_feature (1)..(25): SEQ ID NO: 3313; WAN0249WR_at; Start 47; Stop 71
atgaaaactagattggaacagaata

SEQ ID NO: 36694 - DNA, 25 bp, Artificial
  probe
  misc_feature (1)..(25): SEQ ID NO: 3313; WAN0249WR_at; Start 49; Stop 73
gaaaactagattggaacagaataag

SEQ ID NO: 36695 - DNA, 25 bp, Artificial
  probe
  misc_feature (1)..(25): SEQ ID NO: 3313; WAN0249WR_at; Start 13; Stop 37
attcttcctaccattttatcacttt

SEQ ID NO: 36696 - DNA, 25 bp, Artificial
  probe
  misc_feature (1)..(25): SEQ ID NO: 3313; WAN0249WR_at; Start 5; Stop 29
actctccaattcttcctaccatttt

SEQ ID NO: 36697 - DNA, 25 bp, Artificial
  probe
  misc_feature (1)..(25): SEQ ID NO: 3313; WAN0249WR_at; Start 42; Stop 66
agaatatgaaaactagattggaaca

SEQ ID NO: 36698 - DNA, 25 bp, Artificial
  probe
  misc_feature (1)..(25): SEQ ID NO: 3313; WAN0249WR_at; Start 6; Stop 30
ctctccaattcttcctaccatttta

SEQ ID NO: 36699 - DNA, 25 bp, Artificial
  probe
  misc_feature (1)..(25): SEQ ID NO: 3313; WAN0249WR_at; Start 55; Stop 79
tagattggaacagaataagaaaaaa

SEQ ID NO: 36700 - DNA, 25 bp, Artificial
  probe
  misc_feature (1)..(25): SEQ ID NO: 3313; WAN0249WR_at; Start 11; Stop 35
caattcttcctaccattttatcact

SEQ ID NO: 36701 - DNA, 25 bp, Artificial
  probe
  misc_feature (1)..(25): SEQ ID NO: 4639; WAN0249WS_at; Start 32; Stop 56
tatatcaaaaaaagctagatttctc

SEQ ID NO: 36702 - DNA, 25 bp, Artificial
  probe
  misc_feature (1)..(25): SEQ ID NO: 4639; WAN0249WS_at; Start 9; Stop 33
tcttgtctaatatctttatctagta

SEQ ID NO: 36703 - DNA, 25 bp, Artificial
  probe
  misc_feature (1)..(25): SEQ ID NO: 4639; WAN0249WS_at; Start 3; Stop 27
gtttcctcttgtctaatatctttat

SEQ ID NO: 36704 - DNA, 25 bp, Artificial
  probe
  misc_feature (1)..(25): SEQ ID NO: 4639; WAN0249WS_at; Start 50; Stop 74
atttctctagctgtgactttttatg

SEQ ID NO: 36705 - DNA, 25 bp, Artificial
  probe
  misc_feature (1)..(25): SEQ ID NO: 4639; WAN0249WS_at; Start 79; Stop 103
acttattgcaagagaaaaaacgagg

SEQ ID NO: 36706 - DNA, 25 bp, Artificial
  probe
  misc_feature (1)..(25): SEQ ID NO: 4639; WAN0249WS_at; Start 44; Stop 68
agctagatttctctagctgtgactt

SEQ ID NO: 36707 - DNA, 25 bp, Artificial
  probe
  misc_feature (1)..(25): SEQ ID NO: 4639; WAN0249WS_at; Start 73; Stop 97
tgttatacttattgcaagagaaaaa

SEQ ID NO: 36708 - DNA, 25 bp, Artificial
  probe
  misc_feature (1)..(25): SEQ ID NO: 4639; WAN0249WS_at; Start 74; Stop 98
gttatacttattgcaagagaaaaaa

SEQ ID NO: 36709 - DNA, 25 bp, Artificial
  probe
  misc_feature (1)..(25): SEQ ID NO: 4639; WAN0249WS_at; Start 7; Stop 31
cctcttgtctaatatctttatctag

SEQ ID NO: 36710 - DNA, 25 bp, Artificial
  probe
  misc_feature (1)..(25): SEQ ID NO: 4639; WAN0249WS_at; Start 49; Stop 73
gatttctctagctgtgactttttat

SEQ ID NO: 36711 - DNA, 25 bp, Artificial
  probe
  misc_feature (1)..(25): SEQ ID NO: 4639; WAN0249WS_at; Start 41; Stop 65
aaaagctagatttctctagctgtga

SEQ ID NO: 36712 - DNA, 25 bp, Artificial
  probe
  misc_feature (1)..(25): SEQ ID NO: 4639; WAN0249WS_at; Start 25; Stop 49
tatctagtatatcaaaaaaagctag

SEQ ID NO: 36713 - DNA, 25 bp, Artificial
  probe
  misc_feature (1)..(25): SEQ ID NO: 4639; WAN0249WS_at; Start 68; Stop 92
ttttatgttatacttattgcaagag

SEQ ID NO: 36714 - DNA, 25 bp, Artificial
  probe
  misc_feature (1)..(25): SEQ ID NO: 4639; WAN0249WS_at; Start 39; Stop 63
aaaaaagctagatttctctagctgt

SEQ ID NO: 36715 - DNA, 25 bp, Artificial
  probe
  misc_feature (1)..(25): SEQ ID NO: 4639; WAN0249WS_at; Start 80; Stop 104
cttattgcaagagaaaaaacgagga

SEQ ID NO: 36716 - DNA, 25 bp, Artificial
  probe
  misc_feature (1)..(25): SEQ ID NO: 4639; WAN0249WS_at; Start 51; Stop 75
tttctctagctgtgactttttatgt

SEQ ID NO: 36717 - DNA, 25 bp, Artificial
  probe
  misc_feature (1)..(25): SEQ ID NO: 4639; WAN0249WS_at; Start 81; Stop 105
ttattgcaagagaaaaaacgaggag

SEQ ID NO: 36718 - DNA, 25 bp, Artificial
  probe
  misc_feature (1)..(25): SEQ ID NO: 4639; WAN0249WS_at; Start 46; Stop 70
ctagatttctctagctgtgactttt

SEQ ID NO: 36719 - DNA, 25 bp, Artificial
  probe
  misc_feature (1)..(25): SEQ ID NO: 4639; WAN0249WS_at; Start 64; Stop 88
gactttttatgttatacttattgca

SEQ ID NO: 36720 - DNA, 25 bp, Artificial
  probe
  misc_feature (1)..(25): SEQ ID NO: 4639; WAN0249WS_at; Start 48; Stop 72
agatttctctagctgtgacttttta

SEQ ID NO: 36721 - DNA, 25 bp, Artificial
  probe
  misc_feature (1)..(25): SEQ ID NO: 4639; WAN0249WS_at; Start 2; Stop 26
cgtttcctcttgtctaatatcttta

SEQ ID NO: 36722 - DNA, 25 bp, Artificial
  probe
  misc_feature (1)..(25): SEQ ID NO: 4639; WAN0249WS_at; Start 47; Stop 71
tagatttctctagctgtgacttttt

SEQ ID NO: 36723 - DNA, 25 bp, Artificial
  probe
  misc_feature (1)..(25): SEQ ID NO: 4639; WAN0249WS_at; Start 69; Stop 93
tttatgttatacttattgcaagaga

SEQ ID NO: 36724 - DNA, 25 bp, Artificial
  probe
  misc_feature (1)..(25): SEQ ID NO: 4639; WAN0249WS_at; Start 76; Stop 100
tatacttattgcaagagaaaaaacg

SEQ ID NO: 36725 - DNA, 25 bp, Artificial
  probe
  misc_feature (1)..(25): SEQ ID NO: 4639; WAN0249WS_at; Start 42; Stop 66
aaagctagatttctctagctgtgac

SEQ ID NO: 36726 - DNA, 25 bp, Artificial
  probe
  misc_feature (1)..(25): SEQ ID NO: 4639; WAN0249WS_at; Start 43; Stop 67
aagctagatttctctagctgtgact

SEQ ID NO: 36727 - DNA, 25 bp, Artificial
  probe
  misc_feature (1)..(25): SEQ ID NO: 4639; WAN0249WS_at; Start 13; Stop 37
gtctaatatctttatctagtatatc

SEQ ID NO: 36728 - DNA, 25 bp, Artificial
  probe
  misc_feature (1)..(25): SEQ ID NO: 4639; WAN0249WS_at; Start 70; Stop 94
ttatgttatacttattgcaagagaa

SEQ ID NO: 36729 - DNA, 25 bp, Artificial
  probe
  misc_feature (1)..(25): SEQ ID NO: 4639; WAN0249WS_at; Start 78; Stop 102
tacttattgcaagagaaaaaacgag

SEQ ID NO: 36730 - DNA, 25 bp, Artificial
  probe
  misc_feature (1)..(25): SEQ ID NO: 4639; WAN0249WS_at; Start 77; Stop 101
atacttattgcaagagaaaaaacga

SEQ ID NO: 36731 - DNA, 25 bp, Artificial
  probe
  misc_feature (1)..(25): SEQ ID NO: 4639; WAN0249WS_at; Start 45; Stop 69
gctagatttctctagctgtgacttt

SEQ ID NO: 36732 - DNA, 25 bp, Artificial
  probe
  misc_feature (1)..(25): SEQ ID NO: 4639; WAN0249WS_at; Start 40; Stop 64
aaaaagctagatttctctagctgtg

SEQ ID NO: 36733 - DNA, 25 bp, Artificial
  probe
  misc_feature (1)..(25): SEQ ID NO: 4639; WAN0249WS_at; Start 34; Stop 58
tatcaaaaaaagctagatttctcta

SEQ ID NO: 36734 - DNA, 25 bp, Artificial
  probe
  misc_feature (1)..(25): SEQ ID NO: 4639; WAN0249WS_at; Start 71; Stop 95
tatgttatacttattgcaagagaaa

SEQ ID NO: 36735 - DNA, 25 bp, Artificial
  probe
  misc_feature (1)..(25): SEQ ID NO: 3308; WAN0249WT_at; Start 39; Stop 63
agtcacagctagagaaatctagctt

SEQ ID NO: 36736 - DNA, 25 bp, Artificial
  probe
  misc_feature (1)..(25): SEQ ID NO: 3308; WAN0249WT_at; Start 80; Stop 104
taaagatattagacaagaggaaacg

SEQ ID NO: 36737 - DNA, 25 bp, Artificial
  probe
  misc_feature (1)..(25): SEQ ID NO: 3308; WAN0249WT_at; Start 4; Stop 28
ctcgttttttctcttgcaataagta

SEQ ID NO: 36738 - DNA, 25 bp, Artificial
  probe
  misc_feature (1)..(25): SEQ ID NO: 3308; WAN0249WT_at; Start 30; Stop 54
aacataaaaagtcacagctagagaa

SEQ ID NO: 36739 - DNA, 25 bp, Artificial
  probe
  misc_feature (1)..(25): SEQ ID NO: 3308; WAN0249WT_at; Start 75; Stop 99
ctagataaagatattagacaagagg

SEQ ID NO: 36740 - DNA, 25 bp, Artificial
  probe
  misc_feature (1)..(25): SEQ ID NO: 3308; WAN0249WT_at; Start 24; Stop 48
aagtataacataaaaagtcacagct

SEQ ID NO: 36741 - DNA, 25 bp, Artificial
  probe
  misc_feature (1)..(25): SEQ ID NO: 3308; WAN0249WT_at; Start 48; Stop 72
tagagaaatctagctttttttgata

SEQ ID NO: 36742 - DNA, 25 bp, Artificial
  probe
  misc_feature (1)..(25): SEQ ID NO: 3308; WAN0249WT_at; Start 38; Stop 62
aagtcacagctagagaaatctagct

SEQ ID NO: 36743 - DNA, 25 bp, Artificial
  probe
  misc_feature (1)..(25): SEQ ID NO: 3308; WAN0249WT_at; Start 23; Stop 47
taagtataacataaaaagtcacagc

SEQ ID NO: 36744 - DNA, 25 bp, Artificial
  probe
  misc_feature (1)..(25): SEQ ID NO: 3308; WAN0249WT_at; Start 29; Stop 53
taacataaaaagtcacagctagaga

SEQ ID NO: 36745 - DNA, 25 bp, Artificial
  probe
  misc_feature (1)..(25): SEQ ID NO: 3308; WAN0249WT_at; Start 31; Stop 55
acataaaaagtcacagctagagaaa

SEQ ID NO: 36746 - DNA, 25 bp, Artificial
  probe
  misc_feature (1)..(25): SEQ ID NO: 3308; WAN0249WT_at; Start 42; Stop 66
cacagctagagaaatctagcttttt

SEQ ID NO: 36747 - DNA, 25 bp, Artificial
  probe
  misc_feature (1)..(25): SEQ ID NO: 3308; WAN0249WT_at; Start 6; Stop 30
cgttttttctcttgcaataagtata

SEQ ID NO: 36748 - DNA, 25 bp, Artificial
  probe
  misc_feature (1)..(25): SEQ ID NO: 3308; WAN0249WT_at; Start 1; Stop 25
ctcctcgttttttctcttgcaataa

SEQ ID NO: 36749 - DNA, 25 bp, Artificial
  probe
  misc_feature (1)..(25): SEQ ID NO: 3308; WAN0249WT_at; Start 11; Stop 35
tttctcttgcaataagtataacata

SEQ ID NO: 36750 - DNA, 25 bp, Artificial
  probe
  misc_feature (1)..(25): SEQ ID NO: 3308; WAN0249WT_at; Start 36; Stop 60
aaaagtcacagctagagaaatctag

SEQ ID NO: 36751 - DNA, 25 bp, Artificial
  probe
  misc_feature (1)..(25): SEQ ID NO: 3308; WAN0249WT_at; Start 9; Stop 33
tttttctcttgcaataagtataaca

SEQ ID NO: 36752 - DNA, 25 bp, Artificial
  probe
  misc_feature (1)..(25): SEQ ID NO: 3308; WAN0249WT_at; Start 2; Stop 26
tcctcgttttttctcttgcaataag

SEQ ID NO: 36753 - DNA, 25 bp, Artificial
  probe
  misc_feature (1)..(25): SEQ ID NO: 3308; WAN0249WT_at; Start 35; Stop 59
aaaaagtcacagctagagaaatcta

SEQ ID NO: 36754 - DNA, 25 bp, Artificial
  probe
  misc_feature (1)..(25): SEQ ID NO: 3308; WAN0249WT_at; Start 76; Stop 100
tagataaagatattagacaagagga

SEQ ID NO: 36755 - DNA, 25 bp, Artificial
  probe
  misc_feature (1)..(25): SEQ ID NO: 3308; WAN0249WT_at; Start 40; Stop 64
gtcacagctagagaaatctagcttt

SEQ ID NO: 36756 - DNA, 25 bp, Artificial
  probe
  misc_feature (1)..(25): SEQ ID NO: 3308; WAN0249WT_at; Start 18; Stop 42
tgcaataagtataacataaaaagtc

SEQ ID NO: 36757 - DNA, 25 bp, Artificial
  probe
  misc_feature (1)..(25): SEQ ID NO: 3308; WAN0249WT_at; Start 32; Stop 56
cataaaaagtcacagctagagaaat

SEQ ID NO: 36758 - DNA, 25 bp, Artificial
  probe
  misc_feature (1)..(25): SEQ ID NO: 3308; WAN0249WT_at; Start 37; Stop 61
aaagtcacagctagagaaatctagc

SEQ ID NO: 36759 - DNA, 25 bp, Artificial
  probe
  misc_feature (1)..(25): SEQ ID NO: 3308; WAN0249WT_at; Start 34; Stop 58
taaaaagtcacagctagagaaatct

SEQ ID NO: 36760 - DNA, 25 bp, Artificial
  probe
  misc_feature (1)..(25): SEQ ID NO: 3308; WAN0249WT_at; Start 33; Stop 57
ataaaaagtcacagctagagaaatc

SEQ ID NO: 36761 - DNA, 25 bp, Artificial
  probe
  misc_feature (1)..(25): SEQ ID NO: 3308; WAN0249WT_at; Start 20; Stop 44
caataagtataacataaaaagtcac

SEQ ID NO: 36762 - DNA, 25 bp, Artificial
  probe
  misc_feature (1)..(25): SEQ ID NO: 3308; WAN0249WT_at; Start 3; Stop 27
cctcgttttttctcttgcaataagt

SEQ ID NO: 36763 - DNA, 25 bp, Artificial
  probe
  misc_feature (1)..(25): SEQ ID NO: 3308; WAN0249WT_at; Start 81; Stop 105
aaagatattagacaagaggaaacga

SEQ ID NO: 36764 - DNA, 25 bp, Artificial
  probe
  misc_feature (1)..(25): SEQ ID NO: 3308; WAN0249WT_at; Start 27; Stop 51
tataacataaaaagtcacagctaga

SEQ ID NO: 36765 - DNA, 25 bp, Artificial
  probe
  misc_feature (1)..(25): SEQ ID NO: 3308; WAN0249WT_at; Start 69; Stop 93
gatatactagataaagatattagac

SEQ ID NO: 36766 - DNA, 25 bp, Artificial
  probe
  misc_feature (1)..(25): SEQ ID NO: 3308; WAN0249WT_at; Start 26; Stop 50
gtataacataaaaagtcacagctag

SEQ ID NO: 36767 - DNA, 25 bp, Artificial
  probe
  misc_feature (1)..(25): SEQ ID NO: 3308; WAN0249WT_at; Start 28; Stop 52
ataacataaaaagtcacagctagag

SEQ ID NO: 36768 - DNA, 25 bp, Artificial
  probe
  misc_feature (1)..(25): SEQ ID NO: 3308; WAN0249WT_at; Start 13; Stop 37
tctcttgcaataagtataacataaa

SEQ ID NO: 36769 - DNA, 25 bp, Artificial
  probe
  misc_feature (1)..(25): SEQ ID NO: 3606; WAN0249WU_at; Start 17; Stop 41
ctttttttctttggataattatgat

SEQ ID NO: 36770 - DNA, 25 bp, Artificial
  probe
  misc_feature (1)..(25): SEQ ID NO: 3606; WAN0249WU_at; Start 19; Stop 43
ttttttctttggataattatgataa

SEQ ID NO: 36771 - DNA, 25 bp, Artificial
  probe
  misc_feature (1)..(25): SEQ ID NO: 3606; WAN0249WU_at; Start 23; Stop 47
ttctttggataattatgataaaatg

SEQ ID NO: 36772 - DNA, 25 bp, Artificial
  probe
  misc_feature (1)..(25): SEQ ID NO: 3606; WAN0249WU_at; Start 22; Stop 46
tttctttggataattatgataaaat

SEQ ID NO: 36773 - DNA, 25 bp, Artificial
  probe
  misc_feature (1)..(25): SEQ ID NO: 3606; WAN0249WU_at; Start 44; Stop 68
aatgtagctattaaaggagtaagaa

SEQ ID NO: 36774 - DNA, 25 bp, Artificial
  probe
  misc_feature (1)..(25): SEQ ID NO: 3606; WAN0249WU_at; Start 32; Stop 56
taattatgataaaatgtagctatta

SEQ ID NO: 36775 - DNA, 25 bp, Artificial
  probe
  misc_feature (1)..(25): SEQ ID NO: 3606; WAN0249WU_at; Start 43; Stop 67
aaatgtagctattaaaggagtaaga

SEQ ID NO: 36776 - DNA, 25 bp, Artificial
  probe
  misc_feature (1)..(25): SEQ ID NO: 3606; WAN0249WU_at; Start 39; Stop 63
gataaaatgtagctattaaaggagt

SEQ ID NO: 36777 - DNA, 25 bp, Artificial
  probe
  misc_feature (1)..(25): SEQ ID NO: 3606; WAN0249WU_at; Start 41; Stop 65
taaaatgtagctattaaaggagtaa

SEQ ID NO: 36778 - DNA, 25 bp, Artificial
  probe
  misc_feature (1)..(25): SEQ ID NO: 3606; WAN0249WU_at; Start 37; Stop 61
atgataaaatgtagctattaaagga

SEQ ID NO: 36779 - DNA, 25 bp, Artificial
  probe
  misc_feature (1)..(25): SEQ ID NO: 3606; WAN0249WU_at; Start 38; Stop 62
tgataaaatgtagctattaaaggag

SEQ ID NO: 36780 - DNA, 25 bp, Artificial
  probe
  misc_feature (1)..(25): SEQ ID NO: 3606; WAN0249WU_at; Start 21; Stop 45
ttttctttggataattatgataaaa

SEQ ID NO: 36781 - DNA, 25 bp, Artificial
  probe
  misc_feature (1)..(25): SEQ ID NO: 3606; WAN0249WU_at; Start 34; Stop 58
attatgataaaatgtagctattaaa

SEQ ID NO: 36782 - DNA, 25 bp, Artificial
  probe
  misc_feature (1)..(25): SEQ ID NO: 3606; WAN0249WU_at; Start 42; Stop 66
aaaatgtagctattaaaggagtaag

SEQ ID NO: 36783 - DNA, 25 bp, Artificial
  probe
  misc_feature (1)..(25): SEQ ID NO: 3606; WAN0249WU_at; Start 36; Stop 60
tatgataaaatgtagctattaaagg

SEQ ID NO: 36784 - DNA, 25 bp, Artificial
  probe
  misc_feature (1)..(25): SEQ ID NO: 3606; WAN0249WU_at; Start 26; Stop 50
tttggataattatgataaaatgtag

SEQ ID NO: 36785 - DNA, 25 bp, Artificial
  probe
  misc_feature (1)..(25): SEQ ID NO: 3606; WAN0249WU_at; Start 20; Stop 44
tttttctttggataattatgataaa

SEQ ID NO: 36786 - DNA, 25 bp, Artificial
  probe
  misc_feature (1)..(25): SEQ ID NO: 3606; WAN0249WU_at; Start 24; Stop 48
tctttggataattatgataaaatgt

SEQ ID NO: 36787 - DNA, 25 bp, Artificial
  probe
  misc_feature (1)..(25): SEQ ID NO: 3606; WAN0249WU_at; Start 15; Stop 39
ctctttttttctttggataattatg

SEQ ID NO: 36788 - DNA, 25 bp, Artificial
  probe
  misc_feature (1)..(25): SEQ ID NO: 3606; WAN0249WU_at; Start 31; Stop 55
ataattatgataaaatgtagctatt

SEQ ID NO: 36789 - DNA, 25 bp, Artificial
  probe
  misc_feature (1)..(25): SEQ ID NO: 3606; WAN0249WU_at; Start 28; Stop 52
tggataattatgataaaatgtagct

SEQ ID NO: 36790 - DNA, 25 bp, Artificial
  probe
  misc_feature (1)..(25): SEQ ID NO: 3606; WAN0249WU_at; Start 33; Stop 57
aattatgataaaatgtagctattaa

SEQ ID NO: 36791 - DNA, 25 bp, Artificial
  probe
  misc_feature (1)..(25): SEQ ID NO: 3606; WAN0249WU_at; Start 35; Stop 59
ttatgataaaatgtagctattaaag

SEQ ID NO: 36792 - DNA, 25 bp, Artificial
  probe
  misc_feature (1)..(25): SEQ ID NO: 3606; WAN0249WU_at; Start 30; Stop 54
gataattatgataaaatgtagctat

SEQ ID NO: 36793 - DNA, 25 bp, Artificial
  probe
  misc_feature (1)..(25): SEQ ID NO: 3606; WAN0249WU_at; Start 16; Stop 40
tctttttttctttggataattatga

SEQ ID NO: 36794 - DNA, 25 bp, Artificial
  probe
  misc_feature (1)..(25): SEQ ID NO: 3606; WAN0249WU_at; Start 27; Stop 51
ttggataattatgataaaatgtagc

SEQ ID NO: 36795 - DNA, 25 bp, Artificial
  probe
  misc_feature (1)..(25): SEQ ID NO: 3606; WAN0249WU_at; Start 29; Stop 53
ggataattatgataaaatgtagcta

SEQ ID NO: 36796 - DNA, 25 bp, Artificial
  probe
  misc_feature (1)..(25): SEQ ID NO: 3606; WAN0249WU_at; Start 40; Stop 64
ataaaatgtagctattaaaggagta

SEQ ID NO: 36797 - DNA, 25 bp, Artificial
  probe
  misc_feature (1)..(25): SEQ ID NO: 3606; WAN0249WU_at; Start 25; Stop 49
ctttggataattatgataaaatgta

SEQ ID NO: 36798 - DNA, 25 bp, Artificial
  probe
  misc_feature (1)..(25): SEQ ID NO: 4853; WAN0249WV_at; Start 18; Stop 42
gctacattttatcataattatccaa

SEQ ID NO: 36799 - DNA, 25 bp, Artificial
  probe
  misc_feature (1)..(25): SEQ ID NO: 4853; WAN0249WV_at; Start 9; Stop 33
cctttaatagctacattttatcata

SEQ ID NO: 36800 - DNA, 25 bp, Artificial
  probe
  misc_feature (1)..(25): SEQ ID NO: 4853; WAN0249WV_at; Start 5; Stop 29
tactcctttaatagctacattttat

SEQ ID NO: 36801 - DNA, 25 bp, Artificial
  probe
  misc_feature (1)..(25): SEQ ID NO: 4853; WAN0249WV_at; Start 20; Stop 44
tacattttatcataattatccaaag

SEQ ID NO: 36802 - DNA, 25 bp, Artificial
  probe
  misc_feature (1)..(25): SEQ ID NO: 4853; WAN0249WV_at; Start 4; Stop 28
ttactcctttaatagctacatttta

SEQ ID NO: 36803 - DNA, 25 bp, Artificial
  probe
  misc_feature (1)..(25): SEQ ID NO: 4853; WAN0249WV_at; Start 23; Stop 47
attttatcataattatccaaagaaa

SEQ ID NO: 36804 - DNA, 25 bp, Artificial
  probe
  misc_feature (1)..(25): SEQ ID NO: 4853; WAN0249WV_at; Start 2; Stop 26
tcttactcctttaatagctacattt

SEQ ID NO: 36805 - DNA, 25 bp, Artificial
  probe
  misc_feature (1)..(25): SEQ ID NO: 4853; WAN0249WV_at; Start 10; Stop 34
ctttaatagctacattttatcataa

SEQ ID NO: 36806 - DNA, 25 bp, Artificial
  probe
  misc_feature (1)..(25): SEQ ID NO: 4853; WAN0249WV_at; Start 14; Stop 38
aatagctacattttatcataattat

SEQ ID NO: 36807 - DNA, 25 bp, Artificial
  probe
  misc_feature (1)..(25): SEQ ID NO: 4853; WAN0249WV_at; Start 15; Stop 39
atagctacattttatcataattatc

SEQ ID NO: 36808 - DNA, 25 bp, Artificial
  probe
  misc_feature (1)..(25): SEQ ID NO: 4853; WAN0249WV_at; Start 8; Stop 32
tcctttaatagctacattttatcat

SEQ ID NO: 36809 - DNA, 25 bp, Artificial
  probe
  misc_feature (1)..(25): SEQ ID NO: 4853; WAN0249WV_at; Start 6; Stop 30
actcctttaatagctacattttatc

SEQ ID NO: 36810 - DNA, 25 bp, Artificial
  probe
  misc_feature (1)..(25): SEQ ID NO: 4853; WAN0249WV_at; Start 19; Stop 43
ctacattttatcataattatccaaa

SEQ ID NO: 36811 - DNA, 25 bp, Artificial
  probe
  misc_feature (1)..(25): SEQ ID NO: 4853; WAN0249WV_at; Start 7; Stop 31
ctcctttaatagctacattttatca

SEQ ID NO: 36812 - DNA, 25 bp, Artificial
  probe
  misc_feature (1)..(25): SEQ ID NO: 4853; WAN0249WV_at; Start 30; Stop 54
cataattatccaaagaaaaaaagag

SEQ ID NO: 36813 - DNA, 25 bp, Artificial
  probe
  misc_feature (1)..(25): SEQ ID NO: 4853; WAN0249WV_at; Start 16; Stop 40
tagctacattttatcataattatcc

SEQ ID NO: 36814 - DNA, 25 bp, Artificial
  probe
  misc_feature (1)..(25): SEQ ID NO: 4853; WAN0249WV_at; Start 22; Stop 46
cattttatcataattatccaaagaa

SEQ ID NO: 36815 - DNA, 25 bp, Artificial
  probe
  misc_feature (1)..(25): SEQ ID NO: 4853; WAN0249WV_at; Start 27; Stop 51
tatcataattatccaaagaaaaaaa

SEQ ID NO: 36816 - DNA, 25 bp, Artificial
  probe
  misc_feature (1)..(25): SEQ ID NO: 4853; WAN0249WV_at; Start 11; Stop 35
tttaatagctacattttatcataat

SEQ ID NO: 36817 - DNA, 25 bp, Artificial
  probe
  misc_feature (1)..(25): SEQ ID NO: 4853; WAN0249WV_at; Start 29; Stop 53
tcataattatccaaagaaaaaaaga

SEQ ID NO: 36818 - DNA, 25 bp, Artificial
  probe
  misc_feature (1)..(25): SEQ ID NO: 4853; WAN0249WV_at; Start 21; Stop 45
acattttatcataattatccaaaga

SEQ ID NO: 36819 - DNA, 25 bp, Artificial
  probe
  misc_feature (1)..(25): SEQ ID NO: 4853; WAN0249WV_at; Start 24; Stop 48
ttttatcataattatccaaagaaaa

SEQ ID NO: 36820 - DNA, 25 bp, Artificial
  probe
  misc_feature (1)..(25): SEQ ID NO: 4853; WAN0249WV_at; Start 12; Stop 36
ttaatagctacattttatcataatt

SEQ ID NO: 36821 - DNA, 25 bp, Artificial
  probe
  misc_feature (1)..(25): SEQ ID NO: 4853; WAN0249WV_at; Start 28; Stop 52
atcataattatccaaagaaaaaaag

SEQ ID NO: 36822 - DNA, 25 bp, Artificial
  probe
  misc_feature (1)..(25): SEQ ID NO: 4853; WAN0249WV_at; Start 26; Stop 50
ttatcataattatccaaagaaaaaa

SEQ ID NO: 36823 - DNA, 25 bp, Artificial
  probe
  misc_feature (1)..(25): SEQ ID NO: 4853; WAN0249WV_at; Start 25; Stop 49
tttatcataattatccaaagaaaaa

SEQ ID NO: 36824 - DNA, 25 bp, Artificial
  probe
  misc_feature (1)..(25): SEQ ID NO: 4853; WAN0249WV_at; Start 1; Stop 25
ttcttactcctttaatagctacatt

SEQ ID NO: 36825 - DNA, 25 bp, Artificial
  probe
  misc_feature (1)..(25): SEQ ID NO: 4853; WAN0249WV_at; Start 17; Stop 41
agctacattttatcataattatcca

SEQ ID NO: 36826 - DNA, 25 bp, Artificial
  probe
  misc_feature (1)..(25): SEQ ID NO: 4853; WAN0249WV_at; Start 3; Stop 27
cttactcctttaatagctacatttt

SEQ ID NO: 36827 - DNA, 25 bp, Artificial
  probe
  misc_feature (1)..(25): SEQ ID NO: 4853; WAN0249WV_at; Start 13; Stop 37
taatagctacattttatcataatta

SEQ ID NO: 36828 - DNA, 25 bp, Artificial
  probe
  misc_feature (1)..(25): SEQ ID NO: 3292; WAN0249WW_at; Start 1; Stop 25
ctattagattctatttaaaaagact

SEQ ID NO: 36829 - DNA, 25 bp, Artificial
  probe
  misc_feature (1)..(25): SEQ ID NO: 3292; WAN0249WW_at; Start 21; Stop 45
agacttagaatgcacatgaaagtat

SEQ ID NO: 36830 - DNA, 25 bp, Artificial
  probe
  misc_feature (1)..(25): SEQ ID NO: 3292; WAN0249WW_at; Start 16; Stop 40
taaaaagacttagaatgcacatgaa

SEQ ID NO: 36831 - DNA, 25 bp, Artificial
  probe
  misc_feature (1)..(25): SEQ ID NO: 3292; WAN0249WW_at; Start 29; Stop 53
aatgcacatgaaagtatgtattcta

SEQ ID NO: 36832 - DNA, 25 bp, Artificial
  probe
  misc_feature (1)..(25): SEQ ID NO: 3292; WAN0249WW_at; Start 17; Stop 41
aaaaagacttagaatgcacatgaaa

SEQ ID NO: 36833 - DNA, 25 bp, Artificial
  probe
  misc_feature (1)..(25): SEQ ID NO: 3292; WAN0249WW_at; Start 50; Stop 74
tctaggtcttttgttttgtatacat

SEQ ID NO: 36834 - DNA, 25 bp, Artificial
  probe
  misc_feature (1)..(25): SEQ ID NO: 3292; WAN0249WW_at; Start 43; Stop 67
tatgtattctaggtcttttgttttg

SEQ ID NO: 36835 - DNA, 25 bp, Artificial
  probe
  misc_feature (1)..(25): SEQ ID NO: 3292; WAN0249WW_at; Start 27; Stop 51
agaatgcacatgaaagtatgtattc

SEQ ID NO: 36836 - DNA, 25 bp, Artificial
  probe
  misc_feature (1)..(25): SEQ ID NO: 3292; WAN0249WW_at; Start 19; Stop 43
aaagacttagaatgcacatgaaagt

SEQ ID NO: 36837 - DNA, 25 bp, Artificial
  probe
  misc_feature (1)..(25): SEQ ID NO: 3292; WAN0249WW_at; Start 15; Stop 39
ttaaaaagacttagaatgcacatga

SEQ ID NO: 36838 - DNA, 25 bp, Artificial
  probe
  misc_feature (1)..(25): SEQ ID NO: 3292; WAN0249WW_at; Start 30; Stop 54
atgcacatgaaagtatgtattctag

SEQ ID NO: 36839 - DNA, 25 bp, Artificial
  probe
  misc_feature (1)..(25): SEQ ID NO: 3292; WAN0249WW_at; Start 34; Stop 58
acatgaaagtatgtattctaggtct

SEQ ID NO: 36840 - DNA, 25 bp, Artificial
  probe
  misc_feature (1)..(25): SEQ ID NO: 3292; WAN0249WW_at; Start 26; Stop 50
tagaatgcacatgaaagtatgtatt

SEQ ID NO: 36841 - DNA, 25 bp, Artificial
  probe
  misc_feature (1)..(25): SEQ ID NO: 3292; WAN0249WW_at; Start 40; Stop 64
aagtatgtattctaggtcttttgtt

SEQ ID NO: 36842 - DNA, 25 bp, Artificial
  probe
  misc_feature (1)..(25): SEQ ID NO: 3292; WAN0249WW_at; Start 23; Stop 47
acttagaatgcacatgaaagtatgt

SEQ ID NO: 36843 - DNA, 25 bp, Artificial
  probe
  misc_feature (1)..(25): SEQ ID NO: 3292; WAN0249WW_at; Start 20; Stop 44
aagacttagaatgcacatgaaagta

SEQ ID NO: 36844 - DNA, 25 bp, Artificial
  probe
  misc_feature (1)..(25): SEQ ID NO: 3292; WAN0249WW_at; Start 5; Stop 29
tagattctatttaaaaagacttaga

SEQ ID NO: 36845 - DNA, 25 bp, Artificial
  probe
  misc_feature (1)..(25): SEQ ID NO: 3292; WAN0249WW_at; Start 35; Stop 59
catgaaagtatgtattctaggtctt

SEQ ID NO: 36846 - DNA, 25 bp, Artificial
  probe
  misc_feature (1)..(25): SEQ ID NO: 3292; WAN0249WW_at; Start 18; Stop 42
aaaagacttagaatgcacatgaaag

SEQ ID NO: 36847 - DNA, 25 bp, Artificial
  probe
  misc_feature (1)..(25): SEQ ID NO: 3292; WAN0249WW_at; Start 24; Stop 48
cttagaatgcacatgaaagtatgta

SEQ ID NO: 36848 - DNA, 25 bp, Artificial
  probe
  misc_feature (1)..(25): SEQ ID NO: 3292; WAN0249WW_at; Start 11; Stop 35
ctatttaaaaagacttagaatgcac

SEQ ID NO: 36849 - DNA, 25 bp, Artificial
  probe
  misc_feature (1)..(25): SEQ ID NO: 3292; WAN0249WW_at; Start 66; Stop 90
tgtatacatttaattttcaagagta

SEQ ID NO: 36850 - DNA, 25 bp, Artificial
  probe
  misc_feature (1)..(25): SEQ ID NO: 3292; WAN0249WW_at; Start 45; Stop 69
tgtattctaggtcttttgttttgta

SEQ ID NO: 36851 - DNA, 25 bp, Artificial
  probe
  misc_feature (1)..(25): SEQ ID NO: 3292; WAN0249WW_at; Start 33; Stop 57
cacatgaaagtatgtattctaggtc

SEQ ID NO: 36852 - DNA, 25 bp, Artificial
  probe
  misc_feature (1)..(25): SEQ ID NO: 3292; WAN0249WW_at; Start 49; Stop 73
ttctaggtcttttgttttgtataca

SEQ ID NO: 36853 - DNA, 25 bp, Artificial
  probe
  misc_feature (1)..(25): SEQ ID NO: 3292; WAN0249WW_at; Start 51; Stop 75
ctaggtcttttgttttgtatacatt

SEQ ID NO: 36854 - DNA, 25 bp, Artificial
  probe
  misc_feature (1)..(25): SEQ ID NO: 3292; WAN0249WW_at; Start 22; Stop 46
gacttagaatgcacatgaaagtatg

SEQ ID NO: 36855 - DNA, 25 bp, Artificial
  probe
  misc_feature (1)..(25): SEQ ID NO: 3292; WAN0249WW_at; Start 38; Stop 62
gaaagtatgtattctaggtcttttg

SEQ ID NO: 36856 - DNA, 25 bp, Artificial
  probe
  misc_feature (1)..(25): SEQ ID NO: 3292; WAN0249WW_at; Start 28; Stop 52
gaatgcacatgaaagtatgtattct

SEQ ID NO: 36857 - DNA, 25 bp, Artificial
  probe
  misc_feature (1)..(25): SEQ ID NO: 3292; WAN0249WW_at; Start 14; Stop 38
tttaaaaagacttagaatgcacatg

SEQ ID NO: 36858 - DNA, 25 bp, Artificial
  probe
  misc_feature (1)..(25): SEQ ID NO: 3292; WAN0249WW_at; Start 31; Stop 55
tgcacatgaaagtatgtattctagg

SEQ ID NO: 36859 - DNA, 25 bp, Artificial
  probe
  misc_feature (1)..(25): SEQ ID NO: 3292; WAN0249WW_at; Start 25; Stop 49
ttagaatgcacatgaaagtatgtat

SEQ ID NO: 36860 - DNA, 25 bp, Artificial
  probe
  misc_feature (1)..(25): SEQ ID NO: 3292; WAN0249WW_at; Start 12; Stop 36
tatttaaaaagacttagaatgcaca

SEQ ID NO: 36861 - DNA, 25 bp, Artificial
  probe
  misc_feature (1)..(25): SEQ ID NO: 3292; WAN0249WW_at; Start 32; Stop 56
gcacatgaaagtatgtattctaggt

SEQ ID NO: 36862 - DNA, 25 bp, Artificial
  probe
  misc_feature (1)..(25): SEQ ID NO: 4473; WAN0249WX_at; Start 24; Stop 48
caaaacaaaagacctagaatacata

SEQ ID NO: 36863 - DNA, 25 bp, Artificial
  probe
  misc_feature (1)..(25): SEQ ID NO: 4473; WAN0249WX_at; Start 40; Stop 64
gaatacatactttcatgtgcattct

SEQ ID NO: 36864 - DNA, 25 bp, Artificial
  probe
  misc_feature (1)..(25): SEQ ID NO: 4473; WAN0249WX_at; Start 38; Stop 62
tagaatacatactttcatgtgcatt

SEQ ID NO: 36865 - DNA, 25 bp, Artificial
  probe
  misc_feature (1)..(25): SEQ ID NO: 4473; WAN0249WX_at; Start 1; Stop 25
tactcttgaaaattaaatgtataca

SEQ ID NO: 36866 - DNA, 25 bp, Artificial
  probe
  misc_feature (1)..(25): SEQ ID NO: 4473; WAN0249WX_at; Start 26; Stop 50
aaacaaaagacctagaatacatact

SEQ ID NO: 36867 - DNA, 25 bp, Artificial
  probe
  misc_feature (1)..(25): SEQ ID NO: 4473; WAN0249WX_at; Start 34; Stop 58
gacctagaatacatactttcatgtg

SEQ ID NO: 36868 - DNA, 25 bp, Artificial
  probe
  misc_feature (1)..(25): SEQ ID NO: 4473; WAN0249WX_at; Start 23; Stop 47
acaaaacaaaagacctagaatacat

SEQ ID NO: 36869 - DNA, 25 bp, Artificial
  probe
  misc_feature (1)..(25): SEQ ID NO: 4473; WAN0249WX_at; Start 20; Stop 44
tatacaaaacaaaagacctagaata

SEQ ID NO: 36870 - DNA, 25 bp, Artificial
  probe
  misc_feature (1)..(25): SEQ ID NO: 4473; WAN0249WX_at; Start 35; Stop 59
acctagaatacatactttcatgtgc

SEQ ID NO: 36871 - DNA, 25 bp, Artificial
  probe
  misc_feature (1)..(25): SEQ ID NO: 4473; WAN0249WX_at; Start 44; Stop 68
acatactttcatgtgcattctaagt

SEQ ID NO: 36872 - DNA, 25 bp, Artificial
  probe
  misc_feature (1)..(25): SEQ ID NO: 4473; WAN0249WX_at; Start 50; Stop 74
tttcatgtgcattctaagtcttttt

SEQ ID NO: 36873 - DNA, 25 bp, Artificial
  probe
  misc_feature (1)..(25): SEQ ID NO: 4473; WAN0249WX_at; Start 22; Stop 46
tacaaaacaaaagacctagaataca

SEQ ID NO: 36874 - DNA, 25 bp, Artificial
  probe
  misc_feature (1)..(25): SEQ ID NO: 4473; WAN0249WX_at; Start 47; Stop 71
tactttcatgtgcattctaagtctt

SEQ ID NO: 36875 - DNA, 25 bp, Artificial
  probe
  misc_feature (1)..(25): SEQ ID NO: 4473; WAN0249WX_at; Start 58; Stop 82
gcattctaagtctttttaaatagaa

SEQ ID NO: 36876 - DNA, 25 bp, Artificial
  probe
  misc_feature (1)..(25): SEQ ID NO: 4473; WAN0249WX_at; Start 36; Stop 60
cctagaatacatactttcatgtgca

SEQ ID NO: 36877 - DNA, 25 bp, Artificial
  probe
  misc_feature (1)..(25): SEQ ID NO: 4473; WAN0249WX_at; Start 39; Stop 63
agaatacatactttcatgtgcattc

SEQ ID NO: 36878 - DNA, 25 bp, Artificial
  probe
  misc_feature (1)..(25): SEQ ID NO: 4473; WAN0249WX_at; Start 27; Stop 51
aacaaaagacctagaatacatactt

SEQ ID NO: 36879 - DNA, 25 bp, Artificial
  probe
  misc_feature (1)..(25): SEQ ID NO: 4473; WAN0249WX_at; Start 52; Stop 76
tcatgtgcattctaagtctttttaa

SEQ ID NO: 36880 - DNA, 25 bp, Artificial
  probe
  misc_feature (1)..(25): SEQ ID NO: 4473; WAN0249WX_at; Start 16; Stop 40
aatgtatacaaaacaaaagacctag

SEQ ID NO: 36881 - DNA, 25 bp, Artificial
  probe
  misc_feature (1)..(25): SEQ ID NO: 4473; WAN0249WX_at; Start 49; Stop 73
ctttcatgtgcattctaagtctttt

SEQ ID NO: 36882 - DNA, 25 bp, Artificial
  probe
  misc_feature (1)..(25): SEQ ID NO: 4473; WAN0249WX_at; Start 17; Stop 41
atgtatacaaaacaaaagacctaga

SEQ ID NO: 36883 - DNA, 25 bp, Artificial
  probe
  misc_feature (1)..(25): SEQ ID NO: 4473; WAN0249WX_at; Start 30; Stop 54
aaaagacctagaatacatactttca

SEQ ID NO: 36884 - DNA, 25 bp, Artificial
  probe
  misc_feature (1)..(25): SEQ ID NO: 4473; WAN0249WX_at; Start 45; Stop 69
catactttcatgtgcattctaagtc

SEQ ID NO: 36885 - DNA, 25 bp, Artificial
  probe
  misc_feature (1)..(25): SEQ ID NO: 4473; WAN0249WX_at; Start 32; Stop 56
aagacctagaatacatactttcatg

SEQ ID NO: 36886 - DNA, 25 bp, Artificial
  probe
  misc_feature (1)..(25): SEQ ID NO: 4473; WAN0249WX_at; Start 51; Stop 75
ttcatgtgcattctaagtcttttta

SEQ ID NO: 36887 - DNA, 25 bp, Artificial
  probe
  misc_feature (1)..(25): SEQ ID NO: 4473; WAN0249WX_at; Start 66; Stop 90
agtctttttaaatagaatctaatag

SEQ ID NO: 36888 - DNA, 25 bp, Artificial
  probe
  misc_feature (1)..(25): SEQ ID NO: 4473; WAN0249WX_at; Start 48; Stop 72
actttcatgtgcattctaagtcttt

SEQ ID NO: 36889 - DNA, 25 bp, Artificial
  probe
  misc_feature (1)..(25): SEQ ID NO: 4473; WAN0249WX_at; Start 53; Stop 77
catgtgcattctaagtctttttaaa

SEQ ID NO: 36890 - DNA, 25 bp, Artificial
  probe
  misc_feature (1)..(25): SEQ ID NO: 4473; WAN0249WX_at; Start 41; Stop 65
aatacatactttcatgtgcattcta

SEQ ID NO: 36891 - DNA, 25 bp, Artificial
  probe
  misc_feature (1)..(25): SEQ ID NO: 4473; WAN0249WX_at; Start 37; Stop 61
ctagaatacatactttcatgtgcat

SEQ ID NO: 36892 - DNA, 25 bp, Artificial
  probe
  misc_feature (1)..(25): SEQ ID NO: 4473; WAN0249WX_at; Start 56; Stop 80
gtgcattctaagtctttttaaatag

SEQ ID NO: 36893 - DNA, 25 bp, Artificial
  probe
  misc_feature (1)..(25): SEQ ID NO: 4473; WAN0249WX_at; Start 18; Stop 42
tgtatacaaaacaaaagacctagaa

SEQ ID NO: 36894 - DNA, 25 bp, Artificial
  probe
  misc_feature (1)..(25): SEQ ID NO: 4473; WAN0249WX_at; Start 29; Stop 53
caaaagacctagaatacatactttc

SEQ ID NO: 36895 - DNA, 25 bp, Artificial
  probe
  misc_feature (1)..(25): SEQ ID NO: 4473; WAN0249WX_at; Start 43; Stop 67
tacatactttcatgtgcattctaag

SEQ ID NO: 36896 - DNA, 25 bp, Artificial
  probe
  misc_feature (1)..(25): SEQ ID NO: 221; WAN0249WY_at; Start 36; Stop 60
tccctcaaattagctagtagcatag

SEQ ID NO: 36897 - DNA, 25 bp, Artificial
  probe
  misc_feature (1)..(25): SEQ ID NO: 221; WAN0249WY_at; Start 21; Stop 45
ttatcttagcaaatttccctcaaat

SEQ ID NO: 36898 - DNA, 25 bp, Artificial
  probe
  misc_feature (1)..(25): SEQ ID NO: 221; WAN0249WY_at; Start 33; Stop 57
atttccctcaaattagctagtagca

SEQ ID NO: 36899 - DNA, 25 bp, Artificial
  probe
  misc_feature (1)..(25): SEQ ID NO: 221; WAN0249WY_at; Start 22; Stop 46
tatcttagcaaatttccctcaaatt

SEQ ID NO: 36900 - DNA, 25 bp, Artificial
  probe
  misc_feature (1)..(25): SEQ ID NO: 221; WAN0249WY_at; Start 18; Stop 42
tatttatcttagcaaatttccctca

SEQ ID NO: 36901 - DNA, 25 bp, Artificial
  probe
  misc_feature (1)..(25): SEQ ID NO: 221; WAN0249WY_at; Start 41; Stop 65
caaattagctagtagcatagcctgt

SEQ ID NO: 36902 - DNA, 25 bp, Artificial
  probe
  misc_feature (1)..(25): SEQ ID NO: 221; WAN0249WY_at; Start 17; Stop 41
ttatttatcttagcaaatttccctc

SEQ ID NO: 36903 - DNA, 25 bp, Artificial
  probe
  misc_feature (1)..(25): SEQ ID NO: 221; WAN0249WY_at; Start 19; Stop 43
atttatcttagcaaatttccctcaa

SEQ ID NO: 36904 - DNA, 25 bp, Artificial
  probe
  misc_feature (1)..(25): SEQ ID NO: 221; WAN0249WY_at; Start 27; Stop 51
tagcaaatttccctcaaattagcta

SEQ ID NO: 36905 - DNA, 25 bp, Artificial
  probe
  misc_feature (1)..(25): SEQ ID NO: 221; WAN0249WY_at; Start 2; Stop 26
agagctcctttctttttatttatct

SEQ ID NO: 36906 - DNA, 25 bp, Artificial
  probe
  misc_feature (1)..(25): SEQ ID NO: 221; WAN0249WY_at; Start 26; Stop 50
ttagcaaatttccctcaaattagct

SEQ ID NO: 36907 - DNA, 25 bp, Artificial
  probe
  misc_feature (1)..(25): SEQ ID NO: 221; WAN0249WY_at; Start 35; Stop 59
ttccctcaaattagctagtagcata

SEQ ID NO: 36908 - DNA, 25 bp, Artificial
  probe
  misc_feature (1)..(25): SEQ ID NO: 221; WAN0249WY_at; Start 37; Stop 61
ccctcaaattagctagtagcatagc

SEQ ID NO: 36909 - DNA, 25 bp, Artificial
  probe
  misc_feature (1)..(25): SEQ ID NO: 221; WAN0249WY_at; Start 34; Stop 58
tttccctcaaattagctagtagcat

SEQ ID NO: 36910 - DNA, 25 bp, Artificial
  probe
  misc_feature (1)..(25): SEQ ID NO: 221; WAN0249WY_at; Start 30; Stop 54
caaatttccctcaaattagctagta

SEQ ID NO: 36911 - DNA, 25 bp, Artificial
  probe
  misc_feature (1)..(25): SEQ ID NO: 221; WAN0249WY_at; Start 38; Stop 62
cctcaaattagctagtagcatagcc

SEQ ID NO: 36912 - DNA, 25 bp, Artificial
  probe
  misc_feature (1)..(25): SEQ ID NO: 221; WAN0249WY_at; Start 7; Stop 31
tcctttctttttatttatcttagca

SEQ ID NO: 36913 - DNA, 25 bp, Artificial
  probe
  misc_feature (1)..(25): SEQ ID NO: 221; WAN0249WY_at; Start 25; Stop 49
cttagcaaatttccctcaaattagc

SEQ ID NO: 36914 - DNA, 25 bp, Artificial
  probe
  misc_feature (1)..(25): SEQ ID NO: 221; WAN0249WY_at; Start 32; Stop 56
aatttccctcaaattagctagtagc

SEQ ID NO: 36915 - DNA, 25 bp, Artificial
  probe
  misc_feature (1)..(25): SEQ ID NO: 221; WAN0249WY_at; Start 24; Stop 48
tcttagcaaatttccctcaaattag

SEQ ID NO: 36916 - DNA, 25 bp, Artificial
  probe
  misc_feature (1)..(25): SEQ ID NO: 221; WAN0249WY_at; Start 23; Stop 47
atcttagcaaatttccctcaaatta

SEQ ID NO: 36917 - DNA, 25 bp, Artificial
  probe
  misc_feature (1)..(25): SEQ ID NO: 221; WAN0249WY_at; Start 28; Stop 52
agcaaatttccctcaaattagctag

SEQ ID NO: 36918 - DNA, 25 bp, Artificial
  probe
  misc_feature (1)..(25): SEQ ID NO: 221; WAN0249WY_at; Start 31; Stop 55
aaatttccctcaaattagctagtag

SEQ ID NO: 36919 - DNA, 25 bp, Artificial
  probe
  misc_feature (1)..(25): SEQ ID NO: 221; WAN0249WY_at; Start 40; Stop 64
tcaaattagctagtagcatagcctg

SEQ ID NO: 36920 - DNA, 25 bp, Artificial
  probe
  misc_feature (1)..(25): SEQ ID NO: 221; WAN0249WY_at; Start 29; Stop 53
gcaaatttccctcaaattagctagt

SEQ ID NO: 36921 - DNA, 25 bp, Artificial
  probe
  misc_feature (1)..(25): SEQ ID NO: 221; WAN0249WY_at; Start 39; Stop 63
ctcaaattagctagtagcatagcct

SEQ ID NO: 36922 - DNA, 25 bp, Artificial
  probe
  misc_feature (1)..(25): SEQ ID NO: 221; WAN0249WY_at; Start 20; Stop 44
tttatcttagcaaatttccctcaaa

SEQ ID NO: 36923 - DNA, 25 bp, Artificial
  probe
  misc_feature (1)..(25): SEQ ID NO: 330; WAN0249WZ_at; Start 10; Stop 34
gctactagctaatttgagggaaatt

SEQ ID NO: 36924 - DNA, 25 bp, Artificial
  probe
  misc_feature (1)..(25): SEQ ID NO: 330; WAN0249WZ_at; Start 20; Stop 44
aatttgagggaaatttgctaagata

SEQ ID NO: 36925 - DNA, 25 bp, Artificial
  probe
  misc_feature (1)..(25): SEQ ID NO: 330; WAN0249WZ_at; Start 18; Stop 42
ctaatttgagggaaatttgctaaga

SEQ ID NO: 36926 - DNA, 25 bp, Artificial
  probe
  misc_feature (1)..(25): SEQ ID NO: 330; WAN0249WZ_at; Start 6; Stop 30
ctatgctactagctaatttgaggga

SEQ ID NO: 36927 - DNA, 25 bp, Artificial
  probe
  misc_feature (1)..(25): SEQ ID NO: 330; WAN0249WZ_at; Start 9; Stop 33
tgctactagctaatttgagggaaat

SEQ ID NO: 36928 - DNA, 25 bp, Artificial
  probe
  misc_feature (1)..(25): SEQ ID NO: 330; WAN0249WZ_at; Start 24; Stop 48
tgagggaaatttgctaagataaata

SEQ ID NO: 36929 - DNA, 25 bp, Artificial
  probe
  misc_feature (1)..(25): SEQ ID NO: 330; WAN0249WZ_at; Start 2; Stop 26
caggctatgctactagctaatttga

SEQ ID NO: 36930 - DNA, 25 bp, Artificial
  probe
  misc_feature (1)..(25): SEQ ID NO: 330; WAN0249WZ_at; Start 15; Stop 39
tagctaatttgagggaaatttgcta

SEQ ID NO: 36931 - DNA, 25 bp, Artificial
  probe
  misc_feature (1)..(25): SEQ ID NO: 330; WAN0249WZ_at; Start 35; Stop 59
tgctaagataaataaaaagaaagga

SEQ ID NO: 36932 - DNA, 25 bp, Artificial
  probe
  misc_feature (1)..(25): SEQ ID NO: 330; WAN0249WZ_at; Start 21; Stop 45
atttgagggaaatttgctaagataa

SEQ ID NO: 36933 - DNA, 25 bp, Artificial
  probe
  misc_feature (1)..(25): SEQ ID NO: 330; WAN0249WZ_at; Start 16; Stop 40
agctaatttgagggaaatttgctaa

SEQ ID NO: 36934 - DNA, 25 bp, Artificial
  probe
  misc_feature (1)..(25): SEQ ID NO: 330; WAN0249WZ_at; Start 22; Stop 46
tttgagggaaatttgctaagataaa

SEQ ID NO: 36935 - DNA, 25 bp, Artificial
  probe
  misc_feature (1)..(25): SEQ ID NO: 330; WAN0249WZ_at; Start 17; Stop 41
gctaatttgagggaaatttgctaag

SEQ ID NO: 36936 - DNA, 25 bp, Artificial
  probe
  misc_feature (1)..(25): SEQ ID NO: 330; WAN0249WZ_at; Start 23; Stop 47
ttgagggaaatttgctaagataaat

SEQ ID NO: 36937 - DNA, 25 bp, Artificial
  probe
  misc_feature (1)..(25): SEQ ID NO: 330; WAN0249WZ_at; Start 8; Stop 32
atgctactagctaatttgagggaaa

SEQ ID NO: 36938 - DNA, 25 bp, Artificial
  probe
  misc_feature (1)..(25): SEQ ID NO: 330; WAN0249WZ_at; Start 25; Stop 49
gagggaaatttgctaagataaataa

SEQ ID NO: 36939 - DNA, 25 bp, Artificial
  probe
  misc_feature (1)..(25): SEQ ID NO: 330; WAN0249WZ_at; Start 11; Stop 35
ctactagctaatttgagggaaattt

SEQ ID NO: 36940 - DNA, 25 bp, Artificial
  probe
  misc_feature (1)..(25): SEQ ID NO: 330; WAN0249WZ_at; Start 14; Stop 38
ctagctaatttgagggaaatttgct

SEQ ID NO: 36941 - DNA, 25 bp, Artificial
  probe
  misc_feature (1)..(25): SEQ ID NO: 330; WAN0249WZ_at; Start 7; Stop 31
tatgctactagctaatttgagggaa

SEQ ID NO: 36942 - DNA, 25 bp, Artificial
  probe
  misc_feature (1)..(25): SEQ ID NO: 330; WAN0249WZ_at; Start 1; Stop 25
acaggctatgctactagctaatttg

SEQ ID NO: 36943 - DNA, 25 bp, Artificial
  probe
  misc_feature (1)..(25): SEQ ID NO: 330; WAN0249WZ_at; Start 13; Stop 37
actagctaatttgagggaaatttgc

SEQ ID NO: 36944 - DNA, 25 bp, Artificial
  probe
  misc_feature (1)..(25): SEQ ID NO: 330; WAN0249WZ_at; Start 3; Stop 27
aggctatgctactagctaatttgag

SEQ ID NO: 36945 - DNA, 25 bp, Artificial
  probe
  misc_feature (1)..(25): SEQ ID NO: 330; WAN0249WZ_at; Start 19; Stop 43
taatttgagggaaatttgctaagat

SEQ ID NO: 36946 - DNA, 25 bp, Artificial
  probe
  misc_feature (1)..(25): SEQ ID NO: 330; WAN0249WZ_at; Start 12; Stop 36
tactagctaatttgagggaaatttg

SEQ ID NO: 36947 - DNA, 25 bp, Artificial
  probe
  misc_feature (1)..(25): SEQ ID NO: 330; WAN0249WZ_at; Start 4; Stop 28
ggctatgctactagctaatttgagg

SEQ ID NO: 36948 - DNA, 25 bp, Artificial
  probe
  misc_feature (1)..(25): SEQ ID NO: 330; WAN0249WZ_at; Start 5; Stop 29
gctatgctactagctaatttgaggg

SEQ ID NO: 36949 - DNA, 25 bp, Artificial
  probe
  misc_feature (1)..(25): SEQ ID NO: 4802; WAN0249X2_at; Start 20; Stop 44
gggacacctctgatcggctctaacg

SEQ ID NO: 36950 - DNA, 25 bp, Artificial
  probe
  misc_feature (1)..(25): SEQ ID NO: 4802; WAN0249X2_at; Start 83; Stop 107
agtatcagtttagacttcctatgcg

SEQ ID NO: 36951 - DNA, 25 bp, Artificial
  probe
  misc_feature (1)..(25): SEQ ID NO: 4802; WAN0249X2_at; Start 123; Stop 147
cactctctagtagaaagggactaag

SEQ ID NO: 36952 - DNA, 25 bp, Artificial
  probe
  misc_feature (1)..(25): SEQ ID NO: 4802; WAN0249X2_at; Start 88; Stop 112
cagtttagacttcctatgcgtttcc

SEQ ID NO: 36953 - DNA, 25 bp, Artificial
  probe
  misc_feature (1)..(25): SEQ ID NO: 4802; WAN0249X2_at; Start 76; Stop 100
caagagtagtatcagtttagacttc

SEQ ID NO: 36954 - DNA, 25 bp, Artificial
  probe
  misc_feature (1)..(25): SEQ ID NO: 4802; WAN0249X2_at; Start 127; Stop 151
ctctagtagaaagggactaagtgac

SEQ ID NO: 36955 - DNA, 25 bp, Artificial
  probe
  misc_feature (1)..(25): SEQ ID NO: 4802; WAN0249X2_at; Start 93; Stop 117
tagacttcctatgcgtttccagcaa

SEQ ID NO: 36956 - DNA, 25 bp, Artificial
  probe
  misc_feature (1)..(25): SEQ ID NO: 4802; WAN0249X2_at; Start 119; Stop 143
cacgcactctctagtagaaagggac

SEQ ID NO: 36957 - DNA, 25 bp, Artificial
  probe
  misc_feature (1)..(25): SEQ ID NO: 4802; WAN0249X2_at; Start 112; Stop 136
cagcaaccacgcactctctagtaga

SEQ ID NO: 36958 - DNA, 25 bp, Artificial
  probe
  misc_feature (1)..(25): SEQ ID NO: 4802; WAN0249X2_at; Start 18; Stop 42
gagggacacctctgatcggctctaa

SEQ ID NO: 36959 - DNA, 25 bp, Artificial
  probe
  misc_feature (1)..(25): SEQ ID NO: 4802; WAN0249X2_at; Start 130; Stop 154
tagtagaaagggactaagtgacttg

SEQ ID NO: 36960 - DNA, 25 bp, Artificial
  probe
  misc_feature (1)..(25): SEQ ID NO: 4802; WAN0249X2_at; Start 67; Stop 91
taaaaaactcaagagtagtatcagt

SEQ ID NO: 36961 - DNA, 25 bp, Artificial
  probe
  misc_feature (1)..(25): SEQ ID NO: 4802; WAN0249X2_at; Start 121; Stop 145
cgcactctctagtagaaagggacta

SEQ ID NO: 36962 - DNA, 25 bp, Artificial
  probe
  misc_feature (1)..(25): SEQ ID NO: 4802; WAN0249X2_at; Start 22; Stop 46
gacacctctgatcggctctaacgtg

SEQ ID NO: 36963 - DNA, 25 bp, Artificial
  probe
  misc_feature (1)..(25): SEQ ID NO: 4802; WAN0249X2_at; Start 10; Stop 34
tcaaaagagagggacacctctgatc

SEQ ID NO: 36964 - DNA, 25 bp, Artificial
  probe
  misc_feature (1)..(25): SEQ ID NO: 4802; WAN0249X2_at; Start 2; Stop 26
tatgtacctcaaaagagagggacac

SEQ ID NO: 36965 - DNA, 25 bp, Artificial
  probe
  misc_feature (1)..(25): SEQ ID NO: 4802; WAN0249X2_at; Start 28; Stop 52
tctgatcggctctaacgtggccacc

SEQ ID NO: 36966 - DNA, 25 bp, Artificial
  probe
  misc_feature (1)..(25): SEQ ID NO: 4802; WAN0249X2_at; Start 135; Stop 159
gaaagggactaagtgacttgtctct

SEQ ID NO: 36967 - DNA, 25 bp, Artificial
  probe
  misc_feature (1)..(25): SEQ ID NO: 4802; WAN0249X2_at; Start 37; Stop 61
ctctaacgtggccaccgttttatgt

SEQ ID NO: 36968 - DNA, 25 bp, Artificial
  probe
  misc_feature (1)..(25): SEQ ID NO: 4802; WAN0249X2_at; Start 45; Stop 69
tggccaccgttttatgttttcataa

SEQ ID NO: 36969 - DNA, 25 bp, Artificial
  probe
  misc_feature (1)..(25): SEQ ID NO: 4802; WAN0249X2_at; Start 43; Stop 67
cgtggccaccgttttatgttttcat

SEQ ID NO: 36970 - DNA, 25 bp, Artificial
  probe
  misc_feature (1)..(25): SEQ ID NO: 4802; WAN0249X2_at; Start 98; Stop 122
ttcctatgcgtttccagcaaccacg

SEQ ID NO: 36971 - DNA, 25 bp, Artificial
  probe
  misc_feature (1)..(25): SEQ ID NO: 4802; WAN0249X2_at; Start 57; Stop 81
tatgttttcataaaaaactcaagag

SEQ ID NO: 36972 - DNA, 25 bp, Artificial
  probe
  misc_feature (1)..(25): SEQ ID NO: 4802; WAN0249X2_at; Start 15; Stop 39
agagagggacacctctgatcggctc

SEQ ID NO: 36973 - DNA, 25 bp, Artificial
  probe
  misc_feature (1)..(25): SEQ ID NO: 4802; WAN0249X2_at; Start 6; Stop 30
tacctcaaaagagagggacacctct

SEQ ID NO: 36974 - DNA, 25 bp, Artificial
  probe
  misc_feature (1)..(25): SEQ ID NO: 4802; WAN0249X2_at; Start 13; Stop 37
aaagagagggacacctctgatcggc

SEQ ID NO: 36975 - DNA, 25 bp, Artificial
  probe
  misc_feature (1)..(25): SEQ ID NO: 4802; WAN0249X2_at; Start 4; Stop 28
tgtacctcaaaagagagggacacct

SEQ ID NO: 36976 - DNA, 25 bp, Artificial
  probe
  misc_feature (1)..(25): SEQ ID NO: 4802; WAN0249X2_at; Start 26; Stop 50
cctctgatcggctctaacgtggcca

SEQ ID NO: 36977 - DNA, 25 bp, Artificial
  probe
  misc_feature (1)..(25): SEQ ID NO: 4802; WAN0249X2_at; Start 114; Stop 138
gcaaccacgcactctctagtagaaa

SEQ ID NO: 36978 - DNA, 25 bp, Artificial
  probe
  misc_feature (1)..(25): SEQ ID NO: 4802; WAN0249X2_at; Start 32; Stop 56
atcggctctaacgtggccaccgttt

SEQ ID NO: 36979 - DNA, 25 bp, Artificial
  probe
  misc_feature (1)..(25): SEQ ID NO: 4802; WAN0249X2_at; Start 30; Stop 54
tgatcggctctaacgtggccaccgt

SEQ ID NO: 36980 - DNA, 25 bp, Artificial
  probe
  misc_feature (1)..(25): SEQ ID NO: 4802; WAN0249X2_at; Start 79; Stop 103
gagtagtatcagtttagacttccta

SEQ ID NO: 36981 - DNA, 25 bp, Artificial
  probe
  misc_feature (1)..(25): SEQ ID NO: 4802; WAN0249X2_at; Start 90; Stop 114
gtttagacttcctatgcgtttccag

SEQ ID NO: 36982 - DNA, 25 bp, Artificial
  probe
  misc_feature (1)..(25): SEQ ID NO: 4802; WAN0249X2_at; Start 116; Stop 140
aaccacgcactctctagtagaaagg

SEQ ID NO: 36983 - DNA, 25 bp, Artificial
  probe
  misc_feature (1)..(25): SEQ ID NO: 422; WAN0249X3_at; Start 106; Stop 130
acggtggccacgttagagccgatca

SEQ ID NO: 36984 - DNA, 25 bp, Artificial
  probe
  misc_feature (1)..(25): SEQ ID NO: 422; WAN0249X3_at; Start 57; Stop 81
taggaagtctaaactgatactactc

SEQ ID NO: 36985 - DNA, 25 bp, Artificial
  probe
  misc_feature (1)..(25): SEQ ID NO: 422; WAN0249X3_at; Start 77; Stop 101
tactcttgagttttttatgaaaaca

SEQ ID NO: 36986 - DNA, 25 bp, Artificial
  probe
  misc_feature (1)..(25): SEQ ID NO: 422; WAN0249X3_at; Start 49; Stop 73
gaaacgcataggaagtctaaactga

SEQ ID NO: 36987 - DNA, 25 bp, Artificial
  probe
  misc_feature (1)..(25): SEQ ID NO: 422; WAN0249X3_at; Start 60; Stop 84
gaagtctaaactgatactactcttg

SEQ ID NO: 36988 - DNA, 25 bp, Artificial
  probe
  misc_feature (1)..(25): SEQ ID NO: 422; WAN0249X3_at; Start 11; Stop 35
cacttagtccctttctactagagag

SEQ ID NO: 36989 - DNA, 25 bp, Artificial
  probe
  misc_feature (1)..(25): SEQ ID NO: 422; WAN0249X3_at; Start 114; Stop 138
cacgttagagccgatcagaggtgtc

SEQ ID NO: 36990 - DNA, 25 bp, Artificial
  probe
  misc_feature (1)..(25): SEQ ID NO: 422; WAN0249X3_at; Start 121; Stop 145
gagccgatcagaggtgtccctctct

SEQ ID NO: 36991 - DNA, 25 bp, Artificial
  probe
  misc_feature (1)..(25): SEQ ID NO: 422; WAN0249X3_at; Start 4; Stop 28
gacaagtcacttagtccctttctac

SEQ ID NO: 36992 - DNA, 25 bp, Artificial
  probe
  misc_feature (1)..(25): SEQ ID NO: 422; WAN0249X3_at; Start 43; Stop 67
ttgctggaaacgcataggaagtcta

SEQ ID NO: 36993 - DNA, 25 bp, Artificial
  probe
  misc_feature (1)..(25): SEQ ID NO: 422; WAN0249X3_at; Start 53; Stop 77
cgcataggaagtctaaactgatact

SEQ ID NO: 36994 - DNA, 25 bp, Artificial
  probe
  misc_feature (1)..(25): SEQ ID NO: 422; WAN0249X3_at; Start 104; Stop 128
aaacggtggccacgttagagccgat

SEQ ID NO: 36995 - DNA, 25 bp, Artificial
  probe
  misc_feature (1)..(25): SEQ ID NO: 422; WAN0249X3_at; Start 45; Stop 69
gctggaaacgcataggaagtctaaa

SEQ ID NO: 36996 - DNA, 25 bp, Artificial
  probe
  misc_feature (1)..(25): SEQ ID NO: 422; WAN0249X3_at; Start 63; Stop 87
gtctaaactgatactactcttgagt

SEQ ID NO: 36997 - DNA, 25 bp, Artificial
  probe
  misc_feature (1)..(25): SEQ ID NO: 422; WAN0249X3_at; Start 20; Stop 44
cctttctactagagagtgcgtggtt

SEQ ID NO: 36998 - DNA, 25 bp, Artificial
  probe
  misc_feature (1)..(25): SEQ ID NO: 422; WAN0249X3_at; Start 15; Stop 39
tagtccctttctactagagagtgcg

SEQ ID NO: 36999 - DNA, 25 bp, Artificial
  probe
  misc_feature (1)..(25): SEQ ID NO: 422; WAN0249X3_at; Start 93; Stop 117
atgaaaacataaaacggtggccacg

SEQ ID NO: 37000 - DNA, 25 bp, Artificial
  probe
  misc_feature (1)..(25): SEQ ID NO: 422; WAN0249X3_at; Start 92; Stop 116
tatgaaaacataaaacggtggccac

SEQ ID NO: 37001 - DNA, 25 bp, Artificial
  probe
  misc_feature (1)..(25): SEQ ID NO: 422; WAN0249X3_at; Start 47; Stop 71
tggaaacgcataggaagtctaaact

SEQ ID NO: 37002 - DNA, 25 bp, Artificial
  probe
  misc_feature (1)..(25): SEQ ID NO: 422; WAN0249X3_at; Start 131; Stop 155
gaggtgtccctctcttttgaggtac

SEQ ID NO: 37003 - DNA, 25 bp, Artificial
  probe
  misc_feature (1)..(25): SEQ ID NO: 422; WAN0249X3_at; Start 99; Stop 123
acataaaacggtggccacgttagag

SEQ ID NO: 37004 - DNA, 25 bp, Artificial
  probe
  misc_feature (1)..(25): SEQ ID NO: 422; WAN0249X3_at; Start 108; Stop 132
ggtggccacgttagagccgatcaga

SEQ ID NO: 37005 - DNA, 25 bp, Artificial
  probe
  misc_feature (1)..(25): SEQ ID NO: 422; WAN0249X3_at; Start 135; Stop 159
tgtccctctcttttgaggtacataa

SEQ ID NO: 37006 - DNA, 25 bp, Artificial
  probe
  misc_feature (1)..(25): SEQ ID NO: 422; WAN0249X3_at; Start 18; Stop 42
tccctttctactagagagtgcgtgg

SEQ ID NO: 37007 - DNA, 25 bp, Artificial
  probe
  misc_feature (1)..(25): SEQ ID NO: 422; WAN0249X3_at; Start 1; Stop 25
agagacaagtcacttagtccctttc

SEQ ID NO: 37008 - DNA, 25 bp, Artificial
  probe
  misc_feature (1)..(25): SEQ ID NO: 422; WAN0249X3_at; Start 38; Stop 62
cgtggttgctggaaacgcataggaa

SEQ ID NO: 37009 - DNA, 25 bp, Artificial
  probe
  misc_feature (1)..(25): SEQ ID NO: 422; WAN0249X3_at; Start 40; Stop 64
tggttgctggaaacgcataggaagt

SEQ ID NO: 37010 - DNA, 25 bp, Artificial
  probe
  misc_feature (1)..(25): SEQ ID NO: 422; WAN0249X3_at; Start 126; Stop 150
gatcagaggtgtccctctcttttga

SEQ ID NO: 37011 - DNA, 25 bp, Artificial
  probe
  misc_feature (1)..(25): SEQ ID NO: 422; WAN0249X3_at; Start 116; Stop 140
cgttagagccgatcagaggtgtccc

SEQ ID NO: 37012 - DNA, 25 bp, Artificial
  probe
  misc_feature (1)..(25): SEQ ID NO: 422; WAN0249X3_at; Start 22; Stop 46
tttctactagagagtgcgtggttgc

SEQ ID NO: 37013 - DNA, 25 bp, Artificial
  probe
  misc_feature (1)..(25): SEQ ID NO: 422; WAN0249X3_at; Start 118; Stop 142
ttagagccgatcagaggtgtccctc

SEQ ID NO: 37014 - DNA, 25 bp, Artificial
  probe
  misc_feature (1)..(25): SEQ ID NO: 422; WAN0249X3_at; Start 110; Stop 134
tggccacgttagagccgatcagagg

SEQ ID NO: 37015 - DNA, 25 bp, Artificial
  probe
  misc_feature (1)..(25): SEQ ID NO: 422; WAN0249X3_at; Start 24; Stop 48
tctactagagagtgcgtggttgctg

SEQ ID NO: 37016 - DNA, 25 bp, Artificial
  probe
  misc_feature (1)..(25): SEQ ID NO: 422; WAN0249X3_at; Start 9; Stop 33
gtcacttagtccctttctactagag

SEQ ID NO: 37017 - DNA, 25 bp, Artificial
  probe
  misc_feature (1)..(25): SEQ ID NO: 3161; WAN0249X4_at; Start 42; Stop 66
aaataattacaacaagagaggtata

SEQ ID NO: 37018 - DNA, 25 bp, Artificial
  probe
  misc_feature (1)..(25): SEQ ID NO: 3161; WAN0249X4_at; Start 3; Stop 27
tgacattgattattaagagtgtcac

SEQ ID NO: 37019 - DNA, 25 bp, Artificial
  probe
  misc_feature (1)..(25): SEQ ID NO: 3161; WAN0249X4_at; Start 7; Stop 31
attgattattaagagtgtcacaatt

SEQ ID NO: 37020 - DNA, 25 bp, Artificial
  probe
  misc_feature (1)..(25): SEQ ID NO: 3161; WAN0249X4_at; Start 43; Stop 67
aataattacaacaagagaggtataa

SEQ ID NO: 37021 - DNA, 25 bp, Artificial
  probe
  misc_feature (1)..(25): SEQ ID NO: 3161; WAN0249X4_at; Start 6; Stop 30
cattgattattaagagtgtcacaat

SEQ ID NO: 37022 - DNA, 25 bp, Artificial
  probe
  misc_feature (1)..(25): SEQ ID NO: 3161; WAN0249X4_at; Start 44; Stop 68
ataattacaacaagagaggtataaa

SEQ ID NO: 37023 - DNA, 25 bp, Artificial
  probe
  misc_feature (1)..(25): SEQ ID NO: 3161; WAN0249X4_at; Start 41; Stop 65
aaaataattacaacaagagaggtat

SEQ ID NO: 37024 - DNA, 25 bp, Artificial
  probe
  misc_feature (1)..(25): SEQ ID NO: 3161; WAN0249X4_at; Start 4; Stop 28
gacattgattattaagagtgtcaca

SEQ ID NO: 37025 - DNA, 25 bp, Artificial
  probe
  misc_feature (1)..(25): SEQ ID NO: 3161; WAN0249X4_at; Start 37; Stop 61
aactaaaataattacaacaagagag

SEQ ID NO: 37026 - DNA, 25 bp, Artificial
  probe
  misc_feature (1)..(25): SEQ ID NO: 3161; WAN0249X4_at; Start 1; Stop 25
attgacattgattattaagagtgtc

SEQ ID NO: 37027 - DNA, 25 bp, Artificial
  probe
  misc_feature (1)..(25): SEQ ID NO: 3161; WAN0249X4_at; Start 36; Stop 60
taactaaaataattacaacaagaga

SEQ ID NO: 37028 - DNA, 25 bp, Artificial
  probe
  misc_feature (1)..(25): SEQ ID NO: 3161; WAN0249X4_at; Start 33; Stop 57
ctgtaactaaaataattacaacaag

SEQ ID NO: 37029 - DNA, 25 bp, Artificial
  probe
  misc_feature (1)..(25): SEQ ID NO: 3161; WAN0249X4_at; Start 34; Stop 58
tgtaactaaaataattacaacaaga

SEQ ID NO: 37030 - DNA, 25 bp, Artificial
  probe
  misc_feature (1)..(25): SEQ ID NO: 3161; WAN0249X4_at; Start 40; Stop 64
taaaataattacaacaagagaggta

SEQ ID NO: 37031 - DNA, 25 bp, Artificial
  probe
  misc_feature (1)..(25): SEQ ID NO: 3161; WAN0249X4_at; Start 2; Stop 26
ttgacattgattattaagagtgtca

SEQ ID NO: 37032 - DNA, 25 bp, Artificial
  probe
  misc_feature (1)..(25): SEQ ID NO: 3161; WAN0249X4_at; Start 5; Stop 29
acattgattattaagagtgtcacaa

SEQ ID NO: 37033 - DNA, 25 bp, Artificial
  probe
  misc_feature (1)..(25): SEQ ID NO: 3161; WAN0249X4_at; Start 45; Stop 69
taattacaacaagagaggtataaaa

SEQ ID NO: 37034 - DNA, 25 bp, Artificial
  probe
  misc_feature (1)..(25): SEQ ID NO: 3161; WAN0249X4_at; Start 39; Stop 63
ctaaaataattacaacaagagaggt

SEQ ID NO: 37035 - DNA, 25 bp, Artificial
  probe
  misc_feature (1)..(25): SEQ ID NO: 3161; WAN0249X4_at; Start 38; Stop 62
actaaaataattacaacaagagagg

SEQ ID NO: 37036 - DNA, 25 bp, Artificial
  probe
  misc_feature (1)..(25): SEQ ID NO: 5952; WAN0249X5_at; Start 11; Stop 35
tctcttgttgtaattattttagtta

SEQ ID NO: 37037 - DNA, 25 bp, Artificial
  probe
  misc_feature (1)..(25): SEQ ID NO: 5952; WAN0249X5_at; Start 40; Stop 64
aattgtgacactcttaataatcaat

SEQ ID NO: 37038 - DNA, 25 bp, Artificial
  probe
  misc_feature (1)..(25): SEQ ID NO: 5952; WAN0249X5_at; Start 8; Stop 32
acctctcttgttgtaattattttag

SEQ ID NO: 37039 - DNA, 25 bp, Artificial
  probe
  misc_feature (1)..(25): SEQ ID NO: 5952; WAN0249X5_at; Start 13; Stop 37
tcttgttgtaattattttagttaca

SEQ ID NO: 37040 - DNA, 25 bp, Artificial
  probe
  misc_feature (1)..(25): SEQ ID NO: 5952; WAN0249X5_at; Start 44; Stop 68
gtgacactcttaataatcaatgtca

SEQ ID NO: 37041 - DNA, 25 bp, Artificial
  probe
  misc_feature (1)..(25): SEQ ID NO: 5952; WAN0249X5_at; Start 6; Stop 30
atacctctcttgttgtaattatttt

SEQ ID NO: 37042 - DNA, 25 bp, Artificial
  probe
  misc_feature (1)..(25): SEQ ID NO: 5952; WAN0249X5_at; Start 46; Stop 70
gacactcttaataatcaatgtcaat

SEQ ID NO: 37043 - DNA, 25 bp, Artificial
  probe
  misc_feature (1)..(25): SEQ ID NO: 5952; WAN0249X5_at; Start 7; Stop 31
tacctctcttgttgtaattatttta

SEQ ID NO: 37044 - DNA, 25 bp, Artificial
  probe
  misc_feature (1)..(25): SEQ ID NO: 5952; WAN0249X5_at; Start 43; Stop 67
tgtgacactcttaataatcaatgtc

SEQ ID NO: 37045 - DNA, 25 bp, Artificial
  probe
  misc_feature (1)..(25): SEQ ID NO: 5952; WAN0249X5_at; Start 42; Stop 66
ttgtgacactcttaataatcaatgt

SEQ ID NO: 37046 - DNA, 25 bp, Artificial
  probe
  misc_feature (1)..(25): SEQ ID NO: 5952; WAN0249X5_at; Start 5; Stop 29
tatacctctcttgttgtaattattt

SEQ ID NO: 37047 - DNA, 25 bp, Artificial
  probe
  misc_feature (1)..(25): SEQ ID NO: 5952; WAN0249X5_at; Start 4; Stop 28
ttatacctctcttgttgtaattatt

SEQ ID NO: 37048 - DNA, 25 bp, Artificial
  probe
  misc_feature (1)..(25): SEQ ID NO: 5952; WAN0249X5_at; Start 2; Stop 26
ttttatacctctcttgttgtaatta

SEQ ID NO: 37049 - DNA, 25 bp, Artificial
  probe
  misc_feature (1)..(25): SEQ ID NO: 5952; WAN0249X5_at; Start 3; Stop 27
tttatacctctcttgttgtaattat

SEQ ID NO: 37050 - DNA, 25 bp, Artificial
  probe
  misc_feature (1)..(25): SEQ ID NO: 5952; WAN0249X5_at; Start 41; Stop 65
attgtgacactcttaataatcaatg

SEQ ID NO: 37051 - DNA, 25 bp, Artificial
  probe
  misc_feature (1)..(25): SEQ ID NO: 5952; WAN0249X5_at; Start 45; Stop 69
tgacactcttaataatcaatgtcaa

SEQ ID NO: 37052 - DNA, 25 bp, Artificial
  probe
  misc_feature (1)..(25): SEQ ID NO: 5952; WAN0249X5_at; Start 10; Stop 34
ctctcttgttgtaattattttagtt

SEQ ID NO: 37053 - DNA, 25 bp, Artificial
  probe
  misc_feature (1)..(25): SEQ ID NO: 5952; WAN0249X5_at; Start 14; Stop 38
cttgttgtaattattttagttacag

SEQ ID NO: 37054 - DNA, 25 bp, Artificial
  probe
  misc_feature (1)..(25): SEQ ID NO: 5952; WAN0249X5_at; Start 9; Stop 33
cctctcttgttgtaattattttagt

SEQ ID NO: 37055 - DNA, 25 bp, Artificial
  probe
  misc_feature (1)..(25): SEQ ID NO: 5183; WAN0249X6_at; Start 329; Stop 353
tctgacttcagagggcttttttatt

SEQ ID NO: 37056 - DNA, 25 bp, Artificial
  probe
  misc_feature (1)..(25): SEQ ID NO: 5183; WAN0249X6_at; Start 399; Stop 423
ggtatcagctaattacaccataaag

SEQ ID NO: 37057 - DNA, 25 bp, Artificial
  probe
  misc_feature (1)..(25): SEQ ID NO: 5183; WAN0249X6_at; Start 162; Stop 186
tacgatcttcgcctcgtcgcctagt

SEQ ID NO: 37058 - DNA, 25 bp, Artificial
  probe
  misc_feature (1)..(25): SEQ ID NO: 5183; WAN0249X6_at; Start 383; Stop 407
tacaaaaacctcaaacggtatcagc

SEQ ID NO: 37059 - DNA, 25 bp, Artificial
  probe
  misc_feature (1)..(25): SEQ ID NO: 5183; WAN0249X6_at; Start 93; Stop 117
cactgtaaggtaaaataaaccagct

SEQ ID NO: 37060 - DNA, 25 bp, Artificial
  probe
  misc_feature (1)..(25): SEQ ID NO: 5183; WAN0249X6_at; Start 607; Stop 631
tacccactagcgatagctaaattaa

SEQ ID NO: 37061 - DNA, 25 bp, Artificial
  probe
  misc_feature (1)..(25): SEQ ID NO: 5183; WAN0249X6_at; Start 190; Stop 214
taaacgatttatctagcaagaatca

SEQ ID NO: 37062 - DNA, 25 bp, Artificial
  probe
  misc_feature (1)..(25): SEQ ID NO: 5183; WAN0249X6_at; Start 254; Stop 278
aatgacacagtgttcgatgagcaca

SEQ ID NO: 37063 - DNA, 25 bp, Artificial
  probe
  misc_feature (1)..(25): SEQ ID NO: 5183; WAN0249X6_at; Start 425; Stop 449
tgcgcagttactcggcttttcaagc

SEQ ID NO: 37064 - DNA, 25 bp, Artificial
  probe
  misc_feature (1)..(25): SEQ ID NO: 5183; WAN0249X6_at; Start 475; Stop 499
gaagagcccactctttacaaagtaa

SEQ ID NO: 37065 - DNA, 25 bp, Artificial
  probe
  misc_feature (1)..(25): SEQ ID NO: 5183; WAN0249X6_at; Start 363; Stop 387
tcggtaacaattttggagactacaa

SEQ ID NO: 37066 - DNA, 25 bp, Artificial
  probe
  misc_feature (1)..(25): SEQ ID NO: 5183; WAN0249X6_at; Start 570; Stop 594
tttgaggaggagtaaaatgctttcc

SEQ ID NO: 37067 - DNA, 25 bp, Artificial
  probe
  misc_feature (1)..(25): SEQ ID NO: 5183; WAN0249X6_at; Start 28; Stop 52
tagcttttttgcgttgtcaccttac

SEQ ID NO: 37068 - DNA, 25 bp, Artificial
  probe
  misc_feature (1)..(25): SEQ ID NO: 5183; WAN0249X6_at; Start 447; Stop 471
agccgagtagctgtatgcaagcccc

SEQ ID NO: 37069 - DNA, 25 bp, Artificial
  probe
  misc_feature (1)..(25): SEQ ID NO: 5183; WAN0249X6_at; Start 525; Stop 549
gaagtagtcactgaattccagttag

SEQ ID NO: 37070 - DNA, 25 bp, Artificial
  probe
  misc_feature (1)..(25): SEQ ID NO: 5183; WAN0249X6_at; Start 514; Stop 538
tactttacatggaagtagtcactga

SEQ ID NO: 37071 - DNA, 25 bp, Artificial
  probe
  misc_feature (1)..(25): SEQ ID NO: 5183; WAN0249X6_at; Start 206; Stop 230
caagaatcatgatgctaagggcgtc

SEQ ID NO: 37072 - DNA, 25 bp, Artificial
  probe
  misc_feature (1)..(25): SEQ ID NO: 5183; WAN0249X6_at; Start 439; Stop 463
gcttttcaagccgagtagctgtatg

SEQ ID NO: 37073 - DNA, 25 bp, Artificial
  probe
  misc_feature (1)..(25): SEQ ID NO: 5183; WAN0249X6_at; Start 70; Stop 94
taatctttggttacggttcctagca

SEQ ID NO: 37074 - DNA, 25 bp, Artificial
  probe
  misc_feature (1)..(25): SEQ ID NO: 5183; WAN0249X6_at; Start 148; Stop 172
cactgaaagtttcgtacgatcttcg

SEQ ID NO: 37075 - DNA, 25 bp, Artificial
  probe
  misc_feature (1)..(25): SEQ ID NO: 5183; WAN0249X6_at; Start 237; Stop 261
ccgtatgaaaatagggaaatgacac

SEQ ID NO: 37076 - DNA, 25 bp, Artificial
  probe
  misc_feature (1)..(25): SEQ ID NO: 5183; WAN0249X6_at; Start 638; Stop 662
tgtgctctcctaaaatctgctgatt

SEQ ID NO: 37077 - DNA, 25 bp, Artificial
  probe
  misc_feature (1)..(25): SEQ ID NO: 5183; WAN0249X6_at; Start 659; Stop 683
gatttattactgactaatacaggag

SEQ ID NO: 37078 - DNA, 25 bp, Artificial
  probe
  misc_feature (1)..(25): SEQ ID NO: 5183; WAN0249X6_at; Start 218; Stop 242
tgctaagggcgtcaaaaatccgtat

SEQ ID NO: 37079 - DNA, 25 bp, Artificial
  probe
  misc_feature (1)..(25): SEQ ID NO: 5183; WAN0249X6_at; Start 536; Stop 560
tgaattccagttagaaattactttg

SEQ ID NO: 37080 - DNA, 25 bp, Artificial
  probe
  misc_feature (1)..(25): SEQ ID NO: 5183; WAN0249X6_at; Start 279; Stop 303
aggagtttcatctttttcactagga

SEQ ID NO: 37081 - DNA, 25 bp, Artificial
  probe
  misc_feature (1)..(25): SEQ ID NO: 5183; WAN0249X6_at; Start 623; Stop 647
ctaaattaatgtgtctgtgctctcc

SEQ ID NO: 37082 - DNA, 25 bp, Artificial
  probe
  misc_feature (1)..(25): SEQ ID NO: 5183; WAN0249X6_at; Start 559; Stop 583
tgtaactacgttttgaggaggagta

SEQ ID NO: 37083 - DNA, 25 bp, Artificial
  probe
  misc_feature (1)..(25): SEQ ID NO: 5183; WAN0249X6_at; Start 81; Stop 105
tacggttcctagcactgtaaggtaa

SEQ ID NO: 37084 - DNA, 25 bp, Artificial
  probe
  misc_feature (1)..(25): SEQ ID NO: 5183; WAN0249X6_at; Start 264; Stop 288
tgttcgatgagcacaaggagtttca

SEQ ID NO: 37085 - DNA, 25 bp, Artificial
  probe
  misc_feature (1)..(25): SEQ ID NO: 5183; WAN0249X6_at; Start 579; Stop 603
gagtaaaatgctttcctacgttcga

SEQ ID NO: 37086 - DNA, 25 bp, Artificial
  probe
  misc_feature (1)..(25): SEQ ID NO: 5183; WAN0249X6_at; Start 16; Stop 40
ctctaaattgggtagcttttttgcg

SEQ ID NO: 37087 - DNA, 25 bp, Artificial
  probe
  misc_feature (1)..(25): SEQ ID NO: 5183; WAN0249X6_at; Start 414; Stop 438
caccataaaggtgcgcagttactcg

SEQ ID NO: 37088 - DNA, 25 bp, Artificial
  probe
  misc_feature (1)..(25): SEQ ID NO: 5183; WAN0249X6_at; Start 176; Stop 200
cgtcgcctagtctataaacgattta

SEQ ID NO: 37089 - DNA, 25 bp, Artificial
  probe
  misc_feature (1)..(25): SEQ ID NO: 3182; WAN0249X7_at; Start 45; Stop 69
ctctgattttcagagggctttttca

SEQ ID NO: 37090 - DNA, 25 bp, Artificial
  probe
  misc_feature (1)..(25): SEQ ID NO: 3182; WAN0249X7_at; Start 82; Stop 106
ggacaatcttaaagttactctattg

SEQ ID NO: 37091 - DNA, 25 bp, Artificial
  probe
  misc_feature (1)..(25): SEQ ID NO: 3182; WAN0249X7_at; Start 75; Stop 99
tataaatggacaatcttaaagttac

SEQ ID NO: 37092 - DNA, 25 bp, Artificial
  probe
  misc_feature (1)..(25): SEQ ID NO: 3182; WAN0249X7_at; Start 79; Stop 103
aatggacaatcttaaagttactcta

SEQ ID NO: 37093 - DNA, 25 bp, Artificial
  probe
  misc_feature (1)..(25): SEQ ID NO: 3182; WAN0249X7_at; Start 113; Stop 137
ggcttttgatttgattaggagattc

SEQ ID NO: 37094 - DNA, 25 bp, Artificial
  probe
  misc_feature (1)..(25): SEQ ID NO: 3182; WAN0249X7_at; Start 108; Stop 132
agagtggcttttgatttgattagga

SEQ ID NO: 37095 - DNA, 25 bp, Artificial
  probe
  misc_feature (1)..(25): SEQ ID NO: 3182; WAN0249X7_at; Start 53; Stop 77
ttcagagggctttttcattgagtat

SEQ ID NO: 37096 - DNA, 25 bp, Artificial
  probe
  misc_feature (1)..(25): SEQ ID NO: 3182; WAN0249X7_at; Start 93; Stop 117
aagttactctattgtagagtggctt

SEQ ID NO: 37097 - DNA, 25 bp, Artificial
  probe
  misc_feature (1)..(25): SEQ ID NO: 3182; WAN0249X7_at; Start 81; Stop 105
tggacaatcttaaagttactctatt

SEQ ID NO: 37098 - DNA, 25 bp, Artificial
  probe
  misc_feature (1)..(25): SEQ ID NO: 3182; WAN0249X7_at; Start 71; Stop 95
tgagtataaatggacaatcttaaag

SEQ ID NO: 37099 - DNA, 25 bp, Artificial
  probe
  misc_feature (1)..(25): SEQ ID NO: 3182; WAN0249X7_at; Start 115; Stop 139
cttttgatttgattaggagattctt

SEQ ID NO: 37100 - DNA, 25 bp, Artificial
  probe
  misc_feature (1)..(25): SEQ ID NO: 3182; WAN0249X7_at; Start 54; Stop 78
tcagagggctttttcattgagtata

SEQ ID NO: 37101 - DNA, 25 bp, Artificial
  probe
  misc_feature (1)..(25): SEQ ID NO: 3182; WAN0249X7_at; Start 97; Stop 121
tactctattgtagagtggcttttga

SEQ ID NO: 37102 - DNA, 25 bp, Artificial
  probe
  misc_feature (1)..(25): SEQ ID NO: 3182; WAN0249X7_at; Start 99; Stop 123
ctctattgtagagtggcttttgatt

SEQ ID NO: 37103 - DNA, 25 bp, Artificial
  probe
  misc_feature (1)..(25): SEQ ID NO: 3182; WAN0249X7_at; Start 51; Stop 75
ttttcagagggctttttcattgagt

SEQ ID NO: 37104 - DNA, 25 bp, Artificial
  probe
  misc_feature (1)..(25): SEQ ID NO: 3182; WAN0249X7_at; Start 101; Stop 125
ctattgtagagtggcttttgatttg

SEQ ID NO: 37105 - DNA, 25 bp, Artificial
  probe
  misc_feature (1)..(25): SEQ ID NO: 3182; WAN0249X7_at; Start 72; Stop 96
gagtataaatggacaatcttaaagt

SEQ ID NO: 37106 - DNA, 25 bp, Artificial
  probe
  misc_feature (1)..(25): SEQ ID NO: 3182; WAN0249X7_at; Start 47; Stop 71
ctgattttcagagggctttttcatt

SEQ ID NO: 37107 - DNA, 25 bp, Artificial
  probe
  misc_feature (1)..(25): SEQ ID NO: 3182; WAN0249X7_at; Start 91; Stop 115
taaagttactctattgtagagtggc

SEQ ID NO: 37108 - DNA, 25 bp, Artificial
  probe
  misc_feature (1)..(25): SEQ ID NO: 3182; WAN0249X7_at; Start 78; Stop 102
aaatggacaatcttaaagttactct

SEQ ID NO: 37109 - DNA, 25 bp, Artificial
  probe
  misc_feature (1)..(25): SEQ ID NO: 3182; WAN0249X7_at; Start 110; Stop 134
agtggcttttgatttgattaggaga

SEQ ID NO: 37110 - DNA, 25 bp, Artificial
  probe
  misc_feature (1)..(25): SEQ ID NO: 3182; WAN0249X7_at; Start 107; Stop 131
tagagtggcttttgatttgattagg

SEQ ID NO: 37111 - DNA, 25 bp, Artificial
  probe
  misc_feature (1)..(25): SEQ ID NO: 3182; WAN0249X7_at; Start 114; Stop 138
gcttttgatttgattaggagattct

SEQ ID NO: 37112 - DNA, 25 bp, Artificial
  probe
  misc_feature (1)..(25): SEQ ID NO: 3182; WAN0249X7_at; Start 68; Stop 92
cattgagtataaatggacaatctta

SEQ ID NO: 37113 - DNA, 25 bp, Artificial
  probe
  misc_feature (1)..(25): SEQ ID NO: 3182; WAN0249X7_at; Start 105; Stop 129
tgtagagtggcttttgatttgatta

SEQ ID NO: 37114 - DNA, 25 bp, Artificial
  probe
  misc_feature (1)..(25): SEQ ID NO: 3182; WAN0249X7_at; Start 46; Stop 70
tctgattttcagagggctttttcat

SEQ ID NO: 37115 - DNA, 25 bp, Artificial
  probe
  misc_feature (1)..(25): SEQ ID NO: 3182; WAN0249X7_at; Start 67; Stop 91
tcattgagtataaatggacaatctt

SEQ ID NO: 37116 - DNA, 25 bp, Artificial
  probe
  misc_feature (1)..(25): SEQ ID NO: 3182; WAN0249X7_at; Start 77; Stop 101
taaatggacaatcttaaagttactc

SEQ ID NO: 37117 - DNA, 25 bp, Artificial
  probe
  misc_feature (1)..(25): SEQ ID NO: 3182; WAN0249X7_at; Start 92; Stop 116
aaagttactctattgtagagtggct

SEQ ID NO: 37118 - DNA, 25 bp, Artificial
  probe
  misc_feature (1)..(25): SEQ ID NO: 3182; WAN0249X7_at; Start 44; Stop 68
tctctgattttcagagggctttttc

SEQ ID NO: 37119 - DNA, 25 bp, Artificial
  probe
  misc_feature (1)..(25): SEQ ID NO: 3182; WAN0249X7_at; Start 109; Stop 133
gagtggcttttgatttgattaggag

SEQ ID NO: 37120 - DNA, 25 bp, Artificial
  probe
  misc_feature (1)..(25): SEQ ID NO: 3182; WAN0249X7_at; Start 52; Stop 76
tttcagagggctttttcattgagta

SEQ ID NO: 37121 - DNA, 25 bp, Artificial
  probe
  misc_feature (1)..(25): SEQ ID NO: 3182; WAN0249X7_at; Start 119; Stop 143
tgatttgattaggagattcttataa

SEQ ID NO: 37122 - DNA, 25 bp, Artificial
  probe
  misc_feature (1)..(25): SEQ ID NO: 3182; WAN0249X7_at; Start 85; Stop 109
caatcttaaagttactctattgtag

SEQ ID NO: 37123 - DNA, 25 bp, Artificial
  probe
  misc_feature (1)..(25): SEQ ID NO: 4795; WAN0249X8_at; Start 5; Stop 29
aagaatctcctaatcaaatcaaaag

SEQ ID NO: 37124 - DNA, 25 bp, Artificial
  probe
  misc_feature (1)..(25): SEQ ID NO: 4795; WAN0249X8_at; Start 29; Stop 53
gccactctacaatagagtaacttta

SEQ ID NO: 37125 - DNA, 25 bp, Artificial
  probe
  misc_feature (1)..(25): SEQ ID NO: 4795; WAN0249X8_at; Start 16; Stop 40
aatcaaatcaaaagccactctacaa

SEQ ID NO: 37126 - DNA, 25 bp, Artificial
  probe
  misc_feature (1)..(25): SEQ ID NO: 4795; WAN0249X8_at; Start 49; Stop 73
ctttaagattgtccatttatactca

SEQ ID NO: 37127 - DNA, 25 bp, Artificial
  probe
  misc_feature (1)..(25): SEQ ID NO: 4795; WAN0249X8_at; Start 66; Stop 90
tatactcaatgaaaaagccctctga

SEQ ID NO: 37128 - DNA, 25 bp, Artificial
  probe
  misc_feature (1)..(25): SEQ ID NO: 4795; WAN0249X8_at; Start 68; Stop 92
tactcaatgaaaaagccctctgaaa

SEQ ID NO: 37129 - DNA, 25 bp, Artificial
  probe
  misc_feature (1)..(25): SEQ ID NO: 4795; WAN0249X8_at; Start 26; Stop 50
aaagccactctacaatagagtaact

SEQ ID NO: 37130 - DNA, 25 bp, Artificial
  probe
  misc_feature (1)..(25): SEQ ID NO: 4795; WAN0249X8_at; Start 2; Stop 26
tataagaatctcctaatcaaatcaa

SEQ ID NO: 37131 - DNA, 25 bp, Artificial
  probe
  misc_feature (1)..(25): SEQ ID NO: 4795; WAN0249X8_at; Start 21; Stop 45
aatcaaaagccactctacaatagag

SEQ ID NO: 37132 - DNA, 25 bp, Artificial
  probe
  misc_feature (1)..(25): SEQ ID NO: 4795; WAN0249X8_at; Start 10; Stop 34
tctcctaatcaaatcaaaagccact

SEQ ID NO: 37133 - DNA, 25 bp, Artificial
  probe
  misc_feature (1)..(25): SEQ ID NO: 4795; WAN0249X8_at; Start 39; Stop 63
aatagagtaactttaagattgtcca

SEQ ID NO: 37134 - DNA, 25 bp, Artificial
  probe
  misc_feature (1)..(25): SEQ ID NO: 4795; WAN0249X8_at; Start 76; Stop 100
gaaaaagccctctgaaaatcagaga

SEQ ID NO: 37135 - DNA, 25 bp, Artificial
  probe
  misc_feature (1)..(25): SEQ ID NO: 4795; WAN0249X8_at; Start 69; Stop 93
actcaatgaaaaagccctctgaaaa

SEQ ID NO: 37136 - DNA, 25 bp, Artificial
  probe
  misc_feature (1)..(25): SEQ ID NO: 4795; WAN0249X8_at; Start 41; Stop 65
tagagtaactttaagattgtccatt

SEQ ID NO: 37137 - DNA, 25 bp, Artificial
  probe
  misc_feature (1)..(25): SEQ ID NO: 4795; WAN0249X8_at; Start 24; Stop 48
caaaagccactctacaatagagtaa

SEQ ID NO: 37138 - DNA, 25 bp, Artificial
  probe
  misc_feature (1)..(25): SEQ ID NO: 4795; WAN0249X8_at; Start 74; Stop 98
atgaaaaagccctctgaaaatcaga

SEQ ID NO: 37139 - DNA, 25 bp, Artificial
  probe
  misc_feature (1)..(25): SEQ ID NO: 4795; WAN0249X8_at; Start 31; Stop 55
cactctacaatagagtaactttaag

SEQ ID NO: 37140 - DNA, 25 bp, Artificial
  probe
  misc_feature (1)..(25): SEQ ID NO: 4795; WAN0249X8_at; Start 75; Stop 99
tgaaaaagccctctgaaaatcagag

SEQ ID NO: 37141 - DNA, 25 bp, Artificial
  probe
  misc_feature (1)..(25): SEQ ID NO: 4795; WAN0249X8_at; Start 33; Stop 57
ctctacaatagagtaactttaagat

SEQ ID NO: 37142 - DNA, 25 bp, Artificial
  probe
  misc_feature (1)..(25): SEQ ID NO: 4795; WAN0249X8_at; Start 12; Stop 36
tcctaatcaaatcaaaagccactct

SEQ ID NO: 37143 - DNA, 25 bp, Artificial
  probe
  misc_feature (1)..(25): SEQ ID NO: 4795; WAN0249X8_at; Start 7; Stop 31
gaatctcctaatcaaatcaaaagcc

SEQ ID NO: 37144 - DNA, 25 bp, Artificial
  probe
  misc_feature (1)..(25): SEQ ID NO: 4795; WAN0249X8_at; Start 38; Stop 62
caatagagtaactttaagattgtcc

SEQ ID NO: 37145 - DNA, 25 bp, Artificial
  probe
  misc_feature (1)..(25): SEQ ID NO: 4795; WAN0249X8_at; Start 13; Stop 37
cctaatcaaatcaaaagccactcta

SEQ ID NO: 37146 - DNA, 25 bp, Artificial
  probe
  misc_feature (1)..(25): SEQ ID NO: 4795; WAN0249X8_at; Start 8; Stop 32
aatctcctaatcaaatcaaaagcca

SEQ ID NO: 37147 - DNA, 25 bp, Artificial
  probe
  misc_feature (1)..(25): SEQ ID NO: 4795; WAN0249X8_at; Start 23; Stop 47
tcaaaagccactctacaatagagta

SEQ ID NO: 37148 - DNA, 25 bp, Artificial
  probe
  misc_feature (1)..(25): SEQ ID NO: 4795; WAN0249X8_at; Start 53; Stop 77
aagattgtccatttatactcaatga

SEQ ID NO: 37149 - DNA, 25 bp, Artificial
  probe
  misc_feature (1)..(25): SEQ ID NO: 4795; WAN0249X8_at; Start 70; Stop 94
ctcaatgaaaaagccctctgaaaat

SEQ ID NO: 37150 - DNA, 25 bp, Artificial
  probe
  misc_feature (1)..(25): SEQ ID NO: 4795; WAN0249X8_at; Start 15; Stop 39
taatcaaatcaaaagccactctaca

SEQ ID NO: 37151 - DNA, 25 bp, Artificial
  probe
  misc_feature (1)..(25): SEQ ID NO: 4795; WAN0249X8_at; Start 43; Stop 67
gagtaactttaagattgtccattta

SEQ ID NO: 37152 - DNA, 25 bp, Artificial
  probe
  misc_feature (1)..(25): SEQ ID NO: 4795; WAN0249X8_at; Start 73; Stop 97
aatgaaaaagccctctgaaaatcag

SEQ ID NO: 37153 - DNA, 25 bp, Artificial
  probe
  misc_feature (1)..(25): SEQ ID NO: 4795; WAN0249X8_at; Start 67; Stop 91
atactcaatgaaaaagccctctgaa

SEQ ID NO: 37154 - DNA, 25 bp, Artificial
  probe
  misc_feature (1)..(25): SEQ ID NO: 4795; WAN0249X8_at; Start 19; Stop 43
caaatcaaaagccactctacaatag

SEQ ID NO: 37155 - DNA, 25 bp, Artificial
  probe
  misc_feature (1)..(25): SEQ ID NO: 4795; WAN0249X8_at; Start 46; Stop 70
taactttaagattgtccatttatac

SEQ ID NO: 37156 - DNA, 25 bp, Artificial
  probe
  misc_feature (1)..(25): SEQ ID NO: 4795; WAN0249X8_at; Start 52; Stop 76
taagattgtccatttatactcaatg

SEQ ID NO: 37157 - DNA, 25 bp, Artificial
  probe
  misc_feature (1)..(25): SEQ ID NO: 55; WAN0249X9_at; Start 556; Stop 580
aatctccccgaagggagaaaagctg

SEQ ID NO: 37158 - DNA, 25 bp, Artificial
  probe
  misc_feature (1)..(25): SEQ ID NO: 55; WAN0249X9_at; Start 267; Stop 291
cacctttatggtgtaattagctgat

SEQ ID NO: 37159 - DNA, 25 bp, Artificial
  probe
  misc_feature (1)..(25): SEQ ID NO: 55; WAN0249X9_at; Start 507; Stop 531
actaggcgacgaggcgaagatcgta

SEQ ID NO: 37160 - DNA, 25 bp, Artificial
  probe
  misc_feature (1)..(25): SEQ ID NO: 55; WAN0249X9_at; Start 278; Stop 302
tgtaattagctgataccgtttgagg

SEQ ID NO: 37161 - DNA, 25 bp, Artificial
  probe
  misc_feature (1)..(25): SEQ ID NO: 55; WAN0249X9_at; Start 223; Stop 247
gggcttgcatacagctactcggctt

SEQ ID NO: 37162 - DNA, 25 bp, Artificial
  probe
  misc_feature (1)..(25): SEQ ID NO: 55; WAN0249X9_at; Start 477; Stop 501
catgattcttgctagataaatcgtt

SEQ ID NO: 37163 - DNA, 25 bp, Artificial
  probe
  misc_feature (1)..(25): SEQ ID NO: 55; WAN0249X9_at; Start 46; Stop 70
ggagagcacagacacattaatttag

SEQ ID NO: 37164 - DNA, 25 bp, Artificial
  probe
  misc_feature (1)..(25): SEQ ID NO: 55; WAN0249X9_at; Start 463; Stop 487
gacgcccttagcatcatgattcttg

SEQ ID NO: 37165 - DNA, 25 bp, Artificial
  probe
  misc_feature (1)..(25): SEQ ID NO: 55; WAN0249X9_at; Start 405; Stop 429
tgaaactccttgtgctcatcgaaca

SEQ ID NO: 37166 - DNA, 25 bp, Artificial
  probe
  misc_feature (1)..(25): SEQ ID NO: 55; WAN0249X9_at; Start 63; Stop 87
taatttagctatcgctagtgggtaa

SEQ ID NO: 37167 - DNA, 25 bp, Artificial
  probe
  misc_feature (1)..(25): SEQ ID NO: 55; WAN0249X9_at; Start 594; Stop 618
tacagtgctaggaaccgtaaccaaa

SEQ ID NO: 37168 - DNA, 25 bp, Artificial
  probe
  misc_feature (1)..(25): SEQ ID NO: 55; WAN0249X9_at; Start 415; Stop 439
tgtgctcatcgaacactgtgtcatt

SEQ ID NO: 37169 - DNA, 25 bp, Artificial
  probe
  misc_feature (1)..(25): SEQ ID NO: 55; WAN0249X9_at; Start 340; Stop 364
aataaaaaagccctctgaagtcaga

SEQ ID NO: 37170 - DNA, 25 bp, Artificial
  probe
  misc_feature (1)..(25): SEQ ID NO: 55; WAN0249X9_at; Start 138; Stop 162
taatttctaactggaattcagtgac

SEQ ID NO: 37171 - DNA, 25 bp, Artificial
  probe
  misc_feature (1)..(25): SEQ ID NO: 55; WAN0249X9_at; Start 255; Stop 279
cgagtaactgcgcacctttatggtg

SEQ ID NO: 37172 - DNA, 25 bp, Artificial
  probe
  misc_feature (1)..(25): SEQ ID NO: 55; WAN0249X9_at; Start 151; Stop 175
gaattcagtgactacttccatgtaa

SEQ ID NO: 37173 - DNA, 25 bp, Artificial
  probe
  misc_feature (1)..(25): SEQ ID NO: 55; WAN0249X9_at; Start 493; Stop 517
taaatcgtttatagactaggcgacg

SEQ ID NO: 37174 - DNA, 25 bp, Artificial
  probe
  misc_feature (1)..(25): SEQ ID NO: 55; WAN0249X9_at; Start 641; Stop 665
gtaaggtgacaacgcaaaaaagcta

SEQ ID NO: 37175 - DNA, 25 bp, Artificial
  probe
  misc_feature (1)..(25): SEQ ID NO: 55; WAN0249X9_at; Start 16; Stop 40
tattagtcagtaataaatcagcaga

SEQ ID NO: 37176 - DNA, 25 bp, Artificial
  probe
  misc_feature (1)..(25): SEQ ID NO: 55; WAN0249X9_at; Start 110; Stop 134
tactcctcctcaaaacgtagttaca

SEQ ID NO: 37177 - DNA, 25 bp, Artificial
  probe
  misc_feature (1)..(25): SEQ ID NO: 55; WAN0249X9_at; Start 608; Stop 632
ccgtaaccaaagattatacttgagt

SEQ ID NO: 37178 - DNA, 25 bp, Artificial
  probe
  misc_feature (1)..(25): SEQ ID NO: 55; WAN0249X9_at; Start 521; Stop 545
cgaagatcgtacgaaactttcagtg

SEQ ID NO: 37179 - DNA, 25 bp, Artificial
  probe
  misc_feature (1)..(25): SEQ ID NO: 55; WAN0249X9_at; Start 244; Stop 268
gcttgaaaagccgagtaactgcgca

SEQ ID NO: 37180 - DNA, 25 bp, Artificial
  probe
  misc_feature (1)..(25): SEQ ID NO: 55; WAN0249X9_at; Start 653; Stop 677
cgcaaaaaagctacccaatttagag

SEQ ID NO: 37181 - DNA, 25 bp, Artificial
  probe
  misc_feature (1)..(25): SEQ ID NO: 55; WAN0249X9_at; Start 577; Stop 601
gctggtttattttaccttacagtgc

SEQ ID NO: 37182 - DNA, 25 bp, Artificial
  probe
  misc_feature (1)..(25): SEQ ID NO: 55; WAN0249X9_at; Start 90; Stop 114
tcgaacgtaggaaagcattttactc

SEQ ID NO: 37183 - DNA, 25 bp, Artificial
  probe
  misc_feature (1)..(25): SEQ ID NO: 55; WAN0249X9_at; Start 194; Stop 218
ttactttgtaaagagtgggctcttc

SEQ ID NO: 37184 - DNA, 25 bp, Artificial
  probe
  misc_feature (1)..(25): SEQ ID NO: 55; WAN0249X9_at; Start 432; Stop 456
gtgtcatttccctattttcatacgg

SEQ ID NO: 37185 - DNA, 25 bp, Artificial
  probe
  misc_feature (1)..(25): SEQ ID NO: 55; WAN0249X9_at; Start 230; Stop 254
catacagctactcggcttgaaaagc

SEQ ID NO: 37186 - DNA, 25 bp, Artificial
  probe
  misc_feature (1)..(25): SEQ ID NO: 55; WAN0249X9_at; Start 390; Stop 414
tcctagtgaaaaagatgaaactcct

SEQ ID NO: 37187 - DNA, 25 bp, Artificial
  probe
  misc_feature (1)..(25): SEQ ID NO: 55; WAN0249X9_at; Start 31; Stop 55
aatcagcagattttaggagagcaca

SEQ ID NO: 37188 - DNA, 25 bp, Artificial
  probe
  misc_feature (1)..(25): SEQ ID NO: 55; WAN0249X9_at; Start 99; Stop 123
ggaaagcattttactcctcctcaaa

SEQ ID NO: 37189 - DNA, 25 bp, Artificial
  probe
  misc_feature (1)..(25): SEQ ID NO: 55; WAN0249X9_at; Start 450; Stop 474
catacggatttttgacgcccttagc

SEQ ID NO: 37190 - DNA, 25 bp, Artificial
  probe
  misc_feature (1)..(25): SEQ ID NO: 55; WAN0249X9_at; Start 307; Stop 331
tgtagtctccaaaattgttaccgat

SEQ ID NO: 37191 - DNA, 25 bp, Artificial
  probe
  misc_feature (1)..(25): SEQ ID NO: 238; WAN0249XA_at; Start 10; Stop 34
tggcaaacttttcccttgactagat

SEQ ID NO: 37192 - DNA, 25 bp, Artificial
  probe
  misc_feature (1)..(25): SEQ ID NO: 238; WAN0249XA_at; Start 7; Stop 31
ggctggcaaacttttcccttgacta

SEQ ID NO: 37193 - DNA, 25 bp, Artificial
  probe
  misc_feature (1)..(25): SEQ ID NO: 238; WAN0249XA_at; Start 9; Stop 33
ctggcaaacttttcccttgactaga

SEQ ID NO: 37194 - DNA, 25 bp, Artificial
  probe
  misc_feature (1)..(25): SEQ ID NO: 238; WAN0249XA_at; Start 8; Stop 32
gctggcaaacttttcccttgactag

SEQ ID NO: 37195 - DNA, 25 bp, Artificial
  probe
  misc_feature (1)..(25): SEQ ID NO: 238; WAN0249XA_at; Start 4; Stop 28
gagggctggcaaacttttcccttga

SEQ ID NO: 37196 - DNA, 25 bp, Artificial
  probe
  misc_feature (1)..(25): SEQ ID NO: 5903; WAN0249XB_at; Start 24; Stop 48
tcaagggaaaagtttgccagccctc

SEQ ID NO: 37197 - DNA, 25 bp, Artificial
  probe
  misc_feature (1)..(25): SEQ ID NO: 5903; WAN0249XB_at; Start 18; Stop 42
atctagtcaagggaaaagtttgcca

SEQ ID NO: 37198 - DNA, 25 bp, Artificial
  probe
  misc_feature (1)..(25): SEQ ID NO: 5903; WAN0249XB_at; Start 20; Stop 44
ctagtcaagggaaaagtttgccagc

SEQ ID NO: 37199 - DNA, 25 bp, Artificial
  probe
  misc_feature (1)..(25): SEQ ID NO: 5903; WAN0249XB_at; Start 19; Stop 43
tctagtcaagggaaaagtttgccag

SEQ ID NO: 37200 - DNA, 25 bp, Artificial
  probe
  misc_feature (1)..(25): SEQ ID NO: 5903; WAN0249XB_at; Start 21; Stop 45
tagtcaagggaaaagtttgccagcc

SEQ ID NO: 37201 - DNA, 25 bp, Artificial
  probe
  misc_feature (1)..(25): SEQ ID NO: 124; WAN0249XC_at; Start 29; Stop 53
ctaaactagagggagtggattatcg

SEQ ID NO: 37202 - DNA, 25 bp, Artificial
  probe
  misc_feature (1)..(25): SEQ ID NO: 124; WAN0249XC_at; Start 30; Stop 54
taaactagagggagtggattatcgc

SEQ ID NO: 37203 - DNA, 25 bp, Artificial
  probe
  misc_feature (1)..(25): SEQ ID NO: 124; WAN0249XC_at; Start 35; Stop 59
tagagggagtggattatcgccattg

SEQ ID NO: 37204 - DNA, 25 bp, Artificial
  probe
  misc_feature (1)..(25): SEQ ID NO: 124; WAN0249XC_at; Start 13; Stop 37
tttacatggaaatgtgctaaactag

SEQ ID NO: 37205 - DNA, 25 bp, Artificial
  probe
  misc_feature (1)..(25): SEQ ID NO: 124; WAN0249XC_at; Start 14; Stop 38
ttacatggaaatgtgctaaactaga

SEQ ID NO: 37206 - DNA, 25 bp, Artificial
  probe
  misc_feature (1)..(25): SEQ ID NO: 124; WAN0249XC_at; Start 23; Stop 47
aatgtgctaaactagagggagtgga

SEQ ID NO: 37207 - DNA, 25 bp, Artificial
  probe
  misc_feature (1)..(25): SEQ ID NO: 124; WAN0249XC_at; Start 3; Stop 27
agactataattttacatggaaatgt

SEQ ID NO: 37208 - DNA, 25 bp, Artificial
  probe
  misc_feature (1)..(25): SEQ ID NO: 124; WAN0249XC_at; Start 33; Stop 57
actagagggagtggattatcgccat

SEQ ID NO: 37209 - DNA, 25 bp, Artificial
  probe
  misc_feature (1)..(25): SEQ ID NO: 124; WAN0249XC_at; Start 12; Stop 36
ttttacatggaaatgtgctaaacta

SEQ ID NO: 37210 - DNA, 25 bp, Artificial
  probe
  misc_feature (1)..(25): SEQ ID NO: 124; WAN0249XC_at; Start 20; Stop 44
ggaaatgtgctaaactagagggagt

SEQ ID NO: 37211 - DNA, 25 bp, Artificial
  probe
  misc_feature (1)..(25): SEQ ID NO: 124; WAN0249XC_at; Start 9; Stop 33
taattttacatggaaatgtgctaaa

SEQ ID NO: 37212 - DNA, 25 bp, Artificial
  probe
  misc_feature (1)..(25): SEQ ID NO: 124; WAN0249XC_at; Start 15; Stop 39
tacatggaaatgtgctaaactagag

SEQ ID NO: 37213 - DNA, 25 bp, Artificial
  probe
  misc_feature (1)..(25): SEQ ID NO: 124; WAN0249XC_at; Start 5; Stop 29
actataattttacatggaaatgtgc

SEQ ID NO: 37214 - DNA, 25 bp, Artificial
  probe
  misc_feature (1)..(25): SEQ ID NO: 124; WAN0249XC_at; Start 7; Stop 31
tataattttacatggaaatgtgcta

SEQ ID NO: 37215 - DNA, 25 bp, Artificial
  probe
  misc_feature (1)..(25): SEQ ID NO: 124; WAN0249XC_at; Start 31; Stop 55
aaactagagggagtggattatcgcc

SEQ ID NO: 37216 - DNA, 25 bp, Artificial
  probe
  misc_feature (1)..(25): SEQ ID NO: 124; WAN0249XC_at; Start 17; Stop 41
catggaaatgtgctaaactagaggg

SEQ ID NO: 37217 - DNA, 25 bp, Artificial
  probe
  misc_feature (1)..(25): SEQ ID NO: 124; WAN0249XC_at; Start 8; Stop 32
ataattttacatggaaatgtgctaa

SEQ ID NO: 37218 - DNA, 25 bp, Artificial
  probe
  misc_feature (1)..(25): SEQ ID NO: 124; WAN0249XC_at; Start 25; Stop 49
tgtgctaaactagagggagtggatt

SEQ ID NO: 37219 - DNA, 25 bp, Artificial
  probe
  misc_feature (1)..(25): SEQ ID NO: 124; WAN0249XC_at; Start 32; Stop 56
aactagagggagtggattatcgcca

SEQ ID NO: 37220 - DNA, 25 bp, Artificial
  probe
  misc_feature (1)..(25): SEQ ID NO: 124; WAN0249XC_at; Start 4; Stop 28
gactataattttacatggaaatgtg

SEQ ID NO: 37221 - DNA, 25 bp, Artificial
  probe
  misc_feature (1)..(25): SEQ ID NO: 124; WAN0249XC_at; Start 10; Stop 34
aattttacatggaaatgtgctaaac

SEQ ID NO: 37222 - DNA, 25 bp, Artificial
  probe
  misc_feature (1)..(25): SEQ ID NO: 124; WAN0249XC_at; Start 16; Stop 40
acatggaaatgtgctaaactagagg

SEQ ID NO: 37223 - DNA, 25 bp, Artificial
  probe
  misc_feature (1)..(25): SEQ ID NO: 124; WAN0249XC_at; Start 34; Stop 58
ctagagggagtggattatcgccatt

SEQ ID NO: 37224 - DNA, 25 bp, Artificial
  probe
  misc_feature (1)..(25): SEQ ID NO: 124; WAN0249XC_at; Start 18; Stop 42
atggaaatgtgctaaactagaggga

SEQ ID NO: 37225 - DNA, 25 bp, Artificial
  probe
  misc_feature (1)..(25): SEQ ID NO: 124; WAN0249XC_at; Start 19; Stop 43
tggaaatgtgctaaactagagggag

SEQ ID NO: 37226 - DNA, 25 bp, Artificial
  probe
  misc_feature (1)..(25): SEQ ID NO: 124; WAN0249XC_at; Start 21; Stop 45
gaaatgtgctaaactagagggagtg

SEQ ID NO: 37227 - DNA, 25 bp, Artificial
  probe
  misc_feature (1)..(25): SEQ ID NO: 124; WAN0249XC_at; Start 26; Stop 50
gtgctaaactagagggagtggatta

SEQ ID NO: 37228 - DNA, 25 bp, Artificial
  probe
  misc_feature (1)..(25): SEQ ID NO: 124; WAN0249XC_at; Start 11; Stop 35
attttacatggaaatgtgctaaact

SEQ ID NO: 37229 - DNA, 25 bp, Artificial
  probe
  misc_feature (1)..(25): SEQ ID NO: 124; WAN0249XC_at; Start 2; Stop 26
aagactataattttacatggaaatg

SEQ ID NO: 37230 - DNA, 25 bp, Artificial
  probe
  misc_feature (1)..(25): SEQ ID NO: 124; WAN0249XC_at; Start 24; Stop 48
atgtgctaaactagagggagtggat

SEQ ID NO: 37231 - DNA, 25 bp, Artificial
  probe
  misc_feature (1)..(25): SEQ ID NO: 124; WAN0249XC_at; Start 37; Stop 61
gagggagtggattatcgccattgat

SEQ ID NO: 37232 - DNA, 25 bp, Artificial
  probe
  misc_feature (1)..(25): SEQ ID NO: 124; WAN0249XC_at; Start 6; Stop 30
ctataattttacatggaaatgtgct

SEQ ID NO: 37233 - DNA, 25 bp, Artificial
  probe
  misc_feature (1)..(25): SEQ ID NO: 124; WAN0249XC_at; Start 36; Stop 60
agagggagtggattatcgccattga

SEQ ID NO: 37234 - DNA, 25 bp, Artificial
  probe
  misc_feature (1)..(25): SEQ ID NO: 124; WAN0249XC_at; Start 27; Stop 51
tgctaaactagagggagtggattat

SEQ ID NO: 37235 - DNA, 25 bp, Artificial
  probe
  misc_feature (1)..(25): SEQ ID NO: 574; WAN0249XD_at; Start 18; Stop 42
actccctctagtttagcacatttcc

SEQ ID NO: 37236 - DNA, 25 bp, Artificial
  probe
  misc_feature (1)..(25): SEQ ID NO: 574; WAN0249XD_at; Start 19; Stop 43
ctccctctagtttagcacatttcca

SEQ ID NO: 37237 - DNA, 25 bp, Artificial
  probe
  misc_feature (1)..(25): SEQ ID NO: 574; WAN0249XD_at; Start 12; Stop 36
taatccactccctctagtttagcac

SEQ ID NO: 37238 - DNA, 25 bp, Artificial
  probe
  misc_feature (1)..(25): SEQ ID NO: 574; WAN0249XD_at; Start 24; Stop 48
tctagtttagcacatttccatgtaa

SEQ ID NO: 37239 - DNA, 25 bp, Artificial
  probe
  misc_feature (1)..(25): SEQ ID NO: 574; WAN0249XD_at; Start 35; Stop 59
acatttccatgtaaaattatagtct

SEQ ID NO: 37240 - DNA, 25 bp, Artificial
  probe
  misc_feature (1)..(25): SEQ ID NO: 574; WAN0249XD_at; Start 28; Stop 52
gtttagcacatttccatgtaaaatt

SEQ ID NO: 37241 - DNA, 25 bp, Artificial
  probe
  misc_feature (1)..(25): SEQ ID NO: 574; WAN0249XD_at; Start 8; Stop 32
gcgataatccactccctctagttta

SEQ ID NO: 37242 - DNA, 25 bp, Artificial
  probe
  misc_feature (1)..(25): SEQ ID NO: 574; WAN0249XD_at; Start 17; Stop 41
cactccctctagtttagcacatttc

SEQ ID NO: 37243 - DNA, 25 bp, Artificial
  probe
  misc_feature (1)..(25): SEQ ID NO: 574; WAN0249XD_at; Start 20; Stop 44
tccctctagtttagcacatttccat

SEQ ID NO: 37244 - DNA, 25 bp, Artificial
  probe
  misc_feature (1)..(25): SEQ ID NO: 574; WAN0249XD_at; Start 26; Stop 50
tagtttagcacatttccatgtaaaa

SEQ ID NO: 37245 - DNA, 25 bp, Artificial
  probe
  misc_feature (1)..(25): SEQ ID NO: 574; WAN0249XD_at; Start 3; Stop 27
caatggcgataatccactccctcta

SEQ ID NO: 37246 - DNA, 25 bp, Artificial
  probe
  misc_feature (1)..(25): SEQ ID NO: 574; WAN0249XD_at; Start 25; Stop 49
ctagtttagcacatttccatgtaaa

SEQ ID NO: 37247 - DNA, 25 bp, Artificial
  probe
  misc_feature (1)..(25): SEQ ID NO: 574; WAN0249XD_at; Start 1; Stop 25
atcaatggcgataatccactccctc

SEQ ID NO: 37248 - DNA, 25 bp, Artificial
  probe
  misc_feature (1)..(25): SEQ ID NO: 574; WAN0249XD_at; Start 7; Stop 31
ggcgataatccactccctctagttt

SEQ ID NO: 37249 - DNA, 25 bp, Artificial
  probe
  misc_feature (1)..(25): SEQ ID NO: 574; WAN0249XD_at; Start 27; Stop 51
agtttagcacatttccatgtaaaat

SEQ ID NO: 37250 - DNA, 25 bp, Artificial
  probe
  misc_feature (1)..(25): SEQ ID NO: 574; WAN0249XD_at; Start 4; Stop 28
aatggcgataatccactccctctag

SEQ ID NO: 37251 - DNA, 25 bp, Artificial
  probe
  misc_feature (1)..(25): SEQ ID NO: 574; WAN0249XD_at; Start 23; Stop 47
ctctagtttagcacatttccatgta

SEQ ID NO: 37252 - DNA, 25 bp, Artificial
  probe
  misc_feature (1)..(25): SEQ ID NO: 574; WAN0249XD_at; Start 34; Stop 58
cacatttccatgtaaaattatagtc

SEQ ID NO: 37253 - DNA, 25 bp, Artificial
  probe
  misc_feature (1)..(25): SEQ ID NO: 574; WAN0249XD_at; Start 2; Stop 26
tcaatggcgataatccactccctct

SEQ ID NO: 37254 - DNA, 25 bp, Artificial
  probe
  misc_feature (1)..(25): SEQ ID NO: 574; WAN0249XD_at; Start 13; Stop 37
aatccactccctctagtttagcaca

SEQ ID NO: 37255 - DNA, 25 bp, Artificial
  probe
  misc_feature (1)..(25): SEQ ID NO: 574; WAN0249XD_at; Start 14; Stop 38
atccactccctctagtttagcacat

SEQ ID NO: 37256 - DNA, 25 bp, Artificial
  probe
  misc_feature (1)..(25): SEQ ID NO: 574; WAN0249XD_at; Start 30; Stop 54
ttagcacatttccatgtaaaattat

SEQ ID NO: 37257 - DNA, 25 bp, Artificial
  probe
  misc_feature (1)..(25): SEQ ID NO: 574; WAN0249XD_at; Start 6; Stop 30
tggcgataatccactccctctagtt

SEQ ID NO: 37258 - DNA, 25 bp, Artificial
  probe
  misc_feature (1)..(25): SEQ ID NO: 574; WAN0249XD_at; Start 11; Stop 35
ataatccactccctctagtttagca

SEQ ID NO: 37259 - DNA, 25 bp, Artificial
  probe
  misc_feature (1)..(25): SEQ ID NO: 574; WAN0249XD_at; Start 5; Stop 29
atggcgataatccactccctctagt

SEQ ID NO: 37260 - DNA, 25 bp, Artificial
  probe
  misc_feature (1)..(25): SEQ ID NO: 574; WAN0249XD_at; Start 37; Stop 61
atttccatgtaaaattatagtcttt

SEQ ID NO: 37261 - DNA, 25 bp, Artificial
  probe
  misc_feature (1)..(25): SEQ ID NO: 574; WAN0249XD_at; Start 36; Stop 60
catttccatgtaaaattatagtctt

SEQ ID NO: 37262 - DNA, 25 bp, Artificial
  probe
  misc_feature (1)..(25): SEQ ID NO: 574; WAN0249XD_at; Start 32; Stop 56
agcacatttccatgtaaaattatag

SEQ ID NO: 37263 - DNA, 25 bp, Artificial
  probe
  misc_feature (1)..(25): SEQ ID NO: 574; WAN0249XD_at; Start 21; Stop 45
ccctctagtttagcacatttccatg

SEQ ID NO: 37264 - DNA, 25 bp, Artificial
  probe
  misc_feature (1)..(25): SEQ ID NO: 574; WAN0249XD_at; Start 15; Stop 39
tccactccctctagtttagcacatt

SEQ ID NO: 37265 - DNA, 25 bp, Artificial
  probe
  misc_feature (1)..(25): SEQ ID NO: 574; WAN0249XD_at; Start 29; Stop 53
tttagcacatttccatgtaaaatta

SEQ ID NO: 37266 - DNA, 25 bp, Artificial
  probe
  misc_feature (1)..(25): SEQ ID NO: 574; WAN0249XD_at; Start 33; Stop 57
gcacatttccatgtaaaattatagt

SEQ ID NO: 37267 - DNA, 25 bp, Artificial
  probe
  misc_feature (1)..(25): SEQ ID NO: 574; WAN0249XD_at; Start 9; Stop 33
cgataatccactccctctagtttag

SEQ ID NO: 37268 - DNA, 25 bp, Artificial
  probe
  misc_feature (1)..(25): SEQ ID NO: 574; WAN0249XD_at; Start 22; Stop 46
cctctagtttagcacatttccatgt

SEQ ID NO: 37269 - DNA, 25 bp, Artificial
  probe
  misc_feature (1)..(25): SEQ ID NO: 2782; WAN0249XE_at; Start 103; Stop 127
gaatagtgaatgatgataaggagaa

SEQ ID NO: 37270 - DNA, 25 bp, Artificial
  probe
  misc_feature (1)..(25): SEQ ID NO: 2782; WAN0249XE_at; Start 71; Stop 95
tagttgctgttcgagaaattttgat

SEQ ID NO: 37271 - DNA, 25 bp, Artificial
  probe
  misc_feature (1)..(25): SEQ ID NO: 2782; WAN0249XE_at; Start 93; Stop 117
gattttcaaagaatagtgaatgatg

SEQ ID NO: 37272 - DNA, 25 bp, Artificial
  probe
  misc_feature (1)..(25): SEQ ID NO: 2782; WAN0249XE_at; Start 2; Stop 26
tgtagaaaagccgatagattgatat

SEQ ID NO: 37273 - DNA, 25 bp, Artificial
  probe
  misc_feature (1)..(25): SEQ ID NO: 2782; WAN0249XE_at; Start 55; Stop 79
tgattttagggtataatagttgctg

SEQ ID NO: 37274 - DNA, 25 bp, Artificial
  probe
  misc_feature (1)..(25): SEQ ID NO: 2782; WAN0249XE_at; Start 40; Stop 64
aatttgtcaaaatgctgattttagg

SEQ ID NO: 37275 - DNA, 25 bp, Artificial
  probe
  misc_feature (1)..(25): SEQ ID NO: 2782; WAN0249XE_at; Start 49; Stop 73
aaatgctgattttagggtataatag

SEQ ID NO: 37276 - DNA, 25 bp, Artificial
  probe
  misc_feature (1)..(25): SEQ ID NO: 2782; WAN0249XE_at; Start 33; Stop 57
ttttctaaatttgtcaaaatgctga

SEQ ID NO: 37277 - DNA, 25 bp, Artificial
  probe
  misc_feature (1)..(25): SEQ ID NO: 2782; WAN0249XE_at; Start 42; Stop 66
tttgtcaaaatgctgattttagggt

SEQ ID NO: 37278 - DNA, 25 bp, Artificial
  probe
  misc_feature (1)..(25): SEQ ID NO: 2782; WAN0249XE_at; Start 59; Stop 83
tttagggtataatagttgctgttcg

SEQ ID NO: 37279 - DNA, 25 bp, Artificial
  probe
  misc_feature (1)..(25): SEQ ID NO: 2782; WAN0249XE_at; Start 44; Stop 68
tgtcaaaatgctgattttagggtat

SEQ ID NO: 37280 - DNA, 25 bp, Artificial
  probe
  misc_feature (1)..(25): SEQ ID NO: 2782; WAN0249XE_at; Start 73; Stop 97
gttgctgttcgagaaattttgattt

SEQ ID NO: 37281 - DNA, 25 bp, Artificial
  probe
  misc_feature (1)..(25): SEQ ID NO: 2782; WAN0249XE_at; Start 63; Stop 87
gggtataatagttgctgttcgagaa

SEQ ID NO: 37282 - DNA, 25 bp, Artificial
  probe
  misc_feature (1)..(25): SEQ ID NO: 2782; WAN0249XE_at; Start 82; Stop 106
cgagaaattttgattttcaaagaat

SEQ ID NO: 37283 - DNA, 25 bp, Artificial
  probe
  misc_feature (1)..(25): SEQ ID NO: 2782; WAN0249XE_at; Start 36; Stop 60
tctaaatttgtcaaaatgctgattt

SEQ ID NO: 37284 - DNA, 25 bp, Artificial
  probe
  misc_feature (1)..(25): SEQ ID NO: 2782; WAN0249XE_at; Start 69; Stop 93
aatagttgctgttcgagaaattttg

SEQ ID NO: 37285 - DNA, 25 bp, Artificial
  probe
  misc_feature (1)..(25): SEQ ID NO: 2782; WAN0249XE_at; Start 3; Stop 27
gtagaaaagccgatagattgatatc

SEQ ID NO: 37286 - DNA, 25 bp, Artificial
  probe
  misc_feature (1)..(25): SEQ ID NO: 2782; WAN0249XE_at; Start 11; Stop 35
gccgatagattgatatcggtttttt

SEQ ID NO: 37287 - DNA, 25 bp, Artificial
  probe
  misc_feature (1)..(25): SEQ ID NO: 2782; WAN0249XE_at; Start 62; Stop 86
agggtataatagttgctgttcgaga

SEQ ID NO: 37288 - DNA, 25 bp, Artificial
  probe
  misc_feature (1)..(25): SEQ ID NO: 2782; WAN0249XE_at; Start 106; Stop 130
tagtgaatgatgataaggagaaacc

SEQ ID NO: 37289 - DNA, 25 bp, Artificial
  probe
  misc_feature (1)..(25): SEQ ID NO: 2782; WAN0249XE_at; Start 99; Stop 123
caaagaatagtgaatgatgataagg

SEQ ID NO: 37290 - DNA, 25 bp, Artificial
  probe
  misc_feature (1)..(25): SEQ ID NO: 2782; WAN0249XE_at; Start 53; Stop 77
gctgattttagggtataatagttgc

SEQ ID NO: 37291 - DNA, 25 bp, Artificial
  probe
  misc_feature (1)..(25): SEQ ID NO: 2782; WAN0249XE_at; Start 65; Stop 89
gtataatagttgctgttcgagaaat

SEQ ID NO: 37292 - DNA, 25 bp, Artificial
  probe
  misc_feature (1)..(25): SEQ ID NO: 2782; WAN0249XE_at; Start 66; Stop 90
tataatagttgctgttcgagaaatt

SEQ ID NO: 37293 - DNA, 25 bp, Artificial
  probe
  misc_feature (1)..(25): SEQ ID NO: 2782; WAN0249XE_at; Start 4; Stop 28
tagaaaagccgatagattgatatcg

SEQ ID NO: 37294 - DNA, 25 bp, Artificial
  probe
  misc_feature (1)..(25): SEQ ID NO: 2782; WAN0249XE_at; Start 6; Stop 30
gaaaagccgatagattgatatcggt

SEQ ID NO: 37295 - DNA, 25 bp, Artificial
  probe
  misc_feature (1)..(25): SEQ ID NO: 2782; WAN0249XE_at; Start 7; Stop 31
aaaagccgatagattgatatcggtt

SEQ ID NO: 37296 - DNA, 25 bp, Artificial
  probe
  misc_feature (1)..(25): SEQ ID NO: 2782; WAN0249XE_at; Start 60; Stop 84
ttagggtataatagttgctgttcga

SEQ ID NO: 37297 - DNA, 25 bp, Artificial
  probe
  misc_feature (1)..(25): SEQ ID NO: 2782; WAN0249XE_at; Start 64; Stop 88
ggtataatagttgctgttcgagaaa

SEQ ID NO: 37298 - DNA, 25 bp, Artificial
  probe
  misc_feature (1)..(25): SEQ ID NO: 2782; WAN0249XE_at; Start 47; Stop 71
caaaatgctgattttagggtataat

SEQ ID NO: 37299 - DNA, 25 bp, Artificial
  probe
  misc_feature (1)..(25): SEQ ID NO: 2782; WAN0249XE_at; Start 61; Stop 85
tagggtataatagttgctgttcgag

SEQ ID NO: 37300 - DNA, 25 bp, Artificial
  probe
  misc_feature (1)..(25): SEQ ID NO: 2782; WAN0249XE_at; Start 76; Stop 100
gctgttcgagaaattttgattttca

SEQ ID NO: 37301 - DNA, 25 bp, Artificial
  probe
  misc_feature (1)..(25): SEQ ID NO: 2782; WAN0249XE_at; Start 58; Stop 82
ttttagggtataatagttgctgttc

SEQ ID NO: 37302 - DNA, 25 bp, Artificial
  probe
  misc_feature (1)..(25): SEQ ID NO: 2782; WAN0249XE_at; Start 101; Stop 125
aagaatagtgaatgatgataaggag

SEQ ID NO: 37303 - DNA, 25 bp, Artificial
  probe
  misc_feature (1)..(25): SEQ ID NO: 3779; WAN0249XF_at; Start 70; Stop 94
aaaatcagcattttgacaaatttag

SEQ ID NO: 37304 - DNA, 25 bp, Artificial
  probe
  misc_feature (1)..(25): SEQ ID NO: 3779; WAN0249XF_at; Start 64; Stop 88
taccctaaaatcagcattttgacaa

SEQ ID NO: 37305 - DNA, 25 bp, Artificial
  probe
  misc_feature (1)..(25): SEQ ID NO: 3779; WAN0249XF_at; Start 46; Stop 70
ctcgaacagcaactattatacccta

SEQ ID NO: 37306 - DNA, 25 bp, Artificial
  probe
  misc_feature (1)..(25): SEQ ID NO: 3779; WAN0249XF_at; Start 34; Stop 58
aaatcaaaatttctcgaacagcaac

SEQ ID NO: 37307 - DNA, 25 bp, Artificial
  probe
  misc_feature (1)..(25): SEQ ID NO: 3779; WAN0249XF_at; Start 17; Stop 41
cattcactattctttgaaaatcaaa

SEQ ID NO: 37308 - DNA, 25 bp, Artificial
  probe
  misc_feature (1)..(25): SEQ ID NO: 3779; WAN0249XF_at; Start 52; Stop 76
cagcaactattataccctaaaatca

SEQ ID NO: 37309 - DNA, 25 bp, Artificial
  probe
  misc_feature (1)..(25): SEQ ID NO: 3779; WAN0249XF_at; Start 62; Stop 86
tataccctaaaatcagcattttgac

SEQ ID NO: 37310 - DNA, 25 bp, Artificial
  probe
  misc_feature (1)..(25): SEQ ID NO: 3779; WAN0249XF_at; Start 59; Stop 83
tattataccctaaaatcagcatttt

SEQ ID NO: 37311 - DNA, 25 bp, Artificial
  probe
  misc_feature (1)..(25): SEQ ID NO: 3779; WAN0249XF_at; Start 56; Stop 80
aactattataccctaaaatcagcat

SEQ ID NO: 37312 - DNA, 25 bp, Artificial
  probe
  misc_feature (1)..(25): SEQ ID NO: 3779; WAN0249XF_at; Start 54; Stop 78
gcaactattataccctaaaatcagc

SEQ ID NO: 37313 - DNA, 25 bp, Artificial
  probe
  misc_feature (1)..(25): SEQ ID NO: 3779; WAN0249XF_at; Start 45; Stop 69
tctcgaacagcaactattataccct

SEQ ID NO: 37314 - DNA, 25 bp, Artificial
  probe
  misc_feature (1)..(25): SEQ ID NO: 3779; WAN0249XF_at; Start 35; Stop 59
aatcaaaatttctcgaacagcaact

SEQ ID NO: 37315 - DNA, 25 bp, Artificial
  probe
  misc_feature (1)..(25): SEQ ID NO: 3779; WAN0249XF_at; Start 8; Stop 32
ccttatcatcattcactattctttg

SEQ ID NO: 37316 - DNA, 25 bp, Artificial
  probe
  misc_feature (1)..(25): SEQ ID NO: 3779; WAN0249XF_at; Start 105; Stop 129
atatcaatctatcggcttttctaca

SEQ ID NO: 37317 - DNA, 25 bp, Artificial
  probe
  misc_feature (1)..(25): SEQ ID NO: 3779; WAN0249XF_at; Start 98; Stop 122
aaaaccgatatcaatctatcggctt

SEQ ID NO: 37318 - DNA, 25 bp, Artificial
  probe
  misc_feature (1)..(25): SEQ ID NO: 3779; WAN0249XF_at; Start 2; Stop 26
gtttctccttatcatcattcactat

SEQ ID NO: 37319 - DNA, 25 bp, Artificial
  probe
  misc_feature (1)..(25): SEQ ID NO: 3779; WAN0249XF_at; Start 49; Stop 73
gaacagcaactattataccctaaaa

SEQ ID NO: 37320 - DNA, 25 bp, Artificial
  probe
  misc_feature (1)..(25): SEQ ID NO: 3779; WAN0249XF_at; Start 44; Stop 68
ttctcgaacagcaactattataccc

SEQ ID NO: 37321 - DNA, 25 bp, Artificial
  probe
  misc_feature (1)..(25): SEQ ID NO: 3779; WAN0249XF_at; Start 41; Stop 65
aatttctcgaacagcaactattata

SEQ ID NO: 37322 - DNA, 25 bp, Artificial
  probe
  misc_feature (1)..(25): SEQ ID NO: 3779; WAN0249XF_at; Start 96; Stop 120
aaaaaaccgatatcaatctatcggc

SEQ ID NO: 37323 - DNA, 25 bp, Artificial
  probe
  misc_feature (1)..(25): SEQ ID NO: 3779; WAN0249XF_at; Start 37; Stop 61
tcaaaatttctcgaacagcaactat

SEQ ID NO: 37324 - DNA, 25 bp, Artificial
  probe
  misc_feature (1)..(25): SEQ ID NO: 3779; WAN0249XF_at; Start 104; Stop 128
gatatcaatctatcggcttttctac

SEQ ID NO: 37325 - DNA, 25 bp, Artificial
  probe
  misc_feature (1)..(25): SEQ ID NO: 3779; WAN0249XF_at; Start 47; Stop 71
tcgaacagcaactattataccctaa

SEQ ID NO: 37326 - DNA, 25 bp, Artificial
  probe
  misc_feature (1)..(25): SEQ ID NO: 3779; WAN0249XF_at; Start 11; Stop 35
tatcatcattcactattctttgaaa

SEQ ID NO: 37327 - DNA, 25 bp, Artificial
  probe
  misc_feature (1)..(25): SEQ ID NO: 3779; WAN0249XF_at; Start 66; Stop 90
ccctaaaatcagcattttgacaaat

SEQ ID NO: 37328 - DNA, 25 bp, Artificial
  probe
  misc_feature (1)..(25): SEQ ID NO: 3779; WAN0249XF_at; Start 43; Stop 67
tttctcgaacagcaactattatacc

SEQ ID NO: 37329 - DNA, 25 bp, Artificial
  probe
  misc_feature (1)..(25): SEQ ID NO: 3779; WAN0249XF_at; Start 39; Stop 63
aaaatttctcgaacagcaactatta

SEQ ID NO: 37330 - DNA, 25 bp, Artificial
  probe
  misc_feature (1)..(25): SEQ ID NO: 3779; WAN0249XF_at; Start 1; Stop 25
ggtttctccttatcatcattcacta

SEQ ID NO: 37331 - DNA, 25 bp, Artificial
  probe
  misc_feature (1)..(25): SEQ ID NO: 3779; WAN0249XF_at; Start 48; Stop 72
cgaacagcaactattataccctaaa

SEQ ID NO: 37332 - DNA, 25 bp, Artificial
  probe
  misc_feature (1)..(25): SEQ ID NO: 3779; WAN0249XF_at; Start 14; Stop 38
catcattcactattctttgaaaatc

SEQ ID NO: 37333 - DNA, 25 bp, Artificial
  probe
  misc_feature (1)..(25): SEQ ID NO: 3779; WAN0249XF_at; Start 38; Stop 62
caaaatttctcgaacagcaactatt

SEQ ID NO: 37334 - DNA, 25 bp, Artificial
  probe
  misc_feature (1)..(25): SEQ ID NO: 3779; WAN0249XF_at; Start 75; Stop 99
cagcattttgacaaatttagaaaaa

SEQ ID NO: 37335 - DNA, 25 bp, Artificial
  probe
  misc_feature (1)..(25): SEQ ID NO: 3779; WAN0249XF_at; Start 31; Stop 55
tgaaaatcaaaatttctcgaacagc

SEQ ID NO: 37336 - DNA, 25 bp, Artificial
  probe
  misc_feature (1)..(25): SEQ ID NO: 3779; WAN0249XF_at; Start 32; Stop 56
gaaaatcaaaatttctcgaacagca

SEQ ID NO: 37337 - DNA, 25 bp, Artificial
  probe
  misc_feature (1)..(25): SEQ ID NO: 3204; WAN0249XG_at; Start 11; Stop 35
tcttaagttcaaatgggaatctttc

SEQ ID NO: 37338 - DNA, 25 bp, Artificial
  probe
  misc_feature (1)..(25): SEQ ID NO: 3204; WAN0249XG_at; Start 35; Stop 59
ccccaaggatagaccgcgatactac

SEQ ID NO: 37339 - DNA, 25 bp, Artificial
  probe
  misc_feature (1)..(25): SEQ ID NO: 3204; WAN0249XG_at; Start 1; Stop 25
cacaactccttcttaagttcaaatg

SEQ ID NO: 37340 - DNA, 25 bp, Artificial
  probe
  misc_feature (1)..(25): SEQ ID NO: 3204; WAN0249XG_at; Start 28; Stop 52
aatctttccccaaggatagaccgcg

SEQ ID NO: 37341 - DNA, 25 bp, Artificial
  probe
  misc_feature (1)..(25): SEQ ID NO: 3204; WAN0249XG_at; Start 46; Stop 70
gaccgcgatactactaacaaccaaa

SEQ ID NO: 37342 - DNA, 25 bp, Artificial
  probe
  misc_feature (1)..(25): SEQ ID NO: 3204; WAN0249XG_at; Start 32; Stop 56
tttccccaaggatagaccgcgatac

SEQ ID NO: 37343 - DNA, 25 bp, Artificial
  probe
  misc_feature (1)..(25): SEQ ID NO: 3204; WAN0249XG_at; Start 42; Stop 66
gatagaccgcgatactactaacaac

SEQ ID NO: 37344 - DNA, 25 bp, Artificial
  probe
  misc_feature (1)..(25): SEQ ID NO: 3204; WAN0249XG_at; Start 39; Stop 63
aaggatagaccgcgatactactaac

SEQ ID NO: 37345 - DNA, 25 bp, Artificial
  probe
  misc_feature (1)..(25): SEQ ID NO: 3204; WAN0249XG_at; Start 7; Stop 31
tccttcttaagttcaaatgggaatc

SEQ ID NO: 37346 - DNA, 25 bp, Artificial
  probe
  misc_feature (1)..(25): SEQ ID NO: 3204; WAN0249XG_at; Start 22; Stop 46
aatgggaatctttccccaaggatag

SEQ ID NO: 37347 - DNA, 25 bp, Artificial
  probe
  misc_feature (1)..(25): SEQ ID NO: 3204; WAN0249XG_at; Start 29; Stop 53
atctttccccaaggatagaccgcga

SEQ ID NO: 37348 - DNA, 25 bp, Artificial
  probe
  misc_feature (1)..(25): SEQ ID NO: 3204; WAN0249XG_at; Start 38; Stop 62
caaggatagaccgcgatactactaa

SEQ ID NO: 37349 - DNA, 25 bp, Artificial
  probe
  misc_feature (1)..(25): SEQ ID NO: 3204; WAN0249XG_at; Start 33; Stop 57
ttccccaaggatagaccgcgatact

SEQ ID NO: 37350 - DNA, 25 bp, Artificial
  probe
  misc_feature (1)..(25): SEQ ID NO: 3204; WAN0249XG_at; Start 36; Stop 60
cccaaggatagaccgcgatactact

SEQ ID NO: 37351 - DNA, 25 bp, Artificial
  probe
  misc_feature (1)..(25): SEQ ID NO: 3204; WAN0249XG_at; Start 2; Stop 26
acaactccttcttaagttcaaatgg

SEQ ID NO: 37352 - DNA, 25 bp, Artificial
  probe
  misc_feature (1)..(25): SEQ ID NO: 3204; WAN0249XG_at; Start 40; Stop 64
aggatagaccgcgatactactaaca

SEQ ID NO: 37353 - DNA, 25 bp, Artificial
  probe
  misc_feature (1)..(25): SEQ ID NO: 3204; WAN0249XG_at; Start 6; Stop 30
ctccttcttaagttcaaatgggaat

SEQ ID NO: 37354 - DNA, 25 bp, Artificial
  probe
  misc_feature (1)..(25): SEQ ID NO: 3204; WAN0249XG_at; Start 23; Stop 47
atgggaatctttccccaaggataga

SEQ ID NO: 37355 - DNA, 25 bp, Artificial
  probe
  misc_feature (1)..(25): SEQ ID NO: 3204; WAN0249XG_at; Start 45; Stop 69
agaccgcgatactactaacaaccaa

SEQ ID NO: 37356 - DNA, 25 bp, Artificial
  probe
  misc_feature (1)..(25): SEQ ID NO: 3204; WAN0249XG_at; Start 43; Stop 67
atagaccgcgatactactaacaacc

SEQ ID NO: 37357 - DNA, 25 bp, Artificial
  probe
  misc_feature (1)..(25): SEQ ID NO: 3204; WAN0249XG_at; Start 41; Stop 65
ggatagaccgcgatactactaacaa

SEQ ID NO: 37358 - DNA, 25 bp, Artificial
  probe
  misc_feature (1)..(25): SEQ ID NO: 3204; WAN0249XG_at; Start 8; Stop 32
ccttcttaagttcaaatgggaatct

SEQ ID NO: 37359 - DNA, 25 bp, Artificial
  probe
  misc_feature (1)..(25): SEQ ID NO: 3204; WAN0249XG_at; Start 37; Stop 61
ccaaggatagaccgcgatactacta

SEQ ID NO: 37360 - DNA, 25 bp, Artificial
  probe
  misc_feature (1)..(25): SEQ ID NO: 3204; WAN0249XG_at; Start 31; Stop 55
ctttccccaaggatagaccgcgata

SEQ ID NO: 37361 - DNA, 25 bp, Artificial
  probe
  misc_feature (1)..(25): SEQ ID NO: 3204; WAN0249XG_at; Start 27; Stop 51
gaatctttccccaaggatagaccgc

SEQ ID NO: 37362 - DNA, 25 bp, Artificial
  probe
  misc_feature (1)..(25): SEQ ID NO: 3204; WAN0249XG_at; Start 30; Stop 54
tctttccccaaggatagaccgcgat

SEQ ID NO: 37363 - DNA, 25 bp, Artificial
  probe
  misc_feature (1)..(25): SEQ ID NO: 3204; WAN0249XG_at; Start 34; Stop 58
tccccaaggatagaccgcgatacta

SEQ ID NO: 37364 - DNA, 25 bp, Artificial
  probe
  misc_feature (1)..(25): SEQ ID NO: 3204; WAN0249XG_at; Start 44; Stop 68
tagaccgcgatactactaacaacca

SEQ ID NO: 37365 - DNA, 25 bp, Artificial
  probe
  misc_feature (1)..(25): SEQ ID NO: 3204; WAN0249XG_at; Start 3; Stop 27
caactccttcttaagttcaaatggg

SEQ ID NO: 37366 - DNA, 25 bp, Artificial
  probe
  misc_feature (1)..(25): SEQ ID NO: 3204; WAN0249XG_at; Start 19; Stop 43
tcaaatgggaatctttccccaagga

SEQ ID NO: 37367 - DNA, 25 bp, Artificial
  probe
  misc_feature (1)..(25): SEQ ID NO: 3204; WAN0249XG_at; Start 20; Stop 44
caaatgggaatctttccccaaggat

SEQ ID NO: 37368 - DNA, 25 bp, Artificial
  probe
  misc_feature (1)..(25): SEQ ID NO: 3204; WAN0249XG_at; Start 24; Stop 48
tgggaatctttccccaaggatagac

SEQ ID NO: 37369 - DNA, 25 bp, Artificial
  probe
  misc_feature (1)..(25): SEQ ID NO: 3204; WAN0249XG_at; Start 9; Stop 33
cttcttaagttcaaatgggaatctt

SEQ ID NO: 37370 - DNA, 25 bp, Artificial
  probe
  misc_feature (1)..(25): SEQ ID NO: 5947; WAN0249XH_at; Start 6; Stop 30
gttgttagtagtatcgcggtctatc

SEQ ID NO: 37371 - DNA, 25 bp, Artificial
  probe
  misc_feature (1)..(25): SEQ ID NO: 5947; WAN0249XH_at; Start 46; Stop 70
ccatttgaacttaagaaggagttgt

SEQ ID NO: 37372 - DNA, 25 bp, Artificial
  probe
  misc_feature (1)..(25): SEQ ID NO: 5947; WAN0249XH_at; Start 16; Stop 40
gtatcgcggtctatccttggggaaa

SEQ ID NO: 37373 - DNA, 25 bp, Artificial
  probe
  misc_feature (1)..(25): SEQ ID NO: 5947; WAN0249XH_at; Start 7; Stop 31
ttgttagtagtatcgcggtctatcc

SEQ ID NO: 37374 - DNA, 25 bp, Artificial
  probe
  misc_feature (1)..(25): SEQ ID NO: 5947; WAN0249XH_at; Start 26; Stop 50
ctatccttggggaaagattcccatt

SEQ ID NO: 37375 - DNA, 25 bp, Artificial
  probe
  misc_feature (1)..(25): SEQ ID NO: 5947; WAN0249XH_at; Start 18; Stop 42
atcgcggtctatccttggggaaaga

SEQ ID NO: 37376 - DNA, 25 bp, Artificial
  probe
  misc_feature (1)..(25): SEQ ID NO: 5947; WAN0249XH_at; Start 15; Stop 39
agtatcgcggtctatccttggggaa

SEQ ID NO: 37377 - DNA, 25 bp, Artificial
  probe
  misc_feature (1)..(25): SEQ ID NO: 5947; WAN0249XH_at; Start 10; Stop 34
ttagtagtatcgcggtctatccttg

SEQ ID NO: 37378 - DNA, 25 bp, Artificial
  probe
  misc_feature (1)..(25): SEQ ID NO: 5947; WAN0249XH_at; Start 37; Stop 61
gaaagattcccatttgaacttaaga

SEQ ID NO: 37379 - DNA, 25 bp, Artificial
  probe
  misc_feature (1)..(25): SEQ ID NO: 5947; WAN0249XH_at; Start 24; Stop 48
gtctatccttggggaaagattccca

SEQ ID NO: 37380 - DNA, 25 bp, Artificial
  probe
  misc_feature (1)..(25): SEQ ID NO: 5947; WAN0249XH_at; Start 20; Stop 44
cgcggtctatccttggggaaagatt

SEQ ID NO: 37381 - DNA, 25 bp, Artificial
  probe
  misc_feature (1)..(25): SEQ ID NO: 5947; WAN0249XH_at; Start 17; Stop 41
tatcgcggtctatccttggggaaag

SEQ ID NO: 37382 - DNA, 25 bp, Artificial
  probe
  misc_feature (1)..(25): SEQ ID NO: 5947; WAN0249XH_at; Start 42; Stop 66
attcccatttgaacttaagaaggag

SEQ ID NO: 37383 - DNA, 25 bp, Artificial
  probe
  misc_feature (1)..(25): SEQ ID NO: 5947; WAN0249XH_at; Start 8; Stop 32
tgttagtagtatcgcggtctatcct

SEQ ID NO: 37384 - DNA, 25 bp, Artificial
  probe
  misc_feature (1)..(25): SEQ ID NO: 5947; WAN0249XH_at; Start 5; Stop 29
ggttgttagtagtatcgcggtctat

SEQ ID NO: 37385 - DNA, 25 bp, Artificial
  probe
  misc_feature (1)..(25): SEQ ID NO: 5947; WAN0249XH_at; Start 21; Stop 45
gcggtctatccttggggaaagattc

SEQ ID NO: 37386 - DNA, 25 bp, Artificial
  probe
  misc_feature (1)..(25): SEQ ID NO: 5947; WAN0249XH_at; Start 40; Stop 64
agattcccatttgaacttaagaagg

SEQ ID NO: 37387 - DNA, 25 bp, Artificial
  probe
  misc_feature (1)..(25): SEQ ID NO: 5947; WAN0249XH_at; Start 47; Stop 71
catttgaacttaagaaggagttgtg

SEQ ID NO: 37388 - DNA, 25 bp, Artificial
  probe
  misc_feature (1)..(25): SEQ ID NO: 5947; WAN0249XH_at; Start 39; Stop 63
aagattcccatttgaacttaagaag

SEQ ID NO: 37389 - DNA, 25 bp, Artificial
  probe
  misc_feature (1)..(25): SEQ ID NO: 5947; WAN0249XH_at; Start 3; Stop 27
ttggttgttagtagtatcgcggtct

SEQ ID NO: 37390 - DNA, 25 bp, Artificial
  probe
  misc_feature (1)..(25): SEQ ID NO: 5947; WAN0249XH_at; Start 41; Stop 65
gattcccatttgaacttaagaagga

SEQ ID NO: 37391 - DNA, 25 bp, Artificial
  probe
  misc_feature (1)..(25): SEQ ID NO: 5947; WAN0249XH_at; Start 19; Stop 43
tcgcggtctatccttggggaaagat

SEQ ID NO: 37392 - DNA, 25 bp, Artificial
  probe
  misc_feature (1)..(25): SEQ ID NO: 5947; WAN0249XH_at; Start 13; Stop 37
gtagtatcgcggtctatccttgggg

SEQ ID NO: 37393 - DNA, 25 bp, Artificial
  probe
  misc_feature (1)..(25): SEQ ID NO: 5947; WAN0249XH_at; Start 25; Stop 49
tctatccttggggaaagattcccat

SEQ ID NO: 37394 - DNA, 25 bp, Artificial
  probe
  misc_feature (1)..(25): SEQ ID NO: 5947; WAN0249XH_at; Start 4; Stop 28
tggttgttagtagtatcgcggtcta

SEQ ID NO: 37395 - DNA, 25 bp, Artificial
  probe
  misc_feature (1)..(25): SEQ ID NO: 5947; WAN0249XH_at; Start 2; Stop 26
tttggttgttagtagtatcgcggtc

SEQ ID NO: 37396 - DNA, 25 bp, Artificial
  probe
  misc_feature (1)..(25): SEQ ID NO: 5947; WAN0249XH_at; Start 11; Stop 35
tagtagtatcgcggtctatccttgg

SEQ ID NO: 37397 - DNA, 25 bp, Artificial
  probe
  misc_feature (1)..(25): SEQ ID NO: 5947; WAN0249XH_at; Start 12; Stop 36
agtagtatcgcggtctatccttggg

SEQ ID NO: 37398 - DNA, 25 bp, Artificial
  probe
  misc_feature (1)..(25): SEQ ID NO: 5947; WAN0249XH_at; Start 9; Stop 33
gttagtagtatcgcggtctatcctt

SEQ ID NO: 37399 - DNA, 25 bp, Artificial
  probe
  misc_feature (1)..(25): SEQ ID NO: 5947; WAN0249XH_at; Start 28; Stop 52
atccttggggaaagattcccatttg

SEQ ID NO: 37400 - DNA, 25 bp, Artificial
  probe
  misc_feature (1)..(25): SEQ ID NO: 5947; WAN0249XH_at; Start 29; Stop 53
tccttggggaaagattcccatttga

SEQ ID NO: 37401 - DNA, 25 bp, Artificial
  probe
  misc_feature (1)..(25): SEQ ID NO: 5947; WAN0249XH_at; Start 45; Stop 69
cccatttgaacttaagaaggagttg

SEQ ID NO: 37402 - DNA, 25 bp, Artificial
  probe
  misc_feature (1)..(25): SEQ ID NO: 5947; WAN0249XH_at; Start 14; Stop 38
tagtatcgcggtctatccttgggga

SEQ ID NO: 37403 - DNA, 25 bp, Artificial
  probe
  misc_feature (1)..(25): SEQ ID NO: 2065; WAN0249XI_at; Start 37; Stop 61
aatgagagaaaatgcaagggagaag

SEQ ID NO: 37404 - DNA, 25 bp, Artificial
  probe
  misc_feature (1)..(25): SEQ ID NO: 2065; WAN0249XI_at; Start 81; Stop 105
aactccgacaagataacggagttct

SEQ ID NO: 37405 - DNA, 25 bp, Artificial
  probe
  misc_feature (1)..(25): SEQ ID NO: 2065; WAN0249XI_at; Start 84; Stop 108
tccgacaagataacggagttctttg

SEQ ID NO: 37406 - DNA, 25 bp, Artificial
  probe
  misc_feature (1)..(25): SEQ ID NO: 2065; WAN0249XI_at; Start 26; Stop 50
ttttggcaaaaaatgagagaaaatg

SEQ ID NO: 37407 - DNA, 25 bp, Artificial
  probe
  misc_feature (1)..(25): SEQ ID NO: 2065; WAN0249XI_at; Start 35; Stop 59
aaaatgagagaaaatgcaagggaga

SEQ ID NO: 37408 - DNA, 25 bp, Artificial
  probe
  misc_feature (1)..(25): SEQ ID NO: 2065; WAN0249XI_at; Start 94; Stop 118
taacggagttctttgatatcatttt

SEQ ID NO: 37409 - DNA, 25 bp, Artificial
  probe
  misc_feature (1)..(25): SEQ ID NO: 2065; WAN0249XI_at; Start 36; Stop 60
aaatgagagaaaatgcaagggagaa

SEQ ID NO: 37410 - DNA, 25 bp, Artificial
  probe
  misc_feature (1)..(25): SEQ ID NO: 2065; WAN0249XI_at; Start 82; Stop 106
actccgacaagataacggagttctt

SEQ ID NO: 37411 - DNA, 25 bp, Artificial
  probe
  misc_feature (1)..(25): SEQ ID NO: 2065; WAN0249XI_at; Start 1; Stop 25
atgctaccttctttctacccctcta

SEQ ID NO: 37412 - DNA, 25 bp, Artificial
  probe
  misc_feature (1)..(25): SEQ ID NO: 2065; WAN0249XI_at; Start 30; Stop 54
ggcaaaaaatgagagaaaatgcaag

SEQ ID NO: 37413 - DNA, 25 bp, Artificial
  probe
  misc_feature (1)..(25): SEQ ID NO: 2065; WAN0249XI_at; Start 29; Stop 53
tggcaaaaaatgagagaaaatgcaa

SEQ ID NO: 37414 - DNA, 25 bp, Artificial
  probe
  misc_feature (1)..(25): SEQ ID NO: 2065; WAN0249XI_at; Start 92; Stop 116
gataacggagttctttgatatcatt

SEQ ID NO: 37415 - DNA, 25 bp, Artificial
  probe
  misc_feature (1)..(25): SEQ ID NO: 2065; WAN0249XI_at; Start 31; Stop 55
gcaaaaaatgagagaaaatgcaagg

SEQ ID NO: 37416 - DNA, 25 bp, Artificial
  probe
  misc_feature (1)..(25): SEQ ID NO: 2065; WAN0249XI_at; Start 42; Stop 66
gagaaaatgcaagggagaagggtaa

SEQ ID NO: 37417 - DNA, 25 bp, Artificial
  probe
  misc_feature (1)..(25): SEQ ID NO: 2065; WAN0249XI_at; Start 83; Stop 107
ctccgacaagataacggagttcttt

SEQ ID NO: 37418 - DNA, 25 bp, Artificial
  probe
  misc_feature (1)..(25): SEQ ID NO: 2065; WAN0249XI_at; Start 90; Stop 114
aagataacggagttctttgatatca

SEQ ID NO: 37419 - DNA, 25 bp, Artificial
  probe
  misc_feature (1)..(25): SEQ ID NO: 2065; WAN0249XI_at; Start 23; Stop 47
ctattttggcaaaaaatgagagaaa

SEQ ID NO: 37420 - DNA, 25 bp, Artificial
  probe
  misc_feature (1)..(25): SEQ ID NO: 2065; WAN0249XI_at; Start 33; Stop 57
aaaaaatgagagaaaatgcaaggga

SEQ ID NO: 37421 - DNA, 25 bp, Artificial
  probe
  misc_feature (1)..(25): SEQ ID NO: 2065; WAN0249XI_at; Start 34; Stop 58
aaaaatgagagaaaatgcaagggag

SEQ ID NO: 37422 - DNA, 25 bp, Artificial
  probe
  misc_feature (1)..(25): SEQ ID NO: 2065; WAN0249XI_at; Start 100; Stop 124
agttctttgatatcattttcctttg

SEQ ID NO: 37423 - DNA, 25 bp, Artificial
  probe
  misc_feature (1)..(25): SEQ ID NO: 2065; WAN0249XI_at; Start 95; Stop 119
aacggagttctttgatatcattttc

SEQ ID NO: 37424 - DNA, 25 bp, Artificial
  probe
  misc_feature (1)..(25): SEQ ID NO: 2065; WAN0249XI_at; Start 87; Stop 111
gacaagataacggagttctttgata

SEQ ID NO: 37425 - DNA, 25 bp, Artificial
  probe
  misc_feature (1)..(25): SEQ ID NO: 2065; WAN0249XI_at; Start 40; Stop 64
gagagaaaatgcaagggagaagggt

SEQ ID NO: 37426 - DNA, 25 bp, Artificial
  probe
  misc_feature (1)..(25): SEQ ID NO: 2065; WAN0249XI_at; Start 21; Stop 45
ctctattttggcaaaaaatgagaga

SEQ ID NO: 37427 - DNA, 25 bp, Artificial
  probe
  misc_feature (1)..(25): SEQ ID NO: 2065; WAN0249XI_at; Start 28; Stop 52
ttggcaaaaaatgagagaaaatgca

SEQ ID NO: 37428 - DNA, 25 bp, Artificial
  probe
  misc_feature (1)..(25): SEQ ID NO: 2065; WAN0249XI_at; Start 20; Stop 44
cctctattttggcaaaaaatgagag

SEQ ID NO: 37429 - DNA, 25 bp, Artificial
  probe
  misc_feature (1)..(25): SEQ ID NO: 2065; WAN0249XI_at; Start 98; Stop 122
ggagttctttgatatcattttcctt

SEQ ID NO: 37430 - DNA, 25 bp, Artificial
  probe
  misc_feature (1)..(25): SEQ ID NO: 2065; WAN0249XI_at; Start 96; Stop 120
acggagttctttgatatcattttcc

SEQ ID NO: 37431 - DNA, 25 bp, Artificial
  probe
  misc_feature (1)..(25): SEQ ID NO: 2065; WAN0249XI_at; Start 18; Stop 42
cccctctattttggcaaaaaatgag

SEQ ID NO: 37432 - DNA, 25 bp, Artificial
  probe
  misc_feature (1)..(25): SEQ ID NO: 2065; WAN0249XI_at; Start 32; Stop 56
caaaaaatgagagaaaatgcaaggg

SEQ ID NO: 37433 - DNA, 25 bp, Artificial
  probe
  misc_feature (1)..(25): SEQ ID NO: 2065; WAN0249XI_at; Start 97; Stop 121
cggagttctttgatatcattttcct

SEQ ID NO: 37434 - DNA, 25 bp, Artificial
  probe
  misc_feature (1)..(25): SEQ ID NO: 2065; WAN0249XI_at; Start 10; Stop 34
tctttctacccctctattttggcaa

SEQ ID NO: 37435 - DNA, 25 bp, Artificial
  probe
  misc_feature (1)..(25): SEQ ID NO: 2065; WAN0249XI_at; Start 85; Stop 109
ccgacaagataacggagttctttga

SEQ ID NO: 37436 - DNA, 25 bp, Artificial
  probe
  misc_feature (1)..(25): SEQ ID NO: 2065; WAN0249XI_at; Start 89; Stop 113
caagataacggagttctttgatatc

SEQ ID NO: 37437 - DNA, 25 bp, Artificial
  probe
  misc_feature (1)..(25): SEQ ID NO: 316; WAN0249XJ_at; Start 83; Stop 107
tctcattttttgccaaaatagaggg

SEQ ID NO: 37438 - DNA, 25 bp, Artificial
  probe
  misc_feature (1)..(25): SEQ ID NO: 316; WAN0249XJ_at; Start 4; Stop 28
aaggaaaatgatatcaaagaactcc

SEQ ID NO: 37439 - DNA, 25 bp, Artificial
  probe
  misc_feature (1)..(25): SEQ ID NO: 316; WAN0249XJ_at; Start 21; Stop 45
agaactccgttatcttgtcggagtt

SEQ ID NO: 37440 - DNA, 25 bp, Artificial
  probe
  misc_feature (1)..(25): SEQ ID NO: 316; WAN0249XJ_at; Start 10; Stop 34
aatgatatcaaagaactccgttatc

SEQ ID NO: 37441 - DNA, 25 bp, Artificial
  probe
  misc_feature (1)..(25): SEQ ID NO: 316; WAN0249XJ_at; Start 19; Stop 43
aaagaactccgttatcttgtcggag

SEQ ID NO: 37442 - DNA, 25 bp, Artificial
  probe
  misc_feature (1)..(25): SEQ ID NO: 316; WAN0249XJ_at; Start 65; Stop 89
cttctcccttgcattttctctcatt

SEQ ID NO: 37443 - DNA, 25 bp, Artificial
  probe
  misc_feature (1)..(25): SEQ ID NO: 316; WAN0249XJ_at; Start 9; Stop 33
aaatgatatcaaagaactccgttat

SEQ ID NO: 37444 - DNA, 25 bp, Artificial
  probe
  misc_feature (1)..(25): SEQ ID NO: 316; WAN0249XJ_at; Start 5; Stop 29
aggaaaatgatatcaaagaactccg

SEQ ID NO: 37445 - DNA, 25 bp, Artificial
  probe
  misc_feature (1)..(25): SEQ ID NO: 316; WAN0249XJ_at; Start 3; Stop 27
aaaggaaaatgatatcaaagaactc

SEQ ID NO: 37446 - DNA, 25 bp, Artificial
  probe
  misc_feature (1)..(25): SEQ ID NO: 316; WAN0249XJ_at; Start 101; Stop 125
tagaggggtagaaagaaggtagcat

SEQ ID NO: 37447 - DNA, 25 bp, Artificial
  probe
  misc_feature (1)..(25): SEQ ID NO: 316; WAN0249XJ_at; Start 2; Stop 26
caaaggaaaatgatatcaaagaact

SEQ ID NO: 37448 - DNA, 25 bp, Artificial
  probe
  misc_feature (1)..(25): SEQ ID NO: 316; WAN0249XJ_at; Start 76; Stop 100
cattttctctcattttttgccaaaa

SEQ ID NO: 37449 - DNA, 25 bp, Artificial
  probe
  misc_feature (1)..(25): SEQ ID NO: 316; WAN0249XJ_at; Start 61; Stop 85
tacccttctcccttgcattttctct

SEQ ID NO: 37450 - DNA, 25 bp, Artificial
  probe
  misc_feature (1)..(25): SEQ ID NO: 316; WAN0249XJ_at; Start 7; Stop 31
gaaaatgatatcaaagaactccgtt

SEQ ID NO: 37451 - DNA, 25 bp, Artificial
  probe
  misc_feature (1)..(25): SEQ ID NO: 316; WAN0249XJ_at; Start 8; Stop 32
aaaatgatatcaaagaactccgtta

SEQ ID NO: 37452 - DNA, 25 bp, Artificial
  probe
  misc_feature (1)..(25): SEQ ID NO: 316; WAN0249XJ_at; Start 93; Stop 117
tgccaaaatagaggggtagaaagaa

SEQ ID NO: 37453 - DNA, 25 bp, Artificial
  probe
  misc_feature (1)..(25): SEQ ID NO: 316; WAN0249XJ_at; Start 6; Stop 30
ggaaaatgatatcaaagaactccgt

SEQ ID NO: 37454 - DNA, 25 bp, Artificial
  probe
  misc_feature (1)..(25): SEQ ID NO: 316; WAN0249XJ_at; Start 92; Stop 116
ttgccaaaatagaggggtagaaaga

SEQ ID NO: 37455 - DNA, 25 bp, Artificial
  probe
  misc_feature (1)..(25): SEQ ID NO: 316; WAN0249XJ_at; Start 70; Stop 94
cccttgcattttctctcattttttg

SEQ ID NO: 37456 - DNA, 25 bp, Artificial
  probe
  misc_feature (1)..(25): SEQ ID NO: 316; WAN0249XJ_at; Start 79; Stop 103
tttctctcattttttgccaaaatag

SEQ ID NO: 37457 - DNA, 25 bp, Artificial
  probe
  misc_feature (1)..(25): SEQ ID NO: 316; WAN0249XJ_at; Start 20; Stop 44
aagaactccgttatcttgtcggagt

SEQ ID NO: 37458 - DNA, 25 bp, Artificial
  probe
  misc_feature (1)..(25): SEQ ID NO: 316; WAN0249XJ_at; Start 14; Stop 38
atatcaaagaactccgttatcttgt

SEQ ID NO: 37459 - DNA, 25 bp, Artificial
  probe
  misc_feature (1)..(25): SEQ ID NO: 316; WAN0249XJ_at; Start 66; Stop 90
ttctcccttgcattttctctcattt

SEQ ID NO: 37460 - DNA, 25 bp, Artificial
  probe
  misc_feature (1)..(25): SEQ ID NO: 316; WAN0249XJ_at; Start 11; Stop 35
atgatatcaaagaactccgttatct

SEQ ID NO: 37461 - DNA, 25 bp, Artificial
  probe
  misc_feature (1)..(25): SEQ ID NO: 316; WAN0249XJ_at; Start 15; Stop 39
tatcaaagaactccgttatcttgtc

SEQ ID NO: 37462 - DNA, 25 bp, Artificial
  probe
  misc_feature (1)..(25): SEQ ID NO: 316; WAN0249XJ_at; Start 74; Stop 98
tgcattttctctcattttttgccaa

SEQ ID NO: 37463 - DNA, 25 bp, Artificial
  probe
  misc_feature (1)..(25): SEQ ID NO: 316; WAN0249XJ_at; Start 12; Stop 36
tgatatcaaagaactccgttatctt

SEQ ID NO: 37464 - DNA, 25 bp, Artificial
  probe
  misc_feature (1)..(25): SEQ ID NO: 316; WAN0249XJ_at; Start 71; Stop 95
ccttgcattttctctcattttttgc

SEQ ID NO: 37465 - DNA, 25 bp, Artificial
  probe
  misc_feature (1)..(25): SEQ ID NO: 316; WAN0249XJ_at; Start 81; Stop 105
tctctcattttttgccaaaatagag

SEQ ID NO: 37466 - DNA, 25 bp, Artificial
  probe
  misc_feature (1)..(25): SEQ ID NO: 316; WAN0249XJ_at; Start 67; Stop 91
tctcccttgcattttctctcatttt

SEQ ID NO: 37467 - DNA, 25 bp, Artificial
  probe
  misc_feature (1)..(25): SEQ ID NO: 316; WAN0249XJ_at; Start 18; Stop 42
caaagaactccgttatcttgtcgga

SEQ ID NO: 37468 - DNA, 25 bp, Artificial
  probe
  misc_feature (1)..(25): SEQ ID NO: 316; WAN0249XJ_at; Start 13; Stop 37
gatatcaaagaactccgttatcttg

SEQ ID NO: 37469 - DNA, 25 bp, Artificial
  probe
  misc_feature (1)..(25): SEQ ID NO: 316; WAN0249XJ_at; Start 82; Stop 106
ctctcattttttgccaaaatagagg

SEQ ID NO: 37470 - DNA, 25 bp, Artificial
  probe
  misc_feature (1)..(25): SEQ ID NO: 316; WAN0249XJ_at; Start 17; Stop 41
tcaaagaactccgttatcttgtcgg

SEQ ID NO: 37471 - DNA, 25 bp, Artificial
  probe
  misc_feature (1)..(25): SEQ ID NO: 4800; WAN0249XK_at; Start 150; Stop 174
ttatataagatagaataaatgttcg

SEQ ID NO: 37472 - DNA, 25 bp, Artificial
  probe
  misc_feature (1)..(25): SEQ ID NO: 4800; WAN0249XK_at; Start 105; Stop 129
tagtaattttttgacaagcttgata

SEQ ID NO: 37473 - DNA, 25 bp, Artificial
  probe
  misc_feature (1)..(25): SEQ ID NO: 4800; WAN0249XK_at; Start 103; Stop 127
actagtaattttttgacaagcttga

SEQ ID NO: 37474 - DNA, 25 bp, Artificial
  probe
  misc_feature (1)..(25): SEQ ID NO: 4800; WAN0249XK_at; Start 120; Stop 144
aagcttgataaactaaaatcctatc

SEQ ID NO: 37475 - DNA, 25 bp, Artificial
  probe
  misc_feature (1)..(25): SEQ ID NO: 4800; WAN0249XK_at; Start 116; Stop 140
tgacaagcttgataaactaaaatcc

SEQ ID NO: 37476 - DNA, 25 bp, Artificial
  probe
  misc_feature (1)..(25): SEQ ID NO: 4800; WAN0249XK_at; Start 153; Stop 177
tataagatagaataaatgttcgaaa

SEQ ID NO: 37477 - DNA, 25 bp, Artificial
  probe
  misc_feature (1)..(25): SEQ ID NO: 4800; WAN0249XK_at; Start 108; Stop 132
taattttttgacaagcttgataaac

SEQ ID NO: 37478 - DNA, 25 bp, Artificial
  probe
  misc_feature (1)..(25): SEQ ID NO: 4800; WAN0249XK_at; Start 123; Stop 147
cttgataaactaaaatcctatctat

SEQ ID NO: 37479 - DNA, 25 bp, Artificial
  probe
  misc_feature (1)..(25): SEQ ID NO: 4800; WAN0249XK_at; Start 119; Stop 143
caagcttgataaactaaaatcctat

SEQ ID NO: 37480 - DNA, 25 bp, Artificial
  probe
  misc_feature (1)..(25): SEQ ID NO: 4800; WAN0249XK_at; Start 118; Stop 142
acaagcttgataaactaaaatccta

SEQ ID NO: 37481 - DNA, 25 bp, Artificial
  probe
  misc_feature (1)..(25): SEQ ID NO: 4800; WAN0249XK_at; Start 59; Stop 83
tgctacgaaaaagacaaaaaatgaa

SEQ ID NO: 37482 - DNA, 25 bp, Artificial
  probe
  misc_feature (1)..(25): SEQ ID NO: 4800; WAN0249XK_at; Start 111; Stop 135
ttttttgacaagcttgataaactaa

SEQ ID NO: 37483 - DNA, 25 bp, Artificial
  probe
  misc_feature (1)..(25): SEQ ID NO: 4800; WAN0249XK_at; Start 151; Stop 175
tatataagatagaataaatgttcga

SEQ ID NO: 37484 - DNA, 25 bp, Artificial
  probe
  misc_feature (1)..(25): SEQ ID NO: 4800; WAN0249XK_at; Start 135; Stop 159
aaatcctatctatttttatataaga

SEQ ID NO: 37485 - DNA, 25 bp, Artificial
  probe
  misc_feature (1)..(25): SEQ ID NO: 4800; WAN0249XK_at; Start 117; Stop 141
gacaagcttgataaactaaaatcct

SEQ ID NO: 37486 - DNA, 25 bp, Artificial
  probe
  misc_feature (1)..(25): SEQ ID NO: 4800; WAN0249XK_at; Start 112; Stop 136
tttttgacaagcttgataaactaaa

SEQ ID NO: 37487 - DNA, 25 bp, Artificial
  probe
  misc_feature (1)..(25): SEQ ID NO: 4800; WAN0249XK_at; Start 110; Stop 134
attttttgacaagcttgataaacta

SEQ ID NO: 37488 - DNA, 25 bp, Artificial
  probe
  misc_feature (1)..(25): SEQ ID NO: 4800; WAN0249XK_at; Start 104; Stop 128
ctagtaattttttgacaagcttgat

SEQ ID NO: 37489 - DNA, 25 bp, Artificial
  probe
  misc_feature (1)..(25): SEQ ID NO: 4800; WAN0249XK_at; Start 158; Stop 182
gatagaataaatgttcgaaaatagg

SEQ ID NO: 37490 - DNA, 25 bp, Artificial
  probe
  misc_feature (1)..(25): SEQ ID NO: 4800; WAN0249XK_at; Start 121; Stop 145
agcttgataaactaaaatcctatct

SEQ ID NO: 37491 - DNA, 25 bp, Artificial
  probe
  misc_feature (1)..(25): SEQ ID NO: 4800; WAN0249XK_at; Start 57; Stop 81
tctgctacgaaaaagacaaaaaatg

SEQ ID NO: 37492 - DNA, 25 bp, Artificial
  probe
  misc_feature (1)..(25): SEQ ID NO: 4800; WAN0249XK_at; Start 113; Stop 137
ttttgacaagcttgataaactaaaa

SEQ ID NO: 37493 - DNA, 25 bp, Artificial
  probe
  misc_feature (1)..(25): SEQ ID NO: 4800; WAN0249XK_at; Start 122; Stop 146
gcttgataaactaaaatcctatcta

SEQ ID NO: 37494 - DNA, 25 bp, Artificial
  probe
  misc_feature (1)..(25): SEQ ID NO: 4800; WAN0249XK_at; Start 115; Stop 139
ttgacaagcttgataaactaaaatc

SEQ ID NO: 37495 - DNA, 25 bp, Artificial
  probe
  misc_feature (1)..(25): SEQ ID NO: 4800; WAN0249XK_at; Start 107; Stop 131
gtaattttttgacaagcttgataaa

SEQ ID NO: 37496 - DNA, 25 bp, Artificial
  probe
  misc_feature (1)..(25): SEQ ID NO: 4800; WAN0249XK_at; Start 161; Stop 185
agaataaatgttcgaaaataggagg

SEQ ID NO: 37497 - DNA, 25 bp, Artificial
  probe
  misc_feature (1)..(25): SEQ ID NO: 4800; WAN0249XK_at; Start 160; Stop 184
tagaataaatgttcgaaaataggag

SEQ ID NO: 37498 - DNA, 25 bp, Artificial
  probe
  misc_feature (1)..(25): SEQ ID NO: 4800; WAN0249XK_at; Start 109; Stop 133
aattttttgacaagcttgataaact

SEQ ID NO: 37499 - DNA, 25 bp, Artificial
  probe
  misc_feature (1)..(25): SEQ ID NO: 4800; WAN0249XK_at; Start 58; Stop 82
ctgctacgaaaaagacaaaaaatga

SEQ ID NO: 37500 - DNA, 25 bp, Artificial
  probe
  misc_feature (1)..(25): SEQ ID NO: 4800; WAN0249XK_at; Start 155; Stop 179
taagatagaataaatgttcgaaaat

SEQ ID NO: 37501 - DNA, 25 bp, Artificial
  probe
  misc_feature (1)..(25): SEQ ID NO: 4800; WAN0249XK_at; Start 114; Stop 138
tttgacaagcttgataaactaaaat

SEQ ID NO: 37502 - DNA, 25 bp, Artificial
  probe
  misc_feature (1)..(25): SEQ ID NO: 4800; WAN0249XK_at; Start 102; Stop 126
aactagtaattttttgacaagcttg

SEQ ID NO: 37503 - DNA, 25 bp, Artificial
  probe
  misc_feature (1)..(25): SEQ ID NO: 4800; WAN0249XK_at; Start 125; Stop 149
tgataaactaaaatcctatctattt

SEQ ID NO: 37504 - DNA, 25 bp, Artificial
  probe
  misc_feature (1)..(25): SEQ ID NO: 4800; WAN0249XK_at; Start 106; Stop 130
agtaattttttgacaagcttgataa

SEQ ID NO: 37505 - DNA, 25 bp, Artificial
  probe
  misc_feature (1)..(25): SEQ ID NO: 72; WAN0249XL_at; Start 122; Stop 146
tttcgtagcagaattgtgcaaaagt

SEQ ID NO: 37506 - DNA, 25 bp, Artificial
  probe
  misc_feature (1)..(25): SEQ ID NO: 72; WAN0249XL_at; Start 163; Stop 187
aatgtaattcgaataggaggaagat

SEQ ID NO: 37507 - DNA, 25 bp, Artificial
  probe
  misc_feature (1)..(25): SEQ ID NO: 72; WAN0249XL_at; Start 56; Stop 80
tagtttatcaagcttgtcaaaaaat

SEQ ID NO: 37508 - DNA, 25 bp, Artificial
  probe
  misc_feature (1)..(25): SEQ ID NO: 72; WAN0249XL_at; Start 157; Stop 181
tgctagaatgtaattcgaataggag

SEQ ID NO: 37509 - DNA, 25 bp, Artificial
  probe
  misc_feature (1)..(25): SEQ ID NO: 72; WAN0249XL_at; Start 60; Stop 84
ttatcaagcttgtcaaaaaattact

SEQ ID NO: 37510 - DNA, 25 bp, Artificial
  probe
  misc_feature (1)..(25): SEQ ID NO: 72; WAN0249XL_at; Start 159; Stop 183
ctagaatgtaattcgaataggagga

SEQ ID NO: 37511 - DNA, 25 bp, Artificial
  probe
  misc_feature (1)..(25): SEQ ID NO: 72; WAN0249XL_at; Start 117; Stop 141
gtctttttcgtagcagaattgtgca

SEQ ID NO: 37512 - DNA, 25 bp, Artificial
  probe
  misc_feature (1)..(25): SEQ ID NO: 72; WAN0249XL_at; Start 8; Stop 32
cctattttcgaacatttattctatc

SEQ ID NO: 37513 - DNA, 25 bp, Artificial
  probe
  misc_feature (1)..(25): SEQ ID NO: 72; WAN0249XL_at; Start 109; Stop 133
cattttttgtctttttcgtagcaga

SEQ ID NO: 37514 - DNA, 25 bp, Artificial
  probe
  misc_feature (1)..(25): SEQ ID NO: 72; WAN0249XL_at; Start 58; Stop 82
gtttatcaagcttgtcaaaaaatta

SEQ ID NO: 37515 - DNA, 25 bp, Artificial
  probe
  misc_feature (1)..(25): SEQ ID NO: 72; WAN0249XL_at; Start 160; Stop 184
tagaatgtaattcgaataggaggaa

SEQ ID NO: 37516 - DNA, 25 bp, Artificial
  probe
  misc_feature (1)..(25): SEQ ID NO: 72; WAN0249XL_at; Start 127; Stop 151
tagcagaattgtgcaaaagtttttt

SEQ ID NO: 37517 - DNA, 25 bp, Artificial
  probe
  misc_feature (1)..(25): SEQ ID NO: 72; WAN0249XL_at; Start 125; Stop 149
cgtagcagaattgtgcaaaagtttt

SEQ ID NO: 37518 - DNA, 25 bp, Artificial
  probe
  misc_feature (1)..(25): SEQ ID NO: 72; WAN0249XL_at; Start 51; Stop 75
gattttagtttatcaagcttgtcaa

SEQ ID NO: 37519 - DNA, 25 bp, Artificial
  probe
  misc_feature (1)..(25): SEQ ID NO: 72; WAN0249XL_at; Start 155; Stop 179
tgtgctagaatgtaattcgaatagg

SEQ ID NO: 37520 - DNA, 25 bp, Artificial
  probe
  misc_feature (1)..(25): SEQ ID NO: 72; WAN0249XL_at; Start 119; Stop 143
ctttttcgtagcagaattgtgcaaa

SEQ ID NO: 37521 - DNA, 25 bp, Artificial
  probe
  misc_feature (1)..(25): SEQ ID NO: 72; WAN0249XL_at; Start 165; Stop 189
tgtaattcgaataggaggaagataa

SEQ ID NO: 37522 - DNA, 25 bp, Artificial
  probe
  misc_feature (1)..(25): SEQ ID NO: 72; WAN0249XL_at; Start 118; Stop 142
tctttttcgtagcagaattgtgcaa

SEQ ID NO: 37523 - DNA, 25 bp, Artificial
  probe
  misc_feature (1)..(25): SEQ ID NO: 72; WAN0249XL_at; Start 121; Stop 145
ttttcgtagcagaattgtgcaaaag

SEQ ID NO: 37524 - DNA, 25 bp, Artificial
  probe
  misc_feature (1)..(25): SEQ ID NO: 72; WAN0249XL_at; Start 139; Stop 163
gcaaaagtttttttcttgtgctaga

SEQ ID NO: 37525 - DNA, 25 bp, Artificial
  probe
  misc_feature (1)..(25): SEQ ID NO: 72; WAN0249XL_at; Start 5; Stop 29
cctcctattttcgaacatttattct

SEQ ID NO: 37526 - DNA, 25 bp, Artificial
  probe
  misc_feature (1)..(25): SEQ ID NO: 72; WAN0249XL_at; Start 116; Stop 140
tgtctttttcgtagcagaattgtgc

SEQ ID NO: 37527 - DNA, 25 bp, Artificial
  probe
  misc_feature (1)..(25): SEQ ID NO: 72; WAN0249XL_at; Start 124; Stop 148
tcgtagcagaattgtgcaaaagttt

SEQ ID NO: 37528 - DNA, 25 bp, Artificial
  probe
  misc_feature (1)..(25): SEQ ID NO: 72; WAN0249XL_at; Start 64; Stop 88
caagcttgtcaaaaaattactagtt

SEQ ID NO: 37529 - DNA, 25 bp, Artificial
  probe
  misc_feature (1)..(25): SEQ ID NO: 72; WAN0249XL_at; Start 150; Stop 174
tttcttgtgctagaatgtaattcga

SEQ ID NO: 37530 - DNA, 25 bp, Artificial
  probe
  misc_feature (1)..(25): SEQ ID NO: 72; WAN0249XL_at; Start 50; Stop 74
ggattttagtttatcaagcttgtca

SEQ ID NO: 37531 - DNA, 25 bp, Artificial
  probe
  misc_feature (1)..(25): SEQ ID NO: 72; WAN0249XL_at; Start 152; Stop 176
tcttgtgctagaatgtaattcgaat

SEQ ID NO: 37532 - DNA, 25 bp, Artificial
  probe
  misc_feature (1)..(25): SEQ ID NO: 72; WAN0249XL_at; Start 162; Stop 186
gaatgtaattcgaataggaggaaga

SEQ ID NO: 37533 - DNA, 25 bp, Artificial
  probe
  misc_feature (1)..(25): SEQ ID NO: 72; WAN0249XL_at; Start 16; Stop 40
cgaacatttattctatcttatataa

SEQ ID NO: 37534 - DNA, 25 bp, Artificial
  probe
  misc_feature (1)..(25): SEQ ID NO: 72; WAN0249XL_at; Start 123; Stop 147
ttcgtagcagaattgtgcaaaagtt

SEQ ID NO: 37535 - DNA, 25 bp, Artificial
  probe
  misc_feature (1)..(25): SEQ ID NO: 72; WAN0249XL_at; Start 158; Stop 182
gctagaatgtaattcgaataggagg

SEQ ID NO: 37536 - DNA, 25 bp, Artificial
  probe
  misc_feature (1)..(25): SEQ ID NO: 72; WAN0249XL_at; Start 44; Stop 68
tagataggattttagtttatcaagc

SEQ ID NO: 37537 - DNA, 25 bp, Artificial
  probe
  misc_feature (1)..(25): SEQ ID NO: 72; WAN0249XL_at; Start 63; Stop 87
tcaagcttgtcaaaaaattactagt

SEQ ID NO: 37538 - DNA, 25 bp, Artificial
  probe
  misc_feature (1)..(25): SEQ ID NO: 72; WAN0249XL_at; Start 108; Stop 132
tcattttttgtctttttcgtagcag

SEQ ID NO: 37539 - DNA, 25 bp, Artificial
  probe
  misc_feature (1)..(25): SEQ ID NO: 4346; WAN0249XM_at; Start 158; Stop 182
cacaagaccagagcaaaagatagcc

SEQ ID NO: 37540 - DNA, 25 bp, Artificial
  probe
  misc_feature (1)..(25): SEQ ID NO: 4346; WAN0249XM_at; Start 8; Stop 32
ttctttctaaaggtggtgcgaagcc

SEQ ID NO: 37541 - DNA, 25 bp, Artificial
  probe
  misc_feature (1)..(25): SEQ ID NO: 4346; WAN0249XM_at; Start 139; Stop 163
tgcaacctatctagtataacacaag

SEQ ID NO: 37542 - DNA, 25 bp, Artificial
  probe
  misc_feature (1)..(25): SEQ ID NO: 4346; WAN0249XM_at; Start 146; Stop 170
tatctagtataacacaagaccagag

SEQ ID NO: 37543 - DNA, 25 bp, Artificial
  probe
  misc_feature (1)..(25): SEQ ID NO: 4346; WAN0249XM_at; Start 77; Stop 101
tcatataactagatataaaatcgtg

SEQ ID NO: 37544 - DNA, 25 bp, Artificial
  probe
  misc_feature (1)..(25): SEQ ID NO: 4346; WAN0249XM_at; Start 94; Stop 118
aaatcgtgttgcttcttttccacaa

SEQ ID NO: 37545 - DNA, 25 bp, Artificial
  probe
  misc_feature (1)..(25): SEQ ID NO: 4346; WAN0249XM_at; Start 3; Stop 27
tattcttctttctaaaggtggtgcg

SEQ ID NO: 37546 - DNA, 25 bp, Artificial
  probe
  misc_feature (1)..(25): SEQ ID NO: 4346; WAN0249XM_at; Start 148; Stop 172
tctagtataacacaagaccagagca

SEQ ID NO: 37547 - DNA, 25 bp, Artificial
  probe
  misc_feature (1)..(25): SEQ ID NO: 4346; WAN0249XM_at; Start 21; Stop 45
tggtgcgaagccaccctatagggct

SEQ ID NO: 37548 - DNA, 25 bp, Artificial
  probe
  misc_feature (1)..(25): SEQ ID NO: 4346; WAN0249XM_at; Start 15; Stop 39
taaaggtggtgcgaagccaccctat

SEQ ID NO: 37549 - DNA, 25 bp, Artificial
  probe
  misc_feature (1)..(25): SEQ ID NO: 4346; WAN0249XM_at; Start 97; Stop 121
tcgtgttgcttcttttccacaaaag

SEQ ID NO: 37550 - DNA, 25 bp, Artificial
  probe
  misc_feature (1)..(25): SEQ ID NO: 4346; WAN0249XM_at; Start 130; Stop 154
tgttttctttgcaacctatctagta

SEQ ID NO: 37551 - DNA, 25 bp, Artificial
  probe
  misc_feature (1)..(25): SEQ ID NO: 4346; WAN0249XM_at; Start 124; Stop 148
aagtactgttttctttgcaacctat

SEQ ID NO: 37552 - DNA, 25 bp, Artificial
  probe
  misc_feature (1)..(25): SEQ ID NO: 4346; WAN0249XM_at; Start 155; Stop 179
taacacaagaccagagcaaaagata

SEQ ID NO: 37553 - DNA, 25 bp, Artificial
  probe
  misc_feature (1)..(25): SEQ ID NO: 4346; WAN0249XM_at; Start 163; Stop 187
gaccagagcaaaagatagccccatt

SEQ ID NO: 37554 - DNA, 25 bp, Artificial
  probe
  misc_feature (1)..(25): SEQ ID NO: 4346; WAN0249XM_at; Start 165; Stop 189
ccagagcaaaagatagccccatttc

SEQ ID NO: 37555 - DNA, 25 bp, Artificial
  probe
  misc_feature (1)..(25): SEQ ID NO: 4346; WAN0249XM_at; Start 172; Stop 196
aaaagatagccccatttctacagaa

SEQ ID NO: 37556 - DNA, 25 bp, Artificial
  probe
  misc_feature (1)..(25): SEQ ID NO: 4346; WAN0249XM_at; Start 24; Stop 48
tgcgaagccaccctatagggcttag

SEQ ID NO: 37557 - DNA, 25 bp, Artificial
  probe
  misc_feature (1)..(25): SEQ ID NO: 4346; WAN0249XM_at; Start 9; Stop 33
tctttctaaaggtggtgcgaagcca

SEQ ID NO: 37558 - DNA, 25 bp, Artificial
  probe
  misc_feature (1)..(25): SEQ ID NO: 4346; WAN0249XM_at; Start 29; Stop 53
agccaccctatagggcttagtttat

SEQ ID NO: 37559 - DNA, 25 bp, Artificial
  probe
  misc_feature (1)..(25): SEQ ID NO: 4346; WAN0249XM_at; Start 13; Stop 37
tctaaaggtggtgcgaagccaccct

SEQ ID NO: 37560 - DNA, 25 bp, Artificial
  probe
  misc_feature (1)..(25): SEQ ID NO: 4346; WAN0249XM_at; Start 141; Stop 165
caacctatctagtataacacaagac

SEQ ID NO: 37561 - DNA, 25 bp, Artificial
  probe
  misc_feature (1)..(25): SEQ ID NO: 4346; WAN0249XM_at; Start 150; Stop 174
tagtataacacaagaccagagcaaa

SEQ ID NO: 37562 - DNA, 25 bp, Artificial
  probe
  misc_feature (1)..(25): SEQ ID NO: 4346; WAN0249XM_at; Start 65; Stop 89
tatgacgtattttcatataactaga

SEQ ID NO: 37563 - DNA, 25 bp, Artificial
  probe
  misc_feature (1)..(25): SEQ ID NO: 4346; WAN0249XM_at; Start 100; Stop 124
tgttgcttcttttccacaaaagaaa

SEQ ID NO: 37564 - DNA, 25 bp, Artificial
  probe
  misc_feature (1)..(25): SEQ ID NO: 4346; WAN0249XM_at; Start 11; Stop 35
tttctaaaggtggtgcgaagccacc

SEQ ID NO: 37565 - DNA, 25 bp, Artificial
  probe
  misc_feature (1)..(25): SEQ ID NO: 4346; WAN0249XM_at; Start 17; Stop 41
aaggtggtgcgaagccaccctatag

SEQ ID NO: 37566 - DNA, 25 bp, Artificial
  probe
  misc_feature (1)..(25): SEQ ID NO: 4346; WAN0249XM_at; Start 22; Stop 46
ggtgcgaagccaccctatagggctt

SEQ ID NO: 37567 - DNA, 25 bp, Artificial
  probe
  misc_feature (1)..(25): SEQ ID NO: 4346; WAN0249XM_at; Start 153; Stop 177
tataacacaagaccagagcaaaaga

SEQ ID NO: 37568 - DNA, 25 bp, Artificial
  probe
  misc_feature (1)..(25): SEQ ID NO: 4346; WAN0249XM_at; Start 160; Stop 184
caagaccagagcaaaagatagcccc

SEQ ID NO: 37569 - DNA, 25 bp, Artificial
  probe
  misc_feature (1)..(25): SEQ ID NO: 4346; WAN0249XM_at; Start 26; Stop 50
cgaagccaccctatagggcttagtt

SEQ ID NO: 37570 - DNA, 25 bp, Artificial
  probe
  misc_feature (1)..(25): SEQ ID NO: 4346; WAN0249XM_at; Start 174; Stop 198
aagatagccccatttctacagaaaa

SEQ ID NO: 37571 - DNA, 25 bp, Artificial
  probe
  misc_feature (1)..(25): SEQ ID NO: 4346; WAN0249XM_at; Start 84; Stop 108
actagatataaaatcgtgttgcttc

SEQ ID NO: 37572 - DNA, 25 bp, Artificial
  probe
  misc_feature (1)..(25): SEQ ID NO: 4346; WAN0249XM_at; Start 167; Stop 191
agagcaaaagatagccccatttcta

SEQ ID NO: 37573 - DNA, 25 bp, Artificial
  probe
  misc_feature (1)..(25): SEQ ID NO: 5940; WAN0249XN_at; Start 30; Stop 54
tctggtcttgtgttatactagatag

SEQ ID NO: 37574 - DNA, 25 bp, Artificial
  probe
  misc_feature (1)..(25): SEQ ID NO: 5940; WAN0249XN_at; Start 80; Stop 104
tttgtggaaaagaagcaacacgatt

SEQ ID NO: 37575 - DNA, 25 bp, Artificial
  probe
  misc_feature (1)..(25): SEQ ID NO: 5940; WAN0249XN_at; Start 149; Stop 173
aactaagccctatagggtggcttcg

SEQ ID NO: 37576 - DNA, 25 bp, Artificial
  probe
  misc_feature (1)..(25): SEQ ID NO: 5940; WAN0249XN_at; Start 159; Stop 183
tatagggtggcttcgcaccaccttt

SEQ ID NO: 37577 - DNA, 25 bp, Artificial
  probe
  misc_feature (1)..(25): SEQ ID NO: 5940; WAN0249XN_at; Start 157; Stop 181
cctatagggtggcttcgcaccacct

SEQ ID NO: 37578 - DNA, 25 bp, Artificial
  probe
  misc_feature (1)..(25): SEQ ID NO: 5940; WAN0249XN_at; Start 47; Stop 71
ctagataggttgcaaagaaaacagt

SEQ ID NO: 37579 - DNA, 25 bp, Artificial
  probe
  misc_feature (1)..(25): SEQ ID NO: 5940; WAN0249XN_at; Start 91; Stop 115
gaagcaacacgattttatatctagt

SEQ ID NO: 37580 - DNA, 25 bp, Artificial
  probe
  misc_feature (1)..(25): SEQ ID NO: 5940; WAN0249XN_at; Start 108; Stop 132
tatctagttatatgaaaatacgtca

SEQ ID NO: 37581 - DNA, 25 bp, Artificial
  probe
  misc_feature (1)..(25): SEQ ID NO: 5940; WAN0249XN_at; Start 168; Stop 192
gcttcgcaccacctttagaaagaag

SEQ ID NO: 37582 - DNA, 25 bp, Artificial
  probe
  misc_feature (1)..(25): SEQ ID NO: 5940; WAN0249XN_at; Start 154; Stop 178
agccctatagggtggcttcgcacca

SEQ ID NO: 37583 - DNA, 25 bp, Artificial
  probe
  misc_feature (1)..(25): SEQ ID NO: 5940; WAN0249XN_at; Start 165; Stop 189
gtggcttcgcaccacctttagaaag

SEQ ID NO: 37584 - DNA, 25 bp, Artificial
  probe
  misc_feature (1)..(25): SEQ ID NO: 5940; WAN0249XN_at; Start 118; Stop 142
tatgaaaatacgtcataaaaagaaa

SEQ ID NO: 37585 - DNA, 25 bp, Artificial
  probe
  misc_feature (1)..(25): SEQ ID NO: 5940; WAN0249XN_at; Start 163; Stop 187
gggtggcttcgcaccacctttagaa

SEQ ID NO: 37586 - DNA, 25 bp, Artificial
  probe
  misc_feature (1)..(25): SEQ ID NO: 5940; WAN0249XN_at; Start 173; Stop 197
gcaccacctttagaaagaagaataa

SEQ ID NO: 37587 - DNA, 25 bp, Artificial
  probe
  misc_feature (1)..(25): SEQ ID NO: 5940; WAN0249XN_at; Start 146; Stop 170
ataaactaagccctatagggtggct

SEQ ID NO: 37588 - DNA, 25 bp, Artificial
  probe
  misc_feature (1)..(25): SEQ ID NO: 5940; WAN0249XN_at; Start 23; Stop 47
cttttgctctggtcttgtgttatac

SEQ ID NO: 37589 - DNA, 25 bp, Artificial
  probe
  misc_feature (1)..(25): SEQ ID NO: 5940; WAN0249XN_at; Start 143; Stop 167
agtataaactaagccctatagggtg

SEQ ID NO: 37590 - DNA, 25 bp, Artificial
  probe
  misc_feature (1)..(25): SEQ ID NO: 5940; WAN0249XN_at; Start 16; Stop 40
gggctatcttttgctctggtcttgt

SEQ ID NO: 37591 - DNA, 25 bp, Artificial
  probe
  misc_feature (1)..(25): SEQ ID NO: 5940; WAN0249XN_at; Start 20; Stop 44
tatcttttgctctggtcttgtgtta

SEQ ID NO: 37592 - DNA, 25 bp, Artificial
  probe
  misc_feature (1)..(25): SEQ ID NO: 5940; WAN0249XN_at; Start 77; Stop 101
tcttttgtggaaaagaagcaacacg

SEQ ID NO: 37593 - DNA, 25 bp, Artificial
  probe
  misc_feature (1)..(25): SEQ ID NO: 5940; WAN0249XN_at; Start 78; Stop 102
cttttgtggaaaagaagcaacacga

SEQ ID NO: 37594 - DNA, 25 bp, Artificial
  probe
  misc_feature (1)..(25): SEQ ID NO: 5940; WAN0249XN_at; Start 50; Stop 74
gataggttgcaaagaaaacagtact

SEQ ID NO: 37595 - DNA, 25 bp, Artificial
  probe
  misc_feature (1)..(25): SEQ ID NO: 5940; WAN0249XN_at; Start 85; Stop 109
ggaaaagaagcaacacgattttata

SEQ ID NO: 37596 - DNA, 25 bp, Artificial
  probe
  misc_feature (1)..(25): SEQ ID NO: 5940; WAN0249XN_at; Start 82; Stop 106
tgtggaaaagaagcaacacgatttt

SEQ ID NO: 37597 - DNA, 25 bp, Artificial
  probe
  misc_feature (1)..(25): SEQ ID NO: 5940; WAN0249XN_at; Start 45; Stop 69
tactagataggttgcaaagaaaaca

SEQ ID NO: 37598 - DNA, 25 bp, Artificial
  probe
  misc_feature (1)..(25): SEQ ID NO: 5940; WAN0249XN_at; Start 1; Stop 25
ttttctgtagaaatggggctatctt

SEQ ID NO: 37599 - DNA, 25 bp, Artificial
  probe
  misc_feature (1)..(25): SEQ ID NO: 5940; WAN0249XN_at; Start 35; Stop 59
tcttgtgttatactagataggttgc

SEQ ID NO: 37600 - DNA, 25 bp, Artificial
  probe
  misc_feature (1)..(25): SEQ ID NO: 5940; WAN0249XN_at; Start 151; Stop 175
ctaagccctatagggtggcttcgca

SEQ ID NO: 37601 - DNA, 25 bp, Artificial
  probe
  misc_feature (1)..(25): SEQ ID NO: 5940; WAN0249XN_at; Start 40; Stop 64
tgttatactagataggttgcaaaga

SEQ ID NO: 37602 - DNA, 25 bp, Artificial
  probe
  misc_feature (1)..(25): SEQ ID NO: 5940; WAN0249XN_at; Start 94; Stop 118
gcaacacgattttatatctagttat

SEQ ID NO: 37603 - DNA, 25 bp, Artificial
  probe
  misc_feature (1)..(25): SEQ ID NO: 5940; WAN0249XN_at; Start 167; Stop 191
ggcttcgcaccacctttagaaagaa

SEQ ID NO: 37604 - DNA, 25 bp, Artificial
  probe
  misc_feature (1)..(25): SEQ ID NO: 5940; WAN0249XN_at; Start 171; Stop 195
tcgcaccacctttagaaagaagaat

SEQ ID NO: 37605 - DNA, 25 bp, Artificial
  probe
  misc_feature (1)..(25): SEQ ID NO: 5940; WAN0249XN_at; Start 27; Stop 51
tgctctggtcttgtgttatactaga

SEQ ID NO: 37606 - DNA, 25 bp, Artificial
  probe
  misc_feature (1)..(25): SEQ ID NO: 5940; WAN0249XN_at; Start 51; Stop 75
ataggttgcaaagaaaacagtactt

SEQ ID NO: 37607 - DNA, 25 bp, Artificial
  probe
  misc_feature (1)..(25): SEQ ID NO: 398; WAN0249XO_at; Start 56; Stop 80
ttgtaagtcaatgcaagtcaataag

SEQ ID NO: 37608 - DNA, 25 bp, Artificial
  probe
  misc_feature (1)..(25): SEQ ID NO: 398; WAN0249XO_at; Start 51; Stop 75
ttaaattgtaagtcaatgcaagtca

SEQ ID NO: 37609 - DNA, 25 bp, Artificial
  probe
  misc_feature (1)..(25): SEQ ID NO: 398; WAN0249XO_at; Start 121; Stop 145
tataatgatagcgattaaattcgag

SEQ ID NO: 37610 - DNA, 25 bp, Artificial
  probe
  misc_feature (1)..(25): SEQ ID NO: 398; WAN0249XO_at; Start 72; Stop 96
gtcaataaggaattttcagataatt

SEQ ID NO: 37611 - DNA, 25 bp, Artificial
  probe
  misc_feature (1)..(25): SEQ ID NO: 398; WAN0249XO_at; Start 48; Stop 72
taattaaattgtaagtcaatgcaag

SEQ ID NO: 37612 - DNA, 25 bp, Artificial
  probe
  misc_feature (1)..(25): SEQ ID NO: 398; WAN0249XO_at; Start 1; Stop 25
acttgtcaatagaaaaggaacaatt

SEQ ID NO: 37613 - DNA, 25 bp, Artificial
  probe
  misc_feature (1)..(25): SEQ ID NO: 398; WAN0249XO_at; Start 67; Stop 91
tgcaagtcaataaggaattttcaga

SEQ ID NO: 37614 - DNA, 25 bp, Artificial
  probe
  misc_feature (1)..(25): SEQ ID NO: 398; WAN0249XO_at; Start 87; Stop 111
tcagataattattgaaaaagagacg

SEQ ID NO: 37615 - DNA, 25 bp, Artificial
  probe
  misc_feature (1)..(25): SEQ ID NO: 398; WAN0249XO_at; Start 64; Stop 88
caatgcaagtcaataaggaattttc

SEQ ID NO: 37616 - DNA, 25 bp, Artificial
  probe
  misc_feature (1)..(25): SEQ ID NO: 398; WAN0249XO_at; Start 122; Stop 146
ataatgatagcgattaaattcgagg

SEQ ID NO: 37617 - DNA, 25 bp, Artificial
  probe
  misc_feature (1)..(25): SEQ ID NO: 398; WAN0249XO_at; Start 63; Stop 87
tcaatgcaagtcaataaggaatttt

SEQ ID NO: 37618 - DNA, 25 bp, Artificial
  probe
  misc_feature (1)..(25): SEQ ID NO: 398; WAN0249XO_at; Start 89; Stop 113
agataattattgaaaaagagacgtt

SEQ ID NO: 37619 - DNA, 25 bp, Artificial
  probe
  misc_feature (1)..(25): SEQ ID NO: 398; WAN0249XO_at; Start 124; Stop 148
aatgatagcgattaaattcgaggtg

SEQ ID NO: 37620 - DNA, 25 bp, Artificial
  probe
  misc_feature (1)..(25): SEQ ID NO: 398; WAN0249XO_at; Start 54; Stop 78
aattgtaagtcaatgcaagtcaata

SEQ ID NO: 37621 - DNA, 25 bp, Artificial
  probe
  misc_feature (1)..(25): SEQ ID NO: 398; WAN0249XO_at; Start 61; Stop 85
agtcaatgcaagtcaataaggaatt

SEQ ID NO: 37622 - DNA, 25 bp, Artificial
  probe
  misc_feature (1)..(25): SEQ ID NO: 398; WAN0249XO_at; Start 108; Stop 132
gacgtttttatgttataatgatagc

SEQ ID NO: 37623 - DNA, 25 bp, Artificial
  probe
  misc_feature (1)..(25): SEQ ID NO: 398; WAN0249XO_at; Start 59; Stop 83
taagtcaatgcaagtcaataaggaa

SEQ ID NO: 37624 - DNA, 25 bp, Artificial
  probe
  misc_feature (1)..(25): SEQ ID NO: 398; WAN0249XO_at; Start 4; Stop 28
tgtcaatagaaaaggaacaatttaa

SEQ ID NO: 37625 - DNA, 25 bp, Artificial
  probe
  misc_feature (1)..(25): SEQ ID NO: 398; WAN0249XO_at; Start 110; Stop 134
cgtttttatgttataatgatagcga

SEQ ID NO: 37626 - DNA, 25 bp, Artificial
  probe
  misc_feature (1)..(25): SEQ ID NO: 398; WAN0249XO_at; Start 60; Stop 84
aagtcaatgcaagtcaataaggaat

SEQ ID NO: 37627 - DNA, 25 bp, Artificial
  probe
  misc_feature (1)..(25): SEQ ID NO: 398; WAN0249XO_at; Start 68; Stop 92
gcaagtcaataaggaattttcagat

SEQ ID NO: 37628 - DNA, 25 bp, Artificial
  probe
  misc_feature (1)..(25): SEQ ID NO: 398; WAN0249XO_at; Start 62; Stop 86
gtcaatgcaagtcaataaggaattt

SEQ ID NO: 37629 - DNA, 25 bp, Artificial
  probe
  misc_feature (1)..(25): SEQ ID NO: 398; WAN0249XO_at; Start 123; Stop 147
taatgatagcgattaaattcgaggt

SEQ ID NO: 37630 - DNA, 25 bp, Artificial
  probe
  misc_feature (1)..(25): SEQ ID NO: 398; WAN0249XO_at; Start 88; Stop 112
cagataattattgaaaaagagacgt

SEQ ID NO: 37631 - DNA, 25 bp, Artificial
  probe
  misc_feature (1)..(25): SEQ ID NO: 398; WAN0249XO_at; Start 52; Stop 76
taaattgtaagtcaatgcaagtcaa

SEQ ID NO: 37632 - DNA, 25 bp, Artificial
  probe
  misc_feature (1)..(25): SEQ ID NO: 398; WAN0249XO_at; Start 103; Stop 127
aaagagacgtttttatgttataatg

SEQ ID NO: 37633 - DNA, 25 bp, Artificial
  probe
  misc_feature (1)..(25): SEQ ID NO: 398; WAN0249XO_at; Start 58; Stop 82
gtaagtcaatgcaagtcaataagga

SEQ ID NO: 37634 - DNA, 25 bp, Artificial
  probe
  misc_feature (1)..(25): SEQ ID NO: 398; WAN0249XO_at; Start 65; Stop 89
aatgcaagtcaataaggaattttca

SEQ ID NO: 37635 - DNA, 25 bp, Artificial
  probe
  misc_feature (1)..(25): SEQ ID NO: 398; WAN0249XO_at; Start 126; Stop 150
tgatagcgattaaattcgaggtgaa

SEQ ID NO: 37636 - DNA, 25 bp, Artificial
  probe
  misc_feature (1)..(25): SEQ ID NO: 398; WAN0249XO_at; Start 69; Stop 93
caagtcaataaggaattttcagata

SEQ ID NO: 37637 - DNA, 25 bp, Artificial
  probe
  misc_feature (1)..(25): SEQ ID NO: 398; WAN0249XO_at; Start 2; Stop 26
cttgtcaatagaaaaggaacaattt

SEQ ID NO: 37638 - DNA, 25 bp, Artificial
  probe
  misc_feature (1)..(25): SEQ ID NO: 398; WAN0249XO_at; Start 57; Stop 81
tgtaagtcaatgcaagtcaataagg

SEQ ID NO: 37639 - DNA, 25 bp, Artificial
  probe
  misc_feature (1)..(25): SEQ ID NO: 398; WAN0249XO_at; Start 128; Stop 152
atagcgattaaattcgaggtgaaaa

SEQ ID NO: 37640 - DNA, 25 bp, Artificial
  probe
  misc_feature (1)..(25): SEQ ID NO: 398; WAN0249XO_at; Start 127; Stop 151
gatagcgattaaattcgaggtgaaa

SEQ ID NO: 37641 - DNA, 25 bp, Artificial
  probe
  misc_feature (1)..(25): SEQ ID NO: 5935; WAN0249XP_at; Start 63; Stop 87
ctgaaaattccttattgacttgcat

SEQ ID NO: 37642 - DNA, 25 bp, Artificial
  probe
  misc_feature (1)..(25): SEQ ID NO: 5935; WAN0249XP_at; Start 19; Stop 43
tcgctatcattataacataaaaacg

SEQ ID NO: 37643 - DNA, 25 bp, Artificial
  probe
  misc_feature (1)..(25): SEQ ID NO: 5935; WAN0249XP_at; Start 8; Stop 32
ctcgaatttaatcgctatcattata

SEQ ID NO: 37644 - DNA, 25 bp, Artificial
  probe
  misc_feature (1)..(25): SEQ ID NO: 5935; WAN0249XP_at; Start 2; Stop 26
tttcacctcgaatttaatcgctatc

SEQ ID NO: 37645 - DNA, 25 bp, Artificial
  probe
  misc_feature (1)..(25): SEQ ID NO: 5935; WAN0249XP_at; Start 23; Stop 47
tatcattataacataaaaacgtctc

SEQ ID NO: 37646 - DNA, 25 bp, Artificial
  probe
  misc_feature (1)..(25): SEQ ID NO: 5935; WAN0249XP_at; Start 66; Stop 90
aaaattccttattgacttgcattga

SEQ ID NO: 37647 - DNA, 25 bp, Artificial
  probe
  misc_feature (1)..(25): SEQ ID NO: 5935; WAN0249XP_at; Start 7; Stop 31
cctcgaatttaatcgctatcattat

SEQ ID NO: 37648 - DNA, 25 bp, Artificial
  probe
  misc_feature (1)..(25): SEQ ID NO: 5935; WAN0249XP_at; Start 127; Stop 151
aaattgttccttttctattgacaag

SEQ ID NO: 37649 - DNA, 25 bp, Artificial
  probe
  misc_feature (1)..(25): SEQ ID NO: 5935; WAN0249XP_at; Start 60; Stop 84
tatctgaaaattccttattgacttg

SEQ ID NO: 37650 - DNA, 25 bp, Artificial
  probe
  misc_feature (1)..(25): SEQ ID NO: 5935; WAN0249XP_at; Start 78; Stop 102
tgacttgcattgacttacaatttaa

SEQ ID NO: 37651 - DNA, 25 bp, Artificial
  probe
  misc_feature (1)..(25): SEQ ID NO: 5935; WAN0249XP_at; Start 41; Stop 65
acgtctctttttcaataattatctg

SEQ ID NO: 37652 - DNA, 25 bp, Artificial
  probe
  misc_feature (1)..(25): SEQ ID NO: 5935; WAN0249XP_at; Start 75; Stop 99
tattgacttgcattgacttacaatt

SEQ ID NO: 37653 - DNA, 25 bp, Artificial
  probe
  misc_feature (1)..(25): SEQ ID NO: 5935; WAN0249XP_at; Start 68; Stop 92
aattccttattgacttgcattgact

SEQ ID NO: 37654 - DNA, 25 bp, Artificial
  probe
  misc_feature (1)..(25): SEQ ID NO: 5935; WAN0249XP_at; Start 72; Stop 96
ccttattgacttgcattgacttaca

SEQ ID NO: 37655 - DNA, 25 bp, Artificial
  probe
  misc_feature (1)..(25): SEQ ID NO: 5935; WAN0249XP_at; Start 11; Stop 35
gaatttaatcgctatcattataaca

SEQ ID NO: 37656 - DNA, 25 bp, Artificial
  probe
  misc_feature (1)..(25): SEQ ID NO: 5935; WAN0249XP_at; Start 84; Stop 108
gcattgacttacaatttaattaaaa

SEQ ID NO: 37657 - DNA, 25 bp, Artificial
  probe
  misc_feature (1)..(25): SEQ ID NO: 5935; WAN0249XP_at; Start 79; Stop 103
gacttgcattgacttacaatttaat

SEQ ID NO: 37658 - DNA, 25 bp, Artificial
  probe
  misc_feature (1)..(25): SEQ ID NO: 5935; WAN0249XP_at; Start 21; Stop 45
gctatcattataacataaaaacgtc

SEQ ID NO: 37659 - DNA, 25 bp, Artificial
  probe
  misc_feature (1)..(25): SEQ ID NO: 5935; WAN0249XP_at; Start 65; Stop 89
gaaaattccttattgacttgcattg

SEQ ID NO: 37660 - DNA, 25 bp, Artificial
  probe
  misc_feature (1)..(25): SEQ ID NO: 5935; WAN0249XP_at; Start 73; Stop 97
cttattgacttgcattgacttacaa

SEQ ID NO: 37661 - DNA, 25 bp, Artificial
  probe
  misc_feature (1)..(25): SEQ ID NO: 5935; WAN0249XP_at; Start 3; Stop 27
ttcacctcgaatttaatcgctatca

SEQ ID NO: 37662 - DNA, 25 bp, Artificial
  probe
  misc_feature (1)..(25): SEQ ID NO: 5935; WAN0249XP_at; Start 4; Stop 28
tcacctcgaatttaatcgctatcat

SEQ ID NO: 37663 - DNA, 25 bp, Artificial
  probe
  misc_feature (1)..(25): SEQ ID NO: 5935; WAN0249XP_at; Start 5; Stop 29
cacctcgaatttaatcgctatcatt

SEQ ID NO: 37664 - DNA, 25 bp, Artificial
  probe
  misc_feature (1)..(25): SEQ ID NO: 5935; WAN0249XP_at; Start 71; Stop 95
tccttattgacttgcattgacttac

SEQ ID NO: 37665 - DNA, 25 bp, Artificial
  probe
  misc_feature (1)..(25): SEQ ID NO: 5935; WAN0249XP_at; Start 62; Stop 86
tctgaaaattccttattgacttgca

SEQ ID NO: 37666 - DNA, 25 bp, Artificial
  probe
  misc_feature (1)..(25): SEQ ID NO: 5935; WAN0249XP_at; Start 128; Stop 152
aattgttccttttctattgacaagt

SEQ ID NO: 37667 - DNA, 25 bp, Artificial
  probe
  misc_feature (1)..(25): SEQ ID NO: 5935; WAN0249XP_at; Start 1; Stop 25
ttttcacctcgaatttaatcgctat

SEQ ID NO: 37668 - DNA, 25 bp, Artificial
  probe
  misc_feature (1)..(25): SEQ ID NO: 5935; WAN0249XP_at; Start 57; Stop 81
aattatctgaaaattccttattgac

SEQ ID NO: 37669 - DNA, 25 bp, Artificial
  probe
  misc_feature (1)..(25): SEQ ID NO: 5935; WAN0249XP_at; Start 26; Stop 50
cattataacataaaaacgtctcttt

SEQ ID NO: 37670 - DNA, 25 bp, Artificial
  probe
  misc_feature (1)..(25): SEQ ID NO: 5935; WAN0249XP_at; Start 25; Stop 49
tcattataacataaaaacgtctctt

SEQ ID NO: 37671 - DNA, 25 bp, Artificial
  probe
  misc_feature (1)..(25): SEQ ID NO: 5935; WAN0249XP_at; Start 67; Stop 91
aaattccttattgacttgcattgac

SEQ ID NO: 37672 - DNA, 25 bp, Artificial
  probe
  misc_feature (1)..(25): SEQ ID NO: 5935; WAN0249XP_at; Start 10; Stop 34
cgaatttaatcgctatcattataac

SEQ ID NO: 37673 - DNA, 25 bp, Artificial
  probe
  misc_feature (1)..(25): SEQ ID NO: 5935; WAN0249XP_at; Start 81; Stop 105
cttgcattgacttacaatttaatta

SEQ ID NO: 37674 - DNA, 25 bp, Artificial
  probe
  misc_feature (1)..(25): SEQ ID NO: 5935; WAN0249XP_at; Start 42; Stop 66
cgtctctttttcaataattatctga

SEQ ID NO: 37675 - DNA, 25 bp, Artificial
  probe
  misc_feature (1)..(25): SEQ ID NO: 3245; WAN0249XQ_at; Start 44; Stop 68
agcatcccaaaagttgatatactag

SEQ ID NO: 37676 - DNA, 25 bp, Artificial
  probe
  misc_feature (1)..(25): SEQ ID NO: 3245; WAN0249XQ_at; Start 41; Stop 65
acaagcatcccaaaagttgatatac

SEQ ID NO: 37677 - DNA, 25 bp, Artificial
  probe
  misc_feature (1)..(25): SEQ ID NO: 3245; WAN0249XQ_at; Start 47; Stop 71
atcccaaaagttgatatactagtaa

SEQ ID NO: 37678 - DNA, 25 bp, Artificial
  probe
  misc_feature (1)..(25): SEQ ID NO: 3245; WAN0249XQ_at; Start 40; Stop 64
gacaagcatcccaaaagttgatata

SEQ ID NO: 37679 - DNA, 25 bp, Artificial
  probe
  misc_feature (1)..(25): SEQ ID NO: 3245; WAN0249XQ_at; Start 55; Stop 79
agttgatatactagtaaagtaatcg

SEQ ID NO: 37680 - DNA, 25 bp, Artificial
  probe
  misc_feature (1)..(25): SEQ ID NO: 3245; WAN0249XQ_at; Start 33; Stop 57
aagtgttgacaagcatcccaaaagt

SEQ ID NO: 37681 - DNA, 25 bp, Artificial
  probe
  misc_feature (1)..(25): SEQ ID NO: 3245; WAN0249XQ_at; Start 37; Stop 61
gttgacaagcatcccaaaagttgat

SEQ ID NO: 37682 - DNA, 25 bp, Artificial
  probe
  misc_feature (1)..(25): SEQ ID NO: 3245; WAN0249XQ_at; Start 49; Stop 73
cccaaaagttgatatactagtaaag

SEQ ID NO: 37683 - DNA, 25 bp, Artificial
  probe
  misc_feature (1)..(25): SEQ ID NO: 3245; WAN0249XQ_at; Start 48; Stop 72
tcccaaaagttgatatactagtaaa

SEQ ID NO: 37684 - DNA, 25 bp, Artificial
  probe
  misc_feature (1)..(25): SEQ ID NO: 3245; WAN0249XQ_at; Start 56; Stop 80
gttgatatactagtaaagtaatcga

SEQ ID NO: 37685 - DNA, 25 bp, Artificial
  probe
  misc_feature (1)..(25): SEQ ID NO: 3245; WAN0249XQ_at; Start 43; Stop 67
aagcatcccaaaagttgatatacta

SEQ ID NO: 37686 - DNA, 25 bp, Artificial
  probe
  misc_feature (1)..(25): SEQ ID NO: 3245; WAN0249XQ_at; Start 50; Stop 74
ccaaaagttgatatactagtaaagt

SEQ ID NO: 37687 - DNA, 25 bp, Artificial
  probe
  misc_feature (1)..(25): SEQ ID NO: 3245; WAN0249XQ_at; Start 32; Stop 56
aaagtgttgacaagcatcccaaaag

SEQ ID NO: 37688 - DNA, 25 bp, Artificial
  probe
  misc_feature (1)..(25): SEQ ID NO: 3245; WAN0249XQ_at; Start 42; Stop 66
caagcatcccaaaagttgatatact

SEQ ID NO: 37689 - DNA, 25 bp, Artificial
  probe
  misc_feature (1)..(25): SEQ ID NO: 3245; WAN0249XQ_at; Start 36; Stop 60
tgttgacaagcatcccaaaagttga

SEQ ID NO: 37690 - DNA, 25 bp, Artificial
  probe
  misc_feature (1)..(25): SEQ ID NO: 3245; WAN0249XQ_at; Start 46; Stop 70
catcccaaaagttgatatactagta

SEQ ID NO: 37691 - DNA, 25 bp, Artificial
  probe
  misc_feature (1)..(25): SEQ ID NO: 3245; WAN0249XQ_at; Start 38; Stop 62
ttgacaagcatcccaaaagttgata

SEQ ID NO: 37692 - DNA, 25 bp, Artificial
  probe
  misc_feature (1)..(25): SEQ ID NO: 3245; WAN0249XQ_at; Start 45; Stop 69
gcatcccaaaagttgatatactagt

SEQ ID NO: 37693 - DNA, 25 bp, Artificial
  probe
  misc_feature (1)..(25): SEQ ID NO: 3245; WAN0249XQ_at; Start 54; Stop 78
aagttgatatactagtaaagtaatc

SEQ ID NO: 37694 - DNA, 25 bp, Artificial
  probe
  misc_feature (1)..(25): SEQ ID NO: 3245; WAN0249XQ_at; Start 51; Stop 75
caaaagttgatatactagtaaagta

SEQ ID NO: 37695 - DNA, 25 bp, Artificial
  probe
  misc_feature (1)..(25): SEQ ID NO: 3245; WAN0249XQ_at; Start 34; Stop 58
agtgttgacaagcatcccaaaagtt

SEQ ID NO: 37696 - DNA, 25 bp, Artificial
  probe
  misc_feature (1)..(25): SEQ ID NO: 3245; WAN0249XQ_at; Start 53; Stop 77
aaagttgatatactagtaaagtaat

SEQ ID NO: 37697 - DNA, 25 bp, Artificial
  probe
  misc_feature (1)..(25): SEQ ID NO: 3245; WAN0249XQ_at; Start 39; Stop 63
tgacaagcatcccaaaagttgatat

SEQ ID NO: 37698 - DNA, 25 bp, Artificial
  probe
  misc_feature (1)..(25): SEQ ID NO: 3245; WAN0249XQ_at; Start 35; Stop 59
gtgttgacaagcatcccaaaagttg

SEQ ID NO: 37699 - DNA, 25 bp, Artificial
  probe
  misc_feature (1)..(25): SEQ ID NO: 3245; WAN0249XQ_at; Start 57; Stop 81
ttgatatactagtaaagtaatcgac

SEQ ID NO: 37700 - DNA, 25 bp, Artificial
  probe
  misc_feature (1)..(25): SEQ ID NO: 3823; WAN0249XR_at; Start 22; Stop 46
tcaacttttgggatgcttgtcaaca

SEQ ID NO: 37701 - DNA, 25 bp, Artificial
  probe
  misc_feature (1)..(25): SEQ ID NO: 3823; WAN0249XR_at; Start 13; Stop 37
actagtatatcaacttttgggatgc

SEQ ID NO: 37702 - DNA, 25 bp, Artificial
  probe
  misc_feature (1)..(25): SEQ ID NO: 3823; WAN0249XR_at; Start 25; Stop 49
acttttgggatgcttgtcaacactt

SEQ ID NO: 37703 - DNA, 25 bp, Artificial
  probe
  misc_feature (1)..(25): SEQ ID NO: 3823; WAN0249XR_at; Start 15; Stop 39
tagtatatcaacttttgggatgctt

SEQ ID NO: 37704 - DNA, 25 bp, Artificial
  probe
  misc_feature (1)..(25): SEQ ID NO: 3823; WAN0249XR_at; Start 2; Stop 26
tcgattactttactagtatatcaac

SEQ ID NO: 37705 - DNA, 25 bp, Artificial
  probe
  misc_feature (1)..(25): SEQ ID NO: 3823; WAN0249XR_at; Start 18; Stop 42
tatatcaacttttgggatgcttgtc

SEQ ID NO: 37706 - DNA, 25 bp, Artificial
  probe
  misc_feature (1)..(25): SEQ ID NO: 3823; WAN0249XR_at; Start 9; Stop 33
ctttactagtatatcaacttttggg

SEQ ID NO: 37707 - DNA, 25 bp, Artificial
  probe
  misc_feature (1)..(25): SEQ ID NO: 3823; WAN0249XR_at; Start 8; Stop 32
actttactagtatatcaacttttgg

SEQ ID NO: 37708 - DNA, 25 bp, Artificial
  probe
  misc_feature (1)..(25): SEQ ID NO: 3823; WAN0249XR_at; Start 5; Stop 29
attactttactagtatatcaacttt

SEQ ID NO: 37709 - DNA, 25 bp, Artificial
  probe
  misc_feature (1)..(25): SEQ ID NO: 3823; WAN0249XR_at; Start 20; Stop 44
tatcaacttttgggatgcttgtcaa

SEQ ID NO: 37710 - DNA, 25 bp, Artificial
  probe
  misc_feature (1)..(25): SEQ ID NO: 3823; WAN0249XR_at; Start 11; Stop 35
ttactagtatatcaacttttgggat

SEQ ID NO: 37711 - DNA, 25 bp, Artificial
  probe
  misc_feature (1)..(25): SEQ ID NO: 3823; WAN0249XR_at; Start 12; Stop 36
tactagtatatcaacttttgggatg

SEQ ID NO: 37712 - DNA, 25 bp, Artificial
  probe
  misc_feature (1)..(25): SEQ ID NO: 3823; WAN0249XR_at; Start 3; Stop 27
cgattactttactagtatatcaact

SEQ ID NO: 37713 - DNA, 25 bp, Artificial
  probe
  misc_feature (1)..(25): SEQ ID NO: 3823; WAN0249XR_at; Start 19; Stop 43
atatcaacttttgggatgcttgtca

SEQ ID NO: 37714 - DNA, 25 bp, Artificial
  probe
  misc_feature (1)..(25): SEQ ID NO: 3823; WAN0249XR_at; Start 14; Stop 38
ctagtatatcaacttttgggatgct

SEQ ID NO: 37715 - DNA, 25 bp, Artificial
  probe
  misc_feature (1)..(25): SEQ ID NO: 3823; WAN0249XR_at; Start 26; Stop 50
cttttgggatgcttgtcaacacttt

SEQ ID NO: 37716 - DNA, 25 bp, Artificial
  probe
  misc_feature (1)..(25): SEQ ID NO: 3823; WAN0249XR_at; Start 16; Stop 40
agtatatcaacttttgggatgcttg

SEQ ID NO: 37717 - DNA, 25 bp, Artificial
  probe
  misc_feature (1)..(25): SEQ ID NO: 3823; WAN0249XR_at; Start 1; Stop 25
gtcgattactttactagtatatcaa

SEQ ID NO: 37718 - DNA, 25 bp, Artificial
  probe
  misc_feature (1)..(25): SEQ ID NO: 3823; WAN0249XR_at; Start 24; Stop 48
aacttttgggatgcttgtcaacact

SEQ ID NO: 37719 - DNA, 25 bp, Artificial
  probe
  misc_feature (1)..(25): SEQ ID NO: 3823; WAN0249XR_at; Start 7; Stop 31
tactttactagtatatcaacttttg

SEQ ID NO: 37720 - DNA, 25 bp, Artificial
  probe
  misc_feature (1)..(25): SEQ ID NO: 3823; WAN0249XR_at; Start 23; Stop 47
caacttttgggatgcttgtcaacac

SEQ ID NO: 37721 - DNA, 25 bp, Artificial
  probe
  misc_feature (1)..(25): SEQ ID NO: 3823; WAN0249XR_at; Start 10; Stop 34
tttactagtatatcaacttttggga

SEQ ID NO: 37722 - DNA, 25 bp, Artificial
  probe
  misc_feature (1)..(25): SEQ ID NO: 3823; WAN0249XR_at; Start 4; Stop 28
gattactttactagtatatcaactt

SEQ ID NO: 37723 - DNA, 25 bp, Artificial
  probe
  misc_feature (1)..(25): SEQ ID NO: 3823; WAN0249XR_at; Start 27; Stop 51
ttttgggatgcttgtcaacactttt

SEQ ID NO: 37724 - DNA, 25 bp, Artificial
  probe
  misc_feature (1)..(25): SEQ ID NO: 3823; WAN0249XR_at; Start 21; Stop 45
atcaacttttgggatgcttgtcaac

SEQ ID NO: 37725 - DNA, 25 bp, Artificial
  probe
  misc_feature (1)..(25): SEQ ID NO: 3823; WAN0249XR_at; Start 17; Stop 41
gtatatcaacttttgggatgcttgt

SEQ ID NO: 37726 - DNA, 25 bp, Artificial
  probe
  misc_feature (1)..(25): SEQ ID NO: 4515; WAN0249XS_at; Start 42; Stop 66
taaaaaattagaatccagtcaaatg

SEQ ID NO: 37727 - DNA, 25 bp, Artificial
  probe
  misc_feature (1)..(25): SEQ ID NO: 4515; WAN0249XS_at; Start 18; Stop 42
aaagctagctcttttgtatttctct

SEQ ID NO: 37728 - DNA, 25 bp, Artificial
  probe
  misc_feature (1)..(25): SEQ ID NO: 4515; WAN0249XS_at; Start 43; Stop 67
aaaaaattagaatccagtcaaatgt

SEQ ID NO: 37729 - DNA, 25 bp, Artificial
  probe
  misc_feature (1)..(25): SEQ ID NO: 4515; WAN0249XS_at; Start 15; Stop 39
gctaaagctagctcttttgtatttc

SEQ ID NO: 37730 - DNA, 25 bp, Artificial
  probe
  misc_feature (1)..(25): SEQ ID NO: 4515; WAN0249XS_at; Start 57; Stop 81
cagtcaaatgtagtggagaatcagc

SEQ ID NO: 37731 - DNA, 25 bp, Artificial
  probe
  misc_feature (1)..(25): SEQ ID NO: 4515; WAN0249XS_at; Start 48; Stop 72
attagaatccagtcaaatgtagtgg

SEQ ID NO: 37732 - DNA, 25 bp, Artificial
  probe
  misc_feature (1)..(25): SEQ ID NO: 4515; WAN0249XS_at; Start 38; Stop 62
tctctaaaaaattagaatccagtca

SEQ ID NO: 37733 - DNA, 25 bp, Artificial
  probe
  misc_feature (1)..(25): SEQ ID NO: 4515; WAN0249XS_at; Start 40; Stop 64
tctaaaaaattagaatccagtcaaa

SEQ ID NO: 37734 - DNA, 25 bp, Artificial
  probe
  misc_feature (1)..(25): SEQ ID NO: 4515; WAN0249XS_at; Start 55; Stop 79
tccagtcaaatgtagtggagaatca

SEQ ID NO: 37735 - DNA, 25 bp, Artificial
  probe
  misc_feature (1)..(25): SEQ ID NO: 4515; WAN0249XS_at; Start 20; Stop 44
agctagctcttttgtatttctctaa

SEQ ID NO: 37736 - DNA, 25 bp, Artificial
  probe
  misc_feature (1)..(25): SEQ ID NO: 4515; WAN0249XS_at; Start 63; Stop 87
aatgtagtggagaatcagcgaaaat

SEQ ID NO: 37737 - DNA, 25 bp, Artificial
  probe
  misc_feature (1)..(25): SEQ ID NO: 4515; WAN0249XS_at; Start 22; Stop 46
ctagctcttttgtatttctctaaaa

SEQ ID NO: 37738 - DNA, 25 bp, Artificial
  probe
  misc_feature (1)..(25): SEQ ID NO: 4515; WAN0249XS_at; Start 58; Stop 82
agtcaaatgtagtggagaatcagcg

SEQ ID NO: 37739 - DNA, 25 bp, Artificial
  probe
  misc_feature (1)..(25): SEQ ID NO: 4515; WAN0249XS_at; Start 50; Stop 74
tagaatccagtcaaatgtagtggag

SEQ ID NO: 37740 - DNA, 25 bp, Artificial
  probe
  misc_feature (1)..(25): SEQ ID NO: 4515; WAN0249XS_at; Start 64; Stop 88
atgtagtggagaatcagcgaaaata

SEQ ID NO: 37741 - DNA, 25 bp, Artificial
  probe
  misc_feature (1)..(25): SEQ ID NO: 4515; WAN0249XS_at; Start 51; Stop 75
agaatccagtcaaatgtagtggaga

SEQ ID NO: 37742 - DNA, 25 bp, Artificial
  probe
  misc_feature (1)..(25): SEQ ID NO: 4515; WAN0249XS_at; Start 19; Stop 43
aagctagctcttttgtatttctcta

SEQ ID NO: 37743 - DNA, 25 bp, Artificial
  probe
  misc_feature (1)..(25): SEQ ID NO: 4515; WAN0249XS_at; Start 59; Stop 83
gtcaaatgtagtggagaatcagcga

SEQ ID NO: 37744 - DNA, 25 bp, Artificial
  probe
  misc_feature (1)..(25): SEQ ID NO: 4515; WAN0249XS_at; Start 56; Stop 80
ccagtcaaatgtagtggagaatcag

SEQ ID NO: 37745 - DNA, 25 bp, Artificial
  probe
  misc_feature (1)..(25): SEQ ID NO: 4515; WAN0249XS_at; Start 46; Stop 70
aaattagaatccagtcaaatgtagt

SEQ ID NO: 37746 - DNA, 25 bp, Artificial
  probe
  misc_feature (1)..(25): SEQ ID NO: 4515; WAN0249XS_at; Start 13; Stop 37
tagctaaagctagctcttttgtatt

SEQ ID NO: 37747 - DNA, 25 bp, Artificial
  probe
  misc_feature (1)..(25): SEQ ID NO: 4515; WAN0249XS_at; Start 60; Stop 84
tcaaatgtagtggagaatcagcgaa

SEQ ID NO: 37748 - DNA, 25 bp, Artificial
  probe
  misc_feature (1)..(25): SEQ ID NO: 4515; WAN0249XS_at; Start 17; Stop 41
taaagctagctcttttgtatttctc

SEQ ID NO: 37749 - DNA, 25 bp, Artificial
  probe
  misc_feature (1)..(25): SEQ ID NO: 4515; WAN0249XS_at; Start 61; Stop 85
caaatgtagtggagaatcagcgaaa

SEQ ID NO: 37750 - DNA, 25 bp, Artificial
  probe
  misc_feature (1)..(25): SEQ ID NO: 4515; WAN0249XS_at; Start 54; Stop 78
atccagtcaaatgtagtggagaatc

SEQ ID NO: 37751 - DNA, 25 bp, Artificial
  probe
  misc_feature (1)..(25): SEQ ID NO: 4515; WAN0249XS_at; Start 45; Stop 69
aaaattagaatccagtcaaatgtag

SEQ ID NO: 37752 - DNA, 25 bp, Artificial
  probe
  misc_feature (1)..(25): SEQ ID NO: 4515; WAN0249XS_at; Start 52; Stop 76
gaatccagtcaaatgtagtggagaa

SEQ ID NO: 37753 - DNA, 25 bp, Artificial
  probe
  misc_feature (1)..(25): SEQ ID NO: 4515; WAN0249XS_at; Start 39; Stop 63
ctctaaaaaattagaatccagtcaa

SEQ ID NO: 37754 - DNA, 25 bp, Artificial
  probe
  misc_feature (1)..(25): SEQ ID NO: 4515; WAN0249XS_at; Start 47; Stop 71
aattagaatccagtcaaatgtagtg

SEQ ID NO: 37755 - DNA, 25 bp, Artificial
  probe
  misc_feature (1)..(25): SEQ ID NO: 4515; WAN0249XS_at; Start 21; Stop 45
gctagctcttttgtatttctctaaa

SEQ ID NO: 37756 - DNA, 25 bp, Artificial
  probe
  misc_feature (1)..(25): SEQ ID NO: 4515; WAN0249XS_at; Start 49; Stop 73
ttagaatccagtcaaatgtagtgga

SEQ ID NO: 37757 - DNA, 25 bp, Artificial
  probe
  misc_feature (1)..(25): SEQ ID NO: 4515; WAN0249XS_at; Start 53; Stop 77
aatccagtcaaatgtagtggagaat

SEQ ID NO: 37758 - DNA, 25 bp, Artificial
  probe
  misc_feature (1)..(25): SEQ ID NO: 4515; WAN0249XS_at; Start 23; Stop 47
tagctcttttgtatttctctaaaaa

SEQ ID NO: 37759 - DNA, 25 bp, Artificial
  probe
  misc_feature (1)..(25): SEQ ID NO: 4515; WAN0249XS_at; Start 62; Stop 86
aaatgtagtggagaatcagcgaaaa

SEQ ID NO: 37760 - DNA, 25 bp, Artificial
  probe
  misc_feature (1)..(25): SEQ ID NO: 4576; WAN0249XT_at; Start 18; Stop 42
cactacatttgactggattctaatt

SEQ ID NO: 37761 - DNA, 25 bp, Artificial
  probe
  misc_feature (1)..(25): SEQ ID NO: 4576; WAN0249XT_at; Start 47; Stop 71
agagaaatacaaaagagctagcttt

SEQ ID NO: 37762 - DNA, 25 bp, Artificial
  probe
  misc_feature (1)..(25): SEQ ID NO: 4576; WAN0249XT_at; Start 10; Stop 34
tgattctccactacatttgactgga

SEQ ID NO: 37763 - DNA, 25 bp, Artificial
  probe
  misc_feature (1)..(25): SEQ ID NO: 4576; WAN0249XT_at; Start 6; Stop 30
tcgctgattctccactacatttgac

SEQ ID NO: 37764 - DNA, 25 bp, Artificial
  probe
  misc_feature (1)..(25): SEQ ID NO: 4576; WAN0249XT_at; Start 21; Stop 45
tacatttgactggattctaattttt

SEQ ID NO: 37765 - DNA, 25 bp, Artificial
  probe
  misc_feature (1)..(25): SEQ ID NO: 4576; WAN0249XT_at; Start 30; Stop 54
ctggattctaattttttagagaaat

SEQ ID NO: 37766 - DNA, 25 bp, Artificial
  probe
  misc_feature (1)..(25): SEQ ID NO: 4576; WAN0249XT_at; Start 52; Stop 76
aatacaaaagagctagctttagcta

SEQ ID NO: 37767 - DNA, 25 bp, Artificial
  probe
  misc_feature (1)..(25): SEQ ID NO: 4576; WAN0249XT_at; Start 8; Stop 32
gctgattctccactacatttgactg

SEQ ID NO: 37768 - DNA, 25 bp, Artificial
  probe
  misc_feature (1)..(25): SEQ ID NO: 4576; WAN0249XT_at; Start 11; Stop 35
gattctccactacatttgactggat

SEQ ID NO: 37769 - DNA, 25 bp, Artificial
  probe
  misc_feature (1)..(25): SEQ ID NO: 4576; WAN0249XT_at; Start 16; Stop 40
tccactacatttgactggattctaa

SEQ ID NO: 37770 - DNA, 25 bp, Artificial
  probe
  misc_feature (1)..(25): SEQ ID NO: 4576; WAN0249XT_at; Start 48; Stop 72
gagaaatacaaaagagctagcttta

SEQ ID NO: 37771 - DNA, 25 bp, Artificial
  probe
  misc_feature (1)..(25): SEQ ID NO: 4576; WAN0249XT_at; Start 13; Stop 37
ttctccactacatttgactggattc

SEQ ID NO: 37772 - DNA, 25 bp, Artificial
  probe
  misc_feature (1)..(25): SEQ ID NO: 4576; WAN0249XT_at; Start 27; Stop 51
tgactggattctaattttttagaga

SEQ ID NO: 37773 - DNA, 25 bp, Artificial
  probe
  misc_feature (1)..(25): SEQ ID NO: 4576; WAN0249XT_at; Start 9; Stop 33
ctgattctccactacatttgactgg

SEQ ID NO: 37774 - DNA, 25 bp, Artificial
  probe
  misc_feature (1)..(25): SEQ ID NO: 4576; WAN0249XT_at; Start 4; Stop 28
tttcgctgattctccactacatttg

SEQ ID NO: 37775 - DNA, 25 bp, Artificial
  probe
  misc_feature (1)..(25): SEQ ID NO: 4576; WAN0249XT_at; Start 2; Stop 26
attttcgctgattctccactacatt

SEQ ID NO: 37776 - DNA, 25 bp, Artificial
  probe
  misc_feature (1)..(25): SEQ ID NO: 4576; WAN0249XT_at; Start 46; Stop 70
tagagaaatacaaaagagctagctt

SEQ ID NO: 37777 - DNA, 25 bp, Artificial
  probe
  misc_feature (1)..(25): SEQ ID NO: 4576; WAN0249XT_at; Start 3; Stop 27
ttttcgctgattctccactacattt

SEQ ID NO: 37778 - DNA, 25 bp, Artificial
  probe
  misc_feature (1)..(25): SEQ ID NO: 4576; WAN0249XT_at; Start 26; Stop 50
ttgactggattctaattttttagag

SEQ ID NO: 37779 - DNA, 25 bp, Artificial
  probe
  misc_feature (1)..(25): SEQ ID NO: 4576; WAN0249XT_at; Start 12; Stop 36
attctccactacatttgactggatt

SEQ ID NO: 37780 - DNA, 25 bp, Artificial
  probe
  misc_feature (1)..(25): SEQ ID NO: 4576; WAN0249XT_at; Start 44; Stop 68
tttagagaaatacaaaagagctagc

SEQ ID NO: 37781 - DNA, 25 bp, Artificial
  probe
  misc_feature (1)..(25): SEQ ID NO: 4576; WAN0249XT_at; Start 50; Stop 74
gaaatacaaaagagctagctttagc

SEQ ID NO: 37782 - DNA, 25 bp, Artificial
  probe
  misc_feature (1)..(25): SEQ ID NO: 4576; WAN0249XT_at; Start 17; Stop 41
ccactacatttgactggattctaat

SEQ ID NO: 37783 - DNA, 25 bp, Artificial
  probe
  misc_feature (1)..(25): SEQ ID NO: 4576; WAN0249XT_at; Start 5; Stop 29
ttcgctgattctccactacatttga

SEQ ID NO: 37784 - DNA, 25 bp, Artificial
  probe
  misc_feature (1)..(25): SEQ ID NO: 4576; WAN0249XT_at; Start 7; Stop 31
cgctgattctccactacatttgact

SEQ ID NO: 37785 - DNA, 25 bp, Artificial
  probe
  misc_feature (1)..(25): SEQ ID NO: 4576; WAN0249XT_at; Start 20; Stop 44
ctacatttgactggattctaatttt

SEQ ID NO: 37786 - DNA, 25 bp, Artificial
  probe
  misc_feature (1)..(25): SEQ ID NO: 4576; WAN0249XT_at; Start 45; Stop 69
ttagagaaatacaaaagagctagct

SEQ ID NO: 37787 - DNA, 25 bp, Artificial
  probe
  misc_feature (1)..(25): SEQ ID NO: 4576; WAN0249XT_at; Start 51; Stop 75
aaatacaaaagagctagctttagct

SEQ ID NO: 37788 - DNA, 25 bp, Artificial
  probe
  misc_feature (1)..(25): SEQ ID NO: 4576; WAN0249XT_at; Start 1; Stop 25
tattttcgctgattctccactacat

SEQ ID NO: 37789 - DNA, 25 bp, Artificial
  probe
  misc_feature (1)..(25): SEQ ID NO: 4576; WAN0249XT_at; Start 19; Stop 43
actacatttgactggattctaattt

SEQ ID NO: 37790 - DNA, 25 bp, Artificial
  probe
  misc_feature (1)..(25): SEQ ID NO: 4576; WAN0249XT_at; Start 14; Stop 38
tctccactacatttgactggattct

SEQ ID NO: 37791 - DNA, 25 bp, Artificial
  probe
  misc_feature (1)..(25): SEQ ID NO: 4576; WAN0249XT_at; Start 15; Stop 39
ctccactacatttgactggattcta

SEQ ID NO: 37792 - DNA, 25 bp, Artificial
  probe
  misc_feature (1)..(25): SEQ ID NO: 4576; WAN0249XT_at; Start 23; Stop 47
catttgactggattctaatttttta

SEQ ID NO: 37793 - DNA, 25 bp, Artificial
  probe
  misc_feature (1)..(25): SEQ ID NO: 4576; WAN0249XT_at; Start 49; Stop 73
agaaatacaaaagagctagctttag

SEQ ID NO: 37794 - DNA, 25 bp, Artificial
  probe
  misc_feature (1)..(25): SEQ ID NO: 3515; WAN0249XU_at; Start 22; Stop 46
ttttactctctattatagcatattt

SEQ ID NO: 37795 - DNA, 25 bp, Artificial
  probe
  misc_feature (1)..(25): SEQ ID NO: 3515; WAN0249XU_at; Start 34; Stop 58
ttatagcatattttttaagaaagaa

SEQ ID NO: 37796 - DNA, 25 bp, Artificial
  probe
  misc_feature (1)..(25): SEQ ID NO: 3515; WAN0249XU_at; Start 14; Stop 38
tcaaagttttttactctctattata

SEQ ID NO: 37797 - DNA, 25 bp, Artificial
  probe
  misc_feature (1)..(25): SEQ ID NO: 3515; WAN0249XU_at; Start 15; Stop 39
caaagttttttactctctattatag

SEQ ID NO: 37798 - DNA, 25 bp, Artificial
  probe
  misc_feature (1)..(25): SEQ ID NO: 3515; WAN0249XU_at; Start 33; Stop 57
attatagcatattttttaagaaaga

SEQ ID NO: 37799 - DNA, 25 bp, Artificial
  probe
  misc_feature (1)..(25): SEQ ID NO: 3515; WAN0249XU_at; Start 35; Stop 59
tatagcatattttttaagaaagaaa

SEQ ID NO: 37800 - DNA, 25 bp, Artificial
  probe
  misc_feature (1)..(25): SEQ ID NO: 537; WAN0249XV_at; Start 49; Stop 73
tataatagagagtaaaaaactttga

SEQ ID NO: 37801 - DNA, 25 bp, Artificial
  probe
  misc_feature (1)..(25): SEQ ID NO: 537; WAN0249XV_at; Start 41; Stop 65
aaatatgctataatagagagtaaaa

SEQ ID NO: 37802 - DNA, 25 bp, Artificial
  probe
  misc_feature (1)..(25): SEQ ID NO: 537; WAN0249XV_at; Start 29; Stop 53
ttctttcttaaaaaatatgctataa

SEQ ID NO: 37803 - DNA, 25 bp, Artificial
  probe
  misc_feature (1)..(25): SEQ ID NO: 537; WAN0249XV_at; Start 30; Stop 54
tctttcttaaaaaatatgctataat

SEQ ID NO: 37804 - DNA, 25 bp, Artificial
  probe
  misc_feature (1)..(25): SEQ ID NO: 537; WAN0249XV_at; Start 28; Stop 52
tttctttcttaaaaaatatgctata

SEQ ID NO: 37805 - DNA, 25 bp, Artificial
  probe
  misc_feature (1)..(25): SEQ ID NO: 537; WAN0249XV_at; Start 48; Stop 72
ctataatagagagtaaaaaactttg

SEQ ID NO: 37806 - DNA, 25 bp, Artificial
  probe
  misc_feature (1)..(25): SEQ ID NO: 3507; WAN0249XW_at; Start 33; Stop 57
aaccacttctgcgacctaggatttg

SEQ ID NO: 37807 - DNA, 25 bp, Artificial
  probe
  misc_feature (1)..(25): SEQ ID NO: 3507; WAN0249XW_at; Start 29; Stop 53
tgtaaaccacttctgcgacctagga

SEQ ID NO: 37808 - DNA, 25 bp, Artificial
  probe
  misc_feature (1)..(25): SEQ ID NO: 3507; WAN0249XW_at; Start 31; Stop 55
taaaccacttctgcgacctaggatt

SEQ ID NO: 37809 - DNA, 25 bp, Artificial
  probe
  misc_feature (1)..(25): SEQ ID NO: 3507; WAN0249XW_at; Start 67; Stop 91
ctttacaagtacagtataacacgaa

SEQ ID NO: 37810 - DNA, 25 bp, Artificial
  probe
  misc_feature (1)..(25): SEQ ID NO: 3507; WAN0249XW_at; Start 35; Stop 59
ccacttctgcgacctaggatttgct

SEQ ID NO: 37811 - DNA, 25 bp, Artificial
  probe
  misc_feature (1)..(25): SEQ ID NO: 3507; WAN0249XW_at; Start 25; Stop 49
catttgtaaaccacttctgcgacct

SEQ ID NO: 37812 - DNA, 25 bp, Artificial
  probe
  misc_feature (1)..(25): SEQ ID NO: 3507; WAN0249XW_at; Start 65; Stop 89
tgctttacaagtacagtataacacg

SEQ ID NO: 37813 - DNA, 25 bp, Artificial
  probe
  misc_feature (1)..(25): SEQ ID NO: 3507; WAN0249XW_at; Start 56; Stop 80
tgcttcaagtgctttacaagtacag

SEQ ID NO: 37814 - DNA, 25 bp, Artificial
  probe
  misc_feature (1)..(25): SEQ ID NO: 3507; WAN0249XW_at; Start 239; Stop 263
caactgatactcctacttatttcgg

SEQ ID NO: 37815 - DNA, 25 bp, Artificial
  probe
  misc_feature (1)..(25): SEQ ID NO: 3507; WAN0249XW_at; Start 109; Stop 133
aaatcgcatatttgatattttttct

SEQ ID NO: 37816 - DNA, 25 bp, Artificial
  probe
  misc_feature (1)..(25): SEQ ID NO: 3507; WAN0249XW_at; Start 2; Stop 26
ttttacactccttcaattatcttca

SEQ ID NO: 37817 - DNA, 25 bp, Artificial
  probe
  misc_feature (1)..(25): SEQ ID NO: 3507; WAN0249XW_at; Start 30; Stop 54
gtaaaccacttctgcgacctaggat

SEQ ID NO: 37818 - DNA, 25 bp, Artificial
  probe
  misc_feature (1)..(25): SEQ ID NO: 3507; WAN0249XW_at; Start 36; Stop 60
cacttctgcgacctaggatttgctt

SEQ ID NO: 37819 - DNA, 25 bp, Artificial
  probe
  misc_feature (1)..(25): SEQ ID NO: 3507; WAN0249XW_at; Start 257; Stop 281
atttcggagtgggttattgtcattc

SEQ ID NO: 37820 - DNA, 25 bp, Artificial
  probe
  misc_feature (1)..(25): SEQ ID NO: 3507; WAN0249XW_at; Start 61; Stop 85
caagtgctttacaagtacagtataa

SEQ ID NO: 37821 - DNA, 25 bp, Artificial
  probe
  misc_feature (1)..(25): SEQ ID NO: 3507; WAN0249XW_at; Start 51; Stop 75
ggatttgcttcaagtgctttacaag

SEQ ID NO: 37822 - DNA, 25 bp, Artificial
  probe
  misc_feature (1)..(25): SEQ ID NO: 3507; WAN0249XW_at; Start 220; Stop 244
gatgaagaaaagaaaaatccaactg

SEQ ID NO: 37823 - DNA, 25 bp, Artificial
  probe
  misc_feature (1)..(25): SEQ ID NO: 3507; WAN0249XW_at; Start 15; Stop 39
caattatcttcatttgtaaaccact

SEQ ID NO: 37824 - DNA, 25 bp, Artificial
  probe
  misc_feature (1)..(25): SEQ ID NO: 3507; WAN0249XW_at; Start 58; Stop 82
cttcaagtgctttacaagtacagta

SEQ ID NO: 37825 - DNA, 25 bp, Artificial
  probe
  misc_feature (1)..(25): SEQ ID NO: 3507; WAN0249XW_at; Start 222; Stop 246
tgaagaaaagaaaaatccaactgat

SEQ ID NO: 37826 - DNA, 25 bp, Artificial
  probe
  misc_feature (1)..(25): SEQ ID NO: 3507; WAN0249XW_at; Start 27; Stop 51
tttgtaaaccacttctgcgacctag

SEQ ID NO: 37827 - DNA, 25 bp, Artificial
  probe
  misc_feature (1)..(25): SEQ ID NO: 3507; WAN0249XW_at; Start 28; Stop 52
ttgtaaaccacttctgcgacctagg

SEQ ID NO: 37828 - DNA, 25 bp, Artificial
  probe
  misc_feature (1)..(25): SEQ ID NO: 3507; WAN0249XW_at; Start 244; Stop 268
gatactcctacttatttcggagtgg

SEQ ID NO: 37829 - DNA, 25 bp, Artificial
  probe
  misc_feature (1)..(25): SEQ ID NO: 3507; WAN0249XW_at; Start 266; Stop 290
tgggttattgtcattccatttttaa

SEQ ID NO: 37830 - DNA, 25 bp, Artificial
  probe
  misc_feature (1)..(25): SEQ ID NO: 3507; WAN0249XW_at; Start 226; Stop 250
gaaaagaaaaatccaactgatactc

SEQ ID NO: 37831 - DNA, 25 bp, Artificial
  probe
  misc_feature (1)..(25): SEQ ID NO: 3507; WAN0249XW_at; Start 21; Stop 45
tcttcatttgtaaaccacttctgcg

SEQ ID NO: 37832 - DNA, 25 bp, Artificial
  probe
  misc_feature (1)..(25): SEQ ID NO: 3507; WAN0249XW_at; Start 23; Stop 47
ttcatttgtaaaccacttctgcgac

SEQ ID NO: 37833 - DNA, 25 bp, Artificial
  probe
  misc_feature (1)..(25): SEQ ID NO: 3507; WAN0249XW_at; Start 38; Stop 62
cttctgcgacctaggatttgcttca

SEQ ID NO: 37834 - DNA, 25 bp, Artificial
  probe
  misc_feature (1)..(25): SEQ ID NO: 3507; WAN0249XW_at; Start 231; Stop 255
gaaaaatccaactgatactcctact

SEQ ID NO: 37835 - DNA, 25 bp, Artificial
  probe
  misc_feature (1)..(25): SEQ ID NO: 3507; WAN0249XW_at; Start 215; Stop 239
taatagatgaagaaaagaaaaatcc

SEQ ID NO: 37836 - DNA, 25 bp, Artificial
  probe
  misc_feature (1)..(25): SEQ ID NO: 3507; WAN0249XW_at; Start 261; Stop 285
cggagtgggttattgtcattccatt

SEQ ID NO: 37837 - DNA, 25 bp, Artificial
  probe
  misc_feature (1)..(25): SEQ ID NO: 3507; WAN0249XW_at; Start 40; Stop 64
tctgcgacctaggatttgcttcaag

SEQ ID NO: 37838 - DNA, 25 bp, Artificial
  probe
  misc_feature (1)..(25): SEQ ID NO: 3507; WAN0249XW_at; Start 254; Stop 278
cttatttcggagtgggttattgtca

SEQ ID NO: 37839 - DNA, 25 bp, Artificial
  probe
  misc_feature (1)..(25): SEQ ID NO: 3507; WAN0249XW_at; Start 259; Stop 283
ttcggagtgggttattgtcattcca

SEQ ID NO: 37840 - DNA, 25 bp, Artificial
  probe
  misc_feature (1)..(25): SEQ ID NO: 4747; WAN0249XX_at; Start 207; Stop 231
tatactgtacttgtaaagcacttga

SEQ ID NO: 37841 - DNA, 25 bp, Artificial
  probe
  misc_feature (1)..(25): SEQ ID NO: 4747; WAN0249XX_at; Start 231; Stop 255
aagcaaatcctaggtcgcagaagtg

SEQ ID NO: 37842 - DNA, 25 bp, Artificial
  probe
  misc_feature (1)..(25): SEQ ID NO: 4747; WAN0249XX_at; Start 212; Stop 236
tgtacttgtaaagcacttgaagcaa

SEQ ID NO: 37843 - DNA, 25 bp, Artificial
  probe
  misc_feature (1)..(25): SEQ ID NO: 4747; WAN0249XX_at; Start 36; Stop 60
agtaggagtatcagttggatttttc

SEQ ID NO: 37844 - DNA, 25 bp, Artificial
  probe
  misc_feature (1)..(25): SEQ ID NO: 4747; WAN0249XX_at; Start 156; Stop 180
taagaaaaaatatcaaatatgcgat

SEQ ID NO: 37845 - DNA, 25 bp, Artificial
  probe
  misc_feature (1)..(25): SEQ ID NO: 4747; WAN0249XX_at; Start 225; Stop 249
cacttgaagcaaatcctaggtcgca

SEQ ID NO: 37846 - DNA, 25 bp, Artificial
  probe
  misc_feature (1)..(25): SEQ ID NO: 4747; WAN0249XX_at; Start 239; Stop 263
cctaggtcgcagaagtggtttacaa

SEQ ID NO: 37847 - DNA, 25 bp, Artificial
  probe
  misc_feature (1)..(25): SEQ ID NO: 4747; WAN0249XX_at; Start 202; Stop 226
cgtgttatactgtacttgtaaagca

SEQ ID NO: 37848 - DNA, 25 bp, Artificial
  probe
  misc_feature (1)..(25): SEQ ID NO: 4747; WAN0249XX_at; Start 245; Stop 269
tcgcagaagtggtttacaaatgaag

SEQ ID NO: 37849 - DNA, 25 bp, Artificial
  probe
  misc_feature (1)..(25): SEQ ID NO: 4747; WAN0249XX_at; Start 16; Stop 40
caataacccactccgaaataagtag

SEQ ID NO: 37850 - DNA, 25 bp, Artificial
  probe
  misc_feature (1)..(25): SEQ ID NO: 4747; WAN0249XX_at; Start 6; Stop 30
aatggaatgacaataacccactccg

SEQ ID NO: 37851 - DNA, 25 bp, Artificial
  probe
  misc_feature (1)..(25): SEQ ID NO: 4747; WAN0249XX_at; Start 10; Stop 34
gaatgacaataacccactccgaaat

SEQ ID NO: 37852 - DNA, 25 bp, Artificial
  probe
  misc_feature (1)..(25): SEQ ID NO: 4747; WAN0249XX_at; Start 30; Stop 54
gaaataagtaggagtatcagttgga

SEQ ID NO: 37853 - DNA, 25 bp, Artificial
  probe
  misc_feature (1)..(25): SEQ ID NO: 4747; WAN0249XX_at; Start 47; Stop 71
cagttggatttttcttttcttcatc

SEQ ID NO: 37854 - DNA, 25 bp, Artificial
  probe
  misc_feature (1)..(25): SEQ ID NO: 4747; WAN0249XX_at; Start 241; Stop 265
taggtcgcagaagtggtttacaaat

SEQ ID NO: 37855 - DNA, 25 bp, Artificial
  probe
  misc_feature (1)..(25): SEQ ID NO: 4747; WAN0249XX_at; Start 233; Stop 257
gcaaatcctaggtcgcagaagtggt

SEQ ID NO: 37856 - DNA, 25 bp, Artificial
  probe
  misc_feature (1)..(25): SEQ ID NO: 4747; WAN0249XX_at; Start 236; Stop 260
aatcctaggtcgcagaagtggttta

SEQ ID NO: 37857 - DNA, 25 bp, Artificial
  probe
  misc_feature (1)..(25): SEQ ID NO: 4747; WAN0249XX_at; Start 229; Stop 253
tgaagcaaatcctaggtcgcagaag

SEQ ID NO: 37858 - DNA, 25 bp, Artificial
  probe
  misc_feature (1)..(25): SEQ ID NO: 4747; WAN0249XX_at; Start 2; Stop 26
taaaaatggaatgacaataacccac

SEQ ID NO: 37859 - DNA, 25 bp, Artificial
  probe
  misc_feature (1)..(25): SEQ ID NO: 4747; WAN0249XX_at; Start 238; Stop 262
tcctaggtcgcagaagtggtttaca

SEQ ID NO: 37860 - DNA, 25 bp, Artificial
  probe
  misc_feature (1)..(25): SEQ ID NO: 4747; WAN0249XX_at; Start 27; Stop 51
tccgaaataagtaggagtatcagtt

SEQ ID NO: 37861 - DNA, 25 bp, Artificial
  probe
  misc_feature (1)..(25): SEQ ID NO: 4747; WAN0249XX_at; Start 266; Stop 290
gaagataattgaaggagtgtaaaag

SEQ ID NO: 37862 - DNA, 25 bp, Artificial
  probe
  misc_feature (1)..(25): SEQ ID NO: 4747; WAN0249XX_at; Start 13; Stop 37
tgacaataacccactccgaaataag

SEQ ID NO: 37863 - DNA, 25 bp, Artificial
  probe
  misc_feature (1)..(25): SEQ ID NO: 4747; WAN0249XX_at; Start 243; Stop 267
ggtcgcagaagtggtttacaaatga

SEQ ID NO: 37864 - DNA, 25 bp, Artificial
  probe
  misc_feature (1)..(25): SEQ ID NO: 4747; WAN0249XX_at; Start 220; Stop 244
taaagcacttgaagcaaatcctagg

SEQ ID NO: 37865 - DNA, 25 bp, Artificial
  probe
  misc_feature (1)..(25): SEQ ID NO: 4747; WAN0249XX_at; Start 209; Stop 233
tactgtacttgtaaagcacttgaag

SEQ ID NO: 37866 - DNA, 25 bp, Artificial
  probe
  misc_feature (1)..(25): SEQ ID NO: 4747; WAN0249XX_at; Start 227; Stop 251
cttgaagcaaatcctaggtcgcaga

SEQ ID NO: 37867 - DNA, 25 bp, Artificial
  probe
  misc_feature (1)..(25): SEQ ID NO: 4747; WAN0249XX_at; Start 261; Stop 285
caaatgaagataattgaaggagtgt

SEQ ID NO: 37868 - DNA, 25 bp, Artificial
  probe
  misc_feature (1)..(25): SEQ ID NO: 4747; WAN0249XX_at; Start 8; Stop 32
tggaatgacaataacccactccgaa

SEQ ID NO: 37869 - DNA, 25 bp, Artificial
  probe
  misc_feature (1)..(25): SEQ ID NO: 4747; WAN0249XX_at; Start 248; Stop 272
cagaagtggtttacaaatgaagata

SEQ ID NO: 37870 - DNA, 25 bp, Artificial
  probe
  misc_feature (1)..(25): SEQ ID NO: 4747; WAN0249XX_at; Start 234; Stop 258
caaatcctaggtcgcagaagtggtt

SEQ ID NO: 37871 - DNA, 25 bp, Artificial
  probe
  misc_feature (1)..(25): SEQ ID NO: 4747; WAN0249XX_at; Start 216; Stop 240
cttgtaaagcacttgaagcaaatcc

SEQ ID NO: 37872 - DNA, 25 bp, Artificial
  probe
  misc_feature (1)..(25): SEQ ID NO: 4747; WAN0249XX_at; Start 223; Stop 247
agcacttgaagcaaatcctaggtcg

SEQ ID NO: 37873 - DNA, 25 bp, Artificial
  probe
  misc_feature (1)..(25): SEQ ID NO: 4747; WAN0249XX_at; Start 22; Stop 46
cccactccgaaataagtaggagtat

SEQ ID NO: 37874 - DNA, 25 bp, Artificial
  probe
  misc_feature (1)..(25): SEQ ID NO: 4669; WAN0249XY_at; Start 149; Stop 173
ttattcctgaaagagtacagttagg

SEQ ID NO: 37875 - DNA, 25 bp, Artificial
  probe
  misc_feature (1)..(25): SEQ ID NO: 4669; WAN0249XY_at; Start 103; Stop 127
taataaaaggactaagtgtttgaga

SEQ ID NO: 37876 - DNA, 25 bp, Artificial
  probe
  misc_feature (1)..(25): SEQ ID NO: 4669; WAN0249XY_at; Start 109; Stop 133
aaggactaagtgtttgagatttgtc

SEQ ID NO: 37877 - DNA, 25 bp, Artificial
  probe
  misc_feature (1)..(25): SEQ ID NO: 4669; WAN0249XY_at; Start 93; Stop 117
tcttgcagtataataaaaggactaa

SEQ ID NO: 37878 - DNA, 25 bp, Artificial
  probe
  misc_feature (1)..(25): SEQ ID NO: 4669; WAN0249XY_at; Start 114; Stop 138
ctaagtgtttgagatttgtcttcaa

SEQ ID NO: 37879 - DNA, 25 bp, Artificial
  probe
  misc_feature (1)..(25): SEQ ID NO: 4669; WAN0249XY_at; Start 136; Stop 160
caaacatatgcaattattcctgaaa

SEQ ID NO: 37880 - DNA, 25 bp, Artificial
  probe
  misc_feature (1)..(25): SEQ ID NO: 4669; WAN0249XY_at; Start 133; Stop 157
cttcaaacatatgcaattattcctg

SEQ ID NO: 37881 - DNA, 25 bp, Artificial
  probe
  misc_feature (1)..(25): SEQ ID NO: 4669; WAN0249XY_at; Start 8; Stop 32
agtccctagggctgttttctctaca

SEQ ID NO: 37882 - DNA, 25 bp, Artificial
  probe
  misc_feature (1)..(25): SEQ ID NO: 4669; WAN0249XY_at; Start 131; Stop 155
gtcttcaaacatatgcaattattcc

SEQ ID NO: 37883 - DNA, 25 bp, Artificial
  probe
  misc_feature (1)..(25): SEQ ID NO: 4669; WAN0249XY_at; Start 142; Stop 166
tatgcaattattcctgaaagagtac

SEQ ID NO: 37884 - DNA, 25 bp, Artificial
  probe
  misc_feature (1)..(25): SEQ ID NO: 4669; WAN0249XY_at; Start 124; Stop 148
gagatttgtcttcaaacatatgcaa

SEQ ID NO: 37885 - DNA, 25 bp, Artificial
  probe
  misc_feature (1)..(25): SEQ ID NO: 4669; WAN0249XY_at; Start 153; Stop 177
tcctgaaagagtacagttaggagag

SEQ ID NO: 37886 - DNA, 25 bp, Artificial
  probe
  misc_feature (1)..(25): SEQ ID NO: 4669; WAN0249XY_at; Start 96; Stop 120
tgcagtataataaaaggactaagtg

SEQ ID NO: 37887 - DNA, 25 bp, Artificial
  probe
  misc_feature (1)..(25): SEQ ID NO: 4669; WAN0249XY_at; Start 33; Stop 57
ctaggatataaaaatagactataac

SEQ ID NO: 37888 - DNA, 25 bp, Artificial
  probe
  misc_feature (1)..(25): SEQ ID NO: 4669; WAN0249XY_at; Start 140; Stop 164
catatgcaattattcctgaaagagt

SEQ ID NO: 37889 - DNA, 25 bp, Artificial
  probe
  misc_feature (1)..(25): SEQ ID NO: 4669; WAN0249XY_at; Start 76; Stop 100
aattgaaaactatatcttcttgcag

SEQ ID NO: 37890 - DNA, 25 bp, Artificial
  probe
  misc_feature (1)..(25): SEQ ID NO: 4669; WAN0249XY_at; Start 156; Stop 180
tgaaagagtacagttaggagagggt

SEQ ID NO: 37891 - DNA, 25 bp, Artificial
  probe
  misc_feature (1)..(25): SEQ ID NO: 4669; WAN0249XY_at; Start 98; Stop 122
cagtataataaaaggactaagtgtt

SEQ ID NO: 37892 - DNA, 25 bp, Artificial
  probe
  misc_feature (1)..(25): SEQ ID NO: 4669; WAN0249XY_at; Start 28; Stop 52
ctacactaggatataaaaatagact

SEQ ID NO: 37893 - DNA, 25 bp, Artificial
  probe
  misc_feature (1)..(25): SEQ ID NO: 4669; WAN0249XY_at; Start 11; Stop 35
ccctagggctgttttctctacacta

SEQ ID NO: 37894 - DNA, 25 bp, Artificial
  probe
  misc_feature (1)..(25): SEQ ID NO: 4669; WAN0249XY_at; Start 51; Stop 75
ctataactagttagagaaaaactat

SEQ ID NO: 37895 - DNA, 25 bp, Artificial
  probe
  misc_feature (1)..(25): SEQ ID NO: 4669; WAN0249XY_at; Start 80; Stop 104
gaaaactatatcttcttgcagtata

SEQ ID NO: 37896 - DNA, 25 bp, Artificial
  probe
  misc_feature (1)..(25): SEQ ID NO: 4669; WAN0249XY_at; Start 16; Stop 40
gggctgttttctctacactaggata

SEQ ID NO: 37897 - DNA, 25 bp, Artificial
  probe
  misc_feature (1)..(25): SEQ ID NO: 4669; WAN0249XY_at; Start 18; Stop 42
gctgttttctctacactaggatata

SEQ ID NO: 37898 - DNA, 25 bp, Artificial
  probe
  misc_feature (1)..(25): SEQ ID NO: 4669; WAN0249XY_at; Start 47; Stop 71
tagactataactagttagagaaaaa

SEQ ID NO: 37899 - DNA, 25 bp, Artificial
  probe
  misc_feature (1)..(25): SEQ ID NO: 4669; WAN0249XY_at; Start 57; Stop 81
ctagttagagaaaaactataattga

SEQ ID NO: 37900 - DNA, 25 bp, Artificial
  probe
  misc_feature (1)..(25): SEQ ID NO: 4669; WAN0249XY_at; Start 88; Stop 112
tatcttcttgcagtataataaaagg

SEQ ID NO: 37901 - DNA, 25 bp, Artificial
  probe
  misc_feature (1)..(25): SEQ ID NO: 4669; WAN0249XY_at; Start 150; Stop 174
tattcctgaaagagtacagttagga

SEQ ID NO: 37902 - DNA, 25 bp, Artificial
  probe
  misc_feature (1)..(25): SEQ ID NO: 4669; WAN0249XY_at; Start 14; Stop 38
tagggctgttttctctacactagga

SEQ ID NO: 37903 - DNA, 25 bp, Artificial
  probe
  misc_feature (1)..(25): SEQ ID NO: 4669; WAN0249XY_at; Start 9; Stop 33
gtccctagggctgttttctctacac

SEQ ID NO: 37904 - DNA, 25 bp, Artificial
  probe
  misc_feature (1)..(25): SEQ ID NO: 4669; WAN0249XY_at; Start 90; Stop 114
tcttcttgcagtataataaaaggac

SEQ ID NO: 37905 - DNA, 25 bp, Artificial
  probe
  misc_feature (1)..(25): SEQ ID NO: 4669; WAN0249XY_at; Start 112; Stop 136
gactaagtgtttgagatttgtcttc

SEQ ID NO: 37906 - DNA, 25 bp, Artificial
  probe
  misc_feature (1)..(25): SEQ ID NO: 4669; WAN0249XY_at; Start 145; Stop 169
gcaattattcctgaaagagtacagt

SEQ ID NO: 37907 - DNA, 25 bp, Artificial
  probe
  misc_feature (1)..(25): SEQ ID NO: 4669; WAN0249XY_at; Start 25; Stop 49
tctctacactaggatataaaaatag

SEQ ID NO: 37908 - DNA, 25 bp, Artificial
  probe
  misc_feature (1)..(25): SEQ ID NO: 198; WAN0249XZ_at; Start 13; Stop 37
actgtactctttcaggaataattgc

SEQ ID NO: 37909 - DNA, 25 bp, Artificial
  probe
  misc_feature (1)..(25): SEQ ID NO: 198; WAN0249XZ_at; Start 112; Stop 136
ttttctctaactagttatagtctat

SEQ ID NO: 37910 - DNA, 25 bp, Artificial
  probe
  misc_feature (1)..(25): SEQ ID NO: 198; WAN0249XZ_at; Start 20; Stop 44
tctttcaggaataattgcatatgtt

SEQ ID NO: 37911 - DNA, 25 bp, Artificial
  probe
  misc_feature (1)..(25): SEQ ID NO: 198; WAN0249XZ_at; Start 15; Stop 39
tgtactctttcaggaataattgcat

SEQ ID NO: 37912 - DNA, 25 bp, Artificial
  probe
  misc_feature (1)..(25): SEQ ID NO: 198; WAN0249XZ_at; Start 5; Stop 29
ctctcctaactgtactctttcagga

SEQ ID NO: 37913 - DNA, 25 bp, Artificial
  probe
  misc_feature (1)..(25): SEQ ID NO: 198; WAN0249XZ_at; Start 67; Stop 91
agtccttttattatactgcaagaag

SEQ ID NO: 37914 - DNA, 25 bp, Artificial
  probe
  misc_feature (1)..(25): SEQ ID NO: 198; WAN0249XZ_at; Start 49; Stop 73
gacaaatctcaaacacttagtcctt

SEQ ID NO: 37915 - DNA, 25 bp, Artificial
  probe
  misc_feature (1)..(25): SEQ ID NO: 198; WAN0249XZ_at; Start 142; Stop 166
tatcctagtgtagagaaaacagccc

SEQ ID NO: 37916 - DNA, 25 bp, Artificial
  probe
  misc_feature (1)..(25): SEQ ID NO: 198; WAN0249XZ_at; Start 78; Stop 102
tatactgcaagaagatatagttttc

SEQ ID NO: 37917 - DNA, 25 bp, Artificial
  probe
  misc_feature (1)..(25): SEQ ID NO: 198; WAN0249XZ_at; Start 70; Stop 94
ccttttattatactgcaagaagata

SEQ ID NO: 37918 - DNA, 25 bp, Artificial
  probe
  misc_feature (1)..(25): SEQ ID NO: 198; WAN0249XZ_at; Start 153; Stop 177
agagaaaacagccctagggactgtt

SEQ ID NO: 37919 - DNA, 25 bp, Artificial
  probe
  misc_feature (1)..(25): SEQ ID NO: 198; WAN0249XZ_at; Start 145; Stop 169
cctagtgtagagaaaacagccctag

SEQ ID NO: 37920 - DNA, 25 bp, Artificial
  probe
  misc_feature (1)..(25): SEQ ID NO: 198; WAN0249XZ_at; Start 127; Stop 151
tatagtctatttttatatcctagtg

SEQ ID NO: 37921 - DNA, 25 bp, Artificial
  probe
  misc_feature (1)..(25): SEQ ID NO: 198; WAN0249XZ_at; Start 144; Stop 168
tcctagtgtagagaaaacagcccta

SEQ ID NO: 37922 - DNA, 25 bp, Artificial
  probe
  misc_feature (1)..(25): SEQ ID NO: 198; WAN0249XZ_at; Start 62; Stop 86
cacttagtccttttattatactgca

SEQ ID NO: 37923 - DNA, 25 bp, Artificial
  probe
  misc_feature (1)..(25): SEQ ID NO: 198; WAN0249XZ_at; Start 80; Stop 104
tactgcaagaagatatagttttcaa

SEQ ID NO: 37924 - DNA, 25 bp, Artificial
  probe
  misc_feature (1)..(25): SEQ ID NO: 198; WAN0249XZ_at; Start 133; Stop 157
ctatttttatatcctagtgtagaga

SEQ ID NO: 37925 - DNA, 25 bp, Artificial
  probe
  misc_feature (1)..(25): SEQ ID NO: 198; WAN0249XZ_at; Start 28; Stop 52
gaataattgcatatgtttgaagaca

SEQ ID NO: 37926 - DNA, 25 bp, Artificial
  probe
  misc_feature (1)..(25): SEQ ID NO: 198; WAN0249XZ_at; Start 51; Stop 75
caaatctcaaacacttagtcctttt

SEQ ID NO: 37927 - DNA, 25 bp, Artificial
  probe
  misc_feature (1)..(25): SEQ ID NO: 198; WAN0249XZ_at; Start 18; Stop 42
actctttcaggaataattgcatatg

SEQ ID NO: 37928 - DNA, 25 bp, Artificial
  probe
  misc_feature (1)..(25): SEQ ID NO: 198; WAN0249XZ_at; Start 84; Stop 108
gcaagaagatatagttttcaattat

SEQ ID NO: 37929 - DNA, 25 bp, Artificial
  probe
  misc_feature (1)..(25): SEQ ID NO: 198; WAN0249XZ_at; Start 34; Stop 58
ttgcatatgtttgaagacaaatctc

SEQ ID NO: 37930 - DNA, 25 bp, Artificial
  probe
  misc_feature (1)..(25): SEQ ID NO: 198; WAN0249XZ_at; Start 45; Stop 69
tgaagacaaatctcaaacacttagt

SEQ ID NO: 37931 - DNA, 25 bp, Artificial
  probe
  misc_feature (1)..(25): SEQ ID NO: 198; WAN0249XZ_at; Start 101; Stop 125
tcaattatagtttttctctaactag

SEQ ID NO: 37932 - DNA, 25 bp, Artificial
  probe
  misc_feature (1)..(25): SEQ ID NO: 198; WAN0249XZ_at; Start 9; Stop 33
cctaactgtactctttcaggaataa

SEQ ID NO: 37933 - DNA, 25 bp, Artificial
  probe
  misc_feature (1)..(25): SEQ ID NO: 198; WAN0249XZ_at; Start 151; Stop 175
gtagagaaaacagccctagggactg

SEQ ID NO: 37934 - DNA, 25 bp, Artificial
  probe
  misc_feature (1)..(25): SEQ ID NO: 198; WAN0249XZ_at; Start 36; Stop 60
gcatatgtttgaagacaaatctcaa

SEQ ID NO: 37935 - DNA, 25 bp, Artificial
  probe
  misc_feature (1)..(25): SEQ ID NO: 198; WAN0249XZ_at; Start 150; Stop 174
tgtagagaaaacagccctagggact

SEQ ID NO: 37936 - DNA, 25 bp, Artificial
  probe
  misc_feature (1)..(25): SEQ ID NO: 198; WAN0249XZ_at; Start 46; Stop 70
gaagacaaatctcaaacacttagtc

SEQ ID NO: 37937 - DNA, 25 bp, Artificial
  probe
  misc_feature (1)..(25): SEQ ID NO: 198; WAN0249XZ_at; Start 25; Stop 49
caggaataattgcatatgtttgaag

SEQ ID NO: 37938 - DNA, 25 bp, Artificial
  probe
  misc_feature (1)..(25): SEQ ID NO: 198; WAN0249XZ_at; Start 143; Stop 167
atcctagtgtagagaaaacagccct

SEQ ID NO: 37939 - DNA, 25 bp, Artificial
  probe
  misc_feature (1)..(25): SEQ ID NO: 198; WAN0249XZ_at; Start 147; Stop 171
tagtgtagagaaaacagccctaggg

SEQ ID NO: 37940 - DNA, 25 bp, Artificial
  probe
  misc_feature (1)..(25): SEQ ID NO: 198; WAN0249XZ_at; Start 140; Stop 164
tatatcctagtgtagagaaaacagc

SEQ ID NO: 37941 - DNA, 25 bp, Artificial
  probe
  misc_feature (1)..(25): SEQ ID NO: 198; WAN0249XZ_at; Start 148; Stop 172
agtgtagagaaaacagccctaggga

SEQ ID NO: 37942 - DNA, 25 bp, Artificial
  probe
  misc_feature (1)..(25): SEQ ID NO: 3838; WAN0249Y2_at; Start 39; Stop 63
gattggaattcctattttcactttg

SEQ ID NO: 37943 - DNA, 25 bp, Artificial
  probe
  misc_feature (1)..(25): SEQ ID NO: 3838; WAN0249Y2_at; Start 51; Stop 75
tattttcactttgtgttcttacgga

SEQ ID NO: 37944 - DNA, 25 bp, Artificial
  probe
  misc_feature (1)..(25): SEQ ID NO: 3838; WAN0249Y2_at; Start 27; Stop 51
tagacacttcttgattggaattcct

SEQ ID NO: 37945 - DNA, 25 bp, Artificial
  probe
  misc_feature (1)..(25): SEQ ID NO: 3838; WAN0249Y2_at; Start 11; Stop 35
tagttcttccaagaagtagacactt

SEQ ID NO: 37946 - DNA, 25 bp, Artificial
  probe
  misc_feature (1)..(25): SEQ ID NO: 3838; WAN0249Y2_at; Start 13; Stop 37
gttcttccaagaagtagacacttct

SEQ ID NO: 37947 - DNA, 25 bp, Artificial
  probe
  misc_feature (1)..(25): SEQ ID NO: 3838; WAN0249Y2_at; Start 15; Stop 39
tcttccaagaagtagacacttcttg

SEQ ID NO: 37948 - DNA, 25 bp, Artificial
  probe
  misc_feature (1)..(25): SEQ ID NO: 3838; WAN0249Y2_at; Start 23; Stop 47
gaagtagacacttcttgattggaat

SEQ ID NO: 37949 - DNA, 25 bp, Artificial
  probe
  misc_feature (1)..(25): SEQ ID NO: 3838; WAN0249Y2_at; Start 2; Stop 26
tgaaaaagatagttcttccaagaag

SEQ ID NO: 37950 - DNA, 25 bp, Artificial
  probe
  misc_feature (1)..(25): SEQ ID NO: 3838; WAN0249Y2_at; Start 12; Stop 36
agttcttccaagaagtagacacttc

SEQ ID NO: 37951 - DNA, 25 bp, Artificial
  probe
  misc_feature (1)..(25): SEQ ID NO: 3838; WAN0249Y2_at; Start 70; Stop 94
tacggactttgtatcttagacagga

SEQ ID NO: 37952 - DNA, 25 bp, Artificial
  probe
  misc_feature (1)..(25): SEQ ID NO: 3838; WAN0249Y2_at; Start 35; Stop 59
tcttgattggaattcctattttcac

SEQ ID NO: 37953 - DNA, 25 bp, Artificial
  probe
  misc_feature (1)..(25): SEQ ID NO: 3838; WAN0249Y2_at; Start 5; Stop 29
aaaagatagttcttccaagaagtag

SEQ ID NO: 37954 - DNA, 25 bp, Artificial
  probe
  misc_feature (1)..(25): SEQ ID NO: 3838; WAN0249Y2_at; Start 69; Stop 93
ttacggactttgtatcttagacagg

SEQ ID NO: 37955 - DNA, 25 bp, Artificial
  probe
  misc_feature (1)..(25): SEQ ID NO: 3838; WAN0249Y2_at; Start 71; Stop 95
acggactttgtatcttagacaggag

SEQ ID NO: 37956 - DNA, 25 bp, Artificial
  probe
  misc_feature (1)..(25): SEQ ID NO: 3838; WAN0249Y2_at; Start 29; Stop 53
gacacttcttgattggaattcctat

SEQ ID NO: 37957 - DNA, 25 bp, Artificial
  probe
  misc_feature (1)..(25): SEQ ID NO: 3838; WAN0249Y2_at; Start 57; Stop 81
cactttgtgttcttacggactttgt

SEQ ID NO: 37958 - DNA, 25 bp, Artificial
  probe
  misc_feature (1)..(25): SEQ ID NO: 3838; WAN0249Y2_at; Start 7; Stop 31
aagatagttcttccaagaagtagac

SEQ ID NO: 37959 - DNA, 25 bp, Artificial
  probe
  misc_feature (1)..(25): SEQ ID NO: 3838; WAN0249Y2_at; Start 68; Stop 92
cttacggactttgtatcttagacag

SEQ ID NO: 37960 - DNA, 25 bp, Artificial
  probe
  misc_feature (1)..(25): SEQ ID NO: 3838; WAN0249Y2_at; Start 44; Stop 68
gaattcctattttcactttgtgttc

SEQ ID NO: 37961 - DNA, 25 bp, Artificial
  probe
  misc_feature (1)..(25): SEQ ID NO: 3838; WAN0249Y2_at; Start 75; Stop 99
actttgtatcttagacaggagtaga

SEQ ID NO: 37962 - DNA, 25 bp, Artificial
  probe
  misc_feature (1)..(25): SEQ ID NO: 3838; WAN0249Y2_at; Start 25; Stop 49
agtagacacttcttgattggaattc

SEQ ID NO: 37963 - DNA, 25 bp, Artificial
  probe
  misc_feature (1)..(25): SEQ ID NO: 3838; WAN0249Y2_at; Start 64; Stop 88
tgttcttacggactttgtatcttag

SEQ ID NO: 37964 - DNA, 25 bp, Artificial
  probe
  misc_feature (1)..(25): SEQ ID NO: 3838; WAN0249Y2_at; Start 42; Stop 66
tggaattcctattttcactttgtgt

SEQ ID NO: 37965 - DNA, 25 bp, Artificial
  probe
  misc_feature (1)..(25): SEQ ID NO: 3838; WAN0249Y2_at; Start 62; Stop 86
tgtgttcttacggactttgtatctt

SEQ ID NO: 37966 - DNA, 25 bp, Artificial
  probe
  misc_feature (1)..(25): SEQ ID NO: 3838; WAN0249Y2_at; Start 72; Stop 96
cggactttgtatcttagacaggagt

SEQ ID NO: 37967 - DNA, 25 bp, Artificial
  probe
  misc_feature (1)..(25): SEQ ID NO: 3838; WAN0249Y2_at; Start 9; Stop 33
gatagttcttccaagaagtagacac

SEQ ID NO: 37968 - DNA, 25 bp, Artificial
  probe
  misc_feature (1)..(25): SEQ ID NO: 3838; WAN0249Y2_at; Start 76; Stop 100
ctttgtatcttagacaggagtagag

SEQ ID NO: 37969 - DNA, 25 bp, Artificial
  probe
  misc_feature (1)..(25): SEQ ID NO: 3838; WAN0249Y2_at; Start 59; Stop 83
ctttgtgttcttacggactttgtat

SEQ ID NO: 37970 - DNA, 25 bp, Artificial
  probe
  misc_feature (1)..(25): SEQ ID NO: 3838; WAN0249Y2_at; Start 31; Stop 55
cacttcttgattggaattcctattt

SEQ ID NO: 37971 - DNA, 25 bp, Artificial
  probe
  misc_feature (1)..(25): SEQ ID NO: 3838; WAN0249Y2_at; Start 56; Stop 80
tcactttgtgttcttacggactttg

SEQ ID NO: 37972 - DNA, 25 bp, Artificial
  probe
  misc_feature (1)..(25): SEQ ID NO: 3838; WAN0249Y2_at; Start 26; Stop 50
gtagacacttcttgattggaattcc

SEQ ID NO: 37973 - DNA, 25 bp, Artificial
  probe
  misc_feature (1)..(25): SEQ ID NO: 3838; WAN0249Y2_at; Start 74; Stop 98
gactttgtatcttagacaggagtag

SEQ ID NO: 37974 - DNA, 25 bp, Artificial
  probe
  misc_feature (1)..(25): SEQ ID NO: 3838; WAN0249Y2_at; Start 67; Stop 91
tcttacggactttgtatcttagaca

SEQ ID NO: 37975 - DNA, 25 bp, Artificial
  probe
  misc_feature (1)..(25): SEQ ID NO: 3838; WAN0249Y2_at; Start 73; Stop 97
ggactttgtatcttagacaggagta

SEQ ID NO: 37976 - DNA, 25 bp, Artificial
  probe
  misc_feature (1)..(25): SEQ ID NO: 3312; WAN0249Y3_at; Start 33; Stop 57
gaacacaaagtgaaaataggaattc

SEQ ID NO: 37977 - DNA, 25 bp, Artificial
  probe
  misc_feature (1)..(25): SEQ ID NO: 3312; WAN0249Y3_at; Start 38; Stop 62
caaagtgaaaataggaattccaatc

SEQ ID NO: 37978 - DNA, 25 bp, Artificial
  probe
  misc_feature (1)..(25): SEQ ID NO: 3312; WAN0249Y3_at; Start 36; Stop 60
cacaaagtgaaaataggaattccaa

SEQ ID NO: 37979 - DNA, 25 bp, Artificial
  probe
  misc_feature (1)..(25): SEQ ID NO: 3312; WAN0249Y3_at; Start 14; Stop 38
taagatacaaagtccgtaagaacac

SEQ ID NO: 37980 - DNA, 25 bp, Artificial
  probe
  misc_feature (1)..(25): SEQ ID NO: 3312; WAN0249Y3_at; Start 51; Stop 75
ggaattccaatcaagaagtgtctac

SEQ ID NO: 37981 - DNA, 25 bp, Artificial
  probe
  misc_feature (1)..(25): SEQ ID NO: 3312; WAN0249Y3_at; Start 12; Stop 36
tctaagatacaaagtccgtaagaac

SEQ ID NO: 37982 - DNA, 25 bp, Artificial
  probe
  misc_feature (1)..(25): SEQ ID NO: 3312; WAN0249Y3_at; Start 9; Stop 33
ctgtctaagatacaaagtccgtaag

SEQ ID NO: 37983 - DNA, 25 bp, Artificial
  probe
  misc_feature (1)..(25): SEQ ID NO: 3312; WAN0249Y3_at; Start 46; Stop 70
aaataggaattccaatcaagaagtg

SEQ ID NO: 37984 - DNA, 25 bp, Artificial
  probe
  misc_feature (1)..(25): SEQ ID NO: 3312; WAN0249Y3_at; Start 49; Stop 73
taggaattccaatcaagaagtgtct

SEQ ID NO: 37985 - DNA, 25 bp, Artificial
  probe
  misc_feature (1)..(25): SEQ ID NO: 3312; WAN0249Y3_at; Start 10; Stop 34
tgtctaagatacaaagtccgtaaga

SEQ ID NO: 37986 - DNA, 25 bp, Artificial
  probe
  misc_feature (1)..(25): SEQ ID NO: 3312; WAN0249Y3_at; Start 6; Stop 30
ctcctgtctaagatacaaagtccgt

SEQ ID NO: 37987 - DNA, 25 bp, Artificial
  probe
  misc_feature (1)..(25): SEQ ID NO: 3312; WAN0249Y3_at; Start 18; Stop 42
atacaaagtccgtaagaacacaaag

SEQ ID NO: 37988 - DNA, 25 bp, Artificial
  probe
  misc_feature (1)..(25): SEQ ID NO: 3312; WAN0249Y3_at; Start 1; Stop 25
ctctactcctgtctaagatacaaag

SEQ ID NO: 37989 - DNA, 25 bp, Artificial
  probe
  misc_feature (1)..(25): SEQ ID NO: 3312; WAN0249Y3_at; Start 71; Stop 95
tctacttcttggaagaactatcttt

SEQ ID NO: 37990 - DNA, 25 bp, Artificial
  probe
  misc_feature (1)..(25): SEQ ID NO: 3312; WAN0249Y3_at; Start 55; Stop 79
ttccaatcaagaagtgtctacttct

SEQ ID NO: 37991 - DNA, 25 bp, Artificial
  probe
  misc_feature (1)..(25): SEQ ID NO: 3312; WAN0249Y3_at; Start 41; Stop 65
agtgaaaataggaattccaatcaag

SEQ ID NO: 37992 - DNA, 25 bp, Artificial
  probe
  misc_feature (1)..(25): SEQ ID NO: 3312; WAN0249Y3_at; Start 65; Stop 89
gaagtgtctacttcttggaagaact

SEQ ID NO: 37993 - DNA, 25 bp, Artificial
  probe
  misc_feature (1)..(25): SEQ ID NO: 3312; WAN0249Y3_at; Start 76; Stop 100
ttcttggaagaactatctttttcac

SEQ ID NO: 37994 - DNA, 25 bp, Artificial
  probe
  misc_feature (1)..(25): SEQ ID NO: 3312; WAN0249Y3_at; Start 15; Stop 39
aagatacaaagtccgtaagaacaca

SEQ ID NO: 37995 - DNA, 25 bp, Artificial
  probe
  misc_feature (1)..(25): SEQ ID NO: 3312; WAN0249Y3_at; Start 5; Stop 29
actcctgtctaagatacaaagtccg

SEQ ID NO: 37996 - DNA, 25 bp, Artificial
  probe
  misc_feature (1)..(25): SEQ ID NO: 3312; WAN0249Y3_at; Start 4; Stop 28
tactcctgtctaagatacaaagtcc

SEQ ID NO: 37997 - DNA, 25 bp, Artificial
  probe
  misc_feature (1)..(25): SEQ ID NO: 3312; WAN0249Y3_at; Start 66; Stop 90
aagtgtctacttcttggaagaacta

SEQ ID NO: 37998 - DNA, 25 bp, Artificial
  probe
  misc_feature (1)..(25): SEQ ID NO: 3312; WAN0249Y3_at; Start 2; Stop 26
tctactcctgtctaagatacaaagt

SEQ ID NO: 37999 - DNA, 25 bp, Artificial
  probe
  misc_feature (1)..(25): SEQ ID NO: 3312; WAN0249Y3_at; Start 69; Stop 93
tgtctacttcttggaagaactatct

SEQ ID NO: 38000 - DNA, 25 bp, Artificial
  probe
  misc_feature (1)..(25): SEQ ID NO: 3312; WAN0249Y3_at; Start 26; Stop 50
tccgtaagaacacaaagtgaaaata

SEQ ID NO: 38001 - DNA, 25 bp, Artificial
  probe
  misc_feature (1)..(25): SEQ ID NO: 3312; WAN0249Y3_at; Start 28; Stop 52
cgtaagaacacaaagtgaaaatagg

SEQ ID NO: 38002 - DNA, 25 bp, Artificial
  probe
  misc_feature (1)..(25): SEQ ID NO: 3312; WAN0249Y3_at; Start 8; Stop 32
cctgtctaagatacaaagtccgtaa

SEQ ID NO: 38003 - DNA, 25 bp, Artificial
  probe
  misc_feature (1)..(25): SEQ ID NO: 3312; WAN0249Y3_at; Start 17; Stop 41
gatacaaagtccgtaagaacacaaa

SEQ ID NO: 38004 - DNA, 25 bp, Artificial
  probe
  misc_feature (1)..(25): SEQ ID NO: 3312; WAN0249Y3_at; Start 53; Stop 77
aattccaatcaagaagtgtctactt

SEQ ID NO: 38005 - DNA, 25 bp, Artificial
  probe
  misc_feature (1)..(25): SEQ ID NO: 3312; WAN0249Y3_at; Start 21; Stop 45
caaagtccgtaagaacacaaagtga

SEQ ID NO: 38006 - DNA, 25 bp, Artificial
  probe
  misc_feature (1)..(25): SEQ ID NO: 3312; WAN0249Y3_at; Start 7; Stop 31
tcctgtctaagatacaaagtccgta

SEQ ID NO: 38007 - DNA, 25 bp, Artificial
  probe
  misc_feature (1)..(25): SEQ ID NO: 3312; WAN0249Y3_at; Start 44; Stop 68
gaaaataggaattccaatcaagaag

SEQ ID NO: 38008 - DNA, 25 bp, Artificial
  probe
  misc_feature (1)..(25): SEQ ID NO: 3312; WAN0249Y3_at; Start 52; Stop 76
gaattccaatcaagaagtgtctact

SEQ ID NO: 38009 - DNA, 25 bp, Artificial
  probe
  misc_feature (1)..(25): SEQ ID NO: 3312; WAN0249Y3_at; Start 20; Stop 44
acaaagtccgtaagaacacaaagtg

SEQ ID NO: 38010 - DNA, 25 bp, Artificial
  probe
  misc_feature (1)..(25): SEQ ID NO: 4581; WAN0249Y4_at; Start 112; Stop 136
tactactcaagggagtagctggcag

SEQ ID NO: 38011 - DNA, 25 bp, Artificial
  probe
  misc_feature (1)..(25): SEQ ID NO: 4581; WAN0249Y4_at; Start 48; Stop 72
caaggaaaaattcaaataaggcagt

SEQ ID NO: 38012 - DNA, 25 bp, Artificial
  probe
  misc_feature (1)..(25): SEQ ID NO: 4581; WAN0249Y4_at; Start 129; Stop 153
gctggcagaaacctgtgatagtgtc

SEQ ID NO: 38013 - DNA, 25 bp, Artificial
  probe
  misc_feature (1)..(25): SEQ ID NO: 4581; WAN0249Y4_at; Start 106; Stop 130
taatggtactactcaagggagtagc

SEQ ID NO: 38014 - DNA, 25 bp, Artificial
  probe
  misc_feature (1)..(25): SEQ ID NO: 4581; WAN0249Y4_at; Start 136; Stop 160
gaaacctgtgatagtgtcgtcattc

SEQ ID NO: 38015 - DNA, 25 bp, Artificial
  probe
  misc_feature (1)..(25): SEQ ID NO: 4581; WAN0249Y4_at; Start 101; Stop 125
tggtataatggtactactcaaggga

SEQ ID NO: 38016 - DNA, 25 bp, Artificial
  probe
  misc_feature (1)..(25): SEQ ID NO: 4581; WAN0249Y4_at; Start 117; Stop 141
ctcaagggagtagctggcagaaacc

SEQ ID NO: 38017 - DNA, 25 bp, Artificial
  probe
  misc_feature (1)..(25): SEQ ID NO: 4581; WAN0249Y4_at; Start 132; Stop 156
ggcagaaacctgtgatagtgtcgtc

SEQ ID NO: 38018 - DNA, 25 bp, Artificial
  probe
  misc_feature (1)..(25): SEQ ID NO: 4581; WAN0249Y4_at; Start 124; Stop 148
gagtagctggcagaaacctgtgata

SEQ ID NO: 38019 - DNA, 25 bp, Artificial
  probe
  misc_feature (1)..(25): SEQ ID NO: 4581; WAN0249Y4_at; Start 160; Stop 184
ccgaattttatgctgaaaagtatgc

SEQ ID NO: 38020 - DNA, 25 bp, Artificial
  probe
  misc_feature (1)..(25): SEQ ID NO: 4581; WAN0249Y4_at; Start 28; Stop 52
tctaccattatactggttttcaagg

SEQ ID NO: 38021 - DNA, 25 bp, Artificial
  probe
  misc_feature (1)..(25): SEQ ID NO: 4581; WAN0249Y4_at; Start 134; Stop 158
cagaaacctgtgatagtgtcgtcat

SEQ ID NO: 38022 - DNA, 25 bp, Artificial
  probe
  misc_feature (1)..(25): SEQ ID NO: 4581; WAN0249Y4_at; Start 142; Stop 166
tgtgatagtgtcgtcattccgaatt

SEQ ID NO: 38023 - DNA, 25 bp, Artificial
  probe
  misc_feature (1)..(25): SEQ ID NO: 4581; WAN0249Y4_at; Start 109; Stop 133
tggtactactcaagggagtagctgg

SEQ ID NO: 38024 - DNA, 25 bp, Artificial
  probe
  misc_feature (1)..(25): SEQ ID NO: 4581; WAN0249Y4_at; Start 115; Stop 139
tactcaagggagtagctggcagaaa

SEQ ID NO: 38025 - DNA, 25 bp, Artificial
  probe
  misc_feature (1)..(25): SEQ ID NO: 4581; WAN0249Y4_at; Start 94; Stop 118
caaaatttggtataatggtactact

SEQ ID NO: 38026 - DNA, 25 bp, Artificial
  probe
  misc_feature (1)..(25): SEQ ID NO: 4581; WAN0249Y4_at; Start 145; Stop 169
gatagtgtcgtcattccgaatttta

SEQ ID NO: 38027 - DNA, 25 bp, Artificial
  probe
  misc_feature (1)..(25): SEQ ID NO: 4581; WAN0249Y4_at; Start 7; Stop 31
tcctttctagtcacatagcattcta

SEQ ID NO: 38028 - DNA, 25 bp, Artificial
  probe
  misc_feature (1)..(25): SEQ ID NO: 4581; WAN0249Y4_at; Start 153; Stop 177
cgtcattccgaattttatgctgaaa

SEQ ID NO: 38029 - DNA, 25 bp, Artificial
  probe
  misc_feature (1)..(25): SEQ ID NO: 4581; WAN0249Y4_at; Start 168; Stop 192
tatgctgaaaagtatgctttccggc

SEQ ID NO: 38030 - DNA, 25 bp, Artificial
  probe
  misc_feature (1)..(25): SEQ ID NO: 4581; WAN0249Y4_at; Start 138; Stop 162
aacctgtgatagtgtcgtcattccg

SEQ ID NO: 38031 - DNA, 25 bp, Artificial
  probe
  misc_feature (1)..(25): SEQ ID NO: 4581; WAN0249Y4_at; Start 140; Stop 164
cctgtgatagtgtcgtcattccgaa

SEQ ID NO: 38032 - DNA, 25 bp, Artificial
  probe
  misc_feature (1)..(25): SEQ ID NO: 4581; WAN0249Y4_at; Start 12; Stop 36
tctagtcacatagcattctaccatt

SEQ ID NO: 38033 - DNA, 25 bp, Artificial
  probe
  misc_feature (1)..(25): SEQ ID NO: 4581; WAN0249Y4_at; Start 148; Stop 172
agtgtcgtcattccgaattttatgc

SEQ ID NO: 38034 - DNA, 25 bp, Artificial
  probe
  misc_feature (1)..(25): SEQ ID NO: 4581; WAN0249Y4_at; Start 60; Stop 84
caaataaggcagtttttactctttg

SEQ ID NO: 38035 - DNA, 25 bp, Artificial
  probe
  misc_feature (1)..(25): SEQ ID NO: 4581; WAN0249Y4_at; Start 19; Stop 43
acatagcattctaccattatactgg

SEQ ID NO: 38036 - DNA, 25 bp, Artificial
  probe
  misc_feature (1)..(25): SEQ ID NO: 4581; WAN0249Y4_at; Start 169; Stop 193
atgctgaaaagtatgctttccggcc

SEQ ID NO: 38037 - DNA, 25 bp, Artificial
  probe
  misc_feature (1)..(25): SEQ ID NO: 4581; WAN0249Y4_at; Start 30; Stop 54
taccattatactggttttcaaggaa

SEQ ID NO: 38038 - DNA, 25 bp, Artificial
  probe
  misc_feature (1)..(25): SEQ ID NO: 4581; WAN0249Y4_at; Start 1; Stop 25
tcaacttcctttctagtcacatagc

SEQ ID NO: 38039 - DNA, 25 bp, Artificial
  probe
  misc_feature (1)..(25): SEQ ID NO: 4581; WAN0249Y4_at; Start 123; Stop 147
ggagtagctggcagaaacctgtgat

SEQ ID NO: 38040 - DNA, 25 bp, Artificial
  probe
  misc_feature (1)..(25): SEQ ID NO: 4581; WAN0249Y4_at; Start 127; Stop 151
tagctggcagaaacctgtgatagtg

SEQ ID NO: 38041 - DNA, 25 bp, Artificial
  probe
  misc_feature (1)..(25): SEQ ID NO: 4581; WAN0249Y4_at; Start 156; Stop 180
cattccgaattttatgctgaaaagt

SEQ ID NO: 38042 - DNA, 25 bp, Artificial
  probe
  misc_feature (1)..(25): SEQ ID NO: 4581; WAN0249Y4_at; Start 119; Stop 143
caagggagtagctggcagaaacctg

SEQ ID NO: 38043 - DNA, 25 bp, Artificial
  probe
  misc_feature (1)..(25): SEQ ID NO: 4581; WAN0249Y4_at; Start 103; Stop 127
gtataatggtactactcaagggagt

SEQ ID NO: 38044 - DNA, 25 bp, Artificial
  probe
  misc_feature (1)..(25): SEQ ID NO: 3740; WAN0249Y5_at; Start 146; Stop 170
gaaaaccagtataatggtagaatgc

SEQ ID NO: 38045 - DNA, 25 bp, Artificial
  probe
  misc_feature (1)..(25): SEQ ID NO: 3740; WAN0249Y5_at; Start 165; Stop 189
gaatgctatgtgactagaaaggaag

SEQ ID NO: 38046 - DNA, 25 bp, Artificial
  probe
  misc_feature (1)..(25): SEQ ID NO: 3740; WAN0249Y5_at; Start 17; Stop 41
tttcagcataaaattcggaatgacg

SEQ ID NO: 38047 - DNA, 25 bp, Artificial
  probe
  misc_feature (1)..(25): SEQ ID NO: 3740; WAN0249Y5_at; Start 34; Stop 58
gaatgacgacactatcacaggtttc

SEQ ID NO: 38048 - DNA, 25 bp, Artificial
  probe
  misc_feature (1)..(25): SEQ ID NO: 3740; WAN0249Y5_at; Start 76; Stop 100
agtagtaccattataccaaattttg

SEQ ID NO: 38049 - DNA, 25 bp, Artificial
  probe
  misc_feature (1)..(25): SEQ ID NO: 3740; WAN0249Y5_at; Start 30; Stop 54
ttcggaatgacgacactatcacagg

SEQ ID NO: 38050 - DNA, 25 bp, Artificial
  probe
  misc_feature (1)..(25): SEQ ID NO: 3740; WAN0249Y5_at; Start 32; Stop 56
cggaatgacgacactatcacaggtt

SEQ ID NO: 38051 - DNA, 25 bp, Artificial
  probe
  misc_feature (1)..(25): SEQ ID NO: 3740; WAN0249Y5_at; Start 1; Stop 25
ggccggaaagcatacttttcagcat

SEQ ID NO: 38052 - DNA, 25 bp, Artificial
  probe
  misc_feature (1)..(25): SEQ ID NO: 3740; WAN0249Y5_at; Start 113; Stop 137
agagtaaaaactgccttatttgaat

SEQ ID NO: 38053 - DNA, 25 bp, Artificial
  probe
  misc_feature (1)..(25): SEQ ID NO: 3740; WAN0249Y5_at; Start 64; Stop 88
gctactcccttgagtagtaccatta

SEQ ID NO: 38054 - DNA, 25 bp, Artificial
  probe
  misc_feature (1)..(25): SEQ ID NO: 3740; WAN0249Y5_at; Start 3; Stop 27
ccggaaagcatacttttcagcataa

SEQ ID NO: 38055 - DNA, 25 bp, Artificial
  probe
  misc_feature (1)..(25): SEQ ID NO: 3740; WAN0249Y5_at; Start 151; Stop 175
ccagtataatggtagaatgctatgt

SEQ ID NO: 38056 - DNA, 25 bp, Artificial
  probe
  misc_feature (1)..(25): SEQ ID NO: 3740; WAN0249Y5_at; Start 110; Stop 134
caaagagtaaaaactgccttatttg

SEQ ID NO: 38057 - DNA, 25 bp, Artificial
  probe
  misc_feature (1)..(25): SEQ ID NO: 3740; WAN0249Y5_at; Start 163; Stop 187
tagaatgctatgtgactagaaagga

SEQ ID NO: 38058 - DNA, 25 bp, Artificial
  probe
  misc_feature (1)..(25): SEQ ID NO: 3740; WAN0249Y5_at; Start 10; Stop 34
gcatacttttcagcataaaattcgg

SEQ ID NO: 38059 - DNA, 25 bp, Artificial
  probe
  misc_feature (1)..(25): SEQ ID NO: 3740; WAN0249Y5_at; Start 27; Stop 51
aaattcggaatgacgacactatcac

SEQ ID NO: 38060 - DNA, 25 bp, Artificial
  probe
  misc_feature (1)..(25): SEQ ID NO: 3740; WAN0249Y5_at; Start 57; Stop 81
tctgccagctactcccttgagtagt

SEQ ID NO: 38061 - DNA, 25 bp, Artificial
  probe
  misc_feature (1)..(25): SEQ ID NO: 3740; WAN0249Y5_at; Start 43; Stop 67
cactatcacaggtttctgccagcta

SEQ ID NO: 38062 - DNA, 25 bp, Artificial
  probe
  misc_feature (1)..(25): SEQ ID NO: 3740; WAN0249Y5_at; Start 160; Stop 184
tggtagaatgctatgtgactagaaa

SEQ ID NO: 38063 - DNA, 25 bp, Artificial
  probe
  misc_feature (1)..(25): SEQ ID NO: 3740; WAN0249Y5_at; Start 25; Stop 49
taaaattcggaatgacgacactatc

SEQ ID NO: 38064 - DNA, 25 bp, Artificial
  probe
  misc_feature (1)..(25): SEQ ID NO: 3740; WAN0249Y5_at; Start 71; Stop 95
ccttgagtagtaccattataccaaa

SEQ ID NO: 38065 - DNA, 25 bp, Artificial
  probe
  misc_feature (1)..(25): SEQ ID NO: 3740; WAN0249Y5_at; Start 41; Stop 65
gacactatcacaggtttctgccagc

SEQ ID NO: 38066 - DNA, 25 bp, Artificial
  probe
  misc_feature (1)..(25): SEQ ID NO: 3740; WAN0249Y5_at; Start 157; Stop 181
taatggtagaatgctatgtgactag

SEQ ID NO: 38067 - DNA, 25 bp, Artificial
  probe
  misc_feature (1)..(25): SEQ ID NO: 3740; WAN0249Y5_at; Start 141; Stop 165
tccttgaaaaccagtataatggtag

SEQ ID NO: 38068 - DNA, 25 bp, Artificial
  probe
  misc_feature (1)..(25): SEQ ID NO: 3740; WAN0249Y5_at; Start 61; Stop 85
ccagctactcccttgagtagtacca

SEQ ID NO: 38069 - DNA, 25 bp, Artificial
  probe
  misc_feature (1)..(25): SEQ ID NO: 3740; WAN0249Y5_at; Start 19; Stop 43
tcagcataaaattcggaatgacgac

SEQ ID NO: 38070 - DNA, 25 bp, Artificial
  probe
  misc_feature (1)..(25): SEQ ID NO: 3740; WAN0249Y5_at; Start 22; Stop 46
gcataaaattcggaatgacgacact

SEQ ID NO: 38071 - DNA, 25 bp, Artificial
  probe
  misc_feature (1)..(25): SEQ ID NO: 3740; WAN0249Y5_at; Start 53; Stop 77
ggtttctgccagctactcccttgag

SEQ ID NO: 38072 - DNA, 25 bp, Artificial
  probe
  misc_feature (1)..(25): SEQ ID NO: 3740; WAN0249Y5_at; Start 46; Stop 70
tatcacaggtttctgccagctactc

SEQ ID NO: 38073 - DNA, 25 bp, Artificial
  probe
  misc_feature (1)..(25): SEQ ID NO: 3740; WAN0249Y5_at; Start 5; Stop 29
ggaaagcatacttttcagcataaaa

SEQ ID NO: 38074 - DNA, 25 bp, Artificial
  probe
  misc_feature (1)..(25): SEQ ID NO: 3740; WAN0249Y5_at; Start 38; Stop 62
gacgacactatcacaggtttctgcc

SEQ ID NO: 38075 - DNA, 25 bp, Artificial
  probe
  misc_feature (1)..(25): SEQ ID NO: 3740; WAN0249Y5_at; Start 69; Stop 93
tcccttgagtagtaccattatacca

SEQ ID NO: 38076 - DNA, 25 bp, Artificial
  probe
  misc_feature (1)..(25): SEQ ID NO: 3740; WAN0249Y5_at; Start 54; Stop 78
gtttctgccagctactcccttgagt

SEQ ID NO: 38077 - DNA, 25 bp, Artificial
  probe
  misc_feature (1)..(25): SEQ ID NO: 3740; WAN0249Y5_at; Start 169; Stop 193
gctatgtgactagaaaggaagttga

SEQ ID NO: 38078 - DNA, 25 bp, Artificial
  probe
  misc_feature (1)..(25): SEQ ID NO: 3187; WAN0249Y6_at; Start 19; Stop 43
atggctttttgctacagttgaggga

SEQ ID NO: 38079 - DNA, 25 bp, Artificial
  probe
  misc_feature (1)..(25): SEQ ID NO: 3187; WAN0249Y6_at; Start 67; Stop 91
tgtgctataattgctataatatagt

SEQ ID NO: 38080 - DNA, 25 bp, Artificial
  probe
  misc_feature (1)..(25): SEQ ID NO: 3187; WAN0249Y6_at; Start 86; Stop 110
tatagtaaaaagcaagaggagtgtg

SEQ ID NO: 38081 - DNA, 25 bp, Artificial
  probe
  misc_feature (1)..(25): SEQ ID NO: 3187; WAN0249Y6_at; Start 16; Stop 40
cggatggctttttgctacagttgag

SEQ ID NO: 38082 - DNA, 25 bp, Artificial
  probe
  misc_feature (1)..(25): SEQ ID NO: 3187; WAN0249Y6_at; Start 14; Stop 38
ttcggatggctttttgctacagttg

SEQ ID NO: 38083 - DNA, 25 bp, Artificial
  probe
  misc_feature (1)..(25): SEQ ID NO: 3187; WAN0249Y6_at; Start 23; Stop 47
ctttttgctacagttgagggaaagg

SEQ ID NO: 38084 - DNA, 25 bp, Artificial
  probe
  misc_feature (1)..(25): SEQ ID NO: 3187; WAN0249Y6_at; Start 12; Stop 36
tcttcggatggctttttgctacagt

SEQ ID NO: 38085 - DNA, 25 bp, Artificial
  probe
  misc_feature (1)..(25): SEQ ID NO: 3187; WAN0249Y6_at; Start 22; Stop 46
gctttttgctacagttgagggaaag

SEQ ID NO: 38086 - DNA, 25 bp, Artificial
  probe
  misc_feature (1)..(25): SEQ ID NO: 3187; WAN0249Y6_at; Start 83; Stop 107
taatatagtaaaaagcaagaggagt

SEQ ID NO: 38087 - DNA, 25 bp, Artificial
  probe
  misc_feature (1)..(25): SEQ ID NO: 3187; WAN0249Y6_at; Start 52; Stop 76
gcagttatcggcttttgtgctataa

SEQ ID NO: 38088 - DNA, 25 bp, Artificial
  probe
  misc_feature (1)..(25): SEQ ID NO: 3187; WAN0249Y6_at; Start 2; Stop 26
aaaaaagtcatcttcggatggcttt

SEQ ID NO: 38089 - DNA, 25 bp, Artificial
  probe
  misc_feature (1)..(25): SEQ ID NO: 3187; WAN0249Y6_at; Start 57; Stop 81
tatcggcttttgtgctataattgct

SEQ ID NO: 38090 - DNA, 25 bp, Artificial
  probe
  misc_feature (1)..(25): SEQ ID NO: 3187; WAN0249Y6_at; Start 36; Stop 60
ttgagggaaagggtttgcagttatc

SEQ ID NO: 38091 - DNA, 25 bp, Artificial
  probe
  misc_feature (1)..(25): SEQ ID NO: 3187; WAN0249Y6_at; Start 9; Stop 33
tcatcttcggatggctttttgctac

SEQ ID NO: 38092 - DNA, 25 bp, Artificial
  probe
  misc_feature (1)..(25): SEQ ID NO: 3187; WAN0249Y6_at; Start 11; Stop 35
atcttcggatggctttttgctacag

SEQ ID NO: 38093 - DNA, 25 bp, Artificial
  probe
  misc_feature (1)..(25): SEQ ID NO: 3187; WAN0249Y6_at; Start 6; Stop 30
aagtcatcttcggatggctttttgc

SEQ ID NO: 38094 - DNA, 25 bp, Artificial
  probe
  misc_feature (1)..(25): SEQ ID NO: 3187; WAN0249Y6_at; Start 15; Stop 39
tcggatggctttttgctacagttga

SEQ ID NO: 38095 - DNA, 25 bp, Artificial
  probe
  misc_feature (1)..(25): SEQ ID NO: 3187; WAN0249Y6_at; Start 91; Stop 115
taaaaagcaagaggagtgtgaggaa

SEQ ID NO: 38096 - DNA, 25 bp, Artificial
  probe
  misc_feature (1)..(25): SEQ ID NO: 3187; WAN0249Y6_at; Start 30; Stop 54
ctacagttgagggaaagggtttgca

SEQ ID NO: 38097 - DNA, 25 bp, Artificial
  probe
  misc_feature (1)..(25): SEQ ID NO: 3187; WAN0249Y6_at; Start 60; Stop 84
cggcttttgtgctataattgctata

SEQ ID NO: 38098 - DNA, 25 bp, Artificial
  probe
  misc_feature (1)..(25): SEQ ID NO: 3187; WAN0249Y6_at; Start 13; Stop 37
cttcggatggctttttgctacagtt

SEQ ID NO: 38099 - DNA, 25 bp, Artificial
  probe
  misc_feature (1)..(25): SEQ ID NO: 3187; WAN0249Y6_at; Start 1; Stop 25
caaaaaagtcatcttcggatggctt

SEQ ID NO: 38100 - DNA, 25 bp, Artificial
  probe
  misc_feature (1)..(25): SEQ ID NO: 3187; WAN0249Y6_at; Start 88; Stop 112
tagtaaaaagcaagaggagtgtgag

SEQ ID NO: 38101 - DNA, 25 bp, Artificial
  probe
  misc_feature (1)..(25): SEQ ID NO: 3187; WAN0249Y6_at; Start 21; Stop 45
ggctttttgctacagttgagggaaa

SEQ ID NO: 38102 - DNA, 25 bp, Artificial
  probe
  misc_feature (1)..(25): SEQ ID NO: 3187; WAN0249Y6_at; Start 20; Stop 44
tggctttttgctacagttgagggaa

SEQ ID NO: 38103 - DNA, 25 bp, Artificial
  probe
  misc_feature (1)..(25): SEQ ID NO: 3187; WAN0249Y6_at; Start 46; Stop 70
gggtttgcagttatcggcttttgtg

SEQ ID NO: 38104 - DNA, 25 bp, Artificial
  probe
  misc_feature (1)..(25): SEQ ID NO: 3187; WAN0249Y6_at; Start 47; Stop 71
ggtttgcagttatcggcttttgtgc

SEQ ID NO: 38105 - DNA, 25 bp, Artificial
  probe
  misc_feature (1)..(25): SEQ ID NO: 3187; WAN0249Y6_at; Start 53; Stop 77
cagttatcggcttttgtgctataat

SEQ ID NO: 38106 - DNA, 25 bp, Artificial
  probe
  misc_feature (1)..(25): SEQ ID NO: 3187; WAN0249Y6_at; Start 61; Stop 85
ggcttttgtgctataattgctataa

SEQ ID NO: 38107 - DNA, 25 bp, Artificial
  probe
  misc_feature (1)..(25): SEQ ID NO: 3187; WAN0249Y6_at; Start 51; Stop 75
tgcagttatcggcttttgtgctata

SEQ ID NO: 38108 - DNA, 25 bp, Artificial
  probe
  misc_feature (1)..(25): SEQ ID NO: 3187; WAN0249Y6_at; Start 80; Stop 104
ctataatatagtaaaaagcaagagg

SEQ ID NO: 38109 - DNA, 25 bp, Artificial
  probe
  misc_feature (1)..(25): SEQ ID NO: 3187; WAN0249Y6_at; Start 48; Stop 72
gtttgcagttatcggcttttgtgct

SEQ ID NO: 38110 - DNA, 25 bp, Artificial
  probe
  misc_feature (1)..(25): SEQ ID NO: 3187; WAN0249Y6_at; Start 17; Stop 41
ggatggctttttgctacagttgagg

SEQ ID NO: 38111 - DNA, 25 bp, Artificial
  probe
  misc_feature (1)..(25): SEQ ID NO: 3187; WAN0249Y6_at; Start 44; Stop 68
aagggtttgcagttatcggcttttg

SEQ ID NO: 38112 - DNA, 25 bp, Artificial
  probe
  misc_feature (1)..(25): SEQ ID NO: 4834; WAN0249Y7_at; Start 73; Stop 97
tccctcaactgtagcaaaaagccat

SEQ ID NO: 38113 - DNA, 25 bp, Artificial
  probe
  misc_feature (1)..(25): SEQ ID NO: 4834; WAN0249Y7_at; Start 46; Stop 70
cacaaaagccgataactgcaaaccc

SEQ ID NO: 38114 - DNA, 25 bp, Artificial
  probe
  misc_feature (1)..(25): SEQ ID NO: 4834; WAN0249Y7_at; Start 79; Stop 103
aactgtagcaaaaagccatccgaag

SEQ ID NO: 38115 - DNA, 25 bp, Artificial
  probe
  misc_feature (1)..(25): SEQ ID NO: 4834; WAN0249Y7_at; Start 36; Stop 60
gcaattatagcacaaaagccgataa

SEQ ID NO: 38116 - DNA, 25 bp, Artificial
  probe
  misc_feature (1)..(25): SEQ ID NO: 4834; WAN0249Y7_at; Start 44; Stop 68
agcacaaaagccgataactgcaaac

SEQ ID NO: 38117 - DNA, 25 bp, Artificial
  probe
  misc_feature (1)..(25): SEQ ID NO: 4834; WAN0249Y7_at; Start 32; Stop 56
tatagcaattatagcacaaaagccg

SEQ ID NO: 38118 - DNA, 25 bp, Artificial
  probe
  misc_feature (1)..(25): SEQ ID NO: 4834; WAN0249Y7_at; Start 88; Stop 112
aaaaagccatccgaagatgactttt

SEQ ID NO: 38119 - DNA, 25 bp, Artificial
  probe
  misc_feature (1)..(25): SEQ ID NO: 4834; WAN0249Y7_at; Start 40; Stop 64
ttatagcacaaaagccgataactgc

SEQ ID NO: 38120 - DNA, 25 bp, Artificial
  probe
  misc_feature (1)..(25): SEQ ID NO: 4834; WAN0249Y7_at; Start 83; Stop 107
gtagcaaaaagccatccgaagatga

SEQ ID NO: 38121 - DNA, 25 bp, Artificial
  probe
  misc_feature (1)..(25): SEQ ID NO: 4834; WAN0249Y7_at; Start 81; Stop 105
ctgtagcaaaaagccatccgaagat

SEQ ID NO: 38122 - DNA, 25 bp, Artificial
  probe
  misc_feature (1)..(25): SEQ ID NO: 4834; WAN0249Y7_at; Start 47; Stop 71
acaaaagccgataactgcaaaccct

SEQ ID NO: 38123 - DNA, 25 bp, Artificial
  probe
  misc_feature (1)..(25): SEQ ID NO: 4834; WAN0249Y7_at; Start 12; Stop 36
cctcttgctttttactatattatag

SEQ ID NO: 38124 - DNA, 25 bp, Artificial
  probe
  misc_feature (1)..(25): SEQ ID NO: 4834; WAN0249Y7_at; Start 85; Stop 109
agcaaaaagccatccgaagatgact

SEQ ID NO: 38125 - DNA, 25 bp, Artificial
  probe
  misc_feature (1)..(25): SEQ ID NO: 4834; WAN0249Y7_at; Start 35; Stop 59
agcaattatagcacaaaagccgata

SEQ ID NO: 38126 - DNA, 25 bp, Artificial
  probe
  misc_feature (1)..(25): SEQ ID NO: 4834; WAN0249Y7_at; Start 77; Stop 101
tcaactgtagcaaaaagccatccga

SEQ ID NO: 38127 - DNA, 25 bp, Artificial
  probe
  misc_feature (1)..(25): SEQ ID NO: 4834; WAN0249Y7_at; Start 76; Stop 100
ctcaactgtagcaaaaagccatccg

SEQ ID NO: 38128 - DNA, 25 bp, Artificial
  probe
  misc_feature (1)..(25): SEQ ID NO: 4834; WAN0249Y7_at; Start 41; Stop 65
tatagcacaaaagccgataactgca

SEQ ID NO: 38129 - DNA, 25 bp, Artificial
  probe
  misc_feature (1)..(25): SEQ ID NO: 4834; WAN0249Y7_at; Start 62; Stop 86
tgcaaaccctttccctcaactgtag

SEQ ID NO: 38130 - DNA, 25 bp, Artificial
  probe
  misc_feature (1)..(25): SEQ ID NO: 4834; WAN0249Y7_at; Start 78; Stop 102
caactgtagcaaaaagccatccgaa

SEQ ID NO: 38131 - DNA, 25 bp, Artificial
  probe
  misc_feature (1)..(25): SEQ ID NO: 4834; WAN0249Y7_at; Start 48; Stop 72
caaaagccgataactgcaaaccctt

SEQ ID NO: 38132 - DNA, 25 bp, Artificial
  probe
  misc_feature (1)..(25): SEQ ID NO: 4834; WAN0249Y7_at; Start 71; Stop 95
tttccctcaactgtagcaaaaagcc

SEQ ID NO: 38133 - DNA, 25 bp, Artificial
  probe
  misc_feature (1)..(25): SEQ ID NO: 4834; WAN0249Y7_at; Start 33; Stop 57
atagcaattatagcacaaaagccga

SEQ ID NO: 38134 - DNA, 25 bp, Artificial
  probe
  misc_feature (1)..(25): SEQ ID NO: 4834; WAN0249Y7_at; Start 34; Stop 58
tagcaattatagcacaaaagccgat

SEQ ID NO: 38135 - DNA, 25 bp, Artificial
  probe
  misc_feature (1)..(25): SEQ ID NO: 4834; WAN0249Y7_at; Start 45; Stop 69
gcacaaaagccgataactgcaaacc

SEQ ID NO: 38136 - DNA, 25 bp, Artificial
  probe
  misc_feature (1)..(25): SEQ ID NO: 4834; WAN0249Y7_at; Start 37; Stop 61
caattatagcacaaaagccgataac

SEQ ID NO: 38137 - DNA, 25 bp, Artificial
  probe
  misc_feature (1)..(25): SEQ ID NO: 4834; WAN0249Y7_at; Start 91; Stop 115
aagccatccgaagatgacttttttg

SEQ ID NO: 38138 - DNA, 25 bp, Artificial
  probe
  misc_feature (1)..(25): SEQ ID NO: 4834; WAN0249Y7_at; Start 84; Stop 108
tagcaaaaagccatccgaagatgac

SEQ ID NO: 38139 - DNA, 25 bp, Artificial
  probe
  misc_feature (1)..(25): SEQ ID NO: 4834; WAN0249Y7_at; Start 69; Stop 93
cctttccctcaactgtagcaaaaag

SEQ ID NO: 38140 - DNA, 25 bp, Artificial
  probe
  misc_feature (1)..(25): SEQ ID NO: 4834; WAN0249Y7_at; Start 86; Stop 110
gcaaaaagccatccgaagatgactt

SEQ ID NO: 38141 - DNA, 25 bp, Artificial
  probe
  misc_feature (1)..(25): SEQ ID NO: 4834; WAN0249Y7_at; Start 24; Stop 48
tactatattatagcaattatagcac

SEQ ID NO: 38142 - DNA, 25 bp, Artificial
  probe
  misc_feature (1)..(25): SEQ ID NO: 4834; WAN0249Y7_at; Start 72; Stop 96
ttccctcaactgtagcaaaaagcca

SEQ ID NO: 38143 - DNA, 25 bp, Artificial
  probe
  misc_feature (1)..(25): SEQ ID NO: 4834; WAN0249Y7_at; Start 80; Stop 104
actgtagcaaaaagccatccgaaga

SEQ ID NO: 38144 - DNA, 25 bp, Artificial
  probe
  misc_feature (1)..(25): SEQ ID NO: 4834; WAN0249Y7_at; Start 75; Stop 99
cctcaactgtagcaaaaagccatcc

SEQ ID NO: 38145 - DNA, 25 bp, Artificial
  probe
  misc_feature (1)..(25): SEQ ID NO: 4834; WAN0249Y7_at; Start 56; Stop 80
gataactgcaaaccctttccctcaa

SEQ ID NO: 38146 - DNA, 25 bp, Artificial
  probe
  misc_feature (1)..(25): SEQ ID NO: 4695; WAN0249Y8_at; Start 112; Stop 136
actagaattcgaaaaaacgccacat

SEQ ID NO: 38147 - DNA, 25 bp, Artificial
  probe
  misc_feature (1)..(25): SEQ ID NO: 4695; WAN0249Y8_at; Start 31; Stop 55
ccaagactttgcaaggggtaagtga

SEQ ID NO: 38148 - DNA, 25 bp, Artificial
  probe
  misc_feature (1)..(25): SEQ ID NO: 4695; WAN0249Y8_at; Start 6; Stop 30
tgttcctccttttggtctaatgacc

SEQ ID NO: 38149 - DNA, 25 bp, Artificial
  probe
  misc_feature (1)..(25): SEQ ID NO: 4695; WAN0249Y8_at; Start 117; Stop 141
aattcgaaaaaacgccacatgggcg

SEQ ID NO: 38150 - DNA, 25 bp, Artificial
  probe
  misc_feature (1)..(25): SEQ ID NO: 4695; WAN0249Y8_at; Start 56; Stop 80
ggttcgctcacaataaactattata

SEQ ID NO: 38151 - DNA, 25 bp, Artificial
  probe
  misc_feature (1)..(25): SEQ ID NO: 4695; WAN0249Y8_at; Start 11; Stop 35
ctccttttggtctaatgaccccaag

SEQ ID NO: 38152 - DNA, 25 bp, Artificial
  probe
  misc_feature (1)..(25): SEQ ID NO: 4695; WAN0249Y8_at; Start 20; Stop 44
gtctaatgaccccaagactttgcaa

SEQ ID NO: 38153 - DNA, 25 bp, Artificial
  probe
  misc_feature (1)..(25): SEQ ID NO: 4695; WAN0249Y8_at; Start 60; Stop 84
cgctcacaataaactattatactag

SEQ ID NO: 38154 - DNA, 25 bp, Artificial
  probe
  misc_feature (1)..(25): SEQ ID NO: 4695; WAN0249Y8_at; Start 17; Stop 41
ttggtctaatgaccccaagactttg

SEQ ID NO: 38155 - DNA, 25 bp, Artificial
  probe
  misc_feature (1)..(25): SEQ ID NO: 4695; WAN0249Y8_at; Start 47; Stop 71
ggtaagtgaggttcgctcacaataa

SEQ ID NO: 38156 - DNA, 25 bp, Artificial
  probe
  misc_feature (1)..(25): SEQ ID NO: 4695; WAN0249Y8_at; Start 23; Stop 47
taatgaccccaagactttgcaaggg

SEQ ID NO: 38157 - DNA, 25 bp, Artificial
  probe
  misc_feature (1)..(25): SEQ ID NO: 4695; WAN0249Y8_at; Start 4; Stop 28
tatgttcctccttttggtctaatga

SEQ ID NO: 38158 - DNA, 25 bp, Artificial
  probe
  misc_feature (1)..(25): SEQ ID NO: 4695; WAN0249Y8_at; Start 61; Stop 85
gctcacaataaactattatactaga

SEQ ID NO: 38159 - DNA, 25 bp, Artificial
  probe
  misc_feature (1)..(25): SEQ ID NO: 4695; WAN0249Y8_at; Start 64; Stop 88
cacaataaactattatactagaaaa

SEQ ID NO: 38160 - DNA, 25 bp, Artificial
  probe
  misc_feature (1)..(25): SEQ ID NO: 4695; WAN0249Y8_at; Start 57; Stop 81
gttcgctcacaataaactattatac

SEQ ID NO: 38161 - DNA, 25 bp, Artificial
  probe
  misc_feature (1)..(25): SEQ ID NO: 4695; WAN0249Y8_at; Start 125; Stop 149
aaaacgccacatgggcgttttcctg

SEQ ID NO: 38162 - DNA, 25 bp, Artificial
  probe
  misc_feature (1)..(25): SEQ ID NO: 4695; WAN0249Y8_at; Start 2; Stop 26
gatatgttcctccttttggtctaat

SEQ ID NO: 38163 - DNA, 25 bp, Artificial
  probe
  misc_feature (1)..(25): SEQ ID NO: 4695; WAN0249Y8_at; Start 50; Stop 74
aagtgaggttcgctcacaataaact

SEQ ID NO: 38164 - DNA, 25 bp, Artificial
  probe
  misc_feature (1)..(25): SEQ ID NO: 4695; WAN0249Y8_at; Start 9; Stop 33
tcctccttttggtctaatgacccca

SEQ ID NO: 38165 - DNA, 25 bp, Artificial
  probe
  misc_feature (1)..(25): SEQ ID NO: 4695; WAN0249Y8_at; Start 54; Stop 78
gaggttcgctcacaataaactatta

SEQ ID NO: 38166 - DNA, 25 bp, Artificial
  probe
  misc_feature (1)..(25): SEQ ID NO: 4695; WAN0249Y8_at; Start 46; Stop 70
gggtaagtgaggttcgctcacaata

SEQ ID NO: 38167 - DNA, 25 bp, Artificial
  probe
  misc_feature (1)..(25): SEQ ID NO: 4695; WAN0249Y8_at; Start 114; Stop 138
tagaattcgaaaaaacgccacatgg

SEQ ID NO: 38168 - DNA, 25 bp, Artificial
  probe
  misc_feature (1)..(25): SEQ ID NO: 4695; WAN0249Y8_at; Start 21; Stop 45
tctaatgaccccaagactttgcaag

SEQ ID NO: 38169 - DNA, 25 bp, Artificial
  probe
  misc_feature (1)..(25): SEQ ID NO: 4695; WAN0249Y8_at; Start 53; Stop 77
tgaggttcgctcacaataaactatt

SEQ ID NO: 38170 - DNA, 25 bp, Artificial
  probe
  misc_feature (1)..(25): SEQ ID NO: 4695; WAN0249Y8_at; Start 115; Stop 139
agaattcgaaaaaacgccacatggg

SEQ ID NO: 38171 - DNA, 25 bp, Artificial
  probe
  misc_feature (1)..(25): SEQ ID NO: 4695; WAN0249Y8_at; Start 113; Stop 137
ctagaattcgaaaaaacgccacatg

SEQ ID NO: 38172 - DNA, 25 bp, Artificial
  probe
  misc_feature (1)..(25): SEQ ID NO: 4695; WAN0249Y8_at; Start 51; Stop 75
agtgaggttcgctcacaataaacta

SEQ ID NO: 38173 - DNA, 25 bp, Artificial
  probe
  misc_feature (1)..(25): SEQ ID NO: 4695; WAN0249Y8_at; Start 1; Stop 25
tgatatgttcctccttttggtctaa

SEQ ID NO: 38174 - DNA, 25 bp, Artificial
  probe
  misc_feature (1)..(25): SEQ ID NO: 4695; WAN0249Y8_at; Start 14; Stop 38
cttttggtctaatgaccccaagact

SEQ ID NO: 38175 - DNA, 25 bp, Artificial
  probe
  misc_feature (1)..(25): SEQ ID NO: 4695; WAN0249Y8_at; Start 111; Stop 135
cactagaattcgaaaaaacgccaca

SEQ ID NO: 38176 - DNA, 25 bp, Artificial
  probe
  misc_feature (1)..(25): SEQ ID NO: 4695; WAN0249Y8_at; Start 22; Stop 46
ctaatgaccccaagactttgcaagg

SEQ ID NO: 38177 - DNA, 25 bp, Artificial
  probe
  misc_feature (1)..(25): SEQ ID NO: 4695; WAN0249Y8_at; Start 12; Stop 36
tccttttggtctaatgaccccaaga

SEQ ID NO: 38178 - DNA, 25 bp, Artificial
  probe
  misc_feature (1)..(25): SEQ ID NO: 4695; WAN0249Y8_at; Start 116; Stop 140
gaattcgaaaaaacgccacatgggc

SEQ ID NO: 38179 - DNA, 25 bp, Artificial
  probe
  misc_feature (1)..(25): SEQ ID NO: 4695; WAN0249Y8_at; Start 48; Stop 72
gtaagtgaggttcgctcacaataaa

SEQ ID NO: 38180 - DNA, 25 bp, Artificial
  probe
  misc_feature (1)..(25): SEQ ID NO: 3545; WAN0249Y9_at; Start 84; Stop 108
attgtgagcgaacctcacttacccc

SEQ ID NO: 38181 - DNA, 25 bp, Artificial
  probe
  misc_feature (1)..(25): SEQ ID NO: 3545; WAN0249Y9_at; Start 32; Stop 56
gaattctagtgtttttacttgcgta

SEQ ID NO: 38182 - DNA, 25 bp, Artificial
  probe
  misc_feature (1)..(25): SEQ ID NO: 3545; WAN0249Y9_at; Start 78; Stop 102
tagtttattgtgagcgaacctcact

SEQ ID NO: 38183 - DNA, 25 bp, Artificial
  probe
  misc_feature (1)..(25): SEQ ID NO: 3545; WAN0249Y9_at; Start 85; Stop 109
ttgtgagcgaacctcacttacccct

SEQ ID NO: 38184 - DNA, 25 bp, Artificial
  probe
  misc_feature (1)..(25): SEQ ID NO: 3545; WAN0249Y9_at; Start 79; Stop 103
agtttattgtgagcgaacctcactt

SEQ ID NO: 38185 - DNA, 25 bp, Artificial
  probe
  misc_feature (1)..(25): SEQ ID NO: 3545; WAN0249Y9_at; Start 74; Stop 98
ataatagtttattgtgagcgaacct

SEQ ID NO: 38186 - DNA, 25 bp, Artificial
  probe
  misc_feature (1)..(25): SEQ ID NO: 3545; WAN0249Y9_at; Start 81; Stop 105
tttattgtgagcgaacctcacttac

SEQ ID NO: 38187 - DNA, 25 bp, Artificial
  probe
  misc_feature (1)..(25): SEQ ID NO: 3545; WAN0249Y9_at; Start 108; Stop 132
cttgcaaagtcttggggtcattaga

SEQ ID NO: 38188 - DNA, 25 bp, Artificial
  probe
  misc_feature (1)..(25): SEQ ID NO: 3545; WAN0249Y9_at; Start 14; Stop 38
cccatgtggcgttttttcgaattct

SEQ ID NO: 38189 - DNA, 25 bp, Artificial
  probe
  misc_feature (1)..(25): SEQ ID NO: 3545; WAN0249Y9_at; Start 98; Stop 122
tcacttaccccttgcaaagtcttgg

SEQ ID NO: 38190 - DNA, 25 bp, Artificial
  probe
  misc_feature (1)..(25): SEQ ID NO: 3545; WAN0249Y9_at; Start 86; Stop 110
tgtgagcgaacctcacttacccctt

SEQ ID NO: 38191 - DNA, 25 bp, Artificial
  probe
  misc_feature (1)..(25): SEQ ID NO: 3545; WAN0249Y9_at; Start 13; Stop 37
gcccatgtggcgttttttcgaattc

SEQ ID NO: 38192 - DNA, 25 bp, Artificial
  probe
  misc_feature (1)..(25): SEQ ID NO: 3545; WAN0249Y9_at; Start 83; Stop 107
tattgtgagcgaacctcacttaccc

SEQ ID NO: 38193 - DNA, 25 bp, Artificial
  probe
  misc_feature (1)..(25): SEQ ID NO: 3545; WAN0249Y9_at; Start 30; Stop 54
tcgaattctagtgtttttacttgcg

SEQ ID NO: 38194 - DNA, 25 bp, Artificial
  probe
  misc_feature (1)..(25): SEQ ID NO: 3545; WAN0249Y9_at; Start 16; Stop 40
catgtggcgttttttcgaattctag

SEQ ID NO: 38195 - DNA, 25 bp, Artificial
  probe
  misc_feature (1)..(25): SEQ ID NO: 3545; WAN0249Y9_at; Start 4; Stop 28
caggaaaacgcccatgtggcgtttt

SEQ ID NO: 38196 - DNA, 25 bp, Artificial
  probe
  misc_feature (1)..(25): SEQ ID NO: 3545; WAN0249Y9_at; Start 77; Stop 101
atagtttattgtgagcgaacctcac

SEQ ID NO: 38197 - DNA, 25 bp, Artificial
  probe
  misc_feature (1)..(25): SEQ ID NO: 3545; WAN0249Y9_at; Start 76; Stop 100
aatagtttattgtgagcgaacctca

SEQ ID NO: 38198 - DNA, 25 bp, Artificial
  probe
  misc_feature (1)..(25): SEQ ID NO: 3545; WAN0249Y9_at; Start 12; Stop 36
cgcccatgtggcgttttttcgaatt

SEQ ID NO: 38199 - DNA, 25 bp, Artificial
  probe
  misc_feature (1)..(25): SEQ ID NO: 3545; WAN0249Y9_at; Start 128; Stop 152
ttagaccaaaaggaggaacatatca

SEQ ID NO: 38200 - DNA, 25 bp, Artificial
  probe
  misc_feature (1)..(25): SEQ ID NO: 3545; WAN0249Y9_at; Start 125; Stop 149
tcattagaccaaaaggaggaacata

SEQ ID NO: 38201 - DNA, 25 bp, Artificial
  probe
  misc_feature (1)..(25): SEQ ID NO: 3545; WAN0249Y9_at; Start 75; Stop 99
taatagtttattgtgagcgaacctc

SEQ ID NO: 38202 - DNA, 25 bp, Artificial
  probe
  misc_feature (1)..(25): SEQ ID NO: 3545; WAN0249Y9_at; Start 68; Stop 92
tctagtataatagtttattgtgagc

SEQ ID NO: 38203 - DNA, 25 bp, Artificial
  probe
  misc_feature (1)..(25): SEQ ID NO: 3545; WAN0249Y9_at; Start 73; Stop 97
tataatagtttattgtgagcgaacc

SEQ ID NO: 38204 - DNA, 25 bp, Artificial
  probe
  misc_feature (1)..(25): SEQ ID NO: 3545; WAN0249Y9_at; Start 126; Stop 150
cattagaccaaaaggaggaacatat

SEQ ID NO: 38205 - DNA, 25 bp, Artificial
  probe
  misc_feature (1)..(25): SEQ ID NO: 3545; WAN0249Y9_at; Start 15; Stop 39
ccatgtggcgttttttcgaattcta

SEQ ID NO: 38206 - DNA, 25 bp, Artificial
  probe
  misc_feature (1)..(25): SEQ ID NO: 3545; WAN0249Y9_at; Start 124; Stop 148
gtcattagaccaaaaggaggaacat

SEQ ID NO: 38207 - DNA, 25 bp, Artificial
  probe
  misc_feature (1)..(25): SEQ ID NO: 3545; WAN0249Y9_at; Start 99; Stop 123
cacttaccccttgcaaagtcttggg

SEQ ID NO: 38208 - DNA, 25 bp, Artificial
  probe
  misc_feature (1)..(25): SEQ ID NO: 3545; WAN0249Y9_at; Start 82; Stop 106
ttattgtgagcgaacctcacttacc

SEQ ID NO: 38209 - DNA, 25 bp, Artificial
  probe
  misc_feature (1)..(25): SEQ ID NO: 3545; WAN0249Y9_at; Start 87; Stop 111
gtgagcgaacctcacttaccccttg

SEQ ID NO: 38210 - DNA, 25 bp, Artificial
  probe
  misc_feature (1)..(25): SEQ ID NO: 3545; WAN0249Y9_at; Start 123; Stop 147
ggtcattagaccaaaaggaggaaca

SEQ ID NO: 38211 - DNA, 25 bp, Artificial
  probe
  misc_feature (1)..(25): SEQ ID NO: 3545; WAN0249Y9_at; Start 127; Stop 151
attagaccaaaaggaggaacatatc

SEQ ID NO: 38212 - DNA, 25 bp, Artificial
  probe
  misc_feature (1)..(25): SEQ ID NO: 3545; WAN0249Y9_at; Start 106; Stop 130
cccttgcaaagtcttggggtcatta

SEQ ID NO: 38213 - DNA, 25 bp, Artificial
  probe
  misc_feature (1)..(25): SEQ ID NO: 3545; WAN0249Y9_at; Start 18; Stop 42
tgtggcgttttttcgaattctagtg

SEQ ID NO: 38214 - DNA, 25 bp, Artificial
  probe
  misc_feature (1)..(25): SEQ ID NO: 4345; WAN0249YA_at; Start 16; Stop 40
atagtataccggaagagtgaaagga

SEQ ID NO: 38215 - DNA, 25 bp, Artificial
  probe
  misc_feature (1)..(25): SEQ ID NO: 4345; WAN0249YA_at; Start 45; Stop 69
ataatggagcggttacaaagaacct

SEQ ID NO: 38216 - DNA, 25 bp, Artificial
  probe
  misc_feature (1)..(25): SEQ ID NO: 4345; WAN0249YA_at; Start 38; Stop 62
ggattttataatggagcggttacaa

SEQ ID NO: 38217 - DNA, 25 bp, Artificial
  probe
  misc_feature (1)..(25): SEQ ID NO: 4345; WAN0249YA_at; Start 74; Stop 98
tctattaaacagtatactatgaaaa

SEQ ID NO: 38218 - DNA, 25 bp, Artificial
  probe
  misc_feature (1)..(25): SEQ ID NO: 4345; WAN0249YA_at; Start 71; Stop 95
ctttctattaaacagtatactatga

SEQ ID NO: 38219 - DNA, 25 bp, Artificial
  probe
  misc_feature (1)..(25): SEQ ID NO: 4345; WAN0249YA_at; Start 81; Stop 105
aacagtatactatgaaaatgtgaaa

SEQ ID NO: 38220 - DNA, 25 bp, Artificial
  probe
  misc_feature (1)..(25): SEQ ID NO: 4345; WAN0249YA_at; Start 90; Stop 114
ctatgaaaatgtgaaaatttaacat

SEQ ID NO: 38221 - DNA, 25 bp, Artificial
  probe
  misc_feature (1)..(25): SEQ ID NO: 4345; WAN0249YA_at; Start 83; Stop 107
cagtatactatgaaaatgtgaaaat

SEQ ID NO: 38222 - DNA, 25 bp, Artificial
  probe
  misc_feature (1)..(25): SEQ ID NO: 4345; WAN0249YA_at; Start 80; Stop 104
aaacagtatactatgaaaatgtgaa

SEQ ID NO: 38223 - DNA, 25 bp, Artificial
  probe
  misc_feature (1)..(25): SEQ ID NO: 4345; WAN0249YA_at; Start 78; Stop 102
ttaaacagtatactatgaaaatgtg

SEQ ID NO: 38224 - DNA, 25 bp, Artificial
  probe
  misc_feature (1)..(25): SEQ ID NO: 4345; WAN0249YA_at; Start 15; Stop 39
aatagtataccggaagagtgaaagg

SEQ ID NO: 38225 - DNA, 25 bp, Artificial
  probe
  misc_feature (1)..(25): SEQ ID NO: 4345; WAN0249YA_at; Start 44; Stop 68
tataatggagcggttacaaagaacc

SEQ ID NO: 38226 - DNA, 25 bp, Artificial
  probe
  misc_feature (1)..(25): SEQ ID NO: 4345; WAN0249YA_at; Start 31; Stop 55
agtgaaaggattttataatggagcg

SEQ ID NO: 38227 - DNA, 25 bp, Artificial
  probe
  misc_feature (1)..(25): SEQ ID NO: 4345; WAN0249YA_at; Start 40; Stop 64
attttataatggagcggttacaaag

SEQ ID NO: 38228 - DNA, 25 bp, Artificial
  probe
  misc_feature (1)..(25): SEQ ID NO: 4345; WAN0249YA_at; Start 76; Stop 100
tattaaacagtatactatgaaaatg

SEQ ID NO: 38229 - DNA, 25 bp, Artificial
  probe
  misc_feature (1)..(25): SEQ ID NO: 4345; WAN0249YA_at; Start 10; Stop 34
ttcctaatagtataccggaagagtg

SEQ ID NO: 38230 - DNA, 25 bp, Artificial
  probe
  misc_feature (1)..(25): SEQ ID NO: 4345; WAN0249YA_at; Start 27; Stop 51
gaagagtgaaaggattttataatgg

SEQ ID NO: 38231 - DNA, 25 bp, Artificial
  probe
  misc_feature (1)..(25): SEQ ID NO: 4345; WAN0249YA_at; Start 30; Stop 54
gagtgaaaggattttataatggagc

SEQ ID NO: 38232 - DNA, 25 bp, Artificial
  probe
  misc_feature (1)..(25): SEQ ID NO: 4345; WAN0249YA_at; Start 25; Stop 49
cggaagagtgaaaggattttataat

SEQ ID NO: 38233 - DNA, 25 bp, Artificial
  probe
  misc_feature (1)..(25): SEQ ID NO: 4345; WAN0249YA_at; Start 11; Stop 35
tcctaatagtataccggaagagtga

SEQ ID NO: 38234 - DNA, 25 bp, Artificial
  probe
  misc_feature (1)..(25): SEQ ID NO: 4345; WAN0249YA_at; Start 37; Stop 61
aggattttataatggagcggttaca

SEQ ID NO: 38235 - DNA, 25 bp, Artificial
  probe
  misc_feature (1)..(25): SEQ ID NO: 4345; WAN0249YA_at; Start 70; Stop 94
actttctattaaacagtatactatg

SEQ ID NO: 38236 - DNA, 25 bp, Artificial
  probe
  misc_feature (1)..(25): SEQ ID NO: 4345; WAN0249YA_at; Start 48; Stop 72
atggagcggttacaaagaacctact

SEQ ID NO: 38237 - DNA, 25 bp, Artificial
  probe
  misc_feature (1)..(25): SEQ ID NO: 4345; WAN0249YA_at; Start 33; Stop 57
tgaaaggattttataatggagcggt

SEQ ID NO: 38238 - DNA, 25 bp, Artificial
  probe
  misc_feature (1)..(25): SEQ ID NO: 4345; WAN0249YA_at; Start 12; Stop 36
cctaatagtataccggaagagtgaa

SEQ ID NO: 38239 - DNA, 25 bp, Artificial
  probe
  misc_feature (1)..(25): SEQ ID NO: 4345; WAN0249YA_at; Start 41; Stop 65
ttttataatggagcggttacaaaga

SEQ ID NO: 38240 - DNA, 25 bp, Artificial
  probe
  misc_feature (1)..(25): SEQ ID NO: 4345; WAN0249YA_at; Start 88; Stop 112
tactatgaaaatgtgaaaatttaac

SEQ ID NO: 38241 - DNA, 25 bp, Artificial
  probe
  misc_feature (1)..(25): SEQ ID NO: 4345; WAN0249YA_at; Start 18; Stop 42
agtataccggaagagtgaaaggatt

SEQ ID NO: 38242 - DNA, 25 bp, Artificial
  probe
  misc_feature (1)..(25): SEQ ID NO: 4345; WAN0249YA_at; Start 39; Stop 63
gattttataatggagcggttacaaa

SEQ ID NO: 38243 - DNA, 25 bp, Artificial
  probe
  misc_feature (1)..(25): SEQ ID NO: 4345; WAN0249YA_at; Start 17; Stop 41
tagtataccggaagagtgaaaggat

SEQ ID NO: 38244 - DNA, 25 bp, Artificial
  probe
  misc_feature (1)..(25): SEQ ID NO: 4345; WAN0249YA_at; Start 46; Stop 70
taatggagcggttacaaagaaccta

SEQ ID NO: 38245 - DNA, 25 bp, Artificial
  probe
  misc_feature (1)..(25): SEQ ID NO: 4345; WAN0249YA_at; Start 67; Stop 91
cctactttctattaaacagtatact

SEQ ID NO: 38246 - DNA, 25 bp, Artificial
  probe
  misc_feature (1)..(25): SEQ ID NO: 4345; WAN0249YA_at; Start 32; Stop 56
gtgaaaggattttataatggagcgg

SEQ ID NO: 38247 - DNA, 25 bp, Artificial
  probe
  misc_feature (1)..(25): SEQ ID NO: 4345; WAN0249YA_at; Start 79; Stop 103
taaacagtatactatgaaaatgtga

SEQ ID NO: 38248 - DNA, 25 bp, Artificial
  probe
  misc_feature (1)..(25): SEQ ID NO: 3294; WAN0249YB_at; Start 127; Stop 151
cactcttccggtatactattaggaa

SEQ ID NO: 38249 - DNA, 25 bp, Artificial
  probe
  misc_feature (1)..(25): SEQ ID NO: 3294; WAN0249YB_at; Start 59; Stop 83
cacattttcatagtatactgtttaa

SEQ ID NO: 38250 - DNA, 25 bp, Artificial
  probe
  misc_feature (1)..(25): SEQ ID NO: 3294; WAN0249YB_at; Start 119; Stop 143
aatcctttcactcttccggtatact

SEQ ID NO: 38251 - DNA, 25 bp, Artificial
  probe
  misc_feature (1)..(25): SEQ ID NO: 3294; WAN0249YB_at; Start 120; Stop 144
atcctttcactcttccggtatacta

SEQ ID NO: 38252 - DNA, 25 bp, Artificial
  probe
  misc_feature (1)..(25): SEQ ID NO: 3294; WAN0249YB_at; Start 107; Stop 131
gctccattataaaatcctttcactc

SEQ ID NO: 38253 - DNA, 25 bp, Artificial
  probe
  misc_feature (1)..(25): SEQ ID NO: 3294; WAN0249YB_at; Start 92; Stop 116
aggttctttgtaaccgctccattat

SEQ ID NO: 38254 - DNA, 25 bp, Artificial
  probe
  misc_feature (1)..(25): SEQ ID NO: 3294; WAN0249YB_at; Start 89; Stop 113
agtaggttctttgtaaccgctccat

SEQ ID NO: 38255 - DNA, 25 bp, Artificial
  probe
  misc_feature (1)..(25): SEQ ID NO: 3294; WAN0249YB_at; Start 98; Stop 122
tttgtaaccgctccattataaaatc

SEQ ID NO: 38256 - DNA, 25 bp, Artificial
  probe
  misc_feature (1)..(25): SEQ ID NO: 3294; WAN0249YB_at; Start 121; Stop 145
tcctttcactcttccggtatactat

SEQ ID NO: 38257 - DNA, 25 bp, Artificial
  probe
  misc_feature (1)..(25): SEQ ID NO: 3294; WAN0249YB_at; Start 61; Stop 85
cattttcatagtatactgtttaata

SEQ ID NO: 38258 - DNA, 25 bp, Artificial
  probe
  misc_feature (1)..(25): SEQ ID NO: 3294; WAN0249YB_at; Start 112; Stop 136
attataaaatcctttcactcttccg

SEQ ID NO: 38259 - DNA, 25 bp, Artificial
  probe
  misc_feature (1)..(25): SEQ ID NO: 3294; WAN0249YB_at; Start 96; Stop 120
tctttgtaaccgctccattataaaa

SEQ ID NO: 38260 - DNA, 25 bp, Artificial
  probe
  misc_feature (1)..(25): SEQ ID NO: 3294; WAN0249YB_at; Start 125; Stop 149
ttcactcttccggtatactattagg

SEQ ID NO: 38261 - DNA, 25 bp, Artificial
  probe
  misc_feature (1)..(25): SEQ ID NO: 3294; WAN0249YB_at; Start 66; Stop 90
tcatagtatactgtttaatagaaag

SEQ ID NO: 38262 - DNA, 25 bp, Artificial
  probe
  misc_feature (1)..(25): SEQ ID NO: 3294; WAN0249YB_at; Start 97; Stop 121
ctttgtaaccgctccattataaaat

SEQ ID NO: 38263 - DNA, 25 bp, Artificial
  probe
  misc_feature (1)..(25): SEQ ID NO: 3294; WAN0249YB_at; Start 106; Stop 130
cgctccattataaaatcctttcact

SEQ ID NO: 38264 - DNA, 25 bp, Artificial
  probe
  misc_feature (1)..(25): SEQ ID NO: 3294; WAN0249YB_at; Start 70; Stop 94
agtatactgtttaatagaaagtagg

SEQ ID NO: 38265 - DNA, 25 bp, Artificial
  probe
  misc_feature (1)..(25): SEQ ID NO: 3294; WAN0249YB_at; Start 99; Stop 123
ttgtaaccgctccattataaaatcc

SEQ ID NO: 38266 - DNA, 25 bp, Artificial
  probe
  misc_feature (1)..(25): SEQ ID NO: 3294; WAN0249YB_at; Start 69; Stop 93
tagtatactgtttaatagaaagtag

SEQ ID NO: 38267 - DNA, 25 bp, Artificial
  probe
  misc_feature (1)..(25): SEQ ID NO: 3294; WAN0249YB_at; Start 67; Stop 91
catagtatactgtttaatagaaagt

SEQ ID NO: 38268 - DNA, 25 bp, Artificial
  probe
  misc_feature (1)..(25): SEQ ID NO: 3294; WAN0249YB_at; Start 105; Stop 129
ccgctccattataaaatcctttcac

SEQ ID NO: 38269 - DNA, 25 bp, Artificial
  probe
  misc_feature (1)..(25): SEQ ID NO: 3294; WAN0249YB_at; Start 110; Stop 134
ccattataaaatcctttcactcttc

SEQ ID NO: 38270 - DNA, 25 bp, Artificial
  probe
  misc_feature (1)..(25): SEQ ID NO: 3294; WAN0249YB_at; Start 48; Stop 72
tgttaaattttcacattttcatagt

SEQ ID NO: 38271 - DNA, 25 bp, Artificial
  probe
  misc_feature (1)..(25): SEQ ID NO: 3294; WAN0249YB_at; Start 126; Stop 150
tcactcttccggtatactattagga

SEQ ID NO: 38272 - DNA, 25 bp, Artificial
  probe
  misc_feature (1)..(25): SEQ ID NO: 3294; WAN0249YB_at; Start 93; Stop 117
ggttctttgtaaccgctccattata

SEQ ID NO: 38273 - DNA, 25 bp, Artificial
  probe
  misc_feature (1)..(25): SEQ ID NO: 3294; WAN0249YB_at; Start 109; Stop 133
tccattataaaatcctttcactctt

SEQ ID NO: 38274 - DNA, 25 bp, Artificial
  probe
  misc_feature (1)..(25): SEQ ID NO: 3294; WAN0249YB_at; Start 52; Stop 76
aaattttcacattttcatagtatac

SEQ ID NO: 38275 - DNA, 25 bp, Artificial
  probe
  misc_feature (1)..(25): SEQ ID NO: 3294; WAN0249YB_at; Start 111; Stop 135
cattataaaatcctttcactcttcc

SEQ ID NO: 38276 - DNA, 25 bp, Artificial
  probe
  misc_feature (1)..(25): SEQ ID NO: 3294; WAN0249YB_at; Start 100; Stop 124
tgtaaccgctccattataaaatcct

SEQ ID NO: 38277 - DNA, 25 bp, Artificial
  probe
  misc_feature (1)..(25): SEQ ID NO: 3294; WAN0249YB_at; Start 91; Stop 115
taggttctttgtaaccgctccatta

SEQ ID NO: 38278 - DNA, 25 bp, Artificial
  probe
  misc_feature (1)..(25): SEQ ID NO: 3294; WAN0249YB_at; Start 54; Stop 78
attttcacattttcatagtatactg

SEQ ID NO: 38279 - DNA, 25 bp, Artificial
  probe
  misc_feature (1)..(25): SEQ ID NO: 3294; WAN0249YB_at; Start 122; Stop 146
cctttcactcttccggtatactatt

SEQ ID NO: 38280 - DNA, 25 bp, Artificial
  probe
  misc_feature (1)..(25): SEQ ID NO: 3294; WAN0249YB_at; Start 104; Stop 128
accgctccattataaaatcctttca

SEQ ID NO: 38281 - DNA, 25 bp, Artificial
  probe
  misc_feature (1)..(25): SEQ ID NO: 3294; WAN0249YB_at; Start 55; Stop 79
ttttcacattttcatagtatactgt

SEQ ID NO: 38282 - DNA, 25 bp, Artificial
  probe
  misc_feature (1)..(25): SEQ ID NO: 403; WAN0249YC_at; Start 54; Stop 78
tatgatataatggaaagagttagat

SEQ ID NO: 38283 - DNA, 25 bp, Artificial
  probe
  misc_feature (1)..(25): SEQ ID NO: 403; WAN0249YC_at; Start 58; Stop 82
atataatggaaagagttagattgaa

SEQ ID NO: 38284 - DNA, 25 bp, Artificial
  probe
  misc_feature (1)..(25): SEQ ID NO: 403; WAN0249YC_at; Start 52; Stop 76
tttatgatataatggaaagagttag

SEQ ID NO: 38285 - DNA, 25 bp, Artificial
  probe
  misc_feature (1)..(25): SEQ ID NO: 403; WAN0249YC_at; Start 39; Stop 63
gggatttgcctactttatgatataa

SEQ ID NO: 38286 - DNA, 25 bp, Artificial
  probe
  misc_feature (1)..(25): SEQ ID NO: 403; WAN0249YC_at; Start 60; Stop 84
ataatggaaagagttagattgaaag

SEQ ID NO: 38287 - DNA, 25 bp, Artificial
  probe
  misc_feature (1)..(25): SEQ ID NO: 403; WAN0249YC_at; Start 56; Stop 80
tgatataatggaaagagttagattg

SEQ ID NO: 38288 - DNA, 25 bp, Artificial
  probe
  misc_feature (1)..(25): SEQ ID NO: 403; WAN0249YC_at; Start 70; Stop 94
gagttagattgaaagaggtagtgag

SEQ ID NO: 38289 - DNA, 25 bp, Artificial
  probe
  misc_feature (1)..(25): SEQ ID NO: 403; WAN0249YC_at; Start 36; Stop 60
taggggatttgcctactttatgata

SEQ ID NO: 38290 - DNA, 25 bp, Artificial
  probe
  misc_feature (1)..(25): SEQ ID NO: 403; WAN0249YC_at; Start 62; Stop 86
aatggaaagagttagattgaaagag

SEQ ID NO: 38291 - DNA, 25 bp, Artificial
  probe
  misc_feature (1)..(25): SEQ ID NO: 403; WAN0249YC_at; Start 35; Stop 59
ataggggatttgcctactttatgat

SEQ ID NO: 38292 - DNA, 25 bp, Artificial
  probe
  misc_feature (1)..(25): SEQ ID NO: 403; WAN0249YC_at; Start 57; Stop 81
gatataatggaaagagttagattga

SEQ ID NO: 38293 - DNA, 25 bp, Artificial
  probe
  misc_feature (1)..(25): SEQ ID NO: 403; WAN0249YC_at; Start 55; Stop 79
atgatataatggaaagagttagatt

SEQ ID NO: 38294 - DNA, 25 bp, Artificial
  probe
  misc_feature (1)..(25): SEQ ID NO: 403; WAN0249YC_at; Start 68; Stop 92
aagagttagattgaaagaggtagtg

SEQ ID NO: 38295 - DNA, 25 bp, Artificial
  probe
  misc_feature (1)..(25): SEQ ID NO: 403; WAN0249YC_at; Start 61; Stop 85
taatggaaagagttagattgaaaga

SEQ ID NO: 38296 - DNA, 25 bp, Artificial
  probe
  misc_feature (1)..(25): SEQ ID NO: 403; WAN0249YC_at; Start 33; Stop 57
aaataggggatttgcctactttatg

SEQ ID NO: 38297 - DNA, 25 bp, Artificial
  probe
  misc_feature (1)..(25): SEQ ID NO: 403; WAN0249YC_at; Start 51; Stop 75
ctttatgatataatggaaagagtta

SEQ ID NO: 38298 - DNA, 25 bp, Artificial
  probe
  misc_feature (1)..(25): SEQ ID NO: 403; WAN0249YC_at; Start 37; Stop 61
aggggatttgcctactttatgatat

SEQ ID NO: 38299 - DNA, 25 bp, Artificial
  probe
  misc_feature (1)..(25): SEQ ID NO: 403; WAN0249YC_at; Start 65; Stop 89
ggaaagagttagattgaaagaggta

SEQ ID NO: 38300 - DNA, 25 bp, Artificial
  probe
  misc_feature (1)..(25): SEQ ID NO: 403; WAN0249YC_at; Start 34; Stop 58
aataggggatttgcctactttatga

SEQ ID NO: 38301 - DNA, 25 bp, Artificial
  probe
  misc_feature (1)..(25): SEQ ID NO: 403; WAN0249YC_at; Start 40; Stop 64
ggatttgcctactttatgatataat

SEQ ID NO: 38302 - DNA, 25 bp, Artificial
  probe
  misc_feature (1)..(25): SEQ ID NO: 403; WAN0249YC_at; Start 59; Stop 83
tataatggaaagagttagattgaaa

SEQ ID NO: 38303 - DNA, 25 bp, Artificial
  probe
  misc_feature (1)..(25): SEQ ID NO: 403; WAN0249YC_at; Start 67; Stop 91
aaagagttagattgaaagaggtagt

SEQ ID NO: 38304 - DNA, 25 bp, Artificial
  probe
  misc_feature (1)..(25): SEQ ID NO: 403; WAN0249YC_at; Start 64; Stop 88
tggaaagagttagattgaaagaggt

SEQ ID NO: 38305 - DNA, 25 bp, Artificial
  probe
  misc_feature (1)..(25): SEQ ID NO: 403; WAN0249YC_at; Start 63; Stop 87
atggaaagagttagattgaaagagg

SEQ ID NO: 38306 - DNA, 25 bp, Artificial
  probe
  misc_feature (1)..(25): SEQ ID NO: 403; WAN0249YC_at; Start 38; Stop 62
ggggatttgcctactttatgatata

SEQ ID NO: 38307 - DNA, 25 bp, Artificial
  probe
  misc_feature (1)..(25): SEQ ID NO: 403; WAN0249YC_at; Start 69; Stop 93
agagttagattgaaagaggtagtga

SEQ ID NO: 38308 - DNA, 25 bp, Artificial
  probe
  misc_feature (1)..(25): SEQ ID NO: 403; WAN0249YC_at; Start 53; Stop 77
ttatgatataatggaaagagttaga

SEQ ID NO: 38309 - DNA, 25 bp, Artificial
  probe
  misc_feature (1)..(25): SEQ ID NO: 403; WAN0249YC_at; Start 66; Stop 90
gaaagagttagattgaaagaggtag

SEQ ID NO: 38310 - DNA, 25 bp, Artificial
  probe
  misc_feature (1)..(25): SEQ ID NO: 3302; WAN0249YD_at; Start 13; Stop 37
ttcaatctaactctttccattatat

SEQ ID NO: 38311 - DNA, 25 bp, Artificial
  probe
  misc_feature (1)..(25): SEQ ID NO: 3302; WAN0249YD_at; Start 8; Stop 32
cctctttcaatctaactctttccat

SEQ ID NO: 38312 - DNA, 25 bp, Artificial
  probe
  misc_feature (1)..(25): SEQ ID NO: 3302; WAN0249YD_at; Start 14; Stop 38
tcaatctaactctttccattatatc

SEQ ID NO: 38313 - DNA, 25 bp, Artificial
  probe
  misc_feature (1)..(25): SEQ ID NO: 3302; WAN0249YD_at; Start 18; Stop 42
tctaactctttccattatatcataa

SEQ ID NO: 38314 - DNA, 25 bp, Artificial
  probe
  misc_feature (1)..(25): SEQ ID NO: 3302; WAN0249YD_at; Start 32; Stop 56
ttatatcataaagtaggcaaatccc

SEQ ID NO: 38315 - DNA, 25 bp, Artificial
  probe
  misc_feature (1)..(25): SEQ ID NO: 3302; WAN0249YD_at; Start 19; Stop 43
ctaactctttccattatatcataaa

SEQ ID NO: 38316 - DNA, 25 bp, Artificial
  probe
  misc_feature (1)..(25): SEQ ID NO: 3302; WAN0249YD_at; Start 12; Stop 36
tttcaatctaactctttccattata

SEQ ID NO: 38317 - DNA, 25 bp, Artificial
  probe
  misc_feature (1)..(25): SEQ ID NO: 3302; WAN0249YD_at; Start 15; Stop 39
caatctaactctttccattatatca

SEQ ID NO: 38318 - DNA, 25 bp, Artificial
  probe
  misc_feature (1)..(25): SEQ ID NO: 3302; WAN0249YD_at; Start 35; Stop 59
tatcataaagtaggcaaatccccta

SEQ ID NO: 38319 - DNA, 25 bp, Artificial
  probe
  misc_feature (1)..(25): SEQ ID NO: 3302; WAN0249YD_at; Start 37; Stop 61
tcataaagtaggcaaatcccctatt

SEQ ID NO: 38320 - DNA, 25 bp, Artificial
  probe
  misc_feature (1)..(25): SEQ ID NO: 3302; WAN0249YD_at; Start 17; Stop 41
atctaactctttccattatatcata

SEQ ID NO: 38321 - DNA, 25 bp, Artificial
  probe
  misc_feature (1)..(25): SEQ ID NO: 3302; WAN0249YD_at; Start 11; Stop 35
ctttcaatctaactctttccattat

SEQ ID NO: 38322 - DNA, 25 bp, Artificial
  probe
  misc_feature (1)..(25): SEQ ID NO: 3302; WAN0249YD_at; Start 34; Stop 58
atatcataaagtaggcaaatcccct

SEQ ID NO: 38323 - DNA, 25 bp, Artificial
  probe
  misc_feature (1)..(25): SEQ ID NO: 3302; WAN0249YD_at; Start 16; Stop 40
aatctaactctttccattatatcat

SEQ ID NO: 38324 - DNA, 25 bp, Artificial
  probe
  misc_feature (1)..(25): SEQ ID NO: 3302; WAN0249YD_at; Start 38; Stop 62
cataaagtaggcaaatcccctattt

SEQ ID NO: 38325 - DNA, 25 bp, Artificial
  probe
  misc_feature (1)..(25): SEQ ID NO: 3302; WAN0249YD_at; Start 33; Stop 57
tatatcataaagtaggcaaatcccc

SEQ ID NO: 38326 - DNA, 25 bp, Artificial
  probe
  misc_feature (1)..(25): SEQ ID NO: 3302; WAN0249YD_at; Start 31; Stop 55
attatatcataaagtaggcaaatcc

SEQ ID NO: 38327 - DNA, 25 bp, Artificial
  probe
  misc_feature (1)..(25): SEQ ID NO: 3302; WAN0249YD_at; Start 36; Stop 60
atcataaagtaggcaaatcccctat

SEQ ID NO: 38328 - DNA, 25 bp, Artificial
  probe
  misc_feature (1)..(25): SEQ ID NO: 3302; WAN0249YD_at; Start 9; Stop 33
ctctttcaatctaactctttccatt

SEQ ID NO: 38329 - DNA, 25 bp, Artificial
  probe
  misc_feature (1)..(25): SEQ ID NO: 3302; WAN0249YD_at; Start 20; Stop 44
taactctttccattatatcataaag

SEQ ID NO: 38330 - DNA, 25 bp, Artificial
  probe
  misc_feature (1)..(25): SEQ ID NO: 3302; WAN0249YD_at; Start 10; Stop 34
tctttcaatctaactctttccatta

SEQ ID NO: 38331 - DNA, 25 bp, Artificial
  probe
  misc_feature (1)..(25): SEQ ID NO: 3481; WAN0249YG_at; Start 28; Stop 52
cattgtttgactttccttagtattc

SEQ ID NO: 38332 - DNA, 25 bp, Artificial
  probe
  misc_feature (1)..(25): SEQ ID NO: 3481; WAN0249YG_at; Start 78; Stop 102
cacatatcggaataaactaaaggag

SEQ ID NO: 38333 - DNA, 25 bp, Artificial
  probe
  misc_feature (1)..(25): SEQ ID NO: 3481; WAN0249YG_at; Start 79; Stop 103
acatatcggaataaactaaaggaga

SEQ ID NO: 38334 - DNA, 25 bp, Artificial
  probe
  misc_feature (1)..(25): SEQ ID NO: 3481; WAN0249YG_at; Start 76; Stop 100
aacacatatcggaataaactaaagg

SEQ ID NO: 38335 - DNA, 25 bp, Artificial
  probe
  misc_feature (1)..(25): SEQ ID NO: 3481; WAN0249YG_at; Start 59; Stop 83
aactatatgtaaccggtaacacata

SEQ ID NO: 38336 - DNA, 25 bp, Artificial
  probe
  misc_feature (1)..(25): SEQ ID NO: 3481; WAN0249YG_at; Start 66; Stop 90
tgtaaccggtaacacatatcggaat

SEQ ID NO: 38337 - DNA, 25 bp, Artificial
  probe
  misc_feature (1)..(25): SEQ ID NO: 3481; WAN0249YG_at; Start 58; Stop 82
aaactatatgtaaccggtaacacat

SEQ ID NO: 38338 - DNA, 25 bp, Artificial
  probe
  misc_feature (1)..(25): SEQ ID NO: 3481; WAN0249YG_at; Start 63; Stop 87
atatgtaaccggtaacacatatcgg

SEQ ID NO: 38339 - DNA, 25 bp, Artificial
  probe
  misc_feature (1)..(25): SEQ ID NO: 3481; WAN0249YG_at; Start 64; Stop 88
tatgtaaccggtaacacatatcgga

SEQ ID NO: 38340 - DNA, 25 bp, Artificial
  probe
  misc_feature (1)..(25): SEQ ID NO: 3481; WAN0249YG_at; Start 35; Stop 59
tgactttccttagtattcggtataa

SEQ ID NO: 38341 - DNA, 25 bp, Artificial
  probe
  misc_feature (1)..(25): SEQ ID NO: 3481; WAN0249YG_at; Start 68; Stop 92
taaccggtaacacatatcggaataa

SEQ ID NO: 38342 - DNA, 25 bp, Artificial
  probe
  misc_feature (1)..(25): SEQ ID NO: 3481; WAN0249YG_at; Start 62; Stop 86
tatatgtaaccggtaacacatatcg

SEQ ID NO: 38343 - DNA, 25 bp, Artificial
  probe
  misc_feature (1)..(25): SEQ ID NO: 3481; WAN0249YG_at; Start 73; Stop 97
ggtaacacatatcggaataaactaa

SEQ ID NO: 38344 - DNA, 25 bp, Artificial
  probe
  misc_feature (1)..(25): SEQ ID NO: 3481; WAN0249YG_at; Start 82; Stop 106
tatcggaataaactaaaggagacaa

SEQ ID NO: 38345 - DNA, 25 bp, Artificial
  probe
  misc_feature (1)..(25): SEQ ID NO: 3481; WAN0249YG_at; Start 81; Stop 105
atatcggaataaactaaaggagaca

SEQ ID NO: 38346 - DNA, 25 bp, Artificial
  probe
  misc_feature (1)..(25): SEQ ID NO: 3481; WAN0249YG_at; Start 42; Stop 66
ccttagtattcggtataaactatat

SEQ ID NO: 38347 - DNA, 25 bp, Artificial
  probe
  misc_feature (1)..(25): SEQ ID NO: 3481; WAN0249YG_at; Start 72; Stop 96
cggtaacacatatcggaataaacta

SEQ ID NO: 38348 - DNA, 25 bp, Artificial
  probe
  misc_feature (1)..(25): SEQ ID NO: 3481; WAN0249YG_at; Start 34; Stop 58
ttgactttccttagtattcggtata

SEQ ID NO: 38349 - DNA, 25 bp, Artificial
  probe
  misc_feature (1)..(25): SEQ ID NO: 3481; WAN0249YG_at; Start 55; Stop 79
tataaactatatgtaaccggtaaca

SEQ ID NO: 38350 - DNA, 25 bp, Artificial
  probe
  misc_feature (1)..(25): SEQ ID NO: 3481; WAN0249YG_at; Start 77; Stop 101
acacatatcggaataaactaaagga

SEQ ID NO: 38351 - DNA, 25 bp, Artificial
  probe
  misc_feature (1)..(25): SEQ ID NO: 3481; WAN0249YG_at; Start 49; Stop 73
attcggtataaactatatgtaaccg

SEQ ID NO: 38352 - DNA, 25 bp, Artificial
  probe
  misc_feature (1)..(25): SEQ ID NO: 3481; WAN0249YG_at; Start 71; Stop 95
ccggtaacacatatcggaataaact

SEQ ID NO: 38353 - DNA, 25 bp, Artificial
  probe
  misc_feature (1)..(25): SEQ ID NO: 3481; WAN0249YG_at; Start 57; Stop 81
taaactatatgtaaccggtaacaca

SEQ ID NO: 38354 - DNA, 25 bp, Artificial
  probe
  misc_feature (1)..(25): SEQ ID NO: 3481; WAN0249YG_at; Start 67; Stop 91
gtaaccggtaacacatatcggaata

SEQ ID NO: 38355 - DNA, 25 bp, Artificial
  probe
  misc_feature (1)..(25): SEQ ID NO: 3481; WAN0249YG_at; Start 84; Stop 108
tcggaataaactaaaggagacaatc

SEQ ID NO: 38356 - DNA, 25 bp, Artificial
  probe
  misc_feature (1)..(25): SEQ ID NO: 3481; WAN0249YG_at; Start 1; Stop 25
cttagcgtgatttcttgtttctgag

SEQ ID NO: 38357 - DNA, 25 bp, Artificial
  probe
  misc_feature (1)..(25): SEQ ID NO: 3481; WAN0249YG_at; Start 85; Stop 109
cggaataaactaaaggagacaatca

SEQ ID NO: 38358 - DNA, 25 bp, Artificial
  probe
  misc_feature (1)..(25): SEQ ID NO: 3481; WAN0249YG_at; Start 65; Stop 89
atgtaaccggtaacacatatcggaa

SEQ ID NO: 38359 - DNA, 25 bp, Artificial
  probe
  misc_feature (1)..(25): SEQ ID NO: 3481; WAN0249YG_at; Start 29; Stop 53
attgtttgactttccttagtattcg

SEQ ID NO: 38360 - DNA, 25 bp, Artificial
  probe
  misc_feature (1)..(25): SEQ ID NO: 3481; WAN0249YG_at; Start 83; Stop 107
atcggaataaactaaaggagacaat

SEQ ID NO: 38361 - DNA, 25 bp, Artificial
  probe
  misc_feature (1)..(25): SEQ ID NO: 3481; WAN0249YG_at; Start 48; Stop 72
tattcggtataaactatatgtaacc

SEQ ID NO: 38362 - DNA, 25 bp, Artificial
  probe
  misc_feature (1)..(25): SEQ ID NO: 3481; WAN0249YG_at; Start 80; Stop 104
catatcggaataaactaaaggagac

SEQ ID NO: 38363 - DNA, 25 bp, Artificial
  probe
  misc_feature (1)..(25): SEQ ID NO: 3481; WAN0249YG_at; Start 86; Stop 110
ggaataaactaaaggagacaatcat

SEQ ID NO: 38364 - DNA, 25 bp, Artificial
  probe
  misc_feature (1)..(25): SEQ ID NO: 3481; WAN0249YG_at; Start 75; Stop 99
taacacatatcggaataaactaaag

SEQ ID NO: 38365 - DNA, 25 bp, Artificial
  probe
  misc_feature (1)..(25): SEQ ID NO: 1853; WAN0249YH_at; Start 16; Stop 40
agtttattccgatatgtgttaccgg

SEQ ID NO: 38366 - DNA, 25 bp, Artificial
  probe
  misc_feature (1)..(25): SEQ ID NO: 1853; WAN0249YH_at; Start 86; Stop 110
ctcagaaacaagaaatcacgctaag

SEQ ID NO: 38367 - DNA, 25 bp, Artificial
  probe
  misc_feature (1)..(25): SEQ ID NO: 1853; WAN0249YH_at; Start 24; Stop 48
ccgatatgtgttaccggttacatat

SEQ ID NO: 38368 - DNA, 25 bp, Artificial
  probe
  misc_feature (1)..(25): SEQ ID NO: 1853; WAN0249YH_at; Start 2; Stop 26
tgattgtctcctttagtttattccg

SEQ ID NO: 38369 - DNA, 25 bp, Artificial
  probe
  misc_feature (1)..(25): SEQ ID NO: 1853; WAN0249YH_at; Start 45; Stop 69
atatagtttataccgaatactaagg

SEQ ID NO: 38370 - DNA, 25 bp, Artificial
  probe
  misc_feature (1)..(25): SEQ ID NO: 1853; WAN0249YH_at; Start 5; Stop 29
ttgtctcctttagtttattccgata

SEQ ID NO: 38371 - DNA, 25 bp, Artificial
  probe
  misc_feature (1)..(25): SEQ ID NO: 1853; WAN0249YH_at; Start 60; Stop 84
aatactaaggaaagtcaaacaatgt

SEQ ID NO: 38372 - DNA, 25 bp, Artificial
  probe
  misc_feature (1)..(25): SEQ ID NO: 1853; WAN0249YH_at; Start 23; Stop 47
tccgatatgtgttaccggttacata

SEQ ID NO: 38373 - DNA, 25 bp, Artificial
  probe
  misc_feature (1)..(25): SEQ ID NO: 1853; WAN0249YH_at; Start 58; Stop 82
cgaatactaaggaaagtcaaacaat

SEQ ID NO: 38374 - DNA, 25 bp, Artificial
  probe
  misc_feature (1)..(25): SEQ ID NO: 1853; WAN0249YH_at; Start 38; Stop 62
cggttacatatagtttataccgaat

SEQ ID NO: 38375 - DNA, 25 bp, Artificial
  probe
  misc_feature (1)..(25): SEQ ID NO: 1853; WAN0249YH_at; Start 32; Stop 56
tgttaccggttacatatagtttata

SEQ ID NO: 38376 - DNA, 25 bp, Artificial
  probe
  misc_feature (1)..(25): SEQ ID NO: 1853; WAN0249YH_at; Start 28; Stop 52
tatgtgttaccggttacatatagtt

SEQ ID NO: 38377 - DNA, 25 bp, Artificial
  probe
  misc_feature (1)..(25): SEQ ID NO: 1853; WAN0249YH_at; Start 39; Stop 63
ggttacatatagtttataccgaata

SEQ ID NO: 38378 - DNA, 25 bp, Artificial
  probe
  misc_feature (1)..(25): SEQ ID NO: 1853; WAN0249YH_at; Start 7; Stop 31
gtctcctttagtttattccgatatg

SEQ ID NO: 38379 - DNA, 25 bp, Artificial
  probe
  misc_feature (1)..(25): SEQ ID NO: 1853; WAN0249YH_at; Start 19; Stop 43
ttattccgatatgtgttaccggtta

SEQ ID NO: 38380 - DNA, 25 bp, Artificial
  probe
  misc_feature (1)..(25): SEQ ID NO: 1853; WAN0249YH_at; Start 52; Stop 76
ttataccgaatactaaggaaagtca

SEQ ID NO: 38381 - DNA, 25 bp, Artificial
  probe
  misc_feature (1)..(25): SEQ ID NO: 1853; WAN0249YH_at; Start 42; Stop 66
tacatatagtttataccgaatacta

SEQ ID NO: 38382 - DNA, 25 bp, Artificial
  probe
  misc_feature (1)..(25): SEQ ID NO: 1853; WAN0249YH_at; Start 10; Stop 34
tcctttagtttattccgatatgtgt

SEQ ID NO: 38383 - DNA, 25 bp, Artificial
  probe
  misc_feature (1)..(25): SEQ ID NO: 1853; WAN0249YH_at; Start 8; Stop 32
tctcctttagtttattccgatatgt

SEQ ID NO: 38384 - DNA, 25 bp, Artificial
  probe
  misc_feature (1)..(25): SEQ ID NO: 1853; WAN0249YH_at; Start 30; Stop 54
tgtgttaccggttacatatagttta

SEQ ID NO: 38385 - DNA, 25 bp, Artificial
  probe
  misc_feature (1)..(25): SEQ ID NO: 1853; WAN0249YH_at; Start 11; Stop 35
cctttagtttattccgatatgtgtt

SEQ ID NO: 38386 - DNA, 25 bp, Artificial
  probe
  misc_feature (1)..(25): SEQ ID NO: 1853; WAN0249YH_at; Start 44; Stop 68
catatagtttataccgaatactaag

SEQ ID NO: 38387 - DNA, 25 bp, Artificial
  probe
  misc_feature (1)..(25): SEQ ID NO: 1853; WAN0249YH_at; Start 25; Stop 49
cgatatgtgttaccggttacatata

SEQ ID NO: 38388 - DNA, 25 bp, Artificial
  probe
  misc_feature (1)..(25): SEQ ID NO: 1853; WAN0249YH_at; Start 9; Stop 33
ctcctttagtttattccgatatgtg

SEQ ID NO: 38389 - DNA, 25 bp, Artificial
  probe
  misc_feature (1)..(25): SEQ ID NO: 1853; WAN0249YH_at; Start 59; Stop 83
gaatactaaggaaagtcaaacaatg

SEQ ID NO: 38390 - DNA, 25 bp, Artificial
  probe
  misc_feature (1)..(25): SEQ ID NO: 1853; WAN0249YH_at; Start 3; Stop 27
gattgtctcctttagtttattccga

SEQ ID NO: 38391 - DNA, 25 bp, Artificial
  probe
  misc_feature (1)..(25): SEQ ID NO: 1853; WAN0249YH_at; Start 20; Stop 44
tattccgatatgtgttaccggttac

SEQ ID NO: 38392 - DNA, 25 bp, Artificial
  probe
  misc_feature (1)..(25): SEQ ID NO: 1853; WAN0249YH_at; Start 21; Stop 45
attccgatatgtgttaccggttaca

SEQ ID NO: 38393 - DNA, 25 bp, Artificial
  probe
  misc_feature (1)..(25): SEQ ID NO: 1853; WAN0249YH_at; Start 53; Stop 77
tataccgaatactaaggaaagtcaa

SEQ ID NO: 38394 - DNA, 25 bp, Artificial
  probe
  misc_feature (1)..(25): SEQ ID NO: 1853; WAN0249YH_at; Start 22; Stop 46
ttccgatatgtgttaccggttacat

SEQ ID NO: 38395 - DNA, 25 bp, Artificial
  probe
  misc_feature (1)..(25): SEQ ID NO: 1853; WAN0249YH_at; Start 4; Stop 28
attgtctcctttagtttattccgat

SEQ ID NO: 38396 - DNA, 25 bp, Artificial
  probe
  misc_feature (1)..(25): SEQ ID NO: 1853; WAN0249YH_at; Start 15; Stop 39
tagtttattccgatatgtgttaccg

SEQ ID NO: 38397 - DNA, 25 bp, Artificial
  probe
  misc_feature (1)..(25): SEQ ID NO: 1853; WAN0249YH_at; Start 14; Stop 38
ttagtttattccgatatgtgttacc

SEQ ID NO: 38398 - DNA, 25 bp, Artificial
  probe
  misc_feature (1)..(25): SEQ ID NO: 1853; WAN0249YH_at; Start 40; Stop 64
gttacatatagtttataccgaatac

SEQ ID NO: 38399 - DNA, 25 bp, Artificial
  probe
  misc_feature (1)..(25): SEQ ID NO: 399; WAN0249YI_at; Start 41; Stop 65
caaggaaaagtttataatggaagat

SEQ ID NO: 38400 - DNA, 25 bp, Artificial
  probe
  misc_feature (1)..(25): SEQ ID NO: 399; WAN0249YI_at; Start 49; Stop 73
agtttataatggaagataaggagtt

SEQ ID NO: 38401 - DNA, 25 bp, Artificial
  probe
  misc_feature (1)..(25): SEQ ID NO: 399; WAN0249YI_at; Start 79; Stop 103
tagttatcaaaattgaatgaggaat

SEQ ID NO: 38402 - DNA, 25 bp, Artificial
  probe
  misc_feature (1)..(25): SEQ ID NO: 399; WAN0249YI_at; Start 80; Stop 104
agttatcaaaattgaatgaggaatc

SEQ ID NO: 38403 - DNA, 25 bp, Artificial
  probe
  misc_feature (1)..(25): SEQ ID NO: 399; WAN0249YI_at; Start 48; Stop 72
aagtttataatggaagataaggagt

SEQ ID NO: 38404 - DNA, 25 bp, Artificial
  probe
  misc_feature (1)..(25): SEQ ID NO: 399; WAN0249YI_at; Start 81; Stop 105
gttatcaaaattgaatgaggaatct

SEQ ID NO: 38405 - DNA, 25 bp, Artificial
  probe
  misc_feature (1)..(25): SEQ ID NO: 399; WAN0249YI_at; Start 78; Stop 102
ctagttatcaaaattgaatgaggaa

SEQ ID NO: 38406 - DNA, 25 bp, Artificial
  probe
  misc_feature (1)..(25): SEQ ID NO: 399; WAN0249YI_at; Start 47; Stop 71
aaagtttataatggaagataaggag

SEQ ID NO: 38407 - DNA, 25 bp, Artificial
  probe
  misc_feature (1)..(25): SEQ ID NO: 399; WAN0249YI_at; Start 63; Stop 87
gataaggagtttttcctagttatca

SEQ ID NO: 38408 - DNA, 25 bp, Artificial
  probe
  misc_feature (1)..(25): SEQ ID NO: 399; WAN0249YI_at; Start 77; Stop 101
cctagttatcaaaattgaatgagga

SEQ ID NO: 38409 - DNA, 25 bp, Artificial
  probe
  misc_feature (1)..(25): SEQ ID NO: 399; WAN0249YI_at; Start 53; Stop 77
tataatggaagataaggagtttttc

SEQ ID NO: 38410 - DNA, 25 bp, Artificial
  probe
  misc_feature (1)..(25): SEQ ID NO: 399; WAN0249YI_at; Start 57; Stop 81
atggaagataaggagtttttcctag

SEQ ID NO: 38411 - DNA, 25 bp, Artificial
  probe
  misc_feature (1)..(25): SEQ ID NO: 435; WAN0249YJ_at; Start 3; Stop 27
attcctcattcaattttgataacta

SEQ ID NO: 38412 - DNA, 25 bp, Artificial
  probe
  misc_feature (1)..(25): SEQ ID NO: 435; WAN0249YJ_at; Start 5; Stop 29
tcctcattcaattttgataactagg

SEQ ID NO: 38413 - DNA, 25 bp, Artificial
  probe
  misc_feature (1)..(25): SEQ ID NO: 435; WAN0249YJ_at; Start 41; Stop 65
atcttccattataaacttttccttg

SEQ ID NO: 38414 - DNA, 25 bp, Artificial
  probe
  misc_feature (1)..(25): SEQ ID NO: 435; WAN0249YJ_at; Start 34; Stop 58
actccttatcttccattataaactt

SEQ ID NO: 38415 - DNA, 25 bp, Artificial
  probe
  misc_feature (1)..(25): SEQ ID NO: 435; WAN0249YJ_at; Start 19; Stop 43
tgataactaggaaaaactccttatc

SEQ ID NO: 38416 - DNA, 25 bp, Artificial
  probe
  misc_feature (1)..(25): SEQ ID NO: 435; WAN0249YJ_at; Start 4; Stop 28
ttcctcattcaattttgataactag

SEQ ID NO: 38417 - DNA, 25 bp, Artificial
  probe
  misc_feature (1)..(25): SEQ ID NO: 435; WAN0249YJ_at; Start 29; Stop 53
gaaaaactccttatcttccattata

SEQ ID NO: 38418 - DNA, 25 bp, Artificial
  probe
  misc_feature (1)..(25): SEQ ID NO: 435; WAN0249YJ_at; Start 1; Stop 25
agattcctcattcaattttgataac

SEQ ID NO: 38419 - DNA, 25 bp, Artificial
  probe
  misc_feature (1)..(25): SEQ ID NO: 435; WAN0249YJ_at; Start 35; Stop 59
ctccttatcttccattataaacttt

SEQ ID NO: 38420 - DNA, 25 bp, Artificial
  probe
  misc_feature (1)..(25): SEQ ID NO: 435; WAN0249YJ_at; Start 2; Stop 26
gattcctcattcaattttgataact

SEQ ID NO: 38421 - DNA, 25 bp, Artificial
  probe
  misc_feature (1)..(25): SEQ ID NO: 435; WAN0249YJ_at; Start 33; Stop 57
aactccttatcttccattataaact

SEQ ID NO: 38422 - DNA, 25 bp, Artificial
  probe
  misc_feature (1)..(25): SEQ ID NO: 435; WAN0249YJ_at; Start 25; Stop 49
ctaggaaaaactccttatcttccat

SEQ ID NO: 38423 - DNA, 25 bp, Artificial
  probe
  misc_feature (1)..(25): SEQ ID NO: 3896; WAN0249YK_at; Start 124; Stop 148
taagtggtacaatagttactataga

SEQ ID NO: 38424 - DNA, 25 bp, Artificial
  probe
  misc_feature (1)..(25): SEQ ID NO: 3896; WAN0249YK_at; Start 132; Stop 156
acaatagttactatagatttggagg

SEQ ID NO: 38425 - DNA, 25 bp, Artificial
  probe
  misc_feature (1)..(25): SEQ ID NO: 3896; WAN0249YK_at; Start 28; Stop 52
tttatagtctattaaagggagcagg

SEQ ID NO: 38426 - DNA, 25 bp, Artificial
  probe
  misc_feature (1)..(25): SEQ ID NO: 3896; WAN0249YK_at; Start 22; Stop 46
caccattttatagtctattaaaggg

SEQ ID NO: 38427 - DNA, 25 bp, Artificial
  probe
  misc_feature (1)..(25): SEQ ID NO: 3896; WAN0249YK_at; Start 8; Stop 32
tgtcttttgagattcaccattttat

SEQ ID NO: 38428 - DNA, 25 bp, Artificial
  probe
  misc_feature (1)..(25): SEQ ID NO: 3896; WAN0249YK_at; Start 2; Stop 26
tgaaggtgtcttttgagattcacca

SEQ ID NO: 38429 - DNA, 25 bp, Artificial
  probe
  misc_feature (1)..(25): SEQ ID NO: 3896; WAN0249YK_at; Start 3; Stop 27
gaaggtgtcttttgagattcaccat

SEQ ID NO: 38430 - DNA, 25 bp, Artificial
  probe
  misc_feature (1)..(25): SEQ ID NO: 3896; WAN0249YK_at; Start 31; Stop 55
atagtctattaaagggagcaggaaa

SEQ ID NO: 38431 - DNA, 25 bp, Artificial
  probe
  misc_feature (1)..(25): SEQ ID NO: 3896; WAN0249YK_at; Start 30; Stop 54
tatagtctattaaagggagcaggaa

SEQ ID NO: 38432 - DNA, 25 bp, Artificial
  probe
  misc_feature (1)..(25): SEQ ID NO: 3896; WAN0249YK_at; Start 24; Stop 48
ccattttatagtctattaaagggag

SEQ ID NO: 38433 - DNA, 25 bp, Artificial
  probe
  misc_feature (1)..(25): SEQ ID NO: 3896; WAN0249YK_at; Start 119; Stop 143
caaaataagtggtacaatagttact

SEQ ID NO: 38434 - DNA, 25 bp, Artificial
  probe
  misc_feature (1)..(25): SEQ ID NO: 3896; WAN0249YK_at; Start 75; Stop 99
ttgaaactataactagctcttgaaa

SEQ ID NO: 38435 - DNA, 25 bp, Artificial
  probe
  misc_feature (1)..(25): SEQ ID NO: 3896; WAN0249YK_at; Start 76; Stop 100
tgaaactataactagctcttgaaaa

SEQ ID NO: 38436 - DNA, 25 bp, Artificial
  probe
  misc_feature (1)..(25): SEQ ID NO: 3896; WAN0249YK_at; Start 29; Stop 53
ttatagtctattaaagggagcagga

SEQ ID NO: 38437 - DNA, 25 bp, Artificial
  probe
  misc_feature (1)..(25): SEQ ID NO: 3896; WAN0249YK_at; Start 5; Stop 29
aggtgtcttttgagattcaccattt

SEQ ID NO: 38438 - DNA, 25 bp, Artificial
  probe
  misc_feature (1)..(25): SEQ ID NO: 3896; WAN0249YK_at; Start 129; Stop 153
ggtacaatagttactatagatttgg

SEQ ID NO: 38439 - DNA, 25 bp, Artificial
  probe
  misc_feature (1)..(25): SEQ ID NO: 3896; WAN0249YK_at; Start 25; Stop 49
cattttatagtctattaaagggagc

SEQ ID NO: 38440 - DNA, 25 bp, Artificial
  probe
  misc_feature (1)..(25): SEQ ID NO: 3896; WAN0249YK_at; Start 13; Stop 37
tttgagattcaccattttatagtct

SEQ ID NO: 38441 - DNA, 25 bp, Artificial
  probe
  misc_feature (1)..(25): SEQ ID NO: 3896; WAN0249YK_at; Start 12; Stop 36
ttttgagattcaccattttatagtc

SEQ ID NO: 38442 - DNA, 25 bp, Artificial
  probe
  misc_feature (1)..(25): SEQ ID NO: 3896; WAN0249YK_at; Start 9; Stop 33
gtcttttgagattcaccattttata

SEQ ID NO: 38443 - DNA, 25 bp, Artificial
  probe
  misc_feature (1)..(25): SEQ ID NO: 3896; WAN0249YK_at; Start 4; Stop 28
aaggtgtcttttgagattcaccatt

SEQ ID NO: 38444 - DNA, 25 bp, Artificial
  probe
  misc_feature (1)..(25): SEQ ID NO: 3896; WAN0249YK_at; Start 71; Stop 95
tagtttgaaactataactagctctt

SEQ ID NO: 38445 - DNA, 25 bp, Artificial
  probe
  misc_feature (1)..(25): SEQ ID NO: 3896; WAN0249YK_at; Start 18; Stop 42
gattcaccattttatagtctattaa

SEQ ID NO: 38446 - DNA, 25 bp, Artificial
  probe
  misc_feature (1)..(25): SEQ ID NO: 3896; WAN0249YK_at; Start 74; Stop 98
tttgaaactataactagctcttgaa

SEQ ID NO: 38447 - DNA, 25 bp, Artificial
  probe
  misc_feature (1)..(25): SEQ ID NO: 3896; WAN0249YK_at; Start 121; Stop 145
aaataagtggtacaatagttactat

SEQ ID NO: 38448 - DNA, 25 bp, Artificial
  probe
  misc_feature (1)..(25): SEQ ID NO: 3896; WAN0249YK_at; Start 15; Stop 39
tgagattcaccattttatagtctat

SEQ ID NO: 38449 - DNA, 25 bp, Artificial
  probe
  misc_feature (1)..(25): SEQ ID NO: 3896; WAN0249YK_at; Start 7; Stop 31
gtgtcttttgagattcaccatttta

SEQ ID NO: 38450 - DNA, 25 bp, Artificial
  probe
  misc_feature (1)..(25): SEQ ID NO: 3896; WAN0249YK_at; Start 16; Stop 40
gagattcaccattttatagtctatt

SEQ ID NO: 38451 - DNA, 25 bp, Artificial
  probe
  misc_feature (1)..(25): SEQ ID NO: 3896; WAN0249YK_at; Start 10; Stop 34
tcttttgagattcaccattttatag

SEQ ID NO: 38452 - DNA, 25 bp, Artificial
  probe
  misc_feature (1)..(25): SEQ ID NO: 3896; WAN0249YK_at; Start 32; Stop 56
tagtctattaaagggagcaggaaaa

SEQ ID NO: 38453 - DNA, 25 bp, Artificial
  probe
  misc_feature (1)..(25): SEQ ID NO: 3896; WAN0249YK_at; Start 72; Stop 96
agtttgaaactataactagctcttg

SEQ ID NO: 38454 - DNA, 25 bp, Artificial
  probe
  misc_feature (1)..(25): SEQ ID NO: 3896; WAN0249YK_at; Start 27; Stop 51
ttttatagtctattaaagggagcag

SEQ ID NO: 38455 - DNA, 25 bp, Artificial
  probe
  misc_feature (1)..(25): SEQ ID NO: 3896; WAN0249YK_at; Start 1; Stop 25
gtgaaggtgtcttttgagattcacc

SEQ ID NO: 38456 - DNA, 25 bp, Artificial
  probe
  misc_feature (1)..(25): SEQ ID NO: 3896; WAN0249YK_at; Start 73; Stop 97
gtttgaaactataactagctcttga

SEQ ID NO: 38457 - DNA, 25 bp, Artificial
  probe
  misc_feature (1)..(25): SEQ ID NO: 323; WAN0249YL_at; Start 11; Stop 35
caaatctatagtaactattgtacca

SEQ ID NO: 38458 - DNA, 25 bp, Artificial
  probe
  misc_feature (1)..(25): SEQ ID NO: 323; WAN0249YL_at; Start 129; Stop 153
ctataaaatggtgaatctcaaaaga

SEQ ID NO: 38459 - DNA, 25 bp, Artificial
  probe
  misc_feature (1)..(25): SEQ ID NO: 323; WAN0249YL_at; Start 107; Stop 131
ttttcctgctccctttaatagacta

SEQ ID NO: 38460 - DNA, 25 bp, Artificial
  probe
  misc_feature (1)..(25): SEQ ID NO: 323; WAN0249YL_at; Start 18; Stop 42
atagtaactattgtaccacttattt

SEQ ID NO: 38461 - DNA, 25 bp, Artificial
  probe
  misc_feature (1)..(25): SEQ ID NO: 323; WAN0249YL_at; Start 123; Stop 147
aatagactataaaatggtgaatctc

SEQ ID NO: 38462 - DNA, 25 bp, Artificial
  probe
  misc_feature (1)..(25): SEQ ID NO: 323; WAN0249YL_at; Start 124; Stop 148
atagactataaaatggtgaatctca

SEQ ID NO: 38463 - DNA, 25 bp, Artificial
  probe
  misc_feature (1)..(25): SEQ ID NO: 323; WAN0249YL_at; Start 131; Stop 155
ataaaatggtgaatctcaaaagaca

SEQ ID NO: 38464 - DNA, 25 bp, Artificial
  probe
  misc_feature (1)..(25): SEQ ID NO: 323; WAN0249YL_at; Start 12; Stop 36
aaatctatagtaactattgtaccac

SEQ ID NO: 38465 - DNA, 25 bp, Artificial
  probe
  misc_feature (1)..(25): SEQ ID NO: 323; WAN0249YL_at; Start 138; Stop 162
ggtgaatctcaaaagacaccttcac

SEQ ID NO: 38466 - DNA, 25 bp, Artificial
  probe
  misc_feature (1)..(25): SEQ ID NO: 323; WAN0249YL_at; Start 17; Stop 41
tatagtaactattgtaccacttatt

SEQ ID NO: 38467 - DNA, 25 bp, Artificial
  probe
  misc_feature (1)..(25): SEQ ID NO: 323; WAN0249YL_at; Start 63; Stop 87
ttttcaagagctagttatagtttca

SEQ ID NO: 38468 - DNA, 25 bp, Artificial
  probe
  misc_feature (1)..(25): SEQ ID NO: 323; WAN0249YL_at; Start 68; Stop 92
aagagctagttatagtttcaaacta

SEQ ID NO: 38469 - DNA, 25 bp, Artificial
  probe
  misc_feature (1)..(25): SEQ ID NO: 323; WAN0249YL_at; Start 64; Stop 88
tttcaagagctagttatagtttcaa

SEQ ID NO: 38470 - DNA, 25 bp, Artificial
  probe
  misc_feature (1)..(25): SEQ ID NO: 323; WAN0249YL_at; Start 110; Stop 134
tcctgctccctttaatagactataa

SEQ ID NO: 38471 - DNA, 25 bp, Artificial
  probe
  misc_feature (1)..(25): SEQ ID NO: 323; WAN0249YL_at; Start 16; Stop 40
ctatagtaactattgtaccacttat

SEQ ID NO: 38472 - DNA, 25 bp, Artificial
  probe
  misc_feature (1)..(25): SEQ ID NO: 323; WAN0249YL_at; Start 137; Stop 161
tggtgaatctcaaaagacaccttca

SEQ ID NO: 38473 - DNA, 25 bp, Artificial
  probe
  misc_feature (1)..(25): SEQ ID NO: 323; WAN0249YL_at; Start 7; Stop 31
cctccaaatctatagtaactattgt

SEQ ID NO: 38474 - DNA, 25 bp, Artificial
  probe
  misc_feature (1)..(25): SEQ ID NO: 323; WAN0249YL_at; Start 134; Stop 158
aaatggtgaatctcaaaagacacct

SEQ ID NO: 38475 - DNA, 25 bp, Artificial
  probe
  misc_feature (1)..(25): SEQ ID NO: 323; WAN0249YL_at; Start 128; Stop 152
actataaaatggtgaatctcaaaag

SEQ ID NO: 38476 - DNA, 25 bp, Artificial
  probe
  misc_feature (1)..(25): SEQ ID NO: 323; WAN0249YL_at; Start 109; Stop 133
ttcctgctccctttaatagactata

SEQ ID NO: 38477 - DNA, 25 bp, Artificial
  probe
  misc_feature (1)..(25): SEQ ID NO: 323; WAN0249YL_at; Start 132; Stop 156
taaaatggtgaatctcaaaagacac

SEQ ID NO: 38478 - DNA, 25 bp, Artificial
  probe
  misc_feature (1)..(25): SEQ ID NO: 323; WAN0249YL_at; Start 67; Stop 91
caagagctagttatagtttcaaact

SEQ ID NO: 38479 - DNA, 25 bp, Artificial
  probe
  misc_feature (1)..(25): SEQ ID NO: 323; WAN0249YL_at; Start 125; Stop 149
tagactataaaatggtgaatctcaa

SEQ ID NO: 38480 - DNA, 25 bp, Artificial
  probe
  misc_feature (1)..(25): SEQ ID NO: 323; WAN0249YL_at; Start 66; Stop 90
tcaagagctagttatagtttcaaac

SEQ ID NO: 38481 - DNA, 25 bp, Artificial
  probe
  misc_feature (1)..(25): SEQ ID NO: 323; WAN0249YL_at; Start 130; Stop 154
tataaaatggtgaatctcaaaagac

SEQ ID NO: 38482 - DNA, 25 bp, Artificial
  probe
  misc_feature (1)..(25): SEQ ID NO: 323; WAN0249YL_at; Start 126; Stop 150
agactataaaatggtgaatctcaaa

SEQ ID NO: 38483 - DNA, 25 bp, Artificial
  probe
  misc_feature (1)..(25): SEQ ID NO: 323; WAN0249YL_at; Start 15; Stop 39
tctatagtaactattgtaccactta

SEQ ID NO: 38484 - DNA, 25 bp, Artificial
  probe
  misc_feature (1)..(25): SEQ ID NO: 323; WAN0249YL_at; Start 136; Stop 160
atggtgaatctcaaaagacaccttc

SEQ ID NO: 38485 - DNA, 25 bp, Artificial
  probe
  misc_feature (1)..(25): SEQ ID NO: 323; WAN0249YL_at; Start 10; Stop 34
ccaaatctatagtaactattgtacc

SEQ ID NO: 38486 - DNA, 25 bp, Artificial
  probe
  misc_feature (1)..(25): SEQ ID NO: 323; WAN0249YL_at; Start 13; Stop 37
aatctatagtaactattgtaccact

SEQ ID NO: 38487 - DNA, 25 bp, Artificial
  probe
  misc_feature (1)..(25): SEQ ID NO: 323; WAN0249YL_at; Start 108; Stop 132
tttcctgctccctttaatagactat

SEQ ID NO: 38488 - DNA, 25 bp, Artificial
  probe
  misc_feature (1)..(25): SEQ ID NO: 323; WAN0249YL_at; Start 135; Stop 159
aatggtgaatctcaaaagacacctt

SEQ ID NO: 38489 - DNA, 25 bp, Artificial
  probe
  misc_feature (1)..(25): SEQ ID NO: 323; WAN0249YL_at; Start 133; Stop 157
aaaatggtgaatctcaaaagacacc

SEQ ID NO: 38490 - DNA, 25 bp, Artificial
  probe
  misc_feature (1)..(25): SEQ ID NO: 323; WAN0249YL_at; Start 127; Stop 151
gactataaaatggtgaatctcaaaa

SEQ ID NO: 38491 - DNA, 25 bp, Artificial
  probe
  misc_feature (1)..(25): SEQ ID NO: 3174; WAN0249YM_at; Start 55; Stop 79
gccttctaggaagacttttctccta

SEQ ID NO: 38492 - DNA, 25 bp, Artificial
  probe
  misc_feature (1)..(25): SEQ ID NO: 3174; WAN0249YM_at; Start 39; Stop 63
ttcgcctatgaaaatagccttctag

SEQ ID NO: 38493 - DNA, 25 bp, Artificial
  probe
  misc_feature (1)..(25): SEQ ID NO: 3174; WAN0249YM_at; Start 12; Stop 36
taccttatctttttattataccata

SEQ ID NO: 38494 - DNA, 25 bp, Artificial
  probe
  misc_feature (1)..(25): SEQ ID NO: 3174; WAN0249YM_at; Start 43; Stop 67
cctatgaaaatagccttctaggaag

SEQ ID NO: 38495 - DNA, 25 bp, Artificial
  probe
  misc_feature (1)..(25): SEQ ID NO: 3174; WAN0249YM_at; Start 67; Stop 91
gacttttctcctagaaggctggatt

SEQ ID NO: 38496 - DNA, 25 bp, Artificial
  probe
  misc_feature (1)..(25): SEQ ID NO: 3174; WAN0249YM_at; Start 53; Stop 77
tagccttctaggaagacttttctcc

SEQ ID NO: 38497 - DNA, 25 bp, Artificial
  probe
  misc_feature (1)..(25): SEQ ID NO: 3174; WAN0249YM_at; Start 57; Stop 81
cttctaggaagacttttctcctaga

SEQ ID NO: 38498 - DNA, 25 bp, Artificial
  probe
  misc_feature (1)..(25): SEQ ID NO: 3174; WAN0249YM_at; Start 68; Stop 92
acttttctcctagaaggctggattt

SEQ ID NO: 38499 - DNA, 25 bp, Artificial
  probe
  misc_feature (1)..(25): SEQ ID NO: 3174; WAN0249YM_at; Start 45; Stop 69
tatgaaaatagccttctaggaagac

SEQ ID NO: 38500 - DNA, 25 bp, Artificial
  probe
  misc_feature (1)..(25): SEQ ID NO: 3174; WAN0249YM_at; Start 52; Stop 76
atagccttctaggaagacttttctc

SEQ ID NO: 38501 - DNA, 25 bp, Artificial
  probe
  misc_feature (1)..(25): SEQ ID NO: 3174; WAN0249YM_at; Start 28; Stop 52
tataccatattttcgcctatgaaaa

SEQ ID NO: 38502 - DNA, 25 bp, Artificial
  probe
  misc_feature (1)..(25): SEQ ID NO: 3174; WAN0249YM_at; Start 62; Stop 86
aggaagacttttctcctagaaggct

SEQ ID NO: 38503 - DNA, 25 bp, Artificial
  probe
  misc_feature (1)..(25): SEQ ID NO: 3174; WAN0249YM_at; Start 32; Stop 56
ccatattttcgcctatgaaaatagc

SEQ ID NO: 38504 - DNA, 25 bp, Artificial
  probe
  misc_feature (1)..(25): SEQ ID NO: 3174; WAN0249YM_at; Start 64; Stop 88
gaagacttttctcctagaaggctgg

SEQ ID NO: 38505 - DNA, 25 bp, Artificial
  probe
  misc_feature (1)..(25): SEQ ID NO: 3174; WAN0249YM_at; Start 66; Stop 90
agacttttctcctagaaggctggat

SEQ ID NO: 38506 - DNA, 25 bp, Artificial
  probe
  misc_feature (1)..(25): SEQ ID NO: 3174; WAN0249YM_at; Start 42; Stop 66
gcctatgaaaatagccttctaggaa

SEQ ID NO: 38507 - DNA, 25 bp, Artificial
  probe
  misc_feature (1)..(25): SEQ ID NO: 3174; WAN0249YM_at; Start 35; Stop 59
tattttcgcctatgaaaatagcctt

SEQ ID NO: 38508 - DNA, 25 bp, Artificial
  probe
  misc_feature (1)..(25): SEQ ID NO: 3174; WAN0249YM_at; Start 47; Stop 71
tgaaaatagccttctaggaagactt

SEQ ID NO: 38509 - DNA, 25 bp, Artificial
  probe
  misc_feature (1)..(25): SEQ ID NO: 3174; WAN0249YM_at; Start 40; Stop 64
tcgcctatgaaaatagccttctagg

SEQ ID NO: 38510 - DNA, 25 bp, Artificial
  probe
  misc_feature (1)..(25): SEQ ID NO: 3174; WAN0249YM_at; Start 60; Stop 84
ctaggaagacttttctcctagaagg

SEQ ID NO: 38511 - DNA, 25 bp, Artificial
  probe
  misc_feature (1)..(25): SEQ ID NO: 3174; WAN0249YM_at; Start 65; Stop 89
aagacttttctcctagaaggctgga

SEQ ID NO: 38512 - DNA, 25 bp, Artificial
  probe
  misc_feature (1)..(25): SEQ ID NO: 3174; WAN0249YM_at; Start 27; Stop 51
ttataccatattttcgcctatgaaa

SEQ ID NO: 38513 - DNA, 25 bp, Artificial
  probe
  misc_feature (1)..(25): SEQ ID NO: 3174; WAN0249YM_at; Start 54; Stop 78
agccttctaggaagacttttctcct

SEQ ID NO: 38514 - DNA, 25 bp, Artificial
  probe
  misc_feature (1)..(25): SEQ ID NO: 3174; WAN0249YM_at; Start 61; Stop 85
taggaagacttttctcctagaaggc

SEQ ID NO: 38515 - DNA, 25 bp, Artificial
  probe
  misc_feature (1)..(25): SEQ ID NO: 3174; WAN0249YM_at; Start 56; Stop 80
ccttctaggaagacttttctcctag

SEQ ID NO: 38516 - DNA, 25 bp, Artificial
  probe
  misc_feature (1)..(25): SEQ ID NO: 3174; WAN0249YM_at; Start 36; Stop 60
attttcgcctatgaaaatagccttc

SEQ ID NO: 38517 - DNA, 25 bp, Artificial
  probe
  misc_feature (1)..(25): SEQ ID NO: 3174; WAN0249YM_at; Start 37; Stop 61
ttttcgcctatgaaaatagccttct

SEQ ID NO: 38518 - DNA, 25 bp, Artificial
  probe
  misc_feature (1)..(25): SEQ ID NO: 3174; WAN0249YM_at; Start 46; Stop 70
atgaaaatagccttctaggaagact

SEQ ID NO: 38519 - DNA, 25 bp, Artificial
  probe
  misc_feature (1)..(25): SEQ ID NO: 3174; WAN0249YM_at; Start 38; Stop 62
tttcgcctatgaaaatagccttcta

SEQ ID NO: 38520 - DNA, 25 bp, Artificial
  probe
  misc_feature (1)..(25): SEQ ID NO: 3174; WAN0249YM_at; Start 51; Stop 75
aatagccttctaggaagacttttct

SEQ ID NO: 38521 - DNA, 25 bp, Artificial
  probe
  misc_feature (1)..(25): SEQ ID NO: 3174; WAN0249YM_at; Start 59; Stop 83
tctaggaagacttttctcctagaag

SEQ ID NO: 38522 - DNA, 25 bp, Artificial
  probe
  misc_feature (1)..(25): SEQ ID NO: 3174; WAN0249YM_at; Start 41; Stop 65
cgcctatgaaaatagccttctagga

SEQ ID NO: 38523 - DNA, 25 bp, Artificial
  probe
  misc_feature (1)..(25): SEQ ID NO: 3174; WAN0249YM_at; Start 33; Stop 57
catattttcgcctatgaaaatagcc

SEQ ID NO: 38524 - DNA, 25 bp, Artificial
  probe
  misc_feature (1)..(25): SEQ ID NO: 3174; WAN0249YM_at; Start 63; Stop 87
ggaagacttttctcctagaaggctg

SEQ ID NO: 38525 - DNA, 25 bp, Artificial
  probe
  misc_feature (1)..(25): SEQ ID NO: 154; WAN0249YN_at; Start 29; Stop 53
cctagaaggctattttcataggcga

SEQ ID NO: 38526 - DNA, 25 bp, Artificial
  probe
  misc_feature (1)..(25): SEQ ID NO: 154; WAN0249YN_at; Start 34; Stop 58
aaggctattttcataggcgaaaata

SEQ ID NO: 38527 - DNA, 25 bp, Artificial
  probe
  misc_feature (1)..(25): SEQ ID NO: 154; WAN0249YN_at; Start 7; Stop 31
agccttctaggagaaaagtcttcct

SEQ ID NO: 38528 - DNA, 25 bp, Artificial
  probe
  misc_feature (1)..(25): SEQ ID NO: 154; WAN0249YN_at; Start 6; Stop 30
cagccttctaggagaaaagtcttcc

SEQ ID NO: 38529 - DNA, 25 bp, Artificial
  probe
  misc_feature (1)..(25): SEQ ID NO: 154; WAN0249YN_at; Start 8; Stop 32
gccttctaggagaaaagtcttccta

SEQ ID NO: 38530 - DNA, 25 bp, Artificial
  probe
  misc_feature (1)..(25): SEQ ID NO: 154; WAN0249YN_at; Start 1; Stop 25
aaatccagccttctaggagaaaagt

SEQ ID NO: 38531 - DNA, 25 bp, Artificial
  probe
  misc_feature (1)..(25): SEQ ID NO: 154; WAN0249YN_at; Start 17; Stop 41
gagaaaagtcttcctagaaggctat

SEQ ID NO: 38532 - DNA, 25 bp, Artificial
  probe
  misc_feature (1)..(25): SEQ ID NO: 154; WAN0249YN_at; Start 18; Stop 42
agaaaagtcttcctagaaggctatt

SEQ ID NO: 38533 - DNA, 25 bp, Artificial
  probe
  misc_feature (1)..(25): SEQ ID NO: 154; WAN0249YN_at; Start 36; Stop 60
ggctattttcataggcgaaaatatg

SEQ ID NO: 38534 - DNA, 25 bp, Artificial
  probe
  misc_feature (1)..(25): SEQ ID NO: 154; WAN0249YN_at; Start 32; Stop 56
agaaggctattttcataggcgaaaa

SEQ ID NO: 38535 - DNA, 25 bp, Artificial
  probe
  misc_feature (1)..(25): SEQ ID NO: 154; WAN0249YN_at; Start 2; Stop 26
aatccagccttctaggagaaaagtc

SEQ ID NO: 38536 - DNA, 25 bp, Artificial
  probe
  misc_feature (1)..(25): SEQ ID NO: 154; WAN0249YN_at; Start 57; Stop 81
tatggtataataaaaagataaggta

SEQ ID NO: 38537 - DNA, 25 bp, Artificial
  probe
  misc_feature (1)..(25): SEQ ID NO: 154; WAN0249YN_at; Start 31; Stop 55
tagaaggctattttcataggcgaaa

SEQ ID NO: 38538 - DNA, 25 bp, Artificial
  probe
  misc_feature (1)..(25): SEQ ID NO: 154; WAN0249YN_at; Start 41; Stop 65
ttttcataggcgaaaatatggtata

SEQ ID NO: 38539 - DNA, 25 bp, Artificial
  probe
  misc_feature (1)..(25): SEQ ID NO: 154; WAN0249YN_at; Start 10; Stop 34
cttctaggagaaaagtcttcctaga

SEQ ID NO: 38540 - DNA, 25 bp, Artificial
  probe
  misc_feature (1)..(25): SEQ ID NO: 154; WAN0249YN_at; Start 23; Stop 47
agtcttcctagaaggctattttcat

SEQ ID NO: 38541 - DNA, 25 bp, Artificial
  probe
  misc_feature (1)..(25): SEQ ID NO: 154; WAN0249YN_at; Start 3; Stop 27
atccagccttctaggagaaaagtct

SEQ ID NO: 38542 - DNA, 25 bp, Artificial
  probe
  misc_feature (1)..(25): SEQ ID NO: 154; WAN0249YN_at; Start 4; Stop 28
tccagccttctaggagaaaagtctt

SEQ ID NO: 38543 - DNA, 25 bp, Artificial
  probe
  misc_feature (1)..(25): SEQ ID NO: 154; WAN0249YN_at; Start 5; Stop 29
ccagccttctaggagaaaagtcttc

SEQ ID NO: 38544 - DNA, 25 bp, Artificial
  probe
  misc_feature (1)..(25): SEQ ID NO: 154; WAN0249YN_at; Start 24; Stop 48
gtcttcctagaaggctattttcata

SEQ ID NO: 38545 - DNA, 25 bp, Artificial
  probe
  misc_feature (1)..(25): SEQ ID NO: 154; WAN0249YN_at; Start 27; Stop 51
ttcctagaaggctattttcataggc

SEQ ID NO: 38546 - DNA, 25 bp, Artificial
  probe
  misc_feature (1)..(25): SEQ ID NO: 154; WAN0249YN_at; Start 28; Stop 52
tcctagaaggctattttcataggcg

SEQ ID NO: 38547 - DNA, 25 bp, Artificial
  probe
  misc_feature (1)..(25): SEQ ID NO: 154; WAN0249YN_at; Start 9; Stop 33
ccttctaggagaaaagtcttcctag

SEQ ID NO: 38548 - DNA, 25 bp, Artificial
  probe
  misc_feature (1)..(25): SEQ ID NO: 154; WAN0249YN_at; Start 22; Stop 46
aagtcttcctagaaggctattttca

SEQ ID NO: 38549 - DNA, 25 bp, Artificial
  probe
  misc_feature (1)..(25): SEQ ID NO: 154; WAN0249YN_at; Start 37; Stop 61
gctattttcataggcgaaaatatgg

SEQ ID NO: 38550 - DNA, 25 bp, Artificial
  probe
  misc_feature (1)..(25): SEQ ID NO: 154; WAN0249YN_at; Start 26; Stop 50
cttcctagaaggctattttcatagg

SEQ ID NO: 38551 - DNA, 25 bp, Artificial
  probe
  misc_feature (1)..(25): SEQ ID NO: 154; WAN0249YN_at; Start 16; Stop 40
ggagaaaagtcttcctagaaggcta

SEQ ID NO: 38552 - DNA, 25 bp, Artificial
  probe
  misc_feature (1)..(25): SEQ ID NO: 154; WAN0249YN_at; Start 40; Stop 64
attttcataggcgaaaatatggtat

SEQ ID NO: 38553 - DNA, 25 bp, Artificial
  probe
  misc_feature (1)..(25): SEQ ID NO: 154; WAN0249YN_at; Start 30; Stop 54
ctagaaggctattttcataggcgaa

SEQ ID NO: 38554 - DNA, 25 bp, Artificial
  probe
  misc_feature (1)..(25): SEQ ID NO: 154; WAN0249YN_at; Start 15; Stop 39
aggagaaaagtcttcctagaaggct

SEQ ID NO: 38555 - DNA, 25 bp, Artificial
  probe
  misc_feature (1)..(25): SEQ ID NO: 154; WAN0249YN_at; Start 42; Stop 66
tttcataggcgaaaatatggtataa

SEQ ID NO: 38556 - DNA, 25 bp, Artificial
  probe
  misc_feature (1)..(25): SEQ ID NO: 154; WAN0249YN_at; Start 33; Stop 57
gaaggctattttcataggcgaaaat

SEQ ID NO: 38557 - DNA, 25 bp, Artificial
  probe
  misc_feature (1)..(25): SEQ ID NO: 154; WAN0249YN_at; Start 35; Stop 59
aggctattttcataggcgaaaatat

SEQ ID NO: 38558 - DNA, 25 bp, Artificial
  probe
  misc_feature (1)..(25): SEQ ID NO: 154; WAN0249YN_at; Start 14; Stop 38
taggagaaaagtcttcctagaaggc

SEQ ID NO: 38559 - DNA, 25 bp, Artificial
  probe
  misc_feature (1)..(25): SEQ ID NO: 4341; WAN0249YO_at; Start 1; Stop 25
gttaggaaaagtatcatagattgct

SEQ ID NO: 38560 - DNA, 25 bp, Artificial
  probe
  misc_feature (1)..(25): SEQ ID NO: 4341; WAN0249YO_at; Start 47; Stop 71
aatattatggattatcaacaaggag

SEQ ID NO: 38561 - DNA, 25 bp, Artificial
  probe
  misc_feature (1)..(25): SEQ ID NO: 4341; WAN0249YO_at; Start 14; Stop 38
tcatagattgctttttttggacttt

SEQ ID NO: 38562 - DNA, 25 bp, Artificial
  probe
  misc_feature (1)..(25): SEQ ID NO: 4341; WAN0249YO_at; Start 51; Stop 75
ttatggattatcaacaaggaggaaa

SEQ ID NO: 38563 - DNA, 25 bp, Artificial
  probe
  misc_feature (1)..(25): SEQ ID NO: 4341; WAN0249YO_at; Start 12; Stop 36
tatcatagattgctttttttggact

SEQ ID NO: 38564 - DNA, 25 bp, Artificial
  probe
  misc_feature (1)..(25): SEQ ID NO: 4341; WAN0249YO_at; Start 41; Stop 65
agatataatattatggattatcaac

SEQ ID NO: 38565 - DNA, 25 bp, Artificial
  probe
  misc_feature (1)..(25): SEQ ID NO: 4341; WAN0249YO_at; Start 5; Stop 29
ggaaaagtatcatagattgcttttt

SEQ ID NO: 38566 - DNA, 25 bp, Artificial
  probe
  misc_feature (1)..(25): SEQ ID NO: 4341; WAN0249YO_at; Start 44; Stop 68
tataatattatggattatcaacaag

SEQ ID NO: 38567 - DNA, 25 bp, Artificial
  probe
  misc_feature (1)..(25): SEQ ID NO: 4341; WAN0249YO_at; Start 46; Stop 70
taatattatggattatcaacaagga

SEQ ID NO: 38568 - DNA, 25 bp, Artificial
  probe
  misc_feature (1)..(25): SEQ ID NO: 4341; WAN0249YO_at; Start 11; Stop 35
gtatcatagattgctttttttggac

SEQ ID NO: 38569 - DNA, 25 bp, Artificial
  probe
  misc_feature (1)..(25): SEQ ID NO: 4341; WAN0249YO_at; Start 33; Stop 57
gacttttaagatataatattatgga

SEQ ID NO: 38570 - DNA, 25 bp, Artificial
  probe
  misc_feature (1)..(25): SEQ ID NO: 4341; WAN0249YO_at; Start 6; Stop 30
gaaaagtatcatagattgctttttt

SEQ ID NO: 38571 - DNA, 25 bp, Artificial
  probe
  misc_feature (1)..(25): SEQ ID NO: 4341; WAN0249YO_at; Start 9; Stop 33
aagtatcatagattgctttttttgg

SEQ ID NO: 38572 - DNA, 25 bp, Artificial
  probe
  misc_feature (1)..(25): SEQ ID NO: 4341; WAN0249YO_at; Start 49; Stop 73
tattatggattatcaacaaggagga

SEQ ID NO: 38573 - DNA, 25 bp, Artificial
  probe
  misc_feature (1)..(25): SEQ ID NO: 4341; WAN0249YO_at; Start 45; Stop 69
ataatattatggattatcaacaagg

SEQ ID NO: 38574 - DNA, 25 bp, Artificial
  probe
  misc_feature (1)..(25): SEQ ID NO: 4341; WAN0249YO_at; Start 40; Stop 64
aagatataatattatggattatcaa

SEQ ID NO: 38575 - DNA, 25 bp, Artificial
  probe
  misc_feature (1)..(25): SEQ ID NO: 4341; WAN0249YO_at; Start 31; Stop 55
tggacttttaagatataatattatg

SEQ ID NO: 38576 - DNA, 25 bp, Artificial
  probe
  misc_feature (1)..(25): SEQ ID NO: 4341; WAN0249YO_at; Start 32; Stop 56
ggacttttaagatataatattatgg

SEQ ID NO: 38577 - DNA, 25 bp, Artificial
  probe
  misc_feature (1)..(25): SEQ ID NO: 4341; WAN0249YO_at; Start 4; Stop 28
aggaaaagtatcatagattgctttt

SEQ ID NO: 38578 - DNA, 25 bp, Artificial
  probe
  misc_feature (1)..(25): SEQ ID NO: 4341; WAN0249YO_at; Start 39; Stop 63
taagatataatattatggattatca

SEQ ID NO: 38579 - DNA, 25 bp, Artificial
  probe
  misc_feature (1)..(25): SEQ ID NO: 4341; WAN0249YO_at; Start 34; Stop 58
acttttaagatataatattatggat

SEQ ID NO: 38580 - DNA, 25 bp, Artificial
  probe
  misc_feature (1)..(25): SEQ ID NO: 4341; WAN0249YO_at; Start 35; Stop 59
cttttaagatataatattatggatt

SEQ ID NO: 38581 - DNA, 25 bp, Artificial
  probe
  misc_feature (1)..(25): SEQ ID NO: 4341; WAN0249YO_at; Start 48; Stop 72
atattatggattatcaacaaggagg

SEQ ID NO: 38582 - DNA, 25 bp, Artificial
  probe
  misc_feature (1)..(25): SEQ ID NO: 4341; WAN0249YO_at; Start 3; Stop 27
taggaaaagtatcatagattgcttt

SEQ ID NO: 38583 - DNA, 25 bp, Artificial
  probe
  misc_feature (1)..(25): SEQ ID NO: 4341; WAN0249YO_at; Start 13; Stop 37
atcatagattgctttttttggactt

SEQ ID NO: 38584 - DNA, 25 bp, Artificial
  probe
  misc_feature (1)..(25): SEQ ID NO: 4341; WAN0249YO_at; Start 10; Stop 34
agtatcatagattgctttttttgga

SEQ ID NO: 38585 - DNA, 25 bp, Artificial
  probe
  misc_feature (1)..(25): SEQ ID NO: 4341; WAN0249YO_at; Start 54; Stop 78
tggattatcaacaaggaggaaaaac

SEQ ID NO: 38586 - DNA, 25 bp, Artificial
  probe
  misc_feature (1)..(25): SEQ ID NO: 4341; WAN0249YO_at; Start 52; Stop 76
tatggattatcaacaaggaggaaaa

SEQ ID NO: 38587 - DNA, 25 bp, Artificial
  probe
  misc_feature (1)..(25): SEQ ID NO: 4341; WAN0249YO_at; Start 2; Stop 26
ttaggaaaagtatcatagattgctt

SEQ ID NO: 38588 - DNA, 25 bp, Artificial
  probe
  misc_feature (1)..(25): SEQ ID NO: 4341; WAN0249YO_at; Start 15; Stop 39
catagattgctttttttggactttt

SEQ ID NO: 38589 - DNA, 25 bp, Artificial
  probe
  misc_feature (1)..(25): SEQ ID NO: 4341; WAN0249YO_at; Start 42; Stop 66
gatataatattatggattatcaaca

SEQ ID NO: 38590 - DNA, 25 bp, Artificial
  probe
  misc_feature (1)..(25): SEQ ID NO: 4341; WAN0249YO_at; Start 50; Stop 74
attatggattatcaacaaggaggaa

SEQ ID NO: 38591 - DNA, 25 bp, Artificial
  probe
  misc_feature (1)..(25): SEQ ID NO: 4341; WAN0249YO_at; Start 8; Stop 32
aaagtatcatagattgctttttttg

SEQ ID NO: 38592 - DNA, 25 bp, Artificial
  probe
  misc_feature (1)..(25): SEQ ID NO: 4341; WAN0249YO_at; Start 53; Stop 77
atggattatcaacaaggaggaaaaa

SEQ ID NO: 38593 - DNA, 25 bp, Artificial
  probe
  misc_feature (1)..(25): SEQ ID NO: 250; WAN0249YP_at; Start 48; Stop 72
ccaaaaaaagcaatctatgatactt

SEQ ID NO: 38594 - DNA, 25 bp, Artificial
  probe
  misc_feature (1)..(25): SEQ ID NO: 250; WAN0249YP_at; Start 8; Stop 32
tcctccttgttgataatccataata

SEQ ID NO: 38595 - DNA, 25 bp, Artificial
  probe
  misc_feature (1)..(25): SEQ ID NO: 250; WAN0249YP_at; Start 56; Stop 80
agcaatctatgatacttttcctaac

SEQ ID NO: 38596 - DNA, 25 bp, Artificial
  probe
  misc_feature (1)..(25): SEQ ID NO: 250; WAN0249YP_at; Start 27; Stop 51
ataatattatatcttaaaagtccaa

SEQ ID NO: 38597 - DNA, 25 bp, Artificial
  probe
  misc_feature (1)..(25): SEQ ID NO: 250; WAN0249YP_at; Start 7; Stop 31
ttcctccttgttgataatccataat

SEQ ID NO: 38598 - DNA, 25 bp, Artificial
  probe
  misc_feature (1)..(25): SEQ ID NO: 250; WAN0249YP_at; Start 15; Stop 39
tgttgataatccataatattatatc

SEQ ID NO: 38599 - DNA, 25 bp, Artificial
  probe
  misc_feature (1)..(25): SEQ ID NO: 250; WAN0249YP_at; Start 46; Stop 70
gtccaaaaaaagcaatctatgatac

SEQ ID NO: 38600 - DNA, 25 bp, Artificial
  probe
  misc_feature (1)..(25): SEQ ID NO: 250; WAN0249YP_at; Start 24; Stop 48
tccataatattatatcttaaaagtc

SEQ ID NO: 38601 - DNA, 25 bp, Artificial
  probe
  misc_feature (1)..(25): SEQ ID NO: 250; WAN0249YP_at; Start 53; Stop 77
aaaagcaatctatgatacttttcct

SEQ ID NO: 38602 - DNA, 25 bp, Artificial
  probe
  misc_feature (1)..(25): SEQ ID NO: 250; WAN0249YP_at; Start 12; Stop 36
ccttgttgataatccataatattat

SEQ ID NO: 38603 - DNA, 25 bp, Artificial
  probe
  misc_feature (1)..(25): SEQ ID NO: 250; WAN0249YP_at; Start 28; Stop 52
taatattatatcttaaaagtccaaa

SEQ ID NO: 38604 - DNA, 25 bp, Artificial
  probe
  misc_feature (1)..(25): SEQ ID NO: 250; WAN0249YP_at; Start 45; Stop 69
agtccaaaaaaagcaatctatgata

SEQ ID NO: 38605 - DNA, 25 bp, Artificial
  probe
  misc_feature (1)..(25): SEQ ID NO: 250; WAN0249YP_at; Start 16; Stop 40
gttgataatccataatattatatct

SEQ ID NO: 38606 - DNA, 25 bp, Artificial
  probe
  misc_feature (1)..(25): SEQ ID NO: 250; WAN0249YP_at; Start 11; Stop 35
tccttgttgataatccataatatta

SEQ ID NO: 38607 - DNA, 25 bp, Artificial
  probe
  misc_feature (1)..(25): SEQ ID NO: 250; WAN0249YP_at; Start 47; Stop 71
tccaaaaaaagcaatctatgatact

SEQ ID NO: 38608 - DNA, 25 bp, Artificial
  probe
  misc_feature (1)..(25): SEQ ID NO: 250; WAN0249YP_at; Start 9; Stop 33
cctccttgttgataatccataatat

SEQ ID NO: 38609 - DNA, 25 bp, Artificial
  probe
  misc_feature (1)..(25): SEQ ID NO: 250; WAN0249YP_at; Start 52; Stop 76
aaaaagcaatctatgatacttttcc

SEQ ID NO: 38610 - DNA, 25 bp, Artificial
  probe
  misc_feature (1)..(25): SEQ ID NO: 250; WAN0249YP_at; Start 51; Stop 75
aaaaaagcaatctatgatacttttc

SEQ ID NO: 38611 - DNA, 25 bp, Artificial
  probe
  misc_feature (1)..(25): SEQ ID NO: 250; WAN0249YP_at; Start 22; Stop 46
aatccataatattatatcttaaaag

SEQ ID NO: 38612 - DNA, 25 bp, Artificial
  probe
  misc_feature (1)..(25): SEQ ID NO: 250; WAN0249YP_at; Start 44; Stop 68
aagtccaaaaaaagcaatctatgat

SEQ ID NO: 38613 - DNA, 25 bp, Artificial
  probe
  misc_feature (1)..(25): SEQ ID NO: 250; WAN0249YP_at; Start 3; Stop 27
gtttttcctccttgttgataatcca

SEQ ID NO: 38614 - DNA, 25 bp, Artificial
  probe
  misc_feature (1)..(25): SEQ ID NO: 250; WAN0249YP_at; Start 42; Stop 66
aaaagtccaaaaaaagcaatctatg

SEQ ID NO: 38615 - DNA, 25 bp, Artificial
  probe
  misc_feature (1)..(25): SEQ ID NO: 250; WAN0249YP_at; Start 6; Stop 30
tttcctccttgttgataatccataa

SEQ ID NO: 38616 - DNA, 25 bp, Artificial
  probe
  misc_feature (1)..(25): SEQ ID NO: 250; WAN0249YP_at; Start 4; Stop 28
tttttcctccttgttgataatccat

SEQ ID NO: 38617 - DNA, 25 bp, Artificial
  probe
  misc_feature (1)..(25): SEQ ID NO: 250; WAN0249YP_at; Start 25; Stop 49
ccataatattatatcttaaaagtcc

SEQ ID NO: 38618 - DNA, 25 bp, Artificial
  probe
  misc_feature (1)..(25): SEQ ID NO: 250; WAN0249YP_at; Start 49; Stop 73
caaaaaaagcaatctatgatacttt

SEQ ID NO: 38619 - DNA, 25 bp, Artificial
  probe
  misc_feature (1)..(25): SEQ ID NO: 250; WAN0249YP_at; Start 43; Stop 67
aaagtccaaaaaaagcaatctatga

SEQ ID NO: 38620 - DNA, 25 bp, Artificial
  probe
  misc_feature (1)..(25): SEQ ID NO: 250; WAN0249YP_at; Start 55; Stop 79
aagcaatctatgatacttttcctaa

SEQ ID NO: 38621 - DNA, 25 bp, Artificial
  probe
  misc_feature (1)..(25): SEQ ID NO: 250; WAN0249YP_at; Start 5; Stop 29
ttttcctccttgttgataatccata

SEQ ID NO: 38622 - DNA, 25 bp, Artificial
  probe
  misc_feature (1)..(25): SEQ ID NO: 250; WAN0249YP_at; Start 10; Stop 34
ctccttgttgataatccataatatt

SEQ ID NO: 38623 - DNA, 25 bp, Artificial
  probe
  misc_feature (1)..(25): SEQ ID NO: 250; WAN0249YP_at; Start 19; Stop 43
gataatccataatattatatcttaa

SEQ ID NO: 38624 - DNA, 25 bp, Artificial
  probe
  misc_feature (1)..(25): SEQ ID NO: 250; WAN0249YP_at; Start 26; Stop 50
cataatattatatcttaaaagtcca

SEQ ID NO: 38625 - DNA, 25 bp, Artificial
  probe
  misc_feature (1)..(25): SEQ ID NO: 250; WAN0249YP_at; Start 13; Stop 37
cttgttgataatccataatattata

SEQ ID NO: 38626 - DNA, 25 bp, Artificial
  probe
  misc_feature (1)..(25): SEQ ID NO: 250; WAN0249YP_at; Start 54; Stop 78
aaagcaatctatgatacttttccta

SEQ ID NO: 38627 - DNA, 25 bp, Artificial
  probe
  misc_feature (1)..(25): SEQ ID NO: 3769; WAN0249YQ_at; Start 171; Stop 195
caggttaagaaaagaagtgatgttg

SEQ ID NO: 38628 - DNA, 25 bp, Artificial
  probe
  misc_feature (1)..(25): SEQ ID NO: 3769; WAN0249YQ_at; Start 140; Stop 164
cgtagccccaaaattaggaatcaag

SEQ ID NO: 38629 - DNA, 25 bp, Artificial
  probe
  misc_feature (1)..(25): SEQ ID NO: 3769; WAN0249YQ_at; Start 223; Stop 247
taaaaactctctatctattaatccg

SEQ ID NO: 38630 - DNA, 25 bp, Artificial
  probe
  misc_feature (1)..(25): SEQ ID NO: 3769; WAN0249YQ_at; Start 291; Stop 315
ggtaagacttgctagcttcagtaaa

SEQ ID NO: 38631 - DNA, 25 bp, Artificial
  probe
  misc_feature (1)..(25): SEQ ID NO: 3769; WAN0249YQ_at; Start 1; Stop 25
ggtgagtatggaggtataatacaaa

SEQ ID NO: 38632 - DNA, 25 bp, Artificial
  probe
  misc_feature (1)..(25): SEQ ID NO: 3769; WAN0249YQ_at; Start 86; Stop 110
ccagttataacctagaaattgtgtc

SEQ ID NO: 38633 - DNA, 25 bp, Artificial
  probe
  misc_feature (1)..(25): SEQ ID NO: 3769; WAN0249YQ_at; Start 154; Stop 178
taggaatcaagacttatcaggttaa

SEQ ID NO: 38634 - DNA, 25 bp, Artificial
  probe
  misc_feature (1)..(25): SEQ ID NO: 3769; WAN0249YQ_at; Start 287; Stop 311
tacaggtaagacttgctagcttcag

SEQ ID NO: 38635 - DNA, 25 bp, Artificial
  probe
  misc_feature (1)..(25): SEQ ID NO: 3769; WAN0249YQ_at; Start 50; Stop 74
ggtggactgatgtatatgagtaact

SEQ ID NO: 38636 - DNA, 25 bp, Artificial
  probe
  misc_feature (1)..(25): SEQ ID NO: 3769; WAN0249YQ_at; Start 122; Stop 146
tattgaggacaatataatcgtagcc

SEQ ID NO: 38637 - DNA, 25 bp, Artificial
  probe
  misc_feature (1)..(25): SEQ ID NO: 3769; WAN0249YQ_at; Start 32; Stop 56
ctcgcacataagtatggaggtggac

SEQ ID NO: 38638 - DNA, 25 bp, Artificial
  probe
  misc_feature (1)..(25): SEQ ID NO: 3769; WAN0249YQ_at; Start 160; Stop 184
tcaagacttatcaggttaagaaaag

SEQ ID NO: 38639 - DNA, 25 bp, Artificial
  probe
  misc_feature (1)..(25): SEQ ID NO: 3769; WAN0249YQ_at; Start 20; Stop 44
tacaaagagaggctcgcacataagt

SEQ ID NO: 38640 - DNA, 25 bp, Artificial
  probe
  misc_feature (1)..(25): SEQ ID NO: 3769; WAN0249YQ_at; Start 129; Stop 153
gacaatataatcgtagccccaaaat

SEQ ID NO: 38641 - DNA, 25 bp, Artificial
  probe
  misc_feature (1)..(25): SEQ ID NO: 3769; WAN0249YQ_at; Start 36; Stop 60
cacataagtatggaggtggactgat

SEQ ID NO: 38642 - DNA, 25 bp, Artificial
  probe
  misc_feature (1)..(25): SEQ ID NO: 3769; WAN0249YQ_at; Start 126; Stop 150
gaggacaatataatcgtagccccaa

SEQ ID NO: 38643 - DNA, 25 bp, Artificial
  probe
  misc_feature (1)..(25): SEQ ID NO: 3769; WAN0249YQ_at; Start 346; Stop 370
tccaaaagaaaatggaaataatgaa

SEQ ID NO: 38644 - DNA, 25 bp, Artificial
  probe
  misc_feature (1)..(25): SEQ ID NO: 3769; WAN0249YQ_at; Start 268; Stop 292
gtgttgctttcattaaatttacagg

SEQ ID NO: 38645 - DNA, 25 bp, Artificial
  probe
  misc_feature (1)..(25): SEQ ID NO: 3769; WAN0249YQ_at; Start 283; Stop 307
aatttacaggtaagacttgctagct

SEQ ID NO: 38646 - DNA, 25 bp, Artificial
  probe
  misc_feature (1)..(25): SEQ ID NO: 3769; WAN0249YQ_at; Start 13; Stop 37
ggtataatacaaagagaggctcgca

SEQ ID NO: 38647 - DNA, 25 bp, Artificial
  probe
  misc_feature (1)..(25): SEQ ID NO: 3769; WAN0249YQ_at; Start 316; Stop 340
tatacacaagtttttcagaatagag

SEQ ID NO: 38648 - DNA, 25 bp, Artificial
  probe
  misc_feature (1)..(25): SEQ ID NO: 3769; WAN0249YQ_at; Start 66; Stop 90
tgagtaactatcgataaataccagt

SEQ ID NO: 38649 - DNA, 25 bp, Artificial
  probe
  misc_feature (1)..(25): SEQ ID NO: 3769; WAN0249YQ_at; Start 184; Stop 208
gaagtgatgttgttgatattttaaa

SEQ ID NO: 38650 - DNA, 25 bp, Artificial
  probe
  misc_feature (1)..(25): SEQ ID NO: 3769; WAN0249YQ_at; Start 25; Stop 49
agagaggctcgcacataagtatgga

SEQ ID NO: 38651 - DNA, 25 bp, Artificial
  probe
  misc_feature (1)..(25): SEQ ID NO: 3769; WAN0249YQ_at; Start 54; Stop 78
gactgatgtatatgagtaactatcg

SEQ ID NO: 38652 - DNA, 25 bp, Artificial
  probe
  misc_feature (1)..(25): SEQ ID NO: 3769; WAN0249YQ_at; Start 238; Stop 262
tattaatccgagattcccctctcgg

SEQ ID NO: 38653 - DNA, 25 bp, Artificial
  probe
  misc_feature (1)..(25): SEQ ID NO: 3769; WAN0249YQ_at; Start 99; Stop 123
agaaattgtgtctttctagacgata

SEQ ID NO: 38654 - DNA, 25 bp, Artificial
  probe
  misc_feature (1)..(25): SEQ ID NO: 3769; WAN0249YQ_at; Start 76; Stop 100
tcgataaataccagttataacctag

SEQ ID NO: 38655 - DNA, 25 bp, Artificial
  probe
  misc_feature (1)..(25): SEQ ID NO: 3769; WAN0249YQ_at; Start 336; Stop 360
tagagtgaaatccaaaagaaaatgg

SEQ ID NO: 38656 - DNA, 25 bp, Artificial
  probe
  misc_feature (1)..(25): SEQ ID NO: 3769; WAN0249YQ_at; Start 247; Stop 271
gagattcccctctcggattttgtgt

SEQ ID NO: 38657 - DNA, 25 bp, Artificial
  probe
  misc_feature (1)..(25): SEQ ID NO: 3769; WAN0249YQ_at; Start 255; Stop 279
cctctcggattttgtgttgctttca

SEQ ID NO: 38658 - DNA, 25 bp, Artificial
  probe
  misc_feature (1)..(25): SEQ ID NO: 3769; WAN0249YQ_at; Start 109; Stop 133
tctttctagacgatattgaggacaa

SEQ ID NO: 38659 - DNA, 25 bp, Artificial
  probe
  misc_feature (1)..(25): SEQ ID NO: 3769; WAN0249YQ_at; Start 330; Stop 354
tcagaatagagtgaaatccaaaaga

SEQ ID NO: 38660 - DNA, 25 bp, Artificial
  probe
  misc_feature (1)..(25): SEQ ID NO: 3769; WAN0249YQ_at; Start 301; Stop 325
gctagcttcagtaaatatacacaag

SEQ ID NO: 38661 - DNA, 25 bp, Artificial
  probe
  misc_feature (1)..(25): SEQ ID NO: 4829; WAN0249YR_at; Start 93; Stop 117
gaaagcaacacaaaatccgagaggg

SEQ ID NO: 38662 - DNA, 25 bp, Artificial
  probe
  misc_feature (1)..(25): SEQ ID NO: 4829; WAN0249YR_at; Start 11; Stop 35
ccattttcttttggatttcactcta

SEQ ID NO: 38663 - DNA, 25 bp, Artificial
  probe
  misc_feature (1)..(25): SEQ ID NO: 4829; WAN0249YR_at; Start 123; Stop 147
tcggattaatagatagagagttttt

SEQ ID NO: 38664 - DNA, 25 bp, Artificial
  probe
  misc_feature (1)..(25): SEQ ID NO: 4829; WAN0249YR_at; Start 312; Stop 336
tcagtccacctccatacttatgtgc

SEQ ID NO: 38665 - DNA, 25 bp, Artificial
  probe
  misc_feature (1)..(25): SEQ ID NO: 4829; WAN0249YR_at; Start 261; Stop 285
gacacaatttctaggttataactgg

SEQ ID NO: 38666 - DNA, 25 bp, Artificial
  probe
  misc_feature (1)..(25): SEQ ID NO: 4829; WAN0249YR_at; Start 116; Stop 140
gggaatctcggattaatagatagag

SEQ ID NO: 38667 - DNA, 25 bp, Artificial
  probe
  misc_feature (1)..(25): SEQ ID NO: 4829; WAN0249YR_at; Start 346; Stop 370
tttgtattatacctccatactcacc

SEQ ID NO: 38668 - DNA, 25 bp, Artificial
  probe
  misc_feature (1)..(25): SEQ ID NO: 4829; WAN0249YR_at; Start 101; Stop 125
cacaaaatccgagaggggaatctcg

SEQ ID NO: 38669 - DNA, 25 bp, Artificial
  probe
  misc_feature (1)..(25): SEQ ID NO: 4829; WAN0249YR_at; Start 77; Stop 101
tacctgtaaatttaatgaaagcaac

SEQ ID NO: 38670 - DNA, 25 bp, Artificial
  probe
  misc_feature (1)..(25): SEQ ID NO: 4829; WAN0249YR_at; Start 200; Stop 224
gataagtcttgattcctaattttgg

SEQ ID NO: 38671 - DNA, 25 bp, Artificial
  probe
  misc_feature (1)..(25): SEQ ID NO: 4829; WAN0249YR_at; Start 248; Stop 272
tatcgtctagaaagacacaatttct

SEQ ID NO: 38672 - DNA, 25 bp, Artificial
  probe
  misc_feature (1)..(25): SEQ ID NO: 4829; WAN0249YR_at; Start 29; Stop 53
cactctattctgaaaaacttgtgta

SEQ ID NO: 38673 - DNA, 25 bp, Artificial
  probe
  misc_feature (1)..(25): SEQ ID NO: 4829; WAN0249YR_at; Start 270; Stop 294
tctaggttataactggtatttatcg

SEQ ID NO: 38674 - DNA, 25 bp, Artificial
  probe
  misc_feature (1)..(25): SEQ ID NO: 4829; WAN0249YR_at; Start 62; Stop 86
gaagctagcaagtcttacctgtaaa

SEQ ID NO: 38675 - DNA, 25 bp, Artificial
  probe
  misc_feature (1)..(25): SEQ ID NO: 4829; WAN0249YR_at; Start 315; Stop 339
gtccacctccatacttatgtgcgag

SEQ ID NO: 38676 - DNA, 25 bp, Artificial
  probe
  misc_feature (1)..(25): SEQ ID NO: 4829; WAN0249YR_at; Start 191; Stop 215
tcttaacctgataagtcttgattcc

SEQ ID NO: 38677 - DNA, 25 bp, Artificial
  probe
  misc_feature (1)..(25): SEQ ID NO: 4829; WAN0249YR_at; Start 322; Stop 346
tccatacttatgtgcgagcctctct

SEQ ID NO: 38678 - DNA, 25 bp, Artificial
  probe
  misc_feature (1)..(25): SEQ ID NO: 4829; WAN0249YR_at; Start 58; Stop 82
tactgaagctagcaagtcttacctg

SEQ ID NO: 38679 - DNA, 25 bp, Artificial
  probe
  misc_feature (1)..(25): SEQ ID NO: 4829; WAN0249YR_at; Start 224; Stop 248
gggctacgattatattgtcctcaat

SEQ ID NO: 38680 - DNA, 25 bp, Artificial
  probe
  misc_feature (1)..(25): SEQ ID NO: 4829; WAN0249YR_at; Start 334; Stop 358
tgcgagcctctctttgtattatacc

SEQ ID NO: 38681 - DNA, 25 bp, Artificial
  probe
  misc_feature (1)..(25): SEQ ID NO: 4829; WAN0249YR_at; Start 242; Stop 266
cctcaatatcgtctagaaagacaca

SEQ ID NO: 38682 - DNA, 25 bp, Artificial
  probe
  misc_feature (1)..(25): SEQ ID NO: 4829; WAN0249YR_at; Start 49; Stop 73
gtgtatatttactgaagctagcaag

SEQ ID NO: 38683 - DNA, 25 bp, Artificial
  probe
  misc_feature (1)..(25): SEQ ID NO: 4829; WAN0249YR_at; Start 294; Stop 318
gatagttactcatatacatcagtcc

SEQ ID NO: 38684 - DNA, 25 bp, Artificial
  probe
  misc_feature (1)..(25): SEQ ID NO: 4829; WAN0249YR_at; Start 337; Stop 361
gagcctctctttgtattatacctcc

SEQ ID NO: 38685 - DNA, 25 bp, Artificial
  probe
  misc_feature (1)..(25): SEQ ID NO: 4829; WAN0249YR_at; Start 298; Stop 322
gttactcatatacatcagtccacct

SEQ ID NO: 38686 - DNA, 25 bp, Artificial
  probe
  misc_feature (1)..(25): SEQ ID NO: 4829; WAN0249YR_at; Start 42; Stop 66
aaaacttgtgtatatttactgaagc

SEQ ID NO: 38687 - DNA, 25 bp, Artificial
  probe
  misc_feature (1)..(25): SEQ ID NO: 4829; WAN0249YR_at; Start 209; Stop 233
tgattcctaattttggggctacgat

SEQ ID NO: 38688 - DNA, 25 bp, Artificial
  probe
  misc_feature (1)..(25): SEQ ID NO: 4829; WAN0249YR_at; Start 327; Stop 351
acttatgtgcgagcctctctttgta

SEQ ID NO: 38689 - DNA, 25 bp, Artificial
  probe
  misc_feature (1)..(25): SEQ ID NO: 4829; WAN0249YR_at; Start 163; Stop 187
tttaaaatatcaacaacatcacttc

SEQ ID NO: 38690 - DNA, 25 bp, Artificial
  probe
  misc_feature (1)..(25): SEQ ID NO: 4829; WAN0249YR_at; Start 22; Stop 46
tggatttcactctattctgaaaaac

SEQ ID NO: 38691 - DNA, 25 bp, Artificial
  probe
  misc_feature (1)..(25): SEQ ID NO: 4829; WAN0249YR_at; Start 280; Stop 304
aactggtatttatcgatagttactc

SEQ ID NO: 38692 - DNA, 25 bp, Artificial
  probe
  misc_feature (1)..(25): SEQ ID NO: 4829; WAN0249YR_at; Start 89; Stop 113
taatgaaagcaacacaaaatccgag

SEQ ID NO: 38693 - DNA, 25 bp, Artificial
  probe
  misc_feature (1)..(25): SEQ ID NO: 4829; WAN0249YR_at; Start 236; Stop 260
tattgtcctcaatatcgtctagaaa

SEQ ID NO: 38694 - DNA, 25 bp, Artificial
  probe
  misc_feature (1)..(25): SEQ ID NO: 4829; WAN0249YR_at; Start 176; Stop 200
caacatcacttcttttcttaacctg

SEQ ID NO: 38695 - DNA, 25 bp, Artificial
  probe
  misc_feature (1)..(25): SEQ ID NO: 3310; WAN0249YU_at; Start 110; Stop 134
cgaccttctccaaagaattgctata

SEQ ID NO: 38696 - DNA, 25 bp, Artificial
  probe
  misc_feature (1)..(25): SEQ ID NO: 3310; WAN0249YU_at; Start 32; Stop 56
gagaaatttttatgaataactcaat

SEQ ID NO: 38697 - DNA, 25 bp, Artificial
  probe
  misc_feature (1)..(25): SEQ ID NO: 3310; WAN0249YU_at; Start 102; Stop 126
tcttgtctcgaccttctccaaagaa

SEQ ID NO: 38698 - DNA, 25 bp, Artificial
  probe
  misc_feature (1)..(25): SEQ ID NO: 3310; WAN0249YU_at; Start 103; Stop 127
cttgtctcgaccttctccaaagaat

SEQ ID NO: 38699 - DNA, 25 bp, Artificial
  probe
  misc_feature (1)..(25): SEQ ID NO: 3310; WAN0249YU_at; Start 10; Stop 34
cgacgcattatgatatttgatagag

SEQ ID NO: 38700 - DNA, 25 bp, Artificial
  probe
  misc_feature (1)..(25): SEQ ID NO: 3310; WAN0249YU_at; Start 67; Stop 91
taaatcatgcttatatctcaaagat

SEQ ID NO: 38701 - DNA, 25 bp, Artificial
  probe
  misc_feature (1)..(25): SEQ ID NO: 3310; WAN0249YU_at; Start 113; Stop 137
ccttctccaaagaattgctataata

SEQ ID NO: 38702 - DNA, 25 bp, Artificial
  probe
  misc_feature (1)..(25): SEQ ID NO: 3310; WAN0249YU_at; Start 111; Stop 135
gaccttctccaaagaattgctataa

SEQ ID NO: 38703 - DNA, 25 bp, Artificial
  probe
  misc_feature (1)..(25): SEQ ID NO: 3310; WAN0249YU_at; Start 6; Stop 30
taaacgacgcattatgatatttgat

SEQ ID NO: 38704 - DNA, 25 bp, Artificial
  probe
  misc_feature (1)..(25): SEQ ID NO: 3310; WAN0249YU_at; Start 75; Stop 99
gcttatatctcaaagatacctattt

SEQ ID NO: 38705 - DNA, 25 bp, Artificial
  probe
  misc_feature (1)..(25): SEQ ID NO: 3310; WAN0249YU_at; Start 107; Stop 131
tctcgaccttctccaaagaattgct

SEQ ID NO: 38706 - DNA, 25 bp, Artificial
  probe
  misc_feature (1)..(25): SEQ ID NO: 3310; WAN0249YU_at; Start 93; Stop 117
cctattttatcttgtctcgaccttc

SEQ ID NO: 38707 - DNA, 25 bp, Artificial
  probe
  misc_feature (1)..(25): SEQ ID NO: 3310; WAN0249YU_at; Start 11; Stop 35
gacgcattatgatatttgatagaga

SEQ ID NO: 38708 - DNA, 25 bp, Artificial
  probe
  misc_feature (1)..(25): SEQ ID NO: 3310; WAN0249YU_at; Start 97; Stop 121
ttttatcttgtctcgaccttctcca

SEQ ID NO: 38709 - DNA, 25 bp, Artificial
  probe
  misc_feature (1)..(25): SEQ ID NO: 3310; WAN0249YU_at; Start 52; Stop 76
tcaataattttatagtaaatcatgc

SEQ ID NO: 38710 - DNA, 25 bp, Artificial
  probe
  misc_feature (1)..(25): SEQ ID NO: 3310; WAN0249YU_at; Start 150; Stop 174
catctgcactacacttcaaatttta

SEQ ID NO: 38711 - DNA, 25 bp, Artificial
  probe
  misc_feature (1)..(25): SEQ ID NO: 3310; WAN0249YU_at; Start 106; Stop 130
gtctcgaccttctccaaagaattgc

SEQ ID NO: 38712 - DNA, 25 bp, Artificial
  probe
  misc_feature (1)..(25): SEQ ID NO: 3310; WAN0249YU_at; Start 153; Stop 177
ctgcactacacttcaaattttagca

SEQ ID NO: 38713 - DNA, 25 bp, Artificial
  probe
  misc_feature (1)..(25): SEQ ID NO: 3310; WAN0249YU_at; Start 124; Stop 148
gaattgctataatactattacaaat

SEQ ID NO: 38714 - DNA, 25 bp, Artificial
  probe
  misc_feature (1)..(25): SEQ ID NO: 3310; WAN0249YU_at; Start 95; Stop 119
tattttatcttgtctcgaccttctc

SEQ ID NO: 38715 - DNA, 25 bp, Artificial
  probe
  misc_feature (1)..(25): SEQ ID NO: 3310; WAN0249YU_at; Start 89; Stop 113
gatacctattttatcttgtctcgac

SEQ ID NO: 38716 - DNA, 25 bp, Artificial
  probe
  misc_feature (1)..(25): SEQ ID NO: 3310; WAN0249YU_at; Start 100; Stop 124
tatcttgtctcgaccttctccaaag

SEQ ID NO: 38717 - DNA, 25 bp, Artificial
  probe
  misc_feature (1)..(25): SEQ ID NO: 3310; WAN0249YU_at; Start 109; Stop 133
tcgaccttctccaaagaattgctat

SEQ ID NO: 38718 - DNA, 25 bp, Artificial
  probe
  misc_feature (1)..(25): SEQ ID NO: 3310; WAN0249YU_at; Start 91; Stop 115
tacctattttatcttgtctcgacct

SEQ ID NO: 38719 - DNA, 25 bp, Artificial
  probe
  misc_feature (1)..(25): SEQ ID NO: 3310; WAN0249YU_at; Start 66; Stop 90
gtaaatcatgcttatatctcaaaga

SEQ ID NO: 38720 - DNA, 25 bp, Artificial
  probe
  misc_feature (1)..(25): SEQ ID NO: 3310; WAN0249YU_at; Start 120; Stop 144
caaagaattgctataatactattac

SEQ ID NO: 38721 - DNA, 25 bp, Artificial
  probe
  misc_feature (1)..(25): SEQ ID NO: 3310; WAN0249YU_at; Start 13; Stop 37
cgcattatgatatttgatagagaaa

SEQ ID NO: 38722 - DNA, 25 bp, Artificial
  probe
  misc_feature (1)..(25): SEQ ID NO: 3310; WAN0249YU_at; Start 116; Stop 140
tctccaaagaattgctataatacta

SEQ ID NO: 38723 - DNA, 25 bp, Artificial
  probe
  misc_feature (1)..(25): SEQ ID NO: 3310; WAN0249YU_at; Start 1; Stop 25
ctccttaaacgacgcattatgatat

SEQ ID NO: 38724 - DNA, 25 bp, Artificial
  probe
  misc_feature (1)..(25): SEQ ID NO: 3310; WAN0249YU_at; Start 152; Stop 176
tctgcactacacttcaaattttagc

SEQ ID NO: 38725 - DNA, 25 bp, Artificial
  probe
  misc_feature (1)..(25): SEQ ID NO: 3310; WAN0249YU_at; Start 105; Stop 129
tgtctcgaccttctccaaagaattg

SEQ ID NO: 38726 - DNA, 25 bp, Artificial
  probe
  misc_feature (1)..(25): SEQ ID NO: 3310; WAN0249YU_at; Start 3; Stop 27
ccttaaacgacgcattatgatattt

SEQ ID NO: 38727 - DNA, 25 bp, Artificial
  probe
  misc_feature (1)..(25): SEQ ID NO: 3310; WAN0249YU_at; Start 8; Stop 32
aacgacgcattatgatatttgatag

SEQ ID NO: 38728 - DNA, 25 bp, Artificial
  probe
  misc_feature (1)..(25): SEQ ID NO: 3310; WAN0249YU_at; Start 72; Stop 96
catgcttatatctcaaagataccta

SEQ ID NO: 38729 - DNA, 25 bp, Artificial
  probe
  misc_feature (1)..(25): SEQ ID NO: 4703; WAN0249YV_at; Start 141; Stop 165
tttctctatcaaatatcataatgcg

SEQ ID NO: 38730 - DNA, 25 bp, Artificial
  probe
  misc_feature (1)..(25): SEQ ID NO: 4703; WAN0249YV_at; Start 46; Stop 70
tagcaattctttggagaaggtcgag

SEQ ID NO: 38731 - DNA, 25 bp, Artificial
  probe
  misc_feature (1)..(25): SEQ ID NO: 4703; WAN0249YV_at; Start 144; Stop 168
ctctatcaaatatcataatgcgtcg

SEQ ID NO: 38732 - DNA, 25 bp, Artificial
  probe
  misc_feature (1)..(25): SEQ ID NO: 4703; WAN0249YV_at; Start 153; Stop 177
atatcataatgcgtcgtttaaggag

SEQ ID NO: 38733 - DNA, 25 bp, Artificial
  probe
  misc_feature (1)..(25): SEQ ID NO: 4703; WAN0249YV_at; Start 54; Stop 78
ctttggagaaggtcgagacaagata

SEQ ID NO: 38734 - DNA, 25 bp, Artificial
  probe
  misc_feature (1)..(25): SEQ ID NO: 4703; WAN0249YV_at; Start 125; Stop 149
gagttattcataaaaatttctctat

SEQ ID NO: 38735 - DNA, 25 bp, Artificial
  probe
  misc_feature (1)..(25): SEQ ID NO: 4703; WAN0249YV_at; Start 72; Stop 96
caagataaaataggtatctttgaga

SEQ ID NO: 38736 - DNA, 25 bp, Artificial
  probe
  misc_feature (1)..(25): SEQ ID NO: 4703; WAN0249YV_at; Start 145; Stop 169
tctatcaaatatcataatgcgtcgt

SEQ ID NO: 38737 - DNA, 25 bp, Artificial
  probe
  misc_feature (1)..(25): SEQ ID NO: 4703; WAN0249YV_at; Start 2; Stop 26
gctaaaatttgaagtgtagtgcaga

SEQ ID NO: 38738 - DNA, 25 bp, Artificial
  probe
  misc_feature (1)..(25): SEQ ID NO: 4703; WAN0249YV_at; Start 49; Stop 73
caattctttggagaaggtcgagaca

SEQ ID NO: 38739 - DNA, 25 bp, Artificial
  probe
  misc_feature (1)..(25): SEQ ID NO: 4703; WAN0249YV_at; Start 82; Stop 106
taggtatctttgagatataagcatg

SEQ ID NO: 38740 - DNA, 25 bp, Artificial
  probe
  misc_feature (1)..(25): SEQ ID NO: 4703; WAN0249YV_at; Start 41; Stop 65
tattatagcaattctttggagaagg

SEQ ID NO: 38741 - DNA, 25 bp, Artificial
  probe
  misc_feature (1)..(25): SEQ ID NO: 4703; WAN0249YV_at; Start 150; Stop 174
caaatatcataatgcgtcgtttaag

SEQ ID NO: 38742 - DNA, 25 bp, Artificial
  probe
  misc_feature (1)..(25): SEQ ID NO: 4703; WAN0249YV_at; Start 66; Stop 90
tcgagacaagataaaataggtatct

SEQ ID NO: 38743 - DNA, 25 bp, Artificial
  probe
  misc_feature (1)..(25): SEQ ID NO: 4703; WAN0249YV_at; Start 53; Stop 77
tctttggagaaggtcgagacaagat

SEQ ID NO: 38744 - DNA, 25 bp, Artificial
  probe
  misc_feature (1)..(25): SEQ ID NO: 4703; WAN0249YV_at; Start 62; Stop 86
aaggtcgagacaagataaaataggt

SEQ ID NO: 38745 - DNA, 25 bp, Artificial
  probe
  misc_feature (1)..(25): SEQ ID NO: 4703; WAN0249YV_at; Start 44; Stop 68
tatagcaattctttggagaaggtcg

SEQ ID NO: 38746 - DNA, 25 bp, Artificial
  probe
  misc_feature (1)..(25): SEQ ID NO: 4703; WAN0249YV_at; Start 48; Stop 72
gcaattctttggagaaggtcgagac

SEQ ID NO: 38747 - DNA, 25 bp, Artificial
  probe
  misc_feature (1)..(25): SEQ ID NO: 4703; WAN0249YV_at; Start 51; Stop 75
attctttggagaaggtcgagacaag

SEQ ID NO: 38748 - DNA, 25 bp, Artificial
  probe
  misc_feature (1)..(25): SEQ ID NO: 4703; WAN0249YV_at; Start 50; Stop 74
aattctttggagaaggtcgagacaa

SEQ ID NO: 38749 - DNA, 25 bp, Artificial
  probe
  misc_feature (1)..(25): SEQ ID NO: 4703; WAN0249YV_at; Start 52; Stop 76
ttctttggagaaggtcgagacaaga

SEQ ID NO: 38750 - DNA, 25 bp, Artificial
  probe
  misc_feature (1)..(25): SEQ ID NO: 4703; WAN0249YV_at; Start 103; Stop 127
catgatttactataaaattattgag

SEQ ID NO: 38751 - DNA, 25 bp, Artificial
  probe
  misc_feature (1)..(25): SEQ ID NO: 4703; WAN0249YV_at; Start 35; Stop 59
taatagtattatagcaattctttgg

SEQ ID NO: 38752 - DNA, 25 bp, Artificial
  probe
  misc_feature (1)..(25): SEQ ID NO: 4703; WAN0249YV_at; Start 38; Stop 62
tagtattatagcaattctttggaga

SEQ ID NO: 38753 - DNA, 25 bp, Artificial
  probe
  misc_feature (1)..(25): SEQ ID NO: 4703; WAN0249YV_at; Start 147; Stop 171
tatcaaatatcataatgcgtcgttt

SEQ ID NO: 38754 - DNA, 25 bp, Artificial
  probe
  misc_feature (1)..(25): SEQ ID NO: 4703; WAN0249YV_at; Start 93; Stop 117
gagatataagcatgatttactataa

SEQ ID NO: 38755 - DNA, 25 bp, Artificial
  probe
  misc_feature (1)..(25): SEQ ID NO: 4703; WAN0249YV_at; Start 57; Stop 81
tggagaaggtcgagacaagataaaa

SEQ ID NO: 38756 - DNA, 25 bp, Artificial
  probe
  misc_feature (1)..(25): SEQ ID NO: 4703; WAN0249YV_at; Start 88; Stop 112
tctttgagatataagcatgatttac

SEQ ID NO: 38757 - DNA, 25 bp, Artificial
  probe
  misc_feature (1)..(25): SEQ ID NO: 4703; WAN0249YV_at; Start 61; Stop 85
gaaggtcgagacaagataaaatagg

SEQ ID NO: 38758 - DNA, 25 bp, Artificial
  probe
  misc_feature (1)..(25): SEQ ID NO: 4703; WAN0249YV_at; Start 1; Stop 25
tgctaaaatttgaagtgtagtgcag

SEQ ID NO: 38759 - DNA, 25 bp, Artificial
  probe
  misc_feature (1)..(25): SEQ ID NO: 4703; WAN0249YV_at; Start 4; Stop 28
taaaatttgaagtgtagtgcagatg

SEQ ID NO: 38760 - DNA, 25 bp, Artificial
  probe
  misc_feature (1)..(25): SEQ ID NO: 4703; WAN0249YV_at; Start 47; Stop 71
agcaattctttggagaaggtcgaga

SEQ ID NO: 38761 - DNA, 25 bp, Artificial
  probe
  misc_feature (1)..(25): SEQ ID NO: 4703; WAN0249YV_at; Start 64; Stop 88
ggtcgagacaagataaaataggtat

SEQ ID NO: 38762 - DNA, 25 bp, Artificial
  probe
  misc_feature (1)..(25): SEQ ID NO: 4703; WAN0249YV_at; Start 55; Stop 79
tttggagaaggtcgagacaagataa

SEQ ID NO: 38763 - DNA, 25 bp, Artificial
  probe
  misc_feature (1)..(25): SEQ ID NO: 3708; WAN0249YW_at; Start 29; Stop 53
cttaggacctagttgagctaggaac

SEQ ID NO: 38764 - DNA, 25 bp, Artificial
  probe
  misc_feature (1)..(25): SEQ ID NO: 3708; WAN0249YW_at; Start 25; Stop 49
tgaacttaggacctagttgagctag

SEQ ID NO: 38765 - DNA, 25 bp, Artificial
  probe
  misc_feature (1)..(25): SEQ ID NO: 3708; WAN0249YW_at; Start 55; Stop 79
gacagtatcttatatagaataggag

SEQ ID NO: 38766 - DNA, 25 bp, Artificial
  probe
  misc_feature (1)..(25): SEQ ID NO: 3708; WAN0249YW_at; Start 7; Stop 31
gtccagctcgtatgaaaatgaactt

SEQ ID NO: 38767 - DNA, 25 bp, Artificial
  probe
  misc_feature (1)..(25): SEQ ID NO: 3708; WAN0249YW_at; Start 22; Stop 46
aaatgaacttaggacctagttgagc

SEQ ID NO: 38768 - DNA, 25 bp, Artificial
  probe
  misc_feature (1)..(25): SEQ ID NO: 3708; WAN0249YW_at; Start 57; Stop 81
cagtatcttatatagaataggagaa

SEQ ID NO: 38769 - DNA, 25 bp, Artificial
  probe
  misc_feature (1)..(25): SEQ ID NO: 3708; WAN0249YW_at; Start 37; Stop 61
ctagttgagctaggaaccgacagta

SEQ ID NO: 38770 - DNA, 25 bp, Artificial
  probe
  misc_feature (1)..(25): SEQ ID NO: 3708; WAN0249YW_at; Start 3; Stop 27
tctagtccagctcgtatgaaaatga

SEQ ID NO: 38771 - DNA, 25 bp, Artificial
  probe
  misc_feature (1)..(25): SEQ ID NO: 3708; WAN0249YW_at; Start 49; Stop 73
ggaaccgacagtatcttatatagaa

SEQ ID NO: 38772 - DNA, 25 bp, Artificial
  probe
  misc_feature (1)..(25): SEQ ID NO: 3708; WAN0249YW_at; Start 40; Stop 64
gttgagctaggaaccgacagtatct

SEQ ID NO: 38773 - DNA, 25 bp, Artificial
  probe
  misc_feature (1)..(25): SEQ ID NO: 3708; WAN0249YW_at; Start 15; Stop 39
cgtatgaaaatgaacttaggaccta

SEQ ID NO: 38774 - DNA, 25 bp, Artificial
  probe
  misc_feature (1)..(25): SEQ ID NO: 3708; WAN0249YW_at; Start 16; Stop 40
gtatgaaaatgaacttaggacctag

SEQ ID NO: 38775 - DNA, 25 bp, Artificial
  probe
  misc_feature (1)..(25): SEQ ID NO: 3708; WAN0249YW_at; Start 50; Stop 74
gaaccgacagtatcttatatagaat

SEQ ID NO: 38776 - DNA, 25 bp, Artificial
  probe
  misc_feature (1)..(25): SEQ ID NO: 3708; WAN0249YW_at; Start 14; Stop 38
tcgtatgaaaatgaacttaggacct

SEQ ID NO: 38777 - DNA, 25 bp, Artificial
  probe
  misc_feature (1)..(25): SEQ ID NO: 3708; WAN0249YW_at; Start 39; Stop 63
agttgagctaggaaccgacagtatc

SEQ ID NO: 38778 - DNA, 25 bp, Artificial
  probe
  misc_feature (1)..(25): SEQ ID NO: 3708; WAN0249YW_at; Start 1; Stop 25
gctctagtccagctcgtatgaaaat

SEQ ID NO: 38779 - DNA, 25 bp, Artificial
  probe
  misc_feature (1)..(25): SEQ ID NO: 3708; WAN0249YW_at; Start 61; Stop 85
atcttatatagaataggagaaggag

SEQ ID NO: 38780 - DNA, 25 bp, Artificial
  probe
  misc_feature (1)..(25): SEQ ID NO: 3708; WAN0249YW_at; Start 13; Stop 37
ctcgtatgaaaatgaacttaggacc

SEQ ID NO: 38781 - DNA, 25 bp, Artificial
  probe
  misc_feature (1)..(25): SEQ ID NO: 3708; WAN0249YW_at; Start 53; Stop 77
ccgacagtatcttatatagaatagg

SEQ ID NO: 38782 - DNA, 25 bp, Artificial
  probe
  misc_feature (1)..(25): SEQ ID NO: 3708; WAN0249YW_at; Start 43; Stop 67
gagctaggaaccgacagtatcttat

SEQ ID NO: 38783 - DNA, 25 bp, Artificial
  probe
  misc_feature (1)..(25): SEQ ID NO: 3708; WAN0249YW_at; Start 31; Stop 55
taggacctagttgagctaggaaccg

SEQ ID NO: 38784 - DNA, 25 bp, Artificial
  probe
  misc_feature (1)..(25): SEQ ID NO: 3708; WAN0249YW_at; Start 45; Stop 69
gctaggaaccgacagtatcttatat

SEQ ID NO: 38785 - DNA, 25 bp, Artificial
  probe
  misc_feature (1)..(25): SEQ ID NO: 3708; WAN0249YW_at; Start 4; Stop 28
ctagtccagctcgtatgaaaatgaa

SEQ ID NO: 38786 - DNA, 25 bp, Artificial
  probe
  misc_feature (1)..(25): SEQ ID NO: 3708; WAN0249YW_at; Start 12; Stop 36
gctcgtatgaaaatgaacttaggac

SEQ ID NO: 38787 - DNA, 25 bp, Artificial
  probe
  misc_feature (1)..(25): SEQ ID NO: 3708; WAN0249YW_at; Start 27; Stop 51
aacttaggacctagttgagctagga

SEQ ID NO: 38788 - DNA, 25 bp, Artificial
  probe
  misc_feature (1)..(25): SEQ ID NO: 3708; WAN0249YW_at; Start 36; Stop 60
cctagttgagctaggaaccgacagt

SEQ ID NO: 38789 - DNA, 25 bp, Artificial
  probe
  misc_feature (1)..(25): SEQ ID NO: 3708; WAN0249YW_at; Start 5; Stop 29
tagtccagctcgtatgaaaatgaac

SEQ ID NO: 38790 - DNA, 25 bp, Artificial
  probe
  misc_feature (1)..(25): SEQ ID NO: 3708; WAN0249YW_at; Start 10; Stop 34
cagctcgtatgaaaatgaacttagg

SEQ ID NO: 38791 - DNA, 25 bp, Artificial
  probe
  misc_feature (1)..(25): SEQ ID NO: 3708; WAN0249YW_at; Start 9; Stop 33
ccagctcgtatgaaaatgaacttag

SEQ ID NO: 38792 - DNA, 25 bp, Artificial
  probe
  misc_feature (1)..(25): SEQ ID NO: 3708; WAN0249YW_at; Start 38; Stop 62
tagttgagctaggaaccgacagtat

SEQ ID NO: 38793 - DNA, 25 bp, Artificial
  probe
  misc_feature (1)..(25): SEQ ID NO: 3708; WAN0249YW_at; Start 41; Stop 65
ttgagctaggaaccgacagtatctt

SEQ ID NO: 38794 - DNA, 25 bp, Artificial
  probe
  misc_feature (1)..(25): SEQ ID NO: 3708; WAN0249YW_at; Start 47; Stop 71
taggaaccgacagtatcttatatag

SEQ ID NO: 38795 - DNA, 25 bp, Artificial
  probe
  misc_feature (1)..(25): SEQ ID NO: 3708; WAN0249YW_at; Start 19; Stop 43
tgaaaatgaacttaggacctagttg

SEQ ID NO: 38796 - DNA, 25 bp, Artificial
  probe
  misc_feature (1)..(25): SEQ ID NO: 3708; WAN0249YW_at; Start 34; Stop 58
gacctagttgagctaggaaccgaca

SEQ ID NO: 38797 - DNA, 25 bp, Artificial
  probe
  misc_feature (1)..(25): SEQ ID NO: 3311; WAN0249YX_at; Start 35; Stop 59
tcctagctcaactaggtcctaagtt

SEQ ID NO: 38798 - DNA, 25 bp, Artificial
  probe
  misc_feature (1)..(25): SEQ ID NO: 3311; WAN0249YX_at; Start 30; Stop 54
tcggttcctagctcaactaggtcct

SEQ ID NO: 38799 - DNA, 25 bp, Artificial
  probe
  misc_feature (1)..(25): SEQ ID NO: 3311; WAN0249YX_at; Start 16; Stop 40
tatataagatactgtcggttcctag

SEQ ID NO: 38800 - DNA, 25 bp, Artificial
  probe
  misc_feature (1)..(25): SEQ ID NO: 3311; WAN0249YX_at; Start 40; Stop 64
gctcaactaggtcctaagttcattt

SEQ ID NO: 38801 - DNA, 25 bp, Artificial
  probe
  misc_feature (1)..(25): SEQ ID NO: 3311; WAN0249YX_at; Start 13; Stop 37
ttctatataagatactgtcggttcc

SEQ ID NO: 38802 - DNA, 25 bp, Artificial
  probe
  misc_feature (1)..(25): SEQ ID NO: 3311; WAN0249YX_at; Start 60; Stop 84
cattttcatacgagctggactagag

SEQ ID NO: 38803 - DNA, 25 bp, Artificial
  probe
  misc_feature (1)..(25): SEQ ID NO: 3311; WAN0249YX_at; Start 26; Stop 50
actgtcggttcctagctcaactagg

SEQ ID NO: 38804 - DNA, 25 bp, Artificial
  probe
  misc_feature (1)..(25): SEQ ID NO: 3311; WAN0249YX_at; Start 53; Stop 77
ctaagttcattttcatacgagctgg

SEQ ID NO: 38805 - DNA, 25 bp, Artificial
  probe
  misc_feature (1)..(25): SEQ ID NO: 3311; WAN0249YX_at; Start 28; Stop 52
tgtcggttcctagctcaactaggtc

SEQ ID NO: 38806 - DNA, 25 bp, Artificial
  probe
  misc_feature (1)..(25): SEQ ID NO: 3311; WAN0249YX_at; Start 49; Stop 73
ggtcctaagttcattttcatacgag

SEQ ID NO: 38807 - DNA, 25 bp, Artificial
  probe
  misc_feature (1)..(25): SEQ ID NO: 3311; WAN0249YX_at; Start 55; Stop 79
aagttcattttcatacgagctggac

SEQ ID NO: 38808 - DNA, 25 bp, Artificial
  probe
  misc_feature (1)..(25): SEQ ID NO: 3311; WAN0249YX_at; Start 9; Stop 33
cctattctatataagatactgtcgg

SEQ ID NO: 38809 - DNA, 25 bp, Artificial
  probe
  misc_feature (1)..(25): SEQ ID NO: 3311; WAN0249YX_at; Start 25; Stop 49
tactgtcggttcctagctcaactag

SEQ ID NO: 38810 - DNA, 25 bp, Artificial
  probe
  misc_feature (1)..(25): SEQ ID NO: 3311; WAN0249YX_at; Start 50; Stop 74
gtcctaagttcattttcatacgagc

SEQ ID NO: 38811 - DNA, 25 bp, Artificial
  probe
  misc_feature (1)..(25): SEQ ID NO: 3311; WAN0249YX_at; Start 32; Stop 56
ggttcctagctcaactaggtcctaa

SEQ ID NO: 38812 - DNA, 25 bp, Artificial
  probe
  misc_feature (1)..(25): SEQ ID NO: 3311; WAN0249YX_at; Start 52; Stop 76
cctaagttcattttcatacgagctg

SEQ ID NO: 38813 - DNA, 25 bp, Artificial
  probe
  misc_feature (1)..(25): SEQ ID NO: 3311; WAN0249YX_at; Start 61; Stop 85
attttcatacgagctggactagagc

SEQ ID NO: 38814 - DNA, 25 bp, Artificial
  probe
  misc_feature (1)..(25): SEQ ID NO: 3311; WAN0249YX_at; Start 17; Stop 41
atataagatactgtcggttcctagc

SEQ ID NO: 38815 - DNA, 25 bp, Artificial
  probe
  misc_feature (1)..(25): SEQ ID NO: 3311; WAN0249YX_at; Start 21; Stop 45
aagatactgtcggttcctagctcaa

SEQ ID NO: 38816 - DNA, 25 bp, Artificial
  probe
  misc_feature (1)..(25): SEQ ID NO: 3311; WAN0249YX_at; Start 22; Stop 46
agatactgtcggttcctagctcaac

SEQ ID NO: 38817 - DNA, 25 bp, Artificial
  probe
  misc_feature (1)..(25): SEQ ID NO: 3311; WAN0249YX_at; Start 59; Stop 83
tcattttcatacgagctggactaga

SEQ ID NO: 38818 - DNA, 25 bp, Artificial
  probe
  misc_feature (1)..(25): SEQ ID NO: 3311; WAN0249YX_at; Start 11; Stop 35
tattctatataagatactgtcggtt

SEQ ID NO: 38819 - DNA, 25 bp, Artificial
  probe
  misc_feature (1)..(25): SEQ ID NO: 3311; WAN0249YX_at; Start 38; Stop 62
tagctcaactaggtcctaagttcat

SEQ ID NO: 38820 - DNA, 25 bp, Artificial
  probe
  misc_feature (1)..(25): SEQ ID NO: 3311; WAN0249YX_at; Start 43; Stop 67
caactaggtcctaagttcattttca

SEQ ID NO: 38821 - DNA, 25 bp, Artificial
  probe
  misc_feature (1)..(25): SEQ ID NO: 3311; WAN0249YX_at; Start 47; Stop 71
taggtcctaagttcattttcatacg

SEQ ID NO: 38822 - DNA, 25 bp, Artificial
  probe
  misc_feature (1)..(25): SEQ ID NO: 3311; WAN0249YX_at; Start 18; Stop 42
tataagatactgtcggttcctagct

SEQ ID NO: 38823 - DNA, 25 bp, Artificial
  probe
  misc_feature (1)..(25): SEQ ID NO: 3311; WAN0249YX_at; Start 19; Stop 43
ataagatactgtcggttcctagctc

SEQ ID NO: 38824 - DNA, 25 bp, Artificial
  probe
  misc_feature (1)..(25): SEQ ID NO: 3311; WAN0249YX_at; Start 1; Stop 25
ctccttctcctattctatataagat

SEQ ID NO: 38825 - DNA, 25 bp, Artificial
  probe
  misc_feature (1)..(25): SEQ ID NO: 3311; WAN0249YX_at; Start 33; Stop 57
gttcctagctcaactaggtcctaag

SEQ ID NO: 38826 - DNA, 25 bp, Artificial
  probe
  misc_feature (1)..(25): SEQ ID NO: 3311; WAN0249YX_at; Start 23; Stop 47
gatactgtcggttcctagctcaact

SEQ ID NO: 38827 - DNA, 25 bp, Artificial
  probe
  misc_feature (1)..(25): SEQ ID NO: 3311; WAN0249YX_at; Start 14; Stop 38
tctatataagatactgtcggttcct

SEQ ID NO: 38828 - DNA, 25 bp, Artificial
  probe
  misc_feature (1)..(25): SEQ ID NO: 3311; WAN0249YX_at; Start 54; Stop 78
taagttcattttcatacgagctgga

SEQ ID NO: 38829 - DNA, 25 bp, Artificial
  probe
  misc_feature (1)..(25): SEQ ID NO: 3311; WAN0249YX_at; Start 57; Stop 81
gttcattttcatacgagctggacta

SEQ ID NO: 38830 - DNA, 25 bp, Artificial
  probe
  misc_feature (1)..(25): SEQ ID NO: 3311; WAN0249YX_at; Start 58; Stop 82
ttcattttcatacgagctggactag

SEQ ID NO: 38831 - DNA, 25 bp, Artificial
  probe
  misc_feature (1)..(25): SEQ ID NO: 4469; WAN0249YY_at; Start 54; Stop 78
aaagatatccaattagatgtaagca

SEQ ID NO: 38832 - DNA, 25 bp, Artificial
  probe
  misc_feature (1)..(25): SEQ ID NO: 4469; WAN0249YY_at; Start 45; Stop 69
aagtaaattaaagatatccaattag

SEQ ID NO: 38833 - DNA, 25 bp, Artificial
  probe
  misc_feature (1)..(25): SEQ ID NO: 4469; WAN0249YY_at; Start 53; Stop 77
taaagatatccaattagatgtaagc

SEQ ID NO: 38834 - DNA, 25 bp, Artificial
  probe
  misc_feature (1)..(25): SEQ ID NO: 4469; WAN0249YY_at; Start 20; Stop 44
gataagactattatatcacaaaaac

SEQ ID NO: 38835 - DNA, 25 bp, Artificial
  probe
  misc_feature (1)..(25): SEQ ID NO: 4469; WAN0249YY_at; Start 67; Stop 91
tagatgtaagcactttaaaaaagag

SEQ ID NO: 38836 - DNA, 25 bp, Artificial
  probe
  misc_feature (1)..(25): SEQ ID NO: 4469; WAN0249YY_at; Start 57; Stop 81
gatatccaattagatgtaagcactt

SEQ ID NO: 38837 - DNA, 25 bp, Artificial
  probe
  misc_feature (1)..(25): SEQ ID NO: 4469; WAN0249YY_at; Start 3; Stop 27
ctatacctctgtgtaaagataagac

SEQ ID NO: 38838 - DNA, 25 bp, Artificial
  probe
  misc_feature (1)..(25): SEQ ID NO: 4469; WAN0249YY_at; Start 50; Stop 74
aattaaagatatccaattagatgta

SEQ ID NO: 38839 - DNA, 25 bp, Artificial
  probe
  misc_feature (1)..(25): SEQ ID NO: 4469; WAN0249YY_at; Start 43; Stop 67
acaagtaaattaaagatatccaatt

SEQ ID NO: 38840 - DNA, 25 bp, Artificial
  probe
  misc_feature (1)..(25): SEQ ID NO: 4469; WAN0249YY_at; Start 49; Stop 73
aaattaaagatatccaattagatgt

SEQ ID NO: 38841 - DNA, 25 bp, Artificial
  probe
  misc_feature (1)..(25): SEQ ID NO: 4469; WAN0249YY_at; Start 5; Stop 29
atacctctgtgtaaagataagacta

SEQ ID NO: 38842 - DNA, 25 bp, Artificial
  probe
  misc_feature (1)..(25): SEQ ID NO: 4469; WAN0249YY_at; Start 2; Stop 26
actatacctctgtgtaaagataaga

SEQ ID NO: 38843 - DNA, 25 bp, Artificial
  probe
  misc_feature (1)..(25): SEQ ID NO: 4469; WAN0249YY_at; Start 58; Stop 82
atatccaattagatgtaagcacttt

SEQ ID NO: 38844 - DNA, 25 bp, Artificial
  probe
  misc_feature (1)..(25): SEQ ID NO: 4469; WAN0249YY_at; Start 55; Stop 79
aagatatccaattagatgtaagcac

SEQ ID NO: 38845 - DNA, 25 bp, Artificial
  probe
  misc_feature (1)..(25): SEQ ID NO: 4469; WAN0249YY_at; Start 4; Stop 28
tatacctctgtgtaaagataagact

SEQ ID NO: 38846 - DNA, 25 bp, Artificial
  probe
  misc_feature (1)..(25): SEQ ID NO: 4469; WAN0249YY_at; Start 47; Stop 71
gtaaattaaagatatccaattagat

SEQ ID NO: 38847 - DNA, 25 bp, Artificial
  probe
  misc_feature (1)..(25): SEQ ID NO: 4469; WAN0249YY_at; Start 22; Stop 46
taagactattatatcacaaaaacaa

SEQ ID NO: 38848 - DNA, 25 bp, Artificial
  probe
  misc_feature (1)..(25): SEQ ID NO: 4469; WAN0249YY_at; Start 48; Stop 72
taaattaaagatatccaattagatg

SEQ ID NO: 38849 - DNA, 25 bp, Artificial
  probe
  misc_feature (1)..(25): SEQ ID NO: 4469; WAN0249YY_at; Start 1; Stop 25
tactatacctctgtgtaaagataag

SEQ ID NO: 38850 - DNA, 25 bp, Artificial
  probe
  misc_feature (1)..(25): SEQ ID NO: 4469; WAN0249YY_at; Start 8; Stop 32
cctctgtgtaaagataagactatta

SEQ ID NO: 38851 - DNA, 25 bp, Artificial
  probe
  misc_feature (1)..(25): SEQ ID NO: 4469; WAN0249YY_at; Start 62; Stop 86
ccaattagatgtaagcactttaaaa

SEQ ID NO: 38852 - DNA, 25 bp, Artificial
  probe
  misc_feature (1)..(25): SEQ ID NO: 4469; WAN0249YY_at; Start 65; Stop 89
attagatgtaagcactttaaaaaag

SEQ ID NO: 38853 - DNA, 25 bp, Artificial
  probe
  misc_feature (1)..(25): SEQ ID NO: 4469; WAN0249YY_at; Start 6; Stop 30
tacctctgtgtaaagataagactat

SEQ ID NO: 38854 - DNA, 25 bp, Artificial
  probe
  misc_feature (1)..(25): SEQ ID NO: 4469; WAN0249YY_at; Start 61; Stop 85
tccaattagatgtaagcactttaaa

SEQ ID NO: 38855 - DNA, 25 bp, Artificial
  probe
  misc_feature (1)..(25): SEQ ID NO: 4469; WAN0249YY_at; Start 66; Stop 90
ttagatgtaagcactttaaaaaaga

SEQ ID NO: 38856 - DNA, 25 bp, Artificial
  probe
  misc_feature (1)..(25): SEQ ID NO: 4469; WAN0249YY_at; Start 59; Stop 83
tatccaattagatgtaagcacttta

SEQ ID NO: 38857 - DNA, 25 bp, Artificial
  probe
  misc_feature (1)..(25): SEQ ID NO: 4469; WAN0249YY_at; Start 52; Stop 76
ttaaagatatccaattagatgtaag

SEQ ID NO: 38858 - DNA, 25 bp, Artificial
  probe
  misc_feature (1)..(25): SEQ ID NO: 4469; WAN0249YY_at; Start 42; Stop 66
aacaagtaaattaaagatatccaat

SEQ ID NO: 38859 - DNA, 25 bp, Artificial
  probe
  misc_feature (1)..(25): SEQ ID NO: 4469; WAN0249YY_at; Start 60; Stop 84
atccaattagatgtaagcactttaa

SEQ ID NO: 38860 - DNA, 25 bp, Artificial
  probe
  misc_feature (1)..(25): SEQ ID NO: 4469; WAN0249YY_at; Start 56; Stop 80
agatatccaattagatgtaagcact

SEQ ID NO: 38861 - DNA, 25 bp, Artificial
  probe
  misc_feature (1)..(25): SEQ ID NO: 4469; WAN0249YY_at; Start 63; Stop 87
caattagatgtaagcactttaaaaa

SEQ ID NO: 38862 - DNA, 25 bp, Artificial
  probe
  misc_feature (1)..(25): SEQ ID NO: 4469; WAN0249YY_at; Start 46; Stop 70
agtaaattaaagatatccaattaga

SEQ ID NO: 38863 - DNA, 25 bp, Artificial
  probe
  misc_feature (1)..(25): SEQ ID NO: 4469; WAN0249YY_at; Start 7; Stop 31
acctctgtgtaaagataagactatt

SEQ ID NO: 38864 - DNA, 25 bp, Artificial
  probe
  misc_feature (1)..(25): SEQ ID NO: 4469; WAN0249YY_at; Start 44; Stop 68
caagtaaattaaagatatccaatta

SEQ ID NO: 38865 - DNA, 25 bp, Artificial
  probe
  misc_feature (1)..(25): SEQ ID NO: 3320; WAN0249YZ_at; Start 67; Stop 91
cttatctttacacagaggtatagta

SEQ ID NO: 38866 - DNA, 25 bp, Artificial
  probe
  misc_feature (1)..(25): SEQ ID NO: 3320; WAN0249YZ_at; Start 22; Stop 46
tctaattggatatctttaatttact

SEQ ID NO: 38867 - DNA, 25 bp, Artificial
  probe
  misc_feature (1)..(25): SEQ ID NO: 3320; WAN0249YZ_at; Start 61; Stop 85
aatagtcttatctttacacagaggt

SEQ ID NO: 38868 - DNA, 25 bp, Artificial
  probe
  misc_feature (1)..(25): SEQ ID NO: 3320; WAN0249YZ_at; Start 38; Stop 62
taatttacttgtttttgtgatataa

SEQ ID NO: 38869 - DNA, 25 bp, Artificial
  probe
  misc_feature (1)..(25): SEQ ID NO: 3320; WAN0249YZ_at; Start 6; Stop 30
ttttaaagtgcttacatctaattgg

SEQ ID NO: 38870 - DNA, 25 bp, Artificial
  probe
  misc_feature (1)..(25): SEQ ID NO: 3320; WAN0249YZ_at; Start 39; Stop 63
aatttacttgtttttgtgatataat

SEQ ID NO: 38871 - DNA, 25 bp, Artificial
  probe
  misc_feature (1)..(25): SEQ ID NO: 3320; WAN0249YZ_at; Start 63; Stop 87
tagtcttatctttacacagaggtat

SEQ ID NO: 38872 - DNA, 25 bp, Artificial
  probe
  misc_feature (1)..(25): SEQ ID NO: 3320; WAN0249YZ_at; Start 23; Stop 47
ctaattggatatctttaatttactt

SEQ ID NO: 38873 - DNA, 25 bp, Artificial
  probe
  misc_feature (1)..(25): SEQ ID NO: 3320; WAN0249YZ_at; Start 5; Stop 29
tttttaaagtgcttacatctaattg

SEQ ID NO: 38874 - DNA, 25 bp, Artificial
  probe
  misc_feature (1)..(25): SEQ ID NO: 3320; WAN0249YZ_at; Start 1; Stop 25
ctcttttttaaagtgcttacatcta

SEQ ID NO: 38875 - DNA, 25 bp, Artificial
  probe
  misc_feature (1)..(25): SEQ ID NO: 3320; WAN0249YZ_at; Start 66; Stop 90
tcttatctttacacagaggtatagt

SEQ ID NO: 38876 - DNA, 25 bp, Artificial
  probe
  misc_feature (1)..(25): SEQ ID NO: 3320; WAN0249YZ_at; Start 19; Stop 43
acatctaattggatatctttaattt

SEQ ID NO: 38877 - DNA, 25 bp, Artificial
  probe
  misc_feature (1)..(25): SEQ ID NO: 3320; WAN0249YZ_at; Start 21; Stop 45
atctaattggatatctttaatttac

SEQ ID NO: 38878 - DNA, 25 bp, Artificial
  probe
  misc_feature (1)..(25): SEQ ID NO: 3320; WAN0249YZ_at; Start 20; Stop 44
catctaattggatatctttaattta

SEQ ID NO: 38879 - DNA, 25 bp, Artificial
  probe
  misc_feature (1)..(25): SEQ ID NO: 3320; WAN0249YZ_at; Start 62; Stop 86
atagtcttatctttacacagaggta

SEQ ID NO: 38880 - DNA, 25 bp, Artificial
  probe
  misc_feature (1)..(25): SEQ ID NO: 3320; WAN0249YZ_at; Start 26; Stop 50
attggatatctttaatttacttgtt

SEQ ID NO: 38881 - DNA, 25 bp, Artificial
  probe
  misc_feature (1)..(25): SEQ ID NO: 3320; WAN0249YZ_at; Start 24; Stop 48
taattggatatctttaatttacttg

SEQ ID NO: 38882 - DNA, 25 bp, Artificial
  probe
  misc_feature (1)..(25): SEQ ID NO: 3320; WAN0249YZ_at; Start 16; Stop 40
cttacatctaattggatatctttaa

SEQ ID NO: 38883 - DNA, 25 bp, Artificial
  probe
  misc_feature (1)..(25): SEQ ID NO: 3320; WAN0249YZ_at; Start 2; Stop 26
tcttttttaaagtgcttacatctaa

SEQ ID NO: 38884 - DNA, 25 bp, Artificial
  probe
  misc_feature (1)..(25): SEQ ID NO: 3320; WAN0249YZ_at; Start 64; Stop 88
agtcttatctttacacagaggtata

SEQ ID NO: 38885 - DNA, 25 bp, Artificial
  probe
  misc_feature (1)..(25): SEQ ID NO: 3320; WAN0249YZ_at; Start 18; Stop 42
tacatctaattggatatctttaatt

SEQ ID NO: 38886 - DNA, 25 bp, Artificial
  probe
  misc_feature (1)..(25): SEQ ID NO: 3320; WAN0249YZ_at; Start 65; Stop 89
gtcttatctttacacagaggtatag

SEQ ID NO: 38887 - DNA, 25 bp, Artificial
  probe
  misc_feature (1)..(25): SEQ ID NO: 3320; WAN0249YZ_at; Start 3; Stop 27
cttttttaaagtgcttacatctaat

SEQ ID NO: 38888 - DNA, 25 bp, Artificial
  probe
  misc_feature (1)..(25): SEQ ID NO: 3320; WAN0249YZ_at; Start 17; Stop 41
ttacatctaattggatatctttaat

SEQ ID NO: 38889 - DNA, 25 bp, Artificial
  probe
  misc_feature (1)..(25): SEQ ID NO: 3320; WAN0249YZ_at; Start 60; Stop 84
taatagtcttatctttacacagagg

SEQ ID NO: 38890 - DNA, 25 bp, Artificial
  probe
  misc_feature (1)..(25): SEQ ID NO: 3320; WAN0249YZ_at; Start 25; Stop 49
aattggatatctttaatttacttgt

SEQ ID NO: 38891 - DNA, 25 bp, Artificial
  probe
  misc_feature (1)..(25): SEQ ID NO: 3320; WAN0249YZ_at; Start 15; Stop 39
gcttacatctaattggatatcttta

SEQ ID NO: 38892 - DNA, 25 bp, Artificial
  probe
  misc_feature (1)..(25): SEQ ID NO: 3566; WAN0249Z2_at; Start 37; Stop 61
ttgatagctacggtttttatttgta

SEQ ID NO: 38893 - DNA, 25 bp, Artificial
  probe
  misc_feature (1)..(25): SEQ ID NO: 3566; WAN0249Z2_at; Start 58; Stop 82
tgtatatggtagaatctttttacaa

SEQ ID NO: 38894 - DNA, 25 bp, Artificial
  probe
  misc_feature (1)..(25): SEQ ID NO: 3566; WAN0249Z2_at; Start 25; Stop 49
agtttatctcttttgatagctacgg

SEQ ID NO: 38895 - DNA, 25 bp, Artificial
  probe
  misc_feature (1)..(25): SEQ ID NO: 3566; WAN0249Z2_at; Start 52; Stop 76
tttatttgtatatggtagaatcttt

SEQ ID NO: 38896 - DNA, 25 bp, Artificial
  probe
  misc_feature (1)..(25): SEQ ID NO: 3566; WAN0249Z2_at; Start 16; Stop 40
tagaactgtagtttatctcttttga

SEQ ID NO: 38897 - DNA, 25 bp, Artificial
  probe
  misc_feature (1)..(25): SEQ ID NO: 3566; WAN0249Z2_at; Start 42; Stop 66
agctacggtttttatttgtatatgg

SEQ ID NO: 38898 - DNA, 25 bp, Artificial
  probe
  misc_feature (1)..(25): SEQ ID NO: 3566; WAN0249Z2_at; Start 39; Stop 63
gatagctacggtttttatttgtata

SEQ ID NO: 38899 - DNA, 25 bp, Artificial
  probe
  misc_feature (1)..(25): SEQ ID NO: 3566; WAN0249Z2_at; Start 30; Stop 54
atctcttttgatagctacggttttt

SEQ ID NO: 38900 - DNA, 25 bp, Artificial
  probe
  misc_feature (1)..(25): SEQ ID NO: 3566; WAN0249Z2_at; Start 31; Stop 55
tctcttttgatagctacggttttta

SEQ ID NO: 38901 - DNA, 25 bp, Artificial
  probe
  misc_feature (1)..(25): SEQ ID NO: 3566; WAN0249Z2_at; Start 21; Stop 45
ctgtagtttatctcttttgatagct

SEQ ID NO: 38902 - DNA, 25 bp, Artificial
  probe
  misc_feature (1)..(25): SEQ ID NO: 3566; WAN0249Z2_at; Start 28; Stop 52
ttatctcttttgatagctacggttt

SEQ ID NO: 38903 - DNA, 25 bp, Artificial
  probe
  misc_feature (1)..(25): SEQ ID NO: 3566; WAN0249Z2_at; Start 22; Stop 46
tgtagtttatctcttttgatagcta

SEQ ID NO: 38904 - DNA, 25 bp, Artificial
  probe
  misc_feature (1)..(25): SEQ ID NO: 3566; WAN0249Z2_at; Start 60; Stop 84
tatatggtagaatctttttacaaaa

SEQ ID NO: 38905 - DNA, 25 bp, Artificial
  probe
  misc_feature (1)..(25): SEQ ID NO: 3566; WAN0249Z2_at; Start 41; Stop 65
tagctacggtttttatttgtatatg

SEQ ID NO: 38906 - DNA, 25 bp, Artificial
  probe
  misc_feature (1)..(25): SEQ ID NO: 3566; WAN0249Z2_at; Start 2; Stop 26
aatgtttaaacatatagaactgtag

SEQ ID NO: 38907 - DNA, 25 bp, Artificial
  probe
  misc_feature (1)..(25): SEQ ID NO: 3566; WAN0249Z2_at; Start 19; Stop 43
aactgtagtttatctcttttgatag

SEQ ID NO: 38908 - DNA, 25 bp, Artificial
  probe
  misc_feature (1)..(25): SEQ ID NO: 3566; WAN0249Z2_at; Start 24; Stop 48
tagtttatctcttttgatagctacg

SEQ ID NO: 38909 - DNA, 25 bp, Artificial
  probe
  misc_feature (1)..(25): SEQ ID NO: 3566; WAN0249Z2_at; Start 17; Stop 41
agaactgtagtttatctcttttgat

SEQ ID NO: 38910 - DNA, 25 bp, Artificial
  probe
  misc_feature (1)..(25): SEQ ID NO: 3566; WAN0249Z2_at; Start 4; Stop 28
tgtttaaacatatagaactgtagtt

SEQ ID NO: 38911 - DNA, 25 bp, Artificial
  probe
  misc_feature (1)..(25): SEQ ID NO: 3566; WAN0249Z2_at; Start 29; Stop 53
tatctcttttgatagctacggtttt

SEQ ID NO: 38912 - DNA, 25 bp, Artificial
  probe
  misc_feature (1)..(25): SEQ ID NO: 3566; WAN0249Z2_at; Start 26; Stop 50
gtttatctcttttgatagctacggt

SEQ ID NO: 38913 - DNA, 25 bp, Artificial
  probe
  misc_feature (1)..(25): SEQ ID NO: 3566; WAN0249Z2_at; Start 11; Stop 35
acatatagaactgtagtttatctct

SEQ ID NO: 38914 - DNA, 25 bp, Artificial
  probe
  misc_feature (1)..(25): SEQ ID NO: 3566; WAN0249Z2_at; Start 1; Stop 25
gaatgtttaaacatatagaactgta

SEQ ID NO: 38915 - DNA, 25 bp, Artificial
  probe
  misc_feature (1)..(25): SEQ ID NO: 3566; WAN0249Z2_at; Start 54; Stop 78
tatttgtatatggtagaatcttttt

SEQ ID NO: 38916 - DNA, 25 bp, Artificial
  probe
  misc_feature (1)..(25): SEQ ID NO: 3566; WAN0249Z2_at; Start 32; Stop 56
ctcttttgatagctacggtttttat

SEQ ID NO: 38917 - DNA, 25 bp, Artificial
  probe
  misc_feature (1)..(25): SEQ ID NO: 3566; WAN0249Z2_at; Start 49; Stop 73
gtttttatttgtatatggtagaatc

SEQ ID NO: 38918 - DNA, 25 bp, Artificial
  probe
  misc_feature (1)..(25): SEQ ID NO: 3566; WAN0249Z2_at; Start 12; Stop 36
catatagaactgtagtttatctctt

SEQ ID NO: 38919 - DNA, 25 bp, Artificial
  probe
  misc_feature (1)..(25): SEQ ID NO: 3566; WAN0249Z2_at; Start 20; Stop 44
actgtagtttatctcttttgatagc

SEQ ID NO: 38920 - DNA, 25 bp, Artificial
  probe
  misc_feature (1)..(25): SEQ ID NO: 3566; WAN0249Z2_at; Start 56; Stop 80
tttgtatatggtagaatctttttac

SEQ ID NO: 38921 - DNA, 25 bp, Artificial
  probe
  misc_feature (1)..(25): SEQ ID NO: 3566; WAN0249Z2_at; Start 59; Stop 83
gtatatggtagaatctttttacaaa

SEQ ID NO: 38922 - DNA, 25 bp, Artificial
  probe
  misc_feature (1)..(25): SEQ ID NO: 3566; WAN0249Z2_at; Start 18; Stop 42
gaactgtagtttatctcttttgata

SEQ ID NO: 38923 - DNA, 25 bp, Artificial
  probe
  misc_feature (1)..(25): SEQ ID NO: 3566; WAN0249Z2_at; Start 10; Stop 34
aacatatagaactgtagtttatctc

SEQ ID NO: 38924 - DNA, 25 bp, Artificial
  probe
  misc_feature (1)..(25): SEQ ID NO: 3566; WAN0249Z2_at; Start 27; Stop 51
tttatctcttttgatagctacggtt

SEQ ID NO: 38925 - DNA, 25 bp, Artificial
  probe
  misc_feature (1)..(25): SEQ ID NO: 3566; WAN0249Z2_at; Start 8; Stop 32
taaacatatagaactgtagtttatc

SEQ ID NO: 38926 - DNA, 25 bp, Artificial
  probe
  misc_feature (1)..(25): SEQ ID NO: 3808; WAN0249Z3_at; Start 50; Stop 74
caaaagagataaactacagttctat

SEQ ID NO: 38927 - DNA, 25 bp, Artificial
  probe
  misc_feature (1)..(25): SEQ ID NO: 3808; WAN0249Z3_at; Start 11; Stop 35
aaaaagattctaccatatacaaata

SEQ ID NO: 38928 - DNA, 25 bp, Artificial
  probe
  misc_feature (1)..(25): SEQ ID NO: 3808; WAN0249Z3_at; Start 49; Stop 73
tcaaaagagataaactacagttcta

SEQ ID NO: 38929 - DNA, 25 bp, Artificial
  probe
  misc_feature (1)..(25): SEQ ID NO: 3808; WAN0249Z3_at; Start 44; Stop 68
agctatcaaaagagataaactacag

SEQ ID NO: 38930 - DNA, 25 bp, Artificial
  probe
  misc_feature (1)..(25): SEQ ID NO: 3808; WAN0249Z3_at; Start 43; Stop 67
tagctatcaaaagagataaactaca

SEQ ID NO: 38931 - DNA, 25 bp, Artificial
  probe
  misc_feature (1)..(25): SEQ ID NO: 3808; WAN0249Z3_at; Start 53; Stop 77
aagagataaactacagttctatatg

SEQ ID NO: 38932 - DNA, 25 bp, Artificial
  probe
  misc_feature (1)..(25): SEQ ID NO: 3808; WAN0249Z3_at; Start 46; Stop 70
ctatcaaaagagataaactacagtt

SEQ ID NO: 38933 - DNA, 25 bp, Artificial
  probe
  misc_feature (1)..(25): SEQ ID NO: 3808; WAN0249Z3_at; Start 24; Stop 48
catatacaaataaaaaccgtagcta

SEQ ID NO: 38934 - DNA, 25 bp, Artificial
  probe
  misc_feature (1)..(25): SEQ ID NO: 3808; WAN0249Z3_at; Start 23; Stop 47
ccatatacaaataaaaaccgtagct

SEQ ID NO: 38935 - DNA, 25 bp, Artificial
  probe
  misc_feature (1)..(25): SEQ ID NO: 3808; WAN0249Z3_at; Start 36; Stop 60
aaaaccgtagctatcaaaagagata

SEQ ID NO: 38936 - DNA, 25 bp, Artificial
  probe
  misc_feature (1)..(25): SEQ ID NO: 3808; WAN0249Z3_at; Start 45; Stop 69
gctatcaaaagagataaactacagt

SEQ ID NO: 38937 - DNA, 25 bp, Artificial
  probe
  misc_feature (1)..(25): SEQ ID NO: 3808; WAN0249Z3_at; Start 55; Stop 79
gagataaactacagttctatatgtt

SEQ ID NO: 38938 - DNA, 25 bp, Artificial
  probe
  misc_feature (1)..(25): SEQ ID NO: 3808; WAN0249Z3_at; Start 13; Stop 37
aaagattctaccatatacaaataaa

SEQ ID NO: 38939 - DNA, 25 bp, Artificial
  probe
  misc_feature (1)..(25): SEQ ID NO: 3808; WAN0249Z3_at; Start 39; Stop 63
accgtagctatcaaaagagataaac

SEQ ID NO: 38940 - DNA, 25 bp, Artificial
  probe
  misc_feature (1)..(25): SEQ ID NO: 3808; WAN0249Z3_at; Start 38; Stop 62
aaccgtagctatcaaaagagataaa

SEQ ID NO: 38941 - DNA, 25 bp, Artificial
  probe
  misc_feature (1)..(25): SEQ ID NO: 3808; WAN0249Z3_at; Start 57; Stop 81
gataaactacagttctatatgttta

SEQ ID NO: 38942 - DNA, 25 bp, Artificial
  probe
  misc_feature (1)..(25): SEQ ID NO: 3808; WAN0249Z3_at; Start 16; Stop 40
gattctaccatatacaaataaaaac

SEQ ID NO: 38943 - DNA, 25 bp, Artificial
  probe
  misc_feature (1)..(25): SEQ ID NO: 3808; WAN0249Z3_at; Start 34; Stop 58
taaaaaccgtagctatcaaaagaga

SEQ ID NO: 38944 - DNA, 25 bp, Artificial
  probe
  misc_feature (1)..(25): SEQ ID NO: 3808; WAN0249Z3_at; Start 12; Stop 36
aaaagattctaccatatacaaataa

SEQ ID NO: 38945 - DNA, 25 bp, Artificial
  probe
  misc_feature (1)..(25): SEQ ID NO: 3808; WAN0249Z3_at; Start 28; Stop 52
tacaaataaaaaccgtagctatcaa

SEQ ID NO: 38946 - DNA, 25 bp, Artificial
  probe
  misc_feature (1)..(25): SEQ ID NO: 3808; WAN0249Z3_at; Start 37; Stop 61
aaaccgtagctatcaaaagagataa

SEQ ID NO: 38947 - DNA, 25 bp, Artificial
  probe
  misc_feature (1)..(25): SEQ ID NO: 3808; WAN0249Z3_at; Start 35; Stop 59
aaaaaccgtagctatcaaaagagat

SEQ ID NO: 38948 - DNA, 25 bp, Artificial
  probe
  misc_feature (1)..(25): SEQ ID NO: 3808; WAN0249Z3_at; Start 26; Stop 50
tatacaaataaaaaccgtagctatc

SEQ ID NO: 38949 - DNA, 25 bp, Artificial
  probe
  misc_feature (1)..(25): SEQ ID NO: 3808; WAN0249Z3_at; Start 10; Stop 34
taaaaagattctaccatatacaaat

SEQ ID NO: 38950 - DNA, 25 bp, Artificial
  probe
  misc_feature (1)..(25): SEQ ID NO: 3808; WAN0249Z3_at; Start 48; Stop 72
atcaaaagagataaactacagttct

SEQ ID NO: 38951 - DNA, 25 bp, Artificial
  probe
  misc_feature (1)..(25): SEQ ID NO: 3808; WAN0249Z3_at; Start 64; Stop 88
tacagttctatatgtttaaacattc

SEQ ID NO: 38952 - DNA, 25 bp, Artificial
  probe
  misc_feature (1)..(25): SEQ ID NO: 3808; WAN0249Z3_at; Start 6; Stop 30
tttgtaaaaagattctaccatatac

SEQ ID NO: 38953 - DNA, 25 bp, Artificial
  probe
  misc_feature (1)..(25): SEQ ID NO: 3808; WAN0249Z3_at; Start 42; Stop 66
gtagctatcaaaagagataaactac

SEQ ID NO: 38954 - DNA, 25 bp, Artificial
  probe
  misc_feature (1)..(25): SEQ ID NO: 3808; WAN0249Z3_at; Start 8; Stop 32
tgtaaaaagattctaccatatacaa

SEQ ID NO: 38955 - DNA, 25 bp, Artificial
  probe
  misc_feature (1)..(25): SEQ ID NO: 3808; WAN0249Z3_at; Start 33; Stop 57
ataaaaaccgtagctatcaaaagag

SEQ ID NO: 38956 - DNA, 25 bp, Artificial
  probe
  misc_feature (1)..(25): SEQ ID NO: 3808; WAN0249Z3_at; Start 47; Stop 71
tatcaaaagagataaactacagttc

SEQ ID NO: 38957 - DNA, 25 bp, Artificial
  probe
  misc_feature (1)..(25): SEQ ID NO: 3808; WAN0249Z3_at; Start 61; Stop 85
aactacagttctatatgtttaaaca

SEQ ID NO: 38958 - DNA, 25 bp, Artificial
  probe
  misc_feature (1)..(25): SEQ ID NO: 3808; WAN0249Z3_at; Start 41; Stop 65
cgtagctatcaaaagagataaacta

SEQ ID NO: 38959 - DNA, 25 bp, Artificial
  probe
  misc_feature (1)..(25): SEQ ID NO: 3808; WAN0249Z3_at; Start 40; Stop 64
ccgtagctatcaaaagagataaact

SEQ ID NO: 38960 - DNA, 25 bp, Artificial
  probe
  misc_feature (1)..(25): SEQ ID NO: 4701; WAN0249Z4_at; Start 27; Stop 51
attttaagacttgttagctgatttt

SEQ ID NO: 38961 - DNA, 25 bp, Artificial
  probe
  misc_feature (1)..(25): SEQ ID NO: 4701; WAN0249Z4_at; Start 26; Stop 50
gattttaagacttgttagctgattt

SEQ ID NO: 38962 - DNA, 25 bp, Artificial
  probe
  misc_feature (1)..(25): SEQ ID NO: 4701; WAN0249Z4_at; Start 20; Stop 44
ttttgtgattttaagacttgttagc

SEQ ID NO: 38963 - DNA, 25 bp, Artificial
  probe
  misc_feature (1)..(25): SEQ ID NO: 4701; WAN0249Z4_at; Start 22; Stop 46
ttgtgattttaagacttgttagctg

SEQ ID NO: 38964 - DNA, 25 bp, Artificial
  probe
  misc_feature (1)..(25): SEQ ID NO: 4701; WAN0249Z4_at; Start 14; Stop 38
atgcgtttttgtgattttaagactt

SEQ ID NO: 38965 - DNA, 25 bp, Artificial
  probe
  misc_feature (1)..(25): SEQ ID NO: 4701; WAN0249Z4_at; Start 13; Stop 37
tatgcgtttttgtgattttaagact

SEQ ID NO: 38966 - DNA, 25 bp, Artificial
  probe
  misc_feature (1)..(25): SEQ ID NO: 4701; WAN0249Z4_at; Start 24; Stop 48
gtgattttaagacttgttagctgat

SEQ ID NO: 38967 - DNA, 25 bp, Artificial
  probe
  misc_feature (1)..(25): SEQ ID NO: 4701; WAN0249Z4_at; Start 4; Stop 28
accttacattatgcgtttttgtgat

SEQ ID NO: 38968 - DNA, 25 bp, Artificial
  probe
  misc_feature (1)..(25): SEQ ID NO: 4701; WAN0249Z4_at; Start 3; Stop 27
caccttacattatgcgtttttgtga

SEQ ID NO: 38969 - DNA, 25 bp, Artificial
  probe
  misc_feature (1)..(25): SEQ ID NO: 4701; WAN0249Z4_at; Start 21; Stop 45
tttgtgattttaagacttgttagct

SEQ ID NO: 38970 - DNA, 25 bp, Artificial
  probe
  misc_feature (1)..(25): SEQ ID NO: 4701; WAN0249Z4_at; Start 5; Stop 29
ccttacattatgcgtttttgtgatt

SEQ ID NO: 38971 - DNA, 25 bp, Artificial
  probe
  misc_feature (1)..(25): SEQ ID NO: 4701; WAN0249Z4_at; Start 23; Stop 47
tgtgattttaagacttgttagctga

SEQ ID NO: 38972 - DNA, 25 bp, Artificial
  probe
  misc_feature (1)..(25): SEQ ID NO: 4701; WAN0249Z4_at; Start 2; Stop 26
gcaccttacattatgcgtttttgtg

SEQ ID NO: 38973 - DNA, 25 bp, Artificial
  probe
  misc_feature (1)..(25): SEQ ID NO: 4701; WAN0249Z4_at; Start 15; Stop 39
tgcgtttttgtgattttaagacttg

SEQ ID NO: 38974 - DNA, 25 bp, Artificial
  probe
  misc_feature (1)..(25): SEQ ID NO: 4701; WAN0249Z4_at; Start 25; Stop 49
tgattttaagacttgttagctgatt

SEQ ID NO: 38975 - DNA, 25 bp, Artificial
  probe
  misc_feature (1)..(25): SEQ ID NO: 4701; WAN0249Z4_at; Start 7; Stop 31
ttacattatgcgtttttgtgatttt

SEQ ID NO: 38976 - DNA, 25 bp, Artificial
  probe
  misc_feature (1)..(25): SEQ ID NO: 4701; WAN0249Z4_at; Start 1; Stop 25
tgcaccttacattatgcgtttttgt

SEQ ID NO: 38977 - DNA, 25 bp, Artificial
  probe
  misc_feature (1)..(25): SEQ ID NO: 4701; WAN0249Z4_at; Start 6; Stop 30
cttacattatgcgtttttgtgattt

SEQ ID NO: 38978 - DNA, 25 bp, Artificial
  probe
  misc_feature (1)..(25): SEQ ID NO: 88; WAN0249Z5_at; Start 7; Stop 31
agctaacaagtcttaaaatcacaaa

SEQ ID NO: 38979 - DNA, 25 bp, Artificial
  probe
  misc_feature (1)..(25): SEQ ID NO: 88; WAN0249Z5_at; Start 1; Stop 25
aaaatcagctaacaagtcttaaaat

SEQ ID NO: 38980 - DNA, 25 bp, Artificial
  probe
  misc_feature (1)..(25): SEQ ID NO: 88; WAN0249Z5_at; Start 26; Stop 50
cacaaaaacgcataatgtaaggtgc

SEQ ID NO: 38981 - DNA, 25 bp, Artificial
  probe
  misc_feature (1)..(25): SEQ ID NO: 88; WAN0249Z5_at; Start 13; Stop 37
caagtcttaaaatcacaaaaacgca

SEQ ID NO: 38982 - DNA, 25 bp, Artificial
  probe
  misc_feature (1)..(25): SEQ ID NO: 88; WAN0249Z5_at; Start 15; Stop 39
agtcttaaaatcacaaaaacgcata

SEQ ID NO: 38983 - DNA, 25 bp, Artificial
  probe
  misc_feature (1)..(25): SEQ ID NO: 88; WAN0249Z5_at; Start 5; Stop 29
tcagctaacaagtcttaaaatcaca

SEQ ID NO: 38984 - DNA, 25 bp, Artificial
  probe
  misc_feature (1)..(25): SEQ ID NO: 88; WAN0249Z5_at; Start 2; Stop 26
aaatcagctaacaagtcttaaaatc

SEQ ID NO: 38985 - DNA, 25 bp, Artificial
  probe
  misc_feature (1)..(25): SEQ ID NO: 88; WAN0249Z5_at; Start 27; Stop 51
acaaaaacgcataatgtaaggtgca

SEQ ID NO: 38986 - DNA, 25 bp, Artificial
  probe
  misc_feature (1)..(25): SEQ ID NO: 88; WAN0249Z5_at; Start 3; Stop 27
aatcagctaacaagtcttaaaatca

SEQ ID NO: 38987 - DNA, 25 bp, Artificial
  probe
  misc_feature (1)..(25): SEQ ID NO: 88; WAN0249Z5_at; Start 8; Stop 32
gctaacaagtcttaaaatcacaaaa

SEQ ID NO: 38988 - DNA, 25 bp, Artificial
  probe
  misc_feature (1)..(25): SEQ ID NO: 88; WAN0249Z5_at; Start 6; Stop 30
cagctaacaagtcttaaaatcacaa

SEQ ID NO: 38989 - DNA, 25 bp, Artificial
  probe
  misc_feature (1)..(25): SEQ ID NO: 88; WAN0249Z5_at; Start 4; Stop 28
atcagctaacaagtcttaaaatcac

SEQ ID NO: 38990 - DNA, 25 bp, Artificial
  probe
  misc_feature (1)..(25): SEQ ID NO: 88; WAN0249Z5_at; Start 14; Stop 38
aagtcttaaaatcacaaaaacgcat

SEQ ID NO: 38991 - DNA, 25 bp, Artificial
  probe
  misc_feature (1)..(25): SEQ ID NO: 3598; WAN0249Z6_at; Start 60; Stop 84
gatttgatacgaaaaaagatgaggt

SEQ ID NO: 38992 - DNA, 25 bp, Artificial
  probe
  misc_feature (1)..(25): SEQ ID NO: 3598; WAN0249Z6_at; Start 79; Stop 103
tgaggttggttggtctcatctttta

SEQ ID NO: 38993 - DNA, 25 bp, Artificial
  probe
  misc_feature (1)..(25): SEQ ID NO: 3598; WAN0249Z6_at; Start 17; Stop 41
cattgataagtctagtatgccataa

SEQ ID NO: 38994 - DNA, 25 bp, Artificial
  probe
  misc_feature (1)..(25): SEQ ID NO: 3598; WAN0249Z6_at; Start 4; Stop 28
attacctcgctttcattgataagtc

SEQ ID NO: 38995 - DNA, 25 bp, Artificial
  probe
  misc_feature (1)..(25): SEQ ID NO: 3598; WAN0249Z6_at; Start 56; Stop 80
cttagatttgatacgaaaaaagatg

SEQ ID NO: 38996 - DNA, 25 bp, Artificial
  probe
  misc_feature (1)..(25): SEQ ID NO: 3598; WAN0249Z6_at; Start 2; Stop 26
agattacctcgctttcattgataag

SEQ ID NO: 38997 - DNA, 25 bp, Artificial
  probe
  misc_feature (1)..(25): SEQ ID NO: 3598; WAN0249Z6_at; Start 62; Stop 86
tttgatacgaaaaaagatgaggttg

SEQ ID NO: 38998 - DNA, 25 bp, Artificial
  probe
  misc_feature (1)..(25): SEQ ID NO: 3598; WAN0249Z6_at; Start 86; Stop 110
ggttggtctcatcttttataggtct

SEQ ID NO: 38999 - DNA, 25 bp, Artificial
  probe
  misc_feature (1)..(25): SEQ ID NO: 3598; WAN0249Z6_at; Start 28; Stop 52
ctagtatgccataaagtttctaaaa

SEQ ID NO: 39000 - DNA, 25 bp, Artificial
  probe
  misc_feature (1)..(25): SEQ ID NO: 3598; WAN0249Z6_at; Start 20; Stop 44
tgataagtctagtatgccataaagt

SEQ ID NO: 39001 - DNA, 25 bp, Artificial
  probe
  misc_feature (1)..(25): SEQ ID NO: 3598; WAN0249Z6_at; Start 21; Stop 45
gataagtctagtatgccataaagtt

SEQ ID NO: 39002 - DNA, 25 bp, Artificial
  probe
  misc_feature (1)..(25): SEQ ID NO: 3598; WAN0249Z6_at; Start 26; Stop 50
gtctagtatgccataaagtttctaa

SEQ ID NO: 39003 - DNA, 25 bp, Artificial
  probe
  misc_feature (1)..(25): SEQ ID NO: 3598; WAN0249Z6_at; Start 48; Stop 72
taaaattgcttagatttgatacgaa

SEQ ID NO: 39004 - DNA, 25 bp, Artificial
  probe
  misc_feature (1)..(25): SEQ ID NO: 3598; WAN0249Z6_at; Start 53; Stop 77
ttgcttagatttgatacgaaaaaag

SEQ ID NO: 39005 - DNA, 25 bp, Artificial
  probe
  misc_feature (1)..(25): SEQ ID NO: 3598; WAN0249Z6_at; Start 85; Stop 109
tggttggtctcatcttttataggtc

SEQ ID NO: 39006 - DNA, 25 bp, Artificial
  probe
  misc_feature (1)..(25): SEQ ID NO: 3598; WAN0249Z6_at; Start 58; Stop 82
tagatttgatacgaaaaaagatgag

SEQ ID NO: 39007 - DNA, 25 bp, Artificial
  probe
  misc_feature (1)..(25): SEQ ID NO: 3598; WAN0249Z6_at; Start 13; Stop 37
ctttcattgataagtctagtatgcc

SEQ ID NO: 39008 - DNA, 25 bp, Artificial
  probe
  misc_feature (1)..(25): SEQ ID NO: 3598; WAN0249Z6_at; Start 32; Stop 56
tatgccataaagtttctaaaattgc

SEQ ID NO: 39009 - DNA, 25 bp, Artificial
  probe
  misc_feature (1)..(25): SEQ ID NO: 3598; WAN0249Z6_at; Start 6; Stop 30
tacctcgctttcattgataagtcta

SEQ ID NO: 39010 - DNA, 25 bp, Artificial
  probe
  misc_feature (1)..(25): SEQ ID NO: 3598; WAN0249Z6_at; Start 35; Stop 59
gccataaagtttctaaaattgctta

SEQ ID NO: 39011 - DNA, 25 bp, Artificial
  probe
  misc_feature (1)..(25): SEQ ID NO: 3598; WAN0249Z6_at; Start 63; Stop 87
ttgatacgaaaaaagatgaggttgg

SEQ ID NO: 39012 - DNA, 25 bp, Artificial
  probe
  misc_feature (1)..(25): SEQ ID NO: 3598; WAN0249Z6_at; Start 19; Stop 43
ttgataagtctagtatgccataaag

SEQ ID NO: 39013 - DNA, 25 bp, Artificial
  probe
  misc_feature (1)..(25): SEQ ID NO: 3598; WAN0249Z6_at; Start 1; Stop 25
gagattacctcgctttcattgataa

SEQ ID NO: 39014 - DNA, 25 bp, Artificial
  probe
  misc_feature (1)..(25): SEQ ID NO: 3598; WAN0249Z6_at; Start 14; Stop 38
tttcattgataagtctagtatgcca

SEQ ID NO: 39015 - DNA, 25 bp, Artificial
  probe
  misc_feature (1)..(25): SEQ ID NO: 3598; WAN0249Z6_at; Start 23; Stop 47
taagtctagtatgccataaagtttc

SEQ ID NO: 39016 - DNA, 25 bp, Artificial
  probe
  misc_feature (1)..(25): SEQ ID NO: 3598; WAN0249Z6_at; Start 16; Stop 40
tcattgataagtctagtatgccata

SEQ ID NO: 39017 - DNA, 25 bp, Artificial
  probe
  misc_feature (1)..(25): SEQ ID NO: 3598; WAN0249Z6_at; Start 51; Stop 75
aattgcttagatttgatacgaaaaa

SEQ ID NO: 39018 - DNA, 25 bp, Artificial
  probe
  misc_feature (1)..(25): SEQ ID NO: 3598; WAN0249Z6_at; Start 82; Stop 106
ggttggttggtctcatcttttatag

SEQ ID NO: 39019 - DNA, 25 bp, Artificial
  probe
  misc_feature (1)..(25): SEQ ID NO: 3598; WAN0249Z6_at; Start 8; Stop 32
cctcgctttcattgataagtctagt

SEQ ID NO: 39020 - DNA, 25 bp, Artificial
  probe
  misc_feature (1)..(25): SEQ ID NO: 3598; WAN0249Z6_at; Start 3; Stop 27
gattacctcgctttcattgataagt

SEQ ID NO: 39021 - DNA, 25 bp, Artificial
  probe
  misc_feature (1)..(25): SEQ ID NO: 3598; WAN0249Z6_at; Start 36; Stop 60
ccataaagtttctaaaattgcttag

SEQ ID NO: 39022 - DNA, 25 bp, Artificial
  probe
  misc_feature (1)..(25): SEQ ID NO: 3598; WAN0249Z6_at; Start 11; Stop 35
cgctttcattgataagtctagtatg

SEQ ID NO: 39023 - DNA, 25 bp, Artificial
  probe
  misc_feature (1)..(25): SEQ ID NO: 3598; WAN0249Z6_at; Start 7; Stop 31
acctcgctttcattgataagtctag

SEQ ID NO: 39024 - DNA, 25 bp, Artificial
  probe
  misc_feature (1)..(25): SEQ ID NO: 3598; WAN0249Z6_at; Start 75; Stop 99
aagatgaggttggttggtctcatct

SEQ ID NO: 39025 - DNA, 25 bp, Artificial
  probe
  misc_feature (1)..(25): SEQ ID NO: 418; WAN0249Z7_at; Start 68; Stop 92
ctttatggcatactagacttatcaa

SEQ ID NO: 39026 - DNA, 25 bp, Artificial
  probe
  misc_feature (1)..(25): SEQ ID NO: 418; WAN0249Z7_at; Start 85; Stop 109
cttatcaatgaaagcgaggtaatct

SEQ ID NO: 39027 - DNA, 25 bp, Artificial
  probe
  misc_feature (1)..(25): SEQ ID NO: 418; WAN0249Z7_at; Start 13; Stop 37
gatgagaccaaccaacctcatcttt

SEQ ID NO: 39028 - DNA, 25 bp, Artificial
  probe
  misc_feature (1)..(25): SEQ ID NO: 418; WAN0249Z7_at; Start 2; Stop 26
gacctataaaagatgagaccaacca

SEQ ID NO: 39029 - DNA, 25 bp, Artificial
  probe
  misc_feature (1)..(25): SEQ ID NO: 418; WAN0249Z7_at; Start 76; Stop 100
catactagacttatcaatgaaagcg

SEQ ID NO: 39030 - DNA, 25 bp, Artificial
  probe
  misc_feature (1)..(25): SEQ ID NO: 418; WAN0249Z7_at; Start 80; Stop 104
ctagacttatcaatgaaagcgaggt

SEQ ID NO: 39031 - DNA, 25 bp, Artificial
  probe
  misc_feature (1)..(25): SEQ ID NO: 418; WAN0249Z7_at; Start 4; Stop 28
cctataaaagatgagaccaaccaac

SEQ ID NO: 39032 - DNA, 25 bp, Artificial
  probe
  misc_feature (1)..(25): SEQ ID NO: 418; WAN0249Z7_at; Start 79; Stop 103
actagacttatcaatgaaagcgagg

SEQ ID NO: 39033 - DNA, 25 bp, Artificial
  probe
  misc_feature (1)..(25): SEQ ID NO: 418; WAN0249Z7_at; Start 64; Stop 88
gaaactttatggcatactagactta

SEQ ID NO: 39034 - DNA, 25 bp, Artificial
  probe
  misc_feature (1)..(25): SEQ ID NO: 418; WAN0249Z7_at; Start 81; Stop 105
tagacttatcaatgaaagcgaggta

SEQ ID NO: 39035 - DNA, 25 bp, Artificial
  probe
  misc_feature (1)..(25): SEQ ID NO: 418; WAN0249Z7_at; Start 86; Stop 110
ttatcaatgaaagcgaggtaatctc

SEQ ID NO: 39036 - DNA, 25 bp, Artificial
  probe
  misc_feature (1)..(25): SEQ ID NO: 418; WAN0249Z7_at; Start 34; Stop 58
cttttttcgtatcaaatctaagcaa

SEQ ID NO: 39037 - DNA, 25 bp, Artificial
  probe
  misc_feature (1)..(25): SEQ ID NO: 418; WAN0249Z7_at; Start 59; Stop 83
ttttagaaactttatggcatactag

SEQ ID NO: 39038 - DNA, 25 bp, Artificial
  probe
  misc_feature (1)..(25): SEQ ID NO: 418; WAN0249Z7_at; Start 10; Stop 34
aaagatgagaccaaccaacctcatc

SEQ ID NO: 39039 - DNA, 25 bp, Artificial
  probe
  misc_feature (1)..(25): SEQ ID NO: 418; WAN0249Z7_at; Start 1; Stop 25
agacctataaaagatgagaccaacc

SEQ ID NO: 39040 - DNA, 25 bp, Artificial
  probe
  misc_feature (1)..(25): SEQ ID NO: 418; WAN0249Z7_at; Start 52; Stop 76
taagcaattttagaaactttatggc

SEQ ID NO: 39041 - DNA, 25 bp, Artificial
  probe
  misc_feature (1)..(25): SEQ ID NO: 418; WAN0249Z7_at; Start 74; Stop 98
ggcatactagacttatcaatgaaag

SEQ ID NO: 39042 - DNA, 25 bp, Artificial
  probe
  misc_feature (1)..(25): SEQ ID NO: 418; WAN0249Z7_at; Start 84; Stop 108
acttatcaatgaaagcgaggtaatc

SEQ ID NO: 39043 - DNA, 25 bp, Artificial
  probe
  misc_feature (1)..(25): SEQ ID NO: 418; WAN0249Z7_at; Start 56; Stop 80
caattttagaaactttatggcatac

SEQ ID NO: 39044 - DNA, 25 bp, Artificial
  probe
  misc_feature (1)..(25): SEQ ID NO: 418; WAN0249Z7_at; Start 21; Stop 45
caaccaacctcatcttttttcgtat

SEQ ID NO: 39045 - DNA, 25 bp, Artificial
  probe
  misc_feature (1)..(25): SEQ ID NO: 418; WAN0249Z7_at; Start 8; Stop 32
taaaagatgagaccaaccaacctca

SEQ ID NO: 39046 - DNA, 25 bp, Artificial
  probe
  misc_feature (1)..(25): SEQ ID NO: 418; WAN0249Z7_at; Start 78; Stop 102
tactagacttatcaatgaaagcgag

SEQ ID NO: 39047 - DNA, 25 bp, Artificial
  probe
  misc_feature (1)..(25): SEQ ID NO: 418; WAN0249Z7_at; Start 31; Stop 55
catcttttttcgtatcaaatctaag

SEQ ID NO: 39048 - DNA, 25 bp, Artificial
  probe
  misc_feature (1)..(25): SEQ ID NO: 418; WAN0249Z7_at; Start 5; Stop 29
ctataaaagatgagaccaaccaacc

SEQ ID NO: 39049 - DNA, 25 bp, Artificial
  probe
  misc_feature (1)..(25): SEQ ID NO: 418; WAN0249Z7_at; Start 3; Stop 27
acctataaaagatgagaccaaccaa

SEQ ID NO: 39050 - DNA, 25 bp, Artificial
  probe
  misc_feature (1)..(25): SEQ ID NO: 418; WAN0249Z7_at; Start 62; Stop 86
tagaaactttatggcatactagact

SEQ ID NO: 39051 - DNA, 25 bp, Artificial
  probe
  misc_feature (1)..(25): SEQ ID NO: 418; WAN0249Z7_at; Start 25; Stop 49
caacctcatcttttttcgtatcaaa

SEQ ID NO: 39052 - DNA, 25 bp, Artificial
  probe
  misc_feature (1)..(25): SEQ ID NO: 418; WAN0249Z7_at; Start 15; Stop 39
tgagaccaaccaacctcatcttttt

SEQ ID NO: 39053 - DNA, 25 bp, Artificial
  probe
  misc_feature (1)..(25): SEQ ID NO: 418; WAN0249Z7_at; Start 6; Stop 30
tataaaagatgagaccaaccaacct

SEQ ID NO: 39054 - DNA, 25 bp, Artificial
  probe
  misc_feature (1)..(25): SEQ ID NO: 418; WAN0249Z7_at; Start 40; Stop 64
tcgtatcaaatctaagcaattttag

SEQ ID NO: 39055 - DNA, 25 bp, Artificial
  probe
  misc_feature (1)..(25): SEQ ID NO: 418; WAN0249Z7_at; Start 36; Stop 60
tttttcgtatcaaatctaagcaatt

SEQ ID NO: 39056 - DNA, 25 bp, Artificial
  probe
  misc_feature (1)..(25): SEQ ID NO: 418; WAN0249Z7_at; Start 67; Stop 91
actttatggcatactagacttatca

SEQ ID NO: 39057 - DNA, 25 bp, Artificial
  probe
  misc_feature (1)..(25): SEQ ID NO: 418; WAN0249Z7_at; Start 71; Stop 95
tatggcatactagacttatcaatga

SEQ ID NO: 39058 - DNA, 25 bp, Artificial
  probe
  misc_feature (1)..(25): SEQ ID NO: 418; WAN0249Z7_at; Start 83; Stop 107
gacttatcaatgaaagcgaggtaat

SEQ ID NO: 39059 - DNA, 25 bp, Artificial
  probe
  misc_feature (1)..(25): SEQ ID NO: 311; WAN0249Z8_at; Start 11; Stop 35
ttatatgatgttgaggctaggaaaa

SEQ ID NO: 39060 - DNA, 25 bp, Artificial
  probe
  misc_feature (1)..(25): SEQ ID NO: 311; WAN0249Z8_at; Start 18; Stop 42
atgttgaggctaggaaaaattcaat

SEQ ID NO: 39061 - DNA, 25 bp, Artificial
  probe
  misc_feature (1)..(25): SEQ ID NO: 311; WAN0249Z8_at; Start 55; Stop 79
agtaagtcttctcataacaaaacat

SEQ ID NO: 39062 - DNA, 25 bp, Artificial
  probe
  misc_feature (1)..(25): SEQ ID NO: 311; WAN0249Z8_at; Start 65; Stop 89
ctcataacaaaacattgatatagtt

SEQ ID NO: 39063 - DNA, 25 bp, Artificial
  probe
  misc_feature (1)..(25): SEQ ID NO: 311; WAN0249Z8_at; Start 64; Stop 88
tctcataacaaaacattgatatagt

SEQ ID NO: 39064 - DNA, 25 bp, Artificial
  probe
  misc_feature (1)..(25): SEQ ID NO: 311; WAN0249Z8_at; Start 25; Stop 49
ggctaggaaaaattcaatttcagta

SEQ ID NO: 39065 - DNA, 25 bp, Artificial
  probe
  misc_feature (1)..(25): SEQ ID NO: 311; WAN0249Z8_at; Start 62; Stop 86
cttctcataacaaaacattgatata

SEQ ID NO: 39066 - DNA, 25 bp, Artificial
  probe
  misc_feature (1)..(25): SEQ ID NO: 311; WAN0249Z8_at; Start 60; Stop 84
gtcttctcataacaaaacattgata

SEQ ID NO: 39067 - DNA, 25 bp, Artificial
  probe
  misc_feature (1)..(25): SEQ ID NO: 311; WAN0249Z8_at; Start 23; Stop 47
gaggctaggaaaaattcaatttcag

SEQ ID NO: 39068 - DNA, 25 bp, Artificial
  probe
  misc_feature (1)..(25): SEQ ID NO: 311; WAN0249Z8_at; Start 1; Stop 25
aattttggggttatatgatgttgag

SEQ ID NO: 39069 - DNA, 25 bp, Artificial
  probe
  misc_feature (1)..(25): SEQ ID NO: 311; WAN0249Z8_at; Start 4; Stop 28
tttggggttatatgatgttgaggct

SEQ ID NO: 39070 - DNA, 25 bp, Artificial
  probe
  misc_feature (1)..(25): SEQ ID NO: 311; WAN0249Z8_at; Start 24; Stop 48
aggctaggaaaaattcaatttcagt

SEQ ID NO: 39071 - DNA, 25 bp, Artificial
  probe
  misc_feature (1)..(25): SEQ ID NO: 311; WAN0249Z8_at; Start 57; Stop 81
taagtcttctcataacaaaacattg

SEQ ID NO: 39072 - DNA, 25 bp, Artificial
  probe
  misc_feature (1)..(25): SEQ ID NO: 311; WAN0249Z8_at; Start 61; Stop 85
tcttctcataacaaaacattgatat

SEQ ID NO: 39073 - DNA, 25 bp, Artificial
  probe
  misc_feature (1)..(25): SEQ ID NO: 311; WAN0249Z8_at; Start 26; Stop 50
gctaggaaaaattcaatttcagtaa

SEQ ID NO: 39074 - DNA, 25 bp, Artificial
  probe
  misc_feature (1)..(25): SEQ ID NO: 311; WAN0249Z8_at; Start 3; Stop 27
ttttggggttatatgatgttgaggc

SEQ ID NO: 39075 - DNA, 25 bp, Artificial
  probe
  misc_feature (1)..(25): SEQ ID NO: 311; WAN0249Z8_at; Start 13; Stop 37
atatgatgttgaggctaggaaaaat

SEQ ID NO: 39076 - DNA, 25 bp, Artificial
  probe
  misc_feature (1)..(25): SEQ ID NO: 311; WAN0249Z8_at; Start 22; Stop 46
tgaggctaggaaaaattcaatttca

SEQ ID NO: 39077 - DNA, 25 bp, Artificial
  probe
  misc_feature (1)..(25): SEQ ID NO: 311; WAN0249Z8_at; Start 15; Stop 39
atgatgttgaggctaggaaaaattc

SEQ ID NO: 39078 - DNA, 25 bp, Artificial
  probe
  misc_feature (1)..(25): SEQ ID NO: 311; WAN0249Z8_at; Start 59; Stop 83
agtcttctcataacaaaacattgat

SEQ ID NO: 39079 - DNA, 25 bp, Artificial
  probe
  misc_feature (1)..(25): SEQ ID NO: 311; WAN0249Z8_at; Start 19; Stop 43
tgttgaggctaggaaaaattcaatt

SEQ ID NO: 39080 - DNA, 25 bp, Artificial
  probe
  misc_feature (1)..(25): SEQ ID NO: 311; WAN0249Z8_at; Start 66; Stop 90
tcataacaaaacattgatatagtta

SEQ ID NO: 39081 - DNA, 25 bp, Artificial
  probe
  misc_feature (1)..(25): SEQ ID NO: 311; WAN0249Z8_at; Start 16; Stop 40
tgatgttgaggctaggaaaaattca

SEQ ID NO: 39082 - DNA, 25 bp, Artificial
  probe
  misc_feature (1)..(25): SEQ ID NO: 311; WAN0249Z8_at; Start 58; Stop 82
aagtcttctcataacaaaacattga

SEQ ID NO: 39083 - DNA, 25 bp, Artificial
  probe
  misc_feature (1)..(25): SEQ ID NO: 311; WAN0249Z8_at; Start 63; Stop 87
ttctcataacaaaacattgatatag

SEQ ID NO: 39084 - DNA, 25 bp, Artificial
  probe
  misc_feature (1)..(25): SEQ ID NO: 311; WAN0249Z8_at; Start 54; Stop 78
aagtaagtcttctcataacaaaaca

SEQ ID NO: 39085 - DNA, 25 bp, Artificial
  probe
  misc_feature (1)..(25): SEQ ID NO: 311; WAN0249Z8_at; Start 17; Stop 41
gatgttgaggctaggaaaaattcaa

SEQ ID NO: 39086 - DNA, 25 bp, Artificial
  probe
  misc_feature (1)..(25): SEQ ID NO: 311; WAN0249Z8_at; Start 12; Stop 36
tatatgatgttgaggctaggaaaaa

SEQ ID NO: 39087 - DNA, 25 bp, Artificial
  probe
  misc_feature (1)..(25): SEQ ID NO: 311; WAN0249Z8_at; Start 44; Stop 68
tcagtaaaaaaagtaagtcttctca

SEQ ID NO: 39088 - DNA, 25 bp, Artificial
  probe
  misc_feature (1)..(25): SEQ ID NO: 311; WAN0249Z8_at; Start 10; Stop 34
gttatatgatgttgaggctaggaaa

SEQ ID NO: 39089 - DNA, 25 bp, Artificial
  probe
  misc_feature (1)..(25): SEQ ID NO: 311; WAN0249Z8_at; Start 9; Stop 33
ggttatatgatgttgaggctaggaa

SEQ ID NO: 39090 - DNA, 25 bp, Artificial
  probe
  misc_feature (1)..(25): SEQ ID NO: 311; WAN0249Z8_at; Start 56; Stop 80
gtaagtcttctcataacaaaacatt

SEQ ID NO: 39091 - DNA, 25 bp, Artificial
  probe
  misc_feature (1)..(25): SEQ ID NO: 311; WAN0249Z8_at; Start 45; Stop 69
cagtaaaaaaagtaagtcttctcat

SEQ ID NO: 39092 - DNA, 25 bp, Artificial
  probe
  misc_feature (1)..(25): SEQ ID NO: 311; WAN0249Z8_at; Start 21; Stop 45
ttgaggctaggaaaaattcaatttc

SEQ ID NO: 39093 - DNA, 25 bp, Artificial
  probe
  misc_feature (1)..(25): SEQ ID NO: 4432; WAN0249Z9_at; Start 63; Stop 87
agcctcaacatcatataaccccaaa

SEQ ID NO: 39094 - DNA, 25 bp, Artificial
  probe
  misc_feature (1)..(25): SEQ ID NO: 4432; WAN0249Z9_at; Start 13; Stop 37
tgttttgttatgagaagacttactt

SEQ ID NO: 39095 - DNA, 25 bp, Artificial
  probe
  misc_feature (1)..(25): SEQ ID NO: 4432; WAN0249Z9_at; Start 64; Stop 88
gcctcaacatcatataaccccaaaa

SEQ ID NO: 39096 - DNA, 25 bp, Artificial
  probe
  misc_feature (1)..(25): SEQ ID NO: 4432; WAN0249Z9_at; Start 62; Stop 86
tagcctcaacatcatataaccccaa

SEQ ID NO: 39097 - DNA, 25 bp, Artificial
  probe
  misc_feature (1)..(25): SEQ ID NO: 4432; WAN0249Z9_at; Start 22; Stop 46
atgagaagacttactttttttactg

SEQ ID NO: 39098 - DNA, 25 bp, Artificial
  probe
  misc_feature (1)..(25): SEQ ID NO: 4432; WAN0249Z9_at; Start 11; Stop 35
aatgttttgttatgagaagacttac

SEQ ID NO: 39099 - DNA, 25 bp, Artificial
  probe
  misc_feature (1)..(25): SEQ ID NO: 4432; WAN0249Z9_at; Start 54; Stop 78
atttttcctagcctcaacatcatat

SEQ ID NO: 39100 - DNA, 25 bp, Artificial
  probe
  misc_feature (1)..(25): SEQ ID NO: 4432; WAN0249Z9_at; Start 66; Stop 90
ctcaacatcatataaccccaaaatt

SEQ ID NO: 39101 - DNA, 25 bp, Artificial
  probe
  misc_feature (1)..(25): SEQ ID NO: 4432; WAN0249Z9_at; Start 3; Stop 27
actatatcaatgttttgttatgaga

SEQ ID NO: 39102 - DNA, 25 bp, Artificial
  probe
  misc_feature (1)..(25): SEQ ID NO: 4432; WAN0249Z9_at; Start 59; Stop 83
tcctagcctcaacatcatataaccc

SEQ ID NO: 39103 - DNA, 25 bp, Artificial
  probe
  misc_feature (1)..(25): SEQ ID NO: 4432; WAN0249Z9_at; Start 49; Stop 73
attgaatttttcctagcctcaacat

SEQ ID NO: 39104 - DNA, 25 bp, Artificial
  probe
  misc_feature (1)..(25): SEQ ID NO: 4432; WAN0249Z9_at; Start 8; Stop 32
atcaatgttttgttatgagaagact

SEQ ID NO: 39105 - DNA, 25 bp, Artificial
  probe
  misc_feature (1)..(25): SEQ ID NO: 4432; WAN0249Z9_at; Start 23; Stop 47
tgagaagacttactttttttactga

SEQ ID NO: 39106 - DNA, 25 bp, Artificial
  probe
  misc_feature (1)..(25): SEQ ID NO: 4432; WAN0249Z9_at; Start 52; Stop 76
gaatttttcctagcctcaacatcat

SEQ ID NO: 39107 - DNA, 25 bp, Artificial
  probe
  misc_feature (1)..(25): SEQ ID NO: 4432; WAN0249Z9_at; Start 6; Stop 30
atatcaatgttttgttatgagaaga

SEQ ID NO: 39108 - DNA, 25 bp, Artificial
  probe
  misc_feature (1)..(25): SEQ ID NO: 4432; WAN0249Z9_at; Start 57; Stop 81
tttcctagcctcaacatcatataac

SEQ ID NO: 39109 - DNA, 25 bp, Artificial
  probe
  misc_feature (1)..(25): SEQ ID NO: 4432; WAN0249Z9_at; Start 61; Stop 85
ctagcctcaacatcatataacccca

SEQ ID NO: 39110 - DNA, 25 bp, Artificial
  probe
  misc_feature (1)..(25): SEQ ID NO: 4432; WAN0249Z9_at; Start 2; Stop 26
aactatatcaatgttttgttatgag

SEQ ID NO: 39111 - DNA, 25 bp, Artificial
  probe
  misc_feature (1)..(25): SEQ ID NO: 4432; WAN0249Z9_at; Start 50; Stop 74
ttgaatttttcctagcctcaacatc

SEQ ID NO: 39112 - DNA, 25 bp, Artificial
  probe
  misc_feature (1)..(25): SEQ ID NO: 4432; WAN0249Z9_at; Start 56; Stop 80
ttttcctagcctcaacatcatataa

SEQ ID NO: 39113 - DNA, 25 bp, Artificial
  probe
  misc_feature (1)..(25): SEQ ID NO: 4432; WAN0249Z9_at; Start 7; Stop 31
tatcaatgttttgttatgagaagac

SEQ ID NO: 39114 - DNA, 25 bp, Artificial
  probe
  misc_feature (1)..(25): SEQ ID NO: 4432; WAN0249Z9_at; Start 48; Stop 72
aattgaatttttcctagcctcaaca

SEQ ID NO: 39115 - DNA, 25 bp, Artificial
  probe
  misc_feature (1)..(25): SEQ ID NO: 4432; WAN0249Z9_at; Start 55; Stop 79
tttttcctagcctcaacatcatata

SEQ ID NO: 39116 - DNA, 25 bp, Artificial
  probe
  misc_feature (1)..(25): SEQ ID NO: 4432; WAN0249Z9_at; Start 53; Stop 77
aatttttcctagcctcaacatcata

SEQ ID NO: 39117 - DNA, 25 bp, Artificial
  probe
  misc_feature (1)..(25): SEQ ID NO: 4432; WAN0249Z9_at; Start 10; Stop 34
caatgttttgttatgagaagactta

SEQ ID NO: 39118 - DNA, 25 bp, Artificial
  probe
  misc_feature (1)..(25): SEQ ID NO: 4432; WAN0249Z9_at; Start 1; Stop 25
taactatatcaatgttttgttatga

SEQ ID NO: 39119 - DNA, 25 bp, Artificial
  probe
  misc_feature (1)..(25): SEQ ID NO: 4432; WAN0249Z9_at; Start 65; Stop 89
cctcaacatcatataaccccaaaat

SEQ ID NO: 39120 - DNA, 25 bp, Artificial
  probe
  misc_feature (1)..(25): SEQ ID NO: 4432; WAN0249Z9_at; Start 5; Stop 29
tatatcaatgttttgttatgagaag

SEQ ID NO: 39121 - DNA, 25 bp, Artificial
  probe
  misc_feature (1)..(25): SEQ ID NO: 4432; WAN0249Z9_at; Start 60; Stop 84
cctagcctcaacatcatataacccc

SEQ ID NO: 39122 - DNA, 25 bp, Artificial
  probe
  misc_feature (1)..(25): SEQ ID NO: 4432; WAN0249Z9_at; Start 51; Stop 75
tgaatttttcctagcctcaacatca

SEQ ID NO: 39123 - DNA, 25 bp, Artificial
  probe
  misc_feature (1)..(25): SEQ ID NO: 4432; WAN0249Z9_at; Start 4; Stop 28
ctatatcaatgttttgttatgagaa

SEQ ID NO: 39124 - DNA, 25 bp, Artificial
  probe
  misc_feature (1)..(25): SEQ ID NO: 4432; WAN0249Z9_at; Start 58; Stop 82
ttcctagcctcaacatcatataacc

SEQ ID NO: 39125 - DNA, 25 bp, Artificial
  probe
  misc_feature (1)..(25): SEQ ID NO: 4432; WAN0249Z9_at; Start 12; Stop 36
atgttttgttatgagaagacttact

SEQ ID NO: 39126 - DNA, 25 bp, Artificial
  probe
  misc_feature (1)..(25): SEQ ID NO: 4432; WAN0249Z9_at; Start 9; Stop 33
tcaatgttttgttatgagaagactt

SEQ ID NO: 39127 - DNA, 25 bp, Artificial
  probe
  misc_feature (1)..(25): SEQ ID NO: 4762; WAN0249ZA_at; Start 3; Stop 27
aagagaagacggtatacaatcaaac

SEQ ID NO: 39128 - DNA, 25 bp, Artificial
  probe
  misc_feature (1)..(25): SEQ ID NO: 4762; WAN0249ZA_at; Start 29; Stop 53
attcaccgtgtagccgaaatcgttc

SEQ ID NO: 39129 - DNA, 25 bp, Artificial
  probe
  misc_feature (1)..(25): SEQ ID NO: 4762; WAN0249ZA_at; Start 35; Stop 59
cgtgtagccgaaatcgttcagaatg

SEQ ID NO: 39130 - DNA, 25 bp, Artificial
  probe
  misc_feature (1)..(25): SEQ ID NO: 4762; WAN0249ZA_at; Start 24; Stop 48
aaaccattcaccgtgtagccgaaat

SEQ ID NO: 39131 - DNA, 25 bp, Artificial
  probe
  misc_feature (1)..(25): SEQ ID NO: 4762; WAN0249ZA_at; Start 37; Stop 61
tgtagccgaaatcgttcagaatgaa

SEQ ID NO: 39132 - DNA, 25 bp, Artificial
  probe
  misc_feature (1)..(25): SEQ ID NO: 4762; WAN0249ZA_at; Start 26; Stop 50
accattcaccgtgtagccgaaatcg

SEQ ID NO: 39133 - DNA, 25 bp, Artificial
  probe
  misc_feature (1)..(25): SEQ ID NO: 4762; WAN0249ZA_at; Start 36; Stop 60
gtgtagccgaaatcgttcagaatga

SEQ ID NO: 39134 - DNA, 25 bp, Artificial
  probe
  misc_feature (1)..(25): SEQ ID NO: 4762; WAN0249ZA_at; Start 39; Stop 63
tagccgaaatcgttcagaatgaaga

SEQ ID NO: 39135 - DNA, 25 bp, Artificial
  probe
  misc_feature (1)..(25): SEQ ID NO: 4762; WAN0249ZA_at; Start 38; Stop 62
gtagccgaaatcgttcagaatgaag

SEQ ID NO: 39136 - DNA, 25 bp, Artificial
  probe
  misc_feature (1)..(25): SEQ ID NO: 4762; WAN0249ZA_at; Start 10; Stop 34
gacggtatacaatcaaaccattcac

SEQ ID NO: 39137 - DNA, 25 bp, Artificial
  probe
  misc_feature (1)..(25): SEQ ID NO: 4762; WAN0249ZA_at; Start 40; Stop 64
agccgaaatcgttcagaatgaagac

SEQ ID NO: 39138 - DNA, 25 bp, Artificial
  probe
  misc_feature (1)..(25): SEQ ID NO: 4762; WAN0249ZA_at; Start 25; Stop 49
aaccattcaccgtgtagccgaaatc

SEQ ID NO: 39139 - DNA, 25 bp, Artificial
  probe
  misc_feature (1)..(25): SEQ ID NO: 4762; WAN0249ZA_at; Start 28; Stop 52
cattcaccgtgtagccgaaatcgtt

SEQ ID NO: 39140 - DNA, 25 bp, Artificial
  probe
  misc_feature (1)..(25): SEQ ID NO: 4762; WAN0249ZA_at; Start 15; Stop 39
tatacaatcaaaccattcaccgtgt

SEQ ID NO: 39141 - DNA, 25 bp, Artificial
  probe
  misc_feature (1)..(25): SEQ ID NO: 4762; WAN0249ZA_at; Start 17; Stop 41
tacaatcaaaccattcaccgtgtag

SEQ ID NO: 39142 - DNA, 25 bp, Artificial
  probe
  misc_feature (1)..(25): SEQ ID NO: 4762; WAN0249ZA_at; Start 18; Stop 42
acaatcaaaccattcaccgtgtagc

SEQ ID NO: 39143 - DNA, 25 bp, Artificial
  probe
  misc_feature (1)..(25): SEQ ID NO: 4762; WAN0249ZA_at; Start 11; Stop 35
acggtatacaatcaaaccattcacc

SEQ ID NO: 39144 - DNA, 25 bp, Artificial
  probe
  misc_feature (1)..(25): SEQ ID NO: 4762; WAN0249ZA_at; Start 14; Stop 38
gtatacaatcaaaccattcaccgtg

SEQ ID NO: 39145 - DNA, 25 bp, Artificial
  probe
  misc_feature (1)..(25): SEQ ID NO: 4762; WAN0249ZA_at; Start 22; Stop 46
tcaaaccattcaccgtgtagccgaa

SEQ ID NO: 39146 - DNA, 25 bp, Artificial
  probe
  misc_feature (1)..(25): SEQ ID NO: 4762; WAN0249ZA_at; Start 9; Stop 33
agacggtatacaatcaaaccattca

SEQ ID NO: 39147 - DNA, 25 bp, Artificial
  probe
  misc_feature (1)..(25): SEQ ID NO: 4762; WAN0249ZA_at; Start 27; Stop 51
ccattcaccgtgtagccgaaatcgt

SEQ ID NO: 39148 - DNA, 25 bp, Artificial
  probe
  misc_feature (1)..(25): SEQ ID NO: 4762; WAN0249ZA_at; Start 8; Stop 32
aagacggtatacaatcaaaccattc

SEQ ID NO: 39149 - DNA, 25 bp, Artificial
  probe
  misc_feature (1)..(25): SEQ ID NO: 4762; WAN0249ZA_at; Start 2; Stop 26
taagagaagacggtatacaatcaaa

SEQ ID NO: 39150 - DNA, 25 bp, Artificial
  probe
  misc_feature (1)..(25): SEQ ID NO: 4762; WAN0249ZA_at; Start 4; Stop 28
agagaagacggtatacaatcaaacc

SEQ ID NO: 39151 - DNA, 25 bp, Artificial
  probe
  misc_feature (1)..(25): SEQ ID NO: 4762; WAN0249ZA_at; Start 34; Stop 58
ccgtgtagccgaaatcgttcagaat

SEQ ID NO: 39152 - DNA, 25 bp, Artificial
  probe
  misc_feature (1)..(25): SEQ ID NO: 4762; WAN0249ZA_at; Start 6; Stop 30
agaagacggtatacaatcaaaccat

SEQ ID NO: 39153 - DNA, 25 bp, Artificial
  probe
  misc_feature (1)..(25): SEQ ID NO: 4762; WAN0249ZA_at; Start 13; Stop 37
ggtatacaatcaaaccattcaccgt

SEQ ID NO: 39154 - DNA, 25 bp, Artificial
  probe
  misc_feature (1)..(25): SEQ ID NO: 4762; WAN0249ZA_at; Start 32; Stop 56
caccgtgtagccgaaatcgttcaga

SEQ ID NO: 39155 - DNA, 25 bp, Artificial
  probe
  misc_feature (1)..(25): SEQ ID NO: 4762; WAN0249ZA_at; Start 19; Stop 43
caatcaaaccattcaccgtgtagcc

SEQ ID NO: 39156 - DNA, 25 bp, Artificial
  probe
  misc_feature (1)..(25): SEQ ID NO: 4762; WAN0249ZA_at; Start 7; Stop 31
gaagacggtatacaatcaaaccatt

SEQ ID NO: 39157 - DNA, 25 bp, Artificial
  probe
  misc_feature (1)..(25): SEQ ID NO: 4762; WAN0249ZA_at; Start 20; Stop 44
aatcaaaccattcaccgtgtagccg

SEQ ID NO: 39158 - DNA, 25 bp, Artificial
  probe
  misc_feature (1)..(25): SEQ ID NO: 4762; WAN0249ZA_at; Start 21; Stop 45
atcaaaccattcaccgtgtagccga

SEQ ID NO: 39159 - DNA, 25 bp, Artificial
  probe
  misc_feature (1)..(25): SEQ ID NO: 4762; WAN0249ZA_at; Start 5; Stop 29
gagaagacggtatacaatcaaacca

SEQ ID NO: 39160 - DNA, 25 bp, Artificial
  probe
  misc_feature (1)..(25): SEQ ID NO: 4762; WAN0249ZA_at; Start 33; Stop 57
accgtgtagccgaaatcgttcagaa

SEQ ID NO: 39161 - DNA, 25 bp, Artificial
  probe
  misc_feature (1)..(25): SEQ ID NO: 3829; WAN0249ZB_at; Start 19; Stop 43
ttcggctacacggtgaatggtttga

SEQ ID NO: 39162 - DNA, 25 bp, Artificial
  probe
  misc_feature (1)..(25): SEQ ID NO: 3829; WAN0249ZB_at; Start 7; Stop 31
attctgaacgatttcggctacacgg

SEQ ID NO: 39163 - DNA, 25 bp, Artificial
  probe
  misc_feature (1)..(25): SEQ ID NO: 3829; WAN0249ZB_at; Start 5; Stop 29
tcattctgaacgatttcggctacac

SEQ ID NO: 39164 - DNA, 25 bp, Artificial
  probe
  misc_feature (1)..(25): SEQ ID NO: 3829; WAN0249ZB_at; Start 36; Stop 60
tggtttgattgtataccgtcttctc

SEQ ID NO: 39165 - DNA, 25 bp, Artificial
  probe
  misc_feature (1)..(25): SEQ ID NO: 3829; WAN0249ZB_at; Start 8; Stop 32
ttctgaacgatttcggctacacggt

SEQ ID NO: 39166 - DNA, 25 bp, Artificial
  probe
  misc_feature (1)..(25): SEQ ID NO: 3829; WAN0249ZB_at; Start 34; Stop 58
aatggtttgattgtataccgtcttc

SEQ ID NO: 39167 - DNA, 25 bp, Artificial
  probe
  misc_feature (1)..(25): SEQ ID NO: 3829; WAN0249ZB_at; Start 28; Stop 52
acggtgaatggtttgattgtatacc

SEQ ID NO: 39168 - DNA, 25 bp, Artificial
  probe
  misc_feature (1)..(25): SEQ ID NO: 3829; WAN0249ZB_at; Start 14; Stop 38
acgatttcggctacacggtgaatgg

SEQ ID NO: 39169 - DNA, 25 bp, Artificial
  probe
  misc_feature (1)..(25): SEQ ID NO: 3829; WAN0249ZB_at; Start 3; Stop 27
cttcattctgaacgatttcggctac

SEQ ID NO: 39170 - DNA, 25 bp, Artificial
  probe
  misc_feature (1)..(25): SEQ ID NO: 3829; WAN0249ZB_at; Start 20; Stop 44
tcggctacacggtgaatggtttgat

SEQ ID NO: 39171 - DNA, 25 bp, Artificial
  probe
  misc_feature (1)..(25): SEQ ID NO: 3829; WAN0249ZB_at; Start 6; Stop 30
cattctgaacgatttcggctacacg

SEQ ID NO: 39172 - DNA, 25 bp, Artificial
  probe
  misc_feature (1)..(25): SEQ ID NO: 3829; WAN0249ZB_at; Start 16; Stop 40
gatttcggctacacggtgaatggtt

SEQ ID NO: 39173 - DNA, 25 bp, Artificial
  probe
  misc_feature (1)..(25): SEQ ID NO: 3829; WAN0249ZB_at; Start 2; Stop 26
tcttcattctgaacgatttcggcta

SEQ ID NO: 39174 - DNA, 25 bp, Artificial
  probe
  misc_feature (1)..(25): SEQ ID NO: 3829; WAN0249ZB_at; Start 30; Stop 54
ggtgaatggtttgattgtataccgt

SEQ ID NO: 39175 - DNA, 25 bp, Artificial
  probe
  misc_feature (1)..(25): SEQ ID NO: 3829; WAN0249ZB_at; Start 13; Stop 37
aacgatttcggctacacggtgaatg

SEQ ID NO: 39176 - DNA, 25 bp, Artificial
  probe
  misc_feature (1)..(25): SEQ ID NO: 3829; WAN0249ZB_at; Start 17; Stop 41
atttcggctacacggtgaatggttt

SEQ ID NO: 39177 - DNA, 25 bp, Artificial
  probe
  misc_feature (1)..(25): SEQ ID NO: 3829; WAN0249ZB_at; Start 25; Stop 49
tacacggtgaatggtttgattgtat

SEQ ID NO: 39178 - DNA, 25 bp, Artificial
  probe
  misc_feature (1)..(25): SEQ ID NO: 3829; WAN0249ZB_at; Start 32; Stop 56
tgaatggtttgattgtataccgtct

SEQ ID NO: 39179 - DNA, 25 bp, Artificial
  probe
  misc_feature (1)..(25): SEQ ID NO: 3829; WAN0249ZB_at; Start 39; Stop 63
tttgattgtataccgtcttctctta

SEQ ID NO: 39180 - DNA, 25 bp, Artificial
  probe
  misc_feature (1)..(25): SEQ ID NO: 3829; WAN0249ZB_at; Start 21; Stop 45
cggctacacggtgaatggtttgatt

SEQ ID NO: 39181 - DNA, 25 bp, Artificial
  probe
  misc_feature (1)..(25): SEQ ID NO: 3829; WAN0249ZB_at; Start 15; Stop 39
cgatttcggctacacggtgaatggt

SEQ ID NO: 39182 - DNA, 25 bp, Artificial
  probe
  misc_feature (1)..(25): SEQ ID NO: 3829; WAN0249ZB_at; Start 29; Stop 53
cggtgaatggtttgattgtataccg

SEQ ID NO: 39183 - DNA, 25 bp, Artificial
  probe
  misc_feature (1)..(25): SEQ ID NO: 3829; WAN0249ZB_at; Start 9; Stop 33
tctgaacgatttcggctacacggtg

SEQ ID NO: 39184 - DNA, 25 bp, Artificial
  probe
  misc_feature (1)..(25): SEQ ID NO: 3829; WAN0249ZB_at; Start 38; Stop 62
gtttgattgtataccgtcttctctt

SEQ ID NO: 39185 - DNA, 25 bp, Artificial
  probe
  misc_feature (1)..(25): SEQ ID NO: 3829; WAN0249ZB_at; Start 27; Stop 51
cacggtgaatggtttgattgtatac

SEQ ID NO: 39186 - DNA, 25 bp, Artificial
  probe
  misc_feature (1)..(25): SEQ ID NO: 3829; WAN0249ZB_at; Start 37; Stop 61
ggtttgattgtataccgtcttctct

SEQ ID NO: 39187 - DNA, 25 bp, Artificial
  probe
  misc_feature (1)..(25): SEQ ID NO: 3829; WAN0249ZB_at; Start 4; Stop 28
ttcattctgaacgatttcggctaca

SEQ ID NO: 39188 - DNA, 25 bp, Artificial
  probe
  misc_feature (1)..(25): SEQ ID NO: 3829; WAN0249ZB_at; Start 1; Stop 25
gtcttcattctgaacgatttcggct

SEQ ID NO: 39189 - DNA, 25 bp, Artificial
  probe
  misc_feature (1)..(25): SEQ ID NO: 3829; WAN0249ZB_at; Start 24; Stop 48
ctacacggtgaatggtttgattgta

SEQ ID NO: 39190 - DNA, 25 bp, Artificial
  probe
  misc_feature (1)..(25): SEQ ID NO: 3829; WAN0249ZB_at; Start 33; Stop 57
gaatggtttgattgtataccgtctt

SEQ ID NO: 39191 - DNA, 25 bp, Artificial
  probe
  misc_feature (1)..(25): SEQ ID NO: 3829; WAN0249ZB_at; Start 22; Stop 46
ggctacacggtgaatggtttgattg

SEQ ID NO: 39192 - DNA, 25 bp, Artificial
  probe
  misc_feature (1)..(25): SEQ ID NO: 3829; WAN0249ZB_at; Start 31; Stop 55
gtgaatggtttgattgtataccgtc

SEQ ID NO: 39193 - DNA, 25 bp, Artificial
  probe
  misc_feature (1)..(25): SEQ ID NO: 3829; WAN0249ZB_at; Start 12; Stop 36
gaacgatttcggctacacggtgaat

SEQ ID NO: 39194 - DNA, 25 bp, Artificial
  probe
  misc_feature (1)..(25): SEQ ID NO: 3829; WAN0249ZB_at; Start 23; Stop 47
gctacacggtgaatggtttgattgt

SEQ ID NO: 39195 - DNA, 25 bp, Artificial
  probe
  misc_feature (1)..(25): SEQ ID NO: 3737; WAN0249ZC_at; Start 7; Stop 31
tcagctagaagtagaaacagataaa

SEQ ID NO: 39196 - DNA, 25 bp, Artificial
  probe
  misc_feature (1)..(25): SEQ ID NO: 3737; WAN0249ZC_at; Start 14; Stop 38
gaagtagaaacagataaatacacat

SEQ ID NO: 39197 - DNA, 25 bp, Artificial
  probe
  misc_feature (1)..(25): SEQ ID NO: 3737; WAN0249ZC_at; Start 38; Stop 62
tatactgccgctagaaatggtagta

SEQ ID NO: 39198 - DNA, 25 bp, Artificial
  probe
  misc_feature (1)..(25): SEQ ID NO: 3737; WAN0249ZC_at; Start 44; Stop 68
gccgctagaaatggtagtaaggaag

SEQ ID NO: 39199 - DNA, 25 bp, Artificial
  probe
  misc_feature (1)..(25): SEQ ID NO: 3737; WAN0249ZC_at; Start 75; Stop 99
ttcaagagtcagatatagcagcaac

SEQ ID NO: 39200 - DNA, 25 bp, Artificial
  probe
  misc_feature (1)..(25): SEQ ID NO: 3737; WAN0249ZC_at; Start 80; Stop 104
gagtcagatatagcagcaactctaa

SEQ ID NO: 39201 - DNA, 25 bp, Artificial
  probe
  misc_feature (1)..(25): SEQ ID NO: 3737; WAN0249ZC_at; Start 29; Stop 53
aaatacacatatactgccgctagaa

SEQ ID NO: 39202 - DNA, 25 bp, Artificial
  probe
  misc_feature (1)..(25): SEQ ID NO: 3737; WAN0249ZC_at; Start 46; Stop 70
cgctagaaatggtagtaaggaagtt

SEQ ID NO: 39203 - DNA, 25 bp, Artificial
  probe
  misc_feature (1)..(25): SEQ ID NO: 3737; WAN0249ZC_at; Start 48; Stop 72
ctagaaatggtagtaaggaagttgg

SEQ ID NO: 39204 - DNA, 25 bp, Artificial
  probe
  misc_feature (1)..(25): SEQ ID NO: 3737; WAN0249ZC_at; Start 12; Stop 36
tagaagtagaaacagataaatacac

SEQ ID NO: 39205 - DNA, 25 bp, Artificial
  probe
  misc_feature (1)..(25): SEQ ID NO: 3737; WAN0249ZC_at; Start 76; Stop 100
tcaagagtcagatatagcagcaact

SEQ ID NO: 39206 - DNA, 25 bp, Artificial
  probe
  misc_feature (1)..(25): SEQ ID NO: 3737; WAN0249ZC_at; Start 69; Stop 93
ttggtattcaagagtcagatatagc

SEQ ID NO: 39207 - DNA, 25 bp, Artificial
  probe
  misc_feature (1)..(25): SEQ ID NO: 3737; WAN0249ZC_at; Start 4; Stop 28
taatcagctagaagtagaaacagat

SEQ ID NO: 39208 - DNA, 25 bp, Artificial
  probe
  misc_feature (1)..(25): SEQ ID NO: 3737; WAN0249ZC_at; Start 40; Stop 64
tactgccgctagaaatggtagtaag

SEQ ID NO: 39209 - DNA, 25 bp, Artificial
  probe
  misc_feature (1)..(25): SEQ ID NO: 3737; WAN0249ZC_at; Start 71; Stop 95
ggtattcaagagtcagatatagcag

SEQ ID NO: 39210 - DNA, 25 bp, Artificial
  probe
  misc_feature (1)..(25): SEQ ID NO: 3737; WAN0249ZC_at; Start 28; Stop 52
taaatacacatatactgccgctaga

SEQ ID NO: 39211 - DNA, 25 bp, Artificial
  probe
  misc_feature (1)..(25): SEQ ID NO: 3737; WAN0249ZC_at; Start 30; Stop 54
aatacacatatactgccgctagaaa

SEQ ID NO: 39212 - DNA, 25 bp, Artificial
  probe
  misc_feature (1)..(25): SEQ ID NO: 3737; WAN0249ZC_at; Start 63; Stop 87
aggaagttggtattcaagagtcaga

SEQ ID NO: 39213 - DNA, 25 bp, Artificial
  probe
  misc_feature (1)..(25): SEQ ID NO: 3737; WAN0249ZC_at; Start 77; Stop 101
caagagtcagatatagcagcaactc

SEQ ID NO: 39214 - DNA, 25 bp, Artificial
  probe
  misc_feature (1)..(25): SEQ ID NO: 3737; WAN0249ZC_at; Start 55; Stop 79
tggtagtaaggaagttggtattcaa

SEQ ID NO: 39215 - DNA, 25 bp, Artificial
  probe
  misc_feature (1)..(25): SEQ ID NO: 3737; WAN0249ZC_at; Start 26; Stop 50
gataaatacacatatactgccgcta

SEQ ID NO: 39216 - DNA, 25 bp, Artificial
  probe
  misc_feature (1)..(25): SEQ ID NO: 3737; WAN0249ZC_at; Start 58; Stop 82
tagtaaggaagttggtattcaagag

SEQ ID NO: 39217 - DNA, 25 bp, Artificial
  probe
  misc_feature (1)..(25): SEQ ID NO: 3737; WAN0249ZC_at; Start 61; Stop 85
taaggaagttggtattcaagagtca

SEQ ID NO: 39218 - DNA, 25 bp, Artificial
  probe
  misc_feature (1)..(25): SEQ ID NO: 3737; WAN0249ZC_at; Start 1; Stop 25
ggataatcagctagaagtagaaaca

SEQ ID NO: 39219 - DNA, 25 bp, Artificial
  probe
  misc_feature (1)..(25): SEQ ID NO: 3737; WAN0249ZC_at; Start 32; Stop 56
tacacatatactgccgctagaaatg

SEQ ID NO: 39220 - DNA, 25 bp, Artificial
  probe
  misc_feature (1)..(25): SEQ ID NO: 3737; WAN0249ZC_at; Start 65; Stop 89
gaagttggtattcaagagtcagata

SEQ ID NO: 39221 - DNA, 25 bp, Artificial
  probe
  misc_feature (1)..(25): SEQ ID NO: 3737; WAN0249ZC_at; Start 24; Stop 48
cagataaatacacatatactgccgc

SEQ ID NO: 39222 - DNA, 25 bp, Artificial
  probe
  misc_feature (1)..(25): SEQ ID NO: 3737; WAN0249ZC_at; Start 42; Stop 66
ctgccgctagaaatggtagtaagga

SEQ ID NO: 39223 - DNA, 25 bp, Artificial
  probe
  misc_feature (1)..(25): SEQ ID NO: 3737; WAN0249ZC_at; Start 43; Stop 67
tgccgctagaaatggtagtaaggaa

SEQ ID NO: 39224 - DNA, 25 bp, Artificial
  probe
  misc_feature (1)..(25): SEQ ID NO: 3737; WAN0249ZC_at; Start 2; Stop 26
gataatcagctagaagtagaaacag

SEQ ID NO: 39225 - DNA, 25 bp, Artificial
  probe
  misc_feature (1)..(25): SEQ ID NO: 3737; WAN0249ZC_at; Start 10; Stop 34
gctagaagtagaaacagataaatac

SEQ ID NO: 39226 - DNA, 25 bp, Artificial
  probe
  misc_feature (1)..(25): SEQ ID NO: 3737; WAN0249ZC_at; Start 41; Stop 65
actgccgctagaaatggtagtaagg

SEQ ID NO: 39227 - DNA, 25 bp, Artificial
  probe
  misc_feature (1)..(25): SEQ ID NO: 3737; WAN0249ZC_at; Start 36; Stop 60
catatactgccgctagaaatggtag

SEQ ID NO: 39228 - DNA, 25 bp, Artificial
  probe
  misc_feature (1)..(25): SEQ ID NO: 3737; WAN0249ZC_at; Start 73; Stop 97
tattcaagagtcagatatagcagca

SEQ ID NO: 39229 - DNA, 25 bp, Artificial
  probe
  misc_feature (1)..(25): SEQ ID NO: 4785; WAN0249ZD_at; Start 71; Stop 95
gtatttatctgtttctacttctagc

SEQ ID NO: 39230 - DNA, 25 bp, Artificial
  probe
  misc_feature (1)..(25): SEQ ID NO: 4785; WAN0249ZD_at; Start 53; Stop 77
tctagcggcagtatatgtgtattta

SEQ ID NO: 39231 - DNA, 25 bp, Artificial
  probe
  misc_feature (1)..(25): SEQ ID NO: 4785; WAN0249ZD_at; Start 1; Stop 25
ttagagttgctgctatatctgactc

SEQ ID NO: 39232 - DNA, 25 bp, Artificial
  probe
  misc_feature (1)..(25): SEQ ID NO: 4785; WAN0249ZD_at; Start 59; Stop 83
ggcagtatatgtgtatttatctgtt

SEQ ID NO: 39233 - DNA, 25 bp, Artificial
  probe
  misc_feature (1)..(25): SEQ ID NO: 4785; WAN0249ZD_at; Start 36; Stop 60
acttccttactaccatttctagcgg

SEQ ID NO: 39234 - DNA, 25 bp, Artificial
  probe
  misc_feature (1)..(25): SEQ ID NO: 4785; WAN0249ZD_at; Start 18; Stop 42
tctgactcttgaataccaacttcct

SEQ ID NO: 39235 - DNA, 25 bp, Artificial
  probe
  misc_feature (1)..(25): SEQ ID NO: 4785; WAN0249ZD_at; Start 20; Stop 44
tgactcttgaataccaacttcctta

SEQ ID NO: 39236 - DNA, 25 bp, Artificial
  probe
  misc_feature (1)..(25): SEQ ID NO: 4785; WAN0249ZD_at; Start 51; Stop 75
tttctagcggcagtatatgtgtatt

SEQ ID NO: 39237 - DNA, 25 bp, Artificial
  probe
  misc_feature (1)..(25): SEQ ID NO: 4785; WAN0249ZD_at; Start 16; Stop 40
tatctgactcttgaataccaacttc

SEQ ID NO: 39238 - DNA, 25 bp, Artificial
  probe
  misc_feature (1)..(25): SEQ ID NO: 4785; WAN0249ZD_at; Start 57; Stop 81
gcggcagtatatgtgtatttatctg

SEQ ID NO: 39239 - DNA, 25 bp, Artificial
  probe
  misc_feature (1)..(25): SEQ ID NO: 4785; WAN0249ZD_at; Start 27; Stop 51
tgaataccaacttccttactaccat

SEQ ID NO: 39240 - DNA, 25 bp, Artificial
  probe
  misc_feature (1)..(25): SEQ ID NO: 4785; WAN0249ZD_at; Start 80; Stop 104
tgtttctacttctagctgattatcc

SEQ ID NO: 39241 - DNA, 25 bp, Artificial
  probe
  misc_feature (1)..(25): SEQ ID NO: 4785; WAN0249ZD_at; Start 11; Stop 35
tgctatatctgactcttgaatacca

SEQ ID NO: 39242 - DNA, 25 bp, Artificial
  probe
  misc_feature (1)..(25): SEQ ID NO: 4785; WAN0249ZD_at; Start 2; Stop 26
tagagttgctgctatatctgactct

SEQ ID NO: 39243 - DNA, 25 bp, Artificial
  probe
  misc_feature (1)..(25): SEQ ID NO: 4785; WAN0249ZD_at; Start 49; Stop 73
catttctagcggcagtatatgtgta

SEQ ID NO: 39244 - DNA, 25 bp, Artificial
  probe
  misc_feature (1)..(25): SEQ ID NO: 4785; WAN0249ZD_at; Start 55; Stop 79
tagcggcagtatatgtgtatttatc

SEQ ID NO: 39245 - DNA, 25 bp, Artificial
  probe
  misc_feature (1)..(25): SEQ ID NO: 4785; WAN0249ZD_at; Start 76; Stop 100
tatctgtttctacttctagctgatt

SEQ ID NO: 39246 - DNA, 25 bp, Artificial
  probe
  misc_feature (1)..(25): SEQ ID NO: 4785; WAN0249ZD_at; Start 42; Stop 66
ttactaccatttctagcggcagtat

SEQ ID NO: 39247 - DNA, 25 bp, Artificial
  probe
  misc_feature (1)..(25): SEQ ID NO: 4785; WAN0249ZD_at; Start 40; Stop 64
ccttactaccatttctagcggcagt

SEQ ID NO: 39248 - DNA, 25 bp, Artificial
  probe
  misc_feature (1)..(25): SEQ ID NO: 4785; WAN0249ZD_at; Start 35; Stop 59
aacttccttactaccatttctagcg

SEQ ID NO: 39249 - DNA, 25 bp, Artificial
  probe
  misc_feature (1)..(25): SEQ ID NO: 4785; WAN0249ZD_at; Start 14; Stop 38
tatatctgactcttgaataccaact

SEQ ID NO: 39250 - DNA, 25 bp, Artificial
  probe
  misc_feature (1)..(25): SEQ ID NO: 4785; WAN0249ZD_at; Start 74; Stop 98
tttatctgtttctacttctagctga

SEQ ID NO: 39251 - DNA, 25 bp, Artificial
  probe
  misc_feature (1)..(25): SEQ ID NO: 4785; WAN0249ZD_at; Start 21; Stop 45
gactcttgaataccaacttccttac

SEQ ID NO: 39252 - DNA, 25 bp, Artificial
  probe
  misc_feature (1)..(25): SEQ ID NO: 4785; WAN0249ZD_at; Start 12; Stop 36
gctatatctgactcttgaataccaa

SEQ ID NO: 39253 - DNA, 25 bp, Artificial
  probe
  misc_feature (1)..(25): SEQ ID NO: 4785; WAN0249ZD_at; Start 9; Stop 33
gctgctatatctgactcttgaatac

SEQ ID NO: 39254 - DNA, 25 bp, Artificial
  probe
  misc_feature (1)..(25): SEQ ID NO: 4785; WAN0249ZD_at; Start 8; Stop 32
tgctgctatatctgactcttgaata

SEQ ID NO: 39255 - DNA, 25 bp, Artificial
  probe
  misc_feature (1)..(25): SEQ ID NO: 4785; WAN0249ZD_at; Start 43; Stop 67
tactaccatttctagcggcagtata

SEQ ID NO: 39256 - DNA, 25 bp, Artificial
  probe
  misc_feature (1)..(25): SEQ ID NO: 4785; WAN0249ZD_at; Start 5; Stop 29
agttgctgctatatctgactcttga

SEQ ID NO: 39257 - DNA, 25 bp, Artificial
  probe
  misc_feature (1)..(25): SEQ ID NO: 4785; WAN0249ZD_at; Start 4; Stop 28
gagttgctgctatatctgactcttg

SEQ ID NO: 39258 - DNA, 25 bp, Artificial
  probe
  misc_feature (1)..(25): SEQ ID NO: 4785; WAN0249ZD_at; Start 24; Stop 48
tcttgaataccaacttccttactac

SEQ ID NO: 39259 - DNA, 25 bp, Artificial
  probe
  misc_feature (1)..(25): SEQ ID NO: 4785; WAN0249ZD_at; Start 41; Stop 65
cttactaccatttctagcggcagta

SEQ ID NO: 39260 - DNA, 25 bp, Artificial
  probe
  misc_feature (1)..(25): SEQ ID NO: 4785; WAN0249ZD_at; Start 39; Stop 63
tccttactaccatttctagcggcag

SEQ ID NO: 39261 - DNA, 25 bp, Artificial
  probe
  misc_feature (1)..(25): SEQ ID NO: 4785; WAN0249ZD_at; Start 45; Stop 69
ctaccatttctagcggcagtatatg

SEQ ID NO: 39262 - DNA, 25 bp, Artificial
  probe
  misc_feature (1)..(25): SEQ ID NO: 4785; WAN0249ZD_at; Start 6; Stop 30
gttgctgctatatctgactcttgaa

SEQ ID NO: 39263 - DNA, 25 bp, Artificial
  probe
  misc_feature (1)..(25): SEQ ID NO: 4505; WAN0249ZE_at; Start 21; Stop 45
ccaggaaaagctcacagatgtgggc

SEQ ID NO: 39264 - DNA, 25 bp, Artificial
  probe
  misc_feature (1)..(25): SEQ ID NO: 4505; WAN0249ZE_at; Start 81; Stop 105
agaataaaaacgcttacaagtctgt

SEQ ID NO: 39265 - DNA, 25 bp, Artificial
  probe
  misc_feature (1)..(25): SEQ ID NO: 4505; WAN0249ZE_at; Start 106; Stop 130
tgaactgggaaactatgaatcctat

SEQ ID NO: 39266 - DNA, 25 bp, Artificial
  probe
  misc_feature (1)..(25): SEQ ID NO: 4505; WAN0249ZE_at; Start 91; Stop 115
cgcttacaagtctgttgaactggga

SEQ ID NO: 39267 - DNA, 25 bp, Artificial
  probe
  misc_feature (1)..(25): SEQ ID NO: 4505; WAN0249ZE_at; Start 110; Stop 134
ctgggaaactatgaatcctattttt

SEQ ID NO: 39268 - DNA, 25 bp, Artificial
  probe
  misc_feature (1)..(25): SEQ ID NO: 4505; WAN0249ZE_at; Start 35; Stop 59
cagatgtgggcttttttcctggttt

SEQ ID NO: 39269 - DNA, 25 bp, Artificial
  probe
  misc_feature (1)..(25): SEQ ID NO: 4505; WAN0249ZE_at; Start 137; Stop 161
aaaaatatttccagaaatcagttgc

SEQ ID NO: 39270 - DNA, 25 bp, Artificial
  probe
  misc_feature (1)..(25): SEQ ID NO: 4505; WAN0249ZE_at; Start 15; Stop 39
taggaaccaggaaaagctcacagat

SEQ ID NO: 39271 - DNA, 25 bp, Artificial
  probe
  misc_feature (1)..(25): SEQ ID NO: 4505; WAN0249ZE_at; Start 60; Stop 84
tgagaacgaggtctttcgtaaagaa

SEQ ID NO: 39272 - DNA, 25 bp, Artificial
  probe
  misc_feature (1)..(25): SEQ ID NO: 4505; WAN0249ZE_at; Start 148; Stop 172
cagaaatcagttgctaaatagggta

SEQ ID NO: 39273 - DNA, 25 bp, Artificial
  probe
  misc_feature (1)..(25): SEQ ID NO: 4505; WAN0249ZE_at; Start 13; Stop 37
tctaggaaccaggaaaagctcacag

SEQ ID NO: 39274 - DNA, 25 bp, Artificial
  probe
  misc_feature (1)..(25): SEQ ID NO: 4505; WAN0249ZE_at; Start 155; Stop 179
cagttgctaaatagggtaaaaattg

SEQ ID NO: 39275 - DNA, 25 bp, Artificial
  probe
  misc_feature (1)..(25): SEQ ID NO: 4505; WAN0249ZE_at; Start 3; Stop 27
gattttagaatctaggaaccaggaa

SEQ ID NO: 39276 - DNA, 25 bp, Artificial
  probe
  misc_feature (1)..(25): SEQ ID NO: 4505; WAN0249ZE_at; Start 53; Stop 77
ctggttttgagaacgaggtctttcg

SEQ ID NO: 39277 - DNA, 25 bp, Artificial
  probe
  misc_feature (1)..(25): SEQ ID NO: 4505; WAN0249ZE_at; Start 85; Stop 109
taaaaacgcttacaagtctgttgaa

SEQ ID NO: 39278 - DNA, 25 bp, Artificial
  probe
  misc_feature (1)..(25): SEQ ID NO: 4505; WAN0249ZE_at; Start 159; Stop 183
tgctaaatagggtaaaaattgataa

SEQ ID NO: 39279 - DNA, 25 bp, Artificial
  probe
  misc_feature (1)..(25): SEQ ID NO: 4505; WAN0249ZE_at; Start 10; Stop 34
gaatctaggaaccaggaaaagctca

SEQ ID NO: 39280 - DNA, 25 bp, Artificial
  probe
  misc_feature (1)..(25): SEQ ID NO: 4505; WAN0249ZE_at; Start 24; Stop 48
ggaaaagctcacagatgtgggcttt

SEQ ID NO: 39281 - DNA, 25 bp, Artificial
  probe
  misc_feature (1)..(25): SEQ ID NO: 4505; WAN0249ZE_at; Start 22; Stop 46
caggaaaagctcacagatgtgggct

SEQ ID NO: 39282 - DNA, 25 bp, Artificial
  probe
  misc_feature (1)..(25): SEQ ID NO: 4505; WAN0249ZE_at; Start 8; Stop 32
tagaatctaggaaccaggaaaagct

SEQ ID NO: 39283 - DNA, 25 bp, Artificial
  probe
  misc_feature (1)..(25): SEQ ID NO: 4505; WAN0249ZE_at; Start 100; Stop 124
gtctgttgaactgggaaactatgaa

SEQ ID NO: 39284 - DNA, 25 bp, Artificial
  probe
  misc_feature (1)..(25): SEQ ID NO: 4505; WAN0249ZE_at; Start 17; Stop 41
ggaaccaggaaaagctcacagatgt

SEQ ID NO: 39285 - DNA, 25 bp, Artificial
  probe
  misc_feature (1)..(25): SEQ ID NO: 4505; WAN0249ZE_at; Start 93; Stop 117
cttacaagtctgttgaactgggaaa

SEQ ID NO: 39286 - DNA, 25 bp, Artificial
  probe
  misc_feature (1)..(25): SEQ ID NO: 4505; WAN0249ZE_at; Start 30; Stop 54
gctcacagatgtgggcttttttcct

SEQ ID NO: 39287 - DNA, 25 bp, Artificial
  probe
  misc_feature (1)..(25): SEQ ID NO: 4505; WAN0249ZE_at; Start 97; Stop 121
caagtctgttgaactgggaaactat

SEQ ID NO: 39288 - DNA, 25 bp, Artificial
  probe
  misc_feature (1)..(25): SEQ ID NO: 4505; WAN0249ZE_at; Start 11; Stop 35
aatctaggaaccaggaaaagctcac

SEQ ID NO: 39289 - DNA, 25 bp, Artificial
  probe
  misc_feature (1)..(25): SEQ ID NO: 4505; WAN0249ZE_at; Start 1; Stop 25
tagattttagaatctaggaaccagg

SEQ ID NO: 39290 - DNA, 25 bp, Artificial
  probe
  misc_feature (1)..(25): SEQ ID NO: 4505; WAN0249ZE_at; Start 18; Stop 42
gaaccaggaaaagctcacagatgtg

SEQ ID NO: 39291 - DNA, 25 bp, Artificial
  probe
  misc_feature (1)..(25): SEQ ID NO: 4505; WAN0249ZE_at; Start 150; Stop 174
gaaatcagttgctaaatagggtaaa

SEQ ID NO: 39292 - DNA, 25 bp, Artificial
  probe
  misc_feature (1)..(25): SEQ ID NO: 4505; WAN0249ZE_at; Start 103; Stop 127
tgttgaactgggaaactatgaatcc

SEQ ID NO: 39293 - DNA, 25 bp, Artificial
  probe
  misc_feature (1)..(25): SEQ ID NO: 4505; WAN0249ZE_at; Start 104; Stop 128
gttgaactgggaaactatgaatcct

SEQ ID NO: 39294 - DNA, 25 bp, Artificial
  probe
  misc_feature (1)..(25): SEQ ID NO: 4505; WAN0249ZE_at; Start 89; Stop 113
aacgcttacaagtctgttgaactgg

SEQ ID NO: 39295 - DNA, 25 bp, Artificial
  probe
  misc_feature (1)..(25): SEQ ID NO: 4505; WAN0249ZE_at; Start 95; Stop 119
tacaagtctgttgaactgggaaact

SEQ ID NO: 39296 - DNA, 25 bp, Artificial
  probe
  misc_feature (1)..(25): SEQ ID NO: 4505; WAN0249ZE_at; Start 146; Stop 170
tccagaaatcagttgctaaataggg

SEQ ID NO: 39297 - DNA, 25 bp, Artificial
  probe
  misc_feature (1)..(25): SEQ ID NO: 5384; WAN0249ZF_at; Start 165; Stop 189
aaaccaggaaaaaagcccacatctg

SEQ ID NO: 39298 - DNA, 25 bp, Artificial
  probe
  misc_feature (1)..(25): SEQ ID NO: 5384; WAN0249ZF_at; Start 186; Stop 210
tctgtgagcttttcctggttcctag

SEQ ID NO: 39299 - DNA, 25 bp, Artificial
  probe
  misc_feature (1)..(25): SEQ ID NO: 5384; WAN0249ZF_at; Start 109; Stop 133
tcccagttcaacagacttgtaagcg

SEQ ID NO: 39300 - DNA, 25 bp, Artificial
  probe
  misc_feature (1)..(25): SEQ ID NO: 5384; WAN0249ZF_at; Start 52; Stop 76
taccctatttagcaactgatttctg

SEQ ID NO: 39301 - DNA, 25 bp, Artificial
  probe
  misc_feature (1)..(25): SEQ ID NO: 5384; WAN0249ZF_at; Start 54; Stop 78
ccctatttagcaactgatttctgga

SEQ ID NO: 39302 - DNA, 25 bp, Artificial
  probe
  misc_feature (1)..(25): SEQ ID NO: 5384; WAN0249ZF_at; Start 97; Stop 121
ggattcatagtttcccagttcaaca

SEQ ID NO: 39303 - DNA, 25 bp, Artificial
  probe
  misc_feature (1)..(25): SEQ ID NO: 5384; WAN0249ZF_at; Start 172; Stop 196
gaaaaaagcccacatctgtgagctt

SEQ ID NO: 39304 - DNA, 25 bp, Artificial
  probe
  misc_feature (1)..(25): SEQ ID NO: 5384; WAN0249ZF_at; Start 63; Stop 87
gcaactgatttctggaaatattttt

SEQ ID NO: 39305 - DNA, 25 bp, Artificial
  probe
  misc_feature (1)..(25): SEQ ID NO: 5384; WAN0249ZF_at; Start 170; Stop 194
aggaaaaaagcccacatctgtgagc

SEQ ID NO: 39306 - DNA, 25 bp, Artificial
  probe
  misc_feature (1)..(25): SEQ ID NO: 5384; WAN0249ZF_at; Start 104; Stop 128
tagtttcccagttcaacagacttgt

SEQ ID NO: 39307 - DNA, 25 bp, Artificial
  probe
  misc_feature (1)..(25): SEQ ID NO: 5384; WAN0249ZF_at; Start 119; Stop 143
acagacttgtaagcgtttttattct

SEQ ID NO: 39308 - DNA, 25 bp, Artificial
  probe
  misc_feature (1)..(25): SEQ ID NO: 5384; WAN0249ZF_at; Start 116; Stop 140
tcaacagacttgtaagcgtttttat

SEQ ID NO: 39309 - DNA, 25 bp, Artificial
  probe
  misc_feature (1)..(25): SEQ ID NO: 5384; WAN0249ZF_at; Start 112; Stop 136
cagttcaacagacttgtaagcgttt

SEQ ID NO: 39310 - DNA, 25 bp, Artificial
  probe
  misc_feature (1)..(25): SEQ ID NO: 5384; WAN0249ZF_at; Start 140; Stop 164
ttctttacgaaagacctcgttctca

SEQ ID NO: 39311 - DNA, 25 bp, Artificial
  probe
  misc_feature (1)..(25): SEQ ID NO: 5384; WAN0249ZF_at; Start 59; Stop 83
tttagcaactgatttctggaaatat

SEQ ID NO: 39312 - DNA, 25 bp, Artificial
  probe
  misc_feature (1)..(25): SEQ ID NO: 5384; WAN0249ZF_at; Start 147; Stop 171
cgaaagacctcgttctcaaaaccag

SEQ ID NO: 39313 - DNA, 25 bp, Artificial
  probe
  misc_feature (1)..(25): SEQ ID NO: 5384; WAN0249ZF_at; Start 179; Stop 203
gcccacatctgtgagcttttcctgg

SEQ ID NO: 39314 - DNA, 25 bp, Artificial
  probe
  misc_feature (1)..(25): SEQ ID NO: 5384; WAN0249ZF_at; Start 111; Stop 135
ccagttcaacagacttgtaagcgtt

SEQ ID NO: 39315 - DNA, 25 bp, Artificial
  probe
  misc_feature (1)..(25): SEQ ID NO: 5384; WAN0249ZF_at; Start 45; Stop 69
caatttttaccctatttagcaactg

SEQ ID NO: 39316 - DNA, 25 bp, Artificial
  probe
  misc_feature (1)..(25): SEQ ID NO: 5384; WAN0249ZF_at; Start 184; Stop 208
catctgtgagcttttcctggttcct

SEQ ID NO: 39317 - DNA, 25 bp, Artificial
  probe
  misc_feature (1)..(25): SEQ ID NO: 5384; WAN0249ZF_at; Start 95; Stop 119
taggattcatagtttcccagttcaa

SEQ ID NO: 39318 - DNA, 25 bp, Artificial
  probe
  misc_feature (1)..(25): SEQ ID NO: 5384; WAN0249ZF_at; Start 167; Stop 191
accaggaaaaaagcccacatctgtg

SEQ ID NO: 39319 - DNA, 25 bp, Artificial
  probe
  misc_feature (1)..(25): SEQ ID NO: 5384; WAN0249ZF_at; Start 188; Stop 212
tgtgagcttttcctggttcctagat

SEQ ID NO: 39320 - DNA, 25 bp, Artificial
  probe
  misc_feature (1)..(25): SEQ ID NO: 5384; WAN0249ZF_at; Start 101; Stop 125
tcatagtttcccagttcaacagact

SEQ ID NO: 39321 - DNA, 25 bp, Artificial
  probe
  misc_feature (1)..(25): SEQ ID NO: 5384; WAN0249ZF_at; Start 106; Stop 130
gtttcccagttcaacagacttgtaa

SEQ ID NO: 39322 - DNA, 25 bp, Artificial
  probe
  misc_feature (1)..(25): SEQ ID NO: 5384; WAN0249ZF_at; Start 190; Stop 214
tgagcttttcctggttcctagattc

SEQ ID NO: 39323 - DNA, 25 bp, Artificial
  probe
  misc_feature (1)..(25): SEQ ID NO: 5384; WAN0249ZF_at; Start 98; Stop 122
gattcatagtttcccagttcaacag

SEQ ID NO: 39324 - DNA, 25 bp, Artificial
  probe
  misc_feature (1)..(25): SEQ ID NO: 5384; WAN0249ZF_at; Start 55; Stop 79
cctatttagcaactgatttctggaa

SEQ ID NO: 39325 - DNA, 25 bp, Artificial
  probe
  misc_feature (1)..(25): SEQ ID NO: 5384; WAN0249ZF_at; Start 193; Stop 217
gcttttcctggttcctagattctaa

SEQ ID NO: 39326 - DNA, 25 bp, Artificial
  probe
  misc_feature (1)..(25): SEQ ID NO: 5384; WAN0249ZF_at; Start 107; Stop 131
tttcccagttcaacagacttgtaag

SEQ ID NO: 39327 - DNA, 25 bp, Artificial
  probe
  misc_feature (1)..(25): SEQ ID NO: 5384; WAN0249ZF_at; Start 171; Stop 195
ggaaaaaagcccacatctgtgagct

SEQ ID NO: 39328 - DNA, 25 bp, Artificial
  probe
  misc_feature (1)..(25): SEQ ID NO: 5384; WAN0249ZF_at; Start 90; Stop 114
aaaaataggattcatagtttcccag

SEQ ID NO: 39329 - DNA, 25 bp, Artificial
  probe
  misc_feature (1)..(25): SEQ ID NO: 5384; WAN0249ZF_at; Start 182; Stop 206
cacatctgtgagcttttcctggttc

SEQ ID NO: 39330 - DNA, 25 bp, Artificial
  probe
  misc_feature (1)..(25): SEQ ID NO: 5384; WAN0249ZF_at; Start 198; Stop 222
tcctggttcctagattctaaaatct

SEQ ID NO: 39331 - DNA, 25 bp, Artificial
  probe
  misc_feature (1)..(25): SEQ ID NO: 5004; WAN0249ZG_at; Start 17; Stop 41
acaacgcacaccagagattgcgata

SEQ ID NO: 39332 - DNA, 25 bp, Artificial
  probe
  misc_feature (1)..(25): SEQ ID NO: 5004; WAN0249ZG_at; Start 36; Stop 60
gcgatactgttatagaagtactaat

SEQ ID NO: 39333 - DNA, 25 bp, Artificial
  probe
  misc_feature (1)..(25): SEQ ID NO: 5004; WAN0249ZG_at; Start 6; Stop 30
ttaagatcgagacaacgcacaccag

SEQ ID NO: 39334 - DNA, 25 bp, Artificial
  probe
  misc_feature (1)..(25): SEQ ID NO: 5004; WAN0249ZG_at; Start 24; Stop 48
acaccagagattgcgatactgttat

SEQ ID NO: 39335 - DNA, 25 bp, Artificial
  probe
  misc_feature (1)..(25): SEQ ID NO: 5004; WAN0249ZG_at; Start 3; Stop 27
gaattaagatcgagacaacgcacac

SEQ ID NO: 39336 - DNA, 25 bp, Artificial
  probe
  misc_feature (1)..(25): SEQ ID NO: 5004; WAN0249ZG_at; Start 42; Stop 66
ctgttatagaagtactaatgccctt

SEQ ID NO: 39337 - DNA, 25 bp, Artificial
  probe
  misc_feature (1)..(25): SEQ ID NO: 5004; WAN0249ZG_at; Start 28; Stop 52
cagagattgcgatactgttatagaa

SEQ ID NO: 39338 - DNA, 25 bp, Artificial
  probe
  misc_feature (1)..(25): SEQ ID NO: 5004; WAN0249ZG_at; Start 4; Stop 28
aattaagatcgagacaacgcacacc

SEQ ID NO: 39339 - DNA, 25 bp, Artificial
  probe
  misc_feature (1)..(25): SEQ ID NO: 5004; WAN0249ZG_at; Start 32; Stop 56
gattgcgatactgttatagaagtac

SEQ ID NO: 39340 - DNA, 25 bp, Artificial
  probe
  misc_feature (1)..(25): SEQ ID NO: 5004; WAN0249ZG_at; Start 23; Stop 47
cacaccagagattgcgatactgtta

SEQ ID NO: 39341 - DNA, 25 bp, Artificial
  probe
  misc_feature (1)..(25): SEQ ID NO: 5004; WAN0249ZG_at; Start 5; Stop 29
attaagatcgagacaacgcacacca

SEQ ID NO: 39342 - DNA, 25 bp, Artificial
  probe
  misc_feature (1)..(25): SEQ ID NO: 5004; WAN0249ZG_at; Start 40; Stop 64
tactgttatagaagtactaatgccc

SEQ ID NO: 39343 - DNA, 25 bp, Artificial
  probe
  misc_feature (1)..(25): SEQ ID NO: 5004; WAN0249ZG_at; Start 18; Stop 42
caacgcacaccagagattgcgatac

SEQ ID NO: 39344 - DNA, 25 bp, Artificial
  probe
  misc_feature (1)..(25): SEQ ID NO: 5004; WAN0249ZG_at; Start 22; Stop 46
gcacaccagagattgcgatactgtt

SEQ ID NO: 39345 - DNA, 25 bp, Artificial
  probe
  misc_feature (1)..(25): SEQ ID NO: 5004; WAN0249ZG_at; Start 35; Stop 59
tgcgatactgttatagaagtactaa

SEQ ID NO: 39346 - DNA, 25 bp, Artificial
  probe
  misc_feature (1)..(25): SEQ ID NO: 5004; WAN0249ZG_at; Start 14; Stop 38
gagacaacgcacaccagagattgcg

SEQ ID NO: 39347 - DNA, 25 bp, Artificial
  probe
  misc_feature (1)..(25): SEQ ID NO: 5004; WAN0249ZG_at; Start 2; Stop 26
tgaattaagatcgagacaacgcaca

SEQ ID NO: 39348 - DNA, 25 bp, Artificial
  probe
  misc_feature (1)..(25): SEQ ID NO: 5004; WAN0249ZG_at; Start 9; Stop 33
agatcgagacaacgcacaccagaga

SEQ ID NO: 39349 - DNA, 25 bp, Artificial
  probe
  misc_feature (1)..(25): SEQ ID NO: 5004; WAN0249ZG_at; Start 13; Stop 37
cgagacaacgcacaccagagattgc

SEQ ID NO: 39350 - DNA, 25 bp, Artificial
  probe
  misc_feature (1)..(25): SEQ ID NO: 5004; WAN0249ZG_at; Start 15; Stop 39
agacaacgcacaccagagattgcga

SEQ ID NO: 39351 - DNA, 25 bp, Artificial
  probe
  misc_feature (1)..(25): SEQ ID NO: 5004; WAN0249ZG_at; Start 20; Stop 44
acgcacaccagagattgcgatactg

SEQ ID NO: 39352 - DNA, 25 bp, Artificial
  probe
  misc_feature (1)..(25): SEQ ID NO: 5004; WAN0249ZG_at; Start 12; Stop 36
tcgagacaacgcacaccagagattg

SEQ ID NO: 39353 - DNA, 25 bp, Artificial
  probe
  misc_feature (1)..(25): SEQ ID NO: 5004; WAN0249ZG_at; Start 26; Stop 50
accagagattgcgatactgttatag

SEQ ID NO: 39354 - DNA, 25 bp, Artificial
  probe
  misc_feature (1)..(25): SEQ ID NO: 5004; WAN0249ZG_at; Start 30; Stop 54
gagattgcgatactgttatagaagt

SEQ ID NO: 39355 - DNA, 25 bp, Artificial
  probe
  misc_feature (1)..(25): SEQ ID NO: 5004; WAN0249ZG_at; Start 16; Stop 40
gacaacgcacaccagagattgcgat

SEQ ID NO: 39356 - DNA, 25 bp, Artificial
  probe
  misc_feature (1)..(25): SEQ ID NO: 5004; WAN0249ZG_at; Start 41; Stop 65
actgttatagaagtactaatgccct

SEQ ID NO: 39357 - DNA, 25 bp, Artificial
  probe
  misc_feature (1)..(25): SEQ ID NO: 5004; WAN0249ZG_at; Start 21; Stop 45
cgcacaccagagattgcgatactgt

SEQ ID NO: 39358 - DNA, 25 bp, Artificial
  probe
  misc_feature (1)..(25): SEQ ID NO: 5004; WAN0249ZG_at; Start 8; Stop 32
aagatcgagacaacgcacaccagag

SEQ ID NO: 39359 - DNA, 25 bp, Artificial
  probe
  misc_feature (1)..(25): SEQ ID NO: 5004; WAN0249ZG_at; Start 11; Stop 35
atcgagacaacgcacaccagagatt

SEQ ID NO: 39360 - DNA, 25 bp, Artificial
  probe
  misc_feature (1)..(25): SEQ ID NO: 5004; WAN0249ZG_at; Start 7; Stop 31
taagatcgagacaacgcacaccaga

SEQ ID NO: 39361 - DNA, 25 bp, Artificial
  probe
  misc_feature (1)..(25): SEQ ID NO: 5004; WAN0249ZG_at; Start 27; Stop 51
ccagagattgcgatactgttataga

SEQ ID NO: 39362 - DNA, 25 bp, Artificial
  probe
  misc_feature (1)..(25): SEQ ID NO: 5004; WAN0249ZG_at; Start 43; Stop 67
tgttatagaagtactaatgcccttt

SEQ ID NO: 39363 - DNA, 25 bp, Artificial
  probe
  misc_feature (1)..(25): SEQ ID NO: 5004; WAN0249ZG_at; Start 1; Stop 25
ttgaattaagatcgagacaacgcac

SEQ ID NO: 39364 - DNA, 25 bp, Artificial
  probe
  misc_feature (1)..(25): SEQ ID NO: 5004; WAN0249ZG_at; Start 19; Stop 43
aacgcacaccagagattgcgatact

SEQ ID NO: 39365 - DNA, 25 bp, Artificial
  probe
  misc_feature (1)..(25): SEQ ID NO: 81; WAN0249ZH_at; Start 32; Stop 56
gcaatctctggtgtgcgttgtctcg

SEQ ID NO: 39366 - DNA, 25 bp, Artificial
  probe
  misc_feature (1)..(25): SEQ ID NO: 81; WAN0249ZH_at; Start 37; Stop 61
ctctggtgtgcgttgtctcgatctt

SEQ ID NO: 39367 - DNA, 25 bp, Artificial
  probe
  misc_feature (1)..(25): SEQ ID NO: 81; WAN0249ZH_at; Start 22; Stop 46
taacagtatcgcaatctctggtgtg

SEQ ID NO: 39368 - DNA, 25 bp, Artificial
  probe
  misc_feature (1)..(25): SEQ ID NO: 81; WAN0249ZH_at; Start 19; Stop 43
ctataacagtatcgcaatctctggt

SEQ ID NO: 39369 - DNA, 25 bp, Artificial
  probe
  misc_feature (1)..(25): SEQ ID NO: 81; WAN0249ZH_at; Start 3; Stop 27
aagggcattagtacttctataacag

SEQ ID NO: 39370 - DNA, 25 bp, Artificial
  probe
  misc_feature (1)..(25): SEQ ID NO: 81; WAN0249ZH_at; Start 36; Stop 60
tctctggtgtgcgttgtctcgatct

SEQ ID NO: 39371 - DNA, 25 bp, Artificial
  probe
  misc_feature (1)..(25): SEQ ID NO: 81; WAN0249ZH_at; Start 30; Stop 54
tcgcaatctctggtgtgcgttgtct

SEQ ID NO: 39372 - DNA, 25 bp, Artificial
  probe
  misc_feature (1)..(25): SEQ ID NO: 81; WAN0249ZH_at; Start 24; Stop 48
acagtatcgcaatctctggtgtgcg

SEQ ID NO: 39373 - DNA, 25 bp, Artificial
  probe
  misc_feature (1)..(25): SEQ ID NO: 81; WAN0249ZH_at; Start 25; Stop 49
cagtatcgcaatctctggtgtgcgt

SEQ ID NO: 39374 - DNA, 25 bp, Artificial
  probe
  misc_feature (1)..(25): SEQ ID NO: 81; WAN0249ZH_at; Start 2; Stop 26
aaagggcattagtacttctataaca

SEQ ID NO: 39375 - DNA, 25 bp, Artificial
  probe
  misc_feature (1)..(25): SEQ ID NO: 81; WAN0249ZH_at; Start 23; Stop 47
aacagtatcgcaatctctggtgtgc

SEQ ID NO: 39376 - DNA, 25 bp, Artificial
  probe
  misc_feature (1)..(25): SEQ ID NO: 81; WAN0249ZH_at; Start 40; Stop 64
tggtgtgcgttgtctcgatcttaat

SEQ ID NO: 39377 - DNA, 25 bp, Artificial
  probe
  misc_feature (1)..(25): SEQ ID NO: 81; WAN0249ZH_at; Start 5; Stop 29
gggcattagtacttctataacagta

SEQ ID NO: 39378 - DNA, 25 bp, Artificial
  probe
  misc_feature (1)..(25): SEQ ID NO: 81; WAN0249ZH_at; Start 13; Stop 37
gtacttctataacagtatcgcaatc

SEQ ID NO: 39379 - DNA, 25 bp, Artificial
  probe
  misc_feature (1)..(25): SEQ ID NO: 81; WAN0249ZH_at; Start 41; Stop 65
ggtgtgcgttgtctcgatcttaatt

SEQ ID NO: 39380 - DNA, 25 bp, Artificial
  probe
  misc_feature (1)..(25): SEQ ID NO: 81; WAN0249ZH_at; Start 11; Stop 35
tagtacttctataacagtatcgcaa

SEQ ID NO: 39381 - DNA, 25 bp, Artificial
  probe
  misc_feature (1)..(25): SEQ ID NO: 81; WAN0249ZH_at; Start 4; Stop 28
agggcattagtacttctataacagt

SEQ ID NO: 39382 - DNA, 25 bp, Artificial
  probe
  misc_feature (1)..(25): SEQ ID NO: 81; WAN0249ZH_at; Start 10; Stop 34
ttagtacttctataacagtatcgca

SEQ ID NO: 39383 - DNA, 25 bp, Artificial
  probe
  misc_feature (1)..(25): SEQ ID NO: 81; WAN0249ZH_at; Start 38; Stop 62
tctggtgtgcgttgtctcgatctta

SEQ ID NO: 39384 - DNA, 25 bp, Artificial
  probe
  misc_feature (1)..(25): SEQ ID NO: 81; WAN0249ZH_at; Start 42; Stop 66
gtgtgcgttgtctcgatcttaattc

SEQ ID NO: 39385 - DNA, 25 bp, Artificial
  probe
  misc_feature (1)..(25): SEQ ID NO: 81; WAN0249ZH_at; Start 8; Stop 32
cattagtacttctataacagtatcg

SEQ ID NO: 39386 - DNA, 25 bp, Artificial
  probe
  misc_feature (1)..(25): SEQ ID NO: 81; WAN0249ZH_at; Start 18; Stop 42
tctataacagtatcgcaatctctgg

SEQ ID NO: 39387 - DNA, 25 bp, Artificial
  probe
  misc_feature (1)..(25): SEQ ID NO: 81; WAN0249ZH_at; Start 34; Stop 58
aatctctggtgtgcgttgtctcgat

SEQ ID NO: 39388 - DNA, 25 bp, Artificial
  probe
  misc_feature (1)..(25): SEQ ID NO: 81; WAN0249ZH_at; Start 29; Stop 53
atcgcaatctctggtgtgcgttgtc

SEQ ID NO: 39389 - DNA, 25 bp, Artificial
  probe
  misc_feature (1)..(25): SEQ ID NO: 81; WAN0249ZH_at; Start 27; Stop 51
gtatcgcaatctctggtgtgcgttg

SEQ ID NO: 39390 - DNA, 25 bp, Artificial
  probe
  misc_feature (1)..(25): SEQ ID NO: 81; WAN0249ZH_at; Start 26; Stop 50
agtatcgcaatctctggtgtgcgtt

SEQ ID NO: 39391 - DNA, 25 bp, Artificial
  probe
  misc_feature (1)..(25): SEQ ID NO: 81; WAN0249ZH_at; Start 21; Stop 45
ataacagtatcgcaatctctggtgt

SEQ ID NO: 39392 - DNA, 25 bp, Artificial
  probe
  misc_feature (1)..(25): SEQ ID NO: 81; WAN0249ZH_at; Start 44; Stop 68
gtgcgttgtctcgatcttaattcaa

SEQ ID NO: 39393 - DNA, 25 bp, Artificial
  probe
  misc_feature (1)..(25): SEQ ID NO: 81; WAN0249ZH_at; Start 28; Stop 52
tatcgcaatctctggtgtgcgttgt

SEQ ID NO: 39394 - DNA, 25 bp, Artificial
  probe
  misc_feature (1)..(25): SEQ ID NO: 81; WAN0249ZH_at; Start 6; Stop 30
ggcattagtacttctataacagtat

SEQ ID NO: 39395 - DNA, 25 bp, Artificial
  probe
  misc_feature (1)..(25): SEQ ID NO: 81; WAN0249ZH_at; Start 15; Stop 39
acttctataacagtatcgcaatctc

SEQ ID NO: 39396 - DNA, 25 bp, Artificial
  probe
  misc_feature (1)..(25): SEQ ID NO: 81; WAN0249ZH_at; Start 43; Stop 67
tgtgcgttgtctcgatcttaattca

SEQ ID NO: 39397 - DNA, 25 bp, Artificial
  probe
  misc_feature (1)..(25): SEQ ID NO: 81; WAN0249ZH_at; Start 33; Stop 57
caatctctggtgtgcgttgtctcga

SEQ ID NO: 39398 - DNA, 25 bp, Artificial
  probe
  misc_feature (1)..(25): SEQ ID NO: 81; WAN0249ZH_at; Start 39; Stop 63
ctggtgtgcgttgtctcgatcttaa

SEQ ID NO: 39399 - DNA, 25 bp, Artificial
  probe
  misc_feature (1)..(25): SEQ ID NO: 475; WAN0249ZI_at; Start 7; Stop 31
tgagaatatgaaagcgaacggtttt

SEQ ID NO: 39400 - DNA, 25 bp, Artificial
  probe
  misc_feature (1)..(25): SEQ ID NO: 475; WAN0249ZI_at; Start 48; Stop 72
attcaattttgagtaggtattactc

SEQ ID NO: 39401 - DNA, 25 bp, Artificial
  probe
  misc_feature (1)..(25): SEQ ID NO: 475; WAN0249ZI_at; Start 3; Stop 27
taactgagaatatgaaagcgaacgg

SEQ ID NO: 39402 - DNA, 25 bp, Artificial
  probe
  misc_feature (1)..(25): SEQ ID NO: 475; WAN0249ZI_at; Start 9; Stop 33
agaatatgaaagcgaacggttttct

SEQ ID NO: 39403 - DNA, 25 bp, Artificial
  probe
  misc_feature (1)..(25): SEQ ID NO: 475; WAN0249ZI_at; Start 4; Stop 28
aactgagaatatgaaagcgaacggt

SEQ ID NO: 39404 - DNA, 25 bp, Artificial
  probe
  misc_feature (1)..(25): SEQ ID NO: 475; WAN0249ZI_at; Start 53; Stop 77
attttgagtaggtattactcagagt

SEQ ID NO: 39405 - DNA, 25 bp, Artificial
  probe
  misc_feature (1)..(25): SEQ ID NO: 475; WAN0249ZI_at; Start 2; Stop 26
gtaactgagaatatgaaagcgaacg

SEQ ID NO: 39406 - DNA, 25 bp, Artificial
  probe
  misc_feature (1)..(25): SEQ ID NO: 475; WAN0249ZI_at; Start 51; Stop 75
caattttgagtaggtattactcaga

SEQ ID NO: 39407 - DNA, 25 bp, Artificial
  probe
  misc_feature (1)..(25): SEQ ID NO: 475; WAN0249ZI_at; Start 5; Stop 29
actgagaatatgaaagcgaacggtt

SEQ ID NO: 39408 - DNA, 25 bp, Artificial
  probe
  misc_feature (1)..(25): SEQ ID NO: 475; WAN0249ZI_at; Start 1; Stop 25
agtaactgagaatatgaaagcgaac

SEQ ID NO: 39409 - DNA, 25 bp, Artificial
  probe
  misc_feature (1)..(25): SEQ ID NO: 475; WAN0249ZI_at; Start 52; Stop 76
aattttgagtaggtattactcagag

SEQ ID NO: 39410 - DNA, 25 bp, Artificial
  probe
  misc_feature (1)..(25): SEQ ID NO: 475; WAN0249ZI_at; Start 50; Stop 74
tcaattttgagtaggtattactcag

SEQ ID NO: 39411 - DNA, 25 bp, Artificial
  probe
  misc_feature (1)..(25): SEQ ID NO: 475; WAN0249ZI_at; Start 49; Stop 73
ttcaattttgagtaggtattactca

SEQ ID NO: 39412 - DNA, 25 bp, Artificial
  probe
  misc_feature (1)..(25): SEQ ID NO: 475; WAN0249ZI_at; Start 6; Stop 30
ctgagaatatgaaagcgaacggttt

SEQ ID NO: 39413 - DNA, 25 bp, Artificial
  probe
  misc_feature (1)..(25): SEQ ID NO: 475; WAN0249ZI_at; Start 8; Stop 32
gagaatatgaaagcgaacggttttc

SEQ ID NO: 39414 - DNA, 25 bp, Artificial
  probe
  misc_feature (1)..(25): SEQ ID NO: 383; WAN0249ZJ_at; Start 49; Stop 73
aaccgttcgctttcatattctcagt

SEQ ID NO: 39415 - DNA, 25 bp, Artificial
  probe
  misc_feature (1)..(25): SEQ ID NO: 383; WAN0249ZJ_at; Start 2; Stop 26
ctctgagtaatacctactcaaaatt

SEQ ID NO: 39416 - DNA, 25 bp, Artificial
  probe
  misc_feature (1)..(25): SEQ ID NO: 383; WAN0249ZJ_at; Start 5; Stop 29
tgagtaatacctactcaaaattgaa

SEQ ID NO: 39417 - DNA, 25 bp, Artificial
  probe
  misc_feature (1)..(25): SEQ ID NO: 383; WAN0249ZJ_at; Start 3; Stop 27
tctgagtaatacctactcaaaattg

SEQ ID NO: 39418 - DNA, 25 bp, Artificial
  probe
  misc_feature (1)..(25): SEQ ID NO: 383; WAN0249ZJ_at; Start 50; Stop 74
accgttcgctttcatattctcagtt

SEQ ID NO: 39419 - DNA, 25 bp, Artificial
  probe
  misc_feature (1)..(25): SEQ ID NO: 383; WAN0249ZJ_at; Start 45; Stop 69
agaaaaccgttcgctttcatattct

SEQ ID NO: 39420 - DNA, 25 bp, Artificial
  probe
  misc_feature (1)..(25): SEQ ID NO: 383; WAN0249ZJ_at; Start 47; Stop 71
aaaaccgttcgctttcatattctca

SEQ ID NO: 39421 - DNA, 25 bp, Artificial
  probe
  misc_feature (1)..(25): SEQ ID NO: 383; WAN0249ZJ_at; Start 51; Stop 75
ccgttcgctttcatattctcagtta

SEQ ID NO: 39422 - DNA, 25 bp, Artificial
  probe
  misc_feature (1)..(25): SEQ ID NO: 383; WAN0249ZJ_at; Start 1; Stop 25
actctgagtaatacctactcaaaat

SEQ ID NO: 39423 - DNA, 25 bp, Artificial
  probe
  misc_feature (1)..(25): SEQ ID NO: 383; WAN0249ZJ_at; Start 48; Stop 72
aaaccgttcgctttcatattctcag

SEQ ID NO: 39424 - DNA, 25 bp, Artificial
  probe
  misc_feature (1)..(25): SEQ ID NO: 383; WAN0249ZJ_at; Start 52; Stop 76
cgttcgctttcatattctcagttac

SEQ ID NO: 39425 - DNA, 25 bp, Artificial
  probe
  misc_feature (1)..(25): SEQ ID NO: 383; WAN0249ZJ_at; Start 4; Stop 28
ctgagtaatacctactcaaaattga

SEQ ID NO: 39426 - DNA, 25 bp, Artificial
  probe
  misc_feature (1)..(25): SEQ ID NO: 383; WAN0249ZJ_at; Start 53; Stop 77
gttcgctttcatattctcagttact

SEQ ID NO: 39427 - DNA, 25 bp, Artificial
  probe
  misc_feature (1)..(25): SEQ ID NO: 383; WAN0249ZJ_at; Start 6; Stop 30
gagtaatacctactcaaaattgaat

SEQ ID NO: 39428 - DNA, 25 bp, Artificial
  probe
  misc_feature (1)..(25): SEQ ID NO: 383; WAN0249ZJ_at; Start 46; Stop 70
gaaaaccgttcgctttcatattctc

SEQ ID NO: 39429 - DNA, 25 bp, Artificial
  probe
  misc_feature (1)..(25): SEQ ID NO: 4356; WAN0249ZK_at; Start 10; Stop 34
tcattttactataaaataagcgatt

SEQ ID NO: 39430 - DNA, 25 bp, Artificial
  probe
  misc_feature (1)..(25): SEQ ID NO: 4356; WAN0249ZK_at; Start 26; Stop 50
taagcgattaggggggctattcttc

SEQ ID NO: 39431 - DNA, 25 bp, Artificial
  probe
  misc_feature (1)..(25): SEQ ID NO: 4356; WAN0249ZK_at; Start 34; Stop 58
taggggggctattcttcgacctaca

SEQ ID NO: 39432 - DNA, 25 bp, Artificial
  probe
  misc_feature (1)..(25): SEQ ID NO: 4356; WAN0249ZK_at; Start 12; Stop 36
attttactataaaataagcgattag

SEQ ID NO: 39433 - DNA, 25 bp, Artificial
  probe
  misc_feature (1)..(25): SEQ ID NO: 4356; WAN0249ZK_at; Start 9; Stop 33
ttcattttactataaaataagcgat

SEQ ID NO: 39434 - DNA, 25 bp, Artificial
  probe
  misc_feature (1)..(25): SEQ ID NO: 4356; WAN0249ZK_at; Start 28; Stop 52
agcgattaggggggctattcttcga

SEQ ID NO: 39435 - DNA, 25 bp, Artificial
  probe
  misc_feature (1)..(25): SEQ ID NO: 4356; WAN0249ZK_at; Start 29; Stop 53
gcgattaggggggctattcttcgac

SEQ ID NO: 39436 - DNA, 25 bp, Artificial
  probe
  misc_feature (1)..(25): SEQ ID NO: 4356; WAN0249ZK_at; Start 11; Stop 35
cattttactataaaataagcgatta

SEQ ID NO: 39437 - DNA, 25 bp, Artificial
  probe
  misc_feature (1)..(25): SEQ ID NO: 4356; WAN0249ZK_at; Start 27; Stop 51
aagcgattaggggggctattcttcg

SEQ ID NO: 39438 - DNA, 25 bp, Artificial
  probe
  misc_feature (1)..(25): SEQ ID NO: 4356; WAN0249ZK_at; Start 24; Stop 48
aataagcgattaggggggctattct

SEQ ID NO: 39439 - DNA, 25 bp, Artificial
  probe
  misc_feature (1)..(25): SEQ ID NO: 4356; WAN0249ZK_at; Start 25; Stop 49
ataagcgattaggggggctattctt

SEQ ID NO: 39440 - DNA, 25 bp, Artificial
  probe
  misc_feature (1)..(25): SEQ ID NO: 4718; WAN0249ZL_at; Start 11; Stop 35
agaatagcccccctaatcgcttatt

SEQ ID NO: 39441 - DNA, 25 bp, Artificial
  probe
  misc_feature (1)..(25): SEQ ID NO: 4718; WAN0249ZL_at; Start 6; Stop 30
gtcgaagaatagcccccctaatcgc

SEQ ID NO: 39442 - DNA, 25 bp, Artificial
  probe
  misc_feature (1)..(25): SEQ ID NO: 4718; WAN0249ZL_at; Start 23; Stop 47
ctaatcgcttattttatagtaaaat

SEQ ID NO: 39443 - DNA, 25 bp, Artificial
  probe
  misc_feature (1)..(25): SEQ ID NO: 4718; WAN0249ZL_at; Start 8; Stop 32
cgaagaatagcccccctaatcgctt

SEQ ID NO: 39444 - DNA, 25 bp, Artificial
  probe
  misc_feature (1)..(25): SEQ ID NO: 4718; WAN0249ZL_at; Start 10; Stop 34
aagaatagcccccctaatcgcttat

SEQ ID NO: 39445 - DNA, 25 bp, Artificial
  probe
  misc_feature (1)..(25): SEQ ID NO: 4718; WAN0249ZL_at; Start 1; Stop 25
tgtaggtcgaagaatagccccccta

SEQ ID NO: 39446 - DNA, 25 bp, Artificial
  probe
  misc_feature (1)..(25): SEQ ID NO: 4718; WAN0249ZL_at; Start 9; Stop 33
gaagaatagcccccctaatcgctta

SEQ ID NO: 39447 - DNA, 25 bp, Artificial
  probe
  misc_feature (1)..(25): SEQ ID NO: 4718; WAN0249ZL_at; Start 24; Stop 48
taatcgcttattttatagtaaaatg

SEQ ID NO: 39448 - DNA, 25 bp, Artificial
  probe
  misc_feature (1)..(25): SEQ ID NO: 4718; WAN0249ZL_at; Start 26; Stop 50
atcgcttattttatagtaaaatgaa

SEQ ID NO: 39449 - DNA, 25 bp, Artificial
  probe
  misc_feature (1)..(25): SEQ ID NO: 4718; WAN0249ZL_at; Start 7; Stop 31
tcgaagaatagcccccctaatcgct

SEQ ID NO: 39450 - DNA, 25 bp, Artificial
  probe
  misc_feature (1)..(25): SEQ ID NO: 4718; WAN0249ZL_at; Start 25; Stop 49
aatcgcttattttatagtaaaatga

SEQ ID NO: 39451 - DNA, 25 bp, Artificial
  probe
  misc_feature (1)..(25): SEQ ID NO: 496; WAN0249ZM_at; Start 146; Stop 170
agttagactgtattgcctactgtct

SEQ ID NO: 39452 - DNA, 25 bp, Artificial
  probe
  misc_feature (1)..(25): SEQ ID NO: 496; WAN0249ZM_at; Start 18; Stop 42
gaaaactccttgaaggataagtcta

SEQ ID NO: 39453 - DNA, 25 bp, Artificial
  probe
  misc_feature (1)..(25): SEQ ID NO: 496; WAN0249ZM_at; Start 26; Stop 50
cttgaaggataagtctatttagtac

SEQ ID NO: 39454 - DNA, 25 bp, Artificial
  probe
  misc_feature (1)..(25): SEQ ID NO: 496; WAN0249ZM_at; Start 14; Stop 38
tgctgaaaactccttgaaggataag

SEQ ID NO: 39455 - DNA, 25 bp, Artificial
  probe
  misc_feature (1)..(25): SEQ ID NO: 496; WAN0249ZM_at; Start 155; Stop 179
gtattgcctactgtctatctataaa

SEQ ID NO: 39456 - DNA, 25 bp, Artificial
  probe
  misc_feature (1)..(25): SEQ ID NO: 496; WAN0249ZM_at; Start 96; Stop 120
cgttgtaaaacacttgcaatttagc

SEQ ID NO: 39457 - DNA, 25 bp, Artificial
  probe
  misc_feature (1)..(25): SEQ ID NO: 496; WAN0249ZM_at; Start 143; Stop 167
gaaagttagactgtattgcctactg

SEQ ID NO: 39458 - DNA, 25 bp, Artificial
  probe
  misc_feature (1)..(25): SEQ ID NO: 496; WAN0249ZM_at; Start 145; Stop 169
aagttagactgtattgcctactgtc

SEQ ID NO: 39459 - DNA, 25 bp, Artificial
  probe
  misc_feature (1)..(25): SEQ ID NO: 496; WAN0249ZM_at; Start 100; Stop 124
gtaaaacacttgcaatttagctgaa

SEQ ID NO: 39460 - DNA, 25 bp, Artificial
  probe
  misc_feature (1)..(25): SEQ ID NO: 496; WAN0249ZM_at; Start 22; Stop 46
actccttgaaggataagtctattta

SEQ ID NO: 39461 - DNA, 25 bp, Artificial
  probe
  misc_feature (1)..(25): SEQ ID NO: 496; WAN0249ZM_at; Start 106; Stop 130
cacttgcaatttagctgaaatttga

SEQ ID NO: 39462 - DNA, 25 bp, Artificial
  probe
  misc_feature (1)..(25): SEQ ID NO: 496; WAN0249ZM_at; Start 7; Stop 31
tggataatgctgaaaactccttgaa

SEQ ID NO: 39463 - DNA, 25 bp, Artificial
  probe
  misc_feature (1)..(25): SEQ ID NO: 496; WAN0249ZM_at; Start 160; Stop 184
gcctactgtctatctataaaatata

SEQ ID NO: 39464 - DNA, 25 bp, Artificial
  probe
  misc_feature (1)..(25): SEQ ID NO: 496; WAN0249ZM_at; Start 77; Stop 101
caagaataattcacaaaaacgttgt

SEQ ID NO: 39465 - DNA, 25 bp, Artificial
  probe
  misc_feature (1)..(25): SEQ ID NO: 496; WAN0249ZM_at; Start 128; Stop 152
tgataaaatagtaaggaaagttaga

SEQ ID NO: 39466 - DNA, 25 bp, Artificial
  probe
  misc_feature (1)..(25): SEQ ID NO: 496; WAN0249ZM_at; Start 98; Stop 122
ttgtaaaacacttgcaatttagctg

SEQ ID NO: 39467 - DNA, 25 bp, Artificial
  probe
  misc_feature (1)..(25): SEQ ID NO: 496; WAN0249ZM_at; Start 139; Stop 163
taaggaaagttagactgtattgcct

SEQ ID NO: 39468 - DNA, 25 bp, Artificial
  probe
  misc_feature (1)..(25): SEQ ID NO: 496; WAN0249ZM_at; Start 3; Stop 27
tggatggataatgctgaaaactcct

SEQ ID NO: 39469 - DNA, 25 bp, Artificial
  probe
  misc_feature (1)..(25): SEQ ID NO: 496; WAN0249ZM_at; Start 153; Stop 177
ctgtattgcctactgtctatctata

SEQ ID NO: 39470 - DNA, 25 bp, Artificial
  probe
  misc_feature (1)..(25): SEQ ID NO: 496; WAN0249ZM_at; Start 142; Stop 166
ggaaagttagactgtattgcctact

SEQ ID NO: 39471 - DNA, 25 bp, Artificial
  probe
  misc_feature (1)..(25): SEQ ID NO: 496; WAN0249ZM_at; Start 11; Stop 35
taatgctgaaaactccttgaaggat

SEQ ID NO: 39472 - DNA, 25 bp, Artificial
  probe
  misc_feature (1)..(25): SEQ ID NO: 496; WAN0249ZM_at; Start 1; Stop 25
agtggatggataatgctgaaaactc

SEQ ID NO: 39473 - DNA, 25 bp, Artificial
  probe
  misc_feature (1)..(25): SEQ ID NO: 496; WAN0249ZM_at; Start 119; Stop 143
gctgaaatttgataaaatagtaagg

SEQ ID NO: 39474 - DNA, 25 bp, Artificial
  probe
  misc_feature (1)..(25): SEQ ID NO: 496; WAN0249ZM_at; Start 5; Stop 29
gatggataatgctgaaaactccttg

SEQ ID NO: 39475 - DNA, 25 bp, Artificial
  probe
  misc_feature (1)..(25): SEQ ID NO: 496; WAN0249ZM_at; Start 16; Stop 40
ctgaaaactccttgaaggataagtc

SEQ ID NO: 39476 - DNA, 25 bp, Artificial
  probe
  misc_feature (1)..(25): SEQ ID NO: 496; WAN0249ZM_at; Start 76; Stop 100
ccaagaataattcacaaaaacgttg

SEQ ID NO: 39477 - DNA, 25 bp, Artificial
  probe
  misc_feature (1)..(25): SEQ ID NO: 496; WAN0249ZM_at; Start 138; Stop 162
gtaaggaaagttagactgtattgcc

SEQ ID NO: 39478 - DNA, 25 bp, Artificial
  probe
  misc_feature (1)..(25): SEQ ID NO: 496; WAN0249ZM_at; Start 24; Stop 48
tccttgaaggataagtctatttagt

SEQ ID NO: 39479 - DNA, 25 bp, Artificial
  probe
  misc_feature (1)..(25): SEQ ID NO: 496; WAN0249ZM_at; Start 180; Stop 204
atatattttattggaggcttttact

SEQ ID NO: 39480 - DNA, 25 bp, Artificial
  probe
  misc_feature (1)..(25): SEQ ID NO: 496; WAN0249ZM_at; Start 102; Stop 126
aaaacacttgcaatttagctgaaat

SEQ ID NO: 39481 - DNA, 25 bp, Artificial
  probe
  misc_feature (1)..(25): SEQ ID NO: 496; WAN0249ZM_at; Start 151; Stop 175
gactgtattgcctactgtctatcta

SEQ ID NO: 39482 - DNA, 25 bp, Artificial
  probe
  misc_feature (1)..(25): SEQ ID NO: 496; WAN0249ZM_at; Start 32; Stop 56
ggataagtctatttagtactttcta

SEQ ID NO: 39483 - DNA, 25 bp, Artificial
  probe
  misc_feature (1)..(25): SEQ ID NO: 496; WAN0249ZM_at; Start 12; Stop 36
aatgctgaaaactccttgaaggata

SEQ ID NO: 39484 - DNA, 25 bp, Artificial
  probe
  misc_feature (1)..(25): SEQ ID NO: 496; WAN0249ZM_at; Start 9; Stop 33
gataatgctgaaaactccttgaagg

SEQ ID NO: 39485 - DNA, 25 bp, Artificial
  probe
  misc_feature (1)..(25): SEQ ID NO: 5141; WAN0249ZN_at; Start 24; Stop 48
tatattttatagatagacagtaggc

SEQ ID NO: 39486 - DNA, 25 bp, Artificial
  probe
  misc_feature (1)..(25): SEQ ID NO: 5141; WAN0249ZN_at; Start 42; Stop 66
agtaggcaatacagtctaactttcc

SEQ ID NO: 39487 - DNA, 25 bp, Artificial
  probe
  misc_feature (1)..(25): SEQ ID NO: 5141; WAN0249ZN_at; Start 4; Stop 28
agtaaaagcctccaataaaatatat

SEQ ID NO: 39488 - DNA, 25 bp, Artificial
  probe
  misc_feature (1)..(25): SEQ ID NO: 5141; WAN0249ZN_at; Start 29; Stop 53
tttatagatagacagtaggcaatac

SEQ ID NO: 39489 - DNA, 25 bp, Artificial
  probe
  misc_feature (1)..(25): SEQ ID NO: 5141; WAN0249ZN_at; Start 34; Stop 58
agatagacagtaggcaatacagtct

SEQ ID NO: 39490 - DNA, 25 bp, Artificial
  probe
  misc_feature (1)..(25): SEQ ID NO: 5141; WAN0249ZN_at; Start 78; Stop 102
tcaaatttcagctaaattgcaagtg

SEQ ID NO: 39491 - DNA, 25 bp, Artificial
  probe
  misc_feature (1)..(25): SEQ ID NO: 5141; WAN0249ZN_at; Start 174; Stop 198
tccttcaaggagttttcagcattat

SEQ ID NO: 39492 - DNA, 25 bp, Artificial
  probe
  misc_feature (1)..(25): SEQ ID NO: 5141; WAN0249ZN_at; Start 177; Stop 201
ttcaaggagttttcagcattatcca

SEQ ID NO: 39493 - DNA, 25 bp, Artificial
  probe
  misc_feature (1)..(25): SEQ ID NO: 5141; WAN0249ZN_at; Start 79; Stop 103
caaatttcagctaaattgcaagtgt

SEQ ID NO: 39494 - DNA, 25 bp, Artificial
  probe
  misc_feature (1)..(25): SEQ ID NO: 5141; WAN0249ZN_at; Start 183; Stop 207
gagttttcagcattatccatccact

SEQ ID NO: 39495 - DNA, 25 bp, Artificial
  probe
  misc_feature (1)..(25): SEQ ID NO: 5141; WAN0249ZN_at; Start 180; Stop 204
aaggagttttcagcattatccatcc

SEQ ID NO: 39496 - DNA, 25 bp, Artificial
  probe
  misc_feature (1)..(25): SEQ ID NO: 5141; WAN0249ZN_at; Start 46; Stop 70
ggcaatacagtctaactttccttac

SEQ ID NO: 39497 - DNA, 25 bp, Artificial
  probe
  misc_feature (1)..(25): SEQ ID NO: 5141; WAN0249ZN_at; Start 168; Stop 192
gacttatccttcaaggagttttcag

SEQ ID NO: 39498 - DNA, 25 bp, Artificial
  probe
  misc_feature (1)..(25): SEQ ID NO: 5141; WAN0249ZN_at; Start 88; Stop 112
gctaaattgcaagtgttttacaacg

SEQ ID NO: 39499 - DNA, 25 bp, Artificial
  probe
  misc_feature (1)..(25): SEQ ID NO: 5141; WAN0249ZN_at; Start 182; Stop 206
ggagttttcagcattatccatccac

SEQ ID NO: 39500 - DNA, 25 bp, Artificial
  probe
  misc_feature (1)..(25): SEQ ID NO: 5141; WAN0249ZN_at; Start 89; Stop 113
ctaaattgcaagtgttttacaacgt

SEQ ID NO: 39501 - DNA, 25 bp, Artificial
  probe
  misc_feature (1)..(25): SEQ ID NO: 5141; WAN0249ZN_at; Start 152; Stop 176
tagaaagtactaaatagacttatcc

SEQ ID NO: 39502 - DNA, 25 bp, Artificial
  probe
  misc_feature (1)..(25): SEQ ID NO: 5141; WAN0249ZN_at; Start 172; Stop 196
tatccttcaaggagttttcagcatt

SEQ ID NO: 39503 - DNA, 25 bp, Artificial
  probe
  misc_feature (1)..(25): SEQ ID NO: 5141; WAN0249ZN_at; Start 64; Stop 88
tccttactattttatcaaatttcag

SEQ ID NO: 39504 - DNA, 25 bp, Artificial
  probe
  misc_feature (1)..(25): SEQ ID NO: 5141; WAN0249ZN_at; Start 84; Stop 108
ttcagctaaattgcaagtgttttac

SEQ ID NO: 39505 - DNA, 25 bp, Artificial
  probe
  misc_feature (1)..(25): SEQ ID NO: 5141; WAN0249ZN_at; Start 179; Stop 203
caaggagttttcagcattatccatc

SEQ ID NO: 39506 - DNA, 25 bp, Artificial
  probe
  misc_feature (1)..(25): SEQ ID NO: 5141; WAN0249ZN_at; Start 26; Stop 50
tattttatagatagacagtaggcaa

SEQ ID NO: 39507 - DNA, 25 bp, Artificial
  probe
  misc_feature (1)..(25): SEQ ID NO: 5141; WAN0249ZN_at; Start 41; Stop 65
cagtaggcaatacagtctaactttc

SEQ ID NO: 39508 - DNA, 25 bp, Artificial
  probe
  misc_feature (1)..(25): SEQ ID NO: 5141; WAN0249ZN_at; Start 33; Stop 57
tagatagacagtaggcaatacagtc

SEQ ID NO: 39509 - DNA, 25 bp, Artificial
  probe
  misc_feature (1)..(25): SEQ ID NO: 5141; WAN0249ZN_at; Start 175; Stop 199
ccttcaaggagttttcagcattatc

SEQ ID NO: 39510 - DNA, 25 bp, Artificial
  probe
  misc_feature (1)..(25): SEQ ID NO: 5141; WAN0249ZN_at; Start 1; Stop 25
ttgagtaaaagcctccaataaaata

SEQ ID NO: 39511 - DNA, 25 bp, Artificial
  probe
  misc_feature (1)..(25): SEQ ID NO: 5141; WAN0249ZN_at; Start 108; Stop 132
caacgtttttgtgaattattcttgg

SEQ ID NO: 39512 - DNA, 25 bp, Artificial
  probe
  misc_feature (1)..(25): SEQ ID NO: 5141; WAN0249ZN_at; Start 39; Stop 63
gacagtaggcaatacagtctaactt

SEQ ID NO: 39513 - DNA, 25 bp, Artificial
  probe
  misc_feature (1)..(25): SEQ ID NO: 5141; WAN0249ZN_at; Start 31; Stop 55
tatagatagacagtaggcaatacag

SEQ ID NO: 39514 - DNA, 25 bp, Artificial
  probe
  misc_feature (1)..(25): SEQ ID NO: 5141; WAN0249ZN_at; Start 162; Stop 186
taaatagacttatccttcaaggagt

SEQ ID NO: 39515 - DNA, 25 bp, Artificial
  probe
  misc_feature (1)..(25): SEQ ID NO: 5141; WAN0249ZN_at; Start 44; Stop 68
taggcaatacagtctaactttcctt

SEQ ID NO: 39516 - DNA, 25 bp, Artificial
  probe
  misc_feature (1)..(25): SEQ ID NO: 5141; WAN0249ZN_at; Start 159; Stop 183
tactaaatagacttatccttcaagg

SEQ ID NO: 39517 - DNA, 25 bp, Artificial
  probe
  misc_feature (1)..(25): SEQ ID NO: 5141; WAN0249ZN_at; Start 48; Stop 72
caatacagtctaactttccttacta

SEQ ID NO: 39518 - DNA, 25 bp, Artificial
  probe
  misc_feature (1)..(25): SEQ ID NO: 5141; WAN0249ZN_at; Start 37; Stop 61
tagacagtaggcaatacagtctaac

SEQ ID NO: 39519 - DNA, 25 bp, Artificial
  probe
  misc_feature (1)..(25): SEQ ID NO: 4841; WAN0249ZO_at; Start 4; Stop 28
gatttagttcccagaagaacaatta

SEQ ID NO: 39520 - DNA, 25 bp, Artificial
  probe
  misc_feature (1)..(25): SEQ ID NO: 4841; WAN0249ZO_at; Start 19; Stop 43
agaacaattatttaagttagacact

SEQ ID NO: 39521 - DNA, 25 bp, Artificial
  probe
  misc_feature (1)..(25): SEQ ID NO: 4841; WAN0249ZO_at; Start 17; Stop 41
gaagaacaattatttaagttagaca

SEQ ID NO: 39522 - DNA, 25 bp, Artificial
  probe
  misc_feature (1)..(25): SEQ ID NO: 4841; WAN0249ZO_at; Start 3; Stop 27
cgatttagttcccagaagaacaatt

SEQ ID NO: 39523 - DNA, 25 bp, Artificial
  probe
  misc_feature (1)..(25): SEQ ID NO: 4841; WAN0249ZO_at; Start 14; Stop 38
ccagaagaacaattatttaagttag

SEQ ID NO: 39524 - DNA, 25 bp, Artificial
  probe
  misc_feature (1)..(25): SEQ ID NO: 4841; WAN0249ZO_at; Start 5; Stop 29
atttagttcccagaagaacaattat

SEQ ID NO: 39525 - DNA, 25 bp, Artificial
  probe
  misc_feature (1)..(25): SEQ ID NO: 4841; WAN0249ZO_at; Start 20; Stop 44
gaacaattatttaagttagacacta

SEQ ID NO: 39526 - DNA, 25 bp, Artificial
  probe
  misc_feature (1)..(25): SEQ ID NO: 4841; WAN0249ZO_at; Start 8; Stop 32
tagttcccagaagaacaattattta

SEQ ID NO: 39527 - DNA, 25 bp, Artificial
  probe
  misc_feature (1)..(25): SEQ ID NO: 4841; WAN0249ZO_at; Start 15; Stop 39
cagaagaacaattatttaagttaga

SEQ ID NO: 39528 - DNA, 25 bp, Artificial
  probe
  misc_feature (1)..(25): SEQ ID NO: 4841; WAN0249ZO_at; Start 1; Stop 25
ttcgatttagttcccagaagaacaa

SEQ ID NO: 39529 - DNA, 25 bp, Artificial
  probe
  misc_feature (1)..(25): SEQ ID NO: 4841; WAN0249ZO_at; Start 2; Stop 26
tcgatttagttcccagaagaacaat

SEQ ID NO: 39530 - DNA, 25 bp, Artificial
  probe
  misc_feature (1)..(25): SEQ ID NO: 3651; WAN0249ZP_at; Start 27; Stop 51
attgttcttctgggaactaaatcga

SEQ ID NO: 39531 - DNA, 25 bp, Artificial
  probe
  misc_feature (1)..(25): SEQ ID NO: 3651; WAN0249ZP_at; Start 28; Stop 52
ttgttcttctgggaactaaatcgaa

SEQ ID NO: 39532 - DNA, 25 bp, Artificial
  probe
  misc_feature (1)..(25): SEQ ID NO: 3651; WAN0249ZP_at; Start 12; Stop 36
tgtctaacttaaataattgttcttc

SEQ ID NO: 39533 - DNA, 25 bp, Artificial
  probe
  misc_feature (1)..(25): SEQ ID NO: 3651; WAN0249ZP_at; Start 25; Stop 49
taattgttcttctgggaactaaatc

SEQ ID NO: 39534 - DNA, 25 bp, Artificial
  probe
  misc_feature (1)..(25): SEQ ID NO: 3651; WAN0249ZP_at; Start 21; Stop 45
taaataattgttcttctgggaacta

SEQ ID NO: 39535 - DNA, 25 bp, Artificial
  probe
  misc_feature (1)..(25): SEQ ID NO: 3651; WAN0249ZP_at; Start 14; Stop 38
tctaacttaaataattgttcttctg

SEQ ID NO: 39536 - DNA, 25 bp, Artificial
  probe
  misc_feature (1)..(25): SEQ ID NO: 3651; WAN0249ZP_at; Start 9; Stop 33
tagtgtctaacttaaataattgttc

SEQ ID NO: 39537 - DNA, 25 bp, Artificial
  probe
  misc_feature (1)..(25): SEQ ID NO: 3651; WAN0249ZP_at; Start 26; Stop 50
aattgttcttctgggaactaaatcg

SEQ ID NO: 39538 - DNA, 25 bp, Artificial
  probe
  misc_feature (1)..(25): SEQ ID NO: 3651; WAN0249ZP_at; Start 15; Stop 39
ctaacttaaataattgttcttctgg

SEQ ID NO: 39539 - DNA, 25 bp, Artificial
  probe
  misc_feature (1)..(25): SEQ ID NO: 3651; WAN0249ZP_at; Start 24; Stop 48
ataattgttcttctgggaactaaat

SEQ ID NO: 39540 - DNA, 25 bp, Artificial
  probe
  misc_feature (1)..(25): SEQ ID NO: 3651; WAN0249ZP_at; Start 10; Stop 34
agtgtctaacttaaataattgttct

SEQ ID NO: 39541 - DNA, 25 bp, Artificial
  probe
  misc_feature (1)..(25): SEQ ID NO: 405; WAN0249ZQ_at; Start 27; Stop 51
taatctctacagatacggatgttgg

SEQ ID NO: 39542 - DNA, 25 bp, Artificial
  probe
  misc_feature (1)..(25): SEQ ID NO: 405; WAN0249ZQ_at; Start 62; Stop 86
agatgctttggcttgctagaggaat

SEQ ID NO: 39543 - DNA, 25 bp, Artificial
  probe
  misc_feature (1)..(25): SEQ ID NO: 405; WAN0249ZQ_at; Start 21; Stop 45
actacataatctctacagatacgga

SEQ ID NO: 39544 - DNA, 25 bp, Artificial
  probe
  misc_feature (1)..(25): SEQ ID NO: 405; WAN0249ZQ_at; Start 61; Stop 85
aagatgctttggcttgctagaggaa

SEQ ID NO: 39545 - DNA, 25 bp, Artificial
  probe
  misc_feature (1)..(25): SEQ ID NO: 405; WAN0249ZQ_at; Start 25; Stop 49
cataatctctacagatacggatgtt

SEQ ID NO: 39546 - DNA, 25 bp, Artificial
  probe
  misc_feature (1)..(25): SEQ ID NO: 405; WAN0249ZQ_at; Start 36; Stop 60
cagatacggatgttggagttgatgt

SEQ ID NO: 39547 - DNA, 25 bp, Artificial
  probe
  misc_feature (1)..(25): SEQ ID NO: 405; WAN0249ZQ_at; Start 59; Stop 83
gtaagatgctttggcttgctagagg

SEQ ID NO: 39548 - DNA, 25 bp, Artificial
  probe
  misc_feature (1)..(25): SEQ ID NO: 405; WAN0249ZQ_at; Start 67; Stop 91
ctttggcttgctagaggaattgtgg

SEQ ID NO: 39549 - DNA, 25 bp, Artificial
  probe
  misc_feature (1)..(25): SEQ ID NO: 405; WAN0249ZQ_at; Start 49; Stop 73
tggagttgatgtaagatgctttggc

SEQ ID NO: 39550 - DNA, 25 bp, Artificial
  probe
  misc_feature (1)..(25): SEQ ID NO: 405; WAN0249ZQ_at; Start 56; Stop 80
gatgtaagatgctttggcttgctag

SEQ ID NO: 39551 - DNA, 25 bp, Artificial
  probe
  misc_feature (1)..(25): SEQ ID NO: 405; WAN0249ZQ_at; Start 23; Stop 47
tacataatctctacagatacggatg

SEQ ID NO: 39552 - DNA, 25 bp, Artificial
  probe
  misc_feature (1)..(25): SEQ ID NO: 405; WAN0249ZQ_at; Start 38; Stop 62
gatacggatgttggagttgatgtaa

SEQ ID NO: 39553 - DNA, 25 bp, Artificial
  probe
  misc_feature (1)..(25): SEQ ID NO: 405; WAN0249ZQ_at; Start 58; Stop 82
tgtaagatgctttggcttgctagag

SEQ ID NO: 39554 - DNA, 25 bp, Artificial
  probe
  misc_feature (1)..(25): SEQ ID NO: 405; WAN0249ZQ_at; Start 9; Stop 33
catagatagaaaactacataatctc

SEQ ID NO: 39555 - DNA, 25 bp, Artificial
  probe
  misc_feature (1)..(25): SEQ ID NO: 405; WAN0249ZQ_at; Start 44; Stop 68
gatgttggagttgatgtaagatgct

SEQ ID NO: 39556 - DNA, 25 bp, Artificial
  probe
  misc_feature (1)..(25): SEQ ID NO: 405; WAN0249ZQ_at; Start 40; Stop 64
tacggatgttggagttgatgtaaga

SEQ ID NO: 39557 - DNA, 25 bp, Artificial
  probe
  misc_feature (1)..(25): SEQ ID NO: 405; WAN0249ZQ_at; Start 46; Stop 70
tgttggagttgatgtaagatgcttt

SEQ ID NO: 39558 - DNA, 25 bp, Artificial
  probe
  misc_feature (1)..(25): SEQ ID NO: 405; WAN0249ZQ_at; Start 28; Stop 52
aatctctacagatacggatgttgga

SEQ ID NO: 39559 - DNA, 25 bp, Artificial
  probe
  misc_feature (1)..(25): SEQ ID NO: 405; WAN0249ZQ_at; Start 17; Stop 41
gaaaactacataatctctacagata

SEQ ID NO: 39560 - DNA, 25 bp, Artificial
  probe
  misc_feature (1)..(25): SEQ ID NO: 405; WAN0249ZQ_at; Start 2; Stop 26
gaaattccatagatagaaaactaca

SEQ ID NO: 39561 - DNA, 25 bp, Artificial
  probe
  misc_feature (1)..(25): SEQ ID NO: 405; WAN0249ZQ_at; Start 20; Stop 44
aactacataatctctacagatacgg

SEQ ID NO: 39562 - DNA, 25 bp, Artificial
  probe
  misc_feature (1)..(25): SEQ ID NO: 405; WAN0249ZQ_at; Start 34; Stop 58
tacagatacggatgttggagttgat

SEQ ID NO: 39563 - DNA, 25 bp, Artificial
  probe
  misc_feature (1)..(25): SEQ ID NO: 405; WAN0249ZQ_at; Start 33; Stop 57
ctacagatacggatgttggagttga

SEQ ID NO: 39564 - DNA, 25 bp, Artificial
  probe
  misc_feature (1)..(25): SEQ ID NO: 405; WAN0249ZQ_at; Start 30; Stop 54
tctctacagatacggatgttggagt

SEQ ID NO: 39565 - DNA, 25 bp, Artificial
  probe
  misc_feature (1)..(25): SEQ ID NO: 405; WAN0249ZQ_at; Start 66; Stop 90
gctttggcttgctagaggaattgtg

SEQ ID NO: 39566 - DNA, 25 bp, Artificial
  probe
  misc_feature (1)..(25): SEQ ID NO: 405; WAN0249ZQ_at; Start 63; Stop 87
gatgctttggcttgctagaggaatt

SEQ ID NO: 39567 - DNA, 25 bp, Artificial
  probe
  misc_feature (1)..(25): SEQ ID NO: 405; WAN0249ZQ_at; Start 32; Stop 56
tctacagatacggatgttggagttg

SEQ ID NO: 39568 - DNA, 25 bp, Artificial
  probe
  misc_feature (1)..(25): SEQ ID NO: 405; WAN0249ZQ_at; Start 15; Stop 39
tagaaaactacataatctctacaga

SEQ ID NO: 39569 - DNA, 25 bp, Artificial
  probe
  misc_feature (1)..(25): SEQ ID NO: 405; WAN0249ZQ_at; Start 68; Stop 92
tttggcttgctagaggaattgtgga

SEQ ID NO: 39570 - DNA, 25 bp, Artificial
  probe
  misc_feature (1)..(25): SEQ ID NO: 405; WAN0249ZQ_at; Start 7; Stop 31
tccatagatagaaaactacataatc

SEQ ID NO: 39571 - DNA, 25 bp, Artificial
  probe
  misc_feature (1)..(25): SEQ ID NO: 405; WAN0249ZQ_at; Start 51; Stop 75
gagttgatgtaagatgctttggctt

SEQ ID NO: 39572 - DNA, 25 bp, Artificial
  probe
  misc_feature (1)..(25): SEQ ID NO: 405; WAN0249ZQ_at; Start 65; Stop 89
tgctttggcttgctagaggaattgt

SEQ ID NO: 39573 - DNA, 25 bp, Artificial
  probe
  misc_feature (1)..(25): SEQ ID NO: 405; WAN0249ZQ_at; Start 53; Stop 77
gttgatgtaagatgctttggcttgc

SEQ ID NO: 39574 - DNA, 25 bp, Artificial
  probe
  misc_feature (1)..(25): SEQ ID NO: 405; WAN0249ZQ_at; Start 55; Stop 79
tgatgtaagatgctttggcttgcta

SEQ ID NO: 39575 - DNA, 25 bp, Artificial
  probe
  misc_feature (1)..(25): SEQ ID NO: 4612; WAN0249ZR_at; Start 39; Stop 63
actccaacatccgtatctgtagaga

SEQ ID NO: 39576 - DNA, 25 bp, Artificial
  probe
  misc_feature (1)..(25): SEQ ID NO: 4612; WAN0249ZR_at; Start 12; Stop 36
tctagcaagccaaagcatcttacat

SEQ ID NO: 39577 - DNA, 25 bp, Artificial
  probe
  misc_feature (1)..(25): SEQ ID NO: 4612; WAN0249ZR_at; Start 44; Stop 68
aacatccgtatctgtagagattatg

SEQ ID NO: 39578 - DNA, 25 bp, Artificial
  probe
  misc_feature (1)..(25): SEQ ID NO: 4612; WAN0249ZR_at; Start 2; Stop 26
ccacaattcctctagcaagccaaag

SEQ ID NO: 39579 - DNA, 25 bp, Artificial
  probe
  misc_feature (1)..(25): SEQ ID NO: 4612; WAN0249ZR_at; Start 36; Stop 60
tcaactccaacatccgtatctgtag

SEQ ID NO: 39580 - DNA, 25 bp, Artificial
  probe
  misc_feature (1)..(25): SEQ ID NO: 4612; WAN0249ZR_at; Start 29; Stop 53
tcttacatcaactccaacatccgta

SEQ ID NO: 39581 - DNA, 25 bp, Artificial
  probe
  misc_feature (1)..(25): SEQ ID NO: 4612; WAN0249ZR_at; Start 37; Stop 61
caactccaacatccgtatctgtaga

SEQ ID NO: 39582 - DNA, 25 bp, Artificial
  probe
  misc_feature (1)..(25): SEQ ID NO: 4612; WAN0249ZR_at; Start 67; Stop 91
tgtagttttctatctatggaatttc

SEQ ID NO: 39583 - DNA, 25 bp, Artificial
  probe
  misc_feature (1)..(25): SEQ ID NO: 4612; WAN0249ZR_at; Start 42; Stop 66
ccaacatccgtatctgtagagatta

SEQ ID NO: 39584 - DNA, 25 bp, Artificial
  probe
  misc_feature (1)..(25): SEQ ID NO: 4612; WAN0249ZR_at; Start 22; Stop 46
caaagcatcttacatcaactccaac

SEQ ID NO: 39585 - DNA, 25 bp, Artificial
  probe
  misc_feature (1)..(25): SEQ ID NO: 4612; WAN0249ZR_at; Start 48; Stop 72
tccgtatctgtagagattatgtagt

SEQ ID NO: 39586 - DNA, 25 bp, Artificial
  probe
  misc_feature (1)..(25): SEQ ID NO: 4612; WAN0249ZR_at; Start 7; Stop 31
attcctctagcaagccaaagcatct

SEQ ID NO: 39587 - DNA, 25 bp, Artificial
  probe
  misc_feature (1)..(25): SEQ ID NO: 4612; WAN0249ZR_at; Start 20; Stop 44
gccaaagcatcttacatcaactcca

SEQ ID NO: 39588 - DNA, 25 bp, Artificial
  probe
  misc_feature (1)..(25): SEQ ID NO: 4612; WAN0249ZR_at; Start 62; Stop 86
gattatgtagttttctatctatgga

SEQ ID NO: 39589 - DNA, 25 bp, Artificial
  probe
  misc_feature (1)..(25): SEQ ID NO: 4612; WAN0249ZR_at; Start 4; Stop 28
acaattcctctagcaagccaaagca

SEQ ID NO: 39590 - DNA, 25 bp, Artificial
  probe
  misc_feature (1)..(25): SEQ ID NO: 4612; WAN0249ZR_at; Start 41; Stop 65
tccaacatccgtatctgtagagatt

SEQ ID NO: 39591 - DNA, 25 bp, Artificial
  probe
  misc_feature (1)..(25): SEQ ID NO: 4612; WAN0249ZR_at; Start 46; Stop 70
catccgtatctgtagagattatgta

SEQ ID NO: 39592 - DNA, 25 bp, Artificial
  probe
  misc_feature (1)..(25): SEQ ID NO: 4612; WAN0249ZR_at; Start 3; Stop 27
cacaattcctctagcaagccaaagc

SEQ ID NO: 39593 - DNA, 25 bp, Artificial
  probe
  misc_feature (1)..(25): SEQ ID NO: 4612; WAN0249ZR_at; Start 14; Stop 38
tagcaagccaaagcatcttacatca

SEQ ID NO: 39594 - DNA, 25 bp, Artificial
  probe
  misc_feature (1)..(25): SEQ ID NO: 4612; WAN0249ZR_at; Start 40; Stop 64
ctccaacatccgtatctgtagagat

SEQ ID NO: 39595 - DNA, 25 bp, Artificial
  probe
  misc_feature (1)..(25): SEQ ID NO: 4612; WAN0249ZR_at; Start 13; Stop 37
ctagcaagccaaagcatcttacatc

SEQ ID NO: 39596 - DNA, 25 bp, Artificial
  probe
  misc_feature (1)..(25): SEQ ID NO: 4612; WAN0249ZR_at; Start 52; Stop 76
tatctgtagagattatgtagttttc

SEQ ID NO: 39597 - DNA, 25 bp, Artificial
  probe
  misc_feature (1)..(25): SEQ ID NO: 4612; WAN0249ZR_at; Start 6; Stop 30
aattcctctagcaagccaaagcatc

SEQ ID NO: 39598 - DNA, 25 bp, Artificial
  probe
  misc_feature (1)..(25): SEQ ID NO: 4612; WAN0249ZR_at; Start 18; Stop 42
aagccaaagcatcttacatcaactc

SEQ ID NO: 39599 - DNA, 25 bp, Artificial
  probe
  misc_feature (1)..(25): SEQ ID NO: 4612; WAN0249ZR_at; Start 8; Stop 32
ttcctctagcaagccaaagcatctt

SEQ ID NO: 39600 - DNA, 25 bp, Artificial
  probe
  misc_feature (1)..(25): SEQ ID NO: 4612; WAN0249ZR_at; Start 23; Stop 47
aaagcatcttacatcaactccaaca

SEQ ID NO: 39601 - DNA, 25 bp, Artificial
  probe
  misc_feature (1)..(25): SEQ ID NO: 4612; WAN0249ZR_at; Start 49; Stop 73
ccgtatctgtagagattatgtagtt

SEQ ID NO: 39602 - DNA, 25 bp, Artificial
  probe
  misc_feature (1)..(25): SEQ ID NO: 4612; WAN0249ZR_at; Start 1; Stop 25
tccacaattcctctagcaagccaaa

SEQ ID NO: 39603 - DNA, 25 bp, Artificial
  probe
  misc_feature (1)..(25): SEQ ID NO: 4612; WAN0249ZR_at; Start 17; Stop 41
caagccaaagcatcttacatcaact

SEQ ID NO: 39604 - DNA, 25 bp, Artificial
  probe
  misc_feature (1)..(25): SEQ ID NO: 4612; WAN0249ZR_at; Start 5; Stop 29
caattcctctagcaagccaaagcat

SEQ ID NO: 39605 - DNA, 25 bp, Artificial
  probe
  misc_feature (1)..(25): SEQ ID NO: 4612; WAN0249ZR_at; Start 24; Stop 48
aagcatcttacatcaactccaacat

SEQ ID NO: 39606 - DNA, 25 bp, Artificial
  probe
  misc_feature (1)..(25): SEQ ID NO: 4612; WAN0249ZR_at; Start 33; Stop 57
acatcaactccaacatccgtatctg

SEQ ID NO: 39607 - DNA, 25 bp, Artificial
  probe
  misc_feature (1)..(25): SEQ ID NO: 4612; WAN0249ZR_at; Start 10; Stop 34
cctctagcaagccaaagcatcttac

SEQ ID NO: 39608 - DNA, 25 bp, Artificial
  probe
  misc_feature (1)..(25): SEQ ID NO: 4612; WAN0249ZR_at; Start 16; Stop 40
gcaagccaaagcatcttacatcaac

SEQ ID NO: 39609 - DNA, 25 bp, Artificial
  probe
  misc_feature (1)..(25): SEQ ID NO: 3669; WAN0249ZS_at; Start 28; Stop 52
ttgacagacttattttttacagaat

SEQ ID NO: 39610 - DNA, 25 bp, Artificial
  probe
  misc_feature (1)..(25): SEQ ID NO: 3669; WAN0249ZS_at; Start 3; Stop 27
aagaaaaaataggtctgttagatat

SEQ ID NO: 39611 - DNA, 25 bp, Artificial
  probe
  misc_feature (1)..(25): SEQ ID NO: 3669; WAN0249ZS_at; Start 69; Stop 93
aatgttttatgctataattgatgaa

SEQ ID NO: 39612 - DNA, 25 bp, Artificial
  probe
  misc_feature (1)..(25): SEQ ID NO: 3669; WAN0249ZS_at; Start 23; Stop 47
gatatttgacagacttattttttac

SEQ ID NO: 39613 - DNA, 25 bp, Artificial
  probe
  misc_feature (1)..(25): SEQ ID NO: 3669; WAN0249ZS_at; Start 8; Stop 32
aaaataggtctgttagatatttgac

SEQ ID NO: 39614 - DNA, 25 bp, Artificial
  probe
  misc_feature (1)..(25): SEQ ID NO: 3669; WAN0249ZS_at; Start 18; Stop 42
tgttagatatttgacagacttattt

SEQ ID NO: 39615 - DNA, 25 bp, Artificial
  probe
  misc_feature (1)..(25): SEQ ID NO: 3669; WAN0249ZS_at; Start 10; Stop 34
aataggtctgttagatatttgacag

SEQ ID NO: 39616 - DNA, 25 bp, Artificial
  probe
  misc_feature (1)..(25): SEQ ID NO: 3669; WAN0249ZS_at; Start 32; Stop 56
cagacttattttttacagaatatag

SEQ ID NO: 39617 - DNA, 25 bp, Artificial
  probe
  misc_feature (1)..(25): SEQ ID NO: 3669; WAN0249ZS_at; Start 17; Stop 41
ctgttagatatttgacagacttatt

SEQ ID NO: 39618 - DNA, 25 bp, Artificial
  probe
  misc_feature (1)..(25): SEQ ID NO: 3669; WAN0249ZS_at; Start 89; Stop 113
atgaataaaatagaaggagaagcat

SEQ ID NO: 39619 - DNA, 25 bp, Artificial
  probe
  misc_feature (1)..(25): SEQ ID NO: 3669; WAN0249ZS_at; Start 30; Stop 54
gacagacttattttttacagaatat

SEQ ID NO: 39620 - DNA, 25 bp, Artificial
  probe
  misc_feature (1)..(25): SEQ ID NO: 3669; WAN0249ZS_at; Start 25; Stop 49
tatttgacagacttattttttacag

SEQ ID NO: 39621 - DNA, 25 bp, Artificial
  probe
  misc_feature (1)..(25): SEQ ID NO: 3669; WAN0249ZS_at; Start 1; Stop 25
gcaagaaaaaataggtctgttagat

SEQ ID NO: 39622 - DNA, 25 bp, Artificial
  probe
  misc_feature (1)..(25): SEQ ID NO: 3669; WAN0249ZS_at; Start 14; Stop 38
ggtctgttagatatttgacagactt

SEQ ID NO: 39623 - DNA, 25 bp, Artificial
  probe
  misc_feature (1)..(25): SEQ ID NO: 3669; WAN0249ZS_at; Start 38; Stop 62
tattttttacagaatatagtactac

SEQ ID NO: 39624 - DNA, 25 bp, Artificial
  probe
  misc_feature (1)..(25): SEQ ID NO: 3669; WAN0249ZS_at; Start 47; Stop 71
cagaatatagtactacttaaaaaat

SEQ ID NO: 39625 - DNA, 25 bp, Artificial
  probe
  misc_feature (1)..(25): SEQ ID NO: 3669; WAN0249ZS_at; Start 29; Stop 53
tgacagacttattttttacagaata

SEQ ID NO: 39626 - DNA, 25 bp, Artificial
  probe
  misc_feature (1)..(25): SEQ ID NO: 3669; WAN0249ZS_at; Start 13; Stop 37
aggtctgttagatatttgacagact

SEQ ID NO: 39627 - DNA, 25 bp, Artificial
  probe
  misc_feature (1)..(25): SEQ ID NO: 3669; WAN0249ZS_at; Start 9; Stop 33
aaataggtctgttagatatttgaca

SEQ ID NO: 39628 - DNA, 25 bp, Artificial
  probe
  misc_feature (1)..(25): SEQ ID NO: 3669; WAN0249ZS_at; Start 12; Stop 36
taggtctgttagatatttgacagac

SEQ ID NO: 39629 - DNA, 25 bp, Artificial
  probe
  misc_feature (1)..(25): SEQ ID NO: 3669; WAN0249ZS_at; Start 87; Stop 111
tgatgaataaaatagaaggagaagc

SEQ ID NO: 39630 - DNA, 25 bp, Artificial
  probe
  misc_feature (1)..(25): SEQ ID NO: 3669; WAN0249ZS_at; Start 41; Stop 65
tttttacagaatatagtactactta

SEQ ID NO: 39631 - DNA, 25 bp, Artificial
  probe
  misc_feature (1)..(25): SEQ ID NO: 3669; WAN0249ZS_at; Start 26; Stop 50
atttgacagacttattttttacaga

SEQ ID NO: 39632 - DNA, 25 bp, Artificial
  probe
  misc_feature (1)..(25): SEQ ID NO: 3669; WAN0249ZS_at; Start 45; Stop 69
tacagaatatagtactacttaaaaa

SEQ ID NO: 39633 - DNA, 25 bp, Artificial
  probe
  misc_feature (1)..(25): SEQ ID NO: 3669; WAN0249ZS_at; Start 19; Stop 43
gttagatatttgacagacttatttt

SEQ ID NO: 39634 - DNA, 25 bp, Artificial
  probe
  misc_feature (1)..(25): SEQ ID NO: 3669; WAN0249ZS_at; Start 2; Stop 26
caagaaaaaataggtctgttagata

SEQ ID NO: 39635 - DNA, 25 bp, Artificial
  probe
  misc_feature (1)..(25): SEQ ID NO: 3669; WAN0249ZS_at; Start 48; Stop 72
agaatatagtactacttaaaaaatg

SEQ ID NO: 39636 - DNA, 25 bp, Artificial
  probe
  misc_feature (1)..(25): SEQ ID NO: 3669; WAN0249ZS_at; Start 11; Stop 35
ataggtctgttagatatttgacaga

SEQ ID NO: 39637 - DNA, 25 bp, Artificial
  probe
  misc_feature (1)..(25): SEQ ID NO: 3669; WAN0249ZS_at; Start 42; Stop 66
ttttacagaatatagtactacttaa

SEQ ID NO: 39638 - DNA, 25 bp, Artificial
  probe
  misc_feature (1)..(25): SEQ ID NO: 3669; WAN0249ZS_at; Start 15; Stop 39
gtctgttagatatttgacagactta

SEQ ID NO: 39639 - DNA, 25 bp, Artificial
  probe
  misc_feature (1)..(25): SEQ ID NO: 3669; WAN0249ZS_at; Start 65; Stop 89
aaaaaatgttttatgctataattga

SEQ ID NO: 39640 - DNA, 25 bp, Artificial
  probe
  misc_feature (1)..(25): SEQ ID NO: 3669; WAN0249ZS_at; Start 16; Stop 40
tctgttagatatttgacagacttat

SEQ ID NO: 39641 - DNA, 25 bp, Artificial
  probe
  misc_feature (1)..(25): SEQ ID NO: 3669; WAN0249ZS_at; Start 83; Stop 107
taattgatgaataaaatagaaggag

SEQ ID NO: 39642 - DNA, 25 bp, Artificial
  probe
  misc_feature (1)..(25): SEQ ID NO: 3669; WAN0249ZS_at; Start 88; Stop 112
gatgaataaaatagaaggagaagca

SEQ ID NO: 39643 - DNA, 25 bp, Artificial
  probe
  misc_feature (1)..(25): SEQ ID NO: 2114; WAN0249ZT_at; Start 68; Stop 92
taaaaaataagtctgtcaaatatct

SEQ ID NO: 39644 - DNA, 25 bp, Artificial
  probe
  misc_feature (1)..(25): SEQ ID NO: 2114; WAN0249ZT_at; Start 74; Stop 98
ataagtctgtcaaatatctaacaga

SEQ ID NO: 39645 - DNA, 25 bp, Artificial
  probe
  misc_feature (1)..(25): SEQ ID NO: 2114; WAN0249ZT_at; Start 79; Stop 103
tctgtcaaatatctaacagacctat

SEQ ID NO: 39646 - DNA, 25 bp, Artificial
  probe
  misc_feature (1)..(25): SEQ ID NO: 2114; WAN0249ZT_at; Start 71; Stop 95
aaaataagtctgtcaaatatctaac

SEQ ID NO: 39647 - DNA, 25 bp, Artificial
  probe
  misc_feature (1)..(25): SEQ ID NO: 2114; WAN0249ZT_at; Start 49; Stop 73
taagtagtactatattctgtaaaaa

SEQ ID NO: 39648 - DNA, 25 bp, Artificial
  probe
  misc_feature (1)..(25): SEQ ID NO: 2114; WAN0249ZT_at; Start 23; Stop 47
catcaattatagcataaaacatttt

SEQ ID NO: 39649 - DNA, 25 bp, Artificial
  probe
  misc_feature (1)..(25): SEQ ID NO: 2114; WAN0249ZT_at; Start 59; Stop 83
tatattctgtaaaaaataagtctgt

SEQ ID NO: 39650 - DNA, 25 bp, Artificial
  probe
  misc_feature (1)..(25): SEQ ID NO: 2114; WAN0249ZT_at; Start 80; Stop 104
ctgtcaaatatctaacagacctatt

SEQ ID NO: 39651 - DNA, 25 bp, Artificial
  probe
  misc_feature (1)..(25): SEQ ID NO: 2114; WAN0249ZT_at; Start 67; Stop 91
gtaaaaaataagtctgtcaaatatc

SEQ ID NO: 39652 - DNA, 25 bp, Artificial
  probe
  misc_feature (1)..(25): SEQ ID NO: 2114; WAN0249ZT_at; Start 73; Stop 97
aataagtctgtcaaatatctaacag

SEQ ID NO: 39653 - DNA, 25 bp, Artificial
  probe
  misc_feature (1)..(25): SEQ ID NO: 2114; WAN0249ZT_at; Start 86; Stop 110
aatatctaacagacctattttttct

SEQ ID NO: 39654 - DNA, 25 bp, Artificial
  probe
  misc_feature (1)..(25): SEQ ID NO: 2114; WAN0249ZT_at; Start 72; Stop 96
aaataagtctgtcaaatatctaaca

SEQ ID NO: 39655 - DNA, 25 bp, Artificial
  probe
  misc_feature (1)..(25): SEQ ID NO: 2114; WAN0249ZT_at; Start 58; Stop 82
ctatattctgtaaaaaataagtctg

SEQ ID NO: 39656 - DNA, 25 bp, Artificial
  probe
  misc_feature (1)..(25): SEQ ID NO: 2114; WAN0249ZT_at; Start 42; Stop 66
cattttttaagtagtactatattct

SEQ ID NO: 39657 - DNA, 25 bp, Artificial
  probe
  misc_feature (1)..(25): SEQ ID NO: 2114; WAN0249ZT_at; Start 76; Stop 100
aagtctgtcaaatatctaacagacc

SEQ ID NO: 39658 - DNA, 25 bp, Artificial
  probe
  misc_feature (1)..(25): SEQ ID NO: 2114; WAN0249ZT_at; Start 78; Stop 102
gtctgtcaaatatctaacagaccta

SEQ ID NO: 39659 - DNA, 25 bp, Artificial
  probe
  misc_feature (1)..(25): SEQ ID NO: 2114; WAN0249ZT_at; Start 69; Stop 93
aaaaaataagtctgtcaaatatcta

SEQ ID NO: 39660 - DNA, 25 bp, Artificial
  probe
  misc_feature (1)..(25): SEQ ID NO: 2114; WAN0249ZT_at; Start 22; Stop 46
tcatcaattatagcataaaacattt

SEQ ID NO: 39661 - DNA, 25 bp, Artificial
  probe
  misc_feature (1)..(25): SEQ ID NO: 2114; WAN0249ZT_at; Start 61; Stop 85
tattctgtaaaaaataagtctgtca

SEQ ID NO: 39662 - DNA, 25 bp, Artificial
  probe
  misc_feature (1)..(25): SEQ ID NO: 2114; WAN0249ZT_at; Start 62; Stop 86
attctgtaaaaaataagtctgtcaa

SEQ ID NO: 39663 - DNA, 25 bp, Artificial
  probe
  misc_feature (1)..(25): SEQ ID NO: 2114; WAN0249ZT_at; Start 70; Stop 94
aaaaataagtctgtcaaatatctaa

SEQ ID NO: 39664 - DNA, 25 bp, Artificial
  probe
  misc_feature (1)..(25): SEQ ID NO: 2114; WAN0249ZT_at; Start 75; Stop 99
taagtctgtcaaatatctaacagac

SEQ ID NO: 39665 - DNA, 25 bp, Artificial
  probe
  misc_feature (1)..(25): SEQ ID NO: 2114; WAN0249ZT_at; Start 81; Stop 105
tgtcaaatatctaacagacctattt

SEQ ID NO: 39666 - DNA, 25 bp, Artificial
  probe
  misc_feature (1)..(25): SEQ ID NO: 2114; WAN0249ZT_at; Start 7; Stop 31
ctccttctattttattcatcaatta

SEQ ID NO: 39667 - DNA, 25 bp, Artificial
  probe
  misc_feature (1)..(25): SEQ ID NO: 2114; WAN0249ZT_at; Start 82; Stop 106
gtcaaatatctaacagacctatttt

SEQ ID NO: 39668 - DNA, 25 bp, Artificial
  probe
  misc_feature (1)..(25): SEQ ID NO: 2114; WAN0249ZT_at; Start 26; Stop 50
caattatagcataaaacatttttta

SEQ ID NO: 39669 - DNA, 25 bp, Artificial
  probe
  misc_feature (1)..(25): SEQ ID NO: 2114; WAN0249ZT_at; Start 83; Stop 107
tcaaatatctaacagacctattttt

SEQ ID NO: 39670 - DNA, 25 bp, Artificial
  probe
  misc_feature (1)..(25): SEQ ID NO: 2114; WAN0249ZT_at; Start 65; Stop 89
ctgtaaaaaataagtctgtcaaata

SEQ ID NO: 39671 - DNA, 25 bp, Artificial
  probe
  misc_feature (1)..(25): SEQ ID NO: 2114; WAN0249ZT_at; Start 84; Stop 108
caaatatctaacagacctatttttt

SEQ ID NO: 39672 - DNA, 25 bp, Artificial
  probe
  misc_feature (1)..(25): SEQ ID NO: 2114; WAN0249ZT_at; Start 60; Stop 84
atattctgtaaaaaataagtctgtc

SEQ ID NO: 39673 - DNA, 25 bp, Artificial
  probe
  misc_feature (1)..(25): SEQ ID NO: 2114; WAN0249ZT_at; Start 66; Stop 90
tgtaaaaaataagtctgtcaaatat

SEQ ID NO: 39674 - DNA, 25 bp, Artificial
  probe
  misc_feature (1)..(25): SEQ ID NO: 2114; WAN0249ZT_at; Start 64; Stop 88
tctgtaaaaaataagtctgtcaaat

SEQ ID NO: 39675 - DNA, 25 bp, Artificial
  probe
  misc_feature (1)..(25): SEQ ID NO: 2114; WAN0249ZT_at; Start 77; Stop 101
agtctgtcaaatatctaacagacct

SEQ ID NO: 39676 - DNA, 25 bp, Artificial
  probe
  misc_feature (1)..(25): SEQ ID NO: 2114; WAN0249ZT_at; Start 25; Stop 49
tcaattatagcataaaacatttttt

SEQ ID NO: 39677 - DNA, 25 bp, Artificial
  probe
  misc_feature (1)..(25): SEQ ID NO: 3790; WAN0249ZU_at; Start 64; Stop 88
gatgtggttcttttgcttattcagt

SEQ ID NO: 39678 - DNA, 25 bp, Artificial
  probe
  misc_feature (1)..(25): SEQ ID NO: 3790; WAN0249ZU_at; Start 41; Stop 65
gttaaatcaacctaggattgtcaga

SEQ ID NO: 39679 - DNA, 25 bp, Artificial
  probe
  misc_feature (1)..(25): SEQ ID NO: 3790; WAN0249ZU_at; Start 42; Stop 66
ttaaatcaacctaggattgtcagat

SEQ ID NO: 39680 - DNA, 25 bp, Artificial
  probe
  misc_feature (1)..(25): SEQ ID NO: 3790; WAN0249ZU_at; Start 44; Stop 68
aaatcaacctaggattgtcagatgt

SEQ ID NO: 39681 - DNA, 25 bp, Artificial
  probe
  misc_feature (1)..(25): SEQ ID NO: 3790; WAN0249ZU_at; Start 10; Stop 34
tagggtggaaccgcgtttctgacgc

SEQ ID NO: 39682 - DNA, 25 bp, Artificial
  probe
  misc_feature (1)..(25): SEQ ID NO: 3790; WAN0249ZU_at; Start 59; Stop 83
tgtcagatgtggttcttttgcttat

SEQ ID NO: 39683 - DNA, 25 bp, Artificial
  probe
  misc_feature (1)..(25): SEQ ID NO: 3790; WAN0249ZU_at; Start 26; Stop 50
ttctgacgcccctaggttaaatcaa

SEQ ID NO: 39684 - DNA, 25 bp, Artificial
  probe
  misc_feature (1)..(25): SEQ ID NO: 3790; WAN0249ZU_at; Start 47; Stop 71
tcaacctaggattgtcagatgtggt

SEQ ID NO: 39685 - DNA, 25 bp, Artificial
  probe
  misc_feature (1)..(25): SEQ ID NO: 3790; WAN0249ZU_at; Start 45; Stop 69
aatcaacctaggattgtcagatgtg

SEQ ID NO: 39686 - DNA, 25 bp, Artificial
  probe
  misc_feature (1)..(25): SEQ ID NO: 3790; WAN0249ZU_at; Start 62; Stop 86
cagatgtggttcttttgcttattca

SEQ ID NO: 39687 - DNA, 25 bp, Artificial
  probe
  misc_feature (1)..(25): SEQ ID NO: 3790; WAN0249ZU_at; Start 46; Stop 70
atcaacctaggattgtcagatgtgg

SEQ ID NO: 39688 - DNA, 25 bp, Artificial
  probe
  misc_feature (1)..(25): SEQ ID NO: 3790; WAN0249ZU_at; Start 51; Stop 75
cctaggattgtcagatgtggttctt

SEQ ID NO: 39689 - DNA, 25 bp, Artificial
  probe
  misc_feature (1)..(25): SEQ ID NO: 3790; WAN0249ZU_at; Start 70; Stop 94
gttcttttgcttattcagtctattg

SEQ ID NO: 39690 - DNA, 25 bp, Artificial
  probe
  misc_feature (1)..(25): SEQ ID NO: 3790; WAN0249ZU_at; Start 52; Stop 76
ctaggattgtcagatgtggttcttt

SEQ ID NO: 39691 - DNA, 25 bp, Artificial
  probe
  misc_feature (1)..(25): SEQ ID NO: 3790; WAN0249ZU_at; Start 39; Stop 63
aggttaaatcaacctaggattgtca

SEQ ID NO: 39692 - DNA, 25 bp, Artificial
  probe
  misc_feature (1)..(25): SEQ ID NO: 3790; WAN0249ZU_at; Start 53; Stop 77
taggattgtcagatgtggttctttt

SEQ ID NO: 39693 - DNA, 25 bp, Artificial
  probe
  misc_feature (1)..(25): SEQ ID NO: 3790; WAN0249ZU_at; Start 58; Stop 82
ttgtcagatgtggttcttttgctta

SEQ ID NO: 39694 - DNA, 25 bp, Artificial
  probe
  misc_feature (1)..(25): SEQ ID NO: 3790; WAN0249ZU_at; Start 15; Stop 39
tggaaccgcgtttctgacgccccta

SEQ ID NO: 39695 - DNA, 25 bp, Artificial
  probe
  misc_feature (1)..(25): SEQ ID NO: 3790; WAN0249ZU_at; Start 50; Stop 74
acctaggattgtcagatgtggttct

SEQ ID NO: 39696 - DNA, 25 bp, Artificial
  probe
  misc_feature (1)..(25): SEQ ID NO: 3790; WAN0249ZU_at; Start 63; Stop 87
agatgtggttcttttgcttattcag

SEQ ID NO: 39697 - DNA, 25 bp, Artificial
  probe
  misc_feature (1)..(25): SEQ ID NO: 3790; WAN0249ZU_at; Start 48; Stop 72
caacctaggattgtcagatgtggtt

SEQ ID NO: 39698 - DNA, 25 bp, Artificial
  probe
  misc_feature (1)..(25): SEQ ID NO: 3790; WAN0249ZU_at; Start 40; Stop 64
ggttaaatcaacctaggattgtcag

SEQ ID NO: 39699 - DNA, 25 bp, Artificial
  probe
  misc_feature (1)..(25): SEQ ID NO: 3790; WAN0249ZU_at; Start 25; Stop 49
tttctgacgcccctaggttaaatca

SEQ ID NO: 39700 - DNA, 25 bp, Artificial
  probe
  misc_feature (1)..(25): SEQ ID NO: 3790; WAN0249ZU_at; Start 71; Stop 95
ttcttttgcttattcagtctattgt

SEQ ID NO: 39701 - DNA, 25 bp, Artificial
  probe
  misc_feature (1)..(25): SEQ ID NO: 3790; WAN0249ZU_at; Start 69; Stop 93
ggttcttttgcttattcagtctatt

SEQ ID NO: 39702 - DNA, 25 bp, Artificial
  probe
  misc_feature (1)..(25): SEQ ID NO: 3790; WAN0249ZU_at; Start 67; Stop 91
gtggttcttttgcttattcagtcta

SEQ ID NO: 39703 - DNA, 25 bp, Artificial
  probe
  misc_feature (1)..(25): SEQ ID NO: 3790; WAN0249ZU_at; Start 49; Stop 73
aacctaggattgtcagatgtggttc

SEQ ID NO: 39704 - DNA, 25 bp, Artificial
  probe
  misc_feature (1)..(25): SEQ ID NO: 3790; WAN0249ZU_at; Start 55; Stop 79
ggattgtcagatgtggttcttttgc

SEQ ID NO: 39705 - DNA, 25 bp, Artificial
  probe
  misc_feature (1)..(25): SEQ ID NO: 3790; WAN0249ZU_at; Start 61; Stop 85
tcagatgtggttcttttgcttattc

SEQ ID NO: 39706 - DNA, 25 bp, Artificial
  probe
  misc_feature (1)..(25): SEQ ID NO: 3790; WAN0249ZU_at; Start 66; Stop 90
tgtggttcttttgcttattcagtct

SEQ ID NO: 39707 - DNA, 25 bp, Artificial
  probe
  misc_feature (1)..(25): SEQ ID NO: 3790; WAN0249ZU_at; Start 38; Stop 62
taggttaaatcaacctaggattgtc

SEQ ID NO: 39708 - DNA, 25 bp, Artificial
  probe
  misc_feature (1)..(25): SEQ ID NO: 3790; WAN0249ZU_at; Start 56; Stop 80
gattgtcagatgtggttcttttgct

SEQ ID NO: 39709 - DNA, 25 bp, Artificial
  probe
  misc_feature (1)..(25): SEQ ID NO: 3790; WAN0249ZU_at; Start 27; Stop 51
tctgacgcccctaggttaaatcaac

SEQ ID NO: 39710 - DNA, 25 bp, Artificial
  probe
  misc_feature (1)..(25): SEQ ID NO: 3790; WAN0249ZU_at; Start 43; Stop 67
taaatcaacctaggattgtcagatg

SEQ ID NO: 39711 - DNA, 25 bp, Artificial
  probe
  misc_feature (1)..(25): SEQ ID NO: 322; WAN0249ZV_at; Start 23; Stop 47
gaaccacatctgacaatcctaggtt

SEQ ID NO: 39712 - DNA, 25 bp, Artificial
  probe
  misc_feature (1)..(25): SEQ ID NO: 322; WAN0249ZV_at; Start 57; Stop 81
taggggcgtcagaaacgcggttcca

SEQ ID NO: 39713 - DNA, 25 bp, Artificial
  probe
  misc_feature (1)..(25): SEQ ID NO: 322; WAN0249ZV_at; Start 16; Stop 40
agcaaaagaaccacatctgacaatc

SEQ ID NO: 39714 - DNA, 25 bp, Artificial
  probe
  misc_feature (1)..(25): SEQ ID NO: 322; WAN0249ZV_at; Start 33; Stop 57
tgacaatcctaggttgatttaacct

SEQ ID NO: 39715 - DNA, 25 bp, Artificial
  probe
  misc_feature (1)..(25): SEQ ID NO: 322; WAN0249ZV_at; Start 2; Stop 26
caatagactgaataagcaaaagaac

SEQ ID NO: 39716 - DNA, 25 bp, Artificial
  probe
  misc_feature (1)..(25): SEQ ID NO: 322; WAN0249ZV_at; Start 18; Stop 42
caaaagaaccacatctgacaatcct

SEQ ID NO: 39717 - DNA, 25 bp, Artificial
  probe
  misc_feature (1)..(25): SEQ ID NO: 322; WAN0249ZV_at; Start 25; Stop 49
accacatctgacaatcctaggttga

SEQ ID NO: 39718 - DNA, 25 bp, Artificial
  probe
  misc_feature (1)..(25): SEQ ID NO: 322; WAN0249ZV_at; Start 47; Stop 71
tgatttaacctaggggcgtcagaaa

SEQ ID NO: 39719 - DNA, 25 bp, Artificial
  probe
  misc_feature (1)..(25): SEQ ID NO: 322; WAN0249ZV_at; Start 31; Stop 55
tctgacaatcctaggttgatttaac

SEQ ID NO: 39720 - DNA, 25 bp, Artificial
  probe
  misc_feature (1)..(25): SEQ ID NO: 322; WAN0249ZV_at; Start 22; Stop 46
agaaccacatctgacaatcctaggt

SEQ ID NO: 39721 - DNA, 25 bp, Artificial
  probe
  misc_feature (1)..(25): SEQ ID NO: 322; WAN0249ZV_at; Start 45; Stop 69
gttgatttaacctaggggcgtcaga

SEQ ID NO: 39722 - DNA, 25 bp, Artificial
  probe
  misc_feature (1)..(25): SEQ ID NO: 322; WAN0249ZV_at; Start 21; Stop 45
aagaaccacatctgacaatcctagg

SEQ ID NO: 39723 - DNA, 25 bp, Artificial
  probe
  misc_feature (1)..(25): SEQ ID NO: 322; WAN0249ZV_at; Start 19; Stop 43
aaaagaaccacatctgacaatccta

SEQ ID NO: 39724 - DNA, 25 bp, Artificial
  probe
  misc_feature (1)..(25): SEQ ID NO: 322; WAN0249ZV_at; Start 62; Stop 86
gcgtcagaaacgcggttccacccta

SEQ ID NO: 39725 - DNA, 25 bp, Artificial
  probe
  misc_feature (1)..(25): SEQ ID NO: 322; WAN0249ZV_at; Start 6; Stop 30
agactgaataagcaaaagaaccaca

SEQ ID NO: 39726 - DNA, 25 bp, Artificial
  probe
  misc_feature (1)..(25): SEQ ID NO: 322; WAN0249ZV_at; Start 9; Stop 33
ctgaataagcaaaagaaccacatct

SEQ ID NO: 39727 - DNA, 25 bp, Artificial
  probe
  misc_feature (1)..(25): SEQ ID NO: 322; WAN0249ZV_at; Start 20; Stop 44
aaagaaccacatctgacaatcctag

SEQ ID NO: 39728 - DNA, 25 bp, Artificial
  probe
  misc_feature (1)..(25): SEQ ID NO: 322; WAN0249ZV_at; Start 10; Stop 34
tgaataagcaaaagaaccacatctg

SEQ ID NO: 39729 - DNA, 25 bp, Artificial
  probe
  misc_feature (1)..(25): SEQ ID NO: 322; WAN0249ZV_at; Start 12; Stop 36
aataagcaaaagaaccacatctgac

SEQ ID NO: 39730 - DNA, 25 bp, Artificial
  probe
  misc_feature (1)..(25): SEQ ID NO: 322; WAN0249ZV_at; Start 15; Stop 39
aagcaaaagaaccacatctgacaat

SEQ ID NO: 39731 - DNA, 25 bp, Artificial
  probe
  misc_feature (1)..(25): SEQ ID NO: 322; WAN0249ZV_at; Start 34; Stop 58
gacaatcctaggttgatttaaccta

SEQ ID NO: 39732 - DNA, 25 bp, Artificial
  probe
  misc_feature (1)..(25): SEQ ID NO: 322; WAN0249ZV_at; Start 27; Stop 51
cacatctgacaatcctaggttgatt

SEQ ID NO: 39733 - DNA, 25 bp, Artificial
  probe
  misc_feature (1)..(25): SEQ ID NO: 322; WAN0249ZV_at; Start 17; Stop 41
gcaaaagaaccacatctgacaatcc

SEQ ID NO: 39734 - DNA, 25 bp, Artificial
  probe
  misc_feature (1)..(25): SEQ ID NO: 322; WAN0249ZV_at; Start 32; Stop 56
ctgacaatcctaggttgatttaacc

SEQ ID NO: 39735 - DNA, 25 bp, Artificial
  probe
  misc_feature (1)..(25): SEQ ID NO: 322; WAN0249ZV_at; Start 24; Stop 48
aaccacatctgacaatcctaggttg

SEQ ID NO: 39736 - DNA, 25 bp, Artificial
  probe
  misc_feature (1)..(25): SEQ ID NO: 322; WAN0249ZV_at; Start 8; Stop 32
actgaataagcaaaagaaccacatc

SEQ ID NO: 39737 - DNA, 25 bp, Artificial
  probe
  misc_feature (1)..(25): SEQ ID NO: 322; WAN0249ZV_at; Start 11; Stop 35
gaataagcaaaagaaccacatctga

SEQ ID NO: 39738 - DNA, 25 bp, Artificial
  probe
  misc_feature (1)..(25): SEQ ID NO: 322; WAN0249ZV_at; Start 26; Stop 50
ccacatctgacaatcctaggttgat

SEQ ID NO: 39739 - DNA, 25 bp, Artificial
  probe
  misc_feature (1)..(25): SEQ ID NO: 322; WAN0249ZV_at; Start 7; Stop 31
gactgaataagcaaaagaaccacat

SEQ ID NO: 39740 - DNA, 25 bp, Artificial
  probe
  misc_feature (1)..(25): SEQ ID NO: 322; WAN0249ZV_at; Start 5; Stop 29
tagactgaataagcaaaagaaccac

SEQ ID NO: 39741 - DNA, 25 bp, Artificial
  probe
  misc_feature (1)..(25): SEQ ID NO: 322; WAN0249ZV_at; Start 14; Stop 38
taagcaaaagaaccacatctgacaa

SEQ ID NO: 39742 - DNA, 25 bp, Artificial
  probe
  misc_feature (1)..(25): SEQ ID NO: 322; WAN0249ZV_at; Start 3; Stop 27
aatagactgaataagcaaaagaacc

SEQ ID NO: 39743 - DNA, 25 bp, Artificial
  probe
  misc_feature (1)..(25): SEQ ID NO: 322; WAN0249ZV_at; Start 29; Stop 53
catctgacaatcctaggttgattta

SEQ ID NO: 39744 - DNA, 25 bp, Artificial
  probe
  misc_feature (1)..(25): SEQ ID NO: 322; WAN0249ZV_at; Start 36; Stop 60
caatcctaggttgatttaacctagg

SEQ ID NO: 39745 - DNA, 25 bp, Artificial
  probe
  misc_feature (1)..(25): SEQ ID NO: 112; WAN0249ZW_at; Start 101; Stop 125
cctgagctagacgcagtactaactc

SEQ ID NO: 39746 - DNA, 25 bp, Artificial
  probe
  misc_feature (1)..(25): SEQ ID NO: 112; WAN0249ZW_at; Start 18; Stop 42
aatgtctaagaaattaacatttcac

SEQ ID NO: 39747 - DNA, 25 bp, Artificial
  probe
  misc_feature (1)..(25): SEQ ID NO: 112; WAN0249ZW_at; Start 102; Stop 126
ctgagctagacgcagtactaactcg

SEQ ID NO: 39748 - DNA, 25 bp, Artificial
  probe
  misc_feature (1)..(25): SEQ ID NO: 112; WAN0249ZW_at; Start 14; Stop 38
aaacaatgtctaagaaattaacatt

SEQ ID NO: 39749 - DNA, 25 bp, Artificial
  probe
  misc_feature (1)..(25): SEQ ID NO: 112; WAN0249ZW_at; Start 10; Stop 34
gagtaaacaatgtctaagaaattaa

SEQ ID NO: 39750 - DNA, 25 bp, Artificial
  probe
  misc_feature (1)..(25): SEQ ID NO: 112; WAN0249ZW_at; Start 12; Stop 36
gtaaacaatgtctaagaaattaaca

SEQ ID NO: 39751 - DNA, 25 bp, Artificial
  probe
  misc_feature (1)..(25): SEQ ID NO: 112; WAN0249ZW_at; Start 21; Stop 45
gtctaagaaattaacatttcactgc

SEQ ID NO: 39752 - DNA, 25 bp, Artificial
  probe
  misc_feature (1)..(25): SEQ ID NO: 112; WAN0249ZW_at; Start 98; Stop 122
gtgcctgagctagacgcagtactaa

SEQ ID NO: 39753 - DNA, 25 bp, Artificial
  probe
  misc_feature (1)..(25): SEQ ID NO: 112; WAN0249ZW_at; Start 8; Stop 32
aggagtaaacaatgtctaagaaatt

SEQ ID NO: 39754 - DNA, 25 bp, Artificial
  probe
  misc_feature (1)..(25): SEQ ID NO: 112; WAN0249ZW_at; Start 20; Stop 44
tgtctaagaaattaacatttcactg

SEQ ID NO: 39755 - DNA, 25 bp, Artificial
  probe
  misc_feature (1)..(25): SEQ ID NO: 112; WAN0249ZW_at; Start 7; Stop 31
aaggagtaaacaatgtctaagaaat

SEQ ID NO: 39756 - DNA, 25 bp, Artificial
  probe
  misc_feature (1)..(25): SEQ ID NO: 112; WAN0249ZW_at; Start 104; Stop 128
gagctagacgcagtactaactcgtc

SEQ ID NO: 39757 - DNA, 25 bp, Artificial
  probe
  misc_feature (1)..(25): SEQ ID NO: 112; WAN0249ZW_at; Start 5; Stop 29
taaaggagtaaacaatgtctaagaa

SEQ ID NO: 39758 - DNA, 25 bp, Artificial
  probe
  misc_feature (1)..(25): SEQ ID NO: 112; WAN0249ZW_at; Start 9; Stop 33
ggagtaaacaatgtctaagaaatta

SEQ ID NO: 39759 - DNA, 25 bp, Artificial
  probe
  misc_feature (1)..(25): SEQ ID NO: 112; WAN0249ZW_at; Start 103; Stop 127
tgagctagacgcagtactaactcgt

SEQ ID NO: 39760 - DNA, 25 bp, Artificial
  probe
  misc_feature (1)..(25): SEQ ID NO: 112; WAN0249ZW_at; Start 16; Stop 40
acaatgtctaagaaattaacatttc

SEQ ID NO: 39761 - DNA, 25 bp, Artificial
  probe
  misc_feature (1)..(25): SEQ ID NO: 112; WAN0249ZW_at; Start 19; Stop 43
atgtctaagaaattaacatttcact

SEQ ID NO: 39762 - DNA, 25 bp, Artificial
  probe
  misc_feature (1)..(25): SEQ ID NO: 112; WAN0249ZW_at; Start 15; Stop 39
aacaatgtctaagaaattaacattt

SEQ ID NO: 39763 - DNA, 25 bp, Artificial
  probe
  misc_feature (1)..(25): SEQ ID NO: 112; WAN0249ZW_at; Start 4; Stop 28
ctaaaggagtaaacaatgtctaaga

SEQ ID NO: 39764 - DNA, 25 bp, Artificial
  probe
  misc_feature (1)..(25): SEQ ID NO: 112; WAN0249ZW_at; Start 13; Stop 37
taaacaatgtctaagaaattaacat

SEQ ID NO: 39765 - DNA, 25 bp, Artificial
  probe
  misc_feature (1)..(25): SEQ ID NO: 112; WAN0249ZW_at; Start 100; Stop 124
gcctgagctagacgcagtactaact

SEQ ID NO: 39766 - DNA, 25 bp, Artificial
  probe
  misc_feature (1)..(25): SEQ ID NO: 112; WAN0249ZW_at; Start 99; Stop 123
tgcctgagctagacgcagtactaac

SEQ ID NO: 39767 - DNA, 25 bp, Artificial
  probe
  misc_feature (1)..(25): SEQ ID NO: 112; WAN0249ZW_at; Start 3; Stop 27
actaaaggagtaaacaatgtctaag

SEQ ID NO: 39768 - DNA, 25 bp, Artificial
  probe
  misc_feature (1)..(25): SEQ ID NO: 112; WAN0249ZW_at; Start 17; Stop 41
caatgtctaagaaattaacatttca

SEQ ID NO: 39769 - DNA, 25 bp, Artificial
  probe
  misc_feature (1)..(25): SEQ ID NO: 3580; WAN0249ZX_at; Start 98; Stop 122
atttcttagacattgtttactcctt

SEQ ID NO: 39770 - DNA, 25 bp, Artificial
  probe
  misc_feature (1)..(25): SEQ ID NO: 3580; WAN0249ZX_at; Start 90; Stop 114
aaatgttaatttcttagacattgtt

SEQ ID NO: 39771 - DNA, 25 bp, Artificial
  probe
  misc_feature (1)..(25): SEQ ID NO: 3580; WAN0249ZX_at; Start 92; Stop 116
atgttaatttcttagacattgttta

SEQ ID NO: 39772 - DNA, 25 bp, Artificial
  probe
  misc_feature (1)..(25): SEQ ID NO: 3580; WAN0249ZX_at; Start 87; Stop 111
gtgaaatgttaatttcttagacatt

SEQ ID NO: 39773 - DNA, 25 bp, Artificial
  probe
  misc_feature (1)..(25): SEQ ID NO: 3580; WAN0249ZX_at; Start 88; Stop 112
tgaaatgttaatttcttagacattg

SEQ ID NO: 39774 - DNA, 25 bp, Artificial
  probe
  misc_feature (1)..(25): SEQ ID NO: 3580; WAN0249ZX_at; Start 97; Stop 121
aatttcttagacattgtttactcct

SEQ ID NO: 39775 - DNA, 25 bp, Artificial
  probe
  misc_feature (1)..(25): SEQ ID NO: 3580; WAN0249ZX_at; Start 3; Stop 27
cgagttagtactgcgtctagctcag

SEQ ID NO: 39776 - DNA, 25 bp, Artificial
  probe
  misc_feature (1)..(25): SEQ ID NO: 3580; WAN0249ZX_at; Start 5; Stop 29
agttagtactgcgtctagctcaggc

SEQ ID NO: 39777 - DNA, 25 bp, Artificial
  probe
  misc_feature (1)..(25): SEQ ID NO: 3580; WAN0249ZX_at; Start 86; Stop 110
agtgaaatgttaatttcttagacat

SEQ ID NO: 39778 - DNA, 25 bp, Artificial
  probe
  misc_feature (1)..(25): SEQ ID NO: 3580; WAN0249ZX_at; Start 100; Stop 124
ttcttagacattgtttactccttta

SEQ ID NO: 39779 - DNA, 25 bp, Artificial
  probe
  misc_feature (1)..(25): SEQ ID NO: 3580; WAN0249ZX_at; Start 7; Stop 31
ttagtactgcgtctagctcaggcac

SEQ ID NO: 39780 - DNA, 25 bp, Artificial
  probe
  misc_feature (1)..(25): SEQ ID NO: 3580; WAN0249ZX_at; Start 2; Stop 26
acgagttagtactgcgtctagctca

SEQ ID NO: 39781 - DNA, 25 bp, Artificial
  probe
  misc_feature (1)..(25): SEQ ID NO: 3580; WAN0249ZX_at; Start 1; Stop 25
gacgagttagtactgcgtctagctc

SEQ ID NO: 39782 - DNA, 25 bp, Artificial
  probe
  misc_feature (1)..(25): SEQ ID NO: 3580; WAN0249ZX_at; Start 89; Stop 113
gaaatgttaatttcttagacattgt

SEQ ID NO: 39783 - DNA, 25 bp, Artificial
  probe
  misc_feature (1)..(25): SEQ ID NO: 3580; WAN0249ZX_at; Start 4; Stop 28
gagttagtactgcgtctagctcagg

SEQ ID NO: 39784 - DNA, 25 bp, Artificial
  probe
  misc_feature (1)..(25): SEQ ID NO: 3580; WAN0249ZX_at; Start 93; Stop 117
tgttaatttcttagacattgtttac

SEQ ID NO: 39785 - DNA, 25 bp, Artificial
  probe
  misc_feature (1)..(25): SEQ ID NO: 3580; WAN0249ZX_at; Start 6; Stop 30
gttagtactgcgtctagctcaggca

SEQ ID NO: 39786 - DNA, 25 bp, Artificial
  probe
  misc_feature (1)..(25): SEQ ID NO: 3580; WAN0249ZX_at; Start 96; Stop 120
taatttcttagacattgtttactcc

SEQ ID NO: 39787 - DNA, 25 bp, Artificial
  probe
  misc_feature (1)..(25): SEQ ID NO: 3580; WAN0249ZX_at; Start 95; Stop 119
ttaatttcttagacattgtttactc

SEQ ID NO: 39788 - DNA, 25 bp, Artificial
  probe
  misc_feature (1)..(25): SEQ ID NO: 3580; WAN0249ZX_at; Start 91; Stop 115
aatgttaatttcttagacattgttt

SEQ ID NO: 39789 - DNA, 25 bp, Artificial
  probe
  misc_feature (1)..(25): SEQ ID NO: 3580; WAN0249ZX_at; Start 84; Stop 108
gcagtgaaatgttaatttcttagac

SEQ ID NO: 39790 - DNA, 25 bp, Artificial
  probe
  misc_feature (1)..(25): SEQ ID NO: 3580; WAN0249ZX_at; Start 85; Stop 109
cagtgaaatgttaatttcttagaca

SEQ ID NO: 39791 - DNA, 25 bp, Artificial
  probe
  misc_feature (1)..(25): SEQ ID NO: 461; WAN0249ZY_at; Start 144; Stop 168
ggtagatacctcgttatagcgcggt

SEQ ID NO: 39792 - DNA, 25 bp, Artificial
  probe
  misc_feature (1)..(25): SEQ ID NO: 461; WAN0249ZY_at; Start 146; Stop 170
tagatacctcgttatagcgcggtta

SEQ ID NO: 39793 - DNA, 25 bp, Artificial
  probe
  misc_feature (1)..(25): SEQ ID NO: 461; WAN0249ZY_at; Start 44; Stop 68
tattgggcagctacggaacagtcga

SEQ ID NO: 39794 - DNA, 25 bp, Artificial
  probe
  misc_feature (1)..(25): SEQ ID NO: 461; WAN0249ZY_at; Start 30; Stop 54
cgactatactccgttattgggcagc

SEQ ID NO: 39795 - DNA, 25 bp, Artificial
  probe
  misc_feature (1)..(25): SEQ ID NO: 461; WAN0249ZY_at; Start 26; Stop 50
cagccgactatactccgttattggg

SEQ ID NO: 39796 - DNA, 25 bp, Artificial
  probe
  misc_feature (1)..(25): SEQ ID NO: 461; WAN0249ZY_at; Start 13; Stop 37
cctattcttgtttcagccgactata

SEQ ID NO: 39797 - DNA, 25 bp, Artificial
  probe
  misc_feature (1)..(25): SEQ ID NO: 461; WAN0249ZY_at; Start 128; Stop 152
gagaattgacaatctcggtagatac

SEQ ID NO: 39798 - DNA, 25 bp, Artificial
  probe
  misc_feature (1)..(25): SEQ ID NO: 461; WAN0249ZY_at; Start 45; Stop 69
attgggcagctacggaacagtcgat

SEQ ID NO: 39799 - DNA, 25 bp, Artificial
  probe
  misc_feature (1)..(25): SEQ ID NO: 461; WAN0249ZY_at; Start 41; Stop 65
cgttattgggcagctacggaacagt

SEQ ID NO: 39800 - DNA, 25 bp, Artificial
  probe
  misc_feature (1)..(25): SEQ ID NO: 461; WAN0249ZY_at; Start 150; Stop 174
tacctcgttatagcgcggttactta

SEQ ID NO: 39801 - DNA, 25 bp, Artificial
  probe
  misc_feature (1)..(25): SEQ ID NO: 461; WAN0249ZY_at; Start 117; Stop 141
acagtatactggagaattgacaatc

SEQ ID NO: 39802 - DNA, 25 bp, Artificial
  probe
  misc_feature (1)..(25): SEQ ID NO: 461; WAN0249ZY_at; Start 140; Stop 164
tctcggtagatacctcgttatagcg

SEQ ID NO: 39803 - DNA, 25 bp, Artificial
  probe
  misc_feature (1)..(25): SEQ ID NO: 461; WAN0249ZY_at; Start 53; Stop 77
gctacggaacagtcgatgggacgat

SEQ ID NO: 39804 - DNA, 25 bp, Artificial
  probe
  misc_feature (1)..(25): SEQ ID NO: 461; WAN0249ZY_at; Start 34; Stop 58
tatactccgttattgggcagctacg

SEQ ID NO: 39805 - DNA, 25 bp, Artificial
  probe
  misc_feature (1)..(25): SEQ ID NO: 461; WAN0249ZY_at; Start 21; Stop 45
tgtttcagccgactatactccgtta

SEQ ID NO: 39806 - DNA, 25 bp, Artificial
  probe
  misc_feature (1)..(25): SEQ ID NO: 461; WAN0249ZY_at; Start 36; Stop 60
tactccgttattgggcagctacgga

SEQ ID NO: 39807 - DNA, 25 bp, Artificial
  probe
  misc_feature (1)..(25): SEQ ID NO: 461; WAN0249ZY_at; Start 148; Stop 172
gatacctcgttatagcgcggttact

SEQ ID NO: 39808 - DNA, 25 bp, Artificial
  probe
  misc_feature (1)..(25): SEQ ID NO: 461; WAN0249ZY_at; Start 43; Stop 67
ttattgggcagctacggaacagtcg

SEQ ID NO: 39809 - DNA, 25 bp, Artificial
  probe
  misc_feature (1)..(25): SEQ ID NO: 461; WAN0249ZY_at; Start 133; Stop 157
ttgacaatctcggtagatacctcgt

SEQ ID NO: 39810 - DNA, 25 bp, Artificial
  probe
  misc_feature (1)..(25): SEQ ID NO: 461; WAN0249ZY_at; Start 25; Stop 49
tcagccgactatactccgttattgg

SEQ ID NO: 39811 - DNA, 25 bp, Artificial
  probe
  misc_feature (1)..(25): SEQ ID NO: 461; WAN0249ZY_at; Start 130; Stop 154
gaattgacaatctcggtagatacct

SEQ ID NO: 39812 - DNA, 25 bp, Artificial
  probe
  misc_feature (1)..(25): SEQ ID NO: 461; WAN0249ZY_at; Start 51; Stop 75
cagctacggaacagtcgatgggacg

SEQ ID NO: 39813 - DNA, 25 bp, Artificial
  probe
  misc_feature (1)..(25): SEQ ID NO: 461; WAN0249ZY_at; Start 106; Stop 130
tgttttttataacagtatactggag

SEQ ID NO: 39814 - DNA, 25 bp, Artificial
  probe
  misc_feature (1)..(25): SEQ ID NO: 461; WAN0249ZY_at; Start 31; Stop 55
gactatactccgttattgggcagct

SEQ ID NO: 39815 - DNA, 25 bp, Artificial
  probe
  misc_feature (1)..(25): SEQ ID NO: 461; WAN0249ZY_at; Start 135; Stop 159
gacaatctcggtagatacctcgtta

SEQ ID NO: 39816 - DNA, 25 bp, Artificial
  probe
  misc_feature (1)..(25): SEQ ID NO: 461; WAN0249ZY_at; Start 113; Stop 137
tataacagtatactggagaattgac

SEQ ID NO: 39817 - DNA, 25 bp, Artificial
  probe
  misc_feature (1)..(25): SEQ ID NO: 461; WAN0249ZY_at; Start 56; Stop 80
acggaacagtcgatgggacgatggg

SEQ ID NO: 39818 - DNA, 25 bp, Artificial
  probe
  misc_feature (1)..(25): SEQ ID NO: 461; WAN0249ZY_at; Start 121; Stop 145
tatactggagaattgacaatctcgg

SEQ ID NO: 39819 - DNA, 25 bp, Artificial
  probe
  misc_feature (1)..(25): SEQ ID NO: 461; WAN0249ZY_at; Start 15; Stop 39
tattcttgtttcagccgactatact

SEQ ID NO: 39820 - DNA, 25 bp, Artificial
  probe
  misc_feature (1)..(25): SEQ ID NO: 461; WAN0249ZY_at; Start 124; Stop 148
actggagaattgacaatctcggtag

SEQ ID NO: 39821 - DNA, 25 bp, Artificial
  probe
  misc_feature (1)..(25): SEQ ID NO: 461; WAN0249ZY_at; Start 137; Stop 161
caatctcggtagatacctcgttata

SEQ ID NO: 39822 - DNA, 25 bp, Artificial
  probe
  misc_feature (1)..(25): SEQ ID NO: 461; WAN0249ZY_at; Start 40; Stop 64
ccgttattgggcagctacggaacag

SEQ ID NO: 39823 - DNA, 25 bp, Artificial
  probe
  misc_feature (1)..(25): SEQ ID NO: 461; WAN0249ZY_at; Start 19; Stop 43
cttgtttcagccgactatactccgt

SEQ ID NO: 39824 - DNA, 25 bp, Artificial
  probe
  misc_feature (1)..(25): SEQ ID NO: 461; WAN0249ZY_at; Start 142; Stop 166
tcggtagatacctcgttatagcgcg

SEQ ID NO: 39825 - DNA, 25 bp, Artificial
  probe
  misc_feature (1)..(25): SEQ ID NO: 4447; WAN0249ZZ_at; Start 103; Stop 127
cgtcccatcgactgttccgtagctg

SEQ ID NO: 39826 - DNA, 25 bp, Artificial
  probe
  misc_feature (1)..(25): SEQ ID NO: 4447; WAN0249ZZ_at; Start 37; Stop 61
gattgtcaattctccagtatactgt

SEQ ID NO: 39827 - DNA, 25 bp, Artificial
  probe
  misc_feature (1)..(25): SEQ ID NO: 4447; WAN0249ZZ_at; Start 143; Stop 167
tagtcggctgaaacaagaataggac

SEQ ID NO: 39828 - DNA, 25 bp, Artificial
  probe
  misc_feature (1)..(25): SEQ ID NO: 4447; WAN0249ZZ_at; Start 19; Stop 43
taacgaggtatctaccgagattgtc

SEQ ID NO: 39829 - DNA, 25 bp, Artificial
  probe
  misc_feature (1)..(25): SEQ ID NO: 4447; WAN0249ZZ_at; Start 14; Stop 38
cgctataacgaggtatctaccgaga

SEQ ID NO: 39830 - DNA, 25 bp, Artificial
  probe
  misc_feature (1)..(25): SEQ ID NO: 4447; WAN0249ZZ_at; Start 25; Stop 49
ggtatctaccgagattgtcaattct

SEQ ID NO: 39831 - DNA, 25 bp, Artificial
  probe
  misc_feature (1)..(25): SEQ ID NO: 4447; WAN0249ZZ_at; Start 135; Stop 159
acggagtatagtcggctgaaacaag

SEQ ID NO: 39832 - DNA, 25 bp, Artificial
  probe
  misc_feature (1)..(25): SEQ ID NO: 4447; WAN0249ZZ_at; Start 23; Stop 47
gaggtatctaccgagattgtcaatt

SEQ ID NO: 39833 - DNA, 25 bp, Artificial
  probe
  misc_feature (1)..(25): SEQ ID NO: 4447; WAN0249ZZ_at; Start 122; Stop 146
tagctgcccaataacggagtatagt

SEQ ID NO: 39834 - DNA, 25 bp, Artificial
  probe
  misc_feature (1)..(25): SEQ ID NO: 4447; WAN0249ZZ_at; Start 6; Stop 30
agtaaccgcgctataacgaggtatc

SEQ ID NO: 39835 - DNA, 25 bp, Artificial
  probe
  misc_feature (1)..(25): SEQ ID NO: 4447; WAN0249ZZ_at; Start 115; Stop 139
tgttccgtagctgcccaataacgga

SEQ ID NO: 39836 - DNA, 25 bp, Artificial
  probe
  misc_feature (1)..(25): SEQ ID NO: 4447; WAN0249ZZ_at; Start 34; Stop 58
cgagattgtcaattctccagtatac

SEQ ID NO: 39837 - DNA, 25 bp, Artificial
  probe
  misc_feature (1)..(25): SEQ ID NO: 4447; WAN0249ZZ_at; Start 41; Stop 65
gtcaattctccagtatactgttata

SEQ ID NO: 39838 - DNA, 25 bp, Artificial
  probe
  misc_feature (1)..(25): SEQ ID NO: 4447; WAN0249ZZ_at; Start 141; Stop 165
tatagtcggctgaaacaagaatagg

SEQ ID NO: 39839 - DNA, 25 bp, Artificial
  probe
  misc_feature (1)..(25): SEQ ID NO: 4447; WAN0249ZZ_at; Start 101; Stop 125
atcgtcccatcgactgttccgtagc

SEQ ID NO: 39840 - DNA, 25 bp, Artificial
  probe
  misc_feature (1)..(25): SEQ ID NO: 4447; WAN0249ZZ_at; Start 17; Stop 41
tataacgaggtatctaccgagattg

SEQ ID NO: 39841 - DNA, 25 bp, Artificial
  probe
  misc_feature (1)..(25): SEQ ID NO: 4447; WAN0249ZZ_at; Start 124; Stop 148
gctgcccaataacggagtatagtcg

SEQ ID NO: 39842 - DNA, 25 bp, Artificial
  probe
  misc_feature (1)..(25): SEQ ID NO: 4447; WAN0249ZZ_at; Start 128; Stop 152
cccaataacggagtatagtcggctg

SEQ ID NO: 39843 - DNA, 25 bp, Artificial
  probe
  misc_feature (1)..(25): SEQ ID NO: 4447; WAN0249ZZ_at; Start 153; Stop 177
aaacaagaataggacaaaagtgcct

SEQ ID NO: 39844 - DNA, 25 bp, Artificial
  probe
  misc_feature (1)..(25): SEQ ID NO: 4447; WAN0249ZZ_at; Start 109; Stop 133
atcgactgttccgtagctgcccaat

SEQ ID NO: 39845 - DNA, 25 bp, Artificial
  probe
  misc_feature (1)..(25): SEQ ID NO: 4447; WAN0249ZZ_at; Start 152; Stop 176
gaaacaagaataggacaaaagtgcc

SEQ ID NO: 39846 - DNA, 25 bp, Artificial
  probe
  misc_feature (1)..(25): SEQ ID NO: 4447; WAN0249ZZ_at; Start 146; Stop 170
tcggctgaaacaagaataggacaaa

SEQ ID NO: 39847 - DNA, 25 bp, Artificial
  probe
  misc_feature (1)..(25): SEQ ID NO: 4447; WAN0249ZZ_at; Start 8; Stop 32
taaccgcgctataacgaggtatcta

SEQ ID NO: 39848 - DNA, 25 bp, Artificial
  probe
  misc_feature (1)..(25): SEQ ID NO: 4447; WAN0249ZZ_at; Start 126; Stop 150
tgcccaataacggagtatagtcggc

SEQ ID NO: 39849 - DNA, 25 bp, Artificial
  probe
  misc_feature (1)..(25): SEQ ID NO: 4447; WAN0249ZZ_at; Start 138; Stop 162
gagtatagtcggctgaaacaagaat

SEQ ID NO: 39850 - DNA, 25 bp, Artificial
  probe
  misc_feature (1)..(25): SEQ ID NO: 4447; WAN0249ZZ_at; Start 12; Stop 36
cgcgctataacgaggtatctaccga

SEQ ID NO: 39851 - DNA, 25 bp, Artificial
  probe
  misc_feature (1)..(25): SEQ ID NO: 4447; WAN0249ZZ_at; Start 49; Stop 73
tccagtatactgttataaaaaacaa

SEQ ID NO: 39852 - DNA, 25 bp, Artificial
  probe
  misc_feature (1)..(25): SEQ ID NO: 4447; WAN0249ZZ_at; Start 29; Stop 53
tctaccgagattgtcaattctccag

SEQ ID NO: 39853 - DNA, 25 bp, Artificial
  probe
  misc_feature (1)..(25): SEQ ID NO: 4447; WAN0249ZZ_at; Start 133; Stop 157
taacggagtatagtcggctgaaaca

SEQ ID NO: 39854 - DNA, 25 bp, Artificial
  probe
  misc_feature (1)..(25): SEQ ID NO: 4447; WAN0249ZZ_at; Start 113; Stop 137
actgttccgtagctgcccaataacg

SEQ ID NO: 39855 - DNA, 25 bp, Artificial
  probe
  misc_feature (1)..(25): SEQ ID NO: 4447; WAN0249ZZ_at; Start 4; Stop 28
taagtaaccgcgctataacgaggta

SEQ ID NO: 39856 - DNA, 25 bp, Artificial
  probe
  misc_feature (1)..(25): SEQ ID NO: 4447; WAN0249ZZ_at; Start 130; Stop 154
caataacggagtatagtcggctgaa

SEQ ID NO: 39857 - DNA, 25 bp, Artificial
  probe
  misc_feature (1)..(25): SEQ ID NO: 4447; WAN0249ZZ_at; Start 120; Stop 144
cgtagctgcccaataacggagtata

SEQ ID NO: 39858 - DNA, 25 bp, Artificial
  probe
  misc_feature (1)..(25): SEQ ID NO: 4447; WAN0249ZZ_at; Start 111; Stop 135
cgactgttccgtagctgcccaataa

SEQ ID NO: 39859 - DNA, 25 bp, Artificial
  probe
  misc_feature (1)..(25): SEQ ID NO: 4563; WAN024A22_at; Start 43; Stop 67
aagagactagcagtttgtgtttgct

SEQ ID NO: 39860 - DNA, 25 bp, Artificial
  probe
  misc_feature (1)..(25): SEQ ID NO: 4563; WAN024A22_at; Start 33; Stop 57
aacgataacaaagagactagcagtt

SEQ ID NO: 39861 - DNA, 25 bp, Artificial
  probe
  misc_feature (1)..(25): SEQ ID NO: 4563; WAN024A22_at; Start 60; Stop 84
tgtttgctagtcttttttcgctaaa

SEQ ID NO: 39862 - DNA, 25 bp, Artificial
  probe
  misc_feature (1)..(25): SEQ ID NO: 4563; WAN024A22_at; Start 50; Stop 74
tagcagtttgtgtttgctagtcttt

SEQ ID NO: 39863 - DNA, 25 bp, Artificial
  probe
  misc_feature (1)..(25): SEQ ID NO: 4563; WAN024A22_at; Start 56; Stop 80
tttgtgtttgctagtcttttttcgc

SEQ ID NO: 39864 - DNA, 25 bp, Artificial
  probe
  misc_feature (1)..(25): SEQ ID NO: 4563; WAN024A22_at; Start 24; Stop 48
gatagatgaaacgataacaaagaga

SEQ ID NO: 39865 - DNA, 25 bp, Artificial
  probe
  misc_feature (1)..(25): SEQ ID NO: 4563; WAN024A22_at; Start 30; Stop 54
tgaaacgataacaaagagactagca

SEQ ID NO: 39866 - DNA, 25 bp, Artificial
  probe
  misc_feature (1)..(25): SEQ ID NO: 4563; WAN024A22_at; Start 13; Stop 37
cttttaacaaagatagatgaaacga

SEQ ID NO: 39867 - DNA, 25 bp, Artificial
  probe
  misc_feature (1)..(25): SEQ ID NO: 4563; WAN024A22_at; Start 52; Stop 76
gcagtttgtgtttgctagtcttttt

SEQ ID NO: 39868 - DNA, 25 bp, Artificial
  probe
  misc_feature (1)..(25): SEQ ID NO: 4563; WAN024A22_at; Start 28; Stop 52
gatgaaacgataacaaagagactag

SEQ ID NO: 39869 - DNA, 25 bp, Artificial
  probe
  misc_feature (1)..(25): SEQ ID NO: 4563; WAN024A22_at; Start 17; Stop 41
taacaaagatagatgaaacgataac

SEQ ID NO: 39870 - DNA, 25 bp, Artificial
  probe
  misc_feature (1)..(25): SEQ ID NO: 4563; WAN024A22_at; Start 32; Stop 56
aaacgataacaaagagactagcagt

SEQ ID NO: 39871 - DNA, 25 bp, Artificial
  probe
  misc_feature (1)..(25): SEQ ID NO: 4563; WAN024A22_at; Start 18; Stop 42
aacaaagatagatgaaacgataaca

SEQ ID NO: 39872 - DNA, 25 bp, Artificial
  probe
  misc_feature (1)..(25): SEQ ID NO: 4563; WAN024A22_at; Start 23; Stop 47
agatagatgaaacgataacaaagag

SEQ ID NO: 39873 - DNA, 25 bp, Artificial
  probe
  misc_feature (1)..(25): SEQ ID NO: 4563; WAN024A22_at; Start 31; Stop 55
gaaacgataacaaagagactagcag

SEQ ID NO: 39874 - DNA, 25 bp, Artificial
  probe
  misc_feature (1)..(25): SEQ ID NO: 4563; WAN024A22_at; Start 12; Stop 36
tcttttaacaaagatagatgaaacg

SEQ ID NO: 39875 - DNA, 25 bp, Artificial
  probe
  misc_feature (1)..(25): SEQ ID NO: 4563; WAN024A22_at; Start 38; Stop 62
taacaaagagactagcagtttgtgt

SEQ ID NO: 39876 - DNA, 25 bp, Artificial
  probe
  misc_feature (1)..(25): SEQ ID NO: 4563; WAN024A22_at; Start 45; Stop 69
gagactagcagtttgtgtttgctag

SEQ ID NO: 39877 - DNA, 25 bp, Artificial
  probe
  misc_feature (1)..(25): SEQ ID NO: 4563; WAN024A22_at; Start 41; Stop 65
caaagagactagcagtttgtgtttg

SEQ ID NO: 39878 - DNA, 25 bp, Artificial
  probe
  misc_feature (1)..(25): SEQ ID NO: 4563; WAN024A22_at; Start 34; Stop 58
acgataacaaagagactagcagttt

SEQ ID NO: 39879 - DNA, 25 bp, Artificial
  probe
  misc_feature (1)..(25): SEQ ID NO: 4563; WAN024A22_at; Start 1; Stop 25
tatgtattctttcttttaacaaaga

SEQ ID NO: 39880 - DNA, 25 bp, Artificial
  probe
  misc_feature (1)..(25): SEQ ID NO: 4563; WAN024A22_at; Start 20; Stop 44
caaagatagatgaaacgataacaaa

SEQ ID NO: 39881 - DNA, 25 bp, Artificial
  probe
  misc_feature (1)..(25): SEQ ID NO: 4563; WAN024A22_at; Start 58; Stop 82
tgtgtttgctagtcttttttcgcta

SEQ ID NO: 39882 - DNA, 25 bp, Artificial
  probe
  misc_feature (1)..(25): SEQ ID NO: 4563; WAN024A22_at; Start 15; Stop 39
tttaacaaagatagatgaaacgata

SEQ ID NO: 39883 - DNA, 25 bp, Artificial
  probe
  misc_feature (1)..(25): SEQ ID NO: 4563; WAN024A22_at; Start 39; Stop 63
aacaaagagactagcagtttgtgtt

SEQ ID NO: 39884 - DNA, 25 bp, Artificial
  probe
  misc_feature (1)..(25): SEQ ID NO: 4563; WAN024A22_at; Start 36; Stop 60
gataacaaagagactagcagtttgt

SEQ ID NO: 39885 - DNA, 25 bp, Artificial
  probe
  misc_feature (1)..(25): SEQ ID NO: 4563; WAN024A22_at; Start 26; Stop 50
tagatgaaacgataacaaagagact

SEQ ID NO: 39886 - DNA, 25 bp, Artificial
  probe
  misc_feature (1)..(25): SEQ ID NO: 4563; WAN024A22_at; Start 29; Stop 53
atgaaacgataacaaagagactagc

SEQ ID NO: 39887 - DNA, 25 bp, Artificial
  probe
  misc_feature (1)..(25): SEQ ID NO: 4563; WAN024A22_at; Start 47; Stop 71
gactagcagtttgtgtttgctagtc

SEQ ID NO: 39888 - DNA, 25 bp, Artificial
  probe
  misc_feature (1)..(25): SEQ ID NO: 4563; WAN024A22_at; Start 42; Stop 66
aaagagactagcagtttgtgtttgc

SEQ ID NO: 39889 - DNA, 25 bp, Artificial
  probe
  misc_feature (1)..(25): SEQ ID NO: 4563; WAN024A22_at; Start 25; Stop 49
atagatgaaacgataacaaagagac

SEQ ID NO: 39890 - DNA, 25 bp, Artificial
  probe
  misc_feature (1)..(25): SEQ ID NO: 4563; WAN024A22_at; Start 92; Stop 116
ccataatggttcctaaaaactatca

SEQ ID NO: 39891 - DNA, 25 bp, Artificial
  probe
  misc_feature (1)..(25): SEQ ID NO: 4563; WAN024A22_at; Start 21; Stop 45
aaagatagatgaaacgataacaaag

SEQ ID NO: 39892 - DNA, 25 bp, Artificial
  probe
  misc_feature (1)..(25): SEQ ID NO: 4563; WAN024A22_at; Start 35; Stop 59
cgataacaaagagactagcagtttg

SEQ ID NO: 39893 - DNA, 25 bp, Artificial
  probe
  misc_feature (1)..(25): SEQ ID NO: 4692; WAN024A23_at; Start 42; Stop 66
aaaagactagcaaacacaaactgct

SEQ ID NO: 39894 - DNA, 25 bp, Artificial
  probe
  misc_feature (1)..(25): SEQ ID NO: 4692; WAN024A23_at; Start 40; Stop 64
aaaaaagactagcaaacacaaactg

SEQ ID NO: 39895 - DNA, 25 bp, Artificial
  probe
  misc_feature (1)..(25): SEQ ID NO: 4692; WAN024A23_at; Start 69; Stop 93
tctctttgttatcgtttcatctatc

SEQ ID NO: 39896 - DNA, 25 bp, Artificial
  probe
  misc_feature (1)..(25): SEQ ID NO: 4692; WAN024A23_at; Start 45; Stop 69
agactagcaaacacaaactgctagt

SEQ ID NO: 39897 - DNA, 25 bp, Artificial
  probe
  misc_feature (1)..(25): SEQ ID NO: 4692; WAN024A23_at; Start 80; Stop 104
tcgtttcatctatctttgttaaaag

SEQ ID NO: 39898 - DNA, 25 bp, Artificial
  probe
  misc_feature (1)..(25): SEQ ID NO: 4692; WAN024A23_at; Start 41; Stop 65
aaaaagactagcaaacacaaactgc

SEQ ID NO: 39899 - DNA, 25 bp, Artificial
  probe
  misc_feature (1)..(25): SEQ ID NO: 4692; WAN024A23_at; Start 35; Stop 59
tagcgaaaaaagactagcaaacaca

SEQ ID NO: 39900 - DNA, 25 bp, Artificial
  probe
  misc_feature (1)..(25): SEQ ID NO: 4692; WAN024A23_at; Start 61; Stop 85
actgctagtctctttgttatcgttt

SEQ ID NO: 39901 - DNA, 25 bp, Artificial
  probe
  misc_feature (1)..(25): SEQ ID NO: 4692; WAN024A23_at; Start 58; Stop 82
caaactgctagtctctttgttatcg

SEQ ID NO: 39902 - DNA, 25 bp, Artificial
  probe
  misc_feature (1)..(25): SEQ ID NO: 4692; WAN024A23_at; Start 65; Stop 89
ctagtctctttgttatcgtttcatc

SEQ ID NO: 39903 - DNA, 25 bp, Artificial
  probe
  misc_feature (1)..(25): SEQ ID NO: 4692; WAN024A23_at; Start 62; Stop 86
ctgctagtctctttgttatcgtttc

SEQ ID NO: 39904 - DNA, 25 bp, Artificial
  probe
  misc_feature (1)..(25): SEQ ID NO: 4692; WAN024A23_at; Start 43; Stop 67
aaagactagcaaacacaaactgcta

SEQ ID NO: 39905 - DNA, 25 bp, Artificial
  probe
  misc_feature (1)..(25): SEQ ID NO: 4692; WAN024A23_at; Start 49; Stop 73
tagcaaacacaaactgctagtctct

SEQ ID NO: 39906 - DNA, 25 bp, Artificial
  probe
  misc_feature (1)..(25): SEQ ID NO: 4692; WAN024A23_at; Start 1; Stop 25
tgatagtttttaggaaccattatgg

SEQ ID NO: 39907 - DNA, 25 bp, Artificial
  probe
  misc_feature (1)..(25): SEQ ID NO: 4692; WAN024A23_at; Start 44; Stop 68
aagactagcaaacacaaactgctag

SEQ ID NO: 39908 - DNA, 25 bp, Artificial
  probe
  misc_feature (1)..(25): SEQ ID NO: 4692; WAN024A23_at; Start 53; Stop 77
aaacacaaactgctagtctctttgt

SEQ ID NO: 39909 - DNA, 25 bp, Artificial
  probe
  misc_feature (1)..(25): SEQ ID NO: 4692; WAN024A23_at; Start 52; Stop 76
caaacacaaactgctagtctctttg

SEQ ID NO: 39910 - DNA, 25 bp, Artificial
  probe
  misc_feature (1)..(25): SEQ ID NO: 4692; WAN024A23_at; Start 82; Stop 106
gtttcatctatctttgttaaaagaa

SEQ ID NO: 39911 - DNA, 25 bp, Artificial
  probe
  misc_feature (1)..(25): SEQ ID NO: 4692; WAN024A23_at; Start 56; Stop 80
cacaaactgctagtctctttgttat

SEQ ID NO: 39912 - DNA, 25 bp, Artificial
  probe
  misc_feature (1)..(25): SEQ ID NO: 4692; WAN024A23_at; Start 33; Stop 57
tttagcgaaaaaagactagcaaaca

SEQ ID NO: 39913 - DNA, 25 bp, Artificial
  probe
  misc_feature (1)..(25): SEQ ID NO: 4692; WAN024A23_at; Start 51; Stop 75
gcaaacacaaactgctagtctcttt

SEQ ID NO: 39914 - DNA, 25 bp, Artificial
  probe
  misc_feature (1)..(25): SEQ ID NO: 4692; WAN024A23_at; Start 60; Stop 84
aactgctagtctctttgttatcgtt

SEQ ID NO: 39915 - DNA, 25 bp, Artificial
  probe
  misc_feature (1)..(25): SEQ ID NO: 4692; WAN024A23_at; Start 81; Stop 105
cgtttcatctatctttgttaaaaga

SEQ ID NO: 39916 - DNA, 25 bp, Artificial
  probe
  misc_feature (1)..(25): SEQ ID NO: 4692; WAN024A23_at; Start 54; Stop 78
aacacaaactgctagtctctttgtt

SEQ ID NO: 39917 - DNA, 25 bp, Artificial
  probe
  misc_feature (1)..(25): SEQ ID NO: 4692; WAN024A23_at; Start 37; Stop 61
gcgaaaaaagactagcaaacacaaa

SEQ ID NO: 39918 - DNA, 25 bp, Artificial
  probe
  misc_feature (1)..(25): SEQ ID NO: 4692; WAN024A23_at; Start 34; Stop 58
ttagcgaaaaaagactagcaaacac

SEQ ID NO: 39919 - DNA, 25 bp, Artificial
  probe
  misc_feature (1)..(25): SEQ ID NO: 4692; WAN024A23_at; Start 64; Stop 88
gctagtctctttgttatcgtttcat

SEQ ID NO: 39920 - DNA, 25 bp, Artificial
  probe
  misc_feature (1)..(25): SEQ ID NO: 4692; WAN024A23_at; Start 46; Stop 70
gactagcaaacacaaactgctagtc

SEQ ID NO: 39921 - DNA, 25 bp, Artificial
  probe
  misc_feature (1)..(25): SEQ ID NO: 4692; WAN024A23_at; Start 63; Stop 87
tgctagtctctttgttatcgtttca

SEQ ID NO: 39922 - DNA, 25 bp, Artificial
  probe
  misc_feature (1)..(25): SEQ ID NO: 4692; WAN024A23_at; Start 73; Stop 97
tttgttatcgtttcatctatctttg

SEQ ID NO: 39923 - DNA, 25 bp, Artificial
  probe
  misc_feature (1)..(25): SEQ ID NO: 4692; WAN024A23_at; Start 67; Stop 91
agtctctttgttatcgtttcatcta

SEQ ID NO: 39924 - DNA, 25 bp, Artificial
  probe
  misc_feature (1)..(25): SEQ ID NO: 4692; WAN024A23_at; Start 59; Stop 83
aaactgctagtctctttgttatcgt

SEQ ID NO: 39925 - DNA, 25 bp, Artificial
  probe
  misc_feature (1)..(25): SEQ ID NO: 4692; WAN024A23_at; Start 36; Stop 60
agcgaaaaaagactagcaaacacaa

SEQ ID NO: 39926 - DNA, 25 bp, Artificial
  probe
  misc_feature (1)..(25): SEQ ID NO: 4692; WAN024A23_at; Start 78; Stop 102
tatcgtttcatctatctttgttaaa

SEQ ID NO: 39927 - DNA, 25 bp, Artificial
  probe
  misc_feature (1)..(25): SEQ ID NO: 3599; WAN024A24_at; Start 35; Stop 59
taaaattccattgaaacagttgtct

SEQ ID NO: 39928 - DNA, 25 bp, Artificial
  probe
  misc_feature (1)..(25): SEQ ID NO: 3599; WAN024A24_at; Start 20; Stop 44
tacataatacaattttaaaattcca

SEQ ID NO: 39929 - DNA, 25 bp, Artificial
  probe
  misc_feature (1)..(25): SEQ ID NO: 3599; WAN024A24_at; Start 21; Stop 45
acataatacaattttaaaattccat

SEQ ID NO: 39930 - DNA, 25 bp, Artificial
  probe
  misc_feature (1)..(25): SEQ ID NO: 3599; WAN024A24_at; Start 23; Stop 47
ataatacaattttaaaattccattg

SEQ ID NO: 39931 - DNA, 25 bp, Artificial
  probe
  misc_feature (1)..(25): SEQ ID NO: 3599; WAN024A24_at; Start 12; Stop 36
tctctttttacataatacaatttta

SEQ ID NO: 39932 - DNA, 25 bp, Artificial
  probe
  misc_feature (1)..(25): SEQ ID NO: 3599; WAN024A24_at; Start 29; Stop 53
caattttaaaattccattgaaacag

SEQ ID NO: 39933 - DNA, 25 bp, Artificial
  probe
  misc_feature (1)..(25): SEQ ID NO: 3599; WAN024A24_at; Start 22; Stop 46
cataatacaattttaaaattccatt

SEQ ID NO: 39934 - DNA, 25 bp, Artificial
  probe
  misc_feature (1)..(25): SEQ ID NO: 3599; WAN024A24_at; Start 9; Stop 33
ctttctctttttacataatacaatt

SEQ ID NO: 39935 - DNA, 25 bp, Artificial
  probe
  misc_feature (1)..(25): SEQ ID NO: 3599; WAN024A24_at; Start 34; Stop 58
ttaaaattccattgaaacagttgtc

SEQ ID NO: 39936 - DNA, 25 bp, Artificial
  probe
  misc_feature (1)..(25): SEQ ID NO: 3599; WAN024A24_at; Start 24; Stop 48
taatacaattttaaaattccattga

SEQ ID NO: 39937 - DNA, 25 bp, Artificial
  probe
  misc_feature (1)..(25): SEQ ID NO: 416; WAN024A25_at; Start 7; Stop 31
ctgtttcaatggaattttaaaattg

SEQ ID NO: 39938 - DNA, 25 bp, Artificial
  probe
  misc_feature (1)..(25): SEQ ID NO: 416; WAN024A25_at; Start 35; Stop 59
tatgtaaaaagagaaaggaaatctc

SEQ ID NO: 39939 - DNA, 25 bp, Artificial
  probe
  misc_feature (1)..(25): SEQ ID NO: 416; WAN024A25_at; Start 27; Stop 51
aattgtattatgtaaaaagagaaag

SEQ ID NO: 39940 - DNA, 25 bp, Artificial
  probe
  misc_feature (1)..(25): SEQ ID NO: 416; WAN024A25_at; Start 29; Stop 53
ttgtattatgtaaaaagagaaagga

SEQ ID NO: 39941 - DNA, 25 bp, Artificial
  probe
  misc_feature (1)..(25): SEQ ID NO: 416; WAN024A25_at; Start 13; Stop 37
caatggaattttaaaattgtattat

SEQ ID NO: 39942 - DNA, 25 bp, Artificial
  probe
  misc_feature (1)..(25): SEQ ID NO: 416; WAN024A25_at; Start 1; Stop 25
agacaactgtttcaatggaatttta

SEQ ID NO: 39943 - DNA, 25 bp, Artificial
  probe
  misc_feature (1)..(25): SEQ ID NO: 416; WAN024A25_at; Start 2; Stop 26
gacaactgtttcaatggaattttaa

SEQ ID NO: 39944 - DNA, 25 bp, Artificial
  probe
  misc_feature (1)..(25): SEQ ID NO: 416; WAN024A25_at; Start 24; Stop 48
taaaattgtattatgtaaaaagaga

SEQ ID NO: 39945 - DNA, 25 bp, Artificial
  probe
  misc_feature (1)..(25): SEQ ID NO: 416; WAN024A25_at; Start 28; Stop 52
attgtattatgtaaaaagagaaagg

SEQ ID NO: 39946 - DNA, 25 bp, Artificial
  probe
  misc_feature (1)..(25): SEQ ID NO: 416; WAN024A25_at; Start 30; Stop 54
tgtattatgtaaaaagagaaaggaa

SEQ ID NO: 39947 - DNA, 25 bp, Artificial
  probe
  misc_feature (1)..(25): SEQ ID NO: 416; WAN024A25_at; Start 12; Stop 36
tcaatggaattttaaaattgtatta

SEQ ID NO: 39948 - DNA, 25 bp, Artificial
  probe
  misc_feature (1)..(25): SEQ ID NO: 160; WAN024A26_at; Start 112; Stop 136
gaaaaggtagctaccaatacaaatg

SEQ ID NO: 39949 - DNA, 25 bp, Artificial
  probe
  misc_feature (1)..(25): SEQ ID NO: 160; WAN024A26_at; Start 118; Stop 142
gtagctaccaatacaaatgatgagg

SEQ ID NO: 39950 - DNA, 25 bp, Artificial
  probe
  misc_feature (1)..(25): SEQ ID NO: 160; WAN024A26_at; Start 124; Stop 148
accaatacaaatgatgaggataaaa

SEQ ID NO: 39951 - DNA, 25 bp, Artificial
  probe
  misc_feature (1)..(25): SEQ ID NO: 160; WAN024A26_at; Start 98; Stop 122
ttctgacttaaaatgaaaaggtagc

SEQ ID NO: 39952 - DNA, 25 bp, Artificial
  probe
  misc_feature (1)..(25): SEQ ID NO: 160; WAN024A26_at; Start 1; Stop 25
aaatgaatgagctatctggccttaa

SEQ ID NO: 39953 - DNA, 25 bp, Artificial
  probe
  misc_feature (1)..(25): SEQ ID NO: 160; WAN024A26_at; Start 28; Stop 52
taaggtcagatagtttttagctaat

SEQ ID NO: 39954 - DNA, 25 bp, Artificial
  probe
  misc_feature (1)..(25): SEQ ID NO: 160; WAN024A26_at; Start 2; Stop 26
aatgaatgagctatctggccttaag

SEQ ID NO: 39955 - DNA, 25 bp, Artificial
  probe
  misc_feature (1)..(25): SEQ ID NO: 160; WAN024A26_at; Start 99; Stop 123
tctgacttaaaatgaaaaggtagct

SEQ ID NO: 39956 - DNA, 25 bp, Artificial
  probe
  misc_feature (1)..(25): SEQ ID NO: 160; WAN024A26_at; Start 115; Stop 139
aaggtagctaccaatacaaatgatg

SEQ ID NO: 39957 - DNA, 25 bp, Artificial
  probe
  misc_feature (1)..(25): SEQ ID NO: 160; WAN024A26_at; Start 94; Stop 118
tctgttctgacttaaaatgaaaagg

SEQ ID NO: 39958 - DNA, 25 bp, Artificial
  probe
  misc_feature (1)..(25): SEQ ID NO: 160; WAN024A26_at; Start 91; Stop 115
cattctgttctgacttaaaatgaaa

SEQ ID NO: 39959 - DNA, 25 bp, Artificial
  probe
  misc_feature (1)..(25): SEQ ID NO: 160; WAN024A26_at; Start 26; Stop 50
gttaaggtcagatagtttttagcta

SEQ ID NO: 39960 - DNA, 25 bp, Artificial
  probe
  misc_feature (1)..(25): SEQ ID NO: 160; WAN024A26_at; Start 9; Stop 33
gagctatctggccttaagttaaggt

SEQ ID NO: 39961 - DNA, 25 bp, Artificial
  probe
  misc_feature (1)..(25): SEQ ID NO: 160; WAN024A26_at; Start 17; Stop 41
tggccttaagttaaggtcagatagt

SEQ ID NO: 39962 - DNA, 25 bp, Artificial
  probe
  misc_feature (1)..(25): SEQ ID NO: 160; WAN024A26_at; Start 121; Stop 145
gctaccaatacaaatgatgaggata

SEQ ID NO: 39963 - DNA, 25 bp, Artificial
  probe
  misc_feature (1)..(25): SEQ ID NO: 160; WAN024A26_at; Start 6; Stop 30
aatgagctatctggccttaagttaa

SEQ ID NO: 39964 - DNA, 25 bp, Artificial
  probe
  misc_feature (1)..(25): SEQ ID NO: 160; WAN024A26_at; Start 106; Stop 130
taaaatgaaaaggtagctaccaata

SEQ ID NO: 39965 - DNA, 25 bp, Artificial
  probe
  misc_feature (1)..(25): SEQ ID NO: 160; WAN024A26_at; Start 81; Stop 105
tcttgtgcttcattctgttctgact

SEQ ID NO: 39966 - DNA, 25 bp, Artificial
  probe
  misc_feature (1)..(25): SEQ ID NO: 160; WAN024A26_at; Start 117; Stop 141
ggtagctaccaatacaaatgatgag

SEQ ID NO: 39967 - DNA, 25 bp, Artificial
  probe
  misc_feature (1)..(25): SEQ ID NO: 160; WAN024A26_at; Start 79; Stop 103
tatcttgtgcttcattctgttctga

SEQ ID NO: 39968 - DNA, 25 bp, Artificial
  probe
  misc_feature (1)..(25): SEQ ID NO: 160; WAN024A26_at; Start 108; Stop 132
aaatgaaaaggtagctaccaataca

SEQ ID NO: 39969 - DNA, 25 bp, Artificial
  probe
  misc_feature (1)..(25): SEQ ID NO: 160; WAN024A26_at; Start 13; Stop 37
tatctggccttaagttaaggtcaga

SEQ ID NO: 39970 - DNA, 25 bp, Artificial
  probe
  misc_feature (1)..(25): SEQ ID NO: 160; WAN024A26_at; Start 10; Stop 34
agctatctggccttaagttaaggtc

SEQ ID NO: 39971 - DNA, 25 bp, Artificial
  probe
  misc_feature (1)..(25): SEQ ID NO: 160; WAN024A26_at; Start 5; Stop 29
gaatgagctatctggccttaagtta

SEQ ID NO: 39972 - DNA, 25 bp, Artificial
  probe
  misc_feature (1)..(25): SEQ ID NO: 160; WAN024A26_at; Start 101; Stop 125
tgacttaaaatgaaaaggtagctac

SEQ ID NO: 39973 - DNA, 25 bp, Artificial
  probe
  misc_feature (1)..(25): SEQ ID NO: 160; WAN024A26_at; Start 87; Stop 111
gcttcattctgttctgacttaaaat

SEQ ID NO: 39974 - DNA, 25 bp, Artificial
  probe
  misc_feature (1)..(25): SEQ ID NO: 160; WAN024A26_at; Start 11; Stop 35
gctatctggccttaagttaaggtca

SEQ ID NO: 39975 - DNA, 25 bp, Artificial
  probe
  misc_feature (1)..(25): SEQ ID NO: 160; WAN024A26_at; Start 4; Stop 28
tgaatgagctatctggccttaagtt

SEQ ID NO: 39976 - DNA, 25 bp, Artificial
  probe
  misc_feature (1)..(25): SEQ ID NO: 160; WAN024A26_at; Start 119; Stop 143
tagctaccaatacaaatgatgagga

SEQ ID NO: 39977 - DNA, 25 bp, Artificial
  probe
  misc_feature (1)..(25): SEQ ID NO: 160; WAN024A26_at; Start 64; Stop 88
caattatagtttttttatcttgtgc

SEQ ID NO: 39978 - DNA, 25 bp, Artificial
  probe
  misc_feature (1)..(25): SEQ ID NO: 160; WAN024A26_at; Start 84; Stop 108
tgtgcttcattctgttctgacttaa

SEQ ID NO: 39979 - DNA, 25 bp, Artificial
  probe
  misc_feature (1)..(25): SEQ ID NO: 160; WAN024A26_at; Start 15; Stop 39
tctggccttaagttaaggtcagata

SEQ ID NO: 39980 - DNA, 25 bp, Artificial
  probe
  misc_feature (1)..(25): SEQ ID NO: 160; WAN024A26_at; Start 96; Stop 120
tgttctgacttaaaatgaaaaggta

SEQ ID NO: 39981 - DNA, 25 bp, Artificial
  probe
  misc_feature (1)..(25): SEQ ID NO: 160; WAN024A26_at; Start 123; Stop 147
taccaatacaaatgatgaggataaa

SEQ ID NO: 39982 - DNA, 25 bp, Artificial
  probe
  misc_feature (1)..(25): SEQ ID NO: 5871; WAN024A27_at; Start 100; Stop 124
attagctaaaaactatctgacctta

SEQ ID NO: 39983 - DNA, 25 bp, Artificial
  probe
  misc_feature (1)..(25): SEQ ID NO: 5871; WAN024A27_at; Start 44; Stop 68
ttaagtcagaacagaatgaagcaca

SEQ ID NO: 39984 - DNA, 25 bp, Artificial
  probe
  misc_feature (1)..(25): SEQ ID NO: 5871; WAN024A27_at; Start 117; Stop 141
tgaccttaacttaaggccagatagc

SEQ ID NO: 39985 - DNA, 25 bp, Artificial
  probe
  misc_feature (1)..(25): SEQ ID NO: 5871; WAN024A27_at; Start 50; Stop 74
cagaacagaatgaagcacaagataa

SEQ ID NO: 39986 - DNA, 25 bp, Artificial
  probe
  misc_feature (1)..(25): SEQ ID NO: 5871; WAN024A27_at; Start 123; Stop 147
taacttaaggccagatagctcattc

SEQ ID NO: 39987 - DNA, 25 bp, Artificial
  probe
  misc_feature (1)..(25): SEQ ID NO: 5871; WAN024A27_at; Start 111; Stop 135
actatctgaccttaacttaaggcca

SEQ ID NO: 39988 - DNA, 25 bp, Artificial
  probe
  misc_feature (1)..(25): SEQ ID NO: 5871; WAN024A27_at; Start 127; Stop 151
ttaaggccagatagctcattcattt

SEQ ID NO: 39989 - DNA, 25 bp, Artificial
  probe
  misc_feature (1)..(25): SEQ ID NO: 5871; WAN024A27_at; Start 118; Stop 142
gaccttaacttaaggccagatagct

SEQ ID NO: 39990 - DNA, 25 bp, Artificial
  probe
  misc_feature (1)..(25): SEQ ID NO: 5871; WAN024A27_at; Start 122; Stop 146
ttaacttaaggccagatagctcatt

SEQ ID NO: 39991 - DNA, 25 bp, Artificial
  probe
  misc_feature (1)..(25): SEQ ID NO: 5871; WAN024A27_at; Start 102; Stop 126
tagctaaaaactatctgaccttaac

SEQ ID NO: 39992 - DNA, 25 bp, Artificial
  probe
  misc_feature (1)..(25): SEQ ID NO: 5871; WAN024A27_at; Start 52; Stop 76
gaacagaatgaagcacaagataaaa

SEQ ID NO: 39993 - DNA, 25 bp, Artificial
  probe
  misc_feature (1)..(25): SEQ ID NO: 5871; WAN024A27_at; Start 54; Stop 78
acagaatgaagcacaagataaaaaa

SEQ ID NO: 39994 - DNA, 25 bp, Artificial
  probe
  misc_feature (1)..(25): SEQ ID NO: 5871; WAN024A27_at; Start 30; Stop 54
gctaccttttcattttaagtcagaa

SEQ ID NO: 39995 - DNA, 25 bp, Artificial
  probe
  misc_feature (1)..(25): SEQ ID NO: 5871; WAN024A27_at; Start 9; Stop 33
tcctcatcatttgtattggtagcta

SEQ ID NO: 39996 - DNA, 25 bp, Artificial
  probe
  misc_feature (1)..(25): SEQ ID NO: 5871; WAN024A27_at; Start 61; Stop 85
gaagcacaagataaaaaaactataa

SEQ ID NO: 39997 - DNA, 25 bp, Artificial
  probe
  misc_feature (1)..(25): SEQ ID NO: 5871; WAN024A27_at; Start 34; Stop 58
ccttttcattttaagtcagaacaga

SEQ ID NO: 39998 - DNA, 25 bp, Artificial
  probe
  misc_feature (1)..(25): SEQ ID NO: 5871; WAN024A27_at; Start 12; Stop 36
tcatcatttgtattggtagctacct

SEQ ID NO: 39999 - DNA, 25 bp, Artificial
  probe
  misc_feature (1)..(25): SEQ ID NO: 5871; WAN024A27_at; Start 3; Stop 27
gttttatcctcatcatttgtattgg

SEQ ID NO: 40000 - DNA, 25 bp, Artificial
  probe
  misc_feature (1)..(25): SEQ ID NO: 5871; WAN024A27_at; Start 119; Stop 143
accttaacttaaggccagatagctc

SEQ ID NO: 40001 - DNA, 25 bp, Artificial
  probe
  misc_feature (1)..(25): SEQ ID NO: 5871; WAN024A27_at; Start 42; Stop 66
ttttaagtcagaacagaatgaagca

SEQ ID NO: 40002 - DNA, 25 bp, Artificial
  probe
  misc_feature (1)..(25): SEQ ID NO: 5871; WAN024A27_at; Start 45; Stop 69
taagtcagaacagaatgaagcacaa

SEQ ID NO: 40003 - DNA, 25 bp, Artificial
  probe
  misc_feature (1)..(25): SEQ ID NO: 5871; WAN024A27_at; Start 40; Stop 64
cattttaagtcagaacagaatgaag

SEQ ID NO: 40004 - DNA, 25 bp, Artificial
  probe
  misc_feature (1)..(25): SEQ ID NO: 5871; WAN024A27_at; Start 11; Stop 35
ctcatcatttgtattggtagctacc

SEQ ID NO: 40005 - DNA, 25 bp, Artificial
  probe
  misc_feature (1)..(25): SEQ ID NO: 5871; WAN024A27_at; Start 126; Stop 150
cttaaggccagatagctcattcatt

SEQ ID NO: 40006 - DNA, 25 bp, Artificial
  probe
  misc_feature (1)..(25): SEQ ID NO: 5871; WAN024A27_at; Start 13; Stop 37
catcatttgtattggtagctacctt

SEQ ID NO: 40007 - DNA, 25 bp, Artificial
  probe
  misc_feature (1)..(25): SEQ ID NO: 5871; WAN024A27_at; Start 32; Stop 56
taccttttcattttaagtcagaaca

SEQ ID NO: 40008 - DNA, 25 bp, Artificial
  probe
  misc_feature (1)..(25): SEQ ID NO: 5871; WAN024A27_at; Start 43; Stop 67
tttaagtcagaacagaatgaagcac

SEQ ID NO: 40009 - DNA, 25 bp, Artificial
  probe
  misc_feature (1)..(25): SEQ ID NO: 5871; WAN024A27_at; Start 113; Stop 137
tatctgaccttaacttaaggccaga

SEQ ID NO: 40010 - DNA, 25 bp, Artificial
  probe
  misc_feature (1)..(25): SEQ ID NO: 5871; WAN024A27_at; Start 46; Stop 70
aagtcagaacagaatgaagcacaag

SEQ ID NO: 40011 - DNA, 25 bp, Artificial
  probe
  misc_feature (1)..(25): SEQ ID NO: 5871; WAN024A27_at; Start 124; Stop 148
aacttaaggccagatagctcattca

SEQ ID NO: 40012 - DNA, 25 bp, Artificial
  probe
  misc_feature (1)..(25): SEQ ID NO: 5871; WAN024A27_at; Start 16; Stop 40
catttgtattggtagctaccttttc

SEQ ID NO: 40013 - DNA, 25 bp, Artificial
  probe
  misc_feature (1)..(25): SEQ ID NO: 5871; WAN024A27_at; Start 7; Stop 31
tatcctcatcatttgtattggtagc

SEQ ID NO: 40014 - DNA, 25 bp, Artificial
  probe
  misc_feature (1)..(25): SEQ ID NO: 5871; WAN024A27_at; Start 48; Stop 72
gtcagaacagaatgaagcacaagat

SEQ ID NO: 40015 - DNA, 25 bp, Artificial
  probe
  misc_feature (1)..(25): SEQ ID NO: 5871; WAN024A27_at; Start 28; Stop 52
tagctaccttttcattttaagtcag

SEQ ID NO: 40016 - DNA, 25 bp, Artificial
  probe
  misc_feature (1)..(25): SEQ ID NO: 5929; WAN024A28_at; Start 57; Stop 81
aagtcaagttttaactgcttgtaga

SEQ ID NO: 40017 - DNA, 25 bp, Artificial
  probe
  misc_feature (1)..(25): SEQ ID NO: 5929; WAN024A28_at; Start 70; Stop 94
actgcttgtagaaatacttaaatta

SEQ ID NO: 40018 - DNA, 25 bp, Artificial
  probe
  misc_feature (1)..(25): SEQ ID NO: 5929; WAN024A28_at; Start 94; Stop 118
atgctatgatgggagaaactagtca

SEQ ID NO: 40019 - DNA, 25 bp, Artificial
  probe
  misc_feature (1)..(25): SEQ ID NO: 5929; WAN024A28_at; Start 95; Stop 119
tgctatgatgggagaaactagtcag

SEQ ID NO: 40020 - DNA, 25 bp, Artificial
  probe
  misc_feature (1)..(25): SEQ ID NO: 5929; WAN024A28_at; Start 92; Stop 116
ttatgctatgatgggagaaactagt

SEQ ID NO: 40021 - DNA, 25 bp, Artificial
  probe
  misc_feature (1)..(25): SEQ ID NO: 5929; WAN024A28_at; Start 53; Stop 77
cacaaagtcaagttttaactgcttg

SEQ ID NO: 40022 - DNA, 25 bp, Artificial
  probe
  misc_feature (1)..(25): SEQ ID NO: 5929; WAN024A28_at; Start 55; Stop 79
caaagtcaagttttaactgcttgta

SEQ ID NO: 40023 - DNA, 25 bp, Artificial
  probe
  misc_feature (1)..(25): SEQ ID NO: 5929; WAN024A28_at; Start 73; Stop 97
gcttgtagaaatacttaaattatgc

SEQ ID NO: 40024 - DNA, 25 bp, Artificial
  probe
  misc_feature (1)..(25): SEQ ID NO: 5929; WAN024A28_at; Start 104; Stop 128
gggagaaactagtcagaaatgagga

SEQ ID NO: 40025 - DNA, 25 bp, Artificial
  probe
  misc_feature (1)..(25): SEQ ID NO: 5929; WAN024A28_at; Start 106; Stop 130
gagaaactagtcagaaatgaggaaa

SEQ ID NO: 40026 - DNA, 25 bp, Artificial
  probe
  misc_feature (1)..(25): SEQ ID NO: 5929; WAN024A28_at; Start 84; Stop 108
tacttaaattatgctatgatgggag

SEQ ID NO: 40027 - DNA, 25 bp, Artificial
  probe
  misc_feature (1)..(25): SEQ ID NO: 5929; WAN024A28_at; Start 68; Stop 92
taactgcttgtagaaatacttaaat

SEQ ID NO: 40028 - DNA, 25 bp, Artificial
  probe
  misc_feature (1)..(25): SEQ ID NO: 5929; WAN024A28_at; Start 98; Stop 122
tatgatgggagaaactagtcagaaa

SEQ ID NO: 40029 - DNA, 25 bp, Artificial
  probe
  misc_feature (1)..(25): SEQ ID NO: 5929; WAN024A28_at; Start 89; Stop 113
aaattatgctatgatgggagaaact

SEQ ID NO: 40030 - DNA, 25 bp, Artificial
  probe
  misc_feature (1)..(25): SEQ ID NO: 5929; WAN024A28_at; Start 103; Stop 127
tgggagaaactagtcagaaatgagg

SEQ ID NO: 40031 - DNA, 25 bp, Artificial
  probe
  misc_feature (1)..(25): SEQ ID NO: 5929; WAN024A28_at; Start 100; Stop 124
tgatgggagaaactagtcagaaatg

SEQ ID NO: 40032 - DNA, 25 bp, Artificial
  probe
  misc_feature (1)..(25): SEQ ID NO: 5929; WAN024A28_at; Start 90; Stop 114
aattatgctatgatgggagaaacta

SEQ ID NO: 40033 - DNA, 25 bp, Artificial
  probe
  misc_feature (1)..(25): SEQ ID NO: 5929; WAN024A28_at; Start 86; Stop 110
cttaaattatgctatgatgggagaa

SEQ ID NO: 40034 - DNA, 25 bp, Artificial
  probe
  misc_feature (1)..(25): SEQ ID NO: 5929; WAN024A28_at; Start 65; Stop 89
ttttaactgcttgtagaaatactta

SEQ ID NO: 40035 - DNA, 25 bp, Artificial
  probe
  misc_feature (1)..(25): SEQ ID NO: 5929; WAN024A28_at; Start 110; Stop 134
aactagtcagaaatgaggaaaaaag

SEQ ID NO: 40036 - DNA, 25 bp, Artificial
  probe
  misc_feature (1)..(25): SEQ ID NO: 5929; WAN024A28_at; Start 61; Stop 85
caagttttaactgcttgtagaaata

SEQ ID NO: 40037 - DNA, 25 bp, Artificial
  probe
  misc_feature (1)..(25): SEQ ID NO: 5929; WAN024A28_at; Start 97; Stop 121
ctatgatgggagaaactagtcagaa

SEQ ID NO: 40038 - DNA, 25 bp, Artificial
  probe
  misc_feature (1)..(25): SEQ ID NO: 5929; WAN024A28_at; Start 51; Stop 75
aacacaaagtcaagttttaactgct

SEQ ID NO: 40039 - DNA, 25 bp, Artificial
  probe
  misc_feature (1)..(25): SEQ ID NO: 5929; WAN024A28_at; Start 101; Stop 125
gatgggagaaactagtcagaaatga

SEQ ID NO: 40040 - DNA, 25 bp, Artificial
  probe
  misc_feature (1)..(25): SEQ ID NO: 5929; WAN024A28_at; Start 96; Stop 120
gctatgatgggagaaactagtcaga

SEQ ID NO: 40041 - DNA, 25 bp, Artificial
  probe
  misc_feature (1)..(25): SEQ ID NO: 5929; WAN024A28_at; Start 63; Stop 87
agttttaactgcttgtagaaatact

SEQ ID NO: 40042 - DNA, 25 bp, Artificial
  probe
  misc_feature (1)..(25): SEQ ID NO: 5929; WAN024A28_at; Start 58; Stop 82
agtcaagttttaactgcttgtagaa

SEQ ID NO: 40043 - DNA, 25 bp, Artificial
  probe
  misc_feature (1)..(25): SEQ ID NO: 5929; WAN024A28_at; Start 108; Stop 132
gaaactagtcagaaatgaggaaaaa

SEQ ID NO: 40044 - DNA, 25 bp, Artificial
  probe
  misc_feature (1)..(25): SEQ ID NO: 5929; WAN024A28_at; Start 105; Stop 129
ggagaaactagtcagaaatgaggaa

SEQ ID NO: 40045 - DNA, 25 bp, Artificial
  probe
  misc_feature (1)..(25): SEQ ID NO: 5929; WAN024A28_at; Start 102; Stop 126
atgggagaaactagtcagaaatgag

SEQ ID NO: 40046 - DNA, 25 bp, Artificial
  probe
  misc_feature (1)..(25): SEQ ID NO: 5929; WAN024A28_at; Start 59; Stop 83
gtcaagttttaactgcttgtagaaa

SEQ ID NO: 40047 - DNA, 25 bp, Artificial
  probe
  misc_feature (1)..(25): SEQ ID NO: 5929; WAN024A28_at; Start 85; Stop 109
acttaaattatgctatgatgggaga

SEQ ID NO: 40048 - DNA, 25 bp, Artificial
  probe
  misc_feature (1)..(25): SEQ ID NO: 5929; WAN024A28_at; Start 88; Stop 112
taaattatgctatgatgggagaaac

SEQ ID NO: 40049 - DNA, 25 bp, Artificial
  probe
  misc_feature (1)..(25): SEQ ID NO: 5929; WAN024A28_at; Start 24; Stop 48
ttgataactagattataaaataaca

SEQ ID NO: 40050 - DNA, 25 bp, Artificial
  probe
  misc_feature (1)..(25): SEQ ID NO: 3516; WAN024A29_at; Start 10; Stop 34
tcatttctgactagtttctcccatc

SEQ ID NO: 40051 - DNA, 25 bp, Artificial
  probe
  misc_feature (1)..(25): SEQ ID NO: 3516; WAN024A29_at; Start 14; Stop 38
ttctgactagtttctcccatcatag

SEQ ID NO: 40052 - DNA, 25 bp, Artificial
  probe
  misc_feature (1)..(25): SEQ ID NO: 3516; WAN024A29_at; Start 90; Stop 114
tattttataatctagttatcaaaac

SEQ ID NO: 40053 - DNA, 25 bp, Artificial
  probe
  misc_feature (1)..(25): SEQ ID NO: 3516; WAN024A29_at; Start 27; Stop 51
ctcccatcatagcataatttaagta

SEQ ID NO: 40054 - DNA, 25 bp, Artificial
  probe
  misc_feature (1)..(25): SEQ ID NO: 3516; WAN024A29_at; Start 34; Stop 58
catagcataatttaagtatttctac

SEQ ID NO: 40055 - DNA, 25 bp, Artificial
  probe
  misc_feature (1)..(25): SEQ ID NO: 3516; WAN024A29_at; Start 25; Stop 49
ttctcccatcatagcataatttaag

SEQ ID NO: 40056 - DNA, 25 bp, Artificial
  probe
  misc_feature (1)..(25): SEQ ID NO: 3516; WAN024A29_at; Start 41; Stop 65
taatttaagtatttctacaagcagt

SEQ ID NO: 40057 - DNA, 25 bp, Artificial
  probe
  misc_feature (1)..(25): SEQ ID NO: 3516; WAN024A29_at; Start 8; Stop 32
cctcatttctgactagtttctccca

SEQ ID NO: 40058 - DNA, 25 bp, Artificial
  probe
  misc_feature (1)..(25): SEQ ID NO: 3516; WAN024A29_at; Start 17; Stop 41
tgactagtttctcccatcatagcat

SEQ ID NO: 40059 - DNA, 25 bp, Artificial
  probe
  misc_feature (1)..(25): SEQ ID NO: 3516; WAN024A29_at; Start 9; Stop 33
ctcatttctgactagtttctcccat

SEQ ID NO: 40060 - DNA, 25 bp, Artificial
  probe
  misc_feature (1)..(25): SEQ ID NO: 3516; WAN024A29_at; Start 15; Stop 39
tctgactagtttctcccatcatagc

SEQ ID NO: 40061 - DNA, 25 bp, Artificial
  probe
  misc_feature (1)..(25): SEQ ID NO: 3516; WAN024A29_at; Start 21; Stop 45
tagtttctcccatcatagcataatt

SEQ ID NO: 40062 - DNA, 25 bp, Artificial
  probe
  misc_feature (1)..(25): SEQ ID NO: 3516; WAN024A29_at; Start 26; Stop 50
tctcccatcatagcataatttaagt

SEQ ID NO: 40063 - DNA, 25 bp, Artificial
  probe
  misc_feature (1)..(25): SEQ ID NO: 3516; WAN024A29_at; Start 48; Stop 72
agtatttctacaagcagttaaaact

SEQ ID NO: 40064 - DNA, 25 bp, Artificial
  probe
  misc_feature (1)..(25): SEQ ID NO: 3516; WAN024A29_at; Start 60; Stop 84
agcagttaaaacttgactttgtgtt

SEQ ID NO: 40065 - DNA, 25 bp, Artificial
  probe
  misc_feature (1)..(25): SEQ ID NO: 3516; WAN024A29_at; Start 28; Stop 52
tcccatcatagcataatttaagtat

SEQ ID NO: 40066 - DNA, 25 bp, Artificial
  probe
  misc_feature (1)..(25): SEQ ID NO: 3516; WAN024A29_at; Start 54; Stop 78
tctacaagcagttaaaacttgactt

SEQ ID NO: 40067 - DNA, 25 bp, Artificial
  probe
  misc_feature (1)..(25): SEQ ID NO: 3516; WAN024A29_at; Start 11; Stop 35
catttctgactagtttctcccatca

SEQ ID NO: 40068 - DNA, 25 bp, Artificial
  probe
  misc_feature (1)..(25): SEQ ID NO: 3516; WAN024A29_at; Start 58; Stop 82
caagcagttaaaacttgactttgtg

SEQ ID NO: 40069 - DNA, 25 bp, Artificial
  probe
  misc_feature (1)..(25): SEQ ID NO: 3516; WAN024A29_at; Start 19; Stop 43
actagtttctcccatcatagcataa

SEQ ID NO: 40070 - DNA, 25 bp, Artificial
  probe
  misc_feature (1)..(25): SEQ ID NO: 3516; WAN024A29_at; Start 52; Stop 76
tttctacaagcagttaaaacttgac

SEQ ID NO: 40071 - DNA, 25 bp, Artificial
  probe
  misc_feature (1)..(25): SEQ ID NO: 3516; WAN024A29_at; Start 31; Stop 55
catcatagcataatttaagtatttc

SEQ ID NO: 40072 - DNA, 25 bp, Artificial
  probe
  misc_feature (1)..(25): SEQ ID NO: 3516; WAN024A29_at; Start 1; Stop 25
cttttttcctcatttctgactagtt

SEQ ID NO: 40073 - DNA, 25 bp, Artificial
  probe
  misc_feature (1)..(25): SEQ ID NO: 3516; WAN024A29_at; Start 5; Stop 29
tttcctcatttctgactagtttctc

SEQ ID NO: 40074 - DNA, 25 bp, Artificial
  probe
  misc_feature (1)..(25): SEQ ID NO: 3516; WAN024A29_at; Start 7; Stop 31
tcctcatttctgactagtttctccc

SEQ ID NO: 40075 - DNA, 25 bp, Artificial
  probe
  misc_feature (1)..(25): SEQ ID NO: 3516; WAN024A29_at; Start 50; Stop 74
tatttctacaagcagttaaaacttg

SEQ ID NO: 40076 - DNA, 25 bp, Artificial
  probe
  misc_feature (1)..(25): SEQ ID NO: 3516; WAN024A29_at; Start 23; Stop 47
gtttctcccatcatagcataattta

SEQ ID NO: 40077 - DNA, 25 bp, Artificial
  probe
  misc_feature (1)..(25): SEQ ID NO: 3516; WAN024A29_at; Start 38; Stop 62
gcataatttaagtatttctacaagc

SEQ ID NO: 40078 - DNA, 25 bp, Artificial
  probe
  misc_feature (1)..(25): SEQ ID NO: 3516; WAN024A29_at; Start 46; Stop 70
taagtatttctacaagcagttaaaa

SEQ ID NO: 40079 - DNA, 25 bp, Artificial
  probe
  misc_feature (1)..(25): SEQ ID NO: 3516; WAN024A29_at; Start 16; Stop 40
ctgactagtttctcccatcatagca

SEQ ID NO: 40080 - DNA, 25 bp, Artificial
  probe
  misc_feature (1)..(25): SEQ ID NO: 3516; WAN024A29_at; Start 56; Stop 80
tacaagcagttaaaacttgactttg

SEQ ID NO: 40081 - DNA, 25 bp, Artificial
  probe
  misc_feature (1)..(25): SEQ ID NO: 3516; WAN024A29_at; Start 43; Stop 67
atttaagtatttctacaagcagtta

SEQ ID NO: 40082 - DNA, 25 bp, Artificial
  probe
  misc_feature (1)..(25): SEQ ID NO: 3516; WAN024A29_at; Start 39; Stop 63
cataatttaagtatttctacaagca

SEQ ID NO: 40083 - DNA, 25 bp, Artificial
  probe
  misc_feature (1)..(25): SEQ ID NO: 3516; WAN024A29_at; Start 53; Stop 77
ttctacaagcagttaaaacttgact

SEQ ID NO: 40084 - DNA, 25 bp, Artificial
  probe
  misc_feature (1)..(25): SEQ ID NO: 4542; WAN024A2A_at; Start 20; Stop 44
ctcagttagttggactagctgagtt

SEQ ID NO: 40085 - DNA, 25 bp, Artificial
  probe
  misc_feature (1)..(25): SEQ ID NO: 4542; WAN024A2A_at; Start 21; Stop 45
tcagttagttggactagctgagttt

SEQ ID NO: 40086 - DNA, 25 bp, Artificial
  probe
  misc_feature (1)..(25): SEQ ID NO: 4542; WAN024A2A_at; Start 24; Stop 48
gttagttggactagctgagtttact

SEQ ID NO: 40087 - DNA, 25 bp, Artificial
  probe
  misc_feature (1)..(25): SEQ ID NO: 4542; WAN024A2A_at; Start 26; Stop 50
tagttggactagctgagtttactct

SEQ ID NO: 40088 - DNA, 25 bp, Artificial
  probe
  misc_feature (1)..(25): SEQ ID NO: 4542; WAN024A2A_at; Start 23; Stop 47
agttagttggactagctgagtttac

SEQ ID NO: 40089 - DNA, 25 bp, Artificial
  probe
  misc_feature (1)..(25): SEQ ID NO: 4542; WAN024A2A_at; Start 5; Stop 29
atagataaaggaaaactcagttagt

SEQ ID NO: 40090 - DNA, 25 bp, Artificial
  probe
  misc_feature (1)..(25): SEQ ID NO: 4542; WAN024A2A_at; Start 4; Stop 28
aatagataaaggaaaactcagttag

SEQ ID NO: 40091 - DNA, 25 bp, Artificial
  probe
  misc_feature (1)..(25): SEQ ID NO: 4542; WAN024A2A_at; Start 15; Stop 39
gaaaactcagttagttggactagct

SEQ ID NO: 40092 - DNA, 25 bp, Artificial
  probe
  misc_feature (1)..(25): SEQ ID NO: 4542; WAN024A2A_at; Start 13; Stop 37
aggaaaactcagttagttggactag

SEQ ID NO: 40093 - DNA, 25 bp, Artificial
  probe
  misc_feature (1)..(25): SEQ ID NO: 4542; WAN024A2A_at; Start 19; Stop 43
actcagttagttggactagctgagt

SEQ ID NO: 40094 - DNA, 25 bp, Artificial
  probe
  misc_feature (1)..(25): SEQ ID NO: 4542; WAN024A2A_at; Start 16; Stop 40
aaaactcagttagttggactagctg

SEQ ID NO: 40095 - DNA, 25 bp, Artificial
  probe
  misc_feature (1)..(25): SEQ ID NO: 4542; WAN024A2A_at; Start 14; Stop 38
ggaaaactcagttagttggactagc

SEQ ID NO: 40096 - DNA, 25 bp, Artificial
  probe
  misc_feature (1)..(25): SEQ ID NO: 4542; WAN024A2A_at; Start 7; Stop 31
agataaaggaaaactcagttagttg

SEQ ID NO: 40097 - DNA, 25 bp, Artificial
  probe
  misc_feature (1)..(25): SEQ ID NO: 4542; WAN024A2A_at; Start 17; Stop 41
aaactcagttagttggactagctga

SEQ ID NO: 40098 - DNA, 25 bp, Artificial
  probe
  misc_feature (1)..(25): SEQ ID NO: 4542; WAN024A2A_at; Start 18; Stop 42
aactcagttagttggactagctgag

SEQ ID NO: 40099 - DNA, 25 bp, Artificial
  probe
  misc_feature (1)..(25): SEQ ID NO: 4542; WAN024A2A_at; Start 27; Stop 51
agttggactagctgagtttactctt

SEQ ID NO: 40100 - DNA, 25 bp, Artificial
  probe
  misc_feature (1)..(25): SEQ ID NO: 4542; WAN024A2A_at; Start 22; Stop 46
cagttagttggactagctgagttta

SEQ ID NO: 40101 - DNA, 25 bp, Artificial
  probe
  misc_feature (1)..(25): SEQ ID NO: 4542; WAN024A2A_at; Start 25; Stop 49
ttagttggactagctgagtttactc

SEQ ID NO: 40102 - DNA, 25 bp, Artificial
  probe
  misc_feature (1)..(25): SEQ ID NO: 4846; WAN024A2B_at; Start 37; Stop 61
actaactgagttttcctttatctat

SEQ ID NO: 40103 - DNA, 25 bp, Artificial
  probe
  misc_feature (1)..(25): SEQ ID NO: 4846; WAN024A2B_at; Start 19; Stop 43
gtaaactcagctagtccaactaact

SEQ ID NO: 40104 - DNA, 25 bp, Artificial
  probe
  misc_feature (1)..(25): SEQ ID NO: 4846; WAN024A2B_at; Start 15; Stop 39
aagagtaaactcagctagtccaact

SEQ ID NO: 40105 - DNA, 25 bp, Artificial
  probe
  misc_feature (1)..(25): SEQ ID NO: 4846; WAN024A2B_at; Start 22; Stop 46
aactcagctagtccaactaactgag

SEQ ID NO: 40106 - DNA, 25 bp, Artificial
  probe
  misc_feature (1)..(25): SEQ ID NO: 4846; WAN024A2B_at; Start 26; Stop 50
cagctagtccaactaactgagtttt

SEQ ID NO: 40107 - DNA, 25 bp, Artificial
  probe
  misc_feature (1)..(25): SEQ ID NO: 4846; WAN024A2B_at; Start 20; Stop 44
taaactcagctagtccaactaactg

SEQ ID NO: 40108 - DNA, 25 bp, Artificial
  probe
  misc_feature (1)..(25): SEQ ID NO: 4846; WAN024A2B_at; Start 27; Stop 51
agctagtccaactaactgagttttc

SEQ ID NO: 40109 - DNA, 25 bp, Artificial
  probe
  misc_feature (1)..(25): SEQ ID NO: 4846; WAN024A2B_at; Start 25; Stop 49
tcagctagtccaactaactgagttt

SEQ ID NO: 40110 - DNA, 25 bp, Artificial
  probe
  misc_feature (1)..(25): SEQ ID NO: 4846; WAN024A2B_at; Start 18; Stop 42
agtaaactcagctagtccaactaac

SEQ ID NO: 40111 - DNA, 25 bp, Artificial
  probe
  misc_feature (1)..(25): SEQ ID NO: 4846; WAN024A2B_at; Start 38; Stop 62
ctaactgagttttcctttatctatt

SEQ ID NO: 40112 - DNA, 25 bp, Artificial
  probe
  misc_feature (1)..(25): SEQ ID NO: 4846; WAN024A2B_at; Start 29; Stop 53
ctagtccaactaactgagttttcct

SEQ ID NO: 40113 - DNA, 25 bp, Artificial
  probe
  misc_feature (1)..(25): SEQ ID NO: 4846; WAN024A2B_at; Start 21; Stop 45
aaactcagctagtccaactaactga

SEQ ID NO: 40114 - DNA, 25 bp, Artificial
  probe
  misc_feature (1)..(25): SEQ ID NO: 4846; WAN024A2B_at; Start 40; Stop 64
aactgagttttcctttatctattat

SEQ ID NO: 40115 - DNA, 25 bp, Artificial
  probe
  misc_feature (1)..(25): SEQ ID NO: 4846; WAN024A2B_at; Start 24; Stop 48
ctcagctagtccaactaactgagtt

SEQ ID NO: 40116 - DNA, 25 bp, Artificial
  probe
  misc_feature (1)..(25): SEQ ID NO: 4846; WAN024A2B_at; Start 41; Stop 65
actgagttttcctttatctattata

SEQ ID NO: 40117 - DNA, 25 bp, Artificial
  probe
  misc_feature (1)..(25): SEQ ID NO: 4846; WAN024A2B_at; Start 28; Stop 52
gctagtccaactaactgagttttcc

SEQ ID NO: 40118 - DNA, 25 bp, Artificial
  probe
  misc_feature (1)..(25): SEQ ID NO: 4846; WAN024A2B_at; Start 23; Stop 47
actcagctagtccaactaactgagt

SEQ ID NO: 40119 - DNA, 25 bp, Artificial
  probe
  misc_feature (1)..(25): SEQ ID NO: 4846; WAN024A2B_at; Start 17; Stop 41
gagtaaactcagctagtccaactaa

SEQ ID NO: 40120 - DNA, 25 bp, Artificial
  probe
  misc_feature (1)..(25): SEQ ID NO: 4846; WAN024A2B_at; Start 16; Stop 40
agagtaaactcagctagtccaacta

SEQ ID NO: 40121 - DNA, 25 bp, Artificial
  probe
  misc_feature (1)..(25): SEQ ID NO: 4846; WAN024A2B_at; Start 35; Stop 59
caactaactgagttttcctttatct

SEQ ID NO: 40122 - DNA, 25 bp, Artificial
  probe
  misc_feature (1)..(25): SEQ ID NO: 4846; WAN024A2B_at; Start 39; Stop 63
taactgagttttcctttatctatta

SEQ ID NO: 40123 - DNA, 25 bp, Artificial
  probe
  misc_feature (1)..(25): SEQ ID NO: 4626; WAN024A2C_at; Start 36; Stop 60
gatagttacaacaagaaagaaggaa

SEQ ID NO: 40124 - DNA, 25 bp, Artificial
  probe
  misc_feature (1)..(25): SEQ ID NO: 4626; WAN024A2C_at; Start 5; Stop 29
tgcgtgattgacaagaaagagttag

SEQ ID NO: 40125 - DNA, 25 bp, Artificial
  probe
  misc_feature (1)..(25): SEQ ID NO: 4626; WAN024A2C_at; Start 1; Stop 25
tccttgcgtgattgacaagaaagag

SEQ ID NO: 40126 - DNA, 25 bp, Artificial
  probe
  misc_feature (1)..(25): SEQ ID NO: 4626; WAN024A2C_at; Start 39; Stop 63
agttacaacaagaaagaaggaatct

SEQ ID NO: 40127 - DNA, 25 bp, Artificial
  probe
  misc_feature (1)..(25): SEQ ID NO: 4626; WAN024A2C_at; Start 2; Stop 26
ccttgcgtgattgacaagaaagagt

SEQ ID NO: 40128 - DNA, 25 bp, Artificial
  probe
  misc_feature (1)..(25): SEQ ID NO: 4626; WAN024A2C_at; Start 29; Stop 53
gaataaagatagttacaacaagaaa

SEQ ID NO: 40129 - DNA, 25 bp, Artificial
  probe
  misc_feature (1)..(25): SEQ ID NO: 4626; WAN024A2C_at; Start 27; Stop 51
tagaataaagatagttacaacaaga

SEQ ID NO: 40130 - DNA, 25 bp, Artificial
  probe
  misc_feature (1)..(25): SEQ ID NO: 4626; WAN024A2C_at; Start 3; Stop 27
cttgcgtgattgacaagaaagagtt

SEQ ID NO: 40131 - DNA, 25 bp, Artificial
  probe
  misc_feature (1)..(25): SEQ ID NO: 4626; WAN024A2C_at; Start 24; Stop 48
agttagaataaagatagttacaaca

SEQ ID NO: 40132 - DNA, 25 bp, Artificial
  probe
  misc_feature (1)..(25): SEQ ID NO: 4626; WAN024A2C_at; Start 32; Stop 56
taaagatagttacaacaagaaagaa

SEQ ID NO: 40133 - DNA, 25 bp, Artificial
  probe
  misc_feature (1)..(25): SEQ ID NO: 4626; WAN024A2C_at; Start 26; Stop 50
ttagaataaagatagttacaacaag

SEQ ID NO: 40134 - DNA, 25 bp, Artificial
  probe
  misc_feature (1)..(25): SEQ ID NO: 4626; WAN024A2C_at; Start 35; Stop 59
agatagttacaacaagaaagaagga

SEQ ID NO: 40135 - DNA, 25 bp, Artificial
  probe
  misc_feature (1)..(25): SEQ ID NO: 4626; WAN024A2C_at; Start 21; Stop 45
aagagttagaataaagatagttaca

SEQ ID NO: 40136 - DNA, 25 bp, Artificial
  probe
  misc_feature (1)..(25): SEQ ID NO: 4626; WAN024A2C_at; Start 33; Stop 57
aaagatagttacaacaagaaagaag

SEQ ID NO: 40137 - DNA, 25 bp, Artificial
  probe
  misc_feature (1)..(25): SEQ ID NO: 4626; WAN024A2C_at; Start 28; Stop 52
agaataaagatagttacaacaagaa

SEQ ID NO: 40138 - DNA, 25 bp, Artificial
  probe
  misc_feature (1)..(25): SEQ ID NO: 4626; WAN024A2C_at; Start 10; Stop 34
gattgacaagaaagagttagaataa

SEQ ID NO: 40139 - DNA, 25 bp, Artificial
  probe
  misc_feature (1)..(25): SEQ ID NO: 4626; WAN024A2C_at; Start 9; Stop 33
tgattgacaagaaagagttagaata

SEQ ID NO: 40140 - DNA, 25 bp, Artificial
  probe
  misc_feature (1)..(25): SEQ ID NO: 4626; WAN024A2C_at; Start 23; Stop 47
gagttagaataaagatagttacaac

SEQ ID NO: 40141 - DNA, 25 bp, Artificial
  probe
  misc_feature (1)..(25): SEQ ID NO: 4626; WAN024A2C_at; Start 13; Stop 37
tgacaagaaagagttagaataaaga

SEQ ID NO: 40142 - DNA, 25 bp, Artificial
  probe
  misc_feature (1)..(25): SEQ ID NO: 4626; WAN024A2C_at; Start 8; Stop 32
gtgattgacaagaaagagttagaat

SEQ ID NO: 40143 - DNA, 25 bp, Artificial
  probe
  misc_feature (1)..(25): SEQ ID NO: 4626; WAN024A2C_at; Start 14; Stop 38
gacaagaaagagttagaataaagat

SEQ ID NO: 40144 - DNA, 25 bp, Artificial
  probe
  misc_feature (1)..(25): SEQ ID NO: 4626; WAN024A2C_at; Start 4; Stop 28
ttgcgtgattgacaagaaagagtta

SEQ ID NO: 40145 - DNA, 25 bp, Artificial
  probe
  misc_feature (1)..(25): SEQ ID NO: 4626; WAN024A2C_at; Start 16; Stop 40
caagaaagagttagaataaagatag

SEQ ID NO: 40146 - DNA, 25 bp, Artificial
  probe
  misc_feature (1)..(25): SEQ ID NO: 4626; WAN024A2C_at; Start 7; Stop 31
cgtgattgacaagaaagagttagaa

SEQ ID NO: 40147 - DNA, 25 bp, Artificial
  probe
  misc_feature (1)..(25): SEQ ID NO: 4626; WAN024A2C_at; Start 6; Stop 30
gcgtgattgacaagaaagagttaga

SEQ ID NO: 40148 - DNA, 25 bp, Artificial
  probe
  misc_feature (1)..(25): SEQ ID NO: 4626; WAN024A2C_at; Start 38; Stop 62
tagttacaacaagaaagaaggaatc

SEQ ID NO: 40149 - DNA, 25 bp, Artificial
  probe
  misc_feature (1)..(25): SEQ ID NO: 4626; WAN024A2C_at; Start 12; Stop 36
ttgacaagaaagagttagaataaag

SEQ ID NO: 40150 - DNA, 25 bp, Artificial
  probe
  misc_feature (1)..(25): SEQ ID NO: 4626; WAN024A2C_at; Start 40; Stop 64
gttacaacaagaaagaaggaatcta

SEQ ID NO: 40151 - DNA, 25 bp, Artificial
  probe
  misc_feature (1)..(25): SEQ ID NO: 4626; WAN024A2C_at; Start 41; Stop 65
ttacaacaagaaagaaggaatctat

SEQ ID NO: 40152 - DNA, 25 bp, Artificial
  probe
  misc_feature (1)..(25): SEQ ID NO: 4626; WAN024A2C_at; Start 17; Stop 41
aagaaagagttagaataaagatagt

SEQ ID NO: 40153 - DNA, 25 bp, Artificial
  probe
  misc_feature (1)..(25): SEQ ID NO: 4626; WAN024A2C_at; Start 34; Stop 58
aagatagttacaacaagaaagaagg

SEQ ID NO: 40154 - DNA, 25 bp, Artificial
  probe
  misc_feature (1)..(25): SEQ ID NO: 4626; WAN024A2C_at; Start 19; Stop 43
gaaagagttagaataaagatagtta

SEQ ID NO: 40155 - DNA, 25 bp, Artificial
  probe
  misc_feature (1)..(25): SEQ ID NO: 4626; WAN024A2C_at; Start 37; Stop 61
atagttacaacaagaaagaaggaat

SEQ ID NO: 40156 - DNA, 25 bp, Artificial
  probe
  misc_feature (1)..(25): SEQ ID NO: 4626; WAN024A2C_at; Start 30; Stop 54
aataaagatagttacaacaagaaag

SEQ ID NO: 40157 - DNA, 25 bp, Artificial
  probe
  misc_feature (1)..(25): SEQ ID NO: 553; WAN024A2D_at; Start 23; Stop 47
taactatctttattctaactctttc

SEQ ID NO: 40158 - DNA, 25 bp, Artificial
  probe
  misc_feature (1)..(25): SEQ ID NO: 553; WAN024A2D_at; Start 37; Stop 61
ctaactctttcttgtcaatcacgca

SEQ ID NO: 40159 - DNA, 25 bp, Artificial
  probe
  misc_feature (1)..(25): SEQ ID NO: 553; WAN024A2D_at; Start 24; Stop 48
aactatctttattctaactctttct

SEQ ID NO: 40160 - DNA, 25 bp, Artificial
  probe
  misc_feature (1)..(25): SEQ ID NO: 553; WAN024A2D_at; Start 38; Stop 62
taactctttcttgtcaatcacgcaa

SEQ ID NO: 40161 - DNA, 25 bp, Artificial
  probe
  misc_feature (1)..(25): SEQ ID NO: 553; WAN024A2D_at; Start 30; Stop 54
ctttattctaactctttcttgtcaa

SEQ ID NO: 40162 - DNA, 25 bp, Artificial
  probe
  misc_feature (1)..(25): SEQ ID NO: 553; WAN024A2D_at; Start 8; Stop 32
ccttctttcttgttgtaactatctt

SEQ ID NO: 40163 - DNA, 25 bp, Artificial
  probe
  misc_feature (1)..(25): SEQ ID NO: 553; WAN024A2D_at; Start 9; Stop 33
cttctttcttgttgtaactatcttt

SEQ ID NO: 40164 - DNA, 25 bp, Artificial
  probe
  misc_feature (1)..(25): SEQ ID NO: 553; WAN024A2D_at; Start 36; Stop 60
tctaactctttcttgtcaatcacgc

SEQ ID NO: 40165 - DNA, 25 bp, Artificial
  probe
  misc_feature (1)..(25): SEQ ID NO: 553; WAN024A2D_at; Start 32; Stop 56
ttattctaactctttcttgtcaatc

SEQ ID NO: 40166 - DNA, 25 bp, Artificial
  probe
  misc_feature (1)..(25): SEQ ID NO: 553; WAN024A2D_at; Start 29; Stop 53
tctttattctaactctttcttgtca

SEQ ID NO: 40167 - DNA, 25 bp, Artificial
  probe
  misc_feature (1)..(25): SEQ ID NO: 553; WAN024A2D_at; Start 20; Stop 44
ttgtaactatctttattctaactct

SEQ ID NO: 40168 - DNA, 25 bp, Artificial
  probe
  misc_feature (1)..(25): SEQ ID NO: 553; WAN024A2D_at; Start 10; Stop 34
ttctttcttgttgtaactatcttta

SEQ ID NO: 40169 - DNA, 25 bp, Artificial
  probe
  misc_feature (1)..(25): SEQ ID NO: 553; WAN024A2D_at; Start 7; Stop 31
tccttctttcttgttgtaactatct

SEQ ID NO: 40170 - DNA, 25 bp, Artificial
  probe
  misc_feature (1)..(25): SEQ ID NO: 553; WAN024A2D_at; Start 18; Stop 42
tgttgtaactatctttattctaact

SEQ ID NO: 40171 - DNA, 25 bp, Artificial
  probe
  misc_feature (1)..(25): SEQ ID NO: 553; WAN024A2D_at; Start 2; Stop 26
tagattccttctttcttgttgtaac

SEQ ID NO: 40172 - DNA, 25 bp, Artificial
  probe
  misc_feature (1)..(25): SEQ ID NO: 553; WAN024A2D_at; Start 39; Stop 63
aactctttcttgtcaatcacgcaag

SEQ ID NO: 40173 - DNA, 25 bp, Artificial
  probe
  misc_feature (1)..(25): SEQ ID NO: 553; WAN024A2D_at; Start 15; Stop 39
tcttgttgtaactatctttattcta

SEQ ID NO: 40174 - DNA, 25 bp, Artificial
  probe
  misc_feature (1)..(25): SEQ ID NO: 553; WAN024A2D_at; Start 35; Stop 59
ttctaactctttcttgtcaatcacg

SEQ ID NO: 40175 - DNA, 25 bp, Artificial
  probe
  misc_feature (1)..(25): SEQ ID NO: 553; WAN024A2D_at; Start 27; Stop 51
tatctttattctaactctttcttgt

SEQ ID NO: 40176 - DNA, 25 bp, Artificial
  probe
  misc_feature (1)..(25): SEQ ID NO: 553; WAN024A2D_at; Start 1; Stop 25
atagattccttctttcttgttgtaa

SEQ ID NO: 40177 - DNA, 25 bp, Artificial
  probe
  misc_feature (1)..(25): SEQ ID NO: 553; WAN024A2D_at; Start 3; Stop 27
agattccttctttcttgttgtaact

SEQ ID NO: 40178 - DNA, 25 bp, Artificial
  probe
  misc_feature (1)..(25): SEQ ID NO: 553; WAN024A2D_at; Start 33; Stop 57
tattctaactctttcttgtcaatca

SEQ ID NO: 40179 - DNA, 25 bp, Artificial
  probe
  misc_feature (1)..(25): SEQ ID NO: 553; WAN024A2D_at; Start 5; Stop 29
attccttctttcttgttgtaactat

SEQ ID NO: 40180 - DNA, 25 bp, Artificial
  probe
  misc_feature (1)..(25): SEQ ID NO: 553; WAN024A2D_at; Start 34; Stop 58
attctaactctttcttgtcaatcac

SEQ ID NO: 40181 - DNA, 25 bp, Artificial
  probe
  misc_feature (1)..(25): SEQ ID NO: 553; WAN024A2D_at; Start 17; Stop 41
ttgttgtaactatctttattctaac

SEQ ID NO: 40182 - DNA, 25 bp, Artificial
  probe
  misc_feature (1)..(25): SEQ ID NO: 553; WAN024A2D_at; Start 4; Stop 28
gattccttctttcttgttgtaacta

SEQ ID NO: 40183 - DNA, 25 bp, Artificial
  probe
  misc_feature (1)..(25): SEQ ID NO: 553; WAN024A2D_at; Start 11; Stop 35
tctttcttgttgtaactatctttat

SEQ ID NO: 40184 - DNA, 25 bp, Artificial
  probe
  misc_feature (1)..(25): SEQ ID NO: 553; WAN024A2D_at; Start 21; Stop 45
tgtaactatctttattctaactctt

SEQ ID NO: 40185 - DNA, 25 bp, Artificial
  probe
  misc_feature (1)..(25): SEQ ID NO: 553; WAN024A2D_at; Start 19; Stop 43
gttgtaactatctttattctaactc

SEQ ID NO: 40186 - DNA, 25 bp, Artificial
  probe
  misc_feature (1)..(25): SEQ ID NO: 553; WAN024A2D_at; Start 26; Stop 50
ctatctttattctaactctttcttg

SEQ ID NO: 40187 - DNA, 25 bp, Artificial
  probe
  misc_feature (1)..(25): SEQ ID NO: 553; WAN024A2D_at; Start 6; Stop 30
ttccttctttcttgttgtaactatc

SEQ ID NO: 40188 - DNA, 25 bp, Artificial
  probe
  misc_feature (1)..(25): SEQ ID NO: 553; WAN024A2D_at; Start 40; Stop 64
actctttcttgtcaatcacgcaagg

SEQ ID NO: 40189 - DNA, 25 bp, Artificial
  probe
  misc_feature (1)..(25): SEQ ID NO: 553; WAN024A2D_at; Start 41; Stop 65
ctctttcttgtcaatcacgcaagga

SEQ ID NO: 40190 - DNA, 25 bp, Artificial
  probe
  misc_feature (1)..(25): SEQ ID NO: 553; WAN024A2D_at; Start 16; Stop 40
cttgttgtaactatctttattctaa

SEQ ID NO: 40191 - DNA, 25 bp, Artificial
  probe
  misc_feature (1)..(25): SEQ ID NO: 5910; WAN024A2E_at; Start 146; Stop 170
catttaggatttatagaaaatagat

SEQ ID NO: 40192 - DNA, 25 bp, Artificial
  probe
  misc_feature (1)..(25): SEQ ID NO: 5910; WAN024A2E_at; Start 134; Stop 158
aaagcattatggcatttaggattta

SEQ ID NO: 40193 - DNA, 25 bp, Artificial
  probe
  misc_feature (1)..(25): SEQ ID NO: 5910; WAN024A2E_at; Start 4; Stop 28
ctctccttatattatgtttagtgca

SEQ ID NO: 40194 - DNA, 25 bp, Artificial
  probe
  misc_feature (1)..(25): SEQ ID NO: 5910; WAN024A2E_at; Start 117; Stop 141
caaaatgacaagaattgaaagcatt

SEQ ID NO: 40195 - DNA, 25 bp, Artificial
  probe
  misc_feature (1)..(25): SEQ ID NO: 5910; WAN024A2E_at; Start 130; Stop 154
attgaaagcattatggcatttagga

SEQ ID NO: 40196 - DNA, 25 bp, Artificial
  probe
  misc_feature (1)..(25): SEQ ID NO: 5910; WAN024A2E_at; Start 81; Stop 105
tagttcattttctttcattacctct

SEQ ID NO: 40197 - DNA, 25 bp, Artificial
  probe
  misc_feature (1)..(25): SEQ ID NO: 5910; WAN024A2E_at; Start 126; Stop 150
aagaattgaaagcattatggcattt

SEQ ID NO: 40198 - DNA, 25 bp, Artificial
  probe
  misc_feature (1)..(25): SEQ ID NO: 5910; WAN024A2E_at; Start 131; Stop 155
ttgaaagcattatggcatttaggat

SEQ ID NO: 40199 - DNA, 25 bp, Artificial
  probe
  misc_feature (1)..(25): SEQ ID NO: 5910; WAN024A2E_at; Start 77; Stop 101
ggattagttcattttctttcattac

SEQ ID NO: 40200 - DNA, 25 bp, Artificial
  probe
  misc_feature (1)..(25): SEQ ID NO: 5910; WAN024A2E_at; Start 83; Stop 107
gttcattttctttcattacctctac

SEQ ID NO: 40201 - DNA, 25 bp, Artificial
  probe
  misc_feature (1)..(25): SEQ ID NO: 5910; WAN024A2E_at; Start 6; Stop 30
ctccttatattatgtttagtgcagt

SEQ ID NO: 40202 - DNA, 25 bp, Artificial
  probe
  misc_feature (1)..(25): SEQ ID NO: 5910; WAN024A2E_at; Start 129; Stop 153
aattgaaagcattatggcatttagg

SEQ ID NO: 40203 - DNA, 25 bp, Artificial
  probe
  misc_feature (1)..(25): SEQ ID NO: 5910; WAN024A2E_at; Start 137; Stop 161
gcattatggcatttaggatttatag

SEQ ID NO: 40204 - DNA, 25 bp, Artificial
  probe
  misc_feature (1)..(25): SEQ ID NO: 5910; WAN024A2E_at; Start 86; Stop 110
cattttctttcattacctctacatg

SEQ ID NO: 40205 - DNA, 25 bp, Artificial
  probe
  misc_feature (1)..(25): SEQ ID NO: 5910; WAN024A2E_at; Start 141; Stop 165
tatggcatttaggatttatagaaaa

SEQ ID NO: 40206 - DNA, 25 bp, Artificial
  probe
  misc_feature (1)..(25): SEQ ID NO: 5910; WAN024A2E_at; Start 124; Stop 148
acaagaattgaaagcattatggcat

SEQ ID NO: 40207 - DNA, 25 bp, Artificial
  probe
  misc_feature (1)..(25): SEQ ID NO: 5910; WAN024A2E_at; Start 145; Stop 169
gcatttaggatttatagaaaataga

SEQ ID NO: 40208 - DNA, 25 bp, Artificial
  probe
  misc_feature (1)..(25): SEQ ID NO: 5910; WAN024A2E_at; Start 7; Stop 31
tccttatattatgtttagtgcagtt

SEQ ID NO: 40209 - DNA, 25 bp, Artificial
  probe
  misc_feature (1)..(25): SEQ ID NO: 5910; WAN024A2E_at; Start 128; Stop 152
gaattgaaagcattatggcatttag

SEQ ID NO: 40210 - DNA, 25 bp, Artificial
  probe
  misc_feature (1)..(25): SEQ ID NO: 5910; WAN024A2E_at; Start 84; Stop 108
ttcattttctttcattacctctaca

SEQ ID NO: 40211 - DNA, 25 bp, Artificial
  probe
  misc_feature (1)..(25): SEQ ID NO: 5910; WAN024A2E_at; Start 123; Stop 147
gacaagaattgaaagcattatggca

SEQ ID NO: 40212 - DNA, 25 bp, Artificial
  probe
  misc_feature (1)..(25): SEQ ID NO: 5910; WAN024A2E_at; Start 91; Stop 115
tctttcattacctctacatgatatc

SEQ ID NO: 40213 - DNA, 25 bp, Artificial
  probe
  misc_feature (1)..(25): SEQ ID NO: 5910; WAN024A2E_at; Start 125; Stop 149
caagaattgaaagcattatggcatt

SEQ ID NO: 40214 - DNA, 25 bp, Artificial
  probe
  misc_feature (1)..(25): SEQ ID NO: 5910; WAN024A2E_at; Start 144; Stop 168
ggcatttaggatttatagaaaatag

SEQ ID NO: 40215 - DNA, 25 bp, Artificial
  probe
  misc_feature (1)..(25): SEQ ID NO: 5910; WAN024A2E_at; Start 132; Stop 156
tgaaagcattatggcatttaggatt

SEQ ID NO: 40216 - DNA, 25 bp, Artificial
  probe
  misc_feature (1)..(25): SEQ ID NO: 5910; WAN024A2E_at; Start 135; Stop 159
aagcattatggcatttaggatttat

SEQ ID NO: 40217 - DNA, 25 bp, Artificial
  probe
  misc_feature (1)..(25): SEQ ID NO: 5910; WAN024A2E_at; Start 138; Stop 162
cattatggcatttaggatttataga

SEQ ID NO: 40218 - DNA, 25 bp, Artificial
  probe
  misc_feature (1)..(25): SEQ ID NO: 5910; WAN024A2E_at; Start 87; Stop 111
attttctttcattacctctacatga

SEQ ID NO: 40219 - DNA, 25 bp, Artificial
  probe
  misc_feature (1)..(25): SEQ ID NO: 5910; WAN024A2E_at; Start 89; Stop 113
tttctttcattacctctacatgata

SEQ ID NO: 40220 - DNA, 25 bp, Artificial
  probe
  misc_feature (1)..(25): SEQ ID NO: 5910; WAN024A2E_at; Start 82; Stop 106
agttcattttctttcattacctcta

SEQ ID NO: 40221 - DNA, 25 bp, Artificial
  probe
  misc_feature (1)..(25): SEQ ID NO: 5910; WAN024A2E_at; Start 78; Stop 102
gattagttcattttctttcattacc

SEQ ID NO: 40222 - DNA, 25 bp, Artificial
  probe
  misc_feature (1)..(25): SEQ ID NO: 5910; WAN024A2E_at; Start 5; Stop 29
tctccttatattatgtttagtgcag

SEQ ID NO: 40223 - DNA, 25 bp, Artificial
  probe
  misc_feature (1)..(25): SEQ ID NO: 5910; WAN024A2E_at; Start 3; Stop 27
tctctccttatattatgtttagtgc

SEQ ID NO: 40224 - DNA, 25 bp, Artificial
  probe
  misc_feature (1)..(25): SEQ ID NO: 5910; WAN024A2E_at; Start 122; Stop 146
tgacaagaattgaaagcattatggc

SEQ ID NO: 40225 - DNA, 25 bp, Artificial
  probe
  misc_feature (1)..(25): SEQ ID NO: 301; WAN024A2F_at; Start 76; Stop 100
tatcatgtagaggtaatgaaagaaa

SEQ ID NO: 40226 - DNA, 25 bp, Artificial
  probe
  misc_feature (1)..(25): SEQ ID NO: 301; WAN024A2F_at; Start 71; Stop 95
tgtgatatcatgtagaggtaatgaa

SEQ ID NO: 40227 - DNA, 25 bp, Artificial
  probe
  misc_feature (1)..(25): SEQ ID NO: 301; WAN024A2F_at; Start 163; Stop 187
cactaaacataatataaggagagaa

SEQ ID NO: 40228 - DNA, 25 bp, Artificial
  probe
  misc_feature (1)..(25): SEQ ID NO: 301; WAN024A2F_at; Start 35; Stop 59
tcctaaatgccataatgctttcaat

SEQ ID NO: 40229 - DNA, 25 bp, Artificial
  probe
  misc_feature (1)..(25): SEQ ID NO: 301; WAN024A2F_at; Start 24; Stop 48
ttttctataaatcctaaatgccata

SEQ ID NO: 40230 - DNA, 25 bp, Artificial
  probe
  misc_feature (1)..(25): SEQ ID NO: 301; WAN024A2F_at; Start 69; Stop 93
tttgtgatatcatgtagaggtaatg

SEQ ID NO: 40231 - DNA, 25 bp, Artificial
  probe
  misc_feature (1)..(25): SEQ ID NO: 301; WAN024A2F_at; Start 36; Stop 60
cctaaatgccataatgctttcaatt

SEQ ID NO: 40232 - DNA, 25 bp, Artificial
  probe
  misc_feature (1)..(25): SEQ ID NO: 301; WAN024A2F_at; Start 29; Stop 53
tataaatcctaaatgccataatgct

SEQ ID NO: 40233 - DNA, 25 bp, Artificial
  probe
  misc_feature (1)..(25): SEQ ID NO: 301; WAN024A2F_at; Start 28; Stop 52
ctataaatcctaaatgccataatgc

SEQ ID NO: 40234 - DNA, 25 bp, Artificial
  probe
  misc_feature (1)..(25): SEQ ID NO: 301; WAN024A2F_at; Start 79; Stop 103
catgtagaggtaatgaaagaaaatg

SEQ ID NO: 40235 - DNA, 25 bp, Artificial
  probe
  misc_feature (1)..(25): SEQ ID NO: 301; WAN024A2F_at; Start 27; Stop 51
tctataaatcctaaatgccataatg

SEQ ID NO: 40236 - DNA, 25 bp, Artificial
  probe
  misc_feature (1)..(25): SEQ ID NO: 301; WAN024A2F_at; Start 51; Stop 75
gctttcaattcttgtcattttgtga

SEQ ID NO: 40237 - DNA, 25 bp, Artificial
  probe
  misc_feature (1)..(25): SEQ ID NO: 301; WAN024A2F_at; Start 82; Stop 106
gtagaggtaatgaaagaaaatgaac

SEQ ID NO: 40238 - DNA, 25 bp, Artificial
  probe
  misc_feature (1)..(25): SEQ ID NO: 301; WAN024A2F_at; Start 66; Stop 90
cattttgtgatatcatgtagaggta

SEQ ID NO: 40239 - DNA, 25 bp, Artificial
  probe
  misc_feature (1)..(25): SEQ ID NO: 301; WAN024A2F_at; Start 44; Stop 68
ccataatgctttcaattcttgtcat

SEQ ID NO: 40240 - DNA, 25 bp, Artificial
  probe
  misc_feature (1)..(25): SEQ ID NO: 301; WAN024A2F_at; Start 88; Stop 112
gtaatgaaagaaaatgaactaatcc

SEQ ID NO: 40241 - DNA, 25 bp, Artificial
  probe
  misc_feature (1)..(25): SEQ ID NO: 301; WAN024A2F_at; Start 31; Stop 55
taaatcctaaatgccataatgcttt

SEQ ID NO: 40242 - DNA, 25 bp, Artificial
  probe
  misc_feature (1)..(25): SEQ ID NO: 301; WAN024A2F_at; Start 43; Stop 67
gccataatgctttcaattcttgtca

SEQ ID NO: 40243 - DNA, 25 bp, Artificial
  probe
  misc_feature (1)..(25): SEQ ID NO: 301; WAN024A2F_at; Start 161; Stop 185
tgcactaaacataatataaggagag

SEQ ID NO: 40244 - DNA, 25 bp, Artificial
  probe
  misc_feature (1)..(25): SEQ ID NO: 301; WAN024A2F_at; Start 162; Stop 186
gcactaaacataatataaggagaga

SEQ ID NO: 40245 - DNA, 25 bp, Artificial
  probe
  misc_feature (1)..(25): SEQ ID NO: 301; WAN024A2F_at; Start 33; Stop 57
aatcctaaatgccataatgctttca

SEQ ID NO: 40246 - DNA, 25 bp, Artificial
  probe
  misc_feature (1)..(25): SEQ ID NO: 301; WAN024A2F_at; Start 56; Stop 80
caattcttgtcattttgtgatatca

SEQ ID NO: 40247 - DNA, 25 bp, Artificial
  probe
  misc_feature (1)..(25): SEQ ID NO: 301; WAN024A2F_at; Start 42; Stop 66
tgccataatgctttcaattcttgtc

SEQ ID NO: 40248 - DNA, 25 bp, Artificial
  probe
  misc_feature (1)..(25): SEQ ID NO: 301; WAN024A2F_at; Start 40; Stop 64
aatgccataatgctttcaattcttg

SEQ ID NO: 40249 - DNA, 25 bp, Artificial
  probe
  misc_feature (1)..(25): SEQ ID NO: 301; WAN024A2F_at; Start 87; Stop 111
ggtaatgaaagaaaatgaactaatc

SEQ ID NO: 40250 - DNA, 25 bp, Artificial
  probe
  misc_feature (1)..(25): SEQ ID NO: 301; WAN024A2F_at; Start 164; Stop 188
actaaacataatataaggagagaaa

SEQ ID NO: 40251 - DNA, 25 bp, Artificial
  probe
  misc_feature (1)..(25): SEQ ID NO: 301; WAN024A2F_at; Start 83; Stop 107
tagaggtaatgaaagaaaatgaact

SEQ ID NO: 40252 - DNA, 25 bp, Artificial
  probe
  misc_feature (1)..(25): SEQ ID NO: 301; WAN024A2F_at; Start 38; Stop 62
taaatgccataatgctttcaattct

SEQ ID NO: 40253 - DNA, 25 bp, Artificial
  probe
  misc_feature (1)..(25): SEQ ID NO: 301; WAN024A2F_at; Start 22; Stop 46
tattttctataaatcctaaatgcca

SEQ ID NO: 40254 - DNA, 25 bp, Artificial
  probe
  misc_feature (1)..(25): SEQ ID NO: 301; WAN024A2F_at; Start 89; Stop 113
taatgaaagaaaatgaactaatcca

SEQ ID NO: 40255 - DNA, 25 bp, Artificial
  probe
  misc_feature (1)..(25): SEQ ID NO: 301; WAN024A2F_at; Start 85; Stop 109
gaggtaatgaaagaaaatgaactaa

SEQ ID NO: 40256 - DNA, 25 bp, Artificial
  probe
  misc_feature (1)..(25): SEQ ID NO: 301; WAN024A2F_at; Start 61; Stop 85
cttgtcattttgtgatatcatgtag

SEQ ID NO: 40257 - DNA, 25 bp, Artificial
  probe
  misc_feature (1)..(25): SEQ ID NO: 301; WAN024A2F_at; Start 64; Stop 88
gtcattttgtgatatcatgtagagg

SEQ ID NO: 40258 - DNA, 25 bp, Artificial
  probe
  misc_feature (1)..(25): SEQ ID NO: 301; WAN024A2F_at; Start 74; Stop 98
gatatcatgtagaggtaatgaaaga

SEQ ID NO: 40259 - DNA, 25 bp, Artificial
  probe
  misc_feature (1)..(25): SEQ ID NO: 555; WAN024A2G_at; Start 1; Stop 25
atagctaaataatgttaaatttgag

SEQ ID NO: 40260 - DNA, 25 bp, Artificial
  probe
  misc_feature (1)..(25): SEQ ID NO: 555; WAN024A2G_at; Start 23; Stop 47
gagcataatatcttgtaaaaaattc

SEQ ID NO: 40261 - DNA, 25 bp, Artificial
  probe
  misc_feature (1)..(25): SEQ ID NO: 555; WAN024A2G_at; Start 18; Stop 42
aatttgagcataatatcttgtaaaa

SEQ ID NO: 40262 - DNA, 25 bp, Artificial
  probe
  misc_feature (1)..(25): SEQ ID NO: 555; WAN024A2G_at; Start 4; Stop 28
gctaaataatgttaaatttgagcat

SEQ ID NO: 40263 - DNA, 25 bp, Artificial
  probe
  misc_feature (1)..(25): SEQ ID NO: 555; WAN024A2G_at; Start 17; Stop 41
aaatttgagcataatatcttgtaaa

SEQ ID NO: 40264 - DNA, 25 bp, Artificial
  probe
  misc_feature (1)..(25): SEQ ID NO: 555; WAN024A2G_at; Start 8; Stop 32
aataatgttaaatttgagcataata

SEQ ID NO: 40265 - DNA, 25 bp, Artificial
  probe
  misc_feature (1)..(25): SEQ ID NO: 555; WAN024A2G_at; Start 12; Stop 36
atgttaaatttgagcataatatctt

SEQ ID NO: 40266 - DNA, 25 bp, Artificial
  probe
  misc_feature (1)..(25): SEQ ID NO: 555; WAN024A2G_at; Start 9; Stop 33
ataatgttaaatttgagcataatat

SEQ ID NO: 40267 - DNA, 25 bp, Artificial
  probe
  misc_feature (1)..(25): SEQ ID NO: 555; WAN024A2G_at; Start 6; Stop 30
taaataatgttaaatttgagcataa

SEQ ID NO: 40268 - DNA, 25 bp, Artificial
  probe
  misc_feature (1)..(25): SEQ ID NO: 555; WAN024A2G_at; Start 24; Stop 48
agcataatatcttgtaaaaaattct

SEQ ID NO: 40269 - DNA, 25 bp, Artificial
  probe
  misc_feature (1)..(25): SEQ ID NO: 555; WAN024A2G_at; Start 22; Stop 46
tgagcataatatcttgtaaaaaatt

SEQ ID NO: 40270 - DNA, 25 bp, Artificial
  probe
  misc_feature (1)..(25): SEQ ID NO: 555; WAN024A2G_at; Start 10; Stop 34
taatgttaaatttgagcataatatc

SEQ ID NO: 40271 - DNA, 25 bp, Artificial
  probe
  misc_feature (1)..(25): SEQ ID NO: 555; WAN024A2G_at; Start 16; Stop 40
taaatttgagcataatatcttgtaa

SEQ ID NO: 40272 - DNA, 25 bp, Artificial
  probe
  misc_feature (1)..(25): SEQ ID NO: 555; WAN024A2G_at; Start 2; Stop 26
tagctaaataatgttaaatttgagc

SEQ ID NO: 40273 - DNA, 25 bp, Artificial
  probe
  misc_feature (1)..(25): SEQ ID NO: 555; WAN024A2G_at; Start 20; Stop 44
tttgagcataatatcttgtaaaaaa

SEQ ID NO: 40274 - DNA, 25 bp, Artificial
  probe
  misc_feature (1)..(25): SEQ ID NO: 555; WAN024A2G_at; Start 21; Stop 45
ttgagcataatatcttgtaaaaaat

SEQ ID NO: 40275 - DNA, 25 bp, Artificial
  probe
  misc_feature (1)..(25): SEQ ID NO: 555; WAN024A2G_at; Start 15; Stop 39
ttaaatttgagcataatatcttgta

SEQ ID NO: 40276 - DNA, 25 bp, Artificial
  probe
  misc_feature (1)..(25): SEQ ID NO: 555; WAN024A2G_at; Start 25; Stop 49
gcataatatcttgtaaaaaattcta

SEQ ID NO: 40277 - DNA, 25 bp, Artificial
  probe
  misc_feature (1)..(25): SEQ ID NO: 555; WAN024A2G_at; Start 26; Stop 50
cataatatcttgtaaaaaattctaa

SEQ ID NO: 40278 - DNA, 25 bp, Artificial
  probe
  misc_feature (1)..(25): SEQ ID NO: 555; WAN024A2G_at; Start 14; Stop 38
gttaaatttgagcataatatcttgt

SEQ ID NO: 40279 - DNA, 25 bp, Artificial
  probe
  misc_feature (1)..(25): SEQ ID NO: 555; WAN024A2G_at; Start 13; Stop 37
tgttaaatttgagcataatatcttg

SEQ ID NO: 40280 - DNA, 25 bp, Artificial
  probe
  misc_feature (1)..(25): SEQ ID NO: 555; WAN024A2G_at; Start 3; Stop 27
agctaaataatgttaaatttgagca

SEQ ID NO: 40281 - DNA, 25 bp, Artificial
  probe
  misc_feature (1)..(25): SEQ ID NO: 555; WAN024A2G_at; Start 11; Stop 35
aatgttaaatttgagcataatatct

SEQ ID NO: 40282 - DNA, 25 bp, Artificial
  probe
  misc_feature (1)..(25): SEQ ID NO: 555; WAN024A2G_at; Start 19; Stop 43
atttgagcataatatcttgtaaaaa

SEQ ID NO: 40283 - DNA, 25 bp, Artificial
  probe
  misc_feature (1)..(25): SEQ ID NO: 555; WAN024A2G_at; Start 7; Stop 31
aaataatgttaaatttgagcataat

SEQ ID NO: 40284 - DNA, 25 bp, Artificial
  probe
  misc_feature (1)..(25): SEQ ID NO: 555; WAN024A2G_at; Start 5; Stop 29
ctaaataatgttaaatttgagcata

SEQ ID NO: 40285 - DNA, 25 bp, Artificial
  probe
  misc_feature (1)..(25): SEQ ID NO: 173; WAN024A2H_at; Start 47; Stop 71
caagatattatgctcaaatttaaca

SEQ ID NO: 40286 - DNA, 25 bp, Artificial
  probe
  misc_feature (1)..(25): SEQ ID NO: 173; WAN024A2H_at; Start 56; Stop 80
atgctcaaatttaacattatttagc

SEQ ID NO: 40287 - DNA, 25 bp, Artificial
  probe
  misc_feature (1)..(25): SEQ ID NO: 173; WAN024A2H_at; Start 54; Stop 78
ttatgctcaaatttaacattattta

SEQ ID NO: 40288 - DNA, 25 bp, Artificial
  probe
  misc_feature (1)..(25): SEQ ID NO: 173; WAN024A2H_at; Start 49; Stop 73
agatattatgctcaaatttaacatt

SEQ ID NO: 40289 - DNA, 25 bp, Artificial
  probe
  misc_feature (1)..(25): SEQ ID NO: 173; WAN024A2H_at; Start 50; Stop 74
gatattatgctcaaatttaacatta

SEQ ID NO: 40290 - DNA, 25 bp, Artificial
  probe
  misc_feature (1)..(25): SEQ ID NO: 173; WAN024A2H_at; Start 58; Stop 82
gctcaaatttaacattatttagcta

SEQ ID NO: 40291 - DNA, 25 bp, Artificial
  probe
  misc_feature (1)..(25): SEQ ID NO: 173; WAN024A2H_at; Start 46; Stop 70
acaagatattatgctcaaatttaac

SEQ ID NO: 40292 - DNA, 25 bp, Artificial
  probe
  misc_feature (1)..(25): SEQ ID NO: 173; WAN024A2H_at; Start 51; Stop 75
atattatgctcaaatttaacattat

SEQ ID NO: 40293 - DNA, 25 bp, Artificial
  probe
  misc_feature (1)..(25): SEQ ID NO: 173; WAN024A2H_at; Start 57; Stop 81
tgctcaaatttaacattatttagct

SEQ ID NO: 40294 - DNA, 25 bp, Artificial
  probe
  misc_feature (1)..(25): SEQ ID NO: 173; WAN024A2H_at; Start 55; Stop 79
tatgctcaaatttaacattatttag

SEQ ID NO: 40295 - DNA, 25 bp, Artificial
  probe
  misc_feature (1)..(25): SEQ ID NO: 173; WAN024A2H_at; Start 48; Stop 72
aagatattatgctcaaatttaacat

SEQ ID NO: 40296 - DNA, 25 bp, Artificial
  probe
  misc_feature (1)..(25): SEQ ID NO: 173; WAN024A2H_at; Start 52; Stop 76
tattatgctcaaatttaacattatt

SEQ ID NO: 40297 - DNA, 25 bp, Artificial
  probe
  misc_feature (1)..(25): SEQ ID NO: 173; WAN024A2H_at; Start 45; Stop 69
tacaagatattatgctcaaatttaa

SEQ ID NO: 40298 - DNA, 25 bp, Artificial
  probe
  misc_feature (1)..(25): SEQ ID NO: 173; WAN024A2H_at; Start 59; Stop 83
ctcaaatttaacattatttagctat

SEQ ID NO: 40299 - DNA, 25 bp, Artificial
  probe
  misc_feature (1)..(25): SEQ ID NO: 173; WAN024A2H_at; Start 43; Stop 67
tttacaagatattatgctcaaattt

SEQ ID NO: 40300 - DNA, 25 bp, Artificial
  probe
  misc_feature (1)..(25): SEQ ID NO: 173; WAN024A2H_at; Start 44; Stop 68
ttacaagatattatgctcaaattta

SEQ ID NO: 40301 - DNA, 25 bp, Artificial
  probe
  misc_feature (1)..(25): SEQ ID NO: 4830; WAN024A2I_at; Start 78; Stop 102
cccttatttgtgatagaatattgag

SEQ ID NO: 40302 - DNA, 25 bp, Artificial
  probe
  misc_feature (1)..(25): SEQ ID NO: 4830; WAN024A2I_at; Start 101; Stop 125
agaaaagatatttcttttgagaaag

SEQ ID NO: 40303 - DNA, 25 bp, Artificial
  probe
  misc_feature (1)..(25): SEQ ID NO: 4830; WAN024A2I_at; Start 100; Stop 124
gagaaaagatatttcttttgagaaa

SEQ ID NO: 40304 - DNA, 25 bp, Artificial
  probe
  misc_feature (1)..(25): SEQ ID NO: 4830; WAN024A2I_at; Start 70; Stop 94
gtaattcgcccttatttgtgataga

SEQ ID NO: 40305 - DNA, 25 bp, Artificial
  probe
  misc_feature (1)..(25): SEQ ID NO: 4830; WAN024A2I_at; Start 87; Stop 111
gtgatagaatattgagaaaagatat

SEQ ID NO: 40306 - DNA, 25 bp, Artificial
  probe
  misc_feature (1)..(25): SEQ ID NO: 4830; WAN024A2I_at; Start 81; Stop 105
ttatttgtgatagaatattgagaaa

SEQ ID NO: 40307 - DNA, 25 bp, Artificial
  probe
  misc_feature (1)..(25): SEQ ID NO: 4830; WAN024A2I_at; Start 88; Stop 112
tgatagaatattgagaaaagatatt

SEQ ID NO: 40308 - DNA, 25 bp, Artificial
  probe
  misc_feature (1)..(25): SEQ ID NO: 4830; WAN024A2I_at; Start 74; Stop 98
ttcgcccttatttgtgatagaatat

SEQ ID NO: 40309 - DNA, 25 bp, Artificial
  probe
  misc_feature (1)..(25): SEQ ID NO: 4830; WAN024A2I_at; Start 83; Stop 107
atttgtgatagaatattgagaaaag

SEQ ID NO: 40310 - DNA, 25 bp, Artificial
  probe
  misc_feature (1)..(25): SEQ ID NO: 4830; WAN024A2I_at; Start 96; Stop 120
tattgagaaaagatatttcttttga

SEQ ID NO: 40311 - DNA, 25 bp, Artificial
  probe
  misc_feature (1)..(25): SEQ ID NO: 4830; WAN024A2I_at; Start 79; Stop 103
ccttatttgtgatagaatattgaga

SEQ ID NO: 40312 - DNA, 25 bp, Artificial
  probe
  misc_feature (1)..(25): SEQ ID NO: 4830; WAN024A2I_at; Start 71; Stop 95
taattcgcccttatttgtgatagaa

SEQ ID NO: 40313 - DNA, 25 bp, Artificial
  probe
  misc_feature (1)..(25): SEQ ID NO: 4830; WAN024A2I_at; Start 76; Stop 100
cgcccttatttgtgatagaatattg

SEQ ID NO: 40314 - DNA, 25 bp, Artificial
  probe
  misc_feature (1)..(25): SEQ ID NO: 4830; WAN024A2I_at; Start 80; Stop 104
cttatttgtgatagaatattgagaa

SEQ ID NO: 40315 - DNA, 25 bp, Artificial
  probe
  misc_feature (1)..(25): SEQ ID NO: 4830; WAN024A2I_at; Start 93; Stop 117
gaatattgagaaaagatatttcttt

SEQ ID NO: 40316 - DNA, 25 bp, Artificial
  probe
  misc_feature (1)..(25): SEQ ID NO: 4830; WAN024A2I_at; Start 73; Stop 97
attcgcccttatttgtgatagaata

SEQ ID NO: 40317 - DNA, 25 bp, Artificial
  probe
  misc_feature (1)..(25): SEQ ID NO: 4830; WAN024A2I_at; Start 89; Stop 113
gatagaatattgagaaaagatattt

SEQ ID NO: 40318 - DNA, 25 bp, Artificial
  probe
  misc_feature (1)..(25): SEQ ID NO: 4830; WAN024A2I_at; Start 72; Stop 96
aattcgcccttatttgtgatagaat

SEQ ID NO: 40319 - DNA, 25 bp, Artificial
  probe
  misc_feature (1)..(25): SEQ ID NO: 4830; WAN024A2I_at; Start 68; Stop 92
tggtaattcgcccttatttgtgata

SEQ ID NO: 40320 - DNA, 25 bp, Artificial
  probe
  misc_feature (1)..(25): SEQ ID NO: 4830; WAN024A2I_at; Start 54; Stop 78
tcgccttgtttagttggtaattcgc

SEQ ID NO: 40321 - DNA, 25 bp, Artificial
  probe
  misc_feature (1)..(25): SEQ ID NO: 4830; WAN024A2I_at; Start 82; Stop 106
tatttgtgatagaatattgagaaaa

SEQ ID NO: 40322 - DNA, 25 bp, Artificial
  probe
  misc_feature (1)..(25): SEQ ID NO: 4830; WAN024A2I_at; Start 84; Stop 108
tttgtgatagaatattgagaaaaga

SEQ ID NO: 40323 - DNA, 25 bp, Artificial
  probe
  misc_feature (1)..(25): SEQ ID NO: 4830; WAN024A2I_at; Start 85; Stop 109
ttgtgatagaatattgagaaaagat

SEQ ID NO: 40324 - DNA, 25 bp, Artificial
  probe
  misc_feature (1)..(25): SEQ ID NO: 4830; WAN024A2I_at; Start 45; Stop 69
agtcaaacttcgccttgtttagttg

SEQ ID NO: 40325 - DNA, 25 bp, Artificial
  probe
  misc_feature (1)..(25): SEQ ID NO: 4830; WAN024A2I_at; Start 37; Stop 61
ctagaaaaagtcaaacttcgccttg

SEQ ID NO: 40326 - DNA, 25 bp, Artificial
  probe
  misc_feature (1)..(25): SEQ ID NO: 4830; WAN024A2I_at; Start 97; Stop 121
attgagaaaagatatttcttttgag

SEQ ID NO: 40327 - DNA, 25 bp, Artificial
  probe
  misc_feature (1)..(25): SEQ ID NO: 4830; WAN024A2I_at; Start 92; Stop 116
agaatattgagaaaagatatttctt

SEQ ID NO: 40328 - DNA, 25 bp, Artificial
  probe
  misc_feature (1)..(25): SEQ ID NO: 4830; WAN024A2I_at; Start 77; Stop 101
gcccttatttgtgatagaatattga

SEQ ID NO: 40329 - DNA, 25 bp, Artificial
  probe
  misc_feature (1)..(25): SEQ ID NO: 4830; WAN024A2I_at; Start 99; Stop 123
tgagaaaagatatttcttttgagaa

SEQ ID NO: 40330 - DNA, 25 bp, Artificial
  probe
  misc_feature (1)..(25): SEQ ID NO: 4830; WAN024A2I_at; Start 69; Stop 93
ggtaattcgcccttatttgtgatag

SEQ ID NO: 40331 - DNA, 25 bp, Artificial
  probe
  misc_feature (1)..(25): SEQ ID NO: 4830; WAN024A2I_at; Start 75; Stop 99
tcgcccttatttgtgatagaatatt

SEQ ID NO: 40332 - DNA, 25 bp, Artificial
  probe
  misc_feature (1)..(25): SEQ ID NO: 4830; WAN024A2I_at; Start 86; Stop 110
tgtgatagaatattgagaaaagata

SEQ ID NO: 40333 - DNA, 25 bp, Artificial
  probe
  misc_feature (1)..(25): SEQ ID NO: 4830; WAN024A2I_at; Start 91; Stop 115
tagaatattgagaaaagatatttct

SEQ ID NO: 40334 - DNA, 25 bp, Artificial
  probe
  misc_feature (1)..(25): SEQ ID NO: 4830; WAN024A2I_at; Start 90; Stop 114
atagaatattgagaaaagatatttc

SEQ ID NO: 40335 - DNA, 25 bp, Artificial
  probe
  misc_feature (1)..(25): SEQ ID NO: 3513; WAN024A2J_at; Start 12; Stop 36
ctcaaaagaaatatcttttctcaat

SEQ ID NO: 40336 - DNA, 25 bp, Artificial
  probe
  misc_feature (1)..(25): SEQ ID NO: 3513; WAN024A2J_at; Start 42; Stop 66
atcacaaataagggcgaattaccaa

SEQ ID NO: 40337 - DNA, 25 bp, Artificial
  probe
  misc_feature (1)..(25): SEQ ID NO: 3513; WAN024A2J_at; Start 40; Stop 64
ctatcacaaataagggcgaattacc

SEQ ID NO: 40338 - DNA, 25 bp, Artificial
  probe
  misc_feature (1)..(25): SEQ ID NO: 3513; WAN024A2J_at; Start 9; Stop 33
tttctcaaaagaaatatcttttctc

SEQ ID NO: 40339 - DNA, 25 bp, Artificial
  probe
  misc_feature (1)..(25): SEQ ID NO: 3513; WAN024A2J_at; Start 64; Stop 88
caactaaacaaggcgaagtttgact

SEQ ID NO: 40340 - DNA, 25 bp, Artificial
  probe
  misc_feature (1)..(25): SEQ ID NO: 3513; WAN024A2J_at; Start 33; Stop 57
caatattctatcacaaataagggcg

SEQ ID NO: 40341 - DNA, 25 bp, Artificial
  probe
  misc_feature (1)..(25): SEQ ID NO: 3513; WAN024A2J_at; Start 55; Stop 79
gcgaattaccaactaaacaaggcga

SEQ ID NO: 40342 - DNA, 25 bp, Artificial
  probe
  misc_feature (1)..(25): SEQ ID NO: 3513; WAN024A2J_at; Start 14; Stop 38
caaaagaaatatcttttctcaatat

SEQ ID NO: 40343 - DNA, 25 bp, Artificial
  probe
  misc_feature (1)..(25): SEQ ID NO: 3513; WAN024A2J_at; Start 39; Stop 63
tctatcacaaataagggcgaattac

SEQ ID NO: 40344 - DNA, 25 bp, Artificial
  probe
  misc_feature (1)..(25): SEQ ID NO: 3513; WAN024A2J_at; Start 38; Stop 62
ttctatcacaaataagggcgaatta

SEQ ID NO: 40345 - DNA, 25 bp, Artificial
  probe
  misc_feature (1)..(25): SEQ ID NO: 3513; WAN024A2J_at; Start 13; Stop 37
tcaaaagaaatatcttttctcaata

SEQ ID NO: 40346 - DNA, 25 bp, Artificial
  probe
  misc_feature (1)..(25): SEQ ID NO: 3513; WAN024A2J_at; Start 23; Stop 47
tatcttttctcaatattctatcaca

SEQ ID NO: 40347 - DNA, 25 bp, Artificial
  probe
  misc_feature (1)..(25): SEQ ID NO: 3513; WAN024A2J_at; Start 44; Stop 68
cacaaataagggcgaattaccaact

SEQ ID NO: 40348 - DNA, 25 bp, Artificial
  probe
  misc_feature (1)..(25): SEQ ID NO: 3513; WAN024A2J_at; Start 28; Stop 52
tttctcaatattctatcacaaataa

SEQ ID NO: 40349 - DNA, 25 bp, Artificial
  probe
  misc_feature (1)..(25): SEQ ID NO: 3513; WAN024A2J_at; Start 24; Stop 48
atcttttctcaatattctatcacaa

SEQ ID NO: 40350 - DNA, 25 bp, Artificial
  probe
  misc_feature (1)..(25): SEQ ID NO: 3513; WAN024A2J_at; Start 10; Stop 34
ttctcaaaagaaatatcttttctca

SEQ ID NO: 40351 - DNA, 25 bp, Artificial
  probe
  misc_feature (1)..(25): SEQ ID NO: 3513; WAN024A2J_at; Start 36; Stop 60
tattctatcacaaataagggcgaat

SEQ ID NO: 40352 - DNA, 25 bp, Artificial
  probe
  misc_feature (1)..(25): SEQ ID NO: 3513; WAN024A2J_at; Start 30; Stop 54
tctcaatattctatcacaaataagg

SEQ ID NO: 40353 - DNA, 25 bp, Artificial
  probe
  misc_feature (1)..(25): SEQ ID NO: 3513; WAN024A2J_at; Start 32; Stop 56
tcaatattctatcacaaataagggc

SEQ ID NO: 40354 - DNA, 25 bp, Artificial
  probe
  misc_feature (1)..(25): SEQ ID NO: 3513; WAN024A2J_at; Start 16; Stop 40
aaagaaatatcttttctcaatattc

SEQ ID NO: 40355 - DNA, 25 bp, Artificial
  probe
  misc_feature (1)..(25): SEQ ID NO: 3513; WAN024A2J_at; Start 27; Stop 51
ttttctcaatattctatcacaaata

SEQ ID NO: 40356 - DNA, 25 bp, Artificial
  probe
  misc_feature (1)..(25): SEQ ID NO: 3513; WAN024A2J_at; Start 25; Stop 49
tcttttctcaatattctatcacaaa

SEQ ID NO: 40357 - DNA, 25 bp, Artificial
  probe
  misc_feature (1)..(25): SEQ ID NO: 3513; WAN024A2J_at; Start 41; Stop 65
tatcacaaataagggcgaattacca

SEQ ID NO: 40358 - DNA, 25 bp, Artificial
  probe
  misc_feature (1)..(25): SEQ ID NO: 3513; WAN024A2J_at; Start 19; Stop 43
gaaatatcttttctcaatattctat

SEQ ID NO: 40359 - DNA, 25 bp, Artificial
  probe
  misc_feature (1)..(25): SEQ ID NO: 3513; WAN024A2J_at; Start 31; Stop 55
ctcaatattctatcacaaataaggg

SEQ ID NO: 40360 - DNA, 25 bp, Artificial
  probe
  misc_feature (1)..(25): SEQ ID NO: 3513; WAN024A2J_at; Start 8; Stop 32
ctttctcaaaagaaatatcttttct

SEQ ID NO: 40361 - DNA, 25 bp, Artificial
  probe
  misc_feature (1)..(25): SEQ ID NO: 3513; WAN024A2J_at; Start 34; Stop 58
aatattctatcacaaataagggcga

SEQ ID NO: 40362 - DNA, 25 bp, Artificial
  probe
  misc_feature (1)..(25): SEQ ID NO: 3513; WAN024A2J_at; Start 26; Stop 50
cttttctcaatattctatcacaaat

SEQ ID NO: 40363 - DNA, 25 bp, Artificial
  probe
  misc_feature (1)..(25): SEQ ID NO: 3513; WAN024A2J_at; Start 11; Stop 35
tctcaaaagaaatatcttttctcaa

SEQ ID NO: 40364 - DNA, 25 bp, Artificial
  probe
  misc_feature (1)..(25): SEQ ID NO: 3513; WAN024A2J_at; Start 37; Stop 61
attctatcacaaataagggcgaatt

SEQ ID NO: 40365 - DNA, 25 bp, Artificial
  probe
  misc_feature (1)..(25): SEQ ID NO: 3513; WAN024A2J_at; Start 35; Stop 59
atattctatcacaaataagggcgaa

SEQ ID NO: 40366 - DNA, 25 bp, Artificial
  probe
  misc_feature (1)..(25): SEQ ID NO: 3513; WAN024A2J_at; Start 72; Stop 96
caaggcgaagtttgactttttctag

SEQ ID NO: 40367 - DNA, 25 bp, Artificial
  probe
  misc_feature (1)..(25): SEQ ID NO: 3513; WAN024A2J_at; Start 29; Stop 53
ttctcaatattctatcacaaataag

SEQ ID NO: 40368 - DNA, 25 bp, Artificial
  probe
  misc_feature (1)..(25): SEQ ID NO: 3513; WAN024A2J_at; Start 43; Stop 67
tcacaaataagggcgaattaccaac

SEQ ID NO: 40369 - DNA, 25 bp, Artificial
  probe
  misc_feature (1)..(25): SEQ ID NO: 532; WAN024A2K_at; Start 43; Stop 67
tctcttacagtttgctcagcattct

SEQ ID NO: 40370 - DNA, 25 bp, Artificial
  probe
  misc_feature (1)..(25): SEQ ID NO: 532; WAN024A2K_at; Start 50; Stop 74
cagtttgctcagcattctcaatgat

SEQ ID NO: 40371 - DNA, 25 bp, Artificial
  probe
  misc_feature (1)..(25): SEQ ID NO: 532; WAN024A2K_at; Start 99; Stop 123
ccattcgatttatctgtttgtattg

SEQ ID NO: 40372 - DNA, 25 bp, Artificial
  probe
  misc_feature (1)..(25): SEQ ID NO: 532; WAN024A2K_at; Start 91; Stop 115
tccctttaccattcgatttatctgt

SEQ ID NO: 40373 - DNA, 25 bp, Artificial
  probe
  misc_feature (1)..(25): SEQ ID NO: 532; WAN024A2K_at; Start 49; Stop 73
acagtttgctcagcattctcaatga

SEQ ID NO: 40374 - DNA, 25 bp, Artificial
  probe
  misc_feature (1)..(25): SEQ ID NO: 532; WAN024A2K_at; Start 162; Stop 186
aatgactcccataaaaataataagc

SEQ ID NO: 40375 - DNA, 25 bp, Artificial
  probe
  misc_feature (1)..(25): SEQ ID NO: 532; WAN024A2K_at; Start 168; Stop 192
tcccataaaaataataagctttgaa

SEQ ID NO: 40376 - DNA, 25 bp, Artificial
  probe
  misc_feature (1)..(25): SEQ ID NO: 532; WAN024A2K_at; Start 92; Stop 116
ccctttaccattcgatttatctgtt

SEQ ID NO: 40377 - DNA, 25 bp, Artificial
  probe
  misc_feature (1)..(25): SEQ ID NO: 532; WAN024A2K_at; Start 36; Stop 60
gtcttcatctcttacagtttgctca

SEQ ID NO: 40378 - DNA, 25 bp, Artificial
  probe
  misc_feature (1)..(25): SEQ ID NO: 532; WAN024A2K_at; Start 32; Stop 56
tattgtcttcatctcttacagtttg

SEQ ID NO: 40379 - DNA, 25 bp, Artificial
  probe
  misc_feature (1)..(25): SEQ ID NO: 532; WAN024A2K_at; Start 186; Stop 210
ctttgaaaattccattgtcatgtca

SEQ ID NO: 40380 - DNA, 25 bp, Artificial
  probe
  misc_feature (1)..(25): SEQ ID NO: 532; WAN024A2K_at; Start 183; Stop 207
aagctttgaaaattccattgtcatg

SEQ ID NO: 40381 - DNA, 25 bp, Artificial
  probe
  misc_feature (1)..(25): SEQ ID NO: 532; WAN024A2K_at; Start 54; Stop 78
ttgctcagcattctcaatgatttga

SEQ ID NO: 40382 - DNA, 25 bp, Artificial
  probe
  misc_feature (1)..(25): SEQ ID NO: 532; WAN024A2K_at; Start 188; Stop 212
ttgaaaattccattgtcatgtcatg

SEQ ID NO: 40383 - DNA, 25 bp, Artificial
  probe
  misc_feature (1)..(25): SEQ ID NO: 532; WAN024A2K_at; Start 156; Stop 180
cagaacaatgactcccataaaaata

SEQ ID NO: 40384 - DNA, 25 bp, Artificial
  probe
  misc_feature (1)..(25): SEQ ID NO: 532; WAN024A2K_at; Start 2; Stop 26
taagaaacacatttttagaaggata

SEQ ID NO: 40385 - DNA, 25 bp, Artificial
  probe
  misc_feature (1)..(25): SEQ ID NO: 532; WAN024A2K_at; Start 185; Stop 209
gctttgaaaattccattgtcatgtc

SEQ ID NO: 40386 - DNA, 25 bp, Artificial
  probe
  misc_feature (1)..(25): SEQ ID NO: 532; WAN024A2K_at; Start 53; Stop 77
tttgctcagcattctcaatgatttg

SEQ ID NO: 40387 - DNA, 25 bp, Artificial
  probe
  misc_feature (1)..(25): SEQ ID NO: 532; WAN024A2K_at; Start 123; Stop 147
gttttatttttatgcttcaactcta

SEQ ID NO: 40388 - DNA, 25 bp, Artificial
  probe
  misc_feature (1)..(25): SEQ ID NO: 532; WAN024A2K_at; Start 180; Stop 204
aataagctttgaaaattccattgtc

SEQ ID NO: 40389 - DNA, 25 bp, Artificial
  probe
  misc_feature (1)..(25): SEQ ID NO: 532; WAN024A2K_at; Start 45; Stop 69
tcttacagtttgctcagcattctca

SEQ ID NO: 40390 - DNA, 25 bp, Artificial
  probe
  misc_feature (1)..(25): SEQ ID NO: 532; WAN024A2K_at; Start 39; Stop 63
ttcatctcttacagtttgctcagca

SEQ ID NO: 40391 - DNA, 25 bp, Artificial
  probe
  misc_feature (1)..(25): SEQ ID NO: 532; WAN024A2K_at; Start 22; Stop 46
ggataaattttattgtcttcatctc

SEQ ID NO: 40392 - DNA, 25 bp, Artificial
  probe
  misc_feature (1)..(25): SEQ ID NO: 532; WAN024A2K_at; Start 166; Stop 190
actcccataaaaataataagctttg

SEQ ID NO: 40393 - DNA, 25 bp, Artificial
  probe
  misc_feature (1)..(25): SEQ ID NO: 532; WAN024A2K_at; Start 40; Stop 64
tcatctcttacagtttgctcagcat

SEQ ID NO: 40394 - DNA, 25 bp, Artificial
  probe
  misc_feature (1)..(25): SEQ ID NO: 532; WAN024A2K_at; Start 182; Stop 206
taagctttgaaaattccattgtcat

SEQ ID NO: 40395 - DNA, 25 bp, Artificial
  probe
  misc_feature (1)..(25): SEQ ID NO: 532; WAN024A2K_at; Start 37; Stop 61
tcttcatctcttacagtttgctcag

SEQ ID NO: 40396 - DNA, 25 bp, Artificial
  probe
  misc_feature (1)..(25): SEQ ID NO: 532; WAN024A2K_at; Start 104; Stop 128
cgatttatctgtttgtattgtttta

SEQ ID NO: 40397 - DNA, 25 bp, Artificial
  probe
  misc_feature (1)..(25): SEQ ID NO: 532; WAN024A2K_at; Start 164; Stop 188
tgactcccataaaaataataagctt

SEQ ID NO: 40398 - DNA, 25 bp, Artificial
  probe
  misc_feature (1)..(25): SEQ ID NO: 532; WAN024A2K_at; Start 51; Stop 75
agtttgctcagcattctcaatgatt

SEQ ID NO: 40399 - DNA, 25 bp, Artificial
  probe
  misc_feature (1)..(25): SEQ ID NO: 532; WAN024A2K_at; Start 41; Stop 65
catctcttacagtttgctcagcatt

SEQ ID NO: 40400 - DNA, 25 bp, Artificial
  probe
  misc_feature (1)..(25): SEQ ID NO: 532; WAN024A2K_at; Start 48; Stop 72
tacagtttgctcagcattctcaatg

SEQ ID NO: 40401 - DNA, 25 bp, Artificial
  probe
  misc_feature (1)..(25): SEQ ID NO: 532; WAN024A2K_at; Start 46; Stop 70
cttacagtttgctcagcattctcaa

SEQ ID NO: 40402 - DNA, 25 bp, Artificial
  probe
  misc_feature (1)..(25): SEQ ID NO: 532; WAN024A2K_at; Start 130; Stop 154
ttttatgcttcaactctatttttga

SEQ ID NO: 40403 - DNA, 25 bp, Artificial
  probe
  misc_feature (1)..(25): SEQ ID NO: 3223; WAN024A2L_at; Start 141; Stop 165
cattgagaatgctgagcaaactgta

SEQ ID NO: 40404 - DNA, 25 bp, Artificial
  probe
  misc_feature (1)..(25): SEQ ID NO: 3223; WAN024A2L_at; Start 157; Stop 181
caaactgtaagagatgaagacaata

SEQ ID NO: 40405 - DNA, 25 bp, Artificial
  probe
  misc_feature (1)..(25): SEQ ID NO: 3223; WAN024A2L_at; Start 167; Stop 191
gagatgaagacaataaaatttatcc

SEQ ID NO: 40406 - DNA, 25 bp, Artificial
  probe
  misc_feature (1)..(25): SEQ ID NO: 3223; WAN024A2L_at; Start 4; Stop 28
gacatgacaatggaattttcaaagc

SEQ ID NO: 40407 - DNA, 25 bp, Artificial
  probe
  misc_feature (1)..(25): SEQ ID NO: 3223; WAN024A2L_at; Start 23; Stop 47
caaagcttattatttttatgggagt

SEQ ID NO: 40408 - DNA, 25 bp, Artificial
  probe
  misc_feature (1)..(25): SEQ ID NO: 3223; WAN024A2L_at; Start 8; Stop 32
tgacaatggaattttcaaagcttat

SEQ ID NO: 40409 - DNA, 25 bp, Artificial
  probe
  misc_feature (1)..(25): SEQ ID NO: 3223; WAN024A2L_at; Start 133; Stop 157
gttcaaatcattgagaatgctgagc

SEQ ID NO: 40410 - DNA, 25 bp, Artificial
  probe
  misc_feature (1)..(25): SEQ ID NO: 3223; WAN024A2L_at; Start 154; Stop 178
gagcaaactgtaagagatgaagaca

SEQ ID NO: 40411 - DNA, 25 bp, Artificial
  probe
  misc_feature (1)..(25): SEQ ID NO: 3223; WAN024A2L_at; Start 150; Stop 174
tgctgagcaaactgtaagagatgaa

SEQ ID NO: 40412 - DNA, 25 bp, Artificial
  probe
  misc_feature (1)..(25): SEQ ID NO: 3223; WAN024A2L_at; Start 33; Stop 57
tatttttatgggagtcattgttctg

SEQ ID NO: 40413 - DNA, 25 bp, Artificial
  probe
  misc_feature (1)..(25): SEQ ID NO: 3223; WAN024A2L_at; Start 135; Stop 159
tcaaatcattgagaatgctgagcaa

SEQ ID NO: 40414 - DNA, 25 bp, Artificial
  probe
  misc_feature (1)..(25): SEQ ID NO: 3223; WAN024A2L_at; Start 153; Stop 177
tgagcaaactgtaagagatgaagac

SEQ ID NO: 40415 - DNA, 25 bp, Artificial
  probe
  misc_feature (1)..(25): SEQ ID NO: 3223; WAN024A2L_at; Start 25; Stop 49
aagcttattatttttatgggagtca

SEQ ID NO: 40416 - DNA, 25 bp, Artificial
  probe
  misc_feature (1)..(25): SEQ ID NO: 3223; WAN024A2L_at; Start 125; Stop 149
gtagtaatgttcaaatcattgagaa

SEQ ID NO: 40417 - DNA, 25 bp, Artificial
  probe
  misc_feature (1)..(25): SEQ ID NO: 3223; WAN024A2L_at; Start 187; Stop 211
tatccttctaaaaatgtgtttctta

SEQ ID NO: 40418 - DNA, 25 bp, Artificial
  probe
  misc_feature (1)..(25): SEQ ID NO: 3223; WAN024A2L_at; Start 148; Stop 172
aatgctgagcaaactgtaagagatg

SEQ ID NO: 40419 - DNA, 25 bp, Artificial
  probe
  misc_feature (1)..(25): SEQ ID NO: 3223; WAN024A2L_at; Start 147; Stop 171
gaatgctgagcaaactgtaagagat

SEQ ID NO: 40420 - DNA, 25 bp, Artificial
  probe
  misc_feature (1)..(25): SEQ ID NO: 3223; WAN024A2L_at; Start 85; Stop 109
taaaacaatacaaacagataaatcg

SEQ ID NO: 40421 - DNA, 25 bp, Artificial
  probe
  misc_feature (1)..(25): SEQ ID NO: 3223; WAN024A2L_at; Start 151; Stop 175
gctgagcaaactgtaagagatgaag

SEQ ID NO: 40422 - DNA, 25 bp, Artificial
  probe
  misc_feature (1)..(25): SEQ ID NO: 3223; WAN024A2L_at; Start 60; Stop 84
caaaaatagagttgaagcataaaaa

SEQ ID NO: 40423 - DNA, 25 bp, Artificial
  probe
  misc_feature (1)..(25): SEQ ID NO: 3223; WAN024A2L_at; Start 11; Stop 35
caatggaattttcaaagcttattat

SEQ ID NO: 40424 - DNA, 25 bp, Artificial
  probe
  misc_feature (1)..(25): SEQ ID NO: 3223; WAN024A2L_at; Start 161; Stop 185
ctgtaagagatgaagacaataaaat

SEQ ID NO: 40425 - DNA, 25 bp, Artificial
  probe
  misc_feature (1)..(25): SEQ ID NO: 3223; WAN024A2L_at; Start 97; Stop 121
aacagataaatcgaatggtaaaggg

SEQ ID NO: 40426 - DNA, 25 bp, Artificial
  probe
  misc_feature (1)..(25): SEQ ID NO: 3223; WAN024A2L_at; Start 6; Stop 30
catgacaatggaattttcaaagctt

SEQ ID NO: 40427 - DNA, 25 bp, Artificial
  probe
  misc_feature (1)..(25): SEQ ID NO: 3223; WAN024A2L_at; Start 1; Stop 25
catgacatgacaatggaattttcaa

SEQ ID NO: 40428 - DNA, 25 bp, Artificial
  probe
  misc_feature (1)..(25): SEQ ID NO: 3223; WAN024A2L_at; Start 90; Stop 114
caatacaaacagataaatcgaatgg

SEQ ID NO: 40429 - DNA, 25 bp, Artificial
  probe
  misc_feature (1)..(25): SEQ ID NO: 3223; WAN024A2L_at; Start 144; Stop 168
tgagaatgctgagcaaactgtaaga

SEQ ID NO: 40430 - DNA, 25 bp, Artificial
  probe
  misc_feature (1)..(25): SEQ ID NO: 3223; WAN024A2L_at; Start 140; Stop 164
tcattgagaatgctgagcaaactgt

SEQ ID NO: 40431 - DNA, 25 bp, Artificial
  probe
  misc_feature (1)..(25): SEQ ID NO: 3223; WAN024A2L_at; Start 72; Stop 96
tgaagcataaaaataaaacaataca

SEQ ID NO: 40432 - DNA, 25 bp, Artificial
  probe
  misc_feature (1)..(25): SEQ ID NO: 3223; WAN024A2L_at; Start 137; Stop 161
aaatcattgagaatgctgagcaaac

SEQ ID NO: 40433 - DNA, 25 bp, Artificial
  probe
  misc_feature (1)..(25): SEQ ID NO: 3223; WAN024A2L_at; Start 145; Stop 169
gagaatgctgagcaaactgtaagag

SEQ ID NO: 40434 - DNA, 25 bp, Artificial
  probe
  misc_feature (1)..(25): SEQ ID NO: 3223; WAN024A2L_at; Start 66; Stop 90
tagagttgaagcataaaaataaaac

SEQ ID NO: 40435 - DNA, 25 bp, Artificial
  probe
  misc_feature (1)..(25): SEQ ID NO: 3223; WAN024A2L_at; Start 99; Stop 123
cagataaatcgaatggtaaagggat

SEQ ID NO: 40436 - DNA, 25 bp, Artificial
  probe
  misc_feature (1)..(25): SEQ ID NO: 3223; WAN024A2L_at; Start 172; Stop 196
gaagacaataaaatttatccttcta

SEQ ID NO: 40437 - DNA, 25 bp, Artificial
  probe
  misc_feature (1)..(25): SEQ ID NO: 4633; WAN024A2M_at; Start 183; Stop 207
aattaatttaattagagagccaact

SEQ ID NO: 40438 - DNA, 25 bp, Artificial
  probe
  misc_feature (1)..(25): SEQ ID NO: 4633; WAN024A2M_at; Start 188; Stop 212
atttaattagagagccaactttcta

SEQ ID NO: 40439 - DNA, 25 bp, Artificial
  probe
  misc_feature (1)..(25): SEQ ID NO: 4633; WAN024A2M_at; Start 24; Stop 48
taaaatcaacggttacagaggatta

SEQ ID NO: 40440 - DNA, 25 bp, Artificial
  probe
  misc_feature (1)..(25): SEQ ID NO: 4633; WAN024A2M_at; Start 38; Stop 62
acagaggattaaaaactgtaactgg

SEQ ID NO: 40441 - DNA, 25 bp, Artificial
  probe
  misc_feature (1)..(25): SEQ ID NO: 4633; WAN024A2M_at; Start 191; Stop 215
taattagagagccaactttctaata

SEQ ID NO: 40442 - DNA, 25 bp, Artificial
  probe
  misc_feature (1)..(25): SEQ ID NO: 4633; WAN024A2M_at; Start 18; Stop 42
gctttgtaaaatcaacggttacaga

SEQ ID NO: 40443 - DNA, 25 bp, Artificial
  probe
  misc_feature (1)..(25): SEQ ID NO: 4633; WAN024A2M_at; Start 161; Stop 185
gtcttttgatatatataatgagaat

SEQ ID NO: 40444 - DNA, 25 bp, Artificial
  probe
  misc_feature (1)..(25): SEQ ID NO: 4633; WAN024A2M_at; Start 39; Stop 63
cagaggattaaaaactgtaactggg

SEQ ID NO: 40445 - DNA, 25 bp, Artificial
  probe
  misc_feature (1)..(25): SEQ ID NO: 4633; WAN024A2M_at; Start 88; Stop 112
aagaataaattgaataatagttcca

SEQ ID NO: 40446 - DNA, 25 bp, Artificial
  probe
  misc_feature (1)..(25): SEQ ID NO: 4633; WAN024A2M_at; Start 90; Stop 114
gaataaattgaataatagttccaag

SEQ ID NO: 40447 - DNA, 25 bp, Artificial
  probe
  misc_feature (1)..(25): SEQ ID NO: 4633; WAN024A2M_at; Start 21; Stop 45
ttgtaaaatcaacggttacagagga

SEQ ID NO: 40448 - DNA, 25 bp, Artificial
  probe
  misc_feature (1)..(25): SEQ ID NO: 4633; WAN024A2M_at; Start 186; Stop 210
taatttaattagagagccaactttc

SEQ ID NO: 40449 - DNA, 25 bp, Artificial
  probe
  misc_feature (1)..(25): SEQ ID NO: 4633; WAN024A2M_at; Start 187; Stop 211
aatttaattagagagccaactttct

SEQ ID NO: 40450 - DNA, 25 bp, Artificial
  probe
  misc_feature (1)..(25): SEQ ID NO: 4633; WAN024A2M_at; Start 184; Stop 208
attaatttaattagagagccaactt

SEQ ID NO: 40451 - DNA, 25 bp, Artificial
  probe
  misc_feature (1)..(25): SEQ ID NO: 4633; WAN024A2M_at; Start 162; Stop 186
tcttttgatatatataatgagaatt

SEQ ID NO: 40452 - DNA, 25 bp, Artificial
  probe
  misc_feature (1)..(25): SEQ ID NO: 4633; WAN024A2M_at; Start 192; Stop 216
aattagagagccaactttctaatat

SEQ ID NO: 40453 - DNA, 25 bp, Artificial
  probe
  misc_feature (1)..(25): SEQ ID NO: 4633; WAN024A2M_at; Start 180; Stop 204
gagaattaatttaattagagagcca

SEQ ID NO: 40454 - DNA, 25 bp, Artificial
  probe
  misc_feature (1)..(25): SEQ ID NO: 4633; WAN024A2M_at; Start 91; Stop 115
aataaattgaataatagttccaagt

SEQ ID NO: 40455 - DNA, 25 bp, Artificial
  probe
  misc_feature (1)..(25): SEQ ID NO: 4633; WAN024A2M_at; Start 159; Stop 183
cggtcttttgatatatataatgaga

SEQ ID NO: 40456 - DNA, 25 bp, Artificial
  probe
  misc_feature (1)..(25): SEQ ID NO: 4633; WAN024A2M_at; Start 37; Stop 61
tacagaggattaaaaactgtaactg

SEQ ID NO: 40457 - DNA, 25 bp, Artificial
  probe
  misc_feature (1)..(25): SEQ ID NO: 4633; WAN024A2M_at; Start 17; Stop 41
agctttgtaaaatcaacggttacag

SEQ ID NO: 40458 - DNA, 25 bp, Artificial
  probe
  misc_feature (1)..(25): SEQ ID NO: 4633; WAN024A2M_at; Start 19; Stop 43
ctttgtaaaatcaacggttacagag

SEQ ID NO: 40459 - DNA, 25 bp, Artificial
  probe
  misc_feature (1)..(25): SEQ ID NO: 4633; WAN024A2M_at; Start 189; Stop 213
tttaattagagagccaactttctaa

SEQ ID NO: 40460 - DNA, 25 bp, Artificial
  probe
  misc_feature (1)..(25): SEQ ID NO: 4633; WAN024A2M_at; Start 160; Stop 184
ggtcttttgatatatataatgagaa

SEQ ID NO: 40461 - DNA, 25 bp, Artificial
  probe
  misc_feature (1)..(25): SEQ ID NO: 4633; WAN024A2M_at; Start 179; Stop 203
tgagaattaatttaattagagagcc

SEQ ID NO: 40462 - DNA, 25 bp, Artificial
  probe
  misc_feature (1)..(25): SEQ ID NO: 4633; WAN024A2M_at; Start 158; Stop 182
gcggtcttttgatatatataatgag

SEQ ID NO: 40463 - DNA, 25 bp, Artificial
  probe
  misc_feature (1)..(25): SEQ ID NO: 4633; WAN024A2M_at; Start 163; Stop 187
cttttgatatatataatgagaatta

SEQ ID NO: 40464 - DNA, 25 bp, Artificial
  probe
  misc_feature (1)..(25): SEQ ID NO: 4633; WAN024A2M_at; Start 92; Stop 116
ataaattgaataatagttccaagtg

SEQ ID NO: 40465 - DNA, 25 bp, Artificial
  probe
  misc_feature (1)..(25): SEQ ID NO: 4633; WAN024A2M_at; Start 181; Stop 205
agaattaatttaattagagagccaa

SEQ ID NO: 40466 - DNA, 25 bp, Artificial
  probe
  misc_feature (1)..(25): SEQ ID NO: 4633; WAN024A2M_at; Start 22; Stop 46
tgtaaaatcaacggttacagaggat

SEQ ID NO: 40467 - DNA, 25 bp, Artificial
  probe
  misc_feature (1)..(25): SEQ ID NO: 4633; WAN024A2M_at; Start 157; Stop 181
tgcggtcttttgatatatataatga

SEQ ID NO: 40468 - DNA, 25 bp, Artificial
  probe
  misc_feature (1)..(25): SEQ ID NO: 4633; WAN024A2M_at; Start 182; Stop 206
gaattaatttaattagagagccaac

SEQ ID NO: 40469 - DNA, 25 bp, Artificial
  probe
  misc_feature (1)..(25): SEQ ID NO: 4633; WAN024A2M_at; Start 89; Stop 113
agaataaattgaataatagttccaa

SEQ ID NO: 40470 - DNA, 25 bp, Artificial
  probe
  misc_feature (1)..(25): SEQ ID NO: 4633; WAN024A2M_at; Start 156; Stop 180
ctgcggtcttttgatatatataatg

SEQ ID NO: 40471 - DNA, 25 bp, Artificial
  probe
  misc_feature (1)..(25): SEQ ID NO: 566; WAN024A2N_at; Start 34; Stop 58
tctcattatatatatcaaaagaccg

SEQ ID NO: 40472 - DNA, 25 bp, Artificial
  probe
  misc_feature (1)..(25): SEQ ID NO: 566; WAN024A2N_at; Start 36; Stop 60
tcattatatatatcaaaagaccgca

SEQ ID NO: 40473 - DNA, 25 bp, Artificial
  probe
  misc_feature (1)..(25): SEQ ID NO: 566; WAN024A2N_at; Start 105; Stop 129
tggaactattattcaatttattctt

SEQ ID NO: 40474 - DNA, 25 bp, Artificial
  probe
  misc_feature (1)..(25): SEQ ID NO: 566; WAN024A2N_at; Start 176; Stop 200
ctgtaaccgttgattttacaaagct

SEQ ID NO: 40475 - DNA, 25 bp, Artificial
  probe
  misc_feature (1)..(25): SEQ ID NO: 566; WAN024A2N_at; Start 155; Stop 179
ccagttacagtttttaatcctctgt

SEQ ID NO: 40476 - DNA, 25 bp, Artificial
  probe
  misc_feature (1)..(25): SEQ ID NO: 566; WAN024A2N_at; Start 101; Stop 125
cacttggaactattattcaatttat

SEQ ID NO: 40477 - DNA, 25 bp, Artificial
  probe
  misc_feature (1)..(25): SEQ ID NO: 566; WAN024A2N_at; Start 10; Stop 34
agttggctctctaattaaattaatt

SEQ ID NO: 40478 - DNA, 25 bp, Artificial
  probe
  misc_feature (1)..(25): SEQ ID NO: 566; WAN024A2N_at; Start 11; Stop 35
gttggctctctaattaaattaattc

SEQ ID NO: 40479 - DNA, 25 bp, Artificial
  probe
  misc_feature (1)..(25): SEQ ID NO: 566; WAN024A2N_at; Start 31; Stop 55
aattctcattatatatatcaaaaga

SEQ ID NO: 40480 - DNA, 25 bp, Artificial
  probe
  misc_feature (1)..(25): SEQ ID NO: 566; WAN024A2N_at; Start 172; Stop 196
tcctctgtaaccgttgattttacaa

SEQ ID NO: 40481 - DNA, 25 bp, Artificial
  probe
  misc_feature (1)..(25): SEQ ID NO: 566; WAN024A2N_at; Start 9; Stop 33
aagttggctctctaattaaattaat

SEQ ID NO: 40482 - DNA, 25 bp, Artificial
  probe
  misc_feature (1)..(25): SEQ ID NO: 566; WAN024A2N_at; Start 14; Stop 38
ggctctctaattaaattaattctca

SEQ ID NO: 40483 - DNA, 25 bp, Artificial
  probe
  misc_feature (1)..(25): SEQ ID NO: 566; WAN024A2N_at; Start 156; Stop 180
cagttacagtttttaatcctctgta

SEQ ID NO: 40484 - DNA, 25 bp, Artificial
  probe
  misc_feature (1)..(25): SEQ ID NO: 566; WAN024A2N_at; Start 104; Stop 128
ttggaactattattcaatttattct

SEQ ID NO: 40485 - DNA, 25 bp, Artificial
  probe
  misc_feature (1)..(25): SEQ ID NO: 566; WAN024A2N_at; Start 12; Stop 36
ttggctctctaattaaattaattct

SEQ ID NO: 40486 - DNA, 25 bp, Artificial
  probe
  misc_feature (1)..(25): SEQ ID NO: 566; WAN024A2N_at; Start 15; Stop 39
gctctctaattaaattaattctcat

SEQ ID NO: 40487 - DNA, 25 bp, Artificial
  probe
  misc_feature (1)..(25): SEQ ID NO: 566; WAN024A2N_at; Start 103; Stop 127
cttggaactattattcaatttattc

SEQ ID NO: 40488 - DNA, 25 bp, Artificial
  probe
  misc_feature (1)..(25): SEQ ID NO: 566; WAN024A2N_at; Start 174; Stop 198
ctctgtaaccgttgattttacaaag

SEQ ID NO: 40489 - DNA, 25 bp, Artificial
  probe
  misc_feature (1)..(25): SEQ ID NO: 566; WAN024A2N_at; Start 13; Stop 37
tggctctctaattaaattaattctc

SEQ ID NO: 40490 - DNA, 25 bp, Artificial
  probe
  misc_feature (1)..(25): SEQ ID NO: 566; WAN024A2N_at; Start 169; Stop 193
taatcctctgtaaccgttgatttta

SEQ ID NO: 40491 - DNA, 25 bp, Artificial
  probe
  misc_feature (1)..(25): SEQ ID NO: 566; WAN024A2N_at; Start 33; Stop 57
ttctcattatatatatcaaaagacc

SEQ ID NO: 40492 - DNA, 25 bp, Artificial
  probe
  misc_feature (1)..(25): SEQ ID NO: 566; WAN024A2N_at; Start 32; Stop 56
attctcattatatatatcaaaagac

SEQ ID NO: 40493 - DNA, 25 bp, Artificial
  probe
  misc_feature (1)..(25): SEQ ID NO: 566; WAN024A2N_at; Start 29; Stop 53
ttaattctcattatatatatcaaaa

SEQ ID NO: 40494 - DNA, 25 bp, Artificial
  probe
  misc_feature (1)..(25): SEQ ID NO: 566; WAN024A2N_at; Start 35; Stop 59
ctcattatatatatcaaaagaccgc

SEQ ID NO: 40495 - DNA, 25 bp, Artificial
  probe
  misc_feature (1)..(25): SEQ ID NO: 566; WAN024A2N_at; Start 175; Stop 199
tctgtaaccgttgattttacaaagc

SEQ ID NO: 40496 - DNA, 25 bp, Artificial
  probe
  misc_feature (1)..(25): SEQ ID NO: 566; WAN024A2N_at; Start 37; Stop 61
cattatatatatcaaaagaccgcag

SEQ ID NO: 40497 - DNA, 25 bp, Artificial
  probe
  misc_feature (1)..(25): SEQ ID NO: 566; WAN024A2N_at; Start 30; Stop 54
taattctcattatatatatcaaaag

SEQ ID NO: 40498 - DNA, 25 bp, Artificial
  probe
  misc_feature (1)..(25): SEQ ID NO: 566; WAN024A2N_at; Start 154; Stop 178
cccagttacagtttttaatcctctg

SEQ ID NO: 40499 - DNA, 25 bp, Artificial
  probe
  misc_feature (1)..(25): SEQ ID NO: 566; WAN024A2N_at; Start 102; Stop 126
acttggaactattattcaatttatt

SEQ ID NO: 40500 - DNA, 25 bp, Artificial
  probe
  misc_feature (1)..(25): SEQ ID NO: 566; WAN024A2N_at; Start 171; Stop 195
atcctctgtaaccgttgattttaca

SEQ ID NO: 40501 - DNA, 25 bp, Artificial
  probe
  misc_feature (1)..(25): SEQ ID NO: 185; WAN024A2O_at; Start 3; Stop 27
cacactatcccttttagacaatatt

SEQ ID NO: 40502 - DNA, 25 bp, Artificial
  probe
  misc_feature (1)..(25): SEQ ID NO: 185; WAN024A2O_at; Start 116; Stop 140
cgaatttatatctaaaagggatatt

SEQ ID NO: 40503 - DNA, 25 bp, Artificial
  probe
  misc_feature (1)..(25): SEQ ID NO: 185; WAN024A2O_at; Start 35; Stop 59
gccttattaattcaaaactattgta

SEQ ID NO: 40504 - DNA, 25 bp, Artificial
  probe
  misc_feature (1)..(25): SEQ ID NO: 185; WAN024A2O_at; Start 42; Stop 66
taattcaaaactattgtattagtaa

SEQ ID NO: 40505 - DNA, 25 bp, Artificial
  probe
  misc_feature (1)..(25): SEQ ID NO: 185; WAN024A2O_at; Start 1; Stop 25
aacacactatcccttttagacaata

SEQ ID NO: 40506 - DNA, 25 bp, Artificial
  probe
  misc_feature (1)..(25): SEQ ID NO: 185; WAN024A2O_at; Start 96; Stop 120
gatagatattatcaattaagcgaat

SEQ ID NO: 40507 - DNA, 25 bp, Artificial
  probe
  misc_feature (1)..(25): SEQ ID NO: 185; WAN024A2O_at; Start 113; Stop 137
aagcgaatttatatctaaaagggat

SEQ ID NO: 40508 - DNA, 25 bp, Artificial
  probe
  misc_feature (1)..(25): SEQ ID NO: 185; WAN024A2O_at; Start 13; Stop 37
cttttagacaatattccaattagcc

SEQ ID NO: 40509 - DNA, 25 bp, Artificial
  probe
  misc_feature (1)..(25): SEQ ID NO: 185; WAN024A2O_at; Start 14; Stop 38
ttttagacaatattccaattagcct

SEQ ID NO: 40510 - DNA, 25 bp, Artificial
  probe
  misc_feature (1)..(25): SEQ ID NO: 185; WAN024A2O_at; Start 17; Stop 41
tagacaatattccaattagccttat

SEQ ID NO: 40511 - DNA, 25 bp, Artificial
  probe
  misc_feature (1)..(25): SEQ ID NO: 185; WAN024A2O_at; Start 70; Stop 94
taacagatgtataatagaaaagcaa

SEQ ID NO: 40512 - DNA, 25 bp, Artificial
  probe
  misc_feature (1)..(25): SEQ ID NO: 185; WAN024A2O_at; Start 56; Stop 80
tgtattagtaattataacagatgta

SEQ ID NO: 40513 - DNA, 25 bp, Artificial
  probe
  misc_feature (1)..(25): SEQ ID NO: 185; WAN024A2O_at; Start 12; Stop 36
ccttttagacaatattccaattagc

SEQ ID NO: 40514 - DNA, 25 bp, Artificial
  probe
  misc_feature (1)..(25): SEQ ID NO: 185; WAN024A2O_at; Start 19; Stop 43
gacaatattccaattagccttatta

SEQ ID NO: 40515 - DNA, 25 bp, Artificial
  probe
  misc_feature (1)..(25): SEQ ID NO: 185; WAN024A2O_at; Start 78; Stop 102
gtataatagaaaagcaatgatagat

SEQ ID NO: 40516 - DNA, 25 bp, Artificial
  probe
  misc_feature (1)..(25): SEQ ID NO: 185; WAN024A2O_at; Start 112; Stop 136
taagcgaatttatatctaaaaggga

SEQ ID NO: 40517 - DNA, 25 bp, Artificial
  probe
  misc_feature (1)..(25): SEQ ID NO: 185; WAN024A2O_at; Start 21; Stop 45
caatattccaattagccttattaat

SEQ ID NO: 40518 - DNA, 25 bp, Artificial
  probe
  misc_feature (1)..(25): SEQ ID NO: 185; WAN024A2O_at; Start 7; Stop 31
ctatcccttttagacaatattccaa

SEQ ID NO: 40519 - DNA, 25 bp, Artificial
  probe
  misc_feature (1)..(25): SEQ ID NO: 185; WAN024A2O_at; Start 29; Stop 53
caattagccttattaattcaaaact

SEQ ID NO: 40520 - DNA, 25 bp, Artificial
  probe
  misc_feature (1)..(25): SEQ ID NO: 185; WAN024A2O_at; Start 75; Stop 99
gatgtataatagaaaagcaatgata

SEQ ID NO: 40521 - DNA, 25 bp, Artificial
  probe
  misc_feature (1)..(25): SEQ ID NO: 185; WAN024A2O_at; Start 16; Stop 40
ttagacaatattccaattagcctta

SEQ ID NO: 40522 - DNA, 25 bp, Artificial
  probe
  misc_feature (1)..(25): SEQ ID NO: 185; WAN024A2O_at; Start 73; Stop 97
cagatgtataatagaaaagcaatga

SEQ ID NO: 40523 - DNA, 25 bp, Artificial
  probe
  misc_feature (1)..(25): SEQ ID NO: 185; WAN024A2O_at; Start 121; Stop 145
ttatatctaaaagggatattaaaga

SEQ ID NO: 40524 - DNA, 25 bp, Artificial
  probe
  misc_feature (1)..(25): SEQ ID NO: 185; WAN024A2O_at; Start 115; Stop 139
gcgaatttatatctaaaagggatat

SEQ ID NO: 40525 - DNA, 25 bp, Artificial
  probe
  misc_feature (1)..(25): SEQ ID NO: 185; WAN024A2O_at; Start 100; Stop 124
gatattatcaattaagcgaatttat

SEQ ID NO: 40526 - DNA, 25 bp, Artificial
  probe
  misc_feature (1)..(25): SEQ ID NO: 185; WAN024A2O_at; Start 84; Stop 108
tagaaaagcaatgatagatattatc

SEQ ID NO: 40527 - DNA, 25 bp, Artificial
  probe
  misc_feature (1)..(25): SEQ ID NO: 185; WAN024A2O_at; Start 68; Stop 92
tataacagatgtataatagaaaagc

SEQ ID NO: 40528 - DNA, 25 bp, Artificial
  probe
  misc_feature (1)..(25): SEQ ID NO: 185; WAN024A2O_at; Start 15; Stop 39
tttagacaatattccaattagcctt

SEQ ID NO: 40529 - DNA, 25 bp, Artificial
  probe
  misc_feature (1)..(25): SEQ ID NO: 185; WAN024A2O_at; Start 98; Stop 122
tagatattatcaattaagcgaattt

SEQ ID NO: 40530 - DNA, 25 bp, Artificial
  probe
  misc_feature (1)..(25): SEQ ID NO: 185; WAN024A2O_at; Start 27; Stop 51
tccaattagccttattaattcaaaa

SEQ ID NO: 40531 - DNA, 25 bp, Artificial
  probe
  misc_feature (1)..(25): SEQ ID NO: 185; WAN024A2O_at; Start 8; Stop 32
tatcccttttagacaatattccaat

SEQ ID NO: 40532 - DNA, 25 bp, Artificial
  probe
  misc_feature (1)..(25): SEQ ID NO: 185; WAN024A2O_at; Start 5; Stop 29
cactatcccttttagacaatattcc

SEQ ID NO: 40533 - DNA, 25 bp, Artificial
  probe
  misc_feature (1)..(25): SEQ ID NO: 185; WAN024A2O_at; Start 33; Stop 57
tagccttattaattcaaaactattg

SEQ ID NO: 40534 - DNA, 25 bp, Artificial
  probe
  misc_feature (1)..(25): SEQ ID NO: 185; WAN024A2O_at; Start 11; Stop 35
cccttttagacaatattccaattag

SEQ ID NO: 40535 - DNA, 25 bp, Artificial
  probe
  misc_feature (1)..(25): SEQ ID NO: 594; WAN024A2P_at; Start 18; Stop 42
tcccttttagatataaattcgctta

SEQ ID NO: 40536 - DNA, 25 bp, Artificial
  probe
  misc_feature (1)..(25): SEQ ID NO: 594; WAN024A2P_at; Start 123; Stop 147
ttggaatattgtctaaaagggatag

SEQ ID NO: 40537 - DNA, 25 bp, Artificial
  probe
  misc_feature (1)..(25): SEQ ID NO: 594; WAN024A2P_at; Start 117; Stop 141
ggctaattggaatattgtctaaaag

SEQ ID NO: 40538 - DNA, 25 bp, Artificial
  probe
  misc_feature (1)..(25): SEQ ID NO: 594; WAN024A2P_at; Start 57; Stop 81
tcattgcttttctattatacatctg

SEQ ID NO: 40539 - DNA, 25 bp, Artificial
  probe
  misc_feature (1)..(25): SEQ ID NO: 594; WAN024A2P_at; Start 113; Stop 137
ataaggctaattggaatattgtcta

SEQ ID NO: 40540 - DNA, 25 bp, Artificial
  probe
  misc_feature (1)..(25): SEQ ID NO: 594; WAN024A2P_at; Start 20; Stop 44
ccttttagatataaattcgcttaat

SEQ ID NO: 40541 - DNA, 25 bp, Artificial
  probe
  misc_feature (1)..(25): SEQ ID NO: 594; WAN024A2P_at; Start 74; Stop 98
tacatctgttataattactaataca

SEQ ID NO: 40542 - DNA, 25 bp, Artificial
  probe
  misc_feature (1)..(25): SEQ ID NO: 594; WAN024A2P_at; Start 95; Stop 119
tacaatagttttgaattaataaggc

SEQ ID NO: 40543 - DNA, 25 bp, Artificial
  probe
  misc_feature (1)..(25): SEQ ID NO: 594; WAN024A2P_at; Start 59; Stop 83
attgcttttctattatacatctgtt

SEQ ID NO: 40544 - DNA, 25 bp, Artificial
  probe
  misc_feature (1)..(25): SEQ ID NO: 594; WAN024A2P_at; Start 118; Stop 142
gctaattggaatattgtctaaaagg

SEQ ID NO: 40545 - DNA, 25 bp, Artificial
  probe
  misc_feature (1)..(25): SEQ ID NO: 594; WAN024A2P_at; Start 119; Stop 143
ctaattggaatattgtctaaaaggg

SEQ ID NO: 40546 - DNA, 25 bp, Artificial
  probe
  misc_feature (1)..(25): SEQ ID NO: 594; WAN024A2P_at; Start 103; Stop 127
ttttgaattaataaggctaattgga

SEQ ID NO: 40547 - DNA, 25 bp, Artificial
  probe
  misc_feature (1)..(25): SEQ ID NO: 594; WAN024A2P_at; Start 114; Stop 138
taaggctaattggaatattgtctaa

SEQ ID NO: 40548 - DNA, 25 bp, Artificial
  probe
  misc_feature (1)..(25): SEQ ID NO: 594; WAN024A2P_at; Start 116; Stop 140
aggctaattggaatattgtctaaaa

SEQ ID NO: 40549 - DNA, 25 bp, Artificial
  probe
  misc_feature (1)..(25): SEQ ID NO: 594; WAN024A2P_at; Start 46; Stop 70
gataatatctatcattgcttttcta

SEQ ID NO: 40550 - DNA, 25 bp, Artificial
  probe
  misc_feature (1)..(25): SEQ ID NO: 594; WAN024A2P_at; Start 121; Stop 145
aattggaatattgtctaaaagggat

SEQ ID NO: 40551 - DNA, 25 bp, Artificial
  probe
  misc_feature (1)..(25): SEQ ID NO: 594; WAN024A2P_at; Start 27; Stop 51
gatataaattcgcttaattgataat

SEQ ID NO: 40552 - DNA, 25 bp, Artificial
  probe
  misc_feature (1)..(25): SEQ ID NO: 594; WAN024A2P_at; Start 97; Stop 121
caatagttttgaattaataaggcta

SEQ ID NO: 40553 - DNA, 25 bp, Artificial
  probe
  misc_feature (1)..(25): SEQ ID NO: 594; WAN024A2P_at; Start 122; Stop 146
attggaatattgtctaaaagggata

SEQ ID NO: 40554 - DNA, 25 bp, Artificial
  probe
  misc_feature (1)..(25): SEQ ID NO: 594; WAN024A2P_at; Start 34; Stop 58
attcgcttaattgataatatctatc

SEQ ID NO: 40555 - DNA, 25 bp, Artificial
  probe
  misc_feature (1)..(25): SEQ ID NO: 594; WAN024A2P_at; Start 25; Stop 49
tagatataaattcgcttaattgata

SEQ ID NO: 40556 - DNA, 25 bp, Artificial
  probe
  misc_feature (1)..(25): SEQ ID NO: 594; WAN024A2P_at; Start 120; Stop 144
taattggaatattgtctaaaaggga

SEQ ID NO: 40557 - DNA, 25 bp, Artificial
  probe
  misc_feature (1)..(25): SEQ ID NO: 594; WAN024A2P_at; Start 55; Stop 79
tatcattgcttttctattatacatc

SEQ ID NO: 40558 - DNA, 25 bp, Artificial
  probe
  misc_feature (1)..(25): SEQ ID NO: 594; WAN024A2P_at; Start 58; Stop 82
cattgcttttctattatacatctgt

SEQ ID NO: 40559 - DNA, 25 bp, Artificial
  probe
  misc_feature (1)..(25): SEQ ID NO: 594; WAN024A2P_at; Start 16; Stop 40
tatcccttttagatataaattcgct

SEQ ID NO: 40560 - DNA, 25 bp, Artificial
  probe
  misc_feature (1)..(25): SEQ ID NO: 594; WAN024A2P_at; Start 78; Stop 102
tctgttataattactaatacaatag

SEQ ID NO: 40561 - DNA, 25 bp, Artificial
  probe
  misc_feature (1)..(25): SEQ ID NO: 594; WAN024A2P_at; Start 33; Stop 57
aattcgcttaattgataatatctat

SEQ ID NO: 40562 - DNA, 25 bp, Artificial
  probe
  misc_feature (1)..(25): SEQ ID NO: 594; WAN024A2P_at; Start 115; Stop 139
aaggctaattggaatattgtctaaa

SEQ ID NO: 40563 - DNA, 25 bp, Artificial
  probe
  misc_feature (1)..(25): SEQ ID NO: 594; WAN024A2P_at; Start 31; Stop 55
taaattcgcttaattgataatatct

SEQ ID NO: 40564 - DNA, 25 bp, Artificial
  probe
  misc_feature (1)..(25): SEQ ID NO: 594; WAN024A2P_at; Start 112; Stop 136
aataaggctaattggaatattgtct

SEQ ID NO: 40565 - DNA, 25 bp, Artificial
  probe
  misc_feature (1)..(25): SEQ ID NO: 594; WAN024A2P_at; Start 36; Stop 60
tcgcttaattgataatatctatcat

SEQ ID NO: 40566 - DNA, 25 bp, Artificial
  probe
  misc_feature (1)..(25): SEQ ID NO: 594; WAN024A2P_at; Start 111; Stop 135
taataaggctaattggaatattgtc

SEQ ID NO: 40567 - DNA, 25 bp, Artificial
  probe
  misc_feature (1)..(25): SEQ ID NO: 594; WAN024A2P_at; Start 96; Stop 120
acaatagttttgaattaataaggct

SEQ ID NO: 40568 - DNA, 25 bp, Artificial
  probe
  misc_feature (1)..(25): SEQ ID NO: 594; WAN024A2P_at; Start 104; Stop 128
tttgaattaataaggctaattggaa

SEQ ID NO: 40569 - DNA, 25 bp, Artificial
  probe
  misc_feature (1)..(25): SEQ ID NO: 305; WAN024A2Q_at; Start 355; Stop 379
gacatgtttaacagactctatttta

SEQ ID NO: 40570 - DNA, 25 bp, Artificial
  probe
  misc_feature (1)..(25): SEQ ID NO: 305; WAN024A2Q_at; Start 333; Stop 357
tagacaatttactagttctatagac

SEQ ID NO: 40571 - DNA, 25 bp, Artificial
  probe
  misc_feature (1)..(25): SEQ ID NO: 305; WAN024A2Q_at; Start 346; Stop 370
agttctatagacatgtttaacagac

SEQ ID NO: 40572 - DNA, 25 bp, Artificial
  probe
  misc_feature (1)..(25): SEQ ID NO: 305; WAN024A2Q_at; Start 282; Stop 306
gaagttaattttctaataaatatca

SEQ ID NO: 40573 - DNA, 25 bp, Artificial
  probe
  misc_feature (1)..(25): SEQ ID NO: 305; WAN024A2Q_at; Start 202; Stop 226
taaataatttccctaaagatatgga

SEQ ID NO: 40574 - DNA, 25 bp, Artificial
  probe
  misc_feature (1)..(25): SEQ ID NO: 305; WAN024A2Q_at; Start 349; Stop 373
tctatagacatgtttaacagactct

SEQ ID NO: 40575 - DNA, 25 bp, Artificial
  probe
  misc_feature (1)..(25): SEQ ID NO: 305; WAN024A2Q_at; Start 149; Stop 173
agtccgaagactgccgatatttatc

SEQ ID NO: 40576 - DNA, 25 bp, Artificial
  probe
  misc_feature (1)..(25): SEQ ID NO: 305; WAN024A2Q_at; Start 62; Stop 86
tagattaactacctaattatagcat

SEQ ID NO: 40577 - DNA, 25 bp, Artificial
  probe
  misc_feature (1)..(25): SEQ ID NO: 305; WAN024A2Q_at; Start 76; Stop 100
aattatagcatataacgcagattcc

SEQ ID NO: 40578 - DNA, 25 bp, Artificial
  probe
  misc_feature (1)..(25): SEQ ID NO: 305; WAN024A2Q_at; Start 157; Stop 181
gactgccgatatttatctctcatct

SEQ ID NO: 40579 - DNA, 25 bp, Artificial
  probe
  misc_feature (1)..(25): SEQ ID NO: 305; WAN024A2Q_at; Start 83; Stop 107
gcatataacgcagattcctttcaat

SEQ ID NO: 40580 - DNA, 25 bp, Artificial
  probe
  misc_feature (1)..(25): SEQ ID NO: 305; WAN024A2Q_at; Start 177; Stop 201
catctctttaattatggtaagtaaa

SEQ ID NO: 40581 - DNA, 25 bp, Artificial
  probe
  misc_feature (1)..(25): SEQ ID NO: 305; WAN024A2Q_at; Start 154; Stop 178
gaagactgccgatatttatctctca

SEQ ID NO: 40582 - DNA, 25 bp, Artificial
  probe
  misc_feature (1)..(25): SEQ ID NO: 305; WAN024A2Q_at; Start 152; Stop 176
ccgaagactgccgatatttatctct

SEQ ID NO: 40583 - DNA, 25 bp, Artificial
  probe
  misc_feature (1)..(25): SEQ ID NO: 305; WAN024A2Q_at; Start 304; Stop 328
tcaatatgtgttagtatcttttaaa

SEQ ID NO: 40584 - DNA, 25 bp, Artificial
  probe
  misc_feature (1)..(25): SEQ ID NO: 305; WAN024A2Q_at; Start 163; Stop 187
cgatatttatctctcatctctttaa

SEQ ID NO: 40585 - DNA, 25 bp, Artificial
  probe
  misc_feature (1)..(25): SEQ ID NO: 305; WAN024A2Q_at; Start 147; Stop 171
gcagtccgaagactgccgatattta

SEQ ID NO: 40586 - DNA, 25 bp, Artificial
  probe
  misc_feature (1)..(25): SEQ ID NO: 305; WAN024A2Q_at; Start 29; Stop 53
tctccaattctatattttacctttc

SEQ ID NO: 40587 - DNA, 25 bp, Artificial
  probe
  misc_feature (1)..(25): SEQ ID NO: 305; WAN024A2Q_at; Start 89; Stop 113
aacgcagattcctttcaatcgtatg

SEQ ID NO: 40588 - DNA, 25 bp, Artificial
  probe
  misc_feature (1)..(25): SEQ ID NO: 305; WAN024A2Q_at; Start 112; Stop 136
tgatttactgcattaaattaagtaa

SEQ ID NO: 40589 - DNA, 25 bp, Artificial
  probe
  misc_feature (1)..(25): SEQ ID NO: 305; WAN024A2Q_at; Start 79; Stop 103
tatagcatataacgcagattccttt

SEQ ID NO: 40590 - DNA, 25 bp, Artificial
  probe
  misc_feature (1)..(25): SEQ ID NO: 305; WAN024A2Q_at; Start 91; Stop 115
cgcagattcctttcaatcgtatgat

SEQ ID NO: 40591 - DNA, 25 bp, Artificial
  probe
  misc_feature (1)..(25): SEQ ID NO: 305; WAN024A2Q_at; Start 86; Stop 110
tataacgcagattcctttcaatcgt

SEQ ID NO: 40592 - DNA, 25 bp, Artificial
  probe
  misc_feature (1)..(25): SEQ ID NO: 305; WAN024A2Q_at; Start 173; Stop 197
ctctcatctctttaattatggtaag

SEQ ID NO: 40593 - DNA, 25 bp, Artificial
  probe
  misc_feature (1)..(25): SEQ ID NO: 305; WAN024A2Q_at; Start 342; Stop 366
tactagttctatagacatgtttaac

SEQ ID NO: 40594 - DNA, 25 bp, Artificial
  probe
  misc_feature (1)..(25): SEQ ID NO: 305; WAN024A2Q_at; Start 71; Stop 95
tacctaattatagcatataacgcag

SEQ ID NO: 40595 - DNA, 25 bp, Artificial
  probe
  misc_feature (1)..(25): SEQ ID NO: 305; WAN024A2Q_at; Start 298; Stop 322
taaatatcaatatgtgttagtatct

SEQ ID NO: 40596 - DNA, 25 bp, Artificial
  probe
  misc_feature (1)..(25): SEQ ID NO: 305; WAN024A2Q_at; Start 261; Stop 285
tataaatactgtaaaaatcctgaag

SEQ ID NO: 40597 - DNA, 25 bp, Artificial
  probe
  misc_feature (1)..(25): SEQ ID NO: 305; WAN024A2Q_at; Start 81; Stop 105
tagcatataacgcagattcctttca

SEQ ID NO: 40598 - DNA, 25 bp, Artificial
  probe
  misc_feature (1)..(25): SEQ ID NO: 305; WAN024A2Q_at; Start 266; Stop 290
atactgtaaaaatcctgaagttaat

SEQ ID NO: 40599 - DNA, 25 bp, Artificial
  probe
  misc_feature (1)..(25): SEQ ID NO: 305; WAN024A2Q_at; Start 53; Stop 77
ctaaatgtatagattaactacctaa

SEQ ID NO: 40600 - DNA, 25 bp, Artificial
  probe
  misc_feature (1)..(25): SEQ ID NO: 305; WAN024A2Q_at; Start 46; Stop 70
tacctttctaaatgtatagattaac

SEQ ID NO: 40601 - DNA, 25 bp, Artificial
  probe
  misc_feature (1)..(25): SEQ ID NO: 305; WAN024A2Q_at; Start 104; Stop 128
caatcgtatgatttactgcattaaa

SEQ ID NO: 40602 - DNA, 25 bp, Artificial
  probe
  misc_feature (1)..(25): SEQ ID NO: 305; WAN024A2Q_at; Start 99; Stop 123
cctttcaatcgtatgatttactgca

SEQ ID NO: 40603 - DNA, 25 bp, Artificial
  probe
  misc_feature (1)..(25): SEQ ID NO: 476; WAN024A2R_at; Start 49; Stop 73
gcatatatagtctgaataaatttga

SEQ ID NO: 40604 - DNA, 25 bp, Artificial
  probe
  misc_feature (1)..(25): SEQ ID NO: 476; WAN024A2R_at; Start 44; Stop 68
tatgtgcatatatagtctgaataaa

SEQ ID NO: 40605 - DNA, 25 bp, Artificial
  probe
  misc_feature (1)..(25): SEQ ID NO: 476; WAN024A2R_at; Start 50; Stop 74
catatatagtctgaataaatttgat

SEQ ID NO: 40606 - DNA, 25 bp, Artificial
  probe
  misc_feature (1)..(25): SEQ ID NO: 476; WAN024A2R_at; Start 39; Stop 63
gtgtatatgtgcatatatagtctga

SEQ ID NO: 40607 - DNA, 25 bp, Artificial
  probe
  misc_feature (1)..(25): SEQ ID NO: 476; WAN024A2R_at; Start 11; Stop 35
tacaagccatgtttttatatgaatt

SEQ ID NO: 40608 - DNA, 25 bp, Artificial
  probe
  misc_feature (1)..(25): SEQ ID NO: 476; WAN024A2R_at; Start 28; Stop 52
tatgaatttaagtgtatatgtgcat

SEQ ID NO: 40609 - DNA, 25 bp, Artificial
  probe
  misc_feature (1)..(25): SEQ ID NO: 476; WAN024A2R_at; Start 61; Stop 85
tgaataaatttgatttgaaaaatgg

SEQ ID NO: 40610 - DNA, 25 bp, Artificial
  probe
  misc_feature (1)..(25): SEQ ID NO: 476; WAN024A2R_at; Start 10; Stop 34
ttacaagccatgtttttatatgaat

SEQ ID NO: 40611 - DNA, 25 bp, Artificial
  probe
  misc_feature (1)..(25): SEQ ID NO: 476; WAN024A2R_at; Start 41; Stop 65
gtatatgtgcatatatagtctgaat

SEQ ID NO: 40612 - DNA, 25 bp, Artificial
  probe
  misc_feature (1)..(25): SEQ ID NO: 476; WAN024A2R_at; Start 13; Stop 37
caagccatgtttttatatgaattta

SEQ ID NO: 40613 - DNA, 25 bp, Artificial
  probe
  misc_feature (1)..(25): SEQ ID NO: 476; WAN024A2R_at; Start 38; Stop 62
agtgtatatgtgcatatatagtctg

SEQ ID NO: 40614 - DNA, 25 bp, Artificial
  probe
  misc_feature (1)..(25): SEQ ID NO: 476; WAN024A2R_at; Start 62; Stop 86
gaataaatttgatttgaaaaatgga

SEQ ID NO: 40615 - DNA, 25 bp, Artificial
  probe
  misc_feature (1)..(25): SEQ ID NO: 476; WAN024A2R_at; Start 31; Stop 55
gaatttaagtgtatatgtgcatata

SEQ ID NO: 40616 - DNA, 25 bp, Artificial
  probe
  misc_feature (1)..(25): SEQ ID NO: 476; WAN024A2R_at; Start 36; Stop 60
taagtgtatatgtgcatatatagtc

SEQ ID NO: 40617 - DNA, 25 bp, Artificial
  probe
  misc_feature (1)..(25): SEQ ID NO: 476; WAN024A2R_at; Start 8; Stop 32
ttttacaagccatgtttttatatga

SEQ ID NO: 40618 - DNA, 25 bp, Artificial
  probe
  misc_feature (1)..(25): SEQ ID NO: 476; WAN024A2R_at; Start 56; Stop 80
tagtctgaataaatttgatttgaaa

SEQ ID NO: 40619 - DNA, 25 bp, Artificial
  probe
  misc_feature (1)..(25): SEQ ID NO: 476; WAN024A2R_at; Start 48; Stop 72
tgcatatatagtctgaataaatttg

SEQ ID NO: 40620 - DNA, 25 bp, Artificial
  probe
  misc_feature (1)..(25): SEQ ID NO: 476; WAN024A2R_at; Start 58; Stop 82
gtctgaataaatttgatttgaaaaa

SEQ ID NO: 40621 - DNA, 25 bp, Artificial
  probe
  misc_feature (1)..(25): SEQ ID NO: 476; WAN024A2R_at; Start 54; Stop 78
tatagtctgaataaatttgatttga

SEQ ID NO: 40622 - DNA, 25 bp, Artificial
  probe
  misc_feature (1)..(25): SEQ ID NO: 476; WAN024A2R_at; Start 30; Stop 54
tgaatttaagtgtatatgtgcatat

SEQ ID NO: 40623 - DNA, 25 bp, Artificial
  probe
  misc_feature (1)..(25): SEQ ID NO: 476; WAN024A2R_at; Start 42; Stop 66
tatatgtgcatatatagtctgaata

SEQ ID NO: 40624 - DNA, 25 bp, Artificial
  probe
  misc_feature (1)..(25): SEQ ID NO: 476; WAN024A2R_at; Start 7; Stop 31
tttttacaagccatgtttttatatg

SEQ ID NO: 40625 - DNA, 25 bp, Artificial
  probe
  misc_feature (1)..(25): SEQ ID NO: 476; WAN024A2R_at; Start 9; Stop 33
tttacaagccatgtttttatatgaa

SEQ ID NO: 40626 - DNA, 25 bp, Artificial
  probe
  misc_feature (1)..(25): SEQ ID NO: 476; WAN024A2R_at; Start 16; Stop 40
gccatgtttttatatgaatttaagt

SEQ ID NO: 40627 - DNA, 25 bp, Artificial
  probe
  misc_feature (1)..(25): SEQ ID NO: 476; WAN024A2R_at; Start 37; Stop 61
aagtgtatatgtgcatatatagtct

SEQ ID NO: 40628 - DNA, 25 bp, Artificial
  probe
  misc_feature (1)..(25): SEQ ID NO: 476; WAN024A2R_at; Start 27; Stop 51
atatgaatttaagtgtatatgtgca

SEQ ID NO: 40629 - DNA, 25 bp, Artificial
  probe
  misc_feature (1)..(25): SEQ ID NO: 476; WAN024A2R_at; Start 12; Stop 36
acaagccatgtttttatatgaattt

SEQ ID NO: 40630 - DNA, 25 bp, Artificial
  probe
  misc_feature (1)..(25): SEQ ID NO: 476; WAN024A2R_at; Start 26; Stop 50
tatatgaatttaagtgtatatgtgc

SEQ ID NO: 40631 - DNA, 25 bp, Artificial
  probe
  misc_feature (1)..(25): SEQ ID NO: 476; WAN024A2R_at; Start 65; Stop 89
taaatttgatttgaaaaatggataa

SEQ ID NO: 40632 - DNA, 25 bp, Artificial
  probe
  misc_feature (1)..(25): SEQ ID NO: 476; WAN024A2R_at; Start 14; Stop 38
aagccatgtttttatatgaatttaa

SEQ ID NO: 40633 - DNA, 25 bp, Artificial
  probe
  misc_feature (1)..(25): SEQ ID NO: 476; WAN024A2R_at; Start 47; Stop 71
gtgcatatatagtctgaataaattt

SEQ ID NO: 40634 - DNA, 25 bp, Artificial
  probe
  misc_feature (1)..(25): SEQ ID NO: 476; WAN024A2R_at; Start 40; Stop 64
tgtatatgtgcatatatagtctgaa

SEQ ID NO: 40635 - DNA, 25 bp, Artificial
  probe
  misc_feature (1)..(25): SEQ ID NO: 476; WAN024A2R_at; Start 46; Stop 70
tgtgcatatatagtctgaataaatt

SEQ ID NO: 40636 - DNA, 25 bp, Artificial
  probe
  misc_feature (1)..(25): SEQ ID NO: 476; WAN024A2R_at; Start 17; Stop 41
ccatgtttttatatgaatttaagtg

SEQ ID NO: 40637 - DNA, 25 bp, Artificial
  probe
  misc_feature (1)..(25): SEQ ID NO: 569; WAN024A2S_at; Start 54; Stop 78
tttattcagactatatatgcacata

SEQ ID NO: 40638 - DNA, 25 bp, Artificial
  probe
  misc_feature (1)..(25): SEQ ID NO: 569; WAN024A2S_at; Start 85; Stop 109
taaattcatataaaaacatggcttg

SEQ ID NO: 40639 - DNA, 25 bp, Artificial
  probe
  misc_feature (1)..(25): SEQ ID NO: 569; WAN024A2S_at; Start 57; Stop 81
attcagactatatatgcacatatac

SEQ ID NO: 40640 - DNA, 25 bp, Artificial
  probe
  misc_feature (1)..(25): SEQ ID NO: 569; WAN024A2S_at; Start 40; Stop 64
tttttcaaatcaaatttattcagac

SEQ ID NO: 40641 - DNA, 25 bp, Artificial
  probe
  misc_feature (1)..(25): SEQ ID NO: 569; WAN024A2S_at; Start 86; Stop 110
aaattcatataaaaacatggcttgt

SEQ ID NO: 40642 - DNA, 25 bp, Artificial
  probe
  misc_feature (1)..(25): SEQ ID NO: 569; WAN024A2S_at; Start 81; Stop 105
cacttaaattcatataaaaacatgg

SEQ ID NO: 40643 - DNA, 25 bp, Artificial
  probe
  misc_feature (1)..(25): SEQ ID NO: 569; WAN024A2S_at; Start 42; Stop 66
tttcaaatcaaatttattcagacta

SEQ ID NO: 40644 - DNA, 25 bp, Artificial
  probe
  misc_feature (1)..(25): SEQ ID NO: 569; WAN024A2S_at; Start 51; Stop 75
aaatttattcagactatatatgcac

SEQ ID NO: 40645 - DNA, 25 bp, Artificial
  probe
  misc_feature (1)..(25): SEQ ID NO: 569; WAN024A2S_at; Start 45; Stop 69
caaatcaaatttattcagactatat

SEQ ID NO: 40646 - DNA, 25 bp, Artificial
  probe
  misc_feature (1)..(25): SEQ ID NO: 569; WAN024A2S_at; Start 69; Stop 93
tatgcacatatacacttaaattcat

SEQ ID NO: 40647 - DNA, 25 bp, Artificial
  probe
  misc_feature (1)..(25): SEQ ID NO: 569; WAN024A2S_at; Start 53; Stop 77
atttattcagactatatatgcacat

SEQ ID NO: 40648 - DNA, 25 bp, Artificial
  probe
  misc_feature (1)..(25): SEQ ID NO: 569; WAN024A2S_at; Start 90; Stop 114
tcatataaaaacatggcttgtaaaa

SEQ ID NO: 40649 - DNA, 25 bp, Artificial
  probe
  misc_feature (1)..(25): SEQ ID NO: 569; WAN024A2S_at; Start 59; Stop 83
tcagactatatatgcacatatacac

SEQ ID NO: 40650 - DNA, 25 bp, Artificial
  probe
  misc_feature (1)..(25): SEQ ID NO: 569; WAN024A2S_at; Start 56; Stop 80
tattcagactatatatgcacatata

SEQ ID NO: 40651 - DNA, 25 bp, Artificial
  probe
  misc_feature (1)..(25): SEQ ID NO: 569; WAN024A2S_at; Start 82; Stop 106
acttaaattcatataaaaacatggc

SEQ ID NO: 40652 - DNA, 25 bp, Artificial
  probe
  misc_feature (1)..(25): SEQ ID NO: 569; WAN024A2S_at; Start 60; Stop 84
cagactatatatgcacatatacact

SEQ ID NO: 40653 - DNA, 25 bp, Artificial
  probe
  misc_feature (1)..(25): SEQ ID NO: 569; WAN024A2S_at; Start 55; Stop 79
ttattcagactatatatgcacatat

SEQ ID NO: 40654 - DNA, 25 bp, Artificial
  probe
  misc_feature (1)..(25): SEQ ID NO: 569; WAN024A2S_at; Start 52; Stop 76
aatttattcagactatatatgcaca

SEQ ID NO: 40655 - DNA, 25 bp, Artificial
  probe
  misc_feature (1)..(25): SEQ ID NO: 569; WAN024A2S_at; Start 67; Stop 91
tatatgcacatatacacttaaattc

SEQ ID NO: 40656 - DNA, 25 bp, Artificial
  probe
  misc_feature (1)..(25): SEQ ID NO: 569; WAN024A2S_at; Start 50; Stop 74
caaatttattcagactatatatgca

SEQ ID NO: 40657 - DNA, 25 bp, Artificial
  probe
  misc_feature (1)..(25): SEQ ID NO: 569; WAN024A2S_at; Start 49; Stop 73
tcaaatttattcagactatatatgc

SEQ ID NO: 40658 - DNA, 25 bp, Artificial
  probe
  misc_feature (1)..(25): SEQ ID NO: 569; WAN024A2S_at; Start 58; Stop 82
ttcagactatatatgcacatataca

SEQ ID NO: 40659 - DNA, 25 bp, Artificial
  probe
  misc_feature (1)..(25): SEQ ID NO: 569; WAN024A2S_at; Start 71; Stop 95
tgcacatatacacttaaattcatat

SEQ ID NO: 40660 - DNA, 25 bp, Artificial
  probe
  misc_feature (1)..(25): SEQ ID NO: 569; WAN024A2S_at; Start 72; Stop 96
gcacatatacacttaaattcatata

SEQ ID NO: 40661 - DNA, 25 bp, Artificial
  probe
  misc_feature (1)..(25): SEQ ID NO: 569; WAN024A2S_at; Start 68; Stop 92
atatgcacatatacacttaaattca

SEQ ID NO: 40662 - DNA, 25 bp, Artificial
  probe
  misc_feature (1)..(25): SEQ ID NO: 569; WAN024A2S_at; Start 44; Stop 68
tcaaatcaaatttattcagactata

SEQ ID NO: 40663 - DNA, 25 bp, Artificial
  probe
  misc_feature (1)..(25): SEQ ID NO: 569; WAN024A2S_at; Start 41; Stop 65
ttttcaaatcaaatttattcagact

SEQ ID NO: 40664 - DNA, 25 bp, Artificial
  probe
  misc_feature (1)..(25): SEQ ID NO: 569; WAN024A2S_at; Start 88; Stop 112
attcatataaaaacatggcttgtaa

SEQ ID NO: 40665 - DNA, 25 bp, Artificial
  probe
  misc_feature (1)..(25): SEQ ID NO: 569; WAN024A2S_at; Start 62; Stop 86
gactatatatgcacatatacactta

SEQ ID NO: 40666 - DNA, 25 bp, Artificial
  probe
  misc_feature (1)..(25): SEQ ID NO: 569; WAN024A2S_at; Start 89; Stop 113
ttcatataaaaacatggcttgtaaa

SEQ ID NO: 40667 - DNA, 25 bp, Artificial
  probe
  misc_feature (1)..(25): SEQ ID NO: 569; WAN024A2S_at; Start 38; Stop 62
catttttcaaatcaaatttattcag

SEQ ID NO: 40668 - DNA, 25 bp, Artificial
  probe
  misc_feature (1)..(25): SEQ ID NO: 569; WAN024A2S_at; Start 87; Stop 111
aattcatataaaaacatggcttgta

SEQ ID NO: 40669 - DNA, 25 bp, Artificial
  probe
  misc_feature (1)..(25): SEQ ID NO: 569; WAN024A2S_at; Start 91; Stop 115
catataaaaacatggcttgtaaaaa

SEQ ID NO: 40670 - DNA, 25 bp, Artificial
  probe
  misc_feature (1)..(25): SEQ ID NO: 569; WAN024A2S_at; Start 84; Stop 108
ttaaattcatataaaaacatggctt

SEQ ID NO: 40671 - DNA, 25 bp, Artificial
  probe
  misc_feature (1)..(25): SEQ ID NO: 4404; WAN024A2T_at; Start 181; Stop 205
tacttaccataattaaagagatgag

SEQ ID NO: 40672 - DNA, 25 bp, Artificial
  probe
  misc_feature (1)..(25): SEQ ID NO: 4404; WAN024A2T_at; Start 204; Stop 228
agagataaatatcggcagtcttcgg

SEQ ID NO: 40673 - DNA, 25 bp, Artificial
  probe
  misc_feature (1)..(25): SEQ ID NO: 4404; WAN024A2T_at; Start 269; Stop 293
tacgattgaaaggaatctgcgttat

SEQ ID NO: 40674 - DNA, 25 bp, Artificial
  probe
  misc_feature (1)..(25): SEQ ID NO: 4404; WAN024A2T_at; Start 183; Stop 207
cttaccataattaaagagatgagag

SEQ ID NO: 40675 - DNA, 25 bp, Artificial
  probe
  misc_feature (1)..(25): SEQ ID NO: 4404; WAN024A2T_at; Start 209; Stop 233
taaatatcggcagtcttcggactgc

SEQ ID NO: 40676 - DNA, 25 bp, Artificial
  probe
  misc_feature (1)..(25): SEQ ID NO: 4404; WAN024A2T_at; Start 8; Stop 32
gagtctgttaaacatgtctatagaa

SEQ ID NO: 40677 - DNA, 25 bp, Artificial
  probe
  misc_feature (1)..(25): SEQ ID NO: 4404; WAN024A2T_at; Start 154; Stop 178
tccatatctttagggaaattattta

SEQ ID NO: 40678 - DNA, 25 bp, Artificial
  probe
  misc_feature (1)..(25): SEQ ID NO: 4404; WAN024A2T_at; Start 97; Stop 121
tcaggatttttacagtatttataaa

SEQ ID NO: 40679 - DNA, 25 bp, Artificial
  probe
  misc_feature (1)..(25): SEQ ID NO: 4404; WAN024A2T_at; Start 293; Stop 317
tatgctataattaggtagttaatct

SEQ ID NO: 40680 - DNA, 25 bp, Artificial
  probe
  misc_feature (1)..(25): SEQ ID NO: 4404; WAN024A2T_at; Start 195; Stop 219
aaagagatgagagataaatatcggc

SEQ ID NO: 40681 - DNA, 25 bp, Artificial
  probe
  misc_feature (1)..(25): SEQ ID NO: 4404; WAN024A2T_at; Start 90; Stop 114
attaacttcaggatttttacagtat

SEQ ID NO: 40682 - DNA, 25 bp, Artificial
  probe
  misc_feature (1)..(25): SEQ ID NO: 4404; WAN024A2T_at; Start 264; Stop 288
aatcatacgattgaaaggaatctgc

SEQ ID NO: 40683 - DNA, 25 bp, Artificial
  probe
  misc_feature (1)..(25): SEQ ID NO: 4404; WAN024A2T_at; Start 267; Stop 291
catacgattgaaaggaatctgcgtt

SEQ ID NO: 40684 - DNA, 25 bp, Artificial
  probe
  misc_feature (1)..(25): SEQ ID NO: 4404; WAN024A2T_at; Start 187; Stop 211
ccataattaaagagatgagagataa

SEQ ID NO: 40685 - DNA, 25 bp, Artificial
  probe
  misc_feature (1)..(25): SEQ ID NO: 4404; WAN024A2T_at; Start 266; Stop 290
tcatacgattgaaaggaatctgcgt

SEQ ID NO: 40686 - DNA, 25 bp, Artificial
  probe
  misc_feature (1)..(25): SEQ ID NO: 4404; WAN024A2T_at; Start 287; Stop 311
gcgttatatgctataattaggtagt

SEQ ID NO: 40687 - DNA, 25 bp, Artificial
  probe
  misc_feature (1)..(25): SEQ ID NO: 4404; WAN024A2T_at; Start 1; Stop 25
taaaatagagtctgttaaacatgtc

SEQ ID NO: 40688 - DNA, 25 bp, Artificial
  probe
  misc_feature (1)..(25): SEQ ID NO: 4404; WAN024A2T_at; Start 308; Stop 332
tagttaatctatacatttagaaagg

SEQ ID NO: 40689 - DNA, 25 bp, Artificial
  probe
  misc_feature (1)..(25): SEQ ID NO: 4404; WAN024A2T_at; Start 75; Stop 99
gatatttattagaaaattaacttca

SEQ ID NO: 40690 - DNA, 25 bp, Artificial
  probe
  misc_feature (1)..(25): SEQ ID NO: 4404; WAN024A2T_at; Start 258; Stop 282
gcagtaaatcatacgattgaaagga

SEQ ID NO: 40691 - DNA, 25 bp, Artificial
  probe
  misc_feature (1)..(25): SEQ ID NO: 4404; WAN024A2T_at; Start 22; Stop 46
tgtctatagaactagtaaattgtct

SEQ ID NO: 40692 - DNA, 25 bp, Artificial
  probe
  misc_feature (1)..(25): SEQ ID NO: 4404; WAN024A2T_at; Start 207; Stop 231
gataaatatcggcagtcttcggact

SEQ ID NO: 40693 - DNA, 25 bp, Artificial
  probe
  misc_feature (1)..(25): SEQ ID NO: 4404; WAN024A2T_at; Start 59; Stop 83
gatactaacacatattgatatttat

SEQ ID NO: 40694 - DNA, 25 bp, Artificial
  probe
  misc_feature (1)..(25): SEQ ID NO: 4404; WAN024A2T_at; Start 211; Stop 235
aatatcggcagtcttcggactgcct

SEQ ID NO: 40695 - DNA, 25 bp, Artificial
  probe
  misc_feature (1)..(25): SEQ ID NO: 4404; WAN024A2T_at; Start 249; Stop 273
taatttaatgcagtaaatcatacga

SEQ ID NO: 40696 - DNA, 25 bp, Artificial
  probe
  misc_feature (1)..(25): SEQ ID NO: 4404; WAN024A2T_at; Start 25; Stop 49
ctatagaactagtaaattgtctaaa

SEQ ID NO: 40697 - DNA, 25 bp, Artificial
  probe
  misc_feature (1)..(25): SEQ ID NO: 4404; WAN024A2T_at; Start 52; Stop 76
tttaaaagatactaacacatattga

SEQ ID NO: 40698 - DNA, 25 bp, Artificial
  probe
  misc_feature (1)..(25): SEQ ID NO: 4404; WAN024A2T_at; Start 284; Stop 308
tctgcgttatatgctataattaggt

SEQ ID NO: 40699 - DNA, 25 bp, Artificial
  probe
  misc_feature (1)..(25): SEQ ID NO: 4404; WAN024A2T_at; Start 312; Stop 336
taatctatacatttagaaaggtaaa

SEQ ID NO: 40700 - DNA, 25 bp, Artificial
  probe
  misc_feature (1)..(25): SEQ ID NO: 4404; WAN024A2T_at; Start 275; Stop 299
tgaaaggaatctgcgttatatgcta

SEQ ID NO: 40701 - DNA, 25 bp, Artificial
  probe
  misc_feature (1)..(25): SEQ ID NO: 4404; WAN024A2T_at; Start 278; Stop 302
aaggaatctgcgttatatgctataa

SEQ ID NO: 40702 - DNA, 25 bp, Artificial
  probe
  misc_feature (1)..(25): SEQ ID NO: 4404; WAN024A2T_at; Start 200; Stop 224
gatgagagataaatatcggcagtct

SEQ ID NO: 40703 - DNA, 25 bp, Artificial
  probe
  misc_feature (1)..(25): SEQ ID NO: 4404; WAN024A2T_at; Start 13; Stop 37
tgttaaacatgtctatagaactagt

SEQ ID NO: 40704 - DNA, 25 bp, Artificial
  probe
  misc_feature (1)..(25): SEQ ID NO: 4404; WAN024A2T_at; Start 327; Stop 351
gaaaggtaaaatatagaattggaga

SEQ ID NO: 40705 - DNA, 25 bp, Artificial
  probe
  misc_feature (1)..(25): SEQ ID NO: 77; WAN024A2U_at; Start 74; Stop 98
ctataattaggtggatttagtgata

SEQ ID NO: 40706 - DNA, 25 bp, Artificial
  probe
  misc_feature (1)..(25): SEQ ID NO: 77; WAN024A2U_at; Start 25; Stop 49
tatttctccggtactgggactggga

SEQ ID NO: 40707 - DNA, 25 bp, Artificial
  probe
  misc_feature (1)..(25): SEQ ID NO: 77; WAN024A2U_at; Start 81; Stop 105
taggtggatttagtgatattataaa

SEQ ID NO: 40708 - DNA, 25 bp, Artificial
  probe
  misc_feature (1)..(25): SEQ ID NO: 77; WAN024A2U_at; Start 112; Stop 136
aatctagtattttgaatggttttgg

SEQ ID NO: 40709 - DNA, 25 bp, Artificial
  probe
  misc_feature (1)..(25): SEQ ID NO: 77; WAN024A2U_at; Start 230; Stop 254
ctgtaaataatttgcaaactatagt

SEQ ID NO: 40710 - DNA, 25 bp, Artificial
  probe
  misc_feature (1)..(25): SEQ ID NO: 77; WAN024A2U_at; Start 206; Stop 230
gtttcagagcattttttgttctttc

SEQ ID NO: 40711 - DNA, 25 bp, Artificial
  probe
  misc_feature (1)..(25): SEQ ID NO: 77; WAN024A2U_at; Start 233; Stop 257
taaataatttgcaaactatagtaac

SEQ ID NO: 40712 - DNA, 25 bp, Artificial
  probe
  misc_feature (1)..(25): SEQ ID NO: 77; WAN024A2U_at; Start 42; Stop 66
gactgggacgggactaaaaatctga

SEQ ID NO: 40713 - DNA, 25 bp, Artificial
  probe
  misc_feature (1)..(25): SEQ ID NO: 77; WAN024A2U_at; Start 229; Stop 253
tctgtaaataatttgcaaactatag

SEQ ID NO: 40714 - DNA, 25 bp, Artificial
  probe
  misc_feature (1)..(25): SEQ ID NO: 77; WAN024A2U_at; Start 64; Stop 88
tgaaaacgtcctataattaggtgga

SEQ ID NO: 40715 - DNA, 25 bp, Artificial
  probe
  misc_feature (1)..(25): SEQ ID NO: 77; WAN024A2U_at; Start 202; Stop 226
cagtgtttcagagcattttttgttc

SEQ ID NO: 40716 - DNA, 25 bp, Artificial
  probe
  misc_feature (1)..(25): SEQ ID NO: 77; WAN024A2U_at; Start 197; Stop 221
gaaatcagtgtttcagagcattttt

SEQ ID NO: 40717 - DNA, 25 bp, Artificial
  probe
  misc_feature (1)..(25): SEQ ID NO: 77; WAN024A2U_at; Start 24; Stop 48
atatttctccggtactgggactggg

SEQ ID NO: 40718 - DNA, 25 bp, Artificial
  probe
  misc_feature (1)..(25): SEQ ID NO: 77; WAN024A2U_at; Start 225; Stop 249
tctttctgtaaataatttgcaaact

SEQ ID NO: 40719 - DNA, 25 bp, Artificial
  probe
  misc_feature (1)..(25): SEQ ID NO: 77; WAN024A2U_at; Start 23; Stop 47
aatatttctccggtactgggactgg

SEQ ID NO: 40720 - DNA, 25 bp, Artificial
  probe
  misc_feature (1)..(25): SEQ ID NO: 77; WAN024A2U_at; Start 199; Stop 223
aatcagtgtttcagagcattttttg

SEQ ID NO: 40721 - DNA, 25 bp, Artificial
  probe
  misc_feature (1)..(25): SEQ ID NO: 77; WAN024A2U_at; Start 62; Stop 86
tctgaaaacgtcctataattaggtg

SEQ ID NO: 40722 - DNA, 25 bp, Artificial
  probe
  misc_feature (1)..(25): SEQ ID NO: 77; WAN024A2U_at; Start 203; Stop 227
agtgtttcagagcattttttgttct

SEQ ID NO: 40723 - DNA, 25 bp, Artificial
  probe
  misc_feature (1)..(25): SEQ ID NO: 77; WAN024A2U_at; Start 235; Stop 259
aataatttgcaaactatagtaactg

SEQ ID NO: 40724 - DNA, 25 bp, Artificial
  probe
  misc_feature (1)..(25): SEQ ID NO: 77; WAN024A2U_at; Start 70; Stop 94
cgtcctataattaggtggatttagt

SEQ ID NO: 40725 - DNA, 25 bp, Artificial
  probe
  misc_feature (1)..(25): SEQ ID NO: 77; WAN024A2U_at; Start 106; Stop 130
aaatagaatctagtattttgaatgg

SEQ ID NO: 40726 - DNA, 25 bp, Artificial
  probe
  misc_feature (1)..(25): SEQ ID NO: 77; WAN024A2U_at; Start 10; Stop 34
attatattaaaacaatatttctccg

SEQ ID NO: 40727 - DNA, 25 bp, Artificial
  probe
  misc_feature (1)..(25): SEQ ID NO: 77; WAN024A2U_at; Start 72; Stop 96
tcctataattaggtggatttagtga

SEQ ID NO: 40728 - DNA, 25 bp, Artificial
  probe
  misc_feature (1)..(25): SEQ ID NO: 77; WAN024A2U_at; Start 115; Stop 139
ctagtattttgaatggttttggata

SEQ ID NO: 40729 - DNA, 25 bp, Artificial
  probe
  misc_feature (1)..(25): SEQ ID NO: 77; WAN024A2U_at; Start 195; Stop 219
ttgaaatcagtgtttcagagcattt

SEQ ID NO: 40730 - DNA, 25 bp, Artificial
  probe
  misc_feature (1)..(25): SEQ ID NO: 77; WAN024A2U_at; Start 212; Stop 236
gagcattttttgttctttctgtaaa

SEQ ID NO: 40731 - DNA, 25 bp, Artificial
  probe
  misc_feature (1)..(25): SEQ ID NO: 77; WAN024A2U_at; Start 111; Stop 135
gaatctagtattttgaatggttttg

SEQ ID NO: 40732 - DNA, 25 bp, Artificial
  probe
  misc_feature (1)..(25): SEQ ID NO: 77; WAN024A2U_at; Start 69; Stop 93
acgtcctataattaggtggatttag

SEQ ID NO: 40733 - DNA, 25 bp, Artificial
  probe
  misc_feature (1)..(25): SEQ ID NO: 77; WAN024A2U_at; Start 122; Stop 146
tttgaatggttttggatatattgta

SEQ ID NO: 40734 - DNA, 25 bp, Artificial
  probe
  misc_feature (1)..(25): SEQ ID NO: 77; WAN024A2U_at; Start 60; Stop 84
aatctgaaaacgtcctataattagg

SEQ ID NO: 40735 - DNA, 25 bp, Artificial
  probe
  misc_feature (1)..(25): SEQ ID NO: 77; WAN024A2U_at; Start 63; Stop 87
ctgaaaacgtcctataattaggtgg

SEQ ID NO: 40736 - DNA, 25 bp, Artificial
  probe
  misc_feature (1)..(25): SEQ ID NO: 77; WAN024A2U_at; Start 73; Stop 97
cctataattaggtggatttagtgat

SEQ ID NO: 40737 - DNA, 25 bp, Artificial
  probe
  misc_feature (1)..(25): SEQ ID NO: 77; WAN024A2U_at; Start 91; Stop 115
tagtgatattataaaaaatagaatc

SEQ ID NO: 40738 - DNA, 25 bp, Artificial
  probe
  misc_feature (1)..(25): SEQ ID NO: 77; WAN024A2U_at; Start 222; Stop 246
tgttctttctgtaaataatttgcaa

SEQ ID NO: 40739 - DNA, 25 bp, Artificial
  probe
  misc_feature (1)..(25): SEQ ID NO: 3216; WAN024A2V_at; Start 211; Stop 235
tcccagtcccagtaccggagaaata

SEQ ID NO: 40740 - DNA, 25 bp, Artificial
  probe
  misc_feature (1)..(25): SEQ ID NO: 3216; WAN024A2V_at; Start 1; Stop 25
cagttactatagtttgcaaattatt

SEQ ID NO: 40741 - DNA, 25 bp, Artificial
  probe
  misc_feature (1)..(25): SEQ ID NO: 3216; WAN024A2V_at; Start 24; Stop 48
tttacagaaagaacaaaaaatgctc

SEQ ID NO: 40742 - DNA, 25 bp, Artificial
  probe
  misc_feature (1)..(25): SEQ ID NO: 3216; WAN024A2V_at; Start 30; Stop 54
gaaagaacaaaaaatgctctgaaac

SEQ ID NO: 40743 - DNA, 25 bp, Artificial
  probe
  misc_feature (1)..(25): SEQ ID NO: 3216; WAN024A2V_at; Start 167; Stop 191
ctaaatccacctaattataggacgt

SEQ ID NO: 40744 - DNA, 25 bp, Artificial
  probe
  misc_feature (1)..(25): SEQ ID NO: 3216; WAN024A2V_at; Start 114; Stop 138
tacaatatatccaaaaccattcaaa

SEQ ID NO: 40745 - DNA, 25 bp, Artificial
  probe
  misc_feature (1)..(25): SEQ ID NO: 3216; WAN024A2V_at; Start 26; Stop 50
tacagaaagaacaaaaaatgctctg

SEQ ID NO: 40746 - DNA, 25 bp, Artificial
  probe
  misc_feature (1)..(25): SEQ ID NO: 3216; WAN024A2V_at; Start 121; Stop 145
tatccaaaaccattcaaaatactag

SEQ ID NO: 40747 - DNA, 25 bp, Artificial
  probe
  misc_feature (1)..(25): SEQ ID NO: 3216; WAN024A2V_at; Start 128; Stop 152
aaccattcaaaatactagattctat

SEQ ID NO: 40748 - DNA, 25 bp, Artificial
  probe
  misc_feature (1)..(25): SEQ ID NO: 3216; WAN024A2V_at; Start 176; Stop 200
cctaattataggacgttttcagatt

SEQ ID NO: 40749 - DNA, 25 bp, Artificial
  probe
  misc_feature (1)..(25): SEQ ID NO: 3216; WAN024A2V_at; Start 166; Stop 190
actaaatccacctaattataggacg

SEQ ID NO: 40750 - DNA, 25 bp, Artificial
  probe
  misc_feature (1)..(25): SEQ ID NO: 3216; WAN024A2V_at; Start 123; Stop 147
tccaaaaccattcaaaatactagat

SEQ ID NO: 40751 - DNA, 25 bp, Artificial
  probe
  misc_feature (1)..(25): SEQ ID NO: 3216; WAN024A2V_at; Start 172; Stop 196
tccacctaattataggacgttttca

SEQ ID NO: 40752 - DNA, 25 bp, Artificial
  probe
  misc_feature (1)..(25): SEQ ID NO: 3216; WAN024A2V_at; Start 177; Stop 201
ctaattataggacgttttcagattt

SEQ ID NO: 40753 - DNA, 25 bp, Artificial
  probe
  misc_feature (1)..(25): SEQ ID NO: 3216; WAN024A2V_at; Start 173; Stop 197
ccacctaattataggacgttttcag

SEQ ID NO: 40754 - DNA, 25 bp, Artificial
  probe
  misc_feature (1)..(25): SEQ ID NO: 3216; WAN024A2V_at; Start 16; Stop 40
gcaaattatttacagaaagaacaaa

SEQ ID NO: 40755 - DNA, 25 bp, Artificial
  probe
  misc_feature (1)..(25): SEQ ID NO: 3216; WAN024A2V_at; Start 213; Stop 237
ccagtcccagtaccggagaaatatt

SEQ ID NO: 40756 - DNA, 25 bp, Artificial
  probe
  misc_feature (1)..(25): SEQ ID NO: 3216; WAN024A2V_at; Start 22; Stop 46
tatttacagaaagaacaaaaaatgc

SEQ ID NO: 40757 - DNA, 25 bp, Artificial
  probe
  misc_feature (1)..(25): SEQ ID NO: 3216; WAN024A2V_at; Start 153; Stop 177
tttttataatatcactaaatccacc

SEQ ID NO: 40758 - DNA, 25 bp, Artificial
  probe
  misc_feature (1)..(25): SEQ ID NO: 3216; WAN024A2V_at; Start 41; Stop 65
aaatgctctgaaacactgatttcaa

SEQ ID NO: 40759 - DNA, 25 bp, Artificial
  probe
  misc_feature (1)..(25): SEQ ID NO: 3216; WAN024A2V_at; Start 125; Stop 149
caaaaccattcaaaatactagattc

SEQ ID NO: 40760 - DNA, 25 bp, Artificial
  probe
  misc_feature (1)..(25): SEQ ID NO: 3216; WAN024A2V_at; Start 6; Stop 30
actatagtttgcaaattatttacag

SEQ ID NO: 40761 - DNA, 25 bp, Artificial
  probe
  misc_feature (1)..(25): SEQ ID NO: 3216; WAN024A2V_at; Start 39; Stop 63
aaaaatgctctgaaacactgatttc

SEQ ID NO: 40762 - DNA, 25 bp, Artificial
  probe
  misc_feature (1)..(25): SEQ ID NO: 3216; WAN024A2V_at; Start 34; Stop 58
gaacaaaaaatgctctgaaacactg

SEQ ID NO: 40763 - DNA, 25 bp, Artificial
  probe
  misc_feature (1)..(25): SEQ ID NO: 3216; WAN024A2V_at; Start 212; Stop 236
cccagtcccagtaccggagaaatat

SEQ ID NO: 40764 - DNA, 25 bp, Artificial
  probe
  misc_feature (1)..(25): SEQ ID NO: 3216; WAN024A2V_at; Start 194; Stop 218
tcagatttttagtcccgtcccagtc

SEQ ID NO: 40765 - DNA, 25 bp, Artificial
  probe
  misc_feature (1)..(25): SEQ ID NO: 3216; WAN024A2V_at; Start 226; Stop 250
cggagaaatattgttttaatataat

SEQ ID NO: 40766 - DNA, 25 bp, Artificial
  probe
  misc_feature (1)..(25): SEQ ID NO: 3216; WAN024A2V_at; Start 157; Stop 181
tataatatcactaaatccacctaat

SEQ ID NO: 40767 - DNA, 25 bp, Artificial
  probe
  misc_feature (1)..(25): SEQ ID NO: 3216; WAN024A2V_at; Start 215; Stop 239
agtcccagtaccggagaaatattgt

SEQ ID NO: 40768 - DNA, 25 bp, Artificial
  probe
  misc_feature (1)..(25): SEQ ID NO: 3216; WAN024A2V_at; Start 35; Stop 59
aacaaaaaatgctctgaaacactga

SEQ ID NO: 40769 - DNA, 25 bp, Artificial
  probe
  misc_feature (1)..(25): SEQ ID NO: 3216; WAN024A2V_at; Start 174; Stop 198
cacctaattataggacgttttcaga

SEQ ID NO: 40770 - DNA, 25 bp, Artificial
  probe
  misc_feature (1)..(25): SEQ ID NO: 3216; WAN024A2V_at; Start 37; Stop 61
caaaaaatgctctgaaacactgatt

SEQ ID NO: 40771 - DNA, 25 bp, Artificial
  probe
  misc_feature (1)..(25): SEQ ID NO: 3216; WAN024A2V_at; Start 162; Stop 186
tatcactaaatccacctaattatag

SEQ ID NO: 40772 - DNA, 25 bp, Artificial
  probe
  misc_feature (1)..(25): SEQ ID NO: 3216; WAN024A2V_at; Start 14; Stop 38
ttgcaaattatttacagaaagaaca

SEQ ID NO: 40773 - DNA, 25 bp, Artificial
  probe
  misc_feature (1)..(25): SEQ ID NO: 5942; WAN024A2W_at; Start 148; Stop 172
catttttccaaatatgttattcaac

SEQ ID NO: 40774 - DNA, 25 bp, Artificial
  probe
  misc_feature (1)..(25): SEQ ID NO: 5942; WAN024A2W_at; Start 250; Stop 274
taaaaaagcgatattctagactgta

SEQ ID NO: 40775 - DNA, 25 bp, Artificial
  probe
  misc_feature (1)..(25): SEQ ID NO: 5942; WAN024A2W_at; Start 52; Stop 76
gctatatctattataacatggttta

SEQ ID NO: 40776 - DNA, 25 bp, Artificial
  probe
  misc_feature (1)..(25): SEQ ID NO: 5942; WAN024A2W_at; Start 298; Stop 322
caacagagtgggagtagtcatctaa

SEQ ID NO: 40777 - DNA, 25 bp, Artificial
  probe
  misc_feature (1)..(25): SEQ ID NO: 5942; WAN024A2W_at; Start 156; Stop 180
caaatatgttattcaacttattagc

SEQ ID NO: 40778 - DNA, 25 bp, Artificial
  probe
  misc_feature (1)..(25): SEQ ID NO: 5942; WAN024A2W_at; Start 276; Stop 300
caatccttttccattataggagcaa

SEQ ID NO: 40779 - DNA, 25 bp, Artificial
  probe
  misc_feature (1)..(25): SEQ ID NO: 5942; WAN024A2W_at; Start 68; Stop 92
catggtttaataaattctttgagct

SEQ ID NO: 40780 - DNA, 25 bp, Artificial
  probe
  misc_feature (1)..(25): SEQ ID NO: 5942; WAN024A2W_at; Start 127; Stop 151
tctagtaatattgctatttctcatt

SEQ ID NO: 40781 - DNA, 25 bp, Artificial
  probe
  misc_feature (1)..(25): SEQ ID NO: 5942; WAN024A2W_at; Start 295; Stop 319
gagcaacagagtgggagtagtcatc

SEQ ID NO: 40782 - DNA, 25 bp, Artificial
  probe
  misc_feature (1)..(25): SEQ ID NO: 5942; WAN024A2W_at; Start 280; Stop 304
ccttttccattataggagcaacaga

SEQ ID NO: 40783 - DNA, 25 bp, Artificial
  probe
  misc_feature (1)..(25): SEQ ID NO: 5942; WAN024A2W_at; Start 235; Stop 259
tatcagaataataaataaaaaagcg

SEQ ID NO: 40784 - DNA, 25 bp, Artificial
  probe
  misc_feature (1)..(25): SEQ ID NO: 5942; WAN024A2W_at; Start 188; Stop 212
ctattcatatttgggtataaaacaa

SEQ ID NO: 40785 - DNA, 25 bp, Artificial
  probe
  misc_feature (1)..(25): SEQ ID NO: 5942; WAN024A2W_at; Start 268; Stop 292
gactgtatcaatccttttccattat

SEQ ID NO: 40786 - DNA, 25 bp, Artificial
  probe
  misc_feature (1)..(25): SEQ ID NO: 5942; WAN024A2W_at; Start 301; Stop 325
cagagtgggagtagtcatctaagga

SEQ ID NO: 40787 - DNA, 25 bp, Artificial
  probe
  misc_feature (1)..(25): SEQ ID NO: 5942; WAN024A2W_at; Start 297; Stop 321
gcaacagagtgggagtagtcatcta

SEQ ID NO: 40788 - DNA, 25 bp, Artificial
  probe
  misc_feature (1)..(25): SEQ ID NO: 5942; WAN024A2W_at; Start 303; Stop 327
gagtgggagtagtcatctaaggact

SEQ ID NO: 40789 - DNA, 25 bp, Artificial
  probe
  misc_feature (1)..(25): SEQ ID NO: 5942; WAN024A2W_at; Start 218; Stop 242
caattctaacagttttatatcagaa

SEQ ID NO: 40790 - DNA, 25 bp, Artificial
  probe
  misc_feature (1)..(25): SEQ ID NO: 5942; WAN024A2W_at; Start 23; Stop 47
tctatcctcttgttataaataaaat

SEQ ID NO: 40791 - DNA, 25 bp, Artificial
  probe
  misc_feature (1)..(25): SEQ ID NO: 5942; WAN024A2W_at; Start 135; Stop 159
tattgctatttctcatttttccaaa

SEQ ID NO: 40792 - DNA, 25 bp, Artificial
  probe
  misc_feature (1)..(25): SEQ ID NO: 5942; WAN024A2W_at; Start 264; Stop 288
tctagactgtatcaatccttttcca

SEQ ID NO: 40793 - DNA, 25 bp, Artificial
  probe
  misc_feature (1)..(25): SEQ ID NO: 5942; WAN024A2W_at; Start 285; Stop 309
tccattataggagcaacagagtggg

SEQ ID NO: 40794 - DNA, 25 bp, Artificial
  probe
  misc_feature (1)..(25): SEQ ID NO: 5942; WAN024A2W_at; Start 16; Stop 40
ggtcatttctatcctcttgttataa

SEQ ID NO: 40795 - DNA, 25 bp, Artificial
  probe
  misc_feature (1)..(25): SEQ ID NO: 5942; WAN024A2W_at; Start 283; Stop 307
tttccattataggagcaacagagtg

SEQ ID NO: 40796 - DNA, 25 bp, Artificial
  probe
  misc_feature (1)..(25): SEQ ID NO: 5942; WAN024A2W_at; Start 305; Stop 329
gtgggagtagtcatctaaggactaa

SEQ ID NO: 40797 - DNA, 25 bp, Artificial
  probe
  misc_feature (1)..(25): SEQ ID NO: 5942; WAN024A2W_at; Start 254; Stop 278
aaagcgatattctagactgtatcaa

SEQ ID NO: 40798 - DNA, 25 bp, Artificial
  probe
  misc_feature (1)..(25): SEQ ID NO: 5942; WAN024A2W_at; Start 184; Stop 208
gtctctattcatatttgggtataaa

SEQ ID NO: 40799 - DNA, 25 bp, Artificial
  probe
  misc_feature (1)..(25): SEQ ID NO: 5942; WAN024A2W_at; Start 287; Stop 311
cattataggagcaacagagtgggag

SEQ ID NO: 40800 - DNA, 25 bp, Artificial
  probe
  misc_feature (1)..(25): SEQ ID NO: 5942; WAN024A2W_at; Start 308; Stop 332
ggagtagtcatctaaggactaattt

SEQ ID NO: 40801 - DNA, 25 bp, Artificial
  probe
  misc_feature (1)..(25): SEQ ID NO: 5942; WAN024A2W_at; Start 257; Stop 281
gcgatattctagactgtatcaatcc

SEQ ID NO: 40802 - DNA, 25 bp, Artificial
  probe
  misc_feature (1)..(25): SEQ ID NO: 5942; WAN024A2W_at; Start 5; Stop 29
ctttctaattcggtcatttctatcc

SEQ ID NO: 40803 - DNA, 25 bp, Artificial
  probe
  misc_feature (1)..(25): SEQ ID NO: 5942; WAN024A2W_at; Start 10; Stop 34
taattcggtcatttctatcctcttg

SEQ ID NO: 40804 - DNA, 25 bp, Artificial
  probe
  misc_feature (1)..(25): SEQ ID NO: 5942; WAN024A2W_at; Start 288; Stop 312
attataggagcaacagagtgggagt

SEQ ID NO: 40805 - DNA, 25 bp, Artificial
  probe
  misc_feature (1)..(25): SEQ ID NO: 5942; WAN024A2W_at; Start 273; Stop 297
tatcaatccttttccattataggag

SEQ ID NO: 40806 - DNA, 25 bp, Artificial
  probe
  misc_feature (1)..(25): SEQ ID NO: 5942; WAN024A2W_at; Start 48; Stop 72
tatagctatatctattataacatgg

SEQ ID NO: 40807 - DNA, 25 bp, Artificial
  probe
  misc_feature (1)..(25): SEQ ID NO: 169; WAN024A2X_at; Start 1; Stop 25
aaattagtccttagatgactactcc

SEQ ID NO: 40808 - DNA, 25 bp, Artificial
  probe
  misc_feature (1)..(25): SEQ ID NO: 169; WAN024A2X_at; Start 86; Stop 110
tattattctgatataaaactgttag

SEQ ID NO: 40809 - DNA, 25 bp, Artificial
  probe
  misc_feature (1)..(25): SEQ ID NO: 169; WAN024A2X_at; Start 53; Stop 77
gattgatacagtctagaatatcgct

SEQ ID NO: 40810 - DNA, 25 bp, Artificial
  probe
  misc_feature (1)..(25): SEQ ID NO: 169; WAN024A2X_at; Start 34; Stop 58
tgctcctataatggaaaaggattga

SEQ ID NO: 40811 - DNA, 25 bp, Artificial
  probe
  misc_feature (1)..(25): SEQ ID NO: 169; WAN024A2X_at; Start 294; Stop 318
tataacaagaggatagaaatgaccg

SEQ ID NO: 40812 - DNA, 25 bp, Artificial
  probe
  misc_feature (1)..(25): SEQ ID NO: 169; WAN024A2X_at; Start 47; Stop 71
gaaaaggattgatacagtctagaat

SEQ ID NO: 40813 - DNA, 25 bp, Artificial
  probe
  misc_feature (1)..(25): SEQ ID NO: 169; WAN024A2X_at; Start 14; Stop 38
gatgactactcccactctgttgctc

SEQ ID NO: 40814 - DNA, 25 bp, Artificial
  probe
  misc_feature (1)..(25): SEQ ID NO: 169; WAN024A2X_at; Start 170; Stop 194
catatttggaaaaatgagaaatagc

SEQ ID NO: 40815 - DNA, 25 bp, Artificial
  probe
  misc_feature (1)..(25): SEQ ID NO: 169; WAN024A2X_at; Start 8; Stop 32
tccttagatgactactcccactctg

SEQ ID NO: 40816 - DNA, 25 bp, Artificial
  probe
  misc_feature (1)..(25): SEQ ID NO: 169; WAN024A2X_at; Start 296; Stop 320
taacaagaggatagaaatgaccgaa

SEQ ID NO: 40817 - DNA, 25 bp, Artificial
  probe
  misc_feature (1)..(25): SEQ ID NO: 169; WAN024A2X_at; Start 12; Stop 36
tagatgactactcccactctgttgc

SEQ ID NO: 40818 - DNA, 25 bp, Artificial
  probe
  misc_feature (1)..(25): SEQ ID NO: 169; WAN024A2X_at; Start 302; Stop 326
gaggatagaaatgaccgaattagaa

SEQ ID NO: 40819 - DNA, 25 bp, Artificial
  probe
  misc_feature (1)..(25): SEQ ID NO: 169; WAN024A2X_at; Start 23; Stop 47
tcccactctgttgctcctataatgg

SEQ ID NO: 40820 - DNA, 25 bp, Artificial
  probe
  misc_feature (1)..(25): SEQ ID NO: 169; WAN024A2X_at; Start 123; Stop 147
gttttatacccaaatatgaatagag

SEQ ID NO: 40821 - DNA, 25 bp, Artificial
  probe
  misc_feature (1)..(25): SEQ ID NO: 169; WAN024A2X_at; Start 59; Stop 83
tacagtctagaatatcgctttttta

SEQ ID NO: 40822 - DNA, 25 bp, Artificial
  probe
  misc_feature (1)..(25): SEQ ID NO: 169; WAN024A2X_at; Start 29; Stop 53
tctgttgctcctataatggaaaagg

SEQ ID NO: 40823 - DNA, 25 bp, Artificial
  probe
  misc_feature (1)..(25): SEQ ID NO: 169; WAN024A2X_at; Start 257; Stop 281
taaaccatgttataatagatatagc

SEQ ID NO: 40824 - DNA, 25 bp, Artificial
  probe
  misc_feature (1)..(25): SEQ ID NO: 169; WAN024A2X_at; Start 56; Stop 80
tgatacagtctagaatatcgctttt

SEQ ID NO: 40825 - DNA, 25 bp, Artificial
  probe
  misc_feature (1)..(25): SEQ ID NO: 169; WAN024A2X_at; Start 42; Stop 66
taatggaaaaggattgatacagtct

SEQ ID NO: 40826 - DNA, 25 bp, Artificial
  probe
  misc_feature (1)..(25): SEQ ID NO: 169; WAN024A2X_at; Start 125; Stop 149
tttatacccaaatatgaatagagac

SEQ ID NO: 40827 - DNA, 25 bp, Artificial
  probe
  misc_feature (1)..(25): SEQ ID NO: 169; WAN024A2X_at; Start 38; Stop 62
cctataatggaaaaggattgataca

SEQ ID NO: 40828 - DNA, 25 bp, Artificial
  probe
  misc_feature (1)..(25): SEQ ID NO: 169; WAN024A2X_at; Start 5; Stop 29
tagtccttagatgactactcccact

SEQ ID NO: 40829 - DNA, 25 bp, Artificial
  probe
  misc_feature (1)..(25): SEQ ID NO: 169; WAN024A2X_at; Start 45; Stop 69
tggaaaaggattgatacagtctaga

SEQ ID NO: 40830 - DNA, 25 bp, Artificial
  probe
  misc_feature (1)..(25): SEQ ID NO: 169; WAN024A2X_at; Start 304; Stop 328
ggatagaaatgaccgaattagaaag

SEQ ID NO: 40831 - DNA, 25 bp, Artificial
  probe
  misc_feature (1)..(25): SEQ ID NO: 169; WAN024A2X_at; Start 182; Stop 206
aatgagaaatagcaatattactaga

SEQ ID NO: 40832 - DNA, 25 bp, Artificial
  probe
  misc_feature (1)..(25): SEQ ID NO: 169; WAN024A2X_at; Start 26; Stop 50
cactctgttgctcctataatggaaa

SEQ ID NO: 40833 - DNA, 25 bp, Artificial
  probe
  misc_feature (1)..(25): SEQ ID NO: 169; WAN024A2X_at; Start 92; Stop 116
tctgatataaaactgttagaattga

SEQ ID NO: 40834 - DNA, 25 bp, Artificial
  probe
  misc_feature (1)..(25): SEQ ID NO: 169; WAN024A2X_at; Start 242; Stop 266
gctcaaagaatttattaaaccatgt

SEQ ID NO: 40835 - DNA, 25 bp, Artificial
  probe
  misc_feature (1)..(25): SEQ ID NO: 169; WAN024A2X_at; Start 280; Stop 304
gctataattttatttataacaagag

SEQ ID NO: 40836 - DNA, 25 bp, Artificial
  probe
  misc_feature (1)..(25): SEQ ID NO: 169; WAN024A2X_at; Start 212; Stop 236
tagaaacaatcaatatttaaaaaga

SEQ ID NO: 40837 - DNA, 25 bp, Artificial
  probe
  misc_feature (1)..(25): SEQ ID NO: 169; WAN024A2X_at; Start 307; Stop 331
tagaaatgaccgaattagaaagaaa

SEQ ID NO: 40838 - DNA, 25 bp, Artificial
  probe
  misc_feature (1)..(25): SEQ ID NO: 169; WAN024A2X_at; Start 261; Stop 285
ccatgttataatagatatagctata

SEQ ID NO: 40839 - DNA, 25 bp, Artificial
  probe
  misc_feature (1)..(25): SEQ ID NO: 169; WAN024A2X_at; Start 153; Stop 177
gctaataagttgaataacatatttg

SEQ ID NO: 40840 - DNA, 25 bp, Artificial
  probe
  misc_feature (1)..(25): SEQ ID NO: 169; WAN024A2X_at; Start 299; Stop 323
caagaggatagaaatgaccgaatta

SEQ ID NO: 40841 - DNA, 25 bp, Artificial
  probe
  misc_feature (1)..(25): SEQ ID NO: 4518; WAN024A2Y_at; Start 176; Stop 200
taattgtaacgaatcaaggtcaatc

SEQ ID NO: 40842 - DNA, 25 bp, Artificial
  probe
  misc_feature (1)..(25): SEQ ID NO: 4518; WAN024A2Y_at; Start 177; Stop 201
aattgtaacgaatcaaggtcaatct

SEQ ID NO: 40843 - DNA, 25 bp, Artificial
  probe
  misc_feature (1)..(25): SEQ ID NO: 4518; WAN024A2Y_at; Start 56; Stop 80
cacttccgttatcaacataatacat

SEQ ID NO: 40844 - DNA, 25 bp, Artificial
  probe
  misc_feature (1)..(25): SEQ ID NO: 4518; WAN024A2Y_at; Start 5; Stop 29
gcaacctccttgacttaaaatctat

SEQ ID NO: 40845 - DNA, 25 bp, Artificial
  probe
  misc_feature (1)..(25): SEQ ID NO: 4518; WAN024A2Y_at; Start 45; Stop 69
gcaataaatttcacttccgttatca

SEQ ID NO: 40846 - DNA, 25 bp, Artificial
  probe
  misc_feature (1)..(25): SEQ ID NO: 4518; WAN024A2Y_at; Start 25; Stop 49
tctatatggaattatgacaagcaat

SEQ ID NO: 40847 - DNA, 25 bp, Artificial
  probe
  misc_feature (1)..(25): SEQ ID NO: 4518; WAN024A2Y_at; Start 32; Stop 56
ggaattatgacaagcaataaatttc

SEQ ID NO: 40848 - DNA, 25 bp, Artificial
  probe
  misc_feature (1)..(25): SEQ ID NO: 4518; WAN024A2Y_at; Start 16; Stop 40
gacttaaaatctatatggaattatg

SEQ ID NO: 40849 - DNA, 25 bp, Artificial
  probe
  misc_feature (1)..(25): SEQ ID NO: 4518; WAN024A2Y_at; Start 42; Stop 66
caagcaataaatttcacttccgtta

SEQ ID NO: 40850 - DNA, 25 bp, Artificial
  probe
  misc_feature (1)..(25): SEQ ID NO: 4518; WAN024A2Y_at; Start 40; Stop 64
gacaagcaataaatttcacttccgt

SEQ ID NO: 40851 - DNA, 25 bp, Artificial
  probe
  misc_feature (1)..(25): SEQ ID NO: 4518; WAN024A2Y_at; Start 174; Stop 198
aataattgtaacgaatcaaggtcaa

SEQ ID NO: 40852 - DNA, 25 bp, Artificial
  probe
  misc_feature (1)..(25): SEQ ID NO: 4518; WAN024A2Y_at; Start 12; Stop 36
ccttgacttaaaatctatatggaat

SEQ ID NO: 40853 - DNA, 25 bp, Artificial
  probe
  misc_feature (1)..(25): SEQ ID NO: 4518; WAN024A2Y_at; Start 23; Stop 47
aatctatatggaattatgacaagca

SEQ ID NO: 40854 - DNA, 25 bp, Artificial
  probe
  misc_feature (1)..(25): SEQ ID NO: 4518; WAN024A2Y_at; Start 4; Stop 28
ggcaacctccttgacttaaaatcta

SEQ ID NO: 40855 - DNA, 25 bp, Artificial
  probe
  misc_feature (1)..(25): SEQ ID NO: 4518; WAN024A2Y_at; Start 178; Stop 202
attgtaacgaatcaaggtcaatcta

SEQ ID NO: 40856 - DNA, 25 bp, Artificial
  probe
  misc_feature (1)..(25): SEQ ID NO: 4518; WAN024A2Y_at; Start 62; Stop 86
cgttatcaacataatacattttctt

SEQ ID NO: 40857 - DNA, 25 bp, Artificial
  probe
  misc_feature (1)..(25): SEQ ID NO: 4518; WAN024A2Y_at; Start 49; Stop 73
taaatttcacttccgttatcaacat

SEQ ID NO: 40858 - DNA, 25 bp, Artificial
  probe
  misc_feature (1)..(25): SEQ ID NO: 4518; WAN024A2Y_at; Start 60; Stop 84
tccgttatcaacataatacattttc

SEQ ID NO: 40859 - DNA, 25 bp, Artificial
  probe
  misc_feature (1)..(25): SEQ ID NO: 4518; WAN024A2Y_at; Start 173; Stop 197
aaataattgtaacgaatcaaggtca

SEQ ID NO: 40860 - DNA, 25 bp, Artificial
  probe
  misc_feature (1)..(25): SEQ ID NO: 4518; WAN024A2Y_at; Start 55; Stop 79
tcacttccgttatcaacataataca

SEQ ID NO: 40861 - DNA, 25 bp, Artificial
  probe
  misc_feature (1)..(25): SEQ ID NO: 4518; WAN024A2Y_at; Start 39; Stop 63
tgacaagcaataaatttcacttccg

SEQ ID NO: 40862 - DNA, 25 bp, Artificial
  probe
  misc_feature (1)..(25): SEQ ID NO: 4518; WAN024A2Y_at; Start 162; Stop 186
tggtataattgaaataattgtaacg

SEQ ID NO: 40863 - DNA, 25 bp, Artificial
  probe
  misc_feature (1)..(25): SEQ ID NO: 4518; WAN024A2Y_at; Start 58; Stop 82
cttccgttatcaacataatacattt

SEQ ID NO: 40864 - DNA, 25 bp, Artificial
  probe
  misc_feature (1)..(25): SEQ ID NO: 4518; WAN024A2Y_at; Start 29; Stop 53
tatggaattatgacaagcaataaat

SEQ ID NO: 40865 - DNA, 25 bp, Artificial
  probe
  misc_feature (1)..(25): SEQ ID NO: 4518; WAN024A2Y_at; Start 9; Stop 33
cctccttgacttaaaatctatatgg

SEQ ID NO: 40866 - DNA, 25 bp, Artificial
  probe
  misc_feature (1)..(25): SEQ ID NO: 4518; WAN024A2Y_at; Start 18; Stop 42
cttaaaatctatatggaattatgac

SEQ ID NO: 40867 - DNA, 25 bp, Artificial
  probe
  misc_feature (1)..(25): SEQ ID NO: 4518; WAN024A2Y_at; Start 22; Stop 46
aaatctatatggaattatgacaagc

SEQ ID NO: 40868 - DNA, 25 bp, Artificial
  probe
  misc_feature (1)..(25): SEQ ID NO: 4518; WAN024A2Y_at; Start 51; Stop 75
aatttcacttccgttatcaacataa

SEQ ID NO: 40869 - DNA, 25 bp, Artificial
  probe
  misc_feature (1)..(25): SEQ ID NO: 4518; WAN024A2Y_at; Start 37; Stop 61
tatgacaagcaataaatttcacttc

SEQ ID NO: 40870 - DNA, 25 bp, Artificial
  probe
  misc_feature (1)..(25): SEQ ID NO: 4518; WAN024A2Y_at; Start 172; Stop 196
gaaataattgtaacgaatcaaggtc

SEQ ID NO: 40871 - DNA, 25 bp, Artificial
  probe
  misc_feature (1)..(25): SEQ ID NO: 4518; WAN024A2Y_at; Start 144; Stop 168
tactaatttttcattttgtggtata

SEQ ID NO: 40872 - DNA, 25 bp, Artificial
  probe
  misc_feature (1)..(25): SEQ ID NO: 4518; WAN024A2Y_at; Start 26; Stop 50
ctatatggaattatgacaagcaata

SEQ ID NO: 40873 - DNA, 25 bp, Artificial
  probe
  misc_feature (1)..(25): SEQ ID NO: 4518; WAN024A2Y_at; Start 6; Stop 30
caacctccttgacttaaaatctata

SEQ ID NO: 40874 - DNA, 25 bp, Artificial
  probe
  misc_feature (1)..(25): SEQ ID NO: 4518; WAN024A2Y_at; Start 46; Stop 70
caataaatttcacttccgttatcaa

SEQ ID NO: 40875 - DNA, 25 bp, Artificial
  probe
  misc_feature (1)..(25): SEQ ID NO: 4502; WAN024A2Z_at; Start 128; Stop 152
ttatgttgataacggaagtgaaatt

SEQ ID NO: 40876 - DNA, 25 bp, Artificial
  probe
  misc_feature (1)..(25): SEQ ID NO: 4502; WAN024A2Z_at; Start 135; Stop 159
gataacggaagtgaaatttattgct

SEQ ID NO: 40877 - DNA, 25 bp, Artificial
  probe
  misc_feature (1)..(25): SEQ ID NO: 4502; WAN024A2Z_at; Start 9; Stop 33
ccttgattcgttacaattatttcaa

SEQ ID NO: 40878 - DNA, 25 bp, Artificial
  probe
  misc_feature (1)..(25): SEQ ID NO: 4502; WAN024A2Z_at; Start 1; Stop 25
tagattgaccttgattcgttacaat

SEQ ID NO: 40879 - DNA, 25 bp, Artificial
  probe
  misc_feature (1)..(25): SEQ ID NO: 4502; WAN024A2Z_at; Start 171; Stop 195
catatagattttaagtcaaggaggt

SEQ ID NO: 40880 - DNA, 25 bp, Artificial
  probe
  misc_feature (1)..(25): SEQ ID NO: 4502; WAN024A2Z_at; Start 170; Stop 194
ccatatagattttaagtcaaggagg

SEQ ID NO: 40881 - DNA, 25 bp, Artificial
  probe
  misc_feature (1)..(25): SEQ ID NO: 4502; WAN024A2Z_at; Start 121; Stop 145
aaatgtattatgttgataacggaag

SEQ ID NO: 40882 - DNA, 25 bp, Artificial
  probe
  misc_feature (1)..(25): SEQ ID NO: 4502; WAN024A2Z_at; Start 126; Stop 150
tattatgttgataacggaagtgaaa

SEQ ID NO: 40883 - DNA, 25 bp, Artificial
  probe
  misc_feature (1)..(25): SEQ ID NO: 4502; WAN024A2Z_at; Start 119; Stop 143
gaaaatgtattatgttgataacgga

SEQ ID NO: 40884 - DNA, 25 bp, Artificial
  probe
  misc_feature (1)..(25): SEQ ID NO: 4502; WAN024A2Z_at; Start 134; Stop 158
tgataacggaagtgaaatttattgc

SEQ ID NO: 40885 - DNA, 25 bp, Artificial
  probe
  misc_feature (1)..(25): SEQ ID NO: 4502; WAN024A2Z_at; Start 161; Stop 185
gtcataattccatatagattttaag

SEQ ID NO: 40886 - DNA, 25 bp, Artificial
  probe
  misc_feature (1)..(25): SEQ ID NO: 4502; WAN024A2Z_at; Start 17; Stop 41
cgttacaattatttcaattatacca

SEQ ID NO: 40887 - DNA, 25 bp, Artificial
  probe
  misc_feature (1)..(25): SEQ ID NO: 4502; WAN024A2Z_at; Start 173; Stop 197
tatagattttaagtcaaggaggttg

SEQ ID NO: 40888 - DNA, 25 bp, Artificial
  probe
  misc_feature (1)..(25): SEQ ID NO: 4502; WAN024A2Z_at; Start 163; Stop 187
cataattccatatagattttaagtc

SEQ ID NO: 40889 - DNA, 25 bp, Artificial
  probe
  misc_feature (1)..(25): SEQ ID NO: 4502; WAN024A2Z_at; Start 139; Stop 163
acggaagtgaaatttattgcttgtc

SEQ ID NO: 40890 - DNA, 25 bp, Artificial
  probe
  misc_feature (1)..(25): SEQ ID NO: 4502; WAN024A2Z_at; Start 157; Stop 181
gcttgtcataattccatatagattt

SEQ ID NO: 40891 - DNA, 25 bp, Artificial
  probe
  misc_feature (1)..(25): SEQ ID NO: 4502; WAN024A2Z_at; Start 140; Stop 164
cggaagtgaaatttattgcttgtca

SEQ ID NO: 40892 - DNA, 25 bp, Artificial
  probe
  misc_feature (1)..(25): SEQ ID NO: 4502; WAN024A2Z_at; Start 3; Stop 27
gattgaccttgattcgttacaatta

SEQ ID NO: 40893 - DNA, 25 bp, Artificial
  probe
  misc_feature (1)..(25): SEQ ID NO: 4502; WAN024A2Z_at; Start 166; Stop 190
aattccatatagattttaagtcaag

SEQ ID NO: 40894 - DNA, 25 bp, Artificial
  probe
  misc_feature (1)..(25): SEQ ID NO: 4502; WAN024A2Z_at; Start 131; Stop 155
tgttgataacggaagtgaaatttat

SEQ ID NO: 40895 - DNA, 25 bp, Artificial
  probe
  misc_feature (1)..(25): SEQ ID NO: 4502; WAN024A2Z_at; Start 156; Stop 180
tgcttgtcataattccatatagatt

SEQ ID NO: 40896 - DNA, 25 bp, Artificial
  probe
  misc_feature (1)..(25): SEQ ID NO: 4502; WAN024A2Z_at; Start 175; Stop 199
tagattttaagtcaaggaggttgcc

SEQ ID NO: 40897 - DNA, 25 bp, Artificial
  probe
  misc_feature (1)..(25): SEQ ID NO: 4502; WAN024A2Z_at; Start 147; Stop 171
gaaatttattgcttgtcataattcc

SEQ ID NO: 40898 - DNA, 25 bp, Artificial
  probe
  misc_feature (1)..(25): SEQ ID NO: 4502; WAN024A2Z_at; Start 153; Stop 177
tattgcttgtcataattccatatag

SEQ ID NO: 40899 - DNA, 25 bp, Artificial
  probe
  misc_feature (1)..(25): SEQ ID NO: 4502; WAN024A2Z_at; Start 22; Stop 46
caattatttcaattataccacaaaa

SEQ ID NO: 40900 - DNA, 25 bp, Artificial
  probe
  misc_feature (1)..(25): SEQ ID NO: 4502; WAN024A2Z_at; Start 142; Stop 166
gaagtgaaatttattgcttgtcata

SEQ ID NO: 40901 - DNA, 25 bp, Artificial
  probe
  misc_feature (1)..(25): SEQ ID NO: 4502; WAN024A2Z_at; Start 154; Stop 178
attgcttgtcataattccatataga

SEQ ID NO: 40902 - DNA, 25 bp, Artificial
  probe
  misc_feature (1)..(25): SEQ ID NO: 4502; WAN024A2Z_at; Start 174; Stop 198
atagattttaagtcaaggaggttgc

SEQ ID NO: 40903 - DNA, 25 bp, Artificial
  probe
  misc_feature (1)..(25): SEQ ID NO: 4502; WAN024A2Z_at; Start 35; Stop 59
tataccacaaaatgaaaaattagta

SEQ ID NO: 40904 - DNA, 25 bp, Artificial
  probe
  misc_feature (1)..(25): SEQ ID NO: 4502; WAN024A2Z_at; Start 7; Stop 31
gaccttgattcgttacaattatttc

SEQ ID NO: 40905 - DNA, 25 bp, Artificial
  probe
  misc_feature (1)..(25): SEQ ID NO: 4502; WAN024A2Z_at; Start 124; Stop 148
tgtattatgttgataacggaagtga

SEQ ID NO: 40906 - DNA, 25 bp, Artificial
  probe
  misc_feature (1)..(25): SEQ ID NO: 4502; WAN024A2Z_at; Start 20; Stop 44
tacaattatttcaattataccacaa

SEQ ID NO: 40907 - DNA, 25 bp, Artificial
  probe
  misc_feature (1)..(25): SEQ ID NO: 4502; WAN024A2Z_at; Start 125; Stop 149
gtattatgttgataacggaagtgaa

SEQ ID NO: 40908 - DNA, 25 bp, Artificial
  probe
  misc_feature (1)..(25): SEQ ID NO: 4502; WAN024A2Z_at; Start 137; Stop 161
taacggaagtgaaatttattgcttg

SEQ ID NO: 40909 - DNA, 25 bp, Artificial
  probe
  misc_feature (1)..(25): SEQ ID NO: 3717; WAN024A32_at; Start 101; Stop 125
aatgagaaggaaaaatgtcaaactt

SEQ ID NO: 40910 - DNA, 25 bp, Artificial
  probe
  misc_feature (1)..(25): SEQ ID NO: 3717; WAN024A32_at; Start 83; Stop 107
atcctttatttactataaaatgaga

SEQ ID NO: 40911 - DNA, 25 bp, Artificial
  probe
  misc_feature (1)..(25): SEQ ID NO: 3717; WAN024A32_at; Start 117; Stop 141
gtcaaacttttatattgcaaatagg

SEQ ID NO: 40912 - DNA, 25 bp, Artificial
  probe
  misc_feature (1)..(25): SEQ ID NO: 3717; WAN024A32_at; Start 87; Stop 111
tttatttactataaaatgagaagga

SEQ ID NO: 40913 - DNA, 25 bp, Artificial
  probe
  misc_feature (1)..(25): SEQ ID NO: 3717; WAN024A32_at; Start 102; Stop 126
atgagaaggaaaaatgtcaaacttt

SEQ ID NO: 40914 - DNA, 25 bp, Artificial
  probe
  misc_feature (1)..(25): SEQ ID NO: 3717; WAN024A32_at; Start 93; Stop 117
tactataaaatgagaaggaaaaatg

SEQ ID NO: 40915 - DNA, 25 bp, Artificial
  probe
  misc_feature (1)..(25): SEQ ID NO: 3717; WAN024A32_at; Start 96; Stop 120
tataaaatgagaaggaaaaatgtca

SEQ ID NO: 40916 - DNA, 25 bp, Artificial
  probe
  misc_feature (1)..(25): SEQ ID NO: 3717; WAN024A32_at; Start 110; Stop 134
gaaaaatgtcaaacttttatattgc

SEQ ID NO: 40917 - DNA, 25 bp, Artificial
  probe
  misc_feature (1)..(25): SEQ ID NO: 3717; WAN024A32_at; Start 113; Stop 137
aaatgtcaaacttttatattgcaaa

SEQ ID NO: 40918 - DNA, 25 bp, Artificial
  probe
  misc_feature (1)..(25): SEQ ID NO: 3717; WAN024A32_at; Start 120; Stop 144
aaacttttatattgcaaataggaga

SEQ ID NO: 40919 - DNA, 25 bp, Artificial
  probe
  misc_feature (1)..(25): SEQ ID NO: 3717; WAN024A32_at; Start 121; Stop 145
aacttttatattgcaaataggagaa

SEQ ID NO: 40920 - DNA, 25 bp, Artificial
  probe
  misc_feature (1)..(25): SEQ ID NO: 3717; WAN024A32_at; Start 89; Stop 113
tatttactataaaatgagaaggaaa

SEQ ID NO: 40921 - DNA, 25 bp, Artificial
  probe
  misc_feature (1)..(25): SEQ ID NO: 3717; WAN024A32_at; Start 98; Stop 122
taaaatgagaaggaaaaatgtcaaa

SEQ ID NO: 40922 - DNA, 25 bp, Artificial
  probe
  misc_feature (1)..(25): SEQ ID NO: 3717; WAN024A32_at; Start 88; Stop 112
ttatttactataaaatgagaaggaa

SEQ ID NO: 40923 - DNA, 25 bp, Artificial
  probe
  misc_feature (1)..(25): SEQ ID NO: 3717; WAN024A32_at; Start 85; Stop 109
cctttatttactataaaatgagaag

SEQ ID NO: 40924 - DNA, 25 bp, Artificial
  probe
  misc_feature (1)..(25): SEQ ID NO: 3717; WAN024A32_at; Start 116; Stop 140
tgtcaaacttttatattgcaaatag

SEQ ID NO: 40925 - DNA, 25 bp, Artificial
  probe
  misc_feature (1)..(25): SEQ ID NO: 3717; WAN024A32_at; Start 84; Stop 108
tcctttatttactataaaatgagaa

SEQ ID NO: 40926 - DNA, 25 bp, Artificial
  probe
  misc_feature (1)..(25): SEQ ID NO: 3717; WAN024A32_at; Start 118; Stop 142
tcaaacttttatattgcaaatagga

SEQ ID NO: 40927 - DNA, 25 bp, Artificial
  probe
  misc_feature (1)..(25): SEQ ID NO: 3717; WAN024A32_at; Start 112; Stop 136
aaaatgtcaaacttttatattgcaa

SEQ ID NO: 40928 - DNA, 25 bp, Artificial
  probe
  misc_feature (1)..(25): SEQ ID NO: 3717; WAN024A32_at; Start 119; Stop 143
caaacttttatattgcaaataggag

SEQ ID NO: 40929 - DNA, 25 bp, Artificial
  probe
  misc_feature (1)..(25): SEQ ID NO: 3717; WAN024A32_at; Start 82; Stop 106
tatcctttatttactataaaatgag

SEQ ID NO: 40930 - DNA, 25 bp, Artificial
  probe
  misc_feature (1)..(25): SEQ ID NO: 3717; WAN024A32_at; Start 115; Stop 139
atgtcaaacttttatattgcaaata

SEQ ID NO: 40931 - DNA, 25 bp, Artificial
  probe
  misc_feature (1)..(25): SEQ ID NO: 3717; WAN024A32_at; Start 111; Stop 135
aaaaatgtcaaacttttatattgca

SEQ ID NO: 40932 - DNA, 25 bp, Artificial
  probe
  misc_feature (1)..(25): SEQ ID NO: 3717; WAN024A32_at; Start 114; Stop 138
aatgtcaaacttttatattgcaaat

SEQ ID NO: 40933 - DNA, 25 bp, Artificial
  probe
  misc_feature (1)..(25): SEQ ID NO: 3717; WAN024A32_at; Start 46; Stop 70
ttagaattgtcaaaacaatccgtct

SEQ ID NO: 40934 - DNA, 25 bp, Artificial
  probe
  misc_feature (1)..(25): SEQ ID NO: 3717; WAN024A32_at; Start 76; Stop 100
tgattttatcctttatttactataa

SEQ ID NO: 40935 - DNA, 25 bp, Artificial
  probe
  misc_feature (1)..(25): SEQ ID NO: 3717; WAN024A32_at; Start 47; Stop 71
tagaattgtcaaaacaatccgtcta

SEQ ID NO: 40936 - DNA, 25 bp, Artificial
  probe
  misc_feature (1)..(25): SEQ ID NO: 3717; WAN024A32_at; Start 100; Stop 124
aaatgagaaggaaaaatgtcaaact

SEQ ID NO: 40937 - DNA, 25 bp, Artificial
  probe
  misc_feature (1)..(25): SEQ ID NO: 3717; WAN024A32_at; Start 94; Stop 118
actataaaatgagaaggaaaaatgt

SEQ ID NO: 40938 - DNA, 25 bp, Artificial
  probe
  misc_feature (1)..(25): SEQ ID NO: 3717; WAN024A32_at; Start 86; Stop 110
ctttatttactataaaatgagaagg

SEQ ID NO: 40939 - DNA, 25 bp, Artificial
  probe
  misc_feature (1)..(25): SEQ ID NO: 3717; WAN024A32_at; Start 97; Stop 121
ataaaatgagaaggaaaaatgtcaa

SEQ ID NO: 40940 - DNA, 25 bp, Artificial
  probe
  misc_feature (1)..(25): SEQ ID NO: 3717; WAN024A32_at; Start 95; Stop 119
ctataaaatgagaaggaaaaatgtc

SEQ ID NO: 40941 - DNA, 25 bp, Artificial
  probe
  misc_feature (1)..(25): SEQ ID NO: 3717; WAN024A32_at; Start 48; Stop 72
agaattgtcaaaacaatccgtctag

SEQ ID NO: 40942 - DNA, 25 bp, Artificial
  probe
  misc_feature (1)..(25): SEQ ID NO: 3659; WAN024A33_at; Start 42; Stop 66
tctcattttatagtaaataaaggat

SEQ ID NO: 40943 - DNA, 25 bp, Artificial
  probe
  misc_feature (1)..(25): SEQ ID NO: 3659; WAN024A33_at; Start 8; Stop 32
cctatttgcaatataaaagtttgac

SEQ ID NO: 40944 - DNA, 25 bp, Artificial
  probe
  misc_feature (1)..(25): SEQ ID NO: 3659; WAN024A33_at; Start 24; Stop 48
aagtttgacatttttccttctcatt

SEQ ID NO: 40945 - DNA, 25 bp, Artificial
  probe
  misc_feature (1)..(25): SEQ ID NO: 3659; WAN024A33_at; Start 12; Stop 36
tttgcaatataaaagtttgacattt

SEQ ID NO: 40946 - DNA, 25 bp, Artificial
  probe
  misc_feature (1)..(25): SEQ ID NO: 3659; WAN024A33_at; Start 41; Stop 65
ttctcattttatagtaaataaagga

SEQ ID NO: 40947 - DNA, 25 bp, Artificial
  probe
  misc_feature (1)..(25): SEQ ID NO: 3659; WAN024A33_at; Start 1; Stop 25
gatttctcctatttgcaatataaaa

SEQ ID NO: 40948 - DNA, 25 bp, Artificial
  probe
  misc_feature (1)..(25): SEQ ID NO: 3659; WAN024A33_at; Start 37; Stop 61
ttccttctcattttatagtaaataa

SEQ ID NO: 40949 - DNA, 25 bp, Artificial
  probe
  misc_feature (1)..(25): SEQ ID NO: 3659; WAN024A33_at; Start 5; Stop 29
tctcctatttgcaatataaaagttt

SEQ ID NO: 40950 - DNA, 25 bp, Artificial
  probe
  misc_feature (1)..(25): SEQ ID NO: 3659; WAN024A33_at; Start 39; Stop 63
ccttctcattttatagtaaataaag

SEQ ID NO: 40951 - DNA, 25 bp, Artificial
  probe
  misc_feature (1)..(25): SEQ ID NO: 3659; WAN024A33_at; Start 31; Stop 55
acatttttccttctcattttatagt

SEQ ID NO: 40952 - DNA, 25 bp, Artificial
  probe
  misc_feature (1)..(25): SEQ ID NO: 3659; WAN024A33_at; Start 38; Stop 62
tccttctcattttatagtaaataaa

SEQ ID NO: 40953 - DNA, 25 bp, Artificial
  probe
  misc_feature (1)..(25): SEQ ID NO: 3659; WAN024A33_at; Start 49; Stop 73
ttatagtaaataaaggataaaatca

SEQ ID NO: 40954 - DNA, 25 bp, Artificial
  probe
  misc_feature (1)..(25): SEQ ID NO: 3659; WAN024A33_at; Start 10; Stop 34
tatttgcaatataaaagtttgacat

SEQ ID NO: 40955 - DNA, 25 bp, Artificial
  probe
  misc_feature (1)..(25): SEQ ID NO: 3659; WAN024A33_at; Start 3; Stop 27
tttctcctatttgcaatataaaagt

SEQ ID NO: 40956 - DNA, 25 bp, Artificial
  probe
  misc_feature (1)..(25): SEQ ID NO: 3659; WAN024A33_at; Start 36; Stop 60
tttccttctcattttatagtaaata

SEQ ID NO: 40957 - DNA, 25 bp, Artificial
  probe
  misc_feature (1)..(25): SEQ ID NO: 3659; WAN024A33_at; Start 43; Stop 67
ctcattttatagtaaataaaggata

SEQ ID NO: 40958 - DNA, 25 bp, Artificial
  probe
  misc_feature (1)..(25): SEQ ID NO: 3659; WAN024A33_at; Start 4; Stop 28
ttctcctatttgcaatataaaagtt

SEQ ID NO: 40959 - DNA, 25 bp, Artificial
  probe
  misc_feature (1)..(25): SEQ ID NO: 3659; WAN024A33_at; Start 78; Stop 102
tagacggattgttttgacaattcta

SEQ ID NO: 40960 - DNA, 25 bp, Artificial
  probe
  misc_feature (1)..(25): SEQ ID NO: 3659; WAN024A33_at; Start 13; Stop 37
ttgcaatataaaagtttgacatttt

SEQ ID NO: 40961 - DNA, 25 bp, Artificial
  probe
  misc_feature (1)..(25): SEQ ID NO: 3659; WAN024A33_at; Start 11; Stop 35
atttgcaatataaaagtttgacatt

SEQ ID NO: 40962 - DNA, 25 bp, Artificial
  probe
  misc_feature (1)..(25): SEQ ID NO: 3659; WAN024A33_at; Start 30; Stop 54
gacatttttccttctcattttatag

SEQ ID NO: 40963 - DNA, 25 bp, Artificial
  probe
  misc_feature (1)..(25): SEQ ID NO: 3659; WAN024A33_at; Start 32; Stop 56
catttttccttctcattttatagta

SEQ ID NO: 40964 - DNA, 25 bp, Artificial
  probe
  misc_feature (1)..(25): SEQ ID NO: 3659; WAN024A33_at; Start 79; Stop 103
agacggattgttttgacaattctaa

SEQ ID NO: 40965 - DNA, 25 bp, Artificial
  probe
  misc_feature (1)..(25): SEQ ID NO: 3659; WAN024A33_at; Start 6; Stop 30
ctcctatttgcaatataaaagtttg

SEQ ID NO: 40966 - DNA, 25 bp, Artificial
  probe
  misc_feature (1)..(25): SEQ ID NO: 3659; WAN024A33_at; Start 7; Stop 31
tcctatttgcaatataaaagtttga

SEQ ID NO: 40967 - DNA, 25 bp, Artificial
  probe
  misc_feature (1)..(25): SEQ ID NO: 3659; WAN024A33_at; Start 9; Stop 33
ctatttgcaatataaaagtttgaca

SEQ ID NO: 40968 - DNA, 25 bp, Artificial
  probe
  misc_feature (1)..(25): SEQ ID NO: 3659; WAN024A33_at; Start 77; Stop 101
ctagacggattgttttgacaattct

SEQ ID NO: 40969 - DNA, 25 bp, Artificial
  probe
  misc_feature (1)..(25): SEQ ID NO: 3659; WAN024A33_at; Start 23; Stop 47
aaagtttgacatttttccttctcat

SEQ ID NO: 40970 - DNA, 25 bp, Artificial
  probe
  misc_feature (1)..(25): SEQ ID NO: 3659; WAN024A33_at; Start 40; Stop 64
cttctcattttatagtaaataaagg

SEQ ID NO: 40971 - DNA, 25 bp, Artificial
  probe
  misc_feature (1)..(25): SEQ ID NO: 3659; WAN024A33_at; Start 14; Stop 38
tgcaatataaaagtttgacattttt

SEQ ID NO: 40972 - DNA, 25 bp, Artificial
  probe
  misc_feature (1)..(25): SEQ ID NO: 3659; WAN024A33_at; Start 2; Stop 26
atttctcctatttgcaatataaaag

SEQ ID NO: 40973 - DNA, 25 bp, Artificial
  probe
  misc_feature (1)..(25): SEQ ID NO: 3659; WAN024A33_at; Start 50; Stop 74
tatagtaaataaaggataaaatcaa

SEQ ID NO: 40974 - DNA, 25 bp, Artificial
  probe
  misc_feature (1)..(25): SEQ ID NO: 3659; WAN024A33_at; Start 15; Stop 39
gcaatataaaagtttgacatttttc

SEQ ID NO: 40975 - DNA, 25 bp, Artificial
  probe
  misc_feature (1)..(25): SEQ ID NO: 3659; WAN024A33_at; Start 25; Stop 49
agtttgacatttttccttctcattt

SEQ ID NO: 40976 - DNA, 25 bp, Artificial
  probe
  misc_feature (1)..(25): SEQ ID NO: 4720; WAN024A34_at; Start 71; Stop 95
gaaatcccttgatgcgcaagagatt

SEQ ID NO: 40977 - DNA, 25 bp, Artificial
  probe
  misc_feature (1)..(25): SEQ ID NO: 4720; WAN024A34_at; Start 46; Stop 70
cacttaaacgagattaaagaatggc

SEQ ID NO: 40978 - DNA, 25 bp, Artificial
  probe
  misc_feature (1)..(25): SEQ ID NO: 4720; WAN024A34_at; Start 37; Stop 61
catatacaacacttaaacgagatta

SEQ ID NO: 40979 - DNA, 25 bp, Artificial
  probe
  misc_feature (1)..(25): SEQ ID NO: 4720; WAN024A34_at; Start 192; Stop 216
aaaattaataagcagaaaactctct

SEQ ID NO: 40980 - DNA, 25 bp, Artificial
  probe
  misc_feature (1)..(25): SEQ ID NO: 4720; WAN024A34_at; Start 265; Stop 289
catttatatattgcattaagttaga

SEQ ID NO: 40981 - DNA, 25 bp, Artificial
  probe
  misc_feature (1)..(25): SEQ ID NO: 4720; WAN024A34_at; Start 50; Stop 74
taaacgagattaaagaatggcgaaa

SEQ ID NO: 40982 - DNA, 25 bp, Artificial
  probe
  misc_feature (1)..(25): SEQ ID NO: 4720; WAN024A34_at; Start 33; Stop 57
gctccatatacaacacttaaacgag

SEQ ID NO: 40983 - DNA, 25 bp, Artificial
  probe
  misc_feature (1)..(25): SEQ ID NO: 4720; WAN024A34_at; Start 64; Stop 88
gaatggcgaaatcccttgatgcgca

SEQ ID NO: 40984 - DNA, 25 bp, Artificial
  probe
  misc_feature (1)..(25): SEQ ID NO: 4720; WAN024A34_at; Start 224; Stop 248
tgttgtagagagttttttgttaata

SEQ ID NO: 40985 - DNA, 25 bp, Artificial
  probe
  misc_feature (1)..(25): SEQ ID NO: 4720; WAN024A34_at; Start 28; Stop 52
gcaaagctccatatacaacacttaa

SEQ ID NO: 40986 - DNA, 25 bp, Artificial
  probe
  misc_feature (1)..(25): SEQ ID NO: 4720; WAN024A34_at; Start 343; Stop 367
tcaaagagcaaaccatgaatattaa

SEQ ID NO: 40987 - DNA, 25 bp, Artificial
  probe
  misc_feature (1)..(25): SEQ ID NO: 4720; WAN024A34_at; Start 145; Stop 169
aagcctatcaaattaaacaaagaag

SEQ ID NO: 40988 - DNA, 25 bp, Artificial
  probe
  misc_feature (1)..(25): SEQ ID NO: 4720; WAN024A34_at; Start 277; Stop 301
gcattaagttagatatatgatataa

SEQ ID NO: 40989 - DNA, 25 bp, Artificial
  probe
  misc_feature (1)..(25): SEQ ID NO: 4720; WAN024A34_at; Start 55; Stop 79
gagattaaagaatggcgaaatccct

SEQ ID NO: 40990 - DNA, 25 bp, Artificial
  probe
  misc_feature (1)..(25): SEQ ID NO: 4720; WAN024A34_at; Start 62; Stop 86
aagaatggcgaaatcccttgatgcg

SEQ ID NO: 40991 - DNA, 25 bp, Artificial
  probe
  misc_feature (1)..(25): SEQ ID NO: 4720; WAN024A34_at; Start 78; Stop 102
cttgatgcgcaagagattagctgtc

SEQ ID NO: 40992 - DNA, 25 bp, Artificial
  probe
  misc_feature (1)..(25): SEQ ID NO: 4720; WAN024A34_at; Start 76; Stop 100
cccttgatgcgcaagagattagctg

SEQ ID NO: 40993 - DNA, 25 bp, Artificial
  probe
  misc_feature (1)..(25): SEQ ID NO: 4720; WAN024A34_at; Start 25; Stop 49
tatgcaaagctccatatacaacact

SEQ ID NO: 40994 - DNA, 25 bp, Artificial
  probe
  misc_feature (1)..(25): SEQ ID NO: 4720; WAN024A34_at; Start 201; Stop 225
aagcagaaaactctctattattttg

SEQ ID NO: 40995 - DNA, 25 bp, Artificial
  probe
  misc_feature (1)..(25): SEQ ID NO: 4720; WAN024A34_at; Start 83; Stop 107
tgcgcaagagattagctgtcctttt

SEQ ID NO: 40996 - DNA, 25 bp, Artificial
  probe
  misc_feature (1)..(25): SEQ ID NO: 4720; WAN024A34_at; Start 67; Stop 91
tggcgaaatcccttgatgcgcaaga

SEQ ID NO: 40997 - DNA, 25 bp, Artificial
  probe
  misc_feature (1)..(25): SEQ ID NO: 4720; WAN024A34_at; Start 69; Stop 93
gcgaaatcccttgatgcgcaagaga

SEQ ID NO: 40998 - DNA, 25 bp, Artificial
  probe
  misc_feature (1)..(25): SEQ ID NO: 4720; WAN024A34_at; Start 85; Stop 109
cgcaagagattagctgtcctttttt

SEQ ID NO: 40999 - DNA, 25 bp, Artificial
  probe
  misc_feature (1)..(25): SEQ ID NO: 4720; WAN024A34_at; Start 48; Stop 72
cttaaacgagattaaagaatggcga

SEQ ID NO: 41000 - DNA, 25 bp, Artificial
  probe
  misc_feature (1)..(25): SEQ ID NO: 4720; WAN024A34_at; Start 257; Stop 281
caaaatgacatttatatattgcatt

SEQ ID NO: 41001 - DNA, 25 bp, Artificial
  probe
  misc_feature (1)..(25): SEQ ID NO: 4720; WAN024A34_at; Start 87; Stop 111
caagagattagctgtccttttttat

SEQ ID NO: 41002 - DNA, 25 bp, Artificial
  probe
  misc_feature (1)..(25): SEQ ID NO: 4720; WAN024A34_at; Start 60; Stop 84
taaagaatggcgaaatcccttgatg

SEQ ID NO: 41003 - DNA, 25 bp, Artificial
  probe
  misc_feature (1)..(25): SEQ ID NO: 4720; WAN024A34_at; Start 207; Stop 231
aaaactctctattattttgttgtag

SEQ ID NO: 41004 - DNA, 25 bp, Artificial
  probe
  misc_feature (1)..(25): SEQ ID NO: 4720; WAN024A34_at; Start 80; Stop 104
tgatgcgcaagagattagctgtcct

SEQ ID NO: 41005 - DNA, 25 bp, Artificial
  probe
  misc_feature (1)..(25): SEQ ID NO: 4720; WAN024A34_at; Start 350; Stop 374
gcaaaccatgaatattaatggagga

SEQ ID NO: 41006 - DNA, 25 bp, Artificial
  probe
  misc_feature (1)..(25): SEQ ID NO: 4720; WAN024A34_at; Start 142; Stop 166
tcaaagcctatcaaattaaacaaag

SEQ ID NO: 41007 - DNA, 25 bp, Artificial
  probe
  misc_feature (1)..(25): SEQ ID NO: 4720; WAN024A34_at; Start 54; Stop 78
cgagattaaagaatggcgaaatccc

SEQ ID NO: 41008 - DNA, 25 bp, Artificial
  probe
  misc_feature (1)..(25): SEQ ID NO: 4720; WAN024A34_at; Start 81; Stop 105
gatgcgcaagagattagctgtcctt

SEQ ID NO: 41009 - DNA, 25 bp, Artificial
  probe
  misc_feature (1)..(25): SEQ ID NO: 4720; WAN024A34_at; Start 75; Stop 99
tcccttgatgcgcaagagattagct

SEQ ID NO: 41010 - DNA, 25 bp, Artificial
  probe
  misc_feature (1)..(25): SEQ ID NO: 342; WAN024A35_at; Start 7; Stop 31
tttattcctccattaatattcatgg

SEQ ID NO: 41011 - DNA, 25 bp, Artificial
  probe
  misc_feature (1)..(25): SEQ ID NO: 342; WAN024A35_at; Start 314; Stop 338
tcgccattctttaatctcgtttaag

SEQ ID NO: 41012 - DNA, 25 bp, Artificial
  probe
  misc_feature (1)..(25): SEQ ID NO: 342; WAN024A35_at; Start 293; Stop 317
tctcttgcgcatcaagggatttcgc

SEQ ID NO: 41013 - DNA, 25 bp, Artificial
  probe
  misc_feature (1)..(25): SEQ ID NO: 342; WAN024A35_at; Start 20; Stop 44
taatattcatggtttgctctttgat

SEQ ID NO: 41014 - DNA, 25 bp, Artificial
  probe
  misc_feature (1)..(25): SEQ ID NO: 342; WAN024A35_at; Start 286; Stop 310
cagctaatctcttgcgcatcaaggg

SEQ ID NO: 41015 - DNA, 25 bp, Artificial
  probe
  misc_feature (1)..(25): SEQ ID NO: 342; WAN024A35_at; Start 156; Stop 180
tacaacaaaataatagagagttttc

SEQ ID NO: 41016 - DNA, 25 bp, Artificial
  probe
  misc_feature (1)..(25): SEQ ID NO: 342; WAN024A35_at; Start 169; Stop 193
tagagagttttctgcttattaattt

SEQ ID NO: 41017 - DNA, 25 bp, Artificial
  probe
  misc_feature (1)..(25): SEQ ID NO: 342; WAN024A35_at; Start 300; Stop 324
cgcatcaagggatttcgccattctt

SEQ ID NO: 41018 - DNA, 25 bp, Artificial
  probe
  misc_feature (1)..(25): SEQ ID NO: 342; WAN024A35_at; Start 284; Stop 308
gacagctaatctcttgcgcatcaag

SEQ ID NO: 41019 - DNA, 25 bp, Artificial
  probe
  misc_feature (1)..(25): SEQ ID NO: 342; WAN024A35_at; Start 287; Stop 311
agctaatctcttgcgcatcaaggga

SEQ ID NO: 41020 - DNA, 25 bp, Artificial
  probe
  misc_feature (1)..(25): SEQ ID NO: 342; WAN024A35_at; Start 191; Stop 215
tttttttcaaaatatctaagacatc

SEQ ID NO: 41021 - DNA, 25 bp, Artificial
  probe
  misc_feature (1)..(25): SEQ ID NO: 342; WAN024A35_at; Start 283; Stop 307
ggacagctaatctcttgcgcatcaa

SEQ ID NO: 41022 - DNA, 25 bp, Artificial
  probe
  misc_feature (1)..(25): SEQ ID NO: 342; WAN024A35_at; Start 296; Stop 320
cttgcgcatcaagggatttcgccat

SEQ ID NO: 41023 - DNA, 25 bp, Artificial
  probe
  misc_feature (1)..(25): SEQ ID NO: 342; WAN024A35_at; Start 308; Stop 332
gggatttcgccattctttaatctcg

SEQ ID NO: 41024 - DNA, 25 bp, Artificial
  probe
  misc_feature (1)..(25): SEQ ID NO: 342; WAN024A35_at; Start 99; Stop 123
taacttaatgcaatatataaatgtc

SEQ ID NO: 41025 - DNA, 25 bp, Artificial
  probe
  misc_feature (1)..(25): SEQ ID NO: 342; WAN024A35_at; Start 335; Stop 359
taagtgttgtatatggagctttgca

SEQ ID NO: 41026 - DNA, 25 bp, Artificial
  probe
  misc_feature (1)..(25): SEQ ID NO: 342; WAN024A35_at; Start 138; Stop 162
tattaacaaaaaactctctacaaca

SEQ ID NO: 41027 - DNA, 25 bp, Artificial
  probe
  misc_feature (1)..(25): SEQ ID NO: 342; WAN024A35_at; Start 337; Stop 361
agtgttgtatatggagctttgcata

SEQ ID NO: 41028 - DNA, 25 bp, Artificial
  probe
  misc_feature (1)..(25): SEQ ID NO: 342; WAN024A35_at; Start 316; Stop 340
gccattctttaatctcgtttaagtg

SEQ ID NO: 41029 - DNA, 25 bp, Artificial
  probe
  misc_feature (1)..(25): SEQ ID NO: 342; WAN024A35_at; Start 276; Stop 300
taaaaaaggacagctaatctcttgc

SEQ ID NO: 41030 - DNA, 25 bp, Artificial
  probe
  misc_feature (1)..(25): SEQ ID NO: 342; WAN024A35_at; Start 220; Stop 244
ctttgtttaatttgataggctttga

SEQ ID NO: 41031 - DNA, 25 bp, Artificial
  probe
  misc_feature (1)..(25): SEQ ID NO: 342; WAN024A35_at; Start 281; Stop 305
aaggacagctaatctcttgcgcatc

SEQ ID NO: 41032 - DNA, 25 bp, Artificial
  probe
  misc_feature (1)..(25): SEQ ID NO: 342; WAN024A35_at; Start 290; Stop 314
taatctcttgcgcatcaagggattt

SEQ ID NO: 41033 - DNA, 25 bp, Artificial
  probe
  misc_feature (1)..(25): SEQ ID NO: 342; WAN024A35_at; Start 330; Stop 354
tcgtttaagtgttgtatatggagct

SEQ ID NO: 41034 - DNA, 25 bp, Artificial
  probe
  misc_feature (1)..(25): SEQ ID NO: 342; WAN024A35_at; Start 27; Stop 51
catggtttgctctttgattcttatt

SEQ ID NO: 41035 - DNA, 25 bp, Artificial
  probe
  misc_feature (1)..(25): SEQ ID NO: 342; WAN024A35_at; Start 161; Stop 185
caaaataatagagagttttctgctt

SEQ ID NO: 41036 - DNA, 25 bp, Artificial
  probe
  misc_feature (1)..(25): SEQ ID NO: 342; WAN024A35_at; Start 147; Stop 171
aaaactctctacaacaaaataatag

SEQ ID NO: 41037 - DNA, 25 bp, Artificial
  probe
  misc_feature (1)..(25): SEQ ID NO: 342; WAN024A35_at; Start 86; Stop 110
tatatcatatatctaacttaatgca

SEQ ID NO: 41038 - DNA, 25 bp, Artificial
  probe
  misc_feature (1)..(25): SEQ ID NO: 342; WAN024A35_at; Start 279; Stop 303
aaaaggacagctaatctcttgcgca

SEQ ID NO: 41039 - DNA, 25 bp, Artificial
  probe
  misc_feature (1)..(25): SEQ ID NO: 342; WAN024A35_at; Start 298; Stop 322
tgcgcatcaagggatttcgccattc

SEQ ID NO: 41040 - DNA, 25 bp, Artificial
  probe
  misc_feature (1)..(25): SEQ ID NO: 342; WAN024A35_at; Start 12; Stop 36
tcctccattaatattcatggtttgc

SEQ ID NO: 41041 - DNA, 25 bp, Artificial
  probe
  misc_feature (1)..(25): SEQ ID NO: 342; WAN024A35_at; Start 295; Stop 319
tcttgcgcatcaagggatttcgcca

SEQ ID NO: 41042 - DNA, 25 bp, Artificial
  probe
  misc_feature (1)..(25): SEQ ID NO: 342; WAN024A35_at; Start 302; Stop 326
catcaagggatttcgccattcttta

SEQ ID NO: 41043 - DNA, 25 bp, Artificial
  probe
  misc_feature (1)..(25): SEQ ID NO: 342; WAN024A35_at; Start 278; Stop 302
aaaaaggacagctaatctcttgcgc

SEQ ID NO: 41044 - DNA, 25 bp, Artificial
  probe
  misc_feature (1)..(25): SEQ ID NO: 4354; WAN024A36_at; Start 31; Stop 55
aatacagtaaaaaatcagtcatctt

SEQ ID NO: 41045 - DNA, 25 bp, Artificial
  probe
  misc_feature (1)..(25): SEQ ID NO: 4354; WAN024A36_at; Start 20; Stop 44
tgcatacctaaaatacagtaaaaaa

SEQ ID NO: 41046 - DNA, 25 bp, Artificial
  probe
  misc_feature (1)..(25): SEQ ID NO: 4354; WAN024A36_at; Start 43; Stop 67
aatcagtcatcttggtatgctcctg

SEQ ID NO: 41047 - DNA, 25 bp, Artificial
  probe
  misc_feature (1)..(25): SEQ ID NO: 4354; WAN024A36_at; Start 18; Stop 42
tttgcatacctaaaatacagtaaaa

SEQ ID NO: 41048 - DNA, 25 bp, Artificial
  probe
  misc_feature (1)..(25): SEQ ID NO: 4354; WAN024A36_at; Start 39; Stop 63
aaaaaatcagtcatcttggtatgct

SEQ ID NO: 41049 - DNA, 25 bp, Artificial
  probe
  misc_feature (1)..(25): SEQ ID NO: 4354; WAN024A36_at; Start 30; Stop 54
aaatacagtaaaaaatcagtcatct

SEQ ID NO: 41050 - DNA, 25 bp, Artificial
  probe
  misc_feature (1)..(25): SEQ ID NO: 4354; WAN024A36_at; Start 34; Stop 58
acagtaaaaaatcagtcatcttggt

SEQ ID NO: 41051 - DNA, 25 bp, Artificial
  probe
  misc_feature (1)..(25): SEQ ID NO: 4354; WAN024A36_at; Start 19; Stop 43
ttgcatacctaaaatacagtaaaaa

SEQ ID NO: 41052 - DNA, 25 bp, Artificial
  probe
  misc_feature (1)..(25): SEQ ID NO: 4354; WAN024A36_at; Start 38; Stop 62
taaaaaatcagtcatcttggtatgc

SEQ ID NO: 41053 - DNA, 25 bp, Artificial
  probe
  misc_feature (1)..(25): SEQ ID NO: 4354; WAN024A36_at; Start 42; Stop 66
aaatcagtcatcttggtatgctcct

SEQ ID NO: 41054 - DNA, 25 bp, Artificial
  probe
  misc_feature (1)..(25): SEQ ID NO: 4354; WAN024A36_at; Start 51; Stop 75
atcttggtatgctcctgctttcact

SEQ ID NO: 41055 - DNA, 25 bp, Artificial
  probe
  misc_feature (1)..(25): SEQ ID NO: 4354; WAN024A36_at; Start 44; Stop 68
atcagtcatcttggtatgctcctgc

SEQ ID NO: 41056 - DNA, 25 bp, Artificial
  probe
  misc_feature (1)..(25): SEQ ID NO: 4354; WAN024A36_at; Start 50; Stop 74
catcttggtatgctcctgctttcac

SEQ ID NO: 41057 - DNA, 25 bp, Artificial
  probe
  misc_feature (1)..(25): SEQ ID NO: 4354; WAN024A36_at; Start 9; Stop 33
tagtattattttgcatacctaaaat

SEQ ID NO: 41058 - DNA, 25 bp, Artificial
  probe
  misc_feature (1)..(25): SEQ ID NO: 4354; WAN024A36_at; Start 29; Stop 53
aaaatacagtaaaaaatcagtcatc

SEQ ID NO: 41059 - DNA, 25 bp, Artificial
  probe
  misc_feature (1)..(25): SEQ ID NO: 4354; WAN024A36_at; Start 28; Stop 52
taaaatacagtaaaaaatcagtcat

SEQ ID NO: 41060 - DNA, 25 bp, Artificial
  probe
  misc_feature (1)..(25): SEQ ID NO: 4354; WAN024A36_at; Start 5; Stop 29
catttagtattattttgcataccta

SEQ ID NO: 41061 - DNA, 25 bp, Artificial
  probe
  misc_feature (1)..(25): SEQ ID NO: 4354; WAN024A36_at; Start 15; Stop 39
tattttgcatacctaaaatacagta

SEQ ID NO: 41062 - DNA, 25 bp, Artificial
  probe
  misc_feature (1)..(25): SEQ ID NO: 4354; WAN024A36_at; Start 52; Stop 76
tcttggtatgctcctgctttcacta

SEQ ID NO: 41063 - DNA, 25 bp, Artificial
  probe
  misc_feature (1)..(25): SEQ ID NO: 4354; WAN024A36_at; Start 16; Stop 40
attttgcatacctaaaatacagtaa

SEQ ID NO: 41064 - DNA, 25 bp, Artificial
  probe
  misc_feature (1)..(25): SEQ ID NO: 4354; WAN024A36_at; Start 17; Stop 41
ttttgcatacctaaaatacagtaaa

SEQ ID NO: 41065 - DNA, 25 bp, Artificial
  probe
  misc_feature (1)..(25): SEQ ID NO: 4354; WAN024A36_at; Start 45; Stop 69
tcagtcatcttggtatgctcctgct

SEQ ID NO: 41066 - DNA, 25 bp, Artificial
  probe
  misc_feature (1)..(25): SEQ ID NO: 4354; WAN024A36_at; Start 46; Stop 70
cagtcatcttggtatgctcctgctt

SEQ ID NO: 41067 - DNA, 25 bp, Artificial
  probe
  misc_feature (1)..(25): SEQ ID NO: 4354; WAN024A36_at; Start 48; Stop 72
gtcatcttggtatgctcctgctttc

SEQ ID NO: 41068 - DNA, 25 bp, Artificial
  probe
  misc_feature (1)..(25): SEQ ID NO: 4354; WAN024A36_at; Start 41; Stop 65
aaaatcagtcatcttggtatgctcc

SEQ ID NO: 41069 - DNA, 25 bp, Artificial
  probe
  misc_feature (1)..(25): SEQ ID NO: 4354; WAN024A36_at; Start 13; Stop 37
attattttgcatacctaaaatacag

SEQ ID NO: 41070 - DNA, 25 bp, Artificial
  probe
  misc_feature (1)..(25): SEQ ID NO: 4354; WAN024A36_at; Start 32; Stop 56
atacagtaaaaaatcagtcatcttg

SEQ ID NO: 41071 - DNA, 25 bp, Artificial
  probe
  misc_feature (1)..(25): SEQ ID NO: 4354; WAN024A36_at; Start 37; Stop 61
gtaaaaaatcagtcatcttggtatg

SEQ ID NO: 41072 - DNA, 25 bp, Artificial
  probe
  misc_feature (1)..(25): SEQ ID NO: 4354; WAN024A36_at; Start 49; Stop 73
tcatcttggtatgctcctgctttca

SEQ ID NO: 41073 - DNA, 25 bp, Artificial
  probe
  misc_feature (1)..(25): SEQ ID NO: 4354; WAN024A36_at; Start 35; Stop 59
cagtaaaaaatcagtcatcttggta

SEQ ID NO: 41074 - DNA, 25 bp, Artificial
  probe
  misc_feature (1)..(25): SEQ ID NO: 4354; WAN024A36_at; Start 40; Stop 64
aaaaatcagtcatcttggtatgctc

SEQ ID NO: 41075 - DNA, 25 bp, Artificial
  probe
  misc_feature (1)..(25): SEQ ID NO: 4354; WAN024A36_at; Start 47; Stop 71
agtcatcttggtatgctcctgcttt

SEQ ID NO: 41076 - DNA, 25 bp, Artificial
  probe
  misc_feature (1)..(25): SEQ ID NO: 4354; WAN024A36_at; Start 36; Stop 60
agtaaaaaatcagtcatcttggtat

SEQ ID NO: 41077 - DNA, 25 bp, Artificial
  probe
  misc_feature (1)..(25): SEQ ID NO: 4354; WAN024A36_at; Start 27; Stop 51
ctaaaatacagtaaaaaatcagtca

SEQ ID NO: 41078 - DNA, 25 bp, Artificial
  probe
  misc_feature (1)..(25): SEQ ID NO: 4526; WAN024A37_at; Start 50; Stop 74
ggtatgcaaaataatactaaatgaa

SEQ ID NO: 41079 - DNA, 25 bp, Artificial
  probe
  misc_feature (1)..(25): SEQ ID NO: 4526; WAN024A37_at; Start 14; Stop 38
agcataccaagatgactgatttttt

SEQ ID NO: 41080 - DNA, 25 bp, Artificial
  probe
  misc_feature (1)..(25): SEQ ID NO: 4526; WAN024A37_at; Start 34; Stop 58
tttttactgtattttaggtatgcaa

SEQ ID NO: 41081 - DNA, 25 bp, Artificial
  probe
  misc_feature (1)..(25): SEQ ID NO: 4526; WAN024A37_at; Start 16; Stop 40
cataccaagatgactgattttttac

SEQ ID NO: 41082 - DNA, 25 bp, Artificial
  probe
  misc_feature (1)..(25): SEQ ID NO: 4526; WAN024A37_at; Start 2; Stop 26
agtgaaagcaggagcataccaagat

SEQ ID NO: 41083 - DNA, 25 bp, Artificial
  probe
  misc_feature (1)..(25): SEQ ID NO: 4526; WAN024A37_at; Start 11; Stop 35
aggagcataccaagatgactgattt

SEQ ID NO: 41084 - DNA, 25 bp, Artificial
  probe
  misc_feature (1)..(25): SEQ ID NO: 4526; WAN024A37_at; Start 24; Stop 48
gatgactgattttttactgtatttt

SEQ ID NO: 41085 - DNA, 25 bp, Artificial
  probe
  misc_feature (1)..(25): SEQ ID NO: 4526; WAN024A37_at; Start 45; Stop 69
ttttaggtatgcaaaataatactaa

SEQ ID NO: 41086 - DNA, 25 bp, Artificial
  probe
  misc_feature (1)..(25): SEQ ID NO: 4526; WAN024A37_at; Start 19; Stop 43
accaagatgactgattttttactgt

SEQ ID NO: 41087 - DNA, 25 bp, Artificial
  probe
  misc_feature (1)..(25): SEQ ID NO: 4526; WAN024A37_at; Start 7; Stop 31
aagcaggagcataccaagatgactg

SEQ ID NO: 41088 - DNA, 25 bp, Artificial
  probe
  misc_feature (1)..(25): SEQ ID NO: 4526; WAN024A37_at; Start 5; Stop 29
gaaagcaggagcataccaagatgac

SEQ ID NO: 41089 - DNA, 25 bp, Artificial
  probe
  misc_feature (1)..(25): SEQ ID NO: 4526; WAN024A37_at; Start 21; Stop 45
caagatgactgattttttactgtat

SEQ ID NO: 41090 - DNA, 25 bp, Artificial
  probe
  misc_feature (1)..(25): SEQ ID NO: 4526; WAN024A37_at; Start 33; Stop 57
ttttttactgtattttaggtatgca

SEQ ID NO: 41091 - DNA, 25 bp, Artificial
  probe
  misc_feature (1)..(25): SEQ ID NO: 4526; WAN024A37_at; Start 8; Stop 32
agcaggagcataccaagatgactga

SEQ ID NO: 41092 - DNA, 25 bp, Artificial
  probe
  misc_feature (1)..(25): SEQ ID NO: 4526; WAN024A37_at; Start 26; Stop 50
tgactgattttttactgtattttag

SEQ ID NO: 41093 - DNA, 25 bp, Artificial
  probe
  misc_feature (1)..(25): SEQ ID NO: 4526; WAN024A37_at; Start 18; Stop 42
taccaagatgactgattttttactg

SEQ ID NO: 41094 - DNA, 25 bp, Artificial
  probe
  misc_feature (1)..(25): SEQ ID NO: 4526; WAN024A37_at; Start 22; Stop 46
aagatgactgattttttactgtatt

SEQ ID NO: 41095 - DNA, 25 bp, Artificial
  probe
  misc_feature (1)..(25): SEQ ID NO: 4526; WAN024A37_at; Start 1; Stop 25
tagtgaaagcaggagcataccaaga

SEQ ID NO: 41096 - DNA, 25 bp, Artificial
  probe
  misc_feature (1)..(25): SEQ ID NO: 4526; WAN024A37_at; Start 9; Stop 33
gcaggagcataccaagatgactgat

SEQ ID NO: 41097 - DNA, 25 bp, Artificial
  probe
  misc_feature (1)..(25): SEQ ID NO: 4526; WAN024A37_at; Start 6; Stop 30
aaagcaggagcataccaagatgact

SEQ ID NO: 41098 - DNA, 25 bp, Artificial
  probe
  misc_feature (1)..(25): SEQ ID NO: 4526; WAN024A37_at; Start 12; Stop 36
ggagcataccaagatgactgatttt

SEQ ID NO: 41099 - DNA, 25 bp, Artificial
  probe
  misc_feature (1)..(25): SEQ ID NO: 4526; WAN024A37_at; Start 48; Stop 72
taggtatgcaaaataatactaaatg

SEQ ID NO: 41100 - DNA, 25 bp, Artificial
  probe
  misc_feature (1)..(25): SEQ ID NO: 4526; WAN024A37_at; Start 36; Stop 60
tttactgtattttaggtatgcaaaa

SEQ ID NO: 41101 - DNA, 25 bp, Artificial
  probe
  misc_feature (1)..(25): SEQ ID NO: 4526; WAN024A37_at; Start 37; Stop 61
ttactgtattttaggtatgcaaaat

SEQ ID NO: 41102 - DNA, 25 bp, Artificial
  probe
  misc_feature (1)..(25): SEQ ID NO: 4526; WAN024A37_at; Start 52; Stop 76
tatgcaaaataatactaaatgaaac

SEQ ID NO: 41103 - DNA, 25 bp, Artificial
  probe
  misc_feature (1)..(25): SEQ ID NO: 4526; WAN024A37_at; Start 38; Stop 62
tactgtattttaggtatgcaaaata

SEQ ID NO: 41104 - DNA, 25 bp, Artificial
  probe
  misc_feature (1)..(25): SEQ ID NO: 4526; WAN024A37_at; Start 10; Stop 34
caggagcataccaagatgactgatt

SEQ ID NO: 41105 - DNA, 25 bp, Artificial
  probe
  misc_feature (1)..(25): SEQ ID NO: 4526; WAN024A37_at; Start 43; Stop 67
tattttaggtatgcaaaataatact

SEQ ID NO: 41106 - DNA, 25 bp, Artificial
  probe
  misc_feature (1)..(25): SEQ ID NO: 4526; WAN024A37_at; Start 15; Stop 39
gcataccaagatgactgatttttta

SEQ ID NO: 41107 - DNA, 25 bp, Artificial
  probe
  misc_feature (1)..(25): SEQ ID NO: 4526; WAN024A37_at; Start 39; Stop 63
actgtattttaggtatgcaaaataa

SEQ ID NO: 41108 - DNA, 25 bp, Artificial
  probe
  misc_feature (1)..(25): SEQ ID NO: 4526; WAN024A37_at; Start 3; Stop 27
gtgaaagcaggagcataccaagatg

SEQ ID NO: 41109 - DNA, 25 bp, Artificial
  probe
  misc_feature (1)..(25): SEQ ID NO: 4526; WAN024A37_at; Start 13; Stop 37
gagcataccaagatgactgattttt

SEQ ID NO: 41110 - DNA, 25 bp, Artificial
  probe
  misc_feature (1)..(25): SEQ ID NO: 4526; WAN024A37_at; Start 4; Stop 28
tgaaagcaggagcataccaagatga

SEQ ID NO: 41111 - DNA, 25 bp, Artificial
  probe
  misc_feature (1)..(25): SEQ ID NO: 4526; WAN024A37_at; Start 35; Stop 59
ttttactgtattttaggtatgcaaa

SEQ ID NO: 41112 - DNA, 25 bp, Artificial
  probe
  misc_feature (1)..(25): SEQ ID NO: 402; WAN024A38_at; Start 97; Stop 121
ctaaaatactgattttcggctgaag

SEQ ID NO: 41113 - DNA, 25 bp, Artificial
  probe
  misc_feature (1)..(25): SEQ ID NO: 402; WAN024A38_at; Start 161; Stop 185
gctgatagcttgtgttggttttgga

SEQ ID NO: 41114 - DNA, 25 bp, Artificial
  probe
  misc_feature (1)..(25): SEQ ID NO: 402; WAN024A38_at; Start 107; Stop 131
gattttcggctgaagataatactgg

SEQ ID NO: 41115 - DNA, 25 bp, Artificial
  probe
  misc_feature (1)..(25): SEQ ID NO: 402; WAN024A38_at; Start 123; Stop 147
taatactggagtgcaaattaatggg

SEQ ID NO: 41116 - DNA, 25 bp, Artificial
  probe
  misc_feature (1)..(25): SEQ ID NO: 402; WAN024A38_at; Start 94; Stop 118
aacctaaaatactgattttcggctg

SEQ ID NO: 41117 - DNA, 25 bp, Artificial
  probe
  misc_feature (1)..(25): SEQ ID NO: 402; WAN024A38_at; Start 150; Stop 174
tataataaatagctgatagcttgtg

SEQ ID NO: 41118 - DNA, 25 bp, Artificial
  probe
  misc_feature (1)..(25): SEQ ID NO: 402; WAN024A38_at; Start 164; Stop 188
gatagcttgtgttggttttggattt

SEQ ID NO: 41119 - DNA, 25 bp, Artificial
  probe
  misc_feature (1)..(25): SEQ ID NO: 402; WAN024A38_at; Start 96; Stop 120
cctaaaatactgattttcggctgaa

SEQ ID NO: 41120 - DNA, 25 bp, Artificial
  probe
  misc_feature (1)..(25): SEQ ID NO: 402; WAN024A38_at; Start 100; Stop 124
aaatactgattttcggctgaagata

SEQ ID NO: 41121 - DNA, 25 bp, Artificial
  probe
  misc_feature (1)..(25): SEQ ID NO: 402; WAN024A38_at; Start 127; Stop 151
actggagtgcaaattaatggggtta

SEQ ID NO: 41122 - DNA, 25 bp, Artificial
  probe
  misc_feature (1)..(25): SEQ ID NO: 402; WAN024A38_at; Start 146; Stop 170
gggttataataaatagctgatagct

SEQ ID NO: 41123 - DNA, 25 bp, Artificial
  probe
  misc_feature (1)..(25): SEQ ID NO: 402; WAN024A38_at; Start 118; Stop 142
gaagataatactggagtgcaaatta

SEQ ID NO: 41124 - DNA, 25 bp, Artificial
  probe
  misc_feature (1)..(25): SEQ ID NO: 402; WAN024A38_at; Start 108; Stop 132
attttcggctgaagataatactgga

SEQ ID NO: 41125 - DNA, 25 bp, Artificial
  probe
  misc_feature (1)..(25): SEQ ID NO: 402; WAN024A38_at; Start 159; Stop 183
tagctgatagcttgtgttggttttg

SEQ ID NO: 41126 - DNA, 25 bp, Artificial
  probe
  misc_feature (1)..(25): SEQ ID NO: 402; WAN024A38_at; Start 84; Stop 108
tatttcaaacaacctaaaatactga

SEQ ID NO: 41127 - DNA, 25 bp, Artificial
  probe
  misc_feature (1)..(25): SEQ ID NO: 402; WAN024A38_at; Start 121; Stop 145
gataatactggagtgcaaattaatg

SEQ ID NO: 41128 - DNA, 25 bp, Artificial
  probe
  misc_feature (1)..(25): SEQ ID NO: 402; WAN024A38_at; Start 109; Stop 133
ttttcggctgaagataatactggag

SEQ ID NO: 41129 - DNA, 25 bp, Artificial
  probe
  misc_feature (1)..(25): SEQ ID NO: 402; WAN024A38_at; Start 99; Stop 123
aaaatactgattttcggctgaagat

SEQ ID NO: 41130 - DNA, 25 bp, Artificial
  probe
  misc_feature (1)..(25): SEQ ID NO: 402; WAN024A38_at; Start 105; Stop 129
ctgattttcggctgaagataatact

SEQ ID NO: 41131 - DNA, 25 bp, Artificial
  probe
  misc_feature (1)..(25): SEQ ID NO: 402; WAN024A38_at; Start 98; Stop 122
taaaatactgattttcggctgaaga

SEQ ID NO: 41132 - DNA, 25 bp, Artificial
  probe
  misc_feature (1)..(25): SEQ ID NO: 402; WAN024A38_at; Start 93; Stop 117
caacctaaaatactgattttcggct

SEQ ID NO: 41133 - DNA, 25 bp, Artificial
  probe
  misc_feature (1)..(25): SEQ ID NO: 402; WAN024A38_at; Start 114; Stop 138
ggctgaagataatactggagtgcaa

SEQ ID NO: 41134 - DNA, 25 bp, Artificial
  probe
  misc_feature (1)..(25): SEQ ID NO: 402; WAN024A38_at; Start 111; Stop 135
ttcggctgaagataatactggagtg

SEQ ID NO: 41135 - DNA, 25 bp, Artificial
  probe
  misc_feature (1)..(25): SEQ ID NO: 402; WAN024A38_at; Start 162; Stop 186
ctgatagcttgtgttggttttggat

SEQ ID NO: 41136 - DNA, 25 bp, Artificial
  probe
  misc_feature (1)..(25): SEQ ID NO: 402; WAN024A38_at; Start 115; Stop 139
gctgaagataatactggagtgcaaa

SEQ ID NO: 41137 - DNA, 25 bp, Artificial
  probe
  misc_feature (1)..(25): SEQ ID NO: 402; WAN024A38_at; Start 112; Stop 136
tcggctgaagataatactggagtgc

SEQ ID NO: 41138 - DNA, 25 bp, Artificial
  probe
  misc_feature (1)..(25): SEQ ID NO: 402; WAN024A38_at; Start 110; Stop 134
tttcggctgaagataatactggagt

SEQ ID NO: 41139 - DNA, 25 bp, Artificial
  probe
  misc_feature (1)..(25): SEQ ID NO: 402; WAN024A38_at; Start 113; Stop 137
cggctgaagataatactggagtgca

SEQ ID NO: 41140 - DNA, 25 bp, Artificial
  probe
  misc_feature (1)..(25): SEQ ID NO: 402; WAN024A38_at; Start 104; Stop 128
actgattttcggctgaagataatac

SEQ ID NO: 41141 - DNA, 25 bp, Artificial
  probe
  misc_feature (1)..(25): SEQ ID NO: 402; WAN024A38_at; Start 116; Stop 140
ctgaagataatactggagtgcaaat

SEQ ID NO: 41142 - DNA, 25 bp, Artificial
  probe
  misc_feature (1)..(25): SEQ ID NO: 402; WAN024A38_at; Start 147; Stop 171
ggttataataaatagctgatagctt

SEQ ID NO: 41143 - DNA, 25 bp, Artificial
  probe
  misc_feature (1)..(25): SEQ ID NO: 402; WAN024A38_at; Start 101; Stop 125
aatactgattttcggctgaagataa

SEQ ID NO: 41144 - DNA, 25 bp, Artificial
  probe
  misc_feature (1)..(25): SEQ ID NO: 402; WAN024A38_at; Start 155; Stop 179
taaatagctgatagcttgtgttggt

SEQ ID NO: 41145 - DNA, 25 bp, Artificial
  probe
  misc_feature (1)..(25): SEQ ID NO: 402; WAN024A38_at; Start 117; Stop 141
tgaagataatactggagtgcaaatt

SEQ ID NO: 41146 - DNA, 25 bp, Artificial
  probe
  misc_feature (1)..(25): SEQ ID NO: 3278; WAN024A39_at; Start 64; Stop 88
gcactccagtattatcttcagccga

SEQ ID NO: 41147 - DNA, 25 bp, Artificial
  probe
  misc_feature (1)..(25): SEQ ID NO: 3278; WAN024A39_at; Start 11; Stop 35
aaaatccaaaaccaacacaagctat

SEQ ID NO: 41148 - DNA, 25 bp, Artificial
  probe
  misc_feature (1)..(25): SEQ ID NO: 3278; WAN024A39_at; Start 72; Stop 96
gtattatcttcagccgaaaatcagt

SEQ ID NO: 41149 - DNA, 25 bp, Artificial
  probe
  misc_feature (1)..(25): SEQ ID NO: 3278; WAN024A39_at; Start 65; Stop 89
cactccagtattatcttcagccgaa

SEQ ID NO: 41150 - DNA, 25 bp, Artificial
  probe
  misc_feature (1)..(25): SEQ ID NO: 3278; WAN024A39_at; Start 16; Stop 40
ccaaaaccaacacaagctatcagct

SEQ ID NO: 41151 - DNA, 25 bp, Artificial
  probe
  misc_feature (1)..(25): SEQ ID NO: 3278; WAN024A39_at; Start 31; Stop 55
gctatcagctatttattataacccc

SEQ ID NO: 41152 - DNA, 25 bp, Artificial
  probe
  misc_feature (1)..(25): SEQ ID NO: 3278; WAN024A39_at; Start 33; Stop 57
tatcagctatttattataaccccat

SEQ ID NO: 41153 - DNA, 25 bp, Artificial
  probe
  misc_feature (1)..(25): SEQ ID NO: 3278; WAN024A39_at; Start 80; Stop 104
ttcagccgaaaatcagtattttagg

SEQ ID NO: 41154 - DNA, 25 bp, Artificial
  probe
  misc_feature (1)..(25): SEQ ID NO: 3278; WAN024A39_at; Start 55; Stop 79
cattaatttgcactccagtattatc

SEQ ID NO: 41155 - DNA, 25 bp, Artificial
  probe
  misc_feature (1)..(25): SEQ ID NO: 3278; WAN024A39_at; Start 44; Stop 68
tattataaccccattaatttgcact

SEQ ID NO: 41156 - DNA, 25 bp, Artificial
  probe
  misc_feature (1)..(25): SEQ ID NO: 3278; WAN024A39_at; Start 52; Stop 76
ccccattaatttgcactccagtatt

SEQ ID NO: 41157 - DNA, 25 bp, Artificial
  probe
  misc_feature (1)..(25): SEQ ID NO: 3278; WAN024A39_at; Start 50; Stop 74
aaccccattaatttgcactccagta

SEQ ID NO: 41158 - DNA, 25 bp, Artificial
  probe
  misc_feature (1)..(25): SEQ ID NO: 3278; WAN024A39_at; Start 82; Stop 106
cagccgaaaatcagtattttaggtt

SEQ ID NO: 41159 - DNA, 25 bp, Artificial
  probe
  misc_feature (1)..(25): SEQ ID NO: 3278; WAN024A39_at; Start 69; Stop 93
ccagtattatcttcagccgaaaatc

SEQ ID NO: 41160 - DNA, 25 bp, Artificial
  probe
  misc_feature (1)..(25): SEQ ID NO: 3278; WAN024A39_at; Start 92; Stop 116
tcagtattttaggttgtttgaaata

SEQ ID NO: 41161 - DNA, 25 bp, Artificial
  probe
  misc_feature (1)..(25): SEQ ID NO: 3278; WAN024A39_at; Start 23; Stop 47
caacacaagctatcagctatttatt

SEQ ID NO: 41162 - DNA, 25 bp, Artificial
  probe
  misc_feature (1)..(25): SEQ ID NO: 3278; WAN024A39_at; Start 47; Stop 71
tataaccccattaatttgcactcca

SEQ ID NO: 41163 - DNA, 25 bp, Artificial
  probe
  misc_feature (1)..(25): SEQ ID NO: 3278; WAN024A39_at; Start 76; Stop 100
tatcttcagccgaaaatcagtattt

SEQ ID NO: 41164 - DNA, 25 bp, Artificial
  probe
  misc_feature (1)..(25): SEQ ID NO: 3278; WAN024A39_at; Start 71; Stop 95
agtattatcttcagccgaaaatcag

SEQ ID NO: 41165 - DNA, 25 bp, Artificial
  probe
  misc_feature (1)..(25): SEQ ID NO: 3278; WAN024A39_at; Start 68; Stop 92
tccagtattatcttcagccgaaaat

SEQ ID NO: 41166 - DNA, 25 bp, Artificial
  probe
  misc_feature (1)..(25): SEQ ID NO: 3278; WAN024A39_at; Start 13; Stop 37
aatccaaaaccaacacaagctatca

SEQ ID NO: 41167 - DNA, 25 bp, Artificial
  probe
  misc_feature (1)..(25): SEQ ID NO: 3278; WAN024A39_at; Start 58; Stop 82
taatttgcactccagtattatcttc

SEQ ID NO: 41168 - DNA, 25 bp, Artificial
  probe
  misc_feature (1)..(25): SEQ ID NO: 3278; WAN024A39_at; Start 17; Stop 41
caaaaccaacacaagctatcagcta

SEQ ID NO: 41169 - DNA, 25 bp, Artificial
  probe
  misc_feature (1)..(25): SEQ ID NO: 3278; WAN024A39_at; Start 18; Stop 42
aaaaccaacacaagctatcagctat

SEQ ID NO: 41170 - DNA, 25 bp, Artificial
  probe
  misc_feature (1)..(25): SEQ ID NO: 3278; WAN024A39_at; Start 63; Stop 87
tgcactccagtattatcttcagccg

SEQ ID NO: 41171 - DNA, 25 bp, Artificial
  probe
  misc_feature (1)..(25): SEQ ID NO: 3278; WAN024A39_at; Start 67; Stop 91
ctccagtattatcttcagccgaaaa

SEQ ID NO: 41172 - DNA, 25 bp, Artificial
  probe
  misc_feature (1)..(25): SEQ ID NO: 3278; WAN024A39_at; Start 78; Stop 102
tcttcagccgaaaatcagtatttta

SEQ ID NO: 41173 - DNA, 25 bp, Artificial
  probe
  misc_feature (1)..(25): SEQ ID NO: 3278; WAN024A39_at; Start 66; Stop 90
actccagtattatcttcagccgaaa

SEQ ID NO: 41174 - DNA, 25 bp, Artificial
  probe
  misc_feature (1)..(25): SEQ ID NO: 3278; WAN024A39_at; Start 28; Stop 52
caagctatcagctatttattataac

SEQ ID NO: 41175 - DNA, 25 bp, Artificial
  probe
  misc_feature (1)..(25): SEQ ID NO: 3278; WAN024A39_at; Start 20; Stop 44
aaccaacacaagctatcagctattt

SEQ ID NO: 41176 - DNA, 25 bp, Artificial
  probe
  misc_feature (1)..(25): SEQ ID NO: 3278; WAN024A39_at; Start 36; Stop 60
cagctatttattataaccccattaa

SEQ ID NO: 41177 - DNA, 25 bp, Artificial
  probe
  misc_feature (1)..(25): SEQ ID NO: 3278; WAN024A39_at; Start 15; Stop 39
tccaaaaccaacacaagctatcagc

SEQ ID NO: 41178 - DNA, 25 bp, Artificial
  probe
  misc_feature (1)..(25): SEQ ID NO: 3278; WAN024A39_at; Start 49; Stop 73
taaccccattaatttgcactccagt

SEQ ID NO: 41179 - DNA, 25 bp, Artificial
  probe
  misc_feature (1)..(25): SEQ ID NO: 3278; WAN024A39_at; Start 61; Stop 85
tttgcactccagtattatcttcagc

SEQ ID NO: 41180 - DNA, 25 bp, Artificial
  probe
  misc_feature (1)..(25): SEQ ID NO: 3501; WAN024A3A_at; Start 1; Stop 25
cttgttactcttttctcaatccagc

SEQ ID NO: 41181 - DNA, 25 bp, Artificial
  probe
  misc_feature (1)..(25): SEQ ID NO: 3501; WAN024A3A_at; Start 25; Stop 49
ctaaaatgtgatataatagtactaa

SEQ ID NO: 41182 - DNA, 25 bp, Artificial
  probe
  misc_feature (1)..(25): SEQ ID NO: 3501; WAN024A3A_at; Start 16; Stop 40
tcaatccagctaaaatgtgatataa

SEQ ID NO: 41183 - DNA, 25 bp, Artificial
  probe
  misc_feature (1)..(25): SEQ ID NO: 3501; WAN024A3A_at; Start 14; Stop 38
tctcaatccagctaaaatgtgatat

SEQ ID NO: 41184 - DNA, 25 bp, Artificial
  probe
  misc_feature (1)..(25): SEQ ID NO: 3501; WAN024A3A_at; Start 24; Stop 48
gctaaaatgtgatataatagtacta

SEQ ID NO: 41185 - DNA, 25 bp, Artificial
  probe
  misc_feature (1)..(25): SEQ ID NO: 3501; WAN024A3A_at; Start 17; Stop 41
caatccagctaaaatgtgatataat

SEQ ID NO: 41186 - DNA, 25 bp, Artificial
  probe
  misc_feature (1)..(25): SEQ ID NO: 3501; WAN024A3A_at; Start 13; Stop 37
ttctcaatccagctaaaatgtgata

SEQ ID NO: 41187 - DNA, 25 bp, Artificial
  probe
  misc_feature (1)..(25): SEQ ID NO: 3501; WAN024A3A_at; Start 29; Stop 53
aatgtgatataatagtactaattta

SEQ ID NO: 41188 - DNA, 25 bp, Artificial
  probe
  misc_feature (1)..(25): SEQ ID NO: 3501; WAN024A3A_at; Start 8; Stop 32
ctcttttctcaatccagctaaaatg

SEQ ID NO: 41189 - DNA, 25 bp, Artificial
  probe
  misc_feature (1)..(25): SEQ ID NO: 3501; WAN024A3A_at; Start 19; Stop 43
atccagctaaaatgtgatataatag

SEQ ID NO: 41190 - DNA, 25 bp, Artificial
  probe
  misc_feature (1)..(25): SEQ ID NO: 3501; WAN024A3A_at; Start 6; Stop 30
tactcttttctcaatccagctaaaa

SEQ ID NO: 41191 - DNA, 25 bp, Artificial
  probe
  misc_feature (1)..(25): SEQ ID NO: 3501; WAN024A3A_at; Start 7; Stop 31
actcttttctcaatccagctaaaat

SEQ ID NO: 41192 - DNA, 25 bp, Artificial
  probe
  misc_feature (1)..(25): SEQ ID NO: 3501; WAN024A3A_at; Start 10; Stop 34
cttttctcaatccagctaaaatgtg

SEQ ID NO: 41193 - DNA, 25 bp, Artificial
  probe
  misc_feature (1)..(25): SEQ ID NO: 3501; WAN024A3A_at; Start 2; Stop 26
ttgttactcttttctcaatccagct

SEQ ID NO: 41194 - DNA, 25 bp, Artificial
  probe
  misc_feature (1)..(25): SEQ ID NO: 3501; WAN024A3A_at; Start 4; Stop 28
gttactcttttctcaatccagctaa

SEQ ID NO: 41195 - DNA, 25 bp, Artificial
  probe
  misc_feature (1)..(25): SEQ ID NO: 3501; WAN024A3A_at; Start 27; Stop 51
aaaatgtgatataatagtactaatt

SEQ ID NO: 41196 - DNA, 25 bp, Artificial
  probe
  misc_feature (1)..(25): SEQ ID NO: 3501; WAN024A3A_at; Start 26; Stop 50
taaaatgtgatataatagtactaat

SEQ ID NO: 41197 - DNA, 25 bp, Artificial
  probe
  misc_feature (1)..(25): SEQ ID NO: 3501; WAN024A3A_at; Start 9; Stop 33
tcttttctcaatccagctaaaatgt

SEQ ID NO: 41198 - DNA, 25 bp, Artificial
  probe
  misc_feature (1)..(25): SEQ ID NO: 3501; WAN024A3A_at; Start 12; Stop 36
tttctcaatccagctaaaatgtgat

SEQ ID NO: 41199 - DNA, 25 bp, Artificial
  probe
  misc_feature (1)..(25): SEQ ID NO: 3501; WAN024A3A_at; Start 11; Stop 35
ttttctcaatccagctaaaatgtga

SEQ ID NO: 41200 - DNA, 25 bp, Artificial
  probe
  misc_feature (1)..(25): SEQ ID NO: 3501; WAN024A3A_at; Start 15; Stop 39
ctcaatccagctaaaatgtgatata

SEQ ID NO: 41201 - DNA, 25 bp, Artificial
  probe
  misc_feature (1)..(25): SEQ ID NO: 3501; WAN024A3A_at; Start 22; Stop 46
cagctaaaatgtgatataatagtac

SEQ ID NO: 41202 - DNA, 25 bp, Artificial
  probe
  misc_feature (1)..(25): SEQ ID NO: 3501; WAN024A3A_at; Start 3; Stop 27
tgttactcttttctcaatccagcta

SEQ ID NO: 41203 - DNA, 25 bp, Artificial
  probe
  misc_feature (1)..(25): SEQ ID NO: 3501; WAN024A3A_at; Start 18; Stop 42
aatccagctaaaatgtgatataata

SEQ ID NO: 41204 - DNA, 25 bp, Artificial
  probe
  misc_feature (1)..(25): SEQ ID NO: 3501; WAN024A3A_at; Start 23; Stop 47
agctaaaatgtgatataatagtact

SEQ ID NO: 41205 - DNA, 25 bp, Artificial
  probe
  misc_feature (1)..(25): SEQ ID NO: 3501; WAN024A3A_at; Start 21; Stop 45
ccagctaaaatgtgatataatagta

SEQ ID NO: 41206 - DNA, 25 bp, Artificial
  probe
  misc_feature (1)..(25): SEQ ID NO: 3501; WAN024A3A_at; Start 20; Stop 44
tccagctaaaatgtgatataatagt

SEQ ID NO: 41207 - DNA, 25 bp, Artificial
  probe
  misc_feature (1)..(25): SEQ ID NO: 3501; WAN024A3A_at; Start 5; Stop 29
ttactcttttctcaatccagctaaa

SEQ ID NO: 41208 - DNA, 25 bp, Artificial
  probe
  misc_feature (1)..(25): SEQ ID NO: 4422; WAN024A3B_at; Start 19; Stop 43
tcacattttagctggattgagaaaa

SEQ ID NO: 41209 - DNA, 25 bp, Artificial
  probe
  misc_feature (1)..(25): SEQ ID NO: 4422; WAN024A3B_at; Start 10; Stop 34
actattatatcacattttagctgga

SEQ ID NO: 41210 - DNA, 25 bp, Artificial
  probe
  misc_feature (1)..(25): SEQ ID NO: 4422; WAN024A3B_at; Start 20; Stop 44
cacattttagctggattgagaaaag

SEQ ID NO: 41211 - DNA, 25 bp, Artificial
  probe
  misc_feature (1)..(25): SEQ ID NO: 4422; WAN024A3B_at; Start 17; Stop 41
tatcacattttagctggattgagaa

SEQ ID NO: 41212 - DNA, 25 bp, Artificial
  probe
  misc_feature (1)..(25): SEQ ID NO: 4422; WAN024A3B_at; Start 14; Stop 38
ttatatcacattttagctggattga

SEQ ID NO: 41213 - DNA, 25 bp, Artificial
  probe
  misc_feature (1)..(25): SEQ ID NO: 4422; WAN024A3B_at; Start 29; Stop 53
gctggattgagaaaagagtaacaag

SEQ ID NO: 41214 - DNA, 25 bp, Artificial
  probe
  misc_feature (1)..(25): SEQ ID NO: 4422; WAN024A3B_at; Start 25; Stop 49
tttagctggattgagaaaagagtaa

SEQ ID NO: 41215 - DNA, 25 bp, Artificial
  probe
  misc_feature (1)..(25): SEQ ID NO: 4422; WAN024A3B_at; Start 2; Stop 26
aaattagtactattatatcacattt

SEQ ID NO: 41216 - DNA, 25 bp, Artificial
  probe
  misc_feature (1)..(25): SEQ ID NO: 4422; WAN024A3B_at; Start 22; Stop 46
cattttagctggattgagaaaagag

SEQ ID NO: 41217 - DNA, 25 bp, Artificial
  probe
  misc_feature (1)..(25): SEQ ID NO: 4422; WAN024A3B_at; Start 7; Stop 31
agtactattatatcacattttagct

SEQ ID NO: 41218 - DNA, 25 bp, Artificial
  probe
  misc_feature (1)..(25): SEQ ID NO: 4422; WAN024A3B_at; Start 8; Stop 32
gtactattatatcacattttagctg

SEQ ID NO: 41219 - DNA, 25 bp, Artificial
  probe
  misc_feature (1)..(25): SEQ ID NO: 4422; WAN024A3B_at; Start 16; Stop 40
atatcacattttagctggattgaga

SEQ ID NO: 41220 - DNA, 25 bp, Artificial
  probe
  misc_feature (1)..(25): SEQ ID NO: 4422; WAN024A3B_at; Start 5; Stop 29
ttagtactattatatcacattttag

SEQ ID NO: 41221 - DNA, 25 bp, Artificial
  probe
  misc_feature (1)..(25): SEQ ID NO: 4422; WAN024A3B_at; Start 24; Stop 48
ttttagctggattgagaaaagagta

SEQ ID NO: 41222 - DNA, 25 bp, Artificial
  probe
  misc_feature (1)..(25): SEQ ID NO: 4422; WAN024A3B_at; Start 21; Stop 45
acattttagctggattgagaaaaga

SEQ ID NO: 41223 - DNA, 25 bp, Artificial
  probe
  misc_feature (1)..(25): SEQ ID NO: 4422; WAN024A3B_at; Start 27; Stop 51
tagctggattgagaaaagagtaaca

SEQ ID NO: 41224 - DNA, 25 bp, Artificial
  probe
  misc_feature (1)..(25): SEQ ID NO: 4422; WAN024A3B_at; Start 11; Stop 35
ctattatatcacattttagctggat

SEQ ID NO: 41225 - DNA, 25 bp, Artificial
  probe
  misc_feature (1)..(25): SEQ ID NO: 4422; WAN024A3B_at; Start 18; Stop 42
atcacattttagctggattgagaaa

SEQ ID NO: 41226 - DNA, 25 bp, Artificial
  probe
  misc_feature (1)..(25): SEQ ID NO: 4422; WAN024A3B_at; Start 4; Stop 28
attagtactattatatcacatttta

SEQ ID NO: 41227 - DNA, 25 bp, Artificial
  probe
  misc_feature (1)..(25): SEQ ID NO: 4422; WAN024A3B_at; Start 15; Stop 39
tatatcacattttagctggattgag

SEQ ID NO: 41228 - DNA, 25 bp, Artificial
  probe
  misc_feature (1)..(25): SEQ ID NO: 4422; WAN024A3B_at; Start 6; Stop 30
tagtactattatatcacattttagc

SEQ ID NO: 41229 - DNA, 25 bp, Artificial
  probe
  misc_feature (1)..(25): SEQ ID NO: 4422; WAN024A3B_at; Start 13; Stop 37
attatatcacattttagctggattg

SEQ ID NO: 41230 - DNA, 25 bp, Artificial
  probe
  misc_feature (1)..(25): SEQ ID NO: 4422; WAN024A3B_at; Start 1; Stop 25
taaattagtactattatatcacatt

SEQ ID NO: 41231 - DNA, 25 bp, Artificial
  probe
  misc_feature (1)..(25): SEQ ID NO: 4422; WAN024A3B_at; Start 9; Stop 33
tactattatatcacattttagctgg

SEQ ID NO: 41232 - DNA, 25 bp, Artificial
  probe
  misc_feature (1)..(25): SEQ ID NO: 4422; WAN024A3B_at; Start 28; Stop 52
agctggattgagaaaagagtaacaa

SEQ ID NO: 41233 - DNA, 25 bp, Artificial
  probe
  misc_feature (1)..(25): SEQ ID NO: 4422; WAN024A3B_at; Start 26; Stop 50
ttagctggattgagaaaagagtaac

SEQ ID NO: 41234 - DNA, 25 bp, Artificial
  probe
  misc_feature (1)..(25): SEQ ID NO: 4422; WAN024A3B_at; Start 3; Stop 27
aattagtactattatatcacatttt

SEQ ID NO: 41235 - DNA, 25 bp, Artificial
  probe
  misc_feature (1)..(25): SEQ ID NO: 4422; WAN024A3B_at; Start 23; Stop 47
attttagctggattgagaaaagagt

SEQ ID NO: 41236 - DNA, 25 bp, Artificial
  probe
  misc_feature (1)..(25): SEQ ID NO: 4422; WAN024A3B_at; Start 12; Stop 36
tattatatcacattttagctggatt

SEQ ID NO: 41237 - DNA, 25 bp, Artificial
  probe
  misc_feature (1)..(25): SEQ ID NO: 4906; WAN024A3C_at; Start 101; Stop 125
cgtcttacccctgcaacgatgacta

SEQ ID NO: 41238 - DNA, 25 bp, Artificial
  probe
  misc_feature (1)..(25): SEQ ID NO: 4906; WAN024A3C_at; Start 84; Stop 108
gaagagttcgatttcatcgtcttac

SEQ ID NO: 41239 - DNA, 25 bp, Artificial
  probe
  misc_feature (1)..(25): SEQ ID NO: 4906; WAN024A3C_at; Start 95; Stop 119
tttcatcgtcttacccctgcaacga

SEQ ID NO: 41240 - DNA, 25 bp, Artificial
  probe
  misc_feature (1)..(25): SEQ ID NO: 4906; WAN024A3C_at; Start 80; Stop 104
actcgaagagttcgatttcatcgtc

SEQ ID NO: 41241 - DNA, 25 bp, Artificial
  probe
  misc_feature (1)..(25): SEQ ID NO: 4906; WAN024A3C_at; Start 85; Stop 109
aagagttcgatttcatcgtcttacc

SEQ ID NO: 41242 - DNA, 25 bp, Artificial
  probe
  misc_feature (1)..(25): SEQ ID NO: 4906; WAN024A3C_at; Start 88; Stop 112
agttcgatttcatcgtcttacccct

SEQ ID NO: 41243 - DNA, 25 bp, Artificial
  probe
  misc_feature (1)..(25): SEQ ID NO: 4906; WAN024A3C_at; Start 86; Stop 110
agagttcgatttcatcgtcttaccc

SEQ ID NO: 41244 - DNA, 25 bp, Artificial
  probe
  misc_feature (1)..(25): SEQ ID NO: 4906; WAN024A3C_at; Start 87; Stop 111
gagttcgatttcatcgtcttacccc

SEQ ID NO: 41245 - DNA, 25 bp, Artificial
  probe
  misc_feature (1)..(25): SEQ ID NO: 4906; WAN024A3C_at; Start 77; Stop 101
gtaactcgaagagttcgatttcatc

SEQ ID NO: 41246 - DNA, 25 bp, Artificial
  probe
  misc_feature (1)..(25): SEQ ID NO: 4906; WAN024A3C_at; Start 78; Stop 102
taactcgaagagttcgatttcatcg

SEQ ID NO: 41247 - DNA, 25 bp, Artificial
  probe
  misc_feature (1)..(25): SEQ ID NO: 4906; WAN024A3C_at; Start 81; Stop 105
ctcgaagagttcgatttcatcgtct

SEQ ID NO: 41248 - DNA, 25 bp, Artificial
  probe
  misc_feature (1)..(25): SEQ ID NO: 4906; WAN024A3C_at; Start 92; Stop 116
cgatttcatcgtcttacccctgcaa

SEQ ID NO: 41249 - DNA, 25 bp, Artificial
  probe
  misc_feature (1)..(25): SEQ ID NO: 4906; WAN024A3C_at; Start 51; Stop 75
agaaataagaaaatgaggcagattc

SEQ ID NO: 41250 - DNA, 25 bp, Artificial
  probe
  misc_feature (1)..(25): SEQ ID NO: 4906; WAN024A3C_at; Start 99; Stop 123
atcgtcttacccctgcaacgatgac

SEQ ID NO: 41251 - DNA, 25 bp, Artificial
  probe
  misc_feature (1)..(25): SEQ ID NO: 4906; WAN024A3C_at; Start 79; Stop 103
aactcgaagagttcgatttcatcgt

SEQ ID NO: 41252 - DNA, 25 bp, Artificial
  probe
  misc_feature (1)..(25): SEQ ID NO: 4906; WAN024A3C_at; Start 82; Stop 106
tcgaagagttcgatttcatcgtctt

SEQ ID NO: 41253 - DNA, 25 bp, Artificial
  probe
  misc_feature (1)..(25): SEQ ID NO: 4906; WAN024A3C_at; Start 90; Stop 114
ttcgatttcatcgtcttacccctgc

SEQ ID NO: 41254 - DNA, 25 bp, Artificial
  probe
  misc_feature (1)..(25): SEQ ID NO: 4906; WAN024A3C_at; Start 97; Stop 121
tcatcgtcttacccctgcaacgatg

SEQ ID NO: 41255 - DNA, 25 bp, Artificial
  probe
  misc_feature (1)..(25): SEQ ID NO: 4906; WAN024A3C_at; Start 83; Stop 107
cgaagagttcgatttcatcgtctta

SEQ ID NO: 41256 - DNA, 25 bp, Artificial
  probe
  misc_feature (1)..(25): SEQ ID NO: 4906; WAN024A3C_at; Start 96; Stop 120
ttcatcgtcttacccctgcaacgat

SEQ ID NO: 41257 - DNA, 25 bp, Artificial
  probe
  misc_feature (1)..(25): SEQ ID NO: 4906; WAN024A3C_at; Start 98; Stop 122
catcgtcttacccctgcaacgatga

SEQ ID NO: 41258 - DNA, 25 bp, Artificial
  probe
  misc_feature (1)..(25): SEQ ID NO: 4906; WAN024A3C_at; Start 89; Stop 113
gttcgatttcatcgtcttacccctg

SEQ ID NO: 41259 - DNA, 25 bp, Artificial
  probe
  misc_feature (1)..(25): SEQ ID NO: 4906; WAN024A3C_at; Start 91; Stop 115
tcgatttcatcgtcttacccctgca

SEQ ID NO: 41260 - DNA, 25 bp, Artificial
  probe
  misc_feature (1)..(25): SEQ ID NO: 4906; WAN024A3C_at; Start 104; Stop 128
cttacccctgcaacgatgactaggt

SEQ ID NO: 41261 - DNA, 25 bp, Artificial
  probe
  misc_feature (1)..(25): SEQ ID NO: 4906; WAN024A3C_at; Start 103; Stop 127
tcttacccctgcaacgatgactagg

SEQ ID NO: 41262 - DNA, 25 bp, Artificial
  probe
  misc_feature (1)..(25): SEQ ID NO: 4906; WAN024A3C_at; Start 93; Stop 117
gatttcatcgtcttacccctgcaac

SEQ ID NO: 41263 - DNA, 25 bp, Artificial
  probe
  misc_feature (1)..(25): SEQ ID NO: 4906; WAN024A3C_at; Start 102; Stop 126
gtcttacccctgcaacgatgactag

SEQ ID NO: 41264 - DNA, 25 bp, Artificial
  probe
  misc_feature (1)..(25): SEQ ID NO: 4906; WAN024A3C_at; Start 50; Stop 74
tagaaataagaaaatgaggcagatt

SEQ ID NO: 41265 - DNA, 25 bp, Artificial
  probe
  misc_feature (1)..(25): SEQ ID NO: 4906; WAN024A3C_at; Start 94; Stop 118
atttcatcgtcttacccctgcaacg

SEQ ID NO: 41266 - DNA, 25 bp, Artificial
  probe
  misc_feature (1)..(25): SEQ ID NO: 4906; WAN024A3C_at; Start 100; Stop 124
tcgtcttacccctgcaacgatgact

SEQ ID NO: 41267 - DNA, 25 bp, Artificial
  probe
  misc_feature (1)..(25): SEQ ID NO: 354; WAN024A3D_at; Start 24; Stop 48
agacgatgaaatcgaactcttcgag

SEQ ID NO: 41268 - DNA, 25 bp, Artificial
  probe
  misc_feature (1)..(25): SEQ ID NO: 354; WAN024A3D_at; Start 21; Stop 45
gtaagacgatgaaatcgaactcttc

SEQ ID NO: 41269 - DNA, 25 bp, Artificial
  probe
  misc_feature (1)..(25): SEQ ID NO: 354; WAN024A3D_at; Start 12; Stop 36
gttgcaggggtaagacgatgaaatc

SEQ ID NO: 41270 - DNA, 25 bp, Artificial
  probe
  misc_feature (1)..(25): SEQ ID NO: 354; WAN024A3D_at; Start 25; Stop 49
gacgatgaaatcgaactcttcgagt

SEQ ID NO: 41271 - DNA, 25 bp, Artificial
  probe
  misc_feature (1)..(25): SEQ ID NO: 354; WAN024A3D_at; Start 26; Stop 50
acgatgaaatcgaactcttcgagtt

SEQ ID NO: 41272 - DNA, 25 bp, Artificial
  probe
  misc_feature (1)..(25): SEQ ID NO: 354; WAN024A3D_at; Start 1; Stop 25
acctagtcatcgttgcaggggtaag

SEQ ID NO: 41273 - DNA, 25 bp, Artificial
  probe
  misc_feature (1)..(25): SEQ ID NO: 354; WAN024A3D_at; Start 13; Stop 37
ttgcaggggtaagacgatgaaatcg

SEQ ID NO: 41274 - DNA, 25 bp, Artificial
  probe
  misc_feature (1)..(25): SEQ ID NO: 354; WAN024A3D_at; Start 6; Stop 30
gtcatcgttgcaggggtaagacgat

SEQ ID NO: 41275 - DNA, 25 bp, Artificial
  probe
  misc_feature (1)..(25): SEQ ID NO: 354; WAN024A3D_at; Start 9; Stop 33
atcgttgcaggggtaagacgatgaa

SEQ ID NO: 41276 - DNA, 25 bp, Artificial
  probe
  misc_feature (1)..(25): SEQ ID NO: 354; WAN024A3D_at; Start 2; Stop 26
cctagtcatcgttgcaggggtaaga

SEQ ID NO: 41277 - DNA, 25 bp, Artificial
  probe
  misc_feature (1)..(25): SEQ ID NO: 354; WAN024A3D_at; Start 62; Stop 86
ctcattttcttatttctaaactcgg

SEQ ID NO: 41278 - DNA, 25 bp, Artificial
  probe
  misc_feature (1)..(25): SEQ ID NO: 354; WAN024A3D_at; Start 59; Stop 83
tgcctcattttcttatttctaaact

SEQ ID NO: 41279 - DNA, 25 bp, Artificial
  probe
  misc_feature (1)..(25): SEQ ID NO: 354; WAN024A3D_at; Start 27; Stop 51
cgatgaaatcgaactcttcgagtta

SEQ ID NO: 41280 - DNA, 25 bp, Artificial
  probe
  misc_feature (1)..(25): SEQ ID NO: 354; WAN024A3D_at; Start 28; Stop 52
gatgaaatcgaactcttcgagttac

SEQ ID NO: 41281 - DNA, 25 bp, Artificial
  probe
  misc_feature (1)..(25): SEQ ID NO: 354; WAN024A3D_at; Start 16; Stop 40
caggggtaagacgatgaaatcgaac

SEQ ID NO: 41282 - DNA, 25 bp, Artificial
  probe
  misc_feature (1)..(25): SEQ ID NO: 354; WAN024A3D_at; Start 5; Stop 29
agtcatcgttgcaggggtaagacga

SEQ ID NO: 41283 - DNA, 25 bp, Artificial
  probe
  misc_feature (1)..(25): SEQ ID NO: 354; WAN024A3D_at; Start 60; Stop 84
gcctcattttcttatttctaaactc

SEQ ID NO: 41284 - DNA, 25 bp, Artificial
  probe
  misc_feature (1)..(25): SEQ ID NO: 354; WAN024A3D_at; Start 11; Stop 35
cgttgcaggggtaagacgatgaaat

SEQ ID NO: 41285 - DNA, 25 bp, Artificial
  probe
  misc_feature (1)..(25): SEQ ID NO: 354; WAN024A3D_at; Start 3; Stop 27
ctagtcatcgttgcaggggtaagac

SEQ ID NO: 41286 - DNA, 25 bp, Artificial
  probe
  misc_feature (1)..(25): SEQ ID NO: 354; WAN024A3D_at; Start 4; Stop 28
tagtcatcgttgcaggggtaagacg

SEQ ID NO: 41287 - DNA, 25 bp, Artificial
  probe
  misc_feature (1)..(25): SEQ ID NO: 354; WAN024A3D_at; Start 55; Stop 79
aatctgcctcattttcttatttcta

SEQ ID NO: 41288 - DNA, 25 bp, Artificial
  probe
  misc_feature (1)..(25): SEQ ID NO: 354; WAN024A3D_at; Start 56; Stop 80
atctgcctcattttcttatttctaa

SEQ ID NO: 41289 - DNA, 25 bp, Artificial
  probe
  misc_feature (1)..(25): SEQ ID NO: 354; WAN024A3D_at; Start 54; Stop 78
gaatctgcctcattttcttatttct

SEQ ID NO: 41290 - DNA, 25 bp, Artificial
  probe
  misc_feature (1)..(25): SEQ ID NO: 354; WAN024A3D_at; Start 10; Stop 34
tcgttgcaggggtaagacgatgaaa

SEQ ID NO: 41291 - DNA, 25 bp, Artificial
  probe
  misc_feature (1)..(25): SEQ ID NO: 354; WAN024A3D_at; Start 20; Stop 44
ggtaagacgatgaaatcgaactctt

SEQ ID NO: 41292 - DNA, 25 bp, Artificial
  probe
  misc_feature (1)..(25): SEQ ID NO: 354; WAN024A3D_at; Start 57; Stop 81
tctgcctcattttcttatttctaaa

SEQ ID NO: 41293 - DNA, 25 bp, Artificial
  probe
  misc_feature (1)..(25): SEQ ID NO: 354; WAN024A3D_at; Start 8; Stop 32
catcgttgcaggggtaagacgatga

SEQ ID NO: 41294 - DNA, 25 bp, Artificial
  probe
  misc_feature (1)..(25): SEQ ID NO: 354; WAN024A3D_at; Start 58; Stop 82
ctgcctcattttcttatttctaaac

SEQ ID NO: 41295 - DNA, 25 bp, Artificial
  probe
  misc_feature (1)..(25): SEQ ID NO: 354; WAN024A3D_at; Start 14; Stop 38
tgcaggggtaagacgatgaaatcga

SEQ ID NO: 41296 - DNA, 25 bp, Artificial
  probe
  misc_feature (1)..(25): SEQ ID NO: 354; WAN024A3D_at; Start 22; Stop 46
taagacgatgaaatcgaactcttcg

SEQ ID NO: 41297 - DNA, 25 bp, Artificial
  probe
  misc_feature (1)..(25): SEQ ID NO: 354; WAN024A3D_at; Start 19; Stop 43
gggtaagacgatgaaatcgaactct

SEQ ID NO: 41298 - DNA, 25 bp, Artificial
  probe
  misc_feature (1)..(25): SEQ ID NO: 354; WAN024A3D_at; Start 23; Stop 47
aagacgatgaaatcgaactcttcga

SEQ ID NO: 41299 - DNA, 25 bp, Artificial
  probe
  misc_feature (1)..(25): SEQ ID NO: 354; WAN024A3D_at; Start 61; Stop 85
cctcattttcttatttctaaactcg

SEQ ID NO: 41300 - DNA, 25 bp, Artificial
  probe
  misc_feature (1)..(25): SEQ ID NO: 354; WAN024A3D_at; Start 7; Stop 31
tcatcgttgcaggggtaagacgatg

SEQ ID NO: 41301 - DNA, 25 bp, Artificial
  probe
  misc_feature (1)..(25): SEQ ID NO: 3283; WAN024A3E_at; Start 37; Stop 61
atagaaataaggaagtgaggtagca

SEQ ID NO: 41302 - DNA, 25 bp, Artificial
  probe
  misc_feature (1)..(25): SEQ ID NO: 3283; WAN024A3E_at; Start 39; Stop 63
agaaataaggaagtgaggtagcatc

SEQ ID NO: 41303 - DNA, 25 bp, Artificial
  probe
  misc_feature (1)..(25): SEQ ID NO: 3283; WAN024A3E_at; Start 38; Stop 62
tagaaataaggaagtgaggtagcat

SEQ ID NO: 41304 - DNA, 25 bp, Artificial
  probe
  misc_feature (1)..(25): SEQ ID NO: 3640; WAN024A3F_at; Start 1; Stop 25
gatgctacctcacttccttatttct

SEQ ID NO: 41305 - DNA, 25 bp, Artificial
  probe
  misc_feature (1)..(25): SEQ ID NO: 3640; WAN024A3F_at; Start 3; Stop 27
tgctacctcacttccttatttctat

SEQ ID NO: 41306 - DNA, 25 bp, Artificial
  probe
  misc_feature (1)..(25): SEQ ID NO: 3640; WAN024A3F_at; Start 2; Stop 26
atgctacctcacttccttatttcta

SEQ ID NO: 41307 - DNA, 25 bp, Artificial
  probe
  misc_feature (1)..(25): SEQ ID NO: 3154; WAN024A3G_at; Start 164; Stop 188
cttgtaactaagagggagctaatcg

SEQ ID NO: 41308 - DNA, 25 bp, Artificial
  probe
  misc_feature (1)..(25): SEQ ID NO: 3154; WAN024A3G_at; Start 271; Stop 295
tatcgagttagggaattaaattcaa

SEQ ID NO: 41309 - DNA, 25 bp, Artificial
  probe
  misc_feature (1)..(25): SEQ ID NO: 3154; WAN024A3G_at; Start 158; Stop 182
tttaagcttgtaactaagagggagc

SEQ ID NO: 41310 - DNA, 25 bp, Artificial
  probe
  misc_feature (1)..(25): SEQ ID NO: 3154; WAN024A3G_at; Start 3; Stop 27
tctattttctgtttctatcgaagtc

SEQ ID NO: 41311 - DNA, 25 bp, Artificial
  probe
  misc_feature (1)..(25): SEQ ID NO: 3154; WAN024A3G_at; Start 342; Stop 366
tagtctcattctgatgagaaaacta

SEQ ID NO: 41312 - DNA, 25 bp, Artificial
  probe
  misc_feature (1)..(25): SEQ ID NO: 3154; WAN024A3G_at; Start 331; Stop 355
taatattaaaatagtctcattctga

SEQ ID NO: 41313 - DNA, 25 bp, Artificial
  probe
  misc_feature (1)..(25): SEQ ID NO: 3154; WAN024A3G_at; Start 178; Stop 202
ggagctaatcgactagattctccag

SEQ ID NO: 41314 - DNA, 25 bp, Artificial
  probe
  misc_feature (1)..(25): SEQ ID NO: 3154; WAN024A3G_at; Start 155; Stop 179
cgctttaagcttgtaactaagaggg

SEQ ID NO: 41315 - DNA, 25 bp, Artificial
  probe
  misc_feature (1)..(25): SEQ ID NO: 3154; WAN024A3G_at; Start 40; Stop 64
taaatataataattagcattccaag

SEQ ID NO: 41316 - DNA, 25 bp, Artificial
  probe
  misc_feature (1)..(25): SEQ ID NO: 3154; WAN024A3G_at; Start 8; Stop 32
tttctgtttctatcgaagtcaacta

SEQ ID NO: 41317 - DNA, 25 bp, Artificial
  probe
  misc_feature (1)..(25): SEQ ID NO: 3154; WAN024A3G_at; Start 82; Stop 106
aatagcatattgattagtacaagac

SEQ ID NO: 41318 - DNA, 25 bp, Artificial
  probe
  misc_feature (1)..(25): SEQ ID NO: 3154; WAN024A3G_at; Start 97; Stop 121
agtacaagacagatgttctagttcc

SEQ ID NO: 41319 - DNA, 25 bp, Artificial
  probe
  misc_feature (1)..(25): SEQ ID NO: 3154; WAN024A3G_at; Start 20; Stop 44
tcgaagtcaactatttattgtaaat

SEQ ID NO: 41320 - DNA, 25 bp, Artificial
  probe
  misc_feature (1)..(25): SEQ ID NO: 3154; WAN024A3G_at; Start 175; Stop 199
gagggagctaatcgactagattctc

SEQ ID NO: 41321 - DNA, 25 bp, Artificial
  probe
  misc_feature (1)..(25): SEQ ID NO: 3154; WAN024A3G_at; Start 93; Stop 117
gattagtacaagacagatgttctag

SEQ ID NO: 41322 - DNA, 25 bp, Artificial
  probe
  misc_feature (1)..(25): SEQ ID NO: 3154; WAN024A3G_at; Start 229; Stop 253
tagtgtaatcctagctgttgttaaa

SEQ ID NO: 41323 - DNA, 25 bp, Artificial
  probe
  misc_feature (1)..(25): SEQ ID NO: 3154; WAN024A3G_at; Start 86; Stop 110
gcatattgattagtacaagacagat

SEQ ID NO: 41324 - DNA, 25 bp, Artificial
  probe
  misc_feature (1)..(25): SEQ ID NO: 3154; WAN024A3G_at; Start 337; Stop 361
taaaatagtctcattctgatgagaa

SEQ ID NO: 41325 - DNA, 25 bp, Artificial
  probe
  misc_feature (1)..(25): SEQ ID NO: 3154; WAN024A3G_at; Start 172; Stop 196
taagagggagctaatcgactagatt

SEQ ID NO: 41326 - DNA, 25 bp, Artificial
  probe
  misc_feature (1)..(25): SEQ ID NO: 3154; WAN024A3G_at; Start 110; Stop 134
tgttctagttccttctttaatctgg

SEQ ID NO: 41327 - DNA, 25 bp, Artificial
  probe
  misc_feature (1)..(25): SEQ ID NO: 3154; WAN024A3G_at; Start 381; Stop 405
catagttgtataaggaatgatgaaa

SEQ ID NO: 41328 - DNA, 25 bp, Artificial
  probe
  misc_feature (1)..(25): SEQ ID NO: 3154; WAN024A3G_at; Start 48; Stop 72
ataattagcattccaagtttatttg

SEQ ID NO: 41329 - DNA, 25 bp, Artificial
  probe
  misc_feature (1)..(25): SEQ ID NO: 3154; WAN024A3G_at; Start 104; Stop 128
gacagatgttctagttccttcttta

SEQ ID NO: 41330 - DNA, 25 bp, Artificial
  probe
  misc_feature (1)..(25): SEQ ID NO: 3154; WAN024A3G_at; Start 170; Stop 194
actaagagggagctaatcgactaga

SEQ ID NO: 41331 - DNA, 25 bp, Artificial
  probe
  misc_feature (1)..(25): SEQ ID NO: 3154; WAN024A3G_at; Start 101; Stop 125
caagacagatgttctagttccttct

SEQ ID NO: 41332 - DNA, 25 bp, Artificial
  probe
  misc_feature (1)..(25): SEQ ID NO: 3154; WAN024A3G_at; Start 376; Stop 400
tactgcatagttgtataaggaatga

SEQ ID NO: 41333 - DNA, 25 bp, Artificial
  probe
  misc_feature (1)..(25): SEQ ID NO: 3154; WAN024A3G_at; Start 13; Stop 37
gtttctatcgaagtcaactatttat

SEQ ID NO: 41334 - DNA, 25 bp, Artificial
  probe
  misc_feature (1)..(25): SEQ ID NO: 3154; WAN024A3G_at; Start 234; Stop 258
taatcctagctgttgttaaatttaa

SEQ ID NO: 41335 - DNA, 25 bp, Artificial
  probe
  misc_feature (1)..(25): SEQ ID NO: 3154; WAN024A3G_at; Start 269; Stop 293
tctatcgagttagggaattaaattc

SEQ ID NO: 41336 - DNA, 25 bp, Artificial
  probe
  misc_feature (1)..(25): SEQ ID NO: 3154; WAN024A3G_at; Start 222; Stop 246
ctttttatagtgtaatcctagctgt

SEQ ID NO: 41337 - DNA, 25 bp, Artificial
  probe
  misc_feature (1)..(25): SEQ ID NO: 3154; WAN024A3G_at; Start 359; Stop 383
gaaaactattctatttatactgcat

SEQ ID NO: 41338 - DNA, 25 bp, Artificial
  probe
  misc_feature (1)..(25): SEQ ID NO: 3154; WAN024A3G_at; Start 151; Stop 175
aaatcgctttaagcttgtaactaag

SEQ ID NO: 41339 - DNA, 25 bp, Artificial
  probe
  misc_feature (1)..(25): SEQ ID NO: 3154; WAN024A3G_at; Start 168; Stop 192
taactaagagggagctaatcgacta

SEQ ID NO: 41340 - DNA, 25 bp, Artificial
  probe
  misc_feature (1)..(25): SEQ ID NO: 3154; WAN024A3G_at; Start 160; Stop 184
taagcttgtaactaagagggagcta

SEQ ID NO: 41341 - DNA, 25 bp, Artificial
  probe
  misc_feature (1)..(25): SEQ ID NO: 3504; WAN024A3H_at; Start 373; Stop 397
aatagttgacttcgatagaaacaga

SEQ ID NO: 41342 - DNA, 25 bp, Artificial
  probe
  misc_feature (1)..(25): SEQ ID NO: 3504; WAN024A3H_at; Start 152; Stop 176
aatttaacaacagctaggattacac

SEQ ID NO: 41343 - DNA, 25 bp, Artificial
  probe
  misc_feature (1)..(25): SEQ ID NO: 3504; WAN024A3H_at; Start 159; Stop 183
caacagctaggattacactataaaa

SEQ ID NO: 41344 - DNA, 25 bp, Artificial
  probe
  misc_feature (1)..(25): SEQ ID NO: 3504; WAN024A3H_at; Start 161; Stop 185
acagctaggattacactataaaaag

SEQ ID NO: 41345 - DNA, 25 bp, Artificial
  probe
  misc_feature (1)..(25): SEQ ID NO: 3504; WAN024A3H_at; Start 283; Stop 307
gaaggaactagaacatctgtcttgt

SEQ ID NO: 41346 - DNA, 25 bp, Artificial
  probe
  misc_feature (1)..(25): SEQ ID NO: 3504; WAN024A3H_at; Start 208; Stop 232
gagaatctagtcgattagctccctc

SEQ ID NO: 41347 - DNA, 25 bp, Artificial
  probe
  misc_feature (1)..(25): SEQ ID NO: 3504; WAN024A3H_at; Start 50; Stop 74
catcagaatgagactattttaatat

SEQ ID NO: 41348 - DNA, 25 bp, Artificial
  probe
  misc_feature (1)..(25): SEQ ID NO: 3504; WAN024A3H_at; Start 232; Stop 256
cttagttacaagcttaaagcgattt

SEQ ID NO: 41349 - DNA, 25 bp, Artificial
  probe
  misc_feature (1)..(25): SEQ ID NO: 3504; WAN024A3H_at; Start 41; Stop 65
tagttttctcatcagaatgagacta

SEQ ID NO: 41350 - DNA, 25 bp, Artificial
  probe
  misc_feature (1)..(25): SEQ ID NO: 3504; WAN024A3H_at; Start 114; Stop 138
gaatttaattccctaactcgataga

SEQ ID NO: 41351 - DNA, 25 bp, Artificial
  probe
  misc_feature (1)..(25): SEQ ID NO: 3504; WAN024A3H_at; Start 215; Stop 239
tagtcgattagctccctcttagtta

SEQ ID NO: 41352 - DNA, 25 bp, Artificial
  probe
  misc_feature (1)..(25): SEQ ID NO: 3504; WAN024A3H_at; Start 368; Stop 392
caataaatagttgacttcgatagaa

SEQ ID NO: 41353 - DNA, 25 bp, Artificial
  probe
  misc_feature (1)..(25): SEQ ID NO: 3504; WAN024A3H_at; Start 8; Stop 32
cattccttatacaactatgcagtat

SEQ ID NO: 41354 - DNA, 25 bp, Artificial
  probe
  misc_feature (1)..(25): SEQ ID NO: 3504; WAN024A3H_at; Start 346; Stop 370
ggaatgctaattattatatttacaa

SEQ ID NO: 41355 - DNA, 25 bp, Artificial
  probe
  misc_feature (1)..(25): SEQ ID NO: 3504; WAN024A3H_at; Start 225; Stop 249
gctccctcttagttacaagcttaaa

SEQ ID NO: 41356 - DNA, 25 bp, Artificial
  probe
  misc_feature (1)..(25): SEQ ID NO: 3504; WAN024A3H_at; Start 218; Stop 242
tcgattagctccctcttagttacaa

SEQ ID NO: 41357 - DNA, 25 bp, Artificial
  probe
  misc_feature (1)..(25): SEQ ID NO: 3504; WAN024A3H_at; Start 273; Stop 297
ccagattaaagaaggaactagaaca

SEQ ID NO: 41358 - DNA, 25 bp, Artificial
  probe
  misc_feature (1)..(25): SEQ ID NO: 3504; WAN024A3H_at; Start 150; Stop 174
taaatttaacaacagctaggattac

SEQ ID NO: 41359 - DNA, 25 bp, Artificial
  probe
  misc_feature (1)..(25): SEQ ID NO: 3504; WAN024A3H_at; Start 335; Stop 359
caaataaacttggaatgctaattat

SEQ ID NO: 41360 - DNA, 25 bp, Artificial
  probe
  misc_feature (1)..(25): SEQ ID NO: 3504; WAN024A3H_at; Start 376; Stop 400
agttgacttcgatagaaacagaaaa

SEQ ID NO: 41361 - DNA, 25 bp, Artificial
  probe
  misc_feature (1)..(25): SEQ ID NO: 3504; WAN024A3H_at; Start 26; Stop 50
gcagtataaatagaatagttttctc

SEQ ID NO: 41362 - DNA, 25 bp, Artificial
  probe
  misc_feature (1)..(25): SEQ ID NO: 3504; WAN024A3H_at; Start 279; Stop 303
taaagaaggaactagaacatctgtc

SEQ ID NO: 41363 - DNA, 25 bp, Artificial
  probe
  misc_feature (1)..(25): SEQ ID NO: 3504; WAN024A3H_at; Start 298; Stop 322
tctgtcttgtactaatcaatatgct

SEQ ID NO: 41364 - DNA, 25 bp, Artificial
  probe
  misc_feature (1)..(25): SEQ ID NO: 3504; WAN024A3H_at; Start 210; Stop 234
gaatctagtcgattagctccctctt

SEQ ID NO: 41365 - DNA, 25 bp, Artificial
  probe
  misc_feature (1)..(25): SEQ ID NO: 3504; WAN024A3H_at; Start 19; Stop 43
caactatgcagtataaatagaatag

SEQ ID NO: 41366 - DNA, 25 bp, Artificial
  probe
  misc_feature (1)..(25): SEQ ID NO: 3504; WAN024A3H_at; Start 220; Stop 244
gattagctccctcttagttacaagc

SEQ ID NO: 41367 - DNA, 25 bp, Artificial
  probe
  misc_feature (1)..(25): SEQ ID NO: 3504; WAN024A3H_at; Start 229; Stop 253
cctcttagttacaagcttaaagcga

SEQ ID NO: 41368 - DNA, 25 bp, Artificial
  probe
  misc_feature (1)..(25): SEQ ID NO: 3504; WAN024A3H_at; Start 286; Stop 310
ggaactagaacatctgtcttgtact

SEQ ID NO: 41369 - DNA, 25 bp, Artificial
  probe
  misc_feature (1)..(25): SEQ ID NO: 3504; WAN024A3H_at; Start 156; Stop 180
taacaacagctaggattacactata

SEQ ID NO: 41370 - DNA, 25 bp, Artificial
  probe
  misc_feature (1)..(25): SEQ ID NO: 3504; WAN024A3H_at; Start 37; Stop 61
agaatagttttctcatcagaatgag

SEQ ID NO: 41371 - DNA, 25 bp, Artificial
  probe
  misc_feature (1)..(25): SEQ ID NO: 3504; WAN024A3H_at; Start 206; Stop 230
tggagaatctagtcgattagctccc

SEQ ID NO: 41372 - DNA, 25 bp, Artificial
  probe
  misc_feature (1)..(25): SEQ ID NO: 3504; WAN024A3H_at; Start 362; Stop 386
tatttacaataaatagttgacttcg

SEQ ID NO: 41373 - DNA, 25 bp, Artificial
  probe
  misc_feature (1)..(25): SEQ ID NO: 3504; WAN024A3H_at; Start 5; Stop 29
catcattccttatacaactatgcag

SEQ ID NO: 41374 - DNA, 25 bp, Artificial
  probe
  misc_feature (1)..(25): SEQ ID NO: 3504; WAN024A3H_at; Start 293; Stop 317
gaacatctgtcttgtactaatcaat

SEQ ID NO: 41375 - DNA, 25 bp, Artificial
  probe
  misc_feature (1)..(25): SEQ ID NO: 1552; WAN024A3I_at; Start 31; Stop 55
tagttcaataatcaatatatcattc

SEQ ID NO: 41376 - DNA, 25 bp, Artificial
  probe
  misc_feature (1)..(25): SEQ ID NO: 1552; WAN024A3I_at; Start 92; Stop 116
tttgatagaaaagatgctatactag

SEQ ID NO: 41377 - DNA, 25 bp, Artificial
  probe
  misc_feature (1)..(25): SEQ ID NO: 1552; WAN024A3I_at; Start 21; Stop 45
gttaaagtgttagttcaataatcaa

SEQ ID NO: 41378 - DNA, 25 bp, Artificial
  probe
  misc_feature (1)..(25): SEQ ID NO: 1552; WAN024A3I_at; Start 5; Stop 29
gattgattacgatatagttaaagtg

SEQ ID NO: 41379 - DNA, 25 bp, Artificial
  probe
  misc_feature (1)..(25): SEQ ID NO: 1552; WAN024A3I_at; Start 98; Stop 122
agaaaagatgctatactagaagtag

SEQ ID NO: 41380 - DNA, 25 bp, Artificial
  probe
  misc_feature (1)..(25): SEQ ID NO: 1552; WAN024A3I_at; Start 86; Stop 110
ttaacgtttgatagaaaagatgcta

SEQ ID NO: 41381 - DNA, 25 bp, Artificial
  probe
  misc_feature (1)..(25): SEQ ID NO: 1552; WAN024A3I_at; Start 35; Stop 59
tcaataatcaatatatcattctaag

SEQ ID NO: 41382 - DNA, 25 bp, Artificial
  probe
  misc_feature (1)..(25): SEQ ID NO: 1552; WAN024A3I_at; Start 88; Stop 112
aacgtttgatagaaaagatgctata

SEQ ID NO: 41383 - DNA, 25 bp, Artificial
  probe
  misc_feature (1)..(25): SEQ ID NO: 1552; WAN024A3I_at; Start 20; Stop 44
agttaaagtgttagttcaataatca

SEQ ID NO: 41384 - DNA, 25 bp, Artificial
  probe
  misc_feature (1)..(25): SEQ ID NO: 1552; WAN024A3I_at; Start 19; Stop 43
tagttaaagtgttagttcaataatc

SEQ ID NO: 41385 - DNA, 25 bp, Artificial
  probe
  misc_feature (1)..(25): SEQ ID NO: 1552; WAN024A3I_at; Start 42; Stop 66
tcaatatatcattctaagtctattt

SEQ ID NO: 41386 - DNA, 25 bp, Artificial
  probe
  misc_feature (1)..(25): SEQ ID NO: 1552; WAN024A3I_at; Start 94; Stop 118
tgatagaaaagatgctatactagaa

SEQ ID NO: 41387 - DNA, 25 bp, Artificial
  probe
  misc_feature (1)..(25): SEQ ID NO: 1552; WAN024A3I_at; Start 99; Stop 123
gaaaagatgctatactagaagtagg

SEQ ID NO: 41388 - DNA, 25 bp, Artificial
  probe
  misc_feature (1)..(25): SEQ ID NO: 1552; WAN024A3I_at; Start 39; Stop 63
taatcaatatatcattctaagtcta

SEQ ID NO: 41389 - DNA, 25 bp, Artificial
  probe
  misc_feature (1)..(25): SEQ ID NO: 1552; WAN024A3I_at; Start 85; Stop 109
tttaacgtttgatagaaaagatgct

SEQ ID NO: 41390 - DNA, 25 bp, Artificial
  probe
  misc_feature (1)..(25): SEQ ID NO: 1552; WAN024A3I_at; Start 91; Stop 115
gtttgatagaaaagatgctatacta

SEQ ID NO: 41391 - DNA, 25 bp, Artificial
  probe
  misc_feature (1)..(25): SEQ ID NO: 1552; WAN024A3I_at; Start 104; Stop 128
gatgctatactagaagtaggatgta

SEQ ID NO: 41392 - DNA, 25 bp, Artificial
  probe
  misc_feature (1)..(25): SEQ ID NO: 1552; WAN024A3I_at; Start 27; Stop 51
gtgttagttcaataatcaatatatc

SEQ ID NO: 41393 - DNA, 25 bp, Artificial
  probe
  misc_feature (1)..(25): SEQ ID NO: 1552; WAN024A3I_at; Start 12; Stop 36
tacgatatagttaaagtgttagttc

SEQ ID NO: 41394 - DNA, 25 bp, Artificial
  probe
  misc_feature (1)..(25): SEQ ID NO: 1552; WAN024A3I_at; Start 90; Stop 114
cgtttgatagaaaagatgctatact

SEQ ID NO: 41395 - DNA, 25 bp, Artificial
  probe
  misc_feature (1)..(25): SEQ ID NO: 1552; WAN024A3I_at; Start 100; Stop 124
aaaagatgctatactagaagtagga

SEQ ID NO: 41396 - DNA, 25 bp, Artificial
  probe
  misc_feature (1)..(25): SEQ ID NO: 1552; WAN024A3I_at; Start 87; Stop 111
taacgtttgatagaaaagatgctat

SEQ ID NO: 41397 - DNA, 25 bp, Artificial
  probe
  misc_feature (1)..(25): SEQ ID NO: 1552; WAN024A3I_at; Start 101; Stop 125
aaagatgctatactagaagtaggat

SEQ ID NO: 41398 - DNA, 25 bp, Artificial
  probe
  misc_feature (1)..(25): SEQ ID NO: 1552; WAN024A3I_at; Start 9; Stop 33
gattacgatatagttaaagtgttag

SEQ ID NO: 41399 - DNA, 25 bp, Artificial
  probe
  misc_feature (1)..(25): SEQ ID NO: 1552; WAN024A3I_at; Start 23; Stop 47
taaagtgttagttcaataatcaata

SEQ ID NO: 41400 - DNA, 25 bp, Artificial
  probe
  misc_feature (1)..(25): SEQ ID NO: 1552; WAN024A3I_at; Start 13; Stop 37
acgatatagttaaagtgttagttca

SEQ ID NO: 41401 - DNA, 25 bp, Artificial
  probe
  misc_feature (1)..(25): SEQ ID NO: 1552; WAN024A3I_at; Start 103; Stop 127
agatgctatactagaagtaggatgt

SEQ ID NO: 41402 - DNA, 25 bp, Artificial
  probe
  misc_feature (1)..(25): SEQ ID NO: 1552; WAN024A3I_at; Start 95; Stop 119
gatagaaaagatgctatactagaag

SEQ ID NO: 41403 - DNA, 25 bp, Artificial
  probe
  misc_feature (1)..(25): SEQ ID NO: 1552; WAN024A3I_at; Start 84; Stop 108
gtttaacgtttgatagaaaagatgc

SEQ ID NO: 41404 - DNA, 25 bp, Artificial
  probe
  misc_feature (1)..(25): SEQ ID NO: 1552; WAN024A3I_at; Start 97; Stop 121
tagaaaagatgctatactagaagta

SEQ ID NO: 41405 - DNA, 25 bp, Artificial
  probe
  misc_feature (1)..(25): SEQ ID NO: 1552; WAN024A3I_at; Start 3; Stop 27
gagattgattacgatatagttaaag

SEQ ID NO: 41406 - DNA, 25 bp, Artificial
  probe
  misc_feature (1)..(25): SEQ ID NO: 1552; WAN024A3I_at; Start 14; Stop 38
cgatatagttaaagtgttagttcaa

SEQ ID NO: 41407 - DNA, 25 bp, Artificial
  probe
  misc_feature (1)..(25): SEQ ID NO: 1552; WAN024A3I_at; Start 89; Stop 113
acgtttgatagaaaagatgctatac

SEQ ID NO: 41408 - DNA, 25 bp, Artificial
  probe
  misc_feature (1)..(25): SEQ ID NO: 1552; WAN024A3I_at; Start 102; Stop 126
aagatgctatactagaagtaggatg

SEQ ID NO: 41409 - DNA, 25 bp, Artificial
  probe
  misc_feature (1)..(25): SEQ ID NO: 4463; WAN024A3J_at; Start 100; Stop 124
cactttaactatatcgtaatcaatc

SEQ ID NO: 41410 - DNA, 25 bp, Artificial
  probe
  misc_feature (1)..(25): SEQ ID NO: 4463; WAN024A3J_at; Start 92; Stop 116
tgaactaacactttaactatatcgt

SEQ ID NO: 41411 - DNA, 25 bp, Artificial
  probe
  misc_feature (1)..(25): SEQ ID NO: 4463; WAN024A3J_at; Start 21; Stop 45
gcatcttttctatcaaacgttaaac

SEQ ID NO: 41412 - DNA, 25 bp, Artificial
  probe
  misc_feature (1)..(25): SEQ ID NO: 4463; WAN024A3J_at; Start 22; Stop 46
catcttttctatcaaacgttaaaca

SEQ ID NO: 41413 - DNA, 25 bp, Artificial
  probe
  misc_feature (1)..(25): SEQ ID NO: 4463; WAN024A3J_at; Start 102; Stop 126
ctttaactatatcgtaatcaatctc

SEQ ID NO: 41414 - DNA, 25 bp, Artificial
  probe
  misc_feature (1)..(25): SEQ ID NO: 4463; WAN024A3J_at; Start 12; Stop 36
tctagtatagcatcttttctatcaa

SEQ ID NO: 41415 - DNA, 25 bp, Artificial
  probe
  misc_feature (1)..(25): SEQ ID NO: 4463; WAN024A3J_at; Start 82; Stop 106
tattgattattgaactaacacttta

SEQ ID NO: 41416 - DNA, 25 bp, Artificial
  probe
  misc_feature (1)..(25): SEQ ID NO: 4463; WAN024A3J_at; Start 93; Stop 117
gaactaacactttaactatatcgta

SEQ ID NO: 41417 - DNA, 25 bp, Artificial
  probe
  misc_feature (1)..(25): SEQ ID NO: 4463; WAN024A3J_at; Start 78; Stop 102
gatatattgattattgaactaacac

SEQ ID NO: 41418 - DNA, 25 bp, Artificial
  probe
  misc_feature (1)..(25): SEQ ID NO: 4463; WAN024A3J_at; Start 17; Stop 41
tatagcatcttttctatcaaacgtt

SEQ ID NO: 41419 - DNA, 25 bp, Artificial
  probe
  misc_feature (1)..(25): SEQ ID NO: 4463; WAN024A3J_at; Start 1; Stop 25
tacatcctacttctagtatagcatc

SEQ ID NO: 41420 - DNA, 25 bp, Artificial
  probe
  misc_feature (1)..(25): SEQ ID NO: 4463; WAN024A3J_at; Start 96; Stop 120
ctaacactttaactatatcgtaatc

SEQ ID NO: 41421 - DNA, 25 bp, Artificial
  probe
  misc_feature (1)..(25): SEQ ID NO: 4463; WAN024A3J_at; Start 104; Stop 128
ttaactatatcgtaatcaatctcat

SEQ ID NO: 41422 - DNA, 25 bp, Artificial
  probe
  misc_feature (1)..(25): SEQ ID NO: 4463; WAN024A3J_at; Start 10; Stop 34
cttctagtatagcatcttttctatc

SEQ ID NO: 41423 - DNA, 25 bp, Artificial
  probe
  misc_feature (1)..(25): SEQ ID NO: 4463; WAN024A3J_at; Start 85; Stop 109
tgattattgaactaacactttaact

SEQ ID NO: 41424 - DNA, 25 bp, Artificial
  probe
  misc_feature (1)..(25): SEQ ID NO: 4463; WAN024A3J_at; Start 80; Stop 104
tatattgattattgaactaacactt

SEQ ID NO: 41425 - DNA, 25 bp, Artificial
  probe
  misc_feature (1)..(25): SEQ ID NO: 4463; WAN024A3J_at; Start 3; Stop 27
catcctacttctagtatagcatctt

SEQ ID NO: 41426 - DNA, 25 bp, Artificial
  probe
  misc_feature (1)..(25): SEQ ID NO: 4463; WAN024A3J_at; Start 103; Stop 127
tttaactatatcgtaatcaatctca

SEQ ID NO: 41427 - DNA, 25 bp, Artificial
  probe
  misc_feature (1)..(25): SEQ ID NO: 4463; WAN024A3J_at; Start 2; Stop 26
acatcctacttctagtatagcatct

SEQ ID NO: 41428 - DNA, 25 bp, Artificial
  probe
  misc_feature (1)..(25): SEQ ID NO: 4463; WAN024A3J_at; Start 63; Stop 87
aaatagacttagaatgatatattga

SEQ ID NO: 41429 - DNA, 25 bp, Artificial
  probe
  misc_feature (1)..(25): SEQ ID NO: 4463; WAN024A3J_at; Start 7; Stop 31
ctacttctagtatagcatcttttct

SEQ ID NO: 41430 - DNA, 25 bp, Artificial
  probe
  misc_feature (1)..(25): SEQ ID NO: 4463; WAN024A3J_at; Start 66; Stop 90
tagacttagaatgatatattgatta

SEQ ID NO: 41431 - DNA, 25 bp, Artificial
  probe
  misc_feature (1)..(25): SEQ ID NO: 4463; WAN024A3J_at; Start 19; Stop 43
tagcatcttttctatcaaacgttaa

SEQ ID NO: 41432 - DNA, 25 bp, Artificial
  probe
  misc_feature (1)..(25): SEQ ID NO: 4463; WAN024A3J_at; Start 14; Stop 38
tagtatagcatcttttctatcaaac

SEQ ID NO: 41433 - DNA, 25 bp, Artificial
  probe
  misc_feature (1)..(25): SEQ ID NO: 4463; WAN024A3J_at; Start 16; Stop 40
gtatagcatcttttctatcaaacgt

SEQ ID NO: 41434 - DNA, 25 bp, Artificial
  probe
  misc_feature (1)..(25): SEQ ID NO: 4463; WAN024A3J_at; Start 6; Stop 30
cctacttctagtatagcatcttttc

SEQ ID NO: 41435 - DNA, 25 bp, Artificial
  probe
  misc_feature (1)..(25): SEQ ID NO: 4463; WAN024A3J_at; Start 97; Stop 121
taacactttaactatatcgtaatca

SEQ ID NO: 41436 - DNA, 25 bp, Artificial
  probe
  misc_feature (1)..(25): SEQ ID NO: 4463; WAN024A3J_at; Start 15; Stop 39
agtatagcatcttttctatcaaacg

SEQ ID NO: 41437 - DNA, 25 bp, Artificial
  probe
  misc_feature (1)..(25): SEQ ID NO: 4463; WAN024A3J_at; Start 98; Stop 122
aacactttaactatatcgtaatcaa

SEQ ID NO: 41438 - DNA, 25 bp, Artificial
  probe
  misc_feature (1)..(25): SEQ ID NO: 4463; WAN024A3J_at; Start 91; Stop 115
ttgaactaacactttaactatatcg

SEQ ID NO: 41439 - DNA, 25 bp, Artificial
  probe
  misc_feature (1)..(25): SEQ ID NO: 4463; WAN024A3J_at; Start 13; Stop 37
ctagtatagcatcttttctatcaaa

SEQ ID NO: 41440 - DNA, 25 bp, Artificial
  probe
  misc_feature (1)..(25): SEQ ID NO: 4463; WAN024A3J_at; Start 8; Stop 32
tacttctagtatagcatcttttcta

SEQ ID NO: 41441 - DNA, 25 bp, Artificial
  probe
  misc_feature (1)..(25): SEQ ID NO: 4463; WAN024A3J_at; Start 20; Stop 44
agcatcttttctatcaaacgttaaa

SEQ ID NO: 41442 - DNA, 25 bp, Artificial
  probe
  misc_feature (1)..(25): SEQ ID NO: 4463; WAN024A3J_at; Start 86; Stop 110
gattattgaactaacactttaacta

SEQ ID NO: 41443 - DNA, 25 bp, Artificial
  probe
  misc_feature (1)..(25): SEQ ID NO: 4408; WAN024A3K_at; Start 58; Stop 82
tttttatagtcgctataagatgacc

SEQ ID NO: 41444 - DNA, 25 bp, Artificial
  probe
  misc_feature (1)..(25): SEQ ID NO: 4408; WAN024A3K_at; Start 76; Stop 100
gatgaccttatctatagctttttat

SEQ ID NO: 41445 - DNA, 25 bp, Artificial
  probe
  misc_feature (1)..(25): SEQ ID NO: 4408; WAN024A3K_at; Start 130; Stop 154
tcaattttgtcgcagggaggaatct

SEQ ID NO: 41446 - DNA, 25 bp, Artificial
  probe
  misc_feature (1)..(25): SEQ ID NO: 4408; WAN024A3K_at; Start 27; Stop 51
tctaatgtacagaagactaggcttg

SEQ ID NO: 41447 - DNA, 25 bp, Artificial
  probe
  misc_feature (1)..(25): SEQ ID NO: 4408; WAN024A3K_at; Start 29; Stop 53
taatgtacagaagactaggcttgtt

SEQ ID NO: 41448 - DNA, 25 bp, Artificial
  probe
  misc_feature (1)..(25): SEQ ID NO: 4408; WAN024A3K_at; Start 131; Stop 155
caattttgtcgcagggaggaatctg

SEQ ID NO: 41449 - DNA, 25 bp, Artificial
  probe
  misc_feature (1)..(25): SEQ ID NO: 4408; WAN024A3K_at; Start 36; Stop 60
cagaagactaggcttgttcactttt

SEQ ID NO: 41450 - DNA, 25 bp, Artificial
  probe
  misc_feature (1)..(25): SEQ ID NO: 4408; WAN024A3K_at; Start 127; Stop 151
ttatcaattttgtcgcagggaggaa

SEQ ID NO: 41451 - DNA, 25 bp, Artificial
  probe
  misc_feature (1)..(25): SEQ ID NO: 4408; WAN024A3K_at; Start 28; Stop 52
ctaatgtacagaagactaggcttgt

SEQ ID NO: 41452 - DNA, 25 bp, Artificial
  probe
  misc_feature (1)..(25): SEQ ID NO: 4408; WAN024A3K_at; Start 79; Stop 103
gaccttatctatagctttttatata

SEQ ID NO: 41453 - DNA, 25 bp, Artificial
  probe
  misc_feature (1)..(25): SEQ ID NO: 4408; WAN024A3K_at; Start 30; Stop 54
aatgtacagaagactaggcttgttc

SEQ ID NO: 41454 - DNA, 25 bp, Artificial
  probe
  misc_feature (1)..(25): SEQ ID NO: 4408; WAN024A3K_at; Start 26; Stop 50
ttctaatgtacagaagactaggctt

SEQ ID NO: 41455 - DNA, 25 bp, Artificial
  probe
  misc_feature (1)..(25): SEQ ID NO: 4408; WAN024A3K_at; Start 68; Stop 92
cgctataagatgaccttatctatag

SEQ ID NO: 41456 - DNA, 25 bp, Artificial
  probe
  misc_feature (1)..(25): SEQ ID NO: 4408; WAN024A3K_at; Start 50; Stop 74
tgttcacttttttatagtcgctata

SEQ ID NO: 41457 - DNA, 25 bp, Artificial
  probe
  misc_feature (1)..(25): SEQ ID NO: 4408; WAN024A3K_at; Start 108; Stop 132
tatatattcagacatactattatca

SEQ ID NO: 41458 - DNA, 25 bp, Artificial
  probe
  misc_feature (1)..(25): SEQ ID NO: 4408; WAN024A3K_at; Start 132; Stop 156
aattttgtcgcagggaggaatctgt

SEQ ID NO: 41459 - DNA, 25 bp, Artificial
  probe
  misc_feature (1)..(25): SEQ ID NO: 4408; WAN024A3K_at; Start 122; Stop 146
tactattatcaattttgtcgcaggg

SEQ ID NO: 41460 - DNA, 25 bp, Artificial
  probe
  misc_feature (1)..(25): SEQ ID NO: 4408; WAN024A3K_at; Start 46; Stop 70
ggcttgttcacttttttatagtcgc

SEQ ID NO: 41461 - DNA, 25 bp, Artificial
  probe
  misc_feature (1)..(25): SEQ ID NO: 4408; WAN024A3K_at; Start 24; Stop 48
aattctaatgtacagaagactaggc

SEQ ID NO: 41462 - DNA, 25 bp, Artificial
  probe
  misc_feature (1)..(25): SEQ ID NO: 4408; WAN024A3K_at; Start 21; Stop 45
ctgaattctaatgtacagaagacta

SEQ ID NO: 41463 - DNA, 25 bp, Artificial
  probe
  misc_feature (1)..(25): SEQ ID NO: 4408; WAN024A3K_at; Start 123; Stop 147
actattatcaattttgtcgcaggga

SEQ ID NO: 41464 - DNA, 25 bp, Artificial
  probe
  misc_feature (1)..(25): SEQ ID NO: 4408; WAN024A3K_at; Start 134; Stop 158
ttttgtcgcagggaggaatctgtta

SEQ ID NO: 41465 - DNA, 25 bp, Artificial
  probe
  misc_feature (1)..(25): SEQ ID NO: 4408; WAN024A3K_at; Start 71; Stop 95
tataagatgaccttatctatagctt

SEQ ID NO: 41466 - DNA, 25 bp, Artificial
  probe
  misc_feature (1)..(25): SEQ ID NO: 4408; WAN024A3K_at; Start 128; Stop 152
tatcaattttgtcgcagggaggaat

SEQ ID NO: 41467 - DNA, 25 bp, Artificial
  probe
  misc_feature (1)..(25): SEQ ID NO: 4408; WAN024A3K_at; Start 33; Stop 57
gtacagaagactaggcttgttcact

SEQ ID NO: 41468 - DNA, 25 bp, Artificial
  probe
  misc_feature (1)..(25): SEQ ID NO: 4408; WAN024A3K_at; Start 23; Stop 47
gaattctaatgtacagaagactagg

SEQ ID NO: 41469 - DNA, 25 bp, Artificial
  probe
  misc_feature (1)..(25): SEQ ID NO: 4408; WAN024A3K_at; Start 32; Stop 56
tgtacagaagactaggcttgttcac

SEQ ID NO: 41470 - DNA, 25 bp, Artificial
  probe
  misc_feature (1)..(25): SEQ ID NO: 4408; WAN024A3K_at; Start 102; Stop 126
tataattatatattcagacatacta

SEQ ID NO: 41471 - DNA, 25 bp, Artificial
  probe
  misc_feature (1)..(25): SEQ ID NO: 4408; WAN024A3K_at; Start 41; Stop 65
gactaggcttgttcacttttttata

SEQ ID NO: 41472 - DNA, 25 bp, Artificial
  probe
  misc_feature (1)..(25): SEQ ID NO: 4408; WAN024A3K_at; Start 64; Stop 88
tagtcgctataagatgaccttatct

SEQ ID NO: 41473 - DNA, 25 bp, Artificial
  probe
  misc_feature (1)..(25): SEQ ID NO: 4408; WAN024A3K_at; Start 125; Stop 149
tattatcaattttgtcgcagggagg

SEQ ID NO: 41474 - DNA, 25 bp, Artificial
  probe
  misc_feature (1)..(25): SEQ ID NO: 4408; WAN024A3K_at; Start 34; Stop 58
tacagaagactaggcttgttcactt

SEQ ID NO: 41475 - DNA, 25 bp, Artificial
  probe
  misc_feature (1)..(25): SEQ ID NO: 4408; WAN024A3K_at; Start 135; Stop 159
tttgtcgcagggaggaatctgttaa

SEQ ID NO: 41476 - DNA, 25 bp, Artificial
  probe
  misc_feature (1)..(25): SEQ ID NO: 4408; WAN024A3K_at; Start 61; Stop 85
ttatagtcgctataagatgacctta

SEQ ID NO: 41477 - DNA, 25 bp, Artificial
  probe
  misc_feature (1)..(25): SEQ ID NO: 4756; WAN024A3L_at; Start 71; Stop 95
tagataaggtcatcttatagcgact

SEQ ID NO: 41478 - DNA, 25 bp, Artificial
  probe
  misc_feature (1)..(25): SEQ ID NO: 4756; WAN024A3L_at; Start 15; Stop 39
cctgcgacaaaattgataatagtat

SEQ ID NO: 41479 - DNA, 25 bp, Artificial
  probe
  misc_feature (1)..(25): SEQ ID NO: 4756; WAN024A3L_at; Start 104; Stop 128
gtgaacaagcctagtcttctgtaca

SEQ ID NO: 41480 - DNA, 25 bp, Artificial
  probe
  misc_feature (1)..(25): SEQ ID NO: 4756; WAN024A3L_at; Start 8; Stop 32
attcctccctgcgacaaaattgata

SEQ ID NO: 41481 - DNA, 25 bp, Artificial
  probe
  misc_feature (1)..(25): SEQ ID NO: 4756; WAN024A3L_at; Start 73; Stop 97
gataaggtcatcttatagcgactat

SEQ ID NO: 41482 - DNA, 25 bp, Artificial
  probe
  misc_feature (1)..(25): SEQ ID NO: 4756; WAN024A3L_at; Start 110; Stop 134
aagcctagtcttctgtacattagaa

SEQ ID NO: 41483 - DNA, 25 bp, Artificial
  probe
  misc_feature (1)..(25): SEQ ID NO: 4756; WAN024A3L_at; Start 109; Stop 133
caagcctagtcttctgtacattaga

SEQ ID NO: 41484 - DNA, 25 bp, Artificial
  probe
  misc_feature (1)..(25): SEQ ID NO: 4756; WAN024A3L_at; Start 96; Stop 120
ataaaaaagtgaacaagcctagtct

SEQ ID NO: 41485 - DNA, 25 bp, Artificial
  probe
  misc_feature (1)..(25): SEQ ID NO: 4756; WAN024A3L_at; Start 9; Stop 33
ttcctccctgcgacaaaattgataa

SEQ ID NO: 41486 - DNA, 25 bp, Artificial
  probe
  misc_feature (1)..(25): SEQ ID NO: 4756; WAN024A3L_at; Start 75; Stop 99
taaggtcatcttatagcgactataa

SEQ ID NO: 41487 - DNA, 25 bp, Artificial
  probe
  misc_feature (1)..(25): SEQ ID NO: 4756; WAN024A3L_at; Start 5; Stop 29
cagattcctccctgcgacaaaattg

SEQ ID NO: 41488 - DNA, 25 bp, Artificial
  probe
  misc_feature (1)..(25): SEQ ID NO: 4756; WAN024A3L_at; Start 1; Stop 25
ttaacagattcctccctgcgacaaa

SEQ ID NO: 41489 - DNA, 25 bp, Artificial
  probe
  misc_feature (1)..(25): SEQ ID NO: 4756; WAN024A3L_at; Start 99; Stop 123
aaaaagtgaacaagcctagtcttct

SEQ ID NO: 41490 - DNA, 25 bp, Artificial
  probe
  misc_feature (1)..(25): SEQ ID NO: 4756; WAN024A3L_at; Start 100; Stop 124
aaaagtgaacaagcctagtcttctg

SEQ ID NO: 41491 - DNA, 25 bp, Artificial
  probe
  misc_feature (1)..(25): SEQ ID NO: 4756; WAN024A3L_at; Start 95; Stop 119
tataaaaaagtgaacaagcctagtc

SEQ ID NO: 41492 - DNA, 25 bp, Artificial
  probe
  misc_feature (1)..(25): SEQ ID NO: 4756; WAN024A3L_at; Start 112; Stop 136
gcctagtcttctgtacattagaatt

SEQ ID NO: 41493 - DNA, 25 bp, Artificial
  probe
  misc_feature (1)..(25): SEQ ID NO: 4756; WAN024A3L_at; Start 11; Stop 35
cctccctgcgacaaaattgataata

SEQ ID NO: 41494 - DNA, 25 bp, Artificial
  probe
  misc_feature (1)..(25): SEQ ID NO: 4756; WAN024A3L_at; Start 18; Stop 42
gcgacaaaattgataatagtatgtc

SEQ ID NO: 41495 - DNA, 25 bp, Artificial
  probe
  misc_feature (1)..(25): SEQ ID NO: 4756; WAN024A3L_at; Start 106; Stop 130
gaacaagcctagtcttctgtacatt

SEQ ID NO: 41496 - DNA, 25 bp, Artificial
  probe
  misc_feature (1)..(25): SEQ ID NO: 4756; WAN024A3L_at; Start 90; Stop 114
gcgactataaaaaagtgaacaagcc

SEQ ID NO: 41497 - DNA, 25 bp, Artificial
  probe
  misc_feature (1)..(25): SEQ ID NO: 4756; WAN024A3L_at; Start 102; Stop 126
aagtgaacaagcctagtcttctgta

SEQ ID NO: 41498 - DNA, 25 bp, Artificial
  probe
  misc_feature (1)..(25): SEQ ID NO: 4756; WAN024A3L_at; Start 78; Stop 102
ggtcatcttatagcgactataaaaa

SEQ ID NO: 41499 - DNA, 25 bp, Artificial
  probe
  misc_feature (1)..(25): SEQ ID NO: 4756; WAN024A3L_at; Start 61; Stop 85
taaaaagctatagataaggtcatct

SEQ ID NO: 41500 - DNA, 25 bp, Artificial
  probe
  misc_feature (1)..(25): SEQ ID NO: 4756; WAN024A3L_at; Start 86; Stop 110
tatagcgactataaaaaagtgaaca

SEQ ID NO: 41501 - DNA, 25 bp, Artificial
  probe
  misc_feature (1)..(25): SEQ ID NO: 4756; WAN024A3L_at; Start 2; Stop 26
taacagattcctccctgcgacaaaa

SEQ ID NO: 41502 - DNA, 25 bp, Artificial
  probe
  misc_feature (1)..(25): SEQ ID NO: 4756; WAN024A3L_at; Start 22; Stop 46
caaaattgataatagtatgtctgaa

SEQ ID NO: 41503 - DNA, 25 bp, Artificial
  probe
  misc_feature (1)..(25): SEQ ID NO: 4756; WAN024A3L_at; Start 13; Stop 37
tccctgcgacaaaattgataatagt

SEQ ID NO: 41504 - DNA, 25 bp, Artificial
  probe
  misc_feature (1)..(25): SEQ ID NO: 4756; WAN024A3L_at; Start 115; Stop 139
tagtcttctgtacattagaattcag

SEQ ID NO: 41505 - DNA, 25 bp, Artificial
  probe
  misc_feature (1)..(25): SEQ ID NO: 4756; WAN024A3L_at; Start 92; Stop 116
gactataaaaaagtgaacaagccta

SEQ ID NO: 41506 - DNA, 25 bp, Artificial
  probe
  misc_feature (1)..(25): SEQ ID NO: 4756; WAN024A3L_at; Start 57; Stop 81
tatataaaaagctatagataaggtc

SEQ ID NO: 41507 - DNA, 25 bp, Artificial
  probe
  misc_feature (1)..(25): SEQ ID NO: 4756; WAN024A3L_at; Start 29; Stop 53
gataatagtatgtctgaatatataa

SEQ ID NO: 41508 - DNA, 25 bp, Artificial
  probe
  misc_feature (1)..(25): SEQ ID NO: 4756; WAN024A3L_at; Start 69; Stop 93
tatagataaggtcatcttatagcga

SEQ ID NO: 41509 - DNA, 25 bp, Artificial
  probe
  misc_feature (1)..(25): SEQ ID NO: 4756; WAN024A3L_at; Start 6; Stop 30
agattcctccctgcgacaaaattga

SEQ ID NO: 41510 - DNA, 25 bp, Artificial
  probe
  misc_feature (1)..(25): SEQ ID NO: 4756; WAN024A3L_at; Start 10; Stop 34
tcctccctgcgacaaaattgataat

SEQ ID NO: 41511 - DNA, 25 bp, Artificial
  probe
  misc_feature (1)..(25): SEQ ID NO: 3652; WAN024A3M_at; Start 243; Stop 267
gataggtacctaaagaatacgaaca

SEQ ID NO: 41512 - DNA, 25 bp, Artificial
  probe
  misc_feature (1)..(25): SEQ ID NO: 3652; WAN024A3M_at; Start 1; Stop 25
gattgaaggtcgcttgagcagtatt

SEQ ID NO: 41513 - DNA, 25 bp, Artificial
  probe
  misc_feature (1)..(25): SEQ ID NO: 3652; WAN024A3M_at; Start 8; Stop 32
ggtcgcttgagcagtattcattata

SEQ ID NO: 41514 - DNA, 25 bp, Artificial
  probe
  misc_feature (1)..(25): SEQ ID NO: 3652; WAN024A3M_at; Start 230; Stop 254
cctgaaatcataagataggtaccta

SEQ ID NO: 41515 - DNA, 25 bp, Artificial
  probe
  misc_feature (1)..(25): SEQ ID NO: 3652; WAN024A3M_at; Start 95; Stop 119
tatacagattatgtgaatgatgtga

SEQ ID NO: 41516 - DNA, 25 bp, Artificial
  probe
  misc_feature (1)..(25): SEQ ID NO: 3652; WAN024A3M_at; Start 179; Stop 203
ctaatctatttttcaagttagagaa

SEQ ID NO: 41517 - DNA, 25 bp, Artificial
  probe
  misc_feature (1)..(25): SEQ ID NO: 3652; WAN024A3M_at; Start 219; Stop 243
taatgacatttcctgaaatcataag

SEQ ID NO: 41518 - DNA, 25 bp, Artificial
  probe
  misc_feature (1)..(25): SEQ ID NO: 3652; WAN024A3M_at; Start 18; Stop 42
gcagtattcattataacacgcttgg

SEQ ID NO: 41519 - DNA, 25 bp, Artificial
  probe
  misc_feature (1)..(25): SEQ ID NO: 3652; WAN024A3M_at; Start 12; Stop 36
gcttgagcagtattcattataacac

SEQ ID NO: 41520 - DNA, 25 bp, Artificial
  probe
  misc_feature (1)..(25): SEQ ID NO: 3652; WAN024A3M_at; Start 278; Stop 302
caatcgaaccttatctttgtttcaa

SEQ ID NO: 41521 - DNA, 25 bp, Artificial
  probe
  misc_feature (1)..(25): SEQ ID NO: 3652; WAN024A3M_at; Start 106; Stop 130
tgtgaatgatgtgagtataccttct

SEQ ID NO: 41522 - DNA, 25 bp, Artificial
  probe
  misc_feature (1)..(25): SEQ ID NO: 3652; WAN024A3M_at; Start 109; Stop 133
gaatgatgtgagtataccttcttct

SEQ ID NO: 41523 - DNA, 25 bp, Artificial
  probe
  misc_feature (1)..(25): SEQ ID NO: 3652; WAN024A3M_at; Start 249; Stop 273
tacctaaagaatacgaacataaatc

SEQ ID NO: 41524 - DNA, 25 bp, Artificial
  probe
  misc_feature (1)..(25): SEQ ID NO: 3652; WAN024A3M_at; Start 233; Stop 257
gaaatcataagataggtacctaaag

SEQ ID NO: 41525 - DNA, 25 bp, Artificial
  probe
  misc_feature (1)..(25): SEQ ID NO: 3652; WAN024A3M_at; Start 40; Stop 64
tggttagagaagacaaggaagagct

SEQ ID NO: 41526 - DNA, 25 bp, Artificial
  probe
  misc_feature (1)..(25): SEQ ID NO: 3652; WAN024A3M_at; Start 238; Stop 262
cataagataggtacctaaagaatac

SEQ ID NO: 41527 - DNA, 25 bp, Artificial
  probe
  misc_feature (1)..(25): SEQ ID NO: 3652; WAN024A3M_at; Start 306; Stop 330
taaaatgtcaaatgttcttaacatg

SEQ ID NO: 41528 - DNA, 25 bp, Artificial
  probe
  misc_feature (1)..(25): SEQ ID NO: 3652; WAN024A3M_at; Start 34; Stop 58
cacgcttggttagagaagacaagga

SEQ ID NO: 41529 - DNA, 25 bp, Artificial
  probe
  misc_feature (1)..(25): SEQ ID NO: 3652; WAN024A3M_at; Start 291; Stop 315
tctttgtttcaaaattaaaatgtca

SEQ ID NO: 41530 - DNA, 25 bp, Artificial
  probe
  misc_feature (1)..(25): SEQ ID NO: 3652; WAN024A3M_at; Start 31; Stop 55
taacacgcttggttagagaagacaa

SEQ ID NO: 41531 - DNA, 25 bp, Artificial
  probe
  misc_feature (1)..(25): SEQ ID NO: 3652; WAN024A3M_at; Start 86; Stop 110
tatagtcaatatacagattatgtga

SEQ ID NO: 41532 - DNA, 25 bp, Artificial
  probe
  misc_feature (1)..(25): SEQ ID NO: 3652; WAN024A3M_at; Start 5; Stop 29
gaaggtcgcttgagcagtattcatt

SEQ ID NO: 41533 - DNA, 25 bp, Artificial
  probe
  misc_feature (1)..(25): SEQ ID NO: 3652; WAN024A3M_at; Start 26; Stop 50
cattataacacgcttggttagagaa

SEQ ID NO: 41534 - DNA, 25 bp, Artificial
  probe
  misc_feature (1)..(25): SEQ ID NO: 3652; WAN024A3M_at; Start 22; Stop 46
tattcattataacacgcttggttag

SEQ ID NO: 41535 - DNA, 25 bp, Artificial
  probe
  misc_feature (1)..(25): SEQ ID NO: 3652; WAN024A3M_at; Start 118; Stop 142
gagtataccttcttcttatcttcat

SEQ ID NO: 41536 - DNA, 25 bp, Artificial
  probe
  misc_feature (1)..(25): SEQ ID NO: 3652; WAN024A3M_at; Start 163; Stop 187
aaacaacccattttctctaatctat

SEQ ID NO: 41537 - DNA, 25 bp, Artificial
  probe
  misc_feature (1)..(25): SEQ ID NO: 3652; WAN024A3M_at; Start 44; Stop 68
tagagaagacaaggaagagcttaaa

SEQ ID NO: 41538 - DNA, 25 bp, Artificial
  probe
  misc_feature (1)..(25): SEQ ID NO: 3652; WAN024A3M_at; Start 263; Stop 287
gaacataaatctattcaatcgaacc

SEQ ID NO: 41539 - DNA, 25 bp, Artificial
  probe
  misc_feature (1)..(25): SEQ ID NO: 3652; WAN024A3M_at; Start 49; Stop 73
aagacaaggaagagcttaaaaattg

SEQ ID NO: 41540 - DNA, 25 bp, Artificial
  probe
  misc_feature (1)..(25): SEQ ID NO: 3652; WAN024A3M_at; Start 225; Stop 249
catttcctgaaatcataagataggt

SEQ ID NO: 41541 - DNA, 25 bp, Artificial
  probe
  misc_feature (1)..(25): SEQ ID NO: 3652; WAN024A3M_at; Start 77; Stop 101
tttaaaacttatagtcaatatacag

SEQ ID NO: 41542 - DNA, 25 bp, Artificial
  probe
  misc_feature (1)..(25): SEQ ID NO: 3652; WAN024A3M_at; Start 113; Stop 137
gatgtgagtataccttcttcttatc

SEQ ID NO: 41543 - DNA, 25 bp, Artificial
  probe
  misc_feature (1)..(25): SEQ ID NO: 3652; WAN024A3M_at; Start 123; Stop 147
taccttcttcttatcttcattcaaa

SEQ ID NO: 41544 - DNA, 25 bp, Artificial
  probe
  misc_feature (1)..(25): SEQ ID NO: 3652; WAN024A3M_at; Start 29; Stop 53
tataacacgcttggttagagaagac

SEQ ID NO: 41545 - DNA, 25 bp, Artificial
  probe
  misc_feature (1)..(25): SEQ ID NO: 3682; WAN024A3N_at; Start 221; Stop 245
ggtatactcacatcattcacataat

SEQ ID NO: 41546 - DNA, 25 bp, Artificial
  probe
  misc_feature (1)..(25): SEQ ID NO: 3682; WAN024A3N_at; Start 45; Stop 69
ttgaaacaaagataaggttcgattg

SEQ ID NO: 41547 - DNA, 25 bp, Artificial
  probe
  misc_feature (1)..(25): SEQ ID NO: 3682; WAN024A3N_at; Start 95; Stop 119
ggtacctatcttatgatttcaggaa

SEQ ID NO: 41548 - DNA, 25 bp, Artificial
  probe
  misc_feature (1)..(25): SEQ ID NO: 3682; WAN024A3N_at; Start 289; Stop 313
tccttgtcttctctaaccaagcgtg

SEQ ID NO: 41549 - DNA, 25 bp, Artificial
  probe
  misc_feature (1)..(25): SEQ ID NO: 3682; WAN024A3N_at; Start 305; Stop 329
ccaagcgtgttataatgaatactgc

SEQ ID NO: 41550 - DNA, 25 bp, Artificial
  probe
  misc_feature (1)..(25): SEQ ID NO: 3682; WAN024A3N_at; Start 212; Stop 236
taagaagaaggtatactcacatcat

SEQ ID NO: 41551 - DNA, 25 bp, Artificial
  probe
  misc_feature (1)..(25): SEQ ID NO: 3682; WAN024A3N_at; Start 310; Stop 334
cgtgttataatgaatactgctcaag

SEQ ID NO: 41552 - DNA, 25 bp, Artificial
  probe
  misc_feature (1)..(25): SEQ ID NO: 3682; WAN024A3N_at; Start 234; Stop 258
cattcacataatctgtatattgact

SEQ ID NO: 41553 - DNA, 25 bp, Artificial
  probe
  misc_feature (1)..(25): SEQ ID NO: 3682; WAN024A3N_at; Start 80; Stop 104
tgttcgtattctttaggtacctatc

SEQ ID NO: 41554 - DNA, 25 bp, Artificial
  probe
  misc_feature (1)..(25): SEQ ID NO: 3682; WAN024A3N_at; Start 154; Stop 178
tgaaaaatagattagagaaaatggg

SEQ ID NO: 41555 - DNA, 25 bp, Artificial
  probe
  misc_feature (1)..(25): SEQ ID NO: 3682; WAN024A3N_at; Start 207; Stop 231
gaagataagaagaaggtatactcac

SEQ ID NO: 41556 - DNA, 25 bp, Artificial
  probe
  misc_feature (1)..(25): SEQ ID NO: 3682; WAN024A3N_at; Start 302; Stop 326
taaccaagcgtgttataatgaatac

SEQ ID NO: 41557 - DNA, 25 bp, Artificial
  probe
  misc_feature (1)..(25): SEQ ID NO: 3682; WAN024A3N_at; Start 294; Stop 318
gtcttctctaaccaagcgtgttata

SEQ ID NO: 41558 - DNA, 25 bp, Artificial
  probe
  misc_feature (1)..(25): SEQ ID NO: 3682; WAN024A3N_at; Start 28; Stop 52
catttgacattttaattttgaaaca

SEQ ID NO: 41559 - DNA, 25 bp, Artificial
  probe
  misc_feature (1)..(25): SEQ ID NO: 3682; WAN024A3N_at; Start 218; Stop 242
gaaggtatactcacatcattcacat

SEQ ID NO: 41560 - DNA, 25 bp, Artificial
  probe
  misc_feature (1)..(25): SEQ ID NO: 3682; WAN024A3N_at; Start 101; Stop 125
tatcttatgatttcaggaaatgtca

SEQ ID NO: 41561 - DNA, 25 bp, Artificial
  probe
  misc_feature (1)..(25): SEQ ID NO: 3682; WAN024A3N_at; Start 274; Stop 298
caatttttaagctcttccttgtctt

SEQ ID NO: 41562 - DNA, 25 bp, Artificial
  probe
  misc_feature (1)..(25): SEQ ID NO: 3682; WAN024A3N_at; Start 292; Stop 316
ttgtcttctctaaccaagcgtgtta

SEQ ID NO: 41563 - DNA, 25 bp, Artificial
  probe
  misc_feature (1)..(25): SEQ ID NO: 3682; WAN024A3N_at; Start 74; Stop 98
gatttatgttcgtattctttaggta

SEQ ID NO: 41564 - DNA, 25 bp, Artificial
  probe
  misc_feature (1)..(25): SEQ ID NO: 3682; WAN024A3N_at; Start 159; Stop 183
aatagattagagaaaatgggttgtt

SEQ ID NO: 41565 - DNA, 25 bp, Artificial
  probe
  misc_feature (1)..(25): SEQ ID NO: 3682; WAN024A3N_at; Start 51; Stop 75
caaagataaggttcgattgaataga

SEQ ID NO: 41566 - DNA, 25 bp, Artificial
  probe
  misc_feature (1)..(25): SEQ ID NO: 3682; WAN024A3N_at; Start 281; Stop 305
taagctcttccttgtcttctctaac

SEQ ID NO: 41567 - DNA, 25 bp, Artificial
  probe
  misc_feature (1)..(25): SEQ ID NO: 3682; WAN024A3N_at; Start 240; Stop 264
cataatctgtatattgactataagt

SEQ ID NO: 41568 - DNA, 25 bp, Artificial
  probe
  misc_feature (1)..(25): SEQ ID NO: 3682; WAN024A3N_at; Start 144; Stop 168
ttctctaacttgaaaaatagattag

SEQ ID NO: 41569 - DNA, 25 bp, Artificial
  probe
  misc_feature (1)..(25): SEQ ID NO: 3682; WAN024A3N_at; Start 17; Stop 41
catgttaagaacatttgacatttta

SEQ ID NO: 41570 - DNA, 25 bp, Artificial
  probe
  misc_feature (1)..(25): SEQ ID NO: 3682; WAN024A3N_at; Start 198; Stop 222
tatttgaatgaagataagaagaagg

SEQ ID NO: 41571 - DNA, 25 bp, Artificial
  probe
  misc_feature (1)..(25): SEQ ID NO: 3682; WAN024A3N_at; Start 109; Stop 133
gatttcaggaaatgtcattaaaaaa

SEQ ID NO: 41572 - DNA, 25 bp, Artificial
  probe
  misc_feature (1)..(25): SEQ ID NO: 3682; WAN024A3N_at; Start 297; Stop 321
ttctctaaccaagcgtgttataatg

SEQ ID NO: 41573 - DNA, 25 bp, Artificial
  probe
  misc_feature (1)..(25): SEQ ID NO: 3682; WAN024A3N_at; Start 60; Stop 84
ggttcgattgaatagatttatgttc

SEQ ID NO: 41574 - DNA, 25 bp, Artificial
  probe
  misc_feature (1)..(25): SEQ ID NO: 3682; WAN024A3N_at; Start 225; Stop 249
tactcacatcattcacataatctgt

SEQ ID NO: 41575 - DNA, 25 bp, Artificial
  probe
  misc_feature (1)..(25): SEQ ID NO: 3682; WAN024A3N_at; Start 315; Stop 339
tataatgaatactgctcaagcgacc

SEQ ID NO: 41576 - DNA, 25 bp, Artificial
  probe
  misc_feature (1)..(25): SEQ ID NO: 3682; WAN024A3N_at; Start 312; Stop 336
tgttataatgaatactgctcaagcg

SEQ ID NO: 41577 - DNA, 25 bp, Artificial
  probe
  misc_feature (1)..(25): SEQ ID NO: 3682; WAN024A3N_at; Start 316; Stop 340
ataatgaatactgctcaagcgacct

SEQ ID NO: 41578 - DNA, 25 bp, Artificial
  probe
  misc_feature (1)..(25): SEQ ID NO: 3682; WAN024A3N_at; Start 215; Stop 239
gaagaaggtatactcacatcattca

SEQ ID NO: 41579 - DNA, 25 bp, Artificial
  probe
  misc_feature (1)..(25): SEQ ID NO: 6262; WAN024A3O_at; Start 94; Stop 118
gatttacaaacagcgaagaaagtat

SEQ ID NO: 41580 - DNA, 25 bp, Artificial
  probe
  misc_feature (1)..(25): SEQ ID NO: 6262; WAN024A3O_at; Start 96; Stop 120
tttacaaacagcgaagaaagtatag

SEQ ID NO: 41581 - DNA, 25 bp, Artificial
  probe
  misc_feature (1)..(25): SEQ ID NO: 6262; WAN024A3O_at; Start 136; Stop 160
tatagatgaatcaatttggagagtc

SEQ ID NO: 41582 - DNA, 25 bp, Artificial
  probe
  misc_feature (1)..(25): SEQ ID NO: 6262; WAN024A3O_at; Start 104; Stop 128
cagcgaagaaagtataggaagctga

SEQ ID NO: 41583 - DNA, 25 bp, Artificial
  probe
  misc_feature (1)..(25): SEQ ID NO: 6262; WAN024A3O_at; Start 147; Stop 171
caatttggagagtcaacgcaatcta

SEQ ID NO: 41584 - DNA, 25 bp, Artificial
  probe
  misc_feature (1)..(25): SEQ ID NO: 6262; WAN024A3O_at; Start 175; Stop 199
caatattttcgaagctagggggaag

SEQ ID NO: 41585 - DNA, 25 bp, Artificial
  probe
  misc_feature (1)..(25): SEQ ID NO: 6262; WAN024A3O_at; Start 156; Stop 180
gagtcaacgcaatctatggcaatat

SEQ ID NO: 41586 - DNA, 25 bp, Artificial
  probe
  misc_feature (1)..(25): SEQ ID NO: 6262; WAN024A3O_at; Start 153; Stop 177
ggagagtcaacgcaatctatggcaa

SEQ ID NO: 41587 - DNA, 25 bp, Artificial
  probe
  misc_feature (1)..(25): SEQ ID NO: 6262; WAN024A3O_at; Start 98; Stop 122
tacaaacagcgaagaaagtatagga

SEQ ID NO: 41588 - DNA, 25 bp, Artificial
  probe
  misc_feature (1)..(25): SEQ ID NO: 6262; WAN024A3O_at; Start 168; Stop 192
tctatggcaatattttcgaagctag

SEQ ID NO: 41589 - DNA, 25 bp, Artificial
  probe
  misc_feature (1)..(25): SEQ ID NO: 6262; WAN024A3O_at; Start 170; Stop 194
tatggcaatattttcgaagctaggg

SEQ ID NO: 41590 - DNA, 25 bp, Artificial
  probe
  misc_feature (1)..(25): SEQ ID NO: 6262; WAN024A3O_at; Start 88; Stop 112
cattttgatttacaaacagcgaaga

SEQ ID NO: 41591 - DNA, 25 bp, Artificial
  probe
  misc_feature (1)..(25): SEQ ID NO: 6262; WAN024A3O_at; Start 116; Stop 140
tataggaagctgaaataaaatatag

SEQ ID NO: 41592 - DNA, 25 bp, Artificial
  probe
  misc_feature (1)..(25): SEQ ID NO: 6262; WAN024A3O_at; Start 142; Stop 166
tgaatcaatttggagagtcaacgca

SEQ ID NO: 41593 - DNA, 25 bp, Artificial
  probe
  misc_feature (1)..(25): SEQ ID NO: 6262; WAN024A3O_at; Start 121; Stop 145
gaagctgaaataaaatatagatgaa

SEQ ID NO: 41594 - DNA, 25 bp, Artificial
  probe
  misc_feature (1)..(25): SEQ ID NO: 6262; WAN024A3O_at; Start 87; Stop 111
gcattttgatttacaaacagcgaag

SEQ ID NO: 41595 - DNA, 25 bp, Artificial
  probe
  misc_feature (1)..(25): SEQ ID NO: 6262; WAN024A3O_at; Start 151; Stop 175
ttggagagtcaacgcaatctatggc

SEQ ID NO: 41596 - DNA, 25 bp, Artificial
  probe
  misc_feature (1)..(25): SEQ ID NO: 6262; WAN024A3O_at; Start 140; Stop 164
gatgaatcaatttggagagtcaacg

SEQ ID NO: 41597 - DNA, 25 bp, Artificial
  probe
  misc_feature (1)..(25): SEQ ID NO: 6262; WAN024A3O_at; Start 84; Stop 108
cttgcattttgatttacaaacagcg

SEQ ID NO: 41598 - DNA, 25 bp, Artificial
  probe
  misc_feature (1)..(25): SEQ ID NO: 6262; WAN024A3O_at; Start 144; Stop 168
aatcaatttggagagtcaacgcaat

SEQ ID NO: 41599 - DNA, 25 bp, Artificial
  probe
  misc_feature (1)..(25): SEQ ID NO: 6262; WAN024A3O_at; Start 79; Stop 103
tgtgtcttgcattttgatttacaaa

SEQ ID NO: 41600 - DNA, 25 bp, Artificial
  probe
  misc_feature (1)..(25): SEQ ID NO: 6262; WAN024A3O_at; Start 158; Stop 182
gtcaacgcaatctatggcaatattt

SEQ ID NO: 41601 - DNA, 25 bp, Artificial
  probe
  misc_feature (1)..(25): SEQ ID NO: 6262; WAN024A3O_at; Start 100; Stop 124
caaacagcgaagaaagtataggaag

SEQ ID NO: 41602 - DNA, 25 bp, Artificial
  probe
  misc_feature (1)..(25): SEQ ID NO: 6262; WAN024A3O_at; Start 150; Stop 174
tttggagagtcaacgcaatctatgg

SEQ ID NO: 41603 - DNA, 25 bp, Artificial
  probe
  misc_feature (1)..(25): SEQ ID NO: 6262; WAN024A3O_at; Start 91; Stop 115
tttgatttacaaacagcgaagaaag

SEQ ID NO: 41604 - DNA, 25 bp, Artificial
  probe
  misc_feature (1)..(25): SEQ ID NO: 6262; WAN024A3O_at; Start 143; Stop 167
gaatcaatttggagagtcaacgcaa

SEQ ID NO: 41605 - DNA, 25 bp, Artificial
  probe
  misc_feature (1)..(25): SEQ ID NO: 6262; WAN024A3O_at; Start 161; Stop 185
aacgcaatctatggcaatattttcg

SEQ ID NO: 41606 - DNA, 25 bp, Artificial
  probe
  misc_feature (1)..(25): SEQ ID NO: 6262; WAN024A3O_at; Start 188; Stop 212
gctagggggaagcattttaatttca

SEQ ID NO: 41607 - DNA, 25 bp, Artificial
  probe
  misc_feature (1)..(25): SEQ ID NO: 6262; WAN024A3O_at; Start 165; Stop 189
caatctatggcaatattttcgaagc

SEQ ID NO: 41608 - DNA, 25 bp, Artificial
  probe
  misc_feature (1)..(25): SEQ ID NO: 6262; WAN024A3O_at; Start 107; Stop 131
cgaagaaagtataggaagctgaaat

SEQ ID NO: 41609 - DNA, 25 bp, Artificial
  probe
  misc_feature (1)..(25): SEQ ID NO: 6262; WAN024A3O_at; Start 146; Stop 170
tcaatttggagagtcaacgcaatct

SEQ ID NO: 41610 - DNA, 25 bp, Artificial
  probe
  misc_feature (1)..(25): SEQ ID NO: 6262; WAN024A3O_at; Start 102; Stop 126
aacagcgaagaaagtataggaagct

SEQ ID NO: 41611 - DNA, 25 bp, Artificial
  probe
  misc_feature (1)..(25): SEQ ID NO: 6262; WAN024A3O_at; Start 163; Stop 187
cgcaatctatggcaatattttcgaa

SEQ ID NO: 41612 - DNA, 25 bp, Artificial
  probe
  misc_feature (1)..(25): SEQ ID NO: 6262; WAN024A3O_at; Start 154; Stop 178
gagagtcaacgcaatctatggcaat

SEQ ID NO: 41613 - DNA, 25 bp, Artificial
  probe
  misc_feature (1)..(25): SEQ ID NO: 6263; WAN024A3P_s_at; Start 6; Stop 30
gtgaatgattctgaaataactcata

SEQ ID NO: 41614 - DNA, 25 bp, Artificial
  probe
  misc_feature (1)..(25): SEQ ID NO: 6263; WAN024A3P_s_at; Start 119; Stop 143
acagctagctagagtttcaattgta

SEQ ID NO: 41615 - DNA, 25 bp, Artificial
  probe
  misc_feature (1)..(25): SEQ ID NO: 6263; WAN024A3P_s_at; Start 67; Stop 91
tggtgctactcatgtgtcttgcatt

SEQ ID NO: 41616 - DNA, 25 bp, Artificial
  probe
  misc_feature (1)..(25): SEQ ID NO: 6263; WAN024A3P_s_at; Start 59; Stop 83
aacaaatatggtgctactcatgtgt

SEQ ID NO: 41617 - DNA, 25 bp, Artificial
  probe
  misc_feature (1)..(25): SEQ ID NO: 6263; WAN024A3P_s_at; Start 118; Stop 142
tacagctagctagagtttcaattgt

SEQ ID NO: 41618 - DNA, 25 bp, Artificial
  probe
  misc_feature (1)..(25): SEQ ID NO: 6263; WAN024A3P_s_at; Start 123; Stop 147
ctagctagagtttcaattgtagatg

SEQ ID NO: 41619 - DNA, 25 bp, Artificial
  probe
  misc_feature (1)..(25): SEQ ID NO: 6263; WAN024A3P_s_at; Start 116; Stop 140
tctacagctagctagagtttcaatt

SEQ ID NO: 41620 - DNA, 25 bp, Artificial
  probe
  misc_feature (1)..(25): SEQ ID NO: 6263; WAN024A3P_s_at; Start 147; Stop 171
gttctttgaaataatatcttagcga

SEQ ID NO: 41621 - DNA, 25 bp, Artificial
  probe
  misc_feature (1)..(25): SEQ ID NO: 6263; WAN024A3P_s_at; Start 161; Stop 185
tatcttagcgatttattggtattag

SEQ ID NO: 41622 - DNA, 25 bp, Artificial
  probe
  misc_feature (1)..(25): SEQ ID NO: 6263; WAN024A3P_s_at; Start 87; Stop 111
gcattttaatttcaatgtactaggc

SEQ ID NO: 41623 - DNA, 25 bp, Artificial
  probe
  misc_feature (1)..(25): SEQ ID NO: 6263; WAN024A3P_s_at; Start 114; Stop 138
cttctacagctagctagagtttcaa

SEQ ID NO: 41624 - DNA, 25 bp, Artificial
  probe
  misc_feature (1)..(25): SEQ ID NO: 6263; WAN024A3P_s_at; Start 65; Stop 89
tatggtgctactcatgtgtcttgca

SEQ ID NO: 41625 - DNA, 25 bp, Artificial
  probe
  misc_feature (1)..(25): SEQ ID NO: 6263; WAN024A3P_s_at; Start 64; Stop 88
atatggtgctactcatgtgtcttgc

SEQ ID NO: 41626 - DNA, 25 bp, Artificial
  probe
  misc_feature (1)..(25): SEQ ID NO: 6263; WAN024A3P_s_at; Start 68; Stop 92
ggtgctactcatgtgtcttgcattt

SEQ ID NO: 41627 - DNA, 25 bp, Artificial
  probe
  misc_feature (1)..(25): SEQ ID NO: 6263; WAN024A3P_s_at; Start 113; Stop 137
tcttctacagctagctagagtttca

SEQ ID NO: 41628 - DNA, 25 bp, Artificial
  probe
  misc_feature (1)..(25): SEQ ID NO: 6263; WAN024A3P_s_at; Start 135; Stop 159
tcaattgtagatgttctttgaaata

SEQ ID NO: 41629 - DNA, 25 bp, Artificial
  probe
  misc_feature (1)..(25): SEQ ID NO: 6263; WAN024A3P_s_at; Start 4; Stop 28
tagtgaatgattctgaaataactca

SEQ ID NO: 41630 - DNA, 25 bp, Artificial
  probe
  misc_feature (1)..(25): SEQ ID NO: 6263; WAN024A3P_s_at; Start 17; Stop 41
tgaaataactcataatagtctcttg

SEQ ID NO: 41631 - DNA, 25 bp, Artificial
  probe
  misc_feature (1)..(25): SEQ ID NO: 6263; WAN024A3P_s_at; Start 117; Stop 141
ctacagctagctagagtttcaattg

SEQ ID NO: 41632 - DNA, 25 bp, Artificial
  probe
  misc_feature (1)..(25): SEQ ID NO: 6263; WAN024A3P_s_at; Start 174; Stop 198
tattggtattagaagatttagagaa

SEQ ID NO: 41633 - DNA, 25 bp, Artificial
  probe
  misc_feature (1)..(25): SEQ ID NO: 6263; WAN024A3P_s_at; Start 149; Stop 173
tctttgaaataatatcttagcgatt

SEQ ID NO: 41634 - DNA, 25 bp, Artificial
  probe
  misc_feature (1)..(25): SEQ ID NO: 6263; WAN024A3P_s_at; Start 126; Stop 150
gctagagtttcaattgtagatgttc

SEQ ID NO: 41635 - DNA, 25 bp, Artificial
  probe
  misc_feature (1)..(25): SEQ ID NO: 6263; WAN024A3P_s_at; Start 164; Stop 188
cttagcgatttattggtattagaag

SEQ ID NO: 41636 - DNA, 25 bp, Artificial
  probe
  misc_feature (1)..(25): SEQ ID NO: 6263; WAN024A3P_s_at; Start 130; Stop 154
gagtttcaattgtagatgttctttg

SEQ ID NO: 41637 - DNA, 25 bp, Artificial
  probe
  misc_feature (1)..(25): SEQ ID NO: 6263; WAN024A3P_s_at; Start 69; Stop 93
gtgctactcatgtgtcttgcatttt

SEQ ID NO: 41638 - DNA, 25 bp, Artificial
  probe
  misc_feature (1)..(25): SEQ ID NO: 6263; WAN024A3P_s_at; Start 12; Stop 36
gattctgaaataactcataatagtc

SEQ ID NO: 41639 - DNA, 25 bp, Artificial
  probe
  misc_feature (1)..(25): SEQ ID NO: 6263; WAN024A3P_s_at; Start 166; Stop 190
tagcgatttattggtattagaagat

SEQ ID NO: 41640 - DNA, 25 bp, Artificial
  probe
  misc_feature (1)..(25): SEQ ID NO: 6263; WAN024A3P_s_at; Start 15; Stop 39
tctgaaataactcataatagtctct

SEQ ID NO: 41641 - DNA, 25 bp, Artificial
  probe
  misc_feature (1)..(25): SEQ ID NO: 6263; WAN024A3P_s_at; Start 169; Stop 193
cgatttattggtattagaagattta

SEQ ID NO: 41642 - DNA, 25 bp, Artificial
  probe
  misc_feature (1)..(25): SEQ ID NO: 6263; WAN024A3P_s_at; Start 122; Stop 146
gctagctagagtttcaattgtagat

SEQ ID NO: 41643 - DNA, 25 bp, Artificial
  probe
  misc_feature (1)..(25): SEQ ID NO: 6263; WAN024A3P_s_at; Start 120; Stop 144
cagctagctagagtttcaattgtag

SEQ ID NO: 41644 - DNA, 25 bp, Artificial
  probe
  misc_feature (1)..(25): SEQ ID NO: 6263; WAN024A3P_s_at; Start 63; Stop 87
aatatggtgctactcatgtgtcttg

SEQ ID NO: 41645 - DNA, 25 bp, Artificial
  probe
  misc_feature (1)..(25): SEQ ID NO: 6263; WAN024A3P_s_at; Start 61; Stop 85
caaatatggtgctactcatgtgtct

SEQ ID NO: 41646 - DNA, 25 bp, Artificial
  probe
  misc_feature (1)..(25): SEQ ID NO: 6263; WAN024A3P_s_at; Start 60; Stop 84
acaaatatggtgctactcatgtgtc

SEQ ID NO: 41647 - DNA, 25 bp, Artificial
  probe
  misc_feature (1)..(25): SEQ ID NO: 7182; WAN024A3Q_s_at; Start 115; Stop 139
aaatgcaagacacatgagtagcacc

SEQ ID NO: 41648 - DNA, 25 bp, Artificial
  probe
  misc_feature (1)..(25): SEQ ID NO: 7182; WAN024A3Q_s_at; Start 36; Stop 60
tcgctaagatattatttcaaagaac

SEQ ID NO: 41649 - DNA, 25 bp, Artificial
  probe
  misc_feature (1)..(25): SEQ ID NO: 7182; WAN024A3Q_s_at; Start 116; Stop 140
aatgcaagacacatgagtagcacca

SEQ ID NO: 41650 - DNA, 25 bp, Artificial
  probe
  misc_feature (1)..(25): SEQ ID NO: 7182; WAN024A3Q_s_at; Start 16; Stop 40
aatcttctaataccaataaatcgct

SEQ ID NO: 41651 - DNA, 25 bp, Artificial
  probe
  misc_feature (1)..(25): SEQ ID NO: 7182; WAN024A3Q_s_at; Start 60; Stop 84
catctacaattgaaactctagctag

SEQ ID NO: 41652 - DNA, 25 bp, Artificial
  probe
  misc_feature (1)..(25): SEQ ID NO: 7182; WAN024A3Q_s_at; Start 5; Stop 29
gaatttctctaaatcttctaatacc

SEQ ID NO: 41653 - DNA, 25 bp, Artificial
  probe
  misc_feature (1)..(25): SEQ ID NO: 7182; WAN024A3Q_s_at; Start 19; Stop 43
cttctaataccaataaatcgctaag

SEQ ID NO: 41654 - DNA, 25 bp, Artificial
  probe
  misc_feature (1)..(25): SEQ ID NO: 7182; WAN024A3Q_s_at; Start 70; Stop 94
tgaaactctagctagctgtagaaga

SEQ ID NO: 41655 - DNA, 25 bp, Artificial
  probe
  misc_feature (1)..(25): SEQ ID NO: 7182; WAN024A3Q_s_at; Start 114; Stop 138
aaaatgcaagacacatgagtagcac

SEQ ID NO: 41656 - DNA, 25 bp, Artificial
  probe
  misc_feature (1)..(25): SEQ ID NO: 7182; WAN024A3Q_s_at; Start 66; Stop 90
caattgaaactctagctagctgtag

SEQ ID NO: 41657 - DNA, 25 bp, Artificial
  probe
  misc_feature (1)..(25): SEQ ID NO: 7182; WAN024A3Q_s_at; Start 123; Stop 147
gacacatgagtagcaccatatttgt

SEQ ID NO: 41658 - DNA, 25 bp, Artificial
  probe
  misc_feature (1)..(25): SEQ ID NO: 7182; WAN024A3Q_s_at; Start 67; Stop 91
aattgaaactctagctagctgtaga

SEQ ID NO: 41659 - DNA, 25 bp, Artificial
  probe
  misc_feature (1)..(25): SEQ ID NO: 7182; WAN024A3Q_s_at; Start 180; Stop 204
gagttatttcagaatcattcactac

SEQ ID NO: 41660 - DNA, 25 bp, Artificial
  probe
  misc_feature (1)..(25): SEQ ID NO: 7182; WAN024A3Q_s_at; Start 14; Stop 38
taaatcttctaataccaataaatcg

SEQ ID NO: 41661 - DNA, 25 bp, Artificial
  probe
  misc_feature (1)..(25): SEQ ID NO: 7182; WAN024A3Q_s_at; Start 22; Stop 46
ctaataccaataaatcgctaagata

SEQ ID NO: 41662 - DNA, 25 bp, Artificial
  probe
  misc_feature (1)..(25): SEQ ID NO: 7182; WAN024A3Q_s_at; Start 119; Stop 143
gcaagacacatgagtagcaccatat

SEQ ID NO: 41663 - DNA, 25 bp, Artificial
  probe
  misc_feature (1)..(25): SEQ ID NO: 7182; WAN024A3Q_s_at; Start 1; Stop 25
gaaagaatttctctaaatcttctaa

SEQ ID NO: 41664 - DNA, 25 bp, Artificial
  probe
  misc_feature (1)..(25): SEQ ID NO: 7182; WAN024A3Q_s_at; Start 53; Stop 77
caaagaacatctacaattgaaactc

SEQ ID NO: 41665 - DNA, 25 bp, Artificial
  probe
  misc_feature (1)..(25): SEQ ID NO: 7182; WAN024A3Q_s_at; Start 96; Stop 120
gcctagtacattgaaattaaaatgc

SEQ ID NO: 41666 - DNA, 25 bp, Artificial
  probe
  misc_feature (1)..(25): SEQ ID NO: 7182; WAN024A3Q_s_at; Start 64; Stop 88
tacaattgaaactctagctagctgt

SEQ ID NO: 41667 - DNA, 25 bp, Artificial
  probe
  misc_feature (1)..(25): SEQ ID NO: 7182; WAN024A3Q_s_at; Start 48; Stop 72
tatttcaaagaacatctacaattga

SEQ ID NO: 41668 - DNA, 25 bp, Artificial
  probe
  misc_feature (1)..(25): SEQ ID NO: 7182; WAN024A3Q_s_at; Start 166; Stop 190
caagagactattatgagttatttca

SEQ ID NO: 41669 - DNA, 25 bp, Artificial
  probe
  misc_feature (1)..(25): SEQ ID NO: 7182; WAN024A3Q_s_at; Start 18; Stop 42
tcttctaataccaataaatcgctaa

SEQ ID NO: 41670 - DNA, 25 bp, Artificial
  probe
  misc_feature (1)..(25): SEQ ID NO: 7182; WAN024A3Q_s_at; Start 169; Stop 193
gagactattatgagttatttcagaa

SEQ ID NO: 41671 - DNA, 25 bp, Artificial
  probe
  misc_feature (1)..(25): SEQ ID NO: 7182; WAN024A3Q_s_at; Start 118; Stop 142
tgcaagacacatgagtagcaccata

SEQ ID NO: 41672 - DNA, 25 bp, Artificial
  probe
  misc_feature (1)..(25): SEQ ID NO: 7182; WAN024A3Q_s_at; Start 171; Stop 195
gactattatgagttatttcagaatc

SEQ ID NO: 41673 - DNA, 25 bp, Artificial
  probe
  misc_feature (1)..(25): SEQ ID NO: 7182; WAN024A3Q_s_at; Start 177; Stop 201
tatgagttatttcagaatcattcac

SEQ ID NO: 41674 - DNA, 25 bp, Artificial
  probe
  misc_feature (1)..(25): SEQ ID NO: 7182; WAN024A3Q_s_at; Start 124; Stop 148
acacatgagtagcaccatatttgtt

SEQ ID NO: 41675 - DNA, 25 bp, Artificial
  probe
  misc_feature (1)..(25): SEQ ID NO: 7182; WAN024A3Q_s_at; Start 182; Stop 206
gttatttcagaatcattcactactt

SEQ ID NO: 41676 - DNA, 25 bp, Artificial
  probe
  misc_feature (1)..(25): SEQ ID NO: 7182; WAN024A3Q_s_at; Start 57; Stop 81
gaacatctacaattgaaactctagc

SEQ ID NO: 41677 - DNA, 25 bp, Artificial
  probe
  misc_feature (1)..(25): SEQ ID NO: 7182; WAN024A3Q_s_at; Start 120; Stop 144
caagacacatgagtagcaccatatt

SEQ ID NO: 41678 - DNA, 25 bp, Artificial
  probe
  misc_feature (1)..(25): SEQ ID NO: 7182; WAN024A3Q_s_at; Start 122; Stop 146
agacacatgagtagcaccatatttg

SEQ ID NO: 41679 - DNA, 25 bp, Artificial
  probe
  misc_feature (1)..(25): SEQ ID NO: 7182; WAN024A3Q_s_at; Start 62; Stop 86
tctacaattgaaactctagctagct

SEQ ID NO: 41680 - DNA, 25 bp, Artificial
  probe
  misc_feature (1)..(25): SEQ ID NO: 7182; WAN024A3Q_s_at; Start 69; Stop 93
ttgaaactctagctagctgtagaag

SEQ ID NO: 41681 - DNA, 25 bp, Artificial
  probe
  misc_feature (1)..(25): SEQ ID NO: 7183; WAN024A3R_at; Start 124; Stop 148
cccctagcttcgaaaatattgccat

SEQ ID NO: 41682 - DNA, 25 bp, Artificial
  probe
  misc_feature (1)..(25): SEQ ID NO: 7183; WAN024A3R_at; Start 132; Stop 156
ttcgaaaatattgccatagattgcg

SEQ ID NO: 41683 - DNA, 25 bp, Artificial
  probe
  misc_feature (1)..(25): SEQ ID NO: 7183; WAN024A3R_at; Start 198; Stop 222
cctatactttcttcgctgtttgtaa

SEQ ID NO: 41684 - DNA, 25 bp, Artificial
  probe
  misc_feature (1)..(25): SEQ ID NO: 7183; WAN024A3R_at; Start 126; Stop 150
cctagcttcgaaaatattgccatag

SEQ ID NO: 41685 - DNA, 25 bp, Artificial
  probe
  misc_feature (1)..(25): SEQ ID NO: 7183; WAN024A3R_at; Start 191; Stop 215
tcagcttcctatactttcttcgctg

SEQ ID NO: 41686 - DNA, 25 bp, Artificial
  probe
  misc_feature (1)..(25): SEQ ID NO: 7183; WAN024A3R_at; Start 148; Stop 172
tagattgcgttgactctccaaattg

SEQ ID NO: 41687 - DNA, 25 bp, Artificial
  probe
  misc_feature (1)..(25): SEQ ID NO: 7183; WAN024A3R_at; Start 216; Stop 240
tttgtaaatcaaaatgcaagacaca

SEQ ID NO: 41688 - DNA, 25 bp, Artificial
  probe
  misc_feature (1)..(25): SEQ ID NO: 7183; WAN024A3R_at; Start 211; Stop 235
cgctgtttgtaaatcaaaatgcaag

SEQ ID NO: 41689 - DNA, 25 bp, Artificial
  probe
  misc_feature (1)..(25): SEQ ID NO: 7183; WAN024A3R_at; Start 128; Stop 152
tagcttcgaaaatattgccatagat

SEQ ID NO: 41690 - DNA, 25 bp, Artificial
  probe
  misc_feature (1)..(25): SEQ ID NO: 7183; WAN024A3R_at; Start 125; Stop 149
ccctagcttcgaaaatattgccata

SEQ ID NO: 41691 - DNA, 25 bp, Artificial
  probe
  misc_feature (1)..(25): SEQ ID NO: 7183; WAN024A3R_at; Start 142; Stop 166
ttgccatagattgcgttgactctcc

SEQ ID NO: 41692 - DNA, 25 bp, Artificial
  probe
  misc_feature (1)..(25): SEQ ID NO: 7183; WAN024A3R_at; Start 194; Stop 218
gcttcctatactttcttcgctgttt

SEQ ID NO: 41693 - DNA, 25 bp, Artificial
  probe
  misc_feature (1)..(25): SEQ ID NO: 7183; WAN024A3R_at; Start 159; Stop 183
gactctccaaattgattcatctata

SEQ ID NO: 41694 - DNA, 25 bp, Artificial
  probe
  misc_feature (1)..(25): SEQ ID NO: 7183; WAN024A3R_at; Start 172; Stop 196
gattcatctatattttatttcagct

SEQ ID NO: 41695 - DNA, 25 bp, Artificial
  probe
  misc_feature (1)..(25): SEQ ID NO: 7183; WAN024A3R_at; Start 130; Stop 154
gcttcgaaaatattgccatagattg

SEQ ID NO: 41696 - DNA, 25 bp, Artificial
  probe
  misc_feature (1)..(25): SEQ ID NO: 7183; WAN024A3R_at; Start 135; Stop 159
gaaaatattgccatagattgcgttg

SEQ ID NO: 41697 - DNA, 25 bp, Artificial
  probe
  misc_feature (1)..(25): SEQ ID NO: 7183; WAN024A3R_at; Start 150; Stop 174
gattgcgttgactctccaaattgat

SEQ ID NO: 41698 - DNA, 25 bp, Artificial
  probe
  misc_feature (1)..(25): SEQ ID NO: 7183; WAN024A3R_at; Start 215; Stop 239
gtttgtaaatcaaaatgcaagacac

SEQ ID NO: 41699 - DNA, 25 bp, Artificial
  probe
  misc_feature (1)..(25): SEQ ID NO: 7183; WAN024A3R_at; Start 204; Stop 228
ctttcttcgctgtttgtaaatcaaa

SEQ ID NO: 41700 - DNA, 25 bp, Artificial
  probe
  misc_feature (1)..(25): SEQ ID NO: 7183; WAN024A3R_at; Start 188; Stop 212
atttcagcttcctatactttcttcg

SEQ ID NO: 41701 - DNA, 25 bp, Artificial
  probe
  misc_feature (1)..(25): SEQ ID NO: 7183; WAN024A3R_at; Start 138; Stop 162
aatattgccatagattgcgttgact

SEQ ID NO: 41702 - DNA, 25 bp, Artificial
  probe
  misc_feature (1)..(25): SEQ ID NO: 7183; WAN024A3R_at; Start 145; Stop 169
ccatagattgcgttgactctccaaa

SEQ ID NO: 41703 - DNA, 25 bp, Artificial
  probe
  misc_feature (1)..(25): SEQ ID NO: 7183; WAN024A3R_at; Start 137; Stop 161
aaatattgccatagattgcgttgac

SEQ ID NO: 41704 - DNA, 25 bp, Artificial
  probe
  misc_feature (1)..(25): SEQ ID NO: 7183; WAN024A3R_at; Start 153; Stop 177
tgcgttgactctccaaattgattca

SEQ ID NO: 41705 - DNA, 25 bp, Artificial
  probe
  misc_feature (1)..(25): SEQ ID NO: 7183; WAN024A3R_at; Start 202; Stop 226
tactttcttcgctgtttgtaaatca

SEQ ID NO: 41706 - DNA, 25 bp, Artificial
  probe
  misc_feature (1)..(25): SEQ ID NO: 7183; WAN024A3R_at; Start 111; Stop 135
attaaaatgcttccccctagcttcg

SEQ ID NO: 41707 - DNA, 25 bp, Artificial
  probe
  misc_feature (1)..(25): SEQ ID NO: 7183; WAN024A3R_at; Start 144; Stop 168
gccatagattgcgttgactctccaa

SEQ ID NO: 41708 - DNA, 25 bp, Artificial
  probe
  misc_feature (1)..(25): SEQ ID NO: 7183; WAN024A3R_at; Start 146; Stop 170
catagattgcgttgactctccaaat

SEQ ID NO: 41709 - DNA, 25 bp, Artificial
  probe
  misc_feature (1)..(25): SEQ ID NO: 7183; WAN024A3R_at; Start 208; Stop 232
cttcgctgtttgtaaatcaaaatgc

SEQ ID NO: 41710 - DNA, 25 bp, Artificial
  probe
  misc_feature (1)..(25): SEQ ID NO: 7183; WAN024A3R_at; Start 155; Stop 179
cgttgactctccaaattgattcatc

SEQ ID NO: 41711 - DNA, 25 bp, Artificial
  probe
  misc_feature (1)..(25): SEQ ID NO: 7183; WAN024A3R_at; Start 134; Stop 158
cgaaaatattgccatagattgcgtt

SEQ ID NO: 41712 - DNA, 25 bp, Artificial
  probe
  misc_feature (1)..(25): SEQ ID NO: 7183; WAN024A3R_at; Start 107; Stop 131
tgaaattaaaatgcttccccctagc

SEQ ID NO: 41713 - DNA, 25 bp, Artificial
  probe
  misc_feature (1)..(25): SEQ ID NO: 7183; WAN024A3R_at; Start 175; Stop 199
tcatctatattttatttcagcttcc

SEQ ID NO: 41714 - DNA, 25 bp, Artificial
  probe
  misc_feature (1)..(25): SEQ ID NO: 7183; WAN024A3R_at; Start 140; Stop 164
tattgccatagattgcgttgactct

SEQ ID NO: 41715 - DNA, 25 bp, Artificial
  probe
  misc_feature (1)..(25): SEQ ID NO: 572; WAN024A3S_at; Start 87; Stop 111
tttcacttgacaaaaattggtctat

SEQ ID NO: 41716 - DNA, 25 bp, Artificial
  probe
  misc_feature (1)..(25): SEQ ID NO: 572; WAN024A3S_at; Start 94; Stop 118
tgacaaaaattggtctataccatat

SEQ ID NO: 41717 - DNA, 25 bp, Artificial
  probe
  misc_feature (1)..(25): SEQ ID NO: 572; WAN024A3S_at; Start 86; Stop 110
ttttcacttgacaaaaattggtcta

SEQ ID NO: 41718 - DNA, 25 bp, Artificial
  probe
  misc_feature (1)..(25): SEQ ID NO: 572; WAN024A3S_at; Start 17; Stop 41
tctaagttctaatcctatccattat

SEQ ID NO: 41719 - DNA, 25 bp, Artificial
  probe
  misc_feature (1)..(25): SEQ ID NO: 572; WAN024A3S_at; Start 10; Stop 34
cattctttctaagttctaatcctat

SEQ ID NO: 41720 - DNA, 25 bp, Artificial
  probe
  misc_feature (1)..(25): SEQ ID NO: 572; WAN024A3S_at; Start 27; Stop 51
aatcctatccattataacacgtttc

SEQ ID NO: 41721 - DNA, 25 bp, Artificial
  probe
  misc_feature (1)..(25): SEQ ID NO: 572; WAN024A3S_at; Start 89; Stop 113
tcacttgacaaaaattggtctatac

SEQ ID NO: 41722 - DNA, 25 bp, Artificial
  probe
  misc_feature (1)..(25): SEQ ID NO: 572; WAN024A3S_at; Start 13; Stop 37
tctttctaagttctaatcctatcca

SEQ ID NO: 41723 - DNA, 25 bp, Artificial
  probe
  misc_feature (1)..(25): SEQ ID NO: 572; WAN024A3S_at; Start 36; Stop 60
cattataacacgtttcaagtttgga

SEQ ID NO: 41724 - DNA, 25 bp, Artificial
  probe
  misc_feature (1)..(25): SEQ ID NO: 572; WAN024A3S_at; Start 95; Stop 119
gacaaaaattggtctataccatata

SEQ ID NO: 41725 - DNA, 25 bp, Artificial
  probe
  misc_feature (1)..(25): SEQ ID NO: 572; WAN024A3S_at; Start 32; Stop 56
tatccattataacacgtttcaagtt

SEQ ID NO: 41726 - DNA, 25 bp, Artificial
  probe
  misc_feature (1)..(25): SEQ ID NO: 572; WAN024A3S_at; Start 30; Stop 54
cctatccattataacacgtttcaag

SEQ ID NO: 41727 - DNA, 25 bp, Artificial
  probe
  misc_feature (1)..(25): SEQ ID NO: 572; WAN024A3S_at; Start 97; Stop 121
caaaaattggtctataccatataat

SEQ ID NO: 41728 - DNA, 25 bp, Artificial
  probe
  misc_feature (1)..(25): SEQ ID NO: 572; WAN024A3S_at; Start 23; Stop 47
ttctaatcctatccattataacacg

SEQ ID NO: 41729 - DNA, 25 bp, Artificial
  probe
  misc_feature (1)..(25): SEQ ID NO: 572; WAN024A3S_at; Start 26; Stop 50
taatcctatccattataacacgttt

SEQ ID NO: 41730 - DNA, 25 bp, Artificial
  probe
  misc_feature (1)..(25): SEQ ID NO: 572; WAN024A3S_at; Start 92; Stop 116
cttgacaaaaattggtctataccat

SEQ ID NO: 41731 - DNA, 25 bp, Artificial
  probe
  misc_feature (1)..(25): SEQ ID NO: 572; WAN024A3S_at; Start 39; Stop 63
tataacacgtttcaagtttggacgc

SEQ ID NO: 41732 - DNA, 25 bp, Artificial
  probe
  misc_feature (1)..(25): SEQ ID NO: 572; WAN024A3S_at; Start 91; Stop 115
acttgacaaaaattggtctatacca

SEQ ID NO: 41733 - DNA, 25 bp, Artificial
  probe
  misc_feature (1)..(25): SEQ ID NO: 572; WAN024A3S_at; Start 34; Stop 58
tccattataacacgtttcaagtttg

SEQ ID NO: 41734 - DNA, 25 bp, Artificial
  probe
  misc_feature (1)..(25): SEQ ID NO: 572; WAN024A3S_at; Start 7; Stop 31
gttcattctttctaagttctaatcc

SEQ ID NO: 41735 - DNA, 25 bp, Artificial
  probe
  misc_feature (1)..(25): SEQ ID NO: 572; WAN024A3S_at; Start 82; Stop 106
atcgttttcacttgacaaaaattgg

SEQ ID NO: 41736 - DNA, 25 bp, Artificial
  probe
  misc_feature (1)..(25): SEQ ID NO: 572; WAN024A3S_at; Start 24; Stop 48
tctaatcctatccattataacacgt

SEQ ID NO: 41737 - DNA, 25 bp, Artificial
  probe
  misc_feature (1)..(25): SEQ ID NO: 572; WAN024A3S_at; Start 40; Stop 64
ataacacgtttcaagtttggacgct

SEQ ID NO: 41738 - DNA, 25 bp, Artificial
  probe
  misc_feature (1)..(25): SEQ ID NO: 572; WAN024A3S_at; Start 105; Stop 129
ggtctataccatataataaatatag

SEQ ID NO: 41739 - DNA, 25 bp, Artificial
  probe
  misc_feature (1)..(25): SEQ ID NO: 572; WAN024A3S_at; Start 35; Stop 59
ccattataacacgtttcaagtttgg

SEQ ID NO: 41740 - DNA, 25 bp, Artificial
  probe
  misc_feature (1)..(25): SEQ ID NO: 572; WAN024A3S_at; Start 19; Stop 43
taagttctaatcctatccattataa

SEQ ID NO: 41741 - DNA, 25 bp, Artificial
  probe
  misc_feature (1)..(25): SEQ ID NO: 572; WAN024A3S_at; Start 29; Stop 53
tcctatccattataacacgtttcaa

SEQ ID NO: 41742 - DNA, 25 bp, Artificial
  probe
  misc_feature (1)..(25): SEQ ID NO: 572; WAN024A3S_at; Start 74; Stop 98
gaaattaaatcgttttcacttgaca

SEQ ID NO: 41743 - DNA, 25 bp, Artificial
  probe
  misc_feature (1)..(25): SEQ ID NO: 572; WAN024A3S_at; Start 14; Stop 38
ctttctaagttctaatcctatccat

SEQ ID NO: 41744 - DNA, 25 bp, Artificial
  probe
  misc_feature (1)..(25): SEQ ID NO: 572; WAN024A3S_at; Start 90; Stop 114
cacttgacaaaaattggtctatacc

SEQ ID NO: 41745 - DNA, 25 bp, Artificial
  probe
  misc_feature (1)..(25): SEQ ID NO: 572; WAN024A3S_at; Start 42; Stop 66
aacacgtttcaagtttggacgctct

SEQ ID NO: 41746 - DNA, 25 bp, Artificial
  probe
  misc_feature (1)..(25): SEQ ID NO: 572; WAN024A3S_at; Start 43; Stop 67
acacgtttcaagtttggacgctctt

SEQ ID NO: 41747 - DNA, 25 bp, Artificial
  probe
  misc_feature (1)..(25): SEQ ID NO: 572; WAN024A3S_at; Start 44; Stop 68
cacgtttcaagtttggacgctcttt

SEQ ID NO: 41748 - DNA, 25 bp, Artificial
  probe
  misc_feature (1)..(25): SEQ ID NO: 572; WAN024A3S_at; Start 41; Stop 65
taacacgtttcaagtttggacgctc

SEQ ID NO: 41749 - DNA, 25 bp, Artificial
  probe
  misc_feature (1)..(25): SEQ ID NO: 3509; WAN024A3T_at; Start 37; Stop 61
ggtatagaccaatttttgtcaagtg

SEQ ID NO: 41750 - DNA, 25 bp, Artificial
  probe
  misc_feature (1)..(25): SEQ ID NO: 3509; WAN024A3T_at; Start 35; Stop 59
atggtatagaccaatttttgtcaag

SEQ ID NO: 41751 - DNA, 25 bp, Artificial
  probe
  misc_feature (1)..(25): SEQ ID NO: 3509; WAN024A3T_at; Start 100; Stop 124
gaaacgtgttataatggataggatt

SEQ ID NO: 41752 - DNA, 25 bp, Artificial
  probe
  misc_feature (1)..(25): SEQ ID NO: 3509; WAN024A3T_at; Start 32; Stop 56
tatatggtatagaccaatttttgtc

SEQ ID NO: 41753 - DNA, 25 bp, Artificial
  probe
  misc_feature (1)..(25): SEQ ID NO: 3509; WAN024A3T_at; Start 83; Stop 107
aaagagcgtccaaacttgaaacgtg

SEQ ID NO: 41754 - DNA, 25 bp, Artificial
  probe
  misc_feature (1)..(25): SEQ ID NO: 3509; WAN024A3T_at; Start 84; Stop 108
aagagcgtccaaacttgaaacgtgt

SEQ ID NO: 41755 - DNA, 25 bp, Artificial
  probe
  misc_feature (1)..(25): SEQ ID NO: 3509; WAN024A3T_at; Start 109; Stop 133
tataatggataggattagaacttag

SEQ ID NO: 41756 - DNA, 25 bp, Artificial
  probe
  misc_feature (1)..(25): SEQ ID NO: 3509; WAN024A3T_at; Start 120; Stop 144
ggattagaacttagaaagaatgaac

SEQ ID NO: 41757 - DNA, 25 bp, Artificial
  probe
  misc_feature (1)..(25): SEQ ID NO: 3509; WAN024A3T_at; Start 87; Stop 111
agcgtccaaacttgaaacgtgttat

SEQ ID NO: 41758 - DNA, 25 bp, Artificial
  probe
  misc_feature (1)..(25): SEQ ID NO: 3509; WAN024A3T_at; Start 53; Stop 77
tgtcaagtgaaaacgatttaatttc

SEQ ID NO: 41759 - DNA, 25 bp, Artificial
  probe
  misc_feature (1)..(25): SEQ ID NO: 3509; WAN024A3T_at; Start 23; Stop 47
tatatttattatatggtatagacca

SEQ ID NO: 41760 - DNA, 25 bp, Artificial
  probe
  misc_feature (1)..(25): SEQ ID NO: 3509; WAN024A3T_at; Start 104; Stop 128
cgtgttataatggataggattagaa

SEQ ID NO: 41761 - DNA, 25 bp, Artificial
  probe
  misc_feature (1)..(25): SEQ ID NO: 3509; WAN024A3T_at; Start 118; Stop 142
taggattagaacttagaaagaatga

SEQ ID NO: 41762 - DNA, 25 bp, Artificial
  probe
  misc_feature (1)..(25): SEQ ID NO: 3509; WAN024A3T_at; Start 98; Stop 122
ttgaaacgtgttataatggatagga

SEQ ID NO: 41763 - DNA, 25 bp, Artificial
  probe
  misc_feature (1)..(25): SEQ ID NO: 3509; WAN024A3T_at; Start 93; Stop 117
caaacttgaaacgtgttataatgga

SEQ ID NO: 41764 - DNA, 25 bp, Artificial
  probe
  misc_feature (1)..(25): SEQ ID NO: 3509; WAN024A3T_at; Start 41; Stop 65
tagaccaatttttgtcaagtgaaaa

SEQ ID NO: 41765 - DNA, 25 bp, Artificial
  probe
  misc_feature (1)..(25): SEQ ID NO: 3509; WAN024A3T_at; Start 102; Stop 126
aacgtgttataatggataggattag

SEQ ID NO: 41766 - DNA, 25 bp, Artificial
  probe
  misc_feature (1)..(25): SEQ ID NO: 3509; WAN024A3T_at; Start 91; Stop 115
tccaaacttgaaacgtgttataatg

SEQ ID NO: 41767 - DNA, 25 bp, Artificial
  probe
  misc_feature (1)..(25): SEQ ID NO: 3509; WAN024A3T_at; Start 39; Stop 63
tatagaccaatttttgtcaagtgaa

SEQ ID NO: 41768 - DNA, 25 bp, Artificial
  probe
  misc_feature (1)..(25): SEQ ID NO: 3509; WAN024A3T_at; Start 116; Stop 140
gataggattagaacttagaaagaat

SEQ ID NO: 41769 - DNA, 25 bp, Artificial
  probe
  misc_feature (1)..(25): SEQ ID NO: 3509; WAN024A3T_at; Start 126; Stop 150
gaacttagaaagaatgaacaaatat

SEQ ID NO: 41770 - DNA, 25 bp, Artificial
  probe
  misc_feature (1)..(25): SEQ ID NO: 3509; WAN024A3T_at; Start 86; Stop 110
gagcgtccaaacttgaaacgtgtta

SEQ ID NO: 41771 - DNA, 25 bp, Artificial
  probe
  misc_feature (1)..(25): SEQ ID NO: 3509; WAN024A3T_at; Start 114; Stop 138
tggataggattagaacttagaaaga

SEQ ID NO: 41772 - DNA, 25 bp, Artificial
  probe
  misc_feature (1)..(25): SEQ ID NO: 3509; WAN024A3T_at; Start 92; Stop 116
ccaaacttgaaacgtgttataatgg

SEQ ID NO: 41773 - DNA, 25 bp, Artificial
  probe
  misc_feature (1)..(25): SEQ ID NO: 3509; WAN024A3T_at; Start 106; Stop 130
tgttataatggataggattagaact

SEQ ID NO: 41774 - DNA, 25 bp, Artificial
  probe
  misc_feature (1)..(25): SEQ ID NO: 3509; WAN024A3T_at; Start 88; Stop 112
gcgtccaaacttgaaacgtgttata

SEQ ID NO: 41775 - DNA, 25 bp, Artificial
  probe
  misc_feature (1)..(25): SEQ ID NO: 3509; WAN024A3T_at; Start 85; Stop 109
agagcgtccaaacttgaaacgtgtt

SEQ ID NO: 41776 - DNA, 25 bp, Artificial
  probe
  misc_feature (1)..(25): SEQ ID NO: 3509; WAN024A3T_at; Start 97; Stop 121
cttgaaacgtgttataatggatagg

SEQ ID NO: 41777 - DNA, 25 bp, Artificial
  probe
  misc_feature (1)..(25): SEQ ID NO: 3509; WAN024A3T_at; Start 111; Stop 135
taatggataggattagaacttagaa

SEQ ID NO: 41778 - DNA, 25 bp, Artificial
  probe
  misc_feature (1)..(25): SEQ ID NO: 3509; WAN024A3T_at; Start 45; Stop 69
ccaatttttgtcaagtgaaaacgat

SEQ ID NO: 41779 - DNA, 25 bp, Artificial
  probe
  misc_feature (1)..(25): SEQ ID NO: 3509; WAN024A3T_at; Start 115; Stop 139
ggataggattagaacttagaaagaa

SEQ ID NO: 41780 - DNA, 25 bp, Artificial
  probe
  misc_feature (1)..(25): SEQ ID NO: 3509; WAN024A3T_at; Start 55; Stop 79
tcaagtgaaaacgatttaatttcta

SEQ ID NO: 41781 - DNA, 25 bp, Artificial
  probe
  misc_feature (1)..(25): SEQ ID NO: 3509; WAN024A3T_at; Start 46; Stop 70
caatttttgtcaagtgaaaacgatt

SEQ ID NO: 41782 - DNA, 25 bp, Artificial
  probe
  misc_feature (1)..(25): SEQ ID NO: 3509; WAN024A3T_at; Start 99; Stop 123
tgaaacgtgttataatggataggat

SEQ ID NO: 41783 - DNA, 25 bp, Artificial
  probe
  misc_feature (1)..(25): SEQ ID NO: 139; WAN024A3U_at; Start 10; Stop 34
agcaatgttctattgaacgctttca

SEQ ID NO: 41784 - DNA, 25 bp, Artificial
  probe
  misc_feature (1)..(25): SEQ ID NO: 139; WAN024A3U_at; Start 7; Stop 31
aaaagcaatgttctattgaacgctt

SEQ ID NO: 41785 - DNA, 25 bp, Artificial
  probe
  misc_feature (1)..(25): SEQ ID NO: 139; WAN024A3U_at; Start 23; Stop 47
tgaacgctttcaactcttgtataaa

SEQ ID NO: 41786 - DNA, 25 bp, Artificial
  probe
  misc_feature (1)..(25): SEQ ID NO: 139; WAN024A3U_at; Start 13; Stop 37
aatgttctattgaacgctttcaact

SEQ ID NO: 41787 - DNA, 25 bp, Artificial
  probe
  misc_feature (1)..(25): SEQ ID NO: 139; WAN024A3U_at; Start 65; Stop 89
attaaaccgcatttttgcttgacaa

SEQ ID NO: 41788 - DNA, 25 bp, Artificial
  probe
  misc_feature (1)..(25): SEQ ID NO: 139; WAN024A3U_at; Start 27; Stop 51
cgctttcaactcttgtataaatgga

SEQ ID NO: 41789 - DNA, 25 bp, Artificial
  probe
  misc_feature (1)..(25): SEQ ID NO: 139; WAN024A3U_at; Start 20; Stop 44
tattgaacgctttcaactcttgtat

SEQ ID NO: 41790 - DNA, 25 bp, Artificial
  probe
  misc_feature (1)..(25): SEQ ID NO: 139; WAN024A3U_at; Start 28; Stop 52
gctttcaactcttgtataaatggaa

SEQ ID NO: 41791 - DNA, 25 bp, Artificial
  probe
  misc_feature (1)..(25): SEQ ID NO: 139; WAN024A3U_at; Start 30; Stop 54
tttcaactcttgtataaatggaaga

SEQ ID NO: 41792 - DNA, 25 bp, Artificial
  probe
  misc_feature (1)..(25): SEQ ID NO: 139; WAN024A3U_at; Start 4; Stop 28
taaaaaagcaatgttctattgaacg

SEQ ID NO: 41793 - DNA, 25 bp, Artificial
  probe
  misc_feature (1)..(25): SEQ ID NO: 139; WAN024A3U_at; Start 73; Stop 97
gcatttttgcttgacaattattcct

SEQ ID NO: 41794 - DNA, 25 bp, Artificial
  probe
  misc_feature (1)..(25): SEQ ID NO: 139; WAN024A3U_at; Start 68; Stop 92
aaaccgcatttttgcttgacaatta

SEQ ID NO: 41795 - DNA, 25 bp, Artificial
  probe
  misc_feature (1)..(25): SEQ ID NO: 139; WAN024A3U_at; Start 24; Stop 48
gaacgctttcaactcttgtataaat

SEQ ID NO: 41796 - DNA, 25 bp, Artificial
  probe
  misc_feature (1)..(25): SEQ ID NO: 139; WAN024A3U_at; Start 67; Stop 91
taaaccgcatttttgcttgacaatt

SEQ ID NO: 41797 - DNA, 25 bp, Artificial
  probe
  misc_feature (1)..(25): SEQ ID NO: 139; WAN024A3U_at; Start 19; Stop 43
ctattgaacgctttcaactcttgta

SEQ ID NO: 41798 - DNA, 25 bp, Artificial
  probe
  misc_feature (1)..(25): SEQ ID NO: 139; WAN024A3U_at; Start 83; Stop 107
ttgacaattattccttttacgtgta

SEQ ID NO: 41799 - DNA, 25 bp, Artificial
  probe
  misc_feature (1)..(25): SEQ ID NO: 139; WAN024A3U_at; Start 17; Stop 41
ttctattgaacgctttcaactcttg

SEQ ID NO: 41800 - DNA, 25 bp, Artificial
  probe
  misc_feature (1)..(25): SEQ ID NO: 139; WAN024A3U_at; Start 6; Stop 30
aaaaagcaatgttctattgaacgct

SEQ ID NO: 41801 - DNA, 25 bp, Artificial
  probe
  misc_feature (1)..(25): SEQ ID NO: 139; WAN024A3U_at; Start 81; Stop 105
gcttgacaattattccttttacgtg

SEQ ID NO: 41802 - DNA, 25 bp, Artificial
  probe
  misc_feature (1)..(25): SEQ ID NO: 139; WAN024A3U_at; Start 32; Stop 56
tcaactcttgtataaatggaagaaa

SEQ ID NO: 41803 - DNA, 25 bp, Artificial
  probe
  misc_feature (1)..(25): SEQ ID NO: 139; WAN024A3U_at; Start 5; Stop 29
aaaaaagcaatgttctattgaacgc

SEQ ID NO: 41804 - DNA, 25 bp, Artificial
  probe
  misc_feature (1)..(25): SEQ ID NO: 139; WAN024A3U_at; Start 33; Stop 57
caactcttgtataaatggaagaaaa

SEQ ID NO: 41805 - DNA, 25 bp, Artificial
  probe
  misc_feature (1)..(25): SEQ ID NO: 139; WAN024A3U_at; Start 69; Stop 93
aaccgcatttttgcttgacaattat

SEQ ID NO: 41806 - DNA, 25 bp, Artificial
  probe
  misc_feature (1)..(25): SEQ ID NO: 139; WAN024A3U_at; Start 38; Stop 62
cttgtataaatggaagaaaaaatca

SEQ ID NO: 41807 - DNA, 25 bp, Artificial
  probe
  misc_feature (1)..(25): SEQ ID NO: 139; WAN024A3U_at; Start 29; Stop 53
ctttcaactcttgtataaatggaag

SEQ ID NO: 41808 - DNA, 25 bp, Artificial
  probe
  misc_feature (1)..(25): SEQ ID NO: 139; WAN024A3U_at; Start 15; Stop 39
tgttctattgaacgctttcaactct

SEQ ID NO: 41809 - DNA, 25 bp, Artificial
  probe
  misc_feature (1)..(25): SEQ ID NO: 139; WAN024A3U_at; Start 12; Stop 36
caatgttctattgaacgctttcaac

SEQ ID NO: 41810 - DNA, 25 bp, Artificial
  probe
  misc_feature (1)..(25): SEQ ID NO: 139; WAN024A3U_at; Start 9; Stop 33
aagcaatgttctattgaacgctttc

SEQ ID NO: 41811 - DNA, 25 bp, Artificial
  probe
  misc_feature (1)..(25): SEQ ID NO: 139; WAN024A3U_at; Start 64; Stop 88
aattaaaccgcatttttgcttgaca

SEQ ID NO: 41812 - DNA, 25 bp, Artificial
  probe
  misc_feature (1)..(25): SEQ ID NO: 139; WAN024A3U_at; Start 25; Stop 49
aacgctttcaactcttgtataaatg

SEQ ID NO: 41813 - DNA, 25 bp, Artificial
  probe
  misc_feature (1)..(25): SEQ ID NO: 139; WAN024A3U_at; Start 11; Stop 35
gcaatgttctattgaacgctttcaa

SEQ ID NO: 41814 - DNA, 25 bp, Artificial
  probe
  misc_feature (1)..(25): SEQ ID NO: 139; WAN024A3U_at; Start 79; Stop 103
ttgcttgacaattattccttttacg

SEQ ID NO: 41815 - DNA, 25 bp, Artificial
  probe
  misc_feature (1)..(25): SEQ ID NO: 139; WAN024A3U_at; Start 72; Stop 96
cgcatttttgcttgacaattattcc

SEQ ID NO: 41816 - DNA, 25 bp, Artificial
  probe
  misc_feature (1)..(25): SEQ ID NO: 139; WAN024A3U_at; Start 40; Stop 64
tgtataaatggaagaaaaaatcaaa

SEQ ID NO: 41817 - DNA, 25 bp, Artificial
  probe
  misc_feature (1)..(25): SEQ ID NO: 4367; WAN024A3V_at; Start 88; Stop 112
tgaaagcgttcaatagaacattgct

SEQ ID NO: 41818 - DNA, 25 bp, Artificial
  probe
  misc_feature (1)..(25): SEQ ID NO: 4367; WAN024A3V_at; Start 20; Stop 44
gtaaaaggaataattgtcaagcaaa

SEQ ID NO: 41819 - DNA, 25 bp, Artificial
  probe
  misc_feature (1)..(25): SEQ ID NO: 4367; WAN024A3V_at; Start 65; Stop 89
ttttcttccatttatacaagagttg

SEQ ID NO: 41820 - DNA, 25 bp, Artificial
  probe
  misc_feature (1)..(25): SEQ ID NO: 4367; WAN024A3V_at; Start 18; Stop 42
acgtaaaaggaataattgtcaagca

SEQ ID NO: 41821 - DNA, 25 bp, Artificial
  probe
  misc_feature (1)..(25): SEQ ID NO: 4367; WAN024A3V_at; Start 15; Stop 39
tacacgtaaaaggaataattgtcaa

SEQ ID NO: 41822 - DNA, 25 bp, Artificial
  probe
  misc_feature (1)..(25): SEQ ID NO: 4367; WAN024A3V_at; Start 66; Stop 90
tttcttccatttatacaagagttga

SEQ ID NO: 41823 - DNA, 25 bp, Artificial
  probe
  misc_feature (1)..(25): SEQ ID NO: 4367; WAN024A3V_at; Start 33; Stop 57
ttgtcaagcaaaaatgcggtttaat

SEQ ID NO: 41824 - DNA, 25 bp, Artificial
  probe
  misc_feature (1)..(25): SEQ ID NO: 4367; WAN024A3V_at; Start 27; Stop 51
gaataattgtcaagcaaaaatgcgg

SEQ ID NO: 41825 - DNA, 25 bp, Artificial
  probe
  misc_feature (1)..(25): SEQ ID NO: 4367; WAN024A3V_at; Start 17; Stop 41
cacgtaaaaggaataattgtcaagc

SEQ ID NO: 41826 - DNA, 25 bp, Artificial
  probe
  misc_feature (1)..(25): SEQ ID NO: 4367; WAN024A3V_at; Start 93; Stop 117
gcgttcaatagaacattgctttttt

SEQ ID NO: 41827 - DNA, 25 bp, Artificial
  probe
  misc_feature (1)..(25): SEQ ID NO: 4367; WAN024A3V_at; Start 85; Stop 109
agttgaaagcgttcaatagaacatt

SEQ ID NO: 41828 - DNA, 25 bp, Artificial
  probe
  misc_feature (1)..(25): SEQ ID NO: 4367; WAN024A3V_at; Start 61; Stop 85
gattttttcttccatttatacaaga

SEQ ID NO: 41829 - DNA, 25 bp, Artificial
  probe
  misc_feature (1)..(25): SEQ ID NO: 4367; WAN024A3V_at; Start 81; Stop 105
caagagttgaaagcgttcaatagaa

SEQ ID NO: 41830 - DNA, 25 bp, Artificial
  probe
  misc_feature (1)..(25): SEQ ID NO: 4367; WAN024A3V_at; Start 94; Stop 118
cgttcaatagaacattgctttttta

SEQ ID NO: 41831 - DNA, 25 bp, Artificial
  probe
  misc_feature (1)..(25): SEQ ID NO: 4367; WAN024A3V_at; Start 21; Stop 45
taaaaggaataattgtcaagcaaaa

SEQ ID NO: 41832 - DNA, 25 bp, Artificial
  probe
  misc_feature (1)..(25): SEQ ID NO: 4367; WAN024A3V_at; Start 26; Stop 50
ggaataattgtcaagcaaaaatgcg

SEQ ID NO: 41833 - DNA, 25 bp, Artificial
  probe
  misc_feature (1)..(25): SEQ ID NO: 4367; WAN024A3V_at; Start 19; Stop 43
cgtaaaaggaataattgtcaagcaa

SEQ ID NO: 41834 - DNA, 25 bp, Artificial
  probe
  misc_feature (1)..(25): SEQ ID NO: 4367; WAN024A3V_at; Start 67; Stop 91
ttcttccatttatacaagagttgaa

SEQ ID NO: 41835 - DNA, 25 bp, Artificial
  probe
  misc_feature (1)..(25): SEQ ID NO: 4367; WAN024A3V_at; Start 80; Stop 104
acaagagttgaaagcgttcaataga

SEQ ID NO: 41836 - DNA, 25 bp, Artificial
  probe
  misc_feature (1)..(25): SEQ ID NO: 4367; WAN024A3V_at; Start 86; Stop 110
gttgaaagcgttcaatagaacattg

SEQ ID NO: 41837 - DNA, 25 bp, Artificial
  probe
  misc_feature (1)..(25): SEQ ID NO: 4367; WAN024A3V_at; Start 28; Stop 52
aataattgtcaagcaaaaatgcggt

SEQ ID NO: 41838 - DNA, 25 bp, Artificial
  probe
  misc_feature (1)..(25): SEQ ID NO: 4367; WAN024A3V_at; Start 32; Stop 56
attgtcaagcaaaaatgcggtttaa

SEQ ID NO: 41839 - DNA, 25 bp, Artificial
  probe
  misc_feature (1)..(25): SEQ ID NO: 4367; WAN024A3V_at; Start 87; Stop 111
ttgaaagcgttcaatagaacattgc

SEQ ID NO: 41840 - DNA, 25 bp, Artificial
  probe
  misc_feature (1)..(25): SEQ ID NO: 4367; WAN024A3V_at; Start 83; Stop 107
agagttgaaagcgttcaatagaaca

SEQ ID NO: 41841 - DNA, 25 bp, Artificial
  probe
  misc_feature (1)..(25): SEQ ID NO: 4367; WAN024A3V_at; Start 91; Stop 115
aagcgttcaatagaacattgctttt

SEQ ID NO: 41842 - DNA, 25 bp, Artificial
  probe
  misc_feature (1)..(25): SEQ ID NO: 4367; WAN024A3V_at; Start 31; Stop 55
aattgtcaagcaaaaatgcggttta

SEQ ID NO: 41843 - DNA, 25 bp, Artificial
  probe
  misc_feature (1)..(25): SEQ ID NO: 4367; WAN024A3V_at; Start 34; Stop 58
tgtcaagcaaaaatgcggtttaatt

SEQ ID NO: 41844 - DNA, 25 bp, Artificial
  probe
  misc_feature (1)..(25): SEQ ID NO: 4367; WAN024A3V_at; Start 60; Stop 84
tgattttttcttccatttatacaag

SEQ ID NO: 41845 - DNA, 25 bp, Artificial
  probe
  misc_feature (1)..(25): SEQ ID NO: 4367; WAN024A3V_at; Start 39; Stop 63
agcaaaaatgcggtttaattttgat

SEQ ID NO: 41846 - DNA, 25 bp, Artificial
  probe
  misc_feature (1)..(25): SEQ ID NO: 4367; WAN024A3V_at; Start 30; Stop 54
taattgtcaagcaaaaatgcggttt

SEQ ID NO: 41847 - DNA, 25 bp, Artificial
  probe
  misc_feature (1)..(25): SEQ ID NO: 4367; WAN024A3V_at; Start 89; Stop 113
gaaagcgttcaatagaacattgctt

SEQ ID NO: 41848 - DNA, 25 bp, Artificial
  probe
  misc_feature (1)..(25): SEQ ID NO: 4367; WAN024A3V_at; Start 29; Stop 53
ataattgtcaagcaaaaatgcggtt

SEQ ID NO: 41849 - DNA, 25 bp, Artificial
  probe
  misc_feature (1)..(25): SEQ ID NO: 4367; WAN024A3V_at; Start 84; Stop 108
gagttgaaagcgttcaatagaacat

SEQ ID NO: 41850 - DNA, 25 bp, Artificial
  probe
  misc_feature (1)..(25): SEQ ID NO: 4367; WAN024A3V_at; Start 79; Stop 103
tacaagagttgaaagcgttcaatag

SEQ ID NO: 41851 - DNA, 25 bp, Artificial
  probe
  misc_feature (1)..(25): SEQ ID NO: 4911; WAN024A3W_at; Start 88; Stop 112
tttgatataatagagagaagaactc

SEQ ID NO: 41852 - DNA, 25 bp, Artificial
  probe
  misc_feature (1)..(25): SEQ ID NO: 4911; WAN024A3W_at; Start 12; Stop 36
ggctagagaaatctagtcctttttc

SEQ ID NO: 41853 - DNA, 25 bp, Artificial
  probe
  misc_feature (1)..(25): SEQ ID NO: 4911; WAN024A3W_at; Start 44; Stop 68
taaatactccaaagcctgcaaaaat

SEQ ID NO: 41854 - DNA, 25 bp, Artificial
  probe
  misc_feature (1)..(25): SEQ ID NO: 4911; WAN024A3W_at; Start 55; Stop 79
aagcctgcaaaaatctgaaacttcc

SEQ ID NO: 41855 - DNA, 25 bp, Artificial
  probe
  misc_feature (1)..(25): SEQ ID NO: 4911; WAN024A3W_at; Start 70; Stop 94
tgaaacttcctcctacaatttgata

SEQ ID NO: 41856 - DNA, 25 bp, Artificial
  probe
  misc_feature (1)..(25): SEQ ID NO: 4911; WAN024A3W_at; Start 5; Stop 29
aatgaaaggctagagaaatctagtc

SEQ ID NO: 41857 - DNA, 25 bp, Artificial
  probe
  misc_feature (1)..(25): SEQ ID NO: 4911; WAN024A3W_at; Start 93; Stop 117
tataatagagagaagaactcatttg

SEQ ID NO: 41858 - DNA, 25 bp, Artificial
  probe
  misc_feature (1)..(25): SEQ ID NO: 4911; WAN024A3W_at; Start 48; Stop 72
tactccaaagcctgcaaaaatctga

SEQ ID NO: 41859 - DNA, 25 bp, Artificial
  probe
  misc_feature (1)..(25): SEQ ID NO: 4911; WAN024A3W_at; Start 49; Stop 73
actccaaagcctgcaaaaatctgaa

SEQ ID NO: 41860 - DNA, 25 bp, Artificial
  probe
  misc_feature (1)..(25): SEQ ID NO: 4911; WAN024A3W_at; Start 41; Stop 65
aaataaatactccaaagcctgcaaa

SEQ ID NO: 41861 - DNA, 25 bp, Artificial
  probe
  misc_feature (1)..(25): SEQ ID NO: 4911; WAN024A3W_at; Start 57; Stop 81
gcctgcaaaaatctgaaacttcctc

SEQ ID NO: 41862 - DNA, 25 bp, Artificial
  probe
  misc_feature (1)..(25): SEQ ID NO: 4911; WAN024A3W_at; Start 42; Stop 66
aataaatactccaaagcctgcaaaa

SEQ ID NO: 41863 - DNA, 25 bp, Artificial
  probe
  misc_feature (1)..(25): SEQ ID NO: 4911; WAN024A3W_at; Start 71; Stop 95
gaaacttcctcctacaatttgatat

SEQ ID NO: 41864 - DNA, 25 bp, Artificial
  probe
  misc_feature (1)..(25): SEQ ID NO: 4911; WAN024A3W_at; Start 2; Stop 26
tgaaatgaaaggctagagaaatcta

SEQ ID NO: 41865 - DNA, 25 bp, Artificial
  probe
  misc_feature (1)..(25): SEQ ID NO: 4911; WAN024A3W_at; Start 53; Stop 77
caaagcctgcaaaaatctgaaactt

SEQ ID NO: 41866 - DNA, 25 bp, Artificial
  probe
  misc_feature (1)..(25): SEQ ID NO: 4911; WAN024A3W_at; Start 51; Stop 75
tccaaagcctgcaaaaatctgaaac

SEQ ID NO: 41867 - DNA, 25 bp, Artificial
  probe
  misc_feature (1)..(25): SEQ ID NO: 4911; WAN024A3W_at; Start 7; Stop 31
tgaaaggctagagaaatctagtcct

SEQ ID NO: 41868 - DNA, 25 bp, Artificial
  probe
  misc_feature (1)..(25): SEQ ID NO: 4911; WAN024A3W_at; Start 91; Stop 115
gatataatagagagaagaactcatt

SEQ ID NO: 41869 - DNA, 25 bp, Artificial
  probe
  misc_feature (1)..(25): SEQ ID NO: 4911; WAN024A3W_at; Start 52; Stop 76
ccaaagcctgcaaaaatctgaaact

SEQ ID NO: 41870 - DNA, 25 bp, Artificial
  probe
  misc_feature (1)..(25): SEQ ID NO: 4911; WAN024A3W_at; Start 60; Stop 84
tgcaaaaatctgaaacttcctccta

SEQ ID NO: 41871 - DNA, 25 bp, Artificial
  probe
  misc_feature (1)..(25): SEQ ID NO: 4911; WAN024A3W_at; Start 64; Stop 88
aaaatctgaaacttcctcctacaat

SEQ ID NO: 41872 - DNA, 25 bp, Artificial
  probe
  misc_feature (1)..(25): SEQ ID NO: 4911; WAN024A3W_at; Start 3; Stop 27
gaaatgaaaggctagagaaatctag

SEQ ID NO: 41873 - DNA, 25 bp, Artificial
  probe
  misc_feature (1)..(25): SEQ ID NO: 4911; WAN024A3W_at; Start 62; Stop 86
caaaaatctgaaacttcctcctaca

SEQ ID NO: 41874 - DNA, 25 bp, Artificial
  probe
  misc_feature (1)..(25): SEQ ID NO: 4911; WAN024A3W_at; Start 8; Stop 32
gaaaggctagagaaatctagtcctt

SEQ ID NO: 41875 - DNA, 25 bp, Artificial
  probe
  misc_feature (1)..(25): SEQ ID NO: 4911; WAN024A3W_at; Start 98; Stop 122
tagagagaagaactcatttgaagga

SEQ ID NO: 41876 - DNA, 25 bp, Artificial
  probe
  misc_feature (1)..(25): SEQ ID NO: 4911; WAN024A3W_at; Start 68; Stop 92
tctgaaacttcctcctacaatttga

SEQ ID NO: 41877 - DNA, 25 bp, Artificial
  probe
  misc_feature (1)..(25): SEQ ID NO: 4911; WAN024A3W_at; Start 39; Stop 63
ttaaataaatactccaaagcctgca

SEQ ID NO: 41878 - DNA, 25 bp, Artificial
  probe
  misc_feature (1)..(25): SEQ ID NO: 4911; WAN024A3W_at; Start 78; Stop 102
cctcctacaatttgatataatagag

SEQ ID NO: 41879 - DNA, 25 bp, Artificial
  probe
  misc_feature (1)..(25): SEQ ID NO: 4911; WAN024A3W_at; Start 38; Stop 62
tttaaataaatactccaaagcctgc

SEQ ID NO: 41880 - DNA, 25 bp, Artificial
  probe
  misc_feature (1)..(25): SEQ ID NO: 4911; WAN024A3W_at; Start 14; Stop 38
ctagagaaatctagtcctttttctt

SEQ ID NO: 41881 - DNA, 25 bp, Artificial
  probe
  misc_feature (1)..(25): SEQ ID NO: 4911; WAN024A3W_at; Start 40; Stop 64
taaataaatactccaaagcctgcaa

SEQ ID NO: 41882 - DNA, 25 bp, Artificial
  probe
  misc_feature (1)..(25): SEQ ID NO: 4911; WAN024A3W_at; Start 83; Stop 107
tacaatttgatataatagagagaag

SEQ ID NO: 41883 - DNA, 25 bp, Artificial
  probe
  misc_feature (1)..(25): SEQ ID NO: 4911; WAN024A3W_at; Start 81; Stop 105
cctacaatttgatataatagagaga

SEQ ID NO: 41884 - DNA, 25 bp, Artificial
  probe
  misc_feature (1)..(25): SEQ ID NO: 4911; WAN024A3W_at; Start 58; Stop 82
cctgcaaaaatctgaaacttcctcc

SEQ ID NO: 41885 - DNA, 25 bp, Artificial
  probe
  misc_feature (1)..(25): SEQ ID NO: 4836; WAN024A3X_at; Start 5; Stop 29
tccttcaaatgagttcttctctcta

SEQ ID NO: 41886 - DNA, 25 bp, Artificial
  probe
  misc_feature (1)..(25): SEQ ID NO: 4836; WAN024A3X_at; Start 47; Stop 71
aggaagtttcagatttttgcaggct

SEQ ID NO: 41887 - DNA, 25 bp, Artificial
  probe
  misc_feature (1)..(25): SEQ ID NO: 4836; WAN024A3X_at; Start 52; Stop 76
gtttcagatttttgcaggctttgga

SEQ ID NO: 41888 - DNA, 25 bp, Artificial
  probe
  misc_feature (1)..(25): SEQ ID NO: 4836; WAN024A3X_at; Start 26; Stop 50
tctattatatcaaattgtaggagga

SEQ ID NO: 41889 - DNA, 25 bp, Artificial
  probe
  misc_feature (1)..(25): SEQ ID NO: 4836; WAN024A3X_at; Start 45; Stop 69
ggaggaagtttcagatttttgcagg

SEQ ID NO: 41890 - DNA, 25 bp, Artificial
  probe
  misc_feature (1)..(25): SEQ ID NO: 4836; WAN024A3X_at; Start 31; Stop 55
tatatcaaattgtaggaggaagttt

SEQ ID NO: 41891 - DNA, 25 bp, Artificial
  probe
  misc_feature (1)..(25): SEQ ID NO: 4836; WAN024A3X_at; Start 55; Stop 79
tcagatttttgcaggctttggagta

SEQ ID NO: 41892 - DNA, 25 bp, Artificial
  probe
  misc_feature (1)..(25): SEQ ID NO: 4836; WAN024A3X_at; Start 61; Stop 85
ttttgcaggctttggagtatttatt

SEQ ID NO: 41893 - DNA, 25 bp, Artificial
  probe
  misc_feature (1)..(25): SEQ ID NO: 4836; WAN024A3X_at; Start 15; Stop 39
gagttcttctctctattatatcaaa

SEQ ID NO: 41894 - DNA, 25 bp, Artificial
  probe
  misc_feature (1)..(25): SEQ ID NO: 4836; WAN024A3X_at; Start 101; Stop 125
tagatttctctagcctttcatttca

SEQ ID NO: 41895 - DNA, 25 bp, Artificial
  probe
  misc_feature (1)..(25): SEQ ID NO: 4836; WAN024A3X_at; Start 92; Stop 116
aaaaaggactagatttctctagcct

SEQ ID NO: 41896 - DNA, 25 bp, Artificial
  probe
  misc_feature (1)..(25): SEQ ID NO: 4836; WAN024A3X_at; Start 91; Stop 115
gaaaaaggactagatttctctagcc

SEQ ID NO: 41897 - DNA, 25 bp, Artificial
  probe
  misc_feature (1)..(25): SEQ ID NO: 4836; WAN024A3X_at; Start 43; Stop 67
taggaggaagtttcagatttttgca

SEQ ID NO: 41898 - DNA, 25 bp, Artificial
  probe
  misc_feature (1)..(25): SEQ ID NO: 4836; WAN024A3X_at; Start 97; Stop 121
ggactagatttctctagcctttcat

SEQ ID NO: 41899 - DNA, 25 bp, Artificial
  probe
  misc_feature (1)..(25): SEQ ID NO: 4836; WAN024A3X_at; Start 35; Stop 59
tcaaattgtaggaggaagtttcaga

SEQ ID NO: 41900 - DNA, 25 bp, Artificial
  probe
  misc_feature (1)..(25): SEQ ID NO: 4836; WAN024A3X_at; Start 28; Stop 52
tattatatcaaattgtaggaggaag

SEQ ID NO: 41901 - DNA, 25 bp, Artificial
  probe
  misc_feature (1)..(25): SEQ ID NO: 4836; WAN024A3X_at; Start 33; Stop 57
tatcaaattgtaggaggaagtttca

SEQ ID NO: 41902 - DNA, 25 bp, Artificial
  probe
  misc_feature (1)..(25): SEQ ID NO: 4836; WAN024A3X_at; Start 56; Stop 80
cagatttttgcaggctttggagtat

SEQ ID NO: 41903 - DNA, 25 bp, Artificial
  probe
  misc_feature (1)..(25): SEQ ID NO: 4836; WAN024A3X_at; Start 95; Stop 119
aaggactagatttctctagcctttc

SEQ ID NO: 41904 - DNA, 25 bp, Artificial
  probe
  misc_feature (1)..(25): SEQ ID NO: 4836; WAN024A3X_at; Start 10; Stop 34
caaatgagttcttctctctattata

SEQ ID NO: 41905 - DNA, 25 bp, Artificial
  probe
  misc_feature (1)..(25): SEQ ID NO: 4836; WAN024A3X_at; Start 64; Stop 88
tgcaggctttggagtatttatttaa

SEQ ID NO: 41906 - DNA, 25 bp, Artificial
  probe
  misc_feature (1)..(25): SEQ ID NO: 4836; WAN024A3X_at; Start 25; Stop 49
ctctattatatcaaattgtaggagg

SEQ ID NO: 41907 - DNA, 25 bp, Artificial
  probe
  misc_feature (1)..(25): SEQ ID NO: 4836; WAN024A3X_at; Start 6; Stop 30
ccttcaaatgagttcttctctctat

SEQ ID NO: 41908 - DNA, 25 bp, Artificial
  probe
  misc_feature (1)..(25): SEQ ID NO: 4836; WAN024A3X_at; Start 46; Stop 70
gaggaagtttcagatttttgcaggc

SEQ ID NO: 41909 - DNA, 25 bp, Artificial
  probe
  misc_feature (1)..(25): SEQ ID NO: 4836; WAN024A3X_at; Start 58; Stop 82
gatttttgcaggctttggagtattt

SEQ ID NO: 41910 - DNA, 25 bp, Artificial
  probe
  misc_feature (1)..(25): SEQ ID NO: 4836; WAN024A3X_at; Start 53; Stop 77
tttcagatttttgcaggctttggag

SEQ ID NO: 41911 - DNA, 25 bp, Artificial
  probe
  misc_feature (1)..(25): SEQ ID NO: 4836; WAN024A3X_at; Start 48; Stop 72
ggaagtttcagatttttgcaggctt

SEQ ID NO: 41912 - DNA, 25 bp, Artificial
  probe
  misc_feature (1)..(25): SEQ ID NO: 4836; WAN024A3X_at; Start 65; Stop 89
gcaggctttggagtatttatttaaa

SEQ ID NO: 41913 - DNA, 25 bp, Artificial
  probe
  misc_feature (1)..(25): SEQ ID NO: 4836; WAN024A3X_at; Start 22; Stop 46
tctctctattatatcaaattgtagg

SEQ ID NO: 41914 - DNA, 25 bp, Artificial
  probe
  misc_feature (1)..(25): SEQ ID NO: 4836; WAN024A3X_at; Start 54; Stop 78
ttcagatttttgcaggctttggagt

SEQ ID NO: 41915 - DNA, 25 bp, Artificial
  probe
  misc_feature (1)..(25): SEQ ID NO: 4836; WAN024A3X_at; Start 36; Stop 60
caaattgtaggaggaagtttcagat

SEQ ID NO: 41916 - DNA, 25 bp, Artificial
  probe
  misc_feature (1)..(25): SEQ ID NO: 4836; WAN024A3X_at; Start 49; Stop 73
gaagtttcagatttttgcaggcttt

SEQ ID NO: 41917 - DNA, 25 bp, Artificial
  probe
  misc_feature (1)..(25): SEQ ID NO: 4836; WAN024A3X_at; Start 93; Stop 117
aaaaggactagatttctctagcctt

SEQ ID NO: 41918 - DNA, 25 bp, Artificial
  probe
  misc_feature (1)..(25): SEQ ID NO: 4836; WAN024A3X_at; Start 51; Stop 75
agtttcagatttttgcaggctttgg

SEQ ID NO: 41919 - DNA, 25 bp, Artificial
  probe
  misc_feature (1)..(25): SEQ ID NO: 349; WAN024A3Y_at; Start 20; Stop 44
ggactatgtatctggggatggtgat

SEQ ID NO: 41920 - DNA, 25 bp, Artificial
  probe
  misc_feature (1)..(25): SEQ ID NO: 349; WAN024A3Y_at; Start 8; Stop 32
ccatctccggacggactatgtatct

SEQ ID NO: 41921 - DNA, 25 bp, Artificial
  probe
  misc_feature (1)..(25): SEQ ID NO: 349; WAN024A3Y_at; Start 26; Stop 50
tgtatctggggatggtgatttttat

SEQ ID NO: 41922 - DNA, 25 bp, Artificial
  probe
  misc_feature (1)..(25): SEQ ID NO: 349; WAN024A3Y_at; Start 22; Stop 46
actatgtatctggggatggtgattt

SEQ ID NO: 41923 - DNA, 25 bp, Artificial
  probe
  misc_feature (1)..(25): SEQ ID NO: 349; WAN024A3Y_at; Start 18; Stop 42
acggactatgtatctggggatggtg

SEQ ID NO: 41924 - DNA, 25 bp, Artificial
  probe
  misc_feature (1)..(25): SEQ ID NO: 349; WAN024A3Y_at; Start 16; Stop 40
ggacggactatgtatctggggatgg

SEQ ID NO: 41925 - DNA, 25 bp, Artificial
  probe
  misc_feature (1)..(25): SEQ ID NO: 349; WAN024A3Y_at; Start 11; Stop 35
tctccggacggactatgtatctggg

SEQ ID NO: 41926 - DNA, 25 bp, Artificial
  probe
  misc_feature (1)..(25): SEQ ID NO: 349; WAN024A3Y_at; Start 1; Stop 25
accatcaccatctccggacggacta

SEQ ID NO: 41927 - DNA, 25 bp, Artificial
  probe
  misc_feature (1)..(25): SEQ ID NO: 349; WAN024A3Y_at; Start 4; Stop 28
atcaccatctccggacggactatgt

SEQ ID NO: 41928 - DNA, 25 bp, Artificial
  probe
  misc_feature (1)..(25): SEQ ID NO: 349; WAN024A3Y_at; Start 10; Stop 34
atctccggacggactatgtatctgg

SEQ ID NO: 41929 - DNA, 25 bp, Artificial
  probe
  misc_feature (1)..(25): SEQ ID NO: 349; WAN024A3Y_at; Start 23; Stop 47
ctatgtatctggggatggtgatttt

SEQ ID NO: 41930 - DNA, 25 bp, Artificial
  probe
  misc_feature (1)..(25): SEQ ID NO: 349; WAN024A3Y_at; Start 17; Stop 41
gacggactatgtatctggggatggt

SEQ ID NO: 41931 - DNA, 25 bp, Artificial
  probe
  misc_feature (1)..(25): SEQ ID NO: 349; WAN024A3Y_at; Start 24; Stop 48
tatgtatctggggatggtgattttt

SEQ ID NO: 41932 - DNA, 25 bp, Artificial
  probe
  misc_feature (1)..(25): SEQ ID NO: 349; WAN024A3Y_at; Start 25; Stop 49
atgtatctggggatggtgattttta

SEQ ID NO: 41933 - DNA, 25 bp, Artificial
  probe
  misc_feature (1)..(25): SEQ ID NO: 349; WAN024A3Y_at; Start 19; Stop 43
cggactatgtatctggggatggtga

SEQ ID NO: 41934 - DNA, 25 bp, Artificial
  probe
  misc_feature (1)..(25): SEQ ID NO: 349; WAN024A3Y_at; Start 6; Stop 30
caccatctccggacggactatgtat

SEQ ID NO: 41935 - DNA, 25 bp, Artificial
  probe
  misc_feature (1)..(25): SEQ ID NO: 349; WAN024A3Y_at; Start 9; Stop 33
catctccggacggactatgtatctg

SEQ ID NO: 41936 - DNA, 25 bp, Artificial
  probe
  misc_feature (1)..(25): SEQ ID NO: 349; WAN024A3Y_at; Start 7; Stop 31
accatctccggacggactatgtatc

SEQ ID NO: 41937 - DNA, 25 bp, Artificial
  probe
  misc_feature (1)..(25): SEQ ID NO: 349; WAN024A3Y_at; Start 3; Stop 27
catcaccatctccggacggactatg

SEQ ID NO: 41938 - DNA, 25 bp, Artificial
  probe
  misc_feature (1)..(25): SEQ ID NO: 349; WAN024A3Y_at; Start 21; Stop 45
gactatgtatctggggatggtgatt

SEQ ID NO: 41939 - DNA, 25 bp, Artificial
  probe
  misc_feature (1)..(25): SEQ ID NO: 349; WAN024A3Y_at; Start 14; Stop 38
ccggacggactatgtatctggggat

SEQ ID NO: 41940 - DNA, 25 bp, Artificial
  probe
  misc_feature (1)..(25): SEQ ID NO: 349; WAN024A3Y_at; Start 13; Stop 37
tccggacggactatgtatctgggga

SEQ ID NO: 41941 - DNA, 25 bp, Artificial
  probe
  misc_feature (1)..(25): SEQ ID NO: 349; WAN024A3Y_at; Start 5; Stop 29
tcaccatctccggacggactatgta

SEQ ID NO: 41942 - DNA, 25 bp, Artificial
  probe
  misc_feature (1)..(25): SEQ ID NO: 349; WAN024A3Y_at; Start 15; Stop 39
cggacggactatgtatctggggatg

SEQ ID NO: 41943 - DNA, 25 bp, Artificial
  probe
  misc_feature (1)..(25): SEQ ID NO: 349; WAN024A3Y_at; Start 2; Stop 26
ccatcaccatctccggacggactat

SEQ ID NO: 41944 - DNA, 25 bp, Artificial
  probe
  misc_feature (1)..(25): SEQ ID NO: 349; WAN024A3Y_at; Start 12; Stop 36
ctccggacggactatgtatctgggg

SEQ ID NO: 41945 - DNA, 25 bp, Artificial
  probe
  misc_feature (1)..(25): SEQ ID NO: 520; WAN024A3Z_at; Start 12; Stop 36
catccccagatacatagtccgtccg

SEQ ID NO: 41946 - DNA, 25 bp, Artificial
  probe
  misc_feature (1)..(25): SEQ ID NO: 520; WAN024A3Z_at; Start 4; Stop 28
aaaatcaccatccccagatacatag

SEQ ID NO: 41947 - DNA, 25 bp, Artificial
  probe
  misc_feature (1)..(25): SEQ ID NO: 520; WAN024A3Z_at; Start 19; Stop 43
agatacatagtccgtccggagatgg

SEQ ID NO: 41948 - DNA, 25 bp, Artificial
  probe
  misc_feature (1)..(25): SEQ ID NO: 520; WAN024A3Z_at; Start 6; Stop 30
aatcaccatccccagatacatagtc

SEQ ID NO: 41949 - DNA, 25 bp, Artificial
  probe
  misc_feature (1)..(25): SEQ ID NO: 520; WAN024A3Z_at; Start 15; Stop 39
ccccagatacatagtccgtccggag

SEQ ID NO: 41950 - DNA, 25 bp, Artificial
  probe
  misc_feature (1)..(25): SEQ ID NO: 520; WAN024A3Z_at; Start 9; Stop 33
caccatccccagatacatagtccgt

SEQ ID NO: 41951 - DNA, 25 bp, Artificial
  probe
  misc_feature (1)..(25): SEQ ID NO: 520; WAN024A3Z_at; Start 8; Stop 32
tcaccatccccagatacatagtccg

SEQ ID NO: 41952 - DNA, 25 bp, Artificial
  probe
  misc_feature (1)..(25): SEQ ID NO: 520; WAN024A3Z_at; Start 24; Stop 48
catagtccgtccggagatggtgatg

SEQ ID NO: 41953 - DNA, 25 bp, Artificial
  probe
  misc_feature (1)..(25): SEQ ID NO: 520; WAN024A3Z_at; Start 10; Stop 34
accatccccagatacatagtccgtc

SEQ ID NO: 41954 - DNA, 25 bp, Artificial
  probe
  misc_feature (1)..(25): SEQ ID NO: 520; WAN024A3Z_at; Start 21; Stop 45
atacatagtccgtccggagatggtg

SEQ ID NO: 41955 - DNA, 25 bp, Artificial
  probe
  misc_feature (1)..(25): SEQ ID NO: 520; WAN024A3Z_at; Start 5; Stop 29
aaatcaccatccccagatacatagt

SEQ ID NO: 41956 - DNA, 25 bp, Artificial
  probe
  misc_feature (1)..(25): SEQ ID NO: 520; WAN024A3Z_at; Start 13; Stop 37
atccccagatacatagtccgtccgg

SEQ ID NO: 41957 - DNA, 25 bp, Artificial
  probe
  misc_feature (1)..(25): SEQ ID NO: 520; WAN024A3Z_at; Start 11; Stop 35
ccatccccagatacatagtccgtcc

SEQ ID NO: 41958 - DNA, 25 bp, Artificial
  probe
  misc_feature (1)..(25): SEQ ID NO: 520; WAN024A3Z_at; Start 23; Stop 47
acatagtccgtccggagatggtgat

SEQ ID NO: 41959 - DNA, 25 bp, Artificial
  probe
  misc_feature (1)..(25): SEQ ID NO: 520; WAN024A3Z_at; Start 25; Stop 49
atagtccgtccggagatggtgatgg

SEQ ID NO: 41960 - DNA, 25 bp, Artificial
  probe
  misc_feature (1)..(25): SEQ ID NO: 520; WAN024A3Z_at; Start 18; Stop 42
cagatacatagtccgtccggagatg

SEQ ID NO: 41961 - DNA, 25 bp, Artificial
  probe
  misc_feature (1)..(25): SEQ ID NO: 520; WAN024A3Z_at; Start 7; Stop 31
atcaccatccccagatacatagtcc

SEQ ID NO: 41962 - DNA, 25 bp, Artificial
  probe
  misc_feature (1)..(25): SEQ ID NO: 520; WAN024A3Z_at; Start 3; Stop 27
aaaaatcaccatccccagatacata

SEQ ID NO: 41963 - DNA, 25 bp, Artificial
  probe
  misc_feature (1)..(25): SEQ ID NO: 520; WAN024A3Z_at; Start 2; Stop 26
taaaaatcaccatccccagatacat

SEQ ID NO: 41964 - DNA, 25 bp, Artificial
  probe
  misc_feature (1)..(25): SEQ ID NO: 520; WAN024A3Z_at; Start 22; Stop 46
tacatagtccgtccggagatggtga

SEQ ID NO: 41965 - DNA, 25 bp, Artificial
  probe
  misc_feature (1)..(25): SEQ ID NO: 520; WAN024A3Z_at; Start 14; Stop 38
tccccagatacatagtccgtccgga

SEQ ID NO: 41966 - DNA, 25 bp, Artificial
  probe
  misc_feature (1)..(25): SEQ ID NO: 520; WAN024A3Z_at; Start 20; Stop 44
gatacatagtccgtccggagatggt

SEQ ID NO: 41967 - DNA, 25 bp, Artificial
  probe
  misc_feature (1)..(25): SEQ ID NO: 520; WAN024A3Z_at; Start 1; Stop 25
ataaaaatcaccatccccagataca

SEQ ID NO: 41968 - DNA, 25 bp, Artificial
  probe
  misc_feature (1)..(25): SEQ ID NO: 520; WAN024A3Z_at; Start 26; Stop 50
tagtccgtccggagatggtgatggt

SEQ ID NO: 41969 - DNA, 25 bp, Artificial
  probe
  misc_feature (1)..(25): SEQ ID NO: 520; WAN024A3Z_at; Start 16; Stop 40
cccagatacatagtccgtccggaga

SEQ ID NO: 41970 - DNA, 25 bp, Artificial
  probe
  misc_feature (1)..(25): SEQ ID NO: 520; WAN024A3Z_at; Start 17; Stop 41
ccagatacatagtccgtccggagat

SEQ ID NO: 41971 - DNA, 25 bp, Artificial
  probe
  misc_feature (1)..(25): SEQ ID NO: 3221; WAN024A44_at; Start 70; Stop 94
tttggtaagaattcatgcgtcaact

SEQ ID NO: 41972 - DNA, 25 bp, Artificial
  probe
  misc_feature (1)..(25): SEQ ID NO: 3221; WAN024A44_at; Start 17; Stop 41
gttaggaaagagtaatatagcctat

SEQ ID NO: 41973 - DNA, 25 bp, Artificial
  probe
  misc_feature (1)..(25): SEQ ID NO: 3221; WAN024A44_at; Start 52; Stop 76
taatcaattgcgcagaaatttggta

SEQ ID NO: 41974 - DNA, 25 bp, Artificial
  probe
  misc_feature (1)..(25): SEQ ID NO: 3221; WAN024A44_at; Start 72; Stop 96
tggtaagaattcatgcgtcaactca

SEQ ID NO: 41975 - DNA, 25 bp, Artificial
  probe
  misc_feature (1)..(25): SEQ ID NO: 3221; WAN024A44_at; Start 21; Stop 45
ggaaagagtaatatagcctatatta

SEQ ID NO: 41976 - DNA, 25 bp, Artificial
  probe
  misc_feature (1)..(25): SEQ ID NO: 3221; WAN024A44_at; Start 66; Stop 90
gaaatttggtaagaattcatgcgtc

SEQ ID NO: 41977 - DNA, 25 bp, Artificial
  probe
  misc_feature (1)..(25): SEQ ID NO: 3221; WAN024A44_at; Start 76; Stop 100
aagaattcatgcgtcaactcataaa

SEQ ID NO: 41978 - DNA, 25 bp, Artificial
  probe
  misc_feature (1)..(25): SEQ ID NO: 3221; WAN024A44_at; Start 59; Stop 83
ttgcgcagaaatttggtaagaattc

SEQ ID NO: 41979 - DNA, 25 bp, Artificial
  probe
  misc_feature (1)..(25): SEQ ID NO: 3221; WAN024A44_at; Start 68; Stop 92
aatttggtaagaattcatgcgtcaa

SEQ ID NO: 41980 - DNA, 25 bp, Artificial
  probe
  misc_feature (1)..(25): SEQ ID NO: 3221; WAN024A44_at; Start 44; Stop 68
tatataaataatcaattgcgcagaa

SEQ ID NO: 41981 - DNA, 25 bp, Artificial
  probe
  misc_feature (1)..(25): SEQ ID NO: 3221; WAN024A44_at; Start 19; Stop 43
taggaaagagtaatatagcctatat

SEQ ID NO: 41982 - DNA, 25 bp, Artificial
  probe
  misc_feature (1)..(25): SEQ ID NO: 3221; WAN024A44_at; Start 16; Stop 40
ggttaggaaagagtaatatagccta

SEQ ID NO: 41983 - DNA, 25 bp, Artificial
  probe
  misc_feature (1)..(25): SEQ ID NO: 3221; WAN024A44_at; Start 69; Stop 93
atttggtaagaattcatgcgtcaac

SEQ ID NO: 41984 - DNA, 25 bp, Artificial
  probe
  misc_feature (1)..(25): SEQ ID NO: 3221; WAN024A44_at; Start 53; Stop 77
aatcaattgcgcagaaatttggtaa

SEQ ID NO: 41985 - DNA, 25 bp, Artificial
  probe
  misc_feature (1)..(25): SEQ ID NO: 3221; WAN024A44_at; Start 71; Stop 95
ttggtaagaattcatgcgtcaactc

SEQ ID NO: 41986 - DNA, 25 bp, Artificial
  probe
  misc_feature (1)..(25): SEQ ID NO: 3221; WAN024A44_at; Start 77; Stop 101
agaattcatgcgtcaactcataaag

SEQ ID NO: 41987 - DNA, 25 bp, Artificial
  probe
  misc_feature (1)..(25): SEQ ID NO: 3221; WAN024A44_at; Start 74; Stop 98
gtaagaattcatgcgtcaactcata

SEQ ID NO: 41988 - DNA, 25 bp, Artificial
  probe
  misc_feature (1)..(25): SEQ ID NO: 3221; WAN024A44_at; Start 56; Stop 80
caattgcgcagaaatttggtaagaa

SEQ ID NO: 41989 - DNA, 25 bp, Artificial
  probe
  misc_feature (1)..(25): SEQ ID NO: 3221; WAN024A44_at; Start 60; Stop 84
tgcgcagaaatttggtaagaattca

SEQ ID NO: 41990 - DNA, 25 bp, Artificial
  probe
  misc_feature (1)..(25): SEQ ID NO: 3221; WAN024A44_at; Start 61; Stop 85
gcgcagaaatttggtaagaattcat

SEQ ID NO: 41991 - DNA, 25 bp, Artificial
  probe
  misc_feature (1)..(25): SEQ ID NO: 3221; WAN024A44_at; Start 73; Stop 97
ggtaagaattcatgcgtcaactcat

SEQ ID NO: 41992 - DNA, 25 bp, Artificial
  probe
  misc_feature (1)..(25): SEQ ID NO: 3221; WAN024A44_at; Start 62; Stop 86
cgcagaaatttggtaagaattcatg

SEQ ID NO: 41993 - DNA, 25 bp, Artificial
  probe
  misc_feature (1)..(25): SEQ ID NO: 3221; WAN024A44_at; Start 15; Stop 39
aggttaggaaagagtaatatagcct

SEQ ID NO: 41994 - DNA, 25 bp, Artificial
  probe
  misc_feature (1)..(25): SEQ ID NO: 3221; WAN024A44_at; Start 54; Stop 78
atcaattgcgcagaaatttggtaag

SEQ ID NO: 41995 - DNA, 25 bp, Artificial
  probe
  misc_feature (1)..(25): SEQ ID NO: 3221; WAN024A44_at; Start 55; Stop 79
tcaattgcgcagaaatttggtaaga

SEQ ID NO: 41996 - DNA, 25 bp, Artificial
  probe
  misc_feature (1)..(25): SEQ ID NO: 3221; WAN024A44_at; Start 63; Stop 87
gcagaaatttggtaagaattcatgc

SEQ ID NO: 41997 - DNA, 25 bp, Artificial
  probe
  misc_feature (1)..(25): SEQ ID NO: 3221; WAN024A44_at; Start 64; Stop 88
cagaaatttggtaagaattcatgcg

SEQ ID NO: 41998 - DNA, 25 bp, Artificial
  probe
  misc_feature (1)..(25): SEQ ID NO: 3221; WAN024A44_at; Start 49; Stop 73
aaataatcaattgcgcagaaatttg

SEQ ID NO: 41999 - DNA, 25 bp, Artificial
  probe
  misc_feature (1)..(25): SEQ ID NO: 3221; WAN024A44_at; Start 14; Stop 38
gaggttaggaaagagtaatatagcc

SEQ ID NO: 42000 - DNA, 25 bp, Artificial
  probe
  misc_feature (1)..(25): SEQ ID NO: 3221; WAN024A44_at; Start 67; Stop 91
aaatttggtaagaattcatgcgtca

SEQ ID NO: 42001 - DNA, 25 bp, Artificial
  probe
  misc_feature (1)..(25): SEQ ID NO: 3221; WAN024A44_at; Start 43; Stop 67
ttatataaataatcaattgcgcaga

SEQ ID NO: 42002 - DNA, 25 bp, Artificial
  probe
  misc_feature (1)..(25): SEQ ID NO: 3221; WAN024A44_at; Start 78; Stop 102
gaattcatgcgtcaactcataaaga

SEQ ID NO: 42003 - DNA, 25 bp, Artificial
  probe
  misc_feature (1)..(25): SEQ ID NO: 3221; WAN024A44_at; Start 79; Stop 103
aattcatgcgtcaactcataaagaa

SEQ ID NO: 42004 - DNA, 25 bp, Artificial
  probe
  misc_feature (1)..(25): SEQ ID NO: 3221; WAN024A44_at; Start 46; Stop 70
tataaataatcaattgcgcagaaat

SEQ ID NO: 42005 - DNA, 25 bp, Artificial
  probe
  misc_feature (1)..(25): SEQ ID NO: 4857; WAN024A45_at; Start 7; Stop 31
atgagttgacgcatgaattcttacc

SEQ ID NO: 42006 - DNA, 25 bp, Artificial
  probe
  misc_feature (1)..(25): SEQ ID NO: 4857; WAN024A45_at; Start 66; Stop 90
ggctatattactctttcctaacctc

SEQ ID NO: 42007 - DNA, 25 bp, Artificial
  probe
  misc_feature (1)..(25): SEQ ID NO: 4857; WAN024A45_at; Start 59; Stop 83
taatataggctatattactctttcc

SEQ ID NO: 42008 - DNA, 25 bp, Artificial
  probe
  misc_feature (1)..(25): SEQ ID NO: 4857; WAN024A45_at; Start 2; Stop 26
tctttatgagttgacgcatgaattc

SEQ ID NO: 42009 - DNA, 25 bp, Artificial
  probe
  misc_feature (1)..(25): SEQ ID NO: 4857; WAN024A45_at; Start 4; Stop 28
tttatgagttgacgcatgaattctt

SEQ ID NO: 42010 - DNA, 25 bp, Artificial
  probe
  misc_feature (1)..(25): SEQ ID NO: 4857; WAN024A45_at; Start 14; Stop 38
gacgcatgaattcttaccaaatttc

SEQ ID NO: 42011 - DNA, 25 bp, Artificial
  probe
  misc_feature (1)..(25): SEQ ID NO: 4857; WAN024A45_at; Start 22; Stop 46
aattcttaccaaatttctgcgcaat

SEQ ID NO: 42012 - DNA, 25 bp, Artificial
  probe
  misc_feature (1)..(25): SEQ ID NO: 4857; WAN024A45_at; Start 27; Stop 51
ttaccaaatttctgcgcaattgatt

SEQ ID NO: 42013 - DNA, 25 bp, Artificial
  probe
  misc_feature (1)..(25): SEQ ID NO: 4857; WAN024A45_at; Start 3; Stop 27
ctttatgagttgacgcatgaattct

SEQ ID NO: 42014 - DNA, 25 bp, Artificial
  probe
  misc_feature (1)..(25): SEQ ID NO: 4857; WAN024A45_at; Start 62; Stop 86
tataggctatattactctttcctaa

SEQ ID NO: 42015 - DNA, 25 bp, Artificial
  probe
  misc_feature (1)..(25): SEQ ID NO: 4857; WAN024A45_at; Start 17; Stop 41
gcatgaattcttaccaaatttctgc

SEQ ID NO: 42016 - DNA, 25 bp, Artificial
  probe
  misc_feature (1)..(25): SEQ ID NO: 4857; WAN024A45_at; Start 18; Stop 42
catgaattcttaccaaatttctgcg

SEQ ID NO: 42017 - DNA, 25 bp, Artificial
  probe
  misc_feature (1)..(25): SEQ ID NO: 4857; WAN024A45_at; Start 11; Stop 35
gttgacgcatgaattcttaccaaat

SEQ ID NO: 42018 - DNA, 25 bp, Artificial
  probe
  misc_feature (1)..(25): SEQ ID NO: 4857; WAN024A45_at; Start 6; Stop 30
tatgagttgacgcatgaattcttac

SEQ ID NO: 42019 - DNA, 25 bp, Artificial
  probe
  misc_feature (1)..(25): SEQ ID NO: 4857; WAN024A45_at; Start 25; Stop 49
tcttaccaaatttctgcgcaattga

SEQ ID NO: 42020 - DNA, 25 bp, Artificial
  probe
  misc_feature (1)..(25): SEQ ID NO: 4857; WAN024A45_at; Start 37; Stop 61
tctgcgcaattgattatttatataa

SEQ ID NO: 42021 - DNA, 25 bp, Artificial
  probe
  misc_feature (1)..(25): SEQ ID NO: 4857; WAN024A45_at; Start 34; Stop 58
atttctgcgcaattgattatttata

SEQ ID NO: 42022 - DNA, 25 bp, Artificial
  probe
  misc_feature (1)..(25): SEQ ID NO: 4857; WAN024A45_at; Start 10; Stop 34
agttgacgcatgaattcttaccaaa

SEQ ID NO: 42023 - DNA, 25 bp, Artificial
  probe
  misc_feature (1)..(25): SEQ ID NO: 4857; WAN024A45_at; Start 16; Stop 40
cgcatgaattcttaccaaatttctg

SEQ ID NO: 42024 - DNA, 25 bp, Artificial
  probe
  misc_feature (1)..(25): SEQ ID NO: 4857; WAN024A45_at; Start 12; Stop 36
ttgacgcatgaattcttaccaaatt

SEQ ID NO: 42025 - DNA, 25 bp, Artificial
  probe
  misc_feature (1)..(25): SEQ ID NO: 4857; WAN024A45_at; Start 13; Stop 37
tgacgcatgaattcttaccaaattt

SEQ ID NO: 42026 - DNA, 25 bp, Artificial
  probe
  misc_feature (1)..(25): SEQ ID NO: 4857; WAN024A45_at; Start 24; Stop 48
ttcttaccaaatttctgcgcaattg

SEQ ID NO: 42027 - DNA, 25 bp, Artificial
  probe
  misc_feature (1)..(25): SEQ ID NO: 4857; WAN024A45_at; Start 64; Stop 88
taggctatattactctttcctaacc

SEQ ID NO: 42028 - DNA, 25 bp, Artificial
  probe
  misc_feature (1)..(25): SEQ ID NO: 4857; WAN024A45_at; Start 67; Stop 91
gctatattactctttcctaacctcc

SEQ ID NO: 42029 - DNA, 25 bp, Artificial
  probe
  misc_feature (1)..(25): SEQ ID NO: 4857; WAN024A45_at; Start 8; Stop 32
tgagttgacgcatgaattcttacca

SEQ ID NO: 42030 - DNA, 25 bp, Artificial
  probe
  misc_feature (1)..(25): SEQ ID NO: 4857; WAN024A45_at; Start 19; Stop 43
atgaattcttaccaaatttctgcgc

SEQ ID NO: 42031 - DNA, 25 bp, Artificial
  probe
  misc_feature (1)..(25): SEQ ID NO: 4857; WAN024A45_at; Start 26; Stop 50
cttaccaaatttctgcgcaattgat

SEQ ID NO: 42032 - DNA, 25 bp, Artificial
  probe
  misc_feature (1)..(25): SEQ ID NO: 4857; WAN024A45_at; Start 28; Stop 52
taccaaatttctgcgcaattgatta

SEQ ID NO: 42033 - DNA, 25 bp, Artificial
  probe
  misc_feature (1)..(25): SEQ ID NO: 4857; WAN024A45_at; Start 31; Stop 55
caaatttctgcgcaattgattattt

SEQ ID NO: 42034 - DNA, 25 bp, Artificial
  probe
  misc_feature (1)..(25): SEQ ID NO: 4857; WAN024A45_at; Start 20; Stop 44
tgaattcttaccaaatttctgcgca

SEQ ID NO: 42035 - DNA, 25 bp, Artificial
  probe
  misc_feature (1)..(25): SEQ ID NO: 4857; WAN024A45_at; Start 68; Stop 92
ctatattactctttcctaacctcct

SEQ ID NO: 42036 - DNA, 25 bp, Artificial
  probe
  misc_feature (1)..(25): SEQ ID NO: 4857; WAN024A45_at; Start 38; Stop 62
ctgcgcaattgattatttatataat

SEQ ID NO: 42037 - DNA, 25 bp, Artificial
  probe
  misc_feature (1)..(25): SEQ ID NO: 4857; WAN024A45_at; Start 9; Stop 33
gagttgacgcatgaattcttaccaa

SEQ ID NO: 42038 - DNA, 25 bp, Artificial
  probe
  misc_feature (1)..(25): SEQ ID NO: 4857; WAN024A45_at; Start 21; Stop 45
gaattcttaccaaatttctgcgcaa

SEQ ID NO: 42039 - DNA, 25 bp, Artificial
  probe
  misc_feature (1)..(25): SEQ ID NO: 267; WAN024A46_at; Start 126; Stop 150
tatacaaaattaacagagaggttgt

SEQ ID NO: 42040 - DNA, 25 bp, Artificial
  probe
  misc_feature (1)..(25): SEQ ID NO: 267; WAN024A46_at; Start 92; Stop 116
aacacttgacaagtaacttggatat

SEQ ID NO: 42041 - DNA, 25 bp, Artificial
  probe
  misc_feature (1)..(25): SEQ ID NO: 267; WAN024A46_at; Start 130; Stop 154
caaaattaacagagaggttgtttat

SEQ ID NO: 42042 - DNA, 25 bp, Artificial
  probe
  misc_feature (1)..(25): SEQ ID NO: 267; WAN024A46_at; Start 122; Stop 146
taattatacaaaattaacagagagg

SEQ ID NO: 42043 - DNA, 25 bp, Artificial
  probe
  misc_feature (1)..(25): SEQ ID NO: 267; WAN024A46_at; Start 91; Stop 115
aaacacttgacaagtaacttggata

SEQ ID NO: 42044 - DNA, 25 bp, Artificial
  probe
  misc_feature (1)..(25): SEQ ID NO: 267; WAN024A46_at; Start 95; Stop 119
acttgacaagtaacttggatatcgt

SEQ ID NO: 42045 - DNA, 25 bp, Artificial
  probe
  misc_feature (1)..(25): SEQ ID NO: 267; WAN024A46_at; Start 94; Stop 118
cacttgacaagtaacttggatatcg

SEQ ID NO: 42046 - DNA, 25 bp, Artificial
  probe
  misc_feature (1)..(25): SEQ ID NO: 267; WAN024A46_at; Start 36; Stop 60
caactgatggctcctttttttgaac

SEQ ID NO: 42047 - DNA, 25 bp, Artificial
  probe
  misc_feature (1)..(25): SEQ ID NO: 267; WAN024A46_at; Start 90; Stop 114
aaaacacttgacaagtaacttggat

SEQ ID NO: 42048 - DNA, 25 bp, Artificial
  probe
  misc_feature (1)..(25): SEQ ID NO: 267; WAN024A46_at; Start 127; Stop 151
atacaaaattaacagagaggttgtt

SEQ ID NO: 42049 - DNA, 25 bp, Artificial
  probe
  misc_feature (1)..(25): SEQ ID NO: 267; WAN024A46_at; Start 31; Stop 55
gaaatcaactgatggctcctttttt

SEQ ID NO: 42050 - DNA, 25 bp, Artificial
  probe
  misc_feature (1)..(25): SEQ ID NO: 267; WAN024A46_at; Start 93; Stop 117
acacttgacaagtaacttggatatc

SEQ ID NO: 42051 - DNA, 25 bp, Artificial
  probe
  misc_feature (1)..(25): SEQ ID NO: 267; WAN024A46_at; Start 125; Stop 149
ttatacaaaattaacagagaggttg

SEQ ID NO: 42052 - DNA, 25 bp, Artificial
  probe
  misc_feature (1)..(25): SEQ ID NO: 267; WAN024A46_at; Start 24; Stop 48
ggagcttgaaatcaactgatggctc

SEQ ID NO: 42053 - DNA, 25 bp, Artificial
  probe
  misc_feature (1)..(25): SEQ ID NO: 267; WAN024A46_at; Start 27; Stop 51
gcttgaaatcaactgatggctcctt

SEQ ID NO: 42054 - DNA, 25 bp, Artificial
  probe
  misc_feature (1)..(25): SEQ ID NO: 267; WAN024A46_at; Start 28; Stop 52
cttgaaatcaactgatggctccttt

SEQ ID NO: 42055 - DNA, 25 bp, Artificial
  probe
  misc_feature (1)..(25): SEQ ID NO: 267; WAN024A46_at; Start 26; Stop 50
agcttgaaatcaactgatggctcct

SEQ ID NO: 42056 - DNA, 25 bp, Artificial
  probe
  misc_feature (1)..(25): SEQ ID NO: 267; WAN024A46_at; Start 106; Stop 130
aacttggatatcgttataattatac

SEQ ID NO: 42057 - DNA, 25 bp, Artificial
  probe
  misc_feature (1)..(25): SEQ ID NO: 267; WAN024A46_at; Start 37; Stop 61
aactgatggctcctttttttgaacg

SEQ ID NO: 42058 - DNA, 25 bp, Artificial
  probe
  misc_feature (1)..(25): SEQ ID NO: 267; WAN024A46_at; Start 97; Stop 121
ttgacaagtaacttggatatcgtta

SEQ ID NO: 42059 - DNA, 25 bp, Artificial
  probe
  misc_feature (1)..(25): SEQ ID NO: 267; WAN024A46_at; Start 100; Stop 124
acaagtaacttggatatcgttataa

SEQ ID NO: 42060 - DNA, 25 bp, Artificial
  probe
  misc_feature (1)..(25): SEQ ID NO: 267; WAN024A46_at; Start 30; Stop 54
tgaaatcaactgatggctccttttt

SEQ ID NO: 42061 - DNA, 25 bp, Artificial
  probe
  misc_feature (1)..(25): SEQ ID NO: 267; WAN024A46_at; Start 99; Stop 123
gacaagtaacttggatatcgttata

SEQ ID NO: 42062 - DNA, 25 bp, Artificial
  probe
  misc_feature (1)..(25): SEQ ID NO: 267; WAN024A46_at; Start 101; Stop 125
caagtaacttggatatcgttataat

SEQ ID NO: 42063 - DNA, 25 bp, Artificial
  probe
  misc_feature (1)..(25): SEQ ID NO: 267; WAN024A46_at; Start 110; Stop 134
tggatatcgttataattatacaaaa

SEQ ID NO: 42064 - DNA, 25 bp, Artificial
  probe
  misc_feature (1)..(25): SEQ ID NO: 267; WAN024A46_at; Start 39; Stop 63
ctgatggctcctttttttgaacgaa

SEQ ID NO: 42065 - DNA, 25 bp, Artificial
  probe
  misc_feature (1)..(25): SEQ ID NO: 267; WAN024A46_at; Start 108; Stop 132
cttggatatcgttataattatacaa

SEQ ID NO: 42066 - DNA, 25 bp, Artificial
  probe
  misc_feature (1)..(25): SEQ ID NO: 267; WAN024A46_at; Start 29; Stop 53
ttgaaatcaactgatggctcctttt

SEQ ID NO: 42067 - DNA, 25 bp, Artificial
  probe
  misc_feature (1)..(25): SEQ ID NO: 267; WAN024A46_at; Start 96; Stop 120
cttgacaagtaacttggatatcgtt

SEQ ID NO: 42068 - DNA, 25 bp, Artificial
  probe
  misc_feature (1)..(25): SEQ ID NO: 267; WAN024A46_at; Start 98; Stop 122
tgacaagtaacttggatatcgttat

SEQ ID NO: 42069 - DNA, 25 bp, Artificial
  probe
  misc_feature (1)..(25): SEQ ID NO: 267; WAN024A46_at; Start 40; Stop 64
tgatggctcctttttttgaacgaaa

SEQ ID NO: 42070 - DNA, 25 bp, Artificial
  probe
  misc_feature (1)..(25): SEQ ID NO: 267; WAN024A46_at; Start 123; Stop 147
aattatacaaaattaacagagaggt

SEQ ID NO: 42071 - DNA, 25 bp, Artificial
  probe
  misc_feature (1)..(25): SEQ ID NO: 267; WAN024A46_at; Start 25; Stop 49
gagcttgaaatcaactgatggctcc

SEQ ID NO: 42072 - DNA, 25 bp, Artificial
  probe
  misc_feature (1)..(25): SEQ ID NO: 267; WAN024A46_at; Start 107; Stop 131
acttggatatcgttataattataca

SEQ ID NO: 42073 - DNA, 25 bp, Artificial
  probe
  misc_feature (1)..(25): SEQ ID NO: 141; WAN024A47_at; Start 95; Stop 119
tcgttcaaaaaaaggagccatcagt

SEQ ID NO: 42074 - DNA, 25 bp, Artificial
  probe
  misc_feature (1)..(25): SEQ ID NO: 141; WAN024A47_at; Start 43; Stop 67
atccaagttacttgtcaagtgtttt

SEQ ID NO: 42075 - DNA, 25 bp, Artificial
  probe
  misc_feature (1)..(25): SEQ ID NO: 141; WAN024A47_at; Start 36; Stop 60
taacgatatccaagttacttgtcaa

SEQ ID NO: 42076 - DNA, 25 bp, Artificial
  probe
  misc_feature (1)..(25): SEQ ID NO: 141; WAN024A47_at; Start 96; Stop 120
cgttcaaaaaaaggagccatcagtt

SEQ ID NO: 42077 - DNA, 25 bp, Artificial
  probe
  misc_feature (1)..(25): SEQ ID NO: 141; WAN024A47_at; Start 104; Stop 128
aaaaggagccatcagttgatttcaa

SEQ ID NO: 42078 - DNA, 25 bp, Artificial
  probe
  misc_feature (1)..(25): SEQ ID NO: 141; WAN024A47_at; Start 103; Stop 127
aaaaaggagccatcagttgatttca

SEQ ID NO: 42079 - DNA, 25 bp, Artificial
  probe
  misc_feature (1)..(25): SEQ ID NO: 141; WAN024A47_at; Start 42; Stop 66
tatccaagttacttgtcaagtgttt

SEQ ID NO: 42080 - DNA, 25 bp, Artificial
  probe
  misc_feature (1)..(25): SEQ ID NO: 141; WAN024A47_at; Start 32; Stop 56
attataacgatatccaagttacttg

SEQ ID NO: 42081 - DNA, 25 bp, Artificial
  probe
  misc_feature (1)..(25): SEQ ID NO: 141; WAN024A47_at; Start 33; Stop 57
ttataacgatatccaagttacttgt

SEQ ID NO: 42082 - DNA, 25 bp, Artificial
  probe
  misc_feature (1)..(25): SEQ ID NO: 141; WAN024A47_at; Start 28; Stop 52
tataattataacgatatccaagtta

SEQ ID NO: 42083 - DNA, 25 bp, Artificial
  probe
  misc_feature (1)..(25): SEQ ID NO: 141; WAN024A47_at; Start 109; Stop 133
gagccatcagttgatttcaagctcc

SEQ ID NO: 42084 - DNA, 25 bp, Artificial
  probe
  misc_feature (1)..(25): SEQ ID NO: 141; WAN024A47_at; Start 94; Stop 118
ttcgttcaaaaaaaggagccatcag

SEQ ID NO: 42085 - DNA, 25 bp, Artificial
  probe
  misc_feature (1)..(25): SEQ ID NO: 141; WAN024A47_at; Start 31; Stop 55
aattataacgatatccaagttactt

SEQ ID NO: 42086 - DNA, 25 bp, Artificial
  probe
  misc_feature (1)..(25): SEQ ID NO: 141; WAN024A47_at; Start 11; Stop 35
cctctctgttaattttgtataatta

SEQ ID NO: 42087 - DNA, 25 bp, Artificial
  probe
  misc_feature (1)..(25): SEQ ID NO: 141; WAN024A47_at; Start 105; Stop 129
aaaggagccatcagttgatttcaag

SEQ ID NO: 42088 - DNA, 25 bp, Artificial
  probe
  misc_feature (1)..(25): SEQ ID NO: 141; WAN024A47_at; Start 27; Stop 51
gtataattataacgatatccaagtt

SEQ ID NO: 42089 - DNA, 25 bp, Artificial
  probe
  misc_feature (1)..(25): SEQ ID NO: 141; WAN024A47_at; Start 41; Stop 65
atatccaagttacttgtcaagtgtt

SEQ ID NO: 42090 - DNA, 25 bp, Artificial
  probe
  misc_feature (1)..(25): SEQ ID NO: 141; WAN024A47_at; Start 26; Stop 50
tgtataattataacgatatccaagt

SEQ ID NO: 42091 - DNA, 25 bp, Artificial
  probe
  misc_feature (1)..(25): SEQ ID NO: 141; WAN024A47_at; Start 102; Stop 126
aaaaaaggagccatcagttgatttc

SEQ ID NO: 42092 - DNA, 25 bp, Artificial
  probe
  misc_feature (1)..(25): SEQ ID NO: 141; WAN024A47_at; Start 9; Stop 33
aacctctctgttaattttgtataat

SEQ ID NO: 42093 - DNA, 25 bp, Artificial
  probe
  misc_feature (1)..(25): SEQ ID NO: 141; WAN024A47_at; Start 35; Stop 59
ataacgatatccaagttacttgtca

SEQ ID NO: 42094 - DNA, 25 bp, Artificial
  probe
  misc_feature (1)..(25): SEQ ID NO: 141; WAN024A47_at; Start 108; Stop 132
ggagccatcagttgatttcaagctc

SEQ ID NO: 42095 - DNA, 25 bp, Artificial
  probe
  misc_feature (1)..(25): SEQ ID NO: 141; WAN024A47_at; Start 30; Stop 54
taattataacgatatccaagttact

SEQ ID NO: 42096 - DNA, 25 bp, Artificial
  probe
  misc_feature (1)..(25): SEQ ID NO: 141; WAN024A47_at; Start 93; Stop 117
tttcgttcaaaaaaaggagccatca

SEQ ID NO: 42097 - DNA, 25 bp, Artificial
  probe
  misc_feature (1)..(25): SEQ ID NO: 141; WAN024A47_at; Start 39; Stop 63
cgatatccaagttacttgtcaagtg

SEQ ID NO: 42098 - DNA, 25 bp, Artificial
  probe
  misc_feature (1)..(25): SEQ ID NO: 141; WAN024A47_at; Start 3; Stop 27
ataaacaacctctctgttaattttg

SEQ ID NO: 42099 - DNA, 25 bp, Artificial
  probe
  misc_feature (1)..(25): SEQ ID NO: 141; WAN024A47_at; Start 34; Stop 58
tataacgatatccaagttacttgtc

SEQ ID NO: 42100 - DNA, 25 bp, Artificial
  probe
  misc_feature (1)..(25): SEQ ID NO: 141; WAN024A47_at; Start 97; Stop 121
gttcaaaaaaaggagccatcagttg

SEQ ID NO: 42101 - DNA, 25 bp, Artificial
  probe
  misc_feature (1)..(25): SEQ ID NO: 141; WAN024A47_at; Start 37; Stop 61
aacgatatccaagttacttgtcaag

SEQ ID NO: 42102 - DNA, 25 bp, Artificial
  probe
  misc_feature (1)..(25): SEQ ID NO: 141; WAN024A47_at; Start 106; Stop 130
aaggagccatcagttgatttcaagc

SEQ ID NO: 42103 - DNA, 25 bp, Artificial
  probe
  misc_feature (1)..(25): SEQ ID NO: 141; WAN024A47_at; Start 8; Stop 32
caacctctctgttaattttgtataa

SEQ ID NO: 42104 - DNA, 25 bp, Artificial
  probe
  misc_feature (1)..(25): SEQ ID NO: 141; WAN024A47_at; Start 38; Stop 62
acgatatccaagttacttgtcaagt

SEQ ID NO: 42105 - DNA, 25 bp, Artificial
  probe
  misc_feature (1)..(25): SEQ ID NO: 141; WAN024A47_at; Start 40; Stop 64
gatatccaagttacttgtcaagtgt

SEQ ID NO: 42106 - DNA, 25 bp, Artificial
  probe
  misc_feature (1)..(25): SEQ ID NO: 141; WAN024A47_at; Start 107; Stop 131
aggagccatcagttgatttcaagct

SEQ ID NO: 42107 - DNA, 25 bp, Artificial
  probe
  misc_feature (1)..(25): SEQ ID NO: 469; WAN024A48_at; Start 32; Stop 56
aaatggtataatggaatgaattttg

SEQ ID NO: 42108 - DNA, 25 bp, Artificial
  probe
  misc_feature (1)..(25): SEQ ID NO: 469; WAN024A48_at; Start 34; Stop 58
atggtataatggaatgaattttgta

SEQ ID NO: 42109 - DNA, 25 bp, Artificial
  probe
  misc_feature (1)..(25): SEQ ID NO: 469; WAN024A48_at; Start 39; Stop 63
ataatggaatgaattttgtaaaagg

SEQ ID NO: 42110 - DNA, 25 bp, Artificial
  probe
  misc_feature (1)..(25): SEQ ID NO: 469; WAN024A48_at; Start 42; Stop 66
atggaatgaattttgtaaaaggaag

SEQ ID NO: 42111 - DNA, 25 bp, Artificial
  probe
  misc_feature (1)..(25): SEQ ID NO: 469; WAN024A48_at; Start 6; Stop 30
tttttatggtcgtcaaatgtctcta

SEQ ID NO: 42112 - DNA, 25 bp, Artificial
  probe
  misc_feature (1)..(25): SEQ ID NO: 469; WAN024A48_at; Start 43; Stop 67
tggaatgaattttgtaaaaggaaga

SEQ ID NO: 42113 - DNA, 25 bp, Artificial
  probe
  misc_feature (1)..(25): SEQ ID NO: 469; WAN024A48_at; Start 40; Stop 64
taatggaatgaattttgtaaaagga

SEQ ID NO: 42114 - DNA, 25 bp, Artificial
  probe
  misc_feature (1)..(25): SEQ ID NO: 469; WAN024A48_at; Start 16; Stop 40
cgtcaaatgtctctaaaaatggtat

SEQ ID NO: 42115 - DNA, 25 bp, Artificial
  probe
  misc_feature (1)..(25): SEQ ID NO: 469; WAN024A48_at; Start 35; Stop 59
tggtataatggaatgaattttgtaa

SEQ ID NO: 42116 - DNA, 25 bp, Artificial
  probe
  misc_feature (1)..(25): SEQ ID NO: 469; WAN024A48_at; Start 36; Stop 60
ggtataatggaatgaattttgtaaa

SEQ ID NO: 42117 - DNA, 25 bp, Artificial
  probe
  misc_feature (1)..(25): SEQ ID NO: 469; WAN024A48_at; Start 3; Stop 27
gtatttttatggtcgtcaaatgtct

SEQ ID NO: 42118 - DNA, 25 bp, Artificial
  probe
  misc_feature (1)..(25): SEQ ID NO: 469; WAN024A48_at; Start 47; Stop 71
atgaattttgtaaaaggaagagtga

SEQ ID NO: 42119 - DNA, 25 bp, Artificial
  probe
  misc_feature (1)..(25): SEQ ID NO: 469; WAN024A48_at; Start 14; Stop 38
gtcgtcaaatgtctctaaaaatggt

SEQ ID NO: 42120 - DNA, 25 bp, Artificial
  probe
  misc_feature (1)..(25): SEQ ID NO: 469; WAN024A48_at; Start 17; Stop 41
gtcaaatgtctctaaaaatggtata

SEQ ID NO: 42121 - DNA, 25 bp, Artificial
  probe
  misc_feature (1)..(25): SEQ ID NO: 469; WAN024A48_at; Start 9; Stop 33
ttatggtcgtcaaatgtctctaaaa

SEQ ID NO: 42122 - DNA, 25 bp, Artificial
  probe
  misc_feature (1)..(25): SEQ ID NO: 469; WAN024A48_at; Start 5; Stop 29
atttttatggtcgtcaaatgtctct

SEQ ID NO: 42123 - DNA, 25 bp, Artificial
  probe
  misc_feature (1)..(25): SEQ ID NO: 469; WAN024A48_at; Start 38; Stop 62
tataatggaatgaattttgtaaaag

SEQ ID NO: 42124 - DNA, 25 bp, Artificial
  probe
  misc_feature (1)..(25): SEQ ID NO: 469; WAN024A48_at; Start 37; Stop 61
gtataatggaatgaattttgtaaaa

SEQ ID NO: 42125 - DNA, 25 bp, Artificial
  probe
  misc_feature (1)..(25): SEQ ID NO: 469; WAN024A48_at; Start 33; Stop 57
aatggtataatggaatgaattttgt

SEQ ID NO: 42126 - DNA, 25 bp, Artificial
  probe
  misc_feature (1)..(25): SEQ ID NO: 469; WAN024A48_at; Start 7; Stop 31
ttttatggtcgtcaaatgtctctaa

SEQ ID NO: 42127 - DNA, 25 bp, Artificial
  probe
  misc_feature (1)..(25): SEQ ID NO: 469; WAN024A48_at; Start 10; Stop 34
tatggtcgtcaaatgtctctaaaaa

SEQ ID NO: 42128 - DNA, 25 bp, Artificial
  probe
  misc_feature (1)..(25): SEQ ID NO: 469; WAN024A48_at; Start 31; Stop 55
aaaatggtataatggaatgaatttt

SEQ ID NO: 42129 - DNA, 25 bp, Artificial
  probe
  misc_feature (1)..(25): SEQ ID NO: 469; WAN024A48_at; Start 13; Stop 37
ggtcgtcaaatgtctctaaaaatgg

SEQ ID NO: 42130 - DNA, 25 bp, Artificial
  probe
  misc_feature (1)..(25): SEQ ID NO: 469; WAN024A48_at; Start 19; Stop 43
caaatgtctctaaaaatggtataat

SEQ ID NO: 42131 - DNA, 25 bp, Artificial
  probe
  misc_feature (1)..(25): SEQ ID NO: 469; WAN024A48_at; Start 2; Stop 26
ggtatttttatggtcgtcaaatgtc

SEQ ID NO: 42132 - DNA, 25 bp, Artificial
  probe
  misc_feature (1)..(25): SEQ ID NO: 469; WAN024A48_at; Start 4; Stop 28
tatttttatggtcgtcaaatgtctc

SEQ ID NO: 42133 - DNA, 25 bp, Artificial
  probe
  misc_feature (1)..(25): SEQ ID NO: 469; WAN024A48_at; Start 11; Stop 35
atggtcgtcaaatgtctctaaaaat

SEQ ID NO: 42134 - DNA, 25 bp, Artificial
  probe
  misc_feature (1)..(25): SEQ ID NO: 469; WAN024A48_at; Start 48; Stop 72
tgaattttgtaaaaggaagagtgac

SEQ ID NO: 42135 - DNA, 25 bp, Artificial
  probe
  misc_feature (1)..(25): SEQ ID NO: 469; WAN024A48_at; Start 46; Stop 70
aatgaattttgtaaaaggaagagtg

SEQ ID NO: 42136 - DNA, 25 bp, Artificial
  probe
  misc_feature (1)..(25): SEQ ID NO: 469; WAN024A48_at; Start 12; Stop 36
tggtcgtcaaatgtctctaaaaatg

SEQ ID NO: 42137 - DNA, 25 bp, Artificial
  probe
  misc_feature (1)..(25): SEQ ID NO: 469; WAN024A48_at; Start 18; Stop 42
tcaaatgtctctaaaaatggtataa

SEQ ID NO: 42138 - DNA, 25 bp, Artificial
  probe
  misc_feature (1)..(25): SEQ ID NO: 469; WAN024A48_at; Start 15; Stop 39
tcgtcaaatgtctctaaaaatggta

SEQ ID NO: 42139 - DNA, 25 bp, Artificial
  probe
  misc_feature (1)..(25): SEQ ID NO: 469; WAN024A48_at; Start 8; Stop 32
tttatggtcgtcaaatgtctctaaa

SEQ ID NO: 42140 - DNA, 25 bp, Artificial
  probe
  misc_feature (1)..(25): SEQ ID NO: 469; WAN024A48_at; Start 1; Stop 25
aggtatttttatggtcgtcaaatgt

SEQ ID NO: 42141 - DNA, 25 bp, Artificial
  probe
  misc_feature (1)..(25): SEQ ID NO: 3813; WAN024A49_at; Start 9; Stop 33
tccttttacaaaattcattccatta

SEQ ID NO: 42142 - DNA, 25 bp, Artificial
  probe
  misc_feature (1)..(25): SEQ ID NO: 3813; WAN024A49_at; Start 34; Stop 58
taccatttttagagacatttgacga

SEQ ID NO: 42143 - DNA, 25 bp, Artificial
  probe
  misc_feature (1)..(25): SEQ ID NO: 3813; WAN024A49_at; Start 35; Stop 59
accatttttagagacatttgacgac

SEQ ID NO: 42144 - DNA, 25 bp, Artificial
  probe
  misc_feature (1)..(25): SEQ ID NO: 3813; WAN024A49_at; Start 37; Stop 61
catttttagagacatttgacgacca

SEQ ID NO: 42145 - DNA, 25 bp, Artificial
  probe
  misc_feature (1)..(25): SEQ ID NO: 3813; WAN024A49_at; Start 39; Stop 63
tttttagagacatttgacgaccata

SEQ ID NO: 42146 - DNA, 25 bp, Artificial
  probe
  misc_feature (1)..(25): SEQ ID NO: 3813; WAN024A49_at; Start 33; Stop 57
ataccatttttagagacatttgacg

SEQ ID NO: 42147 - DNA, 25 bp, Artificial
  probe
  misc_feature (1)..(25): SEQ ID NO: 3813; WAN024A49_at; Start 6; Stop 30
tcttccttttacaaaattcattcca

SEQ ID NO: 42148 - DNA, 25 bp, Artificial
  probe
  misc_feature (1)..(25): SEQ ID NO: 3813; WAN024A49_at; Start 42; Stop 66
ttagagacatttgacgaccataaaa

SEQ ID NO: 42149 - DNA, 25 bp, Artificial
  probe
  misc_feature (1)..(25): SEQ ID NO: 3813; WAN024A49_at; Start 46; Stop 70
agacatttgacgaccataaaaatac

SEQ ID NO: 42150 - DNA, 25 bp, Artificial
  probe
  misc_feature (1)..(25): SEQ ID NO: 3813; WAN024A49_at; Start 10; Stop 34
ccttttacaaaattcattccattat

SEQ ID NO: 42151 - DNA, 25 bp, Artificial
  probe
  misc_feature (1)..(25): SEQ ID NO: 3813; WAN024A49_at; Start 15; Stop 39
tacaaaattcattccattataccat

SEQ ID NO: 42152 - DNA, 25 bp, Artificial
  probe
  misc_feature (1)..(25): SEQ ID NO: 3813; WAN024A49_at; Start 38; Stop 62
atttttagagacatttgacgaccat

SEQ ID NO: 42153 - DNA, 25 bp, Artificial
  probe
  misc_feature (1)..(25): SEQ ID NO: 3813; WAN024A49_at; Start 41; Stop 65
tttagagacatttgacgaccataaa

SEQ ID NO: 42154 - DNA, 25 bp, Artificial
  probe
  misc_feature (1)..(25): SEQ ID NO: 3813; WAN024A49_at; Start 7; Stop 31
cttccttttacaaaattcattccat

SEQ ID NO: 42155 - DNA, 25 bp, Artificial
  probe
  misc_feature (1)..(25): SEQ ID NO: 3813; WAN024A49_at; Start 43; Stop 67
tagagacatttgacgaccataaaaa

SEQ ID NO: 42156 - DNA, 25 bp, Artificial
  probe
  misc_feature (1)..(25): SEQ ID NO: 3813; WAN024A49_at; Start 12; Stop 36
ttttacaaaattcattccattatac

SEQ ID NO: 42157 - DNA, 25 bp, Artificial
  probe
  misc_feature (1)..(25): SEQ ID NO: 3813; WAN024A49_at; Start 1; Stop 25
gtcactcttccttttacaaaattca

SEQ ID NO: 42158 - DNA, 25 bp, Artificial
  probe
  misc_feature (1)..(25): SEQ ID NO: 3813; WAN024A49_at; Start 16; Stop 40
acaaaattcattccattataccatt

SEQ ID NO: 42159 - DNA, 25 bp, Artificial
  probe
  misc_feature (1)..(25): SEQ ID NO: 3813; WAN024A49_at; Start 2; Stop 26
tcactcttccttttacaaaattcat

SEQ ID NO: 42160 - DNA, 25 bp, Artificial
  probe
  misc_feature (1)..(25): SEQ ID NO: 3813; WAN024A49_at; Start 31; Stop 55
ttataccatttttagagacatttga

SEQ ID NO: 42161 - DNA, 25 bp, Artificial
  probe
  misc_feature (1)..(25): SEQ ID NO: 3813; WAN024A49_at; Start 36; Stop 60
ccatttttagagacatttgacgacc

SEQ ID NO: 42162 - DNA, 25 bp, Artificial
  probe
  misc_feature (1)..(25): SEQ ID NO: 3813; WAN024A49_at; Start 19; Stop 43
aaattcattccattataccattttt

SEQ ID NO: 42163 - DNA, 25 bp, Artificial
  probe
  misc_feature (1)..(25): SEQ ID NO: 3813; WAN024A49_at; Start 45; Stop 69
gagacatttgacgaccataaaaata

SEQ ID NO: 42164 - DNA, 25 bp, Artificial
  probe
  misc_feature (1)..(25): SEQ ID NO: 3813; WAN024A49_at; Start 47; Stop 71
gacatttgacgaccataaaaatacc

SEQ ID NO: 42165 - DNA, 25 bp, Artificial
  probe
  misc_feature (1)..(25): SEQ ID NO: 3813; WAN024A49_at; Start 32; Stop 56
tataccatttttagagacatttgac

SEQ ID NO: 42166 - DNA, 25 bp, Artificial
  probe
  misc_feature (1)..(25): SEQ ID NO: 3813; WAN024A49_at; Start 30; Stop 54
attataccatttttagagacatttg

SEQ ID NO: 42167 - DNA, 25 bp, Artificial
  probe
  misc_feature (1)..(25): SEQ ID NO: 3813; WAN024A49_at; Start 44; Stop 68
agagacatttgacgaccataaaaat

SEQ ID NO: 42168 - DNA, 25 bp, Artificial
  probe
  misc_feature (1)..(25): SEQ ID NO: 3813; WAN024A49_at; Start 11; Stop 35
cttttacaaaattcattccattata

SEQ ID NO: 42169 - DNA, 25 bp, Artificial
  probe
  misc_feature (1)..(25): SEQ ID NO: 3813; WAN024A49_at; Start 3; Stop 27
cactcttccttttacaaaattcatt

SEQ ID NO: 42170 - DNA, 25 bp, Artificial
  probe
  misc_feature (1)..(25): SEQ ID NO: 3813; WAN024A49_at; Start 40; Stop 64
ttttagagacatttgacgaccataa

SEQ ID NO: 42171 - DNA, 25 bp, Artificial
  probe
  misc_feature (1)..(25): SEQ ID NO: 3813; WAN024A49_at; Start 14; Stop 38
ttacaaaattcattccattatacca

SEQ ID NO: 42172 - DNA, 25 bp, Artificial
  probe
  misc_feature (1)..(25): SEQ ID NO: 3813; WAN024A49_at; Start 48; Stop 72
acatttgacgaccataaaaatacct

SEQ ID NO: 42173 - DNA, 25 bp, Artificial
  probe
  misc_feature (1)..(25): SEQ ID NO: 3813; WAN024A49_at; Start 17; Stop 41
caaaattcattccattataccattt

SEQ ID NO: 42174 - DNA, 25 bp, Artificial
  probe
  misc_feature (1)..(25): SEQ ID NO: 3813; WAN024A49_at; Start 13; Stop 37
tttacaaaattcattccattatacc

SEQ ID NO: 42175 - DNA, 25 bp, Artificial
  probe
  misc_feature (1)..(25): SEQ ID NO: 4715; WAN024A4A_at; Start 7; Stop 31
cctgacagagccccgatcggttaat

SEQ ID NO: 42176 - DNA, 25 bp, Artificial
  probe
  misc_feature (1)..(25): SEQ ID NO: 4715; WAN024A4A_at; Start 20; Stop 44
cgatcggttaatctatgaaaaagaa

SEQ ID NO: 42177 - DNA, 25 bp, Artificial
  probe
  misc_feature (1)..(25): SEQ ID NO: 4715; WAN024A4A_at; Start 19; Stop 43
ccgatcggttaatctatgaaaaaga

SEQ ID NO: 42178 - DNA, 25 bp, Artificial
  probe
  misc_feature (1)..(25): SEQ ID NO: 4715; WAN024A4A_at; Start 10; Stop 34
gacagagccccgatcggttaatcta

SEQ ID NO: 42179 - DNA, 25 bp, Artificial
  probe
  misc_feature (1)..(25): SEQ ID NO: 4715; WAN024A4A_at; Start 14; Stop 38
gagccccgatcggttaatctatgaa

SEQ ID NO: 42180 - DNA, 25 bp, Artificial
  probe
  misc_feature (1)..(25): SEQ ID NO: 4715; WAN024A4A_at; Start 13; Stop 37
agagccccgatcggttaatctatga

SEQ ID NO: 42181 - DNA, 25 bp, Artificial
  probe
  misc_feature (1)..(25): SEQ ID NO: 4715; WAN024A4A_at; Start 3; Stop 27
gggacctgacagagccccgatcggt

SEQ ID NO: 42182 - DNA, 25 bp, Artificial
  probe
  misc_feature (1)..(25): SEQ ID NO: 4715; WAN024A4A_at; Start 16; Stop 40
gccccgatcggttaatctatgaaaa

SEQ ID NO: 42183 - DNA, 25 bp, Artificial
  probe
  misc_feature (1)..(25): SEQ ID NO: 4715; WAN024A4A_at; Start 12; Stop 36
cagagccccgatcggttaatctatg

SEQ ID NO: 42184 - DNA, 25 bp, Artificial
  probe
  misc_feature (1)..(25): SEQ ID NO: 4715; WAN024A4A_at; Start 11; Stop 35
acagagccccgatcggttaatctat

SEQ ID NO: 42185 - DNA, 25 bp, Artificial
  probe
  misc_feature (1)..(25): SEQ ID NO: 4715; WAN024A4A_at; Start 9; Stop 33
tgacagagccccgatcggttaatct

SEQ ID NO: 42186 - DNA, 25 bp, Artificial
  probe
  misc_feature (1)..(25): SEQ ID NO: 4715; WAN024A4A_at; Start 2; Stop 26
ggggacctgacagagccccgatcgg

SEQ ID NO: 42187 - DNA, 25 bp, Artificial
  probe
  misc_feature (1)..(25): SEQ ID NO: 4715; WAN024A4A_at; Start 6; Stop 30
acctgacagagccccgatcggttaa

SEQ ID NO: 42188 - DNA, 25 bp, Artificial
  probe
  misc_feature (1)..(25): SEQ ID NO: 4715; WAN024A4A_at; Start 15; Stop 39
agccccgatcggttaatctatgaaa

SEQ ID NO: 42189 - DNA, 25 bp, Artificial
  probe
  misc_feature (1)..(25): SEQ ID NO: 4715; WAN024A4A_at; Start 18; Stop 42
cccgatcggttaatctatgaaaaag

SEQ ID NO: 42190 - DNA, 25 bp, Artificial
  probe
  misc_feature (1)..(25): SEQ ID NO: 4715; WAN024A4A_at; Start 21; Stop 45
gatcggttaatctatgaaaaagaag

SEQ ID NO: 42191 - DNA, 25 bp, Artificial
  probe
  misc_feature (1)..(25): SEQ ID NO: 4715; WAN024A4A_at; Start 28; Stop 52
taatctatgaaaaagaaggaattta

SEQ ID NO: 42192 - DNA, 25 bp, Artificial
  probe
  misc_feature (1)..(25): SEQ ID NO: 4715; WAN024A4A_at; Start 8; Stop 32
ctgacagagccccgatcggttaatc

SEQ ID NO: 42193 - DNA, 25 bp, Artificial
  probe
  misc_feature (1)..(25): SEQ ID NO: 4715; WAN024A4A_at; Start 23; Stop 47
tcggttaatctatgaaaaagaagga

SEQ ID NO: 42194 - DNA, 25 bp, Artificial
  probe
  misc_feature (1)..(25): SEQ ID NO: 4715; WAN024A4A_at; Start 22; Stop 46
atcggttaatctatgaaaaagaagg

SEQ ID NO: 42195 - DNA, 25 bp, Artificial
  probe
  misc_feature (1)..(25): SEQ ID NO: 4715; WAN024A4A_at; Start 4; Stop 28
ggacctgacagagccccgatcggtt

SEQ ID NO: 42196 - DNA, 25 bp, Artificial
  probe
  misc_feature (1)..(25): SEQ ID NO: 4715; WAN024A4A_at; Start 5; Stop 29
gacctgacagagccccgatcggtta

SEQ ID NO: 42197 - DNA, 25 bp, Artificial
  probe
  misc_feature (1)..(25): SEQ ID NO: 4715; WAN024A4A_at; Start 1; Stop 25
tggggacctgacagagccccgatcg

SEQ ID NO: 42198 - DNA, 25 bp, Artificial
  probe
  misc_feature (1)..(25): SEQ ID NO: 5516; WAN024A4B_at; Start 20; Stop 44
tttcatagattaaccgatcggggct

SEQ ID NO: 42199 - DNA, 25 bp, Artificial
  probe
  misc_feature (1)..(25): SEQ ID NO: 5516; WAN024A4B_at; Start 29; Stop 53
ttaaccgatcggggctctgtcaggt

SEQ ID NO: 42200 - DNA, 25 bp, Artificial
  probe
  misc_feature (1)..(25): SEQ ID NO: 5516; WAN024A4B_at; Start 24; Stop 48
atagattaaccgatcggggctctgt

SEQ ID NO: 42201 - DNA, 25 bp, Artificial
  probe
  misc_feature (1)..(25): SEQ ID NO: 5516; WAN024A4B_at; Start 16; Stop 40
tctttttcatagattaaccgatcgg

SEQ ID NO: 42202 - DNA, 25 bp, Artificial
  probe
  misc_feature (1)..(25): SEQ ID NO: 5516; WAN024A4B_at; Start 33; Stop 57
ccgatcggggctctgtcaggtcccc

SEQ ID NO: 42203 - DNA, 25 bp, Artificial
  probe
  misc_feature (1)..(25): SEQ ID NO: 5516; WAN024A4B_at; Start 21; Stop 45
ttcatagattaaccgatcggggctc

SEQ ID NO: 42204 - DNA, 25 bp, Artificial
  probe
  misc_feature (1)..(25): SEQ ID NO: 5516; WAN024A4B_at; Start 26; Stop 50
agattaaccgatcggggctctgtca

SEQ ID NO: 42205 - DNA, 25 bp, Artificial
  probe
  misc_feature (1)..(25): SEQ ID NO: 5516; WAN024A4B_at; Start 15; Stop 39
ttctttttcatagattaaccgatcg

SEQ ID NO: 42206 - DNA, 25 bp, Artificial
  probe
  misc_feature (1)..(25): SEQ ID NO: 5516; WAN024A4B_at; Start 32; Stop 56
accgatcggggctctgtcaggtccc

SEQ ID NO: 42207 - DNA, 25 bp, Artificial
  probe
  misc_feature (1)..(25): SEQ ID NO: 5516; WAN024A4B_at; Start 7; Stop 31
taaattccttctttttcatagatta

SEQ ID NO: 42208 - DNA, 25 bp, Artificial
  probe
  misc_feature (1)..(25): SEQ ID NO: 5516; WAN024A4B_at; Start 2; Stop 26
tggcataaattccttctttttcata

SEQ ID NO: 42209 - DNA, 25 bp, Artificial
  probe
  misc_feature (1)..(25): SEQ ID NO: 5516; WAN024A4B_at; Start 34; Stop 58
cgatcggggctctgtcaggtcccca

SEQ ID NO: 42210 - DNA, 25 bp, Artificial
  probe
  misc_feature (1)..(25): SEQ ID NO: 5516; WAN024A4B_at; Start 28; Stop 52
attaaccgatcggggctctgtcagg

SEQ ID NO: 42211 - DNA, 25 bp, Artificial
  probe
  misc_feature (1)..(25): SEQ ID NO: 5516; WAN024A4B_at; Start 14; Stop 38
cttctttttcatagattaaccgatc

SEQ ID NO: 42212 - DNA, 25 bp, Artificial
  probe
  misc_feature (1)..(25): SEQ ID NO: 5516; WAN024A4B_at; Start 22; Stop 46
tcatagattaaccgatcggggctct

SEQ ID NO: 42213 - DNA, 25 bp, Artificial
  probe
  misc_feature (1)..(25): SEQ ID NO: 5516; WAN024A4B_at; Start 30; Stop 54
taaccgatcggggctctgtcaggtc

SEQ ID NO: 42214 - DNA, 25 bp, Artificial
  probe
  misc_feature (1)..(25): SEQ ID NO: 5516; WAN024A4B_at; Start 19; Stop 43
ttttcatagattaaccgatcggggc

SEQ ID NO: 42215 - DNA, 25 bp, Artificial
  probe
  misc_feature (1)..(25): SEQ ID NO: 5516; WAN024A4B_at; Start 1; Stop 25
ttggcataaattccttctttttcat

SEQ ID NO: 42216 - DNA, 25 bp, Artificial
  probe
  misc_feature (1)..(25): SEQ ID NO: 5516; WAN024A4B_at; Start 6; Stop 30
ataaattccttctttttcatagatt

SEQ ID NO: 42217 - DNA, 25 bp, Artificial
  probe
  misc_feature (1)..(25): SEQ ID NO: 5516; WAN024A4B_at; Start 12; Stop 36
tccttctttttcatagattaaccga

SEQ ID NO: 42218 - DNA, 25 bp, Artificial
  probe
  misc_feature (1)..(25): SEQ ID NO: 5516; WAN024A4B_at; Start 3; Stop 27
ggcataaattccttctttttcatag

SEQ ID NO: 42219 - DNA, 25 bp, Artificial
  probe
  misc_feature (1)..(25): SEQ ID NO: 5516; WAN024A4B_at; Start 17; Stop 41
ctttttcatagattaaccgatcggg

SEQ ID NO: 42220 - DNA, 25 bp, Artificial
  probe
  misc_feature (1)..(25): SEQ ID NO: 5516; WAN024A4B_at; Start 13; Stop 37
ccttctttttcatagattaaccgat

SEQ ID NO: 42221 - DNA, 25 bp, Artificial
  probe
  misc_feature (1)..(25): SEQ ID NO: 5516; WAN024A4B_at; Start 27; Stop 51
gattaaccgatcggggctctgtcag

SEQ ID NO: 42222 - DNA, 25 bp, Artificial
  probe
  misc_feature (1)..(25): SEQ ID NO: 5516; WAN024A4B_at; Start 4; Stop 28
gcataaattccttctttttcataga

SEQ ID NO: 42223 - DNA, 25 bp, Artificial
  probe
  misc_feature (1)..(25): SEQ ID NO: 5516; WAN024A4B_at; Start 25; Stop 49
tagattaaccgatcggggctctgtc

SEQ ID NO: 42224 - DNA, 25 bp, Artificial
  probe
  misc_feature (1)..(25): SEQ ID NO: 5516; WAN024A4B_at; Start 31; Stop 55
aaccgatcggggctctgtcaggtcc

SEQ ID NO: 42225 - DNA, 25 bp, Artificial
  probe
  misc_feature (1)..(25): SEQ ID NO: 5516; WAN024A4B_at; Start 5; Stop 29
cataaattccttctttttcatagat

SEQ ID NO: 42226 - DNA, 25 bp, Artificial
  probe
  misc_feature (1)..(25): SEQ ID NO: 5516; WAN024A4B_at; Start 23; Stop 47
catagattaaccgatcggggctctg

SEQ ID NO: 42227 - DNA, 25 bp, Artificial
  probe
  misc_feature (1)..(25): SEQ ID NO: 3272; WAN024A4C_at; Start 2; Stop 26
taaatttacctcttttctgatagtc

SEQ ID NO: 42228 - DNA, 25 bp, Artificial
  probe
  misc_feature (1)..(25): SEQ ID NO: 3272; WAN024A4C_at; Start 1; Stop 25
ctaaatttacctcttttctgatagt

SEQ ID NO: 42229 - DNA, 25 bp, Artificial
  probe
  misc_feature (1)..(25): SEQ ID NO: 3272; WAN024A4C_at; Start 5; Stop 29
atttacctcttttctgatagtcatt

SEQ ID NO: 42230 - DNA, 25 bp, Artificial
  probe
  misc_feature (1)..(25): SEQ ID NO: 3272; WAN024A4C_at; Start 4; Stop 28
aatttacctcttttctgatagtcat

SEQ ID NO: 42231 - DNA, 25 bp, Artificial
  probe
  misc_feature (1)..(25): SEQ ID NO: 3272; WAN024A4C_at; Start 6; Stop 30
tttacctcttttctgatagtcattt

SEQ ID NO: 42232 - DNA, 25 bp, Artificial
  probe
  misc_feature (1)..(25): SEQ ID NO: 3272; WAN024A4C_at; Start 3; Stop 27
aaatttacctcttttctgatagtca

SEQ ID NO: 42233 - DNA, 25 bp, Artificial
  probe
  misc_feature (1)..(25): SEQ ID NO: 3272; WAN024A4C_at; Start 7; Stop 31
ttacctcttttctgatagtcatttt

SEQ ID NO: 42234 - DNA, 25 bp, Artificial
  probe
  misc_feature (1)..(25): SEQ ID NO: 4400; WAN024A4D_at; Start 59; Stop 83
aatgactatcagaaaagaggtaaat

SEQ ID NO: 42235 - DNA, 25 bp, Artificial
  probe
  misc_feature (1)..(25): SEQ ID NO: 4400; WAN024A4D_at; Start 58; Stop 82
aaatgactatcagaaaagaggtaaa

SEQ ID NO: 42236 - DNA, 25 bp, Artificial
  probe
  misc_feature (1)..(25): SEQ ID NO: 4400; WAN024A4D_at; Start 61; Stop 85
tgactatcagaaaagaggtaaattt

SEQ ID NO: 42237 - DNA, 25 bp, Artificial
  probe
  misc_feature (1)..(25): SEQ ID NO: 4400; WAN024A4D_at; Start 62; Stop 86
gactatcagaaaagaggtaaattta

SEQ ID NO: 42238 - DNA, 25 bp, Artificial
  probe
  misc_feature (1)..(25): SEQ ID NO: 4400; WAN024A4D_at; Start 63; Stop 87
actatcagaaaagaggtaaatttag

SEQ ID NO: 42239 - DNA, 25 bp, Artificial
  probe
  misc_feature (1)..(25): SEQ ID NO: 4400; WAN024A4D_at; Start 57; Stop 81
aaaatgactatcagaaaagaggtaa

SEQ ID NO: 42240 - DNA, 25 bp, Artificial
  probe
  misc_feature (1)..(25): SEQ ID NO: 4400; WAN024A4D_at; Start 60; Stop 84
atgactatcagaaaagaggtaaatt

SEQ ID NO: 42241 - DNA, 25 bp, Artificial
  probe
  misc_feature (1)..(25): SEQ ID NO: 4592; WAN024A4E_at; Start 12; Stop 36
gggaattggtctaattcaacggaga

SEQ ID NO: 42242 - DNA, 25 bp, Artificial
  probe
  misc_feature (1)..(25): SEQ ID NO: 4592; WAN024A4E_at; Start 2; Stop 26
cagagatgtagggaattggtctaat

SEQ ID NO: 42243 - DNA, 25 bp, Artificial
  probe
  misc_feature (1)..(25): SEQ ID NO: 4592; WAN024A4E_at; Start 70; Stop 94
tataataagaaagttgagaattgat

SEQ ID NO: 42244 - DNA, 25 bp, Artificial
  probe
  misc_feature (1)..(25): SEQ ID NO: 4592; WAN024A4E_at; Start 11; Stop 35
agggaattggtctaattcaacggag

SEQ ID NO: 42245 - DNA, 25 bp, Artificial
  probe
  misc_feature (1)..(25): SEQ ID NO: 4592; WAN024A4E_at; Start 13; Stop 37
ggaattggtctaattcaacggagat

SEQ ID NO: 42246 - DNA, 25 bp, Artificial
  probe
  misc_feature (1)..(25): SEQ ID NO: 4592; WAN024A4E_at; Start 18; Stop 42
tggtctaattcaacggagatcattt

SEQ ID NO: 42247 - DNA, 25 bp, Artificial
  probe
  misc_feature (1)..(25): SEQ ID NO: 4592; WAN024A4E_at; Start 24; Stop 48
aattcaacggagatcatttccagtt

SEQ ID NO: 42248 - DNA, 25 bp, Artificial
  probe
  misc_feature (1)..(25): SEQ ID NO: 4592; WAN024A4E_at; Start 23; Stop 47
taattcaacggagatcatttccagt

SEQ ID NO: 42249 - DNA, 25 bp, Artificial
  probe
  misc_feature (1)..(25): SEQ ID NO: 4592; WAN024A4E_at; Start 67; Stop 91
cgttataataagaaagttgagaatt

SEQ ID NO: 42250 - DNA, 25 bp, Artificial
  probe
  misc_feature (1)..(25): SEQ ID NO: 4592; WAN024A4E_at; Start 6; Stop 30
gatgtagggaattggtctaattcaa

SEQ ID NO: 42251 - DNA, 25 bp, Artificial
  probe
  misc_feature (1)..(25): SEQ ID NO: 4592; WAN024A4E_at; Start 21; Stop 45
tctaattcaacggagatcatttcca

SEQ ID NO: 42252 - DNA, 25 bp, Artificial
  probe
  misc_feature (1)..(25): SEQ ID NO: 4592; WAN024A4E_at; Start 8; Stop 32
tgtagggaattggtctaattcaacg

SEQ ID NO: 42253 - DNA, 25 bp, Artificial
  probe
  misc_feature (1)..(25): SEQ ID NO: 4592; WAN024A4E_at; Start 17; Stop 41
ttggtctaattcaacggagatcatt

SEQ ID NO: 42254 - DNA, 25 bp, Artificial
  probe
  misc_feature (1)..(25): SEQ ID NO: 4592; WAN024A4E_at; Start 35; Stop 59
gatcatttccagttgacgcaagctt

SEQ ID NO: 42255 - DNA, 25 bp, Artificial
  probe
  misc_feature (1)..(25): SEQ ID NO: 4592; WAN024A4E_at; Start 25; Stop 49
attcaacggagatcatttccagttg

SEQ ID NO: 42256 - DNA, 25 bp, Artificial
  probe
  misc_feature (1)..(25): SEQ ID NO: 4592; WAN024A4E_at; Start 19; Stop 43
ggtctaattcaacggagatcatttc

SEQ ID NO: 42257 - DNA, 25 bp, Artificial
  probe
  misc_feature (1)..(25): SEQ ID NO: 4592; WAN024A4E_at; Start 22; Stop 46
ctaattcaacggagatcatttccag

SEQ ID NO: 42258 - DNA, 25 bp, Artificial
  probe
  misc_feature (1)..(25): SEQ ID NO: 4592; WAN024A4E_at; Start 34; Stop 58
agatcatttccagttgacgcaagct

SEQ ID NO: 42259 - DNA, 25 bp, Artificial
  probe
  misc_feature (1)..(25): SEQ ID NO: 4592; WAN024A4E_at; Start 16; Stop 40
attggtctaattcaacggagatcat

SEQ ID NO: 42260 - DNA, 25 bp, Artificial
  probe
  misc_feature (1)..(25): SEQ ID NO: 4592; WAN024A4E_at; Start 33; Stop 57
gagatcatttccagttgacgcaagc

SEQ ID NO: 42261 - DNA, 25 bp, Artificial
  probe
  misc_feature (1)..(25): SEQ ID NO: 4592; WAN024A4E_at; Start 31; Stop 55
cggagatcatttccagttgacgcaa

SEQ ID NO: 42262 - DNA, 25 bp, Artificial
  probe
  misc_feature (1)..(25): SEQ ID NO: 4592; WAN024A4E_at; Start 41; Stop 65
ttccagttgacgcaagcttaaaaaa

SEQ ID NO: 42263 - DNA, 25 bp, Artificial
  probe
  misc_feature (1)..(25): SEQ ID NO: 4592; WAN024A4E_at; Start 44; Stop 68
cagttgacgcaagcttaaaaaaacg

SEQ ID NO: 42264 - DNA, 25 bp, Artificial
  probe
  misc_feature (1)..(25): SEQ ID NO: 4592; WAN024A4E_at; Start 39; Stop 63
atttccagttgacgcaagcttaaaa

SEQ ID NO: 42265 - DNA, 25 bp, Artificial
  probe
  misc_feature (1)..(25): SEQ ID NO: 4592; WAN024A4E_at; Start 36; Stop 60
atcatttccagttgacgcaagctta

SEQ ID NO: 42266 - DNA, 25 bp, Artificial
  probe
  misc_feature (1)..(25): SEQ ID NO: 4592; WAN024A4E_at; Start 30; Stop 54
acggagatcatttccagttgacgca

SEQ ID NO: 42267 - DNA, 25 bp, Artificial
  probe
  misc_feature (1)..(25): SEQ ID NO: 4592; WAN024A4E_at; Start 38; Stop 62
catttccagttgacgcaagcttaaa

SEQ ID NO: 42268 - DNA, 25 bp, Artificial
  probe
  misc_feature (1)..(25): SEQ ID NO: 4592; WAN024A4E_at; Start 10; Stop 34
tagggaattggtctaattcaacgga

SEQ ID NO: 42269 - DNA, 25 bp, Artificial
  probe
  misc_feature (1)..(25): SEQ ID NO: 4592; WAN024A4E_at; Start 29; Stop 53
aacggagatcatttccagttgacgc

SEQ ID NO: 42270 - DNA, 25 bp, Artificial
  probe
  misc_feature (1)..(25): SEQ ID NO: 4592; WAN024A4E_at; Start 15; Stop 39
aattggtctaattcaacggagatca

SEQ ID NO: 42271 - DNA, 25 bp, Artificial
  probe
  misc_feature (1)..(25): SEQ ID NO: 4592; WAN024A4E_at; Start 37; Stop 61
tcatttccagttgacgcaagcttaa

SEQ ID NO: 42272 - DNA, 25 bp, Artificial
  probe
  misc_feature (1)..(25): SEQ ID NO: 4592; WAN024A4E_at; Start 14; Stop 38
gaattggtctaattcaacggagatc

SEQ ID NO: 42273 - DNA, 25 bp, Artificial
  probe
  misc_feature (1)..(25): SEQ ID NO: 4592; WAN024A4E_at; Start 32; Stop 56
ggagatcatttccagttgacgcaag

SEQ ID NO: 42274 - DNA, 25 bp, Artificial
  probe
  misc_feature (1)..(25): SEQ ID NO: 4592; WAN024A4E_at; Start 28; Stop 52
caacggagatcatttccagttgacg

SEQ ID NO: 42275 - DNA, 25 bp, Artificial
  probe
  misc_feature (1)..(25): SEQ ID NO: 150; WAN024A4F_at; Start 63; Stop 87
tccgttgaattagaccaattcccta

SEQ ID NO: 42276 - DNA, 25 bp, Artificial
  probe
  misc_feature (1)..(25): SEQ ID NO: 150; WAN024A4F_at; Start 42; Stop 66
ttgcgtcaactggaaatgatctccg

SEQ ID NO: 42277 - DNA, 25 bp, Artificial
  probe
  misc_feature (1)..(25): SEQ ID NO: 150; WAN024A4F_at; Start 65; Stop 89
cgttgaattagaccaattccctaca

SEQ ID NO: 42278 - DNA, 25 bp, Artificial
  probe
  misc_feature (1)..(25): SEQ ID NO: 150; WAN024A4F_at; Start 50; Stop 74
actggaaatgatctccgttgaatta

SEQ ID NO: 42279 - DNA, 25 bp, Artificial
  probe
  misc_feature (1)..(25): SEQ ID NO: 150; WAN024A4F_at; Start 51; Stop 75
ctggaaatgatctccgttgaattag

SEQ ID NO: 42280 - DNA, 25 bp, Artificial
  probe
  misc_feature (1)..(25): SEQ ID NO: 150; WAN024A4F_at; Start 57; Stop 81
atgatctccgttgaattagaccaat

SEQ ID NO: 42281 - DNA, 25 bp, Artificial
  probe
  misc_feature (1)..(25): SEQ ID NO: 150; WAN024A4F_at; Start 71; Stop 95
attagaccaattccctacatctctg

SEQ ID NO: 42282 - DNA, 25 bp, Artificial
  probe
  misc_feature (1)..(25): SEQ ID NO: 150; WAN024A4F_at; Start 66; Stop 90
gttgaattagaccaattccctacat

SEQ ID NO: 42283 - DNA, 25 bp, Artificial
  probe
  misc_feature (1)..(25): SEQ ID NO: 150; WAN024A4F_at; Start 34; Stop 58
ttttaagcttgcgtcaactggaaat

SEQ ID NO: 42284 - DNA, 25 bp, Artificial
  probe
  misc_feature (1)..(25): SEQ ID NO: 150; WAN024A4F_at; Start 44; Stop 68
gcgtcaactggaaatgatctccgtt

SEQ ID NO: 42285 - DNA, 25 bp, Artificial
  probe
  misc_feature (1)..(25): SEQ ID NO: 150; WAN024A4F_at; Start 32; Stop 56
ttttttaagcttgcgtcaactggaa

SEQ ID NO: 42286 - DNA, 25 bp, Artificial
  probe
  misc_feature (1)..(25): SEQ ID NO: 150; WAN024A4F_at; Start 37; Stop 61
taagcttgcgtcaactggaaatgat

SEQ ID NO: 42287 - DNA, 25 bp, Artificial
  probe
  misc_feature (1)..(25): SEQ ID NO: 150; WAN024A4F_at; Start 6; Stop 30
aattctcaactttcttattataacg

SEQ ID NO: 42288 - DNA, 25 bp, Artificial
  probe
  misc_feature (1)..(25): SEQ ID NO: 150; WAN024A4F_at; Start 43; Stop 67
tgcgtcaactggaaatgatctccgt

SEQ ID NO: 42289 - DNA, 25 bp, Artificial
  probe
  misc_feature (1)..(25): SEQ ID NO: 150; WAN024A4F_at; Start 54; Stop 78
gaaatgatctccgttgaattagacc

SEQ ID NO: 42290 - DNA, 25 bp, Artificial
  probe
  misc_feature (1)..(25): SEQ ID NO: 150; WAN024A4F_at; Start 68; Stop 92
tgaattagaccaattccctacatct

SEQ ID NO: 42291 - DNA, 25 bp, Artificial
  probe
  misc_feature (1)..(25): SEQ ID NO: 150; WAN024A4F_at; Start 58; Stop 82
tgatctccgttgaattagaccaatt

SEQ ID NO: 42292 - DNA, 25 bp, Artificial
  probe
  misc_feature (1)..(25): SEQ ID NO: 150; WAN024A4F_at; Start 39; Stop 63
agcttgcgtcaactggaaatgatct

SEQ ID NO: 42293 - DNA, 25 bp, Artificial
  probe
  misc_feature (1)..(25): SEQ ID NO: 150; WAN024A4F_at; Start 35; Stop 59
tttaagcttgcgtcaactggaaatg

SEQ ID NO: 42294 - DNA, 25 bp, Artificial
  probe
  misc_feature (1)..(25): SEQ ID NO: 150; WAN024A4F_at; Start 49; Stop 73
aactggaaatgatctccgttgaatt

SEQ ID NO: 42295 - DNA, 25 bp, Artificial
  probe
  misc_feature (1)..(25): SEQ ID NO: 150; WAN024A4F_at; Start 59; Stop 83
gatctccgttgaattagaccaattc

SEQ ID NO: 42296 - DNA, 25 bp, Artificial
  probe
  misc_feature (1)..(25): SEQ ID NO: 150; WAN024A4F_at; Start 48; Stop 72
caactggaaatgatctccgttgaat

SEQ ID NO: 42297 - DNA, 25 bp, Artificial
  probe
  misc_feature (1)..(25): SEQ ID NO: 150; WAN024A4F_at; Start 56; Stop 80
aatgatctccgttgaattagaccaa

SEQ ID NO: 42298 - DNA, 25 bp, Artificial
  probe
  misc_feature (1)..(25): SEQ ID NO: 150; WAN024A4F_at; Start 36; Stop 60
ttaagcttgcgtcaactggaaatga

SEQ ID NO: 42299 - DNA, 25 bp, Artificial
  probe
  misc_feature (1)..(25): SEQ ID NO: 150; WAN024A4F_at; Start 47; Stop 71
tcaactggaaatgatctccgttgaa

SEQ ID NO: 42300 - DNA, 25 bp, Artificial
  probe
  misc_feature (1)..(25): SEQ ID NO: 150; WAN024A4F_at; Start 61; Stop 85
tctccgttgaattagaccaattccc

SEQ ID NO: 42301 - DNA, 25 bp, Artificial
  probe
  misc_feature (1)..(25): SEQ ID NO: 150; WAN024A4F_at; Start 40; Stop 64
gcttgcgtcaactggaaatgatctc

SEQ ID NO: 42302 - DNA, 25 bp, Artificial
  probe
  misc_feature (1)..(25): SEQ ID NO: 150; WAN024A4F_at; Start 38; Stop 62
aagcttgcgtcaactggaaatgatc

SEQ ID NO: 42303 - DNA, 25 bp, Artificial
  probe
  misc_feature (1)..(25): SEQ ID NO: 150; WAN024A4F_at; Start 41; Stop 65
cttgcgtcaactggaaatgatctcc

SEQ ID NO: 42304 - DNA, 25 bp, Artificial
  probe
  misc_feature (1)..(25): SEQ ID NO: 150; WAN024A4F_at; Start 45; Stop 69
cgtcaactggaaatgatctccgttg

SEQ ID NO: 42305 - DNA, 25 bp, Artificial
  probe
  misc_feature (1)..(25): SEQ ID NO: 150; WAN024A4F_at; Start 46; Stop 70
gtcaactggaaatgatctccgttga

SEQ ID NO: 42306 - DNA, 25 bp, Artificial
  probe
  misc_feature (1)..(25): SEQ ID NO: 150; WAN024A4F_at; Start 52; Stop 76
tggaaatgatctccgttgaattaga

SEQ ID NO: 42307 - DNA, 25 bp, Artificial
  probe
  misc_feature (1)..(25): SEQ ID NO: 150; WAN024A4F_at; Start 55; Stop 79
aaatgatctccgttgaattagacca

SEQ ID NO: 42308 - DNA, 25 bp, Artificial
  probe
  misc_feature (1)..(25): SEQ ID NO: 150; WAN024A4F_at; Start 62; Stop 86
ctccgttgaattagaccaattccct

SEQ ID NO: 42309 - DNA, 25 bp, Artificial
  probe
  misc_feature (1)..(25): SEQ ID NO: 1329; WAN024A4G_at; Start 7; Stop 31
agttcattgaatgaaggtggtaccg

SEQ ID NO: 42310 - DNA, 25 bp, Artificial
  probe
  misc_feature (1)..(25): SEQ ID NO: 1329; WAN024A4G_at; Start 36; Stop 60
ttttcgcccttcgtgatatgagctt

SEQ ID NO: 42311 - DNA, 25 bp, Artificial
  probe
  misc_feature (1)..(25): SEQ ID NO: 1329; WAN024A4G_at; Start 40; Stop 64
cgcccttcgtgatatgagcttgtct

SEQ ID NO: 42312 - DNA, 25 bp, Artificial
  probe
  misc_feature (1)..(25): SEQ ID NO: 1329; WAN024A4G_at; Start 12; Stop 36
attgaatgaaggtggtaccgcggtt

SEQ ID NO: 42313 - DNA, 25 bp, Artificial
  probe
  misc_feature (1)..(25): SEQ ID NO: 1329; WAN024A4G_at; Start 9; Stop 33
ttcattgaatgaaggtggtaccgcg

SEQ ID NO: 42314 - DNA, 25 bp, Artificial
  probe
  misc_feature (1)..(25): SEQ ID NO: 1329; WAN024A4G_at; Start 48; Stop 72
gtgatatgagcttgtcttttgattt

SEQ ID NO: 42315 - DNA, 25 bp, Artificial
  probe
  misc_feature (1)..(25): SEQ ID NO: 1329; WAN024A4G_at; Start 4; Stop 28
acaagttcattgaatgaaggtggta

SEQ ID NO: 42316 - DNA, 25 bp, Artificial
  probe
  misc_feature (1)..(25): SEQ ID NO: 1329; WAN024A4G_at; Start 39; Stop 63
tcgcccttcgtgatatgagcttgtc

SEQ ID NO: 42317 - DNA, 25 bp, Artificial
  probe
  misc_feature (1)..(25): SEQ ID NO: 1329; WAN024A4G_at; Start 10; Stop 34
tcattgaatgaaggtggtaccgcgg

SEQ ID NO: 42318 - DNA, 25 bp, Artificial
  probe
  misc_feature (1)..(25): SEQ ID NO: 1329; WAN024A4G_at; Start 32; Stop 56
cggtttttcgcccttcgtgatatga

SEQ ID NO: 42319 - DNA, 25 bp, Artificial
  probe
  misc_feature (1)..(25): SEQ ID NO: 1329; WAN024A4G_at; Start 31; Stop 55
gcggtttttcgcccttcgtgatatg

SEQ ID NO: 42320 - DNA, 25 bp, Artificial
  probe
  misc_feature (1)..(25): SEQ ID NO: 1329; WAN024A4G_at; Start 11; Stop 35
cattgaatgaaggtggtaccgcggt

SEQ ID NO: 42321 - DNA, 25 bp, Artificial
  probe
  misc_feature (1)..(25): SEQ ID NO: 1329; WAN024A4G_at; Start 47; Stop 71
cgtgatatgagcttgtcttttgatt

SEQ ID NO: 42322 - DNA, 25 bp, Artificial
  probe
  misc_feature (1)..(25): SEQ ID NO: 1329; WAN024A4G_at; Start 46; Stop 70
tcgtgatatgagcttgtcttttgat

SEQ ID NO: 42323 - DNA, 25 bp, Artificial
  probe
  misc_feature (1)..(25): SEQ ID NO: 1329; WAN024A4G_at; Start 43; Stop 67
ccttcgtgatatgagcttgtctttt

SEQ ID NO: 42324 - DNA, 25 bp, Artificial
  probe
  misc_feature (1)..(25): SEQ ID NO: 1329; WAN024A4G_at; Start 42; Stop 66
cccttcgtgatatgagcttgtcttt

SEQ ID NO: 42325 - DNA, 25 bp, Artificial
  probe
  misc_feature (1)..(25): SEQ ID NO: 1329; WAN024A4G_at; Start 38; Stop 62
ttcgcccttcgtgatatgagcttgt

SEQ ID NO: 42326 - DNA, 25 bp, Artificial
  probe
  misc_feature (1)..(25): SEQ ID NO: 1329; WAN024A4G_at; Start 34; Stop 58
gtttttcgcccttcgtgatatgagc

SEQ ID NO: 42327 - DNA, 25 bp, Artificial
  probe
  misc_feature (1)..(25): SEQ ID NO: 1329; WAN024A4G_at; Start 5; Stop 29
caagttcattgaatgaaggtggtac

SEQ ID NO: 42328 - DNA, 25 bp, Artificial
  probe
  misc_feature (1)..(25): SEQ ID NO: 1329; WAN024A4G_at; Start 3; Stop 27
gacaagttcattgaatgaaggtggt

SEQ ID NO: 42329 - DNA, 25 bp, Artificial
  probe
  misc_feature (1)..(25): SEQ ID NO: 1329; WAN024A4G_at; Start 1; Stop 25
atgacaagttcattgaatgaaggtg

SEQ ID NO: 42330 - DNA, 25 bp, Artificial
  probe
  misc_feature (1)..(25): SEQ ID NO: 1329; WAN024A4G_at; Start 30; Stop 54
cgcggtttttcgcccttcgtgatat

SEQ ID NO: 42331 - DNA, 25 bp, Artificial
  probe
  misc_feature (1)..(25): SEQ ID NO: 1329; WAN024A4G_at; Start 44; Stop 68
cttcgtgatatgagcttgtcttttg

SEQ ID NO: 42332 - DNA, 25 bp, Artificial
  probe
  misc_feature (1)..(25): SEQ ID NO: 1329; WAN024A4G_at; Start 6; Stop 30
aagttcattgaatgaaggtggtacc

SEQ ID NO: 42333 - DNA, 25 bp, Artificial
  probe
  misc_feature (1)..(25): SEQ ID NO: 1329; WAN024A4G_at; Start 33; Stop 57
ggtttttcgcccttcgtgatatgag

SEQ ID NO: 42334 - DNA, 25 bp, Artificial
  probe
  misc_feature (1)..(25): SEQ ID NO: 1329; WAN024A4G_at; Start 45; Stop 69
ttcgtgatatgagcttgtcttttga

SEQ ID NO: 42335 - DNA, 25 bp, Artificial
  probe
  misc_feature (1)..(25): SEQ ID NO: 1329; WAN024A4G_at; Start 41; Stop 65
gcccttcgtgatatgagcttgtctt

SEQ ID NO: 42336 - DNA, 25 bp, Artificial
  probe
  misc_feature (1)..(25): SEQ ID NO: 1329; WAN024A4G_at; Start 2; Stop 26
tgacaagttcattgaatgaaggtgg

SEQ ID NO: 42337 - DNA, 25 bp, Artificial
  probe
  misc_feature (1)..(25): SEQ ID NO: 1329; WAN024A4G_at; Start 35; Stop 59
tttttcgcccttcgtgatatgagct

SEQ ID NO: 42338 - DNA, 25 bp, Artificial
  probe
  misc_feature (1)..(25): SEQ ID NO: 1329; WAN024A4G_at; Start 8; Stop 32
gttcattgaatgaaggtggtaccgc

SEQ ID NO: 42339 - DNA, 25 bp, Artificial
  probe
  misc_feature (1)..(25): SEQ ID NO: 1329; WAN024A4G_at; Start 37; Stop 61
tttcgcccttcgtgatatgagcttg

SEQ ID NO: 42340 - DNA, 25 bp, Artificial
  probe
  misc_feature (1)..(25): SEQ ID NO: 149; WAN024A4H_at; Start 45; Stop 69
taccaccttcattcaatgaacttgt

SEQ ID NO: 42341 - DNA, 25 bp, Artificial
  probe
  misc_feature (1)..(25): SEQ ID NO: 149; WAN024A4H_at; Start 43; Stop 67
ggtaccaccttcattcaatgaactt

SEQ ID NO: 42342 - DNA, 25 bp, Artificial
  probe
  misc_feature (1)..(25): SEQ ID NO: 149; WAN024A4H_at; Start 17; Stop 41
tcatatcacgaagggcgaaaaaccg

SEQ ID NO: 42343 - DNA, 25 bp, Artificial
  probe
  misc_feature (1)..(25): SEQ ID NO: 149; WAN024A4H_at; Start 47; Stop 71
ccaccttcattcaatgaacttgtca

SEQ ID NO: 42344 - DNA, 25 bp, Artificial
  probe
  misc_feature (1)..(25): SEQ ID NO: 149; WAN024A4H_at; Start 6; Stop 30
aaaagacaagctcatatcacgaagg

SEQ ID NO: 42345 - DNA, 25 bp, Artificial
  probe
  misc_feature (1)..(25): SEQ ID NO: 149; WAN024A4H_at; Start 18; Stop 42
catatcacgaagggcgaaaaaccgc

SEQ ID NO: 42346 - DNA, 25 bp, Artificial
  probe
  misc_feature (1)..(25): SEQ ID NO: 149; WAN024A4H_at; Start 37; Stop 61
aaccgcggtaccaccttcattcaat

SEQ ID NO: 42347 - DNA, 25 bp, Artificial
  probe
  misc_feature (1)..(25): SEQ ID NO: 149; WAN024A4H_at; Start 13; Stop 37
aagctcatatcacgaagggcgaaaa

SEQ ID NO: 42348 - DNA, 25 bp, Artificial
  probe
  misc_feature (1)..(25): SEQ ID NO: 149; WAN024A4H_at; Start 42; Stop 66
cggtaccaccttcattcaatgaact

SEQ ID NO: 42349 - DNA, 25 bp, Artificial
  probe
  misc_feature (1)..(25): SEQ ID NO: 149; WAN024A4H_at; Start 12; Stop 36
caagctcatatcacgaagggcgaaa

SEQ ID NO: 42350 - DNA, 25 bp, Artificial
  probe
  misc_feature (1)..(25): SEQ ID NO: 149; WAN024A4H_at; Start 5; Stop 29
caaaagacaagctcatatcacgaag

SEQ ID NO: 42351 - DNA, 25 bp, Artificial
  probe
  misc_feature (1)..(25): SEQ ID NO: 149; WAN024A4H_at; Start 19; Stop 43
atatcacgaagggcgaaaaaccgcg

SEQ ID NO: 42352 - DNA, 25 bp, Artificial
  probe
  misc_feature (1)..(25): SEQ ID NO: 149; WAN024A4H_at; Start 48; Stop 72
caccttcattcaatgaacttgtcat

SEQ ID NO: 42353 - DNA, 25 bp, Artificial
  probe
  misc_feature (1)..(25): SEQ ID NO: 149; WAN024A4H_at; Start 8; Stop 32
aagacaagctcatatcacgaagggc

SEQ ID NO: 42354 - DNA, 25 bp, Artificial
  probe
  misc_feature (1)..(25): SEQ ID NO: 149; WAN024A4H_at; Start 9; Stop 33
agacaagctcatatcacgaagggcg

SEQ ID NO: 42355 - DNA, 25 bp, Artificial
  probe
  misc_feature (1)..(25): SEQ ID NO: 149; WAN024A4H_at; Start 15; Stop 39
gctcatatcacgaagggcgaaaaac

SEQ ID NO: 42356 - DNA, 25 bp, Artificial
  probe
  misc_feature (1)..(25): SEQ ID NO: 149; WAN024A4H_at; Start 14; Stop 38
agctcatatcacgaagggcgaaaaa

SEQ ID NO: 42357 - DNA, 25 bp, Artificial
  probe
  misc_feature (1)..(25): SEQ ID NO: 149; WAN024A4H_at; Start 46; Stop 70
accaccttcattcaatgaacttgtc

SEQ ID NO: 42358 - DNA, 25 bp, Artificial
  probe
  misc_feature (1)..(25): SEQ ID NO: 149; WAN024A4H_at; Start 16; Stop 40
ctcatatcacgaagggcgaaaaacc

SEQ ID NO: 42359 - DNA, 25 bp, Artificial
  probe
  misc_feature (1)..(25): SEQ ID NO: 149; WAN024A4H_at; Start 11; Stop 35
acaagctcatatcacgaagggcgaa

SEQ ID NO: 42360 - DNA, 25 bp, Artificial
  probe
  misc_feature (1)..(25): SEQ ID NO: 149; WAN024A4H_at; Start 1; Stop 25
aaatcaaaagacaagctcatatcac

SEQ ID NO: 42361 - DNA, 25 bp, Artificial
  probe
  misc_feature (1)..(25): SEQ ID NO: 149; WAN024A4H_at; Start 39; Stop 63
ccgcggtaccaccttcattcaatga

SEQ ID NO: 42362 - DNA, 25 bp, Artificial
  probe
  misc_feature (1)..(25): SEQ ID NO: 149; WAN024A4H_at; Start 7; Stop 31
aaagacaagctcatatcacgaaggg

SEQ ID NO: 42363 - DNA, 25 bp, Artificial
  probe
  misc_feature (1)..(25): SEQ ID NO: 149; WAN024A4H_at; Start 38; Stop 62
accgcggtaccaccttcattcaatg

SEQ ID NO: 42364 - DNA, 25 bp, Artificial
  probe
  misc_feature (1)..(25): SEQ ID NO: 149; WAN024A4H_at; Start 40; Stop 64
cgcggtaccaccttcattcaatgaa

SEQ ID NO: 42365 - DNA, 25 bp, Artificial
  probe
  misc_feature (1)..(25): SEQ ID NO: 149; WAN024A4H_at; Start 44; Stop 68
gtaccaccttcattcaatgaacttg

SEQ ID NO: 42366 - DNA, 25 bp, Artificial
  probe
  misc_feature (1)..(25): SEQ ID NO: 149; WAN024A4H_at; Start 3; Stop 27
atcaaaagacaagctcatatcacga

SEQ ID NO: 42367 - DNA, 25 bp, Artificial
  probe
  misc_feature (1)..(25): SEQ ID NO: 149; WAN024A4H_at; Start 10; Stop 34
gacaagctcatatcacgaagggcga

SEQ ID NO: 42368 - DNA, 25 bp, Artificial
  probe
  misc_feature (1)..(25): SEQ ID NO: 149; WAN024A4H_at; Start 4; Stop 28
tcaaaagacaagctcatatcacgaa

SEQ ID NO: 42369 - DNA, 25 bp, Artificial
  probe
  misc_feature (1)..(25): SEQ ID NO: 149; WAN024A4H_at; Start 2; Stop 26
aatcaaaagacaagctcatatcacg

SEQ ID NO: 42370 - DNA, 25 bp, Artificial
  probe
  misc_feature (1)..(25): SEQ ID NO: 149; WAN024A4H_at; Start 41; Stop 65
gcggtaccaccttcattcaatgaac

SEQ ID NO: 42371 - DNA, 25 bp, Artificial
  probe
  misc_feature (1)..(25): SEQ ID NO: 4584; WAN024A4I_at; Start 6; Stop 30
taaagatctatccatttgggtaggt

SEQ ID NO: 42372 - DNA, 25 bp, Artificial
  probe
  misc_feature (1)..(25): SEQ ID NO: 4584; WAN024A4I_at; Start 52; Stop 76
ccaaatccgcttggacctagcttgg

SEQ ID NO: 42373 - DNA, 25 bp, Artificial
  probe
  misc_feature (1)..(25): SEQ ID NO: 4584; WAN024A4I_at; Start 53; Stop 77
caaatccgcttggacctagcttggt

SEQ ID NO: 42374 - DNA, 25 bp, Artificial
  probe
  misc_feature (1)..(25): SEQ ID NO: 4584; WAN024A4I_at; Start 13; Stop 37
ctatccatttgggtaggtctttttg

SEQ ID NO: 42375 - DNA, 25 bp, Artificial
  probe
  misc_feature (1)..(25): SEQ ID NO: 4584; WAN024A4I_at; Start 65; Stop 89
gacctagcttggttattatgagcta

SEQ ID NO: 42376 - DNA, 25 bp, Artificial
  probe
  misc_feature (1)..(25): SEQ ID NO: 4584; WAN024A4I_at; Start 10; Stop 34
gatctatccatttgggtaggtcttt

SEQ ID NO: 42377 - DNA, 25 bp, Artificial
  probe
  misc_feature (1)..(25): SEQ ID NO: 4584; WAN024A4I_at; Start 56; Stop 80
atccgcttggacctagcttggttat

SEQ ID NO: 42378 - DNA, 25 bp, Artificial
  probe
  misc_feature (1)..(25): SEQ ID NO: 4584; WAN024A4I_at; Start 61; Stop 85
cttggacctagcttggttattatga

SEQ ID NO: 42379 - DNA, 25 bp, Artificial
  probe
  misc_feature (1)..(25): SEQ ID NO: 4584; WAN024A4I_at; Start 41; Stop 65
atacaaaaaagccaaatccgcttgg

SEQ ID NO: 42380 - DNA, 25 bp, Artificial
  probe
  misc_feature (1)..(25): SEQ ID NO: 4584; WAN024A4I_at; Start 59; Stop 83
cgcttggacctagcttggttattat

SEQ ID NO: 42381 - DNA, 25 bp, Artificial
  probe
  misc_feature (1)..(25): SEQ ID NO: 4584; WAN024A4I_at; Start 63; Stop 87
tggacctagcttggttattatgagc

SEQ ID NO: 42382 - DNA, 25 bp, Artificial
  probe
  misc_feature (1)..(25): SEQ ID NO: 4584; WAN024A4I_at; Start 50; Stop 74
agccaaatccgcttggacctagctt

SEQ ID NO: 42383 - DNA, 25 bp, Artificial
  probe
  misc_feature (1)..(25): SEQ ID NO: 4584; WAN024A4I_at; Start 38; Stop 62
tgaatacaaaaaagccaaatccgct

SEQ ID NO: 42384 - DNA, 25 bp, Artificial
  probe
  misc_feature (1)..(25): SEQ ID NO: 4584; WAN024A4I_at; Start 60; Stop 84
gcttggacctagcttggttattatg

SEQ ID NO: 42385 - DNA, 25 bp, Artificial
  probe
  misc_feature (1)..(25): SEQ ID NO: 4584; WAN024A4I_at; Start 4; Stop 28
agtaaagatctatccatttgggtag

SEQ ID NO: 42386 - DNA, 25 bp, Artificial
  probe
  misc_feature (1)..(25): SEQ ID NO: 4584; WAN024A4I_at; Start 55; Stop 79
aatccgcttggacctagcttggtta

SEQ ID NO: 42387 - DNA, 25 bp, Artificial
  probe
  misc_feature (1)..(25): SEQ ID NO: 4584; WAN024A4I_at; Start 36; Stop 60
tgtgaatacaaaaaagccaaatccg

SEQ ID NO: 42388 - DNA, 25 bp, Artificial
  probe
  misc_feature (1)..(25): SEQ ID NO: 4584; WAN024A4I_at; Start 51; Stop 75
gccaaatccgcttggacctagcttg

SEQ ID NO: 42389 - DNA, 25 bp, Artificial
  probe
  misc_feature (1)..(25): SEQ ID NO: 4584; WAN024A4I_at; Start 8; Stop 32
aagatctatccatttgggtaggtct

SEQ ID NO: 42390 - DNA, 25 bp, Artificial
  probe
  misc_feature (1)..(25): SEQ ID NO: 4584; WAN024A4I_at; Start 42; Stop 66
tacaaaaaagccaaatccgcttgga

SEQ ID NO: 42391 - DNA, 25 bp, Artificial
  probe
  misc_feature (1)..(25): SEQ ID NO: 4584; WAN024A4I_at; Start 54; Stop 78
aaatccgcttggacctagcttggtt

SEQ ID NO: 42392 - DNA, 25 bp, Artificial
  probe
  misc_feature (1)..(25): SEQ ID NO: 4584; WAN024A4I_at; Start 57; Stop 81
tccgcttggacctagcttggttatt

SEQ ID NO: 42393 - DNA, 25 bp, Artificial
  probe
  misc_feature (1)..(25): SEQ ID NO: 4584; WAN024A4I_at; Start 18; Stop 42
catttgggtaggtctttttgtgaat

SEQ ID NO: 42394 - DNA, 25 bp, Artificial
  probe
  misc_feature (1)..(25): SEQ ID NO: 4584; WAN024A4I_at; Start 5; Stop 29
gtaaagatctatccatttgggtagg

SEQ ID NO: 42395 - DNA, 25 bp, Artificial
  probe
  misc_feature (1)..(25): SEQ ID NO: 4584; WAN024A4I_at; Start 58; Stop 82
ccgcttggacctagcttggttatta

SEQ ID NO: 42396 - DNA, 25 bp, Artificial
  probe
  misc_feature (1)..(25): SEQ ID NO: 4584; WAN024A4I_at; Start 16; Stop 40
tccatttgggtaggtctttttgtga

SEQ ID NO: 42397 - DNA, 25 bp, Artificial
  probe
  misc_feature (1)..(25): SEQ ID NO: 4584; WAN024A4I_at; Start 64; Stop 88
ggacctagcttggttattatgagct

SEQ ID NO: 42398 - DNA, 25 bp, Artificial
  probe
  misc_feature (1)..(25): SEQ ID NO: 4584; WAN024A4I_at; Start 1; Stop 25
tcaagtaaagatctatccatttggg

SEQ ID NO: 42399 - DNA, 25 bp, Artificial
  probe
  misc_feature (1)..(25): SEQ ID NO: 4584; WAN024A4I_at; Start 22; Stop 46
tgggtaggtctttttgtgaatacaa

SEQ ID NO: 42400 - DNA, 25 bp, Artificial
  probe
  misc_feature (1)..(25): SEQ ID NO: 4584; WAN024A4I_at; Start 3; Stop 27
aagtaaagatctatccatttgggta

SEQ ID NO: 42401 - DNA, 25 bp, Artificial
  probe
  misc_feature (1)..(25): SEQ ID NO: 4584; WAN024A4I_at; Start 37; Stop 61
gtgaatacaaaaaagccaaatccgc

SEQ ID NO: 42402 - DNA, 25 bp, Artificial
  probe
  misc_feature (1)..(25): SEQ ID NO: 4584; WAN024A4I_at; Start 2; Stop 26
caagtaaagatctatccatttgggt

SEQ ID NO: 42403 - DNA, 25 bp, Artificial
  probe
  misc_feature (1)..(25): SEQ ID NO: 4584; WAN024A4I_at; Start 7; Stop 31
aaagatctatccatttgggtaggtc

SEQ ID NO: 42404 - DNA, 25 bp, Artificial
  probe
  misc_feature (1)..(25): SEQ ID NO: 4584; WAN024A4I_at; Start 49; Stop 73
aagccaaatccgcttggacctagct

SEQ ID NO: 42405 - DNA, 25 bp, Artificial
  probe
  misc_feature (1)..(25): SEQ ID NO: 4512; WAN024A4J_at; Start 56; Stop 80
aaagacctacccaaatggatagatc

SEQ ID NO: 42406 - DNA, 25 bp, Artificial
  probe
  misc_feature (1)..(25): SEQ ID NO: 4512; WAN024A4J_at; Start 3; Stop 27
gctcataataaccaagctaggtcca

SEQ ID NO: 42407 - DNA, 25 bp, Artificial
  probe
  misc_feature (1)..(25): SEQ ID NO: 4512; WAN024A4J_at; Start 8; Stop 32
taataaccaagctaggtccaagcgg

SEQ ID NO: 42408 - DNA, 25 bp, Artificial
  probe
  misc_feature (1)..(25): SEQ ID NO: 4512; WAN024A4J_at; Start 11; Stop 35
taaccaagctaggtccaagcggatt

SEQ ID NO: 42409 - DNA, 25 bp, Artificial
  probe
  misc_feature (1)..(25): SEQ ID NO: 4512; WAN024A4J_at; Start 59; Stop 83
gacctacccaaatggatagatcttt

SEQ ID NO: 42410 - DNA, 25 bp, Artificial
  probe
  misc_feature (1)..(25): SEQ ID NO: 4512; WAN024A4J_at; Start 10; Stop 34
ataaccaagctaggtccaagcggat

SEQ ID NO: 42411 - DNA, 25 bp, Artificial
  probe
  misc_feature (1)..(25): SEQ ID NO: 4512; WAN024A4J_at; Start 4; Stop 28
ctcataataaccaagctaggtccaa

SEQ ID NO: 42412 - DNA, 25 bp, Artificial
  probe
  misc_feature (1)..(25): SEQ ID NO: 4512; WAN024A4J_at; Start 64; Stop 88
acccaaatggatagatctttacttg

SEQ ID NO: 42413 - DNA, 25 bp, Artificial
  probe
  misc_feature (1)..(25): SEQ ID NO: 4512; WAN024A4J_at; Start 14; Stop 38
ccaagctaggtccaagcggatttgg

SEQ ID NO: 42414 - DNA, 25 bp, Artificial
  probe
  misc_feature (1)..(25): SEQ ID NO: 4512; WAN024A4J_at; Start 45; Stop 69
tgtattcacaaaaagacctacccaa

SEQ ID NO: 42415 - DNA, 25 bp, Artificial
  probe
  misc_feature (1)..(25): SEQ ID NO: 4512; WAN024A4J_at; Start 15; Stop 39
caagctaggtccaagcggatttggc

SEQ ID NO: 42416 - DNA, 25 bp, Artificial
  probe
  misc_feature (1)..(25): SEQ ID NO: 4512; WAN024A4J_at; Start 17; Stop 41
agctaggtccaagcggatttggctt

SEQ ID NO: 42417 - DNA, 25 bp, Artificial
  probe
  misc_feature (1)..(25): SEQ ID NO: 4512; WAN024A4J_at; Start 9; Stop 33
aataaccaagctaggtccaagcgga

SEQ ID NO: 42418 - DNA, 25 bp, Artificial
  probe
  misc_feature (1)..(25): SEQ ID NO: 4512; WAN024A4J_at; Start 57; Stop 81
aagacctacccaaatggatagatct

SEQ ID NO: 42419 - DNA, 25 bp, Artificial
  probe
  misc_feature (1)..(25): SEQ ID NO: 4512; WAN024A4J_at; Start 55; Stop 79
aaaagacctacccaaatggatagat

SEQ ID NO: 42420 - DNA, 25 bp, Artificial
  probe
  misc_feature (1)..(25): SEQ ID NO: 4512; WAN024A4J_at; Start 44; Stop 68
ttgtattcacaaaaagacctaccca

SEQ ID NO: 42421 - DNA, 25 bp, Artificial
  probe
  misc_feature (1)..(25): SEQ ID NO: 4512; WAN024A4J_at; Start 51; Stop 75
cacaaaaagacctacccaaatggat

SEQ ID NO: 42422 - DNA, 25 bp, Artificial
  probe
  misc_feature (1)..(25): SEQ ID NO: 4512; WAN024A4J_at; Start 16; Stop 40
aagctaggtccaagcggatttggct

SEQ ID NO: 42423 - DNA, 25 bp, Artificial
  probe
  misc_feature (1)..(25): SEQ ID NO: 4512; WAN024A4J_at; Start 53; Stop 77
caaaaagacctacccaaatggatag

SEQ ID NO: 42424 - DNA, 25 bp, Artificial
  probe
  misc_feature (1)..(25): SEQ ID NO: 4512; WAN024A4J_at; Start 63; Stop 87
tacccaaatggatagatctttactt

SEQ ID NO: 42425 - DNA, 25 bp, Artificial
  probe
  misc_feature (1)..(25): SEQ ID NO: 4512; WAN024A4J_at; Start 12; Stop 36
aaccaagctaggtccaagcggattt

SEQ ID NO: 42426 - DNA, 25 bp, Artificial
  probe
  misc_feature (1)..(25): SEQ ID NO: 4512; WAN024A4J_at; Start 1; Stop 25
tagctcataataaccaagctaggtc

SEQ ID NO: 42427 - DNA, 25 bp, Artificial
  probe
  misc_feature (1)..(25): SEQ ID NO: 4512; WAN024A4J_at; Start 19; Stop 43
ctaggtccaagcggatttggctttt

SEQ ID NO: 42428 - DNA, 25 bp, Artificial
  probe
  misc_feature (1)..(25): SEQ ID NO: 4512; WAN024A4J_at; Start 6; Stop 30
cataataaccaagctaggtccaagc

SEQ ID NO: 42429 - DNA, 25 bp, Artificial
  probe
  misc_feature (1)..(25): SEQ ID NO: 4512; WAN024A4J_at; Start 50; Stop 74
tcacaaaaagacctacccaaatgga

SEQ ID NO: 42430 - DNA, 25 bp, Artificial
  probe
  misc_feature (1)..(25): SEQ ID NO: 4512; WAN024A4J_at; Start 13; Stop 37
accaagctaggtccaagcggatttg

SEQ ID NO: 42431 - DNA, 25 bp, Artificial
  probe
  misc_feature (1)..(25): SEQ ID NO: 4512; WAN024A4J_at; Start 61; Stop 85
cctacccaaatggatagatctttac

SEQ ID NO: 42432 - DNA, 25 bp, Artificial
  probe
  misc_feature (1)..(25): SEQ ID NO: 4512; WAN024A4J_at; Start 65; Stop 89
cccaaatggatagatctttacttga

SEQ ID NO: 42433 - DNA, 25 bp, Artificial
  probe
  misc_feature (1)..(25): SEQ ID NO: 4512; WAN024A4J_at; Start 48; Stop 72
attcacaaaaagacctacccaaatg

SEQ ID NO: 42434 - DNA, 25 bp, Artificial
  probe
  misc_feature (1)..(25): SEQ ID NO: 4512; WAN024A4J_at; Start 62; Stop 86
ctacccaaatggatagatctttact

SEQ ID NO: 42435 - DNA, 25 bp, Artificial
  probe
  misc_feature (1)..(25): SEQ ID NO: 4512; WAN024A4J_at; Start 7; Stop 31
ataataaccaagctaggtccaagcg

SEQ ID NO: 42436 - DNA, 25 bp, Artificial
  probe
  misc_feature (1)..(25): SEQ ID NO: 4512; WAN024A4J_at; Start 5; Stop 29
tcataataaccaagctaggtccaag

SEQ ID NO: 42437 - DNA, 25 bp, Artificial
  probe
  misc_feature (1)..(25): SEQ ID NO: 4512; WAN024A4J_at; Start 2; Stop 26
agctcataataaccaagctaggtcc

SEQ ID NO: 42438 - DNA, 25 bp, Artificial
  probe
  misc_feature (1)..(25): SEQ ID NO: 4512; WAN024A4J_at; Start 60; Stop 84
acctacccaaatggatagatcttta

SEQ ID NO: 42439 - DNA, 25 bp, Artificial
  probe
  misc_feature (1)..(25): SEQ ID NO: 87; WAN024A4K_at; Start 60; Stop 84
tgcgctaatagatactttatgatag

SEQ ID NO: 42440 - DNA, 25 bp, Artificial
  probe
  misc_feature (1)..(25): SEQ ID NO: 87; WAN024A4K_at; Start 43; Stop 67
tatcttacgcaaacgtttgcgctaa

SEQ ID NO: 42441 - DNA, 25 bp, Artificial
  probe
  misc_feature (1)..(25): SEQ ID NO: 87; WAN024A4K_at; Start 33; Stop 57
agtttccttctatcttacgcaaacg

SEQ ID NO: 42442 - DNA, 25 bp, Artificial
  probe
  misc_feature (1)..(25): SEQ ID NO: 87; WAN024A4K_at; Start 90; Stop 114
agaacaagattgacaagtaagagga

SEQ ID NO: 42443 - DNA, 25 bp, Artificial
  probe
  misc_feature (1)..(25): SEQ ID NO: 87; WAN024A4K_at; Start 30; Stop 54
aatagtttccttctatcttacgcaa

SEQ ID NO: 42444 - DNA, 25 bp, Artificial
  probe
  misc_feature (1)..(25): SEQ ID NO: 87; WAN024A4K_at; Start 52; Stop 76
caaacgtttgcgctaatagatactt

SEQ ID NO: 42445 - DNA, 25 bp, Artificial
  probe
  misc_feature (1)..(25): SEQ ID NO: 87; WAN024A4K_at; Start 87; Stop 111
taaagaacaagattgacaagtaaga

SEQ ID NO: 42446 - DNA, 25 bp, Artificial
  probe
  misc_feature (1)..(25): SEQ ID NO: 87; WAN024A4K_at; Start 57; Stop 81
gtttgcgctaatagatactttatga

SEQ ID NO: 42447 - DNA, 25 bp, Artificial
  probe
  misc_feature (1)..(25): SEQ ID NO: 87; WAN024A4K_at; Start 82; Stop 106
tagaataaagaacaagattgacaag

SEQ ID NO: 42448 - DNA, 25 bp, Artificial
  probe
  misc_feature (1)..(25): SEQ ID NO: 87; WAN024A4K_at; Start 84; Stop 108
gaataaagaacaagattgacaagta

SEQ ID NO: 42449 - DNA, 25 bp, Artificial
  probe
  misc_feature (1)..(25): SEQ ID NO: 87; WAN024A4K_at; Start 95; Stop 119
aagattgacaagtaagaggaaacat

SEQ ID NO: 42450 - DNA, 25 bp, Artificial
  probe
  misc_feature (1)..(25): SEQ ID NO: 87; WAN024A4K_at; Start 56; Stop 80
cgtttgcgctaatagatactttatg

SEQ ID NO: 42451 - DNA, 25 bp, Artificial
  probe
  misc_feature (1)..(25): SEQ ID NO: 87; WAN024A4K_at; Start 93; Stop 117
acaagattgacaagtaagaggaaac

SEQ ID NO: 42452 - DNA, 25 bp, Artificial
  probe
  misc_feature (1)..(25): SEQ ID NO: 87; WAN024A4K_at; Start 77; Stop 101
tatgatagaataaagaacaagattg

SEQ ID NO: 42453 - DNA, 25 bp, Artificial
  probe
  misc_feature (1)..(25): SEQ ID NO: 87; WAN024A4K_at; Start 79; Stop 103
tgatagaataaagaacaagattgac

SEQ ID NO: 42454 - DNA, 25 bp, Artificial
  probe
  misc_feature (1)..(25): SEQ ID NO: 87; WAN024A4K_at; Start 61; Stop 85
gcgctaatagatactttatgataga

SEQ ID NO: 42455 - DNA, 25 bp, Artificial
  probe
  misc_feature (1)..(25): SEQ ID NO: 87; WAN024A4K_at; Start 62; Stop 86
cgctaatagatactttatgatagaa

SEQ ID NO: 42456 - DNA, 25 bp, Artificial
  probe
  misc_feature (1)..(25): SEQ ID NO: 87; WAN024A4K_at; Start 47; Stop 71
ttacgcaaacgtttgcgctaataga

SEQ ID NO: 42457 - DNA, 25 bp, Artificial
  probe
  misc_feature (1)..(25): SEQ ID NO: 87; WAN024A4K_at; Start 38; Stop 62
ccttctatcttacgcaaacgtttgc

SEQ ID NO: 42458 - DNA, 25 bp, Artificial
  probe
  misc_feature (1)..(25): SEQ ID NO: 87; WAN024A4K_at; Start 41; Stop 65
tctatcttacgcaaacgtttgcgct

SEQ ID NO: 42459 - DNA, 25 bp, Artificial
  probe
  misc_feature (1)..(25): SEQ ID NO: 87; WAN024A4K_at; Start 54; Stop 78
aacgtttgcgctaatagatacttta

SEQ ID NO: 42460 - DNA, 25 bp, Artificial
  probe
  misc_feature (1)..(25): SEQ ID NO: 87; WAN024A4K_at; Start 91; Stop 115
gaacaagattgacaagtaagaggaa

SEQ ID NO: 42461 - DNA, 25 bp, Artificial
  probe
  misc_feature (1)..(25): SEQ ID NO: 87; WAN024A4K_at; Start 80; Stop 104
gatagaataaagaacaagattgaca

SEQ ID NO: 42462 - DNA, 25 bp, Artificial
  probe
  misc_feature (1)..(25): SEQ ID NO: 87; WAN024A4K_at; Start 49; Stop 73
acgcaaacgtttgcgctaatagata

SEQ ID NO: 42463 - DNA, 25 bp, Artificial
  probe
  misc_feature (1)..(25): SEQ ID NO: 87; WAN024A4K_at; Start 40; Stop 64
ttctatcttacgcaaacgtttgcgc

SEQ ID NO: 42464 - DNA, 25 bp, Artificial
  probe
  misc_feature (1)..(25): SEQ ID NO: 87; WAN024A4K_at; Start 94; Stop 118
caagattgacaagtaagaggaaaca

SEQ ID NO: 42465 - DNA, 25 bp, Artificial
  probe
  misc_feature (1)..(25): SEQ ID NO: 87; WAN024A4K_at; Start 42; Stop 66
ctatcttacgcaaacgtttgcgcta

SEQ ID NO: 42466 - DNA, 25 bp, Artificial
  probe
  misc_feature (1)..(25): SEQ ID NO: 87; WAN024A4K_at; Start 32; Stop 56
tagtttccttctatcttacgcaaac

SEQ ID NO: 42467 - DNA, 25 bp, Artificial
  probe
  misc_feature (1)..(25): SEQ ID NO: 87; WAN024A4K_at; Start 48; Stop 72
tacgcaaacgtttgcgctaatagat

SEQ ID NO: 42468 - DNA, 25 bp, Artificial
  probe
  misc_feature (1)..(25): SEQ ID NO: 87; WAN024A4K_at; Start 89; Stop 113
aagaacaagattgacaagtaagagg

SEQ ID NO: 42469 - DNA, 25 bp, Artificial
  probe
  misc_feature (1)..(25): SEQ ID NO: 87; WAN024A4K_at; Start 96; Stop 120
agattgacaagtaagaggaaacatt

SEQ ID NO: 42470 - DNA, 25 bp, Artificial
  probe
  misc_feature (1)..(25): SEQ ID NO: 87; WAN024A4K_at; Start 37; Stop 61
tccttctatcttacgcaaacgtttg

SEQ ID NO: 42471 - DNA, 25 bp, Artificial
  probe
  misc_feature (1)..(25): SEQ ID NO: 87; WAN024A4K_at; Start 45; Stop 69
tcttacgcaaacgtttgcgctaata

SEQ ID NO: 42472 - DNA, 25 bp, Artificial
  probe
  misc_feature (1)..(25): SEQ ID NO: 87; WAN024A4K_at; Start 29; Stop 53
aaatagtttccttctatcttacgca

SEQ ID NO: 42473 - DNA, 25 bp, Artificial
  probe
  misc_feature (1)..(25): SEQ ID NO: 290; WAN024A4L_at; Start 4; Stop 28
gtttcctcttacttgtcaatcttgt

SEQ ID NO: 42474 - DNA, 25 bp, Artificial
  probe
  misc_feature (1)..(25): SEQ ID NO: 290; WAN024A4L_at; Start 60; Stop 84
caaacgtttgcgtaagatagaagga

SEQ ID NO: 42475 - DNA, 25 bp, Artificial
  probe
  misc_feature (1)..(25): SEQ ID NO: 290; WAN024A4L_at; Start 41; Stop 65
cataaagtatctattagcgcaaacg

SEQ ID NO: 42476 - DNA, 25 bp, Artificial
  probe
  misc_feature (1)..(25): SEQ ID NO: 290; WAN024A4L_at; Start 13; Stop 37
tacttgtcaatcttgttctttattc

SEQ ID NO: 42477 - DNA, 25 bp, Artificial
  probe
  misc_feature (1)..(25): SEQ ID NO: 290; WAN024A4L_at; Start 8; Stop 32
cctcttacttgtcaatcttgttctt

SEQ ID NO: 42478 - DNA, 25 bp, Artificial
  probe
  misc_feature (1)..(25): SEQ ID NO: 290; WAN024A4L_at; Start 65; Stop 89
gtttgcgtaagatagaaggaaacta

SEQ ID NO: 42479 - DNA, 25 bp, Artificial
  probe
  misc_feature (1)..(25): SEQ ID NO: 290; WAN024A4L_at; Start 18; Stop 42
gtcaatcttgttctttattctatca

SEQ ID NO: 42480 - DNA, 25 bp, Artificial
  probe
  misc_feature (1)..(25): SEQ ID NO: 290; WAN024A4L_at; Start 66; Stop 90
tttgcgtaagatagaaggaaactat

SEQ ID NO: 42481 - DNA, 25 bp, Artificial
  probe
  misc_feature (1)..(25): SEQ ID NO: 290; WAN024A4L_at; Start 10; Stop 34
tcttacttgtcaatcttgttcttta

SEQ ID NO: 42482 - DNA, 25 bp, Artificial
  probe
  misc_feature (1)..(25): SEQ ID NO: 290; WAN024A4L_at; Start 43; Stop 67
taaagtatctattagcgcaaacgtt

SEQ ID NO: 42483 - DNA, 25 bp, Artificial
  probe
  misc_feature (1)..(25): SEQ ID NO: 290; WAN024A4L_at; Start 64; Stop 88
cgtttgcgtaagatagaaggaaact

SEQ ID NO: 42484 - DNA, 25 bp, Artificial
  probe
  misc_feature (1)..(25): SEQ ID NO: 290; WAN024A4L_at; Start 1; Stop 25
aatgtttcctcttacttgtcaatct

SEQ ID NO: 42485 - DNA, 25 bp, Artificial
  probe
  misc_feature (1)..(25): SEQ ID NO: 290; WAN024A4L_at; Start 54; Stop 78
ttagcgcaaacgtttgcgtaagata

SEQ ID NO: 42486 - DNA, 25 bp, Artificial
  probe
  misc_feature (1)..(25): SEQ ID NO: 290; WAN024A4L_at; Start 59; Stop 83
gcaaacgtttgcgtaagatagaagg

SEQ ID NO: 42487 - DNA, 25 bp, Artificial
  probe
  misc_feature (1)..(25): SEQ ID NO: 290; WAN024A4L_at; Start 56; Stop 80
agcgcaaacgtttgcgtaagataga

SEQ ID NO: 42488 - DNA, 25 bp, Artificial
  probe
  misc_feature (1)..(25): SEQ ID NO: 290; WAN024A4L_at; Start 45; Stop 69
aagtatctattagcgcaaacgtttg

SEQ ID NO: 42489 - DNA, 25 bp, Artificial
  probe
  misc_feature (1)..(25): SEQ ID NO: 290; WAN024A4L_at; Start 51; Stop 75
ctattagcgcaaacgtttgcgtaag

SEQ ID NO: 42490 - DNA, 25 bp, Artificial
  probe
  misc_feature (1)..(25): SEQ ID NO: 290; WAN024A4L_at; Start 44; Stop 68
aaagtatctattagcgcaaacgttt

SEQ ID NO: 42491 - DNA, 25 bp, Artificial
  probe
  misc_feature (1)..(25): SEQ ID NO: 290; WAN024A4L_at; Start 20; Stop 44
caatcttgttctttattctatcata

SEQ ID NO: 42492 - DNA, 25 bp, Artificial
  probe
  misc_feature (1)..(25): SEQ ID NO: 290; WAN024A4L_at; Start 3; Stop 27
tgtttcctcttacttgtcaatcttg

SEQ ID NO: 42493 - DNA, 25 bp, Artificial
  probe
  misc_feature (1)..(25): SEQ ID NO: 290; WAN024A4L_at; Start 49; Stop 73
atctattagcgcaaacgtttgcgta

SEQ ID NO: 42494 - DNA, 25 bp, Artificial
  probe
  misc_feature (1)..(25): SEQ ID NO: 290; WAN024A4L_at; Start 52; Stop 76
tattagcgcaaacgtttgcgtaaga

SEQ ID NO: 42495 - DNA, 25 bp, Artificial
  probe
  misc_feature (1)..(25): SEQ ID NO: 290; WAN024A4L_at; Start 40; Stop 64
tcataaagtatctattagcgcaaac

SEQ ID NO: 42496 - DNA, 25 bp, Artificial
  probe
  misc_feature (1)..(25): SEQ ID NO: 290; WAN024A4L_at; Start 36; Stop 60
tctatcataaagtatctattagcgc

SEQ ID NO: 42497 - DNA, 25 bp, Artificial
  probe
  misc_feature (1)..(25): SEQ ID NO: 290; WAN024A4L_at; Start 57; Stop 81
gcgcaaacgtttgcgtaagatagaa

SEQ ID NO: 42498 - DNA, 25 bp, Artificial
  probe
  misc_feature (1)..(25): SEQ ID NO: 290; WAN024A4L_at; Start 7; Stop 31
tcctcttacttgtcaatcttgttct

SEQ ID NO: 42499 - DNA, 25 bp, Artificial
  probe
  misc_feature (1)..(25): SEQ ID NO: 290; WAN024A4L_at; Start 50; Stop 74
tctattagcgcaaacgtttgcgtaa

SEQ ID NO: 42500 - DNA, 25 bp, Artificial
  probe
  misc_feature (1)..(25): SEQ ID NO: 290; WAN024A4L_at; Start 6; Stop 30
ttcctcttacttgtcaatcttgttc

SEQ ID NO: 42501 - DNA, 25 bp, Artificial
  probe
  misc_feature (1)..(25): SEQ ID NO: 290; WAN024A4L_at; Start 39; Stop 63
atcataaagtatctattagcgcaaa

SEQ ID NO: 42502 - DNA, 25 bp, Artificial
  probe
  misc_feature (1)..(25): SEQ ID NO: 290; WAN024A4L_at; Start 48; Stop 72
tatctattagcgcaaacgtttgcgt

SEQ ID NO: 42503 - DNA, 25 bp, Artificial
  probe
  misc_feature (1)..(25): SEQ ID NO: 290; WAN024A4L_at; Start 55; Stop 79
tagcgcaaacgtttgcgtaagatag

SEQ ID NO: 42504 - DNA, 25 bp, Artificial
  probe
  misc_feature (1)..(25): SEQ ID NO: 290; WAN024A4L_at; Start 42; Stop 66
ataaagtatctattagcgcaaacgt

SEQ ID NO: 42505 - DNA, 25 bp, Artificial
  probe
  misc_feature (1)..(25): SEQ ID NO: 290; WAN024A4L_at; Start 38; Stop 62
tatcataaagtatctattagcgcaa

SEQ ID NO: 42506 - DNA, 25 bp, Artificial
  probe
  misc_feature (1)..(25): SEQ ID NO: 290; WAN024A4L_at; Start 37; Stop 61
ctatcataaagtatctattagcgca

SEQ ID NO: 42507 - DNA, 25 bp, Artificial
  probe
  misc_feature (1)..(25): SEQ ID NO: 3588; WAN024A4M_at; Start 21; Stop 45
gataaattcaattcgacaaacgctt

SEQ ID NO: 42508 - DNA, 25 bp, Artificial
  probe
  misc_feature (1)..(25): SEQ ID NO: 3588; WAN024A4M_at; Start 2; Stop 26
actggttggtcgcttgcttgataaa

SEQ ID NO: 42509 - DNA, 25 bp, Artificial
  probe
  misc_feature (1)..(25): SEQ ID NO: 3588; WAN024A4M_at; Start 12; Stop 36
cgcttgcttgataaattcaattcga

SEQ ID NO: 42510 - DNA, 25 bp, Artificial
  probe
  misc_feature (1)..(25): SEQ ID NO: 3588; WAN024A4M_at; Start 15; Stop 39
ttgcttgataaattcaattcgacaa

SEQ ID NO: 42511 - DNA, 25 bp, Artificial
  probe
  misc_feature (1)..(25): SEQ ID NO: 3588; WAN024A4M_at; Start 26; Stop 50
attcaattcgacaaacgcttttata

SEQ ID NO: 42512 - DNA, 25 bp, Artificial
  probe
  misc_feature (1)..(25): SEQ ID NO: 3588; WAN024A4M_at; Start 41; Stop 65
cgcttttatagtttgttagaatgta

SEQ ID NO: 42513 - DNA, 25 bp, Artificial
  probe
  misc_feature (1)..(25): SEQ ID NO: 3588; WAN024A4M_at; Start 42; Stop 66
gcttttatagtttgttagaatgtag

SEQ ID NO: 42514 - DNA, 25 bp, Artificial
  probe
  misc_feature (1)..(25): SEQ ID NO: 3588; WAN024A4M_at; Start 39; Stop 63
aacgcttttatagtttgttagaatg

SEQ ID NO: 42515 - DNA, 25 bp, Artificial
  probe
  misc_feature (1)..(25): SEQ ID NO: 3588; WAN024A4M_at; Start 20; Stop 44
tgataaattcaattcgacaaacgct

SEQ ID NO: 42516 - DNA, 25 bp, Artificial
  probe
  misc_feature (1)..(25): SEQ ID NO: 3588; WAN024A4M_at; Start 7; Stop 31
ttggtcgcttgcttgataaattcaa

SEQ ID NO: 42517 - DNA, 25 bp, Artificial
  probe
  misc_feature (1)..(25): SEQ ID NO: 3588; WAN024A4M_at; Start 29; Stop 53
caattcgacaaacgcttttatagtt

SEQ ID NO: 42518 - DNA, 25 bp, Artificial
  probe
  misc_feature (1)..(25): SEQ ID NO: 3588; WAN024A4M_at; Start 40; Stop 64
acgcttttatagtttgttagaatgt

SEQ ID NO: 42519 - DNA, 25 bp, Artificial
  probe
  misc_feature (1)..(25): SEQ ID NO: 3588; WAN024A4M_at; Start 6; Stop 30
gttggtcgcttgcttgataaattca

SEQ ID NO: 42520 - DNA, 25 bp, Artificial
  probe
  misc_feature (1)..(25): SEQ ID NO: 3588; WAN024A4M_at; Start 8; Stop 32
tggtcgcttgcttgataaattcaat

SEQ ID NO: 42521 - DNA, 25 bp, Artificial
  probe
  misc_feature (1)..(25): SEQ ID NO: 3588; WAN024A4M_at; Start 43; Stop 67
cttttatagtttgttagaatgtagt

SEQ ID NO: 42522 - DNA, 25 bp, Artificial
  probe
  misc_feature (1)..(25): SEQ ID NO: 3588; WAN024A4M_at; Start 47; Stop 71
tatagtttgttagaatgtagttgta

SEQ ID NO: 42523 - DNA, 25 bp, Artificial
  probe
  misc_feature (1)..(25): SEQ ID NO: 3588; WAN024A4M_at; Start 5; Stop 29
ggttggtcgcttgcttgataaattc

SEQ ID NO: 42524 - DNA, 25 bp, Artificial
  probe
  misc_feature (1)..(25): SEQ ID NO: 3588; WAN024A4M_at; Start 31; Stop 55
attcgacaaacgcttttatagtttg

SEQ ID NO: 42525 - DNA, 25 bp, Artificial
  probe
  misc_feature (1)..(25): SEQ ID NO: 3588; WAN024A4M_at; Start 48; Stop 72
atagtttgttagaatgtagttgtaa

SEQ ID NO: 42526 - DNA, 25 bp, Artificial
  probe
  misc_feature (1)..(25): SEQ ID NO: 3588; WAN024A4M_at; Start 18; Stop 42
cttgataaattcaattcgacaaacg

SEQ ID NO: 42527 - DNA, 25 bp, Artificial
  probe
  misc_feature (1)..(25): SEQ ID NO: 3588; WAN024A4M_at; Start 19; Stop 43
ttgataaattcaattcgacaaacgc

SEQ ID NO: 42528 - DNA, 25 bp, Artificial
  probe
  misc_feature (1)..(25): SEQ ID NO: 3588; WAN024A4M_at; Start 14; Stop 38
cttgcttgataaattcaattcgaca

SEQ ID NO: 42529 - DNA, 25 bp, Artificial
  probe
  misc_feature (1)..(25): SEQ ID NO: 3588; WAN024A4M_at; Start 9; Stop 33
ggtcgcttgcttgataaattcaatt

SEQ ID NO: 42530 - DNA, 25 bp, Artificial
  probe
  misc_feature (1)..(25): SEQ ID NO: 3588; WAN024A4M_at; Start 4; Stop 28
tggttggtcgcttgcttgataaatt

SEQ ID NO: 42531 - DNA, 25 bp, Artificial
  probe
  misc_feature (1)..(25): SEQ ID NO: 3588; WAN024A4M_at; Start 16; Stop 40
tgcttgataaattcaattcgacaaa

SEQ ID NO: 42532 - DNA, 25 bp, Artificial
  probe
  misc_feature (1)..(25): SEQ ID NO: 3588; WAN024A4M_at; Start 28; Stop 52
tcaattcgacaaacgcttttatagt

SEQ ID NO: 42533 - DNA, 25 bp, Artificial
  probe
  misc_feature (1)..(25): SEQ ID NO: 3588; WAN024A4M_at; Start 3; Stop 27
ctggttggtcgcttgcttgataaat

SEQ ID NO: 42534 - DNA, 25 bp, Artificial
  probe
  misc_feature (1)..(25): SEQ ID NO: 3588; WAN024A4M_at; Start 13; Stop 37
gcttgcttgataaattcaattcgac

SEQ ID NO: 42535 - DNA, 25 bp, Artificial
  probe
  misc_feature (1)..(25): SEQ ID NO: 3588; WAN024A4M_at; Start 27; Stop 51
ttcaattcgacaaacgcttttatag

SEQ ID NO: 42536 - DNA, 25 bp, Artificial
  probe
  misc_feature (1)..(25): SEQ ID NO: 3588; WAN024A4M_at; Start 25; Stop 49
aattcaattcgacaaacgcttttat

SEQ ID NO: 42537 - DNA, 25 bp, Artificial
  probe
  misc_feature (1)..(25): SEQ ID NO: 3588; WAN024A4M_at; Start 11; Stop 35
tcgcttgcttgataaattcaattcg

SEQ ID NO: 42538 - DNA, 25 bp, Artificial
  probe
  misc_feature (1)..(25): SEQ ID NO: 3588; WAN024A4M_at; Start 22; Stop 46
ataaattcaattcgacaaacgcttt

SEQ ID NO: 42539 - DNA, 25 bp, Artificial
  probe
  misc_feature (1)..(25): SEQ ID NO: 3588; WAN024A4M_at; Start 10; Stop 34
gtcgcttgcttgataaattcaattc

SEQ ID NO: 42540 - DNA, 25 bp, Artificial
  probe
  misc_feature (1)..(25): SEQ ID NO: 3588; WAN024A4M_at; Start 17; Stop 41
gcttgataaattcaattcgacaaac

SEQ ID NO: 42541 - DNA, 25 bp, Artificial
  probe
  misc_feature (1)..(25): SEQ ID NO: 4774; WAN024A4N_at; Start 40; Stop 64
aattgaatttatcaagcaagcgacc

SEQ ID NO: 42542 - DNA, 25 bp, Artificial
  probe
  misc_feature (1)..(25): SEQ ID NO: 4774; WAN024A4N_at; Start 22; Stop 46
ctataaaagcgtttgtcgaattgaa

SEQ ID NO: 42543 - DNA, 25 bp, Artificial
  probe
  misc_feature (1)..(25): SEQ ID NO: 4774; WAN024A4N_at; Start 44; Stop 68
gaatttatcaagcaagcgaccaacc

SEQ ID NO: 42544 - DNA, 25 bp, Artificial
  probe
  misc_feature (1)..(25): SEQ ID NO: 4774; WAN024A4N_at; Start 46; Stop 70
atttatcaagcaagcgaccaaccag

SEQ ID NO: 42545 - DNA, 25 bp, Artificial
  probe
  misc_feature (1)..(25): SEQ ID NO: 4774; WAN024A4N_at; Start 3; Stop 27
acaactacattctaacaaactataa

SEQ ID NO: 42546 - DNA, 25 bp, Artificial
  probe
  misc_feature (1)..(25): SEQ ID NO: 4774; WAN024A4N_at; Start 20; Stop 44
aactataaaagcgtttgtcgaattg

SEQ ID NO: 42547 - DNA, 25 bp, Artificial
  probe
  misc_feature (1)..(25): SEQ ID NO: 4774; WAN024A4N_at; Start 2; Stop 26
tacaactacattctaacaaactata

SEQ ID NO: 42548 - DNA, 25 bp, Artificial
  probe
  misc_feature (1)..(25): SEQ ID NO: 4774; WAN024A4N_at; Start 21; Stop 45
actataaaagcgtttgtcgaattga

SEQ ID NO: 42549 - DNA, 25 bp, Artificial
  probe
  misc_feature (1)..(25): SEQ ID NO: 4774; WAN024A4N_at; Start 48; Stop 72
ttatcaagcaagcgaccaaccagtc

SEQ ID NO: 42550 - DNA, 25 bp, Artificial
  probe
  misc_feature (1)..(25): SEQ ID NO: 4774; WAN024A4N_at; Start 41; Stop 65
attgaatttatcaagcaagcgacca

SEQ ID NO: 42551 - DNA, 25 bp, Artificial
  probe
  misc_feature (1)..(25): SEQ ID NO: 4774; WAN024A4N_at; Start 47; Stop 71
tttatcaagcaagcgaccaaccagt

SEQ ID NO: 42552 - DNA, 25 bp, Artificial
  probe
  misc_feature (1)..(25): SEQ ID NO: 4774; WAN024A4N_at; Start 37; Stop 61
tcgaattgaatttatcaagcaagcg

SEQ ID NO: 42553 - DNA, 25 bp, Artificial
  probe
  misc_feature (1)..(25): SEQ ID NO: 4774; WAN024A4N_at; Start 32; Stop 56
gtttgtcgaattgaatttatcaagc

SEQ ID NO: 42554 - DNA, 25 bp, Artificial
  probe
  misc_feature (1)..(25): SEQ ID NO: 4774; WAN024A4N_at; Start 43; Stop 67
tgaatttatcaagcaagcgaccaac

SEQ ID NO: 42555 - DNA, 25 bp, Artificial
  probe
  misc_feature (1)..(25): SEQ ID NO: 4774; WAN024A4N_at; Start 10; Stop 34
cattctaacaaactataaaagcgtt

SEQ ID NO: 42556 - DNA, 25 bp, Artificial
  probe
  misc_feature (1)..(25): SEQ ID NO: 4774; WAN024A4N_at; Start 23; Stop 47
tataaaagcgtttgtcgaattgaat

SEQ ID NO: 42557 - DNA, 25 bp, Artificial
  probe
  misc_feature (1)..(25): SEQ ID NO: 4774; WAN024A4N_at; Start 35; Stop 59
tgtcgaattgaatttatcaagcaag

SEQ ID NO: 42558 - DNA, 25 bp, Artificial
  probe
  misc_feature (1)..(25): SEQ ID NO: 4774; WAN024A4N_at; Start 8; Stop 32
tacattctaacaaactataaaagcg

SEQ ID NO: 42559 - DNA, 25 bp, Artificial
  probe
  misc_feature (1)..(25): SEQ ID NO: 4774; WAN024A4N_at; Start 1; Stop 25
ttacaactacattctaacaaactat

SEQ ID NO: 42560 - DNA, 25 bp, Artificial
  probe
  misc_feature (1)..(25): SEQ ID NO: 4774; WAN024A4N_at; Start 30; Stop 54
gcgtttgtcgaattgaatttatcaa

SEQ ID NO: 42561 - DNA, 25 bp, Artificial
  probe
  misc_feature (1)..(25): SEQ ID NO: 4774; WAN024A4N_at; Start 33; Stop 57
tttgtcgaattgaatttatcaagca

SEQ ID NO: 42562 - DNA, 25 bp, Artificial
  probe
  misc_feature (1)..(25): SEQ ID NO: 4774; WAN024A4N_at; Start 29; Stop 53
agcgtttgtcgaattgaatttatca

SEQ ID NO: 42563 - DNA, 25 bp, Artificial
  probe
  misc_feature (1)..(25): SEQ ID NO: 4774; WAN024A4N_at; Start 45; Stop 69
aatttatcaagcaagcgaccaacca

SEQ ID NO: 42564 - DNA, 25 bp, Artificial
  probe
  misc_feature (1)..(25): SEQ ID NO: 4774; WAN024A4N_at; Start 18; Stop 42
caaactataaaagcgtttgtcgaat

SEQ ID NO: 42565 - DNA, 25 bp, Artificial
  probe
  misc_feature (1)..(25): SEQ ID NO: 4774; WAN024A4N_at; Start 36; Stop 60
gtcgaattgaatttatcaagcaagc

SEQ ID NO: 42566 - DNA, 25 bp, Artificial
  probe
  misc_feature (1)..(25): SEQ ID NO: 4774; WAN024A4N_at; Start 4; Stop 28
caactacattctaacaaactataaa

SEQ ID NO: 42567 - DNA, 25 bp, Artificial
  probe
  misc_feature (1)..(25): SEQ ID NO: 4774; WAN024A4N_at; Start 24; Stop 48
ataaaagcgtttgtcgaattgaatt

SEQ ID NO: 42568 - DNA, 25 bp, Artificial
  probe
  misc_feature (1)..(25): SEQ ID NO: 4774; WAN024A4N_at; Start 28; Stop 52
aagcgtttgtcgaattgaatttatc

SEQ ID NO: 42569 - DNA, 25 bp, Artificial
  probe
  misc_feature (1)..(25): SEQ ID NO: 4774; WAN024A4N_at; Start 39; Stop 63
gaattgaatttatcaagcaagcgac

SEQ ID NO: 42570 - DNA, 25 bp, Artificial
  probe
  misc_feature (1)..(25): SEQ ID NO: 4774; WAN024A4N_at; Start 31; Stop 55
cgtttgtcgaattgaatttatcaag

SEQ ID NO: 42571 - DNA, 25 bp, Artificial
  probe
  misc_feature (1)..(25): SEQ ID NO: 4774; WAN024A4N_at; Start 42; Stop 66
ttgaatttatcaagcaagcgaccaa

SEQ ID NO: 42572 - DNA, 25 bp, Artificial
  probe
  misc_feature (1)..(25): SEQ ID NO: 4774; WAN024A4N_at; Start 9; Stop 33
acattctaacaaactataaaagcgt

SEQ ID NO: 42573 - DNA, 25 bp, Artificial
  probe
  misc_feature (1)..(25): SEQ ID NO: 4774; WAN024A4N_at; Start 27; Stop 51
aaagcgtttgtcgaattgaatttat

SEQ ID NO: 42574 - DNA, 25 bp, Artificial
  probe
  misc_feature (1)..(25): SEQ ID NO: 4774; WAN024A4N_at; Start 38; Stop 62
cgaattgaatttatcaagcaagcga

SEQ ID NO: 42575 - DNA, 25 bp, Artificial
  probe
  misc_feature (1)..(25): SEQ ID NO: 314; WAN024A4O_at; Start 88; Stop 112
taaatttgacagacacatattgctg

SEQ ID NO: 42576 - DNA, 25 bp, Artificial
  probe
  misc_feature (1)..(25): SEQ ID NO: 314; WAN024A4O_at; Start 82; Stop 106
tgtcactaaatttgacagacacata

SEQ ID NO: 42577 - DNA, 25 bp, Artificial
  probe
  misc_feature (1)..(25): SEQ ID NO: 314; WAN024A4O_at; Start 108; Stop 132
tgctgatacaacctctctacctata

SEQ ID NO: 42578 - DNA, 25 bp, Artificial
  probe
  misc_feature (1)..(25): SEQ ID NO: 314; WAN024A4O_at; Start 134; Stop 158
tctcacagttaacctgaggctagtt

SEQ ID NO: 42579 - DNA, 25 bp, Artificial
  probe
  misc_feature (1)..(25): SEQ ID NO: 314; WAN024A4O_at; Start 127; Stop 151
cctataatctcacagttaacctgag

SEQ ID NO: 42580 - DNA, 25 bp, Artificial
  probe
  misc_feature (1)..(25): SEQ ID NO: 314; WAN024A4O_at; Start 101; Stop 125
cacatattgctgatacaacctctct

SEQ ID NO: 42581 - DNA, 25 bp, Artificial
  probe
  misc_feature (1)..(25): SEQ ID NO: 314; WAN024A4O_at; Start 105; Stop 129
tattgctgatacaacctctctacct

SEQ ID NO: 42582 - DNA, 25 bp, Artificial
  probe
  misc_feature (1)..(25): SEQ ID NO: 314; WAN024A4O_at; Start 63; Stop 87
atctttcttctactacctttgtcac

SEQ ID NO: 42583 - DNA, 25 bp, Artificial
  probe
  misc_feature (1)..(25): SEQ ID NO: 314; WAN024A4O_at; Start 93; Stop 117
ttgacagacacatattgctgataca

SEQ ID NO: 42584 - DNA, 25 bp, Artificial
  probe
  misc_feature (1)..(25): SEQ ID NO: 314; WAN024A4O_at; Start 99; Stop 123
gacacatattgctgatacaacctct

SEQ ID NO: 42585 - DNA, 25 bp, Artificial
  probe
  misc_feature (1)..(25): SEQ ID NO: 314; WAN024A4O_at; Start 75; Stop 99
ctacctttgtcactaaatttgacag

SEQ ID NO: 42586 - DNA, 25 bp, Artificial
  probe
  misc_feature (1)..(25): SEQ ID NO: 314; WAN024A4O_at; Start 92; Stop 116
tttgacagacacatattgctgatac

SEQ ID NO: 42587 - DNA, 25 bp, Artificial
  probe
  misc_feature (1)..(25): SEQ ID NO: 314; WAN024A4O_at; Start 90; Stop 114
aatttgacagacacatattgctgat

SEQ ID NO: 42588 - DNA, 25 bp, Artificial
  probe
  misc_feature (1)..(25): SEQ ID NO: 314; WAN024A4O_at; Start 66; Stop 90
tttcttctactacctttgtcactaa

SEQ ID NO: 42589 - DNA, 25 bp, Artificial
  probe
  misc_feature (1)..(25): SEQ ID NO: 314; WAN024A4O_at; Start 119; Stop 143
cctctctacctataatctcacagtt

SEQ ID NO: 42590 - DNA, 25 bp, Artificial
  probe
  misc_feature (1)..(25): SEQ ID NO: 314; WAN024A4O_at; Start 121; Stop 145
tctctacctataatctcacagttaa

SEQ ID NO: 42591 - DNA, 25 bp, Artificial
  probe
  misc_feature (1)..(25): SEQ ID NO: 314; WAN024A4O_at; Start 133; Stop 157
atctcacagttaacctgaggctagt

SEQ ID NO: 42592 - DNA, 25 bp, Artificial
  probe
  misc_feature (1)..(25): SEQ ID NO: 314; WAN024A4O_at; Start 71; Stop 95
tctactacctttgtcactaaatttg

SEQ ID NO: 42593 - DNA, 25 bp, Artificial
  probe
  misc_feature (1)..(25): SEQ ID NO: 314; WAN024A4O_at; Start 112; Stop 136
gatacaacctctctacctataatct

SEQ ID NO: 42594 - DNA, 25 bp, Artificial
  probe
  misc_feature (1)..(25): SEQ ID NO: 314; WAN024A4O_at; Start 117; Stop 141
aacctctctacctataatctcacag

SEQ ID NO: 42595 - DNA, 25 bp, Artificial
  probe
  misc_feature (1)..(25): SEQ ID NO: 314; WAN024A4O_at; Start 17; Stop 41
taaaatcaaattttccagataccta

SEQ ID NO: 42596 - DNA, 25 bp, Artificial
  probe
  misc_feature (1)..(25): SEQ ID NO: 314; WAN024A4O_at; Start 114; Stop 138
tacaacctctctacctataatctca

SEQ ID NO: 42597 - DNA, 25 bp, Artificial
  probe
  misc_feature (1)..(25): SEQ ID NO: 314; WAN024A4O_at; Start 130; Stop 154
ataatctcacagttaacctgaggct

SEQ ID NO: 42598 - DNA, 25 bp, Artificial
  probe
  misc_feature (1)..(25): SEQ ID NO: 314; WAN024A4O_at; Start 131; Stop 155
taatctcacagttaacctgaggcta

SEQ ID NO: 42599 - DNA, 25 bp, Artificial
  probe
  misc_feature (1)..(25): SEQ ID NO: 314; WAN024A4O_at; Start 129; Stop 153
tataatctcacagttaacctgaggc

SEQ ID NO: 42600 - DNA, 25 bp, Artificial
  probe
  misc_feature (1)..(25): SEQ ID NO: 314; WAN024A4O_at; Start 78; Stop 102
cctttgtcactaaatttgacagaca

SEQ ID NO: 42601 - DNA, 25 bp, Artificial
  probe
  misc_feature (1)..(25): SEQ ID NO: 314; WAN024A4O_at; Start 97; Stop 121
cagacacatattgctgatacaacct

SEQ ID NO: 42602 - DNA, 25 bp, Artificial
  probe
  misc_feature (1)..(25): SEQ ID NO: 314; WAN024A4O_at; Start 95; Stop 119
gacagacacatattgctgatacaac

SEQ ID NO: 42603 - DNA, 25 bp, Artificial
  probe
  misc_feature (1)..(25): SEQ ID NO: 314; WAN024A4O_at; Start 109; Stop 133
gctgatacaacctctctacctataa

SEQ ID NO: 42604 - DNA, 25 bp, Artificial
  probe
  misc_feature (1)..(25): SEQ ID NO: 314; WAN024A4O_at; Start 125; Stop 149
tacctataatctcacagttaacctg

SEQ ID NO: 42605 - DNA, 25 bp, Artificial
  probe
  misc_feature (1)..(25): SEQ ID NO: 314; WAN024A4O_at; Start 103; Stop 127
catattgctgatacaacctctctac

SEQ ID NO: 42606 - DNA, 25 bp, Artificial
  probe
  misc_feature (1)..(25): SEQ ID NO: 314; WAN024A4O_at; Start 85; Stop 109
cactaaatttgacagacacatattg

SEQ ID NO: 42607 - DNA, 25 bp, Artificial
  probe
  misc_feature (1)..(25): SEQ ID NO: 314; WAN024A4O_at; Start 132; Stop 156
aatctcacagttaacctgaggctag

SEQ ID NO: 42608 - DNA, 25 bp, Artificial
  probe
  misc_feature (1)..(25): SEQ ID NO: 314; WAN024A4O_at; Start 86; Stop 110
actaaatttgacagacacatattgc

SEQ ID NO: 42609 - DNA, 25 bp, Artificial
  probe
  misc_feature (1)..(25): SEQ ID NO: 204; WAN024A4P_at; Start 33; Stop 57
tagagaggttgtatcagcaatatgt

SEQ ID NO: 42610 - DNA, 25 bp, Artificial
  probe
  misc_feature (1)..(25): SEQ ID NO: 204; WAN024A4P_at; Start 57; Stop 81
tgtctgtcaaatttagtgacaaagg

SEQ ID NO: 42611 - DNA, 25 bp, Artificial
  probe
  misc_feature (1)..(25): SEQ ID NO: 204; WAN024A4P_at; Start 72; Stop 96
gtgacaaaggtagtagaagaaagat

SEQ ID NO: 42612 - DNA, 25 bp, Artificial
  probe
  misc_feature (1)..(25): SEQ ID NO: 204; WAN024A4P_at; Start 4; Stop 28
tagcctcaggttaactgtgagatta

SEQ ID NO: 42613 - DNA, 25 bp, Artificial
  probe
  misc_feature (1)..(25): SEQ ID NO: 204; WAN024A4P_at; Start 31; Stop 55
ggtagagaggttgtatcagcaatat

SEQ ID NO: 42614 - DNA, 25 bp, Artificial
  probe
  misc_feature (1)..(25): SEQ ID NO: 204; WAN024A4P_at; Start 3; Stop 27
ctagcctcaggttaactgtgagatt

SEQ ID NO: 42615 - DNA, 25 bp, Artificial
  probe
  misc_feature (1)..(25): SEQ ID NO: 204; WAN024A4P_at; Start 37; Stop 61
gaggttgtatcagcaatatgtgtct

SEQ ID NO: 42616 - DNA, 25 bp, Artificial
  probe
  misc_feature (1)..(25): SEQ ID NO: 204; WAN024A4P_at; Start 42; Stop 66
tgtatcagcaatatgtgtctgtcaa

SEQ ID NO: 42617 - DNA, 25 bp, Artificial
  probe
  misc_feature (1)..(25): SEQ ID NO: 204; WAN024A4P_at; Start 26; Stop 50
ttataggtagagaggttgtatcagc

SEQ ID NO: 42618 - DNA, 25 bp, Artificial
  probe
  misc_feature (1)..(25): SEQ ID NO: 204; WAN024A4P_at; Start 27; Stop 51
tataggtagagaggttgtatcagca

SEQ ID NO: 42619 - DNA, 25 bp, Artificial
  probe
  misc_feature (1)..(25): SEQ ID NO: 204; WAN024A4P_at; Start 6; Stop 30
gcctcaggttaactgtgagattata

SEQ ID NO: 42620 - DNA, 25 bp, Artificial
  probe
  misc_feature (1)..(25): SEQ ID NO: 204; WAN024A4P_at; Start 64; Stop 88
caaatttagtgacaaaggtagtaga

SEQ ID NO: 42621 - DNA, 25 bp, Artificial
  probe
  misc_feature (1)..(25): SEQ ID NO: 204; WAN024A4P_at; Start 50; Stop 74
caatatgtgtctgtcaaatttagtg

SEQ ID NO: 42622 - DNA, 25 bp, Artificial
  probe
  misc_feature (1)..(25): SEQ ID NO: 204; WAN024A4P_at; Start 2; Stop 26
actagcctcaggttaactgtgagat

SEQ ID NO: 42623 - DNA, 25 bp, Artificial
  probe
  misc_feature (1)..(25): SEQ ID NO: 204; WAN024A4P_at; Start 60; Stop 84
ctgtcaaatttagtgacaaaggtag

SEQ ID NO: 42624 - DNA, 25 bp, Artificial
  probe
  misc_feature (1)..(25): SEQ ID NO: 204; WAN024A4P_at; Start 39; Stop 63
ggttgtatcagcaatatgtgtctgt

SEQ ID NO: 42625 - DNA, 25 bp, Artificial
  probe
  misc_feature (1)..(25): SEQ ID NO: 204; WAN024A4P_at; Start 66; Stop 90
aatttagtgacaaaggtagtagaag

SEQ ID NO: 42626 - DNA, 25 bp, Artificial
  probe
  misc_feature (1)..(25): SEQ ID NO: 204; WAN024A4P_at; Start 29; Stop 53
taggtagagaggttgtatcagcaat

SEQ ID NO: 42627 - DNA, 25 bp, Artificial
  probe
  misc_feature (1)..(25): SEQ ID NO: 204; WAN024A4P_at; Start 63; Stop 87
tcaaatttagtgacaaaggtagtag

SEQ ID NO: 42628 - DNA, 25 bp, Artificial
  probe
  misc_feature (1)..(25): SEQ ID NO: 204; WAN024A4P_at; Start 15; Stop 39
taactgtgagattataggtagagag

SEQ ID NO: 42629 - DNA, 25 bp, Artificial
  probe
  misc_feature (1)..(25): SEQ ID NO: 204; WAN024A4P_at; Start 1; Stop 25
aactagcctcaggttaactgtgaga

SEQ ID NO: 42630 - DNA, 25 bp, Artificial
  probe
  misc_feature (1)..(25): SEQ ID NO: 204; WAN024A4P_at; Start 47; Stop 71
cagcaatatgtgtctgtcaaattta

SEQ ID NO: 42631 - DNA, 25 bp, Artificial
  probe
  misc_feature (1)..(25): SEQ ID NO: 204; WAN024A4P_at; Start 16; Stop 40
aactgtgagattataggtagagagg

SEQ ID NO: 42632 - DNA, 25 bp, Artificial
  probe
  misc_feature (1)..(25): SEQ ID NO: 204; WAN024A4P_at; Start 24; Stop 48
gattataggtagagaggttgtatca

SEQ ID NO: 42633 - DNA, 25 bp, Artificial
  probe
  misc_feature (1)..(25): SEQ ID NO: 204; WAN024A4P_at; Start 18; Stop 42
ctgtgagattataggtagagaggtt

SEQ ID NO: 42634 - DNA, 25 bp, Artificial
  probe
  misc_feature (1)..(25): SEQ ID NO: 204; WAN024A4P_at; Start 53; Stop 77
tatgtgtctgtcaaatttagtgaca

SEQ ID NO: 42635 - DNA, 25 bp, Artificial
  probe
  misc_feature (1)..(25): SEQ ID NO: 204; WAN024A4P_at; Start 36; Stop 60
agaggttgtatcagcaatatgtgtc

SEQ ID NO: 42636 - DNA, 25 bp, Artificial
  probe
  misc_feature (1)..(25): SEQ ID NO: 204; WAN024A4P_at; Start 35; Stop 59
gagaggttgtatcagcaatatgtgt

SEQ ID NO: 42637 - DNA, 25 bp, Artificial
  probe
  misc_feature (1)..(25): SEQ ID NO: 204; WAN024A4P_at; Start 70; Stop 94
tagtgacaaaggtagtagaagaaag

SEQ ID NO: 42638 - DNA, 25 bp, Artificial
  probe
  misc_feature (1)..(25): SEQ ID NO: 204; WAN024A4P_at; Start 10; Stop 34
caggttaactgtgagattataggta

SEQ ID NO: 42639 - DNA, 25 bp, Artificial
  probe
  misc_feature (1)..(25): SEQ ID NO: 204; WAN024A4P_at; Start 118; Stop 142
taggtatctggaaaatttgatttta

SEQ ID NO: 42640 - DNA, 25 bp, Artificial
  probe
  misc_feature (1)..(25): SEQ ID NO: 204; WAN024A4P_at; Start 12; Stop 36
ggttaactgtgagattataggtaga

SEQ ID NO: 42641 - DNA, 25 bp, Artificial
  probe
  misc_feature (1)..(25): SEQ ID NO: 204; WAN024A4P_at; Start 44; Stop 68
tatcagcaatatgtgtctgtcaaat

SEQ ID NO: 42642 - DNA, 25 bp, Artificial
  probe
  misc_feature (1)..(25): SEQ ID NO: 204; WAN024A4P_at; Start 9; Stop 33
tcaggttaactgtgagattataggt

SEQ ID NO: 42643 - DNA, 25 bp, Artificial
  probe
  misc_feature (1)..(25): SEQ ID NO: 554; WAN024A4Q_at; Start 24; Stop 48
ggtataatgaaacgatacgatagaa

SEQ ID NO: 42644 - DNA, 25 bp, Artificial
  probe
  misc_feature (1)..(25): SEQ ID NO: 554; WAN024A4Q_at; Start 27; Stop 51
ataatgaaacgatacgatagaaaga

SEQ ID NO: 42645 - DNA, 25 bp, Artificial
  probe
  misc_feature (1)..(25): SEQ ID NO: 554; WAN024A4Q_at; Start 25; Stop 49
gtataatgaaacgatacgatagaaa

SEQ ID NO: 42646 - DNA, 25 bp, Artificial
  probe
  misc_feature (1)..(25): SEQ ID NO: 554; WAN024A4Q_at; Start 8; Stop 32
ttcaccccttgtttgtggtataatg

SEQ ID NO: 42647 - DNA, 25 bp, Artificial
  probe
  misc_feature (1)..(25): SEQ ID NO: 554; WAN024A4Q_at; Start 29; Stop 53
aatgaaacgatacgatagaaagaat

SEQ ID NO: 42648 - DNA, 25 bp, Artificial
  probe
  misc_feature (1)..(25): SEQ ID NO: 554; WAN024A4Q_at; Start 26; Stop 50
tataatgaaacgatacgatagaaag

SEQ ID NO: 42649 - DNA, 25 bp, Artificial
  probe
  misc_feature (1)..(25): SEQ ID NO: 554; WAN024A4Q_at; Start 28; Stop 52
taatgaaacgatacgatagaaagaa

SEQ ID NO: 42650 - DNA, 25 bp, Artificial
  probe
  misc_feature (1)..(25): SEQ ID NO: 554; WAN024A4Q_at; Start 1; Stop 25
atagattttcaccccttgtttgtgg

SEQ ID NO: 42651 - DNA, 25 bp, Artificial
  probe
  misc_feature (1)..(25): SEQ ID NO: 554; WAN024A4Q_at; Start 30; Stop 54
atgaaacgatacgatagaaagaata

SEQ ID NO: 42652 - DNA, 25 bp, Artificial
  probe
  misc_feature (1)..(25): SEQ ID NO: 4569; WAN024A4R_at; Start 3; Stop 27
ttctttctatcgtatcgtttcatta

SEQ ID NO: 42653 - DNA, 25 bp, Artificial
  probe
  misc_feature (1)..(25): SEQ ID NO: 4569; WAN024A4R_at; Start 23; Stop 47
cattataccacaaacaaggggtgaa

SEQ ID NO: 42654 - DNA, 25 bp, Artificial
  probe
  misc_feature (1)..(25): SEQ ID NO: 4569; WAN024A4R_at; Start 30; Stop 54
ccacaaacaaggggtgaaaatctat

SEQ ID NO: 42655 - DNA, 25 bp, Artificial
  probe
  misc_feature (1)..(25): SEQ ID NO: 4569; WAN024A4R_at; Start 1; Stop 25
tattctttctatcgtatcgtttcat

SEQ ID NO: 42656 - DNA, 25 bp, Artificial
  probe
  misc_feature (1)..(25): SEQ ID NO: 4569; WAN024A4R_at; Start 5; Stop 29
ctttctatcgtatcgtttcattata

SEQ ID NO: 42657 - DNA, 25 bp, Artificial
  probe
  misc_feature (1)..(25): SEQ ID NO: 4569; WAN024A4R_at; Start 2; Stop 26
attctttctatcgtatcgtttcatt

SEQ ID NO: 42658 - DNA, 25 bp, Artificial
  probe
  misc_feature (1)..(25): SEQ ID NO: 4569; WAN024A4R_at; Start 4; Stop 28
tctttctatcgtatcgtttcattat

SEQ ID NO: 42659 - DNA, 25 bp, Artificial
  probe
  misc_feature (1)..(25): SEQ ID NO: 4628; WAN024A4S_at; Start 32; Stop 56
gaagagcgaatcgtctgattcgttt

SEQ ID NO: 42660 - DNA, 25 bp, Artificial
  probe
  misc_feature (1)..(25): SEQ ID NO: 4628; WAN024A4S_at; Start 10; Stop 34
gaaagctattttcagattttaagaa

SEQ ID NO: 42661 - DNA, 25 bp, Artificial
  probe
  misc_feature (1)..(25): SEQ ID NO: 4628; WAN024A4S_at; Start 83; Stop 107
tactataataggaattttcacaaaa

SEQ ID NO: 42662 - DNA, 25 bp, Artificial
  probe
  misc_feature (1)..(25): SEQ ID NO: 4628; WAN024A4S_at; Start 37; Stop 61
gcgaatcgtctgattcgttttttct

SEQ ID NO: 42663 - DNA, 25 bp, Artificial
  probe
  misc_feature (1)..(25): SEQ ID NO: 4628; WAN024A4S_at; Start 21; Stop 45
tcagattttaagaagagcgaatcgt

SEQ ID NO: 42664 - DNA, 25 bp, Artificial
  probe
  misc_feature (1)..(25): SEQ ID NO: 4628; WAN024A4S_at; Start 29; Stop 53
taagaagagcgaatcgtctgattcg

SEQ ID NO: 42665 - DNA, 25 bp, Artificial
  probe
  misc_feature (1)..(25): SEQ ID NO: 4628; WAN024A4S_at; Start 31; Stop 55
agaagagcgaatcgtctgattcgtt

SEQ ID NO: 42666 - DNA, 25 bp, Artificial
  probe
  misc_feature (1)..(25): SEQ ID NO: 4628; WAN024A4S_at; Start 16; Stop 40
tattttcagattttaagaagagcga

SEQ ID NO: 42667 - DNA, 25 bp, Artificial
  probe
  misc_feature (1)..(25): SEQ ID NO: 4628; WAN024A4S_at; Start 93; Stop 117
ggaattttcacaaaattctgttata

SEQ ID NO: 42668 - DNA, 25 bp, Artificial
  probe
  misc_feature (1)..(25): SEQ ID NO: 4628; WAN024A4S_at; Start 33; Stop 57
aagagcgaatcgtctgattcgtttt

SEQ ID NO: 42669 - DNA, 25 bp, Artificial
  probe
  misc_feature (1)..(25): SEQ ID NO: 4628; WAN024A4S_at; Start 30; Stop 54
aagaagagcgaatcgtctgattcgt

SEQ ID NO: 42670 - DNA, 25 bp, Artificial
  probe
  misc_feature (1)..(25): SEQ ID NO: 4628; WAN024A4S_at; Start 9; Stop 33
ggaaagctattttcagattttaaga

SEQ ID NO: 42671 - DNA, 25 bp, Artificial
  probe
  misc_feature (1)..(25): SEQ ID NO: 4628; WAN024A4S_at; Start 19; Stop 43
tttcagattttaagaagagcgaatc

SEQ ID NO: 42672 - DNA, 25 bp, Artificial
  probe
  misc_feature (1)..(25): SEQ ID NO: 4628; WAN024A4S_at; Start 2; Stop 26
cctttctggaaagctattttcagat

SEQ ID NO: 42673 - DNA, 25 bp, Artificial
  probe
  misc_feature (1)..(25): SEQ ID NO: 4628; WAN024A4S_at; Start 27; Stop 51
tttaagaagagcgaatcgtctgatt

SEQ ID NO: 42674 - DNA, 25 bp, Artificial
  probe
  misc_feature (1)..(25): SEQ ID NO: 4628; WAN024A4S_at; Start 1; Stop 25
tcctttctggaaagctattttcaga

SEQ ID NO: 42675 - DNA, 25 bp, Artificial
  probe
  misc_feature (1)..(25): SEQ ID NO: 4628; WAN024A4S_at; Start 24; Stop 48
gattttaagaagagcgaatcgtctg

SEQ ID NO: 42676 - DNA, 25 bp, Artificial
  probe
  misc_feature (1)..(25): SEQ ID NO: 4628; WAN024A4S_at; Start 14; Stop 38
gctattttcagattttaagaagagc

SEQ ID NO: 42677 - DNA, 25 bp, Artificial
  probe
  misc_feature (1)..(25): SEQ ID NO: 4628; WAN024A4S_at; Start 6; Stop 30
tctggaaagctattttcagatttta

SEQ ID NO: 42678 - DNA, 25 bp, Artificial
  probe
  misc_feature (1)..(25): SEQ ID NO: 4628; WAN024A4S_at; Start 79; Stop 103
gatttactataataggaattttcac

SEQ ID NO: 42679 - DNA, 25 bp, Artificial
  probe
  misc_feature (1)..(25): SEQ ID NO: 4628; WAN024A4S_at; Start 35; Stop 59
gagcgaatcgtctgattcgtttttt

SEQ ID NO: 42680 - DNA, 25 bp, Artificial
  probe
  misc_feature (1)..(25): SEQ ID NO: 4628; WAN024A4S_at; Start 18; Stop 42
ttttcagattttaagaagagcgaat

SEQ ID NO: 42681 - DNA, 25 bp, Artificial
  probe
  misc_feature (1)..(25): SEQ ID NO: 4628; WAN024A4S_at; Start 88; Stop 112
taataggaattttcacaaaattctg

SEQ ID NO: 42682 - DNA, 25 bp, Artificial
  probe
  misc_feature (1)..(25): SEQ ID NO: 4628; WAN024A4S_at; Start 23; Stop 47
agattttaagaagagcgaatcgtct

SEQ ID NO: 42683 - DNA, 25 bp, Artificial
  probe
  misc_feature (1)..(25): SEQ ID NO: 4628; WAN024A4S_at; Start 61; Stop 85
tttttatactgaaatagtgatttac

SEQ ID NO: 42684 - DNA, 25 bp, Artificial
  probe
  misc_feature (1)..(25): SEQ ID NO: 4628; WAN024A4S_at; Start 25; Stop 49
attttaagaagagcgaatcgtctga

SEQ ID NO: 42685 - DNA, 25 bp, Artificial
  probe
  misc_feature (1)..(25): SEQ ID NO: 4628; WAN024A4S_at; Start 17; Stop 41
attttcagattttaagaagagcgaa

SEQ ID NO: 42686 - DNA, 25 bp, Artificial
  probe
  misc_feature (1)..(25): SEQ ID NO: 4628; WAN024A4S_at; Start 71; Stop 95
gaaatagtgatttactataatagga

SEQ ID NO: 42687 - DNA, 25 bp, Artificial
  probe
  misc_feature (1)..(25): SEQ ID NO: 4628; WAN024A4S_at; Start 56; Stop 80
ttttctttttatactgaaatagtga

SEQ ID NO: 42688 - DNA, 25 bp, Artificial
  probe
  misc_feature (1)..(25): SEQ ID NO: 4628; WAN024A4S_at; Start 3; Stop 27
ctttctggaaagctattttcagatt

SEQ ID NO: 42689 - DNA, 25 bp, Artificial
  probe
  misc_feature (1)..(25): SEQ ID NO: 4628; WAN024A4S_at; Start 20; Stop 44
ttcagattttaagaagagcgaatcg

SEQ ID NO: 42690 - DNA, 25 bp, Artificial
  probe
  misc_feature (1)..(25): SEQ ID NO: 4628; WAN024A4S_at; Start 22; Stop 46
cagattttaagaagagcgaatcgtc

SEQ ID NO: 42691 - DNA, 25 bp, Artificial
  probe
  misc_feature (1)..(25): SEQ ID NO: 4628; WAN024A4S_at; Start 15; Stop 39
ctattttcagattttaagaagagcg

SEQ ID NO: 42692 - DNA, 25 bp, Artificial
  probe
  misc_feature (1)..(25): SEQ ID NO: 4628; WAN024A4S_at; Start 28; Stop 52
ttaagaagagcgaatcgtctgattc

SEQ ID NO: 42693 - DNA, 25 bp, Artificial
  probe
  misc_feature (1)..(25): SEQ ID NO: 4541; WAN024A4T_at; Start 74; Stop 98
cgattcgctcttcttaaaatctgaa

SEQ ID NO: 42694 - DNA, 25 bp, Artificial
  probe
  misc_feature (1)..(25): SEQ ID NO: 4541; WAN024A4T_at; Start 38; Stop 62
tcactatttcagtataaaaagaaaa

SEQ ID NO: 42695 - DNA, 25 bp, Artificial
  probe
  misc_feature (1)..(25): SEQ ID NO: 4541; WAN024A4T_at; Start 3; Stop 27
taacagaattttgtgaaaattccta

SEQ ID NO: 42696 - DNA, 25 bp, Artificial
  probe
  misc_feature (1)..(25): SEQ ID NO: 4541; WAN024A4T_at; Start 59; Stop 83
aaaaaacgaatcagacgattcgctc

SEQ ID NO: 42697 - DNA, 25 bp, Artificial
  probe
  misc_feature (1)..(25): SEQ ID NO: 4541; WAN024A4T_at; Start 57; Stop 81
agaaaaaacgaatcagacgattcgc

SEQ ID NO: 42698 - DNA, 25 bp, Artificial
  probe
  misc_feature (1)..(25): SEQ ID NO: 4541; WAN024A4T_at; Start 34; Stop 58
taaatcactatttcagtataaaaag

SEQ ID NO: 42699 - DNA, 25 bp, Artificial
  probe
  misc_feature (1)..(25): SEQ ID NO: 4541; WAN024A4T_at; Start 80; Stop 104
gctcttcttaaaatctgaaaatagc

SEQ ID NO: 42700 - DNA, 25 bp, Artificial
  probe
  misc_feature (1)..(25): SEQ ID NO: 4541; WAN024A4T_at; Start 85; Stop 109
tcttaaaatctgaaaatagctttcc

SEQ ID NO: 42701 - DNA, 25 bp, Artificial
  probe
  misc_feature (1)..(25): SEQ ID NO: 4541; WAN024A4T_at; Start 93; Stop 117
tctgaaaatagctttccagaaagga

SEQ ID NO: 42702 - DNA, 25 bp, Artificial
  probe
  misc_feature (1)..(25): SEQ ID NO: 4541; WAN024A4T_at; Start 1; Stop 25
tataacagaattttgtgaaaattcc

SEQ ID NO: 42703 - DNA, 25 bp, Artificial
  probe
  misc_feature (1)..(25): SEQ ID NO: 4541; WAN024A4T_at; Start 72; Stop 96
gacgattcgctcttcttaaaatctg

SEQ ID NO: 42704 - DNA, 25 bp, Artificial
  probe
  misc_feature (1)..(25): SEQ ID NO: 4541; WAN024A4T_at; Start 17; Stop 41
gaaaattcctattatagtaaatcac

SEQ ID NO: 42705 - DNA, 25 bp, Artificial
  probe
  misc_feature (1)..(25): SEQ ID NO: 4541; WAN024A4T_at; Start 73; Stop 97
acgattcgctcttcttaaaatctga

SEQ ID NO: 42706 - DNA, 25 bp, Artificial
  probe
  misc_feature (1)..(25): SEQ ID NO: 4541; WAN024A4T_at; Start 92; Stop 116
atctgaaaatagctttccagaaagg

SEQ ID NO: 42707 - DNA, 25 bp, Artificial
  probe
  misc_feature (1)..(25): SEQ ID NO: 4541; WAN024A4T_at; Start 60; Stop 84
aaaaacgaatcagacgattcgctct

SEQ ID NO: 42708 - DNA, 25 bp, Artificial
  probe
  misc_feature (1)..(25): SEQ ID NO: 4541; WAN024A4T_at; Start 76; Stop 100
attcgctcttcttaaaatctgaaaa

SEQ ID NO: 42709 - DNA, 25 bp, Artificial
  probe
  misc_feature (1)..(25): SEQ ID NO: 4541; WAN024A4T_at; Start 79; Stop 103
cgctcttcttaaaatctgaaaatag

SEQ ID NO: 42710 - DNA, 25 bp, Artificial
  probe
  misc_feature (1)..(25): SEQ ID NO: 4541; WAN024A4T_at; Start 87; Stop 111
ttaaaatctgaaaatagctttccag

SEQ ID NO: 42711 - DNA, 25 bp, Artificial
  probe
  misc_feature (1)..(25): SEQ ID NO: 4541; WAN024A4T_at; Start 91; Stop 115
aatctgaaaatagctttccagaaag

SEQ ID NO: 42712 - DNA, 25 bp, Artificial
  probe
  misc_feature (1)..(25): SEQ ID NO: 4541; WAN024A4T_at; Start 82; Stop 106
tcttcttaaaatctgaaaatagctt

SEQ ID NO: 42713 - DNA, 25 bp, Artificial
  probe
  misc_feature (1)..(25): SEQ ID NO: 4541; WAN024A4T_at; Start 67; Stop 91
aatcagacgattcgctcttcttaaa

SEQ ID NO: 42714 - DNA, 25 bp, Artificial
  probe
  misc_feature (1)..(25): SEQ ID NO: 4541; WAN024A4T_at; Start 70; Stop 94
cagacgattcgctcttcttaaaatc

SEQ ID NO: 42715 - DNA, 25 bp, Artificial
  probe
  misc_feature (1)..(25): SEQ ID NO: 4541; WAN024A4T_at; Start 89; Stop 113
aaaatctgaaaatagctttccagaa

SEQ ID NO: 42716 - DNA, 25 bp, Artificial
  probe
  misc_feature (1)..(25): SEQ ID NO: 4541; WAN024A4T_at; Start 75; Stop 99
gattcgctcttcttaaaatctgaaa

SEQ ID NO: 42717 - DNA, 25 bp, Artificial
  probe
  misc_feature (1)..(25): SEQ ID NO: 4541; WAN024A4T_at; Start 63; Stop 87
aacgaatcagacgattcgctcttct

SEQ ID NO: 42718 - DNA, 25 bp, Artificial
  probe
  misc_feature (1)..(25): SEQ ID NO: 4541; WAN024A4T_at; Start 23; Stop 47
tcctattatagtaaatcactatttc

SEQ ID NO: 42719 - DNA, 25 bp, Artificial
  probe
  misc_feature (1)..(25): SEQ ID NO: 4541; WAN024A4T_at; Start 88; Stop 112
taaaatctgaaaatagctttccaga

SEQ ID NO: 42720 - DNA, 25 bp, Artificial
  probe
  misc_feature (1)..(25): SEQ ID NO: 4541; WAN024A4T_at; Start 61; Stop 85
aaaacgaatcagacgattcgctctt

SEQ ID NO: 42721 - DNA, 25 bp, Artificial
  probe
  misc_feature (1)..(25): SEQ ID NO: 4541; WAN024A4T_at; Start 69; Stop 93
tcagacgattcgctcttcttaaaat

SEQ ID NO: 42722 - DNA, 25 bp, Artificial
  probe
  misc_feature (1)..(25): SEQ ID NO: 4541; WAN024A4T_at; Start 58; Stop 82
gaaaaaacgaatcagacgattcgct

SEQ ID NO: 42723 - DNA, 25 bp, Artificial
  probe
  misc_feature (1)..(25): SEQ ID NO: 4541; WAN024A4T_at; Start 62; Stop 86
aaacgaatcagacgattcgctcttc

SEQ ID NO: 42724 - DNA, 25 bp, Artificial
  probe
  misc_feature (1)..(25): SEQ ID NO: 4541; WAN024A4T_at; Start 66; Stop 90
gaatcagacgattcgctcttcttaa

SEQ ID NO: 42725 - DNA, 25 bp, Artificial
  probe
  misc_feature (1)..(25): SEQ ID NO: 4541; WAN024A4T_at; Start 31; Stop 55
tagtaaatcactatttcagtataaa

SEQ ID NO: 42726 - DNA, 25 bp, Artificial
  probe
  misc_feature (1)..(25): SEQ ID NO: 4541; WAN024A4T_at; Start 78; Stop 102
tcgctcttcttaaaatctgaaaata

SEQ ID NO: 42727 - DNA, 25 bp, Artificial
  probe
  misc_feature (1)..(25): SEQ ID NO: 187; WAN024A4U_at; Start 15; Stop 39
cttcccactttcttcatttctagaa

SEQ ID NO: 42728 - DNA, 25 bp, Artificial
  probe
  misc_feature (1)..(25): SEQ ID NO: 187; WAN024A4U_at; Start 28; Stop 52
tcatttctagaatatgaatagaagg

SEQ ID NO: 42729 - DNA, 25 bp, Artificial
  probe
  misc_feature (1)..(25): SEQ ID NO: 187; WAN024A4U_at; Start 8; Stop 32
agtggggcttcccactttcttcatt

SEQ ID NO: 42730 - DNA, 25 bp, Artificial
  probe
  misc_feature (1)..(25): SEQ ID NO: 187; WAN024A4U_at; Start 33; Stop 57
tctagaatatgaatagaagggattt

SEQ ID NO: 42731 - DNA, 25 bp, Artificial
  probe
  misc_feature (1)..(25): SEQ ID NO: 187; WAN024A4U_at; Start 5; Stop 29
gagagtggggcttcccactttcttc

SEQ ID NO: 42732 - DNA, 25 bp, Artificial
  probe
  misc_feature (1)..(25): SEQ ID NO: 187; WAN024A4U_at; Start 4; Stop 28
agagagtggggcttcccactttctt

SEQ ID NO: 42733 - DNA, 25 bp, Artificial
  probe
  misc_feature (1)..(25): SEQ ID NO: 187; WAN024A4U_at; Start 16; Stop 40
ttcccactttcttcatttctagaat

SEQ ID NO: 42734 - DNA, 25 bp, Artificial
  probe
  misc_feature (1)..(25): SEQ ID NO: 187; WAN024A4U_at; Start 30; Stop 54
atttctagaatatgaatagaaggga

SEQ ID NO: 42735 - DNA, 25 bp, Artificial
  probe
  misc_feature (1)..(25): SEQ ID NO: 187; WAN024A4U_at; Start 23; Stop 47
tttcttcatttctagaatatgaata

SEQ ID NO: 42736 - DNA, 25 bp, Artificial
  probe
  misc_feature (1)..(25): SEQ ID NO: 187; WAN024A4U_at; Start 31; Stop 55
tttctagaatatgaatagaagggat

SEQ ID NO: 42737 - DNA, 25 bp, Artificial
  probe
  misc_feature (1)..(25): SEQ ID NO: 187; WAN024A4U_at; Start 6; Stop 30
agagtggggcttcccactttcttca

SEQ ID NO: 42738 - DNA, 25 bp, Artificial
  probe
  misc_feature (1)..(25): SEQ ID NO: 187; WAN024A4U_at; Start 19; Stop 43
ccactttcttcatttctagaatatg

SEQ ID NO: 42739 - DNA, 25 bp, Artificial
  probe
  misc_feature (1)..(25): SEQ ID NO: 187; WAN024A4U_at; Start 1; Stop 25
aacagagagtggggcttcccacttt

SEQ ID NO: 42740 - DNA, 25 bp, Artificial
  probe
  misc_feature (1)..(25): SEQ ID NO: 187; WAN024A4U_at; Start 18; Stop 42
cccactttcttcatttctagaatat

SEQ ID NO: 42741 - DNA, 25 bp, Artificial
  probe
  misc_feature (1)..(25): SEQ ID NO: 187; WAN024A4U_at; Start 7; Stop 31
gagtggggcttcccactttcttcat

SEQ ID NO: 42742 - DNA, 25 bp, Artificial
  probe
  misc_feature (1)..(25): SEQ ID NO: 187; WAN024A4U_at; Start 2; Stop 26
acagagagtggggcttcccactttc

SEQ ID NO: 42743 - DNA, 25 bp, Artificial
  probe
  misc_feature (1)..(25): SEQ ID NO: 187; WAN024A4U_at; Start 14; Stop 38
gcttcccactttcttcatttctaga

SEQ ID NO: 42744 - DNA, 25 bp, Artificial
  probe
  misc_feature (1)..(25): SEQ ID NO: 187; WAN024A4U_at; Start 26; Stop 50
cttcatttctagaatatgaatagaa

SEQ ID NO: 42745 - DNA, 25 bp, Artificial
  probe
  misc_feature (1)..(25): SEQ ID NO: 187; WAN024A4U_at; Start 10; Stop 34
tggggcttcccactttcttcatttc

SEQ ID NO: 42746 - DNA, 25 bp, Artificial
  probe
  misc_feature (1)..(25): SEQ ID NO: 187; WAN024A4U_at; Start 27; Stop 51
ttcatttctagaatatgaatagaag

SEQ ID NO: 42747 - DNA, 25 bp, Artificial
  probe
  misc_feature (1)..(25): SEQ ID NO: 187; WAN024A4U_at; Start 32; Stop 56
ttctagaatatgaatagaagggatt

SEQ ID NO: 42748 - DNA, 25 bp, Artificial
  probe
  misc_feature (1)..(25): SEQ ID NO: 187; WAN024A4U_at; Start 24; Stop 48
ttcttcatttctagaatatgaatag

SEQ ID NO: 42749 - DNA, 25 bp, Artificial
  probe
  misc_feature (1)..(25): SEQ ID NO: 187; WAN024A4U_at; Start 29; Stop 53
catttctagaatatgaatagaaggg

SEQ ID NO: 42750 - DNA, 25 bp, Artificial
  probe
  misc_feature (1)..(25): SEQ ID NO: 187; WAN024A4U_at; Start 22; Stop 46
ctttcttcatttctagaatatgaat

SEQ ID NO: 42751 - DNA, 25 bp, Artificial
  probe
  misc_feature (1)..(25): SEQ ID NO: 187; WAN024A4U_at; Start 20; Stop 44
cactttcttcatttctagaatatga

SEQ ID NO: 42752 - DNA, 25 bp, Artificial
  probe
  misc_feature (1)..(25): SEQ ID NO: 187; WAN024A4U_at; Start 25; Stop 49
tcttcatttctagaatatgaataga

SEQ ID NO: 42753 - DNA, 25 bp, Artificial
  probe
  misc_feature (1)..(25): SEQ ID NO: 187; WAN024A4U_at; Start 3; Stop 27
cagagagtggggcttcccactttct

SEQ ID NO: 42754 - DNA, 25 bp, Artificial
  probe
  misc_feature (1)..(25): SEQ ID NO: 187; WAN024A4U_at; Start 12; Stop 36
gggcttcccactttcttcatttcta

SEQ ID NO: 42755 - DNA, 25 bp, Artificial
  probe
  misc_feature (1)..(25): SEQ ID NO: 187; WAN024A4U_at; Start 13; Stop 37
ggcttcccactttcttcatttctag

SEQ ID NO: 42756 - DNA, 25 bp, Artificial
  probe
  misc_feature (1)..(25): SEQ ID NO: 187; WAN024A4U_at; Start 17; Stop 41
tcccactttcttcatttctagaata

SEQ ID NO: 42757 - DNA, 25 bp, Artificial
  probe
  misc_feature (1)..(25): SEQ ID NO: 187; WAN024A4U_at; Start 21; Stop 45
actttcttcatttctagaatatgaa

SEQ ID NO: 42758 - DNA, 25 bp, Artificial
  probe
  misc_feature (1)..(25): SEQ ID NO: 156; WAN024A4V_at; Start 24; Stop 48
gaaatgaagaaagtgggaagcccca

SEQ ID NO: 42759 - DNA, 25 bp, Artificial
  probe
  misc_feature (1)..(25): SEQ ID NO: 156; WAN024A4V_at; Start 9; Stop 33
tctattcatattctagaaatgaaga

SEQ ID NO: 42760 - DNA, 25 bp, Artificial
  probe
  misc_feature (1)..(25): SEQ ID NO: 156; WAN024A4V_at; Start 14; Stop 38
tcatattctagaaatgaagaaagtg

SEQ ID NO: 42761 - DNA, 25 bp, Artificial
  probe
  misc_feature (1)..(25): SEQ ID NO: 156; WAN024A4V_at; Start 21; Stop 45
ctagaaatgaagaaagtgggaagcc

SEQ ID NO: 42762 - DNA, 25 bp, Artificial
  probe
  misc_feature (1)..(25): SEQ ID NO: 156; WAN024A4V_at; Start 31; Stop 55
agaaagtgggaagccccactctctg

SEQ ID NO: 42763 - DNA, 25 bp, Artificial
  probe
  misc_feature (1)..(25): SEQ ID NO: 156; WAN024A4V_at; Start 2; Stop 26
aatcccttctattcatattctagaa

SEQ ID NO: 42764 - DNA, 25 bp, Artificial
  probe
  misc_feature (1)..(25): SEQ ID NO: 156; WAN024A4V_at; Start 26; Stop 50
aatgaagaaagtgggaagccccact

SEQ ID NO: 42765 - DNA, 25 bp, Artificial
  probe
  misc_feature (1)..(25): SEQ ID NO: 156; WAN024A4V_at; Start 16; Stop 40
atattctagaaatgaagaaagtggg

SEQ ID NO: 42766 - DNA, 25 bp, Artificial
  probe
  misc_feature (1)..(25): SEQ ID NO: 156; WAN024A4V_at; Start 15; Stop 39
catattctagaaatgaagaaagtgg

SEQ ID NO: 42767 - DNA, 25 bp, Artificial
  probe
  misc_feature (1)..(25): SEQ ID NO: 156; WAN024A4V_at; Start 20; Stop 44
tctagaaatgaagaaagtgggaagc

SEQ ID NO: 42768 - DNA, 25 bp, Artificial
  probe
  misc_feature (1)..(25): SEQ ID NO: 156; WAN024A4V_at; Start 6; Stop 30
ccttctattcatattctagaaatga

SEQ ID NO: 42769 - DNA, 25 bp, Artificial
  probe
  misc_feature (1)..(25): SEQ ID NO: 156; WAN024A4V_at; Start 32; Stop 56
gaaagtgggaagccccactctctgt

SEQ ID NO: 42770 - DNA, 25 bp, Artificial
  probe
  misc_feature (1)..(25): SEQ ID NO: 156; WAN024A4V_at; Start 17; Stop 41
tattctagaaatgaagaaagtggga

SEQ ID NO: 42771 - DNA, 25 bp, Artificial
  probe
  misc_feature (1)..(25): SEQ ID NO: 156; WAN024A4V_at; Start 10; Stop 34
ctattcatattctagaaatgaagaa

SEQ ID NO: 42772 - DNA, 25 bp, Artificial
  probe
  misc_feature (1)..(25): SEQ ID NO: 156; WAN024A4V_at; Start 11; Stop 35
tattcatattctagaaatgaagaaa

SEQ ID NO: 42773 - DNA, 25 bp, Artificial
  probe
  misc_feature (1)..(25): SEQ ID NO: 156; WAN024A4V_at; Start 7; Stop 31
cttctattcatattctagaaatgaa

SEQ ID NO: 42774 - DNA, 25 bp, Artificial
  probe
  misc_feature (1)..(25): SEQ ID NO: 156; WAN024A4V_at; Start 27; Stop 51
atgaagaaagtgggaagccccactc

SEQ ID NO: 42775 - DNA, 25 bp, Artificial
  probe
  misc_feature (1)..(25): SEQ ID NO: 156; WAN024A4V_at; Start 29; Stop 53
gaagaaagtgggaagccccactctc

SEQ ID NO: 42776 - DNA, 25 bp, Artificial
  probe
  misc_feature (1)..(25): SEQ ID NO: 156; WAN024A4V_at; Start 18; Stop 42
attctagaaatgaagaaagtgggaa

SEQ ID NO: 42777 - DNA, 25 bp, Artificial
  probe
  misc_feature (1)..(25): SEQ ID NO: 156; WAN024A4V_at; Start 13; Stop 37
ttcatattctagaaatgaagaaagt

SEQ ID NO: 42778 - DNA, 25 bp, Artificial
  probe
  misc_feature (1)..(25): SEQ ID NO: 156; WAN024A4V_at; Start 30; Stop 54
aagaaagtgggaagccccactctct

SEQ ID NO: 42779 - DNA, 25 bp, Artificial
  probe
  misc_feature (1)..(25): SEQ ID NO: 156; WAN024A4V_at; Start 19; Stop 43
ttctagaaatgaagaaagtgggaag

SEQ ID NO: 42780 - DNA, 25 bp, Artificial
  probe
  misc_feature (1)..(25): SEQ ID NO: 156; WAN024A4V_at; Start 5; Stop 29
cccttctattcatattctagaaatg

SEQ ID NO: 42781 - DNA, 25 bp, Artificial
  probe
  misc_feature (1)..(25): SEQ ID NO: 156; WAN024A4V_at; Start 33; Stop 57
aaagtgggaagccccactctctgtt

SEQ ID NO: 42782 - DNA, 25 bp, Artificial
  probe
  misc_feature (1)..(25): SEQ ID NO: 156; WAN024A4V_at; Start 12; Stop 36
attcatattctagaaatgaagaaag

SEQ ID NO: 42783 - DNA, 25 bp, Artificial
  probe
  misc_feature (1)..(25): SEQ ID NO: 156; WAN024A4V_at; Start 1; Stop 25
aaatcccttctattcatattctaga

SEQ ID NO: 42784 - DNA, 25 bp, Artificial
  probe
  misc_feature (1)..(25): SEQ ID NO: 156; WAN024A4V_at; Start 4; Stop 28
tcccttctattcatattctagaaat

SEQ ID NO: 42785 - DNA, 25 bp, Artificial
  probe
  misc_feature (1)..(25): SEQ ID NO: 156; WAN024A4V_at; Start 3; Stop 27
atcccttctattcatattctagaaa

SEQ ID NO: 42786 - DNA, 25 bp, Artificial
  probe
  misc_feature (1)..(25): SEQ ID NO: 156; WAN024A4V_at; Start 28; Stop 52
tgaagaaagtgggaagccccactct

SEQ ID NO: 42787 - DNA, 25 bp, Artificial
  probe
  misc_feature (1)..(25): SEQ ID NO: 156; WAN024A4V_at; Start 22; Stop 46
tagaaatgaagaaagtgggaagccc

SEQ ID NO: 42788 - DNA, 25 bp, Artificial
  probe
  misc_feature (1)..(25): SEQ ID NO: 156; WAN024A4V_at; Start 8; Stop 32
ttctattcatattctagaaatgaag

SEQ ID NO: 42789 - DNA, 25 bp, Artificial
  probe
  misc_feature (1)..(25): SEQ ID NO: 4833; WAN024A4W_at; Start 1; Stop 25
ttcctataaaaacatttccgatgag

SEQ ID NO: 42790 - DNA, 25 bp, Artificial
  probe
  misc_feature (1)..(25): SEQ ID NO: 4833; WAN024A4W_at; Start 20; Stop 44
gatgagagagcttgttttttaattt

SEQ ID NO: 42791 - DNA, 25 bp, Artificial
  probe
  misc_feature (1)..(25): SEQ ID NO: 4833; WAN024A4W_at; Start 53; Stop 77
aacaaaaaacgcaagcttaagcctg

SEQ ID NO: 42792 - DNA, 25 bp, Artificial
  probe
  misc_feature (1)..(25): SEQ ID NO: 4833; WAN024A4W_at; Start 61; Stop 85
acgcaagcttaagcctgcggacaat

SEQ ID NO: 42793 - DNA, 25 bp, Artificial
  probe
  misc_feature (1)..(25): SEQ ID NO: 4833; WAN024A4W_at; Start 3; Stop 27
cctataaaaacatttccgatgagag

SEQ ID NO: 42794 - DNA, 25 bp, Artificial
  probe
  misc_feature (1)..(25): SEQ ID NO: 4833; WAN024A4W_at; Start 22; Stop 46
tgagagagcttgttttttaatttcg

SEQ ID NO: 42795 - DNA, 25 bp, Artificial
  probe
  misc_feature (1)..(25): SEQ ID NO: 4833; WAN024A4W_at; Start 62; Stop 86
cgcaagcttaagcctgcggacaatc

SEQ ID NO: 42796 - DNA, 25 bp, Artificial
  probe
  misc_feature (1)..(25): SEQ ID NO: 4833; WAN024A4W_at; Start 15; Stop 39
tttccgatgagagagcttgtttttt

SEQ ID NO: 42797 - DNA, 25 bp, Artificial
  probe
  misc_feature (1)..(25): SEQ ID NO: 4833; WAN024A4W_at; Start 7; Stop 31
taaaaacatttccgatgagagagct

SEQ ID NO: 42798 - DNA, 25 bp, Artificial
  probe
  misc_feature (1)..(25): SEQ ID NO: 4833; WAN024A4W_at; Start 19; Stop 43
cgatgagagagcttgttttttaatt

SEQ ID NO: 42799 - DNA, 25 bp, Artificial
  probe
  misc_feature (1)..(25): SEQ ID NO: 4833; WAN024A4W_at; Start 14; Stop 38
atttccgatgagagagcttgttttt

SEQ ID NO: 42800 - DNA, 25 bp, Artificial
  probe
  misc_feature (1)..(25): SEQ ID NO: 4833; WAN024A4W_at; Start 56; Stop 80
aaaaaacgcaagcttaagcctgcgg

SEQ ID NO: 42801 - DNA, 25 bp, Artificial
  probe
  misc_feature (1)..(25): SEQ ID NO: 4833; WAN024A4W_at; Start 5; Stop 29
tataaaaacatttccgatgagagag

SEQ ID NO: 42802 - DNA, 25 bp, Artificial
  probe
  misc_feature (1)..(25): SEQ ID NO: 4833; WAN024A4W_at; Start 16; Stop 40
ttccgatgagagagcttgtttttta

SEQ ID NO: 42803 - DNA, 25 bp, Artificial
  probe
  misc_feature (1)..(25): SEQ ID NO: 4833; WAN024A4W_at; Start 63; Stop 87
gcaagcttaagcctgcggacaatct

SEQ ID NO: 42804 - DNA, 25 bp, Artificial
  probe
  misc_feature (1)..(25): SEQ ID NO: 4833; WAN024A4W_at; Start 12; Stop 36
acatttccgatgagagagcttgttt

SEQ ID NO: 42805 - DNA, 25 bp, Artificial
  probe
  misc_feature (1)..(25): SEQ ID NO: 4833; WAN024A4W_at; Start 18; Stop 42
ccgatgagagagcttgttttttaat

SEQ ID NO: 42806 - DNA, 25 bp, Artificial
  probe
  misc_feature (1)..(25): SEQ ID NO: 4833; WAN024A4W_at; Start 57; Stop 81
aaaaacgcaagcttaagcctgcgga

SEQ ID NO: 42807 - DNA, 25 bp, Artificial
  probe
  misc_feature (1)..(25): SEQ ID NO: 4833; WAN024A4W_at; Start 21; Stop 45
atgagagagcttgttttttaatttc

SEQ ID NO: 42808 - DNA, 25 bp, Artificial
  probe
  misc_feature (1)..(25): SEQ ID NO: 4833; WAN024A4W_at; Start 6; Stop 30
ataaaaacatttccgatgagagagc

SEQ ID NO: 42809 - DNA, 25 bp, Artificial
  probe
  misc_feature (1)..(25): SEQ ID NO: 4833; WAN024A4W_at; Start 10; Stop 34
aaacatttccgatgagagagcttgt

SEQ ID NO: 42810 - DNA, 25 bp, Artificial
  probe
  misc_feature (1)..(25): SEQ ID NO: 4833; WAN024A4W_at; Start 11; Stop 35
aacatttccgatgagagagcttgtt

SEQ ID NO: 42811 - DNA, 25 bp, Artificial
  probe
  misc_feature (1)..(25): SEQ ID NO: 4833; WAN024A4W_at; Start 59; Stop 83
aaacgcaagcttaagcctgcggaca

SEQ ID NO: 42812 - DNA, 25 bp, Artificial
  probe
  misc_feature (1)..(25): SEQ ID NO: 4833; WAN024A4W_at; Start 2; Stop 26
tcctataaaaacatttccgatgaga

SEQ ID NO: 42813 - DNA, 25 bp, Artificial
  probe
  misc_feature (1)..(25): SEQ ID NO: 4833; WAN024A4W_at; Start 52; Stop 76
caacaaaaaacgcaagcttaagcct

SEQ ID NO: 42814 - DNA, 25 bp, Artificial
  probe
  misc_feature (1)..(25): SEQ ID NO: 4833; WAN024A4W_at; Start 54; Stop 78
acaaaaaacgcaagcttaagcctgc

SEQ ID NO: 42815 - DNA, 25 bp, Artificial
  probe
  misc_feature (1)..(25): SEQ ID NO: 4833; WAN024A4W_at; Start 4; Stop 28
ctataaaaacatttccgatgagaga

SEQ ID NO: 42816 - DNA, 25 bp, Artificial
  probe
  misc_feature (1)..(25): SEQ ID NO: 4833; WAN024A4W_at; Start 55; Stop 79
caaaaaacgcaagcttaagcctgcg

SEQ ID NO: 42817 - DNA, 25 bp, Artificial
  probe
  misc_feature (1)..(25): SEQ ID NO: 4833; WAN024A4W_at; Start 58; Stop 82
aaaacgcaagcttaagcctgcggac

SEQ ID NO: 42818 - DNA, 25 bp, Artificial
  probe
  misc_feature (1)..(25): SEQ ID NO: 4833; WAN024A4W_at; Start 8; Stop 32
aaaaacatttccgatgagagagctt

SEQ ID NO: 42819 - DNA, 25 bp, Artificial
  probe
  misc_feature (1)..(25): SEQ ID NO: 4833; WAN024A4W_at; Start 9; Stop 33
aaaacatttccgatgagagagcttg

SEQ ID NO: 42820 - DNA, 25 bp, Artificial
  probe
  misc_feature (1)..(25): SEQ ID NO: 4833; WAN024A4W_at; Start 13; Stop 37
catttccgatgagagagcttgtttt

SEQ ID NO: 42821 - DNA, 25 bp, Artificial
  probe
  misc_feature (1)..(25): SEQ ID NO: 4833; WAN024A4W_at; Start 60; Stop 84
aacgcaagcttaagcctgcggacaa

SEQ ID NO: 42822 - DNA, 25 bp, Artificial
  probe
  misc_feature (1)..(25): SEQ ID NO: 4833; WAN024A4W_at; Start 17; Stop 41
tccgatgagagagcttgttttttaa

SEQ ID NO: 42823 - DNA, 25 bp, Artificial
  probe
  misc_feature (1)..(25): SEQ ID NO: 437; WAN024A4X_at; Start 63; Stop 87
ctcatcggaaatgtttttataggaa

SEQ ID NO: 42824 - DNA, 25 bp, Artificial
  probe
  misc_feature (1)..(25): SEQ ID NO: 437; WAN024A4X_at; Start 50; Stop 74
aaaaacaagctctctcatcggaaat

SEQ ID NO: 42825 - DNA, 25 bp, Artificial
  probe
  misc_feature (1)..(25): SEQ ID NO: 437; WAN024A4X_at; Start 7; Stop 31
tccgcaggcttaagcttgcgttttt

SEQ ID NO: 42826 - DNA, 25 bp, Artificial
  probe
  misc_feature (1)..(25): SEQ ID NO: 437; WAN024A4X_at; Start 46; Stop 70
attaaaaaacaagctctctcatcgg

SEQ ID NO: 42827 - DNA, 25 bp, Artificial
  probe
  misc_feature (1)..(25): SEQ ID NO: 437; WAN024A4X_at; Start 12; Stop 36
aggcttaagcttgcgttttttgttg

SEQ ID NO: 42828 - DNA, 25 bp, Artificial
  probe
  misc_feature (1)..(25): SEQ ID NO: 437; WAN024A4X_at; Start 4; Stop 28
ttgtccgcaggcttaagcttgcgtt

SEQ ID NO: 42829 - DNA, 25 bp, Artificial
  probe
  misc_feature (1)..(25): SEQ ID NO: 437; WAN024A4X_at; Start 11; Stop 35
caggcttaagcttgcgttttttgtt

SEQ ID NO: 42830 - DNA, 25 bp, Artificial
  probe
  misc_feature (1)..(25): SEQ ID NO: 437; WAN024A4X_at; Start 10; Stop 34
gcaggcttaagcttgcgttttttgt

SEQ ID NO: 42831 - DNA, 25 bp, Artificial
  probe
  misc_feature (1)..(25): SEQ ID NO: 437; WAN024A4X_at; Start 47; Stop 71
ttaaaaaacaagctctctcatcgga

SEQ ID NO: 42832 - DNA, 25 bp, Artificial
  probe
  misc_feature (1)..(25): SEQ ID NO: 437; WAN024A4X_at; Start 44; Stop 68
aaattaaaaaacaagctctctcatc

SEQ ID NO: 42833 - DNA, 25 bp, Artificial
  probe
  misc_feature (1)..(25): SEQ ID NO: 437; WAN024A4X_at; Start 62; Stop 86
tctcatcggaaatgtttttatagga

SEQ ID NO: 42834 - DNA, 25 bp, Artificial
  probe
  misc_feature (1)..(25): SEQ ID NO: 437; WAN024A4X_at; Start 60; Stop 84
tctctcatcggaaatgtttttatag

SEQ ID NO: 42835 - DNA, 25 bp, Artificial
  probe
  misc_feature (1)..(25): SEQ ID NO: 437; WAN024A4X_at; Start 52; Stop 76
aaacaagctctctcatcggaaatgt

SEQ ID NO: 42836 - DNA, 25 bp, Artificial
  probe
  misc_feature (1)..(25): SEQ ID NO: 437; WAN024A4X_at; Start 53; Stop 77
aacaagctctctcatcggaaatgtt

SEQ ID NO: 42837 - DNA, 25 bp, Artificial
  probe
  misc_feature (1)..(25): SEQ ID NO: 437; WAN024A4X_at; Start 5; Stop 29
tgtccgcaggcttaagcttgcgttt

SEQ ID NO: 42838 - DNA, 25 bp, Artificial
  probe
  misc_feature (1)..(25): SEQ ID NO: 437; WAN024A4X_at; Start 49; Stop 73
aaaaaacaagctctctcatcggaaa

SEQ ID NO: 42839 - DNA, 25 bp, Artificial
  probe
  misc_feature (1)..(25): SEQ ID NO: 437; WAN024A4X_at; Start 61; Stop 85
ctctcatcggaaatgtttttatagg

SEQ ID NO: 42840 - DNA, 25 bp, Artificial
  probe
  misc_feature (1)..(25): SEQ ID NO: 437; WAN024A4X_at; Start 9; Stop 33
cgcaggcttaagcttgcgttttttg

SEQ ID NO: 42841 - DNA, 25 bp, Artificial
  probe
  misc_feature (1)..(25): SEQ ID NO: 437; WAN024A4X_at; Start 56; Stop 80
aagctctctcatcggaaatgttttt

SEQ ID NO: 42842 - DNA, 25 bp, Artificial
  probe
  misc_feature (1)..(25): SEQ ID NO: 437; WAN024A4X_at; Start 51; Stop 75
aaaacaagctctctcatcggaaatg

SEQ ID NO: 42843 - DNA, 25 bp, Artificial
  probe
  misc_feature (1)..(25): SEQ ID NO: 437; WAN024A4X_at; Start 58; Stop 82
gctctctcatcggaaatgtttttat

SEQ ID NO: 42844 - DNA, 25 bp, Artificial
  probe
  misc_feature (1)..(25): SEQ ID NO: 437; WAN024A4X_at; Start 54; Stop 78
acaagctctctcatcggaaatgttt

SEQ ID NO: 42845 - DNA, 25 bp, Artificial
  probe
  misc_feature (1)..(25): SEQ ID NO: 437; WAN024A4X_at; Start 2; Stop 26
gattgtccgcaggcttaagcttgcg

SEQ ID NO: 42846 - DNA, 25 bp, Artificial
  probe
  misc_feature (1)..(25): SEQ ID NO: 437; WAN024A4X_at; Start 43; Stop 67
gaaattaaaaaacaagctctctcat

SEQ ID NO: 42847 - DNA, 25 bp, Artificial
  probe
  misc_feature (1)..(25): SEQ ID NO: 437; WAN024A4X_at; Start 42; Stop 66
cgaaattaaaaaacaagctctctca

SEQ ID NO: 42848 - DNA, 25 bp, Artificial
  probe
  misc_feature (1)..(25): SEQ ID NO: 437; WAN024A4X_at; Start 8; Stop 32
ccgcaggcttaagcttgcgtttttt

SEQ ID NO: 42849 - DNA, 25 bp, Artificial
  probe
  misc_feature (1)..(25): SEQ ID NO: 437; WAN024A4X_at; Start 3; Stop 27
attgtccgcaggcttaagcttgcgt

SEQ ID NO: 42850 - DNA, 25 bp, Artificial
  probe
  misc_feature (1)..(25): SEQ ID NO: 437; WAN024A4X_at; Start 48; Stop 72
taaaaaacaagctctctcatcggaa

SEQ ID NO: 42851 - DNA, 25 bp, Artificial
  probe
  misc_feature (1)..(25): SEQ ID NO: 437; WAN024A4X_at; Start 1; Stop 25
agattgtccgcaggcttaagcttgc

SEQ ID NO: 42852 - DNA, 25 bp, Artificial
  probe
  misc_feature (1)..(25): SEQ ID NO: 437; WAN024A4X_at; Start 57; Stop 81
agctctctcatcggaaatgttttta

SEQ ID NO: 42853 - DNA, 25 bp, Artificial
  probe
  misc_feature (1)..(25): SEQ ID NO: 437; WAN024A4X_at; Start 45; Stop 69
aattaaaaaacaagctctctcatcg

SEQ ID NO: 42854 - DNA, 25 bp, Artificial
  probe
  misc_feature (1)..(25): SEQ ID NO: 437; WAN024A4X_at; Start 6; Stop 30
gtccgcaggcttaagcttgcgtttt

SEQ ID NO: 42855 - DNA, 25 bp, Artificial
  probe
  misc_feature (1)..(25): SEQ ID NO: 437; WAN024A4X_at; Start 59; Stop 83
ctctctcatcggaaatgtttttata

SEQ ID NO: 42856 - DNA, 25 bp, Artificial
  probe
  misc_feature (1)..(25): SEQ ID NO: 437; WAN024A4X_at; Start 55; Stop 79
caagctctctcatcggaaatgtttt

SEQ ID NO: 42857 - DNA, 25 bp, Artificial
  probe
  misc_feature (1)..(25): SEQ ID NO: 3680; WAN024A4Y_at; Start 25; Stop 49
gacgaaaaaagttgccttcgagtga

SEQ ID NO: 42858 - DNA, 25 bp, Artificial
  probe
  misc_feature (1)..(25): SEQ ID NO: 3680; WAN024A4Y_at; Start 38; Stop 62
gccttcgagtgacttttttgttaca

SEQ ID NO: 42859 - DNA, 25 bp, Artificial
  probe
  misc_feature (1)..(25): SEQ ID NO: 3680; WAN024A4Y_at; Start 4; Stop 28
attctcttttgaaagtttatggacg

SEQ ID NO: 42860 - DNA, 25 bp, Artificial
  probe
  misc_feature (1)..(25): SEQ ID NO: 3680; WAN024A4Y_at; Start 41; Stop 65
ttcgagtgacttttttgttacaata

SEQ ID NO: 42861 - DNA, 25 bp, Artificial
  probe
  misc_feature (1)..(25): SEQ ID NO: 3680; WAN024A4Y_at; Start 3; Stop 27
cattctcttttgaaagtttatggac

SEQ ID NO: 42862 - DNA, 25 bp, Artificial
  probe
  misc_feature (1)..(25): SEQ ID NO: 3680; WAN024A4Y_at; Start 40; Stop 64
cttcgagtgacttttttgttacaat

SEQ ID NO: 42863 - DNA, 25 bp, Artificial
  probe
  misc_feature (1)..(25): SEQ ID NO: 3680; WAN024A4Y_at; Start 34; Stop 58
agttgccttcgagtgacttttttgt

SEQ ID NO: 42864 - DNA, 25 bp, Artificial
  probe
  misc_feature (1)..(25): SEQ ID NO: 3680; WAN024A4Y_at; Start 27; Stop 51
cgaaaaaagttgccttcgagtgact

SEQ ID NO: 42865 - DNA, 25 bp, Artificial
  probe
  misc_feature (1)..(25): SEQ ID NO: 3680; WAN024A4Y_at; Start 6; Stop 30
tctcttttgaaagtttatggacgaa

SEQ ID NO: 42866 - DNA, 25 bp, Artificial
  probe
  misc_feature (1)..(25): SEQ ID NO: 3680; WAN024A4Y_at; Start 37; Stop 61
tgccttcgagtgacttttttgttac

SEQ ID NO: 42867 - DNA, 25 bp, Artificial
  probe
  misc_feature (1)..(25): SEQ ID NO: 3680; WAN024A4Y_at; Start 5; Stop 29
ttctcttttgaaagtttatggacga

SEQ ID NO: 42868 - DNA, 25 bp, Artificial
  probe
  misc_feature (1)..(25): SEQ ID NO: 3680; WAN024A4Y_at; Start 42; Stop 66
tcgagtgacttttttgttacaatag

SEQ ID NO: 42869 - DNA, 25 bp, Artificial
  probe
  misc_feature (1)..(25): SEQ ID NO: 3680; WAN024A4Y_at; Start 21; Stop 45
tatggacgaaaaaagttgccttcga

SEQ ID NO: 42870 - DNA, 25 bp, Artificial
  probe
  misc_feature (1)..(25): SEQ ID NO: 3680; WAN024A4Y_at; Start 2; Stop 26
ccattctcttttgaaagtttatgga

SEQ ID NO: 42871 - DNA, 25 bp, Artificial
  probe
  misc_feature (1)..(25): SEQ ID NO: 3680; WAN024A4Y_at; Start 36; Stop 60
ttgccttcgagtgacttttttgtta

SEQ ID NO: 42872 - DNA, 25 bp, Artificial
  probe
  misc_feature (1)..(25): SEQ ID NO: 3680; WAN024A4Y_at; Start 22; Stop 46
atggacgaaaaaagttgccttcgag

SEQ ID NO: 42873 - DNA, 25 bp, Artificial
  probe
  misc_feature (1)..(25): SEQ ID NO: 3680; WAN024A4Y_at; Start 1; Stop 25
gccattctcttttgaaagtttatgg

SEQ ID NO: 42874 - DNA, 25 bp, Artificial
  probe
  misc_feature (1)..(25): SEQ ID NO: 3680; WAN024A4Y_at; Start 33; Stop 57
aagttgccttcgagtgacttttttg

SEQ ID NO: 42875 - DNA, 25 bp, Artificial
  probe
  misc_feature (1)..(25): SEQ ID NO: 3295; WAN024A4Z_at; Start 38; Stop 62
tcgtccataaactttcaaaagagaa

SEQ ID NO: 42876 - DNA, 25 bp, Artificial
  probe
  misc_feature (1)..(25): SEQ ID NO: 3295; WAN024A4Z_at; Start 3; Stop 27
attgtaacaaaaaagtcactcgaag

SEQ ID NO: 42877 - DNA, 25 bp, Artificial
  probe
  misc_feature (1)..(25): SEQ ID NO: 3295; WAN024A4Z_at; Start 21; Stop 45
ctcgaaggcaacttttttcgtccat

SEQ ID NO: 42878 - DNA, 25 bp, Artificial
  probe
  misc_feature (1)..(25): SEQ ID NO: 3295; WAN024A4Z_at; Start 37; Stop 61
ttcgtccataaactttcaaaagaga

SEQ ID NO: 42879 - DNA, 25 bp, Artificial
  probe
  misc_feature (1)..(25): SEQ ID NO: 3295; WAN024A4Z_at; Start 7; Stop 31
taacaaaaaagtcactcgaaggcaa

SEQ ID NO: 42880 - DNA, 25 bp, Artificial
  probe
  misc_feature (1)..(25): SEQ ID NO: 3295; WAN024A4Z_at; Start 1; Stop 25
ctattgtaacaaaaaagtcactcga

SEQ ID NO: 42881 - DNA, 25 bp, Artificial
  probe
  misc_feature (1)..(25): SEQ ID NO: 3295; WAN024A4Z_at; Start 22; Stop 46
tcgaaggcaacttttttcgtccata

SEQ ID NO: 42882 - DNA, 25 bp, Artificial
  probe
  misc_feature (1)..(25): SEQ ID NO: 3295; WAN024A4Z_at; Start 9; Stop 33
acaaaaaagtcactcgaaggcaact

SEQ ID NO: 42883 - DNA, 25 bp, Artificial
  probe
  misc_feature (1)..(25): SEQ ID NO: 3295; WAN024A4Z_at; Start 42; Stop 66
ccataaactttcaaaagagaatggc

SEQ ID NO: 42884 - DNA, 25 bp, Artificial
  probe
  misc_feature (1)..(25): SEQ ID NO: 3295; WAN024A4Z_at; Start 10; Stop 34
caaaaaagtcactcgaaggcaactt

SEQ ID NO: 42885 - DNA, 25 bp, Artificial
  probe
  misc_feature (1)..(25): SEQ ID NO: 3295; WAN024A4Z_at; Start 16; Stop 40
agtcactcgaaggcaacttttttcg

SEQ ID NO: 42886 - DNA, 25 bp, Artificial
  probe
  misc_feature (1)..(25): SEQ ID NO: 3295; WAN024A4Z_at; Start 39; Stop 63
cgtccataaactttcaaaagagaat

SEQ ID NO: 42887 - DNA, 25 bp, Artificial
  probe
  misc_feature (1)..(25): SEQ ID NO: 3295; WAN024A4Z_at; Start 6; Stop 30
gtaacaaaaaagtcactcgaaggca

SEQ ID NO: 42888 - DNA, 25 bp, Artificial
  probe
  misc_feature (1)..(25): SEQ ID NO: 3295; WAN024A4Z_at; Start 41; Stop 65
tccataaactttcaaaagagaatgg

SEQ ID NO: 42889 - DNA, 25 bp, Artificial
  probe
  misc_feature (1)..(25): SEQ ID NO: 3295; WAN024A4Z_at; Start 2; Stop 26
tattgtaacaaaaaagtcactcgaa

SEQ ID NO: 42890 - DNA, 25 bp, Artificial
  probe
  misc_feature (1)..(25): SEQ ID NO: 3295; WAN024A4Z_at; Start 18; Stop 42
tcactcgaaggcaacttttttcgtc

SEQ ID NO: 42891 - DNA, 25 bp, Artificial
  probe
  misc_feature (1)..(25): SEQ ID NO: 3295; WAN024A4Z_at; Start 5; Stop 29
tgtaacaaaaaagtcactcgaaggc

SEQ ID NO: 42892 - DNA, 25 bp, Artificial
  probe
  misc_feature (1)..(25): SEQ ID NO: 3295; WAN024A4Z_at; Start 40; Stop 64
gtccataaactttcaaaagagaatg

SEQ ID NO: 42893 - DNA, 25 bp, Artificial
  probe
  misc_feature (1)..(25): SEQ ID NO: 4656; WAN024A52_at; Start 4; Stop 28
taagctacacagcgtagcctagcta

SEQ ID NO: 42894 - DNA, 25 bp, Artificial
  probe
  misc_feature (1)..(25): SEQ ID NO: 4656; WAN024A52_at; Start 9; Stop 33
tacacagcgtagcctagctacgaaa

SEQ ID NO: 42895 - DNA, 25 bp, Artificial
  probe
  misc_feature (1)..(25): SEQ ID NO: 4656; WAN024A52_at; Start 10; Stop 34
acacagcgtagcctagctacgaaaa

SEQ ID NO: 42896 - DNA, 25 bp, Artificial
  probe
  misc_feature (1)..(25): SEQ ID NO: 4656; WAN024A52_at; Start 7; Stop 31
gctacacagcgtagcctagctacga

SEQ ID NO: 42897 - DNA, 25 bp, Artificial
  probe
  misc_feature (1)..(25): SEQ ID NO: 4656; WAN024A52_at; Start 13; Stop 37
cagcgtagcctagctacgaaaaaaa

SEQ ID NO: 42898 - DNA, 25 bp, Artificial
  probe
  misc_feature (1)..(25): SEQ ID NO: 4656; WAN024A52_at; Start 3; Stop 27
ttaagctacacagcgtagcctagct

SEQ ID NO: 42899 - DNA, 25 bp, Artificial
  probe
  misc_feature (1)..(25): SEQ ID NO: 4656; WAN024A52_at; Start 8; Stop 32
ctacacagcgtagcctagctacgaa

SEQ ID NO: 42900 - DNA, 25 bp, Artificial
  probe
  misc_feature (1)..(25): SEQ ID NO: 4656; WAN024A52_at; Start 5; Stop 29
aagctacacagcgtagcctagctac

SEQ ID NO: 42901 - DNA, 25 bp, Artificial
  probe
  misc_feature (1)..(25): SEQ ID NO: 4656; WAN024A52_at; Start 11; Stop 35
cacagcgtagcctagctacgaaaaa

SEQ ID NO: 42902 - DNA, 25 bp, Artificial
  probe
  misc_feature (1)..(25): SEQ ID NO: 4656; WAN024A52_at; Start 2; Stop 26
cttaagctacacagcgtagcctagc

SEQ ID NO: 42903 - DNA, 25 bp, Artificial
  probe
  misc_feature (1)..(25): SEQ ID NO: 4656; WAN024A52_at; Start 12; Stop 36
acagcgtagcctagctacgaaaaaa

SEQ ID NO: 42904 - DNA, 25 bp, Artificial
  probe
  misc_feature (1)..(25): SEQ ID NO: 4656; WAN024A52_at; Start 6; Stop 30
agctacacagcgtagcctagctacg

SEQ ID NO: 42905 - DNA, 25 bp, Artificial
  probe
  misc_feature (1)..(25): SEQ ID NO: 4656; WAN024A52_at; Start 1; Stop 25
tcttaagctacacagcgtagcctag

SEQ ID NO: 42906 - DNA, 25 bp, Artificial
  probe
  misc_feature (1)..(25): SEQ ID NO: 4737; WAN024A53_at; Start 49; Stop 73
agctaggctacgctgtgtagcttaa

SEQ ID NO: 42907 - DNA, 25 bp, Artificial
  probe
  misc_feature (1)..(25): SEQ ID NO: 4737; WAN024A53_at; Start 44; Stop 68
ttcgtagctaggctacgctgtgtag

SEQ ID NO: 42908 - DNA, 25 bp, Artificial
  probe
  misc_feature (1)..(25): SEQ ID NO: 4737; WAN024A53_at; Start 51; Stop 75
ctaggctacgctgtgtagcttaaga

SEQ ID NO: 42909 - DNA, 25 bp, Artificial
  probe
  misc_feature (1)..(25): SEQ ID NO: 4737; WAN024A53_at; Start 48; Stop 72
tagctaggctacgctgtgtagctta

SEQ ID NO: 42910 - DNA, 25 bp, Artificial
  probe
  misc_feature (1)..(25): SEQ ID NO: 4737; WAN024A53_at; Start 45; Stop 69
tcgtagctaggctacgctgtgtagc

SEQ ID NO: 42911 - DNA, 25 bp, Artificial
  probe
  misc_feature (1)..(25): SEQ ID NO: 4737; WAN024A53_at; Start 43; Stop 67
tttcgtagctaggctacgctgtgta

SEQ ID NO: 42912 - DNA, 25 bp, Artificial
  probe
  misc_feature (1)..(25): SEQ ID NO: 4737; WAN024A53_at; Start 50; Stop 74
gctaggctacgctgtgtagcttaag

SEQ ID NO: 42913 - DNA, 25 bp, Artificial
  probe
  misc_feature (1)..(25): SEQ ID NO: 4737; WAN024A53_at; Start 47; Stop 71
gtagctaggctacgctgtgtagctt

SEQ ID NO: 42914 - DNA, 25 bp, Artificial
  probe
  misc_feature (1)..(25): SEQ ID NO: 4737; WAN024A53_at; Start 40; Stop 64
ttttttcgtagctaggctacgctgt

SEQ ID NO: 42915 - DNA, 25 bp, Artificial
  probe
  misc_feature (1)..(25): SEQ ID NO: 4737; WAN024A53_at; Start 46; Stop 70
cgtagctaggctacgctgtgtagct

SEQ ID NO: 42916 - DNA, 25 bp, Artificial
  probe
  misc_feature (1)..(25): SEQ ID NO: 4737; WAN024A53_at; Start 39; Stop 63
tttttttcgtagctaggctacgctg

SEQ ID NO: 42917 - DNA, 25 bp, Artificial
  probe
  misc_feature (1)..(25): SEQ ID NO: 4737; WAN024A53_at; Start 42; Stop 66
ttttcgtagctaggctacgctgtgt

SEQ ID NO: 42918 - DNA, 25 bp, Artificial
  probe
  misc_feature (1)..(25): SEQ ID NO: 4737; WAN024A53_at; Start 41; Stop 65
tttttcgtagctaggctacgctgtg

SEQ ID NO: 42919 - DNA, 25 bp, Artificial
  probe
  misc_feature (1)..(25): SEQ ID NO: 3542; WAN024A54_at; Start 95; Stop 119
atccccaatcgtagtgattgaggat

SEQ ID NO: 42920 - DNA, 25 bp, Artificial
  probe
  misc_feature (1)..(25): SEQ ID NO: 3542; WAN024A54_at; Start 93; Stop 117
aaatccccaatcgtagtgattgagg

SEQ ID NO: 42921 - DNA, 25 bp, Artificial
  probe
  misc_feature (1)..(25): SEQ ID NO: 3542; WAN024A54_at; Start 88; Stop 112
gctaaaaatccccaatcgtagtgat

SEQ ID NO: 42922 - DNA, 25 bp, Artificial
  probe
  misc_feature (1)..(25): SEQ ID NO: 3542; WAN024A54_at; Start 90; Stop 114
taaaaatccccaatcgtagtgattg

SEQ ID NO: 42923 - DNA, 25 bp, Artificial
  probe
  misc_feature (1)..(25): SEQ ID NO: 3542; WAN024A54_at; Start 84; Stop 108
tcaagctaaaaatccccaatcgtag

SEQ ID NO: 42924 - DNA, 25 bp, Artificial
  probe
  misc_feature (1)..(25): SEQ ID NO: 3542; WAN024A54_at; Start 91; Stop 115
aaaaatccccaatcgtagtgattga

SEQ ID NO: 42925 - DNA, 25 bp, Artificial
  probe
  misc_feature (1)..(25): SEQ ID NO: 3542; WAN024A54_at; Start 89; Stop 113
ctaaaaatccccaatcgtagtgatt

SEQ ID NO: 42926 - DNA, 25 bp, Artificial
  probe
  misc_feature (1)..(25): SEQ ID NO: 3542; WAN024A54_at; Start 87; Stop 111
agctaaaaatccccaatcgtagtga

SEQ ID NO: 42927 - DNA, 25 bp, Artificial
  probe
  misc_feature (1)..(25): SEQ ID NO: 3542; WAN024A54_at; Start 86; Stop 110
aagctaaaaatccccaatcgtagtg

SEQ ID NO: 42928 - DNA, 25 bp, Artificial
  probe
  misc_feature (1)..(25): SEQ ID NO: 3542; WAN024A54_at; Start 85; Stop 109
caagctaaaaatccccaatcgtagt

SEQ ID NO: 42929 - DNA, 25 bp, Artificial
  probe
  misc_feature (1)..(25): SEQ ID NO: 3542; WAN024A54_at; Start 92; Stop 116
aaaatccccaatcgtagtgattgag

SEQ ID NO: 42930 - DNA, 25 bp, Artificial
  probe
  misc_feature (1)..(25): SEQ ID NO: 3542; WAN024A54_at; Start 96; Stop 120
tccccaatcgtagtgattgaggatt

SEQ ID NO: 42931 - DNA, 25 bp, Artificial
  probe
  misc_feature (1)..(25): SEQ ID NO: 3542; WAN024A54_at; Start 94; Stop 118
aatccccaatcgtagtgattgagga

SEQ ID NO: 42932 - DNA, 25 bp, Artificial
  probe
  misc_feature (1)..(25): SEQ ID NO: 3657; WAN024A55_at; Start 18; Stop 42
ctcaatcactacgattggggatttt

SEQ ID NO: 42933 - DNA, 25 bp, Artificial
  probe
  misc_feature (1)..(25): SEQ ID NO: 3657; WAN024A55_at; Start 15; Stop 39
atcctcaatcactacgattggggat

SEQ ID NO: 42934 - DNA, 25 bp, Artificial
  probe
  misc_feature (1)..(25): SEQ ID NO: 3657; WAN024A55_at; Start 19; Stop 43
tcaatcactacgattggggattttt

SEQ ID NO: 42935 - DNA, 25 bp, Artificial
  probe
  misc_feature (1)..(25): SEQ ID NO: 3657; WAN024A55_at; Start 16; Stop 40
tcctcaatcactacgattggggatt

SEQ ID NO: 42936 - DNA, 25 bp, Artificial
  probe
  misc_feature (1)..(25): SEQ ID NO: 3657; WAN024A55_at; Start 20; Stop 44
caatcactacgattggggattttta

SEQ ID NO: 42937 - DNA, 25 bp, Artificial
  probe
  misc_feature (1)..(25): SEQ ID NO: 3657; WAN024A55_at; Start 24; Stop 48
cactacgattggggatttttagctt

SEQ ID NO: 42938 - DNA, 25 bp, Artificial
  probe
  misc_feature (1)..(25): SEQ ID NO: 3657; WAN024A55_at; Start 23; Stop 47
tcactacgattggggatttttagct

SEQ ID NO: 42939 - DNA, 25 bp, Artificial
  probe
  misc_feature (1)..(25): SEQ ID NO: 3657; WAN024A55_at; Start 25; Stop 49
actacgattggggatttttagcttg

SEQ ID NO: 42940 - DNA, 25 bp, Artificial
  probe
  misc_feature (1)..(25): SEQ ID NO: 3657; WAN024A55_at; Start 17; Stop 41
cctcaatcactacgattggggattt

SEQ ID NO: 42941 - DNA, 25 bp, Artificial
  probe
  misc_feature (1)..(25): SEQ ID NO: 3657; WAN024A55_at; Start 83; Stop 107
tgaaatgaaataaaaactgaacaaa

SEQ ID NO: 42942 - DNA, 25 bp, Artificial
  probe
  misc_feature (1)..(25): SEQ ID NO: 3657; WAN024A55_at; Start 14; Stop 38
aatcctcaatcactacgattgggga

SEQ ID NO: 42943 - DNA, 25 bp, Artificial
  probe
  misc_feature (1)..(25): SEQ ID NO: 3657; WAN024A55_at; Start 21; Stop 45
aatcactacgattggggatttttag

SEQ ID NO: 42944 - DNA, 25 bp, Artificial
  probe
  misc_feature (1)..(25): SEQ ID NO: 3657; WAN024A55_at; Start 22; Stop 46
atcactacgattggggatttttagc

SEQ ID NO: 42945 - DNA, 25 bp, Artificial
  probe
  misc_feature (1)..(25): SEQ ID NO: 3657; WAN024A55_at; Start 26; Stop 50
ctacgattggggatttttagcttga

SEQ ID NO: 42946 - DNA, 25 bp, Artificial
  probe
  misc_feature (1)..(25): SEQ ID NO: 3657; WAN024A55_at; Start 82; Stop 106
atgaaatgaaataaaaactgaacaa

SEQ ID NO: 42947 - DNA, 25 bp, Artificial
  probe
  misc_feature (1)..(25): SEQ ID NO: 108; WAN024A56_at; Start 5; Stop 29
agcagttgatttcaagaaacaaaaa

SEQ ID NO: 42948 - DNA, 25 bp, Artificial
  probe
  misc_feature (1)..(25): SEQ ID NO: 108; WAN024A56_at; Start 6; Stop 30
gcagttgatttcaagaaacaaaaaa

SEQ ID NO: 42949 - DNA, 25 bp, Artificial
  probe
  misc_feature (1)..(25): SEQ ID NO: 108; WAN024A56_at; Start 4; Stop 28
cagcagttgatttcaagaaacaaaa

SEQ ID NO: 42950 - DNA, 25 bp, Artificial
  probe
  misc_feature (1)..(25): SEQ ID NO: 108; WAN024A56_at; Start 7; Stop 31
cagttgatttcaagaaacaaaaaag

SEQ ID NO: 42951 - DNA, 25 bp, Artificial
  probe
  misc_feature (1)..(25): SEQ ID NO: 108; WAN024A56_at; Start 1; Stop 25
aaacagcagttgatttcaagaaaca

SEQ ID NO: 42952 - DNA, 25 bp, Artificial
  probe
  misc_feature (1)..(25): SEQ ID NO: 108; WAN024A56_at; Start 3; Stop 27
acagcagttgatttcaagaaacaaa

SEQ ID NO: 42953 - DNA, 25 bp, Artificial
  probe
  misc_feature (1)..(25): SEQ ID NO: 108; WAN024A56_at; Start 2; Stop 26
aacagcagttgatttcaagaaacaa

SEQ ID NO: 42954 - DNA, 25 bp, Artificial
  probe
  misc_feature (1)..(25): SEQ ID NO: 4690; WAN024A57_at; Start 30; Stop 54
tttgtttcttgaaatcaactgctgt

SEQ ID NO: 42955 - DNA, 25 bp, Artificial
  probe
  misc_feature (1)..(25): SEQ ID NO: 4690; WAN024A57_at; Start 32; Stop 56
tgtttcttgaaatcaactgctgttt

SEQ ID NO: 42956 - DNA, 25 bp, Artificial
  probe
  misc_feature (1)..(25): SEQ ID NO: 4690; WAN024A57_at; Start 29; Stop 53
ttttgtttcttgaaatcaactgctg

SEQ ID NO: 42957 - DNA, 25 bp, Artificial
  probe
  misc_feature (1)..(25): SEQ ID NO: 4690; WAN024A57_at; Start 31; Stop 55
ttgtttcttgaaatcaactgctgtt

SEQ ID NO: 42958 - DNA, 25 bp, Artificial
  probe
  misc_feature (1)..(25): SEQ ID NO: 4690; WAN024A57_at; Start 28; Stop 52
tttttgtttcttgaaatcaactgct

SEQ ID NO: 42959 - DNA, 25 bp, Artificial
  probe
  misc_feature (1)..(25): SEQ ID NO: 4690; WAN024A57_at; Start 27; Stop 51
ttttttgtttcttgaaatcaactgc

SEQ ID NO: 42960 - DNA, 25 bp, Artificial
  probe
  misc_feature (1)..(25): SEQ ID NO: 4690; WAN024A57_at; Start 26; Stop 50
cttttttgtttcttgaaatcaactg

SEQ ID NO: 42961 - DNA, 25 bp, Artificial
  probe
  misc_feature (1)..(25): SEQ ID NO: 4690; WAN024A57_at; Start 22; Stop 46
tgttcttttttgtttcttgaaatca

SEQ ID NO: 42962 - DNA, 25 bp, Artificial
  probe
  misc_feature (1)..(25): SEQ ID NO: 4504; WAN024A58_at; Start 26; Stop 50
agattctgaaaagtttggcaagtat

SEQ ID NO: 42963 - DNA, 25 bp, Artificial
  probe
  misc_feature (1)..(25): SEQ ID NO: 4504; WAN024A58_at; Start 17; Stop 41
tagtctatcagattctgaaaagttt

SEQ ID NO: 42964 - DNA, 25 bp, Artificial
  probe
  misc_feature (1)..(25): SEQ ID NO: 4504; WAN024A58_at; Start 14; Stop 38
tactagtctatcagattctgaaaag

SEQ ID NO: 42965 - DNA, 25 bp, Artificial
  probe
  misc_feature (1)..(25): SEQ ID NO: 4504; WAN024A58_at; Start 19; Stop 43
gtctatcagattctgaaaagtttgg

SEQ ID NO: 42966 - DNA, 25 bp, Artificial
  probe
  misc_feature (1)..(25): SEQ ID NO: 4504; WAN024A58_at; Start 22; Stop 46
tatcagattctgaaaagtttggcaa

SEQ ID NO: 42967 - DNA, 25 bp, Artificial
  probe
  misc_feature (1)..(25): SEQ ID NO: 4504; WAN024A58_at; Start 20; Stop 44
tctatcagattctgaaaagtttggc

SEQ ID NO: 42968 - DNA, 25 bp, Artificial
  probe
  misc_feature (1)..(25): SEQ ID NO: 4504; WAN024A58_at; Start 21; Stop 45
ctatcagattctgaaaagtttggca

SEQ ID NO: 42969 - DNA, 25 bp, Artificial
  probe
  misc_feature (1)..(25): SEQ ID NO: 4504; WAN024A58_at; Start 16; Stop 40
ctagtctatcagattctgaaaagtt

SEQ ID NO: 42970 - DNA, 25 bp, Artificial
  probe
  misc_feature (1)..(25): SEQ ID NO: 4504; WAN024A58_at; Start 25; Stop 49
cagattctgaaaagtttggcaagta

SEQ ID NO: 42971 - DNA, 25 bp, Artificial
  probe
  misc_feature (1)..(25): SEQ ID NO: 4504; WAN024A58_at; Start 28; Stop 52
attctgaaaagtttggcaagtattt

SEQ ID NO: 42972 - DNA, 25 bp, Artificial
  probe
  misc_feature (1)..(25): SEQ ID NO: 4504; WAN024A58_at; Start 13; Stop 37
atactagtctatcagattctgaaaa

SEQ ID NO: 42973 - DNA, 25 bp, Artificial
  probe
  misc_feature (1)..(25): SEQ ID NO: 4504; WAN024A58_at; Start 24; Stop 48
tcagattctgaaaagtttggcaagt

SEQ ID NO: 42974 - DNA, 25 bp, Artificial
  probe
  misc_feature (1)..(25): SEQ ID NO: 4504; WAN024A58_at; Start 18; Stop 42
agtctatcagattctgaaaagtttg

SEQ ID NO: 42975 - DNA, 25 bp, Artificial
  probe
  misc_feature (1)..(25): SEQ ID NO: 4504; WAN024A58_at; Start 27; Stop 51
gattctgaaaagtttggcaagtatt

SEQ ID NO: 42976 - DNA, 25 bp, Artificial
  probe
  misc_feature (1)..(25): SEQ ID NO: 4504; WAN024A58_at; Start 23; Stop 47
atcagattctgaaaagtttggcaag

SEQ ID NO: 42977 - DNA, 25 bp, Artificial
  probe
  misc_feature (1)..(25): SEQ ID NO: 4504; WAN024A58_at; Start 15; Stop 39
actagtctatcagattctgaaaagt

SEQ ID NO: 42978 - DNA, 25 bp, Artificial
  probe
  misc_feature (1)..(25): SEQ ID NO: 4504; WAN024A58_at; Start 30; Stop 54
tctgaaaagtttggcaagtatttta

SEQ ID NO: 42979 - DNA, 25 bp, Artificial
  probe
  misc_feature (1)..(25): SEQ ID NO: 4403; WAN024A59_at; Start 18; Stop 42
ttttcagaatctgatagactagtat

SEQ ID NO: 42980 - DNA, 25 bp, Artificial
  probe
  misc_feature (1)..(25): SEQ ID NO: 4403; WAN024A59_at; Start 14; Stop 38
aaacttttcagaatctgatagacta

SEQ ID NO: 42981 - DNA, 25 bp, Artificial
  probe
  misc_feature (1)..(25): SEQ ID NO: 4403; WAN024A59_at; Start 9; Stop 33
ttgccaaacttttcagaatctgata

SEQ ID NO: 42982 - DNA, 25 bp, Artificial
  probe
  misc_feature (1)..(25): SEQ ID NO: 4403; WAN024A59_at; Start 16; Stop 40
acttttcagaatctgatagactagt

SEQ ID NO: 42983 - DNA, 25 bp, Artificial
  probe
  misc_feature (1)..(25): SEQ ID NO: 4403; WAN024A59_at; Start 1; Stop 25
taaaatacttgccaaacttttcaga

SEQ ID NO: 42984 - DNA, 25 bp, Artificial
  probe
  misc_feature (1)..(25): SEQ ID NO: 4403; WAN024A59_at; Start 8; Stop 32
cttgccaaacttttcagaatctgat

SEQ ID NO: 42985 - DNA, 25 bp, Artificial
  probe
  misc_feature (1)..(25): SEQ ID NO: 4403; WAN024A59_at; Start 13; Stop 37
caaacttttcagaatctgatagact

SEQ ID NO: 42986 - DNA, 25 bp, Artificial
  probe
  misc_feature (1)..(25): SEQ ID NO: 4403; WAN024A59_at; Start 3; Stop 27
aaatacttgccaaacttttcagaat

SEQ ID NO: 42987 - DNA, 25 bp, Artificial
  probe
  misc_feature (1)..(25): SEQ ID NO: 4403; WAN024A59_at; Start 11; Stop 35
gccaaacttttcagaatctgataga

SEQ ID NO: 42988 - DNA, 25 bp, Artificial
  probe
  misc_feature (1)..(25): SEQ ID NO: 4403; WAN024A59_at; Start 17; Stop 41
cttttcagaatctgatagactagta

SEQ ID NO: 42989 - DNA, 25 bp, Artificial
  probe
  misc_feature (1)..(25): SEQ ID NO: 4403; WAN024A59_at; Start 4; Stop 28
aatacttgccaaacttttcagaatc

SEQ ID NO: 42990 - DNA, 25 bp, Artificial
  probe
  misc_feature (1)..(25): SEQ ID NO: 4403; WAN024A59_at; Start 7; Stop 31
acttgccaaacttttcagaatctga

SEQ ID NO: 42991 - DNA, 25 bp, Artificial
  probe
  misc_feature (1)..(25): SEQ ID NO: 4403; WAN024A59_at; Start 10; Stop 34
tgccaaacttttcagaatctgatag

SEQ ID NO: 42992 - DNA, 25 bp, Artificial
  probe
  misc_feature (1)..(25): SEQ ID NO: 4403; WAN024A59_at; Start 5; Stop 29
atacttgccaaacttttcagaatct

SEQ ID NO: 42993 - DNA, 25 bp, Artificial
  probe
  misc_feature (1)..(25): SEQ ID NO: 4403; WAN024A59_at; Start 15; Stop 39
aacttttcagaatctgatagactag

SEQ ID NO: 42994 - DNA, 25 bp, Artificial
  probe
  misc_feature (1)..(25): SEQ ID NO: 4403; WAN024A59_at; Start 6; Stop 30
tacttgccaaacttttcagaatctg

SEQ ID NO: 42995 - DNA, 25 bp, Artificial
  probe
  misc_feature (1)..(25): SEQ ID NO: 4403; WAN024A59_at; Start 12; Stop 36
ccaaacttttcagaatctgatagac

SEQ ID NO: 42996 - DNA, 25 bp, Artificial
  probe
  misc_feature (1)..(25): SEQ ID NO: 334; WAN024A5A_at; Start 8; Stop 32
agtgcgctgatgtaatcaatcagtg

SEQ ID NO: 42997 - DNA, 25 bp, Artificial
  probe
  misc_feature (1)..(25): SEQ ID NO: 334; WAN024A5A_at; Start 25; Stop 49
aatcagtgcatttttcttatcgaga

SEQ ID NO: 42998 - DNA, 25 bp, Artificial
  probe
  misc_feature (1)..(25): SEQ ID NO: 334; WAN024A5A_at; Start 28; Stop 52
cagtgcatttttcttatcgagagtt

SEQ ID NO: 42999 - DNA, 25 bp, Artificial
  probe
  misc_feature (1)..(25): SEQ ID NO: 334; WAN024A5A_at; Start 38; Stop 62
ttcttatcgagagttgggattttac

SEQ ID NO: 43000 - DNA, 25 bp, Artificial
  probe
  misc_feature (1)..(25): SEQ ID NO: 334; WAN024A5A_at; Start 33; Stop 57
catttttcttatcgagagttgggat

SEQ ID NO: 43001 - DNA, 25 bp, Artificial
  probe
  misc_feature (1)..(25): SEQ ID NO: 334; WAN024A5A_at; Start 46; Stop 70
gagagttgggattttactagcctaa

SEQ ID NO: 43002 - DNA, 25 bp, Artificial
  probe
  misc_feature (1)..(25): SEQ ID NO: 334; WAN024A5A_at; Start 91; Stop 115
taattcaaataaaggaggagactgt

SEQ ID NO: 43003 - DNA, 25 bp, Artificial
  probe
  misc_feature (1)..(25): SEQ ID NO: 334; WAN024A5A_at; Start 73; Stop 97
gatggctttttgatacaataattca

SEQ ID NO: 43004 - DNA, 25 bp, Artificial
  probe
  misc_feature (1)..(25): SEQ ID NO: 334; WAN024A5A_at; Start 52; Stop 76
tgggattttactagcctaattgatg

SEQ ID NO: 43005 - DNA, 25 bp, Artificial
  probe
  misc_feature (1)..(25): SEQ ID NO: 334; WAN024A5A_at; Start 50; Stop 74
gttgggattttactagcctaattga

SEQ ID NO: 43006 - DNA, 25 bp, Artificial
  probe
  misc_feature (1)..(25): SEQ ID NO: 334; WAN024A5A_at; Start 44; Stop 68
tcgagagttgggattttactagcct

SEQ ID NO: 43007 - DNA, 25 bp, Artificial
  probe
  misc_feature (1)..(25): SEQ ID NO: 334; WAN024A5A_at; Start 24; Stop 48
caatcagtgcatttttcttatcgag

SEQ ID NO: 43008 - DNA, 25 bp, Artificial
  probe
  misc_feature (1)..(25): SEQ ID NO: 334; WAN024A5A_at; Start 10; Stop 34
tgcgctgatgtaatcaatcagtgca

SEQ ID NO: 43009 - DNA, 25 bp, Artificial
  probe
  misc_feature (1)..(25): SEQ ID NO: 334; WAN024A5A_at; Start 27; Stop 51
tcagtgcatttttcttatcgagagt

SEQ ID NO: 43010 - DNA, 25 bp, Artificial
  probe
  misc_feature (1)..(25): SEQ ID NO: 334; WAN024A5A_at; Start 5; Stop 29
aaaagtgcgctgatgtaatcaatca

SEQ ID NO: 43011 - DNA, 25 bp, Artificial
  probe
  misc_feature (1)..(25): SEQ ID NO: 334; WAN024A5A_at; Start 2; Stop 26
cataaaagtgcgctgatgtaatcaa

SEQ ID NO: 43012 - DNA, 25 bp, Artificial
  probe
  misc_feature (1)..(25): SEQ ID NO: 334; WAN024A5A_at; Start 32; Stop 56
gcatttttcttatcgagagttggga

SEQ ID NO: 43013 - DNA, 25 bp, Artificial
  probe
  misc_feature (1)..(25): SEQ ID NO: 334; WAN024A5A_at; Start 66; Stop 90
cctaattgatggctttttgatacaa

SEQ ID NO: 43014 - DNA, 25 bp, Artificial
  probe
  misc_feature (1)..(25): SEQ ID NO: 334; WAN024A5A_at; Start 45; Stop 69
cgagagttgggattttactagccta

SEQ ID NO: 43015 - DNA, 25 bp, Artificial
  probe
  misc_feature (1)..(25): SEQ ID NO: 334; WAN024A5A_at; Start 12; Stop 36
cgctgatgtaatcaatcagtgcatt

SEQ ID NO: 43016 - DNA, 25 bp, Artificial
  probe
  misc_feature (1)..(25): SEQ ID NO: 334; WAN024A5A_at; Start 53; Stop 77
gggattttactagcctaattgatgg

SEQ ID NO: 43017 - DNA, 25 bp, Artificial
  probe
  misc_feature (1)..(25): SEQ ID NO: 334; WAN024A5A_at; Start 84; Stop 108
gatacaataattcaaataaaggagg

SEQ ID NO: 43018 - DNA, 25 bp, Artificial
  probe
  misc_feature (1)..(25): SEQ ID NO: 334; WAN024A5A_at; Start 60; Stop 84
tactagcctaattgatggctttttg

SEQ ID NO: 43019 - DNA, 25 bp, Artificial
  probe
  misc_feature (1)..(25): SEQ ID NO: 334; WAN024A5A_at; Start 6; Stop 30
aaagtgcgctgatgtaatcaatcag

SEQ ID NO: 43020 - DNA, 25 bp, Artificial
  probe
  misc_feature (1)..(25): SEQ ID NO: 334; WAN024A5A_at; Start 89; Stop 113
aataattcaaataaaggaggagact

SEQ ID NO: 43021 - DNA, 25 bp, Artificial
  probe
  misc_feature (1)..(25): SEQ ID NO: 334; WAN024A5A_at; Start 26; Stop 50
atcagtgcatttttcttatcgagag

SEQ ID NO: 43022 - DNA, 25 bp, Artificial
  probe
  misc_feature (1)..(25): SEQ ID NO: 334; WAN024A5A_at; Start 4; Stop 28
taaaagtgcgctgatgtaatcaatc

SEQ ID NO: 43023 - DNA, 25 bp, Artificial
  probe
  misc_feature (1)..(25): SEQ ID NO: 334; WAN024A5A_at; Start 55; Stop 79
gattttactagcctaattgatggct

SEQ ID NO: 43024 - DNA, 25 bp, Artificial
  probe
  misc_feature (1)..(25): SEQ ID NO: 334; WAN024A5A_at; Start 39; Stop 63
tcttatcgagagttgggattttact

SEQ ID NO: 43025 - DNA, 25 bp, Artificial
  probe
  misc_feature (1)..(25): SEQ ID NO: 334; WAN024A5A_at; Start 47; Stop 71
agagttgggattttactagcctaat

SEQ ID NO: 43026 - DNA, 25 bp, Artificial
  probe
  misc_feature (1)..(25): SEQ ID NO: 334; WAN024A5A_at; Start 86; Stop 110
tacaataattcaaataaaggaggag

SEQ ID NO: 43027 - DNA, 25 bp, Artificial
  probe
  misc_feature (1)..(25): SEQ ID NO: 334; WAN024A5A_at; Start 16; Stop 40
gatgtaatcaatcagtgcatttttc

SEQ ID NO: 43028 - DNA, 25 bp, Artificial
  probe
  misc_feature (1)..(25): SEQ ID NO: 334; WAN024A5A_at; Start 31; Stop 55
tgcatttttcttatcgagagttggg

SEQ ID NO: 43029 - DNA, 25 bp, Artificial
  probe
  misc_feature (1)..(25): SEQ ID NO: 334; WAN024A5A_at; Start 43; Stop 67
atcgagagttgggattttactagcc

SEQ ID NO: 43030 - DNA, 25 bp, Artificial
  probe
  misc_feature (1)..(25): SEQ ID NO: 333; WAN024A5B_at; Start 64; Stop 88
aactctcgataagaaaaatgcactg

SEQ ID NO: 43031 - DNA, 25 bp, Artificial
  probe
  misc_feature (1)..(25): SEQ ID NO: 333; WAN024A5B_at; Start 47; Stop 71
taggctagtaaaatcccaactctcg

SEQ ID NO: 43032 - DNA, 25 bp, Artificial
  probe
  misc_feature (1)..(25): SEQ ID NO: 333; WAN024A5B_at; Start 68; Stop 92
ctcgataagaaaaatgcactgattg

SEQ ID NO: 43033 - DNA, 25 bp, Artificial
  probe
  misc_feature (1)..(25): SEQ ID NO: 333; WAN024A5B_at; Start 60; Stop 84
tcccaactctcgataagaaaaatgc

SEQ ID NO: 43034 - DNA, 25 bp, Artificial
  probe
  misc_feature (1)..(25): SEQ ID NO: 333; WAN024A5B_at; Start 66; Stop 90
ctctcgataagaaaaatgcactgat

SEQ ID NO: 43035 - DNA, 25 bp, Artificial
  probe
  misc_feature (1)..(25): SEQ ID NO: 333; WAN024A5B_at; Start 87; Stop 111
tgattgattacatcagcgcactttt

SEQ ID NO: 43036 - DNA, 25 bp, Artificial
  probe
  misc_feature (1)..(25): SEQ ID NO: 333; WAN024A5B_at; Start 20; Stop 44
gaattattgtatcaaaaagccatca

SEQ ID NO: 43037 - DNA, 25 bp, Artificial
  probe
  misc_feature (1)..(25): SEQ ID NO: 333; WAN024A5B_at; Start 5; Stop 29
tctcctcctttatttgaattattgt

SEQ ID NO: 43038 - DNA, 25 bp, Artificial
  probe
  misc_feature (1)..(25): SEQ ID NO: 333; WAN024A5B_at; Start 48; Stop 72
aggctagtaaaatcccaactctcga

SEQ ID NO: 43039 - DNA, 25 bp, Artificial
  probe
  misc_feature (1)..(25): SEQ ID NO: 333; WAN024A5B_at; Start 55; Stop 79
taaaatcccaactctcgataagaaa

SEQ ID NO: 43040 - DNA, 25 bp, Artificial
  probe
  misc_feature (1)..(25): SEQ ID NO: 333; WAN024A5B_at; Start 84; Stop 108
cactgattgattacatcagcgcact

SEQ ID NO: 43041 - DNA, 25 bp, Artificial
  probe
  misc_feature (1)..(25): SEQ ID NO: 333; WAN024A5B_at; Start 19; Stop 43
tgaattattgtatcaaaaagccatc

SEQ ID NO: 43042 - DNA, 25 bp, Artificial
  probe
  misc_feature (1)..(25): SEQ ID NO: 333; WAN024A5B_at; Start 67; Stop 91
tctcgataagaaaaatgcactgatt

SEQ ID NO: 43043 - DNA, 25 bp, Artificial
  probe
  misc_feature (1)..(25): SEQ ID NO: 333; WAN024A5B_at; Start 28; Stop 52
gtatcaaaaagccatcaattaggct

SEQ ID NO: 43044 - DNA, 25 bp, Artificial
  probe
  misc_feature (1)..(25): SEQ ID NO: 333; WAN024A5B_at; Start 1; Stop 25
acagtctcctcctttatttgaatta

SEQ ID NO: 43045 - DNA, 25 bp, Artificial
  probe
  misc_feature (1)..(25): SEQ ID NO: 333; WAN024A5B_at; Start 43; Stop 67
caattaggctagtaaaatcccaact

SEQ ID NO: 43046 - DNA, 25 bp, Artificial
  probe
  misc_feature (1)..(25): SEQ ID NO: 333; WAN024A5B_at; Start 90; Stop 114
ttgattacatcagcgcacttttatg

SEQ ID NO: 43047 - DNA, 25 bp, Artificial
  probe
  misc_feature (1)..(25): SEQ ID NO: 333; WAN024A5B_at; Start 73; Stop 97
taagaaaaatgcactgattgattac

SEQ ID NO: 43048 - DNA, 25 bp, Artificial
  probe
  misc_feature (1)..(25): SEQ ID NO: 333; WAN024A5B_at; Start 46; Stop 70
ttaggctagtaaaatcccaactctc

SEQ ID NO: 43049 - DNA, 25 bp, Artificial
  probe
  misc_feature (1)..(25): SEQ ID NO: 333; WAN024A5B_at; Start 63; Stop 87
caactctcgataagaaaaatgcact

SEQ ID NO: 43050 - DNA, 25 bp, Artificial
  probe
  misc_feature (1)..(25): SEQ ID NO: 333; WAN024A5B_at; Start 40; Stop 64
catcaattaggctagtaaaatccca

SEQ ID NO: 43051 - DNA, 25 bp, Artificial
  probe
  misc_feature (1)..(25): SEQ ID NO: 333; WAN024A5B_at; Start 62; Stop 86
ccaactctcgataagaaaaatgcac

SEQ ID NO: 43052 - DNA, 25 bp, Artificial
  probe
  misc_feature (1)..(25): SEQ ID NO: 333; WAN024A5B_at; Start 32; Stop 56
caaaaagccatcaattaggctagta

SEQ ID NO: 43053 - DNA, 25 bp, Artificial
  probe
  misc_feature (1)..(25): SEQ ID NO: 333; WAN024A5B_at; Start 39; Stop 63
ccatcaattaggctagtaaaatccc

SEQ ID NO: 43054 - DNA, 25 bp, Artificial
  probe
  misc_feature (1)..(25): SEQ ID NO: 333; WAN024A5B_at; Start 80; Stop 104
aatgcactgattgattacatcagcg

SEQ ID NO: 43055 - DNA, 25 bp, Artificial
  probe
  misc_feature (1)..(25): SEQ ID NO: 333; WAN024A5B_at; Start 70; Stop 94
cgataagaaaaatgcactgattgat

SEQ ID NO: 43056 - DNA, 25 bp, Artificial
  probe
  misc_feature (1)..(25): SEQ ID NO: 333; WAN024A5B_at; Start 31; Stop 55
tcaaaaagccatcaattaggctagt

SEQ ID NO: 43057 - DNA, 25 bp, Artificial
  probe
  misc_feature (1)..(25): SEQ ID NO: 333; WAN024A5B_at; Start 52; Stop 76
tagtaaaatcccaactctcgataag

SEQ ID NO: 43058 - DNA, 25 bp, Artificial
  probe
  misc_feature (1)..(25): SEQ ID NO: 333; WAN024A5B_at; Start 82; Stop 106
tgcactgattgattacatcagcgca

SEQ ID NO: 43059 - DNA, 25 bp, Artificial
  probe
  misc_feature (1)..(25): SEQ ID NO: 333; WAN024A5B_at; Start 54; Stop 78
gtaaaatcccaactctcgataagaa

SEQ ID NO: 43060 - DNA, 25 bp, Artificial
  probe
  misc_feature (1)..(25): SEQ ID NO: 333; WAN024A5B_at; Start 26; Stop 50
ttgtatcaaaaagccatcaattagg

SEQ ID NO: 43061 - DNA, 25 bp, Artificial
  probe
  misc_feature (1)..(25): SEQ ID NO: 333; WAN024A5B_at; Start 88; Stop 112
gattgattacatcagcgcactttta

SEQ ID NO: 43062 - DNA, 25 bp, Artificial
  probe
  misc_feature (1)..(25): SEQ ID NO: 333; WAN024A5B_at; Start 49; Stop 73
ggctagtaaaatcccaactctcgat

SEQ ID NO: 43063 - DNA, 25 bp, Artificial
  probe
  misc_feature (1)..(25): SEQ ID NO: 333; WAN024A5B_at; Start 42; Stop 66
tcaattaggctagtaaaatcccaac

SEQ ID NO: 43064 - DNA, 25 bp, Artificial
  probe
  misc_feature (1)..(25): SEQ ID NO: 3169; WAN024A5C_at; Start 66; Stop 90
cagtttatccgctgaggaagattcc

SEQ ID NO: 43065 - DNA, 25 bp, Artificial
  probe
  misc_feature (1)..(25): SEQ ID NO: 3169; WAN024A5C_at; Start 69; Stop 93
tttatccgctgaggaagattcctca

SEQ ID NO: 43066 - DNA, 25 bp, Artificial
  probe
  misc_feature (1)..(25): SEQ ID NO: 3169; WAN024A5C_at; Start 60; Stop 84
aaaatacagtttatccgctgaggaa

SEQ ID NO: 43067 - DNA, 25 bp, Artificial
  probe
  misc_feature (1)..(25): SEQ ID NO: 3169; WAN024A5C_at; Start 22; Stop 46
aatttggtaaactatatcttgtgtg

SEQ ID NO: 43068 - DNA, 25 bp, Artificial
  probe
  misc_feature (1)..(25): SEQ ID NO: 3169; WAN024A5C_at; Start 38; Stop 62
tcttgtgtgtaatggacgcacaaaa

SEQ ID NO: 43069 - DNA, 25 bp, Artificial
  probe
  misc_feature (1)..(25): SEQ ID NO: 3169; WAN024A5C_at; Start 34; Stop 58
tatatcttgtgtgtaatggacgcac

SEQ ID NO: 43070 - DNA, 25 bp, Artificial
  probe
  misc_feature (1)..(25): SEQ ID NO: 3169; WAN024A5C_at; Start 27; Stop 51
ggtaaactatatcttgtgtgtaatg

SEQ ID NO: 43071 - DNA, 25 bp, Artificial
  probe
  misc_feature (1)..(25): SEQ ID NO: 3169; WAN024A5C_at; Start 81; Stop 105
ggaagattcctcaagattgacaaag

SEQ ID NO: 43072 - DNA, 25 bp, Artificial
  probe
  misc_feature (1)..(25): SEQ ID NO: 3169; WAN024A5C_at; Start 58; Stop 82
caaaaatacagtttatccgctgagg

SEQ ID NO: 43073 - DNA, 25 bp, Artificial
  probe
  misc_feature (1)..(25): SEQ ID NO: 3169; WAN024A5C_at; Start 36; Stop 60
tatcttgtgtgtaatggacgcacaa

SEQ ID NO: 43074 - DNA, 25 bp, Artificial
  probe
  misc_feature (1)..(25): SEQ ID NO: 3169; WAN024A5C_at; Start 89; Stop 113
cctcaagattgacaaagataggaga

SEQ ID NO: 43075 - DNA, 25 bp, Artificial
  probe
  misc_feature (1)..(25): SEQ ID NO: 3169; WAN024A5C_at; Start 54; Stop 78
cgcacaaaaatacagtttatccgct

SEQ ID NO: 43076 - DNA, 25 bp, Artificial
  probe
  misc_feature (1)..(25): SEQ ID NO: 3169; WAN024A5C_at; Start 41; Stop 65
tgtgtgtaatggacgcacaaaaata

SEQ ID NO: 43077 - DNA, 25 bp, Artificial
  probe
  misc_feature (1)..(25): SEQ ID NO: 3169; WAN024A5C_at; Start 45; Stop 69
tgtaatggacgcacaaaaatacagt

SEQ ID NO: 43078 - DNA, 25 bp, Artificial
  probe
  misc_feature (1)..(25): SEQ ID NO: 3169; WAN024A5C_at; Start 68; Stop 92
gtttatccgctgaggaagattcctc

SEQ ID NO: 43079 - DNA, 25 bp, Artificial
  probe
  misc_feature (1)..(25): SEQ ID NO: 3169; WAN024A5C_at; Start 73; Stop 97
tccgctgaggaagattcctcaagat

SEQ ID NO: 43080 - DNA, 25 bp, Artificial
  probe
  misc_feature (1)..(25): SEQ ID NO: 3169; WAN024A5C_at; Start 55; Stop 79
gcacaaaaatacagtttatccgctg

SEQ ID NO: 43081 - DNA, 25 bp, Artificial
  probe
  misc_feature (1)..(25): SEQ ID NO: 3169; WAN024A5C_at; Start 79; Stop 103
gaggaagattcctcaagattgacaa

SEQ ID NO: 43082 - DNA, 25 bp, Artificial
  probe
  misc_feature (1)..(25): SEQ ID NO: 3169; WAN024A5C_at; Start 20; Stop 44
gaaatttggtaaactatatcttgtg

SEQ ID NO: 43083 - DNA, 25 bp, Artificial
  probe
  misc_feature (1)..(25): SEQ ID NO: 3169; WAN024A5C_at; Start 47; Stop 71
taatggacgcacaaaaatacagttt

SEQ ID NO: 43084 - DNA, 25 bp, Artificial
  probe
  misc_feature (1)..(25): SEQ ID NO: 3169; WAN024A5C_at; Start 88; Stop 112
tcctcaagattgacaaagataggag

SEQ ID NO: 43085 - DNA, 25 bp, Artificial
  probe
  misc_feature (1)..(25): SEQ ID NO: 3169; WAN024A5C_at; Start 32; Stop 56
actatatcttgtgtgtaatggacgc

SEQ ID NO: 43086 - DNA, 25 bp, Artificial
  probe
  misc_feature (1)..(25): SEQ ID NO: 3169; WAN024A5C_at; Start 92; Stop 116
caagattgacaaagataggagaata

SEQ ID NO: 43087 - DNA, 25 bp, Artificial
  probe
  misc_feature (1)..(25): SEQ ID NO: 3169; WAN024A5C_at; Start 33; Stop 57
ctatatcttgtgtgtaatggacgca

SEQ ID NO: 43088 - DNA, 25 bp, Artificial
  probe
  misc_feature (1)..(25): SEQ ID NO: 3169; WAN024A5C_at; Start 50; Stop 74
tggacgcacaaaaatacagtttatc

SEQ ID NO: 43089 - DNA, 25 bp, Artificial
  probe
  misc_feature (1)..(25): SEQ ID NO: 3169; WAN024A5C_at; Start 44; Stop 68
gtgtaatggacgcacaaaaatacag

SEQ ID NO: 43090 - DNA, 25 bp, Artificial
  probe
  misc_feature (1)..(25): SEQ ID NO: 3169; WAN024A5C_at; Start 71; Stop 95
tatccgctgaggaagattcctcaag

SEQ ID NO: 43091 - DNA, 25 bp, Artificial
  probe
  misc_feature (1)..(25): SEQ ID NO: 3169; WAN024A5C_at; Start 82; Stop 106
gaagattcctcaagattgacaaaga

SEQ ID NO: 43092 - DNA, 25 bp, Artificial
  probe
  misc_feature (1)..(25): SEQ ID NO: 3169; WAN024A5C_at; Start 85; Stop 109
gattcctcaagattgacaaagatag

SEQ ID NO: 43093 - DNA, 25 bp, Artificial
  probe
  misc_feature (1)..(25): SEQ ID NO: 3169; WAN024A5C_at; Start 94; Stop 118
agattgacaaagataggagaataaa

SEQ ID NO: 43094 - DNA, 25 bp, Artificial
  probe
  misc_feature (1)..(25): SEQ ID NO: 3169; WAN024A5C_at; Start 62; Stop 86
aatacagtttatccgctgaggaaga

SEQ ID NO: 43095 - DNA, 25 bp, Artificial
  probe
  misc_feature (1)..(25): SEQ ID NO: 3169; WAN024A5C_at; Start 30; Stop 54
aaactatatcttgtgtgtaatggac

SEQ ID NO: 43096 - DNA, 25 bp, Artificial
  probe
  misc_feature (1)..(25): SEQ ID NO: 3169; WAN024A5C_at; Start 61; Stop 85
aaatacagtttatccgctgaggaag

SEQ ID NO: 43097 - DNA, 25 bp, Artificial
  probe
  misc_feature (1)..(25): SEQ ID NO: 3169; WAN024A5C_at; Start 51; Stop 75
ggacgcacaaaaatacagtttatcc

SEQ ID NO: 43098 - DNA, 25 bp, Artificial
  probe
  misc_feature (1)..(25): SEQ ID NO: 5899; WAN024A5D_at; Start 49; Stop 73
aactgtatttttgtgcgtccattac

SEQ ID NO: 43099 - DNA, 25 bp, Artificial
  probe
  misc_feature (1)..(25): SEQ ID NO: 5899; WAN024A5D_at; Start 6; Stop 30
tctcctatctttgtcaatcttgagg

SEQ ID NO: 43100 - DNA, 25 bp, Artificial
  probe
  misc_feature (1)..(25): SEQ ID NO: 5899; WAN024A5D_at; Start 3; Stop 27
tattctcctatctttgtcaatcttg

SEQ ID NO: 43101 - DNA, 25 bp, Artificial
  probe
  misc_feature (1)..(25): SEQ ID NO: 5899; WAN024A5D_at; Start 64; Stop 88
cgtccattacacacaagatatagtt

SEQ ID NO: 43102 - DNA, 25 bp, Artificial
  probe
  misc_feature (1)..(25): SEQ ID NO: 5899; WAN024A5D_at; Start 62; Stop 86
tgcgtccattacacacaagatatag

SEQ ID NO: 43103 - DNA, 25 bp, Artificial
  probe
  misc_feature (1)..(25): SEQ ID NO: 5899; WAN024A5D_at; Start 47; Stop 71
taaactgtatttttgtgcgtccatt

SEQ ID NO: 43104 - DNA, 25 bp, Artificial
  probe
  misc_feature (1)..(25): SEQ ID NO: 5899; WAN024A5D_at; Start 34; Stop 58
cttcctcagcggataaactgtattt

SEQ ID NO: 43105 - DNA, 25 bp, Artificial
  probe
  misc_feature (1)..(25): SEQ ID NO: 5899; WAN024A5D_at; Start 36; Stop 60
tcctcagcggataaactgtattttt

SEQ ID NO: 43106 - DNA, 25 bp, Artificial
  probe
  misc_feature (1)..(25): SEQ ID NO: 5899; WAN024A5D_at; Start 9; Stop 33
cctatctttgtcaatcttgaggaat

SEQ ID NO: 43107 - DNA, 25 bp, Artificial
  probe
  misc_feature (1)..(25): SEQ ID NO: 5899; WAN024A5D_at; Start 14; Stop 38
ctttgtcaatcttgaggaatcttcc

SEQ ID NO: 43108 - DNA, 25 bp, Artificial
  probe
  misc_feature (1)..(25): SEQ ID NO: 5899; WAN024A5D_at; Start 60; Stop 84
tgtgcgtccattacacacaagatat

SEQ ID NO: 43109 - DNA, 25 bp, Artificial
  probe
  misc_feature (1)..(25): SEQ ID NO: 5899; WAN024A5D_at; Start 27; Stop 51
gaggaatcttcctcagcggataaac

SEQ ID NO: 43110 - DNA, 25 bp, Artificial
  probe
  misc_feature (1)..(25): SEQ ID NO: 5899; WAN024A5D_at; Start 57; Stop 81
ttttgtgcgtccattacacacaaga

SEQ ID NO: 43111 - DNA, 25 bp, Artificial
  probe
  misc_feature (1)..(25): SEQ ID NO: 5899; WAN024A5D_at; Start 21; Stop 45
aatcttgaggaatcttcctcagcgg

SEQ ID NO: 43112 - DNA, 25 bp, Artificial
  probe
  misc_feature (1)..(25): SEQ ID NO: 5899; WAN024A5D_at; Start 29; Stop 53
ggaatcttcctcagcggataaactg

SEQ ID NO: 43113 - DNA, 25 bp, Artificial
  probe
  misc_feature (1)..(25): SEQ ID NO: 5899; WAN024A5D_at; Start 40; Stop 64
cagcggataaactgtatttttgtgc

SEQ ID NO: 43114 - DNA, 25 bp, Artificial
  probe
  misc_feature (1)..(25): SEQ ID NO: 5899; WAN024A5D_at; Start 56; Stop 80
tttttgtgcgtccattacacacaag

SEQ ID NO: 43115 - DNA, 25 bp, Artificial
  probe
  misc_feature (1)..(25): SEQ ID NO: 5899; WAN024A5D_at; Start 68; Stop 92
cattacacacaagatatagtttacc

SEQ ID NO: 43116 - DNA, 25 bp, Artificial
  probe
  misc_feature (1)..(25): SEQ ID NO: 5899; WAN024A5D_at; Start 51; Stop 75
ctgtatttttgtgcgtccattacac

SEQ ID NO: 43117 - DNA, 25 bp, Artificial
  probe
  misc_feature (1)..(25): SEQ ID NO: 5899; WAN024A5D_at; Start 54; Stop 78
tatttttgtgcgtccattacacaca

SEQ ID NO: 43118 - DNA, 25 bp, Artificial
  probe
  misc_feature (1)..(25): SEQ ID NO: 5899; WAN024A5D_at; Start 71; Stop 95
tacacacaagatatagtttaccaaa

SEQ ID NO: 43119 - DNA, 25 bp, Artificial
  probe
  misc_feature (1)..(25): SEQ ID NO: 5899; WAN024A5D_at; Start 37; Stop 61
cctcagcggataaactgtatttttg

SEQ ID NO: 43120 - DNA, 25 bp, Artificial
  probe
  misc_feature (1)..(25): SEQ ID NO: 5899; WAN024A5D_at; Start 26; Stop 50
tgaggaatcttcctcagcggataaa

SEQ ID NO: 43121 - DNA, 25 bp, Artificial
  probe
  misc_feature (1)..(25): SEQ ID NO: 5899; WAN024A5D_at; Start 45; Stop 69
gataaactgtatttttgtgcgtcca

SEQ ID NO: 43122 - DNA, 25 bp, Artificial
  probe
  misc_feature (1)..(25): SEQ ID NO: 5899; WAN024A5D_at; Start 17; Stop 41
tgtcaatcttgaggaatcttcctca

SEQ ID NO: 43123 - DNA, 25 bp, Artificial
  probe
  misc_feature (1)..(25): SEQ ID NO: 5899; WAN024A5D_at; Start 11; Stop 35
tatctttgtcaatcttgaggaatct

SEQ ID NO: 43124 - DNA, 25 bp, Artificial
  probe
  misc_feature (1)..(25): SEQ ID NO: 5899; WAN024A5D_at; Start 23; Stop 47
tcttgaggaatcttcctcagcggat

SEQ ID NO: 43125 - DNA, 25 bp, Artificial
  probe
  misc_feature (1)..(25): SEQ ID NO: 5899; WAN024A5D_at; Start 30; Stop 54
gaatcttcctcagcggataaactgt

SEQ ID NO: 43126 - DNA, 25 bp, Artificial
  probe
  misc_feature (1)..(25): SEQ ID NO: 5899; WAN024A5D_at; Start 63; Stop 87
gcgtccattacacacaagatatagt

SEQ ID NO: 43127 - DNA, 25 bp, Artificial
  probe
  misc_feature (1)..(25): SEQ ID NO: 5899; WAN024A5D_at; Start 16; Stop 40
ttgtcaatcttgaggaatcttcctc

SEQ ID NO: 43128 - DNA, 25 bp, Artificial
  probe
  misc_feature (1)..(25): SEQ ID NO: 5899; WAN024A5D_at; Start 73; Stop 97
cacacaagatatagtttaccaaatt

SEQ ID NO: 43129 - DNA, 25 bp, Artificial
  probe
  misc_feature (1)..(25): SEQ ID NO: 5899; WAN024A5D_at; Start 42; Stop 66
gcggataaactgtatttttgtgcgt

SEQ ID NO: 43130 - DNA, 25 bp, Artificial
  probe
  misc_feature (1)..(25): SEQ ID NO: 5899; WAN024A5D_at; Start 33; Stop 57
tcttcctcagcggataaactgtatt

SEQ ID NO: 43131 - DNA, 25 bp, Artificial
  probe
  misc_feature (1)..(25): SEQ ID NO: 5899; WAN024A5D_at; Start 65; Stop 89
gtccattacacacaagatatagttt

SEQ ID NO: 43132 - DNA, 25 bp, Artificial
  probe
  misc_feature (1)..(25): SEQ ID NO: 3569; WAN024A5E_at; Start 67; Stop 91
cagtatcaaggttttagaatatctg

SEQ ID NO: 43133 - DNA, 25 bp, Artificial
  probe
  misc_feature (1)..(25): SEQ ID NO: 3569; WAN024A5E_at; Start 12; Stop 36
gatgcaaatctcatttgatgagaaa

SEQ ID NO: 43134 - DNA, 25 bp, Artificial
  probe
  misc_feature (1)..(25): SEQ ID NO: 3569; WAN024A5E_at; Start 159; Stop 183
ctcagctgtctgagtggattaggtg

SEQ ID NO: 43135 - DNA, 25 bp, Artificial
  probe
  misc_feature (1)..(25): SEQ ID NO: 3569; WAN024A5E_at; Start 63; Stop 87
cgtacagtatcaaggttttagaata

SEQ ID NO: 43136 - DNA, 25 bp, Artificial
  probe
  misc_feature (1)..(25): SEQ ID NO: 3569; WAN024A5E_at; Start 168; Stop 192
ctgagtggattaggtgtatttagac

SEQ ID NO: 43137 - DNA, 25 bp, Artificial
  probe
  misc_feature (1)..(25): SEQ ID NO: 3569; WAN024A5E_at; Start 73; Stop 97
caaggttttagaatatctgatatta

SEQ ID NO: 43138 - DNA, 25 bp, Artificial
  probe
  misc_feature (1)..(25): SEQ ID NO: 3569; WAN024A5E_at; Start 121; Stop 145
ttgttaagacacttttattatggta

SEQ ID NO: 43139 - DNA, 25 bp, Artificial
  probe
  misc_feature (1)..(25): SEQ ID NO: 3569; WAN024A5E_at; Start 139; Stop 163
tatggtatacgaaaaatccactcag

SEQ ID NO: 43140 - DNA, 25 bp, Artificial
  probe
  misc_feature (1)..(25): SEQ ID NO: 3569; WAN024A5E_at; Start 146; Stop 170
tacgaaaaatccactcagctgtctg

SEQ ID NO: 43141 - DNA, 25 bp, Artificial
  probe
  misc_feature (1)..(25): SEQ ID NO: 3569; WAN024A5E_at; Start 85; Stop 109
atatctgatattatacgttttttga

SEQ ID NO: 43142 - DNA, 25 bp, Artificial
  probe
  misc_feature (1)..(25): SEQ ID NO: 3569; WAN024A5E_at; Start 142; Stop 166
ggtatacgaaaaatccactcagctg

SEQ ID NO: 43143 - DNA, 25 bp, Artificial
  probe
  misc_feature (1)..(25): SEQ ID NO: 3569; WAN024A5E_at; Start 15; Stop 39
gcaaatctcatttgatgagaaaata

SEQ ID NO: 43144 - DNA, 25 bp, Artificial
  probe
  misc_feature (1)..(25): SEQ ID NO: 3569; WAN024A5E_at; Start 170; Stop 194
gagtggattaggtgtatttagactc

SEQ ID NO: 43145 - DNA, 25 bp, Artificial
  probe
  misc_feature (1)..(25): SEQ ID NO: 3569; WAN024A5E_at; Start 163; Stop 187
gctgtctgagtggattaggtgtatt

SEQ ID NO: 43146 - DNA, 25 bp, Artificial
  probe
  misc_feature (1)..(25): SEQ ID NO: 3569; WAN024A5E_at; Start 21; Stop 45
ctcatttgatgagaaaataaagtaa

SEQ ID NO: 43147 - DNA, 25 bp, Artificial
  probe
  misc_feature (1)..(25): SEQ ID NO: 3569; WAN024A5E_at; Start 53; Stop 77
tatgataaaacgtacagtatcaagg

SEQ ID NO: 43148 - DNA, 25 bp, Artificial
  probe
  misc_feature (1)..(25): SEQ ID NO: 3569; WAN024A5E_at; Start 23; Stop 47
catttgatgagaaaataaagtaaaa

SEQ ID NO: 43149 - DNA, 25 bp, Artificial
  probe
  misc_feature (1)..(25): SEQ ID NO: 3569; WAN024A5E_at; Start 151; Stop 175
aaaatccactcagctgtctgagtgg

SEQ ID NO: 43150 - DNA, 25 bp, Artificial
  probe
  misc_feature (1)..(25): SEQ ID NO: 3569; WAN024A5E_at; Start 149; Stop 173
gaaaaatccactcagctgtctgagt

SEQ ID NO: 43151 - DNA, 25 bp, Artificial
  probe
  misc_feature (1)..(25): SEQ ID NO: 3569; WAN024A5E_at; Start 141; Stop 165
tggtatacgaaaaatccactcagct

SEQ ID NO: 43152 - DNA, 25 bp, Artificial
  probe
  misc_feature (1)..(25): SEQ ID NO: 3569; WAN024A5E_at; Start 55; Stop 79
tgataaaacgtacagtatcaaggtt

SEQ ID NO: 43153 - DNA, 25 bp, Artificial
  probe
  misc_feature (1)..(25): SEQ ID NO: 3569; WAN024A5E_at; Start 49; Stop 73
tttctatgataaaacgtacagtatc

SEQ ID NO: 43154 - DNA, 25 bp, Artificial
  probe
  misc_feature (1)..(25): SEQ ID NO: 3569; WAN024A5E_at; Start 161; Stop 185
cagctgtctgagtggattaggtgta

SEQ ID NO: 43155 - DNA, 25 bp, Artificial
  probe
  misc_feature (1)..(25): SEQ ID NO: 3569; WAN024A5E_at; Start 45; Stop 69
aaaatttctatgataaaacgtacag

SEQ ID NO: 43156 - DNA, 25 bp, Artificial
  probe
  misc_feature (1)..(25): SEQ ID NO: 3569; WAN024A5E_at; Start 144; Stop 168
tatacgaaaaatccactcagctgtc

SEQ ID NO: 43157 - DNA, 25 bp, Artificial
  probe
  misc_feature (1)..(25): SEQ ID NO: 3569; WAN024A5E_at; Start 1; Stop 25
gacaagagattgatgcaaatctcat

SEQ ID NO: 43158 - DNA, 25 bp, Artificial
  probe
  misc_feature (1)..(25): SEQ ID NO: 3569; WAN024A5E_at; Start 157; Stop 181
cactcagctgtctgagtggattagg

SEQ ID NO: 43159 - DNA, 25 bp, Artificial
  probe
  misc_feature (1)..(25): SEQ ID NO: 3569; WAN024A5E_at; Start 65; Stop 89
tacagtatcaaggttttagaatatc

SEQ ID NO: 43160 - DNA, 25 bp, Artificial
  probe
  misc_feature (1)..(25): SEQ ID NO: 3569; WAN024A5E_at; Start 148; Stop 172
cgaaaaatccactcagctgtctgag

SEQ ID NO: 43161 - DNA, 25 bp, Artificial
  probe
  misc_feature (1)..(25): SEQ ID NO: 3569; WAN024A5E_at; Start 8; Stop 32
gattgatgcaaatctcatttgatga

SEQ ID NO: 43162 - DNA, 25 bp, Artificial
  probe
  misc_feature (1)..(25): SEQ ID NO: 3569; WAN024A5E_at; Start 147; Stop 171
acgaaaaatccactcagctgtctga

SEQ ID NO: 43163 - DNA, 25 bp, Artificial
  probe
  misc_feature (1)..(25): SEQ ID NO: 3569; WAN024A5E_at; Start 160; Stop 184
tcagctgtctgagtggattaggtgt

SEQ ID NO: 43164 - DNA, 25 bp, Artificial
  probe
  misc_feature (1)..(25): SEQ ID NO: 3569; WAN024A5E_at; Start 143; Stop 167
gtatacgaaaaatccactcagctgt

SEQ ID NO: 43165 - DNA, 25 bp, Artificial
  probe
  misc_feature (1)..(25): SEQ ID NO: 3569; WAN024A5E_at; Start 136; Stop 160
tattatggtatacgaaaaatccact

SEQ ID NO: 43166 - DNA, 25 bp, Artificial
  probe
  misc_feature (1)..(25): SEQ ID NO: 3611; WAN024A5F_at; Start 36; Stop 60
gtggatttttcgtataccataataa

SEQ ID NO: 43167 - DNA, 25 bp, Artificial
  probe
  misc_feature (1)..(25): SEQ ID NO: 3611; WAN024A5F_at; Start 50; Stop 74
taccataataaaagtgtcttaacaa

SEQ ID NO: 43168 - DNA, 25 bp, Artificial
  probe
  misc_feature (1)..(25): SEQ ID NO: 3611; WAN024A5F_at; Start 98; Stop 122
taatatcagatattctaaaaccttg

SEQ ID NO: 43169 - DNA, 25 bp, Artificial
  probe
  misc_feature (1)..(25): SEQ ID NO: 3611; WAN024A5F_at; Start 170; Stop 194
atgagatttgcatcaatctcttgtc

SEQ ID NO: 43170 - DNA, 25 bp, Artificial
  probe
  misc_feature (1)..(25): SEQ ID NO: 3611; WAN024A5F_at; Start 8; Stop 32
aatacacctaatccactcagacagc

SEQ ID NO: 43171 - DNA, 25 bp, Artificial
  probe
  misc_feature (1)..(25): SEQ ID NO: 3611; WAN024A5F_at; Start 48; Stop 72
tataccataataaaagtgtcttaac

SEQ ID NO: 43172 - DNA, 25 bp, Artificial
  probe
  misc_feature (1)..(25): SEQ ID NO: 3611; WAN024A5F_at; Start 14; Stop 38
cctaatccactcagacagctgagtg

SEQ ID NO: 43173 - DNA, 25 bp, Artificial
  probe
  misc_feature (1)..(25): SEQ ID NO: 3611; WAN024A5F_at; Start 82; Stop 106
aaaatcaaaaaacgtataatatcag

SEQ ID NO: 43174 - DNA, 25 bp, Artificial
  probe
  misc_feature (1)..(25): SEQ ID NO: 3611; WAN024A5F_at; Start 166; Stop 190
tcaaatgagatttgcatcaatctct

SEQ ID NO: 43175 - DNA, 25 bp, Artificial
  probe
  misc_feature (1)..(25): SEQ ID NO: 3611; WAN024A5F_at; Start 3; Stop 27
gtctaaatacacctaatccactcag

SEQ ID NO: 43176 - DNA, 25 bp, Artificial
  probe
  misc_feature (1)..(25): SEQ ID NO: 3611; WAN024A5F_at; Start 164; Stop 188
catcaaatgagatttgcatcaatct

SEQ ID NO: 43177 - DNA, 25 bp, Artificial
  probe
  misc_feature (1)..(25): SEQ ID NO: 3611; WAN024A5F_at; Start 86; Stop 110
tcaaaaaacgtataatatcagatat

SEQ ID NO: 43178 - DNA, 25 bp, Artificial
  probe
  misc_feature (1)..(25): SEQ ID NO: 3611; WAN024A5F_at; Start 6; Stop 30
taaatacacctaatccactcagaca

SEQ ID NO: 43179 - DNA, 25 bp, Artificial
  probe
  misc_feature (1)..(25): SEQ ID NO: 3611; WAN024A5F_at; Start 34; Stop 58
gagtggatttttcgtataccataat

SEQ ID NO: 43180 - DNA, 25 bp, Artificial
  probe
  misc_feature (1)..(25): SEQ ID NO: 3611; WAN024A5F_at; Start 1; Stop 25
gagtctaaatacacctaatccactc

SEQ ID NO: 43181 - DNA, 25 bp, Artificial
  probe
  misc_feature (1)..(25): SEQ ID NO: 3611; WAN024A5F_at; Start 109; Stop 133
attctaaaaccttgatactgtacgt

SEQ ID NO: 43182 - DNA, 25 bp, Artificial
  probe
  misc_feature (1)..(25): SEQ ID NO: 3611; WAN024A5F_at; Start 156; Stop 180
tattttctcatcaaatgagatttgc

SEQ ID NO: 43183 - DNA, 25 bp, Artificial
  probe
  misc_feature (1)..(25): SEQ ID NO: 3611; WAN024A5F_at; Start 43; Stop 67
tttcgtataccataataaaagtgtc

SEQ ID NO: 43184 - DNA, 25 bp, Artificial
  probe
  misc_feature (1)..(25): SEQ ID NO: 3611; WAN024A5F_at; Start 53; Stop 77
cataataaaagtgtcttaacaaaat

SEQ ID NO: 43185 - DNA, 25 bp, Artificial
  probe
  misc_feature (1)..(25): SEQ ID NO: 3611; WAN024A5F_at; Start 27; Stop 51
gacagctgagtggatttttcgtata

SEQ ID NO: 43186 - DNA, 25 bp, Artificial
  probe
  misc_feature (1)..(25): SEQ ID NO: 3611; WAN024A5F_at; Start 116; Stop 140
aaccttgatactgtacgttttatca

SEQ ID NO: 43187 - DNA, 25 bp, Artificial
  probe
  misc_feature (1)..(25): SEQ ID NO: 3611; WAN024A5F_at; Start 31; Stop 55
gctgagtggatttttcgtataccat

SEQ ID NO: 43188 - DNA, 25 bp, Artificial
  probe
  misc_feature (1)..(25): SEQ ID NO: 3611; WAN024A5F_at; Start 29; Stop 53
cagctgagtggatttttcgtatacc

SEQ ID NO: 43189 - DNA, 25 bp, Artificial
  probe
  misc_feature (1)..(25): SEQ ID NO: 3611; WAN024A5F_at; Start 25; Stop 49
cagacagctgagtggatttttcgta

SEQ ID NO: 43190 - DNA, 25 bp, Artificial
  probe
  misc_feature (1)..(25): SEQ ID NO: 3611; WAN024A5F_at; Start 23; Stop 47
ctcagacagctgagtggatttttcg

SEQ ID NO: 43191 - DNA, 25 bp, Artificial
  probe
  misc_feature (1)..(25): SEQ ID NO: 3611; WAN024A5F_at; Start 150; Stop 174
ttactttattttctcatcaaatgag

SEQ ID NO: 43192 - DNA, 25 bp, Artificial
  probe
  misc_feature (1)..(25): SEQ ID NO: 3611; WAN024A5F_at; Start 10; Stop 34
tacacctaatccactcagacagctg

SEQ ID NO: 43193 - DNA, 25 bp, Artificial
  probe
  misc_feature (1)..(25): SEQ ID NO: 3611; WAN024A5F_at; Start 45; Stop 69
tcgtataccataataaaagtgtctt

SEQ ID NO: 43194 - DNA, 25 bp, Artificial
  probe
  misc_feature (1)..(25): SEQ ID NO: 3611; WAN024A5F_at; Start 12; Stop 36
cacctaatccactcagacagctgag

SEQ ID NO: 43195 - DNA, 25 bp, Artificial
  probe
  misc_feature (1)..(25): SEQ ID NO: 3611; WAN024A5F_at; Start 108; Stop 132
tattctaaaaccttgatactgtacg

SEQ ID NO: 43196 - DNA, 25 bp, Artificial
  probe
  misc_feature (1)..(25): SEQ ID NO: 3611; WAN024A5F_at; Start 126; Stop 150
ctgtacgttttatcatagaaatttt

SEQ ID NO: 43197 - DNA, 25 bp, Artificial
  probe
  misc_feature (1)..(25): SEQ ID NO: 3611; WAN024A5F_at; Start 122; Stop 146
gatactgtacgttttatcatagaaa

SEQ ID NO: 43198 - DNA, 25 bp, Artificial
  probe
  misc_feature (1)..(25): SEQ ID NO: 3611; WAN024A5F_at; Start 104; Stop 128
cagatattctaaaaccttgatactg

SEQ ID NO: 43199 - DNA, 25 bp, Artificial
  probe
  misc_feature (1)..(25): SEQ ID NO: 3611; WAN024A5F_at; Start 16; Stop 40
taatccactcagacagctgagtgga

SEQ ID NO: 43200 - DNA, 25 bp, Artificial
  probe
  misc_feature (1)..(25): SEQ ID NO: 3609; WAN024A5G_at; Start 59; Stop 83
tcacctcacgggatgacattaaaaa

SEQ ID NO: 43201 - DNA, 25 bp, Artificial
  probe
  misc_feature (1)..(25): SEQ ID NO: 3609; WAN024A5G_at; Start 86; Stop 110
tttgcttaggatagtatagcagaaa

SEQ ID NO: 43202 - DNA, 25 bp, Artificial
  probe
  misc_feature (1)..(25): SEQ ID NO: 3609; WAN024A5G_at; Start 56; Stop 80
tcgtcacctcacgggatgacattaa

SEQ ID NO: 43203 - DNA, 25 bp, Artificial
  probe
  misc_feature (1)..(25): SEQ ID NO: 3609; WAN024A5G_at; Start 88; Stop 112
tgcttaggatagtatagcagaaaaa

SEQ ID NO: 43204 - DNA, 25 bp, Artificial
  probe
  misc_feature (1)..(25): SEQ ID NO: 3609; WAN024A5G_at; Start 95; Stop 119
gatagtatagcagaaaaaaatgatt

SEQ ID NO: 43205 - DNA, 25 bp, Artificial
  probe
  misc_feature (1)..(25): SEQ ID NO: 3609; WAN024A5G_at; Start 83; Stop 107
acctttgcttaggatagtatagcag

SEQ ID NO: 43206 - DNA, 25 bp, Artificial
  probe
  misc_feature (1)..(25): SEQ ID NO: 3609; WAN024A5G_at; Start 89; Stop 113
gcttaggatagtatagcagaaaaaa

SEQ ID NO: 43207 - DNA, 25 bp, Artificial
  probe
  misc_feature (1)..(25): SEQ ID NO: 3609; WAN024A5G_at; Start 53; Stop 77
tcttcgtcacctcacgggatgacat

SEQ ID NO: 43208 - DNA, 25 bp, Artificial
  probe
  misc_feature (1)..(25): SEQ ID NO: 3609; WAN024A5G_at; Start 87; Stop 111
ttgcttaggatagtatagcagaaaa

SEQ ID NO: 43209 - DNA, 25 bp, Artificial
  probe
  misc_feature (1)..(25): SEQ ID NO: 3609; WAN024A5G_at; Start 52; Stop 76
gtcttcgtcacctcacgggatgaca

SEQ ID NO: 43210 - DNA, 25 bp, Artificial
  probe
  misc_feature (1)..(25): SEQ ID NO: 3609; WAN024A5G_at; Start 72; Stop 96
tgacattaaaaacctttgcttagga

SEQ ID NO: 43211 - DNA, 25 bp, Artificial
  probe
  misc_feature (1)..(25): SEQ ID NO: 3609; WAN024A5G_at; Start 50; Stop 74
gcgtcttcgtcacctcacgggatga

SEQ ID NO: 43212 - DNA, 25 bp, Artificial
  probe
  misc_feature (1)..(25): SEQ ID NO: 3609; WAN024A5G_at; Start 63; Stop 87
ctcacgggatgacattaaaaacctt

SEQ ID NO: 43213 - DNA, 25 bp, Artificial
  probe
  misc_feature (1)..(25): SEQ ID NO: 3609; WAN024A5G_at; Start 81; Stop 105
aaacctttgcttaggatagtatagc

SEQ ID NO: 43214 - DNA, 25 bp, Artificial
  probe
  misc_feature (1)..(25): SEQ ID NO: 3609; WAN024A5G_at; Start 82; Stop 106
aacctttgcttaggatagtatagca

SEQ ID NO: 43215 - DNA, 25 bp, Artificial
  probe
  misc_feature (1)..(25): SEQ ID NO: 3609; WAN024A5G_at; Start 94; Stop 118
ggatagtatagcagaaaaaaatgat

SEQ ID NO: 43216 - DNA, 25 bp, Artificial
  probe
  misc_feature (1)..(25): SEQ ID NO: 3609; WAN024A5G_at; Start 69; Stop 93
ggatgacattaaaaacctttgctta

SEQ ID NO: 43217 - DNA, 25 bp, Artificial
  probe
  misc_feature (1)..(25): SEQ ID NO: 3609; WAN024A5G_at; Start 80; Stop 104
aaaacctttgcttaggatagtatag

SEQ ID NO: 43218 - DNA, 25 bp, Artificial
  probe
  misc_feature (1)..(25): SEQ ID NO: 3609; WAN024A5G_at; Start 58; Stop 82
gtcacctcacgggatgacattaaaa

SEQ ID NO: 43219 - DNA, 25 bp, Artificial
  probe
  misc_feature (1)..(25): SEQ ID NO: 3609; WAN024A5G_at; Start 60; Stop 84
cacctcacgggatgacattaaaaac

SEQ ID NO: 43220 - DNA, 25 bp, Artificial
  probe
  misc_feature (1)..(25): SEQ ID NO: 3609; WAN024A5G_at; Start 51; Stop 75
cgtcttcgtcacctcacgggatgac

SEQ ID NO: 43221 - DNA, 25 bp, Artificial
  probe
  misc_feature (1)..(25): SEQ ID NO: 3609; WAN024A5G_at; Start 92; Stop 116
taggatagtatagcagaaaaaaatg

SEQ ID NO: 43222 - DNA, 25 bp, Artificial
  probe
  misc_feature (1)..(25): SEQ ID NO: 3609; WAN024A5G_at; Start 90; Stop 114
cttaggatagtatagcagaaaaaaa

SEQ ID NO: 43223 - DNA, 25 bp, Artificial
  probe
  misc_feature (1)..(25): SEQ ID NO: 3609; WAN024A5G_at; Start 75; Stop 99
cattaaaaacctttgcttaggatag

SEQ ID NO: 43224 - DNA, 25 bp, Artificial
  probe
  misc_feature (1)..(25): SEQ ID NO: 3609; WAN024A5G_at; Start 84; Stop 108
cctttgcttaggatagtatagcaga

SEQ ID NO: 43225 - DNA, 25 bp, Artificial
  probe
  misc_feature (1)..(25): SEQ ID NO: 3609; WAN024A5G_at; Start 55; Stop 79
ttcgtcacctcacgggatgacatta

SEQ ID NO: 43226 - DNA, 25 bp, Artificial
  probe
  misc_feature (1)..(25): SEQ ID NO: 3609; WAN024A5G_at; Start 54; Stop 78
cttcgtcacctcacgggatgacatt

SEQ ID NO: 43227 - DNA, 25 bp, Artificial
  probe
  misc_feature (1)..(25): SEQ ID NO: 3609; WAN024A5G_at; Start 62; Stop 86
cctcacgggatgacattaaaaacct

SEQ ID NO: 43228 - DNA, 25 bp, Artificial
  probe
  misc_feature (1)..(25): SEQ ID NO: 3609; WAN024A5G_at; Start 65; Stop 89
cacgggatgacattaaaaacctttg

SEQ ID NO: 43229 - DNA, 25 bp, Artificial
  probe
  misc_feature (1)..(25): SEQ ID NO: 3609; WAN024A5G_at; Start 85; Stop 109
ctttgcttaggatagtatagcagaa

SEQ ID NO: 43230 - DNA, 25 bp, Artificial
  probe
  misc_feature (1)..(25): SEQ ID NO: 3609; WAN024A5G_at; Start 70; Stop 94
gatgacattaaaaacctttgcttag

SEQ ID NO: 43231 - DNA, 25 bp, Artificial
  probe
  misc_feature (1)..(25): SEQ ID NO: 3609; WAN024A5G_at; Start 67; Stop 91
cgggatgacattaaaaacctttgct

SEQ ID NO: 43232 - DNA, 25 bp, Artificial
  probe
  misc_feature (1)..(25): SEQ ID NO: 3609; WAN024A5G_at; Start 71; Stop 95
atgacattaaaaacctttgcttagg

SEQ ID NO: 43233 - DNA, 25 bp, Artificial
  probe
  misc_feature (1)..(25): SEQ ID NO: 3609; WAN024A5G_at; Start 49; Stop 73
tgcgtcttcgtcacctcacgggatg

SEQ ID NO: 43234 - DNA, 25 bp, Artificial
  probe
  misc_feature (1)..(25): SEQ ID NO: 4698; WAN024A5H_at; Start 24; Stop 48
tgctatactatcctaagcaaaggtt

SEQ ID NO: 43235 - DNA, 25 bp, Artificial
  probe
  misc_feature (1)..(25): SEQ ID NO: 4698; WAN024A5H_at; Start 36; Stop 60
ctaagcaaaggtttttaatgtcatc

SEQ ID NO: 43236 - DNA, 25 bp, Artificial
  probe
  misc_feature (1)..(25): SEQ ID NO: 4698; WAN024A5H_at; Start 23; Stop 47
ctgctatactatcctaagcaaaggt

SEQ ID NO: 43237 - DNA, 25 bp, Artificial
  probe
  misc_feature (1)..(25): SEQ ID NO: 4698; WAN024A5H_at; Start 21; Stop 45
ttctgctatactatcctaagcaaag

SEQ ID NO: 43238 - DNA, 25 bp, Artificial
  probe
  misc_feature (1)..(25): SEQ ID NO: 4698; WAN024A5H_at; Start 49; Stop 73
tttaatgtcatcccgtgaggtgacg

SEQ ID NO: 43239 - DNA, 25 bp, Artificial
  probe
  misc_feature (1)..(25): SEQ ID NO: 4698; WAN024A5H_at; Start 46; Stop 70
gtttttaatgtcatcccgtgaggtg

SEQ ID NO: 43240 - DNA, 25 bp, Artificial
  probe
  misc_feature (1)..(25): SEQ ID NO: 4698; WAN024A5H_at; Start 35; Stop 59
cctaagcaaaggtttttaatgtcat

SEQ ID NO: 43241 - DNA, 25 bp, Artificial
  probe
  misc_feature (1)..(25): SEQ ID NO: 4698; WAN024A5H_at; Start 7; Stop 31
acaaaatcatttttttctgctatac

SEQ ID NO: 43242 - DNA, 25 bp, Artificial
  probe
  misc_feature (1)..(25): SEQ ID NO: 4698; WAN024A5H_at; Start 20; Stop 44
tttctgctatactatcctaagcaaa

SEQ ID NO: 43243 - DNA, 25 bp, Artificial
  probe
  misc_feature (1)..(25): SEQ ID NO: 4698; WAN024A5H_at; Start 41; Stop 65
caaaggtttttaatgtcatcccgtg

SEQ ID NO: 43244 - DNA, 25 bp, Artificial
  probe
  misc_feature (1)..(25): SEQ ID NO: 4698; WAN024A5H_at; Start 2; Stop 26
gatttacaaaatcatttttttctgc

SEQ ID NO: 43245 - DNA, 25 bp, Artificial
  probe
  misc_feature (1)..(25): SEQ ID NO: 4698; WAN024A5H_at; Start 25; Stop 49
gctatactatcctaagcaaaggttt

SEQ ID NO: 43246 - DNA, 25 bp, Artificial
  probe
  misc_feature (1)..(25): SEQ ID NO: 4698; WAN024A5H_at; Start 31; Stop 55
ctatcctaagcaaaggtttttaatg

SEQ ID NO: 43247 - DNA, 25 bp, Artificial
  probe
  misc_feature (1)..(25): SEQ ID NO: 4698; WAN024A5H_at; Start 22; Stop 46
tctgctatactatcctaagcaaagg

SEQ ID NO: 43248 - DNA, 25 bp, Artificial
  probe
  misc_feature (1)..(25): SEQ ID NO: 4698; WAN024A5H_at; Start 37; Stop 61
taagcaaaggtttttaatgtcatcc

SEQ ID NO: 43249 - DNA, 25 bp, Artificial
  probe
  misc_feature (1)..(25): SEQ ID NO: 4698; WAN024A5H_at; Start 51; Stop 75
taatgtcatcccgtgaggtgacgaa

SEQ ID NO: 43250 - DNA, 25 bp, Artificial
  probe
  misc_feature (1)..(25): SEQ ID NO: 4698; WAN024A5H_at; Start 19; Stop 43
ttttctgctatactatcctaagcaa

SEQ ID NO: 43251 - DNA, 25 bp, Artificial
  probe
  misc_feature (1)..(25): SEQ ID NO: 4698; WAN024A5H_at; Start 52; Stop 76
aatgtcatcccgtgaggtgacgaag

SEQ ID NO: 43252 - DNA, 25 bp, Artificial
  probe
  misc_feature (1)..(25): SEQ ID NO: 4698; WAN024A5H_at; Start 56; Stop 80
tcatcccgtgaggtgacgaagacgc

SEQ ID NO: 43253 - DNA, 25 bp, Artificial
  probe
  misc_feature (1)..(25): SEQ ID NO: 4698; WAN024A5H_at; Start 39; Stop 63
agcaaaggtttttaatgtcatcccg

SEQ ID NO: 43254 - DNA, 25 bp, Artificial
  probe
  misc_feature (1)..(25): SEQ ID NO: 4698; WAN024A5H_at; Start 34; Stop 58
tcctaagcaaaggtttttaatgtca

SEQ ID NO: 43255 - DNA, 25 bp, Artificial
  probe
  misc_feature (1)..(25): SEQ ID NO: 4698; WAN024A5H_at; Start 44; Stop 68
aggtttttaatgtcatcccgtgagg

SEQ ID NO: 43256 - DNA, 25 bp, Artificial
  probe
  misc_feature (1)..(25): SEQ ID NO: 4698; WAN024A5H_at; Start 53; Stop 77
atgtcatcccgtgaggtgacgaaga

SEQ ID NO: 43257 - DNA, 25 bp, Artificial
  probe
  misc_feature (1)..(25): SEQ ID NO: 4698; WAN024A5H_at; Start 18; Stop 42
tttttctgctatactatcctaagca

SEQ ID NO: 43258 - DNA, 25 bp, Artificial
  probe
  misc_feature (1)..(25): SEQ ID NO: 4698; WAN024A5H_at; Start 26; Stop 50
ctatactatcctaagcaaaggtttt

SEQ ID NO: 43259 - DNA, 25 bp, Artificial
  probe
  misc_feature (1)..(25): SEQ ID NO: 4698; WAN024A5H_at; Start 50; Stop 74
ttaatgtcatcccgtgaggtgacga

SEQ ID NO: 43260 - DNA, 25 bp, Artificial
  probe
  misc_feature (1)..(25): SEQ ID NO: 4698; WAN024A5H_at; Start 57; Stop 81
catcccgtgaggtgacgaagacgca

SEQ ID NO: 43261 - DNA, 25 bp, Artificial
  probe
  misc_feature (1)..(25): SEQ ID NO: 4698; WAN024A5H_at; Start 54; Stop 78
tgtcatcccgtgaggtgacgaagac

SEQ ID NO: 43262 - DNA, 25 bp, Artificial
  probe
  misc_feature (1)..(25): SEQ ID NO: 4698; WAN024A5H_at; Start 17; Stop 41
ttttttctgctatactatcctaagc

SEQ ID NO: 43263 - DNA, 25 bp, Artificial
  probe
  misc_feature (1)..(25): SEQ ID NO: 4698; WAN024A5H_at; Start 43; Stop 67
aaggtttttaatgtcatcccgtgag

SEQ ID NO: 43264 - DNA, 25 bp, Artificial
  probe
  misc_feature (1)..(25): SEQ ID NO: 4698; WAN024A5H_at; Start 48; Stop 72
ttttaatgtcatcccgtgaggtgac

SEQ ID NO: 43265 - DNA, 25 bp, Artificial
  probe
  misc_feature (1)..(25): SEQ ID NO: 4698; WAN024A5H_at; Start 8; Stop 32
caaaatcatttttttctgctatact

SEQ ID NO: 43266 - DNA, 25 bp, Artificial
  probe
  misc_feature (1)..(25): SEQ ID NO: 4698; WAN024A5H_at; Start 47; Stop 71
tttttaatgtcatcccgtgaggtga

SEQ ID NO: 43267 - DNA, 25 bp, Artificial
  probe
  misc_feature (1)..(25): SEQ ID NO: 4698; WAN024A5H_at; Start 55; Stop 79
gtcatcccgtgaggtgacgaagacg

SEQ ID NO: 43268 - DNA, 25 bp, Artificial
  probe
  misc_feature (1)..(25): SEQ ID NO: 4658; WAN024A5I_at; Start 29; Stop 53
tgatatactggtactaatctaaaag

SEQ ID NO: 43269 - DNA, 25 bp, Artificial
  probe
  misc_feature (1)..(25): SEQ ID NO: 4658; WAN024A5I_at; Start 28; Stop 52
ttgatatactggtactaatctaaaa

SEQ ID NO: 43270 - DNA, 25 bp, Artificial
  probe
  misc_feature (1)..(25): SEQ ID NO: 4658; WAN024A5I_at; Start 27; Stop 51
tttgatatactggtactaatctaaa

SEQ ID NO: 43271 - DNA, 25 bp, Artificial
  probe
  misc_feature (1)..(25): SEQ ID NO: 4376; WAN024A5J_at; Start 19; Stop 43
ttttagattagtaccagtatatcaa

SEQ ID NO: 43272 - DNA, 25 bp, Artificial
  probe
  misc_feature (1)..(25): SEQ ID NO: 4376; WAN024A5J_at; Start 24; Stop 48
gattagtaccagtatatcaaatttt

SEQ ID NO: 43273 - DNA, 25 bp, Artificial
  probe
  misc_feature (1)..(25): SEQ ID NO: 4376; WAN024A5J_at; Start 21; Stop 45
ttagattagtaccagtatatcaaat

SEQ ID NO: 43274 - DNA, 25 bp, Artificial
  probe
  misc_feature (1)..(25): SEQ ID NO: 4376; WAN024A5J_at; Start 20; Stop 44
tttagattagtaccagtatatcaaa

SEQ ID NO: 43275 - DNA, 25 bp, Artificial
  probe
  misc_feature (1)..(25): SEQ ID NO: 4376; WAN024A5J_at; Start 18; Stop 42
cttttagattagtaccagtatatca

SEQ ID NO: 43276 - DNA, 25 bp, Artificial
  probe
  misc_feature (1)..(25): SEQ ID NO: 4376; WAN024A5J_at; Start 22; Stop 46
tagattagtaccagtatatcaaatt

SEQ ID NO: 43277 - DNA, 25 bp, Artificial
  probe
  misc_feature (1)..(25): SEQ ID NO: 4376; WAN024A5J_at; Start 23; Stop 47
agattagtaccagtatatcaaattt

SEQ ID NO: 43278 - DNA, 25 bp, Artificial
  probe
  misc_feature (1)..(25): SEQ ID NO: 4424; WAN024A5K_at; Start 7; Stop 31
aaagctctactttacctagtagagc

SEQ ID NO: 43279 - DNA, 25 bp, Artificial
  probe
  misc_feature (1)..(25): SEQ ID NO: 4424; WAN024A5K_at; Start 8; Stop 32
aagctctactttacctagtagagcc

SEQ ID NO: 43280 - DNA, 25 bp, Artificial
  probe
  misc_feature (1)..(25): SEQ ID NO: 4424; WAN024A5K_at; Start 24; Stop 48
agtagagcccaaagtctatgtcaaa

SEQ ID NO: 43281 - DNA, 25 bp, Artificial
  probe
  misc_feature (1)..(25): SEQ ID NO: 4424; WAN024A5K_at; Start 27; Stop 51
agagcccaaagtctatgtcaaaaaa

SEQ ID NO: 43282 - DNA, 25 bp, Artificial
  probe
  misc_feature (1)..(25): SEQ ID NO: 4424; WAN024A5K_at; Start 33; Stop 57
caaagtctatgtcaaaaaaaactct

SEQ ID NO: 43283 - DNA, 25 bp, Artificial
  probe
  misc_feature (1)..(25): SEQ ID NO: 4424; WAN024A5K_at; Start 6; Stop 30
aaaagctctactttacctagtagag

SEQ ID NO: 43284 - DNA, 25 bp, Artificial
  probe
  misc_feature (1)..(25): SEQ ID NO: 4424; WAN024A5K_at; Start 4; Stop 28
caaaaagctctactttacctagtag

SEQ ID NO: 43285 - DNA, 25 bp, Artificial
  probe
  misc_feature (1)..(25): SEQ ID NO: 4424; WAN024A5K_at; Start 13; Stop 37
ctactttacctagtagagcccaaag

SEQ ID NO: 43286 - DNA, 25 bp, Artificial
  probe
  misc_feature (1)..(25): SEQ ID NO: 4424; WAN024A5K_at; Start 37; Stop 61
gtctatgtcaaaaaaaactctatta

SEQ ID NO: 43287 - DNA, 25 bp, Artificial
  probe
  misc_feature (1)..(25): SEQ ID NO: 4424; WAN024A5K_at; Start 11; Stop 35
ctctactttacctagtagagcccaa

SEQ ID NO: 43288 - DNA, 25 bp, Artificial
  probe
  misc_feature (1)..(25): SEQ ID NO: 4424; WAN024A5K_at; Start 16; Stop 40
ctttacctagtagagcccaaagtct

SEQ ID NO: 43289 - DNA, 25 bp, Artificial
  probe
  misc_feature (1)..(25): SEQ ID NO: 4424; WAN024A5K_at; Start 12; Stop 36
tctactttacctagtagagcccaaa

SEQ ID NO: 43290 - DNA, 25 bp, Artificial
  probe
  misc_feature (1)..(25): SEQ ID NO: 4424; WAN024A5K_at; Start 22; Stop 46
ctagtagagcccaaagtctatgtca

SEQ ID NO: 43291 - DNA, 25 bp, Artificial
  probe
  misc_feature (1)..(25): SEQ ID NO: 4424; WAN024A5K_at; Start 26; Stop 50
tagagcccaaagtctatgtcaaaaa

SEQ ID NO: 43292 - DNA, 25 bp, Artificial
  probe
  misc_feature (1)..(25): SEQ ID NO: 4424; WAN024A5K_at; Start 9; Stop 33
agctctactttacctagtagagccc

SEQ ID NO: 43293 - DNA, 25 bp, Artificial
  probe
  misc_feature (1)..(25): SEQ ID NO: 4424; WAN024A5K_at; Start 36; Stop 60
agtctatgtcaaaaaaaactctatt

SEQ ID NO: 43294 - DNA, 25 bp, Artificial
  probe
  misc_feature (1)..(25): SEQ ID NO: 4424; WAN024A5K_at; Start 38; Stop 62
tctatgtcaaaaaaaactctattaa

SEQ ID NO: 43295 - DNA, 25 bp, Artificial
  probe
  misc_feature (1)..(25): SEQ ID NO: 4424; WAN024A5K_at; Start 20; Stop 44
acctagtagagcccaaagtctatgt

SEQ ID NO: 43296 - DNA, 25 bp, Artificial
  probe
  misc_feature (1)..(25): SEQ ID NO: 4424; WAN024A5K_at; Start 19; Stop 43
tacctagtagagcccaaagtctatg

SEQ ID NO: 43297 - DNA, 25 bp, Artificial
  probe
  misc_feature (1)..(25): SEQ ID NO: 4424; WAN024A5K_at; Start 18; Stop 42
ttacctagtagagcccaaagtctat

SEQ ID NO: 43298 - DNA, 25 bp, Artificial
  probe
  misc_feature (1)..(25): SEQ ID NO: 4424; WAN024A5K_at; Start 25; Stop 49
gtagagcccaaagtctatgtcaaaa

SEQ ID NO: 43299 - DNA, 25 bp, Artificial
  probe
  misc_feature (1)..(25): SEQ ID NO: 4424; WAN024A5K_at; Start 10; Stop 34
gctctactttacctagtagagccca

SEQ ID NO: 43300 - DNA, 25 bp, Artificial
  probe
  misc_feature (1)..(25): SEQ ID NO: 4424; WAN024A5K_at; Start 35; Stop 59
aagtctatgtcaaaaaaaactctat

SEQ ID NO: 43301 - DNA, 25 bp, Artificial
  probe
  misc_feature (1)..(25): SEQ ID NO: 4424; WAN024A5K_at; Start 17; Stop 41
tttacctagtagagcccaaagtcta

SEQ ID NO: 43302 - DNA, 25 bp, Artificial
  probe
  misc_feature (1)..(25): SEQ ID NO: 4424; WAN024A5K_at; Start 23; Stop 47
tagtagagcccaaagtctatgtcaa

SEQ ID NO: 43303 - DNA, 25 bp, Artificial
  probe
  misc_feature (1)..(25): SEQ ID NO: 4424; WAN024A5K_at; Start 21; Stop 45
cctagtagagcccaaagtctatgtc

SEQ ID NO: 43304 - DNA, 25 bp, Artificial
  probe
  misc_feature (1)..(25): SEQ ID NO: 4424; WAN024A5K_at; Start 28; Stop 52
gagcccaaagtctatgtcaaaaaaa

SEQ ID NO: 43305 - DNA, 25 bp, Artificial
  probe
  misc_feature (1)..(25): SEQ ID NO: 4335; WAN024A5L_at; Start 27; Stop 51
ctttgggctctactaggtaaagtag

SEQ ID NO: 43306 - DNA, 25 bp, Artificial
  probe
  misc_feature (1)..(25): SEQ ID NO: 4335; WAN024A5L_at; Start 19; Stop 43
gacatagactttgggctctactagg

SEQ ID NO: 43307 - DNA, 25 bp, Artificial
  probe
  misc_feature (1)..(25): SEQ ID NO: 4335; WAN024A5L_at; Start 28; Stop 52
tttgggctctactaggtaaagtaga

SEQ ID NO: 43308 - DNA, 25 bp, Artificial
  probe
  misc_feature (1)..(25): SEQ ID NO: 4335; WAN024A5L_at; Start 5; Stop 29
atagagttttttttgacatagactt

SEQ ID NO: 43309 - DNA, 25 bp, Artificial
  probe
  misc_feature (1)..(25): SEQ ID NO: 4335; WAN024A5L_at; Start 30; Stop 54
tgggctctactaggtaaagtagagc

SEQ ID NO: 43310 - DNA, 25 bp, Artificial
  probe
  misc_feature (1)..(25): SEQ ID NO: 4335; WAN024A5L_at; Start 21; Stop 45
catagactttgggctctactaggta

SEQ ID NO: 43311 - DNA, 25 bp, Artificial
  probe
  misc_feature (1)..(25): SEQ ID NO: 4335; WAN024A5L_at; Start 20; Stop 44
acatagactttgggctctactaggt

SEQ ID NO: 43312 - DNA, 25 bp, Artificial
  probe
  misc_feature (1)..(25): SEQ ID NO: 4335; WAN024A5L_at; Start 15; Stop 39
ttttgacatagactttgggctctac

SEQ ID NO: 43313 - DNA, 25 bp, Artificial
  probe
  misc_feature (1)..(25): SEQ ID NO: 4335; WAN024A5L_at; Start 33; Stop 57
gctctactaggtaaagtagagcttt

SEQ ID NO: 43314 - DNA, 25 bp, Artificial
  probe
  misc_feature (1)..(25): SEQ ID NO: 4335; WAN024A5L_at; Start 22; Stop 46
atagactttgggctctactaggtaa

SEQ ID NO: 43315 - DNA, 25 bp, Artificial
  probe
  misc_feature (1)..(25): SEQ ID NO: 4335; WAN024A5L_at; Start 24; Stop 48
agactttgggctctactaggtaaag

SEQ ID NO: 43316 - DNA, 25 bp, Artificial
  probe
  misc_feature (1)..(25): SEQ ID NO: 4335; WAN024A5L_at; Start 17; Stop 41
ttgacatagactttgggctctacta

SEQ ID NO: 43317 - DNA, 25 bp, Artificial
  probe
  misc_feature (1)..(25): SEQ ID NO: 4335; WAN024A5L_at; Start 34; Stop 58
ctctactaggtaaagtagagctttt

SEQ ID NO: 43318 - DNA, 25 bp, Artificial
  probe
  misc_feature (1)..(25): SEQ ID NO: 4335; WAN024A5L_at; Start 18; Stop 42
tgacatagactttgggctctactag

SEQ ID NO: 43319 - DNA, 25 bp, Artificial
  probe
  misc_feature (1)..(25): SEQ ID NO: 4335; WAN024A5L_at; Start 4; Stop 28
aatagagttttttttgacatagact

SEQ ID NO: 43320 - DNA, 25 bp, Artificial
  probe
  misc_feature (1)..(25): SEQ ID NO: 4335; WAN024A5L_at; Start 23; Stop 47
tagactttgggctctactaggtaaa

SEQ ID NO: 43321 - DNA, 25 bp, Artificial
  probe
  misc_feature (1)..(25): SEQ ID NO: 4335; WAN024A5L_at; Start 3; Stop 27
taatagagttttttttgacatagac

SEQ ID NO: 43322 - DNA, 25 bp, Artificial
  probe
  misc_feature (1)..(25): SEQ ID NO: 4335; WAN024A5L_at; Start 32; Stop 56
ggctctactaggtaaagtagagctt

SEQ ID NO: 43323 - DNA, 25 bp, Artificial
  probe
  misc_feature (1)..(25): SEQ ID NO: 4335; WAN024A5L_at; Start 2; Stop 26
ttaatagagttttttttgacataga

SEQ ID NO: 43324 - DNA, 25 bp, Artificial
  probe
  misc_feature (1)..(25): SEQ ID NO: 4335; WAN024A5L_at; Start 31; Stop 55
gggctctactaggtaaagtagagct

SEQ ID NO: 43325 - DNA, 25 bp, Artificial
  probe
  misc_feature (1)..(25): SEQ ID NO: 4335; WAN024A5L_at; Start 14; Stop 38
tttttgacatagactttgggctcta

SEQ ID NO: 43326 - DNA, 25 bp, Artificial
  probe
  misc_feature (1)..(25): SEQ ID NO: 4335; WAN024A5L_at; Start 7; Stop 31
agagttttttttgacatagactttg

SEQ ID NO: 43327 - DNA, 25 bp, Artificial
  probe
  misc_feature (1)..(25): SEQ ID NO: 4335; WAN024A5L_at; Start 36; Stop 60
ctactaggtaaagtagagctttttg

SEQ ID NO: 43328 - DNA, 25 bp, Artificial
  probe
  misc_feature (1)..(25): SEQ ID NO: 4335; WAN024A5L_at; Start 29; Stop 53
ttgggctctactaggtaaagtagag

SEQ ID NO: 43329 - DNA, 25 bp, Artificial
  probe
  misc_feature (1)..(25): SEQ ID NO: 4335; WAN024A5L_at; Start 16; Stop 40
tttgacatagactttgggctctact

SEQ ID NO: 43330 - DNA, 25 bp, Artificial
  probe
  misc_feature (1)..(25): SEQ ID NO: 4335; WAN024A5L_at; Start 12; Stop 36
tttttttgacatagactttgggctc

SEQ ID NO: 43331 - DNA, 25 bp, Artificial
  probe
  misc_feature (1)..(25): SEQ ID NO: 4335; WAN024A5L_at; Start 13; Stop 37
ttttttgacatagactttgggctct

SEQ ID NO: 43332 - DNA, 25 bp, Artificial
  probe
  misc_feature (1)..(25): SEQ ID NO: 4393; WAN024A5M_at; Start 53; Stop 77
aaagtttggtgtgctgatttgtagc

SEQ ID NO: 43333 - DNA, 25 bp, Artificial
  probe
  misc_feature (1)..(25): SEQ ID NO: 4393; WAN024A5M_at; Start 96; Stop 120
agagagtaaatctttatggaggaag

SEQ ID NO: 43334 - DNA, 25 bp, Artificial
  probe
  misc_feature (1)..(25): SEQ ID NO: 4393; WAN024A5M_at; Start 81; Stop 105
ttcatggtataatcaagagagtaaa

SEQ ID NO: 43335 - DNA, 25 bp, Artificial
  probe
  misc_feature (1)..(25): SEQ ID NO: 4393; WAN024A5M_at; Start 90; Stop 114
taatcaagagagtaaatctttatgg

SEQ ID NO: 43336 - DNA, 25 bp, Artificial
  probe
  misc_feature (1)..(25): SEQ ID NO: 4393; WAN024A5M_at; Start 70; Stop 94
tttgtagccttttcatggtataatc

SEQ ID NO: 43337 - DNA, 25 bp, Artificial
  probe
  misc_feature (1)..(25): SEQ ID NO: 4393; WAN024A5M_at; Start 93; Stop 117
tcaagagagtaaatctttatggagg

SEQ ID NO: 43338 - DNA, 25 bp, Artificial
  probe
  misc_feature (1)..(25): SEQ ID NO: 4393; WAN024A5M_at; Start 54; Stop 78
aagtttggtgtgctgatttgtagcc

SEQ ID NO: 43339 - DNA, 25 bp, Artificial
  probe
  misc_feature (1)..(25): SEQ ID NO: 4393; WAN024A5M_at; Start 56; Stop 80
gtttggtgtgctgatttgtagcctt

SEQ ID NO: 43340 - DNA, 25 bp, Artificial
  probe
  misc_feature (1)..(25): SEQ ID NO: 4393; WAN024A5M_at; Start 77; Stop 101
ccttttcatggtataatcaagagag

SEQ ID NO: 43341 - DNA, 25 bp, Artificial
  probe
  misc_feature (1)..(25): SEQ ID NO: 4393; WAN024A5M_at; Start 49; Stop 73
ttacaaagtttggtgtgctgatttg

SEQ ID NO: 43342 - DNA, 25 bp, Artificial
  probe
  misc_feature (1)..(25): SEQ ID NO: 4393; WAN024A5M_at; Start 79; Stop 103
ttttcatggtataatcaagagagta

SEQ ID NO: 43343 - DNA, 25 bp, Artificial
  probe
  misc_feature (1)..(25): SEQ ID NO: 4393; WAN024A5M_at; Start 46; Stop 70
taattacaaagtttggtgtgctgat

SEQ ID NO: 43344 - DNA, 25 bp, Artificial
  probe
  misc_feature (1)..(25): SEQ ID NO: 4393; WAN024A5M_at; Start 72; Stop 96
tgtagccttttcatggtataatcaa

SEQ ID NO: 43345 - DNA, 25 bp, Artificial
  probe
  misc_feature (1)..(25): SEQ ID NO: 4393; WAN024A5M_at; Start 44; Stop 68
tttaattacaaagtttggtgtgctg

SEQ ID NO: 43346 - DNA, 25 bp, Artificial
  probe
  misc_feature (1)..(25): SEQ ID NO: 4393; WAN024A5M_at; Start 64; Stop 88
tgctgatttgtagccttttcatggt

SEQ ID NO: 43347 - DNA, 25 bp, Artificial
  probe
  misc_feature (1)..(25): SEQ ID NO: 4393; WAN024A5M_at; Start 94; Stop 118
caagagagtaaatctttatggagga

SEQ ID NO: 43348 - DNA, 25 bp, Artificial
  probe
  misc_feature (1)..(25): SEQ ID NO: 4393; WAN024A5M_at; Start 85; Stop 109
tggtataatcaagagagtaaatctt

SEQ ID NO: 43349 - DNA, 25 bp, Artificial
  probe
  misc_feature (1)..(25): SEQ ID NO: 4393; WAN024A5M_at; Start 73; Stop 97
gtagccttttcatggtataatcaag

SEQ ID NO: 43350 - DNA, 25 bp, Artificial
  probe
  misc_feature (1)..(25): SEQ ID NO: 4393; WAN024A5M_at; Start 86; Stop 110
ggtataatcaagagagtaaatcttt

SEQ ID NO: 43351 - DNA, 25 bp, Artificial
  probe
  misc_feature (1)..(25): SEQ ID NO: 4393; WAN024A5M_at; Start 78; Stop 102
cttttcatggtataatcaagagagt

SEQ ID NO: 43352 - DNA, 25 bp, Artificial
  probe
  misc_feature (1)..(25): SEQ ID NO: 4393; WAN024A5M_at; Start 68; Stop 92
gatttgtagccttttcatggtataa

SEQ ID NO: 43353 - DNA, 25 bp, Artificial
  probe
  misc_feature (1)..(25): SEQ ID NO: 4393; WAN024A5M_at; Start 52; Stop 76
caaagtttggtgtgctgatttgtag

SEQ ID NO: 43354 - DNA, 25 bp, Artificial
  probe
  misc_feature (1)..(25): SEQ ID NO: 4393; WAN024A5M_at; Start 63; Stop 87
gtgctgatttgtagccttttcatgg

SEQ ID NO: 43355 - DNA, 25 bp, Artificial
  probe
  misc_feature (1)..(25): SEQ ID NO: 4393; WAN024A5M_at; Start 60; Stop 84
ggtgtgctgatttgtagccttttca

SEQ ID NO: 43356 - DNA, 25 bp, Artificial
  probe
  misc_feature (1)..(25): SEQ ID NO: 4393; WAN024A5M_at; Start 74; Stop 98
tagccttttcatggtataatcaaga

SEQ ID NO: 43357 - DNA, 25 bp, Artificial
  probe
  misc_feature (1)..(25): SEQ ID NO: 4393; WAN024A5M_at; Start 55; Stop 79
agtttggtgtgctgatttgtagcct

SEQ ID NO: 43358 - DNA, 25 bp, Artificial
  probe
  misc_feature (1)..(25): SEQ ID NO: 4393; WAN024A5M_at; Start 66; Stop 90
ctgatttgtagccttttcatggtat

SEQ ID NO: 43359 - DNA, 25 bp, Artificial
  probe
  misc_feature (1)..(25): SEQ ID NO: 4393; WAN024A5M_at; Start 83; Stop 107
catggtataatcaagagagtaaatc

SEQ ID NO: 43360 - DNA, 25 bp, Artificial
  probe
  misc_feature (1)..(25): SEQ ID NO: 4393; WAN024A5M_at; Start 62; Stop 86
tgtgctgatttgtagccttttcatg

SEQ ID NO: 43361 - DNA, 25 bp, Artificial
  probe
  misc_feature (1)..(25): SEQ ID NO: 4393; WAN024A5M_at; Start 76; Stop 100
gccttttcatggtataatcaagaga

SEQ ID NO: 43362 - DNA, 25 bp, Artificial
  probe
  misc_feature (1)..(25): SEQ ID NO: 4393; WAN024A5M_at; Start 57; Stop 81
tttggtgtgctgatttgtagccttt

SEQ ID NO: 43363 - DNA, 25 bp, Artificial
  probe
  misc_feature (1)..(25): SEQ ID NO: 4393; WAN024A5M_at; Start 9; Stop 33
aaaactatcatagtaaatatgttaa

SEQ ID NO: 43364 - DNA, 25 bp, Artificial
  probe
  misc_feature (1)..(25): SEQ ID NO: 4393; WAN024A5M_at; Start 75; Stop 99
agccttttcatggtataatcaagag

SEQ ID NO: 43365 - DNA, 25 bp, Artificial
  probe
  misc_feature (1)..(25): SEQ ID NO: 4393; WAN024A5M_at; Start 97; Stop 121
gagagtaaatctttatggaggaagt

SEQ ID NO: 43366 - DNA, 25 bp, Artificial
  probe
  misc_feature (1)..(25): SEQ ID NO: 395; WAN024A5N_at; Start 30; Stop 54
ttataccatgaaaaggctacaaatc

SEQ ID NO: 43367 - DNA, 25 bp, Artificial
  probe
  misc_feature (1)..(25): SEQ ID NO: 395; WAN024A5N_at; Start 19; Stop 43
tactctcttgattataccatgaaaa

SEQ ID NO: 43368 - DNA, 25 bp, Artificial
  probe
  misc_feature (1)..(25): SEQ ID NO: 395; WAN024A5N_at; Start 27; Stop 51
tgattataccatgaaaaggctacaa

SEQ ID NO: 43369 - DNA, 25 bp, Artificial
  probe
  misc_feature (1)..(25): SEQ ID NO: 395; WAN024A5N_at; Start 38; Stop 62
tgaaaaggctacaaatcagcacacc

SEQ ID NO: 43370 - DNA, 25 bp, Artificial
  probe
  misc_feature (1)..(25): SEQ ID NO: 395; WAN024A5N_at; Start 36; Stop 60
catgaaaaggctacaaatcagcaca

SEQ ID NO: 43371 - DNA, 25 bp, Artificial
  probe
  misc_feature (1)..(25): SEQ ID NO: 395; WAN024A5N_at; Start 41; Stop 65
aaaggctacaaatcagcacaccaaa

SEQ ID NO: 43372 - DNA, 25 bp, Artificial
  probe
  misc_feature (1)..(25): SEQ ID NO: 395; WAN024A5N_at; Start 44; Stop 68
ggctacaaatcagcacaccaaactt

SEQ ID NO: 43373 - DNA, 25 bp, Artificial
  probe
  misc_feature (1)..(25): SEQ ID NO: 395; WAN024A5N_at; Start 26; Stop 50
ttgattataccatgaaaaggctaca

SEQ ID NO: 43374 - DNA, 25 bp, Artificial
  probe
  misc_feature (1)..(25): SEQ ID NO: 395; WAN024A5N_at; Start 23; Stop 47
ctcttgattataccatgaaaaggct

SEQ ID NO: 43375 - DNA, 25 bp, Artificial
  probe
  misc_feature (1)..(25): SEQ ID NO: 395; WAN024A5N_at; Start 17; Stop 41
tttactctcttgattataccatgaa

SEQ ID NO: 43376 - DNA, 25 bp, Artificial
  probe
  misc_feature (1)..(25): SEQ ID NO: 395; WAN024A5N_at; Start 31; Stop 55
tataccatgaaaaggctacaaatca

SEQ ID NO: 43377 - DNA, 25 bp, Artificial
  probe
  misc_feature (1)..(25): SEQ ID NO: 395; WAN024A5N_at; Start 50; Stop 74
aaatcagcacaccaaactttgtaat

SEQ ID NO: 43378 - DNA, 25 bp, Artificial
  probe
  misc_feature (1)..(25): SEQ ID NO: 395; WAN024A5N_at; Start 39; Stop 63
gaaaaggctacaaatcagcacacca

SEQ ID NO: 43379 - DNA, 25 bp, Artificial
  probe
  misc_feature (1)..(25): SEQ ID NO: 395; WAN024A5N_at; Start 22; Stop 46
tctcttgattataccatgaaaaggc

SEQ ID NO: 43380 - DNA, 25 bp, Artificial
  probe
  misc_feature (1)..(25): SEQ ID NO: 395; WAN024A5N_at; Start 5; Stop 29
cctccataaagatttactctcttga

SEQ ID NO: 43381 - DNA, 25 bp, Artificial
  probe
  misc_feature (1)..(25): SEQ ID NO: 395; WAN024A5N_at; Start 15; Stop 39
gatttactctcttgattataccatg

SEQ ID NO: 43382 - DNA, 25 bp, Artificial
  probe
  misc_feature (1)..(25): SEQ ID NO: 395; WAN024A5N_at; Start 34; Stop 58
accatgaaaaggctacaaatcagca

SEQ ID NO: 43383 - DNA, 25 bp, Artificial
  probe
  misc_feature (1)..(25): SEQ ID NO: 395; WAN024A5N_at; Start 45; Stop 69
gctacaaatcagcacaccaaacttt

SEQ ID NO: 43384 - DNA, 25 bp, Artificial
  probe
  misc_feature (1)..(25): SEQ ID NO: 395; WAN024A5N_at; Start 28; Stop 52
gattataccatgaaaaggctacaaa

SEQ ID NO: 43385 - DNA, 25 bp, Artificial
  probe
  misc_feature (1)..(25): SEQ ID NO: 395; WAN024A5N_at; Start 85; Stop 109
aattttaacatatttactatgatag

SEQ ID NO: 43386 - DNA, 25 bp, Artificial
  probe
  misc_feature (1)..(25): SEQ ID NO: 395; WAN024A5N_at; Start 49; Stop 73
caaatcagcacaccaaactttgtaa

SEQ ID NO: 43387 - DNA, 25 bp, Artificial
  probe
  misc_feature (1)..(25): SEQ ID NO: 395; WAN024A5N_at; Start 4; Stop 28
tcctccataaagatttactctcttg

SEQ ID NO: 43388 - DNA, 25 bp, Artificial
  probe
  misc_feature (1)..(25): SEQ ID NO: 395; WAN024A5N_at; Start 12; Stop 36
aaagatttactctcttgattatacc

SEQ ID NO: 43389 - DNA, 25 bp, Artificial
  probe
  misc_feature (1)..(25): SEQ ID NO: 395; WAN024A5N_at; Start 24; Stop 48
tcttgattataccatgaaaaggcta

SEQ ID NO: 43390 - DNA, 25 bp, Artificial
  probe
  misc_feature (1)..(25): SEQ ID NO: 395; WAN024A5N_at; Start 42; Stop 66
aaggctacaaatcagcacaccaaac

SEQ ID NO: 43391 - DNA, 25 bp, Artificial
  probe
  misc_feature (1)..(25): SEQ ID NO: 395; WAN024A5N_at; Start 54; Stop 78
cagcacaccaaactttgtaattaaa

SEQ ID NO: 43392 - DNA, 25 bp, Artificial
  probe
  misc_feature (1)..(25): SEQ ID NO: 395; WAN024A5N_at; Start 35; Stop 59
ccatgaaaaggctacaaatcagcac

SEQ ID NO: 43393 - DNA, 25 bp, Artificial
  probe
  misc_feature (1)..(25): SEQ ID NO: 395; WAN024A5N_at; Start 1; Stop 25
acttcctccataaagatttactctc

SEQ ID NO: 43394 - DNA, 25 bp, Artificial
  probe
  misc_feature (1)..(25): SEQ ID NO: 395; WAN024A5N_at; Start 40; Stop 64
aaaaggctacaaatcagcacaccaa

SEQ ID NO: 43395 - DNA, 25 bp, Artificial
  probe
  misc_feature (1)..(25): SEQ ID NO: 395; WAN024A5N_at; Start 25; Stop 49
cttgattataccatgaaaaggctac

SEQ ID NO: 43396 - DNA, 25 bp, Artificial
  probe
  misc_feature (1)..(25): SEQ ID NO: 395; WAN024A5N_at; Start 32; Stop 56
ataccatgaaaaggctacaaatcag

SEQ ID NO: 43397 - DNA, 25 bp, Artificial
  probe
  misc_feature (1)..(25): SEQ ID NO: 395; WAN024A5N_at; Start 21; Stop 45
ctctcttgattataccatgaaaagg

SEQ ID NO: 43398 - DNA, 25 bp, Artificial
  probe
  misc_feature (1)..(25): SEQ ID NO: 395; WAN024A5N_at; Start 47; Stop 71
tacaaatcagcacaccaaactttgt

SEQ ID NO: 43399 - DNA, 25 bp, Artificial
  probe
  misc_feature (1)..(25): SEQ ID NO: 395; WAN024A5N_at; Start 53; Stop 77
tcagcacaccaaactttgtaattaa

SEQ ID NO: 43400 - DNA, 25 bp, Artificial
  probe
  misc_feature (1)..(25): SEQ ID NO: 3639; WAN024A5O_at; Start 22; Stop 46
gcttgattttaagcatgctttgtgc

SEQ ID NO: 43401 - DNA, 25 bp, Artificial
  probe
  misc_feature (1)..(25): SEQ ID NO: 3639; WAN024A5O_at; Start 12; Stop 36
gaaactttttgcttgattttaagca

SEQ ID NO: 43402 - DNA, 25 bp, Artificial
  probe
  misc_feature (1)..(25): SEQ ID NO: 3639; WAN024A5O_at; Start 119; Stop 143
gggtgaagtctatactgtgtgcagt

SEQ ID NO: 43403 - DNA, 25 bp, Artificial
  probe
  misc_feature (1)..(25): SEQ ID NO: 3639; WAN024A5O_at; Start 138; Stop 162
tgcagtagggctcgcttggctataa

SEQ ID NO: 43404 - DNA, 25 bp, Artificial
  probe
  misc_feature (1)..(25): SEQ ID NO: 3639; WAN024A5O_at; Start 151; Stop 175
gcttggctataaatttcaagtctcc

SEQ ID NO: 43405 - DNA, 25 bp, Artificial
  probe
  misc_feature (1)..(25): SEQ ID NO: 3639; WAN024A5O_at; Start 117; Stop 141
aagggtgaagtctatactgtgtgca

SEQ ID NO: 43406 - DNA, 25 bp, Artificial
  probe
  misc_feature (1)..(25): SEQ ID NO: 3639; WAN024A5O_at; Start 127; Stop 151
tctatactgtgtgcagtagggctcg

SEQ ID NO: 43407 - DNA, 25 bp, Artificial
  probe
  misc_feature (1)..(25): SEQ ID NO: 3639; WAN024A5O_at; Start 129; Stop 153
tatactgtgtgcagtagggctcgct

SEQ ID NO: 43408 - DNA, 25 bp, Artificial
  probe
  misc_feature (1)..(25): SEQ ID NO: 3639; WAN024A5O_at; Start 143; Stop 167
tagggctcgcttggctataaatttc

SEQ ID NO: 43409 - DNA, 25 bp, Artificial
  probe
  misc_feature (1)..(25): SEQ ID NO: 3639; WAN024A5O_at; Start 166; Stop 190
tcaagtctccttgtttaaggagact

SEQ ID NO: 43410 - DNA, 25 bp, Artificial
  probe
  misc_feature (1)..(25): SEQ ID NO: 3639; WAN024A5O_at; Start 131; Stop 155
tactgtgtgcagtagggctcgcttg

SEQ ID NO: 43411 - DNA, 25 bp, Artificial
  probe
  misc_feature (1)..(25): SEQ ID NO: 3639; WAN024A5O_at; Start 70; Stop 94
tcctttaaacctgtcccgtgaggca

SEQ ID NO: 43412 - DNA, 25 bp, Artificial
  probe
  misc_feature (1)..(25): SEQ ID NO: 3639; WAN024A5O_at; Start 31; Stop 55
taagcatgctttgtgctatagtaaa

SEQ ID NO: 43413 - DNA, 25 bp, Artificial
  probe
  misc_feature (1)..(25): SEQ ID NO: 3639; WAN024A5O_at; Start 155; Stop 179
ggctataaatttcaagtctccttgt

SEQ ID NO: 43414 - DNA, 25 bp, Artificial
  probe
  misc_feature (1)..(25): SEQ ID NO: 3639; WAN024A5O_at; Start 49; Stop 73
tagtaaatgataactaaatattcct

SEQ ID NO: 43415 - DNA, 25 bp, Artificial
  probe
  misc_feature (1)..(25): SEQ ID NO: 3639; WAN024A5O_at; Start 76; Stop 100
aaacctgtcccgtgaggcaggcaag

SEQ ID NO: 43416 - DNA, 25 bp, Artificial
  probe
  misc_feature (1)..(25): SEQ ID NO: 3639; WAN024A5O_at; Start 140; Stop 164
cagtagggctcgcttggctataaat

SEQ ID NO: 43417 - DNA, 25 bp, Artificial
  probe
  misc_feature (1)..(25): SEQ ID NO: 3639; WAN024A5O_at; Start 1; Stop 25
gatgctacattgaaactttttgctt

SEQ ID NO: 43418 - DNA, 25 bp, Artificial
  probe
  misc_feature (1)..(25): SEQ ID NO: 3639; WAN024A5O_at; Start 123; Stop 147
gaagtctatactgtgtgcagtaggg

SEQ ID NO: 43419 - DNA, 25 bp, Artificial
  probe
  misc_feature (1)..(25): SEQ ID NO: 3639; WAN024A5O_at; Start 109; Stop 133
taaagtagaagggtgaagtctatac

SEQ ID NO: 43420 - DNA, 25 bp, Artificial
  probe
  misc_feature (1)..(25): SEQ ID NO: 3639; WAN024A5O_at; Start 145; Stop 169
gggctcgcttggctataaatttcaa

SEQ ID NO: 43421 - DNA, 25 bp, Artificial
  probe
  misc_feature (1)..(25): SEQ ID NO: 3639; WAN024A5O_at; Start 106; Stop 130
cgataaagtagaagggtgaagtcta

SEQ ID NO: 43422 - DNA, 25 bp, Artificial
  probe
  misc_feature (1)..(25): SEQ ID NO: 3639; WAN024A5O_at; Start 147; Stop 171
gctcgcttggctataaatttcaagt

SEQ ID NO: 43423 - DNA, 25 bp, Artificial
  probe
  misc_feature (1)..(25): SEQ ID NO: 3639; WAN024A5O_at; Start 4; Stop 28
gctacattgaaactttttgcttgat

SEQ ID NO: 43424 - DNA, 25 bp, Artificial
  probe
  misc_feature (1)..(25): SEQ ID NO: 3639; WAN024A5O_at; Start 91; Stop 115
ggcaggcaaggagcgcgataaagta

SEQ ID NO: 43425 - DNA, 25 bp, Artificial
  probe
  misc_feature (1)..(25): SEQ ID NO: 3639; WAN024A5O_at; Start 72; Stop 96
ctttaaacctgtcccgtgaggcagg

SEQ ID NO: 43426 - DNA, 25 bp, Artificial
  probe
  misc_feature (1)..(25): SEQ ID NO: 3639; WAN024A5O_at; Start 75; Stop 99
taaacctgtcccgtgaggcaggcaa

SEQ ID NO: 43427 - DNA, 25 bp, Artificial
  probe
  misc_feature (1)..(25): SEQ ID NO: 3639; WAN024A5O_at; Start 34; Stop 58
gcatgctttgtgctatagtaaatga

SEQ ID NO: 43428 - DNA, 25 bp, Artificial
  probe
  misc_feature (1)..(25): SEQ ID NO: 3639; WAN024A5O_at; Start 26; Stop 50
gattttaagcatgctttgtgctata

SEQ ID NO: 43429 - DNA, 25 bp, Artificial
  probe
  misc_feature (1)..(25): SEQ ID NO: 3639; WAN024A5O_at; Start 38; Stop 62
gctttgtgctatagtaaatgataac

SEQ ID NO: 43430 - DNA, 25 bp, Artificial
  probe
  misc_feature (1)..(25): SEQ ID NO: 3639; WAN024A5O_at; Start 78; Stop 102
acctgtcccgtgaggcaggcaagga

SEQ ID NO: 43431 - DNA, 25 bp, Artificial
  probe
  misc_feature (1)..(25): SEQ ID NO: 3639; WAN024A5O_at; Start 104; Stop 128
cgcgataaagtagaagggtgaagtc

SEQ ID NO: 43432 - DNA, 25 bp, Artificial
  probe
  misc_feature (1)..(25): SEQ ID NO: 3639; WAN024A5O_at; Start 164; Stop 188
tttcaagtctccttgtttaaggaga

SEQ ID NO: 43433 - DNA, 25 bp, Artificial
  probe
  misc_feature (1)..(25): SEQ ID NO: 3639; WAN024A5O_at; Start 154; Stop 178
tggctataaatttcaagtctccttg

SEQ ID NO: 43434 - DNA, 25 bp, Artificial
  probe
  misc_feature (1)..(25): SEQ ID NO: 3568; WAN024A5P_at; Start 47; Stop 71
atttatagccaagcgagccctactg

SEQ ID NO: 43435 - DNA, 25 bp, Artificial
  probe
  misc_feature (1)..(25): SEQ ID NO: 3568; WAN024A5P_at; Start 148; Stop 172
agttatcatttactatagcacaaag

SEQ ID NO: 43436 - DNA, 25 bp, Artificial
  probe
  misc_feature (1)..(25): SEQ ID NO: 3568; WAN024A5P_at; Start 70; Stop 94
tgcacacagtatagacttcaccctt

SEQ ID NO: 43437 - DNA, 25 bp, Artificial
  probe
  misc_feature (1)..(25): SEQ ID NO: 3568; WAN024A5P_at; Start 117; Stop 141
tgcctcacgggacaggtttaaagga

SEQ ID NO: 43438 - DNA, 25 bp, Artificial
  probe
  misc_feature (1)..(25): SEQ ID NO: 3568; WAN024A5P_at; Start 158; Stop 182
tactatagcacaaagcatgcttaaa

SEQ ID NO: 43439 - DNA, 25 bp, Artificial
  probe
  misc_feature (1)..(25): SEQ ID NO: 3568; WAN024A5P_at; Start 109; Stop 133
tccttgcctgcctcacgggacaggt

SEQ ID NO: 43440 - DNA, 25 bp, Artificial
  probe
  misc_feature (1)..(25): SEQ ID NO: 3568; WAN024A5P_at; Start 45; Stop 69
aaatttatagccaagcgagccctac

SEQ ID NO: 43441 - DNA, 25 bp, Artificial
  probe
  misc_feature (1)..(25): SEQ ID NO: 3568; WAN024A5P_at; Start 61; Stop 85
gagccctactgcacacagtatagac

SEQ ID NO: 43442 - DNA, 25 bp, Artificial
  probe
  misc_feature (1)..(25): SEQ ID NO: 3568; WAN024A5P_at; Start 49; Stop 73
ttatagccaagcgagccctactgca

SEQ ID NO: 43443 - DNA, 25 bp, Artificial
  probe
  misc_feature (1)..(25): SEQ ID NO: 3568; WAN024A5P_at; Start 33; Stop 57
caaggagacttgaaatttatagcca

SEQ ID NO: 43444 - DNA, 25 bp, Artificial
  probe
  misc_feature (1)..(25): SEQ ID NO: 3568; WAN024A5P_at; Start 156; Stop 180
tttactatagcacaaagcatgctta

SEQ ID NO: 43445 - DNA, 25 bp, Artificial
  probe
  misc_feature (1)..(25): SEQ ID NO: 3568; WAN024A5P_at; Start 37; Stop 61
gagacttgaaatttatagccaagcg

SEQ ID NO: 43446 - DNA, 25 bp, Artificial
  probe
  misc_feature (1)..(25): SEQ ID NO: 3568; WAN024A5P_at; Start 115; Stop 139
cctgcctcacgggacaggtttaaag

SEQ ID NO: 43447 - DNA, 25 bp, Artificial
  probe
  misc_feature (1)..(25): SEQ ID NO: 3568; WAN024A5P_at; Start 42; Stop 66
ttgaaatttatagccaagcgagccc

SEQ ID NO: 43448 - DNA, 25 bp, Artificial
  probe
  misc_feature (1)..(25): SEQ ID NO: 3568; WAN024A5P_at; Start 168; Stop 192
caaagcatgcttaaaatcaagcaaa

SEQ ID NO: 43449 - DNA, 25 bp, Artificial
  probe
  misc_feature (1)..(25): SEQ ID NO: 3568; WAN024A5P_at; Start 179; Stop 203
taaaatcaagcaaaaagtttcaatg

SEQ ID NO: 43450 - DNA, 25 bp, Artificial
  probe
  misc_feature (1)..(25): SEQ ID NO: 3568; WAN024A5P_at; Start 161; Stop 185
tatagcacaaagcatgcttaaaatc

SEQ ID NO: 43451 - DNA, 25 bp, Artificial
  probe
  misc_feature (1)..(25): SEQ ID NO: 3568; WAN024A5P_at; Start 111; Stop 135
cttgcctgcctcacgggacaggttt

SEQ ID NO: 43452 - DNA, 25 bp, Artificial
  probe
  misc_feature (1)..(25): SEQ ID NO: 3568; WAN024A5P_at; Start 153; Stop 177
tcatttactatagcacaaagcatgc

SEQ ID NO: 43453 - DNA, 25 bp, Artificial
  probe
  misc_feature (1)..(25): SEQ ID NO: 3568; WAN024A5P_at; Start 50; Stop 74
tatagccaagcgagccctactgcac

SEQ ID NO: 43454 - DNA, 25 bp, Artificial
  probe
  misc_feature (1)..(25): SEQ ID NO: 3568; WAN024A5P_at; Start 67; Stop 91
tactgcacacagtatagacttcacc

SEQ ID NO: 43455 - DNA, 25 bp, Artificial
  probe
  misc_feature (1)..(25): SEQ ID NO: 3568; WAN024A5P_at; Start 165; Stop 189
gcacaaagcatgcttaaaatcaagc

SEQ ID NO: 43456 - DNA, 25 bp, Artificial
  probe
  misc_feature (1)..(25): SEQ ID NO: 3568; WAN024A5P_at; Start 74; Stop 98
cacagtatagacttcacccttctac

SEQ ID NO: 43457 - DNA, 25 bp, Artificial
  probe
  misc_feature (1)..(25): SEQ ID NO: 3568; WAN024A5P_at; Start 63; Stop 87
gccctactgcacacagtatagactt

SEQ ID NO: 43458 - DNA, 25 bp, Artificial
  probe
  misc_feature (1)..(25): SEQ ID NO: 3568; WAN024A5P_at; Start 94; Stop 118
tctactttatcgcgctccttgcctg

SEQ ID NO: 43459 - DNA, 25 bp, Artificial
  probe
  misc_feature (1)..(25): SEQ ID NO: 3568; WAN024A5P_at; Start 184; Stop 208
tcaagcaaaaagtttcaatgtagca

SEQ ID NO: 43460 - DNA, 25 bp, Artificial
  probe
  misc_feature (1)..(25): SEQ ID NO: 3568; WAN024A5P_at; Start 83; Stop 107
gacttcacccttctactttatcgcg

SEQ ID NO: 43461 - DNA, 25 bp, Artificial
  probe
  misc_feature (1)..(25): SEQ ID NO: 3568; WAN024A5P_at; Start 186; Stop 210
aagcaaaaagtttcaatgtagcatc

SEQ ID NO: 43462 - DNA, 25 bp, Artificial
  probe
  misc_feature (1)..(25): SEQ ID NO: 3568; WAN024A5P_at; Start 176; Stop 200
gcttaaaatcaagcaaaaagtttca

SEQ ID NO: 43463 - DNA, 25 bp, Artificial
  probe
  misc_feature (1)..(25): SEQ ID NO: 3568; WAN024A5P_at; Start 172; Stop 196
gcatgcttaaaatcaagcaaaaagt

SEQ ID NO: 43464 - DNA, 25 bp, Artificial
  probe
  misc_feature (1)..(25): SEQ ID NO: 3568; WAN024A5P_at; Start 23; Stop 47
tctccttaaacaaggagacttgaaa

SEQ ID NO: 43465 - DNA, 25 bp, Artificial
  probe
  misc_feature (1)..(25): SEQ ID NO: 3568; WAN024A5P_at; Start 44; Stop 68
gaaatttatagccaagcgagcccta

SEQ ID NO: 43466 - DNA, 25 bp, Artificial
  probe
  misc_feature (1)..(25): SEQ ID NO: 3568; WAN024A5P_at; Start 56; Stop 80
caagcgagccctactgcacacagta

SEQ ID NO: 43467 - DNA, 25 bp, Artificial
  probe
  misc_feature (1)..(25): SEQ ID NO: 3568; WAN024A5P_at; Start 59; Stop 83
gcgagccctactgcacacagtatag

SEQ ID NO: 43468 - DNA, 25 bp, Artificial
  probe
  misc_feature (1)..(25): SEQ ID NO: 184; WAN024A5Q_at; Start 4; Stop 28
acaagacgttaaaagacgccagtga

SEQ ID NO: 43469 - DNA, 25 bp, Artificial
  probe
  misc_feature (1)..(25): SEQ ID NO: 184; WAN024A5Q_at; Start 1; Stop 25
aacacaagacgttaaaagacgccag

SEQ ID NO: 43470 - DNA, 25 bp, Artificial
  probe
  misc_feature (1)..(25): SEQ ID NO: 184; WAN024A5Q_at; Start 22; Stop 46
ccagtgagcgtccacgagaggtgaa

SEQ ID NO: 43471 - DNA, 25 bp, Artificial
  probe
  misc_feature (1)..(25): SEQ ID NO: 184; WAN024A5Q_at; Start 14; Stop 38
aaaagacgccagtgagcgtccacga

SEQ ID NO: 43472 - DNA, 25 bp, Artificial
  probe
  misc_feature (1)..(25): SEQ ID NO: 184; WAN024A5Q_at; Start 19; Stop 43
acgccagtgagcgtccacgagaggt

SEQ ID NO: 43473 - DNA, 25 bp, Artificial
  probe
  misc_feature (1)..(25): SEQ ID NO: 184; WAN024A5Q_at; Start 24; Stop 48
agtgagcgtccacgagaggtgaaaa

SEQ ID NO: 43474 - DNA, 25 bp, Artificial
  probe
  misc_feature (1)..(25): SEQ ID NO: 184; WAN024A5Q_at; Start 18; Stop 42
gacgccagtgagcgtccacgagagg

SEQ ID NO: 43475 - DNA, 25 bp, Artificial
  probe
  misc_feature (1)..(25): SEQ ID NO: 184; WAN024A5Q_at; Start 3; Stop 27
cacaagacgttaaaagacgccagtg

SEQ ID NO: 43476 - DNA, 25 bp, Artificial
  probe
  misc_feature (1)..(25): SEQ ID NO: 184; WAN024A5Q_at; Start 21; Stop 45
gccagtgagcgtccacgagaggtga

SEQ ID NO: 43477 - DNA, 25 bp, Artificial
  probe
  misc_feature (1)..(25): SEQ ID NO: 184; WAN024A5Q_at; Start 8; Stop 32
gacgttaaaagacgccagtgagcgt

SEQ ID NO: 43478 - DNA, 25 bp, Artificial
  probe
  misc_feature (1)..(25): SEQ ID NO: 184; WAN024A5Q_at; Start 7; Stop 31
agacgttaaaagacgccagtgagcg

SEQ ID NO: 43479 - DNA, 25 bp, Artificial
  probe
  misc_feature (1)..(25): SEQ ID NO: 184; WAN024A5Q_at; Start 16; Stop 40
aagacgccagtgagcgtccacgaga

SEQ ID NO: 43480 - DNA, 25 bp, Artificial
  probe
  misc_feature (1)..(25): SEQ ID NO: 184; WAN024A5Q_at; Start 25; Stop 49
gtgagcgtccacgagaggtgaaaat

SEQ ID NO: 43481 - DNA, 25 bp, Artificial
  probe
  misc_feature (1)..(25): SEQ ID NO: 184; WAN024A5Q_at; Start 13; Stop 37
taaaagacgccagtgagcgtccacg

SEQ ID NO: 43482 - DNA, 25 bp, Artificial
  probe
  misc_feature (1)..(25): SEQ ID NO: 184; WAN024A5Q_at; Start 20; Stop 44
cgccagtgagcgtccacgagaggtg

SEQ ID NO: 43483 - DNA, 25 bp, Artificial
  probe
  misc_feature (1)..(25): SEQ ID NO: 184; WAN024A5Q_at; Start 10; Stop 34
cgttaaaagacgccagtgagcgtcc

SEQ ID NO: 43484 - DNA, 25 bp, Artificial
  probe
  misc_feature (1)..(25): SEQ ID NO: 184; WAN024A5Q_at; Start 15; Stop 39
aaagacgccagtgagcgtccacgag

SEQ ID NO: 43485 - DNA, 25 bp, Artificial
  probe
  misc_feature (1)..(25): SEQ ID NO: 184; WAN024A5Q_at; Start 5; Stop 29
caagacgttaaaagacgccagtgag

SEQ ID NO: 43486 - DNA, 25 bp, Artificial
  probe
  misc_feature (1)..(25): SEQ ID NO: 184; WAN024A5Q_at; Start 23; Stop 47
cagtgagcgtccacgagaggtgaaa

SEQ ID NO: 43487 - DNA, 25 bp, Artificial
  probe
  misc_feature (1)..(25): SEQ ID NO: 184; WAN024A5Q_at; Start 17; Stop 41
agacgccagtgagcgtccacgagag

SEQ ID NO: 43488 - DNA, 25 bp, Artificial
  probe
  misc_feature (1)..(25): SEQ ID NO: 184; WAN024A5Q_at; Start 9; Stop 33
acgttaaaagacgccagtgagcgtc

SEQ ID NO: 43489 - DNA, 25 bp, Artificial
  probe
  misc_feature (1)..(25): SEQ ID NO: 184; WAN024A5Q_at; Start 12; Stop 36
ttaaaagacgccagtgagcgtccac

SEQ ID NO: 43490 - DNA, 25 bp, Artificial
  probe
  misc_feature (1)..(25): SEQ ID NO: 184; WAN024A5Q_at; Start 6; Stop 30
aagacgttaaaagacgccagtgagc

SEQ ID NO: 43491 - DNA, 25 bp, Artificial
  probe
  misc_feature (1)..(25): SEQ ID NO: 184; WAN024A5Q_at; Start 2; Stop 26
acacaagacgttaaaagacgccagt

SEQ ID NO: 43492 - DNA, 25 bp, Artificial
  probe
  misc_feature (1)..(25): SEQ ID NO: 184; WAN024A5Q_at; Start 11; Stop 35
gttaaaagacgccagtgagcgtcca

SEQ ID NO: 43493 - DNA, 25 bp, Artificial
  probe
  misc_feature (1)..(25): SEQ ID NO: 3173; WAN024A5R_at; Start 3; Stop 27
tttcacctctcgtggacgctcactg

SEQ ID NO: 43494 - DNA, 25 bp, Artificial
  probe
  misc_feature (1)..(25): SEQ ID NO: 3173; WAN024A5R_at; Start 23; Stop 47
cactggcgtcttttaacgtcttgtg

SEQ ID NO: 43495 - DNA, 25 bp, Artificial
  probe
  misc_feature (1)..(25): SEQ ID NO: 3173; WAN024A5R_at; Start 7; Stop 31
acctctcgtggacgctcactggcgt

SEQ ID NO: 43496 - DNA, 25 bp, Artificial
  probe
  misc_feature (1)..(25): SEQ ID NO: 3173; WAN024A5R_at; Start 25; Stop 49
ctggcgtcttttaacgtcttgtgtt

SEQ ID NO: 43497 - DNA, 25 bp, Artificial
  probe
  misc_feature (1)..(25): SEQ ID NO: 3173; WAN024A5R_at; Start 14; Stop 38
gtggacgctcactggcgtcttttaa

SEQ ID NO: 43498 - DNA, 25 bp, Artificial
  probe
  misc_feature (1)..(25): SEQ ID NO: 3173; WAN024A5R_at; Start 17; Stop 41
gacgctcactggcgtcttttaacgt

SEQ ID NO: 43499 - DNA, 25 bp, Artificial
  probe
  misc_feature (1)..(25): SEQ ID NO: 3173; WAN024A5R_at; Start 8; Stop 32
cctctcgtggacgctcactggcgtc

SEQ ID NO: 43500 - DNA, 25 bp, Artificial
  probe
  misc_feature (1)..(25): SEQ ID NO: 3173; WAN024A5R_at; Start 16; Stop 40
ggacgctcactggcgtcttttaacg

SEQ ID NO: 43501 - DNA, 25 bp, Artificial
  probe
  misc_feature (1)..(25): SEQ ID NO: 3173; WAN024A5R_at; Start 11; Stop 35
ctcgtggacgctcactggcgtcttt

SEQ ID NO: 43502 - DNA, 25 bp, Artificial
  probe
  misc_feature (1)..(25): SEQ ID NO: 3173; WAN024A5R_at; Start 15; Stop 39
tggacgctcactggcgtcttttaac

SEQ ID NO: 43503 - DNA, 25 bp, Artificial
  probe
  misc_feature (1)..(25): SEQ ID NO: 3173; WAN024A5R_at; Start 21; Stop 45
ctcactggcgtcttttaacgtcttg

SEQ ID NO: 43504 - DNA, 25 bp, Artificial
  probe
  misc_feature (1)..(25): SEQ ID NO: 3173; WAN024A5R_at; Start 22; Stop 46
tcactggcgtcttttaacgtcttgt

SEQ ID NO: 43505 - DNA, 25 bp, Artificial
  probe
  misc_feature (1)..(25): SEQ ID NO: 3173; WAN024A5R_at; Start 2; Stop 26
ttttcacctctcgtggacgctcact

SEQ ID NO: 43506 - DNA, 25 bp, Artificial
  probe
  misc_feature (1)..(25): SEQ ID NO: 3173; WAN024A5R_at; Start 19; Stop 43
cgctcactggcgtcttttaacgtct

SEQ ID NO: 43507 - DNA, 25 bp, Artificial
  probe
  misc_feature (1)..(25): SEQ ID NO: 3173; WAN024A5R_at; Start 18; Stop 42
acgctcactggcgtcttttaacgtc

SEQ ID NO: 43508 - DNA, 25 bp, Artificial
  probe
  misc_feature (1)..(25): SEQ ID NO: 3173; WAN024A5R_at; Start 9; Stop 33
ctctcgtggacgctcactggcgtct

SEQ ID NO: 43509 - DNA, 25 bp, Artificial
  probe
  misc_feature (1)..(25): SEQ ID NO: 3173; WAN024A5R_at; Start 12; Stop 36
tcgtggacgctcactggcgtctttt

SEQ ID NO: 43510 - DNA, 25 bp, Artificial
  probe
  misc_feature (1)..(25): SEQ ID NO: 3173; WAN024A5R_at; Start 24; Stop 48
actggcgtcttttaacgtcttgtgt

SEQ ID NO: 43511 - DNA, 25 bp, Artificial
  probe
  misc_feature (1)..(25): SEQ ID NO: 3173; WAN024A5R_at; Start 13; Stop 37
cgtggacgctcactggcgtctttta

SEQ ID NO: 43512 - DNA, 25 bp, Artificial
  probe
  misc_feature (1)..(25): SEQ ID NO: 3173; WAN024A5R_at; Start 6; Stop 30
cacctctcgtggacgctcactggcg

SEQ ID NO: 43513 - DNA, 25 bp, Artificial
  probe
  misc_feature (1)..(25): SEQ ID NO: 3173; WAN024A5R_at; Start 1; Stop 25
attttcacctctcgtggacgctcac

SEQ ID NO: 43514 - DNA, 25 bp, Artificial
  probe
  misc_feature (1)..(25): SEQ ID NO: 3173; WAN024A5R_at; Start 10; Stop 34
tctcgtggacgctcactggcgtctt

SEQ ID NO: 43515 - DNA, 25 bp, Artificial
  probe
  misc_feature (1)..(25): SEQ ID NO: 3173; WAN024A5R_at; Start 20; Stop 44
gctcactggcgtcttttaacgtctt

SEQ ID NO: 43516 - DNA, 25 bp, Artificial
  probe
  misc_feature (1)..(25): SEQ ID NO: 3173; WAN024A5R_at; Start 5; Stop 29
tcacctctcgtggacgctcactggc

SEQ ID NO: 43517 - DNA, 25 bp, Artificial
  probe
  misc_feature (1)..(25): SEQ ID NO: 3173; WAN024A5R_at; Start 4; Stop 28
ttcacctctcgtggacgctcactgg

SEQ ID NO: 43518 - DNA, 25 bp, Artificial
  probe
  misc_feature (1)..(25): SEQ ID NO: 562; WAN024A5S_at; Start 185; Stop 209
gacgaatagaaagcgattgaatttt

SEQ ID NO: 43519 - DNA, 25 bp, Artificial
  probe
  misc_feature (1)..(25): SEQ ID NO: 562; WAN024A5S_at; Start 74; Stop 98
ataactatctttttagcaccgtccg

SEQ ID NO: 43520 - DNA, 25 bp, Artificial
  probe
  misc_feature (1)..(25): SEQ ID NO: 562; WAN024A5S_at; Start 264; Stop 288
tccgtccgtgttcagttacataaat

SEQ ID NO: 43521 - DNA, 25 bp, Artificial
  probe
  misc_feature (1)..(25): SEQ ID NO: 562; WAN024A5S_at; Start 156; Stop 180
ctcagggcgacattaaataagatac

SEQ ID NO: 43522 - DNA, 25 bp, Artificial
  probe
  misc_feature (1)..(25): SEQ ID NO: 562; WAN024A5S_at; Start 212; Stop 236
gaaatcaaggaaggattgacaatcc

SEQ ID NO: 43523 - DNA, 25 bp, Artificial
  probe
  misc_feature (1)..(25): SEQ ID NO: 562; WAN024A5S_at; Start 42; Stop 66
ggagttatgacgaagaactgtcagt

SEQ ID NO: 43524 - DNA, 25 bp, Artificial
  probe
  misc_feature (1)..(25): SEQ ID NO: 562; WAN024A5S_at; Start 125; Stop 149
ggagcacccttctcctttctattcg

SEQ ID NO: 43525 - DNA, 25 bp, Artificial
  probe
  misc_feature (1)..(25): SEQ ID NO: 562; WAN024A5S_at; Start 178; Stop 202
tacaaaggacgaatagaaagcgatt

SEQ ID NO: 43526 - DNA, 25 bp, Artificial
  probe
  misc_feature (1)..(25): SEQ ID NO: 562; WAN024A5S_at; Start 106; Stop 130
tattcagttcagcaaatacggagca

SEQ ID NO: 43527 - DNA, 25 bp, Artificial
  probe
  misc_feature (1)..(25): SEQ ID NO: 562; WAN024A5S_at; Start 117; Stop 141
gcaaatacggagcacccttctcctt

SEQ ID NO: 43528 - DNA, 25 bp, Artificial
  probe
  misc_feature (1)..(25): SEQ ID NO: 562; WAN024A5S_at; Start 56; Stop 80
gaactgtcagttctaggaataacta

SEQ ID NO: 43529 - DNA, 25 bp, Artificial
  probe
  misc_feature (1)..(25): SEQ ID NO: 562; WAN024A5S_at; Start 112; Stop 136
gttcagcaaatacggagcacccttc

SEQ ID NO: 43530 - DNA, 25 bp, Artificial
  probe
  misc_feature (1)..(25): SEQ ID NO: 562; WAN024A5S_at; Start 223; Stop 247
aggattgacaatccaagttggtttc

SEQ ID NO: 43531 - DNA, 25 bp, Artificial
  probe
  misc_feature (1)..(25): SEQ ID NO: 562; WAN024A5S_at; Start 276; Stop 300
cagttacataaattctccgacgagc

SEQ ID NO: 43532 - DNA, 25 bp, Artificial
  probe
  misc_feature (1)..(25): SEQ ID NO: 562; WAN024A5S_at; Start 59; Stop 83
ctgtcagttctaggaataactatct

SEQ ID NO: 43533 - DNA, 25 bp, Artificial
  probe
  misc_feature (1)..(25): SEQ ID NO: 562; WAN024A5S_at; Start 35; Stop 59
taaaataggagttatgacgaagaac

SEQ ID NO: 43534 - DNA, 25 bp, Artificial
  probe
  misc_feature (1)..(25): SEQ ID NO: 562; WAN024A5S_at; Start 193; Stop 217
gaaagcgattgaattttaggaaatc

SEQ ID NO: 43535 - DNA, 25 bp, Artificial
  probe
  misc_feature (1)..(25): SEQ ID NO: 562; WAN024A5S_at; Start 259; Stop 283
agctttccgtccgtgttcagttaca

SEQ ID NO: 43536 - DNA, 25 bp, Artificial
  probe
  misc_feature (1)..(25): SEQ ID NO: 562; WAN024A5S_at; Start 152; Stop 176
gcctctcagggcgacattaaataag

SEQ ID NO: 43537 - DNA, 25 bp, Artificial
  probe
  misc_feature (1)..(25): SEQ ID NO: 562; WAN024A5S_at; Start 139; Stop 163
ctttctattcgtcgcctctcagggc

SEQ ID NO: 43538 - DNA, 25 bp, Artificial
  probe
  misc_feature (1)..(25): SEQ ID NO: 562; WAN024A5S_at; Start 18; Stop 42
tgtcaagcggacaaagctaaaatag

SEQ ID NO: 43539 - DNA, 25 bp, Artificial
  probe
  misc_feature (1)..(25): SEQ ID NO: 562; WAN024A5S_at; Start 164; Stop 188
gacattaaataagatacaaaggacg

SEQ ID NO: 43540 - DNA, 25 bp, Artificial
  probe
  misc_feature (1)..(25): SEQ ID NO: 562; WAN024A5S_at; Start 24; Stop 48
gcggacaaagctaaaataggagtta

SEQ ID NO: 43541 - DNA, 25 bp, Artificial
  probe
  misc_feature (1)..(25): SEQ ID NO: 562; WAN024A5S_at; Start 109; Stop 133
tcagttcagcaaatacggagcaccc

SEQ ID NO: 43542 - DNA, 25 bp, Artificial
  probe
  misc_feature (1)..(25): SEQ ID NO: 562; WAN024A5S_at; Start 2; Stop 26
tataagatattaagggtgtcaagcg

SEQ ID NO: 43543 - DNA, 25 bp, Artificial
  probe
  misc_feature (1)..(25): SEQ ID NO: 562; WAN024A5S_at; Start 288; Stop 312
ttctccgacgagcttttactcgttc

SEQ ID NO: 43544 - DNA, 25 bp, Artificial
  probe
  misc_feature (1)..(25): SEQ ID NO: 562; WAN024A5S_at; Start 29; Stop 53
caaagctaaaataggagttatgacg

SEQ ID NO: 43545 - DNA, 25 bp, Artificial
  probe
  misc_feature (1)..(25): SEQ ID NO: 562; WAN024A5S_at; Start 285; Stop 309
aaattctccgacgagcttttactcg

SEQ ID NO: 43546 - DNA, 25 bp, Artificial
  probe
  misc_feature (1)..(25): SEQ ID NO: 562; WAN024A5S_at; Start 248; Stop 272
tctacattctgagctttccgtccgt

SEQ ID NO: 43547 - DNA, 25 bp, Artificial
  probe
  misc_feature (1)..(25): SEQ ID NO: 562; WAN024A5S_at; Start 235; Stop 259
ccaagttggtttctctacattctga

SEQ ID NO: 43548 - DNA, 25 bp, Artificial
  probe
  misc_feature (1)..(25): SEQ ID NO: 562; WAN024A5S_at; Start 252; Stop 276
cattctgagctttccgtccgtgttc

SEQ ID NO: 43549 - DNA, 25 bp, Artificial
  probe
  misc_feature (1)..(25): SEQ ID NO: 562; WAN024A5S_at; Start 207; Stop 231
tttaggaaatcaaggaaggattgac

SEQ ID NO: 43550 - DNA, 25 bp, Artificial
  probe
  misc_feature (1)..(25): SEQ ID NO: 562; WAN024A5S_at; Start 6; Stop 30
agatattaagggtgtcaagcggaca

SEQ ID NO: 43551 - DNA, 25 bp, Artificial
  probe
  misc_feature (1)..(25): SEQ ID NO: 562; WAN024A5S_at; Start 88; Stop 112
agcaccgtccgtagcccgtattcag

SEQ ID NO: 43552 - DNA, 25 bp, Artificial
  probe
  misc_feature (1)..(25): SEQ ID NO: 3549; WAN024A5T_at; Start 177; Stop 201
gaagggtgctccgtatttgctgaac

SEQ ID NO: 43553 - DNA, 25 bp, Artificial
  probe
  misc_feature (1)..(25): SEQ ID NO: 3549; WAN024A5T_at; Start 215; Stop 239
cggacggtgctaaaaagatagttat

SEQ ID NO: 43554 - DNA, 25 bp, Artificial
  probe
  misc_feature (1)..(25): SEQ ID NO: 3549; WAN024A5T_at; Start 141; Stop 165
tttaatgtcgccctgagaggcgacg

SEQ ID NO: 43555 - DNA, 25 bp, Artificial
  probe
  misc_feature (1)..(25): SEQ ID NO: 3549; WAN024A5T_at; Start 265; Stop 289
taactcctattttagctttgtccgc

SEQ ID NO: 43556 - DNA, 25 bp, Artificial
  probe
  misc_feature (1)..(25): SEQ ID NO: 3549; WAN024A5T_at; Start 44; Stop 68
gacggaaagctcagaatgtagagaa

SEQ ID NO: 43557 - DNA, 25 bp, Artificial
  probe
  misc_feature (1)..(25): SEQ ID NO: 3549; WAN024A5T_at; Start 233; Stop 257
tagttattcctagaactgacagttc

SEQ ID NO: 43558 - DNA, 25 bp, Artificial
  probe
  misc_feature (1)..(25): SEQ ID NO: 3549; WAN024A5T_at; Start 13; Stop 37
gctcgtcggagaatttatgtaactg

SEQ ID NO: 43559 - DNA, 25 bp, Artificial
  probe
  misc_feature (1)..(25): SEQ ID NO: 3549; WAN024A5T_at; Start 114; Stop 138
cgctttctattcgtcctttgtatct

SEQ ID NO: 43560 - DNA, 25 bp, Artificial
  probe
  misc_feature (1)..(25): SEQ ID NO: 3549; WAN024A5T_at; Start 210; Stop 234
ggctacggacggtgctaaaaagata

SEQ ID NO: 43561 - DNA, 25 bp, Artificial
  probe
  misc_feature (1)..(25): SEQ ID NO: 3549; WAN024A5T_at; Start 133; Stop 157
gtatcttatttaatgtcgccctgag

SEQ ID NO: 43562 - DNA, 25 bp, Artificial
  probe
  misc_feature (1)..(25): SEQ ID NO: 3549; WAN024A5T_at; Start 105; Stop 129
aaattcaatcgctttctattcgtcc

SEQ ID NO: 43563 - DNA, 25 bp, Artificial
  probe
  misc_feature (1)..(25): SEQ ID NO: 3549; WAN024A5T_at; Start 164; Stop 188
cgaatagaaaggagaagggtgctcc

SEQ ID NO: 43564 - DNA, 25 bp, Artificial
  probe
  misc_feature (1)..(25): SEQ ID NO: 3549; WAN024A5T_at; Start 30; Stop 54
tgtaactgaacacggacggaaagct

SEQ ID NO: 43565 - DNA, 25 bp, Artificial
  probe
  misc_feature (1)..(25): SEQ ID NO: 3549; WAN024A5T_at; Start 92; Stop 116
ccttgatttcctaaaattcaatcgc

SEQ ID NO: 43566 - DNA, 25 bp, Artificial
  probe
  misc_feature (1)..(25): SEQ ID NO: 3549; WAN024A5T_at; Start 245; Stop 269
gaactgacagttcttcgtcataact

SEQ ID NO: 43567 - DNA, 25 bp, Artificial
  probe
  misc_feature (1)..(25): SEQ ID NO: 3549; WAN024A5T_at; Start 184; Stop 208
gctccgtatttgctgaactgaatac

SEQ ID NO: 43568 - DNA, 25 bp, Artificial
  probe
  misc_feature (1)..(25): SEQ ID NO: 3549; WAN024A5T_at; Start 137; Stop 161
cttatttaatgtcgccctgagaggc

SEQ ID NO: 43569 - DNA, 25 bp, Artificial
  probe
  misc_feature (1)..(25): SEQ ID NO: 3549; WAN024A5T_at; Start 78; Stop 102
gattgtcaatccttccttgatttcc

SEQ ID NO: 43570 - DNA, 25 bp, Artificial
  probe
  misc_feature (1)..(25): SEQ ID NO: 3549; WAN024A5T_at; Start 66; Stop 90
gaaaccaacttggattgtcaatcct

SEQ ID NO: 43571 - DNA, 25 bp, Artificial
  probe
  misc_feature (1)..(25): SEQ ID NO: 3549; WAN024A5T_at; Start 32; Stop 56
taactgaacacggacggaaagctca

SEQ ID NO: 43572 - DNA, 25 bp, Artificial
  probe
  misc_feature (1)..(25): SEQ ID NO: 3549; WAN024A5T_at; Start 219; Stop 243
cggtgctaaaaagatagttattcct

SEQ ID NO: 43573 - DNA, 25 bp, Artificial
  probe
  misc_feature (1)..(25): SEQ ID NO: 3549; WAN024A5T_at; Start 150; Stop 174
gccctgagaggcgacgaatagaaag

SEQ ID NO: 43574 - DNA, 25 bp, Artificial
  probe
  misc_feature (1)..(25): SEQ ID NO: 3549; WAN024A5T_at; Start 288; Stop 312
gcttgacacccttaatatcttatat

SEQ ID NO: 43575 - DNA, 25 bp, Artificial
  probe
  misc_feature (1)..(25): SEQ ID NO: 3549; WAN024A5T_at; Start 181; Stop 205
ggtgctccgtatttgctgaactgaa

SEQ ID NO: 43576 - DNA, 25 bp, Artificial
  probe
  misc_feature (1)..(25): SEQ ID NO: 3549; WAN024A5T_at; Start 272; Stop 296
tattttagctttgtccgcttgacac

SEQ ID NO: 43577 - DNA, 25 bp, Artificial
  probe
  misc_feature (1)..(25): SEQ ID NO: 3549; WAN024A5T_at; Start 36; Stop 60
tgaacacggacggaaagctcagaat

SEQ ID NO: 43578 - DNA, 25 bp, Artificial
  probe
  misc_feature (1)..(25): SEQ ID NO: 3549; WAN024A5T_at; Start 23; Stop 47
gaatttatgtaactgaacacggacg

SEQ ID NO: 43579 - DNA, 25 bp, Artificial
  probe
  misc_feature (1)..(25): SEQ ID NO: 3549; WAN024A5T_at; Start 40; Stop 64
cacggacggaaagctcagaatgtag

SEQ ID NO: 43580 - DNA, 25 bp, Artificial
  probe
  misc_feature (1)..(25): SEQ ID NO: 3549; WAN024A5T_at; Start 57; Stop 81
gaatgtagagaaaccaacttggatt

SEQ ID NO: 43581 - DNA, 25 bp, Artificial
  probe
  misc_feature (1)..(25): SEQ ID NO: 3549; WAN024A5T_at; Start 250; Stop 274
gacagttcttcgtcataactcctat

SEQ ID NO: 43582 - DNA, 25 bp, Artificial
  probe
  misc_feature (1)..(25): SEQ ID NO: 3549; WAN024A5T_at; Start 201; Stop 225
ctgaatacgggctacggacggtgct

SEQ ID NO: 43583 - DNA, 25 bp, Artificial
  probe
  misc_feature (1)..(25): SEQ ID NO: 3549; WAN024A5T_at; Start 54; Stop 78
tcagaatgtagagaaaccaacttgg

SEQ ID NO: 43584 - DNA, 25 bp, Artificial
  probe
  misc_feature (1)..(25): SEQ ID NO: 3549; WAN024A5T_at; Start 1; Stop 25
gaacgagtaaaagctcgtcggagaa

SEQ ID NO: 43585 - DNA, 25 bp, Artificial
  probe
  misc_feature (1)..(25): SEQ ID NO: 3549; WAN024A5T_at; Start 284; Stop 308
gtccgcttgacacccttaatatctt

SEQ ID NO: 43586 - DNA, 25 bp, Artificial
  probe
  misc_feature (1)..(25): SEQ ID NO: 4588; WAN024A5U_at; Start 37; Stop 61
gctaataagaaatgaagggcagtaa

SEQ ID NO: 43587 - DNA, 25 bp, Artificial
  probe
  misc_feature (1)..(25): SEQ ID NO: 4588; WAN024A5U_at; Start 114; Stop 138
gaaagtatattattctgaaggactc

SEQ ID NO: 43588 - DNA, 25 bp, Artificial
  probe
  misc_feature (1)..(25): SEQ ID NO: 4588; WAN024A5U_at; Start 225; Stop 249
gcataattctcctattctagaaggg

SEQ ID NO: 43589 - DNA, 25 bp, Artificial
  probe
  misc_feature (1)..(25): SEQ ID NO: 4588; WAN024A5U_at; Start 33; Stop 57
gttagctaataagaaatgaagggca

SEQ ID NO: 43590 - DNA, 25 bp, Artificial
  probe
  misc_feature (1)..(25): SEQ ID NO: 4588; WAN024A5U_at; Start 7; Stop 31
tacctcgtttttcattatatcataa

SEQ ID NO: 43591 - DNA, 25 bp, Artificial
  probe
  misc_feature (1)..(25): SEQ ID NO: 4588; WAN024A5U_at; Start 235; Stop 259
cctattctagaaggggaggaccagt

SEQ ID NO: 43592 - DNA, 25 bp, Artificial
  probe
  misc_feature (1)..(25): SEQ ID NO: 4588; WAN024A5U_at; Start 64; Stop 88
caagtaatcactttgaagtttcaaa

SEQ ID NO: 43593 - DNA, 25 bp, Artificial
  probe
  misc_feature (1)..(25): SEQ ID NO: 4588; WAN024A5U_at; Start 134; Stop 158
gactctaaaatttcgcagccattta

SEQ ID NO: 43594 - DNA, 25 bp, Artificial
  probe
  misc_feature (1)..(25): SEQ ID NO: 4588; WAN024A5U_at; Start 71; Stop 95
tcactttgaagtttcaaatcttaag

SEQ ID NO: 43595 - DNA, 25 bp, Artificial
  probe
  misc_feature (1)..(25): SEQ ID NO: 4588; WAN024A5U_at; Start 127; Stop 151
tctgaaggactctaaaatttcgcag

SEQ ID NO: 43596 - DNA, 25 bp, Artificial
  probe
  misc_feature (1)..(25): SEQ ID NO: 4588; WAN024A5U_at; Start 253; Stop 277
gaccagtatttcttttatgatagga

SEQ ID NO: 43597 - DNA, 25 bp, Artificial
  probe
  misc_feature (1)..(25): SEQ ID NO: 4588; WAN024A5U_at; Start 168; Stop 192
gctacagaattcctagtcattacta

SEQ ID NO: 43598 - DNA, 25 bp, Artificial
  probe
  misc_feature (1)..(25): SEQ ID NO: 4588; WAN024A5U_at; Start 284; Stop 308
tgtggtataatagagagaataagtt

SEQ ID NO: 43599 - DNA, 25 bp, Artificial
  probe
  misc_feature (1)..(25): SEQ ID NO: 4588; WAN024A5U_at; Start 178; Stop 202
tcctagtcattactagaaatggact

SEQ ID NO: 43600 - DNA, 25 bp, Artificial
  probe
  misc_feature (1)..(25): SEQ ID NO: 4588; WAN024A5U_at; Start 162; Stop 186
gtaattgctacagaattcctagtca

SEQ ID NO: 43601 - DNA, 25 bp, Artificial
  probe
  misc_feature (1)..(25): SEQ ID NO: 4588; WAN024A5U_at; Start 220; Stop 244
gaactgcataattctcctattctag

SEQ ID NO: 43602 - DNA, 25 bp, Artificial
  probe
  misc_feature (1)..(25): SEQ ID NO: 4588; WAN024A5U_at; Start 193; Stop 217
gaaatggactagtttctttgaataa

SEQ ID NO: 43603 - DNA, 25 bp, Artificial
  probe
  misc_feature (1)..(25): SEQ ID NO: 4588; WAN024A5U_at; Start 248; Stop 272
gggaggaccagtatttcttttatga

SEQ ID NO: 43604 - DNA, 25 bp, Artificial
  probe
  misc_feature (1)..(25): SEQ ID NO: 4588; WAN024A5U_at; Start 124; Stop 148
tattctgaaggactctaaaatttcg

SEQ ID NO: 43605 - DNA, 25 bp, Artificial
  probe
  misc_feature (1)..(25): SEQ ID NO: 4588; WAN024A5U_at; Start 212; Stop 236
gaataatagaactgcataattctcc

SEQ ID NO: 43606 - DNA, 25 bp, Artificial
  probe
  misc_feature (1)..(25): SEQ ID NO: 4588; WAN024A5U_at; Start 147; Stop 171
cgcagccatttattagtaattgcta

SEQ ID NO: 43607 - DNA, 25 bp, Artificial
  probe
  misc_feature (1)..(25): SEQ ID NO: 4588; WAN024A5U_at; Start 55; Stop 79
gcagtaagtcaagtaatcactttga

SEQ ID NO: 43608 - DNA, 25 bp, Artificial
  probe
  misc_feature (1)..(25): SEQ ID NO: 4588; WAN024A5U_at; Start 141; Stop 165
aaatttcgcagccatttattagtaa

SEQ ID NO: 43609 - DNA, 25 bp, Artificial
  probe
  misc_feature (1)..(25): SEQ ID NO: 4588; WAN024A5U_at; Start 130; Stop 154
gaaggactctaaaatttcgcagcca

SEQ ID NO: 43610 - DNA, 25 bp, Artificial
  probe
  misc_feature (1)..(25): SEQ ID NO: 4588; WAN024A5U_at; Start 22; Stop 46
tatatcataaagttagctaataaga

SEQ ID NO: 43611 - DNA, 25 bp, Artificial
  probe
  misc_feature (1)..(25): SEQ ID NO: 4588; WAN024A5U_at; Start 45; Stop 69
gaaatgaagggcagtaagtcaagta

SEQ ID NO: 43612 - DNA, 25 bp, Artificial
  probe
  misc_feature (1)..(25): SEQ ID NO: 4588; WAN024A5U_at; Start 40; Stop 64
aataagaaatgaagggcagtaagtc

SEQ ID NO: 43613 - DNA, 25 bp, Artificial
  probe
  misc_feature (1)..(25): SEQ ID NO: 4588; WAN024A5U_at; Start 151; Stop 175
gccatttattagtaattgctacaga

SEQ ID NO: 43614 - DNA, 25 bp, Artificial
  probe
  misc_feature (1)..(25): SEQ ID NO: 4588; WAN024A5U_at; Start 50; Stop 74
gaagggcagtaagtcaagtaatcac

SEQ ID NO: 43615 - DNA, 25 bp, Artificial
  probe
  misc_feature (1)..(25): SEQ ID NO: 4588; WAN024A5U_at; Start 276; Stop 300
gactagattgtggtataatagagag

SEQ ID NO: 43616 - DNA, 25 bp, Artificial
  probe
  misc_feature (1)..(25): SEQ ID NO: 4588; WAN024A5U_at; Start 199; Stop 223
gactagtttctttgaataatagaac

SEQ ID NO: 43617 - DNA, 25 bp, Artificial
  probe
  misc_feature (1)..(25): SEQ ID NO: 4588; WAN024A5U_at; Start 106; Stop 130
tctttaaggaaagtatattattctg

SEQ ID NO: 43618 - DNA, 25 bp, Artificial
  probe
  misc_feature (1)..(25): SEQ ID NO: 4588; WAN024A5U_at; Start 185; Stop 209
cattactagaaatggactagtttct

SEQ ID NO: 43619 - DNA, 25 bp, Artificial
  probe
  misc_feature (1)..(25): SEQ ID NO: 4588; WAN024A5U_at; Start 264; Stop 288
cttttatgataggactagattgtgg

SEQ ID NO: 43620 - DNA, 25 bp, Artificial
  probe
  misc_feature (1)..(25): SEQ ID NO: 3298; WAN024A5V_at; Start 92; Stop 116
ctagaataggagaattatgcagttc

SEQ ID NO: 43621 - DNA, 25 bp, Artificial
  probe
  misc_feature (1)..(25): SEQ ID NO: 3298; WAN024A5V_at; Start 165; Stop 189
tagcaattactaataaatggctgcg

SEQ ID NO: 43622 - DNA, 25 bp, Artificial
  probe
  misc_feature (1)..(25): SEQ ID NO: 3298; WAN024A5V_at; Start 28; Stop 52
aacttattctctctattataccaca

SEQ ID NO: 43623 - DNA, 25 bp, Artificial
  probe
  misc_feature (1)..(25): SEQ ID NO: 3298; WAN024A5V_at; Start 198; Stop 222
gagtccttcagaataatatactttc

SEQ ID NO: 43624 - DNA, 25 bp, Artificial
  probe
  misc_feature (1)..(25): SEQ ID NO: 3298; WAN024A5V_at; Start 311; Stop 335
tataatgaaaaacgaggtaaattga

SEQ ID NO: 43625 - DNA, 25 bp, Artificial
  probe
  misc_feature (1)..(25): SEQ ID NO: 3298; WAN024A5V_at; Start 128; Stop 152
gaaactagtccatttctagtaatga

SEQ ID NO: 43626 - DNA, 25 bp, Artificial
  probe
  misc_feature (1)..(25): SEQ ID NO: 3298; WAN024A5V_at; Start 178; Stop 202
taaatggctgcgaaattttagagtc

SEQ ID NO: 43627 - DNA, 25 bp, Artificial
  probe
  misc_feature (1)..(25): SEQ ID NO: 3298; WAN024A5V_at; Start 262; Stop 286
gtgattacttgacttactgcccttc

SEQ ID NO: 43628 - DNA, 25 bp, Artificial
  probe
  misc_feature (1)..(25): SEQ ID NO: 3298; WAN024A5V_at; Start 134; Stop 158
agtccatttctagtaatgactagga

SEQ ID NO: 43629 - DNA, 25 bp, Artificial
  probe
  misc_feature (1)..(25): SEQ ID NO: 3298; WAN024A5V_at; Start 115; Stop 139
tctattattcaaagaaactagtcca

SEQ ID NO: 43630 - DNA, 25 bp, Artificial
  probe
  misc_feature (1)..(25): SEQ ID NO: 3298; WAN024A5V_at; Start 144; Stop 168
tagtaatgactaggaattctgtagc

SEQ ID NO: 43631 - DNA, 25 bp, Artificial
  probe
  misc_feature (1)..(25): SEQ ID NO: 3298; WAN024A5V_at; Start 272; Stop 296
gacttactgcccttcatttcttatt

SEQ ID NO: 43632 - DNA, 25 bp, Artificial
  probe
  misc_feature (1)..(25): SEQ ID NO: 3298; WAN024A5V_at; Start 35; Stop 59
tctctctattataccacaatctagt

SEQ ID NO: 43633 - DNA, 25 bp, Artificial
  probe
  misc_feature (1)..(25): SEQ ID NO: 3298; WAN024A5V_at; Start 168; Stop 192
caattactaataaatggctgcgaaa

SEQ ID NO: 43634 - DNA, 25 bp, Artificial
  probe
  misc_feature (1)..(25): SEQ ID NO: 3298; WAN024A5V_at; Start 306; Stop 330
tatgatataatgaaaaacgaggtaa

SEQ ID NO: 43635 - DNA, 25 bp, Artificial
  probe
  misc_feature (1)..(25): SEQ ID NO: 3298; WAN024A5V_at; Start 183; Stop 207
ggctgcgaaattttagagtccttca

SEQ ID NO: 43636 - DNA, 25 bp, Artificial
  probe
  misc_feature (1)..(25): SEQ ID NO: 3298; WAN024A5V_at; Start 241; Stop 265
cttaagatttgaaacttcaaagtga

SEQ ID NO: 43637 - DNA, 25 bp, Artificial
  probe
  misc_feature (1)..(25): SEQ ID NO: 3298; WAN024A5V_at; Start 187; Stop 211
gcgaaattttagagtccttcagaat

SEQ ID NO: 43638 - DNA, 25 bp, Artificial
  probe
  misc_feature (1)..(25): SEQ ID NO: 3298; WAN024A5V_at; Start 80; Stop 104
ggtcctccccttctagaataggaga

SEQ ID NO: 43639 - DNA, 25 bp, Artificial
  probe
  misc_feature (1)..(25): SEQ ID NO: 3298; WAN024A5V_at; Start 205; Stop 229
tcagaataatatactttccttaaag

SEQ ID NO: 43640 - DNA, 25 bp, Artificial
  probe
  misc_feature (1)..(25): SEQ ID NO: 3298; WAN024A5V_at; Start 64; Stop 88
tcataaaagaaatactggtcctccc

SEQ ID NO: 43641 - DNA, 25 bp, Artificial
  probe
  misc_feature (1)..(25): SEQ ID NO: 3298; WAN024A5V_at; Start 49; Stop 73
cacaatctagtcctatcataaaaga

SEQ ID NO: 43642 - DNA, 25 bp, Artificial
  probe
  misc_feature (1)..(25): SEQ ID NO: 3298; WAN024A5V_at; Start 41; Stop 65
tattataccacaatctagtcctatc

SEQ ID NO: 43643 - DNA, 25 bp, Artificial
  probe
  misc_feature (1)..(25): SEQ ID NO: 3298; WAN024A5V_at; Start 77; Stop 101
actggtcctccccttctagaatagg

SEQ ID NO: 43644 - DNA, 25 bp, Artificial
  probe
  misc_feature (1)..(25): SEQ ID NO: 3298; WAN024A5V_at; Start 286; Stop 310
catttcttattagctaactttatga

SEQ ID NO: 43645 - DNA, 25 bp, Artificial
  probe
  misc_feature (1)..(25): SEQ ID NO: 3298; WAN024A5V_at; Start 279; Stop 303
tgcccttcatttcttattagctaac

SEQ ID NO: 43646 - DNA, 25 bp, Artificial
  probe
  misc_feature (1)..(25): SEQ ID NO: 3298; WAN024A5V_at; Start 161; Stop 185
tctgtagcaattactaataaatggc

SEQ ID NO: 43647 - DNA, 25 bp, Artificial
  probe
  misc_feature (1)..(25): SEQ ID NO: 3298; WAN024A5V_at; Start 259; Stop 283
aaagtgattacttgacttactgccc

SEQ ID NO: 43648 - DNA, 25 bp, Artificial
  probe
  misc_feature (1)..(25): SEQ ID NO: 3298; WAN024A5V_at; Start 264; Stop 288
gattacttgacttactgcccttcat

SEQ ID NO: 43649 - DNA, 25 bp, Artificial
  probe
  misc_feature (1)..(25): SEQ ID NO: 3298; WAN024A5V_at; Start 87; Stop 111
cccttctagaataggagaattatgc

SEQ ID NO: 43650 - DNA, 25 bp, Artificial
  probe
  misc_feature (1)..(25): SEQ ID NO: 3298; WAN024A5V_at; Start 250; Stop 274
tgaaacttcaaagtgattacttgac

SEQ ID NO: 43651 - DNA, 25 bp, Artificial
  probe
  misc_feature (1)..(25): SEQ ID NO: 3298; WAN024A5V_at; Start 151; Stop 175
gactaggaattctgtagcaattact

SEQ ID NO: 43652 - DNA, 25 bp, Artificial
  probe
  misc_feature (1)..(25): SEQ ID NO: 3298; WAN024A5V_at; Start 72; Stop 96
gaaatactggtcctccccttctaga

SEQ ID NO: 43653 - DNA, 25 bp, Artificial
  probe
  misc_feature (1)..(25): SEQ ID NO: 3298; WAN024A5V_at; Start 104; Stop 128
aattatgcagttctattattcaaag

SEQ ID NO: 43654 - DNA, 25 bp, Artificial
  probe
  misc_feature (1)..(25): SEQ ID NO: 434; WAN024A5W_at; Start 59; Stop 83
aatagatagatgagtagaaaaagaa

SEQ ID NO: 43655 - DNA, 25 bp, Artificial
  probe
  misc_feature (1)..(25): SEQ ID NO: 434; WAN024A5W_at; Start 3; Stop 27
attccaacatctgacaaaatagtcg

SEQ ID NO: 43656 - DNA, 25 bp, Artificial
  probe
  misc_feature (1)..(25): SEQ ID NO: 434; WAN024A5W_at; Start 6; Stop 30
ccaacatctgacaaaatagtcggat

SEQ ID NO: 43657 - DNA, 25 bp, Artificial
  probe
  misc_feature (1)..(25): SEQ ID NO: 434; WAN024A5W_at; Start 1; Stop 25
agattccaacatctgacaaaatagt

SEQ ID NO: 43658 - DNA, 25 bp, Artificial
  probe
  misc_feature (1)..(25): SEQ ID NO: 434; WAN024A5W_at; Start 17; Stop 41
caaaatagtcggatgttttttgatt

SEQ ID NO: 43659 - DNA, 25 bp, Artificial
  probe
  misc_feature (1)..(25): SEQ ID NO: 434; WAN024A5W_at; Start 46; Stop 70
acgaacttttacgaatagatagatg

SEQ ID NO: 43660 - DNA, 25 bp, Artificial
  probe
  misc_feature (1)..(25): SEQ ID NO: 434; WAN024A5W_at; Start 10; Stop 34
catctgacaaaatagtcggatgttt

SEQ ID NO: 43661 - DNA, 25 bp, Artificial
  probe
  misc_feature (1)..(25): SEQ ID NO: 434; WAN024A5W_at; Start 14; Stop 38
tgacaaaatagtcggatgttttttg

SEQ ID NO: 43662 - DNA, 25 bp, Artificial
  probe
  misc_feature (1)..(25): SEQ ID NO: 434; WAN024A5W_at; Start 44; Stop 68
ttacgaacttttacgaatagataga

SEQ ID NO: 43663 - DNA, 25 bp, Artificial
  probe
  misc_feature (1)..(25): SEQ ID NO: 434; WAN024A5W_at; Start 55; Stop 79
tacgaatagatagatgagtagaaaa

SEQ ID NO: 43664 - DNA, 25 bp, Artificial
  probe
  misc_feature (1)..(25): SEQ ID NO: 434; WAN024A5W_at; Start 48; Stop 72
gaacttttacgaatagatagatgag

SEQ ID NO: 43665 - DNA, 25 bp, Artificial
  probe
  misc_feature (1)..(25): SEQ ID NO: 434; WAN024A5W_at; Start 49; Stop 73
aacttttacgaatagatagatgagt

SEQ ID NO: 43666 - DNA, 25 bp, Artificial
  probe
  misc_feature (1)..(25): SEQ ID NO: 434; WAN024A5W_at; Start 58; Stop 82
gaatagatagatgagtagaaaaaga

SEQ ID NO: 43667 - DNA, 25 bp, Artificial
  probe
  misc_feature (1)..(25): SEQ ID NO: 434; WAN024A5W_at; Start 52; Stop 76
ttttacgaatagatagatgagtaga

SEQ ID NO: 43668 - DNA, 25 bp, Artificial
  probe
  misc_feature (1)..(25): SEQ ID NO: 434; WAN024A5W_at; Start 50; Stop 74
acttttacgaatagatagatgagta

SEQ ID NO: 43669 - DNA, 25 bp, Artificial
  probe
  misc_feature (1)..(25): SEQ ID NO: 434; WAN024A5W_at; Start 11; Stop 35
atctgacaaaatagtcggatgtttt

SEQ ID NO: 43670 - DNA, 25 bp, Artificial
  probe
  misc_feature (1)..(25): SEQ ID NO: 434; WAN024A5W_at; Start 51; Stop 75
cttttacgaatagatagatgagtag

SEQ ID NO: 43671 - DNA, 25 bp, Artificial
  probe
  misc_feature (1)..(25): SEQ ID NO: 434; WAN024A5W_at; Start 4; Stop 28
ttccaacatctgacaaaatagtcgg

SEQ ID NO: 43672 - DNA, 25 bp, Artificial
  probe
  misc_feature (1)..(25): SEQ ID NO: 434; WAN024A5W_at; Start 13; Stop 37
ctgacaaaatagtcggatgtttttt

SEQ ID NO: 43673 - DNA, 25 bp, Artificial
  probe
  misc_feature (1)..(25): SEQ ID NO: 434; WAN024A5W_at; Start 8; Stop 32
aacatctgacaaaatagtcggatgt

SEQ ID NO: 43674 - DNA, 25 bp, Artificial
  probe
  misc_feature (1)..(25): SEQ ID NO: 434; WAN024A5W_at; Start 45; Stop 69
tacgaacttttacgaatagatagat

SEQ ID NO: 43675 - DNA, 25 bp, Artificial
  probe
  misc_feature (1)..(25): SEQ ID NO: 434; WAN024A5W_at; Start 15; Stop 39
gacaaaatagtcggatgttttttga

SEQ ID NO: 43676 - DNA, 25 bp, Artificial
  probe
  misc_feature (1)..(25): SEQ ID NO: 434; WAN024A5W_at; Start 2; Stop 26
gattccaacatctgacaaaatagtc

SEQ ID NO: 43677 - DNA, 25 bp, Artificial
  probe
  misc_feature (1)..(25): SEQ ID NO: 434; WAN024A5W_at; Start 7; Stop 31
caacatctgacaaaatagtcggatg

SEQ ID NO: 43678 - DNA, 25 bp, Artificial
  probe
  misc_feature (1)..(25): SEQ ID NO: 434; WAN024A5W_at; Start 54; Stop 78
ttacgaatagatagatgagtagaaa

SEQ ID NO: 43679 - DNA, 25 bp, Artificial
  probe
  misc_feature (1)..(25): SEQ ID NO: 434; WAN024A5W_at; Start 9; Stop 33
acatctgacaaaatagtcggatgtt

SEQ ID NO: 43680 - DNA, 25 bp, Artificial
  probe
  misc_feature (1)..(25): SEQ ID NO: 434; WAN024A5W_at; Start 53; Stop 77
tttacgaatagatagatgagtagaa

SEQ ID NO: 43681 - DNA, 25 bp, Artificial
  probe
  misc_feature (1)..(25): SEQ ID NO: 434; WAN024A5W_at; Start 16; Stop 40
acaaaatagtcggatgttttttgat

SEQ ID NO: 43682 - DNA, 25 bp, Artificial
  probe
  misc_feature (1)..(25): SEQ ID NO: 434; WAN024A5W_at; Start 47; Stop 71
cgaacttttacgaatagatagatga

SEQ ID NO: 43683 - DNA, 25 bp, Artificial
  probe
  misc_feature (1)..(25): SEQ ID NO: 434; WAN024A5W_at; Start 56; Stop 80
acgaatagatagatgagtagaaaaa

SEQ ID NO: 43684 - DNA, 25 bp, Artificial
  probe
  misc_feature (1)..(25): SEQ ID NO: 434; WAN024A5W_at; Start 12; Stop 36
tctgacaaaatagtcggatgttttt

SEQ ID NO: 43685 - DNA, 25 bp, Artificial
  probe
  misc_feature (1)..(25): SEQ ID NO: 434; WAN024A5W_at; Start 57; Stop 81
cgaatagatagatgagtagaaaaag

SEQ ID NO: 43686 - DNA, 25 bp, Artificial
  probe
  misc_feature (1)..(25): SEQ ID NO: 434; WAN024A5W_at; Start 5; Stop 29
tccaacatctgacaaaatagtcgga

SEQ ID NO: 43687 - DNA, 25 bp, Artificial
  probe
  misc_feature (1)..(25): SEQ ID NO: 4859; WAN024A5X_at; Start 4; Stop 28
tttttctactcatctatctattcgt

SEQ ID NO: 43688 - DNA, 25 bp, Artificial
  probe
  misc_feature (1)..(25): SEQ ID NO: 4859; WAN024A5X_at; Start 11; Stop 35
actcatctatctattcgtaaaagtt

SEQ ID NO: 43689 - DNA, 25 bp, Artificial
  probe
  misc_feature (1)..(25): SEQ ID NO: 4859; WAN024A5X_at; Start 46; Stop 70
caaaaaacatccgactattttgtca

SEQ ID NO: 43690 - DNA, 25 bp, Artificial
  probe
  misc_feature (1)..(25): SEQ ID NO: 4859; WAN024A5X_at; Start 16; Stop 40
tctatctattcgtaaaagttcgtaa

SEQ ID NO: 43691 - DNA, 25 bp, Artificial
  probe
  misc_feature (1)..(25): SEQ ID NO: 4859; WAN024A5X_at; Start 56; Stop 80
ccgactattttgtcagatgttggaa

SEQ ID NO: 43692 - DNA, 25 bp, Artificial
  probe
  misc_feature (1)..(25): SEQ ID NO: 4859; WAN024A5X_at; Start 5; Stop 29
ttttctactcatctatctattcgta

SEQ ID NO: 43693 - DNA, 25 bp, Artificial
  probe
  misc_feature (1)..(25): SEQ ID NO: 4859; WAN024A5X_at; Start 15; Stop 39
atctatctattcgtaaaagttcgta

SEQ ID NO: 43694 - DNA, 25 bp, Artificial
  probe
  misc_feature (1)..(25): SEQ ID NO: 4859; WAN024A5X_at; Start 2; Stop 26
tctttttctactcatctatctattc

SEQ ID NO: 43695 - DNA, 25 bp, Artificial
  probe
  misc_feature (1)..(25): SEQ ID NO: 4859; WAN024A5X_at; Start 57; Stop 81
cgactattttgtcagatgttggaat

SEQ ID NO: 43696 - DNA, 25 bp, Artificial
  probe
  misc_feature (1)..(25): SEQ ID NO: 4859; WAN024A5X_at; Start 7; Stop 31
ttctactcatctatctattcgtaaa

SEQ ID NO: 43697 - DNA, 25 bp, Artificial
  probe
  misc_feature (1)..(25): SEQ ID NO: 4859; WAN024A5X_at; Start 58; Stop 82
gactattttgtcagatgttggaatc

SEQ ID NO: 43698 - DNA, 25 bp, Artificial
  probe
  misc_feature (1)..(25): SEQ ID NO: 4859; WAN024A5X_at; Start 12; Stop 36
ctcatctatctattcgtaaaagttc

SEQ ID NO: 43699 - DNA, 25 bp, Artificial
  probe
  misc_feature (1)..(25): SEQ ID NO: 4859; WAN024A5X_at; Start 8; Stop 32
tctactcatctatctattcgtaaaa

SEQ ID NO: 43700 - DNA, 25 bp, Artificial
  probe
  misc_feature (1)..(25): SEQ ID NO: 4859; WAN024A5X_at; Start 1; Stop 25
ttctttttctactcatctatctatt

SEQ ID NO: 43701 - DNA, 25 bp, Artificial
  probe
  misc_feature (1)..(25): SEQ ID NO: 4859; WAN024A5X_at; Start 48; Stop 72
aaaaacatccgactattttgtcaga

SEQ ID NO: 43702 - DNA, 25 bp, Artificial
  probe
  misc_feature (1)..(25): SEQ ID NO: 4859; WAN024A5X_at; Start 14; Stop 38
catctatctattcgtaaaagttcgt

SEQ ID NO: 43703 - DNA, 25 bp, Artificial
  probe
  misc_feature (1)..(25): SEQ ID NO: 4859; WAN024A5X_at; Start 53; Stop 77
catccgactattttgtcagatgttg

SEQ ID NO: 43704 - DNA, 25 bp, Artificial
  probe
  misc_feature (1)..(25): SEQ ID NO: 4859; WAN024A5X_at; Start 55; Stop 79
tccgactattttgtcagatgttgga

SEQ ID NO: 43705 - DNA, 25 bp, Artificial
  probe
  misc_feature (1)..(25): SEQ ID NO: 4859; WAN024A5X_at; Start 59; Stop 83
actattttgtcagatgttggaatct

SEQ ID NO: 43706 - DNA, 25 bp, Artificial
  probe
  misc_feature (1)..(25): SEQ ID NO: 4859; WAN024A5X_at; Start 52; Stop 76
acatccgactattttgtcagatgtt

SEQ ID NO: 43707 - DNA, 25 bp, Artificial
  probe
  misc_feature (1)..(25): SEQ ID NO: 4859; WAN024A5X_at; Start 10; Stop 34
tactcatctatctattcgtaaaagt

SEQ ID NO: 43708 - DNA, 25 bp, Artificial
  probe
  misc_feature (1)..(25): SEQ ID NO: 4859; WAN024A5X_at; Start 13; Stop 37
tcatctatctattcgtaaaagttcg

SEQ ID NO: 43709 - DNA, 25 bp, Artificial
  probe
  misc_feature (1)..(25): SEQ ID NO: 4859; WAN024A5X_at; Start 47; Stop 71
aaaaaacatccgactattttgtcag

SEQ ID NO: 43710 - DNA, 25 bp, Artificial
  probe
  misc_feature (1)..(25): SEQ ID NO: 4859; WAN024A5X_at; Start 45; Stop 69
tcaaaaaacatccgactattttgtc

SEQ ID NO: 43711 - DNA, 25 bp, Artificial
  probe
  misc_feature (1)..(25): SEQ ID NO: 4859; WAN024A5X_at; Start 3; Stop 27
ctttttctactcatctatctattcg

SEQ ID NO: 43712 - DNA, 25 bp, Artificial
  probe
  misc_feature (1)..(25): SEQ ID NO: 4859; WAN024A5X_at; Start 9; Stop 33
ctactcatctatctattcgtaaaag

SEQ ID NO: 43713 - DNA, 25 bp, Artificial
  probe
  misc_feature (1)..(25): SEQ ID NO: 4859; WAN024A5X_at; Start 50; Stop 74
aaacatccgactattttgtcagatg

SEQ ID NO: 43714 - DNA, 25 bp, Artificial
  probe
  misc_feature (1)..(25): SEQ ID NO: 4859; WAN024A5X_at; Start 54; Stop 78
atccgactattttgtcagatgttgg

SEQ ID NO: 43715 - DNA, 25 bp, Artificial
  probe
  misc_feature (1)..(25): SEQ ID NO: 4859; WAN024A5X_at; Start 49; Stop 73
aaaacatccgactattttgtcagat

SEQ ID NO: 43716 - DNA, 25 bp, Artificial
  probe
  misc_feature (1)..(25): SEQ ID NO: 4859; WAN024A5X_at; Start 51; Stop 75
aacatccgactattttgtcagatgt

SEQ ID NO: 43717 - DNA, 25 bp, Artificial
  probe
  misc_feature (1)..(25): SEQ ID NO: 4859; WAN024A5X_at; Start 6; Stop 30
tttctactcatctatctattcgtaa

SEQ ID NO: 43718 - DNA, 25 bp, Artificial
  probe
  misc_feature (1)..(25): SEQ ID NO: 161; WAN024A5Y_at; Start 2; Stop 26
aatgacctaagctagaattctaaga

SEQ ID NO: 43719 - DNA, 25 bp, Artificial
  probe
  misc_feature (1)..(25): SEQ ID NO: 161; WAN024A5Y_at; Start 39; Stop 63
taagagaaaatgaacccaacatttc

SEQ ID NO: 43720 - DNA, 25 bp, Artificial
  probe
  misc_feature (1)..(25): SEQ ID NO: 161; WAN024A5Y_at; Start 45; Stop 69
aaaatgaacccaacatttccataat

SEQ ID NO: 43721 - DNA, 25 bp, Artificial
  probe
  misc_feature (1)..(25): SEQ ID NO: 161; WAN024A5Y_at; Start 49; Stop 73
tgaacccaacatttccataataaaa

SEQ ID NO: 43722 - DNA, 25 bp, Artificial
  probe
  misc_feature (1)..(25): SEQ ID NO: 161; WAN024A5Y_at; Start 41; Stop 65
agagaaaatgaacccaacatttcca

SEQ ID NO: 43723 - DNA, 25 bp, Artificial
  probe
  misc_feature (1)..(25): SEQ ID NO: 161; WAN024A5Y_at; Start 44; Stop 68
gaaaatgaacccaacatttccataa

SEQ ID NO: 43724 - DNA, 25 bp, Artificial
  probe
  misc_feature (1)..(25): SEQ ID NO: 161; WAN024A5Y_at; Start 53; Stop 77
cccaacatttccataataaaacgca

SEQ ID NO: 43725 - DNA, 25 bp, Artificial
  probe
  misc_feature (1)..(25): SEQ ID NO: 161; WAN024A5Y_at; Start 32; Stop 56
tcaattttaagagaaaatgaaccca

SEQ ID NO: 43726 - DNA, 25 bp, Artificial
  probe
  misc_feature (1)..(25): SEQ ID NO: 161; WAN024A5Y_at; Start 3; Stop 27
atgacctaagctagaattctaagaa

SEQ ID NO: 43727 - DNA, 25 bp, Artificial
  probe
  misc_feature (1)..(25): SEQ ID NO: 161; WAN024A5Y_at; Start 1; Stop 25
aaatgacctaagctagaattctaag

SEQ ID NO: 43728 - DNA, 25 bp, Artificial
  probe
  misc_feature (1)..(25): SEQ ID NO: 161; WAN024A5Y_at; Start 4; Stop 28
tgacctaagctagaattctaagaaa

SEQ ID NO: 43729 - DNA, 25 bp, Artificial
  probe
  misc_feature (1)..(25): SEQ ID NO: 161; WAN024A5Y_at; Start 43; Stop 67
agaaaatgaacccaacatttccata

SEQ ID NO: 43730 - DNA, 25 bp, Artificial
  probe
  misc_feature (1)..(25): SEQ ID NO: 161; WAN024A5Y_at; Start 5; Stop 29
gacctaagctagaattctaagaaaa

SEQ ID NO: 43731 - DNA, 25 bp, Artificial
  probe
  misc_feature (1)..(25): SEQ ID NO: 161; WAN024A5Y_at; Start 42; Stop 66
gagaaaatgaacccaacatttccat

SEQ ID NO: 43732 - DNA, 25 bp, Artificial
  probe
  misc_feature (1)..(25): SEQ ID NO: 161; WAN024A5Y_at; Start 54; Stop 78
ccaacatttccataataaaacgcat

SEQ ID NO: 43733 - DNA, 25 bp, Artificial
  probe
  misc_feature (1)..(25): SEQ ID NO: 161; WAN024A5Y_at; Start 47; Stop 71
aatgaacccaacatttccataataa

SEQ ID NO: 43734 - DNA, 25 bp, Artificial
  probe
  misc_feature (1)..(25): SEQ ID NO: 161; WAN024A5Y_at; Start 69; Stop 93
taaaacgcatattagcaagttttta

SEQ ID NO: 43735 - DNA, 25 bp, Artificial
  probe
  misc_feature (1)..(25): SEQ ID NO: 161; WAN024A5Y_at; Start 73; Stop 97
acgcatattagcaagtttttaacac

SEQ ID NO: 43736 - DNA, 25 bp, Artificial
  probe
  misc_feature (1)..(25): SEQ ID NO: 161; WAN024A5Y_at; Start 48; Stop 72
atgaacccaacatttccataataaa

SEQ ID NO: 43737 - DNA, 25 bp, Artificial
  probe
  misc_feature (1)..(25): SEQ ID NO: 161; WAN024A5Y_at; Start 72; Stop 96
aacgcatattagcaagtttttaaca

SEQ ID NO: 43738 - DNA, 25 bp, Artificial
  probe
  misc_feature (1)..(25): SEQ ID NO: 161; WAN024A5Y_at; Start 46; Stop 70
aaatgaacccaacatttccataata

SEQ ID NO: 43739 - DNA, 25 bp, Artificial
  probe
  misc_feature (1)..(25): SEQ ID NO: 4286; WAN024A5Z_at; Start 32; Stop 56
atggaaatgttgggttcattttctc

SEQ ID NO: 43740 - DNA, 25 bp, Artificial
  probe
  misc_feature (1)..(25): SEQ ID NO: 4286; WAN024A5Z_at; Start 26; Stop 50
tttattatggaaatgttgggttcat

SEQ ID NO: 43741 - DNA, 25 bp, Artificial
  probe
  misc_feature (1)..(25): SEQ ID NO: 4286; WAN024A5Z_at; Start 25; Stop 49
ttttattatggaaatgttgggttca

SEQ ID NO: 43742 - DNA, 25 bp, Artificial
  probe
  misc_feature (1)..(25): SEQ ID NO: 4286; WAN024A5Z_at; Start 5; Stop 29
taaaaacttgctaatatgcgtttta

SEQ ID NO: 43743 - DNA, 25 bp, Artificial
  probe
  misc_feature (1)..(25): SEQ ID NO: 4286; WAN024A5Z_at; Start 30; Stop 54
ttatggaaatgttgggttcattttc

SEQ ID NO: 43744 - DNA, 25 bp, Artificial
  probe
  misc_feature (1)..(25): SEQ ID NO: 4286; WAN024A5Z_at; Start 33; Stop 57
tggaaatgttgggttcattttctct

SEQ ID NO: 43745 - DNA, 25 bp, Artificial
  probe
  misc_feature (1)..(25): SEQ ID NO: 4286; WAN024A5Z_at; Start 28; Stop 52
tattatggaaatgttgggttcattt

SEQ ID NO: 43746 - DNA, 25 bp, Artificial
  probe
  misc_feature (1)..(25): SEQ ID NO: 4286; WAN024A5Z_at; Start 70; Stop 94
tttcttagaattctagcttaggtca

SEQ ID NO: 43747 - DNA, 25 bp, Artificial
  probe
  misc_feature (1)..(25): SEQ ID NO: 4286; WAN024A5Z_at; Start 29; Stop 53
attatggaaatgttgggttcatttt

SEQ ID NO: 43748 - DNA, 25 bp, Artificial
  probe
  misc_feature (1)..(25): SEQ ID NO: 4286; WAN024A5Z_at; Start 31; Stop 55
tatggaaatgttgggttcattttct

SEQ ID NO: 43749 - DNA, 25 bp, Artificial
  probe
  misc_feature (1)..(25): SEQ ID NO: 4286; WAN024A5Z_at; Start 71; Stop 95
ttcttagaattctagcttaggtcat

SEQ ID NO: 43750 - DNA, 25 bp, Artificial
  probe
  misc_feature (1)..(25): SEQ ID NO: 4286; WAN024A5Z_at; Start 65; Stop 89
gattttttcttagaattctagctta

SEQ ID NO: 43751 - DNA, 25 bp, Artificial
  probe
  misc_feature (1)..(25): SEQ ID NO: 4286; WAN024A5Z_at; Start 27; Stop 51
ttattatggaaatgttgggttcatt

SEQ ID NO: 43752 - DNA, 25 bp, Artificial
  probe
  misc_feature (1)..(25): SEQ ID NO: 4286; WAN024A5Z_at; Start 2; Stop 26
tgttaaaaacttgctaatatgcgtt

SEQ ID NO: 43753 - DNA, 25 bp, Artificial
  probe
  misc_feature (1)..(25): SEQ ID NO: 4286; WAN024A5Z_at; Start 72; Stop 96
tcttagaattctagcttaggtcatt

SEQ ID NO: 43754 - DNA, 25 bp, Artificial
  probe
  misc_feature (1)..(25): SEQ ID NO: 4286; WAN024A5Z_at; Start 73; Stop 97
cttagaattctagcttaggtcattt

SEQ ID NO: 43755 - DNA, 25 bp, Artificial
  probe
  misc_feature (1)..(25): SEQ ID NO: 4286; WAN024A5Z_at; Start 35; Stop 59
gaaatgttgggttcattttctctta

SEQ ID NO: 43756 - DNA, 25 bp, Artificial
  probe
  misc_feature (1)..(25): SEQ ID NO: 4286; WAN024A5Z_at; Start 69; Stop 93
ttttcttagaattctagcttaggtc

SEQ ID NO: 43757 - DNA, 25 bp, Artificial
  probe
  misc_feature (1)..(25): SEQ ID NO: 4286; WAN024A5Z_at; Start 1; Stop 25
gtgttaaaaacttgctaatatgcgt

SEQ ID NO: 43758 - DNA, 25 bp, Artificial
  probe
  misc_feature (1)..(25): SEQ ID NO: 4286; WAN024A5Z_at; Start 64; Stop 88
tgattttttcttagaattctagctt

SEQ ID NO: 43759 - DNA, 25 bp, Artificial
  probe
  misc_feature (1)..(25): SEQ ID NO: 4286; WAN024A5Z_at; Start 42; Stop 66
tgggttcattttctcttaaaattga

SEQ ID NO: 43760 - DNA, 25 bp, Artificial
  probe
  misc_feature (1)..(25): SEQ ID NO: 4286; WAN024A5Z_at; Start 62; Stop 86
attgattttttcttagaattctagc

SEQ ID NO: 43761 - DNA, 25 bp, Artificial
  probe
  misc_feature (1)..(25): SEQ ID NO: 4286; WAN024A5Z_at; Start 66; Stop 90
attttttcttagaattctagcttag

SEQ ID NO: 43762 - DNA, 25 bp, Artificial
  probe
  misc_feature (1)..(25): SEQ ID NO: 4286; WAN024A5Z_at; Start 63; Stop 87
ttgattttttcttagaattctagct

SEQ ID NO: 43763 - DNA, 25 bp, Artificial
  probe
  misc_feature (1)..(25): SEQ ID NO: 3959; WAN024A62_at; Start 5; Stop 29
gattggcatatcagactactaaagt

SEQ ID NO: 43764 - DNA, 25 bp, Artificial
  probe
  misc_feature (1)..(25): SEQ ID NO: 3959; WAN024A62_at; Start 8; Stop 32
tggcatatcagactactaaagtatt

SEQ ID NO: 43765 - DNA, 25 bp, Artificial
  probe
  misc_feature (1)..(25): SEQ ID NO: 3959; WAN024A62_at; Start 42; Stop 66
aggattttagcgactagttagctgg

SEQ ID NO: 43766 - DNA, 25 bp, Artificial
  probe
  misc_feature (1)..(25): SEQ ID NO: 3959; WAN024A62_at; Start 11; Stop 35
catatcagactactaaagtattgag

SEQ ID NO: 43767 - DNA, 25 bp, Artificial
  probe
  misc_feature (1)..(25): SEQ ID NO: 3959; WAN024A62_at; Start 2; Stop 26
tgagattggcatatcagactactaa

SEQ ID NO: 43768 - DNA, 25 bp, Artificial
  probe
  misc_feature (1)..(25): SEQ ID NO: 3959; WAN024A62_at; Start 29; Stop 53
tattgagtttgttaggattttagcg

SEQ ID NO: 43769 - DNA, 25 bp, Artificial
  probe
  misc_feature (1)..(25): SEQ ID NO: 3959; WAN024A62_at; Start 55; Stop 79
ctagttagctgggaaaggaagatat

SEQ ID NO: 43770 - DNA, 25 bp, Artificial
  probe
  misc_feature (1)..(25): SEQ ID NO: 3959; WAN024A62_at; Start 34; Stop 58
agtttgttaggattttagcgactag

SEQ ID NO: 43771 - DNA, 25 bp, Artificial
  probe
  misc_feature (1)..(25): SEQ ID NO: 3959; WAN024A62_at; Start 39; Stop 63
gttaggattttagcgactagttagc

SEQ ID NO: 43772 - DNA, 25 bp, Artificial
  probe
  misc_feature (1)..(25): SEQ ID NO: 3959; WAN024A62_at; Start 13; Stop 37
tatcagactactaaagtattgagtt

SEQ ID NO: 43773 - DNA, 25 bp, Artificial
  probe
  misc_feature (1)..(25): SEQ ID NO: 3959; WAN024A62_at; Start 38; Stop 62
tgttaggattttagcgactagttag

SEQ ID NO: 43774 - DNA, 25 bp, Artificial
  probe
  misc_feature (1)..(25): SEQ ID NO: 3959; WAN024A62_at; Start 31; Stop 55
ttgagtttgttaggattttagcgac

SEQ ID NO: 43775 - DNA, 25 bp, Artificial
  probe
  misc_feature (1)..(25): SEQ ID NO: 3959; WAN024A62_at; Start 57; Stop 81
agttagctgggaaaggaagatattt

SEQ ID NO: 43776 - DNA, 25 bp, Artificial
  probe
  misc_feature (1)..(25): SEQ ID NO: 3959; WAN024A62_at; Start 33; Stop 57
gagtttgttaggattttagcgacta

SEQ ID NO: 43777 - DNA, 25 bp, Artificial
  probe
  misc_feature (1)..(25): SEQ ID NO: 3959; WAN024A62_at; Start 44; Stop 68
gattttagcgactagttagctggga

SEQ ID NO: 43778 - DNA, 25 bp, Artificial
  probe
  misc_feature (1)..(25): SEQ ID NO: 3959; WAN024A62_at; Start 1; Stop 25
gtgagattggcatatcagactacta

SEQ ID NO: 43779 - DNA, 25 bp, Artificial
  probe
  misc_feature (1)..(25): SEQ ID NO: 3959; WAN024A62_at; Start 48; Stop 72
ttagcgactagttagctgggaaagg

SEQ ID NO: 43780 - DNA, 25 bp, Artificial
  probe
  misc_feature (1)..(25): SEQ ID NO: 3959; WAN024A62_at; Start 21; Stop 45
tactaaagtattgagtttgttagga

SEQ ID NO: 43781 - DNA, 25 bp, Artificial
  probe
  misc_feature (1)..(25): SEQ ID NO: 3959; WAN024A62_at; Start 10; Stop 34
gcatatcagactactaaagtattga

SEQ ID NO: 43782 - DNA, 25 bp, Artificial
  probe
  misc_feature (1)..(25): SEQ ID NO: 3959; WAN024A62_at; Start 47; Stop 71
tttagcgactagttagctgggaaag

SEQ ID NO: 43783 - DNA, 25 bp, Artificial
  probe
  misc_feature (1)..(25): SEQ ID NO: 3959; WAN024A62_at; Start 45; Stop 69
attttagcgactagttagctgggaa

SEQ ID NO: 43784 - DNA, 25 bp, Artificial
  probe
  misc_feature (1)..(25): SEQ ID NO: 3959; WAN024A62_at; Start 18; Stop 42
gactactaaagtattgagtttgtta

SEQ ID NO: 43785 - DNA, 25 bp, Artificial
  probe
  misc_feature (1)..(25): SEQ ID NO: 3959; WAN024A62_at; Start 9; Stop 33
ggcatatcagactactaaagtattg

SEQ ID NO: 43786 - DNA, 25 bp, Artificial
  probe
  misc_feature (1)..(25): SEQ ID NO: 3959; WAN024A62_at; Start 46; Stop 70
ttttagcgactagttagctgggaaa

SEQ ID NO: 43787 - DNA, 25 bp, Artificial
  probe
  misc_feature (1)..(25): SEQ ID NO: 3959; WAN024A62_at; Start 52; Stop 76
cgactagttagctgggaaaggaaga

SEQ ID NO: 43788 - DNA, 25 bp, Artificial
  probe
  misc_feature (1)..(25): SEQ ID NO: 3959; WAN024A62_at; Start 15; Stop 39
tcagactactaaagtattgagtttg

SEQ ID NO: 43789 - DNA, 25 bp, Artificial
  probe
  misc_feature (1)..(25): SEQ ID NO: 3959; WAN024A62_at; Start 50; Stop 74
agcgactagttagctgggaaaggaa

SEQ ID NO: 43790 - DNA, 25 bp, Artificial
  probe
  misc_feature (1)..(25): SEQ ID NO: 3959; WAN024A62_at; Start 7; Stop 31
ttggcatatcagactactaaagtat

SEQ ID NO: 43791 - DNA, 25 bp, Artificial
  probe
  misc_feature (1)..(25): SEQ ID NO: 3959; WAN024A62_at; Start 3; Stop 27
gagattggcatatcagactactaaa

SEQ ID NO: 43792 - DNA, 25 bp, Artificial
  probe
  misc_feature (1)..(25): SEQ ID NO: 3959; WAN024A62_at; Start 56; Stop 80
tagttagctgggaaaggaagatatt

SEQ ID NO: 43793 - DNA, 25 bp, Artificial
  probe
  misc_feature (1)..(25): SEQ ID NO: 3959; WAN024A62_at; Start 4; Stop 28
agattggcatatcagactactaaag

SEQ ID NO: 43794 - DNA, 25 bp, Artificial
  probe
  misc_feature (1)..(25): SEQ ID NO: 3959; WAN024A62_at; Start 41; Stop 65
taggattttagcgactagttagctg

SEQ ID NO: 43795 - DNA, 25 bp, Artificial
  probe
  misc_feature (1)..(25): SEQ ID NO: 3959; WAN024A62_at; Start 53; Stop 77
gactagttagctgggaaaggaagat

SEQ ID NO: 43796 - DNA, 25 bp, Artificial
  probe
  misc_feature (1)..(25): SEQ ID NO: 3959; WAN024A62_at; Start 49; Stop 73
tagcgactagttagctgggaaagga

SEQ ID NO: 43797 - DNA, 25 bp, Artificial
  probe
  misc_feature (1)..(25): SEQ ID NO: 148; WAN024A63_at; Start 28; Stop 52
tcgctaaaatcctaacaaactcaat

SEQ ID NO: 43798 - DNA, 25 bp, Artificial
  probe
  misc_feature (1)..(25): SEQ ID NO: 148; WAN024A63_at; Start 13; Stop 37
ttcccagctaactagtcgctaaaat

SEQ ID NO: 43799 - DNA, 25 bp, Artificial
  probe
  misc_feature (1)..(25): SEQ ID NO: 148; WAN024A63_at; Start 52; Stop 76
tactttagtagtctgatatgccaat

SEQ ID NO: 43800 - DNA, 25 bp, Artificial
  probe
  misc_feature (1)..(25): SEQ ID NO: 148; WAN024A63_at; Start 56; Stop 80
ttagtagtctgatatgccaatctca

SEQ ID NO: 43801 - DNA, 25 bp, Artificial
  probe
  misc_feature (1)..(25): SEQ ID NO: 148; WAN024A63_at; Start 19; Stop 43
gctaactagtcgctaaaatcctaac

SEQ ID NO: 43802 - DNA, 25 bp, Artificial
  probe
  misc_feature (1)..(25): SEQ ID NO: 148; WAN024A63_at; Start 9; Stop 33
tcctttcccagctaactagtcgcta

SEQ ID NO: 43803 - DNA, 25 bp, Artificial
  probe
  misc_feature (1)..(25): SEQ ID NO: 148; WAN024A63_at; Start 29; Stop 53
cgctaaaatcctaacaaactcaata

SEQ ID NO: 43804 - DNA, 25 bp, Artificial
  probe
  misc_feature (1)..(25): SEQ ID NO: 148; WAN024A63_at; Start 25; Stop 49
tagtcgctaaaatcctaacaaactc

SEQ ID NO: 43805 - DNA, 25 bp, Artificial
  probe
  misc_feature (1)..(25): SEQ ID NO: 148; WAN024A63_at; Start 54; Stop 78
ctttagtagtctgatatgccaatct

SEQ ID NO: 43806 - DNA, 25 bp, Artificial
  probe
  misc_feature (1)..(25): SEQ ID NO: 148; WAN024A63_at; Start 43; Stop 67
caaactcaatactttagtagtctga

SEQ ID NO: 43807 - DNA, 25 bp, Artificial
  probe
  misc_feature (1)..(25): SEQ ID NO: 148; WAN024A63_at; Start 24; Stop 48
ctagtcgctaaaatcctaacaaact

SEQ ID NO: 43808 - DNA, 25 bp, Artificial
  probe
  misc_feature (1)..(25): SEQ ID NO: 148; WAN024A63_at; Start 10; Stop 34
cctttcccagctaactagtcgctaa

SEQ ID NO: 43809 - DNA, 25 bp, Artificial
  probe
  misc_feature (1)..(25): SEQ ID NO: 148; WAN024A63_at; Start 31; Stop 55
ctaaaatcctaacaaactcaatact

SEQ ID NO: 43810 - DNA, 25 bp, Artificial
  probe
  misc_feature (1)..(25): SEQ ID NO: 148; WAN024A63_at; Start 14; Stop 38
tcccagctaactagtcgctaaaatc

SEQ ID NO: 43811 - DNA, 25 bp, Artificial
  probe
  misc_feature (1)..(25): SEQ ID NO: 148; WAN024A63_at; Start 40; Stop 64
taacaaactcaatactttagtagtc

SEQ ID NO: 43812 - DNA, 25 bp, Artificial
  probe
  misc_feature (1)..(25): SEQ ID NO: 148; WAN024A63_at; Start 30; Stop 54
gctaaaatcctaacaaactcaatac

SEQ ID NO: 43813 - DNA, 25 bp, Artificial
  probe
  misc_feature (1)..(25): SEQ ID NO: 148; WAN024A63_at; Start 21; Stop 45
taactagtcgctaaaatcctaacaa

SEQ ID NO: 43814 - DNA, 25 bp, Artificial
  probe
  misc_feature (1)..(25): SEQ ID NO: 148; WAN024A63_at; Start 3; Stop 27
atatcttcctttcccagctaactag

SEQ ID NO: 43815 - DNA, 25 bp, Artificial
  probe
  misc_feature (1)..(25): SEQ ID NO: 148; WAN024A63_at; Start 11; Stop 35
ctttcccagctaactagtcgctaaa

SEQ ID NO: 43816 - DNA, 25 bp, Artificial
  probe
  misc_feature (1)..(25): SEQ ID NO: 148; WAN024A63_at; Start 49; Stop 73
caatactttagtagtctgatatgcc

SEQ ID NO: 43817 - DNA, 25 bp, Artificial
  probe
  misc_feature (1)..(25): SEQ ID NO: 148; WAN024A63_at; Start 50; Stop 74
aatactttagtagtctgatatgcca

SEQ ID NO: 43818 - DNA, 25 bp, Artificial
  probe
  misc_feature (1)..(25): SEQ ID NO: 148; WAN024A63_at; Start 8; Stop 32
ttcctttcccagctaactagtcgct

SEQ ID NO: 43819 - DNA, 25 bp, Artificial
  probe
  misc_feature (1)..(25): SEQ ID NO: 148; WAN024A63_at; Start 55; Stop 79
tttagtagtctgatatgccaatctc

SEQ ID NO: 43820 - DNA, 25 bp, Artificial
  probe
  misc_feature (1)..(25): SEQ ID NO: 148; WAN024A63_at; Start 1; Stop 25
aaatatcttcctttcccagctaact

SEQ ID NO: 43821 - DNA, 25 bp, Artificial
  probe
  misc_feature (1)..(25): SEQ ID NO: 148; WAN024A63_at; Start 6; Stop 30
tcttcctttcccagctaactagtcg

SEQ ID NO: 43822 - DNA, 25 bp, Artificial
  probe
  misc_feature (1)..(25): SEQ ID NO: 148; WAN024A63_at; Start 57; Stop 81
tagtagtctgatatgccaatctcac

SEQ ID NO: 43823 - DNA, 25 bp, Artificial
  probe
  misc_feature (1)..(25): SEQ ID NO: 148; WAN024A63_at; Start 51; Stop 75
atactttagtagtctgatatgccaa

SEQ ID NO: 43824 - DNA, 25 bp, Artificial
  probe
  misc_feature (1)..(25): SEQ ID NO: 148; WAN024A63_at; Start 20; Stop 44
ctaactagtcgctaaaatcctaaca

SEQ ID NO: 43825 - DNA, 25 bp, Artificial
  probe
  misc_feature (1)..(25): SEQ ID NO: 148; WAN024A63_at; Start 17; Stop 41
cagctaactagtcgctaaaatccta

SEQ ID NO: 43826 - DNA, 25 bp, Artificial
  probe
  misc_feature (1)..(25): SEQ ID NO: 148; WAN024A63_at; Start 27; Stop 51
gtcgctaaaatcctaacaaactcaa

SEQ ID NO: 43827 - DNA, 25 bp, Artificial
  probe
  misc_feature (1)..(25): SEQ ID NO: 148; WAN024A63_at; Start 53; Stop 77
actttagtagtctgatatgccaatc

SEQ ID NO: 43828 - DNA, 25 bp, Artificial
  probe
  misc_feature (1)..(25): SEQ ID NO: 148; WAN024A63_at; Start 35; Stop 59
aatcctaacaaactcaatactttag

SEQ ID NO: 43829 - DNA, 25 bp, Artificial
  probe
  misc_feature (1)..(25): SEQ ID NO: 148; WAN024A63_at; Start 12; Stop 36
tttcccagctaactagtcgctaaaa

SEQ ID NO: 43830 - DNA, 25 bp, Artificial
  probe
  misc_feature (1)..(25): SEQ ID NO: 148; WAN024A63_at; Start 16; Stop 40
ccagctaactagtcgctaaaatcct

SEQ ID NO: 43831 - DNA, 25 bp, Artificial
  probe
  misc_feature (1)..(25): SEQ ID NO: 484; WAN024A64_at; Start 131; Stop 155
gaagactcacgagagaaaccagcta

SEQ ID NO: 43832 - DNA, 25 bp, Artificial
  probe
  misc_feature (1)..(25): SEQ ID NO: 484; WAN024A64_at; Start 53; Stop 77
gaaccctgtcaagacttagctacta

SEQ ID NO: 43833 - DNA, 25 bp, Artificial
  probe
  misc_feature (1)..(25): SEQ ID NO: 484; WAN024A64_at; Start 65; Stop 89
gacttagctactataatagaagaaa

SEQ ID NO: 43834 - DNA, 25 bp, Artificial
  probe
  misc_feature (1)..(25): SEQ ID NO: 484; WAN024A64_at; Start 121; Stop 145
gatatacatagaagactcacgagag

SEQ ID NO: 43835 - DNA, 25 bp, Artificial
  probe
  misc_feature (1)..(25): SEQ ID NO: 484; WAN024A64_at; Start 99; Stop 123
cttaaaacctcagtcttcctttgat

SEQ ID NO: 43836 - DNA, 25 bp, Artificial
  probe
  misc_feature (1)..(25): SEQ ID NO: 484; WAN024A64_at; Start 138; Stop 162
cacgagagaaaccagctattctcaa

SEQ ID NO: 43837 - DNA, 25 bp, Artificial
  probe
  misc_feature (1)..(25): SEQ ID NO: 484; WAN024A64_at; Start 117; Stop 141
ctttgatatacatagaagactcacg

SEQ ID NO: 43838 - DNA, 25 bp, Artificial
  probe
  misc_feature (1)..(25): SEQ ID NO: 484; WAN024A64_at; Start 142; Stop 166
agagaaaccagctattctcaagaaa

SEQ ID NO: 43839 - DNA, 25 bp, Artificial
  probe
  misc_feature (1)..(25): SEQ ID NO: 484; WAN024A64_at; Start 52; Stop 76
tgaaccctgtcaagacttagctact

SEQ ID NO: 43840 - DNA, 25 bp, Artificial
  probe
  misc_feature (1)..(25): SEQ ID NO: 484; WAN024A64_at; Start 125; Stop 149
tacatagaagactcacgagagaaac

SEQ ID NO: 43841 - DNA, 25 bp, Artificial
  probe
  misc_feature (1)..(25): SEQ ID NO: 484; WAN024A64_at; Start 119; Stop 143
ttgatatacatagaagactcacgag

SEQ ID NO: 43842 - DNA, 25 bp, Artificial
  probe
  misc_feature (1)..(25): SEQ ID NO: 484; WAN024A64_at; Start 56; Stop 80
ccctgtcaagacttagctactataa

SEQ ID NO: 43843 - DNA, 25 bp, Artificial
  probe
  misc_feature (1)..(25): SEQ ID NO: 484; WAN024A64_at; Start 132; Stop 156
aagactcacgagagaaaccagctat

SEQ ID NO: 43844 - DNA, 25 bp, Artificial
  probe
  misc_feature (1)..(25): SEQ ID NO: 484; WAN024A64_at; Start 104; Stop 128
aacctcagtcttcctttgatataca

SEQ ID NO: 43845 - DNA, 25 bp, Artificial
  probe
  misc_feature (1)..(25): SEQ ID NO: 484; WAN024A64_at; Start 129; Stop 153
tagaagactcacgagagaaaccagc

SEQ ID NO: 43846 - DNA, 25 bp, Artificial
  probe
  misc_feature (1)..(25): SEQ ID NO: 484; WAN024A64_at; Start 2; Stop 26
gtatcacaccttttcaaagtaataa

SEQ ID NO: 43847 - DNA, 25 bp, Artificial
  probe
  misc_feature (1)..(25): SEQ ID NO: 484; WAN024A64_at; Start 130; Stop 154
agaagactcacgagagaaaccagct

SEQ ID NO: 43848 - DNA, 25 bp, Artificial
  probe
  misc_feature (1)..(25): SEQ ID NO: 484; WAN024A64_at; Start 126; Stop 150
acatagaagactcacgagagaaacc

SEQ ID NO: 43849 - DNA, 25 bp, Artificial
  probe
  misc_feature (1)..(25): SEQ ID NO: 484; WAN024A64_at; Start 134; Stop 158
gactcacgagagaaaccagctattc

SEQ ID NO: 43850 - DNA, 25 bp, Artificial
  probe
  misc_feature (1)..(25): SEQ ID NO: 484; WAN024A64_at; Start 114; Stop 138
ttcctttgatatacatagaagactc

SEQ ID NO: 43851 - DNA, 25 bp, Artificial
  probe
  misc_feature (1)..(25): SEQ ID NO: 484; WAN024A64_at; Start 127; Stop 151
catagaagactcacgagagaaacca

SEQ ID NO: 43852 - DNA, 25 bp, Artificial
  probe
  misc_feature (1)..(25): SEQ ID NO: 484; WAN024A64_at; Start 50; Stop 74
tttgaaccctgtcaagacttagcta

SEQ ID NO: 43853 - DNA, 25 bp, Artificial
  probe
  misc_feature (1)..(25): SEQ ID NO: 484; WAN024A64_at; Start 69; Stop 93
tagctactataatagaagaaaagtt

SEQ ID NO: 43854 - DNA, 25 bp, Artificial
  probe
  misc_feature (1)..(25): SEQ ID NO: 484; WAN024A64_at; Start 59; Stop 83
tgtcaagacttagctactataatag

SEQ ID NO: 43855 - DNA, 25 bp, Artificial
  probe
  misc_feature (1)..(25): SEQ ID NO: 484; WAN024A64_at; Start 116; Stop 140
cctttgatatacatagaagactcac

SEQ ID NO: 43856 - DNA, 25 bp, Artificial
  probe
  misc_feature (1)..(25): SEQ ID NO: 484; WAN024A64_at; Start 109; Stop 133
cagtcttcctttgatatacatagaa

SEQ ID NO: 43857 - DNA, 25 bp, Artificial
  probe
  misc_feature (1)..(25): SEQ ID NO: 484; WAN024A64_at; Start 137; Stop 161
tcacgagagaaaccagctattctca

SEQ ID NO: 43858 - DNA, 25 bp, Artificial
  probe
  misc_feature (1)..(25): SEQ ID NO: 484; WAN024A64_at; Start 44; Stop 68
ccattttttgaaccctgtcaagact

SEQ ID NO: 43859 - DNA, 25 bp, Artificial
  probe
  misc_feature (1)..(25): SEQ ID NO: 484; WAN024A64_at; Start 48; Stop 72
tttttgaaccctgtcaagacttagc

SEQ ID NO: 43860 - DNA, 25 bp, Artificial
  probe
  misc_feature (1)..(25): SEQ ID NO: 484; WAN024A64_at; Start 102; Stop 126
aaaacctcagtcttcctttgatata

SEQ ID NO: 43861 - DNA, 25 bp, Artificial
  probe
  misc_feature (1)..(25): SEQ ID NO: 484; WAN024A64_at; Start 141; Stop 165
gagagaaaccagctattctcaagaa

SEQ ID NO: 43862 - DNA, 25 bp, Artificial
  probe
  misc_feature (1)..(25): SEQ ID NO: 484; WAN024A64_at; Start 62; Stop 86
caagacttagctactataatagaag

SEQ ID NO: 43863 - DNA, 25 bp, Artificial
  probe
  misc_feature (1)..(25): SEQ ID NO: 484; WAN024A64_at; Start 135; Stop 159
actcacgagagaaaccagctattct

SEQ ID NO: 43864 - DNA, 25 bp, Artificial
  probe
  misc_feature (1)..(25): SEQ ID NO: 484; WAN024A64_at; Start 123; Stop 147
tatacatagaagactcacgagagaa

SEQ ID NO: 43865 - DNA, 25 bp, Artificial
  probe
  misc_feature (1)..(25): SEQ ID NO: 5913; WAN024A65_at; Start 39; Stop 63
tgtatatcaaaggaagactgaggtt

SEQ ID NO: 43866 - DNA, 25 bp, Artificial
  probe
  misc_feature (1)..(25): SEQ ID NO: 5913; WAN024A65_at; Start 93; Stop 117
tagctaagtcttgacagggttcaaa

SEQ ID NO: 43867 - DNA, 25 bp, Artificial
  probe
  misc_feature (1)..(25): SEQ ID NO: 5913; WAN024A65_at; Start 24; Stop 48
ctcgtgagtcttctatgtatatcaa

SEQ ID NO: 43868 - DNA, 25 bp, Artificial
  probe
  misc_feature (1)..(25): SEQ ID NO: 5913; WAN024A65_at; Start 20; Stop 44
ttctctcgtgagtcttctatgtata

SEQ ID NO: 43869 - DNA, 25 bp, Artificial
  probe
  misc_feature (1)..(25): SEQ ID NO: 5913; WAN024A65_at; Start 91; Stop 115
agtagctaagtcttgacagggttca

SEQ ID NO: 43870 - DNA, 25 bp, Artificial
  probe
  misc_feature (1)..(25): SEQ ID NO: 5913; WAN024A65_at; Start 14; Stop 38
gctggtttctctcgtgagtcttcta

SEQ ID NO: 43871 - DNA, 25 bp, Artificial
  probe
  misc_feature (1)..(25): SEQ ID NO: 5913; WAN024A65_at; Start 16; Stop 40
tggtttctctcgtgagtcttctatg

SEQ ID NO: 43872 - DNA, 25 bp, Artificial
  probe
  misc_feature (1)..(25): SEQ ID NO: 5913; WAN024A65_at; Start 83; Stop 107
tctattatagtagctaagtcttgac

SEQ ID NO: 43873 - DNA, 25 bp, Artificial
  probe
  misc_feature (1)..(25): SEQ ID NO: 5913; WAN024A65_at; Start 41; Stop 65
tatatcaaaggaagactgaggtttt

SEQ ID NO: 43874 - DNA, 25 bp, Artificial
  probe
  misc_feature (1)..(25): SEQ ID NO: 5913; WAN024A65_at; Start 12; Stop 36
tagctggtttctctcgtgagtcttc

SEQ ID NO: 43875 - DNA, 25 bp, Artificial
  probe
  misc_feature (1)..(25): SEQ ID NO: 5913; WAN024A65_at; Start 5; Stop 29
ttgagaatagctggtttctctcgtg

SEQ ID NO: 43876 - DNA, 25 bp, Artificial
  probe
  misc_feature (1)..(25): SEQ ID NO: 5913; WAN024A65_at; Start 44; Stop 68
atcaaaggaagactgaggttttaag

SEQ ID NO: 43877 - DNA, 25 bp, Artificial
  probe
  misc_feature (1)..(25): SEQ ID NO: 5913; WAN024A65_at; Start 87; Stop 111
ttatagtagctaagtcttgacaggg

SEQ ID NO: 43878 - DNA, 25 bp, Artificial
  probe
  misc_feature (1)..(25): SEQ ID NO: 5913; WAN024A65_at; Start 3; Stop 27
tcttgagaatagctggtttctctcg

SEQ ID NO: 43879 - DNA, 25 bp, Artificial
  probe
  misc_feature (1)..(25): SEQ ID NO: 5913; WAN024A65_at; Start 7; Stop 31
gagaatagctggtttctctcgtgag

SEQ ID NO: 43880 - DNA, 25 bp, Artificial
  probe
  misc_feature (1)..(25): SEQ ID NO: 5913; WAN024A65_at; Start 73; Stop 97
aaacttttcttctattatagtagct

SEQ ID NO: 43881 - DNA, 25 bp, Artificial
  probe
  misc_feature (1)..(25): SEQ ID NO: 5913; WAN024A65_at; Start 34; Stop 58
ttctatgtatatcaaaggaagactg

SEQ ID NO: 43882 - DNA, 25 bp, Artificial
  probe
  misc_feature (1)..(25): SEQ ID NO: 5913; WAN024A65_at; Start 35; Stop 59
tctatgtatatcaaaggaagactga

SEQ ID NO: 43883 - DNA, 25 bp, Artificial
  probe
  misc_feature (1)..(25): SEQ ID NO: 5913; WAN024A65_at; Start 43; Stop 67
tatcaaaggaagactgaggttttaa

SEQ ID NO: 43884 - DNA, 25 bp, Artificial
  probe
  misc_feature (1)..(25): SEQ ID NO: 5913; WAN024A65_at; Start 26; Stop 50
cgtgagtcttctatgtatatcaaag

SEQ ID NO: 43885 - DNA, 25 bp, Artificial
  probe
  misc_feature (1)..(25): SEQ ID NO: 5913; WAN024A65_at; Start 85; Stop 109
tattatagtagctaagtcttgacag

SEQ ID NO: 43886 - DNA, 25 bp, Artificial
  probe
  misc_feature (1)..(25): SEQ ID NO: 5913; WAN024A65_at; Start 94; Stop 118
agctaagtcttgacagggttcaaaa

SEQ ID NO: 43887 - DNA, 25 bp, Artificial
  probe
  misc_feature (1)..(25): SEQ ID NO: 5913; WAN024A65_at; Start 88; Stop 112
tatagtagctaagtcttgacagggt

SEQ ID NO: 43888 - DNA, 25 bp, Artificial
  probe
  misc_feature (1)..(25): SEQ ID NO: 5913; WAN024A65_at; Start 95; Stop 119
gctaagtcttgacagggttcaaaaa

SEQ ID NO: 43889 - DNA, 25 bp, Artificial
  probe
  misc_feature (1)..(25): SEQ ID NO: 5913; WAN024A65_at; Start 10; Stop 34
aatagctggtttctctcgtgagtct

SEQ ID NO: 43890 - DNA, 25 bp, Artificial
  probe
  misc_feature (1)..(25): SEQ ID NO: 5913; WAN024A65_at; Start 18; Stop 42
gtttctctcgtgagtcttctatgta

SEQ ID NO: 43891 - DNA, 25 bp, Artificial
  probe
  misc_feature (1)..(25): SEQ ID NO: 5913; WAN024A65_at; Start 9; Stop 33
gaatagctggtttctctcgtgagtc

SEQ ID NO: 43892 - DNA, 25 bp, Artificial
  probe
  misc_feature (1)..(25): SEQ ID NO: 5913; WAN024A65_at; Start 92; Stop 116
gtagctaagtcttgacagggttcaa

SEQ ID NO: 43893 - DNA, 25 bp, Artificial
  probe
  misc_feature (1)..(25): SEQ ID NO: 5913; WAN024A65_at; Start 99; Stop 123
agtcttgacagggttcaaaaaatgg

SEQ ID NO: 43894 - DNA, 25 bp, Artificial
  probe
  misc_feature (1)..(25): SEQ ID NO: 5913; WAN024A65_at; Start 90; Stop 114
tagtagctaagtcttgacagggttc

SEQ ID NO: 43895 - DNA, 25 bp, Artificial
  probe
  misc_feature (1)..(25): SEQ ID NO: 5913; WAN024A65_at; Start 37; Stop 61
tatgtatatcaaaggaagactgagg

SEQ ID NO: 43896 - DNA, 25 bp, Artificial
  probe
  misc_feature (1)..(25): SEQ ID NO: 5913; WAN024A65_at; Start 27; Stop 51
gtgagtcttctatgtatatcaaagg

SEQ ID NO: 43897 - DNA, 25 bp, Artificial
  probe
  misc_feature (1)..(25): SEQ ID NO: 5913; WAN024A65_at; Start 22; Stop 46
ctctcgtgagtcttctatgtatatc

SEQ ID NO: 43898 - DNA, 25 bp, Artificial
  probe
  misc_feature (1)..(25): SEQ ID NO: 5913; WAN024A65_at; Start 29; Stop 53
gagtcttctatgtatatcaaaggaa

SEQ ID NO: 43899 - DNA, 25 bp, Artificial
  probe
  misc_feature (1)..(25): SEQ ID NO: 4749; WAN024A66_at; Start 18; Stop 42
tgccttgataaaattgaaagcatat

SEQ ID NO: 43900 - DNA, 25 bp, Artificial
  probe
  misc_feature (1)..(25): SEQ ID NO: 4749; WAN024A66_at; Start 6; Stop 30
acagtagttatttgccttgataaaa

SEQ ID NO: 43901 - DNA, 25 bp, Artificial
  probe
  misc_feature (1)..(25): SEQ ID NO: 4749; WAN024A66_at; Start 11; Stop 35
agttatttgccttgataaaattgaa

SEQ ID NO: 43902 - DNA, 25 bp, Artificial
  probe
  misc_feature (1)..(25): SEQ ID NO: 4749; WAN024A66_at; Start 68; Stop 92
tgaagtaatattcaaggagaatcaa

SEQ ID NO: 43903 - DNA, 25 bp, Artificial
  probe
  misc_feature (1)..(25): SEQ ID NO: 4749; WAN024A66_at; Start 67; Stop 91
ttgaagtaatattcaaggagaatca

SEQ ID NO: 43904 - DNA, 25 bp, Artificial
  probe
  misc_feature (1)..(25): SEQ ID NO: 4749; WAN024A66_at; Start 21; Stop 45
cttgataaaattgaaagcatattca

SEQ ID NO: 43905 - DNA, 25 bp, Artificial
  probe
  misc_feature (1)..(25): SEQ ID NO: 4749; WAN024A66_at; Start 12; Stop 36
gttatttgccttgataaaattgaaa

SEQ ID NO: 43906 - DNA, 25 bp, Artificial
  probe
  misc_feature (1)..(25): SEQ ID NO: 4749; WAN024A66_at; Start 26; Stop 50
taaaattgaaagcatattcataaca

SEQ ID NO: 43907 - DNA, 25 bp, Artificial
  probe
  misc_feature (1)..(25): SEQ ID NO: 4749; WAN024A66_at; Start 34; Stop 58
aaagcatattcataacaatatgata

SEQ ID NO: 43908 - DNA, 25 bp, Artificial
  probe
  misc_feature (1)..(25): SEQ ID NO: 4749; WAN024A66_at; Start 2; Stop 26
taaaacagtagttatttgccttgat

SEQ ID NO: 43909 - DNA, 25 bp, Artificial
  probe
  misc_feature (1)..(25): SEQ ID NO: 4749; WAN024A66_at; Start 16; Stop 40
tttgccttgataaaattgaaagcat

SEQ ID NO: 43910 - DNA, 25 bp, Artificial
  probe
  misc_feature (1)..(25): SEQ ID NO: 4749; WAN024A66_at; Start 29; Stop 53
aattgaaagcatattcataacaata

SEQ ID NO: 43911 - DNA, 25 bp, Artificial
  probe
  misc_feature (1)..(25): SEQ ID NO: 4749; WAN024A66_at; Start 9; Stop 33
gtagttatttgccttgataaaattg

SEQ ID NO: 43912 - DNA, 25 bp, Artificial
  probe
  misc_feature (1)..(25): SEQ ID NO: 4749; WAN024A66_at; Start 28; Stop 52
aaattgaaagcatattcataacaat

SEQ ID NO: 43913 - DNA, 25 bp, Artificial
  probe
  misc_feature (1)..(25): SEQ ID NO: 4749; WAN024A66_at; Start 31; Stop 55
ttgaaagcatattcataacaatatg

SEQ ID NO: 43914 - DNA, 25 bp, Artificial
  probe
  misc_feature (1)..(25): SEQ ID NO: 4749; WAN024A66_at; Start 22; Stop 46
ttgataaaattgaaagcatattcat

SEQ ID NO: 43915 - DNA, 25 bp, Artificial
  probe
  misc_feature (1)..(25): SEQ ID NO: 4749; WAN024A66_at; Start 7; Stop 31
cagtagttatttgccttgataaaat

SEQ ID NO: 43916 - DNA, 25 bp, Artificial
  probe
  misc_feature (1)..(25): SEQ ID NO: 4749; WAN024A66_at; Start 23; Stop 47
tgataaaattgaaagcatattcata

SEQ ID NO: 43917 - DNA, 25 bp, Artificial
  probe
  misc_feature (1)..(25): SEQ ID NO: 4749; WAN024A66_at; Start 17; Stop 41
ttgccttgataaaattgaaagcata

SEQ ID NO: 43918 - DNA, 25 bp, Artificial
  probe
  misc_feature (1)..(25): SEQ ID NO: 4749; WAN024A66_at; Start 3; Stop 27
aaaacagtagttatttgccttgata

SEQ ID NO: 43919 - DNA, 25 bp, Artificial
  probe
  misc_feature (1)..(25): SEQ ID NO: 4749; WAN024A66_at; Start 20; Stop 44
ccttgataaaattgaaagcatattc

SEQ ID NO: 43920 - DNA, 25 bp, Artificial
  probe
  misc_feature (1)..(25): SEQ ID NO: 4749; WAN024A66_at; Start 1; Stop 25
ttaaaacagtagttatttgccttga

SEQ ID NO: 43921 - DNA, 25 bp, Artificial
  probe
  misc_feature (1)..(25): SEQ ID NO: 4749; WAN024A66_at; Start 14; Stop 38
tatttgccttgataaaattgaaagc

SEQ ID NO: 43922 - DNA, 25 bp, Artificial
  probe
  misc_feature (1)..(25): SEQ ID NO: 4749; WAN024A66_at; Start 13; Stop 37
ttatttgccttgataaaattgaaag

SEQ ID NO: 43923 - DNA, 25 bp, Artificial
  probe
  misc_feature (1)..(25): SEQ ID NO: 4749; WAN024A66_at; Start 37; Stop 61
gcatattcataacaatatgatataa

SEQ ID NO: 43924 - DNA, 25 bp, Artificial
  probe
  misc_feature (1)..(25): SEQ ID NO: 4749; WAN024A66_at; Start 4; Stop 28
aaacagtagttatttgccttgataa

SEQ ID NO: 43925 - DNA, 25 bp, Artificial
  probe
  misc_feature (1)..(25): SEQ ID NO: 4749; WAN024A66_at; Start 33; Stop 57
gaaagcatattcataacaatatgat

SEQ ID NO: 43926 - DNA, 25 bp, Artificial
  probe
  misc_feature (1)..(25): SEQ ID NO: 4749; WAN024A66_at; Start 15; Stop 39
atttgccttgataaaattgaaagca

SEQ ID NO: 43927 - DNA, 25 bp, Artificial
  probe
  misc_feature (1)..(25): SEQ ID NO: 4749; WAN024A66_at; Start 19; Stop 43
gccttgataaaattgaaagcatatt

SEQ ID NO: 43928 - DNA, 25 bp, Artificial
  probe
  misc_feature (1)..(25): SEQ ID NO: 4749; WAN024A66_at; Start 10; Stop 34
tagttatttgccttgataaaattga

SEQ ID NO: 43929 - DNA, 25 bp, Artificial
  probe
  misc_feature (1)..(25): SEQ ID NO: 4749; WAN024A66_at; Start 27; Stop 51
aaaattgaaagcatattcataacaa

SEQ ID NO: 43930 - DNA, 25 bp, Artificial
  probe
  misc_feature (1)..(25): SEQ ID NO: 4749; WAN024A66_at; Start 5; Stop 29
aacagtagttatttgccttgataaa

SEQ ID NO: 43931 - DNA, 25 bp, Artificial
  probe
  misc_feature (1)..(25): SEQ ID NO: 4749; WAN024A66_at; Start 24; Stop 48
gataaaattgaaagcatattcataa

SEQ ID NO: 43932 - DNA, 25 bp, Artificial
  probe
  misc_feature (1)..(25): SEQ ID NO: 4749; WAN024A66_at; Start 32; Stop 56
tgaaagcatattcataacaatatga

SEQ ID NO: 43933 - DNA, 25 bp, Artificial
  probe
  misc_feature (1)..(25): SEQ ID NO: 5247; WAN024A67_at; Start 49; Stop 73
gaatatgctttcaattttatcaagg

SEQ ID NO: 43934 - DNA, 25 bp, Artificial
  probe
  misc_feature (1)..(25): SEQ ID NO: 5247; WAN024A67_at; Start 38; Stop 62
catattgttatgaatatgctttcaa

SEQ ID NO: 43935 - DNA, 25 bp, Artificial
  probe
  misc_feature (1)..(25): SEQ ID NO: 5247; WAN024A67_at; Start 41; Stop 65
attgttatgaatatgctttcaattt

SEQ ID NO: 43936 - DNA, 25 bp, Artificial
  probe
  misc_feature (1)..(25): SEQ ID NO: 5247; WAN024A67_at; Start 67; Stop 91
atcaaggcaaataactactgtttta

SEQ ID NO: 43937 - DNA, 25 bp, Artificial
  probe
  misc_feature (1)..(25): SEQ ID NO: 5247; WAN024A67_at; Start 44; Stop 68
gttatgaatatgctttcaattttat

SEQ ID NO: 43938 - DNA, 25 bp, Artificial
  probe
  misc_feature (1)..(25): SEQ ID NO: 5247; WAN024A67_at; Start 59; Stop 83
tcaattttatcaaggcaaataacta

SEQ ID NO: 43939 - DNA, 25 bp, Artificial
  probe
  misc_feature (1)..(25): SEQ ID NO: 5247; WAN024A67_at; Start 58; Stop 82
ttcaattttatcaaggcaaataact

SEQ ID NO: 43940 - DNA, 25 bp, Artificial
  probe
  misc_feature (1)..(25): SEQ ID NO: 5247; WAN024A67_at; Start 2; Stop 26
tgattctccttgaatattacttcaa

SEQ ID NO: 43941 - DNA, 25 bp, Artificial
  probe
  misc_feature (1)..(25): SEQ ID NO: 5247; WAN024A67_at; Start 64; Stop 88
tttatcaaggcaaataactactgtt

SEQ ID NO: 43942 - DNA, 25 bp, Artificial
  probe
  misc_feature (1)..(25): SEQ ID NO: 5247; WAN024A67_at; Start 65; Stop 89
ttatcaaggcaaataactactgttt

SEQ ID NO: 43943 - DNA, 25 bp, Artificial
  probe
  misc_feature (1)..(25): SEQ ID NO: 5247; WAN024A67_at; Start 57; Stop 81
tttcaattttatcaaggcaaataac

SEQ ID NO: 43944 - DNA, 25 bp, Artificial
  probe
  misc_feature (1)..(25): SEQ ID NO: 5247; WAN024A67_at; Start 42; Stop 66
ttgttatgaatatgctttcaatttt

SEQ ID NO: 43945 - DNA, 25 bp, Artificial
  probe
  misc_feature (1)..(25): SEQ ID NO: 5247; WAN024A67_at; Start 66; Stop 90
tatcaaggcaaataactactgtttt

SEQ ID NO: 43946 - DNA, 25 bp, Artificial
  probe
  misc_feature (1)..(25): SEQ ID NO: 5247; WAN024A67_at; Start 33; Stop 57
tatatcatattgttatgaatatgct

SEQ ID NO: 43947 - DNA, 25 bp, Artificial
  probe
  misc_feature (1)..(25): SEQ ID NO: 5247; WAN024A67_at; Start 62; Stop 86
attttatcaaggcaaataactactg

SEQ ID NO: 43948 - DNA, 25 bp, Artificial
  probe
  misc_feature (1)..(25): SEQ ID NO: 5247; WAN024A67_at; Start 63; Stop 87
ttttatcaaggcaaataactactgt

SEQ ID NO: 43949 - DNA, 25 bp, Artificial
  probe
  misc_feature (1)..(25): SEQ ID NO: 5247; WAN024A67_at; Start 53; Stop 77
atgctttcaattttatcaaggcaaa

SEQ ID NO: 43950 - DNA, 25 bp, Artificial
  probe
  misc_feature (1)..(25): SEQ ID NO: 5247; WAN024A67_at; Start 56; Stop 80
ctttcaattttatcaaggcaaataa

SEQ ID NO: 43951 - DNA, 25 bp, Artificial
  probe
  misc_feature (1)..(25): SEQ ID NO: 5247; WAN024A67_at; Start 43; Stop 67
tgttatgaatatgctttcaatttta

SEQ ID NO: 43952 - DNA, 25 bp, Artificial
  probe
  misc_feature (1)..(25): SEQ ID NO: 5247; WAN024A67_at; Start 51; Stop 75
atatgctttcaattttatcaaggca

SEQ ID NO: 43953 - DNA, 25 bp, Artificial
  probe
  misc_feature (1)..(25): SEQ ID NO: 5247; WAN024A67_at; Start 47; Stop 71
atgaatatgctttcaattttatcaa

SEQ ID NO: 43954 - DNA, 25 bp, Artificial
  probe
  misc_feature (1)..(25): SEQ ID NO: 5247; WAN024A67_at; Start 45; Stop 69
ttatgaatatgctttcaattttatc

SEQ ID NO: 43955 - DNA, 25 bp, Artificial
  probe
  misc_feature (1)..(25): SEQ ID NO: 5247; WAN024A67_at; Start 55; Stop 79
gctttcaattttatcaaggcaaata

SEQ ID NO: 43956 - DNA, 25 bp, Artificial
  probe
  misc_feature (1)..(25): SEQ ID NO: 5247; WAN024A67_at; Start 37; Stop 61
tcatattgttatgaatatgctttca

SEQ ID NO: 43957 - DNA, 25 bp, Artificial
  probe
  misc_feature (1)..(25): SEQ ID NO: 5247; WAN024A67_at; Start 48; Stop 72
tgaatatgctttcaattttatcaag

SEQ ID NO: 43958 - DNA, 25 bp, Artificial
  probe
  misc_feature (1)..(25): SEQ ID NO: 5247; WAN024A67_at; Start 39; Stop 63
atattgttatgaatatgctttcaat

SEQ ID NO: 43959 - DNA, 25 bp, Artificial
  probe
  misc_feature (1)..(25): SEQ ID NO: 5247; WAN024A67_at; Start 60; Stop 84
caattttatcaaggcaaataactac

SEQ ID NO: 43960 - DNA, 25 bp, Artificial
  probe
  misc_feature (1)..(25): SEQ ID NO: 5247; WAN024A67_at; Start 1; Stop 25
ttgattctccttgaatattacttca

SEQ ID NO: 43961 - DNA, 25 bp, Artificial
  probe
  misc_feature (1)..(25): SEQ ID NO: 5247; WAN024A67_at; Start 46; Stop 70
tatgaatatgctttcaattttatca

SEQ ID NO: 43962 - DNA, 25 bp, Artificial
  probe
  misc_feature (1)..(25): SEQ ID NO: 5247; WAN024A67_at; Start 68; Stop 92
tcaaggcaaataactactgttttaa

SEQ ID NO: 43963 - DNA, 25 bp, Artificial
  probe
  misc_feature (1)..(25): SEQ ID NO: 5247; WAN024A67_at; Start 54; Stop 78
tgctttcaattttatcaaggcaaat

SEQ ID NO: 43964 - DNA, 25 bp, Artificial
  probe
  misc_feature (1)..(25): SEQ ID NO: 5247; WAN024A67_at; Start 50; Stop 74
aatatgctttcaattttatcaaggc

SEQ ID NO: 43965 - DNA, 25 bp, Artificial
  probe
  misc_feature (1)..(25): SEQ ID NO: 5247; WAN024A67_at; Start 40; Stop 64
tattgttatgaatatgctttcaatt

SEQ ID NO: 43966 - DNA, 25 bp, Artificial
  probe
  misc_feature (1)..(25): SEQ ID NO: 5247; WAN024A67_at; Start 52; Stop 76
tatgctttcaattttatcaaggcaa

SEQ ID NO: 43967 - DNA, 25 bp, Artificial
  probe
  misc_feature (1)..(25): SEQ ID NO: 5629; WAN024A68_at; Start 38; Stop 62
gaatatctatatcaaatagtaacaa

SEQ ID NO: 43968 - DNA, 25 bp, Artificial
  probe
  misc_feature (1)..(25): SEQ ID NO: 5629; WAN024A68_at; Start 13; Stop 37
caccaagtaatgcacattgaaaatt

SEQ ID NO: 43969 - DNA, 25 bp, Artificial
  probe
  misc_feature (1)..(25): SEQ ID NO: 5629; WAN024A68_at; Start 95; Stop 119
agagtttatgactgaaaggtcagaa

SEQ ID NO: 43970 - DNA, 25 bp, Artificial
  probe
  misc_feature (1)..(25): SEQ ID NO: 5629; WAN024A68_at; Start 1; Stop 25
ttggtgagagatcaccaagtaatgc

SEQ ID NO: 43971 - DNA, 25 bp, Artificial
  probe
  misc_feature (1)..(25): SEQ ID NO: 5629; WAN024A68_at; Start 90; Stop 114
taataagagtttatgactgaaaggt

SEQ ID NO: 43972 - DNA, 25 bp, Artificial
  probe
  misc_feature (1)..(25): SEQ ID NO: 5629; WAN024A68_at; Start 94; Stop 118
aagagtttatgactgaaaggtcaga

SEQ ID NO: 43973 - DNA, 25 bp, Artificial
  probe
  misc_feature (1)..(25): SEQ ID NO: 5629; WAN024A68_at; Start 75; Stop 99
aaaacgctgtagtattaataagagt

SEQ ID NO: 43974 - DNA, 25 bp, Artificial
  probe
  misc_feature (1)..(25): SEQ ID NO: 5629; WAN024A68_at; Start 73; Stop 97
cgaaaacgctgtagtattaataaga

SEQ ID NO: 43975 - DNA, 25 bp, Artificial
  probe
  misc_feature (1)..(25): SEQ ID NO: 5629; WAN024A68_at; Start 16; Stop 40
caagtaatgcacattgaaaattgaa

SEQ ID NO: 43976 - DNA, 25 bp, Artificial
  probe
  misc_feature (1)..(25): SEQ ID NO: 5629; WAN024A68_at; Start 98; Stop 122
gtttatgactgaaaggtcagaaaat

SEQ ID NO: 43977 - DNA, 25 bp, Artificial
  probe
  misc_feature (1)..(25): SEQ ID NO: 5629; WAN024A68_at; Start 41; Stop 65
tatctatatcaaatagtaacaagaa

SEQ ID NO: 43978 - DNA, 25 bp, Artificial
  probe
  misc_feature (1)..(25): SEQ ID NO: 5629; WAN024A68_at; Start 7; Stop 31
agagatcaccaagtaatgcacattg

SEQ ID NO: 43979 - DNA, 25 bp, Artificial
  probe
  misc_feature (1)..(25): SEQ ID NO: 5629; WAN024A68_at; Start 5; Stop 29
tgagagatcaccaagtaatgcacat

SEQ ID NO: 43980 - DNA, 25 bp, Artificial
  probe
  misc_feature (1)..(25): SEQ ID NO: 5629; WAN024A68_at; Start 12; Stop 36
tcaccaagtaatgcacattgaaaat

SEQ ID NO: 43981 - DNA, 25 bp, Artificial
  probe
  misc_feature (1)..(25): SEQ ID NO: 5629; WAN024A68_at; Start 9; Stop 33
agatcaccaagtaatgcacattgaa

SEQ ID NO: 43982 - DNA, 25 bp, Artificial
  probe
  misc_feature (1)..(25): SEQ ID NO: 5629; WAN024A68_at; Start 8; Stop 32
gagatcaccaagtaatgcacattga

SEQ ID NO: 43983 - DNA, 25 bp, Artificial
  probe
  misc_feature (1)..(25): SEQ ID NO: 5629; WAN024A68_at; Start 2; Stop 26
tggtgagagatcaccaagtaatgca

SEQ ID NO: 43984 - DNA, 25 bp, Artificial
  probe
  misc_feature (1)..(25): SEQ ID NO: 5629; WAN024A68_at; Start 20; Stop 44
taatgcacattgaaaattgaatatc

SEQ ID NO: 43985 - DNA, 25 bp, Artificial
  probe
  misc_feature (1)..(25): SEQ ID NO: 5629; WAN024A68_at; Start 96; Stop 120
gagtttatgactgaaaggtcagaaa

SEQ ID NO: 43986 - DNA, 25 bp, Artificial
  probe
  misc_feature (1)..(25): SEQ ID NO: 5629; WAN024A68_at; Start 91; Stop 115
aataagagtttatgactgaaaggtc

SEQ ID NO: 43987 - DNA, 25 bp, Artificial
  probe
  misc_feature (1)..(25): SEQ ID NO: 5629; WAN024A68_at; Start 79; Stop 103
cgctgtagtattaataagagtttat

SEQ ID NO: 43988 - DNA, 25 bp, Artificial
  probe
  misc_feature (1)..(25): SEQ ID NO: 5629; WAN024A68_at; Start 10; Stop 34
gatcaccaagtaatgcacattgaaa

SEQ ID NO: 43989 - DNA, 25 bp, Artificial
  probe
  misc_feature (1)..(25): SEQ ID NO: 5629; WAN024A68_at; Start 74; Stop 98
gaaaacgctgtagtattaataagag

SEQ ID NO: 43990 - DNA, 25 bp, Artificial
  probe
  misc_feature (1)..(25): SEQ ID NO: 5629; WAN024A68_at; Start 22; Stop 46
atgcacattgaaaattgaatatcta

SEQ ID NO: 43991 - DNA, 25 bp, Artificial
  probe
  misc_feature (1)..(25): SEQ ID NO: 5629; WAN024A68_at; Start 3; Stop 27
ggtgagagatcaccaagtaatgcac

SEQ ID NO: 43992 - DNA, 25 bp, Artificial
  probe
  misc_feature (1)..(25): SEQ ID NO: 5629; WAN024A68_at; Start 47; Stop 71
tatcaaatagtaacaagaaaataaa

SEQ ID NO: 43993 - DNA, 25 bp, Artificial
  probe
  misc_feature (1)..(25): SEQ ID NO: 5629; WAN024A68_at; Start 100; Stop 124
ttatgactgaaaggtcagaaaataa

SEQ ID NO: 43994 - DNA, 25 bp, Artificial
  probe
  misc_feature (1)..(25): SEQ ID NO: 5629; WAN024A68_at; Start 6; Stop 30
gagagatcaccaagtaatgcacatt

SEQ ID NO: 43995 - DNA, 25 bp, Artificial
  probe
  misc_feature (1)..(25): SEQ ID NO: 5629; WAN024A68_at; Start 4; Stop 28
gtgagagatcaccaagtaatgcaca

SEQ ID NO: 43996 - DNA, 25 bp, Artificial
  probe
  misc_feature (1)..(25): SEQ ID NO: 5629; WAN024A68_at; Start 72; Stop 96
ccgaaaacgctgtagtattaataag

SEQ ID NO: 43997 - DNA, 25 bp, Artificial
  probe
  misc_feature (1)..(25): SEQ ID NO: 5629; WAN024A68_at; Start 44; Stop 68
ctatatcaaatagtaacaagaaaat

SEQ ID NO: 43998 - DNA, 25 bp, Artificial
  probe
  misc_feature (1)..(25): SEQ ID NO: 5629; WAN024A68_at; Start 93; Stop 117
taagagtttatgactgaaaggtcag

SEQ ID NO: 43999 - DNA, 25 bp, Artificial
  probe
  misc_feature (1)..(25): SEQ ID NO: 5629; WAN024A68_at; Start 15; Stop 39
ccaagtaatgcacattgaaaattga

SEQ ID NO: 44000 - DNA, 25 bp, Artificial
  probe
  misc_feature (1)..(25): SEQ ID NO: 5629; WAN024A68_at; Start 80; Stop 104
gctgtagtattaataagagtttatg

SEQ ID NO: 44001 - DNA, 25 bp, Artificial
  probe
  misc_feature (1)..(25): SEQ ID NO: 4810; WAN024A69_at; Start 97; Stop 121
tgtgcattacttggtgatctctcac

SEQ ID NO: 44002 - DNA, 25 bp, Artificial
  probe
  misc_feature (1)..(25): SEQ ID NO: 4810; WAN024A69_at; Start 61; Stop 85
tcttgttactatttgatatagatat

SEQ ID NO: 44003 - DNA, 25 bp, Artificial
  probe
  misc_feature (1)..(25): SEQ ID NO: 4810; WAN024A69_at; Start 87; Stop 111
caattttcaatgtgcattacttggt

SEQ ID NO: 44004 - DNA, 25 bp, Artificial
  probe
  misc_feature (1)..(25): SEQ ID NO: 4810; WAN024A69_at; Start 81; Stop 105
gatattcaattttcaatgtgcatta

SEQ ID NO: 44005 - DNA, 25 bp, Artificial
  probe
  misc_feature (1)..(25): SEQ ID NO: 4810; WAN024A69_at; Start 2; Stop 26
tattttctgacctttcagtcataaa

SEQ ID NO: 44006 - DNA, 25 bp, Artificial
  probe
  misc_feature (1)..(25): SEQ ID NO: 4810; WAN024A69_at; Start 22; Stop 46
ataaactcttattaatactacagcg

SEQ ID NO: 44007 - DNA, 25 bp, Artificial
  probe
  misc_feature (1)..(25): SEQ ID NO: 4810; WAN024A69_at; Start 4; Stop 28
ttttctgacctttcagtcataaact

SEQ ID NO: 44008 - DNA, 25 bp, Artificial
  probe
  misc_feature (1)..(25): SEQ ID NO: 4810; WAN024A69_at; Start 29; Stop 53
cttattaatactacagcgttttcgg

SEQ ID NO: 44009 - DNA, 25 bp, Artificial
  probe
  misc_feature (1)..(25): SEQ ID NO: 4810; WAN024A69_at; Start 23; Stop 47
taaactcttattaatactacagcgt

SEQ ID NO: 44010 - DNA, 25 bp, Artificial
  probe
  misc_feature (1)..(25): SEQ ID NO: 4810; WAN024A69_at; Start 94; Stop 118
caatgtgcattacttggtgatctct

SEQ ID NO: 44011 - DNA, 25 bp, Artificial
  probe
  misc_feature (1)..(25): SEQ ID NO: 4810; WAN024A69_at; Start 28; Stop 52
tcttattaatactacagcgttttcg

SEQ ID NO: 44012 - DNA, 25 bp, Artificial
  probe
  misc_feature (1)..(25): SEQ ID NO: 4810; WAN024A69_at; Start 95; Stop 119
aatgtgcattacttggtgatctctc

SEQ ID NO: 44013 - DNA, 25 bp, Artificial
  probe
  misc_feature (1)..(25): SEQ ID NO: 4810; WAN024A69_at; Start 6; Stop 30
ttctgacctttcagtcataaactct

SEQ ID NO: 44014 - DNA, 25 bp, Artificial
  probe
  misc_feature (1)..(25): SEQ ID NO: 4810; WAN024A69_at; Start 10; Stop 34
gacctttcagtcataaactcttatt

SEQ ID NO: 44015 - DNA, 25 bp, Artificial
  probe
  misc_feature (1)..(25): SEQ ID NO: 4810; WAN024A69_at; Start 99; Stop 123
tgcattacttggtgatctctcacca

SEQ ID NO: 44016 - DNA, 25 bp, Artificial
  probe
  misc_feature (1)..(25): SEQ ID NO: 4810; WAN024A69_at; Start 93; Stop 117
tcaatgtgcattacttggtgatctc

SEQ ID NO: 44017 - DNA, 25 bp, Artificial
  probe
  misc_feature (1)..(25): SEQ ID NO: 4810; WAN024A69_at; Start 96; Stop 120
atgtgcattacttggtgatctctca

SEQ ID NO: 44018 - DNA, 25 bp, Artificial
  probe
  misc_feature (1)..(25): SEQ ID NO: 4810; WAN024A69_at; Start 7; Stop 31
tctgacctttcagtcataaactctt

SEQ ID NO: 44019 - DNA, 25 bp, Artificial
  probe
  misc_feature (1)..(25): SEQ ID NO: 4810; WAN024A69_at; Start 100; Stop 124
gcattacttggtgatctctcaccaa

SEQ ID NO: 44020 - DNA, 25 bp, Artificial
  probe
  misc_feature (1)..(25): SEQ ID NO: 4810; WAN024A69_at; Start 79; Stop 103
tagatattcaattttcaatgtgcat

SEQ ID NO: 44021 - DNA, 25 bp, Artificial
  probe
  misc_feature (1)..(25): SEQ ID NO: 4810; WAN024A69_at; Start 86; Stop 110
tcaattttcaatgtgcattacttgg

SEQ ID NO: 44022 - DNA, 25 bp, Artificial
  probe
  misc_feature (1)..(25): SEQ ID NO: 4810; WAN024A69_at; Start 91; Stop 115
tttcaatgtgcattacttggtgatc

SEQ ID NO: 44023 - DNA, 25 bp, Artificial
  probe
  misc_feature (1)..(25): SEQ ID NO: 4810; WAN024A69_at; Start 8; Stop 32
ctgacctttcagtcataaactctta

SEQ ID NO: 44024 - DNA, 25 bp, Artificial
  probe
  misc_feature (1)..(25): SEQ ID NO: 4810; WAN024A69_at; Start 88; Stop 112
aattttcaatgtgcattacttggtg

SEQ ID NO: 44025 - DNA, 25 bp, Artificial
  probe
  misc_feature (1)..(25): SEQ ID NO: 4810; WAN024A69_at; Start 21; Stop 45
cataaactcttattaatactacagc

SEQ ID NO: 44026 - DNA, 25 bp, Artificial
  probe
  misc_feature (1)..(25): SEQ ID NO: 4810; WAN024A69_at; Start 65; Stop 89
gttactatttgatatagatattcaa

SEQ ID NO: 44027 - DNA, 25 bp, Artificial
  probe
  misc_feature (1)..(25): SEQ ID NO: 4810; WAN024A69_at; Start 83; Stop 107
tattcaattttcaatgtgcattact

SEQ ID NO: 44028 - DNA, 25 bp, Artificial
  probe
  misc_feature (1)..(25): SEQ ID NO: 4810; WAN024A69_at; Start 92; Stop 116
ttcaatgtgcattacttggtgatct

SEQ ID NO: 44029 - DNA, 25 bp, Artificial
  probe
  misc_feature (1)..(25): SEQ ID NO: 4810; WAN024A69_at; Start 89; Stop 113
attttcaatgtgcattacttggtga

SEQ ID NO: 44030 - DNA, 25 bp, Artificial
  probe
  misc_feature (1)..(25): SEQ ID NO: 4810; WAN024A69_at; Start 12; Stop 36
cctttcagtcataaactcttattaa

SEQ ID NO: 44031 - DNA, 25 bp, Artificial
  probe
  misc_feature (1)..(25): SEQ ID NO: 4810; WAN024A69_at; Start 25; Stop 49
aactcttattaatactacagcgttt

SEQ ID NO: 44032 - DNA, 25 bp, Artificial
  probe
  misc_feature (1)..(25): SEQ ID NO: 4810; WAN024A69_at; Start 24; Stop 48
aaactcttattaatactacagcgtt

SEQ ID NO: 44033 - DNA, 25 bp, Artificial
  probe
  misc_feature (1)..(25): SEQ ID NO: 4810; WAN024A69_at; Start 98; Stop 122
gtgcattacttggtgatctctcacc

SEQ ID NO: 44034 - DNA, 25 bp, Artificial
  probe
  misc_feature (1)..(25): SEQ ID NO: 4810; WAN024A69_at; Start 11; Stop 35
acctttcagtcataaactcttatta

SEQ ID NO: 44035 - DNA, 25 bp, Artificial
  probe
  misc_feature (1)..(25): SEQ ID NO: 3626; WAN024A6A_at; Start 7; Stop 31
gaagaagtctagtgttatgagatat

SEQ ID NO: 44036 - DNA, 25 bp, Artificial
  probe
  misc_feature (1)..(25): SEQ ID NO: 3626; WAN024A6A_at; Start 40; Stop 64
ctaacactgggcttttgtttagaat

SEQ ID NO: 44037 - DNA, 25 bp, Artificial
  probe
  misc_feature (1)..(25): SEQ ID NO: 3626; WAN024A6A_at; Start 30; Stop 54
attaaagctcctaacactgggcttt

SEQ ID NO: 44038 - DNA, 25 bp, Artificial
  probe
  misc_feature (1)..(25): SEQ ID NO: 3626; WAN024A6A_at; Start 24; Stop 48
tgagatattaaagctcctaacactg

SEQ ID NO: 44039 - DNA, 25 bp, Artificial
  probe
  misc_feature (1)..(25): SEQ ID NO: 3626; WAN024A6A_at; Start 66; Stop 90
tcttttctttttctataggatatgg

SEQ ID NO: 44040 - DNA, 25 bp, Artificial
  probe
  misc_feature (1)..(25): SEQ ID NO: 3626; WAN024A6A_at; Start 71; Stop 95
tctttttctataggatatggtattc

SEQ ID NO: 44041 - DNA, 25 bp, Artificial
  probe
  misc_feature (1)..(25): SEQ ID NO: 3626; WAN024A6A_at; Start 89; Stop 113
ggtattctatgtagaaaatatatgt

SEQ ID NO: 44042 - DNA, 25 bp, Artificial
  probe
  misc_feature (1)..(25): SEQ ID NO: 3626; WAN024A6A_at; Start 135; Stop 159
aaacatcattagtaaaaggagttag

SEQ ID NO: 44043 - DNA, 25 bp, Artificial
  probe
  misc_feature (1)..(25): SEQ ID NO: 3626; WAN024A6A_at; Start 18; Stop 42
gtgttatgagatattaaagctccta

SEQ ID NO: 44044 - DNA, 25 bp, Artificial
  probe
  misc_feature (1)..(25): SEQ ID NO: 3626; WAN024A6A_at; Start 131; Stop 155
atttaaacatcattagtaaaaggag

SEQ ID NO: 44045 - DNA, 25 bp, Artificial
  probe
  misc_feature (1)..(25): SEQ ID NO: 3626; WAN024A6A_at; Start 104; Stop 128
aaatatatgttaataagtaatgcca

SEQ ID NO: 44046 - DNA, 25 bp, Artificial
  probe
  misc_feature (1)..(25): SEQ ID NO: 3626; WAN024A6A_at; Start 44; Stop 68
cactgggcttttgtttagaatttct

SEQ ID NO: 44047 - DNA, 25 bp, Artificial
  probe
  misc_feature (1)..(25): SEQ ID NO: 3626; WAN024A6A_at; Start 117; Stop 141
taagtaatgccaatatttaaacatc

SEQ ID NO: 44048 - DNA, 25 bp, Artificial
  probe
  misc_feature (1)..(25): SEQ ID NO: 3626; WAN024A6A_at; Start 28; Stop 52
atattaaagctcctaacactgggct

SEQ ID NO: 44049 - DNA, 25 bp, Artificial
  probe
  misc_feature (1)..(25): SEQ ID NO: 3626; WAN024A6A_at; Start 25; Stop 49
gagatattaaagctcctaacactgg

SEQ ID NO: 44050 - DNA, 25 bp, Artificial
  probe
  misc_feature (1)..(25): SEQ ID NO: 3626; WAN024A6A_at; Start 138; Stop 162
catcattagtaaaaggagttagatt

SEQ ID NO: 44051 - DNA, 25 bp, Artificial
  probe
  misc_feature (1)..(25): SEQ ID NO: 3626; WAN024A6A_at; Start 32; Stop 56
taaagctcctaacactgggcttttg

SEQ ID NO: 44052 - DNA, 25 bp, Artificial
  probe
  misc_feature (1)..(25): SEQ ID NO: 3626; WAN024A6A_at; Start 125; Stop 149
gccaatatttaaacatcattagtaa

SEQ ID NO: 44053 - DNA, 25 bp, Artificial
  probe
  misc_feature (1)..(25): SEQ ID NO: 3626; WAN024A6A_at; Start 19; Stop 43
tgttatgagatattaaagctcctaa

SEQ ID NO: 44054 - DNA, 25 bp, Artificial
  probe
  misc_feature (1)..(25): SEQ ID NO: 3626; WAN024A6A_at; Start 81; Stop 105
taggatatggtattctatgtagaaa

SEQ ID NO: 44055 - DNA, 25 bp, Artificial
  probe
  misc_feature (1)..(25): SEQ ID NO: 3626; WAN024A6A_at; Start 1; Stop 25
gatagagaagaagtctagtgttatg

SEQ ID NO: 44056 - DNA, 25 bp, Artificial
  probe
  misc_feature (1)..(25): SEQ ID NO: 3626; WAN024A6A_at; Start 27; Stop 51
gatattaaagctcctaacactgggc

SEQ ID NO: 44057 - DNA, 25 bp, Artificial
  probe
  misc_feature (1)..(25): SEQ ID NO: 3626; WAN024A6A_at; Start 36; Stop 60
gctcctaacactgggcttttgttta

SEQ ID NO: 44058 - DNA, 25 bp, Artificial
  probe
  misc_feature (1)..(25): SEQ ID NO: 3626; WAN024A6A_at; Start 107; Stop 131
tatatgttaataagtaatgccaata

SEQ ID NO: 44059 - DNA, 25 bp, Artificial
  probe
  misc_feature (1)..(25): SEQ ID NO: 3626; WAN024A6A_at; Start 34; Stop 58
aagctcctaacactgggcttttgtt

SEQ ID NO: 44060 - DNA, 25 bp, Artificial
  probe
  misc_feature (1)..(25): SEQ ID NO: 3626; WAN024A6A_at; Start 5; Stop 29
gagaagaagtctagtgttatgagat

SEQ ID NO: 44061 - DNA, 25 bp, Artificial
  probe
  misc_feature (1)..(25): SEQ ID NO: 3626; WAN024A6A_at; Start 33; Stop 57
aaagctcctaacactgggcttttgt

SEQ ID NO: 44062 - DNA, 25 bp, Artificial
  probe
  misc_feature (1)..(25): SEQ ID NO: 3626; WAN024A6A_at; Start 3; Stop 27
tagagaagaagtctagtgttatgag

SEQ ID NO: 44063 - DNA, 25 bp, Artificial
  probe
  misc_feature (1)..(25): SEQ ID NO: 3626; WAN024A6A_at; Start 22; Stop 46
tatgagatattaaagctcctaacac

SEQ ID NO: 44064 - DNA, 25 bp, Artificial
  probe
  misc_feature (1)..(25): SEQ ID NO: 3626; WAN024A6A_at; Start 72; Stop 96
ctttttctataggatatggtattct

SEQ ID NO: 44065 - DNA, 25 bp, Artificial
  probe
  misc_feature (1)..(25): SEQ ID NO: 3626; WAN024A6A_at; Start 29; Stop 53
tattaaagctcctaacactgggctt

SEQ ID NO: 44066 - DNA, 25 bp, Artificial
  probe
  misc_feature (1)..(25): SEQ ID NO: 3626; WAN024A6A_at; Start 26; Stop 50
agatattaaagctcctaacactggg

SEQ ID NO: 44067 - DNA, 25 bp, Artificial
  probe
  misc_feature (1)..(25): SEQ ID NO: 3626; WAN024A6A_at; Start 16; Stop 40
tagtgttatgagatattaaagctcc

SEQ ID NO: 44068 - DNA, 25 bp, Artificial
  probe
  misc_feature (1)..(25): SEQ ID NO: 3626; WAN024A6A_at; Start 10; Stop 34
gaagtctagtgttatgagatattaa

SEQ ID NO: 44069 - DNA, 25 bp, Artificial
  probe
  misc_feature (1)..(25): SEQ ID NO: 3200; WAN024A6B_at; Start 59; Stop 83
tttctacatagaataccatatccta

SEQ ID NO: 44070 - DNA, 25 bp, Artificial
  probe
  misc_feature (1)..(25): SEQ ID NO: 3200; WAN024A6B_at; Start 136; Stop 160
tctcataacactagacttcttctct

SEQ ID NO: 44071 - DNA, 25 bp, Artificial
  probe
  misc_feature (1)..(25): SEQ ID NO: 3200; WAN024A6B_at; Start 36; Stop 60
tggcattacttattaacatatattt

SEQ ID NO: 44072 - DNA, 25 bp, Artificial
  probe
  misc_feature (1)..(25): SEQ ID NO: 3200; WAN024A6B_at; Start 122; Stop 146
taggagctttaatatctcataacac

SEQ ID NO: 44073 - DNA, 25 bp, Artificial
  probe
  misc_feature (1)..(25): SEQ ID NO: 3200; WAN024A6B_at; Start 139; Stop 163
cataacactagacttcttctctatc

SEQ ID NO: 44074 - DNA, 25 bp, Artificial
  probe
  misc_feature (1)..(25): SEQ ID NO: 3200; WAN024A6B_at; Start 134; Stop 158
tatctcataacactagacttcttct

SEQ ID NO: 44075 - DNA, 25 bp, Artificial
  probe
  misc_feature (1)..(25): SEQ ID NO: 3200; WAN024A6B_at; Start 4; Stop 28
tctaactccttttactaatgatgtt

SEQ ID NO: 44076 - DNA, 25 bp, Artificial
  probe
  misc_feature (1)..(25): SEQ ID NO: 3200; WAN024A6B_at; Start 74; Stop 98
ccatatcctatagaaaaagaaaaga

SEQ ID NO: 44077 - DNA, 25 bp, Artificial
  probe
  misc_feature (1)..(25): SEQ ID NO: 3200; WAN024A6B_at; Start 69; Stop 93
gaataccatatcctatagaaaaaga

SEQ ID NO: 44078 - DNA, 25 bp, Artificial
  probe
  misc_feature (1)..(25): SEQ ID NO: 3200; WAN024A6B_at; Start 106; Stop 130
aacaaaagcccagtgttaggagctt

SEQ ID NO: 44079 - DNA, 25 bp, Artificial
  probe
  misc_feature (1)..(25): SEQ ID NO: 3200; WAN024A6B_at; Start 127; Stop 151
gctttaatatctcataacactagac

SEQ ID NO: 44080 - DNA, 25 bp, Artificial
  probe
  misc_feature (1)..(25): SEQ ID NO: 3200; WAN024A6B_at; Start 63; Stop 87
tacatagaataccatatcctataga

SEQ ID NO: 44081 - DNA, 25 bp, Artificial
  probe
  misc_feature (1)..(25): SEQ ID NO: 3200; WAN024A6B_at; Start 118; Stop 142
gtgttaggagctttaatatctcata

SEQ ID NO: 44082 - DNA, 25 bp, Artificial
  probe
  misc_feature (1)..(25): SEQ ID NO: 3200; WAN024A6B_at; Start 116; Stop 140
cagtgttaggagctttaatatctca

SEQ ID NO: 44083 - DNA, 25 bp, Artificial
  probe
  misc_feature (1)..(25): SEQ ID NO: 3200; WAN024A6B_at; Start 114; Stop 138
cccagtgttaggagctttaatatct

SEQ ID NO: 44084 - DNA, 25 bp, Artificial
  probe
  misc_feature (1)..(25): SEQ ID NO: 3200; WAN024A6B_at; Start 72; Stop 96
taccatatcctatagaaaaagaaaa

SEQ ID NO: 44085 - DNA, 25 bp, Artificial
  probe
  misc_feature (1)..(25): SEQ ID NO: 3200; WAN024A6B_at; Start 108; Stop 132
caaaagcccagtgttaggagcttta

SEQ ID NO: 44086 - DNA, 25 bp, Artificial
  probe
  misc_feature (1)..(25): SEQ ID NO: 3200; WAN024A6B_at; Start 113; Stop 137
gcccagtgttaggagctttaatatc

SEQ ID NO: 44087 - DNA, 25 bp, Artificial
  probe
  misc_feature (1)..(25): SEQ ID NO: 3200; WAN024A6B_at; Start 131; Stop 155
taatatctcataacactagacttct

SEQ ID NO: 44088 - DNA, 25 bp, Artificial
  probe
  misc_feature (1)..(25): SEQ ID NO: 3200; WAN024A6B_at; Start 100; Stop 124
attctaaacaaaagcccagtgttag

SEQ ID NO: 44089 - DNA, 25 bp, Artificial
  probe
  misc_feature (1)..(25): SEQ ID NO: 3200; WAN024A6B_at; Start 29; Stop 53
taaatattggcattacttattaaca

SEQ ID NO: 44090 - DNA, 25 bp, Artificial
  probe
  misc_feature (1)..(25): SEQ ID NO: 3200; WAN024A6B_at; Start 96; Stop 120
agaaattctaaacaaaagcccagtg

SEQ ID NO: 44091 - DNA, 25 bp, Artificial
  probe
  misc_feature (1)..(25): SEQ ID NO: 3200; WAN024A6B_at; Start 52; Stop 76
catatattttctacatagaatacca

SEQ ID NO: 44092 - DNA, 25 bp, Artificial
  probe
  misc_feature (1)..(25): SEQ ID NO: 3200; WAN024A6B_at; Start 111; Stop 135
aagcccagtgttaggagctttaata

SEQ ID NO: 44093 - DNA, 25 bp, Artificial
  probe
  misc_feature (1)..(25): SEQ ID NO: 3200; WAN024A6B_at; Start 125; Stop 149
gagctttaatatctcataacactag

SEQ ID NO: 44094 - DNA, 25 bp, Artificial
  probe
  misc_feature (1)..(25): SEQ ID NO: 3200; WAN024A6B_at; Start 23; Stop 47
gatgtttaaatattggcattactta

SEQ ID NO: 44095 - DNA, 25 bp, Artificial
  probe
  misc_feature (1)..(25): SEQ ID NO: 3200; WAN024A6B_at; Start 124; Stop 148
ggagctttaatatctcataacacta

SEQ ID NO: 44096 - DNA, 25 bp, Artificial
  probe
  misc_feature (1)..(25): SEQ ID NO: 3200; WAN024A6B_at; Start 16; Stop 40
tactaatgatgtttaaatattggca

SEQ ID NO: 44097 - DNA, 25 bp, Artificial
  probe
  misc_feature (1)..(25): SEQ ID NO: 3200; WAN024A6B_at; Start 2; Stop 26
aatctaactccttttactaatgatg

SEQ ID NO: 44098 - DNA, 25 bp, Artificial
  probe
  misc_feature (1)..(25): SEQ ID NO: 3200; WAN024A6B_at; Start 67; Stop 91
tagaataccatatcctatagaaaaa

SEQ ID NO: 44099 - DNA, 25 bp, Artificial
  probe
  misc_feature (1)..(25): SEQ ID NO: 3200; WAN024A6B_at; Start 75; Stop 99
catatcctatagaaaaagaaaagaa

SEQ ID NO: 44100 - DNA, 25 bp, Artificial
  probe
  misc_feature (1)..(25): SEQ ID NO: 3200; WAN024A6B_at; Start 115; Stop 139
ccagtgttaggagctttaatatctc

SEQ ID NO: 44101 - DNA, 25 bp, Artificial
  probe
  misc_feature (1)..(25): SEQ ID NO: 3200; WAN024A6B_at; Start 104; Stop 128
taaacaaaagcccagtgttaggagc

SEQ ID NO: 44102 - DNA, 25 bp, Artificial
  probe
  misc_feature (1)..(25): SEQ ID NO: 3200; WAN024A6B_at; Start 105; Stop 129
aaacaaaagcccagtgttaggagct

SEQ ID NO: 44103 - DNA, 25 bp, Artificial
  probe
  misc_feature (1)..(25): SEQ ID NO: 5905; WAN024A6C_at; Start 136; Stop 160
agcataggtaggtcattacaaaaga

SEQ ID NO: 44104 - DNA, 25 bp, Artificial
  probe
  misc_feature (1)..(25): SEQ ID NO: 5905; WAN024A6C_at; Start 149; Stop 173
cattacaaaagaaacgagacatcga

SEQ ID NO: 44105 - DNA, 25 bp, Artificial
  probe
  misc_feature (1)..(25): SEQ ID NO: 5905; WAN024A6C_at; Start 107; Stop 131
aaacgtcggaaaaggcgtagtgatg

SEQ ID NO: 44106 - DNA, 25 bp, Artificial
  probe
  misc_feature (1)..(25): SEQ ID NO: 5905; WAN024A6C_at; Start 108; Stop 132
aacgtcggaaaaggcgtagtgatgc

SEQ ID NO: 44107 - DNA, 25 bp, Artificial
  probe
  misc_feature (1)..(25): SEQ ID NO: 5905; WAN024A6C_at; Start 150; Stop 174
attacaaaagaaacgagacatcgat

SEQ ID NO: 44108 - DNA, 25 bp, Artificial
  probe
  misc_feature (1)..(25): SEQ ID NO: 5905; WAN024A6C_at; Start 134; Stop 158
agagcataggtaggtcattacaaaa

SEQ ID NO: 44109 - DNA, 25 bp, Artificial
  probe
  misc_feature (1)..(25): SEQ ID NO: 5905; WAN024A6C_at; Start 57; Stop 81
tcataaaataatttgacaaaaactg

SEQ ID NO: 44110 - DNA, 25 bp, Artificial
  probe
  misc_feature (1)..(25): SEQ ID NO: 5905; WAN024A6C_at; Start 148; Stop 172
tcattacaaaagaaacgagacatcg

SEQ ID NO: 44111 - DNA, 25 bp, Artificial
  probe
  misc_feature (1)..(25): SEQ ID NO: 5905; WAN024A6C_at; Start 53; Stop 77
taattcataaaataatttgacaaaa

SEQ ID NO: 44112 - DNA, 25 bp, Artificial
  probe
  misc_feature (1)..(25): SEQ ID NO: 5905; WAN024A6C_at; Start 64; Stop 88
ataatttgacaaaaactgtactttg

SEQ ID NO: 44113 - DNA, 25 bp, Artificial
  probe
  misc_feature (1)..(25): SEQ ID NO: 5905; WAN024A6C_at; Start 58; Stop 82
cataaaataatttgacaaaaactgt

SEQ ID NO: 44114 - DNA, 25 bp, Artificial
  probe
  misc_feature (1)..(25): SEQ ID NO: 5905; WAN024A6C_at; Start 135; Stop 159
gagcataggtaggtcattacaaaag

SEQ ID NO: 44115 - DNA, 25 bp, Artificial
  probe
  misc_feature (1)..(25): SEQ ID NO: 5905; WAN024A6C_at; Start 137; Stop 161
gcataggtaggtcattacaaaagaa

SEQ ID NO: 44116 - DNA, 25 bp, Artificial
  probe
  misc_feature (1)..(25): SEQ ID NO: 585; WAN024A6D_at; Start 87; Stop 111
caaagtacagtttttgtcaaattat

SEQ ID NO: 44117 - DNA, 25 bp, Artificial
  probe
  misc_feature (1)..(25): SEQ ID NO: 585; WAN024A6D_at; Start 3; Stop 27
cgatgtctcgtttcttttgtaatga

SEQ ID NO: 44118 - DNA, 25 bp, Artificial
  probe
  misc_feature (1)..(25): SEQ ID NO: 585; WAN024A6D_at; Start 8; Stop 32
tctcgtttcttttgtaatgacctac

SEQ ID NO: 44119 - DNA, 25 bp, Artificial
  probe
  misc_feature (1)..(25): SEQ ID NO: 585; WAN024A6D_at; Start 44; Stop 68
catcactacgccttttccgacgttt

SEQ ID NO: 44120 - DNA, 25 bp, Artificial
  probe
  misc_feature (1)..(25): SEQ ID NO: 585; WAN024A6D_at; Start 93; Stop 117
acagtttttgtcaaattattttatg

SEQ ID NO: 44121 - DNA, 25 bp, Artificial
  probe
  misc_feature (1)..(25): SEQ ID NO: 585; WAN024A6D_at; Start 4; Stop 28
gatgtctcgtttcttttgtaatgac

SEQ ID NO: 44122 - DNA, 25 bp, Artificial
  probe
  misc_feature (1)..(25): SEQ ID NO: 585; WAN024A6D_at; Start 17; Stop 41
ttttgtaatgacctacctatgctct

SEQ ID NO: 44123 - DNA, 25 bp, Artificial
  probe
  misc_feature (1)..(25): SEQ ID NO: 585; WAN024A6D_at; Start 13; Stop 37
tttcttttgtaatgacctacctatg

SEQ ID NO: 44124 - DNA, 25 bp, Artificial
  probe
  misc_feature (1)..(25): SEQ ID NO: 585; WAN024A6D_at; Start 2; Stop 26
tcgatgtctcgtttcttttgtaatg

SEQ ID NO: 44125 - DNA, 25 bp, Artificial
  probe
  misc_feature (1)..(25): SEQ ID NO: 585; WAN024A6D_at; Start 6; Stop 30
tgtctcgtttcttttgtaatgacct

SEQ ID NO: 44126 - DNA, 25 bp, Artificial
  probe
  misc_feature (1)..(25): SEQ ID NO: 585; WAN024A6D_at; Start 94; Stop 118
cagtttttgtcaaattattttatga

SEQ ID NO: 44127 - DNA, 25 bp, Artificial
  probe
  misc_feature (1)..(25): SEQ ID NO: 585; WAN024A6D_at; Start 5; Stop 29
atgtctcgtttcttttgtaatgacc

SEQ ID NO: 44128 - DNA, 25 bp, Artificial
  probe
  misc_feature (1)..(25): SEQ ID NO: 585; WAN024A6D_at; Start 16; Stop 40
cttttgtaatgacctacctatgctc

SEQ ID NO: 44129 - DNA, 25 bp, Artificial
  probe
  misc_feature (1)..(25): SEQ ID NO: 585; WAN024A6D_at; Start 7; Stop 31
gtctcgtttcttttgtaatgaccta

SEQ ID NO: 44130 - DNA, 25 bp, Artificial
  probe
  misc_feature (1)..(25): SEQ ID NO: 585; WAN024A6D_at; Start 14; Stop 38
ttcttttgtaatgacctacctatgc

SEQ ID NO: 44131 - DNA, 25 bp, Artificial
  probe
  misc_feature (1)..(25): SEQ ID NO: 585; WAN024A6D_at; Start 15; Stop 39
tcttttgtaatgacctacctatgct

SEQ ID NO: 44132 - DNA, 25 bp, Artificial
  probe
  misc_feature (1)..(25): SEQ ID NO: 585; WAN024A6D_at; Start 43; Stop 67
gcatcactacgccttttccgacgtt

SEQ ID NO: 44133 - DNA, 25 bp, Artificial
  probe
  misc_feature (1)..(25): SEQ ID NO: 585; WAN024A6D_at; Start 1; Stop 25
atcgatgtctcgtttcttttgtaat

SEQ ID NO: 44134 - DNA, 25 bp, Artificial
  probe
  misc_feature (1)..(25): SEQ ID NO: 3582; WAN024A6E_at; Start 13; Stop 37
gaccaaaaaacttgttattagagca

SEQ ID NO: 44135 - DNA, 25 bp, Artificial
  probe
  misc_feature (1)..(25): SEQ ID NO: 3582; WAN024A6E_at; Start 33; Stop 57
gagcaaatttctgttataataaaac

SEQ ID NO: 44136 - DNA, 25 bp, Artificial
  probe
  misc_feature (1)..(25): SEQ ID NO: 3582; WAN024A6E_at; Start 32; Stop 56
agagcaaatttctgttataataaaa

SEQ ID NO: 44137 - DNA, 25 bp, Artificial
  probe
  misc_feature (1)..(25): SEQ ID NO: 3582; WAN024A6E_at; Start 29; Stop 53
attagagcaaatttctgttataata

SEQ ID NO: 44138 - DNA, 25 bp, Artificial
  probe
  misc_feature (1)..(25): SEQ ID NO: 3582; WAN024A6E_at; Start 31; Stop 55
tagagcaaatttctgttataataaa

SEQ ID NO: 44139 - DNA, 25 bp, Artificial
  probe
  misc_feature (1)..(25): SEQ ID NO: 3582; WAN024A6E_at; Start 30; Stop 54
ttagagcaaatttctgttataataa

SEQ ID NO: 44140 - DNA, 25 bp, Artificial
  probe
  misc_feature (1)..(25): SEQ ID NO: 3582; WAN024A6E_at; Start 35; Stop 59
gcaaatttctgttataataaaacaa

SEQ ID NO: 44141 - DNA, 25 bp, Artificial
  probe
  misc_feature (1)..(25): SEQ ID NO: 3582; WAN024A6E_at; Start 28; Stop 52
tattagagcaaatttctgttataat

SEQ ID NO: 44142 - DNA, 25 bp, Artificial
  probe
  misc_feature (1)..(25): SEQ ID NO: 3582; WAN024A6E_at; Start 12; Stop 36
tgaccaaaaaacttgttattagagc

SEQ ID NO: 44143 - DNA, 25 bp, Artificial
  probe
  misc_feature (1)..(25): SEQ ID NO: 3582; WAN024A6E_at; Start 16; Stop 40
caaaaaacttgttattagagcaaat

SEQ ID NO: 44144 - DNA, 25 bp, Artificial
  probe
  misc_feature (1)..(25): SEQ ID NO: 3582; WAN024A6E_at; Start 34; Stop 58
agcaaatttctgttataataaaaca

SEQ ID NO: 44145 - DNA, 25 bp, Artificial
  probe
  misc_feature (1)..(25): SEQ ID NO: 3582; WAN024A6E_at; Start 36; Stop 60
caaatttctgttataataaaacaag

SEQ ID NO: 44146 - DNA, 25 bp, Artificial
  probe
  misc_feature (1)..(25): SEQ ID NO: 118; WAN024A6F_at; Start 6; Stop 30
tgttttattataacagaaatttgct

SEQ ID NO: 44147 - DNA, 25 bp, Artificial
  probe
  misc_feature (1)..(25): SEQ ID NO: 118; WAN024A6F_at; Start 15; Stop 39
ataacagaaatttgctctaataaca

SEQ ID NO: 44148 - DNA, 25 bp, Artificial
  probe
  misc_feature (1)..(25): SEQ ID NO: 118; WAN024A6F_at; Start 4; Stop 28
cttgttttattataacagaaatttg

SEQ ID NO: 44149 - DNA, 25 bp, Artificial
  probe
  misc_feature (1)..(25): SEQ ID NO: 118; WAN024A6F_at; Start 17; Stop 41
aacagaaatttgctctaataacaag

SEQ ID NO: 44150 - DNA, 25 bp, Artificial
  probe
  misc_feature (1)..(25): SEQ ID NO: 118; WAN024A6F_at; Start 28; Stop 52
gctctaataacaagttttttggtca

SEQ ID NO: 44151 - DNA, 25 bp, Artificial
  probe
  misc_feature (1)..(25): SEQ ID NO: 118; WAN024A6F_at; Start 16; Stop 40
taacagaaatttgctctaataacaa

SEQ ID NO: 44152 - DNA, 25 bp, Artificial
  probe
  misc_feature (1)..(25): SEQ ID NO: 118; WAN024A6F_at; Start 8; Stop 32
ttttattataacagaaatttgctct

SEQ ID NO: 44153 - DNA, 25 bp, Artificial
  probe
  misc_feature (1)..(25): SEQ ID NO: 118; WAN024A6F_at; Start 19; Stop 43
cagaaatttgctctaataacaagtt

SEQ ID NO: 44154 - DNA, 25 bp, Artificial
  probe
  misc_feature (1)..(25): SEQ ID NO: 118; WAN024A6F_at; Start 5; Stop 29
ttgttttattataacagaaatttgc

SEQ ID NO: 44155 - DNA, 25 bp, Artificial
  probe
  misc_feature (1)..(25): SEQ ID NO: 118; WAN024A6F_at; Start 12; Stop 36
attataacagaaatttgctctaata

SEQ ID NO: 44156 - DNA, 25 bp, Artificial
  probe
  misc_feature (1)..(25): SEQ ID NO: 118; WAN024A6F_at; Start 18; Stop 42
acagaaatttgctctaataacaagt

SEQ ID NO: 44157 - DNA, 25 bp, Artificial
  probe
  misc_feature (1)..(25): SEQ ID NO: 118; WAN024A6F_at; Start 20; Stop 44
agaaatttgctctaataacaagttt

SEQ ID NO: 44158 - DNA, 25 bp, Artificial
  probe
  misc_feature (1)..(25): SEQ ID NO: 118; WAN024A6F_at; Start 14; Stop 38
tataacagaaatttgctctaataac

SEQ ID NO: 44159 - DNA, 25 bp, Artificial
  probe
  misc_feature (1)..(25): SEQ ID NO: 118; WAN024A6F_at; Start 9; Stop 33
tttattataacagaaatttgctcta

SEQ ID NO: 44160 - DNA, 25 bp, Artificial
  probe
  misc_feature (1)..(25): SEQ ID NO: 118; WAN024A6F_at; Start 27; Stop 51
tgctctaataacaagttttttggtc

SEQ ID NO: 44161 - DNA, 25 bp, Artificial
  probe
  misc_feature (1)..(25): SEQ ID NO: 118; WAN024A6F_at; Start 7; Stop 31
gttttattataacagaaatttgctc

SEQ ID NO: 44162 - DNA, 25 bp, Artificial
  probe
  misc_feature (1)..(25): SEQ ID NO: 118; WAN024A6F_at; Start 24; Stop 48
atttgctctaataacaagttttttg

SEQ ID NO: 44163 - DNA, 25 bp, Artificial
  probe
  misc_feature (1)..(25): SEQ ID NO: 118; WAN024A6F_at; Start 10; Stop 34
ttattataacagaaatttgctctaa

SEQ ID NO: 44164 - DNA, 25 bp, Artificial
  probe
  misc_feature (1)..(25): SEQ ID NO: 118; WAN024A6F_at; Start 13; Stop 37
ttataacagaaatttgctctaataa

SEQ ID NO: 44165 - DNA, 25 bp, Artificial
  probe
  misc_feature (1)..(25): SEQ ID NO: 118; WAN024A6F_at; Start 11; Stop 35
tattataacagaaatttgctctaat

SEQ ID NO: 44166 - DNA, 25 bp, Artificial
  probe
  misc_feature (1)..(25): SEQ ID NO: 4717; WAN024A6G_at; Start 75; Stop 99
tctctgtctaaagaattcccaaatg

SEQ ID NO: 44167 - DNA, 25 bp, Artificial
  probe
  misc_feature (1)..(25): SEQ ID NO: 4717; WAN024A6G_at; Start 58; Stop 82
gccgctaaaactgagaatctctgtc

SEQ ID NO: 44168 - DNA, 25 bp, Artificial
  probe
  misc_feature (1)..(25): SEQ ID NO: 4717; WAN024A6G_at; Start 105; Stop 129
cagtcccgttttagagtgactcagg

SEQ ID NO: 44169 - DNA, 25 bp, Artificial
  probe
  misc_feature (1)..(25): SEQ ID NO: 4717; WAN024A6G_at; Start 56; Stop 80
ttgccgctaaaactgagaatctctg

SEQ ID NO: 44170 - DNA, 25 bp, Artificial
  probe
  misc_feature (1)..(25): SEQ ID NO: 4717; WAN024A6G_at; Start 106; Stop 130
agtcccgttttagagtgactcaggg

SEQ ID NO: 44171 - DNA, 25 bp, Artificial
  probe
  misc_feature (1)..(25): SEQ ID NO: 4717; WAN024A6G_at; Start 88; Stop 112
aattcccaaatgctttccagtcccg

SEQ ID NO: 44172 - DNA, 25 bp, Artificial
  probe
  misc_feature (1)..(25): SEQ ID NO: 4717; WAN024A6G_at; Start 79; Stop 103
tgtctaaagaattcccaaatgcttt

SEQ ID NO: 44173 - DNA, 25 bp, Artificial
  probe
  misc_feature (1)..(25): SEQ ID NO: 4717; WAN024A6G_at; Start 53; Stop 77
aatttgccgctaaaactgagaatct

SEQ ID NO: 44174 - DNA, 25 bp, Artificial
  probe
  misc_feature (1)..(25): SEQ ID NO: 4717; WAN024A6G_at; Start 63; Stop 87
taaaactgagaatctctgtctaaag

SEQ ID NO: 44175 - DNA, 25 bp, Artificial
  probe
  misc_feature (1)..(25): SEQ ID NO: 4717; WAN024A6G_at; Start 151; Stop 175
aaaggactattatcagttagaaaga

SEQ ID NO: 44176 - DNA, 25 bp, Artificial
  probe
  misc_feature (1)..(25): SEQ ID NO: 4717; WAN024A6G_at; Start 37; Stop 61
tctttatcctgacccaaatttgccg

SEQ ID NO: 44177 - DNA, 25 bp, Artificial
  probe
  misc_feature (1)..(25): SEQ ID NO: 4717; WAN024A6G_at; Start 104; Stop 128
ccagtcccgttttagagtgactcag

SEQ ID NO: 44178 - DNA, 25 bp, Artificial
  probe
  misc_feature (1)..(25): SEQ ID NO: 4717; WAN024A6G_at; Start 85; Stop 109
aagaattcccaaatgctttccagtc

SEQ ID NO: 44179 - DNA, 25 bp, Artificial
  probe
  misc_feature (1)..(25): SEQ ID NO: 4717; WAN024A6G_at; Start 41; Stop 65
tatcctgacccaaatttgccgctaa

SEQ ID NO: 44180 - DNA, 25 bp, Artificial
  probe
  misc_feature (1)..(25): SEQ ID NO: 4717; WAN024A6G_at; Start 77; Stop 101
tctgtctaaagaattcccaaatgct

SEQ ID NO: 44181 - DNA, 25 bp, Artificial
  probe
  misc_feature (1)..(25): SEQ ID NO: 4717; WAN024A6G_at; Start 111; Stop 135
cgttttagagtgactcagggggctt

SEQ ID NO: 44182 - DNA, 25 bp, Artificial
  probe
  misc_feature (1)..(25): SEQ ID NO: 4717; WAN024A6G_at; Start 89; Stop 113
attcccaaatgctttccagtcccgt

SEQ ID NO: 44183 - DNA, 25 bp, Artificial
  probe
  misc_feature (1)..(25): SEQ ID NO: 4717; WAN024A6G_at; Start 96; Stop 120
aatgctttccagtcccgttttagag

SEQ ID NO: 44184 - DNA, 25 bp, Artificial
  probe
  misc_feature (1)..(25): SEQ ID NO: 4717; WAN024A6G_at; Start 39; Stop 63
tttatcctgacccaaatttgccgct

SEQ ID NO: 44185 - DNA, 25 bp, Artificial
  probe
  misc_feature (1)..(25): SEQ ID NO: 4717; WAN024A6G_at; Start 102; Stop 126
ttccagtcccgttttagagtgactc

SEQ ID NO: 44186 - DNA, 25 bp, Artificial
  probe
  misc_feature (1)..(25): SEQ ID NO: 4717; WAN024A6G_at; Start 66; Stop 90
aactgagaatctctgtctaaagaat

SEQ ID NO: 44187 - DNA, 25 bp, Artificial
  probe
  misc_feature (1)..(25): SEQ ID NO: 4717; WAN024A6G_at; Start 55; Stop 79
tttgccgctaaaactgagaatctct

SEQ ID NO: 44188 - DNA, 25 bp, Artificial
  probe
  misc_feature (1)..(25): SEQ ID NO: 4717; WAN024A6G_at; Start 50; Stop 74
ccaaatttgccgctaaaactgagaa

SEQ ID NO: 44189 - DNA, 25 bp, Artificial
  probe
  misc_feature (1)..(25): SEQ ID NO: 4717; WAN024A6G_at; Start 72; Stop 96
gaatctctgtctaaagaattcccaa

SEQ ID NO: 44190 - DNA, 25 bp, Artificial
  probe
  misc_feature (1)..(25): SEQ ID NO: 4717; WAN024A6G_at; Start 148; Stop 172
taaaaaggactattatcagttagaa

SEQ ID NO: 44191 - DNA, 25 bp, Artificial
  probe
  misc_feature (1)..(25): SEQ ID NO: 4717; WAN024A6G_at; Start 70; Stop 94
gagaatctctgtctaaagaattccc

SEQ ID NO: 44192 - DNA, 25 bp, Artificial
  probe
  misc_feature (1)..(25): SEQ ID NO: 4717; WAN024A6G_at; Start 60; Stop 84
cgctaaaactgagaatctctgtcta

SEQ ID NO: 44193 - DNA, 25 bp, Artificial
  probe
  misc_feature (1)..(25): SEQ ID NO: 4717; WAN024A6G_at; Start 57; Stop 81
tgccgctaaaactgagaatctctgt

SEQ ID NO: 44194 - DNA, 25 bp, Artificial
  probe
  misc_feature (1)..(25): SEQ ID NO: 4717; WAN024A6G_at; Start 83; Stop 107
taaagaattcccaaatgctttccag

SEQ ID NO: 44195 - DNA, 25 bp, Artificial
  probe
  misc_feature (1)..(25): SEQ ID NO: 4717; WAN024A6G_at; Start 97; Stop 121
atgctttccagtcccgttttagagt

SEQ ID NO: 44196 - DNA, 25 bp, Artificial
  probe
  misc_feature (1)..(25): SEQ ID NO: 4717; WAN024A6G_at; Start 46; Stop 70
tgacccaaatttgccgctaaaactg

SEQ ID NO: 44197 - DNA, 25 bp, Artificial
  probe
  misc_feature (1)..(25): SEQ ID NO: 4717; WAN024A6G_at; Start 51; Stop 75
caaatttgccgctaaaactgagaat

SEQ ID NO: 44198 - DNA, 25 bp, Artificial
  probe
  misc_feature (1)..(25): SEQ ID NO: 4717; WAN024A6G_at; Start 94; Stop 118
caaatgctttccagtcccgttttag

SEQ ID NO: 44199 - DNA, 25 bp, Artificial
  probe
  misc_feature (1)..(25): SEQ ID NO: 4717; WAN024A6G_at; Start 43; Stop 67
tcctgacccaaatttgccgctaaaa

SEQ ID NO: 44200 - DNA, 25 bp, Artificial
  probe
  misc_feature (1)..(25): SEQ ID NO: 344; WAN024A6H_at; Start 84; Stop 108
catttgggaattctttagacagaga

SEQ ID NO: 44201 - DNA, 25 bp, Artificial
  probe
  misc_feature (1)..(25): SEQ ID NO: 344; WAN024A6H_at; Start 107; Stop 131
gattctcagttttagcggcaaattt

SEQ ID NO: 44202 - DNA, 25 bp, Artificial
  probe
  misc_feature (1)..(25): SEQ ID NO: 344; WAN024A6H_at; Start 119; Stop 143
tagcggcaaatttgggtcaggataa

SEQ ID NO: 44203 - DNA, 25 bp, Artificial
  probe
  misc_feature (1)..(25): SEQ ID NO: 344; WAN024A6H_at; Start 74; Stop 98
gactggaaagcatttgggaattctt

SEQ ID NO: 44204 - DNA, 25 bp, Artificial
  probe
  misc_feature (1)..(25): SEQ ID NO: 344; WAN024A6H_at; Start 71; Stop 95
cgggactggaaagcatttgggaatt

SEQ ID NO: 44205 - DNA, 25 bp, Artificial
  probe
  misc_feature (1)..(25): SEQ ID NO: 344; WAN024A6H_at; Start 116; Stop 140
ttttagcggcaaatttgggtcagga

SEQ ID NO: 44206 - DNA, 25 bp, Artificial
  probe
  misc_feature (1)..(25): SEQ ID NO: 344; WAN024A6H_at; Start 104; Stop 128
agagattctcagttttagcggcaaa

SEQ ID NO: 44207 - DNA, 25 bp, Artificial
  probe
  misc_feature (1)..(25): SEQ ID NO: 344; WAN024A6H_at; Start 65; Stop 89
ctaaaacgggactggaaagcatttg

SEQ ID NO: 44208 - DNA, 25 bp, Artificial
  probe
  misc_feature (1)..(25): SEQ ID NO: 344; WAN024A6H_at; Start 70; Stop 94
acgggactggaaagcatttgggaat

SEQ ID NO: 44209 - DNA, 25 bp, Artificial
  probe
  misc_feature (1)..(25): SEQ ID NO: 344; WAN024A6H_at; Start 79; Stop 103
gaaagcatttgggaattctttagac

SEQ ID NO: 44210 - DNA, 25 bp, Artificial
  probe
  misc_feature (1)..(25): SEQ ID NO: 344; WAN024A6H_at; Start 62; Stop 86
actctaaaacgggactggaaagcat

SEQ ID NO: 44211 - DNA, 25 bp, Artificial
  probe
  misc_feature (1)..(25): SEQ ID NO: 344; WAN024A6H_at; Start 63; Stop 87
ctctaaaacgggactggaaagcatt

SEQ ID NO: 44212 - DNA, 25 bp, Artificial
  probe
  misc_feature (1)..(25): SEQ ID NO: 344; WAN024A6H_at; Start 102; Stop 126
acagagattctcagttttagcggca

SEQ ID NO: 44213 - DNA, 25 bp, Artificial
  probe
  misc_feature (1)..(25): SEQ ID NO: 344; WAN024A6H_at; Start 8; Stop 32
tctttctaactgataatagtccttt

SEQ ID NO: 44214 - DNA, 25 bp, Artificial
  probe
  misc_feature (1)..(25): SEQ ID NO: 344; WAN024A6H_at; Start 73; Stop 97
ggactggaaagcatttgggaattct

SEQ ID NO: 44215 - DNA, 25 bp, Artificial
  probe
  misc_feature (1)..(25): SEQ ID NO: 344; WAN024A6H_at; Start 82; Stop 106
agcatttgggaattctttagacaga

SEQ ID NO: 44216 - DNA, 25 bp, Artificial
  probe
  misc_feature (1)..(25): SEQ ID NO: 344; WAN024A6H_at; Start 113; Stop 137
cagttttagcggcaaatttgggtca

SEQ ID NO: 44217 - DNA, 25 bp, Artificial
  probe
  misc_feature (1)..(25): SEQ ID NO: 344; WAN024A6H_at; Start 114; Stop 138
agttttagcggcaaatttgggtcag

SEQ ID NO: 44218 - DNA, 25 bp, Artificial
  probe
  misc_feature (1)..(25): SEQ ID NO: 344; WAN024A6H_at; Start 54; Stop 78
cctgagtcactctaaaacgggactg

SEQ ID NO: 44219 - DNA, 25 bp, Artificial
  probe
  misc_feature (1)..(25): SEQ ID NO: 344; WAN024A6H_at; Start 92; Stop 116
aattctttagacagagattctcagt

SEQ ID NO: 44220 - DNA, 25 bp, Artificial
  probe
  misc_feature (1)..(25): SEQ ID NO: 344; WAN024A6H_at; Start 88; Stop 112
tgggaattctttagacagagattct

SEQ ID NO: 44221 - DNA, 25 bp, Artificial
  probe
  misc_feature (1)..(25): SEQ ID NO: 344; WAN024A6H_at; Start 101; Stop 125
gacagagattctcagttttagcggc

SEQ ID NO: 44222 - DNA, 25 bp, Artificial
  probe
  misc_feature (1)..(25): SEQ ID NO: 344; WAN024A6H_at; Start 37; Stop 61
tatatcaaaaaaagccccctgagtc

SEQ ID NO: 44223 - DNA, 25 bp, Artificial
  probe
  misc_feature (1)..(25): SEQ ID NO: 344; WAN024A6H_at; Start 57; Stop 81
gagtcactctaaaacgggactggaa

SEQ ID NO: 44224 - DNA, 25 bp, Artificial
  probe
  misc_feature (1)..(25): SEQ ID NO: 344; WAN024A6H_at; Start 122; Stop 146
cggcaaatttgggtcaggataaaga

SEQ ID NO: 44225 - DNA, 25 bp, Artificial
  probe
  misc_feature (1)..(25): SEQ ID NO: 344; WAN024A6H_at; Start 21; Stop 45
taatagtcctttttattatatcaaa

SEQ ID NO: 44226 - DNA, 25 bp, Artificial
  probe
  misc_feature (1)..(25): SEQ ID NO: 344; WAN024A6H_at; Start 109; Stop 133
ttctcagttttagcggcaaatttgg

SEQ ID NO: 44227 - DNA, 25 bp, Artificial
  probe
  misc_feature (1)..(25): SEQ ID NO: 344; WAN024A6H_at; Start 91; Stop 115
gaattctttagacagagattctcag

SEQ ID NO: 44228 - DNA, 25 bp, Artificial
  probe
  misc_feature (1)..(25): SEQ ID NO: 344; WAN024A6H_at; Start 12; Stop 36
tctaactgataatagtcctttttat

SEQ ID NO: 44229 - DNA, 25 bp, Artificial
  probe
  misc_feature (1)..(25): SEQ ID NO: 344; WAN024A6H_at; Start 56; Stop 80
tgagtcactctaaaacgggactgga

SEQ ID NO: 44230 - DNA, 25 bp, Artificial
  probe
  misc_feature (1)..(25): SEQ ID NO: 344; WAN024A6H_at; Start 53; Stop 77
ccctgagtcactctaaaacgggact

SEQ ID NO: 44231 - DNA, 25 bp, Artificial
  probe
  misc_feature (1)..(25): SEQ ID NO: 344; WAN024A6H_at; Start 105; Stop 129
gagattctcagttttagcggcaaat

SEQ ID NO: 44232 - DNA, 25 bp, Artificial
  probe
  misc_feature (1)..(25): SEQ ID NO: 344; WAN024A6H_at; Start 103; Stop 127
cagagattctcagttttagcggcaa

SEQ ID NO: 44233 - DNA, 25 bp, Artificial
  probe
  misc_feature (1)..(25): SEQ ID NO: 344; WAN024A6H_at; Start 124; Stop 148
gcaaatttgggtcaggataaagaaa

SEQ ID NO: 44234 - DNA, 25 bp, Artificial
  probe
  misc_feature (1)..(25): SEQ ID NO: 3282; WAN024A6I_at; Start 45; Stop 69
gaggaaacctcatttcataaactta

SEQ ID NO: 44235 - DNA, 25 bp, Artificial
  probe
  misc_feature (1)..(25): SEQ ID NO: 3282; WAN024A6I_at; Start 122; Stop 146
ctgcaaggaaatccttacagtttga

SEQ ID NO: 44236 - DNA, 25 bp, Artificial
  probe
  misc_feature (1)..(25): SEQ ID NO: 3282; WAN024A6I_at; Start 1; Stop 25
ctagctacctaatttctatttttat

SEQ ID NO: 44237 - DNA, 25 bp, Artificial
  probe
  misc_feature (1)..(25): SEQ ID NO: 3282; WAN024A6I_at; Start 92; Stop 116
aatcaaaaattccaatacgaggtag

SEQ ID NO: 44238 - DNA, 25 bp, Artificial
  probe
  misc_feature (1)..(25): SEQ ID NO: 3282; WAN024A6I_at; Start 52; Stop 76
cctcatttcataaacttaattctaa

SEQ ID NO: 44239 - DNA, 25 bp, Artificial
  probe
  misc_feature (1)..(25): SEQ ID NO: 3282; WAN024A6I_at; Start 40; Stop 64
ggtatgaggaaacctcatttcataa

SEQ ID NO: 44240 - DNA, 25 bp, Artificial
  probe
  misc_feature (1)..(25): SEQ ID NO: 3282; WAN024A6I_at; Start 72; Stop 96
tctaacataattttccgaaaaatca

SEQ ID NO: 44241 - DNA, 25 bp, Artificial
  probe
  misc_feature (1)..(25): SEQ ID NO: 3282; WAN024A6I_at; Start 109; Stop 133
cgaggtagaaaaactgcaaggaaat

SEQ ID NO: 44242 - DNA, 25 bp, Artificial
  probe
  misc_feature (1)..(25): SEQ ID NO: 3282; WAN024A6I_at; Start 26; Stop 50
tcctagtcttgctaggtatgaggaa

SEQ ID NO: 44243 - DNA, 25 bp, Artificial
  probe
  misc_feature (1)..(25): SEQ ID NO: 3282; WAN024A6I_at; Start 16; Stop 40
ctatttttattcctagtcttgctag

SEQ ID NO: 44244 - DNA, 25 bp, Artificial
  probe
  misc_feature (1)..(25): SEQ ID NO: 3282; WAN024A6I_at; Start 25; Stop 49
ttcctagtcttgctaggtatgagga

SEQ ID NO: 44245 - DNA, 25 bp, Artificial
  probe
  misc_feature (1)..(25): SEQ ID NO: 3282; WAN024A6I_at; Start 37; Stop 61
ctaggtatgaggaaacctcatttca

SEQ ID NO: 44246 - DNA, 25 bp, Artificial
  probe
  misc_feature (1)..(25): SEQ ID NO: 3282; WAN024A6I_at; Start 54; Stop 78
tcatttcataaacttaattctaaca

SEQ ID NO: 44247 - DNA, 25 bp, Artificial
  probe
  misc_feature (1)..(25): SEQ ID NO: 3282; WAN024A6I_at; Start 107; Stop 131
tacgaggtagaaaaactgcaaggaa

SEQ ID NO: 44248 - DNA, 25 bp, Artificial
  probe
  misc_feature (1)..(25): SEQ ID NO: 3282; WAN024A6I_at; Start 17; Stop 41
tatttttattcctagtcttgctagg

SEQ ID NO: 44249 - DNA, 25 bp, Artificial
  probe
  misc_feature (1)..(25): SEQ ID NO: 3282; WAN024A6I_at; Start 121; Stop 145
actgcaaggaaatccttacagtttg

SEQ ID NO: 44250 - DNA, 25 bp, Artificial
  probe
  misc_feature (1)..(25): SEQ ID NO: 3282; WAN024A6I_at; Start 117; Stop 141
aaaaactgcaaggaaatccttacag

SEQ ID NO: 44251 - DNA, 25 bp, Artificial
  probe
  misc_feature (1)..(25): SEQ ID NO: 3282; WAN024A6I_at; Start 44; Stop 68
tgaggaaacctcatttcataaactt

SEQ ID NO: 44252 - DNA, 25 bp, Artificial
  probe
  misc_feature (1)..(25): SEQ ID NO: 3282; WAN024A6I_at; Start 123; Stop 147
tgcaaggaaatccttacagtttgag

SEQ ID NO: 44253 - DNA, 25 bp, Artificial
  probe
  misc_feature (1)..(25): SEQ ID NO: 3282; WAN024A6I_at; Start 124; Stop 148
gcaaggaaatccttacagtttgagt

SEQ ID NO: 44254 - DNA, 25 bp, Artificial
  probe
  misc_feature (1)..(25): SEQ ID NO: 3282; WAN024A6I_at; Start 38; Stop 62
taggtatgaggaaacctcatttcat

SEQ ID NO: 44255 - DNA, 25 bp, Artificial
  probe
  misc_feature (1)..(25): SEQ ID NO: 3282; WAN024A6I_at; Start 101; Stop 125
ttccaatacgaggtagaaaaactgc

SEQ ID NO: 44256 - DNA, 25 bp, Artificial
  probe
  misc_feature (1)..(25): SEQ ID NO: 3282; WAN024A6I_at; Start 93; Stop 117
atcaaaaattccaatacgaggtaga

SEQ ID NO: 44257 - DNA, 25 bp, Artificial
  probe
  misc_feature (1)..(25): SEQ ID NO: 3282; WAN024A6I_at; Start 116; Stop 140
gaaaaactgcaaggaaatccttaca

SEQ ID NO: 44258 - DNA, 25 bp, Artificial
  probe
  misc_feature (1)..(25): SEQ ID NO: 3282; WAN024A6I_at; Start 94; Stop 118
tcaaaaattccaatacgaggtagaa

SEQ ID NO: 44259 - DNA, 25 bp, Artificial
  probe
  misc_feature (1)..(25): SEQ ID NO: 3282; WAN024A6I_at; Start 106; Stop 130
atacgaggtagaaaaactgcaagga

SEQ ID NO: 44260 - DNA, 25 bp, Artificial
  probe
  misc_feature (1)..(25): SEQ ID NO: 3282; WAN024A6I_at; Start 118; Stop 142
aaaactgcaaggaaatccttacagt

SEQ ID NO: 44261 - DNA, 25 bp, Artificial
  probe
  misc_feature (1)..(25): SEQ ID NO: 3282; WAN024A6I_at; Start 102; Stop 126
tccaatacgaggtagaaaaactgca

SEQ ID NO: 44262 - DNA, 25 bp, Artificial
  probe
  misc_feature (1)..(25): SEQ ID NO: 3282; WAN024A6I_at; Start 23; Stop 47
tattcctagtcttgctaggtatgag

SEQ ID NO: 44263 - DNA, 25 bp, Artificial
  probe
  misc_feature (1)..(25): SEQ ID NO: 3282; WAN024A6I_at; Start 103; Stop 127
ccaatacgaggtagaaaaactgcaa

SEQ ID NO: 44264 - DNA, 25 bp, Artificial
  probe
  misc_feature (1)..(25): SEQ ID NO: 3282; WAN024A6I_at; Start 114; Stop 138
tagaaaaactgcaaggaaatcctta

SEQ ID NO: 44265 - DNA, 25 bp, Artificial
  probe
  misc_feature (1)..(25): SEQ ID NO: 3282; WAN024A6I_at; Start 104; Stop 128
caatacgaggtagaaaaactgcaag

SEQ ID NO: 44266 - DNA, 25 bp, Artificial
  probe
  misc_feature (1)..(25): SEQ ID NO: 3282; WAN024A6I_at; Start 110; Stop 134
gaggtagaaaaactgcaaggaaatc

SEQ ID NO: 44267 - DNA, 25 bp, Artificial
  probe
  misc_feature (1)..(25): SEQ ID NO: 3282; WAN024A6I_at; Start 105; Stop 129
aatacgaggtagaaaaactgcaagg

SEQ ID NO: 44268 - DNA, 25 bp, Artificial
  probe
  misc_feature (1)..(25): SEQ ID NO: 375; WAN024A6J_at; Start 32; Stop 56
tctacctcgtattggaatttttgat

SEQ ID NO: 44269 - DNA, 25 bp, Artificial
  probe
  misc_feature (1)..(25): SEQ ID NO: 375; WAN024A6J_at; Start 25; Stop 49
cagtttttctacctcgtattggaat

SEQ ID NO: 44270 - DNA, 25 bp, Artificial
  probe
  misc_feature (1)..(25): SEQ ID NO: 375; WAN024A6J_at; Start 18; Stop 42
ttccttgcagtttttctacctcgta

SEQ ID NO: 44271 - DNA, 25 bp, Artificial
  probe
  misc_feature (1)..(25): SEQ ID NO: 375; WAN024A6J_at; Start 1; Stop 25
actcaaactgtaaggatttccttgc

SEQ ID NO: 44272 - DNA, 25 bp, Artificial
  probe
  misc_feature (1)..(25): SEQ ID NO: 375; WAN024A6J_at; Start 15; Stop 39
gatttccttgcagtttttctacctc

SEQ ID NO: 44273 - DNA, 25 bp, Artificial
  probe
  misc_feature (1)..(25): SEQ ID NO: 375; WAN024A6J_at; Start 109; Stop 133
ctagcaagactaggaataaaaatag

SEQ ID NO: 44274 - DNA, 25 bp, Artificial
  probe
  misc_feature (1)..(25): SEQ ID NO: 375; WAN024A6J_at; Start 101; Stop 125
cctcatacctagcaagactaggaat

SEQ ID NO: 44275 - DNA, 25 bp, Artificial
  probe
  misc_feature (1)..(25): SEQ ID NO: 375; WAN024A6J_at; Start 22; Stop 46
ttgcagtttttctacctcgtattgg

SEQ ID NO: 44276 - DNA, 25 bp, Artificial
  probe
  misc_feature (1)..(25): SEQ ID NO: 375; WAN024A6J_at; Start 94; Stop 118
gaggtttcctcatacctagcaagac

SEQ ID NO: 44277 - DNA, 25 bp, Artificial
  probe
  misc_feature (1)..(25): SEQ ID NO: 375; WAN024A6J_at; Start 16; Stop 40
atttccttgcagtttttctacctcg

SEQ ID NO: 44278 - DNA, 25 bp, Artificial
  probe
  misc_feature (1)..(25): SEQ ID NO: 375; WAN024A6J_at; Start 112; Stop 136
gcaagactaggaataaaaatagaaa

SEQ ID NO: 44279 - DNA, 25 bp, Artificial
  probe
  misc_feature (1)..(25): SEQ ID NO: 375; WAN024A6J_at; Start 96; Stop 120
ggtttcctcatacctagcaagacta

SEQ ID NO: 44280 - DNA, 25 bp, Artificial
  probe
  misc_feature (1)..(25): SEQ ID NO: 375; WAN024A6J_at; Start 33; Stop 57
ctacctcgtattggaatttttgatt

SEQ ID NO: 44281 - DNA, 25 bp, Artificial
  probe
  misc_feature (1)..(25): SEQ ID NO: 375; WAN024A6J_at; Start 91; Stop 115
aatgaggtttcctcatacctagcaa

SEQ ID NO: 44282 - DNA, 25 bp, Artificial
  probe
  misc_feature (1)..(25): SEQ ID NO: 375; WAN024A6J_at; Start 97; Stop 121
gtttcctcatacctagcaagactag

SEQ ID NO: 44283 - DNA, 25 bp, Artificial
  probe
  misc_feature (1)..(25): SEQ ID NO: 375; WAN024A6J_at; Start 20; Stop 44
ccttgcagtttttctacctcgtatt

SEQ ID NO: 44284 - DNA, 25 bp, Artificial
  probe
  misc_feature (1)..(25): SEQ ID NO: 375; WAN024A6J_at; Start 23; Stop 47
tgcagtttttctacctcgtattgga

SEQ ID NO: 44285 - DNA, 25 bp, Artificial
  probe
  misc_feature (1)..(25): SEQ ID NO: 375; WAN024A6J_at; Start 88; Stop 112
tgaaatgaggtttcctcatacctag

SEQ ID NO: 44286 - DNA, 25 bp, Artificial
  probe
  misc_feature (1)..(25): SEQ ID NO: 375; WAN024A6J_at; Start 53; Stop 77
tgatttttcggaaaattatgttaga

SEQ ID NO: 44287 - DNA, 25 bp, Artificial
  probe
  misc_feature (1)..(25): SEQ ID NO: 375; WAN024A6J_at; Start 74; Stop 98
tagaattaagtttatgaaatgaggt

SEQ ID NO: 44288 - DNA, 25 bp, Artificial
  probe
  misc_feature (1)..(25): SEQ ID NO: 375; WAN024A6J_at; Start 24; Stop 48
gcagtttttctacctcgtattggaa

SEQ ID NO: 44289 - DNA, 25 bp, Artificial
  probe
  misc_feature (1)..(25): SEQ ID NO: 375; WAN024A6J_at; Start 80; Stop 104
taagtttatgaaatgaggtttcctc

SEQ ID NO: 44290 - DNA, 25 bp, Artificial
  probe
  misc_feature (1)..(25): SEQ ID NO: 375; WAN024A6J_at; Start 98; Stop 122
tttcctcatacctagcaagactagg

SEQ ID NO: 44291 - DNA, 25 bp, Artificial
  probe
  misc_feature (1)..(25): SEQ ID NO: 375; WAN024A6J_at; Start 3; Stop 27
tcaaactgtaaggatttccttgcag

SEQ ID NO: 44292 - DNA, 25 bp, Artificial
  probe
  misc_feature (1)..(25): SEQ ID NO: 375; WAN024A6J_at; Start 86; Stop 110
tatgaaatgaggtttcctcatacct

SEQ ID NO: 44293 - DNA, 25 bp, Artificial
  probe
  misc_feature (1)..(25): SEQ ID NO: 375; WAN024A6J_at; Start 93; Stop 117
tgaggtttcctcatacctagcaaga

SEQ ID NO: 44294 - DNA, 25 bp, Artificial
  probe
  misc_feature (1)..(25): SEQ ID NO: 375; WAN024A6J_at; Start 100; Stop 124
tcctcatacctagcaagactaggaa

SEQ ID NO: 44295 - DNA, 25 bp, Artificial
  probe
  misc_feature (1)..(25): SEQ ID NO: 375; WAN024A6J_at; Start 4; Stop 28
caaactgtaaggatttccttgcagt

SEQ ID NO: 44296 - DNA, 25 bp, Artificial
  probe
  misc_feature (1)..(25): SEQ ID NO: 375; WAN024A6J_at; Start 81; Stop 105
aagtttatgaaatgaggtttcctca

SEQ ID NO: 44297 - DNA, 25 bp, Artificial
  probe
  misc_feature (1)..(25): SEQ ID NO: 375; WAN024A6J_at; Start 11; Stop 35
taaggatttccttgcagtttttcta

SEQ ID NO: 44298 - DNA, 25 bp, Artificial
  probe
  misc_feature (1)..(25): SEQ ID NO: 375; WAN024A6J_at; Start 90; Stop 114
aaatgaggtttcctcatacctagca

SEQ ID NO: 44299 - DNA, 25 bp, Artificial
  probe
  misc_feature (1)..(25): SEQ ID NO: 375; WAN024A6J_at; Start 89; Stop 113
gaaatgaggtttcctcatacctagc

SEQ ID NO: 44300 - DNA, 25 bp, Artificial
  probe
  misc_feature (1)..(25): SEQ ID NO: 375; WAN024A6J_at; Start 124; Stop 148
ataaaaatagaaattaggtagctag

SEQ ID NO: 44301 - DNA, 25 bp, Artificial
  probe
  misc_feature (1)..(25): SEQ ID NO: 375; WAN024A6J_at; Start 104; Stop 128
catacctagcaagactaggaataaa

SEQ ID NO: 44302 - DNA, 25 bp, Artificial
  probe
  misc_feature (1)..(25): SEQ ID NO: 3491; WAN024A6K_at; Start 48; Stop 72
taggaatagcacatggagagaggat

SEQ ID NO: 44303 - DNA, 25 bp, Artificial
  probe
  misc_feature (1)..(25): SEQ ID NO: 3491; WAN024A6K_at; Start 27; Stop 51
aatactataagtatgctaaaatagg

SEQ ID NO: 44304 - DNA, 25 bp, Artificial
  probe
  misc_feature (1)..(25): SEQ ID NO: 3491; WAN024A6K_at; Start 51; Stop 75
gaatagcacatggagagaggattct

SEQ ID NO: 44305 - DNA, 25 bp, Artificial
  probe
  misc_feature (1)..(25): SEQ ID NO: 3491; WAN024A6K_at; Start 38; Stop 62
tatgctaaaataggaatagcacatg

SEQ ID NO: 44306 - DNA, 25 bp, Artificial
  probe
  misc_feature (1)..(25): SEQ ID NO: 3491; WAN024A6K_at; Start 52; Stop 76
aatagcacatggagagaggattctt

SEQ ID NO: 44307 - DNA, 25 bp, Artificial
  probe
  misc_feature (1)..(25): SEQ ID NO: 3491; WAN024A6K_at; Start 42; Stop 66
ctaaaataggaatagcacatggaga

SEQ ID NO: 44308 - DNA, 25 bp, Artificial
  probe
  misc_feature (1)..(25): SEQ ID NO: 3491; WAN024A6K_at; Start 15; Stop 39
tttcttcgtgaaaatactataagta

SEQ ID NO: 44309 - DNA, 25 bp, Artificial
  probe
  misc_feature (1)..(25): SEQ ID NO: 3491; WAN024A6K_at; Start 32; Stop 56
tataagtatgctaaaataggaatag

SEQ ID NO: 44310 - DNA, 25 bp, Artificial
  probe
  misc_feature (1)..(25): SEQ ID NO: 3491; WAN024A6K_at; Start 39; Stop 63
atgctaaaataggaatagcacatgg

SEQ ID NO: 44311 - DNA, 25 bp, Artificial
  probe
  misc_feature (1)..(25): SEQ ID NO: 3491; WAN024A6K_at; Start 11; Stop 35
tccttttcttcgtgaaaatactata

SEQ ID NO: 44312 - DNA, 25 bp, Artificial
  probe
  misc_feature (1)..(25): SEQ ID NO: 3491; WAN024A6K_at; Start 44; Stop 68
aaaataggaatagcacatggagaga

SEQ ID NO: 44313 - DNA, 25 bp, Artificial
  probe
  misc_feature (1)..(25): SEQ ID NO: 3491; WAN024A6K_at; Start 45; Stop 69
aaataggaatagcacatggagagag

SEQ ID NO: 44314 - DNA, 25 bp, Artificial
  probe
  misc_feature (1)..(25): SEQ ID NO: 3491; WAN024A6K_at; Start 30; Stop 54
actataagtatgctaaaataggaat

SEQ ID NO: 44315 - DNA, 25 bp, Artificial
  probe
  misc_feature (1)..(25): SEQ ID NO: 3491; WAN024A6K_at; Start 35; Stop 59
aagtatgctaaaataggaatagcac

SEQ ID NO: 44316 - DNA, 25 bp, Artificial
  probe
  misc_feature (1)..(25): SEQ ID NO: 3491; WAN024A6K_at; Start 13; Stop 37
cttttcttcgtgaaaatactataag

SEQ ID NO: 44317 - DNA, 25 bp, Artificial
  probe
  misc_feature (1)..(25): SEQ ID NO: 3491; WAN024A6K_at; Start 29; Stop 53
tactataagtatgctaaaataggaa

SEQ ID NO: 44318 - DNA, 25 bp, Artificial
  probe
  misc_feature (1)..(25): SEQ ID NO: 3491; WAN024A6K_at; Start 43; Stop 67
taaaataggaatagcacatggagag

SEQ ID NO: 44319 - DNA, 25 bp, Artificial
  probe
  misc_feature (1)..(25): SEQ ID NO: 3491; WAN024A6K_at; Start 41; Stop 65
gctaaaataggaatagcacatggag

SEQ ID NO: 44320 - DNA, 25 bp, Artificial
  probe
  misc_feature (1)..(25): SEQ ID NO: 3491; WAN024A6K_at; Start 46; Stop 70
aataggaatagcacatggagagagg

SEQ ID NO: 44321 - DNA, 25 bp, Artificial
  probe
  misc_feature (1)..(25): SEQ ID NO: 3491; WAN024A6K_at; Start 37; Stop 61
gtatgctaaaataggaatagcacat

SEQ ID NO: 44322 - DNA, 25 bp, Artificial
  probe
  misc_feature (1)..(25): SEQ ID NO: 3491; WAN024A6K_at; Start 16; Stop 40
ttcttcgtgaaaatactataagtat

SEQ ID NO: 44323 - DNA, 25 bp, Artificial
  probe
  misc_feature (1)..(25): SEQ ID NO: 3491; WAN024A6K_at; Start 33; Stop 57
ataagtatgctaaaataggaatagc

SEQ ID NO: 44324 - DNA, 25 bp, Artificial
  probe
  misc_feature (1)..(25): SEQ ID NO: 3491; WAN024A6K_at; Start 40; Stop 64
tgctaaaataggaatagcacatgga

SEQ ID NO: 44325 - DNA, 25 bp, Artificial
  probe
  misc_feature (1)..(25): SEQ ID NO: 3491; WAN024A6K_at; Start 49; Stop 73
aggaatagcacatggagagaggatt

SEQ ID NO: 44326 - DNA, 25 bp, Artificial
  probe
  misc_feature (1)..(25): SEQ ID NO: 3491; WAN024A6K_at; Start 36; Stop 60
agtatgctaaaataggaatagcaca

SEQ ID NO: 44327 - DNA, 25 bp, Artificial
  probe
  misc_feature (1)..(25): SEQ ID NO: 3491; WAN024A6K_at; Start 21; Stop 45
cgtgaaaatactataagtatgctaa

SEQ ID NO: 44328 - DNA, 25 bp, Artificial
  probe
  misc_feature (1)..(25): SEQ ID NO: 3491; WAN024A6K_at; Start 34; Stop 58
taagtatgctaaaataggaatagca

SEQ ID NO: 44329 - DNA, 25 bp, Artificial
  probe
  misc_feature (1)..(25): SEQ ID NO: 3491; WAN024A6K_at; Start 22; Stop 46
gtgaaaatactataagtatgctaaa

SEQ ID NO: 44330 - DNA, 25 bp, Artificial
  probe
  misc_feature (1)..(25): SEQ ID NO: 3491; WAN024A6K_at; Start 19; Stop 43
ttcgtgaaaatactataagtatgct

SEQ ID NO: 44331 - DNA, 25 bp, Artificial
  probe
  misc_feature (1)..(25): SEQ ID NO: 3491; WAN024A6K_at; Start 17; Stop 41
tcttcgtgaaaatactataagtatg

SEQ ID NO: 44332 - DNA, 25 bp, Artificial
  probe
  misc_feature (1)..(25): SEQ ID NO: 3491; WAN024A6K_at; Start 20; Stop 44
tcgtgaaaatactataagtatgcta

SEQ ID NO: 44333 - DNA, 25 bp, Artificial
  probe
  misc_feature (1)..(25): SEQ ID NO: 3491; WAN024A6K_at; Start 31; Stop 55
ctataagtatgctaaaataggaata

SEQ ID NO: 44334 - DNA, 25 bp, Artificial
  probe
  misc_feature (1)..(25): SEQ ID NO: 3491; WAN024A6K_at; Start 18; Stop 42
cttcgtgaaaatactataagtatgc

SEQ ID NO: 44335 - DNA, 25 bp, Artificial
  probe
  misc_feature (1)..(25): SEQ ID NO: 3491; WAN024A6K_at; Start 50; Stop 74
ggaatagcacatggagagaggattc

SEQ ID NO: 44336 - DNA, 25 bp, Artificial
  probe
  misc_feature (1)..(25): SEQ ID NO: 215; WAN024A6L_at; Start 1; Stop 25
aagaatcctctctccatgtgctatt

SEQ ID NO: 44337 - DNA, 25 bp, Artificial
  probe
  misc_feature (1)..(25): SEQ ID NO: 215; WAN024A6L_at; Start 5; Stop 29
atcctctctccatgtgctattccta

SEQ ID NO: 44338 - DNA, 25 bp, Artificial
  probe
  misc_feature (1)..(25): SEQ ID NO: 215; WAN024A6L_at; Start 10; Stop 34
ctctccatgtgctattcctatttta

SEQ ID NO: 44339 - DNA, 25 bp, Artificial
  probe
  misc_feature (1)..(25): SEQ ID NO: 215; WAN024A6L_at; Start 38; Stop 62
tacttatagtattttcacgaagaaa

SEQ ID NO: 44340 - DNA, 25 bp, Artificial
  probe
  misc_feature (1)..(25): SEQ ID NO: 215; WAN024A6L_at; Start 11; Stop 35
tctccatgtgctattcctattttag

SEQ ID NO: 44341 - DNA, 25 bp, Artificial
  probe
  misc_feature (1)..(25): SEQ ID NO: 215; WAN024A6L_at; Start 15; Stop 39
catgtgctattcctattttagcata

SEQ ID NO: 44342 - DNA, 25 bp, Artificial
  probe
  misc_feature (1)..(25): SEQ ID NO: 215; WAN024A6L_at; Start 25; Stop 49
tcctattttagcatacttatagtat

SEQ ID NO: 44343 - DNA, 25 bp, Artificial
  probe
  misc_feature (1)..(25): SEQ ID NO: 215; WAN024A6L_at; Start 24; Stop 48
ttcctattttagcatacttatagta

SEQ ID NO: 44344 - DNA, 25 bp, Artificial
  probe
  misc_feature (1)..(25): SEQ ID NO: 215; WAN024A6L_at; Start 3; Stop 27
gaatcctctctccatgtgctattcc

SEQ ID NO: 44345 - DNA, 25 bp, Artificial
  probe
  misc_feature (1)..(25): SEQ ID NO: 215; WAN024A6L_at; Start 13; Stop 37
tccatgtgctattcctattttagca

SEQ ID NO: 44346 - DNA, 25 bp, Artificial
  probe
  misc_feature (1)..(25): SEQ ID NO: 215; WAN024A6L_at; Start 7; Stop 31
cctctctccatgtgctattcctatt

SEQ ID NO: 44347 - DNA, 25 bp, Artificial
  probe
  misc_feature (1)..(25): SEQ ID NO: 215; WAN024A6L_at; Start 26; Stop 50
cctattttagcatacttatagtatt

SEQ ID NO: 44348 - DNA, 25 bp, Artificial
  probe
  misc_feature (1)..(25): SEQ ID NO: 215; WAN024A6L_at; Start 2; Stop 26
agaatcctctctccatgtgctattc

SEQ ID NO: 44349 - DNA, 25 bp, Artificial
  probe
  misc_feature (1)..(25): SEQ ID NO: 215; WAN024A6L_at; Start 16; Stop 40
atgtgctattcctattttagcatac

SEQ ID NO: 44350 - DNA, 25 bp, Artificial
  probe
  misc_feature (1)..(25): SEQ ID NO: 215; WAN024A6L_at; Start 17; Stop 41
tgtgctattcctattttagcatact

SEQ ID NO: 44351 - DNA, 25 bp, Artificial
  probe
  misc_feature (1)..(25): SEQ ID NO: 215; WAN024A6L_at; Start 34; Stop 58
agcatacttatagtattttcacgaa

SEQ ID NO: 44352 - DNA, 25 bp, Artificial
  probe
  misc_feature (1)..(25): SEQ ID NO: 215; WAN024A6L_at; Start 21; Stop 45
ctattcctattttagcatacttata

SEQ ID NO: 44353 - DNA, 25 bp, Artificial
  probe
  misc_feature (1)..(25): SEQ ID NO: 215; WAN024A6L_at; Start 37; Stop 61
atacttatagtattttcacgaagaa

SEQ ID NO: 44354 - DNA, 25 bp, Artificial
  probe
  misc_feature (1)..(25): SEQ ID NO: 215; WAN024A6L_at; Start 22; Stop 46
tattcctattttagcatacttatag

SEQ ID NO: 44355 - DNA, 25 bp, Artificial
  probe
  misc_feature (1)..(25): SEQ ID NO: 215; WAN024A6L_at; Start 9; Stop 33
tctctccatgtgctattcctatttt

SEQ ID NO: 44356 - DNA, 25 bp, Artificial
  probe
  misc_feature (1)..(25): SEQ ID NO: 215; WAN024A6L_at; Start 42; Stop 66
tatagtattttcacgaagaaaagga

SEQ ID NO: 44357 - DNA, 25 bp, Artificial
  probe
  misc_feature (1)..(25): SEQ ID NO: 215; WAN024A6L_at; Start 18; Stop 42
gtgctattcctattttagcatactt

SEQ ID NO: 44358 - DNA, 25 bp, Artificial
  probe
  misc_feature (1)..(25): SEQ ID NO: 215; WAN024A6L_at; Start 12; Stop 36
ctccatgtgctattcctattttagc

SEQ ID NO: 44359 - DNA, 25 bp, Artificial
  probe
  misc_feature (1)..(25): SEQ ID NO: 215; WAN024A6L_at; Start 23; Stop 47
attcctattttagcatacttatagt

SEQ ID NO: 44360 - DNA, 25 bp, Artificial
  probe
  misc_feature (1)..(25): SEQ ID NO: 215; WAN024A6L_at; Start 33; Stop 57
tagcatacttatagtattttcacga

SEQ ID NO: 44361 - DNA, 25 bp, Artificial
  probe
  misc_feature (1)..(25): SEQ ID NO: 215; WAN024A6L_at; Start 20; Stop 44
gctattcctattttagcatacttat

SEQ ID NO: 44362 - DNA, 25 bp, Artificial
  probe
  misc_feature (1)..(25): SEQ ID NO: 215; WAN024A6L_at; Start 36; Stop 60
catacttatagtattttcacgaaga

SEQ ID NO: 44363 - DNA, 25 bp, Artificial
  probe
  misc_feature (1)..(25): SEQ ID NO: 215; WAN024A6L_at; Start 14; Stop 38
ccatgtgctattcctattttagcat

SEQ ID NO: 44364 - DNA, 25 bp, Artificial
  probe
  misc_feature (1)..(25): SEQ ID NO: 215; WAN024A6L_at; Start 4; Stop 28
aatcctctctccatgtgctattcct

SEQ ID NO: 44365 - DNA, 25 bp, Artificial
  probe
  misc_feature (1)..(25): SEQ ID NO: 215; WAN024A6L_at; Start 35; Stop 59
gcatacttatagtattttcacgaag

SEQ ID NO: 44366 - DNA, 25 bp, Artificial
  probe
  misc_feature (1)..(25): SEQ ID NO: 215; WAN024A6L_at; Start 32; Stop 56
ttagcatacttatagtattttcacg

SEQ ID NO: 44367 - DNA, 25 bp, Artificial
  probe
  misc_feature (1)..(25): SEQ ID NO: 215; WAN024A6L_at; Start 8; Stop 32
ctctctccatgtgctattcctattt

SEQ ID NO: 44368 - DNA, 25 bp, Artificial
  probe
  misc_feature (1)..(25): SEQ ID NO: 215; WAN024A6L_at; Start 40; Stop 64
cttatagtattttcacgaagaaaag

SEQ ID NO: 44369 - DNA, 25 bp, Artificial
  probe
  misc_feature (1)..(25): SEQ ID NO: 215; WAN024A6L_at; Start 19; Stop 43
tgctattcctattttagcatactta

SEQ ID NO: 44370 - DNA, 25 bp, Artificial
  probe
  misc_feature (1)..(25): SEQ ID NO: 443; WAN024A6O_at; Start 194; Stop 218
aatgaattatcatataagaggttag

SEQ ID NO: 44371 - DNA, 25 bp, Artificial
  probe
  misc_feature (1)..(25): SEQ ID NO: 443; WAN024A6O_at; Start 133; Stop 157
acagagatatttacgaacgtttaga

SEQ ID NO: 44372 - DNA, 25 bp, Artificial
  probe
  misc_feature (1)..(25): SEQ ID NO: 443; WAN024A6O_at; Start 134; Stop 158
cagagatatttacgaacgtttagag

SEQ ID NO: 44373 - DNA, 25 bp, Artificial
  probe
  misc_feature (1)..(25): SEQ ID NO: 443; WAN024A6O_at; Start 197; Stop 221
gaattatcatataagaggttagagg

SEQ ID NO: 44374 - DNA, 25 bp, Artificial
  probe
  misc_feature (1)..(25): SEQ ID NO: 443; WAN024A6O_at; Start 166; Stop 190
ggatgttaaaaatcttgttttgtga

SEQ ID NO: 44375 - DNA, 25 bp, Artificial
  probe
  misc_feature (1)..(25): SEQ ID NO: 443; WAN024A6O_at; Start 3; Stop 27
cactattgtacacaaaaataagcgg

SEQ ID NO: 44376 - DNA, 25 bp, Artificial
  probe
  misc_feature (1)..(25): SEQ ID NO: 443; WAN024A6O_at; Start 5; Stop 29
ctattgtacacaaaaataagcggta

SEQ ID NO: 44377 - DNA, 25 bp, Artificial
  probe
  misc_feature (1)..(25): SEQ ID NO: 443; WAN024A6O_at; Start 9; Stop 33
tgtacacaaaaataagcggtaagta

SEQ ID NO: 44378 - DNA, 25 bp, Artificial
  probe
  misc_feature (1)..(25): SEQ ID NO: 443; WAN024A6O_at; Start 199; Stop 223
attatcatataagaggttagaggaa

SEQ ID NO: 44379 - DNA, 25 bp, Artificial
  probe
  misc_feature (1)..(25): SEQ ID NO: 443; WAN024A6O_at; Start 85; Stop 109
actataaagccatataaaatttaag

SEQ ID NO: 44380 - DNA, 25 bp, Artificial
  probe
  misc_feature (1)..(25): SEQ ID NO: 443; WAN024A6O_at; Start 78; Stop 102
gtttcaaactataaagccatataaa

SEQ ID NO: 44381 - DNA, 25 bp, Artificial
  probe
  misc_feature (1)..(25): SEQ ID NO: 443; WAN024A6O_at; Start 191; Stop 215
tataatgaattatcatataagaggt

SEQ ID NO: 44382 - DNA, 25 bp, Artificial
  probe
  misc_feature (1)..(25): SEQ ID NO: 443; WAN024A6O_at; Start 24; Stop 48
gcggtaagtaaaatgaaagtgataa

SEQ ID NO: 44383 - DNA, 25 bp, Artificial
  probe
  misc_feature (1)..(25): SEQ ID NO: 443; WAN024A6O_at; Start 22; Stop 46
aagcggtaagtaaaatgaaagtgat

SEQ ID NO: 44384 - DNA, 25 bp, Artificial
  probe
  misc_feature (1)..(25): SEQ ID NO: 443; WAN024A6O_at; Start 4; Stop 28
actattgtacacaaaaataagcggt

SEQ ID NO: 44385 - DNA, 25 bp, Artificial
  probe
  misc_feature (1)..(25): SEQ ID NO: 443; WAN024A6O_at; Start 196; Stop 220
tgaattatcatataagaggttagag

SEQ ID NO: 44386 - DNA, 25 bp, Artificial
  probe
  misc_feature (1)..(25): SEQ ID NO: 443; WAN024A6O_at; Start 77; Stop 101
agtttcaaactataaagccatataa

SEQ ID NO: 44387 - DNA, 25 bp, Artificial
  probe
  misc_feature (1)..(25): SEQ ID NO: 443; WAN024A6O_at; Start 205; Stop 229
atataagaggttagaggaattttga

SEQ ID NO: 44388 - DNA, 25 bp, Artificial
  probe
  misc_feature (1)..(25): SEQ ID NO: 443; WAN024A6O_at; Start 202; Stop 226
atcatataagaggttagaggaattt

SEQ ID NO: 44389 - DNA, 25 bp, Artificial
  probe
  misc_feature (1)..(25): SEQ ID NO: 443; WAN024A6O_at; Start 2; Stop 26
gcactattgtacacaaaaataagcg

SEQ ID NO: 44390 - DNA, 25 bp, Artificial
  probe
  misc_feature (1)..(25): SEQ ID NO: 443; WAN024A6O_at; Start 76; Stop 100
tagtttcaaactataaagccatata

SEQ ID NO: 44391 - DNA, 25 bp, Artificial
  probe
  misc_feature (1)..(25): SEQ ID NO: 443; WAN024A6O_at; Start 87; Stop 111
tataaagccatataaaatttaagaa

SEQ ID NO: 44392 - DNA, 25 bp, Artificial
  probe
  misc_feature (1)..(25): SEQ ID NO: 443; WAN024A6O_at; Start 198; Stop 222
aattatcatataagaggttagagga

SEQ ID NO: 44393 - DNA, 25 bp, Artificial
  probe
  misc_feature (1)..(25): SEQ ID NO: 443; WAN024A6O_at; Start 201; Stop 225
tatcatataagaggttagaggaatt

SEQ ID NO: 44394 - DNA, 25 bp, Artificial
  probe
  misc_feature (1)..(25): SEQ ID NO: 443; WAN024A6O_at; Start 132; Stop 156
aacagagatatttacgaacgtttag

SEQ ID NO: 44395 - DNA, 25 bp, Artificial
  probe
  misc_feature (1)..(25): SEQ ID NO: 443; WAN024A6O_at; Start 7; Stop 31
attgtacacaaaaataagcggtaag

SEQ ID NO: 44396 - DNA, 25 bp, Artificial
  probe
  misc_feature (1)..(25): SEQ ID NO: 443; WAN024A6O_at; Start 81; Stop 105
tcaaactataaagccatataaaatt

SEQ ID NO: 44397 - DNA, 25 bp, Artificial
  probe
  misc_feature (1)..(25): SEQ ID NO: 443; WAN024A6O_at; Start 23; Stop 47
agcggtaagtaaaatgaaagtgata

SEQ ID NO: 44398 - DNA, 25 bp, Artificial
  probe
  misc_feature (1)..(25): SEQ ID NO: 443; WAN024A6O_at; Start 173; Stop 197
aaaaatcttgttttgtgatataatg

SEQ ID NO: 44399 - DNA, 25 bp, Artificial
  probe
  misc_feature (1)..(25): SEQ ID NO: 443; WAN024A6O_at; Start 203; Stop 227
tcatataagaggttagaggaatttt

SEQ ID NO: 44400 - DNA, 25 bp, Artificial
  probe
  misc_feature (1)..(25): SEQ ID NO: 443; WAN024A6O_at; Start 21; Stop 45
taagcggtaagtaaaatgaaagtga

SEQ ID NO: 44401 - DNA, 25 bp, Artificial
  probe
  misc_feature (1)..(25): SEQ ID NO: 443; WAN024A6O_at; Start 204; Stop 228
catataagaggttagaggaattttg

SEQ ID NO: 44402 - DNA, 25 bp, Artificial
  probe
  misc_feature (1)..(25): SEQ ID NO: 443; WAN024A6O_at; Start 6; Stop 30
tattgtacacaaaaataagcggtaa

SEQ ID NO: 44403 - DNA, 25 bp, Artificial
  probe
  misc_feature (1)..(25): SEQ ID NO: 443; WAN024A6O_at; Start 200; Stop 224
ttatcatataagaggttagaggaat

SEQ ID NO: 44404 - DNA, 25 bp, Artificial
  probe
  misc_feature (1)..(25): SEQ ID NO: 4579; WAN024A6P_at; Start 12; Stop 36
ctaacctcttatatgataattcatt

SEQ ID NO: 44405 - DNA, 25 bp, Artificial
  probe
  misc_feature (1)..(25): SEQ ID NO: 4579; WAN024A6P_at; Start 8; Stop 32
tcctctaacctcttatatgataatt

SEQ ID NO: 44406 - DNA, 25 bp, Artificial
  probe
  misc_feature (1)..(25): SEQ ID NO: 4579; WAN024A6P_at; Start 129; Stop 153
ttatatggctttatagtttgaaact

SEQ ID NO: 44407 - DNA, 25 bp, Artificial
  probe
  misc_feature (1)..(25): SEQ ID NO: 4579; WAN024A6P_at; Start 130; Stop 154
tatatggctttatagtttgaaacta

SEQ ID NO: 44408 - DNA, 25 bp, Artificial
  probe
  misc_feature (1)..(25): SEQ ID NO: 4579; WAN024A6P_at; Start 200; Stop 224
ttaccgcttatttttgtgtacaata

SEQ ID NO: 44409 - DNA, 25 bp, Artificial
  probe
  misc_feature (1)..(25): SEQ ID NO: 4579; WAN024A6P_at; Start 184; Stop 208
atcactttcattttacttaccgctt

SEQ ID NO: 44410 - DNA, 25 bp, Artificial
  probe
  misc_feature (1)..(25): SEQ ID NO: 4579; WAN024A6P_at; Start 41; Stop 65
cacaaaacaagatttttaacatcct

SEQ ID NO: 44411 - DNA, 25 bp, Artificial
  probe
  misc_feature (1)..(25): SEQ ID NO: 4579; WAN024A6P_at; Start 11; Stop 35
tctaacctcttatatgataattcat

SEQ ID NO: 44412 - DNA, 25 bp, Artificial
  probe
  misc_feature (1)..(25): SEQ ID NO: 4579; WAN024A6P_at; Start 186; Stop 210
cactttcattttacttaccgcttat

SEQ ID NO: 44413 - DNA, 25 bp, Artificial
  probe
  misc_feature (1)..(25): SEQ ID NO: 4579; WAN024A6P_at; Start 204; Stop 228
cgcttatttttgtgtacaatagtgc

SEQ ID NO: 44414 - DNA, 25 bp, Artificial
  probe
  misc_feature (1)..(25): SEQ ID NO: 4579; WAN024A6P_at; Start 9; Stop 33
cctctaacctcttatatgataattc

SEQ ID NO: 44415 - DNA, 25 bp, Artificial
  probe
  misc_feature (1)..(25): SEQ ID NO: 4579; WAN024A6P_at; Start 120; Stop 144
tcttaaattttatatggctttatag

SEQ ID NO: 44416 - DNA, 25 bp, Artificial
  probe
  misc_feature (1)..(25): SEQ ID NO: 4579; WAN024A6P_at; Start 40; Stop 64
tcacaaaacaagatttttaacatcc

SEQ ID NO: 44417 - DNA, 25 bp, Artificial
  probe
  misc_feature (1)..(25): SEQ ID NO: 4579; WAN024A6P_at; Start 128; Stop 152
tttatatggctttatagtttgaaac

SEQ ID NO: 44418 - DNA, 25 bp, Artificial
  probe
  misc_feature (1)..(25): SEQ ID NO: 4579; WAN024A6P_at; Start 203; Stop 227
ccgcttatttttgtgtacaatagtg

SEQ ID NO: 44419 - DNA, 25 bp, Artificial
  probe
  misc_feature (1)..(25): SEQ ID NO: 4579; WAN024A6P_at; Start 13; Stop 37
taacctcttatatgataattcatta

SEQ ID NO: 44420 - DNA, 25 bp, Artificial
  probe
  misc_feature (1)..(25): SEQ ID NO: 4579; WAN024A6P_at; Start 72; Stop 96
ctctaaacgttcgtaaatatctctg

SEQ ID NO: 44421 - DNA, 25 bp, Artificial
  probe
  misc_feature (1)..(25): SEQ ID NO: 4579; WAN024A6P_at; Start 202; Stop 226
accgcttatttttgtgtacaatagt

SEQ ID NO: 44422 - DNA, 25 bp, Artificial
  probe
  misc_feature (1)..(25): SEQ ID NO: 4579; WAN024A6P_at; Start 5; Stop 29
aattcctctaacctcttatatgata

SEQ ID NO: 44423 - DNA, 25 bp, Artificial
  probe
  misc_feature (1)..(25): SEQ ID NO: 4579; WAN024A6P_at; Start 6; Stop 30
attcctctaacctcttatatgataa

SEQ ID NO: 44424 - DNA, 25 bp, Artificial
  probe
  misc_feature (1)..(25): SEQ ID NO: 4579; WAN024A6P_at; Start 3; Stop 27
aaaattcctctaacctcttatatga

SEQ ID NO: 44425 - DNA, 25 bp, Artificial
  probe
  misc_feature (1)..(25): SEQ ID NO: 4579; WAN024A6P_at; Start 183; Stop 207
tatcactttcattttacttaccgct

SEQ ID NO: 44426 - DNA, 25 bp, Artificial
  probe
  misc_feature (1)..(25): SEQ ID NO: 4579; WAN024A6P_at; Start 182; Stop 206
ttatcactttcattttacttaccgc

SEQ ID NO: 44427 - DNA, 25 bp, Artificial
  probe
  misc_feature (1)..(25): SEQ ID NO: 4579; WAN024A6P_at; Start 205; Stop 229
gcttatttttgtgtacaatagtgct

SEQ ID NO: 44428 - DNA, 25 bp, Artificial
  probe
  misc_feature (1)..(25): SEQ ID NO: 4579; WAN024A6P_at; Start 74; Stop 98
ctaaacgttcgtaaatatctctgtt

SEQ ID NO: 44429 - DNA, 25 bp, Artificial
  probe
  misc_feature (1)..(25): SEQ ID NO: 4579; WAN024A6P_at; Start 2; Stop 26
caaaattcctctaacctcttatatg

SEQ ID NO: 44430 - DNA, 25 bp, Artificial
  probe
  misc_feature (1)..(25): SEQ ID NO: 4579; WAN024A6P_at; Start 201; Stop 225
taccgcttatttttgtgtacaatag

SEQ ID NO: 44431 - DNA, 25 bp, Artificial
  probe
  misc_feature (1)..(25): SEQ ID NO: 4579; WAN024A6P_at; Start 73; Stop 97
tctaaacgttcgtaaatatctctgt

SEQ ID NO: 44432 - DNA, 25 bp, Artificial
  probe
  misc_feature (1)..(25): SEQ ID NO: 4579; WAN024A6P_at; Start 185; Stop 209
tcactttcattttacttaccgctta

SEQ ID NO: 44433 - DNA, 25 bp, Artificial
  probe
  misc_feature (1)..(25): SEQ ID NO: 4579; WAN024A6P_at; Start 199; Stop 223
cttaccgcttatttttgtgtacaat

SEQ ID NO: 44434 - DNA, 25 bp, Artificial
  probe
  misc_feature (1)..(25): SEQ ID NO: 4579; WAN024A6P_at; Start 4; Stop 28
aaattcctctaacctcttatatgat

SEQ ID NO: 44435 - DNA, 25 bp, Artificial
  probe
  misc_feature (1)..(25): SEQ ID NO: 4579; WAN024A6P_at; Start 7; Stop 31
ttcctctaacctcttatatgataat

SEQ ID NO: 44436 - DNA, 25 bp, Artificial
  probe
  misc_feature (1)..(25): SEQ ID NO: 4579; WAN024A6P_at; Start 26; Stop 50
gataattcattatatcacaaaacaa

SEQ ID NO: 44437 - DNA, 25 bp, Artificial
  probe
  misc_feature (1)..(25): SEQ ID NO: 4579; WAN024A6P_at; Start 10; Stop 34
ctctaacctcttatatgataattca

SEQ ID NO: 44438 - DNA, 25 bp, Artificial
  probe
  misc_feature (1)..(25): SEQ ID NO: 3625; WAN024A6Q_at; Start 39; Stop 63
aatcagatacaaagacaggtgaaac

SEQ ID NO: 44439 - DNA, 25 bp, Artificial
  probe
  misc_feature (1)..(25): SEQ ID NO: 3625; WAN024A6Q_at; Start 57; Stop 81
gtgaaaccttctgtgttatactaga

SEQ ID NO: 44440 - DNA, 25 bp, Artificial
  probe
  misc_feature (1)..(25): SEQ ID NO: 3625; WAN024A6Q_at; Start 37; Stop 61
taaatcagatacaaagacaggtgaa

SEQ ID NO: 44441 - DNA, 25 bp, Artificial
  probe
  misc_feature (1)..(25): SEQ ID NO: 3625; WAN024A6Q_at; Start 35; Stop 59
tataaatcagatacaaagacaggtg

SEQ ID NO: 44442 - DNA, 25 bp, Artificial
  probe
  misc_feature (1)..(25): SEQ ID NO: 3625; WAN024A6Q_at; Start 41; Stop 65
tcagatacaaagacaggtgaaacct

SEQ ID NO: 44443 - DNA, 25 bp, Artificial
  probe
  misc_feature (1)..(25): SEQ ID NO: 3625; WAN024A6Q_at; Start 21; Stop 45
tctattgaaaatattataaatcaga

SEQ ID NO: 44444 - DNA, 25 bp, Artificial
  probe
  misc_feature (1)..(25): SEQ ID NO: 3625; WAN024A6Q_at; Start 8; Stop 32
aagttatatactatctattgaaaat

SEQ ID NO: 44445 - DNA, 25 bp, Artificial
  probe
  misc_feature (1)..(25): SEQ ID NO: 3625; WAN024A6Q_at; Start 56; Stop 80
ggtgaaaccttctgtgttatactag

SEQ ID NO: 44446 - DNA, 25 bp, Artificial
  probe
  misc_feature (1)..(25): SEQ ID NO: 3625; WAN024A6Q_at; Start 32; Stop 56
tattataaatcagatacaaagacag

SEQ ID NO: 44447 - DNA, 25 bp, Artificial
  probe
  misc_feature (1)..(25): SEQ ID NO: 3625; WAN024A6Q_at; Start 9; Stop 33
agttatatactatctattgaaaata

SEQ ID NO: 44448 - DNA, 25 bp, Artificial
  probe
  misc_feature (1)..(25): SEQ ID NO: 3625; WAN024A6Q_at; Start 43; Stop 67
agatacaaagacaggtgaaaccttc

SEQ ID NO: 44449 - DNA, 25 bp, Artificial
  probe
  misc_feature (1)..(25): SEQ ID NO: 3625; WAN024A6Q_at; Start 33; Stop 57
attataaatcagatacaaagacagg

SEQ ID NO: 44450 - DNA, 25 bp, Artificial
  probe
  misc_feature (1)..(25): SEQ ID NO: 3625; WAN024A6Q_at; Start 48; Stop 72
caaagacaggtgaaaccttctgtgt

SEQ ID NO: 44451 - DNA, 25 bp, Artificial
  probe
  misc_feature (1)..(25): SEQ ID NO: 3625; WAN024A6Q_at; Start 46; Stop 70
tacaaagacaggtgaaaccttctgt

SEQ ID NO: 44452 - DNA, 25 bp, Artificial
  probe
  misc_feature (1)..(25): SEQ ID NO: 3625; WAN024A6Q_at; Start 44; Stop 68
gatacaaagacaggtgaaaccttct

SEQ ID NO: 44453 - DNA, 25 bp, Artificial
  probe
  misc_feature (1)..(25): SEQ ID NO: 3625; WAN024A6Q_at; Start 54; Stop 78
caggtgaaaccttctgtgttatact

SEQ ID NO: 44454 - DNA, 25 bp, Artificial
  probe
  misc_feature (1)..(25): SEQ ID NO: 3625; WAN024A6Q_at; Start 34; Stop 58
ttataaatcagatacaaagacaggt

SEQ ID NO: 44455 - DNA, 25 bp, Artificial
  probe
  misc_feature (1)..(25): SEQ ID NO: 3625; WAN024A6Q_at; Start 42; Stop 66
cagatacaaagacaggtgaaacctt

SEQ ID NO: 44456 - DNA, 25 bp, Artificial
  probe
  misc_feature (1)..(25): SEQ ID NO: 3625; WAN024A6Q_at; Start 36; Stop 60
ataaatcagatacaaagacaggtga

SEQ ID NO: 44457 - DNA, 25 bp, Artificial
  probe
  misc_feature (1)..(25): SEQ ID NO: 3625; WAN024A6Q_at; Start 5; Stop 29
gaaaagttatatactatctattgaa

SEQ ID NO: 44458 - DNA, 25 bp, Artificial
  probe
  misc_feature (1)..(25): SEQ ID NO: 3625; WAN024A6Q_at; Start 7; Stop 31
aaagttatatactatctattgaaaa

SEQ ID NO: 44459 - DNA, 25 bp, Artificial
  probe
  misc_feature (1)..(25): SEQ ID NO: 3625; WAN024A6Q_at; Start 6; Stop 30
aaaagttatatactatctattgaaa

SEQ ID NO: 44460 - DNA, 25 bp, Artificial
  probe
  misc_feature (1)..(25): SEQ ID NO: 3625; WAN024A6Q_at; Start 49; Stop 73
aaagacaggtgaaaccttctgtgtt

SEQ ID NO: 44461 - DNA, 25 bp, Artificial
  probe
  misc_feature (1)..(25): SEQ ID NO: 3625; WAN024A6Q_at; Start 51; Stop 75
agacaggtgaaaccttctgtgttat

SEQ ID NO: 44462 - DNA, 25 bp, Artificial
  probe
  misc_feature (1)..(25): SEQ ID NO: 3625; WAN024A6Q_at; Start 45; Stop 69
atacaaagacaggtgaaaccttctg

SEQ ID NO: 44463 - DNA, 25 bp, Artificial
  probe
  misc_feature (1)..(25): SEQ ID NO: 3625; WAN024A6Q_at; Start 3; Stop 27
tagaaaagttatatactatctattg

SEQ ID NO: 44464 - DNA, 25 bp, Artificial
  probe
  misc_feature (1)..(25): SEQ ID NO: 3625; WAN024A6Q_at; Start 4; Stop 28
agaaaagttatatactatctattga

SEQ ID NO: 44465 - DNA, 25 bp, Artificial
  probe
  misc_feature (1)..(25): SEQ ID NO: 3625; WAN024A6Q_at; Start 55; Stop 79
aggtgaaaccttctgtgttatacta

SEQ ID NO: 44466 - DNA, 25 bp, Artificial
  probe
  misc_feature (1)..(25): SEQ ID NO: 3625; WAN024A6Q_at; Start 52; Stop 76
gacaggtgaaaccttctgtgttata

SEQ ID NO: 44467 - DNA, 25 bp, Artificial
  probe
  misc_feature (1)..(25): SEQ ID NO: 3625; WAN024A6Q_at; Start 40; Stop 64
atcagatacaaagacaggtgaaacc

SEQ ID NO: 44468 - DNA, 25 bp, Artificial
  probe
  misc_feature (1)..(25): SEQ ID NO: 3625; WAN024A6Q_at; Start 38; Stop 62
aaatcagatacaaagacaggtgaaa

SEQ ID NO: 44469 - DNA, 25 bp, Artificial
  probe
  misc_feature (1)..(25): SEQ ID NO: 3625; WAN024A6Q_at; Start 47; Stop 71
acaaagacaggtgaaaccttctgtg

SEQ ID NO: 44470 - DNA, 25 bp, Artificial
  probe
  misc_feature (1)..(25): SEQ ID NO: 3625; WAN024A6Q_at; Start 50; Stop 74
aagacaggtgaaaccttctgtgtta

SEQ ID NO: 44471 - DNA, 25 bp, Artificial
  probe
  misc_feature (1)..(25): SEQ ID NO: 3625; WAN024A6Q_at; Start 53; Stop 77
acaggtgaaaccttctgtgttatac

SEQ ID NO: 44472 - DNA, 25 bp, Artificial
  probe
  misc_feature (1)..(25): SEQ ID NO: 595; WAN024A6R_at; Start 15; Stop 39
acagaaggtttcacctgtctttgta

SEQ ID NO: 44473 - DNA, 25 bp, Artificial
  probe
  misc_feature (1)..(25): SEQ ID NO: 595; WAN024A6R_at; Start 13; Stop 37
acacagaaggtttcacctgtctttg

SEQ ID NO: 44474 - DNA, 25 bp, Artificial
  probe
  misc_feature (1)..(25): SEQ ID NO: 595; WAN024A6R_at; Start 4; Stop 28
tctagtataacacagaaggtttcac

SEQ ID NO: 44475 - DNA, 25 bp, Artificial
  probe
  misc_feature (1)..(25): SEQ ID NO: 595; WAN024A6R_at; Start 52; Stop 76
tattttcaatagatagtatataact

SEQ ID NO: 44476 - DNA, 25 bp, Artificial
  probe
  misc_feature (1)..(25): SEQ ID NO: 595; WAN024A6R_at; Start 25; Stop 49
tcacctgtctttgtatctgatttat

SEQ ID NO: 44477 - DNA, 25 bp, Artificial
  probe
  misc_feature (1)..(25): SEQ ID NO: 595; WAN024A6R_at; Start 21; Stop 45
ggtttcacctgtctttgtatctgat

SEQ ID NO: 44478 - DNA, 25 bp, Artificial
  probe
  misc_feature (1)..(25): SEQ ID NO: 595; WAN024A6R_at; Start 17; Stop 41
agaaggtttcacctgtctttgtatc

SEQ ID NO: 44479 - DNA, 25 bp, Artificial
  probe
  misc_feature (1)..(25): SEQ ID NO: 595; WAN024A6R_at; Start 27; Stop 51
acctgtctttgtatctgatttataa

SEQ ID NO: 44480 - DNA, 25 bp, Artificial
  probe
  misc_feature (1)..(25): SEQ ID NO: 595; WAN024A6R_at; Start 26; Stop 50
cacctgtctttgtatctgatttata

SEQ ID NO: 44481 - DNA, 25 bp, Artificial
  probe
  misc_feature (1)..(25): SEQ ID NO: 595; WAN024A6R_at; Start 2; Stop 26
tctctagtataacacagaaggtttc

SEQ ID NO: 44482 - DNA, 25 bp, Artificial
  probe
  misc_feature (1)..(25): SEQ ID NO: 595; WAN024A6R_at; Start 20; Stop 44
aggtttcacctgtctttgtatctga

SEQ ID NO: 44483 - DNA, 25 bp, Artificial
  probe
  misc_feature (1)..(25): SEQ ID NO: 595; WAN024A6R_at; Start 8; Stop 32
gtataacacagaaggtttcacctgt

SEQ ID NO: 44484 - DNA, 25 bp, Artificial
  probe
  misc_feature (1)..(25): SEQ ID NO: 595; WAN024A6R_at; Start 22; Stop 46
gtttcacctgtctttgtatctgatt

SEQ ID NO: 44485 - DNA, 25 bp, Artificial
  probe
  misc_feature (1)..(25): SEQ ID NO: 595; WAN024A6R_at; Start 6; Stop 30
tagtataacacagaaggtttcacct

SEQ ID NO: 44486 - DNA, 25 bp, Artificial
  probe
  misc_feature (1)..(25): SEQ ID NO: 595; WAN024A6R_at; Start 7; Stop 31
agtataacacagaaggtttcacctg

SEQ ID NO: 44487 - DNA, 25 bp, Artificial
  probe
  misc_feature (1)..(25): SEQ ID NO: 595; WAN024A6R_at; Start 18; Stop 42
gaaggtttcacctgtctttgtatct

SEQ ID NO: 44488 - DNA, 25 bp, Artificial
  probe
  misc_feature (1)..(25): SEQ ID NO: 595; WAN024A6R_at; Start 14; Stop 38
cacagaaggtttcacctgtctttgt

SEQ ID NO: 44489 - DNA, 25 bp, Artificial
  probe
  misc_feature (1)..(25): SEQ ID NO: 595; WAN024A6R_at; Start 29; Stop 53
ctgtctttgtatctgatttataata

SEQ ID NO: 44490 - DNA, 25 bp, Artificial
  probe
  misc_feature (1)..(25): SEQ ID NO: 595; WAN024A6R_at; Start 30; Stop 54
tgtctttgtatctgatttataatat

SEQ ID NO: 44491 - DNA, 25 bp, Artificial
  probe
  misc_feature (1)..(25): SEQ ID NO: 595; WAN024A6R_at; Start 43; Stop 67
gatttataatattttcaatagatag

SEQ ID NO: 44492 - DNA, 25 bp, Artificial
  probe
  misc_feature (1)..(25): SEQ ID NO: 595; WAN024A6R_at; Start 10; Stop 34
ataacacagaaggtttcacctgtct

SEQ ID NO: 44493 - DNA, 25 bp, Artificial
  probe
  misc_feature (1)..(25): SEQ ID NO: 595; WAN024A6R_at; Start 28; Stop 52
cctgtctttgtatctgatttataat

SEQ ID NO: 44494 - DNA, 25 bp, Artificial
  probe
  misc_feature (1)..(25): SEQ ID NO: 595; WAN024A6R_at; Start 9; Stop 33
tataacacagaaggtttcacctgtc

SEQ ID NO: 44495 - DNA, 25 bp, Artificial
  probe
  misc_feature (1)..(25): SEQ ID NO: 595; WAN024A6R_at; Start 58; Stop 82
caatagatagtatataacttttcta

SEQ ID NO: 44496 - DNA, 25 bp, Artificial
  probe
  misc_feature (1)..(25): SEQ ID NO: 595; WAN024A6R_at; Start 11; Stop 35
taacacagaaggtttcacctgtctt

SEQ ID NO: 44497 - DNA, 25 bp, Artificial
  probe
  misc_feature (1)..(25): SEQ ID NO: 595; WAN024A6R_at; Start 12; Stop 36
aacacagaaggtttcacctgtcttt

SEQ ID NO: 44498 - DNA, 25 bp, Artificial
  probe
  misc_feature (1)..(25): SEQ ID NO: 595; WAN024A6R_at; Start 24; Stop 48
ttcacctgtctttgtatctgattta

SEQ ID NO: 44499 - DNA, 25 bp, Artificial
  probe
  misc_feature (1)..(25): SEQ ID NO: 595; WAN024A6R_at; Start 3; Stop 27
ctctagtataacacagaaggtttca

SEQ ID NO: 44500 - DNA, 25 bp, Artificial
  probe
  misc_feature (1)..(25): SEQ ID NO: 595; WAN024A6R_at; Start 23; Stop 47
tttcacctgtctttgtatctgattt

SEQ ID NO: 44501 - DNA, 25 bp, Artificial
  probe
  misc_feature (1)..(25): SEQ ID NO: 595; WAN024A6R_at; Start 19; Stop 43
aaggtttcacctgtctttgtatctg

SEQ ID NO: 44502 - DNA, 25 bp, Artificial
  probe
  misc_feature (1)..(25): SEQ ID NO: 595; WAN024A6R_at; Start 16; Stop 40
cagaaggtttcacctgtctttgtat

SEQ ID NO: 44503 - DNA, 25 bp, Artificial
  probe
  misc_feature (1)..(25): SEQ ID NO: 595; WAN024A6R_at; Start 57; Stop 81
tcaatagatagtatataacttttct

SEQ ID NO: 44504 - DNA, 25 bp, Artificial
  probe
  misc_feature (1)..(25): SEQ ID NO: 595; WAN024A6R_at; Start 5; Stop 29
ctagtataacacagaaggtttcacc

SEQ ID NO: 44505 - DNA, 25 bp, Artificial
  probe
  misc_feature (1)..(25): SEQ ID NO: 595; WAN024A6R_at; Start 56; Stop 80
ttcaatagatagtatataacttttc

SEQ ID NO: 44506 - DNA, 25 bp, Artificial
  probe
  misc_feature (1)..(25): SEQ ID NO: 3138; WAN024A6S_at; Start 26; Stop 50
ttctttaaaatatgatataataggg

SEQ ID NO: 44507 - DNA, 25 bp, Artificial
  probe
  misc_feature (1)..(25): SEQ ID NO: 3138; WAN024A6S_at; Start 40; Stop 64
atataatagggcttacaatataaga

SEQ ID NO: 44508 - DNA, 25 bp, Artificial
  probe
  misc_feature (1)..(25): SEQ ID NO: 3138; WAN024A6S_at; Start 38; Stop 62
tgatataatagggcttacaatataa

SEQ ID NO: 44509 - DNA, 25 bp, Artificial
  probe
  misc_feature (1)..(25): SEQ ID NO: 3138; WAN024A6S_at; Start 37; Stop 61
atgatataatagggcttacaatata

SEQ ID NO: 44510 - DNA, 25 bp, Artificial
  probe
  misc_feature (1)..(25): SEQ ID NO: 3138; WAN024A6S_at; Start 43; Stop 67
taatagggcttacaatataagagag

SEQ ID NO: 44511 - DNA, 25 bp, Artificial
  probe
  misc_feature (1)..(25): SEQ ID NO: 3138; WAN024A6S_at; Start 31; Stop 55
taaaatatgatataatagggcttac

SEQ ID NO: 44512 - DNA, 25 bp, Artificial
  probe
  misc_feature (1)..(25): SEQ ID NO: 3138; WAN024A6S_at; Start 44; Stop 68
aatagggcttacaatataagagagg

SEQ ID NO: 44513 - DNA, 25 bp, Artificial
  probe
  misc_feature (1)..(25): SEQ ID NO: 3138; WAN024A6S_at; Start 42; Stop 66
ataatagggcttacaatataagaga

SEQ ID NO: 44514 - DNA, 25 bp, Artificial
  probe
  misc_feature (1)..(25): SEQ ID NO: 3138; WAN024A6S_at; Start 24; Stop 48
cattctttaaaatatgatataatag

SEQ ID NO: 44515 - DNA, 25 bp, Artificial
  probe
  misc_feature (1)..(25): SEQ ID NO: 3138; WAN024A6S_at; Start 41; Stop 65
tataatagggcttacaatataagag

SEQ ID NO: 44516 - DNA, 25 bp, Artificial
  probe
  misc_feature (1)..(25): SEQ ID NO: 3138; WAN024A6S_at; Start 32; Stop 56
aaaatatgatataatagggcttaca

SEQ ID NO: 44517 - DNA, 25 bp, Artificial
  probe
  misc_feature (1)..(25): SEQ ID NO: 3138; WAN024A6S_at; Start 28; Stop 52
ctttaaaatatgatataatagggct

SEQ ID NO: 44518 - DNA, 25 bp, Artificial
  probe
  misc_feature (1)..(25): SEQ ID NO: 3138; WAN024A6S_at; Start 39; Stop 63
gatataatagggcttacaatataag

SEQ ID NO: 44519 - DNA, 25 bp, Artificial
  probe
  misc_feature (1)..(25): SEQ ID NO: 3138; WAN024A6S_at; Start 33; Stop 57
aaatatgatataatagggcttacaa

SEQ ID NO: 44520 - DNA, 25 bp, Artificial
  probe
  misc_feature (1)..(25): SEQ ID NO: 3138; WAN024A6S_at; Start 30; Stop 54
ttaaaatatgatataatagggctta

SEQ ID NO: 44521 - DNA, 25 bp, Artificial
  probe
  misc_feature (1)..(25): SEQ ID NO: 3138; WAN024A6S_at; Start 27; Stop 51
tctttaaaatatgatataatagggc

SEQ ID NO: 44522 - DNA, 25 bp, Artificial
  probe
  misc_feature (1)..(25): SEQ ID NO: 3138; WAN024A6S_at; Start 34; Stop 58
aatatgatataatagggcttacaat

SEQ ID NO: 44523 - DNA, 25 bp, Artificial
  probe
  misc_feature (1)..(25): SEQ ID NO: 3138; WAN024A6S_at; Start 35; Stop 59
atatgatataatagggcttacaata

SEQ ID NO: 44524 - DNA, 25 bp, Artificial
  probe
  misc_feature (1)..(25): SEQ ID NO: 3138; WAN024A6S_at; Start 29; Stop 53
tttaaaatatgatataatagggctt

SEQ ID NO: 44525 - DNA, 25 bp, Artificial
  probe
  misc_feature (1)..(25): SEQ ID NO: 3138; WAN024A6S_at; Start 36; Stop 60
tatgatataatagggcttacaatat

SEQ ID NO: 44526 - DNA, 25 bp, Artificial
  probe
  misc_feature (1)..(25): SEQ ID NO: 3138; WAN024A6S_at; Start 25; Stop 49
attctttaaaatatgatataatagg

SEQ ID NO: 44527 - DNA, 25 bp, Artificial
  probe
  misc_feature (1)..(25): SEQ ID NO: 3243; WAN024A6T_at; Start 22; Stop 46
tattatatcatattttaaagaatga

SEQ ID NO: 44528 - DNA, 25 bp, Artificial
  probe
  misc_feature (1)..(25): SEQ ID NO: 3243; WAN024A6T_at; Start 19; Stop 43
ccctattatatcatattttaaagaa

SEQ ID NO: 44529 - DNA, 25 bp, Artificial
  probe
  misc_feature (1)..(25): SEQ ID NO: 3243; WAN024A6T_at; Start 6; Stop 30
cttatattgtaagccctattatatc

SEQ ID NO: 44530 - DNA, 25 bp, Artificial
  probe
  misc_feature (1)..(25): SEQ ID NO: 3243; WAN024A6T_at; Start 9; Stop 33
atattgtaagccctattatatcata

SEQ ID NO: 44531 - DNA, 25 bp, Artificial
  probe
  misc_feature (1)..(25): SEQ ID NO: 3243; WAN024A6T_at; Start 5; Stop 29
tcttatattgtaagccctattatat

SEQ ID NO: 44532 - DNA, 25 bp, Artificial
  probe
  misc_feature (1)..(25): SEQ ID NO: 3243; WAN024A6T_at; Start 15; Stop 39
taagccctattatatcatattttaa

SEQ ID NO: 44533 - DNA, 25 bp, Artificial
  probe
  misc_feature (1)..(25): SEQ ID NO: 3243; WAN024A6T_at; Start 4; Stop 28
ctcttatattgtaagccctattata

SEQ ID NO: 44534 - DNA, 25 bp, Artificial
  probe
  misc_feature (1)..(25): SEQ ID NO: 3243; WAN024A6T_at; Start 16; Stop 40
aagccctattatatcatattttaaa

SEQ ID NO: 44535 - DNA, 25 bp, Artificial
  probe
  misc_feature (1)..(25): SEQ ID NO: 3243; WAN024A6T_at; Start 18; Stop 42
gccctattatatcatattttaaaga

SEQ ID NO: 44536 - DNA, 25 bp, Artificial
  probe
  misc_feature (1)..(25): SEQ ID NO: 3243; WAN024A6T_at; Start 12; Stop 36
ttgtaagccctattatatcatattt

SEQ ID NO: 44537 - DNA, 25 bp, Artificial
  probe
  misc_feature (1)..(25): SEQ ID NO: 3243; WAN024A6T_at; Start 13; Stop 37
tgtaagccctattatatcatatttt

SEQ ID NO: 44538 - DNA, 25 bp, Artificial
  probe
  misc_feature (1)..(25): SEQ ID NO: 3243; WAN024A6T_at; Start 21; Stop 45
ctattatatcatattttaaagaatg

SEQ ID NO: 44539 - DNA, 25 bp, Artificial
  probe
  misc_feature (1)..(25): SEQ ID NO: 3243; WAN024A6T_at; Start 20; Stop 44
cctattatatcatattttaaagaat

SEQ ID NO: 44540 - DNA, 25 bp, Artificial
  probe
  misc_feature (1)..(25): SEQ ID NO: 3243; WAN024A6T_at; Start 2; Stop 26
ctctcttatattgtaagccctatta

SEQ ID NO: 44541 - DNA, 25 bp, Artificial
  probe
  misc_feature (1)..(25): SEQ ID NO: 3243; WAN024A6T_at; Start 8; Stop 32
tatattgtaagccctattatatcat

SEQ ID NO: 44542 - DNA, 25 bp, Artificial
  probe
  misc_feature (1)..(25): SEQ ID NO: 3243; WAN024A6T_at; Start 14; Stop 38
gtaagccctattatatcatatttta

SEQ ID NO: 44543 - DNA, 25 bp, Artificial
  probe
  misc_feature (1)..(25): SEQ ID NO: 3243; WAN024A6T_at; Start 1; Stop 25
cctctcttatattgtaagccctatt

SEQ ID NO: 44544 - DNA, 25 bp, Artificial
  probe
  misc_feature (1)..(25): SEQ ID NO: 3243; WAN024A6T_at; Start 17; Stop 41
agccctattatatcatattttaaag

SEQ ID NO: 44545 - DNA, 25 bp, Artificial
  probe
  misc_feature (1)..(25): SEQ ID NO: 3243; WAN024A6T_at; Start 3; Stop 27
tctcttatattgtaagccctattat

SEQ ID NO: 44546 - DNA, 25 bp, Artificial
  probe
  misc_feature (1)..(25): SEQ ID NO: 3243; WAN024A6T_at; Start 11; Stop 35
attgtaagccctattatatcatatt

SEQ ID NO: 44547 - DNA, 25 bp, Artificial
  probe
  misc_feature (1)..(25): SEQ ID NO: 3243; WAN024A6T_at; Start 10; Stop 34
tattgtaagccctattatatcatat

SEQ ID NO: 44548 - DNA, 25 bp, Artificial
  probe
  misc_feature (1)..(25): SEQ ID NO: 3243; WAN024A6T_at; Start 7; Stop 31
ttatattgtaagccctattatatca

SEQ ID NO: 44549 - DNA, 25 bp, Artificial
  probe
  misc_feature (1)..(25): SEQ ID NO: 7345; WAN024A6U_at; Start 118; Stop 142
tattgtactgatgtattcttagtaa

SEQ ID NO: 44550 - DNA, 25 bp, Artificial
  probe
  misc_feature (1)..(25): SEQ ID NO: 7345; WAN024A6U_at; Start 97; Stop 121
tattgacttacagaattgctctatt

SEQ ID NO: 44551 - DNA, 25 bp, Artificial
  probe
  misc_feature (1)..(25): SEQ ID NO: 7345; WAN024A6U_at; Start 17; Stop 41
aatttgggctccttgtcaactgtag

SEQ ID NO: 44552 - DNA, 25 bp, Artificial
  probe
  misc_feature (1)..(25): SEQ ID NO: 7345; WAN024A6U_at; Start 103; Stop 127
cttacagaattgctctattgtactg

SEQ ID NO: 44553 - DNA, 25 bp, Artificial
  probe
  misc_feature (1)..(25): SEQ ID NO: 7345; WAN024A6U_at; Start 44; Stop 68
ggttgaataaaagctgacgtctggg

SEQ ID NO: 44554 - DNA, 25 bp, Artificial
  probe
  misc_feature (1)..(25): SEQ ID NO: 7345; WAN024A6U_at; Start 15; Stop 39
ataatttgggctccttgtcaactgt

SEQ ID NO: 44555 - DNA, 25 bp, Artificial
  probe
  misc_feature (1)..(25): SEQ ID NO: 7345; WAN024A6U_at; Start 99; Stop 123
ttgacttacagaattgctctattgt

SEQ ID NO: 44556 - DNA, 25 bp, Artificial
  probe
  misc_feature (1)..(25): SEQ ID NO: 7345; WAN024A6U_at; Start 114; Stop 138
gctctattgtactgatgtattctta

SEQ ID NO: 44557 - DNA, 25 bp, Artificial
  probe
  misc_feature (1)..(25): SEQ ID NO: 7345; WAN024A6U_at; Start 101; Stop 125
gacttacagaattgctctattgtac

SEQ ID NO: 44558 - DNA, 25 bp, Artificial
  probe
  misc_feature (1)..(25): SEQ ID NO: 7345; WAN024A6U_at; Start 14; Stop 38
aataatttgggctccttgtcaactg

SEQ ID NO: 44559 - DNA, 25 bp, Artificial
  probe
  misc_feature (1)..(25): SEQ ID NO: 7345; WAN024A6U_at; Start 10; Stop 34
tatcaataatttgggctccttgtca

SEQ ID NO: 44560 - DNA, 25 bp, Artificial
  probe
  misc_feature (1)..(25): SEQ ID NO: 7345; WAN024A6U_at; Start 38; Stop 62
gtagtgggttgaataaaagctgacg

SEQ ID NO: 44561 - DNA, 25 bp, Artificial
  probe
  misc_feature (1)..(25): SEQ ID NO: 7345; WAN024A6U_at; Start 129; Stop 153
tgtattcttagtaaataatatggtg

SEQ ID NO: 44562 - DNA, 25 bp, Artificial
  probe
  misc_feature (1)..(25): SEQ ID NO: 7345; WAN024A6U_at; Start 111; Stop 135
attgctctattgtactgatgtattc

SEQ ID NO: 44563 - DNA, 25 bp, Artificial
  probe
  misc_feature (1)..(25): SEQ ID NO: 7345; WAN024A6U_at; Start 135; Stop 159
cttagtaaataatatggtgttttga

SEQ ID NO: 44564 - DNA, 25 bp, Artificial
  probe
  misc_feature (1)..(25): SEQ ID NO: 7345; WAN024A6U_at; Start 86; Stop 110
gctttatcaaatattgacttacaga

SEQ ID NO: 44565 - DNA, 25 bp, Artificial
  probe
  misc_feature (1)..(25): SEQ ID NO: 7345; WAN024A6U_at; Start 48; Stop 72
gaataaaagctgacgtctggggaag

SEQ ID NO: 44566 - DNA, 25 bp, Artificial
  probe
  misc_feature (1)..(25): SEQ ID NO: 7345; WAN024A6U_at; Start 19; Stop 43
tttgggctccttgtcaactgtagtg

SEQ ID NO: 44567 - DNA, 25 bp, Artificial
  probe
  misc_feature (1)..(25): SEQ ID NO: 7345; WAN024A6U_at; Start 95; Stop 119
aatattgacttacagaattgctcta

SEQ ID NO: 44568 - DNA, 25 bp, Artificial
  probe
  misc_feature (1)..(25): SEQ ID NO: 7345; WAN024A6U_at; Start 9; Stop 33
ttatcaataatttgggctccttgtc

SEQ ID NO: 44569 - DNA, 25 bp, Artificial
  probe
  misc_feature (1)..(25): SEQ ID NO: 7345; WAN024A6U_at; Start 109; Stop 133
gaattgctctattgtactgatgtat

SEQ ID NO: 44570 - DNA, 25 bp, Artificial
  probe
  misc_feature (1)..(25): SEQ ID NO: 7345; WAN024A6U_at; Start 93; Stop 117
caaatattgacttacagaattgctc

SEQ ID NO: 44571 - DNA, 25 bp, Artificial
  probe
  misc_feature (1)..(25): SEQ ID NO: 7345; WAN024A6U_at; Start 41; Stop 65
gtgggttgaataaaagctgacgtct

SEQ ID NO: 44572 - DNA, 25 bp, Artificial
  probe
  misc_feature (1)..(25): SEQ ID NO: 7345; WAN024A6U_at; Start 107; Stop 131
cagaattgctctattgtactgatgt

SEQ ID NO: 44573 - DNA, 25 bp, Artificial
  probe
  misc_feature (1)..(25): SEQ ID NO: 7345; WAN024A6U_at; Start 40; Stop 64
agtgggttgaataaaagctgacgtc

SEQ ID NO: 44574 - DNA, 25 bp, Artificial
  probe
  misc_feature (1)..(25): SEQ ID NO: 7345; WAN024A6U_at; Start 7; Stop 31
ttttatcaataatttgggctccttg

SEQ ID NO: 44575 - DNA, 25 bp, Artificial
  probe
  misc_feature (1)..(25): SEQ ID NO: 7345; WAN024A6U_at; Start 18; Stop 42
atttgggctccttgtcaactgtagt

SEQ ID NO: 44576 - DNA, 25 bp, Artificial
  probe
  misc_feature (1)..(25): SEQ ID NO: 7345; WAN024A6U_at; Start 43; Stop 67
gggttgaataaaagctgacgtctgg

SEQ ID NO: 44577 - DNA, 25 bp, Artificial
  probe
  misc_feature (1)..(25): SEQ ID NO: 7345; WAN024A6U_at; Start 105; Stop 129
tacagaattgctctattgtactgat

SEQ ID NO: 44578 - DNA, 25 bp, Artificial
  probe
  misc_feature (1)..(25): SEQ ID NO: 7345; WAN024A6U_at; Start 79; Stop 103
aagctttgctttatcaaatattgac

SEQ ID NO: 44579 - DNA, 25 bp, Artificial
  probe
  misc_feature (1)..(25): SEQ ID NO: 7345; WAN024A6U_at; Start 36; Stop 60
ctgtagtgggttgaataaaagctga

SEQ ID NO: 44580 - DNA, 25 bp, Artificial
  probe
  misc_feature (1)..(25): SEQ ID NO: 7345; WAN024A6U_at; Start 37; Stop 61
tgtagtgggttgaataaaagctgac

SEQ ID NO: 44581 - DNA, 25 bp, Artificial
  probe
  misc_feature (1)..(25): SEQ ID NO: 7345; WAN024A6U_at; Start 16; Stop 40
taatttgggctccttgtcaactgta

SEQ ID NO: 44582 - DNA, 25 bp, Artificial
  probe
  misc_feature (1)..(25): SEQ ID NO: 7345; WAN024A6U_at; Start 42; Stop 66
tgggttgaataaaagctgacgtctg

SEQ ID NO: 44583 - DNA, 25 bp, Artificial
  probe
  misc_feature (1)..(25): SEQ ID NO: 7357; WAN024A6V_at; Start 117; Stop 141
cactacagttgacaaggagcccaaa

SEQ ID NO: 44584 - DNA, 25 bp, Artificial
  probe
  misc_feature (1)..(25): SEQ ID NO: 7357; WAN024A6V_at; Start 43; Stop 67
gagcaattctgtaagtcaatatttg

SEQ ID NO: 44585 - DNA, 25 bp, Artificial
  probe
  misc_feature (1)..(25): SEQ ID NO: 7357; WAN024A6V_at; Start 23; Stop 47
aagaatacatcagtacaatagagca

SEQ ID NO: 44586 - DNA, 25 bp, Artificial
  probe
  misc_feature (1)..(25): SEQ ID NO: 7357; WAN024A6V_at; Start 100; Stop 124
tcagcttttattcaacccactacag

SEQ ID NO: 44587 - DNA, 25 bp, Artificial
  probe
  misc_feature (1)..(25): SEQ ID NO: 7357; WAN024A6V_at; Start 15; Stop 39
tatttactaagaatacatcagtaca

SEQ ID NO: 44588 - DNA, 25 bp, Artificial
  probe
  misc_feature (1)..(25): SEQ ID NO: 7357; WAN024A6V_at; Start 38; Stop 62
caatagagcaattctgtaagtcaat

SEQ ID NO: 44589 - DNA, 25 bp, Artificial
  probe
  misc_feature (1)..(25): SEQ ID NO: 7357; WAN024A6V_at; Start 57; Stop 81
gtcaatatttgataaagcaaagctt

SEQ ID NO: 44590 - DNA, 25 bp, Artificial
  probe
  misc_feature (1)..(25): SEQ ID NO: 7357; WAN024A6V_at; Start 32; Stop 56
tcagtacaatagagcaattctgtaa

SEQ ID NO: 44591 - DNA, 25 bp, Artificial
  probe
  misc_feature (1)..(25): SEQ ID NO: 7357; WAN024A6V_at; Start 94; Stop 118
cagacgtcagcttttattcaaccca

SEQ ID NO: 44592 - DNA, 25 bp, Artificial
  probe
  misc_feature (1)..(25): SEQ ID NO: 7357; WAN024A6V_at; Start 41; Stop 65
tagagcaattctgtaagtcaatatt

SEQ ID NO: 44593 - DNA, 25 bp, Artificial
  probe
  misc_feature (1)..(25): SEQ ID NO: 7357; WAN024A6V_at; Start 88; Stop 112
cttccccagacgtcagcttttattc

SEQ ID NO: 44594 - DNA, 25 bp, Artificial
  probe
  misc_feature (1)..(25): SEQ ID NO: 7357; WAN024A6V_at; Start 119; Stop 143
ctacagttgacaaggagcccaaatt

SEQ ID NO: 44595 - DNA, 25 bp, Artificial
  probe
  misc_feature (1)..(25): SEQ ID NO: 7357; WAN024A6V_at; Start 92; Stop 116
cccagacgtcagcttttattcaacc

SEQ ID NO: 44596 - DNA, 25 bp, Artificial
  probe
  misc_feature (1)..(25): SEQ ID NO: 7357; WAN024A6V_at; Start 98; Stop 122
cgtcagcttttattcaacccactac

SEQ ID NO: 44597 - DNA, 25 bp, Artificial
  probe
  misc_feature (1)..(25): SEQ ID NO: 7357; WAN024A6V_at; Start 59; Stop 83
caatatttgataaagcaaagcttta

SEQ ID NO: 44598 - DNA, 25 bp, Artificial
  probe
  misc_feature (1)..(25): SEQ ID NO: 7357; WAN024A6V_at; Start 50; Stop 74
tctgtaagtcaatatttgataaagc

SEQ ID NO: 44599 - DNA, 25 bp, Artificial
  probe
  misc_feature (1)..(25): SEQ ID NO: 7357; WAN024A6V_at; Start 93; Stop 117
ccagacgtcagcttttattcaaccc

SEQ ID NO: 44600 - DNA, 25 bp, Artificial
  probe
  misc_feature (1)..(25): SEQ ID NO: 7357; WAN024A6V_at; Start 96; Stop 120
gacgtcagcttttattcaacccact

SEQ ID NO: 44601 - DNA, 25 bp, Artificial
  probe
  misc_feature (1)..(25): SEQ ID NO: 7357; WAN024A6V_at; Start 7; Stop 31
caccatattatttactaagaataca

SEQ ID NO: 44602 - DNA, 25 bp, Artificial
  probe
  misc_feature (1)..(25): SEQ ID NO: 7357; WAN024A6V_at; Start 35; Stop 59
gtacaatagagcaattctgtaagtc

SEQ ID NO: 44603 - DNA, 25 bp, Artificial
  probe
  misc_feature (1)..(25): SEQ ID NO: 7357; WAN024A6V_at; Start 1; Stop 25
tcaaaacaccatattatttactaag

SEQ ID NO: 44604 - DNA, 25 bp, Artificial
  probe
  misc_feature (1)..(25): SEQ ID NO: 7357; WAN024A6V_at; Start 90; Stop 114
tccccagacgtcagcttttattcaa

SEQ ID NO: 44605 - DNA, 25 bp, Artificial
  probe
  misc_feature (1)..(25): SEQ ID NO: 7357; WAN024A6V_at; Start 25; Stop 49
gaatacatcagtacaatagagcaat

SEQ ID NO: 44606 - DNA, 25 bp, Artificial
  probe
  misc_feature (1)..(25): SEQ ID NO: 7357; WAN024A6V_at; Start 55; Stop 79
aagtcaatatttgataaagcaaagc

SEQ ID NO: 44607 - DNA, 25 bp, Artificial
  probe
  misc_feature (1)..(25): SEQ ID NO: 7357; WAN024A6V_at; Start 118; Stop 142
actacagttgacaaggagcccaaat

SEQ ID NO: 44608 - DNA, 25 bp, Artificial
  probe
  misc_feature (1)..(25): SEQ ID NO: 7357; WAN024A6V_at; Start 62; Stop 86
tatttgataaagcaaagctttaaac

SEQ ID NO: 44609 - DNA, 25 bp, Artificial
  probe
  misc_feature (1)..(25): SEQ ID NO: 7357; WAN024A6V_at; Start 22; Stop 46
taagaatacatcagtacaatagagc

SEQ ID NO: 44610 - DNA, 25 bp, Artificial
  probe
  misc_feature (1)..(25): SEQ ID NO: 7357; WAN024A6V_at; Start 45; Stop 69
gcaattctgtaagtcaatatttgat

SEQ ID NO: 44611 - DNA, 25 bp, Artificial
  probe
  misc_feature (1)..(25): SEQ ID NO: 7357; WAN024A6V_at; Start 29; Stop 53
acatcagtacaatagagcaattctg

SEQ ID NO: 44612 - DNA, 25 bp, Artificial
  probe
  misc_feature (1)..(25): SEQ ID NO: 7357; WAN024A6V_at; Start 95; Stop 119
agacgtcagcttttattcaacccac

SEQ ID NO: 44613 - DNA, 25 bp, Artificial
  probe
  misc_feature (1)..(25): SEQ ID NO: 7357; WAN024A6V_at; Start 30; Stop 54
catcagtacaatagagcaattctgt

SEQ ID NO: 44614 - DNA, 25 bp, Artificial
  probe
  misc_feature (1)..(25): SEQ ID NO: 7357; WAN024A6V_at; Start 28; Stop 52
tacatcagtacaatagagcaattct

SEQ ID NO: 44615 - DNA, 25 bp, Artificial
  probe
  misc_feature (1)..(25): SEQ ID NO: 7357; WAN024A6V_at; Start 36; Stop 60
tacaatagagcaattctgtaagtca

SEQ ID NO: 44616 - DNA, 25 bp, Artificial
  probe
  misc_feature (1)..(25): SEQ ID NO: 7357; WAN024A6V_at; Start 33; Stop 57
cagtacaatagagcaattctgtaag

SEQ ID NO: 44617 - DNA, 25 bp, Artificial
  probe
  misc_feature (1)..(25): SEQ ID NO: 4771; WAN024A6W_at; Start 122; Stop 146
taaataagtctgtctagctatagat

SEQ ID NO: 44618 - DNA, 25 bp, Artificial
  probe
  misc_feature (1)..(25): SEQ ID NO: 4771; WAN024A6W_at; Start 115; Stop 139
ttttatttaaataagtctgtctagc

SEQ ID NO: 44619 - DNA, 25 bp, Artificial
  probe
  misc_feature (1)..(25): SEQ ID NO: 4771; WAN024A6W_at; Start 130; Stop 154
tctgtctagctatagatatattaag

SEQ ID NO: 44620 - DNA, 25 bp, Artificial
  probe
  misc_feature (1)..(25): SEQ ID NO: 4771; WAN024A6W_at; Start 88; Stop 112
atggggagaatccaaaggattctcc

SEQ ID NO: 44621 - DNA, 25 bp, Artificial
  probe
  misc_feature (1)..(25): SEQ ID NO: 4771; WAN024A6W_at; Start 125; Stop 149
ataagtctgtctagctatagatata

SEQ ID NO: 44622 - DNA, 25 bp, Artificial
  probe
  misc_feature (1)..(25): SEQ ID NO: 4771; WAN024A6W_at; Start 89; Stop 113
tggggagaatccaaaggattctccc

SEQ ID NO: 44623 - DNA, 25 bp, Artificial
  probe
  misc_feature (1)..(25): SEQ ID NO: 4771; WAN024A6W_at; Start 81; Stop 105
tgcttatatggggagaatccaaagg

SEQ ID NO: 44624 - DNA, 25 bp, Artificial
  probe
  misc_feature (1)..(25): SEQ ID NO: 4771; WAN024A6W_at; Start 119; Stop 143
atttaaataagtctgtctagctata

SEQ ID NO: 44625 - DNA, 25 bp, Artificial
  probe
  misc_feature (1)..(25): SEQ ID NO: 4771; WAN024A6W_at; Start 87; Stop 111
tatggggagaatccaaaggattctc

SEQ ID NO: 44626 - DNA, 25 bp, Artificial
  probe
  misc_feature (1)..(25): SEQ ID NO: 4771; WAN024A6W_at; Start 123; Stop 147
aaataagtctgtctagctatagata

SEQ ID NO: 44627 - DNA, 25 bp, Artificial
  probe
  misc_feature (1)..(25): SEQ ID NO: 4771; WAN024A6W_at; Start 83; Stop 107
cttatatggggagaatccaaaggat

SEQ ID NO: 44628 - DNA, 25 bp, Artificial
  probe
  misc_feature (1)..(25): SEQ ID NO: 4771; WAN024A6W_at; Start 117; Stop 141
ttatttaaataagtctgtctagcta

SEQ ID NO: 44629 - DNA, 25 bp, Artificial
  probe
  misc_feature (1)..(25): SEQ ID NO: 4771; WAN024A6W_at; Start 128; Stop 152
agtctgtctagctatagatatatta

SEQ ID NO: 44630 - DNA, 25 bp, Artificial
  probe
  misc_feature (1)..(25): SEQ ID NO: 4771; WAN024A6W_at; Start 79; Stop 103
agtgcttatatggggagaatccaaa

SEQ ID NO: 44631 - DNA, 25 bp, Artificial
  probe
  misc_feature (1)..(25): SEQ ID NO: 4771; WAN024A6W_at; Start 116; Stop 140
tttatttaaataagtctgtctagct

SEQ ID NO: 44632 - DNA, 25 bp, Artificial
  probe
  misc_feature (1)..(25): SEQ ID NO: 4771; WAN024A6W_at; Start 124; Stop 148
aataagtctgtctagctatagatat

SEQ ID NO: 44633 - DNA, 25 bp, Artificial
  probe
  misc_feature (1)..(25): SEQ ID NO: 4771; WAN024A6W_at; Start 84; Stop 108
ttatatggggagaatccaaaggatt

SEQ ID NO: 44634 - DNA, 25 bp, Artificial
  probe
  misc_feature (1)..(25): SEQ ID NO: 4771; WAN024A6W_at; Start 121; Stop 145
ttaaataagtctgtctagctataga

SEQ ID NO: 44635 - DNA, 25 bp, Artificial
  probe
  misc_feature (1)..(25): SEQ ID NO: 4771; WAN024A6W_at; Start 120; Stop 144
tttaaataagtctgtctagctatag

SEQ ID NO: 44636 - DNA, 25 bp, Artificial
  probe
  misc_feature (1)..(25): SEQ ID NO: 4771; WAN024A6W_at; Start 118; Stop 142
tatttaaataagtctgtctagctat

SEQ ID NO: 44637 - DNA, 25 bp, Artificial
  probe
  misc_feature (1)..(25): SEQ ID NO: 4771; WAN024A6W_at; Start 126; Stop 150
taagtctgtctagctatagatatat

SEQ ID NO: 44638 - DNA, 25 bp, Artificial
  probe
  misc_feature (1)..(25): SEQ ID NO: 4771; WAN024A6W_at; Start 131; Stop 155
ctgtctagctatagatatattaagt

SEQ ID NO: 44639 - DNA, 25 bp, Artificial
  probe
  misc_feature (1)..(25): SEQ ID NO: 4771; WAN024A6W_at; Start 127; Stop 151
aagtctgtctagctatagatatatt

SEQ ID NO: 44640 - DNA, 25 bp, Artificial
  probe
  misc_feature (1)..(25): SEQ ID NO: 4771; WAN024A6W_at; Start 85; Stop 109
tatatggggagaatccaaaggattc

SEQ ID NO: 44641 - DNA, 25 bp, Artificial
  probe
  misc_feature (1)..(25): SEQ ID NO: 4771; WAN024A6W_at; Start 80; Stop 104
gtgcttatatggggagaatccaaag

SEQ ID NO: 44642 - DNA, 25 bp, Artificial
  probe
  misc_feature (1)..(25): SEQ ID NO: 4771; WAN024A6W_at; Start 129; Stop 153
gtctgtctagctatagatatattaa

SEQ ID NO: 44643 - DNA, 25 bp, Artificial
  probe
  misc_feature (1)..(25): SEQ ID NO: 4771; WAN024A6W_at; Start 82; Stop 106
gcttatatggggagaatccaaagga

SEQ ID NO: 44644 - DNA, 25 bp, Artificial
  probe
  misc_feature (1)..(25): SEQ ID NO: 4771; WAN024A6W_at; Start 86; Stop 110
atatggggagaatccaaaggattct

SEQ ID NO: 44645 - DNA, 25 bp, Artificial
  probe
  misc_feature (1)..(25): SEQ ID NO: 390; WAN024A6X_at; Start 11; Stop 35
tctatagctagacagacttatttaa

SEQ ID NO: 44646 - DNA, 25 bp, Artificial
  probe
  misc_feature (1)..(25): SEQ ID NO: 390; WAN024A6X_at; Start 14; Stop 38
atagctagacagacttatttaaata

SEQ ID NO: 44647 - DNA, 25 bp, Artificial
  probe
  misc_feature (1)..(25): SEQ ID NO: 390; WAN024A6X_at; Start 9; Stop 33
tatctatagctagacagacttattt

SEQ ID NO: 44648 - DNA, 25 bp, Artificial
  probe
  misc_feature (1)..(25): SEQ ID NO: 390; WAN024A6X_at; Start 6; Stop 30
atatatctatagctagacagactta

SEQ ID NO: 44649 - DNA, 25 bp, Artificial
  probe
  misc_feature (1)..(25): SEQ ID NO: 390; WAN024A6X_at; Start 43; Stop 67
gggagaatcctttggattctcccca

SEQ ID NO: 44650 - DNA, 25 bp, Artificial
  probe
  misc_feature (1)..(25): SEQ ID NO: 390; WAN024A6X_at; Start 17; Stop 41
gctagacagacttatttaaataaaa

SEQ ID NO: 44651 - DNA, 25 bp, Artificial
  probe
  misc_feature (1)..(25): SEQ ID NO: 390; WAN024A6X_at; Start 10; Stop 34
atctatagctagacagacttattta

SEQ ID NO: 44652 - DNA, 25 bp, Artificial
  probe
  misc_feature (1)..(25): SEQ ID NO: 390; WAN024A6X_at; Start 50; Stop 74
tcctttggattctccccatataagc

SEQ ID NO: 44653 - DNA, 25 bp, Artificial
  probe
  misc_feature (1)..(25): SEQ ID NO: 390; WAN024A6X_at; Start 12; Stop 36
ctatagctagacagacttatttaaa

SEQ ID NO: 44654 - DNA, 25 bp, Artificial
  probe
  misc_feature (1)..(25): SEQ ID NO: 390; WAN024A6X_at; Start 49; Stop 73
atcctttggattctccccatataag

SEQ ID NO: 44655 - DNA, 25 bp, Artificial
  probe
  misc_feature (1)..(25): SEQ ID NO: 390; WAN024A6X_at; Start 53; Stop 77
tttggattctccccatataagcact

SEQ ID NO: 44656 - DNA, 25 bp, Artificial
  probe
  misc_feature (1)..(25): SEQ ID NO: 390; WAN024A6X_at; Start 1; Stop 25
acttaatatatctatagctagacag

SEQ ID NO: 44657 - DNA, 25 bp, Artificial
  probe
  misc_feature (1)..(25): SEQ ID NO: 390; WAN024A6X_at; Start 44; Stop 68
ggagaatcctttggattctccccat

SEQ ID NO: 44658 - DNA, 25 bp, Artificial
  probe
  misc_feature (1)..(25): SEQ ID NO: 390; WAN024A6X_at; Start 2; Stop 26
cttaatatatctatagctagacaga

SEQ ID NO: 44659 - DNA, 25 bp, Artificial
  probe
  misc_feature (1)..(25): SEQ ID NO: 390; WAN024A6X_at; Start 4; Stop 28
taatatatctatagctagacagact

SEQ ID NO: 44660 - DNA, 25 bp, Artificial
  probe
  misc_feature (1)..(25): SEQ ID NO: 390; WAN024A6X_at; Start 3; Stop 27
ttaatatatctatagctagacagac

SEQ ID NO: 44661 - DNA, 25 bp, Artificial
  probe
  misc_feature (1)..(25): SEQ ID NO: 390; WAN024A6X_at; Start 8; Stop 32
atatctatagctagacagacttatt

SEQ ID NO: 44662 - DNA, 25 bp, Artificial
  probe
  misc_feature (1)..(25): SEQ ID NO: 390; WAN024A6X_at; Start 46; Stop 70
agaatcctttggattctccccatat

SEQ ID NO: 44663 - DNA, 25 bp, Artificial
  probe
  misc_feature (1)..(25): SEQ ID NO: 390; WAN024A6X_at; Start 47; Stop 71
gaatcctttggattctccccatata

SEQ ID NO: 44664 - DNA, 25 bp, Artificial
  probe
  misc_feature (1)..(25): SEQ ID NO: 390; WAN024A6X_at; Start 48; Stop 72
aatcctttggattctccccatataa

SEQ ID NO: 44665 - DNA, 25 bp, Artificial
  probe
  misc_feature (1)..(25): SEQ ID NO: 390; WAN024A6X_at; Start 15; Stop 39
tagctagacagacttatttaaataa

SEQ ID NO: 44666 - DNA, 25 bp, Artificial
  probe
  misc_feature (1)..(25): SEQ ID NO: 390; WAN024A6X_at; Start 45; Stop 69
gagaatcctttggattctccccata

SEQ ID NO: 44667 - DNA, 25 bp, Artificial
  probe
  misc_feature (1)..(25): SEQ ID NO: 390; WAN024A6X_at; Start 5; Stop 29
aatatatctatagctagacagactt

SEQ ID NO: 44668 - DNA, 25 bp, Artificial
  probe
  misc_feature (1)..(25): SEQ ID NO: 390; WAN024A6X_at; Start 13; Stop 37
tatagctagacagacttatttaaat

SEQ ID NO: 44669 - DNA, 25 bp, Artificial
  probe
  misc_feature (1)..(25): SEQ ID NO: 390; WAN024A6X_at; Start 7; Stop 31
tatatctatagctagacagacttat

SEQ ID NO: 44670 - DNA, 25 bp, Artificial
  probe
  misc_feature (1)..(25): SEQ ID NO: 390; WAN024A6X_at; Start 16; Stop 40
agctagacagacttatttaaataaa

SEQ ID NO: 44671 - DNA, 25 bp, Artificial
  probe
  misc_feature (1)..(25): SEQ ID NO: 390; WAN024A6X_at; Start 51; Stop 75
cctttggattctccccatataagca

SEQ ID NO: 44672 - DNA, 25 bp, Artificial
  probe
  misc_feature (1)..(25): SEQ ID NO: 390; WAN024A6X_at; Start 52; Stop 76
ctttggattctccccatataagcac

SEQ ID NO: 44673 - DNA, 25 bp, Artificial
  probe
  misc_feature (1)..(25): SEQ ID NO: 3146; WAN024A6Y_at; Start 110; Stop 134
attgaagacaagctagtcattaggc

SEQ ID NO: 44674 - DNA, 25 bp, Artificial
  probe
  misc_feature (1)..(25): SEQ ID NO: 3146; WAN024A6Y_at; Start 132; Stop 156
ggctggtttgtctttttgtcaactg

SEQ ID NO: 44675 - DNA, 25 bp, Artificial
  probe
  misc_feature (1)..(25): SEQ ID NO: 3146; WAN024A6Y_at; Start 109; Stop 133
gattgaagacaagctagtcattagg

SEQ ID NO: 44676 - DNA, 25 bp, Artificial
  probe
  misc_feature (1)..(25): SEQ ID NO: 3146; WAN024A6Y_at; Start 135; Stop 159
tggtttgtctttttgtcaactgtag

SEQ ID NO: 44677 - DNA, 25 bp, Artificial
  probe
  misc_feature (1)..(25): SEQ ID NO: 3146; WAN024A6Y_at; Start 97; Stop 121
gaatcctctcttgattgaagacaag

SEQ ID NO: 44678 - DNA, 25 bp, Artificial
  probe
  misc_feature (1)..(25): SEQ ID NO: 3146; WAN024A6Y_at; Start 91; Stop 115
ggaacagaatcctctcttgattgaa

SEQ ID NO: 44679 - DNA, 25 bp, Artificial
  probe
  misc_feature (1)..(25): SEQ ID NO: 3146; WAN024A6Y_at; Start 95; Stop 119
cagaatcctctcttgattgaagaca

SEQ ID NO: 44680 - DNA, 25 bp, Artificial
  probe
  misc_feature (1)..(25): SEQ ID NO: 3146; WAN024A6Y_at; Start 127; Stop 151
cattaggctggtttgtctttttgtc

SEQ ID NO: 44681 - DNA, 25 bp, Artificial
  probe
  misc_feature (1)..(25): SEQ ID NO: 3146; WAN024A6Y_at; Start 116; Stop 140
gacaagctagtcattaggctggttt

SEQ ID NO: 44682 - DNA, 25 bp, Artificial
  probe
  misc_feature (1)..(25): SEQ ID NO: 3146; WAN024A6Y_at; Start 80; Stop 104
cttatatggggggaacagaatcctc

SEQ ID NO: 44683 - DNA, 25 bp, Artificial
  probe
  misc_feature (1)..(25): SEQ ID NO: 3146; WAN024A6Y_at; Start 100; Stop 124
tcctctcttgattgaagacaagcta

SEQ ID NO: 44684 - DNA, 25 bp, Artificial
  probe
  misc_feature (1)..(25): SEQ ID NO: 3146; WAN024A6Y_at; Start 94; Stop 118
acagaatcctctcttgattgaagac

SEQ ID NO: 44685 - DNA, 25 bp, Artificial
  probe
  misc_feature (1)..(25): SEQ ID NO: 3146; WAN024A6Y_at; Start 93; Stop 117
aacagaatcctctcttgattgaaga

SEQ ID NO: 44686 - DNA, 25 bp, Artificial
  probe
  misc_feature (1)..(25): SEQ ID NO: 3146; WAN024A6Y_at; Start 122; Stop 146
ctagtcattaggctggtttgtcttt

SEQ ID NO: 44687 - DNA, 25 bp, Artificial
  probe
  misc_feature (1)..(25): SEQ ID NO: 3146; WAN024A6Y_at; Start 111; Stop 135
ttgaagacaagctagtcattaggct

SEQ ID NO: 44688 - DNA, 25 bp, Artificial
  probe
  misc_feature (1)..(25): SEQ ID NO: 3146; WAN024A6Y_at; Start 104; Stop 128
ctcttgattgaagacaagctagtca

SEQ ID NO: 44689 - DNA, 25 bp, Artificial
  probe
  misc_feature (1)..(25): SEQ ID NO: 3146; WAN024A6Y_at; Start 105; Stop 129
tcttgattgaagacaagctagtcat

SEQ ID NO: 44690 - DNA, 25 bp, Artificial
  probe
  misc_feature (1)..(25): SEQ ID NO: 3146; WAN024A6Y_at; Start 90; Stop 114
gggaacagaatcctctcttgattga

SEQ ID NO: 44691 - DNA, 25 bp, Artificial
  probe
  misc_feature (1)..(25): SEQ ID NO: 3146; WAN024A6Y_at; Start 118; Stop 142
caagctagtcattaggctggtttgt

SEQ ID NO: 44692 - DNA, 25 bp, Artificial
  probe
  misc_feature (1)..(25): SEQ ID NO: 3146; WAN024A6Y_at; Start 98; Stop 122
aatcctctcttgattgaagacaagc

SEQ ID NO: 44693 - DNA, 25 bp, Artificial
  probe
  misc_feature (1)..(25): SEQ ID NO: 3146; WAN024A6Y_at; Start 117; Stop 141
acaagctagtcattaggctggtttg

SEQ ID NO: 44694 - DNA, 25 bp, Artificial
  probe
  misc_feature (1)..(25): SEQ ID NO: 3146; WAN024A6Y_at; Start 130; Stop 154
taggctggtttgtctttttgtcaac

SEQ ID NO: 44695 - DNA, 25 bp, Artificial
  probe
  misc_feature (1)..(25): SEQ ID NO: 3146; WAN024A6Y_at; Start 120; Stop 144
agctagtcattaggctggtttgtct

SEQ ID NO: 44696 - DNA, 25 bp, Artificial
  probe
  misc_feature (1)..(25): SEQ ID NO: 3146; WAN024A6Y_at; Start 92; Stop 116
gaacagaatcctctcttgattgaag

SEQ ID NO: 44697 - DNA, 25 bp, Artificial
  probe
  misc_feature (1)..(25): SEQ ID NO: 3146; WAN024A6Y_at; Start 113; Stop 137
gaagacaagctagtcattaggctgg

SEQ ID NO: 44698 - DNA, 25 bp, Artificial
  probe
  misc_feature (1)..(25): SEQ ID NO: 3146; WAN024A6Y_at; Start 112; Stop 136
tgaagacaagctagtcattaggctg

SEQ ID NO: 44699 - DNA, 25 bp, Artificial
  probe
  misc_feature (1)..(25): SEQ ID NO: 3146; WAN024A6Y_at; Start 108; Stop 132
tgattgaagacaagctagtcattag

SEQ ID NO: 44700 - DNA, 25 bp, Artificial
  probe
  misc_feature (1)..(25): SEQ ID NO: 3146; WAN024A6Y_at; Start 119; Stop 143
aagctagtcattaggctggtttgtc

SEQ ID NO: 44701 - DNA, 25 bp, Artificial
  probe
  misc_feature (1)..(25): SEQ ID NO: 3146; WAN024A6Y_at; Start 154; Stop 178
ctgtagtgggttgatataatagtat

SEQ ID NO: 44702 - DNA, 25 bp, Artificial
  probe
  misc_feature (1)..(25): SEQ ID NO: 3146; WAN024A6Y_at; Start 103; Stop 127
tctcttgattgaagacaagctagtc

SEQ ID NO: 44703 - DNA, 25 bp, Artificial
  probe
  misc_feature (1)..(25): SEQ ID NO: 3146; WAN024A6Y_at; Start 123; Stop 147
tagtcattaggctggtttgtctttt

SEQ ID NO: 44704 - DNA, 25 bp, Artificial
  probe
  misc_feature (1)..(25): SEQ ID NO: 3146; WAN024A6Y_at; Start 106; Stop 130
cttgattgaagacaagctagtcatt

SEQ ID NO: 44705 - DNA, 25 bp, Artificial
  probe
  misc_feature (1)..(25): SEQ ID NO: 3146; WAN024A6Y_at; Start 101; Stop 125
cctctcttgattgaagacaagctag

SEQ ID NO: 44706 - DNA, 25 bp, Artificial
  probe
  misc_feature (1)..(25): SEQ ID NO: 3146; WAN024A6Y_at; Start 114; Stop 138
aagacaagctagtcattaggctggt

SEQ ID NO: 44707 - DNA, 25 bp, Artificial
  probe
  misc_feature (1)..(25): SEQ ID NO: 4448; WAN024A6Z_at; Start 20; Stop 44
cactacagttgacaaaaagacaaac

SEQ ID NO: 44708 - DNA, 25 bp, Artificial
  probe
  misc_feature (1)..(25): SEQ ID NO: 4448; WAN024A6Z_at; Start 45; Stop 69
cagcctaatgactagcttgtcttca

SEQ ID NO: 44709 - DNA, 25 bp, Artificial
  probe
  misc_feature (1)..(25): SEQ ID NO: 4448; WAN024A6Z_at; Start 23; Stop 47
tacagttgacaaaaagacaaaccag

SEQ ID NO: 44710 - DNA, 25 bp, Artificial
  probe
  misc_feature (1)..(25): SEQ ID NO: 4448; WAN024A6Z_at; Start 29; Stop 53
tgacaaaaagacaaaccagcctaat

SEQ ID NO: 44711 - DNA, 25 bp, Artificial
  probe
  misc_feature (1)..(25): SEQ ID NO: 4448; WAN024A6Z_at; Start 33; Stop 57
aaaaagacaaaccagcctaatgact

SEQ ID NO: 44712 - DNA, 25 bp, Artificial
  probe
  misc_feature (1)..(25): SEQ ID NO: 4448; WAN024A6Z_at; Start 62; Stop 86
tgtcttcaatcaagagaggattctg

SEQ ID NO: 44713 - DNA, 25 bp, Artificial
  probe
  misc_feature (1)..(25): SEQ ID NO: 4448; WAN024A6Z_at; Start 56; Stop 80
ctagcttgtcttcaatcaagagagg

SEQ ID NO: 44714 - DNA, 25 bp, Artificial
  probe
  misc_feature (1)..(25): SEQ ID NO: 4448; WAN024A6Z_at; Start 51; Stop 75
aatgactagcttgtcttcaatcaag

SEQ ID NO: 44715 - DNA, 25 bp, Artificial
  probe
  misc_feature (1)..(25): SEQ ID NO: 4448; WAN024A6Z_at; Start 57; Stop 81
tagcttgtcttcaatcaagagagga

SEQ ID NO: 44716 - DNA, 25 bp, Artificial
  probe
  misc_feature (1)..(25): SEQ ID NO: 4448; WAN024A6Z_at; Start 27; Stop 51
gttgacaaaaagacaaaccagccta

SEQ ID NO: 44717 - DNA, 25 bp, Artificial
  probe
  misc_feature (1)..(25): SEQ ID NO: 4448; WAN024A6Z_at; Start 4; Stop 28
tactattatatcaacccactacagt

SEQ ID NO: 44718 - DNA, 25 bp, Artificial
  probe
  misc_feature (1)..(25): SEQ ID NO: 4448; WAN024A6Z_at; Start 48; Stop 72
cctaatgactagcttgtcttcaatc

SEQ ID NO: 44719 - DNA, 25 bp, Artificial
  probe
  misc_feature (1)..(25): SEQ ID NO: 4448; WAN024A6Z_at; Start 44; Stop 68
ccagcctaatgactagcttgtcttc

SEQ ID NO: 44720 - DNA, 25 bp, Artificial
  probe
  misc_feature (1)..(25): SEQ ID NO: 4448; WAN024A6Z_at; Start 30; Stop 54
gacaaaaagacaaaccagcctaatg

SEQ ID NO: 44721 - DNA, 25 bp, Artificial
  probe
  misc_feature (1)..(25): SEQ ID NO: 4448; WAN024A6Z_at; Start 64; Stop 88
tcttcaatcaagagaggattctgtt

SEQ ID NO: 44722 - DNA, 25 bp, Artificial
  probe
  misc_feature (1)..(25): SEQ ID NO: 4448; WAN024A6Z_at; Start 35; Stop 59
aaagacaaaccagcctaatgactag

SEQ ID NO: 44723 - DNA, 25 bp, Artificial
  probe
  misc_feature (1)..(25): SEQ ID NO: 4448; WAN024A6Z_at; Start 25; Stop 49
cagttgacaaaaagacaaaccagcc

SEQ ID NO: 44724 - DNA, 25 bp, Artificial
  probe
  misc_feature (1)..(25): SEQ ID NO: 4448; WAN024A6Z_at; Start 38; Stop 62
gacaaaccagcctaatgactagctt

SEQ ID NO: 44725 - DNA, 25 bp, Artificial
  probe
  misc_feature (1)..(25): SEQ ID NO: 4448; WAN024A6Z_at; Start 53; Stop 77
tgactagcttgtcttcaatcaagag

SEQ ID NO: 44726 - DNA, 25 bp, Artificial
  probe
  misc_feature (1)..(25): SEQ ID NO: 4448; WAN024A6Z_at; Start 71; Stop 95
tcaagagaggattctgttcccccca

SEQ ID NO: 44727 - DNA, 25 bp, Artificial
  probe
  misc_feature (1)..(25): SEQ ID NO: 4448; WAN024A6Z_at; Start 37; Stop 61
agacaaaccagcctaatgactagct

SEQ ID NO: 44728 - DNA, 25 bp, Artificial
  probe
  misc_feature (1)..(25): SEQ ID NO: 4448; WAN024A6Z_at; Start 40; Stop 64
caaaccagcctaatgactagcttgt

SEQ ID NO: 44729 - DNA, 25 bp, Artificial
  probe
  misc_feature (1)..(25): SEQ ID NO: 4448; WAN024A6Z_at; Start 3; Stop 27
atactattatatcaacccactacag

SEQ ID NO: 44730 - DNA, 25 bp, Artificial
  probe
  misc_feature (1)..(25): SEQ ID NO: 4448; WAN024A6Z_at; Start 41; Stop 65
aaaccagcctaatgactagcttgtc

SEQ ID NO: 44731 - DNA, 25 bp, Artificial
  probe
  misc_feature (1)..(25): SEQ ID NO: 4448; WAN024A6Z_at; Start 47; Stop 71
gcctaatgactagcttgtcttcaat

SEQ ID NO: 44732 - DNA, 25 bp, Artificial
  probe
  misc_feature (1)..(25): SEQ ID NO: 4448; WAN024A6Z_at; Start 42; Stop 66
aaccagcctaatgactagcttgtct

SEQ ID NO: 44733 - DNA, 25 bp, Artificial
  probe
  misc_feature (1)..(25): SEQ ID NO: 4448; WAN024A6Z_at; Start 59; Stop 83
gcttgtcttcaatcaagagaggatt

SEQ ID NO: 44734 - DNA, 25 bp, Artificial
  probe
  misc_feature (1)..(25): SEQ ID NO: 4448; WAN024A6Z_at; Start 54; Stop 78
gactagcttgtcttcaatcaagaga

SEQ ID NO: 44735 - DNA, 25 bp, Artificial
  probe
  misc_feature (1)..(25): SEQ ID NO: 4448; WAN024A6Z_at; Start 32; Stop 56
caaaaagacaaaccagcctaatgac

SEQ ID NO: 44736 - DNA, 25 bp, Artificial
  probe
  misc_feature (1)..(25): SEQ ID NO: 4448; WAN024A6Z_at; Start 60; Stop 84
cttgtcttcaatcaagagaggattc

SEQ ID NO: 44737 - DNA, 25 bp, Artificial
  probe
  misc_feature (1)..(25): SEQ ID NO: 4448; WAN024A6Z_at; Start 68; Stop 92
caatcaagagaggattctgttcccc

SEQ ID NO: 44738 - DNA, 25 bp, Artificial
  probe
  misc_feature (1)..(25): SEQ ID NO: 4448; WAN024A6Z_at; Start 66; Stop 90
ttcaatcaagagaggattctgttcc

SEQ ID NO: 44739 - DNA, 25 bp, Artificial
  probe
  misc_feature (1)..(25): SEQ ID NO: 4448; WAN024A6Z_at; Start 67; Stop 91
tcaatcaagagaggattctgttccc

SEQ ID NO: 44740 - DNA, 25 bp, Artificial
  probe
  misc_feature (1)..(25): SEQ ID NO: 4448; WAN024A6Z_at; Start 77; Stop 101
gaggattctgttccccccatataag

SEQ ID NO: 44741 - DNA, 25 bp, Artificial
  probe
  misc_feature (1)..(25): SEQ ID NO: 82; WAN024A72_at; Start 61; Stop 85
tcaggaagcatacgatgccctgacc

SEQ ID NO: 44742 - DNA, 25 bp, Artificial
  probe
  misc_feature (1)..(25): SEQ ID NO: 82; WAN024A72_at; Start 23; Stop 47
tagtgctcaatgatctaaaatgact

SEQ ID NO: 44743 - DNA, 25 bp, Artificial
  probe
  misc_feature (1)..(25): SEQ ID NO: 82; WAN024A72_at; Start 69; Stop 93
catacgatgccctgaccctttttgt

SEQ ID NO: 44744 - DNA, 25 bp, Artificial
  probe
  misc_feature (1)..(25): SEQ ID NO: 82; WAN024A72_at; Start 30; Stop 54
caatgatctaaaatgactatatagg

SEQ ID NO: 44745 - DNA, 25 bp, Artificial
  probe
  misc_feature (1)..(25): SEQ ID NO: 82; WAN024A72_at; Start 51; Stop 75
taggattaggtcaggaagcatacga

SEQ ID NO: 44746 - DNA, 25 bp, Artificial
  probe
  misc_feature (1)..(25): SEQ ID NO: 82; WAN024A72_at; Start 49; Stop 73
tataggattaggtcaggaagcatac

SEQ ID NO: 44747 - DNA, 25 bp, Artificial
  probe
  misc_feature (1)..(25): SEQ ID NO: 82; WAN024A72_at; Start 77; Stop 101
gccctgaccctttttgtacttatga

SEQ ID NO: 44748 - DNA, 25 bp, Artificial
  probe
  misc_feature (1)..(25): SEQ ID NO: 82; WAN024A72_at; Start 89; Stop 113
tttgtacttatgagatgagaaagtc

SEQ ID NO: 44749 - DNA, 25 bp, Artificial
  probe
  misc_feature (1)..(25): SEQ ID NO: 82; WAN024A72_at; Start 38; Stop 62
taaaatgactatataggattaggtc

SEQ ID NO: 44750 - DNA, 25 bp, Artificial
  probe
  misc_feature (1)..(25): SEQ ID NO: 82; WAN024A72_at; Start 112; Stop 136
tcatttgttagataaattgacttcg

SEQ ID NO: 44751 - DNA, 25 bp, Artificial
  probe
  misc_feature (1)..(25): SEQ ID NO: 82; WAN024A72_at; Start 84; Stop 108
ccctttttgtacttatgagatgaga

SEQ ID NO: 44752 - DNA, 25 bp, Artificial
  probe
  misc_feature (1)..(25): SEQ ID NO: 82; WAN024A72_at; Start 17; Stop 41
gacaaatagtgctcaatgatctaaa

SEQ ID NO: 44753 - DNA, 25 bp, Artificial
  probe
  misc_feature (1)..(25): SEQ ID NO: 82; WAN024A72_at; Start 74; Stop 98
gatgccctgaccctttttgtactta

SEQ ID NO: 44754 - DNA, 25 bp, Artificial
  probe
  misc_feature (1)..(25): SEQ ID NO: 82; WAN024A72_at; Start 65; Stop 89
gaagcatacgatgccctgacccttt

SEQ ID NO: 44755 - DNA, 25 bp, Artificial
  probe
  misc_feature (1)..(25): SEQ ID NO: 82; WAN024A72_at; Start 54; Stop 78
gattaggtcaggaagcatacgatgc

SEQ ID NO: 44756 - DNA, 25 bp, Artificial
  probe
  misc_feature (1)..(25): SEQ ID NO: 82; WAN024A72_at; Start 59; Stop 83
ggtcaggaagcatacgatgccctga

SEQ ID NO: 44757 - DNA, 25 bp, Artificial
  probe
  misc_feature (1)..(25): SEQ ID NO: 82; WAN024A72_at; Start 45; Stop 69
actatataggattaggtcaggaagc

SEQ ID NO: 44758 - DNA, 25 bp, Artificial
  probe
  misc_feature (1)..(25): SEQ ID NO: 82; WAN024A72_at; Start 71; Stop 95
tacgatgccctgaccctttttgtac

SEQ ID NO: 44759 - DNA, 25 bp, Artificial
  probe
  misc_feature (1)..(25): SEQ ID NO: 82; WAN024A72_at; Start 126; Stop 150
aattgacttcgttagcaaacgttca

SEQ ID NO: 44760 - DNA, 25 bp, Artificial
  probe
  misc_feature (1)..(25): SEQ ID NO: 82; WAN024A72_at; Start 14; Stop 38
tttgacaaatagtgctcaatgatct

SEQ ID NO: 44761 - DNA, 25 bp, Artificial
  probe
  misc_feature (1)..(25): SEQ ID NO: 82; WAN024A72_at; Start 117; Stop 141
tgttagataaattgacttcgttagc

SEQ ID NO: 44762 - DNA, 25 bp, Artificial
  probe
  misc_feature (1)..(25): SEQ ID NO: 82; WAN024A72_at; Start 26; Stop 50
tgctcaatgatctaaaatgactata

SEQ ID NO: 44763 - DNA, 25 bp, Artificial
  probe
  misc_feature (1)..(25): SEQ ID NO: 82; WAN024A72_at; Start 82; Stop 106
gaccctttttgtacttatgagatga

SEQ ID NO: 44764 - DNA, 25 bp, Artificial
  probe
  misc_feature (1)..(25): SEQ ID NO: 82; WAN024A72_at; Start 79; Stop 103
cctgaccctttttgtacttatgaga

SEQ ID NO: 44765 - DNA, 25 bp, Artificial
  probe
  misc_feature (1)..(25): SEQ ID NO: 82; WAN024A72_at; Start 57; Stop 81
taggtcaggaagcatacgatgccct

SEQ ID NO: 44766 - DNA, 25 bp, Artificial
  probe
  misc_feature (1)..(25): SEQ ID NO: 82; WAN024A72_at; Start 122; Stop 146
gataaattgacttcgttagcaaacg

SEQ ID NO: 44767 - DNA, 25 bp, Artificial
  probe
  misc_feature (1)..(25): SEQ ID NO: 82; WAN024A72_at; Start 99; Stop 123
tgagatgagaaagtcatttgttaga

SEQ ID NO: 44768 - DNA, 25 bp, Artificial
  probe
  misc_feature (1)..(25): SEQ ID NO: 82; WAN024A72_at; Start 64; Stop 88
ggaagcatacgatgccctgaccctt

SEQ ID NO: 44769 - DNA, 25 bp, Artificial
  probe
  misc_feature (1)..(25): SEQ ID NO: 82; WAN024A72_at; Start 6; Stop 30
tatttttatttgacaaatagtgctc

SEQ ID NO: 44770 - DNA, 25 bp, Artificial
  probe
  misc_feature (1)..(25): SEQ ID NO: 82; WAN024A72_at; Start 68; Stop 92
gcatacgatgccctgaccctttttg

SEQ ID NO: 44771 - DNA, 25 bp, Artificial
  probe
  misc_feature (1)..(25): SEQ ID NO: 82; WAN024A72_at; Start 129; Stop 153
tgacttcgttagcaaacgttcaaaa

SEQ ID NO: 44772 - DNA, 25 bp, Artificial
  probe
  misc_feature (1)..(25): SEQ ID NO: 82; WAN024A72_at; Start 56; Stop 80
ttaggtcaggaagcatacgatgccc

SEQ ID NO: 44773 - DNA, 25 bp, Artificial
  probe
  misc_feature (1)..(25): SEQ ID NO: 82; WAN024A72_at; Start 47; Stop 71
tatataggattaggtcaggaagcat

SEQ ID NO: 44774 - DNA, 25 bp, Artificial
  probe
  misc_feature (1)..(25): SEQ ID NO: 82; WAN024A72_at; Start 94; Stop 118
acttatgagatgagaaagtcatttg

SEQ ID NO: 44775 - DNA, 25 bp, Artificial
  probe
  misc_feature (1)..(25): SEQ ID NO: 249; WAN024A73_at; Start 77; Stop 101
aagggtcagggcatcgtatgcttcc

SEQ ID NO: 44776 - DNA, 25 bp, Artificial
  probe
  misc_feature (1)..(25): SEQ ID NO: 249; WAN024A73_at; Start 67; Stop 91
taagtacaaaaagggtcagggcatc

SEQ ID NO: 44777 - DNA, 25 bp, Artificial
  probe
  misc_feature (1)..(25): SEQ ID NO: 249; WAN024A73_at; Start 137; Stop 161
gcactatttgtcaaataaaaatact

SEQ ID NO: 44778 - DNA, 25 bp, Artificial
  probe
  misc_feature (1)..(25): SEQ ID NO: 249; WAN024A73_at; Start 90; Stop 114
tcgtatgcttcctgacctaatccta

SEQ ID NO: 44779 - DNA, 25 bp, Artificial
  probe
  misc_feature (1)..(25): SEQ ID NO: 249; WAN024A73_at; Start 71; Stop 95
tacaaaaagggtcagggcatcgtat

SEQ ID NO: 44780 - DNA, 25 bp, Artificial
  probe
  misc_feature (1)..(25): SEQ ID NO: 249; WAN024A73_at; Start 60; Stop 84
catctcataagtacaaaaagggtca

SEQ ID NO: 44781 - DNA, 25 bp, Artificial
  probe
  misc_feature (1)..(25): SEQ ID NO: 249; WAN024A73_at; Start 15; Stop 39
tgaacgtttgctaacgaagtcaatt

SEQ ID NO: 44782 - DNA, 25 bp, Artificial
  probe
  misc_feature (1)..(25): SEQ ID NO: 249; WAN024A73_at; Start 73; Stop 97
caaaaagggtcagggcatcgtatgc

SEQ ID NO: 44783 - DNA, 25 bp, Artificial
  probe
  misc_feature (1)..(25): SEQ ID NO: 249; WAN024A73_at; Start 83; Stop 107
cagggcatcgtatgcttcctgacct

SEQ ID NO: 44784 - DNA, 25 bp, Artificial
  probe
  misc_feature (1)..(25): SEQ ID NO: 249; WAN024A73_at; Start 42; Stop 66
tctaacaaatgactttctcatctca

SEQ ID NO: 44785 - DNA, 25 bp, Artificial
  probe
  misc_feature (1)..(25): SEQ ID NO: 249; WAN024A73_at; Start 62; Stop 86
tctcataagtacaaaaagggtcagg

SEQ ID NO: 44786 - DNA, 25 bp, Artificial
  probe
  misc_feature (1)..(25): SEQ ID NO: 249; WAN024A73_at; Start 124; Stop 148
tttagatcattgagcactatttgtc

SEQ ID NO: 44787 - DNA, 25 bp, Artificial
  probe
  misc_feature (1)..(25): SEQ ID NO: 249; WAN024A73_at; Start 59; Stop 83
tcatctcataagtacaaaaagggtc

SEQ ID NO: 44788 - DNA, 25 bp, Artificial
  probe
  misc_feature (1)..(25): SEQ ID NO: 249; WAN024A73_at; Start 24; Stop 48
gctaacgaagtcaatttatctaaca

SEQ ID NO: 44789 - DNA, 25 bp, Artificial
  probe
  misc_feature (1)..(25): SEQ ID NO: 249; WAN024A73_at; Start 19; Stop 43
cgtttgctaacgaagtcaatttatc

SEQ ID NO: 44790 - DNA, 25 bp, Artificial
  probe
  misc_feature (1)..(25): SEQ ID NO: 249; WAN024A73_at; Start 127; Stop 151
agatcattgagcactatttgtcaaa

SEQ ID NO: 44791 - DNA, 25 bp, Artificial
  probe
  misc_feature (1)..(25): SEQ ID NO: 249; WAN024A73_at; Start 29; Stop 53
cgaagtcaatttatctaacaaatga

SEQ ID NO: 44792 - DNA, 25 bp, Artificial
  probe
  misc_feature (1)..(25): SEQ ID NO: 249; WAN024A73_at; Start 69; Stop 93
agtacaaaaagggtcagggcatcgt

SEQ ID NO: 44793 - DNA, 25 bp, Artificial
  probe
  misc_feature (1)..(25): SEQ ID NO: 249; WAN024A73_at; Start 65; Stop 89
cataagtacaaaaagggtcagggca

SEQ ID NO: 44794 - DNA, 25 bp, Artificial
  probe
  misc_feature (1)..(25): SEQ ID NO: 249; WAN024A73_at; Start 47; Stop 71
caaatgactttctcatctcataagt

SEQ ID NO: 44795 - DNA, 25 bp, Artificial
  probe
  misc_feature (1)..(25): SEQ ID NO: 249; WAN024A73_at; Start 92; Stop 116
gtatgcttcctgacctaatcctata

SEQ ID NO: 44796 - DNA, 25 bp, Artificial
  probe
  misc_feature (1)..(25): SEQ ID NO: 249; WAN024A73_at; Start 86; Stop 110
ggcatcgtatgcttcctgacctaat

SEQ ID NO: 44797 - DNA, 25 bp, Artificial
  probe
  misc_feature (1)..(25): SEQ ID NO: 249; WAN024A73_at; Start 52; Stop 76
gactttctcatctcataagtacaaa

SEQ ID NO: 44798 - DNA, 25 bp, Artificial
  probe
  misc_feature (1)..(25): SEQ ID NO: 249; WAN024A73_at; Start 85; Stop 109
gggcatcgtatgcttcctgacctaa

SEQ ID NO: 44799 - DNA, 25 bp, Artificial
  probe
  misc_feature (1)..(25): SEQ ID NO: 249; WAN024A73_at; Start 131; Stop 155
cattgagcactatttgtcaaataaa

SEQ ID NO: 44800 - DNA, 25 bp, Artificial
  probe
  misc_feature (1)..(25): SEQ ID NO: 249; WAN024A73_at; Start 80; Stop 104
ggtcagggcatcgtatgcttcctga

SEQ ID NO: 44801 - DNA, 25 bp, Artificial
  probe
  misc_feature (1)..(25): SEQ ID NO: 249; WAN024A73_at; Start 64; Stop 88
tcataagtacaaaaagggtcagggc

SEQ ID NO: 44802 - DNA, 25 bp, Artificial
  probe
  misc_feature (1)..(25): SEQ ID NO: 249; WAN024A73_at; Start 96; Stop 120
gcttcctgacctaatcctatatagt

SEQ ID NO: 44803 - DNA, 25 bp, Artificial
  probe
  misc_feature (1)..(25): SEQ ID NO: 249; WAN024A73_at; Start 12; Stop 36
ttttgaacgtttgctaacgaagtca

SEQ ID NO: 44804 - DNA, 25 bp, Artificial
  probe
  misc_feature (1)..(25): SEQ ID NO: 249; WAN024A73_at; Start 117; Stop 141
tagtcattttagatcattgagcact

SEQ ID NO: 44805 - DNA, 25 bp, Artificial
  probe
  misc_feature (1)..(25): SEQ ID NO: 249; WAN024A73_at; Start 88; Stop 112
catcgtatgcttcctgacctaatcc

SEQ ID NO: 44806 - DNA, 25 bp, Artificial
  probe
  misc_feature (1)..(25): SEQ ID NO: 249; WAN024A73_at; Start 119; Stop 143
gtcattttagatcattgagcactat

SEQ ID NO: 44807 - DNA, 25 bp, Artificial
  probe
  misc_feature (1)..(25): SEQ ID NO: 249; WAN024A73_at; Start 103; Stop 127
gacctaatcctatatagtcatttta

SEQ ID NO: 44808 - DNA, 25 bp, Artificial
  probe
  misc_feature (1)..(25): SEQ ID NO: 249; WAN024A73_at; Start 57; Stop 81
tctcatctcataagtacaaaaaggg

SEQ ID NO: 44809 - DNA, 25 bp, Artificial
  probe
  misc_feature (1)..(25): SEQ ID NO: 123; WAN024A74_at; Start 8; Stop 32
gccgagtcaaaattctttgaaatca

SEQ ID NO: 44810 - DNA, 25 bp, Artificial
  probe
  misc_feature (1)..(25): SEQ ID NO: 123; WAN024A74_at; Start 3; Stop 27
agaaggccgagtcaaaattctttga

SEQ ID NO: 44811 - DNA, 25 bp, Artificial
  probe
  misc_feature (1)..(25): SEQ ID NO: 123; WAN024A74_at; Start 22; Stop 46
ctttgaaatcagaaaaaacgcataa

SEQ ID NO: 44812 - DNA, 25 bp, Artificial
  probe
  misc_feature (1)..(25): SEQ ID NO: 123; WAN024A74_at; Start 27; Stop 51
aaatcagaaaaaacgcataatattg

SEQ ID NO: 44813 - DNA, 25 bp, Artificial
  probe
  misc_feature (1)..(25): SEQ ID NO: 123; WAN024A74_at; Start 32; Stop 56
agaaaaaacgcataatattgagtgc

SEQ ID NO: 44814 - DNA, 25 bp, Artificial
  probe
  misc_feature (1)..(25): SEQ ID NO: 123; WAN024A74_at; Start 11; Stop 35
gagtcaaaattctttgaaatcagaa

SEQ ID NO: 44815 - DNA, 25 bp, Artificial
  probe
  misc_feature (1)..(25): SEQ ID NO: 123; WAN024A74_at; Start 35; Stop 59
aaaaacgcataatattgagtgcttt

SEQ ID NO: 44816 - DNA, 25 bp, Artificial
  probe
  misc_feature (1)..(25): SEQ ID NO: 123; WAN024A74_at; Start 34; Stop 58
aaaaaacgcataatattgagtgctt

SEQ ID NO: 44817 - DNA, 25 bp, Artificial
  probe
  misc_feature (1)..(25): SEQ ID NO: 123; WAN024A74_at; Start 20; Stop 44
ttctttgaaatcagaaaaaacgcat

SEQ ID NO: 44818 - DNA, 25 bp, Artificial
  probe
  misc_feature (1)..(25): SEQ ID NO: 123; WAN024A74_at; Start 26; Stop 50
gaaatcagaaaaaacgcataatatt

SEQ ID NO: 44819 - DNA, 25 bp, Artificial
  probe
  misc_feature (1)..(25): SEQ ID NO: 123; WAN024A74_at; Start 9; Stop 33
ccgagtcaaaattctttgaaatcag

SEQ ID NO: 44820 - DNA, 25 bp, Artificial
  probe
  misc_feature (1)..(25): SEQ ID NO: 123; WAN024A74_at; Start 30; Stop 54
tcagaaaaaacgcataatattgagt

SEQ ID NO: 44821 - DNA, 25 bp, Artificial
  probe
  misc_feature (1)..(25): SEQ ID NO: 123; WAN024A74_at; Start 13; Stop 37
gtcaaaattctttgaaatcagaaaa

SEQ ID NO: 44822 - DNA, 25 bp, Artificial
  probe
  misc_feature (1)..(25): SEQ ID NO: 123; WAN024A74_at; Start 31; Stop 55
cagaaaaaacgcataatattgagtg

SEQ ID NO: 44823 - DNA, 25 bp, Artificial
  probe
  misc_feature (1)..(25): SEQ ID NO: 123; WAN024A74_at; Start 19; Stop 43
attctttgaaatcagaaaaaacgca

SEQ ID NO: 44824 - DNA, 25 bp, Artificial
  probe
  misc_feature (1)..(25): SEQ ID NO: 123; WAN024A74_at; Start 2; Stop 26
aagaaggccgagtcaaaattctttg

SEQ ID NO: 44825 - DNA, 25 bp, Artificial
  probe
  misc_feature (1)..(25): SEQ ID NO: 123; WAN024A74_at; Start 29; Stop 53
atcagaaaaaacgcataatattgag

SEQ ID NO: 44826 - DNA, 25 bp, Artificial
  probe
  misc_feature (1)..(25): SEQ ID NO: 123; WAN024A74_at; Start 12; Stop 36
agtcaaaattctttgaaatcagaaa

SEQ ID NO: 44827 - DNA, 25 bp, Artificial
  probe
  misc_feature (1)..(25): SEQ ID NO: 123; WAN024A74_at; Start 28; Stop 52
aatcagaaaaaacgcataatattga

SEQ ID NO: 44828 - DNA, 25 bp, Artificial
  probe
  misc_feature (1)..(25): SEQ ID NO: 123; WAN024A74_at; Start 21; Stop 45
tctttgaaatcagaaaaaacgcata

SEQ ID NO: 44829 - DNA, 25 bp, Artificial
  probe
  misc_feature (1)..(25): SEQ ID NO: 123; WAN024A74_at; Start 25; Stop 49
tgaaatcagaaaaaacgcataatat

SEQ ID NO: 44830 - DNA, 25 bp, Artificial
  probe
  misc_feature (1)..(25): SEQ ID NO: 123; WAN024A74_at; Start 23; Stop 47
tttgaaatcagaaaaaacgcataat

SEQ ID NO: 44831 - DNA, 25 bp, Artificial
  probe
  misc_feature (1)..(25): SEQ ID NO: 123; WAN024A74_at; Start 14; Stop 38
tcaaaattctttgaaatcagaaaaa

SEQ ID NO: 44832 - DNA, 25 bp, Artificial
  probe
  misc_feature (1)..(25): SEQ ID NO: 123; WAN024A74_at; Start 33; Stop 57
gaaaaaacgcataatattgagtgct

SEQ ID NO: 44833 - DNA, 25 bp, Artificial
  probe
  misc_feature (1)..(25): SEQ ID NO: 123; WAN024A74_at; Start 6; Stop 30
aggccgagtcaaaattctttgaaat

SEQ ID NO: 44834 - DNA, 25 bp, Artificial
  probe
  misc_feature (1)..(25): SEQ ID NO: 123; WAN024A74_at; Start 10; Stop 34
cgagtcaaaattctttgaaatcaga

SEQ ID NO: 44835 - DNA, 25 bp, Artificial
  probe
  misc_feature (1)..(25): SEQ ID NO: 123; WAN024A74_at; Start 7; Stop 31
ggccgagtcaaaattctttgaaatc

SEQ ID NO: 44836 - DNA, 25 bp, Artificial
  probe
  misc_feature (1)..(25): SEQ ID NO: 123; WAN024A74_at; Start 4; Stop 28
gaaggccgagtcaaaattctttgaa

SEQ ID NO: 44837 - DNA, 25 bp, Artificial
  probe
  misc_feature (1)..(25): SEQ ID NO: 123; WAN024A74_at; Start 24; Stop 48
ttgaaatcagaaaaaacgcataata

SEQ ID NO: 44838 - DNA, 25 bp, Artificial
  probe
  misc_feature (1)..(25): SEQ ID NO: 129; WAN024A75_at; Start 13; Stop 37
attatgcgttttttctgatttcaaa

SEQ ID NO: 44839 - DNA, 25 bp, Artificial
  probe
  misc_feature (1)..(25): SEQ ID NO: 129; WAN024A75_at; Start 16; Stop 40
atgcgttttttctgatttcaaagaa

SEQ ID NO: 44840 - DNA, 25 bp, Artificial
  probe
  misc_feature (1)..(25): SEQ ID NO: 129; WAN024A75_at; Start 14; Stop 38
ttatgcgttttttctgatttcaaag

SEQ ID NO: 44841 - DNA, 25 bp, Artificial
  probe
  misc_feature (1)..(25): SEQ ID NO: 129; WAN024A75_at; Start 24; Stop 48
tttctgatttcaaagaattttgact

SEQ ID NO: 44842 - DNA, 25 bp, Artificial
  probe
  misc_feature (1)..(25): SEQ ID NO: 129; WAN024A75_at; Start 17; Stop 41
tgcgttttttctgatttcaaagaat

SEQ ID NO: 44843 - DNA, 25 bp, Artificial
  probe
  misc_feature (1)..(25): SEQ ID NO: 129; WAN024A75_at; Start 12; Stop 36
tattatgcgttttttctgatttcaa

SEQ ID NO: 44844 - DNA, 25 bp, Artificial
  probe
  misc_feature (1)..(25): SEQ ID NO: 129; WAN024A75_at; Start 34; Stop 58
caaagaattttgactcggccttctt

SEQ ID NO: 44845 - DNA, 25 bp, Artificial
  probe
  misc_feature (1)..(25): SEQ ID NO: 129; WAN024A75_at; Start 32; Stop 56
ttcaaagaattttgactcggccttc

SEQ ID NO: 44846 - DNA, 25 bp, Artificial
  probe
  misc_feature (1)..(25): SEQ ID NO: 129; WAN024A75_at; Start 25; Stop 49
ttctgatttcaaagaattttgactc

SEQ ID NO: 44847 - DNA, 25 bp, Artificial
  probe
  misc_feature (1)..(25): SEQ ID NO: 129; WAN024A75_at; Start 1; Stop 25
aaagcactcaatattatgcgttttt

SEQ ID NO: 44848 - DNA, 25 bp, Artificial
  probe
  misc_feature (1)..(25): SEQ ID NO: 129; WAN024A75_at; Start 33; Stop 57
tcaaagaattttgactcggccttct

SEQ ID NO: 44849 - DNA, 25 bp, Artificial
  probe
  misc_feature (1)..(25): SEQ ID NO: 129; WAN024A75_at; Start 27; Stop 51
ctgatttcaaagaattttgactcgg

SEQ ID NO: 44850 - DNA, 25 bp, Artificial
  probe
  misc_feature (1)..(25): SEQ ID NO: 129; WAN024A75_at; Start 30; Stop 54
atttcaaagaattttgactcggcct

SEQ ID NO: 44851 - DNA, 25 bp, Artificial
  probe
  misc_feature (1)..(25): SEQ ID NO: 129; WAN024A75_at; Start 26; Stop 50
tctgatttcaaagaattttgactcg

SEQ ID NO: 44852 - DNA, 25 bp, Artificial
  probe
  misc_feature (1)..(25): SEQ ID NO: 129; WAN024A75_at; Start 15; Stop 39
tatgcgttttttctgatttcaaaga

SEQ ID NO: 44853 - DNA, 25 bp, Artificial
  probe
  misc_feature (1)..(25): SEQ ID NO: 129; WAN024A75_at; Start 29; Stop 53
gatttcaaagaattttgactcggcc

SEQ ID NO: 44854 - DNA, 25 bp, Artificial
  probe
  misc_feature (1)..(25): SEQ ID NO: 129; WAN024A75_at; Start 28; Stop 52
tgatttcaaagaattttgactcggc

SEQ ID NO: 44855 - DNA, 25 bp, Artificial
  probe
  misc_feature (1)..(25): SEQ ID NO: 129; WAN024A75_at; Start 22; Stop 46
tttttctgatttcaaagaattttga

SEQ ID NO: 44856 - DNA, 25 bp, Artificial
  probe
  misc_feature (1)..(25): SEQ ID NO: 129; WAN024A75_at; Start 23; Stop 47
ttttctgatttcaaagaattttgac

SEQ ID NO: 44857 - DNA, 25 bp, Artificial
  probe
  misc_feature (1)..(25): SEQ ID NO: 4738; WAN024A76_at; Start 72; Stop 96
ctttgtcacgaatatgccttatagt

SEQ ID NO: 44858 - DNA, 25 bp, Artificial
  probe
  misc_feature (1)..(25): SEQ ID NO: 4738; WAN024A76_at; Start 82; Stop 106
aatatgccttatagttctcgatgta

SEQ ID NO: 44859 - DNA, 25 bp, Artificial
  probe
  misc_feature (1)..(25): SEQ ID NO: 4738; WAN024A76_at; Start 31; Stop 55
ggattttccctagacaacttcattc

SEQ ID NO: 44860 - DNA, 25 bp, Artificial
  probe
  misc_feature (1)..(25): SEQ ID NO: 4738; WAN024A76_at; Start 92; Stop 116
atagttctcgatgtaaacgttttag

SEQ ID NO: 44861 - DNA, 25 bp, Artificial
  probe
  misc_feature (1)..(25): SEQ ID NO: 4738; WAN024A76_at; Start 88; Stop 112
ccttatagttctcgatgtaaacgtt

SEQ ID NO: 44862 - DNA, 25 bp, Artificial
  probe
  misc_feature (1)..(25): SEQ ID NO: 4738; WAN024A76_at; Start 66; Stop 90
aaaaaactttgtcacgaatatgcct

SEQ ID NO: 44863 - DNA, 25 bp, Artificial
  probe
  misc_feature (1)..(25): SEQ ID NO: 4738; WAN024A76_at; Start 74; Stop 98
ttgtcacgaatatgccttatagttc

SEQ ID NO: 44864 - DNA, 25 bp, Artificial
  probe
  misc_feature (1)..(25): SEQ ID NO: 4738; WAN024A76_at; Start 68; Stop 92
aaaactttgtcacgaatatgcctta

SEQ ID NO: 44865 - DNA, 25 bp, Artificial
  probe
  misc_feature (1)..(25): SEQ ID NO: 4738; WAN024A76_at; Start 39; Stop 63
cctagacaacttcattctatcactt

SEQ ID NO: 44866 - DNA, 25 bp, Artificial
  probe
  misc_feature (1)..(25): SEQ ID NO: 4738; WAN024A76_at; Start 87; Stop 111
gccttatagttctcgatgtaaacgt

SEQ ID NO: 44867 - DNA, 25 bp, Artificial
  probe
  misc_feature (1)..(25): SEQ ID NO: 4738; WAN024A76_at; Start 65; Stop 89
taaaaaactttgtcacgaatatgcc

SEQ ID NO: 44868 - DNA, 25 bp, Artificial
  probe
  misc_feature (1)..(25): SEQ ID NO: 4738; WAN024A76_at; Start 67; Stop 91
aaaaactttgtcacgaatatgcctt

SEQ ID NO: 44869 - DNA, 25 bp, Artificial
  probe
  misc_feature (1)..(25): SEQ ID NO: 4738; WAN024A76_at; Start 36; Stop 60
ttccctagacaacttcattctatca

SEQ ID NO: 44870 - DNA, 25 bp, Artificial
  probe
  misc_feature (1)..(25): SEQ ID NO: 4738; WAN024A76_at; Start 32; Stop 56
gattttccctagacaacttcattct

SEQ ID NO: 44871 - DNA, 25 bp, Artificial
  probe
  misc_feature (1)..(25): SEQ ID NO: 4738; WAN024A76_at; Start 70; Stop 94
aactttgtcacgaatatgccttata

SEQ ID NO: 44872 - DNA, 25 bp, Artificial
  probe
  misc_feature (1)..(25): SEQ ID NO: 4738; WAN024A76_at; Start 94; Stop 118
agttctcgatgtaaacgttttagtg

SEQ ID NO: 44873 - DNA, 25 bp, Artificial
  probe
  misc_feature (1)..(25): SEQ ID NO: 4738; WAN024A76_at; Start 112; Stop 136
tttagtggtttagaggctgaaatag

SEQ ID NO: 44874 - DNA, 25 bp, Artificial
  probe
  misc_feature (1)..(25): SEQ ID NO: 4738; WAN024A76_at; Start 89; Stop 113
cttatagttctcgatgtaaacgttt

SEQ ID NO: 44875 - DNA, 25 bp, Artificial
  probe
  misc_feature (1)..(25): SEQ ID NO: 4738; WAN024A76_at; Start 71; Stop 95
actttgtcacgaatatgccttatag

SEQ ID NO: 44876 - DNA, 25 bp, Artificial
  probe
  misc_feature (1)..(25): SEQ ID NO: 4738; WAN024A76_at; Start 78; Stop 102
cacgaatatgccttatagttctcga

SEQ ID NO: 44877 - DNA, 25 bp, Artificial
  probe
  misc_feature (1)..(25): SEQ ID NO: 4738; WAN024A76_at; Start 83; Stop 107
atatgccttatagttctcgatgtaa

SEQ ID NO: 44878 - DNA, 25 bp, Artificial
  probe
  misc_feature (1)..(25): SEQ ID NO: 4738; WAN024A76_at; Start 81; Stop 105
gaatatgccttatagttctcgatgt

SEQ ID NO: 44879 - DNA, 25 bp, Artificial
  probe
  misc_feature (1)..(25): SEQ ID NO: 4738; WAN024A76_at; Start 77; Stop 101
tcacgaatatgccttatagttctcg

SEQ ID NO: 44880 - DNA, 25 bp, Artificial
  probe
  misc_feature (1)..(25): SEQ ID NO: 4738; WAN024A76_at; Start 45; Stop 69
caacttcattctatcacttttaaaa

SEQ ID NO: 44881 - DNA, 25 bp, Artificial
  probe
  misc_feature (1)..(25): SEQ ID NO: 4738; WAN024A76_at; Start 43; Stop 67
gacaacttcattctatcacttttaa

SEQ ID NO: 44882 - DNA, 25 bp, Artificial
  probe
  misc_feature (1)..(25): SEQ ID NO: 4738; WAN024A76_at; Start 86; Stop 110
tgccttatagttctcgatgtaaacg

SEQ ID NO: 44883 - DNA, 25 bp, Artificial
  probe
  misc_feature (1)..(25): SEQ ID NO: 4738; WAN024A76_at; Start 10; Stop 34
catctccttaattttattaggggat

SEQ ID NO: 44884 - DNA, 25 bp, Artificial
  probe
  misc_feature (1)..(25): SEQ ID NO: 4738; WAN024A76_at; Start 91; Stop 115
tatagttctcgatgtaaacgtttta

SEQ ID NO: 44885 - DNA, 25 bp, Artificial
  probe
  misc_feature (1)..(25): SEQ ID NO: 4738; WAN024A76_at; Start 69; Stop 93
aaactttgtcacgaatatgccttat

SEQ ID NO: 44886 - DNA, 25 bp, Artificial
  probe
  misc_feature (1)..(25): SEQ ID NO: 4738; WAN024A76_at; Start 73; Stop 97
tttgtcacgaatatgccttatagtt

SEQ ID NO: 44887 - DNA, 25 bp, Artificial
  probe
  misc_feature (1)..(25): SEQ ID NO: 4738; WAN024A76_at; Start 75; Stop 99
tgtcacgaatatgccttatagttct

SEQ ID NO: 44888 - DNA, 25 bp, Artificial
  probe
  misc_feature (1)..(25): SEQ ID NO: 4738; WAN024A76_at; Start 34; Stop 58
ttttccctagacaacttcattctat

SEQ ID NO: 44889 - DNA, 25 bp, Artificial
  probe
  misc_feature (1)..(25): SEQ ID NO: 4738; WAN024A76_at; Start 84; Stop 108
tatgccttatagttctcgatgtaaa

SEQ ID NO: 44890 - DNA, 25 bp, Artificial
  probe
  misc_feature (1)..(25): SEQ ID NO: 4738; WAN024A76_at; Start 80; Stop 104
cgaatatgccttatagttctcgatg

SEQ ID NO: 44891 - DNA, 25 bp, Artificial
  probe
  misc_feature (1)..(25): SEQ ID NO: 3297; WAN024A77_at; Start 49; Stop 73
gcatattcgtgacaaagttttttaa

SEQ ID NO: 44892 - DNA, 25 bp, Artificial
  probe
  misc_feature (1)..(25): SEQ ID NO: 3297; WAN024A77_at; Start 31; Stop 55
tacatcgagaactataaggcatatt

SEQ ID NO: 44893 - DNA, 25 bp, Artificial
  probe
  misc_feature (1)..(25): SEQ ID NO: 3297; WAN024A77_at; Start 32; Stop 56
acatcgagaactataaggcatattc

SEQ ID NO: 44894 - DNA, 25 bp, Artificial
  probe
  misc_feature (1)..(25): SEQ ID NO: 3297; WAN024A77_at; Start 28; Stop 52
gtttacatcgagaactataaggcat

SEQ ID NO: 44895 - DNA, 25 bp, Artificial
  probe
  misc_feature (1)..(25): SEQ ID NO: 3297; WAN024A77_at; Start 22; Stop 46
taaaacgtttacatcgagaactata

SEQ ID NO: 44896 - DNA, 25 bp, Artificial
  probe
  misc_feature (1)..(25): SEQ ID NO: 3297; WAN024A77_at; Start 73; Stop 97
aaagtgatagaatgaagttgtctag

SEQ ID NO: 44897 - DNA, 25 bp, Artificial
  probe
  misc_feature (1)..(25): SEQ ID NO: 3297; WAN024A77_at; Start 27; Stop 51
cgtttacatcgagaactataaggca

SEQ ID NO: 44898 - DNA, 25 bp, Artificial
  probe
  misc_feature (1)..(25): SEQ ID NO: 3297; WAN024A77_at; Start 35; Stop 59
tcgagaactataaggcatattcgtg

SEQ ID NO: 44899 - DNA, 25 bp, Artificial
  probe
  misc_feature (1)..(25): SEQ ID NO: 3297; WAN024A77_at; Start 30; Stop 54
ttacatcgagaactataaggcatat

SEQ ID NO: 44900 - DNA, 25 bp, Artificial
  probe
  misc_feature (1)..(25): SEQ ID NO: 3297; WAN024A77_at; Start 43; Stop 67
tataaggcatattcgtgacaaagtt

SEQ ID NO: 44901 - DNA, 25 bp, Artificial
  probe
  misc_feature (1)..(25): SEQ ID NO: 3297; WAN024A77_at; Start 40; Stop 64
aactataaggcatattcgtgacaaa

SEQ ID NO: 44902 - DNA, 25 bp, Artificial
  probe
  misc_feature (1)..(25): SEQ ID NO: 3297; WAN024A77_at; Start 48; Stop 72
ggcatattcgtgacaaagtttttta

SEQ ID NO: 44903 - DNA, 25 bp, Artificial
  probe
  misc_feature (1)..(25): SEQ ID NO: 3297; WAN024A77_at; Start 41; Stop 65
actataaggcatattcgtgacaaag

SEQ ID NO: 44904 - DNA, 25 bp, Artificial
  probe
  misc_feature (1)..(25): SEQ ID NO: 3297; WAN024A77_at; Start 70; Stop 94
ttaaaagtgatagaatgaagttgtc

SEQ ID NO: 44905 - DNA, 25 bp, Artificial
  probe
  misc_feature (1)..(25): SEQ ID NO: 3297; WAN024A77_at; Start 38; Stop 62
agaactataaggcatattcgtgaca

SEQ ID NO: 44906 - DNA, 25 bp, Artificial
  probe
  misc_feature (1)..(25): SEQ ID NO: 3297; WAN024A77_at; Start 2; Stop 26
tatttcagcctctaaaccactaaaa

SEQ ID NO: 44907 - DNA, 25 bp, Artificial
  probe
  misc_feature (1)..(25): SEQ ID NO: 3297; WAN024A77_at; Start 21; Stop 45
ctaaaacgtttacatcgagaactat

SEQ ID NO: 44908 - DNA, 25 bp, Artificial
  probe
  misc_feature (1)..(25): SEQ ID NO: 3297; WAN024A77_at; Start 19; Stop 43
cactaaaacgtttacatcgagaact

SEQ ID NO: 44909 - DNA, 25 bp, Artificial
  probe
  misc_feature (1)..(25): SEQ ID NO: 3297; WAN024A77_at; Start 29; Stop 53
tttacatcgagaactataaggcata

SEQ ID NO: 44910 - DNA, 25 bp, Artificial
  probe
  misc_feature (1)..(25): SEQ ID NO: 3297; WAN024A77_at; Start 45; Stop 69
taaggcatattcgtgacaaagtttt

SEQ ID NO: 44911 - DNA, 25 bp, Artificial
  probe
  misc_feature (1)..(25): SEQ ID NO: 3297; WAN024A77_at; Start 36; Stop 60
cgagaactataaggcatattcgtga

SEQ ID NO: 44912 - DNA, 25 bp, Artificial
  probe
  misc_feature (1)..(25): SEQ ID NO: 3297; WAN024A77_at; Start 24; Stop 48
aaacgtttacatcgagaactataag

SEQ ID NO: 44913 - DNA, 25 bp, Artificial
  probe
  misc_feature (1)..(25): SEQ ID NO: 3297; WAN024A77_at; Start 82; Stop 106
gaatgaagttgtctagggaaaatcc

SEQ ID NO: 44914 - DNA, 25 bp, Artificial
  probe
  misc_feature (1)..(25): SEQ ID NO: 3297; WAN024A77_at; Start 39; Stop 63
gaactataaggcatattcgtgacaa

SEQ ID NO: 44915 - DNA, 25 bp, Artificial
  probe
  misc_feature (1)..(25): SEQ ID NO: 3297; WAN024A77_at; Start 1; Stop 25
ctatttcagcctctaaaccactaaa

SEQ ID NO: 44916 - DNA, 25 bp, Artificial
  probe
  misc_feature (1)..(25): SEQ ID NO: 3297; WAN024A77_at; Start 71; Stop 95
taaaagtgatagaatgaagttgtct

SEQ ID NO: 44917 - DNA, 25 bp, Artificial
  probe
  misc_feature (1)..(25): SEQ ID NO: 3297; WAN024A77_at; Start 103; Stop 127
atcccctaataaaattaaggagatg

SEQ ID NO: 44918 - DNA, 25 bp, Artificial
  probe
  misc_feature (1)..(25): SEQ ID NO: 3297; WAN024A77_at; Start 25; Stop 49
aacgtttacatcgagaactataagg

SEQ ID NO: 44919 - DNA, 25 bp, Artificial
  probe
  misc_feature (1)..(25): SEQ ID NO: 3297; WAN024A77_at; Start 33; Stop 57
catcgagaactataaggcatattcg

SEQ ID NO: 44920 - DNA, 25 bp, Artificial
  probe
  misc_feature (1)..(25): SEQ ID NO: 3297; WAN024A77_at; Start 46; Stop 70
aaggcatattcgtgacaaagttttt

SEQ ID NO: 44921 - DNA, 25 bp, Artificial
  probe
  misc_feature (1)..(25): SEQ ID NO: 3297; WAN024A77_at; Start 42; Stop 66
ctataaggcatattcgtgacaaagt

SEQ ID NO: 44922 - DNA, 25 bp, Artificial
  probe
  misc_feature (1)..(25): SEQ ID NO: 3297; WAN024A77_at; Start 75; Stop 99
agtgatagaatgaagttgtctaggg

SEQ ID NO: 44923 - DNA, 25 bp, Artificial
  probe
  misc_feature (1)..(25): SEQ ID NO: 3297; WAN024A77_at; Start 26; Stop 50
acgtttacatcgagaactataaggc

SEQ ID NO: 44924 - DNA, 25 bp, Artificial
  probe
  misc_feature (1)..(25): SEQ ID NO: 3297; WAN024A77_at; Start 78; Stop 102
gatagaatgaagttgtctagggaaa

SEQ ID NO: 44925 - DNA, 25 bp, Artificial
  probe
  misc_feature (1)..(25): SEQ ID NO: 3528; WAN024A78_at; Start 1; Stop 25
gaaaatgagcacgattgagtcgtgc

SEQ ID NO: 44926 - DNA, 25 bp, Artificial
  probe
  misc_feature (1)..(25): SEQ ID NO: 3528; WAN024A78_at; Start 46; Stop 70
ggtaatagctatttcttatatcaaa

SEQ ID NO: 44927 - DNA, 25 bp, Artificial
  probe
  misc_feature (1)..(25): SEQ ID NO: 3528; WAN024A78_at; Start 123; Stop 147
aataaaataatatggaggtcacctt

SEQ ID NO: 44928 - DNA, 25 bp, Artificial
  probe
  misc_feature (1)..(25): SEQ ID NO: 3528; WAN024A78_at; Start 122; Stop 146
taataaaataatatggaggtcacct

SEQ ID NO: 44929 - DNA, 25 bp, Artificial
  probe
  misc_feature (1)..(25): SEQ ID NO: 3528; WAN024A78_at; Start 83; Stop 107
gatatttgtaaactataactcaagg

SEQ ID NO: 44930 - DNA, 25 bp, Artificial
  probe
  misc_feature (1)..(25): SEQ ID NO: 3528; WAN024A78_at; Start 93; Stop 117
aactataactcaaggtgctacaata

SEQ ID NO: 44931 - DNA, 25 bp, Artificial
  probe
  misc_feature (1)..(25): SEQ ID NO: 3528; WAN024A78_at; Start 10; Stop 34
cacgattgagtcgtgcttttttcat

SEQ ID NO: 44932 - DNA, 25 bp, Artificial
  probe
  misc_feature (1)..(25): SEQ ID NO: 3528; WAN024A78_at; Start 17; Stop 41
gagtcgtgcttttttcattttcaaa

SEQ ID NO: 44933 - DNA, 25 bp, Artificial
  probe
  misc_feature (1)..(25): SEQ ID NO: 3528; WAN024A78_at; Start 116; Stop 140
tatccttaataaaataatatggagg

SEQ ID NO: 44934 - DNA, 25 bp, Artificial
  probe
  misc_feature (1)..(25): SEQ ID NO: 3528; WAN024A78_at; Start 106; Stop 130
ggtgctacaatatccttaataaaat

SEQ ID NO: 44935 - DNA, 25 bp, Artificial
  probe
  misc_feature (1)..(25): SEQ ID NO: 3528; WAN024A78_at; Start 92; Stop 116
aaactataactcaaggtgctacaat

SEQ ID NO: 44936 - DNA, 25 bp, Artificial
  probe
  misc_feature (1)..(25): SEQ ID NO: 3528; WAN024A78_at; Start 98; Stop 122
taactcaaggtgctacaatatcctt

SEQ ID NO: 44937 - DNA, 25 bp, Artificial
  probe
  misc_feature (1)..(25): SEQ ID NO: 3528; WAN024A78_at; Start 87; Stop 111
tttgtaaactataactcaaggtgct

SEQ ID NO: 44938 - DNA, 25 bp, Artificial
  probe
  misc_feature (1)..(25): SEQ ID NO: 3528; WAN024A78_at; Start 89; Stop 113
tgtaaactataactcaaggtgctac

SEQ ID NO: 44939 - DNA, 25 bp, Artificial
  probe
  misc_feature (1)..(25): SEQ ID NO: 3528; WAN024A78_at; Start 2; Stop 26
aaaatgagcacgattgagtcgtgct

SEQ ID NO: 44940 - DNA, 25 bp, Artificial
  probe
  misc_feature (1)..(25): SEQ ID NO: 3528; WAN024A78_at; Start 37; Stop 61
tcaaaataaggtaatagctatttct

SEQ ID NO: 44941 - DNA, 25 bp, Artificial
  probe
  misc_feature (1)..(25): SEQ ID NO: 3528; WAN024A78_at; Start 9; Stop 33
gcacgattgagtcgtgcttttttca

SEQ ID NO: 44942 - DNA, 25 bp, Artificial
  probe
  misc_feature (1)..(25): SEQ ID NO: 3528; WAN024A78_at; Start 100; Stop 124
actcaaggtgctacaatatccttaa

SEQ ID NO: 44943 - DNA, 25 bp, Artificial
  probe
  misc_feature (1)..(25): SEQ ID NO: 3528; WAN024A78_at; Start 72; Stop 96
tatagaaaactgatatttgtaaact

SEQ ID NO: 44944 - DNA, 25 bp, Artificial
  probe
  misc_feature (1)..(25): SEQ ID NO: 3528; WAN024A78_at; Start 103; Stop 127
caaggtgctacaatatccttaataa

SEQ ID NO: 44945 - DNA, 25 bp, Artificial
  probe
  misc_feature (1)..(25): SEQ ID NO: 3528; WAN024A78_at; Start 121; Stop 145
ttaataaaataatatggaggtcacc

SEQ ID NO: 44946 - DNA, 25 bp, Artificial
  probe
  misc_feature (1)..(25): SEQ ID NO: 3528; WAN024A78_at; Start 88; Stop 112
ttgtaaactataactcaaggtgcta

SEQ ID NO: 44947 - DNA, 25 bp, Artificial
  probe
  misc_feature (1)..(25): SEQ ID NO: 3528; WAN024A78_at; Start 85; Stop 109
tatttgtaaactataactcaaggtg

SEQ ID NO: 44948 - DNA, 25 bp, Artificial
  probe
  misc_feature (1)..(25): SEQ ID NO: 3528; WAN024A78_at; Start 120; Stop 144
cttaataaaataatatggaggtcac

SEQ ID NO: 44949 - DNA, 25 bp, Artificial
  probe
  misc_feature (1)..(25): SEQ ID NO: 3528; WAN024A78_at; Start 90; Stop 114
gtaaactataactcaaggtgctaca

SEQ ID NO: 44950 - DNA, 25 bp, Artificial
  probe
  misc_feature (1)..(25): SEQ ID NO: 3528; WAN024A78_at; Start 96; Stop 120
tataactcaaggtgctacaatatcc

SEQ ID NO: 44951 - DNA, 25 bp, Artificial
  probe
  misc_feature (1)..(25): SEQ ID NO: 3528; WAN024A78_at; Start 99; Stop 123
aactcaaggtgctacaatatcctta

SEQ ID NO: 44952 - DNA, 25 bp, Artificial
  probe
  misc_feature (1)..(25): SEQ ID NO: 3528; WAN024A78_at; Start 3; Stop 27
aaatgagcacgattgagtcgtgctt

SEQ ID NO: 44953 - DNA, 25 bp, Artificial
  probe
  misc_feature (1)..(25): SEQ ID NO: 3528; WAN024A78_at; Start 102; Stop 126
tcaaggtgctacaatatccttaata

SEQ ID NO: 44954 - DNA, 25 bp, Artificial
  probe
  misc_feature (1)..(25): SEQ ID NO: 3528; WAN024A78_at; Start 53; Stop 77
gctatttcttatatcaaaatataga

SEQ ID NO: 44955 - DNA, 25 bp, Artificial
  probe
  misc_feature (1)..(25): SEQ ID NO: 3528; WAN024A78_at; Start 32; Stop 56
cattttcaaaataaggtaatagcta

SEQ ID NO: 44956 - DNA, 25 bp, Artificial
  probe
  misc_feature (1)..(25): SEQ ID NO: 3528; WAN024A78_at; Start 91; Stop 115
taaactataactcaaggtgctacaa

SEQ ID NO: 44957 - DNA, 25 bp, Artificial
  probe
  misc_feature (1)..(25): SEQ ID NO: 3528; WAN024A78_at; Start 95; Stop 119
ctataactcaaggtgctacaatatc

SEQ ID NO: 44958 - DNA, 25 bp, Artificial
  probe
  misc_feature (1)..(25): SEQ ID NO: 3528; WAN024A78_at; Start 97; Stop 121
ataactcaaggtgctacaatatcct

SEQ ID NO: 44959 - DNA, 25 bp, Artificial
  probe
  misc_feature (1)..(25): SEQ ID NO: 241; WAN024A79_at; Start 29; Stop 53
gatattgtagcaccttgagttatag

SEQ ID NO: 44960 - DNA, 25 bp, Artificial
  probe
  misc_feature (1)..(25): SEQ ID NO: 241; WAN024A79_at; Start 28; Stop 52
ggatattgtagcaccttgagttata

SEQ ID NO: 44961 - DNA, 25 bp, Artificial
  probe
  misc_feature (1)..(25): SEQ ID NO: 241; WAN024A79_at; Start 120; Stop 144
aaagcacgactcaatcgtgctcatt

SEQ ID NO: 44962 - DNA, 25 bp, Artificial
  probe
  misc_feature (1)..(25): SEQ ID NO: 241; WAN024A79_at; Start 107; Stop 131
tttgaaaatgaaaaaagcacgactc

SEQ ID NO: 44963 - DNA, 25 bp, Artificial
  probe
  misc_feature (1)..(25): SEQ ID NO: 241; WAN024A79_at; Start 25; Stop 49
taaggatattgtagcaccttgagtt

SEQ ID NO: 44964 - DNA, 25 bp, Artificial
  probe
  misc_feature (1)..(25): SEQ ID NO: 241; WAN024A79_at; Start 112; Stop 136
aaatgaaaaaagcacgactcaatcg

SEQ ID NO: 44965 - DNA, 25 bp, Artificial
  probe
  misc_feature (1)..(25): SEQ ID NO: 241; WAN024A79_at; Start 110; Stop 134
gaaaatgaaaaaagcacgactcaat

SEQ ID NO: 44966 - DNA, 25 bp, Artificial
  probe
  misc_feature (1)..(25): SEQ ID NO: 241; WAN024A79_at; Start 38; Stop 62
gcaccttgagttatagtttacaaat

SEQ ID NO: 44967 - DNA, 25 bp, Artificial
  probe
  misc_feature (1)..(25): SEQ ID NO: 241; WAN024A79_at; Start 45; Stop 69
gagttatagtttacaaatatcagtt

SEQ ID NO: 44968 - DNA, 25 bp, Artificial
  probe
  misc_feature (1)..(25): SEQ ID NO: 241; WAN024A79_at; Start 118; Stop 142
aaaaagcacgactcaatcgtgctca

SEQ ID NO: 44969 - DNA, 25 bp, Artificial
  probe
  misc_feature (1)..(25): SEQ ID NO: 241; WAN024A79_at; Start 78; Stop 102
tttgatataagaaatagctattacc

SEQ ID NO: 44970 - DNA, 25 bp, Artificial
  probe
  misc_feature (1)..(25): SEQ ID NO: 241; WAN024A79_at; Start 27; Stop 51
aggatattgtagcaccttgagttat

SEQ ID NO: 44971 - DNA, 25 bp, Artificial
  probe
  misc_feature (1)..(25): SEQ ID NO: 241; WAN024A79_at; Start 115; Stop 139
tgaaaaaagcacgactcaatcgtgc

SEQ ID NO: 44972 - DNA, 25 bp, Artificial
  probe
  misc_feature (1)..(25): SEQ ID NO: 241; WAN024A79_at; Start 21; Stop 45
ttattaaggatattgtagcaccttg

SEQ ID NO: 44973 - DNA, 25 bp, Artificial
  probe
  misc_feature (1)..(25): SEQ ID NO: 241; WAN024A79_at; Start 113; Stop 137
aatgaaaaaagcacgactcaatcgt

SEQ ID NO: 44974 - DNA, 25 bp, Artificial
  probe
  misc_feature (1)..(25): SEQ ID NO: 241; WAN024A79_at; Start 5; Stop 29
tgacctccatattattttattaagg

SEQ ID NO: 44975 - DNA, 25 bp, Artificial
  probe
  misc_feature (1)..(25): SEQ ID NO: 241; WAN024A79_at; Start 31; Stop 55
tattgtagcaccttgagttatagtt

SEQ ID NO: 44976 - DNA, 25 bp, Artificial
  probe
  misc_feature (1)..(25): SEQ ID NO: 241; WAN024A79_at; Start 80; Stop 104
tgatataagaaatagctattacctt

SEQ ID NO: 44977 - DNA, 25 bp, Artificial
  probe
  misc_feature (1)..(25): SEQ ID NO: 241; WAN024A79_at; Start 116; Stop 140
gaaaaaagcacgactcaatcgtgct

SEQ ID NO: 44978 - DNA, 25 bp, Artificial
  probe
  misc_feature (1)..(25): SEQ ID NO: 241; WAN024A79_at; Start 3; Stop 27
ggtgacctccatattattttattaa

SEQ ID NO: 44979 - DNA, 25 bp, Artificial
  probe
  misc_feature (1)..(25): SEQ ID NO: 241; WAN024A79_at; Start 88; Stop 112
gaaatagctattaccttattttgaa

SEQ ID NO: 44980 - DNA, 25 bp, Artificial
  probe
  misc_feature (1)..(25): SEQ ID NO: 241; WAN024A79_at; Start 92; Stop 116
tagctattaccttattttgaaaatg

SEQ ID NO: 44981 - DNA, 25 bp, Artificial
  probe
  misc_feature (1)..(25): SEQ ID NO: 241; WAN024A79_at; Start 123; Stop 147
gcacgactcaatcgtgctcattttc

SEQ ID NO: 44982 - DNA, 25 bp, Artificial
  probe
  misc_feature (1)..(25): SEQ ID NO: 241; WAN024A79_at; Start 109; Stop 133
tgaaaatgaaaaaagcacgactcaa

SEQ ID NO: 44983 - DNA, 25 bp, Artificial
  probe
  misc_feature (1)..(25): SEQ ID NO: 241; WAN024A79_at; Start 18; Stop 42
attttattaaggatattgtagcacc

SEQ ID NO: 44984 - DNA, 25 bp, Artificial
  probe
  misc_feature (1)..(25): SEQ ID NO: 241; WAN024A79_at; Start 1; Stop 25
aaggtgacctccatattattttatt

SEQ ID NO: 44985 - DNA, 25 bp, Artificial
  probe
  misc_feature (1)..(25): SEQ ID NO: 241; WAN024A79_at; Start 22; Stop 46
tattaaggatattgtagcaccttga

SEQ ID NO: 44986 - DNA, 25 bp, Artificial
  probe
  misc_feature (1)..(25): SEQ ID NO: 241; WAN024A79_at; Start 36; Stop 60
tagcaccttgagttatagtttacaa

SEQ ID NO: 44987 - DNA, 25 bp, Artificial
  probe
  misc_feature (1)..(25): SEQ ID NO: 241; WAN024A79_at; Start 49; Stop 73
tatagtttacaaatatcagttttct

SEQ ID NO: 44988 - DNA, 25 bp, Artificial
  probe
  misc_feature (1)..(25): SEQ ID NO: 241; WAN024A79_at; Start 34; Stop 58
tgtagcaccttgagttatagtttac

SEQ ID NO: 44989 - DNA, 25 bp, Artificial
  probe
  misc_feature (1)..(25): SEQ ID NO: 241; WAN024A79_at; Start 37; Stop 61
agcaccttgagttatagtttacaaa

SEQ ID NO: 44990 - DNA, 25 bp, Artificial
  probe
  misc_feature (1)..(25): SEQ ID NO: 241; WAN024A79_at; Start 41; Stop 65
ccttgagttatagtttacaaatatc

SEQ ID NO: 44991 - DNA, 25 bp, Artificial
  probe
  misc_feature (1)..(25): SEQ ID NO: 241; WAN024A79_at; Start 24; Stop 48
ttaaggatattgtagcaccttgagt

SEQ ID NO: 44992 - DNA, 25 bp, Artificial
  probe
  misc_feature (1)..(25): SEQ ID NO: 241; WAN024A79_at; Start 108; Stop 132
ttgaaaatgaaaaaagcacgactca

SEQ ID NO: 44993 - DNA, 25 bp, Artificial
  probe
  misc_feature (1)..(25): SEQ ID NO: 177; WAN024A7A_at; Start 52; Stop 76
ttttccctcaggcatgatataatgg

SEQ ID NO: 44994 - DNA, 25 bp, Artificial
  probe
  misc_feature (1)..(25): SEQ ID NO: 177; WAN024A7A_at; Start 66; Stop 90
tgatataatggttacagaagtctag

SEQ ID NO: 44995 - DNA, 25 bp, Artificial
  probe
  misc_feature (1)..(25): SEQ ID NO: 177; WAN024A7A_at; Start 53; Stop 77
tttccctcaggcatgatataatggt

SEQ ID NO: 44996 - DNA, 25 bp, Artificial
  probe
  misc_feature (1)..(25): SEQ ID NO: 177; WAN024A7A_at; Start 68; Stop 92
atataatggttacagaagtctagaa

SEQ ID NO: 44997 - DNA, 25 bp, Artificial
  probe
  misc_feature (1)..(25): SEQ ID NO: 177; WAN024A7A_at; Start 59; Stop 83
tcaggcatgatataatggttacaga

SEQ ID NO: 44998 - DNA, 25 bp, Artificial
  probe
  misc_feature (1)..(25): SEQ ID NO: 177; WAN024A7A_at; Start 73; Stop 97
atggttacagaagtctagaaagagg

SEQ ID NO: 44999 - DNA, 25 bp, Artificial
  probe
  misc_feature (1)..(25): SEQ ID NO: 177; WAN024A7A_at; Start 63; Stop 87
gcatgatataatggttacagaagtc

SEQ ID NO: 45000 - DNA, 25 bp, Artificial
  probe
  misc_feature (1)..(25): SEQ ID NO: 177; WAN024A7A_at; Start 65; Stop 89
atgatataatggttacagaagtcta

SEQ ID NO: 45001 - DNA, 25 bp, Artificial
  probe
  misc_feature (1)..(25): SEQ ID NO: 177; WAN024A7A_at; Start 56; Stop 80
ccctcaggcatgatataatggttac

SEQ ID NO: 45002 - DNA, 25 bp, Artificial
  probe
  misc_feature (1)..(25): SEQ ID NO: 177; WAN024A7A_at; Start 57; Stop 81
cctcaggcatgatataatggttaca

SEQ ID NO: 45003 - DNA, 25 bp, Artificial
  probe
  misc_feature (1)..(25): SEQ ID NO: 177; WAN024A7A_at; Start 54; Stop 78
ttccctcaggcatgatataatggtt

SEQ ID NO: 45004 - DNA, 25 bp, Artificial
  probe
  misc_feature (1)..(25): SEQ ID NO: 177; WAN024A7A_at; Start 67; Stop 91
gatataatggttacagaagtctaga

SEQ ID NO: 45005 - DNA, 25 bp, Artificial
  probe
  misc_feature (1)..(25): SEQ ID NO: 177; WAN024A7A_at; Start 37; Stop 61
actcactgtttttgattttccctca

SEQ ID NO: 45006 - DNA, 25 bp, Artificial
  probe
  misc_feature (1)..(25): SEQ ID NO: 177; WAN024A7A_at; Start 61; Stop 85
aggcatgatataatggttacagaag

SEQ ID NO: 45007 - DNA, 25 bp, Artificial
  probe
  misc_feature (1)..(25): SEQ ID NO: 177; WAN024A7A_at; Start 69; Stop 93
tataatggttacagaagtctagaaa

SEQ ID NO: 45008 - DNA, 25 bp, Artificial
  probe
  misc_feature (1)..(25): SEQ ID NO: 177; WAN024A7A_at; Start 62; Stop 86
ggcatgatataatggttacagaagt

SEQ ID NO: 45009 - DNA, 25 bp, Artificial
  probe
  misc_feature (1)..(25): SEQ ID NO: 177; WAN024A7A_at; Start 55; Stop 79
tccctcaggcatgatataatggtta

SEQ ID NO: 45010 - DNA, 25 bp, Artificial
  probe
  misc_feature (1)..(25): SEQ ID NO: 177; WAN024A7A_at; Start 64; Stop 88
catgatataatggttacagaagtct

SEQ ID NO: 45011 - DNA, 25 bp, Artificial
  probe
  misc_feature (1)..(25): SEQ ID NO: 177; WAN024A7A_at; Start 40; Stop 64
cactgtttttgattttccctcaggc

SEQ ID NO: 45012 - DNA, 25 bp, Artificial
  probe
  misc_feature (1)..(25): SEQ ID NO: 177; WAN024A7A_at; Start 58; Stop 82
ctcaggcatgatataatggttacag

SEQ ID NO: 45013 - DNA, 25 bp, Artificial
  probe
  misc_feature (1)..(25): SEQ ID NO: 177; WAN024A7A_at; Start 38; Stop 62
ctcactgtttttgattttccctcag

SEQ ID NO: 45014 - DNA, 25 bp, Artificial
  probe
  misc_feature (1)..(25): SEQ ID NO: 177; WAN024A7A_at; Start 72; Stop 96
aatggttacagaagtctagaaagag

SEQ ID NO: 45015 - DNA, 25 bp, Artificial
  probe
  misc_feature (1)..(25): SEQ ID NO: 177; WAN024A7A_at; Start 74; Stop 98
tggttacagaagtctagaaagagga

SEQ ID NO: 45016 - DNA, 25 bp, Artificial
  probe
  misc_feature (1)..(25): SEQ ID NO: 177; WAN024A7A_at; Start 75; Stop 99
ggttacagaagtctagaaagaggaa

SEQ ID NO: 45017 - DNA, 25 bp, Artificial
  probe
  misc_feature (1)..(25): SEQ ID NO: 177; WAN024A7A_at; Start 60; Stop 84
caggcatgatataatggttacagaa

SEQ ID NO: 45018 - DNA, 25 bp, Artificial
  probe
  misc_feature (1)..(25): SEQ ID NO: 177; WAN024A7A_at; Start 51; Stop 75
attttccctcaggcatgatataatg

SEQ ID NO: 45019 - DNA, 25 bp, Artificial
  probe
  misc_feature (1)..(25): SEQ ID NO: 177; WAN024A7A_at; Start 71; Stop 95
taatggttacagaagtctagaaaga

SEQ ID NO: 45020 - DNA, 25 bp, Artificial
  probe
  misc_feature (1)..(25): SEQ ID NO: 177; WAN024A7A_at; Start 70; Stop 94
ataatggttacagaagtctagaaag

SEQ ID NO: 45021 - DNA, 25 bp, Artificial
  probe
  misc_feature (1)..(25): SEQ ID NO: 177; WAN024A7A_at; Start 39; Stop 63
tcactgtttttgattttccctcagg

SEQ ID NO: 45022 - DNA, 25 bp, Artificial
  probe
  misc_feature (1)..(25): SEQ ID NO: 4558; WAN024A7B_at; Start 7; Stop 31
tcctctttctagacttctgtaacca

SEQ ID NO: 45023 - DNA, 25 bp, Artificial
  probe
  misc_feature (1)..(25): SEQ ID NO: 4558; WAN024A7B_at; Start 6; Stop 30
ttcctctttctagacttctgtaacc

SEQ ID NO: 45024 - DNA, 25 bp, Artificial
  probe
  misc_feature (1)..(25): SEQ ID NO: 4558; WAN024A7B_at; Start 22; Stop 46
tctgtaaccattatatcatgcctga

SEQ ID NO: 45025 - DNA, 25 bp, Artificial
  probe
  misc_feature (1)..(25): SEQ ID NO: 4558; WAN024A7B_at; Start 24; Stop 48
tgtaaccattatatcatgcctgagg

SEQ ID NO: 45026 - DNA, 25 bp, Artificial
  probe
  misc_feature (1)..(25): SEQ ID NO: 4558; WAN024A7B_at; Start 16; Stop 40
tagacttctgtaaccattatatcat

SEQ ID NO: 45027 - DNA, 25 bp, Artificial
  probe
  misc_feature (1)..(25): SEQ ID NO: 4558; WAN024A7B_at; Start 28; Stop 52
accattatatcatgcctgagggaaa

SEQ ID NO: 45028 - DNA, 25 bp, Artificial
  probe
  misc_feature (1)..(25): SEQ ID NO: 4558; WAN024A7B_at; Start 38; Stop 62
catgcctgagggaaaatcaaaaaca

SEQ ID NO: 45029 - DNA, 25 bp, Artificial
  probe
  misc_feature (1)..(25): SEQ ID NO: 4558; WAN024A7B_at; Start 33; Stop 57
tatatcatgcctgagggaaaatcaa

SEQ ID NO: 45030 - DNA, 25 bp, Artificial
  probe
  misc_feature (1)..(25): SEQ ID NO: 4558; WAN024A7B_at; Start 19; Stop 43
acttctgtaaccattatatcatgcc

SEQ ID NO: 45031 - DNA, 25 bp, Artificial
  probe
  misc_feature (1)..(25): SEQ ID NO: 4558; WAN024A7B_at; Start 12; Stop 36
tttctagacttctgtaaccattata

SEQ ID NO: 45032 - DNA, 25 bp, Artificial
  probe
  misc_feature (1)..(25): SEQ ID NO: 4558; WAN024A7B_at; Start 43; Stop 67
ctgagggaaaatcaaaaacagtgag

SEQ ID NO: 45033 - DNA, 25 bp, Artificial
  probe
  misc_feature (1)..(25): SEQ ID NO: 4558; WAN024A7B_at; Start 15; Stop 39
ctagacttctgtaaccattatatca

SEQ ID NO: 45034 - DNA, 25 bp, Artificial
  probe
  misc_feature (1)..(25): SEQ ID NO: 4558; WAN024A7B_at; Start 10; Stop 34
tctttctagacttctgtaaccatta

SEQ ID NO: 45035 - DNA, 25 bp, Artificial
  probe
  misc_feature (1)..(25): SEQ ID NO: 4558; WAN024A7B_at; Start 18; Stop 42
gacttctgtaaccattatatcatgc

SEQ ID NO: 45036 - DNA, 25 bp, Artificial
  probe
  misc_feature (1)..(25): SEQ ID NO: 4558; WAN024A7B_at; Start 39; Stop 63
atgcctgagggaaaatcaaaaacag

SEQ ID NO: 45037 - DNA, 25 bp, Artificial
  probe
  misc_feature (1)..(25): SEQ ID NO: 4558; WAN024A7B_at; Start 29; Stop 53
ccattatatcatgcctgagggaaaa

SEQ ID NO: 45038 - DNA, 25 bp, Artificial
  probe
  misc_feature (1)..(25): SEQ ID NO: 4558; WAN024A7B_at; Start 23; Stop 47
ctgtaaccattatatcatgcctgag

SEQ ID NO: 45039 - DNA, 25 bp, Artificial
  probe
  misc_feature (1)..(25): SEQ ID NO: 4558; WAN024A7B_at; Start 34; Stop 58
atatcatgcctgagggaaaatcaaa

SEQ ID NO: 45040 - DNA, 25 bp, Artificial
  probe
  misc_feature (1)..(25): SEQ ID NO: 4558; WAN024A7B_at; Start 35; Stop 59
tatcatgcctgagggaaaatcaaaa

SEQ ID NO: 45041 - DNA, 25 bp, Artificial
  probe
  misc_feature (1)..(25): SEQ ID NO: 4558; WAN024A7B_at; Start 41; Stop 65
gcctgagggaaaatcaaaaacagtg

SEQ ID NO: 45042 - DNA, 25 bp, Artificial
  probe
  misc_feature (1)..(25): SEQ ID NO: 4558; WAN024A7B_at; Start 45; Stop 69
gagggaaaatcaaaaacagtgagtc

SEQ ID NO: 45043 - DNA, 25 bp, Artificial
  probe
  misc_feature (1)..(25): SEQ ID NO: 4558; WAN024A7B_at; Start 25; Stop 49
gtaaccattatatcatgcctgaggg

SEQ ID NO: 45044 - DNA, 25 bp, Artificial
  probe
  misc_feature (1)..(25): SEQ ID NO: 4558; WAN024A7B_at; Start 37; Stop 61
tcatgcctgagggaaaatcaaaaac

SEQ ID NO: 45045 - DNA, 25 bp, Artificial
  probe
  misc_feature (1)..(25): SEQ ID NO: 4558; WAN024A7B_at; Start 31; Stop 55
attatatcatgcctgagggaaaatc

SEQ ID NO: 45046 - DNA, 25 bp, Artificial
  probe
  misc_feature (1)..(25): SEQ ID NO: 4558; WAN024A7B_at; Start 44; Stop 68
tgagggaaaatcaaaaacagtgagt

SEQ ID NO: 45047 - DNA, 25 bp, Artificial
  probe
  misc_feature (1)..(25): SEQ ID NO: 4558; WAN024A7B_at; Start 14; Stop 38
tctagacttctgtaaccattatatc

SEQ ID NO: 45048 - DNA, 25 bp, Artificial
  probe
  misc_feature (1)..(25): SEQ ID NO: 4558; WAN024A7B_at; Start 27; Stop 51
aaccattatatcatgcctgagggaa

SEQ ID NO: 45049 - DNA, 25 bp, Artificial
  probe
  misc_feature (1)..(25): SEQ ID NO: 4558; WAN024A7B_at; Start 20; Stop 44
cttctgtaaccattatatcatgcct

SEQ ID NO: 45050 - DNA, 25 bp, Artificial
  probe
  misc_feature (1)..(25): SEQ ID NO: 4558; WAN024A7B_at; Start 40; Stop 64
tgcctgagggaaaatcaaaaacagt

SEQ ID NO: 45051 - DNA, 25 bp, Artificial
  probe
  misc_feature (1)..(25): SEQ ID NO: 4558; WAN024A7B_at; Start 21; Stop 45
ttctgtaaccattatatcatgcctg

SEQ ID NO: 45052 - DNA, 25 bp, Artificial
  probe
  misc_feature (1)..(25): SEQ ID NO: 4558; WAN024A7B_at; Start 26; Stop 50
taaccattatatcatgcctgaggga

SEQ ID NO: 45053 - DNA, 25 bp, Artificial
  probe
  misc_feature (1)..(25): SEQ ID NO: 4558; WAN024A7B_at; Start 32; Stop 56
ttatatcatgcctgagggaaaatca

SEQ ID NO: 45054 - DNA, 25 bp, Artificial
  probe
  misc_feature (1)..(25): SEQ ID NO: 4558; WAN024A7B_at; Start 42; Stop 66
cctgagggaaaatcaaaaacagtga

SEQ ID NO: 45055 - DNA, 25 bp, Artificial
  probe
  misc_feature (1)..(25): SEQ ID NO: 4558; WAN024A7B_at; Start 8; Stop 32
cctctttctagacttctgtaaccat

SEQ ID NO: 45056 - DNA, 25 bp, Artificial
  probe
  misc_feature (1)..(25): SEQ ID NO: 589; WAN024A7C_at; Start 13; Stop 37
taaaaatcgggtgatagataacaat

SEQ ID NO: 45057 - DNA, 25 bp, Artificial
  probe
  misc_feature (1)..(25): SEQ ID NO: 589; WAN024A7C_at; Start 92; Stop 116
caattgttgcgagttgtaggtactc

SEQ ID NO: 45058 - DNA, 25 bp, Artificial
  probe
  misc_feature (1)..(25): SEQ ID NO: 589; WAN024A7C_at; Start 42; Stop 66
tgataaaaccccatactaatagtag

SEQ ID NO: 45059 - DNA, 25 bp, Artificial
  probe
  misc_feature (1)..(25): SEQ ID NO: 589; WAN024A7C_at; Start 16; Stop 40
aaatcgggtgatagataacaattgc

SEQ ID NO: 45060 - DNA, 25 bp, Artificial
  probe
  misc_feature (1)..(25): SEQ ID NO: 589; WAN024A7C_at; Start 87; Stop 111
tattccaattgttgcgagttgtagg

SEQ ID NO: 45061 - DNA, 25 bp, Artificial
  probe
  misc_feature (1)..(25): SEQ ID NO: 589; WAN024A7C_at; Start 29; Stop 53
gataacaattgcttgataaaacccc

SEQ ID NO: 45062 - DNA, 25 bp, Artificial
  probe
  misc_feature (1)..(25): SEQ ID NO: 589; WAN024A7C_at; Start 104; Stop 128
gttgtaggtactcaaataatctata

SEQ ID NO: 45063 - DNA, 25 bp, Artificial
  probe
  misc_feature (1)..(25): SEQ ID NO: 589; WAN024A7C_at; Start 91; Stop 115
ccaattgttgcgagttgtaggtact

SEQ ID NO: 45064 - DNA, 25 bp, Artificial
  probe
  misc_feature (1)..(25): SEQ ID NO: 589; WAN024A7C_at; Start 64; Stop 88
tagaatggttttgggaattataata

SEQ ID NO: 45065 - DNA, 25 bp, Artificial
  probe
  misc_feature (1)..(25): SEQ ID NO: 589; WAN024A7C_at; Start 102; Stop 126
gagttgtaggtactcaaataatcta

SEQ ID NO: 45066 - DNA, 25 bp, Artificial
  probe
  misc_feature (1)..(25): SEQ ID NO: 589; WAN024A7C_at; Start 107; Stop 131
gtaggtactcaaataatctatatag

SEQ ID NO: 45067 - DNA, 25 bp, Artificial
  probe
  misc_feature (1)..(25): SEQ ID NO: 589; WAN024A7C_at; Start 47; Stop 71
aaaccccatactaatagtagaatgg

SEQ ID NO: 45068 - DNA, 25 bp, Artificial
  probe
  misc_feature (1)..(25): SEQ ID NO: 589; WAN024A7C_at; Start 78; Stop 102
gaattataatattccaattgttgcg

SEQ ID NO: 45069 - DNA, 25 bp, Artificial
  probe
  misc_feature (1)..(25): SEQ ID NO: 589; WAN024A7C_at; Start 55; Stop 79
tactaatagtagaatggttttggga

SEQ ID NO: 45070 - DNA, 25 bp, Artificial
  probe
  misc_feature (1)..(25): SEQ ID NO: 589; WAN024A7C_at; Start 33; Stop 57
acaattgcttgataaaaccccatac

SEQ ID NO: 45071 - DNA, 25 bp, Artificial
  probe
  misc_feature (1)..(25): SEQ ID NO: 589; WAN024A7C_at; Start 21; Stop 45
gggtgatagataacaattgcttgat

SEQ ID NO: 45072 - DNA, 25 bp, Artificial
  probe
  misc_feature (1)..(25): SEQ ID NO: 589; WAN024A7C_at; Start 43; Stop 67
gataaaaccccatactaatagtaga

SEQ ID NO: 45073 - DNA, 25 bp, Artificial
  probe
  misc_feature (1)..(25): SEQ ID NO: 589; WAN024A7C_at; Start 57; Stop 81
ctaatagtagaatggttttgggaat

SEQ ID NO: 45074 - DNA, 25 bp, Artificial
  probe
  misc_feature (1)..(25): SEQ ID NO: 589; WAN024A7C_at; Start 50; Stop 74
ccccatactaatagtagaatggttt

SEQ ID NO: 45075 - DNA, 25 bp, Artificial
  probe
  misc_feature (1)..(25): SEQ ID NO: 589; WAN024A7C_at; Start 95; Stop 119
ttgttgcgagttgtaggtactcaaa

SEQ ID NO: 45076 - DNA, 25 bp, Artificial
  probe
  misc_feature (1)..(25): SEQ ID NO: 589; WAN024A7C_at; Start 97; Stop 121
gttgcgagttgtaggtactcaaata

SEQ ID NO: 45077 - DNA, 25 bp, Artificial
  probe
  misc_feature (1)..(25): SEQ ID NO: 589; WAN024A7C_at; Start 90; Stop 114
tccaattgttgcgagttgtaggtac

SEQ ID NO: 45078 - DNA, 25 bp, Artificial
  probe
  misc_feature (1)..(25): SEQ ID NO: 589; WAN024A7C_at; Start 31; Stop 55
taacaattgcttgataaaaccccat

SEQ ID NO: 45079 - DNA, 25 bp, Artificial
  probe
  misc_feature (1)..(25): SEQ ID NO: 589; WAN024A7C_at; Start 110; Stop 134
ggtactcaaataatctatatagaaa

SEQ ID NO: 45080 - DNA, 25 bp, Artificial
  probe
  misc_feature (1)..(25): SEQ ID NO: 589; WAN024A7C_at; Start 93; Stop 117
aattgttgcgagttgtaggtactca

SEQ ID NO: 45081 - DNA, 25 bp, Artificial
  probe
  misc_feature (1)..(25): SEQ ID NO: 589; WAN024A7C_at; Start 11; Stop 35
aataaaaatcgggtgatagataaca

SEQ ID NO: 45082 - DNA, 25 bp, Artificial
  probe
  misc_feature (1)..(25): SEQ ID NO: 589; WAN024A7C_at; Start 19; Stop 43
tcgggtgatagataacaattgcttg

SEQ ID NO: 45083 - DNA, 25 bp, Artificial
  probe
  misc_feature (1)..(25): SEQ ID NO: 589; WAN024A7C_at; Start 100; Stop 124
gcgagttgtaggtactcaaataatc

SEQ ID NO: 45084 - DNA, 25 bp, Artificial
  probe
  misc_feature (1)..(25): SEQ ID NO: 589; WAN024A7C_at; Start 20; Stop 44
cgggtgatagataacaattgcttga

SEQ ID NO: 45085 - DNA, 25 bp, Artificial
  probe
  misc_feature (1)..(25): SEQ ID NO: 589; WAN024A7C_at; Start 82; Stop 106
tataatattccaattgttgcgagtt

SEQ ID NO: 45086 - DNA, 25 bp, Artificial
  probe
  misc_feature (1)..(25): SEQ ID NO: 589; WAN024A7C_at; Start 38; Stop 62
tgcttgataaaaccccatactaata

SEQ ID NO: 45087 - DNA, 25 bp, Artificial
  probe
  misc_feature (1)..(25): SEQ ID NO: 589; WAN024A7C_at; Start 35; Stop 59
aattgcttgataaaaccccatacta

SEQ ID NO: 45088 - DNA, 25 bp, Artificial
  probe
  misc_feature (1)..(25): SEQ ID NO: 589; WAN024A7C_at; Start 53; Stop 77
catactaatagtagaatggttttgg

SEQ ID NO: 45089 - DNA, 25 bp, Artificial
  probe
  misc_feature (1)..(25): SEQ ID NO: 589; WAN024A7C_at; Start 124; Stop 148
ctatatagaaatttagaggtgtgaa

SEQ ID NO: 45090 - DNA, 25 bp, Artificial
  probe
  misc_feature (1)..(25): SEQ ID NO: 4820; WAN024A7D_at; Start 70; Stop 94
tcccaaaaccattctactattagta

SEQ ID NO: 45091 - DNA, 25 bp, Artificial
  probe
  misc_feature (1)..(25): SEQ ID NO: 4820; WAN024A7D_at; Start 114; Stop 138
tgttatctatcacccgatttttatt

SEQ ID NO: 45092 - DNA, 25 bp, Artificial
  probe
  misc_feature (1)..(25): SEQ ID NO: 4820; WAN024A7D_at; Start 64; Stop 88
tataattcccaaaaccattctacta

SEQ ID NO: 45093 - DNA, 25 bp, Artificial
  probe
  misc_feature (1)..(25): SEQ ID NO: 4820; WAN024A7D_at; Start 39; Stop 63
ctacaactcgcaacaattggaatat

SEQ ID NO: 45094 - DNA, 25 bp, Artificial
  probe
  misc_feature (1)..(25): SEQ ID NO: 4820; WAN024A7D_at; Start 40; Stop 64
tacaactcgcaacaattggaatatt

SEQ ID NO: 45095 - DNA, 25 bp, Artificial
  probe
  misc_feature (1)..(25): SEQ ID NO: 4820; WAN024A7D_at; Start 38; Stop 62
cctacaactcgcaacaattggaata

SEQ ID NO: 45096 - DNA, 25 bp, Artificial
  probe
  misc_feature (1)..(25): SEQ ID NO: 4820; WAN024A7D_at; Start 61; Stop 85
tattataattcccaaaaccattcta

SEQ ID NO: 45097 - DNA, 25 bp, Artificial
  probe
  misc_feature (1)..(25): SEQ ID NO: 4820; WAN024A7D_at; Start 49; Stop 73
caacaattggaatattataattccc

SEQ ID NO: 45098 - DNA, 25 bp, Artificial
  probe
  misc_feature (1)..(25): SEQ ID NO: 4820; WAN024A7D_at; Start 106; Stop 130
caagcaattgttatctatcacccga

SEQ ID NO: 45099 - DNA, 25 bp, Artificial
  probe
  misc_feature (1)..(25): SEQ ID NO: 4820; WAN024A7D_at; Start 5; Stop 29
cacctctaaatttctatatagatta

SEQ ID NO: 45100 - DNA, 25 bp, Artificial
  probe
  misc_feature (1)..(25): SEQ ID NO: 4820; WAN024A7D_at; Start 73; Stop 97
caaaaccattctactattagtatgg

SEQ ID NO: 45101 - DNA, 25 bp, Artificial
  probe
  misc_feature (1)..(25): SEQ ID NO: 4820; WAN024A7D_at; Start 37; Stop 61
acctacaactcgcaacaattggaat

SEQ ID NO: 45102 - DNA, 25 bp, Artificial
  probe
  misc_feature (1)..(25): SEQ ID NO: 4820; WAN024A7D_at; Start 35; Stop 59
gtacctacaactcgcaacaattgga

SEQ ID NO: 45103 - DNA, 25 bp, Artificial
  probe
  misc_feature (1)..(25): SEQ ID NO: 4820; WAN024A7D_at; Start 109; Stop 133
gcaattgttatctatcacccgattt

SEQ ID NO: 45104 - DNA, 25 bp, Artificial
  probe
  misc_feature (1)..(25): SEQ ID NO: 4820; WAN024A7D_at; Start 56; Stop 80
tggaatattataattcccaaaacca

SEQ ID NO: 45105 - DNA, 25 bp, Artificial
  probe
  misc_feature (1)..(25): SEQ ID NO: 4820; WAN024A7D_at; Start 107; Stop 131
aagcaattgttatctatcacccgat

SEQ ID NO: 45106 - DNA, 25 bp, Artificial
  probe
  misc_feature (1)..(25): SEQ ID NO: 4820; WAN024A7D_at; Start 26; Stop 50
attatttgagtacctacaactcgca

SEQ ID NO: 45107 - DNA, 25 bp, Artificial
  probe
  misc_feature (1)..(25): SEQ ID NO: 4820; WAN024A7D_at; Start 45; Stop 69
ctcgcaacaattggaatattataat

SEQ ID NO: 45108 - DNA, 25 bp, Artificial
  probe
  misc_feature (1)..(25): SEQ ID NO: 4820; WAN024A7D_at; Start 33; Stop 57
gagtacctacaactcgcaacaattg

SEQ ID NO: 45109 - DNA, 25 bp, Artificial
  probe
  misc_feature (1)..(25): SEQ ID NO: 4820; WAN024A7D_at; Start 68; Stop 92
attcccaaaaccattctactattag

SEQ ID NO: 45110 - DNA, 25 bp, Artificial
  probe
  misc_feature (1)..(25): SEQ ID NO: 4820; WAN024A7D_at; Start 74; Stop 98
aaaaccattctactattagtatggg

SEQ ID NO: 45111 - DNA, 25 bp, Artificial
  probe
  misc_feature (1)..(25): SEQ ID NO: 4820; WAN024A7D_at; Start 110; Stop 134
caattgttatctatcacccgatttt

SEQ ID NO: 45112 - DNA, 25 bp, Artificial
  probe
  misc_feature (1)..(25): SEQ ID NO: 4820; WAN024A7D_at; Start 87; Stop 111
tattagtatggggttttatcaagca

SEQ ID NO: 45113 - DNA, 25 bp, Artificial
  probe
  misc_feature (1)..(25): SEQ ID NO: 4820; WAN024A7D_at; Start 21; Stop 45
tatagattatttgagtacctacaac

SEQ ID NO: 45114 - DNA, 25 bp, Artificial
  probe
  misc_feature (1)..(25): SEQ ID NO: 4820; WAN024A7D_at; Start 1; Stop 25
ttcacacctctaaatttctatatag

SEQ ID NO: 45115 - DNA, 25 bp, Artificial
  probe
  misc_feature (1)..(25): SEQ ID NO: 4820; WAN024A7D_at; Start 97; Stop 121
gggttttatcaagcaattgttatct

SEQ ID NO: 45116 - DNA, 25 bp, Artificial
  probe
  misc_feature (1)..(25): SEQ ID NO: 4820; WAN024A7D_at; Start 25; Stop 49
gattatttgagtacctacaactcgc

SEQ ID NO: 45117 - DNA, 25 bp, Artificial
  probe
  misc_feature (1)..(25): SEQ ID NO: 4820; WAN024A7D_at; Start 28; Stop 52
tatttgagtacctacaactcgcaac

SEQ ID NO: 45118 - DNA, 25 bp, Artificial
  probe
  misc_feature (1)..(25): SEQ ID NO: 4820; WAN024A7D_at; Start 34; Stop 58
agtacctacaactcgcaacaattgg

SEQ ID NO: 45119 - DNA, 25 bp, Artificial
  probe
  misc_feature (1)..(25): SEQ ID NO: 4820; WAN024A7D_at; Start 105; Stop 129
tcaagcaattgttatctatcacccg

SEQ ID NO: 45120 - DNA, 25 bp, Artificial
  probe
  misc_feature (1)..(25): SEQ ID NO: 4820; WAN024A7D_at; Start 30; Stop 54
tttgagtacctacaactcgcaacaa

SEQ ID NO: 45121 - DNA, 25 bp, Artificial
  probe
  misc_feature (1)..(25): SEQ ID NO: 4820; WAN024A7D_at; Start 42; Stop 66
caactcgcaacaattggaatattat

SEQ ID NO: 45122 - DNA, 25 bp, Artificial
  probe
  misc_feature (1)..(25): SEQ ID NO: 4820; WAN024A7D_at; Start 32; Stop 56
tgagtacctacaactcgcaacaatt

SEQ ID NO: 45123 - DNA, 25 bp, Artificial
  probe
  misc_feature (1)..(25): SEQ ID NO: 4820; WAN024A7D_at; Start 23; Stop 47
tagattatttgagtacctacaactc

SEQ ID NO: 45124 - DNA, 25 bp, Artificial
  probe
  misc_feature (1)..(25): SEQ ID NO: 4590; WAN024A7E_at; Start 51; Stop 75
cataaatggagatttttaggcatat

SEQ ID NO: 45125 - DNA, 25 bp, Artificial
  probe
  misc_feature (1)..(25): SEQ ID NO: 4590; WAN024A7E_at; Start 36; Stop 60
tccctcataatggtacataaatgga

SEQ ID NO: 45126 - DNA, 25 bp, Artificial
  probe
  misc_feature (1)..(25): SEQ ID NO: 4590; WAN024A7E_at; Start 80; Stop 104
ggtataataatacccatgaaagagc

SEQ ID NO: 45127 - DNA, 25 bp, Artificial
  probe
  misc_feature (1)..(25): SEQ ID NO: 4590; WAN024A7E_at; Start 102; Stop 126
agcaagtaaatgaatagtaggtgga

SEQ ID NO: 45128 - DNA, 25 bp, Artificial
  probe
  misc_feature (1)..(25): SEQ ID NO: 4590; WAN024A7E_at; Start 3; Stop 27
acatgtggaggccttgcctcctttt

SEQ ID NO: 45129 - DNA, 25 bp, Artificial
  probe
  misc_feature (1)..(25): SEQ ID NO: 4590; WAN024A7E_at; Start 49; Stop 73
tacataaatggagatttttaggcat

SEQ ID NO: 45130 - DNA, 25 bp, Artificial
  probe
  misc_feature (1)..(25): SEQ ID NO: 4590; WAN024A7E_at; Start 40; Stop 64
tcataatggtacataaatggagatt

SEQ ID NO: 45131 - DNA, 25 bp, Artificial
  probe
  misc_feature (1)..(25): SEQ ID NO: 4590; WAN024A7E_at; Start 90; Stop 114
tacccatgaaagagcaagtaaatga

SEQ ID NO: 45132 - DNA, 25 bp, Artificial
  probe
  misc_feature (1)..(25): SEQ ID NO: 4590; WAN024A7E_at; Start 70; Stop 94
gcatatttttggtataataataccc

SEQ ID NO: 45133 - DNA, 25 bp, Artificial
  probe
  misc_feature (1)..(25): SEQ ID NO: 4590; WAN024A7E_at; Start 37; Stop 61
ccctcataatggtacataaatggag

SEQ ID NO: 45134 - DNA, 25 bp, Artificial
  probe
  misc_feature (1)..(25): SEQ ID NO: 4590; WAN024A7E_at; Start 28; Stop 52
tctatttttccctcataatggtaca

SEQ ID NO: 45135 - DNA, 25 bp, Artificial
  probe
  misc_feature (1)..(25): SEQ ID NO: 4590; WAN024A7E_at; Start 103; Stop 127
gcaagtaaatgaatagtaggtggag

SEQ ID NO: 45136 - DNA, 25 bp, Artificial
  probe
  misc_feature (1)..(25): SEQ ID NO: 4590; WAN024A7E_at; Start 41; Stop 65
cataatggtacataaatggagattt

SEQ ID NO: 45137 - DNA, 25 bp, Artificial
  probe
  misc_feature (1)..(25): SEQ ID NO: 4590; WAN024A7E_at; Start 59; Stop 83
gagatttttaggcatatttttggta

SEQ ID NO: 45138 - DNA, 25 bp, Artificial
  probe
  misc_feature (1)..(25): SEQ ID NO: 4590; WAN024A7E_at; Start 82; Stop 106
tataataatacccatgaaagagcaa

SEQ ID NO: 45139 - DNA, 25 bp, Artificial
  probe
  misc_feature (1)..(25): SEQ ID NO: 4590; WAN024A7E_at; Start 87; Stop 111
taatacccatgaaagagcaagtaaa

SEQ ID NO: 45140 - DNA, 25 bp, Artificial
  probe
  misc_feature (1)..(25): SEQ ID NO: 4590; WAN024A7E_at; Start 83; Stop 107
ataataatacccatgaaagagcaag

SEQ ID NO: 45141 - DNA, 25 bp, Artificial
  probe
  misc_feature (1)..(25): SEQ ID NO: 4590; WAN024A7E_at; Start 61; Stop 85
gatttttaggcatatttttggtata

SEQ ID NO: 45142 - DNA, 25 bp, Artificial
  probe
  misc_feature (1)..(25): SEQ ID NO: 4590; WAN024A7E_at; Start 43; Stop 67
taatggtacataaatggagattttt

SEQ ID NO: 45143 - DNA, 25 bp, Artificial
  probe
  misc_feature (1)..(25): SEQ ID NO: 4590; WAN024A7E_at; Start 47; Stop 71
ggtacataaatggagatttttaggc

SEQ ID NO: 45144 - DNA, 25 bp, Artificial
  probe
  misc_feature (1)..(25): SEQ ID NO: 4590; WAN024A7E_at; Start 91; Stop 115
acccatgaaagagcaagtaaatgaa

SEQ ID NO: 45145 - DNA, 25 bp, Artificial
  probe
  misc_feature (1)..(25): SEQ ID NO: 4590; WAN024A7E_at; Start 34; Stop 58
tttccctcataatggtacataaatg

SEQ ID NO: 45146 - DNA, 25 bp, Artificial
  probe
  misc_feature (1)..(25): SEQ ID NO: 4590; WAN024A7E_at; Start 30; Stop 54
tatttttccctcataatggtacata

SEQ ID NO: 45147 - DNA, 25 bp, Artificial
  probe
  misc_feature (1)..(25): SEQ ID NO: 4590; WAN024A7E_at; Start 35; Stop 59
ttccctcataatggtacataaatgg

SEQ ID NO: 45148 - DNA, 25 bp, Artificial
  probe
  misc_feature (1)..(25): SEQ ID NO: 4590; WAN024A7E_at; Start 84; Stop 108
taataatacccatgaaagagcaagt

SEQ ID NO: 45149 - DNA, 25 bp, Artificial
  probe
  misc_feature (1)..(25): SEQ ID NO: 4590; WAN024A7E_at; Start 39; Stop 63
ctcataatggtacataaatggagat

SEQ ID NO: 45150 - DNA, 25 bp, Artificial
  probe
  misc_feature (1)..(25): SEQ ID NO: 4590; WAN024A7E_at; Start 4; Stop 28
catgtggaggccttgcctccttttt

SEQ ID NO: 45151 - DNA, 25 bp, Artificial
  probe
  misc_feature (1)..(25): SEQ ID NO: 4590; WAN024A7E_at; Start 57; Stop 81
tggagatttttaggcatatttttgg

SEQ ID NO: 45152 - DNA, 25 bp, Artificial
  probe
  misc_feature (1)..(25): SEQ ID NO: 4590; WAN024A7E_at; Start 6; Stop 30
tgtggaggccttgcctcctttttct

SEQ ID NO: 45153 - DNA, 25 bp, Artificial
  probe
  misc_feature (1)..(25): SEQ ID NO: 4590; WAN024A7E_at; Start 85; Stop 109
aataatacccatgaaagagcaagta

SEQ ID NO: 45154 - DNA, 25 bp, Artificial
  probe
  misc_feature (1)..(25): SEQ ID NO: 4590; WAN024A7E_at; Start 38; Stop 62
cctcataatggtacataaatggaga

SEQ ID NO: 45155 - DNA, 25 bp, Artificial
  probe
  misc_feature (1)..(25): SEQ ID NO: 4590; WAN024A7E_at; Start 89; Stop 113
atacccatgaaagagcaagtaaatg

SEQ ID NO: 45156 - DNA, 25 bp, Artificial
  probe
  misc_feature (1)..(25): SEQ ID NO: 4590; WAN024A7E_at; Start 88; Stop 112
aatacccatgaaagagcaagtaaat

SEQ ID NO: 45157 - DNA, 25 bp, Artificial
  probe
  misc_feature (1)..(25): SEQ ID NO: 4590; WAN024A7E_at; Start 86; Stop 110
ataatacccatgaaagagcaagtaa

SEQ ID NO: 45158 - DNA, 25 bp, Artificial
  probe
  misc_feature (1)..(25): SEQ ID NO: 3306; WAN024A7F_at; Start 57; Stop 81
gcctaaaaatctccatttatgtacc

SEQ ID NO: 45159 - DNA, 25 bp, Artificial
  probe
  misc_feature (1)..(25): SEQ ID NO: 3306; WAN024A7F_at; Start 48; Stop 72
caaaaatatgcctaaaaatctccat

SEQ ID NO: 45160 - DNA, 25 bp, Artificial
  probe
  misc_feature (1)..(25): SEQ ID NO: 3306; WAN024A7F_at; Start 81; Stop 105
cattatgagggaaaaatagaaaaag

SEQ ID NO: 45161 - DNA, 25 bp, Artificial
  probe
  misc_feature (1)..(25): SEQ ID NO: 3306; WAN024A7F_at; Start 24; Stop 48
gctctttcatgggtattattatacc

SEQ ID NO: 45162 - DNA, 25 bp, Artificial
  probe
  misc_feature (1)..(25): SEQ ID NO: 3306; WAN024A7F_at; Start 17; Stop 41
tttacttgctctttcatgggtatta

SEQ ID NO: 45163 - DNA, 25 bp, Artificial
  probe
  misc_feature (1)..(25): SEQ ID NO: 3306; WAN024A7F_at; Start 4; Stop 28
cacctactattcatttacttgctct

SEQ ID NO: 45164 - DNA, 25 bp, Artificial
  probe
  misc_feature (1)..(25): SEQ ID NO: 3306; WAN024A7F_at; Start 72; Stop 96
tttatgtaccattatgagggaaaaa

SEQ ID NO: 45165 - DNA, 25 bp, Artificial
  probe
  misc_feature (1)..(25): SEQ ID NO: 3306; WAN024A7F_at; Start 98; Stop 122
agaaaaaggaggcaaggcctccaca

SEQ ID NO: 45166 - DNA, 25 bp, Artificial
  probe
  misc_feature (1)..(25): SEQ ID NO: 3306; WAN024A7F_at; Start 96; Stop 120
atagaaaaaggaggcaaggcctcca

SEQ ID NO: 45167 - DNA, 25 bp, Artificial
  probe
  misc_feature (1)..(25): SEQ ID NO: 3306; WAN024A7F_at; Start 15; Stop 39
catttacttgctctttcatgggtat

SEQ ID NO: 45168 - DNA, 25 bp, Artificial
  probe
  misc_feature (1)..(25): SEQ ID NO: 3306; WAN024A7F_at; Start 76; Stop 100
tgtaccattatgagggaaaaataga

SEQ ID NO: 45169 - DNA, 25 bp, Artificial
  probe
  misc_feature (1)..(25): SEQ ID NO: 3306; WAN024A7F_at; Start 47; Stop 71
ccaaaaatatgcctaaaaatctcca

SEQ ID NO: 45170 - DNA, 25 bp, Artificial
  probe
  misc_feature (1)..(25): SEQ ID NO: 3306; WAN024A7F_at; Start 60; Stop 84
taaaaatctccatttatgtaccatt

SEQ ID NO: 45171 - DNA, 25 bp, Artificial
  probe
  misc_feature (1)..(25): SEQ ID NO: 3306; WAN024A7F_at; Start 101; Stop 125
aaaaggaggcaaggcctccacatgt

SEQ ID NO: 45172 - DNA, 25 bp, Artificial
  probe
  misc_feature (1)..(25): SEQ ID NO: 3306; WAN024A7F_at; Start 20; Stop 44
acttgctctttcatgggtattatta

SEQ ID NO: 45173 - DNA, 25 bp, Artificial
  probe
  misc_feature (1)..(25): SEQ ID NO: 3306; WAN024A7F_at; Start 54; Stop 78
tatgcctaaaaatctccatttatgt

SEQ ID NO: 45174 - DNA, 25 bp, Artificial
  probe
  misc_feature (1)..(25): SEQ ID NO: 3306; WAN024A7F_at; Start 99; Stop 123
gaaaaaggaggcaaggcctccacat

SEQ ID NO: 45175 - DNA, 25 bp, Artificial
  probe
  misc_feature (1)..(25): SEQ ID NO: 3306; WAN024A7F_at; Start 14; Stop 38
tcatttacttgctctttcatgggta

SEQ ID NO: 45176 - DNA, 25 bp, Artificial
  probe
  misc_feature (1)..(25): SEQ ID NO: 3306; WAN024A7F_at; Start 67; Stop 91
ctccatttatgtaccattatgaggg

SEQ ID NO: 45177 - DNA, 25 bp, Artificial
  probe
  misc_feature (1)..(25): SEQ ID NO: 3306; WAN024A7F_at; Start 68; Stop 92
tccatttatgtaccattatgaggga

SEQ ID NO: 45178 - DNA, 25 bp, Artificial
  probe
  misc_feature (1)..(25): SEQ ID NO: 3306; WAN024A7F_at; Start 100; Stop 124
aaaaaggaggcaaggcctccacatg

SEQ ID NO: 45179 - DNA, 25 bp, Artificial
  probe
  misc_feature (1)..(25): SEQ ID NO: 3306; WAN024A7F_at; Start 103; Stop 127
aaggaggcaaggcctccacatgtga

SEQ ID NO: 45180 - DNA, 25 bp, Artificial
  probe
  misc_feature (1)..(25): SEQ ID NO: 3306; WAN024A7F_at; Start 70; Stop 94
catttatgtaccattatgagggaaa

SEQ ID NO: 45181 - DNA, 25 bp, Artificial
  probe
  misc_feature (1)..(25): SEQ ID NO: 3306; WAN024A7F_at; Start 77; Stop 101
gtaccattatgagggaaaaatagaa

SEQ ID NO: 45182 - DNA, 25 bp, Artificial
  probe
  misc_feature (1)..(25): SEQ ID NO: 3306; WAN024A7F_at; Start 74; Stop 98
tatgtaccattatgagggaaaaata

SEQ ID NO: 45183 - DNA, 25 bp, Artificial
  probe
  misc_feature (1)..(25): SEQ ID NO: 3306; WAN024A7F_at; Start 12; Stop 36
attcatttacttgctctttcatggg

SEQ ID NO: 45184 - DNA, 25 bp, Artificial
  probe
  misc_feature (1)..(25): SEQ ID NO: 3306; WAN024A7F_at; Start 66; Stop 90
tctccatttatgtaccattatgagg

SEQ ID NO: 45185 - DNA, 25 bp, Artificial
  probe
  misc_feature (1)..(25): SEQ ID NO: 3306; WAN024A7F_at; Start 50; Stop 74
aaaatatgcctaaaaatctccattt

SEQ ID NO: 45186 - DNA, 25 bp, Artificial
  probe
  misc_feature (1)..(25): SEQ ID NO: 3306; WAN024A7F_at; Start 69; Stop 93
ccatttatgtaccattatgagggaa

SEQ ID NO: 45187 - DNA, 25 bp, Artificial
  probe
  misc_feature (1)..(25): SEQ ID NO: 3306; WAN024A7F_at; Start 29; Stop 53
ttcatgggtattattataccaaaaa

SEQ ID NO: 45188 - DNA, 25 bp, Artificial
  probe
  misc_feature (1)..(25): SEQ ID NO: 3306; WAN024A7F_at; Start 2; Stop 26
tccacctactattcatttacttgct

SEQ ID NO: 45189 - DNA, 25 bp, Artificial
  probe
  misc_feature (1)..(25): SEQ ID NO: 3306; WAN024A7F_at; Start 26; Stop 50
tctttcatgggtattattataccaa

SEQ ID NO: 45190 - DNA, 25 bp, Artificial
  probe
  misc_feature (1)..(25): SEQ ID NO: 3306; WAN024A7F_at; Start 11; Stop 35
tattcatttacttgctctttcatgg

SEQ ID NO: 45191 - DNA, 25 bp, Artificial
  probe
  misc_feature (1)..(25): SEQ ID NO: 3306; WAN024A7F_at; Start 45; Stop 69
taccaaaaatatgcctaaaaatctc

SEQ ID NO: 45192 - DNA, 25 bp, Artificial
  probe
  misc_feature (1)..(25): SEQ ID NO: 4343; WAN024A7G_at; Start 8; Stop 32
gaaatgcctttccttgttcacagga

SEQ ID NO: 45193 - DNA, 25 bp, Artificial
  probe
  misc_feature (1)..(25): SEQ ID NO: 4343; WAN024A7G_at; Start 57; Stop 81
agcaggcttagatggtctgcttttt

SEQ ID NO: 45194 - DNA, 25 bp, Artificial
  probe
  misc_feature (1)..(25): SEQ ID NO: 4343; WAN024A7G_at; Start 1; Stop 25
gttatcagaaatgcctttccttgtt

SEQ ID NO: 45195 - DNA, 25 bp, Artificial
  probe
  misc_feature (1)..(25): SEQ ID NO: 4343; WAN024A7G_at; Start 10; Stop 34
aatgcctttccttgttcacaggaaa

SEQ ID NO: 45196 - DNA, 25 bp, Artificial
  probe
  misc_feature (1)..(25): SEQ ID NO: 4343; WAN024A7G_at; Start 37; Stop 61
tatataagaatcaatagtaaagcag

SEQ ID NO: 45197 - DNA, 25 bp, Artificial
  probe
  misc_feature (1)..(25): SEQ ID NO: 4343; WAN024A7G_at; Start 6; Stop 30
cagaaatgcctttccttgttcacag

SEQ ID NO: 45198 - DNA, 25 bp, Artificial
  probe
  misc_feature (1)..(25): SEQ ID NO: 4343; WAN024A7G_at; Start 56; Stop 80
aagcaggcttagatggtctgctttt

SEQ ID NO: 45199 - DNA, 25 bp, Artificial
  probe
  misc_feature (1)..(25): SEQ ID NO: 4343; WAN024A7G_at; Start 60; Stop 84
aggcttagatggtctgcttttttag

SEQ ID NO: 45200 - DNA, 25 bp, Artificial
  probe
  misc_feature (1)..(25): SEQ ID NO: 4343; WAN024A7G_at; Start 2; Stop 26
ttatcagaaatgcctttccttgttc

SEQ ID NO: 45201 - DNA, 25 bp, Artificial
  probe
  misc_feature (1)..(25): SEQ ID NO: 4343; WAN024A7G_at; Start 59; Stop 83
caggcttagatggtctgctttttta

SEQ ID NO: 45202 - DNA, 25 bp, Artificial
  probe
  misc_feature (1)..(25): SEQ ID NO: 4343; WAN024A7G_at; Start 58; Stop 82
gcaggcttagatggtctgctttttt

SEQ ID NO: 45203 - DNA, 25 bp, Artificial
  probe
  misc_feature (1)..(25): SEQ ID NO: 4343; WAN024A7G_at; Start 12; Stop 36
tgcctttccttgttcacaggaaatt

SEQ ID NO: 45204 - DNA, 25 bp, Artificial
  probe
  misc_feature (1)..(25): SEQ ID NO: 4343; WAN024A7G_at; Start 51; Stop 75
tagtaaagcaggcttagatggtctg

SEQ ID NO: 45205 - DNA, 25 bp, Artificial
  probe
  misc_feature (1)..(25): SEQ ID NO: 4343; WAN024A7G_at; Start 9; Stop 33
aaatgcctttccttgttcacaggaa

SEQ ID NO: 45206 - DNA, 25 bp, Artificial
  probe
  misc_feature (1)..(25): SEQ ID NO: 4343; WAN024A7G_at; Start 38; Stop 62
atataagaatcaatagtaaagcagg

SEQ ID NO: 45207 - DNA, 25 bp, Artificial
  probe
  misc_feature (1)..(25): SEQ ID NO: 4343; WAN024A7G_at; Start 52; Stop 76
agtaaagcaggcttagatggtctgc

SEQ ID NO: 45208 - DNA, 25 bp, Artificial
  probe
  misc_feature (1)..(25): SEQ ID NO: 4343; WAN024A7G_at; Start 7; Stop 31
agaaatgcctttccttgttcacagg

SEQ ID NO: 45209 - DNA, 25 bp, Artificial
  probe
  misc_feature (1)..(25): SEQ ID NO: 4343; WAN024A7G_at; Start 5; Stop 29
tcagaaatgcctttccttgttcaca

SEQ ID NO: 45210 - DNA, 25 bp, Artificial
  probe
  misc_feature (1)..(25): SEQ ID NO: 4343; WAN024A7G_at; Start 30; Stop 54
ggaaatttatataagaatcaatagt

SEQ ID NO: 45211 - DNA, 25 bp, Artificial
  probe
  misc_feature (1)..(25): SEQ ID NO: 4343; WAN024A7G_at; Start 63; Stop 87
cttagatggtctgcttttttagttt

SEQ ID NO: 45212 - DNA, 25 bp, Artificial
  probe
  misc_feature (1)..(25): SEQ ID NO: 4343; WAN024A7G_at; Start 35; Stop 59
tttatataagaatcaatagtaaagc

SEQ ID NO: 45213 - DNA, 25 bp, Artificial
  probe
  misc_feature (1)..(25): SEQ ID NO: 4343; WAN024A7G_at; Start 11; Stop 35
atgcctttccttgttcacaggaaat

SEQ ID NO: 45214 - DNA, 25 bp, Artificial
  probe
  misc_feature (1)..(25): SEQ ID NO: 4343; WAN024A7G_at; Start 39; Stop 63
tataagaatcaatagtaaagcaggc

SEQ ID NO: 45215 - DNA, 25 bp, Artificial
  probe
  misc_feature (1)..(25): SEQ ID NO: 4343; WAN024A7G_at; Start 53; Stop 77
gtaaagcaggcttagatggtctgct

SEQ ID NO: 45216 - DNA, 25 bp, Artificial
  probe
  misc_feature (1)..(25): SEQ ID NO: 4343; WAN024A7G_at; Start 31; Stop 55
gaaatttatataagaatcaatagta

SEQ ID NO: 45217 - DNA, 25 bp, Artificial
  probe
  misc_feature (1)..(25): SEQ ID NO: 4343; WAN024A7G_at; Start 61; Stop 85
ggcttagatggtctgcttttttagt

SEQ ID NO: 45218 - DNA, 25 bp, Artificial
  probe
  misc_feature (1)..(25): SEQ ID NO: 4343; WAN024A7G_at; Start 4; Stop 28
atcagaaatgcctttccttgttcac

SEQ ID NO: 45219 - DNA, 25 bp, Artificial
  probe
  misc_feature (1)..(25): SEQ ID NO: 4343; WAN024A7G_at; Start 55; Stop 79
aaagcaggcttagatggtctgcttt

SEQ ID NO: 45220 - DNA, 25 bp, Artificial
  probe
  misc_feature (1)..(25): SEQ ID NO: 4343; WAN024A7G_at; Start 62; Stop 86
gcttagatggtctgcttttttagtt

SEQ ID NO: 45221 - DNA, 25 bp, Artificial
  probe
  misc_feature (1)..(25): SEQ ID NO: 4343; WAN024A7G_at; Start 54; Stop 78
taaagcaggcttagatggtctgctt

SEQ ID NO: 45222 - DNA, 25 bp, Artificial
  probe
  misc_feature (1)..(25): SEQ ID NO: 4343; WAN024A7G_at; Start 36; Stop 60
ttatataagaatcaatagtaaagca

SEQ ID NO: 45223 - DNA, 25 bp, Artificial
  probe
  misc_feature (1)..(25): SEQ ID NO: 4343; WAN024A7G_at; Start 16; Stop 40
tttccttgttcacaggaaatttata

SEQ ID NO: 45224 - DNA, 25 bp, Artificial
  probe
  misc_feature (1)..(25): SEQ ID NO: 4343; WAN024A7G_at; Start 3; Stop 27
tatcagaaatgcctttccttgttca

SEQ ID NO: 45225 - DNA, 25 bp, Artificial
  probe
  misc_feature (1)..(25): SEQ ID NO: 4343; WAN024A7G_at; Start 15; Stop 39
ctttccttgttcacaggaaatttat

SEQ ID NO: 45226 - DNA, 25 bp, Artificial
  probe
  misc_feature (1)..(25): SEQ ID NO: 65; WAN024A7H_at; Start 59; Stop 83
cctgtgaacaaggaaaggcatttct

SEQ ID NO: 45227 - DNA, 25 bp, Artificial
  probe
  misc_feature (1)..(25): SEQ ID NO: 65; WAN024A7H_at; Start 9; Stop 33
aaaaagcagaccatctaagcctgct

SEQ ID NO: 45228 - DNA, 25 bp, Artificial
  probe
  misc_feature (1)..(25): SEQ ID NO: 65; WAN024A7H_at; Start 56; Stop 80
tttcctgtgaacaaggaaaggcatt

SEQ ID NO: 45229 - DNA, 25 bp, Artificial
  probe
  misc_feature (1)..(25): SEQ ID NO: 65; WAN024A7H_at; Start 54; Stop 78
aatttcctgtgaacaaggaaaggca

SEQ ID NO: 45230 - DNA, 25 bp, Artificial
  probe
  misc_feature (1)..(25): SEQ ID NO: 65; WAN024A7H_at; Start 23; Stop 47
ctaagcctgctttactattgattct

SEQ ID NO: 45231 - DNA, 25 bp, Artificial
  probe
  misc_feature (1)..(25): SEQ ID NO: 65; WAN024A7H_at; Start 20; Stop 44
catctaagcctgctttactattgat

SEQ ID NO: 45232 - DNA, 25 bp, Artificial
  probe
  misc_feature (1)..(25): SEQ ID NO: 65; WAN024A7H_at; Start 10; Stop 34
aaaagcagaccatctaagcctgctt

SEQ ID NO: 45233 - DNA, 25 bp, Artificial
  probe
  misc_feature (1)..(25): SEQ ID NO: 65; WAN024A7H_at; Start 47; Stop 71
ttatataaatttcctgtgaacaagg

SEQ ID NO: 45234 - DNA, 25 bp, Artificial
  probe
  misc_feature (1)..(25): SEQ ID NO: 65; WAN024A7H_at; Start 28; Stop 52
cctgctttactattgattcttatat

SEQ ID NO: 45235 - DNA, 25 bp, Artificial
  probe
  misc_feature (1)..(25): SEQ ID NO: 65; WAN024A7H_at; Start 15; Stop 39
cagaccatctaagcctgctttacta

SEQ ID NO: 45236 - DNA, 25 bp, Artificial
  probe
  misc_feature (1)..(25): SEQ ID NO: 65; WAN024A7H_at; Start 8; Stop 32
aaaaaagcagaccatctaagcctgc

SEQ ID NO: 45237 - DNA, 25 bp, Artificial
  probe
  misc_feature (1)..(25): SEQ ID NO: 65; WAN024A7H_at; Start 48; Stop 72
tatataaatttcctgtgaacaagga

SEQ ID NO: 45238 - DNA, 25 bp, Artificial
  probe
  misc_feature (1)..(25): SEQ ID NO: 65; WAN024A7H_at; Start 27; Stop 51
gcctgctttactattgattcttata

SEQ ID NO: 45239 - DNA, 25 bp, Artificial
  probe
  misc_feature (1)..(25): SEQ ID NO: 65; WAN024A7H_at; Start 57; Stop 81
ttcctgtgaacaaggaaaggcattt

SEQ ID NO: 45240 - DNA, 25 bp, Artificial
  probe
  misc_feature (1)..(25): SEQ ID NO: 65; WAN024A7H_at; Start 17; Stop 41
gaccatctaagcctgctttactatt

SEQ ID NO: 45241 - DNA, 25 bp, Artificial
  probe
  misc_feature (1)..(25): SEQ ID NO: 65; WAN024A7H_at; Start 42; Stop 66
gattcttatataaatttcctgtgaa

SEQ ID NO: 45242 - DNA, 25 bp, Artificial
  probe
  misc_feature (1)..(25): SEQ ID NO: 65; WAN024A7H_at; Start 61; Stop 85
tgtgaacaaggaaaggcatttctga

SEQ ID NO: 45243 - DNA, 25 bp, Artificial
  probe
  misc_feature (1)..(25): SEQ ID NO: 65; WAN024A7H_at; Start 12; Stop 36
aagcagaccatctaagcctgcttta

SEQ ID NO: 45244 - DNA, 25 bp, Artificial
  probe
  misc_feature (1)..(25): SEQ ID NO: 65; WAN024A7H_at; Start 60; Stop 84
ctgtgaacaaggaaaggcatttctg

SEQ ID NO: 45245 - DNA, 25 bp, Artificial
  probe
  misc_feature (1)..(25): SEQ ID NO: 65; WAN024A7H_at; Start 7; Stop 31
taaaaaagcagaccatctaagcctg

SEQ ID NO: 45246 - DNA, 25 bp, Artificial
  probe
  misc_feature (1)..(25): SEQ ID NO: 65; WAN024A7H_at; Start 4; Stop 28
aactaaaaaagcagaccatctaagc

SEQ ID NO: 45247 - DNA, 25 bp, Artificial
  probe
  misc_feature (1)..(25): SEQ ID NO: 65; WAN024A7H_at; Start 58; Stop 82
tcctgtgaacaaggaaaggcatttc

SEQ ID NO: 45248 - DNA, 25 bp, Artificial
  probe
  misc_feature (1)..(25): SEQ ID NO: 65; WAN024A7H_at; Start 50; Stop 74
tataaatttcctgtgaacaaggaaa

SEQ ID NO: 45249 - DNA, 25 bp, Artificial
  probe
  misc_feature (1)..(25): SEQ ID NO: 65; WAN024A7H_at; Start 19; Stop 43
ccatctaagcctgctttactattga

SEQ ID NO: 45250 - DNA, 25 bp, Artificial
  probe
  misc_feature (1)..(25): SEQ ID NO: 65; WAN024A7H_at; Start 3; Stop 27
aaactaaaaaagcagaccatctaag

SEQ ID NO: 45251 - DNA, 25 bp, Artificial
  probe
  misc_feature (1)..(25): SEQ ID NO: 65; WAN024A7H_at; Start 6; Stop 30
ctaaaaaagcagaccatctaagcct

SEQ ID NO: 45252 - DNA, 25 bp, Artificial
  probe
  misc_feature (1)..(25): SEQ ID NO: 65; WAN024A7H_at; Start 65; Stop 89
aacaaggaaaggcatttctgataac

SEQ ID NO: 45253 - DNA, 25 bp, Artificial
  probe
  misc_feature (1)..(25): SEQ ID NO: 65; WAN024A7H_at; Start 22; Stop 46
tctaagcctgctttactattgattc

SEQ ID NO: 45254 - DNA, 25 bp, Artificial
  probe
  misc_feature (1)..(25): SEQ ID NO: 65; WAN024A7H_at; Start 63; Stop 87
tgaacaaggaaaggcatttctgata

SEQ ID NO: 45255 - DNA, 25 bp, Artificial
  probe
  misc_feature (1)..(25): SEQ ID NO: 65; WAN024A7H_at; Start 25; Stop 49
aagcctgctttactattgattctta

SEQ ID NO: 45256 - DNA, 25 bp, Artificial
  probe
  misc_feature (1)..(25): SEQ ID NO: 65; WAN024A7H_at; Start 14; Stop 38
gcagaccatctaagcctgctttact

SEQ ID NO: 45257 - DNA, 25 bp, Artificial
  probe
  misc_feature (1)..(25): SEQ ID NO: 65; WAN024A7H_at; Start 5; Stop 29
actaaaaaagcagaccatctaagcc

SEQ ID NO: 45258 - DNA, 25 bp, Artificial
  probe
  misc_feature (1)..(25): SEQ ID NO: 65; WAN024A7H_at; Start 13; Stop 37
agcagaccatctaagcctgctttac

SEQ ID NO: 45259 - DNA, 25 bp, Artificial
  probe
  misc_feature (1)..(25): SEQ ID NO: 65; WAN024A7H_at; Start 62; Stop 86
gtgaacaaggaaaggcatttctgat

SEQ ID NO: 45260 - DNA, 25 bp, Artificial
  probe
  misc_feature (1)..(25): SEQ ID NO: 7184; WAN024A7I_at; Start 12; Stop 36
tagtttaggaacatgaatctaaaaa

SEQ ID NO: 45261 - DNA, 25 bp, Artificial
  probe
  misc_feature (1)..(25): SEQ ID NO: 7184; WAN024A7I_at; Start 182; Stop 206
tacggaaacaatattgccagaataa

SEQ ID NO: 45262 - DNA, 25 bp, Artificial
  probe
  misc_feature (1)..(25): SEQ ID NO: 7184; WAN024A7I_at; Start 290; Stop 314
tgtaggactaggtattgtttcaata

SEQ ID NO: 45263 - DNA, 25 bp, Artificial
  probe
  misc_feature (1)..(25): SEQ ID NO: 7184; WAN024A7I_at; Start 176; Stop 200
gaaaaatacggaaacaatattgcca

SEQ ID NO: 45264 - DNA, 25 bp, Artificial
  probe
  misc_feature (1)..(25): SEQ ID NO: 7184; WAN024A7I_at; Start 240; Stop 264
tataaaaggagaagataaacggcta

SEQ ID NO: 45265 - DNA, 25 bp, Artificial
  probe
  misc_feature (1)..(25): SEQ ID NO: 7184; WAN024A7I_at; Start 286; Stop 310
tagttgtaggactaggtattgtttc

SEQ ID NO: 45266 - DNA, 25 bp, Artificial
  probe
  misc_feature (1)..(25): SEQ ID NO: 7184; WAN024A7I_at; Start 228; Stop 252
cattcattgttttataaaaggagaa

SEQ ID NO: 45267 - DNA, 25 bp, Artificial
  probe
  misc_feature (1)..(25): SEQ ID NO: 7184; WAN024A7I_at; Start 10; Stop 34
cctagtttaggaacatgaatctaaa

SEQ ID NO: 45268 - DNA, 25 bp, Artificial
  probe
  misc_feature (1)..(25): SEQ ID NO: 7184; WAN024A7I_at; Start 151; Stop 175
atagtttattttacgagctaggaag

SEQ ID NO: 45269 - DNA, 25 bp, Artificial
  probe
  misc_feature (1)..(25): SEQ ID NO: 7184; WAN024A7I_at; Start 130; Stop 154
gaagtataataaaaataggatatag

SEQ ID NO: 45270 - DNA, 25 bp, Artificial
  probe
  misc_feature (1)..(25): SEQ ID NO: 7184; WAN024A7I_at; Start 185; Stop 209
ggaaacaatattgccagaataaact

SEQ ID NO: 45271 - DNA, 25 bp, Artificial
  probe
  misc_feature (1)..(25): SEQ ID NO: 7184; WAN024A7I_at; Start 306; Stop 330
gtttcaatattcttatcagccttac

SEQ ID NO: 45272 - DNA, 25 bp, Artificial
  probe
  misc_feature (1)..(25): SEQ ID NO: 7184; WAN024A7I_at; Start 114; Stop 138
tagaaagtaactatatgaagtataa

SEQ ID NO: 45273 - DNA, 25 bp, Artificial
  probe
  misc_feature (1)..(25): SEQ ID NO: 7184; WAN024A7I_at; Start 280; Stop 304
aagcgttagttgtaggactaggtat

SEQ ID NO: 45274 - DNA, 25 bp, Artificial
  probe
  misc_feature (1)..(25): SEQ ID NO: 7184; WAN024A7I_at; Start 109; Stop 133
tgaattagaaagtaactatatgaag

SEQ ID NO: 45275 - DNA, 25 bp, Artificial
  probe
  misc_feature (1)..(25): SEQ ID NO: 7184; WAN024A7I_at; Start 7; Stop 31
cctcctagtttaggaacatgaatct

SEQ ID NO: 45276 - DNA, 25 bp, Artificial
  probe
  misc_feature (1)..(25): SEQ ID NO: 7184; WAN024A7I_at; Start 213; Stop 237
tttagatgcacatttcattcattgt

SEQ ID NO: 45277 - DNA, 25 bp, Artificial
  probe
  misc_feature (1)..(25): SEQ ID NO: 7184; WAN024A7I_at; Start 283; Stop 307
cgttagttgtaggactaggtattgt

SEQ ID NO: 45278 - DNA, 25 bp, Artificial
  probe
  misc_feature (1)..(25): SEQ ID NO: 7184; WAN024A7I_at; Start 179; Stop 203
aaatacggaaacaatattgccagaa

SEQ ID NO: 45279 - DNA, 25 bp, Artificial
  probe
  misc_feature (1)..(25): SEQ ID NO: 7184; WAN024A7I_at; Start 145; Stop 169
taggatatagtttattttacgagct

SEQ ID NO: 45280 - DNA, 25 bp, Artificial
  probe
  misc_feature (1)..(25): SEQ ID NO: 7184; WAN024A7I_at; Start 2; Stop 26
aaagtcctcctagtttaggaacatg

SEQ ID NO: 45281 - DNA, 25 bp, Artificial
  probe
  misc_feature (1)..(25): SEQ ID NO: 7184; WAN024A7I_at; Start 199; Stop 223
cagaataaactatatttagatgcac

SEQ ID NO: 45282 - DNA, 25 bp, Artificial
  probe
  misc_feature (1)..(25): SEQ ID NO: 7184; WAN024A7I_at; Start 96; Stop 120
tcacaagttaatatgaattagaaag

SEQ ID NO: 45283 - DNA, 25 bp, Artificial
  probe
  misc_feature (1)..(25): SEQ ID NO: 7184; WAN024A7I_at; Start 204; Stop 228
taaactatatttagatgcacatttc

SEQ ID NO: 45284 - DNA, 25 bp, Artificial
  probe
  misc_feature (1)..(25): SEQ ID NO: 7184; WAN024A7I_at; Start 308; Stop 332
ttcaatattcttatcagccttacct

SEQ ID NO: 45285 - DNA, 25 bp, Artificial
  probe
  misc_feature (1)..(25): SEQ ID NO: 7184; WAN024A7I_at; Start 302; Stop 326
tattgtttcaatattcttatcagcc

SEQ ID NO: 45286 - DNA, 25 bp, Artificial
  probe
  misc_feature (1)..(25): SEQ ID NO: 7184; WAN024A7I_at; Start 177; Stop 201
aaaaatacggaaacaatattgccag

SEQ ID NO: 45287 - DNA, 25 bp, Artificial
  probe
  misc_feature (1)..(25): SEQ ID NO: 7184; WAN024A7I_at; Start 217; Stop 241
gatgcacatttcattcattgtttta

SEQ ID NO: 45288 - DNA, 25 bp, Artificial
  probe
  misc_feature (1)..(25): SEQ ID NO: 7184; WAN024A7I_at; Start 4; Stop 28
agtcctcctagtttaggaacatgaa

SEQ ID NO: 45289 - DNA, 25 bp, Artificial
  probe
  misc_feature (1)..(25): SEQ ID NO: 7184; WAN024A7I_at; Start 193; Stop 217
tattgccagaataaactatatttag

SEQ ID NO: 45290 - DNA, 25 bp, Artificial
  probe
  misc_feature (1)..(25): SEQ ID NO: 7184; WAN024A7I_at; Start 209; Stop 233
tatatttagatgcacatttcattca

SEQ ID NO: 45291 - DNA, 25 bp, Artificial
  probe
  misc_feature (1)..(25): SEQ ID NO: 7184; WAN024A7I_at; Start 148; Stop 172
gatatagtttattttacgagctagg

SEQ ID NO: 45292 - DNA, 25 bp, Artificial
  probe
  misc_feature (1)..(25): SEQ ID NO: 7184; WAN024A7I_at; Start 67; Stop 91
caaaataacttacttgtgctatact

SEQ ID NO: 45293 - DNA, 25 bp, Artificial
  probe
  misc_feature (1)..(25): SEQ ID NO: 7184; WAN024A7I_at; Start 61; Stop 85
ggcttacaaaataacttacttgtgc

SEQ ID NO: 45294 - DNA, 25 bp, Artificial
  probe
  misc_feature (1)..(25): SEQ ID NO: 6290; WAN024A7J_at; Start 97; Stop 121
caatgaatgaaatgtgcatctaaat

SEQ ID NO: 45295 - DNA, 25 bp, Artificial
  probe
  misc_feature (1)..(25): SEQ ID NO: 6290; WAN024A7J_at; Start 133; Stop 157
tggcaatattgtttccgtatttttc

SEQ ID NO: 45296 - DNA, 25 bp, Artificial
  probe
  misc_feature (1)..(25): SEQ ID NO: 6290; WAN024A7J_at; Start 161; Stop 185
cctagctcgtaaaataaactatatc

SEQ ID NO: 45297 - DNA, 25 bp, Artificial
  probe
  misc_feature (1)..(25): SEQ ID NO: 6290; WAN024A7J_at; Start 1; Stop 25
aggtaaggctgataagaatattgaa

SEQ ID NO: 45298 - DNA, 25 bp, Artificial
  probe
  misc_feature (1)..(25): SEQ ID NO: 6290; WAN024A7J_at; Start 23; Stop 47
gaaacaatacctagtcctacaacta

SEQ ID NO: 45299 - DNA, 25 bp, Artificial
  probe
  misc_feature (1)..(25): SEQ ID NO: 6290; WAN024A7J_at; Start 22; Stop 46
tgaaacaatacctagtcctacaact

SEQ ID NO: 45300 - DNA, 25 bp, Artificial
  probe
  misc_feature (1)..(25): SEQ ID NO: 6290; WAN024A7J_at; Start 303; Stop 327
gattcatgttcctaaactaggagga

SEQ ID NO: 45301 - DNA, 25 bp, Artificial
  probe
  misc_feature (1)..(25): SEQ ID NO: 6290; WAN024A7J_at; Start 162; Stop 186
ctagctcgtaaaataaactatatcc

SEQ ID NO: 45302 - DNA, 25 bp, Artificial
  probe
  misc_feature (1)..(25): SEQ ID NO: 6290; WAN024A7J_at; Start 92; Stop 116
taaaacaatgaatgaaatgtgcatc

SEQ ID NO: 45303 - DNA, 25 bp, Artificial
  probe
  misc_feature (1)..(25): SEQ ID NO: 6290; WAN024A7J_at; Start 26; Stop 50
acaatacctagtcctacaactaacg

SEQ ID NO: 45304 - DNA, 25 bp, Artificial
  probe
  misc_feature (1)..(25): SEQ ID NO: 6290; WAN024A7J_at; Start 307; Stop 331
catgttcctaaactaggaggacttt

SEQ ID NO: 45305 - DNA, 25 bp, Artificial
  probe
  misc_feature (1)..(25): SEQ ID NO: 6290; WAN024A7J_at; Start 113; Stop 137
catctaaatatagtttattctggca

SEQ ID NO: 45306 - DNA, 25 bp, Artificial
  probe
  misc_feature (1)..(25): SEQ ID NO: 6290; WAN024A7J_at; Start 105; Stop 129
gaaatgtgcatctaaatatagttta

SEQ ID NO: 45307 - DNA, 25 bp, Artificial
  probe
  misc_feature (1)..(25): SEQ ID NO: 6290; WAN024A7J_at; Start 69; Stop 93
tagccgtttatcttctccttttata

SEQ ID NO: 45308 - DNA, 25 bp, Artificial
  probe
  misc_feature (1)..(25): SEQ ID NO: 6290; WAN024A7J_at; Start 196; Stop 220
tatacttcatatagttactttctaa

SEQ ID NO: 45309 - DNA, 25 bp, Artificial
  probe
  misc_feature (1)..(25): SEQ ID NO: 6290; WAN024A7J_at; Start 306; Stop 330
tcatgttcctaaactaggaggactt

SEQ ID NO: 45310 - DNA, 25 bp, Artificial
  probe
  misc_feature (1)..(25): SEQ ID NO: 6290; WAN024A7J_at; Start 94; Stop 118
aaacaatgaatgaaatgtgcatcta

SEQ ID NO: 45311 - DNA, 25 bp, Artificial
  probe
  misc_feature (1)..(25): SEQ ID NO: 6290; WAN024A7J_at; Start 213; Stop 237
ctttctaattcatattaacttgtga

SEQ ID NO: 45312 - DNA, 25 bp, Artificial
  probe
  misc_feature (1)..(25): SEQ ID NO: 6290; WAN024A7J_at; Start 158; Stop 182
cttcctagctcgtaaaataaactat

SEQ ID NO: 45313 - DNA, 25 bp, Artificial
  probe
  misc_feature (1)..(25): SEQ ID NO: 6290; WAN024A7J_at; Start 248; Stop 272
gcacaagtaagttattttgtaagcc

SEQ ID NO: 45314 - DNA, 25 bp, Artificial
  probe
  misc_feature (1)..(25): SEQ ID NO: 6290; WAN024A7J_at; Start 301; Stop 325
tagattcatgttcctaaactaggag

SEQ ID NO: 45315 - DNA, 25 bp, Artificial
  probe
  misc_feature (1)..(25): SEQ ID NO: 6290; WAN024A7J_at; Start 29; Stop 53
atacctagtcctacaactaacgctt

SEQ ID NO: 45316 - DNA, 25 bp, Artificial
  probe
  misc_feature (1)..(25): SEQ ID NO: 6290; WAN024A7J_at; Start 165; Stop 189
gctcgtaaaataaactatatcctat

SEQ ID NO: 45317 - DNA, 25 bp, Artificial
  probe
  misc_feature (1)..(25): SEQ ID NO: 6290; WAN024A7J_at; Start 3; Stop 27
gtaaggctgataagaatattgaaac

SEQ ID NO: 45318 - DNA, 25 bp, Artificial
  probe
  misc_feature (1)..(25): SEQ ID NO: 6290; WAN024A7J_at; Start 101; Stop 125
gaatgaaatgtgcatctaaatatag

SEQ ID NO: 45319 - DNA, 25 bp, Artificial
  probe
  misc_feature (1)..(25): SEQ ID NO: 6290; WAN024A7J_at; Start 242; Stop 266
agtatagcacaagtaagttattttg

SEQ ID NO: 45320 - DNA, 25 bp, Artificial
  probe
  misc_feature (1)..(25): SEQ ID NO: 6290; WAN024A7J_at; Start 28; Stop 52
aatacctagtcctacaactaacgct

SEQ ID NO: 45321 - DNA, 25 bp, Artificial
  probe
  misc_feature (1)..(25): SEQ ID NO: 6290; WAN024A7J_at; Start 16; Stop 40
gaatattgaaacaatacctagtcct

SEQ ID NO: 45322 - DNA, 25 bp, Artificial
  probe
  misc_feature (1)..(25): SEQ ID NO: 6290; WAN024A7J_at; Start 128; Stop 152
tattctggcaatattgtttccgtat

SEQ ID NO: 45323 - DNA, 25 bp, Artificial
  probe
  misc_feature (1)..(25): SEQ ID NO: 6290; WAN024A7J_at; Start 125; Stop 149
gtttattctggcaatattgtttccg

SEQ ID NO: 45324 - DNA, 25 bp, Artificial
  probe
  misc_feature (1)..(25): SEQ ID NO: 6290; WAN024A7J_at; Start 19; Stop 43
tattgaaacaatacctagtcctaca

SEQ ID NO: 45325 - DNA, 25 bp, Artificial
  probe
  misc_feature (1)..(25): SEQ ID NO: 6290; WAN024A7J_at; Start 116; Stop 140
ctaaatatagtttattctggcaata

SEQ ID NO: 45326 - DNA, 25 bp, Artificial
  probe
  misc_feature (1)..(25): SEQ ID NO: 6290; WAN024A7J_at; Start 305; Stop 329
ttcatgttcctaaactaggaggact

SEQ ID NO: 45327 - DNA, 25 bp, Artificial
  probe
  misc_feature (1)..(25): SEQ ID NO: 6290; WAN024A7J_at; Start 79; Stop 103
tcttctccttttataaaacaatgaa

SEQ ID NO: 45328 - DNA, 25 bp, Artificial
  probe
  misc_feature (1)..(25): SEQ ID NO: 3810; WAN024A7K_at; Start 54; Stop 78
tgaactagaaaatcagctgatttct

SEQ ID NO: 45329 - DNA, 25 bp, Artificial
  probe
  misc_feature (1)..(25): SEQ ID NO: 3810; WAN024A7K_at; Start 64; Stop 88
aatcagctgatttctaattcacctg

SEQ ID NO: 45330 - DNA, 25 bp, Artificial
  probe
  misc_feature (1)..(25): SEQ ID NO: 3810; WAN024A7K_at; Start 67; Stop 91
cagctgatttctaattcacctgtga

SEQ ID NO: 45331 - DNA, 25 bp, Artificial
  probe
  misc_feature (1)..(25): SEQ ID NO: 3810; WAN024A7K_at; Start 48; Stop 72
cacaaatgaactagaaaatcagctg

SEQ ID NO: 45332 - DNA, 25 bp, Artificial
  probe
  misc_feature (1)..(25): SEQ ID NO: 3810; WAN024A7K_at; Start 90; Stop 114
gatcatgcctaatattacttagtaa

SEQ ID NO: 45333 - DNA, 25 bp, Artificial
  probe
  misc_feature (1)..(25): SEQ ID NO: 3810; WAN024A7K_at; Start 66; Stop 90
tcagctgatttctaattcacctgtg

SEQ ID NO: 45334 - DNA, 25 bp, Artificial
  probe
  misc_feature (1)..(25): SEQ ID NO: 3810; WAN024A7K_at; Start 115; Stop 139
cactcaccttgtattaacttgtgat

SEQ ID NO: 45335 - DNA, 25 bp, Artificial
  probe
  misc_feature (1)..(25): SEQ ID NO: 3810; WAN024A7K_at; Start 41; Stop 65
aaatgaccacaaatgaactagaaaa

SEQ ID NO: 45336 - DNA, 25 bp, Artificial
  probe
  misc_feature (1)..(25): SEQ ID NO: 3810; WAN024A7K_at; Start 84; Stop 108
acctgtgatcatgcctaatattact

SEQ ID NO: 45337 - DNA, 25 bp, Artificial
  probe
  misc_feature (1)..(25): SEQ ID NO: 3810; WAN024A7K_at; Start 79; Stop 103
aattcacctgtgatcatgcctaata

SEQ ID NO: 45338 - DNA, 25 bp, Artificial
  probe
  misc_feature (1)..(25): SEQ ID NO: 3810; WAN024A7K_at; Start 76; Stop 100
tctaattcacctgtgatcatgccta

SEQ ID NO: 45339 - DNA, 25 bp, Artificial
  probe
  misc_feature (1)..(25): SEQ ID NO: 3810; WAN024A7K_at; Start 113; Stop 137
aacactcaccttgtattaacttgtg

SEQ ID NO: 45340 - DNA, 25 bp, Artificial
  probe
  misc_feature (1)..(25): SEQ ID NO: 3810; WAN024A7K_at; Start 62; Stop 86
aaaatcagctgatttctaattcacc

SEQ ID NO: 45341 - DNA, 25 bp, Artificial
  probe
  misc_feature (1)..(25): SEQ ID NO: 3810; WAN024A7K_at; Start 72; Stop 96
gatttctaattcacctgtgatcatg

SEQ ID NO: 45342 - DNA, 25 bp, Artificial
  probe
  misc_feature (1)..(25): SEQ ID NO: 3810; WAN024A7K_at; Start 82; Stop 106
tcacctgtgatcatgcctaatatta

SEQ ID NO: 45343 - DNA, 25 bp, Artificial
  probe
  misc_feature (1)..(25): SEQ ID NO: 3810; WAN024A7K_at; Start 105; Stop 129
tacttagtaacactcaccttgtatt

SEQ ID NO: 45344 - DNA, 25 bp, Artificial
  probe
  misc_feature (1)..(25): SEQ ID NO: 3810; WAN024A7K_at; Start 45; Stop 69
gaccacaaatgaactagaaaatcag

SEQ ID NO: 45345 - DNA, 25 bp, Artificial
  probe
  misc_feature (1)..(25): SEQ ID NO: 3810; WAN024A7K_at; Start 39; Stop 63
aaaaatgaccacaaatgaactagaa

SEQ ID NO: 45346 - DNA, 25 bp, Artificial
  probe
  misc_feature (1)..(25): SEQ ID NO: 3810; WAN024A7K_at; Start 88; Stop 112
gtgatcatgcctaatattacttagt

SEQ ID NO: 45347 - DNA, 25 bp, Artificial
  probe
  misc_feature (1)..(25): SEQ ID NO: 3810; WAN024A7K_at; Start 74; Stop 98
tttctaattcacctgtgatcatgcc

SEQ ID NO: 45348 - DNA, 25 bp, Artificial
  probe
  misc_feature (1)..(25): SEQ ID NO: 3810; WAN024A7K_at; Start 47; Stop 71
ccacaaatgaactagaaaatcagct

SEQ ID NO: 45349 - DNA, 25 bp, Artificial
  probe
  misc_feature (1)..(25): SEQ ID NO: 3810; WAN024A7K_at; Start 50; Stop 74
caaatgaactagaaaatcagctgat

SEQ ID NO: 45350 - DNA, 25 bp, Artificial
  probe
  misc_feature (1)..(25): SEQ ID NO: 3810; WAN024A7K_at; Start 7; Stop 31
ctccttttatatcttaaaggtatat

SEQ ID NO: 45351 - DNA, 25 bp, Artificial
  probe
  misc_feature (1)..(25): SEQ ID NO: 3810; WAN024A7K_at; Start 96; Stop 120
gcctaatattacttagtaacactca

SEQ ID NO: 45352 - DNA, 25 bp, Artificial
  probe
  misc_feature (1)..(25): SEQ ID NO: 3810; WAN024A7K_at; Start 93; Stop 117
catgcctaatattacttagtaacac

SEQ ID NO: 45353 - DNA, 25 bp, Artificial
  probe
  misc_feature (1)..(25): SEQ ID NO: 3810; WAN024A7K_at; Start 102; Stop 126
tattacttagtaacactcaccttgt

SEQ ID NO: 45354 - DNA, 25 bp, Artificial
  probe
  misc_feature (1)..(25): SEQ ID NO: 3810; WAN024A7K_at; Start 37; Stop 61
caaaaaatgaccacaaatgaactag

SEQ ID NO: 45355 - DNA, 25 bp, Artificial
  probe
  misc_feature (1)..(25): SEQ ID NO: 3810; WAN024A7K_at; Start 69; Stop 93
gctgatttctaattcacctgtgatc

SEQ ID NO: 45356 - DNA, 25 bp, Artificial
  probe
  misc_feature (1)..(25): SEQ ID NO: 3810; WAN024A7K_at; Start 111; Stop 135
gtaacactcaccttgtattaacttg

SEQ ID NO: 45357 - DNA, 25 bp, Artificial
  probe
  misc_feature (1)..(25): SEQ ID NO: 3810; WAN024A7K_at; Start 86; Stop 110
ctgtgatcatgcctaatattactta

SEQ ID NO: 45358 - DNA, 25 bp, Artificial
  probe
  misc_feature (1)..(25): SEQ ID NO: 3810; WAN024A7K_at; Start 109; Stop 133
tagtaacactcaccttgtattaact

SEQ ID NO: 45359 - DNA, 25 bp, Artificial
  probe
  misc_feature (1)..(25): SEQ ID NO: 3810; WAN024A7K_at; Start 83; Stop 107
cacctgtgatcatgcctaatattac

SEQ ID NO: 45360 - DNA, 25 bp, Artificial
  probe
  misc_feature (1)..(25): SEQ ID NO: 3810; WAN024A7K_at; Start 34; Stop 58
gtacaaaaaatgaccacaaatgaac

SEQ ID NO: 45361 - DNA, 25 bp, Artificial
  probe
  misc_feature (1)..(25): SEQ ID NO: 3810; WAN024A7K_at; Start 78; Stop 102
taattcacctgtgatcatgcctaat

SEQ ID NO: 45362 - DNA, 25 bp, Artificial
  probe
  misc_feature (1)..(25): SEQ ID NO: 138; WAN024A7L_at; Start 134; Stop 158
gtaatattaggcatgatcacaggtg

SEQ ID NO: 45363 - DNA, 25 bp, Artificial
  probe
  misc_feature (1)..(25): SEQ ID NO: 138; WAN024A7L_at; Start 112; Stop 136
aatacaaggtgagtgttactaagta

SEQ ID NO: 45364 - DNA, 25 bp, Artificial
  probe
  misc_feature (1)..(25): SEQ ID NO: 138; WAN024A7L_at; Start 108; Stop 132
agttaatacaaggtgagtgttacta

SEQ ID NO: 45365 - DNA, 25 bp, Artificial
  probe
  misc_feature (1)..(25): SEQ ID NO: 138; WAN024A7L_at; Start 138; Stop 162
tattaggcatgatcacaggtgaatt

SEQ ID NO: 45366 - DNA, 25 bp, Artificial
  probe
  misc_feature (1)..(25): SEQ ID NO: 138; WAN024A7L_at; Start 171; Stop 195
gctgattttctagttcatttgtggt

SEQ ID NO: 45367 - DNA, 25 bp, Artificial
  probe
  misc_feature (1)..(25): SEQ ID NO: 138; WAN024A7L_at; Start 140; Stop 164
ttaggcatgatcacaggtgaattag

SEQ ID NO: 45368 - DNA, 25 bp, Artificial
  probe
  misc_feature (1)..(25): SEQ ID NO: 138; WAN024A7L_at; Start 136; Stop 160
aatattaggcatgatcacaggtgaa

SEQ ID NO: 45369 - DNA, 25 bp, Artificial
  probe
  misc_feature (1)..(25): SEQ ID NO: 138; WAN024A7L_at; Start 210; Stop 234
atatacctttaagatataaaaggag

SEQ ID NO: 45370 - DNA, 25 bp, Artificial
  probe
  misc_feature (1)..(25): SEQ ID NO: 138; WAN024A7L_at; Start 145; Stop 169
catgatcacaggtgaattagaaatc

SEQ ID NO: 45371 - DNA, 25 bp, Artificial
  probe
  misc_feature (1)..(25): SEQ ID NO: 138; WAN024A7L_at; Start 148; Stop 172
gatcacaggtgaattagaaatcagc

SEQ ID NO: 45372 - DNA, 25 bp, Artificial
  probe
  misc_feature (1)..(25): SEQ ID NO: 138; WAN024A7L_at; Start 143; Stop 167
ggcatgatcacaggtgaattagaaa

SEQ ID NO: 45373 - DNA, 25 bp, Artificial
  probe
  misc_feature (1)..(25): SEQ ID NO: 138; WAN024A7L_at; Start 122; Stop 146
gagtgttactaagtaatattaggca

SEQ ID NO: 45374 - DNA, 25 bp, Artificial
  probe
  misc_feature (1)..(25): SEQ ID NO: 138; WAN024A7L_at; Start 125; Stop 149
tgttactaagtaatattaggcatga

SEQ ID NO: 45375 - DNA, 25 bp, Artificial
  probe
  misc_feature (1)..(25): SEQ ID NO: 138; WAN024A7L_at; Start 164; Stop 188
gaaatcagctgattttctagttcat

SEQ ID NO: 45376 - DNA, 25 bp, Artificial
  probe
  misc_feature (1)..(25): SEQ ID NO: 138; WAN024A7L_at; Start 111; Stop 135
taatacaaggtgagtgttactaagt

SEQ ID NO: 45377 - DNA, 25 bp, Artificial
  probe
  misc_feature (1)..(25): SEQ ID NO: 138; WAN024A7L_at; Start 150; Stop 174
tcacaggtgaattagaaatcagctg

SEQ ID NO: 45378 - DNA, 25 bp, Artificial
  probe
  misc_feature (1)..(25): SEQ ID NO: 138; WAN024A7L_at; Start 114; Stop 138
tacaaggtgagtgttactaagtaat

SEQ ID NO: 45379 - DNA, 25 bp, Artificial
  probe
  misc_feature (1)..(25): SEQ ID NO: 138; WAN024A7L_at; Start 116; Stop 140
caaggtgagtgttactaagtaatat

SEQ ID NO: 45380 - DNA, 25 bp, Artificial
  probe
  misc_feature (1)..(25): SEQ ID NO: 138; WAN024A7L_at; Start 169; Stop 193
cagctgattttctagttcatttgtg

SEQ ID NO: 45381 - DNA, 25 bp, Artificial
  probe
  misc_feature (1)..(25): SEQ ID NO: 138; WAN024A7L_at; Start 183; Stop 207
gttcatttgtggtcattttttgtac

SEQ ID NO: 45382 - DNA, 25 bp, Artificial
  probe
  misc_feature (1)..(25): SEQ ID NO: 138; WAN024A7L_at; Start 174; Stop 198
gattttctagttcatttgtggtcat

SEQ ID NO: 45383 - DNA, 25 bp, Artificial
  probe
  misc_feature (1)..(25): SEQ ID NO: 138; WAN024A7L_at; Start 135; Stop 159
taatattaggcatgatcacaggtga

SEQ ID NO: 45384 - DNA, 25 bp, Artificial
  probe
  misc_feature (1)..(25): SEQ ID NO: 138; WAN024A7L_at; Start 155; Stop 179
ggtgaattagaaatcagctgatttt

SEQ ID NO: 45385 - DNA, 25 bp, Artificial
  probe
  misc_feature (1)..(25): SEQ ID NO: 138; WAN024A7L_at; Start 133; Stop 157
agtaatattaggcatgatcacaggt

SEQ ID NO: 45386 - DNA, 25 bp, Artificial
  probe
  misc_feature (1)..(25): SEQ ID NO: 138; WAN024A7L_at; Start 151; Stop 175
cacaggtgaattagaaatcagctga

SEQ ID NO: 45387 - DNA, 25 bp, Artificial
  probe
  misc_feature (1)..(25): SEQ ID NO: 138; WAN024A7L_at; Start 180; Stop 204
ctagttcatttgtggtcattttttg

SEQ ID NO: 45388 - DNA, 25 bp, Artificial
  probe
  misc_feature (1)..(25): SEQ ID NO: 138; WAN024A7L_at; Start 103; Stop 127
tcacaagttaatacaaggtgagtgt

SEQ ID NO: 45389 - DNA, 25 bp, Artificial
  probe
  misc_feature (1)..(25): SEQ ID NO: 138; WAN024A7L_at; Start 101; Stop 125
aatcacaagttaatacaaggtgagt

SEQ ID NO: 45390 - DNA, 25 bp, Artificial
  probe
  misc_feature (1)..(25): SEQ ID NO: 138; WAN024A7L_at; Start 131; Stop 155
taagtaatattaggcatgatcacag

SEQ ID NO: 45391 - DNA, 25 bp, Artificial
  probe
  misc_feature (1)..(25): SEQ ID NO: 138; WAN024A7L_at; Start 141; Stop 165
taggcatgatcacaggtgaattaga

SEQ ID NO: 45392 - DNA, 25 bp, Artificial
  probe
  misc_feature (1)..(25): SEQ ID NO: 138; WAN024A7L_at; Start 153; Stop 177
caggtgaattagaaatcagctgatt

SEQ ID NO: 45393 - DNA, 25 bp, Artificial
  probe
  misc_feature (1)..(25): SEQ ID NO: 138; WAN024A7L_at; Start 128; Stop 152
tactaagtaatattaggcatgatca

SEQ ID NO: 45394 - DNA, 25 bp, Artificial
  probe
  misc_feature (1)..(25): SEQ ID NO: 138; WAN024A7L_at; Start 106; Stop 130
caagttaatacaaggtgagtgttac

SEQ ID NO: 45395 - DNA, 25 bp, Artificial
  probe
  misc_feature (1)..(25): SEQ ID NO: 138; WAN024A7L_at; Start 104; Stop 128
cacaagttaatacaaggtgagtgtt

SEQ ID NO: 45396 - DNA, 25 bp, Artificial
  probe
  misc_feature (1)..(25): SEQ ID NO: 3744; WAN024A7M_at; Start 97; Stop 121
cctcatgtcacaattcggtgacttg

SEQ ID NO: 45397 - DNA, 25 bp, Artificial
  probe
  misc_feature (1)..(25): SEQ ID NO: 3744; WAN024A7M_at; Start 81; Stop 105
gatatcgtttttacctcctcatgtc

SEQ ID NO: 45398 - DNA, 25 bp, Artificial
  probe
  misc_feature (1)..(25): SEQ ID NO: 3744; WAN024A7M_at; Start 85; Stop 109
tcgtttttacctcctcatgtcacaa

SEQ ID NO: 45399 - DNA, 25 bp, Artificial
  probe
  misc_feature (1)..(25): SEQ ID NO: 3744; WAN024A7M_at; Start 159; Stop 183
tcctctcctctcacttttactttat

SEQ ID NO: 45400 - DNA, 25 bp, Artificial
  probe
  misc_feature (1)..(25): SEQ ID NO: 3744; WAN024A7M_at; Start 27; Stop 51
atcgttacggaaatcgctatggcga

SEQ ID NO: 45401 - DNA, 25 bp, Artificial
  probe
  misc_feature (1)..(25): SEQ ID NO: 3744; WAN024A7M_at; Start 143; Stop 167
aggatggctcactgactcctctcct

SEQ ID NO: 45402 - DNA, 25 bp, Artificial
  probe
  misc_feature (1)..(25): SEQ ID NO: 3744; WAN024A7M_at; Start 42; Stop 66
gctatggcgaatttcctattattaa

SEQ ID NO: 45403 - DNA, 25 bp, Artificial
  probe
  misc_feature (1)..(25): SEQ ID NO: 3744; WAN024A7M_at; Start 1; Stop 25
ggctagagactctgaaatagtctcc

SEQ ID NO: 45404 - DNA, 25 bp, Artificial
  probe
  misc_feature (1)..(25): SEQ ID NO: 3744; WAN024A7M_at; Start 49; Stop 73
cgaatttcctattattaattcgtcg

SEQ ID NO: 45405 - DNA, 25 bp, Artificial
  probe
  misc_feature (1)..(25): SEQ ID NO: 3744; WAN024A7M_at; Start 181; Stop 205
tatttaaatcaagaaataggtgaaa

SEQ ID NO: 45406 - DNA, 25 bp, Artificial
  probe
  misc_feature (1)..(25): SEQ ID NO: 3744; WAN024A7M_at; Start 92; Stop 116
tacctcctcatgtcacaattcggtg

SEQ ID NO: 45407 - DNA, 25 bp, Artificial
  probe
  misc_feature (1)..(25): SEQ ID NO: 3744; WAN024A7M_at; Start 135; Stop 159
gatggagaaggatggctcactgact

SEQ ID NO: 45408 - DNA, 25 bp, Artificial
  probe
  misc_feature (1)..(25): SEQ ID NO: 3744; WAN024A7M_at; Start 112; Stop 136
cggtgacttggtacaagaagtgaga

SEQ ID NO: 45409 - DNA, 25 bp, Artificial
  probe
  misc_feature (1)..(25): SEQ ID NO: 3744; WAN024A7M_at; Start 123; Stop 147
tacaagaagtgagatggagaaggat

SEQ ID NO: 45410 - DNA, 25 bp, Artificial
  probe
  misc_feature (1)..(25): SEQ ID NO: 3744; WAN024A7M_at; Start 110; Stop 134
ttcggtgacttggtacaagaagtga

SEQ ID NO: 45411 - DNA, 25 bp, Artificial
  probe
  misc_feature (1)..(25): SEQ ID NO: 3744; WAN024A7M_at; Start 32; Stop 56
tacggaaatcgctatggcgaatttc

SEQ ID NO: 45412 - DNA, 25 bp, Artificial
  probe
  misc_feature (1)..(25): SEQ ID NO: 3744; WAN024A7M_at; Start 138; Stop 162
ggagaaggatggctcactgactcct

SEQ ID NO: 45413 - DNA, 25 bp, Artificial
  probe
  misc_feature (1)..(25): SEQ ID NO: 3744; WAN024A7M_at; Start 105; Stop 129
cacaattcggtgacttggtacaaga

SEQ ID NO: 45414 - DNA, 25 bp, Artificial
  probe
  misc_feature (1)..(25): SEQ ID NO: 3744; WAN024A7M_at; Start 35; Stop 59
ggaaatcgctatggcgaatttccta

SEQ ID NO: 45415 - DNA, 25 bp, Artificial
  probe
  misc_feature (1)..(25): SEQ ID NO: 3744; WAN024A7M_at; Start 79; Stop 103
aagatatcgtttttacctcctcatg

SEQ ID NO: 45416 - DNA, 25 bp, Artificial
  probe
  misc_feature (1)..(25): SEQ ID NO: 3744; WAN024A7M_at; Start 116; Stop 140
gacttggtacaagaagtgagatgga

SEQ ID NO: 45417 - DNA, 25 bp, Artificial
  probe
  misc_feature (1)..(25): SEQ ID NO: 3744; WAN024A7M_at; Start 104; Stop 128
tcacaattcggtgacttggtacaag

SEQ ID NO: 45418 - DNA, 25 bp, Artificial
  probe
  misc_feature (1)..(25): SEQ ID NO: 3744; WAN024A7M_at; Start 38; Stop 62
aatcgctatggcgaatttcctatta

SEQ ID NO: 45419 - DNA, 25 bp, Artificial
  probe
  misc_feature (1)..(25): SEQ ID NO: 3744; WAN024A7M_at; Start 93; Stop 117
acctcctcatgtcacaattcggtga

SEQ ID NO: 45420 - DNA, 25 bp, Artificial
  probe
  misc_feature (1)..(25): SEQ ID NO: 3744; WAN024A7M_at; Start 28; Stop 52
tcgttacggaaatcgctatggcgaa

SEQ ID NO: 45421 - DNA, 25 bp, Artificial
  probe
  misc_feature (1)..(25): SEQ ID NO: 3744; WAN024A7M_at; Start 118; Stop 142
cttggtacaagaagtgagatggaga

SEQ ID NO: 45422 - DNA, 25 bp, Artificial
  probe
  misc_feature (1)..(25): SEQ ID NO: 3744; WAN024A7M_at; Start 90; Stop 114
tttacctcctcatgtcacaattcgg

SEQ ID NO: 45423 - DNA, 25 bp, Artificial
  probe
  misc_feature (1)..(25): SEQ ID NO: 3744; WAN024A7M_at; Start 29; Stop 53
cgttacggaaatcgctatggcgaat

SEQ ID NO: 45424 - DNA, 25 bp, Artificial
  probe
  misc_feature (1)..(25): SEQ ID NO: 3744; WAN024A7M_at; Start 141; Stop 165
gaaggatggctcactgactcctctc

SEQ ID NO: 45425 - DNA, 25 bp, Artificial
  probe
  misc_feature (1)..(25): SEQ ID NO: 3744; WAN024A7M_at; Start 139; Stop 163
gagaaggatggctcactgactcctc

SEQ ID NO: 45426 - DNA, 25 bp, Artificial
  probe
  misc_feature (1)..(25): SEQ ID NO: 3744; WAN024A7M_at; Start 178; Stop 202
ctttatttaaatcaagaaataggtg

SEQ ID NO: 45427 - DNA, 25 bp, Artificial
  probe
  misc_feature (1)..(25): SEQ ID NO: 3744; WAN024A7M_at; Start 107; Stop 131
caattcggtgacttggtacaagaag

SEQ ID NO: 45428 - DNA, 25 bp, Artificial
  probe
  misc_feature (1)..(25): SEQ ID NO: 3744; WAN024A7M_at; Start 83; Stop 107
tatcgtttttacctcctcatgtcac

SEQ ID NO: 45429 - DNA, 25 bp, Artificial
  probe
  misc_feature (1)..(25): SEQ ID NO: 3744; WAN024A7M_at; Start 100; Stop 124
catgtcacaattcggtgacttggta

SEQ ID NO: 45430 - DNA, 25 bp, Artificial
  probe
  misc_feature (1)..(25): SEQ ID NO: 5958; WAN024A7N_at; Start 80; Stop 104
tcttgtaccaagtcaccgaattgtg

SEQ ID NO: 45431 - DNA, 25 bp, Artificial
  probe
  misc_feature (1)..(25): SEQ ID NO: 5958; WAN024A7N_at; Start 144; Stop 168
taataataggaaattcgccatagcg

SEQ ID NO: 45432 - DNA, 25 bp, Artificial
  probe
  misc_feature (1)..(25): SEQ ID NO: 5958; WAN024A7N_at; Start 73; Stop 97
tctcacttcttgtaccaagtcaccg

SEQ ID NO: 45433 - DNA, 25 bp, Artificial
  probe
  misc_feature (1)..(25): SEQ ID NO: 5958; WAN024A7N_at; Start 83; Stop 107
tgtaccaagtcaccgaattgtgaca

SEQ ID NO: 45434 - DNA, 25 bp, Artificial
  probe
  misc_feature (1)..(25): SEQ ID NO: 5958; WAN024A7N_at; Start 51; Stop 75
gtcagtgagccatccttctccatct

SEQ ID NO: 45435 - DNA, 25 bp, Artificial
  probe
  misc_feature (1)..(25): SEQ ID NO: 5958; WAN024A7N_at; Start 107; Stop 131
atgaggaggtaaaaacgatatcttt

SEQ ID NO: 45436 - DNA, 25 bp, Artificial
  probe
  misc_feature (1)..(25): SEQ ID NO: 5958; WAN024A7N_at; Start 70; Stop 94
ccatctcacttcttgtaccaagtca

SEQ ID NO: 45437 - DNA, 25 bp, Artificial
  probe
  misc_feature (1)..(25): SEQ ID NO: 5958; WAN024A7N_at; Start 158; Stop 182
tcgccatagcgatttccgtaacgat

SEQ ID NO: 45438 - DNA, 25 bp, Artificial
  probe
  misc_feature (1)..(25): SEQ ID NO: 5958; WAN024A7N_at; Start 150; Stop 174
taggaaattcgccatagcgatttcc

SEQ ID NO: 45439 - DNA, 25 bp, Artificial
  probe
  misc_feature (1)..(25): SEQ ID NO: 5958; WAN024A7N_at; Start 106; Stop 130
catgaggaggtaaaaacgatatctt

SEQ ID NO: 45440 - DNA, 25 bp, Artificial
  probe
  misc_feature (1)..(25): SEQ ID NO: 5958; WAN024A7N_at; Start 98; Stop 122
aattgtgacatgaggaggtaaaaac

SEQ ID NO: 45441 - DNA, 25 bp, Artificial
  probe
  misc_feature (1)..(25): SEQ ID NO: 5958; WAN024A7N_at; Start 23; Stop 47
taaataaagtaaaagtgagaggaga

SEQ ID NO: 45442 - DNA, 25 bp, Artificial
  probe
  misc_feature (1)..(25): SEQ ID NO: 5958; WAN024A7N_at; Start 85; Stop 109
taccaagtcaccgaattgtgacatg

SEQ ID NO: 45443 - DNA, 25 bp, Artificial
  probe
  misc_feature (1)..(25): SEQ ID NO: 5958; WAN024A7N_at; Start 88; Stop 112
caagtcaccgaattgtgacatgagg

SEQ ID NO: 45444 - DNA, 25 bp, Artificial
  probe
  misc_feature (1)..(25): SEQ ID NO: 5958; WAN024A7N_at; Start 46; Stop 70
gaggagtcagtgagccatccttctc

SEQ ID NO: 45445 - DNA, 25 bp, Artificial
  probe
  misc_feature (1)..(25): SEQ ID NO: 5958; WAN024A7N_at; Start 104; Stop 128
gacatgaggaggtaaaaacgatatc

SEQ ID NO: 45446 - DNA, 25 bp, Artificial
  probe
  misc_feature (1)..(25): SEQ ID NO: 5958; WAN024A7N_at; Start 96; Stop 120
cgaattgtgacatgaggaggtaaaa

SEQ ID NO: 45447 - DNA, 25 bp, Artificial
  probe
  misc_feature (1)..(25): SEQ ID NO: 5958; WAN024A7N_at; Start 101; Stop 125
tgtgacatgaggaggtaaaaacgat

SEQ ID NO: 45448 - DNA, 25 bp, Artificial
  probe
  misc_feature (1)..(25): SEQ ID NO: 5958; WAN024A7N_at; Start 75; Stop 99
tcacttcttgtaccaagtcaccgaa

SEQ ID NO: 45449 - DNA, 25 bp, Artificial
  probe
  misc_feature (1)..(25): SEQ ID NO: 5958; WAN024A7N_at; Start 81; Stop 105
cttgtaccaagtcaccgaattgtga

SEQ ID NO: 45450 - DNA, 25 bp, Artificial
  probe
  misc_feature (1)..(25): SEQ ID NO: 5958; WAN024A7N_at; Start 157; Stop 181
ttcgccatagcgatttccgtaacga

SEQ ID NO: 45451 - DNA, 25 bp, Artificial
  probe
  misc_feature (1)..(25): SEQ ID NO: 5958; WAN024A7N_at; Start 49; Stop 73
gagtcagtgagccatccttctccat

SEQ ID NO: 45452 - DNA, 25 bp, Artificial
  probe
  misc_feature (1)..(25): SEQ ID NO: 5958; WAN024A7N_at; Start 147; Stop 171
taataggaaattcgccatagcgatt

SEQ ID NO: 45453 - DNA, 25 bp, Artificial
  probe
  misc_feature (1)..(25): SEQ ID NO: 5958; WAN024A7N_at; Start 145; Stop 169
aataataggaaattcgccatagcga

SEQ ID NO: 45454 - DNA, 25 bp, Artificial
  probe
  misc_feature (1)..(25): SEQ ID NO: 5958; WAN024A7N_at; Start 42; Stop 66
aggagaggagtcagtgagccatcct

SEQ ID NO: 45455 - DNA, 25 bp, Artificial
  probe
  misc_feature (1)..(25): SEQ ID NO: 5958; WAN024A7N_at; Start 136; Stop 160
cgacgaattaataataggaaattcg

SEQ ID NO: 45456 - DNA, 25 bp, Artificial
  probe
  misc_feature (1)..(25): SEQ ID NO: 5958; WAN024A7N_at; Start 67; Stop 91
tctccatctcacttcttgtaccaag

SEQ ID NO: 45457 - DNA, 25 bp, Artificial
  probe
  misc_feature (1)..(25): SEQ ID NO: 5958; WAN024A7N_at; Start 95; Stop 119
ccgaattgtgacatgaggaggtaaa

SEQ ID NO: 45458 - DNA, 25 bp, Artificial
  probe
  misc_feature (1)..(25): SEQ ID NO: 5958; WAN024A7N_at; Start 26; Stop 50
ataaagtaaaagtgagaggagagga

SEQ ID NO: 45459 - DNA, 25 bp, Artificial
  probe
  misc_feature (1)..(25): SEQ ID NO: 5958; WAN024A7N_at; Start 7; Stop 31
cacctatttcttgatttaaataaag

SEQ ID NO: 45460 - DNA, 25 bp, Artificial
  probe
  misc_feature (1)..(25): SEQ ID NO: 5958; WAN024A7N_at; Start 153; Stop 177
gaaattcgccatagcgatttccgta

SEQ ID NO: 45461 - DNA, 25 bp, Artificial
  probe
  misc_feature (1)..(25): SEQ ID NO: 5958; WAN024A7N_at; Start 43; Stop 67
ggagaggagtcagtgagccatcctt

SEQ ID NO: 45462 - DNA, 25 bp, Artificial
  probe
  misc_feature (1)..(25): SEQ ID NO: 5958; WAN024A7N_at; Start 184; Stop 208
ggagactatttcagagtctctagcc

SEQ ID NO: 45463 - DNA, 25 bp, Artificial
  probe
  misc_feature (1)..(25): SEQ ID NO: 5958; WAN024A7N_at; Start 93; Stop 117
caccgaattgtgacatgaggaggta

SEQ ID NO: 45464 - DNA, 25 bp, Artificial
  probe
  misc_feature (1)..(25): SEQ ID NO: 4752; WAN024A7O_at; Start 13; Stop 37
tctgtgtttagtattgcgaactcac

SEQ ID NO: 45465 - DNA, 25 bp, Artificial
  probe
  misc_feature (1)..(25): SEQ ID NO: 4752; WAN024A7O_at; Start 46; Stop 70
ctactttaccataattctataggag

SEQ ID NO: 45466 - DNA, 25 bp, Artificial
  probe
  misc_feature (1)..(25): SEQ ID NO: 4752; WAN024A7O_at; Start 120; Stop 144
tgttatgacatagtagatttgattt

SEQ ID NO: 45467 - DNA, 25 bp, Artificial
  probe
  misc_feature (1)..(25): SEQ ID NO: 4752; WAN024A7O_at; Start 18; Stop 42
gtttagtattgcgaactcacaatta

SEQ ID NO: 45468 - DNA, 25 bp, Artificial
  probe
  misc_feature (1)..(25): SEQ ID NO: 4752; WAN024A7O_at; Start 72; Stop 96
atcgcacaaaaagtcggaagcccga

SEQ ID NO: 45469 - DNA, 25 bp, Artificial
  probe
  misc_feature (1)..(25): SEQ ID NO: 4752; WAN024A7O_at; Start 70; Stop 94
gtatcgcacaaaaagtcggaagccc

SEQ ID NO: 45470 - DNA, 25 bp, Artificial
  probe
  misc_feature (1)..(25): SEQ ID NO: 4752; WAN024A7O_at; Start 139; Stop 163
tgattttatcagtgctgcttaggga

SEQ ID NO: 45471 - DNA, 25 bp, Artificial
  probe
  misc_feature (1)..(25): SEQ ID NO: 4752; WAN024A7O_at; Start 73; Stop 97
tcgcacaaaaagtcggaagcccgac

SEQ ID NO: 45472 - DNA, 25 bp, Artificial
  probe
  misc_feature (1)..(25): SEQ ID NO: 4752; WAN024A7O_at; Start 16; Stop 40
gtgtttagtattgcgaactcacaat

SEQ ID NO: 45473 - DNA, 25 bp, Artificial
  probe
  misc_feature (1)..(25): SEQ ID NO: 4752; WAN024A7O_at; Start 54; Stop 78
ccataattctataggagtatcgcac

SEQ ID NO: 45474 - DNA, 25 bp, Artificial
  probe
  misc_feature (1)..(25): SEQ ID NO: 4752; WAN024A7O_at; Start 27; Stop 51
tgcgaactcacaattatttctactt

SEQ ID NO: 45475 - DNA, 25 bp, Artificial
  probe
  misc_feature (1)..(25): SEQ ID NO: 4752; WAN024A7O_at; Start 60; Stop 84
ttctataggagtatcgcacaaaaag

SEQ ID NO: 45476 - DNA, 25 bp, Artificial
  probe
  misc_feature (1)..(25): SEQ ID NO: 4752; WAN024A7O_at; Start 145; Stop 169
tatcagtgctgcttagggaaaaata

SEQ ID NO: 45477 - DNA, 25 bp, Artificial
  probe
  misc_feature (1)..(25): SEQ ID NO: 4752; WAN024A7O_at; Start 52; Stop 76
taccataattctataggagtatcgc

SEQ ID NO: 45478 - DNA, 25 bp, Artificial
  probe
  misc_feature (1)..(25): SEQ ID NO: 4752; WAN024A7O_at; Start 74; Stop 98
cgcacaaaaagtcggaagcccgact

SEQ ID NO: 45479 - DNA, 25 bp, Artificial
  probe
  misc_feature (1)..(25): SEQ ID NO: 4752; WAN024A7O_at; Start 34; Stop 58
tcacaattatttctactttaccata

SEQ ID NO: 45480 - DNA, 25 bp, Artificial
  probe
  misc_feature (1)..(25): SEQ ID NO: 4752; WAN024A7O_at; Start 22; Stop 46
agtattgcgaactcacaattatttc

SEQ ID NO: 45481 - DNA, 25 bp, Artificial
  probe
  misc_feature (1)..(25): SEQ ID NO: 4752; WAN024A7O_at; Start 140; Stop 164
gattttatcagtgctgcttagggaa

SEQ ID NO: 45482 - DNA, 25 bp, Artificial
  probe
  misc_feature (1)..(25): SEQ ID NO: 4752; WAN024A7O_at; Start 62; Stop 86
ctataggagtatcgcacaaaaagtc

SEQ ID NO: 45483 - DNA, 25 bp, Artificial
  probe
  misc_feature (1)..(25): SEQ ID NO: 4752; WAN024A7O_at; Start 64; Stop 88
ataggagtatcgcacaaaaagtcgg

SEQ ID NO: 45484 - DNA, 25 bp, Artificial
  probe
  misc_feature (1)..(25): SEQ ID NO: 4752; WAN024A7O_at; Start 7; Stop 31
tctctttctgtgtttagtattgcga

SEQ ID NO: 45485 - DNA, 25 bp, Artificial
  probe
  misc_feature (1)..(25): SEQ ID NO: 4752; WAN024A7O_at; Start 55; Stop 79
cataattctataggagtatcgcaca

SEQ ID NO: 45486 - DNA, 25 bp, Artificial
  probe
  misc_feature (1)..(25): SEQ ID NO: 4752; WAN024A7O_at; Start 142; Stop 166
ttttatcagtgctgcttagggaaaa

SEQ ID NO: 45487 - DNA, 25 bp, Artificial
  probe
  misc_feature (1)..(25): SEQ ID NO: 4752; WAN024A7O_at; Start 61; Stop 85
tctataggagtatcgcacaaaaagt

SEQ ID NO: 45488 - DNA, 25 bp, Artificial
  probe
  misc_feature (1)..(25): SEQ ID NO: 4752; WAN024A7O_at; Start 67; Stop 91
ggagtatcgcacaaaaagtcggaag

SEQ ID NO: 45489 - DNA, 25 bp, Artificial
  probe
  misc_feature (1)..(25): SEQ ID NO: 4752; WAN024A7O_at; Start 111; Stop 135
cataaattatgttatgacatagtag

SEQ ID NO: 45490 - DNA, 25 bp, Artificial
  probe
  misc_feature (1)..(25): SEQ ID NO: 4752; WAN024A7O_at; Start 71; Stop 95
tatcgcacaaaaagtcggaagcccg

SEQ ID NO: 45491 - DNA, 25 bp, Artificial
  probe
  misc_feature (1)..(25): SEQ ID NO: 4752; WAN024A7O_at; Start 9; Stop 33
tctttctgtgtttagtattgcgaac

SEQ ID NO: 45492 - DNA, 25 bp, Artificial
  probe
  misc_feature (1)..(25): SEQ ID NO: 4752; WAN024A7O_at; Start 57; Stop 81
taattctataggagtatcgcacaaa

SEQ ID NO: 45493 - DNA, 25 bp, Artificial
  probe
  misc_feature (1)..(25): SEQ ID NO: 4752; WAN024A7O_at; Start 58; Stop 82
aattctataggagtatcgcacaaaa

SEQ ID NO: 45494 - DNA, 25 bp, Artificial
  probe
  misc_feature (1)..(25): SEQ ID NO: 4752; WAN024A7O_at; Start 125; Stop 149
tgacatagtagatttgattttatca

SEQ ID NO: 45495 - DNA, 25 bp, Artificial
  probe
  misc_feature (1)..(25): SEQ ID NO: 4752; WAN024A7O_at; Start 65; Stop 89
taggagtatcgcacaaaaagtcgga

SEQ ID NO: 45496 - DNA, 25 bp, Artificial
  probe
  misc_feature (1)..(25): SEQ ID NO: 4752; WAN024A7O_at; Start 69; Stop 93
agtatcgcacaaaaagtcggaagcc

SEQ ID NO: 45497 - DNA, 25 bp, Artificial
  probe
  misc_feature (1)..(25): SEQ ID NO: 4752; WAN024A7O_at; Start 68; Stop 92
gagtatcgcacaaaaagtcggaagc

SEQ ID NO: 45498 - DNA, 25 bp, Artificial
  probe
  misc_feature (1)..(25): SEQ ID NO: 5908; WAN024A7P_at; Start 25; Stop 49
tccctaagcagcactgataaaatca

SEQ ID NO: 45499 - DNA, 25 bp, Artificial
  probe
  misc_feature (1)..(25): SEQ ID NO: 5908; WAN024A7P_at; Start 142; Stop 166
gaaataattgtgagttcgcaatact

SEQ ID NO: 45500 - DNA, 25 bp, Artificial
  probe
  misc_feature (1)..(25): SEQ ID NO: 5908; WAN024A7P_at; Start 153; Stop 177
gagttcgcaatactaaacacagaaa

SEQ ID NO: 45501 - DNA, 25 bp, Artificial
  probe
  misc_feature (1)..(25): SEQ ID NO: 5908; WAN024A7P_at; Start 44; Stop 68
aaatcaaatctactatgtcataaca

SEQ ID NO: 45502 - DNA, 25 bp, Artificial
  probe
  misc_feature (1)..(25): SEQ ID NO: 5908; WAN024A7P_at; Start 94; Stop 118
gggcttccgactttttgtgcgatac

SEQ ID NO: 45503 - DNA, 25 bp, Artificial
  probe
  misc_feature (1)..(25): SEQ ID NO: 5908; WAN024A7P_at; Start 32; Stop 56
gcagcactgataaaatcaaatctac

SEQ ID NO: 45504 - DNA, 25 bp, Artificial
  probe
  misc_feature (1)..(25): SEQ ID NO: 5908; WAN024A7P_at; Start 114; Stop 138
gatactcctatagaattatggtaaa

SEQ ID NO: 45505 - DNA, 25 bp, Artificial
  probe
  misc_feature (1)..(25): SEQ ID NO: 5908; WAN024A7P_at; Start 146; Stop 170
taattgtgagttcgcaatactaaac

SEQ ID NO: 45506 - DNA, 25 bp, Artificial
  probe
  misc_feature (1)..(25): SEQ ID NO: 5908; WAN024A7P_at; Start 148; Stop 172
attgtgagttcgcaatactaaacac

SEQ ID NO: 45507 - DNA, 25 bp, Artificial
  probe
  misc_feature (1)..(25): SEQ ID NO: 5908; WAN024A7P_at; Start 112; Stop 136
gcgatactcctatagaattatggta

SEQ ID NO: 45508 - DNA, 25 bp, Artificial
  probe
  misc_feature (1)..(25): SEQ ID NO: 5908; WAN024A7P_at; Start 19; Stop 43
tatttttccctaagcagcactgata

SEQ ID NO: 45509 - DNA, 25 bp, Artificial
  probe
  misc_feature (1)..(25): SEQ ID NO: 5908; WAN024A7P_at; Start 163; Stop 187
tactaaacacagaaagagattttaa

SEQ ID NO: 45510 - DNA, 25 bp, Artificial
  probe
  misc_feature (1)..(25): SEQ ID NO: 5908; WAN024A7P_at; Start 110; Stop 134
gtgcgatactcctatagaattatgg

SEQ ID NO: 45511 - DNA, 25 bp, Artificial
  probe
  misc_feature (1)..(25): SEQ ID NO: 5908; WAN024A7P_at; Start 159; Stop 183
gcaatactaaacacagaaagagatt

SEQ ID NO: 45512 - DNA, 25 bp, Artificial
  probe
  misc_feature (1)..(25): SEQ ID NO: 5908; WAN024A7P_at; Start 151; Stop 175
gtgagttcgcaatactaaacacaga

SEQ ID NO: 45513 - DNA, 25 bp, Artificial
  probe
  misc_feature (1)..(25): SEQ ID NO: 5908; WAN024A7P_at; Start 107; Stop 131
tttgtgcgatactcctatagaatta

SEQ ID NO: 45514 - DNA, 25 bp, Artificial
  probe
  misc_feature (1)..(25): SEQ ID NO: 5908; WAN024A7P_at; Start 138; Stop 162
agtagaaataattgtgagttcgcaa

SEQ ID NO: 45515 - DNA, 25 bp, Artificial
  probe
  misc_feature (1)..(25): SEQ ID NO: 5908; WAN024A7P_at; Start 102; Stop 126
gactttttgtgcgatactcctatag

SEQ ID NO: 45516 - DNA, 25 bp, Artificial
  probe
  misc_feature (1)..(25): SEQ ID NO: 5908; WAN024A7P_at; Start 22; Stop 46
ttttccctaagcagcactgataaaa

SEQ ID NO: 45517 - DNA, 25 bp, Artificial
  probe
  misc_feature (1)..(25): SEQ ID NO: 5908; WAN024A7P_at; Start 53; Stop 77
ctactatgtcataacataatttatg

SEQ ID NO: 45518 - DNA, 25 bp, Artificial
  probe
  misc_feature (1)..(25): SEQ ID NO: 5908; WAN024A7P_at; Start 29; Stop 53
taagcagcactgataaaatcaaatc

SEQ ID NO: 45519 - DNA, 25 bp, Artificial
  probe
  misc_feature (1)..(25): SEQ ID NO: 5908; WAN024A7P_at; Start 96; Stop 120
gcttccgactttttgtgcgatactc

SEQ ID NO: 45520 - DNA, 25 bp, Artificial
  probe
  misc_feature (1)..(25): SEQ ID NO: 5908; WAN024A7P_at; Start 120; Stop 144
cctatagaattatggtaaagtagaa

SEQ ID NO: 45521 - DNA, 25 bp, Artificial
  probe
  misc_feature (1)..(25): SEQ ID NO: 5908; WAN024A7P_at; Start 99; Stop 123
tccgactttttgtgcgatactccta

SEQ ID NO: 45522 - DNA, 25 bp, Artificial
  probe
  misc_feature (1)..(25): SEQ ID NO: 5908; WAN024A7P_at; Start 27; Stop 51
cctaagcagcactgataaaatcaaa

SEQ ID NO: 45523 - DNA, 25 bp, Artificial
  probe
  misc_feature (1)..(25): SEQ ID NO: 5908; WAN024A7P_at; Start 136; Stop 160
aaagtagaaataattgtgagttcgc

SEQ ID NO: 45524 - DNA, 25 bp, Artificial
  probe
  misc_feature (1)..(25): SEQ ID NO: 5908; WAN024A7P_at; Start 157; Stop 181
tcgcaatactaaacacagaaagaga

SEQ ID NO: 45525 - DNA, 25 bp, Artificial
  probe
  misc_feature (1)..(25): SEQ ID NO: 5908; WAN024A7P_at; Start 155; Stop 179
gttcgcaatactaaacacagaaaga

SEQ ID NO: 45526 - DNA, 25 bp, Artificial
  probe
  misc_feature (1)..(25): SEQ ID NO: 5908; WAN024A7P_at; Start 91; Stop 115
gtcgggcttccgactttttgtgcga

SEQ ID NO: 45527 - DNA, 25 bp, Artificial
  probe
  misc_feature (1)..(25): SEQ ID NO: 5908; WAN024A7P_at; Start 118; Stop 142
ctcctatagaattatggtaaagtag

SEQ ID NO: 45528 - DNA, 25 bp, Artificial
  probe
  misc_feature (1)..(25): SEQ ID NO: 5908; WAN024A7P_at; Start 93; Stop 117
cgggcttccgactttttgtgcgata

SEQ ID NO: 45529 - DNA, 25 bp, Artificial
  probe
  misc_feature (1)..(25): SEQ ID NO: 5908; WAN024A7P_at; Start 38; Stop 62
ctgataaaatcaaatctactatgtc

SEQ ID NO: 45530 - DNA, 25 bp, Artificial
  probe
  misc_feature (1)..(25): SEQ ID NO: 5908; WAN024A7P_at; Start 104; Stop 128
ctttttgtgcgatactcctatagaa

SEQ ID NO: 45531 - DNA, 25 bp, Artificial
  probe
  misc_feature (1)..(25): SEQ ID NO: 5908; WAN024A7P_at; Start 100; Stop 124
ccgactttttgtgcgatactcctat

SEQ ID NO: 45532 - DNA, 25 bp, Artificial
  probe
  misc_feature (1)..(25): SEQ ID NO: 104; WAN024A7Q_at; Start 47; Stop 71
ctaaaagcagtttcttctggatgat

SEQ ID NO: 45533 - DNA, 25 bp, Artificial
  probe
  misc_feature (1)..(25): SEQ ID NO: 104; WAN024A7Q_at; Start 54; Stop 78
cagtttcttctggatgatgtactaa

SEQ ID NO: 45534 - DNA, 25 bp, Artificial
  probe
  misc_feature (1)..(25): SEQ ID NO: 104; WAN024A7Q_at; Start 10; Stop 34
cttatctaattacaaaagaaaggct

SEQ ID NO: 45535 - DNA, 25 bp, Artificial
  probe
  misc_feature (1)..(25): SEQ ID NO: 104; WAN024A7Q_at; Start 46; Stop 70
cctaaaagcagtttcttctggatga

SEQ ID NO: 45536 - DNA, 25 bp, Artificial
  probe
  misc_feature (1)..(25): SEQ ID NO: 104; WAN024A7Q_at; Start 42; Stop 66
tagccctaaaagcagtttcttctgg

SEQ ID NO: 45537 - DNA, 25 bp, Artificial
  probe
  misc_feature (1)..(25): SEQ ID NO: 104; WAN024A7Q_at; Start 12; Stop 36
tatctaattacaaaagaaaggcttc

SEQ ID NO: 45538 - DNA, 25 bp, Artificial
  probe
  misc_feature (1)..(25): SEQ ID NO: 104; WAN024A7Q_at; Start 33; Stop 57
cttctaagttagccctaaaagcagt

SEQ ID NO: 45539 - DNA, 25 bp, Artificial
  probe
  misc_feature (1)..(25): SEQ ID NO: 104; WAN024A7Q_at; Start 51; Stop 75
aagcagtttcttctggatgatgtac

SEQ ID NO: 45540 - DNA, 25 bp, Artificial
  probe
  misc_feature (1)..(25): SEQ ID NO: 104; WAN024A7Q_at; Start 53; Stop 77
gcagtttcttctggatgatgtacta

SEQ ID NO: 45541 - DNA, 25 bp, Artificial
  probe
  misc_feature (1)..(25): SEQ ID NO: 104; WAN024A7Q_at; Start 31; Stop 55
ggcttctaagttagccctaaaagca

SEQ ID NO: 45542 - DNA, 25 bp, Artificial
  probe
  misc_feature (1)..(25): SEQ ID NO: 104; WAN024A7Q_at; Start 14; Stop 38
tctaattacaaaagaaaggcttcta

SEQ ID NO: 45543 - DNA, 25 bp, Artificial
  probe
  misc_feature (1)..(25): SEQ ID NO: 104; WAN024A7Q_at; Start 41; Stop 65
ttagccctaaaagcagtttcttctg

SEQ ID NO: 45544 - DNA, 25 bp, Artificial
  probe
  misc_feature (1)..(25): SEQ ID NO: 104; WAN024A7Q_at; Start 43; Stop 67
agccctaaaagcagtttcttctgga

SEQ ID NO: 45545 - DNA, 25 bp, Artificial
  probe
  misc_feature (1)..(25): SEQ ID NO: 104; WAN024A7Q_at; Start 13; Stop 37
atctaattacaaaagaaaggcttct

SEQ ID NO: 45546 - DNA, 25 bp, Artificial
  probe
  misc_feature (1)..(25): SEQ ID NO: 104; WAN024A7Q_at; Start 49; Stop 73
aaaagcagtttcttctggatgatgt

SEQ ID NO: 45547 - DNA, 25 bp, Artificial
  probe
  misc_feature (1)..(25): SEQ ID NO: 104; WAN024A7Q_at; Start 32; Stop 56
gcttctaagttagccctaaaagcag

SEQ ID NO: 45548 - DNA, 25 bp, Artificial
  probe
  misc_feature (1)..(25): SEQ ID NO: 104; WAN024A7Q_at; Start 52; Stop 76
agcagtttcttctggatgatgtact

SEQ ID NO: 45549 - DNA, 25 bp, Artificial
  probe
  misc_feature (1)..(25): SEQ ID NO: 104; WAN024A7Q_at; Start 44; Stop 68
gccctaaaagcagtttcttctggat

SEQ ID NO: 45550 - DNA, 25 bp, Artificial
  probe
  misc_feature (1)..(25): SEQ ID NO: 104; WAN024A7Q_at; Start 45; Stop 69
ccctaaaagcagtttcttctggatg

SEQ ID NO: 45551 - DNA, 25 bp, Artificial
  probe
  misc_feature (1)..(25): SEQ ID NO: 104; WAN024A7Q_at; Start 55; Stop 79
agtttcttctggatgatgtactaag

SEQ ID NO: 45552 - DNA, 25 bp, Artificial
  probe
  misc_feature (1)..(25): SEQ ID NO: 104; WAN024A7Q_at; Start 56; Stop 80
gtttcttctggatgatgtactaaga

SEQ ID NO: 45553 - DNA, 25 bp, Artificial
  probe
  misc_feature (1)..(25): SEQ ID NO: 104; WAN024A7Q_at; Start 50; Stop 74
aaagcagtttcttctggatgatgta

SEQ ID NO: 45554 - DNA, 25 bp, Artificial
  probe
  misc_feature (1)..(25): SEQ ID NO: 104; WAN024A7Q_at; Start 48; Stop 72
taaaagcagtttcttctggatgatg

SEQ ID NO: 45555 - DNA, 25 bp, Artificial
  probe
  misc_feature (1)..(25): SEQ ID NO: 4657; WAN024A7R_at; Start 26; Stop 50
tgcttttagggctaacttagaagcc

SEQ ID NO: 45556 - DNA, 25 bp, Artificial
  probe
  misc_feature (1)..(25): SEQ ID NO: 4657; WAN024A7R_at; Start 4; Stop 28
tagtacatcatccagaagaaactgc

SEQ ID NO: 45557 - DNA, 25 bp, Artificial
  probe
  misc_feature (1)..(25): SEQ ID NO: 4657; WAN024A7R_at; Start 45; Stop 69
gaagcctttcttttgtaattagata

SEQ ID NO: 45558 - DNA, 25 bp, Artificial
  probe
  misc_feature (1)..(25): SEQ ID NO: 4657; WAN024A7R_at; Start 43; Stop 67
tagaagcctttcttttgtaattaga

SEQ ID NO: 45559 - DNA, 25 bp, Artificial
  probe
  misc_feature (1)..(25): SEQ ID NO: 4657; WAN024A7R_at; Start 6; Stop 30
gtacatcatccagaagaaactgctt

SEQ ID NO: 45560 - DNA, 25 bp, Artificial
  probe
  misc_feature (1)..(25): SEQ ID NO: 4657; WAN024A7R_at; Start 14; Stop 38
tccagaagaaactgcttttagggct

SEQ ID NO: 45561 - DNA, 25 bp, Artificial
  probe
  misc_feature (1)..(25): SEQ ID NO: 4657; WAN024A7R_at; Start 11; Stop 35
tcatccagaagaaactgcttttagg

SEQ ID NO: 45562 - DNA, 25 bp, Artificial
  probe
  misc_feature (1)..(25): SEQ ID NO: 4657; WAN024A7R_at; Start 13; Stop 37
atccagaagaaactgcttttagggc

SEQ ID NO: 45563 - DNA, 25 bp, Artificial
  probe
  misc_feature (1)..(25): SEQ ID NO: 4657; WAN024A7R_at; Start 44; Stop 68
agaagcctttcttttgtaattagat

SEQ ID NO: 45564 - DNA, 25 bp, Artificial
  probe
  misc_feature (1)..(25): SEQ ID NO: 4657; WAN024A7R_at; Start 5; Stop 29
agtacatcatccagaagaaactgct

SEQ ID NO: 45565 - DNA, 25 bp, Artificial
  probe
  misc_feature (1)..(25): SEQ ID NO: 4657; WAN024A7R_at; Start 24; Stop 48
actgcttttagggctaacttagaag

SEQ ID NO: 45566 - DNA, 25 bp, Artificial
  probe
  misc_feature (1)..(25): SEQ ID NO: 4657; WAN024A7R_at; Start 47; Stop 71
agcctttcttttgtaattagataag

SEQ ID NO: 45567 - DNA, 25 bp, Artificial
  probe
  misc_feature (1)..(25): SEQ ID NO: 4657; WAN024A7R_at; Start 16; Stop 40
cagaagaaactgcttttagggctaa

SEQ ID NO: 45568 - DNA, 25 bp, Artificial
  probe
  misc_feature (1)..(25): SEQ ID NO: 4657; WAN024A7R_at; Start 25; Stop 49
ctgcttttagggctaacttagaagc

SEQ ID NO: 45569 - DNA, 25 bp, Artificial
  probe
  misc_feature (1)..(25): SEQ ID NO: 4657; WAN024A7R_at; Start 9; Stop 33
catcatccagaagaaactgctttta

SEQ ID NO: 45570 - DNA, 25 bp, Artificial
  probe
  misc_feature (1)..(25): SEQ ID NO: 4657; WAN024A7R_at; Start 8; Stop 32
acatcatccagaagaaactgctttt

SEQ ID NO: 45571 - DNA, 25 bp, Artificial
  probe
  misc_feature (1)..(25): SEQ ID NO: 4657; WAN024A7R_at; Start 7; Stop 31
tacatcatccagaagaaactgcttt

SEQ ID NO: 45572 - DNA, 25 bp, Artificial
  probe
  misc_feature (1)..(25): SEQ ID NO: 4657; WAN024A7R_at; Start 15; Stop 39
ccagaagaaactgcttttagggcta

SEQ ID NO: 45573 - DNA, 25 bp, Artificial
  probe
  misc_feature (1)..(25): SEQ ID NO: 4657; WAN024A7R_at; Start 10; Stop 34
atcatccagaagaaactgcttttag

SEQ ID NO: 45574 - DNA, 25 bp, Artificial
  probe
  misc_feature (1)..(25): SEQ ID NO: 4657; WAN024A7R_at; Start 12; Stop 36
catccagaagaaactgcttttaggg

SEQ ID NO: 45575 - DNA, 25 bp, Artificial
  probe
  misc_feature (1)..(25): SEQ ID NO: 508; WAN024A7S_at; Start 319; Stop 343
gatagtattaaattttgaagaggag

SEQ ID NO: 45576 - DNA, 25 bp, Artificial
  probe
  misc_feature (1)..(25): SEQ ID NO: 508; WAN024A7S_at; Start 150; Stop 174
cctagataacaaaacacaggatata

SEQ ID NO: 45577 - DNA, 25 bp, Artificial
  probe
  misc_feature (1)..(25): SEQ ID NO: 508; WAN024A7S_at; Start 185; Stop 209
aaacaatttataggataatcattgc

SEQ ID NO: 45578 - DNA, 25 bp, Artificial
  probe
  misc_feature (1)..(25): SEQ ID NO: 508; WAN024A7S_at; Start 159; Stop 183
caaaacacaggatatagtttcttta

SEQ ID NO: 45579 - DNA, 25 bp, Artificial
  probe
  misc_feature (1)..(25): SEQ ID NO: 508; WAN024A7S_at; Start 123; Stop 147
tcagataacttgctgaaaatcttct

SEQ ID NO: 45580 - DNA, 25 bp, Artificial
  probe
  misc_feature (1)..(25): SEQ ID NO: 508; WAN024A7S_at; Start 113; Stop 137
caatttcctttcagataacttgctg

SEQ ID NO: 45581 - DNA, 25 bp, Artificial
  probe
  misc_feature (1)..(25): SEQ ID NO: 508; WAN024A7S_at; Start 103; Stop 127
gattttccttcaatttcctttcaga

SEQ ID NO: 45582 - DNA, 25 bp, Artificial
  probe
  misc_feature (1)..(25): SEQ ID NO: 508; WAN024A7S_at; Start 39; Stop 63
tatgtgataacccttacaatttagt

SEQ ID NO: 45583 - DNA, 25 bp, Artificial
  probe
  misc_feature (1)..(25): SEQ ID NO: 508; WAN024A7S_at; Start 251; Stop 275
aaacaacaaaagaacaccactatat

SEQ ID NO: 45584 - DNA, 25 bp, Artificial
  probe
  misc_feature (1)..(25): SEQ ID NO: 508; WAN024A7S_at; Start 200; Stop 224
taatcattgctatttcacaatacaa

SEQ ID NO: 45585 - DNA, 25 bp, Artificial
  probe
  misc_feature (1)..(25): SEQ ID NO: 508; WAN024A7S_at; Start 152; Stop 176
tagataacaaaacacaggatatagt

SEQ ID NO: 45586 - DNA, 25 bp, Artificial
  probe
  misc_feature (1)..(25): SEQ ID NO: 508; WAN024A7S_at; Start 217; Stop 241
caatacaaacactatatattgtgtt

SEQ ID NO: 45587 - DNA, 25 bp, Artificial
  probe
  misc_feature (1)..(25): SEQ ID NO: 508; WAN024A7S_at; Start 27; Stop 51
ttttttgagttatatgtgataaccc

SEQ ID NO: 45588 - DNA, 25 bp, Artificial
  probe
  misc_feature (1)..(25): SEQ ID NO: 508; WAN024A7S_at; Start 242; Stop 266
tatatataaaaacaacaaaagaaca

SEQ ID NO: 45589 - DNA, 25 bp, Artificial
  probe
  misc_feature (1)..(25): SEQ ID NO: 508; WAN024A7S_at; Start 145; Stop 169
tctatcctagataacaaaacacagg

SEQ ID NO: 45590 - DNA, 25 bp, Artificial
  probe
  misc_feature (1)..(25): SEQ ID NO: 508; WAN024A7S_at; Start 134; Stop 158
gctgaaaatcttctatcctagataa

SEQ ID NO: 45591 - DNA, 25 bp, Artificial
  probe
  misc_feature (1)..(25): SEQ ID NO: 508; WAN024A7S_at; Start 90; Stop 114
caagcattttctggattttccttca

SEQ ID NO: 45592 - DNA, 25 bp, Artificial
  probe
  misc_feature (1)..(25): SEQ ID NO: 508; WAN024A7S_at; Start 60; Stop 84
tagtattataccatcttctaggatt

SEQ ID NO: 45593 - DNA, 25 bp, Artificial
  probe
  misc_feature (1)..(25): SEQ ID NO: 508; WAN024A7S_at; Start 208; Stop 232
gctatttcacaatacaaacactata

SEQ ID NO: 45594 - DNA, 25 bp, Artificial
  probe
  misc_feature (1)..(25): SEQ ID NO: 508; WAN024A7S_at; Start 262; Stop 286
gaacaccactatatttagttcaaat

SEQ ID NO: 45595 - DNA, 25 bp, Artificial
  probe
  misc_feature (1)..(25): SEQ ID NO: 508; WAN024A7S_at; Start 41; Stop 65
tgtgataacccttacaatttagtat

SEQ ID NO: 45596 - DNA, 25 bp, Artificial
  probe
  misc_feature (1)..(25): SEQ ID NO: 508; WAN024A7S_at; Start 131; Stop 155
cttgctgaaaatcttctatcctaga

SEQ ID NO: 45597 - DNA, 25 bp, Artificial
  probe
  misc_feature (1)..(25): SEQ ID NO: 508; WAN024A7S_at; Start 278; Stop 302
agttcaaatcattgacaaaatttta

SEQ ID NO: 45598 - DNA, 25 bp, Artificial
  probe
  misc_feature (1)..(25): SEQ ID NO: 508; WAN024A7S_at; Start 270; Stop 294
ctatatttagttcaaatcattgaca

SEQ ID NO: 45599 - DNA, 25 bp, Artificial
  probe
  misc_feature (1)..(25): SEQ ID NO: 508; WAN024A7S_at; Start 33; Stop 57
gagttatatgtgataacccttacaa

SEQ ID NO: 45600 - DNA, 25 bp, Artificial
  probe
  misc_feature (1)..(25): SEQ ID NO: 508; WAN024A7S_at; Start 137; Stop 161
gaaaatcttctatcctagataacaa

SEQ ID NO: 45601 - DNA, 25 bp, Artificial
  probe
  misc_feature (1)..(25): SEQ ID NO: 508; WAN024A7S_at; Start 58; Stop 82
tttagtattataccatcttctagga

SEQ ID NO: 45602 - DNA, 25 bp, Artificial
  probe
  misc_feature (1)..(25): SEQ ID NO: 508; WAN024A7S_at; Start 301; Stop 325
tattttctgatatactaagatagta

SEQ ID NO: 45603 - DNA, 25 bp, Artificial
  probe
  misc_feature (1)..(25): SEQ ID NO: 508; WAN024A7S_at; Start 257; Stop 281
caaaagaacaccactatatttagtt

SEQ ID NO: 45604 - DNA, 25 bp, Artificial
  probe
  misc_feature (1)..(25): SEQ ID NO: 508; WAN024A7S_at; Start 156; Stop 180
taacaaaacacaggatatagtttct

SEQ ID NO: 45605 - DNA, 25 bp, Artificial
  probe
  misc_feature (1)..(25): SEQ ID NO: 508; WAN024A7S_at; Start 128; Stop 152
taacttgctgaaaatcttctatcct

SEQ ID NO: 45606 - DNA, 25 bp, Artificial
  probe
  misc_feature (1)..(25): SEQ ID NO: 508; WAN024A7S_at; Start 63; Stop 87
tattataccatcttctaggattttt

SEQ ID NO: 45607 - DNA, 25 bp, Artificial
  probe
  misc_feature (1)..(25): SEQ ID NO: 508; WAN024A7S_at; Start 50; Stop 74
ccttacaatttagtattataccatc

SEQ ID NO: 45608 - DNA, 25 bp, Artificial
  probe
  misc_feature (1)..(25): SEQ ID NO: 508; WAN024A7S_at; Start 86; Stop 110
ttttcaagcattttctggattttcc

SEQ ID NO: 45609 - DNA, 25 bp, Artificial
  probe
  misc_feature (1)..(25): SEQ ID NO: 4727; WAN024A7T_at; Start 208; Stop 232
gattttcagcaagttatctgaaagg

SEQ ID NO: 45610 - DNA, 25 bp, Artificial
  probe
  misc_feature (1)..(25): SEQ ID NO: 4727; WAN024A7T_at; Start 247; Stop 271
tccagaaaatgcttgaaaaaaatcc

SEQ ID NO: 45611 - DNA, 25 bp, Artificial
  probe
  misc_feature (1)..(25): SEQ ID NO: 4727; WAN024A7T_at; Start 294; Stop 318
ttgtaagggttatcacatataactc

SEQ ID NO: 45612 - DNA, 25 bp, Artificial
  probe
  misc_feature (1)..(25): SEQ ID NO: 4727; WAN024A7T_at; Start 300; Stop 324
gggttatcacatataactcaaaaaa

SEQ ID NO: 45613 - DNA, 25 bp, Artificial
  probe
  misc_feature (1)..(25): SEQ ID NO: 4727; WAN024A7T_at; Start 49; Stop 73
taaaattttgtcaatgatttgaact

SEQ ID NO: 45614 - DNA, 25 bp, Artificial
  probe
  misc_feature (1)..(25): SEQ ID NO: 4727; WAN024A7T_at; Start 257; Stop 281
gcttgaaaaaaatcctagaagatgg

SEQ ID NO: 45615 - DNA, 25 bp, Artificial
  probe
  misc_feature (1)..(25): SEQ ID NO: 4727; WAN024A7T_at; Start 220; Stop 244
gttatctgaaaggaaattgaaggaa

SEQ ID NO: 45616 - DNA, 25 bp, Artificial
  probe
  misc_feature (1)..(25): SEQ ID NO: 4727; WAN024A7T_at; Start 196; Stop 220
tctaggatagaagattttcagcaag

SEQ ID NO: 45617 - DNA, 25 bp, Artificial
  probe
  misc_feature (1)..(25): SEQ ID NO: 4727; WAN024A7T_at; Start 203; Stop 227
tagaagattttcagcaagttatctg

SEQ ID NO: 45618 - DNA, 25 bp, Artificial
  probe
  misc_feature (1)..(25): SEQ ID NO: 4727; WAN024A7T_at; Start 193; Stop 217
ttatctaggatagaagattttcagc

SEQ ID NO: 45619 - DNA, 25 bp, Artificial
  probe
  misc_feature (1)..(25): SEQ ID NO: 4727; WAN024A7T_at; Start 306; Stop 330
tcacatataactcaaaaaaagaaag

SEQ ID NO: 45620 - DNA, 25 bp, Artificial
  probe
  misc_feature (1)..(25): SEQ ID NO: 4727; WAN024A7T_at; Start 263; Stop 287
aaaaaatcctagaagatggtataat

SEQ ID NO: 45621 - DNA, 25 bp, Artificial
  probe
  misc_feature (1)..(25): SEQ ID NO: 4727; WAN024A7T_at; Start 217; Stop 241
caagttatctgaaaggaaattgaag

SEQ ID NO: 45622 - DNA, 25 bp, Artificial
  probe
  misc_feature (1)..(25): SEQ ID NO: 4727; WAN024A7T_at; Start 214; Stop 238
cagcaagttatctgaaaggaaattg

SEQ ID NO: 45623 - DNA, 25 bp, Artificial
  probe
  misc_feature (1)..(25): SEQ ID NO: 4727; WAN024A7T_at; Start 182; Stop 206
cctgtgttttgttatctaggataga

SEQ ID NO: 45624 - DNA, 25 bp, Artificial
  probe
  misc_feature (1)..(25): SEQ ID NO: 4727; WAN024A7T_at; Start 60; Stop 84
caatgatttgaactaaatatagtgg

SEQ ID NO: 45625 - DNA, 25 bp, Artificial
  probe
  misc_feature (1)..(25): SEQ ID NO: 4727; WAN024A7T_at; Start 205; Stop 229
gaagattttcagcaagttatctgaa

SEQ ID NO: 45626 - DNA, 25 bp, Artificial
  probe
  misc_feature (1)..(25): SEQ ID NO: 4727; WAN024A7T_at; Start 277; Stop 301
gatggtataatactaaattgtaagg

SEQ ID NO: 45627 - DNA, 25 bp, Artificial
  probe
  misc_feature (1)..(25): SEQ ID NO: 4727; WAN024A7T_at; Start 226; Stop 250
tgaaaggaaattgaaggaaaatcca

SEQ ID NO: 45628 - DNA, 25 bp, Artificial
  probe
  misc_feature (1)..(25): SEQ ID NO: 4727; WAN024A7T_at; Start 26; Stop 50
tactatcttagtatatcagaaaata

SEQ ID NO: 45629 - DNA, 25 bp, Artificial
  probe
  misc_feature (1)..(25): SEQ ID NO: 4727; WAN024A7T_at; Start 1; Stop 25
tgtgtaactcctcttcaaaatttaa

SEQ ID NO: 45630 - DNA, 25 bp, Artificial
  probe
  misc_feature (1)..(25): SEQ ID NO: 4727; WAN024A7T_at; Start 168; Stop 192
taaagaaactatatcctgtgttttg

SEQ ID NO: 45631 - DNA, 25 bp, Artificial
  probe
  misc_feature (1)..(25): SEQ ID NO: 4727; WAN024A7T_at; Start 73; Stop 97
taaatatagtggtgttcttttgttg

SEQ ID NO: 45632 - DNA, 25 bp, Artificial
  probe
  misc_feature (1)..(25): SEQ ID NO: 4727; WAN024A7T_at; Start 130; Stop 154
tattgtgaaatagcaatgattatcc

SEQ ID NO: 45633 - DNA, 25 bp, Artificial
  probe
  misc_feature (1)..(25): SEQ ID NO: 4727; WAN024A7T_at; Start 198; Stop 222
taggatagaagattttcagcaagtt

SEQ ID NO: 45634 - DNA, 25 bp, Artificial
  probe
  misc_feature (1)..(25): SEQ ID NO: 4727; WAN024A7T_at; Start 287; Stop 311
tactaaattgtaagggttatcacat

SEQ ID NO: 45635 - DNA, 25 bp, Artificial
  probe
  misc_feature (1)..(25): SEQ ID NO: 4727; WAN024A7T_at; Start 70; Stop 94
aactaaatatagtggtgttcttttg

SEQ ID NO: 45636 - DNA, 25 bp, Artificial
  probe
  misc_feature (1)..(25): SEQ ID NO: 4727; WAN024A7T_at; Start 201; Stop 225
gatagaagattttcagcaagttatc

SEQ ID NO: 45637 - DNA, 25 bp, Artificial
  probe
  misc_feature (1)..(25): SEQ ID NO: 4727; WAN024A7T_at; Start 297; Stop 321
taagggttatcacatataactcaaa

SEQ ID NO: 45638 - DNA, 25 bp, Artificial
  probe
  misc_feature (1)..(25): SEQ ID NO: 4727; WAN024A7T_at; Start 136; Stop 160
gaaatagcaatgattatcctataaa

SEQ ID NO: 45639 - DNA, 25 bp, Artificial
  probe
  misc_feature (1)..(25): SEQ ID NO: 4727; WAN024A7T_at; Start 119; Stop 143
tatagtgtttgtattgtgaaatagc

SEQ ID NO: 45640 - DNA, 25 bp, Artificial
  probe
  misc_feature (1)..(25): SEQ ID NO: 4727; WAN024A7T_at; Start 142; Stop 166
gcaatgattatcctataaattgttt

SEQ ID NO: 45641 - DNA, 25 bp, Artificial
  probe
  misc_feature (1)..(25): SEQ ID NO: 4727; WAN024A7T_at; Start 224; Stop 248
tctgaaaggaaattgaaggaaaatc

SEQ ID NO: 45642 - DNA, 25 bp, Artificial
  probe
  misc_feature (1)..(25): SEQ ID NO: 4727; WAN024A7T_at; Start 12; Stop 36
tcttcaaaatttaatactatcttag

SEQ ID NO: 45643 - DNA, 25 bp, Artificial
  probe
  misc_feature (1)..(25): SEQ ID NO: 4538; WAN024A7U_at; Start 127; Stop 151
tatgtatatatgtaaaattcttgac

SEQ ID NO: 45644 - DNA, 25 bp, Artificial
  probe
  misc_feature (1)..(25): SEQ ID NO: 4538; WAN024A7U_at; Start 147; Stop 171
ttgacaagcaatattaaaaagagta

SEQ ID NO: 45645 - DNA, 25 bp, Artificial
  probe
  misc_feature (1)..(25): SEQ ID NO: 4538; WAN024A7U_at; Start 73; Stop 97
catatatacataatgaaaaatgaaa

SEQ ID NO: 45646 - DNA, 25 bp, Artificial
  probe
  misc_feature (1)..(25): SEQ ID NO: 4538; WAN024A7U_at; Start 131; Stop 155
tatatatgtaaaattcttgacaagc

SEQ ID NO: 45647 - DNA, 25 bp, Artificial
  probe
  misc_feature (1)..(25): SEQ ID NO: 4538; WAN024A7U_at; Start 62; Stop 86
caagaattttacatatatacataat

SEQ ID NO: 45648 - DNA, 25 bp, Artificial
  probe
  misc_feature (1)..(25): SEQ ID NO: 4538; WAN024A7U_at; Start 132; Stop 156
atatatgtaaaattcttgacaagca

SEQ ID NO: 45649 - DNA, 25 bp, Artificial
  probe
  misc_feature (1)..(25): SEQ ID NO: 4538; WAN024A7U_at; Start 71; Stop 95
tacatatatacataatgaaaaatga

SEQ ID NO: 45650 - DNA, 25 bp, Artificial
  probe
  misc_feature (1)..(25): SEQ ID NO: 4538; WAN024A7U_at; Start 129; Stop 153
tgtatatatgtaaaattcttgacaa

SEQ ID NO: 45651 - DNA, 25 bp, Artificial
  probe
  misc_feature (1)..(25): SEQ ID NO: 4538; WAN024A7U_at; Start 130; Stop 154
gtatatatgtaaaattcttgacaag

SEQ ID NO: 45652 - DNA, 25 bp, Artificial
  probe
  misc_feature (1)..(25): SEQ ID NO: 4538; WAN024A7U_at; Start 59; Stop 83
tgtcaagaattttacatatatacat

SEQ ID NO: 45653 - DNA, 25 bp, Artificial
  probe
  misc_feature (1)..(25): SEQ ID NO: 4538; WAN024A7U_at; Start 146; Stop 170
cttgacaagcaatattaaaaagagt

SEQ ID NO: 45654 - DNA, 25 bp, Artificial
  probe
  misc_feature (1)..(25): SEQ ID NO: 4538; WAN024A7U_at; Start 44; Stop 68
ctttttaatattgcttgtcaagaat

SEQ ID NO: 45655 - DNA, 25 bp, Artificial
  probe
  misc_feature (1)..(25): SEQ ID NO: 4538; WAN024A7U_at; Start 139; Stop 163
taaaattcttgacaagcaatattaa

SEQ ID NO: 45656 - DNA, 25 bp, Artificial
  probe
  misc_feature (1)..(25): SEQ ID NO: 4538; WAN024A7U_at; Start 151; Stop 175
caagcaatattaaaaagagtaaact

SEQ ID NO: 45657 - DNA, 25 bp, Artificial
  probe
  misc_feature (1)..(25): SEQ ID NO: 4538; WAN024A7U_at; Start 70; Stop 94
ttacatatatacataatgaaaaatg

SEQ ID NO: 45658 - DNA, 25 bp, Artificial
  probe
  misc_feature (1)..(25): SEQ ID NO: 4538; WAN024A7U_at; Start 148; Stop 172
tgacaagcaatattaaaaagagtaa

SEQ ID NO: 45659 - DNA, 25 bp, Artificial
  probe
  misc_feature (1)..(25): SEQ ID NO: 4538; WAN024A7U_at; Start 60; Stop 84
gtcaagaattttacatatatacata

SEQ ID NO: 45660 - DNA, 25 bp, Artificial
  probe
  misc_feature (1)..(25): SEQ ID NO: 4538; WAN024A7U_at; Start 133; Stop 157
tatatgtaaaattcttgacaagcaa

SEQ ID NO: 45661 - DNA, 25 bp, Artificial
  probe
  misc_feature (1)..(25): SEQ ID NO: 4538; WAN024A7U_at; Start 65; Stop 89
gaattttacatatatacataatgaa

SEQ ID NO: 45662 - DNA, 25 bp, Artificial
  probe
  misc_feature (1)..(25): SEQ ID NO: 4538; WAN024A7U_at; Start 145; Stop 169
tcttgacaagcaatattaaaaagag

SEQ ID NO: 45663 - DNA, 25 bp, Artificial
  probe
  misc_feature (1)..(25): SEQ ID NO: 4538; WAN024A7U_at; Start 64; Stop 88
agaattttacatatatacataatga

SEQ ID NO: 45664 - DNA, 25 bp, Artificial
  probe
  misc_feature (1)..(25): SEQ ID NO: 4538; WAN024A7U_at; Start 136; Stop 160
atgtaaaattcttgacaagcaatat

SEQ ID NO: 45665 - DNA, 25 bp, Artificial
  probe
  misc_feature (1)..(25): SEQ ID NO: 4538; WAN024A7U_at; Start 45; Stop 69
tttttaatattgcttgtcaagaatt

SEQ ID NO: 45666 - DNA, 25 bp, Artificial
  probe
  misc_feature (1)..(25): SEQ ID NO: 4538; WAN024A7U_at; Start 142; Stop 166
aattcttgacaagcaatattaaaaa

SEQ ID NO: 45667 - DNA, 25 bp, Artificial
  probe
  misc_feature (1)..(25): SEQ ID NO: 4538; WAN024A7U_at; Start 135; Stop 159
tatgtaaaattcttgacaagcaata

SEQ ID NO: 45668 - DNA, 25 bp, Artificial
  probe
  misc_feature (1)..(25): SEQ ID NO: 4538; WAN024A7U_at; Start 61; Stop 85
tcaagaattttacatatatacataa

SEQ ID NO: 45669 - DNA, 25 bp, Artificial
  probe
  misc_feature (1)..(25): SEQ ID NO: 4538; WAN024A7U_at; Start 143; Stop 167
attcttgacaagcaatattaaaaag

SEQ ID NO: 45670 - DNA, 25 bp, Artificial
  probe
  misc_feature (1)..(25): SEQ ID NO: 4538; WAN024A7U_at; Start 58; Stop 82
ttgtcaagaattttacatatataca

SEQ ID NO: 45671 - DNA, 25 bp, Artificial
  probe
  misc_feature (1)..(25): SEQ ID NO: 4538; WAN024A7U_at; Start 134; Stop 158
atatgtaaaattcttgacaagcaat

SEQ ID NO: 45672 - DNA, 25 bp, Artificial
  probe
  misc_feature (1)..(25): SEQ ID NO: 4538; WAN024A7U_at; Start 144; Stop 168
ttcttgacaagcaatattaaaaaga

SEQ ID NO: 45673 - DNA, 25 bp, Artificial
  probe
  misc_feature (1)..(25): SEQ ID NO: 4538; WAN024A7U_at; Start 137; Stop 161
tgtaaaattcttgacaagcaatatt

SEQ ID NO: 45674 - DNA, 25 bp, Artificial
  probe
  misc_feature (1)..(25): SEQ ID NO: 4538; WAN024A7U_at; Start 149; Stop 173
gacaagcaatattaaaaagagtaaa

SEQ ID NO: 45675 - DNA, 25 bp, Artificial
  probe
  misc_feature (1)..(25): SEQ ID NO: 4538; WAN024A7U_at; Start 153; Stop 177
agcaatattaaaaagagtaaactat

SEQ ID NO: 45676 - DNA, 25 bp, Artificial
  probe
  misc_feature (1)..(25): SEQ ID NO: 4538; WAN024A7U_at; Start 138; Stop 162
gtaaaattcttgacaagcaatatta

SEQ ID NO: 45677 - DNA, 25 bp, Artificial
  probe
  misc_feature (1)..(25): SEQ ID NO: 466; WAN024A7V_at; Start 1; Stop 25
aggtagcagcattttctaactccta

SEQ ID NO: 45678 - DNA, 25 bp, Artificial
  probe
  misc_feature (1)..(25): SEQ ID NO: 466; WAN024A7V_at; Start 2; Stop 26
ggtagcagcattttctaactcctaa

SEQ ID NO: 45679 - DNA, 25 bp, Artificial
  probe
  misc_feature (1)..(25): SEQ ID NO: 466; WAN024A7V_at; Start 6; Stop 30
gcagcattttctaactcctaaaaac

SEQ ID NO: 45680 - DNA, 25 bp, Artificial
  probe
  misc_feature (1)..(25): SEQ ID NO: 466; WAN024A7V_at; Start 47; Stop 71
aaaacgaaaaatgagagcagaatgt

SEQ ID NO: 45681 - DNA, 25 bp, Artificial
  probe
  misc_feature (1)..(25): SEQ ID NO: 466; WAN024A7V_at; Start 44; Stop 68
gggaaaacgaaaaatgagagcagaa

SEQ ID NO: 45682 - DNA, 25 bp, Artificial
  probe
  misc_feature (1)..(25): SEQ ID NO: 466; WAN024A7V_at; Start 20; Stop 44
ctcctaaaaacaggataggagaacg

SEQ ID NO: 45683 - DNA, 25 bp, Artificial
  probe
  misc_feature (1)..(25): SEQ ID NO: 466; WAN024A7V_at; Start 60; Stop 84
agagcagaatgtgagttctagttct

SEQ ID NO: 45684 - DNA, 25 bp, Artificial
  probe
  misc_feature (1)..(25): SEQ ID NO: 466; WAN024A7V_at; Start 49; Stop 73
aacgaaaaatgagagcagaatgtga

SEQ ID NO: 45685 - DNA, 25 bp, Artificial
  probe
  misc_feature (1)..(25): SEQ ID NO: 466; WAN024A7V_at; Start 15; Stop 39
tctaactcctaaaaacaggatagga

SEQ ID NO: 45686 - DNA, 25 bp, Artificial
  probe
  misc_feature (1)..(25): SEQ ID NO: 466; WAN024A7V_at; Start 61; Stop 85
gagcagaatgtgagttctagttctc

SEQ ID NO: 45687 - DNA, 25 bp, Artificial
  probe
  misc_feature (1)..(25): SEQ ID NO: 466; WAN024A7V_at; Start 59; Stop 83
gagagcagaatgtgagttctagttc

SEQ ID NO: 45688 - DNA, 25 bp, Artificial
  probe
  misc_feature (1)..(25): SEQ ID NO: 466; WAN024A7V_at; Start 16; Stop 40
ctaactcctaaaaacaggataggag

SEQ ID NO: 45689 - DNA, 25 bp, Artificial
  probe
  misc_feature (1)..(25): SEQ ID NO: 466; WAN024A7V_at; Start 62; Stop 86
agcagaatgtgagttctagttctca

SEQ ID NO: 45690 - DNA, 25 bp, Artificial
  probe
  misc_feature (1)..(25): SEQ ID NO: 466; WAN024A7V_at; Start 4; Stop 28
tagcagcattttctaactcctaaaa

SEQ ID NO: 45691 - DNA, 25 bp, Artificial
  probe
  misc_feature (1)..(25): SEQ ID NO: 466; WAN024A7V_at; Start 66; Stop 90
gaatgtgagttctagttctcatttt

SEQ ID NO: 45692 - DNA, 25 bp, Artificial
  probe
  misc_feature (1)..(25): SEQ ID NO: 466; WAN024A7V_at; Start 43; Stop 67
cgggaaaacgaaaaatgagagcaga

SEQ ID NO: 45693 - DNA, 25 bp, Artificial
  probe
  misc_feature (1)..(25): SEQ ID NO: 466; WAN024A7V_at; Start 48; Stop 72
aaacgaaaaatgagagcagaatgtg

SEQ ID NO: 45694 - DNA, 25 bp, Artificial
  probe
  misc_feature (1)..(25): SEQ ID NO: 466; WAN024A7V_at; Start 46; Stop 70
gaaaacgaaaaatgagagcagaatg

SEQ ID NO: 45695 - DNA, 25 bp, Artificial
  probe
  misc_feature (1)..(25): SEQ ID NO: 466; WAN024A7V_at; Start 50; Stop 74
acgaaaaatgagagcagaatgtgag

SEQ ID NO: 45696 - DNA, 25 bp, Artificial
  probe
  misc_feature (1)..(25): SEQ ID NO: 466; WAN024A7V_at; Start 52; Stop 76
gaaaaatgagagcagaatgtgagtt

SEQ ID NO: 45697 - DNA, 25 bp, Artificial
  probe
  misc_feature (1)..(25): SEQ ID NO: 466; WAN024A7V_at; Start 55; Stop 79
aaatgagagcagaatgtgagttcta

SEQ ID NO: 45698 - DNA, 25 bp, Artificial
  probe
  misc_feature (1)..(25): SEQ ID NO: 466; WAN024A7V_at; Start 58; Stop 82
tgagagcagaatgtgagttctagtt

SEQ ID NO: 45699 - DNA, 25 bp, Artificial
  probe
  misc_feature (1)..(25): SEQ ID NO: 466; WAN024A7V_at; Start 42; Stop 66
acgggaaaacgaaaaatgagagcag

SEQ ID NO: 45700 - DNA, 25 bp, Artificial
  probe
  misc_feature (1)..(25): SEQ ID NO: 466; WAN024A7V_at; Start 56; Stop 80
aatgagagcagaatgtgagttctag

SEQ ID NO: 45701 - DNA, 25 bp, Artificial
  probe
  misc_feature (1)..(25): SEQ ID NO: 466; WAN024A7V_at; Start 53; Stop 77
aaaaatgagagcagaatgtgagttc

SEQ ID NO: 45702 - DNA, 25 bp, Artificial
  probe
  misc_feature (1)..(25): SEQ ID NO: 466; WAN024A7V_at; Start 51; Stop 75
cgaaaaatgagagcagaatgtgagt

SEQ ID NO: 45703 - DNA, 25 bp, Artificial
  probe
  misc_feature (1)..(25): SEQ ID NO: 466; WAN024A7V_at; Start 17; Stop 41
taactcctaaaaacaggataggaga

SEQ ID NO: 45704 - DNA, 25 bp, Artificial
  probe
  misc_feature (1)..(25): SEQ ID NO: 466; WAN024A7V_at; Start 45; Stop 69
ggaaaacgaaaaatgagagcagaat

SEQ ID NO: 45705 - DNA, 25 bp, Artificial
  probe
  misc_feature (1)..(25): SEQ ID NO: 466; WAN024A7V_at; Start 8; Stop 32
agcattttctaactcctaaaaacag

SEQ ID NO: 45706 - DNA, 25 bp, Artificial
  probe
  misc_feature (1)..(25): SEQ ID NO: 466; WAN024A7V_at; Start 5; Stop 29
agcagcattttctaactcctaaaaa

SEQ ID NO: 45707 - DNA, 25 bp, Artificial
  probe
  misc_feature (1)..(25): SEQ ID NO: 466; WAN024A7V_at; Start 54; Stop 78
aaaatgagagcagaatgtgagttct

SEQ ID NO: 45708 - DNA, 25 bp, Artificial
  probe
  misc_feature (1)..(25): SEQ ID NO: 466; WAN024A7V_at; Start 64; Stop 88
cagaatgtgagttctagttctcatt

SEQ ID NO: 45709 - DNA, 25 bp, Artificial
  probe
  misc_feature (1)..(25): SEQ ID NO: 466; WAN024A7V_at; Start 3; Stop 27
gtagcagcattttctaactcctaaa

SEQ ID NO: 45710 - DNA, 25 bp, Artificial
  probe
  misc_feature (1)..(25): SEQ ID NO: 466; WAN024A7V_at; Start 63; Stop 87
gcagaatgtgagttctagttctcat

SEQ ID NO: 45711 - DNA, 25 bp, Artificial
  probe
  misc_feature (1)..(25): SEQ ID NO: 5920; WAN024A7W_at; Start 22; Stop 46
aatgagaactagaactcacattctg

SEQ ID NO: 45712 - DNA, 25 bp, Artificial
  probe
  misc_feature (1)..(25): SEQ ID NO: 5920; WAN024A7W_at; Start 81; Stop 105
tttttaggagttagaaaatgctgct

SEQ ID NO: 45713 - DNA, 25 bp, Artificial
  probe
  misc_feature (1)..(25): SEQ ID NO: 5920; WAN024A7W_at; Start 36; Stop 60
ctcacattctgctctcatttttcgt

SEQ ID NO: 45714 - DNA, 25 bp, Artificial
  probe
  misc_feature (1)..(25): SEQ ID NO: 5920; WAN024A7W_at; Start 78; Stop 102
ctgtttttaggagttagaaaatgct

SEQ ID NO: 45715 - DNA, 25 bp, Artificial
  probe
  misc_feature (1)..(25): SEQ ID NO: 5920; WAN024A7W_at; Start 37; Stop 61
tcacattctgctctcatttttcgtt

SEQ ID NO: 45716 - DNA, 25 bp, Artificial
  probe
  misc_feature (1)..(25): SEQ ID NO: 5920; WAN024A7W_at; Start 29; Stop 53
actagaactcacattctgctctcat

SEQ ID NO: 45717 - DNA, 25 bp, Artificial
  probe
  misc_feature (1)..(25): SEQ ID NO: 5920; WAN024A7W_at; Start 31; Stop 55
tagaactcacattctgctctcattt

SEQ ID NO: 45718 - DNA, 25 bp, Artificial
  probe
  misc_feature (1)..(25): SEQ ID NO: 5920; WAN024A7W_at; Start 20; Stop 44
aaaatgagaactagaactcacattc

SEQ ID NO: 45719 - DNA, 25 bp, Artificial
  probe
  misc_feature (1)..(25): SEQ ID NO: 5920; WAN024A7W_at; Start 25; Stop 49
gagaactagaactcacattctgctc

SEQ ID NO: 45720 - DNA, 25 bp, Artificial
  probe
  misc_feature (1)..(25): SEQ ID NO: 5920; WAN024A7W_at; Start 32; Stop 56
agaactcacattctgctctcatttt

SEQ ID NO: 45721 - DNA, 25 bp, Artificial
  probe
  misc_feature (1)..(25): SEQ ID NO: 5920; WAN024A7W_at; Start 84; Stop 108
ttaggagttagaaaatgctgctacc

SEQ ID NO: 45722 - DNA, 25 bp, Artificial
  probe
  misc_feature (1)..(25): SEQ ID NO: 5920; WAN024A7W_at; Start 40; Stop 64
cattctgctctcatttttcgttttc

SEQ ID NO: 45723 - DNA, 25 bp, Artificial
  probe
  misc_feature (1)..(25): SEQ ID NO: 5920; WAN024A7W_at; Start 27; Stop 51
gaactagaactcacattctgctctc

SEQ ID NO: 45724 - DNA, 25 bp, Artificial
  probe
  misc_feature (1)..(25): SEQ ID NO: 5920; WAN024A7W_at; Start 28; Stop 52
aactagaactcacattctgctctca

SEQ ID NO: 45725 - DNA, 25 bp, Artificial
  probe
  misc_feature (1)..(25): SEQ ID NO: 5920; WAN024A7W_at; Start 44; Stop 68
ctgctctcatttttcgttttcccgt

SEQ ID NO: 45726 - DNA, 25 bp, Artificial
  probe
  misc_feature (1)..(25): SEQ ID NO: 5920; WAN024A7W_at; Start 83; Stop 107
tttaggagttagaaaatgctgctac

SEQ ID NO: 45727 - DNA, 25 bp, Artificial
  probe
  misc_feature (1)..(25): SEQ ID NO: 5920; WAN024A7W_at; Start 26; Stop 50
agaactagaactcacattctgctct

SEQ ID NO: 45728 - DNA, 25 bp, Artificial
  probe
  misc_feature (1)..(25): SEQ ID NO: 5920; WAN024A7W_at; Start 38; Stop 62
cacattctgctctcatttttcgttt

SEQ ID NO: 45729 - DNA, 25 bp, Artificial
  probe
  misc_feature (1)..(25): SEQ ID NO: 5920; WAN024A7W_at; Start 30; Stop 54
ctagaactcacattctgctctcatt

SEQ ID NO: 45730 - DNA, 25 bp, Artificial
  probe
  misc_feature (1)..(25): SEQ ID NO: 5920; WAN024A7W_at; Start 18; Stop 42
aaaaaatgagaactagaactcacat

SEQ ID NO: 45731 - DNA, 25 bp, Artificial
  probe
  misc_feature (1)..(25): SEQ ID NO: 5920; WAN024A7W_at; Start 43; Stop 67
tctgctctcatttttcgttttcccg

SEQ ID NO: 45732 - DNA, 25 bp, Artificial
  probe
  misc_feature (1)..(25): SEQ ID NO: 5920; WAN024A7W_at; Start 82; Stop 106
ttttaggagttagaaaatgctgcta

SEQ ID NO: 45733 - DNA, 25 bp, Artificial
  probe
  misc_feature (1)..(25): SEQ ID NO: 5920; WAN024A7W_at; Start 66; Stop 90
cgttctcctatcctgtttttaggag

SEQ ID NO: 45734 - DNA, 25 bp, Artificial
  probe
  misc_feature (1)..(25): SEQ ID NO: 5920; WAN024A7W_at; Start 71; Stop 95
tcctatcctgtttttaggagttaga

SEQ ID NO: 45735 - DNA, 25 bp, Artificial
  probe
  misc_feature (1)..(25): SEQ ID NO: 5920; WAN024A7W_at; Start 80; Stop 104
gtttttaggagttagaaaatgctgc

SEQ ID NO: 45736 - DNA, 25 bp, Artificial
  probe
  misc_feature (1)..(25): SEQ ID NO: 5920; WAN024A7W_at; Start 21; Stop 45
aaatgagaactagaactcacattct

SEQ ID NO: 45737 - DNA, 25 bp, Artificial
  probe
  misc_feature (1)..(25): SEQ ID NO: 5920; WAN024A7W_at; Start 23; Stop 47
atgagaactagaactcacattctgc

SEQ ID NO: 45738 - DNA, 25 bp, Artificial
  probe
  misc_feature (1)..(25): SEQ ID NO: 5920; WAN024A7W_at; Start 35; Stop 59
actcacattctgctctcatttttcg

SEQ ID NO: 45739 - DNA, 25 bp, Artificial
  probe
  misc_feature (1)..(25): SEQ ID NO: 5920; WAN024A7W_at; Start 85; Stop 109
taggagttagaaaatgctgctacct

SEQ ID NO: 45740 - DNA, 25 bp, Artificial
  probe
  misc_feature (1)..(25): SEQ ID NO: 5920; WAN024A7W_at; Start 70; Stop 94
ctcctatcctgtttttaggagttag

SEQ ID NO: 45741 - DNA, 25 bp, Artificial
  probe
  misc_feature (1)..(25): SEQ ID NO: 5920; WAN024A7W_at; Start 33; Stop 57
gaactcacattctgctctcattttt

SEQ ID NO: 45742 - DNA, 25 bp, Artificial
  probe
  misc_feature (1)..(25): SEQ ID NO: 5920; WAN024A7W_at; Start 79; Stop 103
tgtttttaggagttagaaaatgctg

SEQ ID NO: 45743 - DNA, 25 bp, Artificial
  probe
  misc_feature (1)..(25): SEQ ID NO: 5920; WAN024A7W_at; Start 24; Stop 48
tgagaactagaactcacattctgct

SEQ ID NO: 45744 - DNA, 25 bp, Artificial
  probe
  misc_feature (1)..(25): SEQ ID NO: 5920; WAN024A7W_at; Start 19; Stop 43
aaaaatgagaactagaactcacatt

SEQ ID NO: 45745 - DNA, 25 bp, Artificial
  probe
  misc_feature (1)..(25): SEQ ID NO: 3724; WAN024A7X_at; Start 45; Stop 69
tcaactataaaatgttaagtaaatg

SEQ ID NO: 45746 - DNA, 25 bp, Artificial
  probe
  misc_feature (1)..(25): SEQ ID NO: 3724; WAN024A7X_at; Start 35; Stop 59
attgattatctcaactataaaatgt

SEQ ID NO: 45747 - DNA, 25 bp, Artificial
  probe
  misc_feature (1)..(25): SEQ ID NO: 3724; WAN024A7X_at; Start 55; Stop 79
aatgttaagtaaatgatttcaaaat

SEQ ID NO: 45748 - DNA, 25 bp, Artificial
  probe
  misc_feature (1)..(25): SEQ ID NO: 3724; WAN024A7X_at; Start 41; Stop 65
tatctcaactataaaatgttaagta

SEQ ID NO: 45749 - DNA, 25 bp, Artificial
  probe
  misc_feature (1)..(25): SEQ ID NO: 3724; WAN024A7X_at; Start 63; Stop 87
gtaaatgatttcaaaatcagaaagg

SEQ ID NO: 45750 - DNA, 25 bp, Artificial
  probe
  misc_feature (1)..(25): SEQ ID NO: 3724; WAN024A7X_at; Start 59; Stop 83
ttaagtaaatgatttcaaaatcaga

SEQ ID NO: 45751 - DNA, 25 bp, Artificial
  probe
  misc_feature (1)..(25): SEQ ID NO: 3724; WAN024A7X_at; Start 36; Stop 60
ttgattatctcaactataaaatgtt

SEQ ID NO: 45752 - DNA, 25 bp, Artificial
  probe
  misc_feature (1)..(25): SEQ ID NO: 3724; WAN024A7X_at; Start 64; Stop 88
taaatgatttcaaaatcagaaaggg

SEQ ID NO: 45753 - DNA, 25 bp, Artificial
  probe
  misc_feature (1)..(25): SEQ ID NO: 3724; WAN024A7X_at; Start 40; Stop 64
ttatctcaactataaaatgttaagt

SEQ ID NO: 45754 - DNA, 25 bp, Artificial
  probe
  misc_feature (1)..(25): SEQ ID NO: 3724; WAN024A7X_at; Start 47; Stop 71
aactataaaatgttaagtaaatgat

SEQ ID NO: 45755 - DNA, 25 bp, Artificial
  probe
  misc_feature (1)..(25): SEQ ID NO: 3724; WAN024A7X_at; Start 50; Stop 74
tataaaatgttaagtaaatgatttc

SEQ ID NO: 45756 - DNA, 25 bp, Artificial
  probe
  misc_feature (1)..(25): SEQ ID NO: 3724; WAN024A7X_at; Start 62; Stop 86
agtaaatgatttcaaaatcagaaag

SEQ ID NO: 45757 - DNA, 25 bp, Artificial
  probe
  misc_feature (1)..(25): SEQ ID NO: 3724; WAN024A7X_at; Start 37; Stop 61
tgattatctcaactataaaatgtta

SEQ ID NO: 45758 - DNA, 25 bp, Artificial
  probe
  misc_feature (1)..(25): SEQ ID NO: 3724; WAN024A7X_at; Start 39; Stop 63
attatctcaactataaaatgttaag

SEQ ID NO: 45759 - DNA, 25 bp, Artificial
  probe
  misc_feature (1)..(25): SEQ ID NO: 3724; WAN024A7X_at; Start 56; Stop 80
atgttaagtaaatgatttcaaaatc

SEQ ID NO: 45760 - DNA, 25 bp, Artificial
  probe
  misc_feature (1)..(25): SEQ ID NO: 3724; WAN024A7X_at; Start 61; Stop 85
aagtaaatgatttcaaaatcagaaa

SEQ ID NO: 45761 - DNA, 25 bp, Artificial
  probe
  misc_feature (1)..(25): SEQ ID NO: 3724; WAN024A7X_at; Start 38; Stop 62
gattatctcaactataaaatgttaa

SEQ ID NO: 45762 - DNA, 25 bp, Artificial
  probe
  misc_feature (1)..(25): SEQ ID NO: 3724; WAN024A7X_at; Start 34; Stop 58
tattgattatctcaactataaaatg

SEQ ID NO: 45763 - DNA, 25 bp, Artificial
  probe
  misc_feature (1)..(25): SEQ ID NO: 3724; WAN024A7X_at; Start 44; Stop 68
ctcaactataaaatgttaagtaaat

SEQ ID NO: 45764 - DNA, 25 bp, Artificial
  probe
  misc_feature (1)..(25): SEQ ID NO: 3724; WAN024A7X_at; Start 46; Stop 70
caactataaaatgttaagtaaatga

SEQ ID NO: 45765 - DNA, 25 bp, Artificial
  probe
  misc_feature (1)..(25): SEQ ID NO: 3724; WAN024A7X_at; Start 58; Stop 82
gttaagtaaatgatttcaaaatcag

SEQ ID NO: 45766 - DNA, 25 bp, Artificial
  probe
  misc_feature (1)..(25): SEQ ID NO: 3724; WAN024A7X_at; Start 57; Stop 81
tgttaagtaaatgatttcaaaatca

SEQ ID NO: 45767 - DNA, 25 bp, Artificial
  probe
  misc_feature (1)..(25): SEQ ID NO: 3724; WAN024A7X_at; Start 43; Stop 67
tctcaactataaaatgttaagtaaa

SEQ ID NO: 45768 - DNA, 25 bp, Artificial
  probe
  misc_feature (1)..(25): SEQ ID NO: 3724; WAN024A7X_at; Start 65; Stop 89
aaatgatttcaaaatcagaaaggga

SEQ ID NO: 45769 - DNA, 25 bp, Artificial
  probe
  misc_feature (1)..(25): SEQ ID NO: 3724; WAN024A7X_at; Start 60; Stop 84
taagtaaatgatttcaaaatcagaa

SEQ ID NO: 45770 - DNA, 25 bp, Artificial
  probe
  misc_feature (1)..(25): SEQ ID NO: 3724; WAN024A7X_at; Start 42; Stop 66
atctcaactataaaatgttaagtaa

SEQ ID NO: 45771 - DNA, 25 bp, Artificial
  probe
  misc_feature (1)..(25): SEQ ID NO: 3724; WAN024A7X_at; Start 52; Stop 76
taaaatgttaagtaaatgatttcaa

SEQ ID NO: 45772 - DNA, 25 bp, Artificial
  probe
  misc_feature (1)..(25): SEQ ID NO: 3724; WAN024A7X_at; Start 48; Stop 72
actataaaatgttaagtaaatgatt

SEQ ID NO: 45773 - DNA, 25 bp, Artificial
  probe
  misc_feature (1)..(25): SEQ ID NO: 3724; WAN024A7X_at; Start 49; Stop 73
ctataaaatgttaagtaaatgattt

SEQ ID NO: 45774 - DNA, 25 bp, Artificial
  probe
  misc_feature (1)..(25): SEQ ID NO: 3724; WAN024A7X_at; Start 51; Stop 75
ataaaatgttaagtaaatgatttca

SEQ ID NO: 45775 - DNA, 25 bp, Artificial
  probe
  misc_feature (1)..(25): SEQ ID NO: 4618; WAN024A7Y_at; Start 8; Stop 32
ctgattttgaaatcatttacttaac

SEQ ID NO: 45776 - DNA, 25 bp, Artificial
  probe
  misc_feature (1)..(25): SEQ ID NO: 4618; WAN024A7Y_at; Start 1; Stop 25
tccctttctgattttgaaatcattt

SEQ ID NO: 45777 - DNA, 25 bp, Artificial
  probe
  misc_feature (1)..(25): SEQ ID NO: 4618; WAN024A7Y_at; Start 2; Stop 26
ccctttctgattttgaaatcattta

SEQ ID NO: 45778 - DNA, 25 bp, Artificial
  probe
  misc_feature (1)..(25): SEQ ID NO: 4618; WAN024A7Y_at; Start 33; Stop 57
attttatagttgagataatcaatag

SEQ ID NO: 45779 - DNA, 25 bp, Artificial
  probe
  misc_feature (1)..(25): SEQ ID NO: 4618; WAN024A7Y_at; Start 30; Stop 54
aacattttatagttgagataatcaa

SEQ ID NO: 45780 - DNA, 25 bp, Artificial
  probe
  misc_feature (1)..(25): SEQ ID NO: 4618; WAN024A7Y_at; Start 32; Stop 56
cattttatagttgagataatcaata

SEQ ID NO: 45781 - DNA, 25 bp, Artificial
  probe
  misc_feature (1)..(25): SEQ ID NO: 4618; WAN024A7Y_at; Start 4; Stop 28
ctttctgattttgaaatcatttact

SEQ ID NO: 45782 - DNA, 25 bp, Artificial
  probe
  misc_feature (1)..(25): SEQ ID NO: 4618; WAN024A7Y_at; Start 10; Stop 34
gattttgaaatcatttacttaacat

SEQ ID NO: 45783 - DNA, 25 bp, Artificial
  probe
  misc_feature (1)..(25): SEQ ID NO: 4618; WAN024A7Y_at; Start 34; Stop 58
ttttatagttgagataatcaatagc

SEQ ID NO: 45784 - DNA, 25 bp, Artificial
  probe
  misc_feature (1)..(25): SEQ ID NO: 4618; WAN024A7Y_at; Start 14; Stop 38
ttgaaatcatttacttaacatttta

SEQ ID NO: 45785 - DNA, 25 bp, Artificial
  probe
  misc_feature (1)..(25): SEQ ID NO: 4618; WAN024A7Y_at; Start 15; Stop 39
tgaaatcatttacttaacattttat

SEQ ID NO: 45786 - DNA, 25 bp, Artificial
  probe
  misc_feature (1)..(25): SEQ ID NO: 4618; WAN024A7Y_at; Start 18; Stop 42
aatcatttacttaacattttatagt

SEQ ID NO: 45787 - DNA, 25 bp, Artificial
  probe
  misc_feature (1)..(25): SEQ ID NO: 4618; WAN024A7Y_at; Start 31; Stop 55
acattttatagttgagataatcaat

SEQ ID NO: 45788 - DNA, 25 bp, Artificial
  probe
  misc_feature (1)..(25): SEQ ID NO: 4618; WAN024A7Y_at; Start 29; Stop 53
taacattttatagttgagataatca

SEQ ID NO: 45789 - DNA, 25 bp, Artificial
  probe
  misc_feature (1)..(25): SEQ ID NO: 4618; WAN024A7Y_at; Start 6; Stop 30
ttctgattttgaaatcatttactta

SEQ ID NO: 45790 - DNA, 25 bp, Artificial
  probe
  misc_feature (1)..(25): SEQ ID NO: 4618; WAN024A7Y_at; Start 16; Stop 40
gaaatcatttacttaacattttata

SEQ ID NO: 45791 - DNA, 25 bp, Artificial
  probe
  misc_feature (1)..(25): SEQ ID NO: 4618; WAN024A7Y_at; Start 9; Stop 33
tgattttgaaatcatttacttaaca

SEQ ID NO: 45792 - DNA, 25 bp, Artificial
  probe
  misc_feature (1)..(25): SEQ ID NO: 4618; WAN024A7Y_at; Start 7; Stop 31
tctgattttgaaatcatttacttaa

SEQ ID NO: 45793 - DNA, 25 bp, Artificial
  probe
  misc_feature (1)..(25): SEQ ID NO: 4618; WAN024A7Y_at; Start 17; Stop 41
aaatcatttacttaacattttatag

SEQ ID NO: 45794 - DNA, 25 bp, Artificial
  probe
  misc_feature (1)..(25): SEQ ID NO: 4618; WAN024A7Y_at; Start 37; Stop 61
tatagttgagataatcaatagctta

SEQ ID NO: 45795 - DNA, 25 bp, Artificial
  probe
  misc_feature (1)..(25): SEQ ID NO: 4618; WAN024A7Y_at; Start 35; Stop 59
tttatagttgagataatcaatagct

SEQ ID NO: 45796 - DNA, 25 bp, Artificial
  probe
  misc_feature (1)..(25): SEQ ID NO: 4618; WAN024A7Y_at; Start 36; Stop 60
ttatagttgagataatcaatagctt

SEQ ID NO: 45797 - DNA, 25 bp, Artificial
  probe
  misc_feature (1)..(25): SEQ ID NO: 4618; WAN024A7Y_at; Start 3; Stop 27
cctttctgattttgaaatcatttac

SEQ ID NO: 45798 - DNA, 25 bp, Artificial
  probe
  misc_feature (1)..(25): SEQ ID NO: 178; WAN024A7Z_at; Start 118; Stop 142
tctattctgaaagatttgagctgtc

SEQ ID NO: 45799 - DNA, 25 bp, Artificial
  probe
  misc_feature (1)..(25): SEQ ID NO: 178; WAN024A7Z_at; Start 1; Stop 25
aaatttaaggcaatcaattacttgg

SEQ ID NO: 45800 - DNA, 25 bp, Artificial
  probe
  misc_feature (1)..(25): SEQ ID NO: 178; WAN024A7Z_at; Start 11; Stop 35
caatcaattacttggaagagtatga

SEQ ID NO: 45801 - DNA, 25 bp, Artificial
  probe
  misc_feature (1)..(25): SEQ ID NO: 178; WAN024A7Z_at; Start 102; Stop 126
cgatagttagtattgttctattctg

SEQ ID NO: 45802 - DNA, 25 bp, Artificial
  probe
  misc_feature (1)..(25): SEQ ID NO: 178; WAN024A7Z_at; Start 15; Stop 39
caattacttggaagagtatgaaagc

SEQ ID NO: 45803 - DNA, 25 bp, Artificial
  probe
  misc_feature (1)..(25): SEQ ID NO: 178; WAN024A7Z_at; Start 216; Stop 240
tgttcttaatgaattttcagaaagg

SEQ ID NO: 45804 - DNA, 25 bp, Artificial
  probe
  misc_feature (1)..(25): SEQ ID NO: 178; WAN024A7Z_at; Start 34; Stop 58
gaaagcatttagtttataggaattc

SEQ ID NO: 45805 - DNA, 25 bp, Artificial
  probe
  misc_feature (1)..(25): SEQ ID NO: 178; WAN024A7Z_at; Start 142; Stop 166
cagttgtatagaaagtgttcgaatt

SEQ ID NO: 45806 - DNA, 25 bp, Artificial
  probe
  misc_feature (1)..(25): SEQ ID NO: 178; WAN024A7Z_at; Start 45; Stop 69
gtttataggaattctaggtctagaa

SEQ ID NO: 45807 - DNA, 25 bp, Artificial
  probe
  misc_feature (1)..(25): SEQ ID NO: 178; WAN024A7Z_at; Start 123; Stop 147
tctgaaagatttgagctgtcagttg

SEQ ID NO: 45808 - DNA, 25 bp, Artificial
  probe
  misc_feature (1)..(25): SEQ ID NO: 178; WAN024A7Z_at; Start 19; Stop 43
tacttggaagagtatgaaagcattt

SEQ ID NO: 45809 - DNA, 25 bp, Artificial
  probe
  misc_feature (1)..(25): SEQ ID NO: 178; WAN024A7Z_at; Start 137; Stop 161
gctgtcagttgtatagaaagtgttc

SEQ ID NO: 45810 - DNA, 25 bp, Artificial
  probe
  misc_feature (1)..(25): SEQ ID NO: 178; WAN024A7Z_at; Start 50; Stop 74
taggaattctaggtctagaattaca

SEQ ID NO: 45811 - DNA, 25 bp, Artificial
  probe
  misc_feature (1)..(25): SEQ ID NO: 178; WAN024A7Z_at; Start 140; Stop 164
gtcagttgtatagaaagtgttcgaa

SEQ ID NO: 45812 - DNA, 25 bp, Artificial
  probe
  misc_feature (1)..(25): SEQ ID NO: 178; WAN024A7Z_at; Start 128; Stop 152
aagatttgagctgtcagttgtatag

SEQ ID NO: 45813 - DNA, 25 bp, Artificial
  probe
  misc_feature (1)..(25): SEQ ID NO: 178; WAN024A7Z_at; Start 134; Stop 158
tgagctgtcagttgtatagaaagtg

SEQ ID NO: 45814 - DNA, 25 bp, Artificial
  probe
  misc_feature (1)..(25): SEQ ID NO: 178; WAN024A7Z_at; Start 202; Stop 226
gctttatgatataatgttcttaatg

SEQ ID NO: 45815 - DNA, 25 bp, Artificial
  probe
  misc_feature (1)..(25): SEQ ID NO: 178; WAN024A7Z_at; Start 138; Stop 162
ctgtcagttgtatagaaagtgttcg

SEQ ID NO: 45816 - DNA, 25 bp, Artificial
  probe
  misc_feature (1)..(25): SEQ ID NO: 178; WAN024A7Z_at; Start 9; Stop 33
ggcaatcaattacttggaagagtat

SEQ ID NO: 45817 - DNA, 25 bp, Artificial
  probe
  misc_feature (1)..(25): SEQ ID NO: 178; WAN024A7Z_at; Start 107; Stop 131
gttagtattgttctattctgaaaga

SEQ ID NO: 45818 - DNA, 25 bp, Artificial
  probe
  misc_feature (1)..(25): SEQ ID NO: 178; WAN024A7Z_at; Start 16; Stop 40
aattacttggaagagtatgaaagca

SEQ ID NO: 45819 - DNA, 25 bp, Artificial
  probe
  misc_feature (1)..(25): SEQ ID NO: 178; WAN024A7Z_at; Start 21; Stop 45
cttggaagagtatgaaagcatttag

SEQ ID NO: 45820 - DNA, 25 bp, Artificial
  probe
  misc_feature (1)..(25): SEQ ID NO: 178; WAN024A7Z_at; Start 38; Stop 62
gcatttagtttataggaattctagg

SEQ ID NO: 45821 - DNA, 25 bp, Artificial
  probe
  misc_feature (1)..(25): SEQ ID NO: 178; WAN024A7Z_at; Start 130; Stop 154
gatttgagctgtcagttgtatagaa

SEQ ID NO: 45822 - DNA, 25 bp, Artificial
  probe
  misc_feature (1)..(25): SEQ ID NO: 178; WAN024A7Z_at; Start 193; Stop 217
gtatgaggtgctttatgatataatg

SEQ ID NO: 45823 - DNA, 25 bp, Artificial
  probe
  misc_feature (1)..(25): SEQ ID NO: 178; WAN024A7Z_at; Start 120; Stop 144
tattctgaaagatttgagctgtcag

SEQ ID NO: 45824 - DNA, 25 bp, Artificial
  probe
  misc_feature (1)..(25): SEQ ID NO: 178; WAN024A7Z_at; Start 25; Stop 49
gaagagtatgaaagcatttagttta

SEQ ID NO: 45825 - DNA, 25 bp, Artificial
  probe
  misc_feature (1)..(25): SEQ ID NO: 178; WAN024A7Z_at; Start 6; Stop 30
taaggcaatcaattacttggaagag

SEQ ID NO: 45826 - DNA, 25 bp, Artificial
  probe
  misc_feature (1)..(25): SEQ ID NO: 178; WAN024A7Z_at; Start 125; Stop 149
tgaaagatttgagctgtcagttgta

SEQ ID NO: 45827 - DNA, 25 bp, Artificial
  probe
  misc_feature (1)..(25): SEQ ID NO: 178; WAN024A7Z_at; Start 4; Stop 28
tttaaggcaatcaattacttggaag

SEQ ID NO: 45828 - DNA, 25 bp, Artificial
  probe
  misc_feature (1)..(25): SEQ ID NO: 178; WAN024A7Z_at; Start 197; Stop 221
gaggtgctttatgatataatgttct

SEQ ID NO: 45829 - DNA, 25 bp, Artificial
  probe
  misc_feature (1)..(25): SEQ ID NO: 178; WAN024A7Z_at; Start 7; Stop 31
aaggcaatcaattacttggaagagt

SEQ ID NO: 45830 - DNA, 25 bp, Artificial
  probe
  misc_feature (1)..(25): SEQ ID NO: 178; WAN024A7Z_at; Start 225; Stop 249
tgaattttcagaaaggaaaacctca

SEQ ID NO: 45831 - DNA, 25 bp, Artificial
  probe
  misc_feature (1)..(25): SEQ ID NO: 178; WAN024A7Z_at; Start 43; Stop 67
tagtttataggaattctaggtctag

SEQ ID NO: 45832 - DNA, 25 bp, Artificial
  probe
  misc_feature (1)..(25): SEQ ID NO: 5917; WAN024A82_at; Start 90; Stop 114
cgaacactttctatacaactgacag

SEQ ID NO: 45833 - DNA, 25 bp, Artificial
  probe
  misc_feature (1)..(25): SEQ ID NO: 5917; WAN024A82_at; Start 109; Stop 133
tgacagctcaaatctttcagaatag

SEQ ID NO: 45834 - DNA, 25 bp, Artificial
  probe
  misc_feature (1)..(25): SEQ ID NO: 5917; WAN024A82_at; Start 91; Stop 115
gaacactttctatacaactgacagc

SEQ ID NO: 45835 - DNA, 25 bp, Artificial
  probe
  misc_feature (1)..(25): SEQ ID NO: 5917; WAN024A82_at; Start 29; Stop 53
taagaacattatatcataaagcacc

SEQ ID NO: 45836 - DNA, 25 bp, Artificial
  probe
  misc_feature (1)..(25): SEQ ID NO: 5917; WAN024A82_at; Start 218; Stop 242
catactcttccaagtaattgattgc

SEQ ID NO: 45837 - DNA, 25 bp, Artificial
  probe
  misc_feature (1)..(25): SEQ ID NO: 5917; WAN024A82_at; Start 99; Stop 123
tctatacaactgacagctcaaatct

SEQ ID NO: 45838 - DNA, 25 bp, Artificial
  probe
  misc_feature (1)..(25): SEQ ID NO: 5917; WAN024A82_at; Start 223; Stop 247
tcttccaagtaattgattgccttaa

SEQ ID NO: 45839 - DNA, 25 bp, Artificial
  probe
  misc_feature (1)..(25): SEQ ID NO: 5917; WAN024A82_at; Start 105; Stop 129
caactgacagctcaaatctttcaga

SEQ ID NO: 45840 - DNA, 25 bp, Artificial
  probe
  misc_feature (1)..(25): SEQ ID NO: 5917; WAN024A82_at; Start 184; Stop 208
tctagacctagaattcctataaact

SEQ ID NO: 45841 - DNA, 25 bp, Artificial
  probe
  misc_feature (1)..(25): SEQ ID NO: 5917; WAN024A82_at; Start 213; Stop 237
gctttcatactcttccaagtaattg

SEQ ID NO: 45842 - DNA, 25 bp, Artificial
  probe
  misc_feature (1)..(25): SEQ ID NO: 5917; WAN024A82_at; Start 126; Stop 150
cagaatagaacaatactaactatcg

SEQ ID NO: 45843 - DNA, 25 bp, Artificial
  probe
  misc_feature (1)..(25): SEQ ID NO: 5917; WAN024A82_at; Start 11; Stop 35
tcctttctgaaaattcattaagaac

SEQ ID NO: 45844 - DNA, 25 bp, Artificial
  probe
  misc_feature (1)..(25): SEQ ID NO: 5917; WAN024A82_at; Start 176; Stop 200
tatgtaattctagacctagaattcc

SEQ ID NO: 45845 - DNA, 25 bp, Artificial
  probe
  misc_feature (1)..(25): SEQ ID NO: 5917; WAN024A82_at; Start 112; Stop 136
cagctcaaatctttcagaatagaac

SEQ ID NO: 45846 - DNA, 25 bp, Artificial
  probe
  misc_feature (1)..(25): SEQ ID NO: 5917; WAN024A82_at; Start 121; Stop 145
tctttcagaatagaacaatactaac

SEQ ID NO: 45847 - DNA, 25 bp, Artificial
  probe
  misc_feature (1)..(25): SEQ ID NO: 5917; WAN024A82_at; Start 86; Stop 110
aattcgaacactttctatacaactg

SEQ ID NO: 45848 - DNA, 25 bp, Artificial
  probe
  misc_feature (1)..(25): SEQ ID NO: 5917; WAN024A82_at; Start 114; Stop 138
gctcaaatctttcagaatagaacaa

SEQ ID NO: 45849 - DNA, 25 bp, Artificial
  probe
  misc_feature (1)..(25): SEQ ID NO: 5917; WAN024A82_at; Start 203; Stop 227
taaactaaatgctttcatactcttc

SEQ ID NO: 45850 - DNA, 25 bp, Artificial
  probe
  misc_feature (1)..(25): SEQ ID NO: 5917; WAN024A82_at; Start 38; Stop 62
tatatcataaagcacctcatacaat

SEQ ID NO: 45851 - DNA, 25 bp, Artificial
  probe
  misc_feature (1)..(25): SEQ ID NO: 5917; WAN024A82_at; Start 210; Stop 234
aatgctttcatactcttccaagtaa

SEQ ID NO: 45852 - DNA, 25 bp, Artificial
  probe
  misc_feature (1)..(25): SEQ ID NO: 5917; WAN024A82_at; Start 95; Stop 119
actttctatacaactgacagctcaa

SEQ ID NO: 45853 - DNA, 25 bp, Artificial
  probe
  misc_feature (1)..(25): SEQ ID NO: 5917; WAN024A82_at; Start 194; Stop 218
gaattcctataaactaaatgctttc

SEQ ID NO: 45854 - DNA, 25 bp, Artificial
  probe
  misc_feature (1)..(25): SEQ ID NO: 5917; WAN024A82_at; Start 103; Stop 127
tacaactgacagctcaaatctttca

SEQ ID NO: 45855 - DNA, 25 bp, Artificial
  probe
  misc_feature (1)..(25): SEQ ID NO: 5917; WAN024A82_at; Start 94; Stop 118
cactttctatacaactgacagctca

SEQ ID NO: 45856 - DNA, 25 bp, Artificial
  probe
  misc_feature (1)..(25): SEQ ID NO: 5917; WAN024A82_at; Start 110; Stop 134
gacagctcaaatctttcagaataga

SEQ ID NO: 45857 - DNA, 25 bp, Artificial
  probe
  misc_feature (1)..(25): SEQ ID NO: 5917; WAN024A82_at; Start 220; Stop 244
tactcttccaagtaattgattgcct

SEQ ID NO: 45858 - DNA, 25 bp, Artificial
  probe
  misc_feature (1)..(25): SEQ ID NO: 5917; WAN024A82_at; Start 35; Stop 59
cattatatcataaagcacctcatac

SEQ ID NO: 45859 - DNA, 25 bp, Artificial
  probe
  misc_feature (1)..(25): SEQ ID NO: 5917; WAN024A82_at; Start 208; Stop 232
taaatgctttcatactcttccaagt

SEQ ID NO: 45860 - DNA, 25 bp, Artificial
  probe
  misc_feature (1)..(25): SEQ ID NO: 5917; WAN024A82_at; Start 190; Stop 214
cctagaattcctataaactaaatgc

SEQ ID NO: 45861 - DNA, 25 bp, Artificial
  probe
  misc_feature (1)..(25): SEQ ID NO: 5917; WAN024A82_at; Start 227; Stop 251
ccaagtaattgattgccttaaattt

SEQ ID NO: 45862 - DNA, 25 bp, Artificial
  probe
  misc_feature (1)..(25): SEQ ID NO: 5917; WAN024A82_at; Start 3; Stop 27
tgaggttttcctttctgaaaattca

SEQ ID NO: 45863 - DNA, 25 bp, Artificial
  probe
  misc_feature (1)..(25): SEQ ID NO: 5917; WAN024A82_at; Start 32; Stop 56
gaacattatatcataaagcacctca

SEQ ID NO: 45864 - DNA, 25 bp, Artificial
  probe
  misc_feature (1)..(25): SEQ ID NO: 5917; WAN024A82_at; Start 117; Stop 141
caaatctttcagaatagaacaatac

SEQ ID NO: 45865 - DNA, 25 bp, Artificial
  probe
  misc_feature (1)..(25): SEQ ID NO: 5917; WAN024A82_at; Start 16; Stop 40
tctgaaaattcattaagaacattat

SEQ ID NO: 45866 - DNA, 25 bp, Artificial
  probe
  misc_feature (1)..(25): SEQ ID NO: 3237; WAN024A83_at; Start 92; Stop 116
gccactttttgctataatagaggca

SEQ ID NO: 45867 - DNA, 25 bp, Artificial
  probe
  misc_feature (1)..(25): SEQ ID NO: 3237; WAN024A83_at; Start 35; Stop 59
cgtatatatagtcgatttattaaat

SEQ ID NO: 45868 - DNA, 25 bp, Artificial
  probe
  misc_feature (1)..(25): SEQ ID NO: 3237; WAN024A83_at; Start 98; Stop 122
ttttgctataatagaggcagtaaaa

SEQ ID NO: 45869 - DNA, 25 bp, Artificial
  probe
  misc_feature (1)..(25): SEQ ID NO: 3237; WAN024A83_at; Start 112; Stop 136
aggcagtaaaaatgaaggagtcggc

SEQ ID NO: 45870 - DNA, 25 bp, Artificial
  probe
  misc_feature (1)..(25): SEQ ID NO: 3237; WAN024A83_at; Start 107; Stop 131
aatagaggcagtaaaaatgaaggag

SEQ ID NO: 45871 - DNA, 25 bp, Artificial
  probe
  misc_feature (1)..(25): SEQ ID NO: 3237; WAN024A83_at; Start 113; Stop 137
ggcagtaaaaatgaaggagtcggct

SEQ ID NO: 45872 - DNA, 25 bp, Artificial
  probe
  misc_feature (1)..(25): SEQ ID NO: 3237; WAN024A83_at; Start 24; Stop 48
cgtattcaaatcgtatatatagtcg

SEQ ID NO: 45873 - DNA, 25 bp, Artificial
  probe
  misc_feature (1)..(25): SEQ ID NO: 3237; WAN024A83_at; Start 104; Stop 128
tataatagaggcagtaaaaatgaag

SEQ ID NO: 45874 - DNA, 25 bp, Artificial
  probe
  misc_feature (1)..(25): SEQ ID NO: 3237; WAN024A83_at; Start 79; Stop 103
agtggtttccatagccactttttgc

SEQ ID NO: 45875 - DNA, 25 bp, Artificial
  probe
  misc_feature (1)..(25): SEQ ID NO: 3237; WAN024A83_at; Start 9; Stop 33
tataaactgtattcacgtattcaaa

SEQ ID NO: 45876 - DNA, 25 bp, Artificial
  probe
  misc_feature (1)..(25): SEQ ID NO: 3237; WAN024A83_at; Start 82; Stop 106
ggtttccatagccactttttgctat

SEQ ID NO: 45877 - DNA, 25 bp, Artificial
  probe
  misc_feature (1)..(25): SEQ ID NO: 3237; WAN024A83_at; Start 21; Stop 45
tcacgtattcaaatcgtatatatag

SEQ ID NO: 45878 - DNA, 25 bp, Artificial
  probe
  misc_feature (1)..(25): SEQ ID NO: 3237; WAN024A83_at; Start 80; Stop 104
gtggtttccatagccactttttgct

SEQ ID NO: 45879 - DNA, 25 bp, Artificial
  probe
  misc_feature (1)..(25): SEQ ID NO: 3237; WAN024A83_at; Start 87; Stop 111
ccatagccactttttgctataatag

SEQ ID NO: 45880 - DNA, 25 bp, Artificial
  probe
  misc_feature (1)..(25): SEQ ID NO: 3237; WAN024A83_at; Start 14; Stop 38
actgtattcacgtattcaaatcgta

SEQ ID NO: 45881 - DNA, 25 bp, Artificial
  probe
  misc_feature (1)..(25): SEQ ID NO: 3237; WAN024A83_at; Start 12; Stop 36
aaactgtattcacgtattcaaatcg

SEQ ID NO: 45882 - DNA, 25 bp, Artificial
  probe
  misc_feature (1)..(25): SEQ ID NO: 3237; WAN024A83_at; Start 71; Stop 95
ctgtaaaaagtggtttccatagcca

SEQ ID NO: 45883 - DNA, 25 bp, Artificial
  probe
  misc_feature (1)..(25): SEQ ID NO: 3237; WAN024A83_at; Start 58; Stop 82
atctttagataaactgtaaaaagtg

SEQ ID NO: 45884 - DNA, 25 bp, Artificial
  probe
  misc_feature (1)..(25): SEQ ID NO: 3237; WAN024A83_at; Start 90; Stop 114
tagccactttttgctataatagagg

SEQ ID NO: 45885 - DNA, 25 bp, Artificial
  probe
  misc_feature (1)..(25): SEQ ID NO: 3237; WAN024A83_at; Start 2; Stop 26
cagtctttataaactgtattcacgt

SEQ ID NO: 45886 - DNA, 25 bp, Artificial
  probe
  misc_feature (1)..(25): SEQ ID NO: 3237; WAN024A83_at; Start 72; Stop 96
tgtaaaaagtggtttccatagccac

SEQ ID NO: 45887 - DNA, 25 bp, Artificial
  probe
  misc_feature (1)..(25): SEQ ID NO: 3237; WAN024A83_at; Start 94; Stop 118
cactttttgctataatagaggcagt

SEQ ID NO: 45888 - DNA, 25 bp, Artificial
  probe
  misc_feature (1)..(25): SEQ ID NO: 3237; WAN024A83_at; Start 4; Stop 28
gtctttataaactgtattcacgtat

SEQ ID NO: 45889 - DNA, 25 bp, Artificial
  probe
  misc_feature (1)..(25): SEQ ID NO: 3237; WAN024A83_at; Start 96; Stop 120
ctttttgctataatagaggcagtaa

SEQ ID NO: 45890 - DNA, 25 bp, Artificial
  probe
  misc_feature (1)..(25): SEQ ID NO: 3237; WAN024A83_at; Start 109; Stop 133
tagaggcagtaaaaatgaaggagtc

SEQ ID NO: 45891 - DNA, 25 bp, Artificial
  probe
  misc_feature (1)..(25): SEQ ID NO: 3237; WAN024A83_at; Start 6; Stop 30
ctttataaactgtattcacgtattc

SEQ ID NO: 45892 - DNA, 25 bp, Artificial
  probe
  misc_feature (1)..(25): SEQ ID NO: 3237; WAN024A83_at; Start 52; Stop 76
tattaaatctttagataaactgtaa

SEQ ID NO: 45893 - DNA, 25 bp, Artificial
  probe
  misc_feature (1)..(25): SEQ ID NO: 3237; WAN024A83_at; Start 106; Stop 130
taatagaggcagtaaaaatgaagga

SEQ ID NO: 45894 - DNA, 25 bp, Artificial
  probe
  misc_feature (1)..(25): SEQ ID NO: 3237; WAN024A83_at; Start 16; Stop 40
tgtattcacgtattcaaatcgtata

SEQ ID NO: 45895 - DNA, 25 bp, Artificial
  probe
  misc_feature (1)..(25): SEQ ID NO: 3237; WAN024A83_at; Start 26; Stop 50
tattcaaatcgtatatatagtcgat

SEQ ID NO: 45896 - DNA, 25 bp, Artificial
  probe
  misc_feature (1)..(25): SEQ ID NO: 3237; WAN024A83_at; Start 1; Stop 25
ccagtctttataaactgtattcacg

SEQ ID NO: 45897 - DNA, 25 bp, Artificial
  probe
  misc_feature (1)..(25): SEQ ID NO: 3237; WAN024A83_at; Start 93; Stop 117
ccactttttgctataatagaggcag

SEQ ID NO: 45898 - DNA, 25 bp, Artificial
  probe
  misc_feature (1)..(25): SEQ ID NO: 3237; WAN024A83_at; Start 110; Stop 134
agaggcagtaaaaatgaaggagtcg

SEQ ID NO: 45899 - DNA, 25 bp, Artificial
  probe
  misc_feature (1)..(25): SEQ ID NO: 3237; WAN024A83_at; Start 103; Stop 127
ctataatagaggcagtaaaaatgaa

SEQ ID NO: 45900 - DNA, 25 bp, Artificial
  probe
  misc_feature (1)..(25): SEQ ID NO: 448; WAN024A84_at; Start 108; Stop 132
gaatacgtgaatacagtttataaag

SEQ ID NO: 45901 - DNA, 25 bp, Artificial
  probe
  misc_feature (1)..(25): SEQ ID NO: 448; WAN024A84_at; Start 78; Stop 102
gatttaataaatcgactatatatac

SEQ ID NO: 45902 - DNA, 25 bp, Artificial
  probe
  misc_feature (1)..(25): SEQ ID NO: 448; WAN024A84_at; Start 32; Stop 56
atagcaaaaagtggctatggaaacc

SEQ ID NO: 45903 - DNA, 25 bp, Artificial
  probe
  misc_feature (1)..(25): SEQ ID NO: 448; WAN024A84_at; Start 24; Stop 48
cctctattatagcaaaaagtggcta

SEQ ID NO: 45904 - DNA, 25 bp, Artificial
  probe
  misc_feature (1)..(25): SEQ ID NO: 448; WAN024A84_at; Start 8; Stop 32
tccttcatttttactgcctctatta

SEQ ID NO: 45905 - DNA, 25 bp, Artificial
  probe
  misc_feature (1)..(25): SEQ ID NO: 448; WAN024A84_at; Start 28; Stop 52
tattatagcaaaaagtggctatgga

SEQ ID NO: 45906 - DNA, 25 bp, Artificial
  probe
  misc_feature (1)..(25): SEQ ID NO: 448; WAN024A84_at; Start 42; Stop 66
gtggctatggaaaccactttttaca

SEQ ID NO: 45907 - DNA, 25 bp, Artificial
  probe
  misc_feature (1)..(25): SEQ ID NO: 448; WAN024A84_at; Start 113; Stop 137
cgtgaatacagtttataaagactgg

SEQ ID NO: 45908 - DNA, 25 bp, Artificial
  probe
  misc_feature (1)..(25): SEQ ID NO: 448; WAN024A84_at; Start 34; Stop 58
agcaaaaagtggctatggaaaccac

SEQ ID NO: 45909 - DNA, 25 bp, Artificial
  probe
  misc_feature (1)..(25): SEQ ID NO: 448; WAN024A84_at; Start 102; Stop 126
cgatttgaatacgtgaatacagttt

SEQ ID NO: 45910 - DNA, 25 bp, Artificial
  probe
  misc_feature (1)..(25): SEQ ID NO: 448; WAN024A84_at; Start 5; Stop 29
gactccttcatttttactgcctcta

SEQ ID NO: 45911 - DNA, 25 bp, Artificial
  probe
  misc_feature (1)..(25): SEQ ID NO: 448; WAN024A84_at; Start 26; Stop 50
tctattatagcaaaaagtggctatg

SEQ ID NO: 45912 - DNA, 25 bp, Artificial
  probe
  misc_feature (1)..(25): SEQ ID NO: 448; WAN024A84_at; Start 27; Stop 51
ctattatagcaaaaagtggctatgg

SEQ ID NO: 45913 - DNA, 25 bp, Artificial
  probe
  misc_feature (1)..(25): SEQ ID NO: 448; WAN024A84_at; Start 111; Stop 135
tacgtgaatacagtttataaagact

SEQ ID NO: 45914 - DNA, 25 bp, Artificial
  probe
  misc_feature (1)..(25): SEQ ID NO: 448; WAN024A84_at; Start 93; Stop 117
ctatatatacgatttgaatacgtga

SEQ ID NO: 45915 - DNA, 25 bp, Artificial
  probe
  misc_feature (1)..(25): SEQ ID NO: 448; WAN024A84_at; Start 43; Stop 67
tggctatggaaaccactttttacag

SEQ ID NO: 45916 - DNA, 25 bp, Artificial
  probe
  misc_feature (1)..(25): SEQ ID NO: 448; WAN024A84_at; Start 103; Stop 127
gatttgaatacgtgaatacagttta

SEQ ID NO: 45917 - DNA, 25 bp, Artificial
  probe
  misc_feature (1)..(25): SEQ ID NO: 448; WAN024A84_at; Start 31; Stop 55
tatagcaaaaagtggctatggaaac

SEQ ID NO: 45918 - DNA, 25 bp, Artificial
  probe
  misc_feature (1)..(25): SEQ ID NO: 448; WAN024A84_at; Start 19; Stop 43
tactgcctctattatagcaaaaagt

SEQ ID NO: 45919 - DNA, 25 bp, Artificial
  probe
  misc_feature (1)..(25): SEQ ID NO: 448; WAN024A84_at; Start 1; Stop 25
agccgactccttcatttttactgcc

SEQ ID NO: 45920 - DNA, 25 bp, Artificial
  probe
  misc_feature (1)..(25): SEQ ID NO: 448; WAN024A84_at; Start 18; Stop 42
ttactgcctctattatagcaaaaag

SEQ ID NO: 45921 - DNA, 25 bp, Artificial
  probe
  misc_feature (1)..(25): SEQ ID NO: 448; WAN024A84_at; Start 89; Stop 113
tcgactatatatacgatttgaatac

SEQ ID NO: 45922 - DNA, 25 bp, Artificial
  probe
  misc_feature (1)..(25): SEQ ID NO: 448; WAN024A84_at; Start 98; Stop 122
tatacgatttgaatacgtgaataca

SEQ ID NO: 45923 - DNA, 25 bp, Artificial
  probe
  misc_feature (1)..(25): SEQ ID NO: 448; WAN024A84_at; Start 35; Stop 59
gcaaaaagtggctatggaaaccact

SEQ ID NO: 45924 - DNA, 25 bp, Artificial
  probe
  misc_feature (1)..(25): SEQ ID NO: 448; WAN024A84_at; Start 23; Stop 47
gcctctattatagcaaaaagtggct

SEQ ID NO: 45925 - DNA, 25 bp, Artificial
  probe
  misc_feature (1)..(25): SEQ ID NO: 448; WAN024A84_at; Start 2; Stop 26
gccgactccttcatttttactgcct

SEQ ID NO: 45926 - DNA, 25 bp, Artificial
  probe
  misc_feature (1)..(25): SEQ ID NO: 448; WAN024A84_at; Start 56; Stop 80
cactttttacagtttatctaaagat

SEQ ID NO: 45927 - DNA, 25 bp, Artificial
  probe
  misc_feature (1)..(25): SEQ ID NO: 448; WAN024A84_at; Start 11; Stop 35
ttcatttttactgcctctattatag

SEQ ID NO: 45928 - DNA, 25 bp, Artificial
  probe
  misc_feature (1)..(25): SEQ ID NO: 448; WAN024A84_at; Start 36; Stop 60
caaaaagtggctatggaaaccactt

SEQ ID NO: 45929 - DNA, 25 bp, Artificial
  probe
  misc_feature (1)..(25): SEQ ID NO: 448; WAN024A84_at; Start 21; Stop 45
ctgcctctattatagcaaaaagtgg

SEQ ID NO: 45930 - DNA, 25 bp, Artificial
  probe
  misc_feature (1)..(25): SEQ ID NO: 448; WAN024A84_at; Start 70; Stop 94
tatctaaagatttaataaatcgact

SEQ ID NO: 45931 - DNA, 25 bp, Artificial
  probe
  misc_feature (1)..(25): SEQ ID NO: 448; WAN024A84_at; Start 90; Stop 114
cgactatatatacgatttgaatacg

SEQ ID NO: 45932 - DNA, 25 bp, Artificial
  probe
  misc_feature (1)..(25): SEQ ID NO: 448; WAN024A84_at; Start 22; Stop 46
tgcctctattatagcaaaaagtggc

SEQ ID NO: 45933 - DNA, 25 bp, Artificial
  probe
  misc_feature (1)..(25): SEQ ID NO: 448; WAN024A84_at; Start 100; Stop 124
tacgatttgaatacgtgaatacagt

SEQ ID NO: 45934 - DNA, 25 bp, Artificial
  probe
  misc_feature (1)..(25): SEQ ID NO: 4377; WAN024A85_at; Start 88; Stop 112
ttagattagagcacgggctaaaaga

SEQ ID NO: 45935 - DNA, 25 bp, Artificial
  probe
  misc_feature (1)..(25): SEQ ID NO: 4377; WAN024A85_at; Start 32; Stop 56
aaagctgacgagaaactttgtatct

SEQ ID NO: 45936 - DNA, 25 bp, Artificial
  probe
  misc_feature (1)..(25): SEQ ID NO: 4377; WAN024A85_at; Start 33; Stop 57
aagctgacgagaaactttgtatctt

SEQ ID NO: 45937 - DNA, 25 bp, Artificial
  probe
  misc_feature (1)..(25): SEQ ID NO: 4377; WAN024A85_at; Start 96; Stop 120
gagcacgggctaaaagatcggaaaa

SEQ ID NO: 45938 - DNA, 25 bp, Artificial
  probe
  misc_feature (1)..(25): SEQ ID NO: 4377; WAN024A85_at; Start 34; Stop 58
agctgacgagaaactttgtatcttt

SEQ ID NO: 45939 - DNA, 25 bp, Artificial
  probe
  misc_feature (1)..(25): SEQ ID NO: 4377; WAN024A85_at; Start 68; Stop 92
agctcttcgtcattaatatcttaga

SEQ ID NO: 45940 - DNA, 25 bp, Artificial
  probe
  misc_feature (1)..(25): SEQ ID NO: 4377; WAN024A85_at; Start 83; Stop 107
atatcttagattagagcacgggcta

SEQ ID NO: 45941 - DNA, 25 bp, Artificial
  probe
  misc_feature (1)..(25): SEQ ID NO: 4377; WAN024A85_at; Start 87; Stop 111
cttagattagagcacgggctaaaag

SEQ ID NO: 45942 - DNA, 25 bp, Artificial
  probe
  misc_feature (1)..(25): SEQ ID NO: 4377; WAN024A85_at; Start 18; Stop 42
tatgtaaataaaataaagctgacga

SEQ ID NO: 45943 - DNA, 25 bp, Artificial
  probe
  misc_feature (1)..(25): SEQ ID NO: 4377; WAN024A85_at; Start 84; Stop 108
tatcttagattagagcacgggctaa

SEQ ID NO: 45944 - DNA, 25 bp, Artificial
  probe
  misc_feature (1)..(25): SEQ ID NO: 4377; WAN024A85_at; Start 35; Stop 59
gctgacgagaaactttgtatctttt

SEQ ID NO: 45945 - DNA, 25 bp, Artificial
  probe
  misc_feature (1)..(25): SEQ ID NO: 4377; WAN024A85_at; Start 22; Stop 46
taaataaaataaagctgacgagaaa

SEQ ID NO: 45946 - DNA, 25 bp, Artificial
  probe
  misc_feature (1)..(25): SEQ ID NO: 4377; WAN024A85_at; Start 37; Stop 61
tgacgagaaactttgtatcttttag

SEQ ID NO: 45947 - DNA, 25 bp, Artificial
  probe
  misc_feature (1)..(25): SEQ ID NO: 4377; WAN024A85_at; Start 86; Stop 110
tcttagattagagcacgggctaaaa

SEQ ID NO: 45948 - DNA, 25 bp, Artificial
  probe
  misc_feature (1)..(25): SEQ ID NO: 4377; WAN024A85_at; Start 27; Stop 51
aaaataaagctgacgagaaactttg

SEQ ID NO: 45949 - DNA, 25 bp, Artificial
  probe
  misc_feature (1)..(25): SEQ ID NO: 4377; WAN024A85_at; Start 81; Stop 105
taatatcttagattagagcacgggc

SEQ ID NO: 45950 - DNA, 25 bp, Artificial
  probe
  misc_feature (1)..(25): SEQ ID NO: 4377; WAN024A85_at; Start 95; Stop 119
agagcacgggctaaaagatcggaaa

SEQ ID NO: 45951 - DNA, 25 bp, Artificial
  probe
  misc_feature (1)..(25): SEQ ID NO: 4377; WAN024A85_at; Start 64; Stop 88
gcagagctcttcgtcattaatatct

SEQ ID NO: 45952 - DNA, 25 bp, Artificial
  probe
  misc_feature (1)..(25): SEQ ID NO: 4377; WAN024A85_at; Start 67; Stop 91
gagctcttcgtcattaatatcttag

SEQ ID NO: 45953 - DNA, 25 bp, Artificial
  probe
  misc_feature (1)..(25): SEQ ID NO: 4377; WAN024A85_at; Start 20; Stop 44
tgtaaataaaataaagctgacgaga

SEQ ID NO: 45954 - DNA, 25 bp, Artificial
  probe
  misc_feature (1)..(25): SEQ ID NO: 4377; WAN024A85_at; Start 49; Stop 73
ttgtatcttttaggtgcagagctct

SEQ ID NO: 45955 - DNA, 25 bp, Artificial
  probe
  misc_feature (1)..(25): SEQ ID NO: 4377; WAN024A85_at; Start 69; Stop 93
gctcttcgtcattaatatcttagat

SEQ ID NO: 45956 - DNA, 25 bp, Artificial
  probe
  misc_feature (1)..(25): SEQ ID NO: 4377; WAN024A85_at; Start 24; Stop 48
aataaaataaagctgacgagaaact

SEQ ID NO: 45957 - DNA, 25 bp, Artificial
  probe
  misc_feature (1)..(25): SEQ ID NO: 4377; WAN024A85_at; Start 63; Stop 87
tgcagagctcttcgtcattaatatc

SEQ ID NO: 45958 - DNA, 25 bp, Artificial
  probe
  misc_feature (1)..(25): SEQ ID NO: 4377; WAN024A85_at; Start 60; Stop 84
aggtgcagagctcttcgtcattaat

SEQ ID NO: 45959 - DNA, 25 bp, Artificial
  probe
  misc_feature (1)..(25): SEQ ID NO: 4377; WAN024A85_at; Start 29; Stop 53
aataaagctgacgagaaactttgta

SEQ ID NO: 45960 - DNA, 25 bp, Artificial
  probe
  misc_feature (1)..(25): SEQ ID NO: 4377; WAN024A85_at; Start 31; Stop 55
taaagctgacgagaaactttgtatc

SEQ ID NO: 45961 - DNA, 25 bp, Artificial
  probe
  misc_feature (1)..(25): SEQ ID NO: 4377; WAN024A85_at; Start 28; Stop 52
aaataaagctgacgagaaactttgt

SEQ ID NO: 45962 - DNA, 25 bp, Artificial
  probe
  misc_feature (1)..(25): SEQ ID NO: 4377; WAN024A85_at; Start 85; Stop 109
atcttagattagagcacgggctaaa

SEQ ID NO: 45963 - DNA, 25 bp, Artificial
  probe
  misc_feature (1)..(25): SEQ ID NO: 4377; WAN024A85_at; Start 65; Stop 89
cagagctcttcgtcattaatatctt

SEQ ID NO: 45964 - DNA, 25 bp, Artificial
  probe
  misc_feature (1)..(25): SEQ ID NO: 4377; WAN024A85_at; Start 82; Stop 106
aatatcttagattagagcacgggct

SEQ ID NO: 45965 - DNA, 25 bp, Artificial
  probe
  misc_feature (1)..(25): SEQ ID NO: 4377; WAN024A85_at; Start 61; Stop 85
ggtgcagagctcttcgtcattaata

SEQ ID NO: 45966 - DNA, 25 bp, Artificial
  probe
  misc_feature (1)..(25): SEQ ID NO: 4377; WAN024A85_at; Start 94; Stop 118
tagagcacgggctaaaagatcggaa

SEQ ID NO: 45967 - DNA, 25 bp, Artificial
  probe
  misc_feature (1)..(25): SEQ ID NO: 4377; WAN024A85_at; Start 62; Stop 86
gtgcagagctcttcgtcattaatat

SEQ ID NO: 45968 - DNA, 25 bp, Artificial
  probe
  misc_feature (1)..(25): SEQ ID NO: 3730; WAN024A86_at; Start 17; Stop 41
tccgatcttttagcccgtgctctaa

SEQ ID NO: 45969 - DNA, 25 bp, Artificial
  probe
  misc_feature (1)..(25): SEQ ID NO: 3730; WAN024A86_at; Start 51; Stop 75
ttaatgacgaagagctctgcaccta

SEQ ID NO: 45970 - DNA, 25 bp, Artificial
  probe
  misc_feature (1)..(25): SEQ ID NO: 3730; WAN024A86_at; Start 70; Stop 94
cacctaaaagatacaaagtttctcg

SEQ ID NO: 45971 - DNA, 25 bp, Artificial
  probe
  misc_feature (1)..(25): SEQ ID NO: 3730; WAN024A86_at; Start 44; Stop 68
taagatattaatgacgaagagctct

SEQ ID NO: 45972 - DNA, 25 bp, Artificial
  probe
  misc_feature (1)..(25): SEQ ID NO: 3730; WAN024A86_at; Start 79; Stop 103
gatacaaagtttctcgtcagcttta

SEQ ID NO: 45973 - DNA, 25 bp, Artificial
  probe
  misc_feature (1)..(25): SEQ ID NO: 3730; WAN024A86_at; Start 43; Stop 67
ctaagatattaatgacgaagagctc

SEQ ID NO: 45974 - DNA, 25 bp, Artificial
  probe
  misc_feature (1)..(25): SEQ ID NO: 3730; WAN024A86_at; Start 68; Stop 92
tgcacctaaaagatacaaagtttct

SEQ ID NO: 45975 - DNA, 25 bp, Artificial
  probe
  misc_feature (1)..(25): SEQ ID NO: 3730; WAN024A86_at; Start 32; Stop 56
cgtgctctaatctaagatattaatg

SEQ ID NO: 45976 - DNA, 25 bp, Artificial
  probe
  misc_feature (1)..(25): SEQ ID NO: 3730; WAN024A86_at; Start 83; Stop 107
caaagtttctcgtcagctttatttt

SEQ ID NO: 45977 - DNA, 25 bp, Artificial
  probe
  misc_feature (1)..(25): SEQ ID NO: 3730; WAN024A86_at; Start 56; Stop 80
gacgaagagctctgcacctaaaaga

SEQ ID NO: 45978 - DNA, 25 bp, Artificial
  probe
  misc_feature (1)..(25): SEQ ID NO: 3730; WAN024A86_at; Start 55; Stop 79
tgacgaagagctctgcacctaaaag

SEQ ID NO: 45979 - DNA, 25 bp, Artificial
  probe
  misc_feature (1)..(25): SEQ ID NO: 3730; WAN024A86_at; Start 47; Stop 71
gatattaatgacgaagagctctgca

SEQ ID NO: 45980 - DNA, 25 bp, Artificial
  probe
  misc_feature (1)..(25): SEQ ID NO: 3730; WAN024A86_at; Start 14; Stop 38
ttttccgatcttttagcccgtgctc

SEQ ID NO: 45981 - DNA, 25 bp, Artificial
  probe
  misc_feature (1)..(25): SEQ ID NO: 3730; WAN024A86_at; Start 90; Stop 114
tctcgtcagctttattttatttaca

SEQ ID NO: 45982 - DNA, 25 bp, Artificial
  probe
  misc_feature (1)..(25): SEQ ID NO: 3730; WAN024A86_at; Start 25; Stop 49
tttagcccgtgctctaatctaagat

SEQ ID NO: 45983 - DNA, 25 bp, Artificial
  probe
  misc_feature (1)..(25): SEQ ID NO: 3730; WAN024A86_at; Start 93; Stop 117
cgtcagctttattttatttacataa

SEQ ID NO: 45984 - DNA, 25 bp, Artificial
  probe
  misc_feature (1)..(25): SEQ ID NO: 3730; WAN024A86_at; Start 27; Stop 51
tagcccgtgctctaatctaagatat

SEQ ID NO: 45985 - DNA, 25 bp, Artificial
  probe
  misc_feature (1)..(25): SEQ ID NO: 3730; WAN024A86_at; Start 64; Stop 88
gctctgcacctaaaagatacaaagt

SEQ ID NO: 45986 - DNA, 25 bp, Artificial
  probe
  misc_feature (1)..(25): SEQ ID NO: 3730; WAN024A86_at; Start 48; Stop 72
atattaatgacgaagagctctgcac

SEQ ID NO: 45987 - DNA, 25 bp, Artificial
  probe
  misc_feature (1)..(25): SEQ ID NO: 3730; WAN024A86_at; Start 35; Stop 59
gctctaatctaagatattaatgacg

SEQ ID NO: 45988 - DNA, 25 bp, Artificial
  probe
  misc_feature (1)..(25): SEQ ID NO: 3730; WAN024A86_at; Start 50; Stop 74
attaatgacgaagagctctgcacct

SEQ ID NO: 45989 - DNA, 25 bp, Artificial
  probe
  misc_feature (1)..(25): SEQ ID NO: 3730; WAN024A86_at; Start 24; Stop 48
ttttagcccgtgctctaatctaaga

SEQ ID NO: 45990 - DNA, 25 bp, Artificial
  probe
  misc_feature (1)..(25): SEQ ID NO: 3730; WAN024A86_at; Start 76; Stop 100
aaagatacaaagtttctcgtcagct

SEQ ID NO: 45991 - DNA, 25 bp, Artificial
  probe
  misc_feature (1)..(25): SEQ ID NO: 3730; WAN024A86_at; Start 58; Stop 82
cgaagagctctgcacctaaaagata

SEQ ID NO: 45992 - DNA, 25 bp, Artificial
  probe
  misc_feature (1)..(25): SEQ ID NO: 3730; WAN024A86_at; Start 74; Stop 98
taaaagatacaaagtttctcgtcag

SEQ ID NO: 45993 - DNA, 25 bp, Artificial
  probe
  misc_feature (1)..(25): SEQ ID NO: 3730; WAN024A86_at; Start 62; Stop 86
gagctctgcacctaaaagatacaaa

SEQ ID NO: 45994 - DNA, 25 bp, Artificial
  probe
  misc_feature (1)..(25): SEQ ID NO: 3730; WAN024A86_at; Start 29; Stop 53
gcccgtgctctaatctaagatatta

SEQ ID NO: 45995 - DNA, 25 bp, Artificial
  probe
  misc_feature (1)..(25): SEQ ID NO: 3730; WAN024A86_at; Start 59; Stop 83
gaagagctctgcacctaaaagatac

SEQ ID NO: 45996 - DNA, 25 bp, Artificial
  probe
  misc_feature (1)..(25): SEQ ID NO: 3730; WAN024A86_at; Start 49; Stop 73
tattaatgacgaagagctctgcacc

SEQ ID NO: 45997 - DNA, 25 bp, Artificial
  probe
  misc_feature (1)..(25): SEQ ID NO: 3730; WAN024A86_at; Start 52; Stop 76
taatgacgaagagctctgcacctaa

SEQ ID NO: 45998 - DNA, 25 bp, Artificial
  probe
  misc_feature (1)..(25): SEQ ID NO: 3730; WAN024A86_at; Start 60; Stop 84
aagagctctgcacctaaaagataca

SEQ ID NO: 45999 - DNA, 25 bp, Artificial
  probe
  misc_feature (1)..(25): SEQ ID NO: 3730; WAN024A86_at; Start 53; Stop 77
aatgacgaagagctctgcacctaaa

SEQ ID NO: 46000 - DNA, 25 bp, Artificial
  probe
  misc_feature (1)..(25): SEQ ID NO: 3730; WAN024A86_at; Start 15; Stop 39
tttccgatcttttagcccgtgctct

SEQ ID NO: 46001 - DNA, 25 bp, Artificial
  probe
  misc_feature (1)..(25): SEQ ID NO: 3730; WAN024A86_at; Start 66; Stop 90
tctgcacctaaaagatacaaagttt

SEQ ID NO: 46002 - DNA, 25 bp, Artificial
  probe
  misc_feature (1)..(25): SEQ ID NO: 199; WAN024A87_at; Start 2; Stop 26
acgaagatagattagactggaaggt

SEQ ID NO: 46003 - DNA, 25 bp, Artificial
  probe
  misc_feature (1)..(25): SEQ ID NO: 199; WAN024A87_at; Start 26; Stop 50
ttatttccagtttctatcatataaa

SEQ ID NO: 46004 - DNA, 25 bp, Artificial
  probe
  misc_feature (1)..(25): SEQ ID NO: 199; WAN024A87_at; Start 39; Stop 63
ctatcatataaagtaaagggatatc

SEQ ID NO: 46005 - DNA, 25 bp, Artificial
  probe
  misc_feature (1)..(25): SEQ ID NO: 199; WAN024A87_at; Start 8; Stop 32
atagattagactggaaggttatttc

SEQ ID NO: 46006 - DNA, 25 bp, Artificial
  probe
  misc_feature (1)..(25): SEQ ID NO: 199; WAN024A87_at; Start 32; Stop 56
ccagtttctatcatataaagtaaag

SEQ ID NO: 46007 - DNA, 25 bp, Artificial
  probe
  misc_feature (1)..(25): SEQ ID NO: 199; WAN024A87_at; Start 12; Stop 36
attagactggaaggttatttccagt

SEQ ID NO: 46008 - DNA, 25 bp, Artificial
  probe
  misc_feature (1)..(25): SEQ ID NO: 199; WAN024A87_at; Start 7; Stop 31
gatagattagactggaaggttattt

SEQ ID NO: 46009 - DNA, 25 bp, Artificial
  probe
  misc_feature (1)..(25): SEQ ID NO: 199; WAN024A87_at; Start 20; Stop 44
ggaaggttatttccagtttctatca

SEQ ID NO: 46010 - DNA, 25 bp, Artificial
  probe
  misc_feature (1)..(25): SEQ ID NO: 199; WAN024A87_at; Start 37; Stop 61
ttctatcatataaagtaaagggata

SEQ ID NO: 46011 - DNA, 25 bp, Artificial
  probe
  misc_feature (1)..(25): SEQ ID NO: 199; WAN024A87_at; Start 29; Stop 53
tttccagtttctatcatataaagta

SEQ ID NO: 46012 - DNA, 25 bp, Artificial
  probe
  misc_feature (1)..(25): SEQ ID NO: 199; WAN024A87_at; Start 6; Stop 30
agatagattagactggaaggttatt

SEQ ID NO: 46013 - DNA, 25 bp, Artificial
  probe
  misc_feature (1)..(25): SEQ ID NO: 199; WAN024A87_at; Start 11; Stop 35
gattagactggaaggttatttccag

SEQ ID NO: 46014 - DNA, 25 bp, Artificial
  probe
  misc_feature (1)..(25): SEQ ID NO: 199; WAN024A87_at; Start 35; Stop 59
gtttctatcatataaagtaaaggga

SEQ ID NO: 46015 - DNA, 25 bp, Artificial
  probe
  misc_feature (1)..(25): SEQ ID NO: 199; WAN024A87_at; Start 36; Stop 60
tttctatcatataaagtaaagggat

SEQ ID NO: 46016 - DNA, 25 bp, Artificial
  probe
  misc_feature (1)..(25): SEQ ID NO: 199; WAN024A87_at; Start 10; Stop 34
agattagactggaaggttatttcca

SEQ ID NO: 46017 - DNA, 25 bp, Artificial
  probe
  misc_feature (1)..(25): SEQ ID NO: 199; WAN024A87_at; Start 23; Stop 47
aggttatttccagtttctatcatat

SEQ ID NO: 46018 - DNA, 25 bp, Artificial
  probe
  misc_feature (1)..(25): SEQ ID NO: 199; WAN024A87_at; Start 5; Stop 29
aagatagattagactggaaggttat

SEQ ID NO: 46019 - DNA, 25 bp, Artificial
  probe
  misc_feature (1)..(25): SEQ ID NO: 199; WAN024A87_at; Start 22; Stop 46
aaggttatttccagtttctatcata

SEQ ID NO: 46020 - DNA, 25 bp, Artificial
  probe
  misc_feature (1)..(25): SEQ ID NO: 199; WAN024A87_at; Start 27; Stop 51
tatttccagtttctatcatataaag

SEQ ID NO: 46021 - DNA, 25 bp, Artificial
  probe
  misc_feature (1)..(25): SEQ ID NO: 199; WAN024A87_at; Start 21; Stop 45
gaaggttatttccagtttctatcat

SEQ ID NO: 46022 - DNA, 25 bp, Artificial
  probe
  misc_feature (1)..(25): SEQ ID NO: 199; WAN024A87_at; Start 19; Stop 43
tggaaggttatttccagtttctatc

SEQ ID NO: 46023 - DNA, 25 bp, Artificial
  probe
  misc_feature (1)..(25): SEQ ID NO: 199; WAN024A87_at; Start 38; Stop 62
tctatcatataaagtaaagggatat

SEQ ID NO: 46024 - DNA, 25 bp, Artificial
  probe
  misc_feature (1)..(25): SEQ ID NO: 199; WAN024A87_at; Start 1; Stop 25
aacgaagatagattagactggaagg

SEQ ID NO: 46025 - DNA, 25 bp, Artificial
  probe
  misc_feature (1)..(25): SEQ ID NO: 199; WAN024A87_at; Start 34; Stop 58
agtttctatcatataaagtaaaggg

SEQ ID NO: 46026 - DNA, 25 bp, Artificial
  probe
  misc_feature (1)..(25): SEQ ID NO: 199; WAN024A87_at; Start 4; Stop 28
gaagatagattagactggaaggtta

SEQ ID NO: 46027 - DNA, 25 bp, Artificial
  probe
  misc_feature (1)..(25): SEQ ID NO: 199; WAN024A87_at; Start 9; Stop 33
tagattagactggaaggttatttcc

SEQ ID NO: 46028 - DNA, 25 bp, Artificial
  probe
  misc_feature (1)..(25): SEQ ID NO: 199; WAN024A87_at; Start 25; Stop 49
gttatttccagtttctatcatataa

SEQ ID NO: 46029 - DNA, 25 bp, Artificial
  probe
  misc_feature (1)..(25): SEQ ID NO: 199; WAN024A87_at; Start 18; Stop 42
ctggaaggttatttccagtttctat

SEQ ID NO: 46030 - DNA, 25 bp, Artificial
  probe
  misc_feature (1)..(25): SEQ ID NO: 199; WAN024A87_at; Start 28; Stop 52
atttccagtttctatcatataaagt

SEQ ID NO: 46031 - DNA, 25 bp, Artificial
  probe
  misc_feature (1)..(25): SEQ ID NO: 199; WAN024A87_at; Start 31; Stop 55
tccagtttctatcatataaagtaaa

SEQ ID NO: 46032 - DNA, 25 bp, Artificial
  probe
  misc_feature (1)..(25): SEQ ID NO: 199; WAN024A87_at; Start 30; Stop 54
ttccagtttctatcatataaagtaa

SEQ ID NO: 46033 - DNA, 25 bp, Artificial
  probe
  misc_feature (1)..(25): SEQ ID NO: 199; WAN024A87_at; Start 3; Stop 27
cgaagatagattagactggaaggtt

SEQ ID NO: 46034 - DNA, 25 bp, Artificial
  probe
  misc_feature (1)..(25): SEQ ID NO: 199; WAN024A87_at; Start 24; Stop 48
ggttatttccagtttctatcatata

SEQ ID NO: 46035 - DNA, 25 bp, Artificial
  probe
  misc_feature (1)..(25): SEQ ID NO: 199; WAN024A87_at; Start 33; Stop 57
cagtttctatcatataaagtaaagg

SEQ ID NO: 46036 - DNA, 25 bp, Artificial
  probe
  misc_feature (1)..(25): SEQ ID NO: 3630; WAN024A88_at; Start 22; Stop 46
atagaaactggaaataaccttccag

SEQ ID NO: 46037 - DNA, 25 bp, Artificial
  probe
  misc_feature (1)..(25): SEQ ID NO: 3630; WAN024A88_at; Start 31; Stop 55
ggaaataaccttccagtctaatcta

SEQ ID NO: 46038 - DNA, 25 bp, Artificial
  probe
  misc_feature (1)..(25): SEQ ID NO: 3630; WAN024A88_at; Start 32; Stop 56
gaaataaccttccagtctaatctat

SEQ ID NO: 46039 - DNA, 25 bp, Artificial
  probe
  misc_feature (1)..(25): SEQ ID NO: 3630; WAN024A88_at; Start 12; Stop 36
actttatatgatagaaactggaaat

SEQ ID NO: 46040 - DNA, 25 bp, Artificial
  probe
  misc_feature (1)..(25): SEQ ID NO: 3630; WAN024A88_at; Start 19; Stop 43
atgatagaaactggaaataaccttc

SEQ ID NO: 46041 - DNA, 25 bp, Artificial
  probe
  misc_feature (1)..(25): SEQ ID NO: 3630; WAN024A88_at; Start 9; Stop 33
tttactttatatgatagaaactgga

SEQ ID NO: 46042 - DNA, 25 bp, Artificial
  probe
  misc_feature (1)..(25): SEQ ID NO: 3630; WAN024A88_at; Start 13; Stop 37
ctttatatgatagaaactggaaata

SEQ ID NO: 46043 - DNA, 25 bp, Artificial
  probe
  misc_feature (1)..(25): SEQ ID NO: 3630; WAN024A88_at; Start 21; Stop 45
gatagaaactggaaataaccttcca

SEQ ID NO: 46044 - DNA, 25 bp, Artificial
  probe
  misc_feature (1)..(25): SEQ ID NO: 3630; WAN024A88_at; Start 2; Stop 26
atatccctttactttatatgataga

SEQ ID NO: 46045 - DNA, 25 bp, Artificial
  probe
  misc_feature (1)..(25): SEQ ID NO: 3630; WAN024A88_at; Start 30; Stop 54
tggaaataaccttccagtctaatct

SEQ ID NO: 46046 - DNA, 25 bp, Artificial
  probe
  misc_feature (1)..(25): SEQ ID NO: 3630; WAN024A88_at; Start 14; Stop 38
tttatatgatagaaactggaaataa

SEQ ID NO: 46047 - DNA, 25 bp, Artificial
  probe
  misc_feature (1)..(25): SEQ ID NO: 3630; WAN024A88_at; Start 6; Stop 30
ccctttactttatatgatagaaact

SEQ ID NO: 46048 - DNA, 25 bp, Artificial
  probe
  misc_feature (1)..(25): SEQ ID NO: 3630; WAN024A88_at; Start 20; Stop 44
tgatagaaactggaaataaccttcc

SEQ ID NO: 46049 - DNA, 25 bp, Artificial
  probe
  misc_feature (1)..(25): SEQ ID NO: 3630; WAN024A88_at; Start 16; Stop 40
tatatgatagaaactggaaataacc

SEQ ID NO: 46050 - DNA, 25 bp, Artificial
  probe
  misc_feature (1)..(25): SEQ ID NO: 3630; WAN024A88_at; Start 10; Stop 34
ttactttatatgatagaaactggaa

SEQ ID NO: 46051 - DNA, 25 bp, Artificial
  probe
  misc_feature (1)..(25): SEQ ID NO: 3630; WAN024A88_at; Start 18; Stop 42
tatgatagaaactggaaataacctt

SEQ ID NO: 46052 - DNA, 25 bp, Artificial
  probe
  misc_feature (1)..(25): SEQ ID NO: 3630; WAN024A88_at; Start 1; Stop 25
gatatccctttactttatatgatag

SEQ ID NO: 46053 - DNA, 25 bp, Artificial
  probe
  misc_feature (1)..(25): SEQ ID NO: 3630; WAN024A88_at; Start 28; Stop 52
actggaaataaccttccagtctaat

SEQ ID NO: 46054 - DNA, 25 bp, Artificial
  probe
  misc_feature (1)..(25): SEQ ID NO: 3630; WAN024A88_at; Start 17; Stop 41
atatgatagaaactggaaataacct

SEQ ID NO: 46055 - DNA, 25 bp, Artificial
  probe
  misc_feature (1)..(25): SEQ ID NO: 3630; WAN024A88_at; Start 8; Stop 32
ctttactttatatgatagaaactgg

SEQ ID NO: 46056 - DNA, 25 bp, Artificial
  probe
  misc_feature (1)..(25): SEQ ID NO: 3630; WAN024A88_at; Start 29; Stop 53
ctggaaataaccttccagtctaatc

SEQ ID NO: 46057 - DNA, 25 bp, Artificial
  probe
  misc_feature (1)..(25): SEQ ID NO: 3630; WAN024A88_at; Start 11; Stop 35
tactttatatgatagaaactggaaa

SEQ ID NO: 46058 - DNA, 25 bp, Artificial
  probe
  misc_feature (1)..(25): SEQ ID NO: 3630; WAN024A88_at; Start 5; Stop 29
tccctttactttatatgatagaaac

SEQ ID NO: 46059 - DNA, 25 bp, Artificial
  probe
  misc_feature (1)..(25): SEQ ID NO: 3630; WAN024A88_at; Start 4; Stop 28
atccctttactttatatgatagaaa

SEQ ID NO: 46060 - DNA, 25 bp, Artificial
  probe
  misc_feature (1)..(25): SEQ ID NO: 3630; WAN024A88_at; Start 15; Stop 39
ttatatgatagaaactggaaataac

SEQ ID NO: 46061 - DNA, 25 bp, Artificial
  probe
  misc_feature (1)..(25): SEQ ID NO: 3630; WAN024A88_at; Start 3; Stop 27
tatccctttactttatatgatagaa

SEQ ID NO: 46062 - DNA, 25 bp, Artificial
  probe
  misc_feature (1)..(25): SEQ ID NO: 3630; WAN024A88_at; Start 7; Stop 31
cctttactttatatgatagaaactg

SEQ ID NO: 46063 - DNA, 25 bp, Artificial
  probe
  misc_feature (1)..(25): SEQ ID NO: 544; WAN024A8B_at; Start 21; Stop 45
gctttatactttatcatttctaact

SEQ ID NO: 46064 - DNA, 25 bp, Artificial
  probe
  misc_feature (1)..(25): SEQ ID NO: 544; WAN024A8B_at; Start 128; Stop 152
gagaatcggttttctaaataaatca

SEQ ID NO: 46065 - DNA, 25 bp, Artificial
  probe
  misc_feature (1)..(25): SEQ ID NO: 544; WAN024A8B_at; Start 97; Stop 121
tcatcagtaaaaaataaccgatctc

SEQ ID NO: 46066 - DNA, 25 bp, Artificial
  probe
  misc_feature (1)..(25): SEQ ID NO: 544; WAN024A8B_at; Start 148; Stop 172
aatcaaactgatcatttacataaca

SEQ ID NO: 46067 - DNA, 25 bp, Artificial
  probe
  misc_feature (1)..(25): SEQ ID NO: 544; WAN024A8B_at; Start 150; Stop 174
tcaaactgatcatttacataacata

SEQ ID NO: 46068 - DNA, 25 bp, Artificial
  probe
  misc_feature (1)..(25): SEQ ID NO: 544; WAN024A8B_at; Start 95; Stop 119
cctcatcagtaaaaaataaccgatc

SEQ ID NO: 46069 - DNA, 25 bp, Artificial
  probe
  misc_feature (1)..(25): SEQ ID NO: 544; WAN024A8B_at; Start 79; Stop 103
atttatatgtaaaattcctcatcag

SEQ ID NO: 46070 - DNA, 25 bp, Artificial
  probe
  misc_feature (1)..(25): SEQ ID NO: 544; WAN024A8B_at; Start 3; Stop 27
acagtaaactcctttctagctttat

SEQ ID NO: 46071 - DNA, 25 bp, Artificial
  probe
  misc_feature (1)..(25): SEQ ID NO: 544; WAN024A8B_at; Start 96; Stop 120
ctcatcagtaaaaaataaccgatct

SEQ ID NO: 46072 - DNA, 25 bp, Artificial
  probe
  misc_feature (1)..(25): SEQ ID NO: 544; WAN024A8B_at; Start 35; Stop 59
catttctaacttaattatagtctta

SEQ ID NO: 46073 - DNA, 25 bp, Artificial
  probe
  misc_feature (1)..(25): SEQ ID NO: 544; WAN024A8B_at; Start 94; Stop 118
tcctcatcagtaaaaaataaccgat

SEQ ID NO: 46074 - DNA, 25 bp, Artificial
  probe
  misc_feature (1)..(25): SEQ ID NO: 544; WAN024A8B_at; Start 138; Stop 162
tttctaaataaatcaaactgatcat

SEQ ID NO: 46075 - DNA, 25 bp, Artificial
  probe
  misc_feature (1)..(25): SEQ ID NO: 544; WAN024A8B_at; Start 2; Stop 26
tacagtaaactcctttctagcttta

SEQ ID NO: 46076 - DNA, 25 bp, Artificial
  probe
  misc_feature (1)..(25): SEQ ID NO: 544; WAN024A8B_at; Start 78; Stop 102
tatttatatgtaaaattcctcatca

SEQ ID NO: 46077 - DNA, 25 bp, Artificial
  probe
  misc_feature (1)..(25): SEQ ID NO: 544; WAN024A8B_at; Start 152; Stop 176
aaactgatcatttacataacataaa

SEQ ID NO: 46078 - DNA, 25 bp, Artificial
  probe
  misc_feature (1)..(25): SEQ ID NO: 544; WAN024A8B_at; Start 82; Stop 106
tatatgtaaaattcctcatcagtaa

SEQ ID NO: 46079 - DNA, 25 bp, Artificial
  probe
  misc_feature (1)..(25): SEQ ID NO: 544; WAN024A8B_at; Start 100; Stop 124
tcagtaaaaaataaccgatctcatt

SEQ ID NO: 46080 - DNA, 25 bp, Artificial
  probe
  misc_feature (1)..(25): SEQ ID NO: 544; WAN024A8B_at; Start 13; Stop 37
cctttctagctttatactttatcat

SEQ ID NO: 46081 - DNA, 25 bp, Artificial
  probe
  misc_feature (1)..(25): SEQ ID NO: 544; WAN024A8B_at; Start 4; Stop 28
cagtaaactcctttctagctttata

SEQ ID NO: 46082 - DNA, 25 bp, Artificial
  probe
  misc_feature (1)..(25): SEQ ID NO: 544; WAN024A8B_at; Start 93; Stop 117
ttcctcatcagtaaaaaataaccga

SEQ ID NO: 46083 - DNA, 25 bp, Artificial
  probe
  misc_feature (1)..(25): SEQ ID NO: 544; WAN024A8B_at; Start 32; Stop 56
tatcatttctaacttaattatagtc

SEQ ID NO: 46084 - DNA, 25 bp, Artificial
  probe
  misc_feature (1)..(25): SEQ ID NO: 544; WAN024A8B_at; Start 12; Stop 36
tcctttctagctttatactttatca

SEQ ID NO: 46085 - DNA, 25 bp, Artificial
  probe
  misc_feature (1)..(25): SEQ ID NO: 544; WAN024A8B_at; Start 84; Stop 108
tatgtaaaattcctcatcagtaaaa

SEQ ID NO: 46086 - DNA, 25 bp, Artificial
  probe
  misc_feature (1)..(25): SEQ ID NO: 544; WAN024A8B_at; Start 80; Stop 104
tttatatgtaaaattcctcatcagt

SEQ ID NO: 46087 - DNA, 25 bp, Artificial
  probe
  misc_feature (1)..(25): SEQ ID NO: 544; WAN024A8B_at; Start 136; Stop 160
gttttctaaataaatcaaactgatc

SEQ ID NO: 46088 - DNA, 25 bp, Artificial
  probe
  misc_feature (1)..(25): SEQ ID NO: 544; WAN024A8B_at; Start 98; Stop 122
catcagtaaaaaataaccgatctca

SEQ ID NO: 46089 - DNA, 25 bp, Artificial
  probe
  misc_feature (1)..(25): SEQ ID NO: 544; WAN024A8B_at; Start 126; Stop 150
ctgagaatcggttttctaaataaat

SEQ ID NO: 46090 - DNA, 25 bp, Artificial
  probe
  misc_feature (1)..(25): SEQ ID NO: 544; WAN024A8B_at; Start 127; Stop 151
tgagaatcggttttctaaataaatc

SEQ ID NO: 46091 - DNA, 25 bp, Artificial
  probe
  misc_feature (1)..(25): SEQ ID NO: 544; WAN024A8B_at; Start 17; Stop 41
tctagctttatactttatcatttct

SEQ ID NO: 46092 - DNA, 25 bp, Artificial
  probe
  misc_feature (1)..(25): SEQ ID NO: 544; WAN024A8B_at; Start 74; Stop 98
caattatttatatgtaaaattcctc

SEQ ID NO: 46093 - DNA, 25 bp, Artificial
  probe
  misc_feature (1)..(25): SEQ ID NO: 544; WAN024A8B_at; Start 157; Stop 181
gatcatttacataacataaattatg

SEQ ID NO: 46094 - DNA, 25 bp, Artificial
  probe
  misc_feature (1)..(25): SEQ ID NO: 544; WAN024A8B_at; Start 86; Stop 110
tgtaaaattcctcatcagtaaaaaa

SEQ ID NO: 46095 - DNA, 25 bp, Artificial
  probe
  misc_feature (1)..(25): SEQ ID NO: 544; WAN024A8B_at; Start 88; Stop 112
taaaattcctcatcagtaaaaaata

SEQ ID NO: 46096 - DNA, 25 bp, Artificial
  probe
  misc_feature (1)..(25): SEQ ID NO: 544; WAN024A8B_at; Start 151; Stop 175
caaactgatcatttacataacataa

SEQ ID NO: 46097 - DNA, 25 bp, Artificial
  probe
  misc_feature (1)..(25): SEQ ID NO: 4560; WAN024A8C_at; Start 135; Stop 159
taagactataattaagttagaaatg

SEQ ID NO: 46098 - DNA, 25 bp, Artificial
  probe
  misc_feature (1)..(25): SEQ ID NO: 4560; WAN024A8C_at; Start 169; Stop 193
aaagctagaaaggagtttactgtat

SEQ ID NO: 46099 - DNA, 25 bp, Artificial
  probe
  misc_feature (1)..(25): SEQ ID NO: 4560; WAN024A8C_at; Start 167; Stop 191
ataaagctagaaaggagtttactgt

SEQ ID NO: 46100 - DNA, 25 bp, Artificial
  probe
  misc_feature (1)..(25): SEQ ID NO: 4560; WAN024A8C_at; Start 150; Stop 174
gttagaaatgataaagtataaagct

SEQ ID NO: 46101 - DNA, 25 bp, Artificial
  probe
  misc_feature (1)..(25): SEQ ID NO: 4560; WAN024A8C_at; Start 96; Stop 120
gaggaattttacatataaataattg

SEQ ID NO: 46102 - DNA, 25 bp, Artificial
  probe
  misc_feature (1)..(25): SEQ ID NO: 4560; WAN024A8C_at; Start 22; Stop 46
tgttatgtaaatgatcagtttgatt

SEQ ID NO: 46103 - DNA, 25 bp, Artificial
  probe
  misc_feature (1)..(25): SEQ ID NO: 4560; WAN024A8C_at; Start 73; Stop 97
gagatcggttattttttactgatga

SEQ ID NO: 46104 - DNA, 25 bp, Artificial
  probe
  misc_feature (1)..(25): SEQ ID NO: 4560; WAN024A8C_at; Start 77; Stop 101
tcggttattttttactgatgaggaa

SEQ ID NO: 46105 - DNA, 25 bp, Artificial
  probe
  misc_feature (1)..(25): SEQ ID NO: 4560; WAN024A8C_at; Start 166; Stop 190
tataaagctagaaaggagtttactg

SEQ ID NO: 46106 - DNA, 25 bp, Artificial
  probe
  misc_feature (1)..(25): SEQ ID NO: 4560; WAN024A8C_at; Start 74; Stop 98
agatcggttattttttactgatgag

SEQ ID NO: 46107 - DNA, 25 bp, Artificial
  probe
  misc_feature (1)..(25): SEQ ID NO: 4560; WAN024A8C_at; Start 160; Stop 184
ataaagtataaagctagaaaggagt

SEQ ID NO: 46108 - DNA, 25 bp, Artificial
  probe
  misc_feature (1)..(25): SEQ ID NO: 4560; WAN024A8C_at; Start 72; Stop 96
tgagatcggttattttttactgatg

SEQ ID NO: 46109 - DNA, 25 bp, Artificial
  probe
  misc_feature (1)..(25): SEQ ID NO: 4560; WAN024A8C_at; Start 154; Stop 178
gaaatgataaagtataaagctagaa

SEQ ID NO: 46110 - DNA, 25 bp, Artificial
  probe
  misc_feature (1)..(25): SEQ ID NO: 4560; WAN024A8C_at; Start 86; Stop 110
ttttactgatgaggaattttacata

SEQ ID NO: 46111 - DNA, 25 bp, Artificial
  probe
  misc_feature (1)..(25): SEQ ID NO: 4560; WAN024A8C_at; Start 168; Stop 192
taaagctagaaaggagtttactgta

SEQ ID NO: 46112 - DNA, 25 bp, Artificial
  probe
  misc_feature (1)..(25): SEQ ID NO: 4560; WAN024A8C_at; Start 34; Stop 58
gatcagtttgatttatttagaaaac

SEQ ID NO: 46113 - DNA, 25 bp, Artificial
  probe
  misc_feature (1)..(25): SEQ ID NO: 4560; WAN024A8C_at; Start 20; Stop 44
tatgttatgtaaatgatcagtttga

SEQ ID NO: 46114 - DNA, 25 bp, Artificial
  probe
  misc_feature (1)..(25): SEQ ID NO: 4560; WAN024A8C_at; Start 99; Stop 123
gaattttacatataaataattgaac

SEQ ID NO: 46115 - DNA, 25 bp, Artificial
  probe
  misc_feature (1)..(25): SEQ ID NO: 4560; WAN024A8C_at; Start 90; Stop 114
actgatgaggaattttacatataaa

SEQ ID NO: 46116 - DNA, 25 bp, Artificial
  probe
  misc_feature (1)..(25): SEQ ID NO: 4560; WAN024A8C_at; Start 13; Stop 37
cataatttatgttatgtaaatgatc

SEQ ID NO: 46117 - DNA, 25 bp, Artificial
  probe
  misc_feature (1)..(25): SEQ ID NO: 4560; WAN024A8C_at; Start 93; Stop 117
gatgaggaattttacatataaataa

SEQ ID NO: 46118 - DNA, 25 bp, Artificial
  probe
  misc_feature (1)..(25): SEQ ID NO: 4560; WAN024A8C_at; Start 158; Stop 182
tgataaagtataaagctagaaagga

SEQ ID NO: 46119 - DNA, 25 bp, Artificial
  probe
  misc_feature (1)..(25): SEQ ID NO: 4560; WAN024A8C_at; Start 159; Stop 183
gataaagtataaagctagaaaggag

SEQ ID NO: 46120 - DNA, 25 bp, Artificial
  probe
  misc_feature (1)..(25): SEQ ID NO: 4560; WAN024A8C_at; Start 91; Stop 115
ctgatgaggaattttacatataaat

SEQ ID NO: 46121 - DNA, 25 bp, Artificial
  probe
  misc_feature (1)..(25): SEQ ID NO: 4560; WAN024A8C_at; Start 87; Stop 111
tttactgatgaggaattttacatat

SEQ ID NO: 46122 - DNA, 25 bp, Artificial
  probe
  misc_feature (1)..(25): SEQ ID NO: 4560; WAN024A8C_at; Start 84; Stop 108
ttttttactgatgaggaattttaca

SEQ ID NO: 46123 - DNA, 25 bp, Artificial
  probe
  misc_feature (1)..(25): SEQ ID NO: 4560; WAN024A8C_at; Start 76; Stop 100
atcggttattttttactgatgagga

SEQ ID NO: 46124 - DNA, 25 bp, Artificial
  probe
  misc_feature (1)..(25): SEQ ID NO: 4560; WAN024A8C_at; Start 75; Stop 99
gatcggttattttttactgatgagg

SEQ ID NO: 46125 - DNA, 25 bp, Artificial
  probe
  misc_feature (1)..(25): SEQ ID NO: 4560; WAN024A8C_at; Start 156; Stop 180
aatgataaagtataaagctagaaag

SEQ ID NO: 46126 - DNA, 25 bp, Artificial
  probe
  misc_feature (1)..(25): SEQ ID NO: 4560; WAN024A8C_at; Start 138; Stop 162
gactataattaagttagaaatgata

SEQ ID NO: 46127 - DNA, 25 bp, Artificial
  probe
  misc_feature (1)..(25): SEQ ID NO: 4560; WAN024A8C_at; Start 152; Stop 176
tagaaatgataaagtataaagctag

SEQ ID NO: 46128 - DNA, 25 bp, Artificial
  probe
  misc_feature (1)..(25): SEQ ID NO: 4560; WAN024A8C_at; Start 89; Stop 113
tactgatgaggaattttacatataa

SEQ ID NO: 46129 - DNA, 25 bp, Artificial
  probe
  misc_feature (1)..(25): SEQ ID NO: 4560; WAN024A8C_at; Start 85; Stop 109
tttttactgatgaggaattttacat

SEQ ID NO: 46130 - DNA, 25 bp, Artificial
  probe
  misc_feature (1)..(25): SEQ ID NO: 4560; WAN024A8C_at; Start 70; Stop 94
aatgagatcggttattttttactga

SEQ ID NO: 46131 - DNA, 25 bp, Artificial
  probe
  misc_feature (1)..(25): SEQ ID NO: 4688; WAN024A8D_at; Start 102; Stop 126
gttttatgacatagaaatctacttt

SEQ ID NO: 46132 - DNA, 25 bp, Artificial
  probe
  misc_feature (1)..(25): SEQ ID NO: 4688; WAN024A8D_at; Start 143; Stop 167
tctttattttgtccgatgatagcct

SEQ ID NO: 46133 - DNA, 25 bp, Artificial
  probe
  misc_feature (1)..(25): SEQ ID NO: 4688; WAN024A8D_at; Start 58; Stop 82
tgaacatagagagttttcaaatgaa

SEQ ID NO: 46134 - DNA, 25 bp, Artificial
  probe
  misc_feature (1)..(25): SEQ ID NO: 4688; WAN024A8D_at; Start 66; Stop 90
gagagttttcaaatgaatgatgtcc

SEQ ID NO: 46135 - DNA, 25 bp, Artificial
  probe
  misc_feature (1)..(25): SEQ ID NO: 4688; WAN024A8D_at; Start 328; Stop 352
gaacctgttgcaggaagagtttcct

SEQ ID NO: 46136 - DNA, 25 bp, Artificial
  probe
  misc_feature (1)..(25): SEQ ID NO: 4688; WAN024A8D_at; Start 255; Stop 279
cgtcatattatgaaccaaaagaact

SEQ ID NO: 46137 - DNA, 25 bp, Artificial
  probe
  misc_feature (1)..(25): SEQ ID NO: 4688; WAN024A8D_at; Start 157; Stop 181
gatgatagccttttaccctatcttt

SEQ ID NO: 46138 - DNA, 25 bp, Artificial
  probe
  misc_feature (1)..(25): SEQ ID NO: 4688; WAN024A8D_at; Start 284; Stop 308
taccaacagctaataggcctaaagc

SEQ ID NO: 46139 - DNA, 25 bp, Artificial
  probe
  misc_feature (1)..(25): SEQ ID NO: 4688; WAN024A8D_at; Start 341; Stop 365
gaagagtttcctgctgataaataag

SEQ ID NO: 46140 - DNA, 25 bp, Artificial
  probe
  misc_feature (1)..(25): SEQ ID NO: 4688; WAN024A8D_at; Start 217; Stop 241
caaatgatgacttttcagagggagc

SEQ ID NO: 46141 - DNA, 25 bp, Artificial
  probe
  misc_feature (1)..(25): SEQ ID NO: 4688; WAN024A8D_at; Start 279; Stop 303
taaactaccaacagctaataggcct

SEQ ID NO: 46142 - DNA, 25 bp, Artificial
  probe
  misc_feature (1)..(25): SEQ ID NO: 4688; WAN024A8D_at; Start 117; Stop 141
aatctactttatattatatcatgcc

SEQ ID NO: 46143 - DNA, 25 bp, Artificial
  probe
  misc_feature (1)..(25): SEQ ID NO: 4688; WAN024A8D_at; Start 152; Stop 176
tgtccgatgatagccttttacccta

SEQ ID NO: 46144 - DNA, 25 bp, Artificial
  probe
  misc_feature (1)..(25): SEQ ID NO: 4688; WAN024A8D_at; Start 246; Stop 270
aactgttcccgtcatattatgaacc

SEQ ID NO: 46145 - DNA, 25 bp, Artificial
  probe
  misc_feature (1)..(25): SEQ ID NO: 4688; WAN024A8D_at; Start 270; Stop 294
caaaagaactaaactaccaacagct

SEQ ID NO: 46146 - DNA, 25 bp, Artificial
  probe
  misc_feature (1)..(25): SEQ ID NO: 4688; WAN024A8D_at; Start 294; Stop 318
taataggcctaaagctgtaagctca

SEQ ID NO: 46147 - DNA, 25 bp, Artificial
  probe
  misc_feature (1)..(25): SEQ ID NO: 4688; WAN024A8D_at; Start 301; Stop 325
cctaaagctgtaagctcagaagttg

SEQ ID NO: 46148 - DNA, 25 bp, Artificial
  probe
  misc_feature (1)..(25): SEQ ID NO: 4688; WAN024A8D_at; Start 80; Stop 104
gaatgatgtccaaacagttcttgtt

SEQ ID NO: 46149 - DNA, 25 bp, Artificial
  probe
  misc_feature (1)..(25): SEQ ID NO: 4688; WAN024A8D_at; Start 404; Stop 428
gaatcttggtttgttcttcatcacc

SEQ ID NO: 46150 - DNA, 25 bp, Artificial
  probe
  misc_feature (1)..(25): SEQ ID NO: 4688; WAN024A8D_at; Start 18; Stop 42
tagcaaggatttagatcccctattt

SEQ ID NO: 46151 - DNA, 25 bp, Artificial
  probe
  misc_feature (1)..(25): SEQ ID NO: 4688; WAN024A8D_at; Start 237; Stop 261
ggagcaaaaaactgttcccgtcata

SEQ ID NO: 46152 - DNA, 25 bp, Artificial
  probe
  misc_feature (1)..(25): SEQ ID NO: 4688; WAN024A8D_at; Start 92; Stop 116
aacagttcttgttttatgacataga

SEQ ID NO: 46153 - DNA, 25 bp, Artificial
  probe
  misc_feature (1)..(25): SEQ ID NO: 4688; WAN024A8D_at; Start 203; Stop 227
tagaaaaaagccatcaaatgatgac

SEQ ID NO: 46154 - DNA, 25 bp, Artificial
  probe
  misc_feature (1)..(25): SEQ ID NO: 4688; WAN024A8D_at; Start 378; Stop 402
ttcattatcagtaggaattcctgct

SEQ ID NO: 46155 - DNA, 25 bp, Artificial
  probe
  misc_feature (1)..(25): SEQ ID NO: 4688; WAN024A8D_at; Start 182; Stop 206
tagcctatcttttaccctatataga

SEQ ID NO: 46156 - DNA, 25 bp, Artificial
  probe
  misc_feature (1)..(25): SEQ ID NO: 4688; WAN024A8D_at; Start 133; Stop 157
tatcatgccttctttattttgtccg

SEQ ID NO: 46157 - DNA, 25 bp, Artificial
  probe
  misc_feature (1)..(25): SEQ ID NO: 4688; WAN024A8D_at; Start 75; Stop 99
caaatgaatgatgtccaaacagttc

SEQ ID NO: 46158 - DNA, 25 bp, Artificial
  probe
  misc_feature (1)..(25): SEQ ID NO: 4688; WAN024A8D_at; Start 368; Stop 392
cataacttacttcattatcagtagg

SEQ ID NO: 46159 - DNA, 25 bp, Artificial
  probe
  misc_feature (1)..(25): SEQ ID NO: 4688; WAN024A8D_at; Start 224; Stop 248
tgacttttcagagggagcaaaaaac

SEQ ID NO: 46160 - DNA, 25 bp, Artificial
  probe
  misc_feature (1)..(25): SEQ ID NO: 4688; WAN024A8D_at; Start 317; Stop 341
cagaagttgatgaacctgttgcagg

SEQ ID NO: 46161 - DNA, 25 bp, Artificial
  probe
  misc_feature (1)..(25): SEQ ID NO: 4688; WAN024A8D_at; Start 194; Stop 218
taccctatatagaaaaaagccatca

SEQ ID NO: 46162 - DNA, 25 bp, Artificial
  probe
  misc_feature (1)..(25): SEQ ID NO: 4688; WAN024A8D_at; Start 389; Stop 413
taggaattcctgcttgaatcttggt

SEQ ID NO: 46163 - DNA, 25 bp, Artificial
  probe
  misc_feature (1)..(25): SEQ ID NO: 4688; WAN024A8D_at; Start 309; Stop 333
tgtaagctcagaagttgatgaacct

SEQ ID NO: 46164 - DNA, 25 bp, Artificial
  probe
  misc_feature (1)..(25): SEQ ID NO: 4688; WAN024A8D_at; Start 230; Stop 254
ttcagagggagcaaaaaactgttcc

SEQ ID NO: 46165 - DNA, 25 bp, Artificial
  probe
  misc_feature (1)..(25): SEQ ID NO: 4741; WAN024A8E_at; Start 296; Stop 320
tatcatcggacaaaataaagaaggc

SEQ ID NO: 46166 - DNA, 25 bp, Artificial
  probe
  misc_feature (1)..(25): SEQ ID NO: 4741; WAN024A8E_at; Start 40; Stop 64
gaacaaaccaagattcaagcaggaa

SEQ ID NO: 46167 - DNA, 25 bp, Artificial
  probe
  misc_feature (1)..(25): SEQ ID NO: 4741; WAN024A8E_at; Start 151; Stop 175
gctttaggcctattagctgttggta

SEQ ID NO: 46168 - DNA, 25 bp, Artificial
  probe
  misc_feature (1)..(25): SEQ ID NO: 4741; WAN024A8E_at; Start 58; Stop 82
gcaggaattcctactgataatgaag

SEQ ID NO: 46169 - DNA, 25 bp, Artificial
  probe
  misc_feature (1)..(25): SEQ ID NO: 4741; WAN024A8E_at; Start 211; Stop 235
gttttttgctccctctgaaaagtca

SEQ ID NO: 46170 - DNA, 25 bp, Artificial
  probe
  misc_feature (1)..(25): SEQ ID NO: 4741; WAN024A8E_at; Start 369; Stop 393
ggacatcattcatttgaaaactctc

SEQ ID NO: 46171 - DNA, 25 bp, Artificial
  probe
  misc_feature (1)..(25): SEQ ID NO: 4741; WAN024A8E_at; Start 120; Stop 144
tgcaacaggttcatcaacttctgag

SEQ ID NO: 46172 - DNA, 25 bp, Artificial
  probe
  misc_feature (1)..(25): SEQ ID NO: 4741; WAN024A8E_at; Start 242; Stop 266
gatggcttttttctatatagggtaa

SEQ ID NO: 46173 - DNA, 25 bp, Artificial
  probe
  misc_feature (1)..(25): SEQ ID NO: 4741; WAN024A8E_at; Start 315; Stop 339
gaaggcatgatataatataaagtag

SEQ ID NO: 46174 - DNA, 25 bp, Artificial
  probe
  misc_feature (1)..(25): SEQ ID NO: 4741; WAN024A8E_at; Start 95; Stop 119
ttatttatcagcaggaaactcttcc

SEQ ID NO: 46175 - DNA, 25 bp, Artificial
  probe
  misc_feature (1)..(25): SEQ ID NO: 4741; WAN024A8E_at; Start 134; Stop 158
caacttctgagcttacagctttagg

SEQ ID NO: 46176 - DNA, 25 bp, Artificial
  probe
  misc_feature (1)..(25): SEQ ID NO: 4741; WAN024A8E_at; Start 47; Stop 71
ccaagattcaagcaggaattcctac

SEQ ID NO: 46177 - DNA, 25 bp, Artificial
  probe
  misc_feature (1)..(25): SEQ ID NO: 4741; WAN024A8E_at; Start 161; Stop 185
tattagctgttggtagtttagttct

SEQ ID NO: 46178 - DNA, 25 bp, Artificial
  probe
  misc_feature (1)..(25): SEQ ID NO: 4741; WAN024A8E_at; Start 224; Stop 248
tctgaaaagtcatcatttgatggct

SEQ ID NO: 46179 - DNA, 25 bp, Artificial
  probe
  misc_feature (1)..(25): SEQ ID NO: 4741; WAN024A8E_at; Start 276; Stop 300
taaaagatagggtaaaaggctatca

SEQ ID NO: 46180 - DNA, 25 bp, Artificial
  probe
  misc_feature (1)..(25): SEQ ID NO: 4741; WAN024A8E_at; Start 25; Stop 49
taaaaaggtgatgaagaacaaacca

SEQ ID NO: 46181 - DNA, 25 bp, Artificial
  probe
  misc_feature (1)..(25): SEQ ID NO: 4741; WAN024A8E_at; Start 333; Stop 357
aaagtagatttctatgtcataaaac

SEQ ID NO: 46182 - DNA, 25 bp, Artificial
  probe
  misc_feature (1)..(25): SEQ ID NO: 4741; WAN024A8E_at; Start 127; Stop 151
ggttcatcaacttctgagcttacag

SEQ ID NO: 46183 - DNA, 25 bp, Artificial
  probe
  misc_feature (1)..(25): SEQ ID NO: 4741; WAN024A8E_at; Start 198; Stop 222
tatgacgggaacagttttttgctcc

SEQ ID NO: 46184 - DNA, 25 bp, Artificial
  probe
  misc_feature (1)..(25): SEQ ID NO: 4741; WAN024A8E_at; Start 343; Stop 367
tctatgtcataaaacaagaactgtt

SEQ ID NO: 46185 - DNA, 25 bp, Artificial
  probe
  misc_feature (1)..(25): SEQ ID NO: 4741; WAN024A8E_at; Start 67; Stop 91
cctactgataatgaagtaagttatg

SEQ ID NO: 46186 - DNA, 25 bp, Artificial
  probe
  misc_feature (1)..(25): SEQ ID NO: 4741; WAN024A8E_at; Start 218; Stop 242
gctccctctgaaaagtcatcatttg

SEQ ID NO: 46187 - DNA, 25 bp, Artificial
  probe
  misc_feature (1)..(25): SEQ ID NO: 4741; WAN024A8E_at; Start 415; Stop 439
taaaataggggatctaaatccttgc

SEQ ID NO: 46188 - DNA, 25 bp, Artificial
  probe
  misc_feature (1)..(25): SEQ ID NO: 4741; WAN024A8E_at; Start 357; Stop 381
caagaactgtttggacatcattcat

SEQ ID NO: 46189 - DNA, 25 bp, Artificial
  probe
  misc_feature (1)..(25): SEQ ID NO: 4741; WAN024A8E_at; Start 283; Stop 307
tagggtaaaaggctatcatcggaca

SEQ ID NO: 46190 - DNA, 25 bp, Artificial
  probe
  misc_feature (1)..(25): SEQ ID NO: 4741; WAN024A8E_at; Start 142; Stop 166
gagcttacagctttaggcctattag

SEQ ID NO: 46191 - DNA, 25 bp, Artificial
  probe
  misc_feature (1)..(25): SEQ ID NO: 4741; WAN024A8E_at; Start 108; Stop 132
ggaaactcttcctgcaacaggttca

SEQ ID NO: 46192 - DNA, 25 bp, Artificial
  probe
  misc_feature (1)..(25): SEQ ID NO: 4741; WAN024A8E_at; Start 378; Stop 402
tcatttgaaaactctctatgttcaa

SEQ ID NO: 46193 - DNA, 25 bp, Artificial
  probe
  misc_feature (1)..(25): SEQ ID NO: 4741; WAN024A8E_at; Start 31; Stop 55
ggtgatgaagaacaaaccaagattc

SEQ ID NO: 46194 - DNA, 25 bp, Artificial
  probe
  misc_feature (1)..(25): SEQ ID NO: 4741; WAN024A8E_at; Start 183; Stop 207
tcttttggttcataatatgacggga

SEQ ID NO: 46195 - DNA, 25 bp, Artificial
  probe
  misc_feature (1)..(25): SEQ ID NO: 4741; WAN024A8E_at; Start 301; Stop 325
tcggacaaaataaagaaggcatgat

SEQ ID NO: 46196 - DNA, 25 bp, Artificial
  probe
  misc_feature (1)..(25): SEQ ID NO: 4741; WAN024A8E_at; Start 206; Stop 230
gaacagttttttgctccctctgaaa

SEQ ID NO: 46197 - DNA, 25 bp, Artificial
  probe
  misc_feature (1)..(25): SEQ ID NO: 4741; WAN024A8E_at; Start 286; Stop 310
ggtaaaaggctatcatcggacaaaa

SEQ ID NO: 46198 - DNA, 25 bp, Artificial
  probe
  misc_feature (1)..(25): SEQ ID NO: 4741; WAN024A8E_at; Start 254; Stop 278
ctatatagggtaaaagataggctaa

SEQ ID NO: 46199 - DNA, 25 bp, Artificial
  probe
  misc_feature (1)..(25): SEQ ID NO: 260; WAN024A8F_at; Start 63; Stop 87
aagcctcggtaacaaggctttgagt

SEQ ID NO: 46200 - DNA, 25 bp, Artificial
  probe
  misc_feature (1)..(25): SEQ ID NO: 260; WAN024A8F_at; Start 19; Stop 43
tattagatagaataagtctggctac

SEQ ID NO: 46201 - DNA, 25 bp, Artificial
  probe
  misc_feature (1)..(25): SEQ ID NO: 260; WAN024A8F_at; Start 114; Stop 138
tacacttcaatgtgttgtcccagta

SEQ ID NO: 46202 - DNA, 25 bp, Artificial
  probe
  misc_feature (1)..(25): SEQ ID NO: 260; WAN024A8F_at; Start 183; Stop 207
tcggactctaattcgatatcagaag

SEQ ID NO: 46203 - DNA, 25 bp, Artificial
  probe
  misc_feature (1)..(25): SEQ ID NO: 260; WAN024A8F_at; Start 93; Stop 117
gattgtttcttaggtacggaataca

SEQ ID NO: 46204 - DNA, 25 bp, Artificial
  probe
  misc_feature (1)..(25): SEQ ID NO: 260; WAN024A8F_at; Start 169; Stop 193
tatcgccatcaacatcggactctaa

SEQ ID NO: 46205 - DNA, 25 bp, Artificial
  probe
  misc_feature (1)..(25): SEQ ID NO: 260; WAN024A8F_at; Start 186; Stop 210
gactctaattcgatatcagaagaag

SEQ ID NO: 46206 - DNA, 25 bp, Artificial
  probe
  misc_feature (1)..(25): SEQ ID NO: 260; WAN024A8F_at; Start 255; Stop 279
tgattgaactatagtaaattgaaac

SEQ ID NO: 46207 - DNA, 25 bp, Artificial
  probe
  misc_feature (1)..(25): SEQ ID NO: 260; WAN024A8F_at; Start 189; Stop 213
tctaattcgatatcagaagaagttt

SEQ ID NO: 46208 - DNA, 25 bp, Artificial
  probe
  misc_feature (1)..(25): SEQ ID NO: 260; WAN024A8F_at; Start 165; Stop 189
gatttatcgccatcaacatcggact

SEQ ID NO: 46209 - DNA, 25 bp, Artificial
  probe
  misc_feature (1)..(25): SEQ ID NO: 260; WAN024A8F_at; Start 99; Stop 123
ttcttaggtacggaatacacttcaa

SEQ ID NO: 46210 - DNA, 25 bp, Artificial
  probe
  misc_feature (1)..(25): SEQ ID NO: 260; WAN024A8F_at; Start 4; Stop 28
acttagctttacttgtattagatag

SEQ ID NO: 46211 - DNA, 25 bp, Artificial
  probe
  misc_feature (1)..(25): SEQ ID NO: 260; WAN024A8F_at; Start 129; Stop 153
tgtcccagtatcttaatgtcgactg

SEQ ID NO: 46212 - DNA, 25 bp, Artificial
  probe
  misc_feature (1)..(25): SEQ ID NO: 260; WAN024A8F_at; Start 202; Stop 226
cagaagaagttttaatattacgtgc

SEQ ID NO: 46213 - DNA, 25 bp, Artificial
  probe
  misc_feature (1)..(25): SEQ ID NO: 260; WAN024A8F_at; Start 34; Stop 58
gtctggctactgaaaatcacataat

SEQ ID NO: 46214 - DNA, 25 bp, Artificial
  probe
  misc_feature (1)..(25): SEQ ID NO: 260; WAN024A8F_at; Start 103; Stop 127
taggtacggaatacacttcaatgtg

SEQ ID NO: 46215 - DNA, 25 bp, Artificial
  probe
  misc_feature (1)..(25): SEQ ID NO: 260; WAN024A8F_at; Start 142; Stop 166
taatgtcgactggtagattgtctga

SEQ ID NO: 46216 - DNA, 25 bp, Artificial
  probe
  misc_feature (1)..(25): SEQ ID NO: 260; WAN024A8F_at; Start 88; Stop 112
tttatgattgtttcttaggtacgga

SEQ ID NO: 46217 - DNA, 25 bp, Artificial
  probe
  misc_feature (1)..(25): SEQ ID NO: 260; WAN024A8F_at; Start 73; Stop 97
aacaaggctttgagttttatgattg

SEQ ID NO: 46218 - DNA, 25 bp, Artificial
  probe
  misc_feature (1)..(25): SEQ ID NO: 260; WAN024A8F_at; Start 244; Stop 268
tcttgatagaatgattgaactatag

SEQ ID NO: 46219 - DNA, 25 bp, Artificial
  probe
  misc_feature (1)..(25): SEQ ID NO: 260; WAN024A8F_at; Start 31; Stop 55
taagtctggctactgaaaatcacat

SEQ ID NO: 46220 - DNA, 25 bp, Artificial
  probe
  misc_feature (1)..(25): SEQ ID NO: 260; WAN024A8F_at; Start 217; Stop 241
tattacgtgcctttatatattcaat

SEQ ID NO: 46221 - DNA, 25 bp, Artificial
  probe
  misc_feature (1)..(25): SEQ ID NO: 260; WAN024A8F_at; Start 222; Stop 246
cgtgcctttatatattcaatattct

SEQ ID NO: 46222 - DNA, 25 bp, Artificial
  probe
  misc_feature (1)..(25): SEQ ID NO: 260; WAN024A8F_at; Start 24; Stop 48
gatagaataagtctggctactgaaa

SEQ ID NO: 46223 - DNA, 25 bp, Artificial
  probe
  misc_feature (1)..(25): SEQ ID NO: 260; WAN024A8F_at; Start 47; Stop 71
aaatcacataataaaaaagcctcgg

SEQ ID NO: 46224 - DNA, 25 bp, Artificial
  probe
  misc_feature (1)..(25): SEQ ID NO: 260; WAN024A8F_at; Start 126; Stop 150
tgttgtcccagtatcttaatgtcga

SEQ ID NO: 46225 - DNA, 25 bp, Artificial
  probe
  misc_feature (1)..(25): SEQ ID NO: 260; WAN024A8F_at; Start 134; Stop 158
cagtatcttaatgtcgactggtaga

SEQ ID NO: 46226 - DNA, 25 bp, Artificial
  probe
  misc_feature (1)..(25): SEQ ID NO: 260; WAN024A8F_at; Start 153; Stop 177
ggtagattgtctgatttatcgccat

SEQ ID NO: 46227 - DNA, 25 bp, Artificial
  probe
  misc_feature (1)..(25): SEQ ID NO: 260; WAN024A8F_at; Start 157; Stop 181
gattgtctgatttatcgccatcaac

SEQ ID NO: 46228 - DNA, 25 bp, Artificial
  probe
  misc_feature (1)..(25): SEQ ID NO: 260; WAN024A8F_at; Start 28; Stop 52
gaataagtctggctactgaaaatca

SEQ ID NO: 46229 - DNA, 25 bp, Artificial
  probe
  misc_feature (1)..(25): SEQ ID NO: 260; WAN024A8F_at; Start 120; Stop 144
tcaatgtgttgtcccagtatcttaa

SEQ ID NO: 46230 - DNA, 25 bp, Artificial
  probe
  misc_feature (1)..(25): SEQ ID NO: 260; WAN024A8F_at; Start 50; Stop 74
tcacataataaaaaagcctcggtaa

SEQ ID NO: 46231 - DNA, 25 bp, Artificial
  probe
  misc_feature (1)..(25): SEQ ID NO: 260; WAN024A8F_at; Start 69; Stop 93
cggtaacaaggctttgagttttatg

SEQ ID NO: 46232 - DNA, 25 bp, Artificial
  probe
  misc_feature (1)..(25): SEQ ID NO: 260; WAN024A8F_at; Start 174; Stop 198
ccatcaacatcggactctaattcga

SEQ ID NO: 46233 - DNA, 25 bp, Artificial
  probe
  misc_feature (1)..(25): SEQ ID NO: 4614; WAN024A8G_at; Start 109; Stop 133
gagtccgatgttgatggcgataaat

SEQ ID NO: 46234 - DNA, 25 bp, Artificial
  probe
  misc_feature (1)..(25): SEQ ID NO: 4614; WAN024A8G_at; Start 129; Stop 153
taaatcagacaatctaccagtcgac

SEQ ID NO: 46235 - DNA, 25 bp, Artificial
  probe
  misc_feature (1)..(25): SEQ ID NO: 4614; WAN024A8G_at; Start 20; Stop 44
gtttcaatttactatagttcaatca

SEQ ID NO: 46236 - DNA, 25 bp, Artificial
  probe
  misc_feature (1)..(25): SEQ ID NO: 4614; WAN024A8G_at; Start 187; Stop 211
tccgtacctaagaaacaatcataaa

SEQ ID NO: 46237 - DNA, 25 bp, Artificial
  probe
  misc_feature (1)..(25): SEQ ID NO: 4614; WAN024A8G_at; Start 172; Stop 196
cacattgaagtgtattccgtaccta

SEQ ID NO: 46238 - DNA, 25 bp, Artificial
  probe
  misc_feature (1)..(25): SEQ ID NO: 4614; WAN024A8G_at; Start 133; Stop 157
tcagacaatctaccagtcgacatta

SEQ ID NO: 46239 - DNA, 25 bp, Artificial
  probe
  misc_feature (1)..(25): SEQ ID NO: 4614; WAN024A8G_at; Start 121; Stop 145
gatggcgataaatcagacaatctac

SEQ ID NO: 46240 - DNA, 25 bp, Artificial
  probe
  misc_feature (1)..(25): SEQ ID NO: 4614; WAN024A8G_at; Start 136; Stop 160
gacaatctaccagtcgacattaaga

SEQ ID NO: 46241 - DNA, 25 bp, Artificial
  probe
  misc_feature (1)..(25): SEQ ID NO: 4614; WAN024A8G_at; Start 159; Stop 183
gatactgggacaacacattgaagtg

SEQ ID NO: 46242 - DNA, 25 bp, Artificial
  probe
  misc_feature (1)..(25): SEQ ID NO: 4614; WAN024A8G_at; Start 32; Stop 56
tatagttcaatcattctatcaagaa

SEQ ID NO: 46243 - DNA, 25 bp, Artificial
  probe
  misc_feature (1)..(25): SEQ ID NO: 4614; WAN024A8G_at; Start 182; Stop 206
tgtattccgtacctaagaaacaatc

SEQ ID NO: 46244 - DNA, 25 bp, Artificial
  probe
  misc_feature (1)..(25): SEQ ID NO: 4614; WAN024A8G_at; Start 211; Stop 235
aactcaaagccttgttaccgaggct

SEQ ID NO: 46245 - DNA, 25 bp, Artificial
  probe
  misc_feature (1)..(25): SEQ ID NO: 4614; WAN024A8G_at; Start 94; Stop 118
tctgatatcgaattagagtccgatg

SEQ ID NO: 46246 - DNA, 25 bp, Artificial
  probe
  misc_feature (1)..(25): SEQ ID NO: 4614; WAN024A8G_at; Start 146; Stop 170
cagtcgacattaagatactgggaca

SEQ ID NO: 46247 - DNA, 25 bp, Artificial
  probe
  misc_feature (1)..(25): SEQ ID NO: 4614; WAN024A8G_at; Start 176; Stop 200
ttgaagtgtattccgtacctaagaa

SEQ ID NO: 46248 - DNA, 25 bp, Artificial
  probe
  misc_feature (1)..(25): SEQ ID NO: 4614; WAN024A8G_at; Start 270; Stop 294
tctatctaatacaagtaaagctaag

SEQ ID NO: 46249 - DNA, 25 bp, Artificial
  probe
  misc_feature (1)..(25): SEQ ID NO: 4614; WAN024A8G_at; Start 241; Stop 265
attatgtgattttcagtagccagac

SEQ ID NO: 46250 - DNA, 25 bp, Artificial
  probe
  misc_feature (1)..(25): SEQ ID NO: 4614; WAN024A8G_at; Start 198; Stop 222
gaaacaatcataaaactcaaagcct

SEQ ID NO: 46251 - DNA, 25 bp, Artificial
  probe
  misc_feature (1)..(25): SEQ ID NO: 4614; WAN024A8G_at; Start 124; Stop 148
ggcgataaatcagacaatctaccag

SEQ ID NO: 46252 - DNA, 25 bp, Artificial
  probe
  misc_feature (1)..(25): SEQ ID NO: 4614; WAN024A8G_at; Start 156; Stop 180
taagatactgggacaacacattgaa

SEQ ID NO: 46253 - DNA, 25 bp, Artificial
  probe
  misc_feature (1)..(25): SEQ ID NO: 4614; WAN024A8G_at; Start 206; Stop 230
cataaaactcaaagccttgttaccg

SEQ ID NO: 46254 - DNA, 25 bp, Artificial
  probe
  misc_feature (1)..(25): SEQ ID NO: 4614; WAN024A8G_at; Start 245; Stop 269
tgtgattttcagtagccagacttat

SEQ ID NO: 46255 - DNA, 25 bp, Artificial
  probe
  misc_feature (1)..(25): SEQ ID NO: 4614; WAN024A8G_at; Start 57; Stop 81
tattgaatatataaaggcacgtaat

SEQ ID NO: 46256 - DNA, 25 bp, Artificial
  probe
  misc_feature (1)..(25): SEQ ID NO: 4614; WAN024A8G_at; Start 73; Stop 97
gcacgtaatattaaaacttcttctg

SEQ ID NO: 46257 - DNA, 25 bp, Artificial
  probe
  misc_feature (1)..(25): SEQ ID NO: 4614; WAN024A8G_at; Start 161; Stop 185
tactgggacaacacattgaagtgta

SEQ ID NO: 46258 - DNA, 25 bp, Artificial
  probe
  misc_feature (1)..(25): SEQ ID NO: 4614; WAN024A8G_at; Start 115; Stop 139
gatgttgatggcgataaatcagaca

SEQ ID NO: 46259 - DNA, 25 bp, Artificial
  probe
  misc_feature (1)..(25): SEQ ID NO: 4614; WAN024A8G_at; Start 259; Stop 283
gccagacttattctatctaatacaa

SEQ ID NO: 46260 - DNA, 25 bp, Artificial
  probe
  misc_feature (1)..(25): SEQ ID NO: 4614; WAN024A8G_at; Start 104; Stop 128
aattagagtccgatgttgatggcga

SEQ ID NO: 46261 - DNA, 25 bp, Artificial
  probe
  misc_feature (1)..(25): SEQ ID NO: 4614; WAN024A8G_at; Start 151; Stop 175
gacattaagatactgggacaacaca

SEQ ID NO: 46262 - DNA, 25 bp, Artificial
  probe
  misc_feature (1)..(25): SEQ ID NO: 4614; WAN024A8G_at; Start 141; Stop 165
tctaccagtcgacattaagatactg

SEQ ID NO: 46263 - DNA, 25 bp, Artificial
  probe
  misc_feature (1)..(25): SEQ ID NO: 4614; WAN024A8G_at; Start 91; Stop 115
tcttctgatatcgaattagagtccg

SEQ ID NO: 46264 - DNA, 25 bp, Artificial
  probe
  misc_feature (1)..(25): SEQ ID NO: 4614; WAN024A8G_at; Start 54; Stop 78
gaatattgaatatataaaggcacgt

SEQ ID NO: 46265 - DNA, 25 bp, Artificial
  probe
  misc_feature (1)..(25): SEQ ID NO: 4614; WAN024A8G_at; Start 254; Stop 278
cagtagccagacttattctatctaa

SEQ ID NO: 46266 - DNA, 25 bp, Artificial
  probe
  misc_feature (1)..(25): SEQ ID NO: 4614; WAN024A8G_at; Start 226; Stop 250
taccgaggcttttttattatgtgat

SEQ ID NO: 46267 - DNA, 25 bp, Artificial
  probe
  misc_feature (1)..(25): SEQ ID NO: 3524; WAN024A8H_at; Start 64; Stop 88
taaggaaaagttgcacaaagataac

SEQ ID NO: 46268 - DNA, 25 bp, Artificial
  probe
  misc_feature (1)..(25): SEQ ID NO: 3524; WAN024A8H_at; Start 31; Stop 55
aacagacaaaagaaagcgattactt

SEQ ID NO: 46269 - DNA, 25 bp, Artificial
  probe
  misc_feature (1)..(25): SEQ ID NO: 3524; WAN024A8H_at; Start 65; Stop 89
aaggaaaagttgcacaaagataacg

SEQ ID NO: 46270 - DNA, 25 bp, Artificial
  probe
  misc_feature (1)..(25): SEQ ID NO: 3524; WAN024A8H_at; Start 25; Stop 49
gaataaaacagacaaaagaaagcga

SEQ ID NO: 46271 - DNA, 25 bp, Artificial
  probe
  misc_feature (1)..(25): SEQ ID NO: 3524; WAN024A8H_at; Start 76; Stop 100
gcacaaagataacgttttttcttga

SEQ ID NO: 46272 - DNA, 25 bp, Artificial
  probe
  misc_feature (1)..(25): SEQ ID NO: 3524; WAN024A8H_at; Start 1; Stop 25
gaaaacagtatatcataaaagttag

SEQ ID NO: 46273 - DNA, 25 bp, Artificial
  probe
  misc_feature (1)..(25): SEQ ID NO: 3524; WAN024A8H_at; Start 12; Stop 36
atcataaaagttagaataaaacaga

SEQ ID NO: 46274 - DNA, 25 bp, Artificial
  probe
  misc_feature (1)..(25): SEQ ID NO: 3524; WAN024A8H_at; Start 8; Stop 32
gtatatcataaaagttagaataaaa

SEQ ID NO: 46275 - DNA, 25 bp, Artificial
  probe
  misc_feature (1)..(25): SEQ ID NO: 3524; WAN024A8H_at; Start 5; Stop 29
acagtatatcataaaagttagaata

SEQ ID NO: 46276 - DNA, 25 bp, Artificial
  probe
  misc_feature (1)..(25): SEQ ID NO: 3524; WAN024A8H_at; Start 32; Stop 56
acagacaaaagaaagcgattacttt

SEQ ID NO: 46277 - DNA, 25 bp, Artificial
  probe
  misc_feature (1)..(25): SEQ ID NO: 3524; WAN024A8H_at; Start 6; Stop 30
cagtatatcataaaagttagaataa

SEQ ID NO: 46278 - DNA, 25 bp, Artificial
  probe
  misc_feature (1)..(25): SEQ ID NO: 3524; WAN024A8H_at; Start 24; Stop 48
agaataaaacagacaaaagaaagcg

SEQ ID NO: 46279 - DNA, 25 bp, Artificial
  probe
  misc_feature (1)..(25): SEQ ID NO: 3524; WAN024A8H_at; Start 3; Stop 27
aaacagtatatcataaaagttagaa

SEQ ID NO: 46280 - DNA, 25 bp, Artificial
  probe
  misc_feature (1)..(25): SEQ ID NO: 3524; WAN024A8H_at; Start 56; Stop 80
tataaagttaaggaaaagttgcaca

SEQ ID NO: 46281 - DNA, 25 bp, Artificial
  probe
  misc_feature (1)..(25): SEQ ID NO: 3524; WAN024A8H_at; Start 30; Stop 54
aaacagacaaaagaaagcgattact

SEQ ID NO: 46282 - DNA, 25 bp, Artificial
  probe
  misc_feature (1)..(25): SEQ ID NO: 3524; WAN024A8H_at; Start 28; Stop 52
taaaacagacaaaagaaagcgatta

SEQ ID NO: 46283 - DNA, 25 bp, Artificial
  probe
  misc_feature (1)..(25): SEQ ID NO: 3524; WAN024A8H_at; Start 33; Stop 57
cagacaaaagaaagcgattacttta

SEQ ID NO: 46284 - DNA, 25 bp, Artificial
  probe
  misc_feature (1)..(25): SEQ ID NO: 3524; WAN024A8H_at; Start 23; Stop 47
tagaataaaacagacaaaagaaagc

SEQ ID NO: 46285 - DNA, 25 bp, Artificial
  probe
  misc_feature (1)..(25): SEQ ID NO: 3524; WAN024A8H_at; Start 2; Stop 26
aaaacagtatatcataaaagttaga

SEQ ID NO: 46286 - DNA, 25 bp, Artificial
  probe
  misc_feature (1)..(25): SEQ ID NO: 3524; WAN024A8H_at; Start 9; Stop 33
tatatcataaaagttagaataaaac

SEQ ID NO: 46287 - DNA, 25 bp, Artificial
  probe
  misc_feature (1)..(25): SEQ ID NO: 3524; WAN024A8H_at; Start 4; Stop 28
aacagtatatcataaaagttagaat

SEQ ID NO: 46288 - DNA, 25 bp, Artificial
  probe
  misc_feature (1)..(25): SEQ ID NO: 3524; WAN024A8H_at; Start 63; Stop 87
ttaaggaaaagttgcacaaagataa

SEQ ID NO: 46289 - DNA, 25 bp, Artificial
  probe
  misc_feature (1)..(25): SEQ ID NO: 3524; WAN024A8H_at; Start 13; Stop 37
tcataaaagttagaataaaacagac

SEQ ID NO: 46290 - DNA, 25 bp, Artificial
  probe
  misc_feature (1)..(25): SEQ ID NO: 3524; WAN024A8H_at; Start 35; Stop 59
gacaaaagaaagcgattactttata

SEQ ID NO: 46291 - DNA, 25 bp, Artificial
  probe
  misc_feature (1)..(25): SEQ ID NO: 3524; WAN024A8H_at; Start 75; Stop 99
tgcacaaagataacgttttttcttg

SEQ ID NO: 46292 - DNA, 25 bp, Artificial
  probe
  misc_feature (1)..(25): SEQ ID NO: 3524; WAN024A8H_at; Start 62; Stop 86
gttaaggaaaagttgcacaaagata

SEQ ID NO: 46293 - DNA, 25 bp, Artificial
  probe
  misc_feature (1)..(25): SEQ ID NO: 3524; WAN024A8H_at; Start 26; Stop 50
aataaaacagacaaaagaaagcgat

SEQ ID NO: 46294 - DNA, 25 bp, Artificial
  probe
  misc_feature (1)..(25): SEQ ID NO: 3524; WAN024A8H_at; Start 14; Stop 38
cataaaagttagaataaaacagaca

SEQ ID NO: 46295 - DNA, 25 bp, Artificial
  probe
  misc_feature (1)..(25): SEQ ID NO: 3524; WAN024A8H_at; Start 34; Stop 58
agacaaaagaaagcgattactttat

SEQ ID NO: 46296 - DNA, 25 bp, Artificial
  probe
  misc_feature (1)..(25): SEQ ID NO: 3524; WAN024A8H_at; Start 66; Stop 90
aggaaaagttgcacaaagataacgt

SEQ ID NO: 46297 - DNA, 25 bp, Artificial
  probe
  misc_feature (1)..(25): SEQ ID NO: 3524; WAN024A8H_at; Start 27; Stop 51
ataaaacagacaaaagaaagcgatt

SEQ ID NO: 46298 - DNA, 25 bp, Artificial
  probe
  misc_feature (1)..(25): SEQ ID NO: 3524; WAN024A8H_at; Start 7; Stop 31
agtatatcataaaagttagaataaa

SEQ ID NO: 46299 - DNA, 25 bp, Artificial
  probe
  misc_feature (1)..(25): SEQ ID NO: 3524; WAN024A8H_at; Start 61; Stop 85
agttaaggaaaagttgcacaaagat

SEQ ID NO: 46300 - DNA, 25 bp, Artificial
  probe
  misc_feature (1)..(25): SEQ ID NO: 3524; WAN024A8H_at; Start 11; Stop 35
tatcataaaagttagaataaaacag

SEQ ID NO: 46301 - DNA, 25 bp, Artificial
  probe
  misc_feature (1)..(25): SEQ ID NO: 5949; WAN024A8I_at; Start 138; Stop 162
tctaacttttatgatatactgtttt

SEQ ID NO: 46302 - DNA, 25 bp, Artificial
  probe
  misc_feature (1)..(25): SEQ ID NO: 5949; WAN024A8I_at; Start 117; Stop 141
gctttcttttgtctgttttattcta

SEQ ID NO: 46303 - DNA, 25 bp, Artificial
  probe
  misc_feature (1)..(25): SEQ ID NO: 5949; WAN024A8I_at; Start 84; Stop 108
tgtgcaacttttccttaactttata

SEQ ID NO: 46304 - DNA, 25 bp, Artificial
  probe
  misc_feature (1)..(25): SEQ ID NO: 5949; WAN024A8I_at; Start 139; Stop 163
ctaacttttatgatatactgttttc

SEQ ID NO: 46305 - DNA, 25 bp, Artificial
  probe
  misc_feature (1)..(25): SEQ ID NO: 5949; WAN024A8I_at; Start 65; Stop 89
caagaaaaaacgttatctttgtgca

SEQ ID NO: 46306 - DNA, 25 bp, Artificial
  probe
  misc_feature (1)..(25): SEQ ID NO: 5949; WAN024A8I_at; Start 75; Stop 99
cgttatctttgtgcaacttttcctt

SEQ ID NO: 46307 - DNA, 25 bp, Artificial
  probe
  misc_feature (1)..(25): SEQ ID NO: 5949; WAN024A8I_at; Start 113; Stop 137
aatcgctttcttttgtctgttttat

SEQ ID NO: 46308 - DNA, 25 bp, Artificial
  probe
  misc_feature (1)..(25): SEQ ID NO: 5949; WAN024A8I_at; Start 77; Stop 101
ttatctttgtgcaacttttccttaa

SEQ ID NO: 46309 - DNA, 25 bp, Artificial
  probe
  misc_feature (1)..(25): SEQ ID NO: 5949; WAN024A8I_at; Start 126; Stop 150
tgtctgttttattctaacttttatg

SEQ ID NO: 46310 - DNA, 25 bp, Artificial
  probe
  misc_feature (1)..(25): SEQ ID NO: 5949; WAN024A8I_at; Start 78; Stop 102
tatctttgtgcaacttttccttaac

SEQ ID NO: 46311 - DNA, 25 bp, Artificial
  probe
  misc_feature (1)..(25): SEQ ID NO: 5949; WAN024A8I_at; Start 129; Stop 153
ctgttttattctaacttttatgata

SEQ ID NO: 46312 - DNA, 25 bp, Artificial
  probe
  misc_feature (1)..(25): SEQ ID NO: 5949; WAN024A8I_at; Start 137; Stop 161
ttctaacttttatgatatactgttt

SEQ ID NO: 46313 - DNA, 25 bp, Artificial
  probe
  misc_feature (1)..(25): SEQ ID NO: 5949; WAN024A8I_at; Start 116; Stop 140
cgctttcttttgtctgttttattct

SEQ ID NO: 46314 - DNA, 25 bp, Artificial
  probe
  misc_feature (1)..(25): SEQ ID NO: 5949; WAN024A8I_at; Start 109; Stop 133
aagtaatcgctttcttttgtctgtt

SEQ ID NO: 46315 - DNA, 25 bp, Artificial
  probe
  misc_feature (1)..(25): SEQ ID NO: 5949; WAN024A8I_at; Start 105; Stop 129
tataaagtaatcgctttcttttgtc

SEQ ID NO: 46316 - DNA, 25 bp, Artificial
  probe
  misc_feature (1)..(25): SEQ ID NO: 5949; WAN024A8I_at; Start 76; Stop 100
gttatctttgtgcaacttttcctta

SEQ ID NO: 46317 - DNA, 25 bp, Artificial
  probe
  misc_feature (1)..(25): SEQ ID NO: 5949; WAN024A8I_at; Start 114; Stop 138
atcgctttcttttgtctgttttatt

SEQ ID NO: 46318 - DNA, 25 bp, Artificial
  probe
  misc_feature (1)..(25): SEQ ID NO: 5949; WAN024A8I_at; Start 133; Stop 157
tttattctaacttttatgatatact

SEQ ID NO: 46319 - DNA, 25 bp, Artificial
  probe
  misc_feature (1)..(25): SEQ ID NO: 5949; WAN024A8I_at; Start 110; Stop 134
agtaatcgctttcttttgtctgttt

SEQ ID NO: 46320 - DNA, 25 bp, Artificial
  probe
  misc_feature (1)..(25): SEQ ID NO: 5949; WAN024A8I_at; Start 135; Stop 159
tattctaacttttatgatatactgt

SEQ ID NO: 46321 - DNA, 25 bp, Artificial
  probe
  misc_feature (1)..(25): SEQ ID NO: 5949; WAN024A8I_at; Start 112; Stop 136
taatcgctttcttttgtctgtttta

SEQ ID NO: 46322 - DNA, 25 bp, Artificial
  probe
  misc_feature (1)..(25): SEQ ID NO: 5949; WAN024A8I_at; Start 134; Stop 158
ttattctaacttttatgatatactg

SEQ ID NO: 46323 - DNA, 25 bp, Artificial
  probe
  misc_feature (1)..(25): SEQ ID NO: 5949; WAN024A8I_at; Start 136; Stop 160
attctaacttttatgatatactgtt

SEQ ID NO: 46324 - DNA, 25 bp, Artificial
  probe
  misc_feature (1)..(25): SEQ ID NO: 5949; WAN024A8I_at; Start 128; Stop 152
tctgttttattctaacttttatgat

SEQ ID NO: 46325 - DNA, 25 bp, Artificial
  probe
  misc_feature (1)..(25): SEQ ID NO: 5949; WAN024A8I_at; Start 115; Stop 139
tcgctttcttttgtctgttttattc

SEQ ID NO: 46326 - DNA, 25 bp, Artificial
  probe
  misc_feature (1)..(25): SEQ ID NO: 5949; WAN024A8I_at; Start 107; Stop 131
taaagtaatcgctttcttttgtctg

SEQ ID NO: 46327 - DNA, 25 bp, Artificial
  probe
  misc_feature (1)..(25): SEQ ID NO: 5949; WAN024A8I_at; Start 106; Stop 130
ataaagtaatcgctttcttttgtct

SEQ ID NO: 46328 - DNA, 25 bp, Artificial
  probe
  misc_feature (1)..(25): SEQ ID NO: 5949; WAN024A8I_at; Start 79; Stop 103
atctttgtgcaacttttccttaact

SEQ ID NO: 46329 - DNA, 25 bp, Artificial
  probe
  misc_feature (1)..(25): SEQ ID NO: 5949; WAN024A8I_at; Start 127; Stop 151
gtctgttttattctaacttttatga

SEQ ID NO: 46330 - DNA, 25 bp, Artificial
  probe
  misc_feature (1)..(25): SEQ ID NO: 5949; WAN024A8I_at; Start 64; Stop 88
tcaagaaaaaacgttatctttgtgc

SEQ ID NO: 46331 - DNA, 25 bp, Artificial
  probe
  misc_feature (1)..(25): SEQ ID NO: 5949; WAN024A8I_at; Start 74; Stop 98
acgttatctttgtgcaacttttcct

SEQ ID NO: 46332 - DNA, 25 bp, Artificial
  probe
  misc_feature (1)..(25): SEQ ID NO: 5949; WAN024A8I_at; Start 108; Stop 132
aaagtaatcgctttcttttgtctgt

SEQ ID NO: 46333 - DNA, 25 bp, Artificial
  probe
  misc_feature (1)..(25): SEQ ID NO: 4497; WAN024A8J_at; Start 13; Stop 37
tatgatgacttcatacgatttttag

SEQ ID NO: 46334 - DNA, 25 bp, Artificial
  probe
  misc_feature (1)..(25): SEQ ID NO: 4497; WAN024A8J_at; Start 15; Stop 39
tgatgacttcatacgatttttaggc

SEQ ID NO: 46335 - DNA, 25 bp, Artificial
  probe
  misc_feature (1)..(25): SEQ ID NO: 4497; WAN024A8J_at; Start 20; Stop 44
acttcatacgatttttaggctgttt

SEQ ID NO: 46336 - DNA, 25 bp, Artificial
  probe
  misc_feature (1)..(25): SEQ ID NO: 4497; WAN024A8J_at; Start 14; Stop 38
atgatgacttcatacgatttttagg

SEQ ID NO: 46337 - DNA, 25 bp, Artificial
  probe
  misc_feature (1)..(25): SEQ ID NO: 4497; WAN024A8J_at; Start 19; Stop 43
gacttcatacgatttttaggctgtt

SEQ ID NO: 46338 - DNA, 25 bp, Artificial
  probe
  misc_feature (1)..(25): SEQ ID NO: 4497; WAN024A8J_at; Start 12; Stop 36
gtatgatgacttcatacgattttta

SEQ ID NO: 46339 - DNA, 25 bp, Artificial
  probe
  misc_feature (1)..(25): SEQ ID NO: 4497; WAN024A8J_at; Start 8; Stop 32
aatcgtatgatgacttcatacgatt

SEQ ID NO: 46340 - DNA, 25 bp, Artificial
  probe
  misc_feature (1)..(25): SEQ ID NO: 4497; WAN024A8J_at; Start 25; Stop 49
atacgatttttaggctgtttagaga

SEQ ID NO: 46341 - DNA, 25 bp, Artificial
  probe
  misc_feature (1)..(25): SEQ ID NO: 4497; WAN024A8J_at; Start 24; Stop 48
catacgatttttaggctgtttagag

SEQ ID NO: 46342 - DNA, 25 bp, Artificial
  probe
  misc_feature (1)..(25): SEQ ID NO: 4497; WAN024A8J_at; Start 30; Stop 54
atttttaggctgtttagagaggaga

SEQ ID NO: 46343 - DNA, 25 bp, Artificial
  probe
  misc_feature (1)..(25): SEQ ID NO: 4497; WAN024A8J_at; Start 21; Stop 45
cttcatacgatttttaggctgttta

SEQ ID NO: 46344 - DNA, 25 bp, Artificial
  probe
  misc_feature (1)..(25): SEQ ID NO: 4497; WAN024A8J_at; Start 32; Stop 56
ttttaggctgtttagagaggagaac

SEQ ID NO: 46345 - DNA, 25 bp, Artificial
  probe
  misc_feature (1)..(25): SEQ ID NO: 4497; WAN024A8J_at; Start 23; Stop 47
tcatacgatttttaggctgtttaga

SEQ ID NO: 46346 - DNA, 25 bp, Artificial
  probe
  misc_feature (1)..(25): SEQ ID NO: 4497; WAN024A8J_at; Start 18; Stop 42
tgacttcatacgatttttaggctgt

SEQ ID NO: 46347 - DNA, 25 bp, Artificial
  probe
  misc_feature (1)..(25): SEQ ID NO: 4497; WAN024A8J_at; Start 2; Stop 26
agataaaatcgtatgatgacttcat

SEQ ID NO: 46348 - DNA, 25 bp, Artificial
  probe
  misc_feature (1)..(25): SEQ ID NO: 4497; WAN024A8J_at; Start 9; Stop 33
atcgtatgatgacttcatacgattt

SEQ ID NO: 46349 - DNA, 25 bp, Artificial
  probe
  misc_feature (1)..(25): SEQ ID NO: 4497; WAN024A8J_at; Start 28; Stop 52
cgatttttaggctgtttagagagga

SEQ ID NO: 46350 - DNA, 25 bp, Artificial
  probe
  misc_feature (1)..(25): SEQ ID NO: 4497; WAN024A8J_at; Start 27; Stop 51
acgatttttaggctgtttagagagg

SEQ ID NO: 46351 - DNA, 25 bp, Artificial
  probe
  misc_feature (1)..(25): SEQ ID NO: 4497; WAN024A8J_at; Start 16; Stop 40
gatgacttcatacgatttttaggct

SEQ ID NO: 46352 - DNA, 25 bp, Artificial
  probe
  misc_feature (1)..(25): SEQ ID NO: 4497; WAN024A8J_at; Start 1; Stop 25
tagataaaatcgtatgatgacttca

SEQ ID NO: 46353 - DNA, 25 bp, Artificial
  probe
  misc_feature (1)..(25): SEQ ID NO: 4497; WAN024A8J_at; Start 29; Stop 53
gatttttaggctgtttagagaggag

SEQ ID NO: 46354 - DNA, 25 bp, Artificial
  probe
  misc_feature (1)..(25): SEQ ID NO: 4497; WAN024A8J_at; Start 5; Stop 29
taaaatcgtatgatgacttcatacg

SEQ ID NO: 46355 - DNA, 25 bp, Artificial
  probe
  misc_feature (1)..(25): SEQ ID NO: 4497; WAN024A8J_at; Start 7; Stop 31
aaatcgtatgatgacttcatacgat

SEQ ID NO: 46356 - DNA, 25 bp, Artificial
  probe
  misc_feature (1)..(25): SEQ ID NO: 4497; WAN024A8J_at; Start 4; Stop 28
ataaaatcgtatgatgacttcatac

SEQ ID NO: 46357 - DNA, 25 bp, Artificial
  probe
  misc_feature (1)..(25): SEQ ID NO: 4497; WAN024A8J_at; Start 17; Stop 41
atgacttcatacgatttttaggctg

SEQ ID NO: 46358 - DNA, 25 bp, Artificial
  probe
  misc_feature (1)..(25): SEQ ID NO: 4497; WAN024A8J_at; Start 31; Stop 55
tttttaggctgtttagagaggagaa

SEQ ID NO: 46359 - DNA, 25 bp, Artificial
  probe
  misc_feature (1)..(25): SEQ ID NO: 4497; WAN024A8J_at; Start 26; Stop 50
tacgatttttaggctgtttagagag

SEQ ID NO: 46360 - DNA, 25 bp, Artificial
  probe
  misc_feature (1)..(25): SEQ ID NO: 4497; WAN024A8J_at; Start 11; Stop 35
cgtatgatgacttcatacgattttt

SEQ ID NO: 46361 - DNA, 25 bp, Artificial
  probe
  misc_feature (1)..(25): SEQ ID NO: 4497; WAN024A8J_at; Start 3; Stop 27
gataaaatcgtatgatgacttcata

SEQ ID NO: 46362 - DNA, 25 bp, Artificial
  probe
  misc_feature (1)..(25): SEQ ID NO: 4497; WAN024A8J_at; Start 22; Stop 46
ttcatacgatttttaggctgtttag

SEQ ID NO: 46363 - DNA, 25 bp, Artificial
  probe
  misc_feature (1)..(25): SEQ ID NO: 4599; WAN024A8K_at; Start 23; Stop 47
ctaaaaatcgtatgaagtcatcata

SEQ ID NO: 46364 - DNA, 25 bp, Artificial
  probe
  misc_feature (1)..(25): SEQ ID NO: 4599; WAN024A8K_at; Start 5; Stop 29
ttctcctctctaaacagcctaaaaa

SEQ ID NO: 46365 - DNA, 25 bp, Artificial
  probe
  misc_feature (1)..(25): SEQ ID NO: 4599; WAN024A8K_at; Start 32; Stop 56
gtatgaagtcatcatacgattttat

SEQ ID NO: 46366 - DNA, 25 bp, Artificial
  probe
  misc_feature (1)..(25): SEQ ID NO: 4599; WAN024A8K_at; Start 28; Stop 52
aatcgtatgaagtcatcatacgatt

SEQ ID NO: 46367 - DNA, 25 bp, Artificial
  probe
  misc_feature (1)..(25): SEQ ID NO: 4599; WAN024A8K_at; Start 16; Stop 40
aaacagcctaaaaatcgtatgaagt

SEQ ID NO: 46368 - DNA, 25 bp, Artificial
  probe
  misc_feature (1)..(25): SEQ ID NO: 4599; WAN024A8K_at; Start 21; Stop 45
gcctaaaaatcgtatgaagtcatca

SEQ ID NO: 46369 - DNA, 25 bp, Artificial
  probe
  misc_feature (1)..(25): SEQ ID NO: 4599; WAN024A8K_at; Start 4; Stop 28
gttctcctctctaaacagcctaaaa

SEQ ID NO: 46370 - DNA, 25 bp, Artificial
  probe
  misc_feature (1)..(25): SEQ ID NO: 4599; WAN024A8K_at; Start 14; Stop 38
ctaaacagcctaaaaatcgtatgaa

SEQ ID NO: 46371 - DNA, 25 bp, Artificial
  probe
  misc_feature (1)..(25): SEQ ID NO: 4599; WAN024A8K_at; Start 18; Stop 42
acagcctaaaaatcgtatgaagtca

SEQ ID NO: 46372 - DNA, 25 bp, Artificial
  probe
  misc_feature (1)..(25): SEQ ID NO: 4599; WAN024A8K_at; Start 35; Stop 59
tgaagtcatcatacgattttatcta

SEQ ID NO: 46373 - DNA, 25 bp, Artificial
  probe
  misc_feature (1)..(25): SEQ ID NO: 4599; WAN024A8K_at; Start 2; Stop 26
cagttctcctctctaaacagcctaa

SEQ ID NO: 46374 - DNA, 25 bp, Artificial
  probe
  misc_feature (1)..(25): SEQ ID NO: 4599; WAN024A8K_at; Start 7; Stop 31
ctcctctctaaacagcctaaaaatc

SEQ ID NO: 46375 - DNA, 25 bp, Artificial
  probe
  misc_feature (1)..(25): SEQ ID NO: 4599; WAN024A8K_at; Start 8; Stop 32
tcctctctaaacagcctaaaaatcg

SEQ ID NO: 46376 - DNA, 25 bp, Artificial
  probe
  misc_feature (1)..(25): SEQ ID NO: 4599; WAN024A8K_at; Start 11; Stop 35
tctctaaacagcctaaaaatcgtat

SEQ ID NO: 46377 - DNA, 25 bp, Artificial
  probe
  misc_feature (1)..(25): SEQ ID NO: 4599; WAN024A8K_at; Start 6; Stop 30
tctcctctctaaacagcctaaaaat

SEQ ID NO: 46378 - DNA, 25 bp, Artificial
  probe
  misc_feature (1)..(25): SEQ ID NO: 4599; WAN024A8K_at; Start 25; Stop 49
aaaaatcgtatgaagtcatcatacg

SEQ ID NO: 46379 - DNA, 25 bp, Artificial
  probe
  misc_feature (1)..(25): SEQ ID NO: 4599; WAN024A8K_at; Start 1; Stop 25
tcagttctcctctctaaacagccta

SEQ ID NO: 46380 - DNA, 25 bp, Artificial
  probe
  misc_feature (1)..(25): SEQ ID NO: 4599; WAN024A8K_at; Start 13; Stop 37
tctaaacagcctaaaaatcgtatga

SEQ ID NO: 46381 - DNA, 25 bp, Artificial
  probe
  misc_feature (1)..(25): SEQ ID NO: 4599; WAN024A8K_at; Start 12; Stop 36
ctctaaacagcctaaaaatcgtatg

SEQ ID NO: 46382 - DNA, 25 bp, Artificial
  probe
  misc_feature (1)..(25): SEQ ID NO: 4599; WAN024A8K_at; Start 24; Stop 48
taaaaatcgtatgaagtcatcatac

SEQ ID NO: 46383 - DNA, 25 bp, Artificial
  probe
  misc_feature (1)..(25): SEQ ID NO: 4599; WAN024A8K_at; Start 3; Stop 27
agttctcctctctaaacagcctaaa

SEQ ID NO: 46384 - DNA, 25 bp, Artificial
  probe
  misc_feature (1)..(25): SEQ ID NO: 4599; WAN024A8K_at; Start 34; Stop 58
atgaagtcatcatacgattttatct

SEQ ID NO: 46385 - DNA, 25 bp, Artificial
  probe
  misc_feature (1)..(25): SEQ ID NO: 4599; WAN024A8K_at; Start 22; Stop 46
cctaaaaatcgtatgaagtcatcat

SEQ ID NO: 46386 - DNA, 25 bp, Artificial
  probe
  misc_feature (1)..(25): SEQ ID NO: 4599; WAN024A8K_at; Start 31; Stop 55
cgtatgaagtcatcatacgatttta

SEQ ID NO: 46387 - DNA, 25 bp, Artificial
  probe
  misc_feature (1)..(25): SEQ ID NO: 4599; WAN024A8K_at; Start 15; Stop 39
taaacagcctaaaaatcgtatgaag

SEQ ID NO: 46388 - DNA, 25 bp, Artificial
  probe
  misc_feature (1)..(25): SEQ ID NO: 4599; WAN024A8K_at; Start 29; Stop 53
atcgtatgaagtcatcatacgattt

SEQ ID NO: 46389 - DNA, 25 bp, Artificial
  probe
  misc_feature (1)..(25): SEQ ID NO: 4599; WAN024A8K_at; Start 9; Stop 33
cctctctaaacagcctaaaaatcgt

SEQ ID NO: 46390 - DNA, 25 bp, Artificial
  probe
  misc_feature (1)..(25): SEQ ID NO: 4599; WAN024A8K_at; Start 19; Stop 43
cagcctaaaaatcgtatgaagtcat

SEQ ID NO: 46391 - DNA, 25 bp, Artificial
  probe
  misc_feature (1)..(25): SEQ ID NO: 4599; WAN024A8K_at; Start 27; Stop 51
aaatcgtatgaagtcatcatacgat

SEQ ID NO: 46392 - DNA, 25 bp, Artificial
  probe
  misc_feature (1)..(25): SEQ ID NO: 4599; WAN024A8K_at; Start 20; Stop 44
agcctaaaaatcgtatgaagtcatc

SEQ ID NO: 46393 - DNA, 25 bp, Artificial
  probe
  misc_feature (1)..(25): SEQ ID NO: 4599; WAN024A8K_at; Start 33; Stop 57
tatgaagtcatcatacgattttatc

SEQ ID NO: 46394 - DNA, 25 bp, Artificial
  probe
  misc_feature (1)..(25): SEQ ID NO: 4599; WAN024A8K_at; Start 17; Stop 41
aacagcctaaaaatcgtatgaagtc

SEQ ID NO: 46395 - DNA, 25 bp, Artificial
  probe
  misc_feature (1)..(25): SEQ ID NO: 4599; WAN024A8K_at; Start 10; Stop 34
ctctctaaacagcctaaaaatcgta

SEQ ID NO: 46396 - DNA, 25 bp, Artificial
  probe
  misc_feature (1)..(25): SEQ ID NO: 1615; WAN024A8N_at; Start 6; Stop 30
tatcatctatagtaaaataaaaaaa

SEQ ID NO: 46397 - DNA, 25 bp, Artificial
  probe
  misc_feature (1)..(25): SEQ ID NO: 1615; WAN024A8N_at; Start 1; Stop 25
atgagtatcatctatagtaaaataa

SEQ ID NO: 46398 - DNA, 25 bp, Artificial
  probe
  misc_feature (1)..(25): SEQ ID NO: 1615; WAN024A8N_at; Start 9; Stop 33
catctatagtaaaataaaaaaactg

SEQ ID NO: 46399 - DNA, 25 bp, Artificial
  probe
  misc_feature (1)..(25): SEQ ID NO: 1615; WAN024A8N_at; Start 2; Stop 26
tgagtatcatctatagtaaaataaa

SEQ ID NO: 46400 - DNA, 25 bp, Artificial
  probe
  misc_feature (1)..(25): SEQ ID NO: 1615; WAN024A8N_at; Start 3; Stop 27
gagtatcatctatagtaaaataaaa

SEQ ID NO: 46401 - DNA, 25 bp, Artificial
  probe
  misc_feature (1)..(25): SEQ ID NO: 1615; WAN024A8N_at; Start 5; Stop 29
gtatcatctatagtaaaataaaaaa

SEQ ID NO: 46402 - DNA, 25 bp, Artificial
  probe
  misc_feature (1)..(25): SEQ ID NO: 1615; WAN024A8N_at; Start 4; Stop 28
agtatcatctatagtaaaataaaaa

SEQ ID NO: 46403 - DNA, 25 bp, Artificial
  probe
  misc_feature (1)..(25): SEQ ID NO: 3710; WAN024A8O_at; Start 2; Stop 26
ctgtccccaaccaaattgttcagtt

SEQ ID NO: 46404 - DNA, 25 bp, Artificial
  probe
  misc_feature (1)..(25): SEQ ID NO: 3710; WAN024A8O_at; Start 29; Stop 53
tttattttactatagatgatactca

SEQ ID NO: 46405 - DNA, 25 bp, Artificial
  probe
  misc_feature (1)..(25): SEQ ID NO: 3710; WAN024A8O_at; Start 22; Stop 46
cagtttttttattttactatagatg

SEQ ID NO: 46406 - DNA, 25 bp, Artificial
  probe
  misc_feature (1)..(25): SEQ ID NO: 3710; WAN024A8O_at; Start 30; Stop 54
ttattttactatagatgatactcat

SEQ ID NO: 46407 - DNA, 25 bp, Artificial
  probe
  misc_feature (1)..(25): SEQ ID NO: 3710; WAN024A8O_at; Start 26; Stop 50
ttttttattttactatagatgatac

SEQ ID NO: 46408 - DNA, 25 bp, Artificial
  probe
  misc_feature (1)..(25): SEQ ID NO: 3710; WAN024A8O_at; Start 1; Stop 25
gctgtccccaaccaaattgttcagt

SEQ ID NO: 46409 - DNA, 25 bp, Artificial
  probe
  misc_feature (1)..(25): SEQ ID NO: 3710; WAN024A8O_at; Start 28; Stop 52
ttttattttactatagatgatactc

SEQ ID NO: 46410 - DNA, 25 bp, Artificial
  probe
  misc_feature (1)..(25): SEQ ID NO: 3710; WAN024A8O_at; Start 27; Stop 51
tttttattttactatagatgatact

SEQ ID NO: 46411 - DNA, 25 bp, Artificial
  probe
  misc_feature (1)..(25): SEQ ID NO: 4725; WAN024A8P_at; Start 2; Stop 26
gtgctattccaatttcagcctacta

SEQ ID NO: 46412 - DNA, 25 bp, Artificial
  probe
  misc_feature (1)..(25): SEQ ID NO: 4725; WAN024A8P_at; Start 1; Stop 25
tgtgctattccaatttcagcctact

SEQ ID NO: 46413 - DNA, 25 bp, Artificial
  probe
  misc_feature (1)..(25): SEQ ID NO: 4725; WAN024A8P_at; Start 8; Stop 32
ttccaatttcagcctactataactg

SEQ ID NO: 46414 - DNA, 25 bp, Artificial
  probe
  misc_feature (1)..(25): SEQ ID NO: 4725; WAN024A8P_at; Start 12; Stop 36
aatttcagcctactataactgtcat

SEQ ID NO: 46415 - DNA, 25 bp, Artificial
  probe
  misc_feature (1)..(25): SEQ ID NO: 4725; WAN024A8P_at; Start 13; Stop 37
atttcagcctactataactgtcata

SEQ ID NO: 46416 - DNA, 25 bp, Artificial
  probe
  misc_feature (1)..(25): SEQ ID NO: 4725; WAN024A8P_at; Start 16; Stop 40
tcagcctactataactgtcatagat

SEQ ID NO: 46417 - DNA, 25 bp, Artificial
  probe
  misc_feature (1)..(25): SEQ ID NO: 4725; WAN024A8P_at; Start 7; Stop 31
attccaatttcagcctactataact

SEQ ID NO: 46418 - DNA, 25 bp, Artificial
  probe
  misc_feature (1)..(25): SEQ ID NO: 4725; WAN024A8P_at; Start 6; Stop 30
tattccaatttcagcctactataac

SEQ ID NO: 46419 - DNA, 25 bp, Artificial
  probe
  misc_feature (1)..(25): SEQ ID NO: 4725; WAN024A8P_at; Start 17; Stop 41
cagcctactataactgtcatagatt

SEQ ID NO: 46420 - DNA, 25 bp, Artificial
  probe
  misc_feature (1)..(25): SEQ ID NO: 4725; WAN024A8P_at; Start 10; Stop 34
ccaatttcagcctactataactgtc

SEQ ID NO: 46421 - DNA, 25 bp, Artificial
  probe
  misc_feature (1)..(25): SEQ ID NO: 4725; WAN024A8P_at; Start 4; Stop 28
gctattccaatttcagcctactata

SEQ ID NO: 46422 - DNA, 25 bp, Artificial
  probe
  misc_feature (1)..(25): SEQ ID NO: 4725; WAN024A8P_at; Start 9; Stop 33
tccaatttcagcctactataactgt

SEQ ID NO: 46423 - DNA, 25 bp, Artificial
  probe
  misc_feature (1)..(25): SEQ ID NO: 4725; WAN024A8P_at; Start 15; Stop 39
ttcagcctactataactgtcataga

SEQ ID NO: 46424 - DNA, 25 bp, Artificial
  probe
  misc_feature (1)..(25): SEQ ID NO: 4725; WAN024A8P_at; Start 5; Stop 29
ctattccaatttcagcctactataa

SEQ ID NO: 46425 - DNA, 25 bp, Artificial
  probe
  misc_feature (1)..(25): SEQ ID NO: 4725; WAN024A8P_at; Start 18; Stop 42
agcctactataactgtcatagattg

SEQ ID NO: 46426 - DNA, 25 bp, Artificial
  probe
  misc_feature (1)..(25): SEQ ID NO: 4725; WAN024A8P_at; Start 14; Stop 38
tttcagcctactataactgtcatag

SEQ ID NO: 46427 - DNA, 25 bp, Artificial
  probe
  misc_feature (1)..(25): SEQ ID NO: 4725; WAN024A8P_at; Start 11; Stop 35
caatttcagcctactataactgtca

SEQ ID NO: 46428 - DNA, 25 bp, Artificial
  probe
  misc_feature (1)..(25): SEQ ID NO: 4725; WAN024A8P_at; Start 3; Stop 27
tgctattccaatttcagcctactat

SEQ ID NO: 46429 - DNA, 25 bp, Artificial
  probe
  misc_feature (1)..(25): SEQ ID NO: 4494; WAN024A8Q_at; Start 19; Stop 43
tctatgacagttatagtaggctgaa

SEQ ID NO: 46430 - DNA, 25 bp, Artificial
  probe
  misc_feature (1)..(25): SEQ ID NO: 4494; WAN024A8Q_at; Start 28; Stop 52
gttatagtaggctgaaattggaata

SEQ ID NO: 46431 - DNA, 25 bp, Artificial
  probe
  misc_feature (1)..(25): SEQ ID NO: 4494; WAN024A8Q_at; Start 18; Stop 42
atctatgacagttatagtaggctga

SEQ ID NO: 46432 - DNA, 25 bp, Artificial
  probe
  misc_feature (1)..(25): SEQ ID NO: 4494; WAN024A8Q_at; Start 24; Stop 48
gacagttatagtaggctgaaattgg

SEQ ID NO: 46433 - DNA, 25 bp, Artificial
  probe
  misc_feature (1)..(25): SEQ ID NO: 4494; WAN024A8Q_at; Start 32; Stop 56
tagtaggctgaaattggaatagcac

SEQ ID NO: 46434 - DNA, 25 bp, Artificial
  probe
  misc_feature (1)..(25): SEQ ID NO: 4494; WAN024A8Q_at; Start 16; Stop 40
caatctatgacagttatagtaggct

SEQ ID NO: 46435 - DNA, 25 bp, Artificial
  probe
  misc_feature (1)..(25): SEQ ID NO: 4494; WAN024A8Q_at; Start 30; Stop 54
tatagtaggctgaaattggaatagc

SEQ ID NO: 46436 - DNA, 25 bp, Artificial
  probe
  misc_feature (1)..(25): SEQ ID NO: 4494; WAN024A8Q_at; Start 23; Stop 47
tgacagttatagtaggctgaaattg

SEQ ID NO: 46437 - DNA, 25 bp, Artificial
  probe
  misc_feature (1)..(25): SEQ ID NO: 4494; WAN024A8Q_at; Start 33; Stop 57
agtaggctgaaattggaatagcaca

SEQ ID NO: 46438 - DNA, 25 bp, Artificial
  probe
  misc_feature (1)..(25): SEQ ID NO: 4494; WAN024A8Q_at; Start 29; Stop 53
ttatagtaggctgaaattggaatag

SEQ ID NO: 46439 - DNA, 25 bp, Artificial
  probe
  misc_feature (1)..(25): SEQ ID NO: 4494; WAN024A8Q_at; Start 22; Stop 46
atgacagttatagtaggctgaaatt

SEQ ID NO: 46440 - DNA, 25 bp, Artificial
  probe
  misc_feature (1)..(25): SEQ ID NO: 4494; WAN024A8Q_at; Start 25; Stop 49
acagttatagtaggctgaaattgga

SEQ ID NO: 46441 - DNA, 25 bp, Artificial
  probe
  misc_feature (1)..(25): SEQ ID NO: 4494; WAN024A8Q_at; Start 21; Stop 45
tatgacagttatagtaggctgaaat

SEQ ID NO: 46442 - DNA, 25 bp, Artificial
  probe
  misc_feature (1)..(25): SEQ ID NO: 4494; WAN024A8Q_at; Start 27; Stop 51
agttatagtaggctgaaattggaat

SEQ ID NO: 46443 - DNA, 25 bp, Artificial
  probe
  misc_feature (1)..(25): SEQ ID NO: 4494; WAN024A8Q_at; Start 26; Stop 50
cagttatagtaggctgaaattggaa

SEQ ID NO: 46444 - DNA, 25 bp, Artificial
  probe
  misc_feature (1)..(25): SEQ ID NO: 4494; WAN024A8Q_at; Start 20; Stop 44
ctatgacagttatagtaggctgaaa

SEQ ID NO: 46445 - DNA, 25 bp, Artificial
  probe
  misc_feature (1)..(25): SEQ ID NO: 4494; WAN024A8Q_at; Start 31; Stop 55
atagtaggctgaaattggaatagca

SEQ ID NO: 46446 - DNA, 25 bp, Artificial
  probe
  misc_feature (1)..(25): SEQ ID NO: 4494; WAN024A8Q_at; Start 17; Stop 41
aatctatgacagttatagtaggctg

SEQ ID NO: 46447 - DNA, 25 bp, Artificial
  probe
  misc_feature (1)..(25): SEQ ID NO: 5953; WAN024A8R_at; Start 57; Stop 81
cgtctcaattaacagacatagtcat

SEQ ID NO: 46448 - DNA, 25 bp, Artificial
  probe
  misc_feature (1)..(25): SEQ ID NO: 5953; WAN024A8R_at; Start 61; Stop 85
tcaattaacagacatagtcatattc

SEQ ID NO: 46449 - DNA, 25 bp, Artificial
  probe
  misc_feature (1)..(25): SEQ ID NO: 5953; WAN024A8R_at; Start 62; Stop 86
caattaacagacatagtcatattct

SEQ ID NO: 46450 - DNA, 25 bp, Artificial
  probe
  misc_feature (1)..(25): SEQ ID NO: 5953; WAN024A8R_at; Start 41; Stop 65
aaatttttgtcaatctcgtctcaat

SEQ ID NO: 46451 - DNA, 25 bp, Artificial
  probe
  misc_feature (1)..(25): SEQ ID NO: 5953; WAN024A8R_at; Start 18; Stop 42
tactttgtttctatttcactaataa

SEQ ID NO: 46452 - DNA, 25 bp, Artificial
  probe
  misc_feature (1)..(25): SEQ ID NO: 5953; WAN024A8R_at; Start 48; Stop 72
tgtcaatctcgtctcaattaacaga

SEQ ID NO: 46453 - DNA, 25 bp, Artificial
  probe
  misc_feature (1)..(25): SEQ ID NO: 5953; WAN024A8R_at; Start 77; Stop 101
gtcatattctctaaactctgttttt

SEQ ID NO: 46454 - DNA, 25 bp, Artificial
  probe
  misc_feature (1)..(25): SEQ ID NO: 5953; WAN024A8R_at; Start 56; Stop 80
tcgtctcaattaacagacatagtca

SEQ ID NO: 46455 - DNA, 25 bp, Artificial
  probe
  misc_feature (1)..(25): SEQ ID NO: 5953; WAN024A8R_at; Start 38; Stop 62
aataaatttttgtcaatctcgtctc

SEQ ID NO: 46456 - DNA, 25 bp, Artificial
  probe
  misc_feature (1)..(25): SEQ ID NO: 5953; WAN024A8R_at; Start 58; Stop 82
gtctcaattaacagacatagtcata

SEQ ID NO: 46457 - DNA, 25 bp, Artificial
  probe
  misc_feature (1)..(25): SEQ ID NO: 5953; WAN024A8R_at; Start 71; Stop 95
gacatagtcatattctctaaactct

SEQ ID NO: 46458 - DNA, 25 bp, Artificial
  probe
  misc_feature (1)..(25): SEQ ID NO: 5953; WAN024A8R_at; Start 79; Stop 103
catattctctaaactctgtttttaa

SEQ ID NO: 46459 - DNA, 25 bp, Artificial
  probe
  misc_feature (1)..(25): SEQ ID NO: 5953; WAN024A8R_at; Start 47; Stop 71
ttgtcaatctcgtctcaattaacag

SEQ ID NO: 46460 - DNA, 25 bp, Artificial
  probe
  misc_feature (1)..(25): SEQ ID NO: 5953; WAN024A8R_at; Start 40; Stop 64
taaatttttgtcaatctcgtctcaa

SEQ ID NO: 46461 - DNA, 25 bp, Artificial
  probe
  misc_feature (1)..(25): SEQ ID NO: 5953; WAN024A8R_at; Start 63; Stop 87
aattaacagacatagtcatattctc

SEQ ID NO: 46462 - DNA, 25 bp, Artificial
  probe
  misc_feature (1)..(25): SEQ ID NO: 5953; WAN024A8R_at; Start 45; Stop 69
ttttgtcaatctcgtctcaattaac

SEQ ID NO: 46463 - DNA, 25 bp, Artificial
  probe
  misc_feature (1)..(25): SEQ ID NO: 5953; WAN024A8R_at; Start 53; Stop 77
atctcgtctcaattaacagacatag

SEQ ID NO: 46464 - DNA, 25 bp, Artificial
  probe
  misc_feature (1)..(25): SEQ ID NO: 5953; WAN024A8R_at; Start 46; Stop 70
tttgtcaatctcgtctcaattaaca

SEQ ID NO: 46465 - DNA, 25 bp, Artificial
  probe
  misc_feature (1)..(25): SEQ ID NO: 5953; WAN024A8R_at; Start 66; Stop 90
taacagacatagtcatattctctaa

SEQ ID NO: 46466 - DNA, 25 bp, Artificial
  probe
  misc_feature (1)..(25): SEQ ID NO: 5953; WAN024A8R_at; Start 73; Stop 97
catagtcatattctctaaactctgt

SEQ ID NO: 46467 - DNA, 25 bp, Artificial
  probe
  misc_feature (1)..(25): SEQ ID NO: 5953; WAN024A8R_at; Start 54; Stop 78
tctcgtctcaattaacagacatagt

SEQ ID NO: 46468 - DNA, 25 bp, Artificial
  probe
  misc_feature (1)..(25): SEQ ID NO: 5953; WAN024A8R_at; Start 52; Stop 76
aatctcgtctcaattaacagacata

SEQ ID NO: 46469 - DNA, 25 bp, Artificial
  probe
  misc_feature (1)..(25): SEQ ID NO: 5953; WAN024A8R_at; Start 55; Stop 79
ctcgtctcaattaacagacatagtc

SEQ ID NO: 46470 - DNA, 25 bp, Artificial
  probe
  misc_feature (1)..(25): SEQ ID NO: 5953; WAN024A8R_at; Start 34; Stop 58
cactaataaatttttgtcaatctcg

SEQ ID NO: 46471 - DNA, 25 bp, Artificial
  probe
  misc_feature (1)..(25): SEQ ID NO: 5953; WAN024A8R_at; Start 69; Stop 93
cagacatagtcatattctctaaact

SEQ ID NO: 46472 - DNA, 25 bp, Artificial
  probe
  misc_feature (1)..(25): SEQ ID NO: 5953; WAN024A8R_at; Start 72; Stop 96
acatagtcatattctctaaactctg

SEQ ID NO: 46473 - DNA, 25 bp, Artificial
  probe
  misc_feature (1)..(25): SEQ ID NO: 5953; WAN024A8R_at; Start 51; Stop 75
caatctcgtctcaattaacagacat

SEQ ID NO: 46474 - DNA, 25 bp, Artificial
  probe
  misc_feature (1)..(25): SEQ ID NO: 5953; WAN024A8R_at; Start 36; Stop 60
ctaataaatttttgtcaatctcgtc

SEQ ID NO: 46475 - DNA, 25 bp, Artificial
  probe
  misc_feature (1)..(25): SEQ ID NO: 5953; WAN024A8R_at; Start 70; Stop 94
agacatagtcatattctctaaactc

SEQ ID NO: 46476 - DNA, 25 bp, Artificial
  probe
  misc_feature (1)..(25): SEQ ID NO: 5953; WAN024A8R_at; Start 68; Stop 92
acagacatagtcatattctctaaac

SEQ ID NO: 46477 - DNA, 25 bp, Artificial
  probe
  misc_feature (1)..(25): SEQ ID NO: 5953; WAN024A8R_at; Start 49; Stop 73
gtcaatctcgtctcaattaacagac

SEQ ID NO: 46478 - DNA, 25 bp, Artificial
  probe
  misc_feature (1)..(25): SEQ ID NO: 5953; WAN024A8R_at; Start 75; Stop 99
tagtcatattctctaaactctgttt

SEQ ID NO: 46479 - DNA, 25 bp, Artificial
  probe
  misc_feature (1)..(25): SEQ ID NO: 5953; WAN024A8R_at; Start 59; Stop 83
tctcaattaacagacatagtcatat

SEQ ID NO: 46480 - DNA, 25 bp, Artificial
  probe
  misc_feature (1)..(25): SEQ ID NO: 5953; WAN024A8R_at; Start 50; Stop 74
tcaatctcgtctcaattaacagaca

SEQ ID NO: 46481 - DNA, 25 bp, Artificial
  probe
  misc_feature (1)..(25): SEQ ID NO: 4709; WAN024A8S_at; Start 46; Stop 70
aattgagacgagattgacaaaaatt

SEQ ID NO: 46482 - DNA, 25 bp, Artificial
  probe
  misc_feature (1)..(25): SEQ ID NO: 4709; WAN024A8S_at; Start 44; Stop 68
ttaattgagacgagattgacaaaaa

SEQ ID NO: 46483 - DNA, 25 bp, Artificial
  probe
  misc_feature (1)..(25): SEQ ID NO: 4709; WAN024A8S_at; Start 48; Stop 72
ttgagacgagattgacaaaaattta

SEQ ID NO: 46484 - DNA, 25 bp, Artificial
  probe
  misc_feature (1)..(25): SEQ ID NO: 4709; WAN024A8S_at; Start 27; Stop 51
gaatatgactatgtctgttaattga

SEQ ID NO: 46485 - DNA, 25 bp, Artificial
  probe
  misc_feature (1)..(25): SEQ ID NO: 4709; WAN024A8S_at; Start 19; Stop 43
agtttagagaatatgactatgtctg

SEQ ID NO: 46486 - DNA, 25 bp, Artificial
  probe
  misc_feature (1)..(25): SEQ ID NO: 4709; WAN024A8S_at; Start 36; Stop 60
tatgtctgttaattgagacgagatt

SEQ ID NO: 46487 - DNA, 25 bp, Artificial
  probe
  misc_feature (1)..(25): SEQ ID NO: 4709; WAN024A8S_at; Start 40; Stop 64
tctgttaattgagacgagattgaca

SEQ ID NO: 46488 - DNA, 25 bp, Artificial
  probe
  misc_feature (1)..(25): SEQ ID NO: 4709; WAN024A8S_at; Start 21; Stop 45
tttagagaatatgactatgtctgtt

SEQ ID NO: 46489 - DNA, 25 bp, Artificial
  probe
  misc_feature (1)..(25): SEQ ID NO: 4709; WAN024A8S_at; Start 16; Stop 40
cagagtttagagaatatgactatgt

SEQ ID NO: 46490 - DNA, 25 bp, Artificial
  probe
  misc_feature (1)..(25): SEQ ID NO: 4709; WAN024A8S_at; Start 33; Stop 57
gactatgtctgttaattgagacgag

SEQ ID NO: 46491 - DNA, 25 bp, Artificial
  probe
  misc_feature (1)..(25): SEQ ID NO: 4709; WAN024A8S_at; Start 45; Stop 69
taattgagacgagattgacaaaaat

SEQ ID NO: 46492 - DNA, 25 bp, Artificial
  probe
  misc_feature (1)..(25): SEQ ID NO: 4709; WAN024A8S_at; Start 31; Stop 55
atgactatgtctgttaattgagacg

SEQ ID NO: 46493 - DNA, 25 bp, Artificial
  probe
  misc_feature (1)..(25): SEQ ID NO: 4709; WAN024A8S_at; Start 30; Stop 54
tatgactatgtctgttaattgagac

SEQ ID NO: 46494 - DNA, 25 bp, Artificial
  probe
  misc_feature (1)..(25): SEQ ID NO: 4709; WAN024A8S_at; Start 35; Stop 59
ctatgtctgttaattgagacgagat

SEQ ID NO: 46495 - DNA, 25 bp, Artificial
  probe
  misc_feature (1)..(25): SEQ ID NO: 4709; WAN024A8S_at; Start 25; Stop 49
gagaatatgactatgtctgttaatt

SEQ ID NO: 46496 - DNA, 25 bp, Artificial
  probe
  misc_feature (1)..(25): SEQ ID NO: 4709; WAN024A8S_at; Start 15; Stop 39
acagagtttagagaatatgactatg

SEQ ID NO: 46497 - DNA, 25 bp, Artificial
  probe
  misc_feature (1)..(25): SEQ ID NO: 4709; WAN024A8S_at; Start 11; Stop 35
aaaaacagagtttagagaatatgac

SEQ ID NO: 46498 - DNA, 25 bp, Artificial
  probe
  misc_feature (1)..(25): SEQ ID NO: 4709; WAN024A8S_at; Start 39; Stop 63
gtctgttaattgagacgagattgac

SEQ ID NO: 46499 - DNA, 25 bp, Artificial
  probe
  misc_feature (1)..(25): SEQ ID NO: 4709; WAN024A8S_at; Start 71; Stop 95
tattagtgaaatagaaacaaagtaa

SEQ ID NO: 46500 - DNA, 25 bp, Artificial
  probe
  misc_feature (1)..(25): SEQ ID NO: 4709; WAN024A8S_at; Start 18; Stop 42
gagtttagagaatatgactatgtct

SEQ ID NO: 46501 - DNA, 25 bp, Artificial
  probe
  misc_feature (1)..(25): SEQ ID NO: 4709; WAN024A8S_at; Start 42; Stop 66
tgttaattgagacgagattgacaaa

SEQ ID NO: 46502 - DNA, 25 bp, Artificial
  probe
  misc_feature (1)..(25): SEQ ID NO: 4709; WAN024A8S_at; Start 32; Stop 56
tgactatgtctgttaattgagacga

SEQ ID NO: 46503 - DNA, 25 bp, Artificial
  probe
  misc_feature (1)..(25): SEQ ID NO: 4709; WAN024A8S_at; Start 13; Stop 37
aaacagagtttagagaatatgacta

SEQ ID NO: 46504 - DNA, 25 bp, Artificial
  probe
  misc_feature (1)..(25): SEQ ID NO: 4709; WAN024A8S_at; Start 38; Stop 62
tgtctgttaattgagacgagattga

SEQ ID NO: 46505 - DNA, 25 bp, Artificial
  probe
  misc_feature (1)..(25): SEQ ID NO: 4709; WAN024A8S_at; Start 43; Stop 67
gttaattgagacgagattgacaaaa

SEQ ID NO: 46506 - DNA, 25 bp, Artificial
  probe
  misc_feature (1)..(25): SEQ ID NO: 4709; WAN024A8S_at; Start 23; Stop 47
tagagaatatgactatgtctgttaa

SEQ ID NO: 46507 - DNA, 25 bp, Artificial
  probe
  misc_feature (1)..(25): SEQ ID NO: 4709; WAN024A8S_at; Start 17; Stop 41
agagtttagagaatatgactatgtc

SEQ ID NO: 46508 - DNA, 25 bp, Artificial
  probe
  misc_feature (1)..(25): SEQ ID NO: 4709; WAN024A8S_at; Start 41; Stop 65
ctgttaattgagacgagattgacaa

SEQ ID NO: 46509 - DNA, 25 bp, Artificial
  probe
  misc_feature (1)..(25): SEQ ID NO: 4709; WAN024A8S_at; Start 14; Stop 38
aacagagtttagagaatatgactat

SEQ ID NO: 46510 - DNA, 25 bp, Artificial
  probe
  misc_feature (1)..(25): SEQ ID NO: 4709; WAN024A8S_at; Start 61; Stop 85
gacaaaaatttattagtgaaataga

SEQ ID NO: 46511 - DNA, 25 bp, Artificial
  probe
  misc_feature (1)..(25): SEQ ID NO: 4709; WAN024A8S_at; Start 47; Stop 71
attgagacgagattgacaaaaattt

SEQ ID NO: 46512 - DNA, 25 bp, Artificial
  probe
  misc_feature (1)..(25): SEQ ID NO: 4709; WAN024A8S_at; Start 12; Stop 36
aaaacagagtttagagaatatgact

SEQ ID NO: 46513 - DNA, 25 bp, Artificial
  probe
  misc_feature (1)..(25): SEQ ID NO: 4709; WAN024A8S_at; Start 34; Stop 58
actatgtctgttaattgagacgaga

SEQ ID NO: 46514 - DNA, 25 bp, Artificial
  probe
  misc_feature (1)..(25): SEQ ID NO: 4709; WAN024A8S_at; Start 20; Stop 44
gtttagagaatatgactatgtctgt

SEQ ID NO: 46515 - DNA, 25 bp, Artificial
  probe
  misc_feature (1)..(25): SEQ ID NO: 218; WAN024A8T_at; Start 11; Stop 35
taccataaaacaagccctcctcaca

SEQ ID NO: 46516 - DNA, 25 bp, Artificial
  probe
  misc_feature (1)..(25): SEQ ID NO: 218; WAN024A8T_at; Start 22; Stop 46
aagccctcctcacaaacgagaaggg

SEQ ID NO: 46517 - DNA, 25 bp, Artificial
  probe
  misc_feature (1)..(25): SEQ ID NO: 218; WAN024A8T_at; Start 15; Stop 39
ataaaacaagccctcctcacaaacg

SEQ ID NO: 46518 - DNA, 25 bp, Artificial
  probe
  misc_feature (1)..(25): SEQ ID NO: 218; WAN024A8T_at; Start 19; Stop 43
aacaagccctcctcacaaacgagaa

SEQ ID NO: 46519 - DNA, 25 bp, Artificial
  probe
  misc_feature (1)..(25): SEQ ID NO: 218; WAN024A8T_at; Start 16; Stop 40
taaaacaagccctcctcacaaacga

SEQ ID NO: 46520 - DNA, 25 bp, Artificial
  probe
  misc_feature (1)..(25): SEQ ID NO: 218; WAN024A8T_at; Start 21; Stop 45
caagccctcctcacaaacgagaagg

SEQ ID NO: 46521 - DNA, 25 bp, Artificial
  probe
  misc_feature (1)..(25): SEQ ID NO: 218; WAN024A8T_at; Start 65; Stop 89
tgaaattatttttgaaactcaagca

SEQ ID NO: 46522 - DNA, 25 bp, Artificial
  probe
  misc_feature (1)..(25): SEQ ID NO: 218; WAN024A8T_at; Start 10; Stop 34
ttaccataaaacaagccctcctcac

SEQ ID NO: 46523 - DNA, 25 bp, Artificial
  probe
  misc_feature (1)..(25): SEQ ID NO: 218; WAN024A8T_at; Start 20; Stop 44
acaagccctcctcacaaacgagaag

SEQ ID NO: 46524 - DNA, 25 bp, Artificial
  probe
  misc_feature (1)..(25): SEQ ID NO: 218; WAN024A8T_at; Start 17; Stop 41
aaaacaagccctcctcacaaacgag

SEQ ID NO: 46525 - DNA, 25 bp, Artificial
  probe
  misc_feature (1)..(25): SEQ ID NO: 218; WAN024A8T_at; Start 9; Stop 33
tttaccataaaacaagccctcctca

SEQ ID NO: 46526 - DNA, 25 bp, Artificial
  probe
  misc_feature (1)..(25): SEQ ID NO: 218; WAN024A8T_at; Start 24; Stop 48
gccctcctcacaaacgagaagggcg

SEQ ID NO: 46527 - DNA, 25 bp, Artificial
  probe
  misc_feature (1)..(25): SEQ ID NO: 218; WAN024A8T_at; Start 18; Stop 42
aaacaagccctcctcacaaacgaga

SEQ ID NO: 46528 - DNA, 25 bp, Artificial
  probe
  misc_feature (1)..(25): SEQ ID NO: 218; WAN024A8T_at; Start 25; Stop 49
ccctcctcacaaacgagaagggcgg

SEQ ID NO: 46529 - DNA, 25 bp, Artificial
  probe
  misc_feature (1)..(25): SEQ ID NO: 218; WAN024A8T_at; Start 66; Stop 90
gaaattatttttgaaactcaagcaa

SEQ ID NO: 46530 - DNA, 25 bp, Artificial
  probe
  misc_feature (1)..(25): SEQ ID NO: 218; WAN024A8T_at; Start 26; Stop 50
cctcctcacaaacgagaagggcgga

SEQ ID NO: 46531 - DNA, 25 bp, Artificial
  probe
  misc_feature (1)..(25): SEQ ID NO: 218; WAN024A8T_at; Start 14; Stop 38
cataaaacaagccctcctcacaaac

SEQ ID NO: 46532 - DNA, 25 bp, Artificial
  probe
  misc_feature (1)..(25): SEQ ID NO: 218; WAN024A8T_at; Start 28; Stop 52
tcctcacaaacgagaagggcggaaa

SEQ ID NO: 46533 - DNA, 25 bp, Artificial
  probe
  misc_feature (1)..(25): SEQ ID NO: 218; WAN024A8T_at; Start 27; Stop 51
ctcctcacaaacgagaagggcggaa

SEQ ID NO: 46534 - DNA, 25 bp, Artificial
  probe
  misc_feature (1)..(25): SEQ ID NO: 218; WAN024A8T_at; Start 23; Stop 47
agccctcctcacaaacgagaagggc

SEQ ID NO: 46535 - DNA, 25 bp, Artificial
  probe
  misc_feature (1)..(25): SEQ ID NO: 218; WAN024A8T_at; Start 13; Stop 37
ccataaaacaagccctcctcacaaa

SEQ ID NO: 46536 - DNA, 25 bp, Artificial
  probe
  misc_feature (1)..(25): SEQ ID NO: 218; WAN024A8T_at; Start 12; Stop 36
accataaaacaagccctcctcacaa

SEQ ID NO: 46537 - DNA, 25 bp, Artificial
  probe
  misc_feature (1)..(25): SEQ ID NO: 218; WAN024A8T_at; Start 64; Stop 88
ttgaaattatttttgaaactcaagc

SEQ ID NO: 46538 - DNA, 25 bp, Artificial
  probe
  misc_feature (1)..(25): SEQ ID NO: 3777; WAN024A8U_at; Start 57; Stop 81
ttgtgaggagggcttgttttatggt

SEQ ID NO: 46539 - DNA, 25 bp, Artificial
  probe
  misc_feature (1)..(25): SEQ ID NO: 3777; WAN024A8U_at; Start 52; Stop 76
ctcgtttgtgaggagggcttgtttt

SEQ ID NO: 46540 - DNA, 25 bp, Artificial
  probe
  misc_feature (1)..(25): SEQ ID NO: 3777; WAN024A8U_at; Start 42; Stop 66
ttccgcccttctcgtttgtgaggag

SEQ ID NO: 46541 - DNA, 25 bp, Artificial
  probe
  misc_feature (1)..(25): SEQ ID NO: 3777; WAN024A8U_at; Start 49; Stop 73
cttctcgtttgtgaggagggcttgt

SEQ ID NO: 46542 - DNA, 25 bp, Artificial
  probe
  misc_feature (1)..(25): SEQ ID NO: 3777; WAN024A8U_at; Start 50; Stop 74
ttctcgtttgtgaggagggcttgtt

SEQ ID NO: 46543 - DNA, 25 bp, Artificial
  probe
  misc_feature (1)..(25): SEQ ID NO: 3777; WAN024A8U_at; Start 47; Stop 71
cccttctcgtttgtgaggagggctt

SEQ ID NO: 46544 - DNA, 25 bp, Artificial
  probe
  misc_feature (1)..(25): SEQ ID NO: 3777; WAN024A8U_at; Start 53; Stop 77
tcgtttgtgaggagggcttgtttta

SEQ ID NO: 46545 - DNA, 25 bp, Artificial
  probe
  misc_feature (1)..(25): SEQ ID NO: 3777; WAN024A8U_at; Start 41; Stop 65
tttccgcccttctcgtttgtgagga

SEQ ID NO: 46546 - DNA, 25 bp, Artificial
  probe
  misc_feature (1)..(25): SEQ ID NO: 3777; WAN024A8U_at; Start 59; Stop 83
gtgaggagggcttgttttatggtaa

SEQ ID NO: 46547 - DNA, 25 bp, Artificial
  probe
  misc_feature (1)..(25): SEQ ID NO: 3777; WAN024A8U_at; Start 46; Stop 70
gcccttctcgtttgtgaggagggct

SEQ ID NO: 46548 - DNA, 25 bp, Artificial
  probe
  misc_feature (1)..(25): SEQ ID NO: 3777; WAN024A8U_at; Start 54; Stop 78
cgtttgtgaggagggcttgttttat

SEQ ID NO: 46549 - DNA, 25 bp, Artificial
  probe
  misc_feature (1)..(25): SEQ ID NO: 3777; WAN024A8U_at; Start 45; Stop 69
cgcccttctcgtttgtgaggagggc

SEQ ID NO: 46550 - DNA, 25 bp, Artificial
  probe
  misc_feature (1)..(25): SEQ ID NO: 3777; WAN024A8U_at; Start 56; Stop 80
tttgtgaggagggcttgttttatgg

SEQ ID NO: 46551 - DNA, 25 bp, Artificial
  probe
  misc_feature (1)..(25): SEQ ID NO: 3777; WAN024A8U_at; Start 4; Stop 28
tgcttgagtttcaaaaataatttca

SEQ ID NO: 46552 - DNA, 25 bp, Artificial
  probe
  misc_feature (1)..(25): SEQ ID NO: 3777; WAN024A8U_at; Start 3; Stop 27
ttgcttgagtttcaaaaataatttc

SEQ ID NO: 46553 - DNA, 25 bp, Artificial
  probe
  misc_feature (1)..(25): SEQ ID NO: 3777; WAN024A8U_at; Start 55; Stop 79
gtttgtgaggagggcttgttttatg

SEQ ID NO: 46554 - DNA, 25 bp, Artificial
  probe
  misc_feature (1)..(25): SEQ ID NO: 3777; WAN024A8U_at; Start 58; Stop 82
tgtgaggagggcttgttttatggta

SEQ ID NO: 46555 - DNA, 25 bp, Artificial
  probe
  misc_feature (1)..(25): SEQ ID NO: 3777; WAN024A8U_at; Start 51; Stop 75
tctcgtttgtgaggagggcttgttt

SEQ ID NO: 46556 - DNA, 25 bp, Artificial
  probe
  misc_feature (1)..(25): SEQ ID NO: 3777; WAN024A8U_at; Start 60; Stop 84
tgaggagggcttgttttatggtaaa

SEQ ID NO: 46557 - DNA, 25 bp, Artificial
  probe
  misc_feature (1)..(25): SEQ ID NO: 3777; WAN024A8U_at; Start 43; Stop 67
tccgcccttctcgtttgtgaggagg

SEQ ID NO: 46558 - DNA, 25 bp, Artificial
  probe
  misc_feature (1)..(25): SEQ ID NO: 3777; WAN024A8U_at; Start 5; Stop 29
gcttgagtttcaaaaataatttcaa

SEQ ID NO: 46559 - DNA, 25 bp, Artificial
  probe
  misc_feature (1)..(25): SEQ ID NO: 3777; WAN024A8U_at; Start 48; Stop 72
ccttctcgtttgtgaggagggcttg

SEQ ID NO: 46560 - DNA, 25 bp, Artificial
  probe
  misc_feature (1)..(25): SEQ ID NO: 3777; WAN024A8U_at; Start 44; Stop 68
ccgcccttctcgtttgtgaggaggg

SEQ ID NO: 46561 - DNA, 25 bp, Artificial
  probe
  misc_feature (1)..(25): SEQ ID NO: 3132; WAN024A8V_at; Start 20; Stop 44
tttgaaactattgtatcaaaaccga

SEQ ID NO: 46562 - DNA, 25 bp, Artificial
  probe
  misc_feature (1)..(25): SEQ ID NO: 3132; WAN024A8V_at; Start 4; Stop 28
aaagctcctctcaaattttgaaact

SEQ ID NO: 46563 - DNA, 25 bp, Artificial
  probe
  misc_feature (1)..(25): SEQ ID NO: 3132; WAN024A8V_at; Start 29; Stop 53
attgtatcaaaaccgaaaggagctt

SEQ ID NO: 46564 - DNA, 25 bp, Artificial
  probe
  misc_feature (1)..(25): SEQ ID NO: 3132; WAN024A8V_at; Start 26; Stop 50
actattgtatcaaaaccgaaaggag

SEQ ID NO: 46565 - DNA, 25 bp, Artificial
  probe
  misc_feature (1)..(25): SEQ ID NO: 3132; WAN024A8V_at; Start 9; Stop 33
tcctctcaaattttgaaactattgt

SEQ ID NO: 46566 - DNA, 25 bp, Artificial
  probe
  misc_feature (1)..(25): SEQ ID NO: 3132; WAN024A8V_at; Start 7; Stop 31
gctcctctcaaattttgaaactatt

SEQ ID NO: 46567 - DNA, 25 bp, Artificial
  probe
  misc_feature (1)..(25): SEQ ID NO: 3132; WAN024A8V_at; Start 6; Stop 30
agctcctctcaaattttgaaactat

SEQ ID NO: 46568 - DNA, 25 bp, Artificial
  probe
  misc_feature (1)..(25): SEQ ID NO: 3132; WAN024A8V_at; Start 15; Stop 39
caaattttgaaactattgtatcaaa

SEQ ID NO: 46569 - DNA, 25 bp, Artificial
  probe
  misc_feature (1)..(25): SEQ ID NO: 3132; WAN024A8V_at; Start 5; Stop 29
aagctcctctcaaattttgaaacta

SEQ ID NO: 46570 - DNA, 25 bp, Artificial
  probe
  misc_feature (1)..(25): SEQ ID NO: 3132; WAN024A8V_at; Start 2; Stop 26
ttaaagctcctctcaaattttgaaa

SEQ ID NO: 46571 - DNA, 25 bp, Artificial
  probe
  misc_feature (1)..(25): SEQ ID NO: 3132; WAN024A8V_at; Start 12; Stop 36
tctcaaattttgaaactattgtatc

SEQ ID NO: 46572 - DNA, 25 bp, Artificial
  probe
  misc_feature (1)..(25): SEQ ID NO: 3132; WAN024A8V_at; Start 8; Stop 32
ctcctctcaaattttgaaactattg

SEQ ID NO: 46573 - DNA, 25 bp, Artificial
  probe
  misc_feature (1)..(25): SEQ ID NO: 3132; WAN024A8V_at; Start 14; Stop 38
tcaaattttgaaactattgtatcaa

SEQ ID NO: 46574 - DNA, 25 bp, Artificial
  probe
  misc_feature (1)..(25): SEQ ID NO: 3132; WAN024A8V_at; Start 21; Stop 45
ttgaaactattgtatcaaaaccgaa

SEQ ID NO: 46575 - DNA, 25 bp, Artificial
  probe
  misc_feature (1)..(25): SEQ ID NO: 3132; WAN024A8V_at; Start 10; Stop 34
cctctcaaattttgaaactattgta

SEQ ID NO: 46576 - DNA, 25 bp, Artificial
  probe
  misc_feature (1)..(25): SEQ ID NO: 3132; WAN024A8V_at; Start 11; Stop 35
ctctcaaattttgaaactattgtat

SEQ ID NO: 46577 - DNA, 25 bp, Artificial
  probe
  misc_feature (1)..(25): SEQ ID NO: 3132; WAN024A8V_at; Start 13; Stop 37
ctcaaattttgaaactattgtatca

SEQ ID NO: 46578 - DNA, 25 bp, Artificial
  probe
  misc_feature (1)..(25): SEQ ID NO: 3132; WAN024A8V_at; Start 28; Stop 52
tattgtatcaaaaccgaaaggagct

SEQ ID NO: 46579 - DNA, 25 bp, Artificial
  probe
  misc_feature (1)..(25): SEQ ID NO: 3132; WAN024A8V_at; Start 3; Stop 27
taaagctcctctcaaattttgaaac

SEQ ID NO: 46580 - DNA, 25 bp, Artificial
  probe
  misc_feature (1)..(25): SEQ ID NO: 3132; WAN024A8V_at; Start 1; Stop 25
attaaagctcctctcaaattttgaa

SEQ ID NO: 46581 - DNA, 25 bp, Artificial
  probe
  misc_feature (1)..(25): SEQ ID NO: 3132; WAN024A8V_at; Start 22; Stop 46
tgaaactattgtatcaaaaccgaaa

SEQ ID NO: 46582 - DNA, 25 bp, Artificial
  probe
  misc_feature (1)..(25): SEQ ID NO: 3132; WAN024A8V_at; Start 27; Stop 51
ctattgtatcaaaaccgaaaggagc

SEQ ID NO: 46583 - DNA, 25 bp, Artificial
  probe
  misc_feature (1)..(25): SEQ ID NO: 5939; WAN024A8W_at; Start 42; Stop 66
ttgatacaatagtttcaaaatttga

SEQ ID NO: 46584 - DNA, 25 bp, Artificial
  probe
  misc_feature (1)..(25): SEQ ID NO: 5939; WAN024A8W_at; Start 47; Stop 71
acaatagtttcaaaatttgagagga

SEQ ID NO: 46585 - DNA, 25 bp, Artificial
  probe
  misc_feature (1)..(25): SEQ ID NO: 5939; WAN024A8W_at; Start 34; Stop 58
tttcggttttgatacaatagtttca

SEQ ID NO: 46586 - DNA, 25 bp, Artificial
  probe
  misc_feature (1)..(25): SEQ ID NO: 5939; WAN024A8W_at; Start 36; Stop 60
tcggttttgatacaatagtttcaaa

SEQ ID NO: 46587 - DNA, 25 bp, Artificial
  probe
  misc_feature (1)..(25): SEQ ID NO: 5939; WAN024A8W_at; Start 28; Stop 52
agctcctttcggttttgatacaata

SEQ ID NO: 46588 - DNA, 25 bp, Artificial
  probe
  misc_feature (1)..(25): SEQ ID NO: 5939; WAN024A8W_at; Start 53; Stop 77
gtttcaaaatttgagaggagcttta

SEQ ID NO: 46589 - DNA, 25 bp, Artificial
  probe
  misc_feature (1)..(25): SEQ ID NO: 5939; WAN024A8W_at; Start 41; Stop 65
tttgatacaatagtttcaaaatttg

SEQ ID NO: 46590 - DNA, 25 bp, Artificial
  probe
  misc_feature (1)..(25): SEQ ID NO: 5939; WAN024A8W_at; Start 43; Stop 67
tgatacaatagtttcaaaatttgag

SEQ ID NO: 46591 - DNA, 25 bp, Artificial
  probe
  misc_feature (1)..(25): SEQ ID NO: 5939; WAN024A8W_at; Start 55; Stop 79
ttcaaaatttgagaggagctttaat

SEQ ID NO: 46592 - DNA, 25 bp, Artificial
  probe
  misc_feature (1)..(25): SEQ ID NO: 5939; WAN024A8W_at; Start 35; Stop 59
ttcggttttgatacaatagtttcaa

SEQ ID NO: 46593 - DNA, 25 bp, Artificial
  probe
  misc_feature (1)..(25): SEQ ID NO: 5939; WAN024A8W_at; Start 51; Stop 75
tagtttcaaaatttgagaggagctt

SEQ ID NO: 46594 - DNA, 25 bp, Artificial
  probe
  misc_feature (1)..(25): SEQ ID NO: 5939; WAN024A8W_at; Start 27; Stop 51
aagctcctttcggttttgatacaat

SEQ ID NO: 46595 - DNA, 25 bp, Artificial
  probe
  misc_feature (1)..(25): SEQ ID NO: 5939; WAN024A8W_at; Start 54; Stop 78
tttcaaaatttgagaggagctttaa

SEQ ID NO: 46596 - DNA, 25 bp, Artificial
  probe
  misc_feature (1)..(25): SEQ ID NO: 5939; WAN024A8W_at; Start 49; Stop 73
aatagtttcaaaatttgagaggagc

SEQ ID NO: 46597 - DNA, 25 bp, Artificial
  probe
  misc_feature (1)..(25): SEQ ID NO: 5939; WAN024A8W_at; Start 44; Stop 68
gatacaatagtttcaaaatttgaga

SEQ ID NO: 46598 - DNA, 25 bp, Artificial
  probe
  misc_feature (1)..(25): SEQ ID NO: 5939; WAN024A8W_at; Start 48; Stop 72
caatagtttcaaaatttgagaggag

SEQ ID NO: 46599 - DNA, 25 bp, Artificial
  probe
  misc_feature (1)..(25): SEQ ID NO: 5939; WAN024A8W_at; Start 30; Stop 54
ctcctttcggttttgatacaatagt

SEQ ID NO: 46600 - DNA, 25 bp, Artificial
  probe
  misc_feature (1)..(25): SEQ ID NO: 5939; WAN024A8W_at; Start 50; Stop 74
atagtttcaaaatttgagaggagct

SEQ ID NO: 46601 - DNA, 25 bp, Artificial
  probe
  misc_feature (1)..(25): SEQ ID NO: 5939; WAN024A8W_at; Start 45; Stop 69
atacaatagtttcaaaatttgagag

SEQ ID NO: 46602 - DNA, 25 bp, Artificial
  probe
  misc_feature (1)..(25): SEQ ID NO: 5939; WAN024A8W_at; Start 52; Stop 76
agtttcaaaatttgagaggagcttt

SEQ ID NO: 46603 - DNA, 25 bp, Artificial
  probe
  misc_feature (1)..(25): SEQ ID NO: 5939; WAN024A8W_at; Start 46; Stop 70
tacaatagtttcaaaatttgagagg

SEQ ID NO: 46604 - DNA, 25 bp, Artificial
  probe
  misc_feature (1)..(25): SEQ ID NO: 5939; WAN024A8W_at; Start 29; Stop 53
gctcctttcggttttgatacaatag

SEQ ID NO: 46605 - DNA, 25 bp, Artificial
  probe
  misc_feature (1)..(25): SEQ ID NO: 320; WAN024A8X_at; Start 148; Stop 172
gtttcaaatagttatcgcacaagtc

SEQ ID NO: 46606 - DNA, 25 bp, Artificial
  probe
  misc_feature (1)..(25): SEQ ID NO: 320; WAN024A8X_at; Start 131; Stop 155
tctaaccagctaatcttgtttcaaa

SEQ ID NO: 46607 - DNA, 25 bp, Artificial
  probe
  misc_feature (1)..(25): SEQ ID NO: 320; WAN024A8X_at; Start 2; Stop 26
caagtagtatagcatgtttccctaa

SEQ ID NO: 46608 - DNA, 25 bp, Artificial
  probe
  misc_feature (1)..(25): SEQ ID NO: 320; WAN024A8X_at; Start 118; Stop 142
tcttgttggattttctaaccagcta

SEQ ID NO: 46609 - DNA, 25 bp, Artificial
  probe
  misc_feature (1)..(25): SEQ ID NO: 320; WAN024A8X_at; Start 4; Stop 28
agtagtatagcatgtttccctaagg

SEQ ID NO: 46610 - DNA, 25 bp, Artificial
  probe
  misc_feature (1)..(25): SEQ ID NO: 320; WAN024A8X_at; Start 25; Stop 49
aaggcattcaagataatcgtaagtc

SEQ ID NO: 46611 - DNA, 25 bp, Artificial
  probe
  misc_feature (1)..(25): SEQ ID NO: 320; WAN024A8X_at; Start 36; Stop 60
gataatcgtaagtcttttagtacaa

SEQ ID NO: 46612 - DNA, 25 bp, Artificial
  probe
  misc_feature (1)..(25): SEQ ID NO: 320; WAN024A8X_at; Start 124; Stop 148
tggattttctaaccagctaatcttg

SEQ ID NO: 46613 - DNA, 25 bp, Artificial
  probe
  misc_feature (1)..(25): SEQ ID NO: 320; WAN024A8X_at; Start 14; Stop 38
catgtttccctaaggcattcaagat

SEQ ID NO: 46614 - DNA, 25 bp, Artificial
  probe
  misc_feature (1)..(25): SEQ ID NO: 320; WAN024A8X_at; Start 11; Stop 35
tagcatgtttccctaaggcattcaa

SEQ ID NO: 46615 - DNA, 25 bp, Artificial
  probe
  misc_feature (1)..(25): SEQ ID NO: 320; WAN024A8X_at; Start 180; Stop 204
taattcttttcatcatttacgtacg

SEQ ID NO: 46616 - DNA, 25 bp, Artificial
  probe
  misc_feature (1)..(25): SEQ ID NO: 320; WAN024A8X_at; Start 151; Stop 175
tcaaatagttatcgcacaagtctat

SEQ ID NO: 46617 - DNA, 25 bp, Artificial
  probe
  misc_feature (1)..(25): SEQ ID NO: 320; WAN024A8X_at; Start 23; Stop 47
ctaaggcattcaagataatcgtaag

SEQ ID NO: 46618 - DNA, 25 bp, Artificial
  probe
  misc_feature (1)..(25): SEQ ID NO: 320; WAN024A8X_at; Start 20; Stop 44
tccctaaggcattcaagataatcgt

SEQ ID NO: 46619 - DNA, 25 bp, Artificial
  probe
  misc_feature (1)..(25): SEQ ID NO: 320; WAN024A8X_at; Start 17; Stop 41
gtttccctaaggcattcaagataat

SEQ ID NO: 46620 - DNA, 25 bp, Artificial
  probe
  misc_feature (1)..(25): SEQ ID NO: 320; WAN024A8X_at; Start 157; Stop 181
agttatcgcacaagtctattattta

SEQ ID NO: 46621 - DNA, 25 bp, Artificial
  probe
  misc_feature (1)..(25): SEQ ID NO: 320; WAN024A8X_at; Start 1; Stop 25
acaagtagtatagcatgtttcccta

SEQ ID NO: 46622 - DNA, 25 bp, Artificial
  probe
  misc_feature (1)..(25): SEQ ID NO: 320; WAN024A8X_at; Start 136; Stop 160
ccagctaatcttgtttcaaatagtt

SEQ ID NO: 46623 - DNA, 25 bp, Artificial
  probe
  misc_feature (1)..(25): SEQ ID NO: 320; WAN024A8X_at; Start 9; Stop 33
tatagcatgtttccctaaggcattc

SEQ ID NO: 46624 - DNA, 25 bp, Artificial
  probe
  misc_feature (1)..(25): SEQ ID NO: 320; WAN024A8X_at; Start 21; Stop 45
ccctaaggcattcaagataatcgta

SEQ ID NO: 46625 - DNA, 25 bp, Artificial
  probe
  misc_feature (1)..(25): SEQ ID NO: 320; WAN024A8X_at; Start 116; Stop 140
tatcttgttggattttctaaccagc

SEQ ID NO: 46626 - DNA, 25 bp, Artificial
  probe
  misc_feature (1)..(25): SEQ ID NO: 320; WAN024A8X_at; Start 27; Stop 51
ggcattcaagataatcgtaagtctt

SEQ ID NO: 46627 - DNA, 25 bp, Artificial
  probe
  misc_feature (1)..(25): SEQ ID NO: 320; WAN024A8X_at; Start 162; Stop 186
tcgcacaagtctattatttaattct

SEQ ID NO: 46628 - DNA, 25 bp, Artificial
  probe
  misc_feature (1)..(25): SEQ ID NO: 320; WAN024A8X_at; Start 134; Stop 158
aaccagctaatcttgtttcaaatag

SEQ ID NO: 46629 - DNA, 25 bp, Artificial
  probe
  misc_feature (1)..(25): SEQ ID NO: 320; WAN024A8X_at; Start 121; Stop 145
tgttggattttctaaccagctaatc

SEQ ID NO: 46630 - DNA, 25 bp, Artificial
  probe
  misc_feature (1)..(25): SEQ ID NO: 320; WAN024A8X_at; Start 13; Stop 37
gcatgtttccctaaggcattcaaga

SEQ ID NO: 46631 - DNA, 25 bp, Artificial
  probe
  misc_feature (1)..(25): SEQ ID NO: 320; WAN024A8X_at; Start 113; Stop 137
cactatcttgttggattttctaacc

SEQ ID NO: 46632 - DNA, 25 bp, Artificial
  probe
  misc_feature (1)..(25): SEQ ID NO: 320; WAN024A8X_at; Start 126; Stop 150
gattttctaaccagctaatcttgtt

SEQ ID NO: 46633 - DNA, 25 bp, Artificial
  probe
  misc_feature (1)..(25): SEQ ID NO: 320; WAN024A8X_at; Start 7; Stop 31
agtatagcatgtttccctaaggcat

SEQ ID NO: 46634 - DNA, 25 bp, Artificial
  probe
  misc_feature (1)..(25): SEQ ID NO: 320; WAN024A8X_at; Start 29; Stop 53
cattcaagataatcgtaagtctttt

SEQ ID NO: 46635 - DNA, 25 bp, Artificial
  probe
  misc_feature (1)..(25): SEQ ID NO: 320; WAN024A8X_at; Start 19; Stop 43
ttccctaaggcattcaagataatcg

SEQ ID NO: 46636 - DNA, 25 bp, Artificial
  probe
  misc_feature (1)..(25): SEQ ID NO: 320; WAN024A8X_at; Start 6; Stop 30
tagtatagcatgtttccctaaggca

SEQ ID NO: 46637 - DNA, 25 bp, Artificial
  probe
  misc_feature (1)..(25): SEQ ID NO: 320; WAN024A8X_at; Start 150; Stop 174
ttcaaatagttatcgcacaagtcta

SEQ ID NO: 46638 - DNA, 25 bp, Artificial
  probe
  misc_feature (1)..(25): SEQ ID NO: 320; WAN024A8X_at; Start 144; Stop 168
tcttgtttcaaatagttatcgcaca

SEQ ID NO: 46639 - DNA, 25 bp, Artificial
  probe
  misc_feature (1)..(25): SEQ ID NO: 3262; WAN024A8Y_at; Start 169; Stop 193
cttgaatgccttagggaaacatgct

SEQ ID NO: 46640 - DNA, 25 bp, Artificial
  probe
  misc_feature (1)..(25): SEQ ID NO: 3262; WAN024A8Y_at; Start 37; Stop 61
tgtgcgataactatttgaaacaaga

SEQ ID NO: 46641 - DNA, 25 bp, Artificial
  probe
  misc_feature (1)..(25): SEQ ID NO: 3262; WAN024A8Y_at; Start 60; Stop 84
gattagctggttagaaaatccaaca

SEQ ID NO: 46642 - DNA, 25 bp, Artificial
  probe
  misc_feature (1)..(25): SEQ ID NO: 3262; WAN024A8Y_at; Start 68; Stop 92
ggttagaaaatccaacaagatagtg

SEQ ID NO: 46643 - DNA, 25 bp, Artificial
  probe
  misc_feature (1)..(25): SEQ ID NO: 3262; WAN024A8Y_at; Start 24; Stop 48
taaataatagacttgtgcgataact

SEQ ID NO: 46644 - DNA, 25 bp, Artificial
  probe
  misc_feature (1)..(25): SEQ ID NO: 3262; WAN024A8Y_at; Start 146; Stop 170
tgtactaaaagacttacgattatct

SEQ ID NO: 46645 - DNA, 25 bp, Artificial
  probe
  misc_feature (1)..(25): SEQ ID NO: 3262; WAN024A8Y_at; Start 47; Stop 71
ctatttgaaacaagattagctggtt

SEQ ID NO: 46646 - DNA, 25 bp, Artificial
  probe
  misc_feature (1)..(25): SEQ ID NO: 3262; WAN024A8Y_at; Start 44; Stop 68
taactatttgaaacaagattagctg

SEQ ID NO: 46647 - DNA, 25 bp, Artificial
  probe
  misc_feature (1)..(25): SEQ ID NO: 3262; WAN024A8Y_at; Start 177; Stop 201
ccttagggaaacatgctatactact

SEQ ID NO: 46648 - DNA, 25 bp, Artificial
  probe
  misc_feature (1)..(25): SEQ ID NO: 3262; WAN024A8Y_at; Start 39; Stop 63
tgcgataactatttgaaacaagatt

SEQ ID NO: 46649 - DNA, 25 bp, Artificial
  probe
  misc_feature (1)..(25): SEQ ID NO: 3262; WAN024A8Y_at; Start 179; Stop 203
ttagggaaacatgctatactacttg

SEQ ID NO: 46650 - DNA, 25 bp, Artificial
  probe
  misc_feature (1)..(25): SEQ ID NO: 3262; WAN024A8Y_at; Start 175; Stop 199
tgccttagggaaacatgctatacta

SEQ ID NO: 46651 - DNA, 25 bp, Artificial
  probe
  misc_feature (1)..(25): SEQ ID NO: 3262; WAN024A8Y_at; Start 160; Stop 184
tacgattatcttgaatgccttaggg

SEQ ID NO: 46652 - DNA, 25 bp, Artificial
  probe
  misc_feature (1)..(25): SEQ ID NO: 3262; WAN024A8Y_at; Start 166; Stop 190
tatcttgaatgccttagggaaacat

SEQ ID NO: 46653 - DNA, 25 bp, Artificial
  probe
  misc_feature (1)..(25): SEQ ID NO: 3262; WAN024A8Y_at; Start 57; Stop 81
caagattagctggttagaaaatcca

SEQ ID NO: 46654 - DNA, 25 bp, Artificial
  probe
  misc_feature (1)..(25): SEQ ID NO: 3262; WAN024A8Y_at; Start 31; Stop 55
tagacttgtgcgataactatttgaa

SEQ ID NO: 46655 - DNA, 25 bp, Artificial
  probe
  misc_feature (1)..(25): SEQ ID NO: 3262; WAN024A8Y_at; Start 163; Stop 187
gattatcttgaatgccttagggaaa

SEQ ID NO: 46656 - DNA, 25 bp, Artificial
  probe
  misc_feature (1)..(25): SEQ ID NO: 3262; WAN024A8Y_at; Start 154; Stop 178
aagacttacgattatcttgaatgcc

SEQ ID NO: 46657 - DNA, 25 bp, Artificial
  probe
  misc_feature (1)..(25): SEQ ID NO: 3262; WAN024A8Y_at; Start 65; Stop 89
gctggttagaaaatccaacaagata

SEQ ID NO: 46658 - DNA, 25 bp, Artificial
  probe
  misc_feature (1)..(25): SEQ ID NO: 3262; WAN024A8Y_at; Start 63; Stop 87
tagctggttagaaaatccaacaaga

SEQ ID NO: 46659 - DNA, 25 bp, Artificial
  probe
  misc_feature (1)..(25): SEQ ID NO: 3262; WAN024A8Y_at; Start 176; Stop 200
gccttagggaaacatgctatactac

SEQ ID NO: 46660 - DNA, 25 bp, Artificial
  probe
  misc_feature (1)..(25): SEQ ID NO: 3262; WAN024A8Y_at; Start 168; Stop 192
tcttgaatgccttagggaaacatgc

SEQ ID NO: 46661 - DNA, 25 bp, Artificial
  probe
  misc_feature (1)..(25): SEQ ID NO: 3262; WAN024A8Y_at; Start 5; Stop 29
cgtaaatgatgaaaagaattaaata

SEQ ID NO: 46662 - DNA, 25 bp, Artificial
  probe
  misc_feature (1)..(25): SEQ ID NO: 3262; WAN024A8Y_at; Start 1; Stop 25
cgtacgtaaatgatgaaaagaatta

SEQ ID NO: 46663 - DNA, 25 bp, Artificial
  probe
  misc_feature (1)..(25): SEQ ID NO: 3262; WAN024A8Y_at; Start 20; Stop 44
gaattaaataatagacttgtgcgat

SEQ ID NO: 46664 - DNA, 25 bp, Artificial
  probe
  misc_feature (1)..(25): SEQ ID NO: 3262; WAN024A8Y_at; Start 173; Stop 197
aatgccttagggaaacatgctatac

SEQ ID NO: 46665 - DNA, 25 bp, Artificial
  probe
  misc_feature (1)..(25): SEQ ID NO: 3262; WAN024A8Y_at; Start 172; Stop 196
gaatgccttagggaaacatgctata

SEQ ID NO: 46666 - DNA, 25 bp, Artificial
  probe
  misc_feature (1)..(25): SEQ ID NO: 3262; WAN024A8Y_at; Start 180; Stop 204
tagggaaacatgctatactacttgt

SEQ ID NO: 46667 - DNA, 25 bp, Artificial
  probe
  misc_feature (1)..(25): SEQ ID NO: 3262; WAN024A8Y_at; Start 71; Stop 95
tagaaaatccaacaagatagtgaag

SEQ ID NO: 46668 - DNA, 25 bp, Artificial
  probe
  misc_feature (1)..(25): SEQ ID NO: 3262; WAN024A8Y_at; Start 162; Stop 186
cgattatcttgaatgccttagggaa

SEQ ID NO: 46669 - DNA, 25 bp, Artificial
  probe
  misc_feature (1)..(25): SEQ ID NO: 3262; WAN024A8Y_at; Start 50; Stop 74
tttgaaacaagattagctggttaga

SEQ ID NO: 46670 - DNA, 25 bp, Artificial
  probe
  misc_feature (1)..(25): SEQ ID NO: 3262; WAN024A8Y_at; Start 53; Stop 77
gaaacaagattagctggttagaaaa

SEQ ID NO: 46671 - DNA, 25 bp, Artificial
  probe
  misc_feature (1)..(25): SEQ ID NO: 3262; WAN024A8Y_at; Start 156; Stop 180
gacttacgattatcttgaatgcctt

SEQ ID NO: 46672 - DNA, 25 bp, Artificial
  probe
  misc_feature (1)..(25): SEQ ID NO: 3262; WAN024A8Y_at; Start 33; Stop 57
gacttgtgcgataactatttgaaac

SEQ ID NO: 46673 - DNA, 25 bp, Artificial
  probe
  misc_feature (1)..(25): SEQ ID NO: 4336; WAN024A8Z_at; Start 34; Stop 58
aaatataatcatatcctaaaatccc

SEQ ID NO: 46674 - DNA, 25 bp, Artificial
  probe
  misc_feature (1)..(25): SEQ ID NO: 4336; WAN024A8Z_at; Start 28; Stop 52
attaacaaatataatcatatcctaa

SEQ ID NO: 46675 - DNA, 25 bp, Artificial
  probe
  misc_feature (1)..(25): SEQ ID NO: 4336; WAN024A8Z_at; Start 26; Stop 50
taattaacaaatataatcatatcct

SEQ ID NO: 46676 - DNA, 25 bp, Artificial
  probe
  misc_feature (1)..(25): SEQ ID NO: 4336; WAN024A8Z_at; Start 27; Stop 51
aattaacaaatataatcatatccta

SEQ ID NO: 46677 - DNA, 25 bp, Artificial
  probe
  misc_feature (1)..(25): SEQ ID NO: 4336; WAN024A8Z_at; Start 31; Stop 55
aacaaatataatcatatcctaaaat

SEQ ID NO: 46678 - DNA, 25 bp, Artificial
  probe
  misc_feature (1)..(25): SEQ ID NO: 4336; WAN024A8Z_at; Start 25; Stop 49
ctaattaacaaatataatcatatcc

SEQ ID NO: 46679 - DNA, 25 bp, Artificial
  probe
  misc_feature (1)..(25): SEQ ID NO: 4336; WAN024A8Z_at; Start 37; Stop 61
tataatcatatcctaaaatcccttt

SEQ ID NO: 46680 - DNA, 25 bp, Artificial
  probe
  misc_feature (1)..(25): SEQ ID NO: 4336; WAN024A8Z_at; Start 20; Stop 44
aatttctaattaacaaatataatca

SEQ ID NO: 46681 - DNA, 25 bp, Artificial
  probe
  misc_feature (1)..(25): SEQ ID NO: 4336; WAN024A8Z_at; Start 29; Stop 53
ttaacaaatataatcatatcctaaa

SEQ ID NO: 46682 - DNA, 25 bp, Artificial
  probe
  misc_feature (1)..(25): SEQ ID NO: 4336; WAN024A8Z_at; Start 39; Stop 63
taatcatatcctaaaatccctttta

SEQ ID NO: 46683 - DNA, 25 bp, Artificial
  probe
  misc_feature (1)..(25): SEQ ID NO: 4336; WAN024A8Z_at; Start 32; Stop 56
acaaatataatcatatcctaaaatc

SEQ ID NO: 46684 - DNA, 25 bp, Artificial
  probe
  misc_feature (1)..(25): SEQ ID NO: 4336; WAN024A8Z_at; Start 40; Stop 64
aatcatatcctaaaatcccttttag

SEQ ID NO: 46685 - DNA, 25 bp, Artificial
  probe
  misc_feature (1)..(25): SEQ ID NO: 4336; WAN024A8Z_at; Start 41; Stop 65
atcatatcctaaaatcccttttagg

SEQ ID NO: 46686 - DNA, 25 bp, Artificial
  probe
  misc_feature (1)..(25): SEQ ID NO: 4336; WAN024A8Z_at; Start 33; Stop 57
caaatataatcatatcctaaaatcc

SEQ ID NO: 46687 - DNA, 25 bp, Artificial
  probe
  misc_feature (1)..(25): SEQ ID NO: 4336; WAN024A8Z_at; Start 35; Stop 59
aatataatcatatcctaaaatccct

SEQ ID NO: 46688 - DNA, 25 bp, Artificial
  probe
  misc_feature (1)..(25): SEQ ID NO: 4336; WAN024A8Z_at; Start 30; Stop 54
taacaaatataatcatatcctaaaa

SEQ ID NO: 46689 - DNA, 25 bp, Artificial
  probe
  misc_feature (1)..(25): SEQ ID NO: 4336; WAN024A8Z_at; Start 38; Stop 62
ataatcatatcctaaaatccctttt

SEQ ID NO: 46690 - DNA, 25 bp, Artificial
  probe
  misc_feature (1)..(25): SEQ ID NO: 4336; WAN024A8Z_at; Start 24; Stop 48
tctaattaacaaatataatcatatc

SEQ ID NO: 46691 - DNA, 25 bp, Artificial
  probe
  misc_feature (1)..(25): SEQ ID NO: 4336; WAN024A8Z_at; Start 19; Stop 43
taatttctaattaacaaatataatc

SEQ ID NO: 46692 - DNA, 25 bp, Artificial
  probe
  misc_feature (1)..(25): SEQ ID NO: 4336; WAN024A8Z_at; Start 36; Stop 60
atataatcatatcctaaaatccctt

SEQ ID NO: 46693 - DNA, 25 bp, Artificial
  probe
  misc_feature (1)..(25): SEQ ID NO: 83; WAN024A92_at; Start 42; Stop 66
ctaaaagggattttaggatatgatt

SEQ ID NO: 46694 - DNA, 25 bp, Artificial
  probe
  misc_feature (1)..(25): SEQ ID NO: 83; WAN024A92_at; Start 43; Stop 67
taaaagggattttaggatatgatta

SEQ ID NO: 46695 - DNA, 25 bp, Artificial
  probe
  misc_feature (1)..(25): SEQ ID NO: 83; WAN024A92_at; Start 58; Stop 82
gatatgattatatttgttaattaga

SEQ ID NO: 46696 - DNA, 25 bp, Artificial
  probe
  misc_feature (1)..(25): SEQ ID NO: 83; WAN024A92_at; Start 46; Stop 70
aagggattttaggatatgattatat

SEQ ID NO: 46697 - DNA, 25 bp, Artificial
  probe
  misc_feature (1)..(25): SEQ ID NO: 83; WAN024A92_at; Start 45; Stop 69
aaagggattttaggatatgattata

SEQ ID NO: 46698 - DNA, 25 bp, Artificial
  probe
  misc_feature (1)..(25): SEQ ID NO: 83; WAN024A92_at; Start 41; Stop 65
cctaaaagggattttaggatatgat

SEQ ID NO: 46699 - DNA, 25 bp, Artificial
  probe
  misc_feature (1)..(25): SEQ ID NO: 83; WAN024A92_at; Start 44; Stop 68
aaaagggattttaggatatgattat

SEQ ID NO: 46700 - DNA, 25 bp, Artificial
  probe
  misc_feature (1)..(25): SEQ ID NO: 83; WAN024A92_at; Start 57; Stop 81
ggatatgattatatttgttaattag

SEQ ID NO: 46701 - DNA, 25 bp, Artificial
  probe
  misc_feature (1)..(25): SEQ ID NO: 83; WAN024A92_at; Start 50; Stop 74
gattttaggatatgattatatttgt

SEQ ID NO: 46702 - DNA, 25 bp, Artificial
  probe
  misc_feature (1)..(25): SEQ ID NO: 83; WAN024A92_at; Start 48; Stop 72
gggattttaggatatgattatattt

SEQ ID NO: 46703 - DNA, 25 bp, Artificial
  probe
  misc_feature (1)..(25): SEQ ID NO: 83; WAN024A92_at; Start 49; Stop 73
ggattttaggatatgattatatttg

SEQ ID NO: 46704 - DNA, 25 bp, Artificial
  probe
  misc_feature (1)..(25): SEQ ID NO: 83; WAN024A92_at; Start 47; Stop 71
agggattttaggatatgattatatt

SEQ ID NO: 46705 - DNA, 25 bp, Artificial
  probe
  misc_feature (1)..(25): SEQ ID NO: 483; WAN024A93_at; Start 116; Stop 140
tcaacttataagaaaagaggtgtcc

SEQ ID NO: 46706 - DNA, 25 bp, Artificial
  probe
  misc_feature (1)..(25): SEQ ID NO: 483; WAN024A93_at; Start 79; Stop 103
atggagtcaatcaaattttccgtaa

SEQ ID NO: 46707 - DNA, 25 bp, Artificial
  probe
  misc_feature (1)..(25): SEQ ID NO: 483; WAN024A93_at; Start 68; Stop 92
taaaaatcctaatggagtcaatcaa

SEQ ID NO: 46708 - DNA, 25 bp, Artificial
  probe
  misc_feature (1)..(25): SEQ ID NO: 483; WAN024A93_at; Start 67; Stop 91
ttaaaaatcctaatggagtcaatca

SEQ ID NO: 46709 - DNA, 25 bp, Artificial
  probe
  misc_feature (1)..(25): SEQ ID NO: 483; WAN024A93_at; Start 75; Stop 99
cctaatggagtcaatcaaattttcc

SEQ ID NO: 46710 - DNA, 25 bp, Artificial
  probe
  misc_feature (1)..(25): SEQ ID NO: 483; WAN024A93_at; Start 70; Stop 94
aaaatcctaatggagtcaatcaaat

SEQ ID NO: 46711 - DNA, 25 bp, Artificial
  probe
  misc_feature (1)..(25): SEQ ID NO: 483; WAN024A93_at; Start 21; Stop 45
aggattcagattggtttccttactt

SEQ ID NO: 46712 - DNA, 25 bp, Artificial
  probe
  misc_feature (1)..(25): SEQ ID NO: 483; WAN024A93_at; Start 114; Stop 138
aatcaacttataagaaaagaggtgt

SEQ ID NO: 46713 - DNA, 25 bp, Artificial
  probe
  misc_feature (1)..(25): SEQ ID NO: 483; WAN024A93_at; Start 77; Stop 101
taatggagtcaatcaaattttccgt

SEQ ID NO: 46714 - DNA, 25 bp, Artificial
  probe
  misc_feature (1)..(25): SEQ ID NO: 483; WAN024A93_at; Start 64; Stop 88
agattaaaaatcctaatggagtcaa

SEQ ID NO: 46715 - DNA, 25 bp, Artificial
  probe
  misc_feature (1)..(25): SEQ ID NO: 483; WAN024A93_at; Start 63; Stop 87
aagattaaaaatcctaatggagtca

SEQ ID NO: 46716 - DNA, 25 bp, Artificial
  probe
  misc_feature (1)..(25): SEQ ID NO: 483; WAN024A93_at; Start 115; Stop 139
atcaacttataagaaaagaggtgtc

SEQ ID NO: 46717 - DNA, 25 bp, Artificial
  probe
  misc_feature (1)..(25): SEQ ID NO: 483; WAN024A93_at; Start 69; Stop 93
aaaaatcctaatggagtcaatcaaa

SEQ ID NO: 46718 - DNA, 25 bp, Artificial
  probe
  misc_feature (1)..(25): SEQ ID NO: 483; WAN024A93_at; Start 10; Stop 34
ctttctattttaggattcagattgg

SEQ ID NO: 46719 - DNA, 25 bp, Artificial
  probe
  misc_feature (1)..(25): SEQ ID NO: 483; WAN024A93_at; Start 80; Stop 104
tggagtcaatcaaattttccgtaaa

SEQ ID NO: 46720 - DNA, 25 bp, Artificial
  probe
  misc_feature (1)..(25): SEQ ID NO: 483; WAN024A93_at; Start 78; Stop 102
aatggagtcaatcaaattttccgta

SEQ ID NO: 46721 - DNA, 25 bp, Artificial
  probe
  misc_feature (1)..(25): SEQ ID NO: 483; WAN024A93_at; Start 98; Stop 122
ccgtaaaatttgatataatcaactt

SEQ ID NO: 46722 - DNA, 25 bp, Artificial
  probe
  misc_feature (1)..(25): SEQ ID NO: 483; WAN024A93_at; Start 6; Stop 30
caatctttctattttaggattcaga

SEQ ID NO: 46723 - DNA, 25 bp, Artificial
  probe
  misc_feature (1)..(25): SEQ ID NO: 483; WAN024A93_at; Start 97; Stop 121
tccgtaaaatttgatataatcaact

SEQ ID NO: 46724 - DNA, 25 bp, Artificial
  probe
  misc_feature (1)..(25): SEQ ID NO: 483; WAN024A93_at; Start 74; Stop 98
tcctaatggagtcaatcaaattttc

SEQ ID NO: 46725 - DNA, 25 bp, Artificial
  probe
  misc_feature (1)..(25): SEQ ID NO: 483; WAN024A93_at; Start 16; Stop 40
attttaggattcagattggtttcct

SEQ ID NO: 46726 - DNA, 25 bp, Artificial
  probe
  misc_feature (1)..(25): SEQ ID NO: 483; WAN024A93_at; Start 20; Stop 44
taggattcagattggtttccttact

SEQ ID NO: 46727 - DNA, 25 bp, Artificial
  probe
  misc_feature (1)..(25): SEQ ID NO: 483; WAN024A93_at; Start 19; Stop 43
ttaggattcagattggtttccttac

SEQ ID NO: 46728 - DNA, 25 bp, Artificial
  probe
  misc_feature (1)..(25): SEQ ID NO: 483; WAN024A93_at; Start 76; Stop 100
ctaatggagtcaatcaaattttccg

SEQ ID NO: 46729 - DNA, 25 bp, Artificial
  probe
  misc_feature (1)..(25): SEQ ID NO: 483; WAN024A93_at; Start 94; Stop 118
ttttccgtaaaatttgatataatca

SEQ ID NO: 46730 - DNA, 25 bp, Artificial
  probe
  misc_feature (1)..(25): SEQ ID NO: 483; WAN024A93_at; Start 71; Stop 95
aaatcctaatggagtcaatcaaatt

SEQ ID NO: 46731 - DNA, 25 bp, Artificial
  probe
  misc_feature (1)..(25): SEQ ID NO: 483; WAN024A93_at; Start 1; Stop 25
agtatcaatctttctattttaggat

SEQ ID NO: 46732 - DNA, 25 bp, Artificial
  probe
  misc_feature (1)..(25): SEQ ID NO: 483; WAN024A93_at; Start 14; Stop 38
ctattttaggattcagattggtttc

SEQ ID NO: 46733 - DNA, 25 bp, Artificial
  probe
  misc_feature (1)..(25): SEQ ID NO: 483; WAN024A93_at; Start 113; Stop 137
taatcaacttataagaaaagaggtg

SEQ ID NO: 46734 - DNA, 25 bp, Artificial
  probe
  misc_feature (1)..(25): SEQ ID NO: 483; WAN024A93_at; Start 117; Stop 141
caacttataagaaaagaggtgtcct

SEQ ID NO: 46735 - DNA, 25 bp, Artificial
  probe
  misc_feature (1)..(25): SEQ ID NO: 483; WAN024A93_at; Start 15; Stop 39
tattttaggattcagattggtttcc

SEQ ID NO: 46736 - DNA, 25 bp, Artificial
  probe
  misc_feature (1)..(25): SEQ ID NO: 483; WAN024A93_at; Start 11; Stop 35
tttctattttaggattcagattggt

SEQ ID NO: 46737 - DNA, 25 bp, Artificial
  probe
  misc_feature (1)..(25): SEQ ID NO: 483; WAN024A93_at; Start 65; Stop 89
gattaaaaatcctaatggagtcaat

SEQ ID NO: 46738 - DNA, 25 bp, Artificial
  probe
  misc_feature (1)..(25): SEQ ID NO: 483; WAN024A93_at; Start 72; Stop 96
aatcctaatggagtcaatcaaattt

SEQ ID NO: 46739 - DNA, 25 bp, Artificial
  probe
  misc_feature (1)..(25): SEQ ID NO: 459; WAN024A94_at; Start 105; Stop 129
aaaccaatctgaatcctaaaataga

SEQ ID NO: 46740 - DNA, 25 bp, Artificial
  probe
  misc_feature (1)..(25): SEQ ID NO: 459; WAN024A94_at; Start 100; Stop 124
taaggaaaccaatctgaatcctaaa

SEQ ID NO: 46741 - DNA, 25 bp, Artificial
  probe
  misc_feature (1)..(25): SEQ ID NO: 459; WAN024A94_at; Start 41; Stop 65
acggaaaatttgattgactccatta

SEQ ID NO: 46742 - DNA, 25 bp, Artificial
  probe
  misc_feature (1)..(25): SEQ ID NO: 459; WAN024A94_at; Start 108; Stop 132
ccaatctgaatcctaaaatagaaag

SEQ ID NO: 46743 - DNA, 25 bp, Artificial
  probe
  misc_feature (1)..(25): SEQ ID NO: 459; WAN024A94_at; Start 20; Stop 44
aagttgattatatcaaattttacgg

SEQ ID NO: 46744 - DNA, 25 bp, Artificial
  probe
  misc_feature (1)..(25): SEQ ID NO: 459; WAN024A94_at; Start 106; Stop 130
aaccaatctgaatcctaaaatagaa

SEQ ID NO: 46745 - DNA, 25 bp, Artificial
  probe
  misc_feature (1)..(25): SEQ ID NO: 459; WAN024A94_at; Start 115; Stop 139
gaatcctaaaatagaaagattgata

SEQ ID NO: 46746 - DNA, 25 bp, Artificial
  probe
  misc_feature (1)..(25): SEQ ID NO: 459; WAN024A94_at; Start 51; Stop 75
tgattgactccattaggatttttaa

SEQ ID NO: 46747 - DNA, 25 bp, Artificial
  probe
  misc_feature (1)..(25): SEQ ID NO: 459; WAN024A94_at; Start 46; Stop 70
aaatttgattgactccattaggatt

SEQ ID NO: 46748 - DNA, 25 bp, Artificial
  probe
  misc_feature (1)..(25): SEQ ID NO: 459; WAN024A94_at; Start 5; Stop 29
cacctcttttcttataagttgatta

SEQ ID NO: 46749 - DNA, 25 bp, Artificial
  probe
  misc_feature (1)..(25): SEQ ID NO: 459; WAN024A94_at; Start 38; Stop 62
tttacggaaaatttgattgactcca

SEQ ID NO: 46750 - DNA, 25 bp, Artificial
  probe
  misc_feature (1)..(25): SEQ ID NO: 459; WAN024A94_at; Start 98; Stop 122
agtaaggaaaccaatctgaatccta

SEQ ID NO: 46751 - DNA, 25 bp, Artificial
  probe
  misc_feature (1)..(25): SEQ ID NO: 459; WAN024A94_at; Start 39; Stop 63
ttacggaaaatttgattgactccat

SEQ ID NO: 46752 - DNA, 25 bp, Artificial
  probe
  misc_feature (1)..(25): SEQ ID NO: 459; WAN024A94_at; Start 103; Stop 127
ggaaaccaatctgaatcctaaaata

SEQ ID NO: 46753 - DNA, 25 bp, Artificial
  probe
  misc_feature (1)..(25): SEQ ID NO: 459; WAN024A94_at; Start 40; Stop 64
tacggaaaatttgattgactccatt

SEQ ID NO: 46754 - DNA, 25 bp, Artificial
  probe
  misc_feature (1)..(25): SEQ ID NO: 459; WAN024A94_at; Start 113; Stop 137
ctgaatcctaaaatagaaagattga

SEQ ID NO: 46755 - DNA, 25 bp, Artificial
  probe
  misc_feature (1)..(25): SEQ ID NO: 459; WAN024A94_at; Start 49; Stop 73
tttgattgactccattaggattttt

SEQ ID NO: 46756 - DNA, 25 bp, Artificial
  probe
  misc_feature (1)..(25): SEQ ID NO: 459; WAN024A94_at; Start 47; Stop 71
aatttgattgactccattaggattt

SEQ ID NO: 46757 - DNA, 25 bp, Artificial
  probe
  misc_feature (1)..(25): SEQ ID NO: 459; WAN024A94_at; Start 3; Stop 27
gacacctcttttcttataagttgat

SEQ ID NO: 46758 - DNA, 25 bp, Artificial
  probe
  misc_feature (1)..(25): SEQ ID NO: 459; WAN024A94_at; Start 24; Stop 48
tgattatatcaaattttacggaaaa

SEQ ID NO: 46759 - DNA, 25 bp, Artificial
  probe
  misc_feature (1)..(25): SEQ ID NO: 459; WAN024A94_at; Start 43; Stop 67
ggaaaatttgattgactccattagg

SEQ ID NO: 46760 - DNA, 25 bp, Artificial
  probe
  misc_feature (1)..(25): SEQ ID NO: 459; WAN024A94_at; Start 99; Stop 123
gtaaggaaaccaatctgaatcctaa

SEQ ID NO: 46761 - DNA, 25 bp, Artificial
  probe
  misc_feature (1)..(25): SEQ ID NO: 459; WAN024A94_at; Start 97; Stop 121
aagtaaggaaaccaatctgaatcct

SEQ ID NO: 46762 - DNA, 25 bp, Artificial
  probe
  misc_feature (1)..(25): SEQ ID NO: 459; WAN024A94_at; Start 109; Stop 133
caatctgaatcctaaaatagaaaga

SEQ ID NO: 46763 - DNA, 25 bp, Artificial
  probe
  misc_feature (1)..(25): SEQ ID NO: 459; WAN024A94_at; Start 1; Stop 25
aggacacctcttttcttataagttg

SEQ ID NO: 46764 - DNA, 25 bp, Artificial
  probe
  misc_feature (1)..(25): SEQ ID NO: 459; WAN024A94_at; Start 104; Stop 128
gaaaccaatctgaatcctaaaatag

SEQ ID NO: 46765 - DNA, 25 bp, Artificial
  probe
  misc_feature (1)..(25): SEQ ID NO: 459; WAN024A94_at; Start 117; Stop 141
atcctaaaatagaaagattgatact

SEQ ID NO: 46766 - DNA, 25 bp, Artificial
  probe
  misc_feature (1)..(25): SEQ ID NO: 459; WAN024A94_at; Start 44; Stop 68
gaaaatttgattgactccattagga

SEQ ID NO: 46767 - DNA, 25 bp, Artificial
  probe
  misc_feature (1)..(25): SEQ ID NO: 459; WAN024A94_at; Start 45; Stop 69
aaaatttgattgactccattaggat

SEQ ID NO: 46768 - DNA, 25 bp, Artificial
  probe
  misc_feature (1)..(25): SEQ ID NO: 459; WAN024A94_at; Start 52; Stop 76
gattgactccattaggatttttaat

SEQ ID NO: 46769 - DNA, 25 bp, Artificial
  probe
  misc_feature (1)..(25): SEQ ID NO: 459; WAN024A94_at; Start 2; Stop 26
ggacacctcttttcttataagttga

SEQ ID NO: 46770 - DNA, 25 bp, Artificial
  probe
  misc_feature (1)..(25): SEQ ID NO: 459; WAN024A94_at; Start 42; Stop 66
cggaaaatttgattgactccattag

SEQ ID NO: 46771 - DNA, 25 bp, Artificial
  probe
  misc_feature (1)..(25): SEQ ID NO: 459; WAN024A94_at; Start 55; Stop 79
tgactccattaggatttttaatctt

SEQ ID NO: 46772 - DNA, 25 bp, Artificial
  probe
  misc_feature (1)..(25): SEQ ID NO: 459; WAN024A94_at; Start 112; Stop 136
tctgaatcctaaaatagaaagattg

SEQ ID NO: 46773 - DNA, 25 bp, Artificial
  probe
  misc_feature (1)..(25): SEQ ID NO: 125; WAN024A95_at; Start 34; Stop 58
taaatcatctatcttttgggttaca

SEQ ID NO: 46774 - DNA, 25 bp, Artificial
  probe
  misc_feature (1)..(25): SEQ ID NO: 125; WAN024A95_at; Start 39; Stop 63
catctatcttttgggttacagacaa

SEQ ID NO: 46775 - DNA, 25 bp, Artificial
  probe
  misc_feature (1)..(25): SEQ ID NO: 125; WAN024A95_at; Start 24; Stop 48
aaagttagactaaatcatctatctt

SEQ ID NO: 46776 - DNA, 25 bp, Artificial
  probe
  misc_feature (1)..(25): SEQ ID NO: 125; WAN024A95_at; Start 25; Stop 49
aagttagactaaatcatctatcttt

SEQ ID NO: 46777 - DNA, 25 bp, Artificial
  probe
  misc_feature (1)..(25): SEQ ID NO: 125; WAN024A95_at; Start 33; Stop 57
ctaaatcatctatcttttgggttac

SEQ ID NO: 46778 - DNA, 25 bp, Artificial
  probe
  misc_feature (1)..(25): SEQ ID NO: 125; WAN024A95_at; Start 6; Stop 30
ggtaatgtcgtgacctcaaaagtta

SEQ ID NO: 46779 - DNA, 25 bp, Artificial
  probe
  misc_feature (1)..(25): SEQ ID NO: 125; WAN024A95_at; Start 44; Stop 68
atcttttgggttacagacaacctct

SEQ ID NO: 46780 - DNA, 25 bp, Artificial
  probe
  misc_feature (1)..(25): SEQ ID NO: 125; WAN024A95_at; Start 38; Stop 62
tcatctatcttttgggttacagaca

SEQ ID NO: 46781 - DNA, 25 bp, Artificial
  probe
  misc_feature (1)..(25): SEQ ID NO: 125; WAN024A95_at; Start 2; Stop 26
aagaggtaatgtcgtgacctcaaaa

SEQ ID NO: 46782 - DNA, 25 bp, Artificial
  probe
  misc_feature (1)..(25): SEQ ID NO: 125; WAN024A95_at; Start 42; Stop 66
ctatcttttgggttacagacaacct

SEQ ID NO: 46783 - DNA, 25 bp, Artificial
  probe
  misc_feature (1)..(25): SEQ ID NO: 125; WAN024A95_at; Start 30; Stop 54
agactaaatcatctatcttttgggt

SEQ ID NO: 46784 - DNA, 25 bp, Artificial
  probe
  misc_feature (1)..(25): SEQ ID NO: 125; WAN024A95_at; Start 22; Stop 46
caaaagttagactaaatcatctatc

SEQ ID NO: 46785 - DNA, 25 bp, Artificial
  probe
  misc_feature (1)..(25): SEQ ID NO: 125; WAN024A95_at; Start 32; Stop 56
actaaatcatctatcttttgggtta

SEQ ID NO: 46786 - DNA, 25 bp, Artificial
  probe
  misc_feature (1)..(25): SEQ ID NO: 125; WAN024A95_at; Start 3; Stop 27
agaggtaatgtcgtgacctcaaaag

SEQ ID NO: 46787 - DNA, 25 bp, Artificial
  probe
  misc_feature (1)..(25): SEQ ID NO: 125; WAN024A95_at; Start 41; Stop 65
tctatcttttgggttacagacaacc

SEQ ID NO: 46788 - DNA, 25 bp, Artificial
  probe
  misc_feature (1)..(25): SEQ ID NO: 125; WAN024A95_at; Start 1; Stop 25
aaagaggtaatgtcgtgacctcaaa

SEQ ID NO: 46789 - DNA, 25 bp, Artificial
  probe
  misc_feature (1)..(25): SEQ ID NO: 125; WAN024A95_at; Start 21; Stop 45
tcaaaagttagactaaatcatctat

SEQ ID NO: 46790 - DNA, 25 bp, Artificial
  probe
  misc_feature (1)..(25): SEQ ID NO: 125; WAN024A95_at; Start 5; Stop 29
aggtaatgtcgtgacctcaaaagtt

SEQ ID NO: 46791 - DNA, 25 bp, Artificial
  probe
  misc_feature (1)..(25): SEQ ID NO: 125; WAN024A95_at; Start 8; Stop 32
taatgtcgtgacctcaaaagttaga

SEQ ID NO: 46792 - DNA, 25 bp, Artificial
  probe
  misc_feature (1)..(25): SEQ ID NO: 125; WAN024A95_at; Start 40; Stop 64
atctatcttttgggttacagacaac

SEQ ID NO: 46793 - DNA, 25 bp, Artificial
  probe
  misc_feature (1)..(25): SEQ ID NO: 125; WAN024A95_at; Start 31; Stop 55
gactaaatcatctatcttttgggtt

SEQ ID NO: 46794 - DNA, 25 bp, Artificial
  probe
  misc_feature (1)..(25): SEQ ID NO: 125; WAN024A95_at; Start 43; Stop 67
tatcttttgggttacagacaacctc

SEQ ID NO: 46795 - DNA, 25 bp, Artificial
  probe
  misc_feature (1)..(25): SEQ ID NO: 125; WAN024A95_at; Start 28; Stop 52
ttagactaaatcatctatcttttgg

SEQ ID NO: 46796 - DNA, 25 bp, Artificial
  probe
  misc_feature (1)..(25): SEQ ID NO: 125; WAN024A95_at; Start 23; Stop 47
aaaagttagactaaatcatctatct

SEQ ID NO: 46797 - DNA, 25 bp, Artificial
  probe
  misc_feature (1)..(25): SEQ ID NO: 125; WAN024A95_at; Start 4; Stop 28
gaggtaatgtcgtgacctcaaaagt

SEQ ID NO: 46798 - DNA, 25 bp, Artificial
  probe
  misc_feature (1)..(25): SEQ ID NO: 125; WAN024A95_at; Start 29; Stop 53
tagactaaatcatctatcttttggg

SEQ ID NO: 46799 - DNA, 25 bp, Artificial
  probe
  misc_feature (1)..(25): SEQ ID NO: 125; WAN024A95_at; Start 27; Stop 51
gttagactaaatcatctatcttttg

SEQ ID NO: 46800 - DNA, 25 bp, Artificial
  probe
  misc_feature (1)..(25): SEQ ID NO: 125; WAN024A95_at; Start 7; Stop 31
gtaatgtcgtgacctcaaaagttag

SEQ ID NO: 46801 - DNA, 25 bp, Artificial
  probe
  misc_feature (1)..(25): SEQ ID NO: 125; WAN024A95_at; Start 36; Stop 60
aatcatctatcttttgggttacaga

SEQ ID NO: 46802 - DNA, 25 bp, Artificial
  probe
  misc_feature (1)..(25): SEQ ID NO: 125; WAN024A95_at; Start 26; Stop 50
agttagactaaatcatctatctttt

SEQ ID NO: 46803 - DNA, 25 bp, Artificial
  probe
  misc_feature (1)..(25): SEQ ID NO: 125; WAN024A95_at; Start 37; Stop 61
atcatctatcttttgggttacagac

SEQ ID NO: 46804 - DNA, 25 bp, Artificial
  probe
  misc_feature (1)..(25): SEQ ID NO: 125; WAN024A95_at; Start 35; Stop 59
aaatcatctatcttttgggttacag

SEQ ID NO: 46805 - DNA, 25 bp, Artificial
  probe
  misc_feature (1)..(25): SEQ ID NO: 3603; WAN024A96_at; Start 64; Stop 88
aacttttgaggtcacgacattacct

SEQ ID NO: 46806 - DNA, 25 bp, Artificial
  probe
  misc_feature (1)..(25): SEQ ID NO: 3603; WAN024A96_at; Start 32; Stop 56
gtctgtaacccaaaagatagatgat

SEQ ID NO: 46807 - DNA, 25 bp, Artificial
  probe
  misc_feature (1)..(25): SEQ ID NO: 3603; WAN024A96_at; Start 62; Stop 86
ctaacttttgaggtcacgacattac

SEQ ID NO: 46808 - DNA, 25 bp, Artificial
  probe
  misc_feature (1)..(25): SEQ ID NO: 3603; WAN024A96_at; Start 63; Stop 87
taacttttgaggtcacgacattacc

SEQ ID NO: 46809 - DNA, 25 bp, Artificial
  probe
  misc_feature (1)..(25): SEQ ID NO: 3603; WAN024A96_at; Start 49; Stop 73
tagatgatttagtctaacttttgag

SEQ ID NO: 46810 - DNA, 25 bp, Artificial
  probe
  misc_feature (1)..(25): SEQ ID NO: 3603; WAN024A96_at; Start 31; Stop 55
tgtctgtaacccaaaagatagatga

SEQ ID NO: 46811 - DNA, 25 bp, Artificial
  probe
  misc_feature (1)..(25): SEQ ID NO: 3603; WAN024A96_at; Start 67; Stop 91
ttttgaggtcacgacattacctctt

SEQ ID NO: 46812 - DNA, 25 bp, Artificial
  probe
  misc_feature (1)..(25): SEQ ID NO: 3603; WAN024A96_at; Start 48; Stop 72
atagatgatttagtctaacttttga

SEQ ID NO: 46813 - DNA, 25 bp, Artificial
  probe
  misc_feature (1)..(25): SEQ ID NO: 3603; WAN024A96_at; Start 42; Stop 66
caaaagatagatgatttagtctaac

SEQ ID NO: 46814 - DNA, 25 bp, Artificial
  probe
  misc_feature (1)..(25): SEQ ID NO: 3603; WAN024A96_at; Start 46; Stop 70
agatagatgatttagtctaactttt

SEQ ID NO: 46815 - DNA, 25 bp, Artificial
  probe
  misc_feature (1)..(25): SEQ ID NO: 3603; WAN024A96_at; Start 38; Stop 62
aacccaaaagatagatgatttagtc

SEQ ID NO: 46816 - DNA, 25 bp, Artificial
  probe
  misc_feature (1)..(25): SEQ ID NO: 3603; WAN024A96_at; Start 41; Stop 65
ccaaaagatagatgatttagtctaa

SEQ ID NO: 46817 - DNA, 25 bp, Artificial
  probe
  misc_feature (1)..(25): SEQ ID NO: 3603; WAN024A96_at; Start 33; Stop 57
tctgtaacccaaaagatagatgatt

SEQ ID NO: 46818 - DNA, 25 bp, Artificial
  probe
  misc_feature (1)..(25): SEQ ID NO: 3603; WAN024A96_at; Start 29; Stop 53
gttgtctgtaacccaaaagatagat

SEQ ID NO: 46819 - DNA, 25 bp, Artificial
  probe
  misc_feature (1)..(25): SEQ ID NO: 3603; WAN024A96_at; Start 30; Stop 54
ttgtctgtaacccaaaagatagatg

SEQ ID NO: 46820 - DNA, 25 bp, Artificial
  probe
  misc_feature (1)..(25): SEQ ID NO: 3603; WAN024A96_at; Start 66; Stop 90
cttttgaggtcacgacattacctct

SEQ ID NO: 46821 - DNA, 25 bp, Artificial
  probe
  misc_feature (1)..(25): SEQ ID NO: 3603; WAN024A96_at; Start 68; Stop 92
tttgaggtcacgacattacctcttt

SEQ ID NO: 46822 - DNA, 25 bp, Artificial
  probe
  misc_feature (1)..(25): SEQ ID NO: 3603; WAN024A96_at; Start 37; Stop 61
taacccaaaagatagatgatttagt

SEQ ID NO: 46823 - DNA, 25 bp, Artificial
  probe
  misc_feature (1)..(25): SEQ ID NO: 3603; WAN024A96_at; Start 35; Stop 59
tgtaacccaaaagatagatgattta

SEQ ID NO: 46824 - DNA, 25 bp, Artificial
  probe
  misc_feature (1)..(25): SEQ ID NO: 3603; WAN024A96_at; Start 28; Stop 52
ggttgtctgtaacccaaaagataga

SEQ ID NO: 46825 - DNA, 25 bp, Artificial
  probe
  misc_feature (1)..(25): SEQ ID NO: 3603; WAN024A96_at; Start 40; Stop 64
cccaaaagatagatgatttagtcta

SEQ ID NO: 46826 - DNA, 25 bp, Artificial
  probe
  misc_feature (1)..(25): SEQ ID NO: 3603; WAN024A96_at; Start 26; Stop 50
gaggttgtctgtaacccaaaagata

SEQ ID NO: 46827 - DNA, 25 bp, Artificial
  probe
  misc_feature (1)..(25): SEQ ID NO: 3603; WAN024A96_at; Start 50; Stop 74
agatgatttagtctaacttttgagg

SEQ ID NO: 46828 - DNA, 25 bp, Artificial
  probe
  misc_feature (1)..(25): SEQ ID NO: 3603; WAN024A96_at; Start 36; Stop 60
gtaacccaaaagatagatgatttag

SEQ ID NO: 46829 - DNA, 25 bp, Artificial
  probe
  misc_feature (1)..(25): SEQ ID NO: 3603; WAN024A96_at; Start 43; Stop 67
aaaagatagatgatttagtctaact

SEQ ID NO: 46830 - DNA, 25 bp, Artificial
  probe
  misc_feature (1)..(25): SEQ ID NO: 3603; WAN024A96_at; Start 25; Stop 49
agaggttgtctgtaacccaaaagat

SEQ ID NO: 46831 - DNA, 25 bp, Artificial
  probe
  misc_feature (1)..(25): SEQ ID NO: 3603; WAN024A96_at; Start 65; Stop 89
acttttgaggtcacgacattacctc

SEQ ID NO: 46832 - DNA, 25 bp, Artificial
  probe
  misc_feature (1)..(25): SEQ ID NO: 3603; WAN024A96_at; Start 61; Stop 85
tctaacttttgaggtcacgacatta

SEQ ID NO: 46833 - DNA, 25 bp, Artificial
  probe
  misc_feature (1)..(25): SEQ ID NO: 3603; WAN024A96_at; Start 45; Stop 69
aagatagatgatttagtctaacttt

SEQ ID NO: 46834 - DNA, 25 bp, Artificial
  probe
  misc_feature (1)..(25): SEQ ID NO: 3603; WAN024A96_at; Start 47; Stop 71
gatagatgatttagtctaacttttg

SEQ ID NO: 46835 - DNA, 25 bp, Artificial
  probe
  misc_feature (1)..(25): SEQ ID NO: 3603; WAN024A96_at; Start 34; Stop 58
ctgtaacccaaaagatagatgattt

SEQ ID NO: 46836 - DNA, 25 bp, Artificial
  probe
  misc_feature (1)..(25): SEQ ID NO: 3603; WAN024A96_at; Start 44; Stop 68
aaagatagatgatttagtctaactt

SEQ ID NO: 46837 - DNA, 25 bp, Artificial
  probe
  misc_feature (1)..(25): SEQ ID NO: 3603; WAN024A96_at; Start 27; Stop 51
aggttgtctgtaacccaaaagatag

SEQ ID NO: 46838 - DNA, 25 bp, Artificial
  probe
  misc_feature (1)..(25): SEQ ID NO: 3603; WAN024A96_at; Start 39; Stop 63
acccaaaagatagatgatttagtct

SEQ ID NO: 46839 - DNA, 25 bp, Artificial
  probe
  misc_feature (1)..(25): SEQ ID NO: 78; WAN024A97_at; Start 19; Stop 43
cgttgcttaactatgaactttgcaa

SEQ ID NO: 46840 - DNA, 25 bp, Artificial
  probe
  misc_feature (1)..(25): SEQ ID NO: 78; WAN024A97_at; Start 131; Stop 155
cttatgtatgaaaaagcaatgcaac

SEQ ID NO: 46841 - DNA, 25 bp, Artificial
  probe
  misc_feature (1)..(25): SEQ ID NO: 78; WAN024A97_at; Start 16; Stop 40
tatcgttgcttaactatgaactttg

SEQ ID NO: 46842 - DNA, 25 bp, Artificial
  probe
  misc_feature (1)..(25): SEQ ID NO: 78; WAN024A97_at; Start 61; Stop 85
tgtaggacatcttcaaaattttgca

SEQ ID NO: 46843 - DNA, 25 bp, Artificial
  probe
  misc_feature (1)..(25): SEQ ID NO: 78; WAN024A97_at; Start 82; Stop 106
tgcaaggagtgattagacttgttcg

SEQ ID NO: 46844 - DNA, 25 bp, Artificial
  probe
  misc_feature (1)..(25): SEQ ID NO: 78; WAN024A97_at; Start 99; Stop 123
cttgttcggtaaccataaagtgtca

SEQ ID NO: 46845 - DNA, 25 bp, Artificial
  probe
  misc_feature (1)..(25): SEQ ID NO: 78; WAN024A97_at; Start 108; Stop 132
taaccataaagtgtcatactatgct

SEQ ID NO: 46846 - DNA, 25 bp, Artificial
  probe
  misc_feature (1)..(25): SEQ ID NO: 78; WAN024A97_at; Start 146; Stop 170
gcaatgcaactaactcctgagaact

SEQ ID NO: 46847 - DNA, 25 bp, Artificial
  probe
  misc_feature (1)..(25): SEQ ID NO: 78; WAN024A97_at; Start 50; Stop 74
tctcaaaaacttgtaggacatcttc

SEQ ID NO: 46848 - DNA, 25 bp, Artificial
  probe
  misc_feature (1)..(25): SEQ ID NO: 78; WAN024A97_at; Start 140; Stop 164
gaaaaagcaatgcaactaactcctg

SEQ ID NO: 46849 - DNA, 25 bp, Artificial
  probe
  misc_feature (1)..(25): SEQ ID NO: 78; WAN024A97_at; Start 105; Stop 129
cggtaaccataaagtgtcatactat

SEQ ID NO: 46850 - DNA, 25 bp, Artificial
  probe
  misc_feature (1)..(25): SEQ ID NO: 78; WAN024A97_at; Start 103; Stop 127
ttcggtaaccataaagtgtcatact

SEQ ID NO: 46851 - DNA, 25 bp, Artificial
  probe
  misc_feature (1)..(25): SEQ ID NO: 78; WAN024A97_at; Start 65; Stop 89
ggacatcttcaaaattttgcaagga

SEQ ID NO: 46852 - DNA, 25 bp, Artificial
  probe
  misc_feature (1)..(25): SEQ ID NO: 78; WAN024A97_at; Start 85; Stop 109
aaggagtgattagacttgttcggta

SEQ ID NO: 46853 - DNA, 25 bp, Artificial
  probe
  misc_feature (1)..(25): SEQ ID NO: 78; WAN024A97_at; Start 114; Stop 138
taaagtgtcatactatgcttatgta

SEQ ID NO: 46854 - DNA, 25 bp, Artificial
  probe
  misc_feature (1)..(25): SEQ ID NO: 78; WAN024A97_at; Start 142; Stop 166
aaaagcaatgcaactaactcctgag

SEQ ID NO: 46855 - DNA, 25 bp, Artificial
  probe
  misc_feature (1)..(25): SEQ ID NO: 78; WAN024A97_at; Start 11; Stop 35
tattctatcgttgcttaactatgaa

SEQ ID NO: 46856 - DNA, 25 bp, Artificial
  probe
  misc_feature (1)..(25): SEQ ID NO: 78; WAN024A97_at; Start 144; Stop 168
aagcaatgcaactaactcctgagaa

SEQ ID NO: 46857 - DNA, 25 bp, Artificial
  probe
  misc_feature (1)..(25): SEQ ID NO: 78; WAN024A97_at; Start 44; Stop 68
tattcttctcaaaaacttgtaggac

SEQ ID NO: 46858 - DNA, 25 bp, Artificial
  probe
  misc_feature (1)..(25): SEQ ID NO: 78; WAN024A97_at; Start 101; Stop 125
tgttcggtaaccataaagtgtcata

SEQ ID NO: 46859 - DNA, 25 bp, Artificial
  probe
  misc_feature (1)..(25): SEQ ID NO: 78; WAN024A97_at; Start 161; Stop 185
cctgagaactttaaattactaattg

SEQ ID NO: 46860 - DNA, 25 bp, Artificial
  probe
  misc_feature (1)..(25): SEQ ID NO: 78; WAN024A97_at; Start 124; Stop 148
tactatgcttatgtatgaaaaagca

SEQ ID NO: 46861 - DNA, 25 bp, Artificial
  probe
  misc_feature (1)..(25): SEQ ID NO: 78; WAN024A97_at; Start 71; Stop 95
cttcaaaattttgcaaggagtgatt

SEQ ID NO: 46862 - DNA, 25 bp, Artificial
  probe
  misc_feature (1)..(25): SEQ ID NO: 78; WAN024A97_at; Start 179; Stop 203
ctaattggtgccgaaaaggtagaat

SEQ ID NO: 46863 - DNA, 25 bp, Artificial
  probe
  misc_feature (1)..(25): SEQ ID NO: 78; WAN024A97_at; Start 151; Stop 175
gcaactaactcctgagaactttaaa

SEQ ID NO: 46864 - DNA, 25 bp, Artificial
  probe
  misc_feature (1)..(25): SEQ ID NO: 78; WAN024A97_at; Start 47; Stop 71
tcttctcaaaaacttgtaggacatc

SEQ ID NO: 46865 - DNA, 25 bp, Artificial
  probe
  misc_feature (1)..(25): SEQ ID NO: 78; WAN024A97_at; Start 74; Stop 98
caaaattttgcaaggagtgattaga

SEQ ID NO: 46866 - DNA, 25 bp, Artificial
  probe
  misc_feature (1)..(25): SEQ ID NO: 78; WAN024A97_at; Start 53; Stop 77
caaaaacttgtaggacatcttcaaa

SEQ ID NO: 46867 - DNA, 25 bp, Artificial
  probe
  misc_feature (1)..(25): SEQ ID NO: 78; WAN024A97_at; Start 76; Stop 100
aaattttgcaaggagtgattagact

SEQ ID NO: 46868 - DNA, 25 bp, Artificial
  probe
  misc_feature (1)..(25): SEQ ID NO: 78; WAN024A97_at; Start 1; Stop 25
aaaagcactttattctatcgttgct

SEQ ID NO: 46869 - DNA, 25 bp, Artificial
  probe
  misc_feature (1)..(25): SEQ ID NO: 78; WAN024A97_at; Start 23; Stop 47
gcttaactatgaactttgcaatatt

SEQ ID NO: 46870 - DNA, 25 bp, Artificial
  probe
  misc_feature (1)..(25): SEQ ID NO: 78; WAN024A97_at; Start 30; Stop 54
tatgaactttgcaatattcttctca

SEQ ID NO: 46871 - DNA, 25 bp, Artificial
  probe
  misc_feature (1)..(25): SEQ ID NO: 78; WAN024A97_at; Start 135; Stop 159
tgtatgaaaaagcaatgcaactaac

SEQ ID NO: 46872 - DNA, 25 bp, Artificial
  probe
  misc_feature (1)..(25): SEQ ID NO: 78; WAN024A97_at; Start 5; Stop 29
gcactttattctatcgttgcttaac

SEQ ID NO: 46873 - DNA, 25 bp, Artificial
  probe
  misc_feature (1)..(25): SEQ ID NO: 3152; WAN024A98_at; Start 115; Stop 139
tccttgcaaaattttgaagatgtcc

SEQ ID NO: 46874 - DNA, 25 bp, Artificial
  probe
  misc_feature (1)..(25): SEQ ID NO: 3152; WAN024A98_at; Start 29; Stop 53
tttaaagttctcaggagttagttgc

SEQ ID NO: 46875 - DNA, 25 bp, Artificial
  probe
  misc_feature (1)..(25): SEQ ID NO: 3152; WAN024A98_at; Start 133; Stop 157
gatgtcctacaagtttttgagaaga

SEQ ID NO: 46876 - DNA, 25 bp, Artificial
  probe
  misc_feature (1)..(25): SEQ ID NO: 3152; WAN024A98_at; Start 170; Stop 194
tcatagttaagcaacgatagaataa

SEQ ID NO: 46877 - DNA, 25 bp, Artificial
  probe
  misc_feature (1)..(25): SEQ ID NO: 3152; WAN024A98_at; Start 95; Stop 119
taccgaacaagtctaatcactcctt

SEQ ID NO: 46878 - DNA, 25 bp, Artificial
  probe
  misc_feature (1)..(25): SEQ ID NO: 3152; WAN024A98_at; Start 40; Stop 64
caggagttagttgcattgctttttc

SEQ ID NO: 46879 - DNA, 25 bp, Artificial
  probe
  misc_feature (1)..(25): SEQ ID NO: 3152; WAN024A98_at; Start 175; Stop 199
gttaagcaacgatagaataaagtgc

SEQ ID NO: 46880 - DNA, 25 bp, Artificial
  probe
  misc_feature (1)..(25): SEQ ID NO: 3152; WAN024A98_at; Start 1; Stop 25
attctaccttttcggcaccaattag

SEQ ID NO: 46881 - DNA, 25 bp, Artificial
  probe
  misc_feature (1)..(25): SEQ ID NO: 3152; WAN024A98_at; Start 49; Stop 73
gttgcattgctttttcatacataag

SEQ ID NO: 46882 - DNA, 25 bp, Artificial
  probe
  misc_feature (1)..(25): SEQ ID NO: 3152; WAN024A98_at; Start 102; Stop 126
caagtctaatcactccttgcaaaat

SEQ ID NO: 46883 - DNA, 25 bp, Artificial
  probe
  misc_feature (1)..(25): SEQ ID NO: 3152; WAN024A98_at; Start 57; Stop 81
gctttttcatacataagcatagtat

SEQ ID NO: 46884 - DNA, 25 bp, Artificial
  probe
  misc_feature (1)..(25): SEQ ID NO: 3152; WAN024A98_at; Start 92; Stop 116
ggttaccgaacaagtctaatcactc

SEQ ID NO: 46885 - DNA, 25 bp, Artificial
  probe
  misc_feature (1)..(25): SEQ ID NO: 3152; WAN024A98_at; Start 37; Stop 61
tctcaggagttagttgcattgcttt

SEQ ID NO: 46886 - DNA, 25 bp, Artificial
  probe
  misc_feature (1)..(25): SEQ ID NO: 3152; WAN024A98_at; Start 109; Stop 133
aatcactccttgcaaaattttgaag

SEQ ID NO: 46887 - DNA, 25 bp, Artificial
  probe
  misc_feature (1)..(25): SEQ ID NO: 3152; WAN024A98_at; Start 99; Stop 123
gaacaagtctaatcactccttgcaa

SEQ ID NO: 46888 - DNA, 25 bp, Artificial
  probe
  misc_feature (1)..(25): SEQ ID NO: 3152; WAN024A98_at; Start 89; Stop 113
tatggttaccgaacaagtctaatca

SEQ ID NO: 46889 - DNA, 25 bp, Artificial
  probe
  misc_feature (1)..(25): SEQ ID NO: 3152; WAN024A98_at; Start 130; Stop 154
gaagatgtcctacaagtttttgaga

SEQ ID NO: 46890 - DNA, 25 bp, Artificial
  probe
  misc_feature (1)..(25): SEQ ID NO: 3152; WAN024A98_at; Start 119; Stop 143
tgcaaaattttgaagatgtcctaca

SEQ ID NO: 46891 - DNA, 25 bp, Artificial
  probe
  misc_feature (1)..(25): SEQ ID NO: 3152; WAN024A98_at; Start 74; Stop 98
catagtatgacactttatggttacc

SEQ ID NO: 46892 - DNA, 25 bp, Artificial
  probe
  misc_feature (1)..(25): SEQ ID NO: 3152; WAN024A98_at; Start 79; Stop 103
tatgacactttatggttaccgaaca

SEQ ID NO: 46893 - DNA, 25 bp, Artificial
  probe
  misc_feature (1)..(25): SEQ ID NO: 3152; WAN024A98_at; Start 166; Stop 190
aagttcatagttaagcaacgataga

SEQ ID NO: 46894 - DNA, 25 bp, Artificial
  probe
  misc_feature (1)..(25): SEQ ID NO: 3152; WAN024A98_at; Start 31; Stop 55
taaagttctcaggagttagttgcat

SEQ ID NO: 46895 - DNA, 25 bp, Artificial
  probe
  misc_feature (1)..(25): SEQ ID NO: 3152; WAN024A98_at; Start 84; Stop 108
cactttatggttaccgaacaagtct

SEQ ID NO: 46896 - DNA, 25 bp, Artificial
  probe
  misc_feature (1)..(25): SEQ ID NO: 3152; WAN024A98_at; Start 163; Stop 187
gcaaagttcatagttaagcaacgat

SEQ ID NO: 46897 - DNA, 25 bp, Artificial
  probe
  misc_feature (1)..(25): SEQ ID NO: 3152; WAN024A98_at; Start 34; Stop 58
agttctcaggagttagttgcattgc

SEQ ID NO: 46898 - DNA, 25 bp, Artificial
  probe
  misc_feature (1)..(25): SEQ ID NO: 3152; WAN024A98_at; Start 142; Stop 166
caagtttttgagaagaatattgcaa

SEQ ID NO: 46899 - DNA, 25 bp, Artificial
  probe
  misc_feature (1)..(25): SEQ ID NO: 3152; WAN024A98_at; Start 136; Stop 160
gtcctacaagtttttgagaagaata

SEQ ID NO: 46900 - DNA, 25 bp, Artificial
  probe
  misc_feature (1)..(25): SEQ ID NO: 3152; WAN024A98_at; Start 179; Stop 203
agcaacgatagaataaagtgctttt

SEQ ID NO: 46901 - DNA, 25 bp, Artificial
  probe
  misc_feature (1)..(25): SEQ ID NO: 3152; WAN024A98_at; Start 81; Stop 105
tgacactttatggttaccgaacaag

SEQ ID NO: 46902 - DNA, 25 bp, Artificial
  probe
  misc_feature (1)..(25): SEQ ID NO: 3152; WAN024A98_at; Start 64; Stop 88
catacataagcatagtatgacactt

SEQ ID NO: 46903 - DNA, 25 bp, Artificial
  probe
  misc_feature (1)..(25): SEQ ID NO: 3152; WAN024A98_at; Start 19; Stop 43
caattagtaatttaaagttctcagg

SEQ ID NO: 46904 - DNA, 25 bp, Artificial
  probe
  misc_feature (1)..(25): SEQ ID NO: 3152; WAN024A98_at; Start 121; Stop 145
caaaattttgaagatgtcctacaag

SEQ ID NO: 46905 - DNA, 25 bp, Artificial
  probe
  misc_feature (1)..(25): SEQ ID NO: 3152; WAN024A98_at; Start 70; Stop 94
taagcatagtatgacactttatggt

SEQ ID NO: 46906 - DNA, 25 bp, Artificial
  probe
  misc_feature (1)..(25): SEQ ID NO: 3152; WAN024A98_at; Start 151; Stop 175
gagaagaatattgcaaagttcatag

SEQ ID NO: 46907 - DNA, 25 bp, Artificial
  probe
  misc_feature (1)..(25): SEQ ID NO: 4636; WAN024A99_at; Start 40; Stop 64
gatgttcgtgcggttgcacaggatc

SEQ ID NO: 46908 - DNA, 25 bp, Artificial
  probe
  misc_feature (1)..(25): SEQ ID NO: 4636; WAN024A99_at; Start 37; Stop 61
aacgatgttcgtgcggttgcacagg

SEQ ID NO: 46909 - DNA, 25 bp, Artificial
  probe
  misc_feature (1)..(25): SEQ ID NO: 4636; WAN024A99_at; Start 33; Stop 57
aagcaacgatgttcgtgcggttgca

SEQ ID NO: 46910 - DNA, 25 bp, Artificial
  probe
  misc_feature (1)..(25): SEQ ID NO: 4636; WAN024A99_at; Start 73; Stop 97
tcaactcttcaagtatagcatatct

SEQ ID NO: 46911 - DNA, 25 bp, Artificial
  probe
  misc_feature (1)..(25): SEQ ID NO: 4636; WAN024A99_at; Start 70; Stop 94
tagtcaactcttcaagtatagcata

SEQ ID NO: 46912 - DNA, 25 bp, Artificial
  probe
  misc_feature (1)..(25): SEQ ID NO: 4636; WAN024A99_at; Start 56; Stop 80
cacaggatcgtgcatagtcaactct

SEQ ID NO: 46913 - DNA, 25 bp, Artificial
  probe
  misc_feature (1)..(25): SEQ ID NO: 4636; WAN024A99_at; Start 63; Stop 87
tcgtgcatagtcaactcttcaagta

SEQ ID NO: 46914 - DNA, 25 bp, Artificial
  probe
  misc_feature (1)..(25): SEQ ID NO: 4636; WAN024A99_at; Start 58; Stop 82
caggatcgtgcatagtcaactcttc

SEQ ID NO: 46915 - DNA, 25 bp, Artificial
  probe
  misc_feature (1)..(25): SEQ ID NO: 4636; WAN024A99_at; Start 97; Stop 121
tcctattttcttacaagtaataaca

SEQ ID NO: 46916 - DNA, 25 bp, Artificial
  probe
  misc_feature (1)..(25): SEQ ID NO: 4636; WAN024A99_at; Start 64; Stop 88
cgtgcatagtcaactcttcaagtat

SEQ ID NO: 46917 - DNA, 25 bp, Artificial
  probe
  misc_feature (1)..(25): SEQ ID NO: 4636; WAN024A99_at; Start 76; Stop 100
actcttcaagtatagcatatctcct

SEQ ID NO: 46918 - DNA, 25 bp, Artificial
  probe
  misc_feature (1)..(25): SEQ ID NO: 4636; WAN024A99_at; Start 9; Stop 33
cgaaccacttaaacttgaataatca

SEQ ID NO: 46919 - DNA, 25 bp, Artificial
  probe
  misc_feature (1)..(25): SEQ ID NO: 4636; WAN024A99_at; Start 23; Stop 47
ttgaataatcaagcaacgatgttcg

SEQ ID NO: 46920 - DNA, 25 bp, Artificial
  probe
  misc_feature (1)..(25): SEQ ID NO: 4636; WAN024A99_at; Start 45; Stop 69
tcgtgcggttgcacaggatcgtgca

SEQ ID NO: 46921 - DNA, 25 bp, Artificial
  probe
  misc_feature (1)..(25): SEQ ID NO: 4636; WAN024A99_at; Start 28; Stop 52
taatcaagcaacgatgttcgtgcgg

SEQ ID NO: 46922 - DNA, 25 bp, Artificial
  probe
  misc_feature (1)..(25): SEQ ID NO: 4636; WAN024A99_at; Start 68; Stop 92
catagtcaactcttcaagtatagca

SEQ ID NO: 46923 - DNA, 25 bp, Artificial
  probe
  misc_feature (1)..(25): SEQ ID NO: 4636; WAN024A99_at; Start 13; Stop 37
ccacttaaacttgaataatcaagca

SEQ ID NO: 46924 - DNA, 25 bp, Artificial
  probe
  misc_feature (1)..(25): SEQ ID NO: 4636; WAN024A99_at; Start 48; Stop 72
tgcggttgcacaggatcgtgcatag

SEQ ID NO: 46925 - DNA, 25 bp, Artificial
  probe
  misc_feature (1)..(25): SEQ ID NO: 4636; WAN024A99_at; Start 82; Stop 106
caagtatagcatatctcctattttc

SEQ ID NO: 46926 - DNA, 25 bp, Artificial
  probe
  misc_feature (1)..(25): SEQ ID NO: 4636; WAN024A99_at; Start 78; Stop 102
tcttcaagtatagcatatctcctat

SEQ ID NO: 46927 - DNA, 25 bp, Artificial
  probe
  misc_feature (1)..(25): SEQ ID NO: 4636; WAN024A99_at; Start 47; Stop 71
gtgcggttgcacaggatcgtgcata

SEQ ID NO: 46928 - DNA, 25 bp, Artificial
  probe
  misc_feature (1)..(25): SEQ ID NO: 4636; WAN024A99_at; Start 31; Stop 55
tcaagcaacgatgttcgtgcggttg

SEQ ID NO: 46929 - DNA, 25 bp, Artificial
  probe
  misc_feature (1)..(25): SEQ ID NO: 4636; WAN024A99_at; Start 29; Stop 53
aatcaagcaacgatgttcgtgcggt

SEQ ID NO: 46930 - DNA, 25 bp, Artificial
  probe
  misc_feature (1)..(25): SEQ ID NO: 4636; WAN024A99_at; Start 50; Stop 74
cggttgcacaggatcgtgcatagtc

SEQ ID NO: 46931 - DNA, 25 bp, Artificial
  probe
  misc_feature (1)..(25): SEQ ID NO: 4636; WAN024A99_at; Start 42; Stop 66
tgttcgtgcggttgcacaggatcgt

SEQ ID NO: 46932 - DNA, 25 bp, Artificial
  probe
  misc_feature (1)..(25): SEQ ID NO: 4636; WAN024A99_at; Start 66; Stop 90
tgcatagtcaactcttcaagtatag

SEQ ID NO: 46933 - DNA, 25 bp, Artificial
  probe
  misc_feature (1)..(25): SEQ ID NO: 4636; WAN024A99_at; Start 61; Stop 85
gatcgtgcatagtcaactcttcaag

SEQ ID NO: 46934 - DNA, 25 bp, Artificial
  probe
  misc_feature (1)..(25): SEQ ID NO: 4636; WAN024A99_at; Start 54; Stop 78
tgcacaggatcgtgcatagtcaact

SEQ ID NO: 46935 - DNA, 25 bp, Artificial
  probe
  misc_feature (1)..(25): SEQ ID NO: 4636; WAN024A99_at; Start 52; Stop 76
gttgcacaggatcgtgcatagtcaa

SEQ ID NO: 46936 - DNA, 25 bp, Artificial
  probe
  misc_feature (1)..(25): SEQ ID NO: 4636; WAN024A99_at; Start 36; Stop 60
caacgatgttcgtgcggttgcacag

SEQ ID NO: 46937 - DNA, 25 bp, Artificial
  probe
  misc_feature (1)..(25): SEQ ID NO: 4636; WAN024A99_at; Start 60; Stop 84
ggatcgtgcatagtcaactcttcaa

SEQ ID NO: 46938 - DNA, 25 bp, Artificial
  probe
  misc_feature (1)..(25): SEQ ID NO: 4636; WAN024A99_at; Start 35; Stop 59
gcaacgatgttcgtgcggttgcaca

SEQ ID NO: 46939 - DNA, 25 bp, Artificial
  probe
  misc_feature (1)..(25): SEQ ID NO: 4636; WAN024A99_at; Start 26; Stop 50
aataatcaagcaacgatgttcgtgc

SEQ ID NO: 46940 - DNA, 25 bp, Artificial
  probe
  misc_feature (1)..(25): SEQ ID NO: 4636; WAN024A99_at; Start 25; Stop 49
gaataatcaagcaacgatgttcgtg

SEQ ID NO: 46941 - DNA, 25 bp, Artificial
  probe
  misc_feature (1)..(25): SEQ ID NO: 4297; WAN024A9A_at; Start 38; Stop 62
cttgaagagttgactatgcacgatc

SEQ ID NO: 46942 - DNA, 25 bp, Artificial
  probe
  misc_feature (1)..(25): SEQ ID NO: 4297; WAN024A9A_at; Start 17; Stop 41
gaaaataggagatatgctatacttg

SEQ ID NO: 46943 - DNA, 25 bp, Artificial
  probe
  misc_feature (1)..(25): SEQ ID NO: 4297; WAN024A9A_at; Start 66; Stop 90
tgcaaccgcacgaacatcgttgctt

SEQ ID NO: 46944 - DNA, 25 bp, Artificial
  probe
  misc_feature (1)..(25): SEQ ID NO: 4297; WAN024A9A_at; Start 47; Stop 71
ttgactatgcacgatcctgtgcaac

SEQ ID NO: 46945 - DNA, 25 bp, Artificial
  probe
  misc_feature (1)..(25): SEQ ID NO: 4297; WAN024A9A_at; Start 64; Stop 88
tgtgcaaccgcacgaacatcgttgc

SEQ ID NO: 46946 - DNA, 25 bp, Artificial
  probe
  misc_feature (1)..(25): SEQ ID NO: 4297; WAN024A9A_at; Start 90; Stop 114
tgattattcaagtttaagtggttcg

SEQ ID NO: 46947 - DNA, 25 bp, Artificial
  probe
  misc_feature (1)..(25): SEQ ID NO: 4297; WAN024A9A_at; Start 29; Stop 53
tatgctatacttgaagagttgacta

SEQ ID NO: 46948 - DNA, 25 bp, Artificial
  probe
  misc_feature (1)..(25): SEQ ID NO: 4297; WAN024A9A_at; Start 44; Stop 68
gagttgactatgcacgatcctgtgc

SEQ ID NO: 46949 - DNA, 25 bp, Artificial
  probe
  misc_feature (1)..(25): SEQ ID NO: 4297; WAN024A9A_at; Start 36; Stop 60
tacttgaagagttgactatgcacga

SEQ ID NO: 46950 - DNA, 25 bp, Artificial
  probe
  misc_feature (1)..(25): SEQ ID NO: 4297; WAN024A9A_at; Start 63; Stop 87
ctgtgcaaccgcacgaacatcgttg

SEQ ID NO: 46951 - DNA, 25 bp, Artificial
  probe
  misc_feature (1)..(25): SEQ ID NO: 4297; WAN024A9A_at; Start 49; Stop 73
gactatgcacgatcctgtgcaaccg

SEQ ID NO: 46952 - DNA, 25 bp, Artificial
  probe
  misc_feature (1)..(25): SEQ ID NO: 4297; WAN024A9A_at; Start 40; Stop 64
tgaagagttgactatgcacgatcct

SEQ ID NO: 46953 - DNA, 25 bp, Artificial
  probe
  misc_feature (1)..(25): SEQ ID NO: 4297; WAN024A9A_at; Start 59; Stop 83
gatcctgtgcaaccgcacgaacatc

SEQ ID NO: 46954 - DNA, 25 bp, Artificial
  probe
  misc_feature (1)..(25): SEQ ID NO: 4297; WAN024A9A_at; Start 24; Stop 48
ggagatatgctatacttgaagagtt

SEQ ID NO: 46955 - DNA, 25 bp, Artificial
  probe
  misc_feature (1)..(25): SEQ ID NO: 4297; WAN024A9A_at; Start 27; Stop 51
gatatgctatacttgaagagttgac

SEQ ID NO: 46956 - DNA, 25 bp, Artificial
  probe
  misc_feature (1)..(25): SEQ ID NO: 4297; WAN024A9A_at; Start 71; Stop 95
ccgcacgaacatcgttgcttgatta

SEQ ID NO: 46957 - DNA, 25 bp, Artificial
  probe
  misc_feature (1)..(25): SEQ ID NO: 4297; WAN024A9A_at; Start 32; Stop 56
gctatacttgaagagttgactatgc

SEQ ID NO: 46958 - DNA, 25 bp, Artificial
  probe
  misc_feature (1)..(25): SEQ ID NO: 4297; WAN024A9A_at; Start 57; Stop 81
acgatcctgtgcaaccgcacgaaca

SEQ ID NO: 46959 - DNA, 25 bp, Artificial
  probe
  misc_feature (1)..(25): SEQ ID NO: 4297; WAN024A9A_at; Start 68; Stop 92
caaccgcacgaacatcgttgcttga

SEQ ID NO: 46960 - DNA, 25 bp, Artificial
  probe
  misc_feature (1)..(25): SEQ ID NO: 4297; WAN024A9A_at; Start 74; Stop 98
cacgaacatcgttgcttgattattc

SEQ ID NO: 46961 - DNA, 25 bp, Artificial
  probe
  misc_feature (1)..(25): SEQ ID NO: 4297; WAN024A9A_at; Start 10; Stop 34
cttgtaagaaaataggagatatgct

SEQ ID NO: 46962 - DNA, 25 bp, Artificial
  probe
  misc_feature (1)..(25): SEQ ID NO: 4297; WAN024A9A_at; Start 52; Stop 76
tatgcacgatcctgtgcaaccgcac

SEQ ID NO: 46963 - DNA, 25 bp, Artificial
  probe
  misc_feature (1)..(25): SEQ ID NO: 4297; WAN024A9A_at; Start 69; Stop 93
aaccgcacgaacatcgttgcttgat

SEQ ID NO: 46964 - DNA, 25 bp, Artificial
  probe
  misc_feature (1)..(25): SEQ ID NO: 4297; WAN024A9A_at; Start 34; Stop 58
tatacttgaagagttgactatgcac

SEQ ID NO: 46965 - DNA, 25 bp, Artificial
  probe
  misc_feature (1)..(25): SEQ ID NO: 4297; WAN024A9A_at; Start 5; Stop 29
tattacttgtaagaaaataggagat

SEQ ID NO: 46966 - DNA, 25 bp, Artificial
  probe
  misc_feature (1)..(25): SEQ ID NO: 4297; WAN024A9A_at; Start 62; Stop 86
cctgtgcaaccgcacgaacatcgtt

SEQ ID NO: 46967 - DNA, 25 bp, Artificial
  probe
  misc_feature (1)..(25): SEQ ID NO: 4297; WAN024A9A_at; Start 43; Stop 67
agagttgactatgcacgatcctgtg

SEQ ID NO: 46968 - DNA, 25 bp, Artificial
  probe
  misc_feature (1)..(25): SEQ ID NO: 4297; WAN024A9A_at; Start 54; Stop 78
tgcacgatcctgtgcaaccgcacga

SEQ ID NO: 46969 - DNA, 25 bp, Artificial
  probe
  misc_feature (1)..(25): SEQ ID NO: 4297; WAN024A9A_at; Start 42; Stop 66
aagagttgactatgcacgatcctgt

SEQ ID NO: 46970 - DNA, 25 bp, Artificial
  probe
  misc_feature (1)..(25): SEQ ID NO: 4297; WAN024A9A_at; Start 45; Stop 69
agttgactatgcacgatcctgtgca

SEQ ID NO: 46971 - DNA, 25 bp, Artificial
  probe
  misc_feature (1)..(25): SEQ ID NO: 4297; WAN024A9A_at; Start 41; Stop 65
gaagagttgactatgcacgatcctg

SEQ ID NO: 46972 - DNA, 25 bp, Artificial
  probe
  misc_feature (1)..(25): SEQ ID NO: 4297; WAN024A9A_at; Start 22; Stop 46
taggagatatgctatacttgaagag

SEQ ID NO: 46973 - DNA, 25 bp, Artificial
  probe
  misc_feature (1)..(25): SEQ ID NO: 4297; WAN024A9A_at; Start 77; Stop 101
gaacatcgttgcttgattattcaag

SEQ ID NO: 46974 - DNA, 25 bp, Artificial
  probe
  misc_feature (1)..(25): SEQ ID NO: 4297; WAN024A9A_at; Start 39; Stop 63
ttgaagagttgactatgcacgatcc

SEQ ID NO: 46975 - DNA, 25 bp, Artificial
  probe
  misc_feature (1)..(25): SEQ ID NO: 89; WAN024A9B_at; Start 20; Stop 44
atttctaatcactccttgacataaa

SEQ ID NO: 46976 - DNA, 25 bp, Artificial
  probe
  misc_feature (1)..(25): SEQ ID NO: 89; WAN024A9B_at; Start 29; Stop 53
cactccttgacataaataactctca

SEQ ID NO: 46977 - DNA, 25 bp, Artificial
  probe
  misc_feature (1)..(25): SEQ ID NO: 89; WAN024A9B_at; Start 31; Stop 55
ctccttgacataaataactctcacc

SEQ ID NO: 46978 - DNA, 25 bp, Artificial
  probe
  misc_feature (1)..(25): SEQ ID NO: 89; WAN024A9B_at; Start 43; Stop 67
aataactctcaccaataaaagacta

SEQ ID NO: 46979 - DNA, 25 bp, Artificial
  probe
  misc_feature (1)..(25): SEQ ID NO: 89; WAN024A9B_at; Start 39; Stop 63
cataaataactctcaccaataaaag

SEQ ID NO: 46980 - DNA, 25 bp, Artificial
  probe
  misc_feature (1)..(25): SEQ ID NO: 89; WAN024A9B_at; Start 15; Stop 39
aatttatttctaatcactccttgac

SEQ ID NO: 46981 - DNA, 25 bp, Artificial
  probe
  misc_feature (1)..(25): SEQ ID NO: 89; WAN024A9B_at; Start 37; Stop 61
gacataaataactctcaccaataaa

SEQ ID NO: 46982 - DNA, 25 bp, Artificial
  probe
  misc_feature (1)..(25): SEQ ID NO: 89; WAN024A9B_at; Start 27; Stop 51
atcactccttgacataaataactct

SEQ ID NO: 46983 - DNA, 25 bp, Artificial
  probe
  misc_feature (1)..(25): SEQ ID NO: 89; WAN024A9B_at; Start 14; Stop 38
taatttatttctaatcactccttga

SEQ ID NO: 46984 - DNA, 25 bp, Artificial
  probe
  misc_feature (1)..(25): SEQ ID NO: 89; WAN024A9B_at; Start 45; Stop 69
taactctcaccaataaaagactatg

SEQ ID NO: 46985 - DNA, 25 bp, Artificial
  probe
  misc_feature (1)..(25): SEQ ID NO: 89; WAN024A9B_at; Start 21; Stop 45
tttctaatcactccttgacataaat

SEQ ID NO: 46986 - DNA, 25 bp, Artificial
  probe
  misc_feature (1)..(25): SEQ ID NO: 89; WAN024A9B_at; Start 23; Stop 47
tctaatcactccttgacataaataa

SEQ ID NO: 46987 - DNA, 25 bp, Artificial
  probe
  misc_feature (1)..(25): SEQ ID NO: 89; WAN024A9B_at; Start 47; Stop 71
actctcaccaataaaagactatgtc

SEQ ID NO: 46988 - DNA, 25 bp, Artificial
  probe
  misc_feature (1)..(25): SEQ ID NO: 89; WAN024A9B_at; Start 49; Stop 73
tctcaccaataaaagactatgtctt

SEQ ID NO: 46989 - DNA, 25 bp, Artificial
  probe
  misc_feature (1)..(25): SEQ ID NO: 89; WAN024A9B_at; Start 51; Stop 75
tcaccaataaaagactatgtcttaa

SEQ ID NO: 46990 - DNA, 25 bp, Artificial
  probe
  misc_feature (1)..(25): SEQ ID NO: 89; WAN024A9B_at; Start 52; Stop 76
caccaataaaagactatgtcttaaa

SEQ ID NO: 46991 - DNA, 25 bp, Artificial
  probe
  misc_feature (1)..(25): SEQ ID NO: 89; WAN024A9B_at; Start 28; Stop 52
tcactccttgacataaataactctc

SEQ ID NO: 46992 - DNA, 25 bp, Artificial
  probe
  misc_feature (1)..(25): SEQ ID NO: 89; WAN024A9B_at; Start 16; Stop 40
atttatttctaatcactccttgaca

SEQ ID NO: 46993 - DNA, 25 bp, Artificial
  probe
  misc_feature (1)..(25): SEQ ID NO: 89; WAN024A9B_at; Start 63; Stop 87
gactatgtcttaaaaaaatggtata

SEQ ID NO: 46994 - DNA, 25 bp, Artificial
  probe
  misc_feature (1)..(25): SEQ ID NO: 89; WAN024A9B_at; Start 25; Stop 49
taatcactccttgacataaataact

SEQ ID NO: 46995 - DNA, 25 bp, Artificial
  probe
  misc_feature (1)..(25): SEQ ID NO: 89; WAN024A9B_at; Start 33; Stop 57
ccttgacataaataactctcaccaa

SEQ ID NO: 46996 - DNA, 25 bp, Artificial
  probe
  misc_feature (1)..(25): SEQ ID NO: 89; WAN024A9B_at; Start 48; Stop 72
ctctcaccaataaaagactatgtct

SEQ ID NO: 46997 - DNA, 25 bp, Artificial
  probe
  misc_feature (1)..(25): SEQ ID NO: 89; WAN024A9B_at; Start 35; Stop 59
ttgacataaataactctcaccaata

SEQ ID NO: 46998 - DNA, 25 bp, Artificial
  probe
  misc_feature (1)..(25): SEQ ID NO: 89; WAN024A9B_at; Start 50; Stop 74
ctcaccaataaaagactatgtctta

SEQ ID NO: 46999 - DNA, 25 bp, Artificial
  probe
  misc_feature (1)..(25): SEQ ID NO: 89; WAN024A9B_at; Start 30; Stop 54
actccttgacataaataactctcac

SEQ ID NO: 47000 - DNA, 25 bp, Artificial
  probe
  misc_feature (1)..(25): SEQ ID NO: 89; WAN024A9B_at; Start 19; Stop 43
tatttctaatcactccttgacataa

SEQ ID NO: 47001 - DNA, 25 bp, Artificial
  probe
  misc_feature (1)..(25): SEQ ID NO: 89; WAN024A9B_at; Start 41; Stop 65
taaataactctcaccaataaaagac

SEQ ID NO: 47002 - DNA, 25 bp, Artificial
  probe
  misc_feature (1)..(25): SEQ ID NO: 89; WAN024A9B_at; Start 26; Stop 50
aatcactccttgacataaataactc

SEQ ID NO: 47003 - DNA, 25 bp, Artificial
  probe
  misc_feature (1)..(25): SEQ ID NO: 89; WAN024A9B_at; Start 32; Stop 56
tccttgacataaataactctcacca

SEQ ID NO: 47004 - DNA, 25 bp, Artificial
  probe
  misc_feature (1)..(25): SEQ ID NO: 89; WAN024A9B_at; Start 36; Stop 60
tgacataaataactctcaccaataa

SEQ ID NO: 47005 - DNA, 25 bp, Artificial
  probe
  misc_feature (1)..(25): SEQ ID NO: 89; WAN024A9B_at; Start 42; Stop 66
aaataactctcaccaataaaagact

SEQ ID NO: 47006 - DNA, 25 bp, Artificial
  probe
  misc_feature (1)..(25): SEQ ID NO: 89; WAN024A9B_at; Start 34; Stop 58
cttgacataaataactctcaccaat

SEQ ID NO: 47007 - DNA, 25 bp, Artificial
  probe
  misc_feature (1)..(25): SEQ ID NO: 89; WAN024A9B_at; Start 22; Stop 46
ttctaatcactccttgacataaata

SEQ ID NO: 47008 - DNA, 25 bp, Artificial
  probe
  misc_feature (1)..(25): SEQ ID NO: 89; WAN024A9B_at; Start 24; Stop 48
ctaatcactccttgacataaataac

SEQ ID NO: 47009 - DNA, 25 bp, Artificial
  probe
  misc_feature (1)..(25): SEQ ID NO: 3804; WAN024A9C_at; Start 14; Stop 38
tataccatttttttaagacatagtc

SEQ ID NO: 47010 - DNA, 25 bp, Artificial
  probe
  misc_feature (1)..(25): SEQ ID NO: 3804; WAN024A9C_at; Start 54; Stop 78
ttatttatgtcaaggagtgattaga

SEQ ID NO: 47011 - DNA, 25 bp, Artificial
  probe
  misc_feature (1)..(25): SEQ ID NO: 3804; WAN024A9C_at; Start 46; Stop 70
ggtgagagttatttatgtcaaggag

SEQ ID NO: 47012 - DNA, 25 bp, Artificial
  probe
  misc_feature (1)..(25): SEQ ID NO: 3804; WAN024A9C_at; Start 57; Stop 81
tttatgtcaaggagtgattagaaat

SEQ ID NO: 47013 - DNA, 25 bp, Artificial
  probe
  misc_feature (1)..(25): SEQ ID NO: 3804; WAN024A9C_at; Start 51; Stop 75
gagttatttatgtcaaggagtgatt

SEQ ID NO: 47014 - DNA, 25 bp, Artificial
  probe
  misc_feature (1)..(25): SEQ ID NO: 3804; WAN024A9C_at; Start 47; Stop 71
gtgagagttatttatgtcaaggagt

SEQ ID NO: 47015 - DNA, 25 bp, Artificial
  probe
  misc_feature (1)..(25): SEQ ID NO: 3804; WAN024A9C_at; Start 27; Stop 51
taagacatagtcttttattggtgag

SEQ ID NO: 47016 - DNA, 25 bp, Artificial
  probe
  misc_feature (1)..(25): SEQ ID NO: 3804; WAN024A9C_at; Start 61; Stop 85
tgtcaaggagtgattagaaataaat

SEQ ID NO: 47017 - DNA, 25 bp, Artificial
  probe
  misc_feature (1)..(25): SEQ ID NO: 3804; WAN024A9C_at; Start 55; Stop 79
tatttatgtcaaggagtgattagaa

SEQ ID NO: 47018 - DNA, 25 bp, Artificial
  probe
  misc_feature (1)..(25): SEQ ID NO: 3804; WAN024A9C_at; Start 44; Stop 68
ttggtgagagttatttatgtcaagg

SEQ ID NO: 47019 - DNA, 25 bp, Artificial
  probe
  misc_feature (1)..(25): SEQ ID NO: 3804; WAN024A9C_at; Start 48; Stop 72
tgagagttatttatgtcaaggagtg

SEQ ID NO: 47020 - DNA, 25 bp, Artificial
  probe
  misc_feature (1)..(25): SEQ ID NO: 3804; WAN024A9C_at; Start 52; Stop 76
agttatttatgtcaaggagtgatta

SEQ ID NO: 47021 - DNA, 25 bp, Artificial
  probe
  misc_feature (1)..(25): SEQ ID NO: 3804; WAN024A9C_at; Start 36; Stop 60
gtcttttattggtgagagttattta

SEQ ID NO: 47022 - DNA, 25 bp, Artificial
  probe
  misc_feature (1)..(25): SEQ ID NO: 3804; WAN024A9C_at; Start 60; Stop 84
atgtcaaggagtgattagaaataaa

SEQ ID NO: 47023 - DNA, 25 bp, Artificial
  probe
  misc_feature (1)..(25): SEQ ID NO: 3804; WAN024A9C_at; Start 29; Stop 53
agacatagtcttttattggtgagag

SEQ ID NO: 47024 - DNA, 25 bp, Artificial
  probe
  misc_feature (1)..(25): SEQ ID NO: 3804; WAN024A9C_at; Start 49; Stop 73
gagagttatttatgtcaaggagtga

SEQ ID NO: 47025 - DNA, 25 bp, Artificial
  probe
  misc_feature (1)..(25): SEQ ID NO: 3804; WAN024A9C_at; Start 45; Stop 69
tggtgagagttatttatgtcaagga

SEQ ID NO: 47026 - DNA, 25 bp, Artificial
  probe
  misc_feature (1)..(25): SEQ ID NO: 3804; WAN024A9C_at; Start 64; Stop 88
caaggagtgattagaaataaattaa

SEQ ID NO: 47027 - DNA, 25 bp, Artificial
  probe
  misc_feature (1)..(25): SEQ ID NO: 3804; WAN024A9C_at; Start 56; Stop 80
atttatgtcaaggagtgattagaaa

SEQ ID NO: 47028 - DNA, 25 bp, Artificial
  probe
  misc_feature (1)..(25): SEQ ID NO: 3804; WAN024A9C_at; Start 40; Stop 64
tttattggtgagagttatttatgtc

SEQ ID NO: 47029 - DNA, 25 bp, Artificial
  probe
  misc_feature (1)..(25): SEQ ID NO: 3804; WAN024A9C_at; Start 28; Stop 52
aagacatagtcttttattggtgaga

SEQ ID NO: 47030 - DNA, 25 bp, Artificial
  probe
  misc_feature (1)..(25): SEQ ID NO: 3804; WAN024A9C_at; Start 38; Stop 62
cttttattggtgagagttatttatg

SEQ ID NO: 47031 - DNA, 25 bp, Artificial
  probe
  misc_feature (1)..(25): SEQ ID NO: 3804; WAN024A9C_at; Start 32; Stop 56
catagtcttttattggtgagagtta

SEQ ID NO: 47032 - DNA, 25 bp, Artificial
  probe
  misc_feature (1)..(25): SEQ ID NO: 3804; WAN024A9C_at; Start 41; Stop 65
ttattggtgagagttatttatgtca

SEQ ID NO: 47033 - DNA, 25 bp, Artificial
  probe
  misc_feature (1)..(25): SEQ ID NO: 3804; WAN024A9C_at; Start 59; Stop 83
tatgtcaaggagtgattagaaataa

SEQ ID NO: 47034 - DNA, 25 bp, Artificial
  probe
  misc_feature (1)..(25): SEQ ID NO: 3804; WAN024A9C_at; Start 63; Stop 87
tcaaggagtgattagaaataaatta

SEQ ID NO: 47035 - DNA, 25 bp, Artificial
  probe
  misc_feature (1)..(25): SEQ ID NO: 3804; WAN024A9C_at; Start 58; Stop 82
ttatgtcaaggagtgattagaaata

SEQ ID NO: 47036 - DNA, 25 bp, Artificial
  probe
  misc_feature (1)..(25): SEQ ID NO: 3804; WAN024A9C_at; Start 50; Stop 74
agagttatttatgtcaaggagtgat

SEQ ID NO: 47037 - DNA, 25 bp, Artificial
  probe
  misc_feature (1)..(25): SEQ ID NO: 3804; WAN024A9C_at; Start 42; Stop 66
tattggtgagagttatttatgtcaa

SEQ ID NO: 47038 - DNA, 25 bp, Artificial
  probe
  misc_feature (1)..(25): SEQ ID NO: 3804; WAN024A9C_at; Start 62; Stop 86
gtcaaggagtgattagaaataaatt

SEQ ID NO: 47039 - DNA, 25 bp, Artificial
  probe
  misc_feature (1)..(25): SEQ ID NO: 3804; WAN024A9C_at; Start 43; Stop 67
attggtgagagttatttatgtcaag

SEQ ID NO: 47040 - DNA, 25 bp, Artificial
  probe
  misc_feature (1)..(25): SEQ ID NO: 3804; WAN024A9C_at; Start 53; Stop 77
gttatttatgtcaaggagtgattag

SEQ ID NO: 47041 - DNA, 25 bp, Artificial
  probe
  misc_feature (1)..(25): SEQ ID NO: 3804; WAN024A9C_at; Start 34; Stop 58
tagtcttttattggtgagagttatt

SEQ ID NO: 47042 - DNA, 25 bp, Artificial
  probe
  misc_feature (1)..(25): SEQ ID NO: 3804; WAN024A9C_at; Start 30; Stop 54
gacatagtcttttattggtgagagt

SEQ ID NO: 47043 - DNA, 25 bp, Artificial
  probe
  misc_feature (1)..(25): SEQ ID NO: 3258; WAN024A9D_at; Start 133; Stop 157
caatcagtaatttagttctcaggaa

SEQ ID NO: 47044 - DNA, 25 bp, Artificial
  probe
  misc_feature (1)..(25): SEQ ID NO: 3258; WAN024A9D_at; Start 120; Stop 144
tcctttttgacaccaatcagtaatt

SEQ ID NO: 47045 - DNA, 25 bp, Artificial
  probe
  misc_feature (1)..(25): SEQ ID NO: 3258; WAN024A9D_at; Start 115; Stop 139
agttttcctttttgacaccaatcag

SEQ ID NO: 47046 - DNA, 25 bp, Artificial
  probe
  misc_feature (1)..(25): SEQ ID NO: 3258; WAN024A9D_at; Start 90; Stop 114
tatagacaggatatcatcgcttgga

SEQ ID NO: 47047 - DNA, 25 bp, Artificial
  probe
  misc_feature (1)..(25): SEQ ID NO: 3258; WAN024A9D_at; Start 167; Stop 191
gtgcttttcgtacatagtttcataa

SEQ ID NO: 47048 - DNA, 25 bp, Artificial
  probe
  misc_feature (1)..(25): SEQ ID NO: 3258; WAN024A9D_at; Start 92; Stop 116
tagacaggatatcatcgcttggaag

SEQ ID NO: 47049 - DNA, 25 bp, Artificial
  probe
  misc_feature (1)..(25): SEQ ID NO: 3258; WAN024A9D_at; Start 162; Stop 186
tggcagtgcttttcgtacatagttt

SEQ ID NO: 47050 - DNA, 25 bp, Artificial
  probe
  misc_feature (1)..(25): SEQ ID NO: 3258; WAN024A9D_at; Start 71; Stop 95
cagatttctataggtcgtgtataga

SEQ ID NO: 47051 - DNA, 25 bp, Artificial
  probe
  misc_feature (1)..(25): SEQ ID NO: 3258; WAN024A9D_at; Start 123; Stop 147
tttttgacaccaatcagtaatttag

SEQ ID NO: 47052 - DNA, 25 bp, Artificial
  probe
  misc_feature (1)..(25): SEQ ID NO: 3258; WAN024A9D_at; Start 155; Stop 179
gaattaatggcagtgcttttcgtac

SEQ ID NO: 47053 - DNA, 25 bp, Artificial
  probe
  misc_feature (1)..(25): SEQ ID NO: 3258; WAN024A9D_at; Start 183; Stop 207
gtttcataactacagtatagcatag

SEQ ID NO: 47054 - DNA, 25 bp, Artificial
  probe
  misc_feature (1)..(25): SEQ ID NO: 3258; WAN024A9D_at; Start 148; Stop 172
ttctcaggaattaatggcagtgctt

SEQ ID NO: 47055 - DNA, 25 bp, Artificial
  probe
  misc_feature (1)..(25): SEQ ID NO: 3258; WAN024A9D_at; Start 83; Stop 107
ggtcgtgtatagacaggatatcatc

SEQ ID NO: 47056 - DNA, 25 bp, Artificial
  probe
  misc_feature (1)..(25): SEQ ID NO: 3258; WAN024A9D_at; Start 159; Stop 183
taatggcagtgcttttcgtacatag

SEQ ID NO: 47057 - DNA, 25 bp, Artificial
  probe
  misc_feature (1)..(25): SEQ ID NO: 3258; WAN024A9D_at; Start 151; Stop 175
tcaggaattaatggcagtgcttttc

SEQ ID NO: 47058 - DNA, 25 bp, Artificial
  probe
  misc_feature (1)..(25): SEQ ID NO: 3258; WAN024A9D_at; Start 149; Stop 173
tctcaggaattaatggcagtgcttt

SEQ ID NO: 47059 - DNA, 25 bp, Artificial
  probe
  misc_feature (1)..(25): SEQ ID NO: 3258; WAN024A9D_at; Start 179; Stop 203
catagtttcataactacagtatagc

SEQ ID NO: 47060 - DNA, 25 bp, Artificial
  probe
  misc_feature (1)..(25): SEQ ID NO: 3258; WAN024A9D_at; Start 128; Stop 152
gacaccaatcagtaatttagttctc

SEQ ID NO: 47061 - DNA, 25 bp, Artificial
  probe
  misc_feature (1)..(25): SEQ ID NO: 3258; WAN024A9D_at; Start 77; Stop 101
tctataggtcgtgtatagacaggat

SEQ ID NO: 47062 - DNA, 25 bp, Artificial
  probe
  misc_feature (1)..(25): SEQ ID NO: 3258; WAN024A9D_at; Start 203; Stop 227
catagtatatcactttatagttttc

SEQ ID NO: 47063 - DNA, 25 bp, Artificial
  probe
  misc_feature (1)..(25): SEQ ID NO: 3258; WAN024A9D_at; Start 85; Stop 109
tcgtgtatagacaggatatcatcgc

SEQ ID NO: 47064 - DNA, 25 bp, Artificial
  probe
  misc_feature (1)..(25): SEQ ID NO: 3258; WAN024A9D_at; Start 191; Stop 215
actacagtatagcatagtatatcac

SEQ ID NO: 47065 - DNA, 25 bp, Artificial
  probe
  misc_feature (1)..(25): SEQ ID NO: 3258; WAN024A9D_at; Start 66; Stop 90
tattacagatttctataggtcgtgt

SEQ ID NO: 47066 - DNA, 25 bp, Artificial
  probe
  misc_feature (1)..(25): SEQ ID NO: 3258; WAN024A9D_at; Start 195; Stop 219
cagtatagcatagtatatcacttta

SEQ ID NO: 47067 - DNA, 25 bp, Artificial
  probe
  misc_feature (1)..(25): SEQ ID NO: 3258; WAN024A9D_at; Start 99; Stop 123
gatatcatcgcttggaagttttcct

SEQ ID NO: 47068 - DNA, 25 bp, Artificial
  probe
  misc_feature (1)..(25): SEQ ID NO: 3258; WAN024A9D_at; Start 1; Stop 25
cggaaaattctcttttcatactcat

SEQ ID NO: 47069 - DNA, 25 bp, Artificial
  probe
  misc_feature (1)..(25): SEQ ID NO: 3258; WAN024A9D_at; Start 63; Stop 87
gtatattacagatttctataggtcg

SEQ ID NO: 47070 - DNA, 25 bp, Artificial
  probe
  misc_feature (1)..(25): SEQ ID NO: 3258; WAN024A9D_at; Start 81; Stop 105
taggtcgtgtatagacaggatatca

SEQ ID NO: 47071 - DNA, 25 bp, Artificial
  probe
  misc_feature (1)..(25): SEQ ID NO: 3258; WAN024A9D_at; Start 146; Stop 170
agttctcaggaattaatggcagtgc

SEQ ID NO: 47072 - DNA, 25 bp, Artificial
  probe
  misc_feature (1)..(25): SEQ ID NO: 3258; WAN024A9D_at; Start 104; Stop 128
catcgcttggaagttttcctttttg

SEQ ID NO: 47073 - DNA, 25 bp, Artificial
  probe
  misc_feature (1)..(25): SEQ ID NO: 3258; WAN024A9D_at; Start 164; Stop 188
gcagtgcttttcgtacatagtttca

SEQ ID NO: 47074 - DNA, 25 bp, Artificial
  probe
  misc_feature (1)..(25): SEQ ID NO: 3258; WAN024A9D_at; Start 94; Stop 118
gacaggatatcatcgcttggaagtt

SEQ ID NO: 47075 - DNA, 25 bp, Artificial
  probe
  misc_feature (1)..(25): SEQ ID NO: 3258; WAN024A9D_at; Start 88; Stop 112
tgtatagacaggatatcatcgcttg

SEQ ID NO: 47076 - DNA, 25 bp, Artificial
  probe
  misc_feature (1)..(25): SEQ ID NO: 3258; WAN024A9D_at; Start 174; Stop 198
tcgtacatagtttcataactacagt

SEQ ID NO: 47077 - DNA, 25 bp, Artificial
  probe
  misc_feature (1)..(25): SEQ ID NO: 4670; WAN024A9E_at; Start 114; Stop 138
ttccaagcgatgatatcctgtctat

SEQ ID NO: 47078 - DNA, 25 bp, Artificial
  probe
  misc_feature (1)..(25): SEQ ID NO: 4670; WAN024A9E_at; Start 112; Stop 136
acttccaagcgatgatatcctgtct

SEQ ID NO: 47079 - DNA, 25 bp, Artificial
  probe
  misc_feature (1)..(25): SEQ ID NO: 4670; WAN024A9E_at; Start 49; Stop 73
tgtacgaaaagcactgccattaatt

SEQ ID NO: 47080 - DNA, 25 bp, Artificial
  probe
  misc_feature (1)..(25): SEQ ID NO: 4670; WAN024A9E_at; Start 196; Stop 220
gattttaaatgagtatgaaaagaga

SEQ ID NO: 47081 - DNA, 25 bp, Artificial
  probe
  misc_feature (1)..(25): SEQ ID NO: 4670; WAN024A9E_at; Start 204; Stop 228
atgagtatgaaaagagaattttccg

SEQ ID NO: 47082 - DNA, 25 bp, Artificial
  probe
  misc_feature (1)..(25): SEQ ID NO: 4670; WAN024A9E_at; Start 143; Stop 167
gacctatagaaatctgtaatataca

SEQ ID NO: 47083 - DNA, 25 bp, Artificial
  probe
  misc_feature (1)..(25): SEQ ID NO: 4670; WAN024A9E_at; Start 59; Stop 83
gcactgccattaattcctgagaact

SEQ ID NO: 47084 - DNA, 25 bp, Artificial
  probe
  misc_feature (1)..(25): SEQ ID NO: 4670; WAN024A9E_at; Start 127; Stop 151
tatcctgtctatacacgacctatag

SEQ ID NO: 47085 - DNA, 25 bp, Artificial
  probe
  misc_feature (1)..(25): SEQ ID NO: 4670; WAN024A9E_at; Start 120; Stop 144
gcgatgatatcctgtctatacacga

SEQ ID NO: 47086 - DNA, 25 bp, Artificial
  probe
  misc_feature (1)..(25): SEQ ID NO: 4670; WAN024A9E_at; Start 117; Stop 141
caagcgatgatatcctgtctataca

SEQ ID NO: 47087 - DNA, 25 bp, Artificial
  probe
  misc_feature (1)..(25): SEQ ID NO: 4670; WAN024A9E_at; Start 22; Stop 46
ctatgctatactgtagttatgaaac

SEQ ID NO: 47088 - DNA, 25 bp, Artificial
  probe
  misc_feature (1)..(25): SEQ ID NO: 4670; WAN024A9E_at; Start 101; Stop 125
caaaaaggaaaacttccaagcgatg

SEQ ID NO: 47089 - DNA, 25 bp, Artificial
  probe
  misc_feature (1)..(25): SEQ ID NO: 4670; WAN024A9E_at; Start 77; Stop 101
gagaactaaattactgattggtgtc

SEQ ID NO: 47090 - DNA, 25 bp, Artificial
  probe
  misc_feature (1)..(25): SEQ ID NO: 4670; WAN024A9E_at; Start 140; Stop 164
cacgacctatagaaatctgtaatat

SEQ ID NO: 47091 - DNA, 25 bp, Artificial
  probe
  misc_feature (1)..(25): SEQ ID NO: 4670; WAN024A9E_at; Start 47; Stop 71
tatgtacgaaaagcactgccattaa

SEQ ID NO: 47092 - DNA, 25 bp, Artificial
  probe
  misc_feature (1)..(25): SEQ ID NO: 4670; WAN024A9E_at; Start 73; Stop 97
tcctgagaactaaattactgattgg

SEQ ID NO: 47093 - DNA, 25 bp, Artificial
  probe
  misc_feature (1)..(25): SEQ ID NO: 4670; WAN024A9E_at; Start 26; Stop 50
gctatactgtagttatgaaactatg

SEQ ID NO: 47094 - DNA, 25 bp, Artificial
  probe
  misc_feature (1)..(25): SEQ ID NO: 4670; WAN024A9E_at; Start 60; Stop 84
cactgccattaattcctgagaacta

SEQ ID NO: 47095 - DNA, 25 bp, Artificial
  probe
  misc_feature (1)..(25): SEQ ID NO: 4670; WAN024A9E_at; Start 42; Stop 66
gaaactatgtacgaaaagcactgcc

SEQ ID NO: 47096 - DNA, 25 bp, Artificial
  probe
  misc_feature (1)..(25): SEQ ID NO: 4670; WAN024A9E_at; Start 10; Stop 34
taaagtgatatactatgctatactg

SEQ ID NO: 47097 - DNA, 25 bp, Artificial
  probe
  misc_feature (1)..(25): SEQ ID NO: 4670; WAN024A9E_at; Start 122; Stop 146
gatgatatcctgtctatacacgacc

SEQ ID NO: 47098 - DNA, 25 bp, Artificial
  probe
  misc_feature (1)..(25): SEQ ID NO: 4670; WAN024A9E_at; Start 13; Stop 37
agtgatatactatgctatactgtag

SEQ ID NO: 47099 - DNA, 25 bp, Artificial
  probe
  misc_feature (1)..(25): SEQ ID NO: 4670; WAN024A9E_at; Start 57; Stop 81
aagcactgccattaattcctgagaa

SEQ ID NO: 47100 - DNA, 25 bp, Artificial
  probe
  misc_feature (1)..(25): SEQ ID NO: 4670; WAN024A9E_at; Start 2; Stop 26
gaaaactataaagtgatatactatg

SEQ ID NO: 47101 - DNA, 25 bp, Artificial
  probe
  misc_feature (1)..(25): SEQ ID NO: 4670; WAN024A9E_at; Start 44; Stop 68
aactatgtacgaaaagcactgccat

SEQ ID NO: 47102 - DNA, 25 bp, Artificial
  probe
  misc_feature (1)..(25): SEQ ID NO: 4670; WAN024A9E_at; Start 38; Stop 62
ttatgaaactatgtacgaaaagcac

SEQ ID NO: 47103 - DNA, 25 bp, Artificial
  probe
  misc_feature (1)..(25): SEQ ID NO: 4670; WAN024A9E_at; Start 136; Stop 160
tatacacgacctatagaaatctgta

SEQ ID NO: 47104 - DNA, 25 bp, Artificial
  probe
  misc_feature (1)..(25): SEQ ID NO: 4670; WAN024A9E_at; Start 56; Stop 80
aaagcactgccattaattcctgaga

SEQ ID NO: 47105 - DNA, 25 bp, Artificial
  probe
  misc_feature (1)..(25): SEQ ID NO: 4670; WAN024A9E_at; Start 81; Stop 105
actaaattactgattggtgtcaaaa

SEQ ID NO: 47106 - DNA, 25 bp, Artificial
  probe
  misc_feature (1)..(25): SEQ ID NO: 4670; WAN024A9E_at; Start 124; Stop 148
tgatatcctgtctatacacgaccta

SEQ ID NO: 47107 - DNA, 25 bp, Artificial
  probe
  misc_feature (1)..(25): SEQ ID NO: 4670; WAN024A9E_at; Start 63; Stop 87
tgccattaattcctgagaactaaat

SEQ ID NO: 47108 - DNA, 25 bp, Artificial
  probe
  misc_feature (1)..(25): SEQ ID NO: 4670; WAN024A9E_at; Start 41; Stop 65
tgaaactatgtacgaaaagcactgc

SEQ ID NO: 47109 - DNA, 25 bp, Artificial
  probe
  misc_feature (1)..(25): SEQ ID NO: 4670; WAN024A9E_at; Start 54; Stop 78
gaaaagcactgccattaattcctga

SEQ ID NO: 47110 - DNA, 25 bp, Artificial
  probe
  misc_feature (1)..(25): SEQ ID NO: 4670; WAN024A9E_at; Start 129; Stop 153
tcctgtctatacacgacctatagaa

SEQ ID NO: 47111 - DNA, 25 bp, Artificial
  probe
  misc_feature (1)..(25): SEQ ID NO: 568; WAN024A9F_at; Start 4; Stop 28
ttctcccttgttctcatattatccg

SEQ ID NO: 47112 - DNA, 25 bp, Artificial
  probe
  misc_feature (1)..(25): SEQ ID NO: 568; WAN024A9F_at; Start 7; Stop 31
tcccttgttctcatattatccgtca

SEQ ID NO: 47113 - DNA, 25 bp, Artificial
  probe
  misc_feature (1)..(25): SEQ ID NO: 568; WAN024A9F_at; Start 13; Stop 37
gttctcatattatccgtcaaaaata

SEQ ID NO: 47114 - DNA, 25 bp, Artificial
  probe
  misc_feature (1)..(25): SEQ ID NO: 568; WAN024A9F_at; Start 12; Stop 36
tgttctcatattatccgtcaaaaat

SEQ ID NO: 47115 - DNA, 25 bp, Artificial
  probe
  misc_feature (1)..(25): SEQ ID NO: 568; WAN024A9F_at; Start 20; Stop 44
tattatccgtcaaaaatatctttga

SEQ ID NO: 47116 - DNA, 25 bp, Artificial
  probe
  misc_feature (1)..(25): SEQ ID NO: 568; WAN024A9F_at; Start 16; Stop 40
ctcatattatccgtcaaaaatatct

SEQ ID NO: 47117 - DNA, 25 bp, Artificial
  probe
  misc_feature (1)..(25): SEQ ID NO: 568; WAN024A9F_at; Start 59; Stop 83
tcatatacaataaatacaatgctta

SEQ ID NO: 47118 - DNA, 25 bp, Artificial
  probe
  misc_feature (1)..(25): SEQ ID NO: 568; WAN024A9F_at; Start 10; Stop 34
cttgttctcatattatccgtcaaaa

SEQ ID NO: 47119 - DNA, 25 bp, Artificial
  probe
  misc_feature (1)..(25): SEQ ID NO: 568; WAN024A9F_at; Start 76; Stop 100
aatgcttattataccataaatccgc

SEQ ID NO: 47120 - DNA, 25 bp, Artificial
  probe
  misc_feature (1)..(25): SEQ ID NO: 568; WAN024A9F_at; Start 90; Stop 114
cataaatccgctttcaacgataaaa

SEQ ID NO: 47121 - DNA, 25 bp, Artificial
  probe
  misc_feature (1)..(25): SEQ ID NO: 568; WAN024A9F_at; Start 38; Stop 62
tctttgattttttctccagattcat

SEQ ID NO: 47122 - DNA, 25 bp, Artificial
  probe
  misc_feature (1)..(25): SEQ ID NO: 568; WAN024A9F_at; Start 80; Stop 104
cttattataccataaatccgctttc

SEQ ID NO: 47123 - DNA, 25 bp, Artificial
  probe
  misc_feature (1)..(25): SEQ ID NO: 568; WAN024A9F_at; Start 69; Stop 93
taaatacaatgcttattataccata

SEQ ID NO: 47124 - DNA, 25 bp, Artificial
  probe
  misc_feature (1)..(25): SEQ ID NO: 568; WAN024A9F_at; Start 33; Stop 57
aaatatctttgattttttctccaga

SEQ ID NO: 47125 - DNA, 25 bp, Artificial
  probe
  misc_feature (1)..(25): SEQ ID NO: 568; WAN024A9F_at; Start 9; Stop 33
ccttgttctcatattatccgtcaaa

SEQ ID NO: 47126 - DNA, 25 bp, Artificial
  probe
  misc_feature (1)..(25): SEQ ID NO: 568; WAN024A9F_at; Start 23; Stop 47
tatccgtcaaaaatatctttgattt

SEQ ID NO: 47127 - DNA, 25 bp, Artificial
  probe
  misc_feature (1)..(25): SEQ ID NO: 568; WAN024A9F_at; Start 43; Stop 67
gattttttctccagattcatataca

SEQ ID NO: 47128 - DNA, 25 bp, Artificial
  probe
  misc_feature (1)..(25): SEQ ID NO: 568; WAN024A9F_at; Start 2; Stop 26
tattctcccttgttctcatattatc

SEQ ID NO: 47129 - DNA, 25 bp, Artificial
  probe
  misc_feature (1)..(25): SEQ ID NO: 568; WAN024A9F_at; Start 89; Stop 113
ccataaatccgctttcaacgataaa

SEQ ID NO: 47130 - DNA, 25 bp, Artificial
  probe
  misc_feature (1)..(25): SEQ ID NO: 568; WAN024A9F_at; Start 58; Stop 82
ttcatatacaataaatacaatgctt

SEQ ID NO: 47131 - DNA, 25 bp, Artificial
  probe
  misc_feature (1)..(25): SEQ ID NO: 568; WAN024A9F_at; Start 84; Stop 108
ttataccataaatccgctttcaacg

SEQ ID NO: 47132 - DNA, 25 bp, Artificial
  probe
  misc_feature (1)..(25): SEQ ID NO: 568; WAN024A9F_at; Start 6; Stop 30
ctcccttgttctcatattatccgtc

SEQ ID NO: 47133 - DNA, 25 bp, Artificial
  probe
  misc_feature (1)..(25): SEQ ID NO: 568; WAN024A9F_at; Start 79; Stop 103
gcttattataccataaatccgcttt

SEQ ID NO: 47134 - DNA, 25 bp, Artificial
  probe
  misc_feature (1)..(25): SEQ ID NO: 568; WAN024A9F_at; Start 88; Stop 112
accataaatccgctttcaacgataa

SEQ ID NO: 47135 - DNA, 25 bp, Artificial
  probe
  misc_feature (1)..(25): SEQ ID NO: 568; WAN024A9F_at; Start 75; Stop 99
caatgcttattataccataaatccg

SEQ ID NO: 47136 - DNA, 25 bp, Artificial
  probe
  misc_feature (1)..(25): SEQ ID NO: 568; WAN024A9F_at; Start 85; Stop 109
tataccataaatccgctttcaacga

SEQ ID NO: 47137 - DNA, 25 bp, Artificial
  probe
  misc_feature (1)..(25): SEQ ID NO: 568; WAN024A9F_at; Start 78; Stop 102
tgcttattataccataaatccgctt

SEQ ID NO: 47138 - DNA, 25 bp, Artificial
  probe
  misc_feature (1)..(25): SEQ ID NO: 568; WAN024A9F_at; Start 47; Stop 71
ttttctccagattcatatacaataa

SEQ ID NO: 47139 - DNA, 25 bp, Artificial
  probe
  misc_feature (1)..(25): SEQ ID NO: 568; WAN024A9F_at; Start 5; Stop 29
tctcccttgttctcatattatccgt

SEQ ID NO: 47140 - DNA, 25 bp, Artificial
  probe
  misc_feature (1)..(25): SEQ ID NO: 568; WAN024A9F_at; Start 66; Stop 90
caataaatacaatgcttattatacc

SEQ ID NO: 47141 - DNA, 25 bp, Artificial
  probe
  misc_feature (1)..(25): SEQ ID NO: 568; WAN024A9F_at; Start 8; Stop 32
cccttgttctcatattatccgtcaa

SEQ ID NO: 47142 - DNA, 25 bp, Artificial
  probe
  misc_feature (1)..(25): SEQ ID NO: 568; WAN024A9F_at; Start 52; Stop 76
tccagattcatatacaataaataca

SEQ ID NO: 47143 - DNA, 25 bp, Artificial
  probe
  misc_feature (1)..(25): SEQ ID NO: 568; WAN024A9F_at; Start 50; Stop 74
tctccagattcatatacaataaata

SEQ ID NO: 47144 - DNA, 25 bp, Artificial
  probe
  misc_feature (1)..(25): SEQ ID NO: 568; WAN024A9F_at; Start 82; Stop 106
tattataccataaatccgctttcaa

SEQ ID NO: 47145 - DNA, 25 bp, Artificial
  probe
  misc_feature (1)..(25): SEQ ID NO: 5941; WAN024A9G_at; Start 68; Stop 92
gaatctggagaaaaaatcaaagata

SEQ ID NO: 47146 - DNA, 25 bp, Artificial
  probe
  misc_feature (1)..(25): SEQ ID NO: 5941; WAN024A9G_at; Start 21; Stop 45
gttgaaagcggatttatggtataat

SEQ ID NO: 47147 - DNA, 25 bp, Artificial
  probe
  misc_feature (1)..(25): SEQ ID NO: 5941; WAN024A9G_at; Start 26; Stop 50
aagcggatttatggtataataagca

SEQ ID NO: 47148 - DNA, 25 bp, Artificial
  probe
  misc_feature (1)..(25): SEQ ID NO: 5941; WAN024A9G_at; Start 35; Stop 59
tatggtataataagcattgtattta

SEQ ID NO: 47149 - DNA, 25 bp, Artificial
  probe
  misc_feature (1)..(25): SEQ ID NO: 5941; WAN024A9G_at; Start 94; Stop 118
ttttgacggataatatgagaacaag

SEQ ID NO: 47150 - DNA, 25 bp, Artificial
  probe
  misc_feature (1)..(25): SEQ ID NO: 5941; WAN024A9G_at; Start 96; Stop 120
ttgacggataatatgagaacaaggg

SEQ ID NO: 47151 - DNA, 25 bp, Artificial
  probe
  misc_feature (1)..(25): SEQ ID NO: 5941; WAN024A9G_at; Start 63; Stop 87
tatatgaatctggagaaaaaatcaa

SEQ ID NO: 47152 - DNA, 25 bp, Artificial
  probe
  misc_feature (1)..(25): SEQ ID NO: 5941; WAN024A9G_at; Start 100; Stop 124
cggataatatgagaacaagggagaa

SEQ ID NO: 47153 - DNA, 25 bp, Artificial
  probe
  misc_feature (1)..(25): SEQ ID NO: 5941; WAN024A9G_at; Start 54; Stop 78
tatttattgtatatgaatctggaga

SEQ ID NO: 47154 - DNA, 25 bp, Artificial
  probe
  misc_feature (1)..(25): SEQ ID NO: 5941; WAN024A9G_at; Start 25; Stop 49
aaagcggatttatggtataataagc

SEQ ID NO: 47155 - DNA, 25 bp, Artificial
  probe
  misc_feature (1)..(25): SEQ ID NO: 5941; WAN024A9G_at; Start 65; Stop 89
tatgaatctggagaaaaaatcaaag

SEQ ID NO: 47156 - DNA, 25 bp, Artificial
  probe
  misc_feature (1)..(25): SEQ ID NO: 5941; WAN024A9G_at; Start 97; Stop 121
tgacggataatatgagaacaaggga

SEQ ID NO: 47157 - DNA, 25 bp, Artificial
  probe
  misc_feature (1)..(25): SEQ ID NO: 5941; WAN024A9G_at; Start 29; Stop 53
cggatttatggtataataagcattg

SEQ ID NO: 47158 - DNA, 25 bp, Artificial
  probe
  misc_feature (1)..(25): SEQ ID NO: 5941; WAN024A9G_at; Start 15; Stop 39
tttatcgttgaaagcggatttatgg

SEQ ID NO: 47159 - DNA, 25 bp, Artificial
  probe
  misc_feature (1)..(25): SEQ ID NO: 5941; WAN024A9G_at; Start 67; Stop 91
tgaatctggagaaaaaatcaaagat

SEQ ID NO: 47160 - DNA, 25 bp, Artificial
  probe
  misc_feature (1)..(25): SEQ ID NO: 5941; WAN024A9G_at; Start 16; Stop 40
ttatcgttgaaagcggatttatggt

SEQ ID NO: 47161 - DNA, 25 bp, Artificial
  probe
  misc_feature (1)..(25): SEQ ID NO: 5941; WAN024A9G_at; Start 84; Stop 108
tcaaagatatttttgacggataata

SEQ ID NO: 47162 - DNA, 25 bp, Artificial
  probe
  misc_feature (1)..(25): SEQ ID NO: 5941; WAN024A9G_at; Start 101; Stop 125
ggataatatgagaacaagggagaat

SEQ ID NO: 47163 - DNA, 25 bp, Artificial
  probe
  misc_feature (1)..(25): SEQ ID NO: 5941; WAN024A9G_at; Start 61; Stop 85
tgtatatgaatctggagaaaaaatc

SEQ ID NO: 47164 - DNA, 25 bp, Artificial
  probe
  misc_feature (1)..(25): SEQ ID NO: 5941; WAN024A9G_at; Start 102; Stop 126
gataatatgagaacaagggagaata

SEQ ID NO: 47165 - DNA, 25 bp, Artificial
  probe
  misc_feature (1)..(25): SEQ ID NO: 5941; WAN024A9G_at; Start 98; Stop 122
gacggataatatgagaacaagggag

SEQ ID NO: 47166 - DNA, 25 bp, Artificial
  probe
  misc_feature (1)..(25): SEQ ID NO: 5941; WAN024A9G_at; Start 24; Stop 48
gaaagcggatttatggtataataag

SEQ ID NO: 47167 - DNA, 25 bp, Artificial
  probe
  misc_feature (1)..(25): SEQ ID NO: 5941; WAN024A9G_at; Start 99; Stop 123
acggataatatgagaacaagggaga

SEQ ID NO: 47168 - DNA, 25 bp, Artificial
  probe
  misc_feature (1)..(25): SEQ ID NO: 5941; WAN024A9G_at; Start 95; Stop 119
tttgacggataatatgagaacaagg

SEQ ID NO: 47169 - DNA, 25 bp, Artificial
  probe
  misc_feature (1)..(25): SEQ ID NO: 5941; WAN024A9G_at; Start 71; Stop 95
tctggagaaaaaatcaaagatattt

SEQ ID NO: 47170 - DNA, 25 bp, Artificial
  probe
  misc_feature (1)..(25): SEQ ID NO: 5941; WAN024A9G_at; Start 31; Stop 55
gatttatggtataataagcattgta

SEQ ID NO: 47171 - DNA, 25 bp, Artificial
  probe
  misc_feature (1)..(25): SEQ ID NO: 5941; WAN024A9G_at; Start 28; Stop 52
gcggatttatggtataataagcatt

SEQ ID NO: 47172 - DNA, 25 bp, Artificial
  probe
  misc_feature (1)..(25): SEQ ID NO: 5941; WAN024A9G_at; Start 58; Stop 82
tattgtatatgaatctggagaaaaa

SEQ ID NO: 47173 - DNA, 25 bp, Artificial
  probe
  misc_feature (1)..(25): SEQ ID NO: 5941; WAN024A9G_at; Start 19; Stop 43
tcgttgaaagcggatttatggtata

SEQ ID NO: 47174 - DNA, 25 bp, Artificial
  probe
  misc_feature (1)..(25): SEQ ID NO: 5941; WAN024A9G_at; Start 20; Stop 44
cgttgaaagcggatttatggtataa

SEQ ID NO: 47175 - DNA, 25 bp, Artificial
  probe
  misc_feature (1)..(25): SEQ ID NO: 5941; WAN024A9G_at; Start 81; Stop 105
aaatcaaagatatttttgacggata

SEQ ID NO: 47176 - DNA, 25 bp, Artificial
  probe
  misc_feature (1)..(25): SEQ ID NO: 5941; WAN024A9G_at; Start 45; Stop 69
taagcattgtatttattgtatatga

SEQ ID NO: 47177 - DNA, 25 bp, Artificial
  probe
  misc_feature (1)..(25): SEQ ID NO: 5941; WAN024A9G_at; Start 103; Stop 127
ataatatgagaacaagggagaatat

SEQ ID NO: 47178 - DNA, 25 bp, Artificial
  probe
  misc_feature (1)..(25): SEQ ID NO: 5941; WAN024A9G_at; Start 14; Stop 38
ttttatcgttgaaagcggatttatg

SEQ ID NO: 47179 - DNA, 25 bp, Artificial
  probe
  misc_feature (1)..(25): SEQ ID NO: 4550; WAN024A9H_at; Start 3; Stop 27
tatgtaaggtaaatataactaggat

SEQ ID NO: 47180 - DNA, 25 bp, Artificial
  probe
  misc_feature (1)..(25): SEQ ID NO: 4550; WAN024A9H_at; Start 30; Stop 54
ataaagtttacagaggacggtctat

SEQ ID NO: 47181 - DNA, 25 bp, Artificial
  probe
  misc_feature (1)..(25): SEQ ID NO: 4550; WAN024A9H_at; Start 1; Stop 25
tatatgtaaggtaaatataactagg

SEQ ID NO: 47182 - DNA, 25 bp, Artificial
  probe
  misc_feature (1)..(25): SEQ ID NO: 4550; WAN024A9H_at; Start 31; Stop 55
taaagtttacagaggacggtctata

SEQ ID NO: 47183 - DNA, 25 bp, Artificial
  probe
  misc_feature (1)..(25): SEQ ID NO: 4550; WAN024A9H_at; Start 2; Stop 26
atatgtaaggtaaatataactagga

SEQ ID NO: 47184 - DNA, 25 bp, Artificial
  probe
  misc_feature (1)..(25): SEQ ID NO: 4550; WAN024A9H_at; Start 22; Stop 46
taggatttataaagtttacagagga

SEQ ID NO: 47185 - DNA, 25 bp, Artificial
  probe
  misc_feature (1)..(25): SEQ ID NO: 4550; WAN024A9H_at; Start 21; Stop 45
ctaggatttataaagtttacagagg

SEQ ID NO: 47186 - DNA, 25 bp, Artificial
  probe
  misc_feature (1)..(25): SEQ ID NO: 4550; WAN024A9H_at; Start 4; Stop 28
atgtaaggtaaatataactaggatt

SEQ ID NO: 47187 - DNA, 25 bp, Artificial
  probe
  misc_feature (1)..(25): SEQ ID NO: 4550; WAN024A9H_at; Start 29; Stop 53
tataaagtttacagaggacggtcta

SEQ ID NO: 47188 - DNA, 25 bp, Artificial
  probe
  misc_feature (1)..(25): SEQ ID NO: 4550; WAN024A9H_at; Start 20; Stop 44
actaggatttataaagtttacagag

SEQ ID NO: 47189 - DNA, 25 bp, Artificial
  probe
  misc_feature (1)..(25): SEQ ID NO: 4546; WAN024A9I_at; Start 31; Stop 55
cctagttatatttaccttacatata

SEQ ID NO: 47190 - DNA, 25 bp, Artificial
  probe
  misc_feature (1)..(25): SEQ ID NO: 4546; WAN024A9I_at; Start 3; Stop 27
tagaccgtcctctgtaaactttata

SEQ ID NO: 47191 - DNA, 25 bp, Artificial
  probe
  misc_feature (1)..(25): SEQ ID NO: 4546; WAN024A9I_at; Start 10; Stop 34
tcctctgtaaactttataaatccta

SEQ ID NO: 47192 - DNA, 25 bp, Artificial
  probe
  misc_feature (1)..(25): SEQ ID NO: 4546; WAN024A9I_at; Start 29; Stop 53
atcctagttatatttaccttacata

SEQ ID NO: 47193 - DNA, 25 bp, Artificial
  probe
  misc_feature (1)..(25): SEQ ID NO: 4546; WAN024A9I_at; Start 12; Stop 36
ctctgtaaactttataaatcctagt

SEQ ID NO: 47194 - DNA, 25 bp, Artificial
  probe
  misc_feature (1)..(25): SEQ ID NO: 4546; WAN024A9I_at; Start 1; Stop 25
tatagaccgtcctctgtaaacttta

SEQ ID NO: 47195 - DNA, 25 bp, Artificial
  probe
  misc_feature (1)..(25): SEQ ID NO: 4546; WAN024A9I_at; Start 11; Stop 35
cctctgtaaactttataaatcctag

SEQ ID NO: 47196 - DNA, 25 bp, Artificial
  probe
  misc_feature (1)..(25): SEQ ID NO: 4546; WAN024A9I_at; Start 30; Stop 54
tcctagttatatttaccttacatat

SEQ ID NO: 47197 - DNA, 25 bp, Artificial
  probe
  misc_feature (1)..(25): SEQ ID NO: 4546; WAN024A9I_at; Start 28; Stop 52
aatcctagttatatttaccttacat

SEQ ID NO: 47198 - DNA, 25 bp, Artificial
  probe
  misc_feature (1)..(25): SEQ ID NO: 4546; WAN024A9I_at; Start 2; Stop 26
atagaccgtcctctgtaaactttat

SEQ ID NO: 47199 - DNA, 25 bp, Artificial
  probe
  misc_feature (1)..(25): SEQ ID NO: 3495; WAN024A9J_at; Start 1; Stop 25
cttctcttccttactcttgaagtca

SEQ ID NO: 47200 - DNA, 25 bp, Artificial
  probe
  misc_feature (1)..(25): SEQ ID NO: 3495; WAN024A9J_at; Start 31; Stop 55
tctattatatcagaaatcagggaaa

SEQ ID NO: 47201 - DNA, 25 bp, Artificial
  probe
  misc_feature (1)..(25): SEQ ID NO: 3495; WAN024A9J_at; Start 63; Stop 87
ctttacggggagtagcaaaatatag

SEQ ID NO: 47202 - DNA, 25 bp, Artificial
  probe
  misc_feature (1)..(25): SEQ ID NO: 3495; WAN024A9J_at; Start 93; Stop 117
tgaaactagaatactacactgtggg

SEQ ID NO: 47203 - DNA, 25 bp, Artificial
  probe
  misc_feature (1)..(25): SEQ ID NO: 3495; WAN024A9J_at; Start 97; Stop 121
actagaatactacactgtgggtttc

SEQ ID NO: 47204 - DNA, 25 bp, Artificial
  probe
  misc_feature (1)..(25): SEQ ID NO: 3495; WAN024A9J_at; Start 94; Stop 118
gaaactagaatactacactgtgggt

SEQ ID NO: 47205 - DNA, 25 bp, Artificial
  probe
  misc_feature (1)..(25): SEQ ID NO: 3495; WAN024A9J_at; Start 72; Stop 96
gagtagcaaaatatagtggattgaa

SEQ ID NO: 47206 - DNA, 25 bp, Artificial
  probe
  misc_feature (1)..(25): SEQ ID NO: 3495; WAN024A9J_at; Start 151; Stop 175
tcataaactagctcaatacctcaat

SEQ ID NO: 47207 - DNA, 25 bp, Artificial
  probe
  misc_feature (1)..(25): SEQ ID NO: 3495; WAN024A9J_at; Start 156; Stop 180
aactagctcaatacctcaatagact

SEQ ID NO: 47208 - DNA, 25 bp, Artificial
  probe
  misc_feature (1)..(25): SEQ ID NO: 3495; WAN024A9J_at; Start 9; Stop 33
ccttactcttgaagtcaatatttct

SEQ ID NO: 47209 - DNA, 25 bp, Artificial
  probe
  misc_feature (1)..(25): SEQ ID NO: 3495; WAN024A9J_at; Start 19; Stop 43
gaagtcaatatttctattatatcag

SEQ ID NO: 47210 - DNA, 25 bp, Artificial
  probe
  misc_feature (1)..(25): SEQ ID NO: 3495; WAN024A9J_at; Start 96; Stop 120
aactagaatactacactgtgggttt

SEQ ID NO: 47211 - DNA, 25 bp, Artificial
  probe
  misc_feature (1)..(25): SEQ ID NO: 3495; WAN024A9J_at; Start 111; Stop 135
ctgtgggtttctaaaacactcgact

SEQ ID NO: 47212 - DNA, 25 bp, Artificial
  probe
  misc_feature (1)..(25): SEQ ID NO: 3495; WAN024A9J_at; Start 107; Stop 131
tacactgtgggtttctaaaacactc

SEQ ID NO: 47213 - DNA, 25 bp, Artificial
  probe
  misc_feature (1)..(25): SEQ ID NO: 3495; WAN024A9J_at; Start 101; Stop 125
gaatactacactgtgggtttctaaa

SEQ ID NO: 47214 - DNA, 25 bp, Artificial
  probe
  misc_feature (1)..(25): SEQ ID NO: 3495; WAN024A9J_at; Start 70; Stop 94
gggagtagcaaaatatagtggattg

SEQ ID NO: 47215 - DNA, 25 bp, Artificial
  probe
  misc_feature (1)..(25): SEQ ID NO: 3495; WAN024A9J_at; Start 41; Stop 65
cagaaatcagggaaaatagaaactt

SEQ ID NO: 47216 - DNA, 25 bp, Artificial
  probe
  misc_feature (1)..(25): SEQ ID NO: 3495; WAN024A9J_at; Start 40; Stop 64
tcagaaatcagggaaaatagaaact

SEQ ID NO: 47217 - DNA, 25 bp, Artificial
  probe
  misc_feature (1)..(25): SEQ ID NO: 3495; WAN024A9J_at; Start 159; Stop 183
tagctcaatacctcaatagacttcc

SEQ ID NO: 47218 - DNA, 25 bp, Artificial
  probe
  misc_feature (1)..(25): SEQ ID NO: 3495; WAN024A9J_at; Start 146; Stop 170
ttttttcataaactagctcaatacc

SEQ ID NO: 47219 - DNA, 25 bp, Artificial
  probe
  misc_feature (1)..(25): SEQ ID NO: 3495; WAN024A9J_at; Start 36; Stop 60
tatatcagaaatcagggaaaataga

SEQ ID NO: 47220 - DNA, 25 bp, Artificial
  probe
  misc_feature (1)..(25): SEQ ID NO: 3495; WAN024A9J_at; Start 149; Stop 173
tttcataaactagctcaatacctca

SEQ ID NO: 47221 - DNA, 25 bp, Artificial
  probe
  misc_feature (1)..(25): SEQ ID NO: 3495; WAN024A9J_at; Start 108; Stop 132
acactgtgggtttctaaaacactcg

SEQ ID NO: 47222 - DNA, 25 bp, Artificial
  probe
  misc_feature (1)..(25): SEQ ID NO: 3495; WAN024A9J_at; Start 32; Stop 56
ctattatatcagaaatcagggaaaa

SEQ ID NO: 47223 - DNA, 25 bp, Artificial
  probe
  misc_feature (1)..(25): SEQ ID NO: 3495; WAN024A9J_at; Start 98; Stop 122
ctagaatactacactgtgggtttct

SEQ ID NO: 47224 - DNA, 25 bp, Artificial
  probe
  misc_feature (1)..(25): SEQ ID NO: 3495; WAN024A9J_at; Start 161; Stop 185
gctcaatacctcaatagacttcctg

SEQ ID NO: 47225 - DNA, 25 bp, Artificial
  probe
  misc_feature (1)..(25): SEQ ID NO: 3495; WAN024A9J_at; Start 92; Stop 116
ttgaaactagaatactacactgtgg

SEQ ID NO: 47226 - DNA, 25 bp, Artificial
  probe
  misc_feature (1)..(25): SEQ ID NO: 3495; WAN024A9J_at; Start 142; Stop 166
ccaattttttcataaactagctcaa

SEQ ID NO: 47227 - DNA, 25 bp, Artificial
  probe
  misc_feature (1)..(25): SEQ ID NO: 3495; WAN024A9J_at; Start 5; Stop 29
tcttccttactcttgaagtcaatat

SEQ ID NO: 47228 - DNA, 25 bp, Artificial
  probe
  misc_feature (1)..(25): SEQ ID NO: 3495; WAN024A9J_at; Start 138; Stop 162
tcacccaattttttcataaactagc

SEQ ID NO: 47229 - DNA, 25 bp, Artificial
  probe
  misc_feature (1)..(25): SEQ ID NO: 3495; WAN024A9J_at; Start 109; Stop 133
cactgtgggtttctaaaacactcga

SEQ ID NO: 47230 - DNA, 25 bp, Artificial
  probe
  misc_feature (1)..(25): SEQ ID NO: 3495; WAN024A9J_at; Start 120; Stop 144
tctaaaacactcgacttttcaccca

SEQ ID NO: 47231 - DNA, 25 bp, Artificial
  probe
  misc_feature (1)..(25): SEQ ID NO: 3495; WAN024A9J_at; Start 75; Stop 99
tagcaaaatatagtggattgaaact

SEQ ID NO: 47232 - DNA, 25 bp, Artificial
  probe
  misc_feature (1)..(25): SEQ ID NO: 3495; WAN024A9J_at; Start 154; Stop 178
taaactagctcaatacctcaataga

SEQ ID NO: 47233 - DNA, 25 bp, Artificial
  probe
  misc_feature (1)..(25): SEQ ID NO: 5945; WAN024A9K_at; Start 135; Stop 159
ttttccctgatttctgatataatag

SEQ ID NO: 47234 - DNA, 25 bp, Artificial
  probe
  misc_feature (1)..(25): SEQ ID NO: 5945; WAN024A9K_at; Start 13; Stop 37
tctattgaggtattgagctagttta

SEQ ID NO: 47235 - DNA, 25 bp, Artificial
  probe
  misc_feature (1)..(25): SEQ ID NO: 5945; WAN024A9K_at; Start 163; Stop 187
tattgacttcaagagtaaggaagag

SEQ ID NO: 47236 - DNA, 25 bp, Artificial
  probe
  misc_feature (1)..(25): SEQ ID NO: 5945; WAN024A9K_at; Start 159; Stop 183
gaaatattgacttcaagagtaagga

SEQ ID NO: 47237 - DNA, 25 bp, Artificial
  probe
  misc_feature (1)..(25): SEQ ID NO: 5945; WAN024A9K_at; Start 60; Stop 84
gagtgttttagaaacccacagtgta

SEQ ID NO: 47238 - DNA, 25 bp, Artificial
  probe
  misc_feature (1)..(25): SEQ ID NO: 5945; WAN024A9K_at; Start 96; Stop 120
tcaatccactatattttgctactcc

SEQ ID NO: 47239 - DNA, 25 bp, Artificial
  probe
  misc_feature (1)..(25): SEQ ID NO: 5945; WAN024A9K_at; Start 100; Stop 124
tccactatattttgctactccccgt

SEQ ID NO: 47240 - DNA, 25 bp, Artificial
  probe
  misc_feature (1)..(25): SEQ ID NO: 5945; WAN024A9K_at; Start 59; Stop 83
cgagtgttttagaaacccacagtgt

SEQ ID NO: 47241 - DNA, 25 bp, Artificial
  probe
  misc_feature (1)..(25): SEQ ID NO: 5945; WAN024A9K_at; Start 126; Stop 150
aagtttctattttccctgatttctg

SEQ ID NO: 47242 - DNA, 25 bp, Artificial
  probe
  misc_feature (1)..(25): SEQ ID NO: 5945; WAN024A9K_at; Start 127; Stop 151
agtttctattttccctgatttctga

SEQ ID NO: 47243 - DNA, 25 bp, Artificial
  probe
  misc_feature (1)..(25): SEQ ID NO: 5945; WAN024A9K_at; Start 71; Stop 95
aaacccacagtgtagtattctagtt

SEQ ID NO: 47244 - DNA, 25 bp, Artificial
  probe
  misc_feature (1)..(25): SEQ ID NO: 5945; WAN024A9K_at; Start 154; Stop 178
taatagaaatattgacttcaagagt

SEQ ID NO: 47245 - DNA, 25 bp, Artificial
  probe
  misc_feature (1)..(25): SEQ ID NO: 5945; WAN024A9K_at; Start 75; Stop 99
ccacagtgtagtattctagtttcaa

SEQ ID NO: 47246 - DNA, 25 bp, Artificial
  probe
  misc_feature (1)..(25): SEQ ID NO: 5945; WAN024A9K_at; Start 56; Stop 80
agtcgagtgttttagaaacccacag

SEQ ID NO: 47247 - DNA, 25 bp, Artificial
  probe
  misc_feature (1)..(25): SEQ ID NO: 5945; WAN024A9K_at; Start 166; Stop 190
tgacttcaagagtaaggaagagaag

SEQ ID NO: 47248 - DNA, 25 bp, Artificial
  probe
  misc_feature (1)..(25): SEQ ID NO: 5945; WAN024A9K_at; Start 70; Stop 94
gaaacccacagtgtagtattctagt

SEQ ID NO: 47249 - DNA, 25 bp, Artificial
  probe
  misc_feature (1)..(25): SEQ ID NO: 5945; WAN024A9K_at; Start 74; Stop 98
cccacagtgtagtattctagtttca

SEQ ID NO: 47250 - DNA, 25 bp, Artificial
  probe
  misc_feature (1)..(25): SEQ ID NO: 5945; WAN024A9K_at; Start 104; Stop 128
ctatattttgctactccccgtaaag

SEQ ID NO: 47251 - DNA, 25 bp, Artificial
  probe
  misc_feature (1)..(25): SEQ ID NO: 5945; WAN024A9K_at; Start 132; Stop 156
ctattttccctgatttctgatataa

SEQ ID NO: 47252 - DNA, 25 bp, Artificial
  probe
  misc_feature (1)..(25): SEQ ID NO: 5945; WAN024A9K_at; Start 21; Stop 45
ggtattgagctagtttatgaaaaaa

SEQ ID NO: 47253 - DNA, 25 bp, Artificial
  probe
  misc_feature (1)..(25): SEQ ID NO: 5945; WAN024A9K_at; Start 66; Stop 90
tttagaaacccacagtgtagtattc

SEQ ID NO: 47254 - DNA, 25 bp, Artificial
  probe
  misc_feature (1)..(25): SEQ ID NO: 5945; WAN024A9K_at; Start 102; Stop 126
cactatattttgctactccccgtaa

SEQ ID NO: 47255 - DNA, 25 bp, Artificial
  probe
  misc_feature (1)..(25): SEQ ID NO: 5945; WAN024A9K_at; Start 26; Stop 50
tgagctagtttatgaaaaaattggg

SEQ ID NO: 47256 - DNA, 25 bp, Artificial
  probe
  misc_feature (1)..(25): SEQ ID NO: 5945; WAN024A9K_at; Start 29; Stop 53
gctagtttatgaaaaaattgggtga

SEQ ID NO: 47257 - DNA, 25 bp, Artificial
  probe
  misc_feature (1)..(25): SEQ ID NO: 5945; WAN024A9K_at; Start 76; Stop 100
cacagtgtagtattctagtttcaat

SEQ ID NO: 47258 - DNA, 25 bp, Artificial
  probe
  misc_feature (1)..(25): SEQ ID NO: 5945; WAN024A9K_at; Start 18; Stop 42
tgaggtattgagctagtttatgaaa

SEQ ID NO: 47259 - DNA, 25 bp, Artificial
  probe
  misc_feature (1)..(25): SEQ ID NO: 5945; WAN024A9K_at; Start 61; Stop 85
agtgttttagaaacccacagtgtag

SEQ ID NO: 47260 - DNA, 25 bp, Artificial
  probe
  misc_feature (1)..(25): SEQ ID NO: 5945; WAN024A9K_at; Start 9; Stop 33
gaagtctattgaggtattgagctag

SEQ ID NO: 47261 - DNA, 25 bp, Artificial
  probe
  misc_feature (1)..(25): SEQ ID NO: 5945; WAN024A9K_at; Start 58; Stop 82
tcgagtgttttagaaacccacagtg

SEQ ID NO: 47262 - DNA, 25 bp, Artificial
  probe
  misc_feature (1)..(25): SEQ ID NO: 5945; WAN024A9K_at; Start 92; Stop 116
agtttcaatccactatattttgcta

SEQ ID NO: 47263 - DNA, 25 bp, Artificial
  probe
  misc_feature (1)..(25): SEQ ID NO: 5945; WAN024A9K_at; Start 11; Stop 35
agtctattgaggtattgagctagtt

SEQ ID NO: 47264 - DNA, 25 bp, Artificial
  probe
  misc_feature (1)..(25): SEQ ID NO: 5945; WAN024A9K_at; Start 138; Stop 162
tccctgatttctgatataatagaaa

SEQ ID NO: 47265 - DNA, 25 bp, Artificial
  probe
  misc_feature (1)..(25): SEQ ID NO: 5945; WAN024A9K_at; Start 8; Stop 32
ggaagtctattgaggtattgagcta

SEQ ID NO: 47266 - DNA, 25 bp, Artificial
  probe
  misc_feature (1)..(25): SEQ ID NO: 5945; WAN024A9K_at; Start 6; Stop 30
caggaagtctattgaggtattgagc

SEQ ID NO: 47267 - DNA, 25 bp, Artificial
  probe
  misc_feature (1)..(25): SEQ ID NO: 2054; WAN024A9L_at; Start 12; Stop 36
tatgaaaagatctactggatttttt

SEQ ID NO: 47268 - DNA, 25 bp, Artificial
  probe
  misc_feature (1)..(25): SEQ ID NO: 2054; WAN024A9L_at; Start 9; Stop 33
tattatgaaaagatctactggattt

SEQ ID NO: 47269 - DNA, 25 bp, Artificial
  probe
  misc_feature (1)..(25): SEQ ID NO: 2054; WAN024A9L_at; Start 5; Stop 29
gttttattatgaaaagatctactgg

SEQ ID NO: 47270 - DNA, 25 bp, Artificial
  probe
  misc_feature (1)..(25): SEQ ID NO: 2054; WAN024A9L_at; Start 36; Stop 60
tatcaaaataaacttccagtagtct

SEQ ID NO: 47271 - DNA, 25 bp, Artificial
  probe
  misc_feature (1)..(25): SEQ ID NO: 2054; WAN024A9L_at; Start 35; Stop 59
ttatcaaaataaacttccagtagtc

SEQ ID NO: 47272 - DNA, 25 bp, Artificial
  probe
  misc_feature (1)..(25): SEQ ID NO: 2054; WAN024A9L_at; Start 10; Stop 34
attatgaaaagatctactggatttt

SEQ ID NO: 47273 - DNA, 25 bp, Artificial
  probe
  misc_feature (1)..(25): SEQ ID NO: 2054; WAN024A9L_at; Start 43; Stop 67
ataaacttccagtagtcttttcact

SEQ ID NO: 47274 - DNA, 25 bp, Artificial
  probe
  misc_feature (1)..(25): SEQ ID NO: 2054; WAN024A9L_at; Start 8; Stop 32
ttattatgaaaagatctactggatt

SEQ ID NO: 47275 - DNA, 25 bp, Artificial
  probe
  misc_feature (1)..(25): SEQ ID NO: 2054; WAN024A9L_at; Start 6; Stop 30
ttttattatgaaaagatctactgga

SEQ ID NO: 47276 - DNA, 25 bp, Artificial
  probe
  misc_feature (1)..(25): SEQ ID NO: 2054; WAN024A9L_at; Start 7; Stop 31
tttattatgaaaagatctactggat

SEQ ID NO: 47277 - DNA, 25 bp, Artificial
  probe
  misc_feature (1)..(25): SEQ ID NO: 2054; WAN024A9L_at; Start 15; Stop 39
gaaaagatctactggattttttatc

SEQ ID NO: 47278 - DNA, 25 bp, Artificial
  probe
  misc_feature (1)..(25): SEQ ID NO: 2054; WAN024A9L_at; Start 16; Stop 40
aaaagatctactggattttttatca

SEQ ID NO: 47279 - DNA, 25 bp, Artificial
  probe
  misc_feature (1)..(25): SEQ ID NO: 2054; WAN024A9L_at; Start 13; Stop 37
atgaaaagatctactggatttttta

SEQ ID NO: 47280 - DNA, 25 bp, Artificial
  probe
  misc_feature (1)..(25): SEQ ID NO: 2054; WAN024A9L_at; Start 14; Stop 38
tgaaaagatctactggattttttat

SEQ ID NO: 47281 - DNA, 25 bp, Artificial
  probe
  misc_feature (1)..(25): SEQ ID NO: 2054; WAN024A9L_at; Start 4; Stop 28
cgttttattatgaaaagatctactg

SEQ ID NO: 47282 - DNA, 25 bp, Artificial
  probe
  misc_feature (1)..(25): SEQ ID NO: 2054; WAN024A9L_at; Start 11; Stop 35
ttatgaaaagatctactggattttt

SEQ ID NO: 47283 - DNA, 25 bp, Artificial
  probe
  misc_feature (1)..(25): SEQ ID NO: 2054; WAN024A9L_at; Start 37; Stop 61
atcaaaataaacttccagtagtctt

SEQ ID NO: 47284 - DNA, 25 bp, Artificial
  probe
  misc_feature (1)..(25): SEQ ID NO: 4398; WAN024A9M_at; Start 14; Stop 38
gactactggaagtttattttgataa

SEQ ID NO: 47285 - DNA, 25 bp, Artificial
  probe
  misc_feature (1)..(25): SEQ ID NO: 4398; WAN024A9M_at; Start 42; Stop 66
atccagtagatcttttcataataaa

SEQ ID NO: 47286 - DNA, 25 bp, Artificial
  probe
  misc_feature (1)..(25): SEQ ID NO: 4398; WAN024A9M_at; Start 40; Stop 64
aaatccagtagatcttttcataata

SEQ ID NO: 47287 - DNA, 25 bp, Artificial
  probe
  misc_feature (1)..(25): SEQ ID NO: 4398; WAN024A9M_at; Start 6; Stop 30
agtgaaaagactactggaagtttat

SEQ ID NO: 47288 - DNA, 25 bp, Artificial
  probe
  misc_feature (1)..(25): SEQ ID NO: 4398; WAN024A9M_at; Start 34; Stop 58
gataaaaaatccagtagatcttttc

SEQ ID NO: 47289 - DNA, 25 bp, Artificial
  probe
  misc_feature (1)..(25): SEQ ID NO: 4398; WAN024A9M_at; Start 45; Stop 69
cagtagatcttttcataataaaacg

SEQ ID NO: 47290 - DNA, 25 bp, Artificial
  probe
  misc_feature (1)..(25): SEQ ID NO: 4398; WAN024A9M_at; Start 33; Stop 57
tgataaaaaatccagtagatctttt

SEQ ID NO: 47291 - DNA, 25 bp, Artificial
  probe
  misc_feature (1)..(25): SEQ ID NO: 4398; WAN024A9M_at; Start 44; Stop 68
ccagtagatcttttcataataaaac

SEQ ID NO: 47292 - DNA, 25 bp, Artificial
  probe
  misc_feature (1)..(25): SEQ ID NO: 4398; WAN024A9M_at; Start 36; Stop 60
taaaaaatccagtagatcttttcat

SEQ ID NO: 47293 - DNA, 25 bp, Artificial
  probe
  misc_feature (1)..(25): SEQ ID NO: 4398; WAN024A9M_at; Start 35; Stop 59
ataaaaaatccagtagatcttttca

SEQ ID NO: 47294 - DNA, 25 bp, Artificial
  probe
  misc_feature (1)..(25): SEQ ID NO: 4398; WAN024A9M_at; Start 13; Stop 37
agactactggaagtttattttgata

SEQ ID NO: 47295 - DNA, 25 bp, Artificial
  probe
  misc_feature (1)..(25): SEQ ID NO: 4398; WAN024A9M_at; Start 37; Stop 61
aaaaaatccagtagatcttttcata

SEQ ID NO: 47296 - DNA, 25 bp, Artificial
  probe
  misc_feature (1)..(25): SEQ ID NO: 4398; WAN024A9M_at; Start 38; Stop 62
aaaaatccagtagatcttttcataa

SEQ ID NO: 47297 - DNA, 25 bp, Artificial
  probe
  misc_feature (1)..(25): SEQ ID NO: 4398; WAN024A9M_at; Start 41; Stop 65
aatccagtagatcttttcataataa

SEQ ID NO: 47298 - DNA, 25 bp, Artificial
  probe
  misc_feature (1)..(25): SEQ ID NO: 4398; WAN024A9M_at; Start 39; Stop 63
aaaatccagtagatcttttcataat

SEQ ID NO: 47299 - DNA, 25 bp, Artificial
  probe
  misc_feature (1)..(25): SEQ ID NO: 4398; WAN024A9M_at; Start 43; Stop 67
tccagtagatcttttcataataaaa

SEQ ID NO: 47300 - DNA, 25 bp, Artificial
  probe
  misc_feature (1)..(25): SEQ ID NO: 4398; WAN024A9M_at; Start 12; Stop 36
aagactactggaagtttattttgat

SEQ ID NO: 47301 - DNA, 25 bp, Artificial
  probe
  misc_feature (1)..(25): SEQ ID NO: 4663; WAN024A9N_at; Start 89; Stop 113
gctgttcaactaaattttagcaaga

SEQ ID NO: 47302 - DNA, 25 bp, Artificial
  probe
  misc_feature (1)..(25): SEQ ID NO: 4663; WAN024A9N_at; Start 143; Stop 167
gcgttttatacataccgtcctatca

SEQ ID NO: 47303 - DNA, 25 bp, Artificial
  probe
  misc_feature (1)..(25): SEQ ID NO: 4663; WAN024A9N_at; Start 57; Stop 81
gactagatctcttatctaagtatcg

SEQ ID NO: 47304 - DNA, 25 bp, Artificial
  probe
  misc_feature (1)..(25): SEQ ID NO: 4663; WAN024A9N_at; Start 85; Stop 109
tacggctgttcaactaaattttagc

SEQ ID NO: 47305 - DNA, 25 bp, Artificial
  probe
  misc_feature (1)..(25): SEQ ID NO: 4663; WAN024A9N_at; Start 71; Stop 95
tctaagtatcggaatacggctgttc

SEQ ID NO: 47306 - DNA, 25 bp, Artificial
  probe
  misc_feature (1)..(25): SEQ ID NO: 4663; WAN024A9N_at; Start 78; Stop 102
atcggaatacggctgttcaactaaa

SEQ ID NO: 47307 - DNA, 25 bp, Artificial
  probe
  misc_feature (1)..(25): SEQ ID NO: 4663; WAN024A9N_at; Start 75; Stop 99
agtatcggaatacggctgttcaact

SEQ ID NO: 47308 - DNA, 25 bp, Artificial
  probe
  misc_feature (1)..(25): SEQ ID NO: 4663; WAN024A9N_at; Start 80; Stop 104
cggaatacggctgttcaactaaatt

SEQ ID NO: 47309 - DNA, 25 bp, Artificial
  probe
  misc_feature (1)..(25): SEQ ID NO: 4663; WAN024A9N_at; Start 145; Stop 169
gttttatacataccgtcctatcaga

SEQ ID NO: 47310 - DNA, 25 bp, Artificial
  probe
  misc_feature (1)..(25): SEQ ID NO: 4663; WAN024A9N_at; Start 95; Stop 119
caactaaattttagcaagaacttct

SEQ ID NO: 47311 - DNA, 25 bp, Artificial
  probe
  misc_feature (1)..(25): SEQ ID NO: 4663; WAN024A9N_at; Start 73; Stop 97
taagtatcggaatacggctgttcaa

SEQ ID NO: 47312 - DNA, 25 bp, Artificial
  probe
  misc_feature (1)..(25): SEQ ID NO: 4663; WAN024A9N_at; Start 3; Stop 27
tttctcgaatcgctattgccccttt

SEQ ID NO: 47313 - DNA, 25 bp, Artificial
  probe
  misc_feature (1)..(25): SEQ ID NO: 4663; WAN024A9N_at; Start 149; Stop 173
tatacataccgtcctatcagacaat

SEQ ID NO: 47314 - DNA, 25 bp, Artificial
  probe
  misc_feature (1)..(25): SEQ ID NO: 4663; WAN024A9N_at; Start 5; Stop 29
tctcgaatcgctattgccccttttt

SEQ ID NO: 47315 - DNA, 25 bp, Artificial
  probe
  misc_feature (1)..(25): SEQ ID NO: 4663; WAN024A9N_at; Start 129; Stop 153
ctcagttcacagaagcgttttatac

SEQ ID NO: 47316 - DNA, 25 bp, Artificial
  probe
  misc_feature (1)..(25): SEQ ID NO: 4663; WAN024A9N_at; Start 60; Stop 84
tagatctcttatctaagtatcggaa

SEQ ID NO: 47317 - DNA, 25 bp, Artificial
  probe
  misc_feature (1)..(25): SEQ ID NO: 4663; WAN024A9N_at; Start 7; Stop 31
tcgaatcgctattgcccctttttta

SEQ ID NO: 47318 - DNA, 25 bp, Artificial
  probe
  misc_feature (1)..(25): SEQ ID NO: 4663; WAN024A9N_at; Start 152; Stop 176
acataccgtcctatcagacaatcta

SEQ ID NO: 47319 - DNA, 25 bp, Artificial
  probe
  misc_feature (1)..(25): SEQ ID NO: 4663; WAN024A9N_at; Start 87; Stop 111
cggctgttcaactaaattttagcaa

SEQ ID NO: 47320 - DNA, 25 bp, Artificial
  probe
  misc_feature (1)..(25): SEQ ID NO: 4663; WAN024A9N_at; Start 9; Stop 33
gaatcgctattgccccttttttatc

SEQ ID NO: 47321 - DNA, 25 bp, Artificial
  probe
  misc_feature (1)..(25): SEQ ID NO: 4663; WAN024A9N_at; Start 140; Stop 164
gaagcgttttatacataccgtccta

SEQ ID NO: 47322 - DNA, 25 bp, Artificial
  probe
  misc_feature (1)..(25): SEQ ID NO: 4663; WAN024A9N_at; Start 66; Stop 90
tcttatctaagtatcggaatacggc

SEQ ID NO: 47323 - DNA, 25 bp, Artificial
  probe
  misc_feature (1)..(25): SEQ ID NO: 4663; WAN024A9N_at; Start 136; Stop 160
cacagaagcgttttatacataccgt

SEQ ID NO: 47324 - DNA, 25 bp, Artificial
  probe
  misc_feature (1)..(25): SEQ ID NO: 4663; WAN024A9N_at; Start 138; Stop 162
cagaagcgttttatacataccgtcc

SEQ ID NO: 47325 - DNA, 25 bp, Artificial
  probe
  misc_feature (1)..(25): SEQ ID NO: 4663; WAN024A9N_at; Start 1; Stop 25
tctttctcgaatcgctattgcccct

SEQ ID NO: 47326 - DNA, 25 bp, Artificial
  probe
  misc_feature (1)..(25): SEQ ID NO: 4663; WAN024A9N_at; Start 127; Stop 151
ctctcagttcacagaagcgttttat

SEQ ID NO: 47327 - DNA, 25 bp, Artificial
  probe
  misc_feature (1)..(25): SEQ ID NO: 4663; WAN024A9N_at; Start 151; Stop 175
tacataccgtcctatcagacaatct

SEQ ID NO: 47328 - DNA, 25 bp, Artificial
  probe
  misc_feature (1)..(25): SEQ ID NO: 4663; WAN024A9N_at; Start 135; Stop 159
tcacagaagcgttttatacataccg

SEQ ID NO: 47329 - DNA, 25 bp, Artificial
  probe
  misc_feature (1)..(25): SEQ ID NO: 4663; WAN024A9N_at; Start 79; Stop 103
tcggaatacggctgttcaactaaat

SEQ ID NO: 47330 - DNA, 25 bp, Artificial
  probe
  misc_feature (1)..(25): SEQ ID NO: 4663; WAN024A9N_at; Start 64; Stop 88
tctcttatctaagtatcggaatacg

SEQ ID NO: 47331 - DNA, 25 bp, Artificial
  probe
  misc_feature (1)..(25): SEQ ID NO: 4663; WAN024A9N_at; Start 131; Stop 155
cagttcacagaagcgttttatacat

SEQ ID NO: 47332 - DNA, 25 bp, Artificial
  probe
  misc_feature (1)..(25): SEQ ID NO: 4663; WAN024A9N_at; Start 125; Stop 149
ttctctcagttcacagaagcgtttt

SEQ ID NO: 47333 - DNA, 25 bp, Artificial
  probe
  misc_feature (1)..(25): SEQ ID NO: 4663; WAN024A9N_at; Start 122; Stop 146
cccttctctcagttcacagaagcgt

SEQ ID NO: 47334 - DNA, 25 bp, Artificial
  probe
  misc_feature (1)..(25): SEQ ID NO: 4663; WAN024A9N_at; Start 68; Stop 92
ttatctaagtatcggaatacggctg

SEQ ID NO: 47335 - DNA, 25 bp, Artificial
  probe
  misc_feature (1)..(25): SEQ ID NO: 4503; WAN024A9O_at; Start 146; Stop 170
aaaaaaggggcaatagcgattcgag

SEQ ID NO: 47336 - DNA, 25 bp, Artificial
  probe
  misc_feature (1)..(25): SEQ ID NO: 4503; WAN024A9O_at; Start 8; Stop 32
tctgataggacggtatgtataaaac

SEQ ID NO: 47337 - DNA, 25 bp, Artificial
  probe
  misc_feature (1)..(25): SEQ ID NO: 4503; WAN024A9O_at; Start 77; Stop 101
agttgaacagccgtattccgatact

SEQ ID NO: 47338 - DNA, 25 bp, Artificial
  probe
  misc_feature (1)..(25): SEQ ID NO: 4503; WAN024A9O_at; Start 27; Stop 51
taaaacgcttctgtgaactgagaga

SEQ ID NO: 47339 - DNA, 25 bp, Artificial
  probe
  misc_feature (1)..(25): SEQ ID NO: 4503; WAN024A9O_at; Start 72; Stop 96
aatttagttgaacagccgtattccg

SEQ ID NO: 47340 - DNA, 25 bp, Artificial
  probe
  misc_feature (1)..(25): SEQ ID NO: 4503; WAN024A9O_at; Start 93; Stop 117
tccgatacttagataagagatctag

SEQ ID NO: 47341 - DNA, 25 bp, Artificial
  probe
  misc_feature (1)..(25): SEQ ID NO: 4503; WAN024A9O_at; Start 79; Stop 103
ttgaacagccgtattccgatactta

SEQ ID NO: 47342 - DNA, 25 bp, Artificial
  probe
  misc_feature (1)..(25): SEQ ID NO: 4503; WAN024A9O_at; Start 151; Stop 175
aggggcaatagcgattcgagaaaga

SEQ ID NO: 47343 - DNA, 25 bp, Artificial
  probe
  misc_feature (1)..(25): SEQ ID NO: 4503; WAN024A9O_at; Start 3; Stop 27
gattgtctgataggacggtatgtat

SEQ ID NO: 47344 - DNA, 25 bp, Artificial
  probe
  misc_feature (1)..(25): SEQ ID NO: 4503; WAN024A9O_at; Start 99; Stop 123
acttagataagagatctagtcttag

SEQ ID NO: 47345 - DNA, 25 bp, Artificial
  probe
  misc_feature (1)..(25): SEQ ID NO: 4503; WAN024A9O_at; Start 18; Stop 42
cggtatgtataaaacgcttctgtga

SEQ ID NO: 47346 - DNA, 25 bp, Artificial
  probe
  misc_feature (1)..(25): SEQ ID NO: 4503; WAN024A9O_at; Start 20; Stop 44
gtatgtataaaacgcttctgtgaac

SEQ ID NO: 47347 - DNA, 25 bp, Artificial
  probe
  misc_feature (1)..(25): SEQ ID NO: 4503; WAN024A9O_at; Start 88; Stop 112
cgtattccgatacttagataagaga

SEQ ID NO: 47348 - DNA, 25 bp, Artificial
  probe
  misc_feature (1)..(25): SEQ ID NO: 4503; WAN024A9O_at; Start 96; Stop 120
gatacttagataagagatctagtct

SEQ ID NO: 47349 - DNA, 25 bp, Artificial
  probe
  misc_feature (1)..(25): SEQ ID NO: 4503; WAN024A9O_at; Start 29; Stop 53
aaacgcttctgtgaactgagagaag

SEQ ID NO: 47350 - DNA, 25 bp, Artificial
  probe
  misc_feature (1)..(25): SEQ ID NO: 4503; WAN024A9O_at; Start 16; Stop 40
gacggtatgtataaaacgcttctgt

SEQ ID NO: 47351 - DNA, 25 bp, Artificial
  probe
  misc_feature (1)..(25): SEQ ID NO: 4503; WAN024A9O_at; Start 15; Stop 39
ggacggtatgtataaaacgcttctg

SEQ ID NO: 47352 - DNA, 25 bp, Artificial
  probe
  misc_feature (1)..(25): SEQ ID NO: 4503; WAN024A9O_at; Start 74; Stop 98
tttagttgaacagccgtattccgat

SEQ ID NO: 47353 - DNA, 25 bp, Artificial
  probe
  misc_feature (1)..(25): SEQ ID NO: 4503; WAN024A9O_at; Start 25; Stop 49
tataaaacgcttctgtgaactgaga

SEQ ID NO: 47354 - DNA, 25 bp, Artificial
  probe
  misc_feature (1)..(25): SEQ ID NO: 4503; WAN024A9O_at; Start 58; Stop 82
gaagttcttgctaaaatttagttga

SEQ ID NO: 47355 - DNA, 25 bp, Artificial
  probe
  misc_feature (1)..(25): SEQ ID NO: 4503; WAN024A9O_at; Start 48; Stop 72
gagaaggggagaagttcttgctaaa

SEQ ID NO: 47356 - DNA, 25 bp, Artificial
  probe
  misc_feature (1)..(25): SEQ ID NO: 4503; WAN024A9O_at; Start 86; Stop 110
gccgtattccgatacttagataaga

SEQ ID NO: 47357 - DNA, 25 bp, Artificial
  probe
  misc_feature (1)..(25): SEQ ID NO: 4503; WAN024A9O_at; Start 90; Stop 114
tattccgatacttagataagagatc

SEQ ID NO: 47358 - DNA, 25 bp, Artificial
  probe
  misc_feature (1)..(25): SEQ ID NO: 4503; WAN024A9O_at; Start 81; Stop 105
gaacagccgtattccgatacttaga

SEQ ID NO: 47359 - DNA, 25 bp, Artificial
  probe
  misc_feature (1)..(25): SEQ ID NO: 4503; WAN024A9O_at; Start 23; Stop 47
tgtataaaacgcttctgtgaactga

SEQ ID NO: 47360 - DNA, 25 bp, Artificial
  probe
  misc_feature (1)..(25): SEQ ID NO: 4503; WAN024A9O_at; Start 11; Stop 35
gataggacggtatgtataaaacgct

SEQ ID NO: 47361 - DNA, 25 bp, Artificial
  probe
  misc_feature (1)..(25): SEQ ID NO: 4503; WAN024A9O_at; Start 84; Stop 108
cagccgtattccgatacttagataa

SEQ ID NO: 47362 - DNA, 25 bp, Artificial
  probe
  misc_feature (1)..(25): SEQ ID NO: 4503; WAN024A9O_at; Start 10; Stop 34
tgataggacggtatgtataaaacgc

SEQ ID NO: 47363 - DNA, 25 bp, Artificial
  probe
  misc_feature (1)..(25): SEQ ID NO: 4503; WAN024A9O_at; Start 13; Stop 37
taggacggtatgtataaaacgcttc

SEQ ID NO: 47364 - DNA, 25 bp, Artificial
  probe
  misc_feature (1)..(25): SEQ ID NO: 4503; WAN024A9O_at; Start 31; Stop 55
acgcttctgtgaactgagagaaggg

SEQ ID NO: 47365 - DNA, 25 bp, Artificial
  probe
  misc_feature (1)..(25): SEQ ID NO: 4503; WAN024A9O_at; Start 28; Stop 52
aaaacgcttctgtgaactgagagaa

SEQ ID NO: 47366 - DNA, 25 bp, Artificial
  probe
  misc_feature (1)..(25): SEQ ID NO: 4503; WAN024A9O_at; Start 1; Stop 25
tagattgtctgataggacggtatgt

SEQ ID NO: 47367 - DNA, 25 bp, Artificial
  probe
  misc_feature (1)..(25): SEQ ID NO: 4503; WAN024A9O_at; Start 66; Stop 90
tgctaaaatttagttgaacagccgt

SEQ ID NO: 47368 - DNA, 25 bp, Artificial
  probe
  misc_feature (1)..(25): SEQ ID NO: 4503; WAN024A9O_at; Start 68; Stop 92
ctaaaatttagttgaacagccgtat

SEQ ID NO: 47369 - DNA, 25 bp, Artificial
  probe
  misc_feature (1)..(25): SEQ ID NO: 4419; WAN024A9P_at; Start 16; Stop 40
attgaattcgtactaagattttcta

SEQ ID NO: 47370 - DNA, 25 bp, Artificial
  probe
  misc_feature (1)..(25): SEQ ID NO: 4419; WAN024A9P_at; Start 17; Stop 41
ttgaattcgtactaagattttctat

SEQ ID NO: 47371 - DNA, 25 bp, Artificial
  probe
  misc_feature (1)..(25): SEQ ID NO: 4419; WAN024A9P_at; Start 23; Stop 47
tcgtactaagattttctattttcac

SEQ ID NO: 47372 - DNA, 25 bp, Artificial
  probe
  misc_feature (1)..(25): SEQ ID NO: 4419; WAN024A9P_at; Start 14; Stop 38
taattgaattcgtactaagattttc

SEQ ID NO: 47373 - DNA, 25 bp, Artificial
  probe
  misc_feature (1)..(25): SEQ ID NO: 4419; WAN024A9P_at; Start 15; Stop 39
aattgaattcgtactaagattttct

SEQ ID NO: 47374 - DNA, 25 bp, Artificial
  probe
  misc_feature (1)..(25): SEQ ID NO: 4419; WAN024A9P_at; Start 18; Stop 42
tgaattcgtactaagattttctatt

SEQ ID NO: 47375 - DNA, 25 bp, Artificial
  probe
  misc_feature (1)..(25): SEQ ID NO: 4419; WAN024A9P_at; Start 22; Stop 46
ttcgtactaagattttctattttca

SEQ ID NO: 47376 - DNA, 25 bp, Artificial
  probe
  misc_feature (1)..(25): SEQ ID NO: 427; WAN024A9Q_at; Start 35; Stop 59
agaaaatcttagtacgaattcaatt

SEQ ID NO: 47377 - DNA, 25 bp, Artificial
  probe
  misc_feature (1)..(25): SEQ ID NO: 427; WAN024A9Q_at; Start 24; Stop 48
acagtgaaaatagaaaatcttagta

SEQ ID NO: 47378 - DNA, 25 bp, Artificial
  probe
  misc_feature (1)..(25): SEQ ID NO: 427; WAN024A9Q_at; Start 19; Stop 43
aggttacagtgaaaatagaaaatct

SEQ ID NO: 47379 - DNA, 25 bp, Artificial
  probe
  misc_feature (1)..(25): SEQ ID NO: 427; WAN024A9Q_at; Start 33; Stop 57
atagaaaatcttagtacgaattcaa

SEQ ID NO: 47380 - DNA, 25 bp, Artificial
  probe
  misc_feature (1)..(25): SEQ ID NO: 427; WAN024A9Q_at; Start 34; Stop 58
tagaaaatcttagtacgaattcaat

SEQ ID NO: 47381 - DNA, 25 bp, Artificial
  probe
  misc_feature (1)..(25): SEQ ID NO: 427; WAN024A9Q_at; Start 23; Stop 47
tacagtgaaaatagaaaatcttagt

SEQ ID NO: 47382 - DNA, 25 bp, Artificial
  probe
  misc_feature (1)..(25): SEQ ID NO: 427; WAN024A9Q_at; Start 25; Stop 49
cagtgaaaatagaaaatcttagtac

SEQ ID NO: 47383 - DNA, 25 bp, Artificial
  probe
  misc_feature (1)..(25): SEQ ID NO: 427; WAN024A9Q_at; Start 26; Stop 50
agtgaaaatagaaaatcttagtacg

SEQ ID NO: 47384 - DNA, 25 bp, Artificial
  probe
  misc_feature (1)..(25): SEQ ID NO: 427; WAN024A9Q_at; Start 36; Stop 60
gaaaatcttagtacgaattcaatta

SEQ ID NO: 47385 - DNA, 25 bp, Artificial
  probe
  misc_feature (1)..(25): SEQ ID NO: 427; WAN024A9Q_at; Start 32; Stop 56
aatagaaaatcttagtacgaattca

SEQ ID NO: 47386 - DNA, 25 bp, Artificial
  probe
  misc_feature (1)..(25): SEQ ID NO: 427; WAN024A9Q_at; Start 21; Stop 45
gttacagtgaaaatagaaaatctta

SEQ ID NO: 47387 - DNA, 25 bp, Artificial
  probe
  misc_feature (1)..(25): SEQ ID NO: 427; WAN024A9Q_at; Start 28; Stop 52
tgaaaatagaaaatcttagtacgaa

SEQ ID NO: 47388 - DNA, 25 bp, Artificial
  probe
  misc_feature (1)..(25): SEQ ID NO: 427; WAN024A9Q_at; Start 22; Stop 46
ttacagtgaaaatagaaaatcttag

SEQ ID NO: 47389 - DNA, 25 bp, Artificial
  probe
  misc_feature (1)..(25): SEQ ID NO: 427; WAN024A9Q_at; Start 27; Stop 51
gtgaaaatagaaaatcttagtacga

SEQ ID NO: 47390 - DNA, 25 bp, Artificial
  probe
  misc_feature (1)..(25): SEQ ID NO: 490; WAN024A9R_at; Start 11; Stop 35
ctctagaaagatttatctttttcac

SEQ ID NO: 47391 - DNA, 25 bp, Artificial
  probe
  misc_feature (1)..(25): SEQ ID NO: 490; WAN024A9R_at; Start 7; Stop 31
tagactctagaaagatttatctttt

SEQ ID NO: 47392 - DNA, 25 bp, Artificial
  probe
  misc_feature (1)..(25): SEQ ID NO: 490; WAN024A9R_at; Start 12; Stop 36
tctagaaagatttatctttttcaca

SEQ ID NO: 47393 - DNA, 25 bp, Artificial
  probe
  misc_feature (1)..(25): SEQ ID NO: 490; WAN024A9R_at; Start 24; Stop 48
tatctttttcacacaaaccttagtc

SEQ ID NO: 47394 - DNA, 25 bp, Artificial
  probe
  misc_feature (1)..(25): SEQ ID NO: 490; WAN024A9R_at; Start 6; Stop 30
ttagactctagaaagatttatcttt

SEQ ID NO: 47395 - DNA, 25 bp, Artificial
  probe
  misc_feature (1)..(25): SEQ ID NO: 490; WAN024A9R_at; Start 5; Stop 29
tttagactctagaaagatttatctt

SEQ ID NO: 47396 - DNA, 25 bp, Artificial
  probe
  misc_feature (1)..(25): SEQ ID NO: 490; WAN024A9R_at; Start 31; Stop 55
ttcacacaaaccttagtccgaattc

SEQ ID NO: 47397 - DNA, 25 bp, Artificial
  probe
  misc_feature (1)..(25): SEQ ID NO: 490; WAN024A9R_at; Start 2; Stop 26
gtctttagactctagaaagatttat

SEQ ID NO: 47398 - DNA, 25 bp, Artificial
  probe
  misc_feature (1)..(25): SEQ ID NO: 490; WAN024A9R_at; Start 35; Stop 59
cacaaaccttagtccgaattcaatt

SEQ ID NO: 47399 - DNA, 25 bp, Artificial
  probe
  misc_feature (1)..(25): SEQ ID NO: 490; WAN024A9R_at; Start 4; Stop 28
ctttagactctagaaagatttatct

SEQ ID NO: 47400 - DNA, 25 bp, Artificial
  probe
  misc_feature (1)..(25): SEQ ID NO: 490; WAN024A9R_at; Start 33; Stop 57
cacacaaaccttagtccgaattcaa

SEQ ID NO: 47401 - DNA, 25 bp, Artificial
  probe
  misc_feature (1)..(25): SEQ ID NO: 490; WAN024A9R_at; Start 10; Stop 34
actctagaaagatttatctttttca

SEQ ID NO: 47402 - DNA, 25 bp, Artificial
  probe
  misc_feature (1)..(25): SEQ ID NO: 490; WAN024A9R_at; Start 32; Stop 56
tcacacaaaccttagtccgaattca

SEQ ID NO: 47403 - DNA, 25 bp, Artificial
  probe
  misc_feature (1)..(25): SEQ ID NO: 490; WAN024A9R_at; Start 34; Stop 58
acacaaaccttagtccgaattcaat

SEQ ID NO: 47404 - DNA, 25 bp, Artificial
  probe
  misc_feature (1)..(25): SEQ ID NO: 490; WAN024A9R_at; Start 3; Stop 27
tctttagactctagaaagatttatc

SEQ ID NO: 47405 - DNA, 25 bp, Artificial
  probe
  misc_feature (1)..(25): SEQ ID NO: 490; WAN024A9R_at; Start 9; Stop 33
gactctagaaagatttatctttttc

SEQ ID NO: 47406 - DNA, 25 bp, Artificial
  probe
  misc_feature (1)..(25): SEQ ID NO: 490; WAN024A9R_at; Start 8; Stop 32
agactctagaaagatttatcttttt

SEQ ID NO: 47407 - DNA, 25 bp, Artificial
  probe
  misc_feature (1)..(25): SEQ ID NO: 490; WAN024A9R_at; Start 1; Stop 25
agtctttagactctagaaagattta

SEQ ID NO: 47408 - DNA, 25 bp, Artificial
  probe
  misc_feature (1)..(25): SEQ ID NO: 4240; WAN024A9S_at; Start 49; Stop 73
agataaatctttctagagtctaaag

SEQ ID NO: 47409 - DNA, 25 bp, Artificial
  probe
  misc_feature (1)..(25): SEQ ID NO: 4240; WAN024A9S_at; Start 29; Stop 53
gactaaggtttgtgtgaaaaagata

SEQ ID NO: 47410 - DNA, 25 bp, Artificial
  probe
  misc_feature (1)..(25): SEQ ID NO: 4240; WAN024A9S_at; Start 45; Stop 69
aaaaagataaatctttctagagtct

SEQ ID NO: 47411 - DNA, 25 bp, Artificial
  probe
  misc_feature (1)..(25): SEQ ID NO: 4240; WAN024A9S_at; Start 19; Stop 43
attgaattcggactaaggtttgtgt

SEQ ID NO: 47412 - DNA, 25 bp, Artificial
  probe
  misc_feature (1)..(25): SEQ ID NO: 4240; WAN024A9S_at; Start 20; Stop 44
ttgaattcggactaaggtttgtgtg

SEQ ID NO: 47413 - DNA, 25 bp, Artificial
  probe
  misc_feature (1)..(25): SEQ ID NO: 4240; WAN024A9S_at; Start 43; Stop 67
tgaaaaagataaatctttctagagt

SEQ ID NO: 47414 - DNA, 25 bp, Artificial
  probe
  misc_feature (1)..(25): SEQ ID NO: 4240; WAN024A9S_at; Start 22; Stop 46
gaattcggactaaggtttgtgtgaa

SEQ ID NO: 47415 - DNA, 25 bp, Artificial
  probe
  misc_feature (1)..(25): SEQ ID NO: 4240; WAN024A9S_at; Start 46; Stop 70
aaaagataaatctttctagagtcta

SEQ ID NO: 47416 - DNA, 25 bp, Artificial
  probe
  misc_feature (1)..(25): SEQ ID NO: 4240; WAN024A9S_at; Start 48; Stop 72
aagataaatctttctagagtctaaa

SEQ ID NO: 47417 - DNA, 25 bp, Artificial
  probe
  misc_feature (1)..(25): SEQ ID NO: 4240; WAN024A9S_at; Start 21; Stop 45
tgaattcggactaaggtttgtgtga

SEQ ID NO: 47418 - DNA, 25 bp, Artificial
  probe
  misc_feature (1)..(25): SEQ ID NO: 4240; WAN024A9S_at; Start 50; Stop 74
gataaatctttctagagtctaaaga

SEQ ID NO: 47419 - DNA, 25 bp, Artificial
  probe
  misc_feature (1)..(25): SEQ ID NO: 4240; WAN024A9S_at; Start 47; Stop 71
aaagataaatctttctagagtctaa

SEQ ID NO: 47420 - DNA, 25 bp, Artificial
  probe
  misc_feature (1)..(25): SEQ ID NO: 4240; WAN024A9S_at; Start 44; Stop 68
gaaaaagataaatctttctagagtc

SEQ ID NO: 47421 - DNA, 25 bp, Artificial
  probe
  misc_feature (1)..(25): SEQ ID NO: 4240; WAN024A9S_at; Start 52; Stop 76
taaatctttctagagtctaaagact

SEQ ID NO: 47422 - DNA, 25 bp, Artificial
  probe
  misc_feature (1)..(25): SEQ ID NO: 4240; WAN024A9S_at; Start 18; Stop 42
aattgaattcggactaaggtttgtg

SEQ ID NO: 47423 - DNA, 25 bp, Artificial
  probe
  misc_feature (1)..(25): SEQ ID NO: 4240; WAN024A9S_at; Start 51; Stop 75
ataaatctttctagagtctaaagac

SEQ ID NO: 47424 - DNA, 25 bp, Artificial
  probe
  misc_feature (1)..(25): SEQ ID NO: 4240; WAN024A9S_at; Start 42; Stop 66
gtgaaaaagataaatctttctagag

SEQ ID NO: 47425 - DNA, 25 bp, Artificial
  probe
  misc_feature (1)..(25): SEQ ID NO: 376; WAN024A9T_at; Start 39; Stop 63
atcccagtcactaaattttcttgaa

SEQ ID NO: 47426 - DNA, 25 bp, Artificial
  probe
  misc_feature (1)..(25): SEQ ID NO: 376; WAN024A9T_at; Start 30; Stop 54
ggctgggaaatcccagtcactaaat

SEQ ID NO: 47427 - DNA, 25 bp, Artificial
  probe
  misc_feature (1)..(25): SEQ ID NO: 376; WAN024A9T_at; Start 45; Stop 69
gtcactaaattttcttgaatctatt

SEQ ID NO: 47428 - DNA, 25 bp, Artificial
  probe
  misc_feature (1)..(25): SEQ ID NO: 376; WAN024A9T_at; Start 44; Stop 68
agtcactaaattttcttgaatctat

SEQ ID NO: 47429 - DNA, 25 bp, Artificial
  probe
  misc_feature (1)..(25): SEQ ID NO: 376; WAN024A9T_at; Start 28; Stop 52
agggctgggaaatcccagtcactaa

SEQ ID NO: 47430 - DNA, 25 bp, Artificial
  probe
  misc_feature (1)..(25): SEQ ID NO: 376; WAN024A9T_at; Start 40; Stop 64
tcccagtcactaaattttcttgaat

SEQ ID NO: 47431 - DNA, 25 bp, Artificial
  probe
  misc_feature (1)..(25): SEQ ID NO: 376; WAN024A9T_at; Start 32; Stop 56
ctgggaaatcccagtcactaaattt

SEQ ID NO: 47432 - DNA, 25 bp, Artificial
  probe
  misc_feature (1)..(25): SEQ ID NO: 376; WAN024A9T_at; Start 27; Stop 51
aagggctgggaaatcccagtcacta

SEQ ID NO: 47433 - DNA, 25 bp, Artificial
  probe
  misc_feature (1)..(25): SEQ ID NO: 376; WAN024A9T_at; Start 2; Stop 26
ctcattatttcttctcactttaaaa

SEQ ID NO: 47434 - DNA, 25 bp, Artificial
  probe
  misc_feature (1)..(25): SEQ ID NO: 376; WAN024A9T_at; Start 3; Stop 27
tcattatttcttctcactttaaaaa

SEQ ID NO: 47435 - DNA, 25 bp, Artificial
  probe
  misc_feature (1)..(25): SEQ ID NO: 376; WAN024A9T_at; Start 38; Stop 62
aatcccagtcactaaattttcttga

SEQ ID NO: 47436 - DNA, 25 bp, Artificial
  probe
  misc_feature (1)..(25): SEQ ID NO: 376; WAN024A9T_at; Start 29; Stop 53
gggctgggaaatcccagtcactaaa

SEQ ID NO: 47437 - DNA, 25 bp, Artificial
  probe
  misc_feature (1)..(25): SEQ ID NO: 376; WAN024A9T_at; Start 1; Stop 25
actcattatttcttctcactttaaa

SEQ ID NO: 47438 - DNA, 25 bp, Artificial
  probe
  misc_feature (1)..(25): SEQ ID NO: 376; WAN024A9T_at; Start 43; Stop 67
cagtcactaaattttcttgaatcta

SEQ ID NO: 47439 - DNA, 25 bp, Artificial
  probe
  misc_feature (1)..(25): SEQ ID NO: 376; WAN024A9T_at; Start 26; Stop 50
aaagggctgggaaatcccagtcact

SEQ ID NO: 47440 - DNA, 25 bp, Artificial
  probe
  misc_feature (1)..(25): SEQ ID NO: 376; WAN024A9T_at; Start 41; Stop 65
cccagtcactaaattttcttgaatc

SEQ ID NO: 47441 - DNA, 25 bp, Artificial
  probe
  misc_feature (1)..(25): SEQ ID NO: 376; WAN024A9T_at; Start 37; Stop 61
aaatcccagtcactaaattttcttg

SEQ ID NO: 47442 - DNA, 25 bp, Artificial
  probe
  misc_feature (1)..(25): SEQ ID NO: 376; WAN024A9T_at; Start 42; Stop 66
ccagtcactaaattttcttgaatct

SEQ ID NO: 47443 - DNA, 25 bp, Artificial
  probe
  misc_feature (1)..(25): SEQ ID NO: 376; WAN024A9T_at; Start 31; Stop 55
gctgggaaatcccagtcactaaatt

SEQ ID NO: 47444 - DNA, 25 bp, Artificial
  probe
  misc_feature (1)..(25): SEQ ID NO: 261; WAN024A9U_at; Start 6; Stop 30
attcaagaaaatttagtgactggga

SEQ ID NO: 47445 - DNA, 25 bp, Artificial
  probe
  misc_feature (1)..(25): SEQ ID NO: 261; WAN024A9U_at; Start 19; Stop 43
tagtgactgggatttcccagccctt

SEQ ID NO: 47446 - DNA, 25 bp, Artificial
  probe
  misc_feature (1)..(25): SEQ ID NO: 261; WAN024A9U_at; Start 17; Stop 41
tttagtgactgggatttcccagccc

SEQ ID NO: 47447 - DNA, 25 bp, Artificial
  probe
  misc_feature (1)..(25): SEQ ID NO: 261; WAN024A9U_at; Start 15; Stop 39
aatttagtgactgggatttcccagc

SEQ ID NO: 47448 - DNA, 25 bp, Artificial
  probe
  misc_feature (1)..(25): SEQ ID NO: 261; WAN024A9U_at; Start 18; Stop 42
ttagtgactgggatttcccagccct

SEQ ID NO: 47449 - DNA, 25 bp, Artificial
  probe
  misc_feature (1)..(25): SEQ ID NO: 261; WAN024A9U_at; Start 7; Stop 31
ttcaagaaaatttagtgactgggat

SEQ ID NO: 47450 - DNA, 25 bp, Artificial
  probe
  misc_feature (1)..(25): SEQ ID NO: 261; WAN024A9U_at; Start 1; Stop 25
aatagattcaagaaaatttagtgac

SEQ ID NO: 47451 - DNA, 25 bp, Artificial
  probe
  misc_feature (1)..(25): SEQ ID NO: 261; WAN024A9U_at; Start 45; Stop 69
tttaaagtgagaagaaataatgagt

SEQ ID NO: 47452 - DNA, 25 bp, Artificial
  probe
  misc_feature (1)..(25): SEQ ID NO: 261; WAN024A9U_at; Start 16; Stop 40
atttagtgactgggatttcccagcc

SEQ ID NO: 47453 - DNA, 25 bp, Artificial
  probe
  misc_feature (1)..(25): SEQ ID NO: 261; WAN024A9U_at; Start 5; Stop 29
gattcaagaaaatttagtgactggg

SEQ ID NO: 47454 - DNA, 25 bp, Artificial
  probe
  misc_feature (1)..(25): SEQ ID NO: 261; WAN024A9U_at; Start 4; Stop 28
agattcaagaaaatttagtgactgg

SEQ ID NO: 47455 - DNA, 25 bp, Artificial
  probe
  misc_feature (1)..(25): SEQ ID NO: 261; WAN024A9U_at; Start 3; Stop 27
tagattcaagaaaatttagtgactg

SEQ ID NO: 47456 - DNA, 25 bp, Artificial
  probe
  misc_feature (1)..(25): SEQ ID NO: 261; WAN024A9U_at; Start 8; Stop 32
tcaagaaaatttagtgactgggatt

SEQ ID NO: 47457 - DNA, 25 bp, Artificial
  probe
  misc_feature (1)..(25): SEQ ID NO: 261; WAN024A9U_at; Start 44; Stop 68
ttttaaagtgagaagaaataatgag

SEQ ID NO: 47458 - DNA, 25 bp, Artificial
  probe
  misc_feature (1)..(25): SEQ ID NO: 261; WAN024A9U_at; Start 43; Stop 67
tttttaaagtgagaagaaataatga

SEQ ID NO: 47459 - DNA, 25 bp, Artificial
  probe
  misc_feature (1)..(25): SEQ ID NO: 261; WAN024A9U_at; Start 20; Stop 44
agtgactgggatttcccagcccttt

SEQ ID NO: 47460 - DNA, 25 bp, Artificial
  probe
  misc_feature (1)..(25): SEQ ID NO: 261; WAN024A9U_at; Start 2; Stop 26
atagattcaagaaaatttagtgact

SEQ ID NO: 47461 - DNA, 25 bp, Artificial
  probe
  misc_feature (1)..(25): SEQ ID NO: 261; WAN024A9U_at; Start 9; Stop 33
caagaaaatttagtgactgggattt

SEQ ID NO: 47462 - DNA, 25 bp, Artificial
  probe
  misc_feature (1)..(25): SEQ ID NO: 261; WAN024A9U_at; Start 14; Stop 38
aaatttagtgactgggatttcccag

SEQ ID NO: 47463 - DNA, 25 bp, Artificial
  probe
  misc_feature (1)..(25): SEQ ID NO: 5954; WAN024A9V_at; Start 24; Stop 48
tattttctattatcttagcatgaat

SEQ ID NO: 47464 - DNA, 25 bp, Artificial
  probe
  misc_feature (1)..(25): SEQ ID NO: 5954; WAN024A9V_at; Start 15; Stop 39
gttacattctattttctattatctt

SEQ ID NO: 47465 - DNA, 25 bp, Artificial
  probe
  misc_feature (1)..(25): SEQ ID NO: 5954; WAN024A9V_at; Start 9; Stop 33
tccttcgttacattctattttctat

SEQ ID NO: 47466 - DNA, 25 bp, Artificial
  probe
  misc_feature (1)..(25): SEQ ID NO: 5954; WAN024A9V_at; Start 31; Stop 55
tattatcttagcatgaattgagcta

SEQ ID NO: 47467 - DNA, 25 bp, Artificial
  probe
  misc_feature (1)..(25): SEQ ID NO: 5954; WAN024A9V_at; Start 19; Stop 43
cattctattttctattatcttagca

SEQ ID NO: 47468 - DNA, 25 bp, Artificial
  probe
  misc_feature (1)..(25): SEQ ID NO: 5954; WAN024A9V_at; Start 33; Stop 57
ttatcttagcatgaattgagctagt

SEQ ID NO: 47469 - DNA, 25 bp, Artificial
  probe
  misc_feature (1)..(25): SEQ ID NO: 5954; WAN024A9V_at; Start 34; Stop 58
tatcttagcatgaattgagctagtt

SEQ ID NO: 47470 - DNA, 25 bp, Artificial
  probe
  misc_feature (1)..(25): SEQ ID NO: 5954; WAN024A9V_at; Start 7; Stop 31
tctccttcgttacattctattttct

SEQ ID NO: 47471 - DNA, 25 bp, Artificial
  probe
  misc_feature (1)..(25): SEQ ID NO: 5954; WAN024A9V_at; Start 3; Stop 27
tttctctccttcgttacattctatt

SEQ ID NO: 47472 - DNA, 25 bp, Artificial
  probe
  misc_feature (1)..(25): SEQ ID NO: 5954; WAN024A9V_at; Start 35; Stop 59
atcttagcatgaattgagctagttt

SEQ ID NO: 47473 - DNA, 25 bp, Artificial
  probe
  misc_feature (1)..(25): SEQ ID NO: 5954; WAN024A9V_at; Start 22; Stop 46
tctattttctattatcttagcatga

SEQ ID NO: 47474 - DNA, 25 bp, Artificial
  probe
  misc_feature (1)..(25): SEQ ID NO: 5954; WAN024A9V_at; Start 27; Stop 51
tttctattatcttagcatgaattga

SEQ ID NO: 47475 - DNA, 25 bp, Artificial
  probe
  misc_feature (1)..(25): SEQ ID NO: 5954; WAN024A9V_at; Start 13; Stop 37
tcgttacattctattttctattatc

SEQ ID NO: 47476 - DNA, 25 bp, Artificial
  probe
  misc_feature (1)..(25): SEQ ID NO: 5954; WAN024A9V_at; Start 30; Stop 54
ctattatcttagcatgaattgagct

SEQ ID NO: 47477 - DNA, 25 bp, Artificial
  probe
  misc_feature (1)..(25): SEQ ID NO: 5954; WAN024A9V_at; Start 18; Stop 42
acattctattttctattatcttagc

SEQ ID NO: 47478 - DNA, 25 bp, Artificial
  probe
  misc_feature (1)..(25): SEQ ID NO: 5954; WAN024A9V_at; Start 20; Stop 44
attctattttctattatcttagcat

SEQ ID NO: 47479 - DNA, 25 bp, Artificial
  probe
  misc_feature (1)..(25): SEQ ID NO: 5954; WAN024A9V_at; Start 8; Stop 32
ctccttcgttacattctattttcta

SEQ ID NO: 47480 - DNA, 25 bp, Artificial
  probe
  misc_feature (1)..(25): SEQ ID NO: 5954; WAN024A9V_at; Start 10; Stop 34
ccttcgttacattctattttctatt

SEQ ID NO: 47481 - DNA, 25 bp, Artificial
  probe
  misc_feature (1)..(25): SEQ ID NO: 5954; WAN024A9V_at; Start 17; Stop 41
tacattctattttctattatcttag

SEQ ID NO: 47482 - DNA, 25 bp, Artificial
  probe
  misc_feature (1)..(25): SEQ ID NO: 5954; WAN024A9V_at; Start 14; Stop 38
cgttacattctattttctattatct

SEQ ID NO: 47483 - DNA, 25 bp, Artificial
  probe
  misc_feature (1)..(25): SEQ ID NO: 5954; WAN024A9V_at; Start 32; Stop 56
attatcttagcatgaattgagctag

SEQ ID NO: 47484 - DNA, 25 bp, Artificial
  probe
  misc_feature (1)..(25): SEQ ID NO: 5954; WAN024A9V_at; Start 23; Stop 47
ctattttctattatcttagcatgaa

SEQ ID NO: 47485 - DNA, 25 bp, Artificial
  probe
  misc_feature (1)..(25): SEQ ID NO: 5954; WAN024A9V_at; Start 5; Stop 29
tctctccttcgttacattctatttt

SEQ ID NO: 47486 - DNA, 25 bp, Artificial
  probe
  misc_feature (1)..(25): SEQ ID NO: 5954; WAN024A9V_at; Start 4; Stop 28
ttctctccttcgttacattctattt

SEQ ID NO: 47487 - DNA, 25 bp, Artificial
  probe
  misc_feature (1)..(25): SEQ ID NO: 5954; WAN024A9V_at; Start 25; Stop 49
attttctattatcttagcatgaatt

SEQ ID NO: 47488 - DNA, 25 bp, Artificial
  probe
  misc_feature (1)..(25): SEQ ID NO: 5954; WAN024A9V_at; Start 12; Stop 36
ttcgttacattctattttctattat

SEQ ID NO: 47489 - DNA, 25 bp, Artificial
  probe
  misc_feature (1)..(25): SEQ ID NO: 5954; WAN024A9V_at; Start 21; Stop 45
ttctattttctattatcttagcatg

SEQ ID NO: 47490 - DNA, 25 bp, Artificial
  probe
  misc_feature (1)..(25): SEQ ID NO: 5954; WAN024A9V_at; Start 6; Stop 30
ctctccttcgttacattctattttc

SEQ ID NO: 47491 - DNA, 25 bp, Artificial
  probe
  misc_feature (1)..(25): SEQ ID NO: 5954; WAN024A9V_at; Start 1; Stop 25
tttttctctccttcgttacattcta

SEQ ID NO: 47492 - DNA, 25 bp, Artificial
  probe
  misc_feature (1)..(25): SEQ ID NO: 5954; WAN024A9V_at; Start 26; Stop 50
ttttctattatcttagcatgaattg

SEQ ID NO: 47493 - DNA, 25 bp, Artificial
  probe
  misc_feature (1)..(25): SEQ ID NO: 5954; WAN024A9V_at; Start 29; Stop 53
tctattatcttagcatgaattgagc

SEQ ID NO: 47494 - DNA, 25 bp, Artificial
  probe
  misc_feature (1)..(25): SEQ ID NO: 5954; WAN024A9V_at; Start 2; Stop 26
ttttctctccttcgttacattctat

SEQ ID NO: 47495 - DNA, 25 bp, Artificial
  probe
  misc_feature (1)..(25): SEQ ID NO: 5954; WAN024A9V_at; Start 11; Stop 35
cttcgttacattctattttctatta

SEQ ID NO: 47496 - DNA, 25 bp, Artificial
  probe
  misc_feature (1)..(25): SEQ ID NO: 5954; WAN024A9V_at; Start 28; Stop 52
ttctattatcttagcatgaattgag

SEQ ID NO: 47497 - DNA, 25 bp, Artificial
  probe
  misc_feature (1)..(25): SEQ ID NO: 114; WAN024A9W_at; Start 26; Stop 50
aatagaaaatagaatgtaacgaagg

SEQ ID NO: 47498 - DNA, 25 bp, Artificial
  probe
  misc_feature (1)..(25): SEQ ID NO: 114; WAN024A9W_at; Start 33; Stop 57
aatagaatgtaacgaaggagagaaa

SEQ ID NO: 47499 - DNA, 25 bp, Artificial
  probe
  misc_feature (1)..(25): SEQ ID NO: 114; WAN024A9W_at; Start 9; Stop 33
tcaattcatgctaagataatagaaa

SEQ ID NO: 47500 - DNA, 25 bp, Artificial
  probe
  misc_feature (1)..(25): SEQ ID NO: 114; WAN024A9W_at; Start 15; Stop 39
catgctaagataatagaaaatagaa

SEQ ID NO: 47501 - DNA, 25 bp, Artificial
  probe
  misc_feature (1)..(25): SEQ ID NO: 114; WAN024A9W_at; Start 4; Stop 28
ctagctcaattcatgctaagataat

SEQ ID NO: 47502 - DNA, 25 bp, Artificial
  probe
  misc_feature (1)..(25): SEQ ID NO: 114; WAN024A9W_at; Start 34; Stop 58
atagaatgtaacgaaggagagaaaa

SEQ ID NO: 47503 - DNA, 25 bp, Artificial
  probe
  misc_feature (1)..(25): SEQ ID NO: 114; WAN024A9W_at; Start 27; Stop 51
atagaaaatagaatgtaacgaagga

SEQ ID NO: 47504 - DNA, 25 bp, Artificial
  probe
  misc_feature (1)..(25): SEQ ID NO: 114; WAN024A9W_at; Start 11; Stop 35
aattcatgctaagataatagaaaat

SEQ ID NO: 47505 - DNA, 25 bp, Artificial
  probe
  misc_feature (1)..(25): SEQ ID NO: 114; WAN024A9W_at; Start 3; Stop 27
actagctcaattcatgctaagataa

SEQ ID NO: 47506 - DNA, 25 bp, Artificial
  probe
  misc_feature (1)..(25): SEQ ID NO: 114; WAN024A9W_at; Start 20; Stop 44
taagataatagaaaatagaatgtaa

SEQ ID NO: 47507 - DNA, 25 bp, Artificial
  probe
  misc_feature (1)..(25): SEQ ID NO: 114; WAN024A9W_at; Start 2; Stop 26
aactagctcaattcatgctaagata

SEQ ID NO: 47508 - DNA, 25 bp, Artificial
  probe
  misc_feature (1)..(25): SEQ ID NO: 114; WAN024A9W_at; Start 6; Stop 30
agctcaattcatgctaagataatag

SEQ ID NO: 47509 - DNA, 25 bp, Artificial
  probe
  misc_feature (1)..(25): SEQ ID NO: 114; WAN024A9W_at; Start 17; Stop 41
tgctaagataatagaaaatagaatg

SEQ ID NO: 47510 - DNA, 25 bp, Artificial
  probe
  misc_feature (1)..(25): SEQ ID NO: 114; WAN024A9W_at; Start 35; Stop 59
tagaatgtaacgaaggagagaaaaa

SEQ ID NO: 47511 - DNA, 25 bp, Artificial
  probe
  misc_feature (1)..(25): SEQ ID NO: 114; WAN024A9W_at; Start 13; Stop 37
ttcatgctaagataatagaaaatag

SEQ ID NO: 47512 - DNA, 25 bp, Artificial
  probe
  misc_feature (1)..(25): SEQ ID NO: 114; WAN024A9W_at; Start 19; Stop 43
ctaagataatagaaaatagaatgta

SEQ ID NO: 47513 - DNA, 25 bp, Artificial
  probe
  misc_feature (1)..(25): SEQ ID NO: 114; WAN024A9W_at; Start 24; Stop 48
ataatagaaaatagaatgtaacgaa

SEQ ID NO: 47514 - DNA, 25 bp, Artificial
  probe
  misc_feature (1)..(25): SEQ ID NO: 114; WAN024A9W_at; Start 5; Stop 29
tagctcaattcatgctaagataata

SEQ ID NO: 47515 - DNA, 25 bp, Artificial
  probe
  misc_feature (1)..(25): SEQ ID NO: 114; WAN024A9W_at; Start 32; Stop 56
aaatagaatgtaacgaaggagagaa

SEQ ID NO: 47516 - DNA, 25 bp, Artificial
  probe
  misc_feature (1)..(25): SEQ ID NO: 114; WAN024A9W_at; Start 30; Stop 54
gaaaatagaatgtaacgaaggagag

SEQ ID NO: 47517 - DNA, 25 bp, Artificial
  probe
  misc_feature (1)..(25): SEQ ID NO: 114; WAN024A9W_at; Start 14; Stop 38
tcatgctaagataatagaaaataga

SEQ ID NO: 47518 - DNA, 25 bp, Artificial
  probe
  misc_feature (1)..(25): SEQ ID NO: 114; WAN024A9W_at; Start 22; Stop 46
agataatagaaaatagaatgtaacg

SEQ ID NO: 47519 - DNA, 25 bp, Artificial
  probe
  misc_feature (1)..(25): SEQ ID NO: 114; WAN024A9W_at; Start 23; Stop 47
gataatagaaaatagaatgtaacga

SEQ ID NO: 47520 - DNA, 25 bp, Artificial
  probe
  misc_feature (1)..(25): SEQ ID NO: 114; WAN024A9W_at; Start 29; Stop 53
agaaaatagaatgtaacgaaggaga

SEQ ID NO: 47521 - DNA, 25 bp, Artificial
  probe
  misc_feature (1)..(25): SEQ ID NO: 114; WAN024A9W_at; Start 31; Stop 55
aaaatagaatgtaacgaaggagaga

SEQ ID NO: 47522 - DNA, 25 bp, Artificial
  probe
  misc_feature (1)..(25): SEQ ID NO: 114; WAN024A9W_at; Start 8; Stop 32
ctcaattcatgctaagataatagaa

SEQ ID NO: 47523 - DNA, 25 bp, Artificial
  probe
  misc_feature (1)..(25): SEQ ID NO: 114; WAN024A9W_at; Start 21; Stop 45
aagataatagaaaatagaatgtaac

SEQ ID NO: 47524 - DNA, 25 bp, Artificial
  probe
  misc_feature (1)..(25): SEQ ID NO: 114; WAN024A9W_at; Start 1; Stop 25
aaactagctcaattcatgctaagat

SEQ ID NO: 47525 - DNA, 25 bp, Artificial
  probe
  misc_feature (1)..(25): SEQ ID NO: 114; WAN024A9W_at; Start 10; Stop 34
caattcatgctaagataatagaaaa

SEQ ID NO: 47526 - DNA, 25 bp, Artificial
  probe
  misc_feature (1)..(25): SEQ ID NO: 114; WAN024A9W_at; Start 12; Stop 36
attcatgctaagataatagaaaata

SEQ ID NO: 47527 - DNA, 25 bp, Artificial
  probe
  misc_feature (1)..(25): SEQ ID NO: 114; WAN024A9W_at; Start 7; Stop 31
gctcaattcatgctaagataataga

SEQ ID NO: 47528 - DNA, 25 bp, Artificial
  probe
  misc_feature (1)..(25): SEQ ID NO: 114; WAN024A9W_at; Start 25; Stop 49
taatagaaaatagaatgtaacgaag

SEQ ID NO: 47529 - DNA, 25 bp, Artificial
  probe
  misc_feature (1)..(25): SEQ ID NO: 114; WAN024A9W_at; Start 18; Stop 42
gctaagataatagaaaatagaatgt

SEQ ID NO: 47530 - DNA, 25 bp, Artificial
  probe
  misc_feature (1)..(25): SEQ ID NO: 114; WAN024A9W_at; Start 28; Stop 52
tagaaaatagaatgtaacgaaggag

SEQ ID NO: 47531 - DNA, 25 bp, Artificial
  probe
  misc_feature (1)..(25): SEQ ID NO: 324; WAN024A9X_at; Start 34; Stop 58
atatagtatactttatttcagaaaa

SEQ ID NO: 47532 - DNA, 25 bp, Artificial
  probe
  misc_feature (1)..(25): SEQ ID NO: 324; WAN024A9X_at; Start 28; Stop 52
tactttatatagtatactttatttc

SEQ ID NO: 47533 - DNA, 25 bp, Artificial
  probe
  misc_feature (1)..(25): SEQ ID NO: 324; WAN024A9X_at; Start 8; Stop 32
acctccatgttatcatagtttactt

SEQ ID NO: 47534 - DNA, 25 bp, Artificial
  probe
  misc_feature (1)..(25): SEQ ID NO: 324; WAN024A9X_at; Start 32; Stop 56
ttatatagtatactttatttcagaa

SEQ ID NO: 47535 - DNA, 25 bp, Artificial
  probe
  misc_feature (1)..(25): SEQ ID NO: 324; WAN024A9X_at; Start 31; Stop 55
tttatatagtatactttatttcaga

SEQ ID NO: 47536 - DNA, 25 bp, Artificial
  probe
  misc_feature (1)..(25): SEQ ID NO: 324; WAN024A9X_at; Start 13; Stop 37
catgttatcatagtttactttatat

SEQ ID NO: 47537 - DNA, 25 bp, Artificial
  probe
  misc_feature (1)..(25): SEQ ID NO: 324; WAN024A9X_at; Start 6; Stop 30
atacctccatgttatcatagtttac

SEQ ID NO: 47538 - DNA, 25 bp, Artificial
  probe
  misc_feature (1)..(25): SEQ ID NO: 324; WAN024A9X_at; Start 1; Stop 25
acacaatacctccatgttatcatag

SEQ ID NO: 47539 - DNA, 25 bp, Artificial
  probe
  misc_feature (1)..(25): SEQ ID NO: 324; WAN024A9X_at; Start 30; Stop 54
ctttatatagtatactttatttcag

SEQ ID NO: 47540 - DNA, 25 bp, Artificial
  probe
  misc_feature (1)..(25): SEQ ID NO: 324; WAN024A9X_at; Start 4; Stop 28
caatacctccatgttatcatagttt

SEQ ID NO: 47541 - DNA, 25 bp, Artificial
  probe
  misc_feature (1)..(25): SEQ ID NO: 324; WAN024A9X_at; Start 5; Stop 29
aatacctccatgttatcatagttta

SEQ ID NO: 47542 - DNA, 25 bp, Artificial
  probe
  misc_feature (1)..(25): SEQ ID NO: 324; WAN024A9X_at; Start 9; Stop 33
cctccatgttatcatagtttacttt

SEQ ID NO: 47543 - DNA, 25 bp, Artificial
  probe
  misc_feature (1)..(25): SEQ ID NO: 324; WAN024A9X_at; Start 10; Stop 34
ctccatgttatcatagtttacttta

SEQ ID NO: 47544 - DNA, 25 bp, Artificial
  probe
  misc_feature (1)..(25): SEQ ID NO: 324; WAN024A9X_at; Start 35; Stop 59
tatagtatactttatttcagaaaaa

SEQ ID NO: 47545 - DNA, 25 bp, Artificial
  probe
  misc_feature (1)..(25): SEQ ID NO: 324; WAN024A9X_at; Start 16; Stop 40
gttatcatagtttactttatatagt

SEQ ID NO: 47546 - DNA, 25 bp, Artificial
  probe
  misc_feature (1)..(25): SEQ ID NO: 324; WAN024A9X_at; Start 7; Stop 31
tacctccatgttatcatagtttact

SEQ ID NO: 47547 - DNA, 25 bp, Artificial
  probe
  misc_feature (1)..(25): SEQ ID NO: 324; WAN024A9X_at; Start 11; Stop 35
tccatgttatcatagtttactttat

SEQ ID NO: 47548 - DNA, 25 bp, Artificial
  probe
  misc_feature (1)..(25): SEQ ID NO: 324; WAN024A9X_at; Start 20; Stop 44
tcatagtttactttatatagtatac

SEQ ID NO: 47549 - DNA, 25 bp, Artificial
  probe
  misc_feature (1)..(25): SEQ ID NO: 324; WAN024A9X_at; Start 33; Stop 57
tatatagtatactttatttcagaaa

SEQ ID NO: 47550 - DNA, 25 bp, Artificial
  probe
  misc_feature (1)..(25): SEQ ID NO: 324; WAN024A9X_at; Start 21; Stop 45
catagtttactttatatagtatact

SEQ ID NO: 47551 - DNA, 25 bp, Artificial
  probe
  misc_feature (1)..(25): SEQ ID NO: 324; WAN024A9X_at; Start 65; Stop 89
aaccatttcactcattttccctact

SEQ ID NO: 47552 - DNA, 25 bp, Artificial
  probe
  misc_feature (1)..(25): SEQ ID NO: 324; WAN024A9X_at; Start 3; Stop 27
acaatacctccatgttatcatagtt

SEQ ID NO: 47553 - DNA, 25 bp, Artificial
  probe
  misc_feature (1)..(25): SEQ ID NO: 324; WAN024A9X_at; Start 18; Stop 42
tatcatagtttactttatatagtat

SEQ ID NO: 47554 - DNA, 25 bp, Artificial
  probe
  misc_feature (1)..(25): SEQ ID NO: 324; WAN024A9X_at; Start 2; Stop 26
cacaatacctccatgttatcatagt

SEQ ID NO: 47555 - DNA, 25 bp, Artificial
  probe
  misc_feature (1)..(25): SEQ ID NO: 324; WAN024A9X_at; Start 63; Stop 87
taaaccatttcactcattttcccta

SEQ ID NO: 47556 - DNA, 25 bp, Artificial
  probe
  misc_feature (1)..(25): SEQ ID NO: 324; WAN024A9X_at; Start 29; Stop 53
actttatatagtatactttatttca

SEQ ID NO: 47557 - DNA, 25 bp, Artificial
  probe
  misc_feature (1)..(25): SEQ ID NO: 324; WAN024A9X_at; Start 15; Stop 39
tgttatcatagtttactttatatag

SEQ ID NO: 47558 - DNA, 25 bp, Artificial
  probe
  misc_feature (1)..(25): SEQ ID NO: 324; WAN024A9X_at; Start 12; Stop 36
ccatgttatcatagtttactttata

SEQ ID NO: 47559 - DNA, 25 bp, Artificial
  probe
  misc_feature (1)..(25): SEQ ID NO: 480; WAN024A9Y_at; Start 52; Stop 76
tatataaagtaaactatgataacat

SEQ ID NO: 47560 - DNA, 25 bp, Artificial
  probe
  misc_feature (1)..(25): SEQ ID NO: 480; WAN024A9Y_at; Start 33; Stop 57
tttctgaaataaagtatactatata

SEQ ID NO: 47561 - DNA, 25 bp, Artificial
  probe
  misc_feature (1)..(25): SEQ ID NO: 480; WAN024A9Y_at; Start 53; Stop 77
atataaagtaaactatgataacatg

SEQ ID NO: 47562 - DNA, 25 bp, Artificial
  probe
  misc_feature (1)..(25): SEQ ID NO: 480; WAN024A9Y_at; Start 44; Stop 68
aagtatactatataaagtaaactat

SEQ ID NO: 47563 - DNA, 25 bp, Artificial
  probe
  misc_feature (1)..(25): SEQ ID NO: 480; WAN024A9Y_at; Start 57; Stop 81
aaagtaaactatgataacatggagg

SEQ ID NO: 47564 - DNA, 25 bp, Artificial
  probe
  misc_feature (1)..(25): SEQ ID NO: 480; WAN024A9Y_at; Start 3; Stop 27
tagggaaaatgagtgaaatggttta

SEQ ID NO: 47565 - DNA, 25 bp, Artificial
  probe
  misc_feature (1)..(25): SEQ ID NO: 480; WAN024A9Y_at; Start 58; Stop 82
aagtaaactatgataacatggaggt

SEQ ID NO: 47566 - DNA, 25 bp, Artificial
  probe
  misc_feature (1)..(25): SEQ ID NO: 480; WAN024A9Y_at; Start 50; Stop 74
actatataaagtaaactatgataac

SEQ ID NO: 47567 - DNA, 25 bp, Artificial
  probe
  misc_feature (1)..(25): SEQ ID NO: 480; WAN024A9Y_at; Start 65; Stop 89
ctatgataacatggaggtattgtgt

SEQ ID NO: 47568 - DNA, 25 bp, Artificial
  probe
  misc_feature (1)..(25): SEQ ID NO: 480; WAN024A9Y_at; Start 55; Stop 79
ataaagtaaactatgataacatgga

SEQ ID NO: 47569 - DNA, 25 bp, Artificial
  probe
  misc_feature (1)..(25): SEQ ID NO: 480; WAN024A9Y_at; Start 47; Stop 71
tatactatataaagtaaactatgat

SEQ ID NO: 47570 - DNA, 25 bp, Artificial
  probe
  misc_feature (1)..(25): SEQ ID NO: 480; WAN024A9Y_at; Start 56; Stop 80
taaagtaaactatgataacatggag

SEQ ID NO: 47571 - DNA, 25 bp, Artificial
  probe
  misc_feature (1)..(25): SEQ ID NO: 480; WAN024A9Y_at; Start 49; Stop 73
tactatataaagtaaactatgataa

SEQ ID NO: 47572 - DNA, 25 bp, Artificial
  probe
  misc_feature (1)..(25): SEQ ID NO: 480; WAN024A9Y_at; Start 60; Stop 84
gtaaactatgataacatggaggtat

SEQ ID NO: 47573 - DNA, 25 bp, Artificial
  probe
  misc_feature (1)..(25): SEQ ID NO: 480; WAN024A9Y_at; Start 59; Stop 83
agtaaactatgataacatggaggta

SEQ ID NO: 47574 - DNA, 25 bp, Artificial
  probe
  misc_feature (1)..(25): SEQ ID NO: 480; WAN024A9Y_at; Start 38; Stop 62
gaaataaagtatactatataaagta

SEQ ID NO: 47575 - DNA, 25 bp, Artificial
  probe
  misc_feature (1)..(25): SEQ ID NO: 480; WAN024A9Y_at; Start 36; Stop 60
ctgaaataaagtatactatataaag

SEQ ID NO: 47576 - DNA, 25 bp, Artificial
  probe
  misc_feature (1)..(25): SEQ ID NO: 480; WAN024A9Y_at; Start 34; Stop 58
ttctgaaataaagtatactatataa

SEQ ID NO: 47577 - DNA, 25 bp, Artificial
  probe
  misc_feature (1)..(25): SEQ ID NO: 480; WAN024A9Y_at; Start 45; Stop 69
agtatactatataaagtaaactatg

SEQ ID NO: 47578 - DNA, 25 bp, Artificial
  probe
  misc_feature (1)..(25): SEQ ID NO: 480; WAN024A9Y_at; Start 62; Stop 86
aaactatgataacatggaggtattg

SEQ ID NO: 47579 - DNA, 25 bp, Artificial
  probe
  misc_feature (1)..(25): SEQ ID NO: 480; WAN024A9Y_at; Start 37; Stop 61
tgaaataaagtatactatataaagt

SEQ ID NO: 47580 - DNA, 25 bp, Artificial
  probe
  misc_feature (1)..(25): SEQ ID NO: 480; WAN024A9Y_at; Start 31; Stop 55
tttttctgaaataaagtatactata

SEQ ID NO: 47581 - DNA, 25 bp, Artificial
  probe
  misc_feature (1)..(25): SEQ ID NO: 480; WAN024A9Y_at; Start 48; Stop 72
atactatataaagtaaactatgata

SEQ ID NO: 47582 - DNA, 25 bp, Artificial
  probe
  misc_feature (1)..(25): SEQ ID NO: 480; WAN024A9Y_at; Start 1; Stop 25
agtagggaaaatgagtgaaatggtt

SEQ ID NO: 47583 - DNA, 25 bp, Artificial
  probe
  misc_feature (1)..(25): SEQ ID NO: 480; WAN024A9Y_at; Start 64; Stop 88
actatgataacatggaggtattgtg

SEQ ID NO: 47584 - DNA, 25 bp, Artificial
  probe
  misc_feature (1)..(25): SEQ ID NO: 480; WAN024A9Y_at; Start 63; Stop 87
aactatgataacatggaggtattgt

SEQ ID NO: 47585 - DNA, 25 bp, Artificial
  probe
  misc_feature (1)..(25): SEQ ID NO: 480; WAN024A9Y_at; Start 32; Stop 56
ttttctgaaataaagtatactatat

SEQ ID NO: 47586 - DNA, 25 bp, Artificial
  probe
  misc_feature (1)..(25): SEQ ID NO: 480; WAN024A9Y_at; Start 51; Stop 75
ctatataaagtaaactatgataaca

SEQ ID NO: 47587 - DNA, 25 bp, Artificial
  probe
  misc_feature (1)..(25): SEQ ID NO: 480; WAN024A9Y_at; Start 35; Stop 59
tctgaaataaagtatactatataaa

SEQ ID NO: 47588 - DNA, 25 bp, Artificial
  probe
  misc_feature (1)..(25): SEQ ID NO: 480; WAN024A9Y_at; Start 61; Stop 85
taaactatgataacatggaggtatt

SEQ ID NO: 47589 - DNA, 25 bp, Artificial
  probe
  misc_feature (1)..(25): SEQ ID NO: 480; WAN024A9Y_at; Start 46; Stop 70
gtatactatataaagtaaactatga

SEQ ID NO: 47590 - DNA, 25 bp, Artificial
  probe
  misc_feature (1)..(25): SEQ ID NO: 480; WAN024A9Y_at; Start 54; Stop 78
tataaagtaaactatgataacatgg

SEQ ID NO: 47591 - DNA, 25 bp, Artificial
  probe
  misc_feature (1)..(25): SEQ ID NO: 3165; WAN024A9Z_at; Start 316; Stop 340
aactacttgtcaatagtctattaga

SEQ ID NO: 47592 - DNA, 25 bp, Artificial
  probe
  misc_feature (1)..(25): SEQ ID NO: 3165; WAN024A9Z_at; Start 137; Stop 161
tcagtctcgcaataacgagatgcac

SEQ ID NO: 47593 - DNA, 25 bp, Artificial
  probe
  misc_feature (1)..(25): SEQ ID NO: 3165; WAN024A9Z_at; Start 143; Stop 167
tcgcaataacgagatgcactgtaag

SEQ ID NO: 47594 - DNA, 25 bp, Artificial
  probe
  misc_feature (1)..(25): SEQ ID NO: 3165; WAN024A9Z_at; Start 11; Stop 35
tctaaacaagcgacgccatcgtttt

SEQ ID NO: 47595 - DNA, 25 bp, Artificial
  probe
  misc_feature (1)..(25): SEQ ID NO: 3165; WAN024A9Z_at; Start 205; Stop 229
tagcattcagcccaattttcatcat

SEQ ID NO: 47596 - DNA, 25 bp, Artificial
  probe
  misc_feature (1)..(25): SEQ ID NO: 3165; WAN024A9Z_at; Start 85; Stop 109
tgaggacgtcgatgcgcggtaccac

SEQ ID NO: 47597 - DNA, 25 bp, Artificial
  probe
  misc_feature (1)..(25): SEQ ID NO: 3165; WAN024A9Z_at; Start 307; Stop 331
tcatttttaaactacttgtcaatag

SEQ ID NO: 47598 - DNA, 25 bp, Artificial
  probe
  misc_feature (1)..(25): SEQ ID NO: 3165; WAN024A9Z_at; Start 2; Stop 26
tttcacttatctaaacaagcgacgc

SEQ ID NO: 47599 - DNA, 25 bp, Artificial
  probe
  misc_feature (1)..(25): SEQ ID NO: 3165; WAN024A9Z_at; Start 284; Stop 308
cttttctgaatggttaaattatatc

SEQ ID NO: 47600 - DNA, 25 bp, Artificial
  probe
  misc_feature (1)..(25): SEQ ID NO: 3165; WAN024A9Z_at; Start 131; Stop 155
tatcgctcagtctcgcaataacgag

SEQ ID NO: 47601 - DNA, 25 bp, Artificial
  probe
  misc_feature (1)..(25): SEQ ID NO: 3165; WAN024A9Z_at; Start 171; Stop 195
tgcttaccgaatttttataatttca

SEQ ID NO: 47602 - DNA, 25 bp, Artificial
  probe
  misc_feature (1)..(25): SEQ ID NO: 3165; WAN024A9Z_at; Start 38; Stop 62
ttccatactaacctccatcaaaaaa

SEQ ID NO: 47603 - DNA, 25 bp, Artificial
  probe
  misc_feature (1)..(25): SEQ ID NO: 3165; WAN024A9Z_at; Start 77; Stop 101
aacttgtgtgaggacgtcgatgcgc

SEQ ID NO: 47604 - DNA, 25 bp, Artificial
  probe
  misc_feature (1)..(25): SEQ ID NO: 3165; WAN024A9Z_at; Start 60; Stop 84
aaaatcctcacacaaaaaacttgtg

SEQ ID NO: 47605 - DNA, 25 bp, Artificial
  probe
  misc_feature (1)..(25): SEQ ID NO: 3165; WAN024A9Z_at; Start 24; Stop 48
cgccatcgttttctttccatactaa

SEQ ID NO: 47606 - DNA, 25 bp, Artificial
  probe
  misc_feature (1)..(25): SEQ ID NO: 3165; WAN024A9Z_at; Start 231; Stop 255
gccacttatctgttttcagctacca

SEQ ID NO: 47607 - DNA, 25 bp, Artificial
  probe
  misc_feature (1)..(25): SEQ ID NO: 3165; WAN024A9Z_at; Start 349; Stop 373
gatattcacttttagcattcactct

SEQ ID NO: 47608 - DNA, 25 bp, Artificial
  probe
  misc_feature (1)..(25): SEQ ID NO: 3165; WAN024A9Z_at; Start 72; Stop 96
caaaaaacttgtgtgaggacgtcga

SEQ ID NO: 47609 - DNA, 25 bp, Artificial
  probe
  misc_feature (1)..(25): SEQ ID NO: 3165; WAN024A9Z_at; Start 274; Stop 298
tgtatgattacttttctgaatggtt

SEQ ID NO: 47610 - DNA, 25 bp, Artificial
  probe
  misc_feature (1)..(25): SEQ ID NO: 3165; WAN024A9Z_at; Start 214; Stop 238
gcccaattttcatcattgccactta

SEQ ID NO: 47611 - DNA, 25 bp, Artificial
  probe
  misc_feature (1)..(25): SEQ ID NO: 3165; WAN024A9Z_at; Start 107; Stop 131
cacctcaattatagggaatttccct

SEQ ID NO: 47612 - DNA, 25 bp, Artificial
  probe
  misc_feature (1)..(25): SEQ ID NO: 3165; WAN024A9Z_at; Start 256; Stop 280
cagactctctaaaaagtttgtatga

SEQ ID NO: 47613 - DNA, 25 bp, Artificial
  probe
  misc_feature (1)..(25): SEQ ID NO: 3165; WAN024A9Z_at; Start 193; Stop 217
tcaaattctaaatagcattcagccc

SEQ ID NO: 47614 - DNA, 25 bp, Artificial
  probe
  misc_feature (1)..(25): SEQ ID NO: 3165; WAN024A9Z_at; Start 7; Stop 31
cttatctaaacaagcgacgccatcg

SEQ ID NO: 47615 - DNA, 25 bp, Artificial
  probe
  misc_feature (1)..(25): SEQ ID NO: 3165; WAN024A9Z_at; Start 226; Stop 250
tcattgccacttatctgttttcagc

SEQ ID NO: 47616 - DNA, 25 bp, Artificial
  probe
  misc_feature (1)..(25): SEQ ID NO: 3165; WAN024A9Z_at; Start 249; Stop 273
gctaccacagactctctaaaaagtt

SEQ ID NO: 47617 - DNA, 25 bp, Artificial
  probe
  misc_feature (1)..(25): SEQ ID NO: 3165; WAN024A9Z_at; Start 92; Stop 116
gtcgatgcgcggtaccacctcaatt

SEQ ID NO: 47618 - DNA, 25 bp, Artificial
  probe
  misc_feature (1)..(25): SEQ ID NO: 3165; WAN024A9Z_at; Start 95; Stop 119
gatgcgcggtaccacctcaattata

SEQ ID NO: 47619 - DNA, 25 bp, Artificial
  probe
  misc_feature (1)..(25): SEQ ID NO: 3165; WAN024A9Z_at; Start 99; Stop 123
cgcggtaccacctcaattataggga

SEQ ID NO: 47620 - DNA, 25 bp, Artificial
  probe
  misc_feature (1)..(25): SEQ ID NO: 3165; WAN024A9Z_at; Start 18; Stop 42
aagcgacgccatcgttttctttcca

SEQ ID NO: 47621 - DNA, 25 bp, Artificial
  probe
  misc_feature (1)..(25): SEQ ID NO: 3165; WAN024A9Z_at; Start 242; Stop 266
gttttcagctaccacagactctcta

SEQ ID NO: 47622 - DNA, 25 bp, Artificial
  probe
  misc_feature (1)..(25): SEQ ID NO: 3165; WAN024A9Z_at; Start 146; Stop 170
caataacgagatgcactgtaaggtg

SEQ ID NO: 47623 - DNA, 25 bp, Artificial
  probe
  misc_feature (1)..(25): SEQ ID NO: 3165; WAN024A9Z_at; Start 121; Stop 145
ggaatttccctatcgctcagtctcg

SEQ ID NO: 47624 - DNA, 25 bp, Artificial
  probe
  misc_feature (1)..(25): SEQ ID NO: 3165; WAN024A9Z_at; Start 354; Stop 378
tcacttttagcattcactcttgaaa

SEQ ID NO: 47625 - DNA, 25 bp, Artificial
  probe
  misc_feature (1)..(25): SEQ ID NO: 4459; WAN024AA2_at; Start 52; Stop 76
ctattgacaagtagtttaaaaatga

SEQ ID NO: 47626 - DNA, 25 bp, Artificial
  probe
  misc_feature (1)..(25): SEQ ID NO: 4459; WAN024AA2_at; Start 335; Stop 359
ttagtatggaaagaaaacgatggcg

SEQ ID NO: 47627 - DNA, 25 bp, Artificial
  probe
  misc_feature (1)..(25): SEQ ID NO: 4459; WAN024AA2_at; Start 167; Stop 191
ggctgaatgctatttagaatttgaa

SEQ ID NO: 47628 - DNA, 25 bp, Artificial
  probe
  misc_feature (1)..(25): SEQ ID NO: 4459; WAN024AA2_at; Start 145; Stop 169
taagtggcaatgatgaaaattgggc

SEQ ID NO: 47629 - DNA, 25 bp, Artificial
  probe
  misc_feature (1)..(25): SEQ ID NO: 4459; WAN024AA2_at; Start 239; Stop 263
gagactgagcgatagggaaattccc

SEQ ID NO: 47630 - DNA, 25 bp, Artificial
  probe
  misc_feature (1)..(25): SEQ ID NO: 4459; WAN024AA2_at; Start 103; Stop 127
tcatacaaactttttagagagtctg

SEQ ID NO: 47631 - DNA, 25 bp, Artificial
  probe
  misc_feature (1)..(25): SEQ ID NO: 4459; WAN024AA2_at; Start 289; Stop 313
gacgtcctcacacaagttttttgtg

SEQ ID NO: 47632 - DNA, 25 bp, Artificial
  probe
  misc_feature (1)..(25): SEQ ID NO: 4459; WAN024AA2_at; Start 352; Stop 376
cgatggcgtcgcttgtttagataag

SEQ ID NO: 47633 - DNA, 25 bp, Artificial
  probe
  misc_feature (1)..(25): SEQ ID NO: 4459; WAN024AA2_at; Start 88; Stop 112
cattcagaaaagtaatcatacaaac

SEQ ID NO: 47634 - DNA, 25 bp, Artificial
  probe
  misc_feature (1)..(25): SEQ ID NO: 4459; WAN024AA2_at; Start 117; Stop 141
tagagagtctgtggtagctgaaaac

SEQ ID NO: 47635 - DNA, 25 bp, Artificial
  probe
  misc_feature (1)..(25): SEQ ID NO: 4459; WAN024AA2_at; Start 321; Stop 345
ttttttgatggaggttagtatggaa

SEQ ID NO: 47636 - DNA, 25 bp, Artificial
  probe
  misc_feature (1)..(25): SEQ ID NO: 4459; WAN024AA2_at; Start 233; Stop 257
tattgcgagactgagcgatagggaa

SEQ ID NO: 47637 - DNA, 25 bp, Artificial
  probe
  misc_feature (1)..(25): SEQ ID NO: 4459; WAN024AA2_at; Start 15; Stop 39
gaatgctaaaagtgaatatcaaaaa

SEQ ID NO: 47638 - DNA, 25 bp, Artificial
  probe
  misc_feature (1)..(25): SEQ ID NO: 4459; WAN024AA2_at; Start 159; Stop 183
gaaaattgggctgaatgctatttag

SEQ ID NO: 47639 - DNA, 25 bp, Artificial
  probe
  misc_feature (1)..(25): SEQ ID NO: 4459; WAN024AA2_at; Start 152; Stop 176
caatgatgaaaattgggctgaatgc

SEQ ID NO: 47640 - DNA, 25 bp, Artificial
  probe
  misc_feature (1)..(25): SEQ ID NO: 4459; WAN024AA2_at; Start 343; Stop 367
gaaagaaaacgatggcgtcgcttgt

SEQ ID NO: 47641 - DNA, 25 bp, Artificial
  probe
  misc_feature (1)..(25): SEQ ID NO: 4459; WAN024AA2_at; Start 219; Stop 243
acagtgcatctcgttattgcgagac

SEQ ID NO: 47642 - DNA, 25 bp, Artificial
  probe
  misc_feature (1)..(25): SEQ ID NO: 4459; WAN024AA2_at; Start 267; Stop 291
aattgaggtggtaccgcgcatcgac

SEQ ID NO: 47643 - DNA, 25 bp, Artificial
  probe
  misc_feature (1)..(25): SEQ ID NO: 4459; WAN024AA2_at; Start 299; Stop 323
cacaagttttttgtgtgaggatttt

SEQ ID NO: 47644 - DNA, 25 bp, Artificial
  probe
  misc_feature (1)..(25): SEQ ID NO: 4459; WAN024AA2_at; Start 213; Stop 237
caccttacagtgcatctcgttattg

SEQ ID NO: 47645 - DNA, 25 bp, Artificial
  probe
  misc_feature (1)..(25): SEQ ID NO: 4459; WAN024AA2_at; Start 252; Stop 276
agggaaattccctataattgaggtg

SEQ ID NO: 47646 - DNA, 25 bp, Artificial
  probe
  misc_feature (1)..(25): SEQ ID NO: 4459; WAN024AA2_at; Start 284; Stop 308
gcatcgacgtcctcacacaagtttt

SEQ ID NO: 47647 - DNA, 25 bp, Artificial
  probe
  misc_feature (1)..(25): SEQ ID NO: 4459; WAN024AA2_at; Start 43; Stop 67
tctaatagactattgacaagtagtt

SEQ ID NO: 47648 - DNA, 25 bp, Artificial
  probe
  misc_feature (1)..(25): SEQ ID NO: 4459; WAN024AA2_at; Start 188; Stop 212
tgaaattataaaaattcggtaagca

SEQ ID NO: 47649 - DNA, 25 bp, Artificial
  probe
  misc_feature (1)..(25): SEQ ID NO: 4459; WAN024AA2_at; Start 128; Stop 152
tggtagctgaaaacagataagtggc

SEQ ID NO: 47650 - DNA, 25 bp, Artificial
  probe
  misc_feature (1)..(25): SEQ ID NO: 4459; WAN024AA2_at; Start 133; Stop 157
gctgaaaacagataagtggcaatga

SEQ ID NO: 47651 - DNA, 25 bp, Artificial
  probe
  misc_feature (1)..(25): SEQ ID NO: 4459; WAN024AA2_at; Start 229; Stop 253
tcgttattgcgagactgagcgatag

SEQ ID NO: 47652 - DNA, 25 bp, Artificial
  probe
  misc_feature (1)..(25): SEQ ID NO: 4459; WAN024AA2_at; Start 274; Stop 298
gtggtaccgcgcatcgacgtcctca

SEQ ID NO: 47653 - DNA, 25 bp, Artificial
  probe
  misc_feature (1)..(25): SEQ ID NO: 4459; WAN024AA2_at; Start 339; Stop 363
tatggaaagaaaacgatggcgtcgc

SEQ ID NO: 47654 - DNA, 25 bp, Artificial
  probe
  misc_feature (1)..(25): SEQ ID NO: 4459; WAN024AA2_at; Start 260; Stop 284
tccctataattgaggtggtaccgcg

SEQ ID NO: 47655 - DNA, 25 bp, Artificial
  probe
  misc_feature (1)..(25): SEQ ID NO: 4459; WAN024AA2_at; Start 357; Stop 381
gcgtcgcttgtttagataagtgaaa

SEQ ID NO: 47656 - DNA, 25 bp, Artificial
  probe
  misc_feature (1)..(25): SEQ ID NO: 4459; WAN024AA2_at; Start 75; Stop 99
gatataatttaaccattcagaaaag

SEQ ID NO: 47657 - DNA, 25 bp, Artificial
  probe
  misc_feature (1)..(25): SEQ ID NO: 4459; WAN024AA2_at; Start 8; Stop 32
caagagtgaatgctaaaagtgaata

SEQ ID NO: 47658 - DNA, 25 bp, Artificial
  probe
  misc_feature (1)..(25): SEQ ID NO: 4459; WAN024AA2_at; Start 264; Stop 288
tataattgaggtggtaccgcgcatc

SEQ ID NO: 47659 - DNA, 25 bp, Artificial
  probe
  misc_feature (1)..(25): SEQ ID NO: 7362; WAN024AA3_at; Start 95; Stop 119
aagccgttctaagatttaacctatg

SEQ ID NO: 47660 - DNA, 25 bp, Artificial
  probe
  misc_feature (1)..(25): SEQ ID NO: 7362; WAN024AA3_at; Start 15; Stop 39
tcctaacaagtgatcctcgactgtg

SEQ ID NO: 47661 - DNA, 25 bp, Artificial
  probe
  misc_feature (1)..(25): SEQ ID NO: 7362; WAN024AA3_at; Start 8; Stop 32
aatgtaatcctaacaagtgatcctc

SEQ ID NO: 47662 - DNA, 25 bp, Artificial
  probe
  misc_feature (1)..(25): SEQ ID NO: 7362; WAN024AA3_at; Start 82; Stop 106
catatctgattttaagccgttctaa

SEQ ID NO: 47663 - DNA, 25 bp, Artificial
  probe
  misc_feature (1)..(25): SEQ ID NO: 7362; WAN024AA3_at; Start 101; Stop 125
ttctaagatttaacctatgtttcta

SEQ ID NO: 47664 - DNA, 25 bp, Artificial
  probe
  misc_feature (1)..(25): SEQ ID NO: 7362; WAN024AA3_at; Start 88; Stop 112
tgattttaagccgttctaagattta

SEQ ID NO: 47665 - DNA, 25 bp, Artificial
  probe
  misc_feature (1)..(25): SEQ ID NO: 7362; WAN024AA3_at; Start 12; Stop 36
taatcctaacaagtgatcctcgact

SEQ ID NO: 47666 - DNA, 25 bp, Artificial
  probe
  misc_feature (1)..(25): SEQ ID NO: 7362; WAN024AA3_at; Start 13; Stop 37
aatcctaacaagtgatcctcgactg

SEQ ID NO: 47667 - DNA, 25 bp, Artificial
  probe
  misc_feature (1)..(25): SEQ ID NO: 7362; WAN024AA3_at; Start 28; Stop 52
tcctcgactgtgtttgtagcactta

SEQ ID NO: 47668 - DNA, 25 bp, Artificial
  probe
  misc_feature (1)..(25): SEQ ID NO: 7362; WAN024AA3_at; Start 81; Stop 105
tcatatctgattttaagccgttcta

SEQ ID NO: 47669 - DNA, 25 bp, Artificial
  probe
  misc_feature (1)..(25): SEQ ID NO: 7362; WAN024AA3_at; Start 34; Stop 58
actgtgtttgtagcacttagttacc

SEQ ID NO: 47670 - DNA, 25 bp, Artificial
  probe
  misc_feature (1)..(25): SEQ ID NO: 7362; WAN024AA3_at; Start 16; Stop 40
cctaacaagtgatcctcgactgtgt

SEQ ID NO: 47671 - DNA, 25 bp, Artificial
  probe
  misc_feature (1)..(25): SEQ ID NO: 7362; WAN024AA3_at; Start 21; Stop 45
caagtgatcctcgactgtgtttgta

SEQ ID NO: 47672 - DNA, 25 bp, Artificial
  probe
  misc_feature (1)..(25): SEQ ID NO: 7362; WAN024AA3_at; Start 32; Stop 56
cgactgtgtttgtagcacttagtta

SEQ ID NO: 47673 - DNA, 25 bp, Artificial
  probe
  misc_feature (1)..(25): SEQ ID NO: 7362; WAN024AA3_at; Start 96; Stop 120
agccgttctaagatttaacctatgt

SEQ ID NO: 47674 - DNA, 25 bp, Artificial
  probe
  misc_feature (1)..(25): SEQ ID NO: 7362; WAN024AA3_at; Start 30; Stop 54
ctcgactgtgtttgtagcacttagt

SEQ ID NO: 47675 - DNA, 25 bp, Artificial
  probe
  misc_feature (1)..(25): SEQ ID NO: 7362; WAN024AA3_at; Start 26; Stop 50
gatcctcgactgtgtttgtagcact

SEQ ID NO: 47676 - DNA, 25 bp, Artificial
  probe
  misc_feature (1)..(25): SEQ ID NO: 7362; WAN024AA3_at; Start 25; Stop 49
tgatcctcgactgtgtttgtagcac

SEQ ID NO: 47677 - DNA, 25 bp, Artificial
  probe
  misc_feature (1)..(25): SEQ ID NO: 7362; WAN024AA3_at; Start 18; Stop 42
taacaagtgatcctcgactgtgttt

SEQ ID NO: 47678 - DNA, 25 bp, Artificial
  probe
  misc_feature (1)..(25): SEQ ID NO: 7362; WAN024AA3_at; Start 24; Stop 48
gtgatcctcgactgtgtttgtagca

SEQ ID NO: 47679 - DNA, 25 bp, Artificial
  probe
  misc_feature (1)..(25): SEQ ID NO: 7362; WAN024AA3_at; Start 19; Stop 43
aacaagtgatcctcgactgtgtttg

SEQ ID NO: 47680 - DNA, 25 bp, Artificial
  probe
  misc_feature (1)..(25): SEQ ID NO: 7362; WAN024AA3_at; Start 10; Stop 34
tgtaatcctaacaagtgatcctcga

SEQ ID NO: 47681 - DNA, 25 bp, Artificial
  probe
  misc_feature (1)..(25): SEQ ID NO: 7362; WAN024AA3_at; Start 84; Stop 108
tatctgattttaagccgttctaaga

SEQ ID NO: 47682 - DNA, 25 bp, Artificial
  probe
  misc_feature (1)..(25): SEQ ID NO: 7362; WAN024AA3_at; Start 22; Stop 46
aagtgatcctcgactgtgtttgtag

SEQ ID NO: 47683 - DNA, 25 bp, Artificial
  probe
  misc_feature (1)..(25): SEQ ID NO: 7362; WAN024AA3_at; Start 66; Stop 90
gactatttccctttatcatatctga

SEQ ID NO: 47684 - DNA, 25 bp, Artificial
  probe
  misc_feature (1)..(25): SEQ ID NO: 7362; WAN024AA3_at; Start 11; Stop 35
gtaatcctaacaagtgatcctcgac

SEQ ID NO: 47685 - DNA, 25 bp, Artificial
  probe
  misc_feature (1)..(25): SEQ ID NO: 7362; WAN024AA3_at; Start 23; Stop 47
agtgatcctcgactgtgtttgtagc

SEQ ID NO: 47686 - DNA, 25 bp, Artificial
  probe
  misc_feature (1)..(25): SEQ ID NO: 7362; WAN024AA3_at; Start 29; Stop 53
cctcgactgtgtttgtagcacttag

SEQ ID NO: 47687 - DNA, 25 bp, Artificial
  probe
  misc_feature (1)..(25): SEQ ID NO: 7362; WAN024AA3_at; Start 5; Stop 29
taaaatgtaatcctaacaagtgatc

SEQ ID NO: 47688 - DNA, 25 bp, Artificial
  probe
  misc_feature (1)..(25): SEQ ID NO: 7362; WAN024AA3_at; Start 6; Stop 30
aaaatgtaatcctaacaagtgatcc

SEQ ID NO: 47689 - DNA, 25 bp, Artificial
  probe
  misc_feature (1)..(25): SEQ ID NO: 7362; WAN024AA3_at; Start 79; Stop 103
tatcatatctgattttaagccgttc

SEQ ID NO: 47690 - DNA, 25 bp, Artificial
  probe
  misc_feature (1)..(25): SEQ ID NO: 7362; WAN024AA3_at; Start 57; Stop 81
cctagataagactatttccctttat

SEQ ID NO: 47691 - DNA, 25 bp, Artificial
  probe
  misc_feature (1)..(25): SEQ ID NO: 7362; WAN024AA3_at; Start 9; Stop 33
atgtaatcctaacaagtgatcctcg

SEQ ID NO: 47692 - DNA, 25 bp, Artificial
  probe
  misc_feature (1)..(25): SEQ ID NO: 7362; WAN024AA3_at; Start 2; Stop 26
gattaaaatgtaatcctaacaagtg

SEQ ID NO: 47693 - DNA, 25 bp, Artificial
  probe
  misc_feature (1)..(25): SEQ ID NO: 7349; WAN024AA4_at; Start 94; Stop 118
gaggatcacttgttaggattacatt

SEQ ID NO: 47694 - DNA, 25 bp, Artificial
  probe
  misc_feature (1)..(25): SEQ ID NO: 7349; WAN024AA4_at; Start 28; Stop 52
gcttaaaatcagatatgataaaggg

SEQ ID NO: 47695 - DNA, 25 bp, Artificial
  probe
  misc_feature (1)..(25): SEQ ID NO: 7349; WAN024AA4_at; Start 89; Stop 113
cagtcgaggatcacttgttaggatt

SEQ ID NO: 47696 - DNA, 25 bp, Artificial
  probe
  misc_feature (1)..(25): SEQ ID NO: 7349; WAN024AA4_at; Start 18; Stop 42
tcttagaacggcttaaaatcagata

SEQ ID NO: 47697 - DNA, 25 bp, Artificial
  probe
  misc_feature (1)..(25): SEQ ID NO: 7349; WAN024AA4_at; Start 100; Stop 124
cacttgttaggattacattttaatc

SEQ ID NO: 47698 - DNA, 25 bp, Artificial
  probe
  misc_feature (1)..(25): SEQ ID NO: 7349; WAN024AA4_at; Start 6; Stop 30
acataggttaaatcttagaacggct

SEQ ID NO: 47699 - DNA, 25 bp, Artificial
  probe
  misc_feature (1)..(25): SEQ ID NO: 7349; WAN024AA4_at; Start 78; Stop 102
tgctacaaacacagtcgaggatcac

SEQ ID NO: 47700 - DNA, 25 bp, Artificial
  probe
  misc_feature (1)..(25): SEQ ID NO: 7349; WAN024AA4_at; Start 70; Stop 94
taactaagtgctacaaacacagtcg

SEQ ID NO: 47701 - DNA, 25 bp, Artificial
  probe
  misc_feature (1)..(25): SEQ ID NO: 7349; WAN024AA4_at; Start 41; Stop 65
tatgataaagggaaatagtcttatc

SEQ ID NO: 47702 - DNA, 25 bp, Artificial
  probe
  misc_feature (1)..(25): SEQ ID NO: 7349; WAN024AA4_at; Start 23; Stop 47
gaacggcttaaaatcagatatgata

SEQ ID NO: 47703 - DNA, 25 bp, Artificial
  probe
  misc_feature (1)..(25): SEQ ID NO: 7349; WAN024AA4_at; Start 21; Stop 45
tagaacggcttaaaatcagatatga

SEQ ID NO: 47704 - DNA, 25 bp, Artificial
  probe
  misc_feature (1)..(25): SEQ ID NO: 7349; WAN024AA4_at; Start 73; Stop 97
ctaagtgctacaaacacagtcgagg

SEQ ID NO: 47705 - DNA, 25 bp, Artificial
  probe
  misc_feature (1)..(25): SEQ ID NO: 7349; WAN024AA4_at; Start 68; Stop 92
ggtaactaagtgctacaaacacagt

SEQ ID NO: 47706 - DNA, 25 bp, Artificial
  probe
  misc_feature (1)..(25): SEQ ID NO: 7349; WAN024AA4_at; Start 75; Stop 99
aagtgctacaaacacagtcgaggat

SEQ ID NO: 47707 - DNA, 25 bp, Artificial
  probe
  misc_feature (1)..(25): SEQ ID NO: 7349; WAN024AA4_at; Start 77; Stop 101
gtgctacaaacacagtcgaggatca

SEQ ID NO: 47708 - DNA, 25 bp, Artificial
  probe
  misc_feature (1)..(25): SEQ ID NO: 7349; WAN024AA4_at; Start 87; Stop 111
cacagtcgaggatcacttgttagga

SEQ ID NO: 47709 - DNA, 25 bp, Artificial
  probe
  misc_feature (1)..(25): SEQ ID NO: 7349; WAN024AA4_at; Start 93; Stop 117
cgaggatcacttgttaggattacat

SEQ ID NO: 47710 - DNA, 25 bp, Artificial
  probe
  misc_feature (1)..(25): SEQ ID NO: 7349; WAN024AA4_at; Start 79; Stop 103
gctacaaacacagtcgaggatcact

SEQ ID NO: 47711 - DNA, 25 bp, Artificial
  probe
  misc_feature (1)..(25): SEQ ID NO: 7349; WAN024AA4_at; Start 97; Stop 121
gatcacttgttaggattacatttta

SEQ ID NO: 47712 - DNA, 25 bp, Artificial
  probe
  misc_feature (1)..(25): SEQ ID NO: 7349; WAN024AA4_at; Start 76; Stop 100
agtgctacaaacacagtcgaggatc

SEQ ID NO: 47713 - DNA, 25 bp, Artificial
  probe
  misc_feature (1)..(25): SEQ ID NO: 7349; WAN024AA4_at; Start 45; Stop 69
ataaagggaaatagtcttatctagg

SEQ ID NO: 47714 - DNA, 25 bp, Artificial
  probe
  misc_feature (1)..(25): SEQ ID NO: 7349; WAN024AA4_at; Start 72; Stop 96
actaagtgctacaaacacagtcgag

SEQ ID NO: 47715 - DNA, 25 bp, Artificial
  probe
  misc_feature (1)..(25): SEQ ID NO: 7349; WAN024AA4_at; Start 83; Stop 107
caaacacagtcgaggatcacttgtt

SEQ ID NO: 47716 - DNA, 25 bp, Artificial
  probe
  misc_feature (1)..(25): SEQ ID NO: 7349; WAN024AA4_at; Start 14; Stop 38
taaatcttagaacggcttaaaatca

SEQ ID NO: 47717 - DNA, 25 bp, Artificial
  probe
  misc_feature (1)..(25): SEQ ID NO: 7349; WAN024AA4_at; Start 20; Stop 44
ttagaacggcttaaaatcagatatg

SEQ ID NO: 47718 - DNA, 25 bp, Artificial
  probe
  misc_feature (1)..(25): SEQ ID NO: 7349; WAN024AA4_at; Start 1; Stop 25
tagaaacataggttaaatcttagaa

SEQ ID NO: 47719 - DNA, 25 bp, Artificial
  probe
  misc_feature (1)..(25): SEQ ID NO: 7349; WAN024AA4_at; Start 86; Stop 110
acacagtcgaggatcacttgttagg

SEQ ID NO: 47720 - DNA, 25 bp, Artificial
  probe
  misc_feature (1)..(25): SEQ ID NO: 7349; WAN024AA4_at; Start 36; Stop 60
tcagatatgataaagggaaatagtc

SEQ ID NO: 47721 - DNA, 25 bp, Artificial
  probe
  misc_feature (1)..(25): SEQ ID NO: 7349; WAN024AA4_at; Start 7; Stop 31
cataggttaaatcttagaacggctt

SEQ ID NO: 47722 - DNA, 25 bp, Artificial
  probe
  misc_feature (1)..(25): SEQ ID NO: 7349; WAN024AA4_at; Start 92; Stop 116
tcgaggatcacttgttaggattaca

SEQ ID NO: 47723 - DNA, 25 bp, Artificial
  probe
  misc_feature (1)..(25): SEQ ID NO: 7349; WAN024AA4_at; Start 88; Stop 112
acagtcgaggatcacttgttaggat

SEQ ID NO: 47724 - DNA, 25 bp, Artificial
  probe
  misc_feature (1)..(25): SEQ ID NO: 7349; WAN024AA4_at; Start 74; Stop 98
taagtgctacaaacacagtcgagga

SEQ ID NO: 47725 - DNA, 25 bp, Artificial
  probe
  misc_feature (1)..(25): SEQ ID NO: 7349; WAN024AA4_at; Start 81; Stop 105
tacaaacacagtcgaggatcacttg

SEQ ID NO: 47726 - DNA, 25 bp, Artificial
  probe
  misc_feature (1)..(25): SEQ ID NO: 7349; WAN024AA4_at; Start 37; Stop 61
cagatatgataaagggaaatagtct

SEQ ID NO: 47727 - DNA, 25 bp, Artificial
  probe
  misc_feature (1)..(25): SEQ ID NO: 7355; WAN024AA5_at; Start 310; Stop 334
caagctaaaggatatcttatctagg

SEQ ID NO: 47728 - DNA, 25 bp, Artificial
  probe
  misc_feature (1)..(25): SEQ ID NO: 7355; WAN024AA5_at; Start 272; Stop 296
tgaactcatattataggtgtagact

SEQ ID NO: 47729 - DNA, 25 bp, Artificial
  probe
  misc_feature (1)..(25): SEQ ID NO: 7355; WAN024AA5_at; Start 86; Stop 110
gaaagtgagattgagtaaatctttc

SEQ ID NO: 47730 - DNA, 25 bp, Artificial
  probe
  misc_feature (1)..(25): SEQ ID NO: 7355; WAN024AA5_at; Start 230; Stop 254
ggtgtttgacattactatagatagg

SEQ ID NO: 47731 - DNA, 25 bp, Artificial
  probe
  misc_feature (1)..(25): SEQ ID NO: 7355; WAN024AA5_at; Start 194; Stop 218
catttcttgaatgaattggagagat

SEQ ID NO: 47732 - DNA, 25 bp, Artificial
  probe
  misc_feature (1)..(25): SEQ ID NO: 7355; WAN024AA5_at; Start 132; Stop 156
caagatttttgaacatctgataata

SEQ ID NO: 47733 - DNA, 25 bp, Artificial
  probe
  misc_feature (1)..(25): SEQ ID NO: 7355; WAN024AA5_at; Start 21; Stop 45
tagctcggtcattagattctattga

SEQ ID NO: 47734 - DNA, 25 bp, Artificial
  probe
  misc_feature (1)..(25): SEQ ID NO: 7355; WAN024AA5_at; Start 237; Stop 261
gacattactatagataggatttagc

SEQ ID NO: 47735 - DNA, 25 bp, Artificial
  probe
  misc_feature (1)..(25): SEQ ID NO: 7355; WAN024AA5_at; Start 101; Stop 125
taaatctttctatctatataacgca

SEQ ID NO: 47736 - DNA, 25 bp, Artificial
  probe
  misc_feature (1)..(25): SEQ ID NO: 7355; WAN024AA5_at; Start 333; Stop 357
ggtaactaagtgctataacaagata

SEQ ID NO: 47737 - DNA, 25 bp, Artificial
  probe
  misc_feature (1)..(25): SEQ ID NO: 7355; WAN024AA5_at; Start 138; Stop 162
ttttgaacatctgataatatgcact

SEQ ID NO: 47738 - DNA, 25 bp, Artificial
  probe
  misc_feature (1)..(25): SEQ ID NO: 7355; WAN024AA5_at; Start 302; Stop 326
tttggaagcaagctaaaggatatct

SEQ ID NO: 47739 - DNA, 25 bp, Artificial
  probe
  misc_feature (1)..(25): SEQ ID NO: 7355; WAN024AA5_at; Start 350; Stop 374
acaagatatattggtggagttagta

SEQ ID NO: 47740 - DNA, 25 bp, Artificial
  probe
  misc_feature (1)..(25): SEQ ID NO: 7355; WAN024AA5_at; Start 306; Stop 330
gaagcaagctaaaggatatcttatc

SEQ ID NO: 47741 - DNA, 25 bp, Artificial
  probe
  misc_feature (1)..(25): SEQ ID NO: 7355; WAN024AA5_at; Start 4; Stop 28
taatctgtgtaatacagtagctcgg

SEQ ID NO: 47742 - DNA, 25 bp, Artificial
  probe
  misc_feature (1)..(25): SEQ ID NO: 7355; WAN024AA5_at; Start 254; Stop 278
gatttagcagtactaatatgaactc

SEQ ID NO: 47743 - DNA, 25 bp, Artificial
  probe
  misc_feature (1)..(25): SEQ ID NO: 7355; WAN024AA5_at; Start 244; Stop 268
ctatagataggatttagcagtacta

SEQ ID NO: 47744 - DNA, 25 bp, Artificial
  probe
  misc_feature (1)..(25): SEQ ID NO: 7355; WAN024AA5_at; Start 344; Stop 368
gctataacaagatatattggtggag

SEQ ID NO: 47745 - DNA, 25 bp, Artificial
  probe
  misc_feature (1)..(25): SEQ ID NO: 7355; WAN024AA5_at; Start 199; Stop 223
cttgaatgaattggagagatgactt

SEQ ID NO: 47746 - DNA, 25 bp, Artificial
  probe
  misc_feature (1)..(25): SEQ ID NO: 7355; WAN024AA5_at; Start 276; Stop 300
ctcatattataggtgtagacttaaa

SEQ ID NO: 47747 - DNA, 25 bp, Artificial
  probe
  misc_feature (1)..(25): SEQ ID NO: 7355; WAN024AA5_at; Start 202; Stop 226
gaatgaattggagagatgactttat

SEQ ID NO: 47748 - DNA, 25 bp, Artificial
  probe
  misc_feature (1)..(25): SEQ ID NO: 7355; WAN024AA5_at; Start 7; Stop 31
tctgtgtaatacagtagctcggtca

SEQ ID NO: 47749 - DNA, 25 bp, Artificial
  probe
  misc_feature (1)..(25): SEQ ID NO: 7355; WAN024AA5_at; Start 297; Stop 321
taaattttggaagcaagctaaagga

SEQ ID NO: 47750 - DNA, 25 bp, Artificial
  probe
  misc_feature (1)..(25): SEQ ID NO: 7355; WAN024AA5_at; Start 216; Stop 240
gatgactttatttaggtgtttgaca

SEQ ID NO: 47751 - DNA, 25 bp, Artificial
  probe
  misc_feature (1)..(25): SEQ ID NO: 7355; WAN024AA5_at; Start 109; Stop 133
tctatctatataacgcatattatca

SEQ ID NO: 47752 - DNA, 25 bp, Artificial
  probe
  misc_feature (1)..(25): SEQ ID NO: 7355; WAN024AA5_at; Start 71; Stop 95
gaaaaaactcaatttgaaagtgaga

SEQ ID NO: 47753 - DNA, 25 bp, Artificial
  probe
  misc_feature (1)..(25): SEQ ID NO: 7355; WAN024AA5_at; Start 16; Stop 40
tacagtagctcggtcattagattct

SEQ ID NO: 47754 - DNA, 25 bp, Artificial
  probe
  misc_feature (1)..(25): SEQ ID NO: 7355; WAN024AA5_at; Start 258; Stop 282
tagcagtactaatatgaactcatat

SEQ ID NO: 47755 - DNA, 25 bp, Artificial
  probe
  misc_feature (1)..(25): SEQ ID NO: 7355; WAN024AA5_at; Start 26; Stop 50
cggtcattagattctattgaagata

SEQ ID NO: 47756 - DNA, 25 bp, Artificial
  probe
  misc_feature (1)..(25): SEQ ID NO: 7355; WAN024AA5_at; Start 293; Stop 317
gacttaaattttggaagcaagctaa

SEQ ID NO: 47757 - DNA, 25 bp, Artificial
  probe
  misc_feature (1)..(25): SEQ ID NO: 7355; WAN024AA5_at; Start 11; Stop 35
tgtaatacagtagctcggtcattag

SEQ ID NO: 47758 - DNA, 25 bp, Artificial
  probe
  misc_feature (1)..(25): SEQ ID NO: 7355; WAN024AA5_at; Start 287; Stop 311
ggtgtagacttaaattttggaagca

SEQ ID NO: 47759 - DNA, 25 bp, Artificial
  probe
  misc_feature (1)..(25): SEQ ID NO: 7355; WAN024AA5_at; Start 180; Stop 204
tttttgcctttcttcatttcttgaa

SEQ ID NO: 47760 - DNA, 25 bp, Artificial
  probe
  misc_feature (1)..(25): SEQ ID NO: 7355; WAN024AA5_at; Start 145; Stop 169
catctgataatatgcacttttctta

SEQ ID NO: 47761 - DNA, 25 bp, Artificial
  probe
  misc_feature (1)..(25): SEQ ID NO: 7347; WAN024AA6_at; Start 339; Stop 363
tctaatgaccgagctactgtattac

SEQ ID NO: 47762 - DNA, 25 bp, Artificial
  probe
  misc_feature (1)..(25): SEQ ID NO: 7347; WAN024AA6_at; Start 1; Stop 25
tactaactccaccaatatatcttgt

SEQ ID NO: 47763 - DNA, 25 bp, Artificial
  probe
  misc_feature (1)..(25): SEQ ID NO: 7347; WAN024AA6_at; Start 132; Stop 156
taatgtcaaacacctaaataaagtc

SEQ ID NO: 47764 - DNA, 25 bp, Artificial
  probe
  misc_feature (1)..(25): SEQ ID NO: 7347; WAN024AA6_at; Start 64; Stop 88
tgcttccaaaatttaagtctacacc

SEQ ID NO: 47765 - DNA, 25 bp, Artificial
  probe
  misc_feature (1)..(25): SEQ ID NO: 7347; WAN024AA6_at; Start 219; Stop 243
tattatcagatgttcaaaaatcttg

SEQ ID NO: 47766 - DNA, 25 bp, Artificial
  probe
  misc_feature (1)..(25): SEQ ID NO: 7347; WAN024AA6_at; Start 142; Stop 166
cacctaaataaagtcatctctccaa

SEQ ID NO: 47767 - DNA, 25 bp, Artificial
  probe
  misc_feature (1)..(25): SEQ ID NO: 7347; WAN024AA6_at; Start 335; Stop 359
agaatctaatgaccgagctactgta

SEQ ID NO: 47768 - DNA, 25 bp, Artificial
  probe
  misc_feature (1)..(25): SEQ ID NO: 7347; WAN024AA6_at; Start 135; Stop 159
tgtcaaacacctaaataaagtcatc

SEQ ID NO: 47769 - DNA, 25 bp, Artificial
  probe
  misc_feature (1)..(25): SEQ ID NO: 7347; WAN024AA6_at; Start 273; Stop 297
tactcaatctcactttcaaattgag

SEQ ID NO: 47770 - DNA, 25 bp, Artificial
  probe
  misc_feature (1)..(25): SEQ ID NO: 7347; WAN024AA6_at; Start 41; Stop 65
cctagataagatatcctttagcttg

SEQ ID NO: 47771 - DNA, 25 bp, Artificial
  probe
  misc_feature (1)..(25): SEQ ID NO: 7347; WAN024AA6_at; Start 342; Stop 366
aatgaccgagctactgtattacaca

SEQ ID NO: 47772 - DNA, 25 bp, Artificial
  probe
  misc_feature (1)..(25): SEQ ID NO: 7347; WAN024AA6_at; Start 121; Stop 145
cctatctatagtaatgtcaaacacc

SEQ ID NO: 47773 - DNA, 25 bp, Artificial
  probe
  misc_feature (1)..(25): SEQ ID NO: 7347; WAN024AA6_at; Start 123; Stop 147
tatctatagtaatgtcaaacaccta

SEQ ID NO: 47774 - DNA, 25 bp, Artificial
  probe
  misc_feature (1)..(25): SEQ ID NO: 7347; WAN024AA6_at; Start 9; Stop 33
ccaccaatatatcttgttatagcac

SEQ ID NO: 47775 - DNA, 25 bp, Artificial
  probe
  misc_feature (1)..(25): SEQ ID NO: 7347; WAN024AA6_at; Start 331; Stop 355
caatagaatctaatgaccgagctac

SEQ ID NO: 47776 - DNA, 25 bp, Artificial
  probe
  misc_feature (1)..(25): SEQ ID NO: 7347; WAN024AA6_at; Start 47; Stop 71
taagatatcctttagcttgcttcca

SEQ ID NO: 47777 - DNA, 25 bp, Artificial
  probe
  misc_feature (1)..(25): SEQ ID NO: 7347; WAN024AA6_at; Start 18; Stop 42
tatcttgttatagcacttagttacc

SEQ ID NO: 47778 - DNA, 25 bp, Artificial
  probe
  misc_feature (1)..(25): SEQ ID NO: 7347; WAN024AA6_at; Start 206; Stop 230
taagaaaagtgcatattatcagatg

SEQ ID NO: 47779 - DNA, 25 bp, Artificial
  probe
  misc_feature (1)..(25): SEQ ID NO: 7347; WAN024AA6_at; Start 325; Stop 349
tatcttcaatagaatctaatgaccg

SEQ ID NO: 47780 - DNA, 25 bp, Artificial
  probe
  misc_feature (1)..(25): SEQ ID NO: 7347; WAN024AA6_at; Start 251; Stop 275
gcgttatatagatagaaagatttac

SEQ ID NO: 47781 - DNA, 25 bp, Artificial
  probe
  misc_feature (1)..(25): SEQ ID NO: 7347; WAN024AA6_at; Start 50; Stop 74
gatatcctttagcttgcttccaaaa

SEQ ID NO: 47782 - DNA, 25 bp, Artificial
  probe
  misc_feature (1)..(25): SEQ ID NO: 7347; WAN024AA6_at; Start 197; Stop 221
tctttaaaataagaaaagtgcatat

SEQ ID NO: 47783 - DNA, 25 bp, Artificial
  probe
  misc_feature (1)..(25): SEQ ID NO: 7347; WAN024AA6_at; Start 75; Stop 99
tttaagtctacacctataatatgag

SEQ ID NO: 47784 - DNA, 25 bp, Artificial
  probe
  misc_feature (1)..(25): SEQ ID NO: 7347; WAN024AA6_at; Start 107; Stop 131
tagtactgctaaatcctatctatag

SEQ ID NO: 47785 - DNA, 25 bp, Artificial
  probe
  misc_feature (1)..(25): SEQ ID NO: 7347; WAN024AA6_at; Start 79; Stop 103
agtctacacctataatatgagttca

SEQ ID NO: 47786 - DNA, 25 bp, Artificial
  probe
  misc_feature (1)..(25): SEQ ID NO: 7347; WAN024AA6_at; Start 261; Stop 285
gatagaaagatttactcaatctcac

SEQ ID NO: 47787 - DNA, 25 bp, Artificial
  probe
  misc_feature (1)..(25): SEQ ID NO: 7347; WAN024AA6_at; Start 58; Stop 82
ttagcttgcttccaaaatttaagtc

SEQ ID NO: 47788 - DNA, 25 bp, Artificial
  probe
  misc_feature (1)..(25): SEQ ID NO: 7347; WAN024AA6_at; Start 94; Stop 118
tatgagttcatattagtactgctaa

SEQ ID NO: 47789 - DNA, 25 bp, Artificial
  probe
  misc_feature (1)..(25): SEQ ID NO: 7347; WAN024AA6_at; Start 160; Stop 184
tctccaattcattcaagaaatgaag

SEQ ID NO: 47790 - DNA, 25 bp, Artificial
  probe
  misc_feature (1)..(25): SEQ ID NO: 7347; WAN024AA6_at; Start 348; Stop 372
cgagctactgtattacacagattaa

SEQ ID NO: 47791 - DNA, 25 bp, Artificial
  probe
  misc_feature (1)..(25): SEQ ID NO: 7347; WAN024AA6_at; Start 152; Stop 176
aagtcatctctccaattcattcaag

SEQ ID NO: 47792 - DNA, 25 bp, Artificial
  probe
  misc_feature (1)..(25): SEQ ID NO: 7347; WAN024AA6_at; Start 243; Stop 267
gataatatgcgttatatagatagaa

SEQ ID NO: 47793 - DNA, 25 bp, Artificial
  probe
  misc_feature (1)..(25): SEQ ID NO: 7347; WAN024AA6_at; Start 345; Stop 369
gaccgagctactgtattacacagat

SEQ ID NO: 47794 - DNA, 25 bp, Artificial
  probe
  misc_feature (1)..(25): SEQ ID NO: 7347; WAN024AA6_at; Start 212; Stop 236
aagtgcatattatcagatgttcaaa

SEQ ID NO: 47795 - DNA, 25 bp, Artificial
  probe
  misc_feature (1)..(25): SEQ ID NO: 193; WAN024AA7_at; Start 27; Stop 51
gggcaagttgcatattagtcagtat

SEQ ID NO: 47796 - DNA, 25 bp, Artificial
  probe
  misc_feature (1)..(25): SEQ ID NO: 193; WAN024AA7_at; Start 187; Stop 211
tcatttattgctagtggtttagaac

SEQ ID NO: 47797 - DNA, 25 bp, Artificial
  probe
  misc_feature (1)..(25): SEQ ID NO: 193; WAN024AA7_at; Start 44; Stop 68
gtcagtatgtatcttattccactta

SEQ ID NO: 47798 - DNA, 25 bp, Artificial
  probe
  misc_feature (1)..(25): SEQ ID NO: 193; WAN024AA7_at; Start 179; Stop 203
gttcgcaatcatttattgctagtgg

SEQ ID NO: 47799 - DNA, 25 bp, Artificial
  probe
  misc_feature (1)..(25): SEQ ID NO: 193; WAN024AA7_at; Start 61; Stop 85
tccacttattaaaactgagaataaa

SEQ ID NO: 47800 - DNA, 25 bp, Artificial
  probe
  misc_feature (1)..(25): SEQ ID NO: 193; WAN024AA7_at; Start 117; Stop 141
tattgctaattggaattgcgttact

SEQ ID NO: 47801 - DNA, 25 bp, Artificial
  probe
  misc_feature (1)..(25): SEQ ID NO: 193; WAN024AA7_at; Start 160; Stop 184
tttgaaatagtattagtgagttcgc

SEQ ID NO: 47802 - DNA, 25 bp, Artificial
  probe
  misc_feature (1)..(25): SEQ ID NO: 193; WAN024AA7_at; Start 98; Stop 122
cttttatttatattaggtgtattgc

SEQ ID NO: 47803 - DNA, 25 bp, Artificial
  probe
  misc_feature (1)..(25): SEQ ID NO: 193; WAN024AA7_at; Start 210; Stop 234
actgttaagtttcaaacaataattg

SEQ ID NO: 47804 - DNA, 25 bp, Artificial
  probe
  misc_feature (1)..(25): SEQ ID NO: 193; WAN024AA7_at; Start 173; Stop 197
tagtgagttcgcaatcatttattgc

SEQ ID NO: 47805 - DNA, 25 bp, Artificial
  probe
  misc_feature (1)..(25): SEQ ID NO: 193; WAN024AA7_at; Start 111; Stop 135
taggtgtattgctaattggaattgc

SEQ ID NO: 47806 - DNA, 25 bp, Artificial
  probe
  misc_feature (1)..(25): SEQ ID NO: 193; WAN024AA7_at; Start 122; Stop 146
ctaattggaattgcgttactaagtc

SEQ ID NO: 47807 - DNA, 25 bp, Artificial
  probe
  misc_feature (1)..(25): SEQ ID NO: 193; WAN024AA7_at; Start 120; Stop 144
tgctaattggaattgcgttactaag

SEQ ID NO: 47808 - DNA, 25 bp, Artificial
  probe
  misc_feature (1)..(25): SEQ ID NO: 193; WAN024AA7_at; Start 206; Stop 230
tagaactgttaagtttcaaacaata

SEQ ID NO: 47809 - DNA, 25 bp, Artificial
  probe
  misc_feature (1)..(25): SEQ ID NO: 193; WAN024AA7_at; Start 127; Stop 151
tggaattgcgttactaagtcaaaaa

SEQ ID NO: 47810 - DNA, 25 bp, Artificial
  probe
  misc_feature (1)..(25): SEQ ID NO: 193; WAN024AA7_at; Start 162; Stop 186
tgaaatagtattagtgagttcgcaa

SEQ ID NO: 47811 - DNA, 25 bp, Artificial
  probe
  misc_feature (1)..(25): SEQ ID NO: 193; WAN024AA7_at; Start 176; Stop 200
tgagttcgcaatcatttattgctag

SEQ ID NO: 47812 - DNA, 25 bp, Artificial
  probe
  misc_feature (1)..(25): SEQ ID NO: 193; WAN024AA7_at; Start 167; Stop 191
tagtattagtgagttcgcaatcatt

SEQ ID NO: 47813 - DNA, 25 bp, Artificial
  probe
  misc_feature (1)..(25): SEQ ID NO: 193; WAN024AA7_at; Start 184; Stop 208
caatcatttattgctagtggtttag

SEQ ID NO: 47814 - DNA, 25 bp, Artificial
  probe
  misc_feature (1)..(25): SEQ ID NO: 193; WAN024AA7_at; Start 192; Stop 216
tattgctagtggtttagaactgtta

SEQ ID NO: 47815 - DNA, 25 bp, Artificial
  probe
  misc_feature (1)..(25): SEQ ID NO: 193; WAN024AA7_at; Start 124; Stop 148
aattggaattgcgttactaagtcaa

SEQ ID NO: 47816 - DNA, 25 bp, Artificial
  probe
  misc_feature (1)..(25): SEQ ID NO: 193; WAN024AA7_at; Start 14; Stop 38
tttgccattataggggcaagttgca

SEQ ID NO: 47817 - DNA, 25 bp, Artificial
  probe
  misc_feature (1)..(25): SEQ ID NO: 193; WAN024AA7_at; Start 30; Stop 54
caagttgcatattagtcagtatgta

SEQ ID NO: 47818 - DNA, 25 bp, Artificial
  probe
  misc_feature (1)..(25): SEQ ID NO: 193; WAN024AA7_at; Start 42; Stop 66
tagtcagtatgtatcttattccact

SEQ ID NO: 47819 - DNA, 25 bp, Artificial
  probe
  misc_feature (1)..(25): SEQ ID NO: 193; WAN024AA7_at; Start 113; Stop 137
ggtgtattgctaattggaattgcgt

SEQ ID NO: 47820 - DNA, 25 bp, Artificial
  probe
  misc_feature (1)..(25): SEQ ID NO: 193; WAN024AA7_at; Start 4; Stop 28
cagaataatatttgccattataggg

SEQ ID NO: 47821 - DNA, 25 bp, Artificial
  probe
  misc_feature (1)..(25): SEQ ID NO: 193; WAN024AA7_at; Start 188; Stop 212
catttattgctagtggtttagaact

SEQ ID NO: 47822 - DNA, 25 bp, Artificial
  probe
  misc_feature (1)..(25): SEQ ID NO: 193; WAN024AA7_at; Start 75; Stop 99
ctgagaataaattttgggaaatact

SEQ ID NO: 47823 - DNA, 25 bp, Artificial
  probe
  misc_feature (1)..(25): SEQ ID NO: 193; WAN024AA7_at; Start 55; Stop 79
tcttattccacttattaaaactgag

SEQ ID NO: 47824 - DNA, 25 bp, Artificial
  probe
  misc_feature (1)..(25): SEQ ID NO: 193; WAN024AA7_at; Start 57; Stop 81
ttattccacttattaaaactgagaa

SEQ ID NO: 47825 - DNA, 25 bp, Artificial
  probe
  misc_feature (1)..(25): SEQ ID NO: 193; WAN024AA7_at; Start 195; Stop 219
tgctagtggtttagaactgttaagt

SEQ ID NO: 47826 - DNA, 25 bp, Artificial
  probe
  misc_feature (1)..(25): SEQ ID NO: 193; WAN024AA7_at; Start 39; Stop 63
tattagtcagtatgtatcttattcc

SEQ ID NO: 47827 - DNA, 25 bp, Artificial
  probe
  misc_feature (1)..(25): SEQ ID NO: 193; WAN024AA7_at; Start 164; Stop 188
aaatagtattagtgagttcgcaatc

SEQ ID NO: 47828 - DNA, 25 bp, Artificial
  probe
  misc_feature (1)..(25): SEQ ID NO: 193; WAN024AA7_at; Start 169; Stop 193
gtattagtgagttcgcaatcattta

SEQ ID NO: 47829 - DNA, 25 bp, Artificial
  probe
  misc_feature (1)..(25): SEQ ID NO: 5963; WAN024AA8_at; Start 318; Stop 342
taagatacatactgactaatatgca

SEQ ID NO: 47830 - DNA, 25 bp, Artificial
  probe
  misc_feature (1)..(25): SEQ ID NO: 5963; WAN024AA8_at; Start 189; Stop 213
gattgcgaactcactaatactattt

SEQ ID NO: 47831 - DNA, 25 bp, Artificial
  probe
  misc_feature (1)..(25): SEQ ID NO: 5963; WAN024AA8_at; Start 339; Stop 363
tgcaacttgcccctataatggcaaa

SEQ ID NO: 47832 - DNA, 25 bp, Artificial
  probe
  misc_feature (1)..(25): SEQ ID NO: 5963; WAN024AA8_at; Start 297; Stop 321
tctcagttttaataagtggaataag

SEQ ID NO: 47833 - DNA, 25 bp, Artificial
  probe
  misc_feature (1)..(25): SEQ ID NO: 5963; WAN024AA8_at; Start 255; Stop 279
gcaatacacctaatataaataaaag

SEQ ID NO: 47834 - DNA, 25 bp, Artificial
  probe
  misc_feature (1)..(25): SEQ ID NO: 5963; WAN024AA8_at; Start 314; Stop 338
ggaataagatacatactgactaata

SEQ ID NO: 47835 - DNA, 25 bp, Artificial
  probe
  misc_feature (1)..(25): SEQ ID NO: 5963; WAN024AA8_at; Start 278; Stop 302
agtatttcccaaaatttattctcag

SEQ ID NO: 47836 - DNA, 25 bp, Artificial
  probe
  misc_feature (1)..(25): SEQ ID NO: 5963; WAN024AA8_at; Start 312; Stop 336
gtggaataagatacatactgactaa

SEQ ID NO: 47837 - DNA, 25 bp, Artificial
  probe
  misc_feature (1)..(25): SEQ ID NO: 5963; WAN024AA8_at; Start 166; Stop 190
gttctaaaccactagcaataaatga

SEQ ID NO: 47838 - DNA, 25 bp, Artificial
  probe
  misc_feature (1)..(25): SEQ ID NO: 5963; WAN024AA8_at; Start 321; Stop 345
gatacatactgactaatatgcaact

SEQ ID NO: 47839 - DNA, 25 bp, Artificial
  probe
  misc_feature (1)..(25): SEQ ID NO: 5963; WAN024AA8_at; Start 181; Stop 205
caataaatgattgcgaactcactaa

SEQ ID NO: 47840 - DNA, 25 bp, Artificial
  probe
  misc_feature (1)..(25): SEQ ID NO: 5963; WAN024AA8_at; Start 158; Stop 182
acttaacagttctaaaccactagca

SEQ ID NO: 47841 - DNA, 25 bp, Artificial
  probe
  misc_feature (1)..(25): SEQ ID NO: 5963; WAN024AA8_at; Start 235; Stop 259
tagtaacgcaattccaattagcaat

SEQ ID NO: 47842 - DNA, 25 bp, Artificial
  probe
  misc_feature (1)..(25): SEQ ID NO: 5963; WAN024AA8_at; Start 350; Stop 374
cctataatggcaaatattattctgg

SEQ ID NO: 47843 - DNA, 25 bp, Artificial
  probe
  misc_feature (1)..(25): SEQ ID NO: 5963; WAN024AA8_at; Start 143; Stop 167
caattattgtttgaaacttaacagt

SEQ ID NO: 47844 - DNA, 25 bp, Artificial
  probe
  misc_feature (1)..(25): SEQ ID NO: 5963; WAN024AA8_at; Start 243; Stop 267
caattccaattagcaatacacctaa

SEQ ID NO: 47845 - DNA, 25 bp, Artificial
  probe
  misc_feature (1)..(25): SEQ ID NO: 5963; WAN024AA8_at; Start 186; Stop 210
aatgattgcgaactcactaatacta

SEQ ID NO: 47846 - DNA, 25 bp, Artificial
  probe
  misc_feature (1)..(25): SEQ ID NO: 5963; WAN024AA8_at; Start 334; Stop 358
taatatgcaacttgcccctataatg

SEQ ID NO: 47847 - DNA, 25 bp, Artificial
  probe
  misc_feature (1)..(25): SEQ ID NO: 5963; WAN024AA8_at; Start 346; Stop 370
tgcccctataatggcaaatattatt

SEQ ID NO: 47848 - DNA, 25 bp, Artificial
  probe
  misc_feature (1)..(25): SEQ ID NO: 5963; WAN024AA8_at; Start 193; Stop 217
gcgaactcactaatactatttcaaa

SEQ ID NO: 47849 - DNA, 25 bp, Artificial
  probe
  misc_feature (1)..(25): SEQ ID NO: 5963; WAN024AA8_at; Start 170; Stop 194
taaaccactagcaataaatgattgc

SEQ ID NO: 47850 - DNA, 25 bp, Artificial
  probe
  misc_feature (1)..(25): SEQ ID NO: 5963; WAN024AA8_at; Start 329; Stop 353
ctgactaatatgcaacttgccccta

SEQ ID NO: 47851 - DNA, 25 bp, Artificial
  probe
  misc_feature (1)..(25): SEQ ID NO: 5963; WAN024AA8_at; Start 309; Stop 333
taagtggaataagatacatactgac

SEQ ID NO: 47852 - DNA, 25 bp, Artificial
  probe
  misc_feature (1)..(25): SEQ ID NO: 5963; WAN024AA8_at; Start 161; Stop 185
taacagttctaaaccactagcaata

SEQ ID NO: 47853 - DNA, 25 bp, Artificial
  probe
  misc_feature (1)..(25): SEQ ID NO: 5963; WAN024AA8_at; Start 233; Stop 257
cttagtaacgcaattccaattagca

SEQ ID NO: 47854 - DNA, 25 bp, Artificial
  probe
  misc_feature (1)..(25): SEQ ID NO: 5963; WAN024AA8_at; Start 226; Stop 250
tttttgacttagtaacgcaattcca

SEQ ID NO: 47855 - DNA, 25 bp, Artificial
  probe
  misc_feature (1)..(25): SEQ ID NO: 5963; WAN024AA8_at; Start 241; Stop 265
cgcaattccaattagcaatacacct

SEQ ID NO: 47856 - DNA, 25 bp, Artificial
  probe
  misc_feature (1)..(25): SEQ ID NO: 5963; WAN024AA8_at; Start 331; Stop 355
gactaatatgcaacttgcccctata

SEQ ID NO: 47857 - DNA, 25 bp, Artificial
  probe
  misc_feature (1)..(25): SEQ ID NO: 5963; WAN024AA8_at; Start 341; Stop 365
caacttgcccctataatggcaaata

SEQ ID NO: 47858 - DNA, 25 bp, Artificial
  probe
  misc_feature (1)..(25): SEQ ID NO: 5963; WAN024AA8_at; Start 327; Stop 351
tactgactaatatgcaacttgcccc

SEQ ID NO: 47859 - DNA, 25 bp, Artificial
  probe
  misc_feature (1)..(25): SEQ ID NO: 5963; WAN024AA8_at; Start 178; Stop 202
tagcaataaatgattgcgaactcac

SEQ ID NO: 47860 - DNA, 25 bp, Artificial
  probe
  misc_feature (1)..(25): SEQ ID NO: 5963; WAN024AA8_at; Start 231; Stop 255
gacttagtaacgcaattccaattag

SEQ ID NO: 47861 - DNA, 25 bp, Artificial
  probe
  misc_feature (1)..(25): SEQ ID NO: 5963; WAN024AA8_at; Start 174; Stop 198
ccactagcaataaatgattgcgaac

SEQ ID NO: 47862 - DNA, 25 bp, Artificial
  probe
  misc_feature (1)..(25): SEQ ID NO: 5963; WAN024AA8_at; Start 184; Stop 208
taaatgattgcgaactcactaatac

SEQ ID NO: 47863 - DNA, 25 bp, Artificial
  probe
  misc_feature (1)..(25): SEQ ID NO: 4809; WAN024AA9_at; Start 304; Stop 328
gattgaataactactattactctta

SEQ ID NO: 47864 - DNA, 25 bp, Artificial
  probe
  misc_feature (1)..(25): SEQ ID NO: 4809; WAN024AA9_at; Start 201; Stop 225
taacaacaattgtgatacgatcatc

SEQ ID NO: 47865 - DNA, 25 bp, Artificial
  probe
  misc_feature (1)..(25): SEQ ID NO: 4809; WAN024AA9_at; Start 331; Stop 355
attttatcctccactaacaactcaa

SEQ ID NO: 47866 - DNA, 25 bp, Artificial
  probe
  misc_feature (1)..(25): SEQ ID NO: 4809; WAN024AA9_at; Start 168; Stop 192
tcactgattccctgattttatcaaa

SEQ ID NO: 47867 - DNA, 25 bp, Artificial
  probe
  misc_feature (1)..(25): SEQ ID NO: 4809; WAN024AA9_at; Start 149; Stop 173
taattcaaataacagctaatcactg

SEQ ID NO: 47868 - DNA, 25 bp, Artificial
  probe
  misc_feature (1)..(25): SEQ ID NO: 4809; WAN024AA9_at; Start 111; Stop 135
tttaaaaccagttactgcttgaagc

SEQ ID NO: 47869 - DNA, 25 bp, Artificial
  probe
  misc_feature (1)..(25): SEQ ID NO: 4809; WAN024AA9_at; Start 158; Stop 182
taacagctaatcactgattccctga

SEQ ID NO: 47870 - DNA, 25 bp, Artificial
  probe
  misc_feature (1)..(25): SEQ ID NO: 4809; WAN024AA9_at; Start 260; Stop 284
tccgagataataataaagcaacagc

SEQ ID NO: 47871 - DNA, 25 bp, Artificial
  probe
  misc_feature (1)..(25): SEQ ID NO: 4809; WAN024AA9_at; Start 115; Stop 139
aaaccagttactgcttgaagcttaa

SEQ ID NO: 47872 - DNA, 25 bp, Artificial
  probe
  misc_feature (1)..(25): SEQ ID NO: 4809; WAN024AA9_at; Start 46; Stop 70
caagtgatcgcaggctttgtttagt

SEQ ID NO: 47873 - DNA, 25 bp, Artificial
  probe
  misc_feature (1)..(25): SEQ ID NO: 4809; WAN024AA9_at; Start 415; Stop 439
tataatacatactagaatacaaaat

SEQ ID NO: 47874 - DNA, 25 bp, Artificial
  probe
  misc_feature (1)..(25): SEQ ID NO: 4809; WAN024AA9_at; Start 231; Stop 255
aagaacaacatttaacgaatcaaag

SEQ ID NO: 47875 - DNA, 25 bp, Artificial
  probe
  misc_feature (1)..(25): SEQ ID NO: 4809; WAN024AA9_at; Start 41; Stop 65
cctaacaagtgatcgcaggctttgt

SEQ ID NO: 47876 - DNA, 25 bp, Artificial
  probe
  misc_feature (1)..(25): SEQ ID NO: 4809; WAN024AA9_at; Start 494; Stop 518
cttattaagctcatttcaaaattac

SEQ ID NO: 47877 - DNA, 25 bp, Artificial
  probe
  misc_feature (1)..(25): SEQ ID NO: 4809; WAN024AA9_at; Start 294; Stop 318
tattactaaagattgaataactact

SEQ ID NO: 47878 - DNA, 25 bp, Artificial
  probe
  misc_feature (1)..(25): SEQ ID NO: 4809; WAN024AA9_at; Start 214; Stop 238
gatacgatcatcattataagaacaa

SEQ ID NO: 47879 - DNA, 25 bp, Artificial
  probe
  misc_feature (1)..(25): SEQ ID NO: 4809; WAN024AA9_at; Start 461; Stop 485
ctcctatctttattttctacctaca

SEQ ID NO: 47880 - DNA, 25 bp, Artificial
  probe
  misc_feature (1)..(25): SEQ ID NO: 4809; WAN024AA9_at; Start 281; Stop 305
cagcaagcagtattattactaaaga

SEQ ID NO: 47881 - DNA, 25 bp, Artificial
  probe
  misc_feature (1)..(25): SEQ ID NO: 4809; WAN024AA9_at; Start 489; Stop 513
tacctcttattaagctcatttcaaa

SEQ ID NO: 47882 - DNA, 25 bp, Artificial
  probe
  misc_feature (1)..(25): SEQ ID NO: 4809; WAN024AA9_at; Start 50; Stop 74
tgatcgcaggctttgtttagttacc

SEQ ID NO: 47883 - DNA, 25 bp, Artificial
  probe
  misc_feature (1)..(25): SEQ ID NO: 4809; WAN024AA9_at; Start 53; Stop 77
tcgcaggctttgtttagttacctaa

SEQ ID NO: 47884 - DNA, 25 bp, Artificial
  probe
  misc_feature (1)..(25): SEQ ID NO: 4809; WAN024AA9_at; Start 267; Stop 291
taataataaagcaacagcaagcagt

SEQ ID NO: 47885 - DNA, 25 bp, Artificial
  probe
  misc_feature (1)..(25): SEQ ID NO: 4809; WAN024AA9_at; Start 246; Stop 270
cgaatcaaagtttttccgagataat

SEQ ID NO: 47886 - DNA, 25 bp, Artificial
  probe
  misc_feature (1)..(25): SEQ ID NO: 4809; WAN024AA9_at; Start 119; Stop 143
cagttactgcttgaagcttaacagt

SEQ ID NO: 47887 - DNA, 25 bp, Artificial
  probe
  misc_feature (1)..(25): SEQ ID NO: 4809; WAN024AA9_at; Start 327; Stop 351
taacattttatcctccactaacaac

SEQ ID NO: 47888 - DNA, 25 bp, Artificial
  probe
  misc_feature (1)..(25): SEQ ID NO: 4809; WAN024AA9_at; Start 39; Stop 63
ttcctaacaagtgatcgcaggcttt

SEQ ID NO: 47889 - DNA, 25 bp, Artificial
  probe
  misc_feature (1)..(25): SEQ ID NO: 4809; WAN024AA9_at; Start 126; Stop 150
tgcttgaagcttaacagtttactta

SEQ ID NO: 47890 - DNA, 25 bp, Artificial
  probe
  misc_feature (1)..(25): SEQ ID NO: 4809; WAN024AA9_at; Start 270; Stop 294
taataaagcaacagcaagcagtatt

SEQ ID NO: 47891 - DNA, 25 bp, Artificial
  probe
  misc_feature (1)..(25): SEQ ID NO: 4809; WAN024AA9_at; Start 173; Stop 197
gattccctgattttatcaaatatac

SEQ ID NO: 47892 - DNA, 25 bp, Artificial
  probe
  misc_feature (1)..(25): SEQ ID NO: 4809; WAN024AA9_at; Start 188; Stop 212
tcaaatatactaataacaacaattg

SEQ ID NO: 47893 - DNA, 25 bp, Artificial
  probe
  misc_feature (1)..(25): SEQ ID NO: 4809; WAN024AA9_at; Start 318; Stop 342
tattactcttaacattttatcctcc

SEQ ID NO: 47894 - DNA, 25 bp, Artificial
  probe
  misc_feature (1)..(25): SEQ ID NO: 4809; WAN024AA9_at; Start 277; Stop 301
gcaacagcaagcagtattattacta

SEQ ID NO: 47895 - DNA, 25 bp, Artificial
  probe
  misc_feature (1)..(25): SEQ ID NO: 4809; WAN024AA9_at; Start 218; Stop 242
cgatcatcattataagaacaacatt

SEQ ID NO: 47896 - DNA, 25 bp, Artificial
  probe
  misc_feature (1)..(25): SEQ ID NO: 4809; WAN024AA9_at; Start 140; Stop 164
cagtttacttaattcaaataacagc

SEQ ID NO: 47897 - DNA, 25 bp, Artificial
  probe
  misc_feature (1)..(25): SEQ ID NO: 3793; WAN024AAA_at; Start 5; Stop 29
ttttgaaatgagcttaataagaggt

SEQ ID NO: 47898 - DNA, 25 bp, Artificial
  probe
  misc_feature (1)..(25): SEQ ID NO: 3793; WAN024AAA_at; Start 442; Stop 466
ttaggtaactaaacaaagcctgcga

SEQ ID NO: 47899 - DNA, 25 bp, Artificial
  probe
  misc_feature (1)..(25): SEQ ID NO: 3793; WAN024AAA_at; Start 332; Stop 356
taaaatcagggaatcagtgattagc

SEQ ID NO: 47900 - DNA, 25 bp, Artificial
  probe
  misc_feature (1)..(25): SEQ ID NO: 3793; WAN024AAA_at; Start 294; Stop 318
gatgatcgtatcacaattgttgtta

SEQ ID NO: 47901 - DNA, 25 bp, Artificial
  probe
  misc_feature (1)..(25): SEQ ID NO: 3793; WAN024AAA_at; Start 327; Stop 351
tttgataaaatcagggaatcagtga

SEQ ID NO: 47902 - DNA, 25 bp, Artificial
  probe
  misc_feature (1)..(25): SEQ ID NO: 3793; WAN024AAA_at; Start 173; Stop 197
tagtggaggataaaatgttaagagt

SEQ ID NO: 47903 - DNA, 25 bp, Artificial
  probe
  misc_feature (1)..(25): SEQ ID NO: 3793; WAN024AAA_at; Start 449; Stop 473
actaaacaaagcctgcgatcacttg

SEQ ID NO: 47904 - DNA, 25 bp, Artificial
  probe
  misc_feature (1)..(25): SEQ ID NO: 3793; WAN024AAA_at; Start 355; Stop 379
gctgttatttgaattaagtaaactg

SEQ ID NO: 47905 - DNA, 25 bp, Artificial
  probe
  misc_feature (1)..(25): SEQ ID NO: 3793; WAN024AAA_at; Start 214; Stop 238
tctttagtaataatactgcttgctg

SEQ ID NO: 47906 - DNA, 25 bp, Artificial
  probe
  misc_feature (1)..(25): SEQ ID NO: 3793; WAN024AAA_at; Start 181; Stop 205
gataaaatgttaagagtaatagtag

SEQ ID NO: 47907 - DNA, 25 bp, Artificial
  probe
  misc_feature (1)..(25): SEQ ID NO: 3793; WAN024AAA_at; Start 455; Stop 479
caaagcctgcgatcacttgttagga

SEQ ID NO: 47908 - DNA, 25 bp, Artificial
  probe
  misc_feature (1)..(25): SEQ ID NO: 3793; WAN024AAA_at; Start 346; Stop 370
cagtgattagctgttatttgaatta

SEQ ID NO: 47909 - DNA, 25 bp, Artificial
  probe
  misc_feature (1)..(25): SEQ ID NO: 3793; WAN024AAA_at; Start 320; Stop 344
tagtatatttgataaaatcagggaa

SEQ ID NO: 47910 - DNA, 25 bp, Artificial
  probe
  misc_feature (1)..(25): SEQ ID NO: 3793; WAN024AAA_at; Start 34; Stop 58
tgtaggtagaaaataaagataggag

SEQ ID NO: 47911 - DNA, 25 bp, Artificial
  probe
  misc_feature (1)..(25): SEQ ID NO: 3793; WAN024AAA_at; Start 369; Stop 393
taagtaaactgttaagcttcaagca

SEQ ID NO: 47912 - DNA, 25 bp, Artificial
  probe
  misc_feature (1)..(25): SEQ ID NO: 3793; WAN024AAA_at; Start 384; Stop 408
gcttcaagcagtaactggttttaaa

SEQ ID NO: 47913 - DNA, 25 bp, Artificial
  probe
  misc_feature (1)..(25): SEQ ID NO: 3793; WAN024AAA_at; Start 388; Stop 412
caagcagtaactggttttaaatatt

SEQ ID NO: 47914 - DNA, 25 bp, Artificial
  probe
  misc_feature (1)..(25): SEQ ID NO: 3793; WAN024AAA_at; Start 283; Stop 307
gttcttataatgatgatcgtatcac

SEQ ID NO: 47915 - DNA, 25 bp, Artificial
  probe
  misc_feature (1)..(25): SEQ ID NO: 3793; WAN024AAA_at; Start 249; Stop 273
attatctcggaaaaactttgattcg

SEQ ID NO: 47916 - DNA, 25 bp, Artificial
  probe
  misc_feature (1)..(25): SEQ ID NO: 3793; WAN024AAA_at; Start 191; Stop 215
taagagtaatagtagttattcaatc

SEQ ID NO: 47917 - DNA, 25 bp, Artificial
  probe
  misc_feature (1)..(25): SEQ ID NO: 3793; WAN024AAA_at; Start 222; Stop 246
aataatactgcttgctgttgcttta

SEQ ID NO: 47918 - DNA, 25 bp, Artificial
  probe
  misc_feature (1)..(25): SEQ ID NO: 3793; WAN024AAA_at; Start 165; Stop 189
tgagttgttagtggaggataaaatg

SEQ ID NO: 47919 - DNA, 25 bp, Artificial
  probe
  misc_feature (1)..(25): SEQ ID NO: 3793; WAN024AAA_at; Start 456; Stop 480
aaagcctgcgatcacttgttaggaa

SEQ ID NO: 47920 - DNA, 25 bp, Artificial
  probe
  misc_feature (1)..(25): SEQ ID NO: 3793; WAN024AAA_at; Start 378; Stop 402
tgttaagcttcaagcagtaactggt

SEQ ID NO: 47921 - DNA, 25 bp, Artificial
  probe
  misc_feature (1)..(25): SEQ ID NO: 3793; WAN024AAA_at; Start 338; Stop 362
cagggaatcagtgattagctgttat

SEQ ID NO: 47922 - DNA, 25 bp, Artificial
  probe
  misc_feature (1)..(25): SEQ ID NO: 3793; WAN024AAA_at; Start 47; Stop 71
taaagataggagaaaaagtatgaat

SEQ ID NO: 47923 - DNA, 25 bp, Artificial
  probe
  misc_feature (1)..(25): SEQ ID NO: 3793; WAN024AAA_at; Start 218; Stop 242
tagtaataatactgcttgctgttgc

SEQ ID NO: 47924 - DNA, 25 bp, Artificial
  probe
  misc_feature (1)..(25): SEQ ID NO: 3793; WAN024AAA_at; Start 263; Stop 287
actttgattcgttaaatgttgttct

SEQ ID NO: 47925 - DNA, 25 bp, Artificial
  probe
  misc_feature (1)..(25): SEQ ID NO: 3793; WAN024AAA_at; Start 417; Stop 441
ataagataaaggaaggaagtctaat

SEQ ID NO: 47926 - DNA, 25 bp, Artificial
  probe
  misc_feature (1)..(25): SEQ ID NO: 3793; WAN024AAA_at; Start 447; Stop 471
taactaaacaaagcctgcgatcact

SEQ ID NO: 47927 - DNA, 25 bp, Artificial
  probe
  misc_feature (1)..(25): SEQ ID NO: 3793; WAN024AAA_at; Start 235; Stop 259
gctgttgctttattattatctcgga

SEQ ID NO: 47928 - DNA, 25 bp, Artificial
  probe
  misc_feature (1)..(25): SEQ ID NO: 3793; WAN024AAA_at; Start 445; Stop 469
ggtaactaaacaaagcctgcgatca

SEQ ID NO: 47929 - DNA, 25 bp, Artificial
  probe
  misc_feature (1)..(25): SEQ ID NO: 3793; WAN024AAA_at; Start 277; Stop 301
aatgttgttcttataatgatgatcg

SEQ ID NO: 47930 - DNA, 25 bp, Artificial
  probe
  misc_feature (1)..(25): SEQ ID NO: 3793; WAN024AAA_at; Start 300; Stop 324
cgtatcacaattgttgttattagta

SEQ ID NO: 47931 - DNA, 25 bp, Artificial
  probe
  misc_feature (1)..(25): SEQ ID NO: 485; WAN024AAB_at; Start 12; Stop 36
tctactaggatacagacaaatctgt

SEQ ID NO: 47932 - DNA, 25 bp, Artificial
  probe
  misc_feature (1)..(25): SEQ ID NO: 485; WAN024AAB_at; Start 8; Stop 32
ccactctactaggatacagacaaat

SEQ ID NO: 47933 - DNA, 25 bp, Artificial
  probe
  misc_feature (1)..(25): SEQ ID NO: 485; WAN024AAB_at; Start 9; Stop 33
cactctactaggatacagacaaatc

SEQ ID NO: 47934 - DNA, 25 bp, Artificial
  probe
  misc_feature (1)..(25): SEQ ID NO: 485; WAN024AAB_at; Start 22; Stop 46
tacagacaaatctgttccaaattcc

SEQ ID NO: 47935 - DNA, 25 bp, Artificial
  probe
  misc_feature (1)..(25): SEQ ID NO: 485; WAN024AAB_at; Start 58; Stop 82
tagttttgattgctattataccatt

SEQ ID NO: 47936 - DNA, 25 bp, Artificial
  probe
  misc_feature (1)..(25): SEQ ID NO: 485; WAN024AAB_at; Start 107; Stop 131
ccttacaatccttcgaattttactg

SEQ ID NO: 47937 - DNA, 25 bp, Artificial
  probe
  misc_feature (1)..(25): SEQ ID NO: 485; WAN024AAB_at; Start 23; Stop 47
acagacaaatctgttccaaattccg

SEQ ID NO: 47938 - DNA, 25 bp, Artificial
  probe
  misc_feature (1)..(25): SEQ ID NO: 485; WAN024AAB_at; Start 56; Stop 80
tctagttttgattgctattatacca

SEQ ID NO: 47939 - DNA, 25 bp, Artificial
  probe
  misc_feature (1)..(25): SEQ ID NO: 485; WAN024AAB_at; Start 4; Stop 28
atcaccactctactaggatacagac

SEQ ID NO: 47940 - DNA, 25 bp, Artificial
  probe
  misc_feature (1)..(25): SEQ ID NO: 485; WAN024AAB_at; Start 7; Stop 31
accactctactaggatacagacaaa

SEQ ID NO: 47941 - DNA, 25 bp, Artificial
  probe
  misc_feature (1)..(25): SEQ ID NO: 485; WAN024AAB_at; Start 10; Stop 34
actctactaggatacagacaaatct

SEQ ID NO: 47942 - DNA, 25 bp, Artificial
  probe
  misc_feature (1)..(25): SEQ ID NO: 485; WAN024AAB_at; Start 57; Stop 81
ctagttttgattgctattataccat

SEQ ID NO: 47943 - DNA, 25 bp, Artificial
  probe
  misc_feature (1)..(25): SEQ ID NO: 485; WAN024AAB_at; Start 16; Stop 40
ctaggatacagacaaatctgttcca

SEQ ID NO: 47944 - DNA, 25 bp, Artificial
  probe
  misc_feature (1)..(25): SEQ ID NO: 485; WAN024AAB_at; Start 60; Stop 84
gttttgattgctattataccatttt

SEQ ID NO: 47945 - DNA, 25 bp, Artificial
  probe
  misc_feature (1)..(25): SEQ ID NO: 485; WAN024AAB_at; Start 15; Stop 39
actaggatacagacaaatctgttcc

SEQ ID NO: 47946 - DNA, 25 bp, Artificial
  probe
  misc_feature (1)..(25): SEQ ID NO: 485; WAN024AAB_at; Start 108; Stop 132
cttacaatccttcgaattttactgt

SEQ ID NO: 47947 - DNA, 25 bp, Artificial
  probe
  misc_feature (1)..(25): SEQ ID NO: 485; WAN024AAB_at; Start 13; Stop 37
ctactaggatacagacaaatctgtt

SEQ ID NO: 47948 - DNA, 25 bp, Artificial
  probe
  misc_feature (1)..(25): SEQ ID NO: 485; WAN024AAB_at; Start 2; Stop 26
gtatcaccactctactaggatacag

SEQ ID NO: 47949 - DNA, 25 bp, Artificial
  probe
  misc_feature (1)..(25): SEQ ID NO: 485; WAN024AAB_at; Start 5; Stop 29
tcaccactctactaggatacagaca

SEQ ID NO: 47950 - DNA, 25 bp, Artificial
  probe
  misc_feature (1)..(25): SEQ ID NO: 485; WAN024AAB_at; Start 19; Stop 43
ggatacagacaaatctgttccaaat

SEQ ID NO: 47951 - DNA, 25 bp, Artificial
  probe
  misc_feature (1)..(25): SEQ ID NO: 485; WAN024AAB_at; Start 18; Stop 42
aggatacagacaaatctgttccaaa

SEQ ID NO: 47952 - DNA, 25 bp, Artificial
  probe
  misc_feature (1)..(25): SEQ ID NO: 485; WAN024AAB_at; Start 1; Stop 25
agtatcaccactctactaggataca

SEQ ID NO: 47953 - DNA, 25 bp, Artificial
  probe
  misc_feature (1)..(25): SEQ ID NO: 485; WAN024AAB_at; Start 11; Stop 35
ctctactaggatacagacaaatctg

SEQ ID NO: 47954 - DNA, 25 bp, Artificial
  probe
  misc_feature (1)..(25): SEQ ID NO: 485; WAN024AAB_at; Start 14; Stop 38
tactaggatacagacaaatctgttc

SEQ ID NO: 47955 - DNA, 25 bp, Artificial
  probe
  misc_feature (1)..(25): SEQ ID NO: 485; WAN024AAB_at; Start 6; Stop 30
caccactctactaggatacagacaa

SEQ ID NO: 47956 - DNA, 25 bp, Artificial
  probe
  misc_feature (1)..(25): SEQ ID NO: 485; WAN024AAB_at; Start 25; Stop 49
agacaaatctgttccaaattccgtt

SEQ ID NO: 47957 - DNA, 25 bp, Artificial
  probe
  misc_feature (1)..(25): SEQ ID NO: 485; WAN024AAB_at; Start 21; Stop 45
atacagacaaatctgttccaaattc

SEQ ID NO: 47958 - DNA, 25 bp, Artificial
  probe
  misc_feature (1)..(25): SEQ ID NO: 485; WAN024AAB_at; Start 100; Stop 124
actcttaccttacaatccttcgaat

SEQ ID NO: 47959 - DNA, 25 bp, Artificial
  probe
  misc_feature (1)..(25): SEQ ID NO: 485; WAN024AAB_at; Start 24; Stop 48
cagacaaatctgttccaaattccgt

SEQ ID NO: 47960 - DNA, 25 bp, Artificial
  probe
  misc_feature (1)..(25): SEQ ID NO: 485; WAN024AAB_at; Start 101; Stop 125
ctcttaccttacaatccttcgaatt

SEQ ID NO: 47961 - DNA, 25 bp, Artificial
  probe
  misc_feature (1)..(25): SEQ ID NO: 485; WAN024AAB_at; Start 20; Stop 44
gatacagacaaatctgttccaaatt

SEQ ID NO: 47962 - DNA, 25 bp, Artificial
  probe
  misc_feature (1)..(25): SEQ ID NO: 485; WAN024AAB_at; Start 17; Stop 41
taggatacagacaaatctgttccaa

SEQ ID NO: 47963 - DNA, 25 bp, Artificial
  probe
  misc_feature (1)..(25): SEQ ID NO: 485; WAN024AAB_at; Start 59; Stop 83
agttttgattgctattataccattt

SEQ ID NO: 47964 - DNA, 25 bp, Artificial
  probe
  misc_feature (1)..(25): SEQ ID NO: 485; WAN024AAB_at; Start 3; Stop 27
tatcaccactctactaggatacaga

SEQ ID NO: 47965 - DNA, 25 bp, Artificial
  probe
  misc_feature (1)..(25): SEQ ID NO: 4772; WAN024AAC_at; Start 105; Stop 129
tttggaacagatttgtctgtatcct

SEQ ID NO: 47966 - DNA, 25 bp, Artificial
  probe
  misc_feature (1)..(25): SEQ ID NO: 4772; WAN024AAC_at; Start 112; Stop 136
cagatttgtctgtatcctagtagag

SEQ ID NO: 47967 - DNA, 25 bp, Artificial
  probe
  misc_feature (1)..(25): SEQ ID NO: 4772; WAN024AAC_at; Start 113; Stop 137
agatttgtctgtatcctagtagagt

SEQ ID NO: 47968 - DNA, 25 bp, Artificial
  probe
  misc_feature (1)..(25): SEQ ID NO: 4772; WAN024AAC_at; Start 64; Stop 88
aaatggtataatagcaatcaaaact

SEQ ID NO: 47969 - DNA, 25 bp, Artificial
  probe
  misc_feature (1)..(25): SEQ ID NO: 4772; WAN024AAC_at; Start 68; Stop 92
ggtataatagcaatcaaaactagaa

SEQ ID NO: 47970 - DNA, 25 bp, Artificial
  probe
  misc_feature (1)..(25): SEQ ID NO: 4772; WAN024AAC_at; Start 116; Stop 140
tttgtctgtatcctagtagagtggt

SEQ ID NO: 47971 - DNA, 25 bp, Artificial
  probe
  misc_feature (1)..(25): SEQ ID NO: 4772; WAN024AAC_at; Start 98; Stop 122
aacggaatttggaacagatttgtct

SEQ ID NO: 47972 - DNA, 25 bp, Artificial
  probe
  misc_feature (1)..(25): SEQ ID NO: 4772; WAN024AAC_at; Start 101; Stop 125
ggaatttggaacagatttgtctgta

SEQ ID NO: 47973 - DNA, 25 bp, Artificial
  probe
  misc_feature (1)..(25): SEQ ID NO: 4772; WAN024AAC_at; Start 108; Stop 132
ggaacagatttgtctgtatcctagt

SEQ ID NO: 47974 - DNA, 25 bp, Artificial
  probe
  misc_feature (1)..(25): SEQ ID NO: 4772; WAN024AAC_at; Start 70; Stop 94
tataatagcaatcaaaactagaaaa

SEQ ID NO: 47975 - DNA, 25 bp, Artificial
  probe
  misc_feature (1)..(25): SEQ ID NO: 4772; WAN024AAC_at; Start 16; Stop 40
cagtaaaattcgaaggattgtaagg

SEQ ID NO: 47976 - DNA, 25 bp, Artificial
  probe
  misc_feature (1)..(25): SEQ ID NO: 4772; WAN024AAC_at; Start 107; Stop 131
tggaacagatttgtctgtatcctag

SEQ ID NO: 47977 - DNA, 25 bp, Artificial
  probe
  misc_feature (1)..(25): SEQ ID NO: 4772; WAN024AAC_at; Start 109; Stop 133
gaacagatttgtctgtatcctagta

SEQ ID NO: 47978 - DNA, 25 bp, Artificial
  probe
  misc_feature (1)..(25): SEQ ID NO: 4772; WAN024AAC_at; Start 110; Stop 134
aacagatttgtctgtatcctagtag

SEQ ID NO: 47979 - DNA, 25 bp, Artificial
  probe
  misc_feature (1)..(25): SEQ ID NO: 4772; WAN024AAC_at; Start 67; Stop 91
tggtataatagcaatcaaaactaga

SEQ ID NO: 47980 - DNA, 25 bp, Artificial
  probe
  misc_feature (1)..(25): SEQ ID NO: 4772; WAN024AAC_at; Start 117; Stop 141
ttgtctgtatcctagtagagtggtg

SEQ ID NO: 47981 - DNA, 25 bp, Artificial
  probe
  misc_feature (1)..(25): SEQ ID NO: 4772; WAN024AAC_at; Start 120; Stop 144
tctgtatcctagtagagtggtgata

SEQ ID NO: 47982 - DNA, 25 bp, Artificial
  probe
  misc_feature (1)..(25): SEQ ID NO: 4772; WAN024AAC_at; Start 69; Stop 93
gtataatagcaatcaaaactagaaa

SEQ ID NO: 47983 - DNA, 25 bp, Artificial
  probe
  misc_feature (1)..(25): SEQ ID NO: 4772; WAN024AAC_at; Start 104; Stop 128
atttggaacagatttgtctgtatcc

SEQ ID NO: 47984 - DNA, 25 bp, Artificial
  probe
  misc_feature (1)..(25): SEQ ID NO: 4772; WAN024AAC_at; Start 122; Stop 146
tgtatcctagtagagtggtgatact

SEQ ID NO: 47985 - DNA, 25 bp, Artificial
  probe
  misc_feature (1)..(25): SEQ ID NO: 4772; WAN024AAC_at; Start 121; Stop 145
ctgtatcctagtagagtggtgatac

SEQ ID NO: 47986 - DNA, 25 bp, Artificial
  probe
  misc_feature (1)..(25): SEQ ID NO: 4772; WAN024AAC_at; Start 99; Stop 123
acggaatttggaacagatttgtctg

SEQ ID NO: 47987 - DNA, 25 bp, Artificial
  probe
  misc_feature (1)..(25): SEQ ID NO: 4772; WAN024AAC_at; Start 114; Stop 138
gatttgtctgtatcctagtagagtg

SEQ ID NO: 47988 - DNA, 25 bp, Artificial
  probe
  misc_feature (1)..(25): SEQ ID NO: 4772; WAN024AAC_at; Start 118; Stop 142
tgtctgtatcctagtagagtggtga

SEQ ID NO: 47989 - DNA, 25 bp, Artificial
  probe
  misc_feature (1)..(25): SEQ ID NO: 4772; WAN024AAC_at; Start 23; Stop 47
attcgaaggattgtaaggtaagagt

SEQ ID NO: 47990 - DNA, 25 bp, Artificial
  probe
  misc_feature (1)..(25): SEQ ID NO: 4772; WAN024AAC_at; Start 103; Stop 127
aatttggaacagatttgtctgtatc

SEQ ID NO: 47991 - DNA, 25 bp, Artificial
  probe
  misc_feature (1)..(25): SEQ ID NO: 4772; WAN024AAC_at; Start 63; Stop 87
aaaatggtataatagcaatcaaaac

SEQ ID NO: 47992 - DNA, 25 bp, Artificial
  probe
  misc_feature (1)..(25): SEQ ID NO: 4772; WAN024AAC_at; Start 115; Stop 139
atttgtctgtatcctagtagagtgg

SEQ ID NO: 47993 - DNA, 25 bp, Artificial
  probe
  misc_feature (1)..(25): SEQ ID NO: 4772; WAN024AAC_at; Start 111; Stop 135
acagatttgtctgtatcctagtaga

SEQ ID NO: 47994 - DNA, 25 bp, Artificial
  probe
  misc_feature (1)..(25): SEQ ID NO: 4772; WAN024AAC_at; Start 100; Stop 124
cggaatttggaacagatttgtctgt

SEQ ID NO: 47995 - DNA, 25 bp, Artificial
  probe
  misc_feature (1)..(25): SEQ ID NO: 4772; WAN024AAC_at; Start 22; Stop 46
aattcgaaggattgtaaggtaagag

SEQ ID NO: 47996 - DNA, 25 bp, Artificial
  probe
  misc_feature (1)..(25): SEQ ID NO: 4772; WAN024AAC_at; Start 72; Stop 96
taatagcaatcaaaactagaaaata

SEQ ID NO: 47997 - DNA, 25 bp, Artificial
  probe
  misc_feature (1)..(25): SEQ ID NO: 4772; WAN024AAC_at; Start 75; Stop 99
tagcaatcaaaactagaaaataaaa

SEQ ID NO: 47998 - DNA, 25 bp, Artificial
  probe
  misc_feature (1)..(25): SEQ ID NO: 4772; WAN024AAC_at; Start 119; Stop 143
gtctgtatcctagtagagtggtgat

SEQ ID NO: 47999 - DNA, 25 bp, Artificial
  probe
  misc_feature (1)..(25): SEQ ID NO: 4535; WAN024AAD_at; Start 15; Stop 39
tatatttttgtttcgcagaaagtct

SEQ ID NO: 48000 - DNA, 25 bp, Artificial
  probe
  misc_feature (1)..(25): SEQ ID NO: 4535; WAN024AAD_at; Start 62; Stop 86
ttttacgcttttagcaacaagctta

SEQ ID NO: 48001 - DNA, 25 bp, Artificial
  probe
  misc_feature (1)..(25): SEQ ID NO: 4535; WAN024AAD_at; Start 26; Stop 50
ttcgcagaaagtctattattccttt

SEQ ID NO: 48002 - DNA, 25 bp, Artificial
  probe
  misc_feature (1)..(25): SEQ ID NO: 4535; WAN024AAD_at; Start 22; Stop 46
ttgtttcgcagaaagtctattattc

SEQ ID NO: 48003 - DNA, 25 bp, Artificial
  probe
  misc_feature (1)..(25): SEQ ID NO: 4535; WAN024AAD_at; Start 24; Stop 48
gtttcgcagaaagtctattattcct

SEQ ID NO: 48004 - DNA, 25 bp, Artificial
  probe
  misc_feature (1)..(25): SEQ ID NO: 4535; WAN024AAD_at; Start 16; Stop 40
atatttttgtttcgcagaaagtcta

SEQ ID NO: 48005 - DNA, 25 bp, Artificial
  probe
  misc_feature (1)..(25): SEQ ID NO: 4535; WAN024AAD_at; Start 14; Stop 38
ttatatttttgtttcgcagaaagtc

SEQ ID NO: 48006 - DNA, 25 bp, Artificial
  probe
  misc_feature (1)..(25): SEQ ID NO: 4535; WAN024AAD_at; Start 69; Stop 93
cttttagcaacaagcttacacactc

SEQ ID NO: 48007 - DNA, 25 bp, Artificial
  probe
  misc_feature (1)..(25): SEQ ID NO: 4535; WAN024AAD_at; Start 66; Stop 90
acgcttttagcaacaagcttacaca

SEQ ID NO: 48008 - DNA, 25 bp, Artificial
  probe
  misc_feature (1)..(25): SEQ ID NO: 4535; WAN024AAD_at; Start 28; Stop 52
cgcagaaagtctattattcctttcg

SEQ ID NO: 48009 - DNA, 25 bp, Artificial
  probe
  misc_feature (1)..(25): SEQ ID NO: 4535; WAN024AAD_at; Start 71; Stop 95
tttagcaacaagcttacacactcca

SEQ ID NO: 48010 - DNA, 25 bp, Artificial
  probe
  misc_feature (1)..(25): SEQ ID NO: 4535; WAN024AAD_at; Start 27; Stop 51
tcgcagaaagtctattattcctttc

SEQ ID NO: 48011 - DNA, 25 bp, Artificial
  probe
  misc_feature (1)..(25): SEQ ID NO: 4535; WAN024AAD_at; Start 67; Stop 91
cgcttttagcaacaagcttacacac

SEQ ID NO: 48012 - DNA, 25 bp, Artificial
  probe
  misc_feature (1)..(25): SEQ ID NO: 4535; WAN024AAD_at; Start 68; Stop 92
gcttttagcaacaagcttacacact

SEQ ID NO: 48013 - DNA, 25 bp, Artificial
  probe
  misc_feature (1)..(25): SEQ ID NO: 4535; WAN024AAD_at; Start 30; Stop 54
cagaaagtctattattcctttcgtt

SEQ ID NO: 48014 - DNA, 25 bp, Artificial
  probe
  misc_feature (1)..(25): SEQ ID NO: 4535; WAN024AAD_at; Start 23; Stop 47
tgtttcgcagaaagtctattattcc

SEQ ID NO: 48015 - DNA, 25 bp, Artificial
  probe
  misc_feature (1)..(25): SEQ ID NO: 4535; WAN024AAD_at; Start 65; Stop 89
tacgcttttagcaacaagcttacac

SEQ ID NO: 48016 - DNA, 25 bp, Artificial
  probe
  misc_feature (1)..(25): SEQ ID NO: 4535; WAN024AAD_at; Start 13; Stop 37
attatatttttgtttcgcagaaagt

SEQ ID NO: 48017 - DNA, 25 bp, Artificial
  probe
  misc_feature (1)..(25): SEQ ID NO: 4535; WAN024AAD_at; Start 72; Stop 96
ttagcaacaagcttacacactccac

SEQ ID NO: 48018 - DNA, 25 bp, Artificial
  probe
  misc_feature (1)..(25): SEQ ID NO: 4535; WAN024AAD_at; Start 63; Stop 87
tttacgcttttagcaacaagcttac

SEQ ID NO: 48019 - DNA, 25 bp, Artificial
  probe
  misc_feature (1)..(25): SEQ ID NO: 4535; WAN024AAD_at; Start 25; Stop 49
tttcgcagaaagtctattattcctt

SEQ ID NO: 48020 - DNA, 25 bp, Artificial
  probe
  misc_feature (1)..(25): SEQ ID NO: 4535; WAN024AAD_at; Start 29; Stop 53
gcagaaagtctattattcctttcgt

SEQ ID NO: 48021 - DNA, 25 bp, Artificial
  probe
  misc_feature (1)..(25): SEQ ID NO: 4535; WAN024AAD_at; Start 35; Stop 59
agtctattattcctttcgttccaag

SEQ ID NO: 48022 - DNA, 25 bp, Artificial
  probe
  misc_feature (1)..(25): SEQ ID NO: 4535; WAN024AAD_at; Start 70; Stop 94
ttttagcaacaagcttacacactcc

SEQ ID NO: 48023 - DNA, 25 bp, Artificial
  probe
  misc_feature (1)..(25): SEQ ID NO: 4535; WAN024AAD_at; Start 64; Stop 88
ttacgcttttagcaacaagcttaca

SEQ ID NO: 48024 - DNA, 25 bp, Artificial
  probe
  misc_feature (1)..(25): SEQ ID NO: 4136; WAN024AAE_at; Start 59; Stop 83
gactttctgcgaaacaaaaatataa

SEQ ID NO: 48025 - DNA, 25 bp, Artificial
  probe
  misc_feature (1)..(25): SEQ ID NO: 4136; WAN024AAE_at; Start 44; Stop 68
acgaaaggaataatagactttctgc

SEQ ID NO: 48026 - DNA, 25 bp, Artificial
  probe
  misc_feature (1)..(25): SEQ ID NO: 4136; WAN024AAE_at; Start 9; Stop 33
tgtaagcttgttgctaaaagcgtaa

SEQ ID NO: 48027 - DNA, 25 bp, Artificial
  probe
  misc_feature (1)..(25): SEQ ID NO: 4136; WAN024AAE_at; Start 2; Stop 26
tggagtgtgtaagcttgttgctaaa

SEQ ID NO: 48028 - DNA, 25 bp, Artificial
  probe
  misc_feature (1)..(25): SEQ ID NO: 4136; WAN024AAE_at; Start 8; Stop 32
gtgtaagcttgttgctaaaagcgta

SEQ ID NO: 48029 - DNA, 25 bp, Artificial
  probe
  misc_feature (1)..(25): SEQ ID NO: 4136; WAN024AAE_at; Start 47; Stop 71
aaaggaataatagactttctgcgaa

SEQ ID NO: 48030 - DNA, 25 bp, Artificial
  probe
  misc_feature (1)..(25): SEQ ID NO: 4136; WAN024AAE_at; Start 1; Stop 25
gtggagtgtgtaagcttgttgctaa

SEQ ID NO: 48031 - DNA, 25 bp, Artificial
  probe
  misc_feature (1)..(25): SEQ ID NO: 4136; WAN024AAE_at; Start 60; Stop 84
actttctgcgaaacaaaaatataat

SEQ ID NO: 48032 - DNA, 25 bp, Artificial
  probe
  misc_feature (1)..(25): SEQ ID NO: 4136; WAN024AAE_at; Start 3; Stop 27
ggagtgtgtaagcttgttgctaaaa

SEQ ID NO: 48033 - DNA, 25 bp, Artificial
  probe
  misc_feature (1)..(25): SEQ ID NO: 4136; WAN024AAE_at; Start 43; Stop 67
aacgaaaggaataatagactttctg

SEQ ID NO: 48034 - DNA, 25 bp, Artificial
  probe
  misc_feature (1)..(25): SEQ ID NO: 4136; WAN024AAE_at; Start 51; Stop 75
gaataatagactttctgcgaaacaa

SEQ ID NO: 48035 - DNA, 25 bp, Artificial
  probe
  misc_feature (1)..(25): SEQ ID NO: 4136; WAN024AAE_at; Start 45; Stop 69
cgaaaggaataatagactttctgcg

SEQ ID NO: 48036 - DNA, 25 bp, Artificial
  probe
  misc_feature (1)..(25): SEQ ID NO: 4136; WAN024AAE_at; Start 46; Stop 70
gaaaggaataatagactttctgcga

SEQ ID NO: 48037 - DNA, 25 bp, Artificial
  probe
  misc_feature (1)..(25): SEQ ID NO: 4136; WAN024AAE_at; Start 11; Stop 35
taagcttgttgctaaaagcgtaaaa

SEQ ID NO: 48038 - DNA, 25 bp, Artificial
  probe
  misc_feature (1)..(25): SEQ ID NO: 4136; WAN024AAE_at; Start 38; Stop 62
cttggaacgaaaggaataatagact

SEQ ID NO: 48039 - DNA, 25 bp, Artificial
  probe
  misc_feature (1)..(25): SEQ ID NO: 4136; WAN024AAE_at; Start 6; Stop 30
gtgtgtaagcttgttgctaaaagcg

SEQ ID NO: 48040 - DNA, 25 bp, Artificial
  probe
  misc_feature (1)..(25): SEQ ID NO: 4136; WAN024AAE_at; Start 7; Stop 31
tgtgtaagcttgttgctaaaagcgt

SEQ ID NO: 48041 - DNA, 25 bp, Artificial
  probe
  misc_feature (1)..(25): SEQ ID NO: 4136; WAN024AAE_at; Start 49; Stop 73
aggaataatagactttctgcgaaac

SEQ ID NO: 48042 - DNA, 25 bp, Artificial
  probe
  misc_feature (1)..(25): SEQ ID NO: 4136; WAN024AAE_at; Start 50; Stop 74
ggaataatagactttctgcgaaaca

SEQ ID NO: 48043 - DNA, 25 bp, Artificial
  probe
  misc_feature (1)..(25): SEQ ID NO: 4136; WAN024AAE_at; Start 48; Stop 72
aaggaataatagactttctgcgaaa

SEQ ID NO: 48044 - DNA, 25 bp, Artificial
  probe
  misc_feature (1)..(25): SEQ ID NO: 4136; WAN024AAE_at; Start 4; Stop 28
gagtgtgtaagcttgttgctaaaag

SEQ ID NO: 48045 - DNA, 25 bp, Artificial
  probe
  misc_feature (1)..(25): SEQ ID NO: 4136; WAN024AAE_at; Start 58; Stop 82
agactttctgcgaaacaaaaatata

SEQ ID NO: 48046 - DNA, 25 bp, Artificial
  probe
  misc_feature (1)..(25): SEQ ID NO: 4136; WAN024AAE_at; Start 57; Stop 81
tagactttctgcgaaacaaaaatat

SEQ ID NO: 48047 - DNA, 25 bp, Artificial
  probe
  misc_feature (1)..(25): SEQ ID NO: 4136; WAN024AAE_at; Start 10; Stop 34
gtaagcttgttgctaaaagcgtaaa

SEQ ID NO: 48048 - DNA, 25 bp, Artificial
  probe
  misc_feature (1)..(25): SEQ ID NO: 4136; WAN024AAE_at; Start 5; Stop 29
agtgtgtaagcttgttgctaaaagc

SEQ ID NO: 48049 - DNA, 25 bp, Artificial
  probe
  misc_feature (1)..(25): SEQ ID NO: 3478; WAN024AAF_at; Start 134; Stop 158
aaatcatatcgccagcctatcaaaa

SEQ ID NO: 48050 - DNA, 25 bp, Artificial
  probe
  misc_feature (1)..(25): SEQ ID NO: 3478; WAN024AAF_at; Start 103; Stop 127
gagctcagatattgtgtccacaata

SEQ ID NO: 48051 - DNA, 25 bp, Artificial
  probe
  misc_feature (1)..(25): SEQ ID NO: 3478; WAN024AAF_at; Start 157; Stop 181
aacctaccagttttgacagctaacg

SEQ ID NO: 48052 - DNA, 25 bp, Artificial
  probe
  misc_feature (1)..(25): SEQ ID NO: 3478; WAN024AAF_at; Start 102; Stop 126
cgagctcagatattgtgtccacaat

SEQ ID NO: 48053 - DNA, 25 bp, Artificial
  probe
  misc_feature (1)..(25): SEQ ID NO: 3478; WAN024AAF_at; Start 172; Stop 196
acagctaacgataagataacttagt

SEQ ID NO: 48054 - DNA, 25 bp, Artificial
  probe
  misc_feature (1)..(25): SEQ ID NO: 3478; WAN024AAF_at; Start 159; Stop 183
cctaccagttttgacagctaacgat

SEQ ID NO: 48055 - DNA, 25 bp, Artificial
  probe
  misc_feature (1)..(25): SEQ ID NO: 3478; WAN024AAF_at; Start 139; Stop 163
atatcgccagcctatcaaaacctac

SEQ ID NO: 48056 - DNA, 25 bp, Artificial
  probe
  misc_feature (1)..(25): SEQ ID NO: 3478; WAN024AAF_at; Start 13; Stop 37
tcaacattatacttgtctgacaatg

SEQ ID NO: 48057 - DNA, 25 bp, Artificial
  probe
  misc_feature (1)..(25): SEQ ID NO: 3478; WAN024AAF_at; Start 146; Stop 170
cagcctatcaaaacctaccagtttt

SEQ ID NO: 48058 - DNA, 25 bp, Artificial
  probe
  misc_feature (1)..(25): SEQ ID NO: 3478; WAN024AAF_at; Start 101; Stop 125
gcgagctcagatattgtgtccacaa

SEQ ID NO: 48059 - DNA, 25 bp, Artificial
  probe
  misc_feature (1)..(25): SEQ ID NO: 3478; WAN024AAF_at; Start 167; Stop 191
ttttgacagctaacgataagataac

SEQ ID NO: 48060 - DNA, 25 bp, Artificial
  probe
  misc_feature (1)..(25): SEQ ID NO: 3478; WAN024AAF_at; Start 126; Stop 150
tatcccaaaaatcatatcgccagcc

SEQ ID NO: 48061 - DNA, 25 bp, Artificial
  probe
  misc_feature (1)..(25): SEQ ID NO: 3478; WAN024AAF_at; Start 135; Stop 159
aatcatatcgccagcctatcaaaac

SEQ ID NO: 48062 - DNA, 25 bp, Artificial
  probe
  misc_feature (1)..(25): SEQ ID NO: 3478; WAN024AAF_at; Start 171; Stop 195
gacagctaacgataagataacttag

SEQ ID NO: 48063 - DNA, 25 bp, Artificial
  probe
  misc_feature (1)..(25): SEQ ID NO: 3478; WAN024AAF_at; Start 164; Stop 188
cagttttgacagctaacgataagat

SEQ ID NO: 48064 - DNA, 25 bp, Artificial
  probe
  misc_feature (1)..(25): SEQ ID NO: 3478; WAN024AAF_at; Start 144; Stop 168
gccagcctatcaaaacctaccagtt

SEQ ID NO: 48065 - DNA, 25 bp, Artificial
  probe
  misc_feature (1)..(25): SEQ ID NO: 3478; WAN024AAF_at; Start 97; Stop 121
ctttgcgagctcagatattgtgtcc

SEQ ID NO: 48066 - DNA, 25 bp, Artificial
  probe
  misc_feature (1)..(25): SEQ ID NO: 3478; WAN024AAF_at; Start 138; Stop 162
catatcgccagcctatcaaaaccta

SEQ ID NO: 48067 - DNA, 25 bp, Artificial
  probe
  misc_feature (1)..(25): SEQ ID NO: 3478; WAN024AAF_at; Start 128; Stop 152
tcccaaaaatcatatcgccagccta

SEQ ID NO: 48068 - DNA, 25 bp, Artificial
  probe
  misc_feature (1)..(25): SEQ ID NO: 3478; WAN024AAF_at; Start 115; Stop 139
tgtgtccacaatatcccaaaaatca

SEQ ID NO: 48069 - DNA, 25 bp, Artificial
  probe
  misc_feature (1)..(25): SEQ ID NO: 3478; WAN024AAF_at; Start 9; Stop 33
tctttcaacattatacttgtctgac

SEQ ID NO: 48070 - DNA, 25 bp, Artificial
  probe
  misc_feature (1)..(25): SEQ ID NO: 3478; WAN024AAF_at; Start 124; Stop 148
aatatcccaaaaatcatatcgccag

SEQ ID NO: 48071 - DNA, 25 bp, Artificial
  probe
  misc_feature (1)..(25): SEQ ID NO: 3478; WAN024AAF_at; Start 3; Stop 27
taccattctttcaacattatacttg

SEQ ID NO: 48072 - DNA, 25 bp, Artificial
  probe
  misc_feature (1)..(25): SEQ ID NO: 3478; WAN024AAF_at; Start 169; Stop 193
ttgacagctaacgataagataactt

SEQ ID NO: 48073 - DNA, 25 bp, Artificial
  probe
  misc_feature (1)..(25): SEQ ID NO: 3478; WAN024AAF_at; Start 96; Stop 120
tctttgcgagctcagatattgtgtc

SEQ ID NO: 48074 - DNA, 25 bp, Artificial
  probe
  misc_feature (1)..(25): SEQ ID NO: 3478; WAN024AAF_at; Start 94; Stop 118
ggtctttgcgagctcagatattgtg

SEQ ID NO: 48075 - DNA, 25 bp, Artificial
  probe
  misc_feature (1)..(25): SEQ ID NO: 3478; WAN024AAF_at; Start 131; Stop 155
caaaaatcatatcgccagcctatca

SEQ ID NO: 48076 - DNA, 25 bp, Artificial
  probe
  misc_feature (1)..(25): SEQ ID NO: 3478; WAN024AAF_at; Start 130; Stop 154
ccaaaaatcatatcgccagcctatc

SEQ ID NO: 48077 - DNA, 25 bp, Artificial
  probe
  misc_feature (1)..(25): SEQ ID NO: 3478; WAN024AAF_at; Start 163; Stop 187
ccagttttgacagctaacgataaga

SEQ ID NO: 48078 - DNA, 25 bp, Artificial
  probe
  misc_feature (1)..(25): SEQ ID NO: 3478; WAN024AAF_at; Start 117; Stop 141
tgtccacaatatcccaaaaatcata

SEQ ID NO: 48079 - DNA, 25 bp, Artificial
  probe
  misc_feature (1)..(25): SEQ ID NO: 3478; WAN024AAF_at; Start 161; Stop 185
taccagttttgacagctaacgataa

SEQ ID NO: 48080 - DNA, 25 bp, Artificial
  probe
  misc_feature (1)..(25): SEQ ID NO: 3478; WAN024AAF_at; Start 100; Stop 124
tgcgagctcagatattgtgtccaca

SEQ ID NO: 48081 - DNA, 25 bp, Artificial
  probe
  misc_feature (1)..(25): SEQ ID NO: 3478; WAN024AAF_at; Start 14; Stop 38
caacattatacttgtctgacaatgt

SEQ ID NO: 48082 - DNA, 25 bp, Artificial
  probe
  misc_feature (1)..(25): SEQ ID NO: 3478; WAN024AAF_at; Start 98; Stop 122
tttgcgagctcagatattgtgtcca

SEQ ID NO: 48083 - DNA, 25 bp, Artificial
  probe
  misc_feature (1)..(25): SEQ ID NO: 369; WAN024AAG_at; Start 71; Stop 95
attgtggacacaatatctgagctcg

SEQ ID NO: 48084 - DNA, 25 bp, Artificial
  probe
  misc_feature (1)..(25): SEQ ID NO: 369; WAN024AAG_at; Start 16; Stop 40
cgttagctgtcaaaactggtaggtt

SEQ ID NO: 48085 - DNA, 25 bp, Artificial
  probe
  misc_feature (1)..(25): SEQ ID NO: 369; WAN024AAG_at; Start 11; Stop 35
cttatcgttagctgtcaaaactggt

SEQ ID NO: 48086 - DNA, 25 bp, Artificial
  probe
  misc_feature (1)..(25): SEQ ID NO: 369; WAN024AAG_at; Start 78; Stop 102
acacaatatctgagctcgcaaagac

SEQ ID NO: 48087 - DNA, 25 bp, Artificial
  probe
  misc_feature (1)..(25): SEQ ID NO: 369; WAN024AAG_at; Start 3; Stop 27
taagttatcttatcgttagctgtca

SEQ ID NO: 48088 - DNA, 25 bp, Artificial
  probe
  misc_feature (1)..(25): SEQ ID NO: 369; WAN024AAG_at; Start 75; Stop 99
tggacacaatatctgagctcgcaaa

SEQ ID NO: 48089 - DNA, 25 bp, Artificial
  probe
  misc_feature (1)..(25): SEQ ID NO: 369; WAN024AAG_at; Start 77; Stop 101
gacacaatatctgagctcgcaaaga

SEQ ID NO: 48090 - DNA, 25 bp, Artificial
  probe
  misc_feature (1)..(25): SEQ ID NO: 369; WAN024AAG_at; Start 56; Stop 80
tatgatttttgggatattgtggaca

SEQ ID NO: 48091 - DNA, 25 bp, Artificial
  probe
  misc_feature (1)..(25): SEQ ID NO: 369; WAN024AAG_at; Start 76; Stop 100
ggacacaatatctgagctcgcaaag

SEQ ID NO: 48092 - DNA, 25 bp, Artificial
  probe
  misc_feature (1)..(25): SEQ ID NO: 369; WAN024AAG_at; Start 45; Stop 69
taggctggcgatatgatttttggga

SEQ ID NO: 48093 - DNA, 25 bp, Artificial
  probe
  misc_feature (1)..(25): SEQ ID NO: 369; WAN024AAG_at; Start 10; Stop 34
tcttatcgttagctgtcaaaactgg

SEQ ID NO: 48094 - DNA, 25 bp, Artificial
  probe
  misc_feature (1)..(25): SEQ ID NO: 369; WAN024AAG_at; Start 48; Stop 72
gctggcgatatgatttttgggatat

SEQ ID NO: 48095 - DNA, 25 bp, Artificial
  probe
  misc_feature (1)..(25): SEQ ID NO: 369; WAN024AAG_at; Start 5; Stop 29
agttatcttatcgttagctgtcaaa

SEQ ID NO: 48096 - DNA, 25 bp, Artificial
  probe
  misc_feature (1)..(25): SEQ ID NO: 369; WAN024AAG_at; Start 13; Stop 37
tatcgttagctgtcaaaactggtag

SEQ ID NO: 48097 - DNA, 25 bp, Artificial
  probe
  misc_feature (1)..(25): SEQ ID NO: 369; WAN024AAG_at; Start 43; Stop 67
gataggctggcgatatgatttttgg

SEQ ID NO: 48098 - DNA, 25 bp, Artificial
  probe
  misc_feature (1)..(25): SEQ ID NO: 369; WAN024AAG_at; Start 15; Stop 39
tcgttagctgtcaaaactggtaggt

SEQ ID NO: 48099 - DNA, 25 bp, Artificial
  probe
  misc_feature (1)..(25): SEQ ID NO: 369; WAN024AAG_at; Start 47; Stop 71
ggctggcgatatgatttttgggata

SEQ ID NO: 48100 - DNA, 25 bp, Artificial
  probe
  misc_feature (1)..(25): SEQ ID NO: 369; WAN024AAG_at; Start 79; Stop 103
cacaatatctgagctcgcaaagacc

SEQ ID NO: 48101 - DNA, 25 bp, Artificial
  probe
  misc_feature (1)..(25): SEQ ID NO: 369; WAN024AAG_at; Start 165; Stop 189
tcagacaagtataatgttgaaagaa

SEQ ID NO: 48102 - DNA, 25 bp, Artificial
  probe
  misc_feature (1)..(25): SEQ ID NO: 369; WAN024AAG_at; Start 38; Stop 62
gttttgataggctggcgatatgatt

SEQ ID NO: 48103 - DNA, 25 bp, Artificial
  probe
  misc_feature (1)..(25): SEQ ID NO: 369; WAN024AAG_at; Start 59; Stop 83
gatttttgggatattgtggacacaa

SEQ ID NO: 48104 - DNA, 25 bp, Artificial
  probe
  misc_feature (1)..(25): SEQ ID NO: 369; WAN024AAG_at; Start 19; Stop 43
tagctgtcaaaactggtaggttttg

SEQ ID NO: 48105 - DNA, 25 bp, Artificial
  probe
  misc_feature (1)..(25): SEQ ID NO: 369; WAN024AAG_at; Start 34; Stop 58
gtaggttttgataggctggcgatat

SEQ ID NO: 48106 - DNA, 25 bp, Artificial
  probe
  misc_feature (1)..(25): SEQ ID NO: 369; WAN024AAG_at; Start 58; Stop 82
tgatttttgggatattgtggacaca

SEQ ID NO: 48107 - DNA, 25 bp, Artificial
  probe
  misc_feature (1)..(25): SEQ ID NO: 369; WAN024AAG_at; Start 72; Stop 96
ttgtggacacaatatctgagctcgc

SEQ ID NO: 48108 - DNA, 25 bp, Artificial
  probe
  misc_feature (1)..(25): SEQ ID NO: 369; WAN024AAG_at; Start 163; Stop 187
tgtcagacaagtataatgttgaaag

SEQ ID NO: 48109 - DNA, 25 bp, Artificial
  probe
  misc_feature (1)..(25): SEQ ID NO: 369; WAN024AAG_at; Start 29; Stop 53
aactggtaggttttgataggctggc

SEQ ID NO: 48110 - DNA, 25 bp, Artificial
  probe
  misc_feature (1)..(25): SEQ ID NO: 369; WAN024AAG_at; Start 74; Stop 98
gtggacacaatatctgagctcgcaa

SEQ ID NO: 48111 - DNA, 25 bp, Artificial
  probe
  misc_feature (1)..(25): SEQ ID NO: 369; WAN024AAG_at; Start 14; Stop 38
atcgttagctgtcaaaactggtagg

SEQ ID NO: 48112 - DNA, 25 bp, Artificial
  probe
  misc_feature (1)..(25): SEQ ID NO: 369; WAN024AAG_at; Start 6; Stop 30
gttatcttatcgttagctgtcaaaa

SEQ ID NO: 48113 - DNA, 25 bp, Artificial
  probe
  misc_feature (1)..(25): SEQ ID NO: 369; WAN024AAG_at; Start 70; Stop 94
tattgtggacacaatatctgagctc

SEQ ID NO: 48114 - DNA, 25 bp, Artificial
  probe
  misc_feature (1)..(25): SEQ ID NO: 369; WAN024AAG_at; Start 35; Stop 59
taggttttgataggctggcgatatg

SEQ ID NO: 48115 - DNA, 25 bp, Artificial
  probe
  misc_feature (1)..(25): SEQ ID NO: 369; WAN024AAG_at; Start 73; Stop 97
tgtggacacaatatctgagctcgca

SEQ ID NO: 48116 - DNA, 25 bp, Artificial
  probe
  misc_feature (1)..(25): SEQ ID NO: 369; WAN024AAG_at; Start 160; Stop 184
cattgtcagacaagtataatgttga

SEQ ID NO: 48117 - DNA, 25 bp, Artificial
  probe
  misc_feature (1)..(25): SEQ ID NO: 3275; WAN024AAH_at; Start 232; Stop 256
gaataagccgtacatctttcctagt

SEQ ID NO: 48118 - DNA, 25 bp, Artificial
  probe
  misc_feature (1)..(25): SEQ ID NO: 3275; WAN024AAH_at; Start 68; Stop 92
ggtcactgtcttttcataccaggaa

SEQ ID NO: 48119 - DNA, 25 bp, Artificial
  probe
  misc_feature (1)..(25): SEQ ID NO: 3275; WAN024AAH_at; Start 9; Stop 33
taacaccactgcatgtaccgtccta

SEQ ID NO: 48120 - DNA, 25 bp, Artificial
  probe
  misc_feature (1)..(25): SEQ ID NO: 3275; WAN024AAH_at; Start 101; Stop 125
gacaaatttaattagagaggtattc

SEQ ID NO: 48121 - DNA, 25 bp, Artificial
  probe
  misc_feature (1)..(25): SEQ ID NO: 3275; WAN024AAH_at; Start 139; Stop 163
cttcttcgctccatttccattacag

SEQ ID NO: 48122 - DNA, 25 bp, Artificial
  probe
  misc_feature (1)..(25): SEQ ID NO: 3275; WAN024AAH_at; Start 179; Stop 203
tatgtgttcagctgactcccatgat

SEQ ID NO: 48123 - DNA, 25 bp, Artificial
  probe
  misc_feature (1)..(25): SEQ ID NO: 3275; WAN024AAH_at; Start 361; Stop 385
gatttcgctaattccttcctatccc

SEQ ID NO: 48124 - DNA, 25 bp, Artificial
  probe
  misc_feature (1)..(25): SEQ ID NO: 3275; WAN024AAH_at; Start 45; Stop 69
agctcccatcgtttacattttcagg

SEQ ID NO: 48125 - DNA, 25 bp, Artificial
  probe
  misc_feature (1)..(25): SEQ ID NO: 3275; WAN024AAH_at; Start 313; Stop 337
tcatccgctatatatggcttcaagt

SEQ ID NO: 48126 - DNA, 25 bp, Artificial
  probe
  misc_feature (1)..(25): SEQ ID NO: 3275; WAN024AAH_at; Start 82; Stop 106
cataccaggaattagaattgacaaa

SEQ ID NO: 48127 - DNA, 25 bp, Artificial
  probe
  misc_feature (1)..(25): SEQ ID NO: 3275; WAN024AAH_at; Start 350; Stop 374
tgtagaaccttgatttcgctaattc

SEQ ID NO: 48128 - DNA, 25 bp, Artificial
  probe
  misc_feature (1)..(25): SEQ ID NO: 3275; WAN024AAH_at; Start 238; Stop 262
gccgtacatctttcctagtttactc

SEQ ID NO: 48129 - DNA, 25 bp, Artificial
  probe
  misc_feature (1)..(25): SEQ ID NO: 3275; WAN024AAH_at; Start 161; Stop 185
cagaaatttcttcaatactatgtgt

SEQ ID NO: 48130 - DNA, 25 bp, Artificial
  probe
  misc_feature (1)..(25): SEQ ID NO: 3275; WAN024AAH_at; Start 299; Stop 323
gattttagagttcctcatccgctat

SEQ ID NO: 48131 - DNA, 25 bp, Artificial
  probe
  misc_feature (1)..(25): SEQ ID NO: 3275; WAN024AAH_at; Start 390; Stop 414
acctcacgatattcaggcttaggag

SEQ ID NO: 48132 - DNA, 25 bp, Artificial
  probe
  misc_feature (1)..(25): SEQ ID NO: 3275; WAN024AAH_at; Start 53; Stop 77
tcgtttacattttcaggtcactgtc

SEQ ID NO: 48133 - DNA, 25 bp, Artificial
  probe
  misc_feature (1)..(25): SEQ ID NO: 3275; WAN024AAH_at; Start 192; Stop 216
gactcccatgattcgttgtactacg

SEQ ID NO: 48134 - DNA, 25 bp, Artificial
  probe
  misc_feature (1)..(25): SEQ ID NO: 3275; WAN024AAH_at; Start 284; Stop 308
tacgacacctatttggattttagag

SEQ ID NO: 48135 - DNA, 25 bp, Artificial
  probe
  misc_feature (1)..(25): SEQ ID NO: 3275; WAN024AAH_at; Start 396; Stop 420
cgatattcaggcttaggagtcgcta

SEQ ID NO: 48136 - DNA, 25 bp, Artificial
  probe
  misc_feature (1)..(25): SEQ ID NO: 3275; WAN024AAH_at; Start 187; Stop 211
cagctgactcccatgattcgttgta

SEQ ID NO: 48137 - DNA, 25 bp, Artificial
  probe
  misc_feature (1)..(25): SEQ ID NO: 3275; WAN024AAH_at; Start 127; Stop 151
tttaattgttcacttcttcgctcca

SEQ ID NO: 48138 - DNA, 25 bp, Artificial
  probe
  misc_feature (1)..(25): SEQ ID NO: 3275; WAN024AAH_at; Start 19; Stop 43
gcatgtaccgtcctatatttatgat

SEQ ID NO: 48139 - DNA, 25 bp, Artificial
  probe
  misc_feature (1)..(25): SEQ ID NO: 3275; WAN024AAH_at; Start 325; Stop 349
tatggcttcaagtcacgattctgtt

SEQ ID NO: 48140 - DNA, 25 bp, Artificial
  probe
  misc_feature (1)..(25): SEQ ID NO: 3275; WAN024AAH_at; Start 270; Stop 294
ttacgtatataggttacgacaccta

SEQ ID NO: 48141 - DNA, 25 bp, Artificial
  probe
  misc_feature (1)..(25): SEQ ID NO: 3275; WAN024AAH_at; Start 32; Stop 56
tatatttatgatcagctcccatcgt

SEQ ID NO: 48142 - DNA, 25 bp, Artificial
  probe
  misc_feature (1)..(25): SEQ ID NO: 3275; WAN024AAH_at; Start 2; Stop 26
taatctctaacaccactgcatgtac

SEQ ID NO: 48143 - DNA, 25 bp, Artificial
  probe
  misc_feature (1)..(25): SEQ ID NO: 3275; WAN024AAH_at; Start 115; Stop 139
gagaggtattcatttaattgttcac

SEQ ID NO: 48144 - DNA, 25 bp, Artificial
  probe
  misc_feature (1)..(25): SEQ ID NO: 3275; WAN024AAH_at; Start 258; Stop 282
tactctcgtaatttacgtatatagg

SEQ ID NO: 48145 - DNA, 25 bp, Artificial
  probe
  misc_feature (1)..(25): SEQ ID NO: 3275; WAN024AAH_at; Start 198; Stop 222
catgattcgttgtactacgtcctaa

SEQ ID NO: 48146 - DNA, 25 bp, Artificial
  probe
  misc_feature (1)..(25): SEQ ID NO: 3275; WAN024AAH_at; Start 173; Stop 197
caatactatgtgttcagctgactcc

SEQ ID NO: 48147 - DNA, 25 bp, Artificial
  probe
  misc_feature (1)..(25): SEQ ID NO: 3275; WAN024AAH_at; Start 217; Stop 241
tcctaaacgctcacggaataagccg

SEQ ID NO: 48148 - DNA, 25 bp, Artificial
  probe
  misc_feature (1)..(25): SEQ ID NO: 3275; WAN024AAH_at; Start 208; Stop 232
tgtactacgtcctaaacgctcacgg

SEQ ID NO: 48149 - DNA, 25 bp, Artificial
  probe
  misc_feature (1)..(25): SEQ ID NO: 3275; WAN024AAH_at; Start 305; Stop 329
agagttcctcatccgctatatatgg

SEQ ID NO: 48150 - DNA, 25 bp, Artificial
  probe
  misc_feature (1)..(25): SEQ ID NO: 3275; WAN024AAH_at; Start 338; Stop 362
cacgattctgtttgtagaaccttga

SEQ ID NO: 48151 - DNA, 25 bp, Artificial
  probe
  misc_feature (1)..(25): SEQ ID NO: 4508; WAN024AAI_at; Start 311; Stop 335
taaatttgtcaattctaattcctgg

SEQ ID NO: 48152 - DNA, 25 bp, Artificial
  probe
  misc_feature (1)..(25): SEQ ID NO: 4508; WAN024AAI_at; Start 92; Stop 116
ccatatatagcggatgaggaactct

SEQ ID NO: 48153 - DNA, 25 bp, Artificial
  probe
  misc_feature (1)..(25): SEQ ID NO: 4508; WAN024AAI_at; Start 224; Stop 248
ggagtcagctgaacacatagtattg

SEQ ID NO: 48154 - DNA, 25 bp, Artificial
  probe
  misc_feature (1)..(25): SEQ ID NO: 4508; WAN024AAI_at; Start 113; Stop 137
ctctaaaatccaaataggtgtcgta

SEQ ID NO: 48155 - DNA, 25 bp, Artificial
  probe
  misc_feature (1)..(25): SEQ ID NO: 4508; WAN024AAI_at; Start 296; Stop 320
gaatacctctctaattaaatttgtc

SEQ ID NO: 48156 - DNA, 25 bp, Artificial
  probe
  misc_feature (1)..(25): SEQ ID NO: 4508; WAN024AAI_at; Start 258; Stop 282
ctgtaatggaaatggagcgaagaag

SEQ ID NO: 48157 - DNA, 25 bp, Artificial
  probe
  misc_feature (1)..(25): SEQ ID NO: 4508; WAN024AAI_at; Start 216; Stop 240
gaatcatgggagtcagctgaacaca

SEQ ID NO: 48158 - DNA, 25 bp, Artificial
  probe
  misc_feature (1)..(25): SEQ ID NO: 4508; WAN024AAI_at; Start 396; Stop 420
tacatgcagtggtgttagagattag

SEQ ID NO: 48159 - DNA, 25 bp, Artificial
  probe
  misc_feature (1)..(25): SEQ ID NO: 4508; WAN024AAI_at; Start 174; Stop 198
gatgtacggcttattccgtgagcgt

SEQ ID NO: 48160 - DNA, 25 bp, Artificial
  probe
  misc_feature (1)..(25): SEQ ID NO: 4508; WAN024AAI_at; Start 237; Stop 261
cacatagtattgaagaaatttctgt

SEQ ID NO: 48161 - DNA, 25 bp, Artificial
  probe
  misc_feature (1)..(25): SEQ ID NO: 4508; WAN024AAI_at; Start 362; Stop 386
taaacgatgggagctgatcataaat

SEQ ID NO: 48162 - DNA, 25 bp, Artificial
  probe
  misc_feature (1)..(25): SEQ ID NO: 4508; WAN024AAI_at; Start 99; Stop 123
tagcggatgaggaactctaaaatcc

SEQ ID NO: 48163 - DNA, 25 bp, Artificial
  probe
  misc_feature (1)..(25): SEQ ID NO: 4508; WAN024AAI_at; Start 210; Stop 234
tacaacgaatcatgggagtcagctg

SEQ ID NO: 48164 - DNA, 25 bp, Artificial
  probe
  misc_feature (1)..(25): SEQ ID NO: 4508; WAN024AAI_at; Start 189; Stop 213
ccgtgagcgtttaggacgtagtaca

SEQ ID NO: 48165 - DNA, 25 bp, Artificial
  probe
  misc_feature (1)..(25): SEQ ID NO: 4508; WAN024AAI_at; Start 7; Stop 31
ctcctaagcctgaatatcgtgaggt

SEQ ID NO: 48166 - DNA, 25 bp, Artificial
  probe
  misc_feature (1)..(25): SEQ ID NO: 4508; WAN024AAI_at; Start 162; Stop 186
taaactaggaaagatgtacggctta

SEQ ID NO: 48167 - DNA, 25 bp, Artificial
  probe
  misc_feature (1)..(25): SEQ ID NO: 4508; WAN024AAI_at; Start 40; Stop 64
taggaaggaattagcgaaatcaagg

SEQ ID NO: 48168 - DNA, 25 bp, Artificial
  probe
  misc_feature (1)..(25): SEQ ID NO: 4508; WAN024AAI_at; Start 331; Stop 355
cctggtatgaaaagacagtgacctg

SEQ ID NO: 48169 - DNA, 25 bp, Artificial
  probe
  misc_feature (1)..(25): SEQ ID NO: 4508; WAN024AAI_at; Start 283; Stop 307
tgaacaattaaatgaatacctctct

SEQ ID NO: 48170 - DNA, 25 bp, Artificial
  probe
  misc_feature (1)..(25): SEQ ID NO: 4508; WAN024AAI_at; Start 139; Stop 163
cctatatacgtaaattacgagagta

SEQ ID NO: 48171 - DNA, 25 bp, Artificial
  probe
  misc_feature (1)..(25): SEQ ID NO: 4508; WAN024AAI_at; Start 154; Stop 178
tacgagagtaaactaggaaagatgt

SEQ ID NO: 48172 - DNA, 25 bp, Artificial
  probe
  misc_feature (1)..(25): SEQ ID NO: 4508; WAN024AAI_at; Start 127; Stop 151
taggtgtcgtaacctatatacgtaa

SEQ ID NO: 48173 - DNA, 25 bp, Artificial
  probe
  misc_feature (1)..(25): SEQ ID NO: 4508; WAN024AAI_at; Start 1; Stop 25
tagcgactcctaagcctgaatatcg

SEQ ID NO: 48174 - DNA, 25 bp, Artificial
  probe
  misc_feature (1)..(25): SEQ ID NO: 4508; WAN024AAI_at; Start 352; Stop 376
cctgaaaatgtaaacgatgggagct

SEQ ID NO: 48175 - DNA, 25 bp, Artificial
  probe
  misc_feature (1)..(25): SEQ ID NO: 4508; WAN024AAI_at; Start 83; Stop 107
gacttgaagccatatatagcggatg

SEQ ID NO: 48176 - DNA, 25 bp, Artificial
  probe
  misc_feature (1)..(25): SEQ ID NO: 4508; WAN024AAI_at; Start 344; Stop 368
gacagtgacctgaaaatgtaaacga

SEQ ID NO: 48177 - DNA, 25 bp, Artificial
  probe
  misc_feature (1)..(25): SEQ ID NO: 4508; WAN024AAI_at; Start 70; Stop 94
caaacagaatcgtgacttgaagcca

SEQ ID NO: 48178 - DNA, 25 bp, Artificial
  probe
  misc_feature (1)..(25): SEQ ID NO: 4508; WAN024AAI_at; Start 59; Stop 83
tcaaggttctacaaacagaatcgtg

SEQ ID NO: 48179 - DNA, 25 bp, Artificial
  probe
  misc_feature (1)..(25): SEQ ID NO: 4508; WAN024AAI_at; Start 200; Stop 224
taggacgtagtacaacgaatcatgg

SEQ ID NO: 48180 - DNA, 25 bp, Artificial
  probe
  misc_feature (1)..(25): SEQ ID NO: 4508; WAN024AAI_at; Start 324; Stop 348
tctaattcctggtatgaaaagacag

SEQ ID NO: 48181 - DNA, 25 bp, Artificial
  probe
  misc_feature (1)..(25): SEQ ID NO: 4508; WAN024AAI_at; Start 371; Stop 395
ggagctgatcataaatataggacgg

SEQ ID NO: 48182 - DNA, 25 bp, Artificial
  probe
  misc_feature (1)..(25): SEQ ID NO: 4508; WAN024AAI_at; Start 47; Stop 71
gaattagcgaaatcaaggttctaca

SEQ ID NO: 48183 - DNA, 25 bp, Artificial
  probe
  misc_feature (1)..(25): SEQ ID NO: 4508; WAN024AAI_at; Start 270; Stop 294
tggagcgaagaagtgaacaattaaa

SEQ ID NO: 48184 - DNA, 25 bp, Artificial
  probe
  misc_feature (1)..(25): SEQ ID NO: 4508; WAN024AAI_at; Start 383; Stop 407
aaatataggacggtacatgcagtgg

SEQ ID NO: 48185 - DNA, 25 bp, Artificial
  probe
  misc_feature (1)..(25): SEQ ID NO: 4676; WAN024AAJ_at; Start 14; Stop 38
atgtatttgtagatatcgtttgcgc

SEQ ID NO: 48186 - DNA, 25 bp, Artificial
  probe
  misc_feature (1)..(25): SEQ ID NO: 4676; WAN024AAJ_at; Start 73; Stop 97
gctctttaggtgacttttatagaag

SEQ ID NO: 48187 - DNA, 25 bp, Artificial
  probe
  misc_feature (1)..(25): SEQ ID NO: 4676; WAN024AAJ_at; Start 38; Stop 62
catcgaaaaaattaatacaagaata

SEQ ID NO: 48188 - DNA, 25 bp, Artificial
  probe
  misc_feature (1)..(25): SEQ ID NO: 4676; WAN024AAJ_at; Start 75; Stop 99
tctttaggtgacttttatagaagta

SEQ ID NO: 48189 - DNA, 25 bp, Artificial
  probe
  misc_feature (1)..(25): SEQ ID NO: 4676; WAN024AAJ_at; Start 33; Stop 57
ttgcgcatcgaaaaaattaatacaa

SEQ ID NO: 48190 - DNA, 25 bp, Artificial
  probe
  misc_feature (1)..(25): SEQ ID NO: 4676; WAN024AAJ_at; Start 16; Stop 40
gtatttgtagatatcgtttgcgcat

SEQ ID NO: 48191 - DNA, 25 bp, Artificial
  probe
  misc_feature (1)..(25): SEQ ID NO: 4676; WAN024AAJ_at; Start 24; Stop 48
agatatcgtttgcgcatcgaaaaaa

SEQ ID NO: 48192 - DNA, 25 bp, Artificial
  probe
  misc_feature (1)..(25): SEQ ID NO: 4676; WAN024AAJ_at; Start 27; Stop 51
tatcgtttgcgcatcgaaaaaatta

SEQ ID NO: 48193 - DNA, 25 bp, Artificial
  probe
  misc_feature (1)..(25): SEQ ID NO: 4676; WAN024AAJ_at; Start 21; Stop 45
tgtagatatcgtttgcgcatcgaaa

SEQ ID NO: 48194 - DNA, 25 bp, Artificial
  probe
  misc_feature (1)..(25): SEQ ID NO: 4676; WAN024AAJ_at; Start 2; Stop 26
gaatcgttatagatgtatttgtaga

SEQ ID NO: 48195 - DNA, 25 bp, Artificial
  probe
  misc_feature (1)..(25): SEQ ID NO: 4676; WAN024AAJ_at; Start 36; Stop 60
cgcatcgaaaaaattaatacaagaa

SEQ ID NO: 48196 - DNA, 25 bp, Artificial
  probe
  misc_feature (1)..(25): SEQ ID NO: 4676; WAN024AAJ_at; Start 20; Stop 44
ttgtagatatcgtttgcgcatcgaa

SEQ ID NO: 48197 - DNA, 25 bp, Artificial
  probe
  misc_feature (1)..(25): SEQ ID NO: 4676; WAN024AAJ_at; Start 34; Stop 58
tgcgcatcgaaaaaattaatacaag

SEQ ID NO: 48198 - DNA, 25 bp, Artificial
  probe
  misc_feature (1)..(25): SEQ ID NO: 4676; WAN024AAJ_at; Start 35; Stop 59
gcgcatcgaaaaaattaatacaaga

SEQ ID NO: 48199 - DNA, 25 bp, Artificial
  probe
  misc_feature (1)..(25): SEQ ID NO: 4676; WAN024AAJ_at; Start 15; Stop 39
tgtatttgtagatatcgtttgcgca

SEQ ID NO: 48200 - DNA, 25 bp, Artificial
  probe
  misc_feature (1)..(25): SEQ ID NO: 4676; WAN024AAJ_at; Start 13; Stop 37
gatgtatttgtagatatcgtttgcg

SEQ ID NO: 48201 - DNA, 25 bp, Artificial
  probe
  misc_feature (1)..(25): SEQ ID NO: 4676; WAN024AAJ_at; Start 30; Stop 54
cgtttgcgcatcgaaaaaattaata

SEQ ID NO: 48202 - DNA, 25 bp, Artificial
  probe
  misc_feature (1)..(25): SEQ ID NO: 4676; WAN024AAJ_at; Start 17; Stop 41
tatttgtagatatcgtttgcgcatc

SEQ ID NO: 48203 - DNA, 25 bp, Artificial
  probe
  misc_feature (1)..(25): SEQ ID NO: 4676; WAN024AAJ_at; Start 7; Stop 31
gttatagatgtatttgtagatatcg

SEQ ID NO: 48204 - DNA, 25 bp, Artificial
  probe
  misc_feature (1)..(25): SEQ ID NO: 4676; WAN024AAJ_at; Start 1; Stop 25
tgaatcgttatagatgtatttgtag

SEQ ID NO: 48205 - DNA, 25 bp, Artificial
  probe
  misc_feature (1)..(25): SEQ ID NO: 4676; WAN024AAJ_at; Start 23; Stop 47
tagatatcgtttgcgcatcgaaaaa

SEQ ID NO: 48206 - DNA, 25 bp, Artificial
  probe
  misc_feature (1)..(25): SEQ ID NO: 4676; WAN024AAJ_at; Start 9; Stop 33
tatagatgtatttgtagatatcgtt

SEQ ID NO: 48207 - DNA, 25 bp, Artificial
  probe
  misc_feature (1)..(25): SEQ ID NO: 4676; WAN024AAJ_at; Start 74; Stop 98
ctctttaggtgacttttatagaagt

SEQ ID NO: 48208 - DNA, 25 bp, Artificial
  probe
  misc_feature (1)..(25): SEQ ID NO: 4676; WAN024AAJ_at; Start 12; Stop 36
agatgtatttgtagatatcgtttgc

SEQ ID NO: 48209 - DNA, 25 bp, Artificial
  probe
  misc_feature (1)..(25): SEQ ID NO: 4676; WAN024AAJ_at; Start 26; Stop 50
atatcgtttgcgcatcgaaaaaatt

SEQ ID NO: 48210 - DNA, 25 bp, Artificial
  probe
  misc_feature (1)..(25): SEQ ID NO: 4676; WAN024AAJ_at; Start 32; Stop 56
tttgcgcatcgaaaaaattaataca

SEQ ID NO: 48211 - DNA, 25 bp, Artificial
  probe
  misc_feature (1)..(25): SEQ ID NO: 4676; WAN024AAJ_at; Start 28; Stop 52
atcgtttgcgcatcgaaaaaattaa

SEQ ID NO: 48212 - DNA, 25 bp, Artificial
  probe
  misc_feature (1)..(25): SEQ ID NO: 4676; WAN024AAJ_at; Start 31; Stop 55
gtttgcgcatcgaaaaaattaatac

SEQ ID NO: 48213 - DNA, 25 bp, Artificial
  probe
  misc_feature (1)..(25): SEQ ID NO: 4676; WAN024AAJ_at; Start 29; Stop 53
tcgtttgcgcatcgaaaaaattaat

SEQ ID NO: 48214 - DNA, 25 bp, Artificial
  probe
  misc_feature (1)..(25): SEQ ID NO: 4676; WAN024AAJ_at; Start 6; Stop 30
cgttatagatgtatttgtagatatc

SEQ ID NO: 48215 - DNA, 25 bp, Artificial
  probe
  misc_feature (1)..(25): SEQ ID NO: 4676; WAN024AAJ_at; Start 90; Stop 114
tatagaagtaaagtttaggatagaa

SEQ ID NO: 48216 - DNA, 25 bp, Artificial
  probe
  misc_feature (1)..(25): SEQ ID NO: 4676; WAN024AAJ_at; Start 18; Stop 42
atttgtagatatcgtttgcgcatcg

SEQ ID NO: 48217 - DNA, 25 bp, Artificial
  probe
  misc_feature (1)..(25): SEQ ID NO: 4676; WAN024AAJ_at; Start 19; Stop 43
tttgtagatatcgtttgcgcatcga

SEQ ID NO: 48218 - DNA, 25 bp, Artificial
  probe
  misc_feature (1)..(25): SEQ ID NO: 4676; WAN024AAJ_at; Start 22; Stop 46
gtagatatcgtttgcgcatcgaaaa

SEQ ID NO: 48219 - DNA, 25 bp, Artificial
  probe
  misc_feature (1)..(25): SEQ ID NO: 96; WAN024AAK_at; Start 82; Stop 106
ttgtattaattttttcgatgcgcaa

SEQ ID NO: 48220 - DNA, 25 bp, Artificial
  probe
  misc_feature (1)..(25): SEQ ID NO: 96; WAN024AAK_at; Start 101; Stop 125
gcgcaaacgatatctacaaatacat

SEQ ID NO: 48221 - DNA, 25 bp, Artificial
  probe
  misc_feature (1)..(25): SEQ ID NO: 96; WAN024AAK_at; Start 87; Stop 111
ttaattttttcgatgcgcaaacgat

SEQ ID NO: 48222 - DNA, 25 bp, Artificial
  probe
  misc_feature (1)..(25): SEQ ID NO: 96; WAN024AAK_at; Start 94; Stop 118
tttcgatgcgcaaacgatatctaca

SEQ ID NO: 48223 - DNA, 25 bp, Artificial
  probe
  misc_feature (1)..(25): SEQ ID NO: 96; WAN024AAK_at; Start 95; Stop 119
ttcgatgcgcaaacgatatctacaa

SEQ ID NO: 48224 - DNA, 25 bp, Artificial
  probe
  misc_feature (1)..(25): SEQ ID NO: 96; WAN024AAK_at; Start 42; Stop 66
cttctataaaagtcacctaaagagc

SEQ ID NO: 48225 - DNA, 25 bp, Artificial
  probe
  misc_feature (1)..(25): SEQ ID NO: 96; WAN024AAK_at; Start 83; Stop 107
tgtattaattttttcgatgcgcaaa

SEQ ID NO: 48226 - DNA, 25 bp, Artificial
  probe
  misc_feature (1)..(25): SEQ ID NO: 96; WAN024AAK_at; Start 89; Stop 113
aattttttcgatgcgcaaacgatat

SEQ ID NO: 48227 - DNA, 25 bp, Artificial
  probe
  misc_feature (1)..(25): SEQ ID NO: 96; WAN024AAK_at; Start 41; Stop 65
acttctataaaagtcacctaaagag

SEQ ID NO: 48228 - DNA, 25 bp, Artificial
  probe
  misc_feature (1)..(25): SEQ ID NO: 96; WAN024AAK_at; Start 80; Stop 104
tcttgtattaattttttcgatgcgc

SEQ ID NO: 48229 - DNA, 25 bp, Artificial
  probe
  misc_feature (1)..(25): SEQ ID NO: 96; WAN024AAK_at; Start 99; Stop 123
atgcgcaaacgatatctacaaatac

SEQ ID NO: 48230 - DNA, 25 bp, Artificial
  probe
  misc_feature (1)..(25): SEQ ID NO: 96; WAN024AAK_at; Start 96; Stop 120
tcgatgcgcaaacgatatctacaaa

SEQ ID NO: 48231 - DNA, 25 bp, Artificial
  probe
  misc_feature (1)..(25): SEQ ID NO: 96; WAN024AAK_at; Start 86; Stop 110
attaattttttcgatgcgcaaacga

SEQ ID NO: 48232 - DNA, 25 bp, Artificial
  probe
  misc_feature (1)..(25): SEQ ID NO: 96; WAN024AAK_at; Start 88; Stop 112
taattttttcgatgcgcaaacgata

SEQ ID NO: 48233 - DNA, 25 bp, Artificial
  probe
  misc_feature (1)..(25): SEQ ID NO: 96; WAN024AAK_at; Start 108; Stop 132
cgatatctacaaatacatctataac

SEQ ID NO: 48234 - DNA, 25 bp, Artificial
  probe
  misc_feature (1)..(25): SEQ ID NO: 96; WAN024AAK_at; Start 100; Stop 124
tgcgcaaacgatatctacaaataca

SEQ ID NO: 48235 - DNA, 25 bp, Artificial
  probe
  misc_feature (1)..(25): SEQ ID NO: 96; WAN024AAK_at; Start 40; Stop 64
tacttctataaaagtcacctaaaga

SEQ ID NO: 48236 - DNA, 25 bp, Artificial
  probe
  misc_feature (1)..(25): SEQ ID NO: 96; WAN024AAK_at; Start 84; Stop 108
gtattaattttttcgatgcgcaaac

SEQ ID NO: 48237 - DNA, 25 bp, Artificial
  probe
  misc_feature (1)..(25): SEQ ID NO: 96; WAN024AAK_at; Start 85; Stop 109
tattaattttttcgatgcgcaaacg

SEQ ID NO: 48238 - DNA, 25 bp, Artificial
  probe
  misc_feature (1)..(25): SEQ ID NO: 96; WAN024AAK_at; Start 113; Stop 137
tctacaaatacatctataacgattc

SEQ ID NO: 48239 - DNA, 25 bp, Artificial
  probe
  misc_feature (1)..(25): SEQ ID NO: 96; WAN024AAK_at; Start 103; Stop 127
gcaaacgatatctacaaatacatct

SEQ ID NO: 48240 - DNA, 25 bp, Artificial
  probe
  misc_feature (1)..(25): SEQ ID NO: 96; WAN024AAK_at; Start 114; Stop 138
ctacaaatacatctataacgattca

SEQ ID NO: 48241 - DNA, 25 bp, Artificial
  probe
  misc_feature (1)..(25): SEQ ID NO: 96; WAN024AAK_at; Start 102; Stop 126
cgcaaacgatatctacaaatacatc

SEQ ID NO: 48242 - DNA, 25 bp, Artificial
  probe
  misc_feature (1)..(25): SEQ ID NO: 96; WAN024AAK_at; Start 105; Stop 129
aaacgatatctacaaatacatctat

SEQ ID NO: 48243 - DNA, 25 bp, Artificial
  probe
  misc_feature (1)..(25): SEQ ID NO: 96; WAN024AAK_at; Start 93; Stop 117
ttttcgatgcgcaaacgatatctac

SEQ ID NO: 48244 - DNA, 25 bp, Artificial
  probe
  misc_feature (1)..(25): SEQ ID NO: 96; WAN024AAK_at; Start 106; Stop 130
aacgatatctacaaatacatctata

SEQ ID NO: 48245 - DNA, 25 bp, Artificial
  probe
  misc_feature (1)..(25): SEQ ID NO: 96; WAN024AAK_at; Start 109; Stop 133
gatatctacaaatacatctataacg

SEQ ID NO: 48246 - DNA, 25 bp, Artificial
  probe
  misc_feature (1)..(25): SEQ ID NO: 96; WAN024AAK_at; Start 26; Stop 50
tctatcctaaactttacttctataa

SEQ ID NO: 48247 - DNA, 25 bp, Artificial
  probe
  misc_feature (1)..(25): SEQ ID NO: 96; WAN024AAK_at; Start 97; Stop 121
cgatgcgcaaacgatatctacaaat

SEQ ID NO: 48248 - DNA, 25 bp, Artificial
  probe
  misc_feature (1)..(25): SEQ ID NO: 96; WAN024AAK_at; Start 92; Stop 116
tttttcgatgcgcaaacgatatcta

SEQ ID NO: 48249 - DNA, 25 bp, Artificial
  probe
  misc_feature (1)..(25): SEQ ID NO: 96; WAN024AAK_at; Start 98; Stop 122
gatgcgcaaacgatatctacaaata

SEQ ID NO: 48250 - DNA, 25 bp, Artificial
  probe
  misc_feature (1)..(25): SEQ ID NO: 96; WAN024AAK_at; Start 111; Stop 135
tatctacaaatacatctataacgat

SEQ ID NO: 48251 - DNA, 25 bp, Artificial
  probe
  misc_feature (1)..(25): SEQ ID NO: 96; WAN024AAK_at; Start 104; Stop 128
caaacgatatctacaaatacatcta

SEQ ID NO: 48252 - DNA, 25 bp, Artificial
  probe
  misc_feature (1)..(25): SEQ ID NO: 96; WAN024AAK_at; Start 81; Stop 105
cttgtattaattttttcgatgcgca

SEQ ID NO: 48253 - DNA, 25 bp, Artificial
  probe
  misc_feature (1)..(25): SEQ ID NO: 4723; WAN024AAL_at; Start 18; Stop 42
tagcaaagcgtatccaatacctcaa

SEQ ID NO: 48254 - DNA, 25 bp, Artificial
  probe
  misc_feature (1)..(25): SEQ ID NO: 4723; WAN024AAL_at; Start 26; Stop 50
cgtatccaatacctcaataaagtgt

SEQ ID NO: 48255 - DNA, 25 bp, Artificial
  probe
  misc_feature (1)..(25): SEQ ID NO: 4723; WAN024AAL_at; Start 31; Stop 55
ccaatacctcaataaagtgttgttt

SEQ ID NO: 48256 - DNA, 25 bp, Artificial
  probe
  misc_feature (1)..(25): SEQ ID NO: 4723; WAN024AAL_at; Start 59; Stop 83
ctgatattttaactatattgtatag

SEQ ID NO: 48257 - DNA, 25 bp, Artificial
  probe
  misc_feature (1)..(25): SEQ ID NO: 4723; WAN024AAL_at; Start 37; Stop 61
cctcaataaagtgttgtttttactg

SEQ ID NO: 48258 - DNA, 25 bp, Artificial
  probe
  misc_feature (1)..(25): SEQ ID NO: 4723; WAN024AAL_at; Start 27; Stop 51
gtatccaatacctcaataaagtgtt

SEQ ID NO: 48259 - DNA, 25 bp, Artificial
  probe
  misc_feature (1)..(25): SEQ ID NO: 4723; WAN024AAL_at; Start 13; Stop 37
gctattagcaaagcgtatccaatac

SEQ ID NO: 48260 - DNA, 25 bp, Artificial
  probe
  misc_feature (1)..(25): SEQ ID NO: 4723; WAN024AAL_at; Start 7; Stop 31
tattaggctattagcaaagcgtatc

SEQ ID NO: 48261 - DNA, 25 bp, Artificial
  probe
  misc_feature (1)..(25): SEQ ID NO: 4723; WAN024AAL_at; Start 19; Stop 43
agcaaagcgtatccaatacctcaat

SEQ ID NO: 48262 - DNA, 25 bp, Artificial
  probe
  misc_feature (1)..(25): SEQ ID NO: 4723; WAN024AAL_at; Start 104; Stop 128
taggatattttatagaatacccaaa

SEQ ID NO: 48263 - DNA, 25 bp, Artificial
  probe
  misc_feature (1)..(25): SEQ ID NO: 4723; WAN024AAL_at; Start 85; Stop 109
ctactatttaaatctcaattaggat

SEQ ID NO: 48264 - DNA, 25 bp, Artificial
  probe
  misc_feature (1)..(25): SEQ ID NO: 4723; WAN024AAL_at; Start 25; Stop 49
gcgtatccaatacctcaataaagtg

SEQ ID NO: 48265 - DNA, 25 bp, Artificial
  probe
  misc_feature (1)..(25): SEQ ID NO: 4723; WAN024AAL_at; Start 9; Stop 33
ttaggctattagcaaagcgtatcca

SEQ ID NO: 48266 - DNA, 25 bp, Artificial
  probe
  misc_feature (1)..(25): SEQ ID NO: 4723; WAN024AAL_at; Start 23; Stop 47
aagcgtatccaatacctcaataaag

SEQ ID NO: 48267 - DNA, 25 bp, Artificial
  probe
  misc_feature (1)..(25): SEQ ID NO: 4723; WAN024AAL_at; Start 28; Stop 52
tatccaatacctcaataaagtgttg

SEQ ID NO: 48268 - DNA, 25 bp, Artificial
  probe
  misc_feature (1)..(25): SEQ ID NO: 4723; WAN024AAL_at; Start 20; Stop 44
gcaaagcgtatccaatacctcaata

SEQ ID NO: 48269 - DNA, 25 bp, Artificial
  probe
  misc_feature (1)..(25): SEQ ID NO: 4723; WAN024AAL_at; Start 4; Stop 28
gattattaggctattagcaaagcgt

SEQ ID NO: 48270 - DNA, 25 bp, Artificial
  probe
  misc_feature (1)..(25): SEQ ID NO: 4723; WAN024AAL_at; Start 32; Stop 56
caatacctcaataaagtgttgtttt

SEQ ID NO: 48271 - DNA, 25 bp, Artificial
  probe
  misc_feature (1)..(25): SEQ ID NO: 4723; WAN024AAL_at; Start 8; Stop 32
attaggctattagcaaagcgtatcc

SEQ ID NO: 48272 - DNA, 25 bp, Artificial
  probe
  misc_feature (1)..(25): SEQ ID NO: 4723; WAN024AAL_at; Start 21; Stop 45
caaagcgtatccaatacctcaataa

SEQ ID NO: 48273 - DNA, 25 bp, Artificial
  probe
  misc_feature (1)..(25): SEQ ID NO: 4723; WAN024AAL_at; Start 15; Stop 39
tattagcaaagcgtatccaatacct

SEQ ID NO: 48274 - DNA, 25 bp, Artificial
  probe
  misc_feature (1)..(25): SEQ ID NO: 4723; WAN024AAL_at; Start 77; Stop 101
tgtatagtctactatttaaatctca

SEQ ID NO: 48275 - DNA, 25 bp, Artificial
  probe
  misc_feature (1)..(25): SEQ ID NO: 4723; WAN024AAL_at; Start 30; Stop 54
tccaatacctcaataaagtgttgtt

SEQ ID NO: 48276 - DNA, 25 bp, Artificial
  probe
  misc_feature (1)..(25): SEQ ID NO: 4723; WAN024AAL_at; Start 3; Stop 27
tgattattaggctattagcaaagcg

SEQ ID NO: 48277 - DNA, 25 bp, Artificial
  probe
  misc_feature (1)..(25): SEQ ID NO: 4723; WAN024AAL_at; Start 114; Stop 138
tatagaatacccaaaattcaacaat

SEQ ID NO: 48278 - DNA, 25 bp, Artificial
  probe
  misc_feature (1)..(25): SEQ ID NO: 4723; WAN024AAL_at; Start 11; Stop 35
aggctattagcaaagcgtatccaat

SEQ ID NO: 48279 - DNA, 25 bp, Artificial
  probe
  misc_feature (1)..(25): SEQ ID NO: 4723; WAN024AAL_at; Start 17; Stop 41
ttagcaaagcgtatccaatacctca

SEQ ID NO: 48280 - DNA, 25 bp, Artificial
  probe
  misc_feature (1)..(25): SEQ ID NO: 4723; WAN024AAL_at; Start 83; Stop 107
gtctactatttaaatctcaattagg

SEQ ID NO: 48281 - DNA, 25 bp, Artificial
  probe
  misc_feature (1)..(25): SEQ ID NO: 4723; WAN024AAL_at; Start 16; Stop 40
attagcaaagcgtatccaatacctc

SEQ ID NO: 48282 - DNA, 25 bp, Artificial
  probe
  misc_feature (1)..(25): SEQ ID NO: 4723; WAN024AAL_at; Start 40; Stop 64
caataaagtgttgtttttactgata

SEQ ID NO: 48283 - DNA, 25 bp, Artificial
  probe
  misc_feature (1)..(25): SEQ ID NO: 4723; WAN024AAL_at; Start 100; Stop 124
caattaggatattttatagaatacc

SEQ ID NO: 48284 - DNA, 25 bp, Artificial
  probe
  misc_feature (1)..(25): SEQ ID NO: 4723; WAN024AAL_at; Start 116; Stop 140
tagaatacccaaaattcaacaataa

SEQ ID NO: 48285 - DNA, 25 bp, Artificial
  probe
  misc_feature (1)..(25): SEQ ID NO: 4723; WAN024AAL_at; Start 10; Stop 34
taggctattagcaaagcgtatccaa

SEQ ID NO: 48286 - DNA, 25 bp, Artificial
  probe
  misc_feature (1)..(25): SEQ ID NO: 4723; WAN024AAL_at; Start 12; Stop 36
ggctattagcaaagcgtatccaata

SEQ ID NO: 48287 - DNA, 25 bp, Artificial
  probe
  misc_feature (1)..(25): SEQ ID NO: 4807; WAN024AAM_at; Start 102; Stop 126
aggtattggatacgctttgctaata

SEQ ID NO: 48288 - DNA, 25 bp, Artificial
  probe
  misc_feature (1)..(25): SEQ ID NO: 4807; WAN024AAM_at; Start 89; Stop 113
caacactttattgaggtattggata

SEQ ID NO: 48289 - DNA, 25 bp, Artificial
  probe
  misc_feature (1)..(25): SEQ ID NO: 4807; WAN024AAM_at; Start 100; Stop 124
tgaggtattggatacgctttgctaa

SEQ ID NO: 48290 - DNA, 25 bp, Artificial
  probe
  misc_feature (1)..(25): SEQ ID NO: 4807; WAN024AAM_at; Start 40; Stop 64
tgagatttaaatagtagactataca

SEQ ID NO: 48291 - DNA, 25 bp, Artificial
  probe
  misc_feature (1)..(25): SEQ ID NO: 4807; WAN024AAM_at; Start 94; Stop 118
ctttattgaggtattggatacgctt

SEQ ID NO: 48292 - DNA, 25 bp, Artificial
  probe
  misc_feature (1)..(25): SEQ ID NO: 4807; WAN024AAM_at; Start 105; Stop 129
tattggatacgctttgctaatagcc

SEQ ID NO: 48293 - DNA, 25 bp, Artificial
  probe
  misc_feature (1)..(25): SEQ ID NO: 4807; WAN024AAM_at; Start 101; Stop 125
gaggtattggatacgctttgctaat

SEQ ID NO: 48294 - DNA, 25 bp, Artificial
  probe
  misc_feature (1)..(25): SEQ ID NO: 4807; WAN024AAM_at; Start 106; Stop 130
attggatacgctttgctaatagcct

SEQ ID NO: 48295 - DNA, 25 bp, Artificial
  probe
  misc_feature (1)..(25): SEQ ID NO: 4807; WAN024AAM_at; Start 13; Stop 37
tttgggtattctataaaatatccta

SEQ ID NO: 48296 - DNA, 25 bp, Artificial
  probe
  misc_feature (1)..(25): SEQ ID NO: 4807; WAN024AAM_at; Start 47; Stop 71
taaatagtagactatacaatatagt

SEQ ID NO: 48297 - DNA, 25 bp, Artificial
  probe
  misc_feature (1)..(25): SEQ ID NO: 4807; WAN024AAM_at; Start 114; Stop 138
cgctttgctaatagcctaataatca

SEQ ID NO: 48298 - DNA, 25 bp, Artificial
  probe
  misc_feature (1)..(25): SEQ ID NO: 4807; WAN024AAM_at; Start 93; Stop 117
actttattgaggtattggatacgct

SEQ ID NO: 48299 - DNA, 25 bp, Artificial
  probe
  misc_feature (1)..(25): SEQ ID NO: 4807; WAN024AAM_at; Start 34; Stop 58
cctaattgagatttaaatagtagac

SEQ ID NO: 48300 - DNA, 25 bp, Artificial
  probe
  misc_feature (1)..(25): SEQ ID NO: 4807; WAN024AAM_at; Start 17; Stop 41
ggtattctataaaatatcctaattg

SEQ ID NO: 48301 - DNA, 25 bp, Artificial
  probe
  misc_feature (1)..(25): SEQ ID NO: 4807; WAN024AAM_at; Start 91; Stop 115
acactttattgaggtattggatacg

SEQ ID NO: 48302 - DNA, 25 bp, Artificial
  probe
  misc_feature (1)..(25): SEQ ID NO: 4807; WAN024AAM_at; Start 99; Stop 123
ttgaggtattggatacgctttgcta

SEQ ID NO: 48303 - DNA, 25 bp, Artificial
  probe
  misc_feature (1)..(25): SEQ ID NO: 4807; WAN024AAM_at; Start 90; Stop 114
aacactttattgaggtattggatac

SEQ ID NO: 48304 - DNA, 25 bp, Artificial
  probe
  misc_feature (1)..(25): SEQ ID NO: 4807; WAN024AAM_at; Start 19; Stop 43
tattctataaaatatcctaattgag

SEQ ID NO: 48305 - DNA, 25 bp, Artificial
  probe
  misc_feature (1)..(25): SEQ ID NO: 4807; WAN024AAM_at; Start 112; Stop 136
tacgctttgctaatagcctaataat

SEQ ID NO: 48306 - DNA, 25 bp, Artificial
  probe
  misc_feature (1)..(25): SEQ ID NO: 4807; WAN024AAM_at; Start 110; Stop 134
gatacgctttgctaatagcctaata

SEQ ID NO: 48307 - DNA, 25 bp, Artificial
  probe
  misc_feature (1)..(25): SEQ ID NO: 4807; WAN024AAM_at; Start 108; Stop 132
tggatacgctttgctaatagcctaa

SEQ ID NO: 48308 - DNA, 25 bp, Artificial
  probe
  misc_feature (1)..(25): SEQ ID NO: 4807; WAN024AAM_at; Start 66; Stop 90
tatagttaaaatatcagtaaaaaca

SEQ ID NO: 48309 - DNA, 25 bp, Artificial
  probe
  misc_feature (1)..(25): SEQ ID NO: 4807; WAN024AAM_at; Start 86; Stop 110
aaacaacactttattgaggtattgg

SEQ ID NO: 48310 - DNA, 25 bp, Artificial
  probe
  misc_feature (1)..(25): SEQ ID NO: 4807; WAN024AAM_at; Start 92; Stop 116
cactttattgaggtattggatacgc

SEQ ID NO: 48311 - DNA, 25 bp, Artificial
  probe
  misc_feature (1)..(25): SEQ ID NO: 4807; WAN024AAM_at; Start 2; Stop 26
tattgttgaattttgggtattctat

SEQ ID NO: 48312 - DNA, 25 bp, Artificial
  probe
  misc_feature (1)..(25): SEQ ID NO: 4807; WAN024AAM_at; Start 87; Stop 111
aacaacactttattgaggtattgga

SEQ ID NO: 48313 - DNA, 25 bp, Artificial
  probe
  misc_feature (1)..(25): SEQ ID NO: 4807; WAN024AAM_at; Start 97; Stop 121
tattgaggtattggatacgctttgc

SEQ ID NO: 48314 - DNA, 25 bp, Artificial
  probe
  misc_feature (1)..(25): SEQ ID NO: 4807; WAN024AAM_at; Start 107; Stop 131
ttggatacgctttgctaatagccta

SEQ ID NO: 48315 - DNA, 25 bp, Artificial
  probe
  misc_feature (1)..(25): SEQ ID NO: 4807; WAN024AAM_at; Start 77; Stop 101
tatcagtaaaaacaacactttattg

SEQ ID NO: 48316 - DNA, 25 bp, Artificial
  probe
  misc_feature (1)..(25): SEQ ID NO: 4807; WAN024AAM_at; Start 109; Stop 133
ggatacgctttgctaatagcctaat

SEQ ID NO: 48317 - DNA, 25 bp, Artificial
  probe
  misc_feature (1)..(25): SEQ ID NO: 4807; WAN024AAM_at; Start 22; Stop 46
tctataaaatatcctaattgagatt

SEQ ID NO: 48318 - DNA, 25 bp, Artificial
  probe
  misc_feature (1)..(25): SEQ ID NO: 4807; WAN024AAM_at; Start 58; Stop 82
ctatacaatatagttaaaatatcag

SEQ ID NO: 48319 - DNA, 25 bp, Artificial
  probe
  misc_feature (1)..(25): SEQ ID NO: 4807; WAN024AAM_at; Start 115; Stop 139
gctttgctaatagcctaataatcac

SEQ ID NO: 48320 - DNA, 25 bp, Artificial
  probe
  misc_feature (1)..(25): SEQ ID NO: 4807; WAN024AAM_at; Start 80; Stop 104
cagtaaaaacaacactttattgagg

SEQ ID NO: 48321 - DNA, 25 bp, Artificial
  probe
  misc_feature (1)..(25): SEQ ID NO: 4763; WAN024AAN_at; Start 23; Stop 47
agtaactagccttattatactatat

SEQ ID NO: 48322 - DNA, 25 bp, Artificial
  probe
  misc_feature (1)..(25): SEQ ID NO: 4763; WAN024AAN_at; Start 44; Stop 68
atataaggtatgaaatgtaccataa

SEQ ID NO: 48323 - DNA, 25 bp, Artificial
  probe
  misc_feature (1)..(25): SEQ ID NO: 4763; WAN024AAN_at; Start 49; Stop 73
aggtatgaaatgtaccataatcttc

SEQ ID NO: 48324 - DNA, 25 bp, Artificial
  probe
  misc_feature (1)..(25): SEQ ID NO: 4763; WAN024AAN_at; Start 63; Stop 87
ccataatcttcatcaactagttttt

SEQ ID NO: 48325 - DNA, 25 bp, Artificial
  probe
  misc_feature (1)..(25): SEQ ID NO: 4763; WAN024AAN_at; Start 61; Stop 85
taccataatcttcatcaactagttt

SEQ ID NO: 48326 - DNA, 25 bp, Artificial
  probe
  misc_feature (1)..(25): SEQ ID NO: 4763; WAN024AAN_at; Start 47; Stop 71
taaggtatgaaatgtaccataatct

SEQ ID NO: 48327 - DNA, 25 bp, Artificial
  probe
  misc_feature (1)..(25): SEQ ID NO: 4763; WAN024AAN_at; Start 64; Stop 88
cataatcttcatcaactagttttta

SEQ ID NO: 48328 - DNA, 25 bp, Artificial
  probe
  misc_feature (1)..(25): SEQ ID NO: 4763; WAN024AAN_at; Start 22; Stop 46
tagtaactagccttattatactata

SEQ ID NO: 48329 - DNA, 25 bp, Artificial
  probe
  misc_feature (1)..(25): SEQ ID NO: 4763; WAN024AAN_at; Start 59; Stop 83
tgtaccataatcttcatcaactagt

SEQ ID NO: 48330 - DNA, 25 bp, Artificial
  probe
  misc_feature (1)..(25): SEQ ID NO: 4763; WAN024AAN_at; Start 16; Stop 40
caagtttagtaactagccttattat

SEQ ID NO: 48331 - DNA, 25 bp, Artificial
  probe
  misc_feature (1)..(25): SEQ ID NO: 4763; WAN024AAN_at; Start 28; Stop 52
ctagccttattatactatataaggt

SEQ ID NO: 48332 - DNA, 25 bp, Artificial
  probe
  misc_feature (1)..(25): SEQ ID NO: 4763; WAN024AAN_at; Start 40; Stop 64
tactatataaggtatgaaatgtacc

SEQ ID NO: 48333 - DNA, 25 bp, Artificial
  probe
  misc_feature (1)..(25): SEQ ID NO: 4763; WAN024AAN_at; Start 62; Stop 86
accataatcttcatcaactagtttt

SEQ ID NO: 48334 - DNA, 25 bp, Artificial
  probe
  misc_feature (1)..(25): SEQ ID NO: 4763; WAN024AAN_at; Start 41; Stop 65
actatataaggtatgaaatgtacca

SEQ ID NO: 48335 - DNA, 25 bp, Artificial
  probe
  misc_feature (1)..(25): SEQ ID NO: 4763; WAN024AAN_at; Start 25; Stop 49
taactagccttattatactatataa

SEQ ID NO: 48336 - DNA, 25 bp, Artificial
  probe
  misc_feature (1)..(25): SEQ ID NO: 4763; WAN024AAN_at; Start 32; Stop 56
ccttattatactatataaggtatga

SEQ ID NO: 48337 - DNA, 25 bp, Artificial
  probe
  misc_feature (1)..(25): SEQ ID NO: 4763; WAN024AAN_at; Start 43; Stop 67
tatataaggtatgaaatgtaccata

SEQ ID NO: 48338 - DNA, 25 bp, Artificial
  probe
  misc_feature (1)..(25): SEQ ID NO: 4763; WAN024AAN_at; Start 55; Stop 79
gaaatgtaccataatcttcatcaac

SEQ ID NO: 48339 - DNA, 25 bp, Artificial
  probe
  misc_feature (1)..(25): SEQ ID NO: 4763; WAN024AAN_at; Start 57; Stop 81
aatgtaccataatcttcatcaacta

SEQ ID NO: 48340 - DNA, 25 bp, Artificial
  probe
  misc_feature (1)..(25): SEQ ID NO: 4763; WAN024AAN_at; Start 51; Stop 75
gtatgaaatgtaccataatcttcat

SEQ ID NO: 48341 - DNA, 25 bp, Artificial
  probe
  misc_feature (1)..(25): SEQ ID NO: 4763; WAN024AAN_at; Start 56; Stop 80
aaatgtaccataatcttcatcaact

SEQ ID NO: 48342 - DNA, 25 bp, Artificial
  probe
  misc_feature (1)..(25): SEQ ID NO: 4763; WAN024AAN_at; Start 50; Stop 74
ggtatgaaatgtaccataatcttca

SEQ ID NO: 48343 - DNA, 25 bp, Artificial
  probe
  misc_feature (1)..(25): SEQ ID NO: 4763; WAN024AAN_at; Start 45; Stop 69
tataaggtatgaaatgtaccataat

SEQ ID NO: 48344 - DNA, 25 bp, Artificial
  probe
  misc_feature (1)..(25): SEQ ID NO: 4763; WAN024AAN_at; Start 54; Stop 78
tgaaatgtaccataatcttcatcaa

SEQ ID NO: 48345 - DNA, 25 bp, Artificial
  probe
  misc_feature (1)..(25): SEQ ID NO: 4763; WAN024AAN_at; Start 58; Stop 82
atgtaccataatcttcatcaactag

SEQ ID NO: 48346 - DNA, 25 bp, Artificial
  probe
  misc_feature (1)..(25): SEQ ID NO: 4763; WAN024AAN_at; Start 48; Stop 72
aaggtatgaaatgtaccataatctt

SEQ ID NO: 48347 - DNA, 25 bp, Artificial
  probe
  misc_feature (1)..(25): SEQ ID NO: 4763; WAN024AAN_at; Start 46; Stop 70
ataaggtatgaaatgtaccataatc

SEQ ID NO: 48348 - DNA, 25 bp, Artificial
  probe
  misc_feature (1)..(25): SEQ ID NO: 4763; WAN024AAN_at; Start 27; Stop 51
actagccttattatactatataagg

SEQ ID NO: 48349 - DNA, 25 bp, Artificial
  probe
  misc_feature (1)..(25): SEQ ID NO: 4763; WAN024AAN_at; Start 52; Stop 76
tatgaaatgtaccataatcttcatc

SEQ ID NO: 48350 - DNA, 25 bp, Artificial
  probe
  misc_feature (1)..(25): SEQ ID NO: 4763; WAN024AAN_at; Start 42; Stop 66
ctatataaggtatgaaatgtaccat

SEQ ID NO: 48351 - DNA, 25 bp, Artificial
  probe
  misc_feature (1)..(25): SEQ ID NO: 4763; WAN024AAN_at; Start 26; Stop 50
aactagccttattatactatataag

SEQ ID NO: 48352 - DNA, 25 bp, Artificial
  probe
  misc_feature (1)..(25): SEQ ID NO: 4763; WAN024AAN_at; Start 24; Stop 48
gtaactagccttattatactatata

SEQ ID NO: 48353 - DNA, 25 bp, Artificial
  probe
  misc_feature (1)..(25): SEQ ID NO: 4763; WAN024AAN_at; Start 60; Stop 84
gtaccataatcttcatcaactagtt

SEQ ID NO: 48354 - DNA, 25 bp, Artificial
  probe
  misc_feature (1)..(25): SEQ ID NO: 4763; WAN024AAN_at; Start 31; Stop 55
gccttattatactatataaggtatg

SEQ ID NO: 48355 - DNA, 25 bp, Artificial
  probe
  misc_feature (1)..(25): SEQ ID NO: 4396; WAN024AAO_at; Start 12; Stop 36
tgatgaagattatggtacatttcat

SEQ ID NO: 48356 - DNA, 25 bp, Artificial
  probe
  misc_feature (1)..(25): SEQ ID NO: 4396; WAN024AAO_at; Start 17; Stop 41
aagattatggtacatttcatacctt

SEQ ID NO: 48357 - DNA, 25 bp, Artificial
  probe
  misc_feature (1)..(25): SEQ ID NO: 4396; WAN024AAO_at; Start 23; Stop 47
atggtacatttcataccttatatag

SEQ ID NO: 48358 - DNA, 25 bp, Artificial
  probe
  misc_feature (1)..(25): SEQ ID NO: 4396; WAN024AAO_at; Start 33; Stop 57
tcataccttatatagtataataagg

SEQ ID NO: 48359 - DNA, 25 bp, Artificial
  probe
  misc_feature (1)..(25): SEQ ID NO: 4396; WAN024AAO_at; Start 22; Stop 46
tatggtacatttcataccttatata

SEQ ID NO: 48360 - DNA, 25 bp, Artificial
  probe
  misc_feature (1)..(25): SEQ ID NO: 4396; WAN024AAO_at; Start 42; Stop 66
atatagtataataaggctagttact

SEQ ID NO: 48361 - DNA, 25 bp, Artificial
  probe
  misc_feature (1)..(25): SEQ ID NO: 4396; WAN024AAO_at; Start 44; Stop 68
atagtataataaggctagttactaa

SEQ ID NO: 48362 - DNA, 25 bp, Artificial
  probe
  misc_feature (1)..(25): SEQ ID NO: 4396; WAN024AAO_at; Start 16; Stop 40
gaagattatggtacatttcatacct

SEQ ID NO: 48363 - DNA, 25 bp, Artificial
  probe
  misc_feature (1)..(25): SEQ ID NO: 4396; WAN024AAO_at; Start 39; Stop 63
cttatatagtataataaggctagtt

SEQ ID NO: 48364 - DNA, 25 bp, Artificial
  probe
  misc_feature (1)..(25): SEQ ID NO: 4396; WAN024AAO_at; Start 35; Stop 59
ataccttatatagtataataaggct

SEQ ID NO: 48365 - DNA, 25 bp, Artificial
  probe
  misc_feature (1)..(25): SEQ ID NO: 4396; WAN024AAO_at; Start 38; Stop 62
ccttatatagtataataaggctagt

SEQ ID NO: 48366 - DNA, 25 bp, Artificial
  probe
  misc_feature (1)..(25): SEQ ID NO: 4396; WAN024AAO_at; Start 32; Stop 56
ttcataccttatatagtataataag

SEQ ID NO: 48367 - DNA, 25 bp, Artificial
  probe
  misc_feature (1)..(25): SEQ ID NO: 4396; WAN024AAO_at; Start 28; Stop 52
acatttcataccttatatagtataa

SEQ ID NO: 48368 - DNA, 25 bp, Artificial
  probe
  misc_feature (1)..(25): SEQ ID NO: 4396; WAN024AAO_at; Start 49; Stop 73
ataataaggctagttactaaacttg

SEQ ID NO: 48369 - DNA, 25 bp, Artificial
  probe
  misc_feature (1)..(25): SEQ ID NO: 4396; WAN024AAO_at; Start 14; Stop 38
atgaagattatggtacatttcatac

SEQ ID NO: 48370 - DNA, 25 bp, Artificial
  probe
  misc_feature (1)..(25): SEQ ID NO: 4396; WAN024AAO_at; Start 19; Stop 43
gattatggtacatttcataccttat

SEQ ID NO: 48371 - DNA, 25 bp, Artificial
  probe
  misc_feature (1)..(25): SEQ ID NO: 4396; WAN024AAO_at; Start 25; Stop 49
ggtacatttcataccttatatagta

SEQ ID NO: 48372 - DNA, 25 bp, Artificial
  probe
  misc_feature (1)..(25): SEQ ID NO: 4396; WAN024AAO_at; Start 41; Stop 65
tatatagtataataaggctagttac

SEQ ID NO: 48373 - DNA, 25 bp, Artificial
  probe
  misc_feature (1)..(25): SEQ ID NO: 4396; WAN024AAO_at; Start 24; Stop 48
tggtacatttcataccttatatagt

SEQ ID NO: 48374 - DNA, 25 bp, Artificial
  probe
  misc_feature (1)..(25): SEQ ID NO: 4396; WAN024AAO_at; Start 26; Stop 50
gtacatttcataccttatatagtat

SEQ ID NO: 48375 - DNA, 25 bp, Artificial
  probe
  misc_feature (1)..(25): SEQ ID NO: 4396; WAN024AAO_at; Start 43; Stop 67
tatagtataataaggctagttacta

SEQ ID NO: 48376 - DNA, 25 bp, Artificial
  probe
  misc_feature (1)..(25): SEQ ID NO: 4396; WAN024AAO_at; Start 45; Stop 69
tagtataataaggctagttactaaa

SEQ ID NO: 48377 - DNA, 25 bp, Artificial
  probe
  misc_feature (1)..(25): SEQ ID NO: 4396; WAN024AAO_at; Start 20; Stop 44
attatggtacatttcataccttata

SEQ ID NO: 48378 - DNA, 25 bp, Artificial
  probe
  misc_feature (1)..(25): SEQ ID NO: 4396; WAN024AAO_at; Start 13; Stop 37
gatgaagattatggtacatttcata

SEQ ID NO: 48379 - DNA, 25 bp, Artificial
  probe
  misc_feature (1)..(25): SEQ ID NO: 4396; WAN024AAO_at; Start 40; Stop 64
ttatatagtataataaggctagtta

SEQ ID NO: 48380 - DNA, 25 bp, Artificial
  probe
  misc_feature (1)..(25): SEQ ID NO: 4396; WAN024AAO_at; Start 37; Stop 61
accttatatagtataataaggctag

SEQ ID NO: 48381 - DNA, 25 bp, Artificial
  probe
  misc_feature (1)..(25): SEQ ID NO: 4396; WAN024AAO_at; Start 27; Stop 51
tacatttcataccttatatagtata

SEQ ID NO: 48382 - DNA, 25 bp, Artificial
  probe
  misc_feature (1)..(25): SEQ ID NO: 4396; WAN024AAO_at; Start 36; Stop 60
taccttatatagtataataaggcta

SEQ ID NO: 48383 - DNA, 25 bp, Artificial
  probe
  misc_feature (1)..(25): SEQ ID NO: 4396; WAN024AAO_at; Start 18; Stop 42
agattatggtacatttcatacctta

SEQ ID NO: 48384 - DNA, 25 bp, Artificial
  probe
  misc_feature (1)..(25): SEQ ID NO: 4396; WAN024AAO_at; Start 1; Stop 25
taaaaactagttgatgaagattatg

SEQ ID NO: 48385 - DNA, 25 bp, Artificial
  probe
  misc_feature (1)..(25): SEQ ID NO: 4396; WAN024AAO_at; Start 21; Stop 45
ttatggtacatttcataccttatat

SEQ ID NO: 48386 - DNA, 25 bp, Artificial
  probe
  misc_feature (1)..(25): SEQ ID NO: 4396; WAN024AAO_at; Start 34; Stop 58
cataccttatatagtataataaggc

SEQ ID NO: 48387 - DNA, 25 bp, Artificial
  probe
  misc_feature (1)..(25): SEQ ID NO: 4396; WAN024AAO_at; Start 15; Stop 39
tgaagattatggtacatttcatacc

SEQ ID NO: 48388 - DNA, 25 bp, Artificial
  probe
  misc_feature (1)..(25): SEQ ID NO: 4396; WAN024AAO_at; Start 29; Stop 53
catttcataccttatatagtataat

SEQ ID NO: 48389 - DNA, 25 bp, Artificial
  probe
  misc_feature (1)..(25): SEQ ID NO: 4815; WAN024AAP_at; Start 51; Stop 75
tttgtaaaactatttgcaaggaatg

SEQ ID NO: 48390 - DNA, 25 bp, Artificial
  probe
  misc_feature (1)..(25): SEQ ID NO: 4815; WAN024AAP_at; Start 46; Stop 70
ctatttttgtaaaactatttgcaag

SEQ ID NO: 48391 - DNA, 25 bp, Artificial
  probe
  misc_feature (1)..(25): SEQ ID NO: 4815; WAN024AAP_at; Start 60; Stop 84
ctatttgcaaggaatgtccgttgtt

SEQ ID NO: 48392 - DNA, 25 bp, Artificial
  probe
  misc_feature (1)..(25): SEQ ID NO: 4815; WAN024AAP_at; Start 55; Stop 79
taaaactatttgcaaggaatgtccg

SEQ ID NO: 48393 - DNA, 25 bp, Artificial
  probe
  misc_feature (1)..(25): SEQ ID NO: 4815; WAN024AAP_at; Start 39; Stop 63
cagtatactatttttgtaaaactat

SEQ ID NO: 48394 - DNA, 25 bp, Artificial
  probe
  misc_feature (1)..(25): SEQ ID NO: 4815; WAN024AAP_at; Start 44; Stop 68
tactatttttgtaaaactatttgca

SEQ ID NO: 48395 - DNA, 25 bp, Artificial
  probe
  misc_feature (1)..(25): SEQ ID NO: 4815; WAN024AAP_at; Start 73; Stop 97
atgtccgttgttaaaggaactatct

SEQ ID NO: 48396 - DNA, 25 bp, Artificial
  probe
  misc_feature (1)..(25): SEQ ID NO: 4815; WAN024AAP_at; Start 54; Stop 78
gtaaaactatttgcaaggaatgtcc

SEQ ID NO: 48397 - DNA, 25 bp, Artificial
  probe
  misc_feature (1)..(25): SEQ ID NO: 4815; WAN024AAP_at; Start 62; Stop 86
atttgcaaggaatgtccgttgttaa

SEQ ID NO: 48398 - DNA, 25 bp, Artificial
  probe
  misc_feature (1)..(25): SEQ ID NO: 4815; WAN024AAP_at; Start 63; Stop 87
tttgcaaggaatgtccgttgttaaa

SEQ ID NO: 48399 - DNA, 25 bp, Artificial
  probe
  misc_feature (1)..(25): SEQ ID NO: 4815; WAN024AAP_at; Start 65; Stop 89
tgcaaggaatgtccgttgttaaagg

SEQ ID NO: 48400 - DNA, 25 bp, Artificial
  probe
  misc_feature (1)..(25): SEQ ID NO: 4815; WAN024AAP_at; Start 61; Stop 85
tatttgcaaggaatgtccgttgtta

SEQ ID NO: 48401 - DNA, 25 bp, Artificial
  probe
  misc_feature (1)..(25): SEQ ID NO: 4815; WAN024AAP_at; Start 58; Stop 82
aactatttgcaaggaatgtccgttg

SEQ ID NO: 48402 - DNA, 25 bp, Artificial
  probe
  misc_feature (1)..(25): SEQ ID NO: 4815; WAN024AAP_at; Start 64; Stop 88
ttgcaaggaatgtccgttgttaaag

SEQ ID NO: 48403 - DNA, 25 bp, Artificial
  probe
  misc_feature (1)..(25): SEQ ID NO: 4815; WAN024AAP_at; Start 56; Stop 80
aaaactatttgcaaggaatgtccgt

SEQ ID NO: 48404 - DNA, 25 bp, Artificial
  probe
  misc_feature (1)..(25): SEQ ID NO: 4815; WAN024AAP_at; Start 53; Stop 77
tgtaaaactatttgcaaggaatgtc

SEQ ID NO: 48405 - DNA, 25 bp, Artificial
  probe
  misc_feature (1)..(25): SEQ ID NO: 4815; WAN024AAP_at; Start 59; Stop 83
actatttgcaaggaatgtccgttgt

SEQ ID NO: 48406 - DNA, 25 bp, Artificial
  probe
  misc_feature (1)..(25): SEQ ID NO: 4815; WAN024AAP_at; Start 52; Stop 76
ttgtaaaactatttgcaaggaatgt

SEQ ID NO: 48407 - DNA, 25 bp, Artificial
  probe
  misc_feature (1)..(25): SEQ ID NO: 4815; WAN024AAP_at; Start 66; Stop 90
gcaaggaatgtccgttgttaaagga

SEQ ID NO: 48408 - DNA, 25 bp, Artificial
  probe
  misc_feature (1)..(25): SEQ ID NO: 4815; WAN024AAP_at; Start 57; Stop 81
aaactatttgcaaggaatgtccgtt

SEQ ID NO: 48409 - DNA, 25 bp, Artificial
  probe
  misc_feature (1)..(25): SEQ ID NO: 4549; WAN024AAQ_at; Start 65; Stop 89
acattccttgcaaatagttttacaa

SEQ ID NO: 48410 - DNA, 25 bp, Artificial
  probe
  misc_feature (1)..(25): SEQ ID NO: 4549; WAN024AAQ_at; Start 59; Stop 83
caacggacattccttgcaaatagtt

SEQ ID NO: 48411 - DNA, 25 bp, Artificial
  probe
  misc_feature (1)..(25): SEQ ID NO: 4549; WAN024AAQ_at; Start 61; Stop 85
acggacattccttgcaaatagtttt

SEQ ID NO: 48412 - DNA, 25 bp, Artificial
  probe
  misc_feature (1)..(25): SEQ ID NO: 4549; WAN024AAQ_at; Start 58; Stop 82
acaacggacattccttgcaaatagt

SEQ ID NO: 48413 - DNA, 25 bp, Artificial
  probe
  misc_feature (1)..(25): SEQ ID NO: 4549; WAN024AAQ_at; Start 54; Stop 78
tttaacaacggacattccttgcaaa

SEQ ID NO: 48414 - DNA, 25 bp, Artificial
  probe
  misc_feature (1)..(25): SEQ ID NO: 4549; WAN024AAQ_at; Start 53; Stop 77
ctttaacaacggacattccttgcaa

SEQ ID NO: 48415 - DNA, 25 bp, Artificial
  probe
  misc_feature (1)..(25): SEQ ID NO: 4549; WAN024AAQ_at; Start 56; Stop 80
taacaacggacattccttgcaaata

SEQ ID NO: 48416 - DNA, 25 bp, Artificial
  probe
  misc_feature (1)..(25): SEQ ID NO: 4549; WAN024AAQ_at; Start 51; Stop 75
tcctttaacaacggacattccttgc

SEQ ID NO: 48417 - DNA, 25 bp, Artificial
  probe
  misc_feature (1)..(25): SEQ ID NO: 4549; WAN024AAQ_at; Start 60; Stop 84
aacggacattccttgcaaatagttt

SEQ ID NO: 48418 - DNA, 25 bp, Artificial
  probe
  misc_feature (1)..(25): SEQ ID NO: 4549; WAN024AAQ_at; Start 73; Stop 97
tgcaaatagttttacaaaaatagta

SEQ ID NO: 48419 - DNA, 25 bp, Artificial
  probe
  misc_feature (1)..(25): SEQ ID NO: 4549; WAN024AAQ_at; Start 71; Stop 95
cttgcaaatagttttacaaaaatag

SEQ ID NO: 48420 - DNA, 25 bp, Artificial
  probe
  misc_feature (1)..(25): SEQ ID NO: 4549; WAN024AAQ_at; Start 78; Stop 102
atagttttacaaaaatagtatactg

SEQ ID NO: 48421 - DNA, 25 bp, Artificial
  probe
  misc_feature (1)..(25): SEQ ID NO: 4549; WAN024AAQ_at; Start 66; Stop 90
cattccttgcaaatagttttacaaa

SEQ ID NO: 48422 - DNA, 25 bp, Artificial
  probe
  misc_feature (1)..(25): SEQ ID NO: 4549; WAN024AAQ_at; Start 55; Stop 79
ttaacaacggacattccttgcaaat

SEQ ID NO: 48423 - DNA, 25 bp, Artificial
  probe
  misc_feature (1)..(25): SEQ ID NO: 4549; WAN024AAQ_at; Start 64; Stop 88
gacattccttgcaaatagttttaca

SEQ ID NO: 48424 - DNA, 25 bp, Artificial
  probe
  misc_feature (1)..(25): SEQ ID NO: 4549; WAN024AAQ_at; Start 62; Stop 86
cggacattccttgcaaatagtttta

SEQ ID NO: 48425 - DNA, 25 bp, Artificial
  probe
  misc_feature (1)..(25): SEQ ID NO: 4549; WAN024AAQ_at; Start 63; Stop 87
ggacattccttgcaaatagttttac

SEQ ID NO: 48426 - DNA, 25 bp, Artificial
  probe
  misc_feature (1)..(25): SEQ ID NO: 4549; WAN024AAQ_at; Start 57; Stop 81
aacaacggacattccttgcaaatag

SEQ ID NO: 48427 - DNA, 25 bp, Artificial
  probe
  misc_feature (1)..(25): SEQ ID NO: 4549; WAN024AAQ_at; Start 44; Stop 68
agatagttcctttaacaacggacat

SEQ ID NO: 48428 - DNA, 25 bp, Artificial
  probe
  misc_feature (1)..(25): SEQ ID NO: 4549; WAN024AAQ_at; Start 52; Stop 76
cctttaacaacggacattccttgca

SEQ ID NO: 48429 - DNA, 25 bp, Artificial
  probe
  misc_feature (1)..(25): SEQ ID NO: 474; WAN024AAR_at; Start 29; Stop 53
aatacagaaaagagaaatctgacgt

SEQ ID NO: 48430 - DNA, 25 bp, Artificial
  probe
  misc_feature (1)..(25): SEQ ID NO: 474; WAN024AAR_at; Start 26; Stop 50
gaaaatacagaaaagagaaatctga

SEQ ID NO: 48431 - DNA, 25 bp, Artificial
  probe
  misc_feature (1)..(25): SEQ ID NO: 474; WAN024AAR_at; Start 28; Stop 52
aaatacagaaaagagaaatctgacg

SEQ ID NO: 48432 - DNA, 25 bp, Artificial
  probe
  misc_feature (1)..(25): SEQ ID NO: 474; WAN024AAR_at; Start 32; Stop 56
acagaaaagagaaatctgacgtact

SEQ ID NO: 48433 - DNA, 25 bp, Artificial
  probe
  misc_feature (1)..(25): SEQ ID NO: 474; WAN024AAR_at; Start 8; Stop 32
gtaatcctattatacaatgaaaata

SEQ ID NO: 48434 - DNA, 25 bp, Artificial
  probe
  misc_feature (1)..(25): SEQ ID NO: 474; WAN024AAR_at; Start 22; Stop 46
caatgaaaatacagaaaagagaaat

SEQ ID NO: 48435 - DNA, 25 bp, Artificial
  probe
  misc_feature (1)..(25): SEQ ID NO: 474; WAN024AAR_at; Start 35; Stop 59
gaaaagagaaatctgacgtactgga

SEQ ID NO: 48436 - DNA, 25 bp, Artificial
  probe
  misc_feature (1)..(25): SEQ ID NO: 474; WAN024AAR_at; Start 33; Stop 57
cagaaaagagaaatctgacgtactg

SEQ ID NO: 48437 - DNA, 25 bp, Artificial
  probe
  misc_feature (1)..(25): SEQ ID NO: 474; WAN024AAR_at; Start 3; Stop 27
taaatgtaatcctattatacaatga

SEQ ID NO: 48438 - DNA, 25 bp, Artificial
  probe
  misc_feature (1)..(25): SEQ ID NO: 474; WAN024AAR_at; Start 9; Stop 33
taatcctattatacaatgaaaatac

SEQ ID NO: 48439 - DNA, 25 bp, Artificial
  probe
  misc_feature (1)..(25): SEQ ID NO: 474; WAN024AAR_at; Start 11; Stop 35
atcctattatacaatgaaaatacag

SEQ ID NO: 48440 - DNA, 25 bp, Artificial
  probe
  misc_feature (1)..(25): SEQ ID NO: 474; WAN024AAR_at; Start 18; Stop 42
tatacaatgaaaatacagaaaagag

SEQ ID NO: 48441 - DNA, 25 bp, Artificial
  probe
  misc_feature (1)..(25): SEQ ID NO: 474; WAN024AAR_at; Start 5; Stop 29
aatgtaatcctattatacaatgaaa

SEQ ID NO: 48442 - DNA, 25 bp, Artificial
  probe
  misc_feature (1)..(25): SEQ ID NO: 474; WAN024AAR_at; Start 23; Stop 47
aatgaaaatacagaaaagagaaatc

SEQ ID NO: 48443 - DNA, 25 bp, Artificial
  probe
  misc_feature (1)..(25): SEQ ID NO: 474; WAN024AAR_at; Start 21; Stop 45
acaatgaaaatacagaaaagagaaa

SEQ ID NO: 48444 - DNA, 25 bp, Artificial
  probe
  misc_feature (1)..(25): SEQ ID NO: 474; WAN024AAR_at; Start 15; Stop 39
tattatacaatgaaaatacagaaaa

SEQ ID NO: 48445 - DNA, 25 bp, Artificial
  probe
  misc_feature (1)..(25): SEQ ID NO: 474; WAN024AAR_at; Start 10; Stop 34
aatcctattatacaatgaaaataca

SEQ ID NO: 48446 - DNA, 25 bp, Artificial
  probe
  misc_feature (1)..(25): SEQ ID NO: 474; WAN024AAR_at; Start 31; Stop 55
tacagaaaagagaaatctgacgtac

SEQ ID NO: 48447 - DNA, 25 bp, Artificial
  probe
  misc_feature (1)..(25): SEQ ID NO: 474; WAN024AAR_at; Start 36; Stop 60
aaaagagaaatctgacgtactggag

SEQ ID NO: 48448 - DNA, 25 bp, Artificial
  probe
  misc_feature (1)..(25): SEQ ID NO: 474; WAN024AAR_at; Start 27; Stop 51
aaaatacagaaaagagaaatctgac

SEQ ID NO: 48449 - DNA, 25 bp, Artificial
  probe
  misc_feature (1)..(25): SEQ ID NO: 474; WAN024AAR_at; Start 6; Stop 30
atgtaatcctattatacaatgaaaa

SEQ ID NO: 48450 - DNA, 25 bp, Artificial
  probe
  misc_feature (1)..(25): SEQ ID NO: 474; WAN024AAR_at; Start 34; Stop 58
agaaaagagaaatctgacgtactgg

SEQ ID NO: 48451 - DNA, 25 bp, Artificial
  probe
  misc_feature (1)..(25): SEQ ID NO: 474; WAN024AAR_at; Start 14; Stop 38
ctattatacaatgaaaatacagaaa

SEQ ID NO: 48452 - DNA, 25 bp, Artificial
  probe
  misc_feature (1)..(25): SEQ ID NO: 474; WAN024AAR_at; Start 7; Stop 31
tgtaatcctattatacaatgaaaat

SEQ ID NO: 48453 - DNA, 25 bp, Artificial
  probe
  misc_feature (1)..(25): SEQ ID NO: 474; WAN024AAR_at; Start 4; Stop 28
aaatgtaatcctattatacaatgaa

SEQ ID NO: 48454 - DNA, 25 bp, Artificial
  probe
  misc_feature (1)..(25): SEQ ID NO: 474; WAN024AAR_at; Start 2; Stop 26
gtaaatgtaatcctattatacaatg

SEQ ID NO: 48455 - DNA, 25 bp, Artificial
  probe
  misc_feature (1)..(25): SEQ ID NO: 474; WAN024AAR_at; Start 12; Stop 36
tcctattatacaatgaaaatacaga

SEQ ID NO: 48456 - DNA, 25 bp, Artificial
  probe
  misc_feature (1)..(25): SEQ ID NO: 474; WAN024AAR_at; Start 13; Stop 37
cctattatacaatgaaaatacagaa

SEQ ID NO: 48457 - DNA, 25 bp, Artificial
  probe
  misc_feature (1)..(25): SEQ ID NO: 474; WAN024AAR_at; Start 30; Stop 54
atacagaaaagagaaatctgacgta

SEQ ID NO: 48458 - DNA, 25 bp, Artificial
  probe
  misc_feature (1)..(25): SEQ ID NO: 474; WAN024AAR_at; Start 24; Stop 48
atgaaaatacagaaaagagaaatct

SEQ ID NO: 48459 - DNA, 25 bp, Artificial
  probe
  misc_feature (1)..(25): SEQ ID NO: 474; WAN024AAR_at; Start 37; Stop 61
aaagagaaatctgacgtactggaga

SEQ ID NO: 48460 - DNA, 25 bp, Artificial
  probe
  misc_feature (1)..(25): SEQ ID NO: 474; WAN024AAR_at; Start 20; Stop 44
tacaatgaaaatacagaaaagagaa

SEQ ID NO: 48461 - DNA, 25 bp, Artificial
  probe
  misc_feature (1)..(25): SEQ ID NO: 474; WAN024AAR_at; Start 19; Stop 43
atacaatgaaaatacagaaaagaga

SEQ ID NO: 48462 - DNA, 25 bp, Artificial
  probe
  misc_feature (1)..(25): SEQ ID NO: 474; WAN024AAR_at; Start 25; Stop 49
tgaaaatacagaaaagagaaatctg

SEQ ID NO: 48463 - DNA, 25 bp, Artificial
  probe
  misc_feature (1)..(25): SEQ ID NO: 4647; WAN024AAS_at; Start 4; Stop 28
ccagtacgtcagatttctcttttct

SEQ ID NO: 48464 - DNA, 25 bp, Artificial
  probe
  misc_feature (1)..(25): SEQ ID NO: 4647; WAN024AAS_at; Start 34; Stop 58
ttcattgtataataggattacattt

SEQ ID NO: 48465 - DNA, 25 bp, Artificial
  probe
  misc_feature (1)..(25): SEQ ID NO: 4647; WAN024AAS_at; Start 25; Stop 49
ttctgtattttcattgtataatagg

SEQ ID NO: 48466 - DNA, 25 bp, Artificial
  probe
  misc_feature (1)..(25): SEQ ID NO: 4647; WAN024AAS_at; Start 12; Stop 36
tcagatttctcttttctgtattttc

SEQ ID NO: 48467 - DNA, 25 bp, Artificial
  probe
  misc_feature (1)..(25): SEQ ID NO: 4647; WAN024AAS_at; Start 11; Stop 35
gtcagatttctcttttctgtatttt

SEQ ID NO: 48468 - DNA, 25 bp, Artificial
  probe
  misc_feature (1)..(25): SEQ ID NO: 4647; WAN024AAS_at; Start 37; Stop 61
attgtataataggattacatttact

SEQ ID NO: 48469 - DNA, 25 bp, Artificial
  probe
  misc_feature (1)..(25): SEQ ID NO: 4647; WAN024AAS_at; Start 3; Stop 27
tccagtacgtcagatttctcttttc

SEQ ID NO: 48470 - DNA, 25 bp, Artificial
  probe
  misc_feature (1)..(25): SEQ ID NO: 4647; WAN024AAS_at; Start 32; Stop 56
ttttcattgtataataggattacat

SEQ ID NO: 48471 - DNA, 25 bp, Artificial
  probe
  misc_feature (1)..(25): SEQ ID NO: 4647; WAN024AAS_at; Start 36; Stop 60
cattgtataataggattacatttac

SEQ ID NO: 48472 - DNA, 25 bp, Artificial
  probe
  misc_feature (1)..(25): SEQ ID NO: 4647; WAN024AAS_at; Start 28; Stop 52
tgtattttcattgtataataggatt

SEQ ID NO: 48473 - DNA, 25 bp, Artificial
  probe
  misc_feature (1)..(25): SEQ ID NO: 4647; WAN024AAS_at; Start 19; Stop 43
tctcttttctgtattttcattgtat

SEQ ID NO: 48474 - DNA, 25 bp, Artificial
  probe
  misc_feature (1)..(25): SEQ ID NO: 4647; WAN024AAS_at; Start 1; Stop 25
tctccagtacgtcagatttctcttt

SEQ ID NO: 48475 - DNA, 25 bp, Artificial
  probe
  misc_feature (1)..(25): SEQ ID NO: 4647; WAN024AAS_at; Start 21; Stop 45
tcttttctgtattttcattgtataa

SEQ ID NO: 48476 - DNA, 25 bp, Artificial
  probe
  misc_feature (1)..(25): SEQ ID NO: 4647; WAN024AAS_at; Start 16; Stop 40
atttctcttttctgtattttcattg

SEQ ID NO: 48477 - DNA, 25 bp, Artificial
  probe
  misc_feature (1)..(25): SEQ ID NO: 4647; WAN024AAS_at; Start 35; Stop 59
tcattgtataataggattacattta

SEQ ID NO: 48478 - DNA, 25 bp, Artificial
  probe
  misc_feature (1)..(25): SEQ ID NO: 4647; WAN024AAS_at; Start 17; Stop 41
tttctcttttctgtattttcattgt

SEQ ID NO: 48479 - DNA, 25 bp, Artificial
  probe
  misc_feature (1)..(25): SEQ ID NO: 4647; WAN024AAS_at; Start 5; Stop 29
cagtacgtcagatttctcttttctg

SEQ ID NO: 48480 - DNA, 25 bp, Artificial
  probe
  misc_feature (1)..(25): SEQ ID NO: 4647; WAN024AAS_at; Start 7; Stop 31
gtacgtcagatttctcttttctgta

SEQ ID NO: 48481 - DNA, 25 bp, Artificial
  probe
  misc_feature (1)..(25): SEQ ID NO: 4647; WAN024AAS_at; Start 33; Stop 57
tttcattgtataataggattacatt

SEQ ID NO: 48482 - DNA, 25 bp, Artificial
  probe
  misc_feature (1)..(25): SEQ ID NO: 4647; WAN024AAS_at; Start 10; Stop 34
cgtcagatttctcttttctgtattt

SEQ ID NO: 48483 - DNA, 25 bp, Artificial
  probe
  misc_feature (1)..(25): SEQ ID NO: 4647; WAN024AAS_at; Start 27; Stop 51
ctgtattttcattgtataataggat

SEQ ID NO: 48484 - DNA, 25 bp, Artificial
  probe
  misc_feature (1)..(25): SEQ ID NO: 4647; WAN024AAS_at; Start 26; Stop 50
tctgtattttcattgtataatagga

SEQ ID NO: 48485 - DNA, 25 bp, Artificial
  probe
  misc_feature (1)..(25): SEQ ID NO: 4647; WAN024AAS_at; Start 13; Stop 37
cagatttctcttttctgtattttca

SEQ ID NO: 48486 - DNA, 25 bp, Artificial
  probe
  misc_feature (1)..(25): SEQ ID NO: 4647; WAN024AAS_at; Start 20; Stop 44
ctcttttctgtattttcattgtata

SEQ ID NO: 48487 - DNA, 25 bp, Artificial
  probe
  misc_feature (1)..(25): SEQ ID NO: 4647; WAN024AAS_at; Start 18; Stop 42
ttctcttttctgtattttcattgta

SEQ ID NO: 48488 - DNA, 25 bp, Artificial
  probe
  misc_feature (1)..(25): SEQ ID NO: 4647; WAN024AAS_at; Start 14; Stop 38
agatttctcttttctgtattttcat

SEQ ID NO: 48489 - DNA, 25 bp, Artificial
  probe
  misc_feature (1)..(25): SEQ ID NO: 4647; WAN024AAS_at; Start 30; Stop 54
tattttcattgtataataggattac

SEQ ID NO: 48490 - DNA, 25 bp, Artificial
  probe
  misc_feature (1)..(25): SEQ ID NO: 4647; WAN024AAS_at; Start 29; Stop 53
gtattttcattgtataataggatta

SEQ ID NO: 48491 - DNA, 25 bp, Artificial
  probe
  misc_feature (1)..(25): SEQ ID NO: 4647; WAN024AAS_at; Start 15; Stop 39
gatttctcttttctgtattttcatt

SEQ ID NO: 48492 - DNA, 25 bp, Artificial
  probe
  misc_feature (1)..(25): SEQ ID NO: 4647; WAN024AAS_at; Start 9; Stop 33
acgtcagatttctcttttctgtatt

SEQ ID NO: 48493 - DNA, 25 bp, Artificial
  probe
  misc_feature (1)..(25): SEQ ID NO: 4647; WAN024AAS_at; Start 31; Stop 55
attttcattgtataataggattaca

SEQ ID NO: 48494 - DNA, 25 bp, Artificial
  probe
  misc_feature (1)..(25): SEQ ID NO: 4647; WAN024AAS_at; Start 2; Stop 26
ctccagtacgtcagatttctctttt

SEQ ID NO: 48495 - DNA, 25 bp, Artificial
  probe
  misc_feature (1)..(25): SEQ ID NO: 4647; WAN024AAS_at; Start 8; Stop 32
tacgtcagatttctcttttctgtat

SEQ ID NO: 48496 - DNA, 25 bp, Artificial
  probe
  misc_feature (1)..(25): SEQ ID NO: 4647; WAN024AAS_at; Start 6; Stop 30
agtacgtcagatttctcttttctgt

SEQ ID NO: 48497 - DNA, 25 bp, Artificial
  probe
  misc_feature (1)..(25): SEQ ID NO: 4751; WAN024AAT_at; Start 102; Stop 126
aaatctagtataaattatgagcggc

SEQ ID NO: 48498 - DNA, 25 bp, Artificial
  probe
  misc_feature (1)..(25): SEQ ID NO: 4751; WAN024AAT_at; Start 110; Stop 134
tataaattatgagcggctactctaa

SEQ ID NO: 48499 - DNA, 25 bp, Artificial
  probe
  misc_feature (1)..(25): SEQ ID NO: 4751; WAN024AAT_at; Start 103; Stop 127
aatctagtataaattatgagcggct

SEQ ID NO: 48500 - DNA, 25 bp, Artificial
  probe
  misc_feature (1)..(25): SEQ ID NO: 4751; WAN024AAT_at; Start 118; Stop 142
atgagcggctactctaatactttcc

SEQ ID NO: 48501 - DNA, 25 bp, Artificial
  probe
  misc_feature (1)..(25): SEQ ID NO: 4751; WAN024AAT_at; Start 146; Stop 170
taaacaagaaaaagacttacactca

SEQ ID NO: 48502 - DNA, 25 bp, Artificial
  probe
  misc_feature (1)..(25): SEQ ID NO: 4751; WAN024AAT_at; Start 24; Stop 48
cacagtaactttaaatctttggtat

SEQ ID NO: 48503 - DNA, 25 bp, Artificial
  probe
  misc_feature (1)..(25): SEQ ID NO: 4751; WAN024AAT_at; Start 77; Stop 101
taaaatctgtctcaaatcagttatc

SEQ ID NO: 48504 - DNA, 25 bp, Artificial
  probe
  misc_feature (1)..(25): SEQ ID NO: 4751; WAN024AAT_at; Start 86; Stop 110
tctcaaatcagttatcaaatctagt

SEQ ID NO: 48505 - DNA, 25 bp, Artificial
  probe
  misc_feature (1)..(25): SEQ ID NO: 4751; WAN024AAT_at; Start 127; Stop 151
tactctaatactttccctctaaaca

SEQ ID NO: 48506 - DNA, 25 bp, Artificial
  probe
  misc_feature (1)..(25): SEQ ID NO: 4751; WAN024AAT_at; Start 85; Stop 109
gtctcaaatcagttatcaaatctag

SEQ ID NO: 48507 - DNA, 25 bp, Artificial
  probe
  misc_feature (1)..(25): SEQ ID NO: 4751; WAN024AAT_at; Start 121; Stop 145
agcggctactctaatactttccctc

SEQ ID NO: 48508 - DNA, 25 bp, Artificial
  probe
  misc_feature (1)..(25): SEQ ID NO: 4751; WAN024AAT_at; Start 109; Stop 133
gtataaattatgagcggctactcta

SEQ ID NO: 48509 - DNA, 25 bp, Artificial
  probe
  misc_feature (1)..(25): SEQ ID NO: 4751; WAN024AAT_at; Start 73; Stop 97
gaaataaaatctgtctcaaatcagt

SEQ ID NO: 48510 - DNA, 25 bp, Artificial
  probe
  misc_feature (1)..(25): SEQ ID NO: 4751; WAN024AAT_at; Start 129; Stop 153
ctctaatactttccctctaaacaag

SEQ ID NO: 48511 - DNA, 25 bp, Artificial
  probe
  misc_feature (1)..(25): SEQ ID NO: 4751; WAN024AAT_at; Start 122; Stop 146
gcggctactctaatactttccctct

SEQ ID NO: 48512 - DNA, 25 bp, Artificial
  probe
  misc_feature (1)..(25): SEQ ID NO: 4751; WAN024AAT_at; Start 120; Stop 144
gagcggctactctaatactttccct

SEQ ID NO: 48513 - DNA, 25 bp, Artificial
  probe
  misc_feature (1)..(25): SEQ ID NO: 4751; WAN024AAT_at; Start 80; Stop 104
aatctgtctcaaatcagttatcaaa

SEQ ID NO: 48514 - DNA, 25 bp, Artificial
  probe
  misc_feature (1)..(25): SEQ ID NO: 4751; WAN024AAT_at; Start 105; Stop 129
tctagtataaattatgagcggctac

SEQ ID NO: 48515 - DNA, 25 bp, Artificial
  probe
  misc_feature (1)..(25): SEQ ID NO: 4751; WAN024AAT_at; Start 101; Stop 125
caaatctagtataaattatgagcgg

SEQ ID NO: 48516 - DNA, 25 bp, Artificial
  probe
  misc_feature (1)..(25): SEQ ID NO: 4751; WAN024AAT_at; Start 119; Stop 143
tgagcggctactctaatactttccc

SEQ ID NO: 48517 - DNA, 25 bp, Artificial
  probe
  misc_feature (1)..(25): SEQ ID NO: 4751; WAN024AAT_at; Start 67; Stop 91
tttatagaaataaaatctgtctcaa

SEQ ID NO: 48518 - DNA, 25 bp, Artificial
  probe
  misc_feature (1)..(25): SEQ ID NO: 4751; WAN024AAT_at; Start 114; Stop 138
aattatgagcggctactctaatact

SEQ ID NO: 48519 - DNA, 25 bp, Artificial
  probe
  misc_feature (1)..(25): SEQ ID NO: 4751; WAN024AAT_at; Start 89; Stop 113
caaatcagttatcaaatctagtata

SEQ ID NO: 48520 - DNA, 25 bp, Artificial
  probe
  misc_feature (1)..(25): SEQ ID NO: 4751; WAN024AAT_at; Start 106; Stop 130
ctagtataaattatgagcggctact

SEQ ID NO: 48521 - DNA, 25 bp, Artificial
  probe
  misc_feature (1)..(25): SEQ ID NO: 4751; WAN024AAT_at; Start 107; Stop 131
tagtataaattatgagcggctactc

SEQ ID NO: 48522 - DNA, 25 bp, Artificial
  probe
  misc_feature (1)..(25): SEQ ID NO: 4751; WAN024AAT_at; Start 115; Stop 139
attatgagcggctactctaatactt

SEQ ID NO: 48523 - DNA, 25 bp, Artificial
  probe
  misc_feature (1)..(25): SEQ ID NO: 4751; WAN024AAT_at; Start 125; Stop 149
gctactctaatactttccctctaaa

SEQ ID NO: 48524 - DNA, 25 bp, Artificial
  probe
  misc_feature (1)..(25): SEQ ID NO: 4751; WAN024AAT_at; Start 123; Stop 147
cggctactctaatactttccctcta

SEQ ID NO: 48525 - DNA, 25 bp, Artificial
  probe
  misc_feature (1)..(25): SEQ ID NO: 4751; WAN024AAT_at; Start 117; Stop 141
tatgagcggctactctaatactttc

SEQ ID NO: 48526 - DNA, 25 bp, Artificial
  probe
  misc_feature (1)..(25): SEQ ID NO: 4751; WAN024AAT_at; Start 82; Stop 106
tctgtctcaaatcagttatcaaatc

SEQ ID NO: 48527 - DNA, 25 bp, Artificial
  probe
  misc_feature (1)..(25): SEQ ID NO: 4751; WAN024AAT_at; Start 150; Stop 174
caagaaaaagacttacactcaaggg

SEQ ID NO: 48528 - DNA, 25 bp, Artificial
  probe
  misc_feature (1)..(25): SEQ ID NO: 4751; WAN024AAT_at; Start 108; Stop 132
agtataaattatgagcggctactct

SEQ ID NO: 48529 - DNA, 25 bp, Artificial
  probe
  misc_feature (1)..(25): SEQ ID NO: 4751; WAN024AAT_at; Start 124; Stop 148
ggctactctaatactttccctctaa

SEQ ID NO: 48530 - DNA, 25 bp, Artificial
  probe
  misc_feature (1)..(25): SEQ ID NO: 4751; WAN024AAT_at; Start 87; Stop 111
ctcaaatcagttatcaaatctagta

SEQ ID NO: 48531 - DNA, 25 bp, Artificial
  probe
  misc_feature (1)..(25): SEQ ID NO: 202; WAN024AAU_at; Start 72; Stop 96
gagtagccgctcataatttatacta

SEQ ID NO: 48532 - DNA, 25 bp, Artificial
  probe
  misc_feature (1)..(25): SEQ ID NO: 202; WAN024AAU_at; Start 50; Stop 74
cttgtttagagggaaagtattagag

SEQ ID NO: 48533 - DNA, 25 bp, Artificial
  probe
  misc_feature (1)..(25): SEQ ID NO: 202; WAN024AAU_at; Start 74; Stop 98
gtagccgctcataatttatactaga

SEQ ID NO: 48534 - DNA, 25 bp, Artificial
  probe
  misc_feature (1)..(25): SEQ ID NO: 202; WAN024AAU_at; Start 155; Stop 179
ataccaaagatttaaagttactgtg

SEQ ID NO: 48535 - DNA, 25 bp, Artificial
  probe
  misc_feature (1)..(25): SEQ ID NO: 202; WAN024AAU_at; Start 70; Stop 94
tagagtagccgctcataatttatac

SEQ ID NO: 48536 - DNA, 25 bp, Artificial
  probe
  misc_feature (1)..(25): SEQ ID NO: 202; WAN024AAU_at; Start 95; Stop 119
tagatttgataactgatttgagaca

SEQ ID NO: 48537 - DNA, 25 bp, Artificial
  probe
  misc_feature (1)..(25): SEQ ID NO: 202; WAN024AAU_at; Start 102; Stop 126
gataactgatttgagacagatttta

SEQ ID NO: 48538 - DNA, 25 bp, Artificial
  probe
  misc_feature (1)..(25): SEQ ID NO: 202; WAN024AAU_at; Start 64; Stop 88
aagtattagagtagccgctcataat

SEQ ID NO: 48539 - DNA, 25 bp, Artificial
  probe
  misc_feature (1)..(25): SEQ ID NO: 202; WAN024AAU_at; Start 92; Stop 116
tactagatttgataactgatttgag

SEQ ID NO: 48540 - DNA, 25 bp, Artificial
  probe
  misc_feature (1)..(25): SEQ ID NO: 202; WAN024AAU_at; Start 30; Stop 54
ccttgagtgtaagtctttttcttgt

SEQ ID NO: 48541 - DNA, 25 bp, Artificial
  probe
  misc_feature (1)..(25): SEQ ID NO: 202; WAN024AAU_at; Start 62; Stop 86
gaaagtattagagtagccgctcata

SEQ ID NO: 48542 - DNA, 25 bp, Artificial
  probe
  misc_feature (1)..(25): SEQ ID NO: 202; WAN024AAU_at; Start 65; Stop 89
agtattagagtagccgctcataatt

SEQ ID NO: 48543 - DNA, 25 bp, Artificial
  probe
  misc_feature (1)..(25): SEQ ID NO: 202; WAN024AAU_at; Start 33; Stop 57
tgagtgtaagtctttttcttgttta

SEQ ID NO: 48544 - DNA, 25 bp, Artificial
  probe
  misc_feature (1)..(25): SEQ ID NO: 202; WAN024AAU_at; Start 55; Stop 79
ttagagggaaagtattagagtagcc

SEQ ID NO: 48545 - DNA, 25 bp, Artificial
  probe
  misc_feature (1)..(25): SEQ ID NO: 202; WAN024AAU_at; Start 59; Stop 83
agggaaagtattagagtagccgctc

SEQ ID NO: 48546 - DNA, 25 bp, Artificial
  probe
  misc_feature (1)..(25): SEQ ID NO: 202; WAN024AAU_at; Start 57; Stop 81
agagggaaagtattagagtagccgc

SEQ ID NO: 48547 - DNA, 25 bp, Artificial
  probe
  misc_feature (1)..(25): SEQ ID NO: 202; WAN024AAU_at; Start 113; Stop 137
tgagacagattttatttctataaat

SEQ ID NO: 48548 - DNA, 25 bp, Artificial
  probe
  misc_feature (1)..(25): SEQ ID NO: 202; WAN024AAU_at; Start 79; Stop 103
cgctcataatttatactagatttga

SEQ ID NO: 48549 - DNA, 25 bp, Artificial
  probe
  misc_feature (1)..(25): SEQ ID NO: 202; WAN024AAU_at; Start 58; Stop 82
gagggaaagtattagagtagccgct

SEQ ID NO: 48550 - DNA, 25 bp, Artificial
  probe
  misc_feature (1)..(25): SEQ ID NO: 202; WAN024AAU_at; Start 29; Stop 53
cccttgagtgtaagtctttttcttg

SEQ ID NO: 48551 - DNA, 25 bp, Artificial
  probe
  misc_feature (1)..(25): SEQ ID NO: 202; WAN024AAU_at; Start 56; Stop 80
tagagggaaagtattagagtagccg

SEQ ID NO: 48552 - DNA, 25 bp, Artificial
  probe
  misc_feature (1)..(25): SEQ ID NO: 202; WAN024AAU_at; Start 54; Stop 78
tttagagggaaagtattagagtagc

SEQ ID NO: 48553 - DNA, 25 bp, Artificial
  probe
  misc_feature (1)..(25): SEQ ID NO: 202; WAN024AAU_at; Start 63; Stop 87
aaagtattagagtagccgctcataa

SEQ ID NO: 48554 - DNA, 25 bp, Artificial
  probe
  misc_feature (1)..(25): SEQ ID NO: 202; WAN024AAU_at; Start 61; Stop 85
ggaaagtattagagtagccgctcat

SEQ ID NO: 48555 - DNA, 25 bp, Artificial
  probe
  misc_feature (1)..(25): SEQ ID NO: 202; WAN024AAU_at; Start 99; Stop 123
tttgataactgatttgagacagatt

SEQ ID NO: 48556 - DNA, 25 bp, Artificial
  probe
  misc_feature (1)..(25): SEQ ID NO: 202; WAN024AAU_at; Start 71; Stop 95
agagtagccgctcataatttatact

SEQ ID NO: 48557 - DNA, 25 bp, Artificial
  probe
  misc_feature (1)..(25): SEQ ID NO: 202; WAN024AAU_at; Start 108; Stop 132
tgatttgagacagattttatttcta

SEQ ID NO: 48558 - DNA, 25 bp, Artificial
  probe
  misc_feature (1)..(25): SEQ ID NO: 202; WAN024AAU_at; Start 94; Stop 118
ctagatttgataactgatttgagac

SEQ ID NO: 48559 - DNA, 25 bp, Artificial
  probe
  misc_feature (1)..(25): SEQ ID NO: 202; WAN024AAU_at; Start 106; Stop 130
actgatttgagacagattttatttc

SEQ ID NO: 48560 - DNA, 25 bp, Artificial
  probe
  misc_feature (1)..(25): SEQ ID NO: 202; WAN024AAU_at; Start 73; Stop 97
agtagccgctcataatttatactag

SEQ ID NO: 48561 - DNA, 25 bp, Artificial
  probe
  misc_feature (1)..(25): SEQ ID NO: 202; WAN024AAU_at; Start 97; Stop 121
gatttgataactgatttgagacaga

SEQ ID NO: 48562 - DNA, 25 bp, Artificial
  probe
  misc_feature (1)..(25): SEQ ID NO: 202; WAN024AAU_at; Start 77; Stop 101
gccgctcataatttatactagattt

SEQ ID NO: 48563 - DNA, 25 bp, Artificial
  probe
  misc_feature (1)..(25): SEQ ID NO: 202; WAN024AAU_at; Start 75; Stop 99
tagccgctcataatttatactagat

SEQ ID NO: 48564 - DNA, 25 bp, Artificial
  probe
  misc_feature (1)..(25): SEQ ID NO: 202; WAN024AAU_at; Start 60; Stop 84
gggaaagtattagagtagccgctca

SEQ ID NO: 48565 - DNA, 25 bp, Artificial
  probe
  misc_feature (1)..(25): SEQ ID NO: 3812; WAN024AAV_at; Start 65; Stop 89
tatacccagaacacaccttatcgac

SEQ ID NO: 48566 - DNA, 25 bp, Artificial
  probe
  misc_feature (1)..(25): SEQ ID NO: 3812; WAN024AAV_at; Start 92; Stop 116
tcggtctcacctcgtcgcattggct

SEQ ID NO: 48567 - DNA, 25 bp, Artificial
  probe
  misc_feature (1)..(25): SEQ ID NO: 3812; WAN024AAV_at; Start 173; Stop 197
cagcgtgatgcgtcagtgggactca

SEQ ID NO: 48568 - DNA, 25 bp, Artificial
  probe
  misc_feature (1)..(25): SEQ ID NO: 3812; WAN024AAV_at; Start 165; Stop 189
taccgcctcagcgtgatgcgtcagt

SEQ ID NO: 48569 - DNA, 25 bp, Artificial
  probe
  misc_feature (1)..(25): SEQ ID NO: 3812; WAN024AAV_at; Start 147; Stop 171
aactcgtacaagcagtgataccgcc

SEQ ID NO: 48570 - DNA, 25 bp, Artificial
  probe
  misc_feature (1)..(25): SEQ ID NO: 3812; WAN024AAV_at; Start 2; Stop 26
tcacctgaccaattcaggctctctg

SEQ ID NO: 48571 - DNA, 25 bp, Artificial
  probe
  misc_feature (1)..(25): SEQ ID NO: 3812; WAN024AAV_at; Start 142; Stop 166
gcttcaactcgtacaagcagtgata

SEQ ID NO: 48572 - DNA, 25 bp, Artificial
  probe
  misc_feature (1)..(25): SEQ ID NO: 3812; WAN024AAV_at; Start 37; Stop 61
tcatatttcctacttactttacgag

SEQ ID NO: 48573 - DNA, 25 bp, Artificial
  probe
  misc_feature (1)..(25): SEQ ID NO: 3812; WAN024AAV_at; Start 109; Stop 133
cattggctgaacatctacttttact

SEQ ID NO: 48574 - DNA, 25 bp, Artificial
  probe
  misc_feature (1)..(25): SEQ ID NO: 3812; WAN024AAV_at; Start 107; Stop 131
cgcattggctgaacatctactttta

SEQ ID NO: 48575 - DNA, 25 bp, Artificial
  probe
  misc_feature (1)..(25): SEQ ID NO: 3812; WAN024AAV_at; Start 159; Stop 183
cagtgataccgcctcagcgtgatgc

SEQ ID NO: 48576 - DNA, 25 bp, Artificial
  probe
  misc_feature (1)..(25): SEQ ID NO: 3812; WAN024AAV_at; Start 101; Stop 125
cctcgtcgcattggctgaacatcta

SEQ ID NO: 48577 - DNA, 25 bp, Artificial
  probe
  misc_feature (1)..(25): SEQ ID NO: 3812; WAN024AAV_at; Start 71; Stop 95
cagaacacaccttatcgaccttcgg

SEQ ID NO: 48578 - DNA, 25 bp, Artificial
  probe
  misc_feature (1)..(25): SEQ ID NO: 3812; WAN024AAV_at; Start 15; Stop 39
tcaggctctctgtatcatctcatca

SEQ ID NO: 48579 - DNA, 25 bp, Artificial
  probe
  misc_feature (1)..(25): SEQ ID NO: 3812; WAN024AAV_at; Start 90; Stop 114
cttcggtctcacctcgtcgcattgg

SEQ ID NO: 48580 - DNA, 25 bp, Artificial
  probe
  misc_feature (1)..(25): SEQ ID NO: 3812; WAN024AAV_at; Start 150; Stop 174
tcgtacaagcagtgataccgcctca

SEQ ID NO: 48581 - DNA, 25 bp, Artificial
  probe
  misc_feature (1)..(25): SEQ ID NO: 3812; WAN024AAV_at; Start 152; Stop 176
gtacaagcagtgataccgcctcagc

SEQ ID NO: 48582 - DNA, 25 bp, Artificial
  probe
  misc_feature (1)..(25): SEQ ID NO: 3812; WAN024AAV_at; Start 136; Stop 160
gctgatgcttcaactcgtacaagca

SEQ ID NO: 48583 - DNA, 25 bp, Artificial
  probe
  misc_feature (1)..(25): SEQ ID NO: 3812; WAN024AAV_at; Start 176; Stop 200
cgtgatgcgtcagtgggactcaaaa

SEQ ID NO: 48584 - DNA, 25 bp, Artificial
  probe
  misc_feature (1)..(25): SEQ ID NO: 3812; WAN024AAV_at; Start 25; Stop 49
tgtatcatctcatcatatttcctac

SEQ ID NO: 48585 - DNA, 25 bp, Artificial
  probe
  misc_feature (1)..(25): SEQ ID NO: 3812; WAN024AAV_at; Start 181; Stop 205
tgcgtcagtgggactcaaaaagttt

SEQ ID NO: 48586 - DNA, 25 bp, Artificial
  probe
  misc_feature (1)..(25): SEQ ID NO: 3812; WAN024AAV_at; Start 103; Stop 127
tcgtcgcattggctgaacatctact

SEQ ID NO: 48587 - DNA, 25 bp, Artificial
  probe
  misc_feature (1)..(25): SEQ ID NO: 3812; WAN024AAV_at; Start 163; Stop 187
gataccgcctcagcgtgatgcgtca

SEQ ID NO: 48588 - DNA, 25 bp, Artificial
  probe
  misc_feature (1)..(25): SEQ ID NO: 3812; WAN024AAV_at; Start 178; Stop 202
tgatgcgtcagtgggactcaaaaag

SEQ ID NO: 48589 - DNA, 25 bp, Artificial
  probe
  misc_feature (1)..(25): SEQ ID NO: 3812; WAN024AAV_at; Start 74; Stop 98
aacacaccttatcgaccttcggtct

SEQ ID NO: 48590 - DNA, 25 bp, Artificial
  probe
  misc_feature (1)..(25): SEQ ID NO: 3812; WAN024AAV_at; Start 145; Stop 169
tcaactcgtacaagcagtgataccg

SEQ ID NO: 48591 - DNA, 25 bp, Artificial
  probe
  misc_feature (1)..(25): SEQ ID NO: 3812; WAN024AAV_at; Start 139; Stop 163
gatgcttcaactcgtacaagcagtg

SEQ ID NO: 48592 - DNA, 25 bp, Artificial
  probe
  misc_feature (1)..(25): SEQ ID NO: 3812; WAN024AAV_at; Start 183; Stop 207
cgtcagtgggactcaaaaagtttgg

SEQ ID NO: 48593 - DNA, 25 bp, Artificial
  probe
  misc_feature (1)..(25): SEQ ID NO: 3812; WAN024AAV_at; Start 98; Stop 122
tcacctcgtcgcattggctgaacat

SEQ ID NO: 48594 - DNA, 25 bp, Artificial
  probe
  misc_feature (1)..(25): SEQ ID NO: 3812; WAN024AAV_at; Start 154; Stop 178
acaagcagtgataccgcctcagcgt

SEQ ID NO: 48595 - DNA, 25 bp, Artificial
  probe
  misc_feature (1)..(25): SEQ ID NO: 3812; WAN024AAV_at; Start 170; Stop 194
cctcagcgtgatgcgtcagtgggac

SEQ ID NO: 48596 - DNA, 25 bp, Artificial
  probe
  misc_feature (1)..(25): SEQ ID NO: 3812; WAN024AAV_at; Start 94; Stop 118
ggtctcacctcgtcgcattggctga

SEQ ID NO: 48597 - DNA, 25 bp, Artificial
  probe
  misc_feature (1)..(25): SEQ ID NO: 3812; WAN024AAV_at; Start 18; Stop 42
ggctctctgtatcatctcatcatat

SEQ ID NO: 48598 - DNA, 25 bp, Artificial
  probe
  misc_feature (1)..(25): SEQ ID NO: 3812; WAN024AAV_at; Start 8; Stop 32
gaccaattcaggctctctgtatcat

SEQ ID NO: 48599 - DNA, 25 bp, Artificial
  probe
  misc_feature (1)..(25): SEQ ID NO: 4622; WAN024AAW_at; Start 162; Stop 186
ctcgtaaagtaagtaggaaatatga

SEQ ID NO: 48600 - DNA, 25 bp, Artificial
  probe
  misc_feature (1)..(25): SEQ ID NO: 4622; WAN024AAW_at; Start 193; Stop 217
gatacagagagcctgaattggtcag

SEQ ID NO: 48601 - DNA, 25 bp, Artificial
  probe
  misc_feature (1)..(25): SEQ ID NO: 4622; WAN024AAW_at; Start 109; Stop 133
ccaatgcgacgaggtgagaccgaag

SEQ ID NO: 48602 - DNA, 25 bp, Artificial
  probe
  misc_feature (1)..(25): SEQ ID NO: 4622; WAN024AAW_at; Start 40; Stop 64
gcatcacgctgaggcggtatcactg

SEQ ID NO: 48603 - DNA, 25 bp, Artificial
  probe
  misc_feature (1)..(25): SEQ ID NO: 4622; WAN024AAW_at; Start 166; Stop 190
taaagtaagtaggaaatatgatgag

SEQ ID NO: 48604 - DNA, 25 bp, Artificial
  probe
  misc_feature (1)..(25): SEQ ID NO: 4622; WAN024AAW_at; Start 182; Stop 206
tatgatgagatgatacagagagcct

SEQ ID NO: 48605 - DNA, 25 bp, Artificial
  probe
  misc_feature (1)..(25): SEQ ID NO: 4622; WAN024AAW_at; Start 49; Stop 73
tgaggcggtatcactgcttgtacga

SEQ ID NO: 48606 - DNA, 25 bp, Artificial
  probe
  misc_feature (1)..(25): SEQ ID NO: 4622; WAN024AAW_at; Start 52; Stop 76
ggcggtatcactgcttgtacgagtt

SEQ ID NO: 48607 - DNA, 25 bp, Artificial
  probe
  misc_feature (1)..(25): SEQ ID NO: 4622; WAN024AAW_at; Start 185; Stop 209
gatgagatgatacagagagcctgaa

SEQ ID NO: 48608 - DNA, 25 bp, Artificial
  probe
  misc_feature (1)..(25): SEQ ID NO: 4622; WAN024AAW_at; Start 96; Stop 120
agtagatgttcagccaatgcgacga

SEQ ID NO: 48609 - DNA, 25 bp, Artificial
  probe
  misc_feature (1)..(25): SEQ ID NO: 4622; WAN024AAW_at; Start 190; Stop 214
gatgatacagagagcctgaattggt

SEQ ID NO: 48610 - DNA, 25 bp, Artificial
  probe
  misc_feature (1)..(25): SEQ ID NO: 4622; WAN024AAW_at; Start 126; Stop 150
gaccgaaggtcgataaggtgtgttc

SEQ ID NO: 48611 - DNA, 25 bp, Artificial
  probe
  misc_feature (1)..(25): SEQ ID NO: 4622; WAN024AAW_at; Start 94; Stop 118
aaagtagatgttcagccaatgcgac

SEQ ID NO: 48612 - DNA, 25 bp, Artificial
  probe
  misc_feature (1)..(25): SEQ ID NO: 4622; WAN024AAW_at; Start 47; Stop 71
gctgaggcggtatcactgcttgtac

SEQ ID NO: 48613 - DNA, 25 bp, Artificial
  probe
  misc_feature (1)..(25): SEQ ID NO: 4622; WAN024AAW_at; Start 18; Stop 42
aaactttttgagtcccactgacgca

SEQ ID NO: 48614 - DNA, 25 bp, Artificial
  probe
  misc_feature (1)..(25): SEQ ID NO: 4622; WAN024AAW_at; Start 92; Stop 116
taaaagtagatgttcagccaatgcg

SEQ ID NO: 48615 - DNA, 25 bp, Artificial
  probe
  misc_feature (1)..(25): SEQ ID NO: 4622; WAN024AAW_at; Start 16; Stop 40
ccaaactttttgagtcccactgacg

SEQ ID NO: 48616 - DNA, 25 bp, Artificial
  probe
  misc_feature (1)..(25): SEQ ID NO: 4622; WAN024AAW_at; Start 105; Stop 129
tcagccaatgcgacgaggtgagacc

SEQ ID NO: 48617 - DNA, 25 bp, Artificial
  probe
  misc_feature (1)..(25): SEQ ID NO: 4622; WAN024AAW_at; Start 128; Stop 152
ccgaaggtcgataaggtgtgttctg

SEQ ID NO: 48618 - DNA, 25 bp, Artificial
  probe
  misc_feature (1)..(25): SEQ ID NO: 4622; WAN024AAW_at; Start 100; Stop 124
gatgttcagccaatgcgacgaggtg

SEQ ID NO: 48619 - DNA, 25 bp, Artificial
  probe
  misc_feature (1)..(25): SEQ ID NO: 4622; WAN024AAW_at; Start 26; Stop 50
tgagtcccactgacgcatcacgctg

SEQ ID NO: 48620 - DNA, 25 bp, Artificial
  probe
  misc_feature (1)..(25): SEQ ID NO: 4622; WAN024AAW_at; Start 54; Stop 78
cggtatcactgcttgtacgagttga

SEQ ID NO: 48621 - DNA, 25 bp, Artificial
  probe
  misc_feature (1)..(25): SEQ ID NO: 4622; WAN024AAW_at; Start 57; Stop 81
tatcactgcttgtacgagttgaagc

SEQ ID NO: 48622 - DNA, 25 bp, Artificial
  probe
  misc_feature (1)..(25): SEQ ID NO: 4622; WAN024AAW_at; Start 23; Stop 47
ttttgagtcccactgacgcatcacg

SEQ ID NO: 48623 - DNA, 25 bp, Artificial
  probe
  misc_feature (1)..(25): SEQ ID NO: 4622; WAN024AAW_at; Start 134; Stop 158
gtcgataaggtgtgttctgggtata

SEQ ID NO: 48624 - DNA, 25 bp, Artificial
  probe
  misc_feature (1)..(25): SEQ ID NO: 4622; WAN024AAW_at; Start 33; Stop 57
cactgacgcatcacgctgaggcggt

SEQ ID NO: 48625 - DNA, 25 bp, Artificial
  probe
  misc_feature (1)..(25): SEQ ID NO: 4622; WAN024AAW_at; Start 60; Stop 84
cactgcttgtacgagttgaagcatc

SEQ ID NO: 48626 - DNA, 25 bp, Artificial
  probe
  misc_feature (1)..(25): SEQ ID NO: 4622; WAN024AAW_at; Start 195; Stop 219
tacagagagcctgaattggtcaggt

SEQ ID NO: 48627 - DNA, 25 bp, Artificial
  probe
  misc_feature (1)..(25): SEQ ID NO: 4622; WAN024AAW_at; Start 107; Stop 131
agccaatgcgacgaggtgagaccga

SEQ ID NO: 48628 - DNA, 25 bp, Artificial
  probe
  misc_feature (1)..(25): SEQ ID NO: 4622; WAN024AAW_at; Start 98; Stop 122
tagatgttcagccaatgcgacgagg

SEQ ID NO: 48629 - DNA, 25 bp, Artificial
  probe
  misc_feature (1)..(25): SEQ ID NO: 4622; WAN024AAW_at; Start 44; Stop 68
cacgctgaggcggtatcactgcttg

SEQ ID NO: 48630 - DNA, 25 bp, Artificial
  probe
  misc_feature (1)..(25): SEQ ID NO: 4622; WAN024AAW_at; Start 63; Stop 87
tgcttgtacgagttgaagcatcagc

SEQ ID NO: 48631 - DNA, 25 bp, Artificial
  probe
  misc_feature (1)..(25): SEQ ID NO: 4622; WAN024AAW_at; Start 102; Stop 126
tgttcagccaatgcgacgaggtgag

SEQ ID NO: 48632 - DNA, 25 bp, Artificial
  probe
  misc_feature (1)..(25): SEQ ID NO: 4622; WAN024AAW_at; Start 37; Stop 61
gacgcatcacgctgaggcggtatca

SEQ ID NO: 48633 - DNA, 25 bp, Artificial
  probe
  misc_feature (1)..(25): SEQ ID NO: 486; WAN024AAX_at; Start 46; Stop 70
taatttaagtttggactatcatttc

SEQ ID NO: 48634 - DNA, 25 bp, Artificial
  probe
  misc_feature (1)..(25): SEQ ID NO: 486; WAN024AAX_at; Start 61; Stop 85
ctatcatttcaagtatattataaca

SEQ ID NO: 48635 - DNA, 25 bp, Artificial
  probe
  misc_feature (1)..(25): SEQ ID NO: 486; WAN024AAX_at; Start 48; Stop 72
atttaagtttggactatcatttcaa

SEQ ID NO: 48636 - DNA, 25 bp, Artificial
  probe
  misc_feature (1)..(25): SEQ ID NO: 486; WAN024AAX_at; Start 54; Stop 78
gtttggactatcatttcaagtatat

SEQ ID NO: 48637 - DNA, 25 bp, Artificial
  probe
  misc_feature (1)..(25): SEQ ID NO: 486; WAN024AAX_at; Start 55; Stop 79
tttggactatcatttcaagtatatt

SEQ ID NO: 48638 - DNA, 25 bp, Artificial
  probe
  misc_feature (1)..(25): SEQ ID NO: 486; WAN024AAX_at; Start 53; Stop 77
agtttggactatcatttcaagtata

SEQ ID NO: 48639 - DNA, 25 bp, Artificial
  probe
  misc_feature (1)..(25): SEQ ID NO: 486; WAN024AAX_at; Start 52; Stop 76
aagtttggactatcatttcaagtat

SEQ ID NO: 48640 - DNA, 25 bp, Artificial
  probe
  misc_feature (1)..(25): SEQ ID NO: 486; WAN024AAX_at; Start 67; Stop 91
tttcaagtatattataacactttta

SEQ ID NO: 48641 - DNA, 25 bp, Artificial
  probe
  misc_feature (1)..(25): SEQ ID NO: 486; WAN024AAX_at; Start 49; Stop 73
tttaagtttggactatcatttcaag

SEQ ID NO: 48642 - DNA, 25 bp, Artificial
  probe
  misc_feature (1)..(25): SEQ ID NO: 486; WAN024AAX_at; Start 60; Stop 84
actatcatttcaagtatattataac

SEQ ID NO: 48643 - DNA, 25 bp, Artificial
  probe
  misc_feature (1)..(25): SEQ ID NO: 486; WAN024AAX_at; Start 47; Stop 71
aatttaagtttggactatcatttca

SEQ ID NO: 48644 - DNA, 25 bp, Artificial
  probe
  misc_feature (1)..(25): SEQ ID NO: 486; WAN024AAX_at; Start 57; Stop 81
tggactatcatttcaagtatattat

SEQ ID NO: 48645 - DNA, 25 bp, Artificial
  probe
  misc_feature (1)..(25): SEQ ID NO: 486; WAN024AAX_at; Start 51; Stop 75
taagtttggactatcatttcaagta

SEQ ID NO: 48646 - DNA, 25 bp, Artificial
  probe
  misc_feature (1)..(25): SEQ ID NO: 486; WAN024AAX_at; Start 50; Stop 74
ttaagtttggactatcatttcaagt

SEQ ID NO: 48647 - DNA, 25 bp, Artificial
  probe
  misc_feature (1)..(25): SEQ ID NO: 486; WAN024AAX_at; Start 56; Stop 80
ttggactatcatttcaagtatatta

SEQ ID NO: 48648 - DNA, 25 bp, Artificial
  probe
  misc_feature (1)..(25): SEQ ID NO: 486; WAN024AAX_at; Start 58; Stop 82
ggactatcatttcaagtatattata

SEQ ID NO: 48649 - DNA, 25 bp, Artificial
  probe
  misc_feature (1)..(25): SEQ ID NO: 486; WAN024AAX_at; Start 59; Stop 83
gactatcatttcaagtatattataa

SEQ ID NO: 48650 - DNA, 25 bp, Artificial
  probe
  misc_feature (1)..(25): SEQ ID NO: 4402; WAN024AAY_at; Start 10; Stop 34
tataatatacttgaaatgatagtcc

SEQ ID NO: 48651 - DNA, 25 bp, Artificial
  probe
  misc_feature (1)..(25): SEQ ID NO: 4402; WAN024AAY_at; Start 17; Stop 41
tacttgaaatgatagtccaaactta

SEQ ID NO: 48652 - DNA, 25 bp, Artificial
  probe
  misc_feature (1)..(25): SEQ ID NO: 4402; WAN024AAY_at; Start 7; Stop 31
tgttataatatacttgaaatgatag

SEQ ID NO: 48653 - DNA, 25 bp, Artificial
  probe
  misc_feature (1)..(25): SEQ ID NO: 4402; WAN024AAY_at; Start 21; Stop 45
tgaaatgatagtccaaacttaaatt

SEQ ID NO: 48654 - DNA, 25 bp, Artificial
  probe
  misc_feature (1)..(25): SEQ ID NO: 4402; WAN024AAY_at; Start 15; Stop 39
tatacttgaaatgatagtccaaact

SEQ ID NO: 48655 - DNA, 25 bp, Artificial
  probe
  misc_feature (1)..(25): SEQ ID NO: 4402; WAN024AAY_at; Start 19; Stop 43
cttgaaatgatagtccaaacttaaa

SEQ ID NO: 48656 - DNA, 25 bp, Artificial
  probe
  misc_feature (1)..(25): SEQ ID NO: 4402; WAN024AAY_at; Start 8; Stop 32
gttataatatacttgaaatgatagt

SEQ ID NO: 48657 - DNA, 25 bp, Artificial
  probe
  misc_feature (1)..(25): SEQ ID NO: 4402; WAN024AAY_at; Start 14; Stop 38
atatacttgaaatgatagtccaaac

SEQ ID NO: 48658 - DNA, 25 bp, Artificial
  probe
  misc_feature (1)..(25): SEQ ID NO: 4402; WAN024AAY_at; Start 22; Stop 46
gaaatgatagtccaaacttaaatta

SEQ ID NO: 48659 - DNA, 25 bp, Artificial
  probe
  misc_feature (1)..(25): SEQ ID NO: 4402; WAN024AAY_at; Start 9; Stop 33
ttataatatacttgaaatgatagtc

SEQ ID NO: 48660 - DNA, 25 bp, Artificial
  probe
  misc_feature (1)..(25): SEQ ID NO: 4402; WAN024AAY_at; Start 13; Stop 37
aatatacttgaaatgatagtccaaa

SEQ ID NO: 48661 - DNA, 25 bp, Artificial
  probe
  misc_feature (1)..(25): SEQ ID NO: 4402; WAN024AAY_at; Start 20; Stop 44
ttgaaatgatagtccaaacttaaat

SEQ ID NO: 48662 - DNA, 25 bp, Artificial
  probe
  misc_feature (1)..(25): SEQ ID NO: 4402; WAN024AAY_at; Start 12; Stop 36
taatatacttgaaatgatagtccaa

SEQ ID NO: 48663 - DNA, 25 bp, Artificial
  probe
  misc_feature (1)..(25): SEQ ID NO: 4402; WAN024AAY_at; Start 18; Stop 42
acttgaaatgatagtccaaacttaa

SEQ ID NO: 48664 - DNA, 25 bp, Artificial
  probe
  misc_feature (1)..(25): SEQ ID NO: 4402; WAN024AAY_at; Start 1; Stop 25
taaaagtgttataatatacttgaaa

SEQ ID NO: 48665 - DNA, 25 bp, Artificial
  probe
  misc_feature (1)..(25): SEQ ID NO: 4402; WAN024AAY_at; Start 2; Stop 26
aaaagtgttataatatacttgaaat

SEQ ID NO: 48666 - DNA, 25 bp, Artificial
  probe
  misc_feature (1)..(25): SEQ ID NO: 4402; WAN024AAY_at; Start 11; Stop 35
ataatatacttgaaatgatagtcca

SEQ ID NO: 48667 - DNA, 25 bp, Artificial
  probe
  misc_feature (1)..(25): SEQ ID NO: 4402; WAN024AAY_at; Start 16; Stop 40
atacttgaaatgatagtccaaactt

SEQ ID NO: 48668 - DNA, 25 bp, Artificial
  probe
  misc_feature (1)..(25): SEQ ID NO: 4402; WAN024AAY_at; Start 58; Stop 82
tatgatatagaaaaattatattgag

SEQ ID NO: 48669 - DNA, 25 bp, Artificial
  probe
  misc_feature (1)..(25): SEQ ID NO: 3723; WAN024AAZ_at; Start 224; Stop 248
ggtctattcaattgttaaggttcaa

SEQ ID NO: 48670 - DNA, 25 bp, Artificial
  probe
  misc_feature (1)..(25): SEQ ID NO: 3723; WAN024AAZ_at; Start 453; Stop 477
aactgtcatctaaaagtcttctagc

SEQ ID NO: 48671 - DNA, 25 bp, Artificial
  probe
  misc_feature (1)..(25): SEQ ID NO: 3723; WAN024AAZ_at; Start 534; Stop 558
ggcatactttgatacctttttagac

SEQ ID NO: 48672 - DNA, 25 bp, Artificial
  probe
  misc_feature (1)..(25): SEQ ID NO: 3723; WAN024AAZ_at; Start 300; Stop 324
tatcttgatgtaacaaaattctata

SEQ ID NO: 48673 - DNA, 25 bp, Artificial
  probe
  misc_feature (1)..(25): SEQ ID NO: 3723; WAN024AAZ_at; Start 134; Stop 158
gcttagcagaactttttttgccgaa

SEQ ID NO: 48674 - DNA, 25 bp, Artificial
  probe
  misc_feature (1)..(25): SEQ ID NO: 3723; WAN024AAZ_at; Start 383; Stop 407
tagaatttgcttatataaaaaggtc

SEQ ID NO: 48675 - DNA, 25 bp, Artificial
  probe
  misc_feature (1)..(25): SEQ ID NO: 3723; WAN024AAZ_at; Start 179; Stop 203
gacggataggttattacgctccaaa

SEQ ID NO: 48676 - DNA, 25 bp, Artificial
  probe
  misc_feature (1)..(25): SEQ ID NO: 3723; WAN024AAZ_at; Start 27; Stop 51
gatgagccggcttcaaccttagaag

SEQ ID NO: 48677 - DNA, 25 bp, Artificial
  probe
  misc_feature (1)..(25): SEQ ID NO: 3723; WAN024AAZ_at; Start 72; Stop 96
tcatagcggatagggtatccctccc

SEQ ID NO: 48678 - DNA, 25 bp, Artificial
  probe
  misc_feature (1)..(25): SEQ ID NO: 3723; WAN024AAZ_at; Start 283; Stop 307
gaccatcagaaaatatttatcttga

SEQ ID NO: 48679 - DNA, 25 bp, Artificial
  probe
  misc_feature (1)..(25): SEQ ID NO: 3723; WAN024AAZ_at; Start 62; Stop 86
ctcattttcttcatagcggataggg

SEQ ID NO: 48680 - DNA, 25 bp, Artificial
  probe
  misc_feature (1)..(25): SEQ ID NO: 3723; WAN024AAZ_at; Start 85; Stop 109
ggtatccctccctatattcaaactc

SEQ ID NO: 48681 - DNA, 25 bp, Artificial
  probe
  misc_feature (1)..(25): SEQ ID NO: 3723; WAN024AAZ_at; Start 111; Stop 135
tacttatcgctcactttctttttgc

SEQ ID NO: 48682 - DNA, 25 bp, Artificial
  probe
  misc_feature (1)..(25): SEQ ID NO: 3723; WAN024AAZ_at; Start 195; Stop 219
cgctccaaaaataattaacgtcttg

SEQ ID NO: 48683 - DNA, 25 bp, Artificial
  probe
  misc_feature (1)..(25): SEQ ID NO: 3723; WAN024AAZ_at; Start 236; Stop 260
tgttaaggttcaaaatttatcgaga

SEQ ID NO: 48684 - DNA, 25 bp, Artificial
  probe
  misc_feature (1)..(25): SEQ ID NO: 3723; WAN024AAZ_at; Start 362; Stop 386
tcttggtaaccaattttgaaataga

SEQ ID NO: 48685 - DNA, 25 bp, Artificial
  probe
  misc_feature (1)..(25): SEQ ID NO: 3723; WAN024AAZ_at; Start 160; Stop 184
tattcagccgaaagatcttgacgga

SEQ ID NO: 48686 - DNA, 25 bp, Artificial
  probe
  misc_feature (1)..(25): SEQ ID NO: 3723; WAN024AAZ_at; Start 441; Stop 465
gaccctcttggtaactgtcatctaa

SEQ ID NO: 48687 - DNA, 25 bp, Artificial
  probe
  misc_feature (1)..(25): SEQ ID NO: 3723; WAN024AAZ_at; Start 35; Stop 59
ggcttcaaccttagaagtatcatta

SEQ ID NO: 48688 - DNA, 25 bp, Artificial
  probe
  misc_feature (1)..(25): SEQ ID NO: 3723; WAN024AAZ_at; Start 325; Stop 349
aattaccctcttatacttaacagtg

SEQ ID NO: 48689 - DNA, 25 bp, Artificial
  probe
  misc_feature (1)..(25): SEQ ID NO: 3723; WAN024AAZ_at; Start 12; Stop 36
tccgcctctattccggatgagccgg

SEQ ID NO: 48690 - DNA, 25 bp, Artificial
  probe
  misc_feature (1)..(25): SEQ ID NO: 3723; WAN024AAZ_at; Start 20; Stop 44
tattccggatgagccggcttcaacc

SEQ ID NO: 48691 - DNA, 25 bp, Artificial
  probe
  misc_feature (1)..(25): SEQ ID NO: 3723; WAN024AAZ_at; Start 488; Stop 512
ttttctaatcgcctttaaagtgtca

SEQ ID NO: 48692 - DNA, 25 bp, Artificial
  probe
  misc_feature (1)..(25): SEQ ID NO: 3723; WAN024AAZ_at; Start 340; Stop 364
cttaacagtgaaaagaagtctttct

SEQ ID NO: 48693 - DNA, 25 bp, Artificial
  probe
  misc_feature (1)..(25): SEQ ID NO: 3723; WAN024AAZ_at; Start 564; Stop 588
gtctttaatagtgcctttccacctc

SEQ ID NO: 48694 - DNA, 25 bp, Artificial
  probe
  misc_feature (1)..(25): SEQ ID NO: 3723; WAN024AAZ_at; Start 527; Stop 551
tatctctggcatactttgatacctt

SEQ ID NO: 48695 - DNA, 25 bp, Artificial
  probe
  misc_feature (1)..(25): SEQ ID NO: 3723; WAN024AAZ_at; Start 267; Stop 291
aatctttttaaaatttgaccatcag

SEQ ID NO: 48696 - DNA, 25 bp, Artificial
  probe
  misc_feature (1)..(25): SEQ ID NO: 3723; WAN024AAZ_at; Start 246; Stop 270
caaaatttatcgagagttattaatc

SEQ ID NO: 48697 - DNA, 25 bp, Artificial
  probe
  misc_feature (1)..(25): SEQ ID NO: 3723; WAN024AAZ_at; Start 99; Stop 123
tattcaaactcttacttatcgctca

SEQ ID NO: 48698 - DNA, 25 bp, Artificial
  probe
  misc_feature (1)..(25): SEQ ID NO: 3723; WAN024AAZ_at; Start 426; Stop 450
tagcagtgaaaattagaccctcttg

SEQ ID NO: 48699 - DNA, 25 bp, Artificial
  probe
  misc_feature (1)..(25): SEQ ID NO: 3723; WAN024AAZ_at; Start 554; Stop 578
tagacttaaagtctttaatagtgcc

SEQ ID NO: 48700 - DNA, 25 bp, Artificial
  probe
  misc_feature (1)..(25): SEQ ID NO: 3723; WAN024AAZ_at; Start 149; Stop 173
ttttgccgaattattcagccgaaag

SEQ ID NO: 48701 - DNA, 25 bp, Artificial
  probe
  misc_feature (1)..(25): SEQ ID NO: 3723; WAN024AAZ_at; Start 210; Stop 234
taacgtcttgtcttggtctattcaa

SEQ ID NO: 48702 - DNA, 25 bp, Artificial
  probe
  misc_feature (1)..(25): SEQ ID NO: 3723; WAN024AAZ_at; Start 166; Stop 190
gccgaaagatcttgacggataggtt

SEQ ID NO: 48703 - DNA, 25 bp, Artificial
  probe
  misc_feature (1)..(25): SEQ ID NO: 519; WAN024AB2_at; Start 470; Stop 494
aagtgagcgataagtaagagtttga

SEQ ID NO: 48704 - DNA, 25 bp, Artificial
  probe
  misc_feature (1)..(25): SEQ ID NO: 519; WAN024AB2_at; Start 232; Stop 256
agaaagacttcttttcactgttaag

SEQ ID NO: 48705 - DNA, 25 bp, Artificial
  probe
  misc_feature (1)..(25): SEQ ID NO: 519; WAN024AB2_at; Start 560; Stop 584
ccggctcatccggaatagaggcgga

SEQ ID NO: 48706 - DNA, 25 bp, Artificial
  probe
  misc_feature (1)..(25): SEQ ID NO: 519; WAN024AB2_at; Start 104; Stop 128
gaaaattaaagaaatgctagaagac

SEQ ID NO: 48707 - DNA, 25 bp, Artificial
  probe
  misc_feature (1)..(25): SEQ ID NO: 519; WAN024AB2_at; Start 47; Stop 71
ggtatcaaagtatgccagagataaa

SEQ ID NO: 48708 - DNA, 25 bp, Artificial
  probe
  misc_feature (1)..(25): SEQ ID NO: 519; WAN024AB2_at; Start 555; Stop 579
tgaagccggctcatccggaatagag

SEQ ID NO: 48709 - DNA, 25 bp, Artificial
  probe
  misc_feature (1)..(25): SEQ ID NO: 519; WAN024AB2_at; Start 540; Stop 564
tgatacttctaaggttgaagccggc

SEQ ID NO: 48710 - DNA, 25 bp, Artificial
  probe
  misc_feature (1)..(25): SEQ ID NO: 519; WAN024AB2_at; Start 305; Stop 329
ctgatggtcaaattttaaaaagatt

SEQ ID NO: 48711 - DNA, 25 bp, Artificial
  probe
  misc_feature (1)..(25): SEQ ID NO: 519; WAN024AB2_at; Start 336; Stop 360
tctcgataaattttgaaccttaaca

SEQ ID NO: 48712 - DNA, 25 bp, Artificial
  probe
  misc_feature (1)..(25): SEQ ID NO: 519; WAN024AB2_at; Start 38; Stop 62
gtctaaaaaggtatcaaagtatgcc

SEQ ID NO: 48713 - DNA, 25 bp, Artificial
  probe
  misc_feature (1)..(25): SEQ ID NO: 519; WAN024AB2_at; Start 274; Stop 298
tagaattttgttacatcaagataaa

SEQ ID NO: 48714 - DNA, 25 bp, Artificial
  probe
  misc_feature (1)..(25): SEQ ID NO: 519; WAN024AB2_at; Start 134; Stop 158
gatgacagttaccaagagggtctaa

SEQ ID NO: 48715 - DNA, 25 bp, Artificial
  probe
  misc_feature (1)..(25): SEQ ID NO: 519; WAN024AB2_at; Start 210; Stop 234
tctatttcaaaattggttaccaaga

SEQ ID NO: 48716 - DNA, 25 bp, Artificial
  probe
  misc_feature (1)..(25): SEQ ID NO: 519; WAN024AB2_at; Start 510; Stop 534
ccctatccgctatgaagaaaatgag

SEQ ID NO: 48717 - DNA, 25 bp, Artificial
  probe
  misc_feature (1)..(25): SEQ ID NO: 519; WAN024AB2_at; Start 76; Stop 100
tataaatatgacactttaaaggcga

SEQ ID NO: 48718 - DNA, 25 bp, Artificial
  probe
  misc_feature (1)..(25): SEQ ID NO: 519; WAN024AB2_at; Start 349; Stop 373
tgaaccttaacaattgaatagacca

SEQ ID NO: 48719 - DNA, 25 bp, Artificial
  probe
  misc_feature (1)..(25): SEQ ID NO: 519; WAN024AB2_at; Start 146; Stop 170
caagagggtctaattttcactgcta

SEQ ID NO: 48720 - DNA, 25 bp, Artificial
  probe
  misc_feature (1)..(25): SEQ ID NO: 519; WAN024AB2_at; Start 247; Stop 271
cactgttaagtataagagggtaatt

SEQ ID NO: 48721 - DNA, 25 bp, Artificial
  probe
  misc_feature (1)..(25): SEQ ID NO: 519; WAN024AB2_at; Start 405; Stop 429
taacctatccgtcaagatctttcgg

SEQ ID NO: 48722 - DNA, 25 bp, Artificial
  probe
  misc_feature (1)..(25): SEQ ID NO: 519; WAN024AB2_at; Start 487; Stop 511
gagtttgaatatagggagggatacc

SEQ ID NO: 48723 - DNA, 25 bp, Artificial
  probe
  misc_feature (1)..(25): SEQ ID NO: 519; WAN024AB2_at; Start 84; Stop 108
tgacactttaaaggcgattagaaaa

SEQ ID NO: 48724 - DNA, 25 bp, Artificial
  probe
  misc_feature (1)..(25): SEQ ID NO: 519; WAN024AB2_at; Start 453; Stop 477
tctgctaagcaaaaagaaagtgagc

SEQ ID NO: 48725 - DNA, 25 bp, Artificial
  probe
  misc_feature (1)..(25): SEQ ID NO: 519; WAN024AB2_at; Start 547; Stop 571
tctaaggttgaagccggctcatccg

SEQ ID NO: 48726 - DNA, 25 bp, Artificial
  probe
  misc_feature (1)..(25): SEQ ID NO: 519; WAN024AB2_at; Start 377; Stop 401
caagacgttaattatttttggagcg

SEQ ID NO: 48727 - DNA, 25 bp, Artificial
  probe
  misc_feature (1)..(25): SEQ ID NO: 519; WAN024AB2_at; Start 8; Stop 32
gaggtggaaaggcactattaaagac

SEQ ID NO: 48728 - DNA, 25 bp, Artificial
  probe
  misc_feature (1)..(25): SEQ ID NO: 519; WAN024AB2_at; Start 119; Stop 143
gctagaagacttttagatgacagtt

SEQ ID NO: 48729 - DNA, 25 bp, Artificial
  probe
  misc_feature (1)..(25): SEQ ID NO: 519; WAN024AB2_at; Start 189; Stop 213
gacctttttatataagcaaattcta

SEQ ID NO: 48730 - DNA, 25 bp, Artificial
  probe
  misc_feature (1)..(25): SEQ ID NO: 519; WAN024AB2_at; Start 393; Stop 417
tttggagcgtaataacctatccgtc

SEQ ID NO: 48731 - DNA, 25 bp, Artificial
  probe
  misc_feature (1)..(25): SEQ ID NO: 519; WAN024AB2_at; Start 496; Stop 520
tatagggagggataccctatccgct

SEQ ID NO: 48732 - DNA, 25 bp, Artificial
  probe
  misc_feature (1)..(25): SEQ ID NO: 519; WAN024AB2_at; Start 326; Stop 350
gattaataactctcgataaattttg

SEQ ID NO: 48733 - DNA, 25 bp, Artificial
  probe
  misc_feature (1)..(25): SEQ ID NO: 519; WAN024AB2_at; Start 420; Stop 444
gatctttcggctgaataattcggca

SEQ ID NO: 48734 - DNA, 25 bp, Artificial
  probe
  misc_feature (1)..(25): SEQ ID NO: 519; WAN024AB2_at; Start 362; Stop 386
ttgaatagaccaagacaagacgtta

SEQ ID NO: 48735 - DNA, 25 bp, Artificial
  probe
  misc_feature (1)..(25): SEQ ID NO: 519; WAN024AB2_at; Start 438; Stop 462
ttcggcaaaaaaagttctgctaagc

SEQ ID NO: 48736 - DNA, 25 bp, Artificial
  probe
  misc_feature (1)..(25): SEQ ID NO: 519; WAN024AB2_at; Start 290; Stop 314
caagataaatattttctgatggtca

SEQ ID NO: 48737 - DNA, 25 bp, Artificial
  probe
  misc_feature (1)..(25): SEQ ID NO: 590; WAN024AB3_at; Start 114; Stop 138
taccattgtcaatatttgtagcact

SEQ ID NO: 48738 - DNA, 25 bp, Artificial
  probe
  misc_feature (1)..(25): SEQ ID NO: 590; WAN024AB3_at; Start 2; Stop 26
tctaggcttgctttatatttatgat

SEQ ID NO: 48739 - DNA, 25 bp, Artificial
  probe
  misc_feature (1)..(25): SEQ ID NO: 590; WAN024AB3_at; Start 28; Stop 52
aaagactgctcctaaaaatgaaaca

SEQ ID NO: 48740 - DNA, 25 bp, Artificial
  probe
  misc_feature (1)..(25): SEQ ID NO: 590; WAN024AB3_at; Start 146; Stop 170
ggagtttttccatcgagtaaatatc

SEQ ID NO: 48741 - DNA, 25 bp, Artificial
  probe
  misc_feature (1)..(25): SEQ ID NO: 590; WAN024AB3_at; Start 34; Stop 58
tgctcctaaaaatgaaacagatata

SEQ ID NO: 48742 - DNA, 25 bp, Artificial
  probe
  misc_feature (1)..(25): SEQ ID NO: 590; WAN024AB3_at; Start 26; Stop 50
taaaagactgctcctaaaaatgaaa

SEQ ID NO: 48743 - DNA, 25 bp, Artificial
  probe
  misc_feature (1)..(25): SEQ ID NO: 590; WAN024AB3_at; Start 282; Stop 306
gatgagtattttctagattttcttg

SEQ ID NO: 48744 - DNA, 25 bp, Artificial
  probe
  misc_feature (1)..(25): SEQ ID NO: 590; WAN024AB3_at; Start 170; Stop 194
ctttttggaatagatgagcctgttg

SEQ ID NO: 48745 - DNA, 25 bp, Artificial
  probe
  misc_feature (1)..(25): SEQ ID NO: 590; WAN024AB3_at; Start 167; Stop 191
tatctttttggaatagatgagcctg

SEQ ID NO: 48746 - DNA, 25 bp, Artificial
  probe
  misc_feature (1)..(25): SEQ ID NO: 590; WAN024AB3_at; Start 254; Stop 278
tgatatttttcctacctgtcctttg

SEQ ID NO: 48747 - DNA, 25 bp, Artificial
  probe
  misc_feature (1)..(25): SEQ ID NO: 590; WAN024AB3_at; Start 17; Stop 41
tatttatgataaaagactgctccta

SEQ ID NO: 48748 - DNA, 25 bp, Artificial
  probe
  misc_feature (1)..(25): SEQ ID NO: 590; WAN024AB3_at; Start 123; Stop 147
caatatttgtagcactaattctagg

SEQ ID NO: 48749 - DNA, 25 bp, Artificial
  probe
  misc_feature (1)..(25): SEQ ID NO: 590; WAN024AB3_at; Start 104; Stop 128
taacctaagataccattgtcaatat

SEQ ID NO: 48750 - DNA, 25 bp, Artificial
  probe
  misc_feature (1)..(25): SEQ ID NO: 590; WAN024AB3_at; Start 321; Stop 345
tgaagttttagcttttgaactagtc

SEQ ID NO: 48751 - DNA, 25 bp, Artificial
  probe
  misc_feature (1)..(25): SEQ ID NO: 590; WAN024AB3_at; Start 155; Stop 179
ccatcgagtaaatatctttttggaa

SEQ ID NO: 48752 - DNA, 25 bp, Artificial
  probe
  misc_feature (1)..(25): SEQ ID NO: 590; WAN024AB3_at; Start 89; Stop 113
tctatatcttcgtagtaacctaaga

SEQ ID NO: 48753 - DNA, 25 bp, Artificial
  probe
  misc_feature (1)..(25): SEQ ID NO: 590; WAN024AB3_at; Start 175; Stop 199
tggaatagatgagcctgttggtact

SEQ ID NO: 48754 - DNA, 25 bp, Artificial
  probe
  misc_feature (1)..(25): SEQ ID NO: 590; WAN024AB3_at; Start 101; Stop 125
tagtaacctaagataccattgtcaa

SEQ ID NO: 48755 - DNA, 25 bp, Artificial
  probe
  misc_feature (1)..(25): SEQ ID NO: 590; WAN024AB3_at; Start 263; Stop 287
tcctacctgtcctttgtaggatgag

SEQ ID NO: 48756 - DNA, 25 bp, Artificial
  probe
  misc_feature (1)..(25): SEQ ID NO: 590; WAN024AB3_at; Start 23; Stop 47
tgataaaagactgctcctaaaaatg

SEQ ID NO: 48757 - DNA, 25 bp, Artificial
  probe
  misc_feature (1)..(25): SEQ ID NO: 590; WAN024AB3_at; Start 142; Stop 166
tctaggagtttttccatcgagtaaa

SEQ ID NO: 48758 - DNA, 25 bp, Artificial
  probe
  misc_feature (1)..(25): SEQ ID NO: 590; WAN024AB3_at; Start 250; Stop 274
tgtctgatatttttcctacctgtcc

SEQ ID NO: 48759 - DNA, 25 bp, Artificial
  probe
  misc_feature (1)..(25): SEQ ID NO: 590; WAN024AB3_at; Start 132; Stop 156
tagcactaattctaggagtttttcc

SEQ ID NO: 48760 - DNA, 25 bp, Artificial
  probe
  misc_feature (1)..(25): SEQ ID NO: 590; WAN024AB3_at; Start 266; Stop 290
tacctgtcctttgtaggatgagtat

SEQ ID NO: 48761 - DNA, 25 bp, Artificial
  probe
  misc_feature (1)..(25): SEQ ID NO: 590; WAN024AB3_at; Start 247; Stop 271
tgttgtctgatatttttcctacctg

SEQ ID NO: 48762 - DNA, 25 bp, Artificial
  probe
  misc_feature (1)..(25): SEQ ID NO: 590; WAN024AB3_at; Start 126; Stop 150
tatttgtagcactaattctaggagt

SEQ ID NO: 48763 - DNA, 25 bp, Artificial
  probe
  misc_feature (1)..(25): SEQ ID NO: 590; WAN024AB3_at; Start 138; Stop 162
taattctaggagtttttccatcgag

SEQ ID NO: 48764 - DNA, 25 bp, Artificial
  probe
  misc_feature (1)..(25): SEQ ID NO: 590; WAN024AB3_at; Start 31; Stop 55
gactgctcctaaaaatgaaacagat

SEQ ID NO: 48765 - DNA, 25 bp, Artificial
  probe
  misc_feature (1)..(25): SEQ ID NO: 590; WAN024AB3_at; Start 51; Stop 75
cagatataaaattttcaaaaactct

SEQ ID NO: 48766 - DNA, 25 bp, Artificial
  probe
  misc_feature (1)..(25): SEQ ID NO: 590; WAN024AB3_at; Start 84; Stop 108
tatcatctatatcttcgtagtaacc

SEQ ID NO: 48767 - DNA, 25 bp, Artificial
  probe
  misc_feature (1)..(25): SEQ ID NO: 590; WAN024AB3_at; Start 273; Stop 297
cctttgtaggatgagtattttctag

SEQ ID NO: 48768 - DNA, 25 bp, Artificial
  probe
  misc_feature (1)..(25): SEQ ID NO: 590; WAN024AB3_at; Start 329; Stop 353
tagcttttgaactagtcgttgtact

SEQ ID NO: 48769 - DNA, 25 bp, Artificial
  probe
  misc_feature (1)..(25): SEQ ID NO: 590; WAN024AB3_at; Start 95; Stop 119
tcttcgtagtaacctaagataccat

SEQ ID NO: 48770 - DNA, 25 bp, Artificial
  probe
  misc_feature (1)..(25): SEQ ID NO: 590; WAN024AB3_at; Start 99; Stop 123
cgtagtaacctaagataccattgtc

SEQ ID NO: 48771 - DNA, 25 bp, Artificial
  probe
  misc_feature (1)..(25): SEQ ID NO: 121; WAN024AB4_at; Start 9; Stop 33
tacaacgactagttcaaaagctaaa

SEQ ID NO: 48772 - DNA, 25 bp, Artificial
  probe
  misc_feature (1)..(25): SEQ ID NO: 121; WAN024AB4_at; Start 225; Stop 249
gctacaaatattgacaatggtatct

SEQ ID NO: 48773 - DNA, 25 bp, Artificial
  probe
  misc_feature (1)..(25): SEQ ID NO: 121; WAN024AB4_at; Start 54; Stop 78
caagaaaatctagaaaatactcatc

SEQ ID NO: 48774 - DNA, 25 bp, Artificial
  probe
  misc_feature (1)..(25): SEQ ID NO: 121; WAN024AB4_at; Start 161; Stop 185
agtaccaacaggctcatctattcca

SEQ ID NO: 48775 - DNA, 25 bp, Artificial
  probe
  misc_feature (1)..(25): SEQ ID NO: 121; WAN024AB4_at; Start 313; Stop 337
catttttaggagcagtcttttatca

SEQ ID NO: 48776 - DNA, 25 bp, Artificial
  probe
  misc_feature (1)..(25): SEQ ID NO: 121; WAN024AB4_at; Start 82; Stop 106
caaaggacaggtaggaaaaatatca

SEQ ID NO: 48777 - DNA, 25 bp, Artificial
  probe
  misc_feature (1)..(25): SEQ ID NO: 121; WAN024AB4_at; Start 89; Stop 113
caggtaggaaaaatatcagacaaca

SEQ ID NO: 48778 - DNA, 25 bp, Artificial
  probe
  misc_feature (1)..(25): SEQ ID NO: 121; WAN024AB4_at; Start 306; Stop 330
tctgtttcatttttaggagcagtct

SEQ ID NO: 48779 - DNA, 25 bp, Artificial
  probe
  misc_feature (1)..(25): SEQ ID NO: 121; WAN024AB4_at; Start 169; Stop 193
caggctcatctattccaaaaagata

SEQ ID NO: 48780 - DNA, 25 bp, Artificial
  probe
  misc_feature (1)..(25): SEQ ID NO: 121; WAN024AB4_at; Start 252; Stop 276
ggttactacgaagatatagatgata

SEQ ID NO: 48781 - DNA, 25 bp, Artificial
  probe
  misc_feature (1)..(25): SEQ ID NO: 121; WAN024AB4_at; Start 333; Stop 357
tatcataaatataaagcaagcctag

SEQ ID NO: 48782 - DNA, 25 bp, Artificial
  probe
  misc_feature (1)..(25): SEQ ID NO: 121; WAN024AB4_at; Start 190; Stop 214
gatatttactcgatggaaaaactcc

SEQ ID NO: 48783 - DNA, 25 bp, Artificial
  probe
  misc_feature (1)..(25): SEQ ID NO: 121; WAN024AB4_at; Start 208; Stop 232
aaactcctagaattagtgctacaaa

SEQ ID NO: 48784 - DNA, 25 bp, Artificial
  probe
  misc_feature (1)..(25): SEQ ID NO: 121; WAN024AB4_at; Start 17; Stop 41
ctagttcaaaagctaaaacttcaag

SEQ ID NO: 48785 - DNA, 25 bp, Artificial
  probe
  misc_feature (1)..(25): SEQ ID NO: 121; WAN024AB4_at; Start 257; Stop 281
ctacgaagatatagatgataaaaat

SEQ ID NO: 48786 - DNA, 25 bp, Artificial
  probe
  misc_feature (1)..(25): SEQ ID NO: 121; WAN024AB4_at; Start 68; Stop 92
aaatactcatcctacaaaggacagg

SEQ ID NO: 48787 - DNA, 25 bp, Artificial
  probe
  misc_feature (1)..(25): SEQ ID NO: 121; WAN024AB4_at; Start 335; Stop 359
tcataaatataaagcaagcctagat

SEQ ID NO: 48788 - DNA, 25 bp, Artificial
  probe
  misc_feature (1)..(25): SEQ ID NO: 121; WAN024AB4_at; Start 221; Stop 245
tagtgctacaaatattgacaatggt

SEQ ID NO: 48789 - DNA, 25 bp, Artificial
  probe
  misc_feature (1)..(25): SEQ ID NO: 121; WAN024AB4_at; Start 237; Stop 261
gacaatggtatcttaggttactacg

SEQ ID NO: 48790 - DNA, 25 bp, Artificial
  probe
  misc_feature (1)..(25): SEQ ID NO: 121; WAN024AB4_at; Start 6; Stop 30
aagtacaacgactagttcaaaagct

SEQ ID NO: 48791 - DNA, 25 bp, Artificial
  probe
  misc_feature (1)..(25): SEQ ID NO: 121; WAN024AB4_at; Start 302; Stop 326
tatatctgtttcatttttaggagca

SEQ ID NO: 48792 - DNA, 25 bp, Artificial
  probe
  misc_feature (1)..(25): SEQ ID NO: 121; WAN024AB4_at; Start 95; Stop 119
ggaaaaatatcagacaacaaaataa

SEQ ID NO: 48793 - DNA, 25 bp, Artificial
  probe
  misc_feature (1)..(25): SEQ ID NO: 121; WAN024AB4_at; Start 166; Stop 190
caacaggctcatctattccaaaaag

SEQ ID NO: 48794 - DNA, 25 bp, Artificial
  probe
  misc_feature (1)..(25): SEQ ID NO: 121; WAN024AB4_at; Start 248; Stop 272
cttaggttactacgaagatatagat

SEQ ID NO: 48795 - DNA, 25 bp, Artificial
  probe
  misc_feature (1)..(25): SEQ ID NO: 121; WAN024AB4_at; Start 319; Stop 343
taggagcagtcttttatcataaata

SEQ ID NO: 48796 - DNA, 25 bp, Artificial
  probe
  misc_feature (1)..(25): SEQ ID NO: 121; WAN024AB4_at; Start 71; Stop 95
tactcatcctacaaaggacaggtag

SEQ ID NO: 48797 - DNA, 25 bp, Artificial
  probe
  misc_feature (1)..(25): SEQ ID NO: 121; WAN024AB4_at; Start 199; Stop 223
tcgatggaaaaactcctagaattag

SEQ ID NO: 48798 - DNA, 25 bp, Artificial
  probe
  misc_feature (1)..(25): SEQ ID NO: 121; WAN024AB4_at; Start 64; Stop 88
tagaaaatactcatcctacaaagga

SEQ ID NO: 48799 - DNA, 25 bp, Artificial
  probe
  misc_feature (1)..(25): SEQ ID NO: 121; WAN024AB4_at; Start 194; Stop 218
tttactcgatggaaaaactcctaga

SEQ ID NO: 48800 - DNA, 25 bp, Artificial
  probe
  misc_feature (1)..(25): SEQ ID NO: 121; WAN024AB4_at; Start 240; Stop 264
aatggtatcttaggttactacgaag

SEQ ID NO: 48801 - DNA, 25 bp, Artificial
  probe
  misc_feature (1)..(25): SEQ ID NO: 121; WAN024AB4_at; Start 181; Stop 205
ttccaaaaagatatttactcgatgg

SEQ ID NO: 48802 - DNA, 25 bp, Artificial
  probe
  misc_feature (1)..(25): SEQ ID NO: 121; WAN024AB4_at; Start 86; Stop 110
ggacaggtaggaaaaatatcagaca

SEQ ID NO: 48803 - DNA, 25 bp, Artificial
  probe
  misc_feature (1)..(25): SEQ ID NO: 121; WAN024AB4_at; Start 74; Stop 98
tcatcctacaaaggacaggtaggaa

SEQ ID NO: 48804 - DNA, 25 bp, Artificial
  probe
  misc_feature (1)..(25): SEQ ID NO: 121; WAN024AB4_at; Start 204; Stop 228
ggaaaaactcctagaattagtgcta

SEQ ID NO: 48805 - DNA, 25 bp, Artificial
  probe
  misc_feature (1)..(25): SEQ ID NO: 4753; WAN024AB5_at; Start 13; Stop 37
ctgtatttgccattaaaaaactgac

SEQ ID NO: 48806 - DNA, 25 bp, Artificial
  probe
  misc_feature (1)..(25): SEQ ID NO: 4753; WAN024AB5_at; Start 6; Stop 30
ttctgtgctgtatttgccattaaaa

SEQ ID NO: 48807 - DNA, 25 bp, Artificial
  probe
  misc_feature (1)..(25): SEQ ID NO: 4753; WAN024AB5_at; Start 9; Stop 33
tgtgctgtatttgccattaaaaaac

SEQ ID NO: 48808 - DNA, 25 bp, Artificial
  probe
  misc_feature (1)..(25): SEQ ID NO: 4753; WAN024AB5_at; Start 93; Stop 117
ttttaaatgaattccaatattcaat

SEQ ID NO: 48809 - DNA, 25 bp, Artificial
  probe
  misc_feature (1)..(25): SEQ ID NO: 4753; WAN024AB5_at; Start 57; Stop 81
ggcctaacttttgagggtcagttca

SEQ ID NO: 48810 - DNA, 25 bp, Artificial
  probe
  misc_feature (1)..(25): SEQ ID NO: 4753; WAN024AB5_at; Start 16; Stop 40
tatttgccattaaaaaactgacctc

SEQ ID NO: 48811 - DNA, 25 bp, Artificial
  probe
  misc_feature (1)..(25): SEQ ID NO: 4753; WAN024AB5_at; Start 4; Stop 28
aattctgtgctgtatttgccattaa

SEQ ID NO: 48812 - DNA, 25 bp, Artificial
  probe
  misc_feature (1)..(25): SEQ ID NO: 4753; WAN024AB5_at; Start 86; Stop 110
ttgcgacttttaaatgaattccaat

SEQ ID NO: 48813 - DNA, 25 bp, Artificial
  probe
  misc_feature (1)..(25): SEQ ID NO: 4753; WAN024AB5_at; Start 3; Stop 27
aaattctgtgctgtatttgccatta

SEQ ID NO: 48814 - DNA, 25 bp, Artificial
  probe
  misc_feature (1)..(25): SEQ ID NO: 4753; WAN024AB5_at; Start 5; Stop 29
attctgtgctgtatttgccattaaa

SEQ ID NO: 48815 - DNA, 25 bp, Artificial
  probe
  misc_feature (1)..(25): SEQ ID NO: 4753; WAN024AB5_at; Start 14; Stop 38
tgtatttgccattaaaaaactgacc

SEQ ID NO: 48816 - DNA, 25 bp, Artificial
  probe
  misc_feature (1)..(25): SEQ ID NO: 4753; WAN024AB5_at; Start 89; Stop 113
cgacttttaaatgaattccaatatt

SEQ ID NO: 48817 - DNA, 25 bp, Artificial
  probe
  misc_feature (1)..(25): SEQ ID NO: 4753; WAN024AB5_at; Start 11; Stop 35
tgctgtatttgccattaaaaaactg

SEQ ID NO: 48818 - DNA, 25 bp, Artificial
  probe
  misc_feature (1)..(25): SEQ ID NO: 4753; WAN024AB5_at; Start 88; Stop 112
gcgacttttaaatgaattccaatat

SEQ ID NO: 48819 - DNA, 25 bp, Artificial
  probe
  misc_feature (1)..(25): SEQ ID NO: 4753; WAN024AB5_at; Start 90; Stop 114
gacttttaaatgaattccaatattc

SEQ ID NO: 48820 - DNA, 25 bp, Artificial
  probe
  misc_feature (1)..(25): SEQ ID NO: 4753; WAN024AB5_at; Start 91; Stop 115
acttttaaatgaattccaatattca

SEQ ID NO: 48821 - DNA, 25 bp, Artificial
  probe
  misc_feature (1)..(25): SEQ ID NO: 4753; WAN024AB5_at; Start 8; Stop 32
ctgtgctgtatttgccattaaaaaa

SEQ ID NO: 48822 - DNA, 25 bp, Artificial
  probe
  misc_feature (1)..(25): SEQ ID NO: 4753; WAN024AB5_at; Start 10; Stop 34
gtgctgtatttgccattaaaaaact

SEQ ID NO: 48823 - DNA, 25 bp, Artificial
  probe
  misc_feature (1)..(25): SEQ ID NO: 4753; WAN024AB5_at; Start 7; Stop 31
tctgtgctgtatttgccattaaaaa

SEQ ID NO: 48824 - DNA, 25 bp, Artificial
  probe
  misc_feature (1)..(25): SEQ ID NO: 4753; WAN024AB5_at; Start 92; Stop 116
cttttaaatgaattccaatattcaa

SEQ ID NO: 48825 - DNA, 25 bp, Artificial
  probe
  misc_feature (1)..(25): SEQ ID NO: 4753; WAN024AB5_at; Start 2; Stop 26
taaattctgtgctgtatttgccatt

SEQ ID NO: 48826 - DNA, 25 bp, Artificial
  probe
  misc_feature (1)..(25): SEQ ID NO: 4753; WAN024AB5_at; Start 1; Stop 25
ttaaattctgtgctgtatttgccat

SEQ ID NO: 48827 - DNA, 25 bp, Artificial
  probe
  misc_feature (1)..(25): SEQ ID NO: 4753; WAN024AB5_at; Start 12; Stop 36
gctgtatttgccattaaaaaactga

SEQ ID NO: 48828 - DNA, 25 bp, Artificial
  probe
  misc_feature (1)..(25): SEQ ID NO: 4753; WAN024AB5_at; Start 56; Stop 80
tggcctaacttttgagggtcagttc

SEQ ID NO: 48829 - DNA, 25 bp, Artificial
  probe
  misc_feature (1)..(25): SEQ ID NO: 4753; WAN024AB5_at; Start 87; Stop 111
tgcgacttttaaatgaattccaata

SEQ ID NO: 48830 - DNA, 25 bp, Artificial
  probe
  misc_feature (1)..(25): SEQ ID NO: 4455; WAN024AB6_at; Start 94; Stop 118
aatggcaaatacagcacagaattta

SEQ ID NO: 48831 - DNA, 25 bp, Artificial
  probe
  misc_feature (1)..(25): SEQ ID NO: 4455; WAN024AB6_at; Start 95; Stop 119
atggcaaatacagcacagaatttaa

SEQ ID NO: 48832 - DNA, 25 bp, Artificial
  probe
  misc_feature (1)..(25): SEQ ID NO: 4455; WAN024AB6_at; Start 4; Stop 28
ttgaatattggaattcatttaaaag

SEQ ID NO: 48833 - DNA, 25 bp, Artificial
  probe
  misc_feature (1)..(25): SEQ ID NO: 4455; WAN024AB6_at; Start 88; Stop 112
ttttttaatggcaaatacagcacag

SEQ ID NO: 48834 - DNA, 25 bp, Artificial
  probe
  misc_feature (1)..(25): SEQ ID NO: 4455; WAN024AB6_at; Start 2; Stop 26
aattgaatattggaattcatttaaa

SEQ ID NO: 48835 - DNA, 25 bp, Artificial
  probe
  misc_feature (1)..(25): SEQ ID NO: 4455; WAN024AB6_at; Start 84; Stop 108
tcagttttttaatggcaaatacagc

SEQ ID NO: 48836 - DNA, 25 bp, Artificial
  probe
  misc_feature (1)..(25): SEQ ID NO: 4455; WAN024AB6_at; Start 90; Stop 114
ttttaatggcaaatacagcacagaa

SEQ ID NO: 48837 - DNA, 25 bp, Artificial
  probe
  misc_feature (1)..(25): SEQ ID NO: 4455; WAN024AB6_at; Start 86; Stop 110
agttttttaatggcaaatacagcac

SEQ ID NO: 48838 - DNA, 25 bp, Artificial
  probe
  misc_feature (1)..(25): SEQ ID NO: 4455; WAN024AB6_at; Start 39; Stop 63
tgaactgaccctcaaaagttaggcc

SEQ ID NO: 48839 - DNA, 25 bp, Artificial
  probe
  misc_feature (1)..(25): SEQ ID NO: 4455; WAN024AB6_at; Start 5; Stop 29
tgaatattggaattcatttaaaagt

SEQ ID NO: 48840 - DNA, 25 bp, Artificial
  probe
  misc_feature (1)..(25): SEQ ID NO: 4455; WAN024AB6_at; Start 85; Stop 109
cagttttttaatggcaaatacagca

SEQ ID NO: 48841 - DNA, 25 bp, Artificial
  probe
  misc_feature (1)..(25): SEQ ID NO: 4455; WAN024AB6_at; Start 91; Stop 115
tttaatggcaaatacagcacagaat

SEQ ID NO: 48842 - DNA, 25 bp, Artificial
  probe
  misc_feature (1)..(25): SEQ ID NO: 4455; WAN024AB6_at; Start 6; Stop 30
gaatattggaattcatttaaaagtc

SEQ ID NO: 48843 - DNA, 25 bp, Artificial
  probe
  misc_feature (1)..(25): SEQ ID NO: 4455; WAN024AB6_at; Start 9; Stop 33
tattggaattcatttaaaagtcgca

SEQ ID NO: 48844 - DNA, 25 bp, Artificial
  probe
  misc_feature (1)..(25): SEQ ID NO: 4455; WAN024AB6_at; Start 82; Stop 106
ggtcagttttttaatggcaaataca

SEQ ID NO: 48845 - DNA, 25 bp, Artificial
  probe
  misc_feature (1)..(25): SEQ ID NO: 4455; WAN024AB6_at; Start 1; Stop 25
taattgaatattggaattcatttaa

SEQ ID NO: 48846 - DNA, 25 bp, Artificial
  probe
  misc_feature (1)..(25): SEQ ID NO: 4455; WAN024AB6_at; Start 10; Stop 34
attggaattcatttaaaagtcgcaa

SEQ ID NO: 48847 - DNA, 25 bp, Artificial
  probe
  misc_feature (1)..(25): SEQ ID NO: 4455; WAN024AB6_at; Start 93; Stop 117
taatggcaaatacagcacagaattt

SEQ ID NO: 48848 - DNA, 25 bp, Artificial
  probe
  misc_feature (1)..(25): SEQ ID NO: 4455; WAN024AB6_at; Start 7; Stop 31
aatattggaattcatttaaaagtcg

SEQ ID NO: 48849 - DNA, 25 bp, Artificial
  probe
  misc_feature (1)..(25): SEQ ID NO: 4455; WAN024AB6_at; Start 8; Stop 32
atattggaattcatttaaaagtcgc

SEQ ID NO: 48850 - DNA, 25 bp, Artificial
  probe
  misc_feature (1)..(25): SEQ ID NO: 4455; WAN024AB6_at; Start 83; Stop 107
gtcagttttttaatggcaaatacag

SEQ ID NO: 48851 - DNA, 25 bp, Artificial
  probe
  misc_feature (1)..(25): SEQ ID NO: 4455; WAN024AB6_at; Start 40; Stop 64
gaactgaccctcaaaagttaggcca

SEQ ID NO: 48852 - DNA, 25 bp, Artificial
  probe
  misc_feature (1)..(25): SEQ ID NO: 4455; WAN024AB6_at; Start 87; Stop 111
gttttttaatggcaaatacagcaca

SEQ ID NO: 48853 - DNA, 25 bp, Artificial
  probe
  misc_feature (1)..(25): SEQ ID NO: 4455; WAN024AB6_at; Start 92; Stop 116
ttaatggcaaatacagcacagaatt

SEQ ID NO: 48854 - DNA, 25 bp, Artificial
  probe
  misc_feature (1)..(25): SEQ ID NO: 4455; WAN024AB6_at; Start 80; Stop 104
gaggtcagttttttaatggcaaata

SEQ ID NO: 48855 - DNA, 25 bp, Artificial
  probe
  misc_feature (1)..(25): SEQ ID NO: 4455; WAN024AB6_at; Start 89; Stop 113
tttttaatggcaaatacagcacaga

SEQ ID NO: 48856 - DNA, 25 bp, Artificial
  probe
  misc_feature (1)..(25): SEQ ID NO: 66; WAN024AB7_at; Start 43; Stop 67
aattatcattgtcaatagatacagt

SEQ ID NO: 48857 - DNA, 25 bp, Artificial
  probe
  misc_feature (1)..(25): SEQ ID NO: 66; WAN024AB7_at; Start 26; Stop 50
tctattgtatcgataataattatca

SEQ ID NO: 48858 - DNA, 25 bp, Artificial
  probe
  misc_feature (1)..(25): SEQ ID NO: 66; WAN024AB7_at; Start 51; Stop 75
ttgtcaatagatacagttacaaatt

SEQ ID NO: 48859 - DNA, 25 bp, Artificial
  probe
  misc_feature (1)..(25): SEQ ID NO: 66; WAN024AB7_at; Start 47; Stop 71
atcattgtcaatagatacagttaca

SEQ ID NO: 48860 - DNA, 25 bp, Artificial
  probe
  misc_feature (1)..(25): SEQ ID NO: 66; WAN024AB7_at; Start 49; Stop 73
cattgtcaatagatacagttacaaa

SEQ ID NO: 48861 - DNA, 25 bp, Artificial
  probe
  misc_feature (1)..(25): SEQ ID NO: 66; WAN024AB7_at; Start 53; Stop 77
gtcaatagatacagttacaaattta

SEQ ID NO: 48862 - DNA, 25 bp, Artificial
  probe
  misc_feature (1)..(25): SEQ ID NO: 66; WAN024AB7_at; Start 7; Stop 31
tccttaaacatatttcaagtctatt

SEQ ID NO: 48863 - DNA, 25 bp, Artificial
  probe
  misc_feature (1)..(25): SEQ ID NO: 66; WAN024AB7_at; Start 25; Stop 49
gtctattgtatcgataataattatc

SEQ ID NO: 48864 - DNA, 25 bp, Artificial
  probe
  misc_feature (1)..(25): SEQ ID NO: 66; WAN024AB7_at; Start 20; Stop 44
ttcaagtctattgtatcgataataa

SEQ ID NO: 48865 - DNA, 25 bp, Artificial
  probe
  misc_feature (1)..(25): SEQ ID NO: 66; WAN024AB7_at; Start 5; Stop 29
actccttaaacatatttcaagtcta

SEQ ID NO: 48866 - DNA, 25 bp, Artificial
  probe
  misc_feature (1)..(25): SEQ ID NO: 66; WAN024AB7_at; Start 21; Stop 45
tcaagtctattgtatcgataataat

SEQ ID NO: 48867 - DNA, 25 bp, Artificial
  probe
  misc_feature (1)..(25): SEQ ID NO: 66; WAN024AB7_at; Start 58; Stop 82
tagatacagttacaaatttaataat

SEQ ID NO: 48868 - DNA, 25 bp, Artificial
  probe
  misc_feature (1)..(25): SEQ ID NO: 66; WAN024AB7_at; Start 4; Stop 28
aactccttaaacatatttcaagtct

SEQ ID NO: 48869 - DNA, 25 bp, Artificial
  probe
  misc_feature (1)..(25): SEQ ID NO: 66; WAN024AB7_at; Start 52; Stop 76
tgtcaatagatacagttacaaattt

SEQ ID NO: 48870 - DNA, 25 bp, Artificial
  probe
  misc_feature (1)..(25): SEQ ID NO: 66; WAN024AB7_at; Start 36; Stop 60
cgataataattatcattgtcaatag

SEQ ID NO: 48871 - DNA, 25 bp, Artificial
  probe
  misc_feature (1)..(25): SEQ ID NO: 66; WAN024AB7_at; Start 46; Stop 70
tatcattgtcaatagatacagttac

SEQ ID NO: 48872 - DNA, 25 bp, Artificial
  probe
  misc_feature (1)..(25): SEQ ID NO: 66; WAN024AB7_at; Start 48; Stop 72
tcattgtcaatagatacagttacaa

SEQ ID NO: 48873 - DNA, 25 bp, Artificial
  probe
  misc_feature (1)..(25): SEQ ID NO: 66; WAN024AB7_at; Start 6; Stop 30
ctccttaaacatatttcaagtctat

SEQ ID NO: 48874 - DNA, 25 bp, Artificial
  probe
  misc_feature (1)..(25): SEQ ID NO: 66; WAN024AB7_at; Start 22; Stop 46
caagtctattgtatcgataataatt

SEQ ID NO: 48875 - DNA, 25 bp, Artificial
  probe
  misc_feature (1)..(25): SEQ ID NO: 66; WAN024AB7_at; Start 8; Stop 32
ccttaaacatatttcaagtctattg

SEQ ID NO: 48876 - DNA, 25 bp, Artificial
  probe
  misc_feature (1)..(25): SEQ ID NO: 66; WAN024AB7_at; Start 19; Stop 43
tttcaagtctattgtatcgataata

SEQ ID NO: 48877 - DNA, 25 bp, Artificial
  probe
  misc_feature (1)..(25): SEQ ID NO: 66; WAN024AB7_at; Start 15; Stop 39
catatttcaagtctattgtatcgat

SEQ ID NO: 48878 - DNA, 25 bp, Artificial
  probe
  misc_feature (1)..(25): SEQ ID NO: 66; WAN024AB7_at; Start 14; Stop 38
acatatttcaagtctattgtatcga

SEQ ID NO: 48879 - DNA, 25 bp, Artificial
  probe
  misc_feature (1)..(25): SEQ ID NO: 66; WAN024AB7_at; Start 54; Stop 78
tcaatagatacagttacaaatttaa

SEQ ID NO: 48880 - DNA, 25 bp, Artificial
  probe
  misc_feature (1)..(25): SEQ ID NO: 66; WAN024AB7_at; Start 55; Stop 79
caatagatacagttacaaatttaat

SEQ ID NO: 48881 - DNA, 25 bp, Artificial
  probe
  misc_feature (1)..(25): SEQ ID NO: 66; WAN024AB7_at; Start 60; Stop 84
gatacagttacaaatttaataatat

SEQ ID NO: 48882 - DNA, 25 bp, Artificial
  probe
  misc_feature (1)..(25): SEQ ID NO: 66; WAN024AB7_at; Start 13; Stop 37
aacatatttcaagtctattgtatcg

SEQ ID NO: 48883 - DNA, 25 bp, Artificial
  probe
  misc_feature (1)..(25): SEQ ID NO: 66; WAN024AB7_at; Start 11; Stop 35
taaacatatttcaagtctattgtat

SEQ ID NO: 48884 - DNA, 25 bp, Artificial
  probe
  misc_feature (1)..(25): SEQ ID NO: 66; WAN024AB7_at; Start 9; Stop 33
cttaaacatatttcaagtctattgt

SEQ ID NO: 48885 - DNA, 25 bp, Artificial
  probe
  misc_feature (1)..(25): SEQ ID NO: 66; WAN024AB7_at; Start 37; Stop 61
gataataattatcattgtcaataga

SEQ ID NO: 48886 - DNA, 25 bp, Artificial
  probe
  misc_feature (1)..(25): SEQ ID NO: 66; WAN024AB7_at; Start 12; Stop 36
aaacatatttcaagtctattgtatc

SEQ ID NO: 48887 - DNA, 25 bp, Artificial
  probe
  misc_feature (1)..(25): SEQ ID NO: 66; WAN024AB7_at; Start 17; Stop 41
tatttcaagtctattgtatcgataa

SEQ ID NO: 48888 - DNA, 25 bp, Artificial
  probe
  misc_feature (1)..(25): SEQ ID NO: 66; WAN024AB7_at; Start 16; Stop 40
atatttcaagtctattgtatcgata

SEQ ID NO: 48889 - DNA, 25 bp, Artificial
  probe
  misc_feature (1)..(25): SEQ ID NO: 66; WAN024AB7_at; Start 42; Stop 66
taattatcattgtcaatagatacag

SEQ ID NO: 48890 - DNA, 25 bp, Artificial
  probe
  misc_feature (1)..(25): SEQ ID NO: 4431; WAN024AB8_at; Start 77; Stop 101
taattattatcgatacaatagactt

SEQ ID NO: 48891 - DNA, 25 bp, Artificial
  probe
  misc_feature (1)..(25): SEQ ID NO: 4431; WAN024AB8_at; Start 68; Stop 92
tgacaatgataattattatcgatac

SEQ ID NO: 48892 - DNA, 25 bp, Artificial
  probe
  misc_feature (1)..(25): SEQ ID NO: 4431; WAN024AB8_at; Start 52; Stop 76
ttgtaactgtatctattgacaatga

SEQ ID NO: 48893 - DNA, 25 bp, Artificial
  probe
  misc_feature (1)..(25): SEQ ID NO: 4431; WAN024AB8_at; Start 92; Stop 116
caatagacttgaaatatgtttaagg

SEQ ID NO: 48894 - DNA, 25 bp, Artificial
  probe
  misc_feature (1)..(25): SEQ ID NO: 4431; WAN024AB8_at; Start 49; Stop 73
aatttgtaactgtatctattgacaa

SEQ ID NO: 48895 - DNA, 25 bp, Artificial
  probe
  misc_feature (1)..(25): SEQ ID NO: 4431; WAN024AB8_at; Start 91; Stop 115
acaatagacttgaaatatgtttaag

SEQ ID NO: 48896 - DNA, 25 bp, Artificial
  probe
  misc_feature (1)..(25): SEQ ID NO: 4431; WAN024AB8_at; Start 56; Stop 80
aactgtatctattgacaatgataat

SEQ ID NO: 48897 - DNA, 25 bp, Artificial
  probe
  misc_feature (1)..(25): SEQ ID NO: 4431; WAN024AB8_at; Start 69; Stop 93
gacaatgataattattatcgataca

SEQ ID NO: 48898 - DNA, 25 bp, Artificial
  probe
  misc_feature (1)..(25): SEQ ID NO: 4431; WAN024AB8_at; Start 86; Stop 110
tcgatacaatagacttgaaatatgt

SEQ ID NO: 48899 - DNA, 25 bp, Artificial
  probe
  misc_feature (1)..(25): SEQ ID NO: 4431; WAN024AB8_at; Start 78; Stop 102
aattattatcgatacaatagacttg

SEQ ID NO: 48900 - DNA, 25 bp, Artificial
  probe
  misc_feature (1)..(25): SEQ ID NO: 4431; WAN024AB8_at; Start 64; Stop 88
ctattgacaatgataattattatcg

SEQ ID NO: 48901 - DNA, 25 bp, Artificial
  probe
  misc_feature (1)..(25): SEQ ID NO: 4431; WAN024AB8_at; Start 48; Stop 72
aaatttgtaactgtatctattgaca

SEQ ID NO: 48902 - DNA, 25 bp, Artificial
  probe
  misc_feature (1)..(25): SEQ ID NO: 4431; WAN024AB8_at; Start 90; Stop 114
tacaatagacttgaaatatgtttaa

SEQ ID NO: 48903 - DNA, 25 bp, Artificial
  probe
  misc_feature (1)..(25): SEQ ID NO: 4431; WAN024AB8_at; Start 93; Stop 117
aatagacttgaaatatgtttaagga

SEQ ID NO: 48904 - DNA, 25 bp, Artificial
  probe
  misc_feature (1)..(25): SEQ ID NO: 4431; WAN024AB8_at; Start 82; Stop 106
attatcgatacaatagacttgaaat

SEQ ID NO: 48905 - DNA, 25 bp, Artificial
  probe
  misc_feature (1)..(25): SEQ ID NO: 4431; WAN024AB8_at; Start 58; Stop 82
ctgtatctattgacaatgataatta

SEQ ID NO: 48906 - DNA, 25 bp, Artificial
  probe
  misc_feature (1)..(25): SEQ ID NO: 4431; WAN024AB8_at; Start 94; Stop 118
atagacttgaaatatgtttaaggag

SEQ ID NO: 48907 - DNA, 25 bp, Artificial
  probe
  misc_feature (1)..(25): SEQ ID NO: 4431; WAN024AB8_at; Start 54; Stop 78
gtaactgtatctattgacaatgata

SEQ ID NO: 48908 - DNA, 25 bp, Artificial
  probe
  misc_feature (1)..(25): SEQ ID NO: 4431; WAN024AB8_at; Start 53; Stop 77
tgtaactgtatctattgacaatgat

SEQ ID NO: 48909 - DNA, 25 bp, Artificial
  probe
  misc_feature (1)..(25): SEQ ID NO: 4431; WAN024AB8_at; Start 47; Stop 71
taaatttgtaactgtatctattgac

SEQ ID NO: 48910 - DNA, 25 bp, Artificial
  probe
  misc_feature (1)..(25): SEQ ID NO: 4431; WAN024AB8_at; Start 81; Stop 105
tattatcgatacaatagacttgaaa

SEQ ID NO: 48911 - DNA, 25 bp, Artificial
  probe
  misc_feature (1)..(25): SEQ ID NO: 4431; WAN024AB8_at; Start 51; Stop 75
tttgtaactgtatctattgacaatg

SEQ ID NO: 48912 - DNA, 25 bp, Artificial
  probe
  misc_feature (1)..(25): SEQ ID NO: 4431; WAN024AB8_at; Start 79; Stop 103
attattatcgatacaatagacttga

SEQ ID NO: 48913 - DNA, 25 bp, Artificial
  probe
  misc_feature (1)..(25): SEQ ID NO: 4431; WAN024AB8_at; Start 88; Stop 112
gatacaatagacttgaaatatgttt

SEQ ID NO: 48914 - DNA, 25 bp, Artificial
  probe
  misc_feature (1)..(25): SEQ ID NO: 4431; WAN024AB8_at; Start 85; Stop 109
atcgatacaatagacttgaaatatg

SEQ ID NO: 48915 - DNA, 25 bp, Artificial
  probe
  misc_feature (1)..(25): SEQ ID NO: 4431; WAN024AB8_at; Start 87; Stop 111
cgatacaatagacttgaaatatgtt

SEQ ID NO: 48916 - DNA, 25 bp, Artificial
  probe
  misc_feature (1)..(25): SEQ ID NO: 4431; WAN024AB8_at; Start 65; Stop 89
tattgacaatgataattattatcga

SEQ ID NO: 48917 - DNA, 25 bp, Artificial
  probe
  misc_feature (1)..(25): SEQ ID NO: 4431; WAN024AB8_at; Start 80; Stop 104
ttattatcgatacaatagacttgaa

SEQ ID NO: 48918 - DNA, 25 bp, Artificial
  probe
  misc_feature (1)..(25): SEQ ID NO: 4431; WAN024AB8_at; Start 84; Stop 108
tatcgatacaatagacttgaaatat

SEQ ID NO: 48919 - DNA, 25 bp, Artificial
  probe
  misc_feature (1)..(25): SEQ ID NO: 4431; WAN024AB8_at; Start 75; Stop 99
gataattattatcgatacaatagac

SEQ ID NO: 48920 - DNA, 25 bp, Artificial
  probe
  misc_feature (1)..(25): SEQ ID NO: 4431; WAN024AB8_at; Start 96; Stop 120
agacttgaaatatgtttaaggagtt

SEQ ID NO: 48921 - DNA, 25 bp, Artificial
  probe
  misc_feature (1)..(25): SEQ ID NO: 4431; WAN024AB8_at; Start 95; Stop 119
tagacttgaaatatgtttaaggagt

SEQ ID NO: 48922 - DNA, 25 bp, Artificial
  probe
  misc_feature (1)..(25): SEQ ID NO: 4431; WAN024AB8_at; Start 83; Stop 107
ttatcgatacaatagacttgaaata

SEQ ID NO: 48923 - DNA, 25 bp, Artificial
  probe
  misc_feature (1)..(25): SEQ ID NO: 4431; WAN024AB8_at; Start 55; Stop 79
taactgtatctattgacaatgataa

SEQ ID NO: 48924 - DNA, 25 bp, Artificial
  probe
  misc_feature (1)..(25): SEQ ID NO: 268; WAN024AB9_at; Start 111; Stop 135
tccgtccttattttgccataaattg

SEQ ID NO: 48925 - DNA, 25 bp, Artificial
  probe
  misc_feature (1)..(25): SEQ ID NO: 268; WAN024AB9_at; Start 38; Stop 62
tatagcataaatattgatttcattc

SEQ ID NO: 48926 - DNA, 25 bp, Artificial
  probe
  misc_feature (1)..(25): SEQ ID NO: 268; WAN024AB9_at; Start 208; Stop 232
taatttctatcgtctgagatttaca

SEQ ID NO: 48927 - DNA, 25 bp, Artificial
  probe
  misc_feature (1)..(25): SEQ ID NO: 268; WAN024AB9_at; Start 140; Stop 164
aagtgggacctcttatccttaccat

SEQ ID NO: 48928 - DNA, 25 bp, Artificial
  probe
  misc_feature (1)..(25): SEQ ID NO: 268; WAN024AB9_at; Start 58; Stop 82
cattcaatcttacattgatttagtg

SEQ ID NO: 48929 - DNA, 25 bp, Artificial
  probe
  misc_feature (1)..(25): SEQ ID NO: 268; WAN024AB9_at; Start 70; Stop 94
cattgatttagtgatttgttttaga

SEQ ID NO: 48930 - DNA, 25 bp, Artificial
  probe
  misc_feature (1)..(25): SEQ ID NO: 268; WAN024AB9_at; Start 97; Stop 121
atttgttgtgttattccgtccttat

SEQ ID NO: 48931 - DNA, 25 bp, Artificial
  probe
  misc_feature (1)..(25): SEQ ID NO: 268; WAN024AB9_at; Start 218; Stop 242
cgtctgagatttacatattaaattt

SEQ ID NO: 48932 - DNA, 25 bp, Artificial
  probe
  misc_feature (1)..(25): SEQ ID NO: 268; WAN024AB9_at; Start 106; Stop 130
gttattccgtccttattttgccata

SEQ ID NO: 48933 - DNA, 25 bp, Artificial
  probe
  misc_feature (1)..(25): SEQ ID NO: 268; WAN024AB9_at; Start 203; Stop 227
gtttttaatttctatcgtctgagat

SEQ ID NO: 48934 - DNA, 25 bp, Artificial
  probe
  misc_feature (1)..(25): SEQ ID NO: 268; WAN024AB9_at; Start 201; Stop 225
gagtttttaatttctatcgtctgag

SEQ ID NO: 48935 - DNA, 25 bp, Artificial
  probe
  misc_feature (1)..(25): SEQ ID NO: 268; WAN024AB9_at; Start 94; Stop 118
agaatttgttgtgttattccgtcct

SEQ ID NO: 48936 - DNA, 25 bp, Artificial
  probe
  misc_feature (1)..(25): SEQ ID NO: 268; WAN024AB9_at; Start 139; Stop 163
taagtgggacctcttatccttacca

SEQ ID NO: 48937 - DNA, 25 bp, Artificial
  probe
  misc_feature (1)..(25): SEQ ID NO: 268; WAN024AB9_at; Start 62; Stop 86
caatcttacattgatttagtgattt

SEQ ID NO: 48938 - DNA, 25 bp, Artificial
  probe
  misc_feature (1)..(25): SEQ ID NO: 268; WAN024AB9_at; Start 73; Stop 97
tgatttagtgatttgttttagagaa

SEQ ID NO: 48939 - DNA, 25 bp, Artificial
  probe
  misc_feature (1)..(25): SEQ ID NO: 268; WAN024AB9_at; Start 181; Stop 205
tgagtataaaaaagacgatagagtt

SEQ ID NO: 48940 - DNA, 25 bp, Artificial
  probe
  misc_feature (1)..(25): SEQ ID NO: 268; WAN024AB9_at; Start 51; Stop 75
ttgatttcattcaatcttacattga

SEQ ID NO: 48941 - DNA, 25 bp, Artificial
  probe
  misc_feature (1)..(25): SEQ ID NO: 268; WAN024AB9_at; Start 109; Stop 133
attccgtccttattttgccataaat

SEQ ID NO: 48942 - DNA, 25 bp, Artificial
  probe
  misc_feature (1)..(25): SEQ ID NO: 268; WAN024AB9_at; Start 141; Stop 165
agtgggacctcttatccttaccatt

SEQ ID NO: 48943 - DNA, 25 bp, Artificial
  probe
  misc_feature (1)..(25): SEQ ID NO: 268; WAN024AB9_at; Start 93; Stop 117
gagaatttgttgtgttattccgtcc

SEQ ID NO: 48944 - DNA, 25 bp, Artificial
  probe
  misc_feature (1)..(25): SEQ ID NO: 268; WAN024AB9_at; Start 103; Stop 127
tgtgttattccgtccttattttgcc

SEQ ID NO: 48945 - DNA, 25 bp, Artificial
  probe
  misc_feature (1)..(25): SEQ ID NO: 268; WAN024AB9_at; Start 105; Stop 129
tgttattccgtccttattttgccat

SEQ ID NO: 48946 - DNA, 25 bp, Artificial
  probe
  misc_feature (1)..(25): SEQ ID NO: 268; WAN024AB9_at; Start 210; Stop 234
atttctatcgtctgagatttacata

SEQ ID NO: 48947 - DNA, 25 bp, Artificial
  probe
  misc_feature (1)..(25): SEQ ID NO: 268; WAN024AB9_at; Start 215; Stop 239
tatcgtctgagatttacatattaaa

SEQ ID NO: 48948 - DNA, 25 bp, Artificial
  probe
  misc_feature (1)..(25): SEQ ID NO: 268; WAN024AB9_at; Start 124; Stop 148
tgccataaattgttttaagtgggac

SEQ ID NO: 48949 - DNA, 25 bp, Artificial
  probe
  misc_feature (1)..(25): SEQ ID NO: 268; WAN024AB9_at; Start 202; Stop 226
agtttttaatttctatcgtctgaga

SEQ ID NO: 48950 - DNA, 25 bp, Artificial
  probe
  misc_feature (1)..(25): SEQ ID NO: 268; WAN024AB9_at; Start 214; Stop 238
ctatcgtctgagatttacatattaa

SEQ ID NO: 48951 - DNA, 25 bp, Artificial
  probe
  misc_feature (1)..(25): SEQ ID NO: 268; WAN024AB9_at; Start 42; Stop 66
gcataaatattgatttcattcaatc

SEQ ID NO: 48952 - DNA, 25 bp, Artificial
  probe
  misc_feature (1)..(25): SEQ ID NO: 268; WAN024AB9_at; Start 112; Stop 136
ccgtccttattttgccataaattgt

SEQ ID NO: 48953 - DNA, 25 bp, Artificial
  probe
  misc_feature (1)..(25): SEQ ID NO: 268; WAN024AB9_at; Start 107; Stop 131
ttattccgtccttattttgccataa

SEQ ID NO: 48954 - DNA, 25 bp, Artificial
  probe
  misc_feature (1)..(25): SEQ ID NO: 268; WAN024AB9_at; Start 104; Stop 128
gtgttattccgtccttattttgcca

SEQ ID NO: 48955 - DNA, 25 bp, Artificial
  probe
  misc_feature (1)..(25): SEQ ID NO: 268; WAN024AB9_at; Start 78; Stop 102
tagtgatttgttttagagaatttgt

SEQ ID NO: 48956 - DNA, 25 bp, Artificial
  probe
  misc_feature (1)..(25): SEQ ID NO: 268; WAN024AB9_at; Start 113; Stop 137
cgtccttattttgccataaattgtt

SEQ ID NO: 48957 - DNA, 25 bp, Artificial
  probe
  misc_feature (1)..(25): SEQ ID NO: 268; WAN024AB9_at; Start 213; Stop 237
tctatcgtctgagatttacatatta

SEQ ID NO: 48958 - DNA, 25 bp, Artificial
  probe
  misc_feature (1)..(25): SEQ ID NO: 4672; WAN024ABA_at; Start 130; Stop 154
gacggaataacacaacaaattctct

SEQ ID NO: 48959 - DNA, 25 bp, Artificial
  probe
  misc_feature (1)..(25): SEQ ID NO: 4672; WAN024ABA_at; Start 125; Stop 149
ataaggacggaataacacaacaaat

SEQ ID NO: 48960 - DNA, 25 bp, Artificial
  probe
  misc_feature (1)..(25): SEQ ID NO: 4672; WAN024ABA_at; Start 164; Stop 188
cactaaatcaatgtaagattgaatg

SEQ ID NO: 48961 - DNA, 25 bp, Artificial
  probe
  misc_feature (1)..(25): SEQ ID NO: 4672; WAN024ABA_at; Start 82; Stop 106
atggtaaggataagaggtcccactt

SEQ ID NO: 48962 - DNA, 25 bp, Artificial
  probe
  misc_feature (1)..(25): SEQ ID NO: 4672; WAN024ABA_at; Start 23; Stop 47
cagacgatagaaattaaaaactcta

SEQ ID NO: 48963 - DNA, 25 bp, Artificial
  probe
  misc_feature (1)..(25): SEQ ID NO: 4672; WAN024ABA_at; Start 111; Stop 135
caatttatggcaaaataaggacgga

SEQ ID NO: 48964 - DNA, 25 bp, Artificial
  probe
  misc_feature (1)..(25): SEQ ID NO: 4672; WAN024ABA_at; Start 81; Stop 105
aatggtaaggataagaggtcccact

SEQ ID NO: 48965 - DNA, 25 bp, Artificial
  probe
  misc_feature (1)..(25): SEQ ID NO: 4672; WAN024ABA_at; Start 4; Stop 28
aaatttaatatgtaaatctcagacg

SEQ ID NO: 48966 - DNA, 25 bp, Artificial
  probe
  misc_feature (1)..(25): SEQ ID NO: 4672; WAN024ABA_at; Start 142; Stop 166
caacaaattctctaaaacaaatcac

SEQ ID NO: 48967 - DNA, 25 bp, Artificial
  probe
  misc_feature (1)..(25): SEQ ID NO: 4672; WAN024ABA_at; Start 120; Stop 144
gcaaaataaggacggaataacacaa

SEQ ID NO: 48968 - DNA, 25 bp, Artificial
  probe
  misc_feature (1)..(25): SEQ ID NO: 4672; WAN024ABA_at; Start 180; Stop 204
gattgaatgaaatcaatatttatgc

SEQ ID NO: 48969 - DNA, 25 bp, Artificial
  probe
  misc_feature (1)..(25): SEQ ID NO: 4672; WAN024ABA_at; Start 119; Stop 143
ggcaaaataaggacggaataacaca

SEQ ID NO: 48970 - DNA, 25 bp, Artificial
  probe
  misc_feature (1)..(25): SEQ ID NO: 4672; WAN024ABA_at; Start 184; Stop 208
gaatgaaatcaatatttatgctata

SEQ ID NO: 48971 - DNA, 25 bp, Artificial
  probe
  misc_feature (1)..(25): SEQ ID NO: 4672; WAN024ABA_at; Start 12; Stop 36
tatgtaaatctcagacgatagaaat

SEQ ID NO: 48972 - DNA, 25 bp, Artificial
  probe
  misc_feature (1)..(25): SEQ ID NO: 4672; WAN024ABA_at; Start 157; Stop 181
aacaaatcactaaatcaatgtaaga

SEQ ID NO: 48973 - DNA, 25 bp, Artificial
  probe
  misc_feature (1)..(25): SEQ ID NO: 4672; WAN024ABA_at; Start 113; Stop 137
atttatggcaaaataaggacggaat

SEQ ID NO: 48974 - DNA, 25 bp, Artificial
  probe
  misc_feature (1)..(25): SEQ ID NO: 4672; WAN024ABA_at; Start 171; Stop 195
tcaatgtaagattgaatgaaatcaa

SEQ ID NO: 48975 - DNA, 25 bp, Artificial
  probe
  misc_feature (1)..(25): SEQ ID NO: 4672; WAN024ABA_at; Start 21; Stop 45
ctcagacgatagaaattaaaaactc

SEQ ID NO: 48976 - DNA, 25 bp, Artificial
  probe
  misc_feature (1)..(25): SEQ ID NO: 4672; WAN024ABA_at; Start 145; Stop 169
caaattctctaaaacaaatcactaa

SEQ ID NO: 48977 - DNA, 25 bp, Artificial
  probe
  misc_feature (1)..(25): SEQ ID NO: 4672; WAN024ABA_at; Start 83; Stop 107
tggtaaggataagaggtcccactta

SEQ ID NO: 48978 - DNA, 25 bp, Artificial
  probe
  misc_feature (1)..(25): SEQ ID NO: 4672; WAN024ABA_at; Start 129; Stop 153
ggacggaataacacaacaaattctc

SEQ ID NO: 48979 - DNA, 25 bp, Artificial
  probe
  misc_feature (1)..(25): SEQ ID NO: 4672; WAN024ABA_at; Start 20; Stop 44
tctcagacgatagaaattaaaaact

SEQ ID NO: 48980 - DNA, 25 bp, Artificial
  probe
  misc_feature (1)..(25): SEQ ID NO: 4672; WAN024ABA_at; Start 98; Stop 122
gtcccacttaaaacaatttatggca

SEQ ID NO: 48981 - DNA, 25 bp, Artificial
  probe
  misc_feature (1)..(25): SEQ ID NO: 4672; WAN024ABA_at; Start 132; Stop 156
cggaataacacaacaaattctctaa

SEQ ID NO: 48982 - DNA, 25 bp, Artificial
  probe
  misc_feature (1)..(25): SEQ ID NO: 4672; WAN024ABA_at; Start 28; Stop 52
gatagaaattaaaaactctatcgtc

SEQ ID NO: 48983 - DNA, 25 bp, Artificial
  probe
  misc_feature (1)..(25): SEQ ID NO: 4672; WAN024ABA_at; Start 116; Stop 140
tatggcaaaataaggacggaataac

SEQ ID NO: 48984 - DNA, 25 bp, Artificial
  probe
  misc_feature (1)..(25): SEQ ID NO: 4672; WAN024ABA_at; Start 44; Stop 68
tctatcgtcttttttatactcaaaa

SEQ ID NO: 48985 - DNA, 25 bp, Artificial
  probe
  misc_feature (1)..(25): SEQ ID NO: 4672; WAN024ABA_at; Start 9; Stop 33
taatatgtaaatctcagacgataga

SEQ ID NO: 48986 - DNA, 25 bp, Artificial
  probe
  misc_feature (1)..(25): SEQ ID NO: 4672; WAN024ABA_at; Start 14; Stop 38
tgtaaatctcagacgatagaaatta

SEQ ID NO: 48987 - DNA, 25 bp, Artificial
  probe
  misc_feature (1)..(25): SEQ ID NO: 4672; WAN024ABA_at; Start 8; Stop 32
ttaatatgtaaatctcagacgatag

SEQ ID NO: 48988 - DNA, 25 bp, Artificial
  probe
  misc_feature (1)..(25): SEQ ID NO: 4672; WAN024ABA_at; Start 118; Stop 142
tggcaaaataaggacggaataacac

SEQ ID NO: 48989 - DNA, 25 bp, Artificial
  probe
  misc_feature (1)..(25): SEQ ID NO: 4672; WAN024ABA_at; Start 137; Stop 161
taacacaacaaattctctaaaacaa

SEQ ID NO: 48990 - DNA, 25 bp, Artificial
  probe
  misc_feature (1)..(25): SEQ ID NO: 4672; WAN024ABA_at; Start 152; Stop 176
tctaaaacaaatcactaaatcaatg

SEQ ID NO: 48991 - DNA, 25 bp, Artificial
  probe
  misc_feature (1)..(25): SEQ ID NO: 4672; WAN024ABA_at; Start 41; Stop 65
aactctatcgtcttttttatactca

SEQ ID NO: 48992 - DNA, 25 bp, Artificial
  probe
  misc_feature (1)..(25): SEQ ID NO: 393; WAN024ABB_at; Start 81; Stop 105
caatctttatattgagcctattttc

SEQ ID NO: 48993 - DNA, 25 bp, Artificial
  probe
  misc_feature (1)..(25): SEQ ID NO: 393; WAN024ABB_at; Start 118; Stop 142
tgcaagaaaggaataatagctgttc

SEQ ID NO: 48994 - DNA, 25 bp, Artificial
  probe
  misc_feature (1)..(25): SEQ ID NO: 393; WAN024ABB_at; Start 96; Stop 120
gcctattttctaattgataccttgc

SEQ ID NO: 48995 - DNA, 25 bp, Artificial
  probe
  misc_feature (1)..(25): SEQ ID NO: 393; WAN024ABB_at; Start 104; Stop 128
tctaattgataccttgcaagaaagg

SEQ ID NO: 48996 - DNA, 25 bp, Artificial
  probe
  misc_feature (1)..(25): SEQ ID NO: 393; WAN024ABB_at; Start 146; Stop 170
taccaagtaggaatgtaataaatgc

SEQ ID NO: 48997 - DNA, 25 bp, Artificial
  probe
  misc_feature (1)..(25): SEQ ID NO: 393; WAN024ABB_at; Start 27; Stop 51
ttgttgcctttatcaatcatttcaa

SEQ ID NO: 48998 - DNA, 25 bp, Artificial
  probe
  misc_feature (1)..(25): SEQ ID NO: 393; WAN024ABB_at; Start 170; Stop 194
cagaaagtcatatactgtcattctt

SEQ ID NO: 48999 - DNA, 25 bp, Artificial
  probe
  misc_feature (1)..(25): SEQ ID NO: 393; WAN024ABB_at; Start 32; Stop 56
gcctttatcaatcatttcaacgctc

SEQ ID NO: 49000 - DNA, 25 bp, Artificial
  probe
  misc_feature (1)..(25): SEQ ID NO: 393; WAN024ABB_at; Start 93; Stop 117
tgagcctattttctaattgatacct

SEQ ID NO: 49001 - DNA, 25 bp, Artificial
  probe
  misc_feature (1)..(25): SEQ ID NO: 393; WAN024ABB_at; Start 44; Stop 68
catttcaacgctcctttaaatataa

SEQ ID NO: 49002 - DNA, 25 bp, Artificial
  probe
  misc_feature (1)..(25): SEQ ID NO: 393; WAN024ABB_at; Start 64; Stop 88
tataaaaatgatcctatcaatcttt

SEQ ID NO: 49003 - DNA, 25 bp, Artificial
  probe
  misc_feature (1)..(25): SEQ ID NO: 393; WAN024ABB_at; Start 120; Stop 144
caagaaaggaataatagctgttcct

SEQ ID NO: 49004 - DNA, 25 bp, Artificial
  probe
  misc_feature (1)..(25): SEQ ID NO: 393; WAN024ABB_at; Start 106; Stop 130
taattgataccttgcaagaaaggaa

SEQ ID NO: 49005 - DNA, 25 bp, Artificial
  probe
  misc_feature (1)..(25): SEQ ID NO: 393; WAN024ABB_at; Start 116; Stop 140
cttgcaagaaaggaataatagctgt

SEQ ID NO: 49006 - DNA, 25 bp, Artificial
  probe
  misc_feature (1)..(25): SEQ ID NO: 393; WAN024ABB_at; Start 148; Stop 172
ccaagtaggaatgtaataaatgcag

SEQ ID NO: 49007 - DNA, 25 bp, Artificial
  probe
  misc_feature (1)..(25): SEQ ID NO: 393; WAN024ABB_at; Start 164; Stop 188
taaatgcagaaagtcatatactgtc

SEQ ID NO: 49008 - DNA, 25 bp, Artificial
  probe
  misc_feature (1)..(25): SEQ ID NO: 393; WAN024ABB_at; Start 141; Stop 165
tcctataccaagtaggaatgtaata

SEQ ID NO: 49009 - DNA, 25 bp, Artificial
  probe
  misc_feature (1)..(25): SEQ ID NO: 393; WAN024ABB_at; Start 128; Stop 152
gaataatagctgttcctataccaag

SEQ ID NO: 49010 - DNA, 25 bp, Artificial
  probe
  misc_feature (1)..(25): SEQ ID NO: 393; WAN024ABB_at; Start 134; Stop 158
tagctgttcctataccaagtaggaa

SEQ ID NO: 49011 - DNA, 25 bp, Artificial
  probe
  misc_feature (1)..(25): SEQ ID NO: 393; WAN024ABB_at; Start 136; Stop 160
gctgttcctataccaagtaggaatg

SEQ ID NO: 49012 - DNA, 25 bp, Artificial
  probe
  misc_feature (1)..(25): SEQ ID NO: 393; WAN024ABB_at; Start 73; Stop 97
gatcctatcaatctttatattgagc

SEQ ID NO: 49013 - DNA, 25 bp, Artificial
  probe
  misc_feature (1)..(25): SEQ ID NO: 393; WAN024ABB_at; Start 99; Stop 123
tattttctaattgataccttgcaag

SEQ ID NO: 49014 - DNA, 25 bp, Artificial
  probe
  misc_feature (1)..(25): SEQ ID NO: 393; WAN024ABB_at; Start 49; Stop 73
caacgctcctttaaatataaaaatg

SEQ ID NO: 49015 - DNA, 25 bp, Artificial
  probe
  misc_feature (1)..(25): SEQ ID NO: 393; WAN024ABB_at; Start 115; Stop 139
ccttgcaagaaaggaataatagctg

SEQ ID NO: 49016 - DNA, 25 bp, Artificial
  probe
  misc_feature (1)..(25): SEQ ID NO: 393; WAN024ABB_at; Start 138; Stop 162
tgttcctataccaagtaggaatgta

SEQ ID NO: 49017 - DNA, 25 bp, Artificial
  probe
  misc_feature (1)..(25): SEQ ID NO: 393; WAN024ABB_at; Start 39; Stop 63
tcaatcatttcaacgctcctttaaa

SEQ ID NO: 49018 - DNA, 25 bp, Artificial
  probe
  misc_feature (1)..(25): SEQ ID NO: 393; WAN024ABB_at; Start 110; Stop 134
tgataccttgcaagaaaggaataat

SEQ ID NO: 49019 - DNA, 25 bp, Artificial
  probe
  misc_feature (1)..(25): SEQ ID NO: 393; WAN024ABB_at; Start 37; Stop 61
tatcaatcatttcaacgctccttta

SEQ ID NO: 49020 - DNA, 25 bp, Artificial
  probe
  misc_feature (1)..(25): SEQ ID NO: 393; WAN024ABB_at; Start 113; Stop 137
taccttgcaagaaaggaataatagc

SEQ ID NO: 49021 - DNA, 25 bp, Artificial
  probe
  misc_feature (1)..(25): SEQ ID NO: 393; WAN024ABB_at; Start 131; Stop 155
taatagctgttcctataccaagtag

SEQ ID NO: 49022 - DNA, 25 bp, Artificial
  probe
  misc_feature (1)..(25): SEQ ID NO: 393; WAN024ABB_at; Start 155; Stop 179
ggaatgtaataaatgcagaaagtca

SEQ ID NO: 49023 - DNA, 25 bp, Artificial
  probe
  misc_feature (1)..(25): SEQ ID NO: 393; WAN024ABB_at; Start 168; Stop 192
tgcagaaagtcatatactgtcattc

SEQ ID NO: 49024 - DNA, 25 bp, Artificial
  probe
  misc_feature (1)..(25): SEQ ID NO: 393; WAN024ABB_at; Start 132; Stop 156
aatagctgttcctataccaagtagg

SEQ ID NO: 49025 - DNA, 25 bp, Artificial
  probe
  misc_feature (1)..(25): SEQ ID NO: 393; WAN024ABB_at; Start 175; Stop 199
agtcatatactgtcattcttttcta

SEQ ID NO: 49026 - DNA, 25 bp, Artificial
  probe
  misc_feature (1)..(25): SEQ ID NO: 4480; WAN024ABC_at; Start 40; Stop 64
cattcctacttggtataggaacagc

SEQ ID NO: 49027 - DNA, 25 bp, Artificial
  probe
  misc_feature (1)..(25): SEQ ID NO: 4480; WAN024ABC_at; Start 84; Stop 108
ggtatcaattagaaaataggctcaa

SEQ ID NO: 49028 - DNA, 25 bp, Artificial
  probe
  misc_feature (1)..(25): SEQ ID NO: 4480; WAN024ABC_at; Start 8; Stop 32
gaatgacagtatatgactttctgca

SEQ ID NO: 49029 - DNA, 25 bp, Artificial
  probe
  misc_feature (1)..(25): SEQ ID NO: 4480; WAN024ABC_at; Start 86; Stop 110
tatcaattagaaaataggctcaata

SEQ ID NO: 49030 - DNA, 25 bp, Artificial
  probe
  misc_feature (1)..(25): SEQ ID NO: 4480; WAN024ABC_at; Start 137; Stop 161
tttaaaggagcgttgaaatgattga

SEQ ID NO: 49031 - DNA, 25 bp, Artificial
  probe
  misc_feature (1)..(25): SEQ ID NO: 4480; WAN024ABC_at; Start 144; Stop 168
gagcgttgaaatgattgataaaggc

SEQ ID NO: 49032 - DNA, 25 bp, Artificial
  probe
  misc_feature (1)..(25): SEQ ID NO: 4480; WAN024ABC_at; Start 127; Stop 151
catttttatatttaaaggagcgttg

SEQ ID NO: 49033 - DNA, 25 bp, Artificial
  probe
  misc_feature (1)..(25): SEQ ID NO: 4480; WAN024ABC_at; Start 95; Stop 119
gaaaataggctcaatataaagattg

SEQ ID NO: 49034 - DNA, 25 bp, Artificial
  probe
  misc_feature (1)..(25): SEQ ID NO: 4480; WAN024ABC_at; Start 68; Stop 92
tattcctttcttgcaaggtatcaat

SEQ ID NO: 49035 - DNA, 25 bp, Artificial
  probe
  misc_feature (1)..(25): SEQ ID NO: 4480; WAN024ABC_at; Start 38; Stop 62
tacattcctacttggtataggaaca

SEQ ID NO: 49036 - DNA, 25 bp, Artificial
  probe
  misc_feature (1)..(25): SEQ ID NO: 4480; WAN024ABC_at; Start 30; Stop 54
gcatttattacattcctacttggta

SEQ ID NO: 49037 - DNA, 25 bp, Artificial
  probe
  misc_feature (1)..(25): SEQ ID NO: 4480; WAN024ABC_at; Start 106; Stop 130
caatataaagattgataggatcatt

SEQ ID NO: 49038 - DNA, 25 bp, Artificial
  probe
  misc_feature (1)..(25): SEQ ID NO: 4480; WAN024ABC_at; Start 89; Stop 113
caattagaaaataggctcaatataa

SEQ ID NO: 49039 - DNA, 25 bp, Artificial
  probe
  misc_feature (1)..(25): SEQ ID NO: 4480; WAN024ABC_at; Start 139; Stop 163
taaaggagcgttgaaatgattgata

SEQ ID NO: 49040 - DNA, 25 bp, Artificial
  probe
  misc_feature (1)..(25): SEQ ID NO: 4480; WAN024ABC_at; Start 103; Stop 127
gctcaatataaagattgataggatc

SEQ ID NO: 49041 - DNA, 25 bp, Artificial
  probe
  misc_feature (1)..(25): SEQ ID NO: 4480; WAN024ABC_at; Start 153; Stop 177
aatgattgataaaggcaacaaaaaa

SEQ ID NO: 49042 - DNA, 25 bp, Artificial
  probe
  misc_feature (1)..(25): SEQ ID NO: 4480; WAN024ABC_at; Start 22; Stop 46
gactttctgcatttattacattcct

SEQ ID NO: 49043 - DNA, 25 bp, Artificial
  probe
  misc_feature (1)..(25): SEQ ID NO: 4480; WAN024ABC_at; Start 82; Stop 106
aaggtatcaattagaaaataggctc

SEQ ID NO: 49044 - DNA, 25 bp, Artificial
  probe
  misc_feature (1)..(25): SEQ ID NO: 4480; WAN024ABC_at; Start 46; Stop 70
tacttggtataggaacagctattat

SEQ ID NO: 49045 - DNA, 25 bp, Artificial
  probe
  misc_feature (1)..(25): SEQ ID NO: 4480; WAN024ABC_at; Start 63; Stop 87
gctattattcctttcttgcaaggta

SEQ ID NO: 49046 - DNA, 25 bp, Artificial
  probe
  misc_feature (1)..(25): SEQ ID NO: 4480; WAN024ABC_at; Start 43; Stop 67
tcctacttggtataggaacagctat

SEQ ID NO: 49047 - DNA, 25 bp, Artificial
  probe
  misc_feature (1)..(25): SEQ ID NO: 4480; WAN024ABC_at; Start 151; Stop 175
gaaatgattgataaaggcaacaaaa

SEQ ID NO: 49048 - DNA, 25 bp, Artificial
  probe
  misc_feature (1)..(25): SEQ ID NO: 4480; WAN024ABC_at; Start 147; Stop 171
cgttgaaatgattgataaaggcaac

SEQ ID NO: 49049 - DNA, 25 bp, Artificial
  probe
  misc_feature (1)..(25): SEQ ID NO: 4480; WAN024ABC_at; Start 80; Stop 104
gcaaggtatcaattagaaaataggc

SEQ ID NO: 49050 - DNA, 25 bp, Artificial
  probe
  misc_feature (1)..(25): SEQ ID NO: 4480; WAN024ABC_at; Start 12; Stop 36
gacagtatatgactttctgcattta

SEQ ID NO: 49051 - DNA, 25 bp, Artificial
  probe
  misc_feature (1)..(25): SEQ ID NO: 4480; WAN024ABC_at; Start 28; Stop 52
ctgcatttattacattcctacttgg

SEQ ID NO: 49052 - DNA, 25 bp, Artificial
  probe
  misc_feature (1)..(25): SEQ ID NO: 4480; WAN024ABC_at; Start 1; Stop 25
tagaaaagaatgacagtatatgact

SEQ ID NO: 49053 - DNA, 25 bp, Artificial
  probe
  misc_feature (1)..(25): SEQ ID NO: 4480; WAN024ABC_at; Start 48; Stop 72
cttggtataggaacagctattattc

SEQ ID NO: 49054 - DNA, 25 bp, Artificial
  probe
  misc_feature (1)..(25): SEQ ID NO: 4480; WAN024ABC_at; Start 61; Stop 85
cagctattattcctttcttgcaagg

SEQ ID NO: 49055 - DNA, 25 bp, Artificial
  probe
  misc_feature (1)..(25): SEQ ID NO: 4480; WAN024ABC_at; Start 35; Stop 59
tattacattcctacttggtatagga

SEQ ID NO: 49056 - DNA, 25 bp, Artificial
  probe
  misc_feature (1)..(25): SEQ ID NO: 4480; WAN024ABC_at; Start 100; Stop 124
taggctcaatataaagattgatagg

SEQ ID NO: 49057 - DNA, 25 bp, Artificial
  probe
  misc_feature (1)..(25): SEQ ID NO: 4480; WAN024ABC_at; Start 44; Stop 68
cctacttggtataggaacagctatt

SEQ ID NO: 49058 - DNA, 25 bp, Artificial
  probe
  misc_feature (1)..(25): SEQ ID NO: 4480; WAN024ABC_at; Start 72; Stop 96
cctttcttgcaaggtatcaattaga

SEQ ID NO: 49059 - DNA, 25 bp, Artificial
  probe
  misc_feature (1)..(25): SEQ ID NO: 4480; WAN024ABC_at; Start 51; Stop 75
ggtataggaacagctattattcctt

SEQ ID NO: 49060 - DNA, 25 bp, Artificial
  probe
  misc_feature (1)..(25): SEQ ID NO: 464; WAN024ABD_at; Start 37; Stop 61
tctatcttaaagaaaacttataaca

SEQ ID NO: 49061 - DNA, 25 bp, Artificial
  probe
  misc_feature (1)..(25): SEQ ID NO: 464; WAN024ABD_at; Start 20; Stop 44
ttctttagagtaatatatctatctt

SEQ ID NO: 49062 - DNA, 25 bp, Artificial
  probe
  misc_feature (1)..(25): SEQ ID NO: 464; WAN024ABD_at; Start 19; Stop 43
cttctttagagtaatatatctatct

SEQ ID NO: 49063 - DNA, 25 bp, Artificial
  probe
  misc_feature (1)..(25): SEQ ID NO: 464; WAN024ABD_at; Start 28; Stop 52
agtaatatatctatcttaaagaaaa

SEQ ID NO: 49064 - DNA, 25 bp, Artificial
  probe
  misc_feature (1)..(25): SEQ ID NO: 464; WAN024ABD_at; Start 29; Stop 53
gtaatatatctatcttaaagaaaac

SEQ ID NO: 49065 - DNA, 25 bp, Artificial
  probe
  misc_feature (1)..(25): SEQ ID NO: 464; WAN024ABD_at; Start 21; Stop 45
tctttagagtaatatatctatctta

SEQ ID NO: 49066 - DNA, 25 bp, Artificial
  probe
  misc_feature (1)..(25): SEQ ID NO: 464; WAN024ABD_at; Start 12; Stop 36
tcctttacttctttagagtaatata

SEQ ID NO: 49067 - DNA, 25 bp, Artificial
  probe
  misc_feature (1)..(25): SEQ ID NO: 464; WAN024ABD_at; Start 22; Stop 46
ctttagagtaatatatctatcttaa

SEQ ID NO: 49068 - DNA, 25 bp, Artificial
  probe
  misc_feature (1)..(25): SEQ ID NO: 464; WAN024ABD_at; Start 35; Stop 59
tatctatcttaaagaaaacttataa

SEQ ID NO: 49069 - DNA, 25 bp, Artificial
  probe
  misc_feature (1)..(25): SEQ ID NO: 464; WAN024ABD_at; Start 23; Stop 47
tttagagtaatatatctatcttaaa

SEQ ID NO: 49070 - DNA, 25 bp, Artificial
  probe
  misc_feature (1)..(25): SEQ ID NO: 464; WAN024ABD_at; Start 17; Stop 41
tacttctttagagtaatatatctat

SEQ ID NO: 49071 - DNA, 25 bp, Artificial
  probe
  misc_feature (1)..(25): SEQ ID NO: 464; WAN024ABD_at; Start 11; Stop 35
ctcctttacttctttagagtaatat

SEQ ID NO: 49072 - DNA, 25 bp, Artificial
  probe
  misc_feature (1)..(25): SEQ ID NO: 464; WAN024ABD_at; Start 34; Stop 58
atatctatcttaaagaaaacttata

SEQ ID NO: 49073 - DNA, 25 bp, Artificial
  probe
  misc_feature (1)..(25): SEQ ID NO: 464; WAN024ABD_at; Start 25; Stop 49
tagagtaatatatctatcttaaaga

SEQ ID NO: 49074 - DNA, 25 bp, Artificial
  probe
  misc_feature (1)..(25): SEQ ID NO: 464; WAN024ABD_at; Start 30; Stop 54
taatatatctatcttaaagaaaact

SEQ ID NO: 49075 - DNA, 25 bp, Artificial
  probe
  misc_feature (1)..(25): SEQ ID NO: 464; WAN024ABD_at; Start 16; Stop 40
ttacttctttagagtaatatatcta

SEQ ID NO: 49076 - DNA, 25 bp, Artificial
  probe
  misc_feature (1)..(25): SEQ ID NO: 464; WAN024ABD_at; Start 24; Stop 48
ttagagtaatatatctatcttaaag

SEQ ID NO: 49077 - DNA, 25 bp, Artificial
  probe
  misc_feature (1)..(25): SEQ ID NO: 464; WAN024ABD_at; Start 18; Stop 42
acttctttagagtaatatatctatc

SEQ ID NO: 49078 - DNA, 25 bp, Artificial
  probe
  misc_feature (1)..(25): SEQ ID NO: 464; WAN024ABD_at; Start 15; Stop 39
tttacttctttagagtaatatatct

SEQ ID NO: 49079 - DNA, 25 bp, Artificial
  probe
  misc_feature (1)..(25): SEQ ID NO: 464; WAN024ABD_at; Start 26; Stop 50
agagtaatatatctatcttaaagaa

SEQ ID NO: 49080 - DNA, 25 bp, Artificial
  probe
  misc_feature (1)..(25): SEQ ID NO: 464; WAN024ABD_at; Start 32; Stop 56
atatatctatcttaaagaaaactta

SEQ ID NO: 49081 - DNA, 25 bp, Artificial
  probe
  misc_feature (1)..(25): SEQ ID NO: 464; WAN024ABD_at; Start 27; Stop 51
gagtaatatatctatcttaaagaaa

SEQ ID NO: 49082 - DNA, 25 bp, Artificial
  probe
  misc_feature (1)..(25): SEQ ID NO: 464; WAN024ABD_at; Start 33; Stop 57
tatatctatcttaaagaaaacttat

SEQ ID NO: 49083 - DNA, 25 bp, Artificial
  probe
  misc_feature (1)..(25): SEQ ID NO: 464; WAN024ABD_at; Start 31; Stop 55
aatatatctatcttaaagaaaactt

SEQ ID NO: 49084 - DNA, 25 bp, Artificial
  probe
  misc_feature (1)..(25): SEQ ID NO: 464; WAN024ABD_at; Start 14; Stop 38
ctttacttctttagagtaatatatc

SEQ ID NO: 49085 - DNA, 25 bp, Artificial
  probe
  misc_feature (1)..(25): SEQ ID NO: 464; WAN024ABD_at; Start 13; Stop 37
cctttacttctttagagtaatatat

SEQ ID NO: 49086 - DNA, 25 bp, Artificial
  probe
  misc_feature (1)..(25): SEQ ID NO: 346; WAN024ABE_at; Start 27; Stop 51
tttaagatagatatattactctaaa

SEQ ID NO: 49087 - DNA, 25 bp, Artificial
  probe
  misc_feature (1)..(25): SEQ ID NO: 346; WAN024ABE_at; Start 25; Stop 49
tctttaagatagatatattactcta

SEQ ID NO: 49088 - DNA, 25 bp, Artificial
  probe
  misc_feature (1)..(25): SEQ ID NO: 346; WAN024ABE_at; Start 22; Stop 46
ttttctttaagatagatatattact

SEQ ID NO: 49089 - DNA, 25 bp, Artificial
  probe
  misc_feature (1)..(25): SEQ ID NO: 346; WAN024ABE_at; Start 15; Stop 39
ttataagttttctttaagatagata

SEQ ID NO: 49090 - DNA, 25 bp, Artificial
  probe
  misc_feature (1)..(25): SEQ ID NO: 346; WAN024ABE_at; Start 32; Stop 56
gatagatatattactctaaagaagt

SEQ ID NO: 49091 - DNA, 25 bp, Artificial
  probe
  misc_feature (1)..(25): SEQ ID NO: 346; WAN024ABE_at; Start 36; Stop 60
gatatattactctaaagaagtaaag

SEQ ID NO: 49092 - DNA, 25 bp, Artificial
  probe
  misc_feature (1)..(25): SEQ ID NO: 346; WAN024ABE_at; Start 31; Stop 55
agatagatatattactctaaagaag

SEQ ID NO: 49093 - DNA, 25 bp, Artificial
  probe
  misc_feature (1)..(25): SEQ ID NO: 346; WAN024ABE_at; Start 23; Stop 47
tttctttaagatagatatattactc

SEQ ID NO: 49094 - DNA, 25 bp, Artificial
  probe
  misc_feature (1)..(25): SEQ ID NO: 346; WAN024ABE_at; Start 18; Stop 42
taagttttctttaagatagatatat

SEQ ID NO: 49095 - DNA, 25 bp, Artificial
  probe
  misc_feature (1)..(25): SEQ ID NO: 346; WAN024ABE_at; Start 26; Stop 50
ctttaagatagatatattactctaa

SEQ ID NO: 49096 - DNA, 25 bp, Artificial
  probe
  misc_feature (1)..(25): SEQ ID NO: 346; WAN024ABE_at; Start 38; Stop 62
tatattactctaaagaagtaaagga

SEQ ID NO: 49097 - DNA, 25 bp, Artificial
  probe
  misc_feature (1)..(25): SEQ ID NO: 346; WAN024ABE_at; Start 39; Stop 63
atattactctaaagaagtaaaggag

SEQ ID NO: 49098 - DNA, 25 bp, Artificial
  probe
  misc_feature (1)..(25): SEQ ID NO: 346; WAN024ABE_at; Start 13; Stop 37
tgttataagttttctttaagataga

SEQ ID NO: 49099 - DNA, 25 bp, Artificial
  probe
  misc_feature (1)..(25): SEQ ID NO: 346; WAN024ABE_at; Start 28; Stop 52
ttaagatagatatattactctaaag

SEQ ID NO: 49100 - DNA, 25 bp, Artificial
  probe
  misc_feature (1)..(25): SEQ ID NO: 346; WAN024ABE_at; Start 24; Stop 48
ttctttaagatagatatattactct

SEQ ID NO: 49101 - DNA, 25 bp, Artificial
  probe
  misc_feature (1)..(25): SEQ ID NO: 346; WAN024ABE_at; Start 35; Stop 59
agatatattactctaaagaagtaaa

SEQ ID NO: 49102 - DNA, 25 bp, Artificial
  probe
  misc_feature (1)..(25): SEQ ID NO: 346; WAN024ABE_at; Start 16; Stop 40
tataagttttctttaagatagatat

SEQ ID NO: 49103 - DNA, 25 bp, Artificial
  probe
  misc_feature (1)..(25): SEQ ID NO: 346; WAN024ABE_at; Start 21; Stop 45
gttttctttaagatagatatattac

SEQ ID NO: 49104 - DNA, 25 bp, Artificial
  probe
  misc_feature (1)..(25): SEQ ID NO: 346; WAN024ABE_at; Start 29; Stop 53
taagatagatatattactctaaaga

SEQ ID NO: 49105 - DNA, 25 bp, Artificial
  probe
  misc_feature (1)..(25): SEQ ID NO: 346; WAN024ABE_at; Start 30; Stop 54
aagatagatatattactctaaagaa

SEQ ID NO: 49106 - DNA, 25 bp, Artificial
  probe
  misc_feature (1)..(25): SEQ ID NO: 346; WAN024ABE_at; Start 34; Stop 58
tagatatattactctaaagaagtaa

SEQ ID NO: 49107 - DNA, 25 bp, Artificial
  probe
  misc_feature (1)..(25): SEQ ID NO: 346; WAN024ABE_at; Start 37; Stop 61
atatattactctaaagaagtaaagg

SEQ ID NO: 49108 - DNA, 25 bp, Artificial
  probe
  misc_feature (1)..(25): SEQ ID NO: 346; WAN024ABE_at; Start 33; Stop 57
atagatatattactctaaagaagta

SEQ ID NO: 49109 - DNA, 25 bp, Artificial
  probe
  misc_feature (1)..(25): SEQ ID NO: 471; WAN024ABF_at; Start 4; Stop 28
tcttctcctttattgtgtgactagt

SEQ ID NO: 49110 - DNA, 25 bp, Artificial
  probe
  misc_feature (1)..(25): SEQ ID NO: 471; WAN024ABF_at; Start 7; Stop 31
tctcctttattgtgtgactagtcca

SEQ ID NO: 49111 - DNA, 25 bp, Artificial
  probe
  misc_feature (1)..(25): SEQ ID NO: 471; WAN024ABF_at; Start 17; Stop 41
tgtgtgactagtccattagtttgat

SEQ ID NO: 49112 - DNA, 25 bp, Artificial
  probe
  misc_feature (1)..(25): SEQ ID NO: 471; WAN024ABF_at; Start 20; Stop 44
gtgactagtccattagtttgatttt

SEQ ID NO: 49113 - DNA, 25 bp, Artificial
  probe
  misc_feature (1)..(25): SEQ ID NO: 471; WAN024ABF_at; Start 18; Stop 42
gtgtgactagtccattagtttgatt

SEQ ID NO: 49114 - DNA, 25 bp, Artificial
  probe
  misc_feature (1)..(25): SEQ ID NO: 471; WAN024ABF_at; Start 1; Stop 25
aggtcttctcctttattgtgtgact

SEQ ID NO: 49115 - DNA, 25 bp, Artificial
  probe
  misc_feature (1)..(25): SEQ ID NO: 471; WAN024ABF_at; Start 8; Stop 32
ctcctttattgtgtgactagtccat

SEQ ID NO: 49116 - DNA, 25 bp, Artificial
  probe
  misc_feature (1)..(25): SEQ ID NO: 471; WAN024ABF_at; Start 14; Stop 38
tattgtgtgactagtccattagttt

SEQ ID NO: 49117 - DNA, 25 bp, Artificial
  probe
  misc_feature (1)..(25): SEQ ID NO: 471; WAN024ABF_at; Start 9; Stop 33
tcctttattgtgtgactagtccatt

SEQ ID NO: 49118 - DNA, 25 bp, Artificial
  probe
  misc_feature (1)..(25): SEQ ID NO: 471; WAN024ABF_at; Start 13; Stop 37
ttattgtgtgactagtccattagtt

SEQ ID NO: 49119 - DNA, 25 bp, Artificial
  probe
  misc_feature (1)..(25): SEQ ID NO: 471; WAN024ABF_at; Start 10; Stop 34
cctttattgtgtgactagtccatta

SEQ ID NO: 49120 - DNA, 25 bp, Artificial
  probe
  misc_feature (1)..(25): SEQ ID NO: 471; WAN024ABF_at; Start 15; Stop 39
attgtgtgactagtccattagtttg

SEQ ID NO: 49121 - DNA, 25 bp, Artificial
  probe
  misc_feature (1)..(25): SEQ ID NO: 471; WAN024ABF_at; Start 16; Stop 40
ttgtgtgactagtccattagtttga

SEQ ID NO: 49122 - DNA, 25 bp, Artificial
  probe
  misc_feature (1)..(25): SEQ ID NO: 471; WAN024ABF_at; Start 35; Stop 59
gtttgattttacaataagaaaatca

SEQ ID NO: 49123 - DNA, 25 bp, Artificial
  probe
  misc_feature (1)..(25): SEQ ID NO: 471; WAN024ABF_at; Start 12; Stop 36
tttattgtgtgactagtccattagt

SEQ ID NO: 49124 - DNA, 25 bp, Artificial
  probe
  misc_feature (1)..(25): SEQ ID NO: 471; WAN024ABF_at; Start 2; Stop 26
ggtcttctcctttattgtgtgacta

SEQ ID NO: 49125 - DNA, 25 bp, Artificial
  probe
  misc_feature (1)..(25): SEQ ID NO: 471; WAN024ABF_at; Start 6; Stop 30
ttctcctttattgtgtgactagtcc

SEQ ID NO: 49126 - DNA, 25 bp, Artificial
  probe
  misc_feature (1)..(25): SEQ ID NO: 471; WAN024ABF_at; Start 3; Stop 27
gtcttctcctttattgtgtgactag

SEQ ID NO: 49127 - DNA, 25 bp, Artificial
  probe
  misc_feature (1)..(25): SEQ ID NO: 471; WAN024ABF_at; Start 5; Stop 29
cttctcctttattgtgtgactagtc

SEQ ID NO: 49128 - DNA, 25 bp, Artificial
  probe
  misc_feature (1)..(25): SEQ ID NO: 471; WAN024ABF_at; Start 11; Stop 35
ctttattgtgtgactagtccattag

SEQ ID NO: 49129 - DNA, 25 bp, Artificial
  probe
  misc_feature (1)..(25): SEQ ID NO: 471; WAN024ABF_at; Start 19; Stop 43
tgtgactagtccattagtttgattt

SEQ ID NO: 49130 - DNA, 25 bp, Artificial
  probe
  misc_feature (1)..(25): SEQ ID NO: 5919; WAN024ABG_at; Start 32; Stop 56
ggactagtcacacaataaaggagaa

SEQ ID NO: 49131 - DNA, 25 bp, Artificial
  probe
  misc_feature (1)..(25): SEQ ID NO: 5919; WAN024ABG_at; Start 18; Stop 42
aaaatcaaactaatggactagtcac

SEQ ID NO: 49132 - DNA, 25 bp, Artificial
  probe
  misc_feature (1)..(25): SEQ ID NO: 5919; WAN024ABG_at; Start 20; Stop 44
aatcaaactaatggactagtcacac

SEQ ID NO: 49133 - DNA, 25 bp, Artificial
  probe
  misc_feature (1)..(25): SEQ ID NO: 5919; WAN024ABG_at; Start 34; Stop 58
actagtcacacaataaaggagaaga

SEQ ID NO: 49134 - DNA, 25 bp, Artificial
  probe
  misc_feature (1)..(25): SEQ ID NO: 5919; WAN024ABG_at; Start 30; Stop 54
atggactagtcacacaataaaggag

SEQ ID NO: 49135 - DNA, 25 bp, Artificial
  probe
  misc_feature (1)..(25): SEQ ID NO: 5919; WAN024ABG_at; Start 11; Stop 35
ttattgtaaaatcaaactaatggac

SEQ ID NO: 49136 - DNA, 25 bp, Artificial
  probe
  misc_feature (1)..(25): SEQ ID NO: 5919; WAN024ABG_at; Start 22; Stop 46
tcaaactaatggactagtcacacaa

SEQ ID NO: 49137 - DNA, 25 bp, Artificial
  probe
  misc_feature (1)..(25): SEQ ID NO: 5919; WAN024ABG_at; Start 19; Stop 43
aaatcaaactaatggactagtcaca

SEQ ID NO: 49138 - DNA, 25 bp, Artificial
  probe
  misc_feature (1)..(25): SEQ ID NO: 5919; WAN024ABG_at; Start 10; Stop 34
cttattgtaaaatcaaactaatgga

SEQ ID NO: 49139 - DNA, 25 bp, Artificial
  probe
  misc_feature (1)..(25): SEQ ID NO: 5919; WAN024ABG_at; Start 17; Stop 41
taaaatcaaactaatggactagtca

SEQ ID NO: 49140 - DNA, 25 bp, Artificial
  probe
  misc_feature (1)..(25): SEQ ID NO: 5919; WAN024ABG_at; Start 29; Stop 53
aatggactagtcacacaataaagga

SEQ ID NO: 49141 - DNA, 25 bp, Artificial
  probe
  misc_feature (1)..(25): SEQ ID NO: 5919; WAN024ABG_at; Start 12; Stop 36
tattgtaaaatcaaactaatggact

SEQ ID NO: 49142 - DNA, 25 bp, Artificial
  probe
  misc_feature (1)..(25): SEQ ID NO: 5919; WAN024ABG_at; Start 21; Stop 45
atcaaactaatggactagtcacaca

SEQ ID NO: 49143 - DNA, 25 bp, Artificial
  probe
  misc_feature (1)..(25): SEQ ID NO: 5919; WAN024ABG_at; Start 15; Stop 39
tgtaaaatcaaactaatggactagt

SEQ ID NO: 49144 - DNA, 25 bp, Artificial
  probe
  misc_feature (1)..(25): SEQ ID NO: 5919; WAN024ABG_at; Start 31; Stop 55
tggactagtcacacaataaaggaga

SEQ ID NO: 49145 - DNA, 25 bp, Artificial
  probe
  misc_feature (1)..(25): SEQ ID NO: 5919; WAN024ABG_at; Start 37; Stop 61
agtcacacaataaaggagaagacct

SEQ ID NO: 49146 - DNA, 25 bp, Artificial
  probe
  misc_feature (1)..(25): SEQ ID NO: 5919; WAN024ABG_at; Start 16; Stop 40
gtaaaatcaaactaatggactagtc

SEQ ID NO: 49147 - DNA, 25 bp, Artificial
  probe
  misc_feature (1)..(25): SEQ ID NO: 5919; WAN024ABG_at; Start 14; Stop 38
ttgtaaaatcaaactaatggactag

SEQ ID NO: 49148 - DNA, 25 bp, Artificial
  probe
  misc_feature (1)..(25): SEQ ID NO: 5919; WAN024ABG_at; Start 8; Stop 32
ttcttattgtaaaatcaaactaatg

SEQ ID NO: 49149 - DNA, 25 bp, Artificial
  probe
  misc_feature (1)..(25): SEQ ID NO: 5919; WAN024ABG_at; Start 35; Stop 59
ctagtcacacaataaaggagaagac

SEQ ID NO: 49150 - DNA, 25 bp, Artificial
  probe
  misc_feature (1)..(25): SEQ ID NO: 5919; WAN024ABG_at; Start 9; Stop 33
tcttattgtaaaatcaaactaatgg

SEQ ID NO: 49151 - DNA, 25 bp, Artificial
  probe
  misc_feature (1)..(25): SEQ ID NO: 5919; WAN024ABG_at; Start 33; Stop 57
gactagtcacacaataaaggagaag

SEQ ID NO: 49152 - DNA, 25 bp, Artificial
  probe
  misc_feature (1)..(25): SEQ ID NO: 5919; WAN024ABG_at; Start 24; Stop 48
aaactaatggactagtcacacaata

SEQ ID NO: 49153 - DNA, 25 bp, Artificial
  probe
  misc_feature (1)..(25): SEQ ID NO: 5919; WAN024ABG_at; Start 27; Stop 51
ctaatggactagtcacacaataaag

SEQ ID NO: 49154 - DNA, 25 bp, Artificial
  probe
  misc_feature (1)..(25): SEQ ID NO: 5919; WAN024ABG_at; Start 13; Stop 37
attgtaaaatcaaactaatggacta

SEQ ID NO: 49155 - DNA, 25 bp, Artificial
  probe
  misc_feature (1)..(25): SEQ ID NO: 5919; WAN024ABG_at; Start 28; Stop 52
taatggactagtcacacaataaagg

SEQ ID NO: 49156 - DNA, 25 bp, Artificial
  probe
  misc_feature (1)..(25): SEQ ID NO: 5919; WAN024ABG_at; Start 26; Stop 50
actaatggactagtcacacaataaa

SEQ ID NO: 49157 - DNA, 25 bp, Artificial
  probe
  misc_feature (1)..(25): SEQ ID NO: 5919; WAN024ABG_at; Start 23; Stop 47
caaactaatggactagtcacacaat

SEQ ID NO: 49158 - DNA, 25 bp, Artificial
  probe
  misc_feature (1)..(25): SEQ ID NO: 5919; WAN024ABG_at; Start 36; Stop 60
tagtcacacaataaaggagaagacc

SEQ ID NO: 49159 - DNA, 25 bp, Artificial
  probe
  misc_feature (1)..(25): SEQ ID NO: 5919; WAN024ABG_at; Start 25; Stop 49
aactaatggactagtcacacaataa

SEQ ID NO: 49160 - DNA, 25 bp, Artificial
  probe
  misc_feature (1)..(25): SEQ ID NO: 4357; WAN024ABH_at; Start 47; Stop 71
tatcataattttcttaagctttaaa

SEQ ID NO: 49161 - DNA, 25 bp, Artificial
  probe
  misc_feature (1)..(25): SEQ ID NO: 4357; WAN024ABH_at; Start 15; Stop 39
gtccatttctaaatttttgctacat

SEQ ID NO: 49162 - DNA, 25 bp, Artificial
  probe
  misc_feature (1)..(25): SEQ ID NO: 4357; WAN024ABH_at; Start 44; Stop 68
gtatatcataattttcttaagcttt

SEQ ID NO: 49163 - DNA, 25 bp, Artificial
  probe
  misc_feature (1)..(25): SEQ ID NO: 4357; WAN024ABH_at; Start 21; Stop 45
ttctaaatttttgctacattctagt

SEQ ID NO: 49164 - DNA, 25 bp, Artificial
  probe
  misc_feature (1)..(25): SEQ ID NO: 4357; WAN024ABH_at; Start 2; Stop 26
tttcttgcttcacgtccatttctaa

SEQ ID NO: 49165 - DNA, 25 bp, Artificial
  probe
  misc_feature (1)..(25): SEQ ID NO: 4357; WAN024ABH_at; Start 24; Stop 48
taaatttttgctacattctagtata

SEQ ID NO: 49166 - DNA, 25 bp, Artificial
  probe
  misc_feature (1)..(25): SEQ ID NO: 4357; WAN024ABH_at; Start 3; Stop 27
ttcttgcttcacgtccatttctaaa

SEQ ID NO: 49167 - DNA, 25 bp, Artificial
  probe
  misc_feature (1)..(25): SEQ ID NO: 4357; WAN024ABH_at; Start 9; Stop 33
cttcacgtccatttctaaatttttg

SEQ ID NO: 49168 - DNA, 25 bp, Artificial
  probe
  misc_feature (1)..(25): SEQ ID NO: 4357; WAN024ABH_at; Start 35; Stop 59
tacattctagtatatcataattttc

SEQ ID NO: 49169 - DNA, 25 bp, Artificial
  probe
  misc_feature (1)..(25): SEQ ID NO: 4357; WAN024ABH_at; Start 29; Stop 53
ttttgctacattctagtatatcata

SEQ ID NO: 49170 - DNA, 25 bp, Artificial
  probe
  misc_feature (1)..(25): SEQ ID NO: 4357; WAN024ABH_at; Start 22; Stop 46
tctaaatttttgctacattctagta

SEQ ID NO: 49171 - DNA, 25 bp, Artificial
  probe
  misc_feature (1)..(25): SEQ ID NO: 4357; WAN024ABH_at; Start 27; Stop 51
atttttgctacattctagtatatca

SEQ ID NO: 49172 - DNA, 25 bp, Artificial
  probe
  misc_feature (1)..(25): SEQ ID NO: 4357; WAN024ABH_at; Start 32; Stop 56
tgctacattctagtatatcataatt

SEQ ID NO: 49173 - DNA, 25 bp, Artificial
  probe
  misc_feature (1)..(25): SEQ ID NO: 4357; WAN024ABH_at; Start 30; Stop 54
tttgctacattctagtatatcataa

SEQ ID NO: 49174 - DNA, 25 bp, Artificial
  probe
  misc_feature (1)..(25): SEQ ID NO: 4357; WAN024ABH_at; Start 12; Stop 36
cacgtccatttctaaatttttgcta

SEQ ID NO: 49175 - DNA, 25 bp, Artificial
  probe
  misc_feature (1)..(25): SEQ ID NO: 4357; WAN024ABH_at; Start 10; Stop 34
ttcacgtccatttctaaatttttgc

SEQ ID NO: 49176 - DNA, 25 bp, Artificial
  probe
  misc_feature (1)..(25): SEQ ID NO: 4357; WAN024ABH_at; Start 26; Stop 50
aatttttgctacattctagtatatc

SEQ ID NO: 49177 - DNA, 25 bp, Artificial
  probe
  misc_feature (1)..(25): SEQ ID NO: 4357; WAN024ABH_at; Start 20; Stop 44
tttctaaatttttgctacattctag

SEQ ID NO: 49178 - DNA, 25 bp, Artificial
  probe
  misc_feature (1)..(25): SEQ ID NO: 4357; WAN024ABH_at; Start 6; Stop 30
ttgcttcacgtccatttctaaattt

SEQ ID NO: 49179 - DNA, 25 bp, Artificial
  probe
  misc_feature (1)..(25): SEQ ID NO: 4357; WAN024ABH_at; Start 33; Stop 57
gctacattctagtatatcataattt

SEQ ID NO: 49180 - DNA, 25 bp, Artificial
  probe
  misc_feature (1)..(25): SEQ ID NO: 4357; WAN024ABH_at; Start 5; Stop 29
cttgcttcacgtccatttctaaatt

SEQ ID NO: 49181 - DNA, 25 bp, Artificial
  probe
  misc_feature (1)..(25): SEQ ID NO: 4357; WAN024ABH_at; Start 36; Stop 60
acattctagtatatcataattttct

SEQ ID NO: 49182 - DNA, 25 bp, Artificial
  probe
  misc_feature (1)..(25): SEQ ID NO: 4357; WAN024ABH_at; Start 7; Stop 31
tgcttcacgtccatttctaaatttt

SEQ ID NO: 49183 - DNA, 25 bp, Artificial
  probe
  misc_feature (1)..(25): SEQ ID NO: 4357; WAN024ABH_at; Start 23; Stop 47
ctaaatttttgctacattctagtat

SEQ ID NO: 49184 - DNA, 25 bp, Artificial
  probe
  misc_feature (1)..(25): SEQ ID NO: 4357; WAN024ABH_at; Start 17; Stop 41
ccatttctaaatttttgctacattc

SEQ ID NO: 49185 - DNA, 25 bp, Artificial
  probe
  misc_feature (1)..(25): SEQ ID NO: 4357; WAN024ABH_at; Start 1; Stop 25
gtttcttgcttcacgtccatttcta

SEQ ID NO: 49186 - DNA, 25 bp, Artificial
  probe
  misc_feature (1)..(25): SEQ ID NO: 4357; WAN024ABH_at; Start 18; Stop 42
catttctaaatttttgctacattct

SEQ ID NO: 49187 - DNA, 25 bp, Artificial
  probe
  misc_feature (1)..(25): SEQ ID NO: 4357; WAN024ABH_at; Start 31; Stop 55
ttgctacattctagtatatcataat

SEQ ID NO: 49188 - DNA, 25 bp, Artificial
  probe
  misc_feature (1)..(25): SEQ ID NO: 4357; WAN024ABH_at; Start 4; Stop 28
tcttgcttcacgtccatttctaaat

SEQ ID NO: 49189 - DNA, 25 bp, Artificial
  probe
  misc_feature (1)..(25): SEQ ID NO: 4357; WAN024ABH_at; Start 25; Stop 49
aaatttttgctacattctagtatat

SEQ ID NO: 49190 - DNA, 25 bp, Artificial
  probe
  misc_feature (1)..(25): SEQ ID NO: 4357; WAN024ABH_at; Start 43; Stop 67
agtatatcataattttcttaagctt

SEQ ID NO: 49191 - DNA, 25 bp, Artificial
  probe
  misc_feature (1)..(25): SEQ ID NO: 4357; WAN024ABH_at; Start 28; Stop 52
tttttgctacattctagtatatcat

SEQ ID NO: 49192 - DNA, 25 bp, Artificial
  probe
  misc_feature (1)..(25): SEQ ID NO: 4357; WAN024ABH_at; Start 14; Stop 38
cgtccatttctaaatttttgctaca

SEQ ID NO: 49193 - DNA, 25 bp, Artificial
  probe
  misc_feature (1)..(25): SEQ ID NO: 4357; WAN024ABH_at; Start 11; Stop 35
tcacgtccatttctaaatttttgct

SEQ ID NO: 49194 - DNA, 25 bp, Artificial
  probe
  misc_feature (1)..(25): SEQ ID NO: 3179; WAN024ABI_at; Start 25; Stop 49
aattatgatatactagaatgtagca

SEQ ID NO: 49195 - DNA, 25 bp, Artificial
  probe
  misc_feature (1)..(25): SEQ ID NO: 3179; WAN024ABI_at; Start 51; Stop 75
aaatttagaaatggacgtgaagcaa

SEQ ID NO: 49196 - DNA, 25 bp, Artificial
  probe
  misc_feature (1)..(25): SEQ ID NO: 3179; WAN024ABI_at; Start 30; Stop 54
tgatatactagaatgtagcaaaaat

SEQ ID NO: 49197 - DNA, 25 bp, Artificial
  probe
  misc_feature (1)..(25): SEQ ID NO: 3179; WAN024ABI_at; Start 24; Stop 48
aaattatgatatactagaatgtagc

SEQ ID NO: 49198 - DNA, 25 bp, Artificial
  probe
  misc_feature (1)..(25): SEQ ID NO: 3179; WAN024ABI_at; Start 28; Stop 52
tatgatatactagaatgtagcaaaa

SEQ ID NO: 49199 - DNA, 25 bp, Artificial
  probe
  misc_feature (1)..(25): SEQ ID NO: 3179; WAN024ABI_at; Start 52; Stop 76
aatttagaaatggacgtgaagcaag

SEQ ID NO: 49200 - DNA, 25 bp, Artificial
  probe
  misc_feature (1)..(25): SEQ ID NO: 3179; WAN024ABI_at; Start 15; Stop 39
agcttaagaaaattatgatatacta

SEQ ID NO: 49201 - DNA, 25 bp, Artificial
  probe
  misc_feature (1)..(25): SEQ ID NO: 3179; WAN024ABI_at; Start 37; Stop 61
ctagaatgtagcaaaaatttagaaa

SEQ ID NO: 49202 - DNA, 25 bp, Artificial
  probe
  misc_feature (1)..(25): SEQ ID NO: 3179; WAN024ABI_at; Start 34; Stop 58
atactagaatgtagcaaaaatttag

SEQ ID NO: 49203 - DNA, 25 bp, Artificial
  probe
  misc_feature (1)..(25): SEQ ID NO: 3179; WAN024ABI_at; Start 43; Stop 67
tgtagcaaaaatttagaaatggacg

SEQ ID NO: 49204 - DNA, 25 bp, Artificial
  probe
  misc_feature (1)..(25): SEQ ID NO: 3179; WAN024ABI_at; Start 33; Stop 57
tatactagaatgtagcaaaaattta

SEQ ID NO: 49205 - DNA, 25 bp, Artificial
  probe
  misc_feature (1)..(25): SEQ ID NO: 3179; WAN024ABI_at; Start 13; Stop 37
aaagcttaagaaaattatgatatac

SEQ ID NO: 49206 - DNA, 25 bp, Artificial
  probe
  misc_feature (1)..(25): SEQ ID NO: 3179; WAN024ABI_at; Start 41; Stop 65
aatgtagcaaaaatttagaaatgga

SEQ ID NO: 49207 - DNA, 25 bp, Artificial
  probe
  misc_feature (1)..(25): SEQ ID NO: 3179; WAN024ABI_at; Start 48; Stop 72
caaaaatttagaaatggacgtgaag

SEQ ID NO: 49208 - DNA, 25 bp, Artificial
  probe
  misc_feature (1)..(25): SEQ ID NO: 3179; WAN024ABI_at; Start 42; Stop 66
atgtagcaaaaatttagaaatggac

SEQ ID NO: 49209 - DNA, 25 bp, Artificial
  probe
  misc_feature (1)..(25): SEQ ID NO: 3179; WAN024ABI_at; Start 31; Stop 55
gatatactagaatgtagcaaaaatt

SEQ ID NO: 49210 - DNA, 25 bp, Artificial
  probe
  misc_feature (1)..(25): SEQ ID NO: 3179; WAN024ABI_at; Start 53; Stop 77
atttagaaatggacgtgaagcaaga

SEQ ID NO: 49211 - DNA, 25 bp, Artificial
  probe
  misc_feature (1)..(25): SEQ ID NO: 3179; WAN024ABI_at; Start 26; Stop 50
attatgatatactagaatgtagcaa

SEQ ID NO: 49212 - DNA, 25 bp, Artificial
  probe
  misc_feature (1)..(25): SEQ ID NO: 3179; WAN024ABI_at; Start 50; Stop 74
aaaatttagaaatggacgtgaagca

SEQ ID NO: 49213 - DNA, 25 bp, Artificial
  probe
  misc_feature (1)..(25): SEQ ID NO: 3179; WAN024ABI_at; Start 40; Stop 64
gaatgtagcaaaaatttagaaatgg

SEQ ID NO: 49214 - DNA, 25 bp, Artificial
  probe
  misc_feature (1)..(25): SEQ ID NO: 3179; WAN024ABI_at; Start 14; Stop 38
aagcttaagaaaattatgatatact

SEQ ID NO: 49215 - DNA, 25 bp, Artificial
  probe
  misc_feature (1)..(25): SEQ ID NO: 3179; WAN024ABI_at; Start 56; Stop 80
tagaaatggacgtgaagcaagaaac

SEQ ID NO: 49216 - DNA, 25 bp, Artificial
  probe
  misc_feature (1)..(25): SEQ ID NO: 3179; WAN024ABI_at; Start 35; Stop 59
tactagaatgtagcaaaaatttaga

SEQ ID NO: 49217 - DNA, 25 bp, Artificial
  probe
  misc_feature (1)..(25): SEQ ID NO: 3179; WAN024ABI_at; Start 27; Stop 51
ttatgatatactagaatgtagcaaa

SEQ ID NO: 49218 - DNA, 25 bp, Artificial
  probe
  misc_feature (1)..(25): SEQ ID NO: 3179; WAN024ABI_at; Start 47; Stop 71
gcaaaaatttagaaatggacgtgaa

SEQ ID NO: 49219 - DNA, 25 bp, Artificial
  probe
  misc_feature (1)..(25): SEQ ID NO: 3179; WAN024ABI_at; Start 36; Stop 60
actagaatgtagcaaaaatttagaa

SEQ ID NO: 49220 - DNA, 25 bp, Artificial
  probe
  misc_feature (1)..(25): SEQ ID NO: 3179; WAN024ABI_at; Start 10; Stop 34
tttaaagcttaagaaaattatgata

SEQ ID NO: 49221 - DNA, 25 bp, Artificial
  probe
  misc_feature (1)..(25): SEQ ID NO: 3179; WAN024ABI_at; Start 46; Stop 70
agcaaaaatttagaaatggacgtga

SEQ ID NO: 49222 - DNA, 25 bp, Artificial
  probe
  misc_feature (1)..(25): SEQ ID NO: 3179; WAN024ABI_at; Start 55; Stop 79
ttagaaatggacgtgaagcaagaaa

SEQ ID NO: 49223 - DNA, 25 bp, Artificial
  probe
  misc_feature (1)..(25): SEQ ID NO: 3179; WAN024ABI_at; Start 54; Stop 78
tttagaaatggacgtgaagcaagaa

SEQ ID NO: 49224 - DNA, 25 bp, Artificial
  probe
  misc_feature (1)..(25): SEQ ID NO: 3179; WAN024ABI_at; Start 22; Stop 46
gaaaattatgatatactagaatgta

SEQ ID NO: 49225 - DNA, 25 bp, Artificial
  probe
  misc_feature (1)..(25): SEQ ID NO: 3179; WAN024ABI_at; Start 29; Stop 53
atgatatactagaatgtagcaaaaa

SEQ ID NO: 49226 - DNA, 25 bp, Artificial
  probe
  misc_feature (1)..(25): SEQ ID NO: 3179; WAN024ABI_at; Start 38; Stop 62
tagaatgtagcaaaaatttagaaat

SEQ ID NO: 49227 - DNA, 25 bp, Artificial
  probe
  misc_feature (1)..(25): SEQ ID NO: 3179; WAN024ABI_at; Start 45; Stop 69
tagcaaaaatttagaaatggacgtg

SEQ ID NO: 49228 - DNA, 25 bp, Artificial
  probe
  misc_feature (1)..(25): SEQ ID NO: 3523; WAN024ABJ_at; Start 4; Stop 28
aacacctctctatttcaaagaagga

SEQ ID NO: 49229 - DNA, 25 bp, Artificial
  probe
  misc_feature (1)..(25): SEQ ID NO: 3523; WAN024ABJ_at; Start 24; Stop 48
aaggagttcatctgaactcctaaac

SEQ ID NO: 49230 - DNA, 25 bp, Artificial
  probe
  misc_feature (1)..(25): SEQ ID NO: 3523; WAN024ABJ_at; Start 23; Stop 47
gaaggagttcatctgaactcctaaa

SEQ ID NO: 49231 - DNA, 25 bp, Artificial
  probe
  misc_feature (1)..(25): SEQ ID NO: 3523; WAN024ABJ_at; Start 18; Stop 42
tcaaagaaggagttcatctgaactc

SEQ ID NO: 49232 - DNA, 25 bp, Artificial
  probe
  misc_feature (1)..(25): SEQ ID NO: 3523; WAN024ABJ_at; Start 3; Stop 27
aaacacctctctatttcaaagaagg

SEQ ID NO: 49233 - DNA, 25 bp, Artificial
  probe
  misc_feature (1)..(25): SEQ ID NO: 3523; WAN024ABJ_at; Start 19; Stop 43
caaagaaggagttcatctgaactcc

SEQ ID NO: 49234 - DNA, 25 bp, Artificial
  probe
  misc_feature (1)..(25): SEQ ID NO: 3523; WAN024ABJ_at; Start 22; Stop 46
agaaggagttcatctgaactcctaa

SEQ ID NO: 49235 - DNA, 25 bp, Artificial
  probe
  misc_feature (1)..(25): SEQ ID NO: 3523; WAN024ABJ_at; Start 26; Stop 50
ggagttcatctgaactcctaaacga

SEQ ID NO: 49236 - DNA, 25 bp, Artificial
  probe
  misc_feature (1)..(25): SEQ ID NO: 3523; WAN024ABJ_at; Start 28; Stop 52
agttcatctgaactcctaaacgata

SEQ ID NO: 49237 - DNA, 25 bp, Artificial
  probe
  misc_feature (1)..(25): SEQ ID NO: 3523; WAN024ABJ_at; Start 30; Stop 54
ttcatctgaactcctaaacgatatg

SEQ ID NO: 49238 - DNA, 25 bp, Artificial
  probe
  misc_feature (1)..(25): SEQ ID NO: 3523; WAN024ABJ_at; Start 25; Stop 49
aggagttcatctgaactcctaaacg

SEQ ID NO: 49239 - DNA, 25 bp, Artificial
  probe
  misc_feature (1)..(25): SEQ ID NO: 3523; WAN024ABJ_at; Start 31; Stop 55
tcatctgaactcctaaacgatatga

SEQ ID NO: 49240 - DNA, 25 bp, Artificial
  probe
  misc_feature (1)..(25): SEQ ID NO: 3523; WAN024ABJ_at; Start 16; Stop 40
tttcaaagaaggagttcatctgaac

SEQ ID NO: 49241 - DNA, 25 bp, Artificial
  probe
  misc_feature (1)..(25): SEQ ID NO: 3523; WAN024ABJ_at; Start 2; Stop 26
aaaacacctctctatttcaaagaag

SEQ ID NO: 49242 - DNA, 25 bp, Artificial
  probe
  misc_feature (1)..(25): SEQ ID NO: 3523; WAN024ABJ_at; Start 17; Stop 41
ttcaaagaaggagttcatctgaact

SEQ ID NO: 49243 - DNA, 25 bp, Artificial
  probe
  misc_feature (1)..(25): SEQ ID NO: 3523; WAN024ABJ_at; Start 27; Stop 51
gagttcatctgaactcctaaacgat

SEQ ID NO: 49244 - DNA, 25 bp, Artificial
  probe
  misc_feature (1)..(25): SEQ ID NO: 3523; WAN024ABJ_at; Start 1; Stop 25
gaaaacacctctctatttcaaagaa

SEQ ID NO: 49245 - DNA, 25 bp, Artificial
  probe
  misc_feature (1)..(25): SEQ ID NO: 3523; WAN024ABJ_at; Start 5; Stop 29
acacctctctatttcaaagaaggag

SEQ ID NO: 49246 - DNA, 25 bp, Artificial
  probe
  misc_feature (1)..(25): SEQ ID NO: 3523; WAN024ABJ_at; Start 21; Stop 45
aagaaggagttcatctgaactccta

SEQ ID NO: 49247 - DNA, 25 bp, Artificial
  probe
  misc_feature (1)..(25): SEQ ID NO: 3523; WAN024ABJ_at; Start 20; Stop 44
aaagaaggagttcatctgaactcct

SEQ ID NO: 49248 - DNA, 25 bp, Artificial
  probe
  misc_feature (1)..(25): SEQ ID NO: 3523; WAN024ABJ_at; Start 29; Stop 53
gttcatctgaactcctaaacgatat

SEQ ID NO: 49249 - DNA, 25 bp, Artificial
  probe
  misc_feature (1)..(25): SEQ ID NO: 4601; WAN024ABK_at; Start 8; Stop 32
gtttaggagttcagatgaactcctt

SEQ ID NO: 49250 - DNA, 25 bp, Artificial
  probe
  misc_feature (1)..(25): SEQ ID NO: 4601; WAN024ABK_at; Start 13; Stop 37
ggagttcagatgaactccttctttg

SEQ ID NO: 49251 - DNA, 25 bp, Artificial
  probe
  misc_feature (1)..(25): SEQ ID NO: 4601; WAN024ABK_at; Start 19; Stop 43
cagatgaactccttctttgaaatag

SEQ ID NO: 49252 - DNA, 25 bp, Artificial
  probe
  misc_feature (1)..(25): SEQ ID NO: 4601; WAN024ABK_at; Start 23; Stop 47
tgaactccttctttgaaatagagag

SEQ ID NO: 49253 - DNA, 25 bp, Artificial
  probe
  misc_feature (1)..(25): SEQ ID NO: 4601; WAN024ABK_at; Start 1; Stop 25
tcatatcgtttaggagttcagatga

SEQ ID NO: 49254 - DNA, 25 bp, Artificial
  probe
  misc_feature (1)..(25): SEQ ID NO: 4601; WAN024ABK_at; Start 7; Stop 31
cgtttaggagttcagatgaactcct

SEQ ID NO: 49255 - DNA, 25 bp, Artificial
  probe
  misc_feature (1)..(25): SEQ ID NO: 4601; WAN024ABK_at; Start 28; Stop 52
tccttctttgaaatagagaggtgtt

SEQ ID NO: 49256 - DNA, 25 bp, Artificial
  probe
  misc_feature (1)..(25): SEQ ID NO: 4601; WAN024ABK_at; Start 14; Stop 38
gagttcagatgaactccttctttga

SEQ ID NO: 49257 - DNA, 25 bp, Artificial
  probe
  misc_feature (1)..(25): SEQ ID NO: 4601; WAN024ABK_at; Start 20; Stop 44
agatgaactccttctttgaaataga

SEQ ID NO: 49258 - DNA, 25 bp, Artificial
  probe
  misc_feature (1)..(25): SEQ ID NO: 4601; WAN024ABK_at; Start 4; Stop 28
tatcgtttaggagttcagatgaact

SEQ ID NO: 49259 - DNA, 25 bp, Artificial
  probe
  misc_feature (1)..(25): SEQ ID NO: 4601; WAN024ABK_at; Start 25; Stop 49
aactccttctttgaaatagagaggt

SEQ ID NO: 49260 - DNA, 25 bp, Artificial
  probe
  misc_feature (1)..(25): SEQ ID NO: 4601; WAN024ABK_at; Start 24; Stop 48
gaactccttctttgaaatagagagg

SEQ ID NO: 49261 - DNA, 25 bp, Artificial
  probe
  misc_feature (1)..(25): SEQ ID NO: 4601; WAN024ABK_at; Start 5; Stop 29
atcgtttaggagttcagatgaactc

SEQ ID NO: 49262 - DNA, 25 bp, Artificial
  probe
  misc_feature (1)..(25): SEQ ID NO: 4601; WAN024ABK_at; Start 30; Stop 54
cttctttgaaatagagaggtgtttt

SEQ ID NO: 49263 - DNA, 25 bp, Artificial
  probe
  misc_feature (1)..(25): SEQ ID NO: 4601; WAN024ABK_at; Start 17; Stop 41
ttcagatgaactccttctttgaaat

SEQ ID NO: 49264 - DNA, 25 bp, Artificial
  probe
  misc_feature (1)..(25): SEQ ID NO: 4601; WAN024ABK_at; Start 6; Stop 30
tcgtttaggagttcagatgaactcc

SEQ ID NO: 49265 - DNA, 25 bp, Artificial
  probe
  misc_feature (1)..(25): SEQ ID NO: 4601; WAN024ABK_at; Start 27; Stop 51
ctccttctttgaaatagagaggtgt

SEQ ID NO: 49266 - DNA, 25 bp, Artificial
  probe
  misc_feature (1)..(25): SEQ ID NO: 4601; WAN024ABK_at; Start 15; Stop 39
agttcagatgaactccttctttgaa

SEQ ID NO: 49267 - DNA, 25 bp, Artificial
  probe
  misc_feature (1)..(25): SEQ ID NO: 4601; WAN024ABK_at; Start 16; Stop 40
gttcagatgaactccttctttgaaa

SEQ ID NO: 49268 - DNA, 25 bp, Artificial
  probe
  misc_feature (1)..(25): SEQ ID NO: 4601; WAN024ABK_at; Start 12; Stop 36
aggagttcagatgaactccttcttt

SEQ ID NO: 49269 - DNA, 25 bp, Artificial
  probe
  misc_feature (1)..(25): SEQ ID NO: 4601; WAN024ABK_at; Start 3; Stop 27
atatcgtttaggagttcagatgaac

SEQ ID NO: 49270 - DNA, 25 bp, Artificial
  probe
  misc_feature (1)..(25): SEQ ID NO: 4601; WAN024ABK_at; Start 31; Stop 55
ttctttgaaatagagaggtgttttc

SEQ ID NO: 49271 - DNA, 25 bp, Artificial
  probe
  misc_feature (1)..(25): SEQ ID NO: 4601; WAN024ABK_at; Start 21; Stop 45
gatgaactccttctttgaaatagag

SEQ ID NO: 49272 - DNA, 25 bp, Artificial
  probe
  misc_feature (1)..(25): SEQ ID NO: 4601; WAN024ABK_at; Start 10; Stop 34
ttaggagttcagatgaactccttct

SEQ ID NO: 49273 - DNA, 25 bp, Artificial
  probe
  misc_feature (1)..(25): SEQ ID NO: 4601; WAN024ABK_at; Start 18; Stop 42
tcagatgaactccttctttgaaata

SEQ ID NO: 49274 - DNA, 25 bp, Artificial
  probe
  misc_feature (1)..(25): SEQ ID NO: 4601; WAN024ABK_at; Start 9; Stop 33
tttaggagttcagatgaactccttc

SEQ ID NO: 49275 - DNA, 25 bp, Artificial
  probe
  misc_feature (1)..(25): SEQ ID NO: 4601; WAN024ABK_at; Start 22; Stop 46
atgaactccttctttgaaatagaga

SEQ ID NO: 49276 - DNA, 25 bp, Artificial
  probe
  misc_feature (1)..(25): SEQ ID NO: 4601; WAN024ABK_at; Start 11; Stop 35
taggagttcagatgaactccttctt

SEQ ID NO: 49277 - DNA, 25 bp, Artificial
  probe
  misc_feature (1)..(25): SEQ ID NO: 4601; WAN024ABK_at; Start 29; Stop 53
ccttctttgaaatagagaggtgttt

SEQ ID NO: 49278 - DNA, 25 bp, Artificial
  probe
  misc_feature (1)..(25): SEQ ID NO: 4601; WAN024ABK_at; Start 2; Stop 26
catatcgtttaggagttcagatgaa

SEQ ID NO: 49279 - DNA, 25 bp, Artificial
  probe
  misc_feature (1)..(25): SEQ ID NO: 4601; WAN024ABK_at; Start 26; Stop 50
actccttctttgaaatagagaggtg

SEQ ID NO: 49280 - DNA, 25 bp, Artificial
  probe
  misc_feature (1)..(25): SEQ ID NO: 143; WAN024ABL_at; Start 153; Stop 177
ggttcacacaactcatcaaggtccg

SEQ ID NO: 49281 - DNA, 25 bp, Artificial
  probe
  misc_feature (1)..(25): SEQ ID NO: 143; WAN024ABL_at; Start 170; Stop 194
aaggtccgctcctgcgttatgacct

SEQ ID NO: 49282 - DNA, 25 bp, Artificial
  probe
  misc_feature (1)..(25): SEQ ID NO: 143; WAN024ABL_at; Start 219; Stop 243
gactacctatcgactcatcgcatat

SEQ ID NO: 49283 - DNA, 25 bp, Artificial
  probe
  misc_feature (1)..(25): SEQ ID NO: 143; WAN024ABL_at; Start 150; Stop 174
gcaggttcacacaactcatcaaggt

SEQ ID NO: 49284 - DNA, 25 bp, Artificial
  probe
  misc_feature (1)..(25): SEQ ID NO: 143; WAN024ABL_at; Start 105; Stop 129
tcccagtcgctagactagggactaa

SEQ ID NO: 49285 - DNA, 25 bp, Artificial
  probe
  misc_feature (1)..(25): SEQ ID NO: 143; WAN024ABL_at; Start 201; Stop 225
gctcaatagtagtccgaagactacc

SEQ ID NO: 49286 - DNA, 25 bp, Artificial
  probe
  misc_feature (1)..(25): SEQ ID NO: 143; WAN024ABL_at; Start 113; Stop 137
gctagactagggactaagaggcatc

SEQ ID NO: 49287 - DNA, 25 bp, Artificial
  probe
  misc_feature (1)..(25): SEQ ID NO: 143; WAN024ABL_at; Start 94; Stop 118
gaaaataaaaatcccagtcgctaga

SEQ ID NO: 49288 - DNA, 25 bp, Artificial
  probe
  misc_feature (1)..(25): SEQ ID NO: 143; WAN024ABL_at; Start 133; Stop 157
gcatcttcatgtgatgagcaggttc

SEQ ID NO: 49289 - DNA, 25 bp, Artificial
  probe
  misc_feature (1)..(25): SEQ ID NO: 143; WAN024ABL_at; Start 166; Stop 190
catcaaggtccgctcctgcgttatg

SEQ ID NO: 49290 - DNA, 25 bp, Artificial
  probe
  misc_feature (1)..(25): SEQ ID NO: 143; WAN024ABL_at; Start 102; Stop 126
aaatcccagtcgctagactagggac

SEQ ID NO: 49291 - DNA, 25 bp, Artificial
  probe
  misc_feature (1)..(25): SEQ ID NO: 143; WAN024ABL_at; Start 144; Stop 168
tgatgagcaggttcacacaactcat

SEQ ID NO: 49292 - DNA, 25 bp, Artificial
  probe
  misc_feature (1)..(25): SEQ ID NO: 143; WAN024ABL_at; Start 127; Stop 151
taagaggcatcttcatgtgatgagc

SEQ ID NO: 49293 - DNA, 25 bp, Artificial
  probe
  misc_feature (1)..(25): SEQ ID NO: 143; WAN024ABL_at; Start 207; Stop 231
tagtagtccgaagactacctatcga

SEQ ID NO: 49294 - DNA, 25 bp, Artificial
  probe
  misc_feature (1)..(25): SEQ ID NO: 143; WAN024ABL_at; Start 155; Stop 179
ttcacacaactcatcaaggtccgct

SEQ ID NO: 49295 - DNA, 25 bp, Artificial
  probe
  misc_feature (1)..(25): SEQ ID NO: 143; WAN024ABL_at; Start 120; Stop 144
tagggactaagaggcatcttcatgt

SEQ ID NO: 49296 - DNA, 25 bp, Artificial
  probe
  misc_feature (1)..(25): SEQ ID NO: 143; WAN024ABL_at; Start 314; Stop 338
cgtattcaagagtttccctatacat

SEQ ID NO: 49297 - DNA, 25 bp, Artificial
  probe
  misc_feature (1)..(25): SEQ ID NO: 143; WAN024ABL_at; Start 228; Stop 252
tcgactcatcgcatattctatatta

SEQ ID NO: 49298 - DNA, 25 bp, Artificial
  probe
  misc_feature (1)..(25): SEQ ID NO: 143; WAN024ABL_at; Start 168; Stop 192
tcaaggtccgctcctgcgttatgac

SEQ ID NO: 49299 - DNA, 25 bp, Artificial
  probe
  misc_feature (1)..(25): SEQ ID NO: 143; WAN024ABL_at; Start 48; Stop 72
tatactactttttccatgaattgca

SEQ ID NO: 49300 - DNA, 25 bp, Artificial
  probe
  misc_feature (1)..(25): SEQ ID NO: 143; WAN024ABL_at; Start 52; Stop 76
ctactttttccatgaattgcaaagc

SEQ ID NO: 49301 - DNA, 25 bp, Artificial
  probe
  misc_feature (1)..(25): SEQ ID NO: 143; WAN024ABL_at; Start 216; Stop 240
gaagactacctatcgactcatcgca

SEQ ID NO: 49302 - DNA, 25 bp, Artificial
  probe
  misc_feature (1)..(25): SEQ ID NO: 143; WAN024ABL_at; Start 317; Stop 341
attcaagagtttccctatacatatc

SEQ ID NO: 49303 - DNA, 25 bp, Artificial
  probe
  misc_feature (1)..(25): SEQ ID NO: 143; WAN024ABL_at; Start 115; Stop 139
tagactagggactaagaggcatctt

SEQ ID NO: 49304 - DNA, 25 bp, Artificial
  probe
  misc_feature (1)..(25): SEQ ID NO: 143; WAN024ABL_at; Start 162; Stop 186
aactcatcaaggtccgctcctgcgt

SEQ ID NO: 49305 - DNA, 25 bp, Artificial
  probe
  misc_feature (1)..(25): SEQ ID NO: 143; WAN024ABL_at; Start 199; Stop 223
atgctcaatagtagtccgaagacta

SEQ ID NO: 49306 - DNA, 25 bp, Artificial
  probe
  misc_feature (1)..(25): SEQ ID NO: 143; WAN024ABL_at; Start 99; Stop 123
taaaaatcccagtcgctagactagg

SEQ ID NO: 49307 - DNA, 25 bp, Artificial
  probe
  misc_feature (1)..(25): SEQ ID NO: 143; WAN024ABL_at; Start 59; Stop 83
ttccatgaattgcaaagctttttca

SEQ ID NO: 49308 - DNA, 25 bp, Artificial
  probe
  misc_feature (1)..(25): SEQ ID NO: 143; WAN024ABL_at; Start 250; Stop 274
ttactagagatacttgattttgtca

SEQ ID NO: 49309 - DNA, 25 bp, Artificial
  probe
  misc_feature (1)..(25): SEQ ID NO: 143; WAN024ABL_at; Start 117; Stop 141
gactagggactaagaggcatcttca

SEQ ID NO: 49310 - DNA, 25 bp, Artificial
  probe
  misc_feature (1)..(25): SEQ ID NO: 143; WAN024ABL_at; Start 130; Stop 154
gaggcatcttcatgtgatgagcagg

SEQ ID NO: 49311 - DNA, 25 bp, Artificial
  probe
  misc_feature (1)..(25): SEQ ID NO: 143; WAN024ABL_at; Start 70; Stop 94
gcaaagctttttcatcattttttgg

SEQ ID NO: 49312 - DNA, 25 bp, Artificial
  probe
  misc_feature (1)..(25): SEQ ID NO: 143; WAN024ABL_at; Start 234; Stop 258
catcgcatattctatattactagag

SEQ ID NO: 49313 - DNA, 25 bp, Artificial
  probe
  misc_feature (1)..(25): SEQ ID NO: 143; WAN024ABL_at; Start 110; Stop 134
gtcgctagactagggactaagaggc

SEQ ID NO: 49314 - DNA, 25 bp, Artificial
  probe
  misc_feature (1)..(25): SEQ ID NO: 4694; WAN024ABM_at; Start 249; Stop 273
ccaaaaaatgatgaaaaagctttgc

SEQ ID NO: 49315 - DNA, 25 bp, Artificial
  probe
  misc_feature (1)..(25): SEQ ID NO: 4694; WAN024ABM_at; Start 96; Stop 120
tagaatatgcgatgagtcgataggt

SEQ ID NO: 49316 - DNA, 25 bp, Artificial
  probe
  misc_feature (1)..(25): SEQ ID NO: 4694; WAN024ABM_at; Start 215; Stop 239
tagtccctagtctagcgactgggat

SEQ ID NO: 49317 - DNA, 25 bp, Artificial
  probe
  misc_feature (1)..(25): SEQ ID NO: 4694; WAN024ABM_at; Start 91; Stop 115
taatatagaatatgcgatgagtcga

SEQ ID NO: 49318 - DNA, 25 bp, Artificial
  probe
  misc_feature (1)..(25): SEQ ID NO: 4694; WAN024ABM_at; Start 106; Stop 130
gatgagtcgataggtagtcttcgga

SEQ ID NO: 49319 - DNA, 25 bp, Artificial
  probe
  misc_feature (1)..(25): SEQ ID NO: 4694; WAN024ABM_at; Start 220; Stop 244
cctagtctagcgactgggattttta

SEQ ID NO: 49320 - DNA, 25 bp, Artificial
  probe
  misc_feature (1)..(25): SEQ ID NO: 4694; WAN024ABM_at; Start 166; Stop 190
cggaccttgatgagttgtgtgaacc

SEQ ID NO: 49321 - DNA, 25 bp, Artificial
  probe
  misc_feature (1)..(25): SEQ ID NO: 4694; WAN024ABM_at; Start 156; Stop 180
aacgcaggagcggaccttgatgagt

SEQ ID NO: 49322 - DNA, 25 bp, Artificial
  probe
  misc_feature (1)..(25): SEQ ID NO: 4694; WAN024ABM_at; Start 170; Stop 194
ccttgatgagttgtgtgaacctgct

SEQ ID NO: 49323 - DNA, 25 bp, Artificial
  probe
  misc_feature (1)..(25): SEQ ID NO: 4694; WAN024ABM_at; Start 261; Stop 285
gaaaaagctttgcaattcatggaaa

SEQ ID NO: 49324 - DNA, 25 bp, Artificial
  probe
  misc_feature (1)..(25): SEQ ID NO: 4694; WAN024ABM_at; Start 109; Stop 133
gagtcgataggtagtcttcggacta

SEQ ID NO: 49325 - DNA, 25 bp, Artificial
  probe
  misc_feature (1)..(25): SEQ ID NO: 4694; WAN024ABM_at; Start 103; Stop 127
tgcgatgagtcgataggtagtcttc

SEQ ID NO: 49326 - DNA, 25 bp, Artificial
  probe
  misc_feature (1)..(25): SEQ ID NO: 4694; WAN024ABM_at; Start 175; Stop 199
atgagttgtgtgaacctgctcatca

SEQ ID NO: 49327 - DNA, 25 bp, Artificial
  probe
  misc_feature (1)..(25): SEQ ID NO: 4694; WAN024ABM_at; Start 194; Stop 218
tcatcacatgaagatgcctcttagt

SEQ ID NO: 49328 - DNA, 25 bp, Artificial
  probe
  misc_feature (1)..(25): SEQ ID NO: 4694; WAN024ABM_at; Start 278; Stop 302
catggaaaaagtagtataatacttc

SEQ ID NO: 49329 - DNA, 25 bp, Artificial
  probe
  misc_feature (1)..(25): SEQ ID NO: 4694; WAN024ABM_at; Start 227; Stop 251
tagcgactgggatttttattttcca

SEQ ID NO: 49330 - DNA, 25 bp, Artificial
  probe
  misc_feature (1)..(25): SEQ ID NO: 4694; WAN024ABM_at; Start 203; Stop 227
gaagatgcctcttagtccctagtct

SEQ ID NO: 49331 - DNA, 25 bp, Artificial
  probe
  misc_feature (1)..(25): SEQ ID NO: 4694; WAN024ABM_at; Start 120; Stop 144
tagtcttcggactactattgagcat

SEQ ID NO: 49332 - DNA, 25 bp, Artificial
  probe
  misc_feature (1)..(25): SEQ ID NO: 4694; WAN024ABM_at; Start 150; Stop 174
ggtcataacgcaggagcggaccttg

SEQ ID NO: 49333 - DNA, 25 bp, Artificial
  probe
  misc_feature (1)..(25): SEQ ID NO: 4694; WAN024ABM_at; Start 209; Stop 233
gcctcttagtccctagtctagcgac

SEQ ID NO: 49334 - DNA, 25 bp, Artificial
  probe
  misc_feature (1)..(25): SEQ ID NO: 4694; WAN024ABM_at; Start 267; Stop 291
gctttgcaattcatggaaaaagtag

SEQ ID NO: 49335 - DNA, 25 bp, Artificial
  probe
  misc_feature (1)..(25): SEQ ID NO: 4694; WAN024ABM_at; Start 186; Stop 210
gaacctgctcatcacatgaagatgc

SEQ ID NO: 49336 - DNA, 25 bp, Artificial
  probe
  misc_feature (1)..(25): SEQ ID NO: 4694; WAN024ABM_at; Start 212; Stop 236
tcttagtccctagtctagcgactgg

SEQ ID NO: 49337 - DNA, 25 bp, Artificial
  probe
  misc_feature (1)..(25): SEQ ID NO: 4694; WAN024ABM_at; Start 191; Stop 215
tgctcatcacatgaagatgcctctt

SEQ ID NO: 49338 - DNA, 25 bp, Artificial
  probe
  misc_feature (1)..(25): SEQ ID NO: 4694; WAN024ABM_at; Start 200; Stop 224
catgaagatgcctcttagtccctag

SEQ ID NO: 49339 - DNA, 25 bp, Artificial
  probe
  misc_feature (1)..(25): SEQ ID NO: 4694; WAN024ABM_at; Start 2; Stop 26
gatatgtatagggaaactcttgaat

SEQ ID NO: 49340 - DNA, 25 bp, Artificial
  probe
  misc_feature (1)..(25): SEQ ID NO: 4694; WAN024ABM_at; Start 152; Stop 176
tcataacgcaggagcggaccttgat

SEQ ID NO: 49341 - DNA, 25 bp, Artificial
  probe
  misc_feature (1)..(25): SEQ ID NO: 4694; WAN024ABM_at; Start 5; Stop 29
atgtatagggaaactcttgaatacg

SEQ ID NO: 49342 - DNA, 25 bp, Artificial
  probe
  misc_feature (1)..(25): SEQ ID NO: 4694; WAN024ABM_at; Start 63; Stop 87
tcttattgacaaaatcaagtatctc

SEQ ID NO: 49343 - DNA, 25 bp, Artificial
  probe
  misc_feature (1)..(25): SEQ ID NO: 4694; WAN024ABM_at; Start 82; Stop 106
tatctctagtaatatagaatatgcg

SEQ ID NO: 49344 - DNA, 25 bp, Artificial
  probe
  misc_feature (1)..(25): SEQ ID NO: 4694; WAN024ABM_at; Start 271; Stop 295
tgcaattcatggaaaaagtagtata

SEQ ID NO: 49345 - DNA, 25 bp, Artificial
  probe
  misc_feature (1)..(25): SEQ ID NO: 4694; WAN024ABM_at; Start 70; Stop 94
gacaaaatcaagtatctctagtaat

SEQ ID NO: 49346 - DNA, 25 bp, Artificial
  probe
  misc_feature (1)..(25): SEQ ID NO: 4694; WAN024ABM_at; Start 112; Stop 136
tcgataggtagtcttcggactacta

SEQ ID NO: 49347 - DNA, 25 bp, Artificial
  probe
  misc_feature (1)..(25): SEQ ID NO: 4694; WAN024ABM_at; Start 206; Stop 230
gatgcctcttagtccctagtctagc

SEQ ID NO: 49348 - DNA, 25 bp, Artificial
  probe
  misc_feature (1)..(25): SEQ ID NO: 4777; WAN024ABN_at; Start 13; Stop 37
tatactatattcagaaaaacttgtc

SEQ ID NO: 49349 - DNA, 25 bp, Artificial
  probe
  misc_feature (1)..(25): SEQ ID NO: 4777; WAN024ABN_at; Start 18; Stop 42
tatattcagaaaaacttgtcaagtt

SEQ ID NO: 49350 - DNA, 25 bp, Artificial
  probe
  misc_feature (1)..(25): SEQ ID NO: 4777; WAN024ABN_at; Start 7; Stop 31
aagaagtatactatattcagaaaaa

SEQ ID NO: 49351 - DNA, 25 bp, Artificial
  probe
  misc_feature (1)..(25): SEQ ID NO: 4777; WAN024ABN_at; Start 10; Stop 34
aagtatactatattcagaaaaactt

SEQ ID NO: 49352 - DNA, 25 bp, Artificial
  probe
  misc_feature (1)..(25): SEQ ID NO: 4777; WAN024ABN_at; Start 6; Stop 30
taagaagtatactatattcagaaaa

SEQ ID NO: 49353 - DNA, 25 bp, Artificial
  probe
  misc_feature (1)..(25): SEQ ID NO: 4777; WAN024ABN_at; Start 9; Stop 33
gaagtatactatattcagaaaaact

SEQ ID NO: 49354 - DNA, 25 bp, Artificial
  probe
  misc_feature (1)..(25): SEQ ID NO: 4777; WAN024ABN_at; Start 20; Stop 44
tattcagaaaaacttgtcaagtttc

SEQ ID NO: 49355 - DNA, 25 bp, Artificial
  probe
  misc_feature (1)..(25): SEQ ID NO: 4777; WAN024ABN_at; Start 14; Stop 38
atactatattcagaaaaacttgtca

SEQ ID NO: 49356 - DNA, 25 bp, Artificial
  probe
  misc_feature (1)..(25): SEQ ID NO: 4777; WAN024ABN_at; Start 16; Stop 40
actatattcagaaaaacttgtcaag

SEQ ID NO: 49357 - DNA, 25 bp, Artificial
  probe
  misc_feature (1)..(25): SEQ ID NO: 4777; WAN024ABN_at; Start 3; Stop 27
acttaagaagtatactatattcaga

SEQ ID NO: 49358 - DNA, 25 bp, Artificial
  probe
  misc_feature (1)..(25): SEQ ID NO: 4777; WAN024ABN_at; Start 15; Stop 39
tactatattcagaaaaacttgtcaa

SEQ ID NO: 49359 - DNA, 25 bp, Artificial
  probe
  misc_feature (1)..(25): SEQ ID NO: 4777; WAN024ABN_at; Start 5; Stop 29
ttaagaagtatactatattcagaaa

SEQ ID NO: 49360 - DNA, 25 bp, Artificial
  probe
  misc_feature (1)..(25): SEQ ID NO: 4777; WAN024ABN_at; Start 11; Stop 35
agtatactatattcagaaaaacttg

SEQ ID NO: 49361 - DNA, 25 bp, Artificial
  probe
  misc_feature (1)..(25): SEQ ID NO: 4777; WAN024ABN_at; Start 4; Stop 28
cttaagaagtatactatattcagaa

SEQ ID NO: 49362 - DNA, 25 bp, Artificial
  probe
  misc_feature (1)..(25): SEQ ID NO: 4777; WAN024ABN_at; Start 17; Stop 41
ctatattcagaaaaacttgtcaagt

SEQ ID NO: 49363 - DNA, 25 bp, Artificial
  probe
  misc_feature (1)..(25): SEQ ID NO: 4777; WAN024ABN_at; Start 8; Stop 32
agaagtatactatattcagaaaaac

SEQ ID NO: 49364 - DNA, 25 bp, Artificial
  probe
  misc_feature (1)..(25): SEQ ID NO: 4777; WAN024ABN_at; Start 1; Stop 25
ttacttaagaagtatactatattca

SEQ ID NO: 49365 - DNA, 25 bp, Artificial
  probe
  misc_feature (1)..(25): SEQ ID NO: 4777; WAN024ABN_at; Start 2; Stop 26
tacttaagaagtatactatattcag

SEQ ID NO: 49366 - DNA, 25 bp, Artificial
  probe
  misc_feature (1)..(25): SEQ ID NO: 4777; WAN024ABN_at; Start 19; Stop 43
atattcagaaaaacttgtcaagttt

SEQ ID NO: 49367 - DNA, 25 bp, Artificial
  probe
  misc_feature (1)..(25): SEQ ID NO: 4777; WAN024ABN_at; Start 12; Stop 36
gtatactatattcagaaaaacttgt

SEQ ID NO: 49368 - DNA, 25 bp, Artificial
  probe
  misc_feature (1)..(25): SEQ ID NO: 214; WAN024ABO_at; Start 66; Stop 90
aagtttttctgaatatagtatactt

SEQ ID NO: 49369 - DNA, 25 bp, Artificial
  probe
  misc_feature (1)..(25): SEQ ID NO: 214; WAN024ABO_at; Start 75; Stop 99
tgaatatagtatacttcttaagtaa

SEQ ID NO: 49370 - DNA, 25 bp, Artificial
  probe
  misc_feature (1)..(25): SEQ ID NO: 214; WAN024ABO_at; Start 58; Stop 82
aacttgacaagtttttctgaatata

SEQ ID NO: 49371 - DNA, 25 bp, Artificial
  probe
  misc_feature (1)..(25): SEQ ID NO: 214; WAN024ABO_at; Start 62; Stop 86
tgacaagtttttctgaatatagtat

SEQ ID NO: 49372 - DNA, 25 bp, Artificial
  probe
  misc_feature (1)..(25): SEQ ID NO: 214; WAN024ABO_at; Start 74; Stop 98
ctgaatatagtatacttcttaagta

SEQ ID NO: 49373 - DNA, 25 bp, Artificial
  probe
  misc_feature (1)..(25): SEQ ID NO: 214; WAN024ABO_at; Start 70; Stop 94
ttttctgaatatagtatacttctta

SEQ ID NO: 49374 - DNA, 25 bp, Artificial
  probe
  misc_feature (1)..(25): SEQ ID NO: 214; WAN024ABO_at; Start 60; Stop 84
cttgacaagtttttctgaatatagt

SEQ ID NO: 49375 - DNA, 25 bp, Artificial
  probe
  misc_feature (1)..(25): SEQ ID NO: 214; WAN024ABO_at; Start 56; Stop 80
gaaacttgacaagtttttctgaata

SEQ ID NO: 49376 - DNA, 25 bp, Artificial
  probe
  misc_feature (1)..(25): SEQ ID NO: 214; WAN024ABO_at; Start 73; Stop 97
tctgaatatagtatacttcttaagt

SEQ ID NO: 49377 - DNA, 25 bp, Artificial
  probe
  misc_feature (1)..(25): SEQ ID NO: 214; WAN024ABO_at; Start 72; Stop 96
ttctgaatatagtatacttcttaag

SEQ ID NO: 49378 - DNA, 25 bp, Artificial
  probe
  misc_feature (1)..(25): SEQ ID NO: 214; WAN024ABO_at; Start 64; Stop 88
acaagtttttctgaatatagtatac

SEQ ID NO: 49379 - DNA, 25 bp, Artificial
  probe
  misc_feature (1)..(25): SEQ ID NO: 214; WAN024ABO_at; Start 61; Stop 85
ttgacaagtttttctgaatatagta

SEQ ID NO: 49380 - DNA, 25 bp, Artificial
  probe
  misc_feature (1)..(25): SEQ ID NO: 214; WAN024ABO_at; Start 65; Stop 89
caagtttttctgaatatagtatact

SEQ ID NO: 49381 - DNA, 25 bp, Artificial
  probe
  misc_feature (1)..(25): SEQ ID NO: 214; WAN024ABO_at; Start 63; Stop 87
gacaagtttttctgaatatagtata

SEQ ID NO: 49382 - DNA, 25 bp, Artificial
  probe
  misc_feature (1)..(25): SEQ ID NO: 214; WAN024ABO_at; Start 59; Stop 83
acttgacaagtttttctgaatatag

SEQ ID NO: 49383 - DNA, 25 bp, Artificial
  probe
  misc_feature (1)..(25): SEQ ID NO: 214; WAN024ABO_at; Start 67; Stop 91
agtttttctgaatatagtatacttc

SEQ ID NO: 49384 - DNA, 25 bp, Artificial
  probe
  misc_feature (1)..(25): SEQ ID NO: 214; WAN024ABO_at; Start 68; Stop 92
gtttttctgaatatagtatacttct

SEQ ID NO: 49385 - DNA, 25 bp, Artificial
  probe
  misc_feature (1)..(25): SEQ ID NO: 214; WAN024ABO_at; Start 57; Stop 81
aaacttgacaagtttttctgaatat

SEQ ID NO: 49386 - DNA, 25 bp, Artificial
  probe
  misc_feature (1)..(25): SEQ ID NO: 214; WAN024ABO_at; Start 71; Stop 95
tttctgaatatagtatacttcttaa

SEQ ID NO: 49387 - DNA, 25 bp, Artificial
  probe
  misc_feature (1)..(25): SEQ ID NO: 214; WAN024ABO_at; Start 69; Stop 93
tttttctgaatatagtatacttctt

SEQ ID NO: 49388 - DNA, 25 bp, Artificial
  probe
  misc_feature (1)..(25): SEQ ID NO: 4817; WAN024ABP_at; Start 14; Stop 38
gtatagcacaatagcctgctttatg

SEQ ID NO: 49389 - DNA, 25 bp, Artificial
  probe
  misc_feature (1)..(25): SEQ ID NO: 4817; WAN024ABP_at; Start 16; Stop 40
atagcacaatagcctgctttatgct

SEQ ID NO: 49390 - DNA, 25 bp, Artificial
  probe
  misc_feature (1)..(25): SEQ ID NO: 4817; WAN024ABP_at; Start 3; Stop 27
caaccttactagtatagcacaatag

SEQ ID NO: 49391 - DNA, 25 bp, Artificial
  probe
  misc_feature (1)..(25): SEQ ID NO: 4817; WAN024ABP_at; Start 19; Stop 43
gcacaatagcctgctttatgctata

SEQ ID NO: 49392 - DNA, 25 bp, Artificial
  probe
  misc_feature (1)..(25): SEQ ID NO: 4817; WAN024ABP_at; Start 23; Stop 47
aatagcctgctttatgctatactta

SEQ ID NO: 49393 - DNA, 25 bp, Artificial
  probe
  misc_feature (1)..(25): SEQ ID NO: 4817; WAN024ABP_at; Start 6; Stop 30
ccttactagtatagcacaatagcct

SEQ ID NO: 49394 - DNA, 25 bp, Artificial
  probe
  misc_feature (1)..(25): SEQ ID NO: 4817; WAN024ABP_at; Start 9; Stop 33
tactagtatagcacaatagcctgct

SEQ ID NO: 49395 - DNA, 25 bp, Artificial
  probe
  misc_feature (1)..(25): SEQ ID NO: 4817; WAN024ABP_at; Start 4; Stop 28
aaccttactagtatagcacaatagc

SEQ ID NO: 49396 - DNA, 25 bp, Artificial
  probe
  misc_feature (1)..(25): SEQ ID NO: 4817; WAN024ABP_at; Start 5; Stop 29
accttactagtatagcacaatagcc

SEQ ID NO: 49397 - DNA, 25 bp, Artificial
  probe
  misc_feature (1)..(25): SEQ ID NO: 4817; WAN024ABP_at; Start 21; Stop 45
acaatagcctgctttatgctatact

SEQ ID NO: 49398 - DNA, 25 bp, Artificial
  probe
  misc_feature (1)..(25): SEQ ID NO: 4817; WAN024ABP_at; Start 12; Stop 36
tagtatagcacaatagcctgcttta

SEQ ID NO: 49399 - DNA, 25 bp, Artificial
  probe
  misc_feature (1)..(25): SEQ ID NO: 4817; WAN024ABP_at; Start 1; Stop 25
ttcaaccttactagtatagcacaat

SEQ ID NO: 49400 - DNA, 25 bp, Artificial
  probe
  misc_feature (1)..(25): SEQ ID NO: 4817; WAN024ABP_at; Start 17; Stop 41
tagcacaatagcctgctttatgcta

SEQ ID NO: 49401 - DNA, 25 bp, Artificial
  probe
  misc_feature (1)..(25): SEQ ID NO: 4817; WAN024ABP_at; Start 13; Stop 37
agtatagcacaatagcctgctttat

SEQ ID NO: 49402 - DNA, 25 bp, Artificial
  probe
  misc_feature (1)..(25): SEQ ID NO: 4817; WAN024ABP_at; Start 22; Stop 46
caatagcctgctttatgctatactt

SEQ ID NO: 49403 - DNA, 25 bp, Artificial
  probe
  misc_feature (1)..(25): SEQ ID NO: 4817; WAN024ABP_at; Start 8; Stop 32
ttactagtatagcacaatagcctgc

SEQ ID NO: 49404 - DNA, 25 bp, Artificial
  probe
  misc_feature (1)..(25): SEQ ID NO: 4817; WAN024ABP_at; Start 7; Stop 31
cttactagtatagcacaatagcctg

SEQ ID NO: 49405 - DNA, 25 bp, Artificial
  probe
  misc_feature (1)..(25): SEQ ID NO: 4817; WAN024ABP_at; Start 11; Stop 35
ctagtatagcacaatagcctgcttt

SEQ ID NO: 49406 - DNA, 25 bp, Artificial
  probe
  misc_feature (1)..(25): SEQ ID NO: 4817; WAN024ABP_at; Start 20; Stop 44
cacaatagcctgctttatgctatac

SEQ ID NO: 49407 - DNA, 25 bp, Artificial
  probe
  misc_feature (1)..(25): SEQ ID NO: 4817; WAN024ABP_at; Start 10; Stop 34
actagtatagcacaatagcctgctt

SEQ ID NO: 49408 - DNA, 25 bp, Artificial
  probe
  misc_feature (1)..(25): SEQ ID NO: 4817; WAN024ABP_at; Start 15; Stop 39
tatagcacaatagcctgctttatgc

SEQ ID NO: 49409 - DNA, 25 bp, Artificial
  probe
  misc_feature (1)..(25): SEQ ID NO: 4817; WAN024ABP_at; Start 18; Stop 42
agcacaatagcctgctttatgctat

SEQ ID NO: 49410 - DNA, 25 bp, Artificial
  probe
  misc_feature (1)..(25): SEQ ID NO: 4817; WAN024ABP_at; Start 2; Stop 26
tcaaccttactagtatagcacaata

SEQ ID NO: 49411 - DNA, 25 bp, Artificial
  probe
  misc_feature (1)..(25): SEQ ID NO: 3716; WAN024ABQ_at; Start 6; Stop 30
aagtatagcataaagcaggctattg

SEQ ID NO: 49412 - DNA, 25 bp, Artificial
  probe
  misc_feature (1)..(25): SEQ ID NO: 3716; WAN024ABQ_at; Start 23; Stop 47
ggctattgtgctatactagtaaggt

SEQ ID NO: 49413 - DNA, 25 bp, Artificial
  probe
  misc_feature (1)..(25): SEQ ID NO: 3716; WAN024ABQ_at; Start 20; Stop 44
gcaggctattgtgctatactagtaa

SEQ ID NO: 49414 - DNA, 25 bp, Artificial
  probe
  misc_feature (1)..(25): SEQ ID NO: 3716; WAN024ABQ_at; Start 10; Stop 34
atagcataaagcaggctattgtgct

SEQ ID NO: 49415 - DNA, 25 bp, Artificial
  probe
  misc_feature (1)..(25): SEQ ID NO: 3716; WAN024ABQ_at; Start 25; Stop 49
ctattgtgctatactagtaaggttg

SEQ ID NO: 49416 - DNA, 25 bp, Artificial
  probe
  misc_feature (1)..(25): SEQ ID NO: 3716; WAN024ABQ_at; Start 14; Stop 38
cataaagcaggctattgtgctatac

SEQ ID NO: 49417 - DNA, 25 bp, Artificial
  probe
  misc_feature (1)..(25): SEQ ID NO: 3716; WAN024ABQ_at; Start 8; Stop 32
gtatagcataaagcaggctattgtg

SEQ ID NO: 49418 - DNA, 25 bp, Artificial
  probe
  misc_feature (1)..(25): SEQ ID NO: 3716; WAN024ABQ_at; Start 11; Stop 35
tagcataaagcaggctattgtgcta

SEQ ID NO: 49419 - DNA, 25 bp, Artificial
  probe
  misc_feature (1)..(25): SEQ ID NO: 3716; WAN024ABQ_at; Start 27; Stop 51
attgtgctatactagtaaggttgaa

SEQ ID NO: 49420 - DNA, 25 bp, Artificial
  probe
  misc_feature (1)..(25): SEQ ID NO: 3716; WAN024ABQ_at; Start 7; Stop 31
agtatagcataaagcaggctattgt

SEQ ID NO: 49421 - DNA, 25 bp, Artificial
  probe
  misc_feature (1)..(25): SEQ ID NO: 3716; WAN024ABQ_at; Start 16; Stop 40
taaagcaggctattgtgctatacta

SEQ ID NO: 49422 - DNA, 25 bp, Artificial
  probe
  misc_feature (1)..(25): SEQ ID NO: 3716; WAN024ABQ_at; Start 19; Stop 43
agcaggctattgtgctatactagta

SEQ ID NO: 49423 - DNA, 25 bp, Artificial
  probe
  misc_feature (1)..(25): SEQ ID NO: 3716; WAN024ABQ_at; Start 15; Stop 39
ataaagcaggctattgtgctatact

SEQ ID NO: 49424 - DNA, 25 bp, Artificial
  probe
  misc_feature (1)..(25): SEQ ID NO: 3716; WAN024ABQ_at; Start 22; Stop 46
aggctattgtgctatactagtaagg

SEQ ID NO: 49425 - DNA, 25 bp, Artificial
  probe
  misc_feature (1)..(25): SEQ ID NO: 3716; WAN024ABQ_at; Start 5; Stop 29
taagtatagcataaagcaggctatt

SEQ ID NO: 49426 - DNA, 25 bp, Artificial
  probe
  misc_feature (1)..(25): SEQ ID NO: 3716; WAN024ABQ_at; Start 24; Stop 48
gctattgtgctatactagtaaggtt

SEQ ID NO: 49427 - DNA, 25 bp, Artificial
  probe
  misc_feature (1)..(25): SEQ ID NO: 3716; WAN024ABQ_at; Start 18; Stop 42
aagcaggctattgtgctatactagt

SEQ ID NO: 49428 - DNA, 25 bp, Artificial
  probe
  misc_feature (1)..(25): SEQ ID NO: 3716; WAN024ABQ_at; Start 21; Stop 45
caggctattgtgctatactagtaag

SEQ ID NO: 49429 - DNA, 25 bp, Artificial
  probe
  misc_feature (1)..(25): SEQ ID NO: 3716; WAN024ABQ_at; Start 9; Stop 33
tatagcataaagcaggctattgtgc

SEQ ID NO: 49430 - DNA, 25 bp, Artificial
  probe
  misc_feature (1)..(25): SEQ ID NO: 3716; WAN024ABQ_at; Start 26; Stop 50
tattgtgctatactagtaaggttga

SEQ ID NO: 49431 - DNA, 25 bp, Artificial
  probe
  misc_feature (1)..(25): SEQ ID NO: 3716; WAN024ABQ_at; Start 17; Stop 41
aaagcaggctattgtgctatactag

SEQ ID NO: 49432 - DNA, 25 bp, Artificial
  probe
  misc_feature (1)..(25): SEQ ID NO: 3716; WAN024ABQ_at; Start 12; Stop 36
agcataaagcaggctattgtgctat

SEQ ID NO: 49433 - DNA, 25 bp, Artificial
  probe
  misc_feature (1)..(25): SEQ ID NO: 3716; WAN024ABQ_at; Start 13; Stop 37
gcataaagcaggctattgtgctata

SEQ ID NO: 49434 - DNA, 25 bp, Artificial
  probe
  misc_feature (1)..(25): SEQ ID NO: 4705; WAN024ABR_at; Start 26; Stop 50
gccttctataatgatttaggataca

SEQ ID NO: 49435 - DNA, 25 bp, Artificial
  probe
  misc_feature (1)..(25): SEQ ID NO: 4705; WAN024ABR_at; Start 37; Stop 61
tgatttaggatacaatgaaacacga

SEQ ID NO: 49436 - DNA, 25 bp, Artificial
  probe
  misc_feature (1)..(25): SEQ ID NO: 4705; WAN024ABR_at; Start 35; Stop 59
aatgatttaggatacaatgaaacac

SEQ ID NO: 49437 - DNA, 25 bp, Artificial
  probe
  misc_feature (1)..(25): SEQ ID NO: 4705; WAN024ABR_at; Start 12; Stop 36
tgagccttttaattgccttctataa

SEQ ID NO: 49438 - DNA, 25 bp, Artificial
  probe
  misc_feature (1)..(25): SEQ ID NO: 4705; WAN024ABR_at; Start 52; Stop 76
tgaaacacgaaacattgaaaggaaa

SEQ ID NO: 49439 - DNA, 25 bp, Artificial
  probe
  misc_feature (1)..(25): SEQ ID NO: 4705; WAN024ABR_at; Start 2; Stop 26
gctccatttatgagccttttaattg

SEQ ID NO: 49440 - DNA, 25 bp, Artificial
  probe
  misc_feature (1)..(25): SEQ ID NO: 4705; WAN024ABR_at; Start 16; Stop 40
ccttttaattgccttctataatgat

SEQ ID NO: 49441 - DNA, 25 bp, Artificial
  probe
  misc_feature (1)..(25): SEQ ID NO: 4705; WAN024ABR_at; Start 49; Stop 73
caatgaaacacgaaacattgaaagg

SEQ ID NO: 49442 - DNA, 25 bp, Artificial
  probe
  misc_feature (1)..(25): SEQ ID NO: 4705; WAN024ABR_at; Start 25; Stop 49
tgccttctataatgatttaggatac

SEQ ID NO: 49443 - DNA, 25 bp, Artificial
  probe
  misc_feature (1)..(25): SEQ ID NO: 4705; WAN024ABR_at; Start 6; Stop 30
catttatgagccttttaattgcctt

SEQ ID NO: 49444 - DNA, 25 bp, Artificial
  probe
  misc_feature (1)..(25): SEQ ID NO: 4705; WAN024ABR_at; Start 57; Stop 81
cacgaaacattgaaaggaaaacagt

SEQ ID NO: 49445 - DNA, 25 bp, Artificial
  probe
  misc_feature (1)..(25): SEQ ID NO: 4705; WAN024ABR_at; Start 14; Stop 38
agccttttaattgccttctataatg

SEQ ID NO: 49446 - DNA, 25 bp, Artificial
  probe
  misc_feature (1)..(25): SEQ ID NO: 4705; WAN024ABR_at; Start 5; Stop 29
ccatttatgagccttttaattgcct

SEQ ID NO: 49447 - DNA, 25 bp, Artificial
  probe
  misc_feature (1)..(25): SEQ ID NO: 4705; WAN024ABR_at; Start 9; Stop 33
ttatgagccttttaattgccttcta

SEQ ID NO: 49448 - DNA, 25 bp, Artificial
  probe
  misc_feature (1)..(25): SEQ ID NO: 4705; WAN024ABR_at; Start 34; Stop 58
taatgatttaggatacaatgaaaca

SEQ ID NO: 49449 - DNA, 25 bp, Artificial
  probe
  misc_feature (1)..(25): SEQ ID NO: 4705; WAN024ABR_at; Start 45; Stop 69
gatacaatgaaacacgaaacattga

SEQ ID NO: 49450 - DNA, 25 bp, Artificial
  probe
  misc_feature (1)..(25): SEQ ID NO: 4705; WAN024ABR_at; Start 38; Stop 62
gatttaggatacaatgaaacacgaa
